United States Patent Application Publication US 2014/0004565 A1 - sequence listing, part 17

SEQ ID NO: 301718 - RNA, 19 nt, Artificial Sequence
  Description of Artificial Sequence: Synthetic oligonucleotide
aucgucgaaguaccuugug

SEQ ID NO: 301719 - RNA, 19 nt, Artificial Sequence
  Description of Artificial Sequence: Synthetic oligonucleotide
ucucaggccccagucaagu

SEQ ID NO: 301720 - RNA, 19 nt, Artificial Sequence
  Description of Artificial Sequence: Synthetic oligonucleotide
auaguccgcauccacucuu

SEQ ID NO: 301721 - RNA, 19 nt, Artificial Sequence
  Description of Artificial Sequence: Synthetic oligonucleotide
uuucucccgcacgaggaug

SEQ ID NO: 301722 - RNA, 19 nt, Artificial Sequence
  Description of Artificial Sequence: Synthetic oligonucleotide
aguacucuggggugccgca

SEQ ID NO: 301723 - RNA, 19 nt, Artificial Sequence
  Description of Artificial Sequence: Synthetic oligonucleotide
gaugcccucuuuacacaag

SEQ ID NO: 301724 - RNA, 19 nt, Artificial Sequence
  Description of Artificial Sequence: Synthetic oligonucleotide
cuccauuacgaagcacagg

SEQ ID NO: 301725 - RNA, 19 nt, Artificial Sequence
  Description of Artificial Sequence: Synthetic oligonucleotide
ugaucgacugggcggugaa

SEQ ID NO: 301726 - RNA, 19 nt, Artificial Sequence
  Description of Artificial Sequence: Synthetic oligonucleotide
uggcguacuccauuacgaa

SEQ ID NO: 301727 - RNA, 19 nt, Artificial Sequence
  Description of Artificial Sequence: Synthetic oligonucleotide
ccaguugaugcugaggaag

SEQ ID NO: 301728 - RNA, 19 nt, Artificial Sequence
  Description of Artificial Sequence: Synthetic oligonucleotide
cacuuauacucuaaggcau

SEQ ID NO: 301729 - RNA, 19 nt, Artificial Sequence
  Description of Artificial Sequence: Synthetic oligonucleotide
ggcgcuguugcguuucugc

SEQ ID NO: 301730 - RNA, 19 nt, Artificial Sequence
  Description of Artificial Sequence: Synthetic oligonucleotide
ugucacgguacaccacguc

SEQ ID NO: 301731 - RNA, 19 nt, Artificial Sequence
  Description of Artificial Sequence: Synthetic oligonucleotide
cacucucggaugcuggcug

SEQ ID NO: 301732 - RNA, 19 nt, Artificial Sequence
  Description of Artificial Sequence: Synthetic oligonucleotide
uuuucaugguggccccguc

SEQ ID NO: 301733 - RNA, 19 nt, Artificial Sequence
  Description of Artificial Sequence: Synthetic oligonucleotide
caucuggauaguccgcauc

SEQ ID NO: 301734 - RNA, 19 nt, Artificial Sequence
  Description of Artificial Sequence: Synthetic oligonucleotide
auaagguuuuccagcuuga

SEQ ID NO: 301735 - RNA, 19 nt, Artificial Sequence
  Description of Artificial Sequence: Synthetic oligonucleotide
gucccucgagugcaaauac

SEQ ID NO: 301736 - RNA, 19 nt, Artificial Sequence
  Description of Artificial Sequence: Synthetic oligonucleotide
guaucuagucugaggggug

SEQ ID NO: 301737 - RNA, 19 nt, Artificial Sequence
  Description of Artificial Sequence: Synthetic oligonucleotide
ccaaaaggcaaaauaaggu

SEQ ID NO: 301738 - RNA, 19 nt, Artificial Sequence
  Description of Artificial Sequence: Synthetic oligonucleotide
ucucagugaccgugugggc

SEQ ID NO: 301739 - RNA, 19 nt, Artificial Sequence
  Description of Artificial Sequence: Synthetic oligonucleotide
ggcggugaacucaucgucg

SEQ ID NO: 301740 - RNA, 19 nt, Artificial Sequence
  Description of Artificial Sequence: Synthetic oligonucleotide
uguugcguuucugccccag

SEQ ID NO: 301741 - RNA, 19 nt, Artificial Sequence
  Description of Artificial Sequence: Synthetic oligonucleotide
gugggagagaacucucaga

SEQ ID NO: 301742 - RNA, 19 nt, Artificial Sequence
  Description of Artificial Sequence: Synthetic oligonucleotide
uaagguuuuccagcuugau

SEQ ID NO: 301743 - RNA, 19 nt, Artificial Sequence
  Description of Artificial Sequence: Synthetic oligonucleotide
cugugcuacugcacacagc

SEQ ID NO: 301744 - RNA, 19 nt, Artificial Sequence
  Description of Artificial Sequence: Synthetic oligonucleotide
ggucacuuuggcccgugcc

SEQ ID NO: 301745 - RNA, 19 nt, Artificial Sequence
  Description of Artificial Sequence: Synthetic oligonucleotide
uaguccgcauccacucuuc

SEQ ID NO: 301746 - RNA, 19 nt, Artificial Sequence
  Description of Artificial Sequence: Synthetic oligonucleotide
gaccgugugggcgacuuca

SEQ ID NO: 301747 - RNA, 19 nt, Artificial Sequence
  Description of Artificial Sequence: Synthetic oligonucleotide
aacacuccggcugggguuu

SEQ ID NO: 301748 - RNA, 19 nt, Artificial Sequence
  Description of Artificial Sequence: Synthetic oligonucleotide
acucgcacucacacauucg

SEQ ID NO: 301749 - RNA, 19 nt, Artificial Sequence
  Description of Artificial Sequence: Synthetic oligonucleotide
cucaagcccaggugacccc

SEQ ID NO: 301750 - RNA, 19 nt, Artificial Sequence
  Description of Artificial Sequence: Synthetic oligonucleotide
gcccugguaaggcacgagg

SEQ ID NO: 301751 - RNA, 19 nt, Artificial Sequence
  Description of Artificial Sequence: Synthetic oligonucleotide
ccucgagugcaaauacucc

SEQ ID NO: 301752 - RNA, 19 nt, Artificial Sequence
  Description of Artificial Sequence: Synthetic oligonucleotide
ggaguuugagauaaucgaa

SEQ ID NO: 301753 - RNA, 19 nt, Artificial Sequence
  Description of Artificial Sequence: Synthetic oligonucleotide
ugcucacucucggaugcug

SEQ ID NO: 301754 - RNA, 19 nt, Artificial Sequence
  Description of Artificial Sequence: Synthetic oligonucleotide
ccauuacgaagcacaggcg

SEQ ID NO: 301755 - RNA, 19 nt, Artificial Sequence
  Description of Artificial Sequence: Synthetic oligonucleotide
acgaucuccgcaccauaaa

SEQ ID NO: 301756 - RNA, 19 nt, Artificial Sequence
  Description of Artificial Sequence: Synthetic oligonucleotide
gguggucauuuauagccuc

SEQ ID NO: 301757 - RNA, 19 nt, Artificial Sequence
  Description of Artificial Sequence: Synthetic oligonucleotide
cacggacagacucgcacuc

SEQ ID NO: 301758 - RNA, 19 nt, Artificial Sequence
  Description of Artificial Sequence: Synthetic oligonucleotide
cccucgagugcaaauacuc

SEQ ID NO: 301759 - RNA, 19 nt, Artificial Sequence
  Description of Artificial Sequence: Synthetic oligonucleotide
caccacgucccucgagugc

SEQ ID NO: 301760 - RNA, 19 nt, Artificial Sequence
  Description of Artificial Sequence: Synthetic oligonucleotide
augcucaccgcuagagcag

SEQ ID NO: 301761 - RNA, 19 nt, Artificial Sequence
  Description of Artificial Sequence: Synthetic oligonucleotide
acuuauacucuaaggcauu

SEQ ID NO: 301762 - RNA, 19 nt, Artificial Sequence
  Description of Artificial Sequence: Synthetic oligonucleotide
gaccaucuggauaguccgc

SEQ ID NO: 301763 - RNA, 19 nt, Artificial Sequence
  Description of Artificial Sequence: Synthetic oligonucleotide
cucucaggccccagucaag

SEQ ID NO: 301764 - RNA, 19 nt, Artificial Sequence
  Description of Artificial Sequence: Synthetic oligonucleotide
gaagugaccugagguuuga

SEQ ID NO: 301765 - RNA, 19 nt, Artificial Sequence
  Description of Artificial Sequence: Synthetic oligonucleotide
gggcccaauacugucucgg

SEQ ID NO: 301766 - RNA, 19 nt, Artificial Sequence
  Description of Artificial Sequence: Synthetic oligonucleotide
ggauggggcaacauggcca

SEQ ID NO: 301767 - RNA, 19 nt, Artificial Sequence
  Description of Artificial Sequence: Synthetic oligonucleotide
cgucgaaguaccuuguguc

SEQ ID NO: 301768 - RNA, 19 nt, Artificial Sequence
  Description of Artificial Sequence: Synthetic oligonucleotide
gcgaccaucuggauagucc

SEQ ID NO: 301769 - RNA, 19 nt, Artificial Sequence
  Description of Artificial Sequence: Synthetic oligonucleotide
ugcccaccccacccuacug

SEQ ID NO: 301770 - RNA, 19 nt, Artificial Sequence
  Description of Artificial Sequence: Synthetic oligonucleotide
cacugaugcccucuuuaca

SEQ ID NO: 301771 - RNA, 19 nt, Artificial Sequence
  Description of Artificial Sequence: Synthetic oligonucleotide
gacagacagcccaguaaca

SEQ ID NO: 301772 - RNA, 19 nt, Artificial Sequence
  Description of Artificial Sequence: Synthetic oligonucleotide
gauaguccgcauccacucu

SEQ ID NO: 301773 - RNA, 19 nt, Artificial Sequence
  Description of Artificial Sequence: Synthetic oligonucleotide
ggccccgucacugaugccc

SEQ ID NO: 301774 - RNA, 19 nt, Artificial Sequence
  Description of Artificial Sequence: Synthetic oligonucleotide
cacguccguagucauuguc

SEQ ID NO: 301775 - RNA, 19 nt, Artificial Sequence
  Description of Artificial Sequence: Synthetic oligonucleotide
accucgggugccaaguacu

SEQ ID NO: 301776 - RNA, 19 nt, Artificial Sequence
  Description of Artificial Sequence: Synthetic oligonucleotide
gaucuccgcaccauaaaau

SEQ ID NO: 301777 - RNA, 19 nt, Artificial Sequence
  Description of Artificial Sequence: Synthetic oligonucleotide
uauuggggauggggcaaca

SEQ ID NO: 301778 - RNA, 19 nt, Artificial Sequence
  Description of Artificial Sequence: Synthetic oligonucleotide
gaggcugguggucauuuau

SEQ ID NO: 301779 - RNA, 19 nt, Artificial Sequence
  Description of Artificial Sequence: Synthetic oligonucleotide
cacuucggaagugaccuga

SEQ ID NO: 301780 - RNA, 19 nt, Artificial Sequence
  Description of Artificial Sequence: Synthetic oligonucleotide
agcgagcccaggcugucau

SEQ ID NO: 301781 - RNA, 19 nt, Artificial Sequence
  Description of Artificial Sequence: Synthetic oligonucleotide
ugugggcgacuucauccuu

SEQ ID NO: 301782 - RNA, 19 nt, Artificial Sequence
  Description of Artificial Sequence: Synthetic oligonucleotide
cgaaggugcccuuaccaag

SEQ ID NO: 301783 - RNA, 19 nt, Artificial Sequence
  Description of Artificial Sequence: Synthetic oligonucleotide
gagcccaggcugucauagc

SEQ ID NO: 301784 - RNA, 19 nt, Artificial Sequence
  Description of Artificial Sequence: Synthetic oligonucleotide
gugggcgacuucauccuug

SEQ ID NO: 301785 - RNA, 19 nt, Artificial Sequence
  Description of Artificial Sequence: Synthetic oligonucleotide
cugaaggcgccugcauccc

SEQ ID NO: 301786 - RNA, 19 nt, Artificial Sequence
  Description of Artificial Sequence: Synthetic oligonucleotide
ugaagggugguaggagcuu

SEQ ID NO: 301787 - RNA, 19 nt, Artificial Sequence
  Description of Artificial Sequence: Synthetic oligonucleotide
cuugggcacuuucccagca

SEQ ID NO: 301788 - RNA, 19 nt, Artificial Sequence
  Description of Artificial Sequence: Synthetic oligonucleotide
cgguacaccacgucccucg

SEQ ID NO: 301789 - RNA, 19 nt, Artificial Sequence
  Description of Artificial Sequence: Synthetic oligonucleotide
gguccucucgaugaccgug

SEQ ID NO: 301790 - RNA, 19 nt, Artificial Sequence
  Description of Artificial Sequence: Synthetic oligonucleotide
gucuacauggaagguccuc

SEQ ID NO: 301791 - RNA, 19 nt, Artificial Sequence
  Description of Artificial Sequence: Synthetic oligonucleotide
uguugaccgccaccuccau

SEQ ID NO: 301792 - RNA, 19 nt, Artificial Sequence
  Description of Artificial Sequence: Synthetic oligonucleotide
gugagauguguaacagcca

SEQ ID NO: 301793 - RNA, 19 nt, Artificial Sequence
  Description of Artificial Sequence: Synthetic oligonucleotide
cccucuuuacacaagccaa

SEQ ID NO: 301794 - RNA, 19 nt, Artificial Sequence
  Description of Artificial Sequence: Synthetic oligonucleotide
accauaaaaucgggcccga

SEQ ID NO: 301795 - RNA, 19 nt, Artificial Sequence
  Description of Artificial Sequence: Synthetic oligonucleotide
guugaccgccaccuccauc

SEQ ID NO: 301796 - RNA, 19 nt, Artificial Sequence
  Description of Artificial Sequence: Synthetic oligonucleotide
cagagauauuggggauggg

SEQ ID NO: 301797 - RNA, 19 nt, Artificial Sequence
  Description of Artificial Sequence: Synthetic oligonucleotide
ccaauacugucucggugug

SEQ ID NO: 301798 - RNA, 19 nt, Artificial Sequence
  Description of Artificial Sequence: Synthetic oligonucleotide
gagccacacuuauacucua

SEQ ID NO: 301799 - RNA, 19 nt, Artificial Sequence
  Description of Artificial Sequence: Synthetic oligonucleotide
acgguacaccacgucccuc

SEQ ID NO: 301800 - RNA, 19 nt, Artificial Sequence
  Description of Artificial Sequence: Synthetic oligonucleotide
acgucccucgagugcaaau

SEQ ID NO: 301801 - RNA, 19 nt, Artificial Sequence
  Description of Artificial Sequence: Synthetic oligonucleotide
gggcggugaacucaucguc

SEQ ID NO: 301802 - RNA, 19 nt, Artificial Sequence
  Description of Artificial Sequence: Synthetic oligonucleotide
caaacacuccggcuggggu

SEQ ID NO: 301803 - RNA, 19 nt, Artificial Sequence
  Description of Artificial Sequence: Synthetic oligonucleotide
gaucgacugggcggugaac

SEQ ID NO: 301804 - RNA, 19 nt, Artificial Sequence
  Description of Artificial Sequence: Synthetic oligonucleotide
uggaccggcugcacuccau

SEQ ID NO: 301805 - RNA, 19 nt, Artificial Sequence
  Description of Artificial Sequence: Synthetic oligonucleotide
auucgccuuaaggcuccag

SEQ ID NO: 301806 - RNA, 19 nt, Artificial Sequence
  Description of Artificial Sequence: Synthetic oligonucleotide
gacucgcucccgagacagg

SEQ ID NO: 301807 - RNA, 19 nt, Artificial Sequence
  Description of Artificial Sequence: Synthetic oligonucleotide
ggugugauugugaucgacu

SEQ ID NO: 301808 - RNA, 19 nt, Artificial Sequence
  Description of Artificial Sequence: Synthetic oligonucleotide
ugugaucgacugggcggug

SEQ ID NO: 301809 - RNA, 19 nt, Artificial Sequence
  Description of Artificial Sequence: Synthetic oligonucleotide
cccaauacugucucggugu

SEQ ID NO: 301810 - RNA, 19 nt, Artificial Sequence
  Description of Artificial Sequence: Synthetic oligonucleotide
guccguagucauuguccuc

SEQ ID NO: 301811 - RNA, 19 nt, Artificial Sequence
  Description of Artificial Sequence: Synthetic oligonucleotide
gaccugagguuugaagggu

SEQ ID NO: 301812 - RNA, 19 nt, Artificial Sequence
  Description of Artificial Sequence: Synthetic oligonucleotide
ggaagggaacacaaaccaa

SEQ ID NO: 301813 - RNA, 19 nt, Artificial Sequence
  Description of Artificial Sequence: Synthetic oligonucleotide
ugaccgugugggcgacuuc

SEQ ID NO: 301814 - RNA, 19 nt, Artificial Sequence
  Description of Artificial Sequence: Synthetic oligonucleotide
acggacagacucgcacuca

SEQ ID NO: 301815 - RNA, 19 nt, Artificial Sequence
  Description of Artificial Sequence: Synthetic oligonucleotide
ggagccugagaugcucacc

SEQ ID NO: 301816 - RNA, 19 nt, Artificial Sequence
  Description of Artificial Sequence: Synthetic oligonucleotide
ccgcaccauaaaaucgggc

SEQ ID NO: 301817 - RNA, 19 nt, Artificial Sequence
  Description of Artificial Sequence: Synthetic oligonucleotide
ggucauuuauagccucucu

SEQ ID NO: 301818 - RNA, 19 nt, Artificial Sequence
  Description of Artificial Sequence: Synthetic oligonucleotide
ggcccaucgggaggcaagg

SEQ ID NO: 301819 - RNA, 19 nt, Artificial Sequence
  Description of Artificial Sequence: Synthetic oligonucleotide
augucacgguacaccacgu

SEQ ID NO: 301820 - RNA, 19 nt, Artificial Sequence
  Description of Artificial Sequence: Synthetic oligonucleotide
cccagcaugcaucugggaa

SEQ ID NO: 301821 - RNA, 19 nt, Artificial Sequence
  Description of Artificial Sequence: Synthetic oligonucleotide
ugggcgcuguugcguuucu

SEQ ID NO: 301822 - RNA, 19 nt, Artificial Sequence
  Description of Artificial Sequence: Synthetic oligonucleotide
ccaguccacugcacguccg

SEQ ID NO: 301823 - RNA, 19 nt, Artificial Sequence
  Description of Artificial Sequence: Synthetic oligonucleotide
aucgggcccgauccuccgu

SEQ ID NO: 301824 - RNA, 19 nt, Artificial Sequence
  Description of Artificial Sequence: Synthetic oligonucleotide
gcaugcaucugggaauaga

SEQ ID NO: 301825 - RNA, 19 nt, Artificial Sequence
  Description of Artificial Sequence: Synthetic oligonucleotide
gcccaguaacagcauagaa

SEQ ID NO: 301826 - RNA, 19 nt, Artificial Sequence
  Description of Artificial Sequence: Synthetic oligonucleotide
aggcugguggucauuuaua

SEQ ID NO: 301827 - RNA, 19 nt, Artificial Sequence
  Description of Artificial Sequence: Synthetic oligonucleotide
acucaucgucgaaguaccu

SEQ ID NO: 301828 - RNA, 19 nt, Artificial Sequence
  Description of Artificial Sequence: Synthetic oligonucleotide
agccacacuuauacucuaa

SEQ ID NO: 301829 - RNA, 19 nt, Artificial Sequence
  Description of Artificial Sequence: Synthetic oligonucleotide
gugaucgacugggcgguga

SEQ ID NO: 301830 - RNA, 19 nt, Artificial Sequence
  Description of Artificial Sequence: Synthetic oligonucleotide
caucgucgaaguaccuugu

SEQ ID NO: 301831 - RNA, 19 nt, Artificial Sequence
  Description of Artificial Sequence: Synthetic oligonucleotide
ccuuaccaaggaguuugag

SEQ ID NO: 301832 - RNA, 19 nt, Artificial Sequence
  Description of Artificial Sequence: Synthetic oligonucleotide
gggugguaggagcuuucuc

SEQ ID NO: 301833 - RNA, 19 nt, Artificial Sequence
  Description of Artificial Sequence: Synthetic oligonucleotide
gaccccguggcucccacuu

SEQ ID NO: 301834 - RNA, 19 nt, Artificial Sequence
  Description of Artificial Sequence: Synthetic oligonucleotide
cuagucugagggguggggu

SEQ ID NO: 301835 - RNA, 19 nt, Artificial Sequence
  Description of Artificial Sequence: Synthetic oligonucleotide
gggaccaaacacuccggcu

SEQ ID NO: 301836 - RNA, 19 nt, Artificial Sequence
  Description of Artificial Sequence: Synthetic oligonucleotide
cacucacacauucgccuua

SEQ ID NO: 301837 - RNA, 19 nt, Artificial Sequence
  Description of Artificial Sequence: Synthetic oligonucleotide
gguggaccggcugcacucc

SEQ ID NO: 301838 - RNA, 19 nt, Artificial Sequence
  Description of Artificial Sequence: Synthetic oligonucleotide
gguacaccacgucccucga

SEQ ID NO: 301839 - RNA, 19 nt, Artificial Sequence
  Description of Artificial Sequence: Synthetic oligonucleotide
ggcugucauagcgguccgg

SEQ ID NO: 301840 - RNA, 19 nt, Artificial Sequence
  Description of Artificial Sequence: Synthetic oligonucleotide
cacuccggcugggguuucg

SEQ ID NO: 301841 - RNA, 19 nt, Artificial Sequence
  Description of Artificial Sequence: Synthetic oligonucleotide
ccguacaaauaugacaagu

SEQ ID NO: 301842 - RNA, 19 nt, Artificial Sequence
  Description of Artificial Sequence: Synthetic oligonucleotide
gcacggacagacucgcacu

SEQ ID NO: 301843 - RNA, 19 nt, Artificial Sequence
  Description of Artificial Sequence: Synthetic oligonucleotide
ccgaaggugcccuuaccaa

SEQ ID NO: 301844 - RNA, 19 nt, Artificial Sequence
  Description of Artificial Sequence: Synthetic oligonucleotide
cuggcccucaagcccaggu

SEQ ID NO: 301845 - RNA, 19 nt, Artificial Sequence
  Description of Artificial Sequence: Synthetic oligonucleotide
guggaccggcugcacucca

SEQ ID NO: 301846 - RNA, 19 nt, Artificial Sequence
  Description of Artificial Sequence: Synthetic oligonucleotide
gacugggcggugaacucau

SEQ ID NO: 301847 - RNA, 19 nt, Artificial Sequence
  Description of Artificial Sequence: Synthetic oligonucleotide
ccgcacgaggaugacuuug

SEQ ID NO: 301848 - RNA, 19 nt, Artificial Sequence
  Description of Artificial Sequence: Synthetic oligonucleotide
cacgguacaccacgucccu

SEQ ID NO: 301849 - RNA, 19 nt, Artificial Sequence
  Description of Artificial Sequence: Synthetic oligonucleotide
ccggcugcacuccauggga

SEQ ID NO: 301850 - RNA, 19 nt, Artificial Sequence
  Description of Artificial Sequence: Synthetic oligonucleotide
gcacgaggcugugggcagg

SEQ ID NO: 301851 - RNA, 19 nt, Artificial Sequence
  Description of Artificial Sequence: Synthetic oligonucleotide
agugaccgugugggcgacu

SEQ ID NO: 301852 - RNA, 19 nt, Artificial Sequence
  Description of Artificial Sequence: Synthetic oligonucleotide
gcucaccgcuagagcaggg

SEQ ID NO: 301853 - RNA, 19 nt, Artificial Sequence
  Description of Artificial Sequence: Synthetic oligonucleotide
ccacuucggaagugaccug

SEQ ID NO: 301854 - RNA, 19 nt, Artificial Sequence
  Description of Artificial Sequence: Synthetic oligonucleotide
ccgugaagacucgcucccg

SEQ ID NO: 301855 - RNA, 19 nt, Artificial Sequence
  Description of Artificial Sequence: Synthetic oligonucleotide
ccgagacagguggaagaac

SEQ ID NO: 301856 - RNA, 19 nt, Artificial Sequence
  Description of Artificial Sequence: Synthetic oligonucleotide
ggguggcagguuucaucca

SEQ ID NO: 301857 - RNA, 19 nt, Artificial Sequence
  Description of Artificial Sequence: Synthetic oligonucleotide
gggcgacuucauccuuggc

SEQ ID NO: 301858 - RNA, 19 nt, Artificial Sequence
  Description of Artificial Sequence: Synthetic oligonucleotide
cucaccgcuagagcagggu

SEQ ID NO: 301859 - RNA, 19 nt, Artificial Sequence
  Description of Artificial Sequence: Synthetic oligonucleotide
accgugugggcgacuucau

SEQ ID NO: 301860 - RNA, 19 nt, Artificial Sequence
  Description of Artificial Sequence: Synthetic oligonucleotide
ggcccaauacugucucggu

SEQ ID NO: 301861 - RNA, 19 nt, Artificial Sequence
  Description of Artificial Sequence: Synthetic oligonucleotide
ccucucgaugaccgugguc

SEQ ID NO: 301862 - RNA, 19 nt, Artificial Sequence
  Description of Artificial Sequence: Synthetic oligonucleotide
cagcacggacagacucgca

SEQ ID NO: 301863 - RNA, 19 nt, Artificial Sequence
  Description of Artificial Sequence: Synthetic oligonucleotide
ggaagaaccugugcuccau

SEQ ID NO: 301864 - RNA, 19 nt, Artificial Sequence
  Description of Artificial Sequence: Synthetic oligonucleotide
ggggugugauugugaucga

SEQ ID NO: 301865 - RNA, 19 nt, Artificial Sequence
  Description of Artificial Sequence: Synthetic oligonucleotide
ggucugaaaugagugucuu

SEQ ID NO: 301866 - RNA, 19 nt, Artificial Sequence
  Description of Artificial Sequence: Synthetic oligonucleotide
ccuccggcccaagcguccg

SEQ ID NO: 301867 - RNA, 19 nt, Artificial Sequence
  Description of Artificial Sequence: Synthetic oligonucleotide
ccgugugggcgacuucauc

SEQ ID NO: 301868 - RNA, 19 nt, Artificial Sequence
  Description of Artificial Sequence: Synthetic oligonucleotide
gugaccgugugggcgacuu

SEQ ID NO: 301869 - RNA, 19 nt, Artificial Sequence
  Description of Artificial Sequence: Synthetic oligonucleotide
ccguuggcguacuccauua

SEQ ID NO: 301870 - RNA, 19 nt, Artificial Sequence
  Description of Artificial Sequence: Synthetic oligonucleotide
cccuuaccaaggaguuuga

SEQ ID NO: 301871 - RNA, 19 nt, Artificial Sequence
  Description of Artificial Sequence: Synthetic oligonucleotide
cccaucgggaggcaaggcu

SEQ ID NO: 301872 - RNA, 19 nt, Artificial Sequence
  Description of Artificial Sequence: Synthetic oligonucleotide
gccuccggcccaagcgucc

SEQ ID NO: 301873 - RNA, 19 nt, Artificial Sequence
  Description of Artificial Sequence: Synthetic oligonucleotide
cguccguagucauuguccu

SEQ ID NO: 301874 - RNA, 19 nt, Artificial Sequence
  Description of Artificial Sequence: Synthetic oligonucleotide
cauucgccuuaaggcucca

SEQ ID NO: 301875 - RNA, 19 nt, Artificial Sequence
  Description of Artificial Sequence: Synthetic oligonucleotide
gggcgcuguugcguuucug

SEQ ID NO: 301876 - RNA, 19 nt, Artificial Sequence
  Description of Artificial Sequence: Synthetic oligonucleotide
gggcccgauccuccgugaa

SEQ ID NO: 301877 - RNA, 19 nt, Artificial Sequence
  Description of Artificial Sequence: Synthetic oligonucleotide
ggugaccccguggcuccca

SEQ ID NO: 301878 - RNA, 19 nt, Artificial Sequence
  Description of Artificial Sequence: Synthetic oligonucleotide
cucccgcacgaggaugacu

SEQ ID NO: 301879 - RNA, 19 nt, Artificial Sequence
  Description of Artificial Sequence: Synthetic oligonucleotide
cgucccucgagugcaaaua

SEQ ID NO: 301880 - RNA, 19 nt, Artificial Sequence
  Description of Artificial Sequence: Synthetic oligonucleotide
gcggcuccugggucuggaa

SEQ ID NO: 301881 - RNA, 19 nt, Artificial Sequence
  Description of Artificial Sequence: Synthetic oligonucleotide
ccaucuggauaguccgcau

SEQ ID NO: 301882 - RNA, 19 nt, Artificial Sequence
  Description of Artificial Sequence: Synthetic oligonucleotide
gcacguccguagucauugu

SEQ ID NO: 301883 - RNA, 19 nt, Artificial Sequence
  Description of Artificial Sequence: Synthetic oligonucleotide
gcgagcccaggcugucaua

SEQ ID NO: 301884 - RNA, 19 nt, Artificial Sequence
  Description of Artificial Sequence: Synthetic oligonucleotide
ccgauccuccgugaagacu

SEQ ID NO: 301885 - RNA, 19 nt, Artificial Sequence
  Description of Artificial Sequence: Synthetic oligonucleotide
ccuccgccgagccucugcu

SEQ ID NO: 301886 - RNA, 19 nt, Artificial Sequence
  Description of Artificial Sequence: Synthetic oligonucleotide
ccgccccugggcgcuguug

SEQ ID NO: 301887 - RNA, 19 nt, Artificial Sequence
  Description of Artificial Sequence: Synthetic oligonucleotide
ccacgucccucgagugcaa

SEQ ID NO: 301888 - RNA, 19 nt, Artificial Sequence
  Description of Artificial Sequence: Synthetic oligonucleotide
ccauaaaaucgggcccgau

SEQ ID NO: 301889 - RNA, 19 nt, Artificial Sequence
  Description of Artificial Sequence: Synthetic oligonucleotide
gcccauccuugggcacuuu

SEQ ID NO: 301890 - RNA, 19 nt, Artificial Sequence
  Description of Artificial Sequence: Synthetic oligonucleotide
uuauaauuugucauggugg

SEQ ID NO: 301891 - RNA, 19 nt, Artificial Sequence
  Description of Artificial Sequence: Synthetic oligonucleotide
agauacaagacucaucuac

SEQ ID NO: 301892 - RNA, 19 nt, Artificial Sequence
  Description of Artificial Sequence: Synthetic oligonucleotide
accaccuauaauuagauag

SEQ ID NO: 301893 - RNA, 19 nt, Artificial Sequence
  Description of Artificial Sequence: Synthetic oligonucleotide
acaaguauggauuucguag

SEQ ID NO: 301894 - RNA, 19 nt, Artificial Sequence
  Description of Artificial Sequence: Synthetic oligonucleotide
ucauuagauaugaaggagg

SEQ ID NO: 301895 - RNA, 19 nt, Artificial Sequence
  Description of Artificial Sequence: Synthetic oligonucleotide
ucucuuaugaucauaauau

SEQ ID NO: 301896 - RNA, 19 nt, Artificial Sequence
  Description of Artificial Sequence: Synthetic oligonucleotide
uuuuguuugaaccugcaga

SEQ ID NO: 301897 - RNA, 19 nt, Artificial Sequence
  Description of Artificial Sequence: Synthetic oligonucleotide
uguuuuagacaccugauga

SEQ ID NO: 301898 - RNA, 19 nt, Artificial Sequence
  Description of Artificial Sequence: Synthetic oligonucleotide
uuagauaguucucugagcu

SEQ ID NO: 301899 - RNA, 19 nt, Artificial Sequence
  Description of Artificial Sequence: Synthetic oligonucleotide
uuuucguucaccucgaugu

SEQ ID NO: 301900 - RNA, 19 nt, Artificial Sequence
  Description of Artificial Sequence: Synthetic oligonucleotide
agugauaacucgugcaucc

SEQ ID NO: 301901 - RNA, 19 nt, Artificial Sequence
  Description of Artificial Sequence: Synthetic oligonucleotide
auuucucaaaccaauauac

SEQ ID NO: 301902 - RNA, 19 nt, Artificial Sequence
  Description of Artificial Sequence: Synthetic oligonucleotide
aacauuaguacaucuucag

SEQ ID NO: 301903 - RNA, 19 nt, Artificial Sequence
  Description of Artificial Sequence: Synthetic oligonucleotide
uguuucuugauaaaucugu

SEQ ID NO: 301904 - RNA, 19 nt, Artificial Sequence
  Description of Artificial Sequence: Synthetic oligonucleotide
auguggaucaucuauagcu

SEQ ID NO: 301905 - RNA, 19 nt, Artificial Sequence
  Description of Artificial Sequence: Synthetic oligonucleotide
uuccauuacuucuacaucc

SEQ ID NO: 301906 - RNA, 19 nt, Artificial Sequence
  Description of Artificial Sequence: Synthetic oligonucleotide
uguacuuauaauuugucau

SEQ ID NO: 301907 - RNA, 19 nt, Artificial Sequence
  Description of Artificial Sequence: Synthetic oligonucleotide
ucugauaacaaguauggau

SEQ ID NO: 301908 - RNA, 19 nt, Artificial Sequence
  Description of Artificial Sequence: Synthetic oligonucleotide
uucuugauaaaucuguguc

SEQ ID NO: 301909 - RNA, 19 nt, Artificial Sequence
  Description of Artificial Sequence: Synthetic oligonucleotide
auguguaucauucagcuau

SEQ ID NO: 301910 - RNA, 19 nt, Artificial Sequence
  Description of Artificial Sequence: Synthetic oligonucleotide
auaacaaguauggauuucg

SEQ ID NO: 301911 - RNA, 19 nt, Artificial Sequence
  Description of Artificial Sequence: Synthetic oligonucleotide
uauaauuugucaugguggu

SEQ ID NO: 301912 - RNA, 19 nt, Artificial Sequence
  Description of Artificial Sequence: Synthetic oligonucleotide
uccucugauaacaaguaug

SEQ ID NO: 301913 - RNA, 19 nt, Artificial Sequence
  Description of Artificial Sequence: Synthetic oligonucleotide
auuugaacgccuucucagc

SEQ ID NO: 301914 - RNA, 19 nt, Artificial Sequence
  Description of Artificial Sequence: Synthetic oligonucleotide
ugaaaccucaagaauuuca

SEQ ID NO: 301915 - RNA, 19 nt, Artificial Sequence
  Description of Artificial Sequence: Synthetic oligonucleotide
aaccucaagaauuucaaua

SEQ ID NO: 301916 - RNA, 19 nt, Artificial Sequence
  Description of Artificial Sequence: Synthetic oligonucleotide
aucaucuauagcuaagucu

SEQ ID NO: 301917 - RNA, 19 nt, Artificial Sequence
  Description of Artificial Sequence: Synthetic oligonucleotide
gaaugcaugaaacuauuca

SEQ ID NO: 301918 - RNA, 19 nt, Artificial Sequence
  Description of Artificial Sequence: Synthetic oligonucleotide
ucuuaugaucauaauauuu

SEQ ID NO: 301919 - RNA, 19 nt, Artificial Sequence
  Description of Artificial Sequence: Synthetic oligonucleotide
aaugucuucggcucuguga

SEQ ID NO: 301920 - RNA, 19 nt, Artificial Sequence
  Description of Artificial Sequence: Synthetic oligonucleotide
uuucguagcagcauuguaa

SEQ ID NO: 301921 - RNA, 19 nt, Artificial Sequence
  Description of Artificial Sequence: Synthetic oligonucleotide
agauguguaucauucagcu

SEQ ID NO: 301922 - RNA, 19 nt, Artificial Sequence
  Description of Artificial Sequence: Synthetic oligonucleotide
acauuguaaauguugagaa

SEQ ID NO: 301923 - RNA, 19 nt, Artificial Sequence
  Description of Artificial Sequence: Synthetic oligonucleotide
ugguauaaggagcacauau

SEQ ID NO: 301924 - RNA, 19 nt, Artificial Sequence
  Description of Artificial Sequence: Synthetic oligonucleotide
uucacaaucacgccaauuu

SEQ ID NO: 301925 - RNA, 19 nt, Artificial Sequence
  Description of Artificial Sequence: Synthetic oligonucleotide
augcagaacaauuacagau

SEQ ID NO: 301926 - RNA, 19 nt, Artificial Sequence
  Description of Artificial Sequence: Synthetic oligonucleotide
cauuaguacaucuucagga

SEQ ID NO: 301927 - RNA, 19 nt, Artificial Sequence
  Description of Artificial Sequence: Synthetic oligonucleotide
uuuucugucugauuugaac

SEQ ID NO: 301928 - RNA, 19 nt, Artificial Sequence
  Description of Artificial Sequence: Synthetic oligonucleotide
uucuggauuauauaacccu

SEQ ID NO: 301929 - RNA, 19 nt, Artificial Sequence
  Description of Artificial Sequence: Synthetic oligonucleotide
auaauuagauaguucucug

SEQ ID NO: 301930 - RNA, 19 nt, Artificial Sequence
  Description of Artificial Sequence: Synthetic oligonucleotide
aacuauucaaggcuguuuu

SEQ ID NO: 301931 - RNA, 19 nt, Artificial Sequence
  Description of Artificial Sequence: Synthetic oligonucleotide
gaauagcaaacauuaguac

SEQ ID NO: 301932 - RNA, 19 nt, Artificial Sequence
  Description of Artificial Sequence: Synthetic oligonucleotide
gaugaaauuccucauacgu

SEQ ID NO: 301933 - RNA, 19 nt, Artificial Sequence
  Description of Artificial Sequence: Synthetic oligonucleotide
uucuuucacaaucacgcca

SEQ ID NO: 301934 - RNA, 19 nt, Artificial Sequence
  Description of Artificial Sequence: Synthetic oligonucleotide
ucacuuuguacuuauaauu

SEQ ID NO: 301935 - RNA, 19 nt, Artificial Sequence
  Description of Artificial Sequence: Synthetic oligonucleotide
auuaggugcggacacuuuc

SEQ ID NO: 301936 - RNA, 19 nt, Artificial Sequence
  Description of Artificial Sequence: Synthetic oligonucleotide
ucuuaaucacacaacuggu

SEQ ID NO: 301937 - RNA, 19 nt, Artificial Sequence
  Description of Artificial Sequence: Synthetic oligonucleotide
ucuguugcugaucucgacc

SEQ ID NO: 301938 - RNA, 19 nt, Artificial Sequence
  Description of Artificial Sequence: Synthetic oligonucleotide
uuguacuuauaauuuguca

SEQ ID NO: 301939 - RNA, 19 nt, Artificial Sequence
  Description of Artificial Sequence: Synthetic oligonucleotide
auagcuaagucuuguaagu

SEQ ID NO: 301940 - RNA, 19 nt, Artificial Sequence
  Description of Artificial Sequence: Synthetic oligonucleotide
caaguauggauuucguagc

SEQ ID NO: 301941 - RNA, 19 nt, Artificial Sequence
  Description of Artificial Sequence: Synthetic oligonucleotide
caugaguucacuugugcag

SEQ ID NO: 301942 - RNA, 19 nt, Artificial Sequence
  Description of Artificial Sequence: Synthetic oligonucleotide
ucauggugguauaaggagc

SEQ ID NO: 301943 - RNA, 19 nt, Artificial Sequence
  Description of Artificial Sequence: Synthetic oligonucleotide
ugucauggugguauaagga

SEQ ID NO: 301944 - RNA, 19 nt, Artificial Sequence
  Description of Artificial Sequence: Synthetic oligonucleotide
aggaguaaguuucacuuug

SEQ ID NO: 301945 - RNA, 19 nt, Artificial Sequence
  Description of Artificial Sequence: Synthetic oligonucleotide
gauacaagacucaucuacc

SEQ ID NO: 301946 - RNA, 19 nt, Artificial Sequence
  Description of Artificial Sequence: Synthetic oligonucleotide
uuaguacaucuucaggaug

SEQ ID NO: 301947 - RNA, 19 nt, Artificial Sequence
  Description of Artificial Sequence: Synthetic oligonucleotide
gucauggugguauaaggag

SEQ ID NO: 301948 - RNA, 19 nt, Artificial Sequence
  Description of Artificial Sequence: Synthetic oligonucleotide
auucuauauauggacauug

SEQ ID NO: 301949 - RNA, 19 nt, Artificial Sequence
  Description of Artificial Sequence: Synthetic oligonucleotide
gauucuuaaucacacaacu

SEQ ID NO: 301950 - RNA, 19 nt, Artificial Sequence
  Description of Artificial Sequence: Synthetic oligonucleotide
ucacacaacugguagcucc

SEQ ID NO: 301951 - RNA, 19 nt, Artificial Sequence
  Description of Artificial Sequence: Synthetic oligonucleotide
acuagugauaacucgugca

SEQ ID NO: 301952 - RNA, 19 nt, Artificial Sequence
  Description of Artificial Sequence: Synthetic oligonucleotide
accggcuucuaguuguucc

SEQ ID NO: 301953 - RNA, 19 nt, Artificial Sequence
  Description of Artificial Sequence: Synthetic oligonucleotide
caaguaucuuuucacaaug

SEQ ID NO: 301954 - RNA, 19 nt, Artificial Sequence
  Description of Artificial Sequence: Synthetic oligonucleotide
auuauauaacccuuuccau

SEQ ID NO: 301955 - RNA, 19 nt, Artificial Sequence
  Description of Artificial Sequence: Synthetic oligonucleotide
ucuauauauggacauugua

SEQ ID NO: 301956 - RNA, 19 nt, Artificial Sequence
  Description of Artificial Sequence: Synthetic oligonucleotide
gaagauuaggugcggacac

SEQ ID NO: 301957 - RNA, 19 nt, Artificial Sequence
  Description of Artificial Sequence: Synthetic oligonucleotide
ugugcacagaauuuucucu

SEQ ID NO: 301958 - RNA, 19 nt, Artificial Sequence
  Description of Artificial Sequence: Synthetic oligonucleotide
aacucgugcaucccaagca

SEQ ID NO: 301959 - RNA, 19 nt, Artificial Sequence
  Description of Artificial Sequence: Synthetic oligonucleotide
aucauuagauaugaaggag

SEQ ID NO: 301960 - RNA, 19 nt, Artificial Sequence
  Description of Artificial Sequence: Synthetic oligonucleotide
acuucggacuaccugaaug

SEQ ID NO: 301961 - RNA, 19 nt, Artificial Sequence
  Description of Artificial Sequence: Synthetic oligonucleotide
acaacugguagcuccauga

SEQ ID NO: 301962 - RNA, 19 nt, Artificial Sequence
  Description of Artificial Sequence: Synthetic oligonucleotide
uauggauuucguagcagca

SEQ ID NO: 301963 - RNA, 19 nt, Artificial Sequence
  Description of Artificial Sequence: Synthetic oligonucleotide
uuugaacgccuucucagca

SEQ ID NO: 301964 - RNA, 19 nt, Artificial Sequence
  Description of Artificial Sequence: Synthetic oligonucleotide
agcuaaaucccaucauuag

SEQ ID NO: 301965 - RNA, 19 nt, Artificial Sequence
  Description of Artificial Sequence: Synthetic oligonucleotide
guauggauuucguagcagc

SEQ ID NO: 301966 - RNA, 19 nt, Artificial Sequence
  Description of Artificial Sequence: Synthetic oligonucleotide
uuggcuaaugcacuucgga

SEQ ID NO: 301967 - RNA, 19 nt, Artificial Sequence
  Description of Artificial Sequence: Synthetic oligonucleotide
ucgaccaccuauaauuaga

SEQ ID NO: 301968 - RNA, 19 nt, Artificial Sequence
  Description of Artificial Sequence: Synthetic oligonucleotide
ucagucaaaguccguggag

SEQ ID NO: 301969 - RNA, 19 nt, Artificial Sequence
  Description of Artificial Sequence: Synthetic oligonucleotide
cagcauaucucuuaugauc

SEQ ID NO: 301970 - RNA, 19 nt, Artificial Sequence
  Description of Artificial Sequence: Synthetic oligonucleotide
aucucuuaugaucauaaua

SEQ ID NO: 301971 - RNA, 19 nt, Artificial Sequence
  Description of Artificial Sequence: Synthetic oligonucleotide
aaguauggauuucguagca

SEQ ID NO: 301972 - RNA, 19 nt, Artificial Sequence
  Description of Artificial Sequence: Synthetic oligonucleotide
ucauaauaagcugacgauc

SEQ ID NO: 301973 - RNA, 19 nt, Artificial Sequence
  Description of Artificial Sequence: Synthetic oligonucleotide
gaugguacacccaccaagc

SEQ ID NO: 301974 - RNA, 19 nt, Artificial Sequence
  Description of Artificial Sequence: Synthetic oligonucleotide
uacuucuacauccccugag

SEQ ID NO: 301975 - RNA, 19 nt, Artificial Sequence
  Description of Artificial Sequence: Synthetic oligonucleotide
uagcagcauuguaacaugg

SEQ ID NO: 301976 - RNA, 19 nt, Artificial Sequence
  Description of Artificial Sequence: Synthetic oligonucleotide
acgugaguaugucuucagc

SEQ ID NO: 301977 - RNA, 19 nt, Artificial Sequence
  Description of Artificial Sequence: Synthetic oligonucleotide
ucuacauccccugagucac

SEQ ID NO: 301978 - RNA, 19 nt, Artificial Sequence
  Description of Artificial Sequence: Synthetic oligonucleotide
aaauuccucauacgugagu

SEQ ID NO: 301979 - RNA, 19 nt, Artificial Sequence
  Description of Artificial Sequence: Synthetic oligonucleotide
uucuauauauggacauugu

SEQ ID NO: 301980 - RNA, 19 nt, Artificial Sequence
  Description of Artificial Sequence: Synthetic oligonucleotide
uaucugguuggcuaaugca

SEQ ID NO: 301981 - RNA, 19 nt, Artificial Sequence
  Description of Artificial Sequence: Synthetic oligonucleotide
aggugggacaagucaaugg

SEQ ID NO: 301982 - RNA, 19 nt, Artificial Sequence
  Description of Artificial Sequence: Synthetic oligonucleotide
cucaugauccuuucgaaca

SEQ ID NO: 301983 - RNA, 19 nt, Artificial Sequence
  Description of Artificial Sequence: Synthetic oligonucleotide
aucugguuggcuaaugcac

SEQ ID NO: 301984 - RNA, 19 nt, Artificial Sequence
  Description of Artificial Sequence: Synthetic oligonucleotide
aauuccucauacgugagua

SEQ ID NO: 301985 - RNA, 19 nt, Artificial Sequence
  Description of Artificial Sequence: Synthetic oligonucleotide
cucaucaacgggcucuucg

SEQ ID NO: 301986 - RNA, 19 nt, Artificial Sequence
  Description of Artificial Sequence: Synthetic oligonucleotide
ugauaacucgugcauccca

SEQ ID NO: 301987 - RNA, 19 nt, Artificial Sequence
  Description of Artificial Sequence: Synthetic oligonucleotide
uuaggugcggacacuuuca

SEQ ID NO: 301988 - RNA, 19 nt, Artificial Sequence
  Description of Artificial Sequence: Synthetic oligonucleotide
ugagcuaaugaaccacaga

SEQ ID NO: 301989 - RNA, 19 nt, Artificial Sequence
  Description of Artificial Sequence: Synthetic oligonucleotide
caucauuagauaugaagga

SEQ ID NO: 301990 - RNA, 19 nt, Artificial Sequence
  Description of Artificial Sequence: Synthetic oligonucleotide
ugauuuacugucacuugaa

SEQ ID NO: 301991 - RNA, 19 nt, Artificial Sequence
  Description of Artificial Sequence: Synthetic oligonucleotide
aggaagcuaaaucccauca

SEQ ID NO: 301992 - RNA, 19 nt, Artificial Sequence
  Description of Artificial Sequence: Synthetic oligonucleotide
aacaaguauggauuucgua

SEQ ID NO: 301993 - RNA, 19 nt, Artificial Sequence
  Description of Artificial Sequence: Synthetic oligonucleotide
agcauaucucuuaugauca

SEQ ID NO: 301994 - RNA, 19 nt, Artificial Sequence
  Description of Artificial Sequence: Synthetic oligonucleotide
gagauccacaucgacaagc

SEQ ID NO: 301995 - RNA, 19 nt, Artificial Sequence
  Description of Artificial Sequence: Synthetic oligonucleotide
ucaggauaauccagggugu

SEQ ID NO: 301996 - RNA, 19 nt, Artificial Sequence
  Description of Artificial Sequence: Synthetic oligonucleotide
cagauguguaucauucagc

SEQ ID NO: 301997 - RNA, 19 nt, Artificial Sequence
  Description of Artificial Sequence: Synthetic oligonucleotide
uaacucgugcaucccaagc

SEQ ID NO: 301998 - RNA, 19 nt, Artificial Sequence
  Description of Artificial Sequence: Synthetic oligonucleotide
ucucaugauccuuucgaac

SEQ ID NO: 301999 - RNA, 19 nt, Artificial Sequence
  Description of Artificial Sequence: Synthetic oligonucleotide
ucauuaaaugaaaccucaa

SEQ ID NO: 302000 - RNA, 19 nt, Artificial Sequence
  Description of Artificial Sequence: Synthetic oligonucleotide
ucacacugcggaauaaguc

SEQ ID NO: 302001 - RNA, 19 nt, Artificial Sequence
  Description of Artificial Sequence: Synthetic oligonucleotide
uguagcaaagugccauugu

SEQ ID NO: 302002 - RNA, 19 nt, Artificial Sequence
  Description of Artificial Sequence: Synthetic oligonucleotide
uagaagucacuguuuguac

SEQ ID NO: 302003 - RNA, 19 nt, Artificial Sequence
  Description of Artificial Sequence: Synthetic oligonucleotide
uggugucaggauaauccag

SEQ ID NO: 302004 - RNA, 19 nt, Artificial Sequence
  Description of Artificial Sequence: Synthetic oligonucleotide
uucuacuucuacaggaguu

SEQ ID NO: 302005 - RNA, 19 nt, Artificial Sequence
  Description of Artificial Sequence: Synthetic oligonucleotide
caugaaacuauucaaggcu

SEQ ID NO: 302006 - RNA, 19 nt, Artificial Sequence
  Description of Artificial Sequence: Synthetic oligonucleotide
ugguacacccaccaagcac

SEQ ID NO: 302007 - RNA, 19 nt, Artificial Sequence
  Description of Artificial Sequence: Synthetic oligonucleotide
ccucuuaucaugaagcuuc

SEQ ID NO: 302008 - RNA, 19 nt, Artificial Sequence
  Description of Artificial Sequence: Synthetic oligonucleotide
cucaacacuggcaucacca

SEQ ID NO: 302009 - RNA, 19 nt, Artificial Sequence
  Description of Artificial Sequence: Synthetic oligonucleotide
uguaggcuucugcagcugc

SEQ ID NO: 302010 - RNA, 19 nt, Artificial Sequence
  Description of Artificial Sequence: Synthetic oligonucleotide
ucaggaguucuacuucuac

SEQ ID NO: 302011 - RNA, 19 nt, Artificial Sequence
  Description of Artificial Sequence: Synthetic oligonucleotide
augcaugaaacuauucaag

SEQ ID NO: 302012 - RNA, 19 nt, Artificial Sequence
  Description of Artificial Sequence: Synthetic oligonucleotide
guaagcuucagugugcaca

SEQ ID NO: 302013 - RNA, 19 nt, Artificial Sequence
  Description of Artificial Sequence: Synthetic oligonucleotide
ugcucugacuuuucguuca

SEQ ID NO: 302014 - RNA, 19 nt, Artificial Sequence
  Description of Artificial Sequence: Synthetic oligonucleotide
uaacaaguauggauuucgu

SEQ ID NO: 302015 - RNA, 19 nt, Artificial Sequence
  Description of Artificial Sequence: Synthetic oligonucleotide
uggcuaaugcacuucggac

SEQ ID NO: 302016 - RNA, 19 nt, Artificial Sequence
  Description of Artificial Sequence: Synthetic oligonucleotide
gugauuuacugucacuuga

SEQ ID NO: 302017 - RNA, 19 nt, Artificial Sequence
  Description of Artificial Sequence: Synthetic oligonucleotide
uauaacccuuuccauggaa

SEQ ID NO: 302018 - RNA, 19 nt, Artificial Sequence
  Description of Artificial Sequence: Synthetic oligonucleotide
uccucauacgugaguaugu

SEQ ID NO: 302019 - RNA, 19 nt, Artificial Sequence
  Description of Artificial Sequence: Synthetic oligonucleotide
uaauaagcugacgaucuuc

SEQ ID NO: 302020 - RNA, 19 nt, Artificial Sequence
  Description of Artificial Sequence: Synthetic oligonucleotide
cuucuuucacaaucacgcc

SEQ ID NO: 302021 - RNA, 19 nt, Artificial Sequence
  Description of Artificial Sequence: Synthetic oligonucleotide
uuucgaacauuaucuaauu

SEQ ID NO: 302022 - RNA, 19 nt, Artificial Sequence
  Description of Artificial Sequence: Synthetic oligonucleotide
agauaguucucugagcuaa

SEQ ID NO: 302023 - RNA, 19 nt, Artificial Sequence
  Description of Artificial Sequence: Synthetic oligonucleotide
ucaucaacgggcucuucgu

SEQ ID NO: 302024 - RNA, 19 nt, Artificial Sequence
  Description of Artificial Sequence: Synthetic oligonucleotide
ucggcucugugauuuacug

SEQ ID NO: 302025 - RNA, 19 nt, Artificial Sequence
  Description of Artificial Sequence: Synthetic oligonucleotide
accuauaauuagauaguuc

SEQ ID NO: 302026 - RNA, 19 nt, Artificial Sequence
  Description of Artificial Sequence: Synthetic oligonucleotide
uuccucauacgugaguaug

SEQ ID NO: 302027 - RNA, 19 nt, Artificial Sequence
  Description of Artificial Sequence: Synthetic oligonucleotide
uucugguaagcuucagugu

SEQ ID NO: 302028 - RNA, 19 nt, Artificial Sequence
  Description of Artificial Sequence: Synthetic oligonucleotide
uuccauggaaguuggcugu

SEQ ID NO: 302029 - RNA, 19 nt, Artificial Sequence
  Description of Artificial Sequence: Synthetic oligonucleotide
gcaugaaacuauucaaggc

SEQ ID NO: 302030 - RNA, 19 nt, Artificial Sequence
  Description of Artificial Sequence: Synthetic oligonucleotide
uuguaagucaugaguuaaa

SEQ ID NO: 302031 - RNA, 19 nt, Artificial Sequence
  Description of Artificial Sequence: Synthetic oligonucleotide
ucgugcaucccaagcagca

SEQ ID NO: 302032 - RNA, 19 nt, Artificial Sequence
  Description of Artificial Sequence: Synthetic oligonucleotide
aauucuauauauggacauu

SEQ ID NO: 302033 - RNA, 19 nt, Artificial Sequence
  Description of Artificial Sequence: Synthetic oligonucleotide
ucugugauuuacugucacu

SEQ ID NO: 302034 - RNA, 19 nt, Artificial Sequence
  Description of Artificial Sequence: Synthetic oligonucleotide
ucugucugauuugaacgcc

SEQ ID NO: 302035 - RNA, 19 nt, Artificial Sequence
  Description of Artificial Sequence: Synthetic oligonucleotide
aaaguccguggagggaugg

SEQ ID NO: 302036 - RNA, 19 nt, Artificial Sequence
  Description of Artificial Sequence: Synthetic oligonucleotide
auaucucuuaugaucauaa

SEQ ID NO: 302037 - RNA, 19 nt, Artificial Sequence
  Description of Artificial Sequence: Synthetic oligonucleotide
cuaaaucccaucauuagau

SEQ ID NO: 302038 - RNA, 19 nt, Artificial Sequence
  Description of Artificial Sequence: Synthetic oligonucleotide
uacgugaguaugucuucag

SEQ ID NO: 302039 - RNA, 19 nt, Artificial Sequence
  Description of Artificial Sequence: Synthetic oligonucleotide
uguaacuucuuuggauucu

SEQ ID NO: 302040 - RNA, 19 nt, Artificial Sequence
  Description of Artificial Sequence: Synthetic oligonucleotide
cauugugccugccucaguc

SEQ ID NO: 302041 - RNA, 19 nt, Artificial Sequence
  Description of Artificial Sequence: Synthetic oligonucleotide
uucucaugauccuuucgaa

SEQ ID NO: 302042 - RNA, 19 nt, Artificial Sequence
  Description of Artificial Sequence: Synthetic oligonucleotide
gguuggcuaaugcacuucg

SEQ ID NO: 302043 - RNA, 19 nt, Artificial Sequence
  Description of Artificial Sequence: Synthetic oligonucleotide
uucgaacauuaucuaauuu

SEQ ID NO: 302044 - RNA, 19 nt, Artificial Sequence
  Description of Artificial Sequence: Synthetic oligonucleotide
cuauuagcucuccuuucag

SEQ ID NO: 302045 - RNA, 19 nt, Artificial Sequence
  Description of Artificial Sequence: Synthetic oligonucleotide
aucaacgggcucuucgucu

SEQ ID NO: 302046 - RNA, 19 nt, Artificial Sequence
  Description of Artificial Sequence: Synthetic oligonucleotide
cauauuggaauagcaaaca

SEQ ID NO: 302047 - RNA, 19 nt, Artificial Sequence
  Description of Artificial Sequence: Synthetic oligonucleotide
cugagcuaaugaaccacag

SEQ ID NO: 302048 - RNA, 19 nt, Artificial Sequence
  Description of Artificial Sequence: Synthetic oligonucleotide
cuuuucguucaccucgaug

SEQ ID NO: 302049 - RNA, 19 nt, Artificial Sequence
  Description of Artificial Sequence: Synthetic oligonucleotide
aaacuauucaaggcuguuu

SEQ ID NO: 302050 - RNA, 19 nt, Artificial Sequence
  Description of Artificial Sequence: Synthetic oligonucleotide
uccuguugucaaauauucu

SEQ ID NO: 302051 - RNA, 19 nt, Artificial Sequence
  Description of Artificial Sequence: Synthetic oligonucleotide
cacuagugauaacucgugc

SEQ ID NO: 302052 - RNA, 19 nt, Artificial Sequence
  Description of Artificial Sequence: Synthetic oligonucleotide
cugccucagucaaaguccg

SEQ ID NO: 302053 - RNA, 19 nt, Artificial Sequence
  Description of Artificial Sequence: Synthetic oligonucleotide
acaucgacaagcagugguc

SEQ ID NO: 302054 - RNA, 19 nt, Artificial Sequence
  Description of Artificial Sequence: Synthetic oligonucleotide
ucggacuaccugaauggcu

SEQ ID NO: 302055 - RNA, 19 nt, Artificial Sequence
  Description of Artificial Sequence: Synthetic oligonucleotide
cagaucgugcucuuccuug

SEQ ID NO: 302056 - RNA, 19 nt, Artificial Sequence
  Description of Artificial Sequence: Synthetic oligonucleotide
cccugagucacuuggaagc

SEQ ID NO: 302057 - RNA, 19 nt, Artificial Sequence
  Description of Artificial Sequence: Synthetic oligonucleotide
uaaugcacuucggacuacc

SEQ ID NO: 302058 - RNA, 19 nt, Artificial Sequence
  Description of Artificial Sequence: Synthetic oligonucleotide
uacuucuacaggaguucca

SEQ ID NO: 302059 - RNA, 19 nt, Artificial Sequence
  Description of Artificial Sequence: Synthetic oligonucleotide
aguauggauuucguagcag

SEQ ID NO: 302060 - RNA, 19 nt, Artificial Sequence
  Description of Artificial Sequence: Synthetic oligonucleotide
ucucgaccaccuauaauua

SEQ ID NO: 302061 - RNA, 19 nt, Artificial Sequence
  Description of Artificial Sequence: Synthetic oligonucleotide
agcacuagugauaacucgu

SEQ ID NO: 302062 - RNA, 19 nt, Artificial Sequence
  Description of Artificial Sequence: Synthetic oligonucleotide
acaaucacgccaauuucug

SEQ ID NO: 302063 - RNA, 19 nt, Artificial Sequence
  Description of Artificial Sequence: Synthetic oligonucleotide
ggauggguucuccuguugg

SEQ ID NO: 302064 - RNA, 19 nt, Artificial Sequence
  Description of Artificial Sequence: Synthetic oligonucleotide
ucgacaagcaguggucuug

SEQ ID NO: 302065 - RNA, 19 nt, Artificial Sequence
  Description of Artificial Sequence: Synthetic oligonucleotide
cuauagcuaagucuuguaa

SEQ ID NO: 302066 - RNA, 19 nt, Artificial Sequence
  Description of Artificial Sequence: Synthetic oligonucleotide
agucaugaguuaaaacgug

SEQ ID NO: 302067 - RNA, 19 nt, Artificial Sequence
  Description of Artificial Sequence: Synthetic oligonucleotide
agcacauauuggaauagca

SEQ ID NO: 302068 - RNA, 19 nt, Artificial Sequence
  Description of Artificial Sequence: Synthetic oligonucleotide
aucuauagcuaagucuugu

SEQ ID NO: 302069 - RNA, 19 nt, Artificial Sequence
  Description of Artificial Sequence: Synthetic oligonucleotide
ugcaucuaggcuugguuuu

SEQ ID NO: 302070 - RNA, 19 nt, Artificial Sequence
  Description of Artificial Sequence: Synthetic oligonucleotide
cucgaccaccuauaauuag

SEQ ID NO: 302071 - RNA, 19 nt, Artificial Sequence
  Description of Artificial Sequence: Synthetic oligonucleotide
cuuucgaacauuaucuaau

SEQ ID NO: 302072 - RNA, 19 nt, Artificial Sequence
  Description of Artificial Sequence: Synthetic oligonucleotide
cuacuucuacaggaguucc

SEQ ID NO: 302073 - RNA, 19 nt, Artificial Sequence
  Description of Artificial Sequence: Synthetic oligonucleotide
agucacuguuuguacuucu

SEQ ID NO: 302074 - RNA, 19 nt, Artificial Sequence
  Description of Artificial Sequence: Synthetic oligonucleotide
gcuaaaucccaucauuaga

SEQ ID NO: 302075 - RNA, 19 nt, Artificial Sequence
  Description of Artificial Sequence: Synthetic oligonucleotide
cagguucaucucuauuagc

SEQ ID NO: 302076 - RNA, 19 nt, Artificial Sequence
  Description of Artificial Sequence: Synthetic oligonucleotide
ugcccugucaaagaaucaa

SEQ ID NO: 302077 - RNA, 19 nt, Artificial Sequence
  Description of Artificial Sequence: Synthetic oligonucleotide
ugaguucacuugugcagcu

SEQ ID NO: 302078 - RNA, 19 nt, Artificial Sequence
  Description of Artificial Sequence: Synthetic oligonucleotide
gagcacauauuggaauagc

SEQ ID NO: 302079 - RNA, 19 nt, Artificial Sequence
  Description of Artificial Sequence: Synthetic oligonucleotide
auguuucuugauaaaucug

SEQ ID NO: 302080 - RNA, 19 nt, Artificial Sequence
  Description of Artificial Sequence: Synthetic oligonucleotide
ugccaggaauguuucuuga

SEQ ID NO: 302081 - RNA, 19 nt, Artificial Sequence
  Description of Artificial Sequence: Synthetic oligonucleotide
cauggaaguuggcuguuuc

SEQ ID NO: 302082 - RNA, 19 nt, Artificial Sequence
  Description of Artificial Sequence: Synthetic oligonucleotide
uuuuaagguuugcuucguu

SEQ ID NO: 302083 - RNA, 19 nt, Artificial Sequence
  Description of Artificial Sequence: Synthetic oligonucleotide
ucgaugucuccagauacaa

SEQ ID NO: 302084 - RNA, 19 nt, Artificial Sequence
  Description of Artificial Sequence: Synthetic oligonucleotide
uucggcucugugauuuacu

SEQ ID NO: 302085 - RNA, 19 nt, Artificial Sequence
  Description of Artificial Sequence: Synthetic oligonucleotide
uuucguucaccucgauguc

SEQ ID NO: 302086 - RNA, 19 nt, Artificial Sequence
  Description of Artificial Sequence: Synthetic oligonucleotide
uaucucuuaugaucauaau

SEQ ID NO: 302087 - RNA, 19 nt, Artificial Sequence
  Description of Artificial Sequence: Synthetic oligonucleotide
agaucgugcucuuccuugu

SEQ ID NO: 302088 - RNA, 19 nt, Artificial Sequence
  Description of Artificial Sequence: Synthetic oligonucleotide
ugucaccggcuucuaguug

SEQ ID NO: 302089 - RNA, 19 nt, Artificial Sequence
  Description of Artificial Sequence: Synthetic oligonucleotide
caucuauagcuaagucuug

SEQ ID NO: 302090 - RNA, 19 nt, Artificial Sequence
  Description of Artificial Sequence: Synthetic oligonucleotide
aagauuaggugcggacacu

SEQ ID NO: 302091 - RNA, 19 nt, Artificial Sequence
  Description of Artificial Sequence: Synthetic oligonucleotide
cacacugcggaauaagucu

SEQ ID NO: 302092 - RNA, 19 nt, Artificial Sequence
  Description of Artificial Sequence: Synthetic oligonucleotide
cucugagcuaaugaaccac

SEQ ID NO: 302093 - RNA, 19 nt, Artificial Sequence
  Description of Artificial Sequence: Synthetic oligonucleotide
uguguaucauucagcuauu

SEQ ID NO: 302094 - RNA, 19 nt, Artificial Sequence
  Description of Artificial Sequence: Synthetic oligonucleotide
caccugaugaugguacacc

SEQ ID NO: 302095 - RNA, 19 nt, Artificial Sequence
  Description of Artificial Sequence: Synthetic oligonucleotide
uucggacuaccugaauggc

SEQ ID NO: 302096 - RNA, 19 nt, Artificial Sequence
  Description of Artificial Sequence: Synthetic oligonucleotide
auuucguagcagcauugua

SEQ ID NO: 302097 - RNA, 19 nt, Artificial Sequence
  Description of Artificial Sequence: Synthetic oligonucleotide
ugguaagcuucagugugca

SEQ ID NO: 302098 - RNA, 19 nt, Artificial Sequence
  Description of Artificial Sequence: Synthetic oligonucleotide
auaauaagcugacgaucuu

SEQ ID NO: 302099 - RNA, 19 nt, Artificial Sequence
  Description of Artificial Sequence: Synthetic oligonucleotide
auauaacccuuuccaugga

SEQ ID NO: 302100 - RNA, 19 nt, Artificial Sequence
  Description of Artificial Sequence: Synthetic oligonucleotide
gaaccugcagaugccagca

SEQ ID NO: 302101 - RNA, 19 nt, Artificial Sequence
  Description of Artificial Sequence: Synthetic oligonucleotide
uagcuaagucuuguaaguc

SEQ ID NO: 302102 - RNA, 19 nt, Artificial Sequence
  Description of Artificial Sequence: Synthetic oligonucleotide
cucgugcaucccaagcagc

SEQ ID NO: 302103 - RNA, 19 nt, Artificial Sequence
  Description of Artificial Sequence: Synthetic oligonucleotide
acuugcaacagggucuccu

SEQ ID NO: 302104 - RNA, 19 nt, Artificial Sequence
  Description of Artificial Sequence: Synthetic oligonucleotide
uaggugcggacacuuucac

SEQ ID NO: 302105 - RNA, 19 nt, Artificial Sequence
  Description of Artificial Sequence: Synthetic oligonucleotide
ugccagcaauuucauaaua

SEQ ID NO: 302106 - RNA, 19 nt, Artificial Sequence
  Description of Artificial Sequence: Synthetic oligonucleotide
ugucugauuugaacgccuu

SEQ ID NO: 302107 - RNA, 19 nt, Artificial Sequence
  Description of Artificial Sequence: Synthetic oligonucleotide
guuggcuaaugcacuucgg

SEQ ID NO: 302108 - RNA, 19 nt, Artificial Sequence
  Description of Artificial Sequence: Synthetic oligonucleotide
auacgugaguaugucuuca

SEQ ID NO: 302109 - RNA, 19 nt, Artificial Sequence
  Description of Artificial Sequence: Synthetic oligonucleotide
aaugcacuucggacuaccu

SEQ ID NO: 302110 - RNA, 19 nt, Artificial Sequence
  Description of Artificial Sequence: Synthetic oligonucleotide
ucguagcagcauuguaaca

SEQ ID NO: 302111 - RNA, 19 nt, Artificial Sequence
  Description of Artificial Sequence: Synthetic oligonucleotide
gauguguaucauucagcua

SEQ ID NO: 302112 - RNA, 19 nt, Artificial Sequence
  Description of Artificial Sequence: Synthetic oligonucleotide
augguacacccaccaagca

SEQ ID NO: 302113 - RNA, 19 nt, Artificial Sequence
  Description of Artificial Sequence: Synthetic oligonucleotide
gaccuucuaucuuggaaua

SEQ ID NO: 302114 - RNA, 19 nt, Artificial Sequence
  Description of Artificial Sequence: Synthetic oligonucleotide
ucaacgggcucuucgucuu

SEQ ID NO: 302115 - RNA, 19 nt, Artificial Sequence
  Description of Artificial Sequence: Synthetic oligonucleotide
auuccucauacgugaguau

SEQ ID NO: 302116 - RNA, 19 nt, Artificial Sequence
  Description of Artificial Sequence: Synthetic oligonucleotide
caagcagcacuguagcaaa

SEQ ID NO: 302117 - RNA, 19 nt, Artificial Sequence
  Description of Artificial Sequence: Synthetic oligonucleotide
gugccugccucagucaaag

SEQ ID NO: 302118 - RNA, 19 nt, Artificial Sequence
  Description of Artificial Sequence: Synthetic oligonucleotide
caaacgauucaaauucuau

SEQ ID NO: 302119 - RNA, 19 nt, Artificial Sequence
  Description of Artificial Sequence: Synthetic oligonucleotide
ucaccucgaugucuccaga

SEQ ID NO: 302120 - RNA, 19 nt, Artificial Sequence
  Description of Artificial Sequence: Synthetic oligonucleotide
cuguagcaaagugccauug

SEQ ID NO: 302121 - RNA, 19 nt, Artificial Sequence
  Description of Artificial Sequence: Synthetic oligonucleotide
aucauguggaucaucuaua

SEQ ID NO: 302122 - RNA, 19 nt, Artificial Sequence
  Description of Artificial Sequence: Synthetic oligonucleotide
aggauaauccagggugucu

SEQ ID NO: 302123 - RNA, 19 nt, Artificial Sequence
  Description of Artificial Sequence: Synthetic oligonucleotide
cucagucaaaguccgugga

SEQ ID NO: 302124 - RNA, 19 nt, Artificial Sequence
  Description of Artificial Sequence: Synthetic oligonucleotide
acuaccugaauggcucugu

SEQ ID NO: 302125 - RNA, 19 nt, Artificial Sequence
  Description of Artificial Sequence: Synthetic oligonucleotide
cuacaggaguuccauguaa

SEQ ID NO: 302126 - RNA, 19 nt, Artificial Sequence
  Description of Artificial Sequence: Synthetic oligonucleotide
agauuaggugcggacacuu

SEQ ID NO: 302127 - RNA, 19 nt, Artificial Sequence
  Description of Artificial Sequence: Synthetic oligonucleotide
cacaacugguagcuccaug

SEQ ID NO: 302128 - RNA, 19 nt, Artificial Sequence
  Description of Artificial Sequence: Synthetic oligonucleotide
cacacaacugguagcucca

SEQ ID NO: 302129 - RNA, 19 nt, Artificial Sequence
  Description of Artificial Sequence: Synthetic oligonucleotide
ggcucuucgucuuuuguaa

SEQ ID NO: 302130 - RNA, 19 nt, Artificial Sequence
  Description of Artificial Sequence: Synthetic oligonucleotide
gugauaacucgugcauccc

SEQ ID NO: 302131 - RNA, 19 nt, Artificial Sequence
  Description of Artificial Sequence: Synthetic oligonucleotide
caaaguccguggagggaug

SEQ ID NO: 302132 - RNA, 19 nt, Artificial Sequence
  Description of Artificial Sequence: Synthetic oligonucleotide
ugugccugccucagucaaa

SEQ ID NO: 302133 - RNA, 19 nt, Artificial Sequence
  Description of Artificial Sequence: Synthetic oligonucleotide
cacaucgacaagcaguggu

SEQ ID NO: 302134 - RNA, 19 nt, Artificial Sequence
  Description of Artificial Sequence: Synthetic oligonucleotide
cuaccugaauggcucuguc

SEQ ID NO: 302135 - RNA, 19 nt, Artificial Sequence
  Description of Artificial Sequence: Synthetic oligonucleotide
gugcucugacuuuucguuc

SEQ ID NO: 302136 - RNA, 19 nt, Artificial Sequence
  Description of Artificial Sequence: Synthetic oligonucleotide
ggacaagucaaugguggug

SEQ ID NO: 302137 - RNA, 19 nt, Artificial Sequence
  Description of Artificial Sequence: Synthetic oligonucleotide
caucaacgggcucuucguc

SEQ ID NO: 302138 - RNA, 19 nt, Artificial Sequence
  Description of Artificial Sequence: Synthetic oligonucleotide
auaagcugacgaucuucuu

SEQ ID NO: 302139 - RNA, 19 nt, Artificial Sequence
  Description of Artificial Sequence: Synthetic oligonucleotide
ggcuaaugcacuucggacu

SEQ ID NO: 302140 - RNA, 19 nt, Artificial Sequence
  Description of Artificial Sequence: Synthetic oligonucleotide
gacuuuucguucaccucga

SEQ ID NO: 302141 - RNA, 19 nt, Artificial Sequence
  Description of Artificial Sequence: Synthetic oligonucleotide
aggugcggacacuuucacu

SEQ ID NO: 302142 - RNA, 19 nt, Artificial Sequence
  Description of Artificial Sequence: Synthetic oligonucleotide
ggauuucguagcagcauug

SEQ ID NO: 302143 - RNA, 19 nt, Artificial Sequence
  Description of Artificial Sequence: Synthetic oligonucleotide
caaccguccucuuuguugu

SEQ ID NO: 302144 - RNA, 19 nt, Artificial Sequence
  Description of Artificial Sequence: Synthetic oligonucleotide
cacugaccucaacacuggc

SEQ ID NO: 302145 - RNA, 19 nt, Artificial Sequence
  Description of Artificial Sequence: Synthetic oligonucleotide
cugaucucgaccaccuaua

SEQ ID NO: 302146 - RNA, 19 nt, Artificial Sequence
  Description of Artificial Sequence: Synthetic oligonucleotide
gauuucguagcagcauugu

SEQ ID NO: 302147 - RNA, 19 nt, Artificial Sequence
  Description of Artificial Sequence: Synthetic oligonucleotide
ugcugguguucugguaagc

SEQ ID NO: 302148 - RNA, 19 nt, Artificial Sequence
  Description of Artificial Sequence: Synthetic oligonucleotide
ggcugacaaaugucuucgg

SEQ ID NO: 302149 - RNA, 19 nt, Artificial Sequence
  Description of Artificial Sequence: Synthetic oligonucleotide
gcuugucaguguuucuaug

SEQ ID NO: 302150 - RNA, 19 nt, Artificial Sequence
  Description of Artificial Sequence: Synthetic oligonucleotide
aucgacaagcaguggucuu

SEQ ID NO: 302151 - RNA, 19 nt, Artificial Sequence
  Description of Artificial Sequence: Synthetic oligonucleotide
acgccaauuucuguccagu

SEQ ID NO: 302152 - RNA, 19 nt, Artificial Sequence
  Description of Artificial Sequence: Synthetic oligonucleotide
cuucggcucugugauuuac

SEQ ID NO: 302153 - RNA, 19 nt, Artificial Sequence
  Description of Artificial Sequence: Synthetic oligonucleotide
ccauuacuucuacaucccc

SEQ ID NO: 302154 - RNA, 19 nt, Artificial Sequence
  Description of Artificial Sequence: Synthetic oligonucleotide
gaccaccuauaauuagaua

SEQ ID NO: 302155 - RNA, 19 nt, Artificial Sequence
  Description of Artificial Sequence: Synthetic oligonucleotide
cauaucucuuaugaucaua

SEQ ID NO: 302156 - RNA, 19 nt, Artificial Sequence
  Description of Artificial Sequence: Synthetic oligonucleotide
gaguuaaaacgugaagguu

SEQ ID NO: 302157 - RNA, 19 nt, Artificial Sequence
  Description of Artificial Sequence: Synthetic oligonucleotide
caggauaauccaggguguc

SEQ ID NO: 302158 - RNA, 19 nt, Artificial Sequence
  Description of Artificial Sequence: Synthetic oligonucleotide
gcacauauuggaauagcaa

SEQ ID NO: 302159 - RNA, 19 nt, Artificial Sequence
  Description of Artificial Sequence: Synthetic oligonucleotide
gcacuagugauaacucgug

SEQ ID NO: 302160 - RNA, 19 nt, Artificial Sequence
  Description of Artificial Sequence: Synthetic oligonucleotide
cggacuaccugaauggcuc

SEQ ID NO: 302161 - RNA, 19 nt, Artificial Sequence
  Description of Artificial Sequence: Synthetic oligonucleotide
cuuucacuuugccaggaau

SEQ ID NO: 302162 - RNA, 19 nt, Artificial Sequence
  Description of Artificial Sequence: Synthetic oligonucleotide
cucauacgugaguaugucu

SEQ ID NO: 302163 - RNA, 19 nt, Artificial Sequence
  Description of Artificial Sequence: Synthetic oligonucleotide
guucaccucgaugucucca

SEQ ID NO: 302164 - RNA, 19 nt, Artificial Sequence
  Description of Artificial Sequence: Synthetic oligonucleotide
ggcugagauccacaucgac

SEQ ID NO: 302165 - RNA, 19 nt, Artificial Sequence
  Description of Artificial Sequence: Synthetic oligonucleotide
cuaaugcacuucggacuac

SEQ ID NO: 302166 - RNA, 19 nt, Artificial Sequence
  Description of Artificial Sequence: Synthetic oligonucleotide
acacugcggaauaagucuu

SEQ ID NO: 302167 - RNA, 19 nt, Artificial Sequence
  Description of Artificial Sequence: Synthetic oligonucleotide
acuuuucguucaccucgau

SEQ ID NO: 302168 - RNA, 19 nt, Artificial Sequence
  Description of Artificial Sequence: Synthetic oligonucleotide
ccuuucgaacauuaucuaa

SEQ ID NO: 302169 - RNA, 19 nt, Artificial Sequence
  Description of Artificial Sequence: Synthetic oligonucleotide
accuucuaucuuggaauaa

SEQ ID NO: 302170 - RNA, 19 nt, Artificial Sequence
  Description of Artificial Sequence: Synthetic oligonucleotide
aacgggcucuucgucuuuu

SEQ ID NO: 302171 - RNA, 19 nt, Artificial Sequence
  Description of Artificial Sequence: Synthetic oligonucleotide
ccccugagucacuuggaag

SEQ ID NO: 302172 - RNA, 19 nt, Artificial Sequence
  Description of Artificial Sequence: Synthetic oligonucleotide
ggaucaucuauagcuaagu

SEQ ID NO: 302173 - RNA, 19 nt, Artificial Sequence
  Description of Artificial Sequence: Synthetic oligonucleotide
gcucuucgucuuuuguaac

SEQ ID NO: 302174 - RNA, 19 nt, Artificial Sequence
  Description of Artificial Sequence: Synthetic oligonucleotide
gaaggugggacaagucaau

SEQ ID NO: 302175 - RNA, 19 nt, Artificial Sequence
  Description of Artificial Sequence: Synthetic oligonucleotide
caucccaagcagcacugua

SEQ ID NO: 302176 - RNA, 19 nt, Artificial Sequence
  Description of Artificial Sequence: Synthetic oligonucleotide
gcaucuaggcuugguuuug

SEQ ID NO: 302177 - RNA, 19 nt, Artificial Sequence
  Description of Artificial Sequence: Synthetic oligonucleotide
caaucacgccaauuucugu

SEQ ID NO: 302178 - RNA, 19 nt, Artificial Sequence
  Description of Artificial Sequence: Synthetic oligonucleotide
gguaagcuucagugugcac

SEQ ID NO: 302179 - RNA, 19 nt, Artificial Sequence
  Description of Artificial Sequence: Synthetic oligonucleotide
ccaccuauaauuagauagu

SEQ ID NO: 302180 - RNA, 19 nt, Artificial Sequence
  Description of Artificial Sequence: Synthetic oligonucleotide
gcagcauuguaacaugguu

SEQ ID NO: 302181 - RNA, 19 nt, Artificial Sequence
  Description of Artificial Sequence: Synthetic oligonucleotide
cacuuucacuuugccagga

SEQ ID NO: 302182 - RNA, 19 nt, Artificial Sequence
  Description of Artificial Sequence: Synthetic oligonucleotide
ccugaugaugguacaccca

SEQ ID NO: 302183 - RNA, 19 nt, Artificial Sequence
  Description of Artificial Sequence: Synthetic oligonucleotide
gguauaaggagcacauauu

SEQ ID NO: 302184 - RNA, 19 nt, Artificial Sequence
  Description of Artificial Sequence: Synthetic oligonucleotide
ugucgacuaucugcagguu

SEQ ID NO: 302185 - RNA, 19 nt, Artificial Sequence
  Description of Artificial Sequence: Synthetic oligonucleotide
ccucauacgugaguauguc

SEQ ID NO: 302186 - RNA, 19 nt, Artificial Sequence
  Description of Artificial Sequence: Synthetic oligonucleotide
ccuucuaucuuggaauaaa

SEQ ID NO: 302187 - RNA, 19 nt, Artificial Sequence
  Description of Artificial Sequence: Synthetic oligonucleotide
agaucagcauggacauaaa

SEQ ID NO: 302188 - RNA, 19 nt, Artificial Sequence
  Description of Artificial Sequence: Synthetic oligonucleotide
ccuggugucaaguaucuuu

SEQ ID NO: 302189 - RNA, 19 nt, Artificial Sequence
  Description of Artificial Sequence: Synthetic oligonucleotide
gcuaagucuuguaagucau

SEQ ID NO: 302190 - RNA, 19 nt, Artificial Sequence
  Description of Artificial Sequence: Synthetic oligonucleotide
caucgacaagcaguggucu

SEQ ID NO: 302191 - RNA, 19 nt, Artificial Sequence
  Description of Artificial Sequence: Synthetic oligonucleotide
cugguguucugguaagcuu

SEQ ID NO: 302192 - RNA, 19 nt, Artificial Sequence
  Description of Artificial Sequence: Synthetic oligonucleotide
caccuauaauuagauaguu

SEQ ID NO: 302193 - RNA, 19 nt, Artificial Sequence
  Description of Artificial Sequence: Synthetic oligonucleotide
acacaacugguagcuccau

SEQ ID NO: 302194 - RNA, 19 nt, Artificial Sequence
  Description of Artificial Sequence: Synthetic oligonucleotide
caggaguaaguuucacuuu

SEQ ID NO: 302195 - RNA, 19 nt, Artificial Sequence
  Description of Artificial Sequence: Synthetic oligonucleotide
gcagcauaucucuuaugau

SEQ ID NO: 302196 - RNA, 19 nt, Artificial Sequence
  Description of Artificial Sequence: Synthetic oligonucleotide
gcaaagugccauugugccu

SEQ ID NO: 302197 - RNA, 19 nt, Artificial Sequence
  Description of Artificial Sequence: Synthetic oligonucleotide
gaauggcucugucgacuau

SEQ ID NO: 302198 - RNA, 19 nt, Artificial Sequence
  Description of Artificial Sequence: Synthetic oligonucleotide
gugguauaaggagcacaua

SEQ ID NO: 302199 - RNA, 19 nt, Artificial Sequence
  Description of Artificial Sequence: Synthetic oligonucleotide
uccuggugucaaguaucuu

SEQ ID NO: 302200 - RNA, 19 nt, Artificial Sequence
  Description of Artificial Sequence: Synthetic oligonucleotide
cagaugccagcaauuucau

SEQ ID NO: 302201 - RNA, 19 nt, Artificial Sequence
  Description of Artificial Sequence: Synthetic oligonucleotide
cugucaccggcuucuaguu

SEQ ID NO: 302202 - RNA, 19 nt, Artificial Sequence
  Description of Artificial Sequence: Synthetic oligonucleotide
gauuaggugcggacacuuu

SEQ ID NO: 302203 - RNA, 19 nt, Artificial Sequence
  Description of Artificial Sequence: Synthetic oligonucleotide
gcucugugauuuacuguca

SEQ ID NO: 302204 - RNA, 19 nt, Artificial Sequence
  Description of Artificial Sequence: Synthetic oligonucleotide
cauccugugcucugacuuu

SEQ ID NO: 302205 - RNA, 19 nt, Artificial Sequence
  Description of Artificial Sequence: Synthetic oligonucleotide
caccucgaugucuccagau

SEQ ID NO: 302206 - RNA, 19 nt, Artificial Sequence
  Description of Artificial Sequence: Synthetic oligonucleotide
gaacgccuucucagcagcu

SEQ ID NO: 302207 - RNA, 19 nt, Artificial Sequence
  Description of Artificial Sequence: Synthetic oligonucleotide
cacggccuugucaaacgau

SEQ ID NO: 302208 - RNA, 19 nt, Artificial Sequence
  Description of Artificial Sequence: Synthetic oligonucleotide
caccggcuucuaguuguuc

SEQ ID NO: 302209 - RNA, 19 nt, Artificial Sequence
  Description of Artificial Sequence: Synthetic oligonucleotide
cauccacggccuugucaaa

SEQ ID NO: 302210 - RNA, 19 nt, Artificial Sequence
  Description of Artificial Sequence: Synthetic oligonucleotide
ccacaucgacaagcagugg

SEQ ID NO: 302211 - RNA, 19 nt, Artificial Sequence
  Description of Artificial Sequence: Synthetic oligonucleotide
ggacuaccugaauggcucu

SEQ ID NO: 302212 - RNA, 19 nt, Artificial Sequence
  Description of Artificial Sequence: Synthetic oligonucleotide
cccaagcagcacuguagca

SEQ ID NO: 302213 - RNA, 19 nt, Artificial Sequence
  Description of Artificial Sequence: Synthetic oligonucleotide
guacacccaccaagcacua

SEQ ID NO: 302214 - RNA, 19 nt, Artificial Sequence
  Description of Artificial Sequence: Synthetic oligonucleotide
gcauaucucuuaugaucau

SEQ ID NO: 302215 - RNA, 19 nt, Artificial Sequence
  Description of Artificial Sequence: Synthetic oligonucleotide
guguaucauucagcuauuu

SEQ ID NO: 302216 - RNA, 19 nt, Artificial Sequence
  Description of Artificial Sequence: Synthetic oligonucleotide
cacugcggaauaagucuuu

SEQ ID NO: 302217 - RNA, 19 nt, Artificial Sequence
  Description of Artificial Sequence: Synthetic oligonucleotide
gaguucacuugugcagcuu

SEQ ID NO: 302218 - RNA, 19 nt, Artificial Sequence
  Description of Artificial Sequence: Synthetic oligonucleotide
cuacauccccugagucacu

SEQ ID NO: 302219 - RNA, 19 nt, Artificial Sequence
  Description of Artificial Sequence: Synthetic oligonucleotide
gcacuucggacuaccugaa

SEQ ID NO: 302220 - RNA, 19 nt, Artificial Sequence
  Description of Artificial Sequence: Synthetic oligonucleotide
ccacggccuugucaaacga

SEQ ID NO: 302221 - RNA, 19 nt, Artificial Sequence
  Description of Artificial Sequence: Synthetic oligonucleotide
cgaccaccuauaauuagau

SEQ ID NO: 302222 - RNA, 19 nt, Artificial Sequence
  Description of Artificial Sequence: Synthetic oligonucleotide
cacuucggacuaccugaau

SEQ ID NO: 302223 - RNA, 19 nt, Artificial Sequence
  Description of Artificial Sequence: Synthetic oligonucleotide
cugagucacuuggaagcuu

SEQ ID NO: 302224 - RNA, 19 nt, Artificial Sequence
  Description of Artificial Sequence: Synthetic oligonucleotide
ccugagucacuuggaagcu

SEQ ID NO: 302225 - RNA, 19 nt, Artificial Sequence
  Description of Artificial Sequence: Synthetic oligonucleotide
ggccugagucaggaguucu

SEQ ID NO: 302226 - RNA, 19 nt, Artificial Sequence
  Description of Artificial Sequence: Synthetic oligonucleotide
ccagaucgugcucuuccuu

SEQ ID NO: 302227 - RNA, 19 nt, Artificial Sequence
  Description of Artificial Sequence: Synthetic oligonucleotide
caacgggcucuucgucuuu

SEQ ID NO: 302228 - RNA, 19 nt, Artificial Sequence
  Description of Artificial Sequence: Synthetic oligonucleotide
cgacaagcaguggucuugu

SEQ ID NO: 302229 - RNA, 19 nt, Artificial Sequence
  Description of Artificial Sequence: Synthetic oligonucleotide
aauagauacacacacacac

SEQ ID NO: 302230 - RNA, 19 nt, Artificial Sequence
  Description of Artificial Sequence: Synthetic oligonucleotide
ugugauaaggcucacaccc

SEQ ID NO: 302231 - RNA, 19 nt, Artificial Sequence
  Description of Artificial Sequence: Synthetic oligonucleotide
acaaugaaaacccaucacg

SEQ ID NO: 302232 - RNA, 19 nt, Artificial Sequence
  Description of Artificial Sequence: Synthetic oligonucleotide
auauaaaguguuuucuacc

SEQ ID NO: 302233 - RNA, 19 nt, Artificial Sequence
  Description of Artificial Sequence: Synthetic oligonucleotide
uaucuuuacaugcaagccg

SEQ ID NO: 302234 - RNA, 19 nt, Artificial Sequence
  Description of Artificial Sequence: Synthetic oligonucleotide
uccaaaauucauuagggug

SEQ ID NO: 302235 - RNA, 19 nt, Artificial Sequence
  Description of Artificial Sequence: Synthetic oligonucleotide
auagucuuggacuuguagg

SEQ ID NO: 302236 - RNA, 19 nt, Artificial Sequence
  Description of Artificial Sequence: Synthetic oligonucleotide
aaaaguaggaguguuauau

SEQ ID NO: 302237 - RNA, 19 nt, Artificial Sequence
  Description of Artificial Sequence: Synthetic oligonucleotide
aggaguguuauauaaagug

SEQ ID NO: 302238 - RNA, 19 nt, Artificial Sequence
  Description of Artificial Sequence: Synthetic oligonucleotide
ucucuaaucacccucgaga

SEQ ID NO: 302239 - RNA, 19 nt, Artificial Sequence
  Description of Artificial Sequence: Synthetic oligonucleotide
gauacacacacacacacac

SEQ ID NO: 302240 - RNA, 19 nt, Artificial Sequence
  Description of Artificial Sequence: Synthetic oligonucleotide
ucugacgugauccacaaaa

SEQ ID NO: 302241 - RNA, 19 nt, Artificial Sequence
  Description of Artificial Sequence: Synthetic oligonucleotide
aagacauuucuuuaugcgu

SEQ ID NO: 302242 - RNA, 19 nt, Artificial Sequence
  Description of Artificial Sequence: Synthetic oligonucleotide
gauuaaguggacuaugcca

SEQ ID NO: 302243 - RNA, 19 nt, Artificial Sequence
  Description of Artificial Sequence: Synthetic oligonucleotide
acuccuauugcguaccucg

SEQ ID NO: 302244 - RNA, 19 nt, Artificial Sequence
  Description of Artificial Sequence: Synthetic oligonucleotide
uucggaacugaguaggagg

SEQ ID NO: 302245 - RNA, 19 nt, Artificial Sequence
  Description of Artificial Sequence: Synthetic oligonucleotide
auaucguuuggauuccuac

SEQ ID NO: 302246 - RNA, 19 nt, Artificial Sequence
  Description of Artificial Sequence: Synthetic oligonucleotide
uagauacacacacacacac

SEQ ID NO: 302247 - RNA, 19 nt, Artificial Sequence
  Description of Artificial Sequence: Synthetic oligonucleotide
uagauguuaagacagguuu

SEQ ID NO: 302248 - RNA, 19 nt, Artificial Sequence
  Description of Artificial Sequence: Synthetic oligonucleotide
acuuguaggggauacagca

SEQ ID NO: 302249 - RNA, 19 nt, Artificial Sequence
  Description of Artificial Sequence: Synthetic oligonucleotide
ucugcuaugcccuguuugg

SEQ ID NO: 302250 - RNA, 19 nt, Artificial Sequence
  Description of Artificial Sequence: Synthetic oligonucleotide
gaauucggaacugaguagg

SEQ ID NO: 302251 - RNA, 19 nt, Artificial Sequence
  Description of Artificial Sequence: Synthetic oligonucleotide
uacacacacacacacacac

SEQ ID NO: 302252 - RNA, 19 nt, Artificial Sequence
  Description of Artificial Sequence: Synthetic oligonucleotide
uggacuaugccagugaagc

SEQ ID NO: 302253 - RNA, 19 nt, Artificial Sequence
  Description of Artificial Sequence: Synthetic oligonucleotide
ucgagauuagaauuucugc

SEQ ID NO: 302254 - RNA, 19 nt, Artificial Sequence
  Description of Artificial Sequence: Synthetic oligonucleotide
agggguaacauaucuuuac

SEQ ID NO: 302255 - RNA, 19 nt, Artificial Sequence
  Description of Artificial Sequence: Synthetic oligonucleotide
ugcuucuaaggaaaaguag

SEQ ID NO: 302256 - RNA, 19 nt, Artificial Sequence
  Description of Artificial Sequence: Synthetic oligonucleotide
acaagugauaauucccagg

SEQ ID NO: 302257 - RNA, 19 nt, Artificial Sequence
  Description of Artificial Sequence: Synthetic oligonucleotide
gagauuagaauuucugcac

SEQ ID NO: 302258 - RNA, 19 nt, Artificial Sequence
  Description of Artificial Sequence: Synthetic oligonucleotide
uuggcaaucucugagaagu

SEQ ID NO: 302259 - RNA, 19 nt, Artificial Sequence
  Description of Artificial Sequence: Synthetic oligonucleotide
auuguuguagcguacgcca

SEQ ID NO: 302260 - RNA, 19 nt, Artificial Sequence
  Description of Artificial Sequence: Synthetic oligonucleotide
aaaaucugacgugauccac

SEQ ID NO: 302261 - RNA, 19 nt, Artificial Sequence
  Description of Artificial Sequence: Synthetic oligonucleotide
uuguaggggauacagcacc

SEQ ID NO: 302262 - RNA, 19 nt, Artificial Sequence
  Description of Artificial Sequence: Synthetic oligonucleotide
aucacgggugaacaaacac

SEQ ID NO: 302263 - RNA, 19 nt, Artificial Sequence
  Description of Artificial Sequence: Synthetic oligonucleotide
ucagaguuagauguuaaga

SEQ ID NO: 302264 - RNA, 19 nt, Artificial Sequence
  Description of Artificial Sequence: Synthetic oligonucleotide
acaagucucaaaugaaaug

SEQ ID NO: 302265 - RNA, 19 nt, Artificial Sequence
  Description of Artificial Sequence: Synthetic oligonucleotide
aagugauaauucccagggg

SEQ ID NO: 302266 - RNA, 19 nt, Artificial Sequence
  Description of Artificial Sequence: Synthetic oligonucleotide
augaaaacccaucacgggu

SEQ ID NO: 302267 - RNA, 19 nt, Artificial Sequence
  Description of Artificial Sequence: Synthetic oligonucleotide
gagguuguaauccucucug

SEQ ID NO: 302268 - RNA, 19 nt, Artificial Sequence
  Description of Artificial Sequence: Synthetic oligonucleotide
caauaugucuugagcaccg

SEQ ID NO: 302269 - RNA, 19 nt, Artificial Sequence
  Description of Artificial Sequence: Synthetic oligonucleotide
cacacacacacacacacag

SEQ ID NO: 302270 - RNA, 19 nt, Artificial Sequence
  Description of Artificial Sequence: Synthetic oligonucleotide
cagaagcaagcguugaucc

SEQ ID NO: 302271 - RNA, 19 nt, Artificial Sequence
  Description of Artificial Sequence: Synthetic oligonucleotide
aaucgcaguagagaccccg

SEQ ID NO: 302272 - RNA, 19 nt, Artificial Sequence
  Description of Artificial Sequence: Synthetic oligonucleotide
ugagucaccacuugugacu

SEQ ID NO: 302273 - RNA, 19 nt, Artificial Sequence
  Description of Artificial Sequence: Synthetic oligonucleotide
aggauuaaguggacuaugc

SEQ ID NO: 302274 - RNA, 19 nt, Artificial Sequence
  Description of Artificial Sequence: Synthetic oligonucleotide
aaugugguagaacgugaca

SEQ ID NO: 302275 - RNA, 19 nt, Artificial Sequence
  Description of Artificial Sequence: Synthetic oligonucleotide
ucacgggugaacaaacaca

SEQ ID NO: 302276 - RNA, 19 nt, Artificial Sequence
  Description of Artificial Sequence: Synthetic oligonucleotide
aaacccaucacgggugaac

SEQ ID NO: 302277 - RNA, 19 nt, Artificial Sequence
  Description of Artificial Sequence: Synthetic oligonucleotide
caagcguugauccacagga

SEQ ID NO: 302278 - RNA, 19 nt, Artificial Sequence
  Description of Artificial Sequence: Synthetic oligonucleotide
ucaauaugucuugagcacc

SEQ ID NO: 302279 - RNA, 19 nt, Artificial Sequence
  Description of Artificial Sequence: Synthetic oligonucleotide
cucgagauuagaauuucug

SEQ ID NO: 302280 - RNA, 19 nt, Artificial Sequence
  Description of Artificial Sequence: Synthetic oligonucleotide
uugacguuagagauccgug

SEQ ID NO: 302281 - RNA, 19 nt, Artificial Sequence
  Description of Artificial Sequence: Synthetic oligonucleotide
ugggccauugggaauucgg

SEQ ID NO: 302282 - RNA, 19 nt, Artificial Sequence
  Description of Artificial Sequence: Synthetic oligonucleotide
aauaugucuugagcaccgc

SEQ ID NO: 302283 - RNA, 19 nt, Artificial Sequence
  Description of Artificial Sequence: Synthetic oligonucleotide
uauugcguaccucggccgg

SEQ ID NO: 302284 - RNA, 19 nt, Artificial Sequence
  Description of Artificial Sequence: Synthetic oligonucleotide
acuggaaggauuaagugga

SEQ ID NO: 302285 - RNA, 19 nt, Artificial Sequence
  Description of Artificial Sequence: Synthetic oligonucleotide
cacacacacacacacacac

SEQ ID NO: 302286 - RNA, 19 nt, Artificial Sequence
  Description of Artificial Sequence: Synthetic oligonucleotide
cauaggaugccacaugauc

SEQ ID NO: 302287 - RNA, 19 nt, Artificial Sequence
  Description of Artificial Sequence: Synthetic oligonucleotide
uuuaugcguguucacuuac

SEQ ID NO: 302288 - RNA, 19 nt, Artificial Sequence
  Description of Artificial Sequence: Synthetic oligonucleotide
aaggauuaaguggacuaug

SEQ ID NO: 302289 - RNA, 19 nt, Artificial Sequence
  Description of Artificial Sequence: Synthetic oligonucleotide
aaucugacgugauccacaa

SEQ ID NO: 302290 - RNA, 19 nt, Artificial Sequence
  Description of Artificial Sequence: Synthetic oligonucleotide
aguguuuucuaccuucaau

SEQ ID NO: 302291 - RNA, 19 nt, Artificial Sequence
  Description of Artificial Sequence: Synthetic oligonucleotide
agauuccuaggccacaggu

SEQ ID NO: 302292 - RNA, 19 nt, Artificial Sequence
  Description of Artificial Sequence: Synthetic oligonucleotide
ucuuuaugcguguucacuu

SEQ ID NO: 302293 - RNA, 19 nt, Artificial Sequence
  Description of Artificial Sequence: Synthetic oligonucleotide
acgcugauagucuuggacu

SEQ ID NO: 302294 - RNA, 19 nt, Artificial Sequence
  Description of Artificial Sequence: Synthetic oligonucleotide
aaauugacgcugauagucu

SEQ ID NO: 302295 - RNA, 19 nt, Artificial Sequence
  Description of Artificial Sequence: Synthetic oligonucleotide
aguacuaagccuccuuuaa

SEQ ID NO: 302296 - RNA, 19 nt, Artificial Sequence
  Description of Artificial Sequence: Synthetic oligonucleotide
agacauuucuuuaugcgug

SEQ ID NO: 302297 - RNA, 19 nt, Artificial Sequence
  Description of Artificial Sequence: Synthetic oligonucleotide
ugacguuagagauccgugu

SEQ ID NO: 302298 - RNA, 19 nt, Artificial Sequence
  Description of Artificial Sequence: Synthetic oligonucleotide
cuaccuucaauaugucuug

SEQ ID NO: 302299 - RNA, 19 nt, Artificial Sequence
  Description of Artificial Sequence: Synthetic oligonucleotide
cauaucuuacagcacucac

SEQ ID NO: 302300 - RNA, 19 nt, Artificial Sequence
  Description of Artificial Sequence: Synthetic oligonucleotide
ucauaucauuugaaauuac

SEQ ID NO: 302301 - RNA, 19 nt, Artificial Sequence
  Description of Artificial Sequence: Synthetic oligonucleotide
aaaucugacgugauccaca

SEQ ID NO: 302302 - RNA, 19 nt, Artificial Sequence
  Description of Artificial Sequence: Synthetic oligonucleotide
cacacacacacacagcuuc

SEQ ID NO: 302303 - RNA, 19 nt, Artificial Sequence
  Description of Artificial Sequence: Synthetic oligonucleotide
uuaaggagaaaagcuguaa

SEQ ID NO: 302304 - RNA, 19 nt, Artificial Sequence
  Description of Artificial Sequence: Synthetic oligonucleotide
guucccgugccauugcucc

SEQ ID NO: 302305 - RNA, 19 nt, Artificial Sequence
  Description of Artificial Sequence: Synthetic oligonucleotide
aucauaucauuugaaauua

SEQ ID NO: 302306 - RNA, 19 nt, Artificial Sequence
  Description of Artificial Sequence: Synthetic oligonucleotide
cuauugcguaccucggccg

SEQ ID NO: 302307 - RNA, 19 nt, Artificial Sequence
  Description of Artificial Sequence: Synthetic oligonucleotide
caugcaagccguuguacac

SEQ ID NO: 302308 - RNA, 19 nt, Artificial Sequence
  Description of Artificial Sequence: Synthetic oligonucleotide
uucuuuaugcguguucacu

SEQ ID NO: 302309 - RNA, 19 nt, Artificial Sequence
  Description of Artificial Sequence: Synthetic oligonucleotide
caggagcuaccuuucagcc

SEQ ID NO: 302310 - RNA, 19 nt, Artificial Sequence
  Description of Artificial Sequence: Synthetic oligonucleotide
uugagcaccgcuguucacc

SEQ ID NO: 302311 - RNA, 19 nt, Artificial Sequence
  Description of Artificial Sequence: Synthetic oligonucleotide
aaguacuaagccuccuuua

SEQ ID NO: 302312 - RNA, 19 nt, Artificial Sequence
  Description of Artificial Sequence: Synthetic oligonucleotide
acaugcaagccguuguaca

SEQ ID NO: 302313 - RNA, 19 nt, Artificial Sequence
  Description of Artificial Sequence: Synthetic oligonucleotide
cauuguuguagcguacgcc

SEQ ID NO: 302314 - RNA, 19 nt, Artificial Sequence
  Description of Artificial Sequence: Synthetic oligonucleotide
ugggcuucggagcuugucu

SEQ ID NO: 302315 - RNA, 19 nt, Artificial Sequence
  Description of Artificial Sequence: Synthetic oligonucleotide
guuggagagacgaccgugg

SEQ ID NO: 302316 - RNA, 19 nt, Artificial Sequence
  Description of Artificial Sequence: Synthetic oligonucleotide
uccuauugcguaccucggc

SEQ ID NO: 302317 - RNA, 19 nt, Artificial Sequence
  Description of Artificial Sequence: Synthetic oligonucleotide
uuacagaggcgauuuuccu

SEQ ID NO: 302318 - RNA, 19 nt, Artificial Sequence
  Description of Artificial Sequence: Synthetic oligonucleotide
ugcgucagcccggaaauag

SEQ ID NO: 302319 - RNA, 19 nt, Artificial Sequence
  Description of Artificial Sequence: Synthetic oligonucleotide
uguaagcuaugcaguuccc

SEQ ID NO: 302320 - RNA, 19 nt, Artificial Sequence
  Description of Artificial Sequence: Synthetic oligonucleotide
cuaaucacccucgagauua

SEQ ID NO: 302321 - RNA, 19 nt, Artificial Sequence
  Description of Artificial Sequence: Synthetic oligonucleotide
cacuugugacucuggagcc

SEQ ID NO: 302322 - RNA, 19 nt, Artificial Sequence
  Description of Artificial Sequence: Synthetic oligonucleotide
ucacccucgagauuagaau

SEQ ID NO: 302323 - RNA, 19 nt, Artificial Sequence
  Description of Artificial Sequence: Synthetic oligonucleotide
gacgaccguggccaggacg

SEQ ID NO: 302324 - RNA, 19 nt, Artificial Sequence
  Description of Artificial Sequence: Synthetic oligonucleotide
cuuguaggggauacagcac

SEQ ID NO: 302325 - RNA, 19 nt, Artificial Sequence
  Description of Artificial Sequence: Synthetic oligonucleotide
uggcaguaggaauauuuaa

SEQ ID NO: 302326 - RNA, 19 nt, Artificial Sequence
  Description of Artificial Sequence: Synthetic oligonucleotide
agcaaaucaucuaacuccu

SEQ ID NO: 302327 - RNA, 19 nt, Artificial Sequence
  Description of Artificial Sequence: Synthetic oligonucleotide
ucacugguaggaagagacc

SEQ ID NO: 302328 - RNA, 19 nt, Artificial Sequence
  Description of Artificial Sequence: Synthetic oligonucleotide
acguuagagauccguguug

SEQ ID NO: 302329 - RNA, 19 nt, Artificial Sequence
  Description of Artificial Sequence: Synthetic oligonucleotide
agcaccgcuguucaccuug

SEQ ID NO: 302330 - RNA, 19 nt, Artificial Sequence
  Description of Artificial Sequence: Synthetic oligonucleotide
uagcguacgccauccagga

SEQ ID NO: 302331 - RNA, 19 nt, Artificial Sequence
  Description of Artificial Sequence: Synthetic oligonucleotide
auaugucuugagcaccgcu

SEQ ID NO: 302332 - RNA, 19 nt, Artificial Sequence
  Description of Artificial Sequence: Synthetic oligonucleotide
ggagcuaccuuucagccca

SEQ ID NO: 302333 - RNA, 19 nt, Artificial Sequence
  Description of Artificial Sequence: Synthetic oligonucleotide
ggaauucggaacugaguag

SEQ ID NO: 302334 - RNA, 19 nt, Artificial Sequence
  Description of Artificial Sequence: Synthetic oligonucleotide
uguuguagcguacgccauc

SEQ ID NO: 302335 - RNA, 19 nt, Artificial Sequence
  Description of Artificial Sequence: Synthetic oligonucleotide
ggugugagugcugacacag

SEQ ID NO: 302336 - RNA, 19 nt, Artificial Sequence
  Description of Artificial Sequence: Synthetic oligonucleotide
cauaucauuugaaauuacu

SEQ ID NO: 302337 - RNA, 19 nt, Artificial Sequence
  Description of Artificial Sequence: Synthetic oligonucleotide
agacaagcagucugaguga

SEQ ID NO: 302338 - RNA, 19 nt, Artificial Sequence
  Description of Artificial Sequence: Synthetic oligonucleotide
guaggaagagaccuuggaa

SEQ ID NO: 302339 - RNA, 19 nt, Artificial Sequence
  Description of Artificial Sequence: Synthetic oligonucleotide
aucaaucucuaaucacccu

SEQ ID NO: 302340 - RNA, 19 nt, Artificial Sequence
  Description of Artificial Sequence: Synthetic oligonucleotide
aauucagggcgggcagugg

SEQ ID NO: 302341 - RNA, 19 nt, Artificial Sequence
  Description of Artificial Sequence: Synthetic oligonucleotide
uuucagcccagagaaggca

SEQ ID NO: 302342 - RNA, 19 nt, Artificial Sequence
  Description of Artificial Sequence: Synthetic oligonucleotide
guuguagcguacgccaucc

SEQ ID NO: 302343 - RNA, 19 nt, Artificial Sequence
  Description of Artificial Sequence: Synthetic oligonucleotide
auagauacacacacacaca

SEQ ID NO: 302344 - RNA, 19 nt, Artificial Sequence
  Description of Artificial Sequence: Synthetic oligonucleotide
aucaaugcaggugcaguug

SEQ ID NO: 302345 - RNA, 19 nt, Artificial Sequence
  Description of Artificial Sequence: Synthetic oligonucleotide
acacacacacacagcuucc

SEQ ID NO: 302346 - RNA, 19 nt, Artificial Sequence
  Description of Artificial Sequence: Synthetic oligonucleotide
gggaauucggaacugagua

SEQ ID NO: 302347 - RNA, 19 nt, Artificial Sequence
  Description of Artificial Sequence: Synthetic oligonucleotide
ugagcaccgcuguucaccu

SEQ ID NO: 302348 - RNA, 19 nt, Artificial Sequence
  Description of Artificial Sequence: Synthetic oligonucleotide
agaacgugacaggcggccc

SEQ ID NO: 302349 - RNA, 19 nt, Artificial Sequence
  Description of Artificial Sequence: Synthetic oligonucleotide
ccuacuuaagaguccauuc

SEQ ID NO: 302350 - RNA, 19 nt, Artificial Sequence
  Description of Artificial Sequence: Synthetic oligonucleotide
gagauccguguugagauuc

SEQ ID NO: 302351 - RNA, 19 nt, Artificial Sequence
  Description of Artificial Sequence: Synthetic oligonucleotide
auucggaacugaguaggag

SEQ ID NO: 302352 - RNA, 19 nt, Artificial Sequence
  Description of Artificial Sequence: Synthetic oligonucleotide
cuccuauugcguaccucgg

SEQ ID NO: 302353 - RNA, 19 nt, Artificial Sequence
  Description of Artificial Sequence: Synthetic oligonucleotide
acacacacacacacacagc

SEQ ID NO: 302354 - RNA, 19 nt, Artificial Sequence
  Description of Artificial Sequence: Synthetic oligonucleotide
aauucggaacugaguagga

SEQ ID NO: 302355 - RNA, 19 nt, Artificial Sequence
  Description of Artificial Sequence: Synthetic oligonucleotide
guuagagauccguguugag

SEQ ID NO: 302356 - RNA, 19 nt, Artificial Sequence
  Description of Artificial Sequence: Synthetic oligonucleotide
cuaagccuccuuuaauaga

SEQ ID NO: 302357 - RNA, 19 nt, Artificial Sequence
  Description of Artificial Sequence: Synthetic oligonucleotide
cagcaaagauaucguuugg

SEQ ID NO: 302358 - RNA, 19 nt, Artificial Sequence
  Description of Artificial Sequence: Synthetic oligonucleotide
gugagucaccacuugugac

SEQ ID NO: 302359 - RNA, 19 nt, Artificial Sequence
  Description of Artificial Sequence: Synthetic oligonucleotide
cuuaagaguccauucgugu

SEQ ID NO: 302360 - RNA, 19 nt, Artificial Sequence
  Description of Artificial Sequence: Synthetic oligonucleotide
uuagggccgucacuguggu

SEQ ID NO: 302361 - RNA, 19 nt, Artificial Sequence
  Description of Artificial Sequence: Synthetic oligonucleotide
auugcuccacuguacccga

SEQ ID NO: 302362 - RNA, 19 nt, Artificial Sequence
  Description of Artificial Sequence: Synthetic oligonucleotide
uggaaggauuaaguggacu

SEQ ID NO: 302363 - RNA, 19 nt, Artificial Sequence
  Description of Artificial Sequence: Synthetic oligonucleotide
ccguuguacacauaugaac

SEQ ID NO: 302364 - RNA, 19 nt, Artificial Sequence
  Description of Artificial Sequence: Synthetic oligonucleotide
gauaaggcucacacccagc

SEQ ID NO: 302365 - RNA, 19 nt, Artificial Sequence
  Description of Artificial Sequence: Synthetic oligonucleotide
gacaagcagucugagugac

SEQ ID NO: 302366 - RNA, 19 nt, Artificial Sequence
  Description of Artificial Sequence: Synthetic oligonucleotide
gacuuguaggggauacagc

SEQ ID NO: 302367 - RNA, 19 nt, Artificial Sequence
  Description of Artificial Sequence: Synthetic oligonucleotide
ucgccauuguuguagcgua

SEQ ID NO: 302368 - RNA, 19 nt, Artificial Sequence
  Description of Artificial Sequence: Synthetic oligonucleotide
ccuauugcguaccucggcc

SEQ ID NO: 302369 - RNA, 19 nt, Artificial Sequence
  Description of Artificial Sequence: Synthetic oligonucleotide
gccauugggaauucggaac

SEQ ID NO: 302370 - RNA, 19 nt, Artificial Sequence
  Description of Artificial Sequence: Synthetic oligonucleotide
ugcaagccguuguacacau

SEQ ID NO: 302371 - RNA, 19 nt, Artificial Sequence
  Description of Artificial Sequence: Synthetic oligonucleotide
gaaaaguaggaguguuaua

SEQ ID NO: 302372 - RNA, 19 nt, Artificial Sequence
  Description of Artificial Sequence: Synthetic oligonucleotide
acuaugccagugaagcaug

SEQ ID NO: 302373 - RNA, 19 nt, Artificial Sequence
  Description of Artificial Sequence: Synthetic oligonucleotide
cacacacacacacacagcu

SEQ ID NO: 302374 - RNA, 19 nt, Artificial Sequence
  Description of Artificial Sequence: Synthetic oligonucleotide
ggggcuuacuggaaggagg

SEQ ID NO: 302375 - RNA, 19 nt, Artificial Sequence
  Description of Artificial Sequence: Synthetic oligonucleotide
guaggugugagugcugaca

SEQ ID NO: 302376 - RNA, 19 nt, Artificial Sequence
  Description of Artificial Sequence: Synthetic oligonucleotide
uuguuguagcguacgccau

SEQ ID NO: 302377 - RNA, 19 nt, Artificial Sequence
  Description of Artificial Sequence: Synthetic oligonucleotide
agggacucucacaugccgg

SEQ ID NO: 302378 - RNA, 19 nt, Artificial Sequence
  Description of Artificial Sequence: Synthetic oligonucleotide
gaguguuauauaaaguguu

SEQ ID NO: 302379 - RNA, 19 nt, Artificial Sequence
  Description of Artificial Sequence: Synthetic oligonucleotide
gugugggucacagauggca

SEQ ID NO: 302380 - RNA, 19 nt, Artificial Sequence
  Description of Artificial Sequence: Synthetic oligonucleotide
cgagauuagaauuucugca

SEQ ID NO: 302381 - RNA, 19 nt, Artificial Sequence
  Description of Artificial Sequence: Synthetic oligonucleotide
cgggugaacaaacacauuc

SEQ ID NO: 302382 - RNA, 19 nt, Artificial Sequence
  Description of Artificial Sequence: Synthetic oligonucleotide
agauacacacacacacaca

SEQ ID NO: 302383 - RNA, 19 nt, Artificial Sequence
  Description of Artificial Sequence: Synthetic oligonucleotide
gcacauaucuuacagcacu

SEQ ID NO: 302384 - RNA, 19 nt, Artificial Sequence
  Description of Artificial Sequence: Synthetic oligonucleotide
uccuuuaauagaggauuuu

SEQ ID NO: 302385 - RNA, 19 nt, Artificial Sequence
  Description of Artificial Sequence: Synthetic oligonucleotide
agcguacgccauccaggac

SEQ ID NO: 302386 - RNA, 19 nt, Artificial Sequence
  Description of Artificial Sequence: Synthetic oligonucleotide
guccaaaauucauuagggu

SEQ ID NO: 302387 - RNA, 19 nt, Artificial Sequence
  Description of Artificial Sequence: Synthetic oligonucleotide
caagccguuguacacauau

SEQ ID NO: 302388 - RNA, 19 nt, Artificial Sequence
  Description of Artificial Sequence: Synthetic oligonucleotide
ggaagaagagugcuucuaa

SEQ ID NO: 302389 - RNA, 19 nt, Artificial Sequence
  Description of Artificial Sequence: Synthetic oligonucleotide
cuuuaugcguguucacuua

SEQ ID NO: 302390 - RNA, 19 nt, Artificial Sequence
  Description of Artificial Sequence: Synthetic oligonucleotide
gggguaacauaucuuuaca

SEQ ID NO: 302391 - RNA, 19 nt, Artificial Sequence
  Description of Artificial Sequence: Synthetic oligonucleotide
gcguacgccauccaggaca

SEQ ID NO: 302392 - RNA, 19 nt, Artificial Sequence
  Description of Artificial Sequence: Synthetic oligonucleotide
gguuacagaggcgauuuuc

SEQ ID NO: 302393 - RNA, 19 nt, Artificial Sequence
  Description of Artificial Sequence: Synthetic oligonucleotide
acgaccguggccaggacgu

SEQ ID NO: 302394 - RNA, 19 nt, Artificial Sequence
  Description of Artificial Sequence: Synthetic oligonucleotide
gccauuguuguagcguacg

SEQ ID NO: 302395 - RNA, 19 nt, Artificial Sequence
  Description of Artificial Sequence: Synthetic oligonucleotide
acuugggucgguaggugug

SEQ ID NO: 302396 - RNA, 19 nt, Artificial Sequence
  Description of Artificial Sequence: Synthetic oligonucleotide
cacacacacacagcuuccc

SEQ ID NO: 302397 - RNA, 19 nt, Artificial Sequence
  Description of Artificial Sequence: Synthetic oligonucleotide
accgaccaccugugcacac

SEQ ID NO: 302398 - RNA, 19 nt, Artificial Sequence
  Description of Artificial Sequence: Synthetic oligonucleotide
uaaucgcaguagagacccc

SEQ ID NO: 302399 - RNA, 19 nt, Artificial Sequence
  Description of Artificial Sequence: Synthetic oligonucleotide
guaggacugcaagucagca

SEQ ID NO: 302400 - RNA, 19 nt, Artificial Sequence
  Description of Artificial Sequence: Synthetic oligonucleotide
cucuaaucacccucgagau

SEQ ID NO: 302401 - RNA, 19 nt, Artificial Sequence
  Description of Artificial Sequence: Synthetic oligonucleotide
cacgggugaacaaacacau

SEQ ID NO: 302402 - RNA, 19 nt, Artificial Sequence
  Description of Artificial Sequence: Synthetic oligonucleotide
cacaccgaccaccugugca

SEQ ID NO: 302403 - RNA, 19 nt, Artificial Sequence
  Description of Artificial Sequence: Synthetic oligonucleotide
auacacacacacacacaca

SEQ ID NO: 302404 - RNA, 19 nt, Artificial Sequence
  Description of Artificial Sequence: Synthetic oligonucleotide
gacguuagagauccguguu

SEQ ID NO: 302405 - RNA, 19 nt, Artificial Sequence
  Description of Artificial Sequence: Synthetic oligonucleotide
gugauaauucccaggggua

SEQ ID NO: 302406 - RNA, 19 nt, Artificial Sequence
  Description of Artificial Sequence: Synthetic oligonucleotide
accgugccaucaaugcagg

SEQ ID NO: 302407 - RNA, 19 nt, Artificial Sequence
  Description of Artificial Sequence: Synthetic oligonucleotide
aggugugagugcugacaca

SEQ ID NO: 302408 - RNA, 19 nt, Artificial Sequence
  Description of Artificial Sequence: Synthetic oligonucleotide
caucacgggugaacaaaca

SEQ ID NO: 302409 - RNA, 19 nt, Artificial Sequence
  Description of Artificial Sequence: Synthetic oligonucleotide
uugcgggcacucacauggc

SEQ ID NO: 302410 - RNA, 19 nt, Artificial Sequence
  Description of Artificial Sequence: Synthetic oligonucleotide
aggggcuaguguaagcuau

SEQ ID NO: 302411 - RNA, 19 nt, Artificial Sequence
  Description of Artificial Sequence: Synthetic oligonucleotide
ugcguaccucggccggucc

SEQ ID NO: 302412 - RNA, 19 nt, Artificial Sequence
  Description of Artificial Sequence: Synthetic oligonucleotide
ccaucacgggugaacaaac

SEQ ID NO: 302413 - RNA, 19 nt, Artificial Sequence
  Description of Artificial Sequence: Synthetic oligonucleotide
gggucugugagucaccacu

SEQ ID NO: 302414 - RNA, 19 nt, Artificial Sequence
  Description of Artificial Sequence: Synthetic oligonucleotide
gguaggacugcaagucagc

SEQ ID NO: 302415 - RNA, 19 nt, Artificial Sequence
  Description of Artificial Sequence: Synthetic oligonucleotide
ggaaugugguagaacguga

SEQ ID NO: 302416 - RNA, 19 nt, Artificial Sequence
  Description of Artificial Sequence: Synthetic oligonucleotide
cuugagcaccgcuguucac

SEQ ID NO: 302417 - RNA, 19 nt, Artificial Sequence
  Description of Artificial Sequence: Synthetic oligonucleotide
agagauccguguugagauu

SEQ ID NO: 302418 - RNA, 19 nt, Artificial Sequence
  Description of Artificial Sequence: Synthetic oligonucleotide
aaaauucauuagggugauu

SEQ ID NO: 302419 - RNA, 19 nt, Artificial Sequence
  Description of Artificial Sequence: Synthetic oligonucleotide
ccauuguuguagcguacgc

SEQ ID NO: 302420 - RNA, 19 nt, Artificial Sequence
  Description of Artificial Sequence: Synthetic oligonucleotide
gcucacuggaaggauuaag

SEQ ID NO: 302421 - RNA, 19 nt, Artificial Sequence
  Description of Artificial Sequence: Synthetic oligonucleotide
ugucugcuaugcccuguuu

SEQ ID NO: 302422 - RNA, 19 nt, Artificial Sequence
  Description of Artificial Sequence: Synthetic oligonucleotide
acacacacacacacacaca

SEQ ID NO: 302423 - RNA, 19 nt, Artificial Sequence
  Description of Artificial Sequence: Synthetic oligonucleotide
cccgcgagggugaaguuug

SEQ ID NO: 302424 - RNA, 19 nt, Artificial Sequence
  Description of Artificial Sequence: Synthetic oligonucleotide
guaggaggggcuggaauaa

SEQ ID NO: 302425 - RNA, 19 nt, Artificial Sequence
  Description of Artificial Sequence: Synthetic oligonucleotide
agacgaccguggccaggac

SEQ ID NO: 302426 - RNA, 19 nt, Artificial Sequence
  Description of Artificial Sequence: Synthetic oligonucleotide
guacuaagccuccuuuaau

SEQ ID NO: 302427 - RNA, 19 nt, Artificial Sequence
  Description of Artificial Sequence: Synthetic oligonucleotide
ggcuaguguaagcuaugca

SEQ ID NO: 302428 - RNA, 19 nt, Artificial Sequence
  Description of Artificial Sequence: Synthetic oligonucleotide
cgucagcccggaaauaggc

SEQ ID NO: 302429 - RNA, 19 nt, Artificial Sequence
  Description of Artificial Sequence: Synthetic oligonucleotide
ccccgagccacacaccuag

SEQ ID NO: 302430 - RNA, 19 nt, Artificial Sequence
  Description of Artificial Sequence: Synthetic oligonucleotide
cagggguaacauaucuuua

SEQ ID NO: 302431 - RNA, 19 nt, Artificial Sequence
  Description of Artificial Sequence: Synthetic oligonucleotide
acccucgagauuagaauuu

SEQ ID NO: 302432 - RNA, 19 nt, Artificial Sequence
  Description of Artificial Sequence: Synthetic oligonucleotide
gggcuaguguaagcuaugc

SEQ ID NO: 302433 - RNA, 19 nt, Artificial Sequence
  Description of Artificial Sequence: Synthetic oligonucleotide
ggacuaugccagugaagca

SEQ ID NO: 302434 - RNA, 19 nt, Artificial Sequence
  Description of Artificial Sequence: Synthetic oligonucleotide
auugcguaccucggccggu

SEQ ID NO: 302435 - RNA, 19 nt, Artificial Sequence
  Description of Artificial Sequence: Synthetic oligonucleotide
ccgaagcugcaaaggcucg

SEQ ID NO: 302436 - RNA, 19 nt, Artificial Sequence
  Description of Artificial Sequence: Synthetic oligonucleotide
cacccucgagauuagaauu

SEQ ID NO: 302437 - RNA, 19 nt, Artificial Sequence
  Description of Artificial Sequence: Synthetic oligonucleotide
gaccugacgggagaagccu

SEQ ID NO: 302438 - RNA, 19 nt, Artificial Sequence
  Description of Artificial Sequence: Synthetic oligonucleotide
ggcacauaucuuacagcac

SEQ ID NO: 302439 - RNA, 19 nt, Artificial Sequence
  Description of Artificial Sequence: Synthetic oligonucleotide
gcugauagucuuggacuug

SEQ ID NO: 302440 - RNA, 19 nt, Artificial Sequence
  Description of Artificial Sequence: Synthetic oligonucleotide
accugacgggagaagccug

SEQ ID NO: 302441 - RNA, 19 nt, Artificial Sequence
  Description of Artificial Sequence: Synthetic oligonucleotide
gguugcagaagcaagcguu

SEQ ID NO: 302442 - RNA, 19 nt, Artificial Sequence
  Description of Artificial Sequence: Synthetic oligonucleotide
cuugggucgguagguguga

SEQ ID NO: 302443 - RNA, 19 nt, Artificial Sequence
  Description of Artificial Sequence: Synthetic oligonucleotide
gggcguugacguuagagau

SEQ ID NO: 302444 - RNA, 19 nt, Artificial Sequence
  Description of Artificial Sequence: Synthetic oligonucleotide
ccuuacacaagugauaauu

SEQ ID NO: 302445 - RNA, 19 nt, Artificial Sequence
  Description of Artificial Sequence: Synthetic oligonucleotide
aucugacgugauccacaaa

SEQ ID NO: 302446 - RNA, 19 nt, Artificial Sequence
  Description of Artificial Sequence: Synthetic oligonucleotide
gcgucagcccggaaauagg

SEQ ID NO: 302447 - RNA, 19 nt, Artificial Sequence
  Description of Artificial Sequence: Synthetic oligonucleotide
cacuccuauugcguaccuc

SEQ ID NO: 302448 - RNA, 19 nt, Artificial Sequence
  Description of Artificial Sequence: Synthetic oligonucleotide
acacacacacacacagcuu

SEQ ID NO: 302449 - RNA, 19 nt, Artificial Sequence
  Description of Artificial Sequence: Synthetic oligonucleotide
ggcguugacguuagagauc

SEQ ID NO: 302450 - RNA, 19 nt, Artificial Sequence
  Description of Artificial Sequence: Synthetic oligonucleotide
gauccguguugagauuccu

SEQ ID NO: 302451 - RNA, 19 nt, Artificial Sequence
  Description of Artificial Sequence: Synthetic oligonucleotide
ggaaguucuuucagaguua

SEQ ID NO: 302452 - RNA, 19 nt, Artificial Sequence
  Description of Artificial Sequence: Synthetic oligonucleotide
caggggcuaguguaagcua

SEQ ID NO: 302453 - RNA, 19 nt, Artificial Sequence
  Description of Artificial Sequence: Synthetic oligonucleotide
gccauaacuccugggcuca

SEQ ID NO: 302454 - RNA, 19 nt, Artificial Sequence
  Description of Artificial Sequence: Synthetic oligonucleotide
ggcugaaaggacucgccau

SEQ ID NO: 302455 - RNA, 19 nt, Artificial Sequence
  Description of Artificial Sequence: Synthetic oligonucleotide
caccuagcuaauuggcaau

SEQ ID NO: 302456 - RNA, 19 nt, Artificial Sequence
  Description of Artificial Sequence: Synthetic oligonucleotide
ccagggguaacauaucuuu

SEQ ID NO: 302457 - RNA, 19 nt, Artificial Sequence
  Description of Artificial Sequence: Synthetic oligonucleotide
agcaccgggcguugacguu

SEQ ID NO: 302458 - RNA, 19 nt, Artificial Sequence
  Description of Artificial Sequence: Synthetic oligonucleotide
cguuagagauccguguuga

SEQ ID NO: 302459 - RNA, 19 nt, Artificial Sequence
  Description of Artificial Sequence: Synthetic oligonucleotide
cggaaauaggcagugguaa

SEQ ID NO: 302460 - RNA, 19 nt, Artificial Sequence
  Description of Artificial Sequence: Synthetic oligonucleotide
cccucgagauuagaauuuc

SEQ ID NO: 302461 - RNA, 19 nt, Artificial Sequence
  Description of Artificial Sequence: Synthetic oligonucleotide
cuuggacuuguaggggaua

SEQ ID NO: 302462 - RNA, 19 nt, Artificial Sequence
  Description of Artificial Sequence: Synthetic oligonucleotide
gcguaccucggccgguccc

SEQ ID NO: 302463 - RNA, 19 nt, Artificial Sequence
  Description of Artificial Sequence: Synthetic oligonucleotide
cuucccggccuugaugugu

SEQ ID NO: 302464 - RNA, 19 nt, Artificial Sequence
  Description of Artificial Sequence: Synthetic oligonucleotide
acgugacaggcggcccaag

SEQ ID NO: 302465 - RNA, 19 nt, Artificial Sequence
  Description of Artificial Sequence: Synthetic oligonucleotide
cccggugugggucacagau

SEQ ID NO: 302466 - RNA, 19 nt, Artificial Sequence
  Description of Artificial Sequence: Synthetic oligonucleotide
ggacguugcccgccaccac

SEQ ID NO: 302467 - RNA, 19 nt, Artificial Sequence
  Description of Artificial Sequence: Synthetic oligonucleotide
cccaucacgggugaacaaa

SEQ ID NO: 302468 - RNA, 19 nt, Artificial Sequence
  Description of Artificial Sequence: Synthetic oligonucleotide
cagcccgcgagggugaagu

SEQ ID NO: 302469 - RNA, 19 nt, Artificial Sequence
  Description of Artificial Sequence: Synthetic oligonucleotide
ggcaagaacuugagcaaau

SEQ ID NO: 302470 - RNA, 19 nt, Artificial Sequence
  Description of Artificial Sequence: Synthetic oligonucleotide
caccgaccaccugugcaca

SEQ ID NO: 302471 - RNA, 19 nt, Artificial Sequence
  Description of Artificial Sequence: Synthetic oligonucleotide
agcccgcgagggugaaguu

SEQ ID NO: 302472 - RNA, 19 nt, Artificial Sequence
  Description of Artificial Sequence: Synthetic oligonucleotide
ccucgagauuagaauuucu

SEQ ID NO: 302473 - RNA, 19 nt, Artificial Sequence
  Description of Artificial Sequence: Synthetic oligonucleotide
cgcuguucaccuugcacaa

SEQ ID NO: 302474 - RNA, 19 nt, Artificial Sequence
  Description of Artificial Sequence: Synthetic oligonucleotide
gcguguucacuuacaaaau

SEQ ID NO: 302475 - RNA, 19 nt, Artificial Sequence
  Description of Artificial Sequence: Synthetic oligonucleotide
gcaccgggcguugacguua

SEQ ID NO: 302476 - RNA, 19 nt, Artificial Sequence
  Description of Artificial Sequence: Synthetic oligonucleotide
ccagccauuuagggccguc

SEQ ID NO: 302477 - RNA, 19 nt, Artificial Sequence
  Description of Artificial Sequence: Synthetic oligonucleotide
ccgaccaccugugcacaca

SEQ ID NO: 302478 - RNA, 19 nt, Artificial Sequence
  Description of Artificial Sequence: Synthetic oligonucleotide
cacagcccgcgagggugaa

SEQ ID NO: 302479 - RNA, 19 nt, Artificial Sequence
  Description of Artificial Sequence: Synthetic oligonucleotide
cucggccgguccccacugu

SEQ ID NO: 302480 - RNA, 19 nt, Artificial Sequence
  Description of Artificial Sequence: Synthetic oligonucleotide
gcccgcgagggugaaguuu

SEQ ID NO: 302481 - RNA, 19 nt, Artificial Sequence
  Description of Artificial Sequence: Synthetic oligonucleotide
ccccggugugggucacaga

SEQ ID NO: 302482 - RNA, 19 nt, Artificial Sequence
  Description of Artificial Sequence: Synthetic oligonucleotide
ccgcgagggugaaguuugu

SEQ ID NO: 302483 - RNA, 19 nt, Artificial Sequence
  Description of Artificial Sequence: Synthetic oligonucleotide
aaaaguaugaaauauaaac

SEQ ID NO: 302484 - RNA, 19 nt, Artificial Sequence
  Description of Artificial Sequence: Synthetic oligonucleotide
aaauaucaaauggagaucc

SEQ ID NO: 302485 - RNA, 19 nt, Artificial Sequence
  Description of Artificial Sequence: Synthetic oligonucleotide
agaucaaagagccugaaac

SEQ ID NO: 302486 - RNA, 19 nt, Artificial Sequence
  Description of Artificial Sequence: Synthetic oligonucleotide
uuaguuaacuuauaaagag

SEQ ID NO: 302487 - RNA, 19 nt, Artificial Sequence
  Description of Artificial Sequence: Synthetic oligonucleotide
aaaugaguuauacaaauga

SEQ ID NO: 302488 - RNA, 19 nt, Artificial Sequence
  Description of Artificial Sequence: Synthetic oligonucleotide
uuaacuuauaaagagauca

SEQ ID NO: 302489 - RNA, 19 nt, Artificial Sequence
  Description of Artificial Sequence: Synthetic oligonucleotide
aauuuuguauaucccgugc

SEQ ID NO: 302490 - RNA, 19 nt, Artificial Sequence
  Description of Artificial Sequence: Synthetic oligonucleotide
aacuuguacaucaauaggc

SEQ ID NO: 302491 - RNA, 19 nt, Artificial Sequence
  Description of Artificial Sequence: Synthetic oligonucleotide
uguaauaacuuguacauca

SEQ ID NO: 302492 - RNA, 19 nt, Artificial Sequence
  Description of Artificial Sequence: Synthetic oligonucleotide
uauguuauaucucuucccg

SEQ ID NO: 302493 - RNA, 19 nt, Artificial Sequence
  Description of Artificial Sequence: Synthetic oligonucleotide
uucaacuauaccauggcgg

SEQ ID NO: 302494 - RNA, 19 nt, Artificial Sequence
  Description of Artificial Sequence: Synthetic oligonucleotide
ucaacuuuaggacauaacu

SEQ ID NO: 302495 - RNA, 19 nt, Artificial Sequence
  Description of Artificial Sequence: Synthetic oligonucleotide
uuaaauugcaaagaaaaug

SEQ ID NO: 302496 - RNA, 19 nt, Artificial Sequence
  Description of Artificial Sequence: Synthetic oligonucleotide
auaacuauagcguuccuuc

SEQ ID NO: 302497 - RNA, 19 nt, Artificial Sequence
  Description of Artificial Sequence: Synthetic oligonucleotide
gaugacauacccuucagcc

SEQ ID NO: 302498 - RNA, 19 nt, Artificial Sequence
  Description of Artificial Sequence: Synthetic oligonucleotide
auaacuuguacaucaauag

SEQ ID NO: 302499 - RNA, 19 nt, Artificial Sequence
  Description of Artificial Sequence: Synthetic oligonucleotide
uacagaauugcaauacugg

SEQ ID NO: 302500 - RNA, 19 nt, Artificial Sequence
  Description of Artificial Sequence: Synthetic oligonucleotide
uuuaauaagaaaugacucu

SEQ ID NO: 302501 - RNA, 19 nt, Artificial Sequence
  Description of Artificial Sequence: Synthetic oligonucleotide
aaaauagacauauuaguua

SEQ ID NO: 302502 - RNA, 19 nt, Artificial Sequence
  Description of Artificial Sequence: Synthetic oligonucleotide
uaaaguauguuauaucucu

SEQ ID NO: 302503 - RNA, 19 nt, Artificial Sequence
  Description of Artificial Sequence: Synthetic oligonucleotide
acaauguucuuguagagag

SEQ ID NO: 302504 - RNA, 19 nt, Artificial Sequence
  Description of Artificial Sequence: Synthetic oligonucleotide
uggauuagcaaacucuggg

SEQ ID NO: 302505 - RNA, 19 nt, Artificial Sequence
  Description of Artificial Sequence: Synthetic oligonucleotide
aaaugcuagguccaauuuc

SEQ ID NO: 302506 - RNA, 19 nt, Artificial Sequence
  Description of Artificial Sequence: Synthetic oligonucleotide
uauucaaccuaaaugaaaa

SEQ ID NO: 302507 - RNA, 19 nt, Artificial Sequence
  Description of Artificial Sequence: Synthetic oligonucleotide
aaguauguuauaucucuuc

SEQ ID NO: 302508 - RNA, 19 nt, Artificial Sequence
  Description of Artificial Sequence: Synthetic oligonucleotide
auuuuguauaucccgugcc

SEQ ID NO: 302509 - RNA, 19 nt, Artificial Sequence
  Description of Artificial Sequence: Synthetic oligonucleotide
uugauugcaauacaugaug

SEQ ID NO: 302510 - RNA, 19 nt, Artificial Sequence
  Description of Artificial Sequence: Synthetic oligonucleotide
ugauugcaauacaugaugg

SEQ ID NO: 302511 - RNA, 19 nt, Artificial Sequence
  Description of Artificial Sequence: Synthetic oligonucleotide
uguuccauaaaccuuucca

SEQ ID NO: 302512 - RNA, 19 nt, Artificial Sequence
  Description of Artificial Sequence: Synthetic oligonucleotide
uguguaauaacuuguacau

SEQ ID NO: 302513 - RNA, 19 nt, Artificial Sequence
  Description of Artificial Sequence: Synthetic oligonucleotide
uggagguucagucaaaaga

SEQ ID NO: 302514 - RNA, 19 nt, Artificial Sequence
  Description of Artificial Sequence: Synthetic oligonucleotide
ucaaccuaaaugaaaacaa

SEQ ID NO: 302515 - RNA, 19 nt, Artificial Sequence
  Description of Artificial Sequence: Synthetic oligonucleotide
uacaguucguuucaaaucu

SEQ ID NO: 302516 - RNA, 19 nt, Artificial Sequence
  Description of Artificial Sequence: Synthetic oligonucleotide
auuacagagcucucaaaac

SEQ ID NO: 302517 - RNA, 19 nt, Artificial Sequence
  Description of Artificial Sequence: Synthetic oligonucleotide
aggacauaacuccaaacac

SEQ ID NO: 302518 - RNA, 19 nt, Artificial Sequence
  Description of Artificial Sequence: Synthetic oligonucleotide
ugguugaaccaccagagag

SEQ ID NO: 302519 - RNA, 19 nt, Artificial Sequence
  Description of Artificial Sequence: Synthetic oligonucleotide
aauuuggguaaucacauua

SEQ ID NO: 302520 - RNA, 19 nt, Artificial Sequence
  Description of Artificial Sequence: Synthetic oligonucleotide
uugaguaaaaucuggauua

SEQ ID NO: 302521 - RNA, 19 nt, Artificial Sequence
  Description of Artificial Sequence: Synthetic oligonucleotide
acuacaguauuucuuugac

SEQ ID NO: 302522 - RNA, 19 nt, Artificial Sequence
  Description of Artificial Sequence: Synthetic oligonucleotide
ucucucauagccaacguca

SEQ ID NO: 302523 - RNA, 19 nt, Artificial Sequence
  Description of Artificial Sequence: Synthetic oligonucleotide
aaucuggcauuacagagcu

SEQ ID NO: 302524 - RNA, 19 nt, Artificial Sequence
  Description of Artificial Sequence: Synthetic oligonucleotide
acacguaagauucaaauau

SEQ ID NO: 302525 - RNA, 19 nt, Artificial Sequence
  Description of Artificial Sequence: Synthetic oligonucleotide
aguaauggucuucaggcuc

SEQ ID NO: 302526 - RNA, 19 nt, Artificial Sequence
  Description of Artificial Sequence: Synthetic oligonucleotide
cuuuccaucucccuaaccc

SEQ ID NO: 302527 - RNA, 19 nt, Artificial Sequence
  Description of Artificial Sequence: Synthetic oligonucleotide
cauuaggccuuaaauaugc

SEQ ID NO: 302528 - RNA, 19 nt, Artificial Sequence
  Description of Artificial Sequence: Synthetic oligonucleotide
aaucucuuugcaaacgacg

SEQ ID NO: 302529 - RNA, 19 nt, Artificial Sequence
  Description of Artificial Sequence: Synthetic oligonucleotide
uuggguaaucacauuauug

SEQ ID NO: 302530 - RNA, 19 nt, Artificial Sequence
  Description of Artificial Sequence: Synthetic oligonucleotide
caaacgacguccaaagucc

SEQ ID NO: 302531 - RNA, 19 nt, Artificial Sequence
  Description of Artificial Sequence: Synthetic oligonucleotide
aacccaggagacuagcuuc

SEQ ID NO: 302532 - RNA, 19 nt, Artificial Sequence
  Description of Artificial Sequence: Synthetic oligonucleotide
ucuuugauugcaauacaug

SEQ ID NO: 302533 - RNA, 19 nt, Artificial Sequence
  Description of Artificial Sequence: Synthetic oligonucleotide
auguguaauaacuuguaca

SEQ ID NO: 302534 - RNA, 19 nt, Artificial Sequence
  Description of Artificial Sequence: Synthetic oligonucleotide
cacuuuguugcauacgugg

SEQ ID NO: 302535 - RNA, 19 nt, Artificial Sequence
  Description of Artificial Sequence: Synthetic oligonucleotide
acuuugacccaucaguguc

SEQ ID NO: 302536 - RNA, 19 nt, Artificial Sequence
  Description of Artificial Sequence: Synthetic oligonucleotide
agauccaaagcauuugcag

SEQ ID NO: 302537 - RNA, 19 nt, Artificial Sequence
  Description of Artificial Sequence: Synthetic oligonucleotide
ucuauuacuguacccguca

SEQ ID NO: 302538 - RNA, 19 nt, Artificial Sequence
  Description of Artificial Sequence: Synthetic oligonucleotide
uucuauugcuucaucacca

SEQ ID NO: 302539 - RNA, 19 nt, Artificial Sequence
  Description of Artificial Sequence: Synthetic oligonucleotide
gaugggaugauaaacugug

SEQ ID NO: 302540 - RNA, 19 nt, Artificial Sequence
  Description of Artificial Sequence: Synthetic oligonucleotide
agcagcucgagauaacugg

SEQ ID NO: 302541 - RNA, 19 nt, Artificial Sequence
  Description of Artificial Sequence: Synthetic oligonucleotide
auucaguggagguucaguc

SEQ ID NO: 302542 - RNA, 19 nt, Artificial Sequence
  Description of Artificial Sequence: Synthetic oligonucleotide
uguaugaucauguuugguu

SEQ ID NO: 302543 - RNA, 19 nt, Artificial Sequence
  Description of Artificial Sequence: Synthetic oligonucleotide
auacccuucagccacagga

SEQ ID NO: 302544 - RNA, 19 nt, Artificial Sequence
  Description of Artificial Sequence: Synthetic oligonucleotide
uuuaauacagcugccgaug

SEQ ID NO: 302545 - RNA, 19 nt, Artificial Sequence
  Description of Artificial Sequence: Synthetic oligonucleotide
gauagguugaguaaaaucu

SEQ ID NO: 302546 - RNA, 19 nt, Artificial Sequence
  Description of Artificial Sequence: Synthetic oligonucleotide
cucaacauauuaaaaguuc

SEQ ID NO: 302547 - RNA, 19 nt, Artificial Sequence
  Description of Artificial Sequence: Synthetic oligonucleotide
agcuaaggcaagaacagcc

SEQ ID NO: 302548 - RNA, 19 nt, Artificial Sequence
  Description of Artificial Sequence: Synthetic oligonucleotide
ucaacuauaccauggcgga

SEQ ID NO: 302549 - RNA, 19 nt, Artificial Sequence
  Description of Artificial Sequence: Synthetic oligonucleotide
uacaucaauaggcuugggc

SEQ ID NO: 302550 - RNA, 19 nt, Artificial Sequence
  Description of Artificial Sequence: Synthetic oligonucleotide
uaguuaacuuauaaagaga

SEQ ID NO: 302551 - RNA, 19 nt, Artificial Sequence
  Description of Artificial Sequence: Synthetic oligonucleotide
uuggguaagucaauaauau

SEQ ID NO: 302552 - RNA, 19 nt, Artificial Sequence
  Description of Artificial Sequence: Synthetic oligonucleotide
uugcaaacgacguccaaag

SEQ ID NO: 302553 - RNA, 19 nt, Artificial Sequence
  Description of Artificial Sequence: Synthetic oligonucleotide
uuaauaagaaaugacucua

SEQ ID NO: 302554 - RNA, 19 nt, Artificial Sequence
  Description of Artificial Sequence: Synthetic oligonucleotide
acuaaaucugggcagacau

SEQ ID NO: 302555 - RNA, 19 nt, Artificial Sequence
  Description of Artificial Sequence: Synthetic oligonucleotide
auguuauaucucuucccgc

SEQ ID NO: 302556 - RNA, 19 nt, Artificial Sequence
  Description of Artificial Sequence: Synthetic oligonucleotide
auacacguaagauucaaau

SEQ ID NO: 302557 - RNA, 19 nt, Artificial Sequence
  Description of Artificial Sequence: Synthetic oligonucleotide
agaacucuuucuuugagau

SEQ ID NO: 302558 - RNA, 19 nt, Artificial Sequence
  Description of Artificial Sequence: Synthetic oligonucleotide
aagaaaguaauggucuuca

SEQ ID NO: 302559 - RNA, 19 nt, Artificial Sequence
  Description of Artificial Sequence: Synthetic oligonucleotide
ugugacgacaaaugcuagg

SEQ ID NO: 302560 - RNA, 19 nt, Artificial Sequence
  Description of Artificial Sequence: Synthetic oligonucleotide
uaauaagaaaugacucuac

SEQ ID NO: 302561 - RNA, 19 nt, Artificial Sequence
  Description of Artificial Sequence: Synthetic oligonucleotide
uauaccauggcggauuggc

SEQ ID NO: 302562 - RNA, 19 nt, Artificial Sequence
  Description of Artificial Sequence: Synthetic oligonucleotide
auuaguuaacuuauaaaga

SEQ ID NO: 302563 - RNA, 19 nt, Artificial Sequence
  Description of Artificial Sequence: Synthetic oligonucleotide
ucaugauccagauauuuua

SEQ ID NO: 302564 - RNA, 19 nt, Artificial Sequence
  Description of Artificial Sequence: Synthetic oligonucleotide
aaaucucuuugcaaacgac

SEQ ID NO: 302565 - RNA, 19 nt, Artificial Sequence
  Description of Artificial Sequence: Synthetic oligonucleotide
cugcaaaugaguuauacaa

SEQ ID NO: 302566 - RNA, 19 nt, Artificial Sequence
  Description of Artificial Sequence: Synthetic oligonucleotide
acagaauugcaauacuggu

SEQ ID NO: 302567 - RNA, 19 nt, Artificial Sequence
  Description of Artificial Sequence: Synthetic oligonucleotide
caacuuuaggacauaacuc

SEQ ID NO: 302568 - RNA, 19 nt, Artificial Sequence
  Description of Artificial Sequence: Synthetic oligonucleotide
uuaggccuuaaauaugcca

SEQ ID NO: 302569 - RNA, 19 nt, Artificial Sequence
  Description of Artificial Sequence: Synthetic oligonucleotide
gauguguaauaacuuguac

SEQ ID NO: 302570 - RNA, 19 nt, Artificial Sequence
  Description of Artificial Sequence: Synthetic oligonucleotide
uuaacuucagccuggcauc

SEQ ID NO: 302571 - RNA, 19 nt, Artificial Sequence
  Description of Artificial Sequence: Synthetic oligonucleotide
cuagauccaaagcauuugc

SEQ ID NO: 302572 - RNA, 19 nt, Artificial Sequence
  Description of Artificial Sequence: Synthetic oligonucleotide
uuaaacucuuuuacuaaau

SEQ ID NO: 302573 - RNA, 19 nt, Artificial Sequence
  Description of Artificial Sequence: Synthetic oligonucleotide
acaccuuucaucacccucc

SEQ ID NO: 302574 - RNA, 19 nt, Artificial Sequence
  Description of Artificial Sequence: Synthetic oligonucleotide
accuaaaugaaaacaauca

SEQ ID NO: 302575 - RNA, 19 nt, Artificial Sequence
  Description of Artificial Sequence: Synthetic oligonucleotide
guauguuauaucucuuccc

SEQ ID NO: 302576 - RNA, 19 nt, Artificial Sequence
  Description of Artificial Sequence: Synthetic oligonucleotide
aaccagacugcauaccgcu

SEQ ID NO: 302577 - RNA, 19 nt, Artificial Sequence
  Description of Artificial Sequence: Synthetic oligonucleotide
auagccaacgucaauggag

SEQ ID NO: 302578 - RNA, 19 nt, Artificial Sequence
  Description of Artificial Sequence: Synthetic oligonucleotide
agcucgagauaacuggaac

SEQ ID NO: 302579 - RNA, 19 nt, Artificial Sequence
  Description of Artificial Sequence: Synthetic oligonucleotide
auugcaauacaugauggga

SEQ ID NO: 302580 - RNA, 19 nt, Artificial Sequence
  Description of Artificial Sequence: Synthetic oligonucleotide
uccucgcuuaacuucagcc

SEQ ID NO: 302581 - RNA, 19 nt, Artificial Sequence
  Description of Artificial Sequence: Synthetic oligonucleotide
uuuccaucucccuaacccc

SEQ ID NO: 302582 - RNA, 19 nt, Artificial Sequence
  Description of Artificial Sequence: Synthetic oligonucleotide
cucuuugcaaacgacgucc

SEQ ID NO: 302583 - RNA, 19 nt, Artificial Sequence
  Description of Artificial Sequence: Synthetic oligonucleotide
ucugagauagguugaguaa

SEQ ID NO: 302584 - RNA, 19 nt, Artificial Sequence
  Description of Artificial Sequence: Synthetic oligonucleotide
uugcaauacaugaugggau

SEQ ID NO: 302585 - RNA, 19 nt, Artificial Sequence
  Description of Artificial Sequence: Synthetic oligonucleotide
auuaucuccuuuccaucuc

SEQ ID NO: 302586 - RNA, 19 nt, Artificial Sequence
  Description of Artificial Sequence: Synthetic oligonucleotide
agcuuccuagauccaaagc

SEQ ID NO: 302587 - RNA, 19 nt, Artificial Sequence
  Description of Artificial Sequence: Synthetic oligonucleotide
cucaaaacacccacagagc

SEQ ID NO: 302588 - RNA, 19 nt, Artificial Sequence
  Description of Artificial Sequence: Synthetic oligonucleotide
uucaaaucucuuugcaaac

SEQ ID NO: 302589 - RNA, 19 nt, Artificial Sequence
  Description of Artificial Sequence: Synthetic oligonucleotide
cagacaucggcuaacccag

SEQ ID NO: 302590 - RNA, 19 nt, Artificial Sequence
  Description of Artificial Sequence: Synthetic oligonucleotide
uauuacuguacccgucagc

SEQ ID NO: 302591 - RNA, 19 nt, Artificial Sequence
  Description of Artificial Sequence: Synthetic oligonucleotide
aguauauucccuguuuucu

SEQ ID NO: 302592 - RNA, 19 nt, Artificial Sequence
  Description of Artificial Sequence: Synthetic oligonucleotide
cucgagauaacuggaaccc

SEQ ID NO: 302593 - RNA, 19 nt, Artificial Sequence
  Description of Artificial Sequence: Synthetic oligonucleotide
caugauaugucagggacug

SEQ ID NO: 302594 - RNA, 19 nt, Artificial Sequence
  Description of Artificial Sequence: Synthetic oligonucleotide
uagccaacgucaauggaga

SEQ ID NO: 302595 - RNA, 19 nt, Artificial Sequence
  Description of Artificial Sequence: Synthetic oligonucleotide
ucuucccgcaauuggaaug

SEQ ID NO: 302596 - RNA, 19 nt, Artificial Sequence
  Description of Artificial Sequence: Synthetic oligonucleotide
aaagcacucaacauauuaa

SEQ ID NO: 302597 - RNA, 19 nt, Artificial Sequence
  Description of Artificial Sequence: Synthetic oligonucleotide
uacuguacccgucagcguc

SEQ ID NO: 302598 - RNA, 19 nt, Artificial Sequence
  Description of Artificial Sequence: Synthetic oligonucleotide
acguaagauucaaauauuc

SEQ ID NO: 302599 - RNA, 19 nt, Artificial Sequence
  Description of Artificial Sequence: Synthetic oligonucleotide
aauauucaaccuaaaugaa

SEQ ID NO: 302600 - RNA, 19 nt, Artificial Sequence
  Description of Artificial Sequence: Synthetic oligonucleotide
uaucccgugccacagucca

SEQ ID NO: 302601 - RNA, 19 nt, Artificial Sequence
  Description of Artificial Sequence: Synthetic oligonucleotide
ugauguguaauaacuugua

SEQ ID NO: 302602 - RNA, 19 nt, Artificial Sequence
  Description of Artificial Sequence: Synthetic oligonucleotide
uagauccaaagcauuugca

SEQ ID NO: 302603 - RNA, 19 nt, Artificial Sequence
  Description of Artificial Sequence: Synthetic oligonucleotide
uauaucccgugccacaguc

SEQ ID NO: 302604 - RNA, 19 nt, Artificial Sequence
  Description of Artificial Sequence: Synthetic oligonucleotide
cagaauugcaauacugguc

SEQ ID NO: 302605 - RNA, 19 nt, Artificial Sequence
  Description of Artificial Sequence: Synthetic oligonucleotide
aaacaagcuccugcacugc

SEQ ID NO: 302606 - RNA, 19 nt, Artificial Sequence
  Description of Artificial Sequence: Synthetic oligonucleotide
cauucagacaaaacugguc

SEQ ID NO: 302607 - RNA, 19 nt, Artificial Sequence
  Description of Artificial Sequence: Synthetic oligonucleotide
auauccuaauuuuguauau

SEQ ID NO: 302608 - RNA, 19 nt, Artificial Sequence
  Description of Artificial Sequence: Synthetic oligonucleotide
uacacguaagauucaaaua

SEQ ID NO: 302609 - RNA, 19 nt, Artificial Sequence
  Description of Artificial Sequence: Synthetic oligonucleotide
aguaaccagaaagcagggc

SEQ ID NO: 302610 - RNA, 19 nt, Artificial Sequence
  Description of Artificial Sequence: Synthetic oligonucleotide
guguuuaauacagcugccg

SEQ ID NO: 302611 - RNA, 19 nt, Artificial Sequence
  Description of Artificial Sequence: Synthetic oligonucleotide
ucuccgcugucuauuacug

SEQ ID NO: 302612 - RNA, 19 nt, Artificial Sequence
  Description of Artificial Sequence: Synthetic oligonucleotide
aaucuaccaccgcucagcu

SEQ ID NO: 302613 - RNA, 19 nt, Artificial Sequence
  Description of Artificial Sequence: Synthetic oligonucleotide
ucgcuuaacuucagccugg

SEQ ID NO: 302614 - RNA, 19 nt, Artificial Sequence
  Description of Artificial Sequence: Synthetic oligonucleotide
ugucuauuacuguacccgu

SEQ ID NO: 302615 - RNA, 19 nt, Artificial Sequence
  Description of Artificial Sequence: Synthetic oligonucleotide
acuauagcguuccuucacu

SEQ ID NO: 302616 - RNA, 19 nt, Artificial Sequence
  Description of Artificial Sequence: Synthetic oligonucleotide
uucaugauccagauauuuu

SEQ ID NO: 302617 - RNA, 19 nt, Artificial Sequence
  Description of Artificial Sequence: Synthetic oligonucleotide
gaaaugacucuacagaauu

SEQ ID NO: 302618 - RNA, 19 nt, Artificial Sequence
  Description of Artificial Sequence: Synthetic oligonucleotide
aacgucaauggagaacucu

SEQ ID NO: 302619 - RNA, 19 nt, Artificial Sequence
  Description of Artificial Sequence: Synthetic oligonucleotide
cucgcuuaacuucagccug

SEQ ID NO: 302620 - RNA, 19 nt, Artificial Sequence
  Description of Artificial Sequence: Synthetic oligonucleotide
caaucuaccaccgcucagc

SEQ ID NO: 302621 - RNA, 19 nt, Artificial Sequence
  Description of Artificial Sequence: Synthetic oligonucleotide
uccuacuucucgaucucgc

SEQ ID NO: 302622 - RNA, 19 nt, Artificial Sequence
  Description of Artificial Sequence: Synthetic oligonucleotide
acguccaaagucccugaac

SEQ ID NO: 302623 - RNA, 19 nt, Artificial Sequence
  Description of Artificial Sequence: Synthetic oligonucleotide
acaaaugcuagguccaauu

SEQ ID NO: 302624 - RNA, 19 nt, Artificial Sequence
  Description of Artificial Sequence: Synthetic oligonucleotide
auugugacgacaaaugcua

SEQ ID NO: 302625 - RNA, 19 nt, Artificial Sequence
  Description of Artificial Sequence: Synthetic oligonucleotide
acugcauaccgcugcaugu

SEQ ID NO: 302626 - RNA, 19 nt, Artificial Sequence
  Description of Artificial Sequence: Synthetic oligonucleotide
auagguugaguaaaaucug

SEQ ID NO: 302627 - RNA, 19 nt, Artificial Sequence
  Description of Artificial Sequence: Synthetic oligonucleotide
uuguauaucccgugccaca

SEQ ID NO: 302628 - RNA, 19 nt, Artificial Sequence
  Description of Artificial Sequence: Synthetic oligonucleotide
agagccugaaacaaguagu

SEQ ID NO: 302629 - RNA, 19 nt, Artificial Sequence
  Description of Artificial Sequence: Synthetic oligonucleotide
uaacuauagcguuccuuca

SEQ ID NO: 302630 - RNA, 19 nt, Artificial Sequence
  Description of Artificial Sequence: Synthetic oligonucleotide
cuuguagagaggacgccug

SEQ ID NO: 302631 - RNA, 19 nt, Artificial Sequence
  Description of Artificial Sequence: Synthetic oligonucleotide
uuccguauuuccagcauau

SEQ ID NO: 302632 - RNA, 19 nt, Artificial Sequence
  Description of Artificial Sequence: Synthetic oligonucleotide
agacauaacuauagcguuc

SEQ ID NO: 302633 - RNA, 19 nt, Artificial Sequence
  Description of Artificial Sequence: Synthetic oligonucleotide
uugugacgacaaaugcuag

SEQ ID NO: 302634 - RNA, 19 nt, Artificial Sequence
  Description of Artificial Sequence: Synthetic oligonucleotide
acgccugacaucaaugggg

SEQ ID NO: 302635 - RNA, 19 nt, Artificial Sequence
  Description of Artificial Sequence: Synthetic oligonucleotide
acuuuguugcauacguggg

SEQ ID NO: 302636 - RNA, 19 nt, Artificial Sequence
  Description of Artificial Sequence: Synthetic oligonucleotide
aacuauaccauggcggauu

SEQ ID NO: 302637 - RNA, 19 nt, Artificial Sequence
  Description of Artificial Sequence: Synthetic oligonucleotide
aucaauaggcuugggcuuc

SEQ ID NO: 302638 - RNA, 19 nt, Artificial Sequence
  Description of Artificial Sequence: Synthetic oligonucleotide
aauacugguccaacagucu

SEQ ID NO: 302639 - RNA, 19 nt, Artificial Sequence
  Description of Artificial Sequence: Synthetic oligonucleotide
uuauaucucuucccgcaau

SEQ ID NO: 302640 - RNA, 19 nt, Artificial Sequence
  Description of Artificial Sequence: Synthetic oligonucleotide
cuagacgccggguuuggag

SEQ ID NO: 302641 - RNA, 19 nt, Artificial Sequence
  Description of Artificial Sequence: Synthetic oligonucleotide
ugcccaaucuggcauuaca

SEQ ID NO: 302642 - RNA, 19 nt, Artificial Sequence
  Description of Artificial Sequence: Synthetic oligonucleotide
ucuuugcaaacgacgucca

SEQ ID NO: 302643 - RNA, 19 nt, Artificial Sequence
  Description of Artificial Sequence: Synthetic oligonucleotide
ccuuaaauaugccaauuug

SEQ ID NO: 302644 - RNA, 19 nt, Artificial Sequence
  Description of Artificial Sequence: Synthetic oligonucleotide
guucuuguagagaggacgc

SEQ ID NO: 302645 - RNA, 19 nt, Artificial Sequence
  Description of Artificial Sequence: Synthetic oligonucleotide
guaugaucauguuugguua

SEQ ID NO: 302646 - RNA, 19 nt, Artificial Sequence
  Description of Artificial Sequence: Synthetic oligonucleotide
uggcggauuggccacuuug

SEQ ID NO: 302647 - RNA, 19 nt, Artificial Sequence
  Description of Artificial Sequence: Synthetic oligonucleotide
uauaucucuucccgcaauu

SEQ ID NO: 302648 - RNA, 19 nt, Artificial Sequence
  Description of Artificial Sequence: Synthetic oligonucleotide
cuuaacuucagccuggcau

SEQ ID NO: 302649 - RNA, 19 nt, Artificial Sequence
  Description of Artificial Sequence: Synthetic oligonucleotide
uccgcugucuauuacugua

SEQ ID NO: 302650 - RNA, 19 nt, Artificial Sequence
  Description of Artificial Sequence: Synthetic oligonucleotide
uugauacacguaagauuca

SEQ ID NO: 302651 - RNA, 19 nt, Artificial Sequence
  Description of Artificial Sequence: Synthetic oligonucleotide
cuaauuuuguauaucccgu

SEQ ID NO: 302652 - RNA, 19 nt, Artificial Sequence
  Description of Artificial Sequence: Synthetic oligonucleotide
agggauuccuacuucucga

SEQ ID NO: 302653 - RNA, 19 nt, Artificial Sequence
  Description of Artificial Sequence: Synthetic oligonucleotide
acaucggcuaacccaggag

SEQ ID NO: 302654 - RNA, 19 nt, Artificial Sequence
  Description of Artificial Sequence: Synthetic oligonucleotide
auuaggccuuaaauaugcc

SEQ ID NO: 302655 - RNA, 19 nt, Artificial Sequence
  Description of Artificial Sequence: Synthetic oligonucleotide
agcacauuggguaagucaa

SEQ ID NO: 302656 - RNA, 19 nt, Artificial Sequence
  Description of Artificial Sequence: Synthetic oligonucleotide
uaacccaggagacuagcuu

SEQ ID NO: 302657 - RNA, 19 nt, Artificial Sequence
  Description of Artificial Sequence: Synthetic oligonucleotide
cauugacccuccaaaccag

SEQ ID NO: 302658 - RNA, 19 nt, Artificial Sequence
  Description of Artificial Sequence: Synthetic oligonucleotide
ccguauuuccagcauaucc

SEQ ID NO: 302659 - RNA, 19 nt, Artificial Sequence
  Description of Artificial Sequence: Synthetic oligonucleotide
uagacgccggguuuggaga

SEQ ID NO: 302660 - RNA, 19 nt, Artificial Sequence
  Description of Artificial Sequence: Synthetic oligonucleotide
uuccuguaugaucauguuu

SEQ ID NO: 302661 - RNA, 19 nt, Artificial Sequence
  Description of Artificial Sequence: Synthetic oligonucleotide
gcaaacgacguccaaaguc

SEQ ID NO: 302662 - RNA, 19 nt, Artificial Sequence
  Description of Artificial Sequence: Synthetic oligonucleotide
gaucaccuacuuuugcaga

SEQ ID NO: 302663 - RNA, 19 nt, Artificial Sequence
  Description of Artificial Sequence: Synthetic oligonucleotide
ugauacacguaagauucaa

SEQ ID NO: 302664 - RNA, 19 nt, Artificial Sequence
  Description of Artificial Sequence: Synthetic oligonucleotide
uaauacagcugccgaugac

SEQ ID NO: 302665 - RNA, 19 nt, Artificial Sequence
  Description of Artificial Sequence: Synthetic oligonucleotide
aucuccgcugucuauuacu

SEQ ID NO: 302666 - RNA, 19 nt, Artificial Sequence
  Description of Artificial Sequence: Synthetic oligonucleotide
cuauagcguuccuucacug

SEQ ID NO: 302667 - RNA, 19 nt, Artificial Sequence
  Description of Artificial Sequence: Synthetic oligonucleotide
uauccuaauuuuguauauc

SEQ ID NO: 302668 - RNA, 19 nt, Artificial Sequence
  Description of Artificial Sequence: Synthetic oligonucleotide
agcauauccuaauuuugua

SEQ ID NO: 302669 - RNA, 19 nt, Artificial Sequence
  Description of Artificial Sequence: Synthetic oligonucleotide
acucuuugauugcaauaca

SEQ ID NO: 302670 - RNA, 19 nt, Artificial Sequence
  Description of Artificial Sequence: Synthetic oligonucleotide
uuccagcauauccuaauuu

SEQ ID NO: 302671 - RNA, 19 nt, Artificial Sequence
  Description of Artificial Sequence: Synthetic oligonucleotide
gguaagucaauaauauaca

SEQ ID NO: 302672 - RNA, 19 nt, Artificial Sequence
  Description of Artificial Sequence: Synthetic oligonucleotide
ugcaugugauguguaauaa

SEQ ID NO: 302673 - RNA, 19 nt, Artificial Sequence
  Description of Artificial Sequence: Synthetic oligonucleotide
cuauuacuguacccgucag

SEQ ID NO: 302674 - RNA, 19 nt, Artificial Sequence
  Description of Artificial Sequence: Synthetic oligonucleotide
uugacccuccaaaccagac

SEQ ID NO: 302675 - RNA, 19 nt, Artificial Sequence
  Description of Artificial Sequence: Synthetic oligonucleotide
auaccauggcggauuggcc

SEQ ID NO: 302676 - RNA, 19 nt, Artificial Sequence
  Description of Artificial Sequence: Synthetic oligonucleotide
ccgguguacuguuugaucc

SEQ ID NO: 302677 - RNA, 19 nt, Artificial Sequence
  Description of Artificial Sequence: Synthetic oligonucleotide
agucccaaucuucaacuau

SEQ ID NO: 302678 - RNA, 19 nt, Artificial Sequence
  Description of Artificial Sequence: Synthetic oligonucleotide
gauugugacgacaaaugcu

SEQ ID NO: 302679 - RNA, 19 nt, Artificial Sequence
  Description of Artificial Sequence: Synthetic oligonucleotide
aucggcuaacccaggagac

SEQ ID NO: 302680 - RNA, 19 nt, Artificial Sequence
  Description of Artificial Sequence: Synthetic oligonucleotide
gcucgagauaacuggaacc

SEQ ID NO: 302681 - RNA, 19 nt, Artificial Sequence
  Description of Artificial Sequence: Synthetic oligonucleotide
guccguuccgugcugcuag

SEQ ID NO: 302682 - RNA, 19 nt, Artificial Sequence
  Description of Artificial Sequence: Synthetic oligonucleotide
aaaguauguuauaucucuu

SEQ ID NO: 302683 - RNA, 19 nt, Artificial Sequence
  Description of Artificial Sequence: Synthetic oligonucleotide
cauaccgcugcaugugaug

SEQ ID NO: 302684 - RNA, 19 nt, Artificial Sequence
  Description of Artificial Sequence: Synthetic oligonucleotide
caugauccagauauuuuaa

SEQ ID NO: 302685 - RNA, 19 nt, Artificial Sequence
  Description of Artificial Sequence: Synthetic oligonucleotide
acuguacccgucagcgucc

SEQ ID NO: 302686 - RNA, 19 nt, Artificial Sequence
  Description of Artificial Sequence: Synthetic oligonucleotide
ugguuccguauuuccagca

SEQ ID NO: 302687 - RNA, 19 nt, Artificial Sequence
  Description of Artificial Sequence: Synthetic oligonucleotide
uuccuagauccaaagcauu

SEQ ID NO: 302688 - RNA, 19 nt, Artificial Sequence
  Description of Artificial Sequence: Synthetic oligonucleotide
uccuacuugucuugagguc

SEQ ID NO: 302689 - RNA, 19 nt, Artificial Sequence
  Description of Artificial Sequence: Synthetic oligonucleotide
agaaccguuggugggcuag

SEQ ID NO: 302690 - RNA, 19 nt, Artificial Sequence
  Description of Artificial Sequence: Synthetic oligonucleotide
cagcauugacccuccaaac

SEQ ID NO: 302691 - RNA, 19 nt, Artificial Sequence
  Description of Artificial Sequence: Synthetic oligonucleotide
uuggagacgggagcuagcu

SEQ ID NO: 302692 - RNA, 19 nt, Artificial Sequence
  Description of Artificial Sequence: Synthetic oligonucleotide
ucgguccugagggaggaag

SEQ ID NO: 302693 - RNA, 19 nt, Artificial Sequence
  Description of Artificial Sequence: Synthetic oligonucleotide
uccgguguacuguuugauc

SEQ ID NO: 302694 - RNA, 19 nt, Artificial Sequence
  Description of Artificial Sequence: Synthetic oligonucleotide
gcauugacccuccaaacca

SEQ ID NO: 302695 - RNA, 19 nt, Artificial Sequence
  Description of Artificial Sequence: Synthetic oligonucleotide
acuuuaggacauaacucca

SEQ ID NO: 302696 - RNA, 19 nt, Artificial Sequence
  Description of Artificial Sequence: Synthetic oligonucleotide
aaauaucagggcacagaaa

SEQ ID NO: 302697 - RNA, 19 nt, Artificial Sequence
  Description of Artificial Sequence: Synthetic oligonucleotide
caucggcuaacccaggaga

SEQ ID NO: 302698 - RNA, 19 nt, Artificial Sequence
  Description of Artificial Sequence: Synthetic oligonucleotide
gagauugcguugacuccgg

SEQ ID NO: 302699 - RNA, 19 nt, Artificial Sequence
  Description of Artificial Sequence: Synthetic oligonucleotide
ggagguucagucaaaagaa

SEQ ID NO: 302700 - RNA, 19 nt, Artificial Sequence
  Description of Artificial Sequence: Synthetic oligonucleotide
cuuuaggacauaacuccaa

SEQ ID NO: 302701 - RNA, 19 nt, Artificial Sequence
  Description of Artificial Sequence: Synthetic oligonucleotide
auaccgcugcaugugaugu

SEQ ID NO: 302702 - RNA, 19 nt, Artificial Sequence
  Description of Artificial Sequence: Synthetic oligonucleotide
uguagagaggacgccugac

SEQ ID NO: 302703 - RNA, 19 nt, Artificial Sequence
  Description of Artificial Sequence: Synthetic oligonucleotide
ucccgcaauuggaaugugu

SEQ ID NO: 302704 - RNA, 19 nt, Artificial Sequence
  Description of Artificial Sequence: Synthetic oligonucleotide
aaccguuggugggcuaggg

SEQ ID NO: 302705 - RNA, 19 nt, Artificial Sequence
  Description of Artificial Sequence: Synthetic oligonucleotide
ccagcauauccuaauuuug

SEQ ID NO: 302706 - RNA, 19 nt, Artificial Sequence
  Description of Artificial Sequence: Synthetic oligonucleotide
ucccugaacaugguugaac

SEQ ID NO: 302707 - RNA, 19 nt, Artificial Sequence
  Description of Artificial Sequence: Synthetic oligonucleotide
ucucauagccaacgucaau

SEQ ID NO: 302708 - RNA, 19 nt, Artificial Sequence
  Description of Artificial Sequence: Synthetic oligonucleotide
ucgagauaacuggaaccca

SEQ ID NO: 302709 - RNA, 19 nt, Artificial Sequence
  Description of Artificial Sequence: Synthetic oligonucleotide
acgacguccaaagucccug

SEQ ID NO: 302710 - RNA, 19 nt, Artificial Sequence
  Description of Artificial Sequence: Synthetic oligonucleotide
agguugaguaaaaucugga

SEQ ID NO: 302711 - RNA, 19 nt, Artificial Sequence
  Description of Artificial Sequence: Synthetic oligonucleotide
acuagcuuccuagauccaa

SEQ ID NO: 302712 - RNA, 19 nt, Artificial Sequence
  Description of Artificial Sequence: Synthetic oligonucleotide
uugacuccgguguacuguu

SEQ ID NO: 302713 - RNA, 19 nt, Artificial Sequence
  Description of Artificial Sequence: Synthetic oligonucleotide
agggcagacaucggcuaac

SEQ ID NO: 302714 - RNA, 19 nt, Artificial Sequence
  Description of Artificial Sequence: Synthetic oligonucleotide
gaugcagcuaaggcaagaa

SEQ ID NO: 302715 - RNA, 19 nt, Artificial Sequence
  Description of Artificial Sequence: Synthetic oligonucleotide
cugagauagguugaguaaa

SEQ ID NO: 302716 - RNA, 19 nt, Artificial Sequence
  Description of Artificial Sequence: Synthetic oligonucleotide
acaguucguuucaaaucuc

SEQ ID NO: 302717 - RNA, 19 nt, Artificial Sequence
  Description of Artificial Sequence: Synthetic oligonucleotide
uccgugcugcuagacgccg

SEQ ID NO: 302718 - RNA, 19 nt, Artificial Sequence
  Description of Artificial Sequence: Synthetic oligonucleotide
acuguuugauccacuuuga

SEQ ID NO: 302719 - RNA, 19 nt, Artificial Sequence
  Description of Artificial Sequence: Synthetic oligonucleotide
gauacacguaagauucaaa

SEQ ID NO: 302720 - RNA, 19 nt, Artificial Sequence
  Description of Artificial Sequence: Synthetic oligonucleotide
ccguuggugggcuagggag

SEQ ID NO: 302721 - RNA, 19 nt, Artificial Sequence
  Description of Artificial Sequence: Synthetic oligonucleotide
caccuacuuuugcagacuc

SEQ ID NO: 302722 - RNA, 19 nt, Artificial Sequence
  Description of Artificial Sequence: Synthetic oligonucleotide
gugauguguaauaacuugu

SEQ ID NO: 302723 - RNA, 19 nt, Artificial Sequence
  Description of Artificial Sequence: Synthetic oligonucleotide
gcagacauaacuauagcgu

SEQ ID NO: 302724 - RNA, 19 nt, Artificial Sequence
  Description of Artificial Sequence: Synthetic oligonucleotide
ccagacugcauaccgcugc

SEQ ID NO: 302725 - RNA, 19 nt, Artificial Sequence
  Description of Artificial Sequence: Synthetic oligonucleotide
guucguuucaaaucucuuu

SEQ ID NO: 302726 - RNA, 19 nt, Artificial Sequence
  Description of Artificial Sequence: Synthetic oligonucleotide
accgcugcaugugaugugu

SEQ ID NO: 302727 - RNA, 19 nt, Artificial Sequence
  Description of Artificial Sequence: Synthetic oligonucleotide
acuccgguguacuguuuga

SEQ ID NO: 302728 - RNA, 19 nt, Artificial Sequence
  Description of Artificial Sequence: Synthetic oligonucleotide
gaaccguuggugggcuagg

SEQ ID NO: 302729 - RNA, 19 nt, Artificial Sequence
  Description of Artificial Sequence: Synthetic oligonucleotide
cagcauauccuaauuuugu

SEQ ID NO: 302730 - RNA, 19 nt, Artificial Sequence
  Description of Artificial Sequence: Synthetic oligonucleotide
ugcuagacgccggguuugg

SEQ ID NO: 302731 - RNA, 19 nt, Artificial Sequence
  Description of Artificial Sequence: Synthetic oligonucleotide
guaauaacuuguacaucaa

SEQ ID NO: 302732 - RNA, 19 nt, Artificial Sequence
  Description of Artificial Sequence: Synthetic oligonucleotide
cagcuaaggcaagaacagc

SEQ ID NO: 302733 - RNA, 19 nt, Artificial Sequence
  Description of Artificial Sequence: Synthetic oligonucleotide
ggaauguguuuaauacagc

SEQ ID NO: 302734 - RNA, 19 nt, Artificial Sequence
  Description of Artificial Sequence: Synthetic oligonucleotide
cuacuugucuugaggucca

SEQ ID NO: 302735 - RNA, 19 nt, Artificial Sequence
  Description of Artificial Sequence: Synthetic oligonucleotide
uggccacuuuguugcauac

SEQ ID NO: 302736 - RNA, 19 nt, Artificial Sequence
  Description of Artificial Sequence: Synthetic oligonucleotide
aacgacguccaaagucccu

SEQ ID NO: 302737 - RNA, 19 nt, Artificial Sequence
  Description of Artificial Sequence: Synthetic oligonucleotide
uaccgcugcaugugaugug

SEQ ID NO: 302738 - RNA, 19 nt, Artificial Sequence
  Description of Artificial Sequence: Synthetic oligonucleotide
guuccguauuuccagcaua

SEQ ID NO: 302739 - RNA, 19 nt, Artificial Sequence
  Description of Artificial Sequence: Synthetic oligonucleotide
cauacccuucagccacagg

SEQ ID NO: 302740 - RNA, 19 nt, Artificial Sequence
  Description of Artificial Sequence: Synthetic oligonucleotide
aggacgccugacaucaaug

SEQ ID NO: 302741 - RNA, 19 nt, Artificial Sequence
  Description of Artificial Sequence: Synthetic oligonucleotide
gcuagcugaccaugcacug

SEQ ID NO: 302742 - RNA, 19 nt, Artificial Sequence
  Description of Artificial Sequence: Synthetic oligonucleotide
agacgggagcuagcugacc

SEQ ID NO: 302743 - RNA, 19 nt, Artificial Sequence
  Description of Artificial Sequence: Synthetic oligonucleotide
ucggcuaacccaggagacu

SEQ ID NO: 302744 - RNA, 19 nt, Artificial Sequence
  Description of Artificial Sequence: Synthetic oligonucleotide
ggagauccaguuaucaaaa

SEQ ID NO: 302745 - RNA, 19 nt, Artificial Sequence
  Description of Artificial Sequence: Synthetic oligonucleotide
uuguugcauacguggguuu

SEQ ID NO: 302746 - RNA, 19 nt, Artificial Sequence
  Description of Artificial Sequence: Synthetic oligonucleotide
accguuggugggcuaggga

SEQ ID NO: 302747 - RNA, 19 nt, Artificial Sequence
  Description of Artificial Sequence: Synthetic oligonucleotide
cauagccaacgucaaugga

SEQ ID NO: 302748 - RNA, 19 nt, Artificial Sequence
  Description of Artificial Sequence: Synthetic oligonucleotide
gggcagacauaacuauagc

SEQ ID NO: 302749 - RNA, 19 nt, Artificial Sequence
  Description of Artificial Sequence: Synthetic oligonucleotide
gcccaaucuggcauuacag

SEQ ID NO: 302750 - RNA, 19 nt, Artificial Sequence
  Description of Artificial Sequence: Synthetic oligonucleotide
cagacauaacuauagcguu

SEQ ID NO: 302751 - RNA, 19 nt, Artificial Sequence
  Description of Artificial Sequence: Synthetic oligonucleotide
caguugcugaauaaaguau

SEQ ID NO: 302752 - RNA, 19 nt, Artificial Sequence
  Description of Artificial Sequence: Synthetic oligonucleotide
acauauuaguuaacuuaua

SEQ ID NO: 302753 - RNA, 19 nt, Artificial Sequence
  Description of Artificial Sequence: Synthetic oligonucleotide
ugcuauccacccgcugugc

SEQ ID NO: 302754 - RNA, 19 nt, Artificial Sequence
  Description of Artificial Sequence: Synthetic oligonucleotide
gucuauuacuguacccguc

SEQ ID NO: 302755 - RNA, 19 nt, Artificial Sequence
  Description of Artificial Sequence: Synthetic oligonucleotide
uggcaucuacaguucguuu

SEQ ID NO: 302756 - RNA, 19 nt, Artificial Sequence
  Description of Artificial Sequence: Synthetic oligonucleotide
cuauaccauggcggauugg

SEQ ID NO: 302757 - RNA, 19 nt, Artificial Sequence
  Description of Artificial Sequence: Synthetic oligonucleotide
gguugaguaaaaucuggau

SEQ ID NO: 302758 - RNA, 19 nt, Artificial Sequence
  Description of Artificial Sequence: Synthetic oligonucleotide
caggagggauuccuacuuc

SEQ ID NO: 302759 - RNA, 19 nt, Artificial Sequence
  Description of Artificial Sequence: Synthetic oligonucleotide
gccaagucccaugaggcug

SEQ ID NO: 302760 - RNA, 19 nt, Artificial Sequence
  Description of Artificial Sequence: Synthetic oligonucleotide
aguucguuucaaaucucuu

SEQ ID NO: 302761 - RNA, 19 nt, Artificial Sequence
  Description of Artificial Sequence: Synthetic oligonucleotide
guaauggucuucaggcucu

SEQ ID NO: 302762 - RNA, 19 nt, Artificial Sequence
  Description of Artificial Sequence: Synthetic oligonucleotide
guggcauacuugguagaac

SEQ ID NO: 302763 - RNA, 19 nt, Artificial Sequence
  Description of Artificial Sequence: Synthetic oligonucleotide
acgccggguuuggagacgg

SEQ ID NO: 302764 - RNA, 19 nt, Artificial Sequence
  Description of Artificial Sequence: Synthetic oligonucleotide
ggacauaacuccaaacacu

SEQ ID NO: 302765 - RNA, 19 nt, Artificial Sequence
  Description of Artificial Sequence: Synthetic oligonucleotide
gagacgggagcuagcugac

SEQ ID NO: 302766 - RNA, 19 nt, Artificial Sequence
  Description of Artificial Sequence: Synthetic oligonucleotide
guugacuccgguguacugu

SEQ ID NO: 302767 - RNA, 19 nt, Artificial Sequence
  Description of Artificial Sequence: Synthetic oligonucleotide
gacgccggguuuggagacg

SEQ ID NO: 302768 - RNA, 19 nt, Artificial Sequence
  Description of Artificial Sequence: Synthetic oligonucleotide
uccguauuuccagcauauc

SEQ ID NO: 302769 - RNA, 19 nt, Artificial Sequence
  Description of Artificial Sequence: Synthetic oligonucleotide
ccagcauugacccuccaaa

SEQ ID NO: 302770 - RNA, 19 nt, Artificial Sequence
  Description of Artificial Sequence: Synthetic oligonucleotide
gaccaugcacuggccuggg

SEQ ID NO: 302771 - RNA, 19 nt, Artificial Sequence
  Description of Artificial Sequence: Synthetic oligonucleotide
agauugcguugacuccggu

SEQ ID NO: 302772 - RNA, 19 nt, Artificial Sequence
  Description of Artificial Sequence: Synthetic oligonucleotide
gacguccaaagucccugaa

SEQ ID NO: 302773 - RNA, 19 nt, Artificial Sequence
  Description of Artificial Sequence: Synthetic oligonucleotide
ccaauuuggguaaucacau

SEQ ID NO: 302774 - RNA, 19 nt, Artificial Sequence
  Description of Artificial Sequence: Synthetic oligonucleotide
cugcuagacgccggguuug

SEQ ID NO: 302775 - RNA, 19 nt, Artificial Sequence
  Description of Artificial Sequence: Synthetic oligonucleotide
caacgucaauggagaacuc

SEQ ID NO: 302776 - RNA, 19 nt, Artificial Sequence
  Description of Artificial Sequence: Synthetic oligonucleotide
gguccaacagucuugucuu

SEQ ID NO: 302777 - RNA, 19 nt, Artificial Sequence
  Description of Artificial Sequence: Synthetic oligonucleotide
ggagcuagcugaccaugca

SEQ ID NO: 302778 - RNA, 19 nt, Artificial Sequence
  Description of Artificial Sequence: Synthetic oligonucleotide
uccguuccgugcugcuaga

SEQ ID NO: 302779 - RNA, 19 nt, Artificial Sequence
  Description of Artificial Sequence: Synthetic oligonucleotide
gagauccaguuaucaaaau

SEQ ID NO: 302780 - RNA, 19 nt, Artificial Sequence
  Description of Artificial Sequence: Synthetic oligonucleotide
cacguaagauucaaauauu

SEQ ID NO: 302781 - RNA, 19 nt, Artificial Sequence
  Description of Artificial Sequence: Synthetic oligonucleotide
cuaacccaggagacuagcu

SEQ ID NO: 302782 - RNA, 19 nt, Artificial Sequence
  Description of Artificial Sequence: Synthetic oligonucleotide
gcuaacccaggagacuagc

SEQ ID NO: 302783 - RNA, 19 nt, Artificial Sequence
  Description of Artificial Sequence: Synthetic oligonucleotide
cugggcuugaucaccuacu

SEQ ID NO: 302784 - RNA, 19 nt, Artificial Sequence
  Description of Artificial Sequence: Synthetic oligonucleotide
cagccgucccgccaucuuc

SEQ ID NO: 302785 - RNA, 19 nt, Artificial Sequence
  Description of Artificial Sequence: Synthetic oligonucleotide
ccaacgucaauggagaacu

SEQ ID NO: 302786 - RNA, 19 nt, Artificial Sequence
  Description of Artificial Sequence: Synthetic oligonucleotide
agacaucggcuaacccagg

SEQ ID NO: 302787 - RNA, 19 nt, Artificial Sequence
  Description of Artificial Sequence: Synthetic oligonucleotide
accuacuuuugcagacucu

SEQ ID NO: 302788 - RNA, 19 nt, Artificial Sequence
  Description of Artificial Sequence: Synthetic oligonucleotide
ggccacuuuguugcauacg

SEQ ID NO: 302789 - RNA, 19 nt, Artificial Sequence
  Description of Artificial Sequence: Synthetic oligonucleotide
cagacugcauaccgcugca

SEQ ID NO: 302790 - RNA, 19 nt, Artificial Sequence
  Description of Artificial Sequence: Synthetic oligonucleotide
caaaugcuagguccaauuu

SEQ ID NO: 302791 - RNA, 19 nt, Artificial Sequence
  Description of Artificial Sequence: Synthetic oligonucleotide
cgaugacauacccuucagc

SEQ ID NO: 302792 - RNA, 19 nt, Artificial Sequence
  Description of Artificial Sequence: Synthetic oligonucleotide
cauaacuauagcguuccuu

SEQ ID NO: 302793 - RNA, 19 nt, Artificial Sequence
  Description of Artificial Sequence: Synthetic oligonucleotide
cguuccgugcugcuagacg

SEQ ID NO: 302794 - RNA, 19 nt, Artificial Sequence
  Description of Artificial Sequence: Synthetic oligonucleotide
gggagcuagcugaccaugc

SEQ ID NO: 302795 - RNA, 19 nt, Artificial Sequence
  Description of Artificial Sequence: Synthetic oligonucleotide
cagcucgagauaacuggaa

SEQ ID NO: 302796 - RNA, 19 nt, Artificial Sequence
  Description of Artificial Sequence: Synthetic oligonucleotide
uucccgcaauuggaaugug

SEQ ID NO: 302797 - RNA, 19 nt, Artificial Sequence
  Description of Artificial Sequence: Synthetic oligonucleotide
cuucccgcaauuggaaugu

SEQ ID NO: 302798 - RNA, 19 nt, Artificial Sequence
  Description of Artificial Sequence: Synthetic oligonucleotide
ccgaugacauacccuucag

SEQ ID NO: 302799 - RNA, 19 nt, Artificial Sequence
  Description of Artificial Sequence: Synthetic oligonucleotide
gcuugggcuucaaucuacc

SEQ ID NO: 302800 - RNA, 19 nt, Artificial Sequence
  Description of Artificial Sequence: Synthetic oligonucleotide
ucccuguuuucuggaguau

SEQ ID NO: 302801 - RNA, 19 nt, Artificial Sequence
  Description of Artificial Sequence: Synthetic oligonucleotide
cagacucuuugauugcaau

SEQ ID NO: 302802 - RNA, 19 nt, Artificial Sequence
  Description of Artificial Sequence: Synthetic oligonucleotide
ggaaucucucauagccaac

SEQ ID NO: 302803 - RNA, 19 nt, Artificial Sequence
  Description of Artificial Sequence: Synthetic oligonucleotide
ugacuccgguguacuguuu

SEQ ID NO: 302804 - RNA, 19 nt, Artificial Sequence
  Description of Artificial Sequence: Synthetic oligonucleotide
agugcccaaucuggcauua

SEQ ID NO: 302805 - RNA, 19 nt, Artificial Sequence
  Description of Artificial Sequence: Synthetic oligonucleotide
ccgucagcguccucucucc

SEQ ID NO: 302806 - RNA, 19 nt, Artificial Sequence
  Description of Artificial Sequence: Synthetic oligonucleotide
gacaaaugcuagguccaau

SEQ ID NO: 302807 - RNA, 19 nt, Artificial Sequence
  Description of Artificial Sequence: Synthetic oligonucleotide
aucccgugccacaguccac

SEQ ID NO: 302808 - RNA, 19 nt, Artificial Sequence
  Description of Artificial Sequence: Synthetic oligonucleotide
cuuugagauugcguugacu

SEQ ID NO: 302809 - RNA, 19 nt, Artificial Sequence
  Description of Artificial Sequence: Synthetic oligonucleotide
ggagacuagcuuccuagau

SEQ ID NO: 302810 - RNA, 19 nt, Artificial Sequence
  Description of Artificial Sequence: Synthetic oligonucleotide
cacaggccggcagccgucc

SEQ ID NO: 302811 - RNA, 19 nt, Artificial Sequence
  Description of Artificial Sequence: Synthetic oligonucleotide
gacuagcuuccuagaucca

SEQ ID NO: 302812 - RNA, 19 nt, Artificial Sequence
  Description of Artificial Sequence: Synthetic oligonucleotide
ccuacuucucgaucucgca

SEQ ID NO: 302813 - RNA, 19 nt, Artificial Sequence
  Description of Artificial Sequence: Synthetic oligonucleotide
gcagcucgagauaacugga

SEQ ID NO: 302814 - RNA, 19 nt, Artificial Sequence
  Description of Artificial Sequence: Synthetic oligonucleotide
gggcuagggaggguggagc

SEQ ID NO: 302815 - RNA, 19 nt, Artificial Sequence
  Description of Artificial Sequence: Synthetic oligonucleotide
auaugccaauuuggguaau

SEQ ID NO: 302816 - RNA, 19 nt, Artificial Sequence
  Description of Artificial Sequence: Synthetic oligonucleotide
gccgccguccguuccgugc

SEQ ID NO: 302817 - RNA, 19 nt, Artificial Sequence
  Description of Artificial Sequence: Synthetic oligonucleotide
caauacaugaugggaugau

SEQ ID NO: 302818 - RNA, 19 nt, Artificial Sequence
  Description of Artificial Sequence: Synthetic oligonucleotide
guauaucccgugccacagu

SEQ ID NO: 302819 - RNA, 19 nt, Artificial Sequence
  Description of Artificial Sequence: Synthetic oligonucleotide
aucuggcauuacagagcuc

SEQ ID NO: 302820 - RNA, 19 nt, Artificial Sequence
  Description of Artificial Sequence: Synthetic oligonucleotide
gggcagacaucggcuaacc

SEQ ID NO: 302821 - RNA, 19 nt, Artificial Sequence
  Description of Artificial Sequence: Synthetic oligonucleotide
ggcuaacccaggagacuag

SEQ ID NO: 302822 - RNA, 19 nt, Artificial Sequence
  Description of Artificial Sequence: Synthetic oligonucleotide
cuguaugaucauguuuggu

SEQ ID NO: 302823 - RNA, 19 nt, Artificial Sequence
  Description of Artificial Sequence: Synthetic oligonucleotide
uguacccgucagcguccuc

SEQ ID NO: 302824 - RNA, 19 nt, Artificial Sequence
  Description of Artificial Sequence: Synthetic oligonucleotide
agacugcauaccgcugcau

SEQ ID NO: 302825 - RNA, 19 nt, Artificial Sequence
  Description of Artificial Sequence: Synthetic oligonucleotide
caauuuggguaaucacauu

SEQ ID NO: 302826 - RNA, 19 nt, Artificial Sequence
  Description of Artificial Sequence: Synthetic oligonucleotide
ccucgcuuaacuucagccu

SEQ ID NO: 302827 - RNA, 19 nt, Artificial Sequence
  Description of Artificial Sequence: Synthetic oligonucleotide
gcuuaacuucagccuggca

SEQ ID NO: 302828 - RNA, 19 nt, Artificial Sequence
  Description of Artificial Sequence: Synthetic oligonucleotide
agggacuguucaggaggga

SEQ ID NO: 302829 - RNA, 19 nt, Artificial Sequence
  Description of Artificial Sequence: Synthetic oligonucleotide
cacucacagugcccaaucu

SEQ ID NO: 302830 - RNA, 19 nt, Artificial Sequence
  Description of Artificial Sequence: Synthetic oligonucleotide
cucuucccgcaauuggaau

SEQ ID NO: 302831 - RNA, 19 nt, Artificial Sequence
  Description of Artificial Sequence: Synthetic oligonucleotide
cuauccacccgcugugcuu

SEQ ID NO: 302832 - RNA, 19 nt, Artificial Sequence
  Description of Artificial Sequence: Synthetic oligonucleotide
gguuccguauuuccagcau

SEQ ID NO: 302833 - RNA, 19 nt, Artificial Sequence
  Description of Artificial Sequence: Synthetic oligonucleotide
gugggcuagggagggugga

SEQ ID NO: 302834 - RNA, 19 nt, Artificial Sequence
  Description of Artificial Sequence: Synthetic oligonucleotide
auggcggauuggccacuuu

SEQ ID NO: 302835 - RNA, 19 nt, Artificial Sequence
  Description of Artificial Sequence: Synthetic oligonucleotide
caccagagaggacaauguu

SEQ ID NO: 302836 - RNA, 19 nt, Artificial Sequence
  Description of Artificial Sequence: Synthetic oligonucleotide
gagaaccguuggugggcua

SEQ ID NO: 302837 - RNA, 19 nt, Artificial Sequence
  Description of Artificial Sequence: Synthetic oligonucleotide
ccgugcugcuagacgccgg

SEQ ID NO: 302838 - RNA, 19 nt, Artificial Sequence
  Description of Artificial Sequence: Synthetic oligonucleotide
ggguuuggagacgggagcu

SEQ ID NO: 302839 - RNA, 19 nt, Artificial Sequence
  Description of Artificial Sequence: Synthetic oligonucleotide
cuccgcugucuauuacugu

SEQ ID NO: 302840 - RNA, 19 nt, Artificial Sequence
  Description of Artificial Sequence: Synthetic oligonucleotide
gcuauccacccgcugugcu

SEQ ID NO: 302841 - RNA, 19 nt, Artificial Sequence
  Description of Artificial Sequence: Synthetic oligonucleotide
gccggguuuggagacggga

SEQ ID NO: 302842 - RNA, 19 nt, Artificial Sequence
  Description of Artificial Sequence: Synthetic oligonucleotide
gugcccaaucuggcauuac

SEQ ID NO: 302843 - RNA, 19 nt, Artificial Sequence
  Description of Artificial Sequence: Synthetic oligonucleotide
cguugacuccgguguacug

SEQ ID NO: 302844 - RNA, 19 nt, Artificial Sequence
  Description of Artificial Sequence: Synthetic oligonucleotide
ggcggauuggccacuuugu

SEQ ID NO: 302845 - RNA, 19 nt, Artificial Sequence
  Description of Artificial Sequence: Synthetic oligonucleotide
gggacuguucaggagggau

SEQ ID NO: 302846 - RNA, 19 nt, Artificial Sequence
  Description of Artificial Sequence: Synthetic oligonucleotide
cccgcaauuggaauguguu

SEQ ID NO: 302847 - RNA, 19 nt, Artificial Sequence
  Description of Artificial Sequence: Synthetic oligonucleotide
ggccaagucccaugaggcu

SEQ ID NO: 302848 - RNA, 19 nt, Artificial Sequence
  Description of Artificial Sequence: Synthetic oligonucleotide
ggggcaguucugaaugacu

SEQ ID NO: 302849 - RNA, 19 nt, Artificial Sequence
  Description of Artificial Sequence: Synthetic oligonucleotide
cgguguacuguuugaucca

SEQ ID NO: 302850 - RNA, 19 nt, Artificial Sequence
  Description of Artificial Sequence: Synthetic oligonucleotide
gcugccgaugacauacccu

SEQ ID NO: 302851 - RNA, 19 nt, Artificial Sequence
  Description of Artificial Sequence: Synthetic oligonucleotide
caacuauaccauggcggau

SEQ ID NO: 302852 - RNA, 19 nt, Artificial Sequence
  Description of Artificial Sequence: Synthetic oligonucleotide
auccacccgcugugcuuuu

SEQ ID NO: 302853 - RNA, 19 nt, Artificial Sequence
  Description of Artificial Sequence: Synthetic oligonucleotide
ggacuguucaggagggauu

SEQ ID NO: 302854 - RNA, 19 nt, Artificial Sequence
  Description of Artificial Sequence: Synthetic oligonucleotide
cuccgguguacuguuugau

SEQ ID NO: 302855 - RNA, 19 nt, Artificial Sequence
  Description of Artificial Sequence: Synthetic oligonucleotide
gccguccguuccgugcugc

SEQ ID NO: 302856 - RNA, 19 nt, Artificial Sequence
  Description of Artificial Sequence: Synthetic oligonucleotide
ccgugccacaguccaccac

SEQ ID NO: 302857 - RNA, 19 nt, Artificial Sequence
  Description of Artificial Sequence: Synthetic oligonucleotide
gcuagacgccggguuugga

SEQ ID NO: 302858 - RNA, 19 nt, Artificial Sequence
  Description of Artificial Sequence: Synthetic oligonucleotide
ccguuccgugcugcuagac

SEQ ID NO: 302859 - RNA, 19 nt, Artificial Sequence
  Description of Artificial Sequence: Synthetic oligonucleotide
gcguugacuccgguguacu

SEQ ID NO: 302860 - RNA, 19 nt, Artificial Sequence
  Description of Artificial Sequence: Synthetic oligonucleotide
ccgcaauuggaauguguuu

SEQ ID NO: 302861 - RNA, 19 nt, Artificial Sequence
  Description of Artificial Sequence: Synthetic oligonucleotide
cggcuaacccaggagacua

SEQ ID NO: 302862 - RNA, 19 nt, Artificial Sequence
  Description of Artificial Sequence: Synthetic oligonucleotide
gcauaccgcugcaugugau

SEQ ID NO: 302863 - RNA, 19 nt, Artificial Sequence
  Description of Artificial Sequence: Synthetic oligonucleotide
cuguacccgucagcguccu

SEQ ID NO: 302864 - RNA, 19 nt, Artificial Sequence
  Description of Artificial Sequence: Synthetic oligonucleotide
cucgguccugagggaggaa

SEQ ID NO: 302865 - RNA, 19 nt, Artificial Sequence
  Description of Artificial Sequence: Synthetic oligonucleotide
cauggcggauuggccacuu

SEQ ID NO: 302866 - RNA, 19 nt, Artificial Sequence
  Description of Artificial Sequence: Synthetic oligonucleotide
cgacaaaugcuagguccaa

SEQ ID NO: 302867 - RNA, 19 nt, Artificial Sequence
  Description of Artificial Sequence: Synthetic oligonucleotide
ccgcugcaugugaugugua

SEQ ID NO: 302868 - RNA, 19 nt, Artificial Sequence
  Description of Artificial Sequence: Synthetic oligonucleotide
ccgccguccguuccgugcu

SEQ ID NO: 302869 - RNA, 19 nt, Artificial Sequence
  Description of Artificial Sequence: Synthetic oligonucleotide
gggccgcccucgguccuga

SEQ ID NO: 302870 - RNA, 19 nt, Artificial Sequence
  Description of Artificial Sequence: Synthetic oligonucleotide
cgccguccguuccgugcug

SEQ ID NO: 302871 - RNA, 19 nt, Artificial Sequence
  Description of Artificial Sequence: Synthetic oligonucleotide
cgucagcguccucucuccu

SEQ ID NO: 302872 - RNA, 19 nt, Artificial Sequence
  Description of Artificial Sequence: Synthetic oligonucleotide
cggcagccgucccgccauc

SEQ ID NO: 302873 - RNA, 19 nt, Artificial Sequence
  Description of Artificial Sequence: Synthetic oligonucleotide
aaaaguauaaacugccagg

SEQ ID NO: 302874 - RNA, 19 nt, Artificial Sequence
  Description of Artificial Sequence: Synthetic oligonucleotide
ugucauagaacucagaaug

SEQ ID NO: 302875 - RNA, 19 nt, Artificial Sequence
  Description of Artificial Sequence: Synthetic oligonucleotide
ugaaacaucccucagauga

SEQ ID NO: 302876 - RNA, 19 nt, Artificial Sequence
  Description of Artificial Sequence: Synthetic oligonucleotide
aguuuaauagccuauaucu

SEQ ID NO: 302877 - RNA, 19 nt, Artificial Sequence
  Description of Artificial Sequence: Synthetic oligonucleotide
aguauuaauacccacagcu

SEQ ID NO: 302878 - RNA, 19 nt, Artificial Sequence
  Description of Artificial Sequence: Synthetic oligonucleotide
ucagugauaagaauugugg

SEQ ID NO: 302879 - RNA, 19 nt, Artificial Sequence
  Description of Artificial Sequence: Synthetic oligonucleotide
aaagucaugacuucaagcu

SEQ ID NO: 302880 - RNA, 19 nt, Artificial Sequence
  Description of Artificial Sequence: Synthetic oligonucleotide
aaaacuuuaucacagguau

SEQ ID NO: 302881 - RNA, 19 nt, Artificial Sequence
  Description of Artificial Sequence: Synthetic oligonucleotide
auaagaauuguggagaggc

SEQ ID NO: 302882 - RNA, 19 nt, Artificial Sequence
  Description of Artificial Sequence: Synthetic oligonucleotide
uaauacuaguuuaauagcc

SEQ ID NO: 302883 - RNA, 19 nt, Artificial Sequence
  Description of Artificial Sequence: Synthetic oligonucleotide
aaucuauccaugauaaaac

SEQ ID NO: 302884 - RNA, 19 nt, Artificial Sequence
  Description of Artificial Sequence: Synthetic oligonucleotide
uacggagccaguuauaagg

SEQ ID NO: 302885 - RNA, 19 nt, Artificial Sequence
  Description of Artificial Sequence: Synthetic oligonucleotide
agguauauuguacaugugg

SEQ ID NO: 302886 - RNA, 19 nt, Artificial Sequence
  Description of Artificial Sequence: Synthetic oligonucleotide
aggacaaugucauagaacu

SEQ ID NO: 302887 - RNA, 19 nt, Artificial Sequence
  Description of Artificial Sequence: Synthetic oligonucleotide
ugauaaaaccaagacaagg

SEQ ID NO: 302888 - RNA, 19 nt, Artificial Sequence
  Description of Artificial Sequence: Synthetic oligonucleotide
aacauaugggccucacugc

SEQ ID NO: 302889 - RNA, 19 nt, Artificial Sequence
  Description of Artificial Sequence: Synthetic oligonucleotide
aaauuuagaggguggauga

SEQ ID NO: 302890 - RNA, 19 nt, Artificial Sequence
  Description of Artificial Sequence: Synthetic oligonucleotide
cauaguaaggauaggacag

SEQ ID NO: 302891 - RNA, 19 nt, Artificial Sequence
  Description of Artificial Sequence: Synthetic oligonucleotide
agugauaagaauuguggag

SEQ ID NO: 302892 - RNA, 19 nt, Artificial Sequence
  Description of Artificial Sequence: Synthetic oligonucleotide
ugaccuugcaccuucaaag

SEQ ID NO: 302893 - RNA, 19 nt, Artificial Sequence
  Description of Artificial Sequence: Synthetic oligonucleotide
gauugaaauccauagcgcc

SEQ ID NO: 302894 - RNA, 19 nt, Artificial Sequence
  Description of Artificial Sequence: Synthetic oligonucleotide
uauuaauacccacagcugu

SEQ ID NO: 302895 - RNA, 19 nt, Artificial Sequence
  Description of Artificial Sequence: Synthetic oligonucleotide
aucuauccaugauaaaacc

SEQ ID NO: 302896 - RNA, 19 nt, Artificial Sequence
  Description of Artificial Sequence: Synthetic oligonucleotide
agaguaagacaguuuaaac

SEQ ID NO: 302897 - RNA, 19 nt, Artificial Sequence
  Description of Artificial Sequence: Synthetic oligonucleotide
ugugcauucucagagauug

SEQ ID NO: 302898 - RNA, 19 nt, Artificial Sequence
  Description of Artificial Sequence: Synthetic oligonucleotide
gacaaaacgcuucaugugc

SEQ ID NO: 302899 - RNA, 19 nt, Artificial Sequence
  Description of Artificial Sequence: Synthetic oligonucleotide
uuaaacacccuccccaaag

SEQ ID NO: 302900 - RNA, 19 nt, Artificial Sequence
  Description of Artificial Sequence: Synthetic oligonucleotide
ucuauggacacuacggagc

SEQ ID NO: 302901 - RNA, 19 nt, Artificial Sequence
  Description of Artificial Sequence: Synthetic oligonucleotide
uuggauguaucucagcuca

SEQ ID NO: 302902 - RNA, 19 nt, Artificial Sequence
  Description of Artificial Sequence: Synthetic oligonucleotide
aacacuuugcugaugcagc

SEQ ID NO: 302903 - RNA, 19 nt, Artificial Sequence
  Description of Artificial Sequence: Synthetic oligonucleotide
acagguauauuguacaugu

SEQ ID NO: 302904 - RNA, 19 nt, Artificial Sequence
  Description of Artificial Sequence: Synthetic oligonucleotide
uuuacaauuaauguuguua

SEQ ID NO: 302905 - RNA, 19 nt, Artificial Sequence
  Description of Artificial Sequence: Synthetic oligonucleotide
aguuugguuaagcagucgg

SEQ ID NO: 302906 - RNA, 19 nt, Artificial Sequence
  Description of Artificial Sequence: Synthetic oligonucleotide
uuuagaggguggaugacag

SEQ ID NO: 302907 - RNA, 19 nt, Artificial Sequence
  Description of Artificial Sequence: Synthetic oligonucleotide
aguuaugccagacaucuug

SEQ ID NO: 302908 - RNA, 19 nt, Artificial Sequence
  Description of Artificial Sequence: Synthetic oligonucleotide
uguuaaucucuuacuaugc

SEQ ID NO: 302909 - RNA, 19 nt, Artificial Sequence
  Description of Artificial Sequence: Synthetic oligonucleotide
ucauguugauuauaaacca

SEQ ID NO: 302910 - RNA, 19 nt, Artificial Sequence
  Description of Artificial Sequence: Synthetic oligonucleotide
uaaagucaugacuucaagc

SEQ ID NO: 302911 - RNA, 19 nt, Artificial Sequence
  Description of Artificial Sequence: Synthetic oligonucleotide
uuaauagccuauaucuucu

SEQ ID NO: 302912 - RNA, 19 nt, Artificial Sequence
  Description of Artificial Sequence: Synthetic oligonucleotide
guuauaagguugcugcugg

SEQ ID NO: 302913 - RNA, 19 nt, Artificial Sequence
  Description of Artificial Sequence: Synthetic oligonucleotide
aauccauagcgccacacca

SEQ ID NO: 302914 - RNA, 19 nt, Artificial Sequence
  Description of Artificial Sequence: Synthetic oligonucleotide
uaugccagacaucuugcgg

SEQ ID NO: 302915 - RNA, 19 nt, Artificial Sequence
  Description of Artificial Sequence: Synthetic oligonucleotide
ucuauccaugauaaaacca

SEQ ID NO: 302916 - RNA, 19 nt, Artificial Sequence
  Description of Artificial Sequence: Synthetic oligonucleotide
acuuauuaccaccuuccac

SEQ ID NO: 302917 - RNA, 19 nt, Artificial Sequence
  Description of Artificial Sequence: Synthetic oligonucleotide
cacuacaccaaauauauca

SEQ ID NO: 302918 - RNA, 19 nt, Artificial Sequence
  Description of Artificial Sequence: Synthetic oligonucleotide
uuaaucucuuacuaugcca

SEQ ID NO: 302919 - RNA, 19 nt, Artificial Sequence
  Description of Artificial Sequence: Synthetic oligonucleotide
uccaauagcgaacauuaac

SEQ ID NO: 302920 - RNA, 19 nt, Artificial Sequence
  Description of Artificial Sequence: Synthetic oligonucleotide
aacuuuaucacagguauau

SEQ ID NO: 302921 - RNA, 19 nt, Artificial Sequence
  Description of Artificial Sequence: Synthetic oligonucleotide
ugacucguagucaugaccu

SEQ ID NO: 302922 - RNA, 19 nt, Artificial Sequence
  Description of Artificial Sequence: Synthetic oligonucleotide
aagacauucucgccgaaga

SEQ ID NO: 302923 - RNA, 19 nt, Artificial Sequence
  Description of Artificial Sequence: Synthetic oligonucleotide
ucugaaucuauccaugaua

SEQ ID NO: 302924 - RNA, 19 nt, Artificial Sequence
  Description of Artificial Sequence: Synthetic oligonucleotide
ugaaacaggguguuguuac

SEQ ID NO: 302925 - RNA, 19 nt, Artificial Sequence
  Description of Artificial Sequence: Synthetic oligonucleotide
uuagguucaauccuccuau

SEQ ID NO: 302926 - RNA, 19 nt, Artificial Sequence
  Description of Artificial Sequence: Synthetic oligonucleotide
cugauaacgauaaauccuc

SEQ ID NO: 302927 - RNA, 19 nt, Artificial Sequence
  Description of Artificial Sequence: Synthetic oligonucleotide
uuuucauacaagucguccu

SEQ ID NO: 302928 - RNA, 19 nt, Artificial Sequence
  Description of Artificial Sequence: Synthetic oligonucleotide
agguucaauccuccuaucc

SEQ ID NO: 302929 - RNA, 19 nt, Artificial Sequence
  Description of Artificial Sequence: Synthetic oligonucleotide
uguacauguggaaaauaga

SEQ ID NO: 302930 - RNA, 19 nt, Artificial Sequence
  Description of Artificial Sequence: Synthetic oligonucleotide
uaugccaaauuuauaaauu

SEQ ID NO: 302931 - RNA, 19 nt, Artificial Sequence
  Description of Artificial Sequence: Synthetic oligonucleotide
ugccguugagguaauagag

SEQ ID NO: 302932 - RNA, 19 nt, Artificial Sequence
  Description of Artificial Sequence: Synthetic oligonucleotide
ucauagaacucagaauggg

SEQ ID NO: 302933 - RNA, 19 nt, Artificial Sequence
  Description of Artificial Sequence: Synthetic oligonucleotide
aaugccguugagguaauag

SEQ ID NO: 302934 - RNA, 19 nt, Artificial Sequence
  Description of Artificial Sequence: Synthetic oligonucleotide
aauacuaguuuaauagccu

SEQ ID NO: 302935 - RNA, 19 nt, Artificial Sequence
  Description of Artificial Sequence: Synthetic oligonucleotide
agauugaaauccauagcgc

SEQ ID NO: 302936 - RNA, 19 nt, Artificial Sequence
  Description of Artificial Sequence: Synthetic oligonucleotide
uugguuaagcagucggacg

SEQ ID NO: 302937 - RNA, 19 nt, Artificial Sequence
  Description of Artificial Sequence: Synthetic oligonucleotide
uugccauaaaaguacugag

SEQ ID NO: 302938 - RNA, 19 nt, Artificial Sequence
  Description of Artificial Sequence: Synthetic oligonucleotide
agcuugagcacauuuauau

SEQ ID NO: 302939 - RNA, 19 nt, Artificial Sequence
  Description of Artificial Sequence: Synthetic oligonucleotide
agagaguggaauugaguuc

SEQ ID NO: 302940 - RNA, 19 nt, Artificial Sequence
  Description of Artificial Sequence: Synthetic oligonucleotide
uaguuuaauagccuauauc

SEQ ID NO: 302941 - RNA, 19 nt, Artificial Sequence
  Description of Artificial Sequence: Synthetic oligonucleotide
gauuuaguccuucaagaga

SEQ ID NO: 302942 - RNA, 19 nt, Artificial Sequence
  Description of Artificial Sequence: Synthetic oligonucleotide
cauuaacuuuucuacacug

SEQ ID NO: 302943 - RNA, 19 nt, Artificial Sequence
  Description of Artificial Sequence: Synthetic oligonucleotide
gaagguuggauguaucuca

SEQ ID NO: 302944 - RNA, 19 nt, Artificial Sequence
  Description of Artificial Sequence: Synthetic oligonucleotide
ugguuaagcagucggacgu

SEQ ID NO: 302945 - RNA, 19 nt, Artificial Sequence
  Description of Artificial Sequence: Synthetic oligonucleotide
aguacugagauuauaggca

SEQ ID NO: 302946 - RNA, 19 nt, Artificial Sequence
  Description of Artificial Sequence: Synthetic oligonucleotide
aaagguugaaucagcagcu

SEQ ID NO: 302947 - RNA, 19 nt, Artificial Sequence
  Description of Artificial Sequence: Synthetic oligonucleotide
aucacagguauauuguaca

SEQ ID NO: 302948 - RNA, 19 nt, Artificial Sequence
  Description of Artificial Sequence: Synthetic oligonucleotide
ugccauaaaaguacugaga

SEQ ID NO: 302949 - RNA, 19 nt, Artificial Sequence
  Description of Artificial Sequence: Synthetic oligonucleotide
ugacaaaccauguuuguua

SEQ ID NO: 302950 - RNA, 19 nt, Artificial Sequence
  Description of Artificial Sequence: Synthetic oligonucleotide
aucagcagcugucauugac

SEQ ID NO: 302951 - RNA, 19 nt, Artificial Sequence
  Description of Artificial Sequence: Synthetic oligonucleotide
auaaacauaucugagucau

SEQ ID NO: 302952 - RNA, 19 nt, Artificial Sequence
  Description of Artificial Sequence: Synthetic oligonucleotide
aagaauuguggagaggcca

SEQ ID NO: 302953 - RNA, 19 nt, Artificial Sequence
  Description of Artificial Sequence: Synthetic oligonucleotide
acugauaacgauaaauccu

SEQ ID NO: 302954 - RNA, 19 nt, Artificial Sequence
  Description of Artificial Sequence: Synthetic oligonucleotide
aauuguggagaggccaaac

SEQ ID NO: 302955 - RNA, 19 nt, Artificial Sequence
  Description of Artificial Sequence: Synthetic oligonucleotide
guuaaucucuuacuaugcc

SEQ ID NO: 302956 - RNA, 19 nt, Artificial Sequence
  Description of Artificial Sequence: Synthetic oligonucleotide
gaggguggaugacagaacc

SEQ ID NO: 302957 - RNA, 19 nt, Artificial Sequence
  Description of Artificial Sequence: Synthetic oligonucleotide
auaguaaggauaggacagc

SEQ ID NO: 302958 - RNA, 19 nt, Artificial Sequence
  Description of Artificial Sequence: Synthetic oligonucleotide
cuuauuaccaccuuccacu

SEQ ID NO: 302959 - RNA, 19 nt, Artificial Sequence
  Description of Artificial Sequence: Synthetic oligonucleotide
agacaguauuaauacccac

SEQ ID NO: 302960 - RNA, 19 nt, Artificial Sequence
  Description of Artificial Sequence: Synthetic oligonucleotide
caaauuuagaggguggaug

SEQ ID NO: 302961 - RNA, 19 nt, Artificial Sequence
  Description of Artificial Sequence: Synthetic oligonucleotide
accaaauauaucauggcug

SEQ ID NO: 302962 - RNA, 19 nt, Artificial Sequence
  Description of Artificial Sequence: Synthetic oligonucleotide
uaucgcuuaauacuaguuu

SEQ ID NO: 302963 - RNA, 19 nt, Artificial Sequence
  Description of Artificial Sequence: Synthetic oligonucleotide
agacuacauaaugacuucc

SEQ ID NO: 302964 - RNA, 19 nt, Artificial Sequence
  Description of Artificial Sequence: Synthetic oligonucleotide
aaauauaucauggcugcuu

SEQ ID NO: 302965 - RNA, 19 nt, Artificial Sequence
  Description of Artificial Sequence: Synthetic oligonucleotide
uuaugccagacaucuugcg

SEQ ID NO: 302966 - RNA, 19 nt, Artificial Sequence
  Description of Artificial Sequence: Synthetic oligonucleotide
uaagaauuguggagaggcc

SEQ ID NO: 302967 - RNA, 19 nt, Artificial Sequence
  Description of Artificial Sequence: Synthetic oligonucleotide
cuauccaugauaaaaccaa

SEQ ID NO: 302968 - RNA, 19 nt, Artificial Sequence
  Description of Artificial Sequence: Synthetic oligonucleotide
ugggucauugaauuccuca

SEQ ID NO: 302969 - RNA, 19 nt, Artificial Sequence
  Description of Artificial Sequence: Synthetic oligonucleotide
ugauccucguacuuuugcc

SEQ ID NO: 302970 - RNA, 19 nt, Artificial Sequence
  Description of Artificial Sequence: Synthetic oligonucleotide
gcauguaccaccaaggcag

SEQ ID NO: 302971 - RNA, 19 nt, Artificial Sequence
  Description of Artificial Sequence: Synthetic oligonucleotide
uugauaugggucauugaau

SEQ ID NO: 302972 - RNA, 19 nt, Artificial Sequence
  Description of Artificial Sequence: Synthetic oligonucleotide
ucagagauugaaauccaua

SEQ ID NO: 302973 - RNA, 19 nt, Artificial Sequence
  Description of Artificial Sequence: Synthetic oligonucleotide
uauaagguugcugcuggag

SEQ ID NO: 302974 - RNA, 19 nt, Artificial Sequence
  Description of Artificial Sequence: Synthetic oligonucleotide
ucguacuuuugccauaaaa

SEQ ID NO: 302975 - RNA, 19 nt, Artificial Sequence
  Description of Artificial Sequence: Synthetic oligonucleotide
aacuaugaguuuaauuccu

SEQ ID NO: 302976 - RNA, 19 nt, Artificial Sequence
  Description of Artificial Sequence: Synthetic oligonucleotide
agucauaggacaggaagag

SEQ ID NO: 302977 - RNA, 19 nt, Artificial Sequence
  Description of Artificial Sequence: Synthetic oligonucleotide
agcgcuauaaucuggugaa

SEQ ID NO: 302978 - RNA, 19 nt, Artificial Sequence
  Description of Artificial Sequence: Synthetic oligonucleotide
gauaagaauuguggagagg

SEQ ID NO: 302979 - RNA, 19 nt, Artificial Sequence
  Description of Artificial Sequence: Synthetic oligonucleotide
ccaaauauaucauggcugc

SEQ ID NO: 302980 - RNA, 19 nt, Artificial Sequence
  Description of Artificial Sequence: Synthetic oligonucleotide
aucgcuuaauacuaguuua

SEQ ID NO: 302981 - RNA, 19 nt, Artificial Sequence
  Description of Artificial Sequence: Synthetic oligonucleotide
aaacaacuuauuaccaccu

SEQ ID NO: 302982 - RNA, 19 nt, Artificial Sequence
  Description of Artificial Sequence: Synthetic oligonucleotide
uauuaccaccuuccacucg

SEQ ID NO: 302983 - RNA, 19 nt, Artificial Sequence
  Description of Artificial Sequence: Synthetic oligonucleotide
cuauggacacuacggagcc

SEQ ID NO: 302984 - RNA, 19 nt, Artificial Sequence
  Description of Artificial Sequence: Synthetic oligonucleotide
uaagcagucggacguaguc

SEQ ID NO: 302985 - RNA, 19 nt, Artificial Sequence
  Description of Artificial Sequence: Synthetic oligonucleotide
ucaagcuugagcacauuua

SEQ ID NO: 302986 - RNA, 19 nt, Artificial Sequence
  Description of Artificial Sequence: Synthetic oligonucleotide
uccucauugccauuccagc

SEQ ID NO: 302987 - RNA, 19 nt, Artificial Sequence
  Description of Artificial Sequence: Synthetic oligonucleotide
uucuacacugcugaaggca

SEQ ID NO: 302988 - RNA, 19 nt, Artificial Sequence
  Description of Artificial Sequence: Synthetic oligonucleotide
agccuauaucuucuguuuc

SEQ ID NO: 302989 - RNA, 19 nt, Artificial Sequence
  Description of Artificial Sequence: Synthetic oligonucleotide
uguuuucucaugacccaca

SEQ ID NO: 302990 - RNA, 19 nt, Artificial Sequence
  Description of Artificial Sequence: Synthetic oligonucleotide
gauggagggacacuucuga

SEQ ID NO: 302991 - RNA, 19 nt, Artificial Sequence
  Description of Artificial Sequence: Synthetic oligonucleotide
ucuugcgguucaauggagc

SEQ ID NO: 302992 - RNA, 19 nt, Artificial Sequence
  Description of Artificial Sequence: Synthetic oligonucleotide
gugauaagaauuguggaga

SEQ ID NO: 302993 - RNA, 19 nt, Artificial Sequence
  Description of Artificial Sequence: Synthetic oligonucleotide
ucuggugaagaguugguuu

SEQ ID NO: 302994 - RNA, 19 nt, Artificial Sequence
  Description of Artificial Sequence: Synthetic oligonucleotide
cauuguagccagcaauggc

SEQ ID NO: 302995 - RNA, 19 nt, Artificial Sequence
  Description of Artificial Sequence: Synthetic oligonucleotide
aguuauaagguugcugcug

SEQ ID NO: 302996 - RNA, 19 nt, Artificial Sequence
  Description of Artificial Sequence: Synthetic oligonucleotide
ugauaacgauaaauccuca

SEQ ID NO: 302997 - RNA, 19 nt, Artificial Sequence
  Description of Artificial Sequence: Synthetic oligonucleotide
aaccaagacaagggcaauc

SEQ ID NO: 302998 - RNA, 19 nt, Artificial Sequence
  Description of Artificial Sequence: Synthetic oligonucleotide
uuaucgcuuaauacuaguu

SEQ ID NO: 302999 - RNA, 19 nt, Artificial Sequence
  Description of Artificial Sequence: Synthetic oligonucleotide
auuguggagaggccaaacu

SEQ ID NO: 303000 - RNA, 19 nt, Artificial Sequence
  Description of Artificial Sequence: Synthetic oligonucleotide
agcgaugguaggcaaggag

SEQ ID NO: 303001 - RNA, 19 nt, Artificial Sequence
  Description of Artificial Sequence: Synthetic oligonucleotide
auagcgaacauuaacuuuu

SEQ ID NO: 303002 - RNA, 19 nt, Artificial Sequence
  Description of Artificial Sequence: Synthetic oligonucleotide
cuacaccaaauauaucaug

SEQ ID NO: 303003 - RNA, 19 nt, Artificial Sequence
  Description of Artificial Sequence: Synthetic oligonucleotide
acagcuguacaagagaaaa

SEQ ID NO: 303004 - RNA, 19 nt, Artificial Sequence
  Description of Artificial Sequence: Synthetic oligonucleotide
cucguagucaugaccuugc

SEQ ID NO: 303005 - RNA, 19 nt, Artificial Sequence
  Description of Artificial Sequence: Synthetic oligonucleotide
cugacucguagucaugacc

SEQ ID NO: 303006 - RNA, 19 nt, Artificial Sequence
  Description of Artificial Sequence: Synthetic oligonucleotide
uacuaguuuaauagccuau

SEQ ID NO: 303007 - RNA, 19 nt, Artificial Sequence
  Description of Artificial Sequence: Synthetic oligonucleotide
gauaugggucauugaauuc

SEQ ID NO: 303008 - RNA, 19 nt, Artificial Sequence
  Description of Artificial Sequence: Synthetic oligonucleotide
ugcgguucaauggagcagc

SEQ ID NO: 303009 - RNA, 19 nt, Artificial Sequence
  Description of Artificial Sequence: Synthetic oligonucleotide
gguucaauggagcagccac

SEQ ID NO: 303010 - RNA, 19 nt, Artificial Sequence
  Description of Artificial Sequence: Synthetic oligonucleotide
acauaugggccucacugcu

SEQ ID NO: 303011 - RNA, 19 nt, Artificial Sequence
  Description of Artificial Sequence: Synthetic oligonucleotide
agauccuguuuuauauacc

SEQ ID NO: 303012 - RNA, 19 nt, Artificial Sequence
  Description of Artificial Sequence: Synthetic oligonucleotide
ucguccuggucaaucaugu

SEQ ID NO: 303013 - RNA, 19 nt, Artificial Sequence
  Description of Artificial Sequence: Synthetic oligonucleotide
guauuaauacccacagcug

SEQ ID NO: 303014 - RNA, 19 nt, Artificial Sequence
  Description of Artificial Sequence: Synthetic oligonucleotide
uuaucacagguauauugua

SEQ ID NO: 303015 - RNA, 19 nt, Artificial Sequence
  Description of Artificial Sequence: Synthetic oligonucleotide
uucaagcuugagcacauuu

SEQ ID NO: 303016 - RNA, 19 nt, Artificial Sequence
  Description of Artificial Sequence: Synthetic oligonucleotide
ucgcuuaauacuaguuuaa

SEQ ID NO: 303017 - RNA, 19 nt, Artificial Sequence
  Description of Artificial Sequence: Synthetic oligonucleotide
uagacuacauaaugacuuc

SEQ ID NO: 303018 - RNA, 19 nt, Artificial Sequence
  Description of Artificial Sequence: Synthetic oligonucleotide
ugacccacaugaagggugc

SEQ ID NO: 303019 - RNA, 19 nt, Artificial Sequence
  Description of Artificial Sequence: Synthetic oligonucleotide
uaguaaggauaggacagcc

SEQ ID NO: 303020 - RNA, 19 nt, Artificial Sequence
  Description of Artificial Sequence: Synthetic oligonucleotide
aguuuaauuccugucacua

SEQ ID NO: 303021 - RNA, 19 nt, Artificial Sequence
  Description of Artificial Sequence: Synthetic oligonucleotide
ucguugaggaaugucucag

SEQ ID NO: 303022 - RNA, 19 nt, Artificial Sequence
  Description of Artificial Sequence: Synthetic oligonucleotide
gagucggucauggaggaug

SEQ ID NO: 303023 - RNA, 19 nt, Artificial Sequence
  Description of Artificial Sequence: Synthetic oligonucleotide
auggacacuacggagccag

SEQ ID NO: 303024 - RNA, 19 nt, Artificial Sequence
  Description of Artificial Sequence: Synthetic oligonucleotide
ugcagcgcuauaaucuggu

SEQ ID NO: 303025 - RNA, 19 nt, Artificial Sequence
  Description of Artificial Sequence: Synthetic oligonucleotide
cuagacuacauaaugacuu

SEQ ID NO: 303026 - RNA, 19 nt, Artificial Sequence
  Description of Artificial Sequence: Synthetic oligonucleotide
gauccucguacuuuugcca

SEQ ID NO: 303027 - RNA, 19 nt, Artificial Sequence
  Description of Artificial Sequence: Synthetic oligonucleotide
cuaucucugaaucuaucca

SEQ ID NO: 303028 - RNA, 19 nt, Artificial Sequence
  Description of Artificial Sequence: Synthetic oligonucleotide
cagccuagacuacauaaug

SEQ ID NO: 303029 - RNA, 19 nt, Artificial Sequence
  Description of Artificial Sequence: Synthetic oligonucleotide
aggaaaguuaugccagaca

SEQ ID NO: 303030 - RNA, 19 nt, Artificial Sequence
  Description of Artificial Sequence: Synthetic oligonucleotide
uuugauccucguacuuuug

SEQ ID NO: 303031 - RNA, 19 nt, Artificial Sequence
  Description of Artificial Sequence: Synthetic oligonucleotide
uuauuaccaccuuccacuc

SEQ ID NO: 303032 - RNA, 19 nt, Artificial Sequence
  Description of Artificial Sequence: Synthetic oligonucleotide
ucuacccacaugugcauuc

SEQ ID NO: 303033 - RNA, 19 nt, Artificial Sequence
  Description of Artificial Sequence: Synthetic oligonucleotide
gagaguuugguuaagcagu

SEQ ID NO: 303034 - RNA, 19 nt, Artificial Sequence
  Description of Artificial Sequence: Synthetic oligonucleotide
ugauggagggacacuucug

SEQ ID NO: 303035 - RNA, 19 nt, Artificial Sequence
  Description of Artificial Sequence: Synthetic oligonucleotide
uaauagccuauaucuucug

SEQ ID NO: 303036 - RNA, 19 nt, Artificial Sequence
  Description of Artificial Sequence: Synthetic oligonucleotide
cacuucauacaucuucgug

SEQ ID NO: 303037 - RNA, 19 nt, Artificial Sequence
  Description of Artificial Sequence: Synthetic oligonucleotide
ucggacguagucauccccu

SEQ ID NO: 303038 - RNA, 19 nt, Artificial Sequence
  Description of Artificial Sequence: Synthetic oligonucleotide
agucggacguagucauccc

SEQ ID NO: 303039 - RNA, 19 nt, Artificial Sequence
  Description of Artificial Sequence: Synthetic oligonucleotide
aucucguugaggaaugucu

SEQ ID NO: 303040 - RNA, 19 nt, Artificial Sequence
  Description of Artificial Sequence: Synthetic oligonucleotide
agaguuugguuaagcaguc

SEQ ID NO: 303041 - RNA, 19 nt, Artificial Sequence
  Description of Artificial Sequence: Synthetic oligonucleotide
ugaucauguugauuauaaa

SEQ ID NO: 303042 - RNA, 19 nt, Artificial Sequence
  Description of Artificial Sequence: Synthetic oligonucleotide
cauuccagcgaugguaggc

SEQ ID NO: 303043 - RNA, 19 nt, Artificial Sequence
  Description of Artificial Sequence: Synthetic oligonucleotide
gguauauuguacaugugga

SEQ ID NO: 303044 - RNA, 19 nt, Artificial Sequence
  Description of Artificial Sequence: Synthetic oligonucleotide
uacugagauuauaggcaug

SEQ ID NO: 303045 - RNA, 19 nt, Artificial Sequence
  Description of Artificial Sequence: Synthetic oligonucleotide
gacguagucauccccucca

SEQ ID NO: 303046 - RNA, 19 nt, Artificial Sequence
  Description of Artificial Sequence: Synthetic oligonucleotide
acauaaugacuuccagccu

SEQ ID NO: 303047 - RNA, 19 nt, Artificial Sequence
  Description of Artificial Sequence: Synthetic oligonucleotide
agguugaaucagcagcugu

SEQ ID NO: 303048 - RNA, 19 nt, Artificial Sequence
  Description of Artificial Sequence: Synthetic oligonucleotide
caguauuaauacccacagc

SEQ ID NO: 303049 - RNA, 19 nt, Artificial Sequence
  Description of Artificial Sequence: Synthetic oligonucleotide
guuggauguaucucagcuc

SEQ ID NO: 303050 - RNA, 19 nt, Artificial Sequence
  Description of Artificial Sequence: Synthetic oligonucleotide
cucgccgaagaucaaguuc

SEQ ID NO: 303051 - RNA, 19 nt, Artificial Sequence
  Description of Artificial Sequence: Synthetic oligonucleotide
guaaggauaggacagccau

SEQ ID NO: 303052 - RNA, 19 nt, Artificial Sequence
  Description of Artificial Sequence: Synthetic oligonucleotide
gacuacauaaugacuucca

SEQ ID NO: 303053 - RNA, 19 nt, Artificial Sequence
  Description of Artificial Sequence: Synthetic oligonucleotide
uagagucggucauggagga

SEQ ID NO: 303054 - RNA, 19 nt, Artificial Sequence
  Description of Artificial Sequence: Synthetic oligonucleotide
gacuucaagcuugagcaca

SEQ ID NO: 303055 - RNA, 19 nt, Artificial Sequence
  Description of Artificial Sequence: Synthetic oligonucleotide
uccagcgaugguaggcaag

SEQ ID NO: 303056 - RNA, 19 nt, Artificial Sequence
  Description of Artificial Sequence: Synthetic oligonucleotide
ggacugauaacgauaaauc

SEQ ID NO: 303057 - RNA, 19 nt, Artificial Sequence
  Description of Artificial Sequence: Synthetic oligonucleotide
aagcagucggacguaguca

SEQ ID NO: 303058 - RNA, 19 nt, Artificial Sequence
  Description of Artificial Sequence: Synthetic oligonucleotide
cucaaugccguugagguaa

SEQ ID NO: 303059 - RNA, 19 nt, Artificial Sequence
  Description of Artificial Sequence: Synthetic oligonucleotide
guagucauccccuccaaua

SEQ ID NO: 303060 - RNA, 19 nt, Artificial Sequence
  Description of Artificial Sequence: Synthetic oligonucleotide
auugacacaucaucucguu

SEQ ID NO: 303061 - RNA, 19 nt, Artificial Sequence
  Description of Artificial Sequence: Synthetic oligonucleotide
gccuagacuacauaaugac

SEQ ID NO: 303062 - RNA, 19 nt, Artificial Sequence
  Description of Artificial Sequence: Synthetic oligonucleotide
uuauaagguugcugcugga

SEQ ID NO: 303063 - RNA, 19 nt, Artificial Sequence
  Description of Artificial Sequence: Synthetic oligonucleotide
agcaaacaacuuauuacca

SEQ ID NO: 303064 - RNA, 19 nt, Artificial Sequence
  Description of Artificial Sequence: Synthetic oligonucleotide
gaaacaggguguuguuaca

SEQ ID NO: 303065 - RNA, 19 nt, Artificial Sequence
  Description of Artificial Sequence: Synthetic oligonucleotide
ugaaucuauccaugauaaa

SEQ ID NO: 303066 - RNA, 19 nt, Artificial Sequence
  Description of Artificial Sequence: Synthetic oligonucleotide
acuaugaguuuaauuccug

SEQ ID NO: 303067 - RNA, 19 nt, Artificial Sequence
  Description of Artificial Sequence: Synthetic oligonucleotide
cuugcgguucaauggagca

SEQ ID NO: 303068 - RNA, 19 nt, Artificial Sequence
  Description of Artificial Sequence: Synthetic oligonucleotide
acacuacggagccaguuau

SEQ ID NO: 303069 - RNA, 19 nt, Artificial Sequence
  Description of Artificial Sequence: Synthetic oligonucleotide
agaacauaugggccucacu

SEQ ID NO: 303070 - RNA, 19 nt, Artificial Sequence
  Description of Artificial Sequence: Synthetic oligonucleotide
ucacggagaguuugguuaa

SEQ ID NO: 303071 - RNA, 19 nt, Artificial Sequence
  Description of Artificial Sequence: Synthetic oligonucleotide
uugacaaaccauguuuguu

SEQ ID NO: 303072 - RNA, 19 nt, Artificial Sequence
  Description of Artificial Sequence: Synthetic oligonucleotide
guuuaaacacccuccccaa

SEQ ID NO: 303073 - RNA, 19 nt, Artificial Sequence
  Description of Artificial Sequence: Synthetic oligonucleotide
uaauguuguuaaucucuua

SEQ ID NO: 303074 - RNA, 19 nt, Artificial Sequence
  Description of Artificial Sequence: Synthetic oligonucleotide
acuacggagccaguuauaa

SEQ ID NO: 303075 - RNA, 19 nt, Artificial Sequence
  Description of Artificial Sequence: Synthetic oligonucleotide
uccuaucccucccugcaaa

SEQ ID NO: 303076 - RNA, 19 nt, Artificial Sequence
  Description of Artificial Sequence: Synthetic oligonucleotide
aggguggaugacagaaccc

SEQ ID NO: 303077 - RNA, 19 nt, Artificial Sequence
  Description of Artificial Sequence: Synthetic oligonucleotide
auauaccacuucauacauc

SEQ ID NO: 303078 - RNA, 19 nt, Artificial Sequence
  Description of Artificial Sequence: Synthetic oligonucleotide
ucgugggauuuccugucug

SEQ ID NO: 303079 - RNA, 19 nt, Artificial Sequence
  Description of Artificial Sequence: Synthetic oligonucleotide
guuaagcagucggacguag

SEQ ID NO: 303080 - RNA, 19 nt, Artificial Sequence
  Description of Artificial Sequence: Synthetic oligonucleotide
augaaacaucccucagaug

SEQ ID NO: 303081 - RNA, 19 nt, Artificial Sequence
  Description of Artificial Sequence: Synthetic oligonucleotide
cacagguauauuguacaug

SEQ ID NO: 303082 - RNA, 19 nt, Artificial Sequence
  Description of Artificial Sequence: Synthetic oligonucleotide
ugcugaugcagcgcuauaa

SEQ ID NO: 303083 - RNA, 19 nt, Artificial Sequence
  Description of Artificial Sequence: Synthetic oligonucleotide
cuacggagccaguuauaag

SEQ ID NO: 303084 - RNA, 19 nt, Artificial Sequence
  Description of Artificial Sequence: Synthetic oligonucleotide
acuuuugauccucguacuu

SEQ ID NO: 303085 - RNA, 19 nt, Artificial Sequence
  Description of Artificial Sequence: Synthetic oligonucleotide
caccagguguugauauggg

SEQ ID NO: 303086 - RNA, 19 nt, Artificial Sequence
  Description of Artificial Sequence: Synthetic oligonucleotide
uuagaacacuuugcugaug

SEQ ID NO: 303087 - RNA, 19 nt, Artificial Sequence
  Description of Artificial Sequence: Synthetic oligonucleotide
ugaaauccauagcgccaca

SEQ ID NO: 303088 - RNA, 19 nt, Artificial Sequence
  Description of Artificial Sequence: Synthetic oligonucleotide
ccuuuaaugaaaguuguca

SEQ ID NO: 303089 - RNA, 19 nt, Artificial Sequence
  Description of Artificial Sequence: Synthetic oligonucleotide
ugguaggcaaggagagcug

SEQ ID NO: 303090 - RNA, 19 nt, Artificial Sequence
  Description of Artificial Sequence: Synthetic oligonucleotide
uugcgguucaauggagcag

SEQ ID NO: 303091 - RNA, 19 nt, Artificial Sequence
  Description of Artificial Sequence: Synthetic oligonucleotide
ccucccugcaaaauggaag

SEQ ID NO: 303092 - RNA, 19 nt, Artificial Sequence
  Description of Artificial Sequence: Synthetic oligonucleotide
uuccacucgcccaaagguu

SEQ ID NO: 303093 - RNA, 19 nt, Artificial Sequence
  Description of Artificial Sequence: Synthetic oligonucleotide
auccucguacuuuugccau

SEQ ID NO: 303094 - RNA, 19 nt, Artificial Sequence
  Description of Artificial Sequence: Synthetic oligonucleotide
uucauacaucuucguggga

SEQ ID NO: 303095 - RNA, 19 nt, Artificial Sequence
  Description of Artificial Sequence: Synthetic oligonucleotide
uuucacggagaguuugguu

SEQ ID NO: 303096 - RNA, 19 nt, Artificial Sequence
  Description of Artificial Sequence: Synthetic oligonucleotide
agccuagacuacauaauga

SEQ ID NO: 303097 - RNA, 19 nt, Artificial Sequence
  Description of Artificial Sequence: Synthetic oligonucleotide
gggcucauaguaaggauag

SEQ ID NO: 303098 - RNA, 19 nt, Artificial Sequence
  Description of Artificial Sequence: Synthetic oligonucleotide
gacacuacggagccaguua

SEQ ID NO: 303099 - RNA, 19 nt, Artificial Sequence
  Description of Artificial Sequence: Synthetic oligonucleotide
ucacuacaccaaauauauc

SEQ ID NO: 303100 - RNA, 19 nt, Artificial Sequence
  Description of Artificial Sequence: Synthetic oligonucleotide
auccccuccaauagcgaac

SEQ ID NO: 303101 - RNA, 19 nt, Artificial Sequence
  Description of Artificial Sequence: Synthetic oligonucleotide
augggacugauaacgauaa

SEQ ID NO: 303102 - RNA, 19 nt, Artificial Sequence
  Description of Artificial Sequence: Synthetic oligonucleotide
cagaguaagacaguuuaaa

SEQ ID NO: 303103 - RNA, 19 nt, Artificial Sequence
  Description of Artificial Sequence: Synthetic oligonucleotide
accuuuugauaaacuauga

SEQ ID NO: 303104 - RNA, 19 nt, Artificial Sequence
  Description of Artificial Sequence: Synthetic oligonucleotide
aagggugcugguaaagauu

SEQ ID NO: 303105 - RNA, 19 nt, Artificial Sequence
  Description of Artificial Sequence: Synthetic oligonucleotide
aaguugucaccagguguug

SEQ ID NO: 303106 - RNA, 19 nt, Artificial Sequence
  Description of Artificial Sequence: Synthetic oligonucleotide
gguuggauguaucucagcu

SEQ ID NO: 303107 - RNA, 19 nt, Artificial Sequence
  Description of Artificial Sequence: Synthetic oligonucleotide
gguuuucacggagaguuug

SEQ ID NO: 303108 - RNA, 19 nt, Artificial Sequence
  Description of Artificial Sequence: Synthetic oligonucleotide
agcgaacauuaacuuuucu

SEQ ID NO: 303109 - RNA, 19 nt, Artificial Sequence
  Description of Artificial Sequence: Synthetic oligonucleotide
uccuccuaucccucccugc

SEQ ID NO: 303110 - RNA, 19 nt, Artificial Sequence
  Description of Artificial Sequence: Synthetic oligonucleotide
ggguggaugacagaacccc

SEQ ID NO: 303111 - RNA, 19 nt, Artificial Sequence
  Description of Artificial Sequence: Synthetic oligonucleotide
ccguugagguaauagaguc

SEQ ID NO: 303112 - RNA, 19 nt, Artificial Sequence
  Description of Artificial Sequence: Synthetic oligonucleotide
cagcgcuauaaucugguga

SEQ ID NO: 303113 - RNA, 19 nt, Artificial Sequence
  Description of Artificial Sequence: Synthetic oligonucleotide
agacauucucgccgaagau

SEQ ID NO: 303114 - RNA, 19 nt, Artificial Sequence
  Description of Artificial Sequence: Synthetic oligonucleotide
ccaauagcgaacauuaacu

SEQ ID NO: 303115 - RNA, 19 nt, Artificial Sequence
  Description of Artificial Sequence: Synthetic oligonucleotide
aguaaggauaggacagcca

SEQ ID NO: 303116 - RNA, 19 nt, Artificial Sequence
  Description of Artificial Sequence: Synthetic oligonucleotide
aucucuuacuaugccaaau

SEQ ID NO: 303117 - RNA, 19 nt, Artificial Sequence
  Description of Artificial Sequence: Synthetic oligonucleotide
gucggacguagucaucccc

SEQ ID NO: 303118 - RNA, 19 nt, Artificial Sequence
  Description of Artificial Sequence: Synthetic oligonucleotide
cagguauauuguacaugug

SEQ ID NO: 303119 - RNA, 19 nt, Artificial Sequence
  Description of Artificial Sequence: Synthetic oligonucleotide
caaggacaaugucauagaa

SEQ ID NO: 303120 - RNA, 19 nt, Artificial Sequence
  Description of Artificial Sequence: Synthetic oligonucleotide
aaacuuuaucacagguaua

SEQ ID NO: 303121 - RNA, 19 nt, Artificial Sequence
  Description of Artificial Sequence: Synthetic oligonucleotide
gcgaacauuaacuuuucua

SEQ ID NO: 303122 - RNA, 19 nt, Artificial Sequence
  Description of Artificial Sequence: Synthetic oligonucleotide
uggcacucaucuccaugca

SEQ ID NO: 303123 - RNA, 19 nt, Artificial Sequence
  Description of Artificial Sequence: Synthetic oligonucleotide
agaauuguggagaggccaa

SEQ ID NO: 303124 - RNA, 19 nt, Artificial Sequence
  Description of Artificial Sequence: Synthetic oligonucleotide
guacugagauuauaggcau

SEQ ID NO: 303125 - RNA, 19 nt, Artificial Sequence
  Description of Artificial Sequence: Synthetic oligonucleotide
cuaugaguuuaauuccugu

SEQ ID NO: 303126 - RNA, 19 nt, Artificial Sequence
  Description of Artificial Sequence: Synthetic oligonucleotide
ccgagcagcauagucauag

SEQ ID NO: 303127 - RNA, 19 nt, Artificial Sequence
  Description of Artificial Sequence: Synthetic oligonucleotide
cucguugaggaaugucuca

SEQ ID NO: 303128 - RNA, 19 nt, Artificial Sequence
  Description of Artificial Sequence: Synthetic oligonucleotide
gguugaaucagcagcuguc

SEQ ID NO: 303129 - RNA, 19 nt, Artificial Sequence
  Description of Artificial Sequence: Synthetic oligonucleotide
cgauaaauccucaugaacu

SEQ ID NO: 303130 - RNA, 19 nt, Artificial Sequence
  Description of Artificial Sequence: Synthetic oligonucleotide
ggcauguaccaccaaggca

SEQ ID NO: 303131 - RNA, 19 nt, Artificial Sequence
  Description of Artificial Sequence: Synthetic oligonucleotide
gccaccugaagcuggaaca

SEQ ID NO: 303132 - RNA, 19 nt, Artificial Sequence
  Description of Artificial Sequence: Synthetic oligonucleotide
cugcaaaauggaagaguga

SEQ ID NO: 303133 - RNA, 19 nt, Artificial Sequence
  Description of Artificial Sequence: Synthetic oligonucleotide
uacaucuucgugggauuuc

SEQ ID NO: 303134 - RNA, 19 nt, Artificial Sequence
  Description of Artificial Sequence: Synthetic oligonucleotide
caagcuugagcacauuuau

SEQ ID NO: 303135 - RNA, 19 nt, Artificial Sequence
  Description of Artificial Sequence: Synthetic oligonucleotide
cuauaaucuggugaagagu

SEQ ID NO: 303136 - RNA, 19 nt, Artificial Sequence
  Description of Artificial Sequence: Synthetic oligonucleotide
uagguucaauccuccuauc

SEQ ID NO: 303137 - RNA, 19 nt, Artificial Sequence
  Description of Artificial Sequence: Synthetic oligonucleotide
gauugagacccagucucaa

SEQ ID NO: 303138 - RNA, 19 nt, Artificial Sequence
  Description of Artificial Sequence: Synthetic oligonucleotide
cauugacacaucaucucgu

SEQ ID NO: 303139 - RNA, 19 nt, Artificial Sequence
  Description of Artificial Sequence: Synthetic oligonucleotide
aagcuugagcacauuuaua

SEQ ID NO: 303140 - RNA, 19 nt, Artificial Sequence
  Description of Artificial Sequence: Synthetic oligonucleotide
ggggucaugaaacaucccu

SEQ ID NO: 303141 - RNA, 19 nt, Artificial Sequence
  Description of Artificial Sequence: Synthetic oligonucleotide
augcagcgcuauaaucugg

SEQ ID NO: 303142 - RNA, 19 nt, Artificial Sequence
  Description of Artificial Sequence: Synthetic oligonucleotide
aguugucaccagguguuga

SEQ ID NO: 303143 - RNA, 19 nt, Artificial Sequence
  Description of Artificial Sequence: Synthetic oligonucleotide
acggagccaguuauaaggu

SEQ ID NO: 303144 - RNA, 19 nt, Artificial Sequence
  Description of Artificial Sequence: Synthetic oligonucleotide
cuaguuuaauagccuauau

SEQ ID NO: 303145 - RNA, 19 nt, Artificial Sequence
  Description of Artificial Sequence: Synthetic oligonucleotide
ggauaucucucuuccuauc

SEQ ID NO: 303146 - RNA, 19 nt, Artificial Sequence
  Description of Artificial Sequence: Synthetic oligonucleotide
cgaugguaggcaaggagag

SEQ ID NO: 303147 - RNA, 19 nt, Artificial Sequence
  Description of Artificial Sequence: Synthetic oligonucleotide
cgccacaccagcuugauca

SEQ ID NO: 303148 - RNA, 19 nt, Artificial Sequence
  Description of Artificial Sequence: Synthetic oligonucleotide
aucuugcgguucaauggag

SEQ ID NO: 303149 - RNA, 19 nt, Artificial Sequence
  Description of Artificial Sequence: Synthetic oligonucleotide
gccauuccagcgaugguag

SEQ ID NO: 303150 - RNA, 19 nt, Artificial Sequence
  Description of Artificial Sequence: Synthetic oligonucleotide
caauagcgaacauuaacuu

SEQ ID NO: 303151 - RNA, 19 nt, Artificial Sequence
  Description of Artificial Sequence: Synthetic oligonucleotide
ccagcgaugguaggcaagg

SEQ ID NO: 303152 - RNA, 19 nt, Artificial Sequence
  Description of Artificial Sequence: Synthetic oligonucleotide
cauagucauaggacaggaa

SEQ ID NO: 303153 - RNA, 19 nt, Artificial Sequence
  Description of Artificial Sequence: Synthetic oligonucleotide
ucaaugccguugagguaau

SEQ ID NO: 303154 - RNA, 19 nt, Artificial Sequence
  Description of Artificial Sequence: Synthetic oligonucleotide
ugggacugauaacgauaaa

SEQ ID NO: 303155 - RNA, 19 nt, Artificial Sequence
  Description of Artificial Sequence: Synthetic oligonucleotide
aaggagcccugagcaaaca

SEQ ID NO: 303156 - RNA, 19 nt, Artificial Sequence
  Description of Artificial Sequence: Synthetic oligonucleotide
uagccagcaauggcacuca

SEQ ID NO: 303157 - RNA, 19 nt, Artificial Sequence
  Description of Artificial Sequence: Synthetic oligonucleotide
uuccagcgaugguaggcaa

SEQ ID NO: 303158 - RNA, 19 nt, Artificial Sequence
  Description of Artificial Sequence: Synthetic oligonucleotide
ggagcccugagcaaacaac

SEQ ID NO: 303159 - RNA, 19 nt, Artificial Sequence
  Description of Artificial Sequence: Synthetic oligonucleotide
gcgaugguaggcaaggaga

SEQ ID NO: 303160 - RNA, 19 nt, Artificial Sequence
  Description of Artificial Sequence: Synthetic oligonucleotide
caugugcauucucagagau

SEQ ID NO: 303161 - RNA, 19 nt, Artificial Sequence
  Description of Artificial Sequence: Synthetic oligonucleotide
ggcuugacaaaccauguuu

SEQ ID NO: 303162 - RNA, 19 nt, Artificial Sequence
  Description of Artificial Sequence: Synthetic oligonucleotide
ucaucucguugaggaaugu

SEQ ID NO: 303163 - RNA, 19 nt, Artificial Sequence
  Description of Artificial Sequence: Synthetic oligonucleotide
acuuuaucacagguauauu

SEQ ID NO: 303164 - RNA, 19 nt, Artificial Sequence
  Description of Artificial Sequence: Synthetic oligonucleotide
uccucguacuuuugccaua

SEQ ID NO: 303165 - RNA, 19 nt, Artificial Sequence
  Description of Artificial Sequence: Synthetic oligonucleotide
ggacguagucauccccucc

SEQ ID NO: 303166 - RNA, 19 nt, Artificial Sequence
  Description of Artificial Sequence: Synthetic oligonucleotide
caaugggagggucaaaauu

SEQ ID NO: 303167 - RNA, 19 nt, Artificial Sequence
  Description of Artificial Sequence: Synthetic oligonucleotide
agcaagucuucuacccaca

SEQ ID NO: 303168 - RNA, 19 nt, Artificial Sequence
  Description of Artificial Sequence: Synthetic oligonucleotide
guuuucucaugacccacau

SEQ ID NO: 303169 - RNA, 19 nt, Artificial Sequence
  Description of Artificial Sequence: Synthetic oligonucleotide
guugucaccagguguugau

SEQ ID NO: 303170 - RNA, 19 nt, Artificial Sequence
  Description of Artificial Sequence: Synthetic oligonucleotide
gggacugauaacgauaaau

SEQ ID NO: 303171 - RNA, 19 nt, Artificial Sequence
  Description of Artificial Sequence: Synthetic oligonucleotide
aggcaaggagagcugcauu

SEQ ID NO: 303172 - RNA, 19 nt, Artificial Sequence
  Description of Artificial Sequence: Synthetic oligonucleotide
cauugccauuccagcgaug

SEQ ID NO: 303173 - RNA, 19 nt, Artificial Sequence
  Description of Artificial Sequence: Synthetic oligonucleotide
gaauuguggagaggccaaa

SEQ ID NO: 303174 - RNA, 19 nt, Artificial Sequence
  Description of Artificial Sequence: Synthetic oligonucleotide
acguagucauccccuccaa

SEQ ID NO: 303175 - RNA, 19 nt, Artificial Sequence
  Description of Artificial Sequence: Synthetic oligonucleotide
cagcaauggcacucaucuc

SEQ ID NO: 303176 - RNA, 19 nt, Artificial Sequence
  Description of Artificial Sequence: Synthetic oligonucleotide
caggcaaaauuacuuuuau

SEQ ID NO: 303177 - RNA, 19 nt, Artificial Sequence
  Description of Artificial Sequence: Synthetic oligonucleotide
cagugaacaggaacacugu

SEQ ID NO: 303178 - RNA, 19 nt, Artificial Sequence
  Description of Artificial Sequence: Synthetic oligonucleotide
cacggagaguuugguuaag

SEQ ID NO: 303179 - RNA, 19 nt, Artificial Sequence
  Description of Artificial Sequence: Synthetic oligonucleotide
caccgcccgugcaggaccc

SEQ ID NO: 303180 - RNA, 19 nt, Artificial Sequence
  Description of Artificial Sequence: Synthetic oligonucleotide
gcagcgcuauaaucuggug

SEQ ID NO: 303181 - RNA, 19 nt, Artificial Sequence
  Description of Artificial Sequence: Synthetic oligonucleotide
ggccuuagguucaauccuc

SEQ ID NO: 303182 - RNA, 19 nt, Artificial Sequence
  Description of Artificial Sequence: Synthetic oligonucleotide
gccacaaggacaaugucau

SEQ ID NO: 303183 - RNA, 19 nt, Artificial Sequence
  Description of Artificial Sequence: Synthetic oligonucleotide
ccuagacuacauaaugacu

SEQ ID NO: 303184 - RNA, 19 nt, Artificial Sequence
  Description of Artificial Sequence: Synthetic oligonucleotide
ccgugcaggacccuccuuc

SEQ ID NO: 303185 - RNA, 19 nt, Artificial Sequence
  Description of Artificial Sequence: Synthetic oligonucleotide
gggccuuagguucaauccu

SEQ ID NO: 303186 - RNA, 19 nt, Artificial Sequence
  Description of Artificial Sequence: Synthetic oligonucleotide
ggggcucauaguaaggaua

SEQ ID NO: 303187 - RNA, 19 nt, Artificial Sequence
  Description of Artificial Sequence: Synthetic oligonucleotide
ggauugagacccagucuca

SEQ ID NO: 303188 - RNA, 19 nt, Artificial Sequence
  Description of Artificial Sequence: Synthetic oligonucleotide
caucagugauaagaauugu

SEQ ID NO: 303189 - RNA, 19 nt, Artificial Sequence
  Description of Artificial Sequence: Synthetic oligonucleotide
cauagcgccacaccagcuu

SEQ ID NO: 303190 - RNA, 19 nt, Artificial Sequence
  Description of Artificial Sequence: Synthetic oligonucleotide
augugcauucucagagauu

SEQ ID NO: 303191 - RNA, 19 nt, Artificial Sequence
  Description of Artificial Sequence: Synthetic oligonucleotide
acucgcccaaagguugaau

SEQ ID NO: 303192 - RNA, 19 nt, Artificial Sequence
  Description of Artificial Sequence: Synthetic oligonucleotide
gauuuccugucugcuuggu

SEQ ID NO: 303193 - RNA, 19 nt, Artificial Sequence
  Description of Artificial Sequence: Synthetic oligonucleotide
ccuccuaucccucccugca

SEQ ID NO: 303194 - RNA, 19 nt, Artificial Sequence
  Description of Artificial Sequence: Synthetic oligonucleotide
ggugcagaguaagacaguu

SEQ ID NO: 303195 - RNA, 19 nt, Artificial Sequence
  Description of Artificial Sequence: Synthetic oligonucleotide
gggucucagauccuguuuu

SEQ ID NO: 303196 - RNA, 19 nt, Artificial Sequence
  Description of Artificial Sequence: Synthetic oligonucleotide
cuccuaucccucccugcaa

SEQ ID NO: 303197 - RNA, 19 nt, Artificial Sequence
  Description of Artificial Sequence: Synthetic oligonucleotide
agcgccacaccagcuugau

SEQ ID NO: 303198 - RNA, 19 nt, Artificial Sequence
  Description of Artificial Sequence: Synthetic oligonucleotide
cacuacggagccaguuaua

SEQ ID NO: 303199 - RNA, 19 nt, Artificial Sequence
  Description of Artificial Sequence: Synthetic oligonucleotide
cgcuauaaucuggugaaga

SEQ ID NO: 303200 - RNA, 19 nt, Artificial Sequence
  Description of Artificial Sequence: Synthetic oligonucleotide
gacucguagucaugaccuu

SEQ ID NO: 303201 - RNA, 19 nt, Artificial Sequence
  Description of Artificial Sequence: Synthetic oligonucleotide
caugacccacaugaagggu

SEQ ID NO: 303202 - RNA, 19 nt, Artificial Sequence
  Description of Artificial Sequence: Synthetic oligonucleotide
cauucucgccgaagaucaa

SEQ ID NO: 303203 - RNA, 19 nt, Artificial Sequence
  Description of Artificial Sequence: Synthetic oligonucleotide
gcgcuauaaucuggugaag

SEQ ID NO: 303204 - RNA, 19 nt, Artificial Sequence
  Description of Artificial Sequence: Synthetic oligonucleotide
agagucggucauggaggau

SEQ ID NO: 303205 - RNA, 19 nt, Artificial Sequence
  Description of Artificial Sequence: Synthetic oligonucleotide
gcaaauuuagaggguggau

SEQ ID NO: 303206 - RNA, 19 nt, Artificial Sequence
  Description of Artificial Sequence: Synthetic oligonucleotide
gccguugagguaauagagu

SEQ ID NO: 303207 - RNA, 19 nt, Artificial Sequence
  Description of Artificial Sequence: Synthetic oligonucleotide
cuacccacaugugcauucu

SEQ ID NO: 303208 - RNA, 19 nt, Artificial Sequence
  Description of Artificial Sequence: Synthetic oligonucleotide
gguuaagcagucggacgua

SEQ ID NO: 303209 - RNA, 19 nt, Artificial Sequence
  Description of Artificial Sequence: Synthetic oligonucleotide
gcucaguuacagcuuccgu

SEQ ID NO: 303210 - RNA, 19 nt, Artificial Sequence
  Description of Artificial Sequence: Synthetic oligonucleotide
gcaaggagagcugcauugu

SEQ ID NO: 303211 - RNA, 19 nt, Artificial Sequence
  Description of Artificial Sequence: Synthetic oligonucleotide
cucguacuuuugccauaaa

SEQ ID NO: 303212 - RNA, 19 nt, Artificial Sequence
  Description of Artificial Sequence: Synthetic oligonucleotide
gcgguucaauggagcagcc

SEQ ID NO: 303213 - RNA, 19 nt, Artificial Sequence
  Description of Artificial Sequence: Synthetic oligonucleotide
ccucguacuuuugccauaa

SEQ ID NO: 303214 - RNA, 19 nt, Artificial Sequence
  Description of Artificial Sequence: Synthetic oligonucleotide
gcaagucuucuacccacau

SEQ ID NO: 303215 - RNA, 19 nt, Artificial Sequence
  Description of Artificial Sequence: Synthetic oligonucleotide
ccuaucccucccugcaaaa

SEQ ID NO: 303216 - RNA, 19 nt, Artificial Sequence
  Description of Artificial Sequence: Synthetic oligonucleotide
gugcagaguaagacaguuu

SEQ ID NO: 303217 - RNA, 19 nt, Artificial Sequence
  Description of Artificial Sequence: Synthetic oligonucleotide
cccucccugcaaaauggaa

SEQ ID NO: 303218 - RNA, 19 nt, Artificial Sequence
  Description of Artificial Sequence: Synthetic oligonucleotide
cggacguagucauccccuc

SEQ ID NO: 303219 - RNA, 19 nt, Artificial Sequence
  Description of Artificial Sequence: Synthetic oligonucleotide
cccgaccucuucucuuuca

SEQ ID NO: 303220 - RNA, 19 nt, Artificial Sequence
  Description of Artificial Sequence: Synthetic oligonucleotide
caguuacagcuuccguuuu

SEQ ID NO: 303221 - RNA, 19 nt, Artificial Sequence
  Description of Artificial Sequence: Synthetic oligonucleotide
cacucgcccaaagguugaa

SEQ ID NO: 303222 - RNA, 19 nt, Artificial Sequence
  Description of Artificial Sequence: Synthetic oligonucleotide
ccacuucauacaucuucgu

SEQ ID NO: 303223 - RNA, 19 nt, Artificial Sequence
  Description of Artificial Sequence: Synthetic oligonucleotide
gcagguuuucacggagagu

SEQ ID NO: 303224 - RNA, 19 nt, Artificial Sequence
  Description of Artificial Sequence: Synthetic oligonucleotide
ggacacuacggagccaguu

SEQ ID NO: 303225 - RNA, 19 nt, Artificial Sequence
  Description of Artificial Sequence: Synthetic oligonucleotide
gcgccacaccagcuugauc

SEQ ID NO: 303226 - RNA, 19 nt, Artificial Sequence
  Description of Artificial Sequence: Synthetic oligonucleotide
ccccgaccucuucucuuuc

SEQ ID NO: 303227 - RNA, 19 nt, Artificial Sequence
  Description of Artificial Sequence: Synthetic oligonucleotide
caaugccguugagguaaua

SEQ ID NO: 303228 - RNA, 19 nt, Artificial Sequence
  Description of Artificial Sequence: Synthetic oligonucleotide
accgcccgugcaggacccu

SEQ ID NO: 303229 - RNA, 19 nt, Artificial Sequence
  Description of Artificial Sequence: Synthetic oligonucleotide
gcccgugcaggacccuccu

SEQ ID NO: 303230 - RNA, 19 nt, Artificial Sequence
  Description of Artificial Sequence: Synthetic oligonucleotide
cguagucauccccuccaau

SEQ ID NO: 303231 - RNA, 19 nt, Artificial Sequence
  Description of Artificial Sequence: Synthetic oligonucleotide
ccgcccgugcaggacccuc

SEQ ID NO: 303232 - RNA, 19 nt, Artificial Sequence
  Description of Artificial Sequence: Synthetic oligonucleotide
gccaggacuuggaccucau

SEQ ID NO: 303233 - RNA, 19 nt, Artificial Sequence
  Description of Artificial Sequence: Synthetic oligonucleotide
ccccuccaauagcgaacau

SEQ ID NO: 303234 - RNA, 19 nt, Artificial Sequence
  Description of Artificial Sequence: Synthetic oligonucleotide
cccgugcaggacccuccuu

SEQ ID NO: 303235 - RNA, 19 nt, Artificial Sequence
  Description of Artificial Sequence: Synthetic oligonucleotide
acauaauucgaacaucagc

SEQ ID NO: 303236 - RNA, 19 nt, Artificial Sequence
  Description of Artificial Sequence: Synthetic oligonucleotide
agugcagucagacaugagc

SEQ ID NO: 303237 - RNA, 19 nt, Artificial Sequence
  Description of Artificial Sequence: Synthetic oligonucleotide
agagaauccagcuuggcac

SEQ ID NO: 303238 - RNA, 19 nt, Artificial Sequence
  Description of Artificial Sequence: Synthetic oligonucleotide
augucuuuuccucaaauac

SEQ ID NO: 303239 - RNA, 19 nt, Artificial Sequence
  Description of Artificial Sequence: Synthetic oligonucleotide
auuuguacugcauccaugg

SEQ ID NO: 303240 - RNA, 19 nt, Artificial Sequence
  Description of Artificial Sequence: Synthetic oligonucleotide
ucaacaacccauuagaaau

SEQ ID NO: 303241 - RNA, 19 nt, Artificial Sequence
  Description of Artificial Sequence: Synthetic oligonucleotide
agaguaucaauaugaagac

SEQ ID NO: 303242 - RNA, 19 nt, Artificial Sequence
  Description of Artificial Sequence: Synthetic oligonucleotide
aaagcuugcagacagcaga

SEQ ID NO: 303243 - RNA, 19 nt, Artificial Sequence
  Description of Artificial Sequence: Synthetic oligonucleotide
aagggucuaggccaggacc

SEQ ID NO: 303244 - RNA, 19 nt, Artificial Sequence
  Description of Artificial Sequence: Synthetic oligonucleotide
cagaguaucaauaugaaga

SEQ ID NO: 303245 - RNA, 19 nt, Artificial Sequence
  Description of Artificial Sequence: Synthetic oligonucleotide
gaugccuacaagcugaagc

SEQ ID NO: 303246 - RNA, 19 nt, Artificial Sequence
  Description of Artificial Sequence: Synthetic oligonucleotide
guaucugaggacuaaagcc

SEQ ID NO: 303247 - RNA, 19 nt, Artificial Sequence
  Description of Artificial Sequence: Synthetic oligonucleotide
aaucaggacucuuuaagug

SEQ ID NO: 303248 - RNA, 19 nt, Artificial Sequence
  Description of Artificial Sequence: Synthetic oligonucleotide
guauguggagguuagauug

SEQ ID NO: 303249 - RNA, 19 nt, Artificial Sequence
  Description of Artificial Sequence: Synthetic oligonucleotide
aguagaaaccauucucccc

SEQ ID NO: 303250 - RNA, 19 nt, Artificial Sequence
  Description of Artificial Sequence: Synthetic oligonucleotide
aagauaggagaucuggcug

SEQ ID NO: 303251 - RNA, 19 nt, Artificial Sequence
  Description of Artificial Sequence: Synthetic oligonucleotide
cuuuagauaauuuggcuuc

SEQ ID NO: 303252 - RNA, 19 nt, Artificial Sequence
  Description of Artificial Sequence: Synthetic oligonucleotide
uacgagaagauccggaggc

SEQ ID NO: 303253 - RNA, 19 nt, Artificial Sequence
  Description of Artificial Sequence: Synthetic oligonucleotide
auuuguauggcaguagcac

SEQ ID NO: 303254 - RNA, 19 nt, Artificial Sequence
  Description of Artificial Sequence: Synthetic oligonucleotide
uguacugcauccaugggga

SEQ ID NO: 303255 - RNA, 19 nt, Artificial Sequence
  Description of Artificial Sequence: Synthetic oligonucleotide
cucaauaguuaguaugugg

SEQ ID NO: 303256 - RNA, 19 nt, Artificial Sequence
  Description of Artificial Sequence: Synthetic oligonucleotide
agguuagauugucagaagg

SEQ ID NO: 303257 - RNA, 19 nt, Artificial Sequence
  Description of Artificial Sequence: Synthetic oligonucleotide
uagauugucagaagggucu

SEQ ID NO: 303258 - RNA, 19 nt, Artificial Sequence
  Description of Artificial Sequence: Synthetic oligonucleotide
ucuuuaagugucuugcaca

SEQ ID NO: 303259 - RNA, 19 nt, Artificial Sequence
  Description of Artificial Sequence: Synthetic oligonucleotide
aaaacugugaguguccgga

SEQ ID NO: 303260 - RNA, 19 nt, Artificial Sequence
  Description of Artificial Sequence: Synthetic oligonucleotide
ugauuuguauggcaguagc

SEQ ID NO: 303261 - RNA, 19 nt, Artificial Sequence
  Description of Artificial Sequence: Synthetic oligonucleotide
auuacgagaagauccggag

SEQ ID NO: 303262 - RNA, 19 nt, Artificial Sequence
  Description of Artificial Sequence: Synthetic oligonucleotide
aaaacgugguguagaagcc

SEQ ID NO: 303263 - RNA, 19 nt, Artificial Sequence
  Description of Artificial Sequence: Synthetic oligonucleotide
caacccauuagaaaucagg

SEQ ID NO: 303264 - RNA, 19 nt, Artificial Sequence
  Description of Artificial Sequence: Synthetic oligonucleotide
ugucucauggaaauaccag

SEQ ID NO: 303265 - RNA, 19 nt, Artificial Sequence
  Description of Artificial Sequence: Synthetic oligonucleotide
gacaaaagccaguaagcag

SEQ ID NO: 303266 - RNA, 19 nt, Artificial Sequence
  Description of Artificial Sequence: Synthetic oligonucleotide
uaauucgaacaucagcaug

SEQ ID NO: 303267 - RNA, 19 nt, Artificial Sequence
  Description of Artificial Sequence: Synthetic oligonucleotide
uaagcagugcaaccagucg

SEQ ID NO: 303268 - RNA, 19 nt, Artificial Sequence
  Description of Artificial Sequence: Synthetic oligonucleotide
cuuuaagugucuugcacag

SEQ ID NO: 303269 - RNA, 19 nt, Artificial Sequence
  Description of Artificial Sequence: Synthetic oligonucleotide
gauuguucgccguugguug

SEQ ID NO: 303270 - RNA, 19 nt, Artificial Sequence
  Description of Artificial Sequence: Synthetic oligonucleotide
uuacgagaagauccggagg

SEQ ID NO: 303271 - RNA, 19 nt, Artificial Sequence
  Description of Artificial Sequence: Synthetic oligonucleotide
agaguguagucagaguucc

SEQ ID NO: 303272 - RNA, 19 nt, Artificial Sequence
  Description of Artificial Sequence: Synthetic oligonucleotide
auagaguguagucagaguu

SEQ ID NO: 303273 - RNA, 19 nt, Artificial Sequence
  Description of Artificial Sequence: Synthetic oligonucleotide
ucuuuagcaagcuugggua

SEQ ID NO: 303274 - RNA, 19 nt, Artificial Sequence
  Description of Artificial Sequence: Synthetic oligonucleotide
cugauuacgagaagauccg

SEQ ID NO: 303275 - RNA, 19 nt, Artificial Sequence
  Description of Artificial Sequence: Synthetic oligonucleotide
uuuaugcagcucuuuagca

SEQ ID NO: 303276 - RNA, 19 nt, Artificial Sequence
  Description of Artificial Sequence: Synthetic oligonucleotide
uggcucaauaguuaguaug

SEQ ID NO: 303277 - RNA, 19 nt, Artificial Sequence
  Description of Artificial Sequence: Synthetic oligonucleotide
ucuacucgcucacuugccg

SEQ ID NO: 303278 - RNA, 19 nt, Artificial Sequence
  Description of Artificial Sequence: Synthetic oligonucleotide
acaaaagccugauuacgag

SEQ ID NO: 303279 - RNA, 19 nt, Artificial Sequence
  Description of Artificial Sequence: Synthetic oligonucleotide
caaacacgcagucagggag

SEQ ID NO: 303280 - RNA, 19 nt, Artificial Sequence
  Description of Artificial Sequence: Synthetic oligonucleotide
cucugguaaaagcacaggc

SEQ ID NO: 303281 - RNA, 19 nt, Artificial Sequence
  Description of Artificial Sequence: Synthetic oligonucleotide
auccgacuucccuuuaugc

SEQ ID NO: 303282 - RNA, 19 nt, Artificial Sequence
  Description of Artificial Sequence: Synthetic oligonucleotide
uggaacaccucucugcgga

SEQ ID NO: 303283 - RNA, 19 nt, Artificial Sequence
  Description of Artificial Sequence: Synthetic oligonucleotide
gaauuuggugaccagagua

SEQ ID NO: 303284 - RNA, 19 nt, Artificial Sequence
  Description of Artificial Sequence: Synthetic oligonucleotide
ugagacagacccuuuagau

SEQ ID NO: 303285 - RNA, 19 nt, Artificial Sequence
  Description of Artificial Sequence: Synthetic oligonucleotide
ucuaagaagagaggcacga

SEQ ID NO: 303286 - RNA, 19 nt, Artificial Sequence
  Description of Artificial Sequence: Synthetic oligonucleotide
aacucagcaaaacguggug

SEQ ID NO: 303287 - RNA, 19 nt, Artificial Sequence
  Description of Artificial Sequence: Synthetic oligonucleotide
aggugaaagagguguugcc

SEQ ID NO: 303288 - RNA, 19 nt, Artificial Sequence
  Description of Artificial Sequence: Synthetic oligonucleotide
aacaccucucugcggauag

SEQ ID NO: 303289 - RNA, 19 nt, Artificial Sequence
  Description of Artificial Sequence: Synthetic oligonucleotide
guaaggcaggcacugagag

SEQ ID NO: 303290 - RNA, 19 nt, Artificial Sequence
  Description of Artificial Sequence: Synthetic oligonucleotide
uuuguacugcauccauggg

SEQ ID NO: 303291 - RNA, 19 nt, Artificial Sequence
  Description of Artificial Sequence: Synthetic oligonucleotide
aauccggacagccauugaa

SEQ ID NO: 303292 - RNA, 19 nt, Artificial Sequence
  Description of Artificial Sequence: Synthetic oligonucleotide
ugcggauagaagcccaaag

SEQ ID NO: 303293 - RNA, 19 nt, Artificial Sequence
  Description of Artificial Sequence: Synthetic oligonucleotide
guacaaaagccugauuacg

SEQ ID NO: 303294 - RNA, 19 nt, Artificial Sequence
  Description of Artificial Sequence: Synthetic oligonucleotide
caagggcucagcuaccugg

SEQ ID NO: 303295 - RNA, 19 nt, Artificial Sequence
  Description of Artificial Sequence: Synthetic oligonucleotide
aaaagccugauuacgagaa

SEQ ID NO: 303296 - RNA, 19 nt, Artificial Sequence
  Description of Artificial Sequence: Synthetic oligonucleotide
caugauuuggggugauucc

SEQ ID NO: 303297 - RNA, 19 nt, Artificial Sequence
  Description of Artificial Sequence: Synthetic oligonucleotide
ucuagcaacauccgacuuc

SEQ ID NO: 303298 - RNA, 19 nt, Artificial Sequence
  Description of Artificial Sequence: Synthetic oligonucleotide
agaggcacgaugcauguga

SEQ ID NO: 303299 - RNA, 19 nt, Artificial Sequence
  Description of Artificial Sequence: Synthetic oligonucleotide
agucccgcaaagcacuugg

SEQ ID NO: 303300 - RNA, 19 nt, Artificial Sequence
  Description of Artificial Sequence: Synthetic oligonucleotide
auuguucgccguugguugc

SEQ ID NO: 303301 - RNA, 19 nt, Artificial Sequence
  Description of Artificial Sequence: Synthetic oligonucleotide
ugggauguguugaaauggc

SEQ ID NO: 303302 - RNA, 19 nt, Artificial Sequence
  Description of Artificial Sequence: Synthetic oligonucleotide
aucaggacucuuuaagugu

SEQ ID NO: 303303 - RNA, 19 nt, Artificial Sequence
  Description of Artificial Sequence: Synthetic oligonucleotide
augaagacucaugauuugg

SEQ ID NO: 303304 - RNA, 19 nt, Artificial Sequence
  Description of Artificial Sequence: Synthetic oligonucleotide
ugagaacccaaaacuguga

SEQ ID NO: 303305 - RNA, 19 nt, Artificial Sequence
  Description of Artificial Sequence: Synthetic oligonucleotide
cauuucaaggauuguucgc

SEQ ID NO: 303306 - RNA, 19 nt, Artificial Sequence
  Description of Artificial Sequence: Synthetic oligonucleotide
auucuccccucgcagacac

SEQ ID NO: 303307 - RNA, 19 nt, Artificial Sequence
  Description of Artificial Sequence: Synthetic oligonucleotide
ucccaggaucauuucaagg

SEQ ID NO: 303308 - RNA, 19 nt, Artificial Sequence
  Description of Artificial Sequence: Synthetic oligonucleotide
acuaggccauaccaguuuc

SEQ ID NO: 303309 - RNA, 19 nt, Artificial Sequence
  Description of Artificial Sequence: Synthetic oligonucleotide
caucuaagaagagaggcac

SEQ ID NO: 303310 - RNA, 19 nt, Artificial Sequence
  Description of Artificial Sequence: Synthetic oligonucleotide
uuaugcagcucuuuagcaa

SEQ ID NO: 303311 - RNA, 19 nt, Artificial Sequence
  Description of Artificial Sequence: Synthetic oligonucleotide
aagauccggaggccaggcc

SEQ ID NO: 303312 - RNA, 19 nt, Artificial Sequence
  Description of Artificial Sequence: Synthetic oligonucleotide
agaauguugcugaggaagg

SEQ ID NO: 303313 - RNA, 19 nt, Artificial Sequence
  Description of Artificial Sequence: Synthetic oligonucleotide
aagccuugguuacccagag

SEQ ID NO: 303314 - RNA, 19 nt, Artificial Sequence
  Description of Artificial Sequence: Synthetic oligonucleotide
cuuuagcaagcuuggguag

SEQ ID NO: 303315 - RNA, 19 nt, Artificial Sequence
  Description of Artificial Sequence: Synthetic oligonucleotide
ugccaucuaagaagagagg

SEQ ID NO: 303316 - RNA, 19 nt, Artificial Sequence
  Description of Artificial Sequence: Synthetic oligonucleotide
caguccuguagaauguugc

SEQ ID NO: 303317 - RNA, 19 nt, Artificial Sequence
  Description of Artificial Sequence: Synthetic oligonucleotide
cacauuucguggcagggag

SEQ ID NO: 303318 - RNA, 19 nt, Artificial Sequence
  Description of Artificial Sequence: Synthetic oligonucleotide
uccgacuucccuuuaugca

SEQ ID NO: 303319 - RNA, 19 nt, Artificial Sequence
  Description of Artificial Sequence: Synthetic oligonucleotide
guuaguauguggagguuag

SEQ ID NO: 303320 - RNA, 19 nt, Artificial Sequence
  Description of Artificial Sequence: Synthetic oligonucleotide
cucuuuaagugucuugcac

SEQ ID NO: 303321 - RNA, 19 nt, Artificial Sequence
  Description of Artificial Sequence: Synthetic oligonucleotide
caugagacagacccuuuag

SEQ ID NO: 303322 - RNA, 19 nt, Artificial Sequence
  Description of Artificial Sequence: Synthetic oligonucleotide
ucucuagcaacauccgacu

SEQ ID NO: 303323 - RNA, 19 nt, Artificial Sequence
  Description of Artificial Sequence: Synthetic oligonucleotide
cuggggucgugucagagcc

SEQ ID NO: 303324 - RNA, 19 nt, Artificial Sequence
  Description of Artificial Sequence: Synthetic oligonucleotide
uagaguguagucagaguuc

SEQ ID NO: 303325 - RNA, 19 nt, Artificial Sequence
  Description of Artificial Sequence: Synthetic oligonucleotide
cuggaaucggcuugggaag

SEQ ID NO: 303326 - RNA, 19 nt, Artificial Sequence
  Description of Artificial Sequence: Synthetic oligonucleotide
aggcccaugagccgggugg

SEQ ID NO: 303327 - RNA, 19 nt, Artificial Sequence
  Description of Artificial Sequence: Synthetic oligonucleotide
uccgaugacagaugccaag

SEQ ID NO: 303328 - RNA, 19 nt, Artificial Sequence
  Description of Artificial Sequence: Synthetic oligonucleotide
gucauggcaggacagugcc

SEQ ID NO: 303329 - RNA, 19 nt, Artificial Sequence
  Description of Artificial Sequence: Synthetic oligonucleotide
ucgagaagcucccgcauga

SEQ ID NO: 303330 - RNA, 19 nt, Artificial Sequence
  Description of Artificial Sequence: Synthetic oligonucleotide
gcuggcggaacauaauucg

SEQ ID NO: 303331 - RNA, 19 nt, Artificial Sequence
  Description of Artificial Sequence: Synthetic oligonucleotide
aggaauuuggugaccagag

SEQ ID NO: 303332 - RNA, 19 nt, Artificial Sequence
  Description of Artificial Sequence: Synthetic oligonucleotide
aguuugcagagaauccagc

SEQ ID NO: 303333 - RNA, 19 nt, Artificial Sequence
  Description of Artificial Sequence: Synthetic oligonucleotide
guagaaaccauucuccccu

SEQ ID NO: 303334 - RNA, 19 nt, Artificial Sequence
  Description of Artificial Sequence: Synthetic oligonucleotide
aaccagucgccucugcgca

SEQ ID NO: 303335 - RNA, 19 nt, Artificial Sequence
  Description of Artificial Sequence: Synthetic oligonucleotide
agguaggcgagugagagca

SEQ ID NO: 303336 - RNA, 19 nt, Artificial Sequence
  Description of Artificial Sequence: Synthetic oligonucleotide
gguaaaagcacaggcuugg

SEQ ID NO: 303337 - RNA, 19 nt, Artificial Sequence
  Description of Artificial Sequence: Synthetic oligonucleotide
ccaacuguugcccuggagg

SEQ ID NO: 303338 - RNA, 19 nt, Artificial Sequence
  Description of Artificial Sequence: Synthetic oligonucleotide
uuuagcaagcuuggguagc

SEQ ID NO: 303339 - RNA, 19 nt, Artificial Sequence
  Description of Artificial Sequence: Synthetic oligonucleotide
ucccgcaugaguugguuca

SEQ ID NO: 303340 - RNA, 19 nt, Artificial Sequence
  Description of Artificial Sequence: Synthetic oligonucleotide
aacgugguguagaagccag

SEQ ID NO: 303341 - RNA, 19 nt, Artificial Sequence
  Description of Artificial Sequence: Synthetic oligonucleotide
agaguuugcagagaaucca

SEQ ID NO: 303342 - RNA, 19 nt, Artificial Sequence
  Description of Artificial Sequence: Synthetic oligonucleotide
auuuggugaccagaguauc

SEQ ID NO: 303343 - RNA, 19 nt, Artificial Sequence
  Description of Artificial Sequence: Synthetic oligonucleotide
uccggacagccauugaaug

SEQ ID NO: 303344 - RNA, 19 nt, Artificial Sequence
  Description of Artificial Sequence: Synthetic oligonucleotide
agcagugcaaccagucgcc

SEQ ID NO: 303345 - RNA, 19 nt, Artificial Sequence
  Description of Artificial Sequence: Synthetic oligonucleotide
ugauuacgagaagauccgg

SEQ ID NO: 303346 - RNA, 19 nt, Artificial Sequence
  Description of Artificial Sequence: Synthetic oligonucleotide
uuuggcuaaggcccggauc

SEQ ID NO: 303347 - RNA, 19 nt, Artificial Sequence
  Description of Artificial Sequence: Synthetic oligonucleotide
aggaucauuucaaggauug

SEQ ID NO: 303348 - RNA, 19 nt, Artificial Sequence
  Description of Artificial Sequence: Synthetic oligonucleotide
ucgugucagagccaugaac

SEQ ID NO: 303349 - RNA, 19 nt, Artificial Sequence
  Description of Artificial Sequence: Synthetic oligonucleotide
gcggauagaagcccaaagg

SEQ ID NO: 303350 - RNA, 19 nt, Artificial Sequence
  Description of Artificial Sequence: Synthetic oligonucleotide
aguauguggagguuagauu

SEQ ID NO: 303351 - RNA, 19 nt, Artificial Sequence
  Description of Artificial Sequence: Synthetic oligonucleotide
agucagaguucccgaugcc

SEQ ID NO: 303352 - RNA, 19 nt, Artificial Sequence
  Description of Artificial Sequence: Synthetic oligonucleotide
guaguggcaguuccgauga

SEQ ID NO: 303353 - RNA, 19 nt, Artificial Sequence
  Description of Artificial Sequence: Synthetic oligonucleotide
agaaucccaggaucauuuc

SEQ ID NO: 303354 - RNA, 19 nt, Artificial Sequence
  Description of Artificial Sequence: Synthetic oligonucleotide
gaaucccaggaucauuuca

SEQ ID NO: 303355 - RNA, 19 nt, Artificial Sequence
  Description of Artificial Sequence: Synthetic oligonucleotide
agauccggaggccaggcca

SEQ ID NO: 303356 - RNA, 19 nt, Artificial Sequence
  Description of Artificial Sequence: Synthetic oligonucleotide
agaaaccauucuccccucg

SEQ ID NO: 303357 - RNA, 19 nt, Artificial Sequence
  Description of Artificial Sequence: Synthetic oligonucleotide
aguugguucagcugaggaa

SEQ ID NO: 303358 - RNA, 19 nt, Artificial Sequence
  Description of Artificial Sequence: Synthetic oligonucleotide
ucccgcaaagcacuuggca

SEQ ID NO: 303359 - RNA, 19 nt, Artificial Sequence
  Description of Artificial Sequence: Synthetic oligonucleotide
ugaagcgagucagaggccu

SEQ ID NO: 303360 - RNA, 19 nt, Artificial Sequence
  Description of Artificial Sequence: Synthetic oligonucleotide
cacccuacaacucucagaa

SEQ ID NO: 303361 - RNA, 19 nt, Artificial Sequence
  Description of Artificial Sequence: Synthetic oligonucleotide
auagaagcccaaaggcugg

SEQ ID NO: 303362 - RNA, 19 nt, Artificial Sequence
  Description of Artificial Sequence: Synthetic oligonucleotide
gccaugaacaccaaugagc

SEQ ID NO: 303363 - RNA, 19 nt, Artificial Sequence
  Description of Artificial Sequence: Synthetic oligonucleotide
gauuacgagaagauccgga

SEQ ID NO: 303364 - RNA, 19 nt, Artificial Sequence
  Description of Artificial Sequence: Synthetic oligonucleotide
uaggcgagugagagcaugc

SEQ ID NO: 303365 - RNA, 19 nt, Artificial Sequence
  Description of Artificial Sequence: Synthetic oligonucleotide
uggagguuagauugucaga

SEQ ID NO: 303366 - RNA, 19 nt, Artificial Sequence
  Description of Artificial Sequence: Synthetic oligonucleotide
aguccuguagaauguugcu

SEQ ID NO: 303367 - RNA, 19 nt, Artificial Sequence
  Description of Artificial Sequence: Synthetic oligonucleotide
ugggcuccccaguagaaac

SEQ ID NO: 303368 - RNA, 19 nt, Artificial Sequence
  Description of Artificial Sequence: Synthetic oligonucleotide
aaacgugguguagaagcca

SEQ ID NO: 303369 - RNA, 19 nt, Artificial Sequence
  Description of Artificial Sequence: Synthetic oligonucleotide
uguagucagaguucccgau

SEQ ID NO: 303370 - RNA, 19 nt, Artificial Sequence
  Description of Artificial Sequence: Synthetic oligonucleotide
gaugccaaggcagcuaaga

SEQ ID NO: 303371 - RNA, 19 nt, Artificial Sequence
  Description of Artificial Sequence: Synthetic oligonucleotide
cuaacucagggcucaggug

SEQ ID NO: 303372 - RNA, 19 nt, Artificial Sequence
  Description of Artificial Sequence: Synthetic oligonucleotide
aaccaaacaggcacgguau

SEQ ID NO: 303373 - RNA, 19 nt, Artificial Sequence
  Description of Artificial Sequence: Synthetic oligonucleotide
uaaggcccggaucaccugu

SEQ ID NO: 303374 - RNA, 19 nt, Artificial Sequence
  Description of Artificial Sequence: Synthetic oligonucleotide
acaaacacgcagucaggga

SEQ ID NO: 303375 - RNA, 19 nt, Artificial Sequence
  Description of Artificial Sequence: Synthetic oligonucleotide
agaaaugccgggaacacuu

SEQ ID NO: 303376 - RNA, 19 nt, Artificial Sequence
  Description of Artificial Sequence: Synthetic oligonucleotide
caguuccgaugacagaugc

SEQ ID NO: 303377 - RNA, 19 nt, Artificial Sequence
  Description of Artificial Sequence: Synthetic oligonucleotide
aaccgaggauuccuucucu

SEQ ID NO: 303378 - RNA, 19 nt, Artificial Sequence
  Description of Artificial Sequence: Synthetic oligonucleotide
agcaugcauacacugcaga

SEQ ID NO: 303379 - RNA, 19 nt, Artificial Sequence
  Description of Artificial Sequence: Synthetic oligonucleotide
gaguugguucagcugagga

SEQ ID NO: 303380 - RNA, 19 nt, Artificial Sequence
  Description of Artificial Sequence: Synthetic oligonucleotide
gauuuguauggcaguagca

SEQ ID NO: 303381 - RNA, 19 nt, Artificial Sequence
  Description of Artificial Sequence: Synthetic oligonucleotide
gcugacaaagcuugcagac

SEQ ID NO: 303382 - RNA, 19 nt, Artificial Sequence
  Description of Artificial Sequence: Synthetic oligonucleotide
agcaaaacgugguguagaa

SEQ ID NO: 303383 - RNA, 19 nt, Artificial Sequence
  Description of Artificial Sequence: Synthetic oligonucleotide
uacugcauccauggggaag

SEQ ID NO: 303384 - RNA, 19 nt, Artificial Sequence
  Description of Artificial Sequence: Synthetic oligonucleotide
acaccaaugagcacagcug

SEQ ID NO: 303385 - RNA, 19 nt, Artificial Sequence
  Description of Artificial Sequence: Synthetic oligonucleotide
ugaguacaugagacagacc

SEQ ID NO: 303386 - RNA, 19 nt, Artificial Sequence
  Description of Artificial Sequence: Synthetic oligonucleotide
uuagcaagcuuggguagca

SEQ ID NO: 303387 - RNA, 19 nt, Artificial Sequence
  Description of Artificial Sequence: Synthetic oligonucleotide
accacggagucauggcagg

SEQ ID NO: 303388 - RNA, 19 nt, Artificial Sequence
  Description of Artificial Sequence: Synthetic oligonucleotide
ugcugggauguguugaaau

SEQ ID NO: 303389 - RNA, 19 nt, Artificial Sequence
  Description of Artificial Sequence: Synthetic oligonucleotide
uucaaggauuguucgccgu

SEQ ID NO: 303390 - RNA, 19 nt, Artificial Sequence
  Description of Artificial Sequence: Synthetic oligonucleotide
cuuggcacuaggccauacc

SEQ ID NO: 303391 - RNA, 19 nt, Artificial Sequence
  Description of Artificial Sequence: Synthetic oligonucleotide
agggccuagcucuggauca

SEQ ID NO: 303392 - RNA, 19 nt, Artificial Sequence
  Description of Artificial Sequence: Synthetic oligonucleotide
uuggaccaaagcaggcaca

SEQ ID NO: 303393 - RNA, 19 nt, Artificial Sequence
  Description of Artificial Sequence: Synthetic oligonucleotide
uggaccacggagucauggc

SEQ ID NO: 303394 - RNA, 19 nt, Artificial Sequence
  Description of Artificial Sequence: Synthetic oligonucleotide
aguuccgaugacagaugcc

SEQ ID NO: 303395 - RNA, 19 nt, Artificial Sequence
  Description of Artificial Sequence: Synthetic oligonucleotide
ucaaggauuguucgccguu

SEQ ID NO: 303396 - RNA, 19 nt, Artificial Sequence
  Description of Artificial Sequence: Synthetic oligonucleotide
aucuaagaagagaggcacg

SEQ ID NO: 303397 - RNA, 19 nt, Artificial Sequence
  Description of Artificial Sequence: Synthetic oligonucleotide
aggaccuuucucagaaccg

SEQ ID NO: 303398 - RNA, 19 nt, Artificial Sequence
  Description of Artificial Sequence: Synthetic oligonucleotide
uuagauaauuuggcuucac

SEQ ID NO: 303399 - RNA, 19 nt, Artificial Sequence
  Description of Artificial Sequence: Synthetic oligonucleotide
ugaguguccggaugccuac

SEQ ID NO: 303400 - RNA, 19 nt, Artificial Sequence
  Description of Artificial Sequence: Synthetic oligonucleotide
aaacugugaguguccggau

SEQ ID NO: 303401 - RNA, 19 nt, Artificial Sequence
  Description of Artificial Sequence: Synthetic oligonucleotide
cccuacaacucucagaauc

SEQ ID NO: 303402 - RNA, 19 nt, Artificial Sequence
  Description of Artificial Sequence: Synthetic oligonucleotide
ugagaguggaaagcuggac

SEQ ID NO: 303403 - RNA, 19 nt, Artificial Sequence
  Description of Artificial Sequence: Synthetic oligonucleotide
aaacacgcagucagggagu

SEQ ID NO: 303404 - RNA, 19 nt, Artificial Sequence
  Description of Artificial Sequence: Synthetic oligonucleotide
ugagccgggugguaaggca

SEQ ID NO: 303405 - RNA, 19 nt, Artificial Sequence
  Description of Artificial Sequence: Synthetic oligonucleotide
aacaggcacgguauagcug

SEQ ID NO: 303406 - RNA, 19 nt, Artificial Sequence
  Description of Artificial Sequence: Synthetic oligonucleotide
gugauuuguauggcaguag

SEQ ID NO: 303407 - RNA, 19 nt, Artificial Sequence
  Description of Artificial Sequence: Synthetic oligonucleotide
caugagaccauccucucua

SEQ ID NO: 303408 - RNA, 19 nt, Artificial Sequence
  Description of Artificial Sequence: Synthetic oligonucleotide
augagaccauccucucuag

SEQ ID NO: 303409 - RNA, 19 nt, Artificial Sequence
  Description of Artificial Sequence: Synthetic oligonucleotide
gucgguacaggugaccuac

SEQ ID NO: 303410 - RNA, 19 nt, Artificial Sequence
  Description of Artificial Sequence: Synthetic oligonucleotide
gucgccucugcgcagagga

SEQ ID NO: 303411 - RNA, 19 nt, Artificial Sequence
  Description of Artificial Sequence: Synthetic oligonucleotide
agccuugguuacccagagc

SEQ ID NO: 303412 - RNA, 19 nt, Artificial Sequence
  Description of Artificial Sequence: Synthetic oligonucleotide
acggagucauggcaggaca

SEQ ID NO: 303413 - RNA, 19 nt, Artificial Sequence
  Description of Artificial Sequence: Synthetic oligonucleotide
cacgaugcaugugacacuc

SEQ ID NO: 303414 - RNA, 19 nt, Artificial Sequence
  Description of Artificial Sequence: Synthetic oligonucleotide
cucuacucgcucacuugcc

SEQ ID NO: 303415 - RNA, 19 nt, Artificial Sequence
  Description of Artificial Sequence: Synthetic oligonucleotide
guaaaagcacaggcuuggg

SEQ ID NO: 303416 - RNA, 19 nt, Artificial Sequence
  Description of Artificial Sequence: Synthetic oligonucleotide
gaagcucagucgguacagg

SEQ ID NO: 303417 - RNA, 19 nt, Artificial Sequence
  Description of Artificial Sequence: Synthetic oligonucleotide
ccgacuucccuuuaugcag

SEQ ID NO: 303418 - RNA, 19 nt, Artificial Sequence
  Description of Artificial Sequence: Synthetic oligonucleotide
cgagucaacacaucagugc

SEQ ID NO: 303419 - RNA, 19 nt, Artificial Sequence
  Description of Artificial Sequence: Synthetic oligonucleotide
guuagauugucagaagggu

SEQ ID NO: 303420 - RNA, 19 nt, Artificial Sequence
  Description of Artificial Sequence: Synthetic oligonucleotide
cggauagaagcccaaaggc

SEQ ID NO: 303421 - RNA, 19 nt, Artificial Sequence
  Description of Artificial Sequence: Synthetic oligonucleotide
uugaggagucccgcaaagc

SEQ ID NO: 303422 - RNA, 19 nt, Artificial Sequence
  Description of Artificial Sequence: Synthetic oligonucleotide
cugcuuguugaggaguccc

SEQ ID NO: 303423 - RNA, 19 nt, Artificial Sequence
  Description of Artificial Sequence: Synthetic oligonucleotide
cauccgacuucccuuuaug

SEQ ID NO: 303424 - RNA, 19 nt, Artificial Sequence
  Description of Artificial Sequence: Synthetic oligonucleotide
guauagcugucucauggaa

SEQ ID NO: 303425 - RNA, 19 nt, Artificial Sequence
  Description of Artificial Sequence: Synthetic oligonucleotide
cucugcucgagaagcuccc

SEQ ID NO: 303426 - RNA, 19 nt, Artificial Sequence
  Description of Artificial Sequence: Synthetic oligonucleotide
gaagggucuaggccaggac

SEQ ID NO: 303427 - RNA, 19 nt, Artificial Sequence
  Description of Artificial Sequence: Synthetic oligonucleotide
acauuucguggcagggagc

SEQ ID NO: 303428 - RNA, 19 nt, Artificial Sequence
  Description of Artificial Sequence: Synthetic oligonucleotide
uggggugauuccaguagaa

SEQ ID NO: 303429 - RNA, 19 nt, Artificial Sequence
  Description of Artificial Sequence: Synthetic oligonucleotide
ggacuaaagccuugguuac

SEQ ID NO: 303430 - RNA, 19 nt, Artificial Sequence
  Description of Artificial Sequence: Synthetic oligonucleotide
gacuaaagccuugguuacc

SEQ ID NO: 303431 - RNA, 19 nt, Artificial Sequence
  Description of Artificial Sequence: Synthetic oligonucleotide
gguggguaguggcaguucc

SEQ ID NO: 303432 - RNA, 19 nt, Artificial Sequence
  Description of Artificial Sequence: Synthetic oligonucleotide
accgaggauuccuucucug

SEQ ID NO: 303433 - RNA, 19 nt, Artificial Sequence
  Description of Artificial Sequence: Synthetic oligonucleotide
aggauuccuucucuggcau

SEQ ID NO: 303434 - RNA, 19 nt, Artificial Sequence
  Description of Artificial Sequence: Synthetic oligonucleotide
ggagucaaggagguccucg

SEQ ID NO: 303435 - RNA, 19 nt, Artificial Sequence
  Description of Artificial Sequence: Synthetic oligonucleotide
ggcacgagucaacacauca

SEQ ID NO: 303436 - RNA, 19 nt, Artificial Sequence
  Description of Artificial Sequence: Synthetic oligonucleotide
uggguagccuguugaguac

SEQ ID NO: 303437 - RNA, 19 nt, Artificial Sequence
  Description of Artificial Sequence: Synthetic oligonucleotide
uucgccguugguugcucug

SEQ ID NO: 303438 - RNA, 19 nt, Artificial Sequence
  Description of Artificial Sequence: Synthetic oligonucleotide
acugcuuccuugcgcacaa

SEQ ID NO: 303439 - RNA, 19 nt, Artificial Sequence
  Description of Artificial Sequence: Synthetic oligonucleotide
ggcggaacauaauucgaac

SEQ ID NO: 303440 - RNA, 19 nt, Artificial Sequence
  Description of Artificial Sequence: Synthetic oligonucleotide
aguacaugagacagacccu

SEQ ID NO: 303441 - RNA, 19 nt, Artificial Sequence
  Description of Artificial Sequence: Synthetic oligonucleotide
cccgcaaagcacuuggcag

SEQ ID NO: 303442 - RNA, 19 nt, Artificial Sequence
  Description of Artificial Sequence: Synthetic oligonucleotide
cucgagaagcucccgcaug

SEQ ID NO: 303443 - RNA, 19 nt, Artificial Sequence
  Description of Artificial Sequence: Synthetic oligonucleotide
cauuucguggcagggagca

SEQ ID NO: 303444 - RNA, 19 nt, Artificial Sequence
  Description of Artificial Sequence: Synthetic oligonucleotide
caaggauuguucgccguug

SEQ ID NO: 303445 - RNA, 19 nt, Artificial Sequence
  Description of Artificial Sequence: Synthetic oligonucleotide
uuccgaugacagaugccaa

SEQ ID NO: 303446 - RNA, 19 nt, Artificial Sequence
  Description of Artificial Sequence: Synthetic oligonucleotide
ugccuacaagcugaagcug

SEQ ID NO: 303447 - RNA, 19 nt, Artificial Sequence
  Description of Artificial Sequence: Synthetic oligonucleotide
gaauguugcugaggaagga

SEQ ID NO: 303448 - RNA, 19 nt, Artificial Sequence
  Description of Artificial Sequence: Synthetic oligonucleotide
agcgaaggggcagcugugg

SEQ ID NO: 303449 - RNA, 19 nt, Artificial Sequence
  Description of Artificial Sequence: Synthetic oligonucleotide
gccaguaagcagugcaacc

SEQ ID NO: 303450 - RNA, 19 nt, Artificial Sequence
  Description of Artificial Sequence: Synthetic oligonucleotide
uacucgcucacuugccguc

SEQ ID NO: 303451 - RNA, 19 nt, Artificial Sequence
  Description of Artificial Sequence: Synthetic oligonucleotide
gcucagucgguacagguga

SEQ ID NO: 303452 - RNA, 19 nt, Artificial Sequence
  Description of Artificial Sequence: Synthetic oligonucleotide
ugugacacucugggcagcu

SEQ ID NO: 303453 - RNA, 19 nt, Artificial Sequence
  Description of Artificial Sequence: Synthetic oligonucleotide
ggugaaagagguguugcca

SEQ ID NO: 303454 - RNA, 19 nt, Artificial Sequence
  Description of Artificial Sequence: Synthetic oligonucleotide
guaggcgagugagagcaug

SEQ ID NO: 303455 - RNA, 19 nt, Artificial Sequence
  Description of Artificial Sequence: Synthetic oligonucleotide
caugagccgggugguaagg

SEQ ID NO: 303456 - RNA, 19 nt, Artificial Sequence
  Description of Artificial Sequence: Synthetic oligonucleotide
aggauuguucgccguuggu

SEQ ID NO: 303457 - RNA, 19 nt, Artificial Sequence
  Description of Artificial Sequence: Synthetic oligonucleotide
guauggcaguagcacagga

SEQ ID NO: 303458 - RNA, 19 nt, Artificial Sequence
  Description of Artificial Sequence: Synthetic oligonucleotide
cucagcaaaacguggugua

SEQ ID NO: 303459 - RNA, 19 nt, Artificial Sequence
  Description of Artificial Sequence: Synthetic oligonucleotide
acgguauagcugucucaug

SEQ ID NO: 303460 - RNA, 19 nt, Artificial Sequence
  Description of Artificial Sequence: Synthetic oligonucleotide
agcuaacucagggcucagg

SEQ ID NO: 303461 - RNA, 19 nt, Artificial Sequence
  Description of Artificial Sequence: Synthetic oligonucleotide
gcggaacauaauucgaaca

SEQ ID NO: 303462 - RNA, 19 nt, Artificial Sequence
  Description of Artificial Sequence: Synthetic oligonucleotide
gcuaagaccucaucuucca

SEQ ID NO: 303463 - RNA, 19 nt, Artificial Sequence
  Description of Artificial Sequence: Synthetic oligonucleotide
aucagugcagucagacaug

SEQ ID NO: 303464 - RNA, 19 nt, Artificial Sequence
  Description of Artificial Sequence: Synthetic oligonucleotide
cagguaggcgagugagagc

SEQ ID NO: 303465 - RNA, 19 nt, Artificial Sequence
  Description of Artificial Sequence: Synthetic oligonucleotide
cauccagagguuuggcuaa

SEQ ID NO: 303466 - RNA, 19 nt, Artificial Sequence
  Description of Artificial Sequence: Synthetic oligonucleotide
cuggcggaacauaauucga

SEQ ID NO: 303467 - RNA, 19 nt, Artificial Sequence
  Description of Artificial Sequence: Synthetic oligonucleotide
ggaguggagggcugcuagg

SEQ ID NO: 303468 - RNA, 19 nt, Artificial Sequence
  Description of Artificial Sequence: Synthetic oligonucleotide
ccgcaaagcacuuggcagc

SEQ ID NO: 303469 - RNA, 19 nt, Artificial Sequence
  Description of Artificial Sequence: Synthetic oligonucleotide
gcaugaguugguucagcug

SEQ ID NO: 303470 - RNA, 19 nt, Artificial Sequence
  Description of Artificial Sequence: Synthetic oligonucleotide
caggaauuuggugaccaga

SEQ ID NO: 303471 - RNA, 19 nt, Artificial Sequence
  Description of Artificial Sequence: Synthetic oligonucleotide
ggcagcucugguaaaagca

SEQ ID NO: 303472 - RNA, 19 nt, Artificial Sequence
  Description of Artificial Sequence: Synthetic oligonucleotide
cacgcagucagggagugga

SEQ ID NO: 303473 - RNA, 19 nt, Artificial Sequence
  Description of Artificial Sequence: Synthetic oligonucleotide
acauccgacuucccuuuau

SEQ ID NO: 303474 - RNA, 19 nt, Artificial Sequence
  Description of Artificial Sequence: Synthetic oligonucleotide
aguguccggaugccuacaa

SEQ ID NO: 303475 - RNA, 19 nt, Artificial Sequence
  Description of Artificial Sequence: Synthetic oligonucleotide
cacgagucaacacaucagu

SEQ ID NO: 303476 - RNA, 19 nt, Artificial Sequence
  Description of Artificial Sequence: Synthetic oligonucleotide
gcaagacaaacacgcaguc

SEQ ID NO: 303477 - RNA, 19 nt, Artificial Sequence
  Description of Artificial Sequence: Synthetic oligonucleotide
gugaaagagguguugccau

SEQ ID NO: 303478 - RNA, 19 nt, Artificial Sequence
  Description of Artificial Sequence: Synthetic oligonucleotide
gaaauggcugacaaagcuu

SEQ ID NO: 303479 - RNA, 19 nt, Artificial Sequence
  Description of Artificial Sequence: Synthetic oligonucleotide
guagaauguugcugaggaa

SEQ ID NO: 303480 - RNA, 19 nt, Artificial Sequence
  Description of Artificial Sequence: Synthetic oligonucleotide
gaguucccgaugccuccag

SEQ ID NO: 303481 - RNA, 19 nt, Artificial Sequence
  Description of Artificial Sequence: Synthetic oligonucleotide
aaccgcuggcggaacauaa

SEQ ID NO: 303482 - RNA, 19 nt, Artificial Sequence
  Description of Artificial Sequence: Synthetic oligonucleotide
uggcaguuccgaugacaga

SEQ ID NO: 303483 - RNA, 19 nt, Artificial Sequence
  Description of Artificial Sequence: Synthetic oligonucleotide
ucgguacaggugaccuaca

SEQ ID NO: 303484 - RNA, 19 nt, Artificial Sequence
  Description of Artificial Sequence: Synthetic oligonucleotide
ccaaaccaaacaggcacgg

SEQ ID NO: 303485 - RNA, 19 nt, Artificial Sequence
  Description of Artificial Sequence: Synthetic oligonucleotide
ggucgugucagagccauga

SEQ ID NO: 303486 - RNA, 19 nt, Artificial Sequence
  Description of Artificial Sequence: Synthetic oligonucleotide
agccugauuacgagaagau

SEQ ID NO: 303487 - RNA, 19 nt, Artificial Sequence
  Description of Artificial Sequence: Synthetic oligonucleotide
agcgagucagaggccuuuc

SEQ ID NO: 303488 - RNA, 19 nt, Artificial Sequence
  Description of Artificial Sequence: Synthetic oligonucleotide
cuaggccauaccaguuuca

SEQ ID NO: 303489 - RNA, 19 nt, Artificial Sequence
  Description of Artificial Sequence: Synthetic oligonucleotide
augguaucugaggacuaaa

SEQ ID NO: 303490 - RNA, 19 nt, Artificial Sequence
  Description of Artificial Sequence: Synthetic oligonucleotide
gaguguagucagaguuccc

SEQ ID NO: 303491 - RNA, 19 nt, Artificial Sequence
  Description of Artificial Sequence: Synthetic oligonucleotide
ggggugauuccaguagaag

SEQ ID NO: 303492 - RNA, 19 nt, Artificial Sequence
  Description of Artificial Sequence: Synthetic oligonucleotide
gaggcacgaugcaugugac

SEQ ID NO: 303493 - RNA, 19 nt, Artificial Sequence
  Description of Artificial Sequence: Synthetic oligonucleotide
aguucccgaugccuccagu

SEQ ID NO: 303494 - RNA, 19 nt, Artificial Sequence
  Description of Artificial Sequence: Synthetic oligonucleotide
cacggagucauggcaggac

SEQ ID NO: 303495 - RNA, 19 nt, Artificial Sequence
  Description of Artificial Sequence: Synthetic oligonucleotide
agucagacaugagcagaga

SEQ ID NO: 303496 - RNA, 19 nt, Artificial Sequence
  Description of Artificial Sequence: Synthetic oligonucleotide
auccggacagccauugaau

SEQ ID NO: 303497 - RNA, 19 nt, Artificial Sequence
  Description of Artificial Sequence: Synthetic oligonucleotide
ggcucaauaguuaguaugu

SEQ ID NO: 303498 - RNA, 19 nt, Artificial Sequence
  Description of Artificial Sequence: Synthetic oligonucleotide
agguggguaguggcaguuc

SEQ ID NO: 303499 - RNA, 19 nt, Artificial Sequence
  Description of Artificial Sequence: Synthetic oligonucleotide
gcacgagucaacacaucag

SEQ ID NO: 303500 - RNA, 19 nt, Artificial Sequence
  Description of Artificial Sequence: Synthetic oligonucleotide
accagucgccucugcgcag

SEQ ID NO: 303501 - RNA, 19 nt, Artificial Sequence
  Description of Artificial Sequence: Synthetic oligonucleotide
gcuaacucagggcucaggu

SEQ ID NO: 303502 - RNA, 19 nt, Artificial Sequence
  Description of Artificial Sequence: Synthetic oligonucleotide
cagugcaaccagucgccuc

SEQ ID NO: 303503 - RNA, 19 nt, Artificial Sequence
  Description of Artificial Sequence: Synthetic oligonucleotide
ccuuucucagaaccgagga

SEQ ID NO: 303504 - RNA, 19 nt, Artificial Sequence
  Description of Artificial Sequence: Synthetic oligonucleotide
caccugugauuuguauggc

SEQ ID NO: 303505 - RNA, 19 nt, Artificial Sequence
  Description of Artificial Sequence: Synthetic oligonucleotide
ccuguagaauguugcugag

SEQ ID NO: 303506 - RNA, 19 nt, Artificial Sequence
  Description of Artificial Sequence: Synthetic oligonucleotide
guagccuguugaguacaug

SEQ ID NO: 303507 - RNA, 19 nt, Artificial Sequence
  Description of Artificial Sequence: Synthetic oligonucleotide
ugcccggcacgagucaaca

SEQ ID NO: 303508 - RNA, 19 nt, Artificial Sequence
  Description of Artificial Sequence: Synthetic oligonucleotide
gcgcagaggagccauccug

SEQ ID NO: 303509 - RNA, 19 nt, Artificial Sequence
  Description of Artificial Sequence: Synthetic oligonucleotide
gcucaauaguuaguaugug

SEQ ID NO: 303510 - RNA, 19 nt, Artificial Sequence
  Description of Artificial Sequence: Synthetic oligonucleotide
ccuugguuacccagagcag

SEQ ID NO: 303511 - RNA, 19 nt, Artificial Sequence
  Description of Artificial Sequence: Synthetic oligonucleotide
ucgccguugguugcucuga

SEQ ID NO: 303512 - RNA, 19 nt, Artificial Sequence
  Description of Artificial Sequence: Synthetic oligonucleotide
ggaccuuucucagaaccga

SEQ ID NO: 303513 - RNA, 19 nt, Artificial Sequence
  Description of Artificial Sequence: Synthetic oligonucleotide
gaagaaccgcuggcggaac

SEQ ID NO: 303514 - RNA, 19 nt, Artificial Sequence
  Description of Artificial Sequence: Synthetic oligonucleotide
acagacccuuuagauaauu

SEQ ID NO: 303515 - RNA, 19 nt, Artificial Sequence
  Description of Artificial Sequence: Synthetic oligonucleotide
ggcacgguauagcugucuc

SEQ ID NO: 303516 - RNA, 19 nt, Artificial Sequence
  Description of Artificial Sequence: Synthetic oligonucleotide
agaguucccgaugccucca

SEQ ID NO: 303517 - RNA, 19 nt, Artificial Sequence
  Description of Artificial Sequence: Synthetic oligonucleotide
agauugucagaagggucua

SEQ ID NO: 303518 - RNA, 19 nt, Artificial Sequence
  Description of Artificial Sequence: Synthetic oligonucleotide
cuugucuuguaggauggcu

SEQ ID NO: 303519 - RNA, 19 nt, Artificial Sequence
  Description of Artificial Sequence: Synthetic oligonucleotide
ccggaugccuacaagcuga

SEQ ID NO: 303520 - RNA, 19 nt, Artificial Sequence
  Description of Artificial Sequence: Synthetic oligonucleotide
gcaauccggacagccauug

SEQ ID NO: 303521 - RNA, 19 nt, Artificial Sequence
  Description of Artificial Sequence: Synthetic oligonucleotide
acagaacagcaagcauuca

SEQ ID NO: 303522 - RNA, 19 nt, Artificial Sequence
  Description of Artificial Sequence: Synthetic oligonucleotide
gagaggcacgaugcaugug

SEQ ID NO: 303523 - RNA, 19 nt, Artificial Sequence
  Description of Artificial Sequence: Synthetic oligonucleotide
gaccaagggcucagcuacc

SEQ ID NO: 303524 - RNA, 19 nt, Artificial Sequence
  Description of Artificial Sequence: Synthetic oligonucleotide
aggacucuuuaagugucuu

SEQ ID NO: 303525 - RNA, 19 nt, Artificial Sequence
  Description of Artificial Sequence: Synthetic oligonucleotide
gagucccgcaaagcacuug

SEQ ID NO: 303526 - RNA, 19 nt, Artificial Sequence
  Description of Artificial Sequence: Synthetic oligonucleotide
ggauuccuucucuggcaug

SEQ ID NO: 303527 - RNA, 19 nt, Artificial Sequence
  Description of Artificial Sequence: Synthetic oligonucleotide
aggagucaaggagguccuc

SEQ ID NO: 303528 - RNA, 19 nt, Artificial Sequence
  Description of Artificial Sequence: Synthetic oligonucleotide
cucagaaccgaggauuccu

SEQ ID NO: 303529 - RNA, 19 nt, Artificial Sequence
  Description of Artificial Sequence: Synthetic oligonucleotide
gucagaguucccgaugccu

SEQ ID NO: 303530 - RNA, 19 nt, Artificial Sequence
  Description of Artificial Sequence: Synthetic oligonucleotide
ucggcuugggaagcuguuu

SEQ ID NO: 303531 - RNA, 19 nt, Artificial Sequence
  Description of Artificial Sequence: Synthetic oligonucleotide
gcaagcauucagaguuugc

SEQ ID NO: 303532 - RNA, 19 nt, Artificial Sequence
  Description of Artificial Sequence: Synthetic oligonucleotide
gggcagcuaacucagggcu

SEQ ID NO: 303533 - RNA, 19 nt, Artificial Sequence
  Description of Artificial Sequence: Synthetic oligonucleotide
aggcgagugagagcaugca

SEQ ID NO: 303534 - RNA, 19 nt, Artificial Sequence
  Description of Artificial Sequence: Synthetic oligonucleotide
gaacaccaaugagcacagc

SEQ ID NO: 303535 - RNA, 19 nt, Artificial Sequence
  Description of Artificial Sequence: Synthetic oligonucleotide
auaggagaucuggcugaga

SEQ ID NO: 303536 - RNA, 19 nt, Artificial Sequence
  Description of Artificial Sequence: Synthetic oligonucleotide
cucgcucacuugccgucug

SEQ ID NO: 303537 - RNA, 19 nt, Artificial Sequence
  Description of Artificial Sequence: Synthetic oligonucleotide
acucgcucacuugccgucu

SEQ ID NO: 303538 - RNA, 19 nt, Artificial Sequence
  Description of Artificial Sequence: Synthetic oligonucleotide
gccacccuacaacucucag

SEQ ID NO: 303539 - RNA, 19 nt, Artificial Sequence
  Description of Artificial Sequence: Synthetic oligonucleotide
augcccggcacgagucaac

SEQ ID NO: 303540 - RNA, 19 nt, Artificial Sequence
  Description of Artificial Sequence: Synthetic oligonucleotide
acacgcagucagggagugg

SEQ ID NO: 303541 - RNA, 19 nt, Artificial Sequence
  Description of Artificial Sequence: Synthetic oligonucleotide
cacgguauagcugucucau

SEQ ID NO: 303542 - RNA, 19 nt, Artificial Sequence
  Description of Artificial Sequence: Synthetic oligonucleotide
cacggagacucaggaugag

SEQ ID NO: 303543 - RNA, 19 nt, Artificial Sequence
  Description of Artificial Sequence: Synthetic oligonucleotide
cauuagaaaucaggacucu

SEQ ID NO: 303544 - RNA, 19 nt, Artificial Sequence
  Description of Artificial Sequence: Synthetic oligonucleotide
ggaauuuggugaccagagu

SEQ ID NO: 303545 - RNA, 19 nt, Artificial Sequence
  Description of Artificial Sequence: Synthetic oligonucleotide
cuacucgcucacuugccgu

SEQ ID NO: 303546 - RNA, 19 nt, Artificial Sequence
  Description of Artificial Sequence: Synthetic oligonucleotide
uguucgccguugguugcuc

SEQ ID NO: 303547 - RNA, 19 nt, Artificial Sequence
  Description of Artificial Sequence: Synthetic oligonucleotide
gcgagugagagcaugcaua

SEQ ID NO: 303548 - RNA, 19 nt, Artificial Sequence
  Description of Artificial Sequence: Synthetic oligonucleotide
gcgaaggggcagcuguggc

SEQ ID NO: 303549 - RNA, 19 nt, Artificial Sequence
  Description of Artificial Sequence: Synthetic oligonucleotide
acccuacaacucucagaau

SEQ ID NO: 303550 - RNA, 19 nt, Artificial Sequence
  Description of Artificial Sequence: Synthetic oligonucleotide
gccugauuacgagaagauc

SEQ ID NO: 303551 - RNA, 19 nt, Artificial Sequence
  Description of Artificial Sequence: Synthetic oligonucleotide
cagcaauccggacagccau

SEQ ID NO: 303552 - RNA, 19 nt, Artificial Sequence
  Description of Artificial Sequence: Synthetic oligonucleotide
gcagagaauccagcuuggc

SEQ ID NO: 303553 - RNA, 19 nt, Artificial Sequence
  Description of Artificial Sequence: Synthetic oligonucleotide
ccgggaacacuucaugaga

SEQ ID NO: 303554 - RNA, 19 nt, Artificial Sequence
  Description of Artificial Sequence: Synthetic oligonucleotide
gccauaccaguuucauguc

SEQ ID NO: 303555 - RNA, 19 nt, Artificial Sequence
  Description of Artificial Sequence: Synthetic oligonucleotide
gucgugucagagccaugaa

SEQ ID NO: 303556 - RNA, 19 nt, Artificial Sequence
  Description of Artificial Sequence: Synthetic oligonucleotide
cuuggguagccuguugagu

SEQ ID NO: 303557 - RNA, 19 nt, Artificial Sequence
  Description of Artificial Sequence: Synthetic oligonucleotide
gcacgguauagcugucuca

SEQ ID NO: 303558 - RNA, 19 nt, Artificial Sequence
  Description of Artificial Sequence: Synthetic oligonucleotide
cuaccugggcuccccagua

SEQ ID NO: 303559 - RNA, 19 nt, Artificial Sequence
  Description of Artificial Sequence: Synthetic oligonucleotide
gucccgcaaagcacuuggc

SEQ ID NO: 303560 - RNA, 19 nt, Artificial Sequence
  Description of Artificial Sequence: Synthetic oligonucleotide
caccucucugcggauagaa

SEQ ID NO: 303561 - RNA, 19 nt, Artificial Sequence
  Description of Artificial Sequence: Synthetic oligonucleotide
cgcaaagcacuuggcagcg

SEQ ID NO: 303562 - RNA, 19 nt, Artificial Sequence
  Description of Artificial Sequence: Synthetic oligonucleotide
acucaugauuuggggugau

SEQ ID NO: 303563 - RNA, 19 nt, Artificial Sequence
  Description of Artificial Sequence: Synthetic oligonucleotide
gaguguccggaugccuaca

SEQ ID NO: 303564 - RNA, 19 nt, Artificial Sequence
  Description of Artificial Sequence: Synthetic oligonucleotide
gguuacccagagcagcagu

SEQ ID NO: 303565 - RNA, 19 nt, Artificial Sequence
  Description of Artificial Sequence: Synthetic oligonucleotide
caacauccgacuucccuuu

SEQ ID NO: 303566 - RNA, 19 nt, Artificial Sequence
  Description of Artificial Sequence: Synthetic oligonucleotide
ccggacagccauugaauga

SEQ ID NO: 303567 - RNA, 19 nt, Artificial Sequence
  Description of Artificial Sequence: Synthetic oligonucleotide
caauccggacagccauuga

SEQ ID NO: 303568 - RNA, 19 nt, Artificial Sequence
  Description of Artificial Sequence: Synthetic oligonucleotide
ccacccuacaacucucaga

SEQ ID NO: 303569 - RNA, 19 nt, Artificial Sequence
  Description of Artificial Sequence: Synthetic oligonucleotide
acgcagucagggaguggag

SEQ ID NO: 303570 - RNA, 19 nt, Artificial Sequence
  Description of Artificial Sequence: Synthetic oligonucleotide
cgcuggcggaacauaauuc

SEQ ID NO: 303571 - RNA, 19 nt, Artificial Sequence
  Description of Artificial Sequence: Synthetic oligonucleotide
cagugcugccacccuacaa

SEQ ID NO: 303572 - RNA, 19 nt, Artificial Sequence
  Description of Artificial Sequence: Synthetic oligonucleotide
cagacccuuuagauaauuu

SEQ ID NO: 303573 - RNA, 19 nt, Artificial Sequence
  Description of Artificial Sequence: Synthetic oligonucleotide
caggcacgguauagcuguc

SEQ ID NO: 303574 - RNA, 19 nt, Artificial Sequence
  Description of Artificial Sequence: Synthetic oligonucleotide
gaaccgcuggcggaacaua

SEQ ID NO: 303575 - RNA, 19 nt, Artificial Sequence
  Description of Artificial Sequence: Synthetic oligonucleotide
ggaugccuacaagcugaag

SEQ ID NO: 303576 - RNA, 19 nt, Artificial Sequence
  Description of Artificial Sequence: Synthetic oligonucleotide
gccugcacagccaaaccaa

SEQ ID NO: 303577 - RNA, 19 nt, Artificial Sequence
  Description of Artificial Sequence: Synthetic oligonucleotide
ccuuggaccaaagcaggca

SEQ ID NO: 303578 - RNA, 19 nt, Artificial Sequence
  Description of Artificial Sequence: Synthetic oligonucleotide
cauggaagccuuggaccaa

SEQ ID NO: 303579 - RNA, 19 nt, Artificial Sequence
  Description of Artificial Sequence: Synthetic oligonucleotide
ucguggcagggagcagaca

SEQ ID NO: 303580 - RNA, 19 nt, Artificial Sequence
  Description of Artificial Sequence: Synthetic oligonucleotide
cacuaggccauaccaguuu

SEQ ID NO: 303581 - RNA, 19 nt, Artificial Sequence
  Description of Artificial Sequence: Synthetic oligonucleotide
guuuggcuaaggcccggau

SEQ ID NO: 303582 - RNA, 19 nt, Artificial Sequence
  Description of Artificial Sequence: Synthetic oligonucleotide
agcaauccggacagccauu

SEQ ID NO: 303583 - RNA, 19 nt, Artificial Sequence
  Description of Artificial Sequence: Synthetic oligonucleotide
ggguagccuguugaguaca

SEQ ID NO: 303584 - RNA, 19 nt, Artificial Sequence
  Description of Artificial Sequence: Synthetic oligonucleotide
acaccucucugcggauaga

SEQ ID NO: 303585 - RNA, 19 nt, Artificial Sequence
  Description of Artificial Sequence: Synthetic oligonucleotide
accgcuggcggaacauaau

SEQ ID NO: 303586 - RNA, 19 nt, Artificial Sequence
  Description of Artificial Sequence: Synthetic oligonucleotide
cagcuaacucagggcucag

SEQ ID NO: 303587 - RNA, 19 nt, Artificial Sequence
  Description of Artificial Sequence: Synthetic oligonucleotide
cggaacauaauucgaacau

SEQ ID NO: 303588 - RNA, 19 nt, Artificial Sequence
  Description of Artificial Sequence: Synthetic oligonucleotide
cuaagaagagaggcacgau

SEQ ID NO: 303589 - RNA, 19 nt, Artificial Sequence
  Description of Artificial Sequence: Synthetic oligonucleotide
ggugaccuacagccagcuc

SEQ ID NO: 303590 - RNA, 19 nt, Artificial Sequence
  Description of Artificial Sequence: Synthetic oligonucleotide
gcuuggcacuuaaaaucuc

SEQ ID NO: 303591 - RNA, 19 nt, Artificial Sequence
  Description of Artificial Sequence: Synthetic oligonucleotide
caaaccaaacaggcacggu

SEQ ID NO: 303592 - RNA, 19 nt, Artificial Sequence
  Description of Artificial Sequence: Synthetic oligonucleotide
caugcccggcacgagucaa

SEQ ID NO: 303593 - RNA, 19 nt, Artificial Sequence
  Description of Artificial Sequence: Synthetic oligonucleotide
cuacaagcugaagcugggu

SEQ ID NO: 303594 - RNA, 19 nt, Artificial Sequence
  Description of Artificial Sequence: Synthetic oligonucleotide
gguuuggcuaaggcccgga

SEQ ID NO: 303595 - RNA, 19 nt, Artificial Sequence
  Description of Artificial Sequence: Synthetic oligonucleotide
cucuagcaacauccgacuu

SEQ ID NO: 303596 - RNA, 19 nt, Artificial Sequence
  Description of Artificial Sequence: Synthetic oligonucleotide
ggagucauggcaggacagu

SEQ ID NO: 303597 - RNA, 19 nt, Artificial Sequence
  Description of Artificial Sequence: Synthetic oligonucleotide
cugcggauagaagcccaaa

SEQ ID NO: 303598 - RNA, 19 nt, Artificial Sequence
  Description of Artificial Sequence: Synthetic oligonucleotide
gcuaccugggcuccccagu

SEQ ID NO: 303599 - RNA, 19 nt, Artificial Sequence
  Description of Artificial Sequence: Synthetic oligonucleotide
ggcgagugagagcaugcau

SEQ ID NO: 303600 - RNA, 19 nt, Artificial Sequence
  Description of Artificial Sequence: Synthetic oligonucleotide
guucgccguugguugcucu

SEQ ID NO: 303601 - RNA, 19 nt, Artificial Sequence
  Description of Artificial Sequence: Synthetic oligonucleotide
gccgucuggaacaccucuc

SEQ ID NO: 303602 - RNA, 19 nt, Artificial Sequence
  Description of Artificial Sequence: Synthetic oligonucleotide
cccgcaugaguugguucag

SEQ ID NO: 303603 - RNA, 19 nt, Artificial Sequence
  Description of Artificial Sequence: Synthetic oligonucleotide
gcacgaugcaugugacacu

SEQ ID NO: 303604 - RNA, 19 nt, Artificial Sequence
  Description of Artificial Sequence: Synthetic oligonucleotide
ccggaucaccugugauuug

SEQ ID NO: 303605 - RNA, 19 nt, Artificial Sequence
  Description of Artificial Sequence: Synthetic oligonucleotide
gccccgagauccaaugucu

SEQ ID NO: 303606 - RNA, 19 nt, Artificial Sequence
  Description of Artificial Sequence: Synthetic oligonucleotide
gaagcgagucagaggccuu

SEQ ID NO: 303607 - RNA, 19 nt, Artificial Sequence
  Description of Artificial Sequence: Synthetic oligonucleotide
ggaaucggcuugggaagcu

SEQ ID NO: 303608 - RNA, 19 nt, Artificial Sequence
  Description of Artificial Sequence: Synthetic oligonucleotide
ggggucgugucagagccau

SEQ ID NO: 303609 - RNA, 19 nt, Artificial Sequence
  Description of Artificial Sequence: Synthetic oligonucleotide
ccgucuggaacaccucucu

SEQ ID NO: 303610 - RNA, 19 nt, Artificial Sequence
  Description of Artificial Sequence: Synthetic oligonucleotide
ccgagauccaaugucuuuu

SEQ ID NO: 303611 - RNA, 19 nt, Artificial Sequence
  Description of Artificial Sequence: Synthetic oligonucleotide
ccccaguagaaaccauucu

SEQ ID NO: 303612 - RNA, 19 nt, Artificial Sequence
  Description of Artificial Sequence: Synthetic oligonucleotide
ccggcacgagucaacacau

SEQ ID NO: 303613 - RNA, 19 nt, Artificial Sequence
  Description of Artificial Sequence: Synthetic oligonucleotide
cccggaucaccugugauuu

SEQ ID NO: 303614 - RNA, 19 nt, Artificial Sequence
  Description of Artificial Sequence: Synthetic oligonucleotide
cucaugauuuggggugauu

SEQ ID NO: 303615 - RNA, 19 nt, Artificial Sequence
  Description of Artificial Sequence: Synthetic oligonucleotide
gguagccuguugaguacau

SEQ ID NO: 303616 - RNA, 19 nt, Artificial Sequence
  Description of Artificial Sequence: Synthetic oligonucleotide
gggucgugucagagccaug

SEQ ID NO: 303617 - RNA, 19 nt, Artificial Sequence
  Description of Artificial Sequence: Synthetic oligonucleotide
cguugguugcucugacugu

SEQ ID NO: 303618 - RNA, 19 nt, Artificial Sequence
  Description of Artificial Sequence: Synthetic oligonucleotide
gcacuaggccauaccaguu

SEQ ID NO: 303619 - RNA, 19 nt, Artificial Sequence
  Description of Artificial Sequence: Synthetic oligonucleotide
cccgagauccaaugucuuu

SEQ ID NO: 303620 - RNA, 19 nt, Artificial Sequence
  Description of Artificial Sequence: Synthetic oligonucleotide
cggcacgagucaacacauc

SEQ ID NO: 303621 - RNA, 19 nt, Artificial Sequence
  Description of Artificial Sequence: Synthetic oligonucleotide
ccacggagucauggcagga

SEQ ID NO: 303622 - RNA, 19 nt, Artificial Sequence
  Description of Artificial Sequence: Synthetic oligonucleotide
ccgcuggcggaacauaauu

SEQ ID NO: 303623 - RNA, 19 nt, Artificial Sequence
  Description of Artificial Sequence: Synthetic oligonucleotide
ggcccaugagccggguggu

SEQ ID NO: 303624 - RNA, 19 nt, Artificial Sequence
  Description of Artificial Sequence: Synthetic oligonucleotide
ggagucccgcaaagcacuu

SEQ ID NO: 303625 - RNA, 19 nt, Artificial Sequence
  Description of Artificial Sequence: Synthetic oligonucleotide
gguaggcgagugagagcau

SEQ ID NO: 303626 - RNA, 19 nt, Artificial Sequence
  Description of Artificial Sequence: Synthetic oligonucleotide
ccccgagauccaaugucuu

SEQ ID NO: 303627 - RNA, 19 nt, Artificial Sequence
  Description of Artificial Sequence: Synthetic oligonucleotide
gcccaugagccggguggua

SEQ ID NO: 303628 - RNA, 19 nt, Artificial Sequence
  Description of Artificial Sequence: Synthetic oligonucleotide
ccuugcgcacaagucucuu

SEQ ID NO: 303629 - RNA, 19 nt, Artificial Sequence
  Description of Artificial Sequence: Synthetic oligonucleotide
ugaaucaacaauaucagga

SEQ ID NO: 303630 - RNA, 19 nt, Artificial Sequence
  Description of Artificial Sequence: Synthetic oligonucleotide
aauaggagggguaagaagg

SEQ ID NO: 303631 - RNA, 19 nt, Artificial Sequence
  Description of Artificial Sequence: Synthetic oligonucleotide
ugcaguguguaccagaagg

SEQ ID NO: 303632 - RNA, 19 nt, Artificial Sequence
  Description of Artificial Sequence: Synthetic oligonucleotide
aaagucauccagcaguguc

SEQ ID NO: 303633 - RNA, 19 nt, Artificial Sequence
  Description of Artificial Sequence: Synthetic oligonucleotide
uucgugaucauccucauga

SEQ ID NO: 303634 - RNA, 19 nt, Artificial Sequence
  Description of Artificial Sequence: Synthetic oligonucleotide
aggaccagaauccauauuc

SEQ ID NO: 303635 - RNA, 19 nt, Artificial Sequence
  Description of Artificial Sequence: Synthetic oligonucleotide
uggauuggaagccauagag

SEQ ID NO: 303636 - RNA, 19 nt, Artificial Sequence
  Description of Artificial Sequence: Synthetic oligonucleotide
acuaguuccaggaagcucc

SEQ ID NO: 303637 - RNA, 19 nt, Artificial Sequence
  Description of Artificial Sequence: Synthetic oligonucleotide
agcuuugacauccaaucgc

SEQ ID NO: 303638 - RNA, 19 nt, Artificial Sequence
  Description of Artificial Sequence: Synthetic oligonucleotide
aacaguguaaauuccuuca

SEQ ID NO: 303639 - RNA, 19 nt, Artificial Sequence
  Description of Artificial Sequence: Synthetic oligonucleotide
guaaauucggaacugcucc

SEQ ID NO: 303640 - RNA, 19 nt, Artificial Sequence
  Description of Artificial Sequence: Synthetic oligonucleotide
ugucuuaacagacuuuuca

SEQ ID NO: 303641 - RNA, 19 nt, Artificial Sequence
  Description of Artificial Sequence: Synthetic oligonucleotide
ucuacuuggucuagcaagg

SEQ ID NO: 303642 - RNA, 19 nt, Artificial Sequence
  Description of Artificial Sequence: Synthetic oligonucleotide
ucaucugaggaccagaauc

SEQ ID NO: 303643 - RNA, 19 nt, Artificial Sequence
  Description of Artificial Sequence: Synthetic oligonucleotide
gauuggaagccauagagca

SEQ ID NO: 303644 - RNA, 19 nt, Artificial Sequence
  Description of Artificial Sequence: Synthetic oligonucleotide
aaugcgacagaugccaugg

SEQ ID NO: 303645 - RNA, 19 nt, Artificial Sequence
  Description of Artificial Sequence: Synthetic oligonucleotide
aaucaacaauaucaggaug

SEQ ID NO: 303646 - RNA, 19 nt, Artificial Sequence
  Description of Artificial Sequence: Synthetic oligonucleotide
cagccaaccauucagacag

SEQ ID NO: 303647 - RNA, 19 nt, Artificial Sequence
  Description of Artificial Sequence: Synthetic oligonucleotide
cauccuuugggcaucaggc

SEQ ID NO: 303648 - RNA, 19 nt, Artificial Sequence
  Description of Artificial Sequence: Synthetic oligonucleotide
uagucagcuguauaguccg

SEQ ID NO: 303649 - RNA, 19 nt, Artificial Sequence
  Description of Artificial Sequence: Synthetic oligonucleotide
uguucacucgcucacggag

SEQ ID NO: 303650 - RNA, 19 nt, Artificial Sequence
  Description of Artificial Sequence: Synthetic oligonucleotide
aagagccgaaaccauaucu

SEQ ID NO: 303651 - RNA, 19 nt, Artificial Sequence
  Description of Artificial Sequence: Synthetic oligonucleotide
auacauccgacccagcauc

SEQ ID NO: 303652 - RNA, 19 nt, Artificial Sequence
  Description of Artificial Sequence: Synthetic oligonucleotide
ugaggucaagagcagaggc

SEQ ID NO: 303653 - RNA, 19 nt, Artificial Sequence
  Description of Artificial Sequence: Synthetic oligonucleotide
cucuacuuggucuagcaag

SEQ ID NO: 303654 - RNA, 19 nt, Artificial Sequence
  Description of Artificial Sequence: Synthetic oligonucleotide
gaaugauucucgcccaggg

SEQ ID NO: 303655 - RNA, 19 nt, Artificial Sequence
  Description of Artificial Sequence: Synthetic oligonucleotide
uauaguccgugccauguag

SEQ ID NO: 303656 - RNA, 19 nt, Artificial Sequence
  Description of Artificial Sequence: Synthetic oligonucleotide
aggauaaugaccaggaaug

SEQ ID NO: 303657 - RNA, 19 nt, Artificial Sequence
  Description of Artificial Sequence: Synthetic oligonucleotide
caagcgucaggcaucaugc

SEQ ID NO: 303658 - RNA, 19 nt, Artificial Sequence
  Description of Artificial Sequence: Synthetic oligonucleotide
aauaucaggaugaucccug

SEQ ID NO: 303659 - RNA, 19 nt, Artificial Sequence
  Description of Artificial Sequence: Synthetic oligonucleotide
gacggaagugaccagcagg

SEQ ID NO: 303660 - RNA, 19 nt, Artificial Sequence
  Description of Artificial Sequence: Synthetic oligonucleotide
uguaaauucggaacugcuc

SEQ ID NO: 303661 - RNA, 19 nt, Artificial Sequence
  Description of Artificial Sequence: Synthetic oligonucleotide
gaauaggagggguaagaag

SEQ ID NO: 303662 - RNA, 19 nt, Artificial Sequence
  Description of Artificial Sequence: Synthetic oligonucleotide
ucauugacaggauaaugac

SEQ ID NO: 303663 - RNA, 19 nt, Artificial Sequence
  Description of Artificial Sequence: Synthetic oligonucleotide
gauucgguaucucuucugc

SEQ ID NO: 303664 - RNA, 19 nt, Artificial Sequence
  Description of Artificial Sequence: Synthetic oligonucleotide
ugcauuagccacaugcacu

SEQ ID NO: 303665 - RNA, 19 nt, Artificial Sequence
  Description of Artificial Sequence: Synthetic oligonucleotide
uccgcgauggauuggaagc

SEQ ID NO: 303666 - RNA, 19 nt, Artificial Sequence
  Description of Artificial Sequence: Synthetic oligonucleotide
ugaugacugacauccagug

SEQ ID NO: 303667 - RNA, 19 nt, Artificial Sequence
  Description of Artificial Sequence: Synthetic oligonucleotide
uuguugaucaugacggggu

SEQ ID NO: 303668 - RNA, 19 nt, Artificial Sequence
  Description of Artificial Sequence: Synthetic oligonucleotide
caauguuggcagcauaggg

SEQ ID NO: 303669 - RNA, 19 nt, Artificial Sequence
  Description of Artificial Sequence: Synthetic oligonucleotide
uggauguagggagagauga

SEQ ID NO: 303670 - RNA, 19 nt, Artificial Sequence
  Description of Artificial Sequence: Synthetic oligonucleotide
cucauugacaggauaauga

SEQ ID NO: 303671 - RNA, 19 nt, Artificial Sequence
  Description of Artificial Sequence: Synthetic oligonucleotide
cauugacaggauaaugacc

SEQ ID NO: 303672 - RNA, 19 nt, Artificial Sequence
  Description of Artificial Sequence: Synthetic oligonucleotide
auucgguaucucuucugcc

SEQ ID NO: 303673 - RNA, 19 nt, Artificial Sequence
  Description of Artificial Sequence: Synthetic oligonucleotide
ggugcuauacauccgaccc

SEQ ID NO: 303674 - RNA, 19 nt, Artificial Sequence
  Description of Artificial Sequence: Synthetic oligonucleotide
aagaguagggcuccucuga

SEQ ID NO: 303675 - RNA, 19 nt, Artificial Sequence
  Description of Artificial Sequence: Synthetic oligonucleotide
acauacaugagcgugucug

SEQ ID NO: 303676 - RNA, 19 nt, Artificial Sequence
  Description of Artificial Sequence: Synthetic oligonucleotide
ugcgcaaaagcacauccac

SEQ ID NO: 303677 - RNA, 19 nt, Artificial Sequence
  Description of Artificial Sequence: Synthetic oligonucleotide
uguccacccuguaaauucg

SEQ ID NO: 303678 - RNA, 19 nt, Artificial Sequence
  Description of Artificial Sequence: Synthetic oligonucleotide
caggaugucggcaaagcag

SEQ ID NO: 303679 - RNA, 19 nt, Artificial Sequence
  Description of Artificial Sequence: Synthetic oligonucleotide
uauuagcagcauucggccg

SEQ ID NO: 303680 - RNA, 19 nt, Artificial Sequence
  Description of Artificial Sequence: Synthetic oligonucleotide
uucgguaucucuucugcca

SEQ ID NO: 303681 - RNA, 19 nt, Artificial Sequence
  Description of Artificial Sequence: Synthetic oligonucleotide
gaggcuaaagcaguguuug

SEQ ID NO: 303682 - RNA, 19 nt, Artificial Sequence
  Description of Artificial Sequence: Synthetic oligonucleotide
ugucauagagguugcuaag

SEQ ID NO: 303683 - RNA, 19 nt, Artificial Sequence
  Description of Artificial Sequence: Synthetic oligonucleotide
ugacgcacacagcugggcg

SEQ ID NO: 303684 - RNA, 19 nt, Artificial Sequence
  Description of Artificial Sequence: Synthetic oligonucleotide
gaacaaaucuggcuuccgc

SEQ ID NO: 303685 - RNA, 19 nt, Artificial Sequence
  Description of Artificial Sequence: Synthetic oligonucleotide
caguaaagaagccacagga

SEQ ID NO: 303686 - RNA, 19 nt, Artificial Sequence
  Description of Artificial Sequence: Synthetic oligonucleotide
uccaaucgcucacacagga

SEQ ID NO: 303687 - RNA, 19 nt, Artificial Sequence
  Description of Artificial Sequence: Synthetic oligonucleotide
cuagcaaggcccgagaaug

SEQ ID NO: 303688 - RNA, 19 nt, Artificial Sequence
  Description of Artificial Sequence: Synthetic oligonucleotide
agaacauuguugaucauga

SEQ ID NO: 303689 - RNA, 19 nt, Artificial Sequence
  Description of Artificial Sequence: Synthetic oligonucleotide
gauggugcuauacauccga

SEQ ID NO: 303690 - RNA, 19 nt, Artificial Sequence
  Description of Artificial Sequence: Synthetic oligonucleotide
ucgauggucuccgcgaugg

SEQ ID NO: 303691 - RNA, 19 nt, Artificial Sequence
  Description of Artificial Sequence: Synthetic oligonucleotide
gcuugaaguagacuggccg

SEQ ID NO: 303692 - RNA, 19 nt, Artificial Sequence
  Description of Artificial Sequence: Synthetic oligonucleotide
uugcacucccugcagaucu

SEQ ID NO: 303693 - RNA, 19 nt, Artificial Sequence
  Description of Artificial Sequence: Synthetic oligonucleotide
caugaugacugacauccag

SEQ ID NO: 303694 - RNA, 19 nt, Artificial Sequence
  Description of Artificial Sequence: Synthetic oligonucleotide
cauagagguugcuaagcag

SEQ ID NO: 303695 - RNA, 19 nt, Artificial Sequence
  Description of Artificial Sequence: Synthetic oligonucleotide
guugcuaagcagcucggcc

SEQ ID NO: 303696 - RNA, 19 nt, Artificial Sequence
  Description of Artificial Sequence: Synthetic oligonucleotide
aguugcauaaaugaaucaa

SEQ ID NO: 303697 - RNA, 19 nt, Artificial Sequence
  Description of Artificial Sequence: Synthetic oligonucleotide
ucgguaucucuucugccag

SEQ ID NO: 303698 - RNA, 19 nt, Artificial Sequence
  Description of Artificial Sequence: Synthetic oligonucleotide
cacccuguaaauucggaac

SEQ ID NO: 303699 - RNA, 19 nt, Artificial Sequence
  Description of Artificial Sequence: Synthetic oligonucleotide
ucagcuguauaguccgugc

SEQ ID NO: 303700 - RNA, 19 nt, Artificial Sequence
  Description of Artificial Sequence: Synthetic oligonucleotide
uguauaguccgugccaugu

SEQ ID NO: 303701 - RNA, 19 nt, Artificial Sequence
  Description of Artificial Sequence: Synthetic oligonucleotide
aagaagccccaagaugugg

SEQ ID NO: 303702 - RNA, 19 nt, Artificial Sequence
  Description of Artificial Sequence: Synthetic oligonucleotide
aguggaaagacagccccac

SEQ ID NO: 303703 - RNA, 19 nt, Artificial Sequence
  Description of Artificial Sequence: Synthetic oligonucleotide
aucggaagggaacugggcu

SEQ ID NO: 303704 - RNA, 19 nt, Artificial Sequence
  Description of Artificial Sequence: Synthetic oligonucleotide
aaaccauaucugccaccac

SEQ ID NO: 303705 - RNA, 19 nt, Artificial Sequence
  Description of Artificial Sequence: Synthetic oligonucleotide
uggugaacaugacaguauc

SEQ ID NO: 303706 - RNA, 19 nt, Artificial Sequence
  Description of Artificial Sequence: Synthetic oligonucleotide
caguguaaauuccuucacc

SEQ ID NO: 303707 - RNA, 19 nt, Artificial Sequence
  Description of Artificial Sequence: Synthetic oligonucleotide
caaggcccgagaaugauuc

SEQ ID NO: 303708 - RNA, 19 nt, Artificial Sequence
  Description of Artificial Sequence: Synthetic oligonucleotide
cuagcagggccagacaacg

SEQ ID NO: 303709 - RNA, 19 nt, Artificial Sequence
  Description of Artificial Sequence: Synthetic oligonucleotide
ucagccaaccauucagaca

SEQ ID NO: 303710 - RNA, 19 nt, Artificial Sequence
  Description of Artificial Sequence: Synthetic oligonucleotide
uguuggagggauucgguau

SEQ ID NO: 303711 - RNA, 19 nt, Artificial Sequence
  Description of Artificial Sequence: Synthetic oligonucleotide
acaugagcgugucugaaau

SEQ ID NO: 303712 - RNA, 19 nt, Artificial Sequence
  Description of Artificial Sequence: Synthetic oligonucleotide
aaguagacuggccgguaca

SEQ ID NO: 303713 - RNA, 19 nt, Artificial Sequence
  Description of Artificial Sequence: Synthetic oligonucleotide
ugcgacagaugccauggga

SEQ ID NO: 303714 - RNA, 19 nt, Artificial Sequence
  Description of Artificial Sequence: Synthetic oligonucleotide
aguacugucagcaacucua

SEQ ID NO: 303715 - RNA, 19 nt, Artificial Sequence
  Description of Artificial Sequence: Synthetic oligonucleotide
ugccgagugaggucaagag

SEQ ID NO: 303716 - RNA, 19 nt, Artificial Sequence
  Description of Artificial Sequence: Synthetic oligonucleotide
ugaucauguugacuaguuc

SEQ ID NO: 303717 - RNA, 19 nt, Artificial Sequence
  Description of Artificial Sequence: Synthetic oligonucleotide
caagcggcuagucuggaac

SEQ ID NO: 303718 - RNA, 19 nt, Artificial Sequence
  Description of Artificial Sequence: Synthetic oligonucleotide
gcuauuagcagcauucggc

SEQ ID NO: 303719 - RNA, 19 nt, Artificial Sequence
  Description of Artificial Sequence: Synthetic oligonucleotide
ugcuaagcagcucggcccc

SEQ ID NO: 303720 - RNA, 19 nt, Artificial Sequence
  Description of Artificial Sequence: Synthetic oligonucleotide
ugccucaaccaccugggca

SEQ ID NO: 303721 - RNA, 19 nt, Artificial Sequence
  Description of Artificial Sequence: Synthetic oligonucleotide
acccuguaaauucggaacu

SEQ ID NO: 303722 - RNA, 19 nt, Artificial Sequence
  Description of Artificial Sequence: Synthetic oligonucleotide
ucggccgucuuccuguacc

SEQ ID NO: 303723 - RNA, 19 nt, Artificial Sequence
  Description of Artificial Sequence: Synthetic oligonucleotide
gcaucguucagccacuugc

SEQ ID NO: 303724 - RNA, 19 nt, Artificial Sequence
  Description of Artificial Sequence: Synthetic oligonucleotide
aagugggcgggcucauggg

SEQ ID NO: 303725 - RNA, 19 nt, Artificial Sequence
  Description of Artificial Sequence: Synthetic oligonucleotide
cagaacauuguugaucaug

SEQ ID NO: 303726 - RNA, 19 nt, Artificial Sequence
  Description of Artificial Sequence: Synthetic oligonucleotide
uccgccagugcucuacuug

SEQ ID NO: 303727 - RNA, 19 nt, Artificial Sequence
  Description of Artificial Sequence: Synthetic oligonucleotide
augucggcaaagcagucca

SEQ ID NO: 303728 - RNA, 19 nt, Artificial Sequence
  Description of Artificial Sequence: Synthetic oligonucleotide
ucuagcaaggcccgagaau

SEQ ID NO: 303729 - RNA, 19 nt, Artificial Sequence
  Description of Artificial Sequence: Synthetic oligonucleotide
ccgagaaugauucucgccc

SEQ ID NO: 303730 - RNA, 19 nt, Artificial Sequence
  Description of Artificial Sequence: Synthetic oligonucleotide
aucaugacgggguggucag

SEQ ID NO: 303731 - RNA, 19 nt, Artificial Sequence
  Description of Artificial Sequence: Synthetic oligonucleotide
ucuagcagggccagacaac

SEQ ID NO: 303732 - RNA, 19 nt, Artificial Sequence
  Description of Artificial Sequence: Synthetic oligonucleotide
agccgaaaccauaucugcc

SEQ ID NO: 303733 - RNA, 19 nt, Artificial Sequence
  Description of Artificial Sequence: Synthetic oligonucleotide
uucacucgcucacggagga

SEQ ID NO: 303734 - RNA, 19 nt, Artificial Sequence
  Description of Artificial Sequence: Synthetic oligonucleotide
gagcgugucugaaaugucc

SEQ ID NO: 303735 - RNA, 19 nt, Artificial Sequence
  Description of Artificial Sequence: Synthetic oligonucleotide
cuggccauccaccggagag

SEQ ID NO: 303736 - RNA, 19 nt, Artificial Sequence
  Description of Artificial Sequence: Synthetic oligonucleotide
agcuguauaguccgugcca

SEQ ID NO: 303737 - RNA, 19 nt, Artificial Sequence
  Description of Artificial Sequence: Synthetic oligonucleotide
gagaaugauucucgcccag

SEQ ID NO: 303738 - RNA, 19 nt, Artificial Sequence
  Description of Artificial Sequence: Synthetic oligonucleotide
gcuagucuggaacuccucg

SEQ ID NO: 303739 - RNA, 19 nt, Artificial Sequence
  Description of Artificial Sequence: Synthetic oligonucleotide
uugaucaugacgggguggu

SEQ ID NO: 303740 - RNA, 19 nt, Artificial Sequence
  Description of Artificial Sequence: Synthetic oligonucleotide
auaggagggguaagaaggg

SEQ ID NO: 303741 - RNA, 19 nt, Artificial Sequence
  Description of Artificial Sequence: Synthetic oligonucleotide
gaaguagacuggccgguac

SEQ ID NO: 303742 - RNA, 19 nt, Artificial Sequence
  Description of Artificial Sequence: Synthetic oligonucleotide
agaaugauucucgcccagg

SEQ ID NO: 303743 - RNA, 19 nt, Artificial Sequence
  Description of Artificial Sequence: Synthetic oligonucleotide
cuauacauccgacccagca

SEQ ID NO: 303744 - RNA, 19 nt, Artificial Sequence
  Description of Artificial Sequence: Synthetic oligonucleotide
aagcggcuagucuggaacu

SEQ ID NO: 303745 - RNA, 19 nt, Artificial Sequence
  Description of Artificial Sequence: Synthetic oligonucleotide
gaucccugggcccuugcug

SEQ ID NO: 303746 - RNA, 19 nt, Artificial Sequence
  Description of Artificial Sequence: Synthetic oligonucleotide
cagacaacggcccuggcca

SEQ ID NO: 303747 - RNA, 19 nt, Artificial Sequence
  Description of Artificial Sequence: Synthetic oligonucleotide
auguggaccagcugccgag

SEQ ID NO: 303748 - RNA, 19 nt, Artificial Sequence
  Description of Artificial Sequence: Synthetic oligonucleotide
aguguggugaagagauugg

SEQ ID NO: 303749 - RNA, 19 nt, Artificial Sequence
  Description of Artificial Sequence: Synthetic oligonucleotide
agcgucaggcaucaugcug

SEQ ID NO: 303750 - RNA, 19 nt, Artificial Sequence
  Description of Artificial Sequence: Synthetic oligonucleotide
aggguagacacagaagaca

SEQ ID NO: 303751 - RNA, 19 nt, Artificial Sequence
  Description of Artificial Sequence: Synthetic oligonucleotide
aaucgcucacacaggaaca

SEQ ID NO: 303752 - RNA, 19 nt, Artificial Sequence
  Description of Artificial Sequence: Synthetic oligonucleotide
agagccgaaaccauaucug

SEQ ID NO: 303753 - RNA, 19 nt, Artificial Sequence
  Description of Artificial Sequence: Synthetic oligonucleotide
cucaucggaagggaacugg

SEQ ID NO: 303754 - RNA, 19 nt, Artificial Sequence
  Description of Artificial Sequence: Synthetic oligonucleotide
aguuuguuggagggauucg

SEQ ID NO: 303755 - RNA, 19 nt, Artificial Sequence
  Description of Artificial Sequence: Synthetic oligonucleotide
ugcgguacuggggcaagcg

SEQ ID NO: 303756 - RNA, 19 nt, Artificial Sequence
  Description of Artificial Sequence: Synthetic oligonucleotide
cauccaguguggugaagag

SEQ ID NO: 303757 - RNA, 19 nt, Artificial Sequence
  Description of Artificial Sequence: Synthetic oligonucleotide
aguagacuggccgguacag

SEQ ID NO: 303758 - RNA, 19 nt, Artificial Sequence
  Description of Artificial Sequence: Synthetic oligonucleotide
gacuggccgguacagcugc

SEQ ID NO: 303759 - RNA, 19 nt, Artificial Sequence
  Description of Artificial Sequence: Synthetic oligonucleotide
gaccuuugcgguacugggg

SEQ ID NO: 303760 - RNA, 19 nt, Artificial Sequence
  Description of Artificial Sequence: Synthetic oligonucleotide
uacaugagcgugucugaaa

SEQ ID NO: 303761 - RNA, 19 nt, Artificial Sequence
  Description of Artificial Sequence: Synthetic oligonucleotide
uccacccuguaaauucgga

SEQ ID NO: 303762 - RNA, 19 nt, Artificial Sequence
  Description of Artificial Sequence: Synthetic oligonucleotide
caagaguagggcuccucug

SEQ ID NO: 303763 - RNA, 19 nt, Artificial Sequence
  Description of Artificial Sequence: Synthetic oligonucleotide
uugaaguagacuggccggu

SEQ ID NO: 303764 - RNA, 19 nt, Artificial Sequence
  Description of Artificial Sequence: Synthetic oligonucleotide
aggaugucggcaaagcagu

SEQ ID NO: 303765 - RNA, 19 nt, Artificial Sequence
  Description of Artificial Sequence: Synthetic oligonucleotide
agacgggcagaugggaaac

SEQ ID NO: 303766 - RNA, 19 nt, Artificial Sequence
  Description of Artificial Sequence: Synthetic oligonucleotide
uggucuccgcgauggauug

SEQ ID NO: 303767 - RNA, 19 nt, Artificial Sequence
  Description of Artificial Sequence: Synthetic oligonucleotide
agggguacgugggacacag

SEQ ID NO: 303768 - RNA, 19 nt, Artificial Sequence
  Description of Artificial Sequence: Synthetic oligonucleotide
guucacucgcucacggagg

SEQ ID NO: 303769 - RNA, 19 nt, Artificial Sequence
  Description of Artificial Sequence: Synthetic oligonucleotide
ggggcaagcggcuagucug

SEQ ID NO: 303770 - RNA, 19 nt, Artificial Sequence
  Description of Artificial Sequence: Synthetic oligonucleotide
agccccaagauguggacaa

SEQ ID NO: 303771 - RNA, 19 nt, Artificial Sequence
  Description of Artificial Sequence: Synthetic oligonucleotide
acgugggacacaggugucc

SEQ ID NO: 303772 - RNA, 19 nt, Artificial Sequence
  Description of Artificial Sequence: Synthetic oligonucleotide
gucagccaaccauucagac

SEQ ID NO: 303773 - RNA, 19 nt, Artificial Sequence
  Description of Artificial Sequence: Synthetic oligonucleotide
ccaggaguugcauaaauga

SEQ ID NO: 303774 - RNA, 19 nt, Artificial Sequence
  Description of Artificial Sequence: Synthetic oligonucleotide
caaugcgacagaugccaug

SEQ ID NO: 303775 - RNA, 19 nt, Artificial Sequence
  Description of Artificial Sequence: Synthetic oligonucleotide
uacauccgacccagcaucu

SEQ ID NO: 303776 - RNA, 19 nt, Artificial Sequence
  Description of Artificial Sequence: Synthetic oligonucleotide
cuccgcgauggauuggaag

SEQ ID NO: 303777 - RNA, 19 nt, Artificial Sequence
  Description of Artificial Sequence: Synthetic oligonucleotide
guuuacucuuugggaauag

SEQ ID NO: 303778 - RNA, 19 nt, Artificial Sequence
  Description of Artificial Sequence: Synthetic oligonucleotide
cagcauucggccgucuucc

SEQ ID NO: 303779 - RNA, 19 nt, Artificial Sequence
  Description of Artificial Sequence: Synthetic oligonucleotide
caccacacauggccaagcg

SEQ ID NO: 303780 - RNA, 19 nt, Artificial Sequence
  Description of Artificial Sequence: Synthetic oligonucleotide
ugagcgugucugaaauguc

SEQ ID NO: 303781 - RNA, 19 nt, Artificial Sequence
  Description of Artificial Sequence: Synthetic oligonucleotide
ggauuggaagccauagagc

SEQ ID NO: 303782 - RNA, 19 nt, Artificial Sequence
  Description of Artificial Sequence: Synthetic oligonucleotide
cuuugacauccaaucgcuc

SEQ ID NO: 303783 - RNA, 19 nt, Artificial Sequence
  Description of Artificial Sequence: Synthetic oligonucleotide
cacagcaaugcgacagaug

SEQ ID NO: 303784 - RNA, 19 nt, Artificial Sequence
  Description of Artificial Sequence: Synthetic oligonucleotide
accacacauggccaagcgu

SEQ ID NO: 303785 - RNA, 19 nt, Artificial Sequence
  Description of Artificial Sequence: Synthetic oligonucleotide
uagcaaggcccgagaauga

SEQ ID NO: 303786 - RNA, 19 nt, Artificial Sequence
  Description of Artificial Sequence: Synthetic oligonucleotide
gaagggguacgugggacac

SEQ ID NO: 303787 - RNA, 19 nt, Artificial Sequence
  Description of Artificial Sequence: Synthetic oligonucleotide
gaagagccgaaaccauauc

SEQ ID NO: 303788 - RNA, 19 nt, Artificial Sequence
  Description of Artificial Sequence: Synthetic oligonucleotide
aggaggcuaaagcaguguu

SEQ ID NO: 303789 - RNA, 19 nt, Artificial Sequence
  Description of Artificial Sequence: Synthetic oligonucleotide
aagcgucaggcaucaugcu

SEQ ID NO: 303790 - RNA, 19 nt, Artificial Sequence
  Description of Artificial Sequence: Synthetic oligonucleotide
gggaacugggcuuugcgca

SEQ ID NO: 303791 - RNA, 19 nt, Artificial Sequence
  Description of Artificial Sequence: Synthetic oligonucleotide
augagcgccucacagucuu

SEQ ID NO: 303792 - RNA, 19 nt, Artificial Sequence
  Description of Artificial Sequence: Synthetic oligonucleotide
caggauaaugaccaggaau

SEQ ID NO: 303793 - RNA, 19 nt, Artificial Sequence
  Description of Artificial Sequence: Synthetic oligonucleotide
auggugcuauacauccgac

SEQ ID NO: 303794 - RNA, 19 nt, Artificial Sequence
  Description of Artificial Sequence: Synthetic oligonucleotide
agacuugcuguagcacgac

SEQ ID NO: 303795 - RNA, 19 nt, Artificial Sequence
  Description of Artificial Sequence: Synthetic oligonucleotide
guagcacgaccaccacugg

SEQ ID NO: 303796 - RNA, 19 nt, Artificial Sequence
  Description of Artificial Sequence: Synthetic oligonucleotide
uccaccggagaguccucag

SEQ ID NO: 303797 - RNA, 19 nt, Artificial Sequence
  Description of Artificial Sequence: Synthetic oligonucleotide
aaggcccgagaaugauucu

SEQ ID NO: 303798 - RNA, 19 nt, Artificial Sequence
  Description of Artificial Sequence: Synthetic oligonucleotide
ugacauccaaucgcucaca

SEQ ID NO: 303799 - RNA, 19 nt, Artificial Sequence
  Description of Artificial Sequence: Synthetic oligonucleotide
ggccuugacaguuggcgcc

SEQ ID NO: 303800 - RNA, 19 nt, Artificial Sequence
  Description of Artificial Sequence: Synthetic oligonucleotide
gccgaaaccauaucugcca

SEQ ID NO: 303801 - RNA, 19 nt, Artificial Sequence
  Description of Artificial Sequence: Synthetic oligonucleotide
cacaacaguguaaauuccu

SEQ ID NO: 303802 - RNA, 19 nt, Artificial Sequence
  Description of Artificial Sequence: Synthetic oligonucleotide
uggccaagcgucaggcauc

SEQ ID NO: 303803 - RNA, 19 nt, Artificial Sequence
  Description of Artificial Sequence: Synthetic oligonucleotide
gaugacugacauccagugu

SEQ ID NO: 303804 - RNA, 19 nt, Artificial Sequence
  Description of Artificial Sequence: Synthetic oligonucleotide
gccuggaagagccgaaacc

SEQ ID NO: 303805 - RNA, 19 nt, Artificial Sequence
  Description of Artificial Sequence: Synthetic oligonucleotide
gcgacagaugccaugggag

SEQ ID NO: 303806 - RNA, 19 nt, Artificial Sequence
  Description of Artificial Sequence: Synthetic oligonucleotide
ugggcaucguucagccacu

SEQ ID NO: 303807 - RNA, 19 nt, Artificial Sequence
  Description of Artificial Sequence: Synthetic oligonucleotide
ucgugaucauccucaugau

SEQ ID NO: 303808 - RNA, 19 nt, Artificial Sequence
  Description of Artificial Sequence: Synthetic oligonucleotide
ggaccagaauccauauucc

SEQ ID NO: 303809 - RNA, 19 nt, Artificial Sequence
  Description of Artificial Sequence: Synthetic oligonucleotide
agcgugucugaaaugucca

SEQ ID NO: 303810 - RNA, 19 nt, Artificial Sequence
  Description of Artificial Sequence: Synthetic oligonucleotide
acgggguggucagccaacc

SEQ ID NO: 303811 - RNA, 19 nt, Artificial Sequence
  Description of Artificial Sequence: Synthetic oligonucleotide
augcgacagaugccauggg

SEQ ID NO: 303812 - RNA, 19 nt, Artificial Sequence
  Description of Artificial Sequence: Synthetic oligonucleotide
cacaccgaggcaguaguuc

SEQ ID NO: 303813 - RNA, 19 nt, Artificial Sequence
  Description of Artificial Sequence: Synthetic oligonucleotide
ggauucgguaucucuucug

SEQ ID NO: 303814 - RNA, 19 nt, Artificial Sequence
  Description of Artificial Sequence: Synthetic oligonucleotide
gaggcugcgggaggcuugg

SEQ ID NO: 303815 - RNA, 19 nt, Artificial Sequence
  Description of Artificial Sequence: Synthetic oligonucleotide
ccaagcgucaggcaucaug

SEQ ID NO: 303816 - RNA, 19 nt, Artificial Sequence
  Description of Artificial Sequence: Synthetic oligonucleotide
acucuagcagggccagaca

SEQ ID NO: 303817 - RNA, 19 nt, Artificial Sequence
  Description of Artificial Sequence: Synthetic oligonucleotide
cauccgacccagcaucuca

SEQ ID NO: 303818 - RNA, 19 nt, Artificial Sequence
  Description of Artificial Sequence: Synthetic oligonucleotide
ggcacugguagcuuccgga

SEQ ID NO: 303819 - RNA, 19 nt, Artificial Sequence
  Description of Artificial Sequence: Synthetic oligonucleotide
gugcuauacauccgaccca

SEQ ID NO: 303820 - RNA, 19 nt, Artificial Sequence
  Description of Artificial Sequence: Synthetic oligonucleotide
ccaaccauucagacagagc

SEQ ID NO: 303821 - RNA, 19 nt, Artificial Sequence
  Description of Artificial Sequence: Synthetic oligonucleotide
caugggaggucuccauguc

SEQ ID NO: 303822 - RNA, 19 nt, Artificial Sequence
  Description of Artificial Sequence: Synthetic oligonucleotide
gccauguaguccccgacac

SEQ ID NO: 303823 - RNA, 19 nt, Artificial Sequence
  Description of Artificial Sequence: Synthetic oligonucleotide
cuuugcgcaaaagcacauc

SEQ ID NO: 303824 - RNA, 19 nt, Artificial Sequence
  Description of Artificial Sequence: Synthetic oligonucleotide
uccgacccagcaucucaca

SEQ ID NO: 303825 - RNA, 19 nt, Artificial Sequence
  Description of Artificial Sequence: Synthetic oligonucleotide
auguaguccccgacacaac

SEQ ID NO: 303826 - RNA, 19 nt, Artificial Sequence
  Description of Artificial Sequence: Synthetic oligonucleotide
uacgugggacacagguguc

SEQ ID NO: 303827 - RNA, 19 nt, Artificial Sequence
  Description of Artificial Sequence: Synthetic oligonucleotide
auaguccgugccauguagu

SEQ ID NO: 303828 - RNA, 19 nt, Artificial Sequence
  Description of Artificial Sequence: Synthetic oligonucleotide
ccgccagugcucuacuugg

SEQ ID NO: 303829 - RNA, 19 nt, Artificial Sequence
  Description of Artificial Sequence: Synthetic oligonucleotide
ggugucccucaguagucag

SEQ ID NO: 303830 - RNA, 19 nt, Artificial Sequence
  Description of Artificial Sequence: Synthetic oligonucleotide
ugaaguagacuggccggua

SEQ ID NO: 303831 - RNA, 19 nt, Artificial Sequence
  Description of Artificial Sequence: Synthetic oligonucleotide
guccacccuguaaauucgg

SEQ ID NO: 303832 - RNA, 19 nt, Artificial Sequence
  Description of Artificial Sequence: Synthetic oligonucleotide
caccagaccuuugcgguac

SEQ ID NO: 303833 - RNA, 19 nt, Artificial Sequence
  Description of Artificial Sequence: Synthetic oligonucleotide
guagacuggccgguacagc

SEQ ID NO: 303834 - RNA, 19 nt, Artificial Sequence
  Description of Artificial Sequence: Synthetic oligonucleotide
aucgcucacacaggaacaa

SEQ ID NO: 303835 - RNA, 19 nt, Artificial Sequence
  Description of Artificial Sequence: Synthetic oligonucleotide
cccgagaaugauucucgcc

SEQ ID NO: 303836 - RNA, 19 nt, Artificial Sequence
  Description of Artificial Sequence: Synthetic oligonucleotide
gguacgugggacacaggug

SEQ ID NO: 303837 - RNA, 19 nt, Artificial Sequence
  Description of Artificial Sequence: Synthetic oligonucleotide
uaggguggcaggucauauu

SEQ ID NO: 303838 - RNA, 19 nt, Artificial Sequence
  Description of Artificial Sequence: Synthetic oligonucleotide
gagugaggucaagagcaga

SEQ ID NO: 303839 - RNA, 19 nt, Artificial Sequence
  Description of Artificial Sequence: Synthetic oligonucleotide
cucgcccagggccacagca

SEQ ID NO: 303840 - RNA, 19 nt, Artificial Sequence
  Description of Artificial Sequence: Synthetic oligonucleotide
acgggcagaugggaaacca

SEQ ID NO: 303841 - RNA, 19 nt, Artificial Sequence
  Description of Artificial Sequence: Synthetic oligonucleotide
ggauguagggagagaugag

SEQ ID NO: 303842 - RNA, 19 nt, Artificial Sequence
  Description of Artificial Sequence: Synthetic oligonucleotide
gggcagaacauuguugauc

SEQ ID NO: 303843 - RNA, 19 nt, Artificial Sequence
  Description of Artificial Sequence: Synthetic oligonucleotide
gacgggcagaugggaaacc

SEQ ID NO: 303844 - RNA, 19 nt, Artificial Sequence
  Description of Artificial Sequence: Synthetic oligonucleotide
cauagacauacaugagcgu

SEQ ID NO: 303845 - RNA, 19 nt, Artificial Sequence
  Description of Artificial Sequence: Synthetic oligonucleotide
gucauccugcaguguguac

SEQ ID NO: 303846 - RNA, 19 nt, Artificial Sequence
  Description of Artificial Sequence: Synthetic oligonucleotide
gugccauguaguccccgac

SEQ ID NO: 303847 - RNA, 19 nt, Artificial Sequence
  Description of Artificial Sequence: Synthetic oligonucleotide
ggcuuugcgcaaaagcaca

SEQ ID NO: 303848 - RNA, 19 nt, Artificial Sequence
  Description of Artificial Sequence: Synthetic oligonucleotide
gggcuuugcgcaaaagcac

SEQ ID NO: 303849 - RNA, 19 nt, Artificial Sequence
  Description of Artificial Sequence: Synthetic oligonucleotide
augacgggguggucagcca

SEQ ID NO: 303850 - RNA, 19 nt, Artificial Sequence
  Description of Artificial Sequence: Synthetic oligonucleotide
gccaaccauucagacagag

SEQ ID NO: 303851 - RNA, 19 nt, Artificial Sequence
  Description of Artificial Sequence: Synthetic oligonucleotide
gccuucgugaucauccuca

SEQ ID NO: 303852 - RNA, 19 nt, Artificial Sequence
  Description of Artificial Sequence: Synthetic oligonucleotide
gucuccgcgauggauugga

SEQ ID NO: 303853 - RNA, 19 nt, Artificial Sequence
  Description of Artificial Sequence: Synthetic oligonucleotide
guauaguccgugccaugua

SEQ ID NO: 303854 - RNA, 19 nt, Artificial Sequence
  Description of Artificial Sequence: Synthetic oligonucleotide
aagggguacgugggacaca

SEQ ID NO: 303855 - RNA, 19 nt, Artificial Sequence
  Description of Artificial Sequence: Synthetic oligonucleotide
ccgcaccagaccuuugcgg

SEQ ID NO: 303856 - RNA, 19 nt, Artificial Sequence
  Description of Artificial Sequence: Synthetic oligonucleotide
gccuagggcaugcagcaca

SEQ ID NO: 303857 - RNA, 19 nt, Artificial Sequence
  Description of Artificial Sequence: Synthetic oligonucleotide
agacuggccgguacagcug

SEQ ID NO: 303858 - RNA, 19 nt, Artificial Sequence
  Description of Artificial Sequence: Synthetic oligonucleotide
agcauucggccgucuuccu

SEQ ID NO: 303859 - RNA, 19 nt, Artificial Sequence
  Description of Artificial Sequence: Synthetic oligonucleotide
ucuccgcgauggauuggaa

SEQ ID NO: 303860 - RNA, 19 nt, Artificial Sequence
  Description of Artificial Sequence: Synthetic oligonucleotide
ugggcgggcucaugggcaa

SEQ ID NO: 303861 - RNA, 19 nt, Artificial Sequence
  Description of Artificial Sequence: Synthetic oligonucleotide
gcgcaaaagcacauccacc

SEQ ID NO: 303862 - RNA, 19 nt, Artificial Sequence
  Description of Artificial Sequence: Synthetic oligonucleotide
gacgggguggucagccaac

SEQ ID NO: 303863 - RNA, 19 nt, Artificial Sequence
  Description of Artificial Sequence: Synthetic oligonucleotide
gguugcuaagcagcucggc

SEQ ID NO: 303864 - RNA, 19 nt, Artificial Sequence
  Description of Artificial Sequence: Synthetic oligonucleotide
ggagggauucgguaucucu

SEQ ID NO: 303865 - RNA, 19 nt, Artificial Sequence
  Description of Artificial Sequence: Synthetic oligonucleotide
caggaaugccagugcagaa

SEQ ID NO: 303866 - RNA, 19 nt, Artificial Sequence
  Description of Artificial Sequence: Synthetic oligonucleotide
uucggccgucuuccuguac

SEQ ID NO: 303867 - RNA, 19 nt, Artificial Sequence
  Description of Artificial Sequence: Synthetic oligonucleotide
cuccucgggcaguacuguc

SEQ ID NO: 303868 - RNA, 19 nt, Artificial Sequence
  Description of Artificial Sequence: Synthetic oligonucleotide
cuagcacagcacacuggaa

SEQ ID NO: 303869 - RNA, 19 nt, Artificial Sequence
  Description of Artificial Sequence: Synthetic oligonucleotide
gacauacaugagcgugucu

SEQ ID NO: 303870 - RNA, 19 nt, Artificial Sequence
  Description of Artificial Sequence: Synthetic oligonucleotide
acuggggcaagcggcuagu

SEQ ID NO: 303871 - RNA, 19 nt, Artificial Sequence
  Description of Artificial Sequence: Synthetic oligonucleotide
cgugaucauccucaugaug

SEQ ID NO: 303872 - RNA, 19 nt, Artificial Sequence
  Description of Artificial Sequence: Synthetic oligonucleotide
gcauucggccgucuuccug

SEQ ID NO: 303873 - RNA, 19 nt, Artificial Sequence
  Description of Artificial Sequence: Synthetic oligonucleotide
agacaacggcccuggccau

SEQ ID NO: 303874 - RNA, 19 nt, Artificial Sequence
  Description of Artificial Sequence: Synthetic oligonucleotide
gaugggaaaccaggcggcu

SEQ ID NO: 303875 - RNA, 19 nt, Artificial Sequence
  Description of Artificial Sequence: Synthetic oligonucleotide
gcagugucuuaacagacuu

SEQ ID NO: 303876 - RNA, 19 nt, Artificial Sequence
  Description of Artificial Sequence: Synthetic oligonucleotide
cccgcaccagaccuuugcg

SEQ ID NO: 303877 - RNA, 19 nt, Artificial Sequence
  Description of Artificial Sequence: Synthetic oligonucleotide
ccgacccagcaucucacag

SEQ ID NO: 303878 - RNA, 19 nt, Artificial Sequence
  Description of Artificial Sequence: Synthetic oligonucleotide
guagugccuccuugaucca

SEQ ID NO: 303879 - RNA, 19 nt, Artificial Sequence
  Description of Artificial Sequence: Synthetic oligonucleotide
gcucacggaggaucugcug

SEQ ID NO: 303880 - RNA, 19 nt, Artificial Sequence
  Description of Artificial Sequence: Synthetic oligonucleotide
ggcaucguucagccacuug

SEQ ID NO: 303881 - RNA, 19 nt, Artificial Sequence
  Description of Artificial Sequence: Synthetic oligonucleotide
gcgugucugaaauguccac

SEQ ID NO: 303882 - RNA, 19 nt, Artificial Sequence
  Description of Artificial Sequence: Synthetic oligonucleotide
cuggccgguacagcugcug

SEQ ID NO: 303883 - RNA, 19 nt, Artificial Sequence
  Description of Artificial Sequence: Synthetic oligonucleotide
ggaagcuccgccagugcuc

SEQ ID NO: 303884 - RNA, 19 nt, Artificial Sequence
  Description of Artificial Sequence: Synthetic oligonucleotide
cauagagcagggccucugu

SEQ ID NO: 303885 - RNA, 19 nt, Artificial Sequence
  Description of Artificial Sequence: Synthetic oligonucleotide
cugccgagugaggucaaga

SEQ ID NO: 303886 - RNA, 19 nt, Artificial Sequence
  Description of Artificial Sequence: Synthetic oligonucleotide
gcggcuagucuggaacucc

SEQ ID NO: 303887 - RNA, 19 nt, Artificial Sequence
  Description of Artificial Sequence: Synthetic oligonucleotide
cauccaccggagaguccuc

SEQ ID NO: 303888 - RNA, 19 nt, Artificial Sequence
  Description of Artificial Sequence: Synthetic oligonucleotide
ggugaacaugacaguaucu

SEQ ID NO: 303889 - RNA, 19 nt, Artificial Sequence
  Description of Artificial Sequence: Synthetic oligonucleotide
auucggccgucuuccugua

SEQ ID NO: 303890 - RNA, 19 nt, Artificial Sequence
  Description of Artificial Sequence: Synthetic oligonucleotide
cccgacacaacaguguaaa

SEQ ID NO: 303891 - RNA, 19 nt, Artificial Sequence
  Description of Artificial Sequence: Synthetic oligonucleotide
ggugagcaaauggcccagc

SEQ ID NO: 303892 - RNA, 19 nt, Artificial Sequence
  Description of Artificial Sequence: Synthetic oligonucleotide
ggugagagugagggagcug

SEQ ID NO: 303893 - RNA, 19 nt, Artificial Sequence
  Description of Artificial Sequence: Synthetic oligonucleotide
cagugcagaacaugaucau

SEQ ID NO: 303894 - RNA, 19 nt, Artificial Sequence
  Description of Artificial Sequence: Synthetic oligonucleotide
ccgcgauggauuggaagcc

SEQ ID NO: 303895 - RNA, 19 nt, Artificial Sequence
  Description of Artificial Sequence: Synthetic oligonucleotide
ccacccuguaaauucggaa

SEQ ID NO: 303896 - RNA, 19 nt, Artificial Sequence
  Description of Artificial Sequence: Synthetic oligonucleotide
gggguggucagccaaccau

SEQ ID NO: 303897 - RNA, 19 nt, Artificial Sequence
  Description of Artificial Sequence: Synthetic oligonucleotide
cgagaaugauucucgccca

SEQ ID NO: 303898 - RNA, 19 nt, Artificial Sequence
  Description of Artificial Sequence: Synthetic oligonucleotide
gcaguacugucagcaacuc

SEQ ID NO: 303899 - RNA, 19 nt, Artificial Sequence
  Description of Artificial Sequence: Synthetic oligonucleotide
cuuccggagcucagggccu

SEQ ID NO: 303900 - RNA, 19 nt, Artificial Sequence
  Description of Artificial Sequence: Synthetic oligonucleotide
uggcccgcaccagaccuuu

SEQ ID NO: 303901 - RNA, 19 nt, Artificial Sequence
  Description of Artificial Sequence: Synthetic oligonucleotide
gggauucgguaucucuucu

SEQ ID NO: 303902 - RNA, 19 nt, Artificial Sequence
  Description of Artificial Sequence: Synthetic oligonucleotide
gcuggcccgcaccagaccu

SEQ ID NO: 303903 - RNA, 19 nt, Artificial Sequence
  Description of Artificial Sequence: Synthetic oligonucleotide
ggucuccgcgauggauugg

SEQ ID NO: 303904 - RNA, 19 nt, Artificial Sequence
  Description of Artificial Sequence: Synthetic oligonucleotide
ccugaaugagcgccucaca

SEQ ID NO: 303905 - RNA, 19 nt, Artificial Sequence
  Description of Artificial Sequence: Synthetic oligonucleotide
ccaagaguagggcuccucu

SEQ ID NO: 303906 - RNA, 19 nt, Artificial Sequence
  Description of Artificial Sequence: Synthetic oligonucleotide
gcuauacauccgacccagc

SEQ ID NO: 303907 - RNA, 19 nt, Artificial Sequence
  Description of Artificial Sequence: Synthetic oligonucleotide
ggagaguccucagccugga

SEQ ID NO: 303908 - RNA, 19 nt, Artificial Sequence
  Description of Artificial Sequence: Synthetic oligonucleotide
ggaugucggcaaagcaguc

SEQ ID NO: 303909 - RNA, 19 nt, Artificial Sequence
  Description of Artificial Sequence: Synthetic oligonucleotide
cuggggcaagcggcuaguc

SEQ ID NO: 303910 - RNA, 19 nt, Artificial Sequence
  Description of Artificial Sequence: Synthetic oligonucleotide
caucgauggucuccgcgau

SEQ ID NO: 303911 - RNA, 19 nt, Artificial Sequence
  Description of Artificial Sequence: Synthetic oligonucleotide
gggguaagaagggguacgu

SEQ ID NO: 303912 - RNA, 19 nt, Artificial Sequence
  Description of Artificial Sequence: Synthetic oligonucleotide
ccucaucggaagggaacug

SEQ ID NO: 303913 - RNA, 19 nt, Artificial Sequence
  Description of Artificial Sequence: Synthetic oligonucleotide
ggcuagucuggaacuccuc

SEQ ID NO: 303914 - RNA, 19 nt, Artificial Sequence
  Description of Artificial Sequence: Synthetic oligonucleotide
ggaggcuaaagcaguguuu

SEQ ID NO: 303915 - RNA, 19 nt, Artificial Sequence
  Description of Artificial Sequence: Synthetic oligonucleotide
gugccaggaguugcauaaa

SEQ ID NO: 303916 - RNA, 19 nt, Artificial Sequence
  Description of Artificial Sequence: Synthetic oligonucleotide
gccaagaguagggcuccuc

SEQ ID NO: 303917 - RNA, 19 nt, Artificial Sequence
  Description of Artificial Sequence: Synthetic oligonucleotide
uccgugggaugaggccaau

SEQ ID NO: 303918 - RNA, 19 nt, Artificial Sequence
  Description of Artificial Sequence: Synthetic oligonucleotide
cgugccauguaguccccga

SEQ ID NO: 303919 - RNA, 19 nt, Artificial Sequence
  Description of Artificial Sequence: Synthetic oligonucleotide
cgcaccagaccuuugcggu

SEQ ID NO: 303920 - RNA, 19 nt, Artificial Sequence
  Description of Artificial Sequence: Synthetic oligonucleotide
caacucuagcagggccaga

SEQ ID NO: 303921 - RNA, 19 nt, Artificial Sequence
  Description of Artificial Sequence: Synthetic oligonucleotide
ggggcagaacauuguugau

SEQ ID NO: 303922 - RNA, 19 nt, Artificial Sequence
  Description of Artificial Sequence: Synthetic oligonucleotide
cagugaaggcagccugaau

SEQ ID NO: 303923 - RNA, 19 nt, Artificial Sequence
  Description of Artificial Sequence: Synthetic oligonucleotide
uuggcgccucagggaacuu

SEQ ID NO: 303924 - RNA, 19 nt, Artificial Sequence
  Description of Artificial Sequence: Synthetic oligonucleotide
gcuuugcgcaaaagcacau

SEQ ID NO: 303925 - RNA, 19 nt, Artificial Sequence
  Description of Artificial Sequence: Synthetic oligonucleotide
ggguggucagccaaccauu

SEQ ID NO: 303926 - RNA, 19 nt, Artificial Sequence
  Description of Artificial Sequence: Synthetic oligonucleotide
ccccgacacaacaguguaa

SEQ ID NO: 303927 - RNA, 19 nt, Artificial Sequence
  Description of Artificial Sequence: Synthetic oligonucleotide
cgauggauuggaagccaua

SEQ ID NO: 303928 - RNA, 19 nt, Artificial Sequence
  Description of Artificial Sequence: Synthetic oligonucleotide
ccacaugcacuggcuuguc

SEQ ID NO: 303929 - RNA, 19 nt, Artificial Sequence
  Description of Artificial Sequence: Synthetic oligonucleotide
gcacaaggggcagaacauu

SEQ ID NO: 303930 - RNA, 19 nt, Artificial Sequence
  Description of Artificial Sequence: Synthetic oligonucleotide
caacggcccuggccaucca

SEQ ID NO: 303931 - RNA, 19 nt, Artificial Sequence
  Description of Artificial Sequence: Synthetic oligonucleotide
gggucccuguggcacuggu

SEQ ID NO: 303932 - RNA, 19 nt, Artificial Sequence
  Description of Artificial Sequence: Synthetic oligonucleotide
gcgauggauuggaagccau

SEQ ID NO: 303933 - RNA, 19 nt, Artificial Sequence
  Description of Artificial Sequence: Synthetic oligonucleotide
gcgggcucaugggcaaaga

SEQ ID NO: 303934 - RNA, 19 nt, Artificial Sequence
  Description of Artificial Sequence: Synthetic oligonucleotide
cgcgauggauuggaagcca

SEQ ID NO: 303935 - RNA, 19 nt, Artificial Sequence
  Description of Artificial Sequence: Synthetic oligonucleotide
gcuccgccagugcucuacu

SEQ ID NO: 303936 - RNA, 19 nt, Artificial Sequence
  Description of Artificial Sequence: Synthetic oligonucleotide
cggccgucuuccuguacca

SEQ ID NO: 303937 - RNA, 19 nt, Artificial Sequence
  Description of Artificial Sequence: Synthetic oligonucleotide
cuccgccagugcucuacuu

SEQ ID NO: 303938 - RNA, 19 nt, Artificial Sequence
  Description of Artificial Sequence: Synthetic oligonucleotide
cuggcccgcaccagaccuu

SEQ ID NO: 303939 - RNA, 19 nt, Artificial Sequence
  Description of Artificial Sequence: Synthetic oligonucleotide
ccaguuuguuggagggauu

SEQ ID NO: 303940 - RNA, 19 nt, Artificial Sequence
  Description of Artificial Sequence: Synthetic oligonucleotide
ggcggcuguagugccuccu

SEQ ID NO: 303941 - RNA, 19 nt, Artificial Sequence
  Description of Artificial Sequence: Synthetic oligonucleotide
cgcucacggaggaucugcu

SEQ ID NO: 303942 - RNA, 19 nt, Artificial Sequence
  Description of Artificial Sequence: Synthetic oligonucleotide
gcacucccugcagaucuuu

SEQ ID NO: 303943 - RNA, 19 nt, Artificial Sequence
  Description of Artificial Sequence: Synthetic oligonucleotide
ggaugaucccugggcccuu

SEQ ID NO: 303944 - RNA, 19 nt, Artificial Sequence
  Description of Artificial Sequence: Synthetic oligonucleotide
gcacugcuauuagcagcau

SEQ ID NO: 303945 - RNA, 19 nt, Artificial Sequence
  Description of Artificial Sequence: Synthetic oligonucleotide
aauaagaucacugauaucu

SEQ ID NO: 303946 - RNA, 19 nt, Artificial Sequence
  Description of Artificial Sequence: Synthetic oligonucleotide
aauugcauaccauaauggc

SEQ ID NO: 303947 - RNA, 19 nt, Artificial Sequence
  Description of Artificial Sequence: Synthetic oligonucleotide
uuuaaguugaguauaagcu

SEQ ID NO: 303948 - RNA, 19 nt, Artificial Sequence
  Description of Artificial Sequence: Synthetic oligonucleotide
uaaaugauaaagauaguag

SEQ ID NO: 303949 - RNA, 19 nt, Artificial Sequence
  Description of Artificial Sequence: Synthetic oligonucleotide
agauaaaugaccaaaauuc

SEQ ID NO: 303950 - RNA, 19 nt, Artificial Sequence
  Description of Artificial Sequence: Synthetic oligonucleotide
ugaacagaauaacugaugg

SEQ ID NO: 303951 - RNA, 19 nt, Artificial Sequence
  Description of Artificial Sequence: Synthetic oligonucleotide
  modified_base (14)..(14): a, c, u, g, unknown or other
ugcacuauggggancagcg

SEQ ID NO: 303952 - RNA, 19 nt, Artificial Sequence
  Description of Artificial Sequence: Synthetic oligonucleotide
aaaggauugugacagggac

SEQ ID NO: 303953 - RNA, 19 nt, Artificial Sequence
  Description of Artificial Sequence: Synthetic oligonucleotide
agaauauuaauaauugugc

SEQ ID NO: 303954 - RNA, 19 nt, Artificial Sequence
  Description of Artificial Sequence: Synthetic oligonucleotide
aauaacugaugguacauag

SEQ ID NO: 303955 - RNA, 19 nt, Artificial Sequence
  Description of Artificial Sequence: Synthetic oligonucleotide
aaaugauaaagauaguagu

SEQ ID NO: 303956 - RNA, 19 nt, Artificial Sequence
  Description of Artificial Sequence: Synthetic oligonucleotide
aaugcaccacauuuaaagc

SEQ ID NO: 303957 - RNA, 19 nt, Artificial Sequence
  Description of Artificial Sequence: Synthetic oligonucleotide
aauaagugaacagaauaac

SEQ ID NO: 303958 - RNA, 19 nt, Artificial Sequence
  Description of Artificial Sequence: Synthetic oligonucleotide
uuauaagccaaaauagaag

SEQ ID NO: 303959 - RNA, 19 nt, Artificial Sequence
  Description of Artificial Sequence: Synthetic oligonucleotide
uuaauaagaucacugauau

SEQ ID NO: 303960 - RNA, 19 nt, Artificial Sequence
  Description of Artificial Sequence: Synthetic oligonucleotide
cuuuaugaaagaaaucagg

SEQ ID NO: 303961 - RNA, 19 nt, Artificial Sequence
  Description of Artificial Sequence: Synthetic oligonucleotide
uuaaccuucagucuuucag

SEQ ID NO: 303962 - RNA, 19 nt, Artificial Sequence
  Description of Artificial Sequence: Synthetic oligonucleotide
ugacaaauaaacuucccag

SEQ ID NO: 303963 - RNA, 19 nt, Artificial Sequence
  Description of Artificial Sequence: Synthetic oligonucleotide
cauacugagagcaaaacac

SEQ ID NO: 303964 - RNA, 19 nt, Artificial Sequence
  Description of Artificial Sequence: Synthetic oligonucleotide
aaccccaauaggcugaugg

SEQ ID NO: 303965 - RNA, 19 nt, Artificial Sequence
  Description of Artificial Sequence: Synthetic oligonucleotide
aaauacuacucuaucuucc

SEQ ID NO: 303966 - RNA, 19 nt, Artificial Sequence
  Description of Artificial Sequence: Synthetic oligonucleotide
cagaauauuaauaauugug

SEQ ID NO: 303967 - RNA, 19 nt, Artificial Sequence
  Description of Artificial Sequence: Synthetic oligonucleotide
aaacaguugaaacugaaua

SEQ ID NO: 303968 - RNA, 19 nt, Artificial Sequence
  Description of Artificial Sequence: Synthetic oligonucleotide
uuuuaagaauagcugauac

SEQ ID NO: 303969 - RNA, 19 nt, Artificial Sequence
  Description of Artificial Sequence: Synthetic oligonucleotide
uaugcuauuucaaaggaaa

SEQ ID NO: 303970 - RNA, 19 nt, Artificial Sequence
  Description of Artificial Sequence: Synthetic oligonucleotide
auaauugugcuuuugccag

SEQ ID NO: 303971 - RNA, 19 nt, Artificial Sequence
  Description of Artificial Sequence: Synthetic oligonucleotide
aauauauuggauuucucuu

SEQ ID NO: 303972 - RNA, 19 nt, Artificial Sequence
  Description of Artificial Sequence: Synthetic oligonucleotide
uaaaugaccaaaauucccu

SEQ ID NO: 303973 - RNA, 19 nt, Artificial Sequence
  Description of Artificial Sequence: Synthetic oligonucleotide
ugaaaguuuaaguugagua

SEQ ID NO: 303974 - RNA, 19 nt, Artificial Sequence
  Description of Artificial Sequence: Synthetic oligonucleotide
uugcauaccauaauggcug

SEQ ID NO: 303975 - RNA, 19 nt, Artificial Sequence
  Description of Artificial Sequence: Synthetic oligonucleotide
aaauugcauaccauaaugg

SEQ ID NO: 303976 - RNA, 19 nt, Artificial Sequence
  Description of Artificial Sequence: Synthetic oligonucleotide
aagcuuaucccauggauug

SEQ ID NO: 303977 - RNA, 19 nt, Artificial Sequence
  Description of Artificial Sequence: Synthetic oligonucleotide
uugaguauaagcuuugauc

SEQ ID NO: 303978 - RNA, 19 nt, Artificial Sequence
  Description of Artificial Sequence: Synthetic oligonucleotide
agauguauuugguugcuac

SEQ ID NO: 303979 - RNA, 19 nt, Artificial Sequence
  Description of Artificial Sequence: Synthetic oligonucleotide
auaaaugaccaaaauuccc

SEQ ID NO: 303980 - RNA, 19 nt, Artificial Sequence
  Description of Artificial Sequence: Synthetic oligonucleotide
aagcuauauucuucaaugg

SEQ ID NO: 303981 - RNA, 19 nt, Artificial Sequence
  Description of Artificial Sequence: Synthetic oligonucleotide
uuuguuauucgacuuauua

SEQ ID NO: 303982 - RNA, 19 nt, Artificial Sequence
  Description of Artificial Sequence: Synthetic oligonucleotide
aauacaagccaaugcuguc

SEQ ID NO: 303983 - RNA, 19 nt, Artificial Sequence
  Description of Artificial Sequence: Synthetic oligonucleotide
uaaucaccuagaaauaucu

SEQ ID NO: 303984 - RNA, 19 nt, Artificial Sequence
  Description of Artificial Sequence: Synthetic oligonucleotide
uaauaucuggccacagugg

SEQ ID NO: 303985 - RNA, 19 nt, Artificial Sequence
  Description of Artificial Sequence: Synthetic oligonucleotide
uuaaaugauaaagauagua

SEQ ID NO: 303986 - RNA, 19 nt, Artificial Sequence
  Description of Artificial Sequence: Synthetic oligonucleotide
aacccauacacuuacugga

SEQ ID NO: 303987 - RNA, 19 nt, Artificial Sequence
  Description of Artificial Sequence: Synthetic oligonucleotide
uccacaacuauuaucuucu

SEQ ID NO: 303988 - RNA, 19 nt, Artificial Sequence
  Description of Artificial Sequence: Synthetic oligonucleotide
aaaagcuuaucccauggau

SEQ ID NO: 303989 - RNA, 19 nt, Artificial Sequence
  Description of Artificial Sequence: Synthetic oligonucleotide
uaacccauacacuuacugg

SEQ ID NO: 303990 - RNA, 19 nt, Artificial Sequence
  Description of Artificial Sequence: Synthetic oligonucleotide
aaucaggcaacccaugagu

SEQ ID NO: 303991 - RNA, 19 nt, Artificial Sequence
  Description of Artificial Sequence: Synthetic oligonucleotide
ucuagggauuuuauaagcc

SEQ ID NO: 303992 - RNA, 19 nt, Artificial Sequence
  Description of Artificial Sequence: Synthetic oligonucleotide
ugauaaagauaguaguuac

SEQ ID NO: 303993 - RNA, 19 nt, Artificial Sequence
  Description of Artificial Sequence: Synthetic oligonucleotide
guaauaucuggccacagug

SEQ ID NO: 303994 - RNA, 19 nt, Artificial Sequence
  Description of Artificial Sequence: Synthetic oligonucleotide
ugugagaggguccugaaaa

SEQ ID NO: 303995 - RNA, 19 nt, Artificial Sequence
  Description of Artificial Sequence: Synthetic oligonucleotide
agcauugagaauugcuuac

SEQ ID NO: 303996 - RNA, 19 nt, Artificial Sequence
  Description of Artificial Sequence: Synthetic oligonucleotide
caaauugcauaccauaaug

SEQ ID NO: 303997 - RNA, 19 nt, Artificial Sequence
  Description of Artificial Sequence: Synthetic oligonucleotide
uagcaaaggauugugacag

SEQ ID NO: 303998 - RNA, 19 nt, Artificial Sequence
  Description of Artificial Sequence: Synthetic oligonucleotide
auuucuugaaugaaugggg

SEQ ID NO: 303999 - RNA, 19 nt, Artificial Sequence
  Description of Artificial Sequence: Synthetic oligonucleotide
aucuuaacugcccggacac

SEQ ID NO: 304000 - RNA, 19 nt, Artificial Sequence
  Description of Artificial Sequence: Synthetic oligonucleotide
aagggauccuuucuuaaug

SEQ ID NO: 304001 - RNA, 19 nt, Artificial Sequence
  Description of Artificial Sequence: Synthetic oligonucleotide
aauacuacucuaucuuccu

SEQ ID NO: 304002 - RNA, 19 nt, Artificial Sequence
  Description of Artificial Sequence: Synthetic oligonucleotide
caaacuuacucuuuagaug

SEQ ID NO: 304003 - RNA, 19 nt, Artificial Sequence
  Description of Artificial Sequence: Synthetic oligonucleotide
aaguuauuucagugacugc

SEQ ID NO: 304004 - RNA, 19 nt, Artificial Sequence
  Description of Artificial Sequence: Synthetic oligonucleotide
uauaauaagcacauucauu

SEQ ID NO: 304005 - RNA, 19 nt, Artificial Sequence
  Description of Artificial Sequence: Synthetic oligonucleotide
guaacgaugauuccaagca

SEQ ID NO: 304006 - RNA, 19 nt, Artificial Sequence
  Description of Artificial Sequence: Synthetic oligonucleotide
uuguuauucgacuuauuac

SEQ ID NO: 304007 - RNA, 19 nt, Artificial Sequence
  Description of Artificial Sequence: Synthetic oligonucleotide
uacuguugaaaacagcagu

SEQ ID NO: 304008 - RNA, 19 nt, Artificial Sequence
  Description of Artificial Sequence: Synthetic oligonucleotide
ucauaguguuguaugagga

SEQ ID NO: 304009 - RNA, 19 nt, Artificial Sequence
  Description of Artificial Sequence: Synthetic oligonucleotide
aguaagguggcauugcagu

SEQ ID NO: 304010 - RNA, 19 nt, Artificial Sequence
  Description of Artificial Sequence: Synthetic oligonucleotide
gaguggauagauuggaaug

SEQ ID NO: 304011 - RNA, 19 nt, Artificial Sequence
  Description of Artificial Sequence: Synthetic oligonucleotide
aguuauuucagugacugca

SEQ ID NO: 304012 - RNA, 19 nt, Artificial Sequence
  Description of Artificial Sequence: Synthetic oligonucleotide
uucgcuugaucccugcagg

SEQ ID NO: 304013 - RNA, 19 nt, Artificial Sequence
  Description of Artificial Sequence: Synthetic oligonucleotide
acacuuacuggauucauca

SEQ ID NO: 304014 - RNA, 19 nt, Artificial Sequence
  Description of Artificial Sequence: Synthetic oligonucleotide
ucucuagggauuuuauaag

SEQ ID NO: 304015 - RNA, 19 nt, Artificial Sequence
  Description of Artificial Sequence: Synthetic oligonucleotide
cucauaguguuguaugagg

SEQ ID NO: 304016 - RNA, 19 nt, Artificial Sequence
  Description of Artificial Sequence: Synthetic oligonucleotide
ucuuuaugcaaauugcaua

SEQ ID NO: 304017 - RNA, 19 nt, Artificial Sequence
  Description of Artificial Sequence: Synthetic oligonucleotide
ugcaccacauuuaaagcug

SEQ ID NO: 304018 - RNA, 19 nt, Artificial Sequence
  Description of Artificial Sequence: Synthetic oligonucleotide
uccaacuuagcaaaggauu

SEQ ID NO: 304019 - RNA, 19 nt, Artificial Sequence
  Description of Artificial Sequence: Synthetic oligonucleotide
ugcaaauugcauaccauaa

SEQ ID NO: 304020 - RNA, 19 nt, Artificial Sequence
  Description of Artificial Sequence: Synthetic oligonucleotide
aguggauagauuggaaugg

SEQ ID NO: 304021 - RNA, 19 nt, Artificial Sequence
  Description of Artificial Sequence: Synthetic oligonucleotide
augacaaauaaacuuccca

SEQ ID NO: 304022 - RNA, 19 nt, Artificial Sequence
  Description of Artificial Sequence: Synthetic oligonucleotide
ucuugaaugaaugggguac

SEQ ID NO: 304023 - RNA, 19 nt, Artificial Sequence
  Description of Artificial Sequence: Synthetic oligonucleotide
auaguccuuuucugaaugc

SEQ ID NO: 304024 - RNA, 19 nt, Artificial Sequence
  Description of Artificial Sequence: Synthetic oligonucleotide
uauguuuugcuucuuccaa

SEQ ID NO: 304025 - RNA, 19 nt, Artificial Sequence
  Description of Artificial Sequence: Synthetic oligonucleotide
uguugcuugagaaaagcua

SEQ ID NO: 304026 - RNA, 19 nt, Artificial Sequence
  Description of Artificial Sequence: Synthetic oligonucleotide
agcucaucaguucuuuaac

SEQ ID NO: 304027 - RNA, 19 nt, Artificial Sequence
  Description of Artificial Sequence: Synthetic oligonucleotide
ugggaaaauauauuggauu

SEQ ID NO: 304028 - RNA, 19 nt, Artificial Sequence
  Description of Artificial Sequence: Synthetic oligonucleotide
ugcccggacaccauaauug

SEQ ID NO: 304029 - RNA, 19 nt, Artificial Sequence
  Description of Artificial Sequence: Synthetic oligonucleotide
uuucgcuugaucccugcag

SEQ ID NO: 304030 - RNA, 19 nt, Artificial Sequence
  Description of Artificial Sequence: Synthetic oligonucleotide
uaucccauggauuguaggu

SEQ ID NO: 304031 - RNA, 19 nt, Artificial Sequence
  Description of Artificial Sequence: Synthetic oligonucleotide
accagaauauuaauaauug

SEQ ID NO: 304032 - RNA, 19 nt, Artificial Sequence
  Description of Artificial Sequence: Synthetic oligonucleotide
  modified_base (5)..(5): a, c, u, g, unknown or other
gggancagcggauacauag

SEQ ID NO: 304033 - RNA, 19 nt, Artificial Sequence
  Description of Artificial Sequence: Synthetic oligonucleotide
ugaagauguucuuucaaau

SEQ ID NO: 304034 - RNA, 19 nt, Artificial Sequence
  Description of Artificial Sequence: Synthetic oligonucleotide
guaguuacuaaugauguuc

SEQ ID NO: 304035 - RNA, 19 nt, Artificial Sequence
  Description of Artificial Sequence: Synthetic oligonucleotide
ucaauauccccaaccagaa

SEQ ID NO: 304036 - RNA, 19 nt, Artificial Sequence
  Description of Artificial Sequence: Synthetic oligonucleotide
guuuguccaaccccaauag

SEQ ID NO: 304037 - RNA, 19 nt, Artificial Sequence
  Description of Artificial Sequence: Synthetic oligonucleotide
aauggcuaugcaaaaggug

SEQ ID NO: 304038 - RNA, 19 nt, Artificial Sequence
  Description of Artificial Sequence: Synthetic oligonucleotide
auaaagauaguaguuacua

SEQ ID NO: 304039 - RNA, 19 nt, Artificial Sequence
  Description of Artificial Sequence: Synthetic oligonucleotide
uuugaaggcggucuauuuc

SEQ ID NO: 304040 - RNA, 19 nt, Artificial Sequence
  Description of Artificial Sequence: Synthetic oligonucleotide
uuugaaugugaaauauaau

SEQ ID NO: 304041 - RNA, 19 nt, Artificial Sequence
  Description of Artificial Sequence: Synthetic oligonucleotide
uguaaugaguggucagaag

SEQ ID NO: 304042 - RNA, 19 nt, Artificial Sequence
  Description of Artificial Sequence: Synthetic oligonucleotide
ugaaagaaaucaggcaacc

SEQ ID NO: 304043 - RNA, 19 nt, Artificial Sequence
  Description of Artificial Sequence: Synthetic oligonucleotide
uacuacucuaucuuccugu

SEQ ID NO: 304044 - RNA, 19 nt, Artificial Sequence
  Description of Artificial Sequence: Synthetic oligonucleotide
auaacugaugguacauagc

SEQ ID NO: 304045 - RNA, 19 nt, Artificial Sequence
  Description of Artificial Sequence: Synthetic oligonucleotide
uugucugagggcaguaacc

SEQ ID NO: 304046 - RNA, 19 nt, Artificial Sequence
  Description of Artificial Sequence: Synthetic oligonucleotide
ugcaguaacgaugauucca

SEQ ID NO: 304047 - RNA, 19 nt, Artificial Sequence
  Description of Artificial Sequence: Synthetic oligonucleotide
uuucucacacagaacgaga

SEQ ID NO: 304048 - RNA, 19 nt, Artificial Sequence
  Description of Artificial Sequence: Synthetic oligonucleotide
auaaucaccuagaaauauc

SEQ ID NO: 304049 - RNA, 19 nt, Artificial Sequence
  Description of Artificial Sequence: Synthetic oligonucleotide
uguccaaccccaauaggcu

SEQ ID NO: 304050 - RNA, 19 nt, Artificial Sequence
  Description of Artificial Sequence: Synthetic oligonucleotide
augcaccacauuuaaagcu

SEQ ID NO: 304051 - RNA, 19 nt, Artificial Sequence
  Description of Artificial Sequence: Synthetic oligonucleotide
gccaauacaucuuaacugc

SEQ ID NO: 304052 - RNA, 19 nt, Artificial Sequence
  Description of Artificial Sequence: Synthetic oligonucleotide
ucugaaugcaccacauuua

SEQ ID NO: 304053 - RNA, 19 nt, Artificial Sequence
  Description of Artificial Sequence: Synthetic oligonucleotide
uugggaaaauauauuggau

SEQ ID NO: 304054 - RNA, 19 nt, Artificial Sequence
  Description of Artificial Sequence: Synthetic oligonucleotide
cauaguccuuuucugaaug

SEQ ID NO: 304055 - RNA, 19 nt, Artificial Sequence
  Description of Artificial Sequence: Synthetic oligonucleotide
uaaaagcuuaucccaugga

SEQ ID NO: 304056 - RNA, 19 nt, Artificial Sequence
  Description of Artificial Sequence: Synthetic oligonucleotide
acuaaugauguucaucauu

SEQ ID NO: 304057 - RNA, 19 nt, Artificial Sequence
  Description of Artificial Sequence: Synthetic oligonucleotide
auacaucuuaacugcccgg

SEQ ID NO: 304058 - RNA, 19 nt, Artificial Sequence
  Description of Artificial Sequence: Synthetic oligonucleotide
aguucggauagcucuccac

SEQ ID NO: 304059 - RNA, 19 nt, Artificial Sequence
  Description of Artificial Sequence: Synthetic oligonucleotide
gaugguaaaagaccugaaa

SEQ ID NO: 304060 - RNA, 19 nt, Artificial Sequence
  Description of Artificial Sequence: Synthetic oligonucleotide
ucucauaguguuguaugag

SEQ ID NO: 304061 - RNA, 19 nt, Artificial Sequence
  Description of Artificial Sequence: Synthetic oligonucleotide
auuggaauggcuaugcaaa

SEQ ID NO: 304062 - RNA, 19 nt, Artificial Sequence
  Description of Artificial Sequence: Synthetic oligonucleotide
ugguagagaauaaaccaua

SEQ ID NO: 304063 - RNA, 19 nt, Artificial Sequence
  Description of Artificial Sequence: Synthetic oligonucleotide
gaucccugcagguaguuuc

SEQ ID NO: 304064 - RNA, 19 nt, Artificial Sequence
  Description of Artificial Sequence: Synthetic oligonucleotide
aguaauaucuggccacagu

SEQ ID NO: 304065 - RNA, 19 nt, Artificial Sequence
  Description of Artificial Sequence: Synthetic oligonucleotide
cugaaguugguucaauauc

SEQ ID NO: 304066 - RNA, 19 nt, Artificial Sequence
  Description of Artificial Sequence: Synthetic oligonucleotide
aauugccacucugucacag

SEQ ID NO: 304067 - RNA, 19 nt, Artificial Sequence
  Description of Artificial Sequence: Synthetic oligonucleotide
aaugcaguucggauagcuc

SEQ ID NO: 304068 - RNA, 19 nt, Artificial Sequence
  Description of Artificial Sequence: Synthetic oligonucleotide
gauggcucauccaguagcg

SEQ ID NO: 304069 - RNA, 19 nt, Artificial Sequence
  Description of Artificial Sequence: Synthetic oligonucleotide
gauuggaauggcuaugcaa

SEQ ID NO: 304070 - RNA, 19 nt, Artificial Sequence
  Description of Artificial Sequence: Synthetic oligonucleotide
uuauucgacuuauuacuuc

SEQ ID NO: 304071 - RNA, 19 nt, Artificial Sequence
  Description of Artificial Sequence: Synthetic oligonucleotide
ugugaaauauaaucaccua

SEQ ID NO: 304072 - RNA, 19 nt, Artificial Sequence
  Description of Artificial Sequence: Synthetic oligonucleotide
cauggcaaaguaagguggc

SEQ ID NO: 304073 - RNA, 19 nt, Artificial Sequence
  Description of Artificial Sequence: Synthetic oligonucleotide
acacacugcagguagggca

SEQ ID NO: 304074 - RNA, 19 nt, Artificial Sequence
  Description of Artificial Sequence: Synthetic oligonucleotide
aacacauuaugaauagaaa

SEQ ID NO: 304075 - RNA, 19 nt, Artificial Sequence
  Description of Artificial Sequence: Synthetic oligonucleotide
auugcauaccauaauggcu

SEQ ID NO: 304076 - RNA, 19 nt, Artificial Sequence
  Description of Artificial Sequence: Synthetic oligonucleotide
aaccauaguacuguugaaa

SEQ ID NO: 304077 - RNA, 19 nt, Artificial Sequence
  Description of Artificial Sequence: Synthetic oligonucleotide
auaggcugaugguaaaaga

SEQ ID NO: 304078 - RNA, 19 nt, Artificial Sequence
  Description of Artificial Sequence: Synthetic oligonucleotide
caucauuacugguagagaa

SEQ ID NO: 304079 - RNA, 19 nt, Artificial Sequence
  Description of Artificial Sequence: Synthetic oligonucleotide
aagaaaucaggcaacccau

SEQ ID NO: 304080 - RNA, 19 nt, Artificial Sequence
  Description of Artificial Sequence: Synthetic oligonucleotide
  modified_base (3)..(3): a, c, u, g, unknown or other
gancagcggauacauaguc

SEQ ID NO: 304081 - RNA, 19 nt, Artificial Sequence
  Description of Artificial Sequence: Synthetic oligonucleotide
uccaguagcguaaccugug

SEQ ID NO: 304082 - RNA, 19 nt, Artificial Sequence
  Description of Artificial Sequence: Synthetic oligonucleotide
augauaaagauaguaguua

SEQ ID NO: 304083 - RNA, 19 nt, Artificial Sequence
  Description of Artificial Sequence: Synthetic oligonucleotide
uaguguuguaugaggaaaa

SEQ ID NO: 304084 - RNA, 19 nt, Artificial Sequence
  Description of Artificial Sequence: Synthetic oligonucleotide
guuacuaaugauguucauc

SEQ ID NO: 304085 - RNA, 19 nt, Artificial Sequence
  Description of Artificial Sequence: Synthetic oligonucleotide
uuuugugagaggguccuga

SEQ ID NO: 304086 - RNA, 19 nt, Artificial Sequence
  Description of Artificial Sequence: Synthetic oligonucleotide
acuacucuaucuuccugug

SEQ ID NO: 304087 - RNA, 19 nt, Artificial Sequence
  Description of Artificial Sequence: Synthetic oligonucleotide
aguuuguccaaccccaaua

SEQ ID NO: 304088 - RNA, 19 nt, Artificial Sequence
  Description of Artificial Sequence: Synthetic oligonucleotide
  modified_base (9)..(9): a, c, u, g, unknown or other
uauggggancagcggauac

SEQ ID NO: 304089 - RNA, 19 nt, Artificial Sequence
  Description of Artificial Sequence: Synthetic oligonucleotide
ugucaguaauuucuugaau

SEQ ID NO: 304090 - RNA, 19 nt, Artificial Sequence
  Description of Artificial Sequence: Synthetic oligonucleotide
augucaguaauuucuugaa

SEQ ID NO: 304091 - RNA, 19 nt, Artificial Sequence
  Description of Artificial Sequence: Synthetic oligonucleotide
aaguaagguggcauugcag

SEQ ID NO: 304092 - RNA, 19 nt, Artificial Sequence
  Description of Artificial Sequence: Synthetic oligonucleotide
uggauagauuggaauggcu

SEQ ID NO: 304093 - RNA, 19 nt, Artificial Sequence
  Description of Artificial Sequence: Synthetic oligonucleotide
acugcaauacaagccaaug

SEQ ID NO: 304094 - RNA, 19 nt, Artificial Sequence
  Description of Artificial Sequence: Synthetic oligonucleotide
uacaucuuaacugcccgga

SEQ ID NO: 304095 - RNA, 19 nt, Artificial Sequence
  Description of Artificial Sequence: Synthetic oligonucleotide
uacacuuacuggauucauc

SEQ ID NO: 304096 - RNA, 19 nt, Artificial Sequence
  Description of Artificial Sequence: Synthetic oligonucleotide
cauaauugccacucuguca

SEQ ID NO: 304097 - RNA, 19 nt, Artificial Sequence
  Description of Artificial Sequence: Synthetic oligonucleotide
ucuuuagaugcuguacugu

SEQ ID NO: 304098 - RNA, 19 nt, Artificial Sequence
  Description of Artificial Sequence: Synthetic oligonucleotide
augcaaauugcauaccaua

SEQ ID NO: 304099 - RNA, 19 nt, Artificial Sequence
  Description of Artificial Sequence: Synthetic oligonucleotide
cuguuuaaaguuccacaac

SEQ ID NO: 304100 - RNA, 19 nt, Artificial Sequence
  Description of Artificial Sequence: Synthetic oligonucleotide
agcguaaccuguggguucc

SEQ ID NO: 304101 - RNA, 19 nt, Artificial Sequence
  Description of Artificial Sequence: Synthetic oligonucleotide
cucauugacuggugguucc

SEQ ID NO: 304102 - RNA, 19 nt, Artificial Sequence
  Description of Artificial Sequence: Synthetic oligonucleotide
ucaagggcauuuguuauuc

SEQ ID NO: 304103 - RNA, 19 nt, Artificial Sequence
  Description of Artificial Sequence: Synthetic oligonucleotide
ucuuacuuuuggccuuuug

SEQ ID NO: 304104 - RNA, 19 nt, Artificial Sequence
  Description of Artificial Sequence: Synthetic oligonucleotide
gauagauuggaauggcuau

SEQ ID NO: 304105 - RNA, 19 nt, Artificial Sequence
  Description of Artificial Sequence: Synthetic oligonucleotide
aaaccauaguacuguugaa

SEQ ID NO: 304106 - RNA, 19 nt, Artificial Sequence
  Description of Artificial Sequence: Synthetic oligonucleotide
cauuuuguguaauaugcua

SEQ ID NO: 304107 - RNA, 19 nt, Artificial Sequence
  Description of Artificial Sequence: Synthetic oligonucleotide
uaccauaauggcugguuuc

SEQ ID NO: 304108 - RNA, 19 nt, Artificial Sequence
  Description of Artificial Sequence: Synthetic oligonucleotide
caguaacccauacacuuac

SEQ ID NO: 304109 - RNA, 19 nt, Artificial Sequence
  Description of Artificial Sequence: Synthetic oligonucleotide
uuuggacccaacaguccca

SEQ ID NO: 304110 - RNA, 19 nt, Artificial Sequence
  Description of Artificial Sequence: Synthetic oligonucleotide
aguauaagcuuugaucuua

SEQ ID NO: 304111 - RNA, 19 nt, Artificial Sequence
  Description of Artificial Sequence: Synthetic oligonucleotide
ccuuuaugaaagaaaucag

SEQ ID NO: 304112 - RNA, 19 nt, Artificial Sequence
  Description of Artificial Sequence: Synthetic oligonucleotide
auagauuggaauggcuaug

SEQ ID NO: 304113 - RNA, 19 nt, Artificial Sequence
  Description of Artificial Sequence: Synthetic oligonucleotide
caaaguaagguggcauugc

SEQ ID NO: 304114 - RNA, 19 nt, Artificial Sequence
  Description of Artificial Sequence: Synthetic oligonucleotide
gguucaauauccccaacca

SEQ ID NO: 304115 - RNA, 19 nt, Artificial Sequence
  Description of Artificial Sequence: Synthetic oligonucleotide
auacuacucuaucuuccug

SEQ ID NO: 304116 - RNA, 19 nt, Artificial Sequence
  Description of Artificial Sequence: Synthetic oligonucleotide
ugaugguaaaagaccugaa

SEQ ID NO: 304117 - RNA, 19 nt, Artificial Sequence
  Description of Artificial Sequence: Synthetic oligonucleotide
uuuaaccuucagucuuuca

SEQ ID NO: 304118 - RNA, 19 nt, Artificial Sequence
  Description of Artificial Sequence: Synthetic oligonucleotide
aaguugaguauaagcuuug

SEQ ID NO: 304119 - RNA, 19 nt, Artificial Sequence
  Description of Artificial Sequence: Synthetic oligonucleotide
guucggauagcucuccaca

SEQ ID NO: 304120 - RNA, 19 nt, Artificial Sequence
  Description of Artificial Sequence: Synthetic oligonucleotide
  modified_base (2)..(2): a, c, u, g, unknown or other
ancagcggauacauaguca

SEQ ID NO: 304121 - RNA, 19 nt, Artificial Sequence
  Description of Artificial Sequence: Synthetic oligonucleotide
ucauugacuggugguuccg

SEQ ID NO: 304122 - RNA, 19 nt, Artificial Sequence
  Description of Artificial Sequence: Synthetic oligonucleotide
uucuugaaugaauggggua

SEQ ID NO: 304123 - RNA, 19 nt, Artificial Sequence
  Description of Artificial Sequence: Synthetic oligonucleotide
gguagagaauaaaccauag

SEQ ID NO: 304124 - RNA, 19 nt, Artificial Sequence
  Description of Artificial Sequence: Synthetic oligonucleotide
ggauggcucauccaguagc

SEQ ID NO: 304125 - RNA, 19 nt, Artificial Sequence
  Description of Artificial Sequence: Synthetic oligonucleotide
auagccaacaaaggcaaaa

SEQ ID NO: 304126 - RNA, 19 nt, Artificial Sequence
  Description of Artificial Sequence: Synthetic oligonucleotide
ugaaugcaccacauuuaaa

SEQ ID NO: 304127 - RNA, 19 nt, Artificial Sequence
  Description of Artificial Sequence: Synthetic oligonucleotide
ggauuucucuuugaaggcg

SEQ ID NO: 304128 - RNA, 19 nt, Artificial Sequence
  Description of Artificial Sequence: Synthetic oligonucleotide
aaggauugugacagggacu

SEQ ID NO: 304129 - RNA, 19 nt, Artificial Sequence
  Description of Artificial Sequence: Synthetic oligonucleotide
uggauggcucauccaguag

SEQ ID NO: 304130 - RNA, 19 nt, Artificial Sequence
  Description of Artificial Sequence: Synthetic oligonucleotide
cugagagcaaaacacagcu

SEQ ID NO: 304131 - RNA, 19 nt, Artificial Sequence
  Description of Artificial Sequence: Synthetic oligonucleotide
cuuacuuuuggccuuuugu

SEQ ID NO: 304132 - RNA, 19 nt, Artificial Sequence
  Description of Artificial Sequence: Synthetic oligonucleotide
gaaggcggucuauuuccag

SEQ ID NO: 304133 - RNA, 19 nt, Artificial Sequence
  Description of Artificial Sequence: Synthetic oligonucleotide
auaaaccauaguacuguug

SEQ ID NO: 304134 - RNA, 19 nt, Artificial Sequence
  Description of Artificial Sequence: Synthetic oligonucleotide
gguagggcauuauaacagc

SEQ ID NO: 304135 - RNA, 19 nt, Artificial Sequence
  Description of Artificial Sequence: Synthetic oligonucleotide
gguuccggaaacuucuuac

SEQ ID NO: 304136 - RNA, 19 nt, Artificial Sequence
  Description of Artificial Sequence: Synthetic oligonucleotide
gcuauauucuucaauggca

SEQ ID NO: 304137 - RNA, 19 nt, Artificial Sequence
  Description of Artificial Sequence: Synthetic oligonucleotide
aguaguuacuaaugauguu

SEQ ID NO: 304138 - RNA, 19 nt, Artificial Sequence
  Description of Artificial Sequence: Synthetic oligonucleotide
  modified_base (7)..(7): a, c, u, g, unknown or other
uggggancagcggauacau

SEQ ID NO: 304139 - RNA, 19 nt, Artificial Sequence
  Description of Artificial Sequence: Synthetic oligonucleotide
caguagcguaaccuguggg

SEQ ID NO: 304140 - RNA, 19 nt, Artificial Sequence
  Description of Artificial Sequence: Synthetic oligonucleotide
ucccauggauuguagguau

SEQ ID NO: 304141 - RNA, 19 nt, Artificial Sequence
  Description of Artificial Sequence: Synthetic oligonucleotide
auaccauaauggcugguuu

SEQ ID NO: 304142 - RNA, 19 nt, Artificial Sequence
  Description of Artificial Sequence: Synthetic oligonucleotide
ugaaggcggucuauuucca

SEQ ID NO: 304143 - RNA, 19 nt, Artificial Sequence
  Description of Artificial Sequence: Synthetic oligonucleotide
acuuacucuuuagaugcug

SEQ ID NO: 304144 - RNA, 19 nt, Artificial Sequence
  Description of Artificial Sequence: Synthetic oligonucleotide
uacugugccaauacaucuu

SEQ ID NO: 304145 - RNA, 19 nt, Artificial Sequence
  Description of Artificial Sequence: Synthetic oligonucleotide
uucggauagcucuccacau

SEQ ID NO: 304146 - RNA, 19 nt, Artificial Sequence
  Description of Artificial Sequence: Synthetic oligonucleotide
ugcaguucggauagcucuc

SEQ ID NO: 304147 - RNA, 19 nt, Artificial Sequence
  Description of Artificial Sequence: Synthetic oligonucleotide
auugacuggugguuccgga

SEQ ID NO: 304148 - RNA, 19 nt, Artificial Sequence
  Description of Artificial Sequence: Synthetic oligonucleotide
uuugugagaggguccugaa

SEQ ID NO: 304149 - RNA, 19 nt, Artificial Sequence
  Description of Artificial Sequence: Synthetic oligonucleotide
caauacaagccaaugcugu

SEQ ID NO: 304150 - RNA, 19 nt, Artificial Sequence
  Description of Artificial Sequence: Synthetic oligonucleotide
accauaauugccacucugu

SEQ ID NO: 304151 - RNA, 19 nt, Artificial Sequence
  Description of Artificial Sequence: Synthetic oligonucleotide
ugacugcaauacaagccaa

SEQ ID NO: 304152 - RNA, 19 nt, Artificial Sequence
  Description of Artificial Sequence: Synthetic oligonucleotide
augaucugccuccauguuu

SEQ ID NO: 304153 - RNA, 19 nt, Artificial Sequence
  Description of Artificial Sequence: Synthetic oligonucleotide
gauaaagauaguaguuacu

SEQ ID NO: 304154 - RNA, 19 nt, Artificial Sequence
  Description of Artificial Sequence: Synthetic oligonucleotide
agaacgagauguauuuggu

SEQ ID NO: 304155 - RNA, 19 nt, Artificial Sequence
  Description of Artificial Sequence: Synthetic oligonucleotide
gauugugacagggacugaa

SEQ ID NO: 304156 - RNA, 19 nt, Artificial Sequence
  Description of Artificial Sequence: Synthetic oligonucleotide
ugucacagacagccucugc

SEQ ID NO: 304157 - RNA, 19 nt, Artificial Sequence
  Description of Artificial Sequence: Synthetic oligonucleotide
auauagcuacaacuuuaaa

SEQ ID NO: 304158 - RNA, 19 nt, Artificial Sequence
  Description of Artificial Sequence: Synthetic oligonucleotide
cuuugaucuuaugauucuc

SEQ ID NO: 304159 - RNA, 19 nt, Artificial Sequence
  Description of Artificial Sequence: Synthetic oligonucleotide
agaguaauaucuggccaca

SEQ ID NO: 304160 - RNA, 19 nt, Artificial Sequence
  Description of Artificial Sequence: Synthetic oligonucleotide
agauuggaauggcuaugca

SEQ ID NO: 304161 - RNA, 19 nt, Artificial Sequence
  Description of Artificial Sequence: Synthetic oligonucleotide
caucuuaacugcccggaca

SEQ ID NO: 304162 - RNA, 19 nt, Artificial Sequence
  Description of Artificial Sequence: Synthetic oligonucleotide
cauaguguuguaugaggaa

SEQ ID NO: 304163 - RNA, 19 nt, Artificial Sequence
  Description of Artificial Sequence: Synthetic oligonucleotide
uugugagaggguccugaaa

SEQ ID NO: 304164 - RNA, 19 nt, Artificial Sequence
  Description of Artificial Sequence: Synthetic oligonucleotide
gaguaauaucuggccacag

SEQ ID NO: 304165 - RNA, 19 nt, Artificial Sequence
  Description of Artificial Sequence: Synthetic oligonucleotide
uggugguuccggaaacuuc

SEQ ID NO: 304166 - RNA, 19 nt, Artificial Sequence
  Description of Artificial Sequence: Synthetic oligonucleotide
uacuaaugauguucaucau

SEQ ID NO: 304167 - RNA, 19 nt, Artificial Sequence
  Description of Artificial Sequence: Synthetic oligonucleotide
cuuaacugcccggacacca

SEQ ID NO: 304168 - RNA, 19 nt, Artificial Sequence
  Description of Artificial Sequence: Synthetic oligonucleotide
uuaacugcccggacaccau

SEQ ID NO: 304169 - RNA, 19 nt, Artificial Sequence
  Description of Artificial Sequence: Synthetic oligonucleotide
aguuacuaaugauguucau

SEQ ID NO: 304170 - RNA, 19 nt, Artificial Sequence
  Description of Artificial Sequence: Synthetic oligonucleotide
aucuuaugauucucugcau

SEQ ID NO: 304171 - RNA, 19 nt, Artificial Sequence
  Description of Artificial Sequence: Synthetic oligonucleotide
ggauacauagucacuguca

SEQ ID NO: 304172 - RNA, 19 nt, Artificial Sequence
  Description of Artificial Sequence: Synthetic oligonucleotide
cugaugguacauagccaac

SEQ ID NO: 304173 - RNA, 19 nt, Artificial Sequence
  Description of Artificial Sequence: Synthetic oligonucleotide
auaugcuauuucaaaggaa

SEQ ID NO: 304174 - RNA, 19 nt, Artificial Sequence
  Description of Artificial Sequence: Synthetic oligonucleotide
accccaauaggcugauggu

SEQ ID NO: 304175 - RNA, 19 nt, Artificial Sequence
  Description of Artificial Sequence: Synthetic oligonucleotide
uagcguaaccuguggguuc

SEQ ID NO: 304176 - RNA, 19 nt, Artificial Sequence
  Description of Artificial Sequence: Synthetic oligonucleotide
ggcauuauaacagcaacua

SEQ ID NO: 304177 - RNA, 19 nt, Artificial Sequence
  Description of Artificial Sequence: Synthetic oligonucleotide
aguguuguaugaggaaaau

SEQ ID NO: 304178 - RNA, 19 nt, Artificial Sequence
  Description of Artificial Sequence: Synthetic oligonucleotide
gacuuauuacuucuuucau

SEQ ID NO: 304179 - RNA, 19 nt, Artificial Sequence
  Description of Artificial Sequence: Synthetic oligonucleotide
ggcauugcaguaacgauga

SEQ ID NO: 304180 - RNA, 19 nt, Artificial Sequence
  Description of Artificial Sequence: Synthetic oligonucleotide
uggcaaaguaagguggcau

SEQ ID NO: 304181 - RNA, 19 nt, Artificial Sequence
  Description of Artificial Sequence: Synthetic oligonucleotide
ggacccaacagucccaaga

SEQ ID NO: 304182 - RNA, 19 nt, Artificial Sequence
  Description of Artificial Sequence: Synthetic oligonucleotide
aguugaguauaagcuuuga

SEQ ID NO: 304183 - RNA, 19 nt, Artificial Sequence
  Description of Artificial Sequence: Synthetic oligonucleotide
caguaacgaugauuccaag

SEQ ID NO: 304184 - RNA, 19 nt, Artificial Sequence
  Description of Artificial Sequence: Synthetic oligonucleotide
uugaaugaaugggguacuc

SEQ ID NO: 304185 - RNA, 19 nt, Artificial Sequence
  Description of Artificial Sequence: Synthetic oligonucleotide
gagggcaguaacccauaca

SEQ ID NO: 304186 - RNA, 19 nt, Artificial Sequence
  Description of Artificial Sequence: Synthetic oligonucleotide
aacuuacucuuuagaugcu

SEQ ID NO: 304187 - RNA, 19 nt, Artificial Sequence
  Description of Artificial Sequence: Synthetic oligonucleotide
gcaaaguaagguggcauug

SEQ ID NO: 304188 - RNA, 19 nt, Artificial Sequence
  Description of Artificial Sequence: Synthetic oligonucleotide
cagcauugagaauugcuua

SEQ ID NO: 304189 - RNA, 19 nt, Artificial Sequence
  Description of Artificial Sequence: Synthetic oligonucleotide
gaauaacugaugguacaua

SEQ ID NO: 304190 - RNA, 19 nt, Artificial Sequence
  Description of Artificial Sequence: Synthetic oligonucleotide
gaauggcuaugcaaaaggu

SEQ ID NO: 304191 - RNA, 19 nt, Artificial Sequence
  Description of Artificial Sequence: Synthetic oligonucleotide
acaccauaauugccacucu

SEQ ID NO: 304192 - RNA, 19 nt, Artificial Sequence
  Description of Artificial Sequence: Synthetic oligonucleotide
ucuuaacugcccggacacc

SEQ ID NO: 304193 - RNA, 19 nt, Artificial Sequence
  Description of Artificial Sequence: Synthetic oligonucleotide
ugguuccggaaacuucuua

SEQ ID NO: 304194 - RNA, 19 nt, Artificial Sequence
  Description of Artificial Sequence: Synthetic oligonucleotide
gcaacccaugaguggauag

SEQ ID NO: 304195 - RNA, 19 nt, Artificial Sequence
  Description of Artificial Sequence: Synthetic oligonucleotide
cugguagagaauaaaccau

SEQ ID NO: 304196 - RNA, 19 nt, Artificial Sequence
  Description of Artificial Sequence: Synthetic oligonucleotide
guugaguauaagcuuugau

SEQ ID NO: 304197 - RNA, 19 nt, Artificial Sequence
  Description of Artificial Sequence: Synthetic oligonucleotide
cauuacugguagagaauaa

SEQ ID NO: 304198 - RNA, 19 nt, Artificial Sequence
  Description of Artificial Sequence: Synthetic oligonucleotide
ugguugcuacuuucuuugu

SEQ ID NO: 304199 - RNA, 19 nt, Artificial Sequence
  Description of Artificial Sequence: Synthetic oligonucleotide
caaaucaagggcauuuguu

SEQ ID NO: 304200 - RNA, 19 nt, Artificial Sequence
  Description of Artificial Sequence: Synthetic oligonucleotide
gccaaacuuacucuuuaga

SEQ ID NO: 304201 - RNA, 19 nt, Artificial Sequence
  Description of Artificial Sequence: Synthetic oligonucleotide
gcugguuucuccucacaac

SEQ ID NO: 304202 - RNA, 19 nt, Artificial Sequence
  Description of Artificial Sequence: Synthetic oligonucleotide
uccauaccuguggauggcu

SEQ ID NO: 304203 - RNA, 19 nt, Artificial Sequence
  Description of Artificial Sequence: Synthetic oligonucleotide
ggauagauuggaauggcua

SEQ ID NO: 304204 - RNA, 19 nt, Artificial Sequence
  Description of Artificial Sequence: Synthetic oligonucleotide
auggcaaaguaagguggca

SEQ ID NO: 304205 - RNA, 19 nt, Artificial Sequence
  Description of Artificial Sequence: Synthetic oligonucleotide
  modified_base (8)..(8): a, c, u, g, unknown or other
auggggancagcggauaca

SEQ ID NO: 304206 - RNA, 19 nt, Artificial Sequence
  Description of Artificial Sequence: Synthetic oligonucleotide
aucccauggauuguaggua

SEQ ID NO: 304207 - RNA, 19 nt, Artificial Sequence
  Description of Artificial Sequence: Synthetic oligonucleotide
gaacgagauguauuugguu

SEQ ID NO: 304208 - RNA, 19 nt, Artificial Sequence
  Description of Artificial Sequence: Synthetic oligonucleotide
gcauuauaacagcaacuaa

SEQ ID NO: 304209 - RNA, 19 nt, Artificial Sequence
  Description of Artificial Sequence: Synthetic oligonucleotide
ccaguagcguaaccugugg

SEQ ID NO: 304210 - RNA, 19 nt, Artificial Sequence
  Description of Artificial Sequence: Synthetic oligonucleotide
aacugcccggacaccauaa

SEQ ID NO: 304211 - RNA, 19 nt, Artificial Sequence
  Description of Artificial Sequence: Synthetic oligonucleotide
gcccggacaccauaauugc

SEQ ID NO: 304212 - RNA, 19 nt, Artificial Sequence
  Description of Artificial Sequence: Synthetic oligonucleotide
ccggacaccauaauugcca

SEQ ID NO: 304213 - RNA, 19 nt, Artificial Sequence
  Description of Artificial Sequence: Synthetic oligonucleotide
aguaacccauacacuuacu

SEQ ID NO: 304214 - RNA, 19 nt, Artificial Sequence
  Description of Artificial Sequence: Synthetic oligonucleotide
ggcggcuugcauuugggaa

SEQ ID NO: 304215 - RNA, 19 nt, Artificial Sequence
  Description of Artificial Sequence: Synthetic oligonucleotide
gcauuuguuauucgacuua

SEQ ID NO: 304216 - RNA, 19 nt, Artificial Sequence
  Description of Artificial Sequence: Synthetic oligonucleotide
guccauaccuguggauggc

SEQ ID NO: 304217 - RNA, 19 nt, Artificial Sequence
  Description of Artificial Sequence: Synthetic oligonucleotide
cauugagaauugcuuacau

SEQ ID NO: 304218 - RNA, 19 nt, Artificial Sequence
  Description of Artificial Sequence: Synthetic oligonucleotide
gcaguaacgaugauuccaa

SEQ ID NO: 304219 - RNA, 19 nt, Artificial Sequence
  Description of Artificial Sequence: Synthetic oligonucleotide
agcuuaucccauggauugu

SEQ ID NO: 304220 - RNA, 19 nt, Artificial Sequence
  Description of Artificial Sequence: Synthetic oligonucleotide
cauuuguuauucgacuuau

SEQ ID NO: 304221 - RNA, 19 nt, Artificial Sequence
  Description of Artificial Sequence: Synthetic oligonucleotide
acugcccggacaccauaau

SEQ ID NO: 304222 - RNA, 19 nt, Artificial Sequence
  Description of Artificial Sequence: Synthetic oligonucleotide
ggugguuccggaaacuucu

SEQ ID NO: 304223 - RNA, 19 nt, Artificial Sequence
  Description of Artificial Sequence: Synthetic oligonucleotide
guggcauugcaguaacgau

SEQ ID NO: 304224 - RNA, 19 nt, Artificial Sequence
  Description of Artificial Sequence: Synthetic oligonucleotide
ccacauuuaaagcugcacu

SEQ ID NO: 304225 - RNA, 19 nt, Artificial Sequence
  Description of Artificial Sequence: Synthetic oligonucleotide
gcaaauugcauaccauaau

SEQ ID NO: 304226 - RNA, 19 nt, Artificial Sequence
  Description of Artificial Sequence: Synthetic oligonucleotide
cuugaaugaaugggguacu

SEQ ID NO: 304227 - RNA, 19 nt, Artificial Sequence
  Description of Artificial Sequence: Synthetic oligonucleotide
cugaaaguuuaaguugagu

SEQ ID NO: 304228 - RNA, 19 nt, Artificial Sequence
  Description of Artificial Sequence: Synthetic oligonucleotide
gcauugagaauugcuuaca

SEQ ID NO: 304229 - RNA, 19 nt, Artificial Sequence
  Description of Artificial Sequence: Synthetic oligonucleotide
ccaacagucccaagaucuc

SEQ ID NO: 304230 - RNA, 19 nt, Artificial Sequence
  Description of Artificial Sequence: Synthetic oligonucleotide
cuuugaaggcggucuauuu

SEQ ID NO: 304231 - RNA, 19 nt, Artificial Sequence
  Description of Artificial Sequence: Synthetic oligonucleotide
gcuuucgcuugaucccugc

SEQ ID NO: 304232 - RNA, 19 nt, Artificial Sequence
  Description of Artificial Sequence: Synthetic oligonucleotide
cccggacaccauaauugcc

SEQ ID NO: 304233 - RNA, 19 nt, Artificial Sequence
  Description of Artificial Sequence: Synthetic oligonucleotide
cagcaacuaaaagcuuauc

SEQ ID NO: 304234 - RNA, 19 nt, Artificial Sequence
  Description of Artificial Sequence: Synthetic oligonucleotide
gagauguauuugguugcua

SEQ ID NO: 304235 - RNA, 19 nt, Artificial Sequence
  Description of Artificial Sequence: Synthetic oligonucleotide
cauugcaguaacgaugauu

SEQ ID NO: 304236 - RNA, 19 nt, Artificial Sequence
  Description of Artificial Sequence: Synthetic oligonucleotide
ugaucccugcagguaguuu

SEQ ID NO: 304237 - RNA, 19 nt, Artificial Sequence
  Description of Artificial Sequence: Synthetic oligonucleotide
cauaccauaauggcugguu

SEQ ID NO: 304238 - RNA, 19 nt, Artificial Sequence
  Description of Artificial Sequence: Synthetic oligonucleotide
  modified_base (10)..(10): a, c, u, g, unknown or other
cuauggggancagcggaua

SEQ ID NO: 304239 - RNA, 19 nt, Artificial Sequence
  Description of Artificial Sequence: Synthetic oligonucleotide
augggguacuccagaucug

SEQ ID NO: 304240 - RNA, 19 nt, Artificial Sequence
  Description of Artificial Sequence: Synthetic oligonucleotide
guagcguaaccuguggguu

SEQ ID NO: 304241 - RNA, 19 nt, Artificial Sequence
  Description of Artificial Sequence: Synthetic oligonucleotide
agccuuugccaaacuuacu

SEQ ID NO: 304242 - RNA, 19 nt, Artificial Sequence
  Description of Artificial Sequence: Synthetic oligonucleotide
ccauaccuguggauggcuc

SEQ ID NO: 304243 - RNA, 19 nt, Artificial Sequence
  Description of Artificial Sequence: Synthetic oligonucleotide
gacugcaauacaagccaau

SEQ ID NO: 304244 - RNA, 19 nt, Artificial Sequence
  Description of Artificial Sequence: Synthetic oligonucleotide
agcuuucgcuugaucccug

SEQ ID NO: 304245 - RNA, 19 nt, Artificial Sequence
  Description of Artificial Sequence: Synthetic oligonucleotide
gcagcauugagaauugcuu

SEQ ID NO: 304246 - RNA, 19 nt, Artificial Sequence
  Description of Artificial Sequence: Synthetic oligonucleotide
caacagucccaagaucucu

SEQ ID NO: 304247 - RNA, 19 nt, Artificial Sequence
  Description of Artificial Sequence: Synthetic oligonucleotide
cuacucuaucuuccugugu

SEQ ID NO: 304248 - RNA, 19 nt, Artificial Sequence
  Description of Artificial Sequence: Synthetic oligonucleotide
  modified_base (4)..(4): a, c, u, g, unknown or other
ggancagcggauacauagu

SEQ ID NO: 304249 - RNA, 19 nt, Artificial Sequence
  Description of Artificial Sequence: Synthetic oligonucleotide
cuuaaugaucugccuccau

SEQ ID NO: 304250 - RNA, 19 nt, Artificial Sequence
  Description of Artificial Sequence: Synthetic oligonucleotide
ggucuauuuccagguuuuc

SEQ ID NO: 304251 - RNA, 19 nt, Artificial Sequence
  Description of Artificial Sequence: Synthetic oligonucleotide
gcuuaucccauggauugua

SEQ ID NO: 304252 - RNA, 19 nt, Artificial Sequence
  Description of Artificial Sequence: Synthetic oligonucleotide
gguugcuacuuucuuuguu

SEQ ID NO: 304253 - RNA, 19 nt, Artificial Sequence
  Description of Artificial Sequence: Synthetic oligonucleotide
ccaauaggcugaugguaaa

SEQ ID NO: 304254 - RNA, 19 nt, Artificial Sequence
  Description of Artificial Sequence: Synthetic oligonucleotide
cccauggauuguagguauc

SEQ ID NO: 304255 - RNA, 19 nt, Artificial Sequence
  Description of Artificial Sequence: Synthetic oligonucleotide
cagcggauacauagucacu

SEQ ID NO: 304256 - RNA, 19 nt, Artificial Sequence
  Description of Artificial Sequence: Synthetic oligonucleotide
cagcuuucgcuugaucccu

SEQ ID NO: 304257 - RNA, 19 nt, Artificial Sequence
  Description of Artificial Sequence: Synthetic oligonucleotide
ccucacaacacuggcagcu

SEQ ID NO: 304258 - RNA, 19 nt, Artificial Sequence
  Description of Artificial Sequence: Synthetic oligonucleotide
gcggucuauuuccagguuu

SEQ ID NO: 304259 - RNA, 19 nt, Artificial Sequence
  Description of Artificial Sequence: Synthetic oligonucleotide
gcuaugcaaaagguguaau

SEQ ID NO: 304260 - RNA, 19 nt, Artificial Sequence
  Description of Artificial Sequence: Synthetic oligonucleotide
gguuugucugagggcagua

SEQ ID NO: 304261 - RNA, 19 nt, Artificial Sequence
  Description of Artificial Sequence: Synthetic oligonucleotide
cugcccggacaccauaauu

SEQ ID NO: 304262 - RNA, 19 nt, Artificial Sequence
  Description of Artificial Sequence: Synthetic oligonucleotide
ccauggauuguagguaucu

SEQ ID NO: 304263 - RNA, 19 nt, Artificial Sequence
  Description of Artificial Sequence: Synthetic oligonucleotide
cuggugguuccggaaacuu

SEQ ID NO: 304264 - RNA, 19 nt, Artificial Sequence
  Description of Artificial Sequence: Synthetic oligonucleotide
ccccaauaggcugauggua

SEQ ID NO: 304265 - RNA, 19 nt, Artificial Sequence
  Description of Artificial Sequence: Synthetic oligonucleotide
ggauugugacagggacuga

SEQ ID NO: 304266 - RNA, 19 nt, Artificial Sequence
  Description of Artificial Sequence: Synthetic oligonucleotide
cccugguauuuaaaauuuu

SEQ ID NO: 304267 - RNA, 19 nt, Artificial Sequence
  Description of Artificial Sequence: Synthetic oligonucleotide
gcauaccauaauggcuggu

SEQ ID NO: 304268 - RNA, 19 nt, Artificial Sequence
  Description of Artificial Sequence: Synthetic oligonucleotide
ggcggucuauuuccagguu

SEQ ID NO: 304269 - RNA, 19 nt, Artificial Sequence
  Description of Artificial Sequence: Synthetic oligonucleotide
gcguaaccuguggguuccc

SEQ ID NO: 304270 - RNA, 19 nt, Artificial Sequence
  Description of Artificial Sequence: Synthetic oligonucleotide
cggucuauuuccagguuuu

SEQ ID NO: 304271 - RNA, 19 nt, Artificial Sequence
  Description of Artificial Sequence: Synthetic oligonucleotide
  modified_base (6)..(6): a, c, u, g, unknown or other
ggggancagcggauacaua

SEQ ID NO: 304272 - RNA, 19 nt, Artificial Sequence
  Description of Artificial Sequence: Synthetic oligonucleotide
ccauuauguucuggugugu

SEQ ID NO: 304273 - RNA, 19 nt, Artificial Sequence
  Description of Artificial Sequence: Synthetic oligonucleotide
  modified_base (1)..(1): a, c, u, g, unknown or other
ncagcggauacauagucac

SEQ ID NO: 304274 - RNA, 19 nt, Artificial Sequence
  Description of Artificial Sequence: Synthetic oligonucleotide
aauaggcucagucauguac

SEQ ID NO: 304275 - RNA, 19 nt, Artificial Sequence
  Description of Artificial Sequence: Synthetic oligonucleotide
ugaaggaugacuuugguac

SEQ ID NO: 304276 - RNA, 19 nt, Artificial Sequence
  Description of Artificial Sequence: Synthetic oligonucleotide
aguauuuaugaucaaggac

SEQ ID NO: 304277 - RNA, 19 nt, Artificial Sequence
  Description of Artificial Sequence: Synthetic oligonucleotide
uuacggauaacuuucagga

SEQ ID NO: 304278 - RNA, 19 nt, Artificial Sequence
  Description of Artificial Sequence: Synthetic oligonucleotide
ucuuauucaacucuuccug

SEQ ID NO: 304279 - RNA, 19 nt, Artificial Sequence
  Description of Artificial Sequence: Synthetic oligonucleotide
gauaaagagauccucuagc

SEQ ID NO: 304280 - RNA, 19 nt, Artificial Sequence
  Description of Artificial Sequence: Synthetic oligonucleotide
accacaauacacaauaccc

SEQ ID NO: 304281 - RNA, 19 nt, Artificial Sequence
  Description of Artificial Sequence: Synthetic oligonucleotide
gaagacacuagccuauugg

SEQ ID NO: 304282 - RNA, 19 nt, Artificial Sequence
  Description of Artificial Sequence: Synthetic oligonucleotide
agucuuauucaacucuucc

SEQ ID NO: 304283 - RNA, 19 nt, Artificial Sequence
  Description of Artificial Sequence: Synthetic oligonucleotide
guauuuaugaucaaggaca

SEQ ID NO: 304284 - RNA, 19 nt, Artificial Sequence
  Description of Artificial Sequence: Synthetic oligonucleotide
agggaaacuauacagagga

SEQ ID NO: 304285 - RNA, 19 nt, Artificial Sequence
  Description of Artificial Sequence: Synthetic oligonucleotide
aacccugcuauucuguggg

SEQ ID NO: 304286 - RNA, 19 nt, Artificial Sequence
  Description of Artificial Sequence: Synthetic oligonucleotide
ucagggaaacuauacagag

SEQ ID NO: 304287 - RNA, 19 nt, Artificial Sequence
  Description of Artificial Sequence: Synthetic oligonucleotide
aaguauuuaugaucaagga

SEQ ID NO: 304288 - RNA, 19 nt, Artificial Sequence
  Description of Artificial Sequence: Synthetic oligonucleotide
aggguugaucucuaggugc

SEQ ID NO: 304289 - RNA, 19 nt, Artificial Sequence
  Description of Artificial Sequence: Synthetic oligonucleotide
uacacaauacccaacccug

SEQ ID NO: 304290 - RNA, 19 nt, Artificial Sequence
  Description of Artificial Sequence: Synthetic oligonucleotide
uccuuagucacugagacca

SEQ ID NO: 304291 - RNA, 19 nt, Artificial Sequence
  Description of Artificial Sequence: Synthetic oligonucleotide
acggauaaaguugagguac

SEQ ID NO: 304292 - RNA, 19 nt, Artificial Sequence
  Description of Artificial Sequence: Synthetic oligonucleotide
uuggucaugccaaugcccg

SEQ ID NO: 304293 - RNA, 19 nt, Artificial Sequence
  Description of Artificial Sequence: Synthetic oligonucleotide
uccaugaaagccuuugugc

SEQ ID NO: 304294 - RNA, 19 nt, Artificial Sequence
  Description of Artificial Sequence: Synthetic oligonucleotide
acugagaccagacucuuuc

SEQ ID NO: 304295 - RNA, 19 nt, Artificial Sequence
  Description of Artificial Sequence: Synthetic oligonucleotide
uucucgaaggaaaaucucc

SEQ ID NO: 304296 - RNA, 19 nt, Artificial Sequence
  Description of Artificial Sequence: Synthetic oligonucleotide
guagaguugucucugagug

SEQ ID NO: 304297 - RNA, 19 nt, Artificial Sequence
  Description of Artificial Sequence: Synthetic oligonucleotide
guagaaaguauuuaugauc

SEQ ID NO: 304298 - RNA, 19 nt, Artificial Sequence
  Description of Artificial Sequence: Synthetic oligonucleotide
agagguaugauagcgcagc

SEQ ID NO: 304299 - RNA, 19 nt, Artificial Sequence
  Description of Artificial Sequence: Synthetic oligonucleotide
gacacauauucugacaggg

SEQ ID NO: 304300 - RNA, 19 nt, Artificial Sequence
  Description of Artificial Sequence: Synthetic oligonucleotide
gauaaaguugagguacucg

SEQ ID NO: 304301 - RNA, 19 nt, Artificial Sequence
  Description of Artificial Sequence: Synthetic oligonucleotide
uccucuagcuugaacagag

SEQ ID NO: 304302 - RNA, 19 nt, Artificial Sequence
  Description of Artificial Sequence: Synthetic oligonucleotide
aaggacaggauaaagagau

SEQ ID NO: 304303 - RNA, 19 nt, Artificial Sequence
  Description of Artificial Sequence: Synthetic oligonucleotide
caucuugacaggaaagccg

SEQ ID NO: 304304 - RNA, 19 nt, Artificial Sequence
  Description of Artificial Sequence: Synthetic oligonucleotide
aaggaugacuuugguaccc

SEQ ID NO: 304305 - RNA, 19 nt, Artificial Sequence
  Description of Artificial Sequence: Synthetic oligonucleotide
ucaugcgggacacauauuc

SEQ ID NO: 304306 - RNA, 19 nt, Artificial Sequence
  Description of Artificial Sequence: Synthetic oligonucleotide
guagguuggggccagcugg

SEQ ID NO: 304307 - RNA, 19 nt, Artificial Sequence
  Description of Artificial Sequence: Synthetic oligonucleotide
ugagagguaugauagcgca

SEQ ID NO: 304308 - RNA, 19 nt, Artificial Sequence
  Description of Artificial Sequence: Synthetic oligonucleotide
aaagccgaguaguaguaca

SEQ ID NO: 304309 - RNA, 19 nt, Artificial Sequence
  Description of Artificial Sequence: Synthetic oligonucleotide
ucaaccuucuuauccaaga

SEQ ID NO: 304310 - RNA, 19 nt, Artificial Sequence
  Description of Artificial Sequence: Synthetic oligonucleotide
auacacaauacccaacccu

SEQ ID NO: 304311 - RNA, 19 nt, Artificial Sequence
  Description of Artificial Sequence: Synthetic oligonucleotide
uggauuccaagcuuuaagu

SEQ ID NO: 304312 - RNA, 19 nt, Artificial Sequence
  Description of Artificial Sequence: Synthetic oligonucleotide
uguuggagcauuucucgag

SEQ ID NO: 304313 - RNA, 19 nt, Artificial Sequence
  Description of Artificial Sequence: Synthetic oligonucleotide
uuuuacggauaacuuucag

SEQ ID NO: 304314 - RNA, 19 nt, Artificial Sequence
  Description of Artificial Sequence: Synthetic oligonucleotide
auagccuaugaacugcgag

SEQ ID NO: 304315 - RNA, 19 nt, Artificial Sequence
  Description of Artificial Sequence: Synthetic oligonucleotide
aauuuugccuugcucuccu

SEQ ID NO: 304316 - RNA, 19 nt, Artificial Sequence
  Description of Artificial Sequence: Synthetic oligonucleotide
cuucuuauccaagaucucc

SEQ ID NO: 304317 - RNA, 19 nt, Artificial Sequence
  Description of Artificial Sequence: Synthetic oligonucleotide
ugcccaaucauggauaugu

SEQ ID NO: 304318 - RNA, 19 nt, Artificial Sequence
  Description of Artificial Sequence: Synthetic oligonucleotide
agccauaggugcuugucac

SEQ ID NO: 304319 - RNA, 19 nt, Artificial Sequence
  Description of Artificial Sequence: Synthetic oligonucleotide
uagcgaaucuuguccaagg

SEQ ID NO: 304320 - RNA, 19 nt, Artificial Sequence
  Description of Artificial Sequence: Synthetic oligonucleotide
uguccaauuuggaaggguc

SEQ ID NO: 304321 - RNA, 19 nt, Artificial Sequence
  Description of Artificial Sequence: Synthetic oligonucleotide
cuaaucuacuucuuccaug

SEQ ID NO: 304322 - RNA, 19 nt, Artificial Sequence
  Description of Artificial Sequence: Synthetic oligonucleotide
uuggagaucaauucucgaa

SEQ ID NO: 304323 - RNA, 19 nt, Artificial Sequence
  Description of Artificial Sequence: Synthetic oligonucleotide
cuuuccugccuuaaggcac

SEQ ID NO: 304324 - RNA, 19 nt, Artificial Sequence
  Description of Artificial Sequence: Synthetic oligonucleotide
ugaucccacaucuucaauc

SEQ ID NO: 304325 - RNA, 19 nt, Artificial Sequence
  Description of Artificial Sequence: Synthetic oligonucleotide
ucauagcgaaucuugucca

SEQ ID NO: 304326 - RNA, 19 nt, Artificial Sequence
  Description of Artificial Sequence: Synthetic oligonucleotide
cugcucgucaucauugugc

SEQ ID NO: 304327 - RNA, 19 nt, Artificial Sequence
  Description of Artificial Sequence: Synthetic oligonucleotide
uuagucuuauucaacucuu

SEQ ID NO: 304328 - RNA, 19 nt, Artificial Sequence
  Description of Artificial Sequence: Synthetic oligonucleotide
aaacugcccaaucauggau

SEQ ID NO: 304329 - RNA, 19 nt, Artificial Sequence
  Description of Artificial Sequence: Synthetic oligonucleotide
cuuggagaaggccucguag

SEQ ID NO: 304330 - RNA, 19 nt, Artificial Sequence
  Description of Artificial Sequence: Synthetic oligonucleotide
ucaauaggcucagucaugu

SEQ ID NO: 304331 - RNA, 19 nt, Artificial Sequence
  Description of Artificial Sequence: Synthetic oligonucleotide
cacgccacggauaaaguug

SEQ ID NO: 304332 - RNA, 19 nt, Artificial Sequence
  Description of Artificial Sequence: Synthetic oligonucleotide
ucuaaucuacuucuuccau

SEQ ID NO: 304333 - RNA, 19 nt, Artificial Sequence
  Description of Artificial Sequence: Synthetic oligonucleotide
agagcagucucaaacagca

SEQ ID NO: 304334 - RNA, 19 nt, Artificial Sequence
  Description of Artificial Sequence: Synthetic oligonucleotide
ucagcgugcgcuccugagg

SEQ ID NO: 304335 - RNA, 19 nt, Artificial Sequence
  Description of Artificial Sequence: Synthetic oligonucleotide
ugagaaaccagaggagagc

SEQ ID NO: 304336 - RNA, 19 nt, Artificial Sequence
  Description of Artificial Sequence: Synthetic oligonucleotide
uagccuaugaacugcgagu

SEQ ID NO: 304337 - RNA, 19 nt, Artificial Sequence
  Description of Artificial Sequence: Synthetic oligonucleotide
aaauagagggugaugggau

SEQ ID NO: 304338 - RNA, 19 nt, Artificial Sequence
  Description of Artificial Sequence: Synthetic oligonucleotide
acgacggacguacaguuug

SEQ ID NO: 304339 - RNA, 19 nt, Artificial Sequence
  Description of Artificial Sequence: Synthetic oligonucleotide
uuccaacugacccucuaca

SEQ ID NO: 304340 - RNA, 19 nt, Artificial Sequence
  Description of Artificial Sequence: Synthetic oligonucleotide
agcauuucucgagagaugu

SEQ ID NO: 304341 - RNA, 19 nt, Artificial Sequence
  Description of Artificial Sequence: Synthetic oligonucleotide
caggggaucucuaaucuac

SEQ ID NO: 304342 - RNA, 19 nt, Artificial Sequence
  Description of Artificial Sequence: Synthetic oligonucleotide
ggacuuuccugccuuaagg

SEQ ID NO: 304343 - RNA, 19 nt, Artificial Sequence
  Description of Artificial Sequence: Synthetic oligonucleotide
cuuuggucaugccaaugcc

SEQ ID NO: 304344 - RNA, 19 nt, Artificial Sequence
  Description of Artificial Sequence: Synthetic oligonucleotide
gaacacacgacggacguac

SEQ ID NO: 304345 - RNA, 19 nt, Artificial Sequence
  Description of Artificial Sequence: Synthetic oligonucleotide
aaagccucgcuuccgcaca

SEQ ID NO: 304346 - RNA, 19 nt, Artificial Sequence
  Description of Artificial Sequence: Synthetic oligonucleotide
ucagucauguacaccacuu

SEQ ID NO: 304347 - RNA, 19 nt, Artificial Sequence
  Description of Artificial Sequence: Synthetic oligonucleotide
uugacugccaagugguccu

SEQ ID NO: 304348 - RNA, 19 nt, Artificial Sequence
  Description of Artificial Sequence: Synthetic oligonucleotide
uuauucaacucuuccugau

SEQ ID NO: 304349 - RNA, 19 nt, Artificial Sequence
  Description of Artificial Sequence: Synthetic oligonucleotide
ccugccuuaaggcacaagg

SEQ ID NO: 304350 - RNA, 19 nt, Artificial Sequence
  Description of Artificial Sequence: Synthetic oligonucleotide
ugaagacacuagccuauug

SEQ ID NO: 304351 - RNA, 19 nt, Artificial Sequence
  Description of Artificial Sequence: Synthetic oligonucleotide
agcgcgaccgacucgcacg

SEQ ID NO: 304352 - RNA, 19 nt, Artificial Sequence
  Description of Artificial Sequence: Synthetic oligonucleotide
cagggaaacuauacagagg

SEQ ID NO: 304353 - RNA, 19 nt, Artificial Sequence
  Description of Artificial Sequence: Synthetic oligonucleotide
ucaaagggagcucgccgag

SEQ ID NO: 304354 - RNA, 19 nt, Artificial Sequence
  Description of Artificial Sequence: Synthetic oligonucleotide
cacgagauaggcagaguag

SEQ ID NO: 304355 - RNA, 19 nt, Artificial Sequence
  Description of Artificial Sequence: Synthetic oligonucleotide
augauagcgcagcagcuca

SEQ ID NO: 304356 - RNA, 19 nt, Artificial Sequence
  Description of Artificial Sequence: Synthetic oligonucleotide
ugcgaguguuucuucacca

SEQ ID NO: 304357 - RNA, 19 nt, Artificial Sequence
  Description of Artificial Sequence: Synthetic oligonucleotide
auguaauagauggacuucu

SEQ ID NO: 304358 - RNA, 19 nt, Artificial Sequence
  Description of Artificial Sequence: Synthetic oligonucleotide
uccaauuuggaagggucug

SEQ ID NO: 304359 - RNA, 19 nt, Artificial Sequence
  Description of Artificial Sequence: Synthetic oligonucleotide
ccaugaugaacacacgacg

SEQ ID NO: 304360 - RNA, 19 nt, Artificial Sequence
  Description of Artificial Sequence: Synthetic oligonucleotide
caugagcuugcagagauuc

SEQ ID NO: 304361 - RNA, 19 nt, Artificial Sequence
  Description of Artificial Sequence: Synthetic oligonucleotide
ucguagaauuucuuauagu

SEQ ID NO: 304362 - RNA, 19 nt, Artificial Sequence
  Description of Artificial Sequence: Synthetic oligonucleotide
acauauucugacagggaag

SEQ ID NO: 304363 - RNA, 19 nt, Artificial Sequence
  Description of Artificial Sequence: Synthetic oligonucleotide
gacguacaguuugauauug

SEQ ID NO: 304364 - RNA, 19 nt, Artificial Sequence
  Description of Artificial Sequence: Synthetic oligonucleotide
uuuccugccuuaaggcaca

SEQ ID NO: 304365 - RNA, 19 nt, Artificial Sequence
  Description of Artificial Sequence: Synthetic oligonucleotide
acgcaguacucaucaauag

SEQ ID NO: 304366 - RNA, 19 nt, Artificial Sequence
  Description of Artificial Sequence: Synthetic oligonucleotide
ccaugaaagccuuugugcc

SEQ ID NO: 304367 - RNA, 19 nt, Artificial Sequence
  Description of Artificial Sequence: Synthetic oligonucleotide
uuugguaccccggccaaug

SEQ ID NO: 304368 - RNA, 19 nt, Artificial Sequence
  Description of Artificial Sequence: Synthetic oligonucleotide
auccgcuccauguuggcug

SEQ ID NO: 304369 - RNA, 19 nt, Artificial Sequence
  Description of Artificial Sequence: Synthetic oligonucleotide
cucgagagauguucagggg

SEQ ID NO: 304370 - RNA, 19 nt, Artificial Sequence
  Description of Artificial Sequence: Synthetic oligonucleotide
ugguaccccggccaauggg

SEQ ID NO: 304371 - RNA, 19 nt, Artificial Sequence
  Description of Artificial Sequence: Synthetic oligonucleotide
gacgccgacgguuagugga

SEQ ID NO: 304372 - RNA, 19 nt, Artificial Sequence
  Description of Artificial Sequence: Synthetic oligonucleotide
gaguaguaguacagggccg

SEQ ID NO: 304373 - RNA, 19 nt, Artificial Sequence
  Description of Artificial Sequence: Synthetic oligonucleotide
uagcccaugguagaguugu

SEQ ID NO: 304374 - RNA, 19 nt, Artificial Sequence
  Description of Artificial Sequence: Synthetic oligonucleotide
ugaggcucuuauagaauuc

SEQ ID NO: 304375 - RNA, 19 nt, Artificial Sequence
  Description of Artificial Sequence: Synthetic oligonucleotide
ugacuuugguaccccggcc

SEQ ID NO: 304376 - RNA, 19 nt, Artificial Sequence
  Description of Artificial Sequence: Synthetic oligonucleotide
aagccgaguaguaguacag

SEQ ID NO: 304377 - RNA, 19 nt, Artificial Sequence
  Description of Artificial Sequence: Synthetic oligonucleotide
guaguacagggccgggugg

SEQ ID NO: 304378 - RNA, 19 nt, Artificial Sequence
  Description of Artificial Sequence: Synthetic oligonucleotide
auucucgaaggaaaaucuc

SEQ ID NO: 304379 - RNA, 19 nt, Artificial Sequence
  Description of Artificial Sequence: Synthetic oligonucleotide
uaguuugaucaugcgguag

SEQ ID NO: 304380 - RNA, 19 nt, Artificial Sequence
  Description of Artificial Sequence: Synthetic oligonucleotide
agaucaauucucgaaggaa

SEQ ID NO: 304381 - RNA, 19 nt, Artificial Sequence
  Description of Artificial Sequence: Synthetic oligonucleotide
cucagggaaacuauacaga

SEQ ID NO: 304382 - RNA, 19 nt, Artificial Sequence
  Description of Artificial Sequence: Synthetic oligonucleotide
ucggggaucagcucaucac

SEQ ID NO: 304383 - RNA, 19 nt, Artificial Sequence
  Description of Artificial Sequence: Synthetic oligonucleotide
ugaacugcgaguguuucuu

SEQ ID NO: 304384 - RNA, 19 nt, Artificial Sequence
  Description of Artificial Sequence: Synthetic oligonucleotide
cuaaguacucugucugguc

SEQ ID NO: 304385 - RNA, 19 nt, Artificial Sequence
  Description of Artificial Sequence: Synthetic oligonucleotide
ucaucgauacccaggccua

SEQ ID NO: 304386 - RNA, 19 nt, Artificial Sequence
  Description of Artificial Sequence: Synthetic oligonucleotide
agccuaugaacugcgagug

SEQ ID NO: 304387 - RNA, 19 nt, Artificial Sequence
  Description of Artificial Sequence: Synthetic oligonucleotide
ggucaaagggagcucgccg

SEQ ID NO: 304388 - RNA, 19 nt, Artificial Sequence
  Description of Artificial Sequence: Synthetic oligonucleotide
gcuuuggucaugccaaugc

SEQ ID NO: 304389 - RNA, 19 nt, Artificial Sequence
  Description of Artificial Sequence: Synthetic oligonucleotide
auaggcucagucauguaca

SEQ ID NO: 304390 - RNA, 19 nt, Artificial Sequence
  Description of Artificial Sequence: Synthetic oligonucleotide
ucgccgaggaaugaagagc

SEQ ID NO: 304391 - RNA, 19 nt, Artificial Sequence
  Description of Artificial Sequence: Synthetic oligonucleotide
uccucccaaucauugguga

SEQ ID NO: 304392 - RNA, 19 nt, Artificial Sequence
  Description of Artificial Sequence: Synthetic oligonucleotide
augaaggaugacuuuggua

SEQ ID NO: 304393 - RNA, 19 nt, Artificial Sequence
  Description of Artificial Sequence: Synthetic oligonucleotide
auagcgcagcagcucagag

SEQ ID NO: 304394 - RNA, 19 nt, Artificial Sequence
  Description of Artificial Sequence: Synthetic oligonucleotide
auagcgaaucuuguccaag

SEQ ID NO: 304395 - RNA, 19 nt, Artificial Sequence
  Description of Artificial Sequence: Synthetic oligonucleotide
gccgaguaguaguacaggg

SEQ ID NO: 304396 - RNA, 19 nt, Artificial Sequence
  Description of Artificial Sequence: Synthetic oligonucleotide
acacuagccuauuggagau

SEQ ID NO: 304397 - RNA, 19 nt, Artificial Sequence
  Description of Artificial Sequence: Synthetic oligonucleotide
uccuugacccuccucuccu

SEQ ID NO: 304398 - RNA, 19 nt, Artificial Sequence
  Description of Artificial Sequence: Synthetic oligonucleotide
uagucuuauucaacucuuc

SEQ ID NO: 304399 - RNA, 19 nt, Artificial Sequence
  Description of Artificial Sequence: Synthetic oligonucleotide
uacccaacccugcuauucu

SEQ ID NO: 304400 - RNA, 19 nt, Artificial Sequence
  Description of Artificial Sequence: Synthetic oligonucleotide
aagccucgcuuccgcacac

SEQ ID NO: 304401 - RNA, 19 nt, Artificial Sequence
  Description of Artificial Sequence: Synthetic oligonucleotide
acgagauaggcagaguaga

SEQ ID NO: 304402 - RNA, 19 nt, Artificial Sequence
  Description of Artificial Sequence: Synthetic oligonucleotide
cauggauaugucugcacca

SEQ ID NO: 304403 - RNA, 19 nt, Artificial Sequence
  Description of Artificial Sequence: Synthetic oligonucleotide
cucgccgaggaaugaagag

SEQ ID NO: 304404 - RNA, 19 nt, Artificial Sequence
  Description of Artificial Sequence: Synthetic oligonucleotide
cauggugcaccuccucagg

SEQ ID NO: 304405 - RNA, 19 nt, Artificial Sequence
  Description of Artificial Sequence: Synthetic oligonucleotide
uagccuauuggagaugguc

SEQ ID NO: 304406 - RNA, 19 nt, Artificial Sequence
  Description of Artificial Sequence: Synthetic oligonucleotide
agacacuagccuauuggag

SEQ ID NO: 304407 - RNA, 19 nt, Artificial Sequence
  Description of Artificial Sequence: Synthetic oligonucleotide
cgaguaguaguacagggcc

SEQ ID NO: 304408 - RNA, 19 nt, Artificial Sequence
  Description of Artificial Sequence: Synthetic oligonucleotide
cugagaccagacucuuucc

SEQ ID NO: 304409 - RNA, 19 nt, Artificial Sequence
  Description of Artificial Sequence: Synthetic oligonucleotide
guuggagcauuucucgaga

SEQ ID NO: 304410 - RNA, 19 nt, Artificial Sequence
  Description of Artificial Sequence: Synthetic oligonucleotide
guacucggggaucagcuca

SEQ ID NO: 304411 - RNA, 19 nt, Artificial Sequence
  Description of Artificial Sequence: Synthetic oligonucleotide
gucaaagggagcucgccga

SEQ ID NO: 304412 - RNA, 19 nt, Artificial Sequence
  Description of Artificial Sequence: Synthetic oligonucleotide
gaggcucuuauagaauuca

SEQ ID NO: 304413 - RNA, 19 nt, Artificial Sequence
  Description of Artificial Sequence: Synthetic oligonucleotide
cacgaugggguggucaggg

SEQ ID NO: 304414 - RNA, 19 nt, Artificial Sequence
  Description of Artificial Sequence: Synthetic oligonucleotide
uacggauaacuuucaggau

SEQ ID NO: 304415 - RNA, 19 nt, Artificial Sequence
  Description of Artificial Sequence: Synthetic oligonucleotide
augaacugcgaguguuucu

SEQ ID NO: 304416 - RNA, 19 nt, Artificial Sequence
  Description of Artificial Sequence: Synthetic oligonucleotide
cugcgaguguuucuucacc

SEQ ID NO: 304417 - RNA, 19 nt, Artificial Sequence
  Description of Artificial Sequence: Synthetic oligonucleotide
guaauagauggacuucugu

SEQ ID NO: 304418 - RNA, 19 nt, Artificial Sequence
  Description of Artificial Sequence: Synthetic oligonucleotide
cagacugagagguaugaua

SEQ ID NO: 304419 - RNA, 19 nt, Artificial Sequence
  Description of Artificial Sequence: Synthetic oligonucleotide
ugcuauucugugggagggg

SEQ ID NO: 304420 - RNA, 19 nt, Artificial Sequence
  Description of Artificial Sequence: Synthetic oligonucleotide
ugcgguuggaguggguuug

SEQ ID NO: 304421 - RNA, 19 nt, Artificial Sequence
  Description of Artificial Sequence: Synthetic oligonucleotide
gagacgccgacgguuagug

SEQ ID NO: 304422 - RNA, 19 nt, Artificial Sequence
  Description of Artificial Sequence: Synthetic oligonucleotide
acugcccaaucauggauau

SEQ ID NO: 304423 - RNA, 19 nt, Artificial Sequence
  Description of Artificial Sequence: Synthetic oligonucleotide
ggcaucuugacaggaaagc

SEQ ID NO: 304424 - RNA, 19 nt, Artificial Sequence
  Description of Artificial Sequence: Synthetic oligonucleotide
ugccacgagauaggcagag

SEQ ID NO: 304425 - RNA, 19 nt, Artificial Sequence
  Description of Artificial Sequence: Synthetic oligonucleotide
ggcucuuauagaauucacc

SEQ ID NO: 304426 - RNA, 19 nt, Artificial Sequence
  Description of Artificial Sequence: Synthetic oligonucleotide
gagagguaugauagcgcag

SEQ ID NO: 304427 - RNA, 19 nt, Artificial Sequence
  Description of Artificial Sequence: Synthetic oligonucleotide
agguaugauagcgcagcag

SEQ ID NO: 304428 - RNA, 19 nt, Artificial Sequence
  Description of Artificial Sequence: Synthetic oligonucleotide
caagugguccucccaauca

SEQ ID NO: 304429 - RNA, 19 nt, Artificial Sequence
  Description of Artificial Sequence: Synthetic oligonucleotide
acaauacccaacccugcua

SEQ ID NO: 304430 - RNA, 19 nt, Artificial Sequence
  Description of Artificial Sequence: Synthetic oligonucleotide
agccgaguaguaguacagg

SEQ ID NO: 304431 - RNA, 19 nt, Artificial Sequence
  Description of Artificial Sequence: Synthetic oligonucleotide
cacgcggagguuagugugc

SEQ ID NO: 304432 - RNA, 19 nt, Artificial Sequence
  Description of Artificial Sequence: Synthetic oligonucleotide
uacugcucgucaucauugu

SEQ ID NO: 304433 - RNA, 19 nt, Artificial Sequence
  Description of Artificial Sequence: Synthetic oligonucleotide
gaaagccgaguaguaguac

SEQ ID NO: 304434 - RNA, 19 nt, Artificial Sequence
  Description of Artificial Sequence: Synthetic oligonucleotide
gacuuagcaaugguuccca

SEQ ID NO: 304435 - RNA, 19 nt, Artificial Sequence
  Description of Artificial Sequence: Synthetic oligonucleotide
acacgacggacguacaguu

SEQ ID NO: 304436 - RNA, 19 nt, Artificial Sequence
  Description of Artificial Sequence: Synthetic oligonucleotide
gaugaaggaugacuuuggu

SEQ ID NO: 304437 - RNA, 19 nt, Artificial Sequence
  Description of Artificial Sequence: Synthetic oligonucleotide
cuacagagaagugcuugac

SEQ ID NO: 304438 - RNA, 19 nt, Artificial Sequence
  Description of Artificial Sequence: Synthetic oligonucleotide
ccgcuguccaauuuggaag

SEQ ID NO: 304439 - RNA, 19 nt, Artificial Sequence
  Description of Artificial Sequence: Synthetic oligonucleotide
cugccuuaaggcacaagga

SEQ ID NO: 304440 - RNA, 19 nt, Artificial Sequence
  Description of Artificial Sequence: Synthetic oligonucleotide
ccaaucauuggugaggcuc

SEQ ID NO: 304441 - RNA, 19 nt, Artificial Sequence
  Description of Artificial Sequence: Synthetic oligonucleotide
caggauaaagagauccucu

SEQ ID NO: 304442 - RNA, 19 nt, Artificial Sequence
  Description of Artificial Sequence: Synthetic oligonucleotide
ucgauacccaggccuaguu

SEQ ID NO: 304443 - RNA, 19 nt, Artificial Sequence
  Description of Artificial Sequence: Synthetic oligonucleotide
ccgaguaguaguacagggc

SEQ ID NO: 304444 - RNA, 19 nt, Artificial Sequence
  Description of Artificial Sequence: Synthetic oligonucleotide
gagguaugauagcgcagca

SEQ ID NO: 304445 - RNA, 19 nt, Artificial Sequence
  Description of Artificial Sequence: Synthetic oligonucleotide
gagcauuucucgagagaug

SEQ ID NO: 304446 - RNA, 19 nt, Artificial Sequence
  Description of Artificial Sequence: Synthetic oligonucleotide
caucauugugcuuugugau

SEQ ID NO: 304447 - RNA, 19 nt, Artificial Sequence
  Description of Artificial Sequence: Synthetic oligonucleotide
caugcgggaggcauccuca

SEQ ID NO: 304448 - RNA, 19 nt, Artificial Sequence
  Description of Artificial Sequence: Synthetic oligonucleotide
gucaggcucucauagcgaa

SEQ ID NO: 304449 - RNA, 19 nt, Artificial Sequence
  Description of Artificial Sequence: Synthetic oligonucleotide
ucggagcgcgaccgacucg

SEQ ID NO: 304450 - RNA, 19 nt, Artificial Sequence
  Description of Artificial Sequence: Synthetic oligonucleotide
ggcuuagucuuauucaacu

SEQ ID NO: 304451 - RNA, 19 nt, Artificial Sequence
  Description of Artificial Sequence: Synthetic oligonucleotide
caccacuucaaagccucgc

SEQ ID NO: 304452 - RNA, 19 nt, Artificial Sequence
  Description of Artificial Sequence: Synthetic oligonucleotide
gccacggauaaaguugagg

SEQ ID NO: 304453 - RNA, 19 nt, Artificial Sequence
  Description of Artificial Sequence: Synthetic oligonucleotide
guaguaguacagggccggg

SEQ ID NO: 304454 - RNA, 19 nt, Artificial Sequence
  Description of Artificial Sequence: Synthetic oligonucleotide
uaguaguacagggccgggu

SEQ ID NO: 304455 - RNA, 19 nt, Artificial Sequence
  Description of Artificial Sequence: Synthetic oligonucleotide
caaucauuggugaggcucu

SEQ ID NO: 304456 - RNA, 19 nt, Artificial Sequence
  Description of Artificial Sequence: Synthetic oligonucleotide
agacgccgacgguuagugg

SEQ ID NO: 304457 - RNA, 19 nt, Artificial Sequence
  Description of Artificial Sequence: Synthetic oligonucleotide
gaacugcgaguguuucuuc

SEQ ID NO: 304458 - RNA, 19 nt, Artificial Sequence
  Description of Artificial Sequence: Synthetic oligonucleotide
ucgcacgcggagguuagug

SEQ ID NO: 304459 - RNA, 19 nt, Artificial Sequence
  Description of Artificial Sequence: Synthetic oligonucleotide
gccuauuggagauggucac

SEQ ID NO: 304460 - RNA, 19 nt, Artificial Sequence
  Description of Artificial Sequence: Synthetic oligonucleotide
ggagguuagugugcgcggg

SEQ ID NO: 304461 - RNA, 19 nt, Artificial Sequence
  Description of Artificial Sequence: Synthetic oligonucleotide
acuauacagaggacauggu

SEQ ID NO: 304462 - RNA, 19 nt, Artificial Sequence
  Description of Artificial Sequence: Synthetic oligonucleotide
acgcggagguuagugugcg

SEQ ID NO: 304463 - RNA, 19 nt, Artificial Sequence
  Description of Artificial Sequence: Synthetic oligonucleotide
gauagcgcagcagcucaga

SEQ ID NO: 304464 - RNA, 19 nt, Artificial Sequence
  Description of Artificial Sequence: Synthetic oligonucleotide
ggaucagcucaucacagcu

SEQ ID NO: 304465 - RNA, 19 nt, Artificial Sequence
  Description of Artificial Sequence: Synthetic oligonucleotide
ccuccucuccucuaaguac

SEQ ID NO: 304466 - RNA, 19 nt, Artificial Sequence
  Description of Artificial Sequence: Synthetic oligonucleotide
ugccgcuguccaauuugga

SEQ ID NO: 304467 - RNA, 19 nt, Artificial Sequence
  Description of Artificial Sequence: Synthetic oligonucleotide
acggacguacaguuugaua

SEQ ID NO: 304468 - RNA, 19 nt, Artificial Sequence
  Description of Artificial Sequence: Synthetic oligonucleotide
cccguguccaccaaaguca

SEQ ID NO: 304469 - RNA, 19 nt, Artificial Sequence
  Description of Artificial Sequence: Synthetic oligonucleotide
gggaucagcucaucacagc

SEQ ID NO: 304470 - RNA, 19 nt, Artificial Sequence
  Description of Artificial Sequence: Synthetic oligonucleotide
caggccuaguuugaucaug

SEQ ID NO: 304471 - RNA, 19 nt, Artificial Sequence
  Description of Artificial Sequence: Synthetic oligonucleotide
gaccgacucgcacgcggag

SEQ ID NO: 304472 - RNA, 19 nt, Artificial Sequence
  Description of Artificial Sequence: Synthetic oligonucleotide
cuaguuugaucaugcggua

SEQ ID NO: 304473 - RNA, 19 nt, Artificial Sequence
  Description of Artificial Sequence: Synthetic oligonucleotide
gugaugggauagccuauga

SEQ ID NO: 304474 - RNA, 19 nt, Artificial Sequence
  Description of Artificial Sequence: Synthetic oligonucleotide
gauagccuaugaacugcga

SEQ ID NO: 304475 - RNA, 19 nt, Artificial Sequence
  Description of Artificial Sequence: Synthetic oligonucleotide
ccacggauaaaguugaggu

SEQ ID NO: 304476 - RNA, 19 nt, Artificial Sequence
  Description of Artificial Sequence: Synthetic oligonucleotide
ggccuaguuugaucaugcg

SEQ ID NO: 304477 - RNA, 19 nt, Artificial Sequence
  Description of Artificial Sequence: Synthetic oligonucleotide
uggucaugccaaugcccgu

SEQ ID NO: 304478 - RNA, 19 nt, Artificial Sequence
  Description of Artificial Sequence: Synthetic oligonucleotide
ggggaucagcucaucacag

SEQ ID NO: 304479 - RNA, 19 nt, Artificial Sequence
  Description of Artificial Sequence: Synthetic oligonucleotide
gcacgcggagguuagugug

SEQ ID NO: 304480 - RNA, 19 nt, Artificial Sequence
  Description of Artificial Sequence: Synthetic oligonucleotide
cauguuggcuguccagcca

SEQ ID NO: 304481 - RNA, 19 nt, Artificial Sequence
  Description of Artificial Sequence: Synthetic oligonucleotide
cucggagcgcgaccgacuc

SEQ ID NO: 304482 - RNA, 19 nt, Artificial Sequence
  Description of Artificial Sequence: Synthetic oligonucleotide
ggugaugggauagccuaug

SEQ ID NO: 304483 - RNA, 19 nt, Artificial Sequence
  Description of Artificial Sequence: Synthetic oligonucleotide
auccucuagcuugaacaga

SEQ ID NO: 304484 - RNA, 19 nt, Artificial Sequence
  Description of Artificial Sequence: Synthetic oligonucleotide
ugggcgauuucugccugga

SEQ ID NO: 304485 - RNA, 19 nt, Artificial Sequence
  Description of Artificial Sequence: Synthetic oligonucleotide
gccgggugggcucggagcg

SEQ ID NO: 304486 - RNA, 19 nt, Artificial Sequence
  Description of Artificial Sequence: Synthetic oligonucleotide
acgccacggauaaaguuga

SEQ ID NO: 304487 - RNA, 19 nt, Artificial Sequence
  Description of Artificial Sequence: Synthetic oligonucleotide
gcuugaacagagagccagg

SEQ ID NO: 304488 - RNA, 19 nt, Artificial Sequence
  Description of Artificial Sequence: Synthetic oligonucleotide
caauacccaacccugcuau

SEQ ID NO: 304489 - RNA, 19 nt, Artificial Sequence
  Description of Artificial Sequence: Synthetic oligonucleotide
cauagcgaaucuuguccaa

SEQ ID NO: 304490 - RNA, 19 nt, Artificial Sequence
  Description of Artificial Sequence: Synthetic oligonucleotide
cuccucuccucuaaguacu

SEQ ID NO: 304491 - RNA, 19 nt, Artificial Sequence
  Description of Artificial Sequence: Synthetic oligonucleotide
agggagcucgccgaggaau

SEQ ID NO: 304492 - RNA, 19 nt, Artificial Sequence
  Description of Artificial Sequence: Synthetic oligonucleotide
gcgaccgacucgcacgcgg

SEQ ID NO: 304493 - RNA, 19 nt, Artificial Sequence
  Description of Artificial Sequence: Synthetic oligonucleotide
cccaggccuaguuugauca

SEQ ID NO: 304494 - RNA, 19 nt, Artificial Sequence
  Description of Artificial Sequence: Synthetic oligonucleotide
caucgauacccaggccuag

SEQ ID NO: 304495 - RNA, 19 nt, Artificial Sequence
  Description of Artificial Sequence: Synthetic oligonucleotide
augcgguuggaguggguuu

SEQ ID NO: 304496 - RNA, 19 nt, Artificial Sequence
  Description of Artificial Sequence: Synthetic oligonucleotide
gcccguguccaccaaaguc

SEQ ID NO: 304497 - RNA, 19 nt, Artificial Sequence
  Description of Artificial Sequence: Synthetic oligonucleotide
ggagcauuucucgagagau

SEQ ID NO: 304498 - RNA, 19 nt, Artificial Sequence
  Description of Artificial Sequence: Synthetic oligonucleotide
uucaugcgggacacauauu

SEQ ID NO: 304499 - RNA, 19 nt, Artificial Sequence
  Description of Artificial Sequence: Synthetic oligonucleotide
ugcgggaggcauccucauc

SEQ ID NO: 304500 - RNA, 19 nt, Artificial Sequence
  Description of Artificial Sequence: Synthetic oligonucleotide
aucgauacccaggccuagu

SEQ ID NO: 304501 - RNA, 19 nt, Artificial Sequence
  Description of Artificial Sequence: Synthetic oligonucleotide
acguacaguuugauauugu

SEQ ID NO: 304502 - RNA, 19 nt, Artificial Sequence
  Description of Artificial Sequence: Synthetic oligonucleotide
agagagacgccgacgguua

SEQ ID NO: 304503 - RNA, 19 nt, Artificial Sequence
  Description of Artificial Sequence: Synthetic oligonucleotide
aacacacgacggacguaca

SEQ ID NO: 304504 - RNA, 19 nt, Artificial Sequence
  Description of Artificial Sequence: Synthetic oligonucleotide
cacaauacccaacccugcu

SEQ ID NO: 304505 - RNA, 19 nt, Artificial Sequence
  Description of Artificial Sequence: Synthetic oligonucleotide
aggggaucucuaaucuacu

SEQ ID NO: 304506 - RNA, 19 nt, Artificial Sequence
  Description of Artificial Sequence: Synthetic oligonucleotide
ucgccauggugcaccuccu

SEQ ID NO: 304507 - RNA, 19 nt, Artificial Sequence
  Description of Artificial Sequence: Synthetic oligonucleotide
ugcgguagaugcgguugga

SEQ ID NO: 304508 - RNA, 19 nt, Artificial Sequence
  Description of Artificial Sequence: Synthetic oligonucleotide
gagcgcgaccgacucgcac

SEQ ID NO: 304509 - RNA, 19 nt, Artificial Sequence
  Description of Artificial Sequence: Synthetic oligonucleotide
ccucccaaucauuggugag

SEQ ID NO: 304510 - RNA, 19 nt, Artificial Sequence
  Description of Artificial Sequence: Synthetic oligonucleotide
caccaaagucagcgugcgc

SEQ ID NO: 304511 - RNA, 19 nt, Artificial Sequence
  Description of Artificial Sequence: Synthetic oligonucleotide
ugaacacacgacggacgua

SEQ ID NO: 304512 - RNA, 19 nt, Artificial Sequence
  Description of Artificial Sequence: Synthetic oligonucleotide
ccuauuggagauggucacc

SEQ ID NO: 304513 - RNA, 19 nt, Artificial Sequence
  Description of Artificial Sequence: Synthetic oligonucleotide
guagcccaugguagaguug

SEQ ID NO: 304514 - RNA, 19 nt, Artificial Sequence
  Description of Artificial Sequence: Synthetic oligonucleotide
gcgaguguuucuucaccac

SEQ ID NO: 304515 - RNA, 19 nt, Artificial Sequence
  Description of Artificial Sequence: Synthetic oligonucleotide
cauggauuccaagcuuuaa

SEQ ID NO: 304516 - RNA, 19 nt, Artificial Sequence
  Description of Artificial Sequence: Synthetic oligonucleotide
ccaccaaagucagcgugcg

SEQ ID NO: 304517 - RNA, 19 nt, Artificial Sequence
  Description of Artificial Sequence: Synthetic oligonucleotide
gaugcgguuggaguggguu

SEQ ID NO: 304518 - RNA, 19 nt, Artificial Sequence
  Description of Artificial Sequence: Synthetic oligonucleotide
ggauuccaagcuuuaaguu

SEQ ID NO: 304519 - RNA, 19 nt, Artificial Sequence
  Description of Artificial Sequence: Synthetic oligonucleotide
cuugaacagagagccaggu

SEQ ID NO: 304520 - RNA, 19 nt, Artificial Sequence
  Description of Artificial Sequence: Synthetic oligonucleotide
ccguguccaccaaagucag

SEQ ID NO: 304521 - RNA, 19 nt, Artificial Sequence
  Description of Artificial Sequence: Synthetic oligonucleotide
gccgcuguccaauuuggaa

SEQ ID NO: 304522 - RNA, 19 nt, Artificial Sequence
  Description of Artificial Sequence: Synthetic oligonucleotide
acgaugggguggucagggu

SEQ ID NO: 304523 - RNA, 19 nt, Artificial Sequence
  Description of Artificial Sequence: Synthetic oligonucleotide
guccaauuuggaagggucu

SEQ ID NO: 304524 - RNA, 19 nt, Artificial Sequence
  Description of Artificial Sequence: Synthetic oligonucleotide
aucccacaucuucaaucuu

SEQ ID NO: 304525 - RNA, 19 nt, Artificial Sequence
  Description of Artificial Sequence: Synthetic oligonucleotide
cggacguacaguuugauau

SEQ ID NO: 304526 - RNA, 19 nt, Artificial Sequence
  Description of Artificial Sequence: Synthetic oligonucleotide
uaccccggccaaugggcuc

SEQ ID NO: 304527 - RNA, 19 nt, Artificial Sequence
  Description of Artificial Sequence: Synthetic oligonucleotide
ccuucuuauccaagaucuc

SEQ ID NO: 304528 - RNA, 19 nt, Artificial Sequence
  Description of Artificial Sequence: Synthetic oligonucleotide
gccucguagaauuucuuau

SEQ ID NO: 304529 - RNA, 19 nt, Artificial Sequence
  Description of Artificial Sequence: Synthetic oligonucleotide
gacucgcacgcggagguua

SEQ ID NO: 304530 - RNA, 19 nt, Artificial Sequence
  Description of Artificial Sequence: Synthetic oligonucleotide
cacuagccuauuggagaug

SEQ ID NO: 304531 - RNA, 19 nt, Artificial Sequence
  Description of Artificial Sequence: Synthetic oligonucleotide
gggcuuagucuuauucaac

SEQ ID NO: 304532 - RNA, 19 nt, Artificial Sequence
  Description of Artificial Sequence: Synthetic oligonucleotide
uacccaggccuaguuugau

SEQ ID NO: 304533 - RNA, 19 nt, Artificial Sequence
  Description of Artificial Sequence: Synthetic oligonucleotide
ggccucguagaauuucuua

SEQ ID NO: 304534 - RNA, 19 nt, Artificial Sequence
  Description of Artificial Sequence: Synthetic oligonucleotide
ggaguggguuuggggaucc

SEQ ID NO: 304535 - RNA, 19 nt, Artificial Sequence
  Description of Artificial Sequence: Synthetic oligonucleotide
gcacgcacugugaaggauc

SEQ ID NO: 304536 - RNA, 19 nt, Artificial Sequence
  Description of Artificial Sequence: Synthetic oligonucleotide
gggaaacuauacagaggac

SEQ ID NO: 304537 - RNA, 19 nt, Artificial Sequence
  Description of Artificial Sequence: Synthetic oligonucleotide
ccuuagucacugagaccag

SEQ ID NO: 304538 - RNA, 19 nt, Artificial Sequence
  Description of Artificial Sequence: Synthetic oligonucleotide
gacaugagcugggcgauuu

SEQ ID NO: 304539 - RNA, 19 nt, Artificial Sequence
  Description of Artificial Sequence: Synthetic oligonucleotide
ccacgagauaggcagagua

SEQ ID NO: 304540 - RNA, 19 nt, Artificial Sequence
  Description of Artificial Sequence: Synthetic oligonucleotide
cgccgaggaaugaagagca

SEQ ID NO: 304541 - RNA, 19 nt, Artificial Sequence
  Description of Artificial Sequence: Synthetic oligonucleotide
cugcacgcacugugaagga

SEQ ID NO: 304542 - RNA, 19 nt, Artificial Sequence
  Description of Artificial Sequence: Synthetic oligonucleotide
ccucguagaauuucuuaua

SEQ ID NO: 304543 - RNA, 19 nt, Artificial Sequence
  Description of Artificial Sequence: Synthetic oligonucleotide
cccugcuauucugugggag

SEQ ID NO: 304544 - RNA, 19 nt, Artificial Sequence
  Description of Artificial Sequence: Synthetic oligonucleotide
agccucgcuuccgcacacg

SEQ ID NO: 304545 - RNA, 19 nt, Artificial Sequence
  Description of Artificial Sequence: Synthetic oligonucleotide
cggagguuagugugcgcgg

SEQ ID NO: 304546 - RNA, 19 nt, Artificial Sequence
  Description of Artificial Sequence: Synthetic oligonucleotide
cugcccaaucauggauaug

SEQ ID NO: 304547 - RNA, 19 nt, Artificial Sequence
  Description of Artificial Sequence: Synthetic oligonucleotide
caauaggcucagucaugua

SEQ ID NO: 304548 - RNA, 19 nt, Artificial Sequence
  Description of Artificial Sequence: Synthetic oligonucleotide
ccaugcgggaggcauccuc

SEQ ID NO: 304549 - RNA, 19 nt, Artificial Sequence
  Description of Artificial Sequence: Synthetic oligonucleotide
gcgcgaccgacucgcacgc

SEQ ID NO: 304550 - RNA, 19 nt, Artificial Sequence
  Description of Artificial Sequence: Synthetic oligonucleotide
acgccgacgguuaguggaa

SEQ ID NO: 304551 - RNA, 19 nt, Artificial Sequence
  Description of Artificial Sequence: Synthetic oligonucleotide
ggacguacaguuugauauu

SEQ ID NO: 304552 - RNA, 19 nt, Artificial Sequence
  Description of Artificial Sequence: Synthetic oligonucleotide
gcucgccgaggaaugaaga

SEQ ID NO: 304553 - RNA, 19 nt, Artificial Sequence
  Description of Artificial Sequence: Synthetic oligonucleotide
gccgacgguuaguggaauc

SEQ ID NO: 304554 - RNA, 19 nt, Artificial Sequence
  Description of Artificial Sequence: Synthetic oligonucleotide
gcgguuggaguggguuugg

SEQ ID NO: 304555 - RNA, 19 nt, Artificial Sequence
  Description of Artificial Sequence: Synthetic oligonucleotide
cggagcgcgaccgacucgc

SEQ ID NO: 304556 - RNA, 19 nt, Artificial Sequence
  Description of Artificial Sequence: Synthetic oligonucleotide
cuagccuauuggagauggu

SEQ ID NO: 304557 - RNA, 19 nt, Artificial Sequence
  Description of Artificial Sequence: Synthetic oligonucleotide
gacggacguacaguuugau

SEQ ID NO: 304558 - RNA, 19 nt, Artificial Sequence
  Description of Artificial Sequence: Synthetic oligonucleotide
cuugcucuguuggagcauu

SEQ ID NO: 304559 - RNA, 19 nt, Artificial Sequence
  Description of Artificial Sequence: Synthetic oligonucleotide
acgcacugugaaggaucca

SEQ ID NO: 304560 - RNA, 19 nt, Artificial Sequence
  Description of Artificial Sequence: Synthetic oligonucleotide
cccaggggaucucuaaucu

SEQ ID NO: 304561 - RNA, 19 nt, Artificial Sequence
  Description of Artificial Sequence: Synthetic oligonucleotide
cugaucccacaucuucaau

SEQ ID NO: 304562 - RNA, 19 nt, Artificial Sequence
  Description of Artificial Sequence: Synthetic oligonucleotide
ggcucggagcgcgaccgac

SEQ ID NO: 304563 - RNA, 19 nt, Artificial Sequence
  Description of Artificial Sequence: Synthetic oligonucleotide
cagguagguuggggccagc

SEQ ID NO: 304564 - RNA, 19 nt, Artificial Sequence
  Description of Artificial Sequence: Synthetic oligonucleotide
cuuugccgcuguccaauuu

SEQ ID NO: 304565 - RNA, 19 nt, Artificial Sequence
  Description of Artificial Sequence: Synthetic oligonucleotide
ccaggggaucucuaaucua

SEQ ID NO: 304566 - RNA, 19 nt, Artificial Sequence
  Description of Artificial Sequence: Synthetic oligonucleotide
cguguccaccaaagucagc

SEQ ID NO: 304567 - RNA, 19 nt, Artificial Sequence
  Description of Artificial Sequence: Synthetic oligonucleotide
cacgacggacguacaguuu

SEQ ID NO: 304568 - RNA, 19 nt, Artificial Sequence
  Description of Artificial Sequence: Synthetic oligonucleotide
ccgacgguuaguggaaucu

SEQ ID NO: 304569 - RNA, 19 nt, Artificial Sequence
  Description of Artificial Sequence: Synthetic oligonucleotide
cuuugguaccccggccaau

SEQ ID NO: 304570 - RNA, 19 nt, Artificial Sequence
  Description of Artificial Sequence: Synthetic oligonucleotide
cgacggacguacaguuuga

SEQ ID NO: 304571 - RNA, 19 nt, Artificial Sequence
  Description of Artificial Sequence: Synthetic oligonucleotide
ccgaggaaugaagagcaau

SEQ ID NO: 304572 - RNA, 19 nt, Artificial Sequence
  Description of Artificial Sequence: Synthetic oligonucleotide
ccgacucgcacgcggaggu

SEQ ID NO: 304573 - RNA, 19 nt, Artificial Sequence
  Description of Artificial Sequence: Synthetic oligonucleotide
gaguggguuuggggauccu

SEQ ID NO: 304574 - RNA, 19 nt, Artificial Sequence
  Description of Artificial Sequence: Synthetic oligonucleotide
cgcggagguuagugugcgc

SEQ ID NO: 304575 - RNA, 19 nt, Artificial Sequence
  Description of Artificial Sequence: Synthetic oligonucleotide
cgaccgacucgcacgcgga

SEQ ID NO: 304576 - RNA, 19 nt, Artificial Sequence
  Description of Artificial Sequence: Synthetic oligonucleotide
gccgaggaaugaagagcaa

SEQ ID NO: 304577 - RNA, 19 nt, Artificial Sequence
  Description of Artificial Sequence: Synthetic oligonucleotide
gcucggagcgcgaccgacu

SEQ ID NO: 304578 - RNA, 19 nt, Artificial Sequence
  Description of Artificial Sequence: Synthetic oligonucleotide
gcauuucucgagagauguu

SEQ ID NO: 304579 - RNA, 19 nt, Artificial Sequence
  Description of Artificial Sequence: Synthetic oligonucleotide
gggcucggagcgcgaccga

SEQ ID NO: 304580 - RNA, 19 nt, Artificial Sequence
  Description of Artificial Sequence: Synthetic oligonucleotide
ggagcgcgaccgacucgca

SEQ ID NO: 304581 - RNA, 19 nt, Artificial Sequence
  Description of Artificial Sequence: Synthetic oligonucleotide
gccacgagauaggcagagu

SEQ ID NO: 304582 - RNA, 19 nt, Artificial Sequence
  Description of Artificial Sequence: Synthetic oligonucleotide
cccaaucauuggugaggcu

SEQ ID NO: 304583 - RNA, 19 nt, Artificial Sequence
  Description of Artificial Sequence: Synthetic oligonucleotide
cgcacgcggagguuagugu

SEQ ID NO: 304584 - RNA, 19 nt, Artificial Sequence
  Description of Artificial Sequence: Synthetic oligonucleotide
gcucgucaucauugugcuu

SEQ ID NO: 304585 - RNA, 19 nt, Artificial Sequence
  Description of Artificial Sequence: Synthetic oligonucleotide
cucgcacgcggagguuagu

SEQ ID NO: 304586 - RNA, 19 nt, Artificial Sequence
  Description of Artificial Sequence: Synthetic oligonucleotide
gcgugcgcuccugaggguu

SEQ ID NO: 304587 - RNA, 19 nt, Artificial Sequence
  Description of Artificial Sequence: Synthetic oligonucleotide
cgcgaccgacucgcacgcg

SEQ ID NO: 304588 - RNA, 19 nt, Artificial Sequence
  Description of Artificial Sequence: Synthetic oligonucleotide
cccggccaaugggcucacc

SEQ ID NO: 304589 - RNA, 19 nt, Artificial Sequence
  Description of Artificial Sequence: Synthetic oligonucleotide
ccccggccaaugggcucac

SEQ ID NO: 304590 - RNA, 19 nt, Artificial Sequence
  Description of Artificial Sequence: Synthetic oligonucleotide
cgccgacgguuaguggaau

SEQ ID NO: 304591 - RNA, 19 nt, Artificial Sequence
  Description of Artificial Sequence: Synthetic oligonucleotide
cgacucgcacgcggagguu

SEQ ID NO: 304592 - RNA, 19 nt, Artificial Sequence
  Description of Artificial Sequence: Synthetic oligonucleotide
aaaucuagggauccgaggc

SEQ ID NO: 304593 - RNA, 19 nt, Artificial Sequence
  Description of Artificial Sequence: Synthetic oligonucleotide
uaugcauuaaugaagaaca

SEQ ID NO: 304594 - RNA, 19 nt, Artificial Sequence
  Description of Artificial Sequence: Synthetic oligonucleotide
auagcauugacagacaucc

SEQ ID NO: 304595 - RNA, 19 nt, Artificial Sequence
  Description of Artificial Sequence: Synthetic oligonucleotide
auuaaaaccgguaauauac

SEQ ID NO: 304596 - RNA, 19 nt, Artificial Sequence
  Description of Artificial Sequence: Synthetic oligonucleotide
uuaagaaagauguuaggcg

SEQ ID NO: 304597 - RNA, 19 nt, Artificial Sequence
  Description of Artificial Sequence: Synthetic oligonucleotide
uuaagagcaauucaaauac

SEQ ID NO: 304598 - RNA, 19 nt, Artificial Sequence
  Description of Artificial Sequence: Synthetic oligonucleotide
ugcaaagucaaauaaaccc

SEQ ID NO: 304599 - RNA, 19 nt, Artificial Sequence
  Description of Artificial Sequence: Synthetic oligonucleotide
aagcacaaaagauucagac

SEQ ID NO: 304600 - RNA, 19 nt, Artificial Sequence
  Description of Artificial Sequence: Synthetic oligonucleotide
uuacgaauagcauugacag

SEQ ID NO: 304601 - RNA, 19 nt, Artificial Sequence
  Description of Artificial Sequence: Synthetic oligonucleotide
aaauacaagaaaugaucac

SEQ ID NO: 304602 - RNA, 19 nt, Artificial Sequence
  Description of Artificial Sequence: Synthetic oligonucleotide
ucuuuaugcauuaaugaag

SEQ ID NO: 304603 - RNA, 19 nt, Artificial Sequence
  Description of Artificial Sequence: Synthetic oligonucleotide
aauugugacauauguauug

SEQ ID NO: 304604 - RNA, 19 nt, Artificial Sequence
  Description of Artificial Sequence: Synthetic oligonucleotide
aaugcgaaucaccucgucc

SEQ ID NO: 304605 - RNA, 19 nt, Artificial Sequence
  Description of Artificial Sequence: Synthetic oligonucleotide
agcacuacgagucugcacc

SEQ ID NO: 304606 - RNA, 19 nt, Artificial Sequence
  Description of Artificial Sequence: Synthetic oligonucleotide
aagaucuaucuauuaaaac

SEQ ID NO: 304607 - RNA, 19 nt, Artificial Sequence
  Description of Artificial Sequence: Synthetic oligonucleotide
gaucuaucuauuaaaaccg

SEQ ID NO: 304608 - RNA, 19 nt, Artificial Sequence
  Description of Artificial Sequence: Synthetic oligonucleotide
aauauucccacacagcaca

SEQ ID NO: 304609 - RNA, 19 nt, Artificial Sequence
  Description of Artificial Sequence: Synthetic oligonucleotide
ucucccuacauuuuaaccg

SEQ ID NO: 304610 - RNA, 19 nt, Artificial Sequence
  Description of Artificial Sequence: Synthetic oligonucleotide
uuuagguacauaccgauga

SEQ ID NO: 304611 - RNA, 19 nt, Artificial Sequence
  Description of Artificial Sequence: Synthetic oligonucleotide
uuuaagaaagauguuaggc

SEQ ID NO: 304612 - RNA, 19 nt, Artificial Sequence
  Description of Artificial Sequence: Synthetic oligonucleotide
uuuugcaaccuucauaagc

SEQ ID NO: 304613 - RNA, 19 nt, Artificial Sequence
  Description of Artificial Sequence: Synthetic oligonucleotide
uuaaacaaagguaaaacuu

SEQ ID NO: 304614 - RNA, 19 nt, Artificial Sequence
  Description of Artificial Sequence: Synthetic oligonucleotide
aagccuagaaacuuuaaca

SEQ ID NO: 304615 - RNA, 19 nt, Artificial Sequence
  Description of Artificial Sequence: Synthetic oligonucleotide
aauacaagaaaugaucacu

SEQ ID NO: 304616 - RNA, 19 nt, Artificial Sequence
  Description of Artificial Sequence: Synthetic oligonucleotide
acgaauagcauugacagac

SEQ ID NO: 304617 - RNA, 19 nt, Artificial Sequence
  Description of Artificial Sequence: Synthetic oligonucleotide
aauuuggauucuuugcauc

SEQ ID NO: 304618 - RNA, 19 nt, Artificial Sequence
  Description of Artificial Sequence: Synthetic oligonucleotide
uaaaacuuaauugugacau

SEQ ID NO: 304619 - RNA, 19 nt, Artificial Sequence
  Description of Artificial Sequence: Synthetic oligonucleotide
uuaccagcaaaacaaguag

SEQ ID NO: 304620 - RNA, 19 nt, Artificial Sequence
  Description of Artificial Sequence: Synthetic oligonucleotide
acuauuucaaauagcauac

SEQ ID NO: 304621 - RNA, 19 nt, Artificial Sequence
  Description of Artificial Sequence: Synthetic oligonucleotide
cuuauuaccagcaaaacaa

SEQ ID NO: 304622 - RNA, 19 nt, Artificial Sequence
  Description of Artificial Sequence: Synthetic oligonucleotide
ugaaacuaaaauagagugc

SEQ ID NO: 304623 - RNA, 19 nt, Artificial Sequence
  Description of Artificial Sequence: Synthetic oligonucleotide
ugugauugcgucaauuaag

SEQ ID NO: 304624 - RNA, 19 nt, Artificial Sequence
  Description of Artificial Sequence: Synthetic oligonucleotide
ugcuguuagucacagaugc

SEQ ID NO: 304625 - RNA, 19 nt, Artificial Sequence
  Description of Artificial Sequence: Synthetic oligonucleotide
agcuuaaugauuaacacag

SEQ ID NO: 304626 - RNA, 19 nt, Artificial Sequence
  Description of Artificial Sequence: Synthetic oligonucleotide
cacaauuuugauaagcuug

SEQ ID NO: 304627 - RNA, 19 nt, Artificial Sequence
  Description of Artificial Sequence: Synthetic oligonucleotide
uauuguaaaacuacuugcu

SEQ ID NO: 304628 - RNA, 19 nt, Artificial Sequence
  Description of Artificial Sequence: Synthetic oligonucleotide
aacugauugugauugcguc

SEQ ID NO: 304629 - RNA, 19 nt, Artificial Sequence
  Description of Artificial Sequence: Synthetic oligonucleotide
uggacuguaauaauuccag

SEQ ID NO: 304630 - RNA, 19 nt, Artificial Sequence
  Description of Artificial Sequence: Synthetic oligonucleotide
gauugcgucaauuaaguca

SEQ ID NO: 304631 - RNA, 19 nt, Artificial Sequence
  Description of Artificial Sequence: Synthetic oligonucleotide
ucuguaucaagaaagcuau

SEQ ID NO: 304632 - RNA, 19 nt, Artificial Sequence
  Description of Artificial Sequence: Synthetic oligonucleotide
uugucuuuaugcauuaaug

SEQ ID NO: 304633 - RNA, 19 nt, Artificial Sequence
  Description of Artificial Sequence: Synthetic oligonucleotide
ugucuuuaugcauuaauga

SEQ ID NO: 304634 - RNA, 19 nt, Artificial Sequence
  Description of Artificial Sequence: Synthetic oligonucleotide
uguaaaacuacuugcuaca

SEQ ID NO: 304635 - RNA, 19 nt, Artificial Sequence
  Description of Artificial Sequence: Synthetic oligonucleotide
uugugagaagccuagaaac

SEQ ID NO: 304636 - RNA, 19 nt, Artificial Sequence
  Description of Artificial Sequence: Synthetic oligonucleotide
aaguaugccugugaguggc

SEQ ID NO: 304637 - RNA, 19 nt, Artificial Sequence
  Description of Artificial Sequence: Synthetic oligonucleotide
auaagcaaagagcacagcu

SEQ ID NO: 304638 - RNA, 19 nt, Artificial Sequence
  Description of Artificial Sequence: Synthetic oligonucleotide
acauauguauuguaaaacu

SEQ ID NO: 304639 - RNA, 19 nt, Artificial Sequence
  Description of Artificial Sequence: Synthetic oligonucleotide
uguuaggcgagaaacaaaa

SEQ ID NO: 304640 - RNA, 19 nt, Artificial Sequence
  Description of Artificial Sequence: Synthetic oligonucleotide
uugauauauagcuuccuca

SEQ ID NO: 304641 - RNA, 19 nt, Artificial Sequence
  Description of Artificial Sequence: Synthetic oligonucleotide
cugauguuuauauuacucc

SEQ ID NO: 304642 - RNA, 19 nt, Artificial Sequence
  Description of Artificial Sequence: Synthetic oligonucleotide
uaucuauuaaaaccgguaa

SEQ ID NO: 304643 - RNA, 19 nt, Artificial Sequence
  Description of Artificial Sequence: Synthetic oligonucleotide
agacucaaaacauuaauau

SEQ ID NO: 304644 - RNA, 19 nt, Artificial Sequence
  Description of Artificial Sequence: Synthetic oligonucleotide
aaugcgacacauuaucuaa

SEQ ID NO: 304645 - RNA, 19 nt, Artificial Sequence
  Description of Artificial Sequence: Synthetic oligonucleotide
uucucaaagaucuaucuau

SEQ ID NO: 304646 - RNA, 19 nt, Artificial Sequence
  Description of Artificial Sequence: Synthetic oligonucleotide
agccuagaaacuuuaacag

SEQ ID NO: 304647 - RNA, 19 nt, Artificial Sequence
  Description of Artificial Sequence: Synthetic oligonucleotide
uucauaagcaaagagcaca

SEQ ID NO: 304648 - RNA, 19 nt, Artificial Sequence
  Description of Artificial Sequence: Synthetic oligonucleotide
agaaauuacccauggacca

SEQ ID NO: 304649 - RNA, 19 nt, Artificial Sequence
  Description of Artificial Sequence: Synthetic oligonucleotide
auuaagagcaauucaaaua

SEQ ID NO: 304650 - RNA, 19 nt, Artificial Sequence
  Description of Artificial Sequence: Synthetic oligonucleotide
ucgagcauuugucucaucc

SEQ ID NO: 304651 - RNA, 19 nt, Artificial Sequence
  Description of Artificial Sequence: Synthetic oligonucleotide
aguaggacacacuuaaaca

SEQ ID NO: 304652 - RNA, 19 nt, Artificial Sequence
  Description of Artificial Sequence: Synthetic oligonucleotide
ugaaacauaagugucucga

SEQ ID NO: 304653 - RNA, 19 nt, Artificial Sequence
  Description of Artificial Sequence: Synthetic oligonucleotide
gaggaauauucccacacag

SEQ ID NO: 304654 - RNA, 19 nt, Artificial Sequence
  Description of Artificial Sequence: Synthetic oligonucleotide
ucagacuaaaagauuuucu

SEQ ID NO: 304655 - RNA, 19 nt, Artificial Sequence
  Description of Artificial Sequence: Synthetic oligonucleotide
acaaguaggacacacuuaa

SEQ ID NO: 304656 - RNA, 19 nt, Artificial Sequence
  Description of Artificial Sequence: Synthetic oligonucleotide
aacuuuaacagaguucugu

SEQ ID NO: 304657 - RNA, 19 nt, Artificial Sequence
  Description of Artificial Sequence: Synthetic oligonucleotide
ucauuugcagggaaauaag

SEQ ID NO: 304658 - RNA, 19 nt, Artificial Sequence
  Description of Artificial Sequence: Synthetic oligonucleotide
uuaguccuuagucaguaga

SEQ ID NO: 304659 - RNA, 19 nt, Artificial Sequence
  Description of Artificial Sequence: Synthetic oligonucleotide
agaugugacuucuucaucu

SEQ ID NO: 304660 - RNA, 19 nt, Artificial Sequence
  Description of Artificial Sequence: Synthetic oligonucleotide
ugauauauagcuuccucaa

SEQ ID NO: 304661 - RNA, 19 nt, Artificial Sequence
  Description of Artificial Sequence: Synthetic oligonucleotide
aagauucagacuaaaagau

SEQ ID NO: 304662 - RNA, 19 nt, Artificial Sequence
  Description of Artificial Sequence: Synthetic oligonucleotide
uuuaucaguugauggacca

SEQ ID NO: 304663 - RNA, 19 nt, Artificial Sequence
  Description of Artificial Sequence: Synthetic oligonucleotide
agugcaaguccagucaugc

SEQ ID NO: 304664 - RNA, 19 nt, Artificial Sequence
  Description of Artificial Sequence: Synthetic oligonucleotide
agcacgguaauuaagagca

SEQ ID NO: 304665 - RNA, 19 nt, Artificial Sequence
  Description of Artificial Sequence: Synthetic oligonucleotide
gacaucccaauucucgugg

SEQ ID NO: 304666 - RNA, 19 nt, Artificial Sequence
  Description of Artificial Sequence: Synthetic oligonucleotide
uuaaaagugggacuauuuu

SEQ ID NO: 304667 - RNA, 19 nt, Artificial Sequence
  Description of Artificial Sequence: Synthetic oligonucleotide
aaacuuaauugugacauau

SEQ ID NO: 304668 - RNA, 19 nt, Artificial Sequence
  Description of Artificial Sequence: Synthetic oligonucleotide
uuaaaaccgguaauauaca

SEQ ID NO: 304669 - RNA, 19 nt, Artificial Sequence
  Description of Artificial Sequence: Synthetic oligonucleotide
acgugaacaagucagucug

SEQ ID NO: 304670 - RNA, 19 nt, Artificial Sequence
  Description of Artificial Sequence: Synthetic oligonucleotide
ggcaaugcgaaucaccucg

SEQ ID NO: 304671 - RNA, 19 nt, Artificial Sequence
  Description of Artificial Sequence: Synthetic oligonucleotide
aaaagugggacuauuuuaa

SEQ ID NO: 304672 - RNA, 19 nt, Artificial Sequence
  Description of Artificial Sequence: Synthetic oligonucleotide
cugucauucuagcaaauag

SEQ ID NO: 304673 - RNA, 19 nt, Artificial Sequence
  Description of Artificial Sequence: Synthetic oligonucleotide
accgguaauauacauaaau

SEQ ID NO: 304674 - RNA, 19 nt, Artificial Sequence
  Description of Artificial Sequence: Synthetic oligonucleotide
ugauggaccaucuaauaau

SEQ ID NO: 304675 - RNA, 19 nt, Artificial Sequence
  Description of Artificial Sequence: Synthetic oligonucleotide
uaaaagugggacuauuuua

SEQ ID NO: 304676 - RNA, 19 nt, Artificial Sequence
  Description of Artificial Sequence: Synthetic oligonucleotide
ugagugauuuggcuaaaga

SEQ ID NO: 304677 - RNA, 19 nt, Artificial Sequence
  Description of Artificial Sequence: Synthetic oligonucleotide
ucugcuuacgaauagcauu

SEQ ID NO: 304678 - RNA, 19 nt, Artificial Sequence
  Description of Artificial Sequence: Synthetic oligonucleotide
uguauuucaugucuguauu

SEQ ID NO: 304679 - RNA, 19 nt, Artificial Sequence
  Description of Artificial Sequence: Synthetic oligonucleotide
ucuaucuauuaaaaccggu

SEQ ID NO: 304680 - RNA, 19 nt, Artificial Sequence
  Description of Artificial Sequence: Synthetic oligonucleotide
cuuacgaauagcauugaca

SEQ ID NO: 304681 - RNA, 19 nt, Artificial Sequence
  Description of Artificial Sequence: Synthetic oligonucleotide
aaaugcgacacauuaucua

SEQ ID NO: 304682 - RNA, 19 nt, Artificial Sequence
  Description of Artificial Sequence: Synthetic oligonucleotide
aucacuuaaaagugggacu

SEQ ID NO: 304683 - RNA, 19 nt, Artificial Sequence
  Description of Artificial Sequence: Synthetic oligonucleotide
uuuuagguacauaccgaug

SEQ ID NO: 304684 - RNA, 19 nt, Artificial Sequence
  Description of Artificial Sequence: Synthetic oligonucleotide
uauuaccagcaaaacaagu

SEQ ID NO: 304685 - RNA, 19 nt, Artificial Sequence
  Description of Artificial Sequence: Synthetic oligonucleotide
uuagguacauaccgaugag

SEQ ID NO: 304686 - RNA, 19 nt, Artificial Sequence
  Description of Artificial Sequence: Synthetic oligonucleotide
uugauggaccaucuaauaa

SEQ ID NO: 304687 - RNA, 19 nt, Artificial Sequence
  Description of Artificial Sequence: Synthetic oligonucleotide
aacuaaaauagagugcaaa

SEQ ID NO: 304688 - RNA, 19 nt, Artificial Sequence
  Description of Artificial Sequence: Synthetic oligonucleotide
agcauugacagacauccca

SEQ ID NO: 304689 - RNA, 19 nt, Artificial Sequence
  Description of Artificial Sequence: Synthetic oligonucleotide
auuuuagguacauaccgau

SEQ ID NO: 304690 - RNA, 19 nt, Artificial Sequence
  Description of Artificial Sequence: Synthetic oligonucleotide
ugugagcacgguaauuaag

SEQ ID NO: 304691 - RNA, 19 nt, Artificial Sequence
  Description of Artificial Sequence: Synthetic oligonucleotide
acgccuuuaagaaagaugu

SEQ ID NO: 304692 - RNA, 19 nt, Artificial Sequence
  Description of Artificial Sequence: Synthetic oligonucleotide
cugcuuacgaauagcauug

SEQ ID NO: 304693 - RNA, 19 nt, Artificial Sequence
  Description of Artificial Sequence: Synthetic oligonucleotide
uguauuccguauuucuuga

SEQ ID NO: 304694 - RNA, 19 nt, Artificial Sequence
  Description of Artificial Sequence: Synthetic oligonucleotide
uauuaaaaccgguaauaua

SEQ ID NO: 304695 - RNA, 19 nt, Artificial Sequence
  Description of Artificial Sequence: Synthetic oligonucleotide
uuuguaacucugauguuua

SEQ ID NO: 304696 - RNA, 19 nt, Artificial Sequence
  Description of Artificial Sequence: Synthetic oligonucleotide
aaauaaguugccuggccua

SEQ ID NO: 304697 - RNA, 19 nt, Artificial Sequence
  Description of Artificial Sequence: Synthetic oligonucleotide
caaaucuagggauccgagg

SEQ ID NO: 304698 - RNA, 19 nt, Artificial Sequence
  Description of Artificial Sequence: Synthetic oligonucleotide
uuuaaccgcacagaaucag

SEQ ID NO: 304699 - RNA, 19 nt, Artificial Sequence
  Description of Artificial Sequence: Synthetic oligonucleotide
uacauaccgaugagaaaag

SEQ ID NO: 304700 - RNA, 19 nt, Artificial Sequence
  Description of Artificial Sequence: Synthetic oligonucleotide
uacaagaaaugaucacugc

SEQ ID NO: 304701 - RNA, 19 nt, Artificial Sequence
  Description of Artificial Sequence: Synthetic oligonucleotide
gaaucagaagugcuuggug

SEQ ID NO: 304702 - RNA, 19 nt, Artificial Sequence
  Description of Artificial Sequence: Synthetic oligonucleotide
ugaaauuguagguuucuuu

SEQ ID NO: 304703 - RNA, 19 nt, Artificial Sequence
  Description of Artificial Sequence: Synthetic oligonucleotide
uuuuaaccgcacagaauca

SEQ ID NO: 304704 - RNA, 19 nt, Artificial Sequence
  Description of Artificial Sequence: Synthetic oligonucleotide
agcaacguagucaucuccc

SEQ ID NO: 304705 - RNA, 19 nt, Artificial Sequence
  Description of Artificial Sequence: Synthetic oligonucleotide
aacccaaacugauugugau

SEQ ID NO: 304706 - RNA, 19 nt, Artificial Sequence
  Description of Artificial Sequence: Synthetic oligonucleotide
ugagcacgguaauuaagag

SEQ ID NO: 304707 - RNA, 19 nt, Artificial Sequence
  Description of Artificial Sequence: Synthetic oligonucleotide
uguacucugcuuacgaaua

SEQ ID NO: 304708 - RNA, 19 nt, Artificial Sequence
  Description of Artificial Sequence: Synthetic oligonucleotide
uuagucaguagauucccaa

SEQ ID NO: 304709 - RNA, 19 nt, Artificial Sequence
  Description of Artificial Sequence: Synthetic oligonucleotide
auacaagaaaugaucacug

SEQ ID NO: 304710 - RNA, 19 nt, Artificial Sequence
  Description of Artificial Sequence: Synthetic oligonucleotide
uacagccuacauuucagug

SEQ ID NO: 304711 - RNA, 19 nt, Artificial Sequence
  Description of Artificial Sequence: Synthetic oligonucleotide
cucccuacauuuuaaccgc

SEQ ID NO: 304712 - RNA, 19 nt, Artificial Sequence
  Description of Artificial Sequence: Synthetic oligonucleotide
aacuacuugcuacagccua

SEQ ID NO: 304713 - RNA, 19 nt, Artificial Sequence
  Description of Artificial Sequence: Synthetic oligonucleotide
ugucaaguacuacuggaau

SEQ ID NO: 304714 - RNA, 19 nt, Artificial Sequence
  Description of Artificial Sequence: Synthetic oligonucleotide
guacauaccgaugagaaaa

SEQ ID NO: 304715 - RNA, 19 nt, Artificial Sequence
  Description of Artificial Sequence: Synthetic oligonucleotide
uuuggcuaaagaugugacu

SEQ ID NO: 304716 - RNA, 19 nt, Artificial Sequence
  Description of Artificial Sequence: Synthetic oligonucleotide
cacagcuuaaugauuaaca

SEQ ID NO: 304717 - RNA, 19 nt, Artificial Sequence
  Description of Artificial Sequence: Synthetic oligonucleotide
ugauauccuacuccguacu

SEQ ID NO: 304718 - RNA, 19 nt, Artificial Sequence
  Description of Artificial Sequence: Synthetic oligonucleotide
ccuuuaagaaagauguuag

SEQ ID NO: 304719 - RNA, 19 nt, Artificial Sequence
  Description of Artificial Sequence: Synthetic oligonucleotide
aaucuagggauccgaggcu

SEQ ID NO: 304720 - RNA, 19 nt, Artificial Sequence
  Description of Artificial Sequence: Synthetic oligonucleotide
uuaaccgcacagaaucaga

SEQ ID NO: 304721 - RNA, 19 nt, Artificial Sequence
  Description of Artificial Sequence: Synthetic oligonucleotide
gagcacgguaauuaagagc

SEQ ID NO: 304722 - RNA, 19 nt, Artificial Sequence
  Description of Artificial Sequence: Synthetic oligonucleotide
ucguggacuguaauaauuc

SEQ ID NO: 304723 - RNA, 19 nt, Artificial Sequence
  Description of Artificial Sequence: Synthetic oligonucleotide
aaccgcacagaaucagaag

SEQ ID NO: 304724 - RNA, 19 nt, Artificial Sequence
  Description of Artificial Sequence: Synthetic oligonucleotide
uugugauugcgucaauuaa

SEQ ID NO: 304725 - RNA, 19 nt, Artificial Sequence
  Description of Artificial Sequence: Synthetic oligonucleotide
auuuggcuaaagaugugac

SEQ ID NO: 304726 - RNA, 19 nt, Artificial Sequence
  Description of Artificial Sequence: Synthetic oligonucleotide
aaaaugcgacacauuaucu

SEQ ID NO: 304727 - RNA, 19 nt, Artificial Sequence
  Description of Artificial Sequence: Synthetic oligonucleotide
auugugauugcgucaauua

SEQ ID NO: 304728 - RNA, 19 nt, Artificial Sequence
  Description of Artificial Sequence: Synthetic oligonucleotide
aaccacugcuuauuaccag

SEQ ID NO: 304729 - RNA, 19 nt, Artificial Sequence
  Description of Artificial Sequence: Synthetic oligonucleotide
uugauauccuacuccguac

SEQ ID NO: 304730 - RNA, 19 nt, Artificial Sequence
  Description of Artificial Sequence: Synthetic oligonucleotide
uguguuccagacucaaaac

SEQ ID NO: 304731 - RNA, 19 nt, Artificial Sequence
  Description of Artificial Sequence: Synthetic oligonucleotide
auuguaaaacuacuugcua

SEQ ID NO: 304732 - RNA, 19 nt, Artificial Sequence
  Description of Artificial Sequence: Synthetic oligonucleotide
aaacguugucauugguuca

SEQ ID NO: 304733 - RNA, 19 nt, Artificial Sequence
  Description of Artificial Sequence: Synthetic oligonucleotide
uuacccauggaccaaucuu

SEQ ID NO: 304734 - RNA, 19 nt, Artificial Sequence
  Description of Artificial Sequence: Synthetic oligonucleotide
gaauaucuguaucaagaaa

SEQ ID NO: 304735 - RNA, 19 nt, Artificial Sequence
  Description of Artificial Sequence: Synthetic oligonucleotide
cagggaaauaaguugccug

SEQ ID NO: 304736 - RNA, 19 nt, Artificial Sequence
  Description of Artificial Sequence: Synthetic oligonucleotide
ucauucuagcaaauagguc

SEQ ID NO: 304737 - RNA, 19 nt, Artificial Sequence
  Description of Artificial Sequence: Synthetic oligonucleotide
acaauuuugauaagcuugu

SEQ ID NO: 304738 - RNA, 19 nt, Artificial Sequence
  Description of Artificial Sequence: Synthetic oligonucleotide
auugcgucaauuaagucaa

SEQ ID NO: 304739 - RNA, 19 nt, Artificial Sequence
  Description of Artificial Sequence: Synthetic oligonucleotide
gucuuuaugcauuaaugaa

SEQ ID NO: 304740 - RNA, 19 nt, Artificial Sequence
  Description of Artificial Sequence: Synthetic oligonucleotide
uucucguggacuguaauaa

SEQ ID NO: 304741 - RNA, 19 nt, Artificial Sequence
  Description of Artificial Sequence: Synthetic oligonucleotide
cauaccgaugagaaaagca

SEQ ID NO: 304742 - RNA, 19 nt, Artificial Sequence
  Description of Artificial Sequence: Synthetic oligonucleotide
gaaaugaucacugcuguua

SEQ ID NO: 304743 - RNA, 19 nt, Artificial Sequence
  Description of Artificial Sequence: Synthetic oligonucleotide
guaacauaagcuuacuuau

SEQ ID NO: 304744 - RNA, 19 nt, Artificial Sequence
  Description of Artificial Sequence: Synthetic oligonucleotide
caauucucaaagaucuauc

SEQ ID NO: 304745 - RNA, 19 nt, Artificial Sequence
  Description of Artificial Sequence: Synthetic oligonucleotide
ugccgauucuuccaacuca

SEQ ID NO: 304746 - RNA, 19 nt, Artificial Sequence
  Description of Artificial Sequence: Synthetic oligonucleotide
gauuuggcuaaagauguga

SEQ ID NO: 304747 - RNA, 19 nt, Artificial Sequence
  Description of Artificial Sequence: Synthetic oligonucleotide
uaaccgcacagaaucagaa

SEQ ID NO: 304748 - RNA, 19 nt, Artificial Sequence
  Description of Artificial Sequence: Synthetic oligonucleotide
caacaaacguugucauugg

SEQ ID NO: 304749 - RNA, 19 nt, Artificial Sequence
  Description of Artificial Sequence: Synthetic oligonucleotide
uagagugcaaagucaaaua

SEQ ID NO: 304750 - RNA, 19 nt, Artificial Sequence
  Description of Artificial Sequence: Synthetic oligonucleotide
ucgacaagcugugaagcag

SEQ ID NO: 304751 - RNA, 19 nt, Artificial Sequence
  Description of Artificial Sequence: Synthetic oligonucleotide
aauucucguggacuguaau

SEQ ID NO: 304752 - RNA, 19 nt, Artificial Sequence
  Description of Artificial Sequence: Synthetic oligonucleotide
agcaauucaaauacuauuu

SEQ ID NO: 304753 - RNA, 19 nt, Artificial Sequence
  Description of Artificial Sequence: Synthetic oligonucleotide
gucaguagauucccaagug

SEQ ID NO: 304754 - RNA, 19 nt, Artificial Sequence
  Description of Artificial Sequence: Synthetic oligonucleotide
aaagugggacuauuuuaau

SEQ ID NO: 304755 - RNA, 19 nt, Artificial Sequence
  Description of Artificial Sequence: Synthetic oligonucleotide
ucaacagaacuuccaucga

SEQ ID NO: 304756 - RNA, 19 nt, Artificial Sequence
  Description of Artificial Sequence: Synthetic oligonucleotide
uucagacuaaaagauuuuc

SEQ ID NO: 304757 - RNA, 19 nt, Artificial Sequence
  Description of Artificial Sequence: Synthetic oligonucleotide
gaaauaaguugccuggccu

SEQ ID NO: 304758 - RNA, 19 nt, Artificial Sequence
  Description of Artificial Sequence: Synthetic oligonucleotide
uuaacagaguucugugaaa

SEQ ID NO: 304759 - RNA, 19 nt, Artificial Sequence
  Description of Artificial Sequence: Synthetic oligonucleotide
ugugaucccaguucuuccu

SEQ ID NO: 304760 - RNA, 19 nt, Artificial Sequence
  Description of Artificial Sequence: Synthetic oligonucleotide
aucuaucuauuaaaaccgg

SEQ ID NO: 304761 - RNA, 19 nt, Artificial Sequence
  Description of Artificial Sequence: Synthetic oligonucleotide
cuaucuauuaaaaccggua

SEQ ID NO: 304762 - RNA, 19 nt, Artificial Sequence
  Description of Artificial Sequence: Synthetic oligonucleotide
auacaacaaacguugucau

SEQ ID NO: 304763 - RNA, 19 nt, Artificial Sequence
  Description of Artificial Sequence: Synthetic oligonucleotide
aacuuaauugugacauaug

SEQ ID NO: 304764 - RNA, 19 nt, Artificial Sequence
  Description of Artificial Sequence: Synthetic oligonucleotide
aucuguacucugcuuacga

SEQ ID NO: 304765 - RNA, 19 nt, Artificial Sequence
  Description of Artificial Sequence: Synthetic oligonucleotide
uacccauggaccaaucuuu

SEQ ID NO: 304766 - RNA, 19 nt, Artificial Sequence
  Description of Artificial Sequence: Synthetic oligonucleotide
agagucaugggaauauucu

SEQ ID NO: 304767 - RNA, 19 nt, Artificial Sequence
  Description of Artificial Sequence: Synthetic oligonucleotide
auugguucaucagcacuac

SEQ ID NO: 304768 - RNA, 19 nt, Artificial Sequence
  Description of Artificial Sequence: Synthetic oligonucleotide
auucuagcaaauaggucag

SEQ ID NO: 304769 - RNA, 19 nt, Artificial Sequence
  Description of Artificial Sequence: Synthetic oligonucleotide
auuaccagcaaaacaagua

SEQ ID NO: 304770 - RNA, 19 nt, Artificial Sequence
  Description of Artificial Sequence: Synthetic oligonucleotide
guaaaacuacuugcuacag

SEQ ID NO: 304771 - RNA, 19 nt, Artificial Sequence
  Description of Artificial Sequence: Synthetic oligonucleotide
gugaacaagucagucuggg

SEQ ID NO: 304772 - RNA, 19 nt, Artificial Sequence
  Description of Artificial Sequence: Synthetic oligonucleotide
agcaaauccaaugcaccag

SEQ ID NO: 304773 - RNA, 19 nt, Artificial Sequence
  Description of Artificial Sequence: Synthetic oligonucleotide
aaggccuccgcucgcccgg

SEQ ID NO: 304774 - RNA, 19 nt, Artificial Sequence
  Description of Artificial Sequence: Synthetic oligonucleotide
aggucaggaggaauauucc

SEQ ID NO: 304775 - RNA, 19 nt, Artificial Sequence
  Description of Artificial Sequence: Synthetic oligonucleotide
auaccgaugagaaaagcaa

SEQ ID NO: 304776 - RNA, 19 nt, Artificial Sequence
  Description of Artificial Sequence: Synthetic oligonucleotide
aaaaccgguaauauacaua

SEQ ID NO: 304777 - RNA, 19 nt, Artificial Sequence
  Description of Artificial Sequence: Synthetic oligonucleotide
auuacccauggaccaaucu

SEQ ID NO: 304778 - RNA, 19 nt, Artificial Sequence
  Description of Artificial Sequence: Synthetic oligonucleotide
gaauauucccacacagcac

SEQ ID NO: 304779 - RNA, 19 nt, Artificial Sequence
  Description of Artificial Sequence: Synthetic oligonucleotide
uaucaguugauggaccauc

SEQ ID NO: 304780 - RNA, 19 nt, Artificial Sequence
  Description of Artificial Sequence: Synthetic oligonucleotide
uuaaugguccagauaccuu

SEQ ID NO: 304781 - RNA, 19 nt, Artificial Sequence
  Description of Artificial Sequence: Synthetic oligonucleotide
uggccuaauuuuaaagcua

SEQ ID NO: 304782 - RNA, 19 nt, Artificial Sequence
  Description of Artificial Sequence: Synthetic oligonucleotide
aaguacuacuggaauacau

SEQ ID NO: 304783 - RNA, 19 nt, Artificial Sequence
  Description of Artificial Sequence: Synthetic oligonucleotide
agacaucccaauucucgug

SEQ ID NO: 304784 - RNA, 19 nt, Artificial Sequence
  Description of Artificial Sequence: Synthetic oligonucleotide
agguaaaacuuaauuguga

SEQ ID NO: 304785 - RNA, 19 nt, Artificial Sequence
  Description of Artificial Sequence: Synthetic oligonucleotide
acuacuugcuacagccuac

SEQ ID NO: 304786 - RNA, 19 nt, Artificial Sequence
  Description of Artificial Sequence: Synthetic oligonucleotide
ggaaauaaguugccuggcc

SEQ ID NO: 304787 - RNA, 19 nt, Artificial Sequence
  Description of Artificial Sequence: Synthetic oligonucleotide
cucaucggcuccaauagca

SEQ ID NO: 304788 - RNA, 19 nt, Artificial Sequence
  Description of Artificial Sequence: Synthetic oligonucleotide
agcuaauuauaaaauccca

SEQ ID NO: 304789 - RNA, 19 nt, Artificial Sequence
  Description of Artificial Sequence: Synthetic oligonucleotide
uacgaauagcauugacaga

SEQ ID NO: 304790 - RNA, 19 nt, Artificial Sequence
  Description of Artificial Sequence: Synthetic oligonucleotide
gcuuauuaccagcaaaaca

SEQ ID NO: 304791 - RNA, 19 nt, Artificial Sequence
  Description of Artificial Sequence: Synthetic oligonucleotide
agccgcguucuucuucugc

SEQ ID NO: 304792 - RNA, 19 nt, Artificial Sequence
  Description of Artificial Sequence: Synthetic oligonucleotide
uugccacacgugaacaagu

SEQ ID NO: 304793 - RNA, 19 nt, Artificial Sequence
  Description of Artificial Sequence: Synthetic oligonucleotide
aauuacccauggaccaauc

SEQ ID NO: 304794 - RNA, 19 nt, Artificial Sequence
  Description of Artificial Sequence: Synthetic oligonucleotide
caacccaugggauguguac

SEQ ID NO: 304795 - RNA, 19 nt, Artificial Sequence
  Description of Artificial Sequence: Synthetic oligonucleotide
gugcaaagucaaauaaacc

SEQ ID NO: 304796 - RNA, 19 nt, Artificial Sequence
  Description of Artificial Sequence: Synthetic oligonucleotide
cagagucaugggaauauuc

SEQ ID NO: 304797 - RNA, 19 nt, Artificial Sequence
  Description of Artificial Sequence: Synthetic oligonucleotide
ucaucagcacuacgagucu

SEQ ID NO: 304798 - RNA, 19 nt, Artificial Sequence
  Description of Artificial Sequence: Synthetic oligonucleotide
ugucucgagcauuugucuc

SEQ ID NO: 304799 - RNA, 19 nt, Artificial Sequence
  Description of Artificial Sequence: Synthetic oligonucleotide
gauauccuacuccguacuc

SEQ ID NO: 304800 - RNA, 19 nt, Artificial Sequence
  Description of Artificial Sequence: Synthetic oligonucleotide
acuacgagucugcaccugu

SEQ ID NO: 304801 - RNA, 19 nt, Artificial Sequence
  Description of Artificial Sequence: Synthetic oligonucleotide
aacguugucauugguucau

SEQ ID NO: 304802 - RNA, 19 nt, Artificial Sequence
  Description of Artificial Sequence: Synthetic oligonucleotide
uucuagggucuuuaucagu

SEQ ID NO: 304803 - RNA, 19 nt, Artificial Sequence
  Description of Artificial Sequence: Synthetic oligonucleotide
gugagcacgguaauuaaga

SEQ ID NO: 304804 - RNA, 19 nt, Artificial Sequence
  Description of Artificial Sequence: Synthetic oligonucleotide
ugcgcagacgcucgacaag

SEQ ID NO: 304805 - RNA, 19 nt, Artificial Sequence
  Description of Artificial Sequence: Synthetic oligonucleotide
uacgagucugcaccugugu

SEQ ID NO: 304806 - RNA, 19 nt, Artificial Sequence
  Description of Artificial Sequence: Synthetic oligonucleotide
agguacauaccgaugagaa

SEQ ID NO: 304807 - RNA, 19 nt, Artificial Sequence
  Description of Artificial Sequence: Synthetic oligonucleotide
agaaucagaagugcuuggu

SEQ ID NO: 304808 - RNA, 19 nt, Artificial Sequence
  Description of Artificial Sequence: Synthetic oligonucleotide
gucaugggaauauucuuaa

SEQ ID NO: 304809 - RNA, 19 nt, Artificial Sequence
  Description of Artificial Sequence: Synthetic oligonucleotide
auucucguggacuguaaua

SEQ ID NO: 304810 - RNA, 19 nt, Artificial Sequence
  Description of Artificial Sequence: Synthetic oligonucleotide
uacuacuggaauacauauu

SEQ ID NO: 304811 - RNA, 19 nt, Artificial Sequence
  Description of Artificial Sequence: Synthetic oligonucleotide
ugcgacacauuaucuaauu

SEQ ID NO: 304812 - RNA, 19 nt, Artificial Sequence
  Description of Artificial Sequence: Synthetic oligonucleotide
aagcuaugugaaaaccacu

SEQ ID NO: 304813 - RNA, 19 nt, Artificial Sequence
  Description of Artificial Sequence: Synthetic oligonucleotide
gcaaauccaaugcaccagc

SEQ ID NO: 304814 - RNA, 19 nt, Artificial Sequence
  Description of Artificial Sequence: Synthetic oligonucleotide
cuuaguccuuagucaguag

SEQ ID NO: 304815 - RNA, 19 nt, Artificial Sequence
  Description of Artificial Sequence: Synthetic oligonucleotide
cacggaacgccuuuaagaa

SEQ ID NO: 304816 - RNA, 19 nt, Artificial Sequence
  Description of Artificial Sequence: Synthetic oligonucleotide
auauccuacuccguacucu

SEQ ID NO: 304817 - RNA, 19 nt, Artificial Sequence
  Description of Artificial Sequence: Synthetic oligonucleotide
agagcaauucaaauacuau

SEQ ID NO: 304818 - RNA, 19 nt, Artificial Sequence
  Description of Artificial Sequence: Synthetic oligonucleotide
uugccgauucuuccaacuc

SEQ ID NO: 304819 - RNA, 19 nt, Artificial Sequence
  Description of Artificial Sequence: Synthetic oligonucleotide
cccaaacugauugugauug

SEQ ID NO: 304820 - RNA, 19 nt, Artificial Sequence
  Description of Artificial Sequence: Synthetic oligonucleotide
aguacuacuggaauacaua

SEQ ID NO: 304821 - RNA, 19 nt, Artificial Sequence
  Description of Artificial Sequence: Synthetic oligonucleotide
accacggaacgccuuuaag

SEQ ID NO: 304822 - RNA, 19 nt, Artificial Sequence
  Description of Artificial Sequence: Synthetic oligonucleotide
cuuaaugauuaacacaguu

SEQ ID NO: 304823 - RNA, 19 nt, Artificial Sequence
  Description of Artificial Sequence: Synthetic oligonucleotide
acauaagugucucgagcau

SEQ ID NO: 304824 - RNA, 19 nt, Artificial Sequence
  Description of Artificial Sequence: Synthetic oligonucleotide
ugauugcgucaauuaaguc

SEQ ID NO: 304825 - RNA, 19 nt, Artificial Sequence
  Description of Artificial Sequence: Synthetic oligonucleotide
caaugcaccagccgcguuc

SEQ ID NO: 304826 - RNA, 19 nt, Artificial Sequence
  Description of Artificial Sequence: Synthetic oligonucleotide
uugugagcacgguaauuaa

SEQ ID NO: 304827 - RNA, 19 nt, Artificial Sequence
  Description of Artificial Sequence: Synthetic oligonucleotide
cuagggucuuuaucaguug

SEQ ID NO: 304828 - RNA, 19 nt, Artificial Sequence
  Description of Artificial Sequence: Synthetic oligonucleotide
gucaaguacuacuggaaua

SEQ ID NO: 304829 - RNA, 19 nt, Artificial Sequence
  Description of Artificial Sequence: Synthetic oligonucleotide
gcgucaauuaagucaauuc

SEQ ID NO: 304830 - RNA, 19 nt, Artificial Sequence
  Description of Artificial Sequence: Synthetic oligonucleotide
acucugcuuacgaauagca

SEQ ID NO: 304831 - RNA, 19 nt, Artificial Sequence
  Description of Artificial Sequence: Synthetic oligonucleotide
uucuagcaaauaggucagg

SEQ ID NO: 304832 - RNA, 19 nt, Artificial Sequence
  Description of Artificial Sequence: Synthetic oligonucleotide
aacaaguaggacacacuua

SEQ ID NO: 304833 - RNA, 19 nt, Artificial Sequence
  Description of Artificial Sequence: Synthetic oligonucleotide
cgguaauauacauaaauga

SEQ ID NO: 304834 - RNA, 19 nt, Artificial Sequence
  Description of Artificial Sequence: Synthetic oligonucleotide
uacaacaaacguugucauu

SEQ ID NO: 304835 - RNA, 19 nt, Artificial Sequence
  Description of Artificial Sequence: Synthetic oligonucleotide
cuggccuaauuuuaaagcu

SEQ ID NO: 304836 - RNA, 19 nt, Artificial Sequence
  Description of Artificial Sequence: Synthetic oligonucleotide
uccuacuccguacucuguu

SEQ ID NO: 304837 - RNA, 19 nt, Artificial Sequence
  Description of Artificial Sequence: Synthetic oligonucleotide
cggaacgccuuuaagaaag

SEQ ID NO: 304838 - RNA, 19 nt, Artificial Sequence
  Description of Artificial Sequence: Synthetic oligonucleotide
cagcaaauccaaugcacca

SEQ ID NO: 304839 - RNA, 19 nt, Artificial Sequence
  Description of Artificial Sequence: Synthetic oligonucleotide
cugcuguuagucacagaug

SEQ ID NO: 304840 - RNA, 19 nt, Artificial Sequence
  Description of Artificial Sequence: Synthetic oligonucleotide
uagcauugacagacauccc

SEQ ID NO: 304841 - RNA, 19 nt, Artificial Sequence
  Description of Artificial Sequence: Synthetic oligonucleotide
ucccuacauuuuaaccgca

SEQ ID NO: 304842 - RNA, 19 nt, Artificial Sequence
  Description of Artificial Sequence: Synthetic oligonucleotide
augggauguguacuguuua

SEQ ID NO: 304843 - RNA, 19 nt, Artificial Sequence
  Description of Artificial Sequence: Synthetic oligonucleotide
gcaacguagucaucucccg

SEQ ID NO: 304844 - RNA, 19 nt, Artificial Sequence
  Description of Artificial Sequence: Synthetic oligonucleotide
uuccguauuucuugauaua

SEQ ID NO: 304845 - RNA, 19 nt, Artificial Sequence
  Description of Artificial Sequence: Synthetic oligonucleotide
augagugauuuggcuaaag

SEQ ID NO: 304846 - RNA, 19 nt, Artificial Sequence
  Description of Artificial Sequence: Synthetic oligonucleotide
cacuuaaacaaagguaaaa

SEQ ID NO: 304847 - RNA, 19 nt, Artificial Sequence
  Description of Artificial Sequence: Synthetic oligonucleotide
ucucguggacuguaauaau

SEQ ID NO: 304848 - RNA, 19 nt, Artificial Sequence
  Description of Artificial Sequence: Synthetic oligonucleotide
cagaguucugugaaacuaa

SEQ ID NO: 304849 - RNA, 19 nt, Artificial Sequence
  Description of Artificial Sequence: Synthetic oligonucleotide
ucagggcuauucugugaug

SEQ ID NO: 304850 - RNA, 19 nt, Artificial Sequence
  Description of Artificial Sequence: Synthetic oligonucleotide
ugcgucaauuaagucaauu

SEQ ID NO: 304851 - RNA, 19 nt, Artificial Sequence
  Description of Artificial Sequence: Synthetic oligonucleotide
cuguaucaagaaagcuaug

SEQ ID NO: 304852 - RNA, 19 nt, Artificial Sequence
  Description of Artificial Sequence: Synthetic oligonucleotide
cuacgagucugcaccugug

SEQ ID NO: 304853 - RNA, 19 nt, Artificial Sequence
  Description of Artificial Sequence: Synthetic oligonucleotide
uuaucaguugauggaccau

SEQ ID NO: 304854 - RNA, 19 nt, Artificial Sequence
  Description of Artificial Sequence: Synthetic oligonucleotide
acuuaaaagugggacuauu

SEQ ID NO: 304855 - RNA, 19 nt, Artificial Sequence
  Description of Artificial Sequence: Synthetic oligonucleotide
cugauugugauugcgucaa

SEQ ID NO: 304856 - RNA, 19 nt, Artificial Sequence
  Description of Artificial Sequence: Synthetic oligonucleotide
cuccaauagcaacguaguc

SEQ ID NO: 304857 - RNA, 19 nt, Artificial Sequence
  Description of Artificial Sequence: Synthetic oligonucleotide
cauuugcagggaaauaagu

SEQ ID NO: 304858 - RNA, 19 nt, Artificial Sequence
  Description of Artificial Sequence: Synthetic oligonucleotide
ugcgaaucaccucguccuc

SEQ ID NO: 304859 - RNA, 19 nt, Artificial Sequence
  Description of Artificial Sequence: Synthetic oligonucleotide
gugauugcgucaauuaagu

SEQ ID NO: 304860 - RNA, 19 nt, Artificial Sequence
  Description of Artificial Sequence: Synthetic oligonucleotide
cucgacaagcugugaagca

SEQ ID NO: 304861 - RNA, 19 nt, Artificial Sequence
  Description of Artificial Sequence: Synthetic oligonucleotide
cugggucccaccugucuug

SEQ ID NO: 304862 - RNA, 19 nt, Artificial Sequence
  Description of Artificial Sequence: Synthetic oligonucleotide
uagucaucucccguccgga

SEQ ID NO: 304863 - RNA, 19 nt, Artificial Sequence
  Description of Artificial Sequence: Synthetic oligonucleotide
ucggcuccaauagcaacgu

SEQ ID NO: 304864 - RNA, 19 nt, Artificial Sequence
  Description of Artificial Sequence: Synthetic oligonucleotide
uaugccugugaguggcuuu

SEQ ID NO: 304865 - RNA, 19 nt, Artificial Sequence
  Description of Artificial Sequence: Synthetic oligonucleotide
cuagaaacuuuaacagagu

SEQ ID NO: 304866 - RNA, 19 nt, Artificial Sequence
  Description of Artificial Sequence: Synthetic oligonucleotide
acggaacgccuuuaagaaa

SEQ ID NO: 304867 - RNA, 19 nt, Artificial Sequence
  Description of Artificial Sequence: Synthetic oligonucleotide
ccuuagucaguagauuccc

SEQ ID NO: 304868 - RNA, 19 nt, Artificial Sequence
  Description of Artificial Sequence: Synthetic oligonucleotide
gcaaaucuagggauccgag

SEQ ID NO: 304869 - RNA, 19 nt, Artificial Sequence
  Description of Artificial Sequence: Synthetic oligonucleotide
acgcucgacaagcugugaa

SEQ ID NO: 304870 - RNA, 19 nt, Artificial Sequence
  Description of Artificial Sequence: Synthetic oligonucleotide
ggaggaauauucccacaca

SEQ ID NO: 304871 - RNA, 19 nt, Artificial Sequence
  Description of Artificial Sequence: Synthetic oligonucleotide
agcacagcuuaaugauuaa

SEQ ID NO: 304872 - RNA, 19 nt, Artificial Sequence
  Description of Artificial Sequence: Synthetic oligonucleotide
acccaaacugauugugauu

SEQ ID NO: 304873 - RNA, 19 nt, Artificial Sequence
  Description of Artificial Sequence: Synthetic oligonucleotide
acgagucugcaccugugua

SEQ ID NO: 304874 - RNA, 19 nt, Artificial Sequence
  Description of Artificial Sequence: Synthetic oligonucleotide
cagggcuauucugugauga

SEQ ID NO: 304875 - RNA, 19 nt, Artificial Sequence
  Description of Artificial Sequence: Synthetic oligonucleotide
ugcuuacgaauagcauuga

SEQ ID NO: 304876 - RNA, 19 nt, Artificial Sequence
  Description of Artificial Sequence: Synthetic oligonucleotide
uacuugcuacagccuacau

SEQ ID NO: 304877 - RNA, 19 nt, Artificial Sequence
  Description of Artificial Sequence: Synthetic oligonucleotide
uccuuccuagcaugucuuc

SEQ ID NO: 304878 - RNA, 19 nt, Artificial Sequence
  Description of Artificial Sequence: Synthetic oligonucleotide
aguccuuagucaguagauu

SEQ ID NO: 304879 - RNA, 19 nt, Artificial Sequence
  Description of Artificial Sequence: Synthetic oligonucleotide
gcuuacgaauagcauugac

SEQ ID NO: 304880 - RNA, 19 nt, Artificial Sequence
  Description of Artificial Sequence: Synthetic oligonucleotide
gauggaccaucuaauaauu

SEQ ID NO: 304881 - RNA, 19 nt, Artificial Sequence
  Description of Artificial Sequence: Synthetic oligonucleotide
agggcuauucugugaugaa

SEQ ID NO: 304882 - RNA, 19 nt, Artificial Sequence
  Description of Artificial Sequence: Synthetic oligonucleotide
gcucgacaagcugugaagc

SEQ ID NO: 304883 - RNA, 19 nt, Artificial Sequence
  Description of Artificial Sequence: Synthetic oligonucleotide
ccacggaacgccuuuaaga

SEQ ID NO: 304884 - RNA, 19 nt, Artificial Sequence
  Description of Artificial Sequence: Synthetic oligonucleotide
cacgugaacaagucagucu

SEQ ID NO: 304885 - RNA, 19 nt, Artificial Sequence
  Description of Artificial Sequence: Synthetic oligonucleotide
uugcuacagccuacauuuc

SEQ ID NO: 304886 - RNA, 19 nt, Artificial Sequence
  Description of Artificial Sequence: Synthetic oligonucleotide
ugauugugauugcgucaau

SEQ ID NO: 304887 - RNA, 19 nt, Artificial Sequence
  Description of Artificial Sequence: Synthetic oligonucleotide
cuugccgauucuuccaacu

SEQ ID NO: 304888 - RNA, 19 nt, Artificial Sequence
  Description of Artificial Sequence: Synthetic oligonucleotide
cagacgcucgacaagcugu

SEQ ID NO: 304889 - RNA, 19 nt, Artificial Sequence
  Description of Artificial Sequence: Synthetic oligonucleotide
cuagggauccgaggcuuug

SEQ ID NO: 304890 - RNA, 19 nt, Artificial Sequence
  Description of Artificial Sequence: Synthetic oligonucleotide
gguacauaccgaugagaaa

SEQ ID NO: 304891 - RNA, 19 nt, Artificial Sequence
  Description of Artificial Sequence: Synthetic oligonucleotide
caaugcgaaucaccucguc

SEQ ID NO: 304892 - RNA, 19 nt, Artificial Sequence
  Description of Artificial Sequence: Synthetic oligonucleotide
ggccuaauuuuaaagcuaa

SEQ ID NO: 304893 - RNA, 19 nt, Artificial Sequence
  Description of Artificial Sequence: Synthetic oligonucleotide
gcgacacauuaucuaauuc

SEQ ID NO: 304894 - RNA, 19 nt, Artificial Sequence
  Description of Artificial Sequence: Synthetic oligonucleotide
aucuagggauccgaggcuu

SEQ ID NO: 304895 - RNA, 19 nt, Artificial Sequence
  Description of Artificial Sequence: Synthetic oligonucleotide
aaccaacccaugggaugug

SEQ ID NO: 304896 - RNA, 19 nt, Artificial Sequence
  Description of Artificial Sequence: Synthetic oligonucleotide
gugucucgagcauuugucu

SEQ ID NO: 304897 - RNA, 19 nt, Artificial Sequence
  Description of Artificial Sequence: Synthetic oligonucleotide
gauugugauugcgucaauu

SEQ ID NO: 304898 - RNA, 19 nt, Artificial Sequence
  Description of Artificial Sequence: Synthetic oligonucleotide
agacgcucgacaagcugug

SEQ ID NO: 304899 - RNA, 19 nt, Artificial Sequence
  Description of Artificial Sequence: Synthetic oligonucleotide
uagggauccgaggcuuugu

SEQ ID NO: 304900 - RNA, 19 nt, Artificial Sequence
  Description of Artificial Sequence: Synthetic oligonucleotide
caauagcaacguagucauc

SEQ ID NO: 304901 - RNA, 19 nt, Artificial Sequence
  Description of Artificial Sequence: Synthetic oligonucleotide
aaaccacggaacgccuuua

SEQ ID NO: 304902 - RNA, 19 nt, Artificial Sequence
  Description of Artificial Sequence: Synthetic oligonucleotide
gcugaacugaaaccacgga

SEQ ID NO: 304903 - RNA, 19 nt, Artificial Sequence
  Description of Artificial Sequence: Synthetic oligonucleotide
cuacuugcuacagccuaca

SEQ ID NO: 304904 - RNA, 19 nt, Artificial Sequence
  Description of Artificial Sequence: Synthetic oligonucleotide
agucugcaccuguguauaa

SEQ ID NO: 304905 - RNA, 19 nt, Artificial Sequence
  Description of Artificial Sequence: Synthetic oligonucleotide
aaccgguaauauacauaaa

SEQ ID NO: 304906 - RNA, 19 nt, Artificial Sequence
  Description of Artificial Sequence: Synthetic oligonucleotide
caaguaggacacacuuaaa

SEQ ID NO: 304907 - RNA, 19 nt, Artificial Sequence
  Description of Artificial Sequence: Synthetic oligonucleotide
cucguggacuguaauaauu

SEQ ID NO: 304908 - RNA, 19 nt, Artificial Sequence
  Description of Artificial Sequence: Synthetic oligonucleotide
uggccaucugaugcucucu

SEQ ID NO: 304909 - RNA, 19 nt, Artificial Sequence
  Description of Artificial Sequence: Synthetic oligonucleotide
caauucucguggacuguaa

SEQ ID NO: 304910 - RNA, 19 nt, Artificial Sequence
  Description of Artificial Sequence: Synthetic oligonucleotide
agccuacauuucagugggc

SEQ ID NO: 304911 - RNA, 19 nt, Artificial Sequence
  Description of Artificial Sequence: Synthetic oligonucleotide
gaugagugauuuggcuaaa

SEQ ID NO: 304912 - RNA, 19 nt, Artificial Sequence
  Description of Artificial Sequence: Synthetic oligonucleotide
cgucaauuaagucaauucu

SEQ ID NO: 304913 - RNA, 19 nt, Artificial Sequence
  Description of Artificial Sequence: Synthetic oligonucleotide
augcgacacauuaucuaau

SEQ ID NO: 304914 - RNA, 19 nt, Artificial Sequence
  Description of Artificial Sequence: Synthetic oligonucleotide
cccuacauuuuaaccgcac

SEQ ID NO: 304915 - RNA, 19 nt, Artificial Sequence
  Description of Artificial Sequence: Synthetic oligonucleotide
agcuagcaucucccuacau

SEQ ID NO: 304916 - RNA, 19 nt, Artificial Sequence
  Description of Artificial Sequence: Synthetic oligonucleotide
auggaccaucuaauaauuu

SEQ ID NO: 304917 - RNA, 19 nt, Artificial Sequence
  Description of Artificial Sequence: Synthetic oligonucleotide
cagaaguaugccugugagu

SEQ ID NO: 304918 - RNA, 19 nt, Artificial Sequence
  Description of Artificial Sequence: Synthetic oligonucleotide
gccgcguucuucuucugca

SEQ ID NO: 304919 - RNA, 19 nt, Artificial Sequence
  Description of Artificial Sequence: Synthetic oligonucleotide
gcgcagacgcucgacaagc

SEQ ID NO: 304920 - RNA, 19 nt, Artificial Sequence
  Description of Artificial Sequence: Synthetic oligonucleotide
accaacccaugggaugugu

SEQ ID NO: 304921 - RNA, 19 nt, Artificial Sequence
  Description of Artificial Sequence: Synthetic oligonucleotide
caugggauguguacuguuu

SEQ ID NO: 304922 - RNA, 19 nt, Artificial Sequence
  Description of Artificial Sequence: Synthetic oligonucleotide
caucgauuuccacauucau

SEQ ID NO: 304923 - RNA, 19 nt, Artificial Sequence
  Description of Artificial Sequence: Synthetic oligonucleotide
cuuaggcuuaguccuuagu

SEQ ID NO: 304924 - RNA, 19 nt, Artificial Sequence
  Description of Artificial Sequence: Synthetic oligonucleotide
gccacacgugaacaaguca

SEQ ID NO: 304925 - RNA, 19 nt, Artificial Sequence
  Description of Artificial Sequence: Synthetic oligonucleotide
uugcgucaauuaagucaau

SEQ ID NO: 304926 - RNA, 19 nt, Artificial Sequence
  Description of Artificial Sequence: Synthetic oligonucleotide
gaucccaguucuuccucau

SEQ ID NO: 304927 - RNA, 19 nt, Artificial Sequence
  Description of Artificial Sequence: Synthetic oligonucleotide
gcuuacauugcugcuggaa

SEQ ID NO: 304928 - RNA, 19 nt, Artificial Sequence
  Description of Artificial Sequence: Synthetic oligonucleotide
ggccgcagcggacgggagg

SEQ ID NO: 304929 - RNA, 19 nt, Artificial Sequence
  Description of Artificial Sequence: Synthetic oligonucleotide
cacuacgagucugcaccug

SEQ ID NO: 304930 - RNA, 19 nt, Artificial Sequence
  Description of Artificial Sequence: Synthetic oligonucleotide
gcuuaguccuuagucagua

SEQ ID NO: 304931 - RNA, 19 nt, Artificial Sequence
  Description of Artificial Sequence: Synthetic oligonucleotide
cacugcuuauuaccagcaa

SEQ ID NO: 304932 - RNA, 19 nt, Artificial Sequence
  Description of Artificial Sequence: Synthetic oligonucleotide
aguaugccugugaguggcu

SEQ ID NO: 304933 - RNA, 19 nt, Artificial Sequence
  Description of Artificial Sequence: Synthetic oligonucleotide
gcgaaucaccucguccucc

SEQ ID NO: 304934 - RNA, 19 nt, Artificial Sequence
  Description of Artificial Sequence: Synthetic oligonucleotide
cucaaucugugaucccagu

SEQ ID NO: 304935 - RNA, 19 nt, Artificial Sequence
  Description of Artificial Sequence: Synthetic oligonucleotide
caacguagucaucucccgu

SEQ ID NO: 304936 - RNA, 19 nt, Artificial Sequence
  Description of Artificial Sequence: Synthetic oligonucleotide
gggcuauucugugaugaaa

SEQ ID NO: 304937 - RNA, 19 nt, Artificial Sequence
  Description of Artificial Sequence: Synthetic oligonucleotide
gccaccaaguggccuuuac

SEQ ID NO: 304938 - RNA, 19 nt, Artificial Sequence
  Description of Artificial Sequence: Synthetic oligonucleotide
gccgcagcggacgggaggc

SEQ ID NO: 304939 - RNA, 19 nt, Artificial Sequence
  Description of Artificial Sequence: Synthetic oligonucleotide
gaggcuuugugagcacggu

SEQ ID NO: 304940 - RNA, 19 nt, Artificial Sequence
  Description of Artificial Sequence: Synthetic oligonucleotide
gcuguuagucacagaugca

SEQ ID NO: 304941 - RNA, 19 nt, Artificial Sequence
  Description of Artificial Sequence: Synthetic oligonucleotide
gccgauucuuccaacucaa

SEQ ID NO: 304942 - RNA, 19 nt, Artificial Sequence
  Description of Artificial Sequence: Synthetic oligonucleotide
gacgcucgacaagcuguga

SEQ ID NO: 304943 - RNA, 19 nt, Artificial Sequence
  Description of Artificial Sequence: Synthetic oligonucleotide
cuacuccguacucuguuuu

SEQ ID NO: 304944 - RNA, 19 nt, Artificial Sequence
  Description of Artificial Sequence: Synthetic oligonucleotide
gcugucauucuagcaaaua

SEQ ID NO: 304945 - RNA, 19 nt, Artificial Sequence
  Description of Artificial Sequence: Synthetic oligonucleotide
gugcaaguccagucaugcu

SEQ ID NO: 304946 - RNA, 19 nt, Artificial Sequence
  Description of Artificial Sequence: Synthetic oligonucleotide
ccguccggagagcugcagc

SEQ ID NO: 304947 - RNA, 19 nt, Artificial Sequence
  Description of Artificial Sequence: Synthetic oligonucleotide
gugcuuggugcccgaggaa

SEQ ID NO: 304948 - RNA, 19 nt, Artificial Sequence
  Description of Artificial Sequence: Synthetic oligonucleotide
agcggacgggaggcgggag

SEQ ID NO: 304949 - RNA, 19 nt, Artificial Sequence
  Description of Artificial Sequence: Synthetic oligonucleotide
ggaacgccuuuaagaaaga

SEQ ID NO: 304950 - RNA, 19 nt, Artificial Sequence
  Description of Artificial Sequence: Synthetic oligonucleotide
ucgcccggccgcagcggac

SEQ ID NO: 304951 - RNA, 19 nt, Artificial Sequence
  Description of Artificial Sequence: Synthetic oligonucleotide
gcagggaaauaaguugccu

SEQ ID NO: 304952 - RNA, 19 nt, Artificial Sequence
  Description of Artificial Sequence: Synthetic oligonucleotide
gcuuaaugauuaacacagu

SEQ ID NO: 304953 - RNA, 19 nt, Artificial Sequence
  Description of Artificial Sequence: Synthetic oligonucleotide
cagccgcguucuucuucug

SEQ ID NO: 304954 - RNA, 19 nt, Artificial Sequence
  Description of Artificial Sequence: Synthetic oligonucleotide
cacuuaaaagugggacuau

SEQ ID NO: 304955 - RNA, 19 nt, Artificial Sequence
  Description of Artificial Sequence: Synthetic oligonucleotide
ccaauucucguggacugua

SEQ ID NO: 304956 - RNA, 19 nt, Artificial Sequence
  Description of Artificial Sequence: Synthetic oligonucleotide
guaugccugugaguggcuu

SEQ ID NO: 304957 - RNA, 19 nt, Artificial Sequence
  Description of Artificial Sequence: Synthetic oligonucleotide
gcacuacgagucugcaccu

SEQ ID NO: 304958 - RNA, 19 nt, Artificial Sequence
  Description of Artificial Sequence: Synthetic oligonucleotide
ggacgggaggcgggagaag

SEQ ID NO: 304959 - RNA, 19 nt, Artificial Sequence
  Description of Artificial Sequence: Synthetic oligonucleotide
gggguugagacagggguuu

SEQ ID NO: 304960 - RNA, 19 nt, Artificial Sequence
  Description of Artificial Sequence: Synthetic oligonucleotide
agcagacggccuaggccuu

SEQ ID NO: 304961 - RNA, 19 nt, Artificial Sequence
  Description of Artificial Sequence: Synthetic oligonucleotide
ggcuuaguccuuagucagu

SEQ ID NO: 304962 - RNA, 19 nt, Artificial Sequence
  Description of Artificial Sequence: Synthetic oligonucleotide
ccuuccuagcaugucuucu

SEQ ID NO: 304963 - RNA, 19 nt, Artificial Sequence
  Description of Artificial Sequence: Synthetic oligonucleotide
gcaaugcgaaucaccucgu

SEQ ID NO: 304964 - RNA, 19 nt, Artificial Sequence
  Description of Artificial Sequence: Synthetic oligonucleotide
cgagucugcaccuguguau

SEQ ID NO: 304965 - RNA, 19 nt, Artificial Sequence
  Description of Artificial Sequence: Synthetic oligonucleotide
gcccggccgcagcggacgg

SEQ ID NO: 304966 - RNA, 19 nt, Artificial Sequence
  Description of Artificial Sequence: Synthetic oligonucleotide
cagcggacgggaggcggga

SEQ ID NO: 304967 - RNA, 19 nt, Artificial Sequence
  Description of Artificial Sequence: Synthetic oligonucleotide
ccuacuccguacucuguuu

SEQ ID NO: 304968 - RNA, 19 nt, Artificial Sequence
  Description of Artificial Sequence: Synthetic oligonucleotide
cccguccggagagcugcag

SEQ ID NO: 304969 - RNA, 19 nt, Artificial Sequence
  Description of Artificial Sequence: Synthetic oligonucleotide
ccggccgcagcggacggga

SEQ ID NO: 304970 - RNA, 19 nt, Artificial Sequence
  Description of Artificial Sequence: Synthetic oligonucleotide
caccagccgcguucuucuu

SEQ ID NO: 304971 - RNA, 19 nt, Artificial Sequence
  Description of Artificial Sequence: Synthetic oligonucleotide
cggccgcagcggacgggag

SEQ ID NO: 304972 - RNA, 19 nt, Artificial Sequence
  Description of Artificial Sequence: Synthetic oligonucleotide
aaaacuacaacguugagac

SEQ ID NO: 304973 - RNA, 19 nt, Artificial Sequence
  Description of Artificial Sequence: Synthetic oligonucleotide
aacaggauuauuaagauuc

SEQ ID NO: 304974 - RNA, 19 nt, Artificial Sequence
  Description of Artificial Sequence: Synthetic oligonucleotide
uauaacaggauuauuaaga

SEQ ID NO: 304975 - RNA, 19 nt, Artificial Sequence
  Description of Artificial Sequence: Synthetic oligonucleotide
gaucuaacaguccaaaugg

SEQ ID NO: 304976 - RNA, 19 nt, Artificial Sequence
  Description of Artificial Sequence: Synthetic oligonucleotide
ugcucuuaagaauaaaucg

SEQ ID NO: 304977 - RNA, 19 nt, Artificial Sequence
  Description of Artificial Sequence: Synthetic oligonucleotide
aacuacaacguugagaccg

SEQ ID NO: 304978 - RNA, 19 nt, Artificial Sequence
  Description of Artificial Sequence: Synthetic oligonucleotide
uuacauauaagcuuguugu

SEQ ID NO: 304979 - RNA, 19 nt, Artificial Sequence
  Description of Artificial Sequence: Synthetic oligonucleotide
aaaugcgaagccgagaggc

SEQ ID NO: 304980 - RNA, 19 nt, Artificial Sequence
  Description of Artificial Sequence: Synthetic oligonucleotide
uaaaaugcgaagccgagag

SEQ ID NO: 304981 - RNA, 19 nt, Artificial Sequence
  Description of Artificial Sequence: Synthetic oligonucleotide
aaauagaucuaacagucca

SEQ ID NO: 304982 - RNA, 19 nt, Artificial Sequence
  Description of Artificial Sequence: Synthetic oligonucleotide
aacaacauacagugcaucg

SEQ ID NO: 304983 - RNA, 19 nt, Artificial Sequence
  Description of Artificial Sequence: Synthetic oligonucleotide
aauacgauucuuaaaaucu

SEQ ID NO: 304984 - RNA, 19 nt, Artificial Sequence
  Description of Artificial Sequence: Synthetic oligonucleotide
uauuagaucacuuggauuu

SEQ ID NO: 304985 - RNA, 19 nt, Artificial Sequence
  Description of Artificial Sequence: Synthetic oligonucleotide
aauaaugaccuucacuccu

SEQ ID NO: 304986 - RNA, 19 nt, Artificial Sequence
  Description of Artificial Sequence: Synthetic oligonucleotide
aaaucgguauacuucauga

SEQ ID NO: 304987 - RNA, 19 nt, Artificial Sequence
  Description of Artificial Sequence: Synthetic oligonucleotide
ucagcuacuaccaugcaug

SEQ ID NO: 304988 - RNA, 19 nt, Artificial Sequence
  Description of Artificial Sequence: Synthetic oligonucleotide
uuauuaagauuccaguaug

SEQ ID NO: 304989 - RNA, 19 nt, Artificial Sequence
  Description of Artificial Sequence: Synthetic oligonucleotide
gagguuucuaugucgaugg

SEQ ID NO: 304990 - RNA, 19 nt, Artificial Sequence
  Description of Artificial Sequence: Synthetic oligonucleotide
ucugacauaaguacaauau

SEQ ID NO: 304991 - RNA, 19 nt, Artificial Sequence
  Description of Artificial Sequence: Synthetic oligonucleotide
uacaauauuagaucacuug

SEQ ID NO: 304992 - RNA, 19 nt, Artificial Sequence
  Description of Artificial Sequence: Synthetic oligonucleotide
agaucuaacaguccaaaug

SEQ ID NO: 304993 - RNA, 19 nt, Artificial Sequence
  Description of Artificial Sequence: Synthetic oligonucleotide
uacuucaugaagaagaauu

SEQ ID NO: 304994 - RNA, 19 nt, Artificial Sequence
  Description of Artificial Sequence: Synthetic oligonucleotide
aggcacguaacuaaaaugc

SEQ ID NO: 304995 - RNA, 19 nt, Artificial Sequence
  Description of Artificial Sequence: Synthetic oligonucleotide
uggauaagaccuuaggaug

SEQ ID NO: 304996 - RNA, 19 nt, Artificial Sequence
  Description of Artificial Sequence: Synthetic oligonucleotide
agugggaauaaauaaucag

SEQ ID NO: 304997 - RNA, 19 nt, Artificial Sequence
  Description of Artificial Sequence: Synthetic oligonucleotide
uguugcuaaaccucuggcg

SEQ ID NO: 304998 - RNA, 19 nt, Artificial Sequence
  Description of Artificial Sequence: Synthetic oligonucleotide
aacauuaaucucugauuag

SEQ ID NO: 304999 - RNA, 19 nt, Artificial Sequence
  Description of Artificial Sequence: Synthetic oligonucleotide
ucuacugugaaccuucauc

SEQ ID NO: 305000 - RNA, 19 nt, Artificial Sequence
  Description of Artificial Sequence: Synthetic oligonucleotide
aaguaacguucuuacugcc

SEQ ID NO: 305001 - RNA, 19 nt, Artificial Sequence
  Description of Artificial Sequence: Synthetic oligonucleotide
uugaaagccccuaagcccc

SEQ ID NO: 305002 - RNA, 19 nt, Artificial Sequence
  Description of Artificial Sequence: Synthetic oligonucleotide
aucgguauacuucaugaag

SEQ ID NO: 305003 - RNA, 19 nt, Artificial Sequence
  Description of Artificial Sequence: Synthetic oligonucleotide
aauaaucaggaaauuauau

SEQ ID NO: 305004 - RNA, 19 nt, Artificial Sequence
  Description of Artificial Sequence: Synthetic oligonucleotide
ucgguauacuucaugaaga

SEQ ID NO: 305005 - RNA, 19 nt, Artificial Sequence
  Description of Artificial Sequence: Synthetic oligonucleotide
uuaaucucugauuagucau

SEQ ID NO: 305006 - RNA, 19 nt, Artificial Sequence
  Description of Artificial Sequence: Synthetic oligonucleotide
uaaaacuacaacguugaga

SEQ ID NO: 305007 - RNA, 19 nt, Artificial Sequence
  Description of Artificial Sequence: Synthetic oligonucleotide
agaugugagucuccgaggg

SEQ ID NO: 305008 - RNA, 19 nt, Artificial Sequence
  Description of Artificial Sequence: Synthetic oligonucleotide
auuaaucucugauuaguca

SEQ ID NO: 305009 - RNA, 19 nt, Artificial Sequence
  Description of Artificial Sequence: Synthetic oligonucleotide
uaauacgauucuuaaaauc

SEQ ID NO: 305010 - RNA, 19 nt, Artificial Sequence
  Description of Artificial Sequence: Synthetic oligonucleotide
cuaacaguccaaauggcac

SEQ ID NO: 305011 - RNA, 19 nt, Artificial Sequence
  Description of Artificial Sequence: Synthetic oligonucleotide
ugauucauaaaccucucua

SEQ ID NO: 305012 - RNA, 19 nt, Artificial Sequence
  Description of Artificial Sequence: Synthetic oligonucleotide
aacuuaccaaguaacguuc

SEQ ID NO: 305013 - RNA, 19 nt, Artificial Sequence
  Description of Artificial Sequence: Synthetic oligonucleotide
ucuggcgccaaguaguaag

SEQ ID NO: 305014 - RNA, 19 nt, Artificial Sequence
  Description of Artificial Sequence: Synthetic oligonucleotide
uaaaucgguauacuucaug

SEQ ID NO: 305015 - RNA, 19 nt, Artificial Sequence
  Description of Artificial Sequence: Synthetic oligonucleotide
uuagcuagacucacugaag

SEQ ID NO: 305016 - RNA, 19 nt, Artificial Sequence
  Description of Artificial Sequence: Synthetic oligonucleotide
auaaucuuagauucaugcu

SEQ ID NO: 305017 - RNA, 19 nt, Artificial Sequence
  Description of Artificial Sequence: Synthetic oligonucleotide
auuuuauaggcacguaacu

SEQ ID NO: 305018 - RNA, 19 nt, Artificial Sequence
  Description of Artificial Sequence: Synthetic oligonucleotide
aaacuacaacguugagacc

SEQ ID NO: 305019 - RNA, 19 nt, Artificial Sequence
  Description of Artificial Sequence: Synthetic oligonucleotide
aaaaugcgaagccgagagg

SEQ ID NO: 305020 - RNA, 19 nt, Artificial Sequence
  Description of Artificial Sequence: Synthetic oligonucleotide
agccccaacaacuugauaa

SEQ ID NO: 305021 - RNA, 19 nt, Artificial Sequence
  Description of Artificial Sequence: Synthetic oligonucleotide
cuagacucacugaagcacg

SEQ ID NO: 305022 - RNA, 19 nt, Artificial Sequence
  Description of Artificial Sequence: Synthetic oligonucleotide
cuuaggaugucacucgcgc

SEQ ID NO: 305023 - RNA, 19 nt, Artificial Sequence
  Description of Artificial Sequence: Synthetic oligonucleotide
auaccaugagcaaaagggc

SEQ ID NO: 305024 - RNA, 19 nt, Artificial Sequence
  Description of Artificial Sequence: Synthetic oligonucleotide
gcuacuaccaugcaugugc

SEQ ID NO: 305025 - RNA, 19 nt, Artificial Sequence
  Description of Artificial Sequence: Synthetic oligonucleotide
auaacaggauuauuaagau

SEQ ID NO: 305026 - RNA, 19 nt, Artificial Sequence
  Description of Artificial Sequence: Synthetic oligonucleotide
uaacuuaccaaguaacguu

SEQ ID NO: 305027 - RNA, 19 nt, Artificial Sequence
  Description of Artificial Sequence: Synthetic oligonucleotide
uacaacguugagaccgugg

SEQ ID NO: 305028 - RNA, 19 nt, Artificial Sequence
  Description of Artificial Sequence: Synthetic oligonucleotide
uaggcacguaacuaaaaug

SEQ ID NO: 305029 - RNA, 19 nt, Artificial Sequence
  Description of Artificial Sequence: Synthetic oligonucleotide
cagguaugauucauaaacc

SEQ ID NO: 305030 - RNA, 19 nt, Artificial Sequence
  Description of Artificial Sequence: Synthetic oligonucleotide
caagucuggauaaaauaac

SEQ ID NO: 305031 - RNA, 19 nt, Artificial Sequence
  Description of Artificial Sequence: Synthetic oligonucleotide
uuaauacgauucuuaaaau

SEQ ID NO: 305032 - RNA, 19 nt, Artificial Sequence
  Description of Artificial Sequence: Synthetic oligonucleotide
gguaacacgggccuuauac

SEQ ID NO: 305033 - RNA, 19 nt, Artificial Sequence
  Description of Artificial Sequence: Synthetic oligonucleotide
cuaucuacugugaaccuuc

SEQ ID NO: 305034 - RNA, 19 nt, Artificial Sequence
  Description of Artificial Sequence: Synthetic oligonucleotide
auacuacaccacaugauac

SEQ ID NO: 305035 - RNA, 19 nt, Artificial Sequence
  Description of Artificial Sequence: Synthetic oligonucleotide
cauacgcuguuucucaccc

SEQ ID NO: 305036 - RNA, 19 nt, Artificial Sequence
  Description of Artificial Sequence: Synthetic oligonucleotide
uuuuauaggcacguaacua

SEQ ID NO: 305037 - RNA, 19 nt, Artificial Sequence
  Description of Artificial Sequence: Synthetic oligonucleotide
ucacuaaguuauaggcuag

SEQ ID NO: 305038 - RNA, 19 nt, Artificial Sequence
  Description of Artificial Sequence: Synthetic oligonucleotide
guagacuaugcggagagcc

SEQ ID NO: 305039 - RNA, 19 nt, Artificial Sequence
  Description of Artificial Sequence: Synthetic oligonucleotide
accuuaggaugucacucgc

SEQ ID NO: 305040 - RNA, 19 nt, Artificial Sequence
  Description of Artificial Sequence: Synthetic oligonucleotide
acaacguugagaccgugga

SEQ ID NO: 305041 - RNA, 19 nt, Artificial Sequence
  Description of Artificial Sequence: Synthetic oligonucleotide
ccaauaaucacugggaaag

SEQ ID NO: 305042 - RNA, 19 nt, Artificial Sequence
  Description of Artificial Sequence: Synthetic oligonucleotide
agacuaugcggagagcccc

SEQ ID NO: 305043 - RNA, 19 nt, Artificial Sequence
  Description of Artificial Sequence: Synthetic oligonucleotide
acauuaaucucugauuagu

SEQ ID NO: 305044 - RNA, 19 nt, Artificial Sequence
  Description of Artificial Sequence: Synthetic oligonucleotide
acgacauuggucaccagcg

SEQ ID NO: 305045 - RNA, 19 nt, Artificial Sequence
  Description of Artificial Sequence: Synthetic oligonucleotide
uuauaggcacguaacuaaa

SEQ ID NO: 305046 - RNA, 19 nt, Artificial Sequence
  Description of Artificial Sequence: Synthetic oligonucleotide
guuagcuagacucacugaa

SEQ ID NO: 305047 - RNA, 19 nt, Artificial Sequence
  Description of Artificial Sequence: Synthetic oligonucleotide
gugaacacggcacauucug

SEQ ID NO: 305048 - RNA, 19 nt, Artificial Sequence
  Description of Artificial Sequence: Synthetic oligonucleotide
acacaauuauaacaggauu

SEQ ID NO: 305049 - RNA, 19 nt, Artificial Sequence
  Description of Artificial Sequence: Synthetic oligonucleotide
aaucgguauacuucaugaa

SEQ ID NO: 305050 - RNA, 19 nt, Artificial Sequence
  Description of Artificial Sequence: Synthetic oligonucleotide
acaauuauaacaggauuau

SEQ ID NO: 305051 - RNA, 19 nt, Artificial Sequence
  Description of Artificial Sequence: Synthetic oligonucleotide
uguguaguacccaguggca

SEQ ID NO: 305052 - RNA, 19 nt, Artificial Sequence
  Description of Artificial Sequence: Synthetic oligonucleotide
auaggcacguaacuaaaau

SEQ ID NO: 305053 - RNA, 19 nt, Artificial Sequence
  Description of Artificial Sequence: Synthetic oligonucleotide
aacguucuuacugccacug

SEQ ID NO: 305054 - RNA, 19 nt, Artificial Sequence
  Description of Artificial Sequence: Synthetic oligonucleotide
ccaaguaacguucuuacug

SEQ ID NO: 305055 - RNA, 19 nt, Artificial Sequence
  Description of Artificial Sequence: Synthetic oligonucleotide
gucacuaaguuauaggcua

SEQ ID NO: 305056 - RNA, 19 nt, Artificial Sequence
  Description of Artificial Sequence: Synthetic oligonucleotide
ugaacacggcacauucugc

SEQ ID NO: 305057 - RNA, 19 nt, Artificial Sequence
  Description of Artificial Sequence: Synthetic oligonucleotide
augcggagagccccguucc

SEQ ID NO: 305058 - RNA, 19 nt, Artificial Sequence
  Description of Artificial Sequence: Synthetic oligonucleotide
caguuagcuagacucacug

SEQ ID NO: 305059 - RNA, 19 nt, Artificial Sequence
  Description of Artificial Sequence: Synthetic oligonucleotide
uauaggcacguaacuaaaa

SEQ ID NO: 305060 - RNA, 19 nt, Artificial Sequence
  Description of Artificial Sequence: Synthetic oligonucleotide
acguaacuaaaaugcgaag

SEQ ID NO: 305061 - RNA, 19 nt, Artificial Sequence
  Description of Artificial Sequence: Synthetic oligonucleotide
agcgguguccauccuagag

SEQ ID NO: 305062 - RNA, 19 nt, Artificial Sequence
  Description of Artificial Sequence: Synthetic oligonucleotide
uccaggcuaacucuagaaa

SEQ ID NO: 305063 - RNA, 19 nt, Artificial Sequence
  Description of Artificial Sequence: Synthetic oligonucleotide
auuagugacaacacacgca

SEQ ID NO: 305064 - RNA, 19 nt, Artificial Sequence
  Description of Artificial Sequence: Synthetic oligonucleotide
cuuaagaauaaaucgguau

SEQ ID NO: 305065 - RNA, 19 nt, Artificial Sequence
  Description of Artificial Sequence: Synthetic oligonucleotide
gaugugagucuccgagggg

SEQ ID NO: 305066 - RNA, 19 nt, Artificial Sequence
  Description of Artificial Sequence: Synthetic oligonucleotide
uucugacauaaguacaaua

SEQ ID NO: 305067 - RNA, 19 nt, Artificial Sequence
  Description of Artificial Sequence: Synthetic oligonucleotide
agagguuucuaugucgaug

SEQ ID NO: 305068 - RNA, 19 nt, Artificial Sequence
  Description of Artificial Sequence: Synthetic oligonucleotide
gaugccaugagaacuugca

SEQ ID NO: 305069 - RNA, 19 nt, Artificial Sequence
  Description of Artificial Sequence: Synthetic oligonucleotide
aaacggacugugucaguga

SEQ ID NO: 305070 - RNA, 19 nt, Artificial Sequence
  Description of Artificial Sequence: Synthetic oligonucleotide
auuagaucacuuggauuuc

SEQ ID NO: 305071 - RNA, 19 nt, Artificial Sequence
  Description of Artificial Sequence: Synthetic oligonucleotide
uaugcggagagccccguuc

SEQ ID NO: 305072 - RNA, 19 nt, Artificial Sequence
  Description of Artificial Sequence: Synthetic oligonucleotide
cauacuacaccacaugaua

SEQ ID NO: 305073 - RNA, 19 nt, Artificial Sequence
  Description of Artificial Sequence: Synthetic oligonucleotide
acuaaaaugcgaagccgag

SEQ ID NO: 305074 - RNA, 19 nt, Artificial Sequence
  Description of Artificial Sequence: Synthetic oligonucleotide
accaguuagcuagacucac

SEQ ID NO: 305075 - RNA, 19 nt, Artificial Sequence
  Description of Artificial Sequence: Synthetic oligonucleotide
cacguaacuaaaaugcgaa

SEQ ID NO: 305076 - RNA, 19 nt, Artificial Sequence
  Description of Artificial Sequence: Synthetic oligonucleotide
uuacaagcgcuguuuacua

SEQ ID NO: 305077 - RNA, 19 nt, Artificial Sequence
  Description of Artificial Sequence: Synthetic oligonucleotide
ugacauggauucuguacac

SEQ ID NO: 305078 - RNA, 19 nt, Artificial Sequence
  Description of Artificial Sequence: Synthetic oligonucleotide
accguggauagguagucug

SEQ ID NO: 305079 - RNA, 19 nt, Artificial Sequence
  Description of Artificial Sequence: Synthetic oligonucleotide
ugccucucagcucuagugu

SEQ ID NO: 305080 - RNA, 19 nt, Artificial Sequence
  Description of Artificial Sequence: Synthetic oligonucleotide
uacauauaagcuuguuguu

SEQ ID NO: 305081 - RNA, 19 nt, Artificial Sequence
  Description of Artificial Sequence: Synthetic oligonucleotide
auagcagaaaacagcccuc

SEQ ID NO: 305082 - RNA, 19 nt, Artificial Sequence
  Description of Artificial Sequence: Synthetic oligonucleotide
caaaagggcuccugcacac

SEQ ID NO: 305083 - RNA, 19 nt, Artificial Sequence
  Description of Artificial Sequence: Synthetic oligonucleotide
gugauauacagaauuccca

SEQ ID NO: 305084 - RNA, 19 nt, Artificial Sequence
  Description of Artificial Sequence: Synthetic oligonucleotide
cuguugcuaaaccucuggc

SEQ ID NO: 305085 - RNA, 19 nt, Artificial Sequence
  Description of Artificial Sequence: Synthetic oligonucleotide
uguccacguagacagucgu

SEQ ID NO: 305086 - RNA, 19 nt, Artificial Sequence
  Description of Artificial Sequence: Synthetic oligonucleotide
caccacaugauaccaugag

SEQ ID NO: 305087 - RNA, 19 nt, Artificial Sequence
  Description of Artificial Sequence: Synthetic oligonucleotide
cuaaguuauaggcuaggaa

SEQ ID NO: 305088 - RNA, 19 nt, Artificial Sequence
  Description of Artificial Sequence: Synthetic oligonucleotide
auacgcuguuucucacccc

SEQ ID NO: 305089 - RNA, 19 nt, Artificial Sequence
  Description of Artificial Sequence: Synthetic oligonucleotide
acauauaagcuuguuguua

SEQ ID NO: 305090 - RNA, 19 nt, Artificial Sequence
  Description of Artificial Sequence: Synthetic oligonucleotide
ggcgacuugaguguguagg

SEQ ID NO: 305091 - RNA, 19 nt, Artificial Sequence
  Description of Artificial Sequence: Synthetic oligonucleotide
auagaucuaacaguccaaa

SEQ ID NO: 305092 - RNA, 19 nt, Artificial Sequence
  Description of Artificial Sequence: Synthetic oligonucleotide
aguuagcuagacucacuga

SEQ ID NO: 305093 - RNA, 19 nt, Artificial Sequence
  Description of Artificial Sequence: Synthetic oligonucleotide
agcuagacucacugaagca

SEQ ID NO: 305094 - RNA, 19 nt, Artificial Sequence
  Description of Artificial Sequence: Synthetic oligonucleotide
caaugcuccugugugcacg

SEQ ID NO: 305095 - RNA, 19 nt, Artificial Sequence
  Description of Artificial Sequence: Synthetic oligonucleotide
cacugaguaggaacagaag

SEQ ID NO: 305096 - RNA, 19 nt, Artificial Sequence
  Description of Artificial Sequence: Synthetic oligonucleotide
acuaaguuauaggcuagga

SEQ ID NO: 305097 - RNA, 19 nt, Artificial Sequence
  Description of Artificial Sequence: Synthetic oligonucleotide
auuaagauuccaguauguu

SEQ ID NO: 305098 - RNA, 19 nt, Artificial Sequence
  Description of Artificial Sequence: Synthetic oligonucleotide
aguuauaggcuaggaaagu

SEQ ID NO: 305099 - RNA, 19 nt, Artificial Sequence
  Description of Artificial Sequence: Synthetic oligonucleotide
ugauaacauuaaucucuga

SEQ ID NO: 305100 - RNA, 19 nt, Artificial Sequence
  Description of Artificial Sequence: Synthetic oligonucleotide
auaaucacugggaaaggaa

SEQ ID NO: 305101 - RNA, 19 nt, Artificial Sequence
  Description of Artificial Sequence: Synthetic oligonucleotide
uaaaccucuggcgccaagu

SEQ ID NO: 305102 - RNA, 19 nt, Artificial Sequence
  Description of Artificial Sequence: Synthetic oligonucleotide
uagaucuaacaguccaaau

SEQ ID NO: 305103 - RNA, 19 nt, Artificial Sequence
  Description of Artificial Sequence: Synthetic oligonucleotide
uaucuacugugaaccuuca

SEQ ID NO: 305104 - RNA, 19 nt, Artificial Sequence
  Description of Artificial Sequence: Synthetic oligonucleotide
uaugucgauggggugguac

SEQ ID NO: 305105 - RNA, 19 nt, Artificial Sequence
  Description of Artificial Sequence: Synthetic oligonucleotide
uguaguacccaguggcauu

SEQ ID NO: 305106 - RNA, 19 nt, Artificial Sequence
  Description of Artificial Sequence: Synthetic oligonucleotide
acaugacagguucaccccu

SEQ ID NO: 305107 - RNA, 19 nt, Artificial Sequence
  Description of Artificial Sequence: Synthetic oligonucleotide
ucuuagauucaugcuugac

SEQ ID NO: 305108 - RNA, 19 nt, Artificial Sequence
  Description of Artificial Sequence: Synthetic oligonucleotide
ugugaaccuucaucagucu

SEQ ID NO: 305109 - RNA, 19 nt, Artificial Sequence
  Description of Artificial Sequence: Synthetic oligonucleotide
aguuuacaagcgcuguuua

SEQ ID NO: 305110 - RNA, 19 nt, Artificial Sequence
  Description of Artificial Sequence: Synthetic oligonucleotide
ucuaugucgaugggguggu

SEQ ID NO: 305111 - RNA, 19 nt, Artificial Sequence
  Description of Artificial Sequence: Synthetic oligonucleotide
ggguagacuaugcggagag

SEQ ID NO: 305112 - RNA, 19 nt, Artificial Sequence
  Description of Artificial Sequence: Synthetic oligonucleotide
cacuaaguuauaggcuagg

SEQ ID NO: 305113 - RNA, 19 nt, Artificial Sequence
  Description of Artificial Sequence: Synthetic oligonucleotide
acugguguccggaguagac

SEQ ID NO: 305114 - RNA, 19 nt, Artificial Sequence
  Description of Artificial Sequence: Synthetic oligonucleotide
cagauggcgaucugccgag

SEQ ID NO: 305115 - RNA, 19 nt, Artificial Sequence
  Description of Artificial Sequence: Synthetic oligonucleotide
gucacucgcgcuuccagac

SEQ ID NO: 305116 - RNA, 19 nt, Artificial Sequence
  Description of Artificial Sequence: Synthetic oligonucleotide
ucucacccagaugugaguc

SEQ ID NO: 305117 - RNA, 19 nt, Artificial Sequence
  Description of Artificial Sequence: Synthetic oligonucleotide
ggcacguaacuaaaaugcg

SEQ ID NO: 305118 - RNA, 19 nt, Artificial Sequence
  Description of Artificial Sequence: Synthetic oligonucleotide
agguuucuaugucgauggg

SEQ ID NO: 305119 - RNA, 19 nt, Artificial Sequence
  Description of Artificial Sequence: Synthetic oligonucleotide
agaccguggauagguaguc

SEQ ID NO: 305120 - RNA, 19 nt, Artificial Sequence
  Description of Artificial Sequence: Synthetic oligonucleotide
guaguacccaguggcauug

SEQ ID NO: 305121 - RNA, 19 nt, Artificial Sequence
  Description of Artificial Sequence: Synthetic oligonucleotide
cacggcacauucugcaaug

SEQ ID NO: 305122 - RNA, 19 nt, Artificial Sequence
  Description of Artificial Sequence: Synthetic oligonucleotide
gauaagaccuuaggauguc

SEQ ID NO: 305123 - RNA, 19 nt, Artificial Sequence
  Description of Artificial Sequence: Synthetic oligonucleotide
gguuuaucuaucugaaaua

SEQ ID NO: 305124 - RNA, 19 nt, Artificial Sequence
  Description of Artificial Sequence: Synthetic oligonucleotide
agccccguuccacccaaac

SEQ ID NO: 305125 - RNA, 19 nt, Artificial Sequence
  Description of Artificial Sequence: Synthetic oligonucleotide
aaugcgaagccgagaggcu

SEQ ID NO: 305126 - RNA, 19 nt, Artificial Sequence
  Description of Artificial Sequence: Synthetic oligonucleotide
uaacguucuuacugccacu

SEQ ID NO: 305127 - RNA, 19 nt, Artificial Sequence
  Description of Artificial Sequence: Synthetic oligonucleotide
gacuaugcggagagccccg

SEQ ID NO: 305128 - RNA, 19 nt, Artificial Sequence
  Description of Artificial Sequence: Synthetic oligonucleotide
uacccuugaaagccccuaa

SEQ ID NO: 305129 - RNA, 19 nt, Artificial Sequence
  Description of Artificial Sequence: Synthetic oligonucleotide
agcacgacauuggucacca

SEQ ID NO: 305130 - RNA, 19 nt, Artificial Sequence
  Description of Artificial Sequence: Synthetic oligonucleotide
caugugcgcacacaugaca

SEQ ID NO: 305131 - RNA, 19 nt, Artificial Sequence
  Description of Artificial Sequence: Synthetic oligonucleotide
acggcacauucugcaaugc

SEQ ID NO: 305132 - RNA, 19 nt, Artificial Sequence
  Description of Artificial Sequence: Synthetic oligonucleotide
acauacuacaccacaugau

SEQ ID NO: 305133 - RNA, 19 nt, Artificial Sequence
  Description of Artificial Sequence: Synthetic oligonucleotide
aguccaggcuaacucuaga

SEQ ID NO: 305134 - RNA, 19 nt, Artificial Sequence
  Description of Artificial Sequence: Synthetic oligonucleotide
gcuagacucacugaagcac

SEQ ID NO: 305135 - RNA, 19 nt, Artificial Sequence
  Description of Artificial Sequence: Synthetic oligonucleotide
caccccgagaguugauggg

SEQ ID NO: 305136 - RNA, 19 nt, Artificial Sequence
  Description of Artificial Sequence: Synthetic oligonucleotide
aggaugucacucgcgcuuc

SEQ ID NO: 305137 - RNA, 19 nt, Artificial Sequence
  Description of Artificial Sequence: Synthetic oligonucleotide
uagacgcugcacagacacc

SEQ ID NO: 305138 - RNA, 19 nt, Artificial Sequence
  Description of Artificial Sequence: Synthetic oligonucleotide
gacucacugaagcacgagu

SEQ ID NO: 305139 - RNA, 19 nt, Artificial Sequence
  Description of Artificial Sequence: Synthetic oligonucleotide
augauaccaugagcaaaag

SEQ ID NO: 305140 - RNA, 19 nt, Artificial Sequence
  Description of Artificial Sequence: Synthetic oligonucleotide
cuaaaaugcgaagccgaga

SEQ ID NO: 305141 - RNA, 19 nt, Artificial Sequence
  Description of Artificial Sequence: Synthetic oligonucleotide
augagcaaaagggcuccug

SEQ ID NO: 305142 - RNA, 19 nt, Artificial Sequence
  Description of Artificial Sequence: Synthetic oligonucleotide
acuuaccaaguaacguucu

SEQ ID NO: 305143 - RNA, 19 nt, Artificial Sequence
  Description of Artificial Sequence: Synthetic oligonucleotide
augcgaagccgagaggcug

SEQ ID NO: 305144 - RNA, 19 nt, Artificial Sequence
  Description of Artificial Sequence: Synthetic oligonucleotide
aucaccccagggucuacga

SEQ ID NO: 305145 - RNA, 19 nt, Artificial Sequence
  Description of Artificial Sequence: Synthetic oligonucleotide
cuaagggcgccugucugug

SEQ ID NO: 305146 - RNA, 19 nt, Artificial Sequence
  Description of Artificial Sequence: Synthetic oligonucleotide
guccaggcuaacucuagaa

SEQ ID NO: 305147 - RNA, 19 nt, Artificial Sequence
  Description of Artificial Sequence: Synthetic oligonucleotide
guaacacgggccuuauacu

SEQ ID NO: 305148 - RNA, 19 nt, Artificial Sequence
  Description of Artificial Sequence: Synthetic oligonucleotide
ugcaagcucgcagcauagc

SEQ ID NO: 305149 - RNA, 19 nt, Artificial Sequence
  Description of Artificial Sequence: Synthetic oligonucleotide
agccccuaagccccaacaa

SEQ ID NO: 305150 - RNA, 19 nt, Artificial Sequence
  Description of Artificial Sequence: Synthetic oligonucleotide
agacucacugaagcacgag

SEQ ID NO: 305151 - RNA, 19 nt, Artificial Sequence
  Description of Artificial Sequence: Synthetic oligonucleotide
ucgcgcaggugcauacgcu

SEQ ID NO: 305152 - RNA, 19 nt, Artificial Sequence
  Description of Artificial Sequence: Synthetic oligonucleotide
ggcgccaaguaguaaguga

SEQ ID NO: 305153 - RNA, 19 nt, Artificial Sequence
  Description of Artificial Sequence: Synthetic oligonucleotide
ccaggcuaacucuagaaaa

SEQ ID NO: 305154 - RNA, 19 nt, Artificial Sequence
  Description of Artificial Sequence: Synthetic oligonucleotide
uugagaccguggauaggua

SEQ ID NO: 305155 - RNA, 19 nt, Artificial Sequence
  Description of Artificial Sequence: Synthetic oligonucleotide
caggauuauuaagauucca

SEQ ID NO: 305156 - RNA, 19 nt, Artificial Sequence
  Description of Artificial Sequence: Synthetic oligonucleotide
acuacaacguugagaccgu

SEQ ID NO: 305157 - RNA, 19 nt, Artificial Sequence
  Description of Artificial Sequence: Synthetic oligonucleotide
uccggaguagacgcugcac

SEQ ID NO: 305158 - RNA, 19 nt, Artificial Sequence
  Description of Artificial Sequence: Synthetic oligonucleotide
ugcggagagccccguucca

SEQ ID NO: 305159 - RNA, 19 nt, Artificial Sequence
  Description of Artificial Sequence: Synthetic oligonucleotide
aagguaacacgggccuuau

SEQ ID NO: 305160 - RNA, 19 nt, Artificial Sequence
  Description of Artificial Sequence: Synthetic oligonucleotide
ccgugugugcaauaaugac

SEQ ID NO: 305161 - RNA, 19 nt, Artificial Sequence
  Description of Artificial Sequence: Synthetic oligonucleotide
gggucuacgaugaccacca

SEQ ID NO: 305162 - RNA, 19 nt, Artificial Sequence
  Description of Artificial Sequence: Synthetic oligonucleotide
ggggccguuccucagcuac

SEQ ID NO: 305163 - RNA, 19 nt, Artificial Sequence
  Description of Artificial Sequence: Synthetic oligonucleotide
aagugcaagcucgcagcau

SEQ ID NO: 305164 - RNA, 19 nt, Artificial Sequence
  Description of Artificial Sequence: Synthetic oligonucleotide
cagcccucacauguuguag

SEQ ID NO: 305165 - RNA, 19 nt, Artificial Sequence
  Description of Artificial Sequence: Synthetic oligonucleotide
aggguagacuaugcggaga

SEQ ID NO: 305166 - RNA, 19 nt, Artificial Sequence
  Description of Artificial Sequence: Synthetic oligonucleotide
gcgccaaguaguaagugac

SEQ ID NO: 305167 - RNA, 19 nt, Artificial Sequence
  Description of Artificial Sequence: Synthetic oligonucleotide
caucgugucgcucuccacu

SEQ ID NO: 305168 - RNA, 19 nt, Artificial Sequence
  Description of Artificial Sequence: Synthetic oligonucleotide
gcacguaacuaaaaugcga

SEQ ID NO: 305169 - RNA, 19 nt, Artificial Sequence
  Description of Artificial Sequence: Synthetic oligonucleotide
gccccguuccacccaaacg

SEQ ID NO: 305170 - RNA, 19 nt, Artificial Sequence
  Description of Artificial Sequence: Synthetic oligonucleotide
agcuacuaccaugcaugug

SEQ ID NO: 305171 - RNA, 19 nt, Artificial Sequence
  Description of Artificial Sequence: Synthetic oligonucleotide
ggauaagaccuuaggaugu

SEQ ID NO: 305172 - RNA, 19 nt, Artificial Sequence
  Description of Artificial Sequence: Synthetic oligonucleotide
gcccucacauguuguaggc

SEQ ID NO: 305173 - RNA, 19 nt, Artificial Sequence
  Description of Artificial Sequence: Synthetic oligonucleotide
aucucugauuagucauaua

SEQ ID NO: 305174 - RNA, 19 nt, Artificial Sequence
  Description of Artificial Sequence: Synthetic oligonucleotide
gagaccguggauagguagu

SEQ ID NO: 305175 - RNA, 19 nt, Artificial Sequence
  Description of Artificial Sequence: Synthetic oligonucleotide
acggaucacagagguuucu

SEQ ID NO: 305176 - RNA, 19 nt, Artificial Sequence
  Description of Artificial Sequence: Synthetic oligonucleotide
cuacaacguugagaccgug

SEQ ID NO: 305177 - RNA, 19 nt, Artificial Sequence
  Description of Artificial Sequence: Synthetic oligonucleotide
gucuccgugugugcaauaa

SEQ ID NO: 305178 - RNA, 19 nt, Artificial Sequence
  Description of Artificial Sequence: Synthetic oligonucleotide
guacaauauuagaucacuu

SEQ ID NO: 305179 - RNA, 19 nt, Artificial Sequence
  Description of Artificial Sequence: Synthetic oligonucleotide
gugagggaccaguuagcua

SEQ ID NO: 305180 - RNA, 19 nt, Artificial Sequence
  Description of Artificial Sequence: Synthetic oligonucleotide
ccgagagggguacagucuc

SEQ ID NO: 305181 - RNA, 19 nt, Artificial Sequence
  Description of Artificial Sequence: Synthetic oligonucleotide
accugcucuuaagaauaaa

SEQ ID NO: 305182 - RNA, 19 nt, Artificial Sequence
  Description of Artificial Sequence: Synthetic oligonucleotide
acuaugcggagagccccgu

SEQ ID NO: 305183 - RNA, 19 nt, Artificial Sequence
  Description of Artificial Sequence: Synthetic oligonucleotide
gguagacuaugcggagagc

SEQ ID NO: 305184 - RNA, 19 nt, Artificial Sequence
  Description of Artificial Sequence: Synthetic oligonucleotide
cugugcgcccagacccuug

SEQ ID NO: 305185 - RNA, 19 nt, Artificial Sequence
  Description of Artificial Sequence: Synthetic oligonucleotide
ccacagugcaaagccgagg

SEQ ID NO: 305186 - RNA, 19 nt, Artificial Sequence
  Description of Artificial Sequence: Synthetic oligonucleotide
cuggggcgacuugagugug

SEQ ID NO: 305187 - RNA, 19 nt, Artificial Sequence
  Description of Artificial Sequence: Synthetic oligonucleotide
ccggaguagacgcugcaca

SEQ ID NO: 305188 - RNA, 19 nt, Artificial Sequence
  Description of Artificial Sequence: Synthetic oligonucleotide
cacucgcgcuuccagaccu

SEQ ID NO: 305189 - RNA, 19 nt, Artificial Sequence
  Description of Artificial Sequence: Synthetic oligonucleotide
acggacugugucagugaga

SEQ ID NO: 305190 - RNA, 19 nt, Artificial Sequence
  Description of Artificial Sequence: Synthetic oligonucleotide
ccuuucaucagcccuccua

SEQ ID NO: 305191 - RNA, 19 nt, Artificial Sequence
  Description of Artificial Sequence: Synthetic oligonucleotide
agguaacacgggccuuaua

SEQ ID NO: 305192 - RNA, 19 nt, Artificial Sequence
  Description of Artificial Sequence: Synthetic oligonucleotide
ccguuccacccaaacgaac

SEQ ID NO: 305193 - RNA, 19 nt, Artificial Sequence
  Description of Artificial Sequence: Synthetic oligonucleotide
ggcgaucugccgagagggg

SEQ ID NO: 305194 - RNA, 19 nt, Artificial Sequence
  Description of Artificial Sequence: Synthetic oligonucleotide
cagcuacuaccaugcaugu

SEQ ID NO: 305195 - RNA, 19 nt, Artificial Sequence
  Description of Artificial Sequence: Synthetic oligonucleotide
cccucacauguuguaggcc

SEQ ID NO: 305196 - RNA, 19 nt, Artificial Sequence
  Description of Artificial Sequence: Synthetic oligonucleotide
gaccguggauagguagucu

SEQ ID NO: 305197 - RNA, 19 nt, Artificial Sequence
  Description of Artificial Sequence: Synthetic oligonucleotide
caacguugagaccguggau

SEQ ID NO: 305198 - RNA, 19 nt, Artificial Sequence
  Description of Artificial Sequence: Synthetic oligonucleotide
acucgcgcuuccagaccug

SEQ ID NO: 305199 - RNA, 19 nt, Artificial Sequence
  Description of Artificial Sequence: Synthetic oligonucleotide
ccaacaacauacagugcau

SEQ ID NO: 305200 - RNA, 19 nt, Artificial Sequence
  Description of Artificial Sequence: Synthetic oligonucleotide
ggucuacgaugaccaccac

SEQ ID NO: 305201 - RNA, 19 nt, Artificial Sequence
  Description of Artificial Sequence: Synthetic oligonucleotide
gcgcuaccagguccagggc

SEQ ID NO: 305202 - RNA, 19 nt, Artificial Sequence
  Description of Artificial Sequence: Synthetic oligonucleotide
cuguguggcucgguggagu

SEQ ID NO: 305203 - RNA, 19 nt, Artificial Sequence
  Description of Artificial Sequence: Synthetic oligonucleotide
ggcgccugucugugcgccc

SEQ ID NO: 305204 - RNA, 19 nt, Artificial Sequence
  Description of Artificial Sequence: Synthetic oligonucleotide
ccaguuagcuagacucacu

SEQ ID NO: 305205 - RNA, 19 nt, Artificial Sequence
  Description of Artificial Sequence: Synthetic oligonucleotide
cccguuccacccaaacgaa

SEQ ID NO: 305206 - RNA, 19 nt, Artificial Sequence
  Description of Artificial Sequence: Synthetic oligonucleotide
gcgaucugccgagaggggu

SEQ ID NO: 305207 - RNA, 19 nt, Artificial Sequence
  Description of Artificial Sequence: Synthetic oligonucleotide
gucugugcgcccagacccu

SEQ ID NO: 305208 - RNA, 19 nt, Artificial Sequence
  Description of Artificial Sequence: Synthetic oligonucleotide
ccguggauagguagucugu

SEQ ID NO: 305209 - RNA, 19 nt, Artificial Sequence
  Description of Artificial Sequence: Synthetic oligonucleotide
gcccuccuaggcaggcuug

SEQ ID NO: 305210 - RNA, 19 nt, Artificial Sequence
  Description of Artificial Sequence: Synthetic oligonucleotide
ggaucaccccagggucuac

SEQ ID NO: 305211 - RNA, 19 nt, Artificial Sequence
  Description of Artificial Sequence: Synthetic oligonucleotide
cgaucugccgagaggggua

SEQ ID NO: 305212 - RNA, 19 nt, Artificial Sequence
  Description of Artificial Sequence: Synthetic oligonucleotide
gguguccggaguagacgcu

SEQ ID NO: 305213 - RNA, 19 nt, Artificial Sequence
  Description of Artificial Sequence: Synthetic oligonucleotide
agccgucgcgcaggugcau

SEQ ID NO: 305214 - RNA, 19 nt, Artificial Sequence
  Description of Artificial Sequence: Synthetic oligonucleotide
cuaugcggagagccccguu

SEQ ID NO: 305215 - RNA, 19 nt, Artificial Sequence
  Description of Artificial Sequence: Synthetic oligonucleotide
gcuaaaccucuggcgccaa

SEQ ID NO: 305216 - RNA, 19 nt, Artificial Sequence
  Description of Artificial Sequence: Synthetic oligonucleotide
cuaugucgaugggguggua

SEQ ID NO: 305217 - RNA, 19 nt, Artificial Sequence
  Description of Artificial Sequence: Synthetic oligonucleotide
ccucucagcucuaguguuu

SEQ ID NO: 305218 - RNA, 19 nt, Artificial Sequence
  Description of Artificial Sequence: Synthetic oligonucleotide
gagccccguuccacccaaa

SEQ ID NO: 305219 - RNA, 19 nt, Artificial Sequence
  Description of Artificial Sequence: Synthetic oligonucleotide
ccggggccguuccucagcu

SEQ ID NO: 305220 - RNA, 19 nt, Artificial Sequence
  Description of Artificial Sequence: Synthetic oligonucleotide
ggggcccuuuggucuccgu

SEQ ID NO: 305221 - RNA, 19 nt, Artificial Sequence
  Description of Artificial Sequence: Synthetic oligonucleotide
cggggccguuccucagcua

SEQ ID NO: 305222 - RNA, 19 nt, Artificial Sequence
  Description of Artificial Sequence: Synthetic oligonucleotide
aaaacuauaaugcacugac

SEQ ID NO: 305223 - RNA, 19 nt, Artificial Sequence
  Description of Artificial Sequence: Synthetic oligonucleotide
aacuaaauacuuuuauugc

SEQ ID NO: 305224 - RNA, 19 nt, Artificial Sequence
  Description of Artificial Sequence: Synthetic oligonucleotide
aaacuaaauacuuuuauug

SEQ ID NO: 305225 - RNA, 19 nt, Artificial Sequence
  Description of Artificial Sequence: Synthetic oligonucleotide
aguaccauagaacagcugc

SEQ ID NO: 305226 - RNA, 19 nt, Artificial Sequence
  Description of Artificial Sequence: Synthetic oligonucleotide
ugaguuuccaauuagaagu

SEQ ID NO: 305227 - RNA, 19 nt, Artificial Sequence
  Description of Artificial Sequence: Synthetic oligonucleotide
aauaacuaacugcuccucc

SEQ ID NO: 305228 - RNA, 19 nt, Artificial Sequence
  Description of Artificial Sequence: Synthetic oligonucleotide
aacuauaaugcacugaccu

SEQ ID NO: 305229 - RNA, 19 nt, Artificial Sequence
  Description of Artificial Sequence: Synthetic oligonucleotide
uuaacagcuagcuggaacg

SEQ ID NO: 305230 - RNA, 19 nt, Artificial Sequence
  Description of Artificial Sequence: Synthetic oligonucleotide
auugauauacaucaagcag

SEQ ID NO: 305231 - RNA, 19 nt, Artificial Sequence
  Description of Artificial Sequence: Synthetic oligonucleotide
aauaguuggaggcucuuuc

SEQ ID NO: 305232 - RNA, 19 nt, Artificial Sequence
  Description of Artificial Sequence: Synthetic oligonucleotide
aauacuggugccugaaggg

SEQ ID NO: 305233 - RNA, 19 nt, Artificial Sequence
  Description of Artificial Sequence: Synthetic oligonucleotide
aauuauguggaagggaggg

SEQ ID NO: 305234 - RNA, 19 nt, Artificial Sequence
  Description of Artificial Sequence: Synthetic oligonucleotide
ucauugauauacaucaagc

SEQ ID NO: 305235 - RNA, 19 nt, Artificial Sequence
  Description of Artificial Sequence: Synthetic oligonucleotide
uuuuggaagaaguagacaa

SEQ ID NO: 305236 - RNA, 19 nt, Artificial Sequence
  Description of Artificial Sequence: Synthetic oligonucleotide
uugauauacaucaagcagu

SEQ ID NO: 305237 - RNA, 19 nt, Artificial Sequence
  Description of Artificial Sequence: Synthetic oligonucleotide
aagacgaugauuuccgcag

SEQ ID NO: 305238 - RNA, 19 nt, Artificial Sequence
  Description of Artificial Sequence: Synthetic oligonucleotide
cugauaauuauguggaagg

SEQ ID NO: 305239 - RNA, 19 nt, Artificial Sequence
  Description of Artificial Sequence: Synthetic oligonucleotide
ugaggauuauacaaaacca

SEQ ID NO: 305240 - RNA, 19 nt, Artificial Sequence
  Description of Artificial Sequence: Synthetic oligonucleotide
auucacaucccuuauuuuc

SEQ ID NO: 305241 - RNA, 19 nt, Artificial Sequence
  Description of Artificial Sequence: Synthetic oligonucleotide
cauacaccagauaagaaag

SEQ ID NO: 305242 - RNA, 19 nt, Artificial Sequence
  Description of Artificial Sequence: Synthetic oligonucleotide
ugacaaaacaacuaauaac

SEQ ID NO: 305243 - RNA, 19 nt, Artificial Sequence
  Description of Artificial Sequence: Synthetic oligonucleotide
aaacuguaaucuucaugcc

SEQ ID NO: 305244 - RNA, 19 nt, Artificial Sequence
  Description of Artificial Sequence: Synthetic oligonucleotide
ugagucuggacugugaggg

SEQ ID NO: 305245 - RNA, 19 nt, Artificial Sequence
  Description of Artificial Sequence: Synthetic oligonucleotide
aaaccaaguauuaugggag

SEQ ID NO: 305246 - RNA, 19 nt, Artificial Sequence
  Description of Artificial Sequence: Synthetic oligonucleotide
uuucaaacagggaagcagc

SEQ ID NO: 305247 - RNA, 19 nt, Artificial Sequence
  Description of Artificial Sequence: Synthetic oligonucleotide
uuaacauuaacagcuagcu

SEQ ID NO: 305248 - RNA, 19 nt, Artificial Sequence
  Description of Artificial Sequence: Synthetic oligonucleotide
auagauguaagcccaguag

SEQ ID NO: 305249 - RNA, 19 nt, Artificial Sequence
  Description of Artificial Sequence: Synthetic oligonucleotide
uguucaaucucacuccgcc

SEQ ID NO: 305250 - RNA, 19 nt, Artificial Sequence
  Description of Artificial Sequence: Synthetic oligonucleotide
uucguuucaaacagggaag

SEQ ID NO: 305251 - RNA, 19 nt, Artificial Sequence
  Description of Artificial Sequence: Synthetic oligonucleotide
aagaacugcguguaaacga

SEQ ID NO: 305252 - RNA, 19 nt, Artificial Sequence
  Description of Artificial Sequence: Synthetic oligonucleotide
acgauaaggcaccugauag

SEQ ID NO: 305253 - RNA, 19 nt, Artificial Sequence
  Description of Artificial Sequence: Synthetic oligonucleotide
auucguuucaaacagggaa

SEQ ID NO: 305254 - RNA, 19 nt, Artificial Sequence
  Description of Artificial Sequence: Synthetic oligonucleotide
gaaguagacaaggacaugc

SEQ ID NO: 305255 - RNA, 19 nt, Artificial Sequence
  Description of Artificial Sequence: Synthetic oligonucleotide
uguuuuauuaggccagggc

SEQ ID NO: 305256 - RNA, 19 nt, Artificial Sequence
  Description of Artificial Sequence: Synthetic oligonucleotide
uuuucugcgauauccuucc

SEQ ID NO: 305257 - RNA, 19 nt, Artificial Sequence
  Description of Artificial Sequence: Synthetic oligonucleotide
uauuaccaaucucugguag

SEQ ID NO: 305258 - RNA, 19 nt, Artificial Sequence
  Description of Artificial Sequence: Synthetic oligonucleotide
ugguuauagauguaagccc

SEQ ID NO: 305259 - RNA, 19 nt, Artificial Sequence
  Description of Artificial Sequence: Synthetic oligonucleotide
aacuguaaucuucaugcca

SEQ ID NO: 305260 - RNA, 19 nt, Artificial Sequence
  Description of Artificial Sequence: Synthetic oligonucleotide
aacauggcccauucauccc

SEQ ID NO: 305261 - RNA, 19 nt, Artificial Sequence
  Description of Artificial Sequence: Synthetic oligonucleotide
uuacuguugagacuccuug

SEQ ID NO: 305262 - RNA, 19 nt, Artificial Sequence
  Description of Artificial Sequence: Synthetic oligonucleotide
caucauucguuucaaacag

SEQ ID NO: 305263 - RNA, 19 nt, Artificial Sequence
  Description of Artificial Sequence: Synthetic oligonucleotide
aguacaucugcucgauagc

SEQ ID NO: 305264 - RNA, 19 nt, Artificial Sequence
  Description of Artificial Sequence: Synthetic oligonucleotide
ugcucgauagccugggugg

SEQ ID NO: 305265 - RNA, 19 nt, Artificial Sequence
  Description of Artificial Sequence: Synthetic oligonucleotide
agggagauagcucucauga

SEQ ID NO: 305266 - RNA, 19 nt, Artificial Sequence
  Description of Artificial Sequence: Synthetic oligonucleotide
ugcauaguuguauuguucu

SEQ ID NO: 305267 - RNA, 19 nt, Artificial Sequence
  Description of Artificial Sequence: Synthetic oligonucleotide
guugagacuccuugaaugg

SEQ ID NO: 305268 - RNA, 19 nt, Artificial Sequence
  Description of Artificial Sequence: Synthetic oligonucleotide
ugauaauuauguggaaggg

SEQ ID NO: 305269 - RNA, 19 nt, Artificial Sequence
  Description of Artificial Sequence: Synthetic oligonucleotide
cugucagaaauacuggugc

SEQ ID NO: 305270 - RNA, 19 nt, Artificial Sequence
  Description of Artificial Sequence: Synthetic oligonucleotide
guaagaauuccccuaaaca

SEQ ID NO: 305271 - RNA, 19 nt, Artificial Sequence
  Description of Artificial Sequence: Synthetic oligonucleotide
acugauagaucucucguca

SEQ ID NO: 305272 - RNA, 19 nt, Artificial Sequence
  Description of Artificial Sequence: Synthetic oligonucleotide
cauaagaaucucuuucaag

SEQ ID NO: 305273 - RNA, 19 nt, Artificial Sequence
  Description of Artificial Sequence: Synthetic oligonucleotide
cuucugauaauuaugugga

SEQ ID NO: 305274 - RNA, 19 nt, Artificial Sequence
  Description of Artificial Sequence: Synthetic oligonucleotide
aaacuauaaugcacugacc

SEQ ID NO: 305275 - RNA, 19 nt, Artificial Sequence
  Description of Artificial Sequence: Synthetic oligonucleotide
agggcaauuuaaaaguggc

SEQ ID NO: 305276 - RNA, 19 nt, Artificial Sequence
  Description of Artificial Sequence: Synthetic oligonucleotide
uuucggaacaaacuguaau

SEQ ID NO: 305277 - RNA, 19 nt, Artificial Sequence
  Description of Artificial Sequence: Synthetic oligonucleotide
aauguuuuauuaggccagg

SEQ ID NO: 305278 - RNA, 19 nt, Artificial Sequence
  Description of Artificial Sequence: Synthetic oligonucleotide
ucuguaccuaaaaugugca

SEQ ID NO: 305279 - RNA, 19 nt, Artificial Sequence
  Description of Artificial Sequence: Synthetic oligonucleotide
guauagugcgaucacagac

SEQ ID NO: 305280 - RNA, 19 nt, Artificial Sequence
  Description of Artificial Sequence: Synthetic oligonucleotide
ugcgauauccuuccccagg

SEQ ID NO: 305281 - RNA, 19 nt, Artificial Sequence
  Description of Artificial Sequence: Synthetic oligonucleotide
ugcaaaucggcugcaaagg

SEQ ID NO: 305282 - RNA, 19 nt, Artificial Sequence
  Description of Artificial Sequence: Synthetic oligonucleotide
uucucaagagccacgcaag

SEQ ID NO: 305283 - RNA, 19 nt, Artificial Sequence
  Description of Artificial Sequence: Synthetic oligonucleotide
acaagcaucggacaccaug

SEQ ID NO: 305284 - RNA, 19 nt, Artificial Sequence
  Description of Artificial Sequence: Synthetic oligonucleotide
uuaucuuccuggauguacu

SEQ ID NO: 305285 - RNA, 19 nt, Artificial Sequence
  Description of Artificial Sequence: Synthetic oligonucleotide
agaggaucacaguacaucu

SEQ ID NO: 305286 - RNA, 19 nt, Artificial Sequence
  Description of Artificial Sequence: Synthetic oligonucleotide
auagugcgaucacagacuc

SEQ ID NO: 305287 - RNA, 19 nt, Artificial Sequence
  Description of Artificial Sequence: Synthetic oligonucleotide
uacaucaagcaguaggcac

SEQ ID NO: 305288 - RNA, 19 nt, Artificial Sequence
  Description of Artificial Sequence: Synthetic oligonucleotide
gaagaagaggaucacagua

SEQ ID NO: 305289 - RNA, 19 nt, Artificial Sequence
  Description of Artificial Sequence: Synthetic oligonucleotide
guaggcauacaccagauaa

SEQ ID NO: 305290 - RNA, 19 nt, Artificial Sequence
  Description of Artificial Sequence: Synthetic oligonucleotide
ucugcgauauccuucccca

SEQ ID NO: 305291 - RNA, 19 nt, Artificial Sequence
  Description of Artificial Sequence: Synthetic oligonucleotide
cugcguguaaacgauaagg

SEQ ID NO: 305292 - RNA, 19 nt, Artificial Sequence
  Description of Artificial Sequence: Synthetic oligonucleotide
aaugccucacucaaggcug

SEQ ID NO: 305293 - RNA, 19 nt, Artificial Sequence
  Description of Artificial Sequence: Synthetic oligonucleotide
auuguauuugagccagauc

SEQ ID NO: 305294 - RNA, 19 nt, Artificial Sequence
  Description of Artificial Sequence: Synthetic oligonucleotide
uuaaaaguggcaugaggau

SEQ ID NO: 305295 - RNA, 19 nt, Artificial Sequence
  Description of Artificial Sequence: Synthetic oligonucleotide
uaggcauacaccagauaag

SEQ ID NO: 305296 - RNA, 19 nt, Artificial Sequence
  Description of Artificial Sequence: Synthetic oligonucleotide
augucauuauuaaugauca

SEQ ID NO: 305297 - RNA, 19 nt, Artificial Sequence
  Description of Artificial Sequence: Synthetic oligonucleotide
guucagaggacaagcaucg

SEQ ID NO: 305298 - RNA, 19 nt, Artificial Sequence
  Description of Artificial Sequence: Synthetic oligonucleotide
ucuaggggaaucugcaaca

SEQ ID NO: 305299 - RNA, 19 nt, Artificial Sequence
  Description of Artificial Sequence: Synthetic oligonucleotide
uguaagcccaguagugucc

SEQ ID NO: 305300 - RNA, 19 nt, Artificial Sequence
  Description of Artificial Sequence: Synthetic oligonucleotide
cauuaaugccuucuguuac

SEQ ID NO: 305301 - RNA, 19 nt, Artificial Sequence
  Description of Artificial Sequence: Synthetic oligonucleotide
ucucucgucauagcuaagg

SEQ ID NO: 305302 - RNA, 19 nt, Artificial Sequence
  Description of Artificial Sequence: Synthetic oligonucleotide
aggauuauacaaaaccaag

SEQ ID NO: 305303 - RNA, 19 nt, Artificial Sequence
  Description of Artificial Sequence: Synthetic oligonucleotide
auaacuaacugcuccucca

SEQ ID NO: 305304 - RNA, 19 nt, Artificial Sequence
  Description of Artificial Sequence: Synthetic oligonucleotide
aucaugagaggggugaggg

SEQ ID NO: 305305 - RNA, 19 nt, Artificial Sequence
  Description of Artificial Sequence: Synthetic oligonucleotide
gaagacaggucuuaacaga

SEQ ID NO: 305306 - RNA, 19 nt, Artificial Sequence
  Description of Artificial Sequence: Synthetic oligonucleotide
uuuauuccugggauugcug

SEQ ID NO: 305307 - RNA, 19 nt, Artificial Sequence
  Description of Artificial Sequence: Synthetic oligonucleotide
aguauuaugggagauuaaa

SEQ ID NO: 305308 - RNA, 19 nt, Artificial Sequence
  Description of Artificial Sequence: Synthetic oligonucleotide
cauugauauacaucaagca

SEQ ID NO: 305309 - RNA, 19 nt, Artificial Sequence
  Description of Artificial Sequence: Synthetic oligonucleotide
auacugauagaucucucgu

SEQ ID NO: 305310 - RNA, 19 nt, Artificial Sequence
  Description of Artificial Sequence: Synthetic oligonucleotide
uggaccaauuuccaucagc

SEQ ID NO: 305311 - RNA, 19 nt, Artificial Sequence
  Description of Artificial Sequence: Synthetic oligonucleotide
aguucaguucugaugaguc

SEQ ID NO: 305312 - RNA, 19 nt, Artificial Sequence
  Description of Artificial Sequence: Synthetic oligonucleotide
cuauaaugcacugaccuuc

SEQ ID NO: 305313 - RNA, 19 nt, Artificial Sequence
  Description of Artificial Sequence: Synthetic oligonucleotide
ugauuucuccaauaauccu

SEQ ID NO: 305314 - RNA, 19 nt, Artificial Sequence
  Description of Artificial Sequence: Synthetic oligonucleotide
uauccuuaauccuuuuaaa

SEQ ID NO: 305315 - RNA, 19 nt, Artificial Sequence
  Description of Artificial Sequence: Synthetic oligonucleotide
ggcaauucaggucuucugg

SEQ ID NO: 305316 - RNA, 19 nt, Artificial Sequence
  Description of Artificial Sequence: Synthetic oligonucleotide
uggaguacucuucaugaaa

SEQ ID NO: 305317 - RNA, 19 nt, Artificial Sequence
  Description of Artificial Sequence: Synthetic oligonucleotide
gagauaucauuguauuuga

SEQ ID NO: 305318 - RNA, 19 nt, Artificial Sequence
  Description of Artificial Sequence: Synthetic oligonucleotide
aacgauaaggcaccugaua

SEQ ID NO: 305319 - RNA, 19 nt, Artificial Sequence
  Description of Artificial Sequence: Synthetic oligonucleotide
ucggcugcaaaggucauag

SEQ ID NO: 305320 - RNA, 19 nt, Artificial Sequence
  Description of Artificial Sequence: Synthetic oligonucleotide
agugcgaucacagacuccu

SEQ ID NO: 305321 - RNA, 19 nt, Artificial Sequence
  Description of Artificial Sequence: Synthetic oligonucleotide
aaaaguggcaugaggauua

SEQ ID NO: 305322 - RNA, 19 nt, Artificial Sequence
  Description of Artificial Sequence: Synthetic oligonucleotide
caacuaauaacuaacugcu

SEQ ID NO: 305323 - RNA, 19 nt, Artificial Sequence
  Description of Artificial Sequence: Synthetic oligonucleotide
auacuggugccugaagggc

SEQ ID NO: 305324 - RNA, 19 nt, Artificial Sequence
  Description of Artificial Sequence: Synthetic oligonucleotide
cuugaauggacuccaugac

SEQ ID NO: 305325 - RNA, 19 nt, Artificial Sequence
  Description of Artificial Sequence: Synthetic oligonucleotide
aacuaauaacuaacugcuc

SEQ ID NO: 305326 - RNA, 19 nt, Artificial Sequence
  Description of Artificial Sequence: Synthetic oligonucleotide
aacuuuauccuuaauccuu

SEQ ID NO: 305327 - RNA, 19 nt, Artificial Sequence
  Description of Artificial Sequence: Synthetic oligonucleotide
ccuuaauccuuuuaaacac

SEQ ID NO: 305328 - RNA, 19 nt, Artificial Sequence
  Description of Artificial Sequence: Synthetic oligonucleotide
uccucuaggggaaucugca

SEQ ID NO: 305329 - RNA, 19 nt, Artificial Sequence
  Description of Artificial Sequence: Synthetic oligonucleotide
cugaaucuugcucagccac

SEQ ID NO: 305330 - RNA, 19 nt, Artificial Sequence
  Description of Artificial Sequence: Synthetic oligonucleotide
ggagaauuuggucgaauag

SEQ ID NO: 305331 - RNA, 19 nt, Artificial Sequence
  Description of Artificial Sequence: Synthetic oligonucleotide
uuuggucgaauaguuggag

SEQ ID NO: 305332 - RNA, 19 nt, Artificial Sequence
  Description of Artificial Sequence: Synthetic oligonucleotide
accugauagaagaagagga

SEQ ID NO: 305333 - RNA, 19 nt, Artificial Sequence
  Description of Artificial Sequence: Synthetic oligonucleotide
auuaccaaucucugguagu

SEQ ID NO: 305334 - RNA, 19 nt, Artificial Sequence
  Description of Artificial Sequence: Synthetic oligonucleotide
gaaggguccguucuacuac

SEQ ID NO: 305335 - RNA, 19 nt, Artificial Sequence
  Description of Artificial Sequence: Synthetic oligonucleotide
gagauagcucucaugauuc

SEQ ID NO: 305336 - RNA, 19 nt, Artificial Sequence
  Description of Artificial Sequence: Synthetic oligonucleotide
gaaggaucuagaagccugg

SEQ ID NO: 305337 - RNA, 19 nt, Artificial Sequence
  Description of Artificial Sequence: Synthetic oligonucleotide
uuguauuguucuucccucc

SEQ ID NO: 305338 - RNA, 19 nt, Artificial Sequence
  Description of Artificial Sequence: Synthetic oligonucleotide
acagaguggucaucauucg

SEQ ID NO: 305339 - RNA, 19 nt, Artificial Sequence
  Description of Artificial Sequence: Synthetic oligonucleotide
caccuuucggaacaaacug

SEQ ID NO: 305340 - RNA, 19 nt, Artificial Sequence
  Description of Artificial Sequence: Synthetic oligonucleotide
cucagugacagagauauca

SEQ ID NO: 305341 - RNA, 19 nt, Artificial Sequence
  Description of Artificial Sequence: Synthetic oligonucleotide
acauuaaugccuucuguua

SEQ ID NO: 305342 - RNA, 19 nt, Artificial Sequence
  Description of Artificial Sequence: Synthetic oligonucleotide
ucugaugagucacccuucu

SEQ ID NO: 305343 - RNA, 19 nt, Artificial Sequence
  Description of Artificial Sequence: Synthetic oligonucleotide
auucaucacauuaaugccu

SEQ ID NO: 305344 - RNA, 19 nt, Artificial Sequence
  Description of Artificial Sequence: Synthetic oligonucleotide
ugcucaaaucuccaauuau

SEQ ID NO: 305345 - RNA, 19 nt, Artificial Sequence
  Description of Artificial Sequence: Synthetic oligonucleotide
gagauguggagaaauccug

SEQ ID NO: 305346 - RNA, 19 nt, Artificial Sequence
  Description of Artificial Sequence: Synthetic oligonucleotide
gaucucucgucauagcuaa

SEQ ID NO: 305347 - RNA, 19 nt, Artificial Sequence
  Description of Artificial Sequence: Synthetic oligonucleotide
uggguaagaauuccccuaa

SEQ ID NO: 305348 - RNA, 19 nt, Artificial Sequence
  Description of Artificial Sequence: Synthetic oligonucleotide
gaaggcgagggucacugug

SEQ ID NO: 305349 - RNA, 19 nt, Artificial Sequence
  Description of Artificial Sequence: Synthetic oligonucleotide
uccuugaauggacuccaug

SEQ ID NO: 305350 - RNA, 19 nt, Artificial Sequence
  Description of Artificial Sequence: Synthetic oligonucleotide
guguaaacgauaaggcacc

SEQ ID NO: 305351 - RNA, 19 nt, Artificial Sequence
  Description of Artificial Sequence: Synthetic oligonucleotide
gcaucggacaccaugagag

SEQ ID NO: 305352 - RNA, 19 nt, Artificial Sequence
  Description of Artificial Sequence: Synthetic oligonucleotide
aguggucaucauucguuuc

SEQ ID NO: 305353 - RNA, 19 nt, Artificial Sequence
  Description of Artificial Sequence: Synthetic oligonucleotide
acaaauucacaucccuuau

SEQ ID NO: 305354 - RNA, 19 nt, Artificial Sequence
  Description of Artificial Sequence: Synthetic oligonucleotide
cuuuggcaagcugauagag

SEQ ID NO: 305355 - RNA, 19 nt, Artificial Sequence
  Description of Artificial Sequence: Synthetic oligonucleotide
gaauuuggucgaauaguug

SEQ ID NO: 305356 - RNA, 19 nt, Artificial Sequence
  Description of Artificial Sequence: Synthetic oligonucleotide
guauuugagccagaucugc

SEQ ID NO: 305357 - RNA, 19 nt, Artificial Sequence
  Description of Artificial Sequence: Synthetic oligonucleotide
cucuaggggaaucugcaac

SEQ ID NO: 305358 - RNA, 19 nt, Artificial Sequence
  Description of Artificial Sequence: Synthetic oligonucleotide
uacugauagaucucucguc

SEQ ID NO: 305359 - RNA, 19 nt, Artificial Sequence
  Description of Artificial Sequence: Synthetic oligonucleotide
cguguaaacgauaaggcac

SEQ ID NO: 305360 - RNA, 19 nt, Artificial Sequence
  Description of Artificial Sequence: Synthetic oligonucleotide
aaaggcaauucaggucuuc

SEQ ID NO: 305361 - RNA, 19 nt, Artificial Sequence
  Description of Artificial Sequence: Synthetic oligonucleotide
ggucauagggagaauuugg

SEQ ID NO: 305362 - RNA, 19 nt, Artificial Sequence
  Description of Artificial Sequence: Synthetic oligonucleotide
ucucaagagccacgcaaga

SEQ ID NO: 305363 - RNA, 19 nt, Artificial Sequence
  Description of Artificial Sequence: Synthetic oligonucleotide
uaaaaguggcaugaggauu

SEQ ID NO: 305364 - RNA, 19 nt, Artificial Sequence
  Description of Artificial Sequence: Synthetic oligonucleotide
ucuuaacagaguucaucuc

SEQ ID NO: 305365 - RNA, 19 nt, Artificial Sequence
  Description of Artificial Sequence: Synthetic oligonucleotide
aagcaucggacaccaugag

SEQ ID NO: 305366 - RNA, 19 nt, Artificial Sequence
  Description of Artificial Sequence: Synthetic oligonucleotide
auggauuucucucuacaua

SEQ ID NO: 305367 - RNA, 19 nt, Artificial Sequence
  Description of Artificial Sequence: Synthetic oligonucleotide
caagcaucggacaccauga

SEQ ID NO: 305368 - RNA, 19 nt, Artificial Sequence
  Description of Artificial Sequence: Synthetic oligonucleotide
ucucccgccauuugaucag

SEQ ID NO: 305369 - RNA, 19 nt, Artificial Sequence
  Description of Artificial Sequence: Synthetic oligonucleotide
ugauagaucucucgucaua

SEQ ID NO: 305370 - RNA, 19 nt, Artificial Sequence
  Description of Artificial Sequence: Synthetic oligonucleotide
guacaucugcucgauagcc

SEQ ID NO: 305371 - RNA, 19 nt, Artificial Sequence
  Description of Artificial Sequence: Synthetic oligonucleotide
uucuucagggagauagcuc

SEQ ID NO: 305372 - RNA, 19 nt, Artificial Sequence
  Description of Artificial Sequence: Synthetic oligonucleotide
gguaagaauuccccuaaac

SEQ ID NO: 305373 - RNA, 19 nt, Artificial Sequence
  Description of Artificial Sequence: Synthetic oligonucleotide
acuauaaugcacugaccuu

SEQ ID NO: 305374 - RNA, 19 nt, Artificial Sequence
  Description of Artificial Sequence: Synthetic oligonucleotide
agauguaagcccaguagug

SEQ ID NO: 305375 - RNA, 19 nt, Artificial Sequence
  Description of Artificial Sequence: Synthetic oligonucleotide
aagagcaccaaugguuccu

SEQ ID NO: 305376 - RNA, 19 nt, Artificial Sequence
  Description of Artificial Sequence: Synthetic oligonucleotide
accaaucucugguaguuaa

SEQ ID NO: 305377 - RNA, 19 nt, Artificial Sequence
  Description of Artificial Sequence: Synthetic oligonucleotide
cugagucuggacugugagg

SEQ ID NO: 305378 - RNA, 19 nt, Artificial Sequence
  Description of Artificial Sequence: Synthetic oligonucleotide
ugcaaaggucauagggaga

SEQ ID NO: 305379 - RNA, 19 nt, Artificial Sequence
  Description of Artificial Sequence: Synthetic oligonucleotide
uaggcaugggccguguuug

SEQ ID NO: 305380 - RNA, 19 nt, Artificial Sequence
  Description of Artificial Sequence: Synthetic oligonucleotide
aaggcaauucaggucuucu

SEQ ID NO: 305381 - RNA, 19 nt, Artificial Sequence
  Description of Artificial Sequence: Synthetic oligonucleotide
uccaauuaucuuccuggau

SEQ ID NO: 305382 - RNA, 19 nt, Artificial Sequence
  Description of Artificial Sequence: Synthetic oligonucleotide
ucaagacgaugauuuccgc

SEQ ID NO: 305383 - RNA, 19 nt, Artificial Sequence
  Description of Artificial Sequence: Synthetic oligonucleotide
ucaguagggcagcauuacu

SEQ ID NO: 305384 - RNA, 19 nt, Artificial Sequence
  Description of Artificial Sequence: Synthetic oligonucleotide
ucgaauaguuggaggcucu

SEQ ID NO: 305385 - RNA, 19 nt, Artificial Sequence
  Description of Artificial Sequence: Synthetic oligonucleotide
uugggugcuucauuuugga

SEQ ID NO: 305386 - RNA, 19 nt, Artificial Sequence
  Description of Artificial Sequence: Synthetic oligonucleotide
ugauagagccuggaguacu

SEQ ID NO: 305387 - RNA, 19 nt, Artificial Sequence
  Description of Artificial Sequence: Synthetic oligonucleotide
uggguggugcucucaauac

SEQ ID NO: 305388 - RNA, 19 nt, Artificial Sequence
  Description of Artificial Sequence: Synthetic oligonucleotide
aaugggguauuuugucauu

SEQ ID NO: 305389 - RNA, 19 nt, Artificial Sequence
  Description of Artificial Sequence: Synthetic oligonucleotide
acaucccuuauuuucuaaa

SEQ ID NO: 305390 - RNA, 19 nt, Artificial Sequence
  Description of Artificial Sequence: Synthetic oligonucleotide
ugauacugauagaucucuc

SEQ ID NO: 305391 - RNA, 19 nt, Artificial Sequence
  Description of Artificial Sequence: Synthetic oligonucleotide
ggugcuucauuuuggaaga

SEQ ID NO: 305392 - RNA, 19 nt, Artificial Sequence
  Description of Artificial Sequence: Synthetic oligonucleotide
gagaauuuggucgaauagu

SEQ ID NO: 305393 - RNA, 19 nt, Artificial Sequence
  Description of Artificial Sequence: Synthetic oligonucleotide
auguuuuauuaggccaggg

SEQ ID NO: 305394 - RNA, 19 nt, Artificial Sequence
  Description of Artificial Sequence: Synthetic oligonucleotide
ucuugcucagccacccagu

SEQ ID NO: 305395 - RNA, 19 nt, Artificial Sequence
  Description of Artificial Sequence: Synthetic oligonucleotide
aggcaauucaggucuucug

SEQ ID NO: 305396 - RNA, 19 nt, Artificial Sequence
  Description of Artificial Sequence: Synthetic oligonucleotide
gcagcauuacucugguagg

SEQ ID NO: 305397 - RNA, 19 nt, Artificial Sequence
  Description of Artificial Sequence: Synthetic oligonucleotide
uccuuaaaauuugguuaag

SEQ ID NO: 305398 - RNA, 19 nt, Artificial Sequence
  Description of Artificial Sequence: Synthetic oligonucleotide
agauaagaaagugcuuccu

SEQ ID NO: 305399 - RNA, 19 nt, Artificial Sequence
  Description of Artificial Sequence: Synthetic oligonucleotide
guuauagauguaagcccag

SEQ ID NO: 305400 - RNA, 19 nt, Artificial Sequence
  Description of Artificial Sequence: Synthetic oligonucleotide
caucggacaccaugagagg

SEQ ID NO: 305401 - RNA, 19 nt, Artificial Sequence
  Description of Artificial Sequence: Synthetic oligonucleotide
cacuccgccaccucugaag

SEQ ID NO: 305402 - RNA, 19 nt, Artificial Sequence
  Description of Artificial Sequence: Synthetic oligonucleotide
cuaacugcuccuccaguuc

SEQ ID NO: 305403 - RNA, 19 nt, Artificial Sequence
  Description of Artificial Sequence: Synthetic oligonucleotide
ucagauucguuagcagcug

SEQ ID NO: 305404 - RNA, 19 nt, Artificial Sequence
  Description of Artificial Sequence: Synthetic oligonucleotide
ugcgguauagugcgaucac

SEQ ID NO: 305405 - RNA, 19 nt, Artificial Sequence
  Description of Artificial Sequence: Synthetic oligonucleotide
ugggauugcuguuaacauu

SEQ ID NO: 305406 - RNA, 19 nt, Artificial Sequence
  Description of Artificial Sequence: Synthetic oligonucleotide
caccaugagaggaggcugc

SEQ ID NO: 305407 - RNA, 19 nt, Artificial Sequence
  Description of Artificial Sequence: Synthetic oligonucleotide
cucacucaaggcugcuucc

SEQ ID NO: 305408 - RNA, 19 nt, Artificial Sequence
  Description of Artificial Sequence: Synthetic oligonucleotide
caaguauuaugggagauua

SEQ ID NO: 305409 - RNA, 19 nt, Artificial Sequence
  Description of Artificial Sequence: Synthetic oligonucleotide
aggucauagggagaauuug

SEQ ID NO: 305410 - RNA, 19 nt, Artificial Sequence
  Description of Artificial Sequence: Synthetic oligonucleotide
ucgauagccuggguggugc

SEQ ID NO: 305411 - RNA, 19 nt, Artificial Sequence
  Description of Artificial Sequence: Synthetic oligonucleotide
aggaucuagaagccugggu

SEQ ID NO: 305412 - RNA, 19 nt, Artificial Sequence
  Description of Artificial Sequence: Synthetic oligonucleotide
ucuagaagccuggguaaga

SEQ ID NO: 305413 - RNA, 19 nt, Artificial Sequence
  Description of Artificial Sequence: Synthetic oligonucleotide
aaucuccaauuaucuuccu

SEQ ID NO: 305414 - RNA, 19 nt, Artificial Sequence
  Description of Artificial Sequence: Synthetic oligonucleotide
ggagaaauccugugaugag

SEQ ID NO: 305415 - RNA, 19 nt, Artificial Sequence
  Description of Artificial Sequence: Synthetic oligonucleotide
aucauucguuucaaacagg

SEQ ID NO: 305416 - RNA, 19 nt, Artificial Sequence
  Description of Artificial Sequence: Synthetic oligonucleotide
cauguucagaggacaagca

SEQ ID NO: 305417 - RNA, 19 nt, Artificial Sequence
  Description of Artificial Sequence: Synthetic oligonucleotide
agauaucauuguauuugag

SEQ ID NO: 305418 - RNA, 19 nt, Artificial Sequence
  Description of Artificial Sequence: Synthetic oligonucleotide
ucgucauagcuaagguuuc

SEQ ID NO: 305419 - RNA, 19 nt, Artificial Sequence
  Description of Artificial Sequence: Synthetic oligonucleotide
ugggccguguuugcaauag

SEQ ID NO: 305420 - RNA, 19 nt, Artificial Sequence
  Description of Artificial Sequence: Synthetic oligonucleotide
agcauguucagaggacaag

SEQ ID NO: 305421 - RNA, 19 nt, Artificial Sequence
  Description of Artificial Sequence: Synthetic oligonucleotide
uaacagcuagcuggaacgc

SEQ ID NO: 305422 - RNA, 19 nt, Artificial Sequence
  Description of Artificial Sequence: Synthetic oligonucleotide
uggugcucucaauacaauu

SEQ ID NO: 305423 - RNA, 19 nt, Artificial Sequence
  Description of Artificial Sequence: Synthetic oligonucleotide
uuauuaggccagggcagcc

SEQ ID NO: 305424 - RNA, 19 nt, Artificial Sequence
  Description of Artificial Sequence: Synthetic oligonucleotide
aacagcuagcuggaacgca

SEQ ID NO: 305425 - RNA, 19 nt, Artificial Sequence
  Description of Artificial Sequence: Synthetic oligonucleotide
cagauucguuagcagcugc

SEQ ID NO: 305426 - RNA, 19 nt, Artificial Sequence
  Description of Artificial Sequence: Synthetic oligonucleotide
gggcuuauuucacuguuac

SEQ ID NO: 305427 - RNA, 19 nt, Artificial Sequence
  Description of Artificial Sequence: Synthetic oligonucleotide
caauuaucuuccuggaugu

SEQ ID NO: 305428 - RNA, 19 nt, Artificial Sequence
  Description of Artificial Sequence: Synthetic oligonucleotide
ggugcucucaauacaauuc

SEQ ID NO: 305429 - RNA, 19 nt, Artificial Sequence
  Description of Artificial Sequence: Synthetic oligonucleotide
agaacugcguguaaacgau

SEQ ID NO: 305430 - RNA, 19 nt, Artificial Sequence
  Description of Artificial Sequence: Synthetic oligonucleotide
agguugguuauagauguaa

SEQ ID NO: 305431 - RNA, 19 nt, Artificial Sequence
  Description of Artificial Sequence: Synthetic oligonucleotide
agauagcucucaugauucu

SEQ ID NO: 305432 - RNA, 19 nt, Artificial Sequence
  Description of Artificial Sequence: Synthetic oligonucleotide
cacccaguccuccucuagg

SEQ ID NO: 305433 - RNA, 19 nt, Artificial Sequence
  Description of Artificial Sequence: Synthetic oligonucleotide
gguugguuauagauguaag

SEQ ID NO: 305434 - RNA, 19 nt, Artificial Sequence
  Description of Artificial Sequence: Synthetic oligonucleotide
auuuggucgaauaguugga

SEQ ID NO: 305435 - RNA, 19 nt, Artificial Sequence
  Description of Artificial Sequence: Synthetic oligonucleotide
guggcaugaggauuauaca

SEQ ID NO: 305436 - RNA, 19 nt, Artificial Sequence
  Description of Artificial Sequence: Synthetic oligonucleotide
ccguguuugcaauagcuug

SEQ ID NO: 305437 - RNA, 19 nt, Artificial Sequence
  Description of Artificial Sequence: Synthetic oligonucleotide
uguaaacgauaaggcaccu

SEQ ID NO: 305438 - RNA, 19 nt, Artificial Sequence
  Description of Artificial Sequence: Synthetic oligonucleotide
agaguggucaucauucguu

SEQ ID NO: 305439 - RNA, 19 nt, Artificial Sequence
  Description of Artificial Sequence: Synthetic oligonucleotide
ccgccauuugaucagauuc

SEQ ID NO: 305440 - RNA, 19 nt, Artificial Sequence
  Description of Artificial Sequence: Synthetic oligonucleotide
guagggcagcauuacucug

SEQ ID NO: 305441 - RNA, 19 nt, Artificial Sequence
  Description of Artificial Sequence: Synthetic oligonucleotide
acgaugauuuccgcagaag

SEQ ID NO: 305442 - RNA, 19 nt, Artificial Sequence
  Description of Artificial Sequence: Synthetic oligonucleotide
aggcaugggccguguuugc

SEQ ID NO: 305443 - RNA, 19 nt, Artificial Sequence
  Description of Artificial Sequence: Synthetic oligonucleotide
agcauuacucugguaggca

SEQ ID NO: 305444 - RNA, 19 nt, Artificial Sequence
  Description of Artificial Sequence: Synthetic oligonucleotide
acgcaagacuuuauuacca

SEQ ID NO: 305445 - RNA, 19 nt, Artificial Sequence
  Description of Artificial Sequence: Synthetic oligonucleotide
gauagagccuggaguacuc

SEQ ID NO: 305446 - RNA, 19 nt, Artificial Sequence
  Description of Artificial Sequence: Synthetic oligonucleotide
gacgaugauuuccgcagaa

SEQ ID NO: 305447 - RNA, 19 nt, Artificial Sequence
  Description of Artificial Sequence: Synthetic oligonucleotide
caccaaugguuccucauga

SEQ ID NO: 305448 - RNA, 19 nt, Artificial Sequence
  Description of Artificial Sequence: Synthetic oligonucleotide
gcucaaaucuccaauuauc

SEQ ID NO: 305449 - RNA, 19 nt, Artificial Sequence
  Description of Artificial Sequence: Synthetic oligonucleotide
auacaaauucacaucccuu

SEQ ID NO: 305450 - RNA, 19 nt, Artificial Sequence
  Description of Artificial Sequence: Synthetic oligonucleotide
cagggagauagcucucaug

SEQ ID NO: 305451 - RNA, 19 nt, Artificial Sequence
  Description of Artificial Sequence: Synthetic oligonucleotide
uagugcgaucacagacucc

SEQ ID NO: 305452 - RNA, 19 nt, Artificial Sequence
  Description of Artificial Sequence: Synthetic oligonucleotide
ggucuuaacagaguucauc

SEQ ID NO: 305453 - RNA, 19 nt, Artificial Sequence
  Description of Artificial Sequence: Synthetic oligonucleotide
aggggcuuauuucacuguu

SEQ ID NO: 305454 - RNA, 19 nt, Artificial Sequence
  Description of Artificial Sequence: Synthetic oligonucleotide
guaaacgauaaggcaccug

SEQ ID NO: 305455 - RNA, 19 nt, Artificial Sequence
  Description of Artificial Sequence: Synthetic oligonucleotide
cuccaauuaucuuccugga

SEQ ID NO: 305456 - RNA, 19 nt, Artificial Sequence
  Description of Artificial Sequence: Synthetic oligonucleotide
gagaccaggcugagucugg

SEQ ID NO: 305457 - RNA, 19 nt, Artificial Sequence
  Description of Artificial Sequence: Synthetic oligonucleotide
cagguggauacagggaaug

SEQ ID NO: 305458 - RNA, 19 nt, Artificial Sequence
  Description of Artificial Sequence: Synthetic oligonucleotide
ucaauucauucaucacauu

SEQ ID NO: 305459 - RNA, 19 nt, Artificial Sequence
  Description of Artificial Sequence: Synthetic oligonucleotide
aaguauuaugggagauuaa

SEQ ID NO: 305460 - RNA, 19 nt, Artificial Sequence
  Description of Artificial Sequence: Synthetic oligonucleotide
acaucaugagaggggugag

SEQ ID NO: 305461 - RNA, 19 nt, Artificial Sequence
  Description of Artificial Sequence: Synthetic oligonucleotide
gucgaauaguuggaggcuc

SEQ ID NO: 305462 - RNA, 19 nt, Artificial Sequence
  Description of Artificial Sequence: Synthetic oligonucleotide
ucugcgguauagugcgauc

SEQ ID NO: 305463 - RNA, 19 nt, Artificial Sequence
  Description of Artificial Sequence: Synthetic oligonucleotide
gugcucucaauacaauucu

SEQ ID NO: 305464 - RNA, 19 nt, Artificial Sequence
  Description of Artificial Sequence: Synthetic oligonucleotide
gcguguaaacgauaaggca

SEQ ID NO: 305465 - RNA, 19 nt, Artificial Sequence
  Description of Artificial Sequence: Synthetic oligonucleotide
cuucuguuacagagugguc

SEQ ID NO: 305466 - RNA, 19 nt, Artificial Sequence
  Description of Artificial Sequence: Synthetic oligonucleotide
ccccaaguaccauagaaca

SEQ ID NO: 305467 - RNA, 19 nt, Artificial Sequence
  Description of Artificial Sequence: Synthetic oligonucleotide
ugcauugaaaugggguauu

SEQ ID NO: 305468 - RNA, 19 nt, Artificial Sequence
  Description of Artificial Sequence: Synthetic oligonucleotide
agacagcgcuuccacuucu

SEQ ID NO: 305469 - RNA, 19 nt, Artificial Sequence
  Description of Artificial Sequence: Synthetic oligonucleotide
uaccuaaaaugugcaacuu

SEQ ID NO: 305470 - RNA, 19 nt, Artificial Sequence
  Description of Artificial Sequence: Synthetic oligonucleotide
gcaccaaugguuccucaug

SEQ ID NO: 305471 - RNA, 19 nt, Artificial Sequence
  Description of Artificial Sequence: Synthetic oligonucleotide
gcaauucaggucuucugga

SEQ ID NO: 305472 - RNA, 19 nt, Artificial Sequence
  Description of Artificial Sequence: Synthetic oligonucleotide
gguauagugcgaucacaga

SEQ ID NO: 305473 - RNA, 19 nt, Artificial Sequence
  Description of Artificial Sequence: Synthetic oligonucleotide
uucugcgguauagugcgau

SEQ ID NO: 305474 - RNA, 19 nt, Artificial Sequence
  Description of Artificial Sequence: Synthetic oligonucleotide
cgguauagugcgaucacag

SEQ ID NO: 305475 - RNA, 19 nt, Artificial Sequence
  Description of Artificial Sequence: Synthetic oligonucleotide
cugccgagguugguuauag

SEQ ID NO: 305476 - RNA, 19 nt, Artificial Sequence
  Description of Artificial Sequence: Synthetic oligonucleotide
cuuucggaacaaacuguaa

SEQ ID NO: 305477 - RNA, 19 nt, Artificial Sequence
  Description of Artificial Sequence: Synthetic oligonucleotide
caaguaccauagaacagcu

SEQ ID NO: 305478 - RNA, 19 nt, Artificial Sequence
  Description of Artificial Sequence: Synthetic oligonucleotide
aggaagacucagugacaga

SEQ ID NO: 305479 - RNA, 19 nt, Artificial Sequence
  Description of Artificial Sequence: Synthetic oligonucleotide
ucaggucuucuggauaauu

SEQ ID NO: 305480 - RNA, 19 nt, Artificial Sequence
  Description of Artificial Sequence: Synthetic oligonucleotide
gacaccaugagaggaggcu

SEQ ID NO: 305481 - RNA, 19 nt, Artificial Sequence
  Description of Artificial Sequence: Synthetic oligonucleotide
gauucguuagcagcugccu

SEQ ID NO: 305482 - RNA, 19 nt, Artificial Sequence
  Description of Artificial Sequence: Synthetic oligonucleotide
agccacgcaagacuuuauu

SEQ ID NO: 305483 - RNA, 19 nt, Artificial Sequence
  Description of Artificial Sequence: Synthetic oligonucleotide
cugaugagucacccuucug

SEQ ID NO: 305484 - RNA, 19 nt, Artificial Sequence
  Description of Artificial Sequence: Synthetic oligonucleotide
cugcgauauccuuccccag

SEQ ID NO: 305485 - RNA, 19 nt, Artificial Sequence
  Description of Artificial Sequence: Synthetic oligonucleotide
aaaguggcaugaggauuau

SEQ ID NO: 305486 - RNA, 19 nt, Artificial Sequence
  Description of Artificial Sequence: Synthetic oligonucleotide
aggguccguucuacuaccc

SEQ ID NO: 305487 - RNA, 19 nt, Artificial Sequence
  Description of Artificial Sequence: Synthetic oligonucleotide
gaguuuggggaggacucca

SEQ ID NO: 305488 - RNA, 19 nt, Artificial Sequence
  Description of Artificial Sequence: Synthetic oligonucleotide
uuacaggacugcucuucuu

SEQ ID NO: 305489 - RNA, 19 nt, Artificial Sequence
  Description of Artificial Sequence: Synthetic oligonucleotide
ggcaugaggauuauacaaa

SEQ ID NO: 305490 - RNA, 19 nt, Artificial Sequence
  Description of Artificial Sequence: Synthetic oligonucleotide
cuagaagccuggguaagaa

SEQ ID NO: 305491 - RNA, 19 nt, Artificial Sequence
  Description of Artificial Sequence: Synthetic oligonucleotide
ggagauagcucucaugauu

SEQ ID NO: 305492 - RNA, 19 nt, Artificial Sequence
  Description of Artificial Sequence: Synthetic oligonucleotide
ccaaucucugguaguuaag

SEQ ID NO: 305493 - RNA, 19 nt, Artificial Sequence
  Description of Artificial Sequence: Synthetic oligonucleotide
agguggauacagggaauga

SEQ ID NO: 305494 - RNA, 19 nt, Artificial Sequence
  Description of Artificial Sequence: Synthetic oligonucleotide
ggaucuuacaggacugcuc

SEQ ID NO: 305495 - RNA, 19 nt, Artificial Sequence
  Description of Artificial Sequence: Synthetic oligonucleotide
aaaaggcaauucaggucuu

SEQ ID NO: 305496 - RNA, 19 nt, Artificial Sequence
  Description of Artificial Sequence: Synthetic oligonucleotide
cugcgguauagugcgauca

SEQ ID NO: 305497 - RNA, 19 nt, Artificial Sequence
  Description of Artificial Sequence: Synthetic oligonucleotide
cuacccuuuugggugcuuc

SEQ ID NO: 305498 - RNA, 19 nt, Artificial Sequence
  Description of Artificial Sequence: Synthetic oligonucleotide
gguggugcucucaauacaa

SEQ ID NO: 305499 - RNA, 19 nt, Artificial Sequence
  Description of Artificial Sequence: Synthetic oligonucleotide
cugcucaaaucuccaauua

SEQ ID NO: 305500 - RNA, 19 nt, Artificial Sequence
  Description of Artificial Sequence: Synthetic oligonucleotide
uccguucuacuacccuuuu

SEQ ID NO: 305501 - RNA, 19 nt, Artificial Sequence
  Description of Artificial Sequence: Synthetic oligonucleotide
ccucacucaaggcugcuuc

SEQ ID NO: 305502 - RNA, 19 nt, Artificial Sequence
  Description of Artificial Sequence: Synthetic oligonucleotide
ugccaccucuuauacucuu

SEQ ID NO: 305503 - RNA, 19 nt, Artificial Sequence
  Description of Artificial Sequence: Synthetic oligonucleotide
gaguggucaucauucguuu

SEQ ID NO: 305504 - RNA, 19 nt, Artificial Sequence
  Description of Artificial Sequence: Synthetic oligonucleotide
cuggaccaauuuccaucag

SEQ ID NO: 305505 - RNA, 19 nt, Artificial Sequence
  Description of Artificial Sequence: Synthetic oligonucleotide
caguaguguccagcauugg

SEQ ID NO: 305506 - RNA, 19 nt, Artificial Sequence
  Description of Artificial Sequence: Synthetic oligonucleotide
uaccaaucucugguaguua

SEQ ID NO: 305507 - RNA, 19 nt, Artificial Sequence
  Description of Artificial Sequence: Synthetic oligonucleotide
caagcugauagagccugga

SEQ ID NO: 305508 - RNA, 19 nt, Artificial Sequence
  Description of Artificial Sequence: Synthetic oligonucleotide
ucacuccgccaccucugaa

SEQ ID NO: 305509 - RNA, 19 nt, Artificial Sequence
  Description of Artificial Sequence: Synthetic oligonucleotide
aggccugucaggagguaca

SEQ ID NO: 305510 - RNA, 19 nt, Artificial Sequence
  Description of Artificial Sequence: Synthetic oligonucleotide
ggacaagcaucggacacca

SEQ ID NO: 305511 - RNA, 19 nt, Artificial Sequence
  Description of Artificial Sequence: Synthetic oligonucleotide
gucauagcuaagguuucua

SEQ ID NO: 305512 - RNA, 19 nt, Artificial Sequence
  Description of Artificial Sequence: Synthetic oligonucleotide
gugccugaagggcaauuua

SEQ ID NO: 305513 - RNA, 19 nt, Artificial Sequence
  Description of Artificial Sequence: Synthetic oligonucleotide
caagagccacgcaagacuu

SEQ ID NO: 305514 - RNA, 19 nt, Artificial Sequence
  Description of Artificial Sequence: Synthetic oligonucleotide
cucgauagccuggguggug

SEQ ID NO: 305515 - RNA, 19 nt, Artificial Sequence
  Description of Artificial Sequence: Synthetic oligonucleotide
gccacgcaagacuuuauua

SEQ ID NO: 305516 - RNA, 19 nt, Artificial Sequence
  Description of Artificial Sequence: Synthetic oligonucleotide
cucucgucauagcuaaggu

SEQ ID NO: 305517 - RNA, 19 nt, Artificial Sequence
  Description of Artificial Sequence: Synthetic oligonucleotide
ucugccgagguugguuaua

SEQ ID NO: 305518 - RNA, 19 nt, Artificial Sequence
  Description of Artificial Sequence: Synthetic oligonucleotide
cgagguugguuauagaugu

SEQ ID NO: 305519 - RNA, 19 nt, Artificial Sequence
  Description of Artificial Sequence: Synthetic oligonucleotide
cauuguauuugagccagau

SEQ ID NO: 305520 - RNA, 19 nt, Artificial Sequence
  Description of Artificial Sequence: Synthetic oligonucleotide
ggaguacucuucaugaaau

SEQ ID NO: 305521 - RNA, 19 nt, Artificial Sequence
  Description of Artificial Sequence: Synthetic oligonucleotide
ccuuucggaacaaacugua

SEQ ID NO: 305522 - RNA, 19 nt, Artificial Sequence
  Description of Artificial Sequence: Synthetic oligonucleotide
ggcagucugcuccuuugca

SEQ ID NO: 305523 - RNA, 19 nt, Artificial Sequence
  Description of Artificial Sequence: Synthetic oligonucleotide
ucccgccauuugaucagau

SEQ ID NO: 305524 - RNA, 19 nt, Artificial Sequence
  Description of Artificial Sequence: Synthetic oligonucleotide
ggguggugcucucaauaca

SEQ ID NO: 305525 - RNA, 19 nt, Artificial Sequence
  Description of Artificial Sequence: Synthetic oligonucleotide
gaagaggaucacaguacau

SEQ ID NO: 305526 - RNA, 19 nt, Artificial Sequence
  Description of Artificial Sequence: Synthetic oligonucleotide
cuaggggaaucugcaacaa

SEQ ID NO: 305527 - RNA, 19 nt, Artificial Sequence
  Description of Artificial Sequence: Synthetic oligonucleotide
cugcaacaacagacugcug

SEQ ID NO: 305528 - RNA, 19 nt, Artificial Sequence
  Description of Artificial Sequence: Synthetic oligonucleotide
guaggcaugggccguguuu

SEQ ID NO: 305529 - RNA, 19 nt, Artificial Sequence
  Description of Artificial Sequence: Synthetic oligonucleotide
ccccuaaacacagcugcag

SEQ ID NO: 305530 - RNA, 19 nt, Artificial Sequence
  Description of Artificial Sequence: Synthetic oligonucleotide
gaauaguuggaggcucuuu

SEQ ID NO: 305531 - RNA, 19 nt, Artificial Sequence
  Description of Artificial Sequence: Synthetic oligonucleotide
cugauagaucucucgucau

SEQ ID NO: 305532 - RNA, 19 nt, Artificial Sequence
  Description of Artificial Sequence: Synthetic oligonucleotide
cucacuccgccaccucuga

SEQ ID NO: 305533 - RNA, 19 nt, Artificial Sequence
  Description of Artificial Sequence: Synthetic oligonucleotide
cacucccagggaggagugg

SEQ ID NO: 305534 - RNA, 19 nt, Artificial Sequence
  Description of Artificial Sequence: Synthetic oligonucleotide
augggccguguuugcaaua

SEQ ID NO: 305535 - RNA, 19 nt, Artificial Sequence
  Description of Artificial Sequence: Synthetic oligonucleotide
cccuaaacacagcugcaga

SEQ ID NO: 305536 - RNA, 19 nt, Artificial Sequence
  Description of Artificial Sequence: Synthetic oligonucleotide
aucucucgucauagcuaag

SEQ ID NO: 305537 - RNA, 19 nt, Artificial Sequence
  Description of Artificial Sequence: Synthetic oligonucleotide
gggguauuuugucauugau

SEQ ID NO: 305538 - RNA, 19 nt, Artificial Sequence
  Description of Artificial Sequence: Synthetic oligonucleotide
ggacaccaugagaggaggc

SEQ ID NO: 305539 - RNA, 19 nt, Artificial Sequence
  Description of Artificial Sequence: Synthetic oligonucleotide
agacucagugacagagaua

SEQ ID NO: 305540 - RNA, 19 nt, Artificial Sequence
  Description of Artificial Sequence: Synthetic oligonucleotide
ucguaggcaugggccgugu

SEQ ID NO: 305541 - RNA, 19 nt, Artificial Sequence
  Description of Artificial Sequence: Synthetic oligonucleotide
guuacuguugagacuccuu

SEQ ID NO: 305542 - RNA, 19 nt, Artificial Sequence
  Description of Artificial Sequence: Synthetic oligonucleotide
ccugauagaagaagaggau

SEQ ID NO: 305543 - RNA, 19 nt, Artificial Sequence
  Description of Artificial Sequence: Synthetic oligonucleotide
gcgauauccuuccccaggu

SEQ ID NO: 305544 - RNA, 19 nt, Artificial Sequence
  Description of Artificial Sequence: Synthetic oligonucleotide
agacaccuuucggaacaaa

SEQ ID NO: 305545 - RNA, 19 nt, Artificial Sequence
  Description of Artificial Sequence: Synthetic oligonucleotide
aggucuuaacagaguucau

SEQ ID NO: 305546 - RNA, 19 nt, Artificial Sequence
  Description of Artificial Sequence: Synthetic oligonucleotide
ggcuuauuucacuguuacu

SEQ ID NO: 305547 - RNA, 19 nt, Artificial Sequence
  Description of Artificial Sequence: Synthetic oligonucleotide
agcugcaaaucggcugcaa

SEQ ID NO: 305548 - RNA, 19 nt, Artificial Sequence
  Description of Artificial Sequence: Synthetic oligonucleotide
ggccguguuugcaauagcu

SEQ ID NO: 305549 - RNA, 19 nt, Artificial Sequence
  Description of Artificial Sequence: Synthetic oligonucleotide
cauugaaaugggguauuuu

SEQ ID NO: 305550 - RNA, 19 nt, Artificial Sequence
  Description of Artificial Sequence: Synthetic oligonucleotide
gguccguucuacuacccuu

SEQ ID NO: 305551 - RNA, 19 nt, Artificial Sequence
  Description of Artificial Sequence: Synthetic oligonucleotide
ggucgaauaguuggaggcu

SEQ ID NO: 305552 - RNA, 19 nt, Artificial Sequence
  Description of Artificial Sequence: Synthetic oligonucleotide
aucggcugcaaaggucaua

SEQ ID NO: 305553 - RNA, 19 nt, Artificial Sequence
  Description of Artificial Sequence: Synthetic oligonucleotide
gggccguguuugcaauagc

SEQ ID NO: 305554 - RNA, 19 nt, Artificial Sequence
  Description of Artificial Sequence: Synthetic oligonucleotide
gcgguauagugcgaucaca

SEQ ID NO: 305555 - RNA, 19 nt, Artificial Sequence
  Description of Artificial Sequence: Synthetic oligonucleotide
cggacaccaugagaggagg

SEQ ID NO: 305556 - RNA, 19 nt, Artificial Sequence
  Description of Artificial Sequence: Synthetic oligonucleotide
cagaaggguccguucuacu

SEQ ID NO: 305557 - RNA, 19 nt, Artificial Sequence
  Description of Artificial Sequence: Synthetic oligonucleotide
cagagaccaggcugagucu

SEQ ID NO: 305558 - RNA, 19 nt, Artificial Sequence
  Description of Artificial Sequence: Synthetic oligonucleotide
caugggccguguuugcaau

SEQ ID NO: 305559 - RNA, 19 nt, Artificial Sequence
  Description of Artificial Sequence: Synthetic oligonucleotide
gccauuugaucagauucgu

SEQ ID NO: 305560 - RNA, 19 nt, Artificial Sequence
  Description of Artificial Sequence: Synthetic oligonucleotide
cacaguacaucugcucgau

SEQ ID NO: 305561 - RNA, 19 nt, Artificial Sequence
  Description of Artificial Sequence: Synthetic oligonucleotide
gggaucuuacaggacugcu

SEQ ID NO: 305562 - RNA, 19 nt, Artificial Sequence
  Description of Artificial Sequence: Synthetic oligonucleotide
guccguucuacuacccuuu

SEQ ID NO: 305563 - RNA, 19 nt, Artificial Sequence
  Description of Artificial Sequence: Synthetic oligonucleotide
gcauaguuguauuguucuu

SEQ ID NO: 305564 - RNA, 19 nt, Artificial Sequence
  Description of Artificial Sequence: Synthetic oligonucleotide
gggagauagcucucaugau

SEQ ID NO: 305565 - RNA, 19 nt, Artificial Sequence
  Description of Artificial Sequence: Synthetic oligonucleotide
ggggcuuauuucacuguua

SEQ ID NO: 305566 - RNA, 19 nt, Artificial Sequence
  Description of Artificial Sequence: Synthetic oligonucleotide
acuacccuuuugggugcuu

SEQ ID NO: 305567 - RNA, 19 nt, Artificial Sequence
  Description of Artificial Sequence: Synthetic oligonucleotide
cucccgccauuugaucaga

SEQ ID NO: 305568 - RNA, 19 nt, Artificial Sequence
  Description of Artificial Sequence: Synthetic oligonucleotide
ggguccguucuacuacccu

SEQ ID NO: 305569 - RNA, 19 nt, Artificial Sequence
  Description of Artificial Sequence: Synthetic oligonucleotide
guggugcucucaauacaau

SEQ ID NO: 305570 - RNA, 19 nt, Artificial Sequence
  Description of Artificial Sequence: Synthetic oligonucleotide
gaggcucuuucaagacgau

SEQ ID NO: 305571 - RNA, 19 nt, Artificial Sequence
  Description of Artificial Sequence: Synthetic oligonucleotide
cggcugcaaaggucauagg

SEQ ID NO: 305572 - RNA, 19 nt, Artificial Sequence
  Description of Artificial Sequence: Synthetic oligonucleotide
cuccuugaauggacuccau

SEQ ID NO: 305573 - RNA, 19 nt, Artificial Sequence
  Description of Artificial Sequence: Synthetic oligonucleotide
gagccacgcaagacuuuau

SEQ ID NO: 305574 - RNA, 19 nt, Artificial Sequence
  Description of Artificial Sequence: Synthetic oligonucleotide
gcauugaaaugggguauuu

SEQ ID NO: 305575 - RNA, 19 nt, Artificial Sequence
  Description of Artificial Sequence: Synthetic oligonucleotide
ccauuugaucagauucguu

SEQ ID NO: 305576 - RNA, 19 nt, Artificial Sequence
  Description of Artificial Sequence: Synthetic oligonucleotide
cccagguaagagcaccaau

SEQ ID NO: 305577 - RNA, 19 nt, Artificial Sequence
  Description of Artificial Sequence: Synthetic oligonucleotide
gcucgauagccuggguggu

SEQ ID NO: 305578 - RNA, 19 nt, Artificial Sequence
  Description of Artificial Sequence: Synthetic oligonucleotide
cccgccauuugaucagauu

SEQ ID NO: 305579 - RNA, 19 nt, Artificial Sequence
  Description of Artificial Sequence: Synthetic oligonucleotide
gggccaccuucaugauacu

SEQ ID NO: 305580 - RNA, 19 nt, Artificial Sequence
  Description of Artificial Sequence: Synthetic oligonucleotide
cgauagccuggguggugcu

SEQ ID NO: 305581 - RNA, 19 nt, Artificial Sequence
  Description of Artificial Sequence: Synthetic oligonucleotide
cgaauaguuggaggcucuu

SEQ ID NO: 305582 - RNA, 19 nt, Artificial Sequence
  Description of Artificial Sequence: Synthetic oligonucleotide
uguguuuucagcuuuauag

SEQ ID NO: 305583 - RNA, 19 nt, Artificial Sequence
  Description of Artificial Sequence: Synthetic oligonucleotide
ucugcuuccagaaaugaag

SEQ ID NO: 305584 - RNA, 19 nt, Artificial Sequence
  Description of Artificial Sequence: Synthetic oligonucleotide
aaguucuccuuuuagcuuc

SEQ ID NO: 305585 - RNA, 19 nt, Artificial Sequence
  Description of Artificial Sequence: Synthetic oligonucleotide
uguuuucagcuuuauaggg

SEQ ID NO: 305586 - RNA, 19 nt, Artificial Sequence
  Description of Artificial Sequence: Synthetic oligonucleotide
gagacugagagucuaacag

SEQ ID NO: 305587 - RNA, 19 nt, Artificial Sequence
  Description of Artificial Sequence: Synthetic oligonucleotide
aaguugaacaguuugccga

SEQ ID NO: 305588 - RNA, 19 nt, Artificial Sequence
  Description of Artificial Sequence: Synthetic oligonucleotide
cuugagacgaaucugcugc

SEQ ID NO: 305589 - RNA, 19 nt, Artificial Sequence
  Description of Artificial Sequence: Synthetic oligonucleotide
auuuugguaaguugaacag

SEQ ID NO: 305590 - RNA, 19 nt, Artificial Sequence
  Description of Artificial Sequence: Synthetic oligonucleotide
aagaguccggaucuugccc

SEQ ID NO: 305591 - RNA, 19 nt, Artificial Sequence
  Description of Artificial Sequence: Synthetic oligonucleotide
gagacuacguccaaggagg

SEQ ID NO: 305592 - RNA, 19 nt, Artificial Sequence
  Description of Artificial Sequence: Synthetic oligonucleotide
uuuaccucuaccucagaag

SEQ ID NO: 305593 - RNA, 19 nt, Artificial Sequence
  Description of Artificial Sequence: Synthetic oligonucleotide
uaguguuuaucaaauguga

SEQ ID NO: 305594 - RNA, 19 nt, Artificial Sequence
  Description of Artificial Sequence: Synthetic oligonucleotide
cacugauugacauaauccc

SEQ ID NO: 305595 - RNA, 19 nt, Artificial Sequence
  Description of Artificial Sequence: Synthetic oligonucleotide
uuaccucuaccucagaaga

SEQ ID NO: 305596 - RNA, 19 nt, Artificial Sequence
  Description of Artificial Sequence: Synthetic oligonucleotide
gauaacgcgguguugguug

SEQ ID NO: 305597 - RNA, 19 nt, Artificial Sequence
  Description of Artificial Sequence: Synthetic oligonucleotide
ugguaaguugaacaguuug

SEQ ID NO: 305598 - RNA, 19 nt, Artificial Sequence
  Description of Artificial Sequence: Synthetic oligonucleotide
aaggcgcuucugcagagcc

SEQ ID NO: 305599 - RNA, 19 nt, Artificial Sequence
  Description of Artificial Sequence: Synthetic oligonucleotide
ggaagauuuauuucugugg

SEQ ID NO: 305600 - RNA, 19 nt, Artificial Sequence
  Description of Artificial Sequence: Synthetic oligonucleotide
aaaugaagugugcucccuc

SEQ ID NO: 305601 - RNA, 19 nt, Artificial Sequence
  Description of Artificial Sequence: Synthetic oligonucleotide
uugacauccagguagucac

SEQ ID NO: 305602 - RNA, 19 nt, Artificial Sequence
  Description of Artificial Sequence: Synthetic oligonucleotide
guguuuucagcuuuauagg

SEQ ID NO: 305603 - RNA, 19 nt, Artificial Sequence
  Description of Artificial Sequence: Synthetic oligonucleotide
acacguugguuuuaauggc

SEQ ID NO: 305604 - RNA, 19 nt, Artificial Sequence
  Description of Artificial Sequence: Synthetic oligonucleotide
ucuagucucuccuucagcu

SEQ ID NO: 305605 - RNA, 19 nt, Artificial Sequence
  Description of Artificial Sequence: Synthetic oligonucleotide
uccguuuccgccaggaugc

SEQ ID NO: 305606 - RNA, 19 nt, Artificial Sequence
  Description of Artificial Sequence: Synthetic oligonucleotide
ucggcuucccucaacuugg

SEQ ID NO: 305607 - RNA, 19 nt, Artificial Sequence
  Description of Artificial Sequence: Synthetic oligonucleotide
auggcauugacauccaggu

SEQ ID NO: 305608 - RNA, 19 nt, Artificial Sequence
  Description of Artificial Sequence: Synthetic oligonucleotide
uuuaugggaugccugcagc

SEQ ID NO: 305609 - RNA, 19 nt, Artificial Sequence
  Description of Artificial Sequence: Synthetic oligonucleotide
caacuuggagacuacgucc

SEQ ID NO: 305610 - RNA, 19 nt, Artificial Sequence
  Description of Artificial Sequence: Synthetic oligonucleotide
ucaacuuggagacuacguc

SEQ ID NO: 305611 - RNA, 19 nt, Artificial Sequence
  Description of Artificial Sequence: Synthetic oligonucleotide
gacaauugcacugauugac

SEQ ID NO: 305612 - RNA, 19 nt, Artificial Sequence
  Description of Artificial Sequence: Synthetic oligonucleotide
cauaauucuggcacucugc

SEQ ID NO: 305613 - RNA, 19 nt, Artificial Sequence
  Description of Artificial Sequence: Synthetic oligonucleotide
aagauuacucagcuccuca

SEQ ID NO: 305614 - RNA, 19 nt, Artificial Sequence
  Description of Artificial Sequence: Synthetic oligonucleotide
cuucccucaacuuggagac

SEQ ID NO: 305615 - RNA, 19 nt, Artificial Sequence
  Description of Artificial Sequence: Synthetic oligonucleotide
ucuucuauuccugaagacu

SEQ ID NO: 305616 - RNA, 19 nt, Artificial Sequence
  Description of Artificial Sequence: Synthetic oligonucleotide
gguugguuuauuuguaagg

SEQ ID NO: 305617 - RNA, 19 nt, Artificial Sequence
  Description of Artificial Sequence: Synthetic oligonucleotide
uucacugugacccgugacu

SEQ ID NO: 305618 - RNA, 19 nt, Artificial Sequence
  Description of Artificial Sequence: Synthetic oligonucleotide
uugacauaaucccgagcgg

SEQ ID NO: 305619 - RNA, 19 nt, Artificial Sequence
  Description of Artificial Sequence: Synthetic oligonucleotide
uauuuguaaggaaugugua

SEQ ID NO: 305620 - RNA, 19 nt, Artificial Sequence
  Description of Artificial Sequence: Synthetic oligonucleotide
agauuacucagcuccucac

SEQ ID NO: 305621 - RNA, 19 nt, Artificial Sequence
  Description of Artificial Sequence: Synthetic oligonucleotide
auaguguuuaucaaaugug

SEQ ID NO: 305622 - RNA, 19 nt, Artificial Sequence
  Description of Artificial Sequence: Synthetic oligonucleotide
ugggucgucuucaaaagcu

SEQ ID NO: 305623 - RNA, 19 nt, Artificial Sequence
  Description of Artificial Sequence: Synthetic oligonucleotide
uucucuacuaguuccuugu

SEQ ID NO: 305624 - RNA, 19 nt, Artificial Sequence
  Description of Artificial Sequence: Synthetic oligonucleotide
aguugaacaguuugccgag

SEQ ID NO: 305625 - RNA, 19 nt, Artificial Sequence
  Description of Artificial Sequence: Synthetic oligonucleotide
gaagauuuauuucuguggu

SEQ ID NO: 305626 - RNA, 19 nt, Artificial Sequence
  Description of Artificial Sequence: Synthetic oligonucleotide
acugauugacauaaucccg

SEQ ID NO: 305627 - RNA, 19 nt, Artificial Sequence
  Description of Artificial Sequence: Synthetic oligonucleotide
gguucuuuuacagacuggg

SEQ ID NO: 305628 - RNA, 19 nt, Artificial Sequence
  Description of Artificial Sequence: Synthetic oligonucleotide
cugucagcguugaugaggg

SEQ ID NO: 305629 - RNA, 19 nt, Artificial Sequence
  Description of Artificial Sequence: Synthetic oligonucleotide
ugcacugauugacauaauc

SEQ ID NO: 305630 - RNA, 19 nt, Artificial Sequence
  Description of Artificial Sequence: Synthetic oligonucleotide
cacgucaccauccucuacg

SEQ ID NO: 305631 - RNA, 19 nt, Artificial Sequence
  Description of Artificial Sequence: Synthetic oligonucleotide
caagauggaguucuccugc

SEQ ID NO: 305632 - RNA, 19 nt, Artificial Sequence
  Description of Artificial Sequence: Synthetic oligonucleotide
auuuguaaggaauguguaa

SEQ ID NO: 305633 - RNA, 19 nt, Artificial Sequence
  Description of Artificial Sequence: Synthetic oligonucleotide
uccugaagaguccggaucu

SEQ ID NO: 305634 - RNA, 19 nt, Artificial Sequence
  Description of Artificial Sequence: Synthetic oligonucleotide
uccagguagucacauguca

SEQ ID NO: 305635 - RNA, 19 nt, Artificial Sequence
  Description of Artificial Sequence: Synthetic oligonucleotide
acgaaucugcugcuggucg

SEQ ID NO: 305636 - RNA, 19 nt, Artificial Sequence
  Description of Artificial Sequence: Synthetic oligonucleotide
gaacucaccaccuggccug

SEQ ID NO: 305637 - RNA, 19 nt, Artificial Sequence
  Description of Artificial Sequence: Synthetic oligonucleotide
uuauuucugugguucugag

SEQ ID NO: 305638 - RNA, 19 nt, Artificial Sequence
  Description of Artificial Sequence: Synthetic oligonucleotide
uagagaguguagcuucucc

SEQ ID NO: 305639 - RNA, 19 nt, Artificial Sequence
  Description of Artificial Sequence: Synthetic oligonucleotide
ugacauaaucccgagcggc

SEQ ID NO: 305640 - RNA, 19 nt, Artificial Sequence
  Description of Artificial Sequence: Synthetic oligonucleotide
cuggauaacgcgguguugg

SEQ ID NO: 305641 - RNA, 19 nt, Artificial Sequence
  Description of Artificial Sequence: Synthetic oligonucleotide
uuggguuagagaguguagc

SEQ ID NO: 305642 - RNA, 19 nt, Artificial Sequence
  Description of Artificial Sequence: Synthetic oligonucleotide
gaagacuguaauuugcugu

SEQ ID NO: 305643 - RNA, 19 nt, Artificial Sequence
  Description of Artificial Sequence: Synthetic oligonucleotide
uaggaccugcuucucaaag

SEQ ID NO: 305644 - RNA, 19 nt, Artificial Sequence
  Description of Artificial Sequence: Synthetic oligonucleotide
uuugccgggcaacacguug

SEQ ID NO: 305645 - RNA, 19 nt, Artificial Sequence
  Description of Artificial Sequence: Synthetic oligonucleotide
uguguaaggcauuuuggua

SEQ ID NO: 305646 - RNA, 19 nt, Artificial Sequence
  Description of Artificial Sequence: Synthetic oligonucleotide
uguaauuugcugugcaguu

SEQ ID NO: 305647 - RNA, 19 nt, Artificial Sequence
  Description of Artificial Sequence: Synthetic oligonucleotide
cuucgagcugcuaccaucc

SEQ ID NO: 305648 - RNA, 19 nt, Artificial Sequence
  Description of Artificial Sequence: Synthetic oligonucleotide
ugugcaguucugccauucg

SEQ ID NO: 305649 - RNA, 19 nt, Artificial Sequence
  Description of Artificial Sequence: Synthetic oligonucleotide
agcaggugguuucuucagc

SEQ ID NO: 305650 - RNA, 19 nt, Artificial Sequence
  Description of Artificial Sequence: Synthetic oligonucleotide
agcuguucguucuccgccc

SEQ ID NO: 305651 - RNA, 19 nt, Artificial Sequence
  Description of Artificial Sequence: Synthetic oligonucleotide
gaagaguccggaucuugcc

SEQ ID NO: 305652 - RNA, 19 nt, Artificial Sequence
  Description of Artificial Sequence: Synthetic oligonucleotide
ucuugaaguuugguggcgg

SEQ ID NO: 305653 - RNA, 19 nt, Artificial Sequence
  Description of Artificial Sequence: Synthetic oligonucleotide
ugaagauuacucagcuccu

SEQ ID NO: 305654 - RNA, 19 nt, Artificial Sequence
  Description of Artificial Sequence: Synthetic oligonucleotide
cuuccacacacguucuucc

SEQ ID NO: 305655 - RNA, 19 nt, Artificial Sequence
  Description of Artificial Sequence: Synthetic oligonucleotide
uuugguggcggcacgcccc

SEQ ID NO: 305656 - RNA, 19 nt, Artificial Sequence
  Description of Artificial Sequence: Synthetic oligonucleotide
uugccgggcaacacguugg

SEQ ID NO: 305657 - RNA, 19 nt, Artificial Sequence
  Description of Artificial Sequence: Synthetic oligonucleotide
acuacguccaaggagggcu

SEQ ID NO: 305658 - RNA, 19 nt, Artificial Sequence
  Description of Artificial Sequence: Synthetic oligonucleotide
agagaguguagcuucuccu

SEQ ID NO: 305659 - RNA, 19 nt, Artificial Sequence
  Description of Artificial Sequence: Synthetic oligonucleotide
uauaggguccugcucggcu

SEQ ID NO: 305660 - RNA, 19 nt, Artificial Sequence
  Description of Artificial Sequence: Synthetic oligonucleotide
cuuucuacccugguucugg

SEQ ID NO: 305661 - RNA, 19 nt, Artificial Sequence
  Description of Artificial Sequence: Synthetic oligonucleotide
ugugacccgugacuucugg

SEQ ID NO: 305662 - RNA, 19 nt, Artificial Sequence
  Description of Artificial Sequence: Synthetic oligonucleotide
gucggccucagcuugacug

SEQ ID NO: 305663 - RNA, 19 nt, Artificial Sequence
  Description of Artificial Sequence: Synthetic oligonucleotide
ugagcauacccuccguuuc

SEQ ID NO: 305664 - RNA, 19 nt, Artificial Sequence
  Description of Artificial Sequence: Synthetic oligonucleotide
uggucugucagcguugaug

SEQ ID NO: 305665 - RNA, 19 nt, Artificial Sequence
  Description of Artificial Sequence: Synthetic oligonucleotide
guucaaugcaucccucaag

SEQ ID NO: 305666 - RNA, 19 nt, Artificial Sequence
  Description of Artificial Sequence: Synthetic oligonucleotide
agaacucaccaccuggccu

SEQ ID NO: 305667 - RNA, 19 nt, Artificial Sequence
  Description of Artificial Sequence: Synthetic oligonucleotide
ucggcaucugcccggaggc

SEQ ID NO: 305668 - RNA, 19 nt, Artificial Sequence
  Description of Artificial Sequence: Synthetic oligonucleotide
ggagacuacguccaaggag

SEQ ID NO: 305669 - RNA, 19 nt, Artificial Sequence
  Description of Artificial Sequence: Synthetic oligonucleotide
uccagaaaugaagugugcu

SEQ ID NO: 305670 - RNA, 19 nt, Artificial Sequence
  Description of Artificial Sequence: Synthetic oligonucleotide
uaaacgacaggcugugcuc

SEQ ID NO: 305671 - RNA, 19 nt, Artificial Sequence
  Description of Artificial Sequence: Synthetic oligonucleotide
acucguuaaccucuuuucu

SEQ ID NO: 305672 - RNA, 19 nt, Artificial Sequence
  Description of Artificial Sequence: Synthetic oligonucleotide
cuuuaugggaugccugcag

SEQ ID NO: 305673 - RNA, 19 nt, Artificial Sequence
  Description of Artificial Sequence: Synthetic oligonucleotide
guauuuugggccuggccug

SEQ ID NO: 305674 - RNA, 19 nt, Artificial Sequence
  Description of Artificial Sequence: Synthetic oligonucleotide
cagagcuuuccguuguugc

SEQ ID NO: 305675 - RNA, 19 nt, Artificial Sequence
  Description of Artificial Sequence: Synthetic oligonucleotide
uucuagucucuccuucagc

SEQ ID NO: 305676 - RNA, 19 nt, Artificial Sequence
  Description of Artificial Sequence: Synthetic oligonucleotide
uaccucagaagacuguaau

SEQ ID NO: 305677 - RNA, 19 nt, Artificial Sequence
  Description of Artificial Sequence: Synthetic oligonucleotide
augaagugugcucccucac

SEQ ID NO: 305678 - RNA, 19 nt, Artificial Sequence
  Description of Artificial Sequence: Synthetic oligonucleotide
gagcuguucguucuccgcc

SEQ ID NO: 305679 - RNA, 19 nt, Artificial Sequence
  Description of Artificial Sequence: Synthetic oligonucleotide
ucguuaaccucuuuucuuu

SEQ ID NO: 305680 - RNA, 19 nt, Artificial Sequence
  Description of Artificial Sequence: Synthetic oligonucleotide
uuccagaaaugaagugugc

SEQ ID NO: 305681 - RNA, 19 nt, Artificial Sequence
  Description of Artificial Sequence: Synthetic oligonucleotide
uccucuacguggcucuuca

SEQ ID NO: 305682 - RNA, 19 nt, Artificial Sequence
  Description of Artificial Sequence: Synthetic oligonucleotide
agaguguagcuucuccuca

SEQ ID NO: 305683 - RNA, 19 nt, Artificial Sequence
  Description of Artificial Sequence: Synthetic oligonucleotide
gagaguguagcuucuccuc

SEQ ID NO: 305684 - RNA, 19 nt, Artificial Sequence
  Description of Artificial Sequence: Synthetic oligonucleotide
cacucguuaaccucuuuuc

SEQ ID NO: 305685 - RNA, 19 nt, Artificial Sequence
  Description of Artificial Sequence: Synthetic oligonucleotide
ugaucugagcuuucaaguu

SEQ ID NO: 305686 - RNA, 19 nt, Artificial Sequence
  Description of Artificial Sequence: Synthetic oligonucleotide
uguuucacugugacccgug

SEQ ID NO: 305687 - RNA, 19 nt, Artificial Sequence
  Description of Artificial Sequence: Synthetic oligonucleotide
gaguucugggucucuucgg

SEQ ID NO: 305688 - RNA, 19 nt, Artificial Sequence
  Description of Artificial Sequence: Synthetic oligonucleotide
agcugcuaccauccucugc

SEQ ID NO: 305689 - RNA, 19 nt, Artificial Sequence
  Description of Artificial Sequence: Synthetic oligonucleotide
cuugaaguuugguggcggc

SEQ ID NO: 305690 - RNA, 19 nt, Artificial Sequence
  Description of Artificial Sequence: Synthetic oligonucleotide
aaagguucuuuuacagacu

SEQ ID NO: 305691 - RNA, 19 nt, Artificial Sequence
  Description of Artificial Sequence: Synthetic oligonucleotide
ugaaguuugguggcggcac

SEQ ID NO: 305692 - RNA, 19 nt, Artificial Sequence
  Description of Artificial Sequence: Synthetic oligonucleotide
ucacucguuaaccucuuuu

SEQ ID NO: 305693 - RNA, 19 nt, Artificial Sequence
  Description of Artificial Sequence: Synthetic oligonucleotide
gguuagagaguguagcuuc

SEQ ID NO: 305694 - RNA, 19 nt, Artificial Sequence
  Description of Artificial Sequence: Synthetic oligonucleotide
ugagcuguucguucuccgc

SEQ ID NO: 305695 - RNA, 19 nt, Artificial Sequence
  Description of Artificial Sequence: Synthetic oligonucleotide
gagaacucaccaccuggcc

SEQ ID NO: 305696 - RNA, 19 nt, Artificial Sequence
  Description of Artificial Sequence: Synthetic oligonucleotide
guuuccgccaggaugcugc

SEQ ID NO: 305697 - RNA, 19 nt, Artificial Sequence
  Description of Artificial Sequence: Synthetic oligonucleotide
ugcaaggaguucugggucu

SEQ ID NO: 305698 - RNA, 19 nt, Artificial Sequence
  Description of Artificial Sequence: Synthetic oligonucleotide
aggcauuuugguaaguuga

SEQ ID NO: 305699 - RNA, 19 nt, Artificial Sequence
  Description of Artificial Sequence: Synthetic oligonucleotide
uccgccaggaugcugcggu

SEQ ID NO: 305700 - RNA, 19 nt, Artificial Sequence
  Description of Artificial Sequence: Synthetic oligonucleotide
agacaauugcacugauuga

SEQ ID NO: 305701 - RNA, 19 nt, Artificial Sequence
  Description of Artificial Sequence: Synthetic oligonucleotide
ugcccgugaagauuacuca

SEQ ID NO: 305702 - RNA, 19 nt, Artificial Sequence
  Description of Artificial Sequence: Synthetic oligonucleotide
agaguccggaucuugcccu

SEQ ID NO: 305703 - RNA, 19 nt, Artificial Sequence
  Description of Artificial Sequence: Synthetic oligonucleotide
uccgacuucucuacuaguu

SEQ ID NO: 305704 - RNA, 19 nt, Artificial Sequence
  Description of Artificial Sequence: Synthetic oligonucleotide
cucuacguggcucuucaug

SEQ ID NO: 305705 - RNA, 19 nt, Artificial Sequence
  Description of Artificial Sequence: Synthetic oligonucleotide
cuccguuuccgccaggaug

SEQ ID NO: 305706 - RNA, 19 nt, Artificial Sequence
  Description of Artificial Sequence: Synthetic oligonucleotide
cagauguuucacugugacc

SEQ ID NO: 305707 - RNA, 19 nt, Artificial Sequence
  Description of Artificial Sequence: Synthetic oligonucleotide
uuugagcauacccuccguu

SEQ ID NO: 305708 - RNA, 19 nt, Artificial Sequence
  Description of Artificial Sequence: Synthetic oligonucleotide
guugggccuggauaacgcg

SEQ ID NO: 305709 - RNA, 19 nt, Artificial Sequence
  Description of Artificial Sequence: Synthetic oligonucleotide
uggaauggauccucucugu

SEQ ID NO: 305710 - RNA, 19 nt, Artificial Sequence
  Description of Artificial Sequence: Synthetic oligonucleotide
auaggguccugcucggcug

SEQ ID NO: 305711 - RNA, 19 nt, Artificial Sequence
  Description of Artificial Sequence: Synthetic oligonucleotide
ucagcguugaugagggcuu

SEQ ID NO: 305712 - RNA, 19 nt, Artificial Sequence
  Description of Artificial Sequence: Synthetic oligonucleotide
aggccuccgacuucucuac

SEQ ID NO: 305713 - RNA, 19 nt, Artificial Sequence
  Description of Artificial Sequence: Synthetic oligonucleotide
guagcuucuccucacaggu

SEQ ID NO: 305714 - RNA, 19 nt, Artificial Sequence
  Description of Artificial Sequence: Synthetic oligonucleotide
cugagacuugucuccaaug

SEQ ID NO: 305715 - RNA, 19 nt, Artificial Sequence
  Description of Artificial Sequence: Synthetic oligonucleotide
ucuaccucagaagacugua

SEQ ID NO: 305716 - RNA, 19 nt, Artificial Sequence
  Description of Artificial Sequence: Synthetic oligonucleotide
uugagcauacccuccguuu

SEQ ID NO: 305717 - RNA, 19 nt, Artificial Sequence
  Description of Artificial Sequence: Synthetic oligonucleotide
uggagacuacguccaagga

SEQ ID NO: 305718 - RNA, 19 nt, Artificial Sequence
  Description of Artificial Sequence: Synthetic oligonucleotide
gguauuuugggccuggccu

SEQ ID NO: 305719 - RNA, 19 nt, Artificial Sequence
  Description of Artificial Sequence: Synthetic oligonucleotide
auacagacaauugcacuga

SEQ ID NO: 305720 - RNA, 19 nt, Artificial Sequence
  Description of Artificial Sequence: Synthetic oligonucleotide
cugacugguggccugguuc

SEQ ID NO: 305721 - RNA, 19 nt, Artificial Sequence
  Description of Artificial Sequence: Synthetic oligonucleotide
aguucuuuucucggagguc

SEQ ID NO: 305722 - RNA, 19 nt, Artificial Sequence
  Description of Artificial Sequence: Synthetic oligonucleotide
ggucugucagcguugauga

SEQ ID NO: 305723 - RNA, 19 nt, Artificial Sequence
  Description of Artificial Sequence: Synthetic oligonucleotide
agacucaacaccugugauu

SEQ ID NO: 305724 - RNA, 19 nt, Artificial Sequence
  Description of Artificial Sequence: Synthetic oligonucleotide
gacccgugacuucuggagc

SEQ ID NO: 305725 - RNA, 19 nt, Artificial Sequence
  Description of Artificial Sequence: Synthetic oligonucleotide
guaaacgacaggcugugcu

SEQ ID NO: 305726 - RNA, 19 nt, Artificial Sequence
  Description of Artificial Sequence: Synthetic oligonucleotide
uuucucggaggucauuguu

SEQ ID NO: 305727 - RNA, 19 nt, Artificial Sequence
  Description of Artificial Sequence: Synthetic oligonucleotide
accucuaccucagaagacu

SEQ ID NO: 305728 - RNA, 19 nt, Artificial Sequence
  Description of Artificial Sequence: Synthetic oligonucleotide
ugugagcuguucguucucc

SEQ ID NO: 305729 - RNA, 19 nt, Artificial Sequence
  Description of Artificial Sequence: Synthetic oligonucleotide
uccuuucuacccugguucu

SEQ ID NO: 305730 - RNA, 19 nt, Artificial Sequence
  Description of Artificial Sequence: Synthetic oligonucleotide
gaagugugcucccucaccu

SEQ ID NO: 305731 - RNA, 19 nt, Artificial Sequence
  Description of Artificial Sequence: Synthetic oligonucleotide
caguuugccgaggagacuc

SEQ ID NO: 305732 - RNA, 19 nt, Artificial Sequence
  Description of Artificial Sequence: Synthetic oligonucleotide
gguuuuaauggcauugaca

SEQ ID NO: 305733 - RNA, 19 nt, Artificial Sequence
  Description of Artificial Sequence: Synthetic oligonucleotide
auacccuccguuuccgcca

SEQ ID NO: 305734 - RNA, 19 nt, Artificial Sequence
  Description of Artificial Sequence: Synthetic oligonucleotide
gaguguagcuucuccucac

SEQ ID NO: 305735 - RNA, 19 nt, Artificial Sequence
  Description of Artificial Sequence: Synthetic oligonucleotide
uggcgucugcucgaggugg

SEQ ID NO: 305736 - RNA, 19 nt, Artificial Sequence
  Description of Artificial Sequence: Synthetic oligonucleotide
ugggccuggauaacgcggu

SEQ ID NO: 305737 - RNA, 19 nt, Artificial Sequence
  Description of Artificial Sequence: Synthetic oligonucleotide
gguccgcucagcuaaggcc

SEQ ID NO: 305738 - RNA, 19 nt, Artificial Sequence
  Description of Artificial Sequence: Synthetic oligonucleotide
cucagccaaauggagcugc

SEQ ID NO: 305739 - RNA, 19 nt, Artificial Sequence
  Description of Artificial Sequence: Synthetic oligonucleotide
aucccgagcggccuggacu

SEQ ID NO: 305740 - RNA, 19 nt, Artificial Sequence
  Description of Artificial Sequence: Synthetic oligonucleotide
gugagcuguucguucuccg

SEQ ID NO: 305741 - RNA, 19 nt, Artificial Sequence
  Description of Artificial Sequence: Synthetic oligonucleotide
cuguucuugcaacuucuuc

SEQ ID NO: 305742 - RNA, 19 nt, Artificial Sequence
  Description of Artificial Sequence: Synthetic oligonucleotide
agacgaaucugcugcuggu

SEQ ID NO: 305743 - RNA, 19 nt, Artificial Sequence
  Description of Artificial Sequence: Synthetic oligonucleotide
uugaaguuugguggcggca

SEQ ID NO: 305744 - RNA, 19 nt, Artificial Sequence
  Description of Artificial Sequence: Synthetic oligonucleotide
cuacccugguucuggggcc

SEQ ID NO: 305745 - RNA, 19 nt, Artificial Sequence
  Description of Artificial Sequence: Synthetic oligonucleotide
uugcuucccgacccggccc

SEQ ID NO: 305746 - RNA, 19 nt, Artificial Sequence
  Description of Artificial Sequence: Synthetic oligonucleotide
caacaccugugauuccagc

SEQ ID NO: 305747 - RNA, 19 nt, Artificial Sequence
  Description of Artificial Sequence: Synthetic oligonucleotide
auaaucccgagcggccugg

SEQ ID NO: 305748 - RNA, 19 nt, Artificial Sequence
  Description of Artificial Sequence: Synthetic oligonucleotide
gaagauuacucagcuccuc

SEQ ID NO: 305749 - RNA, 19 nt, Artificial Sequence
  Description of Artificial Sequence: Synthetic oligonucleotide
gguguuggggccauucucc

SEQ ID NO: 305750 - RNA, 19 nt, Artificial Sequence
  Description of Artificial Sequence: Synthetic oligonucleotide
cucuugaaguuugguggcg

SEQ ID NO: 305751 - RNA, 19 nt, Artificial Sequence
  Description of Artificial Sequence: Synthetic oligonucleotide
accucagaagacuguaauu

SEQ ID NO: 305752 - RNA, 19 nt, Artificial Sequence
  Description of Artificial Sequence: Synthetic oligonucleotide
gcuucccucaacuuggaga

SEQ ID NO: 305753 - RNA, 19 nt, Artificial Sequence
  Description of Artificial Sequence: Synthetic oligonucleotide
cacagguccgcucagcuaa

SEQ ID NO: 305754 - RNA, 19 nt, Artificial Sequence
  Description of Artificial Sequence: Synthetic oligonucleotide
uugguaaguugaacaguuu

SEQ ID NO: 305755 - RNA, 19 nt, Artificial Sequence
  Description of Artificial Sequence: Synthetic oligonucleotide
caggucacucguuaaccuc

SEQ ID NO: 305756 - RNA, 19 nt, Artificial Sequence
  Description of Artificial Sequence: Synthetic oligonucleotide
agcggccuggacucccagc

SEQ ID NO: 305757 - RNA, 19 nt, Artificial Sequence
  Description of Artificial Sequence: Synthetic oligonucleotide
gacucagacagagguuccc

SEQ ID NO: 305758 - RNA, 19 nt, Artificial Sequence
  Description of Artificial Sequence: Synthetic oligonucleotide
uacagacaauugcacugau

SEQ ID NO: 305759 - RNA, 19 nt, Artificial Sequence
  Description of Artificial Sequence: Synthetic oligonucleotide
guaauuugcugugcaguuc

SEQ ID NO: 305760 - RNA, 19 nt, Artificial Sequence
  Description of Artificial Sequence: Synthetic oligonucleotide
guugaacaguuugccgagg

SEQ ID NO: 305761 - RNA, 19 nt, Artificial Sequence
  Description of Artificial Sequence: Synthetic oligonucleotide
cucaagauggaguucuccu

SEQ ID NO: 305762 - RNA, 19 nt, Artificial Sequence
  Description of Artificial Sequence: Synthetic oligonucleotide
guuugguggcggcacgccc

SEQ ID NO: 305763 - RNA, 19 nt, Artificial Sequence
  Description of Artificial Sequence: Synthetic oligonucleotide
ccagauguuucacugugac

SEQ ID NO: 305764 - RNA, 19 nt, Artificial Sequence
  Description of Artificial Sequence: Synthetic oligonucleotide
uggauaacgcgguguuggu

SEQ ID NO: 305765 - RNA, 19 nt, Artificial Sequence
  Description of Artificial Sequence: Synthetic oligonucleotide
cauaaucccgagcggccug

SEQ ID NO: 305766 - RNA, 19 nt, Artificial Sequence
  Description of Artificial Sequence: Synthetic oligonucleotide
auagcucccgggugaccuc

SEQ ID NO: 305767 - RNA, 19 nt, Artificial Sequence
  Description of Artificial Sequence: Synthetic oligonucleotide
ucagcuuuauaggguccug

SEQ ID NO: 305768 - RNA, 19 nt, Artificial Sequence
  Description of Artificial Sequence: Synthetic oligonucleotide
ggaauggauccucucugug

SEQ ID NO: 305769 - RNA, 19 nt, Artificial Sequence
  Description of Artificial Sequence: Synthetic oligonucleotide
ucagcuugacuggccuggg

SEQ ID NO: 305770 - RNA, 19 nt, Artificial Sequence
  Description of Artificial Sequence: Synthetic oligonucleotide
aggucacucguuaaccucu

SEQ ID NO: 305771 - RNA, 19 nt, Artificial Sequence
  Description of Artificial Sequence: Synthetic oligonucleotide
gucacucaacugcugccug

SEQ ID NO: 305772 - RNA, 19 nt, Artificial Sequence
  Description of Artificial Sequence: Synthetic oligonucleotide
ugcccggaggcuggcaugg

SEQ ID NO: 305773 - RNA, 19 nt, Artificial Sequence
  Description of Artificial Sequence: Synthetic oligonucleotide
uggccuguugcuucccgac

SEQ ID NO: 305774 - RNA, 19 nt, Artificial Sequence
  Description of Artificial Sequence: Synthetic oligonucleotide
ugugcucccucaccugauc

SEQ ID NO: 305775 - RNA, 19 nt, Artificial Sequence
  Description of Artificial Sequence: Synthetic oligonucleotide
ccgggaauaguguuuauca

SEQ ID NO: 305776 - RNA, 19 nt, Artificial Sequence
  Description of Artificial Sequence: Synthetic oligonucleotide
gguagucacaugucaguuc

SEQ ID NO: 305777 - RNA, 19 nt, Artificial Sequence
  Description of Artificial Sequence: Synthetic oligonucleotide
uuagagaguguagcuucuc

SEQ ID NO: 305778 - RNA, 19 nt, Artificial Sequence
  Description of Artificial Sequence: Synthetic oligonucleotide
cuccugucggagcuuugcc

SEQ ID NO: 305779 - RNA, 19 nt, Artificial Sequence
  Description of Artificial Sequence: Synthetic oligonucleotide
uacccuccguuuccgccag

SEQ ID NO: 305780 - RNA, 19 nt, Artificial Sequence
  Description of Artificial Sequence: Synthetic oligonucleotide
uguaaacgacaggcugugc

SEQ ID NO: 305781 - RNA, 19 nt, Artificial Sequence
  Description of Artificial Sequence: Synthetic oligonucleotide
ucucuacuaguuccuuguu

SEQ ID NO: 305782 - RNA, 19 nt, Artificial Sequence
  Description of Artificial Sequence: Synthetic oligonucleotide
ucccgagcggccuggacuc

SEQ ID NO: 305783 - RNA, 19 nt, Artificial Sequence
  Description of Artificial Sequence: Synthetic oligonucleotide
gcccgugaagauuacucag

SEQ ID NO: 305784 - RNA, 19 nt, Artificial Sequence
  Description of Artificial Sequence: Synthetic oligonucleotide
cucaaggcgcuucugcaga

SEQ ID NO: 305785 - RNA, 19 nt, Artificial Sequence
  Description of Artificial Sequence: Synthetic oligonucleotide
caacccugcuaccuccuug

SEQ ID NO: 305786 - RNA, 19 nt, Artificial Sequence
  Description of Artificial Sequence: Synthetic oligonucleotide
agguucccuccuucgagcu

SEQ ID NO: 305787 - RNA, 19 nt, Artificial Sequence
  Description of Artificial Sequence: Synthetic oligonucleotide
aggaauguguaaggcauuu

SEQ ID NO: 305788 - RNA, 19 nt, Artificial Sequence
  Description of Artificial Sequence: Synthetic oligonucleotide
uggcauaauucuggcacuc

SEQ ID NO: 305789 - RNA, 19 nt, Artificial Sequence
  Description of Artificial Sequence: Synthetic oligonucleotide
cuugucuccaauggcuuca

SEQ ID NO: 305790 - RNA, 19 nt, Artificial Sequence
  Description of Artificial Sequence: Synthetic oligonucleotide
cccgugaagauuacucagc

SEQ ID NO: 305791 - RNA, 19 nt, Artificial Sequence
  Description of Artificial Sequence: Synthetic oligonucleotide
uuauaggguccugcucggc

SEQ ID NO: 305792 - RNA, 19 nt, Artificial Sequence
  Description of Artificial Sequence: Synthetic oligonucleotide
gacccggccccacugagaa

SEQ ID NO: 305793 - RNA, 19 nt, Artificial Sequence
  Description of Artificial Sequence: Synthetic oligonucleotide
ugccucaacccugcuaccu

SEQ ID NO: 305794 - RNA, 19 nt, Artificial Sequence
  Description of Artificial Sequence: Synthetic oligonucleotide
ugcucggcuggagggacag

SEQ ID NO: 305795 - RNA, 19 nt, Artificial Sequence
  Description of Artificial Sequence: Synthetic oligonucleotide
ccugggucgucuucaaaag

SEQ ID NO: 305796 - RNA, 19 nt, Artificial Sequence
  Description of Artificial Sequence: Synthetic oligonucleotide
guccgcucagcuaaggcca

SEQ ID NO: 305797 - RNA, 19 nt, Artificial Sequence
  Description of Artificial Sequence: Synthetic oligonucleotide
ugcuaccauccucugcuuu

SEQ ID NO: 305798 - RNA, 19 nt, Artificial Sequence
  Description of Artificial Sequence: Synthetic oligonucleotide
cucgaggugguccagggcu

SEQ ID NO: 305799 - RNA, 19 nt, Artificial Sequence
  Description of Artificial Sequence: Synthetic oligonucleotide
agacuacguccaaggaggg

SEQ ID NO: 305800 - RNA, 19 nt, Artificial Sequence
  Description of Artificial Sequence: Synthetic oligonucleotide
ggguauuuugggccuggcc

SEQ ID NO: 305801 - RNA, 19 nt, Artificial Sequence
  Description of Artificial Sequence: Synthetic oligonucleotide
caggauggccucuguccgc

SEQ ID NO: 305802 - RNA, 19 nt, Artificial Sequence
  Description of Artificial Sequence: Synthetic oligonucleotide
auagccuccuugagcucac

SEQ ID NO: 305803 - RNA, 19 nt, Artificial Sequence
  Description of Artificial Sequence: Synthetic oligonucleotide
acauagcucccgggugacc

SEQ ID NO: 305804 - RNA, 19 nt, Artificial Sequence
  Description of Artificial Sequence: Synthetic oligonucleotide
gacuacguccaaggagggc

SEQ ID NO: 305805 - RNA, 19 nt, Artificial Sequence
  Description of Artificial Sequence: Synthetic oligonucleotide
uggcauugacauccaggua

SEQ ID NO: 305806 - RNA, 19 nt, Artificial Sequence
  Description of Artificial Sequence: Synthetic oligonucleotide
agguagucacaugucaguu

SEQ ID NO: 305807 - RNA, 19 nt, Artificial Sequence
  Description of Artificial Sequence: Synthetic oligonucleotide
uucgagcugcuaccauccu

SEQ ID NO: 305808 - RNA, 19 nt, Artificial Sequence
  Description of Artificial Sequence: Synthetic oligonucleotide
cuaagcuccugucggagcu

SEQ ID NO: 305809 - RNA, 19 nt, Artificial Sequence
  Description of Artificial Sequence: Synthetic oligonucleotide
uccgcccuggccuccuuga

SEQ ID NO: 305810 - RNA, 19 nt, Artificial Sequence
  Description of Artificial Sequence: Synthetic oligonucleotide
ucccgggugaccuccucaa

SEQ ID NO: 305811 - RNA, 19 nt, Artificial Sequence
  Description of Artificial Sequence: Synthetic oligonucleotide
ugugagcuucugccgccgu

SEQ ID NO: 305812 - RNA, 19 nt, Artificial Sequence
  Description of Artificial Sequence: Synthetic oligonucleotide
gaguccggaucuugcccug

SEQ ID NO: 305813 - RNA, 19 nt, Artificial Sequence
  Description of Artificial Sequence: Synthetic oligonucleotide
cuacguccaaggagggcuc

SEQ ID NO: 305814 - RNA, 19 nt, Artificial Sequence
  Description of Artificial Sequence: Synthetic oligonucleotide
cacucaacugcugccugac

SEQ ID NO: 305815 - RNA, 19 nt, Artificial Sequence
  Description of Artificial Sequence: Synthetic oligonucleotide
ugaccuugcuaagcuccug

SEQ ID NO: 305816 - RNA, 19 nt, Artificial Sequence
  Description of Artificial Sequence: Synthetic oligonucleotide
gacauagcucccgggugac

SEQ ID NO: 305817 - RNA, 19 nt, Artificial Sequence
  Description of Artificial Sequence: Synthetic oligonucleotide
gguucaaugcaucccucaa

SEQ ID NO: 305818 - RNA, 19 nt, Artificial Sequence
  Description of Artificial Sequence: Synthetic oligonucleotide
aucccucaagauggaguuc

SEQ ID NO: 305819 - RNA, 19 nt, Artificial Sequence
  Description of Artificial Sequence: Synthetic oligonucleotide
gucagcguugaugagggcu

SEQ ID NO: 305820 - RNA, 19 nt, Artificial Sequence
  Description of Artificial Sequence: Synthetic oligonucleotide
gcuaagcuccugucggagc

SEQ ID NO: 305821 - RNA, 19 nt, Artificial Sequence
  Description of Artificial Sequence: Synthetic oligonucleotide
gcuggucggccucagcuug

SEQ ID NO: 305822 - RNA, 19 nt, Artificial Sequence
  Description of Artificial Sequence: Synthetic oligonucleotide
guuugccgaggagacucag

SEQ ID NO: 305823 - RNA, 19 nt, Artificial Sequence
  Description of Artificial Sequence: Synthetic oligonucleotide
gucugucagcguugaugag

SEQ ID NO: 305824 - RNA, 19 nt, Artificial Sequence
  Description of Artificial Sequence: Synthetic oligonucleotide
gguggccugguucaaugca

SEQ ID NO: 305825 - RNA, 19 nt, Artificial Sequence
  Description of Artificial Sequence: Synthetic oligonucleotide
caauugcacugauugacau

SEQ ID NO: 305826 - RNA, 19 nt, Artificial Sequence
  Description of Artificial Sequence: Synthetic oligonucleotide
ugacuucccgcagccacuc

SEQ ID NO: 305827 - RNA, 19 nt, Artificial Sequence
  Description of Artificial Sequence: Synthetic oligonucleotide
ugggaugccugcagcugua

SEQ ID NO: 305828 - RNA, 19 nt, Artificial Sequence
  Description of Artificial Sequence: Synthetic oligonucleotide
gguugggccuggauaacgc

SEQ ID NO: 305829 - RNA, 19 nt, Artificial Sequence
  Description of Artificial Sequence: Synthetic oligonucleotide
aacgcgguguugguugguu

SEQ ID NO: 305830 - RNA, 19 nt, Artificial Sequence
  Description of Artificial Sequence: Synthetic oligonucleotide
ccuucgagcugcuaccauc

SEQ ID NO: 305831 - RNA, 19 nt, Artificial Sequence
  Description of Artificial Sequence: Synthetic oligonucleotide
gggucuggaagauuuauuu

SEQ ID NO: 305832 - RNA, 19 nt, Artificial Sequence
  Description of Artificial Sequence: Synthetic oligonucleotide
gcauuuugguaaguugaac

SEQ ID NO: 305833 - RNA, 19 nt, Artificial Sequence
  Description of Artificial Sequence: Synthetic oligonucleotide
ugcuggucggccucagcuu

SEQ ID NO: 305834 - RNA, 19 nt, Artificial Sequence
  Description of Artificial Sequence: Synthetic oligonucleotide
ccuccgacuucucuacuag

SEQ ID NO: 305835 - RNA, 19 nt, Artificial Sequence
  Description of Artificial Sequence: Synthetic oligonucleotide
caucccucaagauggaguu

SEQ ID NO: 305836 - RNA, 19 nt, Artificial Sequence
  Description of Artificial Sequence: Synthetic oligonucleotide
ucaacccugcuaccuccuu

SEQ ID NO: 305837 - RNA, 19 nt, Artificial Sequence
  Description of Artificial Sequence: Synthetic oligonucleotide
uugucuccaauggcuucac

SEQ ID NO: 305838 - RNA, 19 nt, Artificial Sequence
  Description of Artificial Sequence: Synthetic oligonucleotide
cucguuaaccucuuuucuu

SEQ ID NO: 305839 - RNA, 19 nt, Artificial Sequence
  Description of Artificial Sequence: Synthetic oligonucleotide
cagguagucacaugucagu

SEQ ID NO: 305840 - RNA, 19 nt, Artificial Sequence
  Description of Artificial Sequence: Synthetic oligonucleotide
uuuugccgggcaacacguu

SEQ ID NO: 305841 - RNA, 19 nt, Artificial Sequence
  Description of Artificial Sequence: Synthetic oligonucleotide
ugccgggaggccuccgacu

SEQ ID NO: 305842 - RNA, 19 nt, Artificial Sequence
  Description of Artificial Sequence: Synthetic oligonucleotide
acaguuugccgaggagacu

SEQ ID NO: 305843 - RNA, 19 nt, Artificial Sequence
  Description of Artificial Sequence: Synthetic oligonucleotide
uuuugggccuggccugcuu

SEQ ID NO: 305844 - RNA, 19 nt, Artificial Sequence
  Description of Artificial Sequence: Synthetic oligonucleotide
ccucuaccucagaagacug

SEQ ID NO: 305845 - RNA, 19 nt, Artificial Sequence
  Description of Artificial Sequence: Synthetic oligonucleotide
ucucuucggcuucccucaa

SEQ ID NO: 305846 - RNA, 19 nt, Artificial Sequence
  Description of Artificial Sequence: Synthetic oligonucleotide
cccaggucacucguuaacc

SEQ ID NO: 305847 - RNA, 19 nt, Artificial Sequence
  Description of Artificial Sequence: Synthetic oligonucleotide
gugacccgugacuucugga

SEQ ID NO: 305848 - RNA, 19 nt, Artificial Sequence
  Description of Artificial Sequence: Synthetic oligonucleotide
ccaaggagggcucuaggga

SEQ ID NO: 305849 - RNA, 19 nt, Artificial Sequence
  Description of Artificial Sequence: Synthetic oligonucleotide
ccgacuucucuacuaguuc

SEQ ID NO: 305850 - RNA, 19 nt, Artificial Sequence
  Description of Artificial Sequence: Synthetic oligonucleotide
uuccgccaggaugcugcgg

SEQ ID NO: 305851 - RNA, 19 nt, Artificial Sequence
  Description of Artificial Sequence: Synthetic oligonucleotide
cugugagcuguucguucuc

SEQ ID NO: 305852 - RNA, 19 nt, Artificial Sequence
  Description of Artificial Sequence: Synthetic oligonucleotide
agcugccucaacccugcua

SEQ ID NO: 305853 - RNA, 19 nt, Artificial Sequence
  Description of Artificial Sequence: Synthetic oligonucleotide
cuuggccuuccacacacgu

SEQ ID NO: 305854 - RNA, 19 nt, Artificial Sequence
  Description of Artificial Sequence: Synthetic oligonucleotide
ccggaucuugcccugguuc

SEQ ID NO: 305855 - RNA, 19 nt, Artificial Sequence
  Description of Artificial Sequence: Synthetic oligonucleotide
cuguguaaccucuucuauu

SEQ ID NO: 305856 - RNA, 19 nt, Artificial Sequence
  Description of Artificial Sequence: Synthetic oligonucleotide
ccucaagauggaguucucc

SEQ ID NO: 305857 - RNA, 19 nt, Artificial Sequence
  Description of Artificial Sequence: Synthetic oligonucleotide
cugcucgaggugguccagg

SEQ ID NO: 305858 - RNA, 19 nt, Artificial Sequence
  Description of Artificial Sequence: Synthetic oligonucleotide
guaggaccugcuucucaaa

SEQ ID NO: 305859 - RNA, 19 nt, Artificial Sequence
  Description of Artificial Sequence: Synthetic oligonucleotide
gcucagcuaaggccagugc

SEQ ID NO: 305860 - RNA, 19 nt, Artificial Sequence
  Description of Artificial Sequence: Synthetic oligonucleotide
cauagcucccgggugaccu

SEQ ID NO: 305861 - RNA, 19 nt, Artificial Sequence
  Description of Artificial Sequence: Synthetic oligonucleotide
cauugacauccagguaguc

SEQ ID NO: 305862 - RNA, 19 nt, Artificial Sequence
  Description of Artificial Sequence: Synthetic oligonucleotide
uacguccaaggagggcucu

SEQ ID NO: 305863 - RNA, 19 nt, Artificial Sequence
  Description of Artificial Sequence: Synthetic oligonucleotide
cuguucguucuccgcccug

SEQ ID NO: 305864 - RNA, 19 nt, Artificial Sequence
  Description of Artificial Sequence: Synthetic oligonucleotide
ugggcccgacauagcuccc

SEQ ID NO: 305865 - RNA, 19 nt, Artificial Sequence
  Description of Artificial Sequence: Synthetic oligonucleotide
guucugggucucuucggcu

SEQ ID NO: 305866 - RNA, 19 nt, Artificial Sequence
  Description of Artificial Sequence: Synthetic oligonucleotide
gcaucugcccggaggcugg

SEQ ID NO: 305867 - RNA, 19 nt, Artificial Sequence
  Description of Artificial Sequence: Synthetic oligonucleotide
gugguccagggcugcuccc

SEQ ID NO: 305868 - RNA, 19 nt, Artificial Sequence
  Description of Artificial Sequence: Synthetic oligonucleotide
cugugcucugagccucuuc

SEQ ID NO: 305869 - RNA, 19 nt, Artificial Sequence
  Description of Artificial Sequence: Synthetic oligonucleotide
cugccgggaggccuccgac

SEQ ID NO: 305870 - RNA, 19 nt, Artificial Sequence
  Description of Artificial Sequence: Synthetic oligonucleotide
gguucccuccuucgagcug

SEQ ID NO: 305871 - RNA, 19 nt, Artificial Sequence
  Description of Artificial Sequence: Synthetic oligonucleotide
cucuaccucagaagacugu

SEQ ID NO: 305872 - RNA, 19 nt, Artificial Sequence
  Description of Artificial Sequence: Synthetic oligonucleotide
gucggagcuuugccaguuc

SEQ ID NO: 305873 - RNA, 19 nt, Artificial Sequence
  Description of Artificial Sequence: Synthetic oligonucleotide
cagaagcugccucaacccu

SEQ ID NO: 305874 - RNA, 19 nt, Artificial Sequence
  Description of Artificial Sequence: Synthetic oligonucleotide
uaaucccgagcggccugga

SEQ ID NO: 305875 - RNA, 19 nt, Artificial Sequence
  Description of Artificial Sequence: Synthetic oligonucleotide
uaacgcgguguugguuggu

SEQ ID NO: 305876 - RNA, 19 nt, Artificial Sequence
  Description of Artificial Sequence: Synthetic oligonucleotide
cugcaggucuuugagcaua

SEQ ID NO: 305877 - RNA, 19 nt, Artificial Sequence
  Description of Artificial Sequence: Synthetic oligonucleotide
acgcgguguugguugguuu

SEQ ID NO: 305878 - RNA, 19 nt, Artificial Sequence
  Description of Artificial Sequence: Synthetic oligonucleotide
gggucgucuucaaaagcuc

SEQ ID NO: 305879 - RNA, 19 nt, Artificial Sequence
  Description of Artificial Sequence: Synthetic oligonucleotide
uggucggccucagcuugac

SEQ ID NO: 305880 - RNA, 19 nt, Artificial Sequence
  Description of Artificial Sequence: Synthetic oligonucleotide
cgugaagauuacucagcuc

SEQ ID NO: 305881 - RNA, 19 nt, Artificial Sequence
  Description of Artificial Sequence: Synthetic oligonucleotide
gcauacccuccguuuccgc

SEQ ID NO: 305882 - RNA, 19 nt, Artificial Sequence
  Description of Artificial Sequence: Synthetic oligonucleotide
ggcuuuggcgucugcucga

SEQ ID NO: 305883 - RNA, 19 nt, Artificial Sequence
  Description of Artificial Sequence: Synthetic oligonucleotide
gccucaacccugcuaccuc

SEQ ID NO: 305884 - RNA, 19 nt, Artificial Sequence
  Description of Artificial Sequence: Synthetic oligonucleotide
cccgcagccacucagcaua

SEQ ID NO: 305885 - RNA, 19 nt, Artificial Sequence
  Description of Artificial Sequence: Synthetic oligonucleotide
cagacucaacaccugugau

SEQ ID NO: 305886 - RNA, 19 nt, Artificial Sequence
  Description of Artificial Sequence: Synthetic oligonucleotide
cucccgggaauaguguuua

SEQ ID NO: 305887 - RNA, 19 nt, Artificial Sequence
  Description of Artificial Sequence: Synthetic oligonucleotide
ggcaacacguugguuuuaa

SEQ ID NO: 305888 - RNA, 19 nt, Artificial Sequence
  Description of Artificial Sequence: Synthetic oligonucleotide
ucccgggaauaguguuuau

SEQ ID NO: 305889 - RNA, 19 nt, Artificial Sequence
  Description of Artificial Sequence: Synthetic oligonucleotide
agcugcccgugaagauuac

SEQ ID NO: 305890 - RNA, 19 nt, Artificial Sequence
  Description of Artificial Sequence: Synthetic oligonucleotide
cagaagggucucgauggaa

SEQ ID NO: 305891 - RNA, 19 nt, Artificial Sequence
  Description of Artificial Sequence: Synthetic oligonucleotide
gacuucccgcagccacuca

SEQ ID NO: 305892 - RNA, 19 nt, Artificial Sequence
  Description of Artificial Sequence: Synthetic oligonucleotide
gcuuuggcgucugcucgag

SEQ ID NO: 305893 - RNA, 19 nt, Artificial Sequence
  Description of Artificial Sequence: Synthetic oligonucleotide
cccgggaauaguguuuauc

SEQ ID NO: 305894 - RNA, 19 nt, Artificial Sequence
  Description of Artificial Sequence: Synthetic oligonucleotide
cuggucggccucagcuuga

SEQ ID NO: 305895 - RNA, 19 nt, Artificial Sequence
  Description of Artificial Sequence: Synthetic oligonucleotide
cuccgcccuggccuccuug

SEQ ID NO: 305896 - RNA, 19 nt, Artificial Sequence
  Description of Artificial Sequence: Synthetic oligonucleotide
ggucgucuucaaaagcucu

SEQ ID NO: 305897 - RNA, 19 nt, Artificial Sequence
  Description of Artificial Sequence: Synthetic oligonucleotide
gcaucccucaagauggagu

SEQ ID NO: 305898 - RNA, 19 nt, Artificial Sequence
  Description of Artificial Sequence: Synthetic oligonucleotide
ggcccuccagucugcucag

SEQ ID NO: 305899 - RNA, 19 nt, Artificial Sequence
  Description of Artificial Sequence: Synthetic oligonucleotide
ccucagcuugacuggccug

SEQ ID NO: 305900 - RNA, 19 nt, Artificial Sequence
  Description of Artificial Sequence: Synthetic oligonucleotide
cuccgacuucucuacuagu

SEQ ID NO: 305901 - RNA, 19 nt, Artificial Sequence
  Description of Artificial Sequence: Synthetic oligonucleotide
cucaacccugcuaccuccu

SEQ ID NO: 305902 - RNA, 19 nt, Artificial Sequence
  Description of Artificial Sequence: Synthetic oligonucleotide
cccucaacuuggagacuac

SEQ ID NO: 305903 - RNA, 19 nt, Artificial Sequence
  Description of Artificial Sequence: Synthetic oligonucleotide
ccgccgugucugcucaucc

SEQ ID NO: 305904 - RNA, 19 nt, Artificial Sequence
  Description of Artificial Sequence: Synthetic oligonucleotide
ccuggauaacgcgguguug

SEQ ID NO: 305905 - RNA, 19 nt, Artificial Sequence
  Description of Artificial Sequence: Synthetic oligonucleotide
ccgugaagauuacucagcu

SEQ ID NO: 305906 - RNA, 19 nt, Artificial Sequence
  Description of Artificial Sequence: Synthetic oligonucleotide
cgacauagcucccggguga

SEQ ID NO: 305907 - RNA, 19 nt, Artificial Sequence
  Description of Artificial Sequence: Synthetic oligonucleotide
cuaccuccuuggcauaauu

SEQ ID NO: 305908 - RNA, 19 nt, Artificial Sequence
  Description of Artificial Sequence: Synthetic oligonucleotide
ccgugacuucuggagcucc

SEQ ID NO: 305909 - RNA, 19 nt, Artificial Sequence
  Description of Artificial Sequence: Synthetic oligonucleotide
cuucccgacccggccccac

SEQ ID NO: 305910 - RNA, 19 nt, Artificial Sequence
  Description of Artificial Sequence: Synthetic oligonucleotide
ccgggcaacacguugguuu

SEQ ID NO: 305911 - RNA, 19 nt, Artificial Sequence
  Description of Artificial Sequence: Synthetic oligonucleotide
ccaggucacucguuaaccu

SEQ ID NO: 305912 - RNA, 19 nt, Artificial Sequence
  Description of Artificial Sequence: Synthetic oligonucleotide
cugcucggcuggagggaca

SEQ ID NO: 305913 - RNA, 19 nt, Artificial Sequence
  Description of Artificial Sequence: Synthetic oligonucleotide
ccauccucuacguggcucu

SEQ ID NO: 305914 - RNA, 19 nt, Artificial Sequence
  Description of Artificial Sequence: Synthetic oligonucleotide
ggcauaauucuggcacucu

SEQ ID NO: 305915 - RNA, 19 nt, Artificial Sequence
  Description of Artificial Sequence: Synthetic oligonucleotide
agcuccugucggagcuuug

SEQ ID NO: 305916 - RNA, 19 nt, Artificial Sequence
  Description of Artificial Sequence: Synthetic oligonucleotide
ggguuagagaguguagcuu

SEQ ID NO: 305917 - RNA, 19 nt, Artificial Sequence
  Description of Artificial Sequence: Synthetic oligonucleotide
cguccaaggagggcucuag

SEQ ID NO: 305918 - RNA, 19 nt, Artificial Sequence
  Description of Artificial Sequence: Synthetic oligonucleotide
ccgcagccacucagcauag

SEQ ID NO: 305919 - RNA, 19 nt, Artificial Sequence
  Description of Artificial Sequence: Synthetic oligonucleotide
cccucaccugaucugagcu

SEQ ID NO: 305920 - RNA, 19 nt, Artificial Sequence
  Description of Artificial Sequence: Synthetic oligonucleotide
cugucggagcuuugccagu

SEQ ID NO: 305921 - RNA, 19 nt, Artificial Sequence
  Description of Artificial Sequence: Synthetic oligonucleotide
ccacgucaccauccucuac

SEQ ID NO: 305922 - RNA, 19 nt, Artificial Sequence
  Description of Artificial Sequence: Synthetic oligonucleotide
cccucaagauggaguucuc

SEQ ID NO: 305923 - RNA, 19 nt, Artificial Sequence
  Description of Artificial Sequence: Synthetic oligonucleotide
acguccaaggagggcucua

SEQ ID NO: 305924 - RNA, 19 nt, Artificial Sequence
  Description of Artificial Sequence: Synthetic oligonucleotide
ccagaagggucucgaugga

SEQ ID NO: 305925 - RNA, 19 nt, Artificial Sequence
  Description of Artificial Sequence: Synthetic oligonucleotide
ccgacccggccccacugag

SEQ ID NO: 305926 - RNA, 19 nt, Artificial Sequence
  Description of Artificial Sequence: Synthetic oligonucleotide
ggucauuguucuuccccuu

SEQ ID NO: 305927 - RNA, 19 nt, Artificial Sequence
  Description of Artificial Sequence: Synthetic oligonucleotide
cccgacauagcucccgggu

SEQ ID NO: 305928 - RNA, 19 nt, Artificial Sequence
  Description of Artificial Sequence: Synthetic oligonucleotide
gugcuuuguuucugagcuu

SEQ ID NO: 305929 - RNA, 19 nt, Artificial Sequence
  Description of Artificial Sequence: Synthetic oligonucleotide
gccuggauaacgcgguguu

SEQ ID NO: 305930 - RNA, 19 nt, Artificial Sequence
  Description of Artificial Sequence: Synthetic oligonucleotide
ggagacucagacagagguu

SEQ ID NO: 305931 - RNA, 19 nt, Artificial Sequence
  Description of Artificial Sequence: Synthetic oligonucleotide
ggcacgccccaggucacuc

SEQ ID NO: 305932 - RNA, 19 nt, Artificial Sequence
  Description of Artificial Sequence: Synthetic oligonucleotide
gucacucguuaaccucuuu

SEQ ID NO: 305933 - RNA, 19 nt, Artificial Sequence
  Description of Artificial Sequence: Synthetic oligonucleotide
gcuguucguucuccgcccu

SEQ ID NO: 305934 - RNA, 19 nt, Artificial Sequence
  Description of Artificial Sequence: Synthetic oligonucleotide
gcuggagacccagccacgu

SEQ ID NO: 305935 - RNA, 19 nt, Artificial Sequence
  Description of Artificial Sequence: Synthetic oligonucleotide
gccccaggucacucguuaa

SEQ ID NO: 305936 - RNA, 19 nt, Artificial Sequence
  Description of Artificial Sequence: Synthetic oligonucleotide
cccuuucuacccugguucu

SEQ ID NO: 305937 - RNA, 19 nt, Artificial Sequence
  Description of Artificial Sequence: Synthetic oligonucleotide
gcucugggcccgacauagc

SEQ ID NO: 305938 - RNA, 19 nt, Artificial Sequence
  Description of Artificial Sequence: Synthetic oligonucleotide
ccgagcggccuggacuccc

SEQ ID NO: 305939 - RNA, 19 nt, Artificial Sequence
  Description of Artificial Sequence: Synthetic oligonucleotide
gcaacacguugguuuuaau

SEQ ID NO: 305940 - RNA, 19 nt, Artificial Sequence
  Description of Artificial Sequence: Synthetic oligonucleotide
cgcgguguugguugguuua

SEQ ID NO: 305941 - RNA, 19 nt, Artificial Sequence
  Description of Artificial Sequence: Synthetic oligonucleotide
gggcucuagggaagcaggu

SEQ ID NO: 305942 - RNA, 19 nt, Artificial Sequence
  Description of Artificial Sequence: Synthetic oligonucleotide
ucccuccuucgagcugcua

SEQ ID NO: 305943 - RNA, 19 nt, Artificial Sequence
  Description of Artificial Sequence: Synthetic oligonucleotide
ccgcccuggccuccuugag

SEQ ID NO: 305944 - RNA, 19 nt, Artificial Sequence
  Description of Artificial Sequence: Synthetic oligonucleotide
gcucuccaccugacuggug

SEQ ID NO: 305945 - RNA, 19 nt, Artificial Sequence
  Description of Artificial Sequence: Synthetic oligonucleotide
cccgugacuucuggagcuc

SEQ ID NO: 305946 - RNA, 19 nt, Artificial Sequence
  Description of Artificial Sequence: Synthetic oligonucleotide
cucggaggucauuguucuu

SEQ ID NO: 305947 - RNA, 19 nt, Artificial Sequence
  Description of Artificial Sequence: Synthetic oligonucleotide
ccagccacgucaccauccu

SEQ ID NO: 305948 - RNA, 19 nt, Artificial Sequence
  Description of Artificial Sequence: Synthetic oligonucleotide
cccggccccacugagaaau

SEQ ID NO: 305949 - RNA, 19 nt, Artificial Sequence
  Description of Artificial Sequence: Synthetic oligonucleotide
gccauucgcugcugcugcu

SEQ ID NO: 305950 - RNA, 19 nt, Artificial Sequence
  Description of Artificial Sequence: Synthetic oligonucleotide
cguuuccgccaggaugcug

SEQ ID NO: 305951 - RNA, 19 nt, Artificial Sequence
  Description of Artificial Sequence: Synthetic oligonucleotide
cagccaaauggagcugcuu

SEQ ID NO: 305952 - RNA, 19 nt, Artificial Sequence
  Description of Artificial Sequence: Synthetic oligonucleotide
cguuaaccucuuuucuuuu

SEQ ID NO: 305953 - RNA, 19 nt, Artificial Sequence
  Description of Artificial Sequence: Synthetic oligonucleotide
acgccccaggucacucguu

SEQ ID NO: 305954 - RNA, 19 nt, Artificial Sequence
  Description of Artificial Sequence: Synthetic oligonucleotide
gcgucugcucgaggugguc

SEQ ID NO: 305955 - RNA, 19 nt, Artificial Sequence
  Description of Artificial Sequence: Synthetic oligonucleotide
ggucacucguuaaccucuu

SEQ ID NO: 305956 - RNA, 19 nt, Artificial Sequence
  Description of Artificial Sequence: Synthetic oligonucleotide
ggucggccucagcuugacu

SEQ ID NO: 305957 - RNA, 19 nt, Artificial Sequence
  Description of Artificial Sequence: Synthetic oligonucleotide
cuggucugucagcguugau

SEQ ID NO: 305958 - RNA, 19 nt, Artificial Sequence
  Description of Artificial Sequence: Synthetic oligonucleotide
ggcgucugcucgagguggu

SEQ ID NO: 305959 - RNA, 19 nt, Artificial Sequence
  Description of Artificial Sequence: Synthetic oligonucleotide
cccgacccggccccacuga

SEQ ID NO: 305960 - RNA, 19 nt, Artificial Sequence
  Description of Artificial Sequence: Synthetic oligonucleotide
cgacccggccccacugaga

SEQ ID NO: 305961 - RNA, 19 nt, Artificial Sequence
  Description of Artificial Sequence: Synthetic oligonucleotide
cccgagcggccuggacucc

SEQ ID NO: 305962 - RNA, 19 nt, Artificial Sequence
  Description of Artificial Sequence: Synthetic oligonucleotide
cgccccaggucacucguua

SEQ ID NO: 305963 - RNA, 19 nt, Artificial Sequence
  Description of Artificial Sequence: Synthetic oligonucleotide
gcugugcaguucugccauu

SEQ ID NO: 305964 - RNA, 19 nt, Artificial Sequence
  Description of Artificial Sequence: Synthetic oligonucleotide
cggcuucccucaacuugga

SEQ ID NO: 305965 - RNA, 19 nt, Artificial Sequence
  Description of Artificial Sequence: Synthetic oligonucleotide
gcuucccgacccggcccca

SEQ ID NO: 305966 - RNA, 19 nt, Artificial Sequence
  Description of Artificial Sequence: Synthetic oligonucleotide
cgccgugucugcucauccu

SEQ ID NO: 305967 - RNA, 19 nt, Artificial Sequence
  Description of Artificial Sequence: Synthetic oligonucleotide
ccgccaggaugcugcggua

SEQ ID NO: 305968 - RNA, 19 nt, Artificial Sequence
  Description of Artificial Sequence: Synthetic oligonucleotide
ccggccccacugagaaaua

SEQ ID NO: 305969 - RNA, 19 nt, Artificial Sequence
  Description of Artificial Sequence: Synthetic oligonucleotide
ccucuacguggcucuucau

SEQ ID NO: 305970 - RNA, 19 nt, Artificial Sequence
  Description of Artificial Sequence: Synthetic oligonucleotide
gccgggcaacacguugguu

SEQ ID NO: 305971 - RNA, 19 nt, Artificial Sequence
  Description of Artificial Sequence: Synthetic oligonucleotide
ccguuuccgccaggaugcu

SEQ ID NO: 305972 - RNA, 19 nt, Artificial Sequence
  Description of Artificial Sequence: Synthetic oligonucleotide
cggcacgccccaggucacu

SEQ ID NO: 305973 - RNA, 19 nt, Artificial Sequence
  Description of Artificial Sequence: Synthetic oligonucleotide
aaauuuauaugauucguag

SEQ ID NO: 305974 - RNA, 19 nt, Artificial Sequence
  Description of Artificial Sequence: Synthetic oligonucleotide
auuuauaugauucguaguc

SEQ ID NO: 305975 - RNA, 19 nt, Artificial Sequence
  Description of Artificial Sequence: Synthetic oligonucleotide
aauaagaucacacaucuua

SEQ ID NO: 305976 - RNA, 19 nt, Artificial Sequence
  Description of Artificial Sequence: Synthetic oligonucleotide
uggcaaauuaaucagagga

SEQ ID NO: 305977 - RNA, 19 nt, Artificial Sequence
  Description of Artificial Sequence: Synthetic oligonucleotide
uuaacauccauaauuuaga

SEQ ID NO: 305978 - RNA, 19 nt, Artificial Sequence
  Description of Artificial Sequence: Synthetic oligonucleotide
uuaaucagaggacuuaaug

SEQ ID NO: 305979 - RNA, 19 nt, Artificial Sequence
  Description of Artificial Sequence: Synthetic oligonucleotide
gauaauaugcugugaacag

SEQ ID NO: 305980 - RNA, 19 nt, Artificial Sequence
  Description of Artificial Sequence: Synthetic oligonucleotide
ucggggaugaaucagaaga

SEQ ID NO: 305981 - RNA, 19 nt, Artificial Sequence
  Description of Artificial Sequence: Synthetic oligonucleotide
agaucacacaucuuaacac

SEQ ID NO: 305982 - RNA, 19 nt, Artificial Sequence
  Description of Artificial Sequence: Synthetic oligonucleotide
uggauuauccuuuuccagg

SEQ ID NO: 305983 - RNA, 19 nt, Artificial Sequence
  Description of Artificial Sequence: Synthetic oligonucleotide
aagacuuaggaccaaguga

SEQ ID NO: 305984 - RNA, 19 nt, Artificial Sequence
  Description of Artificial Sequence: Synthetic oligonucleotide
aggcauauaauacaaaaca

SEQ ID NO: 305985 - RNA, 19 nt, Artificial Sequence
  Description of Artificial Sequence: Synthetic oligonucleotide
ugugcauacauacugcuga

SEQ ID NO: 305986 - RNA, 19 nt, Artificial Sequence
  Description of Artificial Sequence: Synthetic oligonucleotide
ucuaaaagacuuaggacca

SEQ ID NO: 305987 - RNA, 19 nt, Artificial Sequence
  Description of Artificial Sequence: Synthetic oligonucleotide
auuguugcaaggcucgggc

SEQ ID NO: 305988 - RNA, 19 nt, Artificial Sequence
  Description of Artificial Sequence: Synthetic oligonucleotide
aaagacuuaggaccaagug

SEQ ID NO: 305989 - RNA, 19 nt, Artificial Sequence
  Description of Artificial Sequence: Synthetic oligonucleotide
uguuuaugcuccaugagcu

SEQ ID NO: 305990 - RNA, 19 nt, Artificial Sequence
  Description of Artificial Sequence: Synthetic oligonucleotide
cuuaacacgaugcagucag

SEQ ID NO: 305991 - RNA, 19 nt, Artificial Sequence
  Description of Artificial Sequence: Synthetic oligonucleotide
uuugucuuaaagaggggag

SEQ ID NO: 305992 - RNA, 19 nt, Artificial Sequence
  Description of Artificial Sequence: Synthetic oligonucleotide
uuaggcauauaauacaaaa

SEQ ID NO: 305993 - RNA, 19 nt, Artificial Sequence
  Description of Artificial Sequence: Synthetic oligonucleotide
ucucuugacagcacgcucg

SEQ ID NO: 305994 - RNA, 19 nt, Artificial Sequence
  Description of Artificial Sequence: Synthetic oligonucleotide
cuugaacaggcucaaaucc

SEQ ID NO: 305995 - RNA, 19 nt, Artificial Sequence
  Description of Artificial Sequence: Synthetic oligonucleotide
gugauauagaaauacuuug

SEQ ID NO: 305996 - RNA, 19 nt, Artificial Sequence
  Description of Artificial Sequence: Synthetic oligonucleotide
ugaacaggcucaaaucccg

SEQ ID NO: 305997 - RNA, 19 nt, Artificial Sequence
  Description of Artificial Sequence: Synthetic oligonucleotide
uccgcaauugcaaacacac

SEQ ID NO: 305998 - RNA, 19 nt, Artificial Sequence
  Description of Artificial Sequence: Synthetic oligonucleotide
ucuuacacccaucaagagc

SEQ ID NO: 305999 - RNA, 19 nt, Artificial Sequence
  Description of Artificial Sequence: Synthetic oligonucleotide
aaaugugugcacuucuugu

SEQ ID NO: 306000 - RNA, 19 nt, Artificial Sequence
  Description of Artificial Sequence: Synthetic oligonucleotide
cuugcuggcgaugagaugg

SEQ ID NO: 306001 - RNA, 19 nt, Artificial Sequence
  Description of Artificial Sequence: Synthetic oligonucleotide
ucaaaucccgugaaaagca

SEQ ID NO: 306002 - RNA, 19 nt, Artificial Sequence
  Description of Artificial Sequence: Synthetic oligonucleotide
auuaacuucaggucaucuc

SEQ ID NO: 306003 - RNA, 19 nt, Artificial Sequence
  Description of Artificial Sequence: Synthetic oligonucleotide
uaaggacucuuccagacug

SEQ ID NO: 306004 - RNA, 19 nt, Artificial Sequence
  Description of Artificial Sequence: Synthetic oligonucleotide
cuuaaugugggcucuuagg

SEQ ID NO: 306005 - RNA, 19 nt, Artificial Sequence
  Description of Artificial Sequence: Synthetic oligonucleotide
guugcuacggcacagguac

SEQ ID NO: 306006 - RNA, 19 nt, Artificial Sequence
  Description of Artificial Sequence: Synthetic oligonucleotide
ugugcagugacacaccgcu

SEQ ID NO: 306007 - RNA, 19 nt, Artificial Sequence
  Description of Artificial Sequence: Synthetic oligonucleotide
uauuuguagaugaaauuuc

SEQ ID NO: 306008 - RNA, 19 nt, Artificial Sequence
  Description of Artificial Sequence: Synthetic oligonucleotide
ucgacauaagugcagguca

SEQ ID NO: 306009 - RNA, 19 nt, Artificial Sequence
  Description of Artificial Sequence: Synthetic oligonucleotide
uuauaugauucguagucca

SEQ ID NO: 306010 - RNA, 19 nt, Artificial Sequence
  Description of Artificial Sequence: Synthetic oligonucleotide
auacuugcucucuugacag

SEQ ID NO: 306011 - RNA, 19 nt, Artificial Sequence
  Description of Artificial Sequence: Synthetic oligonucleotide
uaaauuuauaugauucgua

SEQ ID NO: 306012 - RNA, 19 nt, Artificial Sequence
  Description of Artificial Sequence: Synthetic oligonucleotide
aaugugagcaaguuaucaa

SEQ ID NO: 306013 - RNA, 19 nt, Artificial Sequence
  Description of Artificial Sequence: Synthetic oligonucleotide
aucucaaaucuuuaacauc

SEQ ID NO: 306014 - RNA, 19 nt, Artificial Sequence
  Description of Artificial Sequence: Synthetic oligonucleotide
uuuauaugauucguagucc

SEQ ID NO: 306015 - RNA, 19 nt, Artificial Sequence
  Description of Artificial Sequence: Synthetic oligonucleotide
uauaguucugcucaucgau

SEQ ID NO: 306016 - RNA, 19 nt, Artificial Sequence
  Description of Artificial Sequence: Synthetic oligonucleotide
guacucucgacauaagugc

SEQ ID NO: 306017 - RNA, 19 nt, Artificial Sequence
  Description of Artificial Sequence: Synthetic oligonucleotide
agcgccugugcauacauac

SEQ ID NO: 306018 - RNA, 19 nt, Artificial Sequence
  Description of Artificial Sequence: Synthetic oligonucleotide
caucuaaaagacuuaggac

SEQ ID NO: 306019 - RNA, 19 nt, Artificial Sequence
  Description of Artificial Sequence: Synthetic oligonucleotide
auaauuuagacagcaaagu

SEQ ID NO: 306020 - RNA, 19 nt, Artificial Sequence
  Description of Artificial Sequence: Synthetic oligonucleotide
guuauuacaucugucuucc

SEQ ID NO: 306021 - RNA, 19 nt, Artificial Sequence
  Description of Artificial Sequence: Synthetic oligonucleotide
agauaauaugcugugaaca

SEQ ID NO: 306022 - RNA, 19 nt, Artificial Sequence
  Description of Artificial Sequence: Synthetic oligonucleotide
agacuuaggaccaagugag

SEQ ID NO: 306023 - RNA, 19 nt, Artificial Sequence
  Description of Artificial Sequence: Synthetic oligonucleotide
uugaacaggcucaaauccc

SEQ ID NO: 306024 - RNA, 19 nt, Artificial Sequence
  Description of Artificial Sequence: Synthetic oligonucleotide
aaaugugagcaaguuauca

SEQ ID NO: 306025 - RNA, 19 nt, Artificial Sequence
  Description of Artificial Sequence: Synthetic oligonucleotide
aggggugauauagaaauac

SEQ ID NO: 306026 - RNA, 19 nt, Artificial Sequence
  Description of Artificial Sequence: Synthetic oligonucleotide
gaaaacacgcccucugcag

SEQ ID NO: 306027 - RNA, 19 nt, Artificial Sequence
  Description of Artificial Sequence: Synthetic oligonucleotide
ugauucguaguccaguguc

SEQ ID NO: 306028 - RNA, 19 nt, Artificial Sequence
  Description of Artificial Sequence: Synthetic oligonucleotide
agacgaggaugauaaaagg

SEQ ID NO: 306029 - RNA, 19 nt, Artificial Sequence
  Description of Artificial Sequence: Synthetic oligonucleotide
uccggagucacgaugugcc

SEQ ID NO: 306030 - RNA, 19 nt, Artificial Sequence
  Description of Artificial Sequence: Synthetic oligonucleotide
agaugggugcacuucuucg

SEQ ID NO: 306031 - RNA, 19 nt, Artificial Sequence
  Description of Artificial Sequence: Synthetic oligonucleotide
uacugcugaacuugaacag

SEQ ID NO: 306032 - RNA, 19 nt, Artificial Sequence
  Description of Artificial Sequence: Synthetic oligonucleotide
uugcggagagaacugauga

SEQ ID NO: 306033 - RNA, 19 nt, Artificial Sequence
  Description of Artificial Sequence: Synthetic oligonucleotide
aucuuaacacgaugcaguc

SEQ ID NO: 306034 - RNA, 19 nt, Artificial Sequence
  Description of Artificial Sequence: Synthetic oligonucleotide
aaugcagggcucgaugggg

SEQ ID NO: 306035 - RNA, 19 nt, Artificial Sequence
  Description of Artificial Sequence: Synthetic oligonucleotide
uggauaguccgcaauugca

SEQ ID NO: 306036 - RNA, 19 nt, Artificial Sequence
  Description of Artificial Sequence: Synthetic oligonucleotide
ucgacuucuccucagugcu

SEQ ID NO: 306037 - RNA, 19 nt, Artificial Sequence
  Description of Artificial Sequence: Synthetic oligonucleotide
ugggugagaagguugguca

SEQ ID NO: 306038 - RNA, 19 nt, Artificial Sequence
  Description of Artificial Sequence: Synthetic oligonucleotide
aguacucucgacauaagug

SEQ ID NO: 306039 - RNA, 19 nt, Artificial Sequence
  Description of Artificial Sequence: Synthetic oligonucleotide
auucgguuucagcuuaggg

SEQ ID NO: 306040 - RNA, 19 nt, Artificial Sequence
  Description of Artificial Sequence: Synthetic oligonucleotide
cucaaaucccgugaaaagc

SEQ ID NO: 306041 - RNA, 19 nt, Artificial Sequence
  Description of Artificial Sequence: Synthetic oligonucleotide
ugaagcacuccucuagcca

SEQ ID NO: 306042 - RNA, 19 nt, Artificial Sequence
  Description of Artificial Sequence: Synthetic oligonucleotide
gacgaggaugauaaaaggc

SEQ ID NO: 306043 - RNA, 19 nt, Artificial Sequence
  Description of Artificial Sequence: Synthetic oligonucleotide
cuggcgaugagaugggugc

SEQ ID NO: 306044 - RNA, 19 nt, Artificial Sequence
  Description of Artificial Sequence: Synthetic oligonucleotide
ucguacuucaaaccacuug

SEQ ID NO: 306045 - RNA, 19 nt, Artificial Sequence
  Description of Artificial Sequence: Synthetic oligonucleotide
gaacaaucaaaugugugca

SEQ ID NO: 306046 - RNA, 19 nt, Artificial Sequence
  Description of Artificial Sequence: Synthetic oligonucleotide
gagauaauaugcugugaac

SEQ ID NO: 306047 - RNA, 19 nt, Artificial Sequence
  Description of Artificial Sequence: Synthetic oligonucleotide
cuuacacccaucaagagcu

SEQ ID NO: 306048 - RNA, 19 nt, Artificial Sequence
  Description of Artificial Sequence: Synthetic oligonucleotide
aaacuccgcauuaugaaca

SEQ ID NO: 306049 - RNA, 19 nt, Artificial Sequence
  Description of Artificial Sequence: Synthetic oligonucleotide
gaucagacgaggaugauaa

SEQ ID NO: 306050 - RNA, 19 nt, Artificial Sequence
  Description of Artificial Sequence: Synthetic oligonucleotide
aacuuccccgcccagggug

SEQ ID NO: 306051 - RNA, 19 nt, Artificial Sequence
  Description of Artificial Sequence: Synthetic oligonucleotide
ugcuuauccgacaucugcu

SEQ ID NO: 306052 - RNA, 19 nt, Artificial Sequence
  Description of Artificial Sequence: Synthetic oligonucleotide
gagcaaguuaucaauauaa

SEQ ID NO: 306053 - RNA, 19 nt, Artificial Sequence
  Description of Artificial Sequence: Synthetic oligonucleotide
accccguauacuuggcacc

SEQ ID NO: 306054 - RNA, 19 nt, Artificial Sequence
  Description of Artificial Sequence: Synthetic oligonucleotide
uuauccgacaucugcucug

SEQ ID NO: 306055 - RNA, 19 nt, Artificial Sequence
  Description of Artificial Sequence: Synthetic oligonucleotide
cguacuucaaaccacuugg

SEQ ID NO: 306056 - RNA, 19 nt, Artificial Sequence
  Description of Artificial Sequence: Synthetic oligonucleotide
acuuaaugugggcucuuag

SEQ ID NO: 306057 - RNA, 19 nt, Artificial Sequence
  Description of Artificial Sequence: Synthetic oligonucleotide
uggaaaacacgcccucugc

SEQ ID NO: 306058 - RNA, 19 nt, Artificial Sequence
  Description of Artificial Sequence: Synthetic oligonucleotide
ugggcucuuaggcauauaa

SEQ ID NO: 306059 - RNA, 19 nt, Artificial Sequence
  Description of Artificial Sequence: Synthetic oligonucleotide
ucccgucagaacaaacucc

SEQ ID NO: 306060 - RNA, 19 nt, Artificial Sequence
  Description of Artificial Sequence: Synthetic oligonucleotide
acaucuuaacacgaugcag

SEQ ID NO: 306061 - RNA, 19 nt, Artificial Sequence
  Description of Artificial Sequence: Synthetic oligonucleotide
acgaggaugauaaaaggcu

SEQ ID NO: 306062 - RNA, 19 nt, Artificial Sequence
  Description of Artificial Sequence: Synthetic oligonucleotide
uucucguacuucaaaccac

SEQ ID NO: 306063 - RNA, 19 nt, Artificial Sequence
  Description of Artificial Sequence: Synthetic oligonucleotide
ugagcaaguuaucaauaua

SEQ ID NO: 306064 - RNA, 19 nt, Artificial Sequence
  Description of Artificial Sequence: Synthetic oligonucleotide
acagguaccccguauacuu

SEQ ID NO: 306065 - RNA, 19 nt, Artificial Sequence
  Description of Artificial Sequence: Synthetic oligonucleotide
uacucucgacauaagugca

SEQ ID NO: 306066 - RNA, 19 nt, Artificial Sequence
  Description of Artificial Sequence: Synthetic oligonucleotide
ucuucguggacucggcaac

SEQ ID NO: 306067 - RNA, 19 nt, Artificial Sequence
  Description of Artificial Sequence: Synthetic oligonucleotide
uugaagcacuccucuagcc

SEQ ID NO: 306068 - RNA, 19 nt, Artificial Sequence
  Description of Artificial Sequence: Synthetic oligonucleotide
gaugaucagacgaggauga

SEQ ID NO: 306069 - RNA, 19 nt, Artificial Sequence
  Description of Artificial Sequence: Synthetic oligonucleotide
agguaccccguauacuugg

SEQ ID NO: 306070 - RNA, 19 nt, Artificial Sequence
  Description of Artificial Sequence: Synthetic oligonucleotide
cauacauacugcugacuug

SEQ ID NO: 306071 - RNA, 19 nt, Artificial Sequence
  Description of Artificial Sequence: Synthetic oligonucleotide
uuaauguacugcugaacuu

SEQ ID NO: 306072 - RNA, 19 nt, Artificial Sequence
  Description of Artificial Sequence: Synthetic oligonucleotide
auccauaauuuagacagca

SEQ ID NO: 306073 - RNA, 19 nt, Artificial Sequence
  Description of Artificial Sequence: Synthetic oligonucleotide
gguaaucuuacacccauca

SEQ ID NO: 306074 - RNA, 19 nt, Artificial Sequence
  Description of Artificial Sequence: Synthetic oligonucleotide
uaaaugugagcaaguuauc

SEQ ID NO: 306075 - RNA, 19 nt, Artificial Sequence
  Description of Artificial Sequence: Synthetic oligonucleotide
aguccgcaauugcaaacac

SEQ ID NO: 306076 - RNA, 19 nt, Artificial Sequence
  Description of Artificial Sequence: Synthetic oligonucleotide
cucuuaggcauauaauaca

SEQ ID NO: 306077 - RNA, 19 nt, Artificial Sequence
  Description of Artificial Sequence: Synthetic oligonucleotide
gagcacucccgucagaaca

SEQ ID NO: 306078 - RNA, 19 nt, Artificial Sequence
  Description of Artificial Sequence: Synthetic oligonucleotide
accaagugaggagugggcg

SEQ ID NO: 306079 - RNA, 19 nt, Artificial Sequence
  Description of Artificial Sequence: Synthetic oligonucleotide
aucuuacacccaucaagag

SEQ ID NO: 306080 - RNA, 19 nt, Artificial Sequence
  Description of Artificial Sequence: Synthetic oligonucleotide
gaggacuuaaugugggcuc

SEQ ID NO: 306081 - RNA, 19 nt, Artificial Sequence
  Description of Artificial Sequence: Synthetic oligonucleotide
cuuccagacugaaagagaa

SEQ ID NO: 306082 - RNA, 19 nt, Artificial Sequence
  Description of Artificial Sequence: Synthetic oligonucleotide
uugucuuaaagaggggaga

SEQ ID NO: 306083 - RNA, 19 nt, Artificial Sequence
  Description of Artificial Sequence: Synthetic oligonucleotide
uuccagacugaaagagaag

SEQ ID NO: 306084 - RNA, 19 nt, Artificial Sequence
  Description of Artificial Sequence: Synthetic oligonucleotide
ucccgugaaaagcacguaa

SEQ ID NO: 306085 - RNA, 19 nt, Artificial Sequence
  Description of Artificial Sequence: Synthetic oligonucleotide
cugcuuucggggaugaauc

SEQ ID NO: 306086 - RNA, 19 nt, Artificial Sequence
  Description of Artificial Sequence: Synthetic oligonucleotide
aggggagaaacgugggcuc

SEQ ID NO: 306087 - RNA, 19 nt, Artificial Sequence
  Description of Artificial Sequence: Synthetic oligonucleotide
ucggcuugugaaugugggg

SEQ ID NO: 306088 - RNA, 19 nt, Artificial Sequence
  Description of Artificial Sequence: Synthetic oligonucleotide
cuagaauaagaucacacau

SEQ ID NO: 306089 - RNA, 19 nt, Artificial Sequence
  Description of Artificial Sequence: Synthetic oligonucleotide
acaggcucaaaucccguga

SEQ ID NO: 306090 - RNA, 19 nt, Artificial Sequence
  Description of Artificial Sequence: Synthetic oligonucleotide
cuucaggucaucucuguca

SEQ ID NO: 306091 - RNA, 19 nt, Artificial Sequence
  Description of Artificial Sequence: Synthetic oligonucleotide
agcaucucgcaggauauag

SEQ ID NO: 306092 - RNA, 19 nt, Artificial Sequence
  Description of Artificial Sequence: Synthetic oligonucleotide
auaugauucguaguccagu

SEQ ID NO: 306093 - RNA, 19 nt, Artificial Sequence
  Description of Artificial Sequence: Synthetic oligonucleotide
ugucuuaaagaggggagaa

SEQ ID NO: 306094 - RNA, 19 nt, Artificial Sequence
  Description of Artificial Sequence: Synthetic oligonucleotide
ggguccggaagguugaagg

SEQ ID NO: 306095 - RNA, 19 nt, Artificial Sequence
  Description of Artificial Sequence: Synthetic oligonucleotide
gacaguguugcuacggcac

SEQ ID NO: 306096 - RNA, 19 nt, Artificial Sequence
  Description of Artificial Sequence: Synthetic oligonucleotide
auauaauacaaaacauaau

SEQ ID NO: 306097 - RNA, 19 nt, Artificial Sequence
  Description of Artificial Sequence: Synthetic oligonucleotide
aacgugggcucgcuuuaag

SEQ ID NO: 306098 - RNA, 19 nt, Artificial Sequence
  Description of Artificial Sequence: Synthetic oligonucleotide
caaucuuaauacuugcucu

SEQ ID NO: 306099 - RNA, 19 nt, Artificial Sequence
  Description of Artificial Sequence: Synthetic oligonucleotide
uucuucguggacucggcaa

SEQ ID NO: 306100 - RNA, 19 nt, Artificial Sequence
  Description of Artificial Sequence: Synthetic oligonucleotide
ugugcaucggcuugugaau

SEQ ID NO: 306101 - RNA, 19 nt, Artificial Sequence
  Description of Artificial Sequence: Synthetic oligonucleotide
auaugcugugaacaggguu

SEQ ID NO: 306102 - RNA, 19 nt, Artificial Sequence
  Description of Artificial Sequence: Synthetic oligonucleotide
gacucggcaacuuccccgc

SEQ ID NO: 306103 - RNA, 19 nt, Artificial Sequence
  Description of Artificial Sequence: Synthetic oligonucleotide
acgugggcucgcuuuaagg

SEQ ID NO: 306104 - RNA, 19 nt, Artificial Sequence
  Description of Artificial Sequence: Synthetic oligonucleotide
gauaguccgcaauugcaaa

SEQ ID NO: 306105 - RNA, 19 nt, Artificial Sequence
  Description of Artificial Sequence: Synthetic oligonucleotide
cauccauaauuuagacagc

SEQ ID NO: 306106 - RNA, 19 nt, Artificial Sequence
  Description of Artificial Sequence: Synthetic oligonucleotide
gaggguguaacgguugcug

SEQ ID NO: 306107 - RNA, 19 nt, Artificial Sequence
  Description of Artificial Sequence: Synthetic oligonucleotide
uaguccgcaauugcaaaca

SEQ ID NO: 306108 - RNA, 19 nt, Artificial Sequence
  Description of Artificial Sequence: Synthetic oligonucleotide
aacuccgcauuaugaacau

SEQ ID NO: 306109 - RNA, 19 nt, Artificial Sequence
  Description of Artificial Sequence: Synthetic oligonucleotide
cucucgacauaagugcagg

SEQ ID NO: 306110 - RNA, 19 nt, Artificial Sequence
  Description of Artificial Sequence: Synthetic oligonucleotide
gguucuuuacagaugagga

SEQ ID NO: 306111 - RNA, 19 nt, Artificial Sequence
  Description of Artificial Sequence: Synthetic oligonucleotide
ugccagguaugucauuaac

SEQ ID NO: 306112 - RNA, 19 nt, Artificial Sequence
  Description of Artificial Sequence: Synthetic oligonucleotide
aucggcuugugaauguggg

SEQ ID NO: 306113 - RNA, 19 nt, Artificial Sequence
  Description of Artificial Sequence: Synthetic oligonucleotide
ucgggcagaugccaggggu

SEQ ID NO: 306114 - RNA, 19 nt, Artificial Sequence
  Description of Artificial Sequence: Synthetic oligonucleotide
guauacuuggcaccugcca

SEQ ID NO: 306115 - RNA, 19 nt, Artificial Sequence
  Description of Artificial Sequence: Synthetic oligonucleotide
ucacacacgggauccgcca

SEQ ID NO: 306116 - RNA, 19 nt, Artificial Sequence
  Description of Artificial Sequence: Synthetic oligonucleotide
cugucaguuaaauuuauau

SEQ ID NO: 306117 - RNA, 19 nt, Artificial Sequence
  Description of Artificial Sequence: Synthetic oligonucleotide
gauccgccauucuuuggcc

SEQ ID NO: 306118 - RNA, 19 nt, Artificial Sequence
  Description of Artificial Sequence: Synthetic oligonucleotide
gguguaacgguugcugugg

SEQ ID NO: 306119 - RNA, 19 nt, Artificial Sequence
  Description of Artificial Sequence: Synthetic oligonucleotide
aggaugauaaaaggcuuca

SEQ ID NO: 306120 - RNA, 19 nt, Artificial Sequence
  Description of Artificial Sequence: Synthetic oligonucleotide
ucucccguagcgccugugc

SEQ ID NO: 306121 - RNA, 19 nt, Artificial Sequence
  Description of Artificial Sequence: Synthetic oligonucleotide
auaagaucacacaucuuaa

SEQ ID NO: 306122 - RNA, 19 nt, Artificial Sequence
  Description of Artificial Sequence: Synthetic oligonucleotide
cccgucagaacaaacuccg

SEQ ID NO: 306123 - RNA, 19 nt, Artificial Sequence
  Description of Artificial Sequence: Synthetic oligonucleotide
gaggaugauaaaaggcuuc

SEQ ID NO: 306124 - RNA, 19 nt, Artificial Sequence
  Description of Artificial Sequence: Synthetic oligonucleotide
ucuuaacacgaugcaguca

SEQ ID NO: 306125 - RNA, 19 nt, Artificial Sequence
  Description of Artificial Sequence: Synthetic oligonucleotide
ucauucgguuucagcuuag

SEQ ID NO: 306126 - RNA, 19 nt, Artificial Sequence
  Description of Artificial Sequence: Synthetic oligonucleotide
gcucaaaucccgugaaaag

SEQ ID NO: 306127 - RNA, 19 nt, Artificial Sequence
  Description of Artificial Sequence: Synthetic oligonucleotide
ucucccuaaggcagagcug

SEQ ID NO: 306128 - RNA, 19 nt, Artificial Sequence
  Description of Artificial Sequence: Synthetic oligonucleotide
ugaggacaguguugcuacg

SEQ ID NO: 306129 - RNA, 19 nt, Artificial Sequence
  Description of Artificial Sequence: Synthetic oligonucleotide
uguaccggcuguacugcac

SEQ ID NO: 306130 - RNA, 19 nt, Artificial Sequence
  Description of Artificial Sequence: Synthetic oligonucleotide
uugcuggcgaugagauggg

SEQ ID NO: 306131 - RNA, 19 nt, Artificial Sequence
  Description of Artificial Sequence: Synthetic oligonucleotide
acuugcucucuugacagca

SEQ ID NO: 306132 - RNA, 19 nt, Artificial Sequence
  Description of Artificial Sequence: Synthetic oligonucleotide
ugcuuucggggaugaauca

SEQ ID NO: 306133 - RNA, 19 nt, Artificial Sequence
  Description of Artificial Sequence: Synthetic oligonucleotide
cauuguugcaaggcucggg

SEQ ID NO: 306134 - RNA, 19 nt, Artificial Sequence
  Description of Artificial Sequence: Synthetic oligonucleotide
gaugaaucagaagagucau

SEQ ID NO: 306135 - RNA, 19 nt, Artificial Sequence
  Description of Artificial Sequence: Synthetic oligonucleotide
augauucguaguccagugu

SEQ ID NO: 306136 - RNA, 19 nt, Artificial Sequence
  Description of Artificial Sequence: Synthetic oligonucleotide
cuuucggggaugaaucaga

SEQ ID NO: 306137 - RNA, 19 nt, Artificial Sequence
  Description of Artificial Sequence: Synthetic oligonucleotide
agugggcgcaaaggggucc

SEQ ID NO: 306138 - RNA, 19 nt, Artificial Sequence
  Description of Artificial Sequence: Synthetic oligonucleotide
ggauauuaaaaugaucucu

SEQ ID NO: 306139 - RNA, 19 nt, Artificial Sequence
  Description of Artificial Sequence: Synthetic oligonucleotide
ucgcagagaaggugugugc

SEQ ID NO: 306140 - RNA, 19 nt, Artificial Sequence
  Description of Artificial Sequence: Synthetic oligonucleotide
cuuucgcagagaaggugug

SEQ ID NO: 306141 - RNA, 19 nt, Artificial Sequence
  Description of Artificial Sequence: Synthetic oligonucleotide
ucggcaacuuccccgccca

SEQ ID NO: 306142 - RNA, 19 nt, Artificial Sequence
  Description of Artificial Sequence: Synthetic oligonucleotide
uguugcuacggcacaggua

SEQ ID NO: 306143 - RNA, 19 nt, Artificial Sequence
  Description of Artificial Sequence: Synthetic oligonucleotide
ugcuacggcacagguaccc

SEQ ID NO: 306144 - RNA, 19 nt, Artificial Sequence
  Description of Artificial Sequence: Synthetic oligonucleotide
auucguaguccagugucug

SEQ ID NO: 306145 - RNA, 19 nt, Artificial Sequence
  Description of Artificial Sequence: Synthetic oligonucleotide
cuccgcauuaugaacaucu

SEQ ID NO: 306146 - RNA, 19 nt, Artificial Sequence
  Description of Artificial Sequence: Synthetic oligonucleotide
guaccggcuguacugcacc

SEQ ID NO: 306147 - RNA, 19 nt, Artificial Sequence
  Description of Artificial Sequence: Synthetic oligonucleotide
cucgacauaagugcagguc

SEQ ID NO: 306148 - RNA, 19 nt, Artificial Sequence
  Description of Artificial Sequence: Synthetic oligonucleotide
aggugugugcaucggcuug

SEQ ID NO: 306149 - RNA, 19 nt, Artificial Sequence
  Description of Artificial Sequence: Synthetic oligonucleotide
acaguguugcuacggcaca

SEQ ID NO: 306150 - RNA, 19 nt, Artificial Sequence
  Description of Artificial Sequence: Synthetic oligonucleotide
cagaggacuuaaugugggc

SEQ ID NO: 306151 - RNA, 19 nt, Artificial Sequence
  Description of Artificial Sequence: Synthetic oligonucleotide
cacaucuuaacacgaugca

SEQ ID NO: 306152 - RNA, 19 nt, Artificial Sequence
  Description of Artificial Sequence: Synthetic oligonucleotide
uuguugcaaggcucgggca

SEQ ID NO: 306153 - RNA, 19 nt, Artificial Sequence
  Description of Artificial Sequence: Synthetic oligonucleotide
gacuuaggaccaagugagg

SEQ ID NO: 306154 - RNA, 19 nt, Artificial Sequence
  Description of Artificial Sequence: Synthetic oligonucleotide
guaacgguugcuguggaaa

SEQ ID NO: 306155 - RNA, 19 nt, Artificial Sequence
  Description of Artificial Sequence: Synthetic oligonucleotide
gcucuuaggcauauaauac

SEQ ID NO: 306156 - RNA, 19 nt, Artificial Sequence
  Description of Artificial Sequence: Synthetic oligonucleotide
aggguguaacgguugcugu

SEQ ID NO: 306157 - RNA, 19 nt, Artificial Sequence
  Description of Artificial Sequence: Synthetic oligonucleotide
ccuagaauaagaucacaca

SEQ ID NO: 306158 - RNA, 19 nt, Artificial Sequence
  Description of Artificial Sequence: Synthetic oligonucleotide
aucucgcaggauauaguuc

SEQ ID NO: 306159 - RNA, 19 nt, Artificial Sequence
  Description of Artificial Sequence: Synthetic oligonucleotide
gugggcucgcuuuaaggac

SEQ ID NO: 306160 - RNA, 19 nt, Artificial Sequence
  Description of Artificial Sequence: Synthetic oligonucleotide
acucccgucagaacaaacu

SEQ ID NO: 306161 - RNA, 19 nt, Artificial Sequence
  Description of Artificial Sequence: Synthetic oligonucleotide
aaaugaucucugacagacu

SEQ ID NO: 306162 - RNA, 19 nt, Artificial Sequence
  Description of Artificial Sequence: Synthetic oligonucleotide
auacugcugacuuggcuuu

SEQ ID NO: 306163 - RNA, 19 nt, Artificial Sequence
  Description of Artificial Sequence: Synthetic oligonucleotide
ucucgacauaagugcaggu

SEQ ID NO: 306164 - RNA, 19 nt, Artificial Sequence
  Description of Artificial Sequence: Synthetic oligonucleotide
ugcagucaguuauuacauc

SEQ ID NO: 306165 - RNA, 19 nt, Artificial Sequence
  Description of Artificial Sequence: Synthetic oligonucleotide
ugcaucggcuugugaaugu

SEQ ID NO: 306166 - RNA, 19 nt, Artificial Sequence
  Description of Artificial Sequence: Synthetic oligonucleotide
uuaacacgaugcagucagu

SEQ ID NO: 306167 - RNA, 19 nt, Artificial Sequence
  Description of Artificial Sequence: Synthetic oligonucleotide
agaacuggccgcacucgac

SEQ ID NO: 306168 - RNA, 19 nt, Artificial Sequence
  Description of Artificial Sequence: Synthetic oligonucleotide
agcaaguuaucaauauaaa

SEQ ID NO: 306169 - RNA, 19 nt, Artificial Sequence
  Description of Artificial Sequence: Synthetic oligonucleotide
guagaggcuucucccuaag

SEQ ID NO: 306170 - RNA, 19 nt, Artificial Sequence
  Description of Artificial Sequence: Synthetic oligonucleotide
aaagcacguaaggcaucag

SEQ ID NO: 306171 - RNA, 19 nt, Artificial Sequence
  Description of Artificial Sequence: Synthetic oligonucleotide
guugagccagugugcagug

SEQ ID NO: 306172 - RNA, 19 nt, Artificial Sequence
  Description of Artificial Sequence: Synthetic oligonucleotide
uguaacgguugcuguggaa

SEQ ID NO: 306173 - RNA, 19 nt, Artificial Sequence
  Description of Artificial Sequence: Synthetic oligonucleotide
ugcauacauacugcugacu

SEQ ID NO: 306174 - RNA, 19 nt, Artificial Sequence
  Description of Artificial Sequence: Synthetic oligonucleotide
gaugggugcacuucuucgu

SEQ ID NO: 306175 - RNA, 19 nt, Artificial Sequence
  Description of Artificial Sequence: Synthetic oligonucleotide
guaaucuuacacccaucaa

SEQ ID NO: 306176 - RNA, 19 nt, Artificial Sequence
  Description of Artificial Sequence: Synthetic oligonucleotide
uuagugggagguggcaggu

SEQ ID NO: 306177 - RNA, 19 nt, Artificial Sequence
  Description of Artificial Sequence: Synthetic oligonucleotide
uuuagacagcaaagucuuu

SEQ ID NO: 306178 - RNA, 19 nt, Artificial Sequence
  Description of Artificial Sequence: Synthetic oligonucleotide
cacaccgcuuccucucccg

SEQ ID NO: 306179 - RNA, 19 nt, Artificial Sequence
  Description of Artificial Sequence: Synthetic oligonucleotide
uggcuuucgcagagaaggu

SEQ ID NO: 306180 - RNA, 19 nt, Artificial Sequence
  Description of Artificial Sequence: Synthetic oligonucleotide
cacgcucguauuucucccc

SEQ ID NO: 306181 - RNA, 19 nt, Artificial Sequence
  Description of Artificial Sequence: Synthetic oligonucleotide
uccgcauuaugaacaucua

SEQ ID NO: 306182 - RNA, 19 nt, Artificial Sequence
  Description of Artificial Sequence: Synthetic oligonucleotide
ccgugaaaagcacguaagg

SEQ ID NO: 306183 - RNA, 19 nt, Artificial Sequence
  Description of Artificial Sequence: Synthetic oligonucleotide
cuagccacuccggagucac

SEQ ID NO: 306184 - RNA, 19 nt, Artificial Sequence
  Description of Artificial Sequence: Synthetic oligonucleotide
ugcugcugcugcugcugcg

SEQ ID NO: 306185 - RNA, 19 nt, Artificial Sequence
  Description of Artificial Sequence: Synthetic oligonucleotide
ggaccaagugaggaguggg

SEQ ID NO: 306186 - RNA, 19 nt, Artificial Sequence
  Description of Artificial Sequence: Synthetic oligonucleotide
acucucgacauaagugcag

SEQ ID NO: 306187 - RNA, 19 nt, Artificial Sequence
  Description of Artificial Sequence: Synthetic oligonucleotide
uuauuacaucugucuuccu

SEQ ID NO: 306188 - RNA, 19 nt, Artificial Sequence
  Description of Artificial Sequence: Synthetic oligonucleotide
cugacuuggcuuucgcaga

SEQ ID NO: 306189 - RNA, 19 nt, Artificial Sequence
  Description of Artificial Sequence: Synthetic oligonucleotide
aggacuuaaugugggcucu

SEQ ID NO: 306190 - RNA, 19 nt, Artificial Sequence
  Description of Artificial Sequence: Synthetic oligonucleotide
gcagucaguuauuacaucu

SEQ ID NO: 306191 - RNA, 19 nt, Artificial Sequence
  Description of Artificial Sequence: Synthetic oligonucleotide
uggggcggcaccaguuucu

SEQ ID NO: 306192 - RNA, 19 nt, Artificial Sequence
  Description of Artificial Sequence: Synthetic oligonucleotide
cucggcaacuuccccgccc

SEQ ID NO: 306193 - RNA, 19 nt, Artificial Sequence
  Description of Artificial Sequence: Synthetic oligonucleotide
agacagcaaagucuuuauu

SEQ ID NO: 306194 - RNA, 19 nt, Artificial Sequence
  Description of Artificial Sequence: Synthetic oligonucleotide
auuaaucagaggacuuaau

SEQ ID NO: 306195 - RNA, 19 nt, Artificial Sequence
  Description of Artificial Sequence: Synthetic oligonucleotide
cccgugaaaagcacguaag

SEQ ID NO: 306196 - RNA, 19 nt, Artificial Sequence
  Description of Artificial Sequence: Synthetic oligonucleotide
uuucgcagagaaggugugu

SEQ ID NO: 306197 - RNA, 19 nt, Artificial Sequence
  Description of Artificial Sequence: Synthetic oligonucleotide
gguccggaagguugaaggc

SEQ ID NO: 306198 - RNA, 19 nt, Artificial Sequence
  Description of Artificial Sequence: Synthetic oligonucleotide
gccuucucguacuucaaac

SEQ ID NO: 306199 - RNA, 19 nt, Artificial Sequence
  Description of Artificial Sequence: Synthetic oligonucleotide
acucggcaacuuccccgcc

SEQ ID NO: 306200 - RNA, 19 nt, Artificial Sequence
  Description of Artificial Sequence: Synthetic oligonucleotide
cauccuagcaagaagccuu

SEQ ID NO: 306201 - RNA, 19 nt, Artificial Sequence
  Description of Artificial Sequence: Synthetic oligonucleotide
gcugugaacaggguuugcc

SEQ ID NO: 306202 - RNA, 19 nt, Artificial Sequence
  Description of Artificial Sequence: Synthetic oligonucleotide
ucguggacucggcaacuuc

SEQ ID NO: 306203 - RNA, 19 nt, Artificial Sequence
  Description of Artificial Sequence: Synthetic oligonucleotide
cagguaccccguauacuug

SEQ ID NO: 306204 - RNA, 19 nt, Artificial Sequence
  Description of Artificial Sequence: Synthetic oligonucleotide
acgaugugccucaccacag

SEQ ID NO: 306205 - RNA, 19 nt, Artificial Sequence
  Description of Artificial Sequence: Synthetic oligonucleotide
ccaugcgccuggauuaucc

SEQ ID NO: 306206 - RNA, 19 nt, Artificial Sequence
  Description of Artificial Sequence: Synthetic oligonucleotide
augagauggcggcuggguu

SEQ ID NO: 306207 - RNA, 19 nt, Artificial Sequence
  Description of Artificial Sequence: Synthetic oligonucleotide
cacaggauauuaaaaugau

SEQ ID NO: 306208 - RNA, 19 nt, Artificial Sequence
  Description of Artificial Sequence: Synthetic oligonucleotide
ggguguaacgguugcugug

SEQ ID NO: 306209 - RNA, 19 nt, Artificial Sequence
  Description of Artificial Sequence: Synthetic oligonucleotide
ggauuauccuuuuccaggu

SEQ ID NO: 306210 - RNA, 19 nt, Artificial Sequence
  Description of Artificial Sequence: Synthetic oligonucleotide
cacccaucaagagcucugc

SEQ ID NO: 306211 - RNA, 19 nt, Artificial Sequence
  Description of Artificial Sequence: Synthetic oligonucleotide
ggugauauagaaauacuuu

SEQ ID NO: 306212 - RNA, 19 nt, Artificial Sequence
  Description of Artificial Sequence: Synthetic oligonucleotide
auccgccauucuuuggccu

SEQ ID NO: 306213 - RNA, 19 nt, Artificial Sequence
  Description of Artificial Sequence: Synthetic oligonucleotide
gagcugcugcugcugcugc

SEQ ID NO: 306214 - RNA, 19 nt, Artificial Sequence
  Description of Artificial Sequence: Synthetic oligonucleotide
uccgccauucuuuggccuu

SEQ ID NO: 306215 - RNA, 19 nt, Artificial Sequence
  Description of Artificial Sequence: Synthetic oligonucleotide
cacgcccucugcagggagg

SEQ ID NO: 306216 - RNA, 19 nt, Artificial Sequence
  Description of Artificial Sequence: Synthetic oligonucleotide
cucgcaggauauaguucug

SEQ ID NO: 306217 - RNA, 19 nt, Artificial Sequence
  Description of Artificial Sequence: Synthetic oligonucleotide
aaauccagucacagagaua

SEQ ID NO: 306218 - RNA, 19 nt, Artificial Sequence
  Description of Artificial Sequence: Synthetic oligonucleotide
uugcuacggcacagguacc

SEQ ID NO: 306219 - RNA, 19 nt, Artificial Sequence
  Description of Artificial Sequence: Synthetic oligonucleotide
gugcaucggcuugugaaug

SEQ ID NO: 306220 - RNA, 19 nt, Artificial Sequence
  Description of Artificial Sequence: Synthetic oligonucleotide
uuacacccaucaagagcuc

SEQ ID NO: 306221 - RNA, 19 nt, Artificial Sequence
  Description of Artificial Sequence: Synthetic oligonucleotide
guggacucggcaacuuccc

SEQ ID NO: 306222 - RNA, 19 nt, Artificial Sequence
  Description of Artificial Sequence: Synthetic oligonucleotide
ugcccucguucugagaguc

SEQ ID NO: 306223 - RNA, 19 nt, Artificial Sequence
  Description of Artificial Sequence: Synthetic oligonucleotide
cuccggagucacgaugugc

SEQ ID NO: 306224 - RNA, 19 nt, Artificial Sequence
  Description of Artificial Sequence: Synthetic oligonucleotide
cacucccgucagaacaaac

SEQ ID NO: 306225 - RNA, 19 nt, Artificial Sequence
  Description of Artificial Sequence: Synthetic oligonucleotide
gaugagauggcggcugggu

SEQ ID NO: 306226 - RNA, 19 nt, Artificial Sequence
  Description of Artificial Sequence: Synthetic oligonucleotide
gauucguaguccagugucu

SEQ ID NO: 306227 - RNA, 19 nt, Artificial Sequence
  Description of Artificial Sequence: Synthetic oligonucleotide
ggugagaagguuggucagc

SEQ ID NO: 306228 - RNA, 19 nt, Artificial Sequence
  Description of Artificial Sequence: Synthetic oligonucleotide
ggcauauaauacaaaacau

SEQ ID NO: 306229 - RNA, 19 nt, Artificial Sequence
  Description of Artificial Sequence: Synthetic oligonucleotide
ccguauacuuggcaccugc

SEQ ID NO: 306230 - RNA, 19 nt, Artificial Sequence
  Description of Artificial Sequence: Synthetic oligonucleotide
guaccccguauacuuggca

SEQ ID NO: 306231 - RNA, 19 nt, Artificial Sequence
  Description of Artificial Sequence: Synthetic oligonucleotide
acuccgcauuaugaacauc

SEQ ID NO: 306232 - RNA, 19 nt, Artificial Sequence
  Description of Artificial Sequence: Synthetic oligonucleotide
accuugcuggcgaugagau

SEQ ID NO: 306233 - RNA, 19 nt, Artificial Sequence
  Description of Artificial Sequence: Synthetic oligonucleotide
gcuuucggggaugaaucag

SEQ ID NO: 306234 - RNA, 19 nt, Artificial Sequence
  Description of Artificial Sequence: Synthetic oligonucleotide
gguguaccggcuguacugc

SEQ ID NO: 306235 - RNA, 19 nt, Artificial Sequence
  Description of Artificial Sequence: Synthetic oligonucleotide
ggaacgggugcugauggac

SEQ ID NO: 306236 - RNA, 19 nt, Artificial Sequence
  Description of Artificial Sequence: Synthetic oligonucleotide
acuccggagucacgaugug

SEQ ID NO: 306237 - RNA, 19 nt, Artificial Sequence
  Description of Artificial Sequence: Synthetic oligonucleotide
gcacgcucguauuucuccc

SEQ ID NO: 306238 - RNA, 19 nt, Artificial Sequence
  Description of Artificial Sequence: Synthetic oligonucleotide
uaccggcuguacugcaccu

SEQ ID NO: 306239 - RNA, 19 nt, Artificial Sequence
  Description of Artificial Sequence: Synthetic oligonucleotide
cucuagccacuccggaguc

SEQ ID NO: 306240 - RNA, 19 nt, Artificial Sequence
  Description of Artificial Sequence: Synthetic oligonucleotide
cuuauccgacaucugcucu

SEQ ID NO: 306241 - RNA, 19 nt, Artificial Sequence
  Description of Artificial Sequence: Synthetic oligonucleotide
aacacgcccucugcaggga

SEQ ID NO: 306242 - RNA, 19 nt, Artificial Sequence
  Description of Artificial Sequence: Synthetic oligonucleotide
gcgcaaagggguccggaag

SEQ ID NO: 306243 - RNA, 19 nt, Artificial Sequence
  Description of Artificial Sequence: Synthetic oligonucleotide
gcggagagaacugaugaga

SEQ ID NO: 306244 - RNA, 19 nt, Artificial Sequence
  Description of Artificial Sequence: Synthetic oligonucleotide
gguccgagucaccuugcug

SEQ ID NO: 306245 - RNA, 19 nt, Artificial Sequence
  Description of Artificial Sequence: Synthetic oligonucleotide
ggacaguguugcuacggca

SEQ ID NO: 306246 - RNA, 19 nt, Artificial Sequence
  Description of Artificial Sequence: Synthetic oligonucleotide
gcuugugaauguggggucc

SEQ ID NO: 306247 - RNA, 19 nt, Artificial Sequence
  Description of Artificial Sequence: Synthetic oligonucleotide
ggggagaaacgugggcucg

SEQ ID NO: 306248 - RNA, 19 nt, Artificial Sequence
  Description of Artificial Sequence: Synthetic oligonucleotide
ugcugcugcugcugcugca

SEQ ID NO: 306249 - RNA, 19 nt, Artificial Sequence
  Description of Artificial Sequence: Synthetic oligonucleotide
gcacagguaccccguauac

SEQ ID NO: 306250 - RNA, 19 nt, Artificial Sequence
  Description of Artificial Sequence: Synthetic oligonucleotide
cugcugcugcugcugcugc

SEQ ID NO: 306251 - RNA, 19 nt, Artificial Sequence
  Description of Artificial Sequence: Synthetic oligonucleotide
guacugcaccugccgcagg

SEQ ID NO: 306252 - RNA, 19 nt, Artificial Sequence
  Description of Artificial Sequence: Synthetic oligonucleotide
gcauacauacugcugacuu

SEQ ID NO: 306253 - RNA, 19 nt, Artificial Sequence
  Description of Artificial Sequence: Synthetic oligonucleotide
gugggcgcaaagggguccg

SEQ ID NO: 306254 - RNA, 19 nt, Artificial Sequence
  Description of Artificial Sequence: Synthetic oligonucleotide
ccucuggcaaaguacucuc

SEQ ID NO: 306255 - RNA, 19 nt, Artificial Sequence
  Description of Artificial Sequence: Synthetic oligonucleotide
cacuccggagucacgaugu

SEQ ID NO: 306256 - RNA, 19 nt, Artificial Sequence
  Description of Artificial Sequence: Synthetic oligonucleotide
gcugcugcugcugcugcgg

SEQ ID NO: 306257 - RNA, 19 nt, Artificial Sequence
  Description of Artificial Sequence: Synthetic oligonucleotide
gucuuaaagaggggagaaa

SEQ ID NO: 306258 - RNA, 19 nt, Artificial Sequence
  Description of Artificial Sequence: Synthetic oligonucleotide
acgguccgagucaccuugc

SEQ ID NO: 306259 - RNA, 19 nt, Artificial Sequence
  Description of Artificial Sequence: Synthetic oligonucleotide
ugcugcugcugcugcugcu

SEQ ID NO: 306260 - RNA, 19 nt, Artificial Sequence
  Description of Artificial Sequence: Synthetic oligonucleotide
cacacgggauccgccauuc

SEQ ID NO: 306261 - RNA, 19 nt, Artificial Sequence
  Description of Artificial Sequence: Synthetic oligonucleotide
acgaugcagucaguuauua

SEQ ID NO: 306262 - RNA, 19 nt, Artificial Sequence
  Description of Artificial Sequence: Synthetic oligonucleotide
acgggauccgccauucuuu

SEQ ID NO: 306263 - RNA, 19 nt, Artificial Sequence
  Description of Artificial Sequence: Synthetic oligonucleotide
guguaacgguugcugugga

SEQ ID NO: 306264 - RNA, 19 nt, Artificial Sequence
  Description of Artificial Sequence: Synthetic oligonucleotide
caggcucaaaucccgugaa

SEQ ID NO: 306265 - RNA, 19 nt, Artificial Sequence
  Description of Artificial Sequence: Synthetic oligonucleotide
ggacuugcggagagaacug

SEQ ID NO: 306266 - RNA, 19 nt, Artificial Sequence
  Description of Artificial Sequence: Synthetic oligonucleotide
gacuuaaugugggcucuua

SEQ ID NO: 306267 - RNA, 19 nt, Artificial Sequence
  Description of Artificial Sequence: Synthetic oligonucleotide
cuaaaagacuuaggaccaa

SEQ ID NO: 306268 - RNA, 19 nt, Artificial Sequence
  Description of Artificial Sequence: Synthetic oligonucleotide
agcugcugcugcugcugcu

SEQ ID NO: 306269 - RNA, 19 nt, Artificial Sequence
  Description of Artificial Sequence: Synthetic oligonucleotide
cacacaagaggcugucagu

SEQ ID NO: 306270 - RNA, 19 nt, Artificial Sequence
  Description of Artificial Sequence: Synthetic oligonucleotide
cucccguagcgccugugca

SEQ ID NO: 306271 - RNA, 19 nt, Artificial Sequence
  Description of Artificial Sequence: Synthetic oligonucleotide
ggcggcuggguucaagcuc

SEQ ID NO: 306272 - RNA, 19 nt, Artificial Sequence
  Description of Artificial Sequence: Synthetic oligonucleotide
acacacgggauccgccauu

SEQ ID NO: 306273 - RNA, 19 nt, Artificial Sequence
  Description of Artificial Sequence: Synthetic oligonucleotide
cgucagaacaaacuccgca

SEQ ID NO: 306274 - RNA, 19 nt, Artificial Sequence
  Description of Artificial Sequence: Synthetic oligonucleotide
gcugcugcugcugcugcag

SEQ ID NO: 306275 - RNA, 19 nt, Artificial Sequence
  Description of Artificial Sequence: Synthetic oligonucleotide
uagcgccugugcauacaua

SEQ ID NO: 306276 - RNA, 19 nt, Artificial Sequence
  Description of Artificial Sequence: Synthetic oligonucleotide
cugguagaggcuucucccu

SEQ ID NO: 306277 - RNA, 19 nt, Artificial Sequence
  Description of Artificial Sequence: Synthetic oligonucleotide
cagggcucgauggggcggc

SEQ ID NO: 306278 - RNA, 19 nt, Artificial Sequence
  Description of Artificial Sequence: Synthetic oligonucleotide
cgguguaccggcuguacug

SEQ ID NO: 306279 - RNA, 19 nt, Artificial Sequence
  Description of Artificial Sequence: Synthetic oligonucleotide
ggaagguugaaggcggugu

SEQ ID NO: 306280 - RNA, 19 nt, Artificial Sequence
  Description of Artificial Sequence: Synthetic oligonucleotide
gcacucgacuucuccucag

SEQ ID NO: 306281 - RNA, 19 nt, Artificial Sequence
  Description of Artificial Sequence: Synthetic oligonucleotide
guacuucaaaccacuuggu

SEQ ID NO: 306282 - RNA, 19 nt, Artificial Sequence
  Description of Artificial Sequence: Synthetic oligonucleotide
gggugauauagaaauacuu

SEQ ID NO: 306283 - RNA, 19 nt, Artificial Sequence
  Description of Artificial Sequence: Synthetic oligonucleotide
uucguggacucggcaacuu

SEQ ID NO: 306284 - RNA, 19 nt, Artificial Sequence
  Description of Artificial Sequence: Synthetic oligonucleotide
guguugcuacggcacaggu

SEQ ID NO: 306285 - RNA, 19 nt, Artificial Sequence
  Description of Artificial Sequence: Synthetic oligonucleotide
gauggggcggcaccaguuu

SEQ ID NO: 306286 - RNA, 19 nt, Artificial Sequence
  Description of Artificial Sequence: Synthetic oligonucleotide
ggccgcacucgacuucucc

SEQ ID NO: 306287 - RNA, 19 nt, Artificial Sequence
  Description of Artificial Sequence: Synthetic oligonucleotide
caggguguacagcuucuua

SEQ ID NO: 306288 - RNA, 19 nt, Artificial Sequence
  Description of Artificial Sequence: Synthetic oligonucleotide
acacgggauccgccauucu

SEQ ID NO: 306289 - RNA, 19 nt, Artificial Sequence
  Description of Artificial Sequence: Synthetic oligonucleotide
ugggcgcaaagggguccgg

SEQ ID NO: 306290 - RNA, 19 nt, Artificial Sequence
  Description of Artificial Sequence: Synthetic oligonucleotide
guagcgccugugcauacau

SEQ ID NO: 306291 - RNA, 19 nt, Artificial Sequence
  Description of Artificial Sequence: Synthetic oligonucleotide
cgugggcucgcuuuaagga

SEQ ID NO: 306292 - RNA, 19 nt, Artificial Sequence
  Description of Artificial Sequence: Synthetic oligonucleotide
augaucagacgaggaugau

SEQ ID NO: 306293 - RNA, 19 nt, Artificial Sequence
  Description of Artificial Sequence: Synthetic oligonucleotide
gguaccccguauacuuggc

SEQ ID NO: 306294 - RNA, 19 nt, Artificial Sequence
  Description of Artificial Sequence: Synthetic oligonucleotide
gaacuugaacaggcucaaa

SEQ ID NO: 306295 - RNA, 19 nt, Artificial Sequence
  Description of Artificial Sequence: Synthetic oligonucleotide
gcugcugcugcugcugcug

SEQ ID NO: 306296 - RNA, 19 nt, Artificial Sequence
  Description of Artificial Sequence: Synthetic oligonucleotide
ccgucagaacaaacuccgc

SEQ ID NO: 306297 - RNA, 19 nt, Artificial Sequence
  Description of Artificial Sequence: Synthetic oligonucleotide
cgaugcagucaguuauuac

SEQ ID NO: 306298 - RNA, 19 nt, Artificial Sequence
  Description of Artificial Sequence: Synthetic oligonucleotide
ccacuccggagucacgaug

SEQ ID NO: 306299 - RNA, 19 nt, Artificial Sequence
  Description of Artificial Sequence: Synthetic oligonucleotide
gggagaaacgugggcucgc

SEQ ID NO: 306300 - RNA, 19 nt, Artificial Sequence
  Description of Artificial Sequence: Synthetic oligonucleotide
ccgacaucugcucuggaua

SEQ ID NO: 306301 - RNA, 19 nt, Artificial Sequence
  Description of Artificial Sequence: Synthetic oligonucleotide
ggucauucucacaggauau

SEQ ID NO: 306302 - RNA, 19 nt, Artificial Sequence
  Description of Artificial Sequence: Synthetic oligonucleotide
ggcgaugagaugggugcac

SEQ ID NO: 306303 - RNA, 19 nt, Artificial Sequence
  Description of Artificial Sequence: Synthetic oligonucleotide
ggcgcaaagggguccggaa

SEQ ID NO: 306304 - RNA, 19 nt, Artificial Sequence
  Description of Artificial Sequence: Synthetic oligonucleotide
uccucgauucuggcucuuu

SEQ ID NO: 306305 - RNA, 19 nt, Artificial Sequence
  Description of Artificial Sequence: Synthetic oligonucleotide
ggggugauauagaaauacu

SEQ ID NO: 306306 - RNA, 19 nt, Artificial Sequence
  Description of Artificial Sequence: Synthetic oligonucleotide
caugcgccuggauuauccu

SEQ ID NO: 306307 - RNA, 19 nt, Artificial Sequence
  Description of Artificial Sequence: Synthetic oligonucleotide
gcacgcugccagcagcgac

SEQ ID NO: 306308 - RNA, 19 nt, Artificial Sequence
  Description of Artificial Sequence: Synthetic oligonucleotide
ccgcacucgacuucuccuc

SEQ ID NO: 306309 - RNA, 19 nt, Artificial Sequence
  Description of Artificial Sequence: Synthetic oligonucleotide
aucccgugaaaagcacgua

SEQ ID NO: 306310 - RNA, 19 nt, Artificial Sequence
  Description of Artificial Sequence: Synthetic oligonucleotide
aggacccagucaggaguga

SEQ ID NO: 306311 - RNA, 19 nt, Artificial Sequence
  Description of Artificial Sequence: Synthetic oligonucleotide
ccuugcuggcgaugagaug

SEQ ID NO: 306312 - RNA, 19 nt, Artificial Sequence
  Description of Artificial Sequence: Synthetic oligonucleotide
cacagguaccccguauacu

SEQ ID NO: 306313 - RNA, 19 nt, Artificial Sequence
  Description of Artificial Sequence: Synthetic oligonucleotide
gagaaacgugggcucgcuu

SEQ ID NO: 306314 - RNA, 19 nt, Artificial Sequence
  Description of Artificial Sequence: Synthetic oligonucleotide
accugccagguaugucauu

SEQ ID NO: 306315 - RNA, 19 nt, Artificial Sequence
  Description of Artificial Sequence: Synthetic oligonucleotide
gggaacgggugcugaugga

SEQ ID NO: 306316 - RNA, 19 nt, Artificial Sequence
  Description of Artificial Sequence: Synthetic oligonucleotide
gcuccugcuuucggggaug

SEQ ID NO: 306317 - RNA, 19 nt, Artificial Sequence
  Description of Artificial Sequence: Synthetic oligonucleotide
ccucuagccacuccggagu

SEQ ID NO: 306318 - RNA, 19 nt, Artificial Sequence
  Description of Artificial Sequence: Synthetic oligonucleotide
cacucgacuucuccucagu

SEQ ID NO: 306319 - RNA, 19 nt, Artificial Sequence
  Description of Artificial Sequence: Synthetic oligonucleotide
ggcgguguaccggcuguac

SEQ ID NO: 306320 - RNA, 19 nt, Artificial Sequence
  Description of Artificial Sequence: Synthetic oligonucleotide
gccgcacucgacuucuccu

SEQ ID NO: 306321 - RNA, 19 nt, Artificial Sequence
  Description of Artificial Sequence: Synthetic oligonucleotide
cucccuccuccuccuccuc

SEQ ID NO: 306322 - RNA, 19 nt, Artificial Sequence
  Description of Artificial Sequence: Synthetic oligonucleotide
cuucguggacucggcaacu

SEQ ID NO: 306323 - RNA, 19 nt, Artificial Sequence
  Description of Artificial Sequence: Synthetic oligonucleotide
ccgccaugcgccuggauua

SEQ ID NO: 306324 - RNA, 19 nt, Artificial Sequence
  Description of Artificial Sequence: Synthetic oligonucleotide
cuggccgcacucgacuucu

SEQ ID NO: 306325 - RNA, 19 nt, Artificial Sequence
  Description of Artificial Sequence: Synthetic oligonucleotide
cuccugcuuucggggauga

SEQ ID NO: 306326 - RNA, 19 nt, Artificial Sequence
  Description of Artificial Sequence: Synthetic oligonucleotide
gguccucgauucuggcucu

SEQ ID NO: 306327 - RNA, 19 nt, Artificial Sequence
  Description of Artificial Sequence: Synthetic oligonucleotide
caccugccagguaugucau

SEQ ID NO: 306328 - RNA, 19 nt, Artificial Sequence
  Description of Artificial Sequence: Synthetic oligonucleotide
gcucgauggggcggcacca

SEQ ID NO: 306329 - RNA, 19 nt, Artificial Sequence
  Description of Artificial Sequence: Synthetic oligonucleotide
cugcccucguucugagagu

SEQ ID NO: 306330 - RNA, 19 nt, Artificial Sequence
  Description of Artificial Sequence: Synthetic oligonucleotide
gccauucuuuggccuucuc

SEQ ID NO: 306331 - RNA, 19 nt, Artificial Sequence
  Description of Artificial Sequence: Synthetic oligonucleotide
cacacacgggauccgccau

SEQ ID NO: 306332 - RNA, 19 nt, Artificial Sequence
  Description of Artificial Sequence: Synthetic oligonucleotide
ccgcauuaugaacaucuau

SEQ ID NO: 306333 - RNA, 19 nt, Artificial Sequence
  Description of Artificial Sequence: Synthetic oligonucleotide
cgaggaugauaaaaggcuu

SEQ ID NO: 306334 - RNA, 19 nt, Artificial Sequence
  Description of Artificial Sequence: Synthetic oligonucleotide
ggagaaacgugggcucgcu

SEQ ID NO: 306335 - RNA, 19 nt, Artificial Sequence
  Description of Artificial Sequence: Synthetic oligonucleotide
ccguagcgccugugcauac

SEQ ID NO: 306336 - RNA, 19 nt, Artificial Sequence
  Description of Artificial Sequence: Synthetic oligonucleotide
cagugccgccaugcgccug

SEQ ID NO: 306337 - RNA, 19 nt, Artificial Sequence
  Description of Artificial Sequence: Synthetic oligonucleotide
gcccucguucugagagucc

SEQ ID NO: 306338 - RNA, 19 nt, Artificial Sequence
  Description of Artificial Sequence: Synthetic oligonucleotide
gcgaugagaugggugcacu

SEQ ID NO: 306339 - RNA, 19 nt, Artificial Sequence
  Description of Artificial Sequence: Synthetic oligonucleotide
cggcuugugaauguggggu

SEQ ID NO: 306340 - RNA, 19 nt, Artificial Sequence
  Description of Artificial Sequence: Synthetic oligonucleotide
cccguauacuuggcaccug

SEQ ID NO: 306341 - RNA, 19 nt, Artificial Sequence
  Description of Artificial Sequence: Synthetic oligonucleotide
cgcacucgacuucuccuca

SEQ ID NO: 306342 - RNA, 19 nt, Artificial Sequence
  Description of Artificial Sequence: Synthetic oligonucleotide
ccgccauucuuuggccuuc

SEQ ID NO: 306343 - RNA, 19 nt, Artificial Sequence
  Description of Artificial Sequence: Synthetic oligonucleotide
gcucgcuuuaaggacucuu

SEQ ID NO: 306344 - RNA, 19 nt, Artificial Sequence
  Description of Artificial Sequence: Synthetic oligonucleotide
cgacauaagugcaggucau

SEQ ID NO: 306345 - RNA, 19 nt, Artificial Sequence
  Description of Artificial Sequence: Synthetic oligonucleotide
cccguagcgccugugcaua

SEQ ID NO: 306346 - RNA, 19 nt, Artificial Sequence
  Description of Artificial Sequence: Synthetic oligonucleotide
ccccguauacuuggcaccu

SEQ ID NO: 306347 - RNA, 19 nt, Artificial Sequence
  Description of Artificial Sequence: Synthetic oligonucleotide
gcgccugugcauacauacu

SEQ ID NO: 306348 - RNA, 19 nt, Artificial Sequence
  Description of Artificial Sequence: Synthetic oligonucleotide
agauggcggcuggguucaa

SEQ ID NO: 306349 - RNA, 19 nt, Artificial Sequence
  Description of Artificial Sequence: Synthetic oligonucleotide
gccacuccggagucacgau

SEQ ID NO: 306350 - RNA, 19 nt, Artificial Sequence
  Description of Artificial Sequence: Synthetic oligonucleotide
ggacuuaaugugggcucuu

SEQ ID NO: 306351 - RNA, 19 nt, Artificial Sequence
  Description of Artificial Sequence: Synthetic oligonucleotide
cuuccccgcccagggugua

SEQ ID NO: 306352 - RNA, 19 nt, Artificial Sequence
  Description of Artificial Sequence: Synthetic oligonucleotide
gugccgccaugcgccugga

SEQ ID NO: 306353 - RNA, 19 nt, Artificial Sequence
  Description of Artificial Sequence: Synthetic oligonucleotide
cggcaacuuccccgcccag

SEQ ID NO: 306354 - RNA, 19 nt, Artificial Sequence
  Description of Artificial Sequence: Synthetic oligonucleotide
cgaugagaugggugcacuu

SEQ ID NO: 306355 - RNA, 19 nt, Artificial Sequence
  Description of Artificial Sequence: Synthetic oligonucleotide
cgaugaacuucuggcacuu

SEQ ID NO: 306356 - RNA, 19 nt, Artificial Sequence
  Description of Artificial Sequence: Synthetic oligonucleotide
cgauggggcggcaccaguu

SEQ ID NO: 306357 - RNA, 19 nt, Artificial Sequence
  Description of Artificial Sequence: Synthetic oligonucleotide
cgguccgagucaccuugcu

SEQ ID NO: 306358 - RNA, 19 nt, Artificial Sequence
  Description of Artificial Sequence: Synthetic oligonucleotide
cgccauucuuuggccuucu

SEQ ID NO: 306359 - RNA, 19 nt, Artificial Sequence
  Description of Artificial Sequence: Synthetic oligonucleotide
uuuacuagugacaagcugg

SEQ ID NO: 306360 - RNA, 19 nt, Artificial Sequence
  Description of Artificial Sequence: Synthetic oligonucleotide
aaccuaauaggguagaggg

SEQ ID NO: 306361 - RNA, 19 nt, Artificial Sequence
  Description of Artificial Sequence: Synthetic oligonucleotide
aacuuaguuauauuggcac

SEQ ID NO: 306362 - RNA, 19 nt, Artificial Sequence
  Description of Artificial Sequence: Synthetic oligonucleotide
gaugacaagacccugaaug

SEQ ID NO: 306363 - RNA, 19 nt, Artificial Sequence
  Description of Artificial Sequence: Synthetic oligonucleotide
aguucauagccuuagcacc

SEQ ID NO: 306364 - RNA, 19 nt, Artificial Sequence
  Description of Artificial Sequence: Synthetic oligonucleotide
aacggaaagugucagcccc

SEQ ID NO: 306365 - RNA, 19 nt, Artificial Sequence
  Description of Artificial Sequence: Synthetic oligonucleotide
agucacuccacucugaacg

SEQ ID NO: 306366 - RNA, 19 nt, Artificial Sequence
  Description of Artificial Sequence: Synthetic oligonucleotide
ugaaaaugaagucaguggu

SEQ ID NO: 306367 - RNA, 19 nt, Artificial Sequence
  Description of Artificial Sequence: Synthetic oligonucleotide
acgcuuuacaaccagauuc

SEQ ID NO: 306368 - RNA, 19 nt, Artificial Sequence
  Description of Artificial Sequence: Synthetic oligonucleotide
auuaguguaguuauacucc

SEQ ID NO: 306369 - RNA, 19 nt, Artificial Sequence
  Description of Artificial Sequence: Synthetic oligonucleotide
auucuugucgauugcaccc

SEQ ID NO: 306370 - RNA, 19 nt, Artificial Sequence
  Description of Artificial Sequence: Synthetic oligonucleotide
gaugauaaauacccgacgc

SEQ ID NO: 306371 - RNA, 19 nt, Artificial Sequence
  Description of Artificial Sequence: Synthetic oligonucleotide
ucuacgaucuccacuaucc

SEQ ID NO: 306372 - RNA, 19 nt, Artificial Sequence
  Description of Artificial Sequence: Synthetic oligonucleotide
aauacccgacgcuuggugc

SEQ ID NO: 306373 - RNA, 19 nt, Artificial Sequence
  Description of Artificial Sequence: Synthetic oligonucleotide
aguaccaauggucauauca

SEQ ID NO: 306374 - RNA, 19 nt, Artificial Sequence
  Description of Artificial Sequence: Synthetic oligonucleotide
acaaccagcacucgguugc

SEQ ID NO: 306375 - RNA, 19 nt, Artificial Sequence
  Description of Artificial Sequence: Synthetic oligonucleotide
uuagcacccaucuuagugg

SEQ ID NO: 306376 - RNA, 19 nt, Artificial Sequence
  Description of Artificial Sequence: Synthetic oligonucleotide
uauuaguguaguuauacuc

SEQ ID NO: 306377 - RNA, 19 nt, Artificial Sequence
  Description of Artificial Sequence: Synthetic oligonucleotide
ugaagucugauccagggac

SEQ ID NO: 306378 - RNA, 19 nt, Artificial Sequence
  Description of Artificial Sequence: Synthetic oligonucleotide
aagaccaggguccucuuac

SEQ ID NO: 306379 - RNA, 19 nt, Artificial Sequence
  Description of Artificial Sequence: Synthetic oligonucleotide
uggacauucaggaauaaaa

SEQ ID NO: 306380 - RNA, 19 nt, Artificial Sequence
  Description of Artificial Sequence: Synthetic oligonucleotide
acgacaaagguguucuucc

SEQ ID NO: 306381 - RNA, 19 nt, Artificial Sequence
  Description of Artificial Sequence: Synthetic oligonucleotide
gaaucagggacuuagaucu

SEQ ID NO: 306382 - RNA, 19 nt, Artificial Sequence
  Description of Artificial Sequence: Synthetic oligonucleotide
aagacccugaauguuaaac

SEQ ID NO: 306383 - RNA, 19 nt, Artificial Sequence
  Description of Artificial Sequence: Synthetic oligonucleotide
acaaaaguccucugguggc

SEQ ID NO: 306384 - RNA, 19 nt, Artificial Sequence
  Description of Artificial Sequence: Synthetic oligonucleotide
cugugguaaaaguaaaggg

SEQ ID NO: 306385 - RNA, 19 nt, Artificial Sequence
  Description of Artificial Sequence: Synthetic oligonucleotide
uuccuuaacaccaagccuc

SEQ ID NO: 306386 - RNA, 19 nt, Artificial Sequence
  Description of Artificial Sequence: Synthetic oligonucleotide
caauccucacaguagagcg

SEQ ID NO: 306387 - RNA, 19 nt, Artificial Sequence
  Description of Artificial Sequence: Synthetic oligonucleotide
ugauguugagacgagaacc

SEQ ID NO: 306388 - RNA, 19 nt, Artificial Sequence
  Description of Artificial Sequence: Synthetic oligonucleotide
cuuggcaaggauuuugagg

SEQ ID NO: 306389 - RNA, 19 nt, Artificial Sequence
  Description of Artificial Sequence: Synthetic oligonucleotide
ugucgauugagccaaccag

SEQ ID NO: 306390 - RNA, 19 nt, Artificial Sequence
  Description of Artificial Sequence: Synthetic oligonucleotide
ugucccaaaacagugaccc

SEQ ID NO: 306391 - RNA, 19 nt, Artificial Sequence
  Description of Artificial Sequence: Synthetic oligonucleotide
guuauauuggcacugaucu

SEQ ID NO: 306392 - RNA, 19 nt, Artificial Sequence
  Description of Artificial Sequence: Synthetic oligonucleotide
uguugagacgagaaccacg

SEQ ID NO: 306393 - RNA, 19 nt, Artificial Sequence
  Description of Artificial Sequence: Synthetic oligonucleotide
aaaugugcuccagaugggc

SEQ ID NO: 306394 - RNA, 19 nt, Artificial Sequence
  Description of Artificial Sequence: Synthetic oligonucleotide
aucuuaguggcaaaauucc

SEQ ID NO: 306395 - RNA, 19 nt, Artificial Sequence
  Description of Artificial Sequence: Synthetic oligonucleotide
uauauuggcacugaucugu

SEQ ID NO: 306396 - RNA, 19 nt, Artificial Sequence
  Description of Artificial Sequence: Synthetic oligonucleotide
gucucgaugauaaauaccc

SEQ ID NO: 306397 - RNA, 19 nt, Artificial Sequence
  Description of Artificial Sequence: Synthetic oligonucleotide
uuaauccggucacaagucg

SEQ ID NO: 306398 - RNA, 19 nt, Artificial Sequence
  Description of Artificial Sequence: Synthetic oligonucleotide
aguggcaaaauuccuauca

SEQ ID NO: 306399 - RNA, 19 nt, Artificial Sequence
  Description of Artificial Sequence: Synthetic oligonucleotide
auuacgguagcucucuuug

SEQ ID NO: 306400 - RNA, 19 nt, Artificial Sequence
  Description of Artificial Sequence: Synthetic oligonucleotide
aguagcacuagaggaaucc

SEQ ID NO: 306401 - RNA, 19 nt, Artificial Sequence
  Description of Artificial Sequence: Synthetic oligonucleotide
agauguucgacauuugccu

SEQ ID NO: 306402 - RNA, 19 nt, Artificial Sequence
  Description of Artificial Sequence: Synthetic oligonucleotide
ugaacggaaagugucagcc

SEQ ID NO: 306403 - RNA, 19 nt, Artificial Sequence
  Description of Artificial Sequence: Synthetic oligonucleotide
uguagaucucgaaugguga

SEQ ID NO: 306404 - RNA, 19 nt, Artificial Sequence
  Description of Artificial Sequence: Synthetic oligonucleotide
cugaccuuuggccagaccc

SEQ ID NO: 306405 - RNA, 19 nt, Artificial Sequence
  Description of Artificial Sequence: Synthetic oligonucleotide
aacccaaucggccccacag

SEQ ID NO: 306406 - RNA, 19 nt, Artificial Sequence
  Description of Artificial Sequence: Synthetic oligonucleotide
uguaguuauacuccaucac

SEQ ID NO: 306407 - RNA, 19 nt, Artificial Sequence
  Description of Artificial Sequence: Synthetic oligonucleotide
aaucucauacuuggcaagg

SEQ ID NO: 306408 - RNA, 19 nt, Artificial Sequence
  Description of Artificial Sequence: Synthetic oligonucleotide
caucuuaguggcaaaauuc

SEQ ID NO: 306409 - RNA, 19 nt, Artificial Sequence
  Description of Artificial Sequence: Synthetic oligonucleotide
uggaguauuggcaaagauc

SEQ ID NO: 306410 - RNA, 19 nt, Artificial Sequence
  Description of Artificial Sequence: Synthetic oligonucleotide
ucaaauuguuuccugcccu

SEQ ID NO: 306411 - RNA, 19 nt, Artificial Sequence
  Description of Artificial Sequence: Synthetic oligonucleotide
uaucaaauggagucggacu

SEQ ID NO: 306412 - RNA, 19 nt, Artificial Sequence
  Description of Artificial Sequence: Synthetic oligonucleotide
cuuagcacccaucuuagug

SEQ ID NO: 306413 - RNA, 19 nt, Artificial Sequence
  Description of Artificial Sequence: Synthetic oligonucleotide
aaaauuccuaucaaaugga

SEQ ID NO: 306414 - RNA, 19 nt, Artificial Sequence
  Description of Artificial Sequence: Synthetic oligonucleotide
uuaccagagaggcucacca

SEQ ID NO: 306415 - RNA, 19 nt, Artificial Sequence
  Description of Artificial Sequence: Synthetic oligonucleotide
augauguugagacgagaac

SEQ ID NO: 306416 - RNA, 19 nt, Artificial Sequence
  Description of Artificial Sequence: Synthetic oligonucleotide
ucgaugauaaauacccgac

SEQ ID NO: 306417 - RNA, 19 nt, Artificial Sequence
  Description of Artificial Sequence: Synthetic oligonucleotide
caaguuuggaaccaccuug

SEQ ID NO: 306418 - RNA, 19 nt, Artificial Sequence
  Description of Artificial Sequence: Synthetic oligonucleotide
guugagacgagaaccacgg

SEQ ID NO: 306419 - RNA, 19 nt, Artificial Sequence
  Description of Artificial Sequence: Synthetic oligonucleotide
aguagagcggaccgcagcg

SEQ ID NO: 306420 - RNA, 19 nt, Artificial Sequence
  Description of Artificial Sequence: Synthetic oligonucleotide
uuaguguaguuauacucca

SEQ ID NO: 306421 - RNA, 19 nt, Artificial Sequence
  Description of Artificial Sequence: Synthetic oligonucleotide
auguuagagacgaagcugg

SEQ ID NO: 306422 - RNA, 19 nt, Artificial Sequence
  Description of Artificial Sequence: Synthetic oligonucleotide
uacgaucuccacuauccgg

SEQ ID NO: 306423 - RNA, 19 nt, Artificial Sequence
  Description of Artificial Sequence: Synthetic oligonucleotide
uacaaccagauucuugaug

SEQ ID NO: 306424 - RNA, 19 nt, Artificial Sequence
  Description of Artificial Sequence: Synthetic oligonucleotide
aaauacccgacgcuuggug

SEQ ID NO: 306425 - RNA, 19 nt, Artificial Sequence
  Description of Artificial Sequence: Synthetic oligonucleotide
agauuggugauucccagcu

SEQ ID NO: 306426 - RNA, 19 nt, Artificial Sequence
  Description of Artificial Sequence: Synthetic oligonucleotide
auauccaagacgcuuuaca

SEQ ID NO: 306427 - RNA, 19 nt, Artificial Sequence
  Description of Artificial Sequence: Synthetic oligonucleotide
agucuuuugcaucgggcac

SEQ ID NO: 306428 - RNA, 19 nt, Artificial Sequence
  Description of Artificial Sequence: Synthetic oligonucleotide
ugggguagaaggaaugaca

SEQ ID NO: 306429 - RNA, 19 nt, Artificial Sequence
  Description of Artificial Sequence: Synthetic oligonucleotide
ucucgaugauaaauacccg

SEQ ID NO: 306430 - RNA, 19 nt, Artificial Sequence
  Description of Artificial Sequence: Synthetic oligonucleotide
agacccacaauguucaggu

SEQ ID NO: 306431 - RNA, 19 nt, Artificial Sequence
  Description of Artificial Sequence: Synthetic oligonucleotide
aaccguggcaggaaugacc

SEQ ID NO: 306432 - RNA, 19 nt, Artificial Sequence
  Description of Artificial Sequence: Synthetic oligonucleotide
uuaguggcaaaauuccuau

SEQ ID NO: 306433 - RNA, 19 nt, Artificial Sequence
  Description of Artificial Sequence: Synthetic oligonucleotide
ugauccagggacguuauug

SEQ ID NO: 306434 - RNA, 19 nt, Artificial Sequence
  Description of Artificial Sequence: Synthetic oligonucleotide
acuagugacaagcuggcau

SEQ ID NO: 306435 - RNA, 19 nt, Artificial Sequence
  Description of Artificial Sequence: Synthetic oligonucleotide
ucgaagaugccuuuucccu

SEQ ID NO: 306436 - RNA, 19 nt, Artificial Sequence
  Description of Artificial Sequence: Synthetic oligonucleotide
cucacaguagagcggaccg

SEQ ID NO: 306437 - RNA, 19 nt, Artificial Sequence
  Description of Artificial Sequence: Synthetic oligonucleotide
cauucuugucgauugcacc

SEQ ID NO: 306438 - RNA, 19 nt, Artificial Sequence
  Description of Artificial Sequence: Synthetic oligonucleotide
agaucucgaauggugaagg

SEQ ID NO: 306439 - RNA, 19 nt, Artificial Sequence
  Description of Artificial Sequence: Synthetic oligonucleotide
gacguuauuggaaaccgug

SEQ ID NO: 306440 - RNA, 19 nt, Artificial Sequence
  Description of Artificial Sequence: Synthetic oligonucleotide
gauccguccauuacgguag

SEQ ID NO: 306441 - RNA, 19 nt, Artificial Sequence
  Description of Artificial Sequence: Synthetic oligonucleotide
uccagccuauguuagagac

SEQ ID NO: 306442 - RNA, 19 nt, Artificial Sequence
  Description of Artificial Sequence: Synthetic oligonucleotide
ugcagaugguguuuagugc

SEQ ID NO: 306443 - RNA, 19 nt, Artificial Sequence
  Description of Artificial Sequence: Synthetic oligonucleotide
ugucgaagaugccuuuucc

SEQ ID NO: 306444 - RNA, 19 nt, Artificial Sequence
  Description of Artificial Sequence: Synthetic oligonucleotide
cuuuacaaccagauucuug

SEQ ID NO: 306445 - RNA, 19 nt, Artificial Sequence
  Description of Artificial Sequence: Synthetic oligonucleotide
uccgguguagggcagaguc

SEQ ID NO: 306446 - RNA, 19 nt, Artificial Sequence
  Description of Artificial Sequence: Synthetic oligonucleotide
aucuaagacucuuuguuau

SEQ ID NO: 306447 - RNA, 19 nt, Artificial Sequence
  Description of Artificial Sequence: Synthetic oligonucleotide
guuauacuccaucacugug

SEQ ID NO: 306448 - RNA, 19 nt, Artificial Sequence
  Description of Artificial Sequence: Synthetic oligonucleotide
uccuaucaaauggagucgg

SEQ ID NO: 306449 - RNA, 19 nt, Artificial Sequence
  Description of Artificial Sequence: Synthetic oligonucleotide
gauaaauacccgacgcuug

SEQ ID NO: 306450 - RNA, 19 nt, Artificial Sequence
  Description of Artificial Sequence: Synthetic oligonucleotide
aaaugggaugcagagcuca

SEQ ID NO: 306451 - RNA, 19 nt, Artificial Sequence
  Description of Artificial Sequence: Synthetic oligonucleotide
agcuagacuuuguagccuc

SEQ ID NO: 306452 - RNA, 19 nt, Artificial Sequence
  Description of Artificial Sequence: Synthetic oligonucleotide
augacaagacccugaaugu

SEQ ID NO: 306453 - RNA, 19 nt, Artificial Sequence
  Description of Artificial Sequence: Synthetic oligonucleotide
uuccuaucaaauggagucg

SEQ ID NO: 306454 - RNA, 19 nt, Artificial Sequence
  Description of Artificial Sequence: Synthetic oligonucleotide
cauaucagugccacagaag

SEQ ID NO: 306455 - RNA, 19 nt, Artificial Sequence
  Description of Artificial Sequence: Synthetic oligonucleotide
uguuagagacgaagcuggg

SEQ ID NO: 306456 - RNA, 19 nt, Artificial Sequence
  Description of Artificial Sequence: Synthetic oligonucleotide
ucucccuccaaagaggucu

SEQ ID NO: 306457 - RNA, 19 nt, Artificial Sequence
  Description of Artificial Sequence: Synthetic oligonucleotide
augauaaauacccgacgcu

SEQ ID NO: 306458 - RNA, 19 nt, Artificial Sequence
  Description of Artificial Sequence: Synthetic oligonucleotide
acagauuggugauucccag

SEQ ID NO: 306459 - RNA, 19 nt, Artificial Sequence
  Description of Artificial Sequence: Synthetic oligonucleotide
aauuguuuccugcccucca

SEQ ID NO: 306460 - RNA, 19 nt, Artificial Sequence
  Description of Artificial Sequence: Synthetic oligonucleotide
gauguucgacauuugccug

SEQ ID NO: 306461 - RNA, 19 nt, Artificial Sequence
  Description of Artificial Sequence: Synthetic oligonucleotide
cuguagaucucgaauggug

SEQ ID NO: 306462 - RNA, 19 nt, Artificial Sequence
  Description of Artificial Sequence: Synthetic oligonucleotide
aaauguagcaguagcacua

SEQ ID NO: 306463 - RNA, 19 nt, Artificial Sequence
  Description of Artificial Sequence: Synthetic oligonucleotide
acuuaguuauauuggcacu

SEQ ID NO: 306464 - RNA, 19 nt, Artificial Sequence
  Description of Artificial Sequence: Synthetic oligonucleotide
aucaaauggagucggacuu

SEQ ID NO: 306465 - RNA, 19 nt, Artificial Sequence
  Description of Artificial Sequence: Synthetic oligonucleotide
uuauauuggcacugaucug

SEQ ID NO: 306466 - RNA, 19 nt, Artificial Sequence
  Description of Artificial Sequence: Synthetic oligonucleotide
uugucgauugagccaacca

SEQ ID NO: 306467 - RNA, 19 nt, Artificial Sequence
  Description of Artificial Sequence: Synthetic oligonucleotide
ucuaccagggcaugagcug

SEQ ID NO: 306468 - RNA, 19 nt, Artificial Sequence
  Description of Artificial Sequence: Synthetic oligonucleotide
accaacauagcuccagcca

SEQ ID NO: 306469 - RNA, 19 nt, Artificial Sequence
  Description of Artificial Sequence: Synthetic oligonucleotide
ucgauugagccaaccagac

SEQ ID NO: 306470 - RNA, 19 nt, Artificial Sequence
  Description of Artificial Sequence: Synthetic oligonucleotide
uggagucggacuuccaccc

SEQ ID NO: 306471 - RNA, 19 nt, Artificial Sequence
  Description of Artificial Sequence: Synthetic oligonucleotide
ucugaacggaaagugucag

SEQ ID NO: 306472 - RNA, 19 nt, Artificial Sequence
  Description of Artificial Sequence: Synthetic oligonucleotide
uugucgauugcacccucag

SEQ ID NO: 306473 - RNA, 19 nt, Artificial Sequence
  Description of Artificial Sequence: Synthetic oligonucleotide
ugauaaauacccgacgcuu

SEQ ID NO: 306474 - RNA, 19 nt, Artificial Sequence
  Description of Artificial Sequence: Synthetic oligonucleotide
aaagaggucuagacggcag

SEQ ID NO: 306475 - RNA, 19 nt, Artificial Sequence
  Description of Artificial Sequence: Synthetic oligonucleotide
ugguaaaaguaaagggauc

SEQ ID NO: 306476 - RNA, 19 nt, Artificial Sequence
  Description of Artificial Sequence: Synthetic oligonucleotide
gaagucugauccagggacg

SEQ ID NO: 306477 - RNA, 19 nt, Artificial Sequence
  Description of Artificial Sequence: Synthetic oligonucleotide
uccucuuacgcauccccag

SEQ ID NO: 306478 - RNA, 19 nt, Artificial Sequence
  Description of Artificial Sequence: Synthetic oligonucleotide
uuaguuauauuggcacuga

SEQ ID NO: 306479 - RNA, 19 nt, Artificial Sequence
  Description of Artificial Sequence: Synthetic oligonucleotide
uucuacacccauccugcug

SEQ ID NO: 306480 - RNA, 19 nt, Artificial Sequence
  Description of Artificial Sequence: Synthetic oligonucleotide
gggagguucacucacugcc

SEQ ID NO: 306481 - RNA, 19 nt, Artificial Sequence
  Description of Artificial Sequence: Synthetic oligonucleotide
uuuuaguaccaaguuugga

SEQ ID NO: 306482 - RNA, 19 nt, Artificial Sequence
  Description of Artificial Sequence: Synthetic oligonucleotide
aguuuggaaccaccuugac

SEQ ID NO: 306483 - RNA, 19 nt, Artificial Sequence
  Description of Artificial Sequence: Synthetic oligonucleotide
ucgguugcccuggauaagg

SEQ ID NO: 306484 - RNA, 19 nt, Artificial Sequence
  Description of Artificial Sequence: Synthetic oligonucleotide
cucgaugauaaauacccga

SEQ ID NO: 306485 - RNA, 19 nt, Artificial Sequence
  Description of Artificial Sequence: Synthetic oligonucleotide
gaugauguugagacgagaa

SEQ ID NO: 306486 - RNA, 19 nt, Artificial Sequence
  Description of Artificial Sequence: Synthetic oligonucleotide
aguccuuuuaguaccaagu

SEQ ID NO: 306487 - RNA, 19 nt, Artificial Sequence
  Description of Artificial Sequence: Synthetic oligonucleotide
uagaucucgaauggugaag

SEQ ID NO: 306488 - RNA, 19 nt, Artificial Sequence
  Description of Artificial Sequence: Synthetic oligonucleotide
gaucagacucucucccucc

SEQ ID NO: 306489 - RNA, 19 nt, Artificial Sequence
  Description of Artificial Sequence: Synthetic oligonucleotide
gaucuaagacucuuuguua

SEQ ID NO: 306490 - RNA, 19 nt, Artificial Sequence
  Description of Artificial Sequence: Synthetic oligonucleotide
ugucucagugagccgacga

SEQ ID NO: 306491 - RNA, 19 nt, Artificial Sequence
  Description of Artificial Sequence: Synthetic oligonucleotide
guuagagacgaagcugggg

SEQ ID NO: 306492 - RNA, 19 nt, Artificial Sequence
  Description of Artificial Sequence: Synthetic oligonucleotide
guguuuagugcugugucag

SEQ ID NO: 306493 - RNA, 19 nt, Artificial Sequence
  Description of Artificial Sequence: Synthetic oligonucleotide
ucuaagacucuuuguuauc

SEQ ID NO: 306494 - RNA, 19 nt, Artificial Sequence
  Description of Artificial Sequence: Synthetic oligonucleotide
gaacggaaagugucagccc

SEQ ID NO: 306495 - RNA, 19 nt, Artificial Sequence
  Description of Artificial Sequence: Synthetic oligonucleotide
acguuauuggaaaccgugg

SEQ ID NO: 306496 - RNA, 19 nt, Artificial Sequence
  Description of Artificial Sequence: Synthetic oligonucleotide
accuaauaggguagagggc

SEQ ID NO: 306497 - RNA, 19 nt, Artificial Sequence
  Description of Artificial Sequence: Synthetic oligonucleotide
uuucccuccucagaguaca

SEQ ID NO: 306498 - RNA, 19 nt, Artificial Sequence
  Description of Artificial Sequence: Synthetic oligonucleotide
uguuuagugcugugucagc

SEQ ID NO: 306499 - RNA, 19 nt, Artificial Sequence
  Description of Artificial Sequence: Synthetic oligonucleotide
ccgaaagucuuuugcaucg

SEQ ID NO: 306500 - RNA, 19 nt, Artificial Sequence
  Description of Artificial Sequence: Synthetic oligonucleotide
agauccguccauuacggua

SEQ ID NO: 306501 - RNA, 19 nt, Artificial Sequence
  Description of Artificial Sequence: Synthetic oligonucleotide
aauccggucacaagucgug

SEQ ID NO: 306502 - RNA, 19 nt, Artificial Sequence
  Description of Artificial Sequence: Synthetic oligonucleotide
cuacgaucuccacuauccg

SEQ ID NO: 306503 - RNA, 19 nt, Artificial Sequence
  Description of Artificial Sequence: Synthetic oligonucleotide
ucagguagcuagacuuugu

SEQ ID NO: 306504 - RNA, 19 nt, Artificial Sequence
  Description of Artificial Sequence: Synthetic oligonucleotide
ucuuacgcauccccagaac

SEQ ID NO: 306505 - RNA, 19 nt, Artificial Sequence
  Description of Artificial Sequence: Synthetic oligonucleotide
aacccacccuuagagacug

SEQ ID NO: 306506 - RNA, 19 nt, Artificial Sequence
  Description of Artificial Sequence: Synthetic oligonucleotide
aauccgaucaaaggcugaa

SEQ ID NO: 306507 - RNA, 19 nt, Artificial Sequence
  Description of Artificial Sequence: Synthetic oligonucleotide
gaccuguccagccaccaac

SEQ ID NO: 306508 - RNA, 19 nt, Artificial Sequence
  Description of Artificial Sequence: Synthetic oligonucleotide
ggaaucagggacuuagauc

SEQ ID NO: 306509 - RNA, 19 nt, Artificial Sequence
  Description of Artificial Sequence: Synthetic oligonucleotide
cagguugaaaaugaaguca

SEQ ID NO: 306510 - RNA, 19 nt, Artificial Sequence
  Description of Artificial Sequence: Synthetic oligonucleotide
uuugccuguagaucucgaa

SEQ ID NO: 306511 - RNA, 19 nt, Artificial Sequence
  Description of Artificial Sequence: Synthetic oligonucleotide
uaucagugccacagaaguc

SEQ ID NO: 306512 - RNA, 19 nt, Artificial Sequence
  Description of Artificial Sequence: Synthetic oligonucleotide
ggacuuagaucuaccaggg

SEQ ID NO: 306513 - RNA, 19 nt, Artificial Sequence
  Description of Artificial Sequence: Synthetic oligonucleotide
ggugauugguuuuccauuc

SEQ ID NO: 306514 - RNA, 19 nt, Artificial Sequence
  Description of Artificial Sequence: Synthetic oligonucleotide
ucuagacggcagcuucucc

SEQ ID NO: 306515 - RNA, 19 nt, Artificial Sequence
  Description of Artificial Sequence: Synthetic oligonucleotide
caaauggagucggacuucc

SEQ ID NO: 306516 - RNA, 19 nt, Artificial Sequence
  Description of Artificial Sequence: Synthetic oligonucleotide
uccauuacgguagcucucu

SEQ ID NO: 306517 - RNA, 19 nt, Artificial Sequence
  Description of Artificial Sequence: Synthetic oligonucleotide
caagacgcuuuacaaccag

SEQ ID NO: 306518 - RNA, 19 nt, Artificial Sequence
  Description of Artificial Sequence: Synthetic oligonucleotide
ucucagugagccgacgaca

SEQ ID NO: 306519 - RNA, 19 nt, Artificial Sequence
  Description of Artificial Sequence: Synthetic oligonucleotide
gagggagguucacucacug

SEQ ID NO: 306520 - RNA, 19 nt, Artificial Sequence
  Description of Artificial Sequence: Synthetic oligonucleotide
ccgaucaaaggcugaaugg

SEQ ID NO: 306521 - RNA, 19 nt, Artificial Sequence
  Description of Artificial Sequence: Synthetic oligonucleotide
aggugauugguuuuccauu

SEQ ID NO: 306522 - RNA, 19 nt, Artificial Sequence
  Description of Artificial Sequence: Synthetic oligonucleotide
ugggcagaguccuuuuagu

SEQ ID NO: 306523 - RNA, 19 nt, Artificial Sequence
  Description of Artificial Sequence: Synthetic oligonucleotide
cuagacggcagcuucucca

SEQ ID NO: 306524 - RNA, 19 nt, Artificial Sequence
  Description of Artificial Sequence: Synthetic oligonucleotide
cccuguguaagccucaaag

SEQ ID NO: 306525 - RNA, 19 nt, Artificial Sequence
  Description of Artificial Sequence: Synthetic oligonucleotide
gggacguuauuggaaaccg

SEQ ID NO: 306526 - RNA, 19 nt, Artificial Sequence
  Description of Artificial Sequence: Synthetic oligonucleotide
uucuaacacaaaaguccuc

SEQ ID NO: 306527 - RNA, 19 nt, Artificial Sequence
  Description of Artificial Sequence: Synthetic oligonucleotide
auguugagacgagaaccac

SEQ ID NO: 306528 - RNA, 19 nt, Artificial Sequence
  Description of Artificial Sequence: Synthetic oligonucleotide
ugguggacauucaggaaua

SEQ ID NO: 306529 - RNA, 19 nt, Artificial Sequence
  Description of Artificial Sequence: Synthetic oligonucleotide
gaccaggguccucuuacgc

SEQ ID NO: 306530 - RNA, 19 nt, Artificial Sequence
  Description of Artificial Sequence: Synthetic oligonucleotide
cugaacggaaagugucagc

SEQ ID NO: 306531 - RNA, 19 nt, Artificial Sequence
  Description of Artificial Sequence: Synthetic oligonucleotide
ugcaacccacccuuagaga

SEQ ID NO: 306532 - RNA, 19 nt, Artificial Sequence
  Description of Artificial Sequence: Synthetic oligonucleotide
ccagaacacaaccugaguc

SEQ ID NO: 306533 - RNA, 19 nt, Artificial Sequence
  Description of Artificial Sequence: Synthetic oligonucleotide
ugagccaaccagacccaca

SEQ ID NO: 306534 - RNA, 19 nt, Artificial Sequence
  Description of Artificial Sequence: Synthetic oligonucleotide
gagucggacuuccacccug

SEQ ID NO: 306535 - RNA, 19 nt, Artificial Sequence
  Description of Artificial Sequence: Synthetic oligonucleotide
uuagaucuaccagggcaug

SEQ ID NO: 306536 - RNA, 19 nt, Artificial Sequence
  Description of Artificial Sequence: Synthetic oligonucleotide
ucuggaguauuggcaaaga

SEQ ID NO: 306537 - RNA, 19 nt, Artificial Sequence
  Description of Artificial Sequence: Synthetic oligonucleotide
ugaugauguugagacgaga

SEQ ID NO: 306538 - RNA, 19 nt, Artificial Sequence
  Description of Artificial Sequence: Synthetic oligonucleotide
uacgcauccccagaacaca

SEQ ID NO: 306539 - RNA, 19 nt, Artificial Sequence
  Description of Artificial Sequence: Synthetic oligonucleotide
acccaaucggccccacagg

SEQ ID NO: 306540 - RNA, 19 nt, Artificial Sequence
  Description of Artificial Sequence: Synthetic oligonucleotide
cacagauuggugauuccca

SEQ ID NO: 306541 - RNA, 19 nt, Artificial Sequence
  Description of Artificial Sequence: Synthetic oligonucleotide
augucccaaaacagugacc

SEQ ID NO: 306542 - RNA, 19 nt, Artificial Sequence
  Description of Artificial Sequence: Synthetic oligonucleotide
agaauccgaucaaaggcug

SEQ ID NO: 306543 - RNA, 19 nt, Artificial Sequence
  Description of Artificial Sequence: Synthetic oligonucleotide
aguuguucaugaagcuccg

SEQ ID NO: 306544 - RNA, 19 nt, Artificial Sequence
  Description of Artificial Sequence: Synthetic oligonucleotide
cucggucacuggcugaaag

SEQ ID NO: 306545 - RNA, 19 nt, Artificial Sequence
  Description of Artificial Sequence: Synthetic oligonucleotide
gccgcagacugcuuaaucc

SEQ ID NO: 306546 - RNA, 19 nt, Artificial Sequence
  Description of Artificial Sequence: Synthetic oligonucleotide
cagguugugggcagcccgg

SEQ ID NO: 306547 - RNA, 19 nt, Artificial Sequence
  Description of Artificial Sequence: Synthetic oligonucleotide
ucgauugcacccucagcaa

SEQ ID NO: 306548 - RNA, 19 nt, Artificial Sequence
  Description of Artificial Sequence: Synthetic oligonucleotide
uuguagccucuucagccgu

SEQ ID NO: 306549 - RNA, 19 nt, Artificial Sequence
  Description of Artificial Sequence: Synthetic oligonucleotide
ccgcuuucuagaaaugugc

SEQ ID NO: 306550 - RNA, 19 nt, Artificial Sequence
  Description of Artificial Sequence: Synthetic oligonucleotide
ucgaauggugaagggcucc

SEQ ID NO: 306551 - RNA, 19 nt, Artificial Sequence
  Description of Artificial Sequence: Synthetic oligonucleotide
gagccgacgacaaaggugu

SEQ ID NO: 306552 - RNA, 19 nt, Artificial Sequence
  Description of Artificial Sequence: Synthetic oligonucleotide
auccggucacaagucgugc

SEQ ID NO: 306553 - RNA, 19 nt, Artificial Sequence
  Description of Artificial Sequence: Synthetic oligonucleotide
cuauguuagagacgaagcu

SEQ ID NO: 306554 - RNA, 19 nt, Artificial Sequence
  Description of Artificial Sequence: Synthetic oligonucleotide
gguaaaaguaaagggaucu

SEQ ID NO: 306555 - RNA, 19 nt, Artificial Sequence
  Description of Artificial Sequence: Synthetic oligonucleotide
aucuaccagggcaugagcu

SEQ ID NO: 306556 - RNA, 19 nt, Artificial Sequence
  Description of Artificial Sequence: Synthetic oligonucleotide
uccggucacaagucgugca

SEQ ID NO: 306557 - RNA, 19 nt, Artificial Sequence
  Description of Artificial Sequence: Synthetic oligonucleotide
uggaaaccguggcaggaau

SEQ ID NO: 306558 - RNA, 19 nt, Artificial Sequence
  Description of Artificial Sequence: Synthetic oligonucleotide
accgcuuucuagaaaugug

SEQ ID NO: 306559 - RNA, 19 nt, Artificial Sequence
  Description of Artificial Sequence: Synthetic oligonucleotide
aaaacccaaucggccccac

SEQ ID NO: 306560 - RNA, 19 nt, Artificial Sequence
  Description of Artificial Sequence: Synthetic oligonucleotide
aagcuccggccucucagcu

SEQ ID NO: 306561 - RNA, 19 nt, Artificial Sequence
  Description of Artificial Sequence: Synthetic oligonucleotide
guagaucucgaauggugaa

SEQ ID NO: 306562 - RNA, 19 nt, Artificial Sequence
  Description of Artificial Sequence: Synthetic oligonucleotide
gccuauguuagagacgaag

SEQ ID NO: 306563 - RNA, 19 nt, Artificial Sequence
  Description of Artificial Sequence: Synthetic oligonucleotide
gucgauugagccaaccaga

SEQ ID NO: 306564 - RNA, 19 nt, Artificial Sequence
  Description of Artificial Sequence: Synthetic oligonucleotide
gcuuaauccggucacaagu

SEQ ID NO: 306565 - RNA, 19 nt, Artificial Sequence
  Description of Artificial Sequence: Synthetic oligonucleotide
cucugaacggaaaguguca

SEQ ID NO: 306566 - RNA, 19 nt, Artificial Sequence
  Description of Artificial Sequence: Synthetic oligonucleotide
cagaacacaaccugagucu

SEQ ID NO: 306567 - RNA, 19 nt, Artificial Sequence
  Description of Artificial Sequence: Synthetic oligonucleotide
cacuauccgguguagggca

SEQ ID NO: 306568 - RNA, 19 nt, Artificial Sequence
  Description of Artificial Sequence: Synthetic oligonucleotide
caguagagcggaccgcagc

SEQ ID NO: 306569 - RNA, 19 nt, Artificial Sequence
  Description of Artificial Sequence: Synthetic oligonucleotide
auccguccauuacgguagc

SEQ ID NO: 306570 - RNA, 19 nt, Artificial Sequence
  Description of Artificial Sequence: Synthetic oligonucleotide
caaucggccccacaggaca

SEQ ID NO: 306571 - RNA, 19 nt, Artificial Sequence
  Description of Artificial Sequence: Synthetic oligonucleotide
cuuaacaccaagccucucu

SEQ ID NO: 306572 - RNA, 19 nt, Artificial Sequence
  Description of Artificial Sequence: Synthetic oligonucleotide
cuuggugcccgccgcagac

SEQ ID NO: 306573 - RNA, 19 nt, Artificial Sequence
  Description of Artificial Sequence: Synthetic oligonucleotide
acaagucgugcagauggug

SEQ ID NO: 306574 - RNA, 19 nt, Artificial Sequence
  Description of Artificial Sequence: Synthetic oligonucleotide
aaacccaaucggccccaca

SEQ ID NO: 306575 - RNA, 19 nt, Artificial Sequence
  Description of Artificial Sequence: Synthetic oligonucleotide
ugccaucacugcuucuaca

SEQ ID NO: 306576 - RNA, 19 nt, Artificial Sequence
  Description of Artificial Sequence: Synthetic oligonucleotide
cuuagaucuaccagggcau

SEQ ID NO: 306577 - RNA, 19 nt, Artificial Sequence
  Description of Artificial Sequence: Synthetic oligonucleotide
guaguucucauugcacuuc

SEQ ID NO: 306578 - RNA, 19 nt, Artificial Sequence
  Description of Artificial Sequence: Synthetic oligonucleotide
gucucagugagccgacgac

SEQ ID NO: 306579 - RNA, 19 nt, Artificial Sequence
  Description of Artificial Sequence: Synthetic oligonucleotide
gugugcaacccacccuuag

SEQ ID NO: 306580 - RNA, 19 nt, Artificial Sequence
  Description of Artificial Sequence: Synthetic oligonucleotide
agggcaugagcugaccaug

SEQ ID NO: 306581 - RNA, 19 nt, Artificial Sequence
  Description of Artificial Sequence: Synthetic oligonucleotide
uaaauacccgacgcuuggu

SEQ ID NO: 306582 - RNA, 19 nt, Artificial Sequence
  Description of Artificial Sequence: Synthetic oligonucleotide
uccagaccgcuuucuagaa

SEQ ID NO: 306583 - RNA, 19 nt, Artificial Sequence
  Description of Artificial Sequence: Synthetic oligonucleotide
cguuauuggaaaccguggc

SEQ ID NO: 306584 - RNA, 19 nt, Artificial Sequence
  Description of Artificial Sequence: Synthetic oligonucleotide
guuaccagagaggcucacc

SEQ ID NO: 306585 - RNA, 19 nt, Artificial Sequence
  Description of Artificial Sequence: Synthetic oligonucleotide
agacgcuuuacaaccagau

SEQ ID NO: 306586 - RNA, 19 nt, Artificial Sequence
  Description of Artificial Sequence: Synthetic oligonucleotide
agucaguaccaauggucau

SEQ ID NO: 306587 - RNA, 19 nt, Artificial Sequence
  Description of Artificial Sequence: Synthetic oligonucleotide
uagcuagacuuuguagccu

SEQ ID NO: 306588 - RNA, 19 nt, Artificial Sequence
  Description of Artificial Sequence: Synthetic oligonucleotide
ccgcagacugcuuaauccg

SEQ ID NO: 306589 - RNA, 19 nt, Artificial Sequence
  Description of Artificial Sequence: Synthetic oligonucleotide
ugacaagacccugaauguu

SEQ ID NO: 306590 - RNA, 19 nt, Artificial Sequence
  Description of Artificial Sequence: Synthetic oligonucleotide
acggcccaucacuucuaac

SEQ ID NO: 306591 - RNA, 19 nt, Artificial Sequence
  Description of Artificial Sequence: Synthetic oligonucleotide
cuuuucccuccucagagua

SEQ ID NO: 306592 - RNA, 19 nt, Artificial Sequence
  Description of Artificial Sequence: Synthetic oligonucleotide
guuguucaugaagcuccgg

SEQ ID NO: 306593 - RNA, 19 nt, Artificial Sequence
  Description of Artificial Sequence: Synthetic oligonucleotide
cauguacaaccagcacucg

SEQ ID NO: 306594 - RNA, 19 nt, Artificial Sequence
  Description of Artificial Sequence: Synthetic oligonucleotide
ugaccaugaucagacucuc

SEQ ID NO: 306595 - RNA, 19 nt, Artificial Sequence
  Description of Artificial Sequence: Synthetic oligonucleotide
ucgugcagaugguguuuag

SEQ ID NO: 306596 - RNA, 19 nt, Artificial Sequence
  Description of Artificial Sequence: Synthetic oligonucleotide
caccuccaaugacacacag

SEQ ID NO: 306597 - RNA, 19 nt, Artificial Sequence
  Description of Artificial Sequence: Synthetic oligonucleotide
auccagccuauguuagaga

SEQ ID NO: 306598 - RNA, 19 nt, Artificial Sequence
  Description of Artificial Sequence: Synthetic oligonucleotide
caaaugggaugcagagcuc

SEQ ID NO: 306599 - RNA, 19 nt, Artificial Sequence
  Description of Artificial Sequence: Synthetic oligonucleotide
ugacgagggccagguaucc

SEQ ID NO: 306600 - RNA, 19 nt, Artificial Sequence
  Description of Artificial Sequence: Synthetic oligonucleotide
ucagugagccgacgacaaa

SEQ ID NO: 306601 - RNA, 19 nt, Artificial Sequence
  Description of Artificial Sequence: Synthetic oligonucleotide
uucccuccucagaguacag

SEQ ID NO: 306602 - RNA, 19 nt, Artificial Sequence
  Description of Artificial Sequence: Synthetic oligonucleotide
gguugcccuggauaaggcc

SEQ ID NO: 306603 - RNA, 19 nt, Artificial Sequence
  Description of Artificial Sequence: Synthetic oligonucleotide
agugacccuggugucauau

SEQ ID NO: 306604 - RNA, 19 nt, Artificial Sequence
  Description of Artificial Sequence: Synthetic oligonucleotide
ccaauccucacaguagagc

SEQ ID NO: 306605 - RNA, 19 nt, Artificial Sequence
  Description of Artificial Sequence: Synthetic oligonucleotide
uagaggaauccagccuaug

SEQ ID NO: 306606 - RNA, 19 nt, Artificial Sequence
  Description of Artificial Sequence: Synthetic oligonucleotide
aaugggaugcagagcucau

SEQ ID NO: 306607 - RNA, 19 nt, Artificial Sequence
  Description of Artificial Sequence: Synthetic oligonucleotide
uagagcggaccgcagcguu

SEQ ID NO: 306608 - RNA, 19 nt, Artificial Sequence
  Description of Artificial Sequence: Synthetic oligonucleotide
ccauucuugucgauugcac

SEQ ID NO: 306609 - RNA, 19 nt, Artificial Sequence
  Description of Artificial Sequence: Synthetic oligonucleotide
ccagccuauguuagagacg

SEQ ID NO: 306610 - RNA, 19 nt, Artificial Sequence
  Description of Artificial Sequence: Synthetic oligonucleotide
cugaagucugauccaggga

SEQ ID NO: 306611 - RNA, 19 nt, Artificial Sequence
  Description of Artificial Sequence: Synthetic oligonucleotide
guaaaaguaaagggaucua

SEQ ID NO: 306612 - RNA, 19 nt, Artificial Sequence
  Description of Artificial Sequence: Synthetic oligonucleotide
caagucgugcagauggugu

SEQ ID NO: 306613 - RNA, 19 nt, Artificial Sequence
  Description of Artificial Sequence: Synthetic oligonucleotide
uacuagugacaagcuggca

SEQ ID NO: 306614 - RNA, 19 nt, Artificial Sequence
  Description of Artificial Sequence: Synthetic oligonucleotide
guggucagaaguguccaga

SEQ ID NO: 306615 - RNA, 19 nt, Artificial Sequence
  Description of Artificial Sequence: Synthetic oligonucleotide
aagggaucuaagacucuuu

SEQ ID NO: 306616 - RNA, 19 nt, Artificial Sequence
  Description of Artificial Sequence: Synthetic oligonucleotide
uguucgacauuugccugua

SEQ ID NO: 306617 - RNA, 19 nt, Artificial Sequence
  Description of Artificial Sequence: Synthetic oligonucleotide
gaauccgaucaaaggcuga

SEQ ID NO: 306618 - RNA, 19 nt, Artificial Sequence
  Description of Artificial Sequence: Synthetic oligonucleotide
acaagacccugaauguuaa

SEQ ID NO: 306619 - RNA, 19 nt, Artificial Sequence
  Description of Artificial Sequence: Synthetic oligonucleotide
ucacugcuucuacacccau

SEQ ID NO: 306620 - RNA, 19 nt, Artificial Sequence
  Description of Artificial Sequence: Synthetic oligonucleotide
acaugagcuagaagcuugu

SEQ ID NO: 306621 - RNA, 19 nt, Artificial Sequence
  Description of Artificial Sequence: Synthetic oligonucleotide
ucacuccacucugaacgga

SEQ ID NO: 306622 - RNA, 19 nt, Artificial Sequence
  Description of Artificial Sequence: Synthetic oligonucleotide
auugagccaaccagaccca

SEQ ID NO: 306623 - RNA, 19 nt, Artificial Sequence
  Description of Artificial Sequence: Synthetic oligonucleotide
uguccagaucaaucucaua

SEQ ID NO: 306624 - RNA, 19 nt, Artificial Sequence
  Description of Artificial Sequence: Synthetic oligonucleotide
accgcagcguucaugccug

SEQ ID NO: 306625 - RNA, 19 nt, Artificial Sequence
  Description of Artificial Sequence: Synthetic oligonucleotide
gcuaacacacugaggaauc

SEQ ID NO: 306626 - RNA, 19 nt, Artificial Sequence
  Description of Artificial Sequence: Synthetic oligonucleotide
ucuuuugcaucgggcacuu

SEQ ID NO: 306627 - RNA, 19 nt, Artificial Sequence
  Description of Artificial Sequence: Synthetic oligonucleotide
ugugugcaacccacccuua

SEQ ID NO: 306628 - RNA, 19 nt, Artificial Sequence
  Description of Artificial Sequence: Synthetic oligonucleotide
cccggagucuuccuucucg

SEQ ID NO: 306629 - RNA, 19 nt, Artificial Sequence
  Description of Artificial Sequence: Synthetic oligonucleotide
cuaacacacugaggaauca

SEQ ID NO: 306630 - RNA, 19 nt, Artificial Sequence
  Description of Artificial Sequence: Synthetic oligonucleotide
cuagugacaagcuggcauu

SEQ ID NO: 306631 - RNA, 19 nt, Artificial Sequence
  Description of Artificial Sequence: Synthetic oligonucleotide
agagcggaccgcagcguuc

SEQ ID NO: 306632 - RNA, 19 nt, Artificial Sequence
  Description of Artificial Sequence: Synthetic oligonucleotide
ggauaaggccaauccucac

SEQ ID NO: 306633 - RNA, 19 nt, Artificial Sequence
  Description of Artificial Sequence: Synthetic oligonucleotide
ggcguggucagaagugucc

SEQ ID NO: 306634 - RNA, 19 nt, Artificial Sequence
  Description of Artificial Sequence: Synthetic oligonucleotide
uccccuccaaaagugccau

SEQ ID NO: 306635 - RNA, 19 nt, Artificial Sequence
  Description of Artificial Sequence: Synthetic oligonucleotide
cggaccgcagcguucaugc

SEQ ID NO: 306636 - RNA, 19 nt, Artificial Sequence
  Description of Artificial Sequence: Synthetic oligonucleotide
accuagagggagguucacu

SEQ ID NO: 306637 - RNA, 19 nt, Artificial Sequence
  Description of Artificial Sequence: Synthetic oligonucleotide
uugagccaaccagacccac

SEQ ID NO: 306638 - RNA, 19 nt, Artificial Sequence
  Description of Artificial Sequence: Synthetic oligonucleotide
uaguccugccaugguggcc

SEQ ID NO: 306639 - RNA, 19 nt, Artificial Sequence
  Description of Artificial Sequence: Synthetic oligonucleotide
gaccgcuuucuagaaaugu

SEQ ID NO: 306640 - RNA, 19 nt, Artificial Sequence
  Description of Artificial Sequence: Synthetic oligonucleotide
guucgacauuugccuguag

SEQ ID NO: 306641 - RNA, 19 nt, Artificial Sequence
  Description of Artificial Sequence: Synthetic oligonucleotide
acuauccgguguagggcag

SEQ ID NO: 306642 - RNA, 19 nt, Artificial Sequence
  Description of Artificial Sequence: Synthetic oligonucleotide
gucugauccagggacguua

SEQ ID NO: 306643 - RNA, 19 nt, Artificial Sequence
  Description of Artificial Sequence: Synthetic oligonucleotide
cagccgugaucuucccagc

SEQ ID NO: 306644 - RNA, 19 nt, Artificial Sequence
  Description of Artificial Sequence: Synthetic oligonucleotide
gugacggcccaucacuucu

SEQ ID NO: 306645 - RNA, 19 nt, Artificial Sequence
  Description of Artificial Sequence: Synthetic oligonucleotide
cagcccggagucuuccuuc

SEQ ID NO: 306646 - RNA, 19 nt, Artificial Sequence
  Description of Artificial Sequence: Synthetic oligonucleotide
cucuuacgcauccccagaa

SEQ ID NO: 306647 - RNA, 19 nt, Artificial Sequence
  Description of Artificial Sequence: Synthetic oligonucleotide
ccacucugaacggaaagug

SEQ ID NO: 306648 - RNA, 19 nt, Artificial Sequence
  Description of Artificial Sequence: Synthetic oligonucleotide
accacggguccuugucuca

SEQ ID NO: 306649 - RNA, 19 nt, Artificial Sequence
  Description of Artificial Sequence: Synthetic oligonucleotide
gaccuuuggccagacccuc

SEQ ID NO: 306650 - RNA, 19 nt, Artificial Sequence
  Description of Artificial Sequence: Synthetic oligonucleotide
cacucgguugcccuggaua

SEQ ID NO: 306651 - RNA, 19 nt, Artificial Sequence
  Description of Artificial Sequence: Synthetic oligonucleotide
ccuaauaggguagagggcu

SEQ ID NO: 306652 - RNA, 19 nt, Artificial Sequence
  Description of Artificial Sequence: Synthetic oligonucleotide
acaguagagcggaccgcag

SEQ ID NO: 306653 - RNA, 19 nt, Artificial Sequence
  Description of Artificial Sequence: Synthetic oligonucleotide
cacuccacucugaacggaa

SEQ ID NO: 306654 - RNA, 19 nt, Artificial Sequence
  Description of Artificial Sequence: Synthetic oligonucleotide
aggaaaacucuggguggcu

SEQ ID NO: 306655 - RNA, 19 nt, Artificial Sequence
  Description of Artificial Sequence: Synthetic oligonucleotide
ggaaaccuaauaggguaga

SEQ ID NO: 306656 - RNA, 19 nt, Artificial Sequence
  Description of Artificial Sequence: Synthetic oligonucleotide
uacccgacgcuuggugccc

SEQ ID NO: 306657 - RNA, 19 nt, Artificial Sequence
  Description of Artificial Sequence: Synthetic oligonucleotide
gacgcuuuacaaccagauu

SEQ ID NO: 306658 - RNA, 19 nt, Artificial Sequence
  Description of Artificial Sequence: Synthetic oligonucleotide
agaccgcuuucuagaaaug

SEQ ID NO: 306659 - RNA, 19 nt, Artificial Sequence
  Description of Artificial Sequence: Synthetic oligonucleotide
ccacuauccgguguagggc

SEQ ID NO: 306660 - RNA, 19 nt, Artificial Sequence
  Description of Artificial Sequence: Synthetic oligonucleotide
cauugucgauugagccaac

SEQ ID NO: 306661 - RNA, 19 nt, Artificial Sequence
  Description of Artificial Sequence: Synthetic oligonucleotide
gcuccggccucucagcuuc

SEQ ID NO: 306662 - RNA, 19 nt, Artificial Sequence
  Description of Artificial Sequence: Synthetic oligonucleotide
gagacgaagcugggguaga

SEQ ID NO: 306663 - RNA, 19 nt, Artificial Sequence
  Description of Artificial Sequence: Synthetic oligonucleotide
guggacauucaggaauaaa

SEQ ID NO: 306664 - RNA, 19 nt, Artificial Sequence
  Description of Artificial Sequence: Synthetic oligonucleotide
ccggucacaagucgugcag

SEQ ID NO: 306665 - RNA, 19 nt, Artificial Sequence
  Description of Artificial Sequence: Synthetic oligonucleotide
aaucagggacuuagaucua

SEQ ID NO: 306666 - RNA, 19 nt, Artificial Sequence
  Description of Artificial Sequence: Synthetic oligonucleotide
agugacaagcuggcauuua

SEQ ID NO: 306667 - RNA, 19 nt, Artificial Sequence
  Description of Artificial Sequence: Synthetic oligonucleotide
uaccuagagggagguucac

SEQ ID NO: 306668 - RNA, 19 nt, Artificial Sequence
  Description of Artificial Sequence: Synthetic oligonucleotide
gacggcccaucacuucuaa

SEQ ID NO: 306669 - RNA, 19 nt, Artificial Sequence
  Description of Artificial Sequence: Synthetic oligonucleotide
agucggacuuccacccugu

SEQ ID NO: 306670 - RNA, 19 nt, Artificial Sequence
  Description of Artificial Sequence: Synthetic oligonucleotide
gggaucuaagacucuuugu

SEQ ID NO: 306671 - RNA, 19 nt, Artificial Sequence
  Description of Artificial Sequence: Synthetic oligonucleotide
cugugugcaacccacccuu

SEQ ID NO: 306672 - RNA, 19 nt, Artificial Sequence
  Description of Artificial Sequence: Synthetic oligonucleotide
cggcccaucacuucuaaca

SEQ ID NO: 306673 - RNA, 19 nt, Artificial Sequence
  Description of Artificial Sequence: Synthetic oligonucleotide
guagccucuucagccguga

SEQ ID NO: 306674 - RNA, 19 nt, Artificial Sequence
  Description of Artificial Sequence: Synthetic oligonucleotide
cccacccuuagagacuggg

SEQ ID NO: 306675 - RNA, 19 nt, Artificial Sequence
  Description of Artificial Sequence: Synthetic oligonucleotide
gccaauccucacaguagag

SEQ ID NO: 306676 - RNA, 19 nt, Artificial Sequence
  Description of Artificial Sequence: Synthetic oligonucleotide
cuggaguauuggcaaagau

SEQ ID NO: 306677 - RNA, 19 nt, Artificial Sequence
  Description of Artificial Sequence: Synthetic oligonucleotide
cacaauguucagguagcua

SEQ ID NO: 306678 - RNA, 19 nt, Artificial Sequence
  Description of Artificial Sequence: Synthetic oligonucleotide
ccaaucggccccacaggac

SEQ ID NO: 306679 - RNA, 19 nt, Artificial Sequence
  Description of Artificial Sequence: Synthetic oligonucleotide
cagagcucaucaaauuguu

SEQ ID NO: 306680 - RNA, 19 nt, Artificial Sequence
  Description of Artificial Sequence: Synthetic oligonucleotide
uccguccauuacgguagcu

SEQ ID NO: 306681 - RNA, 19 nt, Artificial Sequence
  Description of Artificial Sequence: Synthetic oligonucleotide
acuccacucugaacggaaa

SEQ ID NO: 306682 - RNA, 19 nt, Artificial Sequence
  Description of Artificial Sequence: Synthetic oligonucleotide
cauuacgguagcucucuuu

SEQ ID NO: 306683 - RNA, 19 nt, Artificial Sequence
  Description of Artificial Sequence: Synthetic oligonucleotide
agcacucgguugcccugga

SEQ ID NO: 306684 - RNA, 19 nt, Artificial Sequence
  Description of Artificial Sequence: Synthetic oligonucleotide
ggcuaacacacugaggaau

SEQ ID NO: 306685 - RNA, 19 nt, Artificial Sequence
  Description of Artificial Sequence: Synthetic oligonucleotide
caacccacccuuagagacu

SEQ ID NO: 306686 - RNA, 19 nt, Artificial Sequence
  Description of Artificial Sequence: Synthetic oligonucleotide
cuagaggaauccagccuau

SEQ ID NO: 306687 - RNA, 19 nt, Artificial Sequence
  Description of Artificial Sequence: Synthetic oligonucleotide
caagacccugaauguuaaa

SEQ ID NO: 306688 - RNA, 19 nt, Artificial Sequence
  Description of Artificial Sequence: Synthetic oligonucleotide
cccaaucggccccacagga

SEQ ID NO: 306689 - RNA, 19 nt, Artificial Sequence
  Description of Artificial Sequence: Synthetic oligonucleotide
agcuccggccucucagcuu

SEQ ID NO: 306690 - RNA, 19 nt, Artificial Sequence
  Description of Artificial Sequence: Synthetic oligonucleotide
gucgugcagaugguguuua

SEQ ID NO: 306691 - RNA, 19 nt, Artificial Sequence
  Description of Artificial Sequence: Synthetic oligonucleotide
ccuaucaaauggagucgga

SEQ ID NO: 306692 - RNA, 19 nt, Artificial Sequence
  Description of Artificial Sequence: Synthetic oligonucleotide
cacaagucgugcagauggu

SEQ ID NO: 306693 - RNA, 19 nt, Artificial Sequence
  Description of Artificial Sequence: Synthetic oligonucleotide
ggucugacaugagcuagaa

SEQ ID NO: 306694 - RNA, 19 nt, Artificial Sequence
  Description of Artificial Sequence: Synthetic oligonucleotide
cugugucagccccaaugcu

SEQ ID NO: 306695 - RNA, 19 nt, Artificial Sequence
  Description of Artificial Sequence: Synthetic oligonucleotide
acccgacgcuuggugcccg

SEQ ID NO: 306696 - RNA, 19 nt, Artificial Sequence
  Description of Artificial Sequence: Synthetic oligonucleotide
ggucacaagucgugcagau

SEQ ID NO: 306697 - RNA, 19 nt, Artificial Sequence
  Description of Artificial Sequence: Synthetic oligonucleotide
cuauccgguguagggcaga

SEQ ID NO: 306698 - RNA, 19 nt, Artificial Sequence
  Description of Artificial Sequence: Synthetic oligonucleotide
cacgcugcacaugucccaa

SEQ ID NO: 306699 - RNA, 19 nt, Artificial Sequence
  Description of Artificial Sequence: Synthetic oligonucleotide
agucugauccagggacguu

SEQ ID NO: 306700 - RNA, 19 nt, Artificial Sequence
  Description of Artificial Sequence: Synthetic oligonucleotide
gggucugacaugagcuaga

SEQ ID NO: 306701 - RNA, 19 nt, Artificial Sequence
  Description of Artificial Sequence: Synthetic oligonucleotide
agcacccaucuuaguggca

SEQ ID NO: 306702 - RNA, 19 nt, Artificial Sequence
  Description of Artificial Sequence: Synthetic oligonucleotide
gguuaccagagaggcucac

SEQ ID NO: 306703 - RNA, 19 nt, Artificial Sequence
  Description of Artificial Sequence: Synthetic oligonucleotide
gguugaaaaugaagucagu

SEQ ID NO: 306704 - RNA, 19 nt, Artificial Sequence
  Description of Artificial Sequence: Synthetic oligonucleotide
aucggccccacaggacaga

SEQ ID NO: 306705 - RNA, 19 nt, Artificial Sequence
  Description of Artificial Sequence: Synthetic oligonucleotide
gcguggucagaagugucca

SEQ ID NO: 306706 - RNA, 19 nt, Artificial Sequence
  Description of Artificial Sequence: Synthetic oligonucleotide
cucccuccaaagaggucua

SEQ ID NO: 306707 - RNA, 19 nt, Artificial Sequence
  Description of Artificial Sequence: Synthetic oligonucleotide
gaccaugaucagacucucu

SEQ ID NO: 306708 - RNA, 19 nt, Artificial Sequence
  Description of Artificial Sequence: Synthetic oligonucleotide
caugagcuagaagcuugua

SEQ ID NO: 306709 - RNA, 19 nt, Artificial Sequence
  Description of Artificial Sequence: Synthetic oligonucleotide
ccucuuacgcauccccaga

SEQ ID NO: 306710 - RNA, 19 nt, Artificial Sequence
  Description of Artificial Sequence: Synthetic oligonucleotide
auccgguguagggcagagu

SEQ ID NO: 306711 - RNA, 19 nt, Artificial Sequence
  Description of Artificial Sequence: Synthetic oligonucleotide
gccgacgacaaagguguuc

SEQ ID NO: 306712 - RNA, 19 nt, Artificial Sequence
  Description of Artificial Sequence: Synthetic oligonucleotide
guagagggcuggggcuaac

SEQ ID NO: 306713 - RNA, 19 nt, Artificial Sequence
  Description of Artificial Sequence: Synthetic oligonucleotide
gugucauauccaagacgcu

SEQ ID NO: 306714 - RNA, 19 nt, Artificial Sequence
  Description of Artificial Sequence: Synthetic oligonucleotide
cgguugcccuggauaaggc

SEQ ID NO: 306715 - RNA, 19 nt, Artificial Sequence
  Description of Artificial Sequence: Synthetic oligonucleotide
ccacggguccuugucucag

SEQ ID NO: 306716 - RNA, 19 nt, Artificial Sequence
  Description of Artificial Sequence: Synthetic oligonucleotide
gaggucuagacggcagcuu

SEQ ID NO: 306717 - RNA, 19 nt, Artificial Sequence
  Description of Artificial Sequence: Synthetic oligonucleotide
ccgacgacaaagguguucu

SEQ ID NO: 306718 - RNA, 19 nt, Artificial Sequence
  Description of Artificial Sequence: Synthetic oligonucleotide
guagagcggaccgcagcgu

SEQ ID NO: 306719 - RNA, 19 nt, Artificial Sequence
  Description of Artificial Sequence: Synthetic oligonucleotide
gguggacauucaggaauaa

SEQ ID NO: 306720 - RNA, 19 nt, Artificial Sequence
  Description of Artificial Sequence: Synthetic oligonucleotide
cuagacuuuguagccucuu

SEQ ID NO: 306721 - RNA, 19 nt, Artificial Sequence
  Description of Artificial Sequence: Synthetic oligonucleotide
cgcuuucuagaaaugugcu

SEQ ID NO: 306722 - RNA, 19 nt, Artificial Sequence
  Description of Artificial Sequence: Synthetic oligonucleotide
cagaaguguccagaucaau

SEQ ID NO: 306723 - RNA, 19 nt, Artificial Sequence
  Description of Artificial Sequence: Synthetic oligonucleotide
acccacccuuagagacugg

SEQ ID NO: 306724 - RNA, 19 nt, Artificial Sequence
  Description of Artificial Sequence: Synthetic oligonucleotide
ggacguuauuggaaaccgu

SEQ ID NO: 306725 - RNA, 19 nt, Artificial Sequence
  Description of Artificial Sequence: Synthetic oligonucleotide
cagugguguaguucucauu

SEQ ID NO: 306726 - RNA, 19 nt, Artificial Sequence
  Description of Artificial Sequence: Synthetic oligonucleotide
agcuaccuagagggagguu

SEQ ID NO: 306727 - RNA, 19 nt, Artificial Sequence
  Description of Artificial Sequence: Synthetic oligonucleotide
ggugucccaccacgcugca

SEQ ID NO: 306728 - RNA, 19 nt, Artificial Sequence
  Description of Artificial Sequence: Synthetic oligonucleotide
ggucuagacggcagcuucu

SEQ ID NO: 306729 - RNA, 19 nt, Artificial Sequence
  Description of Artificial Sequence: Synthetic oligonucleotide
ccugaauguuaaacuuagu

SEQ ID NO: 306730 - RNA, 19 nt, Artificial Sequence
  Description of Artificial Sequence: Synthetic oligonucleotide
gggcguggucagaaguguc

SEQ ID NO: 306731 - RNA, 19 nt, Artificial Sequence
  Description of Artificial Sequence: Synthetic oligonucleotide
agcggaccgcagcguucau

SEQ ID NO: 306732 - RNA, 19 nt, Artificial Sequence
  Description of Artificial Sequence: Synthetic oligonucleotide
ggagucggacuuccacccu

SEQ ID NO: 306733 - RNA, 19 nt, Artificial Sequence
  Description of Artificial Sequence: Synthetic oligonucleotide
cagcuaccuagagggaggu

SEQ ID NO: 306734 - RNA, 19 nt, Artificial Sequence
  Description of Artificial Sequence: Synthetic oligonucleotide
cacggguccuugucucagu

SEQ ID NO: 306735 - RNA, 19 nt, Artificial Sequence
  Description of Artificial Sequence: Synthetic oligonucleotide
cgguagcucucuuugauuu

SEQ ID NO: 306736 - RNA, 19 nt, Artificial Sequence
  Description of Artificial Sequence: Synthetic oligonucleotide
cgccgcagacugcuuaauc

SEQ ID NO: 306737 - RNA, 19 nt, Artificial Sequence
  Description of Artificial Sequence: Synthetic oligonucleotide
ccuuaacaccaagccucuc

SEQ ID NO: 306738 - RNA, 19 nt, Artificial Sequence
  Description of Artificial Sequence: Synthetic oligonucleotide
gccgugaucuucccagcuu

SEQ ID NO: 306739 - RNA, 19 nt, Artificial Sequence
  Description of Artificial Sequence: Synthetic oligonucleotide
cccgacgcuuggugcccgc

SEQ ID NO: 306740 - RNA, 19 nt, Artificial Sequence
  Description of Artificial Sequence: Synthetic oligonucleotide
cacccauggucucgaugau

SEQ ID NO: 306741 - RNA, 19 nt, Artificial Sequence
  Description of Artificial Sequence: Synthetic oligonucleotide
cccgccgcagacugcuuaa

SEQ ID NO: 306742 - RNA, 19 nt, Artificial Sequence
  Description of Artificial Sequence: Synthetic oligonucleotide
gucggacuuccacccuguu

SEQ ID NO: 306743 - RNA, 19 nt, Artificial Sequence
  Description of Artificial Sequence: Synthetic oligonucleotide
cccaucuuaguggcaaaau

SEQ ID NO: 306744 - RNA, 19 nt, Artificial Sequence
  Description of Artificial Sequence: Synthetic oligonucleotide
ccaaaacagugacccuggu

SEQ ID NO: 306745 - RNA, 19 nt, Artificial Sequence
  Description of Artificial Sequence: Synthetic oligonucleotide
gcagcccggagucuuccuu

SEQ ID NO: 306746 - RNA, 19 nt, Artificial Sequence
  Description of Artificial Sequence: Synthetic oligonucleotide
agccgacgacaaagguguu

SEQ ID NO: 306747 - RNA, 19 nt, Artificial Sequence
  Description of Artificial Sequence: Synthetic oligonucleotide
cugauccagggacguuauu

SEQ ID NO: 306748 - RNA, 19 nt, Artificial Sequence
  Description of Artificial Sequence: Synthetic oligonucleotide
ccacaauguucagguagcu

SEQ ID NO: 306749 - RNA, 19 nt, Artificial Sequence
  Description of Artificial Sequence: Synthetic oligonucleotide
cacacacgcuggggugucu

SEQ ID NO: 306750 - RNA, 19 nt, Artificial Sequence
  Description of Artificial Sequence: Synthetic oligonucleotide
gcucggucacuggcugaaa

SEQ ID NO: 306751 - RNA, 19 nt, Artificial Sequence
  Description of Artificial Sequence: Synthetic oligonucleotide
gcacucgguugcccuggau

SEQ ID NO: 306752 - RNA, 19 nt, Artificial Sequence
  Description of Artificial Sequence: Synthetic oligonucleotide
ccauuacgguagcucucuu

SEQ ID NO: 306753 - RNA, 19 nt, Artificial Sequence
  Description of Artificial Sequence: Synthetic oligonucleotide
cgucuacgaucuccacuau

SEQ ID NO: 306754 - RNA, 19 nt, Artificial Sequence
  Description of Artificial Sequence: Synthetic oligonucleotide
ccgccgcagacugcuuaau

SEQ ID NO: 306755 - RNA, 19 nt, Artificial Sequence
  Description of Artificial Sequence: Synthetic oligonucleotide
aucuguugaacucaagggc

SEQ ID NO: 306756 - RNA, 19 nt, Artificial Sequence
  Description of Artificial Sequence: Synthetic oligonucleotide
aauucugcuccucauuggg

SEQ ID NO: 306757 - RNA, 19 nt, Artificial Sequence
  Description of Artificial Sequence: Synthetic oligonucleotide
ugagcugaacauuugacag

SEQ ID NO: 306758 - RNA, 19 nt, Artificial Sequence
  Description of Artificial Sequence: Synthetic oligonucleotide
uuccuuaucagucucuucc

SEQ ID NO: 306759 - RNA, 19 nt, Artificial Sequence
  Description of Artificial Sequence: Synthetic oligonucleotide
ucucuagagacaaagcccc

SEQ ID NO: 306760 - RNA, 19 nt, Artificial Sequence
  Description of Artificial Sequence: Synthetic oligonucleotide
ucuuugagugcuuugagcu

SEQ ID NO: 306761 - RNA, 19 nt, Artificial Sequence
  Description of Artificial Sequence: Synthetic oligonucleotide
ucuuagaauggacagccag

SEQ ID NO: 306762 - RNA, 19 nt, Artificial Sequence
  Description of Artificial Sequence: Synthetic oligonucleotide
ucagcgguacccaagaccc

SEQ ID NO: 306763 - RNA, 19 nt, Artificial Sequence
  Description of Artificial Sequence: Synthetic oligonucleotide
aggaggauguaccuggacc

SEQ ID NO: 306764 - RNA, 19 nt, Artificial Sequence
  Description of Artificial Sequence: Synthetic oligonucleotide
aaaggguguuaguugcacc

SEQ ID NO: 306765 - RNA, 19 nt, Artificial Sequence
  Description of Artificial Sequence: Synthetic oligonucleotide
uccccuaacgucuuuaucc

SEQ ID NO: 306766 - RNA, 19 nt, Artificial Sequence
  Description of Artificial Sequence: Synthetic oligonucleotide
aauuucuccuagcugcauc

SEQ ID NO: 306767 - RNA, 19 nt, Artificial Sequence
  Description of Artificial Sequence: Synthetic oligonucleotide
aaacaguuggagguggggc

SEQ ID NO: 306768 - RNA, 19 nt, Artificial Sequence
  Description of Artificial Sequence: Synthetic oligonucleotide
cuugaaagcauggugaggc

SEQ ID NO: 306769 - RNA, 19 nt, Artificial Sequence
  Description of Artificial Sequence: Synthetic oligonucleotide
uuucucggcaaucugaggu

SEQ ID NO: 306770 - RNA, 19 nt, Artificial Sequence
  Description of Artificial Sequence: Synthetic oligonucleotide
uuuaccugcuguuucagca

SEQ ID NO: 306771 - RNA, 19 nt, Artificial Sequence
  Description of Artificial Sequence: Synthetic oligonucleotide
ucuaggagcuccccuaacg

SEQ ID NO: 306772 - RNA, 19 nt, Artificial Sequence
  Description of Artificial Sequence: Synthetic oligonucleotide
ugaacauuugacaggguga

SEQ ID NO: 306773 - RNA, 19 nt, Artificial Sequence
  Description of Artificial Sequence: Synthetic oligonucleotide
gaucgaaggagcccaaggg

SEQ ID NO: 306774 - RNA, 19 nt, Artificial Sequence
  Description of Artificial Sequence: Synthetic oligonucleotide
uccgaaucccugcauaggg

SEQ ID NO: 306775 - RNA, 19 nt, Artificial Sequence
  Description of Artificial Sequence: Synthetic oligonucleotide
agcaucagaacaugccacc

SEQ ID NO: 306776 - RNA, 19 nt, Artificial Sequence
  Description of Artificial Sequence: Synthetic oligonucleotide
agguccacuagcuucuggc

SEQ ID NO: 306777 - RNA, 19 nt, Artificial Sequence
  Description of Artificial Sequence: Synthetic oligonucleotide
uucgacuuagccaggagga

SEQ ID NO: 306778 - RNA, 19 nt, Artificial Sequence
  Description of Artificial Sequence: Synthetic oligonucleotide
augaugcagauccugcuac

SEQ ID NO: 306779 - RNA, 19 nt, Artificial Sequence
  Description of Artificial Sequence: Synthetic oligonucleotide
ucacagagggguaaggaga

SEQ ID NO: 306780 - RNA, 19 nt, Artificial Sequence
  Description of Artificial Sequence: Synthetic oligonucleotide
uguaaacaguuggaggugg

SEQ ID NO: 306781 - RNA, 19 nt, Artificial Sequence
  Description of Artificial Sequence: Synthetic oligonucleotide
aaaugacccaauguggucu

SEQ ID NO: 306782 - RNA, 19 nt, Artificial Sequence
  Description of Artificial Sequence: Synthetic oligonucleotide
uuggaggcuaaucuguuga

SEQ ID NO: 306783 - RNA, 19 nt, Artificial Sequence
  Description of Artificial Sequence: Synthetic oligonucleotide
gagauugcuguccucuagg

SEQ ID NO: 306784 - RNA, 19 nt, Artificial Sequence
  Description of Artificial Sequence: Synthetic oligonucleotide
ucuggcguaacucugugau

SEQ ID NO: 306785 - RNA, 19 nt, Artificial Sequence
  Description of Artificial Sequence: Synthetic oligonucleotide
uuagaauggacagccagug

SEQ ID NO: 306786 - RNA, 19 nt, Artificial Sequence
  Description of Artificial Sequence: Synthetic oligonucleotide
uuuuggguggagaauucug

SEQ ID NO: 306787 - RNA, 19 nt, Artificial Sequence
  Description of Artificial Sequence: Synthetic oligonucleotide
aguuucuggucaaaguccc

SEQ ID NO: 306788 - RNA, 19 nt, Artificial Sequence
  Description of Artificial Sequence: Synthetic oligonucleotide
aagguggagccaaaugacc

SEQ ID NO: 306789 - RNA, 19 nt, Artificial Sequence
  Description of Artificial Sequence: Synthetic oligonucleotide
auaggcgccgcagaggugc

SEQ ID NO: 306790 - RNA, 19 nt, Artificial Sequence
  Description of Artificial Sequence: Synthetic oligonucleotide
agcugaacauuugacaggg

SEQ ID NO: 306791 - RNA, 19 nt, Artificial Sequence
  Description of Artificial Sequence: Synthetic oligonucleotide
ugagacuccucuaggagcu

SEQ ID NO: 306792 - RNA, 19 nt, Artificial Sequence
  Description of Artificial Sequence: Synthetic oligonucleotide
ucuucucuagagacaaagc

SEQ ID NO: 306793 - RNA, 19 nt, Artificial Sequence
  Description of Artificial Sequence: Synthetic oligonucleotide
gaguuuucagugguggugg

SEQ ID NO: 306794 - RNA, 19 nt, Artificial Sequence
  Description of Artificial Sequence: Synthetic oligonucleotide
ugcguugaauuucuccuag

SEQ ID NO: 306795 - RNA, 19 nt, Artificial Sequence
  Description of Artificial Sequence: Synthetic oligonucleotide
uggaugaaggccuggaggu

SEQ ID NO: 306796 - RNA, 19 nt, Artificial Sequence
  Description of Artificial Sequence: Synthetic oligonucleotide
ucccuagucuuguaaacag

SEQ ID NO: 306797 - RNA, 19 nt, Artificial Sequence
  Description of Artificial Sequence: Synthetic oligonucleotide
cuucgacuuagccaggagg

SEQ ID NO: 306798 - RNA, 19 nt, Artificial Sequence
  Description of Artificial Sequence: Synthetic oligonucleotide
aaccaauucuucacgguuc

SEQ ID NO: 306799 - RNA, 19 nt, Artificial Sequence
  Description of Artificial Sequence: Synthetic oligonucleotide
ucggcacacacgcucaggg

SEQ ID NO: 306800 - RNA, 19 nt, Artificial Sequence
  Description of Artificial Sequence: Synthetic oligonucleotide
gauccugcuacagagcuug

SEQ ID NO: 306801 - RNA, 19 nt, Artificial Sequence
  Description of Artificial Sequence: Synthetic oligonucleotide
ugagauugcuguccucuag

SEQ ID NO: 306802 - RNA, 19 nt, Artificial Sequence
  Description of Artificial Sequence: Synthetic oligonucleotide
aggcuaaucuguugaacuc

SEQ ID NO: 306803 - RNA, 19 nt, Artificial Sequence
  Description of Artificial Sequence: Synthetic oligonucleotide
agauugcuguccucuaggg

SEQ ID NO: 306804 - RNA, 19 nt, Artificial Sequence
  Description of Artificial Sequence: Synthetic oligonucleotide
uccauggaguuuucagugg

SEQ ID NO: 306805 - RNA, 19 nt, Artificial Sequence
  Description of Artificial Sequence: Synthetic oligonucleotide
uccuugaaagcauggugag

SEQ ID NO: 306806 - RNA, 19 nt, Artificial Sequence
  Description of Artificial Sequence: Synthetic oligonucleotide
gaguggacucagcugaucc

SEQ ID NO: 306807 - RNA, 19 nt, Artificial Sequence
  Description of Artificial Sequence: Synthetic oligonucleotide
acauuugacagggugaccu

SEQ ID NO: 306808 - RNA, 19 nt, Artificial Sequence
  Description of Artificial Sequence: Synthetic oligonucleotide
auuccgaaucccugcauag

SEQ ID NO: 306809 - RNA, 19 nt, Artificial Sequence
  Description of Artificial Sequence: Synthetic oligonucleotide
aguugcaccccacucuuag

SEQ ID NO: 306810 - RNA, 19 nt, Artificial Sequence
  Description of Artificial Sequence: Synthetic oligonucleotide
cauggaccggaaaugcugg

SEQ ID NO: 306811 - RNA, 19 nt, Artificial Sequence
  Description of Artificial Sequence: Synthetic oligonucleotide
cugagacuccucuaggagc

SEQ ID NO: 306812 - RNA, 19 nt, Artificial Sequence
  Description of Artificial Sequence: Synthetic oligonucleotide
agguggagccaaaugaccc

SEQ ID NO: 306813 - RNA, 19 nt, Artificial Sequence
  Description of Artificial Sequence: Synthetic oligonucleotide
aacauuugacagggugacc

SEQ ID NO: 306814 - RNA, 19 nt, Artificial Sequence
  Description of Artificial Sequence: Synthetic oligonucleotide
cauacguugcuguuccagc

SEQ ID NO: 306815 - RNA, 19 nt, Artificial Sequence
  Description of Artificial Sequence: Synthetic oligonucleotide
cuccauggaguuuucagug

SEQ ID NO: 306816 - RNA, 19 nt, Artificial Sequence
  Description of Artificial Sequence: Synthetic oligonucleotide
uguguauccuguccuguga

SEQ ID NO: 306817 - RNA, 19 nt, Artificial Sequence
  Description of Artificial Sequence: Synthetic oligonucleotide
auacugcugcuucauggac

SEQ ID NO: 306818 - RNA, 19 nt, Artificial Sequence
  Description of Artificial Sequence: Synthetic oligonucleotide
guaggcauagggauaggcg

SEQ ID NO: 306819 - RNA, 19 nt, Artificial Sequence
  Description of Artificial Sequence: Synthetic oligonucleotide
uguuaguugcaccccacuc

SEQ ID NO: 306820 - RNA, 19 nt, Artificial Sequence
  Description of Artificial Sequence: Synthetic oligonucleotide
agacauggaugauguggcc

SEQ ID NO: 306821 - RNA, 19 nt, Artificial Sequence
  Description of Artificial Sequence: Synthetic oligonucleotide
augcacaugaaaugggcgu

SEQ ID NO: 306822 - RNA, 19 nt, Artificial Sequence
  Description of Artificial Sequence: Synthetic oligonucleotide
augaaaugggcguggucuc

SEQ ID NO: 306823 - RNA, 19 nt, Artificial Sequence
  Description of Artificial Sequence: Synthetic oligonucleotide
aaaugggcguggucucugg

SEQ ID NO: 306824 - RNA, 19 nt, Artificial Sequence
  Description of Artificial Sequence: Synthetic oligonucleotide
accacucucuucucuagag

SEQ ID NO: 306825 - RNA, 19 nt, Artificial Sequence
  Description of Artificial Sequence: Synthetic oligonucleotide
uguaccuggaccuguguau

SEQ ID NO: 306826 - RNA, 19 nt, Artificial Sequence
  Description of Artificial Sequence: Synthetic oligonucleotide
cuagucuuguaaacaguug

SEQ ID NO: 306827 - RNA, 19 nt, Artificial Sequence
  Description of Artificial Sequence: Synthetic oligonucleotide
cuccauacguugcuguucc

SEQ ID NO: 306828 - RNA, 19 nt, Artificial Sequence
  Description of Artificial Sequence: Synthetic oligonucleotide
uucucagcgguacccaaga

SEQ ID NO: 306829 - RNA, 19 nt, Artificial Sequence
  Description of Artificial Sequence: Synthetic oligonucleotide
cucagcgguacccaagacc

SEQ ID NO: 306830 - RNA, 19 nt, Artificial Sequence
  Description of Artificial Sequence: Synthetic oligonucleotide
agcagcuugaucccgcugu

SEQ ID NO: 306831 - RNA, 19 nt, Artificial Sequence
  Description of Artificial Sequence: Synthetic oligonucleotide
gcgugggccacacagaacg

SEQ ID NO: 306832 - RNA, 19 nt, Artificial Sequence
  Description of Artificial Sequence: Synthetic oligonucleotide
uuaguugcaccccacucuu

SEQ ID NO: 306833 - RNA, 19 nt, Artificial Sequence
  Description of Artificial Sequence: Synthetic oligonucleotide
aaggucugcaggauggaug

SEQ ID NO: 306834 - RNA, 19 nt, Artificial Sequence
  Description of Artificial Sequence: Synthetic oligonucleotide
cucagggugggguucgacg

SEQ ID NO: 306835 - RNA, 19 nt, Artificial Sequence
  Description of Artificial Sequence: Synthetic oligonucleotide
cuagcaucagaacaugcca

SEQ ID NO: 306836 - RNA, 19 nt, Artificial Sequence
  Description of Artificial Sequence: Synthetic oligonucleotide
cuucauggaccggaaaugc

SEQ ID NO: 306837 - RNA, 19 nt, Artificial Sequence
  Description of Artificial Sequence: Synthetic oligonucleotide
agacccuuguccaacuugg

SEQ ID NO: 306838 - RNA, 19 nt, Artificial Sequence
  Description of Artificial Sequence: Synthetic oligonucleotide
guauucucgaugccgggug

SEQ ID NO: 306839 - RNA, 19 nt, Artificial Sequence
  Description of Artificial Sequence: Synthetic oligonucleotide
uugcaccccacucuuagaa

SEQ ID NO: 306840 - RNA, 19 nt, Artificial Sequence
  Description of Artificial Sequence: Synthetic oligonucleotide
ucagggugggguucgacgu

SEQ ID NO: 306841 - RNA, 19 nt, Artificial Sequence
  Description of Artificial Sequence: Synthetic oligonucleotide
ggugaguggacucagcuga

SEQ ID NO: 306842 - RNA, 19 nt, Artificial Sequence
  Description of Artificial Sequence: Synthetic oligonucleotide
gaggcuaaucuguugaacu

SEQ ID NO: 306843 - RNA, 19 nt, Artificial Sequence
  Description of Artificial Sequence: Synthetic oligonucleotide
auacguugcuguuccagca

SEQ ID NO: 306844 - RNA, 19 nt, Artificial Sequence
  Description of Artificial Sequence: Synthetic oligonucleotide
aacgucuuuaucccuuguu

SEQ ID NO: 306845 - RNA, 19 nt, Artificial Sequence
  Description of Artificial Sequence: Synthetic oligonucleotide
cugcuguccggccauaccc

SEQ ID NO: 306846 - RNA, 19 nt, Artificial Sequence
  Description of Artificial Sequence: Synthetic oligonucleotide
ucuucgacuuagccaggag

SEQ ID NO: 306847 - RNA, 19 nt, Artificial Sequence
  Description of Artificial Sequence: Synthetic oligonucleotide
ccuguaucccagaucaugg

SEQ ID NO: 306848 - RNA, 19 nt, Artificial Sequence
  Description of Artificial Sequence: Synthetic oligonucleotide
uggagugcacgcuagcauc

SEQ ID NO: 306849 - RNA, 19 nt, Artificial Sequence
  Description of Artificial Sequence: Synthetic oligonucleotide
aguuucucggcaaucugag

SEQ ID NO: 306850 - RNA, 19 nt, Artificial Sequence
  Description of Artificial Sequence: Synthetic oligonucleotide
ucauucaugcgcucacggu

SEQ ID NO: 306851 - RNA, 19 nt, Artificial Sequence
  Description of Artificial Sequence: Synthetic oligonucleotide
ugggguucgacgugguagc

SEQ ID NO: 306852 - RNA, 19 nt, Artificial Sequence
  Description of Artificial Sequence: Synthetic oligonucleotide
caucugagacuccucuagg

SEQ ID NO: 306853 - RNA, 19 nt, Artificial Sequence
  Description of Artificial Sequence: Synthetic oligonucleotide
ugcacaugaaaugggcgug

SEQ ID NO: 306854 - RNA, 19 nt, Artificial Sequence
  Description of Artificial Sequence: Synthetic oligonucleotide
gaaucccugcauagggugg

SEQ ID NO: 306855 - RNA, 19 nt, Artificial Sequence
  Description of Artificial Sequence: Synthetic oligonucleotide
uugaaagcauggugaggcc

SEQ ID NO: 306856 - RNA, 19 nt, Artificial Sequence
  Description of Artificial Sequence: Synthetic oligonucleotide
ugccugacuuucuugugca

SEQ ID NO: 306857 - RNA, 19 nt, Artificial Sequence
  Description of Artificial Sequence: Synthetic oligonucleotide
accaauucuucacgguucu

SEQ ID NO: 306858 - RNA, 19 nt, Artificial Sequence
  Description of Artificial Sequence: Synthetic oligonucleotide
ggugccauuggaugaaggc

SEQ ID NO: 306859 - RNA, 19 nt, Artificial Sequence
  Description of Artificial Sequence: Synthetic oligonucleotide
acccaauguggucucacug

SEQ ID NO: 306860 - RNA, 19 nt, Artificial Sequence
  Description of Artificial Sequence: Synthetic oligonucleotide
aguuuucaguggugguggg

SEQ ID NO: 306861 - RNA, 19 nt, Artificial Sequence
  Description of Artificial Sequence: Synthetic oligonucleotide
ugugcaacuccuuggccuc

SEQ ID NO: 306862 - RNA, 19 nt, Artificial Sequence
  Description of Artificial Sequence: Synthetic oligonucleotide
ggaucgaaggagcccaagg

SEQ ID NO: 306863 - RNA, 19 nt, Artificial Sequence
  Description of Artificial Sequence: Synthetic oligonucleotide
ucgcacaaggucugcagga

SEQ ID NO: 306864 - RNA, 19 nt, Artificial Sequence
  Description of Artificial Sequence: Synthetic oligonucleotide
cuagcuucuggcguaacuc

SEQ ID NO: 306865 - RNA, 19 nt, Artificial Sequence
  Description of Artificial Sequence: Synthetic oligonucleotide
acgucuuuaucccuuguua

SEQ ID NO: 306866 - RNA, 19 nt, Artificial Sequence
  Description of Artificial Sequence: Synthetic oligonucleotide
acuagcuucuggcguaacu

SEQ ID NO: 306867 - RNA, 19 nt, Artificial Sequence
  Description of Artificial Sequence: Synthetic oligonucleotide
cuaacgucuuuaucccuug

SEQ ID NO: 306868 - RNA, 19 nt, Artificial Sequence
  Description of Artificial Sequence: Synthetic oligonucleotide
cuucagccggguauucucc

SEQ ID NO: 306869 - RNA, 19 nt, Artificial Sequence
  Description of Artificial Sequence: Synthetic oligonucleotide
ugggcguggucucuggaga

SEQ ID NO: 306870 - RNA, 19 nt, Artificial Sequence
  Description of Artificial Sequence: Synthetic oligonucleotide
uuccgaaucccugcauagg

SEQ ID NO: 306871 - RNA, 19 nt, Artificial Sequence
  Description of Artificial Sequence: Synthetic oligonucleotide
caccucggggacuuuacgc

SEQ ID NO: 306872 - RNA, 19 nt, Artificial Sequence
  Description of Artificial Sequence: Synthetic oligonucleotide
uacguugcuguuccagcac

SEQ ID NO: 306873 - RNA, 19 nt, Artificial Sequence
  Description of Artificial Sequence: Synthetic oligonucleotide
acagaacgugcacauggcu

SEQ ID NO: 306874 - RNA, 19 nt, Artificial Sequence
  Description of Artificial Sequence: Synthetic oligonucleotide
gugggguucgacgugguag

SEQ ID NO: 306875 - RNA, 19 nt, Artificial Sequence
  Description of Artificial Sequence: Synthetic oligonucleotide
caccccacucuuagaaugg

SEQ ID NO: 306876 - RNA, 19 nt, Artificial Sequence
  Description of Artificial Sequence: Synthetic oligonucleotide
guccuugaaagcaugguga

SEQ ID NO: 306877 - RNA, 19 nt, Artificial Sequence
  Description of Artificial Sequence: Synthetic oligonucleotide
cucgaugccgggugagugg

SEQ ID NO: 306878 - RNA, 19 nt, Artificial Sequence
  Description of Artificial Sequence: Synthetic oligonucleotide
gcuguggucaggcuccucg

SEQ ID NO: 306879 - RNA, 19 nt, Artificial Sequence
  Description of Artificial Sequence: Synthetic oligonucleotide
aggguguuaguugcacccc

SEQ ID NO: 306880 - RNA, 19 nt, Artificial Sequence
  Description of Artificial Sequence: Synthetic oligonucleotide
cagguggagcaugagauug

SEQ ID NO: 306881 - RNA, 19 nt, Artificial Sequence
  Description of Artificial Sequence: Synthetic oligonucleotide
guuucucggcaaucugagg

SEQ ID NO: 306882 - RNA, 19 nt, Artificial Sequence
  Description of Artificial Sequence: Synthetic oligonucleotide
ggccaugcggcccaagugg

SEQ ID NO: 306883 - RNA, 19 nt, Artificial Sequence
  Description of Artificial Sequence: Synthetic oligonucleotide
guaacucugugaucuucug

SEQ ID NO: 306884 - RNA, 19 nt, Artificial Sequence
  Description of Artificial Sequence: Synthetic oligonucleotide
ugaugcagauccugcuaca

SEQ ID NO: 306885 - RNA, 19 nt, Artificial Sequence
  Description of Artificial Sequence: Synthetic oligonucleotide
gaggugggauuccgaaucc

SEQ ID NO: 306886 - RNA, 19 nt, Artificial Sequence
  Description of Artificial Sequence: Synthetic oligonucleotide
aaucccugcauagggugga

SEQ ID NO: 306887 - RNA, 19 nt, Artificial Sequence
  Description of Artificial Sequence: Synthetic oligonucleotide
ggaccggaaaugcuggucc

SEQ ID NO: 306888 - RNA, 19 nt, Artificial Sequence
  Description of Artificial Sequence: Synthetic oligonucleotide
aguggacucagcugauccu

SEQ ID NO: 306889 - RNA, 19 nt, Artificial Sequence
  Description of Artificial Sequence: Synthetic oligonucleotide
guaaacaguuggagguggg

SEQ ID NO: 306890 - RNA, 19 nt, Artificial Sequence
  Description of Artificial Sequence: Synthetic oligonucleotide
auagggauaggcgccgcag

SEQ ID NO: 306891 - RNA, 19 nt, Artificial Sequence
  Description of Artificial Sequence: Synthetic oligonucleotide
guuaguugcaccccacucu

SEQ ID NO: 306892 - RNA, 19 nt, Artificial Sequence
  Description of Artificial Sequence: Synthetic oligonucleotide
cuugaucccgcuguuccag

SEQ ID NO: 306893 - RNA, 19 nt, Artificial Sequence
  Description of Artificial Sequence: Synthetic oligonucleotide
ucccguagccuuucagcag

SEQ ID NO: 306894 - RNA, 19 nt, Artificial Sequence
  Description of Artificial Sequence: Synthetic oligonucleotide
uuaugcaccuuggaggcua

SEQ ID NO: 306895 - RNA, 19 nt, Artificial Sequence
  Description of Artificial Sequence: Synthetic oligonucleotide
cauggaguuuucaguggug

SEQ ID NO: 306896 - RNA, 19 nt, Artificial Sequence
  Description of Artificial Sequence: Synthetic oligonucleotide
uccggccauacccuucuug

SEQ ID NO: 306897 - RNA, 19 nt, Artificial Sequence
  Description of Artificial Sequence: Synthetic oligonucleotide
aggccuuguggguggaguc

SEQ ID NO: 306898 - RNA, 19 nt, Artificial Sequence
  Description of Artificial Sequence: Synthetic oligonucleotide
uagggauaggcgccgcaga

SEQ ID NO: 306899 - RNA, 19 nt, Artificial Sequence
  Description of Artificial Sequence: Synthetic oligonucleotide
cacucuuagaauggacagc

SEQ ID NO: 306900 - RNA, 19 nt, Artificial Sequence
  Description of Artificial Sequence: Synthetic oligonucleotide
gaucccgcuguuccagacc

SEQ ID NO: 306901 - RNA, 19 nt, Artificial Sequence
  Description of Artificial Sequence: Synthetic oligonucleotide
uuuacgccugcugcugucc

SEQ ID NO: 306902 - RNA, 19 nt, Artificial Sequence
  Description of Artificial Sequence: Synthetic oligonucleotide
gcuagcaucagaacaugcc

SEQ ID NO: 306903 - RNA, 19 nt, Artificial Sequence
  Description of Artificial Sequence: Synthetic oligonucleotide
gacuuuacgccugcugcug

SEQ ID NO: 306904 - RNA, 19 nt, Artificial Sequence
  Description of Artificial Sequence: Synthetic oligonucleotide
ggcuccucggcacacacgc

SEQ ID NO: 306905 - RNA, 19 nt, Artificial Sequence
  Description of Artificial Sequence: Synthetic oligonucleotide
cuguguauccuguccugug

SEQ ID NO: 306906 - RNA, 19 nt, Artificial Sequence
  Description of Artificial Sequence: Synthetic oligonucleotide
cauuugacagggugaccug

SEQ ID NO: 306907 - RNA, 19 nt, Artificial Sequence
  Description of Artificial Sequence: Synthetic oligonucleotide
ucaguuuuggguggagaau

SEQ ID NO: 306908 - RNA, 19 nt, Artificial Sequence
  Description of Artificial Sequence: Synthetic oligonucleotide
ccacucuuagaauggacag

SEQ ID NO: 306909 - RNA, 19 nt, Artificial Sequence
  Description of Artificial Sequence: Synthetic oligonucleotide
cucuguucagccaaggcgu

SEQ ID NO: 306910 - RNA, 19 nt, Artificial Sequence
  Description of Artificial Sequence: Synthetic oligonucleotide
uaccuggaccuguguaucc

SEQ ID NO: 306911 - RNA, 19 nt, Artificial Sequence
  Description of Artificial Sequence: Synthetic oligonucleotide
gaggguagcggaucuggga

SEQ ID NO: 306912 - RNA, 19 nt, Artificial Sequence
  Description of Artificial Sequence: Synthetic oligonucleotide
uguaaguugccugcuccuc

SEQ ID NO: 306913 - RNA, 19 nt, Artificial Sequence
  Description of Artificial Sequence: Synthetic oligonucleotide
gaccggaaaugcugguccc

SEQ ID NO: 306914 - RNA, 19 nt, Artificial Sequence
  Description of Artificial Sequence: Synthetic oligonucleotide
ggccuuauugagccgcugg

SEQ ID NO: 306915 - RNA, 19 nt, Artificial Sequence
  Description of Artificial Sequence: Synthetic oligonucleotide
ucacgguucugagaggaaa

SEQ ID NO: 306916 - RNA, 19 nt, Artificial Sequence
  Description of Artificial Sequence: Synthetic oligonucleotide
acgugcacauggcuucuag

SEQ ID NO: 306917 - RNA, 19 nt, Artificial Sequence
  Description of Artificial Sequence: Synthetic oligonucleotide
ggaguuuucagugguggug

SEQ ID NO: 306918 - RNA, 19 nt, Artificial Sequence
  Description of Artificial Sequence: Synthetic oligonucleotide
acggucacuccguucccuc

SEQ ID NO: 306919 - RNA, 19 nt, Artificial Sequence
  Description of Artificial Sequence: Synthetic oligonucleotide
agcauggugaggccccaug

SEQ ID NO: 306920 - RNA, 19 nt, Artificial Sequence
  Description of Artificial Sequence: Synthetic oligonucleotide
uccucccguagccuuucag

SEQ ID NO: 306921 - RNA, 19 nt, Artificial Sequence
  Description of Artificial Sequence: Synthetic oligonucleotide
gaaaugggcguggucucug

SEQ ID NO: 306922 - RNA, 19 nt, Artificial Sequence
  Description of Artificial Sequence: Synthetic oligonucleotide
ugcuguccggccauacccu

SEQ ID NO: 306923 - RNA, 19 nt, Artificial Sequence
  Description of Artificial Sequence: Synthetic oligonucleotide
uucgacgugguagcgcucu

SEQ ID NO: 306924 - RNA, 19 nt, Artificial Sequence
  Description of Artificial Sequence: Synthetic oligonucleotide
gaaccaauucuucacgguu

SEQ ID NO: 306925 - RNA, 19 nt, Artificial Sequence
  Description of Artificial Sequence: Synthetic oligonucleotide
uaacgucuuuaucccuugu

SEQ ID NO: 306926 - RNA, 19 nt, Artificial Sequence
  Description of Artificial Sequence: Synthetic oligonucleotide
uguggccuguaucccagau

SEQ ID NO: 306927 - RNA, 19 nt, Artificial Sequence
  Description of Artificial Sequence: Synthetic oligonucleotide
aguggagugcacgcuagca

SEQ ID NO: 306928 - RNA, 19 nt, Artificial Sequence
  Description of Artificial Sequence: Synthetic oligonucleotide
ugguucuguaggccugucu

SEQ ID NO: 306929 - RNA, 19 nt, Artificial Sequence
  Description of Artificial Sequence: Synthetic oligonucleotide
gucacuccguucccucugg

SEQ ID NO: 306930 - RNA, 19 nt, Artificial Sequence
  Description of Artificial Sequence: Synthetic oligonucleotide
ggugcguugaauuucuccu

SEQ ID NO: 306931 - RNA, 19 nt, Artificial Sequence
  Description of Artificial Sequence: Synthetic oligonucleotide
cucccguagccuuucagca

SEQ ID NO: 306932 - RNA, 19 nt, Artificial Sequence
  Description of Artificial Sequence: Synthetic oligonucleotide
auaacuccucacagagggg

SEQ ID NO: 306933 - RNA, 19 nt, Artificial Sequence
  Description of Artificial Sequence: Synthetic oligonucleotide
aggagcuccccuaacgucu

SEQ ID NO: 306934 - RNA, 19 nt, Artificial Sequence
  Description of Artificial Sequence: Synthetic oligonucleotide
ugguagcgcucuccugagg

SEQ ID NO: 306935 - RNA, 19 nt, Artificial Sequence
  Description of Artificial Sequence: Synthetic oligonucleotide
aggggaucgaaggagccca

SEQ ID NO: 306936 - RNA, 19 nt, Artificial Sequence
  Description of Artificial Sequence: Synthetic oligonucleotide
gguggcaggaggauguacc

SEQ ID NO: 306937 - RNA, 19 nt, Artificial Sequence
  Description of Artificial Sequence: Synthetic oligonucleotide
acuuuacgccugcugcugu

SEQ ID NO: 306938 - RNA, 19 nt, Artificial Sequence
  Description of Artificial Sequence: Synthetic oligonucleotide
uucuggcguaacucuguga

SEQ ID NO: 306939 - RNA, 19 nt, Artificial Sequence
  Description of Artificial Sequence: Synthetic oligonucleotide
ugaaaugggcguggucucu

SEQ ID NO: 306940 - RNA, 19 nt, Artificial Sequence
  Description of Artificial Sequence: Synthetic oligonucleotide
agccucucuguucagccaa

SEQ ID NO: 306941 - RNA, 19 nt, Artificial Sequence
  Description of Artificial Sequence: Synthetic oligonucleotide
uggaggcuaaucuguugaa

SEQ ID NO: 306942 - RNA, 19 nt, Artificial Sequence
  Description of Artificial Sequence: Synthetic oligonucleotide
cuucuggcguaacucugug

SEQ ID NO: 306943 - RNA, 19 nt, Artificial Sequence
  Description of Artificial Sequence: Synthetic oligonucleotide
gggugcguugaauuucucc

SEQ ID NO: 306944 - RNA, 19 nt, Artificial Sequence
  Description of Artificial Sequence: Synthetic oligonucleotide
cuucacgguucugagagga

SEQ ID NO: 306945 - RNA, 19 nt, Artificial Sequence
  Description of Artificial Sequence: Synthetic oligonucleotide
acacgcucaggguggucuc

SEQ ID NO: 306946 - RNA, 19 nt, Artificial Sequence
  Description of Artificial Sequence: Synthetic oligonucleotide
ccaauguggucucacugag

SEQ ID NO: 306947 - RNA, 19 nt, Artificial Sequence
  Description of Artificial Sequence: Synthetic oligonucleotide
cuccucggcacacacgcuc

SEQ ID NO: 306948 - RNA, 19 nt, Artificial Sequence
  Description of Artificial Sequence: Synthetic oligonucleotide
ggcaagucaaagccaggug

SEQ ID NO: 306949 - RNA, 19 nt, Artificial Sequence
  Description of Artificial Sequence: Synthetic oligonucleotide
ucgaugccgggugagugga

SEQ ID NO: 306950 - RNA, 19 nt, Artificial Sequence
  Description of Artificial Sequence: Synthetic oligonucleotide
cuuuacgccugcugcuguc

SEQ ID NO: 306951 - RNA, 19 nt, Artificial Sequence
  Description of Artificial Sequence: Synthetic oligonucleotide
caugcggcccaagugggug

SEQ ID NO: 306952 - RNA, 19 nt, Artificial Sequence
  Description of Artificial Sequence: Synthetic oligonucleotide
ucggcaaucugaggucagc

SEQ ID NO: 306953 - RNA, 19 nt, Artificial Sequence
  Description of Artificial Sequence: Synthetic oligonucleotide
agugcacgcuagcaucaga

SEQ ID NO: 306954 - RNA, 19 nt, Artificial Sequence
  Description of Artificial Sequence: Synthetic oligonucleotide
uucacgguucugagaggaa

SEQ ID NO: 306955 - RNA, 19 nt, Artificial Sequence
  Description of Artificial Sequence: Synthetic oligonucleotide
gcuccaucauguuccuagg

SEQ ID NO: 306956 - RNA, 19 nt, Artificial Sequence
  Description of Artificial Sequence: Synthetic oligonucleotide
ccggccauacccuucuugc

SEQ ID NO: 306957 - RNA, 19 nt, Artificial Sequence
  Description of Artificial Sequence: Synthetic oligonucleotide
uauugagccgcuggaucuc

SEQ ID NO: 306958 - RNA, 19 nt, Artificial Sequence
  Description of Artificial Sequence: Synthetic oligonucleotide
uuuaugcaccuuggaggcu

SEQ ID NO: 306959 - RNA, 19 nt, Artificial Sequence
  Description of Artificial Sequence: Synthetic oligonucleotide
uugaucccgcuguuccaga

SEQ ID NO: 306960 - RNA, 19 nt, Artificial Sequence
  Description of Artificial Sequence: Synthetic oligonucleotide
caguggccucagcaaaagg

SEQ ID NO: 306961 - RNA, 19 nt, Artificial Sequence
  Description of Artificial Sequence: Synthetic oligonucleotide
caugagauugcuguccucu

SEQ ID NO: 306962 - RNA, 19 nt, Artificial Sequence
  Description of Artificial Sequence: Synthetic oligonucleotide
auucucgaugccgggugag

SEQ ID NO: 306963 - RNA, 19 nt, Artificial Sequence
  Description of Artificial Sequence: Synthetic oligonucleotide
aggcgugggccacacagaa

SEQ ID NO: 306964 - RNA, 19 nt, Artificial Sequence
  Description of Artificial Sequence: Synthetic oligonucleotide
cccugcauaggguggaagc

SEQ ID NO: 306965 - RNA, 19 nt, Artificial Sequence
  Description of Artificial Sequence: Synthetic oligonucleotide
ugcaccccacucuuagaau

SEQ ID NO: 306966 - RNA, 19 nt, Artificial Sequence
  Description of Artificial Sequence: Synthetic oligonucleotide
gacgcagcugcucgcacaa

SEQ ID NO: 306967 - RNA, 19 nt, Artificial Sequence
  Description of Artificial Sequence: Synthetic oligonucleotide
ccccuaacgucuuuauccc

SEQ ID NO: 306968 - RNA, 19 nt, Artificial Sequence
  Description of Artificial Sequence: Synthetic oligonucleotide
gccauacccuucuugccag

SEQ ID NO: 306969 - RNA, 19 nt, Artificial Sequence
  Description of Artificial Sequence: Synthetic oligonucleotide
caggauggaugugcguugc

SEQ ID NO: 306970 - RNA, 19 nt, Artificial Sequence
  Description of Artificial Sequence: Synthetic oligonucleotide
aggcagggugcguugaauu

SEQ ID NO: 306971 - RNA, 19 nt, Artificial Sequence
  Description of Artificial Sequence: Synthetic oligonucleotide
uucaugcgcucacggucac

SEQ ID NO: 306972 - RNA, 19 nt, Artificial Sequence
  Description of Artificial Sequence: Synthetic oligonucleotide
uuuucccuucagccgggua

SEQ ID NO: 306973 - RNA, 19 nt, Artificial Sequence
  Description of Artificial Sequence: Synthetic oligonucleotide
cucggcaaucugaggucag

SEQ ID NO: 306974 - RNA, 19 nt, Artificial Sequence
  Description of Artificial Sequence: Synthetic oligonucleotide
cauggcggguggaggguag

SEQ ID NO: 306975 - RNA, 19 nt, Artificial Sequence
  Description of Artificial Sequence: Synthetic oligonucleotide
augagauugcuguccucua

SEQ ID NO: 306976 - RNA, 19 nt, Artificial Sequence
  Description of Artificial Sequence: Synthetic oligonucleotide
ccuuugucuuggcaagagg

SEQ ID NO: 306977 - RNA, 19 nt, Artificial Sequence
  Description of Artificial Sequence: Synthetic oligonucleotide
uggaccggaaaugcugguc

SEQ ID NO: 306978 - RNA, 19 nt, Artificial Sequence
  Description of Artificial Sequence: Synthetic oligonucleotide
aggugccauuggaugaagg

SEQ ID NO: 306979 - RNA, 19 nt, Artificial Sequence
  Description of Artificial Sequence: Synthetic oligonucleotide
cacgcuagcaucagaacau

SEQ ID NO: 306980 - RNA, 19 nt, Artificial Sequence
  Description of Artificial Sequence: Synthetic oligonucleotide
aaugcuggucccacugcuu

SEQ ID NO: 306981 - RNA, 19 nt, Artificial Sequence
  Description of Artificial Sequence: Synthetic oligonucleotide
caggggaucgaaggagccc

SEQ ID NO: 306982 - RNA, 19 nt, Artificial Sequence
  Description of Artificial Sequence: Synthetic oligonucleotide
ggcuaaucuguugaacuca

SEQ ID NO: 306983 - RNA, 19 nt, Artificial Sequence
  Description of Artificial Sequence: Synthetic oligonucleotide
cauuggaugaaggccugga

SEQ ID NO: 306984 - RNA, 19 nt, Artificial Sequence
  Description of Artificial Sequence: Synthetic oligonucleotide
guaccuggaccuguguauc

SEQ ID NO: 306985 - RNA, 19 nt, Artificial Sequence
  Description of Artificial Sequence: Synthetic oligonucleotide
cccacucuuagaauggaca

SEQ ID NO: 306986 - RNA, 19 nt, Artificial Sequence
  Description of Artificial Sequence: Synthetic oligonucleotide
gccccuuugucuuggcaag

SEQ ID NO: 306987 - RNA, 19 nt, Artificial Sequence
  Description of Artificial Sequence: Synthetic oligonucleotide
gcacaugaaaugggcgugg

SEQ ID NO: 306988 - RNA, 19 nt, Artificial Sequence
  Description of Artificial Sequence: Synthetic oligonucleotide
ggcauagggauaggcgccg

SEQ ID NO: 306989 - RNA, 19 nt, Artificial Sequence
  Description of Artificial Sequence: Synthetic oligonucleotide
gccuguaucccagaucaug

SEQ ID NO: 306990 - RNA, 19 nt, Artificial Sequence
  Description of Artificial Sequence: Synthetic oligonucleotide
aaggcgugggccacacaga

SEQ ID NO: 306991 - RNA, 19 nt, Artificial Sequence
  Description of Artificial Sequence: Synthetic oligonucleotide
auggaccggaaaugcuggu

SEQ ID NO: 306992 - RNA, 19 nt, Artificial Sequence
  Description of Artificial Sequence: Synthetic oligonucleotide
ggagcaugagauugcuguc

SEQ ID NO: 306993 - RNA, 19 nt, Artificial Sequence
  Description of Artificial Sequence: Synthetic oligonucleotide
ucacuccguucccucugga

SEQ ID NO: 306994 - RNA, 19 nt, Artificial Sequence
  Description of Artificial Sequence: Synthetic oligonucleotide
gagugcacgcuagcaucag

SEQ ID NO: 306995 - RNA, 19 nt, Artificial Sequence
  Description of Artificial Sequence: Synthetic oligonucleotide
ccugcauaggguggaagcc

SEQ ID NO: 306996 - RNA, 19 nt, Artificial Sequence
  Description of Artificial Sequence: Synthetic oligonucleotide
ggcuucuaguuucucggca

SEQ ID NO: 306997 - RNA, 19 nt, Artificial Sequence
  Description of Artificial Sequence: Synthetic oligonucleotide
acgcuagcaucagaacaug

SEQ ID NO: 306998 - RNA, 19 nt, Artificial Sequence
  Description of Artificial Sequence: Synthetic oligonucleotide
gguaaggagaggggcauga

SEQ ID NO: 306999 - RNA, 19 nt, Artificial Sequence
  Description of Artificial Sequence: Synthetic oligonucleotide
gugcacgcuagcaucagaa

SEQ ID NO: 307000 - RNA, 19 nt, Artificial Sequence
  Description of Artificial Sequence: Synthetic oligonucleotide
cuaggagcuccccuaacgu

SEQ ID NO: 307001 - RNA, 19 nt, Artificial Sequence
  Description of Artificial Sequence: Synthetic oligonucleotide
gacgugguagcgcucuccu

SEQ ID NO: 307002 - RNA, 19 nt, Artificial Sequence
  Description of Artificial Sequence: Synthetic oligonucleotide
caguggagugcacgcuagc

SEQ ID NO: 307003 - RNA, 19 nt, Artificial Sequence
  Description of Artificial Sequence: Synthetic oligonucleotide
cgaaucccugcauagggug

SEQ ID NO: 307004 - RNA, 19 nt, Artificial Sequence
  Description of Artificial Sequence: Synthetic oligonucleotide
ccaaaagcugguguuggug

SEQ ID NO: 307005 - RNA, 19 nt, Artificial Sequence
  Description of Artificial Sequence: Synthetic oligonucleotide
aucugggaccaguccuuga

SEQ ID NO: 307006 - RNA, 19 nt, Artificial Sequence
  Description of Artificial Sequence: Synthetic oligonucleotide
ggauguaaguugccugcuc

SEQ ID NO: 307007 - RNA, 19 nt, Artificial Sequence
  Description of Artificial Sequence: Synthetic oligonucleotide
cugcaggugccugacuuuc

SEQ ID NO: 307008 - RNA, 19 nt, Artificial Sequence
  Description of Artificial Sequence: Synthetic oligonucleotide
uccauacguugcuguucca

SEQ ID NO: 307009 - RNA, 19 nt, Artificial Sequence
  Description of Artificial Sequence: Synthetic oligonucleotide
aggugagaguuggggagug

SEQ ID NO: 307010 - RNA, 19 nt, Artificial Sequence
  Description of Artificial Sequence: Synthetic oligonucleotide
aggauggaugugcguugcu

SEQ ID NO: 307011 - RNA, 19 nt, Artificial Sequence
  Description of Artificial Sequence: Synthetic oligonucleotide
cucggcacacacgcucagg

SEQ ID NO: 307012 - RNA, 19 nt, Artificial Sequence
  Description of Artificial Sequence: Synthetic oligonucleotide
cagaggugcucaggguggg

SEQ ID NO: 307013 - RNA, 19 nt, Artificial Sequence
  Description of Artificial Sequence: Synthetic oligonucleotide
accuggaccuguguauccu

SEQ ID NO: 307014 - RNA, 19 nt, Artificial Sequence
  Description of Artificial Sequence: Synthetic oligonucleotide
ggauaggcgccgcagaggu

SEQ ID NO: 307015 - RNA, 19 nt, Artificial Sequence
  Description of Artificial Sequence: Synthetic oligonucleotide
gguucgacgugguagcgcu

SEQ ID NO: 307016 - RNA, 19 nt, Artificial Sequence
  Description of Artificial Sequence: Synthetic oligonucleotide
ggcuggggauguaaguugc

SEQ ID NO: 307017 - RNA, 19 nt, Artificial Sequence
  Description of Artificial Sequence: Synthetic oligonucleotide
gggugcaguggagugcacg

SEQ ID NO: 307018 - RNA, 19 nt, Artificial Sequence
  Description of Artificial Sequence: Synthetic oligonucleotide
ccuugaaagcauggugagg

SEQ ID NO: 307019 - RNA, 19 nt, Artificial Sequence
  Description of Artificial Sequence: Synthetic oligonucleotide
ccauacguugcuguuccag

SEQ ID NO: 307020 - RNA, 19 nt, Artificial Sequence
  Description of Artificial Sequence: Synthetic oligonucleotide
gugcguugaauuucuccua

SEQ ID NO: 307021 - RNA, 19 nt, Artificial Sequence
  Description of Artificial Sequence: Synthetic oligonucleotide
gggauaggcgccgcagagg

SEQ ID NO: 307022 - RNA, 19 nt, Artificial Sequence
  Description of Artificial Sequence: Synthetic oligonucleotide
cacacagaacgugcacaug

SEQ ID NO: 307023 - RNA, 19 nt, Artificial Sequence
  Description of Artificial Sequence: Synthetic oligonucleotide
guuccagacccuuguccaa

SEQ ID NO: 307024 - RNA, 19 nt, Artificial Sequence
  Description of Artificial Sequence: Synthetic oligonucleotide
uaguugcaccccacucuua

SEQ ID NO: 307025 - RNA, 19 nt, Artificial Sequence
  Description of Artificial Sequence: Synthetic oligonucleotide
ggaggguagcggaucuggg

SEQ ID NO: 307026 - RNA, 19 nt, Artificial Sequence
  Description of Artificial Sequence: Synthetic oligonucleotide
gacuuagccaggaggaguu

SEQ ID NO: 307027 - RNA, 19 nt, Artificial Sequence
  Description of Artificial Sequence: Synthetic oligonucleotide
gggauuccgaaucccugca

SEQ ID NO: 307028 - RNA, 19 nt, Artificial Sequence
  Description of Artificial Sequence: Synthetic oligonucleotide
ugagcucagccaggggauc

SEQ ID NO: 307029 - RNA, 19 nt, Artificial Sequence
  Description of Artificial Sequence: Synthetic oligonucleotide
cauagggauaggcgccgca

SEQ ID NO: 307030 - RNA, 19 nt, Artificial Sequence
  Description of Artificial Sequence: Synthetic oligonucleotide
uuuggggagcugggcugcc

SEQ ID NO: 307031 - RNA, 19 nt, Artificial Sequence
  Description of Artificial Sequence: Synthetic oligonucleotide
cagaacgugcacauggcuu

SEQ ID NO: 307032 - RNA, 19 nt, Artificial Sequence
  Description of Artificial Sequence: Synthetic oligonucleotide
uccguucccucuggaaguc

SEQ ID NO: 307033 - RNA, 19 nt, Artificial Sequence
  Description of Artificial Sequence: Synthetic oligonucleotide
gccuuauugagccgcugga

SEQ ID NO: 307034 - RNA, 19 nt, Artificial Sequence
  Description of Artificial Sequence: Synthetic oligonucleotide
cagcgguacccaagacccc

SEQ ID NO: 307035 - RNA, 19 nt, Artificial Sequence
  Description of Artificial Sequence: Synthetic oligonucleotide
gauaggcgccgcagaggug

SEQ ID NO: 307036 - RNA, 19 nt, Artificial Sequence
  Description of Artificial Sequence: Synthetic oligonucleotide
guuuuggguggagaauucu

SEQ ID NO: 307037 - RNA, 19 nt, Artificial Sequence
  Description of Artificial Sequence: Synthetic oligonucleotide
ggguguuaguugcacccca

SEQ ID NO: 307038 - RNA, 19 nt, Artificial Sequence
  Description of Artificial Sequence: Synthetic oligonucleotide
cugacgcagcugcucgcac

SEQ ID NO: 307039 - RNA, 19 nt, Artificial Sequence
  Description of Artificial Sequence: Synthetic oligonucleotide
gggccaugcggcccaagug

SEQ ID NO: 307040 - RNA, 19 nt, Artificial Sequence
  Description of Artificial Sequence: Synthetic oligonucleotide
guggagcaugagauugcug

SEQ ID NO: 307041 - RNA, 19 nt, Artificial Sequence
  Description of Artificial Sequence: Synthetic oligonucleotide
guguuaguugcaccccacu

SEQ ID NO: 307042 - RNA, 19 nt, Artificial Sequence
  Description of Artificial Sequence: Synthetic oligonucleotide
ggugagaguuggggagugg

SEQ ID NO: 307043 - RNA, 19 nt, Artificial Sequence
  Description of Artificial Sequence: Synthetic oligonucleotide
gguguuaguugcaccccac

SEQ ID NO: 307044 - RNA, 19 nt, Artificial Sequence
  Description of Artificial Sequence: Synthetic oligonucleotide
gccaugcggcccaaguggg

SEQ ID NO: 307045 - RNA, 19 nt, Artificial Sequence
  Description of Artificial Sequence: Synthetic oligonucleotide
cagggugcguugaauuucu

SEQ ID NO: 307046 - RNA, 19 nt, Artificial Sequence
  Description of Artificial Sequence: Synthetic oligonucleotide
gcuaaucuguugaacucaa

SEQ ID NO: 307047 - RNA, 19 nt, Artificial Sequence
  Description of Artificial Sequence: Synthetic oligonucleotide
caccacucucuucucuaga

SEQ ID NO: 307048 - RNA, 19 nt, Artificial Sequence
  Description of Artificial Sequence: Synthetic oligonucleotide
ucgacgugguagcgcucuc

SEQ ID NO: 307049 - RNA, 19 nt, Artificial Sequence
  Description of Artificial Sequence: Synthetic oligonucleotide
accccacucuuagaaugga

SEQ ID NO: 307050 - RNA, 19 nt, Artificial Sequence
  Description of Artificial Sequence: Synthetic oligonucleotide
caucacuugggagguggga

SEQ ID NO: 307051 - RNA, 19 nt, Artificial Sequence
  Description of Artificial Sequence: Synthetic oligonucleotide
ggagugcacgcuagcauca

SEQ ID NO: 307052 - RNA, 19 nt, Artificial Sequence
  Description of Artificial Sequence: Synthetic oligonucleotide
gcugcucgcacaaggucug

SEQ ID NO: 307053 - RNA, 19 nt, Artificial Sequence
  Description of Artificial Sequence: Synthetic oligonucleotide
gcagggugcguugaauuuc

SEQ ID NO: 307054 - RNA, 19 nt, Artificial Sequence
  Description of Artificial Sequence: Synthetic oligonucleotide
gcucugcaagaugaaggug

SEQ ID NO: 307055 - RNA, 19 nt, Artificial Sequence
  Description of Artificial Sequence: Synthetic oligonucleotide
aggguggcugucaguuuug

SEQ ID NO: 307056 - RNA, 19 nt, Artificial Sequence
  Description of Artificial Sequence: Synthetic oligonucleotide
ccuagucuuguaaacaguu

SEQ ID NO: 307057 - RNA, 19 nt, Artificial Sequence
  Description of Artificial Sequence: Synthetic oligonucleotide
ccaccucggggacuuuacg

SEQ ID NO: 307058 - RNA, 19 nt, Artificial Sequence
  Description of Artificial Sequence: Synthetic oligonucleotide
ucccgcuguuccagacccu

SEQ ID NO: 307059 - RNA, 19 nt, Artificial Sequence
  Description of Artificial Sequence: Synthetic oligonucleotide
ggggcgggugcuccauggg

SEQ ID NO: 307060 - RNA, 19 nt, Artificial Sequence
  Description of Artificial Sequence: Synthetic oligonucleotide
ggaugugcguugcucauuu

SEQ ID NO: 307061 - RNA, 19 nt, Artificial Sequence
  Description of Artificial Sequence: Synthetic oligonucleotide
gcggguggaggguagcgga

SEQ ID NO: 307062 - RNA, 19 nt, Artificial Sequence
  Description of Artificial Sequence: Synthetic oligonucleotide
gaauuucuccuagcugcau

SEQ ID NO: 307063 - RNA, 19 nt, Artificial Sequence
  Description of Artificial Sequence: Synthetic oligonucleotide
cacacgcucaggguggucu

SEQ ID NO: 307064 - RNA, 19 nt, Artificial Sequence
  Description of Artificial Sequence: Synthetic oligonucleotide
agggugcguugaauuucuc

SEQ ID NO: 307065 - RNA, 19 nt, Artificial Sequence
  Description of Artificial Sequence: Synthetic oligonucleotide
ggguucgacgugguagcgc

SEQ ID NO: 307066 - RNA, 19 nt, Artificial Sequence
  Description of Artificial Sequence: Synthetic oligonucleotide
ccccacucuuagaauggac

SEQ ID NO: 307067 - RNA, 19 nt, Artificial Sequence
  Description of Artificial Sequence: Synthetic oligonucleotide
agcuccccuaacgucuuua

SEQ ID NO: 307068 - RNA, 19 nt, Artificial Sequence
  Description of Artificial Sequence: Synthetic oligonucleotide
gggaucgaaggagcccaag

SEQ ID NO: 307069 - RNA, 19 nt, Artificial Sequence
  Description of Artificial Sequence: Synthetic oligonucleotide
gagucucccuagucuugua

SEQ ID NO: 307070 - RNA, 19 nt, Artificial Sequence
  Description of Artificial Sequence: Synthetic oligonucleotide
acacacgcucagggugguc

SEQ ID NO: 307071 - RNA, 19 nt, Artificial Sequence
  Description of Artificial Sequence: Synthetic oligonucleotide
gggguucgacgugguagcg

SEQ ID NO: 307072 - RNA, 19 nt, Artificial Sequence
  Description of Artificial Sequence: Synthetic oligonucleotide
ccucccagccucucuguuc

SEQ ID NO: 307073 - RNA, 19 nt, Artificial Sequence
  Description of Artificial Sequence: Synthetic oligonucleotide
gguauucucgaugccgggu

SEQ ID NO: 307074 - RNA, 19 nt, Artificial Sequence
  Description of Artificial Sequence: Synthetic oligonucleotide
gccauuggaugaaggccug

SEQ ID NO: 307075 - RNA, 19 nt, Artificial Sequence
  Description of Artificial Sequence: Synthetic oligonucleotide
ggcgggugcuccaugggca

SEQ ID NO: 307076 - RNA, 19 nt, Artificial Sequence
  Description of Artificial Sequence: Synthetic oligonucleotide
gagacuccucuaggagcuc

SEQ ID NO: 307077 - RNA, 19 nt, Artificial Sequence
  Description of Artificial Sequence: Synthetic oligonucleotide
gcguaacucugugaucuuc

SEQ ID NO: 307078 - RNA, 19 nt, Artificial Sequence
  Description of Artificial Sequence: Synthetic oligonucleotide
cugcucgcacaaggucugc

SEQ ID NO: 307079 - RNA, 19 nt, Artificial Sequence
  Description of Artificial Sequence: Synthetic oligonucleotide
cccaccucggggacuuuac

SEQ ID NO: 307080 - RNA, 19 nt, Artificial Sequence
  Description of Artificial Sequence: Synthetic oligonucleotide
acuuagccaggaggaguuu

SEQ ID NO: 307081 - RNA, 19 nt, Artificial Sequence
  Description of Artificial Sequence: Synthetic oligonucleotide
ggcguggucucuggagagc

SEQ ID NO: 307082 - RNA, 19 nt, Artificial Sequence
  Description of Artificial Sequence: Synthetic oligonucleotide
gguggagaauucugcuccu

SEQ ID NO: 307083 - RNA, 19 nt, Artificial Sequence
  Description of Artificial Sequence: Synthetic oligonucleotide
gcaugagauugcuguccuc

SEQ ID NO: 307084 - RNA, 19 nt, Artificial Sequence
  Description of Artificial Sequence: Synthetic oligonucleotide
ccggaaaugcuggucccac

SEQ ID NO: 307085 - RNA, 19 nt, Artificial Sequence
  Description of Artificial Sequence: Synthetic oligonucleotide
gugagcucagccaggggau

SEQ ID NO: 307086 - RNA, 19 nt, Artificial Sequence
  Description of Artificial Sequence: Synthetic oligonucleotide
ggucaggcuccucggcaca

SEQ ID NO: 307087 - RNA, 19 nt, Artificial Sequence
  Description of Artificial Sequence: Synthetic oligonucleotide
aagccaggugaagccccuu

SEQ ID NO: 307088 - RNA, 19 nt, Artificial Sequence
  Description of Artificial Sequence: Synthetic oligonucleotide
gccgcuggaucuccuuuuc

SEQ ID NO: 307089 - RNA, 19 nt, Artificial Sequence
  Description of Artificial Sequence: Synthetic oligonucleotide
cccuucugggcuuccaaaa

SEQ ID NO: 307090 - RNA, 19 nt, Artificial Sequence
  Description of Artificial Sequence: Synthetic oligonucleotide
gguggagcaugagauugcu

SEQ ID NO: 307091 - RNA, 19 nt, Artificial Sequence
  Description of Artificial Sequence: Synthetic oligonucleotide
ccauggaguuuucaguggu

SEQ ID NO: 307092 - RNA, 19 nt, Artificial Sequence
  Description of Artificial Sequence: Synthetic oligonucleotide
ccuaacgucuuuaucccuu

SEQ ID NO: 307093 - RNA, 19 nt, Artificial Sequence
  Description of Artificial Sequence: Synthetic oligonucleotide
cguaacucugugaucuucu

SEQ ID NO: 307094 - RNA, 19 nt, Artificial Sequence
  Description of Artificial Sequence: Synthetic oligonucleotide
gccgggugaguggacucag

SEQ ID NO: 307095 - RNA, 19 nt, Artificial Sequence
  Description of Artificial Sequence: Synthetic oligonucleotide
gaugugcguugcucauuuu

SEQ ID NO: 307096 - RNA, 19 nt, Artificial Sequence
  Description of Artificial Sequence: Synthetic oligonucleotide
ggcgccgcagaggugcuca

SEQ ID NO: 307097 - RNA, 19 nt, Artificial Sequence
  Description of Artificial Sequence: Synthetic oligonucleotide
gaggcagggugcguugaau

SEQ ID NO: 307098 - RNA, 19 nt, Artificial Sequence
  Description of Artificial Sequence: Synthetic oligonucleotide
ggcagggugcguugaauuu

SEQ ID NO: 307099 - RNA, 19 nt, Artificial Sequence
  Description of Artificial Sequence: Synthetic oligonucleotide
cgucuuuaucccuuguuau

SEQ ID NO: 307100 - RNA, 19 nt, Artificial Sequence
  Description of Artificial Sequence: Synthetic oligonucleotide
guucgacgugguagcgcuc

SEQ ID NO: 307101 - RNA, 19 nt, Artificial Sequence
  Description of Artificial Sequence: Synthetic oligonucleotide
ccccuucccauaacuccuc

SEQ ID NO: 307102 - RNA, 19 nt, Artificial Sequence
  Description of Artificial Sequence: Synthetic oligonucleotide
cagguguacucugccagau

SEQ ID NO: 307103 - RNA, 19 nt, Artificial Sequence
  Description of Artificial Sequence: Synthetic oligonucleotide
gggauguaaguugccugcu

SEQ ID NO: 307104 - RNA, 19 nt, Artificial Sequence
  Description of Artificial Sequence: Synthetic oligonucleotide
gggccuuauugagccgcug

SEQ ID NO: 307105 - RNA, 19 nt, Artificial Sequence
  Description of Artificial Sequence: Synthetic oligonucleotide
ggauuccgaaucccugcau

SEQ ID NO: 307106 - RNA, 19 nt, Artificial Sequence
  Description of Artificial Sequence: Synthetic oligonucleotide
ccgcuguuccagacccuug

SEQ ID NO: 307107 - RNA, 19 nt, Artificial Sequence
  Description of Artificial Sequence: Synthetic oligonucleotide
ccuaggguggcugucaguu

SEQ ID NO: 307108 - RNA, 19 nt, Artificial Sequence
  Description of Artificial Sequence: Synthetic oligonucleotide
cccuagucuuguaaacagu

SEQ ID NO: 307109 - RNA, 19 nt, Artificial Sequence
  Description of Artificial Sequence: Synthetic oligonucleotide
caggcuccaucauguuccu

SEQ ID NO: 307110 - RNA, 19 nt, Artificial Sequence
  Description of Artificial Sequence: Synthetic oligonucleotide
ggcgugggccacacagaac

SEQ ID NO: 307111 - RNA, 19 nt, Artificial Sequence
  Description of Artificial Sequence: Synthetic oligonucleotide
cagucucuuccaucucaau

SEQ ID NO: 307112 - RNA, 19 nt, Artificial Sequence
  Description of Artificial Sequence: Synthetic oligonucleotide
ccucuaggagcuccccuaa

SEQ ID NO: 307113 - RNA, 19 nt, Artificial Sequence
  Description of Artificial Sequence: Synthetic oligonucleotide
ggggcccuucagcagacau

SEQ ID NO: 307114 - RNA, 19 nt, Artificial Sequence
  Description of Artificial Sequence: Synthetic oligonucleotide
gccaaggcgugggccacac

SEQ ID NO: 307115 - RNA, 19 nt, Artificial Sequence
  Description of Artificial Sequence: Synthetic oligonucleotide
ccgaaucccugcauagggu

SEQ ID NO: 307116 - RNA, 19 nt, Artificial Sequence
  Description of Artificial Sequence: Synthetic oligonucleotide
ccccuucugggcuuccaaa

SEQ ID NO: 307117 - RNA, 19 nt, Artificial Sequence
  Description of Artificial Sequence: Synthetic oligonucleotide
ccguucccucuggaagucc

SEQ ID NO: 307118 - RNA, 19 nt, Artificial Sequence
  Description of Artificial Sequence: Synthetic oligonucleotide
ggccuuguggguggagucu

SEQ ID NO: 307119 - RNA, 19 nt, Artificial Sequence
  Description of Artificial Sequence: Synthetic oligonucleotide
cacggucacuccguucccu

SEQ ID NO: 307120 - RNA, 19 nt, Artificial Sequence
  Description of Artificial Sequence: Synthetic oligonucleotide
gcgccgcagaggugcucag

SEQ ID NO: 307121 - RNA, 19 nt, Artificial Sequence
  Description of Artificial Sequence: Synthetic oligonucleotide
ccagaucaugguggcucuc

SEQ ID NO: 307122 - RNA, 19 nt, Artificial Sequence
  Description of Artificial Sequence: Synthetic oligonucleotide
ccuuauugagccgcuggau

SEQ ID NO: 307123 - RNA, 19 nt, Artificial Sequence
  Description of Artificial Sequence: Synthetic oligonucleotide
cccuaacgucuuuaucccu

SEQ ID NO: 307124 - RNA, 19 nt, Artificial Sequence
  Description of Artificial Sequence: Synthetic oligonucleotide
cguucccucuggaaguccu

SEQ ID NO: 307125 - RNA, 19 nt, Artificial Sequence
  Description of Artificial Sequence: Synthetic oligonucleotide
ggcguaacucugugaucuu

SEQ ID NO: 307126 - RNA, 19 nt, Artificial Sequence
  Description of Artificial Sequence: Synthetic oligonucleotide
cacacacgcucaggguggu

SEQ ID NO: 307127 - RNA, 19 nt, Artificial Sequence
  Description of Artificial Sequence: Synthetic oligonucleotide
gcauggcggguggagggua

SEQ ID NO: 307128 - RNA, 19 nt, Artificial Sequence
  Description of Artificial Sequence: Synthetic oligonucleotide
gagcuccccuaacgucuuu

SEQ ID NO: 307129 - RNA, 19 nt, Artificial Sequence
  Description of Artificial Sequence: Synthetic oligonucleotide
gcggcccaagugggugaag

SEQ ID NO: 307130 - RNA, 19 nt, Artificial Sequence
  Description of Artificial Sequence: Synthetic oligonucleotide
cgaugccgggugaguggac

SEQ ID NO: 307131 - RNA, 19 nt, Artificial Sequence
  Description of Artificial Sequence: Synthetic oligonucleotide
ccaugcggcccaagugggu

SEQ ID NO: 307132 - RNA, 19 nt, Artificial Sequence
  Description of Artificial Sequence: Synthetic oligonucleotide
cggcaaucugaggucagcu

SEQ ID NO: 307133 - RNA, 19 nt, Artificial Sequence
  Description of Artificial Sequence: Synthetic oligonucleotide
cgugggccacacagaacgu

SEQ ID NO: 307134 - RNA, 19 nt, Artificial Sequence
  Description of Artificial Sequence: Synthetic oligonucleotide
gcuccucggcacacacgcu

SEQ ID NO: 307135 - RNA, 19 nt, Artificial Sequence
  Description of Artificial Sequence: Synthetic oligonucleotide
cggcacacacgcucagggu

SEQ ID NO: 307136 - RNA, 19 nt, Artificial Sequence
  Description of Artificial Sequence: Synthetic oligonucleotide
gcgcucuccugaggccuuu

SEQ ID NO: 307137 - RNA, 19 nt, Artificial Sequence
  Description of Artificial Sequence: Synthetic oligonucleotide
cguagccuuucagcagcuu

SEQ ID NO: 307138 - RNA, 19 nt, Artificial Sequence
  Description of Artificial Sequence: Synthetic oligonucleotide
cggggacuuuacgccugcu

SEQ ID NO: 307139 - RNA, 19 nt, Artificial Sequence
  Description of Artificial Sequence: Synthetic oligonucleotide
uuuagaaugacccagugac

SEQ ID NO: 307140 - RNA, 19 nt, Artificial Sequence
  Description of Artificial Sequence: Synthetic oligonucleotide
aaguagaucccauuggucg

SEQ ID NO: 307141 - RNA, 19 nt, Artificial Sequence
  Description of Artificial Sequence: Synthetic oligonucleotide
auagaugcuacgcagcugc

SEQ ID NO: 307142 - RNA, 19 nt, Artificial Sequence
  Description of Artificial Sequence: Synthetic oligonucleotide
aaugagggaccauacaguc

SEQ ID NO: 307143 - RNA, 19 nt, Artificial Sequence
  Description of Artificial Sequence: Synthetic oligonucleotide
aaucguaacaggcagacau

SEQ ID NO: 307144 - RNA, 19 nt, Artificial Sequence
  Description of Artificial Sequence: Synthetic oligonucleotide
ucaaucaaucguaacaggc

SEQ ID NO: 307145 - RNA, 19 nt, Artificial Sequence
  Description of Artificial Sequence: Synthetic oligonucleotide
aacgucagaaugucugugc

SEQ ID NO: 307146 - RNA, 19 nt, Artificial Sequence
  Description of Artificial Sequence: Synthetic oligonucleotide
gauugcauaacuugcuagg

SEQ ID NO: 307147 - RNA, 19 nt, Artificial Sequence
  Description of Artificial Sequence: Synthetic oligonucleotide
ugcauaacuugcuaggucc

SEQ ID NO: 307148 - RNA, 19 nt, Artificial Sequence
  Description of Artificial Sequence: Synthetic oligonucleotide
aacuaguggaagcaguaag

SEQ ID NO: 307149 - RNA, 19 nt, Artificial Sequence
  Description of Artificial Sequence: Synthetic oligonucleotide
cacgauuucacguaccucc

SEQ ID NO: 307150 - RNA, 19 nt, Artificial Sequence
  Description of Artificial Sequence: Synthetic oligonucleotide
agucguagcagucaucccg

SEQ ID NO: 307151 - RNA, 19 nt, Artificial Sequence
  Description of Artificial Sequence: Synthetic oligonucleotide
ucuuuaacaacuuccuaac

SEQ ID NO: 307152 - RNA, 19 nt, Artificial Sequence
  Description of Artificial Sequence: Synthetic oligonucleotide
ucuaccuugaccacugaga

SEQ ID NO: 307153 - RNA, 19 nt, Artificial Sequence
  Description of Artificial Sequence: Synthetic oligonucleotide
cauuccgcacucuagaaag

SEQ ID NO: 307154 - RNA, 19 nt, Artificial Sequence
  Description of Artificial Sequence: Synthetic oligonucleotide
uguuacaagccccggagug

SEQ ID NO: 307155 - RNA, 19 nt, Artificial Sequence
  Description of Artificial Sequence: Synthetic oligonucleotide
cuuacucaacgucagaaug

SEQ ID NO: 307156 - RNA, 19 nt, Artificial Sequence
  Description of Artificial Sequence: Synthetic oligonucleotide
  modified_base (6)..(6): a, c, u, g, unknown or other
ugaacnuaguggcggauca

SEQ ID NO: 307157 - RNA, 19 nt, Artificial Sequence
  Description of Artificial Sequence: Synthetic oligonucleotide
acaauucucacauggcuug

SEQ ID NO: 307158 - RNA, 19 nt, Artificial Sequence
  Description of Artificial Sequence: Synthetic oligonucleotide
uuucuugaggauaucgcac

SEQ ID NO: 307159 - RNA, 19 nt, Artificial Sequence
  Description of Artificial Sequence: Synthetic oligonucleotide
aaguaaccgacugugcuuc

SEQ ID NO: 307160 - RNA, 19 nt, Artificial Sequence
  Description of Artificial Sequence: Synthetic oligonucleotide
acucaaucaaucguaacag

SEQ ID NO: 307161 - RNA, 19 nt, Artificial Sequence
  Description of Artificial Sequence: Synthetic oligonucleotide
agaaagugaggcuaucucu

SEQ ID NO: 307162 - RNA, 19 nt, Artificial Sequence
  Description of Artificial Sequence: Synthetic oligonucleotide
cucaacgucagaaugucug

SEQ ID NO: 307163 - RNA, 19 nt, Artificial Sequence
  Description of Artificial Sequence: Synthetic oligonucleotide
uuuauucccugacaaacau

SEQ ID NO: 307164 - RNA, 19 nt, Artificial Sequence
  Description of Artificial Sequence: Synthetic oligonucleotide
caggauucgaacacuauac

SEQ ID NO: 307165 - RNA, 19 nt, Artificial Sequence
  Description of Artificial Sequence: Synthetic oligonucleotide
guagcagucaucccgcggg

SEQ ID NO: 307166 - RNA, 19 nt, Artificial Sequence
  Description of Artificial Sequence: Synthetic oligonucleotide
cuuguuacaagccccggag

SEQ ID NO: 307167 - RNA, 19 nt, Artificial Sequence
  Description of Artificial Sequence: Synthetic oligonucleotide
guggguaccauacaugagc

SEQ ID NO: 307168 - RNA, 19 nt, Artificial Sequence
  Description of Artificial Sequence: Synthetic oligonucleotide
uaaagagucuccaggcccc

SEQ ID NO: 307169 - RNA, 19 nt, Artificial Sequence
  Description of Artificial Sequence: Synthetic oligonucleotide
uuacucaacgucagaaugu

SEQ ID NO: 307170 - RNA, 19 nt, Artificial Sequence
  Description of Artificial Sequence: Synthetic oligonucleotide
uucacguaccuccuugucc

SEQ ID NO: 307171 - RNA, 19 nt, Artificial Sequence
  Description of Artificial Sequence: Synthetic oligonucleotide
ugaggcuaucucuacaaga

SEQ ID NO: 307172 - RNA, 19 nt, Artificial Sequence
  Description of Artificial Sequence: Synthetic oligonucleotide
gaaggcaccggaaaaucgg

SEQ ID NO: 307173 - RNA, 19 nt, Artificial Sequence
  Description of Artificial Sequence: Synthetic oligonucleotide
ucauagaugcuacgcagcu

SEQ ID NO: 307174 - RNA, 19 nt, Artificial Sequence
  Description of Artificial Sequence: Synthetic oligonucleotide
ucuaagggugcacucaauc

SEQ ID NO: 307175 - RNA, 19 nt, Artificial Sequence
  Description of Artificial Sequence: Synthetic oligonucleotide
acauaauggcggauaagcc

SEQ ID NO: 307176 - RNA, 19 nt, Artificial Sequence
  Description of Artificial Sequence: Synthetic oligonucleotide
ucaucguugaugcgcuggg

SEQ ID NO: 307177 - RNA, 19 nt, Artificial Sequence
  Description of Artificial Sequence: Synthetic oligonucleotide
agaauuuagauggggaaca

SEQ ID NO: 307178 - RNA, 19 nt, Artificial Sequence
  Description of Artificial Sequence: Synthetic oligonucleotide
ugaccaaggucacugggca

SEQ ID NO: 307179 - RNA, 19 nt, Artificial Sequence
  Description of Artificial Sequence: Synthetic oligonucleotide
augucagacauuaaggcug

SEQ ID NO: 307180 - RNA, 19 nt, Artificial Sequence
  Description of Artificial Sequence: Synthetic oligonucleotide
ucugcucaugcuaggaugu

SEQ ID NO: 307181 - RNA, 19 nt, Artificial Sequence
  Description of Artificial Sequence: Synthetic oligonucleotide
uguuuacuccucacaguag

SEQ ID NO: 307182 - RNA, 19 nt, Artificial Sequence
  Description of Artificial Sequence: Synthetic oligonucleotide
agccgugaagaguucaggg

SEQ ID NO: 307183 - RNA, 19 nt, Artificial Sequence
  Description of Artificial Sequence: Synthetic oligonucleotide
cucaaucaaucguaacagg

SEQ ID NO: 307184 - RNA, 19 nt, Artificial Sequence
  Description of Artificial Sequence: Synthetic oligonucleotide
acuugcuaggucccggcac

SEQ ID NO: 307185 - RNA, 19 nt, Artificial Sequence
  Description of Artificial Sequence: Synthetic oligonucleotide
uucuugaggauaucgcacu

SEQ ID NO: 307186 - RNA, 19 nt, Artificial Sequence
  Description of Artificial Sequence: Synthetic oligonucleotide
auaagccucagccgcgugg

SEQ ID NO: 307187 - RNA, 19 nt, Artificial Sequence
  Description of Artificial Sequence: Synthetic oligonucleotide
uauguguguguguggcugg

SEQ ID NO: 307188 - RNA, 19 nt, Artificial Sequence
  Description of Artificial Sequence: Synthetic oligonucleotide
aaccacuccccacugacau

SEQ ID NO: 307189 - RNA, 19 nt, Artificial Sequence
  Description of Artificial Sequence: Synthetic oligonucleotide
uaguggcggaucaaccugg

SEQ ID NO: 307190 - RNA, 19 nt, Artificial Sequence
  Description of Artificial Sequence: Synthetic oligonucleotide
aggaagaauuuagaugggg

SEQ ID NO: 307191 - RNA, 19 nt, Artificial Sequence
  Description of Artificial Sequence: Synthetic oligonucleotide
guauauguguguguguggc

SEQ ID NO: 307192 - RNA, 19 nt, Artificial Sequence
  Description of Artificial Sequence: Synthetic oligonucleotide
uuguccgacagcagguaag

SEQ ID NO: 307193 - RNA, 19 nt, Artificial Sequence
  Description of Artificial Sequence: Synthetic oligonucleotide
aaccgacugugcuucugac

SEQ ID NO: 307194 - RNA, 19 nt, Artificial Sequence
  Description of Artificial Sequence: Synthetic oligonucleotide
acugacauaaggugccugu

SEQ ID NO: 307195 - RNA, 19 nt, Artificial Sequence
  Description of Artificial Sequence: Synthetic oligonucleotide
  modified_base (3)..(3): a, c, u, g, unknown or other
acnuaguggcggaucaacc

SEQ ID NO: 307196 - RNA, 19 nt, Artificial Sequence
  Description of Artificial Sequence: Synthetic oligonucleotide
uggguaccauacaugagcu

SEQ ID NO: 307197 - RNA, 19 nt, Artificial Sequence
  Description of Artificial Sequence: Synthetic oligonucleotide
uuagaaugacccagugacu

SEQ ID NO: 307198 - RNA, 19 nt, Artificial Sequence
  Description of Artificial Sequence: Synthetic oligonucleotide
caaacguaggaaaccacuc

SEQ ID NO: 307199 - RNA, 19 nt, Artificial Sequence
  Description of Artificial Sequence: Synthetic oligonucleotide
cauuaaggcuggaucuacg

SEQ ID NO: 307200 - RNA, 19 nt, Artificial Sequence
  Description of Artificial Sequence: Synthetic oligonucleotide
ugcacgauuucacguaccu

SEQ ID NO: 307201 - RNA, 19 nt, Artificial Sequence
  Description of Artificial Sequence: Synthetic oligonucleotide
auaaggugccugucugugg

SEQ ID NO: 307202 - RNA, 19 nt, Artificial Sequence
  Description of Artificial Sequence: Synthetic oligonucleotide
ucaugcuaggaugucagac

SEQ ID NO: 307203 - RNA, 19 nt, Artificial Sequence
  Description of Artificial Sequence: Synthetic oligonucleotide
acugagugcuaauaacacu

SEQ ID NO: 307204 - RNA, 19 nt, Artificial Sequence
  Description of Artificial Sequence: Synthetic oligonucleotide
cacugagugcuaauaacac

SEQ ID NO: 307205 - RNA, 19 nt, Artificial Sequence
  Description of Artificial Sequence: Synthetic oligonucleotide
cucucugaaccucucgggg

SEQ ID NO: 307206 - RNA, 19 nt, Artificial Sequence
  Description of Artificial Sequence: Synthetic oligonucleotide
uguuuacgugugcaaacgu

SEQ ID NO: 307207 - RNA, 19 nt, Artificial Sequence
  Description of Artificial Sequence: Synthetic oligonucleotide
caaucaaucguaacaggca

SEQ ID NO: 307208 - RNA, 19 nt, Artificial Sequence
  Description of Artificial Sequence: Synthetic oligonucleotide
ggcggaucaaccuggaucc

SEQ ID NO: 307209 - RNA, 19 nt, Artificial Sequence
  Description of Artificial Sequence: Synthetic oligonucleotide
agucgaagguucucagccg

SEQ ID NO: 307210 - RNA, 19 nt, Artificial Sequence
  Description of Artificial Sequence: Synthetic oligonucleotide
aacacgaaggaagaauuua

SEQ ID NO: 307211 - RNA, 19 nt, Artificial Sequence
  Description of Artificial Sequence: Synthetic oligonucleotide
uguggguaccauacaugag

SEQ ID NO: 307212 - RNA, 19 nt, Artificial Sequence
  Description of Artificial Sequence: Synthetic oligonucleotide
auauguguguguguggcug

SEQ ID NO: 307213 - RNA, 19 nt, Artificial Sequence
  Description of Artificial Sequence: Synthetic oligonucleotide
uguccgacagcagguaagg

SEQ ID NO: 307214 - RNA, 19 nt, Artificial Sequence
  Description of Artificial Sequence: Synthetic oligonucleotide
guguuuacgugugcaaacg

SEQ ID NO: 307215 - RNA, 19 nt, Artificial Sequence
  Description of Artificial Sequence: Synthetic oligonucleotide
uccacauaauggcggauaa

SEQ ID NO: 307216 - RNA, 19 nt, Artificial Sequence
  Description of Artificial Sequence: Synthetic oligonucleotide
uugaccacugagaugucau

SEQ ID NO: 307217 - RNA, 19 nt, Artificial Sequence
  Description of Artificial Sequence: Synthetic oligonucleotide
ucaacgucagaaugucugu

SEQ ID NO: 307218 - RNA, 19 nt, Artificial Sequence
  Description of Artificial Sequence: Synthetic oligonucleotide
acacgaaggaagaauuuag

SEQ ID NO: 307219 - RNA, 19 nt, Artificial Sequence
  Description of Artificial Sequence: Synthetic oligonucleotide
gucgguugaugauugcugc

SEQ ID NO: 307220 - RNA, 19 nt, Artificial Sequence
  Description of Artificial Sequence: Synthetic oligonucleotide
auaacuugcuaggucccgg

SEQ ID NO: 307221 - RNA, 19 nt, Artificial Sequence
  Description of Artificial Sequence: Synthetic oligonucleotide
uugcauaacuugcuagguc

SEQ ID NO: 307222 - RNA, 19 nt, Artificial Sequence
  Description of Artificial Sequence: Synthetic oligonucleotide
uaaccgacugugcuucuga

SEQ ID NO: 307223 - RNA, 19 nt, Artificial Sequence
  Description of Artificial Sequence: Synthetic oligonucleotide
ggaucuacgagaggcaagg

SEQ ID NO: 307224 - RNA, 19 nt, Artificial Sequence
  Description of Artificial Sequence: Synthetic oligonucleotide
caacgcucaucgaugcugg

SEQ ID NO: 307225 - RNA, 19 nt, Artificial Sequence
  Description of Artificial Sequence: Synthetic oligonucleotide
gacccagugacuccaauaa

SEQ ID NO: 307226 - RNA, 19 nt, Artificial Sequence
  Description of Artificial Sequence: Synthetic oligonucleotide
guuacaagccccggagugg

SEQ ID NO: 307227 - RNA, 19 nt, Artificial Sequence
  Description of Artificial Sequence: Synthetic oligonucleotide
ggguugauugcauaacuug

SEQ ID NO: 307228 - RNA, 19 nt, Artificial Sequence
  Description of Artificial Sequence: Synthetic oligonucleotide
gcggcgacaacgcucaucg

SEQ ID NO: 307229 - RNA, 19 nt, Artificial Sequence
  Description of Artificial Sequence: Synthetic oligonucleotide
cuaaaaccuaaguaaccga

SEQ ID NO: 307230 - RNA, 19 nt, Artificial Sequence
  Description of Artificial Sequence: Synthetic oligonucleotide
acaacgcucaucgaugcug

SEQ ID NO: 307231 - RNA, 19 nt, Artificial Sequence
  Description of Artificial Sequence: Synthetic oligonucleotide
uauauguguguguguggcu

SEQ ID NO: 307232 - RNA, 19 nt, Artificial Sequence
  Description of Artificial Sequence: Synthetic oligonucleotide
cacugagaugucaucuggc

SEQ ID NO: 307233 - RNA, 19 nt, Artificial Sequence
  Description of Artificial Sequence: Synthetic oligonucleotide
uaacuugcuaggucccggc

SEQ ID NO: 307234 - RNA, 19 nt, Artificial Sequence
  Description of Artificial Sequence: Synthetic oligonucleotide
gacgugguaucucauucuc

SEQ ID NO: 307235 - RNA, 19 nt, Artificial Sequence
  Description of Artificial Sequence: Synthetic oligonucleotide
gaggcuaucucuacaagaa

SEQ ID NO: 307236 - RNA, 19 nt, Artificial Sequence
  Description of Artificial Sequence: Synthetic oligonucleotide
ugcaaacguaggaaaccac

SEQ ID NO: 307237 - RNA, 19 nt, Artificial Sequence
  Description of Artificial Sequence: Synthetic oligonucleotide
uuacgcugcugcugguagg

SEQ ID NO: 307238 - RNA, 19 nt, Artificial Sequence
  Description of Artificial Sequence: Synthetic oligonucleotide
gaucccauuggucgguuga

SEQ ID NO: 307239 - RNA, 19 nt, Artificial Sequence
  Description of Artificial Sequence: Synthetic oligonucleotide
auuucacguaccuccuugu

SEQ ID NO: 307240 - RNA, 19 nt, Artificial Sequence
  Description of Artificial Sequence: Synthetic oligonucleotide
ugacgugguaucucauucu

SEQ ID NO: 307241 - RNA, 19 nt, Artificial Sequence
  Description of Artificial Sequence: Synthetic oligonucleotide
cauaauggcggauaagccu

SEQ ID NO: 307242 - RNA, 19 nt, Artificial Sequence
  Description of Artificial Sequence: Synthetic oligonucleotide
ggcaccggaaaaucgggcg

SEQ ID NO: 307243 - RNA, 19 nt, Artificial Sequence
  Description of Artificial Sequence: Synthetic oligonucleotide
cucaucguugaugcgcugg

SEQ ID NO: 307244 - RNA, 19 nt, Artificial Sequence
  Description of Artificial Sequence: Synthetic oligonucleotide
gacauggccacaugaacua

SEQ ID NO: 307245 - RNA, 19 nt, Artificial Sequence
  Description of Artificial Sequence: Synthetic oligonucleotide
uuuccuauuggggcggcga

SEQ ID NO: 307246 - RNA, 19 nt, Artificial Sequence
  Description of Artificial Sequence: Synthetic oligonucleotide
acgucagaaugucugugcu

SEQ ID NO: 307247 - RNA, 19 nt, Artificial Sequence
  Description of Artificial Sequence: Synthetic oligonucleotide
gcaguuauacugcuugcgc

SEQ ID NO: 307248 - RNA, 19 nt, Artificial Sequence
  Description of Artificial Sequence: Synthetic oligonucleotide
cauaaggugccugucugug

SEQ ID NO: 307249 - RNA, 19 nt, Artificial Sequence
  Description of Artificial Sequence: Synthetic oligonucleotide
cauaacuugcuaggucccg

SEQ ID NO: 307250 - RNA, 19 nt, Artificial Sequence
  Description of Artificial Sequence: Synthetic oligonucleotide
uacucaacgucagaauguc

SEQ ID NO: 307251 - RNA, 19 nt, Artificial Sequence
  Description of Artificial Sequence: Synthetic oligonucleotide
uuucacguaccuccuuguc

SEQ ID NO: 307252 - RNA, 19 nt, Artificial Sequence
  Description of Artificial Sequence: Synthetic oligonucleotide
auuggucgguugaugauug

SEQ ID NO: 307253 - RNA, 19 nt, Artificial Sequence
  Description of Artificial Sequence: Synthetic oligonucleotide
caguuauacugcuugcgca

SEQ ID NO: 307254 - RNA, 19 nt, Artificial Sequence
  Description of Artificial Sequence: Synthetic oligonucleotide
gcggauaagccucagccgc

SEQ ID NO: 307255 - RNA, 19 nt, Artificial Sequence
  Description of Artificial Sequence: Synthetic oligonucleotide
accucucgggguugauugc

SEQ ID NO: 307256 - RNA, 19 nt, Artificial Sequence
  Description of Artificial Sequence: Synthetic oligonucleotide
gucagaaugucugugcuaa

SEQ ID NO: 307257 - RNA, 19 nt, Artificial Sequence
  Description of Artificial Sequence: Synthetic oligonucleotide
uucuuguuacaagccccgg

SEQ ID NO: 307258 - RNA, 19 nt, Artificial Sequence
  Description of Artificial Sequence: Synthetic oligonucleotide
cagagugggacuucuaaaa

SEQ ID NO: 307259 - RNA, 19 nt, Artificial Sequence
  Description of Artificial Sequence: Synthetic oligonucleotide
uuauucccugacaaacauu

SEQ ID NO: 307260 - RNA, 19 nt, Artificial Sequence
  Description of Artificial Sequence: Synthetic oligonucleotide
cucuaccuugaccacugag

SEQ ID NO: 307261 - RNA, 19 nt, Artificial Sequence
  Description of Artificial Sequence: Synthetic oligonucleotide
ggaaugguagaaagugagg

SEQ ID NO: 307262 - RNA, 19 nt, Artificial Sequence
  Description of Artificial Sequence: Synthetic oligonucleotide
cucgcccucgaaguuaucc

SEQ ID NO: 307263 - RNA, 19 nt, Artificial Sequence
  Description of Artificial Sequence: Synthetic oligonucleotide
gauucgaacacuauacauu

SEQ ID NO: 307264 - RNA, 19 nt, Artificial Sequence
  Description of Artificial Sequence: Synthetic oligonucleotide
ugcuccgugucccugcguc

SEQ ID NO: 307265 - RNA, 19 nt, Artificial Sequence
  Description of Artificial Sequence: Synthetic oligonucleotide
cuccagaguccacacgcgg

SEQ ID NO: 307266 - RNA, 19 nt, Artificial Sequence
  Description of Artificial Sequence: Synthetic oligonucleotide
aucccgcggggccucaccc

SEQ ID NO: 307267 - RNA, 19 nt, Artificial Sequence
  Description of Artificial Sequence: Synthetic oligonucleotide
acauuccgcacucuagaaa

SEQ ID NO: 307268 - RNA, 19 nt, Artificial Sequence
  Description of Artificial Sequence: Synthetic oligonucleotide
uuacaagccccggaguggu

SEQ ID NO: 307269 - RNA, 19 nt, Artificial Sequence
  Description of Artificial Sequence: Synthetic oligonucleotide
uaauggcggauaagccuca

SEQ ID NO: 307270 - RNA, 19 nt, Artificial Sequence
  Description of Artificial Sequence: Synthetic oligonucleotide
ugcugcacgauuucacgua

SEQ ID NO: 307271 - RNA, 19 nt, Artificial Sequence
  Description of Artificial Sequence: Synthetic oligonucleotide
ugucuguggguaccauaca

SEQ ID NO: 307272 - RNA, 19 nt, Artificial Sequence
  Description of Artificial Sequence: Synthetic oligonucleotide
caaacuaguggaagcagua

SEQ ID NO: 307273 - RNA, 19 nt, Artificial Sequence
  Description of Artificial Sequence: Synthetic oligonucleotide
  modified_base (7)..(7): a, c, u, g, unknown or other
cugaacnuaguggcggauc

SEQ ID NO: 307274 - RNA, 19 nt, Artificial Sequence
  Description of Artificial Sequence: Synthetic oligonucleotide
ggcggauaagccucagccg

SEQ ID NO: 307275 - RNA, 19 nt, Artificial Sequence
  Description of Artificial Sequence: Synthetic oligonucleotide
ugcucaugcuaggauguca

SEQ ID NO: 307276 - RNA, 19 nt, Artificial Sequence
  Description of Artificial Sequence: Synthetic oligonucleotide
ucuugaggauaucgcacuu

SEQ ID NO: 307277 - RNA, 19 nt, Artificial Sequence
  Description of Artificial Sequence: Synthetic oligonucleotide
ugcuaaucuuuaguccucu

SEQ ID NO: 307278 - RNA, 19 nt, Artificial Sequence
  Description of Artificial Sequence: Synthetic oligonucleotide
uuccuauuggggcggcgac

SEQ ID NO: 307279 - RNA, 19 nt, Artificial Sequence
  Description of Artificial Sequence: Synthetic oligonucleotide
agugaccacuaaguagauc

SEQ ID NO: 307280 - RNA, 19 nt, Artificial Sequence
  Description of Artificial Sequence: Synthetic oligonucleotide
aaaaucgggcgaggggaca

SEQ ID NO: 307281 - RNA, 19 nt, Artificial Sequence
  Description of Artificial Sequence: Synthetic oligonucleotide
uuuuccuauuggggcggcg

SEQ ID NO: 307282 - RNA, 19 nt, Artificial Sequence
  Description of Artificial Sequence: Synthetic oligonucleotide
cccacugacauaaggugcc

SEQ ID NO: 307283 - RNA, 19 nt, Artificial Sequence
  Description of Artificial Sequence: Synthetic oligonucleotide
ucgaagguucucagccgug

SEQ ID NO: 307284 - RNA, 19 nt, Artificial Sequence
  Description of Artificial Sequence: Synthetic oligonucleotide
  modified_base (9)..(9): a, c, u, g, unknown or other
agcugaacnuaguggcgga

SEQ ID NO: 307285 - RNA, 19 nt, Artificial Sequence
  Description of Artificial Sequence: Synthetic oligonucleotide
uggucgguugaugauugcu

SEQ ID NO: 307286 - RNA, 19 nt, Artificial Sequence
  Description of Artificial Sequence: Synthetic oligonucleotide
uaccuuacucaacgucaga

SEQ ID NO: 307287 - RNA, 19 nt, Artificial Sequence
  Description of Artificial Sequence: Synthetic oligonucleotide
uuccacauaauggcggaua

SEQ ID NO: 307288 - RNA, 19 nt, Artificial Sequence
  Description of Artificial Sequence: Synthetic oligonucleotide
aagggugcacucaaucaau

SEQ ID NO: 307289 - RNA, 19 nt, Artificial Sequence
  Description of Artificial Sequence: Synthetic oligonucleotide
cuaaucuuuaguccucugu

SEQ ID NO: 307290 - RNA, 19 nt, Artificial Sequence
  Description of Artificial Sequence: Synthetic oligonucleotide
caauucucacauggcuugg

SEQ ID NO: 307291 - RNA, 19 nt, Artificial Sequence
  Description of Artificial Sequence: Synthetic oligonucleotide
aaucgggcgaggggacaac

SEQ ID NO: 307292 - RNA, 19 nt, Artificial Sequence
  Description of Artificial Sequence: Synthetic oligonucleotide
ugcucggucccaagggcac

SEQ ID NO: 307293 - RNA, 19 nt, Artificial Sequence
  Description of Artificial Sequence: Synthetic oligonucleotide
aguugcuaaagagcauaca

SEQ ID NO: 307294 - RNA, 19 nt, Artificial Sequence
  Description of Artificial Sequence: Synthetic oligonucleotide
gcagacaugacgugguauc

SEQ ID NO: 307295 - RNA, 19 nt, Artificial Sequence
  Description of Artificial Sequence: Synthetic oligonucleotide
ucguagcagucaucccgcg

SEQ ID NO: 307296 - RNA, 19 nt, Artificial Sequence
  Description of Artificial Sequence: Synthetic oligonucleotide
auaacacuagacacuuuau

SEQ ID NO: 307297 - RNA, 19 nt, Artificial Sequence
  Description of Artificial Sequence: Synthetic oligonucleotide
  modified_base (2)..(2): a, c, u, g, unknown or other
cnuaguggcggaucaaccu

SEQ ID NO: 307298 - RNA, 19 nt, Artificial Sequence
  Description of Artificial Sequence: Synthetic oligonucleotide
gucgacagcgcucguccag

SEQ ID NO: 307299 - RNA, 19 nt, Artificial Sequence
  Description of Artificial Sequence: Synthetic oligonucleotide
accgacugugcuucugaca

SEQ ID NO: 307300 - RNA, 19 nt, Artificial Sequence
  Description of Artificial Sequence: Synthetic oligonucleotide
augcugugguaugaucagg

SEQ ID NO: 307301 - RNA, 19 nt, Artificial Sequence
  Description of Artificial Sequence: Synthetic oligonucleotide
aaaucgggcgaggggacaa

SEQ ID NO: 307302 - RNA, 19 nt, Artificial Sequence
  Description of Artificial Sequence: Synthetic oligonucleotide
gcguauaugugugugugug

SEQ ID NO: 307303 - RNA, 19 nt, Artificial Sequence
  Description of Artificial Sequence: Synthetic oligonucleotide
gauaagccucagccgcgug

SEQ ID NO: 307304 - RNA, 19 nt, Artificial Sequence
  Description of Artificial Sequence: Synthetic oligonucleotide
agggugcacucaaucaauc

SEQ ID NO: 307305 - RNA, 19 nt, Artificial Sequence
  Description of Artificial Sequence: Synthetic oligonucleotide
guugauugcauaacuugcu

SEQ ID NO: 307306 - RNA, 19 nt, Artificial Sequence
  Description of Artificial Sequence: Synthetic oligonucleotide
cugcacgauuucacguacc

SEQ ID NO: 307307 - RNA, 19 nt, Artificial Sequence
  Description of Artificial Sequence: Synthetic oligonucleotide
gugcaaacguaggaaacca

SEQ ID NO: 307308 - RNA, 19 nt, Artificial Sequence
  Description of Artificial Sequence: Synthetic oligonucleotide
cuguauggcuggguaaaug

SEQ ID NO: 307309 - RNA, 19 nt, Artificial Sequence
  Description of Artificial Sequence: Synthetic oligonucleotide
aucguaacaggcagacaug

SEQ ID NO: 307310 - RNA, 19 nt, Artificial Sequence
  Description of Artificial Sequence: Synthetic oligonucleotide
gaggguagagcagcugaac

SEQ ID NO: 307311 - RNA, 19 nt, Artificial Sequence
  Description of Artificial Sequence: Synthetic oligonucleotide
cauagaugcuacgcagcug

SEQ ID NO: 307312 - RNA, 19 nt, Artificial Sequence
  Description of Artificial Sequence: Synthetic oligonucleotide
uucuaagggugcacucaau

SEQ ID NO: 307313 - RNA, 19 nt, Artificial Sequence
  Description of Artificial Sequence: Synthetic oligonucleotide
ucgacagcgcucguccagc

SEQ ID NO: 307314 - RNA, 19 nt, Artificial Sequence
  Description of Artificial Sequence: Synthetic oligonucleotide
caacgucagaaugucugug

SEQ ID NO: 307315 - RNA, 19 nt, Artificial Sequence
  Description of Artificial Sequence: Synthetic oligonucleotide
cacacgcggucguucuugg

SEQ ID NO: 307316 - RNA, 19 nt, Artificial Sequence
  Description of Artificial Sequence: Synthetic oligonucleotide
agguguuuacgugugcaaa

SEQ ID NO: 307317 - RNA, 19 nt, Artificial Sequence
  Description of Artificial Sequence: Synthetic oligonucleotide
aguccacacgcggucguuc

SEQ ID NO: 307318 - RNA, 19 nt, Artificial Sequence
  Description of Artificial Sequence: Synthetic oligonucleotide
uuggugcguauaugugugu

SEQ ID NO: 307319 - RNA, 19 nt, Artificial Sequence
  Description of Artificial Sequence: Synthetic oligonucleotide
gacauuaaggcuggaucua

SEQ ID NO: 307320 - RNA, 19 nt, Artificial Sequence
  Description of Artificial Sequence: Synthetic oligonucleotide
gcucaugcuaggaugucag

SEQ ID NO: 307321 - RNA, 19 nt, Artificial Sequence
  Description of Artificial Sequence: Synthetic oligonucleotide
auguguguguguggcuggg

SEQ ID NO: 307322 - RNA, 19 nt, Artificial Sequence
  Description of Artificial Sequence: Synthetic oligonucleotide
ggucgguugaugauugcug

SEQ ID NO: 307323 - RNA, 19 nt, Artificial Sequence
  Description of Artificial Sequence: Synthetic oligonucleotide
guuuacgugugcaaacgua

SEQ ID NO: 307324 - RNA, 19 nt, Artificial Sequence
  Description of Artificial Sequence: Synthetic oligonucleotide
uuggucgguugaugauugc

SEQ ID NO: 307325 - RNA, 19 nt, Artificial Sequence
  Description of Artificial Sequence: Synthetic oligonucleotide
agaguccacacgcggucgu

SEQ ID NO: 307326 - RNA, 19 nt, Artificial Sequence
  Description of Artificial Sequence: Synthetic oligonucleotide
ccucucugaaccucucggg

SEQ ID NO: 307327 - RNA, 19 nt, Artificial Sequence
  Description of Artificial Sequence: Synthetic oligonucleotide
ucccauuggucgguugaug

SEQ ID NO: 307328 - RNA, 19 nt, Artificial Sequence
  Description of Artificial Sequence: Synthetic oligonucleotide
ggugcacucaaucaaucgu

SEQ ID NO: 307329 - RNA, 19 nt, Artificial Sequence
  Description of Artificial Sequence: Synthetic oligonucleotide
ugggguuggugcguauaug

SEQ ID NO: 307330 - RNA, 19 nt, Artificial Sequence
  Description of Artificial Sequence: Synthetic oligonucleotide
acguaccuccuuguccgac

SEQ ID NO: 307331 - RNA, 19 nt, Artificial Sequence
  Description of Artificial Sequence: Synthetic oligonucleotide
ugguuguacugcagucgaa

SEQ ID NO: 307332 - RNA, 19 nt, Artificial Sequence
  Description of Artificial Sequence: Synthetic oligonucleotide
uccuauuggggcggcgaca

SEQ ID NO: 307333 - RNA, 19 nt, Artificial Sequence
  Description of Artificial Sequence: Synthetic oligonucleotide
cugacauaaggugccuguc

SEQ ID NO: 307334 - RNA, 19 nt, Artificial Sequence
  Description of Artificial Sequence: Synthetic oligonucleotide
cguauaugugugugugugg

SEQ ID NO: 307335 - RNA, 19 nt, Artificial Sequence
  Description of Artificial Sequence: Synthetic oligonucleotide
cucgggguugauugcauaa

SEQ ID NO: 307336 - RNA, 19 nt, Artificial Sequence
  Description of Artificial Sequence: Synthetic oligonucleotide
guaggaacucugauaccca

SEQ ID NO: 307337 - RNA, 19 nt, Artificial Sequence
  Description of Artificial Sequence: Synthetic oligonucleotide
caccggaaaaucgggcgag

SEQ ID NO: 307338 - RNA, 19 nt, Artificial Sequence
  Description of Artificial Sequence: Synthetic oligonucleotide
ggauucgaacacuauacau

SEQ ID NO: 307339 - RNA, 19 nt, Artificial Sequence
  Description of Artificial Sequence: Synthetic oligonucleotide
aguaaccgacugugcuucu

SEQ ID NO: 307340 - RNA, 19 nt, Artificial Sequence
  Description of Artificial Sequence: Synthetic oligonucleotide
accggaaaaucgggcgagg

SEQ ID NO: 307341 - RNA, 19 nt, Artificial Sequence
  Description of Artificial Sequence: Synthetic oligonucleotide
guaaccgacugugcuucug

SEQ ID NO: 307342 - RNA, 19 nt, Artificial Sequence
  Description of Artificial Sequence: Synthetic oligonucleotide
gcgucgacagcgcucgucc

SEQ ID NO: 307343 - RNA, 19 nt, Artificial Sequence
  Description of Artificial Sequence: Synthetic oligonucleotide
gguaaggggaaggcaccgg

SEQ ID NO: 307344 - RNA, 19 nt, Artificial Sequence
  Description of Artificial Sequence: Synthetic oligonucleotide
acccagugacuccaauaaa

SEQ ID NO: 307345 - RNA, 19 nt, Artificial Sequence
  Description of Artificial Sequence: Synthetic oligonucleotide
acgauuucacguaccuccu

SEQ ID NO: 307346 - RNA, 19 nt, Artificial Sequence
  Description of Artificial Sequence: Synthetic oligonucleotide
cacauuccgcacucuagaa

SEQ ID NO: 307347 - RNA, 19 nt, Artificial Sequence
  Description of Artificial Sequence: Synthetic oligonucleotide
gcgacaacgcucaucgaug

SEQ ID NO: 307348 - RNA, 19 nt, Artificial Sequence
  Description of Artificial Sequence: Synthetic oligonucleotide
caucguugaugcgcugggc

SEQ ID NO: 307349 - RNA, 19 nt, Artificial Sequence
  Description of Artificial Sequence: Synthetic oligonucleotide
gccgugaagaguucaggga

SEQ ID NO: 307350 - RNA, 19 nt, Artificial Sequence
  Description of Artificial Sequence: Synthetic oligonucleotide
agccccggagugguuguac

SEQ ID NO: 307351 - RNA, 19 nt, Artificial Sequence
  Description of Artificial Sequence: Synthetic oligonucleotide
ugcuaggaugucagacauu

SEQ ID NO: 307352 - RNA, 19 nt, Artificial Sequence
  Description of Artificial Sequence: Synthetic oligonucleotide
ggcacucggggccaggcac

SEQ ID NO: 307353 - RNA, 19 nt, Artificial Sequence
  Description of Artificial Sequence: Synthetic oligonucleotide
auuagcucccagaguggga

SEQ ID NO: 307354 - RNA, 19 nt, Artificial Sequence
  Description of Artificial Sequence: Synthetic oligonucleotide
cacuuuagaaugacccagu

SEQ ID NO: 307355 - RNA, 19 nt, Artificial Sequence
  Description of Artificial Sequence: Synthetic oligonucleotide
guacugcagucgaagguuc

SEQ ID NO: 307356 - RNA, 19 nt, Artificial Sequence
  Description of Artificial Sequence: Synthetic oligonucleotide
uaggagcgccgcugcuccg

SEQ ID NO: 307357 - RNA, 19 nt, Artificial Sequence
  Description of Artificial Sequence: Synthetic oligonucleotide
gccccugucacuucuccac

SEQ ID NO: 307358 - RNA, 19 nt, Artificial Sequence
  Description of Artificial Sequence: Synthetic oligonucleotide
cacugacauaaggugccug

SEQ ID NO: 307359 - RNA, 19 nt, Artificial Sequence
  Description of Artificial Sequence: Synthetic oligonucleotide
  modified_base (17)..(17): a, c, u, g, unknown or other
gguagagcagcugaacnua

SEQ ID NO: 307360 - RNA, 19 nt, Artificial Sequence
  Description of Artificial Sequence: Synthetic oligonucleotide
uguguguguguggcugggu

SEQ ID NO: 307361 - RNA, 19 nt, Artificial Sequence
  Description of Artificial Sequence: Synthetic oligonucleotide
  modified_base (5)..(5): a, c, u, g, unknown or other
gaacnuaguggcggaucaa

SEQ ID NO: 307362 - RNA, 19 nt, Artificial Sequence
  Description of Artificial Sequence: Synthetic oligonucleotide
gcacucaaucaaucguaac

SEQ ID NO: 307363 - RNA, 19 nt, Artificial Sequence
  Description of Artificial Sequence: Synthetic oligonucleotide
cuuguccgacagcagguaa

SEQ ID NO: 307364 - RNA, 19 nt, Artificial Sequence
  Description of Artificial Sequence: Synthetic oligonucleotide
caagcggccaugcuguggu

SEQ ID NO: 307365 - RNA, 19 nt, Artificial Sequence
  Description of Artificial Sequence: Synthetic oligonucleotide
acgugguaucucauucucu

SEQ ID NO: 307366 - RNA, 19 nt, Artificial Sequence
  Description of Artificial Sequence: Synthetic oligonucleotide
ggaccuuacgcugcugcug

SEQ ID NO: 307367 - RNA, 19 nt, Artificial Sequence
  Description of Artificial Sequence: Synthetic oligonucleotide
ggacccgcugcaguuauac

SEQ ID NO: 307368 - RNA, 19 nt, Artificial Sequence
  Description of Artificial Sequence: Synthetic oligonucleotide
agggacccgcugcaguuau

SEQ ID NO: 307369 - RNA, 19 nt, Artificial Sequence
  Description of Artificial Sequence: Synthetic oligonucleotide
gaucuacgagaggcaagga

SEQ ID NO: 307370 - RNA, 19 nt, Artificial Sequence
  Description of Artificial Sequence: Synthetic oligonucleotide
ggguaaaugagggaccaua

SEQ ID NO: 307371 - RNA, 19 nt, Artificial Sequence
  Description of Artificial Sequence: Synthetic oligonucleotide
acucaacgucagaaugucu

SEQ ID NO: 307372 - RNA, 19 nt, Artificial Sequence
  Description of Artificial Sequence: Synthetic oligonucleotide
ugcgucgacagcgcucguc

SEQ ID NO: 307373 - RNA, 19 nt, Artificial Sequence
  Description of Artificial Sequence: Synthetic oligonucleotide
cuggaucuacgagaggcaa

SEQ ID NO: 307374 - RNA, 19 nt, Artificial Sequence
  Description of Artificial Sequence: Synthetic oligonucleotide
gcaaacguaggaaaccacu

SEQ ID NO: 307375 - RNA, 19 nt, Artificial Sequence
  Description of Artificial Sequence: Synthetic oligonucleotide
ugagccccucaccccuuaa

SEQ ID NO: 307376 - RNA, 19 nt, Artificial Sequence
  Description of Artificial Sequence: Synthetic oligonucleotide
uccgugucccugcgucgac

SEQ ID NO: 307377 - RNA, 19 nt, Artificial Sequence
  Description of Artificial Sequence: Synthetic oligonucleotide
cgacaacgcucaucgaugc

SEQ ID NO: 307378 - RNA, 19 nt, Artificial Sequence
  Description of Artificial Sequence: Synthetic oligonucleotide
cugcugguaggagcgccgc

SEQ ID NO: 307379 - RNA, 19 nt, Artificial Sequence
  Description of Artificial Sequence: Synthetic oligonucleotide
cuacgagaggcaaggaauu

SEQ ID NO: 307380 - RNA, 19 nt, Artificial Sequence
  Description of Artificial Sequence: Synthetic oligonucleotide
ucccugcgucgacagcgcu

SEQ ID NO: 307381 - RNA, 19 nt, Artificial Sequence
  Description of Artificial Sequence: Synthetic oligonucleotide
cacgcggucguucuuggcu

SEQ ID NO: 307382 - RNA, 19 nt, Artificial Sequence
  Description of Artificial Sequence: Synthetic oligonucleotide
caucccgcggggccucacc

SEQ ID NO: 307383 - RNA, 19 nt, Artificial Sequence
  Description of Artificial Sequence: Synthetic oligonucleotide
ccgugaagaguucagggaa

SEQ ID NO: 307384 - RNA, 19 nt, Artificial Sequence
  Description of Artificial Sequence: Synthetic oligonucleotide
ggcgacaacgcucaucgau

SEQ ID NO: 307385 - RNA, 19 nt, Artificial Sequence
  Description of Artificial Sequence: Synthetic oligonucleotide
ccacauuccgcacucuaga

SEQ ID NO: 307386 - RNA, 19 nt, Artificial Sequence
  Description of Artificial Sequence: Synthetic oligonucleotide
ggccaaauccagugaccac

SEQ ID NO: 307387 - RNA, 19 nt, Artificial Sequence
  Description of Artificial Sequence: Synthetic oligonucleotide
gacaacgcucaucgaugcu

SEQ ID NO: 307388 - RNA, 19 nt, Artificial Sequence
  Description of Artificial Sequence: Synthetic oligonucleotide
gcaccggaaaaucgggcga

SEQ ID NO: 307389 - RNA, 19 nt, Artificial Sequence
  Description of Artificial Sequence: Synthetic oligonucleotide
aucccauuggucgguugau

SEQ ID NO: 307390 - RNA, 19 nt, Artificial Sequence
  Description of Artificial Sequence: Synthetic oligonucleotide
cacccacugugacauacua

SEQ ID NO: 307391 - RNA, 19 nt, Artificial Sequence
  Description of Artificial Sequence: Synthetic oligonucleotide
ggccaggaaauuagcuccc

SEQ ID NO: 307392 - RNA, 19 nt, Artificial Sequence
  Description of Artificial Sequence: Synthetic oligonucleotide
caugaacuaaaagcaggau

SEQ ID NO: 307393 - RNA, 19 nt, Artificial Sequence
  Description of Artificial Sequence: Synthetic oligonucleotide
cguagcagucaucccgcgg

SEQ ID NO: 307394 - RNA, 19 nt, Artificial Sequence
  Description of Artificial Sequence: Synthetic oligonucleotide
accuuacgcugcugcuggu

SEQ ID NO: 307395 - RNA, 19 nt, Artificial Sequence
  Description of Artificial Sequence: Synthetic oligonucleotide
cacuccccacugacauaag

SEQ ID NO: 307396 - RNA, 19 nt, Artificial Sequence
  Description of Artificial Sequence: Synthetic oligonucleotide
caaucguaacaggcagaca

SEQ ID NO: 307397 - RNA, 19 nt, Artificial Sequence
  Description of Artificial Sequence: Synthetic oligonucleotide
ccacauaauggcggauaag

SEQ ID NO: 307398 - RNA, 19 nt, Artificial Sequence
  Description of Artificial Sequence: Synthetic oligonucleotide
ccucauuguuuacuccuca

SEQ ID NO: 307399 - RNA, 19 nt, Artificial Sequence
  Description of Artificial Sequence: Synthetic oligonucleotide
gaacccaagcggccaugcu

SEQ ID NO: 307400 - RNA, 19 nt, Artificial Sequence
  Description of Artificial Sequence: Synthetic oligonucleotide
uacaagccccggagugguu

SEQ ID NO: 307401 - RNA, 19 nt, Artificial Sequence
  Description of Artificial Sequence: Synthetic oligonucleotide
aggggacaaccagcucauc

SEQ ID NO: 307402 - RNA, 19 nt, Artificial Sequence
  Description of Artificial Sequence: Synthetic oligonucleotide
cauuggucgguugaugauu

SEQ ID NO: 307403 - RNA, 19 nt, Artificial Sequence
  Description of Artificial Sequence: Synthetic oligonucleotide
aggagcgccgcugcuccgu

SEQ ID NO: 307404 - RNA, 19 nt, Artificial Sequence
  Description of Artificial Sequence: Synthetic oligonucleotide
cugacauugcagggccaca

SEQ ID NO: 307405 - RNA, 19 nt, Artificial Sequence
  Description of Artificial Sequence: Synthetic oligonucleotide
guccacacgcggucguucu

SEQ ID NO: 307406 - RNA, 19 nt, Artificial Sequence
  Description of Artificial Sequence: Synthetic oligonucleotide
ccaagcggccaugcugugg

SEQ ID NO: 307407 - RNA, 19 nt, Artificial Sequence
  Description of Artificial Sequence: Synthetic oligonucleotide
ggggcggcgacaacgcuca

SEQ ID NO: 307408 - RNA, 19 nt, Artificial Sequence
  Description of Artificial Sequence: Synthetic oligonucleotide
gcgcucguccagcuugccc

SEQ ID NO: 307409 - RNA, 19 nt, Artificial Sequence
  Description of Artificial Sequence: Synthetic oligonucleotide
cuccgugucccugcgucga

SEQ ID NO: 307410 - RNA, 19 nt, Artificial Sequence
  Description of Artificial Sequence: Synthetic oligonucleotide
ccgggcagcgaaguugccc

SEQ ID NO: 307411 - RNA, 19 nt, Artificial Sequence
  Description of Artificial Sequence: Synthetic oligonucleotide
gccucagccgcgugggguc

SEQ ID NO: 307412 - RNA, 19 nt, Artificial Sequence
  Description of Artificial Sequence: Synthetic oligonucleotide
ccacacgcggucguucuug

SEQ ID NO: 307413 - RNA, 19 nt, Artificial Sequence
  Description of Artificial Sequence: Synthetic oligonucleotide
cacguaccuccuuguccga

SEQ ID NO: 307414 - RNA, 19 nt, Artificial Sequence
  Description of Artificial Sequence: Synthetic oligonucleotide
gcacgauuucacguaccuc

SEQ ID NO: 307415 - RNA, 19 nt, Artificial Sequence
  Description of Artificial Sequence: Synthetic oligonucleotide
ccuuacucaacgucagaau

SEQ ID NO: 307416 - RNA, 19 nt, Artificial Sequence
  Description of Artificial Sequence: Synthetic oligonucleotide
gaaccucucgggguugauu

SEQ ID NO: 307417 - RNA, 19 nt, Artificial Sequence
  Description of Artificial Sequence: Synthetic oligonucleotide
cccugcgucgacagcgcuc

SEQ ID NO: 307418 - RNA, 19 nt, Artificial Sequence
  Description of Artificial Sequence: Synthetic oligonucleotide
cgcucaucgaugcugggua

SEQ ID NO: 307419 - RNA, 19 nt, Artificial Sequence
  Description of Artificial Sequence: Synthetic oligonucleotide
gccaggaaauuagcuccca

SEQ ID NO: 307420 - RNA, 19 nt, Artificial Sequence
  Description of Artificial Sequence: Synthetic oligonucleotide
ggcggcgacaacgcucauc

SEQ ID NO: 307421 - RNA, 19 nt, Artificial Sequence
  Description of Artificial Sequence: Synthetic oligonucleotide
ggauaagccucagccgcgu

SEQ ID NO: 307422 - RNA, 19 nt, Artificial Sequence
  Description of Artificial Sequence: Synthetic oligonucleotide
gccuaaccaggagccgggc

SEQ ID NO: 307423 - RNA, 19 nt, Artificial Sequence
  Description of Artificial Sequence: Synthetic oligonucleotide
acucggggccaggcacgug

SEQ ID NO: 307424 - RNA, 19 nt, Artificial Sequence
  Description of Artificial Sequence: Synthetic oligonucleotide
cuuccacauaauggcggau

SEQ ID NO: 307425 - RNA, 19 nt, Artificial Sequence
  Description of Artificial Sequence: Synthetic oligonucleotide
ccauuggucgguugaugau

SEQ ID NO: 307426 - RNA, 19 nt, Artificial Sequence
  Description of Artificial Sequence: Synthetic oligonucleotide
gaugagccccucaccccuu

SEQ ID NO: 307427 - RNA, 19 nt, Artificial Sequence
  Description of Artificial Sequence: Synthetic oligonucleotide
gcaagcuggaggagucgua

SEQ ID NO: 307428 - RNA, 19 nt, Artificial Sequence
  Description of Artificial Sequence: Synthetic oligonucleotide
ccgcggggccucacccucg

SEQ ID NO: 307429 - RNA, 19 nt, Artificial Sequence
  Description of Artificial Sequence: Synthetic oligonucleotide
gcucccagagugggacuuc

SEQ ID NO: 307430 - RNA, 19 nt, Artificial Sequence
  Description of Artificial Sequence: Synthetic oligonucleotide
gaguccacacgcggucguu

SEQ ID NO: 307431 - RNA, 19 nt, Artificial Sequence
  Description of Artificial Sequence: Synthetic oligonucleotide
  modified_base (8)..(8): a, c, u, g, unknown or other
gcugaacnuaguggcggau

SEQ ID NO: 307432 - RNA, 19 nt, Artificial Sequence
  Description of Artificial Sequence: Synthetic oligonucleotide
cgaaguuauccucuaccuu

SEQ ID NO: 307433 - RNA, 19 nt, Artificial Sequence
  Description of Artificial Sequence: Synthetic oligonucleotide
cucagccgcguggggucca

SEQ ID NO: 307434 - RNA, 19 nt, Artificial Sequence
  Description of Artificial Sequence: Synthetic oligonucleotide
ccacccacugugacauacu

SEQ ID NO: 307435 - RNA, 19 nt, Artificial Sequence
  Description of Artificial Sequence: Synthetic oligonucleotide
cgucgacagcgcucgucca

SEQ ID NO: 307436 - RNA, 19 nt, Artificial Sequence
  Description of Artificial Sequence: Synthetic oligonucleotide
gcggucguucuuggcucga

SEQ ID NO: 307437 - RNA, 19 nt, Artificial Sequence
  Description of Artificial Sequence: Synthetic oligonucleotide
ccgugucccugcgucgaca

SEQ ID NO: 307438 - RNA, 19 nt, Artificial Sequence
  Description of Artificial Sequence: Synthetic oligonucleotide
ccuguauggcuggguaaau

SEQ ID NO: 307439 - RNA, 19 nt, Artificial Sequence
  Description of Artificial Sequence: Synthetic oligonucleotide
gggacccgcugcaguuaua

SEQ ID NO: 307440 - RNA, 19 nt, Artificial Sequence
  Description of Artificial Sequence: Synthetic oligonucleotide
gcucgcccucgaaguuauc

SEQ ID NO: 307441 - RNA, 19 nt, Artificial Sequence
  Description of Artificial Sequence: Synthetic oligonucleotide
cggcacucggggccaggca

SEQ ID NO: 307442 - RNA, 19 nt, Artificial Sequence
  Description of Artificial Sequence: Synthetic oligonucleotide
cugcgucgacagcgcucgu

SEQ ID NO: 307443 - RNA, 19 nt, Artificial Sequence
  Description of Artificial Sequence: Synthetic oligonucleotide
cggcgacaacgcucaucga

SEQ ID NO: 307444 - RNA, 19 nt, Artificial Sequence
  Description of Artificial Sequence: Synthetic oligonucleotide
  modified_base (1)..(1): a, c, u, g, unknown or other
nuaguggcggaucaaccug

SEQ ID NO: 307445 - RNA, 19 nt, Artificial Sequence
  Description of Artificial Sequence: Synthetic oligonucleotide
aauuuugugccuuucuaac

SEQ ID NO: 307446 - RNA, 19 nt, Artificial Sequence
  Description of Artificial Sequence: Synthetic oligonucleotide
uaugcuauguacaacacug

SEQ ID NO: 307447 - RNA, 19 nt, Artificial Sequence
  Description of Artificial Sequence: Synthetic oligonucleotide
aagagaaucggaaaacucc

SEQ ID NO: 307448 - RNA, 19 nt, Artificial Sequence
  Description of Artificial Sequence: Synthetic oligonucleotide
guugauagaaauuuugugc

SEQ ID NO: 307449 - RNA, 19 nt, Artificial Sequence
  Description of Artificial Sequence: Synthetic oligonucleotide
auaaagacucacuaugagg

SEQ ID NO: 307450 - RNA, 19 nt, Artificial Sequence
  Description of Artificial Sequence: Synthetic oligonucleotide
uuuaucauggucagccugg

SEQ ID NO: 307451 - RNA, 19 nt, Artificial Sequence
  Description of Artificial Sequence: Synthetic oligonucleotide
gaaucggaaaacuccaugg

SEQ ID NO: 307452 - RNA, 19 nt, Artificial Sequence
  Description of Artificial Sequence: Synthetic oligonucleotide
uuagaauguaaaaugaaua

SEQ ID NO: 307453 - RNA, 19 nt, Artificial Sequence
  Description of Artificial Sequence: Synthetic oligonucleotide
aguuugagaucucuauucc

SEQ ID NO: 307454 - RNA, 19 nt, Artificial Sequence
  Description of Artificial Sequence: Synthetic oligonucleotide
acaguaauauacaaguuac

SEQ ID NO: 307455 - RNA, 19 nt, Artificial Sequence
  Description of Artificial Sequence: Synthetic oligonucleotide
aaauagauguguuugcuuu

SEQ ID NO: 307456 - RNA, 19 nt, Artificial Sequence
  Description of Artificial Sequence: Synthetic oligonucleotide
uccauaugauuuauuauug

SEQ ID NO: 307457 - RNA, 19 nt, Artificial Sequence
  Description of Artificial Sequence: Synthetic oligonucleotide
uagaauguaaaaugaauaa

SEQ ID NO: 307458 - RNA, 19 nt, Artificial Sequence
  Description of Artificial Sequence: Synthetic oligonucleotide
uauuacacugcuaaagcgu

SEQ ID NO: 307459 - RNA, 19 nt, Artificial Sequence
  Description of Artificial Sequence: Synthetic oligonucleotide
uaccgaacaaguaacagcu

SEQ ID NO: 307460 - RNA, 19 nt, Artificial Sequence
  Description of Artificial Sequence: Synthetic oligonucleotide
aaaggguauuggcaaauag

SEQ ID NO: 307461 - RNA, 19 nt, Artificial Sequence
  Description of Artificial Sequence: Synthetic oligonucleotide
agugguaaguugcauuggc

SEQ ID NO: 307462 - RNA, 19 nt, Artificial Sequence
  Description of Artificial Sequence: Synthetic oligonucleotide
aauuccgucuuugucauag

SEQ ID NO: 307463 - RNA, 19 nt, Artificial Sequence
  Description of Artificial Sequence: Synthetic oligonucleotide
ucuacagacaguauuuccu

SEQ ID NO: 307464 - RNA, 19 nt, Artificial Sequence
  Description of Artificial Sequence: Synthetic oligonucleotide
cucacuaugaggaugguuc

SEQ ID NO: 307465 - RNA, 19 nt, Artificial Sequence
  Description of Artificial Sequence: Synthetic oligonucleotide
acacuuaaacucuuucuac

SEQ ID NO: 307466 - RNA, 19 nt, Artificial Sequence
  Description of Artificial Sequence: Synthetic oligonucleotide
caggcuugcacucacagcg

SEQ ID NO: 307467 - RNA, 19 nt, Artificial Sequence
  Description of Artificial Sequence: Synthetic oligonucleotide
uauuauuguuccuuguaca

SEQ ID NO: 307468 - RNA, 19 nt, Artificial Sequence
  Description of Artificial Sequence: Synthetic oligonucleotide
uagaacaggguuaauaaau

SEQ ID NO: 307469 - RNA, 19 nt, Artificial Sequence
  Description of Artificial Sequence: Synthetic oligonucleotide
uacucaagugccuguaucg

SEQ ID NO: 307470 - RNA, 19 nt, Artificial Sequence
  Description of Artificial Sequence: Synthetic oligonucleotide
uuaguaccgaacaaguaac

SEQ ID NO: 307471 - RNA, 19 nt, Artificial Sequence
  Description of Artificial Sequence: Synthetic oligonucleotide
uuuuagacacgacaguagu

SEQ ID NO: 307472 - RNA, 19 nt, Artificial Sequence
  Description of Artificial Sequence: Synthetic oligonucleotide
aggguuaauaaauaaucug

SEQ ID NO: 307473 - RNA, 19 nt, Artificial Sequence
  Description of Artificial Sequence: Synthetic oligonucleotide
auuaucauggucaaaguca

SEQ ID NO: 307474 - RNA, 19 nt, Artificial Sequence
  Description of Artificial Sequence: Synthetic oligonucleotide
agaucucuauuccaauggc

SEQ ID NO: 307475 - RNA, 19 nt, Artificial Sequence
  Description of Artificial Sequence: Synthetic oligonucleotide
uuccugauaaauuauuuaa

SEQ ID NO: 307476 - RNA, 19 nt, Artificial Sequence
  Description of Artificial Sequence: Synthetic oligonucleotide
ugauuuaguaccgaacaag

SEQ ID NO: 307477 - RNA, 19 nt, Artificial Sequence
  Description of Artificial Sequence: Synthetic oligonucleotide
ucauaaagacucacuauga

SEQ ID NO: 307478 - RNA, 19 nt, Artificial Sequence
  Description of Artificial Sequence: Synthetic oligonucleotide
cauacaauugucucuuggc

SEQ ID NO: 307479 - RNA, 19 nt, Artificial Sequence
  Description of Artificial Sequence: Synthetic oligonucleotide
ugaaaagugaugacuucug

SEQ ID NO: 307480 - RNA, 19 nt, Artificial Sequence
  Description of Artificial Sequence: Synthetic oligonucleotide
uuaaacucuuucuacuugu

SEQ ID NO: 307481 - RNA, 19 nt, Artificial Sequence
  Description of Artificial Sequence: Synthetic oligonucleotide
uuggcauuaggcacguagg

SEQ ID NO: 307482 - RNA, 19 nt, Artificial Sequence
  Description of Artificial Sequence: Synthetic oligonucleotide
uaaagcguuuguuaaacaa

SEQ ID NO: 307483 - RNA, 19 nt, Artificial Sequence
  Description of Artificial Sequence: Synthetic oligonucleotide
agaugauagaacaaaacca

SEQ ID NO: 307484 - RNA, 19 nt, Artificial Sequence
  Description of Artificial Sequence: Synthetic oligonucleotide
aacaaaugagguaauauuu

SEQ ID NO: 307485 - RNA, 19 nt, Artificial Sequence
  Description of Artificial Sequence: Synthetic oligonucleotide
guuggcauuaggcacguag

SEQ ID NO: 307486 - RNA, 19 nt, Artificial Sequence
  Description of Artificial Sequence: Synthetic oligonucleotide
uguacauaagaaacaguaa

SEQ ID NO: 307487 - RNA, 19 nt, Artificial Sequence
  Description of Artificial Sequence: Synthetic oligonucleotide
gauguguuugcuuucacaa

SEQ ID NO: 307488 - RNA, 19 nt, Artificial Sequence
  Description of Artificial Sequence: Synthetic oligonucleotide
uuuagcuagguugauagaa

SEQ ID NO: 307489 - RNA, 19 nt, Artificial Sequence
  Description of Artificial Sequence: Synthetic oligonucleotide
aaaugaaaagugaugacuu

SEQ ID NO: 307490 - RNA, 19 nt, Artificial Sequence
  Description of Artificial Sequence: Synthetic oligonucleotide
ucuuacagucauaaagacu

SEQ ID NO: 307491 - RNA, 19 nt, Artificial Sequence
  Description of Artificial Sequence: Synthetic oligonucleotide
ugccuuucuaaccauaaaa

SEQ ID NO: 307492 - RNA, 19 nt, Artificial Sequence
  Description of Artificial Sequence: Synthetic oligonucleotide
uaguuugagaucucuauuc

SEQ ID NO: 307493 - RNA, 19 nt, Artificial Sequence
  Description of Artificial Sequence: Synthetic oligonucleotide
uuccuuuacaaggagaaac

SEQ ID NO: 307494 - RNA, 19 nt, Artificial Sequence
  Description of Artificial Sequence: Synthetic oligonucleotide
aaucggaaaacuccauggu

SEQ ID NO: 307495 - RNA, 19 nt, Artificial Sequence
  Description of Artificial Sequence: Synthetic oligonucleotide
uuccuguuacucaagugcc

SEQ ID NO: 307496 - RNA, 19 nt, Artificial Sequence
  Description of Artificial Sequence: Synthetic oligonucleotide
auucuuuacccagucacac

SEQ ID NO: 307497 - RNA, 19 nt, Artificial Sequence
  Description of Artificial Sequence: Synthetic oligonucleotide
ucaagugccuguaucgaug

SEQ ID NO: 307498 - RNA, 19 nt, Artificial Sequence
  Description of Artificial Sequence: Synthetic oligonucleotide
uaauggaaugggcaguugu

SEQ ID NO: 307499 - RNA, 19 nt, Artificial Sequence
  Description of Artificial Sequence: Synthetic oligonucleotide
uuaucauggucaaagucau

SEQ ID NO: 307500 - RNA, 19 nt, Artificial Sequence
  Description of Artificial Sequence: Synthetic oligonucleotide
cauaaagacucacuaugag

SEQ ID NO: 307501 - RNA, 19 nt, Artificial Sequence
  Description of Artificial Sequence: Synthetic oligonucleotide
uucaauucagugugcaaac

SEQ ID NO: 307502 - RNA, 19 nt, Artificial Sequence
  Description of Artificial Sequence: Synthetic oligonucleotide
uggcauuaggcacguaggg

SEQ ID NO: 307503 - RNA, 19 nt, Artificial Sequence
  Description of Artificial Sequence: Synthetic oligonucleotide
uggguuguaauggaauggg

SEQ ID NO: 307504 - RNA, 19 nt, Artificial Sequence
  Description of Artificial Sequence: Synthetic oligonucleotide
uaaagcaacgguguacaag

SEQ ID NO: 307505 - RNA, 19 nt, Artificial Sequence
  Description of Artificial Sequence: Synthetic oligonucleotide
uccucauuaggccagccgu

SEQ ID NO: 307506 - RNA, 19 nt, Artificial Sequence
  Description of Artificial Sequence: Synthetic oligonucleotide
uggguuaacucccacgagu

SEQ ID NO: 307507 - RNA, 19 nt, Artificial Sequence
  Description of Artificial Sequence: Synthetic oligonucleotide
uuaugcuauguacaacacu

SEQ ID NO: 307508 - RNA, 19 nt, Artificial Sequence
  Description of Artificial Sequence: Synthetic oligonucleotide
cauaucuacauaguuugag

SEQ ID NO: 307509 - RNA, 19 nt, Artificial Sequence
  Description of Artificial Sequence: Synthetic oligonucleotide
guaccgaacaaguaacagc

SEQ ID NO: 307510 - RNA, 19 nt, Artificial Sequence
  Description of Artificial Sequence: Synthetic oligonucleotide
acagcggucucccacauca

SEQ ID NO: 307511 - RNA, 19 nt, Artificial Sequence
  Description of Artificial Sequence: Synthetic oligonucleotide
agaaucggaaaacuccaug

SEQ ID NO: 307512 - RNA, 19 nt, Artificial Sequence
  Description of Artificial Sequence: Synthetic oligonucleotide
uccugaguugggaagguug

SEQ ID NO: 307513 - RNA, 19 nt, Artificial Sequence
  Description of Artificial Sequence: Synthetic oligonucleotide
acaggcaucgccaauuccg

SEQ ID NO: 307514 - RNA, 19 nt, Artificial Sequence
  Description of Artificial Sequence: Synthetic oligonucleotide
uaauggcccagguaguugc

SEQ ID NO: 307515 - RNA, 19 nt, Artificial Sequence
  Description of Artificial Sequence: Synthetic oligonucleotide
uaacucuacagacaguauu

SEQ ID NO: 307516 - RNA, 19 nt, Artificial Sequence
  Description of Artificial Sequence: Synthetic oligonucleotide
uguccccugaaaaugauuu

SEQ ID NO: 307517 - RNA, 19 nt, Artificial Sequence
  Description of Artificial Sequence: Synthetic oligonucleotide
uuaaggggaaaagccaaag

SEQ ID NO: 307518 - RNA, 19 nt, Artificial Sequence
  Description of Artificial Sequence: Synthetic oligonucleotide
cacguagggaucaagguuc

SEQ ID NO: 307519 - RNA, 19 nt, Artificial Sequence
  Description of Artificial Sequence: Synthetic oligonucleotide
guagggaucaagguucugg

SEQ ID NO: 307520 - RNA, 19 nt, Artificial Sequence
  Description of Artificial Sequence: Synthetic oligonucleotide
uaaauagcauaucuacaua

SEQ ID NO: 307521 - RNA, 19 nt, Artificial Sequence
  Description of Artificial Sequence: Synthetic oligonucleotide
agcaauuugcugauccgcc

SEQ ID NO: 307522 - RNA, 19 nt, Artificial Sequence
  Description of Artificial Sequence: Synthetic oligonucleotide
uuagcuagguugauagaaa

SEQ ID NO: 307523 - RNA, 19 nt, Artificial Sequence
  Description of Artificial Sequence: Synthetic oligonucleotide
cauuaucauggucaaaguc

SEQ ID NO: 307524 - RNA, 19 nt, Artificial Sequence
  Description of Artificial Sequence: Synthetic oligonucleotide
ucacucuaagccccaaaug

SEQ ID NO: 307525 - RNA, 19 nt, Artificial Sequence
  Description of Artificial Sequence: Synthetic oligonucleotide
gcaaucuaauuccagguag

SEQ ID NO: 307526 - RNA, 19 nt, Artificial Sequence
  Description of Artificial Sequence: Synthetic oligonucleotide
uucacucuaagccccaaau

SEQ ID NO: 307527 - RNA, 19 nt, Artificial Sequence
  Description of Artificial Sequence: Synthetic oligonucleotide
auagcauaucuacauaguu

SEQ ID NO: 307528 - RNA, 19 nt, Artificial Sequence
  Description of Artificial Sequence: Synthetic oligonucleotide
acaauugucucuuggcuau

SEQ ID NO: 307529 - RNA, 19 nt, Artificial Sequence
  Description of Artificial Sequence: Synthetic oligonucleotide
ugauagaaauuuugugccu

SEQ ID NO: 307530 - RNA, 19 nt, Artificial Sequence
  Description of Artificial Sequence: Synthetic oligonucleotide
aagucuuucuguccccuga

SEQ ID NO: 307531 - RNA, 19 nt, Artificial Sequence
  Description of Artificial Sequence: Synthetic oligonucleotide
uuagacacgacaguaguuu

SEQ ID NO: 307532 - RNA, 19 nt, Artificial Sequence
  Description of Artificial Sequence: Synthetic oligonucleotide
aaacuccaugguaacagag

SEQ ID NO: 307533 - RNA, 19 nt, Artificial Sequence
  Description of Artificial Sequence: Synthetic oligonucleotide
aauaggcacaaggaguggu

SEQ ID NO: 307534 - RNA, 19 nt, Artificial Sequence
  Description of Artificial Sequence: Synthetic oligonucleotide
gguauuggcaaauaguaaa

SEQ ID NO: 307535 - RNA, 19 nt, Artificial Sequence
  Description of Artificial Sequence: Synthetic oligonucleotide
aaagcguuuguuaaacaaa

SEQ ID NO: 307536 - RNA, 19 nt, Artificial Sequence
  Description of Artificial Sequence: Synthetic oligonucleotide
agacucacuaugaggaugg

SEQ ID NO: 307537 - RNA, 19 nt, Artificial Sequence
  Description of Artificial Sequence: Synthetic oligonucleotide
caagugccuguaucgaugg

SEQ ID NO: 307538 - RNA, 19 nt, Artificial Sequence
  Description of Artificial Sequence: Synthetic oligonucleotide
uguggacuagccuuagagu

SEQ ID NO: 307539 - RNA, 19 nt, Artificial Sequence
  Description of Artificial Sequence: Synthetic oligonucleotide
uacaauugucucuuggcua

SEQ ID NO: 307540 - RNA, 19 nt, Artificial Sequence
  Description of Artificial Sequence: Synthetic oligonucleotide
uuacucaagugccuguauc

SEQ ID NO: 307541 - RNA, 19 nt, Artificial Sequence
  Description of Artificial Sequence: Synthetic oligonucleotide
auauaaaucuccauaugau

SEQ ID NO: 307542 - RNA, 19 nt, Artificial Sequence
  Description of Artificial Sequence: Synthetic oligonucleotide
cacucuaagccccaaauga

SEQ ID NO: 307543 - RNA, 19 nt, Artificial Sequence
  Description of Artificial Sequence: Synthetic oligonucleotide
aguaccgaacaaguaacag

SEQ ID NO: 307544 - RNA, 19 nt, Artificial Sequence
  Description of Artificial Sequence: Synthetic oligonucleotide
aaauaggcacaaggagugg

SEQ ID NO: 307545 - RNA, 19 nt, Artificial Sequence
  Description of Artificial Sequence: Synthetic oligonucleotide
ugccugaaaaugcuucuga

SEQ ID NO: 307546 - RNA, 19 nt, Artificial Sequence
  Description of Artificial Sequence: Synthetic oligonucleotide
aucuaauuccagguagaac

SEQ ID NO: 307547 - RNA, 19 nt, Artificial Sequence
  Description of Artificial Sequence: Synthetic oligonucleotide
uaaauagauguguuugcuu

SEQ ID NO: 307548 - RNA, 19 nt, Artificial Sequence
  Description of Artificial Sequence: Synthetic oligonucleotide
ucucccucugacaugccug

SEQ ID NO: 307549 - RNA, 19 nt, Artificial Sequence
  Description of Artificial Sequence: Synthetic oligonucleotide
aagcguuuguuaaacaaaa

SEQ ID NO: 307550 - RNA, 19 nt, Artificial Sequence
  Description of Artificial Sequence: Synthetic oligonucleotide
agauguguuugcuuucaca

SEQ ID NO: 307551 - RNA, 19 nt, Artificial Sequence
  Description of Artificial Sequence: Synthetic oligonucleotide
cacgagucagcauaaagga

SEQ ID NO: 307552 - RNA, 19 nt, Artificial Sequence
  Description of Artificial Sequence: Synthetic oligonucleotide
ugcaaucuaauuccaggua

SEQ ID NO: 307553 - RNA, 19 nt, Artificial Sequence
  Description of Artificial Sequence: Synthetic oligonucleotide
aacucuacagacaguauuu

SEQ ID NO: 307554 - RNA, 19 nt, Artificial Sequence
  Description of Artificial Sequence: Synthetic oligonucleotide
auaguuugagaucucuauu

SEQ ID NO: 307555 - RNA, 19 nt, Artificial Sequence
  Description of Artificial Sequence: Synthetic oligonucleotide
gccauaugcaaucuaauuc

SEQ ID NO: 307556 - RNA, 19 nt, Artificial Sequence
  Description of Artificial Sequence: Synthetic oligonucleotide
gguagaacaggguuaauaa

SEQ ID NO: 307557 - RNA, 19 nt, Artificial Sequence
  Description of Artificial Sequence: Synthetic oligonucleotide
auauaaguuccaccuuugu

SEQ ID NO: 307558 - RNA, 19 nt, Artificial Sequence
  Description of Artificial Sequence: Synthetic oligonucleotide
uuuagacacgacaguaguu

SEQ ID NO: 307559 - RNA, 19 nt, Artificial Sequence
  Description of Artificial Sequence: Synthetic oligonucleotide
uggacuagccuuagagugu

SEQ ID NO: 307560 - RNA, 19 nt, Artificial Sequence
  Description of Artificial Sequence: Synthetic oligonucleotide
cacuaugcgcacauuauca

SEQ ID NO: 307561 - RNA, 19 nt, Artificial Sequence
  Description of Artificial Sequence: Synthetic oligonucleotide
gaucaagguucugguaugg

SEQ ID NO: 307562 - RNA, 19 nt, Artificial Sequence
  Description of Artificial Sequence: Synthetic oligonucleotide
uuuguaucuuuugggaaaa

SEQ ID NO: 307563 - RNA, 19 nt, Artificial Sequence
  Description of Artificial Sequence: Synthetic oligonucleotide
cuaugcgcacauuaucaug

SEQ ID NO: 307564 - RNA, 19 nt, Artificial Sequence
  Description of Artificial Sequence: Synthetic oligonucleotide
uagggaucaagguucuggu

SEQ ID NO: 307565 - RNA, 19 nt, Artificial Sequence
  Description of Artificial Sequence: Synthetic oligonucleotide
agaacggugauaauguuuu

SEQ ID NO: 307566 - RNA, 19 nt, Artificial Sequence
  Description of Artificial Sequence: Synthetic oligonucleotide
uaguaccgaacaaguaaca

SEQ ID NO: 307567 - RNA, 19 nt, Artificial Sequence
  Description of Artificial Sequence: Synthetic oligonucleotide
cauagucauacugggcugg

SEQ ID NO: 307568 - RNA, 19 nt, Artificial Sequence
  Description of Artificial Sequence: Synthetic oligonucleotide
agagaaucggaaaacucca

SEQ ID NO: 307569 - RNA, 19 nt, Artificial Sequence
  Description of Artificial Sequence: Synthetic oligonucleotide
auugcacaccuguuuguug

SEQ ID NO: 307570 - RNA, 19 nt, Artificial Sequence
  Description of Artificial Sequence: Synthetic oligonucleotide
augauuuaguaccgaacaa

SEQ ID NO: 307571 - RNA, 19 nt, Artificial Sequence
  Description of Artificial Sequence: Synthetic oligonucleotide
uguaucgaugguuggguua

SEQ ID NO: 307572 - RNA, 19 nt, Artificial Sequence
  Description of Artificial Sequence: Synthetic oligonucleotide
guccaaaucauucacucua

SEQ ID NO: 307573 - RNA, 19 nt, Artificial Sequence
  Description of Artificial Sequence: Synthetic oligonucleotide
agcaacgguguacaagaug

SEQ ID NO: 307574 - RNA, 19 nt, Artificial Sequence
  Description of Artificial Sequence: Synthetic oligonucleotide
ucgaugguuggguuaacuc

SEQ ID NO: 307575 - RNA, 19 nt, Artificial Sequence
  Description of Artificial Sequence: Synthetic oligonucleotide
augauuuauuauuguuccu

SEQ ID NO: 307576 - RNA, 19 nt, Artificial Sequence
  Description of Artificial Sequence: Synthetic oligonucleotide
agcuauuucuuuauuggga

SEQ ID NO: 307577 - RNA, 19 nt, Artificial Sequence
  Description of Artificial Sequence: Synthetic oligonucleotide
aaccagaagagaaucggaa

SEQ ID NO: 307578 - RNA, 19 nt, Artificial Sequence
  Description of Artificial Sequence: Synthetic oligonucleotide
gauuuaguaccgaacaagu

SEQ ID NO: 307579 - RNA, 19 nt, Artificial Sequence
  Description of Artificial Sequence: Synthetic oligonucleotide
agguaguugcacuuggcau

SEQ ID NO: 307580 - RNA, 19 nt, Artificial Sequence
  Description of Artificial Sequence: Synthetic oligonucleotide
uaugcacccucccuagcac

SEQ ID NO: 307581 - RNA, 19 nt, Artificial Sequence
  Description of Artificial Sequence: Synthetic oligonucleotide
uccucgccacagaugaugc

SEQ ID NO: 307582 - RNA, 19 nt, Artificial Sequence
  Description of Artificial Sequence: Synthetic oligonucleotide
accagaagagaaucggaaa

SEQ ID NO: 307583 - RNA, 19 nt, Artificial Sequence
  Description of Artificial Sequence: Synthetic oligonucleotide
gguuggguuaacucccacg

SEQ ID NO: 307584 - RNA, 19 nt, Artificial Sequence
  Description of Artificial Sequence: Synthetic oligonucleotide
aggguauuggcaaauagua

SEQ ID NO: 307585 - RNA, 19 nt, Artificial Sequence
  Description of Artificial Sequence: Synthetic oligonucleotide
ugcuaaagcguuuguuaaa

SEQ ID NO: 307586 - RNA, 19 nt, Artificial Sequence
  Description of Artificial Sequence: Synthetic oligonucleotide
acuaugcgcacauuaucau

SEQ ID NO: 307587 - RNA, 19 nt, Artificial Sequence
  Description of Artificial Sequence: Synthetic oligonucleotide
uuccguggauugcacaccu

SEQ ID NO: 307588 - RNA, 19 nt, Artificial Sequence
  Description of Artificial Sequence: Synthetic oligonucleotide
cucauuaggccagccgucg

SEQ ID NO: 307589 - RNA, 19 nt, Artificial Sequence
  Description of Artificial Sequence: Synthetic oligonucleotide
uacaaguuacacuguuuua

SEQ ID NO: 307590 - RNA, 19 nt, Artificial Sequence
  Description of Artificial Sequence: Synthetic oligonucleotide
uuagaguguucauggcuuc

SEQ ID NO: 307591 - RNA, 19 nt, Artificial Sequence
  Description of Artificial Sequence: Synthetic oligonucleotide
ucuuguccugaguugggaa

SEQ ID NO: 307592 - RNA, 19 nt, Artificial Sequence
  Description of Artificial Sequence: Synthetic oligonucleotide
ggugauaauguuuucuucu

SEQ ID NO: 307593 - RNA, 19 nt, Artificial Sequence
  Description of Artificial Sequence: Synthetic oligonucleotide
acuaugaggaugguucaga

SEQ ID NO: 307594 - RNA, 19 nt, Artificial Sequence
  Description of Artificial Sequence: Synthetic oligonucleotide
agcaaaccaaagucauucu

SEQ ID NO: 307595 - RNA, 19 nt, Artificial Sequence
  Description of Artificial Sequence: Synthetic oligonucleotide
uuguaauggaaugggcagu

SEQ ID NO: 307596 - RNA, 19 nt, Artificial Sequence
  Description of Artificial Sequence: Synthetic oligonucleotide
gaucucuauuccaauggca

SEQ ID NO: 307597 - RNA, 19 nt, Artificial Sequence
  Description of Artificial Sequence: Synthetic oligonucleotide
agcggucucccacaucauc

SEQ ID NO: 307598 - RNA, 19 nt, Artificial Sequence
  Description of Artificial Sequence: Synthetic oligonucleotide
gaggaggcguucucauccg

SEQ ID NO: 307599 - RNA, 19 nt, Artificial Sequence
  Description of Artificial Sequence: Synthetic oligonucleotide
caaucuaauuccagguaga

SEQ ID NO: 307600 - RNA, 19 nt, Artificial Sequence
  Description of Artificial Sequence: Synthetic oligonucleotide
ccgaacaaguaacagcucc

SEQ ID NO: 307601 - RNA, 19 nt, Artificial Sequence
  Description of Artificial Sequence: Synthetic oligonucleotide
uguaauggaaugggcaguu

SEQ ID NO: 307602 - RNA, 19 nt, Artificial Sequence
  Description of Artificial Sequence: Synthetic oligonucleotide
uguugcagucguguguccc

SEQ ID NO: 307603 - RNA, 19 nt, Artificial Sequence
  Description of Artificial Sequence: Synthetic oligonucleotide
guccucauuaggccagccg

SEQ ID NO: 307604 - RNA, 19 nt, Artificial Sequence
  Description of Artificial Sequence: Synthetic oligonucleotide
gaaguaaauagauguguuu

SEQ ID NO: 307605 - RNA, 19 nt, Artificial Sequence
  Description of Artificial Sequence: Synthetic oligonucleotide
gcaacgguguacaagauga

SEQ ID NO: 307606 - RNA, 19 nt, Artificial Sequence
  Description of Artificial Sequence: Synthetic oligonucleotide
uccuguuacucaagugccu

SEQ ID NO: 307607 - RNA, 19 nt, Artificial Sequence
  Description of Artificial Sequence: Synthetic oligonucleotide
uaugaggaugguucagaua

SEQ ID NO: 307608 - RNA, 19 nt, Artificial Sequence
  Description of Artificial Sequence: Synthetic oligonucleotide
guagaacaggguuaauaaa

SEQ ID NO: 307609 - RNA, 19 nt, Artificial Sequence
  Description of Artificial Sequence: Synthetic oligonucleotide
aauccuucuggcagguccu

SEQ ID NO: 307610 - RNA, 19 nt, Artificial Sequence
  Description of Artificial Sequence: Synthetic oligonucleotide
caauuugcugauccgccuc

SEQ ID NO: 307611 - RNA, 19 nt, Artificial Sequence
  Description of Artificial Sequence: Synthetic oligonucleotide
uguuuuagcuagguugaua

SEQ ID NO: 307612 - RNA, 19 nt, Artificial Sequence
  Description of Artificial Sequence: Synthetic oligonucleotide
cauaguuugagaucucuau

SEQ ID NO: 307613 - RNA, 19 nt, Artificial Sequence
  Description of Artificial Sequence: Synthetic oligonucleotide
aucaagguucugguauggg

SEQ ID NO: 307614 - RNA, 19 nt, Artificial Sequence
  Description of Artificial Sequence: Synthetic oligonucleotide
acaaucuuacagucauaaa

SEQ ID NO: 307615 - RNA, 19 nt, Artificial Sequence
  Description of Artificial Sequence: Synthetic oligonucleotide
aggcacguagggaucaagg

SEQ ID NO: 307616 - RNA, 19 nt, Artificial Sequence
  Description of Artificial Sequence: Synthetic oligonucleotide
aaaaggguauuggcaaaua

SEQ ID NO: 307617 - RNA, 19 nt, Artificial Sequence
  Description of Artificial Sequence: Synthetic oligonucleotide
caggguuaauaaauaaucu

SEQ ID NO: 307618 - RNA, 19 nt, Artificial Sequence
  Description of Artificial Sequence: Synthetic oligonucleotide
ggguuaauaaauaaucugu

SEQ ID NO: 307619 - RNA, 19 nt, Artificial Sequence
  Description of Artificial Sequence: Synthetic oligonucleotide
gcuggguuguaauggaaug

SEQ ID NO: 307620 - RNA, 19 nt, Artificial Sequence
  Description of Artificial Sequence: Synthetic oligonucleotide
ugaggaugguucagauagu

SEQ ID NO: 307621 - RNA, 19 nt, Artificial Sequence
  Description of Artificial Sequence: Synthetic oligonucleotide
ucauuaggccagccgucga

SEQ ID NO: 307622 - RNA, 19 nt, Artificial Sequence
  Description of Artificial Sequence: Synthetic oligonucleotide
gugguaaguugcauuggcc

SEQ ID NO: 307623 - RNA, 19 nt, Artificial Sequence
  Description of Artificial Sequence: Synthetic oligonucleotide
gguuccguggauugcacac

SEQ ID NO: 307624 - RNA, 19 nt, Artificial Sequence
  Description of Artificial Sequence: Synthetic oligonucleotide
gaggcguucucauccguga

SEQ ID NO: 307625 - RNA, 19 nt, Artificial Sequence
  Description of Artificial Sequence: Synthetic oligonucleotide
agaacaggguuaauaaaua

SEQ ID NO: 307626 - RNA, 19 nt, Artificial Sequence
  Description of Artificial Sequence: Synthetic oligonucleotide
uggcuaugcacccucccua

SEQ ID NO: 307627 - RNA, 19 nt, Artificial Sequence
  Description of Artificial Sequence: Synthetic oligonucleotide
agguagaacaggguuaaua

SEQ ID NO: 307628 - RNA, 19 nt, Artificial Sequence
  Description of Artificial Sequence: Synthetic oligonucleotide
guugcauuggccacacaca

SEQ ID NO: 307629 - RNA, 19 nt, Artificial Sequence
  Description of Artificial Sequence: Synthetic oligonucleotide
cuaaagcguuuguuaaaca

SEQ ID NO: 307630 - RNA, 19 nt, Artificial Sequence
  Description of Artificial Sequence: Synthetic oligonucleotide
cuauuccaauggcaaugag

SEQ ID NO: 307631 - RNA, 19 nt, Artificial Sequence
  Description of Artificial Sequence: Synthetic oligonucleotide
aguccuaguggguccuucu

SEQ ID NO: 307632 - RNA, 19 nt, Artificial Sequence
  Description of Artificial Sequence: Synthetic oligonucleotide
ugcgcacauuaucaugguc

SEQ ID NO: 307633 - RNA, 19 nt, Artificial Sequence
  Description of Artificial Sequence: Synthetic oligonucleotide
ucacagcgguacauggggu

SEQ ID NO: 307634 - RNA, 19 nt, Artificial Sequence
  Description of Artificial Sequence: Synthetic oligonucleotide
cuaugcacccucccuagca

SEQ ID NO: 307635 - RNA, 19 nt, Artificial Sequence
  Description of Artificial Sequence: Synthetic oligonucleotide
gucgcuguaauggcccagg

SEQ ID NO: 307636 - RNA, 19 nt, Artificial Sequence
  Description of Artificial Sequence: Synthetic oligonucleotide
caacaaaugagguaauauu

SEQ ID NO: 307637 - RNA, 19 nt, Artificial Sequence
  Description of Artificial Sequence: Synthetic oligonucleotide
gagguaauauuuguauaua

SEQ ID NO: 307638 - RNA, 19 nt, Artificial Sequence
  Description of Artificial Sequence: Synthetic oligonucleotide
ggaaauaggcacaaggagu

SEQ ID NO: 307639 - RNA, 19 nt, Artificial Sequence
  Description of Artificial Sequence: Synthetic oligonucleotide
ccgugaaaggcugagagug

SEQ ID NO: 307640 - RNA, 19 nt, Artificial Sequence
  Description of Artificial Sequence: Synthetic oligonucleotide
guaaguugcauuggccaca

SEQ ID NO: 307641 - RNA, 19 nt, Artificial Sequence
  Description of Artificial Sequence: Synthetic oligonucleotide
cuuagaguguucauggcuu

SEQ ID NO: 307642 - RNA, 19 nt, Artificial Sequence
  Description of Artificial Sequence: Synthetic oligonucleotide
guaauggcccagguaguug

SEQ ID NO: 307643 - RNA, 19 nt, Artificial Sequence
  Description of Artificial Sequence: Synthetic oligonucleotide
agccgucgaggucuguguc

SEQ ID NO: 307644 - RNA, 19 nt, Artificial Sequence
  Description of Artificial Sequence: Synthetic oligonucleotide
cagguaguugcacuuggca

SEQ ID NO: 307645 - RNA, 19 nt, Artificial Sequence
  Description of Artificial Sequence: Synthetic oligonucleotide
aucgccaauuccgucuuug

SEQ ID NO: 307646 - RNA, 19 nt, Artificial Sequence
  Description of Artificial Sequence: Synthetic oligonucleotide
acacgacaguaguuuuaag

SEQ ID NO: 307647 - RNA, 19 nt, Artificial Sequence
  Description of Artificial Sequence: Synthetic oligonucleotide
auaaagcaacgguguacaa

SEQ ID NO: 307648 - RNA, 19 nt, Artificial Sequence
  Description of Artificial Sequence: Synthetic oligonucleotide
cauguucuuggaggaggcg

SEQ ID NO: 307649 - RNA, 19 nt, Artificial Sequence
  Description of Artificial Sequence: Synthetic oligonucleotide
cacagcgguacaugggguc

SEQ ID NO: 307650 - RNA, 19 nt, Artificial Sequence
  Description of Artificial Sequence: Synthetic oligonucleotide
gguggcucggugcugaguc

SEQ ID NO: 307651 - RNA, 19 nt, Artificial Sequence
  Description of Artificial Sequence: Synthetic oligonucleotide
guugcagucguguguccca

SEQ ID NO: 307652 - RNA, 19 nt, Artificial Sequence
  Description of Artificial Sequence: Synthetic oligonucleotide
uuacacugcuaaagcguuu

SEQ ID NO: 307653 - RNA, 19 nt, Artificial Sequence
  Description of Artificial Sequence: Synthetic oligonucleotide
uuaucauggucagccuggu

SEQ ID NO: 307654 - RNA, 19 nt, Artificial Sequence
  Description of Artificial Sequence: Synthetic oligonucleotide
agugccuguaucgaugguu

SEQ ID NO: 307655 - RNA, 19 nt, Artificial Sequence
  Description of Artificial Sequence: Synthetic oligonucleotide
ugauccgccucagcuaccu

SEQ ID NO: 307656 - RNA, 19 nt, Artificial Sequence
  Description of Artificial Sequence: Synthetic oligonucleotide
acucuaagccccaaaugaa

SEQ ID NO: 307657 - RNA, 19 nt, Artificial Sequence
  Description of Artificial Sequence: Synthetic oligonucleotide
guaucgaugguuggguuaa

SEQ ID NO: 307658 - RNA, 19 nt, Artificial Sequence
  Description of Artificial Sequence: Synthetic oligonucleotide
aggcaucgccaauuccguc

SEQ ID NO: 307659 - RNA, 19 nt, Artificial Sequence
  Description of Artificial Sequence: Synthetic oligonucleotide
ucgccaauuccgucuuugu

SEQ ID NO: 307660 - RNA, 19 nt, Artificial Sequence
  Description of Artificial Sequence: Synthetic oligonucleotide
uugugccuuucuaaccaua

SEQ ID NO: 307661 - RNA, 19 nt, Artificial Sequence
  Description of Artificial Sequence: Synthetic oligonucleotide
acauggggucgcuguaaug

SEQ ID NO: 307662 - RNA, 19 nt, Artificial Sequence
  Description of Artificial Sequence: Synthetic oligonucleotide
auuaaggggaaaagccaaa

SEQ ID NO: 307663 - RNA, 19 nt, Artificial Sequence
  Description of Artificial Sequence: Synthetic oligonucleotide
augggcaguugucccuauc

SEQ ID NO: 307664 - RNA, 19 nt, Artificial Sequence
  Description of Artificial Sequence: Synthetic oligonucleotide
agccccaaaugaaaaguga

SEQ ID NO: 307665 - RNA, 19 nt, Artificial Sequence
  Description of Artificial Sequence: Synthetic oligonucleotide
caccuaauuccacuucaca

SEQ ID NO: 307666 - RNA, 19 nt, Artificial Sequence
  Description of Artificial Sequence: Synthetic oligonucleotide
ugcugagucugggacugca

SEQ ID NO: 307667 - RNA, 19 nt, Artificial Sequence
  Description of Artificial Sequence: Synthetic oligonucleotide
cuacauaguuugagaucuc

SEQ ID NO: 307668 - RNA, 19 nt, Artificial Sequence
  Description of Artificial Sequence: Synthetic oligonucleotide
cucccuagcacuuuggcuu

SEQ ID NO: 307669 - RNA, 19 nt, Artificial Sequence
  Description of Artificial Sequence: Synthetic oligonucleotide
uaacucccacgagucagca

SEQ ID NO: 307670 - RNA, 19 nt, Artificial Sequence
  Description of Artificial Sequence: Synthetic oligonucleotide
aagugccuguaucgauggu

SEQ ID NO: 307671 - RNA, 19 nt, Artificial Sequence
  Description of Artificial Sequence: Synthetic oligonucleotide
ggcuaugcacccucccuag

SEQ ID NO: 307672 - RNA, 19 nt, Artificial Sequence
  Description of Artificial Sequence: Synthetic oligonucleotide
uugcacucacagcgguaca

SEQ ID NO: 307673 - RNA, 19 nt, Artificial Sequence
  Description of Artificial Sequence: Synthetic oligonucleotide
ugguuggguuaacucccac

SEQ ID NO: 307674 - RNA, 19 nt, Artificial Sequence
  Description of Artificial Sequence: Synthetic oligonucleotide
ucccuagcacuuuggcuuc

SEQ ID NO: 307675 - RNA, 19 nt, Artificial Sequence
  Description of Artificial Sequence: Synthetic oligonucleotide
uaggcacguagggaucaag

SEQ ID NO: 307676 - RNA, 19 nt, Artificial Sequence
  Description of Artificial Sequence: Synthetic oligonucleotide
guuccguggauugcacacc

SEQ ID NO: 307677 - RNA, 19 nt, Artificial Sequence
  Description of Artificial Sequence: Synthetic oligonucleotide
ucccuaucaucugggauuu

SEQ ID NO: 307678 - RNA, 19 nt, Artificial Sequence
  Description of Artificial Sequence: Synthetic oligonucleotide
caguugucccuaucaucug

SEQ ID NO: 307679 - RNA, 19 nt, Artificial Sequence
  Description of Artificial Sequence: Synthetic oligonucleotide
guaauggaaugggcaguug

SEQ ID NO: 307680 - RNA, 19 nt, Artificial Sequence
  Description of Artificial Sequence: Synthetic oligonucleotide
auuccagguagaacagggu

SEQ ID NO: 307681 - RNA, 19 nt, Artificial Sequence
  Description of Artificial Sequence: Synthetic oligonucleotide
uccguggauugcacaccug

SEQ ID NO: 307682 - RNA, 19 nt, Artificial Sequence
  Description of Artificial Sequence: Synthetic oligonucleotide
auuccgucuuugucauagu

SEQ ID NO: 307683 - RNA, 19 nt, Artificial Sequence
  Description of Artificial Sequence: Synthetic oligonucleotide
cacaaggagugguguggac

SEQ ID NO: 307684 - RNA, 19 nt, Artificial Sequence
  Description of Artificial Sequence: Synthetic oligonucleotide
accgaacaaguaacagcuc

SEQ ID NO: 307685 - RNA, 19 nt, Artificial Sequence
  Description of Artificial Sequence: Synthetic oligonucleotide
ccauugccugcauagccag

SEQ ID NO: 307686 - RNA, 19 nt, Artificial Sequence
  Description of Artificial Sequence: Synthetic oligonucleotide
gggaaguaaauagaugugu

SEQ ID NO: 307687 - RNA, 19 nt, Artificial Sequence
  Description of Artificial Sequence: Synthetic oligonucleotide
gccaccuaauuccacuuca

SEQ ID NO: 307688 - RNA, 19 nt, Artificial Sequence
  Description of Artificial Sequence: Synthetic oligonucleotide
cccacgagucagcauaaag

SEQ ID NO: 307689 - RNA, 19 nt, Artificial Sequence
  Description of Artificial Sequence: Synthetic oligonucleotide
uccuggaaauaggcacaag

SEQ ID NO: 307690 - RNA, 19 nt, Artificial Sequence
  Description of Artificial Sequence: Synthetic oligonucleotide
agggaucaagguucuggua

SEQ ID NO: 307691 - RNA, 19 nt, Artificial Sequence
  Description of Artificial Sequence: Synthetic oligonucleotide
uaucauggucagccugguu

SEQ ID NO: 307692 - RNA, 19 nt, Artificial Sequence
  Description of Artificial Sequence: Synthetic oligonucleotide
gcagggguuccguggauug

SEQ ID NO: 307693 - RNA, 19 nt, Artificial Sequence
  Description of Artificial Sequence: Synthetic oligonucleotide
agauagucccacgcuuccu

SEQ ID NO: 307694 - RNA, 19 nt, Artificial Sequence
  Description of Artificial Sequence: Synthetic oligonucleotide
ucucuuggcuaugcacccu

SEQ ID NO: 307695 - RNA, 19 nt, Artificial Sequence
  Description of Artificial Sequence: Synthetic oligonucleotide
ggguuaacucccacgaguc

SEQ ID NO: 307696 - RNA, 19 nt, Artificial Sequence
  Description of Artificial Sequence: Synthetic oligonucleotide
gguaguugcacuuggcauu

SEQ ID NO: 307697 - RNA, 19 nt, Artificial Sequence
  Description of Artificial Sequence: Synthetic oligonucleotide
ccuguuacucaagugccug

SEQ ID NO: 307698 - RNA, 19 nt, Artificial Sequence
  Description of Artificial Sequence: Synthetic oligonucleotide
cucccucugacaugccuga

SEQ ID NO: 307699 - RNA, 19 nt, Artificial Sequence
  Description of Artificial Sequence: Synthetic oligonucleotide
acgagucagcauaaaggaa

SEQ ID NO: 307700 - RNA, 19 nt, Artificial Sequence
  Description of Artificial Sequence: Synthetic oligonucleotide
ggguuguaauggaaugggc

SEQ ID NO: 307701 - RNA, 19 nt, Artificial Sequence
  Description of Artificial Sequence: Synthetic oligonucleotide
uagucauacugggcugggu

SEQ ID NO: 307702 - RNA, 19 nt, Artificial Sequence
  Description of Artificial Sequence: Synthetic oligonucleotide
guccuaguggguccuucuc

SEQ ID NO: 307703 - RNA, 19 nt, Artificial Sequence
  Description of Artificial Sequence: Synthetic oligonucleotide
acucacuaugaggaugguu

SEQ ID NO: 307704 - RNA, 19 nt, Artificial Sequence
  Description of Artificial Sequence: Synthetic oligonucleotide
cuaugaggaugguucagau

SEQ ID NO: 307705 - RNA, 19 nt, Artificial Sequence
  Description of Artificial Sequence: Synthetic oligonucleotide
aggaggcguucucauccgu

SEQ ID NO: 307706 - RNA, 19 nt, Artificial Sequence
  Description of Artificial Sequence: Synthetic oligonucleotide
ggggucgcuguaauggccc

SEQ ID NO: 307707 - RNA, 19 nt, Artificial Sequence
  Description of Artificial Sequence: Synthetic oligonucleotide
ggcaucgccaauuccgucu

SEQ ID NO: 307708 - RNA, 19 nt, Artificial Sequence
  Description of Artificial Sequence: Synthetic oligonucleotide
aagcaacgguguacaagau

SEQ ID NO: 307709 - RNA, 19 nt, Artificial Sequence
  Description of Artificial Sequence: Synthetic oligonucleotide
gugugugagaagugcccaa

SEQ ID NO: 307710 - RNA, 19 nt, Artificial Sequence
  Description of Artificial Sequence: Synthetic oligonucleotide
agacacgacaguaguuuua

SEQ ID NO: 307711 - RNA, 19 nt, Artificial Sequence
  Description of Artificial Sequence: Synthetic oligonucleotide
gugccuuucuaaccauaaa

SEQ ID NO: 307712 - RNA, 19 nt, Artificial Sequence
  Description of Artificial Sequence: Synthetic oligonucleotide
ccaccuaauuccacuucac

SEQ ID NO: 307713 - RNA, 19 nt, Artificial Sequence
  Description of Artificial Sequence: Synthetic oligonucleotide
cacccucccuagcacuuug

SEQ ID NO: 307714 - RNA, 19 nt, Artificial Sequence
  Description of Artificial Sequence: Synthetic oligonucleotide
caauugucucuuggcuaug

SEQ ID NO: 307715 - RNA, 19 nt, Artificial Sequence
  Description of Artificial Sequence: Synthetic oligonucleotide
gauccgccucagcuaccug

SEQ ID NO: 307716 - RNA, 19 nt, Artificial Sequence
  Description of Artificial Sequence: Synthetic oligonucleotide
guuacucaagugccuguau

SEQ ID NO: 307717 - RNA, 19 nt, Artificial Sequence
  Description of Artificial Sequence: Synthetic oligonucleotide
uuaggcacguagggaucaa

SEQ ID NO: 307718 - RNA, 19 nt, Artificial Sequence
  Description of Artificial Sequence: Synthetic oligonucleotide
gagugguguggacuagccu

SEQ ID NO: 307719 - RNA, 19 nt, Artificial Sequence
  Description of Artificial Sequence: Synthetic oligonucleotide
cagucgugugucccaucug

SEQ ID NO: 307720 - RNA, 19 nt, Artificial Sequence
  Description of Artificial Sequence: Synthetic oligonucleotide
gccgucgaggucugugucc

SEQ ID NO: 307721 - RNA, 19 nt, Artificial Sequence
  Description of Artificial Sequence: Synthetic oligonucleotide
auguuuuagcuagguugau

SEQ ID NO: 307722 - RNA, 19 nt, Artificial Sequence
  Description of Artificial Sequence: Synthetic oligonucleotide
gauugggcaccagccugca

SEQ ID NO: 307723 - RNA, 19 nt, Artificial Sequence
  Description of Artificial Sequence: Synthetic oligonucleotide
aguccacacuaugcgcaca

SEQ ID NO: 307724 - RNA, 19 nt, Artificial Sequence
  Description of Artificial Sequence: Synthetic oligonucleotide
ugcagggguuccguggauu

SEQ ID NO: 307725 - RNA, 19 nt, Artificial Sequence
  Description of Artificial Sequence: Synthetic oligonucleotide
uugcagucgugugucccau

SEQ ID NO: 307726 - RNA, 19 nt, Artificial Sequence
  Description of Artificial Sequence: Synthetic oligonucleotide
ggguauuggcaaauaguaa

SEQ ID NO: 307727 - RNA, 19 nt, Artificial Sequence
  Description of Artificial Sequence: Synthetic oligonucleotide
ccucauuaggccagccguc

SEQ ID NO: 307728 - RNA, 19 nt, Artificial Sequence
  Description of Artificial Sequence: Synthetic oligonucleotide
ggcacguagggaucaaggu

SEQ ID NO: 307729 - RNA, 19 nt, Artificial Sequence
  Description of Artificial Sequence: Synthetic oligonucleotide
guccccugaaaaugauuua

SEQ ID NO: 307730 - RNA, 19 nt, Artificial Sequence
  Description of Artificial Sequence: Synthetic oligonucleotide
uaucgaugguuggguuaac

SEQ ID NO: 307731 - RNA, 19 nt, Artificial Sequence
  Description of Artificial Sequence: Synthetic oligonucleotide
augguuggguuaacuccca

SEQ ID NO: 307732 - RNA, 19 nt, Artificial Sequence
  Description of Artificial Sequence: Synthetic oligonucleotide
ggaggcguucucauccgug

SEQ ID NO: 307733 - RNA, 19 nt, Artificial Sequence
  Description of Artificial Sequence: Synthetic oligonucleotide
acguagggaucaagguucu

SEQ ID NO: 307734 - RNA, 19 nt, Artificial Sequence
  Description of Artificial Sequence: Synthetic oligonucleotide
gcuaugcacccucccuagc

SEQ ID NO: 307735 - RNA, 19 nt, Artificial Sequence
  Description of Artificial Sequence: Synthetic oligonucleotide
ugcagucgugugucccauc

SEQ ID NO: 307736 - RNA, 19 nt, Artificial Sequence
  Description of Artificial Sequence: Synthetic oligonucleotide
cagcgguacauggggucgc

SEQ ID NO: 307737 - RNA, 19 nt, Artificial Sequence
  Description of Artificial Sequence: Synthetic oligonucleotide
gcaauuugcugauccgccu

SEQ ID NO: 307738 - RNA, 19 nt, Artificial Sequence
  Description of Artificial Sequence: Synthetic oligonucleotide
auacugggcuggguuguaa

SEQ ID NO: 307739 - RNA, 19 nt, Artificial Sequence
  Description of Artificial Sequence: Synthetic oligonucleotide
ggcguucucauccgugaaa

SEQ ID NO: 307740 - RNA, 19 nt, Artificial Sequence
  Description of Artificial Sequence: Synthetic oligonucleotide
cccucccuagcacuuuggc

SEQ ID NO: 307741 - RNA, 19 nt, Artificial Sequence
  Description of Artificial Sequence: Synthetic oligonucleotide
gcagucgugugucccaucu

SEQ ID NO: 307742 - RNA, 19 nt, Artificial Sequence
  Description of Artificial Sequence: Synthetic oligonucleotide
gcauaucuacauaguuuga

SEQ ID NO: 307743 - RNA, 19 nt, Artificial Sequence
  Description of Artificial Sequence: Synthetic oligonucleotide
cucccacgagucagcauaa

SEQ ID NO: 307744 - RNA, 19 nt, Artificial Sequence
  Description of Artificial Sequence: Synthetic oligonucleotide
ccacacuaugcgcacauua

SEQ ID NO: 307745 - RNA, 19 nt, Artificial Sequence
  Description of Artificial Sequence: Synthetic oligonucleotide
uaguugcacuuggcauucu

SEQ ID NO: 307746 - RNA, 19 nt, Artificial Sequence
  Description of Artificial Sequence: Synthetic oligonucleotide
uccacacuaugcgcacauu

SEQ ID NO: 307747 - RNA, 19 nt, Artificial Sequence
  Description of Artificial Sequence: Synthetic oligonucleotide
cugagucugggacugcauu

SEQ ID NO: 307748 - RNA, 19 nt, Artificial Sequence
  Description of Artificial Sequence: Synthetic oligonucleotide
ggucgcuguaauggcccag

SEQ ID NO: 307749 - RNA, 19 nt, Artificial Sequence
  Description of Artificial Sequence: Synthetic oligonucleotide
ucccacgagucagcauaaa

SEQ ID NO: 307750 - RNA, 19 nt, Artificial Sequence
  Description of Artificial Sequence: Synthetic oligonucleotide
cacagcggucucccacauc

SEQ ID NO: 307751 - RNA, 19 nt, Artificial Sequence
  Description of Artificial Sequence: Synthetic oligonucleotide
ucccucugacaugccugaa

SEQ ID NO: 307752 - RNA, 19 nt, Artificial Sequence
  Description of Artificial Sequence: Synthetic oligonucleotide
ccacuucacaagacagaga

SEQ ID NO: 307753 - RNA, 19 nt, Artificial Sequence
  Description of Artificial Sequence: Synthetic oligonucleotide
ccagccgucgaggucugug

SEQ ID NO: 307754 - RNA, 19 nt, Artificial Sequence
  Description of Artificial Sequence: Synthetic oligonucleotide
ugaguccuaguggguccuu

SEQ ID NO: 307755 - RNA, 19 nt, Artificial Sequence
  Description of Artificial Sequence: Synthetic oligonucleotide
cuguaucgaugguuggguu

SEQ ID NO: 307756 - RNA, 19 nt, Artificial Sequence
  Description of Artificial Sequence: Synthetic oligonucleotide
cagccgucgaggucugugu

SEQ ID NO: 307757 - RNA, 19 nt, Artificial Sequence
  Description of Artificial Sequence: Synthetic oligonucleotide
caacgguguacaagaugau

SEQ ID NO: 307758 - RNA, 19 nt, Artificial Sequence
  Description of Artificial Sequence: Synthetic oligonucleotide
gggucgcuguaauggccca

SEQ ID NO: 307759 - RNA, 19 nt, Artificial Sequence
  Description of Artificial Sequence: Synthetic oligonucleotide
ccuguaucgaugguugggu

SEQ ID NO: 307760 - RNA, 19 nt, Artificial Sequence
  Description of Artificial Sequence: Synthetic oligonucleotide
ccguggauugcacaccugu

SEQ ID NO: 307761 - RNA, 19 nt, Artificial Sequence
  Description of Artificial Sequence: Synthetic oligonucleotide
gggguuccguggauugcac

SEQ ID NO: 307762 - RNA, 19 nt, Artificial Sequence
  Description of Artificial Sequence: Synthetic oligonucleotide
caauuccgucuuugucaua

SEQ ID NO: 307763 - RNA, 19 nt, Artificial Sequence
  Description of Artificial Sequence: Synthetic oligonucleotide
gacucacuaugaggauggu

SEQ ID NO: 307764 - RNA, 19 nt, Artificial Sequence
  Description of Artificial Sequence: Synthetic oligonucleotide
ccucccuagcacuuuggcu

SEQ ID NO: 307765 - RNA, 19 nt, Artificial Sequence
  Description of Artificial Sequence: Synthetic oligonucleotide
cccucugacaugccugaaa

SEQ ID NO: 307766 - RNA, 19 nt, Artificial Sequence
  Description of Artificial Sequence: Synthetic oligonucleotide
ggacuagccuuagaguguu

SEQ ID NO: 307767 - RNA, 19 nt, Artificial Sequence
  Description of Artificial Sequence: Synthetic oligonucleotide
gcgguacauggggucgcug

SEQ ID NO: 307768 - RNA, 19 nt, Artificial Sequence
  Description of Artificial Sequence: Synthetic oligonucleotide
cguugucaucaucgugguc

SEQ ID NO: 307769 - RNA, 19 nt, Artificial Sequence
  Description of Artificial Sequence: Synthetic oligonucleotide
ggcaggucaccugcucuua

SEQ ID NO: 307770 - RNA, 19 nt, Artificial Sequence
  Description of Artificial Sequence: Synthetic oligonucleotide
cgguacauggggucgcugu

SEQ ID NO: 307771 - RNA, 19 nt, Artificial Sequence
  Description of Artificial Sequence: Synthetic oligonucleotide
gcugagucugggacugcau

SEQ ID NO: 307772 - RNA, 19 nt, Artificial Sequence
  Description of Artificial Sequence: Synthetic oligonucleotide
ccgucgaggucuguguccu

SEQ ID NO: 307773 - RNA, 19 nt, Artificial Sequence
  Description of Artificial Sequence: Synthetic oligonucleotide
cagguagaacaggguuaau

SEQ ID NO: 307774 - RNA, 19 nt, Artificial Sequence
  Description of Artificial Sequence: Synthetic oligonucleotide
ggcucggugcugaguccua

SEQ ID NO: 307775 - RNA, 19 nt, Artificial Sequence
  Description of Artificial Sequence: Synthetic oligonucleotide
gguuggcauuaggcacgua

SEQ ID NO: 307776 - RNA, 19 nt, Artificial Sequence
  Description of Artificial Sequence: Synthetic oligonucleotide
aacguaauaaguuaacuug

SEQ ID NO: 307777 - RNA, 19 nt, Artificial Sequence
  Description of Artificial Sequence: Synthetic oligonucleotide
accauaaucaaacugcagc

SEQ ID NO: 307778 - RNA, 19 nt, Artificial Sequence
  Description of Artificial Sequence: Synthetic oligonucleotide
aaacuggacauccugacuc

SEQ ID NO: 307779 - RNA, 19 nt, Artificial Sequence
  Description of Artificial Sequence: Synthetic oligonucleotide
aauugcacauugucuaugc

SEQ ID NO: 307780 - RNA, 19 nt, Artificial Sequence
  Description of Artificial Sequence: Synthetic oligonucleotide
aauuaugggauaucugagg

SEQ ID NO: 307781 - RNA, 19 nt, Artificial Sequence
  Description of Artificial Sequence: Synthetic oligonucleotide
ugcaguguaaccaagggca

SEQ ID NO: 307782 - RNA, 19 nt, Artificial Sequence
  Description of Artificial Sequence: Synthetic oligonucleotide
aauaaguuaacuugggauu

SEQ ID NO: 307783 - RNA, 19 nt, Artificial Sequence
  Description of Artificial Sequence: Synthetic oligonucleotide
auuaugggauaucugaggg

SEQ ID NO: 307784 - RNA, 19 nt, Artificial Sequence
  Description of Artificial Sequence: Synthetic oligonucleotide
aauugggcaacuugacacc

SEQ ID NO: 307785 - RNA, 19 nt, Artificial Sequence
  Description of Artificial Sequence: Synthetic oligonucleotide
uauaagaugacucgagcug

SEQ ID NO: 307786 - RNA, 19 nt, Artificial Sequence
  Description of Artificial Sequence: Synthetic oligonucleotide
uuacaaacaauagcgaggg

SEQ ID NO: 307787 - RNA, 19 nt, Artificial Sequence
  Description of Artificial Sequence: Synthetic oligonucleotide
uguauaaugcaacaguaaa

SEQ ID NO: 307788 - RNA, 19 nt, Artificial Sequence
  Description of Artificial Sequence: Synthetic oligonucleotide
uuaacuugggauuuaaauc

SEQ ID NO: 307789 - RNA, 19 nt, Artificial Sequence
  Description of Artificial Sequence: Synthetic oligonucleotide
agcauuagucuucagaaag

SEQ ID NO: 307790 - RNA, 19 nt, Artificial Sequence
  Description of Artificial Sequence: Synthetic oligonucleotide
ugugucagaauuauuaaaa

SEQ ID NO: 307791 - RNA, 19 nt, Artificial Sequence
  Description of Artificial Sequence: Synthetic oligonucleotide
aaaucauggagaccaaaug

SEQ ID NO: 307792 - RNA, 19 nt, Artificial Sequence
  Description of Artificial Sequence: Synthetic oligonucleotide
uaaaauugcacauugucua

SEQ ID NO: 307793 - RNA, 19 nt, Artificial Sequence
  Description of Artificial Sequence: Synthetic oligonucleotide
auaaucaaacugcagcuuc

SEQ ID NO: 307794 - RNA, 19 nt, Artificial Sequence
  Description of Artificial Sequence: Synthetic oligonucleotide
uuucgaagcaccaaaauuu

SEQ ID NO: 307795 - RNA, 19 nt, Artificial Sequence
  Description of Artificial Sequence: Synthetic oligonucleotide
uuaucagaacuccugcgcg

SEQ ID NO: 307796 - RNA, 19 nt, Artificial Sequence
  Description of Artificial Sequence: Synthetic oligonucleotide
ucaauaggguaaauguagg

SEQ ID NO: 307797 - RNA, 19 nt, Artificial Sequence
  Description of Artificial Sequence: Synthetic oligonucleotide
aucagcuuaacagauggcc

SEQ ID NO: 307798 - RNA, 19 nt, Artificial Sequence
  Description of Artificial Sequence: Synthetic oligonucleotide
uuuaaucgcagacauucgc

SEQ ID NO: 307799 - RNA, 19 nt, Artificial Sequence
  Description of Artificial Sequence: Synthetic oligonucleotide
uuaacagauggccauagaa

SEQ ID NO: 307800 - RNA, 19 nt, Artificial Sequence
  Description of Artificial Sequence: Synthetic oligonucleotide
ucuuugauuguugaucugg

SEQ ID NO: 307801 - RNA, 19 nt, Artificial Sequence
  Description of Artificial Sequence: Synthetic oligonucleotide
aaacguaauaaguuaacuu

SEQ ID NO: 307802 - RNA, 19 nt, Artificial Sequence
  Description of Artificial Sequence: Synthetic oligonucleotide
agaguaacugccugcaacg

SEQ ID NO: 307803 - RNA, 19 nt, Artificial Sequence
  Description of Artificial Sequence: Synthetic oligonucleotide
ugcagaaugacaauggauu

SEQ ID NO: 307804 - RNA, 19 nt, Artificial Sequence
  Description of Artificial Sequence: Synthetic oligonucleotide
gacacguuuucgcugaggg

SEQ ID NO: 307805 - RNA, 19 nt, Artificial Sequence
  Description of Artificial Sequence: Synthetic oligonucleotide
auaaagcgcagacgaaugc

SEQ ID NO: 307806 - RNA, 19 nt, Artificial Sequence
  Description of Artificial Sequence: Synthetic oligonucleotide
cauuuguugcuuaugcagg

SEQ ID NO: 307807 - RNA, 19 nt, Artificial Sequence
  Description of Artificial Sequence: Synthetic oligonucleotide
aguucguucuauuacauau

SEQ ID NO: 307808 - RNA, 19 nt, Artificial Sequence
  Description of Artificial Sequence: Synthetic oligonucleotide
uuuuaaucgcagacauucg

SEQ ID NO: 307809 - RNA, 19 nt, Artificial Sequence
  Description of Artificial Sequence: Synthetic oligonucleotide
uucagaauugggcaacuug

SEQ ID NO: 307810 - RNA, 19 nt, Artificial Sequence
  Description of Artificial Sequence: Synthetic oligonucleotide
uaugaauuaugggauaucu

SEQ ID NO: 307811 - RNA, 19 nt, Artificial Sequence
  Description of Artificial Sequence: Synthetic oligonucleotide
gauacaguggaaacucucg

SEQ ID NO: 307812 - RNA, 19 nt, Artificial Sequence
  Description of Artificial Sequence: Synthetic oligonucleotide
aucaauaggguaaauguag

SEQ ID NO: 307813 - RNA, 19 nt, Artificial Sequence
  Description of Artificial Sequence: Synthetic oligonucleotide
uuaucuuugauuguugauc

SEQ ID NO: 307814 - RNA, 19 nt, Artificial Sequence
  Description of Artificial Sequence: Synthetic oligonucleotide
augccuauaagaugacucg

SEQ ID NO: 307815 - RNA, 19 nt, Artificial Sequence
  Description of Artificial Sequence: Synthetic oligonucleotide
ucugaaugaaacguaauaa

SEQ ID NO: 307816 - RNA, 19 nt, Artificial Sequence
  Description of Artificial Sequence: Synthetic oligonucleotide
aacgaauugucaacugagc

SEQ ID NO: 307817 - RNA, 19 nt, Artificial Sequence
  Description of Artificial Sequence: Synthetic oligonucleotide
aaaaugcacuuccuuuguc

SEQ ID NO: 307818 - RNA, 19 nt, Artificial Sequence
  Description of Artificial Sequence: Synthetic oligonucleotide
aaugcagaaugacaaugga

SEQ ID NO: 307819 - RNA, 19 nt, Artificial Sequence
  Description of Artificial Sequence: Synthetic oligonucleotide
ugcuuuugagaaacuaaag

SEQ ID NO: 307820 - RNA, 19 nt, Artificial Sequence
  Description of Artificial Sequence: Synthetic oligonucleotide
aacggcaaugcuuccauca

SEQ ID NO: 307821 - RNA, 19 nt, Artificial Sequence
  Description of Artificial Sequence: Synthetic oligonucleotide
uuuagacuagugaaucuac

SEQ ID NO: 307822 - RNA, 19 nt, Artificial Sequence
  Description of Artificial Sequence: Synthetic oligonucleotide
aaugcaacaguaaaugaaa

SEQ ID NO: 307823 - RNA, 19 nt, Artificial Sequence
  Description of Artificial Sequence: Synthetic oligonucleotide
auaauccuuaugcucguuc

SEQ ID NO: 307824 - RNA, 19 nt, Artificial Sequence
  Description of Artificial Sequence: Synthetic oligonucleotide
guaaauguaggaaagcuca

SEQ ID NO: 307825 - RNA, 19 nt, Artificial Sequence
  Description of Artificial Sequence: Synthetic oligonucleotide
uuccgcaacucacucaggg

SEQ ID NO: 307826 - RNA, 19 nt, Artificial Sequence
  Description of Artificial Sequence: Synthetic oligonucleotide
uucauuucgaagcaccaaa

SEQ ID NO: 307827 - RNA, 19 nt, Artificial Sequence
  Description of Artificial Sequence: Synthetic oligonucleotide
uuaaucgcagacauucgcu

SEQ ID NO: 307828 - RNA, 19 nt, Artificial Sequence
  Description of Artificial Sequence: Synthetic oligonucleotide
uuuuggaccaacagaacau

SEQ ID NO: 307829 - RNA, 19 nt, Artificial Sequence
  Description of Artificial Sequence: Synthetic oligonucleotide
ugucuguggguacauaaug

SEQ ID NO: 307830 - RNA, 19 nt, Artificial Sequence
  Description of Artificial Sequence: Synthetic oligonucleotide
ugaaacguaauaaguuaac

SEQ ID NO: 307831 - RNA, 19 nt, Artificial Sequence
  Description of Artificial Sequence: Synthetic oligonucleotide
ggguacauaauguauaaug

SEQ ID NO: 307832 - RNA, 19 nt, Artificial Sequence
  Description of Artificial Sequence: Synthetic oligonucleotide
aaauaaagcgcagacgaau

SEQ ID NO: 307833 - RNA, 19 nt, Artificial Sequence
  Description of Artificial Sequence: Synthetic oligonucleotide
uuuaagagcuugcaacccu

SEQ ID NO: 307834 - RNA, 19 nt, Artificial Sequence
  Description of Artificial Sequence: Synthetic oligonucleotide
aauaaagcgcagacgaaug

SEQ ID NO: 307835 - RNA, 19 nt, Artificial Sequence
  Description of Artificial Sequence: Synthetic oligonucleotide
uuaugggauaucugagggg

SEQ ID NO: 307836 - RNA, 19 nt, Artificial Sequence
  Description of Artificial Sequence: Synthetic oligonucleotide
uuaagugcagcuugggccu

SEQ ID NO: 307837 - RNA, 19 nt, Artificial Sequence
  Description of Artificial Sequence: Synthetic oligonucleotide
ucagcuuaacagauggcca

SEQ ID NO: 307838 - RNA, 19 nt, Artificial Sequence
  Description of Artificial Sequence: Synthetic oligonucleotide
uucugaaugaaacguaaua

SEQ ID NO: 307839 - RNA, 19 nt, Artificial Sequence
  Description of Artificial Sequence: Synthetic oligonucleotide
uaaauguaggaaagcucag

SEQ ID NO: 307840 - RNA, 19 nt, Artificial Sequence
  Description of Artificial Sequence: Synthetic oligonucleotide
caacgaauugucaacugag

SEQ ID NO: 307841 - RNA, 19 nt, Artificial Sequence
  Description of Artificial Sequence: Synthetic oligonucleotide
cuaauuuccuuuccaauuc

SEQ ID NO: 307842 - RNA, 19 nt, Artificial Sequence
  Description of Artificial Sequence: Synthetic oligonucleotide
uaugggauaucugaggggu

SEQ ID NO: 307843 - RNA, 19 nt, Artificial Sequence
  Description of Artificial Sequence: Synthetic oligonucleotide
uucgauguccuuugucugg

SEQ ID NO: 307844 - RNA, 19 nt, Artificial Sequence
  Description of Artificial Sequence: Synthetic oligonucleotide
ugucuugcugucuucaaac

SEQ ID NO: 307845 - RNA, 19 nt, Artificial Sequence
  Description of Artificial Sequence: Synthetic oligonucleotide
aguguaaccaagggcaacg

SEQ ID NO: 307846 - RNA, 19 nt, Artificial Sequence
  Description of Artificial Sequence: Synthetic oligonucleotide
uggugcauggcccaucuug

SEQ ID NO: 307847 - RNA, 19 nt, Artificial Sequence
  Description of Artificial Sequence: Synthetic oligonucleotide
uuaagagcuugcaacccug

SEQ ID NO: 307848 - RNA, 19 nt, Artificial Sequence
  Description of Artificial Sequence: Synthetic oligonucleotide
caguugaaaaugcacuucc

SEQ ID NO: 307849 - RNA, 19 nt, Artificial Sequence
  Description of Artificial Sequence: Synthetic oligonucleotide
acguaauaaguuaacuugg

SEQ ID NO: 307850 - RNA, 19 nt, Artificial Sequence
  Description of Artificial Sequence: Synthetic oligonucleotide
uuagacuagugaaucuaca

SEQ ID NO: 307851 - RNA, 19 nt, Artificial Sequence
  Description of Artificial Sequence: Synthetic oligonucleotide
uucguucuauuacauauau

SEQ ID NO: 307852 - RNA, 19 nt, Artificial Sequence
  Description of Artificial Sequence: Synthetic oligonucleotide
uaauccuuaugcucguuca

SEQ ID NO: 307853 - RNA, 19 nt, Artificial Sequence
  Description of Artificial Sequence: Synthetic oligonucleotide
ugguacucgggcuggaggg

SEQ ID NO: 307854 - RNA, 19 nt, Artificial Sequence
  Description of Artificial Sequence: Synthetic oligonucleotide
acgaauugucaacugagca

SEQ ID NO: 307855 - RNA, 19 nt, Artificial Sequence
  Description of Artificial Sequence: Synthetic oligonucleotide
uacccaaugaucccgaguu

SEQ ID NO: 307856 - RNA, 19 nt, Artificial Sequence
  Description of Artificial Sequence: Synthetic oligonucleotide
acgaaugccuauaagauga

SEQ ID NO: 307857 - RNA, 19 nt, Artificial Sequence
  Description of Artificial Sequence: Synthetic oligonucleotide
auuugugucagaauuauua

SEQ ID NO: 307858 - RNA, 19 nt, Artificial Sequence
  Description of Artificial Sequence: Synthetic oligonucleotide
uuaucuggggaguguauug

SEQ ID NO: 307859 - RNA, 19 nt, Artificial Sequence
  Description of Artificial Sequence: Synthetic oligonucleotide
gacgaaugccuauaagaug

SEQ ID NO: 307860 - RNA, 19 nt, Artificial Sequence
  Description of Artificial Sequence: Synthetic oligonucleotide
gagaguaacugccugcaac

SEQ ID NO: 307861 - RNA, 19 nt, Artificial Sequence
  Description of Artificial Sequence: Synthetic oligonucleotide
guuuuggaccaacagaaca

SEQ ID NO: 307862 - RNA, 19 nt, Artificial Sequence
  Description of Artificial Sequence: Synthetic oligonucleotide
ucuacuccuauuuucuuau

SEQ ID NO: 307863 - RNA, 19 nt, Artificial Sequence
  Description of Artificial Sequence: Synthetic oligonucleotide
ccauguguaaauaaagcgc

SEQ ID NO: 307864 - RNA, 19 nt, Artificial Sequence
  Description of Artificial Sequence: Synthetic oligonucleotide
caagucuggagucccaagg

SEQ ID NO: 307865 - RNA, 19 nt, Artificial Sequence
  Description of Artificial Sequence: Synthetic oligonucleotide
gauguugaagcuugccgug

SEQ ID NO: 307866 - RNA, 19 nt, Artificial Sequence
  Description of Artificial Sequence: Synthetic oligonucleotide
aacuccucgaauucuccca

SEQ ID NO: 307867 - RNA, 19 nt, Artificial Sequence
  Description of Artificial Sequence: Synthetic oligonucleotide
aacacccauguguaaauaa

SEQ ID NO: 307868 - RNA, 19 nt, Artificial Sequence
  Description of Artificial Sequence: Synthetic oligonucleotide
ucaaugccgaauuguagcu

SEQ ID NO: 307869 - RNA, 19 nt, Artificial Sequence
  Description of Artificial Sequence: Synthetic oligonucleotide
aauagcgagggcaaaugcu

SEQ ID NO: 307870 - RNA, 19 nt, Artificial Sequence
  Description of Artificial Sequence: Synthetic oligonucleotide
ucaaguuggucgccugagg

SEQ ID NO: 307871 - RNA, 19 nt, Artificial Sequence
  Description of Artificial Sequence: Synthetic oligonucleotide
ucucauugcucgucgaugu

SEQ ID NO: 307872 - RNA, 19 nt, Artificial Sequence
  Description of Artificial Sequence: Synthetic oligonucleotide
cagacgaaugccuauaaga

SEQ ID NO: 307873 - RNA, 19 nt, Artificial Sequence
  Description of Artificial Sequence: Synthetic oligonucleotide
ucuacauauacuugucaua

SEQ ID NO: 307874 - RNA, 19 nt, Artificial Sequence
  Description of Artificial Sequence: Synthetic oligonucleotide
ucuggugaagggauacccc

SEQ ID NO: 307875 - RNA, 19 nt, Artificial Sequence
  Description of Artificial Sequence: Synthetic oligonucleotide
cuuuucagucagcuugucg

SEQ ID NO: 307876 - RNA, 19 nt, Artificial Sequence
  Description of Artificial Sequence: Synthetic oligonucleotide
agugguacaaagcuauuuu

SEQ ID NO: 307877 - RNA, 19 nt, Artificial Sequence
  Description of Artificial Sequence: Synthetic oligonucleotide
aaauugcacauugucuaug

SEQ ID NO: 307878 - RNA, 19 nt, Artificial Sequence
  Description of Artificial Sequence: Synthetic oligonucleotide
ucguucaaaucaauagggu

SEQ ID NO: 307879 - RNA, 19 nt, Artificial Sequence
  Description of Artificial Sequence: Synthetic oligonucleotide
aucgcagacauucgcuuuc

SEQ ID NO: 307880 - RNA, 19 nt, Artificial Sequence
  Description of Artificial Sequence: Synthetic oligonucleotide
aagagcuugcaacccugag

SEQ ID NO: 307881 - RNA, 19 nt, Artificial Sequence
  Description of Artificial Sequence: Synthetic oligonucleotide
accaaaugugcaguguaac

SEQ ID NO: 307882 - RNA, 19 nt, Artificial Sequence
  Description of Artificial Sequence: Synthetic oligonucleotide
uuaugcucguucaaaucaa

SEQ ID NO: 307883 - RNA, 19 nt, Artificial Sequence
  Description of Artificial Sequence: Synthetic oligonucleotide
uguaaccaagggcaacggc

SEQ ID NO: 307884 - RNA, 19 nt, Artificial Sequence
  Description of Artificial Sequence: Synthetic oligonucleotide
aagccuacaucugcacccc

SEQ ID NO: 307885 - RNA, 19 nt, Artificial Sequence
  Description of Artificial Sequence: Synthetic oligonucleotide
ugugucaaugccgaauugu

SEQ ID NO: 307886 - RNA, 19 nt, Artificial Sequence
  Description of Artificial Sequence: Synthetic oligonucleotide
uccagcuaccucucaauug

SEQ ID NO: 307887 - RNA, 19 nt, Artificial Sequence
  Description of Artificial Sequence: Synthetic oligonucleotide
ugguuuuagacuagugaau

SEQ ID NO: 307888 - RNA, 19 nt, Artificial Sequence
  Description of Artificial Sequence: Synthetic oligonucleotide
aaucaauaggguaaaugua

SEQ ID NO: 307889 - RNA, 19 nt, Artificial Sequence
  Description of Artificial Sequence: Synthetic oligonucleotide
gucugauugugguacucgg

SEQ ID NO: 307890 - RNA, 19 nt, Artificial Sequence
  Description of Artificial Sequence: Synthetic oligonucleotide
ucgcaccugaccaugaguc

SEQ ID NO: 307891 - RNA, 19 nt, Artificial Sequence
  Description of Artificial Sequence: Synthetic oligonucleotide
uugucguugauauuaucuu

SEQ ID NO: 307892 - RNA, 19 nt, Artificial Sequence
  Description of Artificial Sequence: Synthetic oligonucleotide
ccauuuguugcuuaugcag

SEQ ID NO: 307893 - RNA, 19 nt, Artificial Sequence
  Description of Artificial Sequence: Synthetic oligonucleotide
auaagaugacucgagcugu

SEQ ID NO: 307894 - RNA, 19 nt, Artificial Sequence
  Description of Artificial Sequence: Synthetic oligonucleotide
uguguagucuuaguuuucu

SEQ ID NO: 307895 - RNA, 19 nt, Artificial Sequence
  Description of Artificial Sequence: Synthetic oligonucleotide
gucguugauauuaucuuug

SEQ ID NO: 307896 - RNA, 19 nt, Artificial Sequence
  Description of Artificial Sequence: Synthetic oligonucleotide
ucguugauauuaucuuuga

SEQ ID NO: 307897 - RNA, 19 nt, Artificial Sequence
  Description of Artificial Sequence: Synthetic oligonucleotide
caaaucucagggacuggcc

SEQ ID NO: 307898 - RNA, 19 nt, Artificial Sequence
  Description of Artificial Sequence: Synthetic oligonucleotide
cuggggaguguauugcuag

SEQ ID NO: 307899 - RNA, 19 nt, Artificial Sequence
  Description of Artificial Sequence: Synthetic oligonucleotide
guaaccaagggcaacggca

SEQ ID NO: 307900 - RNA, 19 nt, Artificial Sequence
  Description of Artificial Sequence: Synthetic oligonucleotide
uucgaagcaccaaaauuuu

SEQ ID NO: 307901 - RNA, 19 nt, Artificial Sequence
  Description of Artificial Sequence: Synthetic oligonucleotide
ugacucgagcuguaagugc

SEQ ID NO: 307902 - RNA, 19 nt, Artificial Sequence
  Description of Artificial Sequence: Synthetic oligonucleotide
agucugauugugguacucg

SEQ ID NO: 307903 - RNA, 19 nt, Artificial Sequence
  Description of Artificial Sequence: Synthetic oligonucleotide
ugcaacgaauugucaacug

SEQ ID NO: 307904 - RNA, 19 nt, Artificial Sequence
  Description of Artificial Sequence: Synthetic oligonucleotide
ugaguucguucuauuacau

SEQ ID NO: 307905 - RNA, 19 nt, Artificial Sequence
  Description of Artificial Sequence: Synthetic oligonucleotide
auauaauggcuuccuucug

SEQ ID NO: 307906 - RNA, 19 nt, Artificial Sequence
  Description of Artificial Sequence: Synthetic oligonucleotide
ucucauguuccgagccgcg

SEQ ID NO: 307907 - RNA, 19 nt, Artificial Sequence
  Description of Artificial Sequence: Synthetic oligonucleotide
ugcucaucgcacuccacug

SEQ ID NO: 307908 - RNA, 19 nt, Artificial Sequence
  Description of Artificial Sequence: Synthetic oligonucleotide
uggaccaacagaacauaau

SEQ ID NO: 307909 - RNA, 19 nt, Artificial Sequence
  Description of Artificial Sequence: Synthetic oligonucleotide
gugaguucguucuauuaca

SEQ ID NO: 307910 - RNA, 19 nt, Artificial Sequence
  Description of Artificial Sequence: Synthetic oligonucleotide
agaaucucccauggugggc

SEQ ID NO: 307911 - RNA, 19 nt, Artificial Sequence
  Description of Artificial Sequence: Synthetic oligonucleotide
uucaaguuggucgccugag

SEQ ID NO: 307912 - RNA, 19 nt, Artificial Sequence
  Description of Artificial Sequence: Synthetic oligonucleotide
ugucguugauauuaucuuu

SEQ ID NO: 307913 - RNA, 19 nt, Artificial Sequence
  Description of Artificial Sequence: Synthetic oligonucleotide
ucauguuccgagccgcgcu

SEQ ID NO: 307914 - RNA, 19 nt, Artificial Sequence
  Description of Artificial Sequence: Synthetic oligonucleotide
cagugcagugccauucacg

SEQ ID NO: 307915 - RNA, 19 nt, Artificial Sequence
  Description of Artificial Sequence: Synthetic oligonucleotide
auguugaagcuugccgugc

SEQ ID NO: 307916 - RNA, 19 nt, Artificial Sequence
  Description of Artificial Sequence: Synthetic oligonucleotide
aaagcgcagacgaaugccu

SEQ ID NO: 307917 - RNA, 19 nt, Artificial Sequence
  Description of Artificial Sequence: Synthetic oligonucleotide
auaaguuaacuugggauuu

SEQ ID NO: 307918 - RNA, 19 nt, Artificial Sequence
  Description of Artificial Sequence: Synthetic oligonucleotide
uaucuggggaguguauugc

SEQ ID NO: 307919 - RNA, 19 nt, Artificial Sequence
  Description of Artificial Sequence: Synthetic oligonucleotide
gauguguagucuuaguuuu

SEQ ID NO: 307920 - RNA, 19 nt, Artificial Sequence
  Description of Artificial Sequence: Synthetic oligonucleotide
agguuaggaaggguuugcc

SEQ ID NO: 307921 - RNA, 19 nt, Artificial Sequence
  Description of Artificial Sequence: Synthetic oligonucleotide
gaacauaauaucuguuggu

SEQ ID NO: 307922 - RNA, 19 nt, Artificial Sequence
  Description of Artificial Sequence: Synthetic oligonucleotide
cuuaauccagcuaccucuc

SEQ ID NO: 307923 - RNA, 19 nt, Artificial Sequence
  Description of Artificial Sequence: Synthetic oligonucleotide
auauuaucuuugauuguug

SEQ ID NO: 307924 - RNA, 19 nt, Artificial Sequence
  Description of Artificial Sequence: Synthetic oligonucleotide
guugcuuaugcaggaaggc

SEQ ID NO: 307925 - RNA, 19 nt, Artificial Sequence
  Description of Artificial Sequence: Synthetic oligonucleotide
uccuuaugcucguucaaau

SEQ ID NO: 307926 - RNA, 19 nt, Artificial Sequence
  Description of Artificial Sequence: Synthetic oligonucleotide
aagcuugccgugcucaguu

SEQ ID NO: 307927 - RNA, 19 nt, Artificial Sequence
  Description of Artificial Sequence: Synthetic oligonucleotide
agacgaaugccuauaagau

SEQ ID NO: 307928 - RNA, 19 nt, Artificial Sequence
  Description of Artificial Sequence: Synthetic oligonucleotide
acaauagcgagggcaaaug

SEQ ID NO: 307929 - RNA, 19 nt, Artificial Sequence
  Description of Artificial Sequence: Synthetic oligonucleotide
uguaagugcgaaggugacc

SEQ ID NO: 307930 - RNA, 19 nt, Artificial Sequence
  Description of Artificial Sequence: Synthetic oligonucleotide
aacugccugcaacgaauug

SEQ ID NO: 307931 - RNA, 19 nt, Artificial Sequence
  Description of Artificial Sequence: Synthetic oligonucleotide
gaggagggguuuuguauug

SEQ ID NO: 307932 - RNA, 19 nt, Artificial Sequence
  Description of Artificial Sequence: Synthetic oligonucleotide
cuauaagaugacucgagcu

SEQ ID NO: 307933 - RNA, 19 nt, Artificial Sequence
  Description of Artificial Sequence: Synthetic oligonucleotide
uguauuggagucucucauu

SEQ ID NO: 307934 - RNA, 19 nt, Artificial Sequence
  Description of Artificial Sequence: Synthetic oligonucleotide
gaaugaaacguaauaaguu

SEQ ID NO: 307935 - RNA, 19 nt, Artificial Sequence
  Description of Artificial Sequence: Synthetic oligonucleotide
uccucacuuaucagaacuc

SEQ ID NO: 307936 - RNA, 19 nt, Artificial Sequence
  Description of Artificial Sequence: Synthetic oligonucleotide
aguuuuggaccaacagaac

SEQ ID NO: 307937 - RNA, 19 nt, Artificial Sequence
  Description of Artificial Sequence: Synthetic oligonucleotide
uaaucgcagacauucgcuu

SEQ ID NO: 307938 - RNA, 19 nt, Artificial Sequence
  Description of Artificial Sequence: Synthetic oligonucleotide
acugccugcaacgaauugu

SEQ ID NO: 307939 - RNA, 19 nt, Artificial Sequence
  Description of Artificial Sequence: Synthetic oligonucleotide
guuugccucaagucuggag

SEQ ID NO: 307940 - RNA, 19 nt, Artificial Sequence
  Description of Artificial Sequence: Synthetic oligonucleotide
aacucacucagggauuccu

SEQ ID NO: 307941 - RNA, 19 nt, Artificial Sequence
  Description of Artificial Sequence: Synthetic oligonucleotide
ugagggcauagauccuccg

SEQ ID NO: 307942 - RNA, 19 nt, Artificial Sequence
  Description of Artificial Sequence: Synthetic oligonucleotide
augaaacguaauaaguuaa

SEQ ID NO: 307943 - RNA, 19 nt, Artificial Sequence
  Description of Artificial Sequence: Synthetic oligonucleotide
ucauugcucgucgaugugu

SEQ ID NO: 307944 - RNA, 19 nt, Artificial Sequence
  Description of Artificial Sequence: Synthetic oligonucleotide
augacucgagcuguaagug

SEQ ID NO: 307945 - RNA, 19 nt, Artificial Sequence
  Description of Artificial Sequence: Synthetic oligonucleotide
cuuugauuguugaucugga

SEQ ID NO: 307946 - RNA, 19 nt, Artificial Sequence
  Description of Artificial Sequence: Synthetic oligonucleotide
ucuuauucaucagcuuaac

SEQ ID NO: 307947 - RNA, 19 nt, Artificial Sequence
  Description of Artificial Sequence: Synthetic oligonucleotide
cauggagaccaaaugugca

SEQ ID NO: 307948 - RNA, 19 nt, Artificial Sequence
  Description of Artificial Sequence: Synthetic oligonucleotide
aguuggucgccugagguga

SEQ ID NO: 307949 - RNA, 19 nt, Artificial Sequence
  Description of Artificial Sequence: Synthetic oligonucleotide
auugucaacugagcauuag

SEQ ID NO: 307950 - RNA, 19 nt, Artificial Sequence
  Description of Artificial Sequence: Synthetic oligonucleotide
caauaggguaaauguagga

SEQ ID NO: 307951 - RNA, 19 nt, Artificial Sequence
  Description of Artificial Sequence: Synthetic oligonucleotide
uccaauucucauguuccga

SEQ ID NO: 307952 - RNA, 19 nt, Artificial Sequence
  Description of Artificial Sequence: Synthetic oligonucleotide
gggcaaaugcuuuugagaa

SEQ ID NO: 307953 - RNA, 19 nt, Artificial Sequence
  Description of Artificial Sequence: Synthetic oligonucleotide
uggauacaguggaaacucu

SEQ ID NO: 307954 - RNA, 19 nt, Artificial Sequence
  Description of Artificial Sequence: Synthetic oligonucleotide
augaauuaugggauaucug

SEQ ID NO: 307955 - RNA, 19 nt, Artificial Sequence
  Description of Artificial Sequence: Synthetic oligonucleotide
cguaauaaguuaacuuggg

SEQ ID NO: 307956 - RNA, 19 nt, Artificial Sequence
  Description of Artificial Sequence: Synthetic oligonucleotide
uaugcucguucaaaucaau

SEQ ID NO: 307957 - RNA, 19 nt, Artificial Sequence
  Description of Artificial Sequence: Synthetic oligonucleotide
caccauaaucaaacugcag

SEQ ID NO: 307958 - RNA, 19 nt, Artificial Sequence
  Description of Artificial Sequence: Synthetic oligonucleotide
guaagugcgaaggugaccu

SEQ ID NO: 307959 - RNA, 19 nt, Artificial Sequence
  Description of Artificial Sequence: Synthetic oligonucleotide
ugccuauaagaugacucga

SEQ ID NO: 307960 - RNA, 19 nt, Artificial Sequence
  Description of Artificial Sequence: Synthetic oligonucleotide
gaaucucccauggugggca

SEQ ID NO: 307961 - RNA, 19 nt, Artificial Sequence
  Description of Artificial Sequence: Synthetic oligonucleotide
auacucauuugugucagaa

SEQ ID NO: 307962 - RNA, 19 nt, Artificial Sequence
  Description of Artificial Sequence: Synthetic oligonucleotide
gggaguguauugcuagagg

SEQ ID NO: 307963 - RNA, 19 nt, Artificial Sequence
  Description of Artificial Sequence: Synthetic oligonucleotide
ccaauucucauguuccgag

SEQ ID NO: 307964 - RNA, 19 nt, Artificial Sequence
  Description of Artificial Sequence: Synthetic oligonucleotide
aaguuaacuugggauuuaa

SEQ ID NO: 307965 - RNA, 19 nt, Artificial Sequence
  Description of Artificial Sequence: Synthetic oligonucleotide
ugucgcaccugaccaugag

SEQ ID NO: 307966 - RNA, 19 nt, Artificial Sequence
  Description of Artificial Sequence: Synthetic oligonucleotide
uaucucagcugugcuaugu

SEQ ID NO: 307967 - RNA, 19 nt, Artificial Sequence
  Description of Artificial Sequence: Synthetic oligonucleotide
gucuggugaagggauaccc

SEQ ID NO: 307968 - RNA, 19 nt, Artificial Sequence
  Description of Artificial Sequence: Synthetic oligonucleotide
augugcaguguaaccaagg

SEQ ID NO: 307969 - RNA, 19 nt, Artificial Sequence
  Description of Artificial Sequence: Synthetic oligonucleotide
cuuuggaacagggauggca

SEQ ID NO: 307970 - RNA, 19 nt, Artificial Sequence
  Description of Artificial Sequence: Synthetic oligonucleotide
uacaaacaauagcgagggc

SEQ ID NO: 307971 - RNA, 19 nt, Artificial Sequence
  Description of Artificial Sequence: Synthetic oligonucleotide
ucgagcuguaagugcgaag

SEQ ID NO: 307972 - RNA, 19 nt, Artificial Sequence
  Description of Artificial Sequence: Synthetic oligonucleotide
uugucuggugaagggauac

SEQ ID NO: 307973 - RNA, 19 nt, Artificial Sequence
  Description of Artificial Sequence: Synthetic oligonucleotide
uacucauuugugucagaau

SEQ ID NO: 307974 - RNA, 19 nt, Artificial Sequence
  Description of Artificial Sequence: Synthetic oligonucleotide
ggugugaccuuccucucag

SEQ ID NO: 307975 - RNA, 19 nt, Artificial Sequence
  Description of Artificial Sequence: Synthetic oligonucleotide
auugucuaugcuucaucua

SEQ ID NO: 307976 - RNA, 19 nt, Artificial Sequence
  Description of Artificial Sequence: Synthetic oligonucleotide
ccgaauuguagcugggagg

SEQ ID NO: 307977 - RNA, 19 nt, Artificial Sequence
  Description of Artificial Sequence: Synthetic oligonucleotide
ccccuuaugaauuauggga

SEQ ID NO: 307978 - RNA, 19 nt, Artificial Sequence
  Description of Artificial Sequence: Synthetic oligonucleotide
ucuggggaguguauugcua

SEQ ID NO: 307979 - RNA, 19 nt, Artificial Sequence
  Description of Artificial Sequence: Synthetic oligonucleotide
cuguaagugcgaaggugac

SEQ ID NO: 307980 - RNA, 19 nt, Artificial Sequence
  Description of Artificial Sequence: Synthetic oligonucleotide
cagaaugacaauggauuuc

SEQ ID NO: 307981 - RNA, 19 nt, Artificial Sequence
  Description of Artificial Sequence: Synthetic oligonucleotide
aggaaucuccuccaccgau

SEQ ID NO: 307982 - RNA, 19 nt, Artificial Sequence
  Description of Artificial Sequence: Synthetic oligonucleotide
auguauaaugcaacaguaa

SEQ ID NO: 307983 - RNA, 19 nt, Artificial Sequence
  Description of Artificial Sequence: Synthetic oligonucleotide
ggaaagcucagagaguaac

SEQ ID NO: 307984 - RNA, 19 nt, Artificial Sequence
  Description of Artificial Sequence: Synthetic oligonucleotide
auguguaaauaaagcgcag

SEQ ID NO: 307985 - RNA, 19 nt, Artificial Sequence
  Description of Artificial Sequence: Synthetic oligonucleotide
uugcucgucgauguguagu

SEQ ID NO: 307986 - RNA, 19 nt, Artificial Sequence
  Description of Artificial Sequence: Synthetic oligonucleotide
ugccgugcucaguugaaaa

SEQ ID NO: 307987 - RNA, 19 nt, Artificial Sequence
  Description of Artificial Sequence: Synthetic oligonucleotide
acccaaugaucccgaguuc

SEQ ID NO: 307988 - RNA, 19 nt, Artificial Sequence
  Description of Artificial Sequence: Synthetic oligonucleotide
cguucuauuacauauauau

SEQ ID NO: 307989 - RNA, 19 nt, Artificial Sequence
  Description of Artificial Sequence: Synthetic oligonucleotide
uuccucucagaaucuccca

SEQ ID NO: 307990 - RNA, 19 nt, Artificial Sequence
  Description of Artificial Sequence: Synthetic oligonucleotide
cuggacauccugacucuac

SEQ ID NO: 307991 - RNA, 19 nt, Artificial Sequence
  Description of Artificial Sequence: Synthetic oligonucleotide
auugcucgucgauguguag

SEQ ID NO: 307992 - RNA, 19 nt, Artificial Sequence
  Description of Artificial Sequence: Synthetic oligonucleotide
caucuuuugcuuggaaguc

SEQ ID NO: 307993 - RNA, 19 nt, Artificial Sequence
  Description of Artificial Sequence: Synthetic oligonucleotide
ucguucuauuacauauaua

SEQ ID NO: 307994 - RNA, 19 nt, Artificial Sequence
  Description of Artificial Sequence: Synthetic oligonucleotide
ucagaacuccugcgcggcc

SEQ ID NO: 307995 - RNA, 19 nt, Artificial Sequence
  Description of Artificial Sequence: Synthetic oligonucleotide
cugcacuuacacuguugcc

SEQ ID NO: 307996 - RNA, 19 nt, Artificial Sequence
  Description of Artificial Sequence: Synthetic oligonucleotide
guauugcuagaggugugcc

SEQ ID NO: 307997 - RNA, 19 nt, Artificial Sequence
  Description of Artificial Sequence: Synthetic oligonucleotide
gagcauuagucuucagaaa

SEQ ID NO: 307998 - RNA, 19 nt, Artificial Sequence
  Description of Artificial Sequence: Synthetic oligonucleotide
aacuccugcgcggccggcg

SEQ ID NO: 307999 - RNA, 19 nt, Artificial Sequence
  Description of Artificial Sequence: Synthetic oligonucleotide
auagcgagggcaaaugcuu

SEQ ID NO: 308000 - RNA, 19 nt, Artificial Sequence
  Description of Artificial Sequence: Synthetic oligonucleotide
ggaguguauugcuagaggu

SEQ ID NO: 308001 - RNA, 19 nt, Artificial Sequence
  Description of Artificial Sequence: Synthetic oligonucleotide
acauggauauguggauaag

SEQ ID NO: 308002 - RNA, 19 nt, Artificial Sequence
  Description of Artificial Sequence: Synthetic oligonucleotide
ucaucgcacuccacugcca

SEQ ID NO: 308003 - RNA, 19 nt, Artificial Sequence
  Description of Artificial Sequence: Synthetic oligonucleotide
uggggaguguauugcuaga

SEQ ID NO: 308004 - RNA, 19 nt, Artificial Sequence
  Description of Artificial Sequence: Synthetic oligonucleotide
ugagggguacuuguaggaa

SEQ ID NO: 308005 - RNA, 19 nt, Artificial Sequence
  Description of Artificial Sequence: Synthetic oligonucleotide
gcaacgaauugucaacuga

SEQ ID NO: 308006 - RNA, 19 nt, Artificial Sequence
  Description of Artificial Sequence: Synthetic oligonucleotide
ucgauguccuuugucuggu

SEQ ID NO: 308007 - RNA, 19 nt, Artificial Sequence
  Description of Artificial Sequence: Synthetic oligonucleotide
gcaaaucucagggacuggc

SEQ ID NO: 308008 - RNA, 19 nt, Artificial Sequence
  Description of Artificial Sequence: Synthetic oligonucleotide
auacauggauauguggaua

SEQ ID NO: 308009 - RNA, 19 nt, Artificial Sequence
  Description of Artificial Sequence: Synthetic oligonucleotide
uaaguuaacuugggauuua

SEQ ID NO: 308010 - RNA, 19 nt, Artificial Sequence
  Description of Artificial Sequence: Synthetic oligonucleotide
agcuggcccguuuucgaug

SEQ ID NO: 308011 - RNA, 19 nt, Artificial Sequence
  Description of Artificial Sequence: Synthetic oligonucleotide
ucgucgauguguagucuua

SEQ ID NO: 308012 - RNA, 19 nt, Artificial Sequence
  Description of Artificial Sequence: Synthetic oligonucleotide
guuuucgcugagggcauag

SEQ ID NO: 308013 - RNA, 19 nt, Artificial Sequence
  Description of Artificial Sequence: Synthetic oligonucleotide
uccuccaccgauacucauu

SEQ ID NO: 308014 - RNA, 19 nt, Artificial Sequence
  Description of Artificial Sequence: Synthetic oligonucleotide
uggcccguuuucgaugucc

SEQ ID NO: 308015 - RNA, 19 nt, Artificial Sequence
  Description of Artificial Sequence: Synthetic oligonucleotide
aauaauccuuaugcucguu

SEQ ID NO: 308016 - RNA, 19 nt, Artificial Sequence
  Description of Artificial Sequence: Synthetic oligonucleotide
uugcuagaggugugcccag

SEQ ID NO: 308017 - RNA, 19 nt, Artificial Sequence
  Description of Artificial Sequence: Synthetic oligonucleotide
aagugcgaaggugaccuuu

SEQ ID NO: 308018 - RNA, 19 nt, Artificial Sequence
  Description of Artificial Sequence: Synthetic oligonucleotide
gcuguaagugcgaagguga

SEQ ID NO: 308019 - RNA, 19 nt, Artificial Sequence
  Description of Artificial Sequence: Synthetic oligonucleotide
cauguuccgagccgcgcug

SEQ ID NO: 308020 - RNA, 19 nt, Artificial Sequence
  Description of Artificial Sequence: Synthetic oligonucleotide
ggugugaugucugucgcac

SEQ ID NO: 308021 - RNA, 19 nt, Artificial Sequence
  Description of Artificial Sequence: Synthetic oligonucleotide
acacccauguguaaauaaa

SEQ ID NO: 308022 - RNA, 19 nt, Artificial Sequence
  Description of Artificial Sequence: Synthetic oligonucleotide
agugcgaaggugaccuuug

SEQ ID NO: 308023 - RNA, 19 nt, Artificial Sequence
  Description of Artificial Sequence: Synthetic oligonucleotide
gcaccugaccaugaguccg

SEQ ID NO: 308024 - RNA, 19 nt, Artificial Sequence
  Description of Artificial Sequence: Synthetic oligonucleotide
agaggugugcccaguuuug

SEQ ID NO: 308025 - RNA, 19 nt, Artificial Sequence
  Description of Artificial Sequence: Synthetic oligonucleotide
auccuuaugcucguucaaa

SEQ ID NO: 308026 - RNA, 19 nt, Artificial Sequence
  Description of Artificial Sequence: Synthetic oligonucleotide
gcagacgaaugccuauaag

SEQ ID NO: 308027 - RNA, 19 nt, Artificial Sequence
  Description of Artificial Sequence: Synthetic oligonucleotide
ggucuuacugucugcccug

SEQ ID NO: 308028 - RNA, 19 nt, Artificial Sequence
  Description of Artificial Sequence: Synthetic oligonucleotide
cgugcucaguugaaaaugc

SEQ ID NO: 308029 - RNA, 19 nt, Artificial Sequence
  Description of Artificial Sequence: Synthetic oligonucleotide
auccagcuaccucucaauu

SEQ ID NO: 308030 - RNA, 19 nt, Artificial Sequence
  Description of Artificial Sequence: Synthetic oligonucleotide
ugccucaagucuggagucc

SEQ ID NO: 308031 - RNA, 19 nt, Artificial Sequence
  Description of Artificial Sequence: Synthetic oligonucleotide
cccaaugaucccgaguucc

SEQ ID NO: 308032 - RNA, 19 nt, Artificial Sequence
  Description of Artificial Sequence: Synthetic oligonucleotide
caaugccgaauuguagcug

SEQ ID NO: 308033 - RNA, 19 nt, Artificial Sequence
  Description of Artificial Sequence: Synthetic oligonucleotide
ggauauguggauaaguuuu

SEQ ID NO: 308034 - RNA, 19 nt, Artificial Sequence
  Description of Artificial Sequence: Synthetic oligonucleotide
ugccgaauuguagcuggga

SEQ ID NO: 308035 - RNA, 19 nt, Artificial Sequence
  Description of Artificial Sequence: Synthetic oligonucleotide
cuuaacagauggccauaga

SEQ ID NO: 308036 - RNA, 19 nt, Artificial Sequence
  Description of Artificial Sequence: Synthetic oligonucleotide
gcuuaacagauggccauag

SEQ ID NO: 308037 - RNA, 19 nt, Artificial Sequence
  Description of Artificial Sequence: Synthetic oligonucleotide
gugcauggcccaucuugag

SEQ ID NO: 308038 - RNA, 19 nt, Artificial Sequence
  Description of Artificial Sequence: Synthetic oligonucleotide
gaggaaucuccuccaccga

SEQ ID NO: 308039 - RNA, 19 nt, Artificial Sequence
  Description of Artificial Sequence: Synthetic oligonucleotide
agagaguaacugccugcaa

SEQ ID NO: 308040 - RNA, 19 nt, Artificial Sequence
  Description of Artificial Sequence: Synthetic oligonucleotide
acugagcauuagucuucag

SEQ ID NO: 308041 - RNA, 19 nt, Artificial Sequence
  Description of Artificial Sequence: Synthetic oligonucleotide
cucauugcucgucgaugug

SEQ ID NO: 308042 - RNA, 19 nt, Artificial Sequence
  Description of Artificial Sequence: Synthetic oligonucleotide
cucauguuccgagccgcgc

SEQ ID NO: 308043 - RNA, 19 nt, Artificial Sequence
  Description of Artificial Sequence: Synthetic oligonucleotide
ccucacuuaucagaacucc

SEQ ID NO: 308044 - RNA, 19 nt, Artificial Sequence
  Description of Artificial Sequence: Synthetic oligonucleotide
gcacuuacacuguugccca

SEQ ID NO: 308045 - RNA, 19 nt, Artificial Sequence
  Description of Artificial Sequence: Synthetic oligonucleotide
cuucaaguuggucgccuga

SEQ ID NO: 308046 - RNA, 19 nt, Artificial Sequence
  Description of Artificial Sequence: Synthetic oligonucleotide
cagagaguaacugccugca

SEQ ID NO: 308047 - RNA, 19 nt, Artificial Sequence
  Description of Artificial Sequence: Synthetic oligonucleotide
ccuuaugcucguucaaauc

SEQ ID NO: 308048 - RNA, 19 nt, Artificial Sequence
  Description of Artificial Sequence: Synthetic oligonucleotide
ucuuacugucugcccuguc

SEQ ID NO: 308049 - RNA, 19 nt, Artificial Sequence
  Description of Artificial Sequence: Synthetic oligonucleotide
uagagccauuuguugcuua

SEQ ID NO: 308050 - RNA, 19 nt, Artificial Sequence
  Description of Artificial Sequence: Synthetic oligonucleotide
ggggaguguauugcuagag

SEQ ID NO: 308051 - RNA, 19 nt, Artificial Sequence
  Description of Artificial Sequence: Synthetic oligonucleotide
cuugagaaagcaggccaca

SEQ ID NO: 308052 - RNA, 19 nt, Artificial Sequence
  Description of Artificial Sequence: Synthetic oligonucleotide
guugaagcuugccgugcuc

SEQ ID NO: 308053 - RNA, 19 nt, Artificial Sequence
  Description of Artificial Sequence: Synthetic oligonucleotide
aucucagcugugcuauguu

SEQ ID NO: 308054 - RNA, 19 nt, Artificial Sequence
  Description of Artificial Sequence: Synthetic oligonucleotide
guaacugccugcaacgaau

SEQ ID NO: 308055 - RNA, 19 nt, Artificial Sequence
  Description of Artificial Sequence: Synthetic oligonucleotide
guucauuucgaagcaccaa

SEQ ID NO: 308056 - RNA, 19 nt, Artificial Sequence
  Description of Artificial Sequence: Synthetic oligonucleotide
agcgagggcaaaugcuuuu

SEQ ID NO: 308057 - RNA, 19 nt, Artificial Sequence
  Description of Artificial Sequence: Synthetic oligonucleotide
cauggauauguggauaagu

SEQ ID NO: 308058 - RNA, 19 nt, Artificial Sequence
  Description of Artificial Sequence: Synthetic oligonucleotide
gaccuuugccuggaaacaa

SEQ ID NO: 308059 - RNA, 19 nt, Artificial Sequence
  Description of Artificial Sequence: Synthetic oligonucleotide
aguuaacuugggauuuaaa

SEQ ID NO: 308060 - RNA, 19 nt, Artificial Sequence
  Description of Artificial Sequence: Synthetic oligonucleotide
cauugcucgucgaugugua

SEQ ID NO: 308061 - RNA, 19 nt, Artificial Sequence
  Description of Artificial Sequence: Synthetic oligonucleotide
aggaaggguuugccucaag

SEQ ID NO: 308062 - RNA, 19 nt, Artificial Sequence
  Description of Artificial Sequence: Synthetic oligonucleotide
cagugggaucugcagucug

SEQ ID NO: 308063 - RNA, 19 nt, Artificial Sequence
  Description of Artificial Sequence: Synthetic oligonucleotide
ugaguccgugcuccaugaa

SEQ ID NO: 308064 - RNA, 19 nt, Artificial Sequence
  Description of Artificial Sequence: Synthetic oligonucleotide
ccaagggcaacggcaaugc

SEQ ID NO: 308065 - RNA, 19 nt, Artificial Sequence
  Description of Artificial Sequence: Synthetic oligonucleotide
guucguucuauuacauaua

SEQ ID NO: 308066 - RNA, 19 nt, Artificial Sequence
  Description of Artificial Sequence: Synthetic oligonucleotide
ggucgccugaggugaagcc

SEQ ID NO: 308067 - RNA, 19 nt, Artificial Sequence
  Description of Artificial Sequence: Synthetic oligonucleotide
gcauuagucuucagaaaga

SEQ ID NO: 308068 - RNA, 19 nt, Artificial Sequence
  Description of Artificial Sequence: Synthetic oligonucleotide
gguacccaaugaucccgag

SEQ ID NO: 308069 - RNA, 19 nt, Artificial Sequence
  Description of Artificial Sequence: Synthetic oligonucleotide
gcuucaaguuggucgccug

SEQ ID NO: 308070 - RNA, 19 nt, Artificial Sequence
  Description of Artificial Sequence: Synthetic oligonucleotide
augccgaauuguagcuggg

SEQ ID NO: 308071 - RNA, 19 nt, Artificial Sequence
  Description of Artificial Sequence: Synthetic oligonucleotide
ggaaggguuugccucaagu

SEQ ID NO: 308072 - RNA, 19 nt, Artificial Sequence
  Description of Artificial Sequence: Synthetic oligonucleotide
ggguuugccucaagucugg

SEQ ID NO: 308073 - RNA, 19 nt, Artificial Sequence
  Description of Artificial Sequence: Synthetic oligonucleotide
guugaucuggaccccuuau

SEQ ID NO: 308074 - RNA, 19 nt, Artificial Sequence
  Description of Artificial Sequence: Synthetic oligonucleotide
ccugacucuacauauacuu

SEQ ID NO: 308075 - RNA, 19 nt, Artificial Sequence
  Description of Artificial Sequence: Synthetic oligonucleotide
agcuugcaacccugaggca

SEQ ID NO: 308076 - RNA, 19 nt, Artificial Sequence
  Description of Artificial Sequence: Synthetic oligonucleotide
aagcgcagacgaaugccua

SEQ ID NO: 308077 - RNA, 19 nt, Artificial Sequence
  Description of Artificial Sequence: Synthetic oligonucleotide
cguucaaaucaauagggua

SEQ ID NO: 308078 - RNA, 19 nt, Artificial Sequence
  Description of Artificial Sequence: Synthetic oligonucleotide
gguuaggaaggguuugccu

SEQ ID NO: 308079 - RNA, 19 nt, Artificial Sequence
  Description of Artificial Sequence: Synthetic oligonucleotide
uggaccccuuaugaauuau

SEQ ID NO: 308080 - RNA, 19 nt, Artificial Sequence
  Description of Artificial Sequence: Synthetic oligonucleotide
cuugccgugcucaguugaa

SEQ ID NO: 308081 - RNA, 19 nt, Artificial Sequence
  Description of Artificial Sequence: Synthetic oligonucleotide
uugccgugcucaguugaaa

SEQ ID NO: 308082 - RNA, 19 nt, Artificial Sequence
  Description of Artificial Sequence: Synthetic oligonucleotide
guacccaaugaucccgagu

SEQ ID NO: 308083 - RNA, 19 nt, Artificial Sequence
  Description of Artificial Sequence: Synthetic oligonucleotide
augcucguucaaaucaaua

SEQ ID NO: 308084 - RNA, 19 nt, Artificial Sequence
  Description of Artificial Sequence: Synthetic oligonucleotide
ugcuagaggugugcccagu

SEQ ID NO: 308085 - RNA, 19 nt, Artificial Sequence
  Description of Artificial Sequence: Synthetic oligonucleotide
agcuuaacagauggccaua

SEQ ID NO: 308086 - RNA, 19 nt, Artificial Sequence
  Description of Artificial Sequence: Synthetic oligonucleotide
cagcuuaacagauggccau

SEQ ID NO: 308087 - RNA, 19 nt, Artificial Sequence
  Description of Artificial Sequence: Synthetic oligonucleotide
cagucugauugugguacuc

SEQ ID NO: 308088 - RNA, 19 nt, Artificial Sequence
  Description of Artificial Sequence: Synthetic oligonucleotide
caacucacucagggauucc

SEQ ID NO: 308089 - RNA, 19 nt, Artificial Sequence
  Description of Artificial Sequence: Synthetic oligonucleotide
ggaccccuuaugaauuaug

SEQ ID NO: 308090 - RNA, 19 nt, Artificial Sequence
  Description of Artificial Sequence: Synthetic oligonucleotide
gucgauguguagucuuagu

SEQ ID NO: 308091 - RNA, 19 nt, Artificial Sequence
  Description of Artificial Sequence: Synthetic oligonucleotide
uaagugcgaaggugaccuu

SEQ ID NO: 308092 - RNA, 19 nt, Artificial Sequence
  Description of Artificial Sequence: Synthetic oligonucleotide
gugcucaguugaaaaugca

SEQ ID NO: 308093 - RNA, 19 nt, Artificial Sequence
  Description of Artificial Sequence: Synthetic oligonucleotide
agcuugucguugauauuau

SEQ ID NO: 308094 - RNA, 19 nt, Artificial Sequence
  Description of Artificial Sequence: Synthetic oligonucleotide
gccggcggaagcuggacac

SEQ ID NO: 308095 - RNA, 19 nt, Artificial Sequence
  Description of Artificial Sequence: Synthetic oligonucleotide
ggcagugcagugccauuca

SEQ ID NO: 308096 - RNA, 19 nt, Artificial Sequence
  Description of Artificial Sequence: Synthetic oligonucleotide
gucgcaccugaccaugagu

SEQ ID NO: 308097 - RNA, 19 nt, Artificial Sequence
  Description of Artificial Sequence: Synthetic oligonucleotide
gccucaagucuggaguccc

SEQ ID NO: 308098 - RNA, 19 nt, Artificial Sequence
  Description of Artificial Sequence: Synthetic oligonucleotide
ggcccaucuugagaaagca

SEQ ID NO: 308099 - RNA, 19 nt, Artificial Sequence
  Description of Artificial Sequence: Synthetic oligonucleotide
cugcaacgaauugucaacu

SEQ ID NO: 308100 - RNA, 19 nt, Artificial Sequence
  Description of Artificial Sequence: Synthetic oligonucleotide
cagucucauugcucgucga

SEQ ID NO: 308101 - RNA, 19 nt, Artificial Sequence
  Description of Artificial Sequence: Synthetic oligonucleotide
ggaggagggguuuuguauu

SEQ ID NO: 308102 - RNA, 19 nt, Artificial Sequence
  Description of Artificial Sequence: Synthetic oligonucleotide
ccugaccaugaguccgugc

SEQ ID NO: 308103 - RNA, 19 nt, Artificial Sequence
  Description of Artificial Sequence: Synthetic oligonucleotide
gcacauugucuaugcuuca

SEQ ID NO: 308104 - RNA, 19 nt, Artificial Sequence
  Description of Artificial Sequence: Synthetic oligonucleotide
guccgaguucccaugggcu

SEQ ID NO: 308105 - RNA, 19 nt, Artificial Sequence
  Description of Artificial Sequence: Synthetic oligonucleotide
gcacuugcucaucgcacuc

SEQ ID NO: 308106 - RNA, 19 nt, Artificial Sequence
  Description of Artificial Sequence: Synthetic oligonucleotide
auguuccgagccgcgcugu

SEQ ID NO: 308107 - RNA, 19 nt, Artificial Sequence
  Description of Artificial Sequence: Synthetic oligonucleotide
accugaccaugaguccgug

SEQ ID NO: 308108 - RNA, 19 nt, Artificial Sequence
  Description of Artificial Sequence: Synthetic oligonucleotide
ugcccgcucuccucacuua

SEQ ID NO: 308109 - RNA, 19 nt, Artificial Sequence
  Description of Artificial Sequence: Synthetic oligonucleotide
gucgccugaggugaagccu

SEQ ID NO: 308110 - RNA, 19 nt, Artificial Sequence
  Description of Artificial Sequence: Synthetic oligonucleotide
cugcagucugauuguggua

SEQ ID NO: 308111 - RNA, 19 nt, Artificial Sequence
  Description of Artificial Sequence: Synthetic oligonucleotide
cauuugugucagaauuauu

SEQ ID NO: 308112 - RNA, 19 nt, Artificial Sequence
  Description of Artificial Sequence: Synthetic oligonucleotide
cucgucgauguguagucuu

SEQ ID NO: 308113 - RNA, 19 nt, Artificial Sequence
  Description of Artificial Sequence: Synthetic oligonucleotide
cuggaguccgaguucccau

SEQ ID NO: 308114 - RNA, 19 nt, Artificial Sequence
  Description of Artificial Sequence: Synthetic oligonucleotide
ggaaucuccuccaccgaua

SEQ ID NO: 308115 - RNA, 19 nt, Artificial Sequence
  Description of Artificial Sequence: Synthetic oligonucleotide
gagcuggcccguuuucgau

SEQ ID NO: 308116 - RNA, 19 nt, Artificial Sequence
  Description of Artificial Sequence: Synthetic oligonucleotide
caaugaucccgaguucccu

SEQ ID NO: 308117 - RNA, 19 nt, Artificial Sequence
  Description of Artificial Sequence: Synthetic oligonucleotide
cgaauugucaacugagcau

SEQ ID NO: 308118 - RNA, 19 nt, Artificial Sequence
  Description of Artificial Sequence: Synthetic oligonucleotide
cucgagcuguaagugcgaa

SEQ ID NO: 308119 - RNA, 19 nt, Artificial Sequence
  Description of Artificial Sequence: Synthetic oligonucleotide
cuagaggugugcccaguuu

SEQ ID NO: 308120 - RNA, 19 nt, Artificial Sequence
  Description of Artificial Sequence: Synthetic oligonucleotide
gcaacggcaaugcuuccau

SEQ ID NO: 308121 - RNA, 19 nt, Artificial Sequence
  Description of Artificial Sequence: Synthetic oligonucleotide
augggauaucugaggggua

SEQ ID NO: 308122 - RNA, 19 nt, Artificial Sequence
  Description of Artificial Sequence: Synthetic oligonucleotide
gcuggcccguuuucgaugu

SEQ ID NO: 308123 - RNA, 19 nt, Artificial Sequence
  Description of Artificial Sequence: Synthetic oligonucleotide
cucccauggugggcauggc

SEQ ID NO: 308124 - RNA, 19 nt, Artificial Sequence
  Description of Artificial Sequence: Synthetic oligonucleotide
cacauugucuaugcuucau

SEQ ID NO: 308125 - RNA, 19 nt, Artificial Sequence
  Description of Artificial Sequence: Synthetic oligonucleotide
cgauguguagucuuaguuu

SEQ ID NO: 308126 - RNA, 19 nt, Artificial Sequence
  Description of Artificial Sequence: Synthetic oligonucleotide
cgcucuccucacuuaucag

SEQ ID NO: 308127 - RNA, 19 nt, Artificial Sequence
  Description of Artificial Sequence: Synthetic oligonucleotide
ccgucccagggcuuucuuc

SEQ ID NO: 308128 - RNA, 19 nt, Artificial Sequence
  Description of Artificial Sequence: Synthetic oligonucleotide
gccgugcucaguugaaaau

SEQ ID NO: 308129 - RNA, 19 nt, Artificial Sequence
  Description of Artificial Sequence: Synthetic oligonucleotide
gucuuacugucugcccugu

SEQ ID NO: 308130 - RNA, 19 nt, Artificial Sequence
  Description of Artificial Sequence: Synthetic oligonucleotide
guuggucgccugaggugaa

SEQ ID NO: 308131 - RNA, 19 nt, Artificial Sequence
  Description of Artificial Sequence: Synthetic oligonucleotide
caagggcaacggcaaugcu

SEQ ID NO: 308132 - RNA, 19 nt, Artificial Sequence
  Description of Artificial Sequence: Synthetic oligonucleotide
guagagccauuuguugcuu

SEQ ID NO: 308133 - RNA, 19 nt, Artificial Sequence
  Description of Artificial Sequence: Synthetic oligonucleotide
gcagucugauugugguacu

SEQ ID NO: 308134 - RNA, 19 nt, Artificial Sequence
  Description of Artificial Sequence: Synthetic oligonucleotide
cuggcccguuuucgauguc

SEQ ID NO: 308135 - RNA, 19 nt, Artificial Sequence
  Description of Artificial Sequence: Synthetic oligonucleotide
ccgugcuccaugaaguuuu

SEQ ID NO: 308136 - RNA, 19 nt, Artificial Sequence
  Description of Artificial Sequence: Synthetic oligonucleotide
ccggcggaagcuggacacg

SEQ ID NO: 308137 - RNA, 19 nt, Artificial Sequence
  Description of Artificial Sequence: Synthetic oligonucleotide
gcccaguuuuggaccaaca

SEQ ID NO: 308138 - RNA, 19 nt, Artificial Sequence
  Description of Artificial Sequence: Synthetic oligonucleotide
cccaggucuacuccuauuu

SEQ ID NO: 308139 - RNA, 19 nt, Artificial Sequence
  Description of Artificial Sequence: Synthetic oligonucleotide
cuucagaauugggcaacuu

SEQ ID NO: 308140 - RNA, 19 nt, Artificial Sequence
  Description of Artificial Sequence: Synthetic oligonucleotide
gcuagaggugugcccaguu

SEQ ID NO: 308141 - RNA, 19 nt, Artificial Sequence
  Description of Artificial Sequence: Synthetic oligonucleotide
ggcccguuuucgauguccu

SEQ ID NO: 308142 - RNA, 19 nt, Artificial Sequence
  Description of Artificial Sequence: Synthetic oligonucleotide
cguugauauuaucuuugau

SEQ ID NO: 308143 - RNA, 19 nt, Artificial Sequence
  Description of Artificial Sequence: Synthetic oligonucleotide
gcgcagacgaaugccuaua

SEQ ID NO: 308144 - RNA, 19 nt, Artificial Sequence
  Description of Artificial Sequence: Synthetic oligonucleotide
ccaggucuacuccuauuuu

SEQ ID NO: 308145 - RNA, 19 nt, Artificial Sequence
  Description of Artificial Sequence: Synthetic oligonucleotide
ccugcgcggccggcggaag

SEQ ID NO: 308146 - RNA, 19 nt, Artificial Sequence
  Description of Artificial Sequence: Synthetic oligonucleotide
gcgcggccggcggaagcug

SEQ ID NO: 308147 - RNA, 19 nt, Artificial Sequence
  Description of Artificial Sequence: Synthetic oligonucleotide
gcggccggcggaagcugga

SEQ ID NO: 308148 - RNA, 19 nt, Artificial Sequence
  Description of Artificial Sequence: Synthetic oligonucleotide
gcccguuuucgauguccuu

SEQ ID NO: 308149 - RNA, 19 nt, Artificial Sequence
  Description of Artificial Sequence: Synthetic oligonucleotide
cggcggaagcuggacacgu

SEQ ID NO: 308150 - RNA, 19 nt, Artificial Sequence
  Description of Artificial Sequence: Synthetic oligonucleotide
cguuuucgcugagggcaua

SEQ ID NO: 308151 - RNA, 19 nt, Artificial Sequence
  Description of Artificial Sequence: Synthetic oligonucleotide
uuagaaagggcuauuaugg

SEQ ID NO: 308152 - RNA, 19 nt, Artificial Sequence
  Description of Artificial Sequence: Synthetic oligonucleotide
ucuagcauuaaauaacggg

SEQ ID NO: 308153 - RNA, 19 nt, Artificial Sequence
  Description of Artificial Sequence: Synthetic oligonucleotide
cuagcauuaaauaacgggg

SEQ ID NO: 308154 - RNA, 19 nt, Artificial Sequence
  Description of Artificial Sequence: Synthetic oligonucleotide
aaggcuuagagguuagggc

SEQ ID NO: 308155 - RNA, 19 nt, Artificial Sequence
  Description of Artificial Sequence: Synthetic oligonucleotide
aauaacggggccucaaaac

SEQ ID NO: 308156 - RNA, 19 nt, Artificial Sequence
  Description of Artificial Sequence: Synthetic oligonucleotide
aauaucuucaugcauucgu

SEQ ID NO: 308157 - RNA, 19 nt, Artificial Sequence
  Description of Artificial Sequence: Synthetic oligonucleotide
uacaauugcggccacaucc

SEQ ID NO: 308158 - RNA, 19 nt, Artificial Sequence
  Description of Artificial Sequence: Synthetic oligonucleotide
uuuacagguauccuuaaca

SEQ ID NO: 308159 - RNA, 19 nt, Artificial Sequence
  Description of Artificial Sequence: Synthetic oligonucleotide
aacagacaaccuuucaugg

SEQ ID NO: 308160 - RNA, 19 nt, Artificial Sequence
  Description of Artificial Sequence: Synthetic oligonucleotide
uuaaacuacggaaugcuug

SEQ ID NO: 308161 - RNA, 19 nt, Artificial Sequence
  Description of Artificial Sequence: Synthetic oligonucleotide
acuauuaaagaacaaacaa

SEQ ID NO: 308162 - RNA, 19 nt, Artificial Sequence
  Description of Artificial Sequence: Synthetic oligonucleotide
cucucuauagcaaaacugg

SEQ ID NO: 308163 - RNA, 19 nt, Artificial Sequence
  Description of Artificial Sequence: Synthetic oligonucleotide
aauccuaugcaggauauuc

SEQ ID NO: 308164 - RNA, 19 nt, Artificial Sequence
  Description of Artificial Sequence: Synthetic oligonucleotide
uuuuauaguuagcugaggu

SEQ ID NO: 308165 - RNA, 19 nt, Artificial Sequence
  Description of Artificial Sequence: Synthetic oligonucleotide
uaucgaacaagauuaggag

SEQ ID NO: 308166 - RNA, 19 nt, Artificial Sequence
  Description of Artificial Sequence: Synthetic oligonucleotide
uagucuuuaccaauggucc

SEQ ID NO: 308167 - RNA, 19 nt, Artificial Sequence
  Description of Artificial Sequence: Synthetic oligonucleotide
ucuuuuauaguuagcugag

SEQ ID NO: 308168 - RNA, 19 nt, Artificial Sequence
  Description of Artificial Sequence: Synthetic oligonucleotide
agaacugccuaacaccacc

SEQ ID NO: 308169 - RNA, 19 nt, Artificial Sequence
  Description of Artificial Sequence: Synthetic oligonucleotide
agcauuaaauaacggggcc

SEQ ID NO: 308170 - RNA, 19 nt, Artificial Sequence
  Description of Artificial Sequence: Synthetic oligonucleotide
ucgaacaagauuaggagac

SEQ ID NO: 308171 - RNA, 19 nt, Artificial Sequence
  Description of Artificial Sequence: Synthetic oligonucleotide
auaacggggccucaaaacg

SEQ ID NO: 308172 - RNA, 19 nt, Artificial Sequence
  Description of Artificial Sequence: Synthetic oligonucleotide
uuuaagaccuggcugaaaa

SEQ ID NO: 308173 - RNA, 19 nt, Artificial Sequence
  Description of Artificial Sequence: Synthetic oligonucleotide
uauacaucuagucaugaua

SEQ ID NO: 308174 - RNA, 19 nt, Artificial Sequence
  Description of Artificial Sequence: Synthetic oligonucleotide
aaggucgggcaguaaaggc

SEQ ID NO: 308175 - RNA, 19 nt, Artificial Sequence
  Description of Artificial Sequence: Synthetic oligonucleotide
ucgaauucuagcauuaaau

SEQ ID NO: 308176 - RNA, 19 nt, Artificial Sequence
  Description of Artificial Sequence: Synthetic oligonucleotide
aagaauugcugcuccauca

SEQ ID NO: 308177 - RNA, 19 nt, Artificial Sequence
  Description of Artificial Sequence: Synthetic oligonucleotide
uugagaagauaauuggagc

SEQ ID NO: 308178 - RNA, 19 nt, Artificial Sequence
  Description of Artificial Sequence: Synthetic oligonucleotide
uggagcguaaaucugugcc

SEQ ID NO: 308179 - RNA, 19 nt, Artificial Sequence
  Description of Artificial Sequence: Synthetic oligonucleotide
uaaacuacggaaugcuugc

SEQ ID NO: 308180 - RNA, 19 nt, Artificial Sequence
  Description of Artificial Sequence: Synthetic oligonucleotide
uccauuacgucaauggacu

SEQ ID NO: 308181 - RNA, 19 nt, Artificial Sequence
  Description of Artificial Sequence: Synthetic oligonucleotide
uucauaacaggcauagcac

SEQ ID NO: 308182 - RNA, 19 nt, Artificial Sequence
  Description of Artificial Sequence: Synthetic oligonucleotide
ucgcuuccaaacaucaugg

SEQ ID NO: 308183 - RNA, 19 nt, Artificial Sequence
  Description of Artificial Sequence: Synthetic oligonucleotide
agucuuugacguuuuaguc

SEQ ID NO: 308184 - RNA, 19 nt, Artificial Sequence
  Description of Artificial Sequence: Synthetic oligonucleotide
uagaaaccggcuccuaucg

SEQ ID NO: 308185 - RNA, 19 nt, Artificial Sequence
  Description of Artificial Sequence: Synthetic oligonucleotide
ugauaaguguaauaccaug

SEQ ID NO: 308186 - RNA, 19 nt, Artificial Sequence
  Description of Artificial Sequence: Synthetic oligonucleotide
ugaccaucggcucagucag

SEQ ID NO: 308187 - RNA, 19 nt, Artificial Sequence
  Description of Artificial Sequence: Synthetic oligonucleotide
uagcauuaaauaacggggc

SEQ ID NO: 308188 - RNA, 19 nt, Artificial Sequence
  Description of Artificial Sequence: Synthetic oligonucleotide
aacaagauuaggagacacc

SEQ ID NO: 308189 - RNA, 19 nt, Artificial Sequence
  Description of Artificial Sequence: Synthetic oligonucleotide
aacuauuaaagaacaaaca

SEQ ID NO: 308190 - RNA, 19 nt, Artificial Sequence
  Description of Artificial Sequence: Synthetic oligonucleotide
ucuacccucaguauugaca

SEQ ID NO: 308191 - RNA, 19 nt, Artificial Sequence
  Description of Artificial Sequence: Synthetic oligonucleotide
guaugugccaacuugcaug

SEQ ID NO: 308192 - RNA, 19 nt, Artificial Sequence
  Description of Artificial Sequence: Synthetic oligonucleotide
uugaaucugucauauagaa

SEQ ID NO: 308193 - RNA, 19 nt, Artificial Sequence
  Description of Artificial Sequence: Synthetic oligonucleotide
acgguuccucacuugaucc

SEQ ID NO: 308194 - RNA, 19 nt, Artificial Sequence
  Description of Artificial Sequence: Synthetic oligonucleotide
caaucaaguuacuugcugc

SEQ ID NO: 308195 - RNA, 19 nt, Artificial Sequence
  Description of Artificial Sequence: Synthetic oligonucleotide
uuuuaucagagauccauuc

SEQ ID NO: 308196 - RNA, 19 nt, Artificial Sequence
  Description of Artificial Sequence: Synthetic oligonucleotide
aucauaucgaacaagauua

SEQ ID NO: 308197 - RNA, 19 nt, Artificial Sequence
  Description of Artificial Sequence: Synthetic oligonucleotide
auacaucuagucaugauag

SEQ ID NO: 308198 - RNA, 19 nt, Artificial Sequence
  Description of Artificial Sequence: Synthetic oligonucleotide
ugcauucguggcaaaaucc

SEQ ID NO: 308199 - RNA, 19 nt, Artificial Sequence
  Description of Artificial Sequence: Synthetic oligonucleotide
gucuuuuauaguuagcuga

SEQ ID NO: 308200 - RNA, 19 nt, Artificial Sequence
  Description of Artificial Sequence: Synthetic oligonucleotide
gaaagggcuauuauggccc

SEQ ID NO: 308201 - RNA, 19 nt, Artificial Sequence
  Description of Artificial Sequence: Synthetic oligonucleotide
uauagcaaaacuggguccc

SEQ ID NO: 308202 - RNA, 19 nt, Artificial Sequence
  Description of Artificial Sequence: Synthetic oligonucleotide
agugcauaaguugucagag

SEQ ID NO: 308203 - RNA, 19 nt, Artificial Sequence
  Description of Artificial Sequence: Synthetic oligonucleotide
uaaguguaauaccauguuc

SEQ ID NO: 308204 - RNA, 19 nt, Artificial Sequence
  Description of Artificial Sequence: Synthetic oligonucleotide
aauugcgucuaucccaggu

SEQ ID NO: 308205 - RNA, 19 nt, Artificial Sequence
  Description of Artificial Sequence: Synthetic oligonucleotide
cauuucagcuacacgagag

SEQ ID NO: 308206 - RNA, 19 nt, Artificial Sequence
  Description of Artificial Sequence: Synthetic oligonucleotide
aaccugaugcaucgaguac

SEQ ID NO: 308207 - RNA, 19 nt, Artificial Sequence
  Description of Artificial Sequence: Synthetic oligonucleotide
auuaagcaaaucuuucaga

SEQ ID NO: 308208 - RNA, 19 nt, Artificial Sequence
  Description of Artificial Sequence: Synthetic oligonucleotide
cuaauugcgucuaucccag

SEQ ID NO: 308209 - RNA, 19 nt, Artificial Sequence
  Description of Artificial Sequence: Synthetic oligonucleotide
uucuagcauuaaauaacgg

SEQ ID NO: 308210 - RNA, 19 nt, Artificial Sequence
  Description of Artificial Sequence: Synthetic oligonucleotide
agacaguaguuccugguuc

SEQ ID NO: 308211 - RNA, 19 nt, Artificial Sequence
  Description of Artificial Sequence: Synthetic oligonucleotide
acaagcauaguauaacuuu

SEQ ID NO: 308212 - RNA, 19 nt, Artificial Sequence
  Description of Artificial Sequence: Synthetic oligonucleotide
agggauuacaccagugucc

SEQ ID NO: 308213 - RNA, 19 nt, Artificial Sequence
  Description of Artificial Sequence: Synthetic oligonucleotide
gucuaucccagguuuauag

SEQ ID NO: 308214 - RNA, 19 nt, Artificial Sequence
  Description of Artificial Sequence: Synthetic oligonucleotide
cuauagcaaaacugggucc

SEQ ID NO: 308215 - RNA, 19 nt, Artificial Sequence
  Description of Artificial Sequence: Synthetic oligonucleotide
aucaucuacuccugcaauc

SEQ ID NO: 308216 - RNA, 19 nt, Artificial Sequence
  Description of Artificial Sequence: Synthetic oligonucleotide
cugccuaacaccaccauug

SEQ ID NO: 308217 - RNA, 19 nt, Artificial Sequence
  Description of Artificial Sequence: Synthetic oligonucleotide
aaaacguggguuugugcca

SEQ ID NO: 308218 - RNA, 19 nt, Artificial Sequence
  Description of Artificial Sequence: Synthetic oligonucleotide
uguaagcagccccugggag

SEQ ID NO: 308219 - RNA, 19 nt, Artificial Sequence
  Description of Artificial Sequence: Synthetic oligonucleotide
aguuagucaggauauucca

SEQ ID NO: 308220 - RNA, 19 nt, Artificial Sequence
  Description of Artificial Sequence: Synthetic oligonucleotide
gaaugcuugcacauaauac

SEQ ID NO: 308221 - RNA, 19 nt, Artificial Sequence
  Description of Artificial Sequence: Synthetic oligonucleotide
aaaccugaugcaucgagua

SEQ ID NO: 308222 - RNA, 19 nt, Artificial Sequence
  Description of Artificial Sequence: Synthetic oligonucleotide
ucauaucgaacaagauuag

SEQ ID NO: 308223 - RNA, 19 nt, Artificial Sequence
  Description of Artificial Sequence: Synthetic oligonucleotide
gagaauaacaucagcuaug

SEQ ID NO: 308224 - RNA, 19 nt, Artificial Sequence
  Description of Artificial Sequence: Synthetic oligonucleotide
uccuaauugcgucuauccc

SEQ ID NO: 308225 - RNA, 19 nt, Artificial Sequence
  Description of Artificial Sequence: Synthetic oligonucleotide
ugucgugugacacaaccuc

SEQ ID NO: 308226 - RNA, 19 nt, Artificial Sequence
  Description of Artificial Sequence: Synthetic oligonucleotide
aauuggagcguaaaucugu

SEQ ID NO: 308227 - RNA, 19 nt, Artificial Sequence
  Description of Artificial Sequence: Synthetic oligonucleotide
agcucuuaugauuuuccag

SEQ ID NO: 308228 - RNA, 19 nt, Artificial Sequence
  Description of Artificial Sequence: Synthetic oligonucleotide
aaauaacggggccucaaaa

SEQ ID NO: 308229 - RNA, 19 nt, Artificial Sequence
  Description of Artificial Sequence: Synthetic oligonucleotide
gcauccauuacgucaaugg

SEQ ID NO: 308230 - RNA, 19 nt, Artificial Sequence
  Description of Artificial Sequence: Synthetic oligonucleotide
uuguaagggauuacaccag

SEQ ID NO: 308231 - RNA, 19 nt, Artificial Sequence
  Description of Artificial Sequence: Synthetic oligonucleotide
aucgaacaagauuaggaga

SEQ ID NO: 308232 - RNA, 19 nt, Artificial Sequence
  Description of Artificial Sequence: Synthetic oligonucleotide
agagcucuuaugauuuucc

SEQ ID NO: 308233 - RNA, 19 nt, Artificial Sequence
  Description of Artificial Sequence: Synthetic oligonucleotide
augcauucguggcaaaauc

SEQ ID NO: 308234 - RNA, 19 nt, Artificial Sequence
  Description of Artificial Sequence: Synthetic oligonucleotide
ucgaguacacuguauacau

SEQ ID NO: 308235 - RNA, 19 nt, Artificial Sequence
  Description of Artificial Sequence: Synthetic oligonucleotide
uaugugccaacuugcaugu

SEQ ID NO: 308236 - RNA, 19 nt, Artificial Sequence
  Description of Artificial Sequence: Synthetic oligonucleotide
uacucucuauagcaaaacu

SEQ ID NO: 308237 - RNA, 19 nt, Artificial Sequence
  Description of Artificial Sequence: Synthetic oligonucleotide
uccgaguuagucaggauau

SEQ ID NO: 308238 - RNA, 19 nt, Artificial Sequence
  Description of Artificial Sequence: Synthetic oligonucleotide
uaggacaguccaaugggug

SEQ ID NO: 308239 - RNA, 19 nt, Artificial Sequence
  Description of Artificial Sequence: Synthetic oligonucleotide
uucgaauucuagcauuaaa

SEQ ID NO: 308240 - RNA, 19 nt, Artificial Sequence
  Description of Artificial Sequence: Synthetic oligonucleotide
ucuaucccagguuuauagc

SEQ ID NO: 308241 - RNA, 19 nt, Artificial Sequence
  Description of Artificial Sequence: Synthetic oligonucleotide
uuaacauguuggcuuuucu

SEQ ID NO: 308242 - RNA, 19 nt, Artificial Sequence
  Description of Artificial Sequence: Synthetic oligonucleotide
uggguuugugccaacgaga

SEQ ID NO: 308243 - RNA, 19 nt, Artificial Sequence
  Description of Artificial Sequence: Synthetic oligonucleotide
uugauaaguguaauaccau

SEQ ID NO: 308244 - RNA, 19 nt, Artificial Sequence
  Description of Artificial Sequence: Synthetic oligonucleotide
uguucgaacauauccuuua

SEQ ID NO: 308245 - RNA, 19 nt, Artificial Sequence
  Description of Artificial Sequence: Synthetic oligonucleotide
agcuacaaccuuuggagcu

SEQ ID NO: 308246 - RNA, 19 nt, Artificial Sequence
  Description of Artificial Sequence: Synthetic oligonucleotide
acguuuuaguccaucauag

SEQ ID NO: 308247 - RNA, 19 nt, Artificial Sequence
  Description of Artificial Sequence: Synthetic oligonucleotide
uagacgguuccucacuuga

SEQ ID NO: 308248 - RNA, 19 nt, Artificial Sequence
  Description of Artificial Sequence: Synthetic oligonucleotide
uuuuacagguauccuuaac

SEQ ID NO: 308249 - RNA, 19 nt, Artificial Sequence
  Description of Artificial Sequence: Synthetic oligonucleotide
gguauccuuaacauguugg

SEQ ID NO: 308250 - RNA, 19 nt, Artificial Sequence
  Description of Artificial Sequence: Synthetic oligonucleotide
aacaucagcuaugggagca

SEQ ID NO: 308251 - RNA, 19 nt, Artificial Sequence
  Description of Artificial Sequence: Synthetic oligonucleotide
auuacaucauucagaauca

SEQ ID NO: 308252 - RNA, 19 nt, Artificial Sequence
  Description of Artificial Sequence: Synthetic oligonucleotide
auuacgucaauggacucug

SEQ ID NO: 308253 - RNA, 19 nt, Artificial Sequence
  Description of Artificial Sequence: Synthetic oligonucleotide
agaaucacguuggaaaaca

SEQ ID NO: 308254 - RNA, 19 nt, Artificial Sequence
  Description of Artificial Sequence: Synthetic oligonucleotide
uucaaucaaguuacuugcu

SEQ ID NO: 308255 - RNA, 19 nt, Artificial Sequence
  Description of Artificial Sequence: Synthetic oligonucleotide
cauaucgaacaagauuagg

SEQ ID NO: 308256 - RNA, 19 nt, Artificial Sequence
  Description of Artificial Sequence: Synthetic oligonucleotide
uuuccccucuagaaaccgg

SEQ ID NO: 308257 - RNA, 19 nt, Artificial Sequence
  Description of Artificial Sequence: Synthetic oligonucleotide
uacacgagagagugcaucu

SEQ ID NO: 308258 - RNA, 19 nt, Artificial Sequence
  Description of Artificial Sequence: Synthetic oligonucleotide
uaaauaacggggccucaaa

SEQ ID NO: 308259 - RNA, 19 nt, Artificial Sequence
  Description of Artificial Sequence: Synthetic oligonucleotide
cuugcaauccuaugcagga

SEQ ID NO: 308260 - RNA, 19 nt, Artificial Sequence
  Description of Artificial Sequence: Synthetic oligonucleotide
uuccacaccagcaauuguu

SEQ ID NO: 308261 - RNA, 19 nt, Artificial Sequence
  Description of Artificial Sequence: Synthetic oligonucleotide
ucuuucgaauucuagcauu

SEQ ID NO: 308262 - RNA, 19 nt, Artificial Sequence
  Description of Artificial Sequence: Synthetic oligonucleotide
ugcaauccuaugcaggaua

SEQ ID NO: 308263 - RNA, 19 nt, Artificial Sequence
  Description of Artificial Sequence: Synthetic oligonucleotide
uccuagaugguuguaucug

SEQ ID NO: 308264 - RNA, 19 nt, Artificial Sequence
  Description of Artificial Sequence: Synthetic oligonucleotide
agagauccauucuucauua

SEQ ID NO: 308265 - RNA, 19 nt, Artificial Sequence
  Description of Artificial Sequence: Synthetic oligonucleotide
uguaugugccaacuugcau

SEQ ID NO: 308266 - RNA, 19 nt, Artificial Sequence
  Description of Artificial Sequence: Synthetic oligonucleotide
cuagaaaccggcuccuauc

SEQ ID NO: 308267 - RNA, 19 nt, Artificial Sequence
  Description of Artificial Sequence: Synthetic oligonucleotide
cuacuaaggcuucagcauc

SEQ ID NO: 308268 - RNA, 19 nt, Artificial Sequence
  Description of Artificial Sequence: Synthetic oligonucleotide
caucgaguacacuguauac

SEQ ID NO: 308269 - RNA, 19 nt, Artificial Sequence
  Description of Artificial Sequence: Synthetic oligonucleotide
ucaucauaucgaacaagau

SEQ ID NO: 308270 - RNA, 19 nt, Artificial Sequence
  Description of Artificial Sequence: Synthetic oligonucleotide
aucuuaaacugccaagauu

SEQ ID NO: 308271 - RNA, 19 nt, Artificial Sequence
  Description of Artificial Sequence: Synthetic oligonucleotide
uaacggggccucaaaacgu

SEQ ID NO: 308272 - RNA, 19 nt, Artificial Sequence
  Description of Artificial Sequence: Synthetic oligonucleotide
agcuacacgagagagugca

SEQ ID NO: 308273 - RNA, 19 nt, Artificial Sequence
  Description of Artificial Sequence: Synthetic oligonucleotide
cuuuuauaguuagcugagg

SEQ ID NO: 308274 - RNA, 19 nt, Artificial Sequence
  Description of Artificial Sequence: Synthetic oligonucleotide
guggguuugugccaacgag

SEQ ID NO: 308275 - RNA, 19 nt, Artificial Sequence
  Description of Artificial Sequence: Synthetic oligonucleotide
uauaaguuaaaagccccuu

SEQ ID NO: 308276 - RNA, 19 nt, Artificial Sequence
  Description of Artificial Sequence: Synthetic oligonucleotide
ucuccuagaugguuguauc

SEQ ID NO: 308277 - RNA, 19 nt, Artificial Sequence
  Description of Artificial Sequence: Synthetic oligonucleotide
acgagagagugcaucuucc

SEQ ID NO: 308278 - RNA, 19 nt, Artificial Sequence
  Description of Artificial Sequence: Synthetic oligonucleotide
agaccugcaaucuccgaga

SEQ ID NO: 308279 - RNA, 19 nt, Artificial Sequence
  Description of Artificial Sequence: Synthetic oligonucleotide
gcuccuaucgcuuccaaac

SEQ ID NO: 308280 - RNA, 19 nt, Artificial Sequence
  Description of Artificial Sequence: Synthetic oligonucleotide
uuacucucuauagcaaaac

SEQ ID NO: 308281 - RNA, 19 nt, Artificial Sequence
  Description of Artificial Sequence: Synthetic oligonucleotide
aucgaguacacuguauaca

SEQ ID NO: 308282 - RNA, 19 nt, Artificial Sequence
  Description of Artificial Sequence: Synthetic oligonucleotide
uuaaauaacggggccucaa

SEQ ID NO: 308283 - RNA, 19 nt, Artificial Sequence
  Description of Artificial Sequence: Synthetic oligonucleotide
cuaucgcuuccaaacauca

SEQ ID NO: 308284 - RNA, 19 nt, Artificial Sequence
  Description of Artificial Sequence: Synthetic oligonucleotide
uccuaucgcuuccaaacau

SEQ ID NO: 308285 - RNA, 19 nt, Artificial Sequence
  Description of Artificial Sequence: Synthetic oligonucleotide
uaguccaucauaggcaaau

SEQ ID NO: 308286 - RNA, 19 nt, Artificial Sequence
  Description of Artificial Sequence: Synthetic oligonucleotide
aucuagucaugauagucuu

SEQ ID NO: 308287 - RNA, 19 nt, Artificial Sequence
  Description of Artificial Sequence: Synthetic oligonucleotide
agcagacuuagaaagggcu

SEQ ID NO: 308288 - RNA, 19 nt, Artificial Sequence
  Description of Artificial Sequence: Synthetic oligonucleotide
aauugcggccacauccuug

SEQ ID NO: 308289 - RNA, 19 nt, Artificial Sequence
  Description of Artificial Sequence: Synthetic oligonucleotide
gacgguuccucacuugauc

SEQ ID NO: 308290 - RNA, 19 nt, Artificial Sequence
  Description of Artificial Sequence: Synthetic oligonucleotide
aggcgucacagcuacuuug

SEQ ID NO: 308291 - RNA, 19 nt, Artificial Sequence
  Description of Artificial Sequence: Synthetic oligonucleotide
cugaccaucggcucaguca

SEQ ID NO: 308292 - RNA, 19 nt, Artificial Sequence
  Description of Artificial Sequence: Synthetic oligonucleotide
caagaauugcugcuccauc

SEQ ID NO: 308293 - RNA, 19 nt, Artificial Sequence
  Description of Artificial Sequence: Synthetic oligonucleotide
uccaaugggugauuugcua

SEQ ID NO: 308294 - RNA, 19 nt, Artificial Sequence
  Description of Artificial Sequence: Synthetic oligonucleotide
cuucuagacgguuccucac

SEQ ID NO: 308295 - RNA, 19 nt, Artificial Sequence
  Description of Artificial Sequence: Synthetic oligonucleotide
cauucguggcaaaauccuc

SEQ ID NO: 308296 - RNA, 19 nt, Artificial Sequence
  Description of Artificial Sequence: Synthetic oligonucleotide
aaucacguuggaaaacauu

SEQ ID NO: 308297 - RNA, 19 nt, Artificial Sequence
  Description of Artificial Sequence: Synthetic oligonucleotide
acugguccggaucucucug

SEQ ID NO: 308298 - RNA, 19 nt, Artificial Sequence
  Description of Artificial Sequence: Synthetic oligonucleotide
cauaacaggcauagcacaa

SEQ ID NO: 308299 - RNA, 19 nt, Artificial Sequence
  Description of Artificial Sequence: Synthetic oligonucleotide
caucuagucaugauagucu

SEQ ID NO: 308300 - RNA, 19 nt, Artificial Sequence
  Description of Artificial Sequence: Synthetic oligonucleotide
agcacguuuccccucuaga

SEQ ID NO: 308301 - RNA, 19 nt, Artificial Sequence
  Description of Artificial Sequence: Synthetic oligonucleotide
cauccauuacgucaaugga

SEQ ID NO: 308302 - RNA, 19 nt, Artificial Sequence
  Description of Artificial Sequence: Synthetic oligonucleotide
gguucacuagcuuggcaag

SEQ ID NO: 308303 - RNA, 19 nt, Artificial Sequence
  Description of Artificial Sequence: Synthetic oligonucleotide
accaucggcucagucaguc

SEQ ID NO: 308304 - RNA, 19 nt, Artificial Sequence
  Description of Artificial Sequence: Synthetic oligonucleotide
gagcucuuaugauuuucca

SEQ ID NO: 308305 - RNA, 19 nt, Artificial Sequence
  Description of Artificial Sequence: Synthetic oligonucleotide
uucucgcaagccugcaaga

SEQ ID NO: 308306 - RNA, 19 nt, Artificial Sequence
  Description of Artificial Sequence: Synthetic oligonucleotide
uuugacguuuuaguccauc

SEQ ID NO: 308307 - RNA, 19 nt, Artificial Sequence
  Description of Artificial Sequence: Synthetic oligonucleotide
aaacugggucccugguaga

SEQ ID NO: 308308 - RNA, 19 nt, Artificial Sequence
  Description of Artificial Sequence: Synthetic oligonucleotide
cuggacuaccuaugagagc

SEQ ID NO: 308309 - RNA, 19 nt, Artificial Sequence
  Description of Artificial Sequence: Synthetic oligonucleotide
auuggagcguaaaucugug

SEQ ID NO: 308310 - RNA, 19 nt, Artificial Sequence
  Description of Artificial Sequence: Synthetic oligonucleotide
ugggagcacccacaucacc

SEQ ID NO: 308311 - RNA, 19 nt, Artificial Sequence
  Description of Artificial Sequence: Synthetic oligonucleotide
ccuaauugcgucuauccca

SEQ ID NO: 308312 - RNA, 19 nt, Artificial Sequence
  Description of Artificial Sequence: Synthetic oligonucleotide
agcaauuguuguauugaga

SEQ ID NO: 308313 - RNA, 19 nt, Artificial Sequence
  Description of Artificial Sequence: Synthetic oligonucleotide
aacggggccucaaaacgug

SEQ ID NO: 308314 - RNA, 19 nt, Artificial Sequence
  Description of Artificial Sequence: Synthetic oligonucleotide
aacugccuaacaccaccau

SEQ ID NO: 308315 - RNA, 19 nt, Artificial Sequence
  Description of Artificial Sequence: Synthetic oligonucleotide
accaaugguccaauguucu

SEQ ID NO: 308316 - RNA, 19 nt, Artificial Sequence
  Description of Artificial Sequence: Synthetic oligonucleotide
uaauugcgucuaucccagg

SEQ ID NO: 308317 - RNA, 19 nt, Artificial Sequence
  Description of Artificial Sequence: Synthetic oligonucleotide
caucauaucgaacaagauu

SEQ ID NO: 308318 - RNA, 19 nt, Artificial Sequence
  Description of Artificial Sequence: Synthetic oligonucleotide
aguccugucgugugacaca

SEQ ID NO: 308319 - RNA, 19 nt, Artificial Sequence
  Description of Artificial Sequence: Synthetic oligonucleotide
cagacaaccuuucauggua

SEQ ID NO: 308320 - RNA, 19 nt, Artificial Sequence
  Description of Artificial Sequence: Synthetic oligonucleotide
uggaacgagugggucagca

SEQ ID NO: 308321 - RNA, 19 nt, Artificial Sequence
  Description of Artificial Sequence: Synthetic oligonucleotide
aaacguggguuugugccaa

SEQ ID NO: 308322 - RNA, 19 nt, Artificial Sequence
  Description of Artificial Sequence: Synthetic oligonucleotide
acugccuaacaccaccauu

SEQ ID NO: 308323 - RNA, 19 nt, Artificial Sequence
  Description of Artificial Sequence: Synthetic oligonucleotide
cuacacgagagagugcauc

SEQ ID NO: 308324 - RNA, 19 nt, Artificial Sequence
  Description of Artificial Sequence: Synthetic oligonucleotide
acguuggaaaacauuaauu

SEQ ID NO: 308325 - RNA, 19 nt, Artificial Sequence
  Description of Artificial Sequence: Synthetic oligonucleotide
gaugcaucgaguacacugu

SEQ ID NO: 308326 - RNA, 19 nt, Artificial Sequence
  Description of Artificial Sequence: Synthetic oligonucleotide
acaauugcggccacauccu

SEQ ID NO: 308327 - RNA, 19 nt, Artificial Sequence
  Description of Artificial Sequence: Synthetic oligonucleotide
uuucgaauucuagcauuaa

SEQ ID NO: 308328 - RNA, 19 nt, Artificial Sequence
  Description of Artificial Sequence: Synthetic oligonucleotide
ucucgcaagccugcaagac

SEQ ID NO: 308329 - RNA, 19 nt, Artificial Sequence
  Description of Artificial Sequence: Synthetic oligonucleotide
gucgugugacacaaccucc

SEQ ID NO: 308330 - RNA, 19 nt, Artificial Sequence
  Description of Artificial Sequence: Synthetic oligonucleotide
ucaugcauucguggcaaaa

SEQ ID NO: 308331 - RNA, 19 nt, Artificial Sequence
  Description of Artificial Sequence: Synthetic oligonucleotide
gguggaacgagugggucag

SEQ ID NO: 308332 - RNA, 19 nt, Artificial Sequence
  Description of Artificial Sequence: Synthetic oligonucleotide
auaggacaguccaaugggu

SEQ ID NO: 308333 - RNA, 19 nt, Artificial Sequence
  Description of Artificial Sequence: Synthetic oligonucleotide
cuacccucaguauugacau

SEQ ID NO: 308334 - RNA, 19 nt, Artificial Sequence
  Description of Artificial Sequence: Synthetic oligonucleotide
caugauagucuuuaccaau

SEQ ID NO: 308335 - RNA, 19 nt, Artificial Sequence
  Description of Artificial Sequence: Synthetic oligonucleotide
auuaaacuacggaaugcuu

SEQ ID NO: 308336 - RNA, 19 nt, Artificial Sequence
  Description of Artificial Sequence: Synthetic oligonucleotide
cuacuuugguuugcugggc

SEQ ID NO: 308337 - RNA, 19 nt, Artificial Sequence
  Description of Artificial Sequence: Synthetic oligonucleotide
cuuccuaauugcgucuauc

SEQ ID NO: 308338 - RNA, 19 nt, Artificial Sequence
  Description of Artificial Sequence: Synthetic oligonucleotide
uugacacacuuggccauug

SEQ ID NO: 308339 - RNA, 19 nt, Artificial Sequence
  Description of Artificial Sequence: Synthetic oligonucleotide
ugauugaaucugucauaua

SEQ ID NO: 308340 - RNA, 19 nt, Artificial Sequence
  Description of Artificial Sequence: Synthetic oligonucleotide
ugcccguugugcccaaauc

SEQ ID NO: 308341 - RNA, 19 nt, Artificial Sequence
  Description of Artificial Sequence: Synthetic oligonucleotide
ggcgucacagcuacuuugg

SEQ ID NO: 308342 - RNA, 19 nt, Artificial Sequence
  Description of Artificial Sequence: Synthetic oligonucleotide
ggaaugcuugcacauaaua

SEQ ID NO: 308343 - RNA, 19 nt, Artificial Sequence
  Description of Artificial Sequence: Synthetic oligonucleotide
ggagcguaaaucugugcca

SEQ ID NO: 308344 - RNA, 19 nt, Artificial Sequence
  Description of Artificial Sequence: Synthetic oligonucleotide
gacuuagaaagggcuauua

SEQ ID NO: 308345 - RNA, 19 nt, Artificial Sequence
  Description of Artificial Sequence: Synthetic oligonucleotide
ucgggcaguaaaggcauaa

SEQ ID NO: 308346 - RNA, 19 nt, Artificial Sequence
  Description of Artificial Sequence: Synthetic oligonucleotide
cacaauguuacuccccacu

SEQ ID NO: 308347 - RNA, 19 nt, Artificial Sequence
  Description of Artificial Sequence: Synthetic oligonucleotide
ugcgucuaucccagguuua

SEQ ID NO: 308348 - RNA, 19 nt, Artificial Sequence
  Description of Artificial Sequence: Synthetic oligonucleotide
guguaagcagccccuggga

SEQ ID NO: 308349 - RNA, 19 nt, Artificial Sequence
  Description of Artificial Sequence: Synthetic oligonucleotide
gcaaucucacuugcaaacc

SEQ ID NO: 308350 - RNA, 19 nt, Artificial Sequence
  Description of Artificial Sequence: Synthetic oligonucleotide
cauuaauuuguaagggauu

SEQ ID NO: 308351 - RNA, 19 nt, Artificial Sequence
  Description of Artificial Sequence: Synthetic oligonucleotide
acguggguuugugccaacg

SEQ ID NO: 308352 - RNA, 19 nt, Artificial Sequence
  Description of Artificial Sequence: Synthetic oligonucleotide
ugggcucuacccucaguau

SEQ ID NO: 308353 - RNA, 19 nt, Artificial Sequence
  Description of Artificial Sequence: Synthetic oligonucleotide
cugcaguucccagcaacag

SEQ ID NO: 308354 - RNA, 19 nt, Artificial Sequence
  Description of Artificial Sequence: Synthetic oligonucleotide
uuacgucaauggacucugu

SEQ ID NO: 308355 - RNA, 19 nt, Artificial Sequence
  Description of Artificial Sequence: Synthetic oligonucleotide
gaugguuccccgaagcaau

SEQ ID NO: 308356 - RNA, 19 nt, Artificial Sequence
  Description of Artificial Sequence: Synthetic oligonucleotide
gggauuacaccagugucca

SEQ ID NO: 308357 - RNA, 19 nt, Artificial Sequence
  Description of Artificial Sequence: Synthetic oligonucleotide
cuccuaucgcuuccaaaca

SEQ ID NO: 308358 - RNA, 19 nt, Artificial Sequence
  Description of Artificial Sequence: Synthetic oligonucleotide
cuacaauugcggccacauc

SEQ ID NO: 308359 - RNA, 19 nt, Artificial Sequence
  Description of Artificial Sequence: Synthetic oligonucleotide
auagcaaaacugggucccu

SEQ ID NO: 308360 - RNA, 19 nt, Artificial Sequence
  Description of Artificial Sequence: Synthetic oligonucleotide
caaaccugaugcaucgagu

SEQ ID NO: 308361 - RNA, 19 nt, Artificial Sequence
  Description of Artificial Sequence: Synthetic oligonucleotide
gcuacuaaggcuucagcau

SEQ ID NO: 308362 - RNA, 19 nt, Artificial Sequence
  Description of Artificial Sequence: Synthetic oligonucleotide
gcaucgaguacacuguaua

SEQ ID NO: 308363 - RNA, 19 nt, Artificial Sequence
  Description of Artificial Sequence: Synthetic oligonucleotide
ccugaugcaucgaguacac

SEQ ID NO: 308364 - RNA, 19 nt, Artificial Sequence
  Description of Artificial Sequence: Synthetic oligonucleotide
gcccguugugcccaaauca

SEQ ID NO: 308365 - RNA, 19 nt, Artificial Sequence
  Description of Artificial Sequence: Synthetic oligonucleotide
aaaccggcuccuaucgcuu

SEQ ID NO: 308366 - RNA, 19 nt, Artificial Sequence
  Description of Artificial Sequence: Synthetic oligonucleotide
gagauccauucuucauuaa

SEQ ID NO: 308367 - RNA, 19 nt, Artificial Sequence
  Description of Artificial Sequence: Synthetic oligonucleotide
cauauggaugguuccucua

SEQ ID NO: 308368 - RNA, 19 nt, Artificial Sequence
  Description of Artificial Sequence: Synthetic oligonucleotide
uggcaguuguucgaacaua

SEQ ID NO: 308369 - RNA, 19 nt, Artificial Sequence
  Description of Artificial Sequence: Synthetic oligonucleotide
cacguuggaaaacauuaau

SEQ ID NO: 308370 - RNA, 19 nt, Artificial Sequence
  Description of Artificial Sequence: Synthetic oligonucleotide
accugcaaucuccgagaga

SEQ ID NO: 308371 - RNA, 19 nt, Artificial Sequence
  Description of Artificial Sequence: Synthetic oligonucleotide
ugguuccccgaagcaaugu

SEQ ID NO: 308372 - RNA, 19 nt, Artificial Sequence
  Description of Artificial Sequence: Synthetic oligonucleotide
cagcuacacgagagagugc

SEQ ID NO: 308373 - RNA, 19 nt, Artificial Sequence
  Description of Artificial Sequence: Synthetic oligonucleotide
ugccaacgagaagaacaac

SEQ ID NO: 308374 - RNA, 19 nt, Artificial Sequence
  Description of Artificial Sequence: Synthetic oligonucleotide
uccuguccucgugcuaacc

SEQ ID NO: 308375 - RNA, 19 nt, Artificial Sequence
  Description of Artificial Sequence: Synthetic oligonucleotide
cccacuaggcugcuccgcg

SEQ ID NO: 308376 - RNA, 19 nt, Artificial Sequence
  Description of Artificial Sequence: Synthetic oligonucleotide
cauuacgucaauggacucu

SEQ ID NO: 308377 - RNA, 19 nt, Artificial Sequence
  Description of Artificial Sequence: Synthetic oligonucleotide
gacugguccggaucucucu

SEQ ID NO: 308378 - RNA, 19 nt, Artificial Sequence
  Description of Artificial Sequence: Synthetic oligonucleotide
gccugcaagacaguaguuc

SEQ ID NO: 308379 - RNA, 19 nt, Artificial Sequence
  Description of Artificial Sequence: Synthetic oligonucleotide
cuccuagaugguuguaucu

SEQ ID NO: 308380 - RNA, 19 nt, Artificial Sequence
  Description of Artificial Sequence: Synthetic oligonucleotide
acggggccucaaaacgugg

SEQ ID NO: 308381 - RNA, 19 nt, Artificial Sequence
  Description of Artificial Sequence: Synthetic oligonucleotide
ggguuugugccaacgagaa

SEQ ID NO: 308382 - RNA, 19 nt, Artificial Sequence
  Description of Artificial Sequence: Synthetic oligonucleotide
ggcuuagagguuagggcac

SEQ ID NO: 308383 - RNA, 19 nt, Artificial Sequence
  Description of Artificial Sequence: Synthetic oligonucleotide
ccgaagcaauguauugcag

SEQ ID NO: 308384 - RNA, 19 nt, Artificial Sequence
  Description of Artificial Sequence: Synthetic oligonucleotide
augguuccccgaagcaaug

SEQ ID NO: 308385 - RNA, 19 nt, Artificial Sequence
  Description of Artificial Sequence: Synthetic oligonucleotide
ccucauuaccucuccuguc

SEQ ID NO: 308386 - RNA, 19 nt, Artificial Sequence
  Description of Artificial Sequence: Synthetic oligonucleotide
cugguccggaucucucuga

SEQ ID NO: 308387 - RNA, 19 nt, Artificial Sequence
  Description of Artificial Sequence: Synthetic oligonucleotide
cccugguagaugucucagc

SEQ ID NO: 308388 - RNA, 19 nt, Artificial Sequence
  Description of Artificial Sequence: Synthetic oligonucleotide
cugucgugugacacaaccu

SEQ ID NO: 308389 - RNA, 19 nt, Artificial Sequence
  Description of Artificial Sequence: Synthetic oligonucleotide
uacccucaguauugacaua

SEQ ID NO: 308390 - RNA, 19 nt, Artificial Sequence
  Description of Artificial Sequence: Synthetic oligonucleotide
ggaacgagugggucagcaa

SEQ ID NO: 308391 - RNA, 19 nt, Artificial Sequence
  Description of Artificial Sequence: Synthetic oligonucleotide
gcauucguggcaaaauccu

SEQ ID NO: 308392 - RNA, 19 nt, Artificial Sequence
  Description of Artificial Sequence: Synthetic oligonucleotide
acacgagagagugcaucuu

SEQ ID NO: 308393 - RNA, 19 nt, Artificial Sequence
  Description of Artificial Sequence: Synthetic oligonucleotide
accuacaauugcggccaca

SEQ ID NO: 308394 - RNA, 19 nt, Artificial Sequence
  Description of Artificial Sequence: Synthetic oligonucleotide
ggagugcagaacugccuaa

SEQ ID NO: 308395 - RNA, 19 nt, Artificial Sequence
  Description of Artificial Sequence: Synthetic oligonucleotide
ccaccaugacagacugacc

SEQ ID NO: 308396 - RNA, 19 nt, Artificial Sequence
  Description of Artificial Sequence: Synthetic oligonucleotide
ccauuacgucaauggacuc

SEQ ID NO: 308397 - RNA, 19 nt, Artificial Sequence
  Description of Artificial Sequence: Synthetic oligonucleotide
uccgcggacugguccggau

SEQ ID NO: 308398 - RNA, 19 nt, Artificial Sequence
  Description of Artificial Sequence: Synthetic oligonucleotide
gguuccccgaagcaaugua

SEQ ID NO: 308399 - RNA, 19 nt, Artificial Sequence
  Description of Artificial Sequence: Synthetic oligonucleotide
ccguugugcccaaaucauc

SEQ ID NO: 308400 - RNA, 19 nt, Artificial Sequence
  Description of Artificial Sequence: Synthetic oligonucleotide
ggcaguuguucgaacauau

SEQ ID NO: 308401 - RNA, 19 nt, Artificial Sequence
  Description of Artificial Sequence: Synthetic oligonucleotide
gcauaaguugucagagucu

SEQ ID NO: 308402 - RNA, 19 nt, Artificial Sequence
  Description of Artificial Sequence: Synthetic oligonucleotide
cggggccucaaaacguggg

SEQ ID NO: 308403 - RNA, 19 nt, Artificial Sequence
  Description of Artificial Sequence: Synthetic oligonucleotide
cagaaccgagggaucugaa

SEQ ID NO: 308404 - RNA, 19 nt, Artificial Sequence
  Description of Artificial Sequence: Synthetic oligonucleotide
gcguaaaucugugccagcu

SEQ ID NO: 308405 - RNA, 19 nt, Artificial Sequence
  Description of Artificial Sequence: Synthetic oligonucleotide
cagagcuacuaaggcuuca

SEQ ID NO: 308406 - RNA, 19 nt, Artificial Sequence
  Description of Artificial Sequence: Synthetic oligonucleotide
cagucagucuuugacguuu

SEQ ID NO: 308407 - RNA, 19 nt, Artificial Sequence
  Description of Artificial Sequence: Synthetic oligonucleotide
caccuacaauugcggccac

SEQ ID NO: 308408 - RNA, 19 nt, Artificial Sequence
  Description of Artificial Sequence: Synthetic oligonucleotide
gugccaacuugcaugucau

SEQ ID NO: 308409 - RNA, 19 nt, Artificial Sequence
  Description of Artificial Sequence: Synthetic oligonucleotide
gcaagaauugcugcuccau

SEQ ID NO: 308410 - RNA, 19 nt, Artificial Sequence
  Description of Artificial Sequence: Synthetic oligonucleotide
guggaacgagugggucagc

SEQ ID NO: 308411 - RNA, 19 nt, Artificial Sequence
  Description of Artificial Sequence: Synthetic oligonucleotide
acaccgcucgucacucgaa

SEQ ID NO: 308412 - RNA, 19 nt, Artificial Sequence
  Description of Artificial Sequence: Synthetic oligonucleotide
ggggccucaaaacgugggu

SEQ ID NO: 308413 - RNA, 19 nt, Artificial Sequence
  Description of Artificial Sequence: Synthetic oligonucleotide
ggucgggcaguaaaggcau

SEQ ID NO: 308414 - RNA, 19 nt, Artificial Sequence
  Description of Artificial Sequence: Synthetic oligonucleotide
gcaauccuaugcaggauau

SEQ ID NO: 308415 - RNA, 19 nt, Artificial Sequence
  Description of Artificial Sequence: Synthetic oligonucleotide
ggacugguccggaucucuc

SEQ ID NO: 308416 - RNA, 19 nt, Artificial Sequence
  Description of Artificial Sequence: Synthetic oligonucleotide
gggcucuacccucaguauu

SEQ ID NO: 308417 - RNA, 19 nt, Artificial Sequence
  Description of Artificial Sequence: Synthetic oligonucleotide
ccuacaauugcggccacau

SEQ ID NO: 308418 - RNA, 19 nt, Artificial Sequence
  Description of Artificial Sequence: Synthetic oligonucleotide
cagcuaccuggcuugcaau

SEQ ID NO: 308419 - RNA, 19 nt, Artificial Sequence
  Description of Artificial Sequence: Synthetic oligonucleotide
ggacuaccuaugagagcca

SEQ ID NO: 308420 - RNA, 19 nt, Artificial Sequence
  Description of Artificial Sequence: Synthetic oligonucleotide
cccguugugcccaaaucau

SEQ ID NO: 308421 - RNA, 19 nt, Artificial Sequence
  Description of Artificial Sequence: Synthetic oligonucleotide
caauugcggccacauccuu

SEQ ID NO: 308422 - RNA, 19 nt, Artificial Sequence
  Description of Artificial Sequence: Synthetic oligonucleotide
ccgcggacugguccggauc

SEQ ID NO: 308423 - RNA, 19 nt, Artificial Sequence
  Description of Artificial Sequence: Synthetic oligonucleotide
ccuuuaagaccuggcugaa

SEQ ID NO: 308424 - RNA, 19 nt, Artificial Sequence
  Description of Artificial Sequence: Synthetic oligonucleotide
cgguuccucacuugaucca

SEQ ID NO: 308425 - RNA, 19 nt, Artificial Sequence
  Description of Artificial Sequence: Synthetic oligonucleotide
cugcccguugugcccaaau

SEQ ID NO: 308426 - RNA, 19 nt, Artificial Sequence
  Description of Artificial Sequence: Synthetic oligonucleotide
caauccuaugcaggauauu

SEQ ID NO: 308427 - RNA, 19 nt, Artificial Sequence
  Description of Artificial Sequence: Synthetic oligonucleotide
gaccaucggcucagucagu

SEQ ID NO: 308428 - RNA, 19 nt, Artificial Sequence
  Description of Artificial Sequence: Synthetic oligonucleotide
gcgucuaucccagguuuau

SEQ ID NO: 308429 - RNA, 19 nt, Artificial Sequence
  Description of Artificial Sequence: Synthetic oligonucleotide
gucgggcaguaaaggcaua

SEQ ID NO: 308430 - RNA, 19 nt, Artificial Sequence
  Description of Artificial Sequence: Synthetic oligonucleotide
gcccuucauaacaggcaua

SEQ ID NO: 308431 - RNA, 19 nt, Artificial Sequence
  Description of Artificial Sequence: Synthetic oligonucleotide
cuccgcggacugguccgga

SEQ ID NO: 308432 - RNA, 19 nt, Artificial Sequence
  Description of Artificial Sequence: Synthetic oligonucleotide
cgcggacugguccggaucu

SEQ ID NO: 308433 - RNA, 19 nt, Artificial Sequence
  Description of Artificial Sequence: Synthetic oligonucleotide
gcggacugguccggaucuc

SEQ ID NO: 308434 - RNA, 19 nt, Artificial Sequence
  Description of Artificial Sequence: Synthetic oligonucleotide
gcuacacgagagagugcau

SEQ ID NO: 308435 - RNA, 19 nt, Artificial Sequence
  Description of Artificial Sequence: Synthetic oligonucleotide
cgucuaucccagguuuaua

SEQ ID NO: 308436 - RNA, 19 nt, Artificial Sequence
  Description of Artificial Sequence: Synthetic oligonucleotide
cggacugguccggaucucu

SEQ ID NO: 308437 - RNA, 19 nt, Artificial Sequence
  Description of Artificial Sequence: Synthetic oligonucleotide
ccgaguuagucaggauauu

SEQ ID NO: 308438 - RNA, 19 nt, Artificial Sequence
  Description of Artificial Sequence: Synthetic oligonucleotide
aaugccaugggcuucaagc

SEQ ID NO: 308439 - RNA, 19 nt, Artificial Sequence
  Description of Artificial Sequence: Synthetic oligonucleotide
aaucuauagaugcagcugc

SEQ ID NO: 308440 - RNA, 19 nt, Artificial Sequence
  Description of Artificial Sequence: Synthetic oligonucleotide
aaaaccucaaacucuuuac

SEQ ID NO: 308441 - RNA, 19 nt, Artificial Sequence
  Description of Artificial Sequence: Synthetic oligonucleotide
aguauaacuguacauugcc

SEQ ID NO: 308442 - RNA, 19 nt, Artificial Sequence
  Description of Artificial Sequence: Synthetic oligonucleotide
aaugcugcaaaauguuacc

SEQ ID NO: 308443 - RNA, 19 nt, Artificial Sequence
  Description of Artificial Sequence: Synthetic oligonucleotide
gauacaaagagaugguacg

SEQ ID NO: 308444 - RNA, 19 nt, Artificial Sequence
  Description of Artificial Sequence: Synthetic oligonucleotide
auauaggccaaccugaccg

SEQ ID NO: 308445 - RNA, 19 nt, Artificial Sequence
  Description of Artificial Sequence: Synthetic oligonucleotide
aaaucaccaguucaucugc

SEQ ID NO: 308446 - RNA, 19 nt, Artificial Sequence
  Description of Artificial Sequence: Synthetic oligonucleotide
uauacagauauacaucaag

SEQ ID NO: 308447 - RNA, 19 nt, Artificial Sequence
  Description of Artificial Sequence: Synthetic oligonucleotide
aaugcgugcucgcucaugc

SEQ ID NO: 308448 - RNA, 19 nt, Artificial Sequence
  Description of Artificial Sequence: Synthetic oligonucleotide
uggaacaagaaucagugug

SEQ ID NO: 308449 - RNA, 19 nt, Artificial Sequence
  Description of Artificial Sequence: Synthetic oligonucleotide
uauacaucaagacaugagu

SEQ ID NO: 308450 - RNA, 19 nt, Artificial Sequence
  Description of Artificial Sequence: Synthetic oligonucleotide
auagccucaacguaguugg

SEQ ID NO: 308451 - RNA, 19 nt, Artificial Sequence
  Description of Artificial Sequence: Synthetic oligonucleotide
auagagugaaaauaauuuc

SEQ ID NO: 308452 - RNA, 19 nt, Artificial Sequence
  Description of Artificial Sequence: Synthetic oligonucleotide
uuucuaaacauagugaugu

SEQ ID NO: 308453 - RNA, 19 nt, Artificial Sequence
  Description of Artificial Sequence: Synthetic oligonucleotide
agagaaaauaaucagugga

SEQ ID NO: 308454 - RNA, 19 nt, Artificial Sequence
  Description of Artificial Sequence: Synthetic oligonucleotide
uaggccauaauuuacguga

SEQ ID NO: 308455 - RNA, 19 nt, Artificial Sequence
  Description of Artificial Sequence: Synthetic oligonucleotide
uuuacucagaaaauggcgu

SEQ ID NO: 308456 - RNA, 19 nt, Artificial Sequence
  Description of Artificial Sequence: Synthetic oligonucleotide
aauagagugaaaauaauuu

SEQ ID NO: 308457 - RNA, 19 nt, Artificial Sequence
  Description of Artificial Sequence: Synthetic oligonucleotide
ucuaauguaaagcaucuua

SEQ ID NO: 308458 - RNA, 19 nt, Artificial Sequence
  Description of Artificial Sequence: Synthetic oligonucleotide
agaauuagacuucucagca

SEQ ID NO: 308459 - RNA, 19 nt, Artificial Sequence
  Description of Artificial Sequence: Synthetic oligonucleotide
guugauuccuguuagggug

SEQ ID NO: 308460 - RNA, 19 nt, Artificial Sequence
  Description of Artificial Sequence: Synthetic oligonucleotide
gagaauuagacuucucagc

SEQ ID NO: 308461 - RNA, 19 nt, Artificial Sequence
  Description of Artificial Sequence: Synthetic oligonucleotide
aauguaggccauaauuuac

SEQ ID NO: 308462 - RNA, 19 nt, Artificial Sequence
  Description of Artificial Sequence: Synthetic oligonucleotide
ucacuggauagccucaacg

SEQ ID NO: 308463 - RNA, 19 nt, Artificial Sequence
  Description of Artificial Sequence: Synthetic oligonucleotide
aaguauaacuguacauugc

SEQ ID NO: 308464 - RNA, 19 nt, Artificial Sequence
  Description of Artificial Sequence: Synthetic oligonucleotide
uuaaucuauagaugcagcu

SEQ ID NO: 308465 - RNA, 19 nt, Artificial Sequence
  Description of Artificial Sequence: Synthetic oligonucleotide
uucgauucagaucugcaga

SEQ ID NO: 308466 - RNA, 19 nt, Artificial Sequence
  Description of Artificial Sequence: Synthetic oligonucleotide
auggcguuaaaguuuguuc

SEQ ID NO: 308467 - RNA, 19 nt, Artificial Sequence
  Description of Artificial Sequence: Synthetic oligonucleotide
uacagauauacaucaagac

SEQ ID NO: 308468 - RNA, 19 nt, Artificial Sequence
  Description of Artificial Sequence: Synthetic oligonucleotide
uuacauggagaucaucuca

SEQ ID NO: 308469 - RNA, 19 nt, Artificial Sequence
  Description of Artificial Sequence: Synthetic oligonucleotide
ucagugugauccaucauug

SEQ ID NO: 308470 - RNA, 19 nt, Artificial Sequence
  Description of Artificial Sequence: Synthetic oligonucleotide
acagcuuacauggagauca

SEQ ID NO: 308471 - RNA, 19 nt, Artificial Sequence
  Description of Artificial Sequence: Synthetic oligonucleotide
auuccuguuagggugacac

SEQ ID NO: 308472 - RNA, 19 nt, Artificial Sequence
  Description of Artificial Sequence: Synthetic oligonucleotide
aaaauggcguuaaaguuug

SEQ ID NO: 308473 - RNA, 19 nt, Artificial Sequence
  Description of Artificial Sequence: Synthetic oligonucleotide
uuacgugacuggaagagca

SEQ ID NO: 308474 - RNA, 19 nt, Artificial Sequence
  Description of Artificial Sequence: Synthetic oligonucleotide
uuugcaugcuguguggugg

SEQ ID NO: 308475 - RNA, 19 nt, Artificial Sequence
  Description of Artificial Sequence: Synthetic oligonucleotide
agagauggccaguuucucc

SEQ ID NO: 308476 - RNA, 19 nt, Artificial Sequence
  Description of Artificial Sequence: Synthetic oligonucleotide
uacaucaagacaugagucu

SEQ ID NO: 308477 - RNA, 19 nt, Artificial Sequence
  Description of Artificial Sequence: Synthetic oligonucleotide
cugaauaucaaauaauaua

SEQ ID NO: 308478 - RNA, 19 nt, Artificial Sequence
  Description of Artificial Sequence: Synthetic oligonucleotide
uggcguuaaaguuuguuca

SEQ ID NO: 308479 - RNA, 19 nt, Artificial Sequence
  Description of Artificial Sequence: Synthetic oligonucleotide
caggcuaaggcuaacggag

SEQ ID NO: 308480 - RNA, 19 nt, Artificial Sequence
  Description of Artificial Sequence: Synthetic oligonucleotide
ucuaaacauagugauguug

SEQ ID NO: 308481 - RNA, 19 nt, Artificial Sequence
  Description of Artificial Sequence: Synthetic oligonucleotide
uauaacuguacauugccuu

SEQ ID NO: 308482 - RNA, 19 nt, Artificial Sequence
  Description of Artificial Sequence: Synthetic oligonucleotide
caugagucuaauguaaagc

SEQ ID NO: 308483 - RNA, 19 nt, Artificial Sequence
  Description of Artificial Sequence: Synthetic oligonucleotide
ugcuuugaaaaguuagucu

SEQ ID NO: 308484 - RNA, 19 nt, Artificial Sequence
  Description of Artificial Sequence: Synthetic oligonucleotide
uggggaaugcugcaaaaug

SEQ ID NO: 308485 - RNA, 19 nt, Artificial Sequence
  Description of Artificial Sequence: Synthetic oligonucleotide
aaacaguucaugaggucac

SEQ ID NO: 308486 - RNA, 19 nt, Artificial Sequence
  Description of Artificial Sequence: Synthetic oligonucleotide
aauuuacgugacuggaaga

SEQ ID NO: 308487 - RNA, 19 nt, Artificial Sequence
  Description of Artificial Sequence: Synthetic oligonucleotide
ucaugaggucaccacacag

SEQ ID NO: 308488 - RNA, 19 nt, Artificial Sequence
  Description of Artificial Sequence: Synthetic oligonucleotide
uaaucuauagaugcagcug

SEQ ID NO: 308489 - RNA, 19 nt, Artificial Sequence
  Description of Artificial Sequence: Synthetic oligonucleotide
auuuacgugacuggaagag

SEQ ID NO: 308490 - RNA, 19 nt, Artificial Sequence
  Description of Artificial Sequence: Synthetic oligonucleotide
ugugauccaucauugacuc

SEQ ID NO: 308491 - RNA, 19 nt, Artificial Sequence
  Description of Artificial Sequence: Synthetic oligonucleotide
ugguugauuccuguuaggg

SEQ ID NO: 308492 - RNA, 19 nt, Artificial Sequence
  Description of Artificial Sequence: Synthetic oligonucleotide
cuucauucaucagugacgc

SEQ ID NO: 308493 - RNA, 19 nt, Artificial Sequence
  Description of Artificial Sequence: Synthetic oligonucleotide
agaugguacggguagggag

SEQ ID NO: 308494 - RNA, 19 nt, Artificial Sequence
  Description of Artificial Sequence: Synthetic oligonucleotide
cuggauagccucaacguag

SEQ ID NO: 308495 - RNA, 19 nt, Artificial Sequence
  Description of Artificial Sequence: Synthetic oligonucleotide
ugucagaagccaccaaugc

SEQ ID NO: 308496 - RNA, 19 nt, Artificial Sequence
  Description of Artificial Sequence: Synthetic oligonucleotide
uacaaagagaugguacggg

SEQ ID NO: 308497 - RNA, 19 nt, Artificial Sequence
  Description of Artificial Sequence: Synthetic oligonucleotide
auacaucaagacaugaguc

SEQ ID NO: 308498 - RNA, 19 nt, Artificial Sequence
  Description of Artificial Sequence: Synthetic oligonucleotide
ugcucgcucaugcaaacag

SEQ ID NO: 308499 - RNA, 19 nt, Artificial Sequence
  Description of Artificial Sequence: Synthetic oligonucleotide
uguuagacucgucaucaga

SEQ ID NO: 308500 - RNA, 19 nt, Artificial Sequence
  Description of Artificial Sequence: Synthetic oligonucleotide
acaugagucuaauguaaag

SEQ ID NO: 308501 - RNA, 19 nt, Artificial Sequence
  Description of Artificial Sequence: Synthetic oligonucleotide
ugggagauuuuccagugcu

SEQ ID NO: 308502 - RNA, 19 nt, Artificial Sequence
  Description of Artificial Sequence: Synthetic oligonucleotide
uagacucgucaucagacca

SEQ ID NO: 308503 - RNA, 19 nt, Artificial Sequence
  Description of Artificial Sequence: Synthetic oligonucleotide
gaaugcugcaaaauguuac

SEQ ID NO: 308504 - RNA, 19 nt, Artificial Sequence
  Description of Artificial Sequence: Synthetic oligonucleotide
aucgauccgcuucacaguc

SEQ ID NO: 308505 - RNA, 19 nt, Artificial Sequence
  Description of Artificial Sequence: Synthetic oligonucleotide
auugacucaggagagauaa

SEQ ID NO: 308506 - RNA, 19 nt, Artificial Sequence
  Description of Artificial Sequence: Synthetic oligonucleotide
aucguuugcagguggagug

SEQ ID NO: 308507 - RNA, 19 nt, Artificial Sequence
  Description of Artificial Sequence: Synthetic oligonucleotide
ugcugcaaaauguuacccc

SEQ ID NO: 308508 - RNA, 19 nt, Artificial Sequence
  Description of Artificial Sequence: Synthetic oligonucleotide
aucuuaaccgggaggaggc

SEQ ID NO: 308509 - RNA, 19 nt, Artificial Sequence
  Description of Artificial Sequence: Synthetic oligonucleotide
guucgauucagaucugcag

SEQ ID NO: 308510 - RNA, 19 nt, Artificial Sequence
  Description of Artificial Sequence: Synthetic oligonucleotide
uaauguaaagcaucuuaau

SEQ ID NO: 308511 - RNA, 19 nt, Artificial Sequence
  Description of Artificial Sequence: Synthetic oligonucleotide
uuagacucgucaucagacc

SEQ ID NO: 308512 - RNA, 19 nt, Artificial Sequence
  Description of Artificial Sequence: Synthetic oligonucleotide
aucagugugauccaucauu

SEQ ID NO: 308513 - RNA, 19 nt, Artificial Sequence
  Description of Artificial Sequence: Synthetic oligonucleotide
ugagucuaauguaaagcau

SEQ ID NO: 308514 - RNA, 19 nt, Artificial Sequence
  Description of Artificial Sequence: Synthetic oligonucleotide
gaacucgcacuuccgaucc

SEQ ID NO: 308515 - RNA, 19 nt, Artificial Sequence
  Description of Artificial Sequence: Synthetic oligonucleotide
aacaguucaugaggucacc

SEQ ID NO: 308516 - RNA, 19 nt, Artificial Sequence
  Description of Artificial Sequence: Synthetic oligonucleotide
aagaagacgcaagcgcuuc

SEQ ID NO: 308517 - RNA, 19 nt, Artificial Sequence
  Description of Artificial Sequence: Synthetic oligonucleotide
acuaagguugcugccaguc

SEQ ID NO: 308518 - RNA, 19 nt, Artificial Sequence
  Description of Artificial Sequence: Synthetic oligonucleotide
ugagaguucgauucagauc

SEQ ID NO: 308519 - RNA, 19 nt, Artificial Sequence
  Description of Artificial Sequence: Synthetic oligonucleotide
gagucuaauguaaagcauc

SEQ ID NO: 308520 - RNA, 19 nt, Artificial Sequence
  Description of Artificial Sequence: Synthetic oligonucleotide
cuuacauggagaucaucuc

SEQ ID NO: 308521 - RNA, 19 nt, Artificial Sequence
  Description of Artificial Sequence: Synthetic oligonucleotide
cuaaggcuaacggagcucc

SEQ ID NO: 308522 - RNA, 19 nt, Artificial Sequence
  Description of Artificial Sequence: Synthetic oligonucleotide
  modified_base (4)..(4): a, c, u, g, unknown or other
agcngaaccucccggaaga

SEQ ID NO: 308523 - RNA, 19 nt, Artificial Sequence
  Description of Artificial Sequence: Synthetic oligonucleotide
agcagcagcagcagcagcc

SEQ ID NO: 308524 - RNA, 19 nt, Artificial Sequence
  Description of Artificial Sequence: Synthetic oligonucleotide
  modified_base (16)..(16): a, c, u, g, unknown or other
uucugaaccuccagcngaa

SEQ ID NO: 308525 - RNA, 19 nt, Artificial Sequence
  Description of Artificial Sequence: Synthetic oligonucleotide
ucgagagauggccaguuuc

SEQ ID NO: 308526 - RNA, 19 nt, Artificial Sequence
  Description of Artificial Sequence: Synthetic oligonucleotide
ucauagagggcccgaacuc

SEQ ID NO: 308527 - RNA, 19 nt, Artificial Sequence
  Description of Artificial Sequence: Synthetic oligonucleotide
guuguuagacucgucauca

SEQ ID NO: 308528 - RNA, 19 nt, Artificial Sequence
  Description of Artificial Sequence: Synthetic oligonucleotide
auuaaaaccucaaacucuu

SEQ ID NO: 308529 - RNA, 19 nt, Artificial Sequence
  Description of Artificial Sequence: Synthetic oligonucleotide
aacagcagcagcagcagca

SEQ ID NO: 308530 - RNA, 19 nt, Artificial Sequence
  Description of Artificial Sequence: Synthetic oligonucleotide
caacucuccagugaguggc

SEQ ID NO: 308531 - RNA, 19 nt, Artificial Sequence
  Description of Artificial Sequence: Synthetic oligonucleotide
cacaggcuaaggcuaacgg

SEQ ID NO: 308532 - RNA, 19 nt, Artificial Sequence
  Description of Artificial Sequence: Synthetic oligonucleotide
ugagcgauggauccgcuuu

SEQ ID NO: 308533 - RNA, 19 nt, Artificial Sequence
  Description of Artificial Sequence: Synthetic oligonucleotide
aagacagcuuacauggaga

SEQ ID NO: 308534 - RNA, 19 nt, Artificial Sequence
  Description of Artificial Sequence: Synthetic oligonucleotide
aaccgugaagccugugaug

SEQ ID NO: 308535 - RNA, 19 nt, Artificial Sequence
  Description of Artificial Sequence: Synthetic oligonucleotide
uuuacgugacuggaagagc

SEQ ID NO: 308536 - RNA, 19 nt, Artificial Sequence
  Description of Artificial Sequence: Synthetic oligonucleotide
ucaagacaugagucuaaug

SEQ ID NO: 308537 - RNA, 19 nt, Artificial Sequence
  Description of Artificial Sequence: Synthetic oligonucleotide
acaggcuaaggcuaacgga

SEQ ID NO: 308538 - RNA, 19 nt, Artificial Sequence
  Description of Artificial Sequence: Synthetic oligonucleotide
uguuaccccugcaacuggc

SEQ ID NO: 308539 - RNA, 19 nt, Artificial Sequence
  Description of Artificial Sequence: Synthetic oligonucleotide
uuaaccgggaggaggcugu

SEQ ID NO: 308540 - RNA, 19 nt, Artificial Sequence
  Description of Artificial Sequence: Synthetic oligonucleotide
  modified_base (7)..(7): a, c, u, g, unknown or other
uccagcngaaccucccgga

SEQ ID NO: 308541 - RNA, 19 nt, Artificial Sequence
  Description of Artificial Sequence: Synthetic oligonucleotide
aauggguuagaguccccau

SEQ ID NO: 308542 - RNA, 19 nt, Artificial Sequence
  Description of Artificial Sequence: Synthetic oligonucleotide
cauagagggcccgaacucg

SEQ ID NO: 308543 - RNA, 19 nt, Artificial Sequence
  Description of Artificial Sequence: Synthetic oligonucleotide
uauaggccaaccugaccgc

SEQ ID NO: 308544 - RNA, 19 nt, Artificial Sequence
  Description of Artificial Sequence: Synthetic oligonucleotide
aaccugaccgcuguccaag

SEQ ID NO: 308545 - RNA, 19 nt, Artificial Sequence
  Description of Artificial Sequence: Synthetic oligonucleotide
acuuccgauccugagguag

SEQ ID NO: 308546 - RNA, 19 nt, Artificial Sequence
  Description of Artificial Sequence: Synthetic oligonucleotide
ucgucaaauggguuagagu

SEQ ID NO: 308547 - RNA, 19 nt, Artificial Sequence
  Description of Artificial Sequence: Synthetic oligonucleotide
aguguccucgucaaauggg

SEQ ID NO: 308548 - RNA, 19 nt, Artificial Sequence
  Description of Artificial Sequence: Synthetic oligonucleotide
gcauccguggugaagaagg

SEQ ID NO: 308549 - RNA, 19 nt, Artificial Sequence
  Description of Artificial Sequence: Synthetic oligonucleotide
uggucccuucucuacaagc

SEQ ID NO: 308550 - RNA, 19 nt, Artificial Sequence
  Description of Artificial Sequence: Synthetic oligonucleotide
uggcuuucgcuguuggacc

SEQ ID NO: 308551 - RNA, 19 nt, Artificial Sequence
  Description of Artificial Sequence: Synthetic oligonucleotide
caaccaucaucguuugcag

SEQ ID NO: 308552 - RNA, 19 nt, Artificial Sequence
  Description of Artificial Sequence: Synthetic oligonucleotide
agucuaauguaaagcaucu

SEQ ID NO: 308553 - RNA, 19 nt, Artificial Sequence
  Description of Artificial Sequence: Synthetic oligonucleotide
uuagacuucucagcagucu

SEQ ID NO: 308554 - RNA, 19 nt, Artificial Sequence
  Description of Artificial Sequence: Synthetic oligonucleotide
auagugauguuggggaaug

SEQ ID NO: 308555 - RNA, 19 nt, Artificial Sequence
  Description of Artificial Sequence: Synthetic oligonucleotide
uuacucagaaaauggcguu

SEQ ID NO: 308556 - RNA, 19 nt, Artificial Sequence
  Description of Artificial Sequence: Synthetic oligonucleotide
aauggcguuaaaguuuguu

SEQ ID NO: 308557 - RNA, 19 nt, Artificial Sequence
  Description of Artificial Sequence: Synthetic oligonucleotide
caucaucguuugcaggugg

SEQ ID NO: 308558 - RNA, 19 nt, Artificial Sequence
  Description of Artificial Sequence: Synthetic oligonucleotide
ugacauggagcuagaguuc

SEQ ID NO: 308559 - RNA, 19 nt, Artificial Sequence
  Description of Artificial Sequence: Synthetic oligonucleotide
cuuggaaaggggccaaguc

SEQ ID NO: 308560 - RNA, 19 nt, Artificial Sequence
  Description of Artificial Sequence: Synthetic oligonucleotide
ggagcuagaguucuggcca

SEQ ID NO: 308561 - RNA, 19 nt, Artificial Sequence
  Description of Artificial Sequence: Synthetic oligonucleotide
gggagaauuagacuucuca

SEQ ID NO: 308562 - RNA, 19 nt, Artificial Sequence
  Description of Artificial Sequence: Synthetic oligonucleotide
auguuaccccugcaacugg

SEQ ID NO: 308563 - RNA, 19 nt, Artificial Sequence
  Description of Artificial Sequence: Synthetic oligonucleotide
acaguccguuuguaguuuc

SEQ ID NO: 308564 - RNA, 19 nt, Artificial Sequence
  Description of Artificial Sequence: Synthetic oligonucleotide
auagagggcccgaacucgc

SEQ ID NO: 308565 - RNA, 19 nt, Artificial Sequence
  Description of Artificial Sequence: Synthetic oligonucleotide
cucuaucuuggucaguuca

SEQ ID NO: 308566 - RNA, 19 nt, Artificial Sequence
  Description of Artificial Sequence: Synthetic oligonucleotide
ucagugacgccuucacuuc

SEQ ID NO: 308567 - RNA, 19 nt, Artificial Sequence
  Description of Artificial Sequence: Synthetic oligonucleotide
agagggcccgaacucgcac

SEQ ID NO: 308568 - RNA, 19 nt, Artificial Sequence
  Description of Artificial Sequence: Synthetic oligonucleotide
aaggcuaacggagcuccug

SEQ ID NO: 308569 - RNA, 19 nt, Artificial Sequence
  Description of Artificial Sequence: Synthetic oligonucleotide
agagugaaaauaauuucua

SEQ ID NO: 308570 - RNA, 19 nt, Artificial Sequence
  Description of Artificial Sequence: Synthetic oligonucleotide
ugaacuccccacuuccguc

SEQ ID NO: 308571 - RNA, 19 nt, Artificial Sequence
  Description of Artificial Sequence: Synthetic oligonucleotide
cacaucuuaaccgggagga

SEQ ID NO: 308572 - RNA, 19 nt, Artificial Sequence
  Description of Artificial Sequence: Synthetic oligonucleotide
agccagaauagagugaaaa

SEQ ID NO: 308573 - RNA, 19 nt, Artificial Sequence
  Description of Artificial Sequence: Synthetic oligonucleotide
ucguuugcagguggagugg

SEQ ID NO: 308574 - RNA, 19 nt, Artificial Sequence
  Description of Artificial Sequence: Synthetic oligonucleotide
gaagccuaacacaaccauc

SEQ ID NO: 308575 - RNA, 19 nt, Artificial Sequence
  Description of Artificial Sequence: Synthetic oligonucleotide
cagugaaaucaccaguuca

SEQ ID NO: 308576 - RNA, 19 nt, Artificial Sequence
  Description of Artificial Sequence: Synthetic oligonucleotide
acuggauagccucaacgua

SEQ ID NO: 308577 - RNA, 19 nt, Artificial Sequence
  Description of Artificial Sequence: Synthetic oligonucleotide
cugguugauuccuguuagg

SEQ ID NO: 308578 - RNA, 19 nt, Artificial Sequence
  Description of Artificial Sequence: Synthetic oligonucleotide
ucaucguuugcagguggag

SEQ ID NO: 308579 - RNA, 19 nt, Artificial Sequence
  Description of Artificial Sequence: Synthetic oligonucleotide
auagaugcagcugcuuuga

SEQ ID NO: 308580 - RNA, 19 nt, Artificial Sequence
  Description of Artificial Sequence: Synthetic oligonucleotide
aaguccccagugaaaucac

SEQ ID NO: 308581 - RNA, 19 nt, Artificial Sequence
  Description of Artificial Sequence: Synthetic oligonucleotide
guaguuggcuggauauagg

SEQ ID NO: 308582 - RNA, 19 nt, Artificial Sequence
  Description of Artificial Sequence: Synthetic oligonucleotide
caauguaggccauaauuua

SEQ ID NO: 308583 - RNA, 19 nt, Artificial Sequence
  Description of Artificial Sequence: Synthetic oligonucleotide
ugcgugcucgcucaugcaa

SEQ ID NO: 308584 - RNA, 19 nt, Artificial Sequence
  Description of Artificial Sequence: Synthetic oligonucleotide
cucgucaaauggguuagag

SEQ ID NO: 308585 - RNA, 19 nt, Artificial Sequence
  Description of Artificial Sequence: Synthetic oligonucleotide
auaaucaguggaacaagaa

SEQ ID NO: 308586 - RNA, 19 nt, Artificial Sequence
  Description of Artificial Sequence: Synthetic oligonucleotide
cucgggacacuaagguugc

SEQ ID NO: 308587 - RNA, 19 nt, Artificial Sequence
  Description of Artificial Sequence: Synthetic oligonucleotide
uggucuuaaugucuuccuu

SEQ ID NO: 308588 - RNA, 19 nt, Artificial Sequence
  Description of Artificial Sequence: Synthetic oligonucleotide
uaacggagcuccugaacuc

SEQ ID NO: 308589 - RNA, 19 nt, Artificial Sequence
  Description of Artificial Sequence: Synthetic oligonucleotide
accgcuguccaagcguccc

SEQ ID NO: 308590 - RNA, 19 nt, Artificial Sequence
  Description of Artificial Sequence: Synthetic oligonucleotide
auaagggcaagaaggugca

SEQ ID NO: 308591 - RNA, 19 nt, Artificial Sequence
  Description of Artificial Sequence: Synthetic oligonucleotide
gcaucuuaaucuauagaug

SEQ ID NO: 308592 - RNA, 19 nt, Artificial Sequence
  Description of Artificial Sequence: Synthetic oligonucleotide
gugaagaaggguuguuaga

SEQ ID NO: 308593 - RNA, 19 nt, Artificial Sequence
  Description of Artificial Sequence: Synthetic oligonucleotide
gcagggauucaucagagaa

SEQ ID NO: 308594 - RNA, 19 nt, Artificial Sequence
  Description of Artificial Sequence: Synthetic oligonucleotide
uucgcuguuggaccauguc

SEQ ID NO: 308595 - RNA, 19 nt, Artificial Sequence
  Description of Artificial Sequence: Synthetic oligonucleotide
caccaaugcuucaagagua

SEQ ID NO: 308596 - RNA, 19 nt, Artificial Sequence
  Description of Artificial Sequence: Synthetic oligonucleotide
aagguugcugccagucuug

SEQ ID NO: 308597 - RNA, 19 nt, Artificial Sequence
  Description of Artificial Sequence: Synthetic oligonucleotide
cuaacggagcuccugaacu

SEQ ID NO: 308598 - RNA, 19 nt, Artificial Sequence
  Description of Artificial Sequence: Synthetic oligonucleotide
gcucgggacacuaagguug

SEQ ID NO: 308599 - RNA, 19 nt, Artificial Sequence
  Description of Artificial Sequence: Synthetic oligonucleotide
  modified_base (8)..(8): a, c, u, g, unknown or other
cuccagcngaaccucccgg

SEQ ID NO: 308600 - RNA, 19 nt, Artificial Sequence
  Description of Artificial Sequence: Synthetic oligonucleotide
ugacugcaaagaccuggga

SEQ ID NO: 308601 - RNA, 19 nt, Artificial Sequence
  Description of Artificial Sequence: Synthetic oligonucleotide
uuccuguuagggugacacc

SEQ ID NO: 308602 - RNA, 19 nt, Artificial Sequence
  Description of Artificial Sequence: Synthetic oligonucleotide
aggccauaauuuacgugac

SEQ ID NO: 308603 - RNA, 19 nt, Artificial Sequence
  Description of Artificial Sequence: Synthetic oligonucleotide
ucgcucaugcaaacaguuc

SEQ ID NO: 308604 - RNA, 19 nt, Artificial Sequence
  Description of Artificial Sequence: Synthetic oligonucleotide
uuuguucacugaacuugua

SEQ ID NO: 308605 - RNA, 19 nt, Artificial Sequence
  Description of Artificial Sequence: Synthetic oligonucleotide
gaagaaggguuguuagacu

SEQ ID NO: 308606 - RNA, 19 nt, Artificial Sequence
  Description of Artificial Sequence: Synthetic oligonucleotide
aggcuaacggagcuccuga

SEQ ID NO: 308607 - RNA, 19 nt, Artificial Sequence
  Description of Artificial Sequence: Synthetic oligonucleotide
uuucgcuguuggaccaugu

SEQ ID NO: 308608 - RNA, 19 nt, Artificial Sequence
  Description of Artificial Sequence: Synthetic oligonucleotide
cucuccggcugagaguucg

SEQ ID NO: 308609 - RNA, 19 nt, Artificial Sequence
  Description of Artificial Sequence: Synthetic oligonucleotide
caugauacaaagagauggu

SEQ ID NO: 308610 - RNA, 19 nt, Artificial Sequence
  Description of Artificial Sequence: Synthetic oligonucleotide
ggauccgcuuugcuguugg

SEQ ID NO: 308611 - RNA, 19 nt, Artificial Sequence
  Description of Artificial Sequence: Synthetic oligonucleotide
gagcgauggauccgcuuug

SEQ ID NO: 308612 - RNA, 19 nt, Artificial Sequence
  Description of Artificial Sequence: Synthetic oligonucleotide
  modified_base (5)..(5): a, c, u, g, unknown or other
cagcngaaccucccggaag

SEQ ID NO: 308613 - RNA, 19 nt, Artificial Sequence
  Description of Artificial Sequence: Synthetic oligonucleotide
gguuguuagacucgucauc

SEQ ID NO: 308614 - RNA, 19 nt, Artificial Sequence
  Description of Artificial Sequence: Synthetic oligonucleotide
gaguggaugccaacauggc

SEQ ID NO: 308615 - RNA, 19 nt, Artificial Sequence
  Description of Artificial Sequence: Synthetic oligonucleotide
ucgcacuuccgauccugag

SEQ ID NO: 308616 - RNA, 19 nt, Artificial Sequence
  Description of Artificial Sequence: Synthetic oligonucleotide
uacucagaaaauggcguua

SEQ ID NO: 308617 - RNA, 19 nt, Artificial Sequence
  Description of Artificial Sequence: Synthetic oligonucleotide
cuaucuuggucaguucauc

SEQ ID NO: 308618 - RNA, 19 nt, Artificial Sequence
  Description of Artificial Sequence: Synthetic oligonucleotide
gacaugagucuaauguaaa

SEQ ID NO: 308619 - RNA, 19 nt, Artificial Sequence
  Description of Artificial Sequence: Synthetic oligonucleotide
ggcguuaaaguuuguucac

SEQ ID NO: 308620 - RNA, 19 nt, Artificial Sequence
  Description of Artificial Sequence: Synthetic oligonucleotide
agcagcagcagcagcagca

SEQ ID NO: 308621 - RNA, 19 nt, Artificial Sequence
  Description of Artificial Sequence: Synthetic oligonucleotide
cuuaaccgggaggaggcug

SEQ ID NO: 308622 - RNA, 19 nt, Artificial Sequence
  Description of Artificial Sequence: Synthetic oligonucleotide
ccggcugagaguucgauuc

SEQ ID NO: 308623 - RNA, 19 nt, Artificial Sequence
  Description of Artificial Sequence: Synthetic oligonucleotide
agucuuguucugcccagaa

SEQ ID NO: 308624 - RNA, 19 nt, Artificial Sequence
  Description of Artificial Sequence: Synthetic oligonucleotide
ugcccauggccugucacug

SEQ ID NO: 308625 - RNA, 19 nt, Artificial Sequence
  Description of Artificial Sequence: Synthetic oligonucleotide
auaaaacuguuaaucugua

SEQ ID NO: 308626 - RNA, 19 nt, Artificial Sequence
  Description of Artificial Sequence: Synthetic oligonucleotide
acucagaaaauggcguuaa

SEQ ID NO: 308627 - RNA, 19 nt, Artificial Sequence
  Description of Artificial Sequence: Synthetic oligonucleotide
gcuuugaaaaguuagucuu

SEQ ID NO: 308628 - RNA, 19 nt, Artificial Sequence
  Description of Artificial Sequence: Synthetic oligonucleotide
uuggggaaugcugcaaaau

SEQ ID NO: 308629 - RNA, 19 nt, Artificial Sequence
  Description of Artificial Sequence: Synthetic oligonucleotide
caguccguuuguaguuucc

SEQ ID NO: 308630 - RNA, 19 nt, Artificial Sequence
  Description of Artificial Sequence: Synthetic oligonucleotide
uacgugacuggaagagcau

SEQ ID NO: 308631 - RNA, 19 nt, Artificial Sequence
  Description of Artificial Sequence: Synthetic oligonucleotide
augguacggguagggaggg

SEQ ID NO: 308632 - RNA, 19 nt, Artificial Sequence
  Description of Artificial Sequence: Synthetic oligonucleotide
gugcagauccaugauacaa

SEQ ID NO: 308633 - RNA, 19 nt, Artificial Sequence
  Description of Artificial Sequence: Synthetic oligonucleotide
caaagagaugguacgggua

SEQ ID NO: 308634 - RNA, 19 nt, Artificial Sequence
  Description of Artificial Sequence: Synthetic oligonucleotide
uccagcgucgggcccacuc

SEQ ID NO: 308635 - RNA, 19 nt, Artificial Sequence
  Description of Artificial Sequence: Synthetic oligonucleotide
acagcagcagcagcagcag

SEQ ID NO: 308636 - RNA, 19 nt, Artificial Sequence
  Description of Artificial Sequence: Synthetic oligonucleotide
gacuguaacugcguggacu

SEQ ID NO: 308637 - RNA, 19 nt, Artificial Sequence
  Description of Artificial Sequence: Synthetic oligonucleotide
cguuaaaguuuguucacug

SEQ ID NO: 308638 - RNA, 19 nt, Artificial Sequence
  Description of Artificial Sequence: Synthetic oligonucleotide
cucgaagggguuguagcug

SEQ ID NO: 308639 - RNA, 19 nt, Artificial Sequence
  Description of Artificial Sequence: Synthetic oligonucleotide
uuccaaccucccagaagcu

SEQ ID NO: 308640 - RNA, 19 nt, Artificial Sequence
  Description of Artificial Sequence: Synthetic oligonucleotide
aguccguuuguaguuucca

SEQ ID NO: 308641 - RNA, 19 nt, Artificial Sequence
  Description of Artificial Sequence: Synthetic oligonucleotide
acaucuuaaccgggaggag

SEQ ID NO: 308642 - RNA, 19 nt, Artificial Sequence
  Description of Artificial Sequence: Synthetic oligonucleotide
ggcuucucgagagauggcc

SEQ ID NO: 308643 - RNA, 19 nt, Artificial Sequence
  Description of Artificial Sequence: Synthetic oligonucleotide
gucagaagccaccaaugcu

SEQ ID NO: 308644 - RNA, 19 nt, Artificial Sequence
  Description of Artificial Sequence: Synthetic oligonucleotide
gaagacgcaagcgcuucuc

SEQ ID NO: 308645 - RNA, 19 nt, Artificial Sequence
  Description of Artificial Sequence: Synthetic oligonucleotide
ggaaccgugaagccuguga

SEQ ID NO: 308646 - RNA, 19 nt, Artificial Sequence
  Description of Artificial Sequence: Synthetic oligonucleotide
uaaggcuaacggagcuccu

SEQ ID NO: 308647 - RNA, 19 nt, Artificial Sequence
  Description of Artificial Sequence: Synthetic oligonucleotide
gguacggguagggaggggc

SEQ ID NO: 308648 - RNA, 19 nt, Artificial Sequence
  Description of Artificial Sequence: Synthetic oligonucleotide
cacucacccucucugcuuc

SEQ ID NO: 308649 - RNA, 19 nt, Artificial Sequence
  Description of Artificial Sequence: Synthetic oligonucleotide
uagagggcccgaacucgca

SEQ ID NO: 308650 - RNA, 19 nt, Artificial Sequence
  Description of Artificial Sequence: Synthetic oligonucleotide
cacuggauagccucaacgu

SEQ ID NO: 308651 - RNA, 19 nt, Artificial Sequence
  Description of Artificial Sequence: Synthetic oligonucleotide
gguugagcgauggauccgc

SEQ ID NO: 308652 - RNA, 19 nt, Artificial Sequence
  Description of Artificial Sequence: Synthetic oligonucleotide
gaaccucccggaagaagac

SEQ ID NO: 308653 - RNA, 19 nt, Artificial Sequence
  Description of Artificial Sequence: Synthetic oligonucleotide
acggagcuccugaacuccc

SEQ ID NO: 308654 - RNA, 19 nt, Artificial Sequence
  Description of Artificial Sequence: Synthetic oligonucleotide
gagaucaucucagaucaau

SEQ ID NO: 308655 - RNA, 19 nt, Artificial Sequence
  Description of Artificial Sequence: Synthetic oligonucleotide
aucguguuccugccccuca

SEQ ID NO: 308656 - RNA, 19 nt, Artificial Sequence
  Description of Artificial Sequence: Synthetic oligonucleotide
aggaagccuaacacaacca

SEQ ID NO: 308657 - RNA, 19 nt, Artificial Sequence
  Description of Artificial Sequence: Synthetic oligonucleotide
guccucgucaaauggguua

SEQ ID NO: 308658 - RNA, 19 nt, Artificial Sequence
  Description of Artificial Sequence: Synthetic oligonucleotide
ucacucacccucucugcuu

SEQ ID NO: 308659 - RNA, 19 nt, Artificial Sequence
  Description of Artificial Sequence: Synthetic oligonucleotide
aggagagauaagggcaaga

SEQ ID NO: 308660 - RNA, 19 nt, Artificial Sequence
  Description of Artificial Sequence: Synthetic oligonucleotide
  modified_base (2)..(2): a, c, u, g, unknown or other
cngaaccucccggaagaag

SEQ ID NO: 308661 - RNA, 19 nt, Artificial Sequence
  Description of Artificial Sequence: Synthetic oligonucleotide
uuccgauccugagguagug

SEQ ID NO: 308662 - RNA, 19 nt, Artificial Sequence
  Description of Artificial Sequence: Synthetic oligonucleotide
caguggaacaagaaucagu

SEQ ID NO: 308663 - RNA, 19 nt, Artificial Sequence
  Description of Artificial Sequence: Synthetic oligonucleotide
guuggggaaugcugcaaaa

SEQ ID NO: 308664 - RNA, 19 nt, Artificial Sequence
  Description of Artificial Sequence: Synthetic oligonucleotide
agacgcaagcgcuucucuu

SEQ ID NO: 308665 - RNA, 19 nt, Artificial Sequence
  Description of Artificial Sequence: Synthetic oligonucleotide
aacucgcacuuccgauccu

SEQ ID NO: 308666 - RNA, 19 nt, Artificial Sequence
  Description of Artificial Sequence: Synthetic oligonucleotide
gagagauggccaguuucuc

SEQ ID NO: 308667 - RNA, 19 nt, Artificial Sequence
  Description of Artificial Sequence: Synthetic oligonucleotide
gauccgcuuugcuguuggc

SEQ ID NO: 308668 - RNA, 19 nt, Artificial Sequence
  Description of Artificial Sequence: Synthetic oligonucleotide
ggagagauaagggcaagaa

SEQ ID NO: 308669 - RNA, 19 nt, Artificial Sequence
  Description of Artificial Sequence: Synthetic oligonucleotide
uagccucaacguaguuggc

SEQ ID NO: 308670 - RNA, 19 nt, Artificial Sequence
  Description of Artificial Sequence: Synthetic oligonucleotide
gcuaacggagcuccugaac

SEQ ID NO: 308671 - RNA, 19 nt, Artificial Sequence
  Description of Artificial Sequence: Synthetic oligonucleotide
gcuggacuguaacugcgug

SEQ ID NO: 308672 - RNA, 19 nt, Artificial Sequence
  Description of Artificial Sequence: Synthetic oligonucleotide
cccggaagaagacgcaagc

SEQ ID NO: 308673 - RNA, 19 nt, Artificial Sequence
  Description of Artificial Sequence: Synthetic oligonucleotide
gcuagaguucuggccaggg

SEQ ID NO: 308674 - RNA, 19 nt, Artificial Sequence
  Description of Artificial Sequence: Synthetic oligonucleotide
ucucguagcugcugacauu

SEQ ID NO: 308675 - RNA, 19 nt, Artificial Sequence
  Description of Artificial Sequence: Synthetic oligonucleotide
agcuagaguucuggccagg

SEQ ID NO: 308676 - RNA, 19 nt, Artificial Sequence
  Description of Artificial Sequence: Synthetic oligonucleotide
uccgcuucacaguccguuu

SEQ ID NO: 308677 - RNA, 19 nt, Artificial Sequence
  Description of Artificial Sequence: Synthetic oligonucleotide
gucacuggacacuuccacu

SEQ ID NO: 308678 - RNA, 19 nt, Artificial Sequence
  Description of Artificial Sequence: Synthetic oligonucleotide
gccuaacacaaccaucauc

SEQ ID NO: 308679 - RNA, 19 nt, Artificial Sequence
  Description of Artificial Sequence: Synthetic oligonucleotide
agcgucccuugcaccaacc

SEQ ID NO: 308680 - RNA, 19 nt, Artificial Sequence
  Description of Artificial Sequence: Synthetic oligonucleotide
ucuuaaccgggaggaggcu

SEQ ID NO: 308681 - RNA, 19 nt, Artificial Sequence
  Description of Artificial Sequence: Synthetic oligonucleotide
cguaguuggcuggauauag

SEQ ID NO: 308682 - RNA, 19 nt, Artificial Sequence
  Description of Artificial Sequence: Synthetic oligonucleotide
ggauauaggccaaccugac

SEQ ID NO: 308683 - RNA, 19 nt, Artificial Sequence
  Description of Artificial Sequence: Synthetic oligonucleotide
cugugccuagaucugccca

SEQ ID NO: 308684 - RNA, 19 nt, Artificial Sequence
  Description of Artificial Sequence: Synthetic oligonucleotide
uccggcugagaguucgauu

SEQ ID NO: 308685 - RNA, 19 nt, Artificial Sequence
  Description of Artificial Sequence: Synthetic oligonucleotide
ugguccccugucugguuga

SEQ ID NO: 308686 - RNA, 19 nt, Artificial Sequence
  Description of Artificial Sequence: Synthetic oligonucleotide
uccgauccugagguagugu

SEQ ID NO: 308687 - RNA, 19 nt, Artificial Sequence
  Description of Artificial Sequence: Synthetic oligonucleotide
guccguuuguaguuuccaa

SEQ ID NO: 308688 - RNA, 19 nt, Artificial Sequence
  Description of Artificial Sequence: Synthetic oligonucleotide
aucaucguuugcaggugga

SEQ ID NO: 308689 - RNA, 19 nt, Artificial Sequence
  Description of Artificial Sequence: Synthetic oligonucleotide
ucaacguaguuggcuggau

SEQ ID NO: 308690 - RNA, 19 nt, Artificial Sequence
  Description of Artificial Sequence: Synthetic oligonucleotide
auaggccaaccugaccgcu

SEQ ID NO: 308691 - RNA, 19 nt, Artificial Sequence
  Description of Artificial Sequence: Synthetic oligonucleotide
ucaaugcgugcucgcucau

SEQ ID NO: 308692 - RNA, 19 nt, Artificial Sequence
  Description of Artificial Sequence: Synthetic oligonucleotide
cuguaacugcguggacugg

SEQ ID NO: 308693 - RNA, 19 nt, Artificial Sequence
  Description of Artificial Sequence: Synthetic oligonucleotide
cacuuccacucccacagaa

SEQ ID NO: 308694 - RNA, 19 nt, Artificial Sequence
  Description of Artificial Sequence: Synthetic oligonucleotide
cugagguaguguccucguc

SEQ ID NO: 308695 - RNA, 19 nt, Artificial Sequence
  Description of Artificial Sequence: Synthetic oligonucleotide
uucuggccagggagaauua

SEQ ID NO: 308696 - RNA, 19 nt, Artificial Sequence
  Description of Artificial Sequence: Synthetic oligonucleotide
agugacgccuucacuucca

SEQ ID NO: 308697 - RNA, 19 nt, Artificial Sequence
  Description of Artificial Sequence: Synthetic oligonucleotide
gcacaggcuaaggcuaacg

SEQ ID NO: 308698 - RNA, 19 nt, Artificial Sequence
  Description of Artificial Sequence: Synthetic oligonucleotide
ccgauccugagguaguguc

SEQ ID NO: 308699 - RNA, 19 nt, Artificial Sequence
  Description of Artificial Sequence: Synthetic oligonucleotide
cagugugauccaucauuga

SEQ ID NO: 308700 - RNA, 19 nt, Artificial Sequence
  Description of Artificial Sequence: Synthetic oligonucleotide
acacaccaggaagccuaac

SEQ ID NO: 308701 - RNA, 19 nt, Artificial Sequence
  Description of Artificial Sequence: Synthetic oligonucleotide
acacaggcgguggccauca

SEQ ID NO: 308702 - RNA, 19 nt, Artificial Sequence
  Description of Artificial Sequence: Synthetic oligonucleotide
ccagugaaaucaccaguuc

SEQ ID NO: 308703 - RNA, 19 nt, Artificial Sequence
  Description of Artificial Sequence: Synthetic oligonucleotide
cagcagcagcagcagcagc

SEQ ID NO: 308704 - RNA, 19 nt, Artificial Sequence
  Description of Artificial Sequence: Synthetic oligonucleotide
guggaacaagaaucagugu

SEQ ID NO: 308705 - RNA, 19 nt, Artificial Sequence
  Description of Artificial Sequence: Synthetic oligonucleotide
gguaguguccucgucaaau

SEQ ID NO: 308706 - RNA, 19 nt, Artificial Sequence
  Description of Artificial Sequence: Synthetic oligonucleotide
uggauccgcuuugcuguug

SEQ ID NO: 308707 - RNA, 19 nt, Artificial Sequence
  Description of Artificial Sequence: Synthetic oligonucleotide
acugacggugcugcccgug

SEQ ID NO: 308708 - RNA, 19 nt, Artificial Sequence
  Description of Artificial Sequence: Synthetic oligonucleotide
guuaccccugcaacuggca

SEQ ID NO: 308709 - RNA, 19 nt, Artificial Sequence
  Description of Artificial Sequence: Synthetic oligonucleotide
ugcacaggcuaaggcuaac

SEQ ID NO: 308710 - RNA, 19 nt, Artificial Sequence
  Description of Artificial Sequence: Synthetic oligonucleotide
  modified_base (9)..(9): a, c, u, g, unknown or other
ccuccagcngaaccucccg

SEQ ID NO: 308711 - RNA, 19 nt, Artificial Sequence
  Description of Artificial Sequence: Synthetic oligonucleotide
ugguacggguagggagggg

SEQ ID NO: 308712 - RNA, 19 nt, Artificial Sequence
  Description of Artificial Sequence: Synthetic oligonucleotide
caaugcgugcucgcucaug

SEQ ID NO: 308713 - RNA, 19 nt, Artificial Sequence
  Description of Artificial Sequence: Synthetic oligonucleotide
acgugacuggaagagcaua

SEQ ID NO: 308714 - RNA, 19 nt, Artificial Sequence
  Description of Artificial Sequence: Synthetic oligonucleotide
caacguaguuggcuggaua

SEQ ID NO: 308715 - RNA, 19 nt, Artificial Sequence
  Description of Artificial Sequence: Synthetic oligonucleotide
ggguugagcgauggauccg

SEQ ID NO: 308716 - RNA, 19 nt, Artificial Sequence
  Description of Artificial Sequence: Synthetic oligonucleotide
gccaaccugaccgcugucc

SEQ ID NO: 308717 - RNA, 19 nt, Artificial Sequence
  Description of Artificial Sequence: Synthetic oligonucleotide
agaguucgauucagaucug

SEQ ID NO: 308718 - RNA, 19 nt, Artificial Sequence
  Description of Artificial Sequence: Synthetic oligonucleotide
ggccugucacuggauagcc

SEQ ID NO: 308719 - RNA, 19 nt, Artificial Sequence
  Description of Artificial Sequence: Synthetic oligonucleotide
cuaacacaaccaucaucgu

SEQ ID NO: 308720 - RNA, 19 nt, Artificial Sequence
  Description of Artificial Sequence: Synthetic oligonucleotide
ccaagcgucccuugcacca

SEQ ID NO: 308721 - RNA, 19 nt, Artificial Sequence
  Description of Artificial Sequence: Synthetic oligonucleotide
ggcuuucgcuguuggacca

SEQ ID NO: 308722 - RNA, 19 nt, Artificial Sequence
  Description of Artificial Sequence: Synthetic oligonucleotide
cugaacuccccacuuccgu

SEQ ID NO: 308723 - RNA, 19 nt, Artificial Sequence
  Description of Artificial Sequence: Synthetic oligonucleotide
agggcccgaacucgcacuu

SEQ ID NO: 308724 - RNA, 19 nt, Artificial Sequence
  Description of Artificial Sequence: Synthetic oligonucleotide
cugaccgcuguccaagcgu

SEQ ID NO: 308725 - RNA, 19 nt, Artificial Sequence
  Description of Artificial Sequence: Synthetic oligonucleotide
ggguguggucugaucaagc

SEQ ID NO: 308726 - RNA, 19 nt, Artificial Sequence
  Description of Artificial Sequence: Synthetic oligonucleotide
auggauccgcuuugcuguu

SEQ ID NO: 308727 - RNA, 19 nt, Artificial Sequence
  Description of Artificial Sequence: Synthetic oligonucleotide
cgaacucgcacuuccgauc

SEQ ID NO: 308728 - RNA, 19 nt, Artificial Sequence
  Description of Artificial Sequence: Synthetic oligonucleotide
agguaguguccucgucaaa

SEQ ID NO: 308729 - RNA, 19 nt, Artificial Sequence
  Description of Artificial Sequence: Synthetic oligonucleotide
gcgucgggcccacucagug

SEQ ID NO: 308730 - RNA, 19 nt, Artificial Sequence
  Description of Artificial Sequence: Synthetic oligonucleotide
cuuccgauccugagguagu

SEQ ID NO: 308731 - RNA, 19 nt, Artificial Sequence
  Description of Artificial Sequence: Synthetic oligonucleotide
gcagcagcagcagcagcag

SEQ ID NO: 308732 - RNA, 19 nt, Artificial Sequence
  Description of Artificial Sequence: Synthetic oligonucleotide
gaccgcuguccaagcgucc

SEQ ID NO: 308733 - RNA, 19 nt, Artificial Sequence
  Description of Artificial Sequence: Synthetic oligonucleotide
acguaguuggcuggauaua

SEQ ID NO: 308734 - RNA, 19 nt, Artificial Sequence
  Description of Artificial Sequence: Synthetic oligonucleotide
ggcauccguggugaagaag

SEQ ID NO: 308735 - RNA, 19 nt, Artificial Sequence
  Description of Artificial Sequence: Synthetic oligonucleotide
gcagcagcagcagcagccc

SEQ ID NO: 308736 - RNA, 19 nt, Artificial Sequence
  Description of Artificial Sequence: Synthetic oligonucleotide
ccacuuccgucucuccgcc

SEQ ID NO: 308737 - RNA, 19 nt, Artificial Sequence
  Description of Artificial Sequence: Synthetic oligonucleotide
cauagugauguuggggaau

SEQ ID NO: 308738 - RNA, 19 nt, Artificial Sequence
  Description of Artificial Sequence: Synthetic oligonucleotide
gcgucccuugcaccaaccc

SEQ ID NO: 308739 - RNA, 19 nt, Artificial Sequence
  Description of Artificial Sequence: Synthetic oligonucleotide
cagcaaccccacaucugga

SEQ ID NO: 308740 - RNA, 19 nt, Artificial Sequence
  Description of Artificial Sequence: Synthetic oligonucleotide
gcuucucgagagauggcca

SEQ ID NO: 308741 - RNA, 19 nt, Artificial Sequence
  Description of Artificial Sequence: Synthetic oligonucleotide
uacggguagggaggggcuu

SEQ ID NO: 308742 - RNA, 19 nt, Artificial Sequence
  Description of Artificial Sequence: Synthetic oligonucleotide
cucucuccggcugagaguu

SEQ ID NO: 308743 - RNA, 19 nt, Artificial Sequence
  Description of Artificial Sequence: Synthetic oligonucleotide
ggaggggcuuggcuuucgc

SEQ ID NO: 308744 - RNA, 19 nt, Artificial Sequence
  Description of Artificial Sequence: Synthetic oligonucleotide
ugcguggacugggcggggu

SEQ ID NO: 308745 - RNA, 19 nt, Artificial Sequence
  Description of Artificial Sequence: Synthetic oligonucleotide
caaccugaccgcuguccaa

SEQ ID NO: 308746 - RNA, 19 nt, Artificial Sequence
  Description of Artificial Sequence: Synthetic oligonucleotide
ucucuccggcugagaguuc

SEQ ID NO: 308747 - RNA, 19 nt, Artificial Sequence
  Description of Artificial Sequence: Synthetic oligonucleotide
ggguuguuagacucgucau

SEQ ID NO: 308748 - RNA, 19 nt, Artificial Sequence
  Description of Artificial Sequence: Synthetic oligonucleotide
ccaucaucguuugcaggug

SEQ ID NO: 308749 - RNA, 19 nt, Artificial Sequence
  Description of Artificial Sequence: Synthetic oligonucleotide
cagugagcugcugugcaua

SEQ ID NO: 308750 - RNA, 19 nt, Artificial Sequence
  Description of Artificial Sequence: Synthetic oligonucleotide
caggguaauucugagucuu

SEQ ID NO: 308751 - RNA, 19 nt, Artificial Sequence
  Description of Artificial Sequence: Synthetic oligonucleotide
ucgggacacuaagguugcu

SEQ ID NO: 308752 - RNA, 19 nt, Artificial Sequence
  Description of Artificial Sequence: Synthetic oligonucleotide
gugcucgcucaugcaaaca

SEQ ID NO: 308753 - RNA, 19 nt, Artificial Sequence
  Description of Artificial Sequence: Synthetic oligonucleotide
gcaggguaauucugagucu

SEQ ID NO: 308754 - RNA, 19 nt, Artificial Sequence
  Description of Artificial Sequence: Synthetic oligonucleotide
ggcuaacggagcuccugaa

SEQ ID NO: 308755 - RNA, 19 nt, Artificial Sequence
  Description of Artificial Sequence: Synthetic oligonucleotide
cuuccagcgucgggcccac

SEQ ID NO: 308756 - RNA, 19 nt, Artificial Sequence
  Description of Artificial Sequence: Synthetic oligonucleotide
gcguuaaaguuuguucacu

SEQ ID NO: 308757 - RNA, 19 nt, Artificial Sequence
  Description of Artificial Sequence: Synthetic oligonucleotide
cccuccaacucuccaguga

SEQ ID NO: 308758 - RNA, 19 nt, Artificial Sequence
  Description of Artificial Sequence: Synthetic oligonucleotide
gcccuccaacucuccagug

SEQ ID NO: 308759 - RNA, 19 nt, Artificial Sequence
  Description of Artificial Sequence: Synthetic oligonucleotide
ugcugcccgugucguccuc

SEQ ID NO: 308760 - RNA, 19 nt, Artificial Sequence
  Description of Artificial Sequence: Synthetic oligonucleotide
gcccgaacucgcacuuccg

SEQ ID NO: 308761 - RNA, 19 nt, Artificial Sequence
  Description of Artificial Sequence: Synthetic oligonucleotide
ccucgaagggguuguagcu

SEQ ID NO: 308762 - RNA, 19 nt, Artificial Sequence
  Description of Artificial Sequence: Synthetic oligonucleotide
gugcuuggaaaggggccaa

SEQ ID NO: 308763 - RNA, 19 nt, Artificial Sequence
  Description of Artificial Sequence: Synthetic oligonucleotide
caagcgucccuugcaccaa

SEQ ID NO: 308764 - RNA, 19 nt, Artificial Sequence
  Description of Artificial Sequence: Synthetic oligonucleotide
gaccagucagcaggguaau

SEQ ID NO: 308765 - RNA, 19 nt, Artificial Sequence
  Description of Artificial Sequence: Synthetic oligonucleotide
cccgaacucgcacuuccga

SEQ ID NO: 308766 - RNA, 19 nt, Artificial Sequence
  Description of Artificial Sequence: Synthetic oligonucleotide
agcgucgggcccacucagu

SEQ ID NO: 308767 - RNA, 19 nt, Artificial Sequence
  Description of Artificial Sequence: Synthetic oligonucleotide
guacggguagggaggggcu

SEQ ID NO: 308768 - RNA, 19 nt, Artificial Sequence
  Description of Artificial Sequence: Synthetic oligonucleotide
accagucagcaggguaauu

SEQ ID NO: 308769 - RNA, 19 nt, Artificial Sequence
  Description of Artificial Sequence: Synthetic oligonucleotide
cuucucucuccggcugaga

SEQ ID NO: 308770 - RNA, 19 nt, Artificial Sequence
  Description of Artificial Sequence: Synthetic oligonucleotide
cugacggugcugcccgugu

SEQ ID NO: 308771 - RNA, 19 nt, Artificial Sequence
  Description of Artificial Sequence: Synthetic oligonucleotide
  modified_base (6)..(6): a, c, u, g, unknown or other
ccagcngaaccucccggaa

SEQ ID NO: 308772 - RNA, 19 nt, Artificial Sequence
  Description of Artificial Sequence: Synthetic oligonucleotide
cacuaagguugcugccagu

SEQ ID NO: 308773 - RNA, 19 nt, Artificial Sequence
  Description of Artificial Sequence: Synthetic oligonucleotide
ccagcgucgggcccacuca

SEQ ID NO: 308774 - RNA, 19 nt, Artificial Sequence
  Description of Artificial Sequence: Synthetic oligonucleotide
cagcuuacauggagaucau

SEQ ID NO: 308775 - RNA, 19 nt, Artificial Sequence
  Description of Artificial Sequence: Synthetic oligonucleotide
cacaguccguuuguaguuu

SEQ ID NO: 308776 - RNA, 19 nt, Artificial Sequence
  Description of Artificial Sequence: Synthetic oligonucleotide
gcucgcucaugcaaacagu

SEQ ID NO: 308777 - RNA, 19 nt, Artificial Sequence
  Description of Artificial Sequence: Synthetic oligonucleotide
gauccgcuucacaguccgu

SEQ ID NO: 308778 - RNA, 19 nt, Artificial Sequence
  Description of Artificial Sequence: Synthetic oligonucleotide
  modified_base (3)..(3): a, c, u, g, unknown or other
gcngaaccucccggaagaa

SEQ ID NO: 308779 - RNA, 19 nt, Artificial Sequence
  Description of Artificial Sequence: Synthetic oligonucleotide
gcgauggauccgcuuugcu

SEQ ID NO: 308780 - RNA, 19 nt, Artificial Sequence
  Description of Artificial Sequence: Synthetic oligonucleotide
ccgccagccugcccauggc

SEQ ID NO: 308781 - RNA, 19 nt, Artificial Sequence
  Description of Artificial Sequence: Synthetic oligonucleotide
ccgaacucgcacuuccgau

SEQ ID NO: 308782 - RNA, 19 nt, Artificial Sequence
  Description of Artificial Sequence: Synthetic oligonucleotide
cugcccgugucguccucgu

SEQ ID NO: 308783 - RNA, 19 nt, Artificial Sequence
  Description of Artificial Sequence: Synthetic oligonucleotide
ccccauuggcauccguggu

SEQ ID NO: 308784 - RNA, 19 nt, Artificial Sequence
  Description of Artificial Sequence: Synthetic oligonucleotide
cuaccucuuucagcuucuu

SEQ ID NO: 308785 - RNA, 19 nt, Artificial Sequence
  Description of Artificial Sequence: Synthetic oligonucleotide
gcuuucgcuguuggaccau

SEQ ID NO: 308786 - RNA, 19 nt, Artificial Sequence
  Description of Artificial Sequence: Synthetic oligonucleotide
ggaugccaacauggcugcu

SEQ ID NO: 308787 - RNA, 19 nt, Artificial Sequence
  Description of Artificial Sequence: Synthetic oligonucleotide
ccgcuguccaagcgucccu

SEQ ID NO: 308788 - RNA, 19 nt, Artificial Sequence
  Description of Artificial Sequence: Synthetic oligonucleotide
cguccucgaagggguugua

SEQ ID NO: 308789 - RNA, 19 nt, Artificial Sequence
  Description of Artificial Sequence: Synthetic oligonucleotide
aaaaggaacauuucauagc

SEQ ID NO: 308790 - RNA, 19 nt, Artificial Sequence
  Description of Artificial Sequence: Synthetic oligonucleotide
aauuccuuaccaaugaggc

SEQ ID NO: 308791 - RNA, 19 nt, Artificial Sequence
  Description of Artificial Sequence: Synthetic oligonucleotide
uuaaugaugauaaugcaac

SEQ ID NO: 308792 - RNA, 19 nt, Artificial Sequence
  Description of Artificial Sequence: Synthetic oligonucleotide
acuacaguuugcuagaaac

SEQ ID NO: 308793 - RNA, 19 nt, Artificial Sequence
  Description of Artificial Sequence: Synthetic oligonucleotide
uuaauuagaggauuuguag

SEQ ID NO: 308794 - RNA, 19 nt, Artificial Sequence
  Description of Artificial Sequence: Synthetic oligonucleotide
aaagccaaaaggguggucc

SEQ ID NO: 308795 - RNA, 19 nt, Artificial Sequence
  Description of Artificial Sequence: Synthetic oligonucleotide
auagaauacgccucuauac

SEQ ID NO: 308796 - RNA, 19 nt, Artificial Sequence
  Description of Artificial Sequence: Synthetic oligonucleotide
gaaacuagcuccuaggggc

SEQ ID NO: 308797 - RNA, 19 nt, Artificial Sequence
  Description of Artificial Sequence: Synthetic oligonucleotide
aaauguagucaguuguuac

SEQ ID NO: 308798 - RNA, 19 nt, Artificial Sequence
  Description of Artificial Sequence: Synthetic oligonucleotide
cuaaauauacccacaaggc

SEQ ID NO: 308799 - RNA, 19 nt, Artificial Sequence
  Description of Artificial Sequence: Synthetic oligonucleotide
uuuagaauacuuuagcuau

SEQ ID NO: 308800 - RNA, 19 nt, Artificial Sequence
  Description of Artificial Sequence: Synthetic oligonucleotide
uacgcagcgacuuagaucu

SEQ ID NO: 308801 - RNA, 19 nt, Artificial Sequence
  Description of Artificial Sequence: Synthetic oligonucleotide
ugugagaacuccuaggugc

SEQ ID NO: 308802 - RNA, 19 nt, Artificial Sequence
  Description of Artificial Sequence: Synthetic oligonucleotide
aagaaacuagcuccuaggg

SEQ ID NO: 308803 - RNA, 19 nt, Artificial Sequence
  Description of Artificial Sequence: Synthetic oligonucleotide
uuugcuagaaacaucaguu

SEQ ID NO: 308804 - RNA, 19 nt, Artificial Sequence
  Description of Artificial Sequence: Synthetic oligonucleotide
uuuaaugaugauaaugcaa

SEQ ID NO: 308805 - RNA, 19 nt, Artificial Sequence
  Description of Artificial Sequence: Synthetic oligonucleotide
ugaaauacugacaucaaua

SEQ ID NO: 308806 - RNA, 19 nt, Artificial Sequence
  Description of Artificial Sequence: Synthetic oligonucleotide
uuuacucuaaacagcaaca

SEQ ID NO: 308807 - RNA, 19 nt, Artificial Sequence
  Description of Artificial Sequence: Synthetic oligonucleotide
aauuagaggauuuguagau

SEQ ID NO: 308808 - RNA, 19 nt, Artificial Sequence
  Description of Artificial Sequence: Synthetic oligonucleotide
uguugggacagccacaaag

SEQ ID NO: 308809 - RNA, 19 nt, Artificial Sequence
  Description of Artificial Sequence: Synthetic oligonucleotide
aguaacuguacgcagcgac

SEQ ID NO: 308810 - RNA, 19 nt, Artificial Sequence
  Description of Artificial Sequence: Synthetic oligonucleotide
uacuuuagaauacuuuagc

SEQ ID NO: 308811 - RNA, 19 nt, Artificial Sequence
  Description of Artificial Sequence: Synthetic oligonucleotide
agucacuacaguuugcuag

SEQ ID NO: 308812 - RNA, 19 nt, Artificial Sequence
  Description of Artificial Sequence: Synthetic oligonucleotide
uguacuuguggcuaaauau

SEQ ID NO: 308813 - RNA, 19 nt, Artificial Sequence
  Description of Artificial Sequence: Synthetic oligonucleotide
aauacgccucuauacacag

SEQ ID NO: 308814 - RNA, 19 nt, Artificial Sequence
  Description of Artificial Sequence: Synthetic oligonucleotide
aguugaaauacugacauca

SEQ ID NO: 308815 - RNA, 19 nt, Artificial Sequence
  Description of Artificial Sequence: Synthetic oligonucleotide
agauucacaucucugguag

SEQ ID NO: 308816 - RNA, 19 nt, Artificial Sequence
  Description of Artificial Sequence: Synthetic oligonucleotide
aagacauucugagagcagg

SEQ ID NO: 308817 - RNA, 19 nt, Artificial Sequence
  Description of Artificial Sequence: Synthetic oligonucleotide
uaauuagaggauuuguaga

SEQ ID NO: 308818 - RNA, 19 nt, Artificial Sequence
  Description of Artificial Sequence: Synthetic oligonucleotide
guuugaucgugauagcugg

SEQ ID NO: 308819 - RNA, 19 nt, Artificial Sequence
  Description of Artificial Sequence: Synthetic oligonucleotide
aguauguggacagugguac

SEQ ID NO: 308820 - RNA, 19 nt, Artificial Sequence
  Description of Artificial Sequence: Synthetic oligonucleotide
agaauacgccucuauacac

SEQ ID NO: 308821 - RNA, 19 nt, Artificial Sequence
  Description of Artificial Sequence: Synthetic oligonucleotide
acacacaacagccugaacu

SEQ ID NO: 308822 - RNA, 19 nt, Artificial Sequence
  Description of Artificial Sequence: Synthetic oligonucleotide
uuagaggauuuguagauac

SEQ ID NO: 308823 - RNA, 19 nt, Artificial Sequence
  Description of Artificial Sequence: Synthetic oligonucleotide
uuuuaaugaugauaaugca

SEQ ID NO: 308824 - RNA, 19 nt, Artificial Sequence
  Description of Artificial Sequence: Synthetic oligonucleotide
uaccuuaaggcccaagacc

SEQ ID NO: 308825 - RNA, 19 nt, Artificial Sequence
  Description of Artificial Sequence: Synthetic oligonucleotide
uguuugaucgugauagcug

SEQ ID NO: 308826 - RNA, 19 nt, Artificial Sequence
  Description of Artificial Sequence: Synthetic oligonucleotide
uugggugaaacaguggugg

SEQ ID NO: 308827 - RNA, 19 nt, Artificial Sequence
  Description of Artificial Sequence: Synthetic oligonucleotide
uagaauacgccucuauaca

SEQ ID NO: 308828 - RNA, 19 nt, Artificial Sequence
  Description of Artificial Sequence: Synthetic oligonucleotide
uacaaaaggaacauuucau

SEQ ID NO: 308829 - RNA, 19 nt, Artificial Sequence
  Description of Artificial Sequence: Synthetic oligonucleotide
aguacaaaaguuuaucauu

SEQ ID NO: 308830 - RNA, 19 nt, Artificial Sequence
  Description of Artificial Sequence: Synthetic oligonucleotide
agaaacuagcuccuagggg

SEQ ID NO: 308831 - RNA, 19 nt, Artificial Sequence
  Description of Artificial Sequence: Synthetic oligonucleotide
aauagaauacgccucuaua

SEQ ID NO: 308832 - RNA, 19 nt, Artificial Sequence
  Description of Artificial Sequence: Synthetic oligonucleotide
uuauguguugcccacaauu

SEQ ID NO: 308833 - RNA, 19 nt, Artificial Sequence
  Description of Artificial Sequence: Synthetic oligonucleotide
caauuccuuaccaaugagg

SEQ ID NO: 308834 - RNA, 19 nt, Artificial Sequence
  Description of Artificial Sequence: Synthetic oligonucleotide
auguguugcccacaauucc

SEQ ID NO: 308835 - RNA, 19 nt, Artificial Sequence
  Description of Artificial Sequence: Synthetic oligonucleotide
uacauuuugguggugagga

SEQ ID NO: 308836 - RNA, 19 nt, Artificial Sequence
  Description of Artificial Sequence: Synthetic oligonucleotide
aguauuugcaggcagggaa

SEQ ID NO: 308837 - RNA, 19 nt, Artificial Sequence
  Description of Artificial Sequence: Synthetic oligonucleotide
auuccuuaccaaugaggcc

SEQ ID NO: 308838 - RNA, 19 nt, Artificial Sequence
  Description of Artificial Sequence: Synthetic oligonucleotide
aacuuuggaucugaggcuc

SEQ ID NO: 308839 - RNA, 19 nt, Artificial Sequence
  Description of Artificial Sequence: Synthetic oligonucleotide
uguggcuaaauauacccac

SEQ ID NO: 308840 - RNA, 19 nt, Artificial Sequence
  Description of Artificial Sequence: Synthetic oligonucleotide
acgccauauaaacacaaag

SEQ ID NO: 308841 - RNA, 19 nt, Artificial Sequence
  Description of Artificial Sequence: Synthetic oligonucleotide
uuuacauuuugguggugag

SEQ ID NO: 308842 - RNA, 19 nt, Artificial Sequence
  Description of Artificial Sequence: Synthetic oligonucleotide
aguccuauuuacaaagaac

SEQ ID NO: 308843 - RNA, 19 nt, Artificial Sequence
  Description of Artificial Sequence: Synthetic oligonucleotide
aaauggcgcccgcucaacc

SEQ ID NO: 308844 - RNA, 19 nt, Artificial Sequence
  Description of Artificial Sequence: Synthetic oligonucleotide
uuucugaggaggacgagga

SEQ ID NO: 308845 - RNA, 19 nt, Artificial Sequence
  Description of Artificial Sequence: Synthetic oligonucleotide
cuaggugcuagucuugggg

SEQ ID NO: 308846 - RNA, 19 nt, Artificial Sequence
  Description of Artificial Sequence: Synthetic oligonucleotide
uacuuguggcuaaauauac

SEQ ID NO: 308847 - RNA, 19 nt, Artificial Sequence
  Description of Artificial Sequence: Synthetic oligonucleotide
agcgcgaagaaacuagcuc

SEQ ID NO: 308848 - RNA, 19 nt, Artificial Sequence
  Description of Artificial Sequence: Synthetic oligonucleotide
uuccauauauuaaccauau

SEQ ID NO: 308849 - RNA, 19 nt, Artificial Sequence
  Description of Artificial Sequence: Synthetic oligonucleotide
uucaccccagaccaggucc

SEQ ID NO: 308850 - RNA, 19 nt, Artificial Sequence
  Description of Artificial Sequence: Synthetic oligonucleotide
ugaacaagccuccuuccca

SEQ ID NO: 308851 - RNA, 19 nt, Artificial Sequence
  Description of Artificial Sequence: Synthetic oligonucleotide
uacgccucuauacacaguc

SEQ ID NO: 308852 - RNA, 19 nt, Artificial Sequence
  Description of Artificial Sequence: Synthetic oligonucleotide
uggucuguaagccccaaga

SEQ ID NO: 308853 - RNA, 19 nt, Artificial Sequence
  Description of Artificial Sequence: Synthetic oligonucleotide
uuacaagauucacaucucu

SEQ ID NO: 308854 - RNA, 19 nt, Artificial Sequence
  Description of Artificial Sequence: Synthetic oligonucleotide
acugugguacaaaaggaac

SEQ ID NO: 308855 - RNA, 19 nt, Artificial Sequence
  Description of Artificial Sequence: Synthetic oligonucleotide
agaaggauacacauuuggg

SEQ ID NO: 308856 - RNA, 19 nt, Artificial Sequence
  Description of Artificial Sequence: Synthetic oligonucleotide
ugugccagaaggauacaca

SEQ ID NO: 308857 - RNA, 19 nt, Artificial Sequence
  Description of Artificial Sequence: Synthetic oligonucleotide
uuaccaaugaggccucaug

SEQ ID NO: 308858 - RNA, 19 nt, Artificial Sequence
  Description of Artificial Sequence: Synthetic oligonucleotide
agauacagugguuuaugug

SEQ ID NO: 308859 - RNA, 19 nt, Artificial Sequence
  Description of Artificial Sequence: Synthetic oligonucleotide
auauuugguucauuuagaa

SEQ ID NO: 308860 - RNA, 19 nt, Artificial Sequence
  Description of Artificial Sequence: Synthetic oligonucleotide
aguccauacaggugccacc

SEQ ID NO: 308861 - RNA, 19 nt, Artificial Sequence
  Description of Artificial Sequence: Synthetic oligonucleotide
cuaguaacccaguccauac

SEQ ID NO: 308862 - RNA, 19 nt, Artificial Sequence
  Description of Artificial Sequence: Synthetic oligonucleotide
ugugcucgaacccuuuucu

SEQ ID NO: 308863 - RNA, 19 nt, Artificial Sequence
  Description of Artificial Sequence: Synthetic oligonucleotide
gaaggauacacauuugggu

SEQ ID NO: 308864 - RNA, 19 nt, Artificial Sequence
  Description of Artificial Sequence: Synthetic oligonucleotide
gacuaguaacuguacgcag

SEQ ID NO: 308865 - RNA, 19 nt, Artificial Sequence
  Description of Artificial Sequence: Synthetic oligonucleotide
uaacccaguccauacaggu

SEQ ID NO: 308866 - RNA, 19 nt, Artificial Sequence
  Description of Artificial Sequence: Synthetic oligonucleotide
ugcugggacacccucuucc

SEQ ID NO: 308867 - RNA, 19 nt, Artificial Sequence
  Description of Artificial Sequence: Synthetic oligonucleotide
uucgcuugugcucgaaccc

SEQ ID NO: 308868 - RNA, 19 nt, Artificial Sequence
  Description of Artificial Sequence: Synthetic oligonucleotide
uaagacauucugagagcag

SEQ ID NO: 308869 - RNA, 19 nt, Artificial Sequence
  Description of Artificial Sequence: Synthetic oligonucleotide
aguaaauuguguaggccuc

SEQ ID NO: 308870 - RNA, 19 nt, Artificial Sequence
  Description of Artificial Sequence: Synthetic oligonucleotide
agcauccguaguuugaaca

SEQ ID NO: 308871 - RNA, 19 nt, Artificial Sequence
  Description of Artificial Sequence: Synthetic oligonucleotide
cagcaguugaaauacugac

SEQ ID NO: 308872 - RNA, 19 nt, Artificial Sequence
  Description of Artificial Sequence: Synthetic oligonucleotide
agaguauguggacaguggu

SEQ ID NO: 308873 - RNA, 19 nt, Artificial Sequence
  Description of Artificial Sequence: Synthetic oligonucleotide
acaauuccuuaccaaugag

SEQ ID NO: 308874 - RNA, 19 nt, Artificial Sequence
  Description of Artificial Sequence: Synthetic oligonucleotide
uggauuccgacuucuugag

SEQ ID NO: 308875 - RNA, 19 nt, Artificial Sequence
  Description of Artificial Sequence: Synthetic oligonucleotide
accuccucacauuuuaaug

SEQ ID NO: 308876 - RNA, 19 nt, Artificial Sequence
  Description of Artificial Sequence: Synthetic oligonucleotide
uuuaugaaggcuggaugug

SEQ ID NO: 308877 - RNA, 19 nt, Artificial Sequence
  Description of Artificial Sequence: Synthetic oligonucleotide
uccguaguuugaacaagcc

SEQ ID NO: 308878 - RNA, 19 nt, Artificial Sequence
  Description of Artificial Sequence: Synthetic oligonucleotide
auaagacauucugagagca

SEQ ID NO: 308879 - RNA, 19 nt, Artificial Sequence
  Description of Artificial Sequence: Synthetic oligonucleotide
uaggugcuagucuuggggc

SEQ ID NO: 308880 - RNA, 19 nt, Artificial Sequence
  Description of Artificial Sequence: Synthetic oligonucleotide
caucaguuacuuuagaaua

SEQ ID NO: 308881 - RNA, 19 nt, Artificial Sequence
  Description of Artificial Sequence: Synthetic oligonucleotide
aucgugauagcuggccucc

SEQ ID NO: 308882 - RNA, 19 nt, Artificial Sequence
  Description of Artificial Sequence: Synthetic oligonucleotide
cauauucaaagucccucag

SEQ ID NO: 308883 - RNA, 19 nt, Artificial Sequence
  Description of Artificial Sequence: Synthetic oligonucleotide
auccguaguuugaacaagc

SEQ ID NO: 308884 - RNA, 19 nt, Artificial Sequence
  Description of Artificial Sequence: Synthetic oligonucleotide
uagucaguuguuacaaaau

SEQ ID NO: 308885 - RNA, 19 nt, Artificial Sequence
  Description of Artificial Sequence: Synthetic oligonucleotide
uuacucuaaacagcaacac

SEQ ID NO: 308886 - RNA, 19 nt, Artificial Sequence
  Description of Artificial Sequence: Synthetic oligonucleotide
ugugguacaaaaggaacau

SEQ ID NO: 308887 - RNA, 19 nt, Artificial Sequence
  Description of Artificial Sequence: Synthetic oligonucleotide
ugccugguaccuuaaggcc

SEQ ID NO: 308888 - RNA, 19 nt, Artificial Sequence
  Description of Artificial Sequence: Synthetic oligonucleotide
ucucauauuccacucuguu

SEQ ID NO: 308889 - RNA, 19 nt, Artificial Sequence
  Description of Artificial Sequence: Synthetic oligonucleotide
cauauaaggagggccagac

SEQ ID NO: 308890 - RNA, 19 nt, Artificial Sequence
  Description of Artificial Sequence: Synthetic oligonucleotide
auacccacaaggcacuagu

SEQ ID NO: 308891 - RNA, 19 nt, Artificial Sequence
  Description of Artificial Sequence: Synthetic oligonucleotide
gguaccugaggccauacug

SEQ ID NO: 308892 - RNA, 19 nt, Artificial Sequence
  Description of Artificial Sequence: Synthetic oligonucleotide
gcggaaauggaaaauggcg

SEQ ID NO: 308893 - RNA, 19 nt, Artificial Sequence
  Description of Artificial Sequence: Synthetic oligonucleotide
uagaauacuuuagcuauaa

SEQ ID NO: 308894 - RNA, 19 nt, Artificial Sequence
  Description of Artificial Sequence: Synthetic oligonucleotide
aaaauggcgcccgcucaac

SEQ ID NO: 308895 - RNA, 19 nt, Artificial Sequence
  Description of Artificial Sequence: Synthetic oligonucleotide
uguaaaugccaguggcgga

SEQ ID NO: 308896 - RNA, 19 nt, Artificial Sequence
  Description of Artificial Sequence: Synthetic oligonucleotide
uugaucgugauagcuggcc

SEQ ID NO: 308897 - RNA, 19 nt, Artificial Sequence
  Description of Artificial Sequence: Synthetic oligonucleotide
cauuugggugaaacagugg

SEQ ID NO: 308898 - RNA, 19 nt, Artificial Sequence
  Description of Artificial Sequence: Synthetic oligonucleotide
agcgacuuagaucugcaaa

SEQ ID NO: 308899 - RNA, 19 nt, Artificial Sequence
  Description of Artificial Sequence: Synthetic oligonucleotide
acaacucuagcagaagcug

SEQ ID NO: 308900 - RNA, 19 nt, Artificial Sequence
  Description of Artificial Sequence: Synthetic oligonucleotide
uagcgcuguggccugauca

SEQ ID NO: 308901 - RNA, 19 nt, Artificial Sequence
  Description of Artificial Sequence: Synthetic oligonucleotide
acauuuugguggugaggac

SEQ ID NO: 308902 - RNA, 19 nt, Artificial Sequence
  Description of Artificial Sequence: Synthetic oligonucleotide
uuagaauacuuuagcuaua

SEQ ID NO: 308903 - RNA, 19 nt, Artificial Sequence
  Description of Artificial Sequence: Synthetic oligonucleotide
uauguggacagugguaccu

SEQ ID NO: 308904 - RNA, 19 nt, Artificial Sequence
  Description of Artificial Sequence: Synthetic oligonucleotide
aaguucuuguauuccuaau

SEQ ID NO: 308905 - RNA, 19 nt, Artificial Sequence
  Description of Artificial Sequence: Synthetic oligonucleotide
ugaucgugauagcuggccu

SEQ ID NO: 308906 - RNA, 19 nt, Artificial Sequence
  Description of Artificial Sequence: Synthetic oligonucleotide
gauagcgcacucccaauuc

SEQ ID NO: 308907 - RNA, 19 nt, Artificial Sequence
  Description of Artificial Sequence: Synthetic oligonucleotide
guaccuauuacuaaaugua

SEQ ID NO: 308908 - RNA, 19 nt, Artificial Sequence
  Description of Artificial Sequence: Synthetic oligonucleotide
guggauuccgacuucuuga

SEQ ID NO: 308909 - RNA, 19 nt, Artificial Sequence
  Description of Artificial Sequence: Synthetic oligonucleotide
gguucaucgugccaucagg

SEQ ID NO: 308910 - RNA, 19 nt, Artificial Sequence
  Description of Artificial Sequence: Synthetic oligonucleotide
uuagugccgcugcuuauga

SEQ ID NO: 308911 - RNA, 19 nt, Artificial Sequence
  Description of Artificial Sequence: Synthetic oligonucleotide
uccucacauuuuaaugaug

SEQ ID NO: 308912 - RNA, 19 nt, Artificial Sequence
  Description of Artificial Sequence: Synthetic oligonucleotide
uuugaucgugauagcuggc

SEQ ID NO: 308913 - RNA, 19 nt, Artificial Sequence
  Description of Artificial Sequence: Synthetic oligonucleotide
ggauagucaucuuugaaaa

SEQ ID NO: 308914 - RNA, 19 nt, Artificial Sequence
  Description of Artificial Sequence: Synthetic oligonucleotide
guaccuuaaggcccaagac

SEQ ID NO: 308915 - RNA, 19 nt, Artificial Sequence
  Description of Artificial Sequence: Synthetic oligonucleotide
ucucccgguggucuguaag

SEQ ID NO: 308916 - RNA, 19 nt, Artificial Sequence
  Description of Artificial Sequence: Synthetic oligonucleotide
ucuugccaagccaaucccu

SEQ ID NO: 308917 - RNA, 19 nt, Artificial Sequence
  Description of Artificial Sequence: Synthetic oligonucleotide
uaaauguagucaguuguua

SEQ ID NO: 308918 - RNA, 19 nt, Artificial Sequence
  Description of Artificial Sequence: Synthetic oligonucleotide
cagguuucugaggaggacg

SEQ ID NO: 308919 - RNA, 19 nt, Artificial Sequence
  Description of Artificial Sequence: Synthetic oligonucleotide
guucucguagcgcuguggc

SEQ ID NO: 308920 - RNA, 19 nt, Artificial Sequence
  Description of Artificial Sequence: Synthetic oligonucleotide
cgccauauaaacacaaagg

SEQ ID NO: 308921 - RNA, 19 nt, Artificial Sequence
  Description of Artificial Sequence: Synthetic oligonucleotide
ucuuucacccugcuggguu

SEQ ID NO: 308922 - RNA, 19 nt, Artificial Sequence
  Description of Artificial Sequence: Synthetic oligonucleotide
ugaaguaccuccucacauu

SEQ ID NO: 308923 - RNA, 19 nt, Artificial Sequence
  Description of Artificial Sequence: Synthetic oligonucleotide
caucgugccaucaggguuc

SEQ ID NO: 308924 - RNA, 19 nt, Artificial Sequence
  Description of Artificial Sequence: Synthetic oligonucleotide
uucucauauuccacucugu

SEQ ID NO: 308925 - RNA, 19 nt, Artificial Sequence
  Description of Artificial Sequence: Synthetic oligonucleotide
gagaacuccuaggugcuag

SEQ ID NO: 308926 - RNA, 19 nt, Artificial Sequence
  Description of Artificial Sequence: Synthetic oligonucleotide
cugugguacaaaaggaaca

SEQ ID NO: 308927 - RNA, 19 nt, Artificial Sequence
  Description of Artificial Sequence: Synthetic oligonucleotide
ugguuuauguguugcccac

SEQ ID NO: 308928 - RNA, 19 nt, Artificial Sequence
  Description of Artificial Sequence: Synthetic oligonucleotide
gcgcgaagaaacuagcucc

SEQ ID NO: 308929 - RNA, 19 nt, Artificial Sequence
  Description of Artificial Sequence: Synthetic oligonucleotide
gagaauagaauacgccucu

SEQ ID NO: 308930 - RNA, 19 nt, Artificial Sequence
  Description of Artificial Sequence: Synthetic oligonucleotide
uugcuagaaacaucaguua

SEQ ID NO: 308931 - RNA, 19 nt, Artificial Sequence
  Description of Artificial Sequence: Synthetic oligonucleotide
uguacgcagcgacuuagau

SEQ ID NO: 308932 - RNA, 19 nt, Artificial Sequence
  Description of Artificial Sequence: Synthetic oligonucleotide
cuccuaggggcuuaccaag

SEQ ID NO: 308933 - RNA, 19 nt, Artificial Sequence
  Description of Artificial Sequence: Synthetic oligonucleotide
uaguaacccaguccauaca

SEQ ID NO: 308934 - RNA, 19 nt, Artificial Sequence
  Description of Artificial Sequence: Synthetic oligonucleotide
uggaucagccaaucuuuca

SEQ ID NO: 308935 - RNA, 19 nt, Artificial Sequence
  Description of Artificial Sequence: Synthetic oligonucleotide
cacaauuccuuaccaauga

SEQ ID NO: 308936 - RNA, 19 nt, Artificial Sequence
  Description of Artificial Sequence: Synthetic oligonucleotide
gcgacuaguaacuguacgc

SEQ ID NO: 308937 - RNA, 19 nt, Artificial Sequence
  Description of Artificial Sequence: Synthetic oligonucleotide
aaacgccauauaaacacaa

SEQ ID NO: 308938 - RNA, 19 nt, Artificial Sequence
  Description of Artificial Sequence: Synthetic oligonucleotide
ucaggguucuuuguuggga

SEQ ID NO: 308939 - RNA, 19 nt, Artificial Sequence
  Description of Artificial Sequence: Synthetic oligonucleotide
gucacuacaguuugcuaga

SEQ ID NO: 308940 - RNA, 19 nt, Artificial Sequence
  Description of Artificial Sequence: Synthetic oligonucleotide
gauucacaucucugguagc

SEQ ID NO: 308941 - RNA, 19 nt, Artificial Sequence
  Description of Artificial Sequence: Synthetic oligonucleotide
aucagguucaucgugccau

SEQ ID NO: 308942 - RNA, 19 nt, Artificial Sequence
  Description of Artificial Sequence: Synthetic oligonucleotide
uaaauuguguaggccucug

SEQ ID NO: 308943 - RNA, 19 nt, Artificial Sequence
  Description of Artificial Sequence: Synthetic oligonucleotide
cagccaaucuuucacccug

SEQ ID NO: 308944 - RNA, 19 nt, Artificial Sequence
  Description of Artificial Sequence: Synthetic oligonucleotide
acuguacgcagcgacuuag

SEQ ID NO: 308945 - RNA, 19 nt, Artificial Sequence
  Description of Artificial Sequence: Synthetic oligonucleotide
gaucgugauagcuggccuc

SEQ ID NO: 308946 - RNA, 19 nt, Artificial Sequence
  Description of Artificial Sequence: Synthetic oligonucleotide
ggcgacuaguaacuguacg

SEQ ID NO: 308947 - RNA, 19 nt, Artificial Sequence
  Description of Artificial Sequence: Synthetic oligonucleotide
cagccauauaaggagggcc

SEQ ID NO: 308948 - RNA, 19 nt, Artificial Sequence
  Description of Artificial Sequence: Synthetic oligonucleotide
uugugcucgaacccuuuuc

SEQ ID NO: 308949 - RNA, 19 nt, Artificial Sequence
  Description of Artificial Sequence: Synthetic oligonucleotide
uucuugagggucucacgcu

SEQ ID NO: 308950 - RNA, 19 nt, Artificial Sequence
  Description of Artificial Sequence: Synthetic oligonucleotide
ucucacgcugccugguacc

SEQ ID NO: 308951 - RNA, 19 nt, Artificial Sequence
  Description of Artificial Sequence: Synthetic oligonucleotide
cuagguuguagggugggac

SEQ ID NO: 308952 - RNA, 19 nt, Artificial Sequence
  Description of Artificial Sequence: Synthetic oligonucleotide
gaucacagacccaguuggg

SEQ ID NO: 308953 - RNA, 19 nt, Artificial Sequence
  Description of Artificial Sequence: Synthetic oligonucleotide
gaauacgccucuauacaca

SEQ ID NO: 308954 - RNA, 19 nt, Artificial Sequence
  Description of Artificial Sequence: Synthetic oligonucleotide
agcuccuaggggcuuacca

SEQ ID NO: 308955 - RNA, 19 nt, Artificial Sequence
  Description of Artificial Sequence: Synthetic oligonucleotide
ucgaacccuuuucucauau

SEQ ID NO: 308956 - RNA, 19 nt, Artificial Sequence
  Description of Artificial Sequence: Synthetic oligonucleotide
uauacccacaaggcacuag

SEQ ID NO: 308957 - RNA, 19 nt, Artificial Sequence
  Description of Artificial Sequence: Synthetic oligonucleotide
agucuuggggcucagccuu

SEQ ID NO: 308958 - RNA, 19 nt, Artificial Sequence
  Description of Artificial Sequence: Synthetic oligonucleotide
cggaaauggaaaauggcgc

SEQ ID NO: 308959 - RNA, 19 nt, Artificial Sequence
  Description of Artificial Sequence: Synthetic oligonucleotide
agcaguugaaauacugaca

SEQ ID NO: 308960 - RNA, 19 nt, Artificial Sequence
  Description of Artificial Sequence: Synthetic oligonucleotide
auauaaggagggccagaca

SEQ ID NO: 308961 - RNA, 19 nt, Artificial Sequence
  Description of Artificial Sequence: Synthetic oligonucleotide
agggauagcgcacucccaa

SEQ ID NO: 308962 - RNA, 19 nt, Artificial Sequence
  Description of Artificial Sequence: Synthetic oligonucleotide
gggcuuaccaaguacaaaa

SEQ ID NO: 308963 - RNA, 19 nt, Artificial Sequence
  Description of Artificial Sequence: Synthetic oligonucleotide
auguagucaguuguuacaa

SEQ ID NO: 308964 - RNA, 19 nt, Artificial Sequence
  Description of Artificial Sequence: Synthetic oligonucleotide
agucggcugagggcaaucc

SEQ ID NO: 308965 - RNA, 19 nt, Artificial Sequence
  Description of Artificial Sequence: Synthetic oligonucleotide
ggcuaaauauacccacaag

SEQ ID NO: 308966 - RNA, 19 nt, Artificial Sequence
  Description of Artificial Sequence: Synthetic oligonucleotide
uguguaggccucugcuuga

SEQ ID NO: 308967 - RNA, 19 nt, Artificial Sequence
  Description of Artificial Sequence: Synthetic oligonucleotide
aucugaggcucauaagcaa

SEQ ID NO: 308968 - RNA, 19 nt, Artificial Sequence
  Description of Artificial Sequence: Synthetic oligonucleotide
guuuauguguugcccacaa

SEQ ID NO: 308969 - RNA, 19 nt, Artificial Sequence
  Description of Artificial Sequence: Synthetic oligonucleotide
cucccgguggucuguaagc

SEQ ID NO: 308970 - RNA, 19 nt, Artificial Sequence
  Description of Artificial Sequence: Synthetic oligonucleotide
cucuaaacagcaacacaga

SEQ ID NO: 308971 - RNA, 19 nt, Artificial Sequence
  Description of Artificial Sequence: Synthetic oligonucleotide
guacgcagcgacuuagauc

SEQ ID NO: 308972 - RNA, 19 nt, Artificial Sequence
  Description of Artificial Sequence: Synthetic oligonucleotide
aguuugaacaagccuccuu

SEQ ID NO: 308973 - RNA, 19 nt, Artificial Sequence
  Description of Artificial Sequence: Synthetic oligonucleotide
aagaucuguuugaucguga

SEQ ID NO: 308974 - RNA, 19 nt, Artificial Sequence
  Description of Artificial Sequence: Synthetic oligonucleotide
ccucacauuuuaaugauga

SEQ ID NO: 308975 - RNA, 19 nt, Artificial Sequence
  Description of Artificial Sequence: Synthetic oligonucleotide
ugggugaaacagugguggc

SEQ ID NO: 308976 - RNA, 19 nt, Artificial Sequence
  Description of Artificial Sequence: Synthetic oligonucleotide
uucucguagcgcuguggcc

SEQ ID NO: 308977 - RNA, 19 nt, Artificial Sequence
  Description of Artificial Sequence: Synthetic oligonucleotide
uuuauguguugcccacaau

SEQ ID NO: 308978 - RNA, 19 nt, Artificial Sequence
  Description of Artificial Sequence: Synthetic oligonucleotide
ugugaucacuggcuauguc

SEQ ID NO: 308979 - RNA, 19 nt, Artificial Sequence
  Description of Artificial Sequence: Synthetic oligonucleotide
gaaaauggcgcccgcucaa

SEQ ID NO: 308980 - RNA, 19 nt, Artificial Sequence
  Description of Artificial Sequence: Synthetic oligonucleotide
gacggauagucaucuuuga

SEQ ID NO: 308981 - RNA, 19 nt, Artificial Sequence
  Description of Artificial Sequence: Synthetic oligonucleotide
uccaucaaccucggcuccg

SEQ ID NO: 308982 - RNA, 19 nt, Artificial Sequence
  Description of Artificial Sequence: Synthetic oligonucleotide
cuuagugccgcugcuuaug

SEQ ID NO: 308983 - RNA, 19 nt, Artificial Sequence
  Description of Artificial Sequence: Synthetic oligonucleotide
uguaagccccaagaucaca

SEQ ID NO: 308984 - RNA, 19 nt, Artificial Sequence
  Description of Artificial Sequence: Synthetic oligonucleotide
ugacugguucccauuccaa

SEQ ID NO: 308985 - RNA, 19 nt, Artificial Sequence
  Description of Artificial Sequence: Synthetic oligonucleotide
uccuaggggcuuaccaagu

SEQ ID NO: 308986 - RNA, 19 nt, Artificial Sequence
  Description of Artificial Sequence: Synthetic oligonucleotide
agccauauaaggagggcca

SEQ ID NO: 308987 - RNA, 19 nt, Artificial Sequence
  Description of Artificial Sequence: Synthetic oligonucleotide
guauguggacagugguacc

SEQ ID NO: 308988 - RNA, 19 nt, Artificial Sequence
  Description of Artificial Sequence: Synthetic oligonucleotide
acggauagucaucuuugaa

SEQ ID NO: 308989 - RNA, 19 nt, Artificial Sequence
  Description of Artificial Sequence: Synthetic oligonucleotide
gccaccgcuagauagcagc

SEQ ID NO: 308990 - RNA, 19 nt, Artificial Sequence
  Description of Artificial Sequence: Synthetic oligonucleotide
accccugcgcggcuucucc

SEQ ID NO: 308991 - RNA, 19 nt, Artificial Sequence
  Description of Artificial Sequence: Synthetic oligonucleotide
agaauacuuuagcuauaaa

SEQ ID NO: 308992 - RNA, 19 nt, Artificial Sequence
  Description of Artificial Sequence: Synthetic oligonucleotide
uccauauauuaaccauaua

SEQ ID NO: 308993 - RNA, 19 nt, Artificial Sequence
  Description of Artificial Sequence: Synthetic oligonucleotide
guuacaagauucacaucuc

SEQ ID NO: 308994 - RNA, 19 nt, Artificial Sequence
  Description of Artificial Sequence: Synthetic oligonucleotide
gaggccauacugugcccag

SEQ ID NO: 308995 - RNA, 19 nt, Artificial Sequence
  Description of Artificial Sequence: Synthetic oligonucleotide
cauccguaguuugaacaag

SEQ ID NO: 308996 - RNA, 19 nt, Artificial Sequence
  Description of Artificial Sequence: Synthetic oligonucleotide
acuaguaacccaguccaua

SEQ ID NO: 308997 - RNA, 19 nt, Artificial Sequence
  Description of Artificial Sequence: Synthetic oligonucleotide
uaacuguacgcagcgacuu

SEQ ID NO: 308998 - RNA, 19 nt, Artificial Sequence
  Description of Artificial Sequence: Synthetic oligonucleotide
gaauagaauacgccucuau

SEQ ID NO: 308999 - RNA, 19 nt, Artificial Sequence
  Description of Artificial Sequence: Synthetic oligonucleotide
aggugcuagucuuggggcu

SEQ ID NO: 309000 - RNA, 19 nt, Artificial Sequence
  Description of Artificial Sequence: Synthetic oligonucleotide
uacugacaucaauauuaaa

SEQ ID NO: 309001 - RNA, 19 nt, Artificial Sequence
  Description of Artificial Sequence: Synthetic oligonucleotide
aacgccauauaaacacaaa

SEQ ID NO: 309002 - RNA, 19 nt, Artificial Sequence
  Description of Artificial Sequence: Synthetic oligonucleotide
cuggaucagccaaucuuuc

SEQ ID NO: 309003 - RNA, 19 nt, Artificial Sequence
  Description of Artificial Sequence: Synthetic oligonucleotide
agggucucacgcugccugg

SEQ ID NO: 309004 - RNA, 19 nt, Artificial Sequence
  Description of Artificial Sequence: Synthetic oligonucleotide
ugagggcaauccccgacau

SEQ ID NO: 309005 - RNA, 19 nt, Artificial Sequence
  Description of Artificial Sequence: Synthetic oligonucleotide
cugguagccaaggacugug

SEQ ID NO: 309006 - RNA, 19 nt, Artificial Sequence
  Description of Artificial Sequence: Synthetic oligonucleotide
acgcuggccaacuuuggau

SEQ ID NO: 309007 - RNA, 19 nt, Artificial Sequence
  Description of Artificial Sequence: Synthetic oligonucleotide
agccaaucuuucacccugc

SEQ ID NO: 309008 - RNA, 19 nt, Artificial Sequence
  Description of Artificial Sequence: Synthetic oligonucleotide
gaggccaccgcuagauagc

SEQ ID NO: 309009 - RNA, 19 nt, Artificial Sequence
  Description of Artificial Sequence: Synthetic oligonucleotide
auuagaggauuuguagaua

SEQ ID NO: 309010 - RNA, 19 nt, Artificial Sequence
  Description of Artificial Sequence: Synthetic oligonucleotide
ggacggauagucaucuuug

SEQ ID NO: 309011 - RNA, 19 nt, Artificial Sequence
  Description of Artificial Sequence: Synthetic oligonucleotide
gacuccugguugcagaccu

SEQ ID NO: 309012 - RNA, 19 nt, Artificial Sequence
  Description of Artificial Sequence: Synthetic oligonucleotide
ggcaauccccgacauauuc

SEQ ID NO: 309013 - RNA, 19 nt, Artificial Sequence
  Description of Artificial Sequence: Synthetic oligonucleotide
ggaagcaugccugcauccg

SEQ ID NO: 309014 - RNA, 19 nt, Artificial Sequence
  Description of Artificial Sequence: Synthetic oligonucleotide
cucuagguuguaggguggg

SEQ ID NO: 309015 - RNA, 19 nt, Artificial Sequence
  Description of Artificial Sequence: Synthetic oligonucleotide
gagggccagacauacugaa

SEQ ID NO: 309016 - RNA, 19 nt, Artificial Sequence
  Description of Artificial Sequence: Synthetic oligonucleotide
gcaguaaauuguguaggcc

SEQ ID NO: 309017 - RNA, 19 nt, Artificial Sequence
  Description of Artificial Sequence: Synthetic oligonucleotide
caguugaaauacugacauc

SEQ ID NO: 309018 - RNA, 19 nt, Artificial Sequence
  Description of Artificial Sequence: Synthetic oligonucleotide
gcgacuuagaucugcaaaa

SEQ ID NO: 309019 - RNA, 19 nt, Artificial Sequence
  Description of Artificial Sequence: Synthetic oligonucleotide
ggaacaagucugaaggaga

SEQ ID NO: 309020 - RNA, 19 nt, Artificial Sequence
  Description of Artificial Sequence: Synthetic oligonucleotide
uccagggauagcgcacucc

SEQ ID NO: 309021 - RNA, 19 nt, Artificial Sequence
  Description of Artificial Sequence: Synthetic oligonucleotide
agccugaacuccccaggug

SEQ ID NO: 309022 - RNA, 19 nt, Artificial Sequence
  Description of Artificial Sequence: Synthetic oligonucleotide
ccagggauagcgcacuccc

SEQ ID NO: 309023 - RNA, 19 nt, Artificial Sequence
  Description of Artificial Sequence: Synthetic oligonucleotide
acgccucuauacacagucc

SEQ ID NO: 309024 - RNA, 19 nt, Artificial Sequence
  Description of Artificial Sequence: Synthetic oligonucleotide
ucuagguuguaggguggga

SEQ ID NO: 309025 - RNA, 19 nt, Artificial Sequence
  Description of Artificial Sequence: Synthetic oligonucleotide
ggcggaaauggaaaauggc

SEQ ID NO: 309026 - RNA, 19 nt, Artificial Sequence
  Description of Artificial Sequence: Synthetic oligonucleotide
caggcgacuaguaacugua

SEQ ID NO: 309027 - RNA, 19 nt, Artificial Sequence
  Description of Artificial Sequence: Synthetic oligonucleotide
cacccugcuggguuuauga

SEQ ID NO: 309028 - RNA, 19 nt, Artificial Sequence
  Description of Artificial Sequence: Synthetic oligonucleotide
guccauacaggugccacca

SEQ ID NO: 309029 - RNA, 19 nt, Artificial Sequence
  Description of Artificial Sequence: Synthetic oligonucleotide
uuccucgucauggagccuu

SEQ ID NO: 309030 - RNA, 19 nt, Artificial Sequence
  Description of Artificial Sequence: Synthetic oligonucleotide
guauuugcaggcagggaaa

SEQ ID NO: 309031 - RNA, 19 nt, Artificial Sequence
  Description of Artificial Sequence: Synthetic oligonucleotide
ucgcuugugcucgaacccu

SEQ ID NO: 309032 - RNA, 19 nt, Artificial Sequence
  Description of Artificial Sequence: Synthetic oligonucleotide
ggcaagucggcugagggca

SEQ ID NO: 309033 - RNA, 19 nt, Artificial Sequence
  Description of Artificial Sequence: Synthetic oligonucleotide
auggcgcccgcucaacccu

SEQ ID NO: 309034 - RNA, 19 nt, Artificial Sequence
  Description of Artificial Sequence: Synthetic oligonucleotide
gucucacgcugccugguac

SEQ ID NO: 309035 - RNA, 19 nt, Artificial Sequence
  Description of Artificial Sequence: Synthetic oligonucleotide
caguccauacaggugccac

SEQ ID NO: 309036 - RNA, 19 nt, Artificial Sequence
  Description of Artificial Sequence: Synthetic oligonucleotide
auuuguagauacagugguu

SEQ ID NO: 309037 - RNA, 19 nt, Artificial Sequence
  Description of Artificial Sequence: Synthetic oligonucleotide
guccaucaaccucggcucc

SEQ ID NO: 309038 - RNA, 19 nt, Artificial Sequence
  Description of Artificial Sequence: Synthetic oligonucleotide
ggccauacugugcccaggc

SEQ ID NO: 309039 - RNA, 19 nt, Artificial Sequence
  Description of Artificial Sequence: Synthetic oligonucleotide
guggucuguaagccccaag

SEQ ID NO: 309040 - RNA, 19 nt, Artificial Sequence
  Description of Artificial Sequence: Synthetic oligonucleotide
uaguuugaacaagccuccu

SEQ ID NO: 309041 - RNA, 19 nt, Artificial Sequence
  Description of Artificial Sequence: Synthetic oligonucleotide
ccgguggucuguaagcccc

SEQ ID NO: 309042 - RNA, 19 nt, Artificial Sequence
  Description of Artificial Sequence: Synthetic oligonucleotide
auggaaaauggcgcccgcu

SEQ ID NO: 309043 - RNA, 19 nt, Artificial Sequence
  Description of Artificial Sequence: Synthetic oligonucleotide
gccugaacuccccagguga

SEQ ID NO: 309044 - RNA, 19 nt, Artificial Sequence
  Description of Artificial Sequence: Synthetic oligonucleotide
gaacuccuaggugcuaguc

SEQ ID NO: 309045 - RNA, 19 nt, Artificial Sequence
  Description of Artificial Sequence: Synthetic oligonucleotide
auacagugguuuauguguu

SEQ ID NO: 309046 - RNA, 19 nt, Artificial Sequence
  Description of Artificial Sequence: Synthetic oligonucleotide
aggcgacuaguaacuguac

SEQ ID NO: 309047 - RNA, 19 nt, Artificial Sequence
  Description of Artificial Sequence: Synthetic oligonucleotide
agggcaucaaaaggccuga

SEQ ID NO: 309048 - RNA, 19 nt, Artificial Sequence
  Description of Artificial Sequence: Synthetic oligonucleotide
uaguaacuguacgcagcga

SEQ ID NO: 309049 - RNA, 19 nt, Artificial Sequence
  Description of Artificial Sequence: Synthetic oligonucleotide
uuccgacuucuugaggguc

SEQ ID NO: 309050 - RNA, 19 nt, Artificial Sequence
  Description of Artificial Sequence: Synthetic oligonucleotide
ggaguccccuucuuuccag

SEQ ID NO: 309051 - RNA, 19 nt, Artificial Sequence
  Description of Artificial Sequence: Synthetic oligonucleotide
ugcauccgagcgcgaagaa

SEQ ID NO: 309052 - RNA, 19 nt, Artificial Sequence
  Description of Artificial Sequence: Synthetic oligonucleotide
gaaaccccugcgcggcuuc

SEQ ID NO: 309053 - RNA, 19 nt, Artificial Sequence
  Description of Artificial Sequence: Synthetic oligonucleotide
cagacauacugaaguaccu

SEQ ID NO: 309054 - RNA, 19 nt, Artificial Sequence
  Description of Artificial Sequence: Synthetic oligonucleotide
gagucacuacaguuugcua

SEQ ID NO: 309055 - RNA, 19 nt, Artificial Sequence
  Description of Artificial Sequence: Synthetic oligonucleotide
agacgcuggccaacuuugg

SEQ ID NO: 309056 - RNA, 19 nt, Artificial Sequence
  Description of Artificial Sequence: Synthetic oligonucleotide
agaauagaauacgccucua

SEQ ID NO: 309057 - RNA, 19 nt, Artificial Sequence
  Description of Artificial Sequence: Synthetic oligonucleotide
gugccaccaacugcaacug

SEQ ID NO: 309058 - RNA, 19 nt, Artificial Sequence
  Description of Artificial Sequence: Synthetic oligonucleotide
gugcucgaacccuuuucuc

SEQ ID NO: 309059 - RNA, 19 nt, Artificial Sequence
  Description of Artificial Sequence: Synthetic oligonucleotide
aguugggcccagaggccac

SEQ ID NO: 309060 - RNA, 19 nt, Artificial Sequence
  Description of Artificial Sequence: Synthetic oligonucleotide
ucggcuccggccuguacuu

SEQ ID NO: 309061 - RNA, 19 nt, Artificial Sequence
  Description of Artificial Sequence: Synthetic oligonucleotide
cucaacccucccaggcgac

SEQ ID NO: 309062 - RNA, 19 nt, Artificial Sequence
  Description of Artificial Sequence: Synthetic oligonucleotide
cggauagucaucuuugaaa

SEQ ID NO: 309063 - RNA, 19 nt, Artificial Sequence
  Description of Artificial Sequence: Synthetic oligonucleotide
guaacuguacgcagcgacu

SEQ ID NO: 309064 - RNA, 19 nt, Artificial Sequence
  Description of Artificial Sequence: Synthetic oligonucleotide
cuguuugaucgugauagcu

SEQ ID NO: 309065 - RNA, 19 nt, Artificial Sequence
  Description of Artificial Sequence: Synthetic oligonucleotide
aggccauacugugcccagg

SEQ ID NO: 309066 - RNA, 19 nt, Artificial Sequence
  Description of Artificial Sequence: Synthetic oligonucleotide
ucaacccucccaggcgacu

SEQ ID NO: 309067 - RNA, 19 nt, Artificial Sequence
  Description of Artificial Sequence: Synthetic oligonucleotide
caucaaccucggcuccggc

SEQ ID NO: 309068 - RNA, 19 nt, Artificial Sequence
  Description of Artificial Sequence: Synthetic oligonucleotide
guaaauuguguaggccucu

SEQ ID NO: 309069 - RNA, 19 nt, Artificial Sequence
  Description of Artificial Sequence: Synthetic oligonucleotide
ucacccugcuggguuuaug

SEQ ID NO: 309070 - RNA, 19 nt, Artificial Sequence
  Description of Artificial Sequence: Synthetic oligonucleotide
ccuugcuuggucccugaac

SEQ ID NO: 309071 - RNA, 19 nt, Artificial Sequence
  Description of Artificial Sequence: Synthetic oligonucleotide
gcuccuaggggcuuaccaa

SEQ ID NO: 309072 - RNA, 19 nt, Artificial Sequence
  Description of Artificial Sequence: Synthetic oligonucleotide
guucccauuccaagggucu

SEQ ID NO: 309073 - RNA, 19 nt, Artificial Sequence
  Description of Artificial Sequence: Synthetic oligonucleotide
caucagguucaucgugcca

SEQ ID NO: 309074 - RNA, 19 nt, Artificial Sequence
  Description of Artificial Sequence: Synthetic oligonucleotide
caguggcggaaauggaaaa

SEQ ID NO: 309075 - RNA, 19 nt, Artificial Sequence
  Description of Artificial Sequence: Synthetic oligonucleotide
aggccaccgcuagauagca

SEQ ID NO: 309076 - RNA, 19 nt, Artificial Sequence
  Description of Artificial Sequence: Synthetic oligonucleotide
gcuggucucuagguuguag

SEQ ID NO: 309077 - RNA, 19 nt, Artificial Sequence
  Description of Artificial Sequence: Synthetic oligonucleotide
cuguacgcagcgacuuaga

SEQ ID NO: 309078 - RNA, 19 nt, Artificial Sequence
  Description of Artificial Sequence: Synthetic oligonucleotide
acguucucguagcgcugug

SEQ ID NO: 309079 - RNA, 19 nt, Artificial Sequence
  Description of Artificial Sequence: Synthetic oligonucleotide
gcucaacccucccaggcga

SEQ ID NO: 309080 - RNA, 19 nt, Artificial Sequence
  Description of Artificial Sequence: Synthetic oligonucleotide
gacccagguggggagaaua

SEQ ID NO: 309081 - RNA, 19 nt, Artificial Sequence
  Description of Artificial Sequence: Synthetic oligonucleotide
cugcauccgagcgcgaaga

SEQ ID NO: 309082 - RNA, 19 nt, Artificial Sequence
  Description of Artificial Sequence: Synthetic oligonucleotide
gguccuuucuccaagcuuu

SEQ ID NO: 309083 - RNA, 19 nt, Artificial Sequence
  Description of Artificial Sequence: Synthetic oligonucleotide
uucccauuccaagggucuu

SEQ ID NO: 309084 - RNA, 19 nt, Artificial Sequence
  Description of Artificial Sequence: Synthetic oligonucleotide
cuagcuccuaggggcuuac

SEQ ID NO: 309085 - RNA, 19 nt, Artificial Sequence
  Description of Artificial Sequence: Synthetic oligonucleotide
cgagcgcgaagaaacuagc

SEQ ID NO: 309086 - RNA, 19 nt, Artificial Sequence
  Description of Artificial Sequence: Synthetic oligonucleotide
uccucgucauggagccuua

SEQ ID NO: 309087 - RNA, 19 nt, Artificial Sequence
  Description of Artificial Sequence: Synthetic oligonucleotide
aaaccccugcgcggcuucu

SEQ ID NO: 309088 - RNA, 19 nt, Artificial Sequence
  Description of Artificial Sequence: Synthetic oligonucleotide
gcaauccccgacauauuca

SEQ ID NO: 309089 - RNA, 19 nt, Artificial Sequence
  Description of Artificial Sequence: Synthetic oligonucleotide
cacucccaauucaucaggu

SEQ ID NO: 309090 - RNA, 19 nt, Artificial Sequence
  Description of Artificial Sequence: Synthetic oligonucleotide
ugaaaccccugcgcggcuu

SEQ ID NO: 309091 - RNA, 19 nt, Artificial Sequence
  Description of Artificial Sequence: Synthetic oligonucleotide
ucgugauagcuggccucca

SEQ ID NO: 309092 - RNA, 19 nt, Artificial Sequence
  Description of Artificial Sequence: Synthetic oligonucleotide
ccgcucaacccucccaggc

SEQ ID NO: 309093 - RNA, 19 nt, Artificial Sequence
  Description of Artificial Sequence: Synthetic oligonucleotide
ugcuagucuuggggcucag

SEQ ID NO: 309094 - RNA, 19 nt, Artificial Sequence
  Description of Artificial Sequence: Synthetic oligonucleotide
gcaacagcccagguuucug

SEQ ID NO: 309095 - RNA, 19 nt, Artificial Sequence
  Description of Artificial Sequence: Synthetic oligonucleotide
gguuuauguguugcccaca

SEQ ID NO: 309096 - RNA, 19 nt, Artificial Sequence
  Description of Artificial Sequence: Synthetic oligonucleotide
ggugcuagucuuggggcuc

SEQ ID NO: 309097 - RNA, 19 nt, Artificial Sequence
  Description of Artificial Sequence: Synthetic oligonucleotide
gagcgcgaagaaacuagcu

SEQ ID NO: 309098 - RNA, 19 nt, Artificial Sequence
  Description of Artificial Sequence: Synthetic oligonucleotide
ccuuggcccuuacuuggcc

SEQ ID NO: 309099 - RNA, 19 nt, Artificial Sequence
  Description of Artificial Sequence: Synthetic oligonucleotide
acuagcuccuaggggcuua

SEQ ID NO: 309100 - RNA, 19 nt, Artificial Sequence
  Description of Artificial Sequence: Synthetic oligonucleotide
ccaggggaugucaggaaca

SEQ ID NO: 309101 - RNA, 19 nt, Artificial Sequence
  Description of Artificial Sequence: Synthetic oligonucleotide
cccgguggucuguaagccc

SEQ ID NO: 309102 - RNA, 19 nt, Artificial Sequence
  Description of Artificial Sequence: Synthetic oligonucleotide
auauacccacaaggcacua

SEQ ID NO: 309103 - RNA, 19 nt, Artificial Sequence
  Description of Artificial Sequence: Synthetic oligonucleotide
gguagccaaggacuguggu

SEQ ID NO: 309104 - RNA, 19 nt, Artificial Sequence
  Description of Artificial Sequence: Synthetic oligonucleotide
cuaccagggcgcaguggga

SEQ ID NO: 309105 - RNA, 19 nt, Artificial Sequence
  Description of Artificial Sequence: Synthetic oligonucleotide
ggucuguaagccccaagau

SEQ ID NO: 309106 - RNA, 19 nt, Artificial Sequence
  Description of Artificial Sequence: Synthetic oligonucleotide
auacgccucuauacacagu

SEQ ID NO: 309107 - RNA, 19 nt, Artificial Sequence
  Description of Artificial Sequence: Synthetic oligonucleotide
ggcccuuacuuggccacag

SEQ ID NO: 309108 - RNA, 19 nt, Artificial Sequence
  Description of Artificial Sequence: Synthetic oligonucleotide
ccaucaaccucggcuccgg

SEQ ID NO: 309109 - RNA, 19 nt, Artificial Sequence
  Description of Artificial Sequence: Synthetic oligonucleotide
guagcgcuguggccugauc

SEQ ID NO: 309110 - RNA, 19 nt, Artificial Sequence
  Description of Artificial Sequence: Synthetic oligonucleotide
aucgugccaucaggguucu

SEQ ID NO: 309111 - RNA, 19 nt, Artificial Sequence
  Description of Artificial Sequence: Synthetic oligonucleotide
gagggcaauccccgacaua

SEQ ID NO: 309112 - RNA, 19 nt, Artificial Sequence
  Description of Artificial Sequence: Synthetic oligonucleotide
uggcgcccgcucaacccuc

SEQ ID NO: 309113 - RNA, 19 nt, Artificial Sequence
  Description of Artificial Sequence: Synthetic oligonucleotide
cacagacaaaacgccauau

SEQ ID NO: 309114 - RNA, 19 nt, Artificial Sequence
  Description of Artificial Sequence: Synthetic oligonucleotide
gcacaagucucuccaauuu

SEQ ID NO: 309115 - RNA, 19 nt, Artificial Sequence
  Description of Artificial Sequence: Synthetic oligonucleotide
cagcgacuuagaucugcaa

SEQ ID NO: 309116 - RNA, 19 nt, Artificial Sequence
  Description of Artificial Sequence: Synthetic oligonucleotide
cgacuaguaacuguacgca

SEQ ID NO: 309117 - RNA, 19 nt, Artificial Sequence
  Description of Artificial Sequence: Synthetic oligonucleotide
gcccacaauuccuuaccaa

SEQ ID NO: 309118 - RNA, 19 nt, Artificial Sequence
  Description of Artificial Sequence: Synthetic oligonucleotide
ggagggccagacauacuga

SEQ ID NO: 309119 - RNA, 19 nt, Artificial Sequence
  Description of Artificial Sequence: Synthetic oligonucleotide
gcagcgacuuagaucugca

SEQ ID NO: 309120 - RNA, 19 nt, Artificial Sequence
  Description of Artificial Sequence: Synthetic oligonucleotide
aucucccgguggucuguaa

SEQ ID NO: 309121 - RNA, 19 nt, Artificial Sequence
  Description of Artificial Sequence: Synthetic oligonucleotide
cuucuucgcuugugcucga

SEQ ID NO: 309122 - RNA, 19 nt, Artificial Sequence
  Description of Artificial Sequence: Synthetic oligonucleotide
ggcuggauguggauuccga

SEQ ID NO: 309123 - RNA, 19 nt, Artificial Sequence
  Description of Artificial Sequence: Synthetic oligonucleotide
auguggauuccgacuucuu

SEQ ID NO: 309124 - RNA, 19 nt, Artificial Sequence
  Description of Artificial Sequence: Synthetic oligonucleotide
ggauagcgcacucccaauu

SEQ ID NO: 309125 - RNA, 19 nt, Artificial Sequence
  Description of Artificial Sequence: Synthetic oligonucleotide
ccguaguuugaacaagccu

SEQ ID NO: 309126 - RNA, 19 nt, Artificial Sequence
  Description of Artificial Sequence: Synthetic oligonucleotide
cguucucguagcgcugugg

SEQ ID NO: 309127 - RNA, 19 nt, Artificial Sequence
  Description of Artificial Sequence: Synthetic oligonucleotide
gcccuuacuuggccacagc

SEQ ID NO: 309128 - RNA, 19 nt, Artificial Sequence
  Description of Artificial Sequence: Synthetic oligonucleotide
ugccugcauccgagcgcga

SEQ ID NO: 309129 - RNA, 19 nt, Artificial Sequence
  Description of Artificial Sequence: Synthetic oligonucleotide
caaggggccugggcacaac

SEQ ID NO: 309130 - RNA, 19 nt, Artificial Sequence
  Description of Artificial Sequence: Synthetic oligonucleotide
ccauauaaggagggccaga

SEQ ID NO: 309131 - RNA, 19 nt, Artificial Sequence
  Description of Artificial Sequence: Synthetic oligonucleotide
agccagcuaccagggcgca

SEQ ID NO: 309132 - RNA, 19 nt, Artificial Sequence
  Description of Artificial Sequence: Synthetic oligonucleotide
cugcaucucccgguggucu

SEQ ID NO: 309133 - RNA, 19 nt, Artificial Sequence
  Description of Artificial Sequence: Synthetic oligonucleotide
gcauccgagcgcgaagaaa

SEQ ID NO: 309134 - RNA, 19 nt, Artificial Sequence
  Description of Artificial Sequence: Synthetic oligonucleotide
caacccucccaggcgacua

SEQ ID NO: 309135 - RNA, 19 nt, Artificial Sequence
  Description of Artificial Sequence: Synthetic oligonucleotide
cccacaguauuugcaggca

SEQ ID NO: 309136 - RNA, 19 nt, Artificial Sequence
  Description of Artificial Sequence: Synthetic oligonucleotide
gccucuauacacaguccua

SEQ ID NO: 309137 - RNA, 19 nt, Artificial Sequence
  Description of Artificial Sequence: Synthetic oligonucleotide
ggucucacgcugccuggua

SEQ ID NO: 309138 - RNA, 19 nt, Artificial Sequence
  Description of Artificial Sequence: Synthetic oligonucleotide
cucacgcugccugguaccu

SEQ ID NO: 309139 - RNA, 19 nt, Artificial Sequence
  Description of Artificial Sequence: Synthetic oligonucleotide
gggauagcgcacucccaau

SEQ ID NO: 309140 - RNA, 19 nt, Artificial Sequence
  Description of Artificial Sequence: Synthetic oligonucleotide
ggccaccgcuagauagcag

SEQ ID NO: 309141 - RNA, 19 nt, Artificial Sequence
  Description of Artificial Sequence: Synthetic oligonucleotide
cccaggcgacuaguaacug

SEQ ID NO: 309142 - RNA, 19 nt, Artificial Sequence
  Description of Artificial Sequence: Synthetic oligonucleotide
gccagcuaccagggcgcag

SEQ ID NO: 309143 - RNA, 19 nt, Artificial Sequence
  Description of Artificial Sequence: Synthetic oligonucleotide
cgccucuauacacaguccu

SEQ ID NO: 309144 - RNA, 19 nt, Artificial Sequence
  Description of Artificial Sequence: Synthetic oligonucleotide
cugaaaccccugcgcggcu

SEQ ID NO: 309145 - RNA, 19 nt, Artificial Sequence
  Description of Artificial Sequence: Synthetic oligonucleotide
gccaaaagggugguccuuu

SEQ ID NO: 309146 - RNA, 19 nt, Artificial Sequence
  Description of Artificial Sequence: Synthetic oligonucleotide
acgcagcgacuuagaucug

SEQ ID NO: 309147 - RNA, 19 nt, Artificial Sequence
  Description of Artificial Sequence: Synthetic oligonucleotide
gcucagacaagggccugcu

SEQ ID NO: 309148 - RNA, 19 nt, Artificial Sequence
  Description of Artificial Sequence: Synthetic oligonucleotide
ccaccgcuagauagcagcu

SEQ ID NO: 309149 - RNA, 19 nt, Artificial Sequence
  Description of Artificial Sequence: Synthetic oligonucleotide
ggcgcccgcucaacccucc

SEQ ID NO: 309150 - RNA, 19 nt, Artificial Sequence
  Description of Artificial Sequence: Synthetic oligonucleotide
ccggccuguacuuguggcu

SEQ ID NO: 309151 - RNA, 19 nt, Artificial Sequence
  Description of Artificial Sequence: Synthetic oligonucleotide
gccuguacuuguggcuaaa

SEQ ID NO: 309152 - RNA, 19 nt, Artificial Sequence
  Description of Artificial Sequence: Synthetic oligonucleotide
ccccaagaucacagaccca

SEQ ID NO: 309153 - RNA, 19 nt, Artificial Sequence
  Description of Artificial Sequence: Synthetic oligonucleotide
gcgcccgcucaacccuccc

SEQ ID NO: 309154 - RNA, 19 nt, Artificial Sequence
  Description of Artificial Sequence: Synthetic oligonucleotide
caagucggcugagggcaau

SEQ ID NO: 309155 - RNA, 19 nt, Artificial Sequence
  Description of Artificial Sequence: Synthetic oligonucleotide
caccgcuagauagcagcuu

SEQ ID NO: 309156 - RNA, 19 nt, Artificial Sequence
  Description of Artificial Sequence: Synthetic oligonucleotide
gggucucacgcugccuggu

SEQ ID NO: 309157 - RNA, 19 nt, Artificial Sequence
  Description of Artificial Sequence: Synthetic oligonucleotide
ucgugccaucaggguucuu

SEQ ID NO: 309158 - RNA, 19 nt, Artificial Sequence
  Description of Artificial Sequence: Synthetic oligonucleotide
gcgcuguggccugaucagu

SEQ ID NO: 309159 - RNA, 19 nt, Artificial Sequence
  Description of Artificial Sequence: Synthetic oligonucleotide
gggcaauccccgacauauu

SEQ ID NO: 309160 - RNA, 19 nt, Artificial Sequence
  Description of Artificial Sequence: Synthetic oligonucleotide
cgcuugugcucgaacccuu

SEQ ID NO: 309161 - RNA, 19 nt, Artificial Sequence
  Description of Artificial Sequence: Synthetic oligonucleotide
aauucugcucuuuagggcc

SEQ ID NO: 309162 - RNA, 19 nt, Artificial Sequence
  Description of Artificial Sequence: Synthetic oligonucleotide
auaguauguaugcagaggg

SEQ ID NO: 309163 - RNA, 19 nt, Artificial Sequence
  Description of Artificial Sequence: Synthetic oligonucleotide
aguaacaaagaacauuggg

SEQ ID NO: 309164 - RNA, 19 nt, Artificial Sequence
  Description of Artificial Sequence: Synthetic oligonucleotide
ugagcauuaaagcagccag

SEQ ID NO: 309165 - RNA, 19 nt, Artificial Sequence
  Description of Artificial Sequence: Synthetic oligonucleotide
uucaggaauagacagaccu

SEQ ID NO: 309166 - RNA, 19 nt, Artificial Sequence
  Description of Artificial Sequence: Synthetic oligonucleotide
ucacacaucagcuuuagca

SEQ ID NO: 309167 - RNA, 19 nt, Artificial Sequence
  Description of Artificial Sequence: Synthetic oligonucleotide
aguugcuuuagguaugggc

SEQ ID NO: 309168 - RNA, 19 nt, Artificial Sequence
  Description of Artificial Sequence: Synthetic oligonucleotide
aaauguggggcuucaaaag

SEQ ID NO: 309169 - RNA, 19 nt, Artificial Sequence
  Description of Artificial Sequence: Synthetic oligonucleotide
aaaagauucagugcuuggg

SEQ ID NO: 309170 - RNA, 19 nt, Artificial Sequence
  Description of Artificial Sequence: Synthetic oligonucleotide
aacuccuggaugcaccugc

SEQ ID NO: 309171 - RNA, 19 nt, Artificial Sequence
  Description of Artificial Sequence: Synthetic oligonucleotide
aaaaguguagcauggugca

SEQ ID NO: 309172 - RNA, 19 nt, Artificial Sequence
  Description of Artificial Sequence: Synthetic oligonucleotide
caaaaguguagcauggugc

SEQ ID NO: 309173 - RNA, 19 nt, Artificial Sequence
  Description of Artificial Sequence: Synthetic oligonucleotide
caaaauacugggcuguugg

SEQ ID NO: 309174 - RNA, 19 nt, Artificial Sequence
  Description of Artificial Sequence: Synthetic oligonucleotide
auagugaccagcguagugc

SEQ ID NO: 309175 - RNA, 19 nt, Artificial Sequence
  Description of Artificial Sequence: Synthetic oligonucleotide
aauagacagaccuggccag

SEQ ID NO: 309176 - RNA, 19 nt, Artificial Sequence
  Description of Artificial Sequence: Synthetic oligonucleotide
aaagauucagugcuugggu

SEQ ID NO: 309177 - RNA, 19 nt, Artificial Sequence
  Description of Artificial Sequence: Synthetic oligonucleotide
aaaauacugggcuguuggg

SEQ ID NO: 309178 - RNA, 19 nt, Artificial Sequence
  Description of Artificial Sequence: Synthetic oligonucleotide
gaacaugcaggauuucugg

SEQ ID NO: 309179 - RNA, 19 nt, Artificial Sequence
  Description of Artificial Sequence: Synthetic oligonucleotide
aaauaagggaccacuggac

SEQ ID NO: 309180 - RNA, 19 nt, Artificial Sequence
  Description of Artificial Sequence: Synthetic oligonucleotide
uggaucuaggcucucaagc

SEQ ID NO: 309181 - RNA, 19 nt, Artificial Sequence
  Description of Artificial Sequence: Synthetic oligonucleotide
ugcauagugaccagcguag

SEQ ID NO: 309182 - RNA, 19 nt, Artificial Sequence
  Description of Artificial Sequence: Synthetic oligonucleotide
aacaugcaggauuucuggg

SEQ ID NO: 309183 - RNA, 19 nt, Artificial Sequence
  Description of Artificial Sequence: Synthetic oligonucleotide
uccuguaucaaaguaggag

SEQ ID NO: 309184 - RNA, 19 nt, Artificial Sequence
  Description of Artificial Sequence: Synthetic oligonucleotide
gacacugucuacgacagag

SEQ ID NO: 309185 - RNA, 19 nt, Artificial Sequence
  Description of Artificial Sequence: Synthetic oligonucleotide
uuuauuaagugagagugau

SEQ ID NO: 309186 - RNA, 19 nt, Artificial Sequence
  Description of Artificial Sequence: Synthetic oligonucleotide
uccauaguauguaugcaga

SEQ ID NO: 309187 - RNA, 19 nt, Artificial Sequence
  Description of Artificial Sequence: Synthetic oligonucleotide
caaaguuccaccucccagc

SEQ ID NO: 309188 - RNA, 19 nt, Artificial Sequence
  Description of Artificial Sequence: Synthetic oligonucleotide
aauccagugucagggaccg

SEQ ID NO: 309189 - RNA, 19 nt, Artificial Sequence
  Description of Artificial Sequence: Synthetic oligonucleotide
gaucagagcaggaagggag

SEQ ID NO: 309190 - RNA, 19 nt, Artificial Sequence
  Description of Artificial Sequence: Synthetic oligonucleotide
cacuggaccuaucagaggc

SEQ ID NO: 309191 - RNA, 19 nt, Artificial Sequence
  Description of Artificial Sequence: Synthetic oligonucleotide
cugagcacucaauacagag

SEQ ID NO: 309192 - RNA, 19 nt, Artificial Sequence
  Description of Artificial Sequence: Synthetic oligonucleotide
aggaggaauaagccaauuc

SEQ ID NO: 309193 - RNA, 19 nt, Artificial Sequence
  Description of Artificial Sequence: Synthetic oligonucleotide
aggucguuguagaaaaucc

SEQ ID NO: 309194 - RNA, 19 nt, Artificial Sequence
  Description of Artificial Sequence: Synthetic oligonucleotide
gagguacucagguugauuc

SEQ ID NO: 309195 - RNA, 19 nt, Artificial Sequence
  Description of Artificial Sequence: Synthetic oligonucleotide
uggaacuacuggcuguagg

SEQ ID NO: 309196 - RNA, 19 nt, Artificial Sequence
  Description of Artificial Sequence: Synthetic oligonucleotide
gaagagggagucucggcgg

SEQ ID NO: 309197 - RNA, 19 nt, Artificial Sequence
  Description of Artificial Sequence: Synthetic oligonucleotide
aacacccaagcuccugugg

SEQ ID NO: 309198 - RNA, 19 nt, Artificial Sequence
  Description of Artificial Sequence: Synthetic oligonucleotide
aguaggagaagagggaauc

SEQ ID NO: 309199 - RNA, 19 nt, Artificial Sequence
  Description of Artificial Sequence: Synthetic oligonucleotide
agcguagugcccuugaccu

SEQ ID NO: 309200 - RNA, 19 nt, Artificial Sequence
  Description of Artificial Sequence: Synthetic oligonucleotide
ucuacgacagagccugugc

SEQ ID NO: 309201 - RNA, 19 nt, Artificial Sequence
  Description of Artificial Sequence: Synthetic oligonucleotide
cagccaucaagcaagggag

SEQ ID NO: 309202 - RNA, 19 nt, Artificial Sequence
  Description of Artificial Sequence: Synthetic oligonucleotide
ucaauacagagcagcacac

SEQ ID NO: 309203 - RNA, 19 nt, Artificial Sequence
  Description of Artificial Sequence: Synthetic oligonucleotide
uguagaaaauccucucagu

SEQ ID NO: 309204 - RNA, 19 nt, Artificial Sequence
  Description of Artificial Sequence: Synthetic oligonucleotide
agcguuugcugcuugaacu

SEQ ID NO: 309205 - RNA, 19 nt, Artificial Sequence
  Description of Artificial Sequence: Synthetic oligonucleotide
gaagcuuaggggcagggca

SEQ ID NO: 309206 - RNA, 19 nt, Artificial Sequence
  Description of Artificial Sequence: Synthetic oligonucleotide
ucaaaagauucagugcuug

SEQ ID NO: 309207 - RNA, 19 nt, Artificial Sequence
  Description of Artificial Sequence: Synthetic oligonucleotide
uuagacugcguccuguauc

SEQ ID NO: 309208 - RNA, 19 nt, Artificial Sequence
  Description of Artificial Sequence: Synthetic oligonucleotide
cagacaaucaaggaacccc

SEQ ID NO: 309209 - RNA, 19 nt, Artificial Sequence
  Description of Artificial Sequence: Synthetic oligonucleotide
ugagagugaucagagcagg

SEQ ID NO: 309210 - RNA, 19 nt, Artificial Sequence
  Description of Artificial Sequence: Synthetic oligonucleotide
agguacucagguugauucc

SEQ ID NO: 309211 - RNA, 19 nt, Artificial Sequence
  Description of Artificial Sequence: Synthetic oligonucleotide
caaaagauucagugcuugg

SEQ ID NO: 309212 - RNA, 19 nt, Artificial Sequence
  Description of Artificial Sequence: Synthetic oligonucleotide
uugaccuaaacaagggcuc

SEQ ID NO: 309213 - RNA, 19 nt, Artificial Sequence
  Description of Artificial Sequence: Synthetic oligonucleotide
uagacugcguccuguauca

SEQ ID NO: 309214 - RNA, 19 nt, Artificial Sequence
  Description of Artificial Sequence: Synthetic oligonucleotide
uguaucaaaguaggagaag

SEQ ID NO: 309215 - RNA, 19 nt, Artificial Sequence
  Description of Artificial Sequence: Synthetic oligonucleotide
agaaugaggucguuguaga

SEQ ID NO: 309216 - RNA, 19 nt, Artificial Sequence
  Description of Artificial Sequence: Synthetic oligonucleotide
ucaagccggaccuugcggc

SEQ ID NO: 309217 - RNA, 19 nt, Artificial Sequence
  Description of Artificial Sequence: Synthetic oligonucleotide
aguugucacaggcagggcu

SEQ ID NO: 309218 - RNA, 19 nt, Artificial Sequence
  Description of Artificial Sequence: Synthetic oligonucleotide
guaggggucccucagcugc

SEQ ID NO: 309219 - RNA, 19 nt, Artificial Sequence
  Description of Artificial Sequence: Synthetic oligonucleotide
uauguaugcagaggggccc

SEQ ID NO: 309220 - RNA, 19 nt, Artificial Sequence
  Description of Artificial Sequence: Synthetic oligonucleotide
cucaaauaagggaccacug

SEQ ID NO: 309221 - RNA, 19 nt, Artificial Sequence
  Description of Artificial Sequence: Synthetic oligonucleotide
agugcgugcggcuuggugu

SEQ ID NO: 309222 - RNA, 19 nt, Artificial Sequence
  Description of Artificial Sequence: Synthetic oligonucleotide
accuccuaagaccacuguc

SEQ ID NO: 309223 - RNA, 19 nt, Artificial Sequence
  Description of Artificial Sequence: Synthetic oligonucleotide
gagaucucgagugcgugcg

SEQ ID NO: 309224 - RNA, 19 nt, Artificial Sequence
  Description of Artificial Sequence: Synthetic oligonucleotide
ugaacacccaagcuccugu

SEQ ID NO: 309225 - RNA, 19 nt, Artificial Sequence
  Description of Artificial Sequence: Synthetic oligonucleotide
uaccuuacugcccauggau

SEQ ID NO: 309226 - RNA, 19 nt, Artificial Sequence
  Description of Artificial Sequence: Synthetic oligonucleotide
augaggucguuguagaaaa

SEQ ID NO: 309227 - RNA, 19 nt, Artificial Sequence
  Description of Artificial Sequence: Synthetic oligonucleotide
caggacaggcucaagccgg

SEQ ID NO: 309228 - RNA, 19 nt, Artificial Sequence
  Description of Artificial Sequence: Synthetic oligonucleotide
uugcauagugaccagcgua

SEQ ID NO: 309229 - RNA, 19 nt, Artificial Sequence
  Description of Artificial Sequence: Synthetic oligonucleotide
ucugugacacugucuacga

SEQ ID NO: 309230 - RNA, 19 nt, Artificial Sequence
  Description of Artificial Sequence: Synthetic oligonucleotide
caggcuagaagaaggcccc

SEQ ID NO: 309231 - RNA, 19 nt, Artificial Sequence
  Description of Artificial Sequence: Synthetic oligonucleotide
aacuugcgcuccauagugc

SEQ ID NO: 309232 - RNA, 19 nt, Artificial Sequence
  Description of Artificial Sequence: Synthetic oligonucleotide
uuuagggccgcagccauca

SEQ ID NO: 309233 - RNA, 19 nt, Artificial Sequence
  Description of Artificial Sequence: Synthetic oligonucleotide
cagaaugaggucguuguag

SEQ ID NO: 309234 - RNA, 19 nt, Artificial Sequence
  Description of Artificial Sequence: Synthetic oligonucleotide
gacuccucggacucggcag

SEQ ID NO: 309235 - RNA, 19 nt, Artificial Sequence
  Description of Artificial Sequence: Synthetic oligonucleotide
cuugagaguccacagaaaa

SEQ ID NO: 309236 - RNA, 19 nt, Artificial Sequence
  Description of Artificial Sequence: Synthetic oligonucleotide
uuauuaagugagagugauc

SEQ ID NO: 309237 - RNA, 19 nt, Artificial Sequence
  Description of Artificial Sequence: Synthetic oligonucleotide
gccaauucugcucuuuagg

SEQ ID NO: 309238 - RNA, 19 nt, Artificial Sequence
  Description of Artificial Sequence: Synthetic oligonucleotide
aaaauccucucagucagua

SEQ ID NO: 309239 - RNA, 19 nt, Artificial Sequence
  Description of Artificial Sequence: Synthetic oligonucleotide
uucacaucagcuccauuuu

SEQ ID NO: 309240 - RNA, 19 nt, Artificial Sequence
  Description of Artificial Sequence: Synthetic oligonucleotide
caaaguaggagaagaggga

SEQ ID NO: 309241 - RNA, 19 nt, Artificial Sequence
  Description of Artificial Sequence: Synthetic oligonucleotide
gggaccguaccuuagagca

SEQ ID NO: 309242 - RNA, 19 nt, Artificial Sequence
  Description of Artificial Sequence: Synthetic oligonucleotide
ugcgauggucaguggaucc

SEQ ID NO: 309243 - RNA, 19 nt, Artificial Sequence
  Description of Artificial Sequence: Synthetic oligonucleotide
acugcuuagacugcguccu

SEQ ID NO: 309244 - RNA, 19 nt, Artificial Sequence
  Description of Artificial Sequence: Synthetic oligonucleotide
ccuaagaccacugucacug

SEQ ID NO: 309245 - RNA, 19 nt, Artificial Sequence
  Description of Artificial Sequence: Synthetic oligonucleotide
guugcuuuagguaugggcu

SEQ ID NO: 309246 - RNA, 19 nt, Artificial Sequence
  Description of Artificial Sequence: Synthetic oligonucleotide
aaaccagacagugccucug

SEQ ID NO: 309247 - RNA, 19 nt, Artificial Sequence
  Description of Artificial Sequence: Synthetic oligonucleotide
ugaacuccuggaugcaccu

SEQ ID NO: 309248 - RNA, 19 nt, Artificial Sequence
  Description of Artificial Sequence: Synthetic oligonucleotide
ucugugggccuucccagca

SEQ ID NO: 309249 - RNA, 19 nt, Artificial Sequence
  Description of Artificial Sequence: Synthetic oligonucleotide
gacagaccuggccagugug

SEQ ID NO: 309250 - RNA, 19 nt, Artificial Sequence
  Description of Artificial Sequence: Synthetic oligonucleotide
ucagggaccguaccuuaga

SEQ ID NO: 309251 - RNA, 19 nt, Artificial Sequence
  Description of Artificial Sequence: Synthetic oligonucleotide
agcauuaaagcagccagaa

SEQ ID NO: 309252 - RNA, 19 nt, Artificial Sequence
  Description of Artificial Sequence: Synthetic oligonucleotide
auggaucuaggcucucaag

SEQ ID NO: 309253 - RNA, 19 nt, Artificial Sequence
  Description of Artificial Sequence: Synthetic oligonucleotide
ggaggaauaagccaauucu

SEQ ID NO: 309254 - RNA, 19 nt, Artificial Sequence
  Description of Artificial Sequence: Synthetic oligonucleotide
ucuuuagggccgcagccau

SEQ ID NO: 309255 - RNA, 19 nt, Artificial Sequence
  Description of Artificial Sequence: Synthetic oligonucleotide
gacccaaguggccagccac

SEQ ID NO: 309256 - RNA, 19 nt, Artificial Sequence
  Description of Artificial Sequence: Synthetic oligonucleotide
ccaggcuagaagaaggccc

SEQ ID NO: 309257 - RNA, 19 nt, Artificial Sequence
  Description of Artificial Sequence: Synthetic oligonucleotide
gcagugaacacccaagcuc

SEQ ID NO: 309258 - RNA, 19 nt, Artificial Sequence
  Description of Artificial Sequence: Synthetic oligonucleotide
cauagugaccagcguagug

SEQ ID NO: 309259 - RNA, 19 nt, Artificial Sequence
  Description of Artificial Sequence: Synthetic oligonucleotide
ugcguccuguaucaaagua

SEQ ID NO: 309260 - RNA, 19 nt, Artificial Sequence
  Description of Artificial Sequence: Synthetic oligonucleotide
cuugaacugcgauggucag

SEQ ID NO: 309261 - RNA, 19 nt, Artificial Sequence
  Description of Artificial Sequence: Synthetic oligonucleotide
uugcuuuagguaugggcuc

SEQ ID NO: 309262 - RNA, 19 nt, Artificial Sequence
  Description of Artificial Sequence: Synthetic oligonucleotide
gaggucguuguagaaaauc

SEQ ID NO: 309263 - RNA, 19 nt, Artificial Sequence
  Description of Artificial Sequence: Synthetic oligonucleotide
cuuuagcagcucuggcucc

SEQ ID NO: 309264 - RNA, 19 nt, Artificial Sequence
  Description of Artificial Sequence: Synthetic oligonucleotide
aacaagggcuccauaguau

SEQ ID NO: 309265 - RNA, 19 nt, Artificial Sequence
  Description of Artificial Sequence: Synthetic oligonucleotide
cucaagccggaccuugcgg

SEQ ID NO: 309266 - RNA, 19 nt, Artificial Sequence
  Description of Artificial Sequence: Synthetic oligonucleotide
acacccaagcuccugugga

SEQ ID NO: 309267 - RNA, 19 nt, Artificial Sequence
  Description of Artificial Sequence: Synthetic oligonucleotide
uguaggacugcugccuggc

SEQ ID NO: 309268 - RNA, 19 nt, Artificial Sequence
  Description of Artificial Sequence: Synthetic oligonucleotide
aagagggagucucggcgga

SEQ ID NO: 309269 - RNA, 19 nt, Artificial Sequence
  Description of Artificial Sequence: Synthetic oligonucleotide
gauggaucuaggcucucaa

SEQ ID NO: 309270 - RNA, 19 nt, Artificial Sequence
  Description of Artificial Sequence: Synthetic oligonucleotide
gucguuguagaaaauccuc

SEQ ID NO: 309271 - RNA, 19 nt, Artificial Sequence
  Description of Artificial Sequence: Synthetic oligonucleotide
auagugccagcugaggaca

SEQ ID NO: 309272 - RNA, 19 nt, Artificial Sequence
  Description of Artificial Sequence: Synthetic oligonucleotide
cagcucacguacaucugcc

SEQ ID NO: 309273 - RNA, 19 nt, Artificial Sequence
  Description of Artificial Sequence: Synthetic oligonucleotide
cagcguagugcccuugacc

SEQ ID NO: 309274 - RNA, 19 nt, Artificial Sequence
  Description of Artificial Sequence: Synthetic oligonucleotide
agcauggugcaagggugcc

SEQ ID NO: 309275 - RNA, 19 nt, Artificial Sequence
  Description of Artificial Sequence: Synthetic oligonucleotide
aaggcaggauggaucuagg

SEQ ID NO: 309276 - RNA, 19 nt, Artificial Sequence
  Description of Artificial Sequence: Synthetic oligonucleotide
cguccuguaucaaaguagg

SEQ ID NO: 309277 - RNA, 19 nt, Artificial Sequence
  Description of Artificial Sequence: Synthetic oligonucleotide
ucucggcggaacuugcgcu

SEQ ID NO: 309278 - RNA, 19 nt, Artificial Sequence
  Description of Artificial Sequence: Synthetic oligonucleotide
ggaucuaggcucucaagca

SEQ ID NO: 309279 - RNA, 19 nt, Artificial Sequence
  Description of Artificial Sequence: Synthetic oligonucleotide
ccuuacugcccauggaugc

SEQ ID NO: 309280 - RNA, 19 nt, Artificial Sequence
  Description of Artificial Sequence: Synthetic oligonucleotide
cauauuuguccuugaucca

SEQ ID NO: 309281 - RNA, 19 nt, Artificial Sequence
  Description of Artificial Sequence: Synthetic oligonucleotide
cuauuuccaagcucacaca

SEQ ID NO: 309282 - RNA, 19 nt, Artificial Sequence
  Description of Artificial Sequence: Synthetic oligonucleotide
cuccauagugccagcugag

SEQ ID NO: 309283 - RNA, 19 nt, Artificial Sequence
  Description of Artificial Sequence: Synthetic oligonucleotide
cuaccuccuaagaccacug

SEQ ID NO: 309284 - RNA, 19 nt, Artificial Sequence
  Description of Artificial Sequence: Synthetic oligonucleotide
agacuaccuccuaagacca

SEQ ID NO: 309285 - RNA, 19 nt, Artificial Sequence
  Description of Artificial Sequence: Synthetic oligonucleotide
guaccuuagagcagugaac

SEQ ID NO: 309286 - RNA, 19 nt, Artificial Sequence
  Description of Artificial Sequence: Synthetic oligonucleotide
caagccggaccuugcggcg

SEQ ID NO: 309287 - RNA, 19 nt, Artificial Sequence
  Description of Artificial Sequence: Synthetic oligonucleotide
uguggaugccugagcacuc

SEQ ID NO: 309288 - RNA, 19 nt, Artificial Sequence
  Description of Artificial Sequence: Synthetic oligonucleotide
ugcuugaacugcgaugguc

SEQ ID NO: 309289 - RNA, 19 nt, Artificial Sequence
  Description of Artificial Sequence: Synthetic oligonucleotide
gaugcuggcccagcgagga

SEQ ID NO: 309290 - RNA, 19 nt, Artificial Sequence
  Description of Artificial Sequence: Synthetic oligonucleotide
aagcccaaccuggaugcug

SEQ ID NO: 309291 - RNA, 19 nt, Artificial Sequence
  Description of Artificial Sequence: Synthetic oligonucleotide
ggcgcuggcacuucugugc

SEQ ID NO: 309292 - RNA, 19 nt, Artificial Sequence
  Description of Artificial Sequence: Synthetic oligonucleotide
uccuaagaccacugucacu

SEQ ID NO: 309293 - RNA, 19 nt, Artificial Sequence
  Description of Artificial Sequence: Synthetic oligonucleotide
cagggagaucucgagugcg

SEQ ID NO: 309294 - RNA, 19 nt, Artificial Sequence
  Description of Artificial Sequence: Synthetic oligonucleotide
uuuuaaugccuggucccuc

SEQ ID NO: 309295 - RNA, 19 nt, Artificial Sequence
  Description of Artificial Sequence: Synthetic oligonucleotide
cuuuagguaugggcucugg

SEQ ID NO: 309296 - RNA, 19 nt, Artificial Sequence
  Description of Artificial Sequence: Synthetic oligonucleotide
ugggccaaaguuccaccuc

SEQ ID NO: 309297 - RNA, 19 nt, Artificial Sequence
  Description of Artificial Sequence: Synthetic oligonucleotide
agaucucgagugcgugcgg

SEQ ID NO: 309298 - RNA, 19 nt, Artificial Sequence
  Description of Artificial Sequence: Synthetic oligonucleotide
ucacugagcgagguacuca

SEQ ID NO: 309299 - RNA, 19 nt, Artificial Sequence
  Description of Artificial Sequence: Synthetic oligonucleotide
auucugcucuuuagggccg

SEQ ID NO: 309300 - RNA, 19 nt, Artificial Sequence
  Description of Artificial Sequence: Synthetic oligonucleotide
gagacgccugcguccagcc

SEQ ID NO: 309301 - RNA, 19 nt, Artificial Sequence
  Description of Artificial Sequence: Synthetic oligonucleotide
cagggaccguaccuuagag

SEQ ID NO: 309302 - RNA, 19 nt, Artificial Sequence
  Description of Artificial Sequence: Synthetic oligonucleotide
gaagggagugggauuccug

SEQ ID NO: 309303 - RNA, 19 nt, Artificial Sequence
  Description of Artificial Sequence: Synthetic oligonucleotide
cugcguccagccugggugg

SEQ ID NO: 309304 - RNA, 19 nt, Artificial Sequence
  Description of Artificial Sequence: Synthetic oligonucleotide
ccaaaguuccaccucccag

SEQ ID NO: 309305 - RNA, 19 nt, Artificial Sequence
  Description of Artificial Sequence: Synthetic oligonucleotide
ugagacgccugcguccagc

SEQ ID NO: 309306 - RNA, 19 nt, Artificial Sequence
  Description of Artificial Sequence: Synthetic oligonucleotide
aagccggaccuugcggcgg

SEQ ID NO: 309307 - RNA, 19 nt, Artificial Sequence
  Description of Artificial Sequence: Synthetic oligonucleotide
ugaggggcuagggucuuca

SEQ ID NO: 309308 - RNA, 19 nt, Artificial Sequence
  Description of Artificial Sequence: Synthetic oligonucleotide
ugagcgagguacucagguu

SEQ ID NO: 309309 - RNA, 19 nt, Artificial Sequence
  Description of Artificial Sequence: Synthetic oligonucleotide
gaacugcgauggucagugg

SEQ ID NO: 309310 - RNA, 19 nt, Artificial Sequence
  Description of Artificial Sequence: Synthetic oligonucleotide
ggaacuacuggcuguaggu

SEQ ID NO: 309311 - RNA, 19 nt, Artificial Sequence
  Description of Artificial Sequence: Synthetic oligonucleotide
ggcaguauuugcauaguga

SEQ ID NO: 309312 - RNA, 19 nt, Artificial Sequence
  Description of Artificial Sequence: Synthetic oligonucleotide
uugauucccugggugggcu

SEQ ID NO: 309313 - RNA, 19 nt, Artificial Sequence
  Description of Artificial Sequence: Synthetic oligonucleotide
ugcuuagacugcguccugu

SEQ ID NO: 309314 - RNA, 19 nt, Artificial Sequence
  Description of Artificial Sequence: Synthetic oligonucleotide
ccugcguccagccugggug

SEQ ID NO: 309315 - RNA, 19 nt, Artificial Sequence
  Description of Artificial Sequence: Synthetic oligonucleotide
ggagaucucgagugcgugc

SEQ ID NO: 309316 - RNA, 19 nt, Artificial Sequence
  Description of Artificial Sequence: Synthetic oligonucleotide
agguaugggcucuggccca

SEQ ID NO: 309317 - RNA, 19 nt, Artificial Sequence
  Description of Artificial Sequence: Synthetic oligonucleotide
agcucacguacaucugcca

SEQ ID NO: 309318 - RNA, 19 nt, Artificial Sequence
  Description of Artificial Sequence: Synthetic oligonucleotide
gcguccuguaucaaaguag

SEQ ID NO: 309319 - RNA, 19 nt, Artificial Sequence
  Description of Artificial Sequence: Synthetic oligonucleotide
gacugcguccuguaucaaa

SEQ ID NO: 309320 - RNA, 19 nt, Artificial Sequence
  Description of Artificial Sequence: Synthetic oligonucleotide
ugaggucguuguagaaaau

SEQ ID NO: 309321 - RNA, 19 nt, Artificial Sequence
  Description of Artificial Sequence: Synthetic oligonucleotide
ucgccacacuggcuguugc

SEQ ID NO: 309322 - RNA, 19 nt, Artificial Sequence
  Description of Artificial Sequence: Synthetic oligonucleotide
gcuugaacugcgaugguca

SEQ ID NO: 309323 - RNA, 19 nt, Artificial Sequence
  Description of Artificial Sequence: Synthetic oligonucleotide
uugaacugcgauggucagu

SEQ ID NO: 309324 - RNA, 19 nt, Artificial Sequence
  Description of Artificial Sequence: Synthetic oligonucleotide
cagcguuugcugcuugaac

SEQ ID NO: 309325 - RNA, 19 nt, Artificial Sequence
  Description of Artificial Sequence: Synthetic oligonucleotide
ggagaaggcaggauggauc

SEQ ID NO: 309326 - RNA, 19 nt, Artificial Sequence
  Description of Artificial Sequence: Synthetic oligonucleotide
cugagcauuaaagcagcca

SEQ ID NO: 309327 - RNA, 19 nt, Artificial Sequence
  Description of Artificial Sequence: Synthetic oligonucleotide
guugauucccugggugggc

SEQ ID NO: 309328 - RNA, 19 nt, Artificial Sequence
  Description of Artificial Sequence: Synthetic oligonucleotide
gcuagaugaggggcuaggg

SEQ ID NO: 309329 - RNA, 19 nt, Artificial Sequence
  Description of Artificial Sequence: Synthetic oligonucleotide
ugcgguacugcagcucugu

SEQ ID NO: 309330 - RNA, 19 nt, Artificial Sequence
  Description of Artificial Sequence: Synthetic oligonucleotide
caaccuggaugcugggguc

SEQ ID NO: 309331 - RNA, 19 nt, Artificial Sequence
  Description of Artificial Sequence: Synthetic oligonucleotide
gugcgugcggcuuggugug

SEQ ID NO: 309332 - RNA, 19 nt, Artificial Sequence
  Description of Artificial Sequence: Synthetic oligonucleotide
acugcgauggucaguggau

SEQ ID NO: 309333 - RNA, 19 nt, Artificial Sequence
  Description of Artificial Sequence: Synthetic oligonucleotide
gcguuugcugcuugaacug

SEQ ID NO: 309334 - RNA, 19 nt, Artificial Sequence
  Description of Artificial Sequence: Synthetic oligonucleotide
acccaaguggccagccacg

SEQ ID NO: 309335 - RNA, 19 nt, Artificial Sequence
  Description of Artificial Sequence: Synthetic oligonucleotide
cuccuggaugcaccugcgg

SEQ ID NO: 309336 - RNA, 19 nt, Artificial Sequence
  Description of Artificial Sequence: Synthetic oligonucleotide
gaguggggacuccagaaau

SEQ ID NO: 309337 - RNA, 19 nt, Artificial Sequence
  Description of Artificial Sequence: Synthetic oligonucleotide
gccucuauccuggaacucc

SEQ ID NO: 309338 - RNA, 19 nt, Artificial Sequence
  Description of Artificial Sequence: Synthetic oligonucleotide
ccaguugacuucagcuccg

SEQ ID NO: 309339 - RNA, 19 nt, Artificial Sequence
  Description of Artificial Sequence: Synthetic oligonucleotide
cucggcggaacuugcgcuc

SEQ ID NO: 309340 - RNA, 19 nt, Artificial Sequence
  Description of Artificial Sequence: Synthetic oligonucleotide
gcucaagccggaccuugcg

SEQ ID NO: 309341 - RNA, 19 nt, Artificial Sequence
  Description of Artificial Sequence: Synthetic oligonucleotide
ugagggcgcuggcacuucu

SEQ ID NO: 309342 - RNA, 19 nt, Artificial Sequence
  Description of Artificial Sequence: Synthetic oligonucleotide
cugugacacugucuacgac

SEQ ID NO: 309343 - RNA, 19 nt, Artificial Sequence
  Description of Artificial Sequence: Synthetic oligonucleotide
uucccgggcuggugcagag

SEQ ID NO: 309344 - RNA, 19 nt, Artificial Sequence
  Description of Artificial Sequence: Synthetic oligonucleotide
auagacagaccuggccagu

SEQ ID NO: 309345 - RNA, 19 nt, Artificial Sequence
  Description of Artificial Sequence: Synthetic oligonucleotide
gggaaguaggggcgugagg

SEQ ID NO: 309346 - RNA, 19 nt, Artificial Sequence
  Description of Artificial Sequence: Synthetic oligonucleotide
uuuguccugccuggaacua

SEQ ID NO: 309347 - RNA, 19 nt, Artificial Sequence
  Description of Artificial Sequence: Synthetic oligonucleotide
gagagugaucagagcagga

SEQ ID NO: 309348 - RNA, 19 nt, Artificial Sequence
  Description of Artificial Sequence: Synthetic oligonucleotide
gaccuaaacaagggcucca

SEQ ID NO: 309349 - RNA, 19 nt, Artificial Sequence
  Description of Artificial Sequence: Synthetic oligonucleotide
cucgagugcgugcggcuug

SEQ ID NO: 309350 - RNA, 19 nt, Artificial Sequence
  Description of Artificial Sequence: Synthetic oligonucleotide
aaagcccaaccuggaugcu

SEQ ID NO: 309351 - RNA, 19 nt, Artificial Sequence
  Description of Artificial Sequence: Synthetic oligonucleotide
gucagggaccguaccuuag

SEQ ID NO: 309352 - RNA, 19 nt, Artificial Sequence
  Description of Artificial Sequence: Synthetic oligonucleotide
gaggggcuagggucuucag

SEQ ID NO: 309353 - RNA, 19 nt, Artificial Sequence
  Description of Artificial Sequence: Synthetic oligonucleotide
caagggugcccggccaagg

SEQ ID NO: 309354 - RNA, 19 nt, Artificial Sequence
  Description of Artificial Sequence: Synthetic oligonucleotide
ggcuagaugaggggcuagg

SEQ ID NO: 309355 - RNA, 19 nt, Artificial Sequence
  Description of Artificial Sequence: Synthetic oligonucleotide
gugaacacccaagcuccug

SEQ ID NO: 309356 - RNA, 19 nt, Artificial Sequence
  Description of Artificial Sequence: Synthetic oligonucleotide
agccucuauccuggaacuc

SEQ ID NO: 309357 - RNA, 19 nt, Artificial Sequence
  Description of Artificial Sequence: Synthetic oligonucleotide
acuacuggcuguagguuuu

SEQ ID NO: 309358 - RNA, 19 nt, Artificial Sequence
  Description of Artificial Sequence: Synthetic oligonucleotide
gaccguaccuuagagcagu

SEQ ID NO: 309359 - RNA, 19 nt, Artificial Sequence
  Description of Artificial Sequence: Synthetic oligonucleotide
cuaccuuacugcccaugga

SEQ ID NO: 309360 - RNA, 19 nt, Artificial Sequence
  Description of Artificial Sequence: Synthetic oligonucleotide
gcuagggucuucaggaaca

SEQ ID NO: 309361 - RNA, 19 nt, Artificial Sequence
  Description of Artificial Sequence: Synthetic oligonucleotide
gccacguggccuugagacg

SEQ ID NO: 309362 - RNA, 19 nt, Artificial Sequence
  Description of Artificial Sequence: Synthetic oligonucleotide
accuaaacaagggcuccau

SEQ ID NO: 309363 - RNA, 19 nt, Artificial Sequence
  Description of Artificial Sequence: Synthetic oligonucleotide
ccacguggccuugagacgc

SEQ ID NO: 309364 - RNA, 19 nt, Artificial Sequence
  Description of Artificial Sequence: Synthetic oligonucleotide
agcgagguacucagguuga

SEQ ID NO: 309365 - RNA, 19 nt, Artificial Sequence
  Description of Artificial Sequence: Synthetic oligonucleotide
guugggaugggcccacagu

SEQ ID NO: 309366 - RNA, 19 nt, Artificial Sequence
  Description of Artificial Sequence: Synthetic oligonucleotide
uugagacgccugcguccag

SEQ ID NO: 309367 - RNA, 19 nt, Artificial Sequence
  Description of Artificial Sequence: Synthetic oligonucleotide
ccauggaugcucccagggc

SEQ ID NO: 309368 - RNA, 19 nt, Artificial Sequence
  Description of Artificial Sequence: Synthetic oligonucleotide
gaagagcugggaucaggau

SEQ ID NO: 309369 - RNA, 19 nt, Artificial Sequence
  Description of Artificial Sequence: Synthetic oligonucleotide
agggcaguauuugcauagu

SEQ ID NO: 309370 - RNA, 19 nt, Artificial Sequence
  Description of Artificial Sequence: Synthetic oligonucleotide
aucagaggcccagcccgag

SEQ ID NO: 309371 - RNA, 19 nt, Artificial Sequence
  Description of Artificial Sequence: Synthetic oligonucleotide
cacguggccuugagacgcc

SEQ ID NO: 309372 - RNA, 19 nt, Artificial Sequence
  Description of Artificial Sequence: Synthetic oligonucleotide
cugcgauggucaguggauc

SEQ ID NO: 309373 - RNA, 19 nt, Artificial Sequence
  Description of Artificial Sequence: Synthetic oligonucleotide
ggaacuugcgcuccauagu

SEQ ID NO: 309374 - RNA, 19 nt, Artificial Sequence
  Description of Artificial Sequence: Synthetic oligonucleotide
cuacgacagagccugugcu

SEQ ID NO: 309375 - RNA, 19 nt, Artificial Sequence
  Description of Artificial Sequence: Synthetic oligonucleotide
ugucuacgacagagccugu

SEQ ID NO: 309376 - RNA, 19 nt, Artificial Sequence
  Description of Artificial Sequence: Synthetic oligonucleotide
cuggaacuacuggcuguag

SEQ ID NO: 309377 - RNA, 19 nt, Artificial Sequence
  Description of Artificial Sequence: Synthetic oligonucleotide
gcgugaggggagcugugag

SEQ ID NO: 309378 - RNA, 19 nt, Artificial Sequence
  Description of Artificial Sequence: Synthetic oligonucleotide
ccacuggaccuaucagagg

SEQ ID NO: 309379 - RNA, 19 nt, Artificial Sequence
  Description of Artificial Sequence: Synthetic oligonucleotide
ucucgagugcgugcggcuu

SEQ ID NO: 309380 - RNA, 19 nt, Artificial Sequence
  Description of Artificial Sequence: Synthetic oligonucleotide
aggauggaucuaggcucuc

SEQ ID NO: 309381 - RNA, 19 nt, Artificial Sequence
  Description of Artificial Sequence: Synthetic oligonucleotide
cguaccuuagagcagugaa

SEQ ID NO: 309382 - RNA, 19 nt, Artificial Sequence
  Description of Artificial Sequence: Synthetic oligonucleotide
caggauggaucuaggcucu

SEQ ID NO: 309383 - RNA, 19 nt, Artificial Sequence
  Description of Artificial Sequence: Synthetic oligonucleotide
gggagaucucgagugcgug

SEQ ID NO: 309384 - RNA, 19 nt, Artificial Sequence
  Description of Artificial Sequence: Synthetic oligonucleotide
gacuaccuccuaagaccac

SEQ ID NO: 309385 - RNA, 19 nt, Artificial Sequence
  Description of Artificial Sequence: Synthetic oligonucleotide
gcgucucggggcuucccgg

SEQ ID NO: 309386 - RNA, 19 nt, Artificial Sequence
  Description of Artificial Sequence: Synthetic oligonucleotide
gucgccacacuggcuguug

SEQ ID NO: 309387 - RNA, 19 nt, Artificial Sequence
  Description of Artificial Sequence: Synthetic oligonucleotide
ugcccggccaaggcugucu

SEQ ID NO: 309388 - RNA, 19 nt, Artificial Sequence
  Description of Artificial Sequence: Synthetic oligonucleotide
acgccugcguccagccugg

SEQ ID NO: 309389 - RNA, 19 nt, Artificial Sequence
  Description of Artificial Sequence: Synthetic oligonucleotide
caccaucaaagcccaaccu

SEQ ID NO: 309390 - RNA, 19 nt, Artificial Sequence
  Description of Artificial Sequence: Synthetic oligonucleotide
ggucguuguagaaaauccu

SEQ ID NO: 309391 - RNA, 19 nt, Artificial Sequence
  Description of Artificial Sequence: Synthetic oligonucleotide
ucggggcuucccgggcugg

SEQ ID NO: 309392 - RNA, 19 nt, Artificial Sequence
  Description of Artificial Sequence: Synthetic oligonucleotide
gaacuacuggcuguagguu

SEQ ID NO: 309393 - RNA, 19 nt, Artificial Sequence
  Description of Artificial Sequence: Synthetic oligonucleotide
gagggcgcuggcacuucug

SEQ ID NO: 309394 - RNA, 19 nt, Artificial Sequence
  Description of Artificial Sequence: Synthetic oligonucleotide
gcgcuggcacuucugugcc

SEQ ID NO: 309395 - RNA, 19 nt, Artificial Sequence
  Description of Artificial Sequence: Synthetic oligonucleotide
uuagggccgcagccaucaa

SEQ ID NO: 309396 - RNA, 19 nt, Artificial Sequence
  Description of Artificial Sequence: Synthetic oligonucleotide
ggaccguaccuuagagcag

SEQ ID NO: 309397 - RNA, 19 nt, Artificial Sequence
  Description of Artificial Sequence: Synthetic oligonucleotide
cuccucggacucggcagcc

SEQ ID NO: 309398 - RNA, 19 nt, Artificial Sequence
  Description of Artificial Sequence: Synthetic oligonucleotide
guaugggcucuggcccagg

SEQ ID NO: 309399 - RNA, 19 nt, Artificial Sequence
  Description of Artificial Sequence: Synthetic oligonucleotide
ggaucaggaugguccuuga

SEQ ID NO: 309400 - RNA, 19 nt, Artificial Sequence
  Description of Artificial Sequence: Synthetic oligonucleotide
cuccgugggccagcgcugc

SEQ ID NO: 309401 - RNA, 19 nt, Artificial Sequence
  Description of Artificial Sequence: Synthetic oligonucleotide
ugaccagcguagugcccuu

SEQ ID NO: 309402 - RNA, 19 nt, Artificial Sequence
  Description of Artificial Sequence: Synthetic oligonucleotide
cuuagacugcguccuguau

SEQ ID NO: 309403 - RNA, 19 nt, Artificial Sequence
  Description of Artificial Sequence: Synthetic oligonucleotide
gguaugggcucuggcccag

SEQ ID NO: 309404 - RNA, 19 nt, Artificial Sequence
  Description of Artificial Sequence: Synthetic oligonucleotide
ggcccagcgaggaucuggc

SEQ ID NO: 309405 - RNA, 19 nt, Artificial Sequence
  Description of Artificial Sequence: Synthetic oligonucleotide
accuugcggcgggaaguag

SEQ ID NO: 309406 - RNA, 19 nt, Artificial Sequence
  Description of Artificial Sequence: Synthetic oligonucleotide
cuuacugcccauggaugcu

SEQ ID NO: 309407 - RNA, 19 nt, Artificial Sequence
  Description of Artificial Sequence: Synthetic oligonucleotide
gaugcucccagggcaguau

SEQ ID NO: 309408 - RNA, 19 nt, Artificial Sequence
  Description of Artificial Sequence: Synthetic oligonucleotide
gcuuagacugcguccugua

SEQ ID NO: 309409 - RNA, 19 nt, Artificial Sequence
  Description of Artificial Sequence: Synthetic oligonucleotide
ugcguccagccugggugga

SEQ ID NO: 309410 - RNA, 19 nt, Artificial Sequence
  Description of Artificial Sequence: Synthetic oligonucleotide
cguuugcugcuugaacugc

SEQ ID NO: 309411 - RNA, 19 nt, Artificial Sequence
  Description of Artificial Sequence: Synthetic oligonucleotide
ccaaccuggaugcuggggu

SEQ ID NO: 309412 - RNA, 19 nt, Artificial Sequence
  Description of Artificial Sequence: Synthetic oligonucleotide
accguaccuuagagcagug

SEQ ID NO: 309413 - RNA, 19 nt, Artificial Sequence
  Description of Artificial Sequence: Synthetic oligonucleotide
gaccuugcggcgggaagua

SEQ ID NO: 309414 - RNA, 19 nt, Artificial Sequence
  Description of Artificial Sequence: Synthetic oligonucleotide
ugcgugcggcuuggugugc

SEQ ID NO: 309415 - RNA, 19 nt, Artificial Sequence
  Description of Artificial Sequence: Synthetic oligonucleotide
agagggagucucggcggaa

SEQ ID NO: 309416 - RNA, 19 nt, Artificial Sequence
  Description of Artificial Sequence: Synthetic oligonucleotide
cccgaggagugaagcuuag

SEQ ID NO: 309417 - RNA, 19 nt, Artificial Sequence
  Description of Artificial Sequence: Synthetic oligonucleotide
ggacccaaguggccagcca

SEQ ID NO: 309418 - RNA, 19 nt, Artificial Sequence
  Description of Artificial Sequence: Synthetic oligonucleotide
cagcgaggaucuggcuggc

SEQ ID NO: 309419 - RNA, 19 nt, Artificial Sequence
  Description of Artificial Sequence: Synthetic oligonucleotide
ccgaggagugaagcuuagg

SEQ ID NO: 309420 - RNA, 19 nt, Artificial Sequence
  Description of Artificial Sequence: Synthetic oligonucleotide
acguggccuugagacgccu

SEQ ID NO: 309421 - RNA, 19 nt, Artificial Sequence
  Description of Artificial Sequence: Synthetic oligonucleotide
caagggagucagaggcccu

SEQ ID NO: 309422 - RNA, 19 nt, Artificial Sequence
  Description of Artificial Sequence: Synthetic oligonucleotide
cagcgucucggggcuuccc

SEQ ID NO: 309423 - RNA, 19 nt, Artificial Sequence
  Description of Artificial Sequence: Synthetic oligonucleotide
gggcuagggucuucaggaa

SEQ ID NO: 309424 - RNA, 19 nt, Artificial Sequence
  Description of Artificial Sequence: Synthetic oligonucleotide
agacugcguccuguaucaa

SEQ ID NO: 309425 - RNA, 19 nt, Artificial Sequence
  Description of Artificial Sequence: Synthetic oligonucleotide
ggcgugaggggagcuguga

SEQ ID NO: 309426 - RNA, 19 nt, Artificial Sequence
  Description of Artificial Sequence: Synthetic oligonucleotide
ccuaaacaagggcuccaua

SEQ ID NO: 309427 - RNA, 19 nt, Artificial Sequence
  Description of Artificial Sequence: Synthetic oligonucleotide
gggccgcagccaucaagca

SEQ ID NO: 309428 - RNA, 19 nt, Artificial Sequence
  Description of Artificial Sequence: Synthetic oligonucleotide
gaugaggggcuagggucuu

SEQ ID NO: 309429 - RNA, 19 nt, Artificial Sequence
  Description of Artificial Sequence: Synthetic oligonucleotide
gugagggcgcuggcacuuc

SEQ ID NO: 309430 - RNA, 19 nt, Artificial Sequence
  Description of Artificial Sequence: Synthetic oligonucleotide
ccccucaaauaagggacca

SEQ ID NO: 309431 - RNA, 19 nt, Artificial Sequence
  Description of Artificial Sequence: Synthetic oligonucleotide
gcgugcggcuuggugugcc

SEQ ID NO: 309432 - RNA, 19 nt, Artificial Sequence
  Description of Artificial Sequence: Synthetic oligonucleotide
cugguucauggugcuauuu

SEQ ID NO: 309433 - RNA, 19 nt, Artificial Sequence
  Description of Artificial Sequence: Synthetic oligonucleotide
ggcgaagcagugugacaau

SEQ ID NO: 309434 - RNA, 19 nt, Artificial Sequence
  Description of Artificial Sequence: Synthetic oligonucleotide
gcauagugaccagcguagu

SEQ ID NO: 309435 - RNA, 19 nt, Artificial Sequence
  Description of Artificial Sequence: Synthetic oligonucleotide
gccaggcgaagcaguguga

SEQ ID NO: 309436 - RNA, 19 nt, Artificial Sequence
  Description of Artificial Sequence: Synthetic oligonucleotide
gcgggaaguaggggcguga

SEQ ID NO: 309437 - RNA, 19 nt, Artificial Sequence
  Description of Artificial Sequence: Synthetic oligonucleotide
gcguagugcccuugaccua

SEQ ID NO: 309438 - RNA, 19 nt, Artificial Sequence
  Description of Artificial Sequence: Synthetic oligonucleotide
caccugcgguacugcagcu

SEQ ID NO: 309439 - RNA, 19 nt, Artificial Sequence
  Description of Artificial Sequence: Synthetic oligonucleotide
gggauuccugccagcccaa

SEQ ID NO: 309440 - RNA, 19 nt, Artificial Sequence
  Description of Artificial Sequence: Synthetic oligonucleotide
ccggguaggcuggggucag

SEQ ID NO: 309441 - RNA, 19 nt, Artificial Sequence
  Description of Artificial Sequence: Synthetic oligonucleotide
ccaugcgggccaggcgaag

SEQ ID NO: 309442 - RNA, 19 nt, Artificial Sequence
  Description of Artificial Sequence: Synthetic oligonucleotide
ccagcgucucggggcuucc

SEQ ID NO: 309443 - RNA, 19 nt, Artificial Sequence
  Description of Artificial Sequence: Synthetic oligonucleotide
ccguaccuuagagcaguga

SEQ ID NO: 309444 - RNA, 19 nt, Artificial Sequence
  Description of Artificial Sequence: Synthetic oligonucleotide
ccgggcuggugcagagguc

SEQ ID NO: 309445 - RNA, 19 nt, Artificial Sequence
  Description of Artificial Sequence: Synthetic oligonucleotide
ccccaaauguggggcuuca

SEQ ID NO: 309446 - RNA, 19 nt, Artificial Sequence
  Description of Artificial Sequence: Synthetic oligonucleotide
ggugcccggccaaggcugu

SEQ ID NO: 309447 - RNA, 19 nt, Artificial Sequence
  Description of Artificial Sequence: Synthetic oligonucleotide
cgugcggcuuggugugcca

SEQ ID NO: 309448 - RNA, 19 nt, Artificial Sequence
  Description of Artificial Sequence: Synthetic oligonucleotide
ccggccugccaggcccuag

SEQ ID NO: 309449 - RNA, 19 nt, Artificial Sequence
  Description of Artificial Sequence: Synthetic oligonucleotide
gcccagcgaggaucuggcu

SEQ ID NO: 309450 - RNA, 19 nt, Artificial Sequence
  Description of Artificial Sequence: Synthetic oligonucleotide
gcgagguacucagguugau

SEQ ID NO: 309451 - RNA, 19 nt, Artificial Sequence
  Description of Artificial Sequence: Synthetic oligonucleotide
gcguccagccuggguggaa

SEQ ID NO: 309452 - RNA, 19 nt, Artificial Sequence
  Description of Artificial Sequence: Synthetic oligonucleotide
caggcucaagccggaccuu

SEQ ID NO: 309453 - RNA, 19 nt, Artificial Sequence
  Description of Artificial Sequence: Synthetic oligonucleotide
ccggaccuugcggcgggaa

SEQ ID NO: 309454 - RNA, 19 nt, Artificial Sequence
  Description of Artificial Sequence: Synthetic oligonucleotide
gccggaccuugcggcggga

SEQ ID NO: 309455 - RNA, 19 nt, Artificial Sequence
  Description of Artificial Sequence: Synthetic oligonucleotide
cgccugcguccagccuggg

SEQ ID NO: 309456 - RNA, 19 nt, Artificial Sequence
  Description of Artificial Sequence: Synthetic oligonucleotide
aauaauacggagcugagcc

SEQ ID NO: 309457 - RNA, 19 nt, Artificial Sequence
  Description of Artificial Sequence: Synthetic oligonucleotide
ucuauauuaaaucagacug

SEQ ID NO: 309458 - RNA, 19 nt, Artificial Sequence
  Description of Artificial Sequence: Synthetic oligonucleotide
agcauaguaaauuuuaaac

SEQ ID NO: 309459 - RNA, 19 nt, Artificial Sequence
  Description of Artificial Sequence: Synthetic oligonucleotide
aauuuagugucauauaucu

SEQ ID NO: 309460 - RNA, 19 nt, Artificial Sequence
  Description of Artificial Sequence: Synthetic oligonucleotide
uuucauaccauaacuaggg

SEQ ID NO: 309461 - RNA, 19 nt, Artificial Sequence
  Description of Artificial Sequence: Synthetic oligonucleotide
acuaagaaagaccaaaggg

SEQ ID NO: 309462 - RNA, 19 nt, Artificial Sequence
  Description of Artificial Sequence: Synthetic oligonucleotide
cuaagaaagaccaaagggg

SEQ ID NO: 309463 - RNA, 19 nt, Artificial Sequence
  Description of Artificial Sequence: Synthetic oligonucleotide
aaauauauaccuagcaggc

SEQ ID NO: 309464 - RNA, 19 nt, Artificial Sequence
  Description of Artificial Sequence: Synthetic oligonucleotide
agcagaaugauuuuaaaag

SEQ ID NO: 309465 - RNA, 19 nt, Artificial Sequence
  Description of Artificial Sequence: Synthetic oligonucleotide
aauagaugaauucagcaga

SEQ ID NO: 309466 - RNA, 19 nt, Artificial Sequence
  Description of Artificial Sequence: Synthetic oligonucleotide
aagacucccgcguagauac

SEQ ID NO: 309467 - RNA, 19 nt, Artificial Sequence
  Description of Artificial Sequence: Synthetic oligonucleotide
aagucgauaauugaugccc

SEQ ID NO: 309468 - RNA, 19 nt, Artificial Sequence
  Description of Artificial Sequence: Synthetic oligonucleotide
aaucccuacacuucuuucc

SEQ ID NO: 309469 - RNA, 19 nt, Artificial Sequence
  Description of Artificial Sequence: Synthetic oligonucleotide
uaaauggauauuuucaccc

SEQ ID NO: 309470 - RNA, 19 nt, Artificial Sequence
  Description of Artificial Sequence: Synthetic oligonucleotide
auauauaccuagcaggcac

SEQ ID NO: 309471 - RNA, 19 nt, Artificial Sequence
  Description of Artificial Sequence: Synthetic oligonucleotide
aagguuagcaauuuaguga

SEQ ID NO: 309472 - RNA, 19 nt, Artificial Sequence
  Description of Artificial Sequence: Synthetic oligonucleotide
acaagucgauaauugaugc

SEQ ID NO: 309473 - RNA, 19 nt, Artificial Sequence
  Description of Artificial Sequence: Synthetic oligonucleotide
aacaagauuaagguuagag

SEQ ID NO: 309474 - RNA, 19 nt, Artificial Sequence
  Description of Artificial Sequence: Synthetic oligonucleotide
aaucagacuguguuaaaag

SEQ ID NO: 309475 - RNA, 19 nt, Artificial Sequence
  Description of Artificial Sequence: Synthetic oligonucleotide
uauuaaaucagacuguguu

SEQ ID NO: 309476 - RNA, 19 nt, Artificial Sequence
  Description of Artificial Sequence: Synthetic oligonucleotide
aguagcauugaauauaccu

SEQ ID NO: 309477 - RNA, 19 nt, Artificial Sequence
  Description of Artificial Sequence: Synthetic oligonucleotide
guuuuguagauuuuaauac

SEQ ID NO: 309478 - RNA, 19 nt, Artificial Sequence
  Description of Artificial Sequence: Synthetic oligonucleotide
aagagcaaaggucucgggg

SEQ ID NO: 309479 - RNA, 19 nt, Artificial Sequence
  Description of Artificial Sequence: Synthetic oligonucleotide
uguuucaaauaauacggag

SEQ ID NO: 309480 - RNA, 19 nt, Artificial Sequence
  Description of Artificial Sequence: Synthetic oligonucleotide
cucgaggcaacuaugaugc

SEQ ID NO: 309481 - RNA, 19 nt, Artificial Sequence
  Description of Artificial Sequence: Synthetic oligonucleotide
aagucggcuucuuacaagg

SEQ ID NO: 309482 - RNA, 19 nt, Artificial Sequence
  Description of Artificial Sequence: Synthetic oligonucleotide
aaggcaaauccaaagacuc

SEQ ID NO: 309483 - RNA, 19 nt, Artificial Sequence
  Description of Artificial Sequence: Synthetic oligonucleotide
ugauaucucgcauacagcu

SEQ ID NO: 309484 - RNA, 19 nt, Artificial Sequence
  Description of Artificial Sequence: Synthetic oligonucleotide
gauaccugcaaugaugagg

SEQ ID NO: 309485 - RNA, 19 nt, Artificial Sequence
  Description of Artificial Sequence: Synthetic oligonucleotide
uuuagaugcauugaguaca

SEQ ID NO: 309486 - RNA, 19 nt, Artificial Sequence
  Description of Artificial Sequence: Synthetic oligonucleotide
cuuauuaauugucuguaag

SEQ ID NO: 309487 - RNA, 19 nt, Artificial Sequence
  Description of Artificial Sequence: Synthetic oligonucleotide
aaauaauacggagcugagc

SEQ ID NO: 309488 - RNA, 19 nt, Artificial Sequence
  Description of Artificial Sequence: Synthetic oligonucleotide
agccaauagaaaugaaagc

SEQ ID NO: 309489 - RNA, 19 nt, Artificial Sequence
  Description of Artificial Sequence: Synthetic oligonucleotide
uuggcugcaagucccaugg

SEQ ID NO: 309490 - RNA, 19 nt, Artificial Sequence
  Description of Artificial Sequence: Synthetic oligonucleotide
aauuacaaugguauuuuag

SEQ ID NO: 309491 - RNA, 19 nt, Artificial Sequence
  Description of Artificial Sequence: Synthetic oligonucleotide
uagaguuaccucaagcaag

SEQ ID NO: 309492 - RNA, 19 nt, Artificial Sequence
  Description of Artificial Sequence: Synthetic oligonucleotide
uauauuaaaucagacugug

SEQ ID NO: 309493 - RNA, 19 nt, Artificial Sequence
  Description of Artificial Sequence: Synthetic oligonucleotide
aaaugcauaagagaagcca

SEQ ID NO: 309494 - RNA, 19 nt, Artificial Sequence
  Description of Artificial Sequence: Synthetic oligonucleotide
guuaaggaggauuccaggg

SEQ ID NO: 309495 - RNA, 19 nt, Artificial Sequence
  Description of Artificial Sequence: Synthetic oligonucleotide
uauuaauugucuguaagac

SEQ ID NO: 309496 - RNA, 19 nt, Artificial Sequence
  Description of Artificial Sequence: Synthetic oligonucleotide
guuaccucaagcaaguuag

SEQ ID NO: 309497 - RNA, 19 nt, Artificial Sequence
  Description of Artificial Sequence: Synthetic oligonucleotide
aacuagcacacacauuuag

SEQ ID NO: 309498 - RNA, 19 nt, Artificial Sequence
  Description of Artificial Sequence: Synthetic oligonucleotide
guauuuuagaugcauugag

SEQ ID NO: 309499 - RNA, 19 nt, Artificial Sequence
  Description of Artificial Sequence: Synthetic oligonucleotide
auaccuagcaggcaccuac

SEQ ID NO: 309500 - RNA, 19 nt, Artificial Sequence
  Description of Artificial Sequence: Synthetic oligonucleotide
uuuguagucuccauacaug

SEQ ID NO: 309501 - RNA, 19 nt, Artificial Sequence
  Description of Artificial Sequence: Synthetic oligonucleotide
ugaauauaccuucaauuuc

SEQ ID NO: 309502 - RNA, 19 nt, Artificial Sequence
  Description of Artificial Sequence: Synthetic oligonucleotide
cuugcaguaagcaucugag

SEQ ID NO: 309503 - RNA, 19 nt, Artificial Sequence
  Description of Artificial Sequence: Synthetic oligonucleotide
auaauugaugcccaugcca

SEQ ID NO: 309504 - RNA, 19 nt, Artificial Sequence
  Description of Artificial Sequence: Synthetic oligonucleotide
gauauuuucaccccgucaa

SEQ ID NO: 309505 - RNA, 19 nt, Artificial Sequence
  Description of Artificial Sequence: Synthetic oligonucleotide
uuuagucaguauuuuauaa

SEQ ID NO: 309506 - RNA, 19 nt, Artificial Sequence
  Description of Artificial Sequence: Synthetic oligonucleotide
acaagauuaagguuagagu

SEQ ID NO: 309507 - RNA, 19 nt, Artificial Sequence
  Description of Artificial Sequence: Synthetic oligonucleotide
accaaucccuaccuaaagc

SEQ ID NO: 309508 - RNA, 19 nt, Artificial Sequence
  Description of Artificial Sequence: Synthetic oligonucleotide
uuuauuggcuuccccgggg

SEQ ID NO: 309509 - RNA, 19 nt, Artificial Sequence
  Description of Artificial Sequence: Synthetic oligonucleotide
uagauaccugcaaugauga

SEQ ID NO: 309510 - RNA, 19 nt, Artificial Sequence
  Description of Artificial Sequence: Synthetic oligonucleotide
agauuaagguuagaguuac

SEQ ID NO: 309511 - RNA, 19 nt, Artificial Sequence
  Description of Artificial Sequence: Synthetic oligonucleotide
aauacuuuagucaguauuu

SEQ ID NO: 309512 - RNA, 19 nt, Artificial Sequence
  Description of Artificial Sequence: Synthetic oligonucleotide
uuagaguuaccucaagcaa

SEQ ID NO: 309513 - RNA, 19 nt, Artificial Sequence
  Description of Artificial Sequence: Synthetic oligonucleotide
cauugaguacaauuuagug

SEQ ID NO: 309514 - RNA, 19 nt, Artificial Sequence
  Description of Artificial Sequence: Synthetic oligonucleotide
guuagaguuaccucaagca

SEQ ID NO: 309515 - RNA, 19 nt, Artificial Sequence
  Description of Artificial Sequence: Synthetic oligonucleotide
uaauugaugcccaugccaa

SEQ ID NO: 309516 - RNA, 19 nt, Artificial Sequence
  Description of Artificial Sequence: Synthetic oligonucleotide
gauacagaacccgauguag

SEQ ID NO: 309517 - RNA, 19 nt, Artificial Sequence
  Description of Artificial Sequence: Synthetic oligonucleotide
uuaaaucagacuguguuaa

SEQ ID NO: 309518 - RNA, 19 nt, Artificial Sequence
  Description of Artificial Sequence: Synthetic oligonucleotide
uagauacagaacccgaugu

SEQ ID NO: 309519 - RNA, 19 nt, Artificial Sequence
  Description of Artificial Sequence: Synthetic oligonucleotide
ugucuauauuaaaucagac

SEQ ID NO: 309520 - RNA, 19 nt, Artificial Sequence
  Description of Artificial Sequence: Synthetic oligonucleotide
aaugcugacucuuaccaua

SEQ ID NO: 309521 - RNA, 19 nt, Artificial Sequence
  Description of Artificial Sequence: Synthetic oligonucleotide
auuaagguuagaguuaccu

SEQ ID NO: 309522 - RNA, 19 nt, Artificial Sequence
  Description of Artificial Sequence: Synthetic oligonucleotide
aaagucggcuucuuacaag

SEQ ID NO: 309523 - RNA, 19 nt, Artificial Sequence
  Description of Artificial Sequence: Synthetic oligonucleotide
caagguuagcaauuuagug

SEQ ID NO: 309524 - RNA, 19 nt, Artificial Sequence
  Description of Artificial Sequence: Synthetic oligonucleotide
uuaccauaauuacuaagaa

SEQ ID NO: 309525 - RNA, 19 nt, Artificial Sequence
  Description of Artificial Sequence: Synthetic oligonucleotide
uaaaaguuaaggcucucua

SEQ ID NO: 309526 - RNA, 19 nt, Artificial Sequence
  Description of Artificial Sequence: Synthetic oligonucleotide
acacacauuuaguccauac

SEQ ID NO: 309527 - RNA, 19 nt, Artificial Sequence
  Description of Artificial Sequence: Synthetic oligonucleotide
auaucucgcauacagcucu

SEQ ID NO: 309528 - RNA, 19 nt, Artificial Sequence
  Description of Artificial Sequence: Synthetic oligonucleotide
uuguuaauuccuuugguuu

SEQ ID NO: 309529 - RNA, 19 nt, Artificial Sequence
  Description of Artificial Sequence: Synthetic oligonucleotide
uuuguuaauuccuuugguu

SEQ ID NO: 309530 - RNA, 19 nt, Artificial Sequence
  Description of Artificial Sequence: Synthetic oligonucleotide
guuucauaccauaacuagg

SEQ ID NO: 309531 - RNA, 19 nt, Artificial Sequence
  Description of Artificial Sequence: Synthetic oligonucleotide
cauuaaggcggccuaaaag

SEQ ID NO: 309532 - RNA, 19 nt, Artificial Sequence
  Description of Artificial Sequence: Synthetic oligonucleotide
ucaauccucagaaccacca

SEQ ID NO: 309533 - RNA, 19 nt, Artificial Sequence
  Description of Artificial Sequence: Synthetic oligonucleotide
caugacuacauucccagac

SEQ ID NO: 309534 - RNA, 19 nt, Artificial Sequence
  Description of Artificial Sequence: Synthetic oligonucleotide
auccuuugccaaccaaucc

SEQ ID NO: 309535 - RNA, 19 nt, Artificial Sequence
  Description of Artificial Sequence: Synthetic oligonucleotide
ugaaauaccugucuauauu

SEQ ID NO: 309536 - RNA, 19 nt, Artificial Sequence
  Description of Artificial Sequence: Synthetic oligonucleotide
guaaugcugacucuuacca

SEQ ID NO: 309537 - RNA, 19 nt, Artificial Sequence
  Description of Artificial Sequence: Synthetic oligonucleotide
aaccaaucccuaccuaaag

SEQ ID NO: 309538 - RNA, 19 nt, Artificial Sequence
  Description of Artificial Sequence: Synthetic oligonucleotide
gauaauugaugcccaugcc

SEQ ID NO: 309539 - RNA, 19 nt, Artificial Sequence
  Description of Artificial Sequence: Synthetic oligonucleotide
cuaccauaucaacaaaggc

SEQ ID NO: 309540 - RNA, 19 nt, Artificial Sequence
  Description of Artificial Sequence: Synthetic oligonucleotide
accuccaacuuuuaacuag

SEQ ID NO: 309541 - RNA, 19 nt, Artificial Sequence
  Description of Artificial Sequence: Synthetic oligonucleotide
uuaguccauacugauaucu

SEQ ID NO: 309542 - RNA, 19 nt, Artificial Sequence
  Description of Artificial Sequence: Synthetic oligonucleotide
uuaaggcucucuaaagagu

SEQ ID NO: 309543 - RNA, 19 nt, Artificial Sequence
  Description of Artificial Sequence: Synthetic oligonucleotide
aacccgauguagcuuguag

SEQ ID NO: 309544 - RNA, 19 nt, Artificial Sequence
  Description of Artificial Sequence: Synthetic oligonucleotide
accucaagcaaguuaguug

SEQ ID NO: 309545 - RNA, 19 nt, Artificial Sequence
  Description of Artificial Sequence: Synthetic oligonucleotide
caccccgucaauuacaaug

SEQ ID NO: 309546 - RNA, 19 nt, Artificial Sequence
  Description of Artificial Sequence: Synthetic oligonucleotide
uaucuugccuggcuuaggc

SEQ ID NO: 309547 - RNA, 19 nt, Artificial Sequence
  Description of Artificial Sequence: Synthetic oligonucleotide
aguaaauuuuaaacucugg

SEQ ID NO: 309548 - RNA, 19 nt, Artificial Sequence
  Description of Artificial Sequence: Synthetic oligonucleotide
gaauuuagcagaugccuga

SEQ ID NO: 309549 - RNA, 19 nt, Artificial Sequence
  Description of Artificial Sequence: Synthetic oligonucleotide
accugucuauauuaaauca

SEQ ID NO: 309550 - RNA, 19 nt, Artificial Sequence
  Description of Artificial Sequence: Synthetic oligonucleotide
uucagcagaaugauuuuaa

SEQ ID NO: 309551 - RNA, 19 nt, Artificial Sequence
  Description of Artificial Sequence: Synthetic oligonucleotide
cucgcauacagcucuaaac

SEQ ID NO: 309552 - RNA, 19 nt, Artificial Sequence
  Description of Artificial Sequence: Synthetic oligonucleotide
gaggccaccaagaauuagg

SEQ ID NO: 309553 - RNA, 19 nt, Artificial Sequence
  Description of Artificial Sequence: Synthetic oligonucleotide
ggcuauaacagccaagaug

SEQ ID NO: 309554 - RNA, 19 nt, Artificial Sequence
  Description of Artificial Sequence: Synthetic oligonucleotide
uuaagguuagaguuaccuc

SEQ ID NO: 309555 - RNA, 19 nt, Artificial Sequence
  Description of Artificial Sequence: Synthetic oligonucleotide
aaugcauaagagaagccaa

SEQ ID NO: 309556 - RNA, 19 nt, Artificial Sequence
  Description of Artificial Sequence: Synthetic oligonucleotide
aaaagugguggcccuagaa

SEQ ID NO: 309557 - RNA, 19 nt, Artificial Sequence
  Description of Artificial Sequence: Synthetic oligonucleotide
auuaaaucagacuguguua

SEQ ID NO: 309558 - RNA, 19 nt, Artificial Sequence
  Description of Artificial Sequence: Synthetic oligonucleotide
uauaucuucucagcaaacu

SEQ ID NO: 309559 - RNA, 19 nt, Artificial Sequence
  Description of Artificial Sequence: Synthetic oligonucleotide
uuguagauuuuaauacuaa

SEQ ID NO: 309560 - RNA, 19 nt, Artificial Sequence
  Description of Artificial Sequence: Synthetic oligonucleotide
aacaagguccaucaauguu

SEQ ID NO: 309561 - RNA, 19 nt, Artificial Sequence
  Description of Artificial Sequence: Synthetic oligonucleotide
uaaggcucucuaaagaguu

SEQ ID NO: 309562 - RNA, 19 nt, Artificial Sequence
  Description of Artificial Sequence: Synthetic oligonucleotide
aaaucagacuguguuaaaa

SEQ ID NO: 309563 - RNA, 19 nt, Artificial Sequence
  Description of Artificial Sequence: Synthetic oligonucleotide
uugccaaccaaucccuacc

SEQ ID NO: 309564 - RNA, 19 nt, Artificial Sequence
  Description of Artificial Sequence: Synthetic oligonucleotide
cuaccuaaagcauaguaaa

SEQ ID NO: 309565 - RNA, 19 nt, Artificial Sequence
  Description of Artificial Sequence: Synthetic oligonucleotide
uaccugucuauauuaaauc

SEQ ID NO: 309566 - RNA, 19 nt, Artificial Sequence
  Description of Artificial Sequence: Synthetic oligonucleotide
uagcagaugccugaaauac

SEQ ID NO: 309567 - RNA, 19 nt, Artificial Sequence
  Description of Artificial Sequence: Synthetic oligonucleotide
uuaaaaguuaaggcucucu

SEQ ID NO: 309568 - RNA, 19 nt, Artificial Sequence
  Description of Artificial Sequence: Synthetic oligonucleotide
uguggcuauaacagccaag

SEQ ID NO: 309569 - RNA, 19 nt, Artificial Sequence
  Description of Artificial Sequence: Synthetic oligonucleotide
cauuggcaaccacagaagc

SEQ ID NO: 309570 - RNA, 19 nt, Artificial Sequence
  Description of Artificial Sequence: Synthetic oligonucleotide
ggaacuuauuaauugucug

SEQ ID NO: 309571 - RNA, 19 nt, Artificial Sequence
  Description of Artificial Sequence: Synthetic oligonucleotide
cuaaagaguucuaaaacua

SEQ ID NO: 309572 - RNA, 19 nt, Artificial Sequence
  Description of Artificial Sequence: Synthetic oligonucleotide
augaggaucacgccacaag

SEQ ID NO: 309573 - RNA, 19 nt, Artificial Sequence
  Description of Artificial Sequence: Synthetic oligonucleotide
aggucuggcuaccauauca

SEQ ID NO: 309574 - RNA, 19 nt, Artificial Sequence
  Description of Artificial Sequence: Synthetic oligonucleotide
uuuucaccccgucaauuac

SEQ ID NO: 309575 - RNA, 19 nt, Artificial Sequence
  Description of Artificial Sequence: Synthetic oligonucleotide
ugcauugagcaccacuggu

SEQ ID NO: 309576 - RNA, 19 nt, Artificial Sequence
  Description of Artificial Sequence: Synthetic oligonucleotide
uccaacuuuuaacuaguau

SEQ ID NO: 309577 - RNA, 19 nt, Artificial Sequence
  Description of Artificial Sequence: Synthetic oligonucleotide
gucauauaucuucucagca

SEQ ID NO: 309578 - RNA, 19 nt, Artificial Sequence
  Description of Artificial Sequence: Synthetic oligonucleotide
gacacuguuaaaagcuaag

SEQ ID NO: 309579 - RNA, 19 nt, Artificial Sequence
  Description of Artificial Sequence: Synthetic oligonucleotide
aaagcauaguaaauuuuaa

SEQ ID NO: 309580 - RNA, 19 nt, Artificial Sequence
  Description of Artificial Sequence: Synthetic oligonucleotide
aaagaaguacuggauccga

SEQ ID NO: 309581 - RNA, 19 nt, Artificial Sequence
  Description of Artificial Sequence: Synthetic oligonucleotide
gaacuuauuaauugucugu

SEQ ID NO: 309582 - RNA, 19 nt, Artificial Sequence
  Description of Artificial Sequence: Synthetic oligonucleotide
caagucgauaauugaugcc

SEQ ID NO: 309583 - RNA, 19 nt, Artificial Sequence
  Description of Artificial Sequence: Synthetic oligonucleotide
acauuuaguccauacugau

SEQ ID NO: 309584 - RNA, 19 nt, Artificial Sequence
  Description of Artificial Sequence: Synthetic oligonucleotide
aacuaggauauaaauggaa

SEQ ID NO: 309585 - RNA, 19 nt, Artificial Sequence
  Description of Artificial Sequence: Synthetic oligonucleotide
guaguagcauugaauauac

SEQ ID NO: 309586 - RNA, 19 nt, Artificial Sequence
  Description of Artificial Sequence: Synthetic oligonucleotide
uuuauccauaaauguucca

SEQ ID NO: 309587 - RNA, 19 nt, Artificial Sequence
  Description of Artificial Sequence: Synthetic oligonucleotide
uuugccaaccaaucccuac

SEQ ID NO: 309588 - RNA, 19 nt, Artificial Sequence
  Description of Artificial Sequence: Synthetic oligonucleotide
uacaugucauuaaggcggc

SEQ ID NO: 309589 - RNA, 19 nt, Artificial Sequence
  Description of Artificial Sequence: Synthetic oligonucleotide
uuucaccccgucaauuaca

SEQ ID NO: 309590 - RNA, 19 nt, Artificial Sequence
  Description of Artificial Sequence: Synthetic oligonucleotide
agacaaaggugcuagcaaa

SEQ ID NO: 309591 - RNA, 19 nt, Artificial Sequence
  Description of Artificial Sequence: Synthetic oligonucleotide
uuauuggcuuccccggggc

SEQ ID NO: 309592 - RNA, 19 nt, Artificial Sequence
  Description of Artificial Sequence: Synthetic oligonucleotide
uggcuuaggcccuauuggc

SEQ ID NO: 309593 - RNA, 19 nt, Artificial Sequence
  Description of Artificial Sequence: Synthetic oligonucleotide
uacagcaugugcuuagcau

SEQ ID NO: 309594 - RNA, 19 nt, Artificial Sequence
  Description of Artificial Sequence: Synthetic oligonucleotide
cacacaaauguccacuguc

SEQ ID NO: 309595 - RNA, 19 nt, Artificial Sequence
  Description of Artificial Sequence: Synthetic oligonucleotide
cuuuauuggcuuccccggg

SEQ ID NO: 309596 - RNA, 19 nt, Artificial Sequence
  Description of Artificial Sequence: Synthetic oligonucleotide
aguuuaguaggaggccacc

SEQ ID NO: 309597 - RNA, 19 nt, Artificial Sequence
  Description of Artificial Sequence: Synthetic oligonucleotide
cauaacuaggguuuuggaa

SEQ ID NO: 309598 - RNA, 19 nt, Artificial Sequence
  Description of Artificial Sequence: Synthetic oligonucleotide
gguuaaggaggauuccagg

SEQ ID NO: 309599 - RNA, 19 nt, Artificial Sequence
  Description of Artificial Sequence: Synthetic oligonucleotide
ggagcuauucugcugcggg

SEQ ID NO: 309600 - RNA, 19 nt, Artificial Sequence
  Description of Artificial Sequence: Synthetic oligonucleotide
ucgggguuaaggaggauuc

SEQ ID NO: 309601 - RNA, 19 nt, Artificial Sequence
  Description of Artificial Sequence: Synthetic oligonucleotide
aaacuaggauauaaaugga

SEQ ID NO: 309602 - RNA, 19 nt, Artificial Sequence
  Description of Artificial Sequence: Synthetic oligonucleotide
ucggcuucuuacaagguuu

SEQ ID NO: 309603 - RNA, 19 nt, Artificial Sequence
  Description of Artificial Sequence: Synthetic oligonucleotide
aacuaccacugcccacccc

SEQ ID NO: 309604 - RNA, 19 nt, Artificial Sequence
  Description of Artificial Sequence: Synthetic oligonucleotide
gaugauauccaugacacuu

SEQ ID NO: 309605 - RNA, 19 nt, Artificial Sequence
  Description of Artificial Sequence: Synthetic oligonucleotide
gcuauaacagccaagaugu

SEQ ID NO: 309606 - RNA, 19 nt, Artificial Sequence
  Description of Artificial Sequence: Synthetic oligonucleotide
gguuagaguuaccucaagc

SEQ ID NO: 309607 - RNA, 19 nt, Artificial Sequence
  Description of Artificial Sequence: Synthetic oligonucleotide
uucauaccauaacuagggu

SEQ ID NO: 309608 - RNA, 19 nt, Artificial Sequence
  Description of Artificial Sequence: Synthetic oligonucleotide
ucuucugcggggucuccgg

SEQ ID NO: 309609 - RNA, 19 nt, Artificial Sequence
  Description of Artificial Sequence: Synthetic oligonucleotide
caacuaugaugcuagaaaa

SEQ ID NO: 309610 - RNA, 19 nt, Artificial Sequence
  Description of Artificial Sequence: Synthetic oligonucleotide
cugacucuuaccauaauua

SEQ ID NO: 309611 - RNA, 19 nt, Artificial Sequence
  Description of Artificial Sequence: Synthetic oligonucleotide
uaacuaggguuuuggaaaa

SEQ ID NO: 309612 - RNA, 19 nt, Artificial Sequence
  Description of Artificial Sequence: Synthetic oligonucleotide
augauauccaugacacuuc

SEQ ID NO: 309613 - RNA, 19 nt, Artificial Sequence
  Description of Artificial Sequence: Synthetic oligonucleotide
aguuaccucaagcaaguua

SEQ ID NO: 309614 - RNA, 19 nt, Artificial Sequence
  Description of Artificial Sequence: Synthetic oligonucleotide
gagcuauucugcugcgggg

SEQ ID NO: 309615 - RNA, 19 nt, Artificial Sequence
  Description of Artificial Sequence: Synthetic oligonucleotide
agaaugguuucagaugucu

SEQ ID NO: 309616 - RNA, 19 nt, Artificial Sequence
  Description of Artificial Sequence: Synthetic oligonucleotide
auuuucaccccgucaauua

SEQ ID NO: 309617 - RNA, 19 nt, Artificial Sequence
  Description of Artificial Sequence: Synthetic oligonucleotide
agaaugauuuuaaaaguua

SEQ ID NO: 309618 - RNA, 19 nt, Artificial Sequence
  Description of Artificial Sequence: Synthetic oligonucleotide
caaugaugaggaucacgcc

SEQ ID NO: 309619 - RNA, 19 nt, Artificial Sequence
  Description of Artificial Sequence: Synthetic oligonucleotide
aacuaggguuuuggaaaac

SEQ ID NO: 309620 - RNA, 19 nt, Artificial Sequence
  Description of Artificial Sequence: Synthetic oligonucleotide
ugaguacaauuuaguguca

SEQ ID NO: 309621 - RNA, 19 nt, Artificial Sequence
  Description of Artificial Sequence: Synthetic oligonucleotide
uaauacggagcugagccaa

SEQ ID NO: 309622 - RNA, 19 nt, Artificial Sequence
  Description of Artificial Sequence: Synthetic oligonucleotide
ccugucuauauuaaaucag

SEQ ID NO: 309623 - RNA, 19 nt, Artificial Sequence
  Description of Artificial Sequence: Synthetic oligonucleotide
auaauacggagcugagcca

SEQ ID NO: 309624 - RNA, 19 nt, Artificial Sequence
  Description of Artificial Sequence: Synthetic oligonucleotide
guagacuagaggccagcag

SEQ ID NO: 309625 - RNA, 19 nt, Artificial Sequence
  Description of Artificial Sequence: Synthetic oligonucleotide
cccgcguagauacagaacc

SEQ ID NO: 309626 - RNA, 19 nt, Artificial Sequence
  Description of Artificial Sequence: Synthetic oligonucleotide
auaaaccuccaacuuuuaa

SEQ ID NO: 309627 - RNA, 19 nt, Artificial Sequence
  Description of Artificial Sequence: Synthetic oligonucleotide
ucgauaauugaugcccaug

SEQ ID NO: 309628 - RNA, 19 nt, Artificial Sequence
  Description of Artificial Sequence: Synthetic oligonucleotide
acugguagacuagaggcca

SEQ ID NO: 309629 - RNA, 19 nt, Artificial Sequence
  Description of Artificial Sequence: Synthetic oligonucleotide
caagguuuuaaauggauau

SEQ ID NO: 309630 - RNA, 19 nt, Artificial Sequence
  Description of Artificial Sequence: Synthetic oligonucleotide
cuaggauauaaauggaacu

SEQ ID NO: 309631 - RNA, 19 nt, Artificial Sequence
  Description of Artificial Sequence: Synthetic oligonucleotide
ugucuguaagacugaucgc

SEQ ID NO: 309632 - RNA, 19 nt, Artificial Sequence
  Description of Artificial Sequence: Synthetic oligonucleotide
aacuuaaggcacauauuau

SEQ ID NO: 309633 - RNA, 19 nt, Artificial Sequence
  Description of Artificial Sequence: Synthetic oligonucleotide
gcuuaggcccuauuggccg

SEQ ID NO: 309634 - RNA, 19 nt, Artificial Sequence
  Description of Artificial Sequence: Synthetic oligonucleotide
accccgucaauuacaaugg

SEQ ID NO: 309635 - RNA, 19 nt, Artificial Sequence
  Description of Artificial Sequence: Synthetic oligonucleotide
uucaaauaauacggagcug

SEQ ID NO: 309636 - RNA, 19 nt, Artificial Sequence
  Description of Artificial Sequence: Synthetic oligonucleotide
gcaacuaugaugcuagaaa

SEQ ID NO: 309637 - RNA, 19 nt, Artificial Sequence
  Description of Artificial Sequence: Synthetic oligonucleotide
acaguuuaguaggaggcca

SEQ ID NO: 309638 - RNA, 19 nt, Artificial Sequence
  Description of Artificial Sequence: Synthetic oligonucleotide
uaguccauacugauaucuc

SEQ ID NO: 309639 - RNA, 19 nt, Artificial Sequence
  Description of Artificial Sequence: Synthetic oligonucleotide
cauaccauaacuaggguuu

SEQ ID NO: 309640 - RNA, 19 nt, Artificial Sequence
  Description of Artificial Sequence: Synthetic oligonucleotide
ucuguaagacugaucgcuu

SEQ ID NO: 309641 - RNA, 19 nt, Artificial Sequence
  Description of Artificial Sequence: Synthetic oligonucleotide
aauugucuguaagacugau

SEQ ID NO: 309642 - RNA, 19 nt, Artificial Sequence
  Description of Artificial Sequence: Synthetic oligonucleotide
ccaauagaaaugaaagcuc

SEQ ID NO: 309643 - RNA, 19 nt, Artificial Sequence
  Description of Artificial Sequence: Synthetic oligonucleotide
agcuacacaacaguuuagu

SEQ ID NO: 309644 - RNA, 19 nt, Artificial Sequence
  Description of Artificial Sequence: Synthetic oligonucleotide
aauacggagcugagccaac

SEQ ID NO: 309645 - RNA, 19 nt, Artificial Sequence
  Description of Artificial Sequence: Synthetic oligonucleotide
cauacugauaucucgcaua

SEQ ID NO: 309646 - RNA, 19 nt, Artificial Sequence
  Description of Artificial Sequence: Synthetic oligonucleotide
caagguccaucaauguuuc

SEQ ID NO: 309647 - RNA, 19 nt, Artificial Sequence
  Description of Artificial Sequence: Synthetic oligonucleotide
auacggagcugagccaacc

SEQ ID NO: 309648 - RNA, 19 nt, Artificial Sequence
  Description of Artificial Sequence: Synthetic oligonucleotide
uacguguauuuguagucuc

SEQ ID NO: 309649 - RNA, 19 nt, Artificial Sequence
  Description of Artificial Sequence: Synthetic oligonucleotide
uauuggccgcaucagggau

SEQ ID NO: 309650 - RNA, 19 nt, Artificial Sequence
  Description of Artificial Sequence: Synthetic oligonucleotide
ugguaguagcauugaauau

SEQ ID NO: 309651 - RNA, 19 nt, Artificial Sequence
  Description of Artificial Sequence: Synthetic oligonucleotide
ucaagcaaguuaguuguua

SEQ ID NO: 309652 - RNA, 19 nt, Artificial Sequence
  Description of Artificial Sequence: Synthetic oligonucleotide
uggagaaccucuggggacc

SEQ ID NO: 309653 - RNA, 19 nt, Artificial Sequence
  Description of Artificial Sequence: Synthetic oligonucleotide
ugccaaccaaucccuaccu

SEQ ID NO: 309654 - RNA, 19 nt, Artificial Sequence
  Description of Artificial Sequence: Synthetic oligonucleotide
acuaggguuuuggaaaacu

SEQ ID NO: 309655 - RNA, 19 nt, Artificial Sequence
  Description of Artificial Sequence: Synthetic oligonucleotide
ucugcggggucuccggagc

SEQ ID NO: 309656 - RNA, 19 nt, Artificial Sequence
  Description of Artificial Sequence: Synthetic oligonucleotide
augcauugaguacaauuua

SEQ ID NO: 309657 - RNA, 19 nt, Artificial Sequence
  Description of Artificial Sequence: Synthetic oligonucleotide
cgauaauugaugcccaugc

SEQ ID NO: 309658 - RNA, 19 nt, Artificial Sequence
  Description of Artificial Sequence: Synthetic oligonucleotide
cugcauugagcaccacugg

SEQ ID NO: 309659 - RNA, 19 nt, Artificial Sequence
  Description of Artificial Sequence: Synthetic oligonucleotide
acccgauguagcuuguaga

SEQ ID NO: 309660 - RNA, 19 nt, Artificial Sequence
  Description of Artificial Sequence: Synthetic oligonucleotide
uaguagcauugaauauacc

SEQ ID NO: 309661 - RNA, 19 nt, Artificial Sequence
  Description of Artificial Sequence: Synthetic oligonucleotide
ugugcuuagcaugcuugug

SEQ ID NO: 309662 - RNA, 19 nt, Artificial Sequence
  Description of Artificial Sequence: Synthetic oligonucleotide
gcacauauuauaaucuuca

SEQ ID NO: 309663 - RNA, 19 nt, Artificial Sequence
  Description of Artificial Sequence: Synthetic oligonucleotide
ucucgcauacagcucuaaa

SEQ ID NO: 309664 - RNA, 19 nt, Artificial Sequence
  Description of Artificial Sequence: Synthetic oligonucleotide
cucuaaacuaggauauaaa

SEQ ID NO: 309665 - RNA, 19 nt, Artificial Sequence
  Description of Artificial Sequence: Synthetic oligonucleotide
aaccuccaacuuuuaacua

SEQ ID NO: 309666 - RNA, 19 nt, Artificial Sequence
  Description of Artificial Sequence: Synthetic oligonucleotide
gauccagcuacacaacagu

SEQ ID NO: 309667 - RNA, 19 nt, Artificial Sequence
  Description of Artificial Sequence: Synthetic oligonucleotide
accuacucgaggcaacuau

SEQ ID NO: 309668 - RNA, 19 nt, Artificial Sequence
  Description of Artificial Sequence: Synthetic oligonucleotide
uuuaguccauacugauauc

SEQ ID NO: 309669 - RNA, 19 nt, Artificial Sequence
  Description of Artificial Sequence: Synthetic oligonucleotide
uggaguaaugcugacucuu

SEQ ID NO: 309670 - RNA, 19 nt, Artificial Sequence
  Description of Artificial Sequence: Synthetic oligonucleotide
acuagcacacacauuuagu

SEQ ID NO: 309671 - RNA, 19 nt, Artificial Sequence
  Description of Artificial Sequence: Synthetic oligonucleotide
gauaucucgcauacagcuc

SEQ ID NO: 309672 - RNA, 19 nt, Artificial Sequence
  Description of Artificial Sequence: Synthetic oligonucleotide
uacggagcugagccaacca

SEQ ID NO: 309673 - RNA, 19 nt, Artificial Sequence
  Description of Artificial Sequence: Synthetic oligonucleotide
ggugggauguggcucagug

SEQ ID NO: 309674 - RNA, 19 nt, Artificial Sequence
  Description of Artificial Sequence: Synthetic oligonucleotide
gcugcggggacucuguugc

SEQ ID NO: 309675 - RNA, 19 nt, Artificial Sequence
  Description of Artificial Sequence: Synthetic oligonucleotide
aagguuagaguuaccucaa

SEQ ID NO: 309676 - RNA, 19 nt, Artificial Sequence
  Description of Artificial Sequence: Synthetic oligonucleotide
accuagcaggcaccuacuc

SEQ ID NO: 309677 - RNA, 19 nt, Artificial Sequence
  Description of Artificial Sequence: Synthetic oligonucleotide
aggguuuuggaaaacuaaa

SEQ ID NO: 309678 - RNA, 19 nt, Artificial Sequence
  Description of Artificial Sequence: Synthetic oligonucleotide
agauaccugcaaugaugag

SEQ ID NO: 309679 - RNA, 19 nt, Artificial Sequence
  Description of Artificial Sequence: Synthetic oligonucleotide
cuacucgaggcaacuauga

SEQ ID NO: 309680 - RNA, 19 nt, Artificial Sequence
  Description of Artificial Sequence: Synthetic oligonucleotide
uuaccucaagcaaguuagu

SEQ ID NO: 309681 - RNA, 19 nt, Artificial Sequence
  Description of Artificial Sequence: Synthetic oligonucleotide
auauuaaaucagacugugu

SEQ ID NO: 309682 - RNA, 19 nt, Artificial Sequence
  Description of Artificial Sequence: Synthetic oligonucleotide
gacagcauuccacaauggu

SEQ ID NO: 309683 - RNA, 19 nt, Artificial Sequence
  Description of Artificial Sequence: Synthetic oligonucleotide
aaagacucccgcguagaua

SEQ ID NO: 309684 - RNA, 19 nt, Artificial Sequence
  Description of Artificial Sequence: Synthetic oligonucleotide
aauauaccuucaauuucuu

SEQ ID NO: 309685 - RNA, 19 nt, Artificial Sequence
  Description of Artificial Sequence: Synthetic oligonucleotide
cuuaggcccuauuggccgc

SEQ ID NO: 309686 - RNA, 19 nt, Artificial Sequence
  Description of Artificial Sequence: Synthetic oligonucleotide
guuggcugcaagucccaug

SEQ ID NO: 309687 - RNA, 19 nt, Artificial Sequence
  Description of Artificial Sequence: Synthetic oligonucleotide
agguuagaguuaccucaag

SEQ ID NO: 309688 - RNA, 19 nt, Artificial Sequence
  Description of Artificial Sequence: Synthetic oligonucleotide
gacucccgcguagauacag

SEQ ID NO: 309689 - RNA, 19 nt, Artificial Sequence
  Description of Artificial Sequence: Synthetic oligonucleotide
uggggaccaacaaggucca

SEQ ID NO: 309690 - RNA, 19 nt, Artificial Sequence
  Description of Artificial Sequence: Synthetic oligonucleotide
cacuaggcuugcaguaagc

SEQ ID NO: 309691 - RNA, 19 nt, Artificial Sequence
  Description of Artificial Sequence: Synthetic oligonucleotide
aucagggauccagcuacac

SEQ ID NO: 309692 - RNA, 19 nt, Artificial Sequence
  Description of Artificial Sequence: Synthetic oligonucleotide
gauccgaggucugauccac

SEQ ID NO: 309693 - RNA, 19 nt, Artificial Sequence
  Description of Artificial Sequence: Synthetic oligonucleotide
gguaguagcauugaauaua

SEQ ID NO: 309694 - RNA, 19 nt, Artificial Sequence
  Description of Artificial Sequence: Synthetic oligonucleotide
acaagguuuuaaauggaua

SEQ ID NO: 309695 - RNA, 19 nt, Artificial Sequence
  Description of Artificial Sequence: Synthetic oligonucleotide
cacuucacugguaguagca

SEQ ID NO: 309696 - RNA, 19 nt, Artificial Sequence
  Description of Artificial Sequence: Synthetic oligonucleotide
ggauauaaauggaacuauc

SEQ ID NO: 309697 - RNA, 19 nt, Artificial Sequence
  Description of Artificial Sequence: Synthetic oligonucleotide
gauuaagguuagaguuacc

SEQ ID NO: 309698 - RNA, 19 nt, Artificial Sequence
  Description of Artificial Sequence: Synthetic oligonucleotide
ggauauuuucaccccguca

SEQ ID NO: 309699 - RNA, 19 nt, Artificial Sequence
  Description of Artificial Sequence: Synthetic oligonucleotide
cagaaugauuuuaaaaguu

SEQ ID NO: 309700 - RNA, 19 nt, Artificial Sequence
  Description of Artificial Sequence: Synthetic oligonucleotide
cuaggguuuuggaaaacua

SEQ ID NO: 309701 - RNA, 19 nt, Artificial Sequence
  Description of Artificial Sequence: Synthetic oligonucleotide
auauaccuagcaggcaccu

SEQ ID NO: 309702 - RNA, 19 nt, Artificial Sequence
  Description of Artificial Sequence: Synthetic oligonucleotide
agcuauucugcugcgggga

SEQ ID NO: 309703 - RNA, 19 nt, Artificial Sequence
  Description of Artificial Sequence: Synthetic oligonucleotide
uaccuagcaggcaccuacu

SEQ ID NO: 309704 - RNA, 19 nt, Artificial Sequence
  Description of Artificial Sequence: Synthetic oligonucleotide
ccaaucccuaccuaaagca

SEQ ID NO: 309705 - RNA, 19 nt, Artificial Sequence
  Description of Artificial Sequence: Synthetic oligonucleotide
ucccgcguagauacagaac

SEQ ID NO: 309706 - RNA, 19 nt, Artificial Sequence
  Description of Artificial Sequence: Synthetic oligonucleotide
ggguuuuggaaaacuaaac

SEQ ID NO: 309707 - RNA, 19 nt, Artificial Sequence
  Description of Artificial Sequence: Synthetic oligonucleotide
cagcuacacaacaguuuag

SEQ ID NO: 309708 - RNA, 19 nt, Artificial Sequence
  Description of Artificial Sequence: Synthetic oligonucleotide
cuauuggccgcaucaggga

SEQ ID NO: 309709 - RNA, 19 nt, Artificial Sequence
  Description of Artificial Sequence: Synthetic oligonucleotide
auuggccgcaucagggauc

SEQ ID NO: 309710 - RNA, 19 nt, Artificial Sequence
  Description of Artificial Sequence: Synthetic oligonucleotide
uaccauaacuaggguuuug

SEQ ID NO: 309711 - RNA, 19 nt, Artificial Sequence
  Description of Artificial Sequence: Synthetic oligonucleotide
gucaauuacaaugguauuu

SEQ ID NO: 309712 - RNA, 19 nt, Artificial Sequence
  Description of Artificial Sequence: Synthetic oligonucleotide
agucgauaauugaugccca

SEQ ID NO: 309713 - RNA, 19 nt, Artificial Sequence
  Description of Artificial Sequence: Synthetic oligonucleotide
cugguagacuagaggccag

SEQ ID NO: 309714 - RNA, 19 nt, Artificial Sequence
  Description of Artificial Sequence: Synthetic oligonucleotide
ugguagacuagaggccagc

SEQ ID NO: 309715 - RNA, 19 nt, Artificial Sequence
  Description of Artificial Sequence: Synthetic oligonucleotide
uaccucaagcaaguuaguu

SEQ ID NO: 309716 - RNA, 19 nt, Artificial Sequence
  Description of Artificial Sequence: Synthetic oligonucleotide
guuuaguaggaggccacca

SEQ ID NO: 309717 - RNA, 19 nt, Artificial Sequence
  Description of Artificial Sequence: Synthetic oligonucleotide
uccgaggucugauccacuu

SEQ ID NO: 309718 - RNA, 19 nt, Artificial Sequence
  Description of Artificial Sequence: Synthetic oligonucleotide
cuaucuugccuggcuuagg

SEQ ID NO: 309719 - RNA, 19 nt, Artificial Sequence
  Description of Artificial Sequence: Synthetic oligonucleotide
gucuggcuaccauaucaac

SEQ ID NO: 309720 - RNA, 19 nt, Artificial Sequence
  Description of Artificial Sequence: Synthetic oligonucleotide
acggagcugagccaaccaa

SEQ ID NO: 309721 - RNA, 19 nt, Artificial Sequence
  Description of Artificial Sequence: Synthetic oligonucleotide
ggguuaaggaggauuccag

SEQ ID NO: 309722 - RNA, 19 nt, Artificial Sequence
  Description of Artificial Sequence: Synthetic oligonucleotide
caccacugguagacuagag

SEQ ID NO: 309723 - RNA, 19 nt, Artificial Sequence
  Description of Artificial Sequence: Synthetic oligonucleotide
uggcuaccauaucaacaaa

SEQ ID NO: 309724 - RNA, 19 nt, Artificial Sequence
  Description of Artificial Sequence: Synthetic oligonucleotide
aaacuagcacacacauuua

SEQ ID NO: 309725 - RNA, 19 nt, Artificial Sequence
  Description of Artificial Sequence: Synthetic oligonucleotide
cagaaugguuucagauguc

SEQ ID NO: 309726 - RNA, 19 nt, Artificial Sequence
  Description of Artificial Sequence: Synthetic oligonucleotide
ggccacaagucgauaauug

SEQ ID NO: 309727 - RNA, 19 nt, Artificial Sequence
  Description of Artificial Sequence: Synthetic oligonucleotide
gaccaaagggguaaacagu

SEQ ID NO: 309728 - RNA, 19 nt, Artificial Sequence
  Description of Artificial Sequence: Synthetic oligonucleotide
caguacguguauuuguagu

SEQ ID NO: 309729 - RNA, 19 nt, Artificial Sequence
  Description of Artificial Sequence: Synthetic oligonucleotide
gccacaagucgauaauuga

SEQ ID NO: 309730 - RNA, 19 nt, Artificial Sequence
  Description of Artificial Sequence: Synthetic oligonucleotide
auacagcucuaaacuagga

SEQ ID NO: 309731 - RNA, 19 nt, Artificial Sequence
  Description of Artificial Sequence: Synthetic oligonucleotide
cagcucuaaacuaggauau

SEQ ID NO: 309732 - RNA, 19 nt, Artificial Sequence
  Description of Artificial Sequence: Synthetic oligonucleotide
ccuacucgaggcaacuaug

SEQ ID NO: 309733 - RNA, 19 nt, Artificial Sequence
  Description of Artificial Sequence: Synthetic oligonucleotide
ggccuaaaagugguggccc

SEQ ID NO: 309734 - RNA, 19 nt, Artificial Sequence
  Description of Artificial Sequence: Synthetic oligonucleotide
gaaccucuggggaccaaca

SEQ ID NO: 309735 - RNA, 19 nt, Artificial Sequence
  Description of Artificial Sequence: Synthetic oligonucleotide
gcacuaggcuugcaguaag

SEQ ID NO: 309736 - RNA, 19 nt, Artificial Sequence
  Description of Artificial Sequence: Synthetic oligonucleotide
caacuaccacugcccaccc

SEQ ID NO: 309737 - RNA, 19 nt, Artificial Sequence
  Description of Artificial Sequence: Synthetic oligonucleotide
ccaguacguguauuuguag

SEQ ID NO: 309738 - RNA, 19 nt, Artificial Sequence
  Description of Artificial Sequence: Synthetic oligonucleotide
agacuagaggccagcagaa

SEQ ID NO: 309739 - RNA, 19 nt, Artificial Sequence
  Description of Artificial Sequence: Synthetic oligonucleotide
agcacuaggcuugcaguaa

SEQ ID NO: 309740 - RNA, 19 nt, Artificial Sequence
  Description of Artificial Sequence: Synthetic oligonucleotide
uaucucgcauacagcucua

SEQ ID NO: 309741 - RNA, 19 nt, Artificial Sequence
  Description of Artificial Sequence: Synthetic oligonucleotide
ccucaagcaaguuaguugu

SEQ ID NO: 309742 - RNA, 19 nt, Artificial Sequence
  Description of Artificial Sequence: Synthetic oligonucleotide
gcacacuccauuggcaacc

SEQ ID NO: 309743 - RNA, 19 nt, Artificial Sequence
  Description of Artificial Sequence: Synthetic oligonucleotide
aggagcaagguuagcaauu

SEQ ID NO: 309744 - RNA, 19 nt, Artificial Sequence
  Description of Artificial Sequence: Synthetic oligonucleotide
caugauggaugauauccau

SEQ ID NO: 309745 - RNA, 19 nt, Artificial Sequence
  Description of Artificial Sequence: Synthetic oligonucleotide
agacggugauggauuuggg

SEQ ID NO: 309746 - RNA, 19 nt, Artificial Sequence
  Description of Artificial Sequence: Synthetic oligonucleotide
cucuuaccauaauuacuaa

SEQ ID NO: 309747 - RNA, 19 nt, Artificial Sequence
  Description of Artificial Sequence: Synthetic oligonucleotide
gcucuaaacuaggauauaa

SEQ ID NO: 309748 - RNA, 19 nt, Artificial Sequence
  Description of Artificial Sequence: Synthetic oligonucleotide
cugagccaaccaaaggcaa

SEQ ID NO: 309749 - RNA, 19 nt, Artificial Sequence
  Description of Artificial Sequence: Synthetic oligonucleotide
accaagaauuaggaagcuu

SEQ ID NO: 309750 - RNA, 19 nt, Artificial Sequence
  Description of Artificial Sequence: Synthetic oligonucleotide
acaagcccaguacguguau

SEQ ID NO: 309751 - RNA, 19 nt, Artificial Sequence
  Description of Artificial Sequence: Synthetic oligonucleotide
cuacacuucuuucccauau

SEQ ID NO: 309752 - RNA, 19 nt, Artificial Sequence
  Description of Artificial Sequence: Synthetic oligonucleotide
ccgucaauuacaaugguau

SEQ ID NO: 309753 - RNA, 19 nt, Artificial Sequence
  Description of Artificial Sequence: Synthetic oligonucleotide
cccuauuggccgcaucagg

SEQ ID NO: 309754 - RNA, 19 nt, Artificial Sequence
  Description of Artificial Sequence: Synthetic oligonucleotide
ccaaccaaucccuaccuaa

SEQ ID NO: 309755 - RNA, 19 nt, Artificial Sequence
  Description of Artificial Sequence: Synthetic oligonucleotide
gcccuagaaggacaggaca

SEQ ID NO: 309756 - RNA, 19 nt, Artificial Sequence
  Description of Artificial Sequence: Synthetic oligonucleotide
uuaggcccuauuggccgca

SEQ ID NO: 309757 - RNA, 19 nt, Artificial Sequence
  Description of Artificial Sequence: Synthetic oligonucleotide
gcggccuaaaagugguggc

SEQ ID NO: 309758 - RNA, 19 nt, Artificial Sequence
  Description of Artificial Sequence: Synthetic oligonucleotide
uauaccuagcaggcaccua

SEQ ID NO: 309759 - RNA, 19 nt, Artificial Sequence
  Description of Artificial Sequence: Synthetic oligonucleotide
aagucccauggaaggucug

SEQ ID NO: 309760 - RNA, 19 nt, Artificial Sequence
  Description of Artificial Sequence: Synthetic oligonucleotide
auaccauaacuaggguuuu

SEQ ID NO: 309761 - RNA, 19 nt, Artificial Sequence
  Description of Artificial Sequence: Synthetic oligonucleotide
gcuacacaacaguuuagua

SEQ ID NO: 309762 - RNA, 19 nt, Artificial Sequence
  Description of Artificial Sequence: Synthetic oligonucleotide
cccaugagaucuguguuug

SEQ ID NO: 309763 - RNA, 19 nt, Artificial Sequence
  Description of Artificial Sequence: Synthetic oligonucleotide
caacaagguccaucaaugu

SEQ ID NO: 309764 - RNA, 19 nt, Artificial Sequence
  Description of Artificial Sequence: Synthetic oligonucleotide
cucccgcguagauacagaa

SEQ ID NO: 309765 - RNA, 19 nt, Artificial Sequence
  Description of Artificial Sequence: Synthetic oligonucleotide
gggguuaaggaggauucca

SEQ ID NO: 309766 - RNA, 19 nt, Artificial Sequence
  Description of Artificial Sequence: Synthetic oligonucleotide
gaguacaauuuagugucau

SEQ ID NO: 309767 - RNA, 19 nt, Artificial Sequence
  Description of Artificial Sequence: Synthetic oligonucleotide
ggccgcaucagggauccag

SEQ ID NO: 309768 - RNA, 19 nt, Artificial Sequence
  Description of Artificial Sequence: Synthetic oligonucleotide
ucgaggcaacuaugaugcu

SEQ ID NO: 309769 - RNA, 19 nt, Artificial Sequence
  Description of Artificial Sequence: Synthetic oligonucleotide
cuacauucccagacaggua

SEQ ID NO: 309770 - RNA, 19 nt, Artificial Sequence
  Description of Artificial Sequence: Synthetic oligonucleotide
ccgcguagauacagaaccc

SEQ ID NO: 309771 - RNA, 19 nt, Artificial Sequence
  Description of Artificial Sequence: Synthetic oligonucleotide
aggcaacuaugaugcuaga

SEQ ID NO: 309772 - RNA, 19 nt, Artificial Sequence
  Description of Artificial Sequence: Synthetic oligonucleotide
caaugaacaccugguaggu

SEQ ID NO: 309773 - RNA, 19 nt, Artificial Sequence
  Description of Artificial Sequence: Synthetic oligonucleotide
gcuauucugcugcggggac

SEQ ID NO: 309774 - RNA, 19 nt, Artificial Sequence
  Description of Artificial Sequence: Synthetic oligonucleotide
cgcguagauacagaacccg

SEQ ID NO: 309775 - RNA, 19 nt, Artificial Sequence
  Description of Artificial Sequence: Synthetic oligonucleotide
gcaagucccauggaagguc

SEQ ID NO: 309776 - RNA, 19 nt, Artificial Sequence
  Description of Artificial Sequence: Synthetic oligonucleotide
uguuggcugcaagucccau

SEQ ID NO: 309777 - RNA, 19 nt, Artificial Sequence
  Description of Artificial Sequence: Synthetic oligonucleotide
gguagacuagaggccagca

SEQ ID NO: 309778 - RNA, 19 nt, Artificial Sequence
  Description of Artificial Sequence: Synthetic oligonucleotide
gcaagguuagcaauuuagu

SEQ ID NO: 309779 - RNA, 19 nt, Artificial Sequence
  Description of Artificial Sequence: Synthetic oligonucleotide
ggcaacuaugaugcuagaa

SEQ ID NO: 309780 - RNA, 19 nt, Artificial Sequence
  Description of Artificial Sequence: Synthetic oligonucleotide
gucggcuucuuacaagguu

SEQ ID NO: 309781 - RNA, 19 nt, Artificial Sequence
  Description of Artificial Sequence: Synthetic oligonucleotide
caucagggauccagcuaca

SEQ ID NO: 309782 - RNA, 19 nt, Artificial Sequence
  Description of Artificial Sequence: Synthetic oligonucleotide
cuaaaacuuaaggcacaua

SEQ ID NO: 309783 - RNA, 19 nt, Artificial Sequence
  Description of Artificial Sequence: Synthetic oligonucleotide
agcucuaaacuaggauaua

SEQ ID NO: 309784 - RNA, 19 nt, Artificial Sequence
  Description of Artificial Sequence: Synthetic oligonucleotide
agucggcuucuuacaaggu

SEQ ID NO: 309785 - RNA, 19 nt, Artificial Sequence
  Description of Artificial Sequence: Synthetic oligonucleotide
ugcggggacucuguugcuu

SEQ ID NO: 309786 - RNA, 19 nt, Artificial Sequence
  Description of Artificial Sequence: Synthetic oligonucleotide
ggaucacgccacaagccca

SEQ ID NO: 309787 - RNA, 19 nt, Artificial Sequence
  Description of Artificial Sequence: Synthetic oligonucleotide
gucgauaauugaugcccau

SEQ ID NO: 309788 - RNA, 19 nt, Artificial Sequence
  Description of Artificial Sequence: Synthetic oligonucleotide
aggcaccuacucgaggcaa

SEQ ID NO: 309789 - RNA, 19 nt, Artificial Sequence
  Description of Artificial Sequence: Synthetic oligonucleotide
gcguagauacagaacccga

SEQ ID NO: 309790 - RNA, 19 nt, Artificial Sequence
  Description of Artificial Sequence: Synthetic oligonucleotide
acucccgcguagauacaga

SEQ ID NO: 309791 - RNA, 19 nt, Artificial Sequence
  Description of Artificial Sequence: Synthetic oligonucleotide
ggcccuagaaggacaggac

SEQ ID NO: 309792 - RNA, 19 nt, Artificial Sequence
  Description of Artificial Sequence: Synthetic oligonucleotide
ccacaagucgauaauugau

SEQ ID NO: 309793 - RNA, 19 nt, Artificial Sequence
  Description of Artificial Sequence: Synthetic oligonucleotide
cuguaagacugaucgcuuu

SEQ ID NO: 309794 - RNA, 19 nt, Artificial Sequence
  Description of Artificial Sequence: Synthetic oligonucleotide
gcauuccacaauggucacc

SEQ ID NO: 309795 - RNA, 19 nt, Artificial Sequence
  Description of Artificial Sequence: Synthetic oligonucleotide
aucucgcauacagcucuaa

SEQ ID NO: 309796 - RNA, 19 nt, Artificial Sequence
  Description of Artificial Sequence: Synthetic oligonucleotide
ggaguaaugcugacucuua

SEQ ID NO: 309797 - RNA, 19 nt, Artificial Sequence
  Description of Artificial Sequence: Synthetic oligonucleotide
gccgcaucagggauccagc

SEQ ID NO: 309798 - RNA, 19 nt, Artificial Sequence
  Description of Artificial Sequence: Synthetic oligonucleotide
augacagacuguggcuaua

SEQ ID NO: 309799 - RNA, 19 nt, Artificial Sequence
  Description of Artificial Sequence: Synthetic oligonucleotide
cccaguacguguauuugua

SEQ ID NO: 309800 - RNA, 19 nt, Artificial Sequence
  Description of Artificial Sequence: Synthetic oligonucleotide
cuucugcggggucuccgga

SEQ ID NO: 309801 - RNA, 19 nt, Artificial Sequence
  Description of Artificial Sequence: Synthetic oligonucleotide
cucccaugagaucuguguu

SEQ ID NO: 309802 - RNA, 19 nt, Artificial Sequence
  Description of Artificial Sequence: Synthetic oligonucleotide
cccuaccuaaagcauagua

SEQ ID NO: 309803 - RNA, 19 nt, Artificial Sequence
  Description of Artificial Sequence: Synthetic oligonucleotide
gugguacagcaugugcuua

SEQ ID NO: 309804 - RNA, 19 nt, Artificial Sequence
  Description of Artificial Sequence: Synthetic oligonucleotide
ggugauggauuugggaaau

SEQ ID NO: 309805 - RNA, 19 nt, Artificial Sequence
  Description of Artificial Sequence: Synthetic oligonucleotide
cccgucaauuacaauggua

SEQ ID NO: 309806 - RNA, 19 nt, Artificial Sequence
  Description of Artificial Sequence: Synthetic oligonucleotide
ccggagcuauucugcugcg

SEQ ID NO: 309807 - RNA, 19 nt, Artificial Sequence
  Description of Artificial Sequence: Synthetic oligonucleotide
ccgaggucugauccacuug

SEQ ID NO: 309808 - RNA, 19 nt, Artificial Sequence
  Description of Artificial Sequence: Synthetic oligonucleotide
ggcaccuacucgaggcaac

SEQ ID NO: 309809 - RNA, 19 nt, Artificial Sequence
  Description of Artificial Sequence: Synthetic oligonucleotide
gaggucugauccacuuggu

SEQ ID NO: 309810 - RNA, 19 nt, Artificial Sequence
  Description of Artificial Sequence: Synthetic oligonucleotide
caaagacucccgcguagau

SEQ ID NO: 309811 - RNA, 19 nt, Artificial Sequence
  Description of Artificial Sequence: Synthetic oligonucleotide
cggccuaaaagugguggcc

SEQ ID NO: 309812 - RNA, 19 nt, Artificial Sequence
  Description of Artificial Sequence: Synthetic oligonucleotide
gaacccgauguagcuugua

SEQ ID NO: 309813 - RNA, 19 nt, Artificial Sequence
  Description of Artificial Sequence: Synthetic oligonucleotide
cucgggguuaaggaggauu

SEQ ID NO: 309814 - RNA, 19 nt, Artificial Sequence
  Description of Artificial Sequence: Synthetic oligonucleotide
gcaccacugguagacuaga

SEQ ID NO: 309815 - RNA, 19 nt, Artificial Sequence
  Description of Artificial Sequence: Synthetic oligonucleotide
gacuagaggccagcagaau

SEQ ID NO: 309816 - RNA, 19 nt, Artificial Sequence
  Description of Artificial Sequence: Synthetic oligonucleotide
ccaaagacucccgcguaga

SEQ ID NO: 309817 - RNA, 19 nt, Artificial Sequence
  Description of Artificial Sequence: Synthetic oligonucleotide
cuauaacagccaagauguu

SEQ ID NO: 309818 - RNA, 19 nt, Artificial Sequence
  Description of Artificial Sequence: Synthetic oligonucleotide
gccuaaaagugguggcccu

SEQ ID NO: 309819 - RNA, 19 nt, Artificial Sequence
  Description of Artificial Sequence: Synthetic oligonucleotide
ccucccuauuuuaucuuua

SEQ ID NO: 309820 - RNA, 19 nt, Artificial Sequence
  Description of Artificial Sequence: Synthetic oligonucleotide
ucucgggguuaaggaggau

SEQ ID NO: 309821 - RNA, 19 nt, Artificial Sequence
  Description of Artificial Sequence: Synthetic oligonucleotide
aggcggccuaaaaguggug

SEQ ID NO: 309822 - RNA, 19 nt, Artificial Sequence
  Description of Artificial Sequence: Synthetic oligonucleotide
cucaagcaaguuaguuguu

SEQ ID NO: 309823 - RNA, 19 nt, Artificial Sequence
  Description of Artificial Sequence: Synthetic oligonucleotide
ggagaaccucuggggacca

SEQ ID NO: 309824 - RNA, 19 nt, Artificial Sequence
  Description of Artificial Sequence: Synthetic oligonucleotide
agacucccgcguagauaca

SEQ ID NO: 309825 - RNA, 19 nt, Artificial Sequence
  Description of Artificial Sequence: Synthetic oligonucleotide
gggucuccggagcuauucu

SEQ ID NO: 309826 - RNA, 19 nt, Artificial Sequence
  Description of Artificial Sequence: Synthetic oligonucleotide
ggucacacacugcucuauu

SEQ ID NO: 309827 - RNA, 19 nt, Artificial Sequence
  Description of Artificial Sequence: Synthetic oligonucleotide
ccuacacuucuuucccaua

SEQ ID NO: 309828 - RNA, 19 nt, Artificial Sequence
  Description of Artificial Sequence: Synthetic oligonucleotide
ggcucucuaaagaguucua

SEQ ID NO: 309829 - RNA, 19 nt, Artificial Sequence
  Description of Artificial Sequence: Synthetic oligonucleotide
caccuacucgaggcaacua

SEQ ID NO: 309830 - RNA, 19 nt, Artificial Sequence
  Description of Artificial Sequence: Synthetic oligonucleotide
cgaggcaacuaugaugcua

SEQ ID NO: 309831 - RNA, 19 nt, Artificial Sequence
  Description of Artificial Sequence: Synthetic oligonucleotide
gcuuccccggggccaaacu

SEQ ID NO: 309832 - RNA, 19 nt, Artificial Sequence
  Description of Artificial Sequence: Synthetic oligonucleotide
cugcggggucuccggagcu

SEQ ID NO: 309833 - RNA, 19 nt, Artificial Sequence
  Description of Artificial Sequence: Synthetic oligonucleotide
gcggggacucuguugcuuu

SEQ ID NO: 309834 - RNA, 19 nt, Artificial Sequence
  Description of Artificial Sequence: Synthetic oligonucleotide
cgucaauuacaaugguauu

SEQ ID NO: 309835 - RNA, 19 nt, Artificial Sequence
  Description of Artificial Sequence: Synthetic oligonucleotide
cccucccuauuuuaucuuu

SEQ ID NO: 309836 - RNA, 19 nt, Artificial Sequence
  Description of Artificial Sequence: Synthetic oligonucleotide
ccgcaucagggauccagcu

SEQ ID NO: 309837 - RNA, 19 nt, Artificial Sequence
  Description of Artificial Sequence: Synthetic oligonucleotide
cugcggggacucuguugcu

SEQ ID NO: 309838 - RNA, 19 nt, Artificial Sequence
  Description of Artificial Sequence: Synthetic oligonucleotide
ccccgucaauuacaauggu

SEQ ID NO: 309839 - RNA, 19 nt, Artificial Sequence
  Description of Artificial Sequence: Synthetic oligonucleotide
cugcugcggggacucuguu

SEQ ID NO: 309840 - RNA, 19 nt, Artificial Sequence
  Description of Artificial Sequence: Synthetic oligonucleotide
gccuggcuuaggcccuauu

SEQ ID NO: 309841 - RNA, 19 nt, Artificial Sequence
  Description of Artificial Sequence: Synthetic oligonucleotide
ggggaccaacaagguccau

SEQ ID NO: 309842 - RNA, 19 nt, Artificial Sequence
  Description of Artificial Sequence: Synthetic oligonucleotide
uaugauucaacuaacacug

SEQ ID NO: 309843 - RNA, 19 nt, Artificial Sequence
  Description of Artificial Sequence: Synthetic oligonucleotide
auaauuaagacuaacuucc

SEQ ID NO: 309844 - RNA, 19 nt, Artificial Sequence
  Description of Artificial Sequence: Synthetic oligonucleotide
acuucauacaucuagguac

SEQ ID NO: 309845 - RNA, 19 nt, Artificial Sequence
  Description of Artificial Sequence: Synthetic oligonucleotide
aauacaucacuuuuaacag

SEQ ID NO: 309846 - RNA, 19 nt, Artificial Sequence
  Description of Artificial Sequence: Synthetic oligonucleotide
auacuugccagauagauac

SEQ ID NO: 309847 - RNA, 19 nt, Artificial Sequence
  Description of Artificial Sequence: Synthetic oligonucleotide
uuugcuagcagaauuauga

SEQ ID NO: 309848 - RNA, 19 nt, Artificial Sequence
  Description of Artificial Sequence: Synthetic oligonucleotide
aaaucuaagcaacaauggg

SEQ ID NO: 309849 - RNA, 19 nt, Artificial Sequence
  Description of Artificial Sequence: Synthetic oligonucleotide
auuaaaucauuauuucacc

SEQ ID NO: 309850 - RNA, 19 nt, Artificial Sequence
  Description of Artificial Sequence: Synthetic oligonucleotide
uaauaauacguccaucugg

SEQ ID NO: 309851 - RNA, 19 nt, Artificial Sequence
  Description of Artificial Sequence: Synthetic oligonucleotide
aauacuuaauaucacagaa

SEQ ID NO: 309852 - RNA, 19 nt, Artificial Sequence
  Description of Artificial Sequence: Synthetic oligonucleotide
ggaucuuaaauuuagaaag

SEQ ID NO: 309853 - RNA, 19 nt, Artificial Sequence
  Description of Artificial Sequence: Synthetic oligonucleotide
aaauaugagucacaccauc

SEQ ID NO: 309854 - RNA, 19 nt, Artificial Sequence
  Description of Artificial Sequence: Synthetic oligonucleotide
guaaguuucaaacauuacc

SEQ ID NO: 309855 - RNA, 19 nt, Artificial Sequence
  Description of Artificial Sequence: Synthetic oligonucleotide
aaaauucagaucugguauc

SEQ ID NO: 309856 - RNA, 19 nt, Artificial Sequence
  Description of Artificial Sequence: Synthetic oligonucleotide
ugugaguaaaauuuugcag

SEQ ID NO: 309857 - RNA, 19 nt, Artificial Sequence
  Description of Artificial Sequence: Synthetic oligonucleotide
ucaacuaacacuguggucu

SEQ ID NO: 309858 - RNA, 19 nt, Artificial Sequence
  Description of Artificial Sequence: Synthetic oligonucleotide
ugcaucagaggcaugauag

SEQ ID NO: 309859 - RNA, 19 nt, Artificial Sequence
  Description of Artificial Sequence: Synthetic oligonucleotide
agcuugauaagauaccugg

SEQ ID NO: 309860 - RNA, 19 nt, Artificial Sequence
  Description of Artificial Sequence: Synthetic oligonucleotide
aguuagagccggcauaucc

SEQ ID NO: 309861 - RNA, 19 nt, Artificial Sequence
  Description of Artificial Sequence: Synthetic oligonucleotide
auaugauucaacuaacacu

SEQ ID NO: 309862 - RNA, 19 nt, Artificial Sequence
  Description of Artificial Sequence: Synthetic oligonucleotide
caugauaggaacaagccug

SEQ ID NO: 309863 - RNA, 19 nt, Artificial Sequence
  Description of Artificial Sequence: Synthetic oligonucleotide
ucuauguugaguuucucug

SEQ ID NO: 309864 - RNA, 19 nt, Artificial Sequence
  Description of Artificial Sequence: Synthetic oligonucleotide
aaucauacgaacugucuca

SEQ ID NO: 309865 - RNA, 19 nt, Artificial Sequence
  Description of Artificial Sequence: Synthetic oligonucleotide
ucuacuacuacaccaguca

SEQ ID NO: 309866 - RNA, 19 nt, Artificial Sequence
  Description of Artificial Sequence: Synthetic oligonucleotide
uguaaccaacauaacaaag

SEQ ID NO: 309867 - RNA, 19 nt, Artificial Sequence
  Description of Artificial Sequence: Synthetic oligonucleotide
gagauaacaaacaauacca

SEQ ID NO: 309868 - RNA, 19 nt, Artificial Sequence
  Description of Artificial Sequence: Synthetic oligonucleotide
aacucguucuaaguaaagc

SEQ ID NO: 309869 - RNA, 19 nt, Artificial Sequence
  Description of Artificial Sequence: Synthetic oligonucleotide
guuccggaaaguuagagcc

SEQ ID NO: 309870 - RNA, 19 nt, Artificial Sequence
  Description of Artificial Sequence: Synthetic oligonucleotide
uaauacguccaucugggag

SEQ ID NO: 309871 - RNA, 19 nt, Artificial Sequence
  Description of Artificial Sequence: Synthetic oligonucleotide
ugucgagucauccaaaagu

SEQ ID NO: 309872 - RNA, 19 nt, Artificial Sequence
  Description of Artificial Sequence: Synthetic oligonucleotide
uuagaaagacuucauacau

SEQ ID NO: 309873 - RNA, 19 nt, Artificial Sequence
  Description of Artificial Sequence: Synthetic oligonucleotide
ucagcagaaugguugaagg

SEQ ID NO: 309874 - RNA, 19 nt, Artificial Sequence
  Description of Artificial Sequence: Synthetic oligonucleotide
uucaauucggaucuuaaau

SEQ ID NO: 309875 - RNA, 19 nt, Artificial Sequence
  Description of Artificial Sequence: Synthetic oligonucleotide
uguugaguuucucuggucc

SEQ ID NO: 309876 - RNA, 19 nt, Artificial Sequence
  Description of Artificial Sequence: Synthetic oligonucleotide
gauucaacuaacacugugg

SEQ ID NO: 309877 - RNA, 19 nt, Artificial Sequence
  Description of Artificial Sequence: Synthetic oligonucleotide
uguguuaaauuuagaaugu

SEQ ID NO: 309878 - RNA, 19 nt, Artificial Sequence
  Description of Artificial Sequence: Synthetic oligonucleotide
ucugugaguaaaauuuugc

SEQ ID NO: 309879 - RNA, 19 nt, Artificial Sequence
  Description of Artificial Sequence: Synthetic oligonucleotide
acauucaagguacaaauga

SEQ ID NO: 309880 - RNA, 19 nt, Artificial Sequence
  Description of Artificial Sequence: Synthetic oligonucleotide
ucuagguacuaucugauau

SEQ ID NO: 309881 - RNA, 19 nt, Artificial Sequence
  Description of Artificial Sequence: Synthetic oligonucleotide
agucacaccgaguuucucc

SEQ ID NO: 309882 - RNA, 19 nt, Artificial Sequence
  Description of Artificial Sequence: Synthetic oligonucleotide
aaucuaagcaacaaugggu

SEQ ID NO: 309883 - RNA, 19 nt, Artificial Sequence
  Description of Artificial Sequence: Synthetic oligonucleotide
acuaacuuuaaaguuaucu

SEQ ID NO: 309884 - RNA, 19 nt, Artificial Sequence
  Description of Artificial Sequence: Synthetic oligonucleotide
uagaauacauacaguaugu

SEQ ID NO: 309885 - RNA, 19 nt, Artificial Sequence
  Description of Artificial Sequence: Synthetic oligonucleotide
aauucacuugccucaucac

SEQ ID NO: 309886 - RNA, 19 nt, Artificial Sequence
  Description of Artificial Sequence: Synthetic oligonucleotide
aaaagcaauucagcaacac

SEQ ID NO: 309887 - RNA, 19 nt, Artificial Sequence
  Description of Artificial Sequence: Synthetic oligonucleotide
uccuauuuguucaaauuga

SEQ ID NO: 309888 - RNA, 19 nt, Artificial Sequence
  Description of Artificial Sequence: Synthetic oligonucleotide
uugaagugaaggaaaauau

SEQ ID NO: 309889 - RNA, 19 nt, Artificial Sequence
  Description of Artificial Sequence: Synthetic oligonucleotide
uguguuuguaaaauucaga

SEQ ID NO: 309890 - RNA, 19 nt, Artificial Sequence
  Description of Artificial Sequence: Synthetic oligonucleotide
cuaagaaaucccucaaggc

SEQ ID NO: 309891 - RNA, 19 nt, Artificial Sequence
  Description of Artificial Sequence: Synthetic oligonucleotide
uguauaugauucaacuaac

SEQ ID NO: 309892 - RNA, 19 nt, Artificial Sequence
  Description of Artificial Sequence: Synthetic oligonucleotide
ugguugaucugauaauagg

SEQ ID NO: 309893 - RNA, 19 nt, Artificial Sequence
  Description of Artificial Sequence: Synthetic oligonucleotide
uaagaaucagaucuuuuaa

SEQ ID NO: 309894 - RNA, 19 nt, Artificial Sequence
  Description of Artificial Sequence: Synthetic oligonucleotide
caagccuggcauuuuaucg

SEQ ID NO: 309895 - RNA, 19 nt, Artificial Sequence
  Description of Artificial Sequence: Synthetic oligonucleotide
uuuaaucauacgaacuguc

SEQ ID NO: 309896 - RNA, 19 nt, Artificial Sequence
  Description of Artificial Sequence: Synthetic oligonucleotide
ugauucaacuaacacugug

SEQ ID NO: 309897 - RNA, 19 nt, Artificial Sequence
  Description of Artificial Sequence: Synthetic oligonucleotide
ucucguuccaaccuugaug

SEQ ID NO: 309898 - RNA, 19 nt, Artificial Sequence
  Description of Artificial Sequence: Synthetic oligonucleotide
aaacaaauucuacauucaa

SEQ ID NO: 309899 - RNA, 19 nt, Artificial Sequence
  Description of Artificial Sequence: Synthetic oligonucleotide
uuuuaaggacucaaaccug

SEQ ID NO: 309900 - RNA, 19 nt, Artificial Sequence
  Description of Artificial Sequence: Synthetic oligonucleotide
uaaucauacgaacugucuc

SEQ ID NO: 309901 - RNA, 19 nt, Artificial Sequence
  Description of Artificial Sequence: Synthetic oligonucleotide
auuguaaccaacauaacaa

SEQ ID NO: 309902 - RNA, 19 nt, Artificial Sequence
  Description of Artificial Sequence: Synthetic oligonucleotide
aacauugagcgcaauucac

SEQ ID NO: 309903 - RNA, 19 nt, Artificial Sequence
  Description of Artificial Sequence: Synthetic oligonucleotide
uggauggcuacauacacac

SEQ ID NO: 309904 - RNA, 19 nt, Artificial Sequence
  Description of Artificial Sequence: Synthetic oligonucleotide
agagucuacuacuacacca

SEQ ID NO: 309905 - RNA, 19 nt, Artificial Sequence
  Description of Artificial Sequence: Synthetic oligonucleotide
ugauaauaggucuuccaac

SEQ ID NO: 309906 - RNA, 19 nt, Artificial Sequence
  Description of Artificial Sequence: Synthetic oligonucleotide
uuuagaauguuuagcuuuc

SEQ ID NO: 309907 - RNA, 19 nt, Artificial Sequence
  Description of Artificial Sequence: Synthetic oligonucleotide
acucguucuaaguaaagcu

SEQ ID NO: 309908 - RNA, 19 nt, Artificial Sequence
  Description of Artificial Sequence: Synthetic oligonucleotide
uuucuggugucuauguuga

SEQ ID NO: 309909 - RNA, 19 nt, Artificial Sequence
  Description of Artificial Sequence: Synthetic oligonucleotide
auaugagucacaccaucuc

SEQ ID NO: 309910 - RNA, 19 nt, Artificial Sequence
  Description of Artificial Sequence: Synthetic oligonucleotide
caaaugauaaugcucuuuc

SEQ ID NO: 309911 - RNA, 19 nt, Artificial Sequence
  Description of Artificial Sequence: Synthetic oligonucleotide
ucaagagcuaagaaucaga

SEQ ID NO: 309912 - RNA, 19 nt, Artificial Sequence
  Description of Artificial Sequence: Synthetic oligonucleotide
guguauaugauucaacuaa

SEQ ID NO: 309913 - RNA, 19 nt, Artificial Sequence
  Description of Artificial Sequence: Synthetic oligonucleotide
uaccucuacaaucuucucc

SEQ ID NO: 309914 - RNA, 19 nt, Artificial Sequence
  Description of Artificial Sequence: Synthetic oligonucleotide
uuuguaaaauucagaucug

SEQ ID NO: 309915 - RNA, 19 nt, Artificial Sequence
  Description of Artificial Sequence: Synthetic oligonucleotide
caugguucgcccuagugag

SEQ ID NO: 309916 - RNA, 19 nt, Artificial Sequence
  Description of Artificial Sequence: Synthetic oligonucleotide
uugagauaacaaacaauac

SEQ ID NO: 309917 - RNA, 19 nt, Artificial Sequence
  Description of Artificial Sequence: Synthetic oligonucleotide
caauagaauacauacagua

SEQ ID NO: 309918 - RNA, 19 nt, Artificial Sequence
  Description of Artificial Sequence: Synthetic oligonucleotide
agauagauacuaacagugc

SEQ ID NO: 309919 - RNA, 19 nt, Artificial Sequence
  Description of Artificial Sequence: Synthetic oligonucleotide
aauagaauacauacaguau

SEQ ID NO: 309920 - RNA, 19 nt, Artificial Sequence
  Description of Artificial Sequence: Synthetic oligonucleotide
agcgcaauucacuugccuc

SEQ ID NO: 309921 - RNA, 19 nt, Artificial Sequence
  Description of Artificial Sequence: Synthetic oligonucleotide
cuauguugaguuucucugg

SEQ ID NO: 309922 - RNA, 19 nt, Artificial Sequence
  Description of Artificial Sequence: Synthetic oligonucleotide
auucaacuaacacuguggu

SEQ ID NO: 309923 - RNA, 19 nt, Artificial Sequence
  Description of Artificial Sequence: Synthetic oligonucleotide
guuucuggugucuauguug

SEQ ID NO: 309924 - RNA, 19 nt, Artificial Sequence
  Description of Artificial Sequence: Synthetic oligonucleotide
acaucuagguacuaucuga

SEQ ID NO: 309925 - RNA, 19 nt, Artificial Sequence
  Description of Artificial Sequence: Synthetic oligonucleotide
ugucaucccaauuucguac

SEQ ID NO: 309926 - RNA, 19 nt, Artificial Sequence
  Description of Artificial Sequence: Synthetic oligonucleotide
ucguucuaaguaaagcugu

SEQ ID NO: 309927 - RNA, 19 nt, Artificial Sequence
  Description of Artificial Sequence: Synthetic oligonucleotide
caguccuauauacaguagg

SEQ ID NO: 309928 - RNA, 19 nt, Artificial Sequence
  Description of Artificial Sequence: Synthetic oligonucleotide
uuuuaucgaacagucacac

SEQ ID NO: 309929 - RNA, 19 nt, Artificial Sequence
  Description of Artificial Sequence: Synthetic oligonucleotide
ucaauucggaucuuaaauu

SEQ ID NO: 309930 - RNA, 19 nt, Artificial Sequence
  Description of Artificial Sequence: Synthetic oligonucleotide
aaucccucaaggcauuggu

SEQ ID NO: 309931 - RNA, 19 nt, Artificial Sequence
  Description of Artificial Sequence: Synthetic oligonucleotide
uguuuguaaaauucagauc

SEQ ID NO: 309932 - RNA, 19 nt, Artificial Sequence
  Description of Artificial Sequence: Synthetic oligonucleotide
ggaaaucuaagcaacaaug

SEQ ID NO: 309933 - RNA, 19 nt, Artificial Sequence
  Description of Artificial Sequence: Synthetic oligonucleotide
uucuuguaaggugagggag

SEQ ID NO: 309934 - RNA, 19 nt, Artificial Sequence
  Description of Artificial Sequence: Synthetic oligonucleotide
acguacacccuuuucuugg

SEQ ID NO: 309935 - RNA, 19 nt, Artificial Sequence
  Description of Artificial Sequence: Synthetic oligonucleotide
cauacaucuagguacuauc

SEQ ID NO: 309936 - RNA, 19 nt, Artificial Sequence
  Description of Artificial Sequence: Synthetic oligonucleotide
uacaucuagguacuaucug

SEQ ID NO: 309937 - RNA, 19 nt, Artificial Sequence
  Description of Artificial Sequence: Synthetic oligonucleotide
uuucguacuaugccguucu

SEQ ID NO: 309938 - RNA, 19 nt, Artificial Sequence
  Description of Artificial Sequence: Synthetic oligonucleotide
uacugugauacaaugucuc

SEQ ID NO: 309939 - RNA, 19 nt, Artificial Sequence
  Description of Artificial Sequence: Synthetic oligonucleotide
cuguuuaagcucucguucc

SEQ ID NO: 309940 - RNA, 19 nt, Artificial Sequence
  Description of Artificial Sequence: Synthetic oligonucleotide
cauugaucaagugaggcug

SEQ ID NO: 309941 - RNA, 19 nt, Artificial Sequence
  Description of Artificial Sequence: Synthetic oligonucleotide
aacaccgaccagucggcac

SEQ ID NO: 309942 - RNA, 19 nt, Artificial Sequence
  Description of Artificial Sequence: Synthetic oligonucleotide
ucaccuuaggauaggaaaa

SEQ ID NO: 309943 - RNA, 19 nt, Artificial Sequence
  Description of Artificial Sequence: Synthetic oligonucleotide
aauaugagucacaccaucu

SEQ ID NO: 309944 - RNA, 19 nt, Artificial Sequence
  Description of Artificial Sequence: Synthetic oligonucleotide
ucuuguaaggugagggaga

SEQ ID NO: 309945 - RNA, 19 nt, Artificial Sequence
  Description of Artificial Sequence: Synthetic oligonucleotide
uguuccggaaaguuagagc

SEQ ID NO: 309946 - RNA, 19 nt, Artificial Sequence
  Description of Artificial Sequence: Synthetic oligonucleotide
cucguucuaaguaaagcug

SEQ ID NO: 309947 - RNA, 19 nt, Artificial Sequence
  Description of Artificial Sequence: Synthetic oligonucleotide
aagccuggcauuuuaucga

SEQ ID NO: 309948 - RNA, 19 nt, Artificial Sequence
  Description of Artificial Sequence: Synthetic oligonucleotide
acauaguugagccuccaga

SEQ ID NO: 309949 - RNA, 19 nt, Artificial Sequence
  Description of Artificial Sequence: Synthetic oligonucleotide
aaauucagaucugguauca

SEQ ID NO: 309950 - RNA, 19 nt, Artificial Sequence
  Description of Artificial Sequence: Synthetic oligonucleotide
gcaacaauggguuucaaga

SEQ ID NO: 309951 - RNA, 19 nt, Artificial Sequence
  Description of Artificial Sequence: Synthetic oligonucleotide
ugaagugaaggaaaauauu

SEQ ID NO: 309952 - RNA, 19 nt, Artificial Sequence
  Description of Artificial Sequence: Synthetic oligonucleotide
aagaaaucccucaaggcau

SEQ ID NO: 309953 - RNA, 19 nt, Artificial Sequence
  Description of Artificial Sequence: Synthetic oligonucleotide
gaggcugaaauaaagcuuc

SEQ ID NO: 309954 - RNA, 19 nt, Artificial Sequence
  Description of Artificial Sequence: Synthetic oligonucleotide
aaacuauaaaauggaauuu

SEQ ID NO: 309955 - RNA, 19 nt, Artificial Sequence
  Description of Artificial Sequence: Synthetic oligonucleotide
gugaguaaaauuuugcagu

SEQ ID NO: 309956 - RNA, 19 nt, Artificial Sequence
  Description of Artificial Sequence: Synthetic oligonucleotide
aggaacaccaugugcuuuc

SEQ ID NO: 309957 - RNA, 19 nt, Artificial Sequence
  Description of Artificial Sequence: Synthetic oligonucleotide
aaugucucauuauuucauu

SEQ ID NO: 309958 - RNA, 19 nt, Artificial Sequence
  Description of Artificial Sequence: Synthetic oligonucleotide
ucuacauucaagguacaaa

SEQ ID NO: 309959 - RNA, 19 nt, Artificial Sequence
  Description of Artificial Sequence: Synthetic oligonucleotide
ucuacccuauucuuucuug

SEQ ID NO: 309960 - RNA, 19 nt, Artificial Sequence
  Description of Artificial Sequence: Synthetic oligonucleotide
acauugaucaagugaggcu

SEQ ID NO: 309961 - RNA, 19 nt, Artificial Sequence
  Description of Artificial Sequence: Synthetic oligonucleotide
acuaugccguucuccaugg

SEQ ID NO: 309962 - RNA, 19 nt, Artificial Sequence
  Description of Artificial Sequence: Synthetic oligonucleotide
acuuuaauaauacguccau

SEQ ID NO: 309963 - RNA, 19 nt, Artificial Sequence
  Description of Artificial Sequence: Synthetic oligonucleotide
cuugcucaauauuguaacc

SEQ ID NO: 309964 - RNA, 19 nt, Artificial Sequence
  Description of Artificial Sequence: Synthetic oligonucleotide
auacuuaauaucacagaag

SEQ ID NO: 309965 - RNA, 19 nt, Artificial Sequence
  Description of Artificial Sequence: Synthetic oligonucleotide
ugaggcugaaauaaagcuu

SEQ ID NO: 309966 - RNA, 19 nt, Artificial Sequence
  Description of Artificial Sequence: Synthetic oligonucleotide
ugauaagauaccugguaau

SEQ ID NO: 309967 - RNA, 19 nt, Artificial Sequence
  Description of Artificial Sequence: Synthetic oligonucleotide
cauccaauaccacauuuuc

SEQ ID NO: 309968 - RNA, 19 nt, Artificial Sequence
  Description of Artificial Sequence: Synthetic oligonucleotide
ugguccaaauguguaaucc

SEQ ID NO: 309969 - RNA, 19 nt, Artificial Sequence
  Description of Artificial Sequence: Synthetic oligonucleotide
uaauaucccucccagcaau

SEQ ID NO: 309970 - RNA, 19 nt, Artificial Sequence
  Description of Artificial Sequence: Synthetic oligonucleotide
uuaagacuaacuuccuuuu

SEQ ID NO: 309971 - RNA, 19 nt, Artificial Sequence
  Description of Artificial Sequence: Synthetic oligonucleotide
uuccggaaaguuagagccg

SEQ ID NO: 309972 - RNA, 19 nt, Artificial Sequence
  Description of Artificial Sequence: Synthetic oligonucleotide
agugacucugagucgagca

SEQ ID NO: 309973 - RNA, 19 nt, Artificial Sequence
  Description of Artificial Sequence: Synthetic oligonucleotide
auucggaucuuaaauuuag

SEQ ID NO: 309974 - RNA, 19 nt, Artificial Sequence
  Description of Artificial Sequence: Synthetic oligonucleotide
uuuuguauuuacugugaua

SEQ ID NO: 309975 - RNA, 19 nt, Artificial Sequence
  Description of Artificial Sequence: Synthetic oligonucleotide
uguuuaagcucucguucca

SEQ ID NO: 309976 - RNA, 19 nt, Artificial Sequence
  Description of Artificial Sequence: Synthetic oligonucleotide
agguacaaaugauaaugcu

SEQ ID NO: 309977 - RNA, 19 nt, Artificial Sequence
  Description of Artificial Sequence: Synthetic oligonucleotide
uugucgagucauccaaaag

SEQ ID NO: 309978 - RNA, 19 nt, Artificial Sequence
  Description of Artificial Sequence: Synthetic oligonucleotide
agaauacauacaguauguc

SEQ ID NO: 309979 - RNA, 19 nt, Artificial Sequence
  Description of Artificial Sequence: Synthetic oligonucleotide
uacacaccagaaaauuggu

SEQ ID NO: 309980 - RNA, 19 nt, Artificial Sequence
  Description of Artificial Sequence: Synthetic oligonucleotide
aguguauaugauucaacua

SEQ ID NO: 309981 - RNA, 19 nt, Artificial Sequence
  Description of Artificial Sequence: Synthetic oligonucleotide
cuaagaaucagaucuuuua

SEQ ID NO: 309982 - RNA, 19 nt, Artificial Sequence
  Description of Artificial Sequence: Synthetic oligonucleotide
agcagcuugauaagauacc

SEQ ID NO: 309983 - RNA, 19 nt, Artificial Sequence
  Description of Artificial Sequence: Synthetic oligonucleotide
ugguaccaguccuauauac

SEQ ID NO: 309984 - RNA, 19 nt, Artificial Sequence
  Description of Artificial Sequence: Synthetic oligonucleotide
cauaagauccuugauuuca

SEQ ID NO: 309985 - RNA, 19 nt, Artificial Sequence
  Description of Artificial Sequence: Synthetic oligonucleotide
aauguuagaaagacuucau

SEQ ID NO: 309986 - RNA, 19 nt, Artificial Sequence
  Description of Artificial Sequence: Synthetic oligonucleotide
gaucaagugaggcugaaau

SEQ ID NO: 309987 - RNA, 19 nt, Artificial Sequence
  Description of Artificial Sequence: Synthetic oligonucleotide
aagugacucugagucgagc

SEQ ID NO: 309988 - RNA, 19 nt, Artificial Sequence
  Description of Artificial Sequence: Synthetic oligonucleotide
uaccugguaauaucccucc

SEQ ID NO: 309989 - RNA, 19 nt, Artificial Sequence
  Description of Artificial Sequence: Synthetic oligonucleotide
gcaauauccagccuucuug

SEQ ID NO: 309990 - RNA, 19 nt, Artificial Sequence
  Description of Artificial Sequence: Synthetic oligonucleotide
accaugugcuuucuucggg

SEQ ID NO: 309991 - RNA, 19 nt, Artificial Sequence
  Description of Artificial Sequence: Synthetic oligonucleotide
auacacugggcaaauauga

SEQ ID NO: 309992 - RNA, 19 nt, Artificial Sequence
  Description of Artificial Sequence: Synthetic oligonucleotide
auuagcauuggaaaucuaa

SEQ ID NO: 309993 - RNA, 19 nt, Artificial Sequence
  Description of Artificial Sequence: Synthetic oligonucleotide
uauuuaggauucuacccua

SEQ ID NO: 309994 - RNA, 19 nt, Artificial Sequence
  Description of Artificial Sequence: Synthetic oligonucleotide
ugcuagcagaauuaugaaa

SEQ ID NO: 309995 - RNA, 19 nt, Artificial Sequence
  Description of Artificial Sequence: Synthetic oligonucleotide
ucugagucgagcacccaac

SEQ ID NO: 309996 - RNA, 19 nt, Artificial Sequence
  Description of Artificial Sequence: Synthetic oligonucleotide
uaugucccaacucccaaau

SEQ ID NO: 309997 - RNA, 19 nt, Artificial Sequence
  Description of Artificial Sequence: Synthetic oligonucleotide
ugaucugauaauaggucuu

SEQ ID NO: 309998 - RNA, 19 nt, Artificial Sequence
  Description of Artificial Sequence: Synthetic oligonucleotide
ucgagucauccaaaaguug

SEQ ID NO: 309999 - RNA, 19 nt, Artificial Sequence
  Description of Artificial Sequence: Synthetic oligonucleotide
aaggcauauccccgcaaca

SEQ ID NO: 310000 - RNA, 19 nt, Artificial Sequence
  Description of Artificial Sequence: Synthetic oligonucleotide
gaacugugaaaaguuaaca

SEQ ID NO: 310001 - RNA, 19 nt, Artificial Sequence
  Description of Artificial Sequence: Synthetic oligonucleotide
uucacaaacccagugccgu

SEQ ID NO: 310002 - RNA, 19 nt, Artificial Sequence
  Description of Artificial Sequence: Synthetic oligonucleotide
agacuucauacaucuaggu

SEQ ID NO: 310003 - RNA, 19 nt, Artificial Sequence
  Description of Artificial Sequence: Synthetic oligonucleotide
cuaagcaacaauggguuuc

SEQ ID NO: 310004 - RNA, 19 nt, Artificial Sequence
  Description of Artificial Sequence: Synthetic oligonucleotide
auauccagccuucuuguaa

SEQ ID NO: 310005 - RNA, 19 nt, Artificial Sequence
  Description of Artificial Sequence: Synthetic oligonucleotide
uuaaggacucaaaccugac

SEQ ID NO: 310006 - RNA, 19 nt, Artificial Sequence
  Description of Artificial Sequence: Synthetic oligonucleotide
uucggaucuuaaauuuaga

SEQ ID NO: 310007 - RNA, 19 nt, Artificial Sequence
  Description of Artificial Sequence: Synthetic oligonucleotide
uaagcaacaauggguuuca

SEQ ID NO: 310008 - RNA, 19 nt, Artificial Sequence
  Description of Artificial Sequence: Synthetic oligonucleotide
uuagagccggcauauccac

SEQ ID NO: 310009 - RNA, 19 nt, Artificial Sequence
  Description of Artificial Sequence: Synthetic oligonucleotide
auugagcgcaauucacuug

SEQ ID NO: 310010 - RNA, 19 nt, Artificial Sequence
  Description of Artificial Sequence: Synthetic oligonucleotide
acuacuacaccagucaaua

SEQ ID NO: 310011 - RNA, 19 nt, Artificial Sequence
  Description of Artificial Sequence: Synthetic oligonucleotide
gggguaauuaacuuccaac

SEQ ID NO: 310012 - RNA, 19 nt, Artificial Sequence
  Description of Artificial Sequence: Synthetic oligonucleotide
accaguccuauauacagua

SEQ ID NO: 310013 - RNA, 19 nt, Artificial Sequence
  Description of Artificial Sequence: Synthetic oligonucleotide
auaccugguaauaucccuc

SEQ ID NO: 310014 - RNA, 19 nt, Artificial Sequence
  Description of Artificial Sequence: Synthetic oligonucleotide
augauaggaacaagccugg

SEQ ID NO: 310015 - RNA, 19 nt, Artificial Sequence
  Description of Artificial Sequence: Synthetic oligonucleotide
auaccaacuggacggaaaa

SEQ ID NO: 310016 - RNA, 19 nt, Artificial Sequence
  Description of Artificial Sequence: Synthetic oligonucleotide
cuugauaagauaccuggua

SEQ ID NO: 310017 - RNA, 19 nt, Artificial Sequence
  Description of Artificial Sequence: Synthetic oligonucleotide
gauaagauaccugguaaua

SEQ ID NO: 310018 - RNA, 19 nt, Artificial Sequence
  Description of Artificial Sequence: Synthetic oligonucleotide
ucaccgaccauaagauccu

SEQ ID NO: 310019 - RNA, 19 nt, Artificial Sequence
  Description of Artificial Sequence: Synthetic oligonucleotide
uacuacuacaccagucaau

SEQ ID NO: 310020 - RNA, 19 nt, Artificial Sequence
  Description of Artificial Sequence: Synthetic oligonucleotide
aauacuugccagauagaua

SEQ ID NO: 310021 - RNA, 19 nt, Artificial Sequence
  Description of Artificial Sequence: Synthetic oligonucleotide
aauaccaacuggacggaaa

SEQ ID NO: 310022 - RNA, 19 nt, Artificial Sequence
  Description of Artificial Sequence: Synthetic oligonucleotide
auuuuaucgaacagucaca

SEQ ID NO: 310023 - RNA, 19 nt, Artificial Sequence
  Description of Artificial Sequence: Synthetic oligonucleotide
acuugccucaucaccgacc

SEQ ID NO: 310024 - RNA, 19 nt, Artificial Sequence
  Description of Artificial Sequence: Synthetic oligonucleotide
accugguaauaucccuccc

SEQ ID NO: 310025 - RNA, 19 nt, Artificial Sequence
  Description of Artificial Sequence: Synthetic oligonucleotide
auuucguacuaugccguuc

SEQ ID NO: 310026 - RNA, 19 nt, Artificial Sequence
  Description of Artificial Sequence: Synthetic oligonucleotide
accgaguuucuccagcaca

SEQ ID NO: 310027 - RNA, 19 nt, Artificial Sequence
  Description of Artificial Sequence: Synthetic oligonucleotide
cagcagaaugguugaaggc

SEQ ID NO: 310028 - RNA, 19 nt, Artificial Sequence
  Description of Artificial Sequence: Synthetic oligonucleotide
aguccuauauacaguaggu

SEQ ID NO: 310029 - RNA, 19 nt, Artificial Sequence
  Description of Artificial Sequence: Synthetic oligonucleotide
aauuucguacuaugccguu

SEQ ID NO: 310030 - RNA, 19 nt, Artificial Sequence
  Description of Artificial Sequence: Synthetic oligonucleotide
cuuaggauaggaaaacuau

SEQ ID NO: 310031 - RNA, 19 nt, Artificial Sequence
  Description of Artificial Sequence: Synthetic oligonucleotide
uguuuucuaccccuauauu

SEQ ID NO: 310032 - RNA, 19 nt, Artificial Sequence
  Description of Artificial Sequence: Synthetic oligonucleotide
aucuaagcaacaauggguu

SEQ ID NO: 310033 - RNA, 19 nt, Artificial Sequence
  Description of Artificial Sequence: Synthetic oligonucleotide
uucaacuaacacugugguc

SEQ ID NO: 310034 - RNA, 19 nt, Artificial Sequence
  Description of Artificial Sequence: Synthetic oligonucleotide
ccuucuuguaaggugaggg

SEQ ID NO: 310035 - RNA, 19 nt, Artificial Sequence
  Description of Artificial Sequence: Synthetic oligonucleotide
auacaucuagguacuaucu

SEQ ID NO: 310036 - RNA, 19 nt, Artificial Sequence
  Description of Artificial Sequence: Synthetic oligonucleotide
ugguucgcccuagugagcc

SEQ ID NO: 310037 - RNA, 19 nt, Artificial Sequence
  Description of Artificial Sequence: Synthetic oligonucleotide
gaucugauaauaggucuuc

SEQ ID NO: 310038 - RNA, 19 nt, Artificial Sequence
  Description of Artificial Sequence: Synthetic oligonucleotide
gcuguuuaagcucucguuc

SEQ ID NO: 310039 - RNA, 19 nt, Artificial Sequence
  Description of Artificial Sequence: Synthetic oligonucleotide
ugggguaauuaacuuccaa

SEQ ID NO: 310040 - RNA, 19 nt, Artificial Sequence
  Description of Artificial Sequence: Synthetic oligonucleotide
auaaugcucuuucacuguu

SEQ ID NO: 310041 - RNA, 19 nt, Artificial Sequence
  Description of Artificial Sequence: Synthetic oligonucleotide
uugcuagcagaauuaugaa

SEQ ID NO: 310042 - RNA, 19 nt, Artificial Sequence
  Description of Artificial Sequence: Synthetic oligonucleotide
ucgggguggaucuucaauu

SEQ ID NO: 310043 - RNA, 19 nt, Artificial Sequence
  Description of Artificial Sequence: Synthetic oligonucleotide
aauucggaucuuaaauuua

SEQ ID NO: 310044 - RNA, 19 nt, Artificial Sequence
  Description of Artificial Sequence: Synthetic oligonucleotide
ugguaauaucccucccagc

SEQ ID NO: 310045 - RNA, 19 nt, Artificial Sequence
  Description of Artificial Sequence: Synthetic oligonucleotide
ucguacuaugccguucucc

SEQ ID NO: 310046 - RNA, 19 nt, Artificial Sequence
  Description of Artificial Sequence: Synthetic oligonucleotide
caccaugugcuuucuucgg

SEQ ID NO: 310047 - RNA, 19 nt, Artificial Sequence
  Description of Artificial Sequence: Synthetic oligonucleotide
aguaugucccaacucccaa

SEQ ID NO: 310048 - RNA, 19 nt, Artificial Sequence
  Description of Artificial Sequence: Synthetic oligonucleotide
ucugguccaaauguguaau

SEQ ID NO: 310049 - RNA, 19 nt, Artificial Sequence
  Description of Artificial Sequence: Synthetic oligonucleotide
ucauacaucuagguacuau

SEQ ID NO: 310050 - RNA, 19 nt, Artificial Sequence
  Description of Artificial Sequence: Synthetic oligonucleotide
agauacuaacagugcucag

SEQ ID NO: 310051 - RNA, 19 nt, Artificial Sequence
  Description of Artificial Sequence: Synthetic oligonucleotide
uauauacaguagguguccu

SEQ ID NO: 310052 - RNA, 19 nt, Artificial Sequence
  Description of Artificial Sequence: Synthetic oligonucleotide
acgaacugucucaaaauca

SEQ ID NO: 310053 - RNA, 19 nt, Artificial Sequence
  Description of Artificial Sequence: Synthetic oligonucleotide
ccucaauagucauugguac

SEQ ID NO: 310054 - RNA, 19 nt, Artificial Sequence
  Description of Artificial Sequence: Synthetic oligonucleotide
ucuugucgagucauccaaa

SEQ ID NO: 310055 - RNA, 19 nt, Artificial Sequence
  Description of Artificial Sequence: Synthetic oligonucleotide
aggcauauccccgcaacag

SEQ ID NO: 310056 - RNA, 19 nt, Artificial Sequence
  Description of Artificial Sequence: Synthetic oligonucleotide
uggcuacauacacaccaga

SEQ ID NO: 310057 - RNA, 19 nt, Artificial Sequence
  Description of Artificial Sequence: Synthetic oligonucleotide
gaacucguucuaaguaaag

SEQ ID NO: 310058 - RNA, 19 nt, Artificial Sequence
  Description of Artificial Sequence: Synthetic oligonucleotide
agcuguuuaagcucucguu

SEQ ID NO: 310059 - RNA, 19 nt, Artificial Sequence
  Description of Artificial Sequence: Synthetic oligonucleotide
gccuugagcauacaaaguc

SEQ ID NO: 310060 - RNA, 19 nt, Artificial Sequence
  Description of Artificial Sequence: Synthetic oligonucleotide
uugguacucuugucgaguc

SEQ ID NO: 310061 - RNA, 19 nt, Artificial Sequence
  Description of Artificial Sequence: Synthetic oligonucleotide
caaagugacucugagucga

SEQ ID NO: 310062 - RNA, 19 nt, Artificial Sequence
  Description of Artificial Sequence: Synthetic oligonucleotide
acaguagguguccugcaau

SEQ ID NO: 310063 - RNA, 19 nt, Artificial Sequence
  Description of Artificial Sequence: Synthetic oligonucleotide
caacauugagcgcaauuca

SEQ ID NO: 310064 - RNA, 19 nt, Artificial Sequence
  Description of Artificial Sequence: Synthetic oligonucleotide
uccaugggguaauuaacuu

SEQ ID NO: 310065 - RNA, 19 nt, Artificial Sequence
  Description of Artificial Sequence: Synthetic oligonucleotide
caguagguguccugcaaug

SEQ ID NO: 310066 - RNA, 19 nt, Artificial Sequence
  Description of Artificial Sequence: Synthetic oligonucleotide
acaccgaccagucggcacu

SEQ ID NO: 310067 - RNA, 19 nt, Artificial Sequence
  Description of Artificial Sequence: Synthetic oligonucleotide
agugcucagaacugugaaa

SEQ ID NO: 310068 - RNA, 19 nt, Artificial Sequence
  Description of Artificial Sequence: Synthetic oligonucleotide
uugagccuccagaaagcac

SEQ ID NO: 310069 - RNA, 19 nt, Artificial Sequence
  Description of Artificial Sequence: Synthetic oligonucleotide
agucuacuacuacaccagu

SEQ ID NO: 310070 - RNA, 19 nt, Artificial Sequence
  Description of Artificial Sequence: Synthetic oligonucleotide
acaccaacucccucaacau

SEQ ID NO: 310071 - RNA, 19 nt, Artificial Sequence
  Description of Artificial Sequence: Synthetic oligonucleotide
acauugagcgcaauucacu

SEQ ID NO: 310072 - RNA, 19 nt, Artificial Sequence
  Description of Artificial Sequence: Synthetic oligonucleotide
acugggcaaauaugaguca

SEQ ID NO: 310073 - RNA, 19 nt, Artificial Sequence
  Description of Artificial Sequence: Synthetic oligonucleotide
gucacaccgaguuucucca

SEQ ID NO: 310074 - RNA, 19 nt, Artificial Sequence
  Description of Artificial Sequence: Synthetic oligonucleotide
cagcuugauaagauaccug

SEQ ID NO: 310075 - RNA, 19 nt, Artificial Sequence
  Description of Artificial Sequence: Synthetic oligonucleotide
acccuauucuuucuuguuu

SEQ ID NO: 310076 - RNA, 19 nt, Artificial Sequence
  Description of Artificial Sequence: Synthetic oligonucleotide
acacguacacccuuuucuu

SEQ ID NO: 310077 - RNA, 19 nt, Artificial Sequence
  Description of Artificial Sequence: Synthetic oligonucleotide
guuagagccggcauaucca

SEQ ID NO: 310078 - RNA, 19 nt, Artificial Sequence
  Description of Artificial Sequence: Synthetic oligonucleotide
cuaaggccagcuucuguuc

SEQ ID NO: 310079 - RNA, 19 nt, Artificial Sequence
  Description of Artificial Sequence: Synthetic oligonucleotide
aaagugacucugagucgag

SEQ ID NO: 310080 - RNA, 19 nt, Artificial Sequence
  Description of Artificial Sequence: Synthetic oligonucleotide
uucuaccccuauauuuaaa

SEQ ID NO: 310081 - RNA, 19 nt, Artificial Sequence
  Description of Artificial Sequence: Synthetic oligonucleotide
acacccuuuucuugguacu

SEQ ID NO: 310082 - RNA, 19 nt, Artificial Sequence
  Description of Artificial Sequence: Synthetic oligonucleotide
uucuacauucaagguacaa

SEQ ID NO: 310083 - RNA, 19 nt, Artificial Sequence
  Description of Artificial Sequence: Synthetic oligonucleotide
ucuaagcaacaauggguuu

SEQ ID NO: 310084 - RNA, 19 nt, Artificial Sequence
  Description of Artificial Sequence: Synthetic oligonucleotide
auaauacguccaucuggga

SEQ ID NO: 310085 - RNA, 19 nt, Artificial Sequence
  Description of Artificial Sequence: Synthetic oligonucleotide
cacguacacccuuuucuug

SEQ ID NO: 310086 - RNA, 19 nt, Artificial Sequence
  Description of Artificial Sequence: Synthetic oligonucleotide
auaggugguucugugagua

SEQ ID NO: 310087 - RNA, 19 nt, Artificial Sequence
  Description of Artificial Sequence: Synthetic oligonucleotide
caccuuaggauaggaaaac

SEQ ID NO: 310088 - RNA, 19 nt, Artificial Sequence
  Description of Artificial Sequence: Synthetic oligonucleotide
ugagcgcaauucacuugcc

SEQ ID NO: 310089 - RNA, 19 nt, Artificial Sequence
  Description of Artificial Sequence: Synthetic oligonucleotide
uaaugcucuuucacuguuu

SEQ ID NO: 310090 - RNA, 19 nt, Artificial Sequence
  Description of Artificial Sequence: Synthetic oligonucleotide
cuucaauucggaucuuaaa

SEQ ID NO: 310091 - RNA, 19 nt, Artificial Sequence
  Description of Artificial Sequence: Synthetic oligonucleotide
uucuacccuauucuuucuu

SEQ ID NO: 310092 - RNA, 19 nt, Artificial Sequence
  Description of Artificial Sequence: Synthetic oligonucleotide
aggcugaaauaaagcuucc

SEQ ID NO: 310093 - RNA, 19 nt, Artificial Sequence
  Description of Artificial Sequence: Synthetic oligonucleotide
guguuccggaaaguuagag

SEQ ID NO: 310094 - RNA, 19 nt, Artificial Sequence
  Description of Artificial Sequence: Synthetic oligonucleotide
gaggcaugauaggaacaag

SEQ ID NO: 310095 - RNA, 19 nt, Artificial Sequence
  Description of Artificial Sequence: Synthetic oligonucleotide
auccaauaccacauuuucu

SEQ ID NO: 310096 - RNA, 19 nt, Artificial Sequence
  Description of Artificial Sequence: Synthetic oligonucleotide
gccguugucgcacaccacc

SEQ ID NO: 310097 - RNA, 19 nt, Artificial Sequence
  Description of Artificial Sequence: Synthetic oligonucleotide
ccaacauugagcgcaauuc

SEQ ID NO: 310098 - RNA, 19 nt, Artificial Sequence
  Description of Artificial Sequence: Synthetic oligonucleotide
guaauaucccucccagcaa

SEQ ID NO: 310099 - RNA, 19 nt, Artificial Sequence
  Description of Artificial Sequence: Synthetic oligonucleotide
gcauaauuaagacuaacuu

SEQ ID NO: 310100 - RNA, 19 nt, Artificial Sequence
  Description of Artificial Sequence: Synthetic oligonucleotide
gggguggaucuucaauucg

SEQ ID NO: 310101 - RNA, 19 nt, Artificial Sequence
  Description of Artificial Sequence: Synthetic oligonucleotide
ucauugguaccaguccuau

SEQ ID NO: 310102 - RNA, 19 nt, Artificial Sequence
  Description of Artificial Sequence: Synthetic oligonucleotide
ggcaaauaugagucacacc

SEQ ID NO: 310103 - RNA, 19 nt, Artificial Sequence
  Description of Artificial Sequence: Synthetic oligonucleotide
cuugucgagucauccaaaa

SEQ ID NO: 310104 - RNA, 19 nt, Artificial Sequence
  Description of Artificial Sequence: Synthetic oligonucleotide
caagagcuaagaaucagau

SEQ ID NO: 310105 - RNA, 19 nt, Artificial Sequence
  Description of Artificial Sequence: Synthetic oligonucleotide
caacuaacacuguggucuc

SEQ ID NO: 310106 - RNA, 19 nt, Artificial Sequence
  Description of Artificial Sequence: Synthetic oligonucleotide
gugauacaaugucucauua

SEQ ID NO: 310107 - RNA, 19 nt, Artificial Sequence
  Description of Artificial Sequence: Synthetic oligonucleotide
auaagauccuugauuucaa

SEQ ID NO: 310108 - RNA, 19 nt, Artificial Sequence
  Description of Artificial Sequence: Synthetic oligonucleotide
cauauccacacuucacaaa

SEQ ID NO: 310109 - RNA, 19 nt, Artificial Sequence
  Description of Artificial Sequence: Synthetic oligonucleotide
cucuugucgagucauccaa

SEQ ID NO: 310110 - RNA, 19 nt, Artificial Sequence
  Description of Artificial Sequence: Synthetic oligonucleotide
ggugucuauguugaguuuc

SEQ ID NO: 310111 - RNA, 19 nt, Artificial Sequence
  Description of Artificial Sequence: Synthetic oligonucleotide
cacacguacacccuuuucu

SEQ ID NO: 310112 - RNA, 19 nt, Artificial Sequence
  Description of Artificial Sequence: Synthetic oligonucleotide
ggcugaaauaaagcuuccg

SEQ ID NO: 310113 - RNA, 19 nt, Artificial Sequence
  Description of Artificial Sequence: Synthetic oligonucleotide
acuugccagauagauacua

SEQ ID NO: 310114 - RNA, 19 nt, Artificial Sequence
  Description of Artificial Sequence: Synthetic oligonucleotide
caauucggaucuuaaauuu

SEQ ID NO: 310115 - RNA, 19 nt, Artificial Sequence
  Description of Artificial Sequence: Synthetic oligonucleotide
caauuucguacuaugccgu

SEQ ID NO: 310116 - RNA, 19 nt, Artificial Sequence
  Description of Artificial Sequence: Synthetic oligonucleotide
ucauacgaacugucucaaa

SEQ ID NO: 310117 - RNA, 19 nt, Artificial Sequence
  Description of Artificial Sequence: Synthetic oligonucleotide
uagagccggcauauccaca

SEQ ID NO: 310118 - RNA, 19 nt, Artificial Sequence
  Description of Artificial Sequence: Synthetic oligonucleotide
ucaucccaauuucguacua

SEQ ID NO: 310119 - RNA, 19 nt, Artificial Sequence
  Description of Artificial Sequence: Synthetic oligonucleotide
aucuagguacuaucugaua

SEQ ID NO: 310120 - RNA, 19 nt, Artificial Sequence
  Description of Artificial Sequence: Synthetic oligonucleotide
acauccaauaccacauuuu

SEQ ID NO: 310121 - RNA, 19 nt, Artificial Sequence
  Description of Artificial Sequence: Synthetic oligonucleotide
gguugaucugauaauaggu

SEQ ID NO: 310122 - RNA, 19 nt, Artificial Sequence
  Description of Artificial Sequence: Synthetic oligonucleotide
uacuugccagauagauacu

SEQ ID NO: 310123 - RNA, 19 nt, Artificial Sequence
  Description of Artificial Sequence: Synthetic oligonucleotide
cugguccaaauguguaauc

SEQ ID NO: 310124 - RNA, 19 nt, Artificial Sequence
  Description of Artificial Sequence: Synthetic oligonucleotide
cuagugagccgccgcccgg

SEQ ID NO: 310125 - RNA, 19 nt, Artificial Sequence
  Description of Artificial Sequence: Synthetic oligonucleotide
gugccguugucgcacacca

SEQ ID NO: 310126 - RNA, 19 nt, Artificial Sequence
  Description of Artificial Sequence: Synthetic oligonucleotide
auugaucaagugaggcuga

SEQ ID NO: 310127 - RNA, 19 nt, Artificial Sequence
  Description of Artificial Sequence: Synthetic oligonucleotide
ucccaacucccaaauuauu

SEQ ID NO: 310128 - RNA, 19 nt, Artificial Sequence
  Description of Artificial Sequence: Synthetic oligonucleotide
aucauacgaacugucucaa

SEQ ID NO: 310129 - RNA, 19 nt, Artificial Sequence
  Description of Artificial Sequence: Synthetic oligonucleotide
gguaaguuucaaacauuac

SEQ ID NO: 310130 - RNA, 19 nt, Artificial Sequence
  Description of Artificial Sequence: Synthetic oligonucleotide
cacccaacaccgaccaguc

SEQ ID NO: 310131 - RNA, 19 nt, Artificial Sequence
  Description of Artificial Sequence: Synthetic oligonucleotide
cacuuuggugguugaucug

SEQ ID NO: 310132 - RNA, 19 nt, Artificial Sequence
  Description of Artificial Sequence: Synthetic oligonucleotide
cuacuacuacaccagucaa

SEQ ID NO: 310133 - RNA, 19 nt, Artificial Sequence
  Description of Artificial Sequence: Synthetic oligonucleotide
acccaacaccgaccagucg

SEQ ID NO: 310134 - RNA, 19 nt, Artificial Sequence
  Description of Artificial Sequence: Synthetic oligonucleotide
agcuaagaaucagaucuuu

SEQ ID NO: 310135 - RNA, 19 nt, Artificial Sequence
  Description of Artificial Sequence: Synthetic oligonucleotide
gggcaaauaugagucacac

SEQ ID NO: 310136 - RNA, 19 nt, Artificial Sequence
  Description of Artificial Sequence: Synthetic oligonucleotide
uucugcccucaauagucau

SEQ ID NO: 310137 - RNA, 19 nt, Artificial Sequence
  Description of Artificial Sequence: Synthetic oligonucleotide
caguaugucccaacuccca

SEQ ID NO: 310138 - RNA, 19 nt, Artificial Sequence
  Description of Artificial Sequence: Synthetic oligonucleotide
cucugguccaaauguguaa

SEQ ID NO: 310139 - RNA, 19 nt, Artificial Sequence
  Description of Artificial Sequence: Synthetic oligonucleotide
aauaucccucccagcaaua

SEQ ID NO: 310140 - RNA, 19 nt, Artificial Sequence
  Description of Artificial Sequence: Synthetic oligonucleotide
guugagccuccagaaagca

SEQ ID NO: 310141 - RNA, 19 nt, Artificial Sequence
  Description of Artificial Sequence: Synthetic oligonucleotide
augguucgcccuagugagc

SEQ ID NO: 310142 - RNA, 19 nt, Artificial Sequence
  Description of Artificial Sequence: Synthetic oligonucleotide
aggaacaagccuggcauuu

SEQ ID NO: 310143 - RNA, 19 nt, Artificial Sequence
  Description of Artificial Sequence: Synthetic oligonucleotide
uucgcccuagugagccgcc

SEQ ID NO: 310144 - RNA, 19 nt, Artificial Sequence
  Description of Artificial Sequence: Synthetic oligonucleotide
caaggcauuggugauuuua

SEQ ID NO: 310145 - RNA, 19 nt, Artificial Sequence
  Description of Artificial Sequence: Synthetic oligonucleotide
guucgcccuagugagccgc

SEQ ID NO: 310146 - RNA, 19 nt, Artificial Sequence
  Description of Artificial Sequence: Synthetic oligonucleotide
cagaggcaugauaggaaca

SEQ ID NO: 310147 - RNA, 19 nt, Artificial Sequence
  Description of Artificial Sequence: Synthetic oligonucleotide
uucguacuaugccguucuc

SEQ ID NO: 310148 - RNA, 19 nt, Artificial Sequence
  Description of Artificial Sequence: Synthetic oligonucleotide
aauuagcauuggaaaucua

SEQ ID NO: 310149 - RNA, 19 nt, Artificial Sequence
  Description of Artificial Sequence: Synthetic oligonucleotide
gguaccaguccuauauaca

SEQ ID NO: 310150 - RNA, 19 nt, Artificial Sequence
  Description of Artificial Sequence: Synthetic oligonucleotide
gcgcaauucacuugccuca

SEQ ID NO: 310151 - RNA, 19 nt, Artificial Sequence
  Description of Artificial Sequence: Synthetic oligonucleotide
auacauaguugagccucca

SEQ ID NO: 310152 - RNA, 19 nt, Artificial Sequence
  Description of Artificial Sequence: Synthetic oligonucleotide
uaggugguucugugaguaa

SEQ ID NO: 310153 - RNA, 19 nt, Artificial Sequence
  Description of Artificial Sequence: Synthetic oligonucleotide
agccggcauauccacacuu

SEQ ID NO: 310154 - RNA, 19 nt, Artificial Sequence
  Description of Artificial Sequence: Synthetic oligonucleotide
uguguguacugagcauguc

SEQ ID NO: 310155 - RNA, 19 nt, Artificial Sequence
  Description of Artificial Sequence: Synthetic oligonucleotide
caggccaggauacauaguu

SEQ ID NO: 310156 - RNA, 19 nt, Artificial Sequence
  Description of Artificial Sequence: Synthetic oligonucleotide
ugccuggauuguguuaaaa

SEQ ID NO: 310157 - RNA, 19 nt, Artificial Sequence
  Description of Artificial Sequence: Synthetic oligonucleotide
gguauuugacaacaugauu

SEQ ID NO: 310158 - RNA, 19 nt, Artificial Sequence
  Description of Artificial Sequence: Synthetic oligonucleotide
gcaugauaggaacaagccu

SEQ ID NO: 310159 - RNA, 19 nt, Artificial Sequence
  Description of Artificial Sequence: Synthetic oligonucleotide
aggccaggauacauaguug

SEQ ID NO: 310160 - RNA, 19 nt, Artificial Sequence
  Description of Artificial Sequence: Synthetic oligonucleotide
caucuagguacuaucugau

SEQ ID NO: 310161 - RNA, 19 nt, Artificial Sequence
  Description of Artificial Sequence: Synthetic oligonucleotide
cuacccuauucuuucuugu

SEQ ID NO: 310162 - RNA, 19 nt, Artificial Sequence
  Description of Artificial Sequence: Synthetic oligonucleotide
uggugucuauguugaguuu

SEQ ID NO: 310163 - RNA, 19 nt, Artificial Sequence
  Description of Artificial Sequence: Synthetic oligonucleotide
cuagguacuaucugauauu

SEQ ID NO: 310164 - RNA, 19 nt, Artificial Sequence
  Description of Artificial Sequence: Synthetic oligonucleotide
cauugagcgcaauucacuu

SEQ ID NO: 310165 - RNA, 19 nt, Artificial Sequence
  Description of Artificial Sequence: Synthetic oligonucleotide
uagugagccgccgcccggc

SEQ ID NO: 310166 - RNA, 19 nt, Artificial Sequence
  Description of Artificial Sequence: Synthetic oligonucleotide
cuggcuguccaugguucgc

SEQ ID NO: 310167 - RNA, 19 nt, Artificial Sequence
  Description of Artificial Sequence: Synthetic oligonucleotide
cggaucuuaaauuuagaaa

SEQ ID NO: 310168 - RNA, 19 nt, Artificial Sequence
  Description of Artificial Sequence: Synthetic oligonucleotide
cguacuaugccguucucca

SEQ ID NO: 310169 - RNA, 19 nt, Artificial Sequence
  Description of Artificial Sequence: Synthetic oligonucleotide
ccgaccauaagauccuuga

SEQ ID NO: 310170 - RNA, 19 nt, Artificial Sequence
  Description of Artificial Sequence: Synthetic oligonucleotide
guaaucccacagguguuuc

SEQ ID NO: 310171 - RNA, 19 nt, Artificial Sequence
  Description of Artificial Sequence: Synthetic oligonucleotide
cuaccccuauauuuaaaau

SEQ ID NO: 310172 - RNA, 19 nt, Artificial Sequence
  Description of Artificial Sequence: Synthetic oligonucleotide
ccaguccuauauacaguag

SEQ ID NO: 310173 - RNA, 19 nt, Artificial Sequence
  Description of Artificial Sequence: Synthetic oligonucleotide
accgaccauaagauccuug

SEQ ID NO: 310174 - RNA, 19 nt, Artificial Sequence
  Description of Artificial Sequence: Synthetic oligonucleotide
cacuugccucaucaccgac

SEQ ID NO: 310175 - RNA, 19 nt, Artificial Sequence
  Description of Artificial Sequence: Synthetic oligonucleotide
agcacccaacaccgaccag

SEQ ID NO: 310176 - RNA, 19 nt, Artificial Sequence
  Description of Artificial Sequence: Synthetic oligonucleotide
cacccuuuucuugguacuc

SEQ ID NO: 310177 - RNA, 19 nt, Artificial Sequence
  Description of Artificial Sequence: Synthetic oligonucleotide
uucauacacugggcaaaua

SEQ ID NO: 310178 - RNA, 19 nt, Artificial Sequence
  Description of Artificial Sequence: Synthetic oligonucleotide
cccucaauagucauuggua

SEQ ID NO: 310179 - RNA, 19 nt, Artificial Sequence
  Description of Artificial Sequence: Synthetic oligonucleotide
gagcgcaauucacuugccu

SEQ ID NO: 310180 - RNA, 19 nt, Artificial Sequence
  Description of Artificial Sequence: Synthetic oligonucleotide
cuugguacucuugucgagu

SEQ ID NO: 310181 - RNA, 19 nt, Artificial Sequence
  Description of Artificial Sequence: Synthetic oligonucleotide
agaaaucccucaaggcauu

SEQ ID NO: 310182 - RNA, 19 nt, Artificial Sequence
  Description of Artificial Sequence: Synthetic oligonucleotide
ggcuacauacacaccagaa

SEQ ID NO: 310183 - RNA, 19 nt, Artificial Sequence
  Description of Artificial Sequence: Synthetic oligonucleotide
ccauaagauccuugauuuc

SEQ ID NO: 310184 - RNA, 19 nt, Artificial Sequence
  Description of Artificial Sequence: Synthetic oligonucleotide
ccugguaauaucccuccca

SEQ ID NO: 310185 - RNA, 19 nt, Artificial Sequence
  Description of Artificial Sequence: Synthetic oligonucleotide
ucgcccuagugagccgccg

SEQ ID NO: 310186 - RNA, 19 nt, Artificial Sequence
  Description of Artificial Sequence: Synthetic oligonucleotide
ggaaaguuagagccggcau

SEQ ID NO: 310187 - RNA, 19 nt, Artificial Sequence
  Description of Artificial Sequence: Synthetic oligonucleotide
ugccguugucgcacaccac

SEQ ID NO: 310188 - RNA, 19 nt, Artificial Sequence
  Description of Artificial Sequence: Synthetic oligonucleotide
cccaacucccaaauuauua

SEQ ID NO: 310189 - RNA, 19 nt, Artificial Sequence
  Description of Artificial Sequence: Synthetic oligonucleotide
gguucgcccuagugagccg

SEQ ID NO: 310190 - RNA, 19 nt, Artificial Sequence
  Description of Artificial Sequence: Synthetic oligonucleotide
caugugcuuucuucggggu

SEQ ID NO: 310191 - RNA, 19 nt, Artificial Sequence
  Description of Artificial Sequence: Synthetic oligonucleotide
ccagucggcacuggcaggc

SEQ ID NO: 310192 - RNA, 19 nt, Artificial Sequence
  Description of Artificial Sequence: Synthetic oligonucleotide
cugcaucagaggcaugaua

SEQ ID NO: 310193 - RNA, 19 nt, Artificial Sequence
  Description of Artificial Sequence: Synthetic oligonucleotide
cccacuuuggugguugauc

SEQ ID NO: 310194 - RNA, 19 nt, Artificial Sequence
  Description of Artificial Sequence: Synthetic oligonucleotide
ggcuguccaugguucgccc

SEQ ID NO: 310195 - RNA, 19 nt, Artificial Sequence
  Description of Artificial Sequence: Synthetic oligonucleotide
agugagccgccgcccggcu

SEQ ID NO: 310196 - RNA, 19 nt, Artificial Sequence
  Description of Artificial Sequence: Synthetic oligonucleotide
accagucaauaagccuuga

SEQ ID NO: 310197 - RNA, 19 nt, Artificial Sequence
  Description of Artificial Sequence: Synthetic oligonucleotide
ccaauagaauacauacagu

SEQ ID NO: 310198 - RNA, 19 nt, Artificial Sequence
  Description of Artificial Sequence: Synthetic oligonucleotide
aucucccuuuagaacucgu

SEQ ID NO: 310199 - RNA, 19 nt, Artificial Sequence
  Description of Artificial Sequence: Synthetic oligonucleotide
ccacuuuggugguugaucu

SEQ ID NO: 310200 - RNA, 19 nt, Artificial Sequence
  Description of Artificial Sequence: Synthetic oligonucleotide
guacacccuuuucuuggua

SEQ ID NO: 310201 - RNA, 19 nt, Artificial Sequence
  Description of Artificial Sequence: Synthetic oligonucleotide
gguacucuugucgagucau

SEQ ID NO: 310202 - RNA, 19 nt, Artificial Sequence
  Description of Artificial Sequence: Synthetic oligonucleotide
cauugguaccaguccuaua

SEQ ID NO: 310203 - RNA, 19 nt, Artificial Sequence
  Description of Artificial Sequence: Synthetic oligonucleotide
cacagguguuucaugucau

SEQ ID NO: 310204 - RNA, 19 nt, Artificial Sequence
  Description of Artificial Sequence: Synthetic oligonucleotide
gcacacguacacccuuuuc

SEQ ID NO: 310205 - RNA, 19 nt, Artificial Sequence
  Description of Artificial Sequence: Synthetic oligonucleotide
guacuaugccguucuccau

SEQ ID NO: 310206 - RNA, 19 nt, Artificial Sequence
  Description of Artificial Sequence: Synthetic oligonucleotide
accgaccagucggcacugg

SEQ ID NO: 310207 - RNA, 19 nt, Artificial Sequence
  Description of Artificial Sequence: Synthetic oligonucleotide
ccggcauauccacacuuca

SEQ ID NO: 310208 - RNA, 19 nt, Artificial Sequence
  Description of Artificial Sequence: Synthetic oligonucleotide
ccgaccagucggcacuggc

SEQ ID NO: 310209 - RNA, 19 nt, Artificial Sequence
  Description of Artificial Sequence: Synthetic oligonucleotide
gcuugauaagauaccuggu

SEQ ID NO: 310210 - RNA, 19 nt, Artificial Sequence
  Description of Artificial Sequence: Synthetic oligonucleotide
ccggaaaguuagagccggc

SEQ ID NO: 310211 - RNA, 19 nt, Artificial Sequence
  Description of Artificial Sequence: Synthetic oligonucleotide
ggauucuacccuauucuuu

SEQ ID NO: 310212 - RNA, 19 nt, Artificial Sequence
  Description of Artificial Sequence: Synthetic oligonucleotide
cuucgggguggaucuucaa

SEQ ID NO: 310213 - RNA, 19 nt, Artificial Sequence
  Description of Artificial Sequence: Synthetic oligonucleotide
caccgaccagucggcacug

SEQ ID NO: 310214 - RNA, 19 nt, Artificial Sequence
  Description of Artificial Sequence: Synthetic oligonucleotide
gagccggcauauccacacu

SEQ ID NO: 310215 - RNA, 19 nt, Artificial Sequence
  Description of Artificial Sequence: Synthetic oligonucleotide
cucccucaacauugaucaa

SEQ ID NO: 310216 - RNA, 19 nt, Artificial Sequence
  Description of Artificial Sequence: Synthetic oligonucleotide
cccuauucuuucuuguuuu

SEQ ID NO: 310217 - RNA, 19 nt, Artificial Sequence
  Description of Artificial Sequence: Synthetic oligonucleotide
gucgagcacccaacaccga

SEQ ID NO: 310218 - RNA, 19 nt, Artificial Sequence
  Description of Artificial Sequence: Synthetic oligonucleotide
cgaccagucggcacuggca

SEQ ID NO: 310219 - RNA, 19 nt, Artificial Sequence
  Description of Artificial Sequence: Synthetic oligonucleotide
gcucucguuccaaccuuga

SEQ ID NO: 310220 - RNA, 19 nt, Artificial Sequence
  Description of Artificial Sequence: Synthetic oligonucleotide
cacuggcaggcuguugugu

SEQ ID NO: 310221 - RNA, 19 nt, Artificial Sequence
  Description of Artificial Sequence: Synthetic oligonucleotide
cggaaaguuagagccggca

SEQ ID NO: 310222 - RNA, 19 nt, Artificial Sequence
  Description of Artificial Sequence: Synthetic oligonucleotide
cgcccuagugagccgccgc

SEQ ID NO: 310223 - RNA, 19 nt, Artificial Sequence
  Description of Artificial Sequence: Synthetic oligonucleotide
guccaugguucgcccuagu

SEQ ID NO: 310224 - RNA, 19 nt, Artificial Sequence
  Description of Artificial Sequence: Synthetic oligonucleotide
gcccggcuuggccugcauc

SEQ ID NO: 310225 - RNA, 19 nt, Artificial Sequence
  Description of Artificial Sequence: Synthetic oligonucleotide
ggaacaagccuggcauuuu

SEQ ID NO: 310226 - RNA, 19 nt, Artificial Sequence
  Description of Artificial Sequence: Synthetic oligonucleotide
cguucuaaguaaagcuguu

SEQ ID NO: 310227 - RNA, 19 nt, Artificial Sequence
  Description of Artificial Sequence: Synthetic oligonucleotide
cgaccauaagauccuugau

SEQ ID NO: 310228 - RNA, 19 nt, Artificial Sequence
  Description of Artificial Sequence: Synthetic oligonucleotide
gugagccgccgcccggcuu

SEQ ID NO: 310229 - RNA, 19 nt, Artificial Sequence
  Description of Artificial Sequence: Synthetic oligonucleotide
cagucggcacuggcaggcu

SEQ ID NO: 310230 - RNA, 19 nt, Artificial Sequence
  Description of Artificial Sequence: Synthetic oligonucleotide
ccgcccggcuuggccugca

SEQ ID NO: 310231 - RNA, 19 nt, Artificial Sequence
  Description of Artificial Sequence: Synthetic oligonucleotide
aggaagguaacuuuuagcc

SEQ ID NO: 310232 - RNA, 19 nt, Artificial Sequence
  Description of Artificial Sequence: Synthetic oligonucleotide
acgaauuucacccuuaugg

SEQ ID NO: 310233 - RNA, 19 nt, Artificial Sequence
  Description of Artificial Sequence: Synthetic oligonucleotide
uucuaaaccauccggacgg

SEQ ID NO: 310234 - RNA, 19 nt, Artificial Sequence
  Description of Artificial Sequence: Synthetic oligonucleotide
uuuagccacauuuugaaag

SEQ ID NO: 310235 - RNA, 19 nt, Artificial Sequence
  Description of Artificial Sequence: Synthetic oligonucleotide
aaugcuaguacacaauuga

SEQ ID NO: 310236 - RNA, 19 nt, Artificial Sequence
  Description of Artificial Sequence: Synthetic oligonucleotide
uuuagauguagcaucagug

SEQ ID NO: 310237 - RNA, 19 nt, Artificial Sequence
  Description of Artificial Sequence: Synthetic oligonucleotide
auaaagcuccuucucaucc

SEQ ID NO: 310238 - RNA, 19 nt, Artificial Sequence
  Description of Artificial Sequence: Synthetic oligonucleotide
aaguuuuacauuuucggca

SEQ ID NO: 310239 - RNA, 19 nt, Artificial Sequence
  Description of Artificial Sequence: Synthetic oligonucleotide
uuuaucacgaacauucaca

SEQ ID NO: 310240 - RNA, 19 nt, Artificial Sequence
  Description of Artificial Sequence: Synthetic oligonucleotide
uuuucaaccaaacuugacu

SEQ ID NO: 310241 - RNA, 19 nt, Artificial Sequence
  Description of Artificial Sequence: Synthetic oligonucleotide
cauuguaucagucuuuucc

SEQ ID NO: 310242 - RNA, 19 nt, Artificial Sequence
  Description of Artificial Sequence: Synthetic oligonucleotide
uccuaauaaaagcuagucg

SEQ ID NO: 310243 - RNA, 19 nt, Artificial Sequence
  Description of Artificial Sequence: Synthetic oligonucleotide
uaagcgugcaguauguagg

SEQ ID NO: 310244 - RNA, 19 nt, Artificial Sequence
  Description of Artificial Sequence: Synthetic oligonucleotide
auugcuaaauuguacuaac

SEQ ID NO: 310245 - RNA, 19 nt, Artificial Sequence
  Description of Artificial Sequence: Synthetic oligonucleotide
aaagauagcuucuugccgu

SEQ ID NO: 310246 - RNA, 19 nt, Artificial Sequence
  Description of Artificial Sequence: Synthetic oligonucleotide
aaauguguaauaaucacga

SEQ ID NO: 310247 - RNA, 19 nt, Artificial Sequence
  Description of Artificial Sequence: Synthetic oligonucleotide
aaaagcaccauccgcuccg

SEQ ID NO: 310248 - RNA, 19 nt, Artificial Sequence
  Description of Artificial Sequence: Synthetic oligonucleotide
gaaagauagcuucuugccg

SEQ ID NO: 310249 - RNA, 19 nt, Artificial Sequence
  Description of Artificial Sequence: Synthetic oligonucleotide
auuaccaaacugcagaacu

SEQ ID NO: 310250 - RNA, 19 nt, Artificial Sequence
  Description of Artificial Sequence: Synthetic oligonucleotide
uguguaaggauuaccaaac

SEQ ID NO: 310251 - RNA, 19 nt, Artificial Sequence
  Description of Artificial Sequence: Synthetic oligonucleotide
uuaucacgaacauucacag

SEQ ID NO: 310252 - RNA, 19 nt, Artificial Sequence
  Description of Artificial Sequence: Synthetic oligonucleotide
uuuagcuagaaagauagcu

SEQ ID NO: 310253 - RNA, 19 nt, Artificial Sequence
  Description of Artificial Sequence: Synthetic oligonucleotide
uauugaagcaucauucacu

SEQ ID NO: 310254 - RNA, 19 nt, Artificial Sequence
  Description of Artificial Sequence: Synthetic oligonucleotide
cuuauggguaacauaacag

SEQ ID NO: 310255 - RNA, 19 nt, Artificial Sequence
  Description of Artificial Sequence: Synthetic oligonucleotide
aacuuuuagccacauuuug

SEQ ID NO: 310256 - RNA, 19 nt, Artificial Sequence
  Description of Artificial Sequence: Synthetic oligonucleotide
auaggacucgcacaggugg

SEQ ID NO: 310257 - RNA, 19 nt, Artificial Sequence
  Description of Artificial Sequence: Synthetic oligonucleotide
cacaauugacuguugaucc

SEQ ID NO: 310258 - RNA, 19 nt, Artificial Sequence
  Description of Artificial Sequence: Synthetic oligonucleotide
agagaauguguugagacac

SEQ ID NO: 310259 - RNA, 19 nt, Artificial Sequence
  Description of Artificial Sequence: Synthetic oligonucleotide
uuauggguaacauaacaga

SEQ ID NO: 310260 - RNA, 19 nt, Artificial Sequence
  Description of Artificial Sequence: Synthetic oligonucleotide
gauauacggaguuaaggug

SEQ ID NO: 310261 - RNA, 19 nt, Artificial Sequence
  Description of Artificial Sequence: Synthetic oligonucleotide
aaauuuaucucugcagaag

SEQ ID NO: 310262 - RNA, 19 nt, Artificial Sequence
  Description of Artificial Sequence: Synthetic oligonucleotide
uuuauugaagcaucauuca

SEQ ID NO: 310263 - RNA, 19 nt, Artificial Sequence
  Description of Artificial Sequence: Synthetic oligonucleotide
gguaauauccuugaaaugc

SEQ ID NO: 310264 - RNA, 19 nt, Artificial Sequence
  Description of Artificial Sequence: Synthetic oligonucleotide
uagaaagauagcuucuugc

SEQ ID NO: 310265 - RNA, 19 nt, Artificial Sequence
  Description of Artificial Sequence: Synthetic oligonucleotide
guaaggauuaccaaacugc

SEQ ID NO: 310266 - RNA, 19 nt, Artificial Sequence
  Description of Artificial Sequence: Synthetic oligonucleotide
uaaggauuaccaaacugca

SEQ ID NO: 310267 - RNA, 19 nt, Artificial Sequence
  Description of Artificial Sequence: Synthetic oligonucleotide
ugcuaaauuguacuaacuc

SEQ ID NO: 310268 - RNA, 19 nt, Artificial Sequence
  Description of Artificial Sequence: Synthetic oligonucleotide
aggauuaccaaacugcaga

SEQ ID NO: 310269 - RNA, 19 nt, Artificial Sequence
  Description of Artificial Sequence: Synthetic oligonucleotide
aauuguacuaacuccuaau

SEQ ID NO: 310270 - RNA, 19 nt, Artificial Sequence
  Description of Artificial Sequence: Synthetic oligonucleotide
agaagaccagcuuuugugg

SEQ ID NO: 310271 - RNA, 19 nt, Artificial Sequence
  Description of Artificial Sequence: Synthetic oligonucleotide
uguugauccuuccacauaa

SEQ ID NO: 310272 - RNA, 19 nt, Artificial Sequence
  Description of Artificial Sequence: Synthetic oligonucleotide
uuucuaagcgugcaguaug

SEQ ID NO: 310273 - RNA, 19 nt, Artificial Sequence
  Description of Artificial Sequence: Synthetic oligonucleotide
uuaucucugcagaagacac

SEQ ID NO: 310274 - RNA, 19 nt, Artificial Sequence
  Description of Artificial Sequence: Synthetic oligonucleotide
uggauauacggaguuaagg

SEQ ID NO: 310275 - RNA, 19 nt, Artificial Sequence
  Description of Artificial Sequence: Synthetic oligonucleotide
gagagauuuuccaaauucg

SEQ ID NO: 310276 - RNA, 19 nt, Artificial Sequence
  Description of Artificial Sequence: Synthetic oligonucleotide
ugcuguguaaggauuacca

SEQ ID NO: 310277 - RNA, 19 nt, Artificial Sequence
  Description of Artificial Sequence: Synthetic oligonucleotide
aauguguaauaaucacgag

SEQ ID NO: 310278 - RNA, 19 nt, Artificial Sequence
  Description of Artificial Sequence: Synthetic oligonucleotide
aguuaagguguaaugacac

SEQ ID NO: 310279 - RNA, 19 nt, Artificial Sequence
  Description of Artificial Sequence: Synthetic oligonucleotide
ucugaucauaguugggagg

SEQ ID NO: 310280 - RNA, 19 nt, Artificial Sequence
  Description of Artificial Sequence: Synthetic oligonucleotide
caagauaggacucgcacag

SEQ ID NO: 310281 - RNA, 19 nt, Artificial Sequence
  Description of Artificial Sequence: Synthetic oligonucleotide
uuauugaagcaucauucac

SEQ ID NO: 310282 - RNA, 19 nt, Artificial Sequence
  Description of Artificial Sequence: Synthetic oligonucleotide
gaacugauaaaauucucca

SEQ ID NO: 310283 - RNA, 19 nt, Artificial Sequence
  Description of Artificial Sequence: Synthetic oligonucleotide
uguaauaaucacgagcagu

SEQ ID NO: 310284 - RNA, 19 nt, Artificial Sequence
  Description of Artificial Sequence: Synthetic oligonucleotide
ugccccacgaauuucaccc

SEQ ID NO: 310285 - RNA, 19 nt, Artificial Sequence
  Description of Artificial Sequence: Synthetic oligonucleotide
aaauuugcucugaucauag

SEQ ID NO: 310286 - RNA, 19 nt, Artificial Sequence
  Description of Artificial Sequence: Synthetic oligonucleotide
cuaaucuccuuuuaaguuc

SEQ ID NO: 310287 - RNA, 19 nt, Artificial Sequence
  Description of Artificial Sequence: Synthetic oligonucleotide
agcuuuuguggucaccacc

SEQ ID NO: 310288 - RNA, 19 nt, Artificial Sequence
  Description of Artificial Sequence: Synthetic oligonucleotide
ugucacugacacaauaucu

SEQ ID NO: 310289 - RNA, 19 nt, Artificial Sequence
  Description of Artificial Sequence: Synthetic oligonucleotide
aaccuugaauauaccaacc

SEQ ID NO: 310290 - RNA, 19 nt, Artificial Sequence
  Description of Artificial Sequence: Synthetic oligonucleotide
uuuuaucacgaacauucac

SEQ ID NO: 310291 - RNA, 19 nt, Artificial Sequence
  Description of Artificial Sequence: Synthetic oligonucleotide
aaagcuagucgaaauuuag

SEQ ID NO: 310292 - RNA, 19 nt, Artificial Sequence
  Description of Artificial Sequence: Synthetic oligonucleotide
ugcuaguacacaauugacu

SEQ ID NO: 310293 - RNA, 19 nt, Artificial Sequence
  Description of Artificial Sequence: Synthetic oligonucleotide
ugcuuuaugugucacugac

SEQ ID NO: 310294 - RNA, 19 nt, Artificial Sequence
  Description of Artificial Sequence: Synthetic oligonucleotide
auaaucacgagcaguacuc

SEQ ID NO: 310295 - RNA, 19 nt, Artificial Sequence
  Description of Artificial Sequence: Synthetic oligonucleotide
acucucucguuuucuaagc

SEQ ID NO: 310296 - RNA, 19 nt, Artificial Sequence
  Description of Artificial Sequence: Synthetic oligonucleotide
gcuaaauuguacuaacucc

SEQ ID NO: 310297 - RNA, 19 nt, Artificial Sequence
  Description of Artificial Sequence: Synthetic oligonucleotide
ucgaaauuuagaacauucu

SEQ ID NO: 310298 - RNA, 19 nt, Artificial Sequence
  Description of Artificial Sequence: Synthetic oligonucleotide
guuaguacuggcugacugg

SEQ ID NO: 310299 - RNA, 19 nt, Artificial Sequence
  Description of Artificial Sequence: Synthetic oligonucleotide
uugcucugaucauaguugg

SEQ ID NO: 310300 - RNA, 19 nt, Artificial Sequence
  Description of Artificial Sequence: Synthetic oligonucleotide
ucuaaucuccuuuuaaguu

SEQ ID NO: 310301 - RNA, 19 nt, Artificial Sequence
  Description of Artificial Sequence: Synthetic oligonucleotide
aacuccuaauaaaagcuag

SEQ ID NO: 310302 - RNA, 19 nt, Artificial Sequence
  Description of Artificial Sequence: Synthetic oligonucleotide
uguguuuauugaagcauca

SEQ ID NO: 310303 - RNA, 19 nt, Artificial Sequence
  Description of Artificial Sequence: Synthetic oligonucleotide
gcuaguacacaauugacug

SEQ ID NO: 310304 - RNA, 19 nt, Artificial Sequence
  Description of Artificial Sequence: Synthetic oligonucleotide
gaagguaauauccuugaaa

SEQ ID NO: 310305 - RNA, 19 nt, Artificial Sequence
  Description of Artificial Sequence: Synthetic oligonucleotide
uucugaucaaaaugggucu

SEQ ID NO: 310306 - RNA, 19 nt, Artificial Sequence
  Description of Artificial Sequence: Synthetic oligonucleotide
ugugaagacacuguuagua

SEQ ID NO: 310307 - RNA, 19 nt, Artificial Sequence
  Description of Artificial Sequence: Synthetic oligonucleotide
auugcuuuaugugucacug

SEQ ID NO: 310308 - RNA, 19 nt, Artificial Sequence
  Description of Artificial Sequence: Synthetic oligonucleotide
uuaaguuccuucucccuug

SEQ ID NO: 310309 - RNA, 19 nt, Artificial Sequence
  Description of Artificial Sequence: Synthetic oligonucleotide
cucacagcaugcuagcugc

SEQ ID NO: 310310 - RNA, 19 nt, Artificial Sequence
  Description of Artificial Sequence: Synthetic oligonucleotide
acauaagcuuaguauuuuc

SEQ ID NO: 310311 - RNA, 19 nt, Artificial Sequence
  Description of Artificial Sequence: Synthetic oligonucleotide
cuucuaaaccauccggacg

SEQ ID NO: 310312 - RNA, 19 nt, Artificial Sequence
  Description of Artificial Sequence: Synthetic oligonucleotide
ugaauauaccaacccaguc

SEQ ID NO: 310313 - RNA, 19 nt, Artificial Sequence
  Description of Artificial Sequence: Synthetic oligonucleotide
uuguacuaacuccuaauaa

SEQ ID NO: 310314 - RNA, 19 nt, Artificial Sequence
  Description of Artificial Sequence: Synthetic oligonucleotide
uuaccaaacugcagaacug

SEQ ID NO: 310315 - RNA, 19 nt, Artificial Sequence
  Description of Artificial Sequence: Synthetic oligonucleotide
gagauuuuccaaauucgag

SEQ ID NO: 310316 - RNA, 19 nt, Artificial Sequence
  Description of Artificial Sequence: Synthetic oligonucleotide
cugaacgugccuuucaaac

SEQ ID NO: 310317 - RNA, 19 nt, Artificial Sequence
  Description of Artificial Sequence: Synthetic oligonucleotide
ugaacgugccuuucaaacc

SEQ ID NO: 310318 - RNA, 19 nt, Artificial Sequence
  Description of Artificial Sequence: Synthetic oligonucleotide
aauugcuuuaugugucacu

SEQ ID NO: 310319 - RNA, 19 nt, Artificial Sequence
  Description of Artificial Sequence: Synthetic oligonucleotide
agcuagucgaaauuuagaa

SEQ ID NO: 310320 - RNA, 19 nt, Artificial Sequence
  Description of Artificial Sequence: Synthetic oligonucleotide
cuaagcgugcaguauguag

SEQ ID NO: 310321 - RNA, 19 nt, Artificial Sequence
  Description of Artificial Sequence: Synthetic oligonucleotide
aguuuuacauuuucggcaa

SEQ ID NO: 310322 - RNA, 19 nt, Artificial Sequence
  Description of Artificial Sequence: Synthetic oligonucleotide
ugagacaccucgaaaccug

SEQ ID NO: 310323 - RNA, 19 nt, Artificial Sequence
  Description of Artificial Sequence: Synthetic oligonucleotide
ugacuguugauccuuccac

SEQ ID NO: 310324 - RNA, 19 nt, Artificial Sequence
  Description of Artificial Sequence: Synthetic oligonucleotide
ccuaauaaaagcuagucga

SEQ ID NO: 310325 - RNA, 19 nt, Artificial Sequence
  Description of Artificial Sequence: Synthetic oligonucleotide
ucucacagcaugcuagcug

SEQ ID NO: 310326 - RNA, 19 nt, Artificial Sequence
  Description of Artificial Sequence: Synthetic oligonucleotide
auugaagcaucauucacuu

SEQ ID NO: 310327 - RNA, 19 nt, Artificial Sequence
  Description of Artificial Sequence: Synthetic oligonucleotide
ucauuuggaagguaauauc

SEQ ID NO: 310328 - RNA, 19 nt, Artificial Sequence
  Description of Artificial Sequence: Synthetic oligonucleotide
uagcuuuagauguagcauc

SEQ ID NO: 310329 - RNA, 19 nt, Artificial Sequence
  Description of Artificial Sequence: Synthetic oligonucleotide
uguagcaucaguguaucuc

SEQ ID NO: 310330 - RNA, 19 nt, Artificial Sequence
  Description of Artificial Sequence: Synthetic oligonucleotide
gguguggauggauauacgg

SEQ ID NO: 310331 - RNA, 19 nt, Artificial Sequence
  Description of Artificial Sequence: Synthetic oligonucleotide
aaaugcuaguacacaauug

SEQ ID NO: 310332 - RNA, 19 nt, Artificial Sequence
  Description of Artificial Sequence: Synthetic oligonucleotide
agcuaguucaaguuuuaca

SEQ ID NO: 310333 - RNA, 19 nt, Artificial Sequence
  Description of Artificial Sequence: Synthetic oligonucleotide
aacauaucagaguuuccuu

SEQ ID NO: 310334 - RNA, 19 nt, Artificial Sequence
  Description of Artificial Sequence: Synthetic oligonucleotide
guugagacaccucgaaacc

SEQ ID NO: 310335 - RNA, 19 nt, Artificial Sequence
  Description of Artificial Sequence: Synthetic oligonucleotide
cuuauaaagcuccuucuca

SEQ ID NO: 310336 - RNA, 19 nt, Artificial Sequence
  Description of Artificial Sequence: Synthetic oligonucleotide
auaaaagcuagucgaaauu

SEQ ID NO: 310337 - RNA, 19 nt, Artificial Sequence
  Description of Artificial Sequence: Synthetic oligonucleotide
aguuggaagucugcaaugg

SEQ ID NO: 310338 - RNA, 19 nt, Artificial Sequence
  Description of Artificial Sequence: Synthetic oligonucleotide
auuguacuaacuccuaaua

SEQ ID NO: 310339 - RNA, 19 nt, Artificial Sequence
  Description of Artificial Sequence: Synthetic oligonucleotide
cuaaauuguacuaacuccu

SEQ ID NO: 310340 - RNA, 19 nt, Artificial Sequence
  Description of Artificial Sequence: Synthetic oligonucleotide
agacacuguuaguacuggc

SEQ ID NO: 310341 - RNA, 19 nt, Artificial Sequence
  Description of Artificial Sequence: Synthetic oligonucleotide
ucaaccaaacuugacugca

SEQ ID NO: 310342 - RNA, 19 nt, Artificial Sequence
  Description of Artificial Sequence: Synthetic oligonucleotide
uucaaccaaacuugacugc

SEQ ID NO: 310343 - RNA, 19 nt, Artificial Sequence
  Description of Artificial Sequence: Synthetic oligonucleotide
gacaccucgaaaccuguug

SEQ ID NO: 310344 - RNA, 19 nt, Artificial Sequence
  Description of Artificial Sequence: Synthetic oligonucleotide
ugacauaagcuuaguauuu

SEQ ID NO: 310345 - RNA, 19 nt, Artificial Sequence
  Description of Artificial Sequence: Synthetic oligonucleotide
uuuagaacauucugaucaa

SEQ ID NO: 310346 - RNA, 19 nt, Artificial Sequence
  Description of Artificial Sequence: Synthetic oligonucleotide
ugccauuguuuuaucacga

SEQ ID NO: 310347 - RNA, 19 nt, Artificial Sequence
  Description of Artificial Sequence: Synthetic oligonucleotide
uguguugagacaccucgaa

SEQ ID NO: 310348 - RNA, 19 nt, Artificial Sequence
  Description of Artificial Sequence: Synthetic oligonucleotide
auauacggaguuaaggugu

SEQ ID NO: 310349 - RNA, 19 nt, Artificial Sequence
  Description of Artificial Sequence: Synthetic oligonucleotide
aaucacgagcaguacucca

SEQ ID NO: 310350 - RNA, 19 nt, Artificial Sequence
  Description of Artificial Sequence: Synthetic oligonucleotide
uagauguagcaucagugua

SEQ ID NO: 310351 - RNA, 19 nt, Artificial Sequence
  Description of Artificial Sequence: Synthetic oligonucleotide
agauaggacucgcacaggu

SEQ ID NO: 310352 - RNA, 19 nt, Artificial Sequence
  Description of Artificial Sequence: Synthetic oligonucleotide
cuaacuccuaauaaaagcu

SEQ ID NO: 310353 - RNA, 19 nt, Artificial Sequence
  Description of Artificial Sequence: Synthetic oligonucleotide
uucuuuagcuagaaagaua

SEQ ID NO: 310354 - RNA, 19 nt, Artificial Sequence
  Description of Artificial Sequence: Synthetic oligonucleotide
aacugucuagcucuaguuu

SEQ ID NO: 310355 - RNA, 19 nt, Artificial Sequence
  Description of Artificial Sequence: Synthetic oligonucleotide
aaaggaguacuugccccac

SEQ ID NO: 310356 - RNA, 19 nt, Artificial Sequence
  Description of Artificial Sequence: Synthetic oligonucleotide
uguaggucugccauuguuu

SEQ ID NO: 310357 - RNA, 19 nt, Artificial Sequence
  Description of Artificial Sequence: Synthetic oligonucleotide
uccgucucgaguuucuugu

SEQ ID NO: 310358 - RNA, 19 nt, Artificial Sequence
  Description of Artificial Sequence: Synthetic oligonucleotide
uaacuccuaauaaaagcua

SEQ ID NO: 310359 - RNA, 19 nt, Artificial Sequence
  Description of Artificial Sequence: Synthetic oligonucleotide
ugugcguuaggaagguaac

SEQ ID NO: 310360 - RNA, 19 nt, Artificial Sequence
  Description of Artificial Sequence: Synthetic oligonucleotide
cuuuuagccacauuuugaa

SEQ ID NO: 310361 - RNA, 19 nt, Artificial Sequence
  Description of Artificial Sequence: Synthetic oligonucleotide
aucauuuggaagguaauau

SEQ ID NO: 310362 - RNA, 19 nt, Artificial Sequence
  Description of Artificial Sequence: Synthetic oligonucleotide
aagauagcuucuugccgug

SEQ ID NO: 310363 - RNA, 19 nt, Artificial Sequence
  Description of Artificial Sequence: Synthetic oligonucleotide
acguguucuucaaauuugc

SEQ ID NO: 310364 - RNA, 19 nt, Artificial Sequence
  Description of Artificial Sequence: Synthetic oligonucleotide
agcauauuuauuacauuug

SEQ ID NO: 310365 - RNA, 19 nt, Artificial Sequence
  Description of Artificial Sequence: Synthetic oligonucleotide
uucuaagcgugcaguaugu

SEQ ID NO: 310366 - RNA, 19 nt, Artificial Sequence
  Description of Artificial Sequence: Synthetic oligonucleotide
gucgaaauuuagaacauuc

SEQ ID NO: 310367 - RNA, 19 nt, Artificial Sequence
  Description of Artificial Sequence: Synthetic oligonucleotide
acggaguuaagguguaaug

SEQ ID NO: 310368 - RNA, 19 nt, Artificial Sequence
  Description of Artificial Sequence: Synthetic oligonucleotide
aagcgugcaguauguaggu

SEQ ID NO: 310369 - RNA, 19 nt, Artificial Sequence
  Description of Artificial Sequence: Synthetic oligonucleotide
guuaacaugucaaaauuua

SEQ ID NO: 310370 - RNA, 19 nt, Artificial Sequence
  Description of Artificial Sequence: Synthetic oligonucleotide
ucguuuucuaagcgugcag

SEQ ID NO: 310371 - RNA, 19 nt, Artificial Sequence
  Description of Artificial Sequence: Synthetic oligonucleotide
ucucguuuucuaagcgugc

SEQ ID NO: 310372 - RNA, 19 nt, Artificial Sequence
  Description of Artificial Sequence: Synthetic oligonucleotide
ccaagugugcguuaggaag

SEQ ID NO: 310373 - RNA, 19 nt, Artificial Sequence
  Description of Artificial Sequence: Synthetic oligonucleotide
ucucucguuuucuaagcgu

SEQ ID NO: 310374 - RNA, 19 nt, Artificial Sequence
  Description of Artificial Sequence: Synthetic oligonucleotide
agaggggacacuucuugug

SEQ ID NO: 310375 - RNA, 19 nt, Artificial Sequence
  Description of Artificial Sequence: Synthetic oligonucleotide
ucaaugguucaauucucuc

SEQ ID NO: 310376 - RNA, 19 nt, Artificial Sequence
  Description of Artificial Sequence: Synthetic oligonucleotide
gugaagacacuguuaguac

SEQ ID NO: 310377 - RNA, 19 nt, Artificial Sequence
  Description of Artificial Sequence: Synthetic oligonucleotide
uuagcucaagaagaccagc

SEQ ID NO: 310378 - RNA, 19 nt, Artificial Sequence
  Description of Artificial Sequence: Synthetic oligonucleotide
aguuuauccuucaaacugu

SEQ ID NO: 310379 - RNA, 19 nt, Artificial Sequence
  Description of Artificial Sequence: Synthetic oligonucleotide
uccugcaacaguuguuuac

SEQ ID NO: 310380 - RNA, 19 nt, Artificial Sequence
  Description of Artificial Sequence: Synthetic oligonucleotide
cacguaaaugcugacuggc

SEQ ID NO: 310381 - RNA, 19 nt, Artificial Sequence
  Description of Artificial Sequence: Synthetic oligonucleotide
aaugggucugaacgugccu

SEQ ID NO: 310382 - RNA, 19 nt, Artificial Sequence
  Description of Artificial Sequence: Synthetic oligonucleotide
acaugauccuuuguuaaca

SEQ ID NO: 310383 - RNA, 19 nt, Artificial Sequence
  Description of Artificial Sequence: Synthetic oligonucleotide
aucaauucacagaggggac

SEQ ID NO: 310384 - RNA, 19 nt, Artificial Sequence
  Description of Artificial Sequence: Synthetic oligonucleotide
aggccagaccauuuauuuc

SEQ ID NO: 310385 - RNA, 19 nt, Artificial Sequence
  Description of Artificial Sequence: Synthetic oligonucleotide
uagucgaaauuuagaacau

SEQ ID NO: 310386 - RNA, 19 nt, Artificial Sequence
  Description of Artificial Sequence: Synthetic oligonucleotide
gauugcuaaauuguacuaa

SEQ ID NO: 310387 - RNA, 19 nt, Artificial Sequence
  Description of Artificial Sequence: Synthetic oligonucleotide
gccaauuguaguuuguaac

SEQ ID NO: 310388 - RNA, 19 nt, Artificial Sequence
  Description of Artificial Sequence: Synthetic oligonucleotide
cuccuaauaaaagcuaguc

SEQ ID NO: 310389 - RNA, 19 nt, Artificial Sequence
  Description of Artificial Sequence: Synthetic oligonucleotide
augcuaguacacaauugac

SEQ ID NO: 310390 - RNA, 19 nt, Artificial Sequence
  Description of Artificial Sequence: Synthetic oligonucleotide
uaguacacaauugacuguu

SEQ ID NO: 310391 - RNA, 19 nt, Artificial Sequence
  Description of Artificial Sequence: Synthetic oligonucleotide
guauguaggucugccauug

SEQ ID NO: 310392 - RNA, 19 nt, Artificial Sequence
  Description of Artificial Sequence: Synthetic oligonucleotide
acuuuuagccacauuuuga

SEQ ID NO: 310393 - RNA, 19 nt, Artificial Sequence
  Description of Artificial Sequence: Synthetic oligonucleotide
cuuuagcuagaaagauagc

SEQ ID NO: 310394 - RNA, 19 nt, Artificial Sequence
  Description of Artificial Sequence: Synthetic oligonucleotide
aacgugccuuucaaacccc

SEQ ID NO: 310395 - RNA, 19 nt, Artificial Sequence
  Description of Artificial Sequence: Synthetic oligonucleotide
agauugcuaaauuguacua

SEQ ID NO: 310396 - RNA, 19 nt, Artificial Sequence
  Description of Artificial Sequence: Synthetic oligonucleotide
acaccucgaaaccuguugu

SEQ ID NO: 310397 - RNA, 19 nt, Artificial Sequence
  Description of Artificial Sequence: Synthetic oligonucleotide
auuuggaagguaauauccu

SEQ ID NO: 310398 - RNA, 19 nt, Artificial Sequence
  Description of Artificial Sequence: Synthetic oligonucleotide
uuguagcuuuagauguagc

SEQ ID NO: 310399 - RNA, 19 nt, Artificial Sequence
  Description of Artificial Sequence: Synthetic oligonucleotide
augacacuccaagugugcg

SEQ ID NO: 310400 - RNA, 19 nt, Artificial Sequence
  Description of Artificial Sequence: Synthetic oligonucleotide
aaaagcuagucgaaauuua

SEQ ID NO: 310401 - RNA, 19 nt, Artificial Sequence
  Description of Artificial Sequence: Synthetic oligonucleotide
aagcuagucgaaauuuaga

SEQ ID NO: 310402 - RNA, 19 nt, Artificial Sequence
  Description of Artificial Sequence: Synthetic oligonucleotide
ucgggcacaccuuccagug

SEQ ID NO: 310403 - RNA, 19 nt, Artificial Sequence
  Description of Artificial Sequence: Synthetic oligonucleotide
aucaguguaucucuucaua

SEQ ID NO: 310404 - RNA, 19 nt, Artificial Sequence
  Description of Artificial Sequence: Synthetic oligonucleotide
uugccguguugcuugaacu

SEQ ID NO: 310405 - RNA, 19 nt, Artificial Sequence
  Description of Artificial Sequence: Synthetic oligonucleotide
ggucuguguuuauugaagc

SEQ ID NO: 310406 - RNA, 19 nt, Artificial Sequence
  Description of Artificial Sequence: Synthetic oligonucleotide
gaauuucacccuuaugggu

SEQ ID NO: 310407 - RNA, 19 nt, Artificial Sequence
  Description of Artificial Sequence: Synthetic oligonucleotide
gauguagcaucaguguauc

SEQ ID NO: 310408 - RNA, 19 nt, Artificial Sequence
  Description of Artificial Sequence: Synthetic oligonucleotide
aagauaggacucgcacagg

SEQ ID NO: 310409 - RNA, 19 nt, Artificial Sequence
  Description of Artificial Sequence: Synthetic oligonucleotide
uuguuauacuuuucuguuu

SEQ ID NO: 310410 - RNA, 19 nt, Artificial Sequence
  Description of Artificial Sequence: Synthetic oligonucleotide
uaaucacgagcaguacucc

SEQ ID NO: 310411 - RNA, 19 nt, Artificial Sequence
  Description of Artificial Sequence: Synthetic oligonucleotide
ucgaaguugugcuguuucu

SEQ ID NO: 310412 - RNA, 19 nt, Artificial Sequence
  Description of Artificial Sequence: Synthetic oligonucleotide
uauacggaguuaaggugua

SEQ ID NO: 310413 - RNA, 19 nt, Artificial Sequence
  Description of Artificial Sequence: Synthetic oligonucleotide
cuggcuuuacauccauggc

SEQ ID NO: 310414 - RNA, 19 nt, Artificial Sequence
  Description of Artificial Sequence: Synthetic oligonucleotide
aaaccccugcuggucauag

SEQ ID NO: 310415 - RNA, 19 nt, Artificial Sequence
  Description of Artificial Sequence: Synthetic oligonucleotide
ggauauacggaguuaaggu

SEQ ID NO: 310416 - RNA, 19 nt, Artificial Sequence
  Description of Artificial Sequence: Synthetic oligonucleotide
aggagagcccuguacaaau

SEQ ID NO: 310417 - RNA, 19 nt, Artificial Sequence
  Description of Artificial Sequence: Synthetic oligonucleotide
acuugacugcaguuuguca

SEQ ID NO: 310418 - RNA, 19 nt, Artificial Sequence
  Description of Artificial Sequence: Synthetic oligonucleotide
guguaauaaucacgagcag

SEQ ID NO: 310419 - RNA, 19 nt, Artificial Sequence
  Description of Artificial Sequence: Synthetic oligonucleotide
ugcguuaggaagguaacuu

SEQ ID NO: 310420 - RNA, 19 nt, Artificial Sequence
  Description of Artificial Sequence: Synthetic oligonucleotide
uuuuacauuuucggcaauu

SEQ ID NO: 310421 - RNA, 19 nt, Artificial Sequence
  Description of Artificial Sequence: Synthetic oligonucleotide
gcuagucgaaauuuagaac

SEQ ID NO: 310422 - RNA, 19 nt, Artificial Sequence
  Description of Artificial Sequence: Synthetic oligonucleotide
uugagacaccucgaaaccu

SEQ ID NO: 310423 - RNA, 19 nt, Artificial Sequence
  Description of Artificial Sequence: Synthetic oligonucleotide
gcuaguucaaguuuuacau

SEQ ID NO: 310424 - RNA, 19 nt, Artificial Sequence
  Description of Artificial Sequence: Synthetic oligonucleotide
uugugcuguguaaggauua

SEQ ID NO: 310425 - RNA, 19 nt, Artificial Sequence
  Description of Artificial Sequence: Synthetic oligonucleotide
uuuggcaguguaggaagga

SEQ ID NO: 310426 - RNA, 19 nt, Artificial Sequence
  Description of Artificial Sequence: Synthetic oligonucleotide
guagcaucaguguaucucu

SEQ ID NO: 310427 - RNA, 19 nt, Artificial Sequence
  Description of Artificial Sequence: Synthetic oligonucleotide
ucugaacgugccuuucaaa

SEQ ID NO: 310428 - RNA, 19 nt, Artificial Sequence
  Description of Artificial Sequence: Synthetic oligonucleotide
uggagccggaguuucagau

SEQ ID NO: 310429 - RNA, 19 nt, Artificial Sequence
  Description of Artificial Sequence: Synthetic oligonucleotide
gauaggacucgcacaggug

SEQ ID NO: 310430 - RNA, 19 nt, Artificial Sequence
  Description of Artificial Sequence: Synthetic oligonucleotide
agauguagcaucaguguau

SEQ ID NO: 310431 - RNA, 19 nt, Artificial Sequence
  Description of Artificial Sequence: Synthetic oligonucleotide
uugcuuuaugugucacuga

SEQ ID NO: 310432 - RNA, 19 nt, Artificial Sequence
  Description of Artificial Sequence: Synthetic oligonucleotide
aguacuugccccacgaauu

SEQ ID NO: 310433 - RNA, 19 nt, Artificial Sequence
  Description of Artificial Sequence: Synthetic oligonucleotide
acuccaagugugcguuagg

SEQ ID NO: 310434 - RNA, 19 nt, Artificial Sequence
  Description of Artificial Sequence: Synthetic oligonucleotide
acgaaguuucuccuuuaaa

SEQ ID NO: 310435 - RNA, 19 nt, Artificial Sequence
  Description of Artificial Sequence: Synthetic oligonucleotide
aggacucgcacagguggcc

SEQ ID NO: 310436 - RNA, 19 nt, Artificial Sequence
  Description of Artificial Sequence: Synthetic oligonucleotide
acgagcaguacuccaucca

SEQ ID NO: 310437 - RNA, 19 nt, Artificial Sequence
  Description of Artificial Sequence: Synthetic oligonucleotide
cugacauaagcuuaguauu

SEQ ID NO: 310438 - RNA, 19 nt, Artificial Sequence
  Description of Artificial Sequence: Synthetic oligonucleotide
acauucaaguuguucucuu

SEQ ID NO: 310439 - RNA, 19 nt, Artificial Sequence
  Description of Artificial Sequence: Synthetic oligonucleotide
uucgaggccagaccauuua

SEQ ID NO: 310440 - RNA, 19 nt, Artificial Sequence
  Description of Artificial Sequence: Synthetic oligonucleotide
uacggaguuaagguguaau

SEQ ID NO: 310441 - RNA, 19 nt, Artificial Sequence
  Description of Artificial Sequence: Synthetic oligonucleotide
ccaaauucgaggccagacc

SEQ ID NO: 310442 - RNA, 19 nt, Artificial Sequence
  Description of Artificial Sequence: Synthetic oligonucleotide
caaugguucaauucucucu

SEQ ID NO: 310443 - RNA, 19 nt, Artificial Sequence
  Description of Artificial Sequence: Synthetic oligonucleotide
ugugcuguguaaggauuac

SEQ ID NO: 310444 - RNA, 19 nt, Artificial Sequence
  Description of Artificial Sequence: Synthetic oligonucleotide
cagcucgaaacuggaaagg

SEQ ID NO: 310445 - RNA, 19 nt, Artificial Sequence
  Description of Artificial Sequence: Synthetic oligonucleotide
aagguaacuuuuagccaca

SEQ ID NO: 310446 - RNA, 19 nt, Artificial Sequence
  Description of Artificial Sequence: Synthetic oligonucleotide
ggcauaggagaccauaaaa

SEQ ID NO: 310447 - RNA, 19 nt, Artificial Sequence
  Description of Artificial Sequence: Synthetic oligonucleotide
aucgggcacaccuuccagu

SEQ ID NO: 310448 - RNA, 19 nt, Artificial Sequence
  Description of Artificial Sequence: Synthetic oligonucleotide
acaucgggcacaccuucca

SEQ ID NO: 310449 - RNA, 19 nt, Artificial Sequence
  Description of Artificial Sequence: Synthetic oligonucleotide
uucaaacugucuagcucua

SEQ ID NO: 310450 - RNA, 19 nt, Artificial Sequence
  Description of Artificial Sequence: Synthetic oligonucleotide
uuuuggagccucuggcauu

SEQ ID NO: 310451 - RNA, 19 nt, Artificial Sequence
  Description of Artificial Sequence: Synthetic oligonucleotide
acuccuaauaaaagcuagu

SEQ ID NO: 310452 - RNA, 19 nt, Artificial Sequence
  Description of Artificial Sequence: Synthetic oligonucleotide
uuacgaaguuucuccuuua

SEQ ID NO: 310453 - RNA, 19 nt, Artificial Sequence
  Description of Artificial Sequence: Synthetic oligonucleotide
cugcucgcugcacaucggg

SEQ ID NO: 310454 - RNA, 19 nt, Artificial Sequence
  Description of Artificial Sequence: Synthetic oligonucleotide
ugugccuuccugaguuuau

SEQ ID NO: 310455 - RNA, 19 nt, Artificial Sequence
  Description of Artificial Sequence: Synthetic oligonucleotide
ucgaggccagaccauuuau

SEQ ID NO: 310456 - RNA, 19 nt, Artificial Sequence
  Description of Artificial Sequence: Synthetic oligonucleotide
agcucaagaagaccagcuu

SEQ ID NO: 310457 - RNA, 19 nt, Artificial Sequence
  Description of Artificial Sequence: Synthetic oligonucleotide
ucuguaccucugacauaag

SEQ ID NO: 310458 - RNA, 19 nt, Artificial Sequence
  Description of Artificial Sequence: Synthetic oligonucleotide
aacuggagaagcagcucga

SEQ ID NO: 310459 - RNA, 19 nt, Artificial Sequence
  Description of Artificial Sequence: Synthetic oligonucleotide
cacgaauuucacccuuaug

SEQ ID NO: 310460 - RNA, 19 nt, Artificial Sequence
  Description of Artificial Sequence: Synthetic oligonucleotide
cauucugaucaaaaugggu

SEQ ID NO: 310461 - RNA, 19 nt, Artificial Sequence
  Description of Artificial Sequence: Synthetic oligonucleotide
guguggauggauauacgga

SEQ ID NO: 310462 - RNA, 19 nt, Artificial Sequence
  Description of Artificial Sequence: Synthetic oligonucleotide
caacauaucagaguuuccu

SEQ ID NO: 310463 - RNA, 19 nt, Artificial Sequence
  Description of Artificial Sequence: Synthetic oligonucleotide
cuuuacauccauggcagaa

SEQ ID NO: 310464 - RNA, 19 nt, Artificial Sequence
  Description of Artificial Sequence: Synthetic oligonucleotide
agcuagaaagauagcuucu

SEQ ID NO: 310465 - RNA, 19 nt, Artificial Sequence
  Description of Artificial Sequence: Synthetic oligonucleotide
aggcauaggagaccauaaa

SEQ ID NO: 310466 - RNA, 19 nt, Artificial Sequence
  Description of Artificial Sequence: Synthetic oligonucleotide
cacaucgggcacaccuucc

SEQ ID NO: 310467 - RNA, 19 nt, Artificial Sequence
  Description of Artificial Sequence: Synthetic oligonucleotide
guuuuaucacgaacauuca

SEQ ID NO: 310468 - RNA, 19 nt, Artificial Sequence
  Description of Artificial Sequence: Synthetic oligonucleotide
caaucaccuuuaccaauuc

SEQ ID NO: 310469 - RNA, 19 nt, Artificial Sequence
  Description of Artificial Sequence: Synthetic oligonucleotide
ugccguguugcuugaacuu

SEQ ID NO: 310470 - RNA, 19 nt, Artificial Sequence
  Description of Artificial Sequence: Synthetic oligonucleotide
uccugaguuuauccuucaa

SEQ ID NO: 310471 - RNA, 19 nt, Artificial Sequence
  Description of Artificial Sequence: Synthetic oligonucleotide
ugcacaucgggcacaccuu

SEQ ID NO: 310472 - RNA, 19 nt, Artificial Sequence
  Description of Artificial Sequence: Synthetic oligonucleotide
caccucgaaaccuguugug

SEQ ID NO: 310473 - RNA, 19 nt, Artificial Sequence
  Description of Artificial Sequence: Synthetic oligonucleotide
caauugcuuuaugugucac

SEQ ID NO: 310474 - RNA, 19 nt, Artificial Sequence
  Description of Artificial Sequence: Synthetic oligonucleotide
auccggacggcuaagguuu

SEQ ID NO: 310475 - RNA, 19 nt, Artificial Sequence
  Description of Artificial Sequence: Synthetic oligonucleotide
ucacccuuauggguaacau

SEQ ID NO: 310476 - RNA, 19 nt, Artificial Sequence
  Description of Artificial Sequence: Synthetic oligonucleotide
acuugccccacgaauuuca

SEQ ID NO: 310477 - RNA, 19 nt, Artificial Sequence
  Description of Artificial Sequence: Synthetic oligonucleotide
ugggcucggacuuuccauu

SEQ ID NO: 310478 - RNA, 19 nt, Artificial Sequence
  Description of Artificial Sequence: Synthetic oligonucleotide
cacuccaagugugcguuag

SEQ ID NO: 310479 - RNA, 19 nt, Artificial Sequence
  Description of Artificial Sequence: Synthetic oligonucleotide
gcuacagacaacauugucu

SEQ ID NO: 310480 - RNA, 19 nt, Artificial Sequence
  Description of Artificial Sequence: Synthetic oligonucleotide
caacauugucuucccaaga

SEQ ID NO: 310481 - RNA, 19 nt, Artificial Sequence
  Description of Artificial Sequence: Synthetic oligonucleotide
guuaagguguaaugacacu

SEQ ID NO: 310482 - RNA, 19 nt, Artificial Sequence
  Description of Artificial Sequence: Synthetic oligonucleotide
ggauuaccaaacugcagaa

SEQ ID NO: 310483 - RNA, 19 nt, Artificial Sequence
  Description of Artificial Sequence: Synthetic oligonucleotide
guaucagucuuuuccuggu

SEQ ID NO: 310484 - RNA, 19 nt, Artificial Sequence
  Description of Artificial Sequence: Synthetic oligonucleotide
aguacacaauugacuguug

SEQ ID NO: 310485 - RNA, 19 nt, Artificial Sequence
  Description of Artificial Sequence: Synthetic oligonucleotide
accauccggacggcuaagg

SEQ ID NO: 310486 - RNA, 19 nt, Artificial Sequence
  Description of Artificial Sequence: Synthetic oligonucleotide
caggcauaggagaccauaa

SEQ ID NO: 310487 - RNA, 19 nt, Artificial Sequence
  Description of Artificial Sequence: Synthetic oligonucleotide
auguagcaucaguguaucu

SEQ ID NO: 310488 - RNA, 19 nt, Artificial Sequence
  Description of Artificial Sequence: Synthetic oligonucleotide
aucacgagcaguacuccau

SEQ ID NO: 310489 - RNA, 19 nt, Artificial Sequence
  Description of Artificial Sequence: Synthetic oligonucleotide
acguaaaugcugacuggcu

SEQ ID NO: 310490 - RNA, 19 nt, Artificial Sequence
  Description of Artificial Sequence: Synthetic oligonucleotide
cauagucaggcgggaacug

SEQ ID NO: 310491 - RNA, 19 nt, Artificial Sequence
  Description of Artificial Sequence: Synthetic oligonucleotide
cuaguacacaauugacugu

SEQ ID NO: 310492 - RNA, 19 nt, Artificial Sequence
  Description of Artificial Sequence: Synthetic oligonucleotide
uagccacauuuugaaagau

SEQ ID NO: 310493 - RNA, 19 nt, Artificial Sequence
  Description of Artificial Sequence: Synthetic oligonucleotide
gugcuguguaaggauuacc

SEQ ID NO: 310494 - RNA, 19 nt, Artificial Sequence
  Description of Artificial Sequence: Synthetic oligonucleotide
ggacggcuaagguuucgag

SEQ ID NO: 310495 - RNA, 19 nt, Artificial Sequence
  Description of Artificial Sequence: Synthetic oligonucleotide
cagcuuuuguggucaccac

SEQ ID NO: 310496 - RNA, 19 nt, Artificial Sequence
  Description of Artificial Sequence: Synthetic oligonucleotide
uagcaucaguguaucucuu

SEQ ID NO: 310497 - RNA, 19 nt, Artificial Sequence
  Description of Artificial Sequence: Synthetic oligonucleotide
aaccccugcuggucauagu

SEQ ID NO: 310498 - RNA, 19 nt, Artificial Sequence
  Description of Artificial Sequence: Synthetic oligonucleotide
augggucugaacgugccuu

SEQ ID NO: 310499 - RNA, 19 nt, Artificial Sequence
  Description of Artificial Sequence: Synthetic oligonucleotide
caacguguucuucaaauuu

SEQ ID NO: 310500 - RNA, 19 nt, Artificial Sequence
  Description of Artificial Sequence: Synthetic oligonucleotide
agcgugcaguauguagguc

SEQ ID NO: 310501 - RNA, 19 nt, Artificial Sequence
  Description of Artificial Sequence: Synthetic oligonucleotide
gcuguaagcaggagagccc

SEQ ID NO: 310502 - RNA, 19 nt, Artificial Sequence
  Description of Artificial Sequence: Synthetic oligonucleotide
ucgagcuggcuggcuacag

SEQ ID NO: 310503 - RNA, 19 nt, Artificial Sequence
  Description of Artificial Sequence: Synthetic oligonucleotide
ucuaagcgugcaguaugua

SEQ ID NO: 310504 - RNA, 19 nt, Artificial Sequence
  Description of Artificial Sequence: Synthetic oligonucleotide
guaggucugccauuguuuu

SEQ ID NO: 310505 - RNA, 19 nt, Artificial Sequence
  Description of Artificial Sequence: Synthetic oligonucleotide
ccguguugcuugaacuugc

SEQ ID NO: 310506 - RNA, 19 nt, Artificial Sequence
  Description of Artificial Sequence: Synthetic oligonucleotide
ccucuggcauuccuuaaac

SEQ ID NO: 310507 - RNA, 19 nt, Artificial Sequence
  Description of Artificial Sequence: Synthetic oligonucleotide
caccuuuaccaauuccucu

SEQ ID NO: 310508 - RNA, 19 nt, Artificial Sequence
  Description of Artificial Sequence: Synthetic oligonucleotide
uacuugccccacgaauuuc

SEQ ID NO: 310509 - RNA, 19 nt, Artificial Sequence
  Description of Artificial Sequence: Synthetic oligonucleotide
uggucaccaccaacauauc

SEQ ID NO: 310510 - RNA, 19 nt, Artificial Sequence
  Description of Artificial Sequence: Synthetic oligonucleotide
cgaacauucacagcaucac

SEQ ID NO: 310511 - RNA, 19 nt, Artificial Sequence
  Description of Artificial Sequence: Synthetic oligonucleotide
guugugggcucggacuuuc

SEQ ID NO: 310512 - RNA, 19 nt, Artificial Sequence
  Description of Artificial Sequence: Synthetic oligonucleotide
gaccacguaaaugcugacu

SEQ ID NO: 310513 - RNA, 19 nt, Artificial Sequence
  Description of Artificial Sequence: Synthetic oligonucleotide
gcaguauguaggucugcca

SEQ ID NO: 310514 - RNA, 19 nt, Artificial Sequence
  Description of Artificial Sequence: Synthetic oligonucleotide
uucaggcauaggagaccau

SEQ ID NO: 310515 - RNA, 19 nt, Artificial Sequence
  Description of Artificial Sequence: Synthetic oligonucleotide
gcgugcaguauguaggucu

SEQ ID NO: 310516 - RNA, 19 nt, Artificial Sequence
  Description of Artificial Sequence: Synthetic oligonucleotide
ggguguggauggauauacg

SEQ ID NO: 310517 - RNA, 19 nt, Artificial Sequence
  Description of Artificial Sequence: Synthetic oligonucleotide
ccuuucugucuucagcuga

SEQ ID NO: 310518 - RNA, 19 nt, Artificial Sequence
  Description of Artificial Sequence: Synthetic oligonucleotide
cacccuuauggguaacaua

SEQ ID NO: 310519 - RNA, 19 nt, Artificial Sequence
  Description of Artificial Sequence: Synthetic oligonucleotide
guaagcaggagagcccugu

SEQ ID NO: 310520 - RNA, 19 nt, Artificial Sequence
  Description of Artificial Sequence: Synthetic oligonucleotide
gcuuuacgaaguuucuccu

SEQ ID NO: 310521 - RNA, 19 nt, Artificial Sequence
  Description of Artificial Sequence: Synthetic oligonucleotide
uucucccuugagagauuuu

SEQ ID NO: 310522 - RNA, 19 nt, Artificial Sequence
  Description of Artificial Sequence: Synthetic oligonucleotide
uccggacggcuaagguuuc

SEQ ID NO: 310523 - RNA, 19 nt, Artificial Sequence
  Description of Artificial Sequence: Synthetic oligonucleotide
cgucucgaguuucuugugc

SEQ ID NO: 310524 - RNA, 19 nt, Artificial Sequence
  Description of Artificial Sequence: Synthetic oligonucleotide
aggcgggaacugcucgcug

SEQ ID NO: 310525 - RNA, 19 nt, Artificial Sequence
  Description of Artificial Sequence: Synthetic oligonucleotide
agguaacuuuuagccacau

SEQ ID NO: 310526 - RNA, 19 nt, Artificial Sequence
  Description of Artificial Sequence: Synthetic oligonucleotide
gugcaguauguaggucugc

SEQ ID NO: 310527 - RNA, 19 nt, Artificial Sequence
  Description of Artificial Sequence: Synthetic oligonucleotide
guacuugccccacgaauuu

SEQ ID NO: 310528 - RNA, 19 nt, Artificial Sequence
  Description of Artificial Sequence: Synthetic oligonucleotide
gcacaucgggcacaccuuc

SEQ ID NO: 310529 - RNA, 19 nt, Artificial Sequence
  Description of Artificial Sequence: Synthetic oligonucleotide
cuggagccggaguuucaga

SEQ ID NO: 310530 - RNA, 19 nt, Artificial Sequence
  Description of Artificial Sequence: Synthetic oligonucleotide
cugacucccauuucucuuu

SEQ ID NO: 310531 - RNA, 19 nt, Artificial Sequence
  Description of Artificial Sequence: Synthetic oligonucleotide
cauccggacggcuaagguu

SEQ ID NO: 310532 - RNA, 19 nt, Artificial Sequence
  Description of Artificial Sequence: Synthetic oligonucleotide
cccuuucugucuucagcug

SEQ ID NO: 310533 - RNA, 19 nt, Artificial Sequence
  Description of Artificial Sequence: Synthetic oligonucleotide
gagacaccucgaaaccugu

SEQ ID NO: 310534 - RNA, 19 nt, Artificial Sequence
  Description of Artificial Sequence: Synthetic oligonucleotide
gcccuguacaaauuuuccu

SEQ ID NO: 310535 - RNA, 19 nt, Artificial Sequence
  Description of Artificial Sequence: Synthetic oligonucleotide
auacggaguuaagguguaa

SEQ ID NO: 310536 - RNA, 19 nt, Artificial Sequence
  Description of Artificial Sequence: Synthetic oligonucleotide
gugggcucggacuuuccau

SEQ ID NO: 310537 - RNA, 19 nt, Artificial Sequence
  Description of Artificial Sequence: Synthetic oligonucleotide
acgugccuuucaaaccccu

SEQ ID NO: 310538 - RNA, 19 nt, Artificial Sequence
  Description of Artificial Sequence: Synthetic oligonucleotide
acacuccaagugugcguua

SEQ ID NO: 310539 - RNA, 19 nt, Artificial Sequence
  Description of Artificial Sequence: Synthetic oligonucleotide
auauaccaacccagucuuu

SEQ ID NO: 310540 - RNA, 19 nt, Artificial Sequence
  Description of Artificial Sequence: Synthetic oligonucleotide
ggaguacuugccccacgaa

SEQ ID NO: 310541 - RNA, 19 nt, Artificial Sequence
  Description of Artificial Sequence: Synthetic oligonucleotide
gugcguuaggaagguaacu

SEQ ID NO: 310542 - RNA, 19 nt, Artificial Sequence
  Description of Artificial Sequence: Synthetic oligonucleotide
gcaaucaccuuuaccaauu

SEQ ID NO: 310543 - RNA, 19 nt, Artificial Sequence
  Description of Artificial Sequence: Synthetic oligonucleotide
cuaagguuucgagcuggcu

SEQ ID NO: 310544 - RNA, 19 nt, Artificial Sequence
  Description of Artificial Sequence: Synthetic oligonucleotide
auacuucaagaaggcccuu

SEQ ID NO: 310545 - RNA, 19 nt, Artificial Sequence
  Description of Artificial Sequence: Synthetic oligonucleotide
cagguggccuuuggauuuc

SEQ ID NO: 310546 - RNA, 19 nt, Artificial Sequence
  Description of Artificial Sequence: Synthetic oligonucleotide
cucgcacagguggccuuug

SEQ ID NO: 310547 - RNA, 19 nt, Artificial Sequence
  Description of Artificial Sequence: Synthetic oligonucleotide
agacaccucgaaaccuguu

SEQ ID NO: 310548 - RNA, 19 nt, Artificial Sequence
  Description of Artificial Sequence: Synthetic oligonucleotide
agugugcguuaggaaggua

SEQ ID NO: 310549 - RNA, 19 nt, Artificial Sequence
  Description of Artificial Sequence: Synthetic oligonucleotide
ccgucucgaguuucuugug

SEQ ID NO: 310550 - RNA, 19 nt, Artificial Sequence
  Description of Artificial Sequence: Synthetic oligonucleotide
cagcaugcuagcugcuuuu

SEQ ID NO: 310551 - RNA, 19 nt, Artificial Sequence
  Description of Artificial Sequence: Synthetic oligonucleotide
gacucgcacagguggccuu

SEQ ID NO: 310552 - RNA, 19 nt, Artificial Sequence
  Description of Artificial Sequence: Synthetic oligonucleotide
cccacgaauuucacccuua

SEQ ID NO: 310553 - RNA, 19 nt, Artificial Sequence
  Description of Artificial Sequence: Synthetic oligonucleotide
ccggacggcuaagguuucg

SEQ ID NO: 310554 - RNA, 19 nt, Artificial Sequence
  Description of Artificial Sequence: Synthetic oligonucleotide
caggcgggaacugcucgcu

SEQ ID NO: 310555 - RNA, 19 nt, Artificial Sequence
  Description of Artificial Sequence: Synthetic oligonucleotide
ggacucgcacagguggccu

SEQ ID NO: 310556 - RNA, 19 nt, Artificial Sequence
  Description of Artificial Sequence: Synthetic oligonucleotide
ccauccggacggcuaaggu

SEQ ID NO: 310557 - RNA, 19 nt, Artificial Sequence
  Description of Artificial Sequence: Synthetic oligonucleotide
ccacgaauuucacccuuau

SEQ ID NO: 310558 - RNA, 19 nt, Artificial Sequence
  Description of Artificial Sequence: Synthetic oligonucleotide
gccccacgaauuucacccu

SEQ ID NO: 310559 - RNA, 19 nt, Artificial Sequence
  Description of Artificial Sequence: Synthetic oligonucleotide
ggcucggacuuuccauuuu

SEQ ID NO: 310560 - RNA, 19 nt, Artificial Sequence
  Description of Artificial Sequence: Synthetic oligonucleotide
cguguugcuugaacuugcu

SEQ ID NO: 310561 - RNA, 19 nt, Artificial Sequence
  Description of Artificial Sequence: Synthetic oligonucleotide
cggacggcuaagguuucga

SEQ ID NO: 310562 - RNA, 19 nt, Artificial Sequence
  Description of Artificial Sequence: Synthetic oligonucleotide
ccccacgaauuucacccuu

SEQ ID NO: 310563 - RNA, 19 nt, Artificial Sequence
  Description of Artificial Sequence: Synthetic oligonucleotide
aauaacuaggcguagaggu

SEQ ID NO: 310564 - RNA, 19 nt, Artificial Sequence
  Description of Artificial Sequence: Synthetic oligonucleotide
uucaccauaguucugagag

SEQ ID NO: 310565 - RNA, 19 nt, Artificial Sequence
  Description of Artificial Sequence: Synthetic oligonucleotide
ucacguaauacauacaagg

SEQ ID NO: 310566 - RNA, 19 nt, Artificial Sequence
  Description of Artificial Sequence: Synthetic oligonucleotide
ugugguauaauccaggaac

SEQ ID NO: 310567 - RNA, 19 nt, Artificial Sequence
  Description of Artificial Sequence: Synthetic oligonucleotide
uagauuauaggccagguca

SEQ ID NO: 310568 - RNA, 19 nt, Artificial Sequence
  Description of Artificial Sequence: Synthetic oligonucleotide
ucauguuuggaucaugccg

SEQ ID NO: 310569 - RNA, 19 nt, Artificial Sequence
  Description of Artificial Sequence: Synthetic oligonucleotide
acuuauaggaagcaaagag

SEQ ID NO: 310570 - RNA, 19 nt, Artificial Sequence
  Description of Artificial Sequence: Synthetic oligonucleotide
aauacagcggaucuccuuc

SEQ ID NO: 310571 - RNA, 19 nt, Artificial Sequence
  Description of Artificial Sequence: Synthetic oligonucleotide
auagacauuggugucaucc

SEQ ID NO: 310572 - RNA, 19 nt, Artificial Sequence
  Description of Artificial Sequence: Synthetic oligonucleotide
uguauaagaggcuugcugc

SEQ ID NO: 310573 - RNA, 19 nt, Artificial Sequence
  Description of Artificial Sequence: Synthetic oligonucleotide
ucuaaguuccccucaaagg

SEQ ID NO: 310574 - RNA, 19 nt, Artificial Sequence
  Description of Artificial Sequence: Synthetic oligonucleotide
aauaguaguuuugucuggc

SEQ ID NO: 310575 - RNA, 19 nt, Artificial Sequence
  Description of Artificial Sequence: Synthetic oligonucleotide
uuacagucuaucaacaaca

SEQ ID NO: 310576 - RNA, 19 nt, Artificial Sequence
  Description of Artificial Sequence: Synthetic oligonucleotide
aaccagauaaucugguuag

SEQ ID NO: 310577 - RNA, 19 nt, Artificial Sequence
  Description of Artificial Sequence: Synthetic oligonucleotide
gaaacauaaaugugauugg

SEQ ID NO: 310578 - RNA, 19 nt, Artificial Sequence
  Description of Artificial Sequence: Synthetic oligonucleotide
augcaaagcacgcagaauc

SEQ ID NO: 310579 - RNA, 19 nt, Artificial Sequence
  Description of Artificial Sequence: Synthetic oligonucleotide
ucauuguucacaugcaaag

SEQ ID NO: 310580 - RNA, 19 nt, Artificial Sequence
  Description of Artificial Sequence: Synthetic oligonucleotide
aagaguaguaugucagcac

SEQ ID NO: 310581 - RNA, 19 nt, Artificial Sequence
  Description of Artificial Sequence: Synthetic oligonucleotide
guauggauuaucuugagga

SEQ ID NO: 310582 - RNA, 19 nt, Artificial Sequence
  Description of Artificial Sequence: Synthetic oligonucleotide
gaaauaacuaggcguagag

SEQ ID NO: 310583 - RNA, 19 nt, Artificial Sequence
  Description of Artificial Sequence: Synthetic oligonucleotide
agaucagauaugcagauga

SEQ ID NO: 310584 - RNA, 19 nt, Artificial Sequence
  Description of Artificial Sequence: Synthetic oligonucleotide
aauuugggcacggagauca

SEQ ID NO: 310585 - RNA, 19 nt, Artificial Sequence
  Description of Artificial Sequence: Synthetic oligonucleotide
uguauggauuaucuugagg

SEQ ID NO: 310586 - RNA, 19 nt, Artificial Sequence
  Description of Artificial Sequence: Synthetic oligonucleotide
uguaggaugagauagucuu

SEQ ID NO: 310587 - RNA, 19 nt, Artificial Sequence
  Description of Artificial Sequence: Synthetic oligonucleotide
ucagauaugcagaugaauu

SEQ ID NO: 310588 - RNA, 19 nt, Artificial Sequence
  Description of Artificial Sequence: Synthetic oligonucleotide
aaguugaggaagugggagg

SEQ ID NO: 310589 - RNA, 19 nt, Artificial Sequence
  Description of Artificial Sequence: Synthetic oligonucleotide
auaauccaggaacuuggcc

SEQ ID NO: 310590 - RNA, 19 nt, Artificial Sequence
  Description of Artificial Sequence: Synthetic oligonucleotide
acucaccccauauagguac

SEQ ID NO: 310591 - RNA, 19 nt, Artificial Sequence
  Description of Artificial Sequence: Synthetic oligonucleotide
ucuuaaguacauucuuggg

SEQ ID NO: 310592 - RNA, 19 nt, Artificial Sequence
  Description of Artificial Sequence: Synthetic oligonucleotide
ugucucgaauuucugauug

SEQ ID NO: 310593 - RNA, 19 nt, Artificial Sequence
  Description of Artificial Sequence: Synthetic oligonucleotide
cauaaaguuguaauuccag

SEQ ID NO: 310594 - RNA, 19 nt, Artificial Sequence
  Description of Artificial Sequence: Synthetic oligonucleotide
aaaccagauaaucugguua

SEQ ID NO: 310595 - RNA, 19 nt, Artificial Sequence
  Description of Artificial Sequence: Synthetic oligonucleotide
gaugagacgggagaaagcc

SEQ ID NO: 310596 - RNA, 19 nt, Artificial Sequence
  Description of Artificial Sequence: Synthetic oligonucleotide
guaaguauaaccagucucc

SEQ ID NO: 310597 - RNA, 19 nt, Artificial Sequence
  Description of Artificial Sequence: Synthetic oligonucleotide
aaacgcuucuguccagccc

SEQ ID NO: 310598 - RNA, 19 nt, Artificial Sequence
  Description of Artificial Sequence: Synthetic oligonucleotide
gacagauaaggcucagugg

SEQ ID NO: 310599 - RNA, 19 nt, Artificial Sequence
  Description of Artificial Sequence: Synthetic oligonucleotide
gacaguucggguuugugug

SEQ ID NO: 310600 - RNA, 19 nt, Artificial Sequence
  Description of Artificial Sequence: Synthetic oligonucleotide
cugacauaaguccaucacg

SEQ ID NO: 310601 - RNA, 19 nt, Artificial Sequence
  Description of Artificial Sequence: Synthetic oligonucleotide
uaauaguaguuuugucugg

SEQ ID NO: 310602 - RNA, 19 nt, Artificial Sequence
  Description of Artificial Sequence: Synthetic oligonucleotide
agcucugacccuuugauca

SEQ ID NO: 310603 - RNA, 19 nt, Artificial Sequence
  Description of Artificial Sequence: Synthetic oligonucleotide
auuggguugaguguggauc

SEQ ID NO: 310604 - RNA, 19 nt, Artificial Sequence
  Description of Artificial Sequence: Synthetic oligonucleotide
cacucuauagacauuggug

SEQ ID NO: 310605 - RNA, 19 nt, Artificial Sequence
  Description of Artificial Sequence: Synthetic oligonucleotide
auagucuugagccagucau

SEQ ID NO: 310606 - RNA, 19 nt, Artificial Sequence
  Description of Artificial Sequence: Synthetic oligonucleotide
accauaaagaagccgagga

SEQ ID NO: 310607 - RNA, 19 nt, Artificial Sequence
  Description of Artificial Sequence: Synthetic oligonucleotide
aaagaguaguaugucagca

SEQ ID NO: 310608 - RNA, 19 nt, Artificial Sequence
  Description of Artificial Sequence: Synthetic oligonucleotide
acguaauacauacaaggca

SEQ ID NO: 310609 - RNA, 19 nt, Artificial Sequence
  Description of Artificial Sequence: Synthetic oligonucleotide
uggaugucaauccaauacu

SEQ ID NO: 310610 - RNA, 19 nt, Artificial Sequence
  Description of Artificial Sequence: Synthetic oligonucleotide
cacguaauacauacaaggc

SEQ ID NO: 310611 - RNA, 19 nt, Artificial Sequence
  Description of Artificial Sequence: Synthetic oligonucleotide
acauaaguccaucacgaug

SEQ ID NO: 310612 - RNA, 19 nt, Artificial Sequence
  Description of Artificial Sequence: Synthetic oligonucleotide
uucacguaauacauacaag

SEQ ID NO: 310613 - RNA, 19 nt, Artificial Sequence
  Description of Artificial Sequence: Synthetic oligonucleotide
aucgaaucagggcagccac

SEQ ID NO: 310614 - RNA, 19 nt, Artificial Sequence
  Description of Artificial Sequence: Synthetic oligonucleotide
uagauacucauguugucug

SEQ ID NO: 310615 - RNA, 19 nt, Artificial Sequence
  Description of Artificial Sequence: Synthetic oligonucleotide
agauaugcagaugaauuuc

SEQ ID NO: 310616 - RNA, 19 nt, Artificial Sequence
  Description of Artificial Sequence: Synthetic oligonucleotide
ugucaauccaauacuucug

SEQ ID NO: 310617 - RNA, 19 nt, Artificial Sequence
  Description of Artificial Sequence: Synthetic oligonucleotide
auagugugagggcagguag

SEQ ID NO: 310618 - RNA, 19 nt, Artificial Sequence
  Description of Artificial Sequence: Synthetic oligonucleotide
ucgaauuucugauuguguc

SEQ ID NO: 310619 - RNA, 19 nt, Artificial Sequence
  Description of Artificial Sequence: Synthetic oligonucleotide
ucucgccaucccaagaugg

SEQ ID NO: 310620 - RNA, 19 nt, Artificial Sequence
  Description of Artificial Sequence: Synthetic oligonucleotide
guagagguugaagagaacc

SEQ ID NO: 310621 - RNA, 19 nt, Artificial Sequence
  Description of Artificial Sequence: Synthetic oligonucleotide
agaguaguaugucagcaca

SEQ ID NO: 310622 - RNA, 19 nt, Artificial Sequence
  Description of Artificial Sequence: Synthetic oligonucleotide
accuaaggguuccaucucc

SEQ ID NO: 310623 - RNA, 19 nt, Artificial Sequence
  Description of Artificial Sequence: Synthetic oligonucleotide
guuugguugucuaaguucc

SEQ ID NO: 310624 - RNA, 19 nt, Artificial Sequence
  Description of Artificial Sequence: Synthetic oligonucleotide
ggcuuuaaggaugagaucc

SEQ ID NO: 310625 - RNA, 19 nt, Artificial Sequence
  Description of Artificial Sequence: Synthetic oligonucleotide
cugggcaggaaccauaaag

SEQ ID NO: 310626 - RNA, 19 nt, Artificial Sequence
  Description of Artificial Sequence: Synthetic oligonucleotide
auaggcacuguguagauua

SEQ ID NO: 310627 - RNA, 19 nt, Artificial Sequence
  Description of Artificial Sequence: Synthetic oligonucleotide
gugagcucggaauaucugg

SEQ ID NO: 310628 - RNA, 19 nt, Artificial Sequence
  Description of Artificial Sequence: Synthetic oligonucleotide
agcaagugcaccuccaaug

SEQ ID NO: 310629 - RNA, 19 nt, Artificial Sequence
  Description of Artificial Sequence: Synthetic oligonucleotide
auagucuccccaucguaac

SEQ ID NO: 310630 - RNA, 19 nt, Artificial Sequence
  Description of Artificial Sequence: Synthetic oligonucleotide
gauccguucacguaauaca

SEQ ID NO: 310631 - RNA, 19 nt, Artificial Sequence
  Description of Artificial Sequence: Synthetic oligonucleotide
uggguuaaagaugaagaug

SEQ ID NO: 310632 - RNA, 19 nt, Artificial Sequence
  Description of Artificial Sequence: Synthetic oligonucleotide
ugagacgggagaaagccgu

SEQ ID NO: 310633 - RNA, 19 nt, Artificial Sequence
  Description of Artificial Sequence: Synthetic oligonucleotide
uuugcccuaucauuguuca

SEQ ID NO: 310634 - RNA, 19 nt, Artificial Sequence
  Description of Artificial Sequence: Synthetic oligonucleotide
aauccgaagcagaaggaag

SEQ ID NO: 310635 - RNA, 19 nt, Artificial Sequence
  Description of Artificial Sequence: Synthetic oligonucleotide
uccaauggauccagcaugc

SEQ ID NO: 310636 - RNA, 19 nt, Artificial Sequence
  Description of Artificial Sequence: Synthetic oligonucleotide
guuuggaucaugccgaaca

SEQ ID NO: 310637 - RNA, 19 nt, Artificial Sequence
  Description of Artificial Sequence: Synthetic oligonucleotide
auagguacccugcaauuug

SEQ ID NO: 310638 - RNA, 19 nt, Artificial Sequence
  Description of Artificial Sequence: Synthetic oligonucleotide
guuagagaagaguucacca

SEQ ID NO: 310639 - RNA, 19 nt, Artificial Sequence
  Description of Artificial Sequence: Synthetic oligonucleotide
gauuuucggggauggauug

SEQ ID NO: 310640 - RNA, 19 nt, Artificial Sequence
  Description of Artificial Sequence: Synthetic oligonucleotide
auaggaagcaaagaguagu

SEQ ID NO: 310641 - RNA, 19 nt, Artificial Sequence
  Description of Artificial Sequence: Synthetic oligonucleotide
gaccucaugauagaauucc

SEQ ID NO: 310642 - RNA, 19 nt, Artificial Sequence
  Description of Artificial Sequence: Synthetic oligonucleotide
auagcgcucgauaucaugg

SEQ ID NO: 310643 - RNA, 19 nt, Artificial Sequence
  Description of Artificial Sequence: Synthetic oligonucleotide
gauguauggauuaucuuga

SEQ ID NO: 310644 - RNA, 19 nt, Artificial Sequence
  Description of Artificial Sequence: Synthetic oligonucleotide
uggccaacugacccaaacg

SEQ ID NO: 310645 - RNA, 19 nt, Artificial Sequence
  Description of Artificial Sequence: Synthetic oligonucleotide
ucuauagacauugguguca

SEQ ID NO: 310646 - RNA, 19 nt, Artificial Sequence
  Description of Artificial Sequence: Synthetic oligonucleotide
auaaucugguuagagaaga

SEQ ID NO: 310647 - RNA, 19 nt, Artificial Sequence
  Description of Artificial Sequence: Synthetic oligonucleotide
gacccaaacgcuucugucc

SEQ ID NO: 310648 - RNA, 19 nt, Artificial Sequence
  Description of Artificial Sequence: Synthetic oligonucleotide
gauggauugucuccuuuug

SEQ ID NO: 310649 - RNA, 19 nt, Artificial Sequence
  Description of Artificial Sequence: Synthetic oligonucleotide
ucaauggcaaugagcacac

SEQ ID NO: 310650 - RNA, 19 nt, Artificial Sequence
  Description of Artificial Sequence: Synthetic oligonucleotide
gaggugauaaucucaucac

SEQ ID NO: 310651 - RNA, 19 nt, Artificial Sequence
  Description of Artificial Sequence: Synthetic oligonucleotide
uaacuaggcguagaggucc

SEQ ID NO: 310652 - RNA, 19 nt, Artificial Sequence
  Description of Artificial Sequence: Synthetic oligonucleotide
gaggaaucggucugagagg

SEQ ID NO: 310653 - RNA, 19 nt, Artificial Sequence
  Description of Artificial Sequence: Synthetic oligonucleotide
cacaauacagcggaucucc

SEQ ID NO: 310654 - RNA, 19 nt, Artificial Sequence
  Description of Artificial Sequence: Synthetic oligonucleotide
ucguagagguugaagagaa

SEQ ID NO: 310655 - RNA, 19 nt, Artificial Sequence
  Description of Artificial Sequence: Synthetic oligonucleotide
aaaugugauugguccgaag

SEQ ID NO: 310656 - RNA, 19 nt, Artificial Sequence
  Description of Artificial Sequence: Synthetic oligonucleotide
cuguauaagaggcuugcug

SEQ ID NO: 310657 - RNA, 19 nt, Artificial Sequence
  Description of Artificial Sequence: Synthetic oligonucleotide
uguguagauuauaggccag

SEQ ID NO: 310658 - RNA, 19 nt, Artificial Sequence
  Description of Artificial Sequence: Synthetic oligonucleotide
cagaugaauacaacugcag

SEQ ID NO: 310659 - RNA, 19 nt, Artificial Sequence
  Description of Artificial Sequence: Synthetic oligonucleotide
caucguagagguugaagag

SEQ ID NO: 310660 - RNA, 19 nt, Artificial Sequence
  Description of Artificial Sequence: Synthetic oligonucleotide
ucacucuauagacauuggu

SEQ ID NO: 310661 - RNA, 19 nt, Artificial Sequence
  Description of Artificial Sequence: Synthetic oligonucleotide
auaaccagucuccuugaug

SEQ ID NO: 310662 - RNA, 19 nt, Artificial Sequence
  Description of Artificial Sequence: Synthetic oligonucleotide
ugucagugaugccacauuc

SEQ ID NO: 310663 - RNA, 19 nt, Artificial Sequence
  Description of Artificial Sequence: Synthetic oligonucleotide
auggucacucuauagacau

SEQ ID NO: 310664 - RNA, 19 nt, Artificial Sequence
  Description of Artificial Sequence: Synthetic oligonucleotide
aauaucuggauaagagaga

SEQ ID NO: 310665 - RNA, 19 nt, Artificial Sequence
  Description of Artificial Sequence: Synthetic oligonucleotide
cagagaucgaaucagggca

SEQ ID NO: 310666 - RNA, 19 nt, Artificial Sequence
  Description of Artificial Sequence: Synthetic oligonucleotide
auaggauuuucggggaugg

SEQ ID NO: 310667 - RNA, 19 nt, Artificial Sequence
  Description of Artificial Sequence: Synthetic oligonucleotide
ugaauacaacugcaguccu

SEQ ID NO: 310668 - RNA, 19 nt, Artificial Sequence
  Description of Artificial Sequence: Synthetic oligonucleotide
caauggauccagcaugccc

SEQ ID NO: 310669 - RNA, 19 nt, Artificial Sequence
  Description of Artificial Sequence: Synthetic oligonucleotide
ugcccuaucauuguucaca

SEQ ID NO: 310670 - RNA, 19 nt, Artificial Sequence
  Description of Artificial Sequence: Synthetic oligonucleotide
gauugguccgaagaugcag

SEQ ID NO: 310671 - RNA, 19 nt, Artificial Sequence
  Description of Artificial Sequence: Synthetic oligonucleotide
uccaauacuucuguguagu

SEQ ID NO: 310672 - RNA, 19 nt, Artificial Sequence
  Description of Artificial Sequence: Synthetic oligonucleotide
ucaccauaguucugagagg

SEQ ID NO: 310673 - RNA, 19 nt, Artificial Sequence
  Description of Artificial Sequence: Synthetic oligonucleotide
aauucaucuuauaggauuu

SEQ ID NO: 310674 - RNA, 19 nt, Artificial Sequence
  Description of Artificial Sequence: Synthetic oligonucleotide
guauaagaggcuugcugcc

SEQ ID NO: 310675 - RNA, 19 nt, Artificial Sequence
  Description of Artificial Sequence: Synthetic oligonucleotide
ugcggauccguucacguaa

SEQ ID NO: 310676 - RNA, 19 nt, Artificial Sequence
  Description of Artificial Sequence: Synthetic oligonucleotide
uaggaugagauagucuuga

SEQ ID NO: 310677 - RNA, 19 nt, Artificial Sequence
  Description of Artificial Sequence: Synthetic oligonucleotide
cuuguaggcugucagugug

SEQ ID NO: 310678 - RNA, 19 nt, Artificial Sequence
  Description of Artificial Sequence: Synthetic oligonucleotide
auaaaugugauugguccga

SEQ ID NO: 310679 - RNA, 19 nt, Artificial Sequence
  Description of Artificial Sequence: Synthetic oligonucleotide
uccuuugcggauccguuca

SEQ ID NO: 310680 - RNA, 19 nt, Artificial Sequence
  Description of Artificial Sequence: Synthetic oligonucleotide
ccuauggaccucaugauag

SEQ ID NO: 310681 - RNA, 19 nt, Artificial Sequence
  Description of Artificial Sequence: Synthetic oligonucleotide
ugggucucauaguugcuag

SEQ ID NO: 310682 - RNA, 19 nt, Artificial Sequence
  Description of Artificial Sequence: Synthetic oligonucleotide
auaucuggauaagagagau

SEQ ID NO: 310683 - RNA, 19 nt, Artificial Sequence
  Description of Artificial Sequence: Synthetic oligonucleotide
gugauugguccgaagaugc

SEQ ID NO: 310684 - RNA, 19 nt, Artificial Sequence
  Description of Artificial Sequence: Synthetic oligonucleotide
uaaguuccccucaaagguc

SEQ ID NO: 310685 - RNA, 19 nt, Artificial Sequence
  Description of Artificial Sequence: Synthetic oligonucleotide
caccuuugcccuaucauug

SEQ ID NO: 310686 - RNA, 19 nt, Artificial Sequence
  Description of Artificial Sequence: Synthetic oligonucleotide
uggggugauagcuggggag

SEQ ID NO: 310687 - RNA, 19 nt, Artificial Sequence
  Description of Artificial Sequence: Synthetic oligonucleotide
aaaccaguuuccauaggca

SEQ ID NO: 310688 - RNA, 19 nt, Artificial Sequence
  Description of Artificial Sequence: Synthetic oligonucleotide
cuguguagauuauaggcca

SEQ ID NO: 310689 - RNA, 19 nt, Artificial Sequence
  Description of Artificial Sequence: Synthetic oligonucleotide
uuugcggauccguucacgu

SEQ ID NO: 310690 - RNA, 19 nt, Artificial Sequence
  Description of Artificial Sequence: Synthetic oligonucleotide
ucuacaggcagagaucgaa

SEQ ID NO: 310691 - RNA, 19 nt, Artificial Sequence
  Description of Artificial Sequence: Synthetic oligonucleotide
acucauuggguugagugug

SEQ ID NO: 310692 - RNA, 19 nt, Artificial Sequence
  Description of Artificial Sequence: Synthetic oligonucleotide
acaguucggguuugugugg

SEQ ID NO: 310693 - RNA, 19 nt, Artificial Sequence
  Description of Artificial Sequence: Synthetic oligonucleotide
auaucaugggaaucauagu

SEQ ID NO: 310694 - RNA, 19 nt, Artificial Sequence
  Description of Artificial Sequence: Synthetic oligonucleotide
uccccaucguaacuggaug

SEQ ID NO: 310695 - RNA, 19 nt, Artificial Sequence
  Description of Artificial Sequence: Synthetic oligonucleotide
uguagauuauaggccaggu

SEQ ID NO: 310696 - RNA, 19 nt, Artificial Sequence
  Description of Artificial Sequence: Synthetic oligonucleotide
auguaaguauaaccagucu

SEQ ID NO: 310697 - RNA, 19 nt, Artificial Sequence
  Description of Artificial Sequence: Synthetic oligonucleotide
uacucauguugucuguggu

SEQ ID NO: 310698 - RNA, 19 nt, Artificial Sequence
  Description of Artificial Sequence: Synthetic oligonucleotide
gucuaucaacaacacaaac

SEQ ID NO: 310699 - RNA, 19 nt, Artificial Sequence
  Description of Artificial Sequence: Synthetic oligonucleotide
auaacuaggcguagagguc

SEQ ID NO: 310700 - RNA, 19 nt, Artificial Sequence
  Description of Artificial Sequence: Synthetic oligonucleotide
ucuguuuaggcuguuccuc

SEQ ID NO: 310701 - RNA, 19 nt, Artificial Sequence
  Description of Artificial Sequence: Synthetic oligonucleotide
ggaaccauaaagaagccga

SEQ ID NO: 310702 - RNA, 19 nt, Artificial Sequence
  Description of Artificial Sequence: Synthetic oligonucleotide
cuuauaggauuuucgggga

SEQ ID NO: 310703 - RNA, 19 nt, Artificial Sequence
  Description of Artificial Sequence: Synthetic oligonucleotide
aggaaccauaaagaagccg

SEQ ID NO: 310704 - RNA, 19 nt, Artificial Sequence
  Description of Artificial Sequence: Synthetic oligonucleotide
ucggggauggauugucucc

SEQ ID NO: 310705 - RNA, 19 nt, Artificial Sequence
  Description of Artificial Sequence: Synthetic oligonucleotide
guaacuggaugucaaucca

SEQ ID NO: 310706 - RNA, 19 nt, Artificial Sequence
  Description of Artificial Sequence: Synthetic oligonucleotide
uagcgcucgauaucauggg

SEQ ID NO: 310707 - RNA, 19 nt, Artificial Sequence
  Description of Artificial Sequence: Synthetic oligonucleotide
gauuacagucuaucaacaa

SEQ ID NO: 310708 - RNA, 19 nt, Artificial Sequence
  Description of Artificial Sequence: Synthetic oligonucleotide
aggaugagacgggagaaag

SEQ ID NO: 310709 - RNA, 19 nt, Artificial Sequence
  Description of Artificial Sequence: Synthetic oligonucleotide
gaaccauaaagaagccgag

SEQ ID NO: 310710 - RNA, 19 nt, Artificial Sequence
  Description of Artificial Sequence: Synthetic oligonucleotide
ggauaagagagaucuucag

SEQ ID NO: 310711 - RNA, 19 nt, Artificial Sequence
  Description of Artificial Sequence: Synthetic oligonucleotide
uaacuggaugucaauccaa

SEQ ID NO: 310712 - RNA, 19 nt, Artificial Sequence
  Description of Artificial Sequence: Synthetic oligonucleotide
agucuuugaugagaagguc

SEQ ID NO: 310713 - RNA, 19 nt, Artificial Sequence
  Description of Artificial Sequence: Synthetic oligonucleotide
uuggccaacugacccaaac

SEQ ID NO: 310714 - RNA, 19 nt, Artificial Sequence
  Description of Artificial Sequence: Synthetic oligonucleotide
gcucauauuucauguuugg

SEQ ID NO: 310715 - RNA, 19 nt, Artificial Sequence
  Description of Artificial Sequence: Synthetic oligonucleotide
agaaucaggaugagacggg

SEQ ID NO: 310716 - RNA, 19 nt, Artificial Sequence
  Description of Artificial Sequence: Synthetic oligonucleotide
aggguuaucuggaggacuc

SEQ ID NO: 310717 - RNA, 19 nt, Artificial Sequence
  Description of Artificial Sequence: Synthetic oligonucleotide
gacccucucauagugugag

SEQ ID NO: 310718 - RNA, 19 nt, Artificial Sequence
  Description of Artificial Sequence: Synthetic oligonucleotide
auaguaguuuugucuggcu

SEQ ID NO: 310719 - RNA, 19 nt, Artificial Sequence
  Description of Artificial Sequence: Synthetic oligonucleotide
auauagguacccugcaauu

SEQ ID NO: 310720 - RNA, 19 nt, Artificial Sequence
  Description of Artificial Sequence: Synthetic oligonucleotide
gaguaguaugucagcacag

SEQ ID NO: 310721 - RNA, 19 nt, Artificial Sequence
  Description of Artificial Sequence: Synthetic oligonucleotide
agaucgaaucagggcagcc

SEQ ID NO: 310722 - RNA, 19 nt, Artificial Sequence
  Description of Artificial Sequence: Synthetic oligonucleotide
gauccaaccuaaggguucc

SEQ ID NO: 310723 - RNA, 19 nt, Artificial Sequence
  Description of Artificial Sequence: Synthetic oligonucleotide
cucgauaucaugggaauca

SEQ ID NO: 310724 - RNA, 19 nt, Artificial Sequence
  Description of Artificial Sequence: Synthetic oligonucleotide
uggucaaagaccugacaua

SEQ ID NO: 310725 - RNA, 19 nt, Artificial Sequence
  Description of Artificial Sequence: Synthetic oligonucleotide
guacguggguuaaagauga

SEQ ID NO: 310726 - RNA, 19 nt, Artificial Sequence
  Description of Artificial Sequence: Synthetic oligonucleotide
guagauuauaggccagguc

SEQ ID NO: 310727 - RNA, 19 nt, Artificial Sequence
  Description of Artificial Sequence: Synthetic oligonucleotide
cauagcgcucgauaucaug

SEQ ID NO: 310728 - RNA, 19 nt, Artificial Sequence
  Description of Artificial Sequence: Synthetic oligonucleotide
uugauccacuccucgucag

SEQ ID NO: 310729 - RNA, 19 nt, Artificial Sequence
  Description of Artificial Sequence: Synthetic oligonucleotide
ucggaauaucuggauaaga

SEQ ID NO: 310730 - RNA, 19 nt, Artificial Sequence
  Description of Artificial Sequence: Synthetic oligonucleotide
cuguaauaguaguuuuguc

SEQ ID NO: 310731 - RNA, 19 nt, Artificial Sequence
  Description of Artificial Sequence: Synthetic oligonucleotide
cugcaauuugggcacggag

SEQ ID NO: 310732 - RNA, 19 nt, Artificial Sequence
  Description of Artificial Sequence: Synthetic oligonucleotide
cucauuggguugagugugg

SEQ ID NO: 310733 - RNA, 19 nt, Artificial Sequence
  Description of Artificial Sequence: Synthetic oligonucleotide
ugguugucuaaguuccccu

SEQ ID NO: 310734 - RNA, 19 nt, Artificial Sequence
  Description of Artificial Sequence: Synthetic oligonucleotide
uugucuaaguuccccucaa

SEQ ID NO: 310735 - RNA, 19 nt, Artificial Sequence
  Description of Artificial Sequence: Synthetic oligonucleotide
aaguuccccucaaaggucu

SEQ ID NO: 310736 - RNA, 19 nt, Artificial Sequence
  Description of Artificial Sequence: Synthetic oligonucleotide
cucgccaucccaagauggg

SEQ ID NO: 310737 - RNA, 19 nt, Artificial Sequence
  Description of Artificial Sequence: Synthetic oligonucleotide
uucucgccaucccaagaug

SEQ ID NO: 310738 - RNA, 19 nt, Artificial Sequence
  Description of Artificial Sequence: Synthetic oligonucleotide
cugucggccccacucauag

SEQ ID NO: 310739 - RNA, 19 nt, Artificial Sequence
  Description of Artificial Sequence: Synthetic oligonucleotide
gauagaauuccuugggguu

SEQ ID NO: 310740 - RNA, 19 nt, Artificial Sequence
  Description of Artificial Sequence: Synthetic oligonucleotide
guguagauuauaggccagg

SEQ ID NO: 310741 - RNA, 19 nt, Artificial Sequence
  Description of Artificial Sequence: Synthetic oligonucleotide
gcagagaucgaaucagggc

SEQ ID NO: 310742 - RNA, 19 nt, Artificial Sequence
  Description of Artificial Sequence: Synthetic oligonucleotide
cacgaugcucucauggauc

SEQ ID NO: 310743 - RNA, 19 nt, Artificial Sequence
  Description of Artificial Sequence: Synthetic oligonucleotide
gucagcgugggccagaugu

SEQ ID NO: 310744 - RNA, 19 nt, Artificial Sequence
  Description of Artificial Sequence: Synthetic oligonucleotide
aguacauucuugggaagga

SEQ ID NO: 310745 - RNA, 19 nt, Artificial Sequence
  Description of Artificial Sequence: Synthetic oligonucleotide
gauagucuugagccaguca

SEQ ID NO: 310746 - RNA, 19 nt, Artificial Sequence
  Description of Artificial Sequence: Synthetic oligonucleotide
acgggagaaagccguguag

SEQ ID NO: 310747 - RNA, 19 nt, Artificial Sequence
  Description of Artificial Sequence: Synthetic oligonucleotide
ugcaguccuuugcggaucc

SEQ ID NO: 310748 - RNA, 19 nt, Artificial Sequence
  Description of Artificial Sequence: Synthetic oligonucleotide
ugggagaaggguagauacu

SEQ ID NO: 310749 - RNA, 19 nt, Artificial Sequence
  Description of Artificial Sequence: Synthetic oligonucleotide
uauagguacccugcaauuu

SEQ ID NO: 310750 - RNA, 19 nt, Artificial Sequence
  Description of Artificial Sequence: Synthetic oligonucleotide
aucguagagguugaagaga

SEQ ID NO: 310751 - RNA, 19 nt, Artificial Sequence
  Description of Artificial Sequence: Synthetic oligonucleotide
aacacccauaaaguuguaa

SEQ ID NO: 310752 - RNA, 19 nt, Artificial Sequence
  Description of Artificial Sequence: Synthetic oligonucleotide
cauagccugcuguauaaga

SEQ ID NO: 310753 - RNA, 19 nt, Artificial Sequence
  Description of Artificial Sequence: Synthetic oligonucleotide
ugacccaaacgcuucuguc

SEQ ID NO: 310754 - RNA, 19 nt, Artificial Sequence
  Description of Artificial Sequence: Synthetic oligonucleotide
uggauccaaccuaaggguu

SEQ ID NO: 310755 - RNA, 19 nt, Artificial Sequence
  Description of Artificial Sequence: Synthetic oligonucleotide
aggaugagauagucuugag

SEQ ID NO: 310756 - RNA, 19 nt, Artificial Sequence
  Description of Artificial Sequence: Synthetic oligonucleotide
agagaucgaaucagggcag

SEQ ID NO: 310757 - RNA, 19 nt, Artificial Sequence
  Description of Artificial Sequence: Synthetic oligonucleotide
aaauggcccugacucucca

SEQ ID NO: 310758 - RNA, 19 nt, Artificial Sequence
  Description of Artificial Sequence: Synthetic oligonucleotide
gggccuauggaccucauga

SEQ ID NO: 310759 - RNA, 19 nt, Artificial Sequence
  Description of Artificial Sequence: Synthetic oligonucleotide
aucagauaugcagaugaau

SEQ ID NO: 310760 - RNA, 19 nt, Artificial Sequence
  Description of Artificial Sequence: Synthetic oligonucleotide
uggaggacucaccccauau

SEQ ID NO: 310761 - RNA, 19 nt, Artificial Sequence
  Description of Artificial Sequence: Synthetic oligonucleotide
uauggaccucaugauagaa

SEQ ID NO: 310762 - RNA, 19 nt, Artificial Sequence
  Description of Artificial Sequence: Synthetic oligonucleotide
uuuucggggauggauuguc

SEQ ID NO: 310763 - RNA, 19 nt, Artificial Sequence
  Description of Artificial Sequence: Synthetic oligonucleotide
aaucggucugagaggagca

SEQ ID NO: 310764 - RNA, 19 nt, Artificial Sequence
  Description of Artificial Sequence: Synthetic oligonucleotide
ccguucacguaauacauac

SEQ ID NO: 310765 - RNA, 19 nt, Artificial Sequence
  Description of Artificial Sequence: Synthetic oligonucleotide
acaaaccagauaaucuggu

SEQ ID NO: 310766 - RNA, 19 nt, Artificial Sequence
  Description of Artificial Sequence: Synthetic oligonucleotide
uuucggggauggauugucu

SEQ ID NO: 310767 - RNA, 19 nt, Artificial Sequence
  Description of Artificial Sequence: Synthetic oligonucleotide
uaucuggauaagagagauc

SEQ ID NO: 310768 - RNA, 19 nt, Artificial Sequence
  Description of Artificial Sequence: Synthetic oligonucleotide
aggauuuucggggauggau

SEQ ID NO: 310769 - RNA, 19 nt, Artificial Sequence
  Description of Artificial Sequence: Synthetic oligonucleotide
ccgaacacccauaaaguug

SEQ ID NO: 310770 - RNA, 19 nt, Artificial Sequence
  Description of Artificial Sequence: Synthetic oligonucleotide
auagaauuccuugggguuu

SEQ ID NO: 310771 - RNA, 19 nt, Artificial Sequence
  Description of Artificial Sequence: Synthetic oligonucleotide
caccauaguucugagagga

SEQ ID NO: 310772 - RNA, 19 nt, Artificial Sequence
  Description of Artificial Sequence: Synthetic oligonucleotide
agucuggugagugccccac

SEQ ID NO: 310773 - RNA, 19 nt, Artificial Sequence
  Description of Artificial Sequence: Synthetic oligonucleotide
uucggggauggauugucuc

SEQ ID NO: 310774 - RNA, 19 nt, Artificial Sequence
  Description of Artificial Sequence: Synthetic oligonucleotide
gaagccgaggaaucggucu

SEQ ID NO: 310775 - RNA, 19 nt, Artificial Sequence
  Description of Artificial Sequence: Synthetic oligonucleotide
uagucuccccaucguaacu

SEQ ID NO: 310776 - RNA, 19 nt, Artificial Sequence
  Description of Artificial Sequence: Synthetic oligonucleotide
gccauagucggcuaagauc

SEQ ID NO: 310777 - RNA, 19 nt, Artificial Sequence
  Description of Artificial Sequence: Synthetic oligonucleotide
gguacccugcaauuugggc

SEQ ID NO: 310778 - RNA, 19 nt, Artificial Sequence
  Description of Artificial Sequence: Synthetic oligonucleotide
ugucuaaguuccccucaaa

SEQ ID NO: 310779 - RNA, 19 nt, Artificial Sequence
  Description of Artificial Sequence: Synthetic oligonucleotide
gaucgaaucagggcagcca

SEQ ID NO: 310780 - RNA, 19 nt, Artificial Sequence
  Description of Artificial Sequence: Synthetic oligonucleotide
ccaauuccuggucaaagac

SEQ ID NO: 310781 - RNA, 19 nt, Artificial Sequence
  Description of Artificial Sequence: Synthetic oligonucleotide
gaggcuugcugccuggaaa

SEQ ID NO: 310782 - RNA, 19 nt, Artificial Sequence
  Description of Artificial Sequence: Synthetic oligonucleotide
guggauccaaccuaagggu

SEQ ID NO: 310783 - RNA, 19 nt, Artificial Sequence
  Description of Artificial Sequence: Synthetic oligonucleotide
gaaucaggaugagacggga

SEQ ID NO: 310784 - RNA, 19 nt, Artificial Sequence
  Description of Artificial Sequence: Synthetic oligonucleotide
gugauagcuggggagacuc

SEQ ID NO: 310785 - RNA, 19 nt, Artificial Sequence
  Description of Artificial Sequence: Synthetic oligonucleotide
ucuuguggauggucacucu

SEQ ID NO: 310786 - RNA, 19 nt, Artificial Sequence
  Description of Artificial Sequence: Synthetic oligonucleotide
guaggaugagauagucuug

SEQ ID NO: 310787 - RNA, 19 nt, Artificial Sequence
  Description of Artificial Sequence: Synthetic oligonucleotide
ggcagagaucgaaucaggg

SEQ ID NO: 310788 - RNA, 19 nt, Artificial Sequence
  Description of Artificial Sequence: Synthetic oligonucleotide
ugauagcuggggagacuca

SEQ ID NO: 310789 - RNA, 19 nt, Artificial Sequence
  Description of Artificial Sequence: Synthetic oligonucleotide
uccguucacguaauacaua

SEQ ID NO: 310790 - RNA, 19 nt, Artificial Sequence
  Description of Artificial Sequence: Synthetic oligonucleotide
augagacgggagaaagccg

SEQ ID NO: 310791 - RNA, 19 nt, Artificial Sequence
  Description of Artificial Sequence: Synthetic oligonucleotide
guagauacucauguugucu

SEQ ID NO: 310792 - RNA, 19 nt, Artificial Sequence
  Description of Artificial Sequence: Synthetic oligonucleotide
gucacucuauagacauugg

SEQ ID NO: 310793 - RNA, 19 nt, Artificial Sequence
  Description of Artificial Sequence: Synthetic oligonucleotide
aucguaacuggaugucaau

SEQ ID NO: 310794 - RNA, 19 nt, Artificial Sequence
  Description of Artificial Sequence: Synthetic oligonucleotide
cauauagguacccugcaau

SEQ ID NO: 310795 - RNA, 19 nt, Artificial Sequence
  Description of Artificial Sequence: Synthetic oligonucleotide
cucggaauaucuggauaag

SEQ ID NO: 310796 - RNA, 19 nt, Artificial Sequence
  Description of Artificial Sequence: Synthetic oligonucleotide
agcgcucgauaucauggga

SEQ ID NO: 310797 - RNA, 19 nt, Artificial Sequence
  Description of Artificial Sequence: Synthetic oligonucleotide
ucuggauaagagagaucuu

SEQ ID NO: 310798 - RNA, 19 nt, Artificial Sequence
  Description of Artificial Sequence: Synthetic oligonucleotide
ucgaaucagggcagccacu

SEQ ID NO: 310799 - RNA, 19 nt, Artificial Sequence
  Description of Artificial Sequence: Synthetic oligonucleotide
auccguucacguaauacau

SEQ ID NO: 310800 - RNA, 19 nt, Artificial Sequence
  Description of Artificial Sequence: Synthetic oligonucleotide
ucacaauacagcggaucuc

SEQ ID NO: 310801 - RNA, 19 nt, Artificial Sequence
  Description of Artificial Sequence: Synthetic oligonucleotide
cuggucaaagaccugacau

SEQ ID NO: 310802 - RNA, 19 nt, Artificial Sequence
  Description of Artificial Sequence: Synthetic oligonucleotide
uuugggcacggagaucaga

SEQ ID NO: 310803 - RNA, 19 nt, Artificial Sequence
  Description of Artificial Sequence: Synthetic oligonucleotide
ggaagcaaggaaauaacua

SEQ ID NO: 310804 - RNA, 19 nt, Artificial Sequence
  Description of Artificial Sequence: Synthetic oligonucleotide
ggucaaagaccugacauaa

SEQ ID NO: 310805 - RNA, 19 nt, Artificial Sequence
  Description of Artificial Sequence: Synthetic oligonucleotide
ugaggguuaucuggaggac

SEQ ID NO: 310806 - RNA, 19 nt, Artificial Sequence
  Description of Artificial Sequence: Synthetic oligonucleotide
ucauuggguugagugugga

SEQ ID NO: 310807 - RNA, 19 nt, Artificial Sequence
  Description of Artificial Sequence: Synthetic oligonucleotide
gcucggaauaucuggauaa

SEQ ID NO: 310808 - RNA, 19 nt, Artificial Sequence
  Description of Artificial Sequence: Synthetic oligonucleotide
gguagauacucauguuguc

SEQ ID NO: 310809 - RNA, 19 nt, Artificial Sequence
  Description of Artificial Sequence: Synthetic oligonucleotide
gggagaaggguagauacuc

SEQ ID NO: 310810 - RNA, 19 nt, Artificial Sequence
  Description of Artificial Sequence: Synthetic oligonucleotide
ccccauauagguacccugc

SEQ ID NO: 310811 - RNA, 19 nt, Artificial Sequence
  Description of Artificial Sequence: Synthetic oligonucleotide
cguacguggguuaaagaug

SEQ ID NO: 310812 - RNA, 19 nt, Artificial Sequence
  Description of Artificial Sequence: Synthetic oligonucleotide
gucaaagaccugacauaag

SEQ ID NO: 310813 - RNA, 19 nt, Artificial Sequence
  Description of Artificial Sequence: Synthetic oligonucleotide
cuguguaguugugcugucc

SEQ ID NO: 310814 - RNA, 19 nt, Artificial Sequence
  Description of Artificial Sequence: Synthetic oligonucleotide
cuauggaccucaugauaga

SEQ ID NO: 310815 - RNA, 19 nt, Artificial Sequence
  Description of Artificial Sequence: Synthetic oligonucleotide
guccgaagaugcagguugg

SEQ ID NO: 310816 - RNA, 19 nt, Artificial Sequence
  Description of Artificial Sequence: Synthetic oligonucleotide
aggcguagagguccucucu

SEQ ID NO: 310817 - RNA, 19 nt, Artificial Sequence
  Description of Artificial Sequence: Synthetic oligonucleotide
ggcaggauuugccuucaug

SEQ ID NO: 310818 - RNA, 19 nt, Artificial Sequence
  Description of Artificial Sequence: Synthetic oligonucleotide
gucuuguggauggucacuc

SEQ ID NO: 310819 - RNA, 19 nt, Artificial Sequence
  Description of Artificial Sequence: Synthetic oligonucleotide
ucaccccauauagguaccc

SEQ ID NO: 310820 - RNA, 19 nt, Artificial Sequence
  Description of Artificial Sequence: Synthetic oligonucleotide
cauguugucugugguauaa

SEQ ID NO: 310821 - RNA, 19 nt, Artificial Sequence
  Description of Artificial Sequence: Synthetic oligonucleotide
ggauccguucacguaauac

SEQ ID NO: 310822 - RNA, 19 nt, Artificial Sequence
  Description of Artificial Sequence: Synthetic oligonucleotide
ggacucaccccauauaggu

SEQ ID NO: 310823 - RNA, 19 nt, Artificial Sequence
  Description of Artificial Sequence: Synthetic oligonucleotide
ggcucagaugaauacaacu

SEQ ID NO: 310824 - RNA, 19 nt, Artificial Sequence
  Description of Artificial Sequence: Synthetic oligonucleotide
gaucagauaugcagaugaa

SEQ ID NO: 310825 - RNA, 19 nt, Artificial Sequence
  Description of Artificial Sequence: Synthetic oligonucleotide
cacuuauaggaagcaaaga

SEQ ID NO: 310826 - RNA, 19 nt, Artificial Sequence
  Description of Artificial Sequence: Synthetic oligonucleotide
gguugucuaaguuccccuc

SEQ ID NO: 310827 - RNA, 19 nt, Artificial Sequence
  Description of Artificial Sequence: Synthetic oligonucleotide
aaaaggggccaggcugcug

SEQ ID NO: 310828 - RNA, 19 nt, Artificial Sequence
  Description of Artificial Sequence: Synthetic oligonucleotide
gcacggagaucagauaugc

SEQ ID NO: 310829 - RNA, 19 nt, Artificial Sequence
  Description of Artificial Sequence: Synthetic oligonucleotide
uugauggguuugguugucu

SEQ ID NO: 310830 - RNA, 19 nt, Artificial Sequence
  Description of Artificial Sequence: Synthetic oligonucleotide
guucugucggccccacuca

SEQ ID NO: 310831 - RNA, 19 nt, Artificial Sequence
  Description of Artificial Sequence: Synthetic oligonucleotide
uguuuggaucaugccgaac

SEQ ID NO: 310832 - RNA, 19 nt, Artificial Sequence
  Description of Artificial Sequence: Synthetic oligonucleotide
ccauaaaguuguaauucca

SEQ ID NO: 310833 - RNA, 19 nt, Artificial Sequence
  Description of Artificial Sequence: Synthetic oligonucleotide
ggaaauaacuaggcguaga

SEQ ID NO: 310834 - RNA, 19 nt, Artificial Sequence
  Description of Artificial Sequence: Synthetic oligonucleotide
gaaucagggcagccacuuc

SEQ ID NO: 310835 - RNA, 19 nt, Artificial Sequence
  Description of Artificial Sequence: Synthetic oligonucleotide
ucgccaucccaagaugggu

SEQ ID NO: 310836 - RNA, 19 nt, Artificial Sequence
  Description of Artificial Sequence: Synthetic oligonucleotide
guaugucagcacaggaaga

SEQ ID NO: 310837 - RNA, 19 nt, Artificial Sequence
  Description of Artificial Sequence: Synthetic oligonucleotide
caguucggguuuguguggc

SEQ ID NO: 310838 - RNA, 19 nt, Artificial Sequence
  Description of Artificial Sequence: Synthetic oligonucleotide
cucgaauuucugauugugu

SEQ ID NO: 310839 - RNA, 19 nt, Artificial Sequence
  Description of Artificial Sequence: Synthetic oligonucleotide
gucagugaugccacauuca

SEQ ID NO: 310840 - RNA, 19 nt, Artificial Sequence
  Description of Artificial Sequence: Synthetic oligonucleotide
cagauaugcagaugaauuu

SEQ ID NO: 310841 - RNA, 19 nt, Artificial Sequence
  Description of Artificial Sequence: Synthetic oligonucleotide
auguuuggaucaugccgaa

SEQ ID NO: 310842 - RNA, 19 nt, Artificial Sequence
  Description of Artificial Sequence: Synthetic oligonucleotide
auuuucggggauggauugu

SEQ ID NO: 310843 - RNA, 19 nt, Artificial Sequence
  Description of Artificial Sequence: Synthetic oligonucleotide
cagugaugccacauucaca

SEQ ID NO: 310844 - RNA, 19 nt, Artificial Sequence
  Description of Artificial Sequence: Synthetic oligonucleotide
gggaaucauagucucccca

SEQ ID NO: 310845 - RNA, 19 nt, Artificial Sequence
  Description of Artificial Sequence: Synthetic oligonucleotide
cagcgugggccagaugugg

SEQ ID NO: 310846 - RNA, 19 nt, Artificial Sequence
  Description of Artificial Sequence: Synthetic oligonucleotide
aguguggauccaaccuaag

SEQ ID NO: 310847 - RNA, 19 nt, Artificial Sequence
  Description of Artificial Sequence: Synthetic oligonucleotide
ccucucauagugugagggc

SEQ ID NO: 310848 - RNA, 19 nt, Artificial Sequence
  Description of Artificial Sequence: Synthetic oligonucleotide
gugguauaauccaggaacu

SEQ ID NO: 310849 - RNA, 19 nt, Artificial Sequence
  Description of Artificial Sequence: Synthetic oligonucleotide
uccaaccuaaggguuccau

SEQ ID NO: 310850 - RNA, 19 nt, Artificial Sequence
  Description of Artificial Sequence: Synthetic oligonucleotide
aacuaggcguagagguccu

SEQ ID NO: 310851 - RNA, 19 nt, Artificial Sequence
  Description of Artificial Sequence: Synthetic oligonucleotide
gacgggagaaagccgugua

SEQ ID NO: 310852 - RNA, 19 nt, Artificial Sequence
  Description of Artificial Sequence: Synthetic oligonucleotide
agggccuauggaccucaug

SEQ ID NO: 310853 - RNA, 19 nt, Artificial Sequence
  Description of Artificial Sequence: Synthetic oligonucleotide
uugcccuaucauuguucac

SEQ ID NO: 310854 - RNA, 19 nt, Artificial Sequence
  Description of Artificial Sequence: Synthetic oligonucleotide
gugggcucagaugaauaca

SEQ ID NO: 310855 - RNA, 19 nt, Artificial Sequence
  Description of Artificial Sequence: Synthetic oligonucleotide
uugcggauccguucacgua

SEQ ID NO: 310856 - RNA, 19 nt, Artificial Sequence
  Description of Artificial Sequence: Synthetic oligonucleotide
gaccugacauaaguccauc

SEQ ID NO: 310857 - RNA, 19 nt, Artificial Sequence
  Description of Artificial Sequence: Synthetic oligonucleotide
aguucggguuuguguggca

SEQ ID NO: 310858 - RNA, 19 nt, Artificial Sequence
  Description of Artificial Sequence: Synthetic oligonucleotide
ggaugagacgggagaaagc

SEQ ID NO: 310859 - RNA, 19 nt, Artificial Sequence
  Description of Artificial Sequence: Synthetic oligonucleotide
gagacgggagaaagccgug

SEQ ID NO: 310860 - RNA, 19 nt, Artificial Sequence
  Description of Artificial Sequence: Synthetic oligonucleotide
ccaaccuaaggguuccauc

SEQ ID NO: 310861 - RNA, 19 nt, Artificial Sequence
  Description of Artificial Sequence: Synthetic oligonucleotide
agacgggagaaagccgugu

SEQ ID NO: 310862 - RNA, 19 nt, Artificial Sequence
  Description of Artificial Sequence: Synthetic oligonucleotide
agaccugacauaaguccau

SEQ ID NO: 310863 - RNA, 19 nt, Artificial Sequence
  Description of Artificial Sequence: Synthetic oligonucleotide
ggaaucauagucuccccau

SEQ ID NO: 310864 - RNA, 19 nt, Artificial Sequence
  Description of Artificial Sequence: Synthetic oligonucleotide
gguucuguaauaguaguuu

SEQ ID NO: 310865 - RNA, 19 nt, Artificial Sequence
  Description of Artificial Sequence: Synthetic oligonucleotide
ggauccaaccuaaggguuc

SEQ ID NO: 310866 - RNA, 19 nt, Artificial Sequence
  Description of Artificial Sequence: Synthetic oligonucleotide
ucagucagcgugggccaga

SEQ ID NO: 310867 - RNA, 19 nt, Artificial Sequence
  Description of Artificial Sequence: Synthetic oligonucleotide
uacguggguuaaagaugaa

SEQ ID NO: 310868 - RNA, 19 nt, Artificial Sequence
  Description of Artificial Sequence: Synthetic oligonucleotide
ugucggccccacucauagc

SEQ ID NO: 310869 - RNA, 19 nt, Artificial Sequence
  Description of Artificial Sequence: Synthetic oligonucleotide
gcaauuugggcacggagau

SEQ ID NO: 310870 - RNA, 19 nt, Artificial Sequence
  Description of Artificial Sequence: Synthetic oligonucleotide
ugggcacggagaucagaua

SEQ ID NO: 310871 - RNA, 19 nt, Artificial Sequence
  Description of Artificial Sequence: Synthetic oligonucleotide
uggguugaguguggaucca

SEQ ID NO: 310872 - RNA, 19 nt, Artificial Sequence
  Description of Artificial Sequence: Synthetic oligonucleotide
cauagugugagggcaggua

SEQ ID NO: 310873 - RNA, 19 nt, Artificial Sequence
  Description of Artificial Sequence: Synthetic oligonucleotide
cugacucuccauucagucu

SEQ ID NO: 310874 - RNA, 19 nt, Artificial Sequence
  Description of Artificial Sequence: Synthetic oligonucleotide
gaggguuaucuggaggacu

SEQ ID NO: 310875 - RNA, 19 nt, Artificial Sequence
  Description of Artificial Sequence: Synthetic oligonucleotide
ggcaugaguggugacaucu

SEQ ID NO: 310876 - RNA, 19 nt, Artificial Sequence
  Description of Artificial Sequence: Synthetic oligonucleotide
ggguagauacucauguugu

SEQ ID NO: 310877 - RNA, 19 nt, Artificial Sequence
  Description of Artificial Sequence: Synthetic oligonucleotide
gcuccguugauggguuugg

SEQ ID NO: 310878 - RNA, 19 nt, Artificial Sequence
  Description of Artificial Sequence: Synthetic oligonucleotide
gguugaguguggauccaac

SEQ ID NO: 310879 - RNA, 19 nt, Artificial Sequence
  Description of Artificial Sequence: Synthetic oligonucleotide
ccuaggaugaugucucgaa

SEQ ID NO: 310880 - RNA, 19 nt, Artificial Sequence
  Description of Artificial Sequence: Synthetic oligonucleotide
caggugagcucggaauauc

SEQ ID NO: 310881 - RNA, 19 nt, Artificial Sequence
  Description of Artificial Sequence: Synthetic oligonucleotide
acuaggcguagagguccuc

SEQ ID NO: 310882 - RNA, 19 nt, Artificial Sequence
  Description of Artificial Sequence: Synthetic oligonucleotide
cuaggaugaugucucgaau

SEQ ID NO: 310883 - RNA, 19 nt, Artificial Sequence
  Description of Artificial Sequence: Synthetic oligonucleotide
caaaccagauaaucugguu

SEQ ID NO: 310884 - RNA, 19 nt, Artificial Sequence
  Description of Artificial Sequence: Synthetic oligonucleotide
gguuuguguggcagugagc

SEQ ID NO: 310885 - RNA, 19 nt, Artificial Sequence
  Description of Artificial Sequence: Synthetic oligonucleotide
gucucgaauuucugauugu

SEQ ID NO: 310886 - RNA, 19 nt, Artificial Sequence
  Description of Artificial Sequence: Synthetic oligonucleotide
gacucaccccauauaggua

SEQ ID NO: 310887 - RNA, 19 nt, Artificial Sequence
  Description of Artificial Sequence: Synthetic oligonucleotide
cggagaucagauaugcaga

SEQ ID NO: 310888 - RNA, 19 nt, Artificial Sequence
  Description of Artificial Sequence: Synthetic oligonucleotide
uggcaugaguggugacauc

SEQ ID NO: 310889 - RNA, 19 nt, Artificial Sequence
  Description of Artificial Sequence: Synthetic oligonucleotide
ggggugauagcuggggaga

SEQ ID NO: 310890 - RNA, 19 nt, Artificial Sequence
  Description of Artificial Sequence: Synthetic oligonucleotide
guguaggaugagauagucu

SEQ ID NO: 310891 - RNA, 19 nt, Artificial Sequence
  Description of Artificial Sequence: Synthetic oligonucleotide
ugguccgaagaugcagguu

SEQ ID NO: 310892 - RNA, 19 nt, Artificial Sequence
  Description of Artificial Sequence: Synthetic oligonucleotide
cucuacaggcagagaucga

SEQ ID NO: 310893 - RNA, 19 nt, Artificial Sequence
  Description of Artificial Sequence: Synthetic oligonucleotide
gccuauggaccucaugaua

SEQ ID NO: 310894 - RNA, 19 nt, Artificial Sequence
  Description of Artificial Sequence: Synthetic oligonucleotide
cuacaggcagagaucgaau

SEQ ID NO: 310895 - RNA, 19 nt, Artificial Sequence
  Description of Artificial Sequence: Synthetic oligonucleotide
agucagcgugggccagaug

SEQ ID NO: 310896 - RNA, 19 nt, Artificial Sequence
  Description of Artificial Sequence: Synthetic oligonucleotide
cguguaggaugagauaguc

SEQ ID NO: 310897 - RNA, 19 nt, Artificial Sequence
  Description of Artificial Sequence: Synthetic oligonucleotide
ggaggacucaccccauaua

SEQ ID NO: 310898 - RNA, 19 nt, Artificial Sequence
  Description of Artificial Sequence: Synthetic oligonucleotide
ugccccguacguggguuaa

SEQ ID NO: 310899 - RNA, 19 nt, Artificial Sequence
  Description of Artificial Sequence: Synthetic oligonucleotide
ggagacucauuggguugag

SEQ ID NO: 310900 - RNA, 19 nt, Artificial Sequence
  Description of Artificial Sequence: Synthetic oligonucleotide
ccguacguggguuaaagau

SEQ ID NO: 310901 - RNA, 19 nt, Artificial Sequence
  Description of Artificial Sequence: Synthetic oligonucleotide
ggauggauugucuccuuuu

SEQ ID NO: 310902 - RNA, 19 nt, Artificial Sequence
  Description of Artificial Sequence: Synthetic oligonucleotide
aggcacuguguagauuaua

SEQ ID NO: 310903 - RNA, 19 nt, Artificial Sequence
  Description of Artificial Sequence: Synthetic oligonucleotide
gcucgauaucaugggaauc

SEQ ID NO: 310904 - RNA, 19 nt, Artificial Sequence
  Description of Artificial Sequence: Synthetic oligonucleotide
ggauuuucggggauggauu

SEQ ID NO: 310905 - RNA, 19 nt, Artificial Sequence
  Description of Artificial Sequence: Synthetic oligonucleotide
cccauauagguacccugca

SEQ ID NO: 310906 - RNA, 19 nt, Artificial Sequence
  Description of Artificial Sequence: Synthetic oligonucleotide
ggccauagccugcuguaua

SEQ ID NO: 310907 - RNA, 19 nt, Artificial Sequence
  Description of Artificial Sequence: Synthetic oligonucleotide
gagggccgggagacauucc

SEQ ID NO: 310908 - RNA, 19 nt, Artificial Sequence
  Description of Artificial Sequence: Synthetic oligonucleotide
gugucagugaugccacauu

SEQ ID NO: 310909 - RNA, 19 nt, Artificial Sequence
  Description of Artificial Sequence: Synthetic oligonucleotide
gggcucagaugaauacaac

SEQ ID NO: 310910 - RNA, 19 nt, Artificial Sequence
  Description of Artificial Sequence: Synthetic oligonucleotide
ccaauggauccagcaugcc

SEQ ID NO: 310911 - RNA, 19 nt, Artificial Sequence
  Description of Artificial Sequence: Synthetic oligonucleotide
auccaaccuaaggguucca

SEQ ID NO: 310912 - RNA, 19 nt, Artificial Sequence
  Description of Artificial Sequence: Synthetic oligonucleotide
gagacucauuggguugagu

SEQ ID NO: 310913 - RNA, 19 nt, Artificial Sequence
  Description of Artificial Sequence: Synthetic oligonucleotide
gcgcucgauaucaugggaa

SEQ ID NO: 310914 - RNA, 19 nt, Artificial Sequence
  Description of Artificial Sequence: Synthetic oligonucleotide
cuguggcuuuaaggaugag

SEQ ID NO: 310915 - RNA, 19 nt, Artificial Sequence
  Description of Artificial Sequence: Synthetic oligonucleotide
ggagggccuauggaccuca

SEQ ID NO: 310916 - RNA, 19 nt, Artificial Sequence
  Description of Artificial Sequence: Synthetic oligonucleotide
ccuuugcggauccguucac

SEQ ID NO: 310917 - RNA, 19 nt, Artificial Sequence
  Description of Artificial Sequence: Synthetic oligonucleotide
cagcaagugcaccuccaau

SEQ ID NO: 310918 - RNA, 19 nt, Artificial Sequence
  Description of Artificial Sequence: Synthetic oligonucleotide
ccaucacgaugcucucaug

SEQ ID NO: 310919 - RNA, 19 nt, Artificial Sequence
  Description of Artificial Sequence: Synthetic oligonucleotide
cuggaggacucaccccaua

SEQ ID NO: 310920 - RNA, 19 nt, Artificial Sequence
  Description of Artificial Sequence: Synthetic oligonucleotide
ggccuauggaccucaugau

SEQ ID NO: 310921 - RNA, 19 nt, Artificial Sequence
  Description of Artificial Sequence: Synthetic oligonucleotide
ggguuaucuggaggacuca

SEQ ID NO: 310922 - RNA, 19 nt, Artificial Sequence
  Description of Artificial Sequence: Synthetic oligonucleotide
cguucacguaauacauaca

SEQ ID NO: 310923 - RNA, 19 nt, Artificial Sequence
  Description of Artificial Sequence: Synthetic oligonucleotide
ugccccacugaggcaccau

SEQ ID NO: 310924 - RNA, 19 nt, Artificial Sequence
  Description of Artificial Sequence: Synthetic oligonucleotide
ccucaugauagaauuccuu

SEQ ID NO: 310925 - RNA, 19 nt, Artificial Sequence
  Description of Artificial Sequence: Synthetic oligonucleotide
ccucgucagucagcguggg

SEQ ID NO: 310926 - RNA, 19 nt, Artificial Sequence
  Description of Artificial Sequence: Synthetic oligonucleotide
gcaguccuuugcggauccg

SEQ ID NO: 310927 - RNA, 19 nt, Artificial Sequence
  Description of Artificial Sequence: Synthetic oligonucleotide
gggucucauaguugcuagu

SEQ ID NO: 310928 - RNA, 19 nt, Artificial Sequence
  Description of Artificial Sequence: Synthetic oligonucleotide
ggguugaguguggauccaa

SEQ ID NO: 310929 - RNA, 19 nt, Artificial Sequence
  Description of Artificial Sequence: Synthetic oligonucleotide
gggccgggagacauuccac

SEQ ID NO: 310930 - RNA, 19 nt, Artificial Sequence
  Description of Artificial Sequence: Synthetic oligonucleotide
ggugauagcuggggagacu

SEQ ID NO: 310931 - RNA, 19 nt, Artificial Sequence
  Description of Artificial Sequence: Synthetic oligonucleotide
ccccaucguaacuggaugu

SEQ ID NO: 310932 - RNA, 19 nt, Artificial Sequence
  Description of Artificial Sequence: Synthetic oligonucleotide
gacucuccauucagucuuu

SEQ ID NO: 310933 - RNA, 19 nt, Artificial Sequence
  Description of Artificial Sequence: Synthetic oligonucleotide
cugccccguacguggguua

SEQ ID NO: 310934 - RNA, 19 nt, Artificial Sequence
  Description of Artificial Sequence: Synthetic oligonucleotide
ccgggcauagcgcucgaua

SEQ ID NO: 310935 - RNA, 19 nt, Artificial Sequence
  Description of Artificial Sequence: Synthetic oligonucleotide
ccgggagacauuccacuua

SEQ ID NO: 310936 - RNA, 19 nt, Artificial Sequence
  Description of Artificial Sequence: Synthetic oligonucleotide
cggccccacucauagccac

SEQ ID NO: 310937 - RNA, 19 nt, Artificial Sequence
  Description of Artificial Sequence: Synthetic oligonucleotide
ccgaggaaucggucugaga

SEQ ID NO: 310938 - RNA, 19 nt, Artificial Sequence
  Description of Artificial Sequence: Synthetic oligonucleotide
ccugcaauuugggcacgga

SEQ ID NO: 310939 - RNA, 19 nt, Artificial Sequence
  Description of Artificial Sequence: Synthetic oligonucleotide
gccgggagacauuccacuu

SEQ ID NO: 310940 - RNA, 19 nt, Artificial Sequence
  Description of Artificial Sequence: Synthetic oligonucleotide
cuccguugauggguuuggu

SEQ ID NO: 310941 - RNA, 19 nt, Artificial Sequence
  Description of Artificial Sequence: Synthetic oligonucleotide
gggagggccuauggaccuc

SEQ ID NO: 310942 - RNA, 19 nt, Artificial Sequence
  Description of Artificial Sequence: Synthetic oligonucleotide
cgcucgauaucaugggaau

SEQ ID NO: 310943 - RNA, 19 nt, Artificial Sequence
  Description of Artificial Sequence: Synthetic oligonucleotide
cagucagcgugggccagau

SEQ ID NO: 310944 - RNA, 19 nt, Artificial Sequence
  Description of Artificial Sequence: Synthetic oligonucleotide
gagggccuauggaccucau

SEQ ID NO: 310945 - RNA, 19 nt, Artificial Sequence
  Description of Artificial Sequence: Synthetic oligonucleotide
gugagggccgggagacauu

SEQ ID NO: 310946 - RNA, 19 nt, Artificial Sequence
  Description of Artificial Sequence: Synthetic oligonucleotide
gcauagcgcucgauaucau

SEQ ID NO: 310947 - RNA, 19 nt, Artificial Sequence
  Description of Artificial Sequence: Synthetic oligonucleotide
gcggauccguucacguaau

SEQ ID NO: 310948 - RNA, 19 nt, Artificial Sequence
  Description of Artificial Sequence: Synthetic oligonucleotide
cggauccguucacguaaua

SEQ ID NO: 310949 - RNA, 19 nt, Artificial Sequence
  Description of Artificial Sequence: Synthetic oligonucleotide
aaaucuauuauuuauagau

SEQ ID NO: 310950 - RNA, 19 nt, Artificial Sequence
  Description of Artificial Sequence: Synthetic oligonucleotide
aaugccuuaacauaaacug

SEQ ID NO: 310951 - RNA, 19 nt, Artificial Sequence
  Description of Artificial Sequence: Synthetic oligonucleotide
aagacuuuacauuuugugc

SEQ ID NO: 310952 - RNA, 19 nt, Artificial Sequence
  Description of Artificial Sequence: Synthetic oligonucleotide
aaacacuuaaguuagggag

SEQ ID NO: 310953 - RNA, 19 nt, Artificial Sequence
  Description of Artificial Sequence: Synthetic oligonucleotide
acuaagauuaauucuaaac

SEQ ID NO: 310954 - RNA, 19 nt, Artificial Sequence
  Description of Artificial Sequence: Synthetic oligonucleotide
aauaacucuuguaugaacc

SEQ ID NO: 310955 - RNA, 19 nt, Artificial Sequence
  Description of Artificial Sequence: Synthetic oligonucleotide
aauuauacacaacucaaug

SEQ ID NO: 310956 - RNA, 19 nt, Artificial Sequence
  Description of Artificial Sequence: Synthetic oligonucleotide
auagucauaaaacaccuac

SEQ ID NO: 310957 - RNA, 19 nt, Artificial Sequence
  Description of Artificial Sequence: Synthetic oligonucleotide
aaugcaugcaguuucaaca

SEQ ID NO: 310958 - RNA, 19 nt, Artificial Sequence
  Description of Artificial Sequence: Synthetic oligonucleotide
uggauugugaauuugagac

SEQ ID NO: 310959 - RNA, 19 nt, Artificial Sequence
  Description of Artificial Sequence: Synthetic oligonucleotide
auagugucuagcuauacac

SEQ ID NO: 310960 - RNA, 19 nt, Artificial Sequence
  Description of Artificial Sequence: Synthetic oligonucleotide
uuaacaaugaaucccuuug

SEQ ID NO: 310961 - RNA, 19 nt, Artificial Sequence
  Description of Artificial Sequence: Synthetic oligonucleotide
cuuuguauaagauuguuuc

SEQ ID NO: 310962 - RNA, 19 nt, Artificial Sequence
  Description of Artificial Sequence: Synthetic oligonucleotide
aaauaacucuuguaugaac

SEQ ID NO: 310963 - RNA, 19 nt, Artificial Sequence
  Description of Artificial Sequence: Synthetic oligonucleotide
aaaacaccuacacuaauca

SEQ ID NO: 310964 - RNA, 19 nt, Artificial Sequence
  Description of Artificial Sequence: Synthetic oligonucleotide
aacuauggguguuuggugg

SEQ ID NO: 310965 - RNA, 19 nt, Artificial Sequence
  Description of Artificial Sequence: Synthetic oligonucleotide
ucuuguaugaaccuccggc

SEQ ID NO: 310966 - RNA, 19 nt, Artificial Sequence
  Description of Artificial Sequence: Synthetic oligonucleotide
agaaacuucagaauaaagg

SEQ ID NO: 310967 - RNA, 19 nt, Artificial Sequence
  Description of Artificial Sequence: Synthetic oligonucleotide
gcuaauuuaauuuacauca

SEQ ID NO: 310968 - RNA, 19 nt, Artificial Sequence
  Description of Artificial Sequence: Synthetic oligonucleotide
uuuacuuaguaugugaagc

SEQ ID NO: 310969 - RNA, 19 nt, Artificial Sequence
  Description of Artificial Sequence: Synthetic oligonucleotide
ugaaauaacucuuguauga

SEQ ID NO: 310970 - RNA, 19 nt, Artificial Sequence
  Description of Artificial Sequence: Synthetic oligonucleotide
uguuccaccgccauuaugc

SEQ ID NO: 310971 - RNA, 19 nt, Artificial Sequence
  Description of Artificial Sequence: Synthetic oligonucleotide
aauuuuagagccuauuuua

SEQ ID NO: 310972 - RNA, 19 nt, Artificial Sequence
  Description of Artificial Sequence: Synthetic oligonucleotide
uuauuaacaaugaaucccu

SEQ ID NO: 310973 - RNA, 19 nt, Artificial Sequence
  Description of Artificial Sequence: Synthetic oligonucleotide
uugacgacuaaucuuagca

SEQ ID NO: 310974 - RNA, 19 nt, Artificial Sequence
  Description of Artificial Sequence: Synthetic oligonucleotide
agagcauugaaucugagau

SEQ ID NO: 310975 - RNA, 19 nt, Artificial Sequence
  Description of Artificial Sequence: Synthetic oligonucleotide
aguauugacauuauuuugg

SEQ ID NO: 310976 - RNA, 19 nt, Artificial Sequence
  Description of Artificial Sequence: Synthetic oligonucleotide
auuagaaaugacaauuuac

SEQ ID NO: 310977 - RNA, 19 nt, Artificial Sequence
  Description of Artificial Sequence: Synthetic oligonucleotide
guugcauacagucugcagg

SEQ ID NO: 310978 - RNA, 19 nt, Artificial Sequence
  Description of Artificial Sequence: Synthetic oligonucleotide
ucaacauuagcucucaaua

SEQ ID NO: 310979 - RNA, 19 nt, Artificial Sequence
  Description of Artificial Sequence: Synthetic oligonucleotide
uuuaauugucaaaagcccu

SEQ ID NO: 310980 - RNA, 19 nt, Artificial Sequence
  Description of Artificial Sequence: Synthetic oligonucleotide
aacuacucaaauugacgac

SEQ ID NO: 310981 - RNA, 19 nt, Artificial Sequence
  Description of Artificial Sequence: Synthetic oligonucleotide
aaauguuugaggauacuuc

SEQ ID NO: 310982 - RNA, 19 nt, Artificial Sequence
  Description of Artificial Sequence: Synthetic oligonucleotide
ugucuagcuauacacauca

SEQ ID NO: 310983 - RNA, 19 nt, Artificial Sequence
  Description of Artificial Sequence: Synthetic oligonucleotide
ugaaguucauuacaagcag

SEQ ID NO: 310984 - RNA, 19 nt, Artificial Sequence
  Description of Artificial Sequence: Synthetic oligonucleotide
ucaaauugacgacuaaucu

SEQ ID NO: 310985 - RNA, 19 nt, Artificial Sequence
  Description of Artificial Sequence: Synthetic oligonucleotide
uggauaaauauauaguguc

SEQ ID NO: 310986 - RNA, 19 nt, Artificial Sequence
  Description of Artificial Sequence: Synthetic oligonucleotide
uccaauauacccuaagcac

SEQ ID NO: 310987 - RNA, 19 nt, Artificial Sequence
  Description of Artificial Sequence: Synthetic oligonucleotide
auaaaucagauuucaaugu

SEQ ID NO: 310988 - RNA, 19 nt, Artificial Sequence
  Description of Artificial Sequence: Synthetic oligonucleotide
ugugagucguauaaaaugu

SEQ ID NO: 310989 - RNA, 19 nt, Artificial Sequence
  Description of Artificial Sequence: Synthetic oligonucleotide
aaauuuuagagccuauuuu

SEQ ID NO: 310990 - RNA, 19 nt, Artificial Sequence
  Description of Artificial Sequence: Synthetic oligonucleotide
uuuacuauucccucucugc

SEQ ID NO: 310991 - RNA, 19 nt, Artificial Sequence
  Description of Artificial Sequence: Synthetic oligonucleotide
uggcucuugcauaugaugg

SEQ ID NO: 310992 - RNA, 19 nt, Artificial Sequence
  Description of Artificial Sequence: Synthetic oligonucleotide
aacucuuguaugaaccucc

SEQ ID NO: 310993 - RNA, 19 nt, Artificial Sequence
  Description of Artificial Sequence: Synthetic oligonucleotide
aaaacacuuaaguuaggga

SEQ ID NO: 310994 - RNA, 19 nt, Artificial Sequence
  Description of Artificial Sequence: Synthetic oligonucleotide
ucacaaugcauuguuaggg

SEQ ID NO: 310995 - RNA, 19 nt, Artificial Sequence
  Description of Artificial Sequence: Synthetic oligonucleotide
uguacuagaaaugaaguuc

SEQ ID NO: 310996 - RNA, 19 nt, Artificial Sequence
  Description of Artificial Sequence: Synthetic oligonucleotide
uuuacgaagcaggauacgg

SEQ ID NO: 310997 - RNA, 19 nt, Artificial Sequence
  Description of Artificial Sequence: Synthetic oligonucleotide
uggaauugccaacacagcc

SEQ ID NO: 310998 - RNA, 19 nt, Artificial Sequence
  Description of Artificial Sequence: Synthetic oligonucleotide
gaccaaccuaguuaaaugg

SEQ ID NO: 310999 - RNA, 19 nt, Artificial Sequence
  Description of Artificial Sequence: Synthetic oligonucleotide
agacuuuacauuuugugcu

SEQ ID NO: 311000 - RNA, 19 nt, Artificial Sequence
  Description of Artificial Sequence: Synthetic oligonucleotide
accuacacuaaucacuugg

SEQ ID NO: 311001 - RNA, 19 nt, Artificial Sequence
  Description of Artificial Sequence: Synthetic oligonucleotide
aucaaggugagccaaacca

SEQ ID NO: 311002 - RNA, 19 nt, Artificial Sequence
  Description of Artificial Sequence: Synthetic oligonucleotide
uaauucuaaacucuugaaa

SEQ ID NO: 311003 - RNA, 19 nt, Artificial Sequence
  Description of Artificial Sequence: Synthetic oligonucleotide
uucgugaggaccuuuagga

SEQ ID NO: 311004 - RNA, 19 nt, Artificial Sequence
  Description of Artificial Sequence: Synthetic oligonucleotide
ucguauaaaauguacuaga

SEQ ID NO: 311005 - RNA, 19 nt, Artificial Sequence
  Description of Artificial Sequence: Synthetic oligonucleotide
aaauacuccaaaggggagg

SEQ ID NO: 311006 - RNA, 19 nt, Artificial Sequence
  Description of Artificial Sequence: Synthetic oligonucleotide
aaugaaucccuuuguauaa

SEQ ID NO: 311007 - RNA, 19 nt, Artificial Sequence
  Description of Artificial Sequence: Synthetic oligonucleotide
ucuuuaugaucccuuacca

SEQ ID NO: 311008 - RNA, 19 nt, Artificial Sequence
  Description of Artificial Sequence: Synthetic oligonucleotide
uugugcuagaccaaccuag

SEQ ID NO: 311009 - RNA, 19 nt, Artificial Sequence
  Description of Artificial Sequence: Synthetic oligonucleotide
acuauucccucucugcccc

SEQ ID NO: 311010 - RNA, 19 nt, Artificial Sequence
  Description of Artificial Sequence: Synthetic oligonucleotide
uugggaacaaaucuuauuu

SEQ ID NO: 311011 - RNA, 19 nt, Artificial Sequence
  Description of Artificial Sequence: Synthetic oligonucleotide
aaacaccuacacuaaucac

SEQ ID NO: 311012 - RNA, 19 nt, Artificial Sequence
  Description of Artificial Sequence: Synthetic oligonucleotide
uauguuacaguuauacaau

SEQ ID NO: 311013 - RNA, 19 nt, Artificial Sequence
  Description of Artificial Sequence: Synthetic oligonucleotide
uuccuaacagggaagagga

SEQ ID NO: 311014 - RNA, 19 nt, Artificial Sequence
  Description of Artificial Sequence: Synthetic oligonucleotide
uuuagagccuauuuuauua

SEQ ID NO: 311015 - RNA, 19 nt, Artificial Sequence
  Description of Artificial Sequence: Synthetic oligonucleotide
gagauucucuuuaugaucc

SEQ ID NO: 311016 - RNA, 19 nt, Artificial Sequence
  Description of Artificial Sequence: Synthetic oligonucleotide
uuacauuuugugcuagacc

SEQ ID NO: 311017 - RNA, 19 nt, Artificial Sequence
  Description of Artificial Sequence: Synthetic oligonucleotide
gaacuacucaaauugacga

SEQ ID NO: 311018 - RNA, 19 nt, Artificial Sequence
  Description of Artificial Sequence: Synthetic oligonucleotide
auacccuaagcacaaacag

SEQ ID NO: 311019 - RNA, 19 nt, Artificial Sequence
  Description of Artificial Sequence: Synthetic oligonucleotide
uuucgugaggaccuuuagg

SEQ ID NO: 311020 - RNA, 19 nt, Artificial Sequence
  Description of Artificial Sequence: Synthetic oligonucleotide
aauauauagugucuagcua

SEQ ID NO: 311021 - RNA, 19 nt, Artificial Sequence
  Description of Artificial Sequence: Synthetic oligonucleotide
ugaaccuccggcauugaag

SEQ ID NO: 311022 - RNA, 19 nt, Artificial Sequence
  Description of Artificial Sequence: Synthetic oligonucleotide
uauuuacuuaguaugugaa

SEQ ID NO: 311023 - RNA, 19 nt, Artificial Sequence
  Description of Artificial Sequence: Synthetic oligonucleotide
uaaaacaccuacacuaauc

SEQ ID NO: 311024 - RNA, 19 nt, Artificial Sequence
  Description of Artificial Sequence: Synthetic oligonucleotide
uacacuaaucacuuggcac

SEQ ID NO: 311025 - RNA, 19 nt, Artificial Sequence
  Description of Artificial Sequence: Synthetic oligonucleotide
uuacuauucccucucugcc

SEQ ID NO: 311026 - RNA, 19 nt, Artificial Sequence
  Description of Artificial Sequence: Synthetic oligonucleotide
uuaccauugacaucauuca

SEQ ID NO: 311027 - RNA, 19 nt, Artificial Sequence
  Description of Artificial Sequence: Synthetic oligonucleotide
acauugguguaucaucugg

SEQ ID NO: 311028 - RNA, 19 nt, Artificial Sequence
  Description of Artificial Sequence: Synthetic oligonucleotide
uucagugaccuacaaacac

SEQ ID NO: 311029 - RNA, 19 nt, Artificial Sequence
  Description of Artificial Sequence: Synthetic oligonucleotide
aaaucaaggugagccaaac

SEQ ID NO: 311030 - RNA, 19 nt, Artificial Sequence
  Description of Artificial Sequence: Synthetic oligonucleotide
ugagucguauaaaauguac

SEQ ID NO: 311031 - RNA, 19 nt, Artificial Sequence
  Description of Artificial Sequence: Synthetic oligonucleotide
aacaccuacacuaaucacu

SEQ ID NO: 311032 - RNA, 19 nt, Artificial Sequence
  Description of Artificial Sequence: Synthetic oligonucleotide
aaauugacgacuaaucuua

SEQ ID NO: 311033 - RNA, 19 nt, Artificial Sequence
  Description of Artificial Sequence: Synthetic oligonucleotide
aaaggcauaugucaucaaa

SEQ ID NO: 311034 - RNA, 19 nt, Artificial Sequence
  Description of Artificial Sequence: Synthetic oligonucleotide
ucaggauucaucagauuca

SEQ ID NO: 311035 - RNA, 19 nt, Artificial Sequence
  Description of Artificial Sequence: Synthetic oligonucleotide
aguuggcuugguuagggac

SEQ ID NO: 311036 - RNA, 19 nt, Artificial Sequence
  Description of Artificial Sequence: Synthetic oligonucleotide
uauagugucuagcuauaca

SEQ ID NO: 311037 - RNA, 19 nt, Artificial Sequence
  Description of Artificial Sequence: Synthetic oligonucleotide
uguugaagaauucaacauu

SEQ ID NO: 311038 - RNA, 19 nt, Artificial Sequence
  Description of Artificial Sequence: Synthetic oligonucleotide
auaaauaaugaggucagga

SEQ ID NO: 311039 - RNA, 19 nt, Artificial Sequence
  Description of Artificial Sequence: Synthetic oligonucleotide
ggaagucaaagucuaaggg

SEQ ID NO: 311040 - RNA, 19 nt, Artificial Sequence
  Description of Artificial Sequence: Synthetic oligonucleotide
uuuugugcuagaccaaccu

SEQ ID NO: 311041 - RNA, 19 nt, Artificial Sequence
  Description of Artificial Sequence: Synthetic oligonucleotide
auuacaagcagcuuuucuu

SEQ ID NO: 311042 - RNA, 19 nt, Artificial Sequence
  Description of Artificial Sequence: Synthetic oligonucleotide
acacuaaucacuuggcacu

SEQ ID NO: 311043 - RNA, 19 nt, Artificial Sequence
  Description of Artificial Sequence: Synthetic oligonucleotide
ggauacuucucuuuaauug

SEQ ID NO: 311044 - RNA, 19 nt, Artificial Sequence
  Description of Artificial Sequence: Synthetic oligonucleotide
acuuaaguuagggagaaca

SEQ ID NO: 311045 - RNA, 19 nt, Artificial Sequence
  Description of Artificial Sequence: Synthetic oligonucleotide
auugacgacuaaucuuagc

SEQ ID NO: 311046 - RNA, 19 nt, Artificial Sequence
  Description of Artificial Sequence: Synthetic oligonucleotide
uuagaaauucacaguuuac

SEQ ID NO: 311047 - RNA, 19 nt, Artificial Sequence
  Description of Artificial Sequence: Synthetic oligonucleotide
cuagcuauacacaucauaa

SEQ ID NO: 311048 - RNA, 19 nt, Artificial Sequence
  Description of Artificial Sequence: Synthetic oligonucleotide
uccaaaauacauuucccaa

SEQ ID NO: 311049 - RNA, 19 nt, Artificial Sequence
  Description of Artificial Sequence: Synthetic oligonucleotide
aacuacaguauugacauua

SEQ ID NO: 311050 - RNA, 19 nt, Artificial Sequence
  Description of Artificial Sequence: Synthetic oligonucleotide
aauuaaaacuggugguaau

SEQ ID NO: 311051 - RNA, 19 nt, Artificial Sequence
  Description of Artificial Sequence: Synthetic oligonucleotide
ucaucauuccuaaucugcu

SEQ ID NO: 311052 - RNA, 19 nt, Artificial Sequence
  Description of Artificial Sequence: Synthetic oligonucleotide
ucuuuacgaagcaggauac

SEQ ID NO: 311053 - RNA, 19 nt, Artificial Sequence
  Description of Artificial Sequence: Synthetic oligonucleotide
gaaugacucuagcuaaucc

SEQ ID NO: 311054 - RNA, 19 nt, Artificial Sequence
  Description of Artificial Sequence: Synthetic oligonucleotide
cuugcaauaucacugucuc

SEQ ID NO: 311055 - RNA, 19 nt, Artificial Sequence
  Description of Artificial Sequence: Synthetic oligonucleotide
ucuagcuaauccaucucug

SEQ ID NO: 311056 - RNA, 19 nt, Artificial Sequence
  Description of Artificial Sequence: Synthetic oligonucleotide
uuacuuaguaugugaagcu

SEQ ID NO: 311057 - RNA, 19 nt, Artificial Sequence
  Description of Artificial Sequence: Synthetic oligonucleotide
guuucgugacacuugguag

SEQ ID NO: 311058 - RNA, 19 nt, Artificial Sequence
  Description of Artificial Sequence: Synthetic oligonucleotide
agccaaaccauuuugggaa

SEQ ID NO: 311059 - RNA, 19 nt, Artificial Sequence
  Description of Artificial Sequence: Synthetic oligonucleotide
uuacgaagcaggauacggc

SEQ ID NO: 311060 - RNA, 19 nt, Artificial Sequence
  Description of Artificial Sequence: Synthetic oligonucleotide
cuggugguaaugaaucacg

SEQ ID NO: 311061 - RNA, 19 nt, Artificial Sequence
  Description of Artificial Sequence: Synthetic oligonucleotide
uauucauguagcugaguca

SEQ ID NO: 311062 - RNA, 19 nt, Artificial Sequence
  Description of Artificial Sequence: Synthetic oligonucleotide
uuuaggaaauccacaaguu

SEQ ID NO: 311063 - RNA, 19 nt, Artificial Sequence
  Description of Artificial Sequence: Synthetic oligonucleotide
uguuucgugacacuuggua

SEQ ID NO: 311064 - RNA, 19 nt, Artificial Sequence
  Description of Artificial Sequence: Synthetic oligonucleotide
uauccaccuaacuauaaaa

SEQ ID NO: 311065 - RNA, 19 nt, Artificial Sequence
  Description of Artificial Sequence: Synthetic oligonucleotide
agggaugucuauucauuac

SEQ ID NO: 311066 - RNA, 19 nt, Artificial Sequence
  Description of Artificial Sequence: Synthetic oligonucleotide
ucuacuuuucuuucaugga

SEQ ID NO: 311067 - RNA, 19 nt, Artificial Sequence
  Description of Artificial Sequence: Synthetic oligonucleotide
guuccuaacagggaagagg

SEQ ID NO: 311068 - RNA, 19 nt, Artificial Sequence
  Description of Artificial Sequence: Synthetic oligonucleotide
uuucgugacacuugguaga

SEQ ID NO: 311069 - RNA, 19 nt, Artificial Sequence
  Description of Artificial Sequence: Synthetic oligonucleotide
agucuaaaugugcagugug

SEQ ID NO: 311070 - RNA, 19 nt, Artificial Sequence
  Description of Artificial Sequence: Synthetic oligonucleotide
ugcuacaauuuaauaguca

SEQ ID NO: 311071 - RNA, 19 nt, Artificial Sequence
  Description of Artificial Sequence: Synthetic oligonucleotide
ugacacuugguagaaacug

SEQ ID NO: 311072 - RNA, 19 nt, Artificial Sequence
  Description of Artificial Sequence: Synthetic oligonucleotide
uguaucaucuggaaugguu

SEQ ID NO: 311073 - RNA, 19 nt, Artificial Sequence
  Description of Artificial Sequence: Synthetic oligonucleotide
agucguauaaaauguacua

SEQ ID NO: 311074 - RNA, 19 nt, Artificial Sequence
  Description of Artificial Sequence: Synthetic oligonucleotide
aacauugcuuccagugacc

SEQ ID NO: 311075 - RNA, 19 nt, Artificial Sequence
  Description of Artificial Sequence: Synthetic oligonucleotide
uuccuaaucugcuacaauu

SEQ ID NO: 311076 - RNA, 19 nt, Artificial Sequence
  Description of Artificial Sequence: Synthetic oligonucleotide
uuaggaaauccacaaguuu

SEQ ID NO: 311077 - RNA, 19 nt, Artificial Sequence
  Description of Artificial Sequence: Synthetic oligonucleotide
ugcuagaccaaccuaguua

SEQ ID NO: 311078 - RNA, 19 nt, Artificial Sequence
  Description of Artificial Sequence: Synthetic oligonucleotide
uuuguugcauacagucugc

SEQ ID NO: 311079 - RNA, 19 nt, Artificial Sequence
  Description of Artificial Sequence: Synthetic oligonucleotide
uuaaguuagggagaacacu

SEQ ID NO: 311080 - RNA, 19 nt, Artificial Sequence
  Description of Artificial Sequence: Synthetic oligonucleotide
uacgaagcaggauacggca

SEQ ID NO: 311081 - RNA, 19 nt, Artificial Sequence
  Description of Artificial Sequence: Synthetic oligonucleotide
cuucucacacaaaauuagc

SEQ ID NO: 311082 - RNA, 19 nt, Artificial Sequence
  Description of Artificial Sequence: Synthetic oligonucleotide
uguagcagcguauuacuaa

SEQ ID NO: 311083 - RNA, 19 nt, Artificial Sequence
  Description of Artificial Sequence: Synthetic oligonucleotide
gguggaauugccaacacag

SEQ ID NO: 311084 - RNA, 19 nt, Artificial Sequence
  Description of Artificial Sequence: Synthetic oligonucleotide
uaacaaugaaucccuuugu

SEQ ID NO: 311085 - RNA, 19 nt, Artificial Sequence
  Description of Artificial Sequence: Synthetic oligonucleotide
guauuuacuuaguauguga

SEQ ID NO: 311086 - RNA, 19 nt, Artificial Sequence
  Description of Artificial Sequence: Synthetic oligonucleotide
gagaacacuuuccuccucc

SEQ ID NO: 311087 - RNA, 19 nt, Artificial Sequence
  Description of Artificial Sequence: Synthetic oligonucleotide
cauuagcucucaauaaaac

SEQ ID NO: 311088 - RNA, 19 nt, Artificial Sequence
  Description of Artificial Sequence: Synthetic oligonucleotide
auaacucuuguaugaaccu

SEQ ID NO: 311089 - RNA, 19 nt, Artificial Sequence
  Description of Artificial Sequence: Synthetic oligonucleotide
uugguagaaacugaacuac

SEQ ID NO: 311090 - RNA, 19 nt, Artificial Sequence
  Description of Artificial Sequence: Synthetic oligonucleotide
aacacuuaaguuagggaga

SEQ ID NO: 311091 - RNA, 19 nt, Artificial Sequence
  Description of Artificial Sequence: Synthetic oligonucleotide
agugucuagcuauacacau

SEQ ID NO: 311092 - RNA, 19 nt, Artificial Sequence
  Description of Artificial Sequence: Synthetic oligonucleotide
cuagcuaauccaucucugc

SEQ ID NO: 311093 - RNA, 19 nt, Artificial Sequence
  Description of Artificial Sequence: Synthetic oligonucleotide
ugaauuaaaacugguggua

SEQ ID NO: 311094 - RNA, 19 nt, Artificial Sequence
  Description of Artificial Sequence: Synthetic oligonucleotide
gaaguuggcuugguuaggg

SEQ ID NO: 311095 - RNA, 19 nt, Artificial Sequence
  Description of Artificial Sequence: Synthetic oligonucleotide
cagcguauuacuaauaaaa

SEQ ID NO: 311096 - RNA, 19 nt, Artificial Sequence
  Description of Artificial Sequence: Synthetic oligonucleotide
ucuuagcacuucuuuacga

SEQ ID NO: 311097 - RNA, 19 nt, Artificial Sequence
  Description of Artificial Sequence: Synthetic oligonucleotide
ucaaaagcccuguuucgug

SEQ ID NO: 311098 - RNA, 19 nt, Artificial Sequence
  Description of Artificial Sequence: Synthetic oligonucleotide
cuuuaugaucccuuaccac

SEQ ID NO: 311099 - RNA, 19 nt, Artificial Sequence
  Description of Artificial Sequence: Synthetic oligonucleotide
uacaaauuuaugugacuaa

SEQ ID NO: 311100 - RNA, 19 nt, Artificial Sequence
  Description of Artificial Sequence: Synthetic oligonucleotide
gucguauaaaauguacuag

SEQ ID NO: 311101 - RNA, 19 nt, Artificial Sequence
  Description of Artificial Sequence: Synthetic oligonucleotide
ucucaauaaaacccuuaaa

SEQ ID NO: 311102 - RNA, 19 nt, Artificial Sequence
  Description of Artificial Sequence: Synthetic oligonucleotide
acuggugguaaugaaucac

SEQ ID NO: 311103 - RNA, 19 nt, Artificial Sequence
  Description of Artificial Sequence: Synthetic oligonucleotide
uucugugagucguauaaaa

SEQ ID NO: 311104 - RNA, 19 nt, Artificial Sequence
  Description of Artificial Sequence: Synthetic oligonucleotide
ucuuucauggauugugaau

SEQ ID NO: 311105 - RNA, 19 nt, Artificial Sequence
  Description of Artificial Sequence: Synthetic oligonucleotide
uucuuucuauguuacaguu

SEQ ID NO: 311106 - RNA, 19 nt, Artificial Sequence
  Description of Artificial Sequence: Synthetic oligonucleotide
uguugcauacagucugcag

SEQ ID NO: 311107 - RNA, 19 nt, Artificial Sequence
  Description of Artificial Sequence: Synthetic oligonucleotide
ugacgacuaaucuuagcac

SEQ ID NO: 311108 - RNA, 19 nt, Artificial Sequence
  Description of Artificial Sequence: Synthetic oligonucleotide
acuacucaaauugacgacu

SEQ ID NO: 311109 - RNA, 19 nt, Artificial Sequence
  Description of Artificial Sequence: Synthetic oligonucleotide
uccuccaauauacccuaag

SEQ ID NO: 311110 - RNA, 19 nt, Artificial Sequence
  Description of Artificial Sequence: Synthetic oligonucleotide
aaggggaggaaucccacau

SEQ ID NO: 311111 - RNA, 19 nt, Artificial Sequence
  Description of Artificial Sequence: Synthetic oligonucleotide
aaucugcuacaauuuaaua

SEQ ID NO: 311112 - RNA, 19 nt, Artificial Sequence
  Description of Artificial Sequence: Synthetic oligonucleotide
gaauugccaacacagccuc

SEQ ID NO: 311113 - RNA, 19 nt, Artificial Sequence
  Description of Artificial Sequence: Synthetic oligonucleotide
aaucccacauucugugagu

SEQ ID NO: 311114 - RNA, 19 nt, Artificial Sequence
  Description of Artificial Sequence: Synthetic oligonucleotide
aacuggugguaaugaauca

SEQ ID NO: 311115 - RNA, 19 nt, Artificial Sequence
  Description of Artificial Sequence: Synthetic oligonucleotide
uuagagccuauuuuauuau

SEQ ID NO: 311116 - RNA, 19 nt, Artificial Sequence
  Description of Artificial Sequence: Synthetic oligonucleotide
uuugggaacaaaucuuauu

SEQ ID NO: 311117 - RNA, 19 nt, Artificial Sequence
  Description of Artificial Sequence: Synthetic oligonucleotide
ugagaugcaccgucgcugc

SEQ ID NO: 311118 - RNA, 19 nt, Artificial Sequence
  Description of Artificial Sequence: Synthetic oligonucleotide
uacuuaguaugugaagcug

SEQ ID NO: 311119 - RNA, 19 nt, Artificial Sequence
  Description of Artificial Sequence: Synthetic oligonucleotide
uggugguaaugaaucacga

SEQ ID NO: 311120 - RNA, 19 nt, Artificial Sequence
  Description of Artificial Sequence: Synthetic oligonucleotide
cuccaauauacccuaagca

SEQ ID NO: 311121 - RNA, 19 nt, Artificial Sequence
  Description of Artificial Sequence: Synthetic oligonucleotide
uggucagagagcauugaau

SEQ ID NO: 311122 - RNA, 19 nt, Artificial Sequence
  Description of Artificial Sequence: Synthetic oligonucleotide
ugucaguauuuacuuagua

SEQ ID NO: 311123 - RNA, 19 nt, Artificial Sequence
  Description of Artificial Sequence: Synthetic oligonucleotide
uuaugaucccuuaccacuu

SEQ ID NO: 311124 - RNA, 19 nt, Artificial Sequence
  Description of Artificial Sequence: Synthetic oligonucleotide
uuccugagaugcaccgucg

SEQ ID NO: 311125 - RNA, 19 nt, Artificial Sequence
  Description of Artificial Sequence: Synthetic oligonucleotide
aggcuuuaaugccuuaaca

SEQ ID NO: 311126 - RNA, 19 nt, Artificial Sequence
  Description of Artificial Sequence: Synthetic oligonucleotide
gaaauuuuagagccuauuu

SEQ ID NO: 311127 - RNA, 19 nt, Artificial Sequence
  Description of Artificial Sequence: Synthetic oligonucleotide
agcagcguauuacuaauaa

SEQ ID NO: 311128 - RNA, 19 nt, Artificial Sequence
  Description of Artificial Sequence: Synthetic oligonucleotide
gguaaaaucuauuauuuau

SEQ ID NO: 311129 - RNA, 19 nt, Artificial Sequence
  Description of Artificial Sequence: Synthetic oligonucleotide
ugugcuagaccaaccuagu

SEQ ID NO: 311130 - RNA, 19 nt, Artificial Sequence
  Description of Artificial Sequence: Synthetic oligonucleotide
auguacuagaaaugaaguu

SEQ ID NO: 311131 - RNA, 19 nt, Artificial Sequence
  Description of Artificial Sequence: Synthetic oligonucleotide
aggggaaugcugcugaaaa

SEQ ID NO: 311132 - RNA, 19 nt, Artificial Sequence
  Description of Artificial Sequence: Synthetic oligonucleotide
auaaaacaccuacacuaau

SEQ ID NO: 311133 - RNA, 19 nt, Artificial Sequence
  Description of Artificial Sequence: Synthetic oligonucleotide
cuugguagaaacugaacua

SEQ ID NO: 311134 - RNA, 19 nt, Artificial Sequence
  Description of Artificial Sequence: Synthetic oligonucleotide
uuugugcuagaccaaccua

SEQ ID NO: 311135 - RNA, 19 nt, Artificial Sequence
  Description of Artificial Sequence: Synthetic oligonucleotide
uacacaacucaaugaaaua

SEQ ID NO: 311136 - RNA, 19 nt, Artificial Sequence
  Description of Artificial Sequence: Synthetic oligonucleotide
ucauuccuaaucugcuaca

SEQ ID NO: 311137 - RNA, 19 nt, Artificial Sequence
  Description of Artificial Sequence: Synthetic oligonucleotide
aauugacgacuaaucuuag

SEQ ID NO: 311138 - RNA, 19 nt, Artificial Sequence
  Description of Artificial Sequence: Synthetic oligonucleotide
gagucaaaugugcaaucca

SEQ ID NO: 311139 - RNA, 19 nt, Artificial Sequence
  Description of Artificial Sequence: Synthetic oligonucleotide
gagccaaaccauuuuggga

SEQ ID NO: 311140 - RNA, 19 nt, Artificial Sequence
  Description of Artificial Sequence: Synthetic oligonucleotide
augaaucacgaacccggag

SEQ ID NO: 311141 - RNA, 19 nt, Artificial Sequence
  Description of Artificial Sequence: Synthetic oligonucleotide
ugguuagggacgacagcag

SEQ ID NO: 311142 - RNA, 19 nt, Artificial Sequence
  Description of Artificial Sequence: Synthetic oligonucleotide
gacgacuaaucuuagcacu

SEQ ID NO: 311143 - RNA, 19 nt, Artificial Sequence
  Description of Artificial Sequence: Synthetic oligonucleotide
ugggaacaaaucuuauuua

SEQ ID NO: 311144 - RNA, 19 nt, Artificial Sequence
  Description of Artificial Sequence: Synthetic oligonucleotide
uguuaggguuucugacagg

SEQ ID NO: 311145 - RNA, 19 nt, Artificial Sequence
  Description of Artificial Sequence: Synthetic oligonucleotide
cuaaucugcuacaauuuaa

SEQ ID NO: 311146 - RNA, 19 nt, Artificial Sequence
  Description of Artificial Sequence: Synthetic oligonucleotide
cauugaaucugagauucuc

SEQ ID NO: 311147 - RNA, 19 nt, Artificial Sequence
  Description of Artificial Sequence: Synthetic oligonucleotide
uaguaacucaauuccccaa

SEQ ID NO: 311148 - RNA, 19 nt, Artificial Sequence
  Description of Artificial Sequence: Synthetic oligonucleotide
ugguggaauugccaacaca

SEQ ID NO: 311149 - RNA, 19 nt, Artificial Sequence
  Description of Artificial Sequence: Synthetic oligonucleotide
acuuaguaugugaagcuga

SEQ ID NO: 311150 - RNA, 19 nt, Artificial Sequence
  Description of Artificial Sequence: Synthetic oligonucleotide
uaccauugacaucauucau

SEQ ID NO: 311151 - RNA, 19 nt, Artificial Sequence
  Description of Artificial Sequence: Synthetic oligonucleotide
gacaucauucaucauuccu

SEQ ID NO: 311152 - RNA, 19 nt, Artificial Sequence
  Description of Artificial Sequence: Synthetic oligonucleotide
caacuauggguguuuggug

SEQ ID NO: 311153 - RNA, 19 nt, Artificial Sequence
  Description of Artificial Sequence: Synthetic oligonucleotide
ggcauugaagucuaaaugu

SEQ ID NO: 311154 - RNA, 19 nt, Artificial Sequence
  Description of Artificial Sequence: Synthetic oligonucleotide
cugagccuuccugagaugc

SEQ ID NO: 311155 - RNA, 19 nt, Artificial Sequence
  Description of Artificial Sequence: Synthetic oligonucleotide
aaugaaucacgaacccgga

SEQ ID NO: 311156 - RNA, 19 nt, Artificial Sequence
  Description of Artificial Sequence: Synthetic oligonucleotide
ugaucccuuaccacuuuuc

SEQ ID NO: 311157 - RNA, 19 nt, Artificial Sequence
  Description of Artificial Sequence: Synthetic oligonucleotide
agcugagucacuaguaacu

SEQ ID NO: 311158 - RNA, 19 nt, Artificial Sequence
  Description of Artificial Sequence: Synthetic oligonucleotide
gucuaaaugugcagugugc

SEQ ID NO: 311159 - RNA, 19 nt, Artificial Sequence
  Description of Artificial Sequence: Synthetic oligonucleotide
agcuaauccaucucugcua

SEQ ID NO: 311160 - RNA, 19 nt, Artificial Sequence
  Description of Artificial Sequence: Synthetic oligonucleotide
cuggaaugguuuucacacc

SEQ ID NO: 311161 - RNA, 19 nt, Artificial Sequence
  Description of Artificial Sequence: Synthetic oligonucleotide
aagauuguuucaggaggcu

SEQ ID NO: 311162 - RNA, 19 nt, Artificial Sequence
  Description of Artificial Sequence: Synthetic oligonucleotide
acucaaauugacgacuaau

SEQ ID NO: 311163 - RNA, 19 nt, Artificial Sequence
  Description of Artificial Sequence: Synthetic oligonucleotide
gaaccuccggcauugaagu

SEQ ID NO: 311164 - RNA, 19 nt, Artificial Sequence
  Description of Artificial Sequence: Synthetic oligonucleotide
acuuuacauuuugugcuag

SEQ ID NO: 311165 - RNA, 19 nt, Artificial Sequence
  Description of Artificial Sequence: Synthetic oligonucleotide
cuuagcacuucuuuacgaa

SEQ ID NO: 311166 - RNA, 19 nt, Artificial Sequence
  Description of Artificial Sequence: Synthetic oligonucleotide
acuauggguguuuggugga

SEQ ID NO: 311167 - RNA, 19 nt, Artificial Sequence
  Description of Artificial Sequence: Synthetic oligonucleotide
caaugucuguucagugacc

SEQ ID NO: 311168 - RNA, 19 nt, Artificial Sequence
  Description of Artificial Sequence: Synthetic oligonucleotide
uccugagaugcaccgucgc

SEQ ID NO: 311169 - RNA, 19 nt, Artificial Sequence
  Description of Artificial Sequence: Synthetic oligonucleotide
ucuguucagugaccuacaa

SEQ ID NO: 311170 - RNA, 19 nt, Artificial Sequence
  Description of Artificial Sequence: Synthetic oligonucleotide
cuuuacgaagcaggauacg

SEQ ID NO: 311171 - RNA, 19 nt, Artificial Sequence
  Description of Artificial Sequence: Synthetic oligonucleotide
agagccuauuuuauuauaa

SEQ ID NO: 311172 - RNA, 19 nt, Artificial Sequence
  Description of Artificial Sequence: Synthetic oligonucleotide
aauuagcaccucucucaaa

SEQ ID NO: 311173 - RNA, 19 nt, Artificial Sequence
  Description of Artificial Sequence: Synthetic oligonucleotide
guagcugagucacuaguaa

SEQ ID NO: 311174 - RNA, 19 nt, Artificial Sequence
  Description of Artificial Sequence: Synthetic oligonucleotide
agucaaaugugcaauccau

SEQ ID NO: 311175 - RNA, 19 nt, Artificial Sequence
  Description of Artificial Sequence: Synthetic oligonucleotide
gggaacaaaucuuauuuaa

SEQ ID NO: 311176 - RNA, 19 nt, Artificial Sequence
  Description of Artificial Sequence: Synthetic oligonucleotide
ccaacaaaugagaaacuuc

SEQ ID NO: 311177 - RNA, 19 nt, Artificial Sequence
  Description of Artificial Sequence: Synthetic oligonucleotide
cugagaugcaccgucgcug

SEQ ID NO: 311178 - RNA, 19 nt, Artificial Sequence
  Description of Artificial Sequence: Synthetic oligonucleotide
uaacucuuguaugaaccuc

SEQ ID NO: 311179 - RNA, 19 nt, Artificial Sequence
  Description of Artificial Sequence: Synthetic oligonucleotide
gacuaagauuaauucuaaa

SEQ ID NO: 311180 - RNA, 19 nt, Artificial Sequence
  Description of Artificial Sequence: Synthetic oligonucleotide
ccuguuucgugacacuugg

SEQ ID NO: 311181 - RNA, 19 nt, Artificial Sequence
  Description of Artificial Sequence: Synthetic oligonucleotide
cauugguguaucaucugga

SEQ ID NO: 311182 - RNA, 19 nt, Artificial Sequence
  Description of Artificial Sequence: Synthetic oligonucleotide
acauuagcucucaauaaaa

SEQ ID NO: 311183 - RNA, 19 nt, Artificial Sequence
  Description of Artificial Sequence: Synthetic oligonucleotide
ugacucuagcuaauccauc

SEQ ID NO: 311184 - RNA, 19 nt, Artificial Sequence
  Description of Artificial Sequence: Synthetic oligonucleotide
cuuaguaugugaagcugaa

SEQ ID NO: 311185 - RNA, 19 nt, Artificial Sequence
  Description of Artificial Sequence: Synthetic oligonucleotide
gaccugaugucaccauagc

SEQ ID NO: 311186 - RNA, 19 nt, Artificial Sequence
  Description of Artificial Sequence: Synthetic oligonucleotide
uuuauucauguagcugagu

SEQ ID NO: 311187 - RNA, 19 nt, Artificial Sequence
  Description of Artificial Sequence: Synthetic oligonucleotide
gcuagaccaaccuaguuaa

SEQ ID NO: 311188 - RNA, 19 nt, Artificial Sequence
  Description of Artificial Sequence: Synthetic oligonucleotide
agauuaauucuaaacucuu

SEQ ID NO: 311189 - RNA, 19 nt, Artificial Sequence
  Description of Artificial Sequence: Synthetic oligonucleotide
ccaauauacccuaagcaca

SEQ ID NO: 311190 - RNA, 19 nt, Artificial Sequence
  Description of Artificial Sequence: Synthetic oligonucleotide
caucaaggauauccagagc

SEQ ID NO: 311191 - RNA, 19 nt, Artificial Sequence
  Description of Artificial Sequence: Synthetic oligonucleotide
uggacaagaggggaaugcu

SEQ ID NO: 311192 - RNA, 19 nt, Artificial Sequence
  Description of Artificial Sequence: Synthetic oligonucleotide
acucaaugaaauauucuua

SEQ ID NO: 311193 - RNA, 19 nt, Artificial Sequence
  Description of Artificial Sequence: Synthetic oligonucleotide
uacuccaaaggggaggaau

SEQ ID NO: 311194 - RNA, 19 nt, Artificial Sequence
  Description of Artificial Sequence: Synthetic oligonucleotide
uagagccuauuuuauuaua

SEQ ID NO: 311195 - RNA, 19 nt, Artificial Sequence
  Description of Artificial Sequence: Synthetic oligonucleotide
uagggacgacagcaguugc

SEQ ID NO: 311196 - RNA, 19 nt, Artificial Sequence
  Description of Artificial Sequence: Synthetic oligonucleotide
uggguguuugguggaauug

SEQ ID NO: 311197 - RNA, 19 nt, Artificial Sequence
  Description of Artificial Sequence: Synthetic oligonucleotide
gacuuuacauuuugugcua

SEQ ID NO: 311198 - RNA, 19 nt, Artificial Sequence
  Description of Artificial Sequence: Synthetic oligonucleotide
uaaucacuuggcacugcau

SEQ ID NO: 311199 - RNA, 19 nt, Artificial Sequence
  Description of Artificial Sequence: Synthetic oligonucleotide
ugcauaugaugggaacuga

SEQ ID NO: 311200 - RNA, 19 nt, Artificial Sequence
  Description of Artificial Sequence: Synthetic oligonucleotide
caaccuaguuaaaugggaa

SEQ ID NO: 311201 - RNA, 19 nt, Artificial Sequence
  Description of Artificial Sequence: Synthetic oligonucleotide
cuaaucacuuggcacugca

SEQ ID NO: 311202 - RNA, 19 nt, Artificial Sequence
  Description of Artificial Sequence: Synthetic oligonucleotide
cucuuguaugaaccuccgg

SEQ ID NO: 311203 - RNA, 19 nt, Artificial Sequence
  Description of Artificial Sequence: Synthetic oligonucleotide
ccuacacuaaucacuuggc

SEQ ID NO: 311204 - RNA, 19 nt, Artificial Sequence
  Description of Artificial Sequence: Synthetic oligonucleotide
acucuuguaugaaccuccg

SEQ ID NO: 311205 - RNA, 19 nt, Artificial Sequence
  Description of Artificial Sequence: Synthetic oligonucleotide
ccuccaauauacccuaagc

SEQ ID NO: 311206 - RNA, 19 nt, Artificial Sequence
  Description of Artificial Sequence: Synthetic oligonucleotide
gucauaaaacaccuacacu

SEQ ID NO: 311207 - RNA, 19 nt, Artificial Sequence
  Description of Artificial Sequence: Synthetic oligonucleotide
uuguuucacaaugcauugu

SEQ ID NO: 311208 - RNA, 19 nt, Artificial Sequence
  Description of Artificial Sequence: Synthetic oligonucleotide
cacauugguguaucaucug

SEQ ID NO: 311209 - RNA, 19 nt, Artificial Sequence
  Description of Artificial Sequence: Synthetic oligonucleotide
cuacacuaaucacuuggca

SEQ ID NO: 311210 - RNA, 19 nt, Artificial Sequence
  Description of Artificial Sequence: Synthetic oligonucleotide
ucgugaggaccuuuaggaa

SEQ ID NO: 311211 - RNA, 19 nt, Artificial Sequence
  Description of Artificial Sequence: Synthetic oligonucleotide
uuggcuugguuagggacga

SEQ ID NO: 311212 - RNA, 19 nt, Artificial Sequence
  Description of Artificial Sequence: Synthetic oligonucleotide
caaauugacgacuaaucuu

SEQ ID NO: 311213 - RNA, 19 nt, Artificial Sequence
  Description of Artificial Sequence: Synthetic oligonucleotide
augacucuagcuaauccau

SEQ ID NO: 311214 - RNA, 19 nt, Artificial Sequence
  Description of Artificial Sequence: Synthetic oligonucleotide
gcauugaagucuaaaugug

SEQ ID NO: 311215 - RNA, 19 nt, Artificial Sequence
  Description of Artificial Sequence: Synthetic oligonucleotide
acacuuaaguuagggagaa

SEQ ID NO: 311216 - RNA, 19 nt, Artificial Sequence
  Description of Artificial Sequence: Synthetic oligonucleotide
uucauguagcugagucacu

SEQ ID NO: 311217 - RNA, 19 nt, Artificial Sequence
  Description of Artificial Sequence: Synthetic oligonucleotide
accuccggcauugaagucu

SEQ ID NO: 311218 - RNA, 19 nt, Artificial Sequence
  Description of Artificial Sequence: Synthetic oligonucleotide
uuaguaugugaagcugaaa

SEQ ID NO: 311219 - RNA, 19 nt, Artificial Sequence
  Description of Artificial Sequence: Synthetic oligonucleotide
agaugauuucucaaugauu

SEQ ID NO: 311220 - RNA, 19 nt, Artificial Sequence
  Description of Artificial Sequence: Synthetic oligonucleotide
gagucguauaaaauguacu

SEQ ID NO: 311221 - RNA, 19 nt, Artificial Sequence
  Description of Artificial Sequence: Synthetic oligonucleotide
aauggaagucaaagucuaa

SEQ ID NO: 311222 - RNA, 19 nt, Artificial Sequence
  Description of Artificial Sequence: Synthetic oligonucleotide
gcaugcaguuucaacagcc

SEQ ID NO: 311223 - RNA, 19 nt, Artificial Sequence
  Description of Artificial Sequence: Synthetic oligonucleotide
cgugacacuugguagaaac

SEQ ID NO: 311224 - RNA, 19 nt, Artificial Sequence
  Description of Artificial Sequence: Synthetic oligonucleotide
gucuauucauuacucuuua

SEQ ID NO: 311225 - RNA, 19 nt, Artificial Sequence
  Description of Artificial Sequence: Synthetic oligonucleotide
aaccagcuuaacuguucaa

SEQ ID NO: 311226 - RNA, 19 nt, Artificial Sequence
  Description of Artificial Sequence: Synthetic oligonucleotide
acucaauuccccaauuguu

SEQ ID NO: 311227 - RNA, 19 nt, Artificial Sequence
  Description of Artificial Sequence: Synthetic oligonucleotide
acaccuacacuaaucacuu

SEQ ID NO: 311228 - RNA, 19 nt, Artificial Sequence
  Description of Artificial Sequence: Synthetic oligonucleotide
uaugaucccuuaccacuuu

SEQ ID NO: 311229 - RNA, 19 nt, Artificial Sequence
  Description of Artificial Sequence: Synthetic oligonucleotide
acgaagcaggauacggcac

SEQ ID NO: 311230 - RNA, 19 nt, Artificial Sequence
  Description of Artificial Sequence: Synthetic oligonucleotide
augcaccgucgcugcaucc

SEQ ID NO: 311231 - RNA, 19 nt, Artificial Sequence
  Description of Artificial Sequence: Synthetic oligonucleotide
uguggucagagagcauuga

SEQ ID NO: 311232 - RNA, 19 nt, Artificial Sequence
  Description of Artificial Sequence: Synthetic oligonucleotide
uucgugacacuugguagaa

SEQ ID NO: 311233 - RNA, 19 nt, Artificial Sequence
  Description of Artificial Sequence: Synthetic oligonucleotide
gaugcaccgucgcugcauc

SEQ ID NO: 311234 - RNA, 19 nt, Artificial Sequence
  Description of Artificial Sequence: Synthetic oligonucleotide
caagcuucaucaaggauau

SEQ ID NO: 311235 - RNA, 19 nt, Artificial Sequence
  Description of Artificial Sequence: Synthetic oligonucleotide
uuguugcauacagucugca

SEQ ID NO: 311236 - RNA, 19 nt, Artificial Sequence
  Description of Artificial Sequence: Synthetic oligonucleotide
caccauagcaacaaugcau

SEQ ID NO: 311237 - RNA, 19 nt, Artificial Sequence
  Description of Artificial Sequence: Synthetic oligonucleotide
guggaauugccaacacagc

SEQ ID NO: 311238 - RNA, 19 nt, Artificial Sequence
  Description of Artificial Sequence: Synthetic oligonucleotide
ccugaaauaacucuuguau

SEQ ID NO: 311239 - RNA, 19 nt, Artificial Sequence
  Description of Artificial Sequence: Synthetic oligonucleotide
caaccagcuuaacuguuca

SEQ ID NO: 311240 - RNA, 19 nt, Artificial Sequence
  Description of Artificial Sequence: Synthetic oligonucleotide
caggcaucaguagcugccg

SEQ ID NO: 311241 - RNA, 19 nt, Artificial Sequence
  Description of Artificial Sequence: Synthetic oligonucleotide
caacucaaugaaauauucu

SEQ ID NO: 311242 - RNA, 19 nt, Artificial Sequence
  Description of Artificial Sequence: Synthetic oligonucleotide
caucaguagcugccgugag

SEQ ID NO: 311243 - RNA, 19 nt, Artificial Sequence
  Description of Artificial Sequence: Synthetic oligonucleotide
cacuaaucacuuggcacug

SEQ ID NO: 311244 - RNA, 19 nt, Artificial Sequence
  Description of Artificial Sequence: Synthetic oligonucleotide
gucagagagcauugaaucu

SEQ ID NO: 311245 - RNA, 19 nt, Artificial Sequence
  Description of Artificial Sequence: Synthetic oligonucleotide
aaguuagggagaacacuuu

SEQ ID NO: 311246 - RNA, 19 nt, Artificial Sequence
  Description of Artificial Sequence: Synthetic oligonucleotide
ugcaccgucgcugcaucca

SEQ ID NO: 311247 - RNA, 19 nt, Artificial Sequence
  Description of Artificial Sequence: Synthetic oligonucleotide
guagagucaaaugugcaau

SEQ ID NO: 311248 - RNA, 19 nt, Artificial Sequence
  Description of Artificial Sequence: Synthetic oligonucleotide
uccggcauugaagucuaaa

SEQ ID NO: 311249 - RNA, 19 nt, Artificial Sequence
  Description of Artificial Sequence: Synthetic oligonucleotide
caggauacggcacauuggu

SEQ ID NO: 311250 - RNA, 19 nt, Artificial Sequence
  Description of Artificial Sequence: Synthetic oligonucleotide
uagcagcguauuacuaaua

SEQ ID NO: 311251 - RNA, 19 nt, Artificial Sequence
  Description of Artificial Sequence: Synthetic oligonucleotide
guagcagcguauuacuaau

SEQ ID NO: 311252 - RNA, 19 nt, Artificial Sequence
  Description of Artificial Sequence: Synthetic oligonucleotide
ggaugucuauucauuacuc

SEQ ID NO: 311253 - RNA, 19 nt, Artificial Sequence
  Description of Artificial Sequence: Synthetic oligonucleotide
ggguguuugguggaauugc

SEQ ID NO: 311254 - RNA, 19 nt, Artificial Sequence
  Description of Artificial Sequence: Synthetic oligonucleotide
cucuagcuaauccaucucu

SEQ ID NO: 311255 - RNA, 19 nt, Artificial Sequence
  Description of Artificial Sequence: Synthetic oligonucleotide
gcaggauacggcacauugg

SEQ ID NO: 311256 - RNA, 19 nt, Artificial Sequence
  Description of Artificial Sequence: Synthetic oligonucleotide
gaacccggagaaggguucc

SEQ ID NO: 311257 - RNA, 19 nt, Artificial Sequence
  Description of Artificial Sequence: Synthetic oligonucleotide
acauucugugagucguaua

SEQ ID NO: 311258 - RNA, 19 nt, Artificial Sequence
  Description of Artificial Sequence: Synthetic oligonucleotide
auucugugagucguauaaa

SEQ ID NO: 311259 - RNA, 19 nt, Artificial Sequence
  Description of Artificial Sequence: Synthetic oligonucleotide
ggcaucaguagcugccgug

SEQ ID NO: 311260 - RNA, 19 nt, Artificial Sequence
  Description of Artificial Sequence: Synthetic oligonucleotide
cacaaugcauuguuagggu

SEQ ID NO: 311261 - RNA, 19 nt, Artificial Sequence
  Description of Artificial Sequence: Synthetic oligonucleotide
gaggaaucccacauucugu

SEQ ID NO: 311262 - RNA, 19 nt, Artificial Sequence
  Description of Artificial Sequence: Synthetic oligonucleotide
aguucauuacaagcagcuu

SEQ ID NO: 311263 - RNA, 19 nt, Artificial Sequence
  Description of Artificial Sequence: Synthetic oligonucleotide
aauugccaacacagccucu

SEQ ID NO: 311264 - RNA, 19 nt, Artificial Sequence
  Description of Artificial Sequence: Synthetic oligonucleotide
gggaugucuauucauuacu

SEQ ID NO: 311265 - RNA, 19 nt, Artificial Sequence
  Description of Artificial Sequence: Synthetic oligonucleotide
cagggaugucuauucauua

SEQ ID NO: 311266 - RNA, 19 nt, Artificial Sequence
  Description of Artificial Sequence: Synthetic oligonucleotide
acgacuaaucuuagcacuu

SEQ ID NO: 311267 - RNA, 19 nt, Artificial Sequence
  Description of Artificial Sequence: Synthetic oligonucleotide
augaucccuuaccacuuuu

SEQ ID NO: 311268 - RNA, 19 nt, Artificial Sequence
  Description of Artificial Sequence: Synthetic oligonucleotide
ggaaguuggcuugguuagg

SEQ ID NO: 311269 - RNA, 19 nt, Artificial Sequence
  Description of Artificial Sequence: Synthetic oligonucleotide
accuuacuuccaaaauaca

SEQ ID NO: 311270 - RNA, 19 nt, Artificial Sequence
  Description of Artificial Sequence: Synthetic oligonucleotide
cauuccuaaucugcuacaa

SEQ ID NO: 311271 - RNA, 19 nt, Artificial Sequence
  Description of Artificial Sequence: Synthetic oligonucleotide
gugucuagcuauacacauc

SEQ ID NO: 311272 - RNA, 19 nt, Artificial Sequence
  Description of Artificial Sequence: Synthetic oligonucleotide
gagcauugaaucugagauu

SEQ ID NO: 311273 - RNA, 19 nt, Artificial Sequence
  Description of Artificial Sequence: Synthetic oligonucleotide
ggaauugccaacacagccu

SEQ ID NO: 311274 - RNA, 19 nt, Artificial Sequence
  Description of Artificial Sequence: Synthetic oligonucleotide
caccuacacuaaucacuug

SEQ ID NO: 311275 - RNA, 19 nt, Artificial Sequence
  Description of Artificial Sequence: Synthetic oligonucleotide
gguuccuaacagggaagag

SEQ ID NO: 311276 - RNA, 19 nt, Artificial Sequence
  Description of Artificial Sequence: Synthetic oligonucleotide
acuuggcacugcauguagu

SEQ ID NO: 311277 - RNA, 19 nt, Artificial Sequence
  Description of Artificial Sequence: Synthetic oligonucleotide
acggcacauugguguauca

SEQ ID NO: 311278 - RNA, 19 nt, Artificial Sequence
  Description of Artificial Sequence: Synthetic oligonucleotide
gcagcguauuacuaauaaa

SEQ ID NO: 311279 - RNA, 19 nt, Artificial Sequence
  Description of Artificial Sequence: Synthetic oligonucleotide
ggggaaaccuuacuuccaa

SEQ ID NO: 311280 - RNA, 19 nt, Artificial Sequence
  Description of Artificial Sequence: Synthetic oligonucleotide
agggacgacagcaguugca

SEQ ID NO: 311281 - RNA, 19 nt, Artificial Sequence
  Description of Artificial Sequence: Synthetic oligonucleotide
gugagucguauaaaaugua

SEQ ID NO: 311282 - RNA, 19 nt, Artificial Sequence
  Description of Artificial Sequence: Synthetic oligonucleotide
gccaaaccauuuugggaac

SEQ ID NO: 311283 - RNA, 19 nt, Artificial Sequence
  Description of Artificial Sequence: Synthetic oligonucleotide
aacccggagaaggguuccu

SEQ ID NO: 311284 - RNA, 19 nt, Artificial Sequence
  Description of Artificial Sequence: Synthetic oligonucleotide
ugaggaccuuuaggaaauc

SEQ ID NO: 311285 - RNA, 19 nt, Artificial Sequence
  Description of Artificial Sequence: Synthetic oligonucleotide
uggcagaguuauccaccua

SEQ ID NO: 311286 - RNA, 19 nt, Artificial Sequence
  Description of Artificial Sequence: Synthetic oligonucleotide
gugaggaccuuuaggaaau

SEQ ID NO: 311287 - RNA, 19 nt, Artificial Sequence
  Description of Artificial Sequence: Synthetic oligonucleotide
gcacauugguguaucaucu

SEQ ID NO: 311288 - RNA, 19 nt, Artificial Sequence
  Description of Artificial Sequence: Synthetic oligonucleotide
cacuuaaguuagggagaac

SEQ ID NO: 311289 - RNA, 19 nt, Artificial Sequence
  Description of Artificial Sequence: Synthetic oligonucleotide
ccggagaaggguuccuaac

SEQ ID NO: 311290 - RNA, 19 nt, Artificial Sequence
  Description of Artificial Sequence: Synthetic oligonucleotide
ccuaaucugcuacaauuua

SEQ ID NO: 311291 - RNA, 19 nt, Artificial Sequence
  Description of Artificial Sequence: Synthetic oligonucleotide
cuagaccaaccuaguuaaa

SEQ ID NO: 311292 - RNA, 19 nt, Artificial Sequence
  Description of Artificial Sequence: Synthetic oligonucleotide
guuccaccgccauuaugcu

SEQ ID NO: 311293 - RNA, 19 nt, Artificial Sequence
  Description of Artificial Sequence: Synthetic oligonucleotide
cgugaggaccuuuaggaaa

SEQ ID NO: 311294 - RNA, 19 nt, Artificial Sequence
  Description of Artificial Sequence: Synthetic oligonucleotide
gguuagggacgacagcagu

SEQ ID NO: 311295 - RNA, 19 nt, Artificial Sequence
  Description of Artificial Sequence: Synthetic oligonucleotide
ggguuccuaacagggaaga

SEQ ID NO: 311296 - RNA, 19 nt, Artificial Sequence
  Description of Artificial Sequence: Synthetic oligonucleotide
gugacacuugguagaaacu

SEQ ID NO: 311297 - RNA, 19 nt, Artificial Sequence
  Description of Artificial Sequence: Synthetic oligonucleotide
ggcuugguuagggacgaca

SEQ ID NO: 311298 - RNA, 19 nt, Artificial Sequence
  Description of Artificial Sequence: Synthetic oligonucleotide
gcaccgucgcugcauccag

SEQ ID NO: 311299 - RNA, 19 nt, Artificial Sequence
  Description of Artificial Sequence: Synthetic oligonucleotide
aagcaggauacggcacauu

SEQ ID NO: 311300 - RNA, 19 nt, Artificial Sequence
  Description of Artificial Sequence: Synthetic oligonucleotide
ccuugcaauaucacugucu

SEQ ID NO: 311301 - RNA, 19 nt, Artificial Sequence
  Description of Artificial Sequence: Synthetic oligonucleotide
gaaaaccuauguagguauu

SEQ ID NO: 311302 - RNA, 19 nt, Artificial Sequence
  Description of Artificial Sequence: Synthetic oligonucleotide
guuagggacgacagcaguu

SEQ ID NO: 311303 - RNA, 19 nt, Artificial Sequence
  Description of Artificial Sequence: Synthetic oligonucleotide
ccuuauuugucaguauuua

SEQ ID NO: 311304 - RNA, 19 nt, Artificial Sequence
  Description of Artificial Sequence: Synthetic oligonucleotide
ucgugacacuugguagaaa

SEQ ID NO: 311305 - RNA, 19 nt, Artificial Sequence
  Description of Artificial Sequence: Synthetic oligonucleotide
gggaaaccuuacuuccaaa

SEQ ID NO: 311306 - RNA, 19 nt, Artificial Sequence
  Description of Artificial Sequence: Synthetic oligonucleotide
aggaggcuuuaaugccuua

SEQ ID NO: 311307 - RNA, 19 nt, Artificial Sequence
  Description of Artificial Sequence: Synthetic oligonucleotide
cagaaaucccugagaacuu

SEQ ID NO: 311308 - RNA, 19 nt, Artificial Sequence
  Description of Artificial Sequence: Synthetic oligonucleotide
ccucucucaaagcucugga

SEQ ID NO: 311309 - RNA, 19 nt, Artificial Sequence
  Description of Artificial Sequence: Synthetic oligonucleotide
cuaauccaucucugcuaua

SEQ ID NO: 311310 - RNA, 19 nt, Artificial Sequence
  Description of Artificial Sequence: Synthetic oligonucleotide
auacuccaaaggggaggaa

SEQ ID NO: 311311 - RNA, 19 nt, Artificial Sequence
  Description of Artificial Sequence: Synthetic oligonucleotide
cgaacccggagaaggguuc

SEQ ID NO: 311312 - RNA, 19 nt, Artificial Sequence
  Description of Artificial Sequence: Synthetic oligonucleotide
ccccaauuguugaagaauu

SEQ ID NO: 311313 - RNA, 19 nt, Artificial Sequence
  Description of Artificial Sequence: Synthetic oligonucleotide
gcaacaaugcaugcaguuu

SEQ ID NO: 311314 - RNA, 19 nt, Artificial Sequence
  Description of Artificial Sequence: Synthetic oligonucleotide
cacauucugugagucguau

SEQ ID NO: 311315 - RNA, 19 nt, Artificial Sequence
  Description of Artificial Sequence: Synthetic oligonucleotide
ccggcauugaagucuaaau

SEQ ID NO: 311316 - RNA, 19 nt, Artificial Sequence
  Description of Artificial Sequence: Synthetic oligonucleotide
caccgucgcugcauccaga

SEQ ID NO: 311317 - RNA, 19 nt, Artificial Sequence
  Description of Artificial Sequence: Synthetic oligonucleotide
acccggagaaggguuccua

SEQ ID NO: 311318 - RNA, 19 nt, Artificial Sequence
  Description of Artificial Sequence: Synthetic oligonucleotide
cuguuucgugacacuuggu

SEQ ID NO: 311319 - RNA, 19 nt, Artificial Sequence
  Description of Artificial Sequence: Synthetic oligonucleotide
cgacuaaucuuagcacuuc

SEQ ID NO: 311320 - RNA, 19 nt, Artificial Sequence
  Description of Artificial Sequence: Synthetic oligonucleotide
cuauuaccauugacaucau

SEQ ID NO: 311321 - RNA, 19 nt, Artificial Sequence
  Description of Artificial Sequence: Synthetic oligonucleotide
guguaucaucuggaauggu

SEQ ID NO: 311322 - RNA, 19 nt, Artificial Sequence
  Description of Artificial Sequence: Synthetic oligonucleotide
caguugcagcuguucugua

SEQ ID NO: 311323 - RNA, 19 nt, Artificial Sequence
  Description of Artificial Sequence: Synthetic oligonucleotide
uggcuugguuagggacgac

SEQ ID NO: 311324 - RNA, 19 nt, Artificial Sequence
  Description of Artificial Sequence: Synthetic oligonucleotide
cccggagaaggguuccuaa

SEQ ID NO: 311325 - RNA, 19 nt, Artificial Sequence
  Description of Artificial Sequence: Synthetic oligonucleotide
ccuccggcauugaagucua

SEQ ID NO: 311326 - RNA, 19 nt, Artificial Sequence
  Description of Artificial Sequence: Synthetic oligonucleotide
ccugagaugcaccgucgcu

SEQ ID NO: 311327 - RNA, 19 nt, Artificial Sequence
  Description of Artificial Sequence: Synthetic oligonucleotide
gucuagcuauacacaucau

SEQ ID NO: 311328 - RNA, 19 nt, Artificial Sequence
  Description of Artificial Sequence: Synthetic oligonucleotide
uagcugccgugaggauuuu

SEQ ID NO: 311329 - RNA, 19 nt, Artificial Sequence
  Description of Artificial Sequence: Synthetic oligonucleotide
cuccggcauugaagucuaa

SEQ ID NO: 311330 - RNA, 19 nt, Artificial Sequence
  Description of Artificial Sequence: Synthetic oligonucleotide
caguagcugccgugaggau

SEQ ID NO: 311331 - RNA, 19 nt, Artificial Sequence
  Description of Artificial Sequence: Synthetic oligonucleotide
ccgucgcugcauccagaaa

SEQ ID NO: 311332 - RNA, 19 nt, Artificial Sequence
  Description of Artificial Sequence: Synthetic oligonucleotide
aauauaacgaacuggucgc

SEQ ID NO: 311333 - RNA, 19 nt, Artificial Sequence
  Description of Artificial Sequence: Synthetic oligonucleotide
aaugccuccauuuagugac

SEQ ID NO: 311334 - RNA, 19 nt, Artificial Sequence
  Description of Artificial Sequence: Synthetic oligonucleotide
uuuaacauuauuagcaagg

SEQ ID NO: 311335 - RNA, 19 nt, Artificial Sequence
  Description of Artificial Sequence: Synthetic oligonucleotide
gaauauaacgaacuggucg

SEQ ID NO: 311336 - RNA, 19 nt, Artificial Sequence
  Description of Artificial Sequence: Synthetic oligonucleotide
aacauuauuagcaaggauc

SEQ ID NO: 311337 - RNA, 19 nt, Artificial Sequence
  Description of Artificial Sequence: Synthetic oligonucleotide
aaaauuccuaauaucaacc

SEQ ID NO: 311338 - RNA, 19 nt, Artificial Sequence
  Description of Artificial Sequence: Synthetic oligonucleotide
uguagaacuaaauacaaug

SEQ ID NO: 311339 - RNA, 19 nt, Artificial Sequence
  Description of Artificial Sequence: Synthetic oligonucleotide
uauacauggcaucuaaucg

SEQ ID NO: 311340 - RNA, 19 nt, Artificial Sequence
  Description of Artificial Sequence: Synthetic oligonucleotide
ugcacuuaaacuuaaagca

SEQ ID NO: 311341 - RNA, 19 nt, Artificial Sequence
  Description of Artificial Sequence: Synthetic oligonucleotide
auucauaacucccucauac

SEQ ID NO: 311342 - RNA, 19 nt, Artificial Sequence
  Description of Artificial Sequence: Synthetic oligonucleotide
uacucugugauauaagugg

SEQ ID NO: 311343 - RNA, 19 nt, Artificial Sequence
  Description of Artificial Sequence: Synthetic oligonucleotide
ucucaauaaaacaaggagc

SEQ ID NO: 311344 - RNA, 19 nt, Artificial Sequence
  Description of Artificial Sequence: Synthetic oligonucleotide
aaaauuguguagucaauag

SEQ ID NO: 311345 - RNA, 19 nt, Artificial Sequence
  Description of Artificial Sequence: Synthetic oligonucleotide
ugugaaauaugguugauug

SEQ ID NO: 311346 - RNA, 19 nt, Artificial Sequence
  Description of Artificial Sequence: Synthetic oligonucleotide
aaauuccuaauaucaaccg

SEQ ID NO: 311347 - RNA, 19 nt, Artificial Sequence
  Description of Artificial Sequence: Synthetic oligonucleotide
uuagauagcaagcucaaug

SEQ ID NO: 311348 - RNA, 19 nt, Artificial Sequence
  Description of Artificial Sequence: Synthetic oligonucleotide
auuagcaaggaucauuuac

SEQ ID NO: 311349 - RNA, 19 nt, Artificial Sequence
  Description of Artificial Sequence: Synthetic oligonucleotide
auacauggcaucuaaucgc

SEQ ID NO: 311350 - RNA, 19 nt, Artificial Sequence
  Description of Artificial Sequence: Synthetic oligonucleotide
uaaacgaagauuauuucca

SEQ ID NO: 311351 - RNA, 19 nt, Artificial Sequence
  Description of Artificial Sequence: Synthetic oligonucleotide
uuuucgaauauaacgaacu

SEQ ID NO: 311352 - RNA, 19 nt, Artificial Sequence
  Description of Artificial Sequence: Synthetic oligonucleotide
aucuaaucgcaucuaaccc

SEQ ID NO: 311353 - RNA, 19 nt, Artificial Sequence
  Description of Artificial Sequence: Synthetic oligonucleotide
aaaacaagcacucuugaua

SEQ ID NO: 311354 - RNA, 19 nt, Artificial Sequence
  Description of Artificial Sequence: Synthetic oligonucleotide
ggugcaauaaucuuguggg

SEQ ID NO: 311355 - RNA, 19 nt, Artificial Sequence
  Description of Artificial Sequence: Synthetic oligonucleotide
ucgaauauaacgaacuggu

SEQ ID NO: 311356 - RNA, 19 nt, Artificial Sequence
  Description of Artificial Sequence: Synthetic oligonucleotide
uuaaaagucuccaaucacu

SEQ ID NO: 311357 - RNA, 19 nt, Artificial Sequence
  Description of Artificial Sequence: Synthetic oligonucleotide
uaauacuagggauaaacca

SEQ ID NO: 311358 - RNA, 19 nt, Artificial Sequence
  Description of Artificial Sequence: Synthetic oligonucleotide
uucagcauaaggaucacug

SEQ ID NO: 311359 - RNA, 19 nt, Artificial Sequence
  Description of Artificial Sequence: Synthetic oligonucleotide
uuaauacuagggauaaacc

SEQ ID NO: 311360 - RNA, 19 nt, Artificial Sequence
  Description of Artificial Sequence: Synthetic oligonucleotide
aaugugggaagaccugacc

SEQ ID NO: 311361 - RNA, 19 nt, Artificial Sequence
  Description of Artificial Sequence: Synthetic oligonucleotide
ucuuuguaaaaucccauca

SEQ ID NO: 311362 - RNA, 19 nt, Artificial Sequence
  Description of Artificial Sequence: Synthetic oligonucleotide
cuugcuaaggauugggugg

SEQ ID NO: 311363 - RNA, 19 nt, Artificial Sequence
  Description of Artificial Sequence: Synthetic oligonucleotide
cuaaaucagacauuucagg

SEQ ID NO: 311364 - RNA, 19 nt, Artificial Sequence
  Description of Artificial Sequence: Synthetic oligonucleotide
acgaagauuauuuccacuc

SEQ ID NO: 311365 - RNA, 19 nt, Artificial Sequence
  Description of Artificial Sequence: Synthetic oligonucleotide
auaaaaggggccuccauuc

SEQ ID NO: 311366 - RNA, 19 nt, Artificial Sequence
  Description of Artificial Sequence: Synthetic oligonucleotide
uacguaaucauuugguacc

SEQ ID NO: 311367 - RNA, 19 nt, Artificial Sequence
  Description of Artificial Sequence: Synthetic oligonucleotide
aaacgaagauuauuuccac

SEQ ID NO: 311368 - RNA, 19 nt, Artificial Sequence
  Description of Artificial Sequence: Synthetic oligonucleotide
guaaacgaagauuauuucc

SEQ ID NO: 311369 - RNA, 19 nt, Artificial Sequence
  Description of Artificial Sequence: Synthetic oligonucleotide
uguuuaucagauaugcaac

SEQ ID NO: 311370 - RNA, 19 nt, Artificial Sequence
  Description of Artificial Sequence: Synthetic oligonucleotide
aucacuacaggccuggcuc

SEQ ID NO: 311371 - RNA, 19 nt, Artificial Sequence
  Description of Artificial Sequence: Synthetic oligonucleotide
caucuaaucgcaucuaacc

SEQ ID NO: 311372 - RNA, 19 nt, Artificial Sequence
  Description of Artificial Sequence: Synthetic oligonucleotide
uagagauucucaauaaaac

SEQ ID NO: 311373 - RNA, 19 nt, Artificial Sequence
  Description of Artificial Sequence: Synthetic oligonucleotide
ucauuaguuucacugggag

SEQ ID NO: 311374 - RNA, 19 nt, Artificial Sequence
  Description of Artificial Sequence: Synthetic oligonucleotide
uuugauucacagaagcugu

SEQ ID NO: 311375 - RNA, 19 nt, Artificial Sequence
  Description of Artificial Sequence: Synthetic oligonucleotide
ucuaaucgcaucuaacccc

SEQ ID NO: 311376 - RNA, 19 nt, Artificial Sequence
  Description of Artificial Sequence: Synthetic oligonucleotide
uaugguugauugaagauuc

SEQ ID NO: 311377 - RNA, 19 nt, Artificial Sequence
  Description of Artificial Sequence: Synthetic oligonucleotide
auucuugcuacacauagcu

SEQ ID NO: 311378 - RNA, 19 nt, Artificial Sequence
  Description of Artificial Sequence: Synthetic oligonucleotide
cucaauaaaacaaggagca

SEQ ID NO: 311379 - RNA, 19 nt, Artificial Sequence
  Description of Artificial Sequence: Synthetic oligonucleotide
uucgaauauaacgaacugg

SEQ ID NO: 311380 - RNA, 19 nt, Artificial Sequence
  Description of Artificial Sequence: Synthetic oligonucleotide
aguguuaggaagugucacc

SEQ ID NO: 311381 - RNA, 19 nt, Artificial Sequence
  Description of Artificial Sequence: Synthetic oligonucleotide
aacaguguuaggaaguguc

SEQ ID NO: 311382 - RNA, 19 nt, Artificial Sequence
  Description of Artificial Sequence: Synthetic oligonucleotide
auaccaaccaucgucauuc

SEQ ID NO: 311383 - RNA, 19 nt, Artificial Sequence
  Description of Artificial Sequence: Synthetic oligonucleotide
uaucauuuuguuuuagggu

SEQ ID NO: 311384 - RNA, 19 nt, Artificial Sequence
  Description of Artificial Sequence: Synthetic oligonucleotide
ucaccuuuacuccaugucc

SEQ ID NO: 311385 - RNA, 19 nt, Artificial Sequence
  Description of Artificial Sequence: Synthetic oligonucleotide
aaccuuuuccaaguaagac

SEQ ID NO: 311386 - RNA, 19 nt, Artificial Sequence
  Description of Artificial Sequence: Synthetic oligonucleotide
ugaaauaugguugauugaa

SEQ ID NO: 311387 - RNA, 19 nt, Artificial Sequence
  Description of Artificial Sequence: Synthetic oligonucleotide
uuuagugacuuuguaaggc

SEQ ID NO: 311388 - RNA, 19 nt, Artificial Sequence
  Description of Artificial Sequence: Synthetic oligonucleotide
aaacaaggagcauaaagua

SEQ ID NO: 311389 - RNA, 19 nt, Artificial Sequence
  Description of Artificial Sequence: Synthetic oligonucleotide
aauaaaacaaggagcauaa

SEQ ID NO: 311390 - RNA, 19 nt, Artificial Sequence
  Description of Artificial Sequence: Synthetic oligonucleotide
uaaccucacaguauuaaca

SEQ ID NO: 311391 - RNA, 19 nt, Artificial Sequence
  Description of Artificial Sequence: Synthetic oligonucleotide
acuguacucaaccacagcu

SEQ ID NO: 311392 - RNA, 19 nt, Artificial Sequence
  Description of Artificial Sequence: Synthetic oligonucleotide
aauuccuaauaucaaccgu

SEQ ID NO: 311393 - RNA, 19 nt, Artificial Sequence
  Description of Artificial Sequence: Synthetic oligonucleotide
aaguuuuagaaggguaaac

SEQ ID NO: 311394 - RNA, 19 nt, Artificial Sequence
  Description of Artificial Sequence: Synthetic oligonucleotide
uccaaguaaacaguguuag

SEQ ID NO: 311395 - RNA, 19 nt, Artificial Sequence
  Description of Artificial Sequence: Synthetic oligonucleotide
uugcuuaccaguuggcagg

SEQ ID NO: 311396 - RNA, 19 nt, Artificial Sequence
  Description of Artificial Sequence: Synthetic oligonucleotide
aauacuagggauaaaccaa

SEQ ID NO: 311397 - RNA, 19 nt, Artificial Sequence
  Description of Artificial Sequence: Synthetic oligonucleotide
ggaacaaacauucguaaag

SEQ ID NO: 311398 - RNA, 19 nt, Artificial Sequence
  Description of Artificial Sequence: Synthetic oligonucleotide
aucuuuguaaaaucccauc

SEQ ID NO: 311399 - RNA, 19 nt, Artificial Sequence
  Description of Artificial Sequence: Synthetic oligonucleotide
uaaggcucucauaaguaag

SEQ ID NO: 311400 - RNA, 19 nt, Artificial Sequence
  Description of Artificial Sequence: Synthetic oligonucleotide
agucacgccauucauaacu

SEQ ID NO: 311401 - RNA, 19 nt, Artificial Sequence
  Description of Artificial Sequence: Synthetic oligonucleotide
uaugcaacacuugcuaagg

SEQ ID NO: 311402 - RNA, 19 nt, Artificial Sequence
  Description of Artificial Sequence: Synthetic oligonucleotide
ugauuccaaguaaacagug

SEQ ID NO: 311403 - RNA, 19 nt, Artificial Sequence
  Description of Artificial Sequence: Synthetic oligonucleotide
uuucgaauauaacgaacug

SEQ ID NO: 311404 - RNA, 19 nt, Artificial Sequence
  Description of Artificial Sequence: Synthetic oligonucleotide
cauaucuuuucaaguauag

SEQ ID NO: 311405 - RNA, 19 nt, Artificial Sequence
  Description of Artificial Sequence: Synthetic oligonucleotide
cuucauuaguuucacuggg

SEQ ID NO: 311406 - RNA, 19 nt, Artificial Sequence
  Description of Artificial Sequence: Synthetic oligonucleotide
aguuccaaaauuuuaugau

SEQ ID NO: 311407 - RNA, 19 nt, Artificial Sequence
  Description of Artificial Sequence: Synthetic oligonucleotide
ucugugauauaagugggag

SEQ ID NO: 311408 - RNA, 19 nt, Artificial Sequence
  Description of Artificial Sequence: Synthetic oligonucleotide
auaaggaucacuguacuca

SEQ ID NO: 311409 - RNA, 19 nt, Artificial Sequence
  Description of Artificial Sequence: Synthetic oligonucleotide
auaugcaacacuugcuaag

SEQ ID NO: 311410 - RNA, 19 nt, Artificial Sequence
  Description of Artificial Sequence: Synthetic oligonucleotide
ugugcugagcuuuacucag

SEQ ID NO: 311411 - RNA, 19 nt, Artificial Sequence
  Description of Artificial Sequence: Synthetic oligonucleotide
uuaucagauaugcaacacu

SEQ ID NO: 311412 - RNA, 19 nt, Artificial Sequence
  Description of Artificial Sequence: Synthetic oligonucleotide
uuagaaggguaaacgaaga

SEQ ID NO: 311413 - RNA, 19 nt, Artificial Sequence
  Description of Artificial Sequence: Synthetic oligonucleotide
aaggauugggugguguagc

SEQ ID NO: 311414 - RNA, 19 nt, Artificial Sequence
  Description of Artificial Sequence: Synthetic oligonucleotide
agggauaaaccaaacauag

SEQ ID NO: 311415 - RNA, 19 nt, Artificial Sequence
  Description of Artificial Sequence: Synthetic oligonucleotide
ucauuuacaguuaggcccu

SEQ ID NO: 311416 - RNA, 19 nt, Artificial Sequence
  Description of Artificial Sequence: Synthetic oligonucleotide
cuuuguaaaaucccaucag

SEQ ID NO: 311417 - RNA, 19 nt, Artificial Sequence
  Description of Artificial Sequence: Synthetic oligonucleotide
ucccucauaccaaccaucg

SEQ ID NO: 311418 - RNA, 19 nt, Artificial Sequence
  Description of Artificial Sequence: Synthetic oligonucleotide
ucuuuucaaguauaguccu

SEQ ID NO: 311419 - RNA, 19 nt, Artificial Sequence
  Description of Artificial Sequence: Synthetic oligonucleotide
agauuauuuccacucaggu

SEQ ID NO: 311420 - RNA, 19 nt, Artificial Sequence
  Description of Artificial Sequence: Synthetic oligonucleotide
uuguaaggcucucauaagu

SEQ ID NO: 311421 - RNA, 19 nt, Artificial Sequence
  Description of Artificial Sequence: Synthetic oligonucleotide
gagggagccauauuacggg

SEQ ID NO: 311422 - RNA, 19 nt, Artificial Sequence
  Description of Artificial Sequence: Synthetic oligonucleotide
ucuuauacauggcaucuaa

SEQ ID NO: 311423 - RNA, 19 nt, Artificial Sequence
  Description of Artificial Sequence: Synthetic oligonucleotide
ucaaccuaccauuucuuca

SEQ ID NO: 311424 - RNA, 19 nt, Artificial Sequence
  Description of Artificial Sequence: Synthetic oligonucleotide
agaccugaccuccugaaag

SEQ ID NO: 311425 - RNA, 19 nt, Artificial Sequence
  Description of Artificial Sequence: Synthetic oligonucleotide
uuaucuuauacauggcauc

SEQ ID NO: 311426 - RNA, 19 nt, Artificial Sequence
  Description of Artificial Sequence: Synthetic oligonucleotide
aggagcauaaaguaaacuu

SEQ ID NO: 311427 - RNA, 19 nt, Artificial Sequence
  Description of Artificial Sequence: Synthetic oligonucleotide
ucauaaguaaggcugugua

SEQ ID NO: 311428 - RNA, 19 nt, Artificial Sequence
  Description of Artificial Sequence: Synthetic oligonucleotide
guguuuaucagauaugcaa

SEQ ID NO: 311429 - RNA, 19 nt, Artificial Sequence
  Description of Artificial Sequence: Synthetic oligonucleotide
cauuuguaggacauuguug

SEQ ID NO: 311430 - RNA, 19 nt, Artificial Sequence
  Description of Artificial Sequence: Synthetic oligonucleotide
guugcuuaccaguuggcag

SEQ ID NO: 311431 - RNA, 19 nt, Artificial Sequence
  Description of Artificial Sequence: Synthetic oligonucleotide
aagauaaaagcaagcuauc

SEQ ID NO: 311432 - RNA, 19 nt, Artificial Sequence
  Description of Artificial Sequence: Synthetic oligonucleotide
uaaaagucuccaaucacua

SEQ ID NO: 311433 - RNA, 19 nt, Artificial Sequence
  Description of Artificial Sequence: Synthetic oligonucleotide
uuuguaaggcucucauaag

SEQ ID NO: 311434 - RNA, 19 nt, Artificial Sequence
  Description of Artificial Sequence: Synthetic oligonucleotide
uacggguugggcuagguac

SEQ ID NO: 311435 - RNA, 19 nt, Artificial Sequence
  Description of Artificial Sequence: Synthetic oligonucleotide
aacgaagauuauuuccacu

SEQ ID NO: 311436 - RNA, 19 nt, Artificial Sequence
  Description of Artificial Sequence: Synthetic oligonucleotide
aaucgcaucuaaccccauc

SEQ ID NO: 311437 - RNA, 19 nt, Artificial Sequence
  Description of Artificial Sequence: Synthetic oligonucleotide
uaaagacaaugaaaacuga

SEQ ID NO: 311438 - RNA, 19 nt, Artificial Sequence
  Description of Artificial Sequence: Synthetic oligonucleotide
uauaaaaggggccuccauu

SEQ ID NO: 311439 - RNA, 19 nt, Artificial Sequence
  Description of Artificial Sequence: Synthetic oligonucleotide
guacguaaucauuugguac

SEQ ID NO: 311440 - RNA, 19 nt, Artificial Sequence
  Description of Artificial Sequence: Synthetic oligonucleotide
aagauuuggcagucaaccu

SEQ ID NO: 311441 - RNA, 19 nt, Artificial Sequence
  Description of Artificial Sequence: Synthetic oligonucleotide
auuaacagcaugcaaucua

SEQ ID NO: 311442 - RNA, 19 nt, Artificial Sequence
  Description of Artificial Sequence: Synthetic oligonucleotide
uacauggcaucuaaucgca

SEQ ID NO: 311443 - RNA, 19 nt, Artificial Sequence
  Description of Artificial Sequence: Synthetic oligonucleotide
auaaaagaaguaacuucac

SEQ ID NO: 311444 - RNA, 19 nt, Artificial Sequence
  Description of Artificial Sequence: Synthetic oligonucleotide
auaacaguugguacagugg

SEQ ID NO: 311445 - RNA, 19 nt, Artificial Sequence
  Description of Artificial Sequence: Synthetic oligonucleotide
uagggauaaaccaaacaua

SEQ ID NO: 311446 - RNA, 19 nt, Artificial Sequence
  Description of Artificial Sequence: Synthetic oligonucleotide
uguccaaugucaucuaaaa

SEQ ID NO: 311447 - RNA, 19 nt, Artificial Sequence
  Description of Artificial Sequence: Synthetic oligonucleotide
ugauaucuacagaaaagua

SEQ ID NO: 311448 - RNA, 19 nt, Artificial Sequence
  Description of Artificial Sequence: Synthetic oligonucleotide
gaaggguaaacgaagauua

SEQ ID NO: 311449 - RNA, 19 nt, Artificial Sequence
  Description of Artificial Sequence: Synthetic oligonucleotide
uggguacucaccuuuacuc

SEQ ID NO: 311450 - RNA, 19 nt, Artificial Sequence
  Description of Artificial Sequence: Synthetic oligonucleotide
uuacaguuaggcccuguca

SEQ ID NO: 311451 - RNA, 19 nt, Artificial Sequence
  Description of Artificial Sequence: Synthetic oligonucleotide
acuaaauacaaugcauucu

SEQ ID NO: 311452 - RNA, 19 nt, Artificial Sequence
  Description of Artificial Sequence: Synthetic oligonucleotide
uguaaggcucucauaagua

SEQ ID NO: 311453 - RNA, 19 nt, Artificial Sequence
  Description of Artificial Sequence: Synthetic oligonucleotide
ucugaugcugcuccgacua

SEQ ID NO: 311454 - RNA, 19 nt, Artificial Sequence
  Description of Artificial Sequence: Synthetic oligonucleotide
uucauuaguuucacuggga

SEQ ID NO: 311455 - RNA, 19 nt, Artificial Sequence
  Description of Artificial Sequence: Synthetic oligonucleotide
uuauaugcuucauuaguuu

SEQ ID NO: 311456 - RNA, 19 nt, Artificial Sequence
  Description of Artificial Sequence: Synthetic oligonucleotide
aaucacuacaggccuggcu

SEQ ID NO: 311457 - RNA, 19 nt, Artificial Sequence
  Description of Artificial Sequence: Synthetic oligonucleotide
agguuuucgaauauaacga

SEQ ID NO: 311458 - RNA, 19 nt, Artificial Sequence
  Description of Artificial Sequence: Synthetic oligonucleotide
cuuuacucagaauaaugca

SEQ ID NO: 311459 - RNA, 19 nt, Artificial Sequence
  Description of Artificial Sequence: Synthetic oligonucleotide
aucgcaucuaaccccauca

SEQ ID NO: 311460 - RNA, 19 nt, Artificial Sequence
  Description of Artificial Sequence: Synthetic oligonucleotide
ggaucauuuacaguuaggc

SEQ ID NO: 311461 - RNA, 19 nt, Artificial Sequence
  Description of Artificial Sequence: Synthetic oligonucleotide
acuagggauaaaccaaaca

SEQ ID NO: 311462 - RNA, 19 nt, Artificial Sequence
  Description of Artificial Sequence: Synthetic oligonucleotide
uuuaucagauaugcaacac

SEQ ID NO: 311463 - RNA, 19 nt, Artificial Sequence
  Description of Artificial Sequence: Synthetic oligonucleotide
gaagauuccauccuccgua

SEQ ID NO: 311464 - RNA, 19 nt, Artificial Sequence
  Description of Artificial Sequence: Synthetic oligonucleotide
caguguagaacuaaauaca

SEQ ID NO: 311465 - RNA, 19 nt, Artificial Sequence
  Description of Artificial Sequence: Synthetic oligonucleotide
uuuccacucagguugcacu

SEQ ID NO: 311466 - RNA, 19 nt, Artificial Sequence
  Description of Artificial Sequence: Synthetic oligonucleotide
uccuccguaacugggaugc

SEQ ID NO: 311467 - RNA, 19 nt, Artificial Sequence
  Description of Artificial Sequence: Synthetic oligonucleotide
guuuaugggcaaauaaaug

SEQ ID NO: 311468 - RNA, 19 nt, Artificial Sequence
  Description of Artificial Sequence: Synthetic oligonucleotide
agaacuaaauacaaugcau

SEQ ID NO: 311469 - RNA, 19 nt, Artificial Sequence
  Description of Artificial Sequence: Synthetic oligonucleotide
guugguacaguggagaaga

SEQ ID NO: 311470 - RNA, 19 nt, Artificial Sequence
  Description of Artificial Sequence: Synthetic oligonucleotide
uuuacaguuaggcccuguc

SEQ ID NO: 311471 - RNA, 19 nt, Artificial Sequence
  Description of Artificial Sequence: Synthetic oligonucleotide
ugguaaagcaguugcuuac

SEQ ID NO: 311472 - RNA, 19 nt, Artificial Sequence
  Description of Artificial Sequence: Synthetic oligonucleotide
aguacagcacauuuaguua

SEQ ID NO: 311473 - RNA, 19 nt, Artificial Sequence
  Description of Artificial Sequence: Synthetic oligonucleotide
ugauggacucaacauaauu

SEQ ID NO: 311474 - RNA, 19 nt, Artificial Sequence
  Description of Artificial Sequence: Synthetic oligonucleotide
auaacgaacuggucgcuca

SEQ ID NO: 311475 - RNA, 19 nt, Artificial Sequence
  Description of Artificial Sequence: Synthetic oligonucleotide
cacgccauucauaacuccc

SEQ ID NO: 311476 - RNA, 19 nt, Artificial Sequence
  Description of Artificial Sequence: Synthetic oligonucleotide
aguuuaugggcaaauaaau

SEQ ID NO: 311477 - RNA, 19 nt, Artificial Sequence
  Description of Artificial Sequence: Synthetic oligonucleotide
gguaaaacaaagguuguac

SEQ ID NO: 311478 - RNA, 19 nt, Artificial Sequence
  Description of Artificial Sequence: Synthetic oligonucleotide
aguaacuucaccauuuaua

SEQ ID NO: 311479 - RNA, 19 nt, Artificial Sequence
  Description of Artificial Sequence: Synthetic oligonucleotide
cuagguacguaaucauuug

SEQ ID NO: 311480 - RNA, 19 nt, Artificial Sequence
  Description of Artificial Sequence: Synthetic oligonucleotide
uuuggcagucaaccuacca

SEQ ID NO: 311481 - RNA, 19 nt, Artificial Sequence
  Description of Artificial Sequence: Synthetic oligonucleotide
agauaaaagcaagcuauca

SEQ ID NO: 311482 - RNA, 19 nt, Artificial Sequence
  Description of Artificial Sequence: Synthetic oligonucleotide
aaguucguauuucuuugau

SEQ ID NO: 311483 - RNA, 19 nt, Artificial Sequence
  Description of Artificial Sequence: Synthetic oligonucleotide
uccguaacugggaugccug

SEQ ID NO: 311484 - RNA, 19 nt, Artificial Sequence
  Description of Artificial Sequence: Synthetic oligonucleotide
uaaggauugggugguguag

SEQ ID NO: 311485 - RNA, 19 nt, Artificial Sequence
  Description of Artificial Sequence: Synthetic oligonucleotide
aggagauaaccucacagua

SEQ ID NO: 311486 - RNA, 19 nt, Artificial Sequence
  Description of Artificial Sequence: Synthetic oligonucleotide
uguuguacgugggaggcca

SEQ ID NO: 311487 - RNA, 19 nt, Artificial Sequence
  Description of Artificial Sequence: Synthetic oligonucleotide
ugccacaaccuuuuccaag

SEQ ID NO: 311488 - RNA, 19 nt, Artificial Sequence
  Description of Artificial Sequence: Synthetic oligonucleotide
uuauggaaugguguuuaug

SEQ ID NO: 311489 - RNA, 19 nt, Artificial Sequence
  Description of Artificial Sequence: Synthetic oligonucleotide
aaaaggggccuccauucau

SEQ ID NO: 311490 - RNA, 19 nt, Artificial Sequence
  Description of Artificial Sequence: Synthetic oligonucleotide
uaaaaggggccuccauuca

SEQ ID NO: 311491 - RNA, 19 nt, Artificial Sequence
  Description of Artificial Sequence: Synthetic oligonucleotide
ucguauuucuuugauucac

SEQ ID NO: 311492 - RNA, 19 nt, Artificial Sequence
  Description of Artificial Sequence: Synthetic oligonucleotide
ugggcuagguacguaauca

SEQ ID NO: 311493 - RNA, 19 nt, Artificial Sequence
  Description of Artificial Sequence: Synthetic oligonucleotide
uggaacaaacauucguaaa

SEQ ID NO: 311494 - RNA, 19 nt, Artificial Sequence
  Description of Artificial Sequence: Synthetic oligonucleotide
aguauaguccugaaaacaa

SEQ ID NO: 311495 - RNA, 19 nt, Artificial Sequence
  Description of Artificial Sequence: Synthetic oligonucleotide
ccuaaaucagacauuucag

SEQ ID NO: 311496 - RNA, 19 nt, Artificial Sequence
  Description of Artificial Sequence: Synthetic oligonucleotide
ugcuccgacuacuugggug

SEQ ID NO: 311497 - RNA, 19 nt, Artificial Sequence
  Description of Artificial Sequence: Synthetic oligonucleotide
cauaauccucuggaggugg

SEQ ID NO: 311498 - RNA, 19 nt, Artificial Sequence
  Description of Artificial Sequence: Synthetic oligonucleotide
acgaacuggucgcucaaag

SEQ ID NO: 311499 - RNA, 19 nt, Artificial Sequence
  Description of Artificial Sequence: Synthetic oligonucleotide
cuagggauaaaccaaacau

SEQ ID NO: 311500 - RNA, 19 nt, Artificial Sequence
  Description of Artificial Sequence: Synthetic oligonucleotide
acucugugauauaaguggg

SEQ ID NO: 311501 - RNA, 19 nt, Artificial Sequence
  Description of Artificial Sequence: Synthetic oligonucleotide
gcuuuacucagaauaaugc

SEQ ID NO: 311502 - RNA, 19 nt, Artificial Sequence
  Description of Artificial Sequence: Synthetic oligonucleotide
uauaagugggaggagucaa

SEQ ID NO: 311503 - RNA, 19 nt, Artificial Sequence
  Description of Artificial Sequence: Synthetic oligonucleotide
uuauaaaaggggccuccau

SEQ ID NO: 311504 - RNA, 19 nt, Artificial Sequence
  Description of Artificial Sequence: Synthetic oligonucleotide
guauaguccugaaaacaag

SEQ ID NO: 311505 - RNA, 19 nt, Artificial Sequence
  Description of Artificial Sequence: Synthetic oligonucleotide
ucuagcuaaugugggaaga

SEQ ID NO: 311506 - RNA, 19 nt, Artificial Sequence
  Description of Artificial Sequence: Synthetic oligonucleotide
gauaugcaacacuugcuaa

SEQ ID NO: 311507 - RNA, 19 nt, Artificial Sequence
  Description of Artificial Sequence: Synthetic oligonucleotide
uguggguucuugaaguguu

SEQ ID NO: 311508 - RNA, 19 nt, Artificial Sequence
  Description of Artificial Sequence: Synthetic oligonucleotide
cucauaccaaccaucguca

SEQ ID NO: 311509 - RNA, 19 nt, Artificial Sequence
  Description of Artificial Sequence: Synthetic oligonucleotide
agaugaucuuuaaagacaa

SEQ ID NO: 311510 - RNA, 19 nt, Artificial Sequence
  Description of Artificial Sequence: Synthetic oligonucleotide
ucauuaaggugagacugga

SEQ ID NO: 311511 - RNA, 19 nt, Artificial Sequence
  Description of Artificial Sequence: Synthetic oligonucleotide
cuaaucgcaucuaacccca

SEQ ID NO: 311512 - RNA, 19 nt, Artificial Sequence
  Description of Artificial Sequence: Synthetic oligonucleotide
ugguugauugaagauucca

SEQ ID NO: 311513 - RNA, 19 nt, Artificial Sequence
  Description of Artificial Sequence: Synthetic oligonucleotide
guuuucgaauauaacgaac

SEQ ID NO: 311514 - RNA, 19 nt, Artificial Sequence
  Description of Artificial Sequence: Synthetic oligonucleotide
aaagguuguacugcaggaa

SEQ ID NO: 311515 - RNA, 19 nt, Artificial Sequence
  Description of Artificial Sequence: Synthetic oligonucleotide
ugguguagcuuuugguucu

SEQ ID NO: 311516 - RNA, 19 nt, Artificial Sequence
  Description of Artificial Sequence: Synthetic oligonucleotide
agugccgcccaaguguccc

SEQ ID NO: 311517 - RNA, 19 nt, Artificial Sequence
  Description of Artificial Sequence: Synthetic oligonucleotide
cauaaggaucacuguacuc

SEQ ID NO: 311518 - RNA, 19 nt, Artificial Sequence
  Description of Artificial Sequence: Synthetic oligonucleotide
ugcgagggagccauauuac

SEQ ID NO: 311519 - RNA, 19 nt, Artificial Sequence
  Description of Artificial Sequence: Synthetic oligonucleotide
aaaaucccaucaguacucu

SEQ ID NO: 311520 - RNA, 19 nt, Artificial Sequence
  Description of Artificial Sequence: Synthetic oligonucleotide
gcuccgacuacuugggugg

SEQ ID NO: 311521 - RNA, 19 nt, Artificial Sequence
  Description of Artificial Sequence: Synthetic oligonucleotide
cauauuacggguugggcua

SEQ ID NO: 311522 - RNA, 19 nt, Artificial Sequence
  Description of Artificial Sequence: Synthetic oligonucleotide
uagugacuuuguaaggcuc

SEQ ID NO: 311523 - RNA, 19 nt, Artificial Sequence
  Description of Artificial Sequence: Synthetic oligonucleotide
aaauucccagggccucuag

SEQ ID NO: 311524 - RNA, 19 nt, Artificial Sequence
  Description of Artificial Sequence: Synthetic oligonucleotide
uagcuaaugugggaagacc

SEQ ID NO: 311525 - RNA, 19 nt, Artificial Sequence
  Description of Artificial Sequence: Synthetic oligonucleotide
gucgcucaaagguuggcug

SEQ ID NO: 311526 - RNA, 19 nt, Artificial Sequence
  Description of Artificial Sequence: Synthetic oligonucleotide
uggaggacgcacuggcucc

SEQ ID NO: 311527 - RNA, 19 nt, Artificial Sequence
  Description of Artificial Sequence: Synthetic oligonucleotide
aguuaggcccugucauuuc

SEQ ID NO: 311528 - RNA, 19 nt, Artificial Sequence
  Description of Artificial Sequence: Synthetic oligonucleotide
aggugagacuggaacaaac

SEQ ID NO: 311529 - RNA, 19 nt, Artificial Sequence
  Description of Artificial Sequence: Synthetic oligonucleotide
gcaaggaucauuuacaguu

SEQ ID NO: 311530 - RNA, 19 nt, Artificial Sequence
  Description of Artificial Sequence: Synthetic oligonucleotide
cucuagcuaaugugggaag

SEQ ID NO: 311531 - RNA, 19 nt, Artificial Sequence
  Description of Artificial Sequence: Synthetic oligonucleotide
gguaaacgaagauuauuuc

SEQ ID NO: 311532 - RNA, 19 nt, Artificial Sequence
  Description of Artificial Sequence: Synthetic oligonucleotide
cuaaauacaaugcauucuu

SEQ ID NO: 311533 - RNA, 19 nt, Artificial Sequence
  Description of Artificial Sequence: Synthetic oligonucleotide
auaagugggaggagucaac

SEQ ID NO: 311534 - RNA, 19 nt, Artificial Sequence
  Description of Artificial Sequence: Synthetic oligonucleotide
aaagaucagcgcccucaga

SEQ ID NO: 311535 - RNA, 19 nt, Artificial Sequence
  Description of Artificial Sequence: Synthetic oligonucleotide
uugauucacagaagcuguc

SEQ ID NO: 311536 - RNA, 19 nt, Artificial Sequence
  Description of Artificial Sequence: Synthetic oligonucleotide
acuggauucugguuauaaa

SEQ ID NO: 311537 - RNA, 19 nt, Artificial Sequence
  Description of Artificial Sequence: Synthetic oligonucleotide
aggagucaacugcccaugg

SEQ ID NO: 311538 - RNA, 19 nt, Artificial Sequence
  Description of Artificial Sequence: Synthetic oligonucleotide
uuaccaguuggcaggguuu

SEQ ID NO: 311539 - RNA, 19 nt, Artificial Sequence
  Description of Artificial Sequence: Synthetic oligonucleotide
uaauccucuggagguggcg

SEQ ID NO: 311540 - RNA, 19 nt, Artificial Sequence
  Description of Artificial Sequence: Synthetic oligonucleotide
guaaggcucucauaaguaa

SEQ ID NO: 311541 - RNA, 19 nt, Artificial Sequence
  Description of Artificial Sequence: Synthetic oligonucleotide
agcaccuguguccugguaa

SEQ ID NO: 311542 - RNA, 19 nt, Artificial Sequence
  Description of Artificial Sequence: Synthetic oligonucleotide
aguucguauuucuuugauu

SEQ ID NO: 311543 - RNA, 19 nt, Artificial Sequence
  Description of Artificial Sequence: Synthetic oligonucleotide
uacuugggugguuauuuau

SEQ ID NO: 311544 - RNA, 19 nt, Artificial Sequence
  Description of Artificial Sequence: Synthetic oligonucleotide
gagauaaccucacaguauu

SEQ ID NO: 311545 - RNA, 19 nt, Artificial Sequence
  Description of Artificial Sequence: Synthetic oligonucleotide
auauaagugggaggaguca

SEQ ID NO: 311546 - RNA, 19 nt, Artificial Sequence
  Description of Artificial Sequence: Synthetic oligonucleotide
agguacguaaucauuuggu

SEQ ID NO: 311547 - RNA, 19 nt, Artificial Sequence
  Description of Artificial Sequence: Synthetic oligonucleotide
ugggaugccuggauaucca

SEQ ID NO: 311548 - RNA, 19 nt, Artificial Sequence
  Description of Artificial Sequence: Synthetic oligonucleotide
acuugggugguuauuuaug

SEQ ID NO: 311549 - RNA, 19 nt, Artificial Sequence
  Description of Artificial Sequence: Synthetic oligonucleotide
uggcaggguuucaacauuc

SEQ ID NO: 311550 - RNA, 19 nt, Artificial Sequence
  Description of Artificial Sequence: Synthetic oligonucleotide
gcaauaaucuuguggguuc

SEQ ID NO: 311551 - RNA, 19 nt, Artificial Sequence
  Description of Artificial Sequence: Synthetic oligonucleotide
gcaacuuucucuuuaugaa

SEQ ID NO: 311552 - RNA, 19 nt, Artificial Sequence
  Description of Artificial Sequence: Synthetic oligonucleotide
uugggcuagguacguaauc

SEQ ID NO: 311553 - RNA, 19 nt, Artificial Sequence
  Description of Artificial Sequence: Synthetic oligonucleotide
caaccuaccauuucuucaa

SEQ ID NO: 311554 - RNA, 19 nt, Artificial Sequence
  Description of Artificial Sequence: Synthetic oligonucleotide
ccucauaccaaccaucguc

SEQ ID NO: 311555 - RNA, 19 nt, Artificial Sequence
  Description of Artificial Sequence: Synthetic oligonucleotide
guuacagaguauccuucca

SEQ ID NO: 311556 - RNA, 19 nt, Artificial Sequence
  Description of Artificial Sequence: Synthetic oligonucleotide
aggaucauuuacaguuagg

SEQ ID NO: 311557 - RNA, 19 nt, Artificial Sequence
  Description of Artificial Sequence: Synthetic oligonucleotide
auaauccucuggagguggc

SEQ ID NO: 311558 - RNA, 19 nt, Artificial Sequence
  Description of Artificial Sequence: Synthetic oligonucleotide
augguugauugaagauucc

SEQ ID NO: 311559 - RNA, 19 nt, Artificial Sequence
  Description of Artificial Sequence: Synthetic oligonucleotide
ucacgccauucauaacucc

SEQ ID NO: 311560 - RNA, 19 nt, Artificial Sequence
  Description of Artificial Sequence: Synthetic oligonucleotide
cuggaacaaacauucguaa

SEQ ID NO: 311561 - RNA, 19 nt, Artificial Sequence
  Description of Artificial Sequence: Synthetic oligonucleotide
ggagccauauuacggguug

SEQ ID NO: 311562 - RNA, 19 nt, Artificial Sequence
  Description of Artificial Sequence: Synthetic oligonucleotide
aguugcuuaccaguuggca

SEQ ID NO: 311563 - RNA, 19 nt, Artificial Sequence
  Description of Artificial Sequence: Synthetic oligonucleotide
ucucauaaguaaggcugug

SEQ ID NO: 311564 - RNA, 19 nt, Artificial Sequence
  Description of Artificial Sequence: Synthetic oligonucleotide
ucacuacaggccuggcuca

SEQ ID NO: 311565 - RNA, 19 nt, Artificial Sequence
  Description of Artificial Sequence: Synthetic oligonucleotide
cuccauucaucugaugcug

SEQ ID NO: 311566 - RNA, 19 nt, Artificial Sequence
  Description of Artificial Sequence: Synthetic oligonucleotide
uauaacgaacuggucgcuc

SEQ ID NO: 311567 - RNA, 19 nt, Artificial Sequence
  Description of Artificial Sequence: Synthetic oligonucleotide
gucaagagcuaacuguuua

SEQ ID NO: 311568 - RNA, 19 nt, Artificial Sequence
  Description of Artificial Sequence: Synthetic oligonucleotide
gguuauaaaaggggccucc

SEQ ID NO: 311569 - RNA, 19 nt, Artificial Sequence
  Description of Artificial Sequence: Synthetic oligonucleotide
caguguuaggaagugucac

SEQ ID NO: 311570 - RNA, 19 nt, Artificial Sequence
  Description of Artificial Sequence: Synthetic oligonucleotide
uccuaauaucaaccguuuu

SEQ ID NO: 311571 - RNA, 19 nt, Artificial Sequence
  Description of Artificial Sequence: Synthetic oligonucleotide
cccaucauuaaggugagac

SEQ ID NO: 311572 - RNA, 19 nt, Artificial Sequence
  Description of Artificial Sequence: Synthetic oligonucleotide
uguuaggaagugucaccuc

SEQ ID NO: 311573 - RNA, 19 nt, Artificial Sequence
  Description of Artificial Sequence: Synthetic oligonucleotide
gucaaccuaccauuucuuc

SEQ ID NO: 311574 - RNA, 19 nt, Artificial Sequence
  Description of Artificial Sequence: Synthetic oligonucleotide
uguacgugggaggccacca

SEQ ID NO: 311575 - RNA, 19 nt, Artificial Sequence
  Description of Artificial Sequence: Synthetic oligonucleotide
acucaccuuuacuccaugu

SEQ ID NO: 311576 - RNA, 19 nt, Artificial Sequence
  Description of Artificial Sequence: Synthetic oligonucleotide
gcucaaugccuccauuuag

SEQ ID NO: 311577 - RNA, 19 nt, Artificial Sequence
  Description of Artificial Sequence: Synthetic oligonucleotide
auacuagggauaaaccaaa

SEQ ID NO: 311578 - RNA, 19 nt, Artificial Sequence
  Description of Artificial Sequence: Synthetic oligonucleotide
aucagauaugcaacacuug

SEQ ID NO: 311579 - RNA, 19 nt, Artificial Sequence
  Description of Artificial Sequence: Synthetic oligonucleotide
agcugagucaagagcuaac

SEQ ID NO: 311580 - RNA, 19 nt, Artificial Sequence
  Description of Artificial Sequence: Synthetic oligonucleotide
uacucaccuuuacuccaug

SEQ ID NO: 311581 - RNA, 19 nt, Artificial Sequence
  Description of Artificial Sequence: Synthetic oligonucleotide
gauucaucaaagacuggcu

SEQ ID NO: 311582 - RNA, 19 nt, Artificial Sequence
  Description of Artificial Sequence: Synthetic oligonucleotide
uaacgaacuggucgcucaa

SEQ ID NO: 311583 - RNA, 19 nt, Artificial Sequence
  Description of Artificial Sequence: Synthetic oligonucleotide
agcucaaugccuccauuua

SEQ ID NO: 311584 - RNA, 19 nt, Artificial Sequence
  Description of Artificial Sequence: Synthetic oligonucleotide
guacagcacauuuaguuau

SEQ ID NO: 311585 - RNA, 19 nt, Artificial Sequence
  Description of Artificial Sequence: Synthetic oligonucleotide
gguacucaccuuuacucca

SEQ ID NO: 311586 - RNA, 19 nt, Artificial Sequence
  Description of Artificial Sequence: Synthetic oligonucleotide
guuaggcccugucauuuca

SEQ ID NO: 311587 - RNA, 19 nt, Artificial Sequence
  Description of Artificial Sequence: Synthetic oligonucleotide
uuggcaggguuucaacauu

SEQ ID NO: 311588 - RNA, 19 nt, Artificial Sequence
  Description of Artificial Sequence: Synthetic oligonucleotide
gguuuucgaauauaacgaa

SEQ ID NO: 311589 - RNA, 19 nt, Artificial Sequence
  Description of Artificial Sequence: Synthetic oligonucleotide
uacucaaccacagcugcuu

SEQ ID NO: 311590 - RNA, 19 nt, Artificial Sequence
  Description of Artificial Sequence: Synthetic oligonucleotide
gaggcggggauucaucaaa

SEQ ID NO: 311591 - RNA, 19 nt, Artificial Sequence
  Description of Artificial Sequence: Synthetic oligonucleotide
guaaacagcucccauucau

SEQ ID NO: 311592 - RNA, 19 nt, Artificial Sequence
  Description of Artificial Sequence: Synthetic oligonucleotide
ccaaguaaacaguguuagg

SEQ ID NO: 311593 - RNA, 19 nt, Artificial Sequence
  Description of Artificial Sequence: Synthetic oligonucleotide
agggagccauauuacgggu

SEQ ID NO: 311594 - RNA, 19 nt, Artificial Sequence
  Description of Artificial Sequence: Synthetic oligonucleotide
caaugccuccauuuaguga

SEQ ID NO: 311595 - RNA, 19 nt, Artificial Sequence
  Description of Artificial Sequence: Synthetic oligonucleotide
gagccauauuacggguugg

SEQ ID NO: 311596 - RNA, 19 nt, Artificial Sequence
  Description of Artificial Sequence: Synthetic oligonucleotide
gguaaagcaguugcuuacc

SEQ ID NO: 311597 - RNA, 19 nt, Artificial Sequence
  Description of Artificial Sequence: Synthetic oligonucleotide
uacgugggaggccaccaau

SEQ ID NO: 311598 - RNA, 19 nt, Artificial Sequence
  Description of Artificial Sequence: Synthetic oligonucleotide
auauuacggguugggcuag

SEQ ID NO: 311599 - RNA, 19 nt, Artificial Sequence
  Description of Artificial Sequence: Synthetic oligonucleotide
cacuguacucaaccacagc

SEQ ID NO: 311600 - RNA, 19 nt, Artificial Sequence
  Description of Artificial Sequence: Synthetic oligonucleotide
guuauaaaaggggccucca

SEQ ID NO: 311601 - RNA, 19 nt, Artificial Sequence
  Description of Artificial Sequence: Synthetic oligonucleotide
aggguaaacgaagauuauu

SEQ ID NO: 311602 - RNA, 19 nt, Artificial Sequence
  Description of Artificial Sequence: Synthetic oligonucleotide
cuugcuacacauagcuuua

SEQ ID NO: 311603 - RNA, 19 nt, Artificial Sequence
  Description of Artificial Sequence: Synthetic oligonucleotide
acggguugggcuagguacg

SEQ ID NO: 311604 - RNA, 19 nt, Artificial Sequence
  Description of Artificial Sequence: Synthetic oligonucleotide
gcggggauucaucaaagac

SEQ ID NO: 311605 - RNA, 19 nt, Artificial Sequence
  Description of Artificial Sequence: Synthetic oligonucleotide
uuauaacaguugguacagu

SEQ ID NO: 311606 - RNA, 19 nt, Artificial Sequence
  Description of Artificial Sequence: Synthetic oligonucleotide
ucgcaucuaaccccaucau

SEQ ID NO: 311607 - RNA, 19 nt, Artificial Sequence
  Description of Artificial Sequence: Synthetic oligonucleotide
gguacguaaucauuuggua

SEQ ID NO: 311608 - RNA, 19 nt, Artificial Sequence
  Description of Artificial Sequence: Synthetic oligonucleotide
ggcuguguacuguguaugc

SEQ ID NO: 311609 - RNA, 19 nt, Artificial Sequence
  Description of Artificial Sequence: Synthetic oligonucleotide
uuacggguugggcuaggua

SEQ ID NO: 311610 - RNA, 19 nt, Artificial Sequence
  Description of Artificial Sequence: Synthetic oligonucleotide
acguaaucauuugguacca

SEQ ID NO: 311611 - RNA, 19 nt, Artificial Sequence
  Description of Artificial Sequence: Synthetic oligonucleotide
auauaacgaacuggucgcu

SEQ ID NO: 311612 - RNA, 19 nt, Artificial Sequence
  Description of Artificial Sequence: Synthetic oligonucleotide
aacuggucgcucaaagguu

SEQ ID NO: 311613 - RNA, 19 nt, Artificial Sequence
  Description of Artificial Sequence: Synthetic oligonucleotide
ucauaccaaccaucgucau

SEQ ID NO: 311614 - RNA, 19 nt, Artificial Sequence
  Description of Artificial Sequence: Synthetic oligonucleotide
caucuaaccccaucauuaa

SEQ ID NO: 311615 - RNA, 19 nt, Artificial Sequence
  Description of Artificial Sequence: Synthetic oligonucleotide
auacuugggugguuauuua

SEQ ID NO: 311616 - RNA, 19 nt, Artificial Sequence
  Description of Artificial Sequence: Synthetic oligonucleotide
ugguuauaaaaggggccuc

SEQ ID NO: 311617 - RNA, 19 nt, Artificial Sequence
  Description of Artificial Sequence: Synthetic oligonucleotide
cuaaccccaucauuaaggu

SEQ ID NO: 311618 - RNA, 19 nt, Artificial Sequence
  Description of Artificial Sequence: Synthetic oligonucleotide
aggaaagaucagcgcccuc

SEQ ID NO: 311619 - RNA, 19 nt, Artificial Sequence
  Description of Artificial Sequence: Synthetic oligonucleotide
acaaugcauucuugcuaca

SEQ ID NO: 311620 - RNA, 19 nt, Artificial Sequence
  Description of Artificial Sequence: Synthetic oligonucleotide
caggagauaaccucacagu

SEQ ID NO: 311621 - RNA, 19 nt, Artificial Sequence
  Description of Artificial Sequence: Synthetic oligonucleotide
ucccuaaaucagacauuuc

SEQ ID NO: 311622 - RNA, 19 nt, Artificial Sequence
  Description of Artificial Sequence: Synthetic oligonucleotide
ggaucacuguacucaacca

SEQ ID NO: 311623 - RNA, 19 nt, Artificial Sequence
  Description of Artificial Sequence: Synthetic oligonucleotide
cuaaggauuggguggugua

SEQ ID NO: 311624 - RNA, 19 nt, Artificial Sequence
  Description of Artificial Sequence: Synthetic oligonucleotide
acgugggaggccaccaauc

SEQ ID NO: 311625 - RNA, 19 nt, Artificial Sequence
  Description of Artificial Sequence: Synthetic oligonucleotide
cagauaugcaacacuugcu

SEQ ID NO: 311626 - RNA, 19 nt, Artificial Sequence
  Description of Artificial Sequence: Synthetic oligonucleotide
cugguuauaaaaggggccu

SEQ ID NO: 311627 - RNA, 19 nt, Artificial Sequence
  Description of Artificial Sequence: Synthetic oligonucleotide
uaccaguuggcaggguuuc

SEQ ID NO: 311628 - RNA, 19 nt, Artificial Sequence
  Description of Artificial Sequence: Synthetic oligonucleotide
guguuaggaagugucaccu

SEQ ID NO: 311629 - RNA, 19 nt, Artificial Sequence
  Description of Artificial Sequence: Synthetic oligonucleotide
aucaguacucugugauaua

SEQ ID NO: 311630 - RNA, 19 nt, Artificial Sequence
  Description of Artificial Sequence: Synthetic oligonucleotide
gagucaagagcuaacuguu

SEQ ID NO: 311631 - RNA, 19 nt, Artificial Sequence
  Description of Artificial Sequence: Synthetic oligonucleotide
acgccauucauaacucccu

SEQ ID NO: 311632 - RNA, 19 nt, Artificial Sequence
  Description of Artificial Sequence: Synthetic oligonucleotide
gucaacugcccauggguua

SEQ ID NO: 311633 - RNA, 19 nt, Artificial Sequence
  Description of Artificial Sequence: Synthetic oligonucleotide
auaaugcaugauggacuca

SEQ ID NO: 311634 - RNA, 19 nt, Artificial Sequence
  Description of Artificial Sequence: Synthetic oligonucleotide
gcaucuaaucgcaucuaac

SEQ ID NO: 311635 - RNA, 19 nt, Artificial Sequence
  Description of Artificial Sequence: Synthetic oligonucleotide
auuuacaguuaggcccugu

SEQ ID NO: 311636 - RNA, 19 nt, Artificial Sequence
  Description of Artificial Sequence: Synthetic oligonucleotide
cuccaaucacuacaggccu

SEQ ID NO: 311637 - RNA, 19 nt, Artificial Sequence
  Description of Artificial Sequence: Synthetic oligonucleotide
gcacuuaaacuuaaagcaa

SEQ ID NO: 311638 - RNA, 19 nt, Artificial Sequence
  Description of Artificial Sequence: Synthetic oligonucleotide
ggcucacuguuacagagua

SEQ ID NO: 311639 - RNA, 19 nt, Artificial Sequence
  Description of Artificial Sequence: Synthetic oligonucleotide
gaguuccuggccaaagcua

SEQ ID NO: 311640 - RNA, 19 nt, Artificial Sequence
  Description of Artificial Sequence: Synthetic oligonucleotide
auuacggguugggcuaggu

SEQ ID NO: 311641 - RNA, 19 nt, Artificial Sequence
  Description of Artificial Sequence: Synthetic oligonucleotide
ggcaucuaaucgcaucuaa

SEQ ID NO: 311642 - RNA, 19 nt, Artificial Sequence
  Description of Artificial Sequence: Synthetic oligonucleotide
accccaucauuaaggugag

SEQ ID NO: 311643 - RNA, 19 nt, Artificial Sequence
  Description of Artificial Sequence: Synthetic oligonucleotide
uaaucgcaucuaaccccau

SEQ ID NO: 311644 - RNA, 19 nt, Artificial Sequence
  Description of Artificial Sequence: Synthetic oligonucleotide
gccauauuacggguugggc

SEQ ID NO: 311645 - RNA, 19 nt, Artificial Sequence
  Description of Artificial Sequence: Synthetic oligonucleotide
gagcugagucaagagcuaa

SEQ ID NO: 311646 - RNA, 19 nt, Artificial Sequence
  Description of Artificial Sequence: Synthetic oligonucleotide
gggagugccgcccaagugu

SEQ ID NO: 311647 - RNA, 19 nt, Artificial Sequence
  Description of Artificial Sequence: Synthetic oligonucleotide
ugcugcgagggagccauau

SEQ ID NO: 311648 - RNA, 19 nt, Artificial Sequence
  Description of Artificial Sequence: Synthetic oligonucleotide
uugcuacacauagcuuuau

SEQ ID NO: 311649 - RNA, 19 nt, Artificial Sequence
  Description of Artificial Sequence: Synthetic oligonucleotide
gugcaauaaucuugugggu

SEQ ID NO: 311650 - RNA, 19 nt, Artificial Sequence
  Description of Artificial Sequence: Synthetic oligonucleotide
gcagucaaccuaccauuuc

SEQ ID NO: 311651 - RNA, 19 nt, Artificial Sequence
  Description of Artificial Sequence: Synthetic oligonucleotide
cgaauauaacgaacugguc

SEQ ID NO: 311652 - RNA, 19 nt, Artificial Sequence
  Description of Artificial Sequence: Synthetic oligonucleotide
agauaaccucacaguauua

SEQ ID NO: 311653 - RNA, 19 nt, Artificial Sequence
  Description of Artificial Sequence: Synthetic oligonucleotide
agucaagagcuaacuguuu

SEQ ID NO: 311654 - RNA, 19 nt, Artificial Sequence
  Description of Artificial Sequence: Synthetic oligonucleotide
uccugccaguguagaacua

SEQ ID NO: 311655 - RNA, 19 nt, Artificial Sequence
  Description of Artificial Sequence: Synthetic oligonucleotide
augauggacucaacauaau

SEQ ID NO: 311656 - RNA, 19 nt, Artificial Sequence
  Description of Artificial Sequence: Synthetic oligonucleotide
gcuggugcaauaaucuugu

SEQ ID NO: 311657 - RNA, 19 nt, Artificial Sequence
  Description of Artificial Sequence: Synthetic oligonucleotide
gaaauucccagggccucua

SEQ ID NO: 311658 - RNA, 19 nt, Artificial Sequence
  Description of Artificial Sequence: Synthetic oligonucleotide
gguugauugaagauuccau

SEQ ID NO: 311659 - RNA, 19 nt, Artificial Sequence
  Description of Artificial Sequence: Synthetic oligonucleotide
gcauuuguaggacauuguu

SEQ ID NO: 311660 - RNA, 19 nt, Artificial Sequence
  Description of Artificial Sequence: Synthetic oligonucleotide
uccgacuacuuggguggcu

SEQ ID NO: 311661 - RNA, 19 nt, Artificial Sequence
  Description of Artificial Sequence: Synthetic oligonucleotide
gcuagguacguaaucauuu

SEQ ID NO: 311662 - RNA, 19 nt, Artificial Sequence
  Description of Artificial Sequence: Synthetic oligonucleotide
ggcuccagugugcgauagg

SEQ ID NO: 311663 - RNA, 19 nt, Artificial Sequence
  Description of Artificial Sequence: Synthetic oligonucleotide
aggacgcacuggcuccagu

SEQ ID NO: 311664 - RNA, 19 nt, Artificial Sequence
  Description of Artificial Sequence: Synthetic oligonucleotide
cauuuacaguuaggcccug

SEQ ID NO: 311665 - RNA, 19 nt, Artificial Sequence
  Description of Artificial Sequence: Synthetic oligonucleotide
caccuguguccugguaaag

SEQ ID NO: 311666 - RNA, 19 nt, Artificial Sequence
  Description of Artificial Sequence: Synthetic oligonucleotide
cuagggcucgcugcuuauc

SEQ ID NO: 311667 - RNA, 19 nt, Artificial Sequence
  Description of Artificial Sequence: Synthetic oligonucleotide
gccucuagcuaauguggga

SEQ ID NO: 311668 - RNA, 19 nt, Artificial Sequence
  Description of Artificial Sequence: Synthetic oligonucleotide
cuguaaguucguauuucuu

SEQ ID NO: 311669 - RNA, 19 nt, Artificial Sequence
  Description of Artificial Sequence: Synthetic oligonucleotide
cacuacaggccuggcucac

SEQ ID NO: 311670 - RNA, 19 nt, Artificial Sequence
  Description of Artificial Sequence: Synthetic oligonucleotide
uguccccuuuccugacaua

SEQ ID NO: 311671 - RNA, 19 nt, Artificial Sequence
  Description of Artificial Sequence: Synthetic oligonucleotide
gaugaucuuuaaagacaau

SEQ ID NO: 311672 - RNA, 19 nt, Artificial Sequence
  Description of Artificial Sequence: Synthetic oligonucleotide
guggaggcggggauucauc

SEQ ID NO: 311673 - RNA, 19 nt, Artificial Sequence
  Description of Artificial Sequence: Synthetic oligonucleotide
guacgugggaggccaccaa

SEQ ID NO: 311674 - RNA, 19 nt, Artificial Sequence
  Description of Artificial Sequence: Synthetic oligonucleotide
ggguuaccccaaaauacaa

SEQ ID NO: 311675 - RNA, 19 nt, Artificial Sequence
  Description of Artificial Sequence: Synthetic oligonucleotide
ugccgcccaaguguccccu

SEQ ID NO: 311676 - RNA, 19 nt, Artificial Sequence
  Description of Artificial Sequence: Synthetic oligonucleotide
cggggauucaucaaagacu

SEQ ID NO: 311677 - RNA, 19 nt, Artificial Sequence
  Description of Artificial Sequence: Synthetic oligonucleotide
ccaucauuaaggugagacu

SEQ ID NO: 311678 - RNA, 19 nt, Artificial Sequence
  Description of Artificial Sequence: Synthetic oligonucleotide
cauaccaaccaucgucauu

SEQ ID NO: 311679 - RNA, 19 nt, Artificial Sequence
  Description of Artificial Sequence: Synthetic oligonucleotide
ggagugccgcccaaguguc

SEQ ID NO: 311680 - RNA, 19 nt, Artificial Sequence
  Description of Artificial Sequence: Synthetic oligonucleotide
gcuaacuguuuaucuuaua

SEQ ID NO: 311681 - RNA, 19 nt, Artificial Sequence
  Description of Artificial Sequence: Synthetic oligonucleotide
gugccgcccaagugucccc

SEQ ID NO: 311682 - RNA, 19 nt, Artificial Sequence
  Description of Artificial Sequence: Synthetic oligonucleotide
gccaagguguuuaucagau

SEQ ID NO: 311683 - RNA, 19 nt, Artificial Sequence
  Description of Artificial Sequence: Synthetic oligonucleotide
ccucuagcuaaugugggaa

SEQ ID NO: 311684 - RNA, 19 nt, Artificial Sequence
  Description of Artificial Sequence: Synthetic oligonucleotide
guacucaaccacagcugcu

SEQ ID NO: 311685 - RNA, 19 nt, Artificial Sequence
  Description of Artificial Sequence: Synthetic oligonucleotide
gggauaaaccaaacauagu

SEQ ID NO: 311686 - RNA, 19 nt, Artificial Sequence
  Description of Artificial Sequence: Synthetic oligonucleotide
gguuaccccaaaauacaau

SEQ ID NO: 311687 - RNA, 19 nt, Artificial Sequence
  Description of Artificial Sequence: Synthetic oligonucleotide
cauuauuagcaaggaucau

SEQ ID NO: 311688 - RNA, 19 nt, Artificial Sequence
  Description of Artificial Sequence: Synthetic oligonucleotide
gagcaccuguguccuggua

SEQ ID NO: 311689 - RNA, 19 nt, Artificial Sequence
  Description of Artificial Sequence: Synthetic oligonucleotide
caguuaggcccugucauuu

SEQ ID NO: 311690 - RNA, 19 nt, Artificial Sequence
  Description of Artificial Sequence: Synthetic oligonucleotide
guacucaccuuuacuccau

SEQ ID NO: 311691 - RNA, 19 nt, Artificial Sequence
  Description of Artificial Sequence: Synthetic oligonucleotide
guugggcuagguacguaau

SEQ ID NO: 311692 - RNA, 19 nt, Artificial Sequence
  Description of Artificial Sequence: Synthetic oligonucleotide
ccaucaguacucugugaua

SEQ ID NO: 311693 - RNA, 19 nt, Artificial Sequence
  Description of Artificial Sequence: Synthetic oligonucleotide
gguucuucuagggcucgcu

SEQ ID NO: 311694 - RNA, 19 nt, Artificial Sequence
  Description of Artificial Sequence: Synthetic oligonucleotide
gugggaggccaccaaucuu

SEQ ID NO: 311695 - RNA, 19 nt, Artificial Sequence
  Description of Artificial Sequence: Synthetic oligonucleotide
gggcuagguacguaaucau

SEQ ID NO: 311696 - RNA, 19 nt, Artificial Sequence
  Description of Artificial Sequence: Synthetic oligonucleotide
cgccauucauaacucccuc

SEQ ID NO: 311697 - RNA, 19 nt, Artificial Sequence
  Description of Artificial Sequence: Synthetic oligonucleotide
gguuggcuggugcaauaau

SEQ ID NO: 311698 - RNA, 19 nt, Artificial Sequence
  Description of Artificial Sequence: Synthetic oligonucleotide
ggaggacgcacuggcucca

SEQ ID NO: 311699 - RNA, 19 nt, Artificial Sequence
  Description of Artificial Sequence: Synthetic oligonucleotide
ggcuagguacguaaucauu

SEQ ID NO: 311700 - RNA, 19 nt, Artificial Sequence
  Description of Artificial Sequence: Synthetic oligonucleotide
ggcagucaaccuaccauuu

SEQ ID NO: 311701 - RNA, 19 nt, Artificial Sequence
  Description of Artificial Sequence: Synthetic oligonucleotide
cgcccaaguguccccuuuc

SEQ ID NO: 311702 - RNA, 19 nt, Artificial Sequence
  Description of Artificial Sequence: Synthetic oligonucleotide
cugcuccgacuacuugggu

SEQ ID NO: 311703 - RNA, 19 nt, Artificial Sequence
  Description of Artificial Sequence: Synthetic oligonucleotide
gcccauggguuaccccaaa

SEQ ID NO: 311704 - RNA, 19 nt, Artificial Sequence
  Description of Artificial Sequence: Synthetic oligonucleotide
gcugcgagggagccauauu

SEQ ID NO: 311705 - RNA, 19 nt, Artificial Sequence
  Description of Artificial Sequence: Synthetic oligonucleotide
cccucauaccaaccaucgu

SEQ ID NO: 311706 - RNA, 19 nt, Artificial Sequence
  Description of Artificial Sequence: Synthetic oligonucleotide
cgcaucuaaccccaucauu

SEQ ID NO: 311707 - RNA, 19 nt, Artificial Sequence
  Description of Artificial Sequence: Synthetic oligonucleotide
ggagcccaugguggguccu

SEQ ID NO: 311708 - RNA, 19 nt, Artificial Sequence
  Description of Artificial Sequence: Synthetic oligonucleotide
ccgacuacuuggguggcuu

SEQ ID NO: 311709 - RNA, 19 nt, Artificial Sequence
  Description of Artificial Sequence: Synthetic oligonucleotide
cagcgcccucagagcaccu

SEQ ID NO: 311710 - RNA, 19 nt, Artificial Sequence
  Description of Artificial Sequence: Synthetic oligonucleotide
ggcgguggaggcggggauu

SEQ ID NO: 311711 - RNA, 19 nt, Artificial Sequence
  Description of Artificial Sequence: Synthetic oligonucleotide
gccgcccaaguguccccuu

SEQ ID NO: 311712 - RNA, 19 nt, Artificial Sequence
  Description of Artificial Sequence: Synthetic oligonucleotide
ccgcccaaguguccccuuu

SEQ ID NO: 311713 - RNA, 19 nt, Artificial Sequence
  Description of Artificial Sequence: Synthetic oligonucleotide
aauauuaaaugcuaagacc

SEQ ID NO: 311714 - RNA, 19 nt, Artificial Sequence
  Description of Artificial Sequence: Synthetic oligonucleotide
auuugauucauuuuggccc

SEQ ID NO: 311715 - RNA, 19 nt, Artificial Sequence
  Description of Artificial Sequence: Synthetic oligonucleotide
uuacauaaaagaaggaggg

SEQ ID NO: 311716 - RNA, 19 nt, Artificial Sequence
  Description of Artificial Sequence: Synthetic oligonucleotide
ugagguuuacucuuuaccg

SEQ ID NO: 311717 - RNA, 19 nt, Artificial Sequence
  Description of Artificial Sequence: Synthetic oligonucleotide
uuugaauugaagauguaga

SEQ ID NO: 311718 - RNA, 19 nt, Artificial Sequence
  Description of Artificial Sequence: Synthetic oligonucleotide
aaggucauacauaauauac

SEQ ID NO: 311719 - RNA, 19 nt, Artificial Sequence
  Description of Artificial Sequence: Synthetic oligonucleotide
acuaaaugaacaucuguac

SEQ ID NO: 311720 - RNA, 19 nt, Artificial Sequence
  Description of Artificial Sequence: Synthetic oligonucleotide
aaagauuuauuggugagag

SEQ ID NO: 311721 - RNA, 19 nt, Artificial Sequence
  Description of Artificial Sequence: Synthetic oligonucleotide
aaaauguguagguuugcgg

SEQ ID NO: 311722 - RNA, 19 nt, Artificial Sequence
  Description of Artificial Sequence: Synthetic oligonucleotide
uaagaaagcacaaucccag

SEQ ID NO: 311723 - RNA, 19 nt, Artificial Sequence
  Description of Artificial Sequence: Synthetic oligonucleotide
ugaaaaucagccuucagcu

SEQ ID NO: 311724 - RNA, 19 nt, Artificial Sequence
  Description of Artificial Sequence: Synthetic oligonucleotide
uguugcaauacugacaagg

SEQ ID NO: 311725 - RNA, 19 nt, Artificial Sequence
  Description of Artificial Sequence: Synthetic oligonucleotide
cauuugauccuucugaugc

SEQ ID NO: 311726 - RNA, 19 nt, Artificial Sequence
  Description of Artificial Sequence: Synthetic oligonucleotide
uuugcggaauauuaaaugc

SEQ ID NO: 311727 - RNA, 19 nt, Artificial Sequence
  Description of Artificial Sequence: Synthetic oligonucleotide
uaaaagcuagcaaacagga

SEQ ID NO: 311728 - RNA, 19 nt, Artificial Sequence
  Description of Artificial Sequence: Synthetic oligonucleotide
ugacauaaauacauggccc

SEQ ID NO: 311729 - RNA, 19 nt, Artificial Sequence
  Description of Artificial Sequence: Synthetic oligonucleotide
uucucuuacuaaaagcuag

SEQ ID NO: 311730 - RNA, 19 nt, Artificial Sequence
  Description of Artificial Sequence: Synthetic oligonucleotide
auauuaaaugcuaagaccu

SEQ ID NO: 311731 - RNA, 19 nt, Artificial Sequence
  Description of Artificial Sequence: Synthetic oligonucleotide
uuugauucauuuuggcccg

SEQ ID NO: 311732 - RNA, 19 nt, Artificial Sequence
  Description of Artificial Sequence: Synthetic oligonucleotide
aagaguaacgguaagaaaa

SEQ ID NO: 311733 - RNA, 19 nt, Artificial Sequence
  Description of Artificial Sequence: Synthetic oligonucleotide
agcaucaagacucuaaggu

SEQ ID NO: 311734 - RNA, 19 nt, Artificial Sequence
  Description of Artificial Sequence: Synthetic oligonucleotide
uauacauaguacaaagguc

SEQ ID NO: 311735 - RNA, 19 nt, Artificial Sequence
  Description of Artificial Sequence: Synthetic oligonucleotide
ucuaagaucauuugauccu

SEQ ID NO: 311736 - RNA, 19 nt, Artificial Sequence
  Description of Artificial Sequence: Synthetic oligonucleotide
aggcguuccauacagcugc

SEQ ID NO: 311737 - RNA, 19 nt, Artificial Sequence
  Description of Artificial Sequence: Synthetic oligonucleotide
uggacaaccauucuuucug

SEQ ID NO: 311738 - RNA, 19 nt, Artificial Sequence
  Description of Artificial Sequence: Synthetic oligonucleotide
cuuucgaucaucuuuccug

SEQ ID NO: 311739 - RNA, 19 nt, Artificial Sequence
  Description of Artificial Sequence: Synthetic oligonucleotide
acaagaacuagcuagguua

SEQ ID NO: 311740 - RNA, 19 nt, Artificial Sequence
  Description of Artificial Sequence: Synthetic oligonucleotide
ugcuuuuacaagaacuagc

SEQ ID NO: 311741 - RNA, 19 nt, Artificial Sequence
  Description of Artificial Sequence: Synthetic oligonucleotide
ugugauugacucaaacuug

SEQ ID NO: 311742 - RNA, 19 nt, Artificial Sequence
  Description of Artificial Sequence: Synthetic oligonucleotide
uuagaaaauguguagguuu

SEQ ID NO: 311743 - RNA, 19 nt, Artificial Sequence
  Description of Artificial Sequence: Synthetic oligonucleotide
cauuugauucauuuuggcc

SEQ ID NO: 311744 - RNA, 19 nt, Artificial Sequence
  Description of Artificial Sequence: Synthetic oligonucleotide
uuacuaaaagcuagcaaac

SEQ ID NO: 311745 - RNA, 19 nt, Artificial Sequence
  Description of Artificial Sequence: Synthetic oligonucleotide
aaugcugucaugauuaaaa

SEQ ID NO: 311746 - RNA, 19 nt, Artificial Sequence
  Description of Artificial Sequence: Synthetic oligonucleotide
aauacauggcccuuccagu

SEQ ID NO: 311747 - RNA, 19 nt, Artificial Sequence
  Description of Artificial Sequence: Synthetic oligonucleotide
aacuagcuagguuaccauc

SEQ ID NO: 311748 - RNA, 19 nt, Artificial Sequence
  Description of Artificial Sequence: Synthetic oligonucleotide
gauaguuaucuuuaccuca

SEQ ID NO: 311749 - RNA, 19 nt, Artificial Sequence
  Description of Artificial Sequence: Synthetic oligonucleotide
agauuuauuggugagagaa

SEQ ID NO: 311750 - RNA, 19 nt, Artificial Sequence
  Description of Artificial Sequence: Synthetic oligonucleotide
auacauaguacaaagguca

SEQ ID NO: 311751 - RNA, 19 nt, Artificial Sequence
  Description of Artificial Sequence: Synthetic oligonucleotide
aguuaucuuuaccucaaag

SEQ ID NO: 311752 - RNA, 19 nt, Artificial Sequence
  Description of Artificial Sequence: Synthetic oligonucleotide
aacagggugagcaauccgg

SEQ ID NO: 311753 - RNA, 19 nt, Artificial Sequence
  Description of Artificial Sequence: Synthetic oligonucleotide
guuuaguugugauugacuc

SEQ ID NO: 311754 - RNA, 19 nt, Artificial Sequence
  Description of Artificial Sequence: Synthetic oligonucleotide
aguaacgguaagaaaauag

SEQ ID NO: 311755 - RNA, 19 nt, Artificial Sequence
  Description of Artificial Sequence: Synthetic oligonucleotide
uaagguaaugagaaagaaa

SEQ ID NO: 311756 - RNA, 19 nt, Artificial Sequence
  Description of Artificial Sequence: Synthetic oligonucleotide
guuugcggaauauuaaaug

SEQ ID NO: 311757 - RNA, 19 nt, Artificial Sequence
  Description of Artificial Sequence: Synthetic oligonucleotide
aaaacaccgaguaccaaag

SEQ ID NO: 311758 - RNA, 19 nt, Artificial Sequence
  Description of Artificial Sequence: Synthetic oligonucleotide
auaaaugcugcaauuaugu

SEQ ID NO: 311759 - RNA, 19 nt, Artificial Sequence
  Description of Artificial Sequence: Synthetic oligonucleotide
aauccggcauuccuugcac

SEQ ID NO: 311760 - RNA, 19 nt, Artificial Sequence
  Description of Artificial Sequence: Synthetic oligonucleotide
agaaagcacaaucccagag

SEQ ID NO: 311761 - RNA, 19 nt, Artificial Sequence
  Description of Artificial Sequence: Synthetic oligonucleotide
uagagcgccgccauguccg

SEQ ID NO: 311762 - RNA, 19 nt, Artificial Sequence
  Description of Artificial Sequence: Synthetic oligonucleotide
aaaagauuuauuggugaga

SEQ ID NO: 311763 - RNA, 19 nt, Artificial Sequence
  Description of Artificial Sequence: Synthetic oligonucleotide
uuaggcguuccauacagcu

SEQ ID NO: 311764 - RNA, 19 nt, Artificial Sequence
  Description of Artificial Sequence: Synthetic oligonucleotide
uuaguugugauugacucaa

SEQ ID NO: 311765 - RNA, 19 nt, Artificial Sequence
  Description of Artificial Sequence: Synthetic oligonucleotide
ucuuacuaaaagcuagcaa

SEQ ID NO: 311766 - RNA, 19 nt, Artificial Sequence
  Description of Artificial Sequence: Synthetic oligonucleotide
aacuaaaugaacaucugua

SEQ ID NO: 311767 - RNA, 19 nt, Artificial Sequence
  Description of Artificial Sequence: Synthetic oligonucleotide
uuaaaugcuaagaccuuaa

SEQ ID NO: 311768 - RNA, 19 nt, Artificial Sequence
  Description of Artificial Sequence: Synthetic oligonucleotide
ucucuuacuaaaagcuagc

SEQ ID NO: 311769 - RNA, 19 nt, Artificial Sequence
  Description of Artificial Sequence: Synthetic oligonucleotide
aggauucucuuacuaaaag

SEQ ID NO: 311770 - RNA, 19 nt, Artificial Sequence
  Description of Artificial Sequence: Synthetic oligonucleotide
ugugggaauuuaaaauuac

SEQ ID NO: 311771 - RNA, 19 nt, Artificial Sequence
  Description of Artificial Sequence: Synthetic oligonucleotide
aaaggucauacauaauaua

SEQ ID NO: 311772 - RNA, 19 nt, Artificial Sequence
  Description of Artificial Sequence: Synthetic oligonucleotide
cugagguuuacucuuuacc

SEQ ID NO: 311773 - RNA, 19 nt, Artificial Sequence
  Description of Artificial Sequence: Synthetic oligonucleotide
uucugaugcagcaucuucu

SEQ ID NO: 311774 - RNA, 19 nt, Artificial Sequence
  Description of Artificial Sequence: Synthetic oligonucleotide
uuuucugagucaauaugaa

SEQ ID NO: 311775 - RNA, 19 nt, Artificial Sequence
  Description of Artificial Sequence: Synthetic oligonucleotide
ucaagacugagguuuacuc

SEQ ID NO: 311776 - RNA, 19 nt, Artificial Sequence
  Description of Artificial Sequence: Synthetic oligonucleotide
uacgccuccagcauuuacc

SEQ ID NO: 311777 - RNA, 19 nt, Artificial Sequence
  Description of Artificial Sequence: Synthetic oligonucleotide
acuucuugcauauuguauu

SEQ ID NO: 311778 - RNA, 19 nt, Artificial Sequence
  Description of Artificial Sequence: Synthetic oligonucleotide
ugucggaaagagccgacag

SEQ ID NO: 311779 - RNA, 19 nt, Artificial Sequence
  Description of Artificial Sequence: Synthetic oligonucleotide
ugauaguuaucuuuaccuc

SEQ ID NO: 311780 - RNA, 19 nt, Artificial Sequence
  Description of Artificial Sequence: Synthetic oligonucleotide
ucuugcauauuguauuggu

SEQ ID NO: 311781 - RNA, 19 nt, Artificial Sequence
  Description of Artificial Sequence: Synthetic oligonucleotide
aaaagcuagcaaacaggac

SEQ ID NO: 311782 - RNA, 19 nt, Artificial Sequence
  Description of Artificial Sequence: Synthetic oligonucleotide
auacauggcccuuccaguc

SEQ ID NO: 311783 - RNA, 19 nt, Artificial Sequence
  Description of Artificial Sequence: Synthetic oligonucleotide
uugcggaauauuaaaugcu

SEQ ID NO: 311784 - RNA, 19 nt, Artificial Sequence
  Description of Artificial Sequence: Synthetic oligonucleotide
aacaccgaguaccaaagua

SEQ ID NO: 311785 - RNA, 19 nt, Artificial Sequence
  Description of Artificial Sequence: Synthetic oligonucleotide
acgcuuguaagacagugug

SEQ ID NO: 311786 - RNA, 19 nt, Artificial Sequence
  Description of Artificial Sequence: Synthetic oligonucleotide
ugcagucauaacauggcac

SEQ ID NO: 311787 - RNA, 19 nt, Artificial Sequence
  Description of Artificial Sequence: Synthetic oligonucleotide
acacuaagcagugaccacg

SEQ ID NO: 311788 - RNA, 19 nt, Artificial Sequence
  Description of Artificial Sequence: Synthetic oligonucleotide
aagagccgacagcugacac

SEQ ID NO: 311789 - RNA, 19 nt, Artificial Sequence
  Description of Artificial Sequence: Synthetic oligonucleotide
ugagcaauccggcauuccu

SEQ ID NO: 311790 - RNA, 19 nt, Artificial Sequence
  Description of Artificial Sequence: Synthetic oligonucleotide
guacaaaggucauacauaa

SEQ ID NO: 311791 - RNA, 19 nt, Artificial Sequence
  Description of Artificial Sequence: Synthetic oligonucleotide
acaaccuggacaaccauuc

SEQ ID NO: 311792 - RNA, 19 nt, Artificial Sequence
  Description of Artificial Sequence: Synthetic oligonucleotide
uacugacaaggcuuaggcg

SEQ ID NO: 311793 - RNA, 19 nt, Artificial Sequence
  Description of Artificial Sequence: Synthetic oligonucleotide
gauaggauucucuuacuaa

SEQ ID NO: 311794 - RNA, 19 nt, Artificial Sequence
  Description of Artificial Sequence: Synthetic oligonucleotide
uuucgaucaucuuuccugu

SEQ ID NO: 311795 - RNA, 19 nt, Artificial Sequence
  Description of Artificial Sequence: Synthetic oligonucleotide
gguaaugagaaagaaaaga

SEQ ID NO: 311796 - RNA, 19 nt, Artificial Sequence
  Description of Artificial Sequence: Synthetic oligonucleotide
agguguuaccaaaaguuac

SEQ ID NO: 311797 - RNA, 19 nt, Artificial Sequence
  Description of Artificial Sequence: Synthetic oligonucleotide
aacgcaaaugcuuccgaaa

SEQ ID NO: 311798 - RNA, 19 nt, Artificial Sequence
  Description of Artificial Sequence: Synthetic oligonucleotide
uuucugcccuuacuuaaag

SEQ ID NO: 311799 - RNA, 19 nt, Artificial Sequence
  Description of Artificial Sequence: Synthetic oligonucleotide
uggucaauucucugcaccc

SEQ ID NO: 311800 - RNA, 19 nt, Artificial Sequence
  Description of Artificial Sequence: Synthetic oligonucleotide
aggcuuaggcguuccauac

SEQ ID NO: 311801 - RNA, 19 nt, Artificial Sequence
  Description of Artificial Sequence: Synthetic oligonucleotide
acucaggcgacuguacugc

SEQ ID NO: 311802 - RNA, 19 nt, Artificial Sequence
  Description of Artificial Sequence: Synthetic oligonucleotide
guggcaguuuucaaggugg

SEQ ID NO: 311803 - RNA, 19 nt, Artificial Sequence
  Description of Artificial Sequence: Synthetic oligonucleotide
cuccguuuaguugugauug

SEQ ID NO: 311804 - RNA, 19 nt, Artificial Sequence
  Description of Artificial Sequence: Synthetic oligonucleotide
ugcggaauauuaaaugcua

SEQ ID NO: 311805 - RNA, 19 nt, Artificial Sequence
  Description of Artificial Sequence: Synthetic oligonucleotide
gucaaacgcacacugcugc

SEQ ID NO: 311806 - RNA, 19 nt, Artificial Sequence
  Description of Artificial Sequence: Synthetic oligonucleotide
agaaaauguguagguuugc

SEQ ID NO: 311807 - RNA, 19 nt, Artificial Sequence
  Description of Artificial Sequence: Synthetic oligonucleotide
aagaacuagcuagguuacc

SEQ ID NO: 311808 - RNA, 19 nt, Artificial Sequence
  Description of Artificial Sequence: Synthetic oligonucleotide
uuuacucuuuaccguucag

SEQ ID NO: 311809 - RNA, 19 nt, Artificial Sequence
  Description of Artificial Sequence: Synthetic oligonucleotide
uuguauugguuuuacucuc

SEQ ID NO: 311810 - RNA, 19 nt, Artificial Sequence
  Description of Artificial Sequence: Synthetic oligonucleotide
ugcacccuuaagcaucucc

SEQ ID NO: 311811 - RNA, 19 nt, Artificial Sequence
  Description of Artificial Sequence: Synthetic oligonucleotide
aacgcacacugcugcuugc

SEQ ID NO: 311812 - RNA, 19 nt, Artificial Sequence
  Description of Artificial Sequence: Synthetic oligonucleotide
gaugagauggcggacagaa

SEQ ID NO: 311813 - RNA, 19 nt, Artificial Sequence
  Description of Artificial Sequence: Synthetic oligonucleotide
ucauuugauccuucugaug

SEQ ID NO: 311814 - RNA, 19 nt, Artificial Sequence
  Description of Artificial Sequence: Synthetic oligonucleotide
ugucaaacgcacacugcug

SEQ ID NO: 311815 - RNA, 19 nt, Artificial Sequence
  Description of Artificial Sequence: Synthetic oligonucleotide
accguucaggagcucaugg

SEQ ID NO: 311816 - RNA, 19 nt, Artificial Sequence
  Description of Artificial Sequence: Synthetic oligonucleotide
uaccaaaaguuacucaauu

SEQ ID NO: 311817 - RNA, 19 nt, Artificial Sequence
  Description of Artificial Sequence: Synthetic oligonucleotide
uuaccaaaaguuacucaau

SEQ ID NO: 311818 - RNA, 19 nt, Artificial Sequence
  Description of Artificial Sequence: Synthetic oligonucleotide
uuuaccguucaggagcuca

SEQ ID NO: 311819 - RNA, 19 nt, Artificial Sequence
  Description of Artificial Sequence: Synthetic oligonucleotide
acucugucuauacauagua

SEQ ID NO: 311820 - RNA, 19 nt, Artificial Sequence
  Description of Artificial Sequence: Synthetic oligonucleotide
guaacgguaagaaaauaga

SEQ ID NO: 311821 - RNA, 19 nt, Artificial Sequence
  Description of Artificial Sequence: Synthetic oligonucleotide
aaauguccauuauuacaaa

SEQ ID NO: 311822 - RNA, 19 nt, Artificial Sequence
  Description of Artificial Sequence: Synthetic oligonucleotide
caagaacuagcuagguuac

SEQ ID NO: 311823 - RNA, 19 nt, Artificial Sequence
  Description of Artificial Sequence: Synthetic oligonucleotide
uaggauucucuuacuaaaa

SEQ ID NO: 311824 - RNA, 19 nt, Artificial Sequence
  Description of Artificial Sequence: Synthetic oligonucleotide
aagaauauggagguccaua

SEQ ID NO: 311825 - RNA, 19 nt, Artificial Sequence
  Description of Artificial Sequence: Synthetic oligonucleotide
cuggucaauucucugcacc

SEQ ID NO: 311826 - RNA, 19 nt, Artificial Sequence
  Description of Artificial Sequence: Synthetic oligonucleotide
uucccuaccacggugacau

SEQ ID NO: 311827 - RNA, 19 nt, Artificial Sequence
  Description of Artificial Sequence: Synthetic oligonucleotide
uucuugcauauuguauugg

SEQ ID NO: 311828 - RNA, 19 nt, Artificial Sequence
  Description of Artificial Sequence: Synthetic oligonucleotide
acaccgaguaccaaaguag

SEQ ID NO: 311829 - RNA, 19 nt, Artificial Sequence
  Description of Artificial Sequence: Synthetic oligonucleotide
uacuaaaagcuagcaaaca

SEQ ID NO: 311830 - RNA, 19 nt, Artificial Sequence
  Description of Artificial Sequence: Synthetic oligonucleotide
agcaauccggcauuccuug

SEQ ID NO: 311831 - RNA, 19 nt, Artificial Sequence
  Description of Artificial Sequence: Synthetic oligonucleotide
uguggguuuucuccauuug

SEQ ID NO: 311832 - RNA, 19 nt, Artificial Sequence
  Description of Artificial Sequence: Synthetic oligonucleotide
auacaaagaaacggaaggu

SEQ ID NO: 311833 - RNA, 19 nt, Artificial Sequence
  Description of Artificial Sequence: Synthetic oligonucleotide
ucaugguaaaaugcuguca

SEQ ID NO: 311834 - RNA, 19 nt, Artificial Sequence
  Description of Artificial Sequence: Synthetic oligonucleotide
ggaauauuaaaugcuaaga

SEQ ID NO: 311835 - RNA, 19 nt, Artificial Sequence
  Description of Artificial Sequence: Synthetic oligonucleotide
uagguacacuucacaacag

SEQ ID NO: 311836 - RNA, 19 nt, Artificial Sequence
  Description of Artificial Sequence: Synthetic oligonucleotide
guaguuuagaaaaugugua

SEQ ID NO: 311837 - RNA, 19 nt, Artificial Sequence
  Description of Artificial Sequence: Synthetic oligonucleotide
uacucaggcgacuguacug

SEQ ID NO: 311838 - RNA, 19 nt, Artificial Sequence
  Description of Artificial Sequence: Synthetic oligonucleotide
cacacuuacgccuccagca

SEQ ID NO: 311839 - RNA, 19 nt, Artificial Sequence
  Description of Artificial Sequence: Synthetic oligonucleotide
gacaaccauucuuucugcc

SEQ ID NO: 311840 - RNA, 19 nt, Artificial Sequence
  Description of Artificial Sequence: Synthetic oligonucleotide
ggagauguuauggugcccg

SEQ ID NO: 311841 - RNA, 19 nt, Artificial Sequence
  Description of Artificial Sequence: Synthetic oligonucleotide
guaagaaagcacaauccca

SEQ ID NO: 311842 - RNA, 19 nt, Artificial Sequence
  Description of Artificial Sequence: Synthetic oligonucleotide
gauugacucaaacuuggua

SEQ ID NO: 311843 - RNA, 19 nt, Artificial Sequence
  Description of Artificial Sequence: Synthetic oligonucleotide
auauggagguccauacuuc

SEQ ID NO: 311844 - RNA, 19 nt, Artificial Sequence
  Description of Artificial Sequence: Synthetic oligonucleotide
cuucacaacagggugagca

SEQ ID NO: 311845 - RNA, 19 nt, Artificial Sequence
  Description of Artificial Sequence: Synthetic oligonucleotide
acugcacaugacacuaagc

SEQ ID NO: 311846 - RNA, 19 nt, Artificial Sequence
  Description of Artificial Sequence: Synthetic oligonucleotide
uacaagaacuagcuagguu

SEQ ID NO: 311847 - RNA, 19 nt, Artificial Sequence
  Description of Artificial Sequence: Synthetic oligonucleotide
acacucacaaagaagagua

SEQ ID NO: 311848 - RNA, 19 nt, Artificial Sequence
  Description of Artificial Sequence: Synthetic oligonucleotide
aaagaaacggaagguguua

SEQ ID NO: 311849 - RNA, 19 nt, Artificial Sequence
  Description of Artificial Sequence: Synthetic oligonucleotide
uacauaguacaaaggucau

SEQ ID NO: 311850 - RNA, 19 nt, Artificial Sequence
  Description of Artificial Sequence: Synthetic oligonucleotide
accaaaaguuacucaauuu

SEQ ID NO: 311851 - RNA, 19 nt, Artificial Sequence
  Description of Artificial Sequence: Synthetic oligonucleotide
aauucgugcagcgcuggca

SEQ ID NO: 311852 - RNA, 19 nt, Artificial Sequence
  Description of Artificial Sequence: Synthetic oligonucleotide
agccaacgcaaaugcuucc

SEQ ID NO: 311853 - RNA, 19 nt, Artificial Sequence
  Description of Artificial Sequence: Synthetic oligonucleotide
ugaauucgugcagcgcugg

SEQ ID NO: 311854 - RNA, 19 nt, Artificial Sequence
  Description of Artificial Sequence: Synthetic oligonucleotide
gaagaguaacgguaagaaa

SEQ ID NO: 311855 - RNA, 19 nt, Artificial Sequence
  Description of Artificial Sequence: Synthetic oligonucleotide
aaacaccgaguaccaaagu

SEQ ID NO: 311856 - RNA, 19 nt, Artificial Sequence
  Description of Artificial Sequence: Synthetic oligonucleotide
acgcaaaugcuuccgaaaa

SEQ ID NO: 311857 - RNA, 19 nt, Artificial Sequence
  Description of Artificial Sequence: Synthetic oligonucleotide
agcgccucgaaggggaagc

SEQ ID NO: 311858 - RNA, 19 nt, Artificial Sequence
  Description of Artificial Sequence: Synthetic oligonucleotide
gaaggacacgcuuguaaga

SEQ ID NO: 311859 - RNA, 19 nt, Artificial Sequence
  Description of Artificial Sequence: Synthetic oligonucleotide
uggcggacagaaacuacug

SEQ ID NO: 311860 - RNA, 19 nt, Artificial Sequence
  Description of Artificial Sequence: Synthetic oligonucleotide
ugcaguagguacacuucac

SEQ ID NO: 311861 - RNA, 19 nt, Artificial Sequence
  Description of Artificial Sequence: Synthetic oligonucleotide
ugcccgacuucucagacuu

SEQ ID NO: 311862 - RNA, 19 nt, Artificial Sequence
  Description of Artificial Sequence: Synthetic oligonucleotide
aaguagagagagggagcac

SEQ ID NO: 311863 - RNA, 19 nt, Artificial Sequence
  Description of Artificial Sequence: Synthetic oligonucleotide
guuaccaucauuccuuuau

SEQ ID NO: 311864 - RNA, 19 nt, Artificial Sequence
  Description of Artificial Sequence: Synthetic oligonucleotide
gcuuaggcguuccauacag

SEQ ID NO: 311865 - RNA, 19 nt, Artificial Sequence
  Description of Artificial Sequence: Synthetic oligonucleotide
gccgggugaauccagagcc

SEQ ID NO: 311866 - RNA, 19 nt, Artificial Sequence
  Description of Artificial Sequence: Synthetic oligonucleotide
agguuuacucuuuaccguu

SEQ ID NO: 311867 - RNA, 19 nt, Artificial Sequence
  Description of Artificial Sequence: Synthetic oligonucleotide
uguuauggugcccgacuuc

SEQ ID NO: 311868 - RNA, 19 nt, Artificial Sequence
  Description of Artificial Sequence: Synthetic oligonucleotide
augcagucauaacauggca

SEQ ID NO: 311869 - RNA, 19 nt, Artificial Sequence
  Description of Artificial Sequence: Synthetic oligonucleotide
agugaccacgauggaaaac

SEQ ID NO: 311870 - RNA, 19 nt, Artificial Sequence
  Description of Artificial Sequence: Synthetic oligonucleotide
uucuuucgaucaucuuucc

SEQ ID NO: 311871 - RNA, 19 nt, Artificial Sequence
  Description of Artificial Sequence: Synthetic oligonucleotide
acacgcuuguaagacagug

SEQ ID NO: 311872 - RNA, 19 nt, Artificial Sequence
  Description of Artificial Sequence: Synthetic oligonucleotide
aagaggcauugcuuuuaca

SEQ ID NO: 311873 - RNA, 19 nt, Artificial Sequence
  Description of Artificial Sequence: Synthetic oligonucleotide
ccaacccugacccaggagc

SEQ ID NO: 311874 - RNA, 19 nt, Artificial Sequence
  Description of Artificial Sequence: Synthetic oligonucleotide
uuacaagaacuagcuaggu

SEQ ID NO: 311875 - RNA, 19 nt, Artificial Sequence
  Description of Artificial Sequence: Synthetic oligonucleotide
acaaagucucagguggcag

SEQ ID NO: 311876 - RNA, 19 nt, Artificial Sequence
  Description of Artificial Sequence: Synthetic oligonucleotide
gcacacuucuugcauauug

SEQ ID NO: 311877 - RNA, 19 nt, Artificial Sequence
  Description of Artificial Sequence: Synthetic oligonucleotide
caagacucuaagguaauga

SEQ ID NO: 311878 - RNA, 19 nt, Artificial Sequence
  Description of Artificial Sequence: Synthetic oligonucleotide
acuacucaggcgacuguac

SEQ ID NO: 311879 - RNA, 19 nt, Artificial Sequence
  Description of Artificial Sequence: Synthetic oligonucleotide
auaguuaucuuuaccucaa

SEQ ID NO: 311880 - RNA, 19 nt, Artificial Sequence
  Description of Artificial Sequence: Synthetic oligonucleotide
gguaguuuagaaaaugugu

SEQ ID NO: 311881 - RNA, 19 nt, Artificial Sequence
  Description of Artificial Sequence: Synthetic oligonucleotide
agaguaacgguaagaaaau

SEQ ID NO: 311882 - RNA, 19 nt, Artificial Sequence
  Description of Artificial Sequence: Synthetic oligonucleotide
gcaguuuucccucuuagaa

SEQ ID NO: 311883 - RNA, 19 nt, Artificial Sequence
  Description of Artificial Sequence: Synthetic oligonucleotide
gcagucauaacauggcaca

SEQ ID NO: 311884 - RNA, 19 nt, Artificial Sequence
  Description of Artificial Sequence: Synthetic oligonucleotide
cugaauucgugcagcgcug

SEQ ID NO: 311885 - RNA, 19 nt, Artificial Sequence
  Description of Artificial Sequence: Synthetic oligonucleotide
aaagagccgacagcugaca

SEQ ID NO: 311886 - RNA, 19 nt, Artificial Sequence
  Description of Artificial Sequence: Synthetic oligonucleotide
cagccaacgcaaaugcuuc

SEQ ID NO: 311887 - RNA, 19 nt, Artificial Sequence
  Description of Artificial Sequence: Synthetic oligonucleotide
agagccgacagcugacaca

SEQ ID NO: 311888 - RNA, 19 nt, Artificial Sequence
  Description of Artificial Sequence: Synthetic oligonucleotide
gagguuuacucuuuaccgu

SEQ ID NO: 311889 - RNA, 19 nt, Artificial Sequence
  Description of Artificial Sequence: Synthetic oligonucleotide
gaccagguguuuccauucc

SEQ ID NO: 311890 - RNA, 19 nt, Artificial Sequence
  Description of Artificial Sequence: Synthetic oligonucleotide
cuuaggcguuccauacagc

SEQ ID NO: 311891 - RNA, 19 nt, Artificial Sequence
  Description of Artificial Sequence: Synthetic oligonucleotide
caacagggugagcaauccg

SEQ ID NO: 311892 - RNA, 19 nt, Artificial Sequence
  Description of Artificial Sequence: Synthetic oligonucleotide
acgccuccagcauuuaccu

SEQ ID NO: 311893 - RNA, 19 nt, Artificial Sequence
  Description of Artificial Sequence: Synthetic oligonucleotide
gaaagagccgacagcugac

SEQ ID NO: 311894 - RNA, 19 nt, Artificial Sequence
  Description of Artificial Sequence: Synthetic oligonucleotide
gcuagguuaccaucauucc

SEQ ID NO: 311895 - RNA, 19 nt, Artificial Sequence
  Description of Artificial Sequence: Synthetic oligonucleotide
uccguuuaguugugauuga

SEQ ID NO: 311896 - RNA, 19 nt, Artificial Sequence
  Description of Artificial Sequence: Synthetic oligonucleotide
cauuuaccuuagcaucaag

SEQ ID NO: 311897 - RNA, 19 nt, Artificial Sequence
  Description of Artificial Sequence: Synthetic oligonucleotide
cacggugacauaaauacau

SEQ ID NO: 311898 - RNA, 19 nt, Artificial Sequence
  Description of Artificial Sequence: Synthetic oligonucleotide
ugauucauuuuggcccgag

SEQ ID NO: 311899 - RNA, 19 nt, Artificial Sequence
  Description of Artificial Sequence: Synthetic oligonucleotide
caaaggucauacauaauau

SEQ ID NO: 311900 - RNA, 19 nt, Artificial Sequence
  Description of Artificial Sequence: Synthetic oligonucleotide
ggacacgcuuguaagacag

SEQ ID NO: 311901 - RNA, 19 nt, Artificial Sequence
  Description of Artificial Sequence: Synthetic oligonucleotide
uuaccguucaggagcucau

SEQ ID NO: 311902 - RNA, 19 nt, Artificial Sequence
  Description of Artificial Sequence: Synthetic oligonucleotide
uuacgccuccagcauuuac

SEQ ID NO: 311903 - RNA, 19 nt, Artificial Sequence
  Description of Artificial Sequence: Synthetic oligonucleotide
cugcccuuacuuaaagaca

SEQ ID NO: 311904 - RNA, 19 nt, Artificial Sequence
  Description of Artificial Sequence: Synthetic oligonucleotide
gaauucgugcagcgcuggc

SEQ ID NO: 311905 - RNA, 19 nt, Artificial Sequence
  Description of Artificial Sequence: Synthetic oligonucleotide
acagccaacgcaaaugcuu

SEQ ID NO: 311906 - RNA, 19 nt, Artificial Sequence
  Description of Artificial Sequence: Synthetic oligonucleotide
cuccugucggaaagagccg

SEQ ID NO: 311907 - RNA, 19 nt, Artificial Sequence
  Description of Artificial Sequence: Synthetic oligonucleotide
guaauggcugccacuacuc

SEQ ID NO: 311908 - RNA, 19 nt, Artificial Sequence
  Description of Artificial Sequence: Synthetic oligonucleotide
cacguucugagcacacuuc

SEQ ID NO: 311909 - RNA, 19 nt, Artificial Sequence
  Description of Artificial Sequence: Synthetic oligonucleotide
uaguuaucuuuaccucaaa

SEQ ID NO: 311910 - RNA, 19 nt, Artificial Sequence
  Description of Artificial Sequence: Synthetic oligonucleotide
auguuauggugcccgacuu

SEQ ID NO: 311911 - RNA, 19 nt, Artificial Sequence
  Description of Artificial Sequence: Synthetic oligonucleotide
auggcggacagaaacuacu

SEQ ID NO: 311912 - RNA, 19 nt, Artificial Sequence
  Description of Artificial Sequence: Synthetic oligonucleotide
acacuuacgccuccagcau

SEQ ID NO: 311913 - RNA, 19 nt, Artificial Sequence
  Description of Artificial Sequence: Synthetic oligonucleotide
ucucugcacccuuaagcau

SEQ ID NO: 311914 - RNA, 19 nt, Artificial Sequence
  Description of Artificial Sequence: Synthetic oligonucleotide
agucucagguggcaguuuu

SEQ ID NO: 311915 - RNA, 19 nt, Artificial Sequence
  Description of Artificial Sequence: Synthetic oligonucleotide
gagccgacagcugacacaa

SEQ ID NO: 311916 - RNA, 19 nt, Artificial Sequence
  Description of Artificial Sequence: Synthetic oligonucleotide
caccgaguaccaaaguaga

SEQ ID NO: 311917 - RNA, 19 nt, Artificial Sequence
  Description of Artificial Sequence: Synthetic oligonucleotide
cucgaaggggaagcgcugg

SEQ ID NO: 311918 - RNA, 19 nt, Artificial Sequence
  Description of Artificial Sequence: Synthetic oligonucleotide
acaggcuaugacugauagu

SEQ ID NO: 311919 - RNA, 19 nt, Artificial Sequence
  Description of Artificial Sequence: Synthetic oligonucleotide
caauaaaugcugcaauuau

SEQ ID NO: 311920 - RNA, 19 nt, Artificial Sequence
  Description of Artificial Sequence: Synthetic oligonucleotide
aggcacuuagcuccacacu

SEQ ID NO: 311921 - RNA, 19 nt, Artificial Sequence
  Description of Artificial Sequence: Synthetic oligonucleotide
cagucauaacauggcacag

SEQ ID NO: 311922 - RNA, 19 nt, Artificial Sequence
  Description of Artificial Sequence: Synthetic oligonucleotide
cuagguuaccaucauuccu

SEQ ID NO: 311923 - RNA, 19 nt, Artificial Sequence
  Description of Artificial Sequence: Synthetic oligonucleotide
cucuuacuaaaagcuagca

SEQ ID NO: 311924 - RNA, 19 nt, Artificial Sequence
  Description of Artificial Sequence: Synthetic oligonucleotide
gacagcgccucgaagggga

SEQ ID NO: 311925 - RNA, 19 nt, Artificial Sequence
  Description of Artificial Sequence: Synthetic oligonucleotide
ggacaaccauucuuucugc

SEQ ID NO: 311926 - RNA, 19 nt, Artificial Sequence
  Description of Artificial Sequence: Synthetic oligonucleotide
cacuaagcagugaccacga

SEQ ID NO: 311927 - RNA, 19 nt, Artificial Sequence
  Description of Artificial Sequence: Synthetic oligonucleotide
gcuuuuacaagaacuagcu

SEQ ID NO: 311928 - RNA, 19 nt, Artificial Sequence
  Description of Artificial Sequence: Synthetic oligonucleotide
ggugcaggcguagagcgcc

SEQ ID NO: 311929 - RNA, 19 nt, Artificial Sequence
  Description of Artificial Sequence: Synthetic oligonucleotide
aguggucagugccggguga

SEQ ID NO: 311930 - RNA, 19 nt, Artificial Sequence
  Description of Artificial Sequence: Synthetic oligonucleotide
cacccuuaagcaucuccuc

SEQ ID NO: 311931 - RNA, 19 nt, Artificial Sequence
  Description of Artificial Sequence: Synthetic oligonucleotide
acggugacauaaauacaug

SEQ ID NO: 311932 - RNA, 19 nt, Artificial Sequence
  Description of Artificial Sequence: Synthetic oligonucleotide
guguuuccauuccacccac

SEQ ID NO: 311933 - RNA, 19 nt, Artificial Sequence
  Description of Artificial Sequence: Synthetic oligonucleotide
accuggacaaccauucuuu

SEQ ID NO: 311934 - RNA, 19 nt, Artificial Sequence
  Description of Artificial Sequence: Synthetic oligonucleotide
uuuuacucuccugcuggua

SEQ ID NO: 311935 - RNA, 19 nt, Artificial Sequence
  Description of Artificial Sequence: Synthetic oligonucleotide
ugcagcgcuggcauuuauu

SEQ ID NO: 311936 - RNA, 19 nt, Artificial Sequence
  Description of Artificial Sequence: Synthetic oligonucleotide
auguugcaauacugacaag

SEQ ID NO: 311937 - RNA, 19 nt, Artificial Sequence
  Description of Artificial Sequence: Synthetic oligonucleotide
guuauggugcccgacuucu

SEQ ID NO: 311938 - RNA, 19 nt, Artificial Sequence
  Description of Artificial Sequence: Synthetic oligonucleotide
caaccauucuuucugcccu

SEQ ID NO: 311939 - RNA, 19 nt, Artificial Sequence
  Description of Artificial Sequence: Synthetic oligonucleotide
gccgcuuuaucugacaguc

SEQ ID NO: 311940 - RNA, 19 nt, Artificial Sequence
  Description of Artificial Sequence: Synthetic oligonucleotide
cucacugcacaaagucuca

SEQ ID NO: 311941 - RNA, 19 nt, Artificial Sequence
  Description of Artificial Sequence: Synthetic oligonucleotide
caauccggcauuccuugca

SEQ ID NO: 311942 - RNA, 19 nt, Artificial Sequence
  Description of Artificial Sequence: Synthetic oligonucleotide
ccaagaguauacccugaag

SEQ ID NO: 311943 - RNA, 19 nt, Artificial Sequence
  Description of Artificial Sequence: Synthetic oligonucleotide
gugccgggugaauccagag

SEQ ID NO: 311944 - RNA, 19 nt, Artificial Sequence
  Description of Artificial Sequence: Synthetic oligonucleotide
gcaguagguacacuucaca

SEQ ID NO: 311945 - RNA, 19 nt, Artificial Sequence
  Description of Artificial Sequence: Synthetic oligonucleotide
cugcaauuauguugcaaua

SEQ ID NO: 311946 - RNA, 19 nt, Artificial Sequence
  Description of Artificial Sequence: Synthetic oligonucleotide
gauucauuuuggcccgagu

SEQ ID NO: 311947 - RNA, 19 nt, Artificial Sequence
  Description of Artificial Sequence: Synthetic oligonucleotide
cauucccuaccacggugac

SEQ ID NO: 311948 - RNA, 19 nt, Artificial Sequence
  Description of Artificial Sequence: Synthetic oligonucleotide
uagcuagguuaccaucauu

SEQ ID NO: 311949 - RNA, 19 nt, Artificial Sequence
  Description of Artificial Sequence: Synthetic oligonucleotide
gagcaccggcuguuguugc

SEQ ID NO: 311950 - RNA, 19 nt, Artificial Sequence
  Description of Artificial Sequence: Synthetic oligonucleotide
cuggcauuuauugccaaua

SEQ ID NO: 311951 - RNA, 19 nt, Artificial Sequence
  Description of Artificial Sequence: Synthetic oligonucleotide
caacgcaaaugcuuccgaa

SEQ ID NO: 311952 - RNA, 19 nt, Artificial Sequence
  Description of Artificial Sequence: Synthetic oligonucleotide
ugcacguucugagcacacu

SEQ ID NO: 311953 - RNA, 19 nt, Artificial Sequence
  Description of Artificial Sequence: Synthetic oligonucleotide
gccaacgcaaaugcuuccg

SEQ ID NO: 311954 - RNA, 19 nt, Artificial Sequence
  Description of Artificial Sequence: Synthetic oligonucleotide
uggcucgagaagagcugcu

SEQ ID NO: 311955 - RNA, 19 nt, Artificial Sequence
  Description of Artificial Sequence: Synthetic oligonucleotide
aguauacccugaagcaaaa

SEQ ID NO: 311956 - RNA, 19 nt, Artificial Sequence
  Description of Artificial Sequence: Synthetic oligonucleotide
uaccguucaggagcucaug

SEQ ID NO: 311957 - RNA, 19 nt, Artificial Sequence
  Description of Artificial Sequence: Synthetic oligonucleotide
cacuucuugcauauuguau

SEQ ID NO: 311958 - RNA, 19 nt, Artificial Sequence
  Description of Artificial Sequence: Synthetic oligonucleotide
cacaaccuggcggcggcgg

SEQ ID NO: 311959 - RNA, 19 nt, Artificial Sequence
  Description of Artificial Sequence: Synthetic oligonucleotide
cauggcccuuccagucucc

SEQ ID NO: 311960 - RNA, 19 nt, Artificial Sequence
  Description of Artificial Sequence: Synthetic oligonucleotide
acuuacgccuccagcauuu

SEQ ID NO: 311961 - RNA, 19 nt, Artificial Sequence
  Description of Artificial Sequence: Synthetic oligonucleotide
gaguaacgguaagaaaaua

SEQ ID NO: 311962 - RNA, 19 nt, Artificial Sequence
  Description of Artificial Sequence: Synthetic oligonucleotide
gguguuaccaaaaguuacu

SEQ ID NO: 311963 - RNA, 19 nt, Artificial Sequence
  Description of Artificial Sequence: Synthetic oligonucleotide
cugucuccguuuaguugug

SEQ ID NO: 311964 - RNA, 19 nt, Artificial Sequence
  Description of Artificial Sequence: Synthetic oligonucleotide
guggcacuuggugcaggcg

SEQ ID NO: 311965 - RNA, 19 nt, Artificial Sequence
  Description of Artificial Sequence: Synthetic oligonucleotide
caauucucugcacccuuaa

SEQ ID NO: 311966 - RNA, 19 nt, Artificial Sequence
  Description of Artificial Sequence: Synthetic oligonucleotide
acuaagcagugaccacgau

SEQ ID NO: 311967 - RNA, 19 nt, Artificial Sequence
  Description of Artificial Sequence: Synthetic oligonucleotide
gguaaaaugcugucaugau

SEQ ID NO: 311968 - RNA, 19 nt, Artificial Sequence
  Description of Artificial Sequence: Synthetic oligonucleotide
ggugcccgacuucucagac

SEQ ID NO: 311969 - RNA, 19 nt, Artificial Sequence
  Description of Artificial Sequence: Synthetic oligonucleotide
ucgugcagcgcuggcauuu

SEQ ID NO: 311970 - RNA, 19 nt, Artificial Sequence
  Description of Artificial Sequence: Synthetic oligonucleotide
uugauucauuuuggcccga

SEQ ID NO: 311971 - RNA, 19 nt, Artificial Sequence
  Description of Artificial Sequence: Synthetic oligonucleotide
ggagcaccggcuguuguug

SEQ ID NO: 311972 - RNA, 19 nt, Artificial Sequence
  Description of Artificial Sequence: Synthetic oligonucleotide
auuuugaauugaagaugua

SEQ ID NO: 311973 - RNA, 19 nt, Artificial Sequence
  Description of Artificial Sequence: Synthetic oligonucleotide
ugucuccguuuaguuguga

SEQ ID NO: 311974 - RNA, 19 nt, Artificial Sequence
  Description of Artificial Sequence: Synthetic oligonucleotide
ggcacaaccuggcggcggc

SEQ ID NO: 311975 - RNA, 19 nt, Artificial Sequence
  Description of Artificial Sequence: Synthetic oligonucleotide
cagugccgggugaauccag

SEQ ID NO: 311976 - RNA, 19 nt, Artificial Sequence
  Description of Artificial Sequence: Synthetic oligonucleotide
guuuuacucuccugcuggu

SEQ ID NO: 311977 - RNA, 19 nt, Artificial Sequence
  Description of Artificial Sequence: Synthetic oligonucleotide
auucccuaccacggugaca

SEQ ID NO: 311978 - RNA, 19 nt, Artificial Sequence
  Description of Artificial Sequence: Synthetic oligonucleotide
ggcacuuagcuccacacuu

SEQ ID NO: 311979 - RNA, 19 nt, Artificial Sequence
  Description of Artificial Sequence: Synthetic oligonucleotide
cugccacuacucaggcgac

SEQ ID NO: 311980 - RNA, 19 nt, Artificial Sequence
  Description of Artificial Sequence: Synthetic oligonucleotide
gguuuacucuuuaccguuc

SEQ ID NO: 311981 - RNA, 19 nt, Artificial Sequence
  Description of Artificial Sequence: Synthetic oligonucleotide
ccgaguaccaaaguagaga

SEQ ID NO: 311982 - RNA, 19 nt, Artificial Sequence
  Description of Artificial Sequence: Synthetic oligonucleotide
gcuaugacugauaguuauc

SEQ ID NO: 311983 - RNA, 19 nt, Artificial Sequence
  Description of Artificial Sequence: Synthetic oligonucleotide
aggcguagagcgccgccau

SEQ ID NO: 311984 - RNA, 19 nt, Artificial Sequence
  Description of Artificial Sequence: Synthetic oligonucleotide
agugccgggugaauccaga

SEQ ID NO: 311985 - RNA, 19 nt, Artificial Sequence
  Description of Artificial Sequence: Synthetic oligonucleotide
gucuucacggagauguuau

SEQ ID NO: 311986 - RNA, 19 nt, Artificial Sequence
  Description of Artificial Sequence: Synthetic oligonucleotide
gccacuacucaggcgacug

SEQ ID NO: 311987 - RNA, 19 nt, Artificial Sequence
  Description of Artificial Sequence: Synthetic oligonucleotide
gcgacuguacugcuccuuc

SEQ ID NO: 311988 - RNA, 19 nt, Artificial Sequence
  Description of Artificial Sequence: Synthetic oligonucleotide
cacgcuuguaagacagugu

SEQ ID NO: 311989 - RNA, 19 nt, Artificial Sequence
  Description of Artificial Sequence: Synthetic oligonucleotide
cuacucaggcgacuguacu

SEQ ID NO: 311990 - RNA, 19 nt, Artificial Sequence
  Description of Artificial Sequence: Synthetic oligonucleotide
ggagcucaugguaguuuag

SEQ ID NO: 311991 - RNA, 19 nt, Artificial Sequence
  Description of Artificial Sequence: Synthetic oligonucleotide
aaguggcagugugggaauu

SEQ ID NO: 311992 - RNA, 19 nt, Artificial Sequence
  Description of Artificial Sequence: Synthetic oligonucleotide
gcuuuaucugacagucuca

SEQ ID NO: 311993 - RNA, 19 nt, Artificial Sequence
  Description of Artificial Sequence: Synthetic oligonucleotide
ccuggacaaccauucuuuc

SEQ ID NO: 311994 - RNA, 19 nt, Artificial Sequence
  Description of Artificial Sequence: Synthetic oligonucleotide
cgcuuguaagacagugugc

SEQ ID NO: 311995 - RNA, 19 nt, Artificial Sequence
  Description of Artificial Sequence: Synthetic oligonucleotide
gcaauccggcauuccuugc

SEQ ID NO: 311996 - RNA, 19 nt, Artificial Sequence
  Description of Artificial Sequence: Synthetic oligonucleotide
ugccacuacucaggcgacu

SEQ ID NO: 311997 - RNA, 19 nt, Artificial Sequence
  Description of Artificial Sequence: Synthetic oligonucleotide
ccaagcgcucagcaugcag

SEQ ID NO: 311998 - RNA, 19 nt, Artificial Sequence
  Description of Artificial Sequence: Synthetic oligonucleotide
ccuuacuuaaagacagacu

SEQ ID NO: 311999 - RNA, 19 nt, Artificial Sequence
  Description of Artificial Sequence: Synthetic oligonucleotide
ggaaaagcugucuccguuu

SEQ ID NO: 312000 - RNA, 19 nt, Artificial Sequence
  Description of Artificial Sequence: Synthetic oligonucleotide
acgcacacugcugcuugca

SEQ ID NO: 312001 - RNA, 19 nt, Artificial Sequence
  Description of Artificial Sequence: Synthetic oligonucleotide
ggcuuaggcguuccauaca

SEQ ID NO: 312002 - RNA, 19 nt, Artificial Sequence
  Description of Artificial Sequence: Synthetic oligonucleotide
gguuugcggaauauuaaau

SEQ ID NO: 312003 - RNA, 19 nt, Artificial Sequence
  Description of Artificial Sequence: Synthetic oligonucleotide
cugucggaaagagccgaca

SEQ ID NO: 312004 - RNA, 19 nt, Artificial Sequence
  Description of Artificial Sequence: Synthetic oligonucleotide
ccguuuaguugugauugac

SEQ ID NO: 312005 - RNA, 19 nt, Artificial Sequence
  Description of Artificial Sequence: Synthetic oligonucleotide
ggagguccauacuucuucu

SEQ ID NO: 312006 - RNA, 19 nt, Artificial Sequence
  Description of Artificial Sequence: Synthetic oligonucleotide
cacuacucaggcgacugua

SEQ ID NO: 312007 - RNA, 19 nt, Artificial Sequence
  Description of Artificial Sequence: Synthetic oligonucleotide
gcauucccuaccacgguga

SEQ ID NO: 312008 - RNA, 19 nt, Artificial Sequence
  Description of Artificial Sequence: Synthetic oligonucleotide
gugcaggcguagagcgccg

SEQ ID NO: 312009 - RNA, 19 nt, Artificial Sequence
  Description of Artificial Sequence: Synthetic oligonucleotide
uguccggcccgggccgugc

SEQ ID NO: 312010 - RNA, 19 nt, Artificial Sequence
  Description of Artificial Sequence: Synthetic oligonucleotide
ccucgaaggggaagcgcug

SEQ ID NO: 312011 - RNA, 19 nt, Artificial Sequence
  Description of Artificial Sequence: Synthetic oligonucleotide
ccaucuaccuucuuucgau

SEQ ID NO: 312012 - RNA, 19 nt, Artificial Sequence
  Description of Artificial Sequence: Synthetic oligonucleotide
gagcaauccggcauuccuu

SEQ ID NO: 312013 - RNA, 19 nt, Artificial Sequence
  Description of Artificial Sequence: Synthetic oligonucleotide
cuaccacggugacauaaau

SEQ ID NO: 312014 - RNA, 19 nt, Artificial Sequence
  Description of Artificial Sequence: Synthetic oligonucleotide
gggaaguguccaguacaac

SEQ ID NO: 312015 - RNA, 19 nt, Artificial Sequence
  Description of Artificial Sequence: Synthetic oligonucleotide
gcacccuuaagcaucuccu

SEQ ID NO: 312016 - RNA, 19 nt, Artificial Sequence
  Description of Artificial Sequence: Synthetic oligonucleotide
gcauuuaccuuagcaucaa

SEQ ID NO: 312017 - RNA, 19 nt, Artificial Sequence
  Description of Artificial Sequence: Synthetic oligonucleotide
gggaaaagcugucuccguu

SEQ ID NO: 312018 - RNA, 19 nt, Artificial Sequence
  Description of Artificial Sequence: Synthetic oligonucleotide
ggugagagaaaggcucucu

SEQ ID NO: 312019 - RNA, 19 nt, Artificial Sequence
  Description of Artificial Sequence: Synthetic oligonucleotide
ggucuucacggagauguua

SEQ ID NO: 312020 - RNA, 19 nt, Artificial Sequence
  Description of Artificial Sequence: Synthetic oligonucleotide
ccuaccacggugacauaaa

SEQ ID NO: 312021 - RNA, 19 nt, Artificial Sequence
  Description of Artificial Sequence: Synthetic oligonucleotide
ggcucgagaagagcugcuc

SEQ ID NO: 312022 - RNA, 19 nt, Artificial Sequence
  Description of Artificial Sequence: Synthetic oligonucleotide
ccaacgcaaaugcuuccga

SEQ ID NO: 312023 - RNA, 19 nt, Artificial Sequence
  Description of Artificial Sequence: Synthetic oligonucleotide
ggcuggcucgagaagagcu

SEQ ID NO: 312024 - RNA, 19 nt, Artificial Sequence
  Description of Artificial Sequence: Synthetic oligonucleotide
caaggcuuaggcguuccau

SEQ ID NO: 312025 - RNA, 19 nt, Artificial Sequence
  Description of Artificial Sequence: Synthetic oligonucleotide
ggcguagagcgccgccaug

SEQ ID NO: 312026 - RNA, 19 nt, Artificial Sequence
  Description of Artificial Sequence: Synthetic oligonucleotide
gcugcacguucugagcaca

SEQ ID NO: 312027 - RNA, 19 nt, Artificial Sequence
  Description of Artificial Sequence: Synthetic oligonucleotide
gguuaccaucauuccuuua

SEQ ID NO: 312028 - RNA, 19 nt, Artificial Sequence
  Description of Artificial Sequence: Synthetic oligonucleotide
agcacacuucuugcauauu

SEQ ID NO: 312029 - RNA, 19 nt, Artificial Sequence
  Description of Artificial Sequence: Synthetic oligonucleotide
cguuuaguugugauugacu

SEQ ID NO: 312030 - RNA, 19 nt, Artificial Sequence
  Description of Artificial Sequence: Synthetic oligonucleotide
gacacgcuuguaagacagu

SEQ ID NO: 312031 - RNA, 19 nt, Artificial Sequence
  Description of Artificial Sequence: Synthetic oligonucleotide
gugcccgacuucucagacu

SEQ ID NO: 312032 - RNA, 19 nt, Artificial Sequence
  Description of Artificial Sequence: Synthetic oligonucleotide
cugagucaauaugaauuuu

SEQ ID NO: 312033 - RNA, 19 nt, Artificial Sequence
  Description of Artificial Sequence: Synthetic oligonucleotide
cugcauucccuaccacggu

SEQ ID NO: 312034 - RNA, 19 nt, Artificial Sequence
  Description of Artificial Sequence: Synthetic oligonucleotide
gccucgaaggggaagcgcu

SEQ ID NO: 312035 - RNA, 19 nt, Artificial Sequence
  Description of Artificial Sequence: Synthetic oligonucleotide
gcgccucgaaggggaagcg

SEQ ID NO: 312036 - RNA, 19 nt, Artificial Sequence
  Description of Artificial Sequence: Synthetic oligonucleotide
ggagcaggucugagacccc

SEQ ID NO: 312037 - RNA, 19 nt, Artificial Sequence
  Description of Artificial Sequence: Synthetic oligonucleotide
caagaauauggagguccau

SEQ ID NO: 312038 - RNA, 19 nt, Artificial Sequence
  Description of Artificial Sequence: Synthetic oligonucleotide
gcacaaccuggcggcggcg

SEQ ID NO: 312039 - RNA, 19 nt, Artificial Sequence
  Description of Artificial Sequence: Synthetic oligonucleotide
cacuuacgccuccagcauu

SEQ ID NO: 312040 - RNA, 19 nt, Artificial Sequence
  Description of Artificial Sequence: Synthetic oligonucleotide
cccuaccacggugacauaa

SEQ ID NO: 312041 - RNA, 19 nt, Artificial Sequence
  Description of Artificial Sequence: Synthetic oligonucleotide
ucccuaccacggugacaua

SEQ ID NO: 312042 - RNA, 19 nt, Artificial Sequence
  Description of Artificial Sequence: Synthetic oligonucleotide
cggcccgccgcuuuaucug

SEQ ID NO: 312043 - RNA, 19 nt, Artificial Sequence
  Description of Artificial Sequence: Synthetic oligonucleotide
gcguagagcgccgccaugu

SEQ ID NO: 312044 - RNA, 19 nt, Artificial Sequence
  Description of Artificial Sequence: Synthetic oligonucleotide
agccgacagcugacacaag

SEQ ID NO: 312045 - RNA, 19 nt, Artificial Sequence
  Description of Artificial Sequence: Synthetic oligonucleotide
ccgggugaauccagagcca

SEQ ID NO: 312046 - RNA, 19 nt, Artificial Sequence
  Description of Artificial Sequence: Synthetic oligonucleotide
cuuacgccuccagcauuua

SEQ ID NO: 312047 - RNA, 19 nt, Artificial Sequence
  Description of Artificial Sequence: Synthetic oligonucleotide
ccaguacaaccuggacaac

SEQ ID NO: 312048 - RNA, 19 nt, Artificial Sequence
  Description of Artificial Sequence: Synthetic oligonucleotide
gcacagcaguuuucccucu

SEQ ID NO: 312049 - RNA, 19 nt, Artificial Sequence
  Description of Artificial Sequence: Synthetic oligonucleotide
cccgccgcuuuaucugaca

SEQ ID NO: 312050 - RNA, 19 nt, Artificial Sequence
  Description of Artificial Sequence: Synthetic oligonucleotide
cgccucgaaggggaagcgc

SEQ ID NO: 312051 - RNA, 19 nt, Artificial Sequence
  Description of Artificial Sequence: Synthetic oligonucleotide
cgggccgugcucgccgccg

SEQ ID NO: 312052 - RNA, 19 nt, Artificial Sequence
  Description of Artificial Sequence: Synthetic oligonucleotide
ccgcuuuaucugacagucu

SEQ ID NO: 312053 - RNA, 19 nt, Artificial Sequence
  Description of Artificial Sequence: Synthetic oligonucleotide
ccggcccgccgcuuuaucu

SEQ ID NO: 312054 - RNA, 19 nt, Artificial Sequence
  Description of Artificial Sequence: Synthetic oligonucleotide
gcccgccgcuuuaucugac

SEQ ID NO: 312055 - RNA, 19 nt, Artificial Sequence
  Description of Artificial Sequence: Synthetic oligonucleotide
gccggcccgccgcuuuauc

SEQ ID NO: 312056 - RNA, 19 nt, Artificial Sequence
  Description of Artificial Sequence: Synthetic oligonucleotide
ccacuacucaggcgacugu

SEQ ID NO: 312057 - RNA, 19 nt, Artificial Sequence
  Description of Artificial Sequence: Synthetic oligonucleotide
cccaagcgcucagcaugca

SEQ ID NO: 312058 - RNA, 19 nt, Artificial Sequence
  Description of Artificial Sequence: Synthetic oligonucleotide
aauuuuacuugucagauag

SEQ ID NO: 312059 - RNA, 19 nt, Artificial Sequence
  Description of Artificial Sequence: Synthetic oligonucleotide
acaaaguuaacuuugacca

SEQ ID NO: 312060 - RNA, 19 nt, Artificial Sequence
  Description of Artificial Sequence: Synthetic oligonucleotide
uauauaacaacaacuuaag

SEQ ID NO: 312061 - RNA, 19 nt, Artificial Sequence
  Description of Artificial Sequence: Synthetic oligonucleotide
agagaaguaaccuucauga

SEQ ID NO: 312062 - RNA, 19 nt, Artificial Sequence
  Description of Artificial Sequence: Synthetic oligonucleotide
ucgguaguaacguaggucg

SEQ ID NO: 312063 - RNA, 19 nt, Artificial Sequence
  Description of Artificial Sequence: Synthetic oligonucleotide
aaaaccugcgccuuauccg

SEQ ID NO: 312064 - RNA, 19 nt, Artificial Sequence
  Description of Artificial Sequence: Synthetic oligonucleotide
auaacaacaacuuaagcau

SEQ ID NO: 312065 - RNA, 19 nt, Artificial Sequence
  Description of Artificial Sequence: Synthetic oligonucleotide
aaaguuaacuuugaccaac

SEQ ID NO: 312066 - RNA, 19 nt, Artificial Sequence
  Description of Artificial Sequence: Synthetic oligonucleotide
uauccauuaagcuucuuag

SEQ ID NO: 312067 - RNA, 19 nt, Artificial Sequence
  Description of Artificial Sequence: Synthetic oligonucleotide
uuacuugucagauagucca

SEQ ID NO: 312068 - RNA, 19 nt, Artificial Sequence
  Description of Artificial Sequence: Synthetic oligonucleotide
ugcaugauggcacugaacu

SEQ ID NO: 312069 - RNA, 19 nt, Artificial Sequence
  Description of Artificial Sequence: Synthetic oligonucleotide
ugcacggcaaacuaaaacc

SEQ ID NO: 312070 - RNA, 19 nt, Artificial Sequence
  Description of Artificial Sequence: Synthetic oligonucleotide
acgacuuuaauuuuacuug

SEQ ID NO: 312071 - RNA, 19 nt, Artificial Sequence
  Description of Artificial Sequence: Synthetic oligonucleotide
uggaauggugagaaggugg

SEQ ID NO: 312072 - RNA, 19 nt, Artificial Sequence
  Description of Artificial Sequence: Synthetic oligonucleotide
cuuuccacgacugugagag

SEQ ID NO: 312073 - RNA, 19 nt, Artificial Sequence
  Description of Artificial Sequence: Synthetic oligonucleotide
cagagugcaauaaugcugg

SEQ ID NO: 312074 - RNA, 19 nt, Artificial Sequence
  Description of Artificial Sequence: Synthetic oligonucleotide
uguguacuugaagagaagg

SEQ ID NO: 312075 - RNA, 19 nt, Artificial Sequence
  Description of Artificial Sequence: Synthetic oligonucleotide
agccacaugacccucuacc

SEQ ID NO: 312076 - RNA, 19 nt, Artificial Sequence
  Description of Artificial Sequence: Synthetic oligonucleotide
uauaguuucugcuugcuau

SEQ ID NO: 312077 - RNA, 19 nt, Artificial Sequence
  Description of Artificial Sequence: Synthetic oligonucleotide
uuuacuugucagauagucc

SEQ ID NO: 312078 - RNA, 19 nt, Artificial Sequence
  Description of Artificial Sequence: Synthetic oligonucleotide
ucguuuaccagccugugca

SEQ ID NO: 312079 - RNA, 19 nt, Artificial Sequence
  Description of Artificial Sequence: Synthetic oligonucleotide
uacucuaaggccucgaaac

SEQ ID NO: 312080 - RNA, 19 nt, Artificial Sequence
  Description of Artificial Sequence: Synthetic oligonucleotide
ugcagagucgguaguaacg

SEQ ID NO: 312081 - RNA, 19 nt, Artificial Sequence
  Description of Artificial Sequence: Synthetic oligonucleotide
agaaguaaccuucaugagu

SEQ ID NO: 312082 - RNA, 19 nt, Artificial Sequence
  Description of Artificial Sequence: Synthetic oligonucleotide
aagaaguaccgccaguugu

SEQ ID NO: 312083 - RNA, 19 nt, Artificial Sequence
  Description of Artificial Sequence: Synthetic oligonucleotide
aaggccucgaaacaaggug

SEQ ID NO: 312084 - RNA, 19 nt, Artificial Sequence
  Description of Artificial Sequence: Synthetic oligonucleotide
aggacugauagacacauga

SEQ ID NO: 312085 - RNA, 19 nt, Artificial Sequence
  Description of Artificial Sequence: Synthetic oligonucleotide
gacuugaagaaguaccgcc

SEQ ID NO: 312086 - RNA, 19 nt, Artificial Sequence
  Description of Artificial Sequence: Synthetic oligonucleotide
ugaaccuugcagcaaaccu

SEQ ID NO: 312087 - RNA, 19 nt, Artificial Sequence
  Description of Artificial Sequence: Synthetic oligonucleotide
cacuccuagagcuucacgg

SEQ ID NO: 312088 - RNA, 19 nt, Artificial Sequence
  Description of Artificial Sequence: Synthetic oligonucleotide
aauacugugccaaccagug

SEQ ID NO: 312089 - RNA, 19 nt, Artificial Sequence
  Description of Artificial Sequence: Synthetic oligonucleotide
guagguggcaggcagacag

SEQ ID NO: 312090 - RNA, 19 nt, Artificial Sequence
  Description of Artificial Sequence: Synthetic oligonucleotide
uccauuaagcuucuuagua

SEQ ID NO: 312091 - RNA, 19 nt, Artificial Sequence
  Description of Artificial Sequence: Synthetic oligonucleotide
aguaacguaggucguuuac

SEQ ID NO: 312092 - RNA, 19 nt, Artificial Sequence
  Description of Artificial Sequence: Synthetic oligonucleotide
uagugagaccaguaggugg

SEQ ID NO: 312093 - RNA, 19 nt, Artificial Sequence
  Description of Artificial Sequence: Synthetic oligonucleotide
guagacuugaagaaguacc

SEQ ID NO: 312094 - RNA, 19 nt, Artificial Sequence
  Description of Artificial Sequence: Synthetic oligonucleotide
aaguagaacagauuuuguu

SEQ ID NO: 312095 - RNA, 19 nt, Artificial Sequence
  Description of Artificial Sequence: Synthetic oligonucleotide
aaguuaacuuugaccaacc

SEQ ID NO: 312096 - RNA, 19 nt, Artificial Sequence
  Description of Artificial Sequence: Synthetic oligonucleotide
cugguaaacauguugagga

SEQ ID NO: 312097 - RNA, 19 nt, Artificial Sequence
  Description of Artificial Sequence: Synthetic oligonucleotide
uacuugaagagaaggguca

SEQ ID NO: 312098 - RNA, 19 nt, Artificial Sequence
  Description of Artificial Sequence: Synthetic oligonucleotide
ugucuuccaaaacacuaag

SEQ ID NO: 312099 - RNA, 19 nt, Artificial Sequence
  Description of Artificial Sequence: Synthetic oligonucleotide
uugaaauuccgccccagca

SEQ ID NO: 312100 - RNA, 19 nt, Artificial Sequence
  Description of Artificial Sequence: Synthetic oligonucleotide
cuuaguaucacaauggaau

SEQ ID NO: 312101 - RNA, 19 nt, Artificial Sequence
  Description of Artificial Sequence: Synthetic oligonucleotide
ucguaagcgguccuuggcg

SEQ ID NO: 312102 - RNA, 19 nt, Artificial Sequence
  Description of Artificial Sequence: Synthetic oligonucleotide
ugcaauaaugcuggggagg

SEQ ID NO: 312103 - RNA, 19 nt, Artificial Sequence
  Description of Artificial Sequence: Synthetic oligonucleotide
ucuaaggccucgaaacaag

SEQ ID NO: 312104 - RNA, 19 nt, Artificial Sequence
  Description of Artificial Sequence: Synthetic oligonucleotide
ugaaauuccgccccagcac

SEQ ID NO: 312105 - RNA, 19 nt, Artificial Sequence
  Description of Artificial Sequence: Synthetic oligonucleotide
caugcagagugcaauaaug

SEQ ID NO: 312106 - RNA, 19 nt, Artificial Sequence
  Description of Artificial Sequence: Synthetic oligonucleotide
agugacugguagcagaucu

SEQ ID NO: 312107 - RNA, 19 nt, Artificial Sequence
  Description of Artificial Sequence: Synthetic oligonucleotide
ugguugauagagcgcaggg

SEQ ID NO: 312108 - RNA, 19 nt, Artificial Sequence
  Description of Artificial Sequence: Synthetic oligonucleotide
uccgguuucaacacugaug

SEQ ID NO: 312109 - RNA, 19 nt, Artificial Sequence
  Description of Artificial Sequence: Synthetic oligonucleotide
ugagacuuaugaaccagga

SEQ ID NO: 312110 - RNA, 19 nt, Artificial Sequence
  Description of Artificial Sequence: Synthetic oligonucleotide
gaccugaacagauuccugc

SEQ ID NO: 312111 - RNA, 19 nt, Artificial Sequence
  Description of Artificial Sequence: Synthetic oligonucleotide
uccuuggcgauucugacuc

SEQ ID NO: 312112 - RNA, 19 nt, Artificial Sequence
  Description of Artificial Sequence: Synthetic oligonucleotide
uaacguaggucguuuacca

SEQ ID NO: 312113 - RNA, 19 nt, Artificial Sequence
  Description of Artificial Sequence: Synthetic oligonucleotide
ucugucgugacuuggugga

SEQ ID NO: 312114 - RNA, 19 nt, Artificial Sequence
  Description of Artificial Sequence: Synthetic oligonucleotide
ugagguucauucuccaucu

SEQ ID NO: 312115 - RNA, 19 nt, Artificial Sequence
  Description of Artificial Sequence: Synthetic oligonucleotide
acucgauucgucuuaggug

SEQ ID NO: 312116 - RNA, 19 nt, Artificial Sequence
  Description of Artificial Sequence: Synthetic oligonucleotide
auguuguaaauggcgauac

SEQ ID NO: 312117 - RNA, 19 nt, Artificial Sequence
  Description of Artificial Sequence: Synthetic oligonucleotide
aaaacaguguccagauauc

SEQ ID NO: 312118 - RNA, 19 nt, Artificial Sequence
  Description of Artificial Sequence: Synthetic oligonucleotide
ucccagacgacuuuaauuu

SEQ ID NO: 312119 - RNA, 19 nt, Artificial Sequence
  Description of Artificial Sequence: Synthetic oligonucleotide
ugauagacacaugaucugc

SEQ ID NO: 312120 - RNA, 19 nt, Artificial Sequence
  Description of Artificial Sequence: Synthetic oligonucleotide
gauggagcguccgaaagag

SEQ ID NO: 312121 - RNA, 19 nt, Artificial Sequence
  Description of Artificial Sequence: Synthetic oligonucleotide
uguucgagagugcacggca

SEQ ID NO: 312122 - RNA, 19 nt, Artificial Sequence
  Description of Artificial Sequence: Synthetic oligonucleotide
acuuaagcauuuuauuuau

SEQ ID NO: 312123 - RNA, 19 nt, Artificial Sequence
  Description of Artificial Sequence: Synthetic oligonucleotide
gcaaacuaaaaccugcgcc

SEQ ID NO: 312124 - RNA, 19 nt, Artificial Sequence
  Description of Artificial Sequence: Synthetic oligonucleotide
ccgguuucaacacugaugg

SEQ ID NO: 312125 - RNA, 19 nt, Artificial Sequence
  Description of Artificial Sequence: Synthetic oligonucleotide
acuggaauagcaugguggu

SEQ ID NO: 312126 - RNA, 19 nt, Artificial Sequence
  Description of Artificial Sequence: Synthetic oligonucleotide
ucgucuuaggugaacacuc

SEQ ID NO: 312127 - RNA, 19 nt, Artificial Sequence
  Description of Artificial Sequence: Synthetic oligonucleotide
cuuaugaaccaggacuugg

SEQ ID NO: 312128 - RNA, 19 nt, Artificial Sequence
  Description of Artificial Sequence: Synthetic oligonucleotide
ugguggauuccccagagau

SEQ ID NO: 312129 - RNA, 19 nt, Artificial Sequence
  Description of Artificial Sequence: Synthetic oligonucleotide
ucgcgaaucucugacaaag

SEQ ID NO: 312130 - RNA, 19 nt, Artificial Sequence
  Description of Artificial Sequence: Synthetic oligonucleotide
uagcuagugagaccaguag

SEQ ID NO: 312131 - RNA, 19 nt, Artificial Sequence
  Description of Artificial Sequence: Synthetic oligonucleotide
gaaguaaccuucaugagua

SEQ ID NO: 312132 - RNA, 19 nt, Artificial Sequence
  Description of Artificial Sequence: Synthetic oligonucleotide
cucgauucgucuuagguga

SEQ ID NO: 312133 - RNA, 19 nt, Artificial Sequence
  Description of Artificial Sequence: Synthetic oligonucleotide
aaaacgcgagucuucgcga

SEQ ID NO: 312134 - RNA, 19 nt, Artificial Sequence
  Description of Artificial Sequence: Synthetic oligonucleotide
aauagcauggugguccgga

SEQ ID NO: 312135 - RNA, 19 nt, Artificial Sequence
  Description of Artificial Sequence: Synthetic oligonucleotide
auucgucuuaggugaacac

SEQ ID NO: 312136 - RNA, 19 nt, Artificial Sequence
  Description of Artificial Sequence: Synthetic oligonucleotide
agcaacuugucuugaaccu

SEQ ID NO: 312137 - RNA, 19 nt, Artificial Sequence
  Description of Artificial Sequence: Synthetic oligonucleotide
guuguaaauggcgauacca

SEQ ID NO: 312138 - RNA, 19 nt, Artificial Sequence
  Description of Artificial Sequence: Synthetic oligonucleotide
aguaggacucgauucgucu

SEQ ID NO: 312139 - RNA, 19 nt, Artificial Sequence
  Description of Artificial Sequence: Synthetic oligonucleotide
ugacaaagagcagagacuu

SEQ ID NO: 312140 - RNA, 19 nt, Artificial Sequence
  Description of Artificial Sequence: Synthetic oligonucleotide
gaugagaaagacaggccgc

SEQ ID NO: 312141 - RNA, 19 nt, Artificial Sequence
  Description of Artificial Sequence: Synthetic oligonucleotide
aacgcuaccagugccaaau

SEQ ID NO: 312142 - RNA, 19 nt, Artificial Sequence
  Description of Artificial Sequence: Synthetic oligonucleotide
cuaaggccucgaaacaagg

SEQ ID NO: 312143 - RNA, 19 nt, Artificial Sequence
  Description of Artificial Sequence: Synthetic oligonucleotide
agacuugaagaaguaccgc

SEQ ID NO: 312144 - RNA, 19 nt, Artificial Sequence
  Description of Artificial Sequence: Synthetic oligonucleotide
uccuagagcuucacggugc

SEQ ID NO: 312145 - RNA, 19 nt, Artificial Sequence
  Description of Artificial Sequence: Synthetic oligonucleotide
cucgacauaaacaguucug

SEQ ID NO: 312146 - RNA, 19 nt, Artificial Sequence
  Description of Artificial Sequence: Synthetic oligonucleotide
ucaugagacuuaugaacca

SEQ ID NO: 312147 - RNA, 19 nt, Artificial Sequence
  Description of Artificial Sequence: Synthetic oligonucleotide
ggcgugauggcauccaugg

SEQ ID NO: 312148 - RNA, 19 nt, Artificial Sequence
  Description of Artificial Sequence: Synthetic oligonucleotide
uaggucguuuaccagccug

SEQ ID NO: 312149 - RNA, 19 nt, Artificial Sequence
  Description of Artificial Sequence: Synthetic oligonucleotide
auccguacaaaguuaacuu

SEQ ID NO: 312150 - RNA, 19 nt, Artificial Sequence
  Description of Artificial Sequence: Synthetic oligonucleotide
gaaauuccgccccagcaca

SEQ ID NO: 312151 - RNA, 19 nt, Artificial Sequence
  Description of Artificial Sequence: Synthetic oligonucleotide
ugauggagcguccgaaaga

SEQ ID NO: 312152 - RNA, 19 nt, Artificial Sequence
  Description of Artificial Sequence: Synthetic oligonucleotide
gugguauaguuucugcuug

SEQ ID NO: 312153 - RNA, 19 nt, Artificial Sequence
  Description of Artificial Sequence: Synthetic oligonucleotide
acaguguccagauauccaa

SEQ ID NO: 312154 - RNA, 19 nt, Artificial Sequence
  Description of Artificial Sequence: Synthetic oligonucleotide
agguguucgagagugcacg

SEQ ID NO: 312155 - RNA, 19 nt, Artificial Sequence
  Description of Artificial Sequence: Synthetic oligonucleotide
gaagaaguaccgccaguug

SEQ ID NO: 312156 - RNA, 19 nt, Artificial Sequence
  Description of Artificial Sequence: Synthetic oligonucleotide
ugaucugcauggaccacgc

SEQ ID NO: 312157 - RNA, 19 nt, Artificial Sequence
  Description of Artificial Sequence: Synthetic oligonucleotide
uguuguaaauggcgauacc

SEQ ID NO: 312158 - RNA, 19 nt, Artificial Sequence
  Description of Artificial Sequence: Synthetic oligonucleotide
uucaaggcaaucggagggg

SEQ ID NO: 312159 - RNA, 19 nt, Artificial Sequence
  Description of Artificial Sequence: Synthetic oligonucleotide
agccauguuguaaauggcg

SEQ ID NO: 312160 - RNA, 19 nt, Artificial Sequence
  Description of Artificial Sequence: Synthetic oligonucleotide
cuuaggugaacacucacaa

SEQ ID NO: 312161 - RNA, 19 nt, Artificial Sequence
  Description of Artificial Sequence: Synthetic oligonucleotide
ugagauccguacaaaguua

SEQ ID NO: 312162 - RNA, 19 nt, Artificial Sequence
  Description of Artificial Sequence: Synthetic oligonucleotide
uucacgucaggugacgggc

SEQ ID NO: 312163 - RNA, 19 nt, Artificial Sequence
  Description of Artificial Sequence: Synthetic oligonucleotide
accaaucuccucuuguaga

SEQ ID NO: 312164 - RNA, 19 nt, Artificial Sequence
  Description of Artificial Sequence: Synthetic oligonucleotide
augaucugcauggaccacg

SEQ ID NO: 312165 - RNA, 19 nt, Artificial Sequence
  Description of Artificial Sequence: Synthetic oligonucleotide
aaguaaccuucaugaguag

SEQ ID NO: 312166 - RNA, 19 nt, Artificial Sequence
  Description of Artificial Sequence: Synthetic oligonucleotide
ugaguaggcugaugaaaug

SEQ ID NO: 312167 - RNA, 19 nt, Artificial Sequence
  Description of Artificial Sequence: Synthetic oligonucleotide
agagucgguaguaacguag

SEQ ID NO: 312168 - RNA, 19 nt, Artificial Sequence
  Description of Artificial Sequence: Synthetic oligonucleotide
aaccagugggaguacgccu

SEQ ID NO: 312169 - RNA, 19 nt, Artificial Sequence
  Description of Artificial Sequence: Synthetic oligonucleotide
aguaucacaauggaaugau

SEQ ID NO: 312170 - RNA, 19 nt, Artificial Sequence
  Description of Artificial Sequence: Synthetic oligonucleotide
gagugcaauaaugcugggg

SEQ ID NO: 312171 - RNA, 19 nt, Artificial Sequence
  Description of Artificial Sequence: Synthetic oligonucleotide
gacugauggaugaaagcug

SEQ ID NO: 312172 - RNA, 19 nt, Artificial Sequence
  Description of Artificial Sequence: Synthetic oligonucleotide
uaaggccucgaaacaaggu

SEQ ID NO: 312173 - RNA, 19 nt, Artificial Sequence
  Description of Artificial Sequence: Synthetic oligonucleotide
ugcuccaaaugccuggcaa

SEQ ID NO: 312174 - RNA, 19 nt, Artificial Sequence
  Description of Artificial Sequence: Synthetic oligonucleotide
aaccuugcagcaaaccugu

SEQ ID NO: 312175 - RNA, 19 nt, Artificial Sequence
  Description of Artificial Sequence: Synthetic oligonucleotide
uugcuauucagagucucca

SEQ ID NO: 312176 - RNA, 19 nt, Artificial Sequence
  Description of Artificial Sequence: Synthetic oligonucleotide
guaacguaggucguuuacc

SEQ ID NO: 312177 - RNA, 19 nt, Artificial Sequence
  Description of Artificial Sequence: Synthetic oligonucleotide
ugguauaguuucugcuugc

SEQ ID NO: 312178 - RNA, 19 nt, Artificial Sequence
  Description of Artificial Sequence: Synthetic oligonucleotide
cuugaaauuccgccccagc

SEQ ID NO: 312179 - RNA, 19 nt, Artificial Sequence
  Description of Artificial Sequence: Synthetic oligonucleotide
caaacuaaaaccugcgccu

SEQ ID NO: 312180 - RNA, 19 nt, Artificial Sequence
  Description of Artificial Sequence: Synthetic oligonucleotide
uucgucuuaggugaacacu

SEQ ID NO: 312181 - RNA, 19 nt, Artificial Sequence
  Description of Artificial Sequence: Synthetic oligonucleotide
cuucacgucaggugacggg

SEQ ID NO: 312182 - RNA, 19 nt, Artificial Sequence
  Description of Artificial Sequence: Synthetic oligonucleotide
auaaugcuggggaggaagg

SEQ ID NO: 312183 - RNA, 19 nt, Artificial Sequence
  Description of Artificial Sequence: Synthetic oligonucleotide
uguacucuaaggccucgaa

SEQ ID NO: 312184 - RNA, 19 nt, Artificial Sequence
  Description of Artificial Sequence: Synthetic oligonucleotide
cucugguaaacauguugag

SEQ ID NO: 312185 - RNA, 19 nt, Artificial Sequence
  Description of Artificial Sequence: Synthetic oligonucleotide
gugguugcagagucgguag

SEQ ID NO: 312186 - RNA, 19 nt, Artificial Sequence
  Description of Artificial Sequence: Synthetic oligonucleotide
caugagacuuaugaaccag

SEQ ID NO: 312187 - RNA, 19 nt, Artificial Sequence
  Description of Artificial Sequence: Synthetic oligonucleotide
aagguguucgagagugcac

SEQ ID NO: 312188 - RNA, 19 nt, Artificial Sequence
  Description of Artificial Sequence: Synthetic oligonucleotide
gugaaugaucacuuugguc

SEQ ID NO: 312189 - RNA, 19 nt, Artificial Sequence
  Description of Artificial Sequence: Synthetic oligonucleotide
uucaggcugugguaguccc

SEQ ID NO: 312190 - RNA, 19 nt, Artificial Sequence
  Description of Artificial Sequence: Synthetic oligonucleotide
gugguagcuagugagacca

SEQ ID NO: 312191 - RNA, 19 nt, Artificial Sequence
  Description of Artificial Sequence: Synthetic oligonucleotide
cuccaaaugccuggcaacg

SEQ ID NO: 312192 - RNA, 19 nt, Artificial Sequence
  Description of Artificial Sequence: Synthetic oligonucleotide
ucacgucaggugacgggcg

SEQ ID NO: 312193 - RNA, 19 nt, Artificial Sequence
  Description of Artificial Sequence: Synthetic oligonucleotide
acuccuagagcuucacggu

SEQ ID NO: 312194 - RNA, 19 nt, Artificial Sequence
  Description of Artificial Sequence: Synthetic oligonucleotide
acucuaaggccucgaaaca

SEQ ID NO: 312195 - RNA, 19 nt, Artificial Sequence
  Description of Artificial Sequence: Synthetic oligonucleotide
aguuaacuuugaccaaccu

SEQ ID NO: 312196 - RNA, 19 nt, Artificial Sequence
  Description of Artificial Sequence: Synthetic oligonucleotide
gcuauucagagucuccaag

SEQ ID NO: 312197 - RNA, 19 nt, Artificial Sequence
  Description of Artificial Sequence: Synthetic oligonucleotide
gauagacacaugaucugca

SEQ ID NO: 312198 - RNA, 19 nt, Artificial Sequence
  Description of Artificial Sequence: Synthetic oligonucleotide
ugaacgagggcaggucccg

SEQ ID NO: 312199 - RNA, 19 nt, Artificial Sequence
  Description of Artificial Sequence: Synthetic oligonucleotide
gguggcacugucguaagcg

SEQ ID NO: 312200 - RNA, 19 nt, Artificial Sequence
  Description of Artificial Sequence: Synthetic oligonucleotide
uguucugucgaugggcuuc

SEQ ID NO: 312201 - RNA, 19 nt, Artificial Sequence
  Description of Artificial Sequence: Synthetic oligonucleotide
gauaccaaucuccucuugu

SEQ ID NO: 312202 - RNA, 19 nt, Artificial Sequence
  Description of Artificial Sequence: Synthetic oligonucleotide
augguugauagagcgcagg

SEQ ID NO: 312203 - RNA, 19 nt, Artificial Sequence
  Description of Artificial Sequence: Synthetic oligonucleotide
gauucgucuuaggugaaca

SEQ ID NO: 312204 - RNA, 19 nt, Artificial Sequence
  Description of Artificial Sequence: Synthetic oligonucleotide
gccaaauggaccccaaagc

SEQ ID NO: 312205 - RNA, 19 nt, Artificial Sequence
  Description of Artificial Sequence: Synthetic oligonucleotide
agcaugguugauagagcgc

SEQ ID NO: 312206 - RNA, 19 nt, Artificial Sequence
  Description of Artificial Sequence: Synthetic oligonucleotide
gugcacggcaaacuaaaac

SEQ ID NO: 312207 - RNA, 19 nt, Artificial Sequence
  Description of Artificial Sequence: Synthetic oligonucleotide
cacgacugugagagcaucg

SEQ ID NO: 312208 - RNA, 19 nt, Artificial Sequence
  Description of Artificial Sequence: Synthetic oligonucleotide
uuaggugaacacucacaaa

SEQ ID NO: 312209 - RNA, 19 nt, Artificial Sequence
  Description of Artificial Sequence: Synthetic oligonucleotide
agugcagagaugaggcuag

SEQ ID NO: 312210 - RNA, 19 nt, Artificial Sequence
  Description of Artificial Sequence: Synthetic oligonucleotide
uguugaggaaggucuguau

SEQ ID NO: 312211 - RNA, 19 nt, Artificial Sequence
  Description of Artificial Sequence: Synthetic oligonucleotide
guacuugaagagaaggguc

SEQ ID NO: 312212 - RNA, 19 nt, Artificial Sequence
  Description of Artificial Sequence: Synthetic oligonucleotide
uugaaccuugcagcaaacc

SEQ ID NO: 312213 - RNA, 19 nt, Artificial Sequence
  Description of Artificial Sequence: Synthetic oligonucleotide
gaaccuuggugcugaugag

SEQ ID NO: 312214 - RNA, 19 nt, Artificial Sequence
  Description of Artificial Sequence: Synthetic oligonucleotide
gucuucgcgaaucucugac

SEQ ID NO: 312215 - RNA, 19 nt, Artificial Sequence
  Description of Artificial Sequence: Synthetic oligonucleotide
aguaggcugaugaaaugug

SEQ ID NO: 312216 - RNA, 19 nt, Artificial Sequence
  Description of Artificial Sequence: Synthetic oligonucleotide
ugugauggagcguccgaaa

SEQ ID NO: 312217 - RNA, 19 nt, Artificial Sequence
  Description of Artificial Sequence: Synthetic oligonucleotide
aaacgcgagucuucgcgaa

SEQ ID NO: 312218 - RNA, 19 nt, Artificial Sequence
  Description of Artificial Sequence: Synthetic oligonucleotide
gugcaauaaugcuggggag

SEQ ID NO: 312219 - RNA, 19 nt, Artificial Sequence
  Description of Artificial Sequence: Synthetic oligonucleotide
ugauagagcgcaggggcca

SEQ ID NO: 312220 - RNA, 19 nt, Artificial Sequence
  Description of Artificial Sequence: Synthetic oligonucleotide
augaguaggcugaugaaau

SEQ ID NO: 312221 - RNA, 19 nt, Artificial Sequence
  Description of Artificial Sequence: Synthetic oligonucleotide
gacucgauucgucuuaggu

SEQ ID NO: 312222 - RNA, 19 nt, Artificial Sequence
  Description of Artificial Sequence: Synthetic oligonucleotide
aggcacacccaucuguacu

SEQ ID NO: 312223 - RNA, 19 nt, Artificial Sequence
  Description of Artificial Sequence: Synthetic oligonucleotide
augaccauccagagagugg

SEQ ID NO: 312224 - RNA, 19 nt, Artificial Sequence
  Description of Artificial Sequence: Synthetic oligonucleotide
uggcaacgcuaccagugcc

SEQ ID NO: 312225 - RNA, 19 nt, Artificial Sequence
  Description of Artificial Sequence: Synthetic oligonucleotide
aacuaaaaccugcgccuua

SEQ ID NO: 312226 - RNA, 19 nt, Artificial Sequence
  Description of Artificial Sequence: Synthetic oligonucleotide
uaggacucgauucgucuua

SEQ ID NO: 312227 - RNA, 19 nt, Artificial Sequence
  Description of Artificial Sequence: Synthetic oligonucleotide
ucuguacucuaaggccucg

SEQ ID NO: 312228 - RNA, 19 nt, Artificial Sequence
  Description of Artificial Sequence: Synthetic oligonucleotide
aaacuaaaaccugcgccuu

SEQ ID NO: 312229 - RNA, 19 nt, Artificial Sequence
  Description of Artificial Sequence: Synthetic oligonucleotide
auggugagaagguggcacu

SEQ ID NO: 312230 - RNA, 19 nt, Artificial Sequence
  Description of Artificial Sequence: Synthetic oligonucleotide
uugcagcaaaccuguugag

SEQ ID NO: 312231 - RNA, 19 nt, Artificial Sequence
  Description of Artificial Sequence: Synthetic oligonucleotide
ccguacaaaguuaacuuug

SEQ ID NO: 312232 - RNA, 19 nt, Artificial Sequence
  Description of Artificial Sequence: Synthetic oligonucleotide
ugcgccuuauccgcuaggc

SEQ ID NO: 312233 - RNA, 19 nt, Artificial Sequence
  Description of Artificial Sequence: Synthetic oligonucleotide
acuugguggauuccccaga

SEQ ID NO: 312234 - RNA, 19 nt, Artificial Sequence
  Description of Artificial Sequence: Synthetic oligonucleotide
agagugcaauaaugcuggg

SEQ ID NO: 312235 - RNA, 19 nt, Artificial Sequence
  Description of Artificial Sequence: Synthetic oligonucleotide
agggaacugggaguaggac

SEQ ID NO: 312236 - RNA, 19 nt, Artificial Sequence
  Description of Artificial Sequence: Synthetic oligonucleotide
gggcgcucagcaaugaugg

SEQ ID NO: 312237 - RNA, 19 nt, Artificial Sequence
  Description of Artificial Sequence: Synthetic oligonucleotide
cuagugagaccaguaggug

SEQ ID NO: 312238 - RNA, 19 nt, Artificial Sequence
  Description of Artificial Sequence: Synthetic oligonucleotide
ggugaacgagggcaggucc

SEQ ID NO: 312239 - RNA, 19 nt, Artificial Sequence
  Description of Artificial Sequence: Synthetic oligonucleotide
agcauuuuauuuauccauu

SEQ ID NO: 312240 - RNA, 19 nt, Artificial Sequence
  Description of Artificial Sequence: Synthetic oligonucleotide
gagucuucgcgaaucucug

SEQ ID NO: 312241 - RNA, 19 nt, Artificial Sequence
  Description of Artificial Sequence: Synthetic oligonucleotide
ggaauggugagaagguggc

SEQ ID NO: 312242 - RNA, 19 nt, Artificial Sequence
  Description of Artificial Sequence: Synthetic oligonucleotide
caugguugauagagcgcag

SEQ ID NO: 312243 - RNA, 19 nt, Artificial Sequence
  Description of Artificial Sequence: Synthetic oligonucleotide
gucguuuaccagccugugc

SEQ ID NO: 312244 - RNA, 19 nt, Artificial Sequence
  Description of Artificial Sequence: Synthetic oligonucleotide
agauccguacaaaguuaac

SEQ ID NO: 312245 - RNA, 19 nt, Artificial Sequence
  Description of Artificial Sequence: Synthetic oligonucleotide
caaccagugggaguacgcc

SEQ ID NO: 312246 - RNA, 19 nt, Artificial Sequence
  Description of Artificial Sequence: Synthetic oligonucleotide
cuguuucaauguuuguaca

SEQ ID NO: 312247 - RNA, 19 nt, Artificial Sequence
  Description of Artificial Sequence: Synthetic oligonucleotide
gagagugcacggcaaacua

SEQ ID NO: 312248 - RNA, 19 nt, Artificial Sequence
  Description of Artificial Sequence: Synthetic oligonucleotide
gagauccguacaaaguuaa

SEQ ID NO: 312249 - RNA, 19 nt, Artificial Sequence
  Description of Artificial Sequence: Synthetic oligonucleotide
cuucgcgaaucucugacaa

SEQ ID NO: 312250 - RNA, 19 nt, Artificial Sequence
  Description of Artificial Sequence: Synthetic oligonucleotide
cagugguagcuagugagac

SEQ ID NO: 312251 - RNA, 19 nt, Artificial Sequence
  Description of Artificial Sequence: Synthetic oligonucleotide
gaggaaggucuguauuauc

SEQ ID NO: 312252 - RNA, 19 nt, Artificial Sequence
  Description of Artificial Sequence: Synthetic oligonucleotide
aucuugaaauuccgcccca

SEQ ID NO: 312253 - RNA, 19 nt, Artificial Sequence
  Description of Artificial Sequence: Synthetic oligonucleotide
ugguagcagaucugucgug

SEQ ID NO: 312254 - RNA, 19 nt, Artificial Sequence
  Description of Artificial Sequence: Synthetic oligonucleotide
gucgguaguaacguagguc

SEQ ID NO: 312255 - RNA, 19 nt, Artificial Sequence
  Description of Artificial Sequence: Synthetic oligonucleotide
uaucugagauccguacaaa

SEQ ID NO: 312256 - RNA, 19 nt, Artificial Sequence
  Description of Artificial Sequence: Synthetic oligonucleotide
gggagaccugaacagauuc

SEQ ID NO: 312257 - RNA, 19 nt, Artificial Sequence
  Description of Artificial Sequence: Synthetic oligonucleotide
uugugauggagcguccgaa

SEQ ID NO: 312258 - RNA, 19 nt, Artificial Sequence
  Description of Artificial Sequence: Synthetic oligonucleotide
ggacaguagacuugaagaa

SEQ ID NO: 312259 - RNA, 19 nt, Artificial Sequence
  Description of Artificial Sequence: Synthetic oligonucleotide
aucuguacucuaaggccuc

SEQ ID NO: 312260 - RNA, 19 nt, Artificial Sequence
  Description of Artificial Sequence: Synthetic oligonucleotide
aacgagggcaggucccgau

SEQ ID NO: 312261 - RNA, 19 nt, Artificial Sequence
  Description of Artificial Sequence: Synthetic oligonucleotide
acgagggcaggucccgauc

SEQ ID NO: 312262 - RNA, 19 nt, Artificial Sequence
  Description of Artificial Sequence: Synthetic oligonucleotide
aaguaccgccaguugugau

SEQ ID NO: 312263 - RNA, 19 nt, Artificial Sequence
  Description of Artificial Sequence: Synthetic oligonucleotide
gguguucgagagugcacgg

SEQ ID NO: 312264 - RNA, 19 nt, Artificial Sequence
  Description of Artificial Sequence: Synthetic oligonucleotide
ugcagagaugaggcuagca

SEQ ID NO: 312265 - RNA, 19 nt, Artificial Sequence
  Description of Artificial Sequence: Synthetic oligonucleotide
auggcgauaccaaucuccu

SEQ ID NO: 312266 - RNA, 19 nt, Artificial Sequence
  Description of Artificial Sequence: Synthetic oligonucleotide
gucccgagagagugcagag

SEQ ID NO: 312267 - RNA, 19 nt, Artificial Sequence
  Description of Artificial Sequence: Synthetic oligonucleotide
agaaggucaugagacuuau

SEQ ID NO: 312268 - RNA, 19 nt, Artificial Sequence
  Description of Artificial Sequence: Synthetic oligonucleotide
gugggaguacgccuggaga

SEQ ID NO: 312269 - RNA, 19 nt, Artificial Sequence
  Description of Artificial Sequence: Synthetic oligonucleotide
gucgugacuugguggauuc

SEQ ID NO: 312270 - RNA, 19 nt, Artificial Sequence
  Description of Artificial Sequence: Synthetic oligonucleotide
aggccucgaaacaagguga

SEQ ID NO: 312271 - RNA, 19 nt, Artificial Sequence
  Description of Artificial Sequence: Synthetic oligonucleotide
gagugcacggcaaacuaaa

SEQ ID NO: 312272 - RNA, 19 nt, Artificial Sequence
  Description of Artificial Sequence: Synthetic oligonucleotide
guacucuaaggccucgaaa

SEQ ID NO: 312273 - RNA, 19 nt, Artificial Sequence
  Description of Artificial Sequence: Synthetic oligonucleotide
acgcgagucuucgcgaauc

SEQ ID NO: 312274 - RNA, 19 nt, Artificial Sequence
  Description of Artificial Sequence: Synthetic oligonucleotide
aggaagggcuugaacaccu

SEQ ID NO: 312275 - RNA, 19 nt, Artificial Sequence
  Description of Artificial Sequence: Synthetic oligonucleotide
agucuucgcgaaucucuga

SEQ ID NO: 312276 - RNA, 19 nt, Artificial Sequence
  Description of Artificial Sequence: Synthetic oligonucleotide
guugugauggagcguccga

SEQ ID NO: 312277 - RNA, 19 nt, Artificial Sequence
  Description of Artificial Sequence: Synthetic oligonucleotide
gcaugguugauagagcgca

SEQ ID NO: 312278 - RNA, 19 nt, Artificial Sequence
  Description of Artificial Sequence: Synthetic oligonucleotide
ugguagcuagugagaccag

SEQ ID NO: 312279 - RNA, 19 nt, Artificial Sequence
  Description of Artificial Sequence: Synthetic oligonucleotide
aacgcgagucuucgcgaau

SEQ ID NO: 312280 - RNA, 19 nt, Artificial Sequence
  Description of Artificial Sequence: Synthetic oligonucleotide
caaucuccucuuguagaag

SEQ ID NO: 312281 - RNA, 19 nt, Artificial Sequence
  Description of Artificial Sequence: Synthetic oligonucleotide
aggcucgacauaaacaguu

SEQ ID NO: 312282 - RNA, 19 nt, Artificial Sequence
  Description of Artificial Sequence: Synthetic oligonucleotide
cgccuuauccgcuaggcgc

SEQ ID NO: 312283 - RNA, 19 nt, Artificial Sequence
  Description of Artificial Sequence: Synthetic oligonucleotide
gcgauucugacucaggacu

SEQ ID NO: 312284 - RNA, 19 nt, Artificial Sequence
  Description of Artificial Sequence: Synthetic oligonucleotide
guagucccgagagagugca

SEQ ID NO: 312285 - RNA, 19 nt, Artificial Sequence
  Description of Artificial Sequence: Synthetic oligonucleotide
acagugguagcuagugaga

SEQ ID NO: 312286 - RNA, 19 nt, Artificial Sequence
  Description of Artificial Sequence: Synthetic oligonucleotide
caagguguucgagagugca

SEQ ID NO: 312287 - RNA, 19 nt, Artificial Sequence
  Description of Artificial Sequence: Synthetic oligonucleotide
uucgcgaaucucugacaaa

SEQ ID NO: 312288 - RNA, 19 nt, Artificial Sequence
  Description of Artificial Sequence: Synthetic oligonucleotide
accgccaguugugauggag

SEQ ID NO: 312289 - RNA, 19 nt, Artificial Sequence
  Description of Artificial Sequence: Synthetic oligonucleotide
gaaguaccgccaguuguga

SEQ ID NO: 312290 - RNA, 19 nt, Artificial Sequence
  Description of Artificial Sequence: Synthetic oligonucleotide
uccacgacugugagagcau

SEQ ID NO: 312291 - RNA, 19 nt, Artificial Sequence
  Description of Artificial Sequence: Synthetic oligonucleotide
ccgaaagaggagcucaaac

SEQ ID NO: 312292 - RNA, 19 nt, Artificial Sequence
  Description of Artificial Sequence: Synthetic oligonucleotide
gaauagcauggugguccgg

SEQ ID NO: 312293 - RNA, 19 nt, Artificial Sequence
  Description of Artificial Sequence: Synthetic oligonucleotide
ugcuguguguucugucgau

SEQ ID NO: 312294 - RNA, 19 nt, Artificial Sequence
  Description of Artificial Sequence: Synthetic oligonucleotide
gagguucauucuccaucug

SEQ ID NO: 312295 - RNA, 19 nt, Artificial Sequence
  Description of Artificial Sequence: Synthetic oligonucleotide
guauaguuucugcuugcua

SEQ ID NO: 312296 - RNA, 19 nt, Artificial Sequence
  Description of Artificial Sequence: Synthetic oligonucleotide
gugaacgagggcagguccc

SEQ ID NO: 312297 - RNA, 19 nt, Artificial Sequence
  Description of Artificial Sequence: Synthetic oligonucleotide
uaguaacguaggucguuua

SEQ ID NO: 312298 - RNA, 19 nt, Artificial Sequence
  Description of Artificial Sequence: Synthetic oligonucleotide
guuugaacagguggauguc

SEQ ID NO: 312299 - RNA, 19 nt, Artificial Sequence
  Description of Artificial Sequence: Synthetic oligonucleotide
agguccgguuucaacacug

SEQ ID NO: 312300 - RNA, 19 nt, Artificial Sequence
  Description of Artificial Sequence: Synthetic oligonucleotide
gucccgauccaucuugaaa

SEQ ID NO: 312301 - RNA, 19 nt, Artificial Sequence
  Description of Artificial Sequence: Synthetic oligonucleotide
aggacucgauucgucuuag

SEQ ID NO: 312302 - RNA, 19 nt, Artificial Sequence
  Description of Artificial Sequence: Synthetic oligonucleotide
cugucgcuuuucuccuggg

SEQ ID NO: 312303 - RNA, 19 nt, Artificial Sequence
  Description of Artificial Sequence: Synthetic oligonucleotide
cacgucaggugacgggcgc

SEQ ID NO: 312304 - RNA, 19 nt, Artificial Sequence
  Description of Artificial Sequence: Synthetic oligonucleotide
ucgauucgucuuaggugaa

SEQ ID NO: 312305 - RNA, 19 nt, Artificial Sequence
  Description of Artificial Sequence: Synthetic oligonucleotide
uuuccacgacugugagagc

SEQ ID NO: 312306 - RNA, 19 nt, Artificial Sequence
  Description of Artificial Sequence: Synthetic oligonucleotide
ggaggaugcucucagccaa

SEQ ID NO: 312307 - RNA, 19 nt, Artificial Sequence
  Description of Artificial Sequence: Synthetic oligonucleotide
cagcaaugccccucugcac

SEQ ID NO: 312308 - RNA, 19 nt, Artificial Sequence
  Description of Artificial Sequence: Synthetic oligonucleotide
cuuauccgcuaggcgcugg

SEQ ID NO: 312309 - RNA, 19 nt, Artificial Sequence
  Description of Artificial Sequence: Synthetic oligonucleotide
accacccggcagccagugc

SEQ ID NO: 312310 - RNA, 19 nt, Artificial Sequence
  Description of Artificial Sequence: Synthetic oligonucleotide
guagcuagugagaccagua

SEQ ID NO: 312311 - RNA, 19 nt, Artificial Sequence
  Description of Artificial Sequence: Synthetic oligonucleotide
guugaaccuugcagcaaac

SEQ ID NO: 312312 - RNA, 19 nt, Artificial Sequence
  Description of Artificial Sequence: Synthetic oligonucleotide
ugucgugacuugguggauu

SEQ ID NO: 312313 - RNA, 19 nt, Artificial Sequence
  Description of Artificial Sequence: Synthetic oligonucleotide
caaagagcagagacuucaa

SEQ ID NO: 312314 - RNA, 19 nt, Artificial Sequence
  Description of Artificial Sequence: Synthetic oligonucleotide
gauagagcgcaggggccac

SEQ ID NO: 312315 - RNA, 19 nt, Artificial Sequence
  Description of Artificial Sequence: Synthetic oligonucleotide
cucuaaggccucgaaacaa

SEQ ID NO: 312316 - RNA, 19 nt, Artificial Sequence
  Description of Artificial Sequence: Synthetic oligonucleotide
ugaucacuuuggucucauc

SEQ ID NO: 312317 - RNA, 19 nt, Artificial Sequence
  Description of Artificial Sequence: Synthetic oligonucleotide
guguucgagagugcacggc

SEQ ID NO: 312318 - RNA, 19 nt, Artificial Sequence
  Description of Artificial Sequence: Synthetic oligonucleotide
aaauuccgccccagcacau

SEQ ID NO: 312319 - RNA, 19 nt, Artificial Sequence
  Description of Artificial Sequence: Synthetic oligonucleotide
uauccgcuaggcgcugggc

SEQ ID NO: 312320 - RNA, 19 nt, Artificial Sequence
  Description of Artificial Sequence: Synthetic oligonucleotide
agagugcacggcaaacuaa

SEQ ID NO: 312321 - RNA, 19 nt, Artificial Sequence
  Description of Artificial Sequence: Synthetic oligonucleotide
gagaggcgugauggcaucc

SEQ ID NO: 312322 - RNA, 19 nt, Artificial Sequence
  Description of Artificial Sequence: Synthetic oligonucleotide
ucguugaaccuugcagcaa

SEQ ID NO: 312323 - RNA, 19 nt, Artificial Sequence
  Description of Artificial Sequence: Synthetic oligonucleotide
guugcagagucgguaguaa

SEQ ID NO: 312324 - RNA, 19 nt, Artificial Sequence
  Description of Artificial Sequence: Synthetic oligonucleotide
cugguagcagaucugucgu

SEQ ID NO: 312325 - RNA, 19 nt, Artificial Sequence
  Description of Artificial Sequence: Synthetic oligonucleotide
guagaaggucaugagacuu

SEQ ID NO: 312326 - RNA, 19 nt, Artificial Sequence
  Description of Artificial Sequence: Synthetic oligonucleotide
aggcaaucggaggggcagg

SEQ ID NO: 312327 - RNA, 19 nt, Artificial Sequence
  Description of Artificial Sequence: Synthetic oligonucleotide
auggaccacgcugugggau

SEQ ID NO: 312328 - RNA, 19 nt, Artificial Sequence
  Description of Artificial Sequence: Synthetic oligonucleotide
acgcuaccagugccaaaug

SEQ ID NO: 312329 - RNA, 19 nt, Artificial Sequence
  Description of Artificial Sequence: Synthetic oligonucleotide
acgcuagccaggacaguag

SEQ ID NO: 312330 - RNA, 19 nt, Artificial Sequence
  Description of Artificial Sequence: Synthetic oligonucleotide
gggaacugggaguaggacu

SEQ ID NO: 312331 - RNA, 19 nt, Artificial Sequence
  Description of Artificial Sequence: Synthetic oligonucleotide
caugaucugcauggaccac

SEQ ID NO: 312332 - RNA, 19 nt, Artificial Sequence
  Description of Artificial Sequence: Synthetic oligonucleotide
gcacuccuagagcuucacg

SEQ ID NO: 312333 - RNA, 19 nt, Artificial Sequence
  Description of Artificial Sequence: Synthetic oligonucleotide
uggcgauaccaaucuccuc

SEQ ID NO: 312334 - RNA, 19 nt, Artificial Sequence
  Description of Artificial Sequence: Synthetic oligonucleotide
aauuccgccccagcacauu

SEQ ID NO: 312335 - RNA, 19 nt, Artificial Sequence
  Description of Artificial Sequence: Synthetic oligonucleotide
cagguggaugucugguuga

SEQ ID NO: 312336 - RNA, 19 nt, Artificial Sequence
  Description of Artificial Sequence: Synthetic oligonucleotide
ggagcguccgaaagaggag

SEQ ID NO: 312337 - RNA, 19 nt, Artificial Sequence
  Description of Artificial Sequence: Synthetic oligonucleotide
caggccgcacagugguagc

SEQ ID NO: 312338 - RNA, 19 nt, Artificial Sequence
  Description of Artificial Sequence: Synthetic oligonucleotide
augaucacuuuggucucau

SEQ ID NO: 312339 - RNA, 19 nt, Artificial Sequence
  Description of Artificial Sequence: Synthetic oligonucleotide
ccgccaguugugauggagc

SEQ ID NO: 312340 - RNA, 19 nt, Artificial Sequence
  Description of Artificial Sequence: Synthetic oligonucleotide
ggagcucaaacagcucagc

SEQ ID NO: 312341 - RNA, 19 nt, Artificial Sequence
  Description of Artificial Sequence: Synthetic oligonucleotide
cucccagacgacuuuaauu

SEQ ID NO: 312342 - RNA, 19 nt, Artificial Sequence
  Description of Artificial Sequence: Synthetic oligonucleotide
gcgccuuauccgcuaggcg

SEQ ID NO: 312343 - RNA, 19 nt, Artificial Sequence
  Description of Artificial Sequence: Synthetic oligonucleotide
gaguacgccuggagagcag

SEQ ID NO: 312344 - RNA, 19 nt, Artificial Sequence
  Description of Artificial Sequence: Synthetic oligonucleotide
cugcgccuuauccgcuagg

SEQ ID NO: 312345 - RNA, 19 nt, Artificial Sequence
  Description of Artificial Sequence: Synthetic oligonucleotide
caggugacgggcgcucagc

SEQ ID NO: 312346 - RNA, 19 nt, Artificial Sequence
  Description of Artificial Sequence: Synthetic oligonucleotide
ggccucgaaacaaggugag

SEQ ID NO: 312347 - RNA, 19 nt, Artificial Sequence
  Description of Artificial Sequence: Synthetic oligonucleotide
cccagagauauucucuaca

SEQ ID NO: 312348 - RNA, 19 nt, Artificial Sequence
  Description of Artificial Sequence: Synthetic oligonucleotide
gcagaucugucgugacuug

SEQ ID NO: 312349 - RNA, 19 nt, Artificial Sequence
  Description of Artificial Sequence: Synthetic oligonucleotide
ggugcugaugagaggcgug

SEQ ID NO: 312350 - RNA, 19 nt, Artificial Sequence
  Description of Artificial Sequence: Synthetic oligonucleotide
ugaggcuagcaugguugau

SEQ ID NO: 312351 - RNA, 19 nt, Artificial Sequence
  Description of Artificial Sequence: Synthetic oligonucleotide
cacgcuagccaggacagua

SEQ ID NO: 312352 - RNA, 19 nt, Artificial Sequence
  Description of Artificial Sequence: Synthetic oligonucleotide
gggaguacgccuggagagc

SEQ ID NO: 312353 - RNA, 19 nt, Artificial Sequence
  Description of Artificial Sequence: Synthetic oligonucleotide
gcucgacauaaacaguucu

SEQ ID NO: 312354 - RNA, 19 nt, Artificial Sequence
  Description of Artificial Sequence: Synthetic oligonucleotide
gagcgcaggggccacugcu

SEQ ID NO: 312355 - RNA, 19 nt, Artificial Sequence
  Description of Artificial Sequence: Synthetic oligonucleotide
agugcacggcaaacuaaaa

SEQ ID NO: 312356 - RNA, 19 nt, Artificial Sequence
  Description of Artificial Sequence: Synthetic oligonucleotide
guaggacucgauucgucuu

SEQ ID NO: 312357 - RNA, 19 nt, Artificial Sequence
  Description of Artificial Sequence: Synthetic oligonucleotide
ggaguacgccuggagagca

SEQ ID NO: 312358 - RNA, 19 nt, Artificial Sequence
  Description of Artificial Sequence: Synthetic oligonucleotide
gcuguguguucugucgaug

SEQ ID NO: 312359 - RNA, 19 nt, Artificial Sequence
  Description of Artificial Sequence: Synthetic oligonucleotide
ggucguuuaccagccugug

SEQ ID NO: 312360 - RNA, 19 nt, Artificial Sequence
  Description of Artificial Sequence: Synthetic oligonucleotide
uggauuccccagagauauu

SEQ ID NO: 312361 - RNA, 19 nt, Artificial Sequence
  Description of Artificial Sequence: Synthetic oligonucleotide
guaguaacguaggucguuu

SEQ ID NO: 312362 - RNA, 19 nt, Artificial Sequence
  Description of Artificial Sequence: Synthetic oligonucleotide
accacgcugugggaucucu

SEQ ID NO: 312363 - RNA, 19 nt, Artificial Sequence
  Description of Artificial Sequence: Synthetic oligonucleotide
acccucuaccugcuccaaa

SEQ ID NO: 312364 - RNA, 19 nt, Artificial Sequence
  Description of Artificial Sequence: Synthetic oligonucleotide
cagagauauucucuacaau

SEQ ID NO: 312365 - RNA, 19 nt, Artificial Sequence
  Description of Artificial Sequence: Synthetic oligonucleotide
caugacccucuaccugcuc

SEQ ID NO: 312366 - RNA, 19 nt, Artificial Sequence
  Description of Artificial Sequence: Synthetic oligonucleotide
uuaccagccugugcacauu

SEQ ID NO: 312367 - RNA, 19 nt, Artificial Sequence
  Description of Artificial Sequence: Synthetic oligonucleotide
guucgagagugcacggcaa

SEQ ID NO: 312368 - RNA, 19 nt, Artificial Sequence
  Description of Artificial Sequence: Synthetic oligonucleotide
gugccaaauggaccccaaa

SEQ ID NO: 312369 - RNA, 19 nt, Artificial Sequence
  Description of Artificial Sequence: Synthetic oligonucleotide
ccuucacgucaggugacgg

SEQ ID NO: 312370 - RNA, 19 nt, Artificial Sequence
  Description of Artificial Sequence: Synthetic oligonucleotide
cagccaacuguucucuggu

SEQ ID NO: 312371 - RNA, 19 nt, Artificial Sequence
  Description of Artificial Sequence: Synthetic oligonucleotide
gagguccgguuucaacacu

SEQ ID NO: 312372 - RNA, 19 nt, Artificial Sequence
  Description of Artificial Sequence: Synthetic oligonucleotide
ggcaacgcuaccagugcca

SEQ ID NO: 312373 - RNA, 19 nt, Artificial Sequence
  Description of Artificial Sequence: Synthetic oligonucleotide
gcacugucguaagcggucc

SEQ ID NO: 312374 - RNA, 19 nt, Artificial Sequence
  Description of Artificial Sequence: Synthetic oligonucleotide
gccucgaaacaaggugagg

SEQ ID NO: 312375 - RNA, 19 nt, Artificial Sequence
  Description of Artificial Sequence: Synthetic oligonucleotide
ggcucgacauaaacaguuc

SEQ ID NO: 312376 - RNA, 19 nt, Artificial Sequence
  Description of Artificial Sequence: Synthetic oligonucleotide
gaggcucgacauaaacagu

SEQ ID NO: 312377 - RNA, 19 nt, Artificial Sequence
  Description of Artificial Sequence: Synthetic oligonucleotide
gcagagucgguaguaacgu

SEQ ID NO: 312378 - RNA, 19 nt, Artificial Sequence
  Description of Artificial Sequence: Synthetic oligonucleotide
cgggcgcucagcaaugaug

SEQ ID NO: 312379 - RNA, 19 nt, Artificial Sequence
  Description of Artificial Sequence: Synthetic oligonucleotide
gagcaagguguucgagagu

SEQ ID NO: 312380 - RNA, 19 nt, Artificial Sequence
  Description of Artificial Sequence: Synthetic oligonucleotide
gcacggcaaacuaaaaccu

SEQ ID NO: 312381 - RNA, 19 nt, Artificial Sequence
  Description of Artificial Sequence: Synthetic oligonucleotide
gguauaguuucugcuugcu

SEQ ID NO: 312382 - RNA, 19 nt, Artificial Sequence
  Description of Artificial Sequence: Synthetic oligonucleotide
agggagaccugaacagauu

SEQ ID NO: 312383 - RNA, 19 nt, Artificial Sequence
  Description of Artificial Sequence: Synthetic oligonucleotide
cagagucgguaguaacgua

SEQ ID NO: 312384 - RNA, 19 nt, Artificial Sequence
  Description of Artificial Sequence: Synthetic oligonucleotide
acgucaggugacgggcgcu

SEQ ID NO: 312385 - RNA, 19 nt, Artificial Sequence
  Description of Artificial Sequence: Synthetic oligonucleotide
aggucccgauccaucuuga

SEQ ID NO: 312386 - RNA, 19 nt, Artificial Sequence
  Description of Artificial Sequence: Synthetic oligonucleotide
gggcaugaccauccagaga

SEQ ID NO: 312387 - RNA, 19 nt, Artificial Sequence
  Description of Artificial Sequence: Synthetic oligonucleotide
guaagcgguccuuggcgau

SEQ ID NO: 312388 - RNA, 19 nt, Artificial Sequence
  Description of Artificial Sequence: Synthetic oligonucleotide
gaacgagggcaggucccga

SEQ ID NO: 312389 - RNA, 19 nt, Artificial Sequence
  Description of Artificial Sequence: Synthetic oligonucleotide
ugggugccucccuggcauc

SEQ ID NO: 312390 - RNA, 19 nt, Artificial Sequence
  Description of Artificial Sequence: Synthetic oligonucleotide
auagagcgcaggggccacu

SEQ ID NO: 312391 - RNA, 19 nt, Artificial Sequence
  Description of Artificial Sequence: Synthetic oligonucleotide
cugggaguaggacucgauu

SEQ ID NO: 312392 - RNA, 19 nt, Artificial Sequence
  Description of Artificial Sequence: Synthetic oligonucleotide
cugugagagcaucguugaa

SEQ ID NO: 312393 - RNA, 19 nt, Artificial Sequence
  Description of Artificial Sequence: Synthetic oligonucleotide
guccgaaagaggagcucaa

SEQ ID NO: 312394 - RNA, 19 nt, Artificial Sequence
  Description of Artificial Sequence: Synthetic oligonucleotide
ccgagagagugcagagaug

SEQ ID NO: 312395 - RNA, 19 nt, Artificial Sequence
  Description of Artificial Sequence: Synthetic oligonucleotide
gguagcuagugagaccagu

SEQ ID NO: 312396 - RNA, 19 nt, Artificial Sequence
  Description of Artificial Sequence: Synthetic oligonucleotide
caccacccggcagccagug

SEQ ID NO: 312397 - RNA, 19 nt, Artificial Sequence
  Description of Artificial Sequence: Synthetic oligonucleotide
guccgguuucaacacugau

SEQ ID NO: 312398 - RNA, 19 nt, Artificial Sequence
  Description of Artificial Sequence: Synthetic oligonucleotide
gggugaacgagggcagguc

SEQ ID NO: 312399 - RNA, 19 nt, Artificial Sequence
  Description of Artificial Sequence: Synthetic oligonucleotide
cguaagcgguccuuggcga

SEQ ID NO: 312400 - RNA, 19 nt, Artificial Sequence
  Description of Artificial Sequence: Synthetic oligonucleotide
ggggcaggaggcucgacau

SEQ ID NO: 312401 - RNA, 19 nt, Artificial Sequence
  Description of Artificial Sequence: Synthetic oligonucleotide
cccgagagagugcagagau

SEQ ID NO: 312402 - RNA, 19 nt, Artificial Sequence
  Description of Artificial Sequence: Synthetic oligonucleotide
gggugccucccuggcaucc

SEQ ID NO: 312403 - RNA, 19 nt, Artificial Sequence
  Description of Artificial Sequence: Synthetic oligonucleotide
guaggucguuuaccagccu

SEQ ID NO: 312404 - RNA, 19 nt, Artificial Sequence
  Description of Artificial Sequence: Synthetic oligonucleotide
gguccgguuucaacacuga

SEQ ID NO: 312405 - RNA, 19 nt, Artificial Sequence
  Description of Artificial Sequence: Synthetic oligonucleotide
ggcaaucggaggggcagga

SEQ ID NO: 312406 - RNA, 19 nt, Artificial Sequence
  Description of Artificial Sequence: Synthetic oligonucleotide
caacgcuaccagugccaaa

SEQ ID NO: 312407 - RNA, 19 nt, Artificial Sequence
  Description of Artificial Sequence: Synthetic oligonucleotide
gcaacgcuaccagugccaa

SEQ ID NO: 312408 - RNA, 19 nt, Artificial Sequence
  Description of Artificial Sequence: Synthetic oligonucleotide
ccaaggcuugucauagacu

SEQ ID NO: 312409 - RNA, 19 nt, Artificial Sequence
  Description of Artificial Sequence: Synthetic oligonucleotide
cacuaagugucuggugaau

SEQ ID NO: 312410 - RNA, 19 nt, Artificial Sequence
  Description of Artificial Sequence: Synthetic oligonucleotide
gcagugacugguagcagau

SEQ ID NO: 312411 - RNA, 19 nt, Artificial Sequence
  Description of Artificial Sequence: Synthetic oligonucleotide
gccuuauccgcuaggcgcu

SEQ ID NO: 312412 - RNA, 19 nt, Artificial Sequence
  Description of Artificial Sequence: Synthetic oligonucleotide
gaccacgcugugggaucuc

SEQ ID NO: 312413 - RNA, 19 nt, Artificial Sequence
  Description of Artificial Sequence: Synthetic oligonucleotide
gcgagucuucgcgaaucuc

SEQ ID NO: 312414 - RNA, 19 nt, Artificial Sequence
  Description of Artificial Sequence: Synthetic oligonucleotide
ccacccggcagccagugcu

SEQ ID NO: 312415 - RNA, 19 nt, Artificial Sequence
  Description of Artificial Sequence: Synthetic oligonucleotide
cgauucgucuuaggugaac

SEQ ID NO: 312416 - RNA, 19 nt, Artificial Sequence
  Description of Artificial Sequence: Synthetic oligonucleotide
cacugucguaagcgguccu

SEQ ID NO: 312417 - RNA, 19 nt, Artificial Sequence
  Description of Artificial Sequence: Synthetic oligonucleotide
gcguccgaaagaggagcuc

SEQ ID NO: 312418 - RNA, 19 nt, Artificial Sequence
  Description of Artificial Sequence: Synthetic oligonucleotide
ccaugcagagugcaauaau

SEQ ID NO: 312419 - RNA, 19 nt, Artificial Sequence
  Description of Artificial Sequence: Synthetic oligonucleotide
ccuuauccgcuaggcgcug

SEQ ID NO: 312420 - RNA, 19 nt, Artificial Sequence
  Description of Artificial Sequence: Synthetic oligonucleotide
gcucagcaaugauggggua

SEQ ID NO: 312421 - RNA, 19 nt, Artificial Sequence
  Description of Artificial Sequence: Synthetic oligonucleotide
gcgauaccaaucuccucuu

SEQ ID NO: 312422 - RNA, 19 nt, Artificial Sequence
  Description of Artificial Sequence: Synthetic oligonucleotide
ccuuggcgauucugacuca

SEQ ID NO: 312423 - RNA, 19 nt, Artificial Sequence
  Description of Artificial Sequence: Synthetic oligonucleotide
ggaccacgcugugggaucu

SEQ ID NO: 312424 - RNA, 19 nt, Artificial Sequence
  Description of Artificial Sequence: Synthetic oligonucleotide
cccagacgacuuuaauuuu

SEQ ID NO: 312425 - RNA, 19 nt, Artificial Sequence
  Description of Artificial Sequence: Synthetic oligonucleotide
caaugccccucugcacgcu

SEQ ID NO: 312426 - RNA, 19 nt, Artificial Sequence
  Description of Artificial Sequence: Synthetic oligonucleotide
cccgauccaucuugaaauu

SEQ ID NO: 312427 - RNA, 19 nt, Artificial Sequence
  Description of Artificial Sequence: Synthetic oligonucleotide
cugucgugacuugguggau

SEQ ID NO: 312428 - RNA, 19 nt, Artificial Sequence
  Description of Artificial Sequence: Synthetic oligonucleotide
gcauggugguccggaagau

SEQ ID NO: 312429 - RNA, 19 nt, Artificial Sequence
  Description of Artificial Sequence: Synthetic oligonucleotide
ccgcacagugguagcuagu

SEQ ID NO: 312430 - RNA, 19 nt, Artificial Sequence
  Description of Artificial Sequence: Synthetic oligonucleotide
cgcgagucuucgcgaaucu

SEQ ID NO: 312431 - RNA, 19 nt, Artificial Sequence
  Description of Artificial Sequence: Synthetic oligonucleotide
aauacguaguuccagaugc

SEQ ID NO: 312432 - RNA, 19 nt, Artificial Sequence
  Description of Artificial Sequence: Synthetic oligonucleotide
agauauaugaaagagaccg

SEQ ID NO: 312433 - RNA, 19 nt, Artificial Sequence
  Description of Artificial Sequence: Synthetic oligonucleotide
aaaccgauaccacaaauac

SEQ ID NO: 312434 - RNA, 19 nt, Artificial Sequence
  Description of Artificial Sequence: Synthetic oligonucleotide
aacacguccaaauugguag

SEQ ID NO: 312435 - RNA, 19 nt, Artificial Sequence
  Description of Artificial Sequence: Synthetic oligonucleotide
ucaaauaagaguaucaguu

SEQ ID NO: 312436 - RNA, 19 nt, Artificial Sequence
  Description of Artificial Sequence: Synthetic oligonucleotide
gaagacaauacguaguucc

SEQ ID NO: 312437 - RNA, 19 nt, Artificial Sequence
  Description of Artificial Sequence: Synthetic oligonucleotide
uccacuauacgcaaaguug

SEQ ID NO: 312438 - RNA, 19 nt, Artificial Sequence
  Description of Artificial Sequence: Synthetic oligonucleotide
uccaacacguccaaauugg

SEQ ID NO: 312439 - RNA, 19 nt, Artificial Sequence
  Description of Artificial Sequence: Synthetic oligonucleotide
auaaggucaagcaugcugc

SEQ ID NO: 312440 - RNA, 19 nt, Artificial Sequence
  Description of Artificial Sequence: Synthetic oligonucleotide
ugcccuaaagaacacaugc

SEQ ID NO: 312441 - RNA, 19 nt, Artificial Sequence
  Description of Artificial Sequence: Synthetic oligonucleotide
uguuuuaaaagaaguggca

SEQ ID NO: 312442 - RNA, 19 nt, Artificial Sequence
  Description of Artificial Sequence: Synthetic oligonucleotide
aggucaucagaauugguac

SEQ ID NO: 312443 - RNA, 19 nt, Artificial Sequence
  Description of Artificial Sequence: Synthetic oligonucleotide
ugaagcaacuuaacuaucc

SEQ ID NO: 312444 - RNA, 19 nt, Artificial Sequence
  Description of Artificial Sequence: Synthetic oligonucleotide
cuuuacaccacgaacauca

SEQ ID NO: 312445 - RNA, 19 nt, Artificial Sequence
  Description of Artificial Sequence: Synthetic oligonucleotide
uacccuuuggauuagagaa

SEQ ID NO: 312446 - RNA, 19 nt, Artificial Sequence
  Description of Artificial Sequence: Synthetic oligonucleotide
agugauaauauccaugaaa

SEQ ID NO: 312447 - RNA, 19 nt, Artificial Sequence
  Description of Artificial Sequence: Synthetic oligonucleotide
aaacagucauacaaugccc

SEQ ID NO: 312448 - RNA, 19 nt, Artificial Sequence
  Description of Artificial Sequence: Synthetic oligonucleotide
ugugcgacgacucguacag

SEQ ID NO: 312449 - RNA, 19 nt, Artificial Sequence
  Description of Artificial Sequence: Synthetic oligonucleotide
cauuuugacaccuggggcc

SEQ ID NO: 312450 - RNA, 19 nt, Artificial Sequence
  Description of Artificial Sequence: Synthetic oligonucleotide
agcuaggaaaguugggugc

SEQ ID NO: 312451 - RNA, 19 nt, Artificial Sequence
  Description of Artificial Sequence: Synthetic oligonucleotide
cugagcguaucuaucaugg

SEQ ID NO: 312452 - RNA, 19 nt, Artificial Sequence
  Description of Artificial Sequence: Synthetic oligonucleotide
gagcguaucuaucaugggg

SEQ ID NO: 312453 - RNA, 19 nt, Artificial Sequence
  Description of Artificial Sequence: Synthetic oligonucleotide
cuauacgcaaaguugaguc

SEQ ID NO: 312454 - RNA, 19 nt, Artificial Sequence
  Description of Artificial Sequence: Synthetic oligonucleotide
acaauaaggucaagcaugc

SEQ ID NO: 312455 - RNA, 19 nt, Artificial Sequence
  Description of Artificial Sequence: Synthetic oligonucleotide
cucaaaacuuuacaccacg

SEQ ID NO: 312456 - RNA, 19 nt, Artificial Sequence
  Description of Artificial Sequence: Synthetic oligonucleotide
aaguuaggcgaaauguugg

SEQ ID NO: 312457 - RNA, 19 nt, Artificial Sequence
  Description of Artificial Sequence: Synthetic oligonucleotide
uuugaggugacgcucccug

SEQ ID NO: 312458 - RNA, 19 nt, Artificial Sequence
  Description of Artificial Sequence: Synthetic oligonucleotide
uuaggcgaaauguuggacu

SEQ ID NO: 312459 - RNA, 19 nt, Artificial Sequence
  Description of Artificial Sequence: Synthetic oligonucleotide
agugauccgaaauagggau

SEQ ID NO: 312460 - RNA, 19 nt, Artificial Sequence
  Description of Artificial Sequence: Synthetic oligonucleotide
ucacguagauugcagggag

SEQ ID NO: 312461 - RNA, 19 nt, Artificial Sequence
  Description of Artificial Sequence: Synthetic oligonucleotide
accaauuuugcacuuggca

SEQ ID NO: 312462 - RNA, 19 nt, Artificial Sequence
  Description of Artificial Sequence: Synthetic oligonucleotide
acuuaacuaucccuuccac

SEQ ID NO: 312463 - RNA, 19 nt, Artificial Sequence
  Description of Artificial Sequence: Synthetic oligonucleotide
agaguaucaguuuuguuuu

SEQ ID NO: 312464 - RNA, 19 nt, Artificial Sequence
  Description of Artificial Sequence: Synthetic oligonucleotide
cauaaguauugcauuugag

SEQ ID NO: 312465 - RNA, 19 nt, Artificial Sequence
  Description of Artificial Sequence: Synthetic oligonucleotide
gguacaauaaggucaagca

SEQ ID NO: 312466 - RNA, 19 nt, Artificial Sequence
  Description of Artificial Sequence: Synthetic oligonucleotide
cuagcgguuagggaaagcg

SEQ ID NO: 312467 - RNA, 19 nt, Artificial Sequence
  Description of Artificial Sequence: Synthetic oligonucleotide
cugaucgccauuuccgacg

SEQ ID NO: 312468 - RNA, 19 nt, Artificial Sequence
  Description of Artificial Sequence: Synthetic oligonucleotide
ugguacaauaaggucaagc

SEQ ID NO: 312469 - RNA, 19 nt, Artificial Sequence
  Description of Artificial Sequence: Synthetic oligonucleotide
uucgaugugcgacgacucg

SEQ ID NO: 312470 - RNA, 19 nt, Artificial Sequence
  Description of Artificial Sequence: Synthetic oligonucleotide
guugaaguuaggcgaaaug

SEQ ID NO: 312471 - RNA, 19 nt, Artificial Sequence
  Description of Artificial Sequence: Synthetic oligonucleotide
aagaaaccaaccauaagua

SEQ ID NO: 312472 - RNA, 19 nt, Artificial Sequence
  Description of Artificial Sequence: Synthetic oligonucleotide
aaugcccuaaagaacacau

SEQ ID NO: 312473 - RNA, 19 nt, Artificial Sequence
  Description of Artificial Sequence: Synthetic oligonucleotide
gaggcuagcgguuagggaa

SEQ ID NO: 312474 - RNA, 19 nt, Artificial Sequence
  Description of Artificial Sequence: Synthetic oligonucleotide
uauacgcaaaguugagucu

SEQ ID NO: 312475 - RNA, 19 nt, Artificial Sequence
  Description of Artificial Sequence: Synthetic oligonucleotide
gacaauacguaguuccaga

SEQ ID NO: 312476 - RNA, 19 nt, Artificial Sequence
  Description of Artificial Sequence: Synthetic oligonucleotide
ucguuugcugcccaagaga

SEQ ID NO: 312477 - RNA, 19 nt, Artificial Sequence
  Description of Artificial Sequence: Synthetic oligonucleotide
aauagggauuugcuuguau

SEQ ID NO: 312478 - RNA, 19 nt, Artificial Sequence
  Description of Artificial Sequence: Synthetic oligonucleotide
ucugagcguaucuaucaug

SEQ ID NO: 312479 - RNA, 19 nt, Artificial Sequence
  Description of Artificial Sequence: Synthetic oligonucleotide
aacacgguugucacagggg

SEQ ID NO: 312480 - RNA, 19 nt, Artificial Sequence
  Description of Artificial Sequence: Synthetic oligonucleotide
agcgguuagggaaagcgac

SEQ ID NO: 312481 - RNA, 19 nt, Artificial Sequence
  Description of Artificial Sequence: Synthetic oligonucleotide
agauuggucucgcagugca

SEQ ID NO: 312482 - RNA, 19 nt, Artificial Sequence
  Description of Artificial Sequence: Synthetic oligonucleotide
caagcaaugcaccaagaca

SEQ ID NO: 312483 - RNA, 19 nt, Artificial Sequence
  Description of Artificial Sequence: Synthetic oligonucleotide
auacccuuuggauuagaga

SEQ ID NO: 312484 - RNA, 19 nt, Artificial Sequence
  Description of Artificial Sequence: Synthetic oligonucleotide
cauacccuuuggauuagag

SEQ ID NO: 312485 - RNA, 19 nt, Artificial Sequence
  Description of Artificial Sequence: Synthetic oligonucleotide
ugagcguaucuaucauggg

SEQ ID NO: 312486 - RNA, 19 nt, Artificial Sequence
  Description of Artificial Sequence: Synthetic oligonucleotide
auacgcaaaguugagucug

SEQ ID NO: 312487 - RNA, 19 nt, Artificial Sequence
  Description of Artificial Sequence: Synthetic oligonucleotide
acauugccuggaucuagac

SEQ ID NO: 312488 - RNA, 19 nt, Artificial Sequence
  Description of Artificial Sequence: Synthetic oligonucleotide
ugaucgccauuuccgacgc

SEQ ID NO: 312489 - RNA, 19 nt, Artificial Sequence
  Description of Artificial Sequence: Synthetic oligonucleotide
acguagauugcagggaguc

SEQ ID NO: 312490 - RNA, 19 nt, Artificial Sequence
  Description of Artificial Sequence: Synthetic oligonucleotide
gcacgagccgucuagauug

SEQ ID NO: 312491 - RNA, 19 nt, Artificial Sequence
  Description of Artificial Sequence: Synthetic oligonucleotide
guaauauacuguguagcac

SEQ ID NO: 312492 - RNA, 19 nt, Artificial Sequence
  Description of Artificial Sequence: Synthetic oligonucleotide
aguuaggcgaaauguugga

SEQ ID NO: 312493 - RNA, 19 nt, Artificial Sequence
  Description of Artificial Sequence: Synthetic oligonucleotide
ugcugcacgagccgucuag

SEQ ID NO: 312494 - RNA, 19 nt, Artificial Sequence
  Description of Artificial Sequence: Synthetic oligonucleotide
agcgggguucgauucugcc

SEQ ID NO: 312495 - RNA, 19 nt, Artificial Sequence
  Description of Artificial Sequence: Synthetic oligonucleotide
caauacguaguuccagaug

SEQ ID NO: 312496 - RNA, 19 nt, Artificial Sequence
  Description of Artificial Sequence: Synthetic oligonucleotide
uuucgaugugcgacgacuc

SEQ ID NO: 312497 - RNA, 19 nt, Artificial Sequence
  Description of Artificial Sequence: Synthetic oligonucleotide
acaauacguaguuccagau

SEQ ID NO: 312498 - RNA, 19 nt, Artificial Sequence
  Description of Artificial Sequence: Synthetic oligonucleotide
aacucggccuggaacuuac

SEQ ID NO: 312499 - RNA, 19 nt, Artificial Sequence
  Description of Artificial Sequence: Synthetic oligonucleotide
uaacuaucccuuccacaca

SEQ ID NO: 312500 - RNA, 19 nt, Artificial Sequence
  Description of Artificial Sequence: Synthetic oligonucleotide
cucggucaaggucagacuc

SEQ ID NO: 312501 - RNA, 19 nt, Artificial Sequence
  Description of Artificial Sequence: Synthetic oligonucleotide
cacuauacgcaaaguugag

SEQ ID NO: 312502 - RNA, 19 nt, Artificial Sequence
  Description of Artificial Sequence: Synthetic oligonucleotide
agaaccgugaacccacaau

SEQ ID NO: 312503 - RNA, 19 nt, Artificial Sequence
  Description of Artificial Sequence: Synthetic oligonucleotide
guucucgucguagagcacc

SEQ ID NO: 312504 - RNA, 19 nt, Artificial Sequence
  Description of Artificial Sequence: Synthetic oligonucleotide
guagauugcagggagucca

SEQ ID NO: 312505 - RNA, 19 nt, Artificial Sequence
  Description of Artificial Sequence: Synthetic oligonucleotide
auuuccgacgcgaagggca

SEQ ID NO: 312506 - RNA, 19 nt, Artificial Sequence
  Description of Artificial Sequence: Synthetic oligonucleotide
aguccguugcacuguuggg

SEQ ID NO: 312507 - RNA, 19 nt, Artificial Sequence
  Description of Artificial Sequence: Synthetic oligonucleotide
uuccagguagaacgcccgg

SEQ ID NO: 312508 - RNA, 19 nt, Artificial Sequence
  Description of Artificial Sequence: Synthetic oligonucleotide
ccuugagacaauguaagcc

SEQ ID NO: 312509 - RNA, 19 nt, Artificial Sequence
  Description of Artificial Sequence: Synthetic oligonucleotide
gaaaguugggugccuuuca

SEQ ID NO: 312510 - RNA, 19 nt, Artificial Sequence
  Description of Artificial Sequence: Synthetic oligonucleotide
guccguugcacuguugggg

SEQ ID NO: 312511 - RNA, 19 nt, Artificial Sequence
  Description of Artificial Sequence: Synthetic oligonucleotide
uagcgguuagggaaagcga

SEQ ID NO: 312512 - RNA, 19 nt, Artificial Sequence
  Description of Artificial Sequence: Synthetic oligonucleotide
ugauccgaaauagggauuu

SEQ ID NO: 312513 - RNA, 19 nt, Artificial Sequence
  Description of Artificial Sequence: Synthetic oligonucleotide
accauaaguauugcauuug

SEQ ID NO: 312514 - RNA, 19 nt, Artificial Sequence
  Description of Artificial Sequence: Synthetic oligonucleotide
ucccgguccucgcagcgcg

SEQ ID NO: 312515 - RNA, 19 nt, Artificial Sequence
  Description of Artificial Sequence: Synthetic oligonucleotide
ugaggugacgcucccugaa

SEQ ID NO: 312516 - RNA, 19 nt, Artificial Sequence
  Description of Artificial Sequence: Synthetic oligonucleotide
ugcugaucgccauuuccga

SEQ ID NO: 312517 - RNA, 19 nt, Artificial Sequence
  Description of Artificial Sequence: Synthetic oligonucleotide
aaccgauaccacaaauaca

SEQ ID NO: 312518 - RNA, 19 nt, Artificial Sequence
  Description of Artificial Sequence: Synthetic oligonucleotide
cucguuugcugcccaagag

SEQ ID NO: 312519 - RNA, 19 nt, Artificial Sequence
  Description of Artificial Sequence: Synthetic oligonucleotide
uagaacgcccggcagcccu

SEQ ID NO: 312520 - RNA, 19 nt, Artificial Sequence
  Description of Artificial Sequence: Synthetic oligonucleotide
acuauacgcaaaguugagu

SEQ ID NO: 312521 - RNA, 19 nt, Artificial Sequence
  Description of Artificial Sequence: Synthetic oligonucleotide
uaggcgaaauguuggacuu

SEQ ID NO: 312522 - RNA, 19 nt, Artificial Sequence
  Description of Artificial Sequence: Synthetic oligonucleotide
uaaggucaagcaugcugca

SEQ ID NO: 312523 - RNA, 19 nt, Artificial Sequence
  Description of Artificial Sequence: Synthetic oligonucleotide
cgauaccacaaauacagag

SEQ ID NO: 312524 - RNA, 19 nt, Artificial Sequence
  Description of Artificial Sequence: Synthetic oligonucleotide
caaaacuuuacaccacgaa

SEQ ID NO: 312525 - RNA, 19 nt, Artificial Sequence
  Description of Artificial Sequence: Synthetic oligonucleotide
gccauuuccgacgcgaagg

SEQ ID NO: 312526 - RNA, 19 nt, Artificial Sequence
  Description of Artificial Sequence: Synthetic oligonucleotide
cuguguagcacagcugaag

SEQ ID NO: 312527 - RNA, 19 nt, Artificial Sequence
  Description of Artificial Sequence: Synthetic oligonucleotide
uggcaaccuugucuaauac

SEQ ID NO: 312528 - RNA, 19 nt, Artificial Sequence
  Description of Artificial Sequence: Synthetic oligonucleotide
acggugucggugccgcagc

SEQ ID NO: 312529 - RNA, 19 nt, Artificial Sequence
  Description of Artificial Sequence: Synthetic oligonucleotide
gaaccgugaacccacaauu

SEQ ID NO: 312530 - RNA, 19 nt, Artificial Sequence
  Description of Artificial Sequence: Synthetic oligonucleotide
aacauacccuuuggauuag

SEQ ID NO: 312531 - RNA, 19 nt, Artificial Sequence
  Description of Artificial Sequence: Synthetic oligonucleotide
acacguccaaauugguaga

SEQ ID NO: 312532 - RNA, 19 nt, Artificial Sequence
  Description of Artificial Sequence: Synthetic oligonucleotide
agccgucuagauuggucuc

SEQ ID NO: 312533 - RNA, 19 nt, Artificial Sequence
  Description of Artificial Sequence: Synthetic oligonucleotide
agcaaaucucucccucugu

SEQ ID NO: 312534 - RNA, 19 nt, Artificial Sequence
  Description of Artificial Sequence: Synthetic oligonucleotide
aagaaccgugaacccacaa

SEQ ID NO: 312535 - RNA, 19 nt, Artificial Sequence
  Description of Artificial Sequence: Synthetic oligonucleotide
cgugaacccacaauuuugg

SEQ ID NO: 312536 - RNA, 19 nt, Artificial Sequence
  Description of Artificial Sequence: Synthetic oligonucleotide
augugcgacgacucguaca

SEQ ID NO: 312537 - RNA, 19 nt, Artificial Sequence
  Description of Artificial Sequence: Synthetic oligonucleotide
acgguugucacaggggcug

SEQ ID NO: 312538 - RNA, 19 nt, Artificial Sequence
  Description of Artificial Sequence: Synthetic oligonucleotide
uacguaguuccagaugcaa

SEQ ID NO: 312539 - RNA, 19 nt, Artificial Sequence
  Description of Artificial Sequence: Synthetic oligonucleotide
caugcccauacccuacuuc

SEQ ID NO: 312540 - RNA, 19 nt, Artificial Sequence
  Description of Artificial Sequence: Synthetic oligonucleotide
accgugaacccacaauuuu

SEQ ID NO: 312541 - RNA, 19 nt, Artificial Sequence
  Description of Artificial Sequence: Synthetic oligonucleotide
ugcacgagccgucuagauu

SEQ ID NO: 312542 - RNA, 19 nt, Artificial Sequence
  Description of Artificial Sequence: Synthetic oligonucleotide
gagccgucuagauuggucu

SEQ ID NO: 312543 - RNA, 19 nt, Artificial Sequence
  Description of Artificial Sequence: Synthetic oligonucleotide
auggccguuucgaugugcg

SEQ ID NO: 312544 - RNA, 19 nt, Artificial Sequence
  Description of Artificial Sequence: Synthetic oligonucleotide
guuaggcgaaauguuggac

SEQ ID NO: 312545 - RNA, 19 nt, Artificial Sequence
  Description of Artificial Sequence: Synthetic oligonucleotide
ccccuugagacaauguaag

SEQ ID NO: 312546 - RNA, 19 nt, Artificial Sequence
  Description of Artificial Sequence: Synthetic oligonucleotide
ggucugagcguaucuauca

SEQ ID NO: 312547 - RNA, 19 nt, Artificial Sequence
  Description of Artificial Sequence: Synthetic oligonucleotide
aucgccauuuccgacgcga

SEQ ID NO: 312548 - RNA, 19 nt, Artificial Sequence
  Description of Artificial Sequence: Synthetic oligonucleotide
cauuugaggugacgcuccc

SEQ ID NO: 312549 - RNA, 19 nt, Artificial Sequence
  Description of Artificial Sequence: Synthetic oligonucleotide
gaugugcgacgacucguac

SEQ ID NO: 312550 - RNA, 19 nt, Artificial Sequence
  Description of Artificial Sequence: Synthetic oligonucleotide
uccagguagaacgcccggc

SEQ ID NO: 312551 - RNA, 19 nt, Artificial Sequence
  Description of Artificial Sequence: Synthetic oligonucleotide
ucgaugugcgacgacucgu

SEQ ID NO: 312552 - RNA, 19 nt, Artificial Sequence
  Description of Artificial Sequence: Synthetic oligonucleotide
aacgggacacuuccagcua

SEQ ID NO: 312553 - RNA, 19 nt, Artificial Sequence
  Description of Artificial Sequence: Synthetic oligonucleotide
ugaagagcgcgcgcaccgg

SEQ ID NO: 312554 - RNA, 19 nt, Artificial Sequence
  Description of Artificial Sequence: Synthetic oligonucleotide
gccguuucgaugugcgacg

SEQ ID NO: 312555 - RNA, 19 nt, Artificial Sequence
  Description of Artificial Sequence: Synthetic oligonucleotide
gggguaugggagcaaacac

SEQ ID NO: 312556 - RNA, 19 nt, Artificial Sequence
  Description of Artificial Sequence: Synthetic oligonucleotide
ccacuauacgcaaaguuga

SEQ ID NO: 312557 - RNA, 19 nt, Artificial Sequence
  Description of Artificial Sequence: Synthetic oligonucleotide
ccuuucacguagauugcag

SEQ ID NO: 312558 - RNA, 19 nt, Artificial Sequence
  Description of Artificial Sequence: Synthetic oligonucleotide
ucggagcgggguucgauuc

SEQ ID NO: 312559 - RNA, 19 nt, Artificial Sequence
  Description of Artificial Sequence: Synthetic oligonucleotide
cucgcagcgcgugaagagc

SEQ ID NO: 312560 - RNA, 19 nt, Artificial Sequence
  Description of Artificial Sequence: Synthetic oligonucleotide
gaacuuacugaagccaccu

SEQ ID NO: 312561 - RNA, 19 nt, Artificial Sequence
  Description of Artificial Sequence: Synthetic oligonucleotide
gaacacaugcccauacccu

SEQ ID NO: 312562 - RNA, 19 nt, Artificial Sequence
  Description of Artificial Sequence: Synthetic oligonucleotide
gauggccguuucgaugugc

SEQ ID NO: 312563 - RNA, 19 nt, Artificial Sequence
  Description of Artificial Sequence: Synthetic oligonucleotide
aaccgugaacccacaauuu

SEQ ID NO: 312564 - RNA, 19 nt, Artificial Sequence
  Description of Artificial Sequence: Synthetic oligonucleotide
agcgacccaggagccaagc

SEQ ID NO: 312565 - RNA, 19 nt, Artificial Sequence
  Description of Artificial Sequence: Synthetic oligonucleotide
ccguucguugcccagcucc

SEQ ID NO: 312566 - RNA, 19 nt, Artificial Sequence
  Description of Artificial Sequence: Synthetic oligonucleotide
guuucgaugugcgacgacu

SEQ ID NO: 312567 - RNA, 19 nt, Artificial Sequence
  Description of Artificial Sequence: Synthetic oligonucleotide
cacauugccuggaucuaga

SEQ ID NO: 312568 - RNA, 19 nt, Artificial Sequence
  Description of Artificial Sequence: Synthetic oligonucleotide
gauccgaaauagggauuug

SEQ ID NO: 312569 - RNA, 19 nt, Artificial Sequence
  Description of Artificial Sequence: Synthetic oligonucleotide
ggaacuuacugaagccacc

SEQ ID NO: 312570 - RNA, 19 nt, Artificial Sequence
  Description of Artificial Sequence: Synthetic oligonucleotide
gacagcgggcugccauccg

SEQ ID NO: 312571 - RNA, 19 nt, Artificial Sequence
  Description of Artificial Sequence: Synthetic oligonucleotide
accgacucgccaccugugu

SEQ ID NO: 312572 - RNA, 19 nt, Artificial Sequence
  Description of Artificial Sequence: Synthetic oligonucleotide
aggcgaaauguuggacuuc

SEQ ID NO: 312573 - RNA, 19 nt, Artificial Sequence
  Description of Artificial Sequence: Synthetic oligonucleotide
aggcggggugccuagcaga

SEQ ID NO: 312574 - RNA, 19 nt, Artificial Sequence
  Description of Artificial Sequence: Synthetic oligonucleotide
caagcacgcugcgcgaagc

SEQ ID NO: 312575 - RNA, 19 nt, Artificial Sequence
  Description of Artificial Sequence: Synthetic oligonucleotide
cauuuccgacgcgaagggc

SEQ ID NO: 312576 - RNA, 19 nt, Artificial Sequence
  Description of Artificial Sequence: Synthetic oligonucleotide
caacacguccaaauuggua

SEQ ID NO: 312577 - RNA, 19 nt, Artificial Sequence
  Description of Artificial Sequence: Synthetic oligonucleotide
gaucgccauuuccgacgcg

SEQ ID NO: 312578 - RNA, 19 nt, Artificial Sequence
  Description of Artificial Sequence: Synthetic oligonucleotide
ugcggucggcaguccauca

SEQ ID NO: 312579 - RNA, 19 nt, Artificial Sequence
  Description of Artificial Sequence: Synthetic oligonucleotide
gguucgauucugccucgcc

SEQ ID NO: 312580 - RNA, 19 nt, Artificial Sequence
  Description of Artificial Sequence: Synthetic oligonucleotide
agaccgaagacugcaccau

SEQ ID NO: 312581 - RNA, 19 nt, Artificial Sequence
  Description of Artificial Sequence: Synthetic oligonucleotide
cuggaucuagacagcaugu

SEQ ID NO: 312582 - RNA, 19 nt, Artificial Sequence
  Description of Artificial Sequence: Synthetic oligonucleotide
cccuugagacaauguaagc

SEQ ID NO: 312583 - RNA, 19 nt, Artificial Sequence
  Description of Artificial Sequence: Synthetic oligonucleotide
gcccuaaagaacacaugcc

SEQ ID NO: 312584 - RNA, 19 nt, Artificial Sequence
  Description of Artificial Sequence: Synthetic oligonucleotide
accgaagacugcaccauaa

SEQ ID NO: 312585 - RNA, 19 nt, Artificial Sequence
  Description of Artificial Sequence: Synthetic oligonucleotide
acguccaaauugguagagu

SEQ ID NO: 312586 - RNA, 19 nt, Artificial Sequence
  Description of Artificial Sequence: Synthetic oligonucleotide
ugcccauacccuacuucuu

SEQ ID NO: 312587 - RNA, 19 nt, Artificial Sequence
  Description of Artificial Sequence: Synthetic oligonucleotide
ggaaagcgacccaggagcc

SEQ ID NO: 312588 - RNA, 19 nt, Artificial Sequence
  Description of Artificial Sequence: Synthetic oligonucleotide
acgccgcagcaugaugccc

SEQ ID NO: 312589 - RNA, 19 nt, Artificial Sequence
  Description of Artificial Sequence: Synthetic oligonucleotide
auacguaguuccagaugca

SEQ ID NO: 312590 - RNA, 19 nt, Artificial Sequence
  Description of Artificial Sequence: Synthetic oligonucleotide
gaugcccgggauggccacg

SEQ ID NO: 312591 - RNA, 19 nt, Artificial Sequence
  Description of Artificial Sequence: Synthetic oligonucleotide
ggaacacgguugucacagg

SEQ ID NO: 312592 - RNA, 19 nt, Artificial Sequence
  Description of Artificial Sequence: Synthetic oligonucleotide
ugggugccuuucacguaga

SEQ ID NO: 312593 - RNA, 19 nt, Artificial Sequence
  Description of Artificial Sequence: Synthetic oligonucleotide
ggccguuucgaugugcgac

SEQ ID NO: 312594 - RNA, 19 nt, Artificial Sequence
  Description of Artificial Sequence: Synthetic oligonucleotide
gccgucuagauuggucucg

SEQ ID NO: 312595 - RNA, 19 nt, Artificial Sequence
  Description of Artificial Sequence: Synthetic oligonucleotide
gcugaucgccauuuccgac

SEQ ID NO: 312596 - RNA, 19 nt, Artificial Sequence
  Description of Artificial Sequence: Synthetic oligonucleotide
cagguaaaggaaggggcga

SEQ ID NO: 312597 - RNA, 19 nt, Artificial Sequence
  Description of Artificial Sequence: Synthetic oligonucleotide
cugcaccauaacaaagucu

SEQ ID NO: 312598 - RNA, 19 nt, Artificial Sequence
  Description of Artificial Sequence: Synthetic oligonucleotide
uggccguuucgaugugcga

SEQ ID NO: 312599 - RNA, 19 nt, Artificial Sequence
  Description of Artificial Sequence: Synthetic oligonucleotide
agccgaggcuagcgguuag

SEQ ID NO: 312600 - RNA, 19 nt, Artificial Sequence
  Description of Artificial Sequence: Synthetic oligonucleotide
gaacgcccggcagcccucg

SEQ ID NO: 312601 - RNA, 19 nt, Artificial Sequence
  Description of Artificial Sequence: Synthetic oligonucleotide
agcgucugguaaagcgguc

SEQ ID NO: 312602 - RNA, 19 nt, Artificial Sequence
  Description of Artificial Sequence: Synthetic oligonucleotide
gaccgacucgccaccugug

SEQ ID NO: 312603 - RNA, 19 nt, Artificial Sequence
  Description of Artificial Sequence: Synthetic oligonucleotide
gcgucugguaaagcggucc

SEQ ID NO: 312604 - RNA, 19 nt, Artificial Sequence
  Description of Artificial Sequence: Synthetic oligonucleotide
ggaagagucggagcugauc

SEQ ID NO: 312605 - RNA, 19 nt, Artificial Sequence
  Description of Artificial Sequence: Synthetic oligonucleotide
aagccgaggcuagcgguua

SEQ ID NO: 312606 - RNA, 19 nt, Artificial Sequence
  Description of Artificial Sequence: Synthetic oligonucleotide
agaacgcccggcagcccuc

SEQ ID NO: 312607 - RNA, 19 nt, Artificial Sequence
  Description of Artificial Sequence: Synthetic oligonucleotide
ccagucccugcuuggguag

SEQ ID NO: 312608 - RNA, 19 nt, Artificial Sequence
  Description of Artificial Sequence: Synthetic oligonucleotide
ggagccaagccgguggauc

SEQ ID NO: 312609 - RNA, 19 nt, Artificial Sequence
  Description of Artificial Sequence: Synthetic oligonucleotide
gcgguuagggaaagcgacc

SEQ ID NO: 312610 - RNA, 19 nt, Artificial Sequence
  Description of Artificial Sequence: Synthetic oligonucleotide
cgggguucgauucugccuc

SEQ ID NO: 312611 - RNA, 19 nt, Artificial Sequence
  Description of Artificial Sequence: Synthetic oligonucleotide
gcucguuugcugcccaaga

SEQ ID NO: 312612 - RNA, 19 nt, Artificial Sequence
  Description of Artificial Sequence: Synthetic oligonucleotide
ggcaagggcggggagcuac

SEQ ID NO: 312613 - RNA, 19 nt, Artificial Sequence
  Description of Artificial Sequence: Synthetic oligonucleotide
ggugccuagcagacgcccc

SEQ ID NO: 312614 - RNA, 19 nt, Artificial Sequence
  Description of Artificial Sequence: Synthetic oligonucleotide
acgggucugagcguaucua

SEQ ID NO: 312615 - RNA, 19 nt, Artificial Sequence
  Description of Artificial Sequence: Synthetic oligonucleotide
ggcgaaauguuggacuucu

SEQ ID NO: 312616 - RNA, 19 nt, Artificial Sequence
  Description of Artificial Sequence: Synthetic oligonucleotide
aggcuagcgguuagggaaa

SEQ ID NO: 312617 - RNA, 19 nt, Artificial Sequence
  Description of Artificial Sequence: Synthetic oligonucleotide
ggagcgggguucgauucug

SEQ ID NO: 312618 - RNA, 19 nt, Artificial Sequence
  Description of Artificial Sequence: Synthetic oligonucleotide
cgucugguaaagcgguccc

SEQ ID NO: 312619 - RNA, 19 nt, Artificial Sequence
  Description of Artificial Sequence: Synthetic oligonucleotide
gucugagcguaucuaucau

SEQ ID NO: 312620 - RNA, 19 nt, Artificial Sequence
  Description of Artificial Sequence: Synthetic oligonucleotide
gcggucggcaguccaucag

SEQ ID NO: 312621 - RNA, 19 nt, Artificial Sequence
  Description of Artificial Sequence: Synthetic oligonucleotide
gggugccuagcagacgccc

SEQ ID NO: 312622 - RNA, 19 nt, Artificial Sequence
  Description of Artificial Sequence: Synthetic oligonucleotide
gggucugagcguaucuauc

SEQ ID NO: 312623 - RNA, 19 nt, Artificial Sequence
  Description of Artificial Sequence: Synthetic oligonucleotide
gguaaaggaaggggcgaaa

SEQ ID NO: 312624 - RNA, 19 nt, Artificial Sequence
  Description of Artificial Sequence: Synthetic oligonucleotide
augcccgggauggccacgu

SEQ ID NO: 312625 - RNA, 19 nt, Artificial Sequence
  Description of Artificial Sequence: Synthetic oligonucleotide
gacgccccucaaggcaggc

SEQ ID NO: 312626 - RNA, 19 nt, Artificial Sequence
  Description of Artificial Sequence: Synthetic oligonucleotide
gugccuagcagacgccccu

SEQ ID NO: 312627 - RNA, 19 nt, Artificial Sequence
  Description of Artificial Sequence: Synthetic oligonucleotide
cguagauugcagggagucc

SEQ ID NO: 312628 - RNA, 19 nt, Artificial Sequence
  Description of Artificial Sequence: Synthetic oligonucleotide
aacgcccggcagcccucgu

SEQ ID NO: 312629 - RNA, 19 nt, Artificial Sequence
  Description of Artificial Sequence: Synthetic oligonucleotide
gaacucggccuggaacuua

SEQ ID NO: 312630 - RNA, 19 nt, Artificial Sequence
  Description of Artificial Sequence: Synthetic oligonucleotide
gcccucgucuuugaguuuc

SEQ ID NO: 312631 - RNA, 19 nt, Artificial Sequence
  Description of Artificial Sequence: Synthetic oligonucleotide
ccaagcacgcugcgcgaag

SEQ ID NO: 312632 - RNA, 19 nt, Artificial Sequence
  Description of Artificial Sequence: Synthetic oligonucleotide
cacguagauugcagggagu

SEQ ID NO: 312633 - RNA, 19 nt, Artificial Sequence
  Description of Artificial Sequence: Synthetic oligonucleotide
aggcagagucaaaguacau

SEQ ID NO: 312634 - RNA, 19 nt, Artificial Sequence
  Description of Artificial Sequence: Synthetic oligonucleotide
cacgaacaucaugaagcaa

SEQ ID NO: 312635 - RNA, 19 nt, Artificial Sequence
  Description of Artificial Sequence: Synthetic oligonucleotide
uggcuccagugauccgaaa

SEQ ID NO: 312636 - RNA, 19 nt, Artificial Sequence
  Description of Artificial Sequence: Synthetic oligonucleotide
ggucggcaguccaucagca

SEQ ID NO: 312637 - RNA, 19 nt, Artificial Sequence
  Description of Artificial Sequence: Synthetic oligonucleotide
gccuuucacguagauugca

SEQ ID NO: 312638 - RNA, 19 nt, Artificial Sequence
  Description of Artificial Sequence: Synthetic oligonucleotide
cacgguugucacaggggcu

SEQ ID NO: 312639 - RNA, 19 nt, Artificial Sequence
  Description of Artificial Sequence: Synthetic oligonucleotide
gcggucccgguccucgcag

SEQ ID NO: 312640 - RNA, 19 nt, Artificial Sequence
  Description of Artificial Sequence: Synthetic oligonucleotide
guccaccgggaaggaaggc

SEQ ID NO: 312641 - RNA, 19 nt, Artificial Sequence
  Description of Artificial Sequence: Synthetic oligonucleotide
gacgacucguacagcuccu

SEQ ID NO: 312642 - RNA, 19 nt, Artificial Sequence
  Description of Artificial Sequence: Synthetic oligonucleotide
ggcuagcgguuagggaaag

SEQ ID NO: 312643 - RNA, 19 nt, Artificial Sequence
  Description of Artificial Sequence: Synthetic oligonucleotide
ggaccgacucgccaccugu

SEQ ID NO: 312644 - RNA, 19 nt, Artificial Sequence
  Description of Artificial Sequence: Synthetic oligonucleotide
gcuagcgguuagggaaagc

SEQ ID NO: 312645 - RNA, 19 nt, Artificial Sequence
  Description of Artificial Sequence: Synthetic oligonucleotide
cuaggaaaguugggugccu

SEQ ID NO: 312646 - RNA, 19 nt, Artificial Sequence
  Description of Artificial Sequence: Synthetic oligonucleotide
gggacacuuccagcuagga

SEQ ID NO: 312647 - RNA, 19 nt, Artificial Sequence
  Description of Artificial Sequence: Synthetic oligonucleotide
caagccgaggcuagcgguu

SEQ ID NO: 312648 - RNA, 19 nt, Artificial Sequence
  Description of Artificial Sequence: Synthetic oligonucleotide
cacgggucugagcguaucu

SEQ ID NO: 312649 - RNA, 19 nt, Artificial Sequence
  Description of Artificial Sequence: Synthetic oligonucleotide
ccgauaccacaaauacaga

SEQ ID NO: 312650 - RNA, 19 nt, Artificial Sequence
  Description of Artificial Sequence: Synthetic oligonucleotide
gugcgacgacucguacagc

SEQ ID NO: 312651 - RNA, 19 nt, Artificial Sequence
  Description of Artificial Sequence: Synthetic oligonucleotide
gcgggguucgauucugccu

SEQ ID NO: 312652 - RNA, 19 nt, Artificial Sequence
  Description of Artificial Sequence: Synthetic oligonucleotide
gugauccgaaauagggauu

SEQ ID NO: 312653 - RNA, 19 nt, Artificial Sequence
  Description of Artificial Sequence: Synthetic oligonucleotide
gacgcucccugaagaauuu

SEQ ID NO: 312654 - RNA, 19 nt, Artificial Sequence
  Description of Artificial Sequence: Synthetic oligonucleotide
cgccauuuccgacgcgaag

SEQ ID NO: 312655 - RNA, 19 nt, Artificial Sequence
  Description of Artificial Sequence: Synthetic oligonucleotide
ggguucgauucugccucgc

SEQ ID NO: 312656 - RNA, 19 nt, Artificial Sequence
  Description of Artificial Sequence: Synthetic oligonucleotide
gcugcacgagccgucuaga

SEQ ID NO: 312657 - RNA, 19 nt, Artificial Sequence
  Description of Artificial Sequence: Synthetic oligonucleotide
ggccaagcacgcugcgcga

SEQ ID NO: 312658 - RNA, 19 nt, Artificial Sequence
  Description of Artificial Sequence: Synthetic oligonucleotide
acgcucccugaagaauuuu

SEQ ID NO: 312659 - RNA, 19 nt, Artificial Sequence
  Description of Artificial Sequence: Synthetic oligonucleotide
cugcacgagccgucuagau

SEQ ID NO: 312660 - RNA, 19 nt, Artificial Sequence
  Description of Artificial Sequence: Synthetic oligonucleotide
gcgacgacucguacagcuc

SEQ ID NO: 312661 - RNA, 19 nt, Artificial Sequence
  Description of Artificial Sequence: Synthetic oligonucleotide
ccaacacguccaaauuggu

SEQ ID NO: 312662 - RNA, 19 nt, Artificial Sequence
  Description of Artificial Sequence: Synthetic oligonucleotide
gguccucgcagcgcgugaa

SEQ ID NO: 312663 - RNA, 19 nt, Artificial Sequence
  Description of Artificial Sequence: Synthetic oligonucleotide
ugcccgggauggccacguu

SEQ ID NO: 312664 - RNA, 19 nt, Artificial Sequence
  Description of Artificial Sequence: Synthetic oligonucleotide
cguuucgaugugcgacgac

SEQ ID NO: 312665 - RNA, 19 nt, Artificial Sequence
  Description of Artificial Sequence: Synthetic oligonucleotide
ccuagcagacgccccucaa

SEQ ID NO: 312666 - RNA, 19 nt, Artificial Sequence
  Description of Artificial Sequence: Synthetic oligonucleotide
cgaugugcgacgacucgua

SEQ ID NO: 312667 - RNA, 19 nt, Artificial Sequence
  Description of Artificial Sequence: Synthetic oligonucleotide
gcacgggucugagcguauc

SEQ ID NO: 312668 - RNA, 19 nt, Artificial Sequence
  Description of Artificial Sequence: Synthetic oligonucleotide
ccauacccuacuucuugau

SEQ ID NO: 312669 - RNA, 19 nt, Artificial Sequence
  Description of Artificial Sequence: Synthetic oligonucleotide
gccaagcacgcugcgcgaa

SEQ ID NO: 312670 - RNA, 19 nt, Artificial Sequence
  Description of Artificial Sequence: Synthetic oligonucleotide
gggcacgggucugagcgua

SEQ ID NO: 312671 - RNA, 19 nt, Artificial Sequence
  Description of Artificial Sequence: Synthetic oligonucleotide
ccguuucgaugugcgacga

SEQ ID NO: 312672 - RNA, 19 nt, Artificial Sequence
  Description of Artificial Sequence: Synthetic oligonucleotide
cacuuccagcuaggaaagu

SEQ ID NO: 312673 - RNA, 19 nt, Artificial Sequence
  Description of Artificial Sequence: Synthetic oligonucleotide
ccgacgcgaagggcacggg

SEQ ID NO: 312674 - RNA, 19 nt, Artificial Sequence
  Description of Artificial Sequence: Synthetic oligonucleotide
cucucggagcgggguucga

SEQ ID NO: 312675 - RNA, 19 nt, Artificial Sequence
  Description of Artificial Sequence: Synthetic oligonucleotide
ccgcagcgucugguaaagc

SEQ ID NO: 312676 - RNA, 19 nt, Artificial Sequence
  Description of Artificial Sequence: Synthetic oligonucleotide
ccgucuugcugaucgccau

SEQ ID NO: 312677 - RNA, 19 nt, Artificial Sequence
  Description of Artificial Sequence: Synthetic oligonucleotide
cgcgaagggcacgggucug

SEQ ID NO: 312678 - RNA, 19 nt, Artificial Sequence
  Description of Artificial Sequence: Synthetic oligonucleotide
ccgacucgccaccuguguu

SEQ ID NO: 312679 - RNA, 19 nt, Artificial Sequence
  Description of Artificial Sequence: Synthetic oligonucleotide
gcgaaauguuggacuucuu

SEQ ID NO: 312680 - RNA, 19 nt, Artificial Sequence
  Description of Artificial Sequence: Synthetic oligonucleotide
ggcacgggucugagcguau

SEQ ID NO: 312681 - RNA, 19 nt, Artificial Sequence
  Description of Artificial Sequence: Synthetic oligonucleotide
ccgaguccguugcacuguu

SEQ ID NO: 312682 - RNA, 19 nt, Artificial Sequence
  Description of Artificial Sequence: Synthetic oligonucleotide
cccggcagcccucgucuuu

SEQ ID NO: 312683 - RNA, 19 nt, Artificial Sequence
  Description of Artificial Sequence: Synthetic oligonucleotide
gcgcgcgcaccggcagguu

SEQ ID NO: 312684 - RNA, 19 nt, Artificial Sequence
  Description of Artificial Sequence: Synthetic oligonucleotide
uuaagauuaucacaaaacc

SEQ ID NO: 312685 - RNA, 19 nt, Artificial Sequence
  Description of Artificial Sequence: Synthetic oligonucleotide
aauuuaagcgagcauauug

SEQ ID NO: 312686 - RNA, 19 nt, Artificial Sequence
  Description of Artificial Sequence: Synthetic oligonucleotide
uuaaacuacauaaagugcu

SEQ ID NO: 312687 - RNA, 19 nt, Artificial Sequence
  Description of Artificial Sequence: Synthetic oligonucleotide
uuuacaacccacauuaacu

SEQ ID NO: 312688 - RNA, 19 nt, Artificial Sequence
  Description of Artificial Sequence: Synthetic oligonucleotide
uaguuaugaaucuacaacc

SEQ ID NO: 312689 - RNA, 19 nt, Artificial Sequence
  Description of Artificial Sequence: Synthetic oligonucleotide
aguccaacuucauaaauac

SEQ ID NO: 312690 - RNA, 19 nt, Artificial Sequence
  Description of Artificial Sequence: Synthetic oligonucleotide
aauacauagguacggcagg

SEQ ID NO: 312691 - RNA, 19 nt, Artificial Sequence
  Description of Artificial Sequence: Synthetic oligonucleotide
uauacucuagagcugauca

SEQ ID NO: 312692 - RNA, 19 nt, Artificial Sequence
  Description of Artificial Sequence: Synthetic oligonucleotide
agucccucguuuuauaucc

SEQ ID NO: 312693 - RNA, 19 nt, Artificial Sequence
  Description of Artificial Sequence: Synthetic oligonucleotide
uguccuuacaagaacaucu

SEQ ID NO: 312694 - RNA, 19 nt, Artificial Sequence
  Description of Artificial Sequence: Synthetic oligonucleotide
ucuguauauacucuagagc

SEQ ID NO: 312695 - RNA, 19 nt, Artificial Sequence
  Description of Artificial Sequence: Synthetic oligonucleotide
aacaaguaaaccuugucaa

SEQ ID NO: 312696 - RNA, 19 nt, Artificial Sequence
  Description of Artificial Sequence: Synthetic oligonucleotide
ugaaccuuaagucaaguau

SEQ ID NO: 312697 - RNA, 19 nt, Artificial Sequence
  Description of Artificial Sequence: Synthetic oligonucleotide
auucuuagucaucugacuc

SEQ ID NO: 312698 - RNA, 19 nt, Artificial Sequence
  Description of Artificial Sequence: Synthetic oligonucleotide
caacuauucagcuagucag

SEQ ID NO: 312699 - RNA, 19 nt, Artificial Sequence
  Description of Artificial Sequence: Synthetic oligonucleotide
ucuuacacagaucaccgcc

SEQ ID NO: 312700 - RNA, 19 nt, Artificial Sequence
  Description of Artificial Sequence: Synthetic oligonucleotide
auuagugaaccuuaaguca

SEQ ID NO: 312701 - RNA, 19 nt, Artificial Sequence
  Description of Artificial Sequence: Synthetic oligonucleotide
gguucuaccagaaugaagg

SEQ ID NO: 312702 - RNA, 19 nt, Artificial Sequence
  Description of Artificial Sequence: Synthetic oligonucleotide
uguaacuaauuagugaacc

SEQ ID NO: 312703 - RNA, 19 nt, Artificial Sequence
  Description of Artificial Sequence: Synthetic oligonucleotide
uuaugaaucuacaaccagu

SEQ ID NO: 312704 - RNA, 19 nt, Artificial Sequence
  Description of Artificial Sequence: Synthetic oligonucleotide
aaauacauagguacggcag

SEQ ID NO: 312705 - RNA, 19 nt, Artificial Sequence
  Description of Artificial Sequence: Synthetic oligonucleotide
ucguuuuauauccaaagaa

SEQ ID NO: 312706 - RNA, 19 nt, Artificial Sequence
  Description of Artificial Sequence: Synthetic oligonucleotide
acuaaauuggagucccucg

SEQ ID NO: 312707 - RNA, 19 nt, Artificial Sequence
  Description of Artificial Sequence: Synthetic oligonucleotide
aaguguaagacaaacagaa

SEQ ID NO: 312708 - RNA, 19 nt, Artificial Sequence
  Description of Artificial Sequence: Synthetic oligonucleotide
ucaacuauucagcuaguca

SEQ ID NO: 312709 - RNA, 19 nt, Artificial Sequence
  Description of Artificial Sequence: Synthetic oligonucleotide
aaugauccuagcucaaaca

SEQ ID NO: 312710 - RNA, 19 nt, Artificial Sequence
  Description of Artificial Sequence: Synthetic oligonucleotide
auuguuaaagcccgggcag

SEQ ID NO: 312711 - RNA, 19 nt, Artificial Sequence
  Description of Artificial Sequence: Synthetic oligonucleotide
uuaagaguccccuacugca

SEQ ID NO: 312712 - RNA, 19 nt, Artificial Sequence
  Description of Artificial Sequence: Synthetic oligonucleotide
aauuugcugagugaaaacu

SEQ ID NO: 312713 - RNA, 19 nt, Artificial Sequence
  Description of Artificial Sequence: Synthetic oligonucleotide
uguuaugccauccuugaaa

SEQ ID NO: 312714 - RNA, 19 nt, Artificial Sequence
  Description of Artificial Sequence: Synthetic oligonucleotide
augguuaugagucuagccu

SEQ ID NO: 312715 - RNA, 19 nt, Artificial Sequence
  Description of Artificial Sequence: Synthetic oligonucleotide
agcaacacccgcaaaagcc

SEQ ID NO: 312716 - RNA, 19 nt, Artificial Sequence
  Description of Artificial Sequence: Synthetic oligonucleotide
ucuagagcugaucaugaca

SEQ ID NO: 312717 - RNA, 19 nt, Artificial Sequence
  Description of Artificial Sequence: Synthetic oligonucleotide
aggcuaauaaacuuaagau

SEQ ID NO: 312718 - RNA, 19 nt, Artificial Sequence
  Description of Artificial Sequence: Synthetic oligonucleotide
uuacaucuaucugugaucc

SEQ ID NO: 312719 - RNA, 19 nt, Artificial Sequence
  Description of Artificial Sequence: Synthetic oligonucleotide
uuuguuaugccauccuuga

SEQ ID NO: 312720 - RNA, 19 nt, Artificial Sequence
  Description of Artificial Sequence: Synthetic oligonucleotide
uaaauuuaagcgagcauau

SEQ ID NO: 312721 - RNA, 19 nt, Artificial Sequence
  Description of Artificial Sequence: Synthetic oligonucleotide
augauccuagcucaaacag

SEQ ID NO: 312722 - RNA, 19 nt, Artificial Sequence
  Description of Artificial Sequence: Synthetic oligonucleotide
uuaccaaaccacuuuacaa

SEQ ID NO: 312723 - RNA, 19 nt, Artificial Sequence
  Description of Artificial Sequence: Synthetic oligonucleotide
aacuagagaaguugcaaau

SEQ ID NO: 312724 - RNA, 19 nt, Artificial Sequence
  Description of Artificial Sequence: Synthetic oligonucleotide
aguuuuguaacuaauuagu

SEQ ID NO: 312725 - RNA, 19 nt, Artificial Sequence
  Description of Artificial Sequence: Synthetic oligonucleotide
aacuaaauuggagucccuc

SEQ ID NO: 312726 - RNA, 19 nt, Artificial Sequence
  Description of Artificial Sequence: Synthetic oligonucleotide
uguacguggaagaacucca

SEQ ID NO: 312727 - RNA, 19 nt, Artificial Sequence
  Description of Artificial Sequence: Synthetic oligonucleotide
gauuaucacaaaaccaagc

SEQ ID NO: 312728 - RNA, 19 nt, Artificial Sequence
  Description of Artificial Sequence: Synthetic oligonucleotide
uccuguacguggaagaacu

SEQ ID NO: 312729 - RNA, 19 nt, Artificial Sequence
  Description of Artificial Sequence: Synthetic oligonucleotide
gcaaacuagacuaauacag

SEQ ID NO: 312730 - RNA, 19 nt, Artificial Sequence
  Description of Artificial Sequence: Synthetic oligonucleotide
acaacccacauuaacuugc

SEQ ID NO: 312731 - RNA, 19 nt, Artificial Sequence
  Description of Artificial Sequence: Synthetic oligonucleotide
uggcuauuauauaacugag

SEQ ID NO: 312732 - RNA, 19 nt, Artificial Sequence
  Description of Artificial Sequence: Synthetic oligonucleotide
guggcuauuauauaacuga

SEQ ID NO: 312733 - RNA, 19 nt, Artificial Sequence
  Description of Artificial Sequence: Synthetic oligonucleotide
gauuguuaaagcccgggca

SEQ ID NO: 312734 - RNA, 19 nt, Artificial Sequence
  Description of Artificial Sequence: Synthetic oligonucleotide
uuaagcgagcauauugaca

SEQ ID NO: 312735 - RNA, 19 nt, Artificial Sequence
  Description of Artificial Sequence: Synthetic oligonucleotide
uauaacugaggcuaccaaa

SEQ ID NO: 312736 - RNA, 19 nt, Artificial Sequence
  Description of Artificial Sequence: Synthetic oligonucleotide
uugguccuaacccuuucgg

SEQ ID NO: 312737 - RNA, 19 nt, Artificial Sequence
  Description of Artificial Sequence: Synthetic oligonucleotide
uucagauaguaacucuuca

SEQ ID NO: 312738 - RNA, 19 nt, Artificial Sequence
  Description of Artificial Sequence: Synthetic oligonucleotide
ugguuaugagucuagccug

SEQ ID NO: 312739 - RNA, 19 nt, Artificial Sequence
  Description of Artificial Sequence: Synthetic oligonucleotide
uucuuagucaucugacuca

SEQ ID NO: 312740 - RNA, 19 nt, Artificial Sequence
  Description of Artificial Sequence: Synthetic oligonucleotide
uucuagacaaggaaaucaa

SEQ ID NO: 312741 - RNA, 19 nt, Artificial Sequence
  Description of Artificial Sequence: Synthetic oligonucleotide
uauauguuguuuaccuuaa

SEQ ID NO: 312742 - RNA, 19 nt, Artificial Sequence
  Description of Artificial Sequence: Synthetic oligonucleotide
uuuaagcgagcauauugac

SEQ ID NO: 312743 - RNA, 19 nt, Artificial Sequence
  Description of Artificial Sequence: Synthetic oligonucleotide
uauguugcuagaguggaac

SEQ ID NO: 312744 - RNA, 19 nt, Artificial Sequence
  Description of Artificial Sequence: Synthetic oligonucleotide
ucuaaauuuaagcgagcau

SEQ ID NO: 312745 - RNA, 19 nt, Artificial Sequence
  Description of Artificial Sequence: Synthetic oligonucleotide
cuaucuuauuagauaugcc

SEQ ID NO: 312746 - RNA, 19 nt, Artificial Sequence
  Description of Artificial Sequence: Synthetic oligonucleotide
aauccuguagccauuugcu

SEQ ID NO: 312747 - RNA, 19 nt, Artificial Sequence
  Description of Artificial Sequence: Synthetic oligonucleotide
uauauaacugaggcuacca

SEQ ID NO: 312748 - RNA, 19 nt, Artificial Sequence
  Description of Artificial Sequence: Synthetic oligonucleotide
aacauggaccaucacucga

SEQ ID NO: 312749 - RNA, 19 nt, Artificial Sequence
  Description of Artificial Sequence: Synthetic oligonucleotide
agcaaacuagacuaauaca

SEQ ID NO: 312750 - RNA, 19 nt, Artificial Sequence
  Description of Artificial Sequence: Synthetic oligonucleotide
cuaauuagugaaccuuaag

SEQ ID NO: 312751 - RNA, 19 nt, Artificial Sequence
  Description of Artificial Sequence: Synthetic oligonucleotide
caauccuguagccauuugc

SEQ ID NO: 312752 - RNA, 19 nt, Artificial Sequence
  Description of Artificial Sequence: Synthetic oligonucleotide
aguccacgcacacaacugg

SEQ ID NO: 312753 - RNA, 19 nt, Artificial Sequence
  Description of Artificial Sequence: Synthetic oligonucleotide
cauuuuccgaagcaugccc

SEQ ID NO: 312754 - RNA, 19 nt, Artificial Sequence
  Description of Artificial Sequence: Synthetic oligonucleotide
auacauagguacggcaggc

SEQ ID NO: 312755 - RNA, 19 nt, Artificial Sequence
  Description of Artificial Sequence: Synthetic oligonucleotide
aggucuacacguccugagc

SEQ ID NO: 312756 - RNA, 19 nt, Artificial Sequence
  Description of Artificial Sequence: Synthetic oligonucleotide
ugauccuagcucaaacaga

SEQ ID NO: 312757 - RNA, 19 nt, Artificial Sequence
  Description of Artificial Sequence: Synthetic oligonucleotide
uacuaggcuaauaaacuua

SEQ ID NO: 312758 - RNA, 19 nt, Artificial Sequence
  Description of Artificial Sequence: Synthetic oligonucleotide
auagguacggcaggcaggg

SEQ ID NO: 312759 - RNA, 19 nt, Artificial Sequence
  Description of Artificial Sequence: Synthetic oligonucleotide
uuguagcuuaaauccaucu

SEQ ID NO: 312760 - RNA, 19 nt, Artificial Sequence
  Description of Artificial Sequence: Synthetic oligonucleotide
uuguaacuaauuagugaac

SEQ ID NO: 312761 - RNA, 19 nt, Artificial Sequence
  Description of Artificial Sequence: Synthetic oligonucleotide
uggaggaugucucaacuau

SEQ ID NO: 312762 - RNA, 19 nt, Artificial Sequence
  Description of Artificial Sequence: Synthetic oligonucleotide
gguagaauguacauggaug

SEQ ID NO: 312763 - RNA, 19 nt, Artificial Sequence
  Description of Artificial Sequence: Synthetic oligonucleotide
aaauuggagucccucguuu

SEQ ID NO: 312764 - RNA, 19 nt, Artificial Sequence
  Description of Artificial Sequence: Synthetic oligonucleotide
acaaccaguccacgcacac

SEQ ID NO: 312765 - RNA, 19 nt, Artificial Sequence
  Description of Artificial Sequence: Synthetic oligonucleotide
gaucucgagcgacuggcgg

SEQ ID NO: 312766 - RNA, 19 nt, Artificial Sequence
  Description of Artificial Sequence: Synthetic oligonucleotide
uggauuguuaaagcccggg

SEQ ID NO: 312767 - RNA, 19 nt, Artificial Sequence
  Description of Artificial Sequence: Synthetic oligonucleotide
aaguacaccugggaaagcu

SEQ ID NO: 312768 - RNA, 19 nt, Artificial Sequence
  Description of Artificial Sequence: Synthetic oligonucleotide
uacaacccacauuaacuug

SEQ ID NO: 312769 - RNA, 19 nt, Artificial Sequence
  Description of Artificial Sequence: Synthetic oligonucleotide
acaccuauuaaacuacaua

SEQ ID NO: 312770 - RNA, 19 nt, Artificial Sequence
  Description of Artificial Sequence: Synthetic oligonucleotide
ucccguuuuguccuuacaa

SEQ ID NO: 312771 - RNA, 19 nt, Artificial Sequence
  Description of Artificial Sequence: Synthetic oligonucleotide
gauccuagcucaaacagaa

SEQ ID NO: 312772 - RNA, 19 nt, Artificial Sequence
  Description of Artificial Sequence: Synthetic oligonucleotide
guugcuagaguggaacucc

SEQ ID NO: 312773 - RNA, 19 nt, Artificial Sequence
  Description of Artificial Sequence: Synthetic oligonucleotide
ucuaucugugauccucaca

SEQ ID NO: 312774 - RNA, 19 nt, Artificial Sequence
  Description of Artificial Sequence: Synthetic oligonucleotide
guaaaccuugucaauagca

SEQ ID NO: 312775 - RNA, 19 nt, Artificial Sequence
  Description of Artificial Sequence: Synthetic oligonucleotide
caaacuagacuaauacaga

SEQ ID NO: 312776 - RNA, 19 nt, Artificial Sequence
  Description of Artificial Sequence: Synthetic oligonucleotide
aguuaugaaucuacaacca

SEQ ID NO: 312777 - RNA, 19 nt, Artificial Sequence
  Description of Artificial Sequence: Synthetic oligonucleotide
guugguccuaacccuuucg

SEQ ID NO: 312778 - RNA, 19 nt, Artificial Sequence
  Description of Artificial Sequence: Synthetic oligonucleotide
uagugaaccuuaagucaag

SEQ ID NO: 312779 - RNA, 19 nt, Artificial Sequence
  Description of Artificial Sequence: Synthetic oligonucleotide
agauuucuaacuagagaag

SEQ ID NO: 312780 - RNA, 19 nt, Artificial Sequence
  Description of Artificial Sequence: Synthetic oligonucleotide
ucaauagcaccaugguuau

SEQ ID NO: 312781 - RNA, 19 nt, Artificial Sequence
  Description of Artificial Sequence: Synthetic oligonucleotide
ugaucucgagcgacuggcg

SEQ ID NO: 312782 - RNA, 19 nt, Artificial Sequence
  Description of Artificial Sequence: Synthetic oligonucleotide
auauacucuagagcugauc

SEQ ID NO: 312783 - RNA, 19 nt, Artificial Sequence
  Description of Artificial Sequence: Synthetic oligonucleotide
cccuacugcacucacaagg

SEQ ID NO: 312784 - RNA, 19 nt, Artificial Sequence
  Description of Artificial Sequence: Synthetic oligonucleotide
ugaagguauucaccacccc

SEQ ID NO: 312785 - RNA, 19 nt, Artificial Sequence
  Description of Artificial Sequence: Synthetic oligonucleotide
cgcgagaugaucucgagcg

SEQ ID NO: 312786 - RNA, 19 nt, Artificial Sequence
  Description of Artificial Sequence: Synthetic oligonucleotide
uuagugcuucuuucaacac

SEQ ID NO: 312787 - RNA, 19 nt, Artificial Sequence
  Description of Artificial Sequence: Synthetic oligonucleotide
aguggcuauuauauaacug

SEQ ID NO: 312788 - RNA, 19 nt, Artificial Sequence
  Description of Artificial Sequence: Synthetic oligonucleotide
uggccacucuucuagacaa

SEQ ID NO: 312789 - RNA, 19 nt, Artificial Sequence
  Description of Artificial Sequence: Synthetic oligonucleotide
auauaacugaggcuaccaa

SEQ ID NO: 312790 - RNA, 19 nt, Artificial Sequence
  Description of Artificial Sequence: Synthetic oligonucleotide
ucugacucaugacuauuuu

SEQ ID NO: 312791 - RNA, 19 nt, Artificial Sequence
  Description of Artificial Sequence: Synthetic oligonucleotide
aguuuguuaugccauccuu

SEQ ID NO: 312792 - RNA, 19 nt, Artificial Sequence
  Description of Artificial Sequence: Synthetic oligonucleotide
uuauucuuguuagccacaa

SEQ ID NO: 312793 - RNA, 19 nt, Artificial Sequence
  Description of Artificial Sequence: Synthetic oligonucleotide
ucucccuauucacuuugga

SEQ ID NO: 312794 - RNA, 19 nt, Artificial Sequence
  Description of Artificial Sequence: Synthetic oligonucleotide
cuaggcuaauaaacuuaag

SEQ ID NO: 312795 - RNA, 19 nt, Artificial Sequence
  Description of Artificial Sequence: Synthetic oligonucleotide
uucgcguccuugacgccgg

SEQ ID NO: 312796 - RNA, 19 nt, Artificial Sequence
  Description of Artificial Sequence: Synthetic oligonucleotide
acuauucagcuagucagca

SEQ ID NO: 312797 - RNA, 19 nt, Artificial Sequence
  Description of Artificial Sequence: Synthetic oligonucleotide
ugcuaaggguucgaugcag

SEQ ID NO: 312798 - RNA, 19 nt, Artificial Sequence
  Description of Artificial Sequence: Synthetic oligonucleotide
uguugcuagaguggaacuc

SEQ ID NO: 312799 - RNA, 19 nt, Artificial Sequence
  Description of Artificial Sequence: Synthetic oligonucleotide
gugguugcgcugcacgccg

SEQ ID NO: 312800 - RNA, 19 nt, Artificial Sequence
  Description of Artificial Sequence: Synthetic oligonucleotide
cuuucaaaugauccuagcu

SEQ ID NO: 312801 - RNA, 19 nt, Artificial Sequence
  Description of Artificial Sequence: Synthetic oligonucleotide
ucuuagucaucugacucau

SEQ ID NO: 312802 - RNA, 19 nt, Artificial Sequence
  Description of Artificial Sequence: Synthetic oligonucleotide
gagaaguguaagacaaaca

SEQ ID NO: 312803 - RNA, 19 nt, Artificial Sequence
  Description of Artificial Sequence: Synthetic oligonucleotide
cuacaaccaguccacgcac

SEQ ID NO: 312804 - RNA, 19 nt, Artificial Sequence
  Description of Artificial Sequence: Synthetic oligonucleotide
agucccguuuuguccuuac

SEQ ID NO: 312805 - RNA, 19 nt, Artificial Sequence
  Description of Artificial Sequence: Synthetic oligonucleotide
ggauuguuaaagcccgggc

SEQ ID NO: 312806 - RNA, 19 nt, Artificial Sequence
  Description of Artificial Sequence: Synthetic oligonucleotide
cuauucagcuagucagcac

SEQ ID NO: 312807 - RNA, 19 nt, Artificial Sequence
  Description of Artificial Sequence: Synthetic oligonucleotide
uggaacuccuggauuguua

SEQ ID NO: 312808 - RNA, 19 nt, Artificial Sequence
  Description of Artificial Sequence: Synthetic oligonucleotide
auguugcuagaguggaacu

SEQ ID NO: 312809 - RNA, 19 nt, Artificial Sequence
  Description of Artificial Sequence: Synthetic oligonucleotide
acauuaggagcaaacuaga

SEQ ID NO: 312810 - RNA, 19 nt, Artificial Sequence
  Description of Artificial Sequence: Synthetic oligonucleotide
ugcacucacaaggcuaucu

SEQ ID NO: 312811 - RNA, 19 nt, Artificial Sequence
  Description of Artificial Sequence: Synthetic oligonucleotide
ucaccgccaucauuagugc

SEQ ID NO: 312812 - RNA, 19 nt, Artificial Sequence
  Description of Artificial Sequence: Synthetic oligonucleotide
acuuucugcuaaggguucg

SEQ ID NO: 312813 - RNA, 19 nt, Artificial Sequence
  Description of Artificial Sequence: Synthetic oligonucleotide
gagucuagccuguguuacc

SEQ ID NO: 312814 - RNA, 19 nt, Artificial Sequence
  Description of Artificial Sequence: Synthetic oligonucleotide
ggcuucgcguccuugacgc

SEQ ID NO: 312815 - RNA, 19 nt, Artificial Sequence
  Description of Artificial Sequence: Synthetic oligonucleotide
cuucgcguccuugacgccg

SEQ ID NO: 312816 - RNA, 19 nt, Artificial Sequence
  Description of Artificial Sequence: Synthetic oligonucleotide
uuaugccauccuugaaaac

SEQ ID NO: 312817 - RNA, 19 nt, Artificial Sequence
  Description of Artificial Sequence: Synthetic oligonucleotide
gccauuacuaggcuaauaa

SEQ ID NO: 312818 - RNA, 19 nt, Artificial Sequence
  Description of Artificial Sequence: Synthetic oligonucleotide
aguacaccugggaaagcuc

SEQ ID NO: 312819 - RNA, 19 nt, Artificial Sequence
  Description of Artificial Sequence: Synthetic oligonucleotide
uuggaggaugucucaacua

SEQ ID NO: 312820 - RNA, 19 nt, Artificial Sequence
  Description of Artificial Sequence: Synthetic oligonucleotide
agucuagccuguguuacca

SEQ ID NO: 312821 - RNA, 19 nt, Artificial Sequence
  Description of Artificial Sequence: Synthetic oligonucleotide
guagcgcgagaugaucucg

SEQ ID NO: 312822 - RNA, 19 nt, Artificial Sequence
  Description of Artificial Sequence: Synthetic oligonucleotide
uaggagcaaacuagacuaa

SEQ ID NO: 312823 - RNA, 19 nt, Artificial Sequence
  Description of Artificial Sequence: Synthetic oligonucleotide
auacucuagagcugaucau

SEQ ID NO: 312824 - RNA, 19 nt, Artificial Sequence
  Description of Artificial Sequence: Synthetic oligonucleotide
uugcuagaguggaacuccu

SEQ ID NO: 312825 - RNA, 19 nt, Artificial Sequence
  Description of Artificial Sequence: Synthetic oligonucleotide
auucagcuagucagcacuc

SEQ ID NO: 312826 - RNA, 19 nt, Artificial Sequence
  Description of Artificial Sequence: Synthetic oligonucleotide
aucucgagcgacuggcggu

SEQ ID NO: 312827 - RNA, 19 nt, Artificial Sequence
  Description of Artificial Sequence: Synthetic oligonucleotide
acucacaaggcuaucuuau

SEQ ID NO: 312828 - RNA, 19 nt, Artificial Sequence
  Description of Artificial Sequence: Synthetic oligonucleotide
ggcuauguugcuagagugg

SEQ ID NO: 312829 - RNA, 19 nt, Artificial Sequence
  Description of Artificial Sequence: Synthetic oligonucleotide
cucucccuauucacuuugg

SEQ ID NO: 312830 - RNA, 19 nt, Artificial Sequence
  Description of Artificial Sequence: Synthetic oligonucleotide
uagcgcgagaugaucucga

SEQ ID NO: 312831 - RNA, 19 nt, Artificial Sequence
  Description of Artificial Sequence: Synthetic oligonucleotide
acuaauuagugaaccuuaa

SEQ ID NO: 312832 - RNA, 19 nt, Artificial Sequence
  Description of Artificial Sequence: Synthetic oligonucleotide
gccugcauaguuaugaauc

SEQ ID NO: 312833 - RNA, 19 nt, Artificial Sequence
  Description of Artificial Sequence: Synthetic oligonucleotide
cuggcgguacagcucgucc

SEQ ID NO: 312834 - RNA, 19 nt, Artificial Sequence
  Description of Artificial Sequence: Synthetic oligonucleotide
ucucaacuauucagcuagu

SEQ ID NO: 312835 - RNA, 19 nt, Artificial Sequence
  Description of Artificial Sequence: Synthetic oligonucleotide
guacauucuuagucaucug

SEQ ID NO: 312836 - RNA, 19 nt, Artificial Sequence
  Description of Artificial Sequence: Synthetic oligonucleotide
agugaaccuuaagucaagu

SEQ ID NO: 312837 - RNA, 19 nt, Artificial Sequence
  Description of Artificial Sequence: Synthetic oligonucleotide
gucuacacguccugagcac

SEQ ID NO: 312838 - RNA, 19 nt, Artificial Sequence
  Description of Artificial Sequence: Synthetic oligonucleotide
agcgcgagaugaucucgag

SEQ ID NO: 312839 - RNA, 19 nt, Artificial Sequence
  Description of Artificial Sequence: Synthetic oligonucleotide
cuaaauuggagucccucgu

SEQ ID NO: 312840 - RNA, 19 nt, Artificial Sequence
  Description of Artificial Sequence: Synthetic oligonucleotide
ucccucguuuuauauccaa

SEQ ID NO: 312841 - RNA, 19 nt, Artificial Sequence
  Description of Artificial Sequence: Synthetic oligonucleotide
gugccucuucucuaaauaa

SEQ ID NO: 312842 - RNA, 19 nt, Artificial Sequence
  Description of Artificial Sequence: Synthetic oligonucleotide
cucacgcgcuccagcaggg

SEQ ID NO: 312843 - RNA, 19 nt, Artificial Sequence
  Description of Artificial Sequence: Synthetic oligonucleotide
aaacuaaauuggagucccu

SEQ ID NO: 312844 - RNA, 19 nt, Artificial Sequence
  Description of Artificial Sequence: Synthetic oligonucleotide
uucagcuagucagcacuca

SEQ ID NO: 312845 - RNA, 19 nt, Artificial Sequence
  Description of Artificial Sequence: Synthetic oligonucleotide
uccuuacaucuaucuguga

SEQ ID NO: 312846 - RNA, 19 nt, Artificial Sequence
  Description of Artificial Sequence: Synthetic oligonucleotide
uccacgcacacaacugguu

SEQ ID NO: 312847 - RNA, 19 nt, Artificial Sequence
  Description of Artificial Sequence: Synthetic oligonucleotide
cuuagucaucugacucaug

SEQ ID NO: 312848 - RNA, 19 nt, Artificial Sequence
  Description of Artificial Sequence: Synthetic oligonucleotide
gugaaccuuaagucaagua

SEQ ID NO: 312849 - RNA, 19 nt, Artificial Sequence
  Description of Artificial Sequence: Synthetic oligonucleotide
guuaugagucuagccugug

SEQ ID NO: 312850 - RNA, 19 nt, Artificial Sequence
  Description of Artificial Sequence: Synthetic oligonucleotide
gcuauguugcuagagugga

SEQ ID NO: 312851 - RNA, 19 nt, Artificial Sequence
  Description of Artificial Sequence: Synthetic oligonucleotide
aggagcaaacuagacuaau

SEQ ID NO: 312852 - RNA, 19 nt, Artificial Sequence
  Description of Artificial Sequence: Synthetic oligonucleotide
gccuguguuaccaaaccac

SEQ ID NO: 312853 - RNA, 19 nt, Artificial Sequence
  Description of Artificial Sequence: Synthetic oligonucleotide
cagcuagucagcacucaga

SEQ ID NO: 312854 - RNA, 19 nt, Artificial Sequence
  Description of Artificial Sequence: Synthetic oligonucleotide
gcuagucagcacucagacc

SEQ ID NO: 312855 - RNA, 19 nt, Artificial Sequence
  Description of Artificial Sequence: Synthetic oligonucleotide
acgcacacaacugguucug

SEQ ID NO: 312856 - RNA, 19 nt, Artificial Sequence
  Description of Artificial Sequence: Synthetic oligonucleotide
caguggcuauuauauaacu

SEQ ID NO: 312857 - RNA, 19 nt, Artificial Sequence
  Description of Artificial Sequence: Synthetic oligonucleotide
gguagcgcgagaugaucuc

SEQ ID NO: 312858 - RNA, 19 nt, Artificial Sequence
  Description of Artificial Sequence: Synthetic oligonucleotide
guccuguacguggaagaac

SEQ ID NO: 312859 - RNA, 19 nt, Artificial Sequence
  Description of Artificial Sequence: Synthetic oligonucleotide
ucucgagcgacuggcggua

SEQ ID NO: 312860 - RNA, 19 nt, Artificial Sequence
  Description of Artificial Sequence: Synthetic oligonucleotide
cuauguugcuagaguggaa

SEQ ID NO: 312861 - RNA, 19 nt, Artificial Sequence
  Description of Artificial Sequence: Synthetic oligonucleotide
aggacuggccacucuucua

SEQ ID NO: 312862 - RNA, 19 nt, Artificial Sequence
  Description of Artificial Sequence: Synthetic oligonucleotide
ggcgcccggguucuuagcc

SEQ ID NO: 312863 - RNA, 19 nt, Artificial Sequence
  Description of Artificial Sequence: Synthetic oligonucleotide
acccuuucgggaacagaug

SEQ ID NO: 312864 - RNA, 19 nt, Artificial Sequence
  Description of Artificial Sequence: Synthetic oligonucleotide
gcuaaggguucgaugcagc

SEQ ID NO: 312865 - RNA, 19 nt, Artificial Sequence
  Description of Artificial Sequence: Synthetic oligonucleotide
guacugcggcuucuaguca

SEQ ID NO: 312866 - RNA, 19 nt, Artificial Sequence
  Description of Artificial Sequence: Synthetic oligonucleotide
cugcuaaggguucgaugca

SEQ ID NO: 312867 - RNA, 19 nt, Artificial Sequence
  Description of Artificial Sequence: Synthetic oligonucleotide
accaccccagguagaaugu

SEQ ID NO: 312868 - RNA, 19 nt, Artificial Sequence
  Description of Artificial Sequence: Synthetic oligonucleotide
accccuuucucaaccacuu

SEQ ID NO: 312869 - RNA, 19 nt, Artificial Sequence
  Description of Artificial Sequence: Synthetic oligonucleotide
cacguccugagcacuugga

SEQ ID NO: 312870 - RNA, 19 nt, Artificial Sequence
  Description of Artificial Sequence: Synthetic oligonucleotide
gcgagcauauugacauuag

SEQ ID NO: 312871 - RNA, 19 nt, Artificial Sequence
  Description of Artificial Sequence: Synthetic oligonucleotide
gguauucaccaccccaggu

SEQ ID NO: 312872 - RNA, 19 nt, Artificial Sequence
  Description of Artificial Sequence: Synthetic oligonucleotide
ccaugguuaugagucuagc

SEQ ID NO: 312873 - RNA, 19 nt, Artificial Sequence
  Description of Artificial Sequence: Synthetic oligonucleotide
gcgcgagaugaucucgagc

SEQ ID NO: 312874 - RNA, 19 nt, Artificial Sequence
  Description of Artificial Sequence: Synthetic oligonucleotide
caguacugcggcuucuagu

SEQ ID NO: 312875 - RNA, 19 nt, Artificial Sequence
  Description of Artificial Sequence: Synthetic oligonucleotide
ccuuacaucuaucugugau

SEQ ID NO: 312876 - RNA, 19 nt, Artificial Sequence
  Description of Artificial Sequence: Synthetic oligonucleotide
gucccguuuuguccuuaca

SEQ ID NO: 312877 - RNA, 19 nt, Artificial Sequence
  Description of Artificial Sequence: Synthetic oligonucleotide
caguuuguuaugccauccu

SEQ ID NO: 312878 - RNA, 19 nt, Artificial Sequence
  Description of Artificial Sequence: Synthetic oligonucleotide
gcgcccggguucuuagccg

SEQ ID NO: 312879 - RNA, 19 nt, Artificial Sequence
  Description of Artificial Sequence: Synthetic oligonucleotide
cuguguuaccaaaccacuu

SEQ ID NO: 312880 - RNA, 19 nt, Artificial Sequence
  Description of Artificial Sequence: Synthetic oligonucleotide
ccuguguuaccaaaccacu

SEQ ID NO: 312881 - RNA, 19 nt, Artificial Sequence
  Description of Artificial Sequence: Synthetic oligonucleotide
cuacugcacucacaaggcu

SEQ ID NO: 312882 - RNA, 19 nt, Artificial Sequence
  Description of Artificial Sequence: Synthetic oligonucleotide
cuugggcucugcaagucuu

SEQ ID NO: 312883 - RNA, 19 nt, Artificial Sequence
  Description of Artificial Sequence: Synthetic oligonucleotide
uggccauuacuaggcuaau

SEQ ID NO: 312884 - RNA, 19 nt, Artificial Sequence
  Description of Artificial Sequence: Synthetic oligonucleotide
caaccaguccacgcacaca

SEQ ID NO: 312885 - RNA, 19 nt, Artificial Sequence
  Description of Artificial Sequence: Synthetic oligonucleotide
ggguucgaugcagcuuucc

SEQ ID NO: 312886 - RNA, 19 nt, Artificial Sequence
  Description of Artificial Sequence: Synthetic oligonucleotide
auccuagcucaaacagaaa

SEQ ID NO: 312887 - RNA, 19 nt, Artificial Sequence
  Description of Artificial Sequence: Synthetic oligonucleotide
gcgagaugaucucgagcga

SEQ ID NO: 312888 - RNA, 19 nt, Artificial Sequence
  Description of Artificial Sequence: Synthetic oligonucleotide
gucccucguuuuauaucca

SEQ ID NO: 312889 - RNA, 19 nt, Artificial Sequence
  Description of Artificial Sequence: Synthetic oligonucleotide
cuuagccgccucgcugcuc

SEQ ID NO: 312890 - RNA, 19 nt, Artificial Sequence
  Description of Artificial Sequence: Synthetic oligonucleotide
gcggcuucgcguccuugac

SEQ ID NO: 312891 - RNA, 19 nt, Artificial Sequence
  Description of Artificial Sequence: Synthetic oligonucleotide
cgucucgugguugcgcugc

SEQ ID NO: 312892 - RNA, 19 nt, Artificial Sequence
  Description of Artificial Sequence: Synthetic oligonucleotide
gcggcgcccggguucuuag

SEQ ID NO: 312893 - RNA, 19 nt, Artificial Sequence
  Description of Artificial Sequence: Synthetic oligonucleotide
cgugguugcgcugcacgcc

SEQ ID NO: 312894 - RNA, 19 nt, Artificial Sequence
  Description of Artificial Sequence: Synthetic oligonucleotide
cucgagcgacuggcgguac

SEQ ID NO: 312895 - RNA, 19 nt, Artificial Sequence
  Description of Artificial Sequence: Synthetic oligonucleotide
cugcacucacaaggcuauc

SEQ ID NO: 312896 - RNA, 19 nt, Artificial Sequence
  Description of Artificial Sequence: Synthetic oligonucleotide
caccgccaucauuagugcu

SEQ ID NO: 312897 - RNA, 19 nt, Artificial Sequence
  Description of Artificial Sequence: Synthetic oligonucleotide
cggcuucgcguccuugacg

SEQ ID NO: 312898 - RNA, 19 nt, Artificial Sequence
  Description of Artificial Sequence: Synthetic oligonucleotide
ccuccucggccgacggcgg

SEQ ID NO: 312899 - RNA, 19 nt, Artificial Sequence
  Description of Artificial Sequence: Synthetic oligonucleotide
ggccgucucgugguugcgc

SEQ ID NO: 312900 - RNA, 19 nt, Artificial Sequence
  Description of Artificial Sequence: Synthetic oligonucleotide
ccccuacugcacucacaag

SEQ ID NO: 312901 - RNA, 19 nt, Artificial Sequence
  Description of Artificial Sequence: Synthetic oligonucleotide
gccucgcccagcggcuucg

SEQ ID NO: 312902 - RNA, 19 nt, Artificial Sequence
  Description of Artificial Sequence: Synthetic oligonucleotide
ggccauuacuaggcuaaua

SEQ ID NO: 312903 - RNA, 19 nt, Artificial Sequence
  Description of Artificial Sequence: Synthetic oligonucleotide
ccuaacccuuucgggaaca

SEQ ID NO: 312904 - RNA, 19 nt, Artificial Sequence
  Description of Artificial Sequence: Synthetic oligonucleotide
ccgcaaaagccagcagcac

SEQ ID NO: 312905 - RNA, 19 nt, Artificial Sequence
  Description of Artificial Sequence: Synthetic oligonucleotide
gccgucucgugguugcgcu

SEQ ID NO: 312906 - RNA, 19 nt, Artificial Sequence
  Description of Artificial Sequence: Synthetic oligonucleotide
ccgcuugccgagcgccucc

SEQ ID NO: 312907 - RNA, 19 nt, Artificial Sequence
  Description of Artificial Sequence: Synthetic oligonucleotide
ggagguagcgcgagaugau

SEQ ID NO: 312908 - RNA, 19 nt, Artificial Sequence
  Description of Artificial Sequence: Synthetic oligonucleotide
cucggccgacggcggcgug

SEQ ID NO: 312909 - RNA, 19 nt, Artificial Sequence
  Description of Artificial Sequence: Synthetic oligonucleotide
gcacgccgucgcccacgcg

SEQ ID NO: 312910 - RNA, 19 nt, Artificial Sequence
  Description of Artificial Sequence: Synthetic oligonucleotide
cggcgcccggguucuuagc

SEQ ID NO: 312911 - RNA, 19 nt, Artificial Sequence
  Description of Artificial Sequence: Synthetic oligonucleotide
ccaccccagguagaaugua

SEQ ID NO: 312912 - RNA, 19 nt, Artificial Sequence
  Description of Artificial Sequence: Synthetic oligonucleotide
cagcgcccuccggcccgcc

SEQ ID NO: 312913 - RNA, 19 nt, Artificial Sequence
  Description of Artificial Sequence: Synthetic oligonucleotide
ccagucccguuuuguccuu

SEQ ID NO: 312914 - RNA, 19 nt, Artificial Sequence
  Description of Artificial Sequence: Synthetic oligonucleotide
aauauuagccaccaggccc

SEQ ID NO: 312915 - RNA, 19 nt, Artificial Sequence
  Description of Artificial Sequence: Synthetic oligonucleotide
aaaaguacuagauacucug

SEQ ID NO: 312916 - RNA, 19 nt, Artificial Sequence
  Description of Artificial Sequence: Synthetic oligonucleotide
aguauuuucguguggaagc

SEQ ID NO: 312917 - RNA, 19 nt, Artificial Sequence
  Description of Artificial Sequence: Synthetic oligonucleotide
auuacaacccaccagguac

SEQ ID NO: 312918 - RNA, 19 nt, Artificial Sequence
  Description of Artificial Sequence: Synthetic oligonucleotide
aauucguucagucagacuu

SEQ ID NO: 312919 - RNA, 19 nt, Artificial Sequence
  Description of Artificial Sequence: Synthetic oligonucleotide
acgucugucaauuuugucc

SEQ ID NO: 312920 - RNA, 19 nt, Artificial Sequence
  Description of Artificial Sequence: Synthetic oligonucleotide
ugaaaucugccacaaaccg

SEQ ID NO: 312921 - RNA, 19 nt, Artificial Sequence
  Description of Artificial Sequence: Synthetic oligonucleotide
ucuaauuuuguucacgaca

SEQ ID NO: 312922 - RNA, 19 nt, Artificial Sequence
  Description of Artificial Sequence: Synthetic oligonucleotide
ugaaccaacagcuggaugc

SEQ ID NO: 312923 - RNA, 19 nt, Artificial Sequence
  Description of Artificial Sequence: Synthetic oligonucleotide
uuuaaugcagaacugcgug

SEQ ID NO: 312924 - RNA, 19 nt, Artificial Sequence
  Description of Artificial Sequence: Synthetic oligonucleotide
ugauugaguggucaggugg

SEQ ID NO: 312925 - RNA, 19 nt, Artificial Sequence
  Description of Artificial Sequence: Synthetic oligonucleotide
cagaauucuacugagaucc

SEQ ID NO: 312926 - RNA, 19 nt, Artificial Sequence
  Description of Artificial Sequence: Synthetic oligonucleotide
uguguugcaauccguaagg

SEQ ID NO: 312927 - RNA, 19 nt, Artificial Sequence
  Description of Artificial Sequence: Synthetic oligonucleotide
  modified_base (2)..(2): a, c, u, g, unknown or other
  modified_base (14)..(14): a, c, u, g, unknown or other
gnuuccagggagunaaccc

SEQ ID NO: 312928 - RNA, 19 nt, Artificial Sequence
  Description of Artificial Sequence: Synthetic oligonucleotide
aacugcgugaaguauuuuc

SEQ ID NO: 312929 - RNA, 19 nt, Artificial Sequence
  Description of Artificial Sequence: Synthetic oligonucleotide
uacucaacagcauugaagu

SEQ ID NO: 312930 - RNA, 19 nt, Artificial Sequence
  Description of Artificial Sequence: Synthetic oligonucleotide
gaagaugguggucagggcg

SEQ ID NO: 312931 - RNA, 19 nt, Artificial Sequence
  Description of Artificial Sequence: Synthetic oligonucleotide
uucacgacaaucuuagugu

SEQ ID NO: 312932 - RNA, 19 nt, Artificial Sequence
  Description of Artificial Sequence: Synthetic oligonucleotide
uagaauuacaacccaccag

SEQ ID NO: 312933 - RNA, 19 nt, Artificial Sequence
  Description of Artificial Sequence: Synthetic oligonucleotide
auaucuucgaguugauuuc

SEQ ID NO: 312934 - RNA, 19 nt, Artificial Sequence
  Description of Artificial Sequence: Synthetic oligonucleotide
aaccagagaaucguuuugc

SEQ ID NO: 312935 - RNA, 19 nt, Artificial Sequence
  Description of Artificial Sequence: Synthetic oligonucleotide
aaauggauugucuggggcu

SEQ ID NO: 312936 - RNA, 19 nt, Artificial Sequence
  Description of Artificial Sequence: Synthetic oligonucleotide
uaucuuuugauuauccuuu

SEQ ID NO: 312937 - RNA, 19 nt, Artificial Sequence
  Description of Artificial Sequence: Synthetic oligonucleotide
uugaucgagaggaucuugg

SEQ ID NO: 312938 - RNA, 19 nt, Artificial Sequence
  Description of Artificial Sequence: Synthetic oligonucleotide
caacaaauaccaccaaugg

SEQ ID NO: 312939 - RNA, 19 nt, Artificial Sequence
  Description of Artificial Sequence: Synthetic oligonucleotide
aaaccggucuaucagcuca

SEQ ID NO: 312940 - RNA, 19 nt, Artificial Sequence
  Description of Artificial Sequence: Synthetic oligonucleotide
auuagggacagugugcugg

SEQ ID NO: 312941 - RNA, 19 nt, Artificial Sequence
  Description of Artificial Sequence: Synthetic oligonucleotide
ucagugucgugauugagug

SEQ ID NO: 312942 - RNA, 19 nt, Artificial Sequence
  Description of Artificial Sequence: Synthetic oligonucleotide
aaauaccugcucuauggcu

SEQ ID NO: 312943 - RNA, 19 nt, Artificial Sequence
  Description of Artificial Sequence: Synthetic oligonucleotide
caaucuuaguguaacuggc

SEQ ID NO: 312944 - RNA, 19 nt, Artificial Sequence
  Description of Artificial Sequence: Synthetic oligonucleotide
ucguguggaagccagguug

SEQ ID NO: 312945 - RNA, 19 nt, Artificial Sequence
  Description of Artificial Sequence: Synthetic oligonucleotide
auuuuguccagccaggcaa

SEQ ID NO: 312946 - RNA, 19 nt, Artificial Sequence
  Description of Artificial Sequence: Synthetic oligonucleotide
gagauuaauucguucaguc

SEQ ID NO: 312947 - RNA, 19 nt, Artificial Sequence
  Description of Artificial Sequence: Synthetic oligonucleotide
agugaaccuggccacuucc

SEQ ID NO: 312948 - RNA, 19 nt, Artificial Sequence
  Description of Artificial Sequence: Synthetic oligonucleotide
ucguuuugcaagaaacccc

SEQ ID NO: 312949 - RNA, 19 nt, Artificial Sequence
  Description of Artificial Sequence: Synthetic oligonucleotide
aaaguuaguuguucucuga

SEQ ID NO: 312950 - RNA, 19 nt, Artificial Sequence
  Description of Artificial Sequence: Synthetic oligonucleotide
ucaguguuaggcuucggug

SEQ ID NO: 312951 - RNA, 19 nt, Artificial Sequence
  Description of Artificial Sequence: Synthetic oligonucleotide
aaucaguugcucagagucc

SEQ ID NO: 312952 - RNA, 19 nt, Artificial Sequence
  Description of Artificial Sequence: Synthetic oligonucleotide
ucucccgugagauuaauuc

SEQ ID NO: 312953 - RNA, 19 nt, Artificial Sequence
  Description of Artificial Sequence: Synthetic oligonucleotide
aaccccucaaaguuaguug

SEQ ID NO: 312954 - RNA, 19 nt, Artificial Sequence
  Description of Artificial Sequence: Synthetic oligonucleotide
ugggacucaauguauacgu

SEQ ID NO: 312955 - RNA, 19 nt, Artificial Sequence
  Description of Artificial Sequence: Synthetic oligonucleotide
auauuagccaccaggcccc

SEQ ID NO: 312956 - RNA, 19 nt, Artificial Sequence
  Description of Artificial Sequence: Synthetic oligonucleotide
aacaaugccaugaaaugga

SEQ ID NO: 312957 - RNA, 19 nt, Artificial Sequence
  Description of Artificial Sequence: Synthetic oligonucleotide
aucuauguuugccagagau

SEQ ID NO: 312958 - RNA, 19 nt, Artificial Sequence
  Description of Artificial Sequence: Synthetic oligonucleotide
guauacguagagaugaggc

SEQ ID NO: 312959 - RNA, 19 nt, Artificial Sequence
  Description of Artificial Sequence: Synthetic oligonucleotide
ucuaacuccccuuucucca

SEQ ID NO: 312960 - RNA, 19 nt, Artificial Sequence
  Description of Artificial Sequence: Synthetic oligonucleotide
aaugaguuugcaaauuuaa

SEQ ID NO: 312961 - RNA, 19 nt, Artificial Sequence
  Description of Artificial Sequence: Synthetic oligonucleotide
uauacguagagaugaggcu

SEQ ID NO: 312962 - RNA, 19 nt, Artificial Sequence
  Description of Artificial Sequence: Synthetic oligonucleotide
auacguagagaugaggcuc

SEQ ID NO: 312963 - RNA, 19 nt, Artificial Sequence
  Description of Artificial Sequence: Synthetic oligonucleotide
caccaaugguucaugaggg

SEQ ID NO: 312964 - RNA, 19 nt, Artificial Sequence
  Description of Artificial Sequence: Synthetic oligonucleotide
  modified_base (4)..(4): a, c, u, g, unknown or other
agunaaccccaccagccag

SEQ ID NO: 312965 - RNA, 19 nt, Artificial Sequence
  Description of Artificial Sequence: Synthetic oligonucleotide
aaguacuagauacucugau

SEQ ID NO: 312966 - RNA, 19 nt, Artificial Sequence
  Description of Artificial Sequence: Synthetic oligonucleotide
ugcuuaauaucuucgaguu

SEQ ID NO: 312967 - RNA, 19 nt, Artificial Sequence
  Description of Artificial Sequence: Synthetic oligonucleotide
uguauacguagagaugagg

SEQ ID NO: 312968 - RNA, 19 nt, Artificial Sequence
  Description of Artificial Sequence: Synthetic oligonucleotide
cuagcugcugaguaguagc

SEQ ID NO: 312969 - RNA, 19 nt, Artificial Sequence
  Description of Artificial Sequence: Synthetic oligonucleotide
agucuaauuuuguucacga

SEQ ID NO: 312970 - RNA, 19 nt, Artificial Sequence
  Description of Artificial Sequence: Synthetic oligonucleotide
aauucuacugagauccucu

SEQ ID NO: 312971 - RNA, 19 nt, Artificial Sequence
  Description of Artificial Sequence: Synthetic oligonucleotide
caguguuaggcuucggugg

SEQ ID NO: 312972 - RNA, 19 nt, Artificial Sequence
  Description of Artificial Sequence: Synthetic oligonucleotide
acgacaaucuuaguguaac

SEQ ID NO: 312973 - RNA, 19 nt, Artificial Sequence
  Description of Artificial Sequence: Synthetic oligonucleotide
guugucacggaugaugggg

SEQ ID NO: 312974 - RNA, 19 nt, Artificial Sequence
  Description of Artificial Sequence: Synthetic oligonucleotide
aauuuuguccagccaggca

SEQ ID NO: 312975 - RNA, 19 nt, Artificial Sequence
  Description of Artificial Sequence: Synthetic oligonucleotide
agauuaauucguucaguca

SEQ ID NO: 312976 - RNA, 19 nt, Artificial Sequence
  Description of Artificial Sequence: Synthetic oligonucleotide
cauccgaccauacuucucc

SEQ ID NO: 312977 - RNA, 19 nt, Artificial Sequence
  Description of Artificial Sequence: Synthetic oligonucleotide
ugucaggguacaaccagag

SEQ ID NO: 312978 - RNA, 19 nt, Artificial Sequence
  Description of Artificial Sequence: Synthetic oligonucleotide
aacgucugucaauuuuguc

SEQ ID NO: 312979 - RNA, 19 nt, Artificial Sequence
  Description of Artificial Sequence: Synthetic oligonucleotide
uccgucauguaccacuccc

SEQ ID NO: 312980 - RNA, 19 nt, Artificial Sequence
  Description of Artificial Sequence: Synthetic oligonucleotide
auuucagcccgggucaugc

SEQ ID NO: 312981 - RNA, 19 nt, Artificial Sequence
  Description of Artificial Sequence: Synthetic oligonucleotide
ugaaugaguuugcaaauuu

SEQ ID NO: 312982 - RNA, 19 nt, Artificial Sequence
  Description of Artificial Sequence: Synthetic oligonucleotide
acuaggacccuagaauuac

SEQ ID NO: 312983 - RNA, 19 nt, Artificial Sequence
  Description of Artificial Sequence: Synthetic oligonucleotide
auacucaacagcauugaag

SEQ ID NO: 312984 - RNA, 19 nt, Artificial Sequence
  Description of Artificial Sequence: Synthetic oligonucleotide
caaugguucaugaggggcc

SEQ ID NO: 312985 - RNA, 19 nt, Artificial Sequence
  Description of Artificial Sequence: Synthetic oligonucleotide
acugcgugaaguauuuucg

SEQ ID NO: 312986 - RNA, 19 nt, Artificial Sequence
  Description of Artificial Sequence: Synthetic oligonucleotide
agaagugacauaagggcuc

SEQ ID NO: 312987 - RNA, 19 nt, Artificial Sequence
  Description of Artificial Sequence: Synthetic oligonucleotide
ucaggcgugagcuguagca

SEQ ID NO: 312988 - RNA, 19 nt, Artificial Sequence
  Description of Artificial Sequence: Synthetic oligonucleotide
aguguaacuggcaggugcc

SEQ ID NO: 312989 - RNA, 19 nt, Artificial Sequence
  Description of Artificial Sequence: Synthetic oligonucleotide
uucgaguugauuuccuuuc

SEQ ID NO: 312990 - RNA, 19 nt, Artificial Sequence
  Description of Artificial Sequence: Synthetic oligonucleotide
gugagauuaauucguucag

SEQ ID NO: 312991 - RNA, 19 nt, Artificial Sequence
  Description of Artificial Sequence: Synthetic oligonucleotide
uuaaugcagaacugcguga

SEQ ID NO: 312992 - RNA, 19 nt, Artificial Sequence
  Description of Artificial Sequence: Synthetic oligonucleotide
agugucgugauugaguggu

SEQ ID NO: 312993 - RNA, 19 nt, Artificial Sequence
  Description of Artificial Sequence: Synthetic oligonucleotide
aaugcagaacugcgugaag

SEQ ID NO: 312994 - RNA, 19 nt, Artificial Sequence
  Description of Artificial Sequence: Synthetic oligonucleotide
cucccgugagauuaauucg

SEQ ID NO: 312995 - RNA, 19 nt, Artificial Sequence
  Description of Artificial Sequence: Synthetic oligonucleotide
aauuacaacccaccaggua

SEQ ID NO: 312996 - RNA, 19 nt, Artificial Sequence
  Description of Artificial Sequence: Synthetic oligonucleotide
acuagauacucugauagau

SEQ ID NO: 312997 - RNA, 19 nt, Artificial Sequence
  Description of Artificial Sequence: Synthetic oligonucleotide
gcuaguugcaccucaggcg

SEQ ID NO: 312998 - RNA, 19 nt, Artificial Sequence
  Description of Artificial Sequence: Synthetic oligonucleotide
agccauuagggacagugug

SEQ ID NO: 312999 - RNA, 19 nt, Artificial Sequence
  Description of Artificial Sequence: Synthetic oligonucleotide
ugcaaauuuaaugcagaac

SEQ ID NO: 313000 - RNA, 19 nt, Artificial Sequence
  Description of Artificial Sequence: Synthetic oligonucleotide
uauggcuaguugcaccuca

SEQ ID NO: 313001 - RNA, 19 nt, Artificial Sequence
  Description of Artificial Sequence: Synthetic oligonucleotide
ugcgugaaguauuuucgug

SEQ ID NO: 313002 - RNA, 19 nt, Artificial Sequence
  Description of Artificial Sequence: Synthetic oligonucleotide
ucccgugagauuaauucgu

SEQ ID NO: 313003 - RNA, 19 nt, Artificial Sequence
  Description of Artificial Sequence: Synthetic oligonucleotide
ucuccguacugucugcgcc

SEQ ID NO: 313004 - RNA, 19 nt, Artificial Sequence
  Description of Artificial Sequence: Synthetic oligonucleotide
gguguuggagccauuaggg

SEQ ID NO: 313005 - RNA, 19 nt, Artificial Sequence
  Description of Artificial Sequence: Synthetic oligonucleotide
cucgcaugauuuuggaaag

SEQ ID NO: 313006 - RNA, 19 nt, Artificial Sequence
  Description of Artificial Sequence: Synthetic oligonucleotide
ucacguggcagaauucuac

SEQ ID NO: 313007 - RNA, 19 nt, Artificial Sequence
  Description of Artificial Sequence: Synthetic oligonucleotide
aucaucccgccgcucaacc

SEQ ID NO: 313008 - RNA, 19 nt, Artificial Sequence
  Description of Artificial Sequence: Synthetic oligonucleotide
gaaacauccgaccauacuu

SEQ ID NO: 313009 - RNA, 19 nt, Artificial Sequence
  Description of Artificial Sequence: Synthetic oligonucleotide
guagccagacaguacucgg

SEQ ID NO: 313010 - RNA, 19 nt, Artificial Sequence
  Description of Artificial Sequence: Synthetic oligonucleotide
caaaguuaguuguucucug

SEQ ID NO: 313011 - RNA, 19 nt, Artificial Sequence
  Description of Artificial Sequence: Synthetic oligonucleotide
aaauaccaccaaugguuca

SEQ ID NO: 313012 - RNA, 19 nt, Artificial Sequence
  Description of Artificial Sequence: Synthetic oligonucleotide
aacauccgaccauacuucu

SEQ ID NO: 313013 - RNA, 19 nt, Artificial Sequence
  Description of Artificial Sequence: Synthetic oligonucleotide
uuacaacccaccagguaca

SEQ ID NO: 313014 - RNA, 19 nt, Artificial Sequence
  Description of Artificial Sequence: Synthetic oligonucleotide
ugucuguauauuccuuaca

SEQ ID NO: 313015 - RNA, 19 nt, Artificial Sequence
  Description of Artificial Sequence: Synthetic oligonucleotide
cacaaaccggucuaucagc

SEQ ID NO: 313016 - RNA, 19 nt, Artificial Sequence
  Description of Artificial Sequence: Synthetic oligonucleotide
uuuucguguggaagccagg

SEQ ID NO: 313017 - RNA, 19 nt, Artificial Sequence
  Description of Artificial Sequence: Synthetic oligonucleotide
gaccucucacgacaguccg

SEQ ID NO: 313018 - RNA, 19 nt, Artificial Sequence
  Description of Artificial Sequence: Synthetic oligonucleotide
auccguaaggaguuugaug

SEQ ID NO: 313019 - RNA, 19 nt, Artificial Sequence
  Description of Artificial Sequence: Synthetic oligonucleotide
aauaccugcucuauggcua

SEQ ID NO: 313020 - RNA, 19 nt, Artificial Sequence
  Description of Artificial Sequence: Synthetic oligonucleotide
uauacucaacagcauugaa

SEQ ID NO: 313021 - RNA, 19 nt, Artificial Sequence
  Description of Artificial Sequence: Synthetic oligonucleotide
uuagccaccaggccccuga

SEQ ID NO: 313022 - RNA, 19 nt, Artificial Sequence
  Description of Artificial Sequence: Synthetic oligonucleotide
ugucacuaggacccuagaa

SEQ ID NO: 313023 - RNA, 19 nt, Artificial Sequence
  Description of Artificial Sequence: Synthetic oligonucleotide
acuucuccguacugucugc

SEQ ID NO: 313024 - RNA, 19 nt, Artificial Sequence
  Description of Artificial Sequence: Synthetic oligonucleotide
gauugaguggucagguggc

SEQ ID NO: 313025 - RNA, 19 nt, Artificial Sequence
  Description of Artificial Sequence: Synthetic oligonucleotide
uugcaaauuuaaugcagaa

SEQ ID NO: 313026 - RNA, 19 nt, Artificial Sequence
  Description of Artificial Sequence: Synthetic oligonucleotide
aagggguugguagacgaug

SEQ ID NO: 313027 - RNA, 19 nt, Artificial Sequence
  Description of Artificial Sequence: Synthetic oligonucleotide
guaguagacgaagagguca

SEQ ID NO: 313028 - RNA, 19 nt, Artificial Sequence
  Description of Artificial Sequence: Synthetic oligonucleotide
ccuagaauuacaacccacc

SEQ ID NO: 313029 - RNA, 19 nt, Artificial Sequence
  Description of Artificial Sequence: Synthetic oligonucleotide
aguugcucagagucccugg

SEQ ID NO: 313030 - RNA, 19 nt, Artificial Sequence
  Description of Artificial Sequence: Synthetic oligonucleotide
ugaucgagaggaucuuggc

SEQ ID NO: 313031 - RNA, 19 nt, Artificial Sequence
  Description of Artificial Sequence: Synthetic oligonucleotide
ugugagcacugcaccaugc

SEQ ID NO: 313032 - RNA, 19 nt, Artificial Sequence
  Description of Artificial Sequence: Synthetic oligonucleotide
ugagauuaauucguucagu

SEQ ID NO: 313033 - RNA, 19 nt, Artificial Sequence
  Description of Artificial Sequence: Synthetic oligonucleotide
aaucuuaguguaacuggca

SEQ ID NO: 313034 - RNA, 19 nt, Artificial Sequence
  Description of Artificial Sequence: Synthetic oligonucleotide
gguacagcgcucgagaaag

SEQ ID NO: 313035 - RNA, 19 nt, Artificial Sequence
  Description of Artificial Sequence: Synthetic oligonucleotide
uguaguagacgaagagguc

SEQ ID NO: 313036 - RNA, 19 nt, Artificial Sequence
  Description of Artificial Sequence: Synthetic oligonucleotide
guggucagggcgaucaugg

SEQ ID NO: 313037 - RNA, 19 nt, Artificial Sequence
  Description of Artificial Sequence: Synthetic oligonucleotide
agaaaccccucaaaguuag

SEQ ID NO: 313038 - RNA, 19 nt, Artificial Sequence
  Description of Artificial Sequence: Synthetic oligonucleotide
uguugggaacagaguauug

SEQ ID NO: 313039 - RNA, 19 nt, Artificial Sequence
  Description of Artificial Sequence: Synthetic oligonucleotide
uuaauucguucagucagac

SEQ ID NO: 313040 - RNA, 19 nt, Artificial Sequence
  Description of Artificial Sequence: Synthetic oligonucleotide
  modified_base (8)..(8): a, c, u, g, unknown or other
agggagunaaccccaccag

SEQ ID NO: 313041 - RNA, 19 nt, Artificial Sequence
  Description of Artificial Sequence: Synthetic oligonucleotide
cuagaauuacaacccacca

SEQ ID NO: 313042 - RNA, 19 nt, Artificial Sequence
  Description of Artificial Sequence: Synthetic oligonucleotide
gacgauuccugcucuggug

SEQ ID NO: 313043 - RNA, 19 nt, Artificial Sequence
  Description of Artificial Sequence: Synthetic oligonucleotide
aaaguacuagauacucuga

SEQ ID NO: 313044 - RNA, 19 nt, Artificial Sequence
  Description of Artificial Sequence: Synthetic oligonucleotide
  modified_base (9)..(9): a, c, u, g, unknown or other
ggucauggnuuccagggag

SEQ ID NO: 313045 - RNA, 19 nt, Artificial Sequence
  Description of Artificial Sequence: Synthetic oligonucleotide
accaaugguucaugagggg

SEQ ID NO: 313046 - RNA, 19 nt, Artificial Sequence
  Description of Artificial Sequence: Synthetic oligonucleotide
agguuucuguguugcaauc

SEQ ID NO: 313047 - RNA, 19 nt, Artificial Sequence
  Description of Artificial Sequence: Synthetic oligonucleotide
acgacaucaucuauguuug

SEQ ID NO: 313048 - RNA, 19 nt, Artificial Sequence
  Description of Artificial Sequence: Synthetic oligonucleotide
gaugcgggacgauuccugc

SEQ ID NO: 313049 - RNA, 19 nt, Artificial Sequence
  Description of Artificial Sequence: Synthetic oligonucleotide
agugcugagcugugagcac

SEQ ID NO: 313050 - RNA, 19 nt, Artificial Sequence
  Description of Artificial Sequence: Synthetic oligonucleotide
acgauuccugcucuggugu

SEQ ID NO: 313051 - RNA, 19 nt, Artificial Sequence
  Description of Artificial Sequence: Synthetic oligonucleotide
gauuuagcaacuucuccgu

SEQ ID NO: 313052 - RNA, 19 nt, Artificial Sequence
  Description of Artificial Sequence: Synthetic oligonucleotide
uugcaauccguaaggaguu

SEQ ID NO: 313053 - RNA, 19 nt, Artificial Sequence
  Description of Artificial Sequence: Synthetic oligonucleotide
uaaugcagaacugcgugaa

SEQ ID NO: 313054 - RNA, 19 nt, Artificial Sequence
  Description of Artificial Sequence: Synthetic oligonucleotide
ucgugauugaguggucagg

SEQ ID NO: 313055 - RNA, 19 nt, Artificial Sequence
  Description of Artificial Sequence: Synthetic oligonucleotide
auuuaaugcagaacugcgu

SEQ ID NO: 313056 - RNA, 19 nt, Artificial Sequence
  Description of Artificial Sequence: Synthetic oligonucleotide
ugaguggucagguggcgcu

SEQ ID NO: 313057 - RNA, 19 nt, Artificial Sequence
  Description of Artificial Sequence: Synthetic oligonucleotide
aggguacaaccagagaauc

SEQ ID NO: 313058 - RNA, 19 nt, Artificial Sequence
  Description of Artificial Sequence: Synthetic oligonucleotide
aggcgugagcuguagcacg

SEQ ID NO: 313059 - RNA, 19 nt, Artificial Sequence
  Description of Artificial Sequence: Synthetic oligonucleotide
auauacucaacagcauuga

SEQ ID NO: 313060 - RNA, 19 nt, Artificial Sequence
  Description of Artificial Sequence: Synthetic oligonucleotide
aaugguucaugaggggcca

SEQ ID NO: 313061 - RNA, 19 nt, Artificial Sequence
  Description of Artificial Sequence: Synthetic oligonucleotide
guauuuucguguggaagcc

SEQ ID NO: 313062 - RNA, 19 nt, Artificial Sequence
  Description of Artificial Sequence: Synthetic oligonucleotide
aggcucaaaacacuuggaa

SEQ ID NO: 313063 - RNA, 19 nt, Artificial Sequence
  Description of Artificial Sequence: Synthetic oligonucleotide
auaccugcucuauggcuag

SEQ ID NO: 313064 - RNA, 19 nt, Artificial Sequence
  Description of Artificial Sequence: Synthetic oligonucleotide
cagcgcucgagaaagccgc

SEQ ID NO: 313065 - RNA, 19 nt, Artificial Sequence
  Description of Artificial Sequence: Synthetic oligonucleotide
  modified_base (5)..(5): a, c, u, g, unknown or other
  modified_base (17)..(17): a, c, u, g, unknown or other
auggnuuccagggagunaa

SEQ ID NO: 313066 - RNA, 19 nt, Artificial Sequence
  Description of Artificial Sequence: Synthetic oligonucleotide
uuucguguggaagccaggu

SEQ ID NO: 313067 - RNA, 19 nt, Artificial Sequence
  Description of Artificial Sequence: Synthetic oligonucleotide
  modified_base (7)..(7): a, c, u, g, unknown or other
gggagunaaccccaccagc

SEQ ID NO: 313068 - RNA, 19 nt, Artificial Sequence
  Description of Artificial Sequence: Synthetic oligonucleotide
uugguagacgauggugggg

SEQ ID NO: 313069 - RNA, 19 nt, Artificial Sequence
  Description of Artificial Sequence: Synthetic oligonucleotide
ggucuaacugcuuaauauc

SEQ ID NO: 313070 - RNA, 19 nt, Artificial Sequence
  Description of Artificial Sequence: Synthetic oligonucleotide
agucagacuuacaucaacu

SEQ ID NO: 313071 - RNA, 19 nt, Artificial Sequence
  Description of Artificial Sequence: Synthetic oligonucleotide
ucagucuaauuuuguucac

SEQ ID NO: 313072 - RNA, 19 nt, Artificial Sequence
  Description of Artificial Sequence: Synthetic oligonucleotide
ugcugauuggcuugcacuu

SEQ ID NO: 313073 - RNA, 19 nt, Artificial Sequence
  Description of Artificial Sequence: Synthetic oligonucleotide
aguuugcggaugcgggacg

SEQ ID NO: 313074 - RNA, 19 nt, Artificial Sequence
  Description of Artificial Sequence: Synthetic oligonucleotide
agagauugcucuguuggga

SEQ ID NO: 313075 - RNA, 19 nt, Artificial Sequence
  Description of Artificial Sequence: Synthetic oligonucleotide
  modified_base (6)..(6): a, c, u, g, unknown or other
ggagunaaccccaccagcc

SEQ ID NO: 313076 - RNA, 19 nt, Artificial Sequence
  Description of Artificial Sequence: Synthetic oligonucleotide
aauggauugucuggggcuu

SEQ ID NO: 313077 - RNA, 19 nt, Artificial Sequence
  Description of Artificial Sequence: Synthetic oligonucleotide
agcuugaucgagaggaucu

SEQ ID NO: 313078 - RNA, 19 nt, Artificial Sequence
  Description of Artificial Sequence: Synthetic oligonucleotide
guugggaacagaguauuga

SEQ ID NO: 313079 - RNA, 19 nt, Artificial Sequence
  Description of Artificial Sequence: Synthetic oligonucleotide
  modified_base (4)..(4): a, c, u, g, unknown or other
  modified_base (16)..(16): a, c, u, g, unknown or other
uggnuuccagggagunaac

SEQ ID NO: 313080 - RNA, 19 nt, Artificial Sequence
  Description of Artificial Sequence: Synthetic oligonucleotide
  modified_base (5)..(5): a, c, u, g, unknown or other
gagunaaccccaccagcca

SEQ ID NO: 313081 - RNA, 19 nt, Artificial Sequence
  Description of Artificial Sequence: Synthetic oligonucleotide
ugccuuaucuuuugauuau

SEQ ID NO: 313082 - RNA, 19 nt, Artificial Sequence
  Description of Artificial Sequence: Synthetic oligonucleotide
gucgugauugaguggucag

SEQ ID NO: 313083 - RNA, 19 nt, Artificial Sequence
  Description of Artificial Sequence: Synthetic oligonucleotide
uucacccaggcauaacguc

SEQ ID NO: 313084 - RNA, 19 nt, Artificial Sequence
  Description of Artificial Sequence: Synthetic oligonucleotide
ggcuaguugcaccucaggc

SEQ ID NO: 313085 - RNA, 19 nt, Artificial Sequence
  Description of Artificial Sequence: Synthetic oligonucleotide
uguuaggcuucggugggcc

SEQ ID NO: 313086 - RNA, 19 nt, Artificial Sequence
  Description of Artificial Sequence: Synthetic oligonucleotide
caaccagagaaucguuuug

SEQ ID NO: 313087 - RNA, 19 nt, Artificial Sequence
  Description of Artificial Sequence: Synthetic oligonucleotide
gaugauuuccuguuugauu

SEQ ID NO: 313088 - RNA, 19 nt, Artificial Sequence
  Description of Artificial Sequence: Synthetic oligonucleotide
uaauucguucagucagacu

SEQ ID NO: 313089 - RNA, 19 nt, Artificial Sequence
  Description of Artificial Sequence: Synthetic oligonucleotide
aguugucaacaaauaccac

SEQ ID NO: 313090 - RNA, 19 nt, Artificial Sequence
  Description of Artificial Sequence: Synthetic oligonucleotide
auuaauucguucagucaga

SEQ ID NO: 313091 - RNA, 19 nt, Artificial Sequence
  Description of Artificial Sequence: Synthetic oligonucleotide
ugucgugauugagugguca

SEQ ID NO: 313092 - RNA, 19 nt, Artificial Sequence
  Description of Artificial Sequence: Synthetic oligonucleotide
guugcucagagucccuggc

SEQ ID NO: 313093 - RNA, 19 nt, Artificial Sequence
  Description of Artificial Sequence: Synthetic oligonucleotide
ugcggaugcgggacgauuc

SEQ ID NO: 313094 - RNA, 19 nt, Artificial Sequence
  Description of Artificial Sequence: Synthetic oligonucleotide
gucuaauuuuguucacgac

SEQ ID NO: 313095 - RNA, 19 nt, Artificial Sequence
  Description of Artificial Sequence: Synthetic oligonucleotide
ucagucagacuuacaucaa

SEQ ID NO: 313096 - RNA, 19 nt, Artificial Sequence
  Description of Artificial Sequence: Synthetic oligonucleotide
cacgacaucaucuauguuu

SEQ ID NO: 313097 - RNA, 19 nt, Artificial Sequence
  Description of Artificial Sequence: Synthetic oligonucleotide
aguagacgaagaggucagc

SEQ ID NO: 313098 - RNA, 19 nt, Artificial Sequence
  Description of Artificial Sequence: Synthetic oligonucleotide
ucacgacaaucuuagugua

SEQ ID NO: 313099 - RNA, 19 nt, Artificial Sequence
  Description of Artificial Sequence: Synthetic oligonucleotide
gcucgcaugauuuuggaaa

SEQ ID NO: 313100 - RNA, 19 nt, Artificial Sequence
  Description of Artificial Sequence: Synthetic oligonucleotide
ugcgggacgauuccugcuc

SEQ ID NO: 313101 - RNA, 19 nt, Artificial Sequence
  Description of Artificial Sequence: Synthetic oligonucleotide
uggaaacauccgaccauac

SEQ ID NO: 313102 - RNA, 19 nt, Artificial Sequence
  Description of Artificial Sequence: Synthetic oligonucleotide
aauccguaaggaguuugau

SEQ ID NO: 313103 - RNA, 19 nt, Artificial Sequence
  Description of Artificial Sequence: Synthetic oligonucleotide
agcaacuucuccguacugu

SEQ ID NO: 313104 - RNA, 19 nt, Artificial Sequence
  Description of Artificial Sequence: Synthetic oligonucleotide
cagucagacuuacaucaac

SEQ ID NO: 313105 - RNA, 19 nt, Artificial Sequence
  Description of Artificial Sequence: Synthetic oligonucleotide
acaguccggauauugucau

SEQ ID NO: 313106 - RNA, 19 nt, Artificial Sequence
  Description of Artificial Sequence: Synthetic oligonucleotide
  modified_base (9)..(9): a, c, u, g, unknown or other
cagggagunaaccccacca

SEQ ID NO: 313107 - RNA, 19 nt, Artificial Sequence
  Description of Artificial Sequence: Synthetic oligonucleotide
  modified_base (7)..(7): a, c, u, g, unknown or other
  modified_base (19)..(19): a, c, u, g, unknown or other
ucauggnuuccagggagun

SEQ ID NO: 313108 - RNA, 19 nt, Artificial Sequence
  Description of Artificial Sequence: Synthetic oligonucleotide
agggcgaucaugggcuccc

SEQ ID NO: 313109 - RNA, 19 nt, Artificial Sequence
  Description of Artificial Sequence: Synthetic oligonucleotide
uauuuucguguggaagcca

SEQ ID NO: 313110 - RNA, 19 nt, Artificial Sequence
  Description of Artificial Sequence: Synthetic oligonucleotide
agggguugguagacgaugg

SEQ ID NO: 313111 - RNA, 19 nt, Artificial Sequence
  Description of Artificial Sequence: Synthetic oligonucleotide
acaguacucggcugugcug

SEQ ID NO: 313112 - RNA, 19 nt, Artificial Sequence
  Description of Artificial Sequence: Synthetic oligonucleotide
cucaauguauacguagaga

SEQ ID NO: 313113 - RNA, 19 nt, Artificial Sequence
  Description of Artificial Sequence: Synthetic oligonucleotide
aaccggucuaucagcucac

SEQ ID NO: 313114 - RNA, 19 nt, Artificial Sequence
  Description of Artificial Sequence: Synthetic oligonucleotide
cauugaagucagcuugauc

SEQ ID NO: 313115 - RNA, 19 nt, Artificial Sequence
  Description of Artificial Sequence: Synthetic oligonucleotide
uucuccguacugucugcgc

SEQ ID NO: 313116 - RNA, 19 nt, Artificial Sequence
  Description of Artificial Sequence: Synthetic oligonucleotide
ucacggaugauggggacau

SEQ ID NO: 313117 - RNA, 19 nt, Artificial Sequence
  Description of Artificial Sequence: Synthetic oligonucleotide
caugcugauuggcuugcac

SEQ ID NO: 313118 - RNA, 19 nt, Artificial Sequence
  Description of Artificial Sequence: Synthetic oligonucleotide
gaucgagaggaucuuggcu

SEQ ID NO: 313119 - RNA, 19 nt, Artificial Sequence
  Description of Artificial Sequence: Synthetic oligonucleotide
aggaucauuucagcccggg

SEQ ID NO: 313120 - RNA, 19 nt, Artificial Sequence
  Description of Artificial Sequence: Synthetic oligonucleotide
gaguauugauauacucaac

SEQ ID NO: 313121 - RNA, 19 nt, Artificial Sequence
  Description of Artificial Sequence: Synthetic oligonucleotide
cugcuuaauaucuucgagu

SEQ ID NO: 313122 - RNA, 19 nt, Artificial Sequence
  Description of Artificial Sequence: Synthetic oligonucleotide
cucaaaacacuuggaaaca

SEQ ID NO: 313123 - RNA, 19 nt, Artificial Sequence
  Description of Artificial Sequence: Synthetic oligonucleotide
acaaaccggucuaucagcu

SEQ ID NO: 313124 - RNA, 19 nt, Artificial Sequence
  Description of Artificial Sequence: Synthetic oligonucleotide
gugauugaguggucaggug

SEQ ID NO: 313125 - RNA, 19 nt, Artificial Sequence
  Description of Artificial Sequence: Synthetic oligonucleotide
cuaguugcaccucaggcgu

SEQ ID NO: 313126 - RNA, 19 nt, Artificial Sequence
  Description of Artificial Sequence: Synthetic oligonucleotide
uccucuccgucauguacca

SEQ ID NO: 313127 - RNA, 19 nt, Artificial Sequence
  Description of Artificial Sequence: Synthetic oligonucleotide
guuugaccucucacgacag

SEQ ID NO: 313128 - RNA, 19 nt, Artificial Sequence
  Description of Artificial Sequence: Synthetic oligonucleotide
uagcaacuucuccguacug

SEQ ID NO: 313129 - RNA, 19 nt, Artificial Sequence
  Description of Artificial Sequence: Synthetic oligonucleotide
  modified_base (3)..(3): a, c, u, g, unknown or other
gunaaccccaccagccagc

SEQ ID NO: 313130 - RNA, 19 nt, Artificial Sequence
  Description of Artificial Sequence: Synthetic oligonucleotide
ggcucaaaacacuuggaaa

SEQ ID NO: 313131 - RNA, 19 nt, Artificial Sequence
  Description of Artificial Sequence: Synthetic oligonucleotide
  modified_base (2)..(2): a, c, u, g, unknown or other
unaaccccaccagccagca

SEQ ID NO: 313132 - RNA, 19 nt, Artificial Sequence
  Description of Artificial Sequence: Synthetic oligonucleotide
cacgacaguccggauauug

SEQ ID NO: 313133 - RNA, 19 nt, Artificial Sequence
  Description of Artificial Sequence: Synthetic oligonucleotide
guuugccagagauugcucu

SEQ ID NO: 313134 - RNA, 19 nt, Artificial Sequence
  Description of Artificial Sequence: Synthetic oligonucleotide
cucugauagaugcuguuua

SEQ ID NO: 313135 - RNA, 19 nt, Artificial Sequence
  Description of Artificial Sequence: Synthetic oligonucleotide
ggucaugccuuucacgaca

SEQ ID NO: 313136 - RNA, 19 nt, Artificial Sequence
  Description of Artificial Sequence: Synthetic oligonucleotide
ucgacgcccugcuccaacc

SEQ ID NO: 313137 - RNA, 19 nt, Artificial Sequence
  Description of Artificial Sequence: Synthetic oligonucleotide
auguauacguagagaugag

SEQ ID NO: 313138 - RNA, 19 nt, Artificial Sequence
  Description of Artificial Sequence: Synthetic oligonucleotide
caauccguaaggaguuuga

SEQ ID NO: 313139 - RNA, 19 nt, Artificial Sequence
  Description of Artificial Sequence: Synthetic oligonucleotide
cuucuccguacugucugcg

SEQ ID NO: 313140 - RNA, 19 nt, Artificial Sequence
  Description of Artificial Sequence: Synthetic oligonucleotide
augaaugaguuugcaaauu

SEQ ID NO: 313141 - RNA, 19 nt, Artificial Sequence
  Description of Artificial Sequence: Synthetic oligonucleotide
gucuaacugcuuaauaucu

SEQ ID NO: 313142 - RNA, 19 nt, Artificial Sequence
  Description of Artificial Sequence: Synthetic oligonucleotide
cagugucgugauugagugg

SEQ ID NO: 313143 - RNA, 19 nt, Artificial Sequence
  Description of Artificial Sequence: Synthetic oligonucleotide
ggguacaaccagagaaucg

SEQ ID NO: 313144 - RNA, 19 nt, Artificial Sequence
  Description of Artificial Sequence: Synthetic oligonucleotide
auuuagcaacuucuccgua

SEQ ID NO: 313145 - RNA, 19 nt, Artificial Sequence
  Description of Artificial Sequence: Synthetic oligonucleotide
caucccgccgcucaaccuc

SEQ ID NO: 313146 - RNA, 19 nt, Artificial Sequence
  Description of Artificial Sequence: Synthetic oligonucleotide
ccacaaaccggucuaucag

SEQ ID NO: 313147 - RNA, 19 nt, Artificial Sequence
  Description of Artificial Sequence: Synthetic oligonucleotide
ucgagugcuugccuuccau

SEQ ID NO: 313148 - RNA, 19 nt, Artificial Sequence
  Description of Artificial Sequence: Synthetic oligonucleotide
ccaaugguucaugaggggc

SEQ ID NO: 313149 - RNA, 19 nt, Artificial Sequence
  Description of Artificial Sequence: Synthetic oligonucleotide
gcugaauggcuuucugggc

SEQ ID NO: 313150 - RNA, 19 nt, Artificial Sequence
  Description of Artificial Sequence: Synthetic oligonucleotide
auaagggcucuggucacca

SEQ ID NO: 313151 - RNA, 19 nt, Artificial Sequence
  Description of Artificial Sequence: Synthetic oligonucleotide
agcauugaagucagcuuga

SEQ ID NO: 313152 - RNA, 19 nt, Artificial Sequence
  Description of Artificial Sequence: Synthetic oligonucleotide
ccggaaaaguuccagcaug

SEQ ID NO: 313153 - RNA, 19 nt, Artificial Sequence
  Description of Artificial Sequence: Synthetic oligonucleotide
uauugucauccagucuccu

SEQ ID NO: 313154 - RNA, 19 nt, Artificial Sequence
  Description of Artificial Sequence: Synthetic oligonucleotide
ggagauuuagcaacuucuc

SEQ ID NO: 313155 - RNA, 19 nt, Artificial Sequence
  Description of Artificial Sequence: Synthetic oligonucleotide
caggcauauucucugaggu

SEQ ID NO: 313156 - RNA, 19 nt, Artificial Sequence
  Description of Artificial Sequence: Synthetic oligonucleotide
gguacaaccagagaaucgu

SEQ ID NO: 313157 - RNA, 19 nt, Artificial Sequence
  Description of Artificial Sequence: Synthetic oligonucleotide
gguugucacggaugauggg

SEQ ID NO: 313158 - RNA, 19 nt, Artificial Sequence
  Description of Artificial Sequence: Synthetic oligonucleotide
uucgagugcuugccuucca

SEQ ID NO: 313159 - RNA, 19 nt, Artificial Sequence
  Description of Artificial Sequence: Synthetic oligonucleotide
agaacugcgugaaguauuu

SEQ ID NO: 313160 - RNA, 19 nt, Artificial Sequence
  Description of Artificial Sequence: Synthetic oligonucleotide
uugcaccucaggcgugagc

SEQ ID NO: 313161 - RNA, 19 nt, Artificial Sequence
  Description of Artificial Sequence: Synthetic oligonucleotide
agguacagcgcucgagaaa

SEQ ID NO: 313162 - RNA, 19 nt, Artificial Sequence
  Description of Artificial Sequence: Synthetic oligonucleotide
uuucagcccgggucaugcc

SEQ ID NO: 313163 - RNA, 19 nt, Artificial Sequence
  Description of Artificial Sequence: Synthetic oligonucleotide
  modified_base (3)..(3): a, c, u, g, unknown or other
  modified_base (15)..(15): a, c, u, g, unknown or other
ggnuuccagggagunaacc

SEQ ID NO: 313164 - RNA, 19 nt, Artificial Sequence
  Description of Artificial Sequence: Synthetic oligonucleotide
uguccucgucacguggcag

SEQ ID NO: 313165 - RNA, 19 nt, Artificial Sequence
  Description of Artificial Sequence: Synthetic oligonucleotide
uucguguggaagccagguu

SEQ ID NO: 313166 - RNA, 19 nt, Artificial Sequence
  Description of Artificial Sequence: Synthetic oligonucleotide
uaguugcaccucaggcgug

SEQ ID NO: 313167 - RNA, 19 nt, Artificial Sequence
  Description of Artificial Sequence: Synthetic oligonucleotide
acucugauagaugcuguuu

SEQ ID NO: 313168 - RNA, 19 nt, Artificial Sequence
  Description of Artificial Sequence: Synthetic oligonucleotide
uucagggagugggugucca

SEQ ID NO: 313169 - RNA, 19 nt, Artificial Sequence
  Description of Artificial Sequence: Synthetic oligonucleotide
acauccgaccauacuucuc

SEQ ID NO: 313170 - RNA, 19 nt, Artificial Sequence
  Description of Artificial Sequence: Synthetic oligonucleotide
guggucuuagggagguugc

SEQ ID NO: 313171 - RNA, 19 nt, Artificial Sequence
  Description of Artificial Sequence: Synthetic oligonucleotide
ucaucccgccgcucaaccu

SEQ ID NO: 313172 - RNA, 19 nt, Artificial Sequence
  Description of Artificial Sequence: Synthetic oligonucleotide
cugucaggguacaaccaga

SEQ ID NO: 313173 - RNA, 19 nt, Artificial Sequence
  Description of Artificial Sequence: Synthetic oligonucleotide
guuaggcuucggugggccc

SEQ ID NO: 313174 - RNA, 19 nt, Artificial Sequence
  Description of Artificial Sequence: Synthetic oligonucleotide
gucaguguuaggcuucggu

SEQ ID NO: 313175 - RNA, 19 nt, Artificial Sequence
  Description of Artificial Sequence: Synthetic oligonucleotide
caaaccggucuaucagcuc

SEQ ID NO: 313176 - RNA, 19 nt, Artificial Sequence
  Description of Artificial Sequence: Synthetic oligonucleotide
uucucccgugagauuaauu

SEQ ID NO: 313177 - RNA, 19 nt, Artificial Sequence
  Description of Artificial Sequence: Synthetic oligonucleotide
gggagaucgagcaggacca

SEQ ID NO: 313178 - RNA, 19 nt, Artificial Sequence
  Description of Artificial Sequence: Synthetic oligonucleotide
cuaggacccuagaauuaca

SEQ ID NO: 313179 - RNA, 19 nt, Artificial Sequence
  Description of Artificial Sequence: Synthetic oligonucleotide
gguuccgucugucagggua

SEQ ID NO: 313180 - RNA, 19 nt, Artificial Sequence
  Description of Artificial Sequence: Synthetic oligonucleotide
auauuccuuacagucucuu

SEQ ID NO: 313181 - RNA, 19 nt, Artificial Sequence
  Description of Artificial Sequence: Synthetic oligonucleotide
ucgucacguggcagaauuc

SEQ ID NO: 313182 - RNA, 19 nt, Artificial Sequence
  Description of Artificial Sequence: Synthetic oligonucleotide
guuccgucugucaggguac

SEQ ID NO: 313183 - RNA, 19 nt, Artificial Sequence
  Description of Artificial Sequence: Synthetic oligonucleotide
caguacucggcugugcuga

SEQ ID NO: 313184 - RNA, 19 nt, Artificial Sequence
  Description of Artificial Sequence: Synthetic oligonucleotide
gccauuagggacagugugc

SEQ ID NO: 313185 - RNA, 19 nt, Artificial Sequence
  Description of Artificial Sequence: Synthetic oligonucleotide
gaggaucauuucagcccgg

SEQ ID NO: 313186 - RNA, 19 nt, Artificial Sequence
  Description of Artificial Sequence: Synthetic oligonucleotide
cucacgacaguccggauau

SEQ ID NO: 313187 - RNA, 19 nt, Artificial Sequence
  Description of Artificial Sequence: Synthetic oligonucleotide
acgacaguccggauauugu

SEQ ID NO: 313188 - RNA, 19 nt, Artificial Sequence
  Description of Artificial Sequence: Synthetic oligonucleotide
aguugcaccucaggcguga

SEQ ID NO: 313189 - RNA, 19 nt, Artificial Sequence
  Description of Artificial Sequence: Synthetic oligonucleotide
ugccccacguuuguuugac

SEQ ID NO: 313190 - RNA, 19 nt, Artificial Sequence
  Description of Artificial Sequence: Synthetic oligonucleotide
cucaggcgugagcuguagc

SEQ ID NO: 313191 - RNA, 19 nt, Artificial Sequence
  Description of Artificial Sequence: Synthetic oligonucleotide
cucccguggaaacauccga

SEQ ID NO: 313192 - RNA, 19 nt, Artificial Sequence
  Description of Artificial Sequence: Synthetic oligonucleotide
gggacgauuccugcucugg

SEQ ID NO: 313193 - RNA, 19 nt, Artificial Sequence
  Description of Artificial Sequence: Synthetic oligonucleotide
gggaugaaugaguuugcaa

SEQ ID NO: 313194 - RNA, 19 nt, Artificial Sequence
  Description of Artificial Sequence: Synthetic oligonucleotide
augcgggacgauuccugcu

SEQ ID NO: 313195 - RNA, 19 nt, Artificial Sequence
  Description of Artificial Sequence: Synthetic oligonucleotide
auggcuaguugcaccucag

SEQ ID NO: 313196 - RNA, 19 nt, Artificial Sequence
  Description of Artificial Sequence: Synthetic oligonucleotide
cccguggaaacauccgacc

SEQ ID NO: 313197 - RNA, 19 nt, Artificial Sequence
  Description of Artificial Sequence: Synthetic oligonucleotide
gucaggguacaaccagaga

SEQ ID NO: 313198 - RNA, 19 nt, Artificial Sequence
  Description of Artificial Sequence: Synthetic oligonucleotide
ccgucauguaccacucccg

SEQ ID NO: 313199 - RNA, 19 nt, Artificial Sequence
  Description of Artificial Sequence: Synthetic oligonucleotide
caggcgugagcuguagcac

SEQ ID NO: 313200 - RNA, 19 nt, Artificial Sequence
  Description of Artificial Sequence: Synthetic oligonucleotide
uccguacugucugcgccug

SEQ ID NO: 313201 - RNA, 19 nt, Artificial Sequence
  Description of Artificial Sequence: Synthetic oligonucleotide
cacuaggacccuagaauua

SEQ ID NO: 313202 - RNA, 19 nt, Artificial Sequence
  Description of Artificial Sequence: Synthetic oligonucleotide
cacgacaaucuuaguguaa

SEQ ID NO: 313203 - RNA, 19 nt, Artificial Sequence
  Description of Artificial Sequence: Synthetic oligonucleotide
ugguucaugaggggccauc

SEQ ID NO: 313204 - RNA, 19 nt, Artificial Sequence
  Description of Artificial Sequence: Synthetic oligonucleotide
uggcgcuuggcauggucua

SEQ ID NO: 313205 - RNA, 19 nt, Artificial Sequence
  Description of Artificial Sequence: Synthetic oligonucleotide
agaauucuacugagauccu

SEQ ID NO: 313206 - RNA, 19 nt, Artificial Sequence
  Description of Artificial Sequence: Synthetic oligonucleotide
ggcgugagcuguagcacgg

SEQ ID NO: 313207 - RNA, 19 nt, Artificial Sequence
  Description of Artificial Sequence: Synthetic oligonucleotide
gcaauccguaaggaguuug

SEQ ID NO: 313208 - RNA, 19 nt, Artificial Sequence
  Description of Artificial Sequence: Synthetic oligonucleotide
gaaccaacagcuggaugcu

SEQ ID NO: 313209 - RNA, 19 nt, Artificial Sequence
  Description of Artificial Sequence: Synthetic oligonucleotide
cucgacgcccugcuccaac

SEQ ID NO: 313210 - RNA, 19 nt, Artificial Sequence
  Description of Artificial Sequence: Synthetic oligonucleotide
guacucggcugugcugagg

SEQ ID NO: 313211 - RNA, 19 nt, Artificial Sequence
  Description of Artificial Sequence: Synthetic oligonucleotide
caggguacaaccagagaau

SEQ ID NO: 313212 - RNA, 19 nt, Artificial Sequence
  Description of Artificial Sequence: Synthetic oligonucleotide
ggaaacauccgaccauacu

SEQ ID NO: 313213 - RNA, 19 nt, Artificial Sequence
  Description of Artificial Sequence: Synthetic oligonucleotide
guguugcaauccguaagga

SEQ ID NO: 313214 - RNA, 19 nt, Artificial Sequence
  Description of Artificial Sequence: Synthetic oligonucleotide
cacguuuguuugaccucuc

SEQ ID NO: 313215 - RNA, 19 nt, Artificial Sequence
  Description of Artificial Sequence: Synthetic oligonucleotide
uaggcuucggugggcccug

SEQ ID NO: 313216 - RNA, 19 nt, Artificial Sequence
  Description of Artificial Sequence: Synthetic oligonucleotide
guccggauauugucaucca

SEQ ID NO: 313217 - RNA, 19 nt, Artificial Sequence
  Description of Artificial Sequence: Synthetic oligonucleotide
agccgauggaugggagauc

SEQ ID NO: 313218 - RNA, 19 nt, Artificial Sequence
  Description of Artificial Sequence: Synthetic oligonucleotide
uccucgucacguggcagaa

SEQ ID NO: 313219 - RNA, 19 nt, Artificial Sequence
  Description of Artificial Sequence: Synthetic oligonucleotide
gucacggaugauggggaca

SEQ ID NO: 313220 - RNA, 19 nt, Artificial Sequence
  Description of Artificial Sequence: Synthetic oligonucleotide
gugagccgauggaugggag

SEQ ID NO: 313221 - RNA, 19 nt, Artificial Sequence
  Description of Artificial Sequence: Synthetic oligonucleotide
cagaacugcgugaaguauu

SEQ ID NO: 313222 - RNA, 19 nt, Artificial Sequence
  Description of Artificial Sequence: Synthetic oligonucleotide
ggauauugucauccagucu

SEQ ID NO: 313223 - RNA, 19 nt, Artificial Sequence
  Description of Artificial Sequence: Synthetic oligonucleotide
uuccgucugucaggguaca

SEQ ID NO: 313224 - RNA, 19 nt, Artificial Sequence
  Description of Artificial Sequence: Synthetic oligonucleotide
cucgucacguggcagaauu

SEQ ID NO: 313225 - RNA, 19 nt, Artificial Sequence
  Description of Artificial Sequence: Synthetic oligonucleotide
cacguggcagaauucuacu

SEQ ID NO: 313226 - RNA, 19 nt, Artificial Sequence
  Description of Artificial Sequence: Synthetic oligonucleotide
cugcgugaaguauuuucgu

SEQ ID NO: 313227 - RNA, 19 nt, Artificial Sequence
  Description of Artificial Sequence: Synthetic oligonucleotide
caguccggauauugucauc

SEQ ID NO: 313228 - RNA, 19 nt, Artificial Sequence
  Description of Artificial Sequence: Synthetic oligonucleotide
caucaucccgccgcucaac

SEQ ID NO: 313229 - RNA, 19 nt, Artificial Sequence
  Description of Artificial Sequence: Synthetic oligonucleotide
uauuagccaccaggccccu

SEQ ID NO: 313230 - RNA, 19 nt, Artificial Sequence
  Description of Artificial Sequence: Synthetic oligonucleotide
ccgugagauuaauucguuc

SEQ ID NO: 313231 - RNA, 19 nt, Artificial Sequence
  Description of Artificial Sequence: Synthetic oligonucleotide
cgggucaugccuuucacga

SEQ ID NO: 313232 - RNA, 19 nt, Artificial Sequence
  Description of Artificial Sequence: Synthetic oligonucleotide
caggugguucagugucgug

SEQ ID NO: 313233 - RNA, 19 nt, Artificial Sequence
  Description of Artificial Sequence: Synthetic oligonucleotide
cuauggcuaguugcaccuc

SEQ ID NO: 313234 - RNA, 19 nt, Artificial Sequence
  Description of Artificial Sequence: Synthetic oligonucleotide
gcggaugcgggacgauucc

SEQ ID NO: 313235 - RNA, 19 nt, Artificial Sequence
  Description of Artificial Sequence: Synthetic oligonucleotide
  modified_base (6)..(6): a, c, u, g, unknown or other
  modified_base (18)..(18): a, c, u, g, unknown or other
cauggnuuccagggaguna

SEQ ID NO: 313236 - RNA, 19 nt, Artificial Sequence
  Description of Artificial Sequence: Synthetic oligonucleotide
cgacaguccggauauuguc

SEQ ID NO: 313237 - RNA, 19 nt, Artificial Sequence
  Description of Artificial Sequence: Synthetic oligonucleotide
cuucgucaguguuaggcuu

SEQ ID NO: 313238 - RNA, 19 nt, Artificial Sequence
  Description of Artificial Sequence: Synthetic oligonucleotide
uugcggaugcgggacgauu

SEQ ID NO: 313239 - RNA, 19 nt, Artificial Sequence
  Description of Artificial Sequence: Synthetic oligonucleotide
ugcaauccguaaggaguuu

SEQ ID NO: 313240 - RNA, 19 nt, Artificial Sequence
  Description of Artificial Sequence: Synthetic oligonucleotide
caucuauguuugccagaga

SEQ ID NO: 313241 - RNA, 19 nt, Artificial Sequence
  Description of Artificial Sequence: Synthetic oligonucleotide
gacagugugcuggaacuuu

SEQ ID NO: 313242 - RNA, 19 nt, Artificial Sequence
  Description of Artificial Sequence: Synthetic oligonucleotide
guugcaccucaggcgugag

SEQ ID NO: 313243 - RNA, 19 nt, Artificial Sequence
  Description of Artificial Sequence: Synthetic oligonucleotide
ggcauaacgucugucaauu

SEQ ID NO: 313244 - RNA, 19 nt, Artificial Sequence
  Description of Artificial Sequence: Synthetic oligonucleotide
cagggcgaucaugggcucc

SEQ ID NO: 313245 - RNA, 19 nt, Artificial Sequence
  Description of Artificial Sequence: Synthetic oligonucleotide
cuacugagauccucuccgu

SEQ ID NO: 313246 - RNA, 19 nt, Artificial Sequence
  Description of Artificial Sequence: Synthetic oligonucleotide
gccuuaucuuuugauuauc

SEQ ID NO: 313247 - RNA, 19 nt, Artificial Sequence
  Description of Artificial Sequence: Synthetic oligonucleotide
cccacguuuguuugaccuc

SEQ ID NO: 313248 - RNA, 19 nt, Artificial Sequence
  Description of Artificial Sequence: Synthetic oligonucleotide
caggugccuuccucacaac

SEQ ID NO: 313249 - RNA, 19 nt, Artificial Sequence
  Description of Artificial Sequence: Synthetic oligonucleotide
ggugccuuccucacaaccu

SEQ ID NO: 313250 - RNA, 19 nt, Artificial Sequence
  Description of Artificial Sequence: Synthetic oligonucleotide
cguucagucagacuuacau

SEQ ID NO: 313251 - RNA, 19 nt, Artificial Sequence
  Description of Artificial Sequence: Synthetic oligonucleotide
ccgucugucaggguacaac

SEQ ID NO: 313252 - RNA, 19 nt, Artificial Sequence
  Description of Artificial Sequence: Synthetic oligonucleotide
ccguggaaacauccgacca

SEQ ID NO: 313253 - RNA, 19 nt, Artificial Sequence
  Description of Artificial Sequence: Synthetic oligonucleotide
guuugauucugggguccaa

SEQ ID NO: 313254 - RNA, 19 nt, Artificial Sequence
  Description of Artificial Sequence: Synthetic oligonucleotide
ccggucuaucagcucacug

SEQ ID NO: 313255 - RNA, 19 nt, Artificial Sequence
  Description of Artificial Sequence: Synthetic oligonucleotide
  modified_base (8)..(8): a, c, u, g, unknown or other
gucauggnuuccagggagu

SEQ ID NO: 313256 - RNA, 19 nt, Artificial Sequence
  Description of Artificial Sequence: Synthetic oligonucleotide
gucacguggcagaauucua

SEQ ID NO: 313257 - RNA, 19 nt, Artificial Sequence
  Description of Artificial Sequence: Synthetic oligonucleotide
ggcucgcaugauuuuggaa

SEQ ID NO: 313258 - RNA, 19 nt, Artificial Sequence
  Description of Artificial Sequence: Synthetic oligonucleotide
cuccguacugucugcgccu

SEQ ID NO: 313259 - RNA, 19 nt, Artificial Sequence
  Description of Artificial Sequence: Synthetic oligonucleotide
cagaugagacacagcuccu

SEQ ID NO: 313260 - RNA, 19 nt, Artificial Sequence
  Description of Artificial Sequence: Synthetic oligonucleotide
accggucuaucagcucacu

SEQ ID NO: 313261 - RNA, 19 nt, Artificial Sequence
  Description of Artificial Sequence: Synthetic oligonucleotide
cagugugcuggaacuuucu

SEQ ID NO: 313262 - RNA, 19 nt, Artificial Sequence
  Description of Artificial Sequence: Synthetic oligonucleotide
guggcgcuuggcauggucu

SEQ ID NO: 313263 - RNA, 19 nt, Artificial Sequence
  Description of Artificial Sequence: Synthetic oligonucleotide
uccgucugucaggguacaa

SEQ ID NO: 313264 - RNA, 19 nt, Artificial Sequence
  Description of Artificial Sequence: Synthetic oligonucleotide
gaucgagcaggaccaucuu

SEQ ID NO: 313265 - RNA, 19 nt, Artificial Sequence
  Description of Artificial Sequence: Synthetic oligonucleotide
cgcucgagaaagccgcuac

SEQ ID NO: 313266 - RNA, 19 nt, Artificial Sequence
  Description of Artificial Sequence: Synthetic oligonucleotide
gaagggguugguagacgau

SEQ ID NO: 313267 - RNA, 19 nt, Artificial Sequence
  Description of Artificial Sequence: Synthetic oligonucleotide
ccgcucaaccucgacgccc

SEQ ID NO: 313268 - RNA, 19 nt, Artificial Sequence
  Description of Artificial Sequence: Synthetic oligonucleotide
ccucucacgacaguccgga

SEQ ID NO: 313269 - RNA, 19 nt, Artificial Sequence
  Description of Artificial Sequence: Synthetic oligonucleotide
cugccccacguuuguuuga

SEQ ID NO: 313270 - RNA, 19 nt, Artificial Sequence
  Description of Artificial Sequence: Synthetic oligonucleotide
ggacgauuccugcucuggu

SEQ ID NO: 313271 - RNA, 19 nt, Artificial Sequence
  Description of Artificial Sequence: Synthetic oligonucleotide
agcgcucgagaaagccgcu

SEQ ID NO: 313272 - RNA, 19 nt, Artificial Sequence
  Description of Artificial Sequence: Synthetic oligonucleotide
acguagagaugaggcucaa

SEQ ID NO: 313273 - RNA, 19 nt, Artificial Sequence
  Description of Artificial Sequence: Synthetic oligonucleotide
gugucgugauugagugguc

SEQ ID NO: 313274 - RNA, 19 nt, Artificial Sequence
  Description of Artificial Sequence: Synthetic oligonucleotide
ccccacguuuguuugaccu

SEQ ID NO: 313275 - RNA, 19 nt, Artificial Sequence
  Description of Artificial Sequence: Synthetic oligonucleotide
ggcgaucaugggcucccca

SEQ ID NO: 313276 - RNA, 19 nt, Artificial Sequence
  Description of Artificial Sequence: Synthetic oligonucleotide
augguucaugaggggccau

SEQ ID NO: 313277 - RNA, 19 nt, Artificial Sequence
  Description of Artificial Sequence: Synthetic oligonucleotide
gccgcucaaccucgacgcc

SEQ ID NO: 313278 - RNA, 19 nt, Artificial Sequence
  Description of Artificial Sequence: Synthetic oligonucleotide
gcgcuuggcauggucuaac

SEQ ID NO: 313279 - RNA, 19 nt, Artificial Sequence
  Description of Artificial Sequence: Synthetic oligonucleotide
gccggaaaaguuccagcau

SEQ ID NO: 313280 - RNA, 19 nt, Artificial Sequence
  Description of Artificial Sequence: Synthetic oligonucleotide
gccccacguuuguuugacc

SEQ ID NO: 313281 - RNA, 19 nt, Artificial Sequence
  Description of Artificial Sequence: Synthetic oligonucleotide
gcucgagaaagccgcuacu

SEQ ID NO: 313282 - RNA, 19 nt, Artificial Sequence
  Description of Artificial Sequence: Synthetic oligonucleotide
aggcuucggugggcccugg

SEQ ID NO: 313283 - RNA, 19 nt, Artificial Sequence
  Description of Artificial Sequence: Synthetic oligonucleotide
ucacgacaguccggauauu

SEQ ID NO: 313284 - RNA, 19 nt, Artificial Sequence
  Description of Artificial Sequence: Synthetic oligonucleotide
ccacguuuguuugaccucu

SEQ ID NO: 313285 - RNA, 19 nt, Artificial Sequence
  Description of Artificial Sequence: Synthetic oligonucleotide
caccagguacagcgcucga

SEQ ID NO: 313286 - RNA, 19 nt, Artificial Sequence
  Description of Artificial Sequence: Synthetic oligonucleotide
ccguacugucugcgccugg

SEQ ID NO: 313287 - RNA, 19 nt, Artificial Sequence
  Description of Artificial Sequence: Synthetic oligonucleotide
gaacugcgugaaguauuuu

SEQ ID NO: 313288 - RNA, 19 nt, Artificial Sequence
  Description of Artificial Sequence: Synthetic oligonucleotide
cgacgcccugcuccaaccc

SEQ ID NO: 313289 - RNA, 19 nt, Artificial Sequence
  Description of Artificial Sequence: Synthetic oligonucleotide
cguguggaagccagguugu

SEQ ID NO: 313290 - RNA, 19 nt, Artificial Sequence
  Description of Artificial Sequence: Synthetic oligonucleotide
cgucauguaccacucccgu

SEQ ID NO: 313291 - RNA, 19 nt, Artificial Sequence
  Description of Artificial Sequence: Synthetic oligonucleotide
gcauaacgucugucaauuu

SEQ ID NO: 313292 - RNA, 19 nt, Artificial Sequence
  Description of Artificial Sequence: Synthetic oligonucleotide
gcgggacgauuccugcucu

SEQ ID NO: 313293 - RNA, 19 nt, Artificial Sequence
  Description of Artificial Sequence: Synthetic oligonucleotide
gcccuucauguccaguauu

SEQ ID NO: 313294 - RNA, 19 nt, Artificial Sequence
  Description of Artificial Sequence: Synthetic oligonucleotide
cgggacgauuccugcucug

SEQ ID NO: 313295 - RNA, 19 nt, Artificial Sequence
  Description of Artificial Sequence: Synthetic oligonucleotide
cgacaaucuuaguguaacu

SEQ ID NO: 313296 - RNA, 19 nt, Artificial Sequence
  Description of Artificial Sequence: Synthetic oligonucleotide
cgucacguggcagaauucu

SEQ ID NO: 313297 - RNA, 19 nt, Artificial Sequence
  Description of Artificial Sequence: Synthetic oligonucleotide
ccccuucgucaguguuagg

SEQ ID NO: 313298 - RNA, 19 nt, Artificial Sequence
  Description of Artificial Sequence: Synthetic oligonucleotide
cucucacgacaguccggau

SEQ ID NO: 313299 - RNA, 19 nt, Artificial Sequence
  Description of Artificial Sequence: Synthetic oligonucleotide
cccgugagauuaauucguu

SEQ ID NO: 313300 - RNA, 19 nt, Artificial Sequence
  Description of Artificial Sequence: Synthetic oligonucleotide
cugccacaaaccggucuau

SEQ ID NO: 313301 - RNA, 19 nt, Artificial Sequence
  Description of Artificial Sequence: Synthetic oligonucleotide
ccuccaucaucccgccgcu

SEQ ID NO: 313302 - RNA, 19 nt, Artificial Sequence
  Description of Artificial Sequence: Synthetic oligonucleotide
gcgcucgagaaagccgcua

SEQ ID NO: 313303 - RNA, 19 nt, Artificial Sequence
  Description of Artificial Sequence: Synthetic oligonucleotide
ccaugcugauuggcuugca

SEQ ID NO: 313304 - RNA, 19 nt, Artificial Sequence
  Description of Artificial Sequence: Synthetic oligonucleotide
ccuuagcucuggcucgcau

SEQ ID NO: 313305 - RNA, 19 nt, Artificial Sequence
  Description of Artificial Sequence: Synthetic oligonucleotide
cgauuccugcucugguguu

SEQ ID NO: 313306 - RNA, 19 nt, Artificial Sequence
  Description of Artificial Sequence: Synthetic oligonucleotide
cacggaugauggggacauu

SEQ ID NO: 313307 - RNA, 19 nt, Artificial Sequence
  Description of Artificial Sequence: Synthetic oligonucleotide
ccgagcccuccuucucuuu

SEQ ID NO: 313308 - RNA, 19 nt, Artificial Sequence
  Description of Artificial Sequence: Synthetic oligonucleotide
uuuacuauaaugcagaaau

SEQ ID NO: 313309 - RNA, 19 nt, Artificial Sequence
  Description of Artificial Sequence: Synthetic oligonucleotide
aaaguaaugucacuggaac

SEQ ID NO: 313310 - RNA, 19 nt, Artificial Sequence
  Description of Artificial Sequence: Synthetic oligonucleotide
cuugaaaauaccuuggugg

SEQ ID NO: 313311 - RNA, 19 nt, Artificial Sequence
  Description of Artificial Sequence: Synthetic oligonucleotide
aaagcugaaacauguauuc

SEQ ID NO: 313312 - RNA, 19 nt, Artificial Sequence
  Description of Artificial Sequence: Synthetic oligonucleotide
uuuggaacaaucuaggccc

SEQ ID NO: 313313 - RNA, 19 nt, Artificial Sequence
  Description of Artificial Sequence: Synthetic oligonucleotide
uguuauguaaccaggagcc

SEQ ID NO: 313314 - RNA, 19 nt, Artificial Sequence
  Description of Artificial Sequence: Synthetic oligonucleotide
aaauuugauuccuuaauca

SEQ ID NO: 313315 - RNA, 19 nt, Artificial Sequence
  Description of Artificial Sequence: Synthetic oligonucleotide
acaaguacuucacugacac

SEQ ID NO: 313316 - RNA, 19 nt, Artificial Sequence
  Description of Artificial Sequence: Synthetic oligonucleotide
aauccuguuauguaaccag

SEQ ID NO: 313317 - RNA, 19 nt, Artificial Sequence
  Description of Artificial Sequence: Synthetic oligonucleotide
ucacucucaaguaagacac

SEQ ID NO: 313318 - RNA, 19 nt, Artificial Sequence
  Description of Artificial Sequence: Synthetic oligonucleotide
ugcucuauucuaaauauac

SEQ ID NO: 313319 - RNA, 19 nt, Artificial Sequence
  Description of Artificial Sequence: Synthetic oligonucleotide
aguuaauugcuccaacuuc

SEQ ID NO: 313320 - RNA, 19 nt, Artificial Sequence
  Description of Artificial Sequence: Synthetic oligonucleotide
uuuuauagguacuuuguaa

SEQ ID NO: 313321 - RNA, 19 nt, Artificial Sequence
  Description of Artificial Sequence: Synthetic oligonucleotide
ugauaaauuaugaggaaua

SEQ ID NO: 313322 - RNA, 19 nt, Artificial Sequence
  Description of Artificial Sequence: Synthetic oligonucleotide
ugaaauggacggaaaacug

SEQ ID NO: 313323 - RNA, 19 nt, Artificial Sequence
  Description of Artificial Sequence: Synthetic oligonucleotide
aggucuauguacuccauuc

SEQ ID NO: 313324 - RNA, 19 nt, Artificial Sequence
  Description of Artificial Sequence: Synthetic oligonucleotide
aaaccuaacgugcugucca

SEQ ID NO: 313325 - RNA, 19 nt, Artificial Sequence
  Description of Artificial Sequence: Synthetic oligonucleotide
aaaaccuaacgugcugucc

SEQ ID NO: 313326 - RNA, 19 nt, Artificial Sequence
  Description of Artificial Sequence: Synthetic oligonucleotide
ugcauacuggcgaagugcg

SEQ ID NO: 313327 - RNA, 19 nt, Artificial Sequence
  Description of Artificial Sequence: Synthetic oligonucleotide
uauagauaugcacagugua

SEQ ID NO: 313328 - RNA, 19 nt, Artificial Sequence
  Description of Artificial Sequence: Synthetic oligonucleotide
aagggaguagcuaauuaac

SEQ ID NO: 313329 - RNA, 19 nt, Artificial Sequence
  Description of Artificial Sequence: Synthetic oligonucleotide
ucggaauggaguuaauugc

SEQ ID NO: 313330 - RNA, 19 nt, Artificial Sequence
  Description of Artificial Sequence: Synthetic oligonucleotide
uaaguaagccgucuagcag

SEQ ID NO: 313331 - RNA, 19 nt, Artificial Sequence
  Description of Artificial Sequence: Synthetic oligonucleotide
caaggagcgauuuacaauc

SEQ ID NO: 313332 - RNA, 19 nt, Artificial Sequence
  Description of Artificial Sequence: Synthetic oligonucleotide
gaacuagguguguacaagg

SEQ ID NO: 313333 - RNA, 19 nt, Artificial Sequence
  Description of Artificial Sequence: Synthetic oligonucleotide
aauaccuugguggucguag

SEQ ID NO: 313334 - RNA, 19 nt, Artificial Sequence
  Description of Artificial Sequence: Synthetic oligonucleotide
ugcuauucacauuauaauc

SEQ ID NO: 313335 - RNA, 19 nt, Artificial Sequence
  Description of Artificial Sequence: Synthetic oligonucleotide
acgcuaauguaggagaucc

SEQ ID NO: 313336 - RNA, 19 nt, Artificial Sequence
  Description of Artificial Sequence: Synthetic oligonucleotide
aucguuucaacuuucaaua

SEQ ID NO: 313337 - RNA, 19 nt, Artificial Sequence
  Description of Artificial Sequence: Synthetic oligonucleotide
ucguagacgcuaauguagg

SEQ ID NO: 313338 - RNA, 19 nt, Artificial Sequence
  Description of Artificial Sequence: Synthetic oligonucleotide
aaauggacggaaaacugag

SEQ ID NO: 313339 - RNA, 19 nt, Artificial Sequence
  Description of Artificial Sequence: Synthetic oligonucleotide
gaauggaguuaauugcucc

SEQ ID NO: 313340 - RNA, 19 nt, Artificial Sequence
  Description of Artificial Sequence: Synthetic oligonucleotide
agggaagaaaaccuaacgu

SEQ ID NO: 313341 - RNA, 19 nt, Artificial Sequence
  Description of Artificial Sequence: Synthetic oligonucleotide
uaacgugcuguccacagga

SEQ ID NO: 313342 - RNA, 19 nt, Artificial Sequence
  Description of Artificial Sequence: Synthetic oligonucleotide
ucuuaagccuuacucacaa

SEQ ID NO: 313343 - RNA, 19 nt, Artificial Sequence
  Description of Artificial Sequence: Synthetic oligonucleotide
uuauagguacuuuguaaac

SEQ ID NO: 313344 - RNA, 19 nt, Artificial Sequence
  Description of Artificial Sequence: Synthetic oligonucleotide
uaaacgaugcucacagacu

SEQ ID NO: 313345 - RNA, 19 nt, Artificial Sequence
  Description of Artificial Sequence: Synthetic oligonucleotide
guaauacaggccuccaucc

SEQ ID NO: 313346 - RNA, 19 nt, Artificial Sequence
  Description of Artificial Sequence: Synthetic oligonucleotide
aguggguucuacuuggugu

SEQ ID NO: 313347 - RNA, 19 nt, Artificial Sequence
  Description of Artificial Sequence: Synthetic oligonucleotide
aaucuaggcccaaaaguuc

SEQ ID NO: 313348 - RNA, 19 nt, Artificial Sequence
  Description of Artificial Sequence: Synthetic oligonucleotide
uuacuauaaugcagaaaug

SEQ ID NO: 313349 - RNA, 19 nt, Artificial Sequence
  Description of Artificial Sequence: Synthetic oligonucleotide
uuacaaucagacuucggaa

SEQ ID NO: 313350 - RNA, 19 nt, Artificial Sequence
  Description of Artificial Sequence: Synthetic oligonucleotide
auagguacuuuguaaacau

SEQ ID NO: 313351 - RNA, 19 nt, Artificial Sequence
  Description of Artificial Sequence: Synthetic oligonucleotide
uggucguagacgcuaaugu

SEQ ID NO: 313352 - RNA, 19 nt, Artificial Sequence
  Description of Artificial Sequence: Synthetic oligonucleotide
aucacaaguacuucacuga

SEQ ID NO: 313353 - RNA, 19 nt, Artificial Sequence
  Description of Artificial Sequence: Synthetic oligonucleotide
cauaacugauguuuaggug

SEQ ID NO: 313354 - RNA, 19 nt, Artificial Sequence
  Description of Artificial Sequence: Synthetic oligonucleotide
ugagcuacuaacuggcaaa

SEQ ID NO: 313355 - RNA, 19 nt, Artificial Sequence
  Description of Artificial Sequence: Synthetic oligonucleotide
ucuaaauauacaugacuuu

SEQ ID NO: 313356 - RNA, 19 nt, Artificial Sequence
  Description of Artificial Sequence: Synthetic oligonucleotide
uuugguaauacaggccucc

SEQ ID NO: 313357 - RNA, 19 nt, Artificial Sequence
  Description of Artificial Sequence: Synthetic oligonucleotide
ucacaaguacuucacugac

SEQ ID NO: 313358 - RNA, 19 nt, Artificial Sequence
  Description of Artificial Sequence: Synthetic oligonucleotide
auaaauuaugaggaauaug

SEQ ID NO: 313359 - RNA, 19 nt, Artificial Sequence
  Description of Artificial Sequence: Synthetic oligonucleotide
ugaacuagguguguacaag

SEQ ID NO: 313360 - RNA, 19 nt, Artificial Sequence
  Description of Artificial Sequence: Synthetic oligonucleotide
uauguaaccaggagccacu

SEQ ID NO: 313361 - RNA, 19 nt, Artificial Sequence
  Description of Artificial Sequence: Synthetic oligonucleotide
gauguuuaggugagaaggc

SEQ ID NO: 313362 - RNA, 19 nt, Artificial Sequence
  Description of Artificial Sequence: Synthetic oligonucleotide
aacauuaaccagucaguuu

SEQ ID NO: 313363 - RNA, 19 nt, Artificial Sequence
  Description of Artificial Sequence: Synthetic oligonucleotide
aaccuaacgugcuguccac

SEQ ID NO: 313364 - RNA, 19 nt, Artificial Sequence
  Description of Artificial Sequence: Synthetic oligonucleotide
ugacacuaagcaugggacc

SEQ ID NO: 313365 - RNA, 19 nt, Artificial Sequence
  Description of Artificial Sequence: Synthetic oligonucleotide
gagcgauuuacaaucagac

SEQ ID NO: 313366 - RNA, 19 nt, Artificial Sequence
  Description of Artificial Sequence: Synthetic oligonucleotide
cuagaacacaagagaauac

SEQ ID NO: 313367 - RNA, 19 nt, Artificial Sequence
  Description of Artificial Sequence: Synthetic oligonucleotide
uaugaacuagguguguaca

SEQ ID NO: 313368 - RNA, 19 nt, Artificial Sequence
  Description of Artificial Sequence: Synthetic oligonucleotide
uucaaggagcgauuuacaa

SEQ ID NO: 313369 - RNA, 19 nt, Artificial Sequence
  Description of Artificial Sequence: Synthetic oligonucleotide
gucguagacgcuaauguag

SEQ ID NO: 313370 - RNA, 19 nt, Artificial Sequence
  Description of Artificial Sequence: Synthetic oligonucleotide
aauugcuauucacauuaua

SEQ ID NO: 313371 - RNA, 19 nt, Artificial Sequence
  Description of Artificial Sequence: Synthetic oligonucleotide
guuuguaauccaaagcuga

SEQ ID NO: 313372 - RNA, 19 nt, Artificial Sequence
  Description of Artificial Sequence: Synthetic oligonucleotide
aauggacggaaaacugagg

SEQ ID NO: 313373 - RNA, 19 nt, Artificial Sequence
  Description of Artificial Sequence: Synthetic oligonucleotide
aauaugaacuaggugugua

SEQ ID NO: 313374 - RNA, 19 nt, Artificial Sequence
  Description of Artificial Sequence: Synthetic oligonucleotide
cuaaguaagccgucuagca

SEQ ID NO: 313375 - RNA, 19 nt, Artificial Sequence
  Description of Artificial Sequence: Synthetic oligonucleotide
cacaucacaaguacuucac

SEQ ID NO: 313376 - RNA, 19 nt, Artificial Sequence
  Description of Artificial Sequence: Synthetic oligonucleotide
ugaacuaaguaagccgucu

SEQ ID NO: 313377 - RNA, 19 nt, Artificial Sequence
  Description of Artificial Sequence: Synthetic oligonucleotide
cuaagcaugggaccgucac

SEQ ID NO: 313378 - RNA, 19 nt, Artificial Sequence
  Description of Artificial Sequence: Synthetic oligonucleotide
auaugccaaagucaucacu

SEQ ID NO: 313379 - RNA, 19 nt, Artificial Sequence
  Description of Artificial Sequence: Synthetic oligonucleotide
cucgcgaugucggagaagc

SEQ ID NO: 313380 - RNA, 19 nt, Artificial Sequence
  Description of Artificial Sequence: Synthetic oligonucleotide
gaguauuuggaacaaucua

SEQ ID NO: 313381 - RNA, 19 nt, Artificial Sequence
  Description of Artificial Sequence: Synthetic oligonucleotide
ucgucuuugucauuacuau

SEQ ID NO: 313382 - RNA, 19 nt, Artificial Sequence
  Description of Artificial Sequence: Synthetic oligonucleotide
uguugaguggguucuacuu

SEQ ID NO: 313383 - RNA, 19 nt, Artificial Sequence
  Description of Artificial Sequence: Synthetic oligonucleotide
uacaucguuucaacuuuca

SEQ ID NO: 313384 - RNA, 19 nt, Artificial Sequence
  Description of Artificial Sequence: Synthetic oligonucleotide
agccacuacuuucccagac

SEQ ID NO: 313385 - RNA, 19 nt, Artificial Sequence
  Description of Artificial Sequence: Synthetic oligonucleotide
agcgauuuacaaucagacu

SEQ ID NO: 313386 - RNA, 19 nt, Artificial Sequence
  Description of Artificial Sequence: Synthetic oligonucleotide
guagacgcuaauguaggag

SEQ ID NO: 313387 - RNA, 19 nt, Artificial Sequence
  Description of Artificial Sequence: Synthetic oligonucleotide
uguuuacuauaaugcagaa

SEQ ID NO: 313388 - RNA, 19 nt, Artificial Sequence
  Description of Artificial Sequence: Synthetic oligonucleotide
uaauacaggccuccauccu

SEQ ID NO: 313389 - RNA, 19 nt, Artificial Sequence
  Description of Artificial Sequence: Synthetic oligonucleotide
caauuuaaacgaugcucac

SEQ ID NO: 313390 - RNA, 19 nt, Artificial Sequence
  Description of Artificial Sequence: Synthetic oligonucleotide
aaacccagguucuuugcua

SEQ ID NO: 313391 - RNA, 19 nt, Artificial Sequence
  Description of Artificial Sequence: Synthetic oligonucleotide
gguaauacaggccuccauc

SEQ ID NO: 313392 - RNA, 19 nt, Artificial Sequence
  Description of Artificial Sequence: Synthetic oligonucleotide
guaauccaaagcugaaaca

SEQ ID NO: 313393 - RNA, 19 nt, Artificial Sequence
  Description of Artificial Sequence: Synthetic oligonucleotide
aagccuuacucacaauaua

SEQ ID NO: 313394 - RNA, 19 nt, Artificial Sequence
  Description of Artificial Sequence: Synthetic oligonucleotide
gaggacuccgacugucccg

SEQ ID NO: 313395 - RNA, 19 nt, Artificial Sequence
  Description of Artificial Sequence: Synthetic oligonucleotide
acuauaaugcagaaaugaa

SEQ ID NO: 313396 - RNA, 19 nt, Artificial Sequence
  Description of Artificial Sequence: Synthetic oligonucleotide
uccuauccgccccagcggc

SEQ ID NO: 313397 - RNA, 19 nt, Artificial Sequence
  Description of Artificial Sequence: Synthetic oligonucleotide
cuggugaguauuuggaaca

SEQ ID NO: 313398 - RNA, 19 nt, Artificial Sequence
  Description of Artificial Sequence: Synthetic oligonucleotide
ucuacucaccccuccacuc

SEQ ID NO: 313399 - RNA, 19 nt, Artificial Sequence
  Description of Artificial Sequence: Synthetic oligonucleotide
uauaugcuccaugccaucu

SEQ ID NO: 313400 - RNA, 19 nt, Artificial Sequence
  Description of Artificial Sequence: Synthetic oligonucleotide
uggaauuauuucucuugaa

SEQ ID NO: 313401 - RNA, 19 nt, Artificial Sequence
  Description of Artificial Sequence: Synthetic oligonucleotide
aaaauaccuugguggucgu

SEQ ID NO: 313402 - RNA, 19 nt, Artificial Sequence
  Description of Artificial Sequence: Synthetic oligonucleotide
ggguuuguaauccaaagcu

SEQ ID NO: 313403 - RNA, 19 nt, Artificial Sequence
  Description of Artificial Sequence: Synthetic oligonucleotide
cuggaauuauuucucuuga

SEQ ID NO: 313404 - RNA, 19 nt, Artificial Sequence
  Description of Artificial Sequence: Synthetic oligonucleotide
ugcggaagcgaacgcggag

SEQ ID NO: 313405 - RNA, 19 nt, Artificial Sequence
  Description of Artificial Sequence: Synthetic oligonucleotide
cuaacgugcuguccacagg

SEQ ID NO: 313406 - RNA, 19 nt, Artificial Sequence
  Description of Artificial Sequence: Synthetic oligonucleotide
aggagcgauuuacaaucag

SEQ ID NO: 313407 - RNA, 19 nt, Artificial Sequence
  Description of Artificial Sequence: Synthetic oligonucleotide
augaacuagguguguacaa

SEQ ID NO: 313408 - RNA, 19 nt, Artificial Sequence
  Description of Artificial Sequence: Synthetic oligonucleotide
acggaaaacugaggacucc

SEQ ID NO: 313409 - RNA, 19 nt, Artificial Sequence
  Description of Artificial Sequence: Synthetic oligonucleotide
auacuggcgaagugcggag

SEQ ID NO: 313410 - RNA, 19 nt, Artificial Sequence
  Description of Artificial Sequence: Synthetic oligonucleotide
cuugcggagcgugaagccg

SEQ ID NO: 313411 - RNA, 19 nt, Artificial Sequence
  Description of Artificial Sequence: Synthetic oligonucleotide
cucagucaaucugauuugc

SEQ ID NO: 313412 - RNA, 19 nt, Artificial Sequence
  Description of Artificial Sequence: Synthetic oligonucleotide
gaaaccaugugaacuaagu

SEQ ID NO: 313413 - RNA, 19 nt, Artificial Sequence
  Description of Artificial Sequence: Synthetic oligonucleotide
auuuggcacuguuaauuaa

SEQ ID NO: 313414 - RNA, 19 nt, Artificial Sequence
  Description of Artificial Sequence: Synthetic oligonucleotide
uagguacuuuguaaacauc

SEQ ID NO: 313415 - RNA, 19 nt, Artificial Sequence
  Description of Artificial Sequence: Synthetic oligonucleotide
uuggaacaaucuaggccca

SEQ ID NO: 313416 - RNA, 19 nt, Artificial Sequence
  Description of Artificial Sequence: Synthetic oligonucleotide
acgaugcucacagacuuug

SEQ ID NO: 313417 - RNA, 19 nt, Artificial Sequence
  Description of Artificial Sequence: Synthetic oligonucleotide
ccuacuuaaucauaugcca

SEQ ID NO: 313418 - RNA, 19 nt, Artificial Sequence
  Description of Artificial Sequence: Synthetic oligonucleotide
uggcacuguuaauuaauau

SEQ ID NO: 313419 - RNA, 19 nt, Artificial Sequence
  Description of Artificial Sequence: Synthetic oligonucleotide
gguuuguaauccaaagcug

SEQ ID NO: 313420 - RNA, 19 nt, Artificial Sequence
  Description of Artificial Sequence: Synthetic oligonucleotide
ucccagacgcuguucacaa

SEQ ID NO: 313421 - RNA, 19 nt, Artificial Sequence
  Description of Artificial Sequence: Synthetic oligonucleotide
agccgucuagcagaucuac

SEQ ID NO: 313422 - RNA, 19 nt, Artificial Sequence
  Description of Artificial Sequence: Synthetic oligonucleotide
guguguacaagguuuuaua

SEQ ID NO: 313423 - RNA, 19 nt, Artificial Sequence
  Description of Artificial Sequence: Synthetic oligonucleotide
agccgagcggcgcuaggac

SEQ ID NO: 313424 - RNA, 19 nt, Artificial Sequence
  Description of Artificial Sequence: Synthetic oligonucleotide
agggaguagcuaauuaaca

SEQ ID NO: 313425 - RNA, 19 nt, Artificial Sequence
  Description of Artificial Sequence: Synthetic oligonucleotide
aggugcggaagcgaacgcg

SEQ ID NO: 313426 - RNA, 19 nt, Artificial Sequence
  Description of Artificial Sequence: Synthetic oligonucleotide
gccacuacuuucccagacg

SEQ ID NO: 313427 - RNA, 19 nt, Artificial Sequence
  Description of Artificial Sequence: Synthetic oligonucleotide
ucucacaaugcccgcuuuu

SEQ ID NO: 313428 - RNA, 19 nt, Artificial Sequence
  Description of Artificial Sequence: Synthetic oligonucleotide
gacgggguccuauccgccc

SEQ ID NO: 313429 - RNA, 19 nt, Artificial Sequence
  Description of Artificial Sequence: Synthetic oligonucleotide
auaccuugguggucguaga

SEQ ID NO: 313430 - RNA, 19 nt, Artificial Sequence
  Description of Artificial Sequence: Synthetic oligonucleotide
augauccccucccaccaca

SEQ ID NO: 313431 - RNA, 19 nt, Artificial Sequence
  Description of Artificial Sequence: Synthetic oligonucleotide
aaggagcgauuuacaauca

SEQ ID NO: 313432 - RNA, 19 nt, Artificial Sequence
  Description of Artificial Sequence: Synthetic oligonucleotide
uugguaauacaggccucca

SEQ ID NO: 313433 - RNA, 19 nt, Artificial Sequence
  Description of Artificial Sequence: Synthetic oligonucleotide
ccacuacuuucccagacgc

SEQ ID NO: 313434 - RNA, 19 nt, Artificial Sequence
  Description of Artificial Sequence: Synthetic oligonucleotide
ggugcggaagcgaacgcgg

SEQ ID NO: 313435 - RNA, 19 nt, Artificial Sequence
  Description of Artificial Sequence: Synthetic oligonucleotide
uugguggucguagacgcua

SEQ ID NO: 313436 - RNA, 19 nt, Artificial Sequence
  Description of Artificial Sequence: Synthetic oligonucleotide
guggucguagacgcuaaug

SEQ ID NO: 313437 - RNA, 19 nt, Artificial Sequence
  Description of Artificial Sequence: Synthetic oligonucleotide
agcuacuaacuggcaaaag

SEQ ID NO: 313438 - RNA, 19 nt, Artificial Sequence
  Description of Artificial Sequence: Synthetic oligonucleotide
ccuaacgugcuguccacag

SEQ ID NO: 313439 - RNA, 19 nt, Artificial Sequence
  Description of Artificial Sequence: Synthetic oligonucleotide
cuauccgccccagcggccg

SEQ ID NO: 313440 - RNA, 19 nt, Artificial Sequence
  Description of Artificial Sequence: Synthetic oligonucleotide
gaggcucgcgaugucggag

SEQ ID NO: 313441 - RNA, 19 nt, Artificial Sequence
  Description of Artificial Sequence: Synthetic oligonucleotide
gacgcuaauguaggagauc

SEQ ID NO: 313442 - RNA, 19 nt, Artificial Sequence
  Description of Artificial Sequence: Synthetic oligonucleotide
cccgucauacuccuguggc

SEQ ID NO: 313443 - RNA, 19 nt, Artificial Sequence
  Description of Artificial Sequence: Synthetic oligonucleotide
gugagcgugcggugcaggc

SEQ ID NO: 313444 - RNA, 19 nt, Artificial Sequence
  Description of Artificial Sequence: Synthetic oligonucleotide
ggagcgauuuacaaucaga

SEQ ID NO: 313445 - RNA, 19 nt, Artificial Sequence
  Description of Artificial Sequence: Synthetic oligonucleotide
aggcucgcgaugucggaga

SEQ ID NO: 313446 - RNA, 19 nt, Artificial Sequence
  Description of Artificial Sequence: Synthetic oligonucleotide
ccaggugcggaagcgaacg

SEQ ID NO: 313447 - RNA, 19 nt, Artificial Sequence
  Description of Artificial Sequence: Synthetic oligonucleotide
ugguggucguagacgcuaa

SEQ ID NO: 313448 - RNA, 19 nt, Artificial Sequence
  Description of Artificial Sequence: Synthetic oligonucleotide
acacacaugcacacacaca

SEQ ID NO: 313449 - RNA, 19 nt, Artificial Sequence
  Description of Artificial Sequence: Synthetic oligonucleotide
gggaguagcuaauuaacau

SEQ ID NO: 313450 - RNA, 19 nt, Artificial Sequence
  Description of Artificial Sequence: Synthetic oligonucleotide
uauccgccccagcggccgg

SEQ ID NO: 313451 - RNA, 19 nt, Artificial Sequence
  Description of Artificial Sequence: Synthetic oligonucleotide
aagcgaacgcggagccagg

SEQ ID NO: 313452 - RNA, 19 nt, Artificial Sequence
  Description of Artificial Sequence: Synthetic oligonucleotide
cgaacgcggagccaggagg

SEQ ID NO: 313453 - RNA, 19 nt, Artificial Sequence
  Description of Artificial Sequence: Synthetic oligonucleotide
gagcuacuaacuggcaaaa

SEQ ID NO: 313454 - RNA, 19 nt, Artificial Sequence
  Description of Artificial Sequence: Synthetic oligonucleotide
gugaugacgccgguuccug

SEQ ID NO: 313455 - RNA, 19 nt, Artificial Sequence
  Description of Artificial Sequence: Synthetic oligonucleotide
aguaagccgucuagcagau

SEQ ID NO: 313456 - RNA, 19 nt, Artificial Sequence
  Description of Artificial Sequence: Synthetic oligonucleotide
uccuaagacauggccgcua

SEQ ID NO: 313457 - RNA, 19 nt, Artificial Sequence
  Description of Artificial Sequence: Synthetic oligonucleotide
uggguucuacuuggugucu

SEQ ID NO: 313458 - RNA, 19 nt, Artificial Sequence
  Description of Artificial Sequence: Synthetic oligonucleotide
augggguuuguaauccaaa

SEQ ID NO: 313459 - RNA, 19 nt, Artificial Sequence
  Description of Artificial Sequence: Synthetic oligonucleotide
gcuugcggagcgugaagcc

SEQ ID NO: 313460 - RNA, 19 nt, Artificial Sequence
  Description of Artificial Sequence: Synthetic oligonucleotide
aacgaugcucacagacuuu

SEQ ID NO: 313461 - RNA, 19 nt, Artificial Sequence
  Description of Artificial Sequence: Synthetic oligonucleotide
aaauaccuugguggucgua

SEQ ID NO: 313462 - RNA, 19 nt, Artificial Sequence
  Description of Artificial Sequence: Synthetic oligonucleotide
acacuaagcaugggaccgu

SEQ ID NO: 313463 - RNA, 19 nt, Artificial Sequence
  Description of Artificial Sequence: Synthetic oligonucleotide
ggcuugcggagcgugaagc

SEQ ID NO: 313464 - RNA, 19 nt, Artificial Sequence
  Description of Artificial Sequence: Synthetic oligonucleotide
cacacccgcggcgcgacgg

SEQ ID NO: 313465 - RNA, 19 nt, Artificial Sequence
  Description of Artificial Sequence: Synthetic oligonucleotide
agcucucacaaugcccgcu

SEQ ID NO: 313466 - RNA, 19 nt, Artificial Sequence
  Description of Artificial Sequence: Synthetic oligonucleotide
acacccgcggcgcgacggg

SEQ ID NO: 313467 - RNA, 19 nt, Artificial Sequence
  Description of Artificial Sequence: Synthetic oligonucleotide
caggugcggaagcgaacgc

SEQ ID NO: 313468 - RNA, 19 nt, Artificial Sequence
  Description of Artificial Sequence: Synthetic oligonucleotide
ggucguagacgcuaaugua

SEQ ID NO: 313469 - RNA, 19 nt, Artificial Sequence
  Description of Artificial Sequence: Synthetic oligonucleotide
cugcucuauucuaaauaua

SEQ ID NO: 313470 - RNA, 19 nt, Artificial Sequence
  Description of Artificial Sequence: Synthetic oligonucleotide
ucgcgaugucggagaagcu

SEQ ID NO: 313471 - RNA, 19 nt, Artificial Sequence
  Description of Artificial Sequence: Synthetic oligonucleotide
cgucauacuccuguggcgc

SEQ ID NO: 313472 - RNA, 19 nt, Artificial Sequence
  Description of Artificial Sequence: Synthetic oligonucleotide
ccggugaugacgccgguuc

SEQ ID NO: 313473 - RNA, 19 nt, Artificial Sequence
  Description of Artificial Sequence: Synthetic oligonucleotide
uggaacaaucuaggcccaa

SEQ ID NO: 313474 - RNA, 19 nt, Artificial Sequence
  Description of Artificial Sequence: Synthetic oligonucleotide
gcgacgggguccuauccgc

SEQ ID NO: 313475 - RNA, 19 nt, Artificial Sequence
  Description of Artificial Sequence: Synthetic oligonucleotide
cggaaaacugaggacuccg

SEQ ID NO: 313476 - RNA, 19 nt, Artificial Sequence
  Description of Artificial Sequence: Synthetic oligonucleotide
agagucaauuggguccuuu

SEQ ID NO: 313477 - RNA, 19 nt, Artificial Sequence
  Description of Artificial Sequence: Synthetic oligonucleotide
uccgacugucccgcacaag

SEQ ID NO: 313478 - RNA, 19 nt, Artificial Sequence
  Description of Artificial Sequence: Synthetic oligonucleotide
cuccauccuacuuaaucau

SEQ ID NO: 313479 - RNA, 19 nt, Artificial Sequence
  Description of Artificial Sequence: Synthetic oligonucleotide
gcggaagcgaacgcggagc

SEQ ID NO: 313480 - RNA, 19 nt, Artificial Sequence
  Description of Artificial Sequence: Synthetic oligonucleotide
ggaaaacugaggacuccga

SEQ ID NO: 313481 - RNA, 19 nt, Artificial Sequence
  Description of Artificial Sequence: Synthetic oligonucleotide
accuaacgugcuguccaca

SEQ ID NO: 313482 - RNA, 19 nt, Artificial Sequence
  Description of Artificial Sequence: Synthetic oligonucleotide
gaacgcggagccaggaggu

SEQ ID NO: 313483 - RNA, 19 nt, Artificial Sequence
  Description of Artificial Sequence: Synthetic oligonucleotide
ccaaaaucuacaggcguga

SEQ ID NO: 313484 - RNA, 19 nt, Artificial Sequence
  Description of Artificial Sequence: Synthetic oligonucleotide
ggugagcgugcggugcagg

SEQ ID NO: 313485 - RNA, 19 nt, Artificial Sequence
  Description of Artificial Sequence: Synthetic oligonucleotide
aagccgucuagcagaucua

SEQ ID NO: 313486 - RNA, 19 nt, Artificial Sequence
  Description of Artificial Sequence: Synthetic oligonucleotide
agacuucggaauggaguua

SEQ ID NO: 313487 - RNA, 19 nt, Artificial Sequence
  Description of Artificial Sequence: Synthetic oligonucleotide
gccgagcggcgcuaggacc

SEQ ID NO: 313488 - RNA, 19 nt, Artificial Sequence
  Description of Artificial Sequence: Synthetic oligonucleotide
agcgaacgcggagccagga

SEQ ID NO: 313489 - RNA, 19 nt, Artificial Sequence
  Description of Artificial Sequence: Synthetic oligonucleotide
ggaacaaucuaggcccaaa

SEQ ID NO: 313490 - RNA, 19 nt, Artificial Sequence
  Description of Artificial Sequence: Synthetic oligonucleotide
gcgaacgcggagccaggag

SEQ ID NO: 313491 - RNA, 19 nt, Artificial Sequence
  Description of Artificial Sequence: Synthetic oligonucleotide
ccauccuacuuaaucauau

SEQ ID NO: 313492 - RNA, 19 nt, Artificial Sequence
  Description of Artificial Sequence: Synthetic oligonucleotide
ccccgucauacuccugugg

SEQ ID NO: 313493 - RNA, 19 nt, Artificial Sequence
  Description of Artificial Sequence: Synthetic oligonucleotide
gucauacuccuguggcgcu

SEQ ID NO: 313494 - RNA, 19 nt, Artificial Sequence
  Description of Artificial Sequence: Synthetic oligonucleotide
gguguguacaagguuuuau

SEQ ID NO: 313495 - RNA, 19 nt, Artificial Sequence
  Description of Artificial Sequence: Synthetic oligonucleotide
caggggccuagcauuuaaa

SEQ ID NO: 313496 - RNA, 19 nt, Artificial Sequence
  Description of Artificial Sequence: Synthetic oligonucleotide
agguguguacaagguuuua

SEQ ID NO: 313497 - RNA, 19 nt, Artificial Sequence
  Description of Artificial Sequence: Synthetic oligonucleotide
cuucggaauggaguuaauu

SEQ ID NO: 313498 - RNA, 19 nt, Artificial Sequence
  Description of Artificial Sequence: Synthetic oligonucleotide
gggcuugcggagcgugaag

SEQ ID NO: 313499 - RNA, 19 nt, Artificial Sequence
  Description of Artificial Sequence: Synthetic oligonucleotide
cuccaaugugccccauuua

SEQ ID NO: 313500 - RNA, 19 nt, Artificial Sequence
  Description of Artificial Sequence: Synthetic oligonucleotide
cacuacuuucccagacgcu

SEQ ID NO: 313501 - RNA, 19 nt, Artificial Sequence
  Description of Artificial Sequence: Synthetic oligonucleotide
cgcuaauguaggagauccc

SEQ ID NO: 313502 - RNA, 19 nt, Artificial Sequence
  Description of Artificial Sequence: Synthetic oligonucleotide
caaguacuucacugacacu

SEQ ID NO: 313503 - RNA, 19 nt, Artificial Sequence
  Description of Artificial Sequence: Synthetic oligonucleotide
gaaggucuauguacuccau

SEQ ID NO: 313504 - RNA, 19 nt, Artificial Sequence
  Description of Artificial Sequence: Synthetic oligonucleotide
ccuauccgccccagcggcc

SEQ ID NO: 313505 - RNA, 19 nt, Artificial Sequence
  Description of Artificial Sequence: Synthetic oligonucleotide
cuuaagccuuacucacaau

SEQ ID NO: 313506 - RNA, 19 nt, Artificial Sequence
  Description of Artificial Sequence: Synthetic oligonucleotide
ggaccggccguccgcgcgc

SEQ ID NO: 313507 - RNA, 19 nt, Artificial Sequence
  Description of Artificial Sequence: Synthetic oligonucleotide
cuugguggucguagacgcu

SEQ ID NO: 313508 - RNA, 19 nt, Artificial Sequence
  Description of Artificial Sequence: Synthetic oligonucleotide
cggaauggaguuaauugcu

SEQ ID NO: 313509 - RNA, 19 nt, Artificial Sequence
  Description of Artificial Sequence: Synthetic oligonucleotide
cacucucaaguaagacacu

SEQ ID NO: 313510 - RNA, 19 nt, Artificial Sequence
  Description of Artificial Sequence: Synthetic oligonucleotide
gugcggaagcgaacgcgga

SEQ ID NO: 313511 - RNA, 19 nt, Artificial Sequence
  Description of Artificial Sequence: Synthetic oligonucleotide
ggcgcgacgggguccuauc

SEQ ID NO: 313512 - RNA, 19 nt, Artificial Sequence
  Description of Artificial Sequence: Synthetic oligonucleotide
gccccgucauacuccugug

SEQ ID NO: 313513 - RNA, 19 nt, Artificial Sequence
  Description of Artificial Sequence: Synthetic oligonucleotide
gcgcgacgggguccuaucc

SEQ ID NO: 313514 - RNA, 19 nt, Artificial Sequence
  Description of Artificial Sequence: Synthetic oligonucleotide
ggugaugacgccgguuccu

SEQ ID NO: 313515 - RNA, 19 nt, Artificial Sequence
  Description of Artificial Sequence: Synthetic oligonucleotide
gcgugaagccgagcggcgc

SEQ ID NO: 313516 - RNA, 19 nt, Artificial Sequence
  Description of Artificial Sequence: Synthetic oligonucleotide
gguucuacuuggugucuuu

SEQ ID NO: 313517 - RNA, 19 nt, Artificial Sequence
  Description of Artificial Sequence: Synthetic oligonucleotide
cguagacgcuaauguagga

SEQ ID NO: 313518 - RNA, 19 nt, Artificial Sequence
  Description of Artificial Sequence: Synthetic oligonucleotide
gccgucuagcagaucuaca

SEQ ID NO: 313519 - RNA, 19 nt, Artificial Sequence
  Description of Artificial Sequence: Synthetic oligonucleotide
gcucgcgaugucggagaag

SEQ ID NO: 313520 - RNA, 19 nt, Artificial Sequence
  Description of Artificial Sequence: Synthetic oligonucleotide
ggugaguauuuggaacaau

SEQ ID NO: 313521 - RNA, 19 nt, Artificial Sequence
  Description of Artificial Sequence: Synthetic oligonucleotide
ccgcacaaggagaauacuu

SEQ ID NO: 313522 - RNA, 19 nt, Artificial Sequence
  Description of Artificial Sequence: Synthetic oligonucleotide
ggcucgcgaugucggagaa

SEQ ID NO: 313523 - RNA, 19 nt, Artificial Sequence
  Description of Artificial Sequence: Synthetic oligonucleotide
acccgccacaccagcucgu

SEQ ID NO: 313524 - RNA, 19 nt, Artificial Sequence
  Description of Artificial Sequence: Synthetic oligonucleotide
gcucucacaaugcccgcuu

SEQ ID NO: 313525 - RNA, 19 nt, Artificial Sequence
  Description of Artificial Sequence: Synthetic oligonucleotide
cuccuaagacauggccgcu

SEQ ID NO: 313526 - RNA, 19 nt, Artificial Sequence
  Description of Artificial Sequence: Synthetic oligonucleotide
ccgccacaccagcucguac

SEQ ID NO: 313527 - RNA, 19 nt, Artificial Sequence
  Description of Artificial Sequence: Synthetic oligonucleotide
gguggucguagacgcuaau

SEQ ID NO: 313528 - RNA, 19 nt, Artificial Sequence
  Description of Artificial Sequence: Synthetic oligonucleotide
ccacacccgcggcgcgacg

SEQ ID NO: 313529 - RNA, 19 nt, Artificial Sequence
  Description of Artificial Sequence: Synthetic oligonucleotide
ggguucuacuuggugucuu

SEQ ID NO: 313530 - RNA, 19 nt, Artificial Sequence
  Description of Artificial Sequence: Synthetic oligonucleotide
cguccgcgcgccagcgcag

SEQ ID NO: 313531 - RNA, 19 nt, Artificial Sequence
  Description of Artificial Sequence: Synthetic oligonucleotide
cgaggcucgcgaugucgga

SEQ ID NO: 313532 - RNA, 19 nt, Artificial Sequence
  Description of Artificial Sequence: Synthetic oligonucleotide
cccgcacaaggagaauacu

SEQ ID NO: 313533 - RNA, 19 nt, Artificial Sequence
  Description of Artificial Sequence: Synthetic oligonucleotide
gggcaccgucuccgcccuc

SEQ ID NO: 313534 - RNA, 19 nt, Artificial Sequence
  Description of Artificial Sequence: Synthetic oligonucleotide
cggcgcgacgggguccuau

SEQ ID NO: 313535 - RNA, 19 nt, Artificial Sequence
  Description of Artificial Sequence: Synthetic oligonucleotide
aaugaaacccucucgaccc

SEQ ID NO: 313536 - RNA, 19 nt, Artificial Sequence
  Description of Artificial Sequence: Synthetic oligonucleotide
aauacgacuagaaaggacc

SEQ ID NO: 313537 - RNA, 19 nt, Artificial Sequence
  Description of Artificial Sequence: Synthetic oligonucleotide
aauggggugauauccaagc

SEQ ID NO: 313538 - RNA, 19 nt, Artificial Sequence
  Description of Artificial Sequence: Synthetic oligonucleotide
acacauauaguucaccucc

SEQ ID NO: 313539 - RNA, 19 nt, Artificial Sequence
  Description of Artificial Sequence: Synthetic oligonucleotide
uuaaauucgaccauagagu

SEQ ID NO: 313540 - RNA, 19 nt, Artificial Sequence
  Description of Artificial Sequence: Synthetic oligonucleotide
aauacgaccuugcuugggc

SEQ ID NO: 313541 - RNA, 19 nt, Artificial Sequence
  Description of Artificial Sequence: Synthetic oligonucleotide
guugagaggacacauauag

SEQ ID NO: 313542 - RNA, 19 nt, Artificial Sequence
  Description of Artificial Sequence: Synthetic oligonucleotide
aacggaauguccucaacac

SEQ ID NO: 313543 - RNA, 19 nt, Artificial Sequence
  Description of Artificial Sequence: Synthetic oligonucleotide
aacaggagguuauaccagc

SEQ ID NO: 313544 - RNA, 19 nt, Artificial Sequence
  Description of Artificial Sequence: Synthetic oligonucleotide
acuaacaaccaauucacag

SEQ ID NO: 313545 - RNA, 19 nt, Artificial Sequence
  Description of Artificial Sequence: Synthetic oligonucleotide
cacaauacgaccuugcuug

SEQ ID NO: 313546 - RNA, 19 nt, Artificial Sequence
  Description of Artificial Sequence: Synthetic oligonucleotide
acaaccaauucacagcccc

SEQ ID NO: 313547 - RNA, 19 nt, Artificial Sequence
  Description of Artificial Sequence: Synthetic oligonucleotide
gacaaacucgcccaggugg

SEQ ID NO: 313548 - RNA, 19 nt, Artificial Sequence
  Description of Artificial Sequence: Synthetic oligonucleotide
acaaguuaaaggcauuuuc

SEQ ID NO: 313549 - RNA, 19 nt, Artificial Sequence
  Description of Artificial Sequence: Synthetic oligonucleotide
aauggcacaaagcggggac

SEQ ID NO: 313550 - RNA, 19 nt, Artificial Sequence
  Description of Artificial Sequence: Synthetic oligonucleotide
uguggcuugggaauuaucc

SEQ ID NO: 313551 - RNA, 19 nt, Artificial Sequence
  Description of Artificial Sequence: Synthetic oligonucleotide
ucgaccauagaguacacag

SEQ ID NO: 313552 - RNA, 19 nt, Artificial Sequence
  Description of Artificial Sequence: Synthetic oligonucleotide
ugcuauagaugacaguggg

SEQ ID NO: 313553 - RNA, 19 nt, Artificial Sequence
  Description of Artificial Sequence: Synthetic oligonucleotide
acugcuagagaauagcuug

SEQ ID NO: 313554 - RNA, 19 nt, Artificial Sequence
  Description of Artificial Sequence: Synthetic oligonucleotide
cuaacaaccaauucacagc

SEQ ID NO: 313555 - RNA, 19 nt, Artificial Sequence
  Description of Artificial Sequence: Synthetic oligonucleotide
aauucgaccauagaguaca

SEQ ID NO: 313556 - RNA, 19 nt, Artificial Sequence
  Description of Artificial Sequence: Synthetic oligonucleotide
aaaggaagcucucacuuca

SEQ ID NO: 313557 - RNA, 19 nt, Artificial Sequence
  Description of Artificial Sequence: Synthetic oligonucleotide
uguuguagugauuacacuc

SEQ ID NO: 313558 - RNA, 19 nt, Artificial Sequence
  Description of Artificial Sequence: Synthetic oligonucleotide
uguuauuggccaaugccag

SEQ ID NO: 313559 - RNA, 19 nt, Artificial Sequence
  Description of Artificial Sequence: Synthetic oligonucleotide
uaggaaacuuucuaucagg

SEQ ID NO: 313560 - RNA, 19 nt, Artificial Sequence
  Description of Artificial Sequence: Synthetic oligonucleotide
aguacugcuagagaauagc

SEQ ID NO: 313561 - RNA, 19 nt, Artificial Sequence
  Description of Artificial Sequence: Synthetic oligonucleotide
ucagaaacuaacaaccaau

SEQ ID NO: 313562 - RNA, 19 nt, Artificial Sequence
  Description of Artificial Sequence: Synthetic oligonucleotide
ugugaaaggaucuccagaa

SEQ ID NO: 313563 - RNA, 19 nt, Artificial Sequence
  Description of Artificial Sequence: Synthetic oligonucleotide
aaagguggucaucaggaug

SEQ ID NO: 313564 - RNA, 19 nt, Artificial Sequence
  Description of Artificial Sequence: Synthetic oligonucleotide
auaacuagggagccauggc

SEQ ID NO: 313565 - RNA, 19 nt, Artificial Sequence
  Description of Artificial Sequence: Synthetic oligonucleotide
uagaaaggaccccaaagca

SEQ ID NO: 313566 - RNA, 19 nt, Artificial Sequence
  Description of Artificial Sequence: Synthetic oligonucleotide
cagguuuccacucaggcag

SEQ ID NO: 313567 - RNA, 19 nt, Artificial Sequence
  Description of Artificial Sequence: Synthetic oligonucleotide
aguuccccgagacaaaagg

SEQ ID NO: 313568 - RNA, 19 nt, Artificial Sequence
  Description of Artificial Sequence: Synthetic oligonucleotide
uacuggaagaccacaauac

SEQ ID NO: 313569 - RNA, 19 nt, Artificial Sequence
  Description of Artificial Sequence: Synthetic oligonucleotide
auuacacucagugcggagc

SEQ ID NO: 313570 - RNA, 19 nt, Artificial Sequence
  Description of Artificial Sequence: Synthetic oligonucleotide
uuggacuucaauacgacua

SEQ ID NO: 313571 - RNA, 19 nt, Artificial Sequence
  Description of Artificial Sequence: Synthetic oligonucleotide
ucaagauacgggcugagau

SEQ ID NO: 313572 - RNA, 19 nt, Artificial Sequence
  Description of Artificial Sequence: Synthetic oligonucleotide
gagaccaaccuccuguagg

SEQ ID NO: 313573 - RNA, 19 nt, Artificial Sequence
  Description of Artificial Sequence: Synthetic oligonucleotide
gaugaccuuauugagucgg

SEQ ID NO: 313574 - RNA, 19 nt, Artificial Sequence
  Description of Artificial Sequence: Synthetic oligonucleotide
ucagagcaagcaaagacgu

SEQ ID NO: 313575 - RNA, 19 nt, Artificial Sequence
  Description of Artificial Sequence: Synthetic oligonucleotide
gaugggagcuucaagauac

SEQ ID NO: 313576 - RNA, 19 nt, Artificial Sequence
  Description of Artificial Sequence: Synthetic oligonucleotide
gagaauagcuugcuggagc

SEQ ID NO: 313577 - RNA, 19 nt, Artificial Sequence
  Description of Artificial Sequence: Synthetic oligonucleotide
ucaccaucgaugaagccug

SEQ ID NO: 313578 - RNA, 19 nt, Artificial Sequence
  Description of Artificial Sequence: Synthetic oligonucleotide
uccacuagugucuuggacu

SEQ ID NO: 313579 - RNA, 19 nt, Artificial Sequence
  Description of Artificial Sequence: Synthetic oligonucleotide
aaagagaacggaauguccu

SEQ ID NO: 313580 - RNA, 19 nt, Artificial Sequence
  Description of Artificial Sequence: Synthetic oligonucleotide
guagaaagagaacggaaug

SEQ ID NO: 313581 - RNA, 19 nt, Artificial Sequence
  Description of Artificial Sequence: Synthetic oligonucleotide
accaaccuccuguaggugc

SEQ ID NO: 313582 - RNA, 19 nt, Artificial Sequence
  Description of Artificial Sequence: Synthetic oligonucleotide
auugagucgguucugcaug

SEQ ID NO: 313583 - RNA, 19 nt, Artificial Sequence
  Description of Artificial Sequence: Synthetic oligonucleotide
cauacgugcacagagcugc

SEQ ID NO: 313584 - RNA, 19 nt, Artificial Sequence
  Description of Artificial Sequence: Synthetic oligonucleotide
gacaaugaaacccucucga

SEQ ID NO: 313585 - RNA, 19 nt, Artificial Sequence
  Description of Artificial Sequence: Synthetic oligonucleotide
aagauacgggcugagaugu

SEQ ID NO: 313586 - RNA, 19 nt, Artificial Sequence
  Description of Artificial Sequence: Synthetic oligonucleotide
caaugaaacccucucgacc

SEQ ID NO: 313587 - RNA, 19 nt, Artificial Sequence
  Description of Artificial Sequence: Synthetic oligonucleotide
ccuaucaugccguugaccg

SEQ ID NO: 313588 - RNA, 19 nt, Artificial Sequence
  Description of Artificial Sequence: Synthetic oligonucleotide
uugguaaaauucagaaacu

SEQ ID NO: 313589 - RNA, 19 nt, Artificial Sequence
  Description of Artificial Sequence: Synthetic oligonucleotide
agcauugagacacuuccug

SEQ ID NO: 313590 - RNA, 19 nt, Artificial Sequence
  Description of Artificial Sequence: Synthetic oligonucleotide
agagcaagcaaagacguug

SEQ ID NO: 313591 - RNA, 19 nt, Artificial Sequence
  Description of Artificial Sequence: Synthetic oligonucleotide
aaggcuuggugguccaagg

SEQ ID NO: 313592 - RNA, 19 nt, Artificial Sequence
  Description of Artificial Sequence: Synthetic oligonucleotide
guaguccauucauagagcc

SEQ ID NO: 313593 - RNA, 19 nt, Artificial Sequence
  Description of Artificial Sequence: Synthetic oligonucleotide
aauagcuugcuggagcuga

SEQ ID NO: 313594 - RNA, 19 nt, Artificial Sequence
  Description of Artificial Sequence: Synthetic oligonucleotide
cuuucgcucagugugaaag

SEQ ID NO: 313595 - RNA, 19 nt, Artificial Sequence
  Description of Artificial Sequence: Synthetic oligonucleotide
uccgaaggaagucucguga

SEQ ID NO: 313596 - RNA, 19 nt, Artificial Sequence
  Description of Artificial Sequence: Synthetic oligonucleotide
agauucguagaggggaacc

SEQ ID NO: 313597 - RNA, 19 nt, Artificial Sequence
  Description of Artificial Sequence: Synthetic oligonucleotide
cauaacuagggagccaugg

SEQ ID NO: 313598 - RNA, 19 nt, Artificial Sequence
  Description of Artificial Sequence: Synthetic oligonucleotide
gaaagagaacggaaugucc

SEQ ID NO: 313599 - RNA, 19 nt, Artificial Sequence
  Description of Artificial Sequence: Synthetic oligonucleotide
aaauucgaccauagaguac

SEQ ID NO: 313600 - RNA, 19 nt, Artificial Sequence
  Description of Artificial Sequence: Synthetic oligonucleotide
uaguccauucauagagccg

SEQ ID NO: 313601 - RNA, 19 nt, Artificial Sequence
  Description of Artificial Sequence: Synthetic oligonucleotide
uuucgcucagugugaaagg

SEQ ID NO: 313602 - RNA, 19 nt, Artificial Sequence
  Description of Artificial Sequence: Synthetic oligonucleotide
guuguuguagugauuacac

SEQ ID NO: 313603 - RNA, 19 nt, Artificial Sequence
  Description of Artificial Sequence: Synthetic oligonucleotide
aaagucucgggcaaucucu

SEQ ID NO: 313604 - RNA, 19 nt, Artificial Sequence
  Description of Artificial Sequence: Synthetic oligonucleotide
uguuguuguagugauuaca

SEQ ID NO: 313605 - RNA, 19 nt, Artificial Sequence
  Description of Artificial Sequence: Synthetic oligonucleotide
auccaguugggauuaaagu

SEQ ID NO: 313606 - RNA, 19 nt, Artificial Sequence
  Description of Artificial Sequence: Synthetic oligonucleotide
aaagcaccgaccccugugu

SEQ ID NO: 313607 - RNA, 19 nt, Artificial Sequence
  Description of Artificial Sequence: Synthetic oligonucleotide
agaauagcuugcuggagcu

SEQ ID NO: 313608 - RNA, 19 nt, Artificial Sequence
  Description of Artificial Sequence: Synthetic oligonucleotide
cauccaguugggauuaaag

SEQ ID NO: 313609 - RNA, 19 nt, Artificial Sequence
  Description of Artificial Sequence: Synthetic oligonucleotide
uaauggggugauauccaag

SEQ ID NO: 313610 - RNA, 19 nt, Artificial Sequence
  Description of Artificial Sequence: Synthetic oligonucleotide
gaagguuugccacaaccuc

SEQ ID NO: 313611 - RNA, 19 nt, Artificial Sequence
  Description of Artificial Sequence: Synthetic oligonucleotide
gcugcuauagaugacagug

SEQ ID NO: 313612 - RNA, 19 nt, Artificial Sequence
  Description of Artificial Sequence: Synthetic oligonucleotide
agugugaaaggaucuccag

SEQ ID NO: 313613 - RNA, 19 nt, Artificial Sequence
  Description of Artificial Sequence: Synthetic oligonucleotide
accuuauugagucgguucu

SEQ ID NO: 313614 - RNA, 19 nt, Artificial Sequence
  Description of Artificial Sequence: Synthetic oligonucleotide
gauauaccauggcugugcc

SEQ ID NO: 313615 - RNA, 19 nt, Artificial Sequence
  Description of Artificial Sequence: Synthetic oligonucleotide
cuugcccacacuuuugaug

SEQ ID NO: 313616 - RNA, 19 nt, Artificial Sequence
  Description of Artificial Sequence: Synthetic oligonucleotide
gaaggagccaacuggcaac

SEQ ID NO: 313617 - RNA, 19 nt, Artificial Sequence
  Description of Artificial Sequence: Synthetic oligonucleotide
agaguggcaaagguccucc

SEQ ID NO: 313618 - RNA, 19 nt, Artificial Sequence
  Description of Artificial Sequence: Synthetic oligonucleotide
acuggcaacaccauucaag

SEQ ID NO: 313619 - RNA, 19 nt, Artificial Sequence
  Description of Artificial Sequence: Synthetic oligonucleotide
uguagaaacugaugggcau

SEQ ID NO: 313620 - RNA, 19 nt, Artificial Sequence
  Description of Artificial Sequence: Synthetic oligonucleotide
auacgacuagaaaggaccc

SEQ ID NO: 313621 - RNA, 19 nt, Artificial Sequence
  Description of Artificial Sequence: Synthetic oligonucleotide
uucauagagccgcaccgug

SEQ ID NO: 313622 - RNA, 19 nt, Artificial Sequence
  Description of Artificial Sequence: Synthetic oligonucleotide
gaacggaauguccucaaca

SEQ ID NO: 313623 - RNA, 19 nt, Artificial Sequence
  Description of Artificial Sequence: Synthetic oligonucleotide
accuuuugcggucacucag

SEQ ID NO: 313624 - RNA, 19 nt, Artificial Sequence
  Description of Artificial Sequence: Synthetic oligonucleotide
ucugcauaacuagggagcc

SEQ ID NO: 313625 - RNA, 19 nt, Artificial Sequence
  Description of Artificial Sequence: Synthetic oligonucleotide
uuuucagcucccaggaaau

SEQ ID NO: 313626 - RNA, 19 nt, Artificial Sequence
  Description of Artificial Sequence: Synthetic oligonucleotide
cuguuauuggccaaugcca

SEQ ID NO: 313627 - RNA, 19 nt, Artificial Sequence
  Description of Artificial Sequence: Synthetic oligonucleotide
caagauacgggcugagaug

SEQ ID NO: 313628 - RNA, 19 nt, Artificial Sequence
  Description of Artificial Sequence: Synthetic oligonucleotide
ugggcaaagaguggcaaag

SEQ ID NO: 313629 - RNA, 19 nt, Artificial Sequence
  Description of Artificial Sequence: Synthetic oligonucleotide
uuacacucagugcggagcu

SEQ ID NO: 313630 - RNA, 19 nt, Artificial Sequence
  Description of Artificial Sequence: Synthetic oligonucleotide
aacuugcaggagacgaggc

SEQ ID NO: 313631 - RNA, 19 nt, Artificial Sequence
  Description of Artificial Sequence: Synthetic oligonucleotide
ucuuggacuucaauacgac

SEQ ID NO: 313632 - RNA, 19 nt, Artificial Sequence
  Description of Artificial Sequence: Synthetic oligonucleotide
auauaccauggcugugccc

SEQ ID NO: 313633 - RNA, 19 nt, Artificial Sequence
  Description of Artificial Sequence: Synthetic oligonucleotide
uaucaugccguugaccgug

SEQ ID NO: 313634 - RNA, 19 nt, Artificial Sequence
  Description of Artificial Sequence: Synthetic oligonucleotide
caaaguucccuuccauggg

SEQ ID NO: 313635 - RNA, 19 nt, Artificial Sequence
  Description of Artificial Sequence: Synthetic oligonucleotide
cuucauaccacugccauca

SEQ ID NO: 313636 - RNA, 19 nt, Artificial Sequence
  Description of Artificial Sequence: Synthetic oligonucleotide
uuucagcccauuccuaggu

SEQ ID NO: 313637 - RNA, 19 nt, Artificial Sequence
  Description of Artificial Sequence: Synthetic oligonucleotide
ugggagauucguagagggg

SEQ ID NO: 313638 - RNA, 19 nt, Artificial Sequence
  Description of Artificial Sequence: Synthetic oligonucleotide
cuuucagcccauuccuagg

SEQ ID NO: 313639 - RNA, 19 nt, Artificial Sequence
  Description of Artificial Sequence: Synthetic oligonucleotide
uggggugauauccaagcaa

SEQ ID NO: 313640 - RNA, 19 nt, Artificial Sequence
  Description of Artificial Sequence: Synthetic oligonucleotide
uucuccgaaggaagucucg

SEQ ID NO: 313641 - RNA, 19 nt, Artificial Sequence
  Description of Artificial Sequence: Synthetic oligonucleotide
agaaagcaaaaggaagcuc

SEQ ID NO: 313642 - RNA, 19 nt, Artificial Sequence
  Description of Artificial Sequence: Synthetic oligonucleotide
uucguagaggggaaccgug

SEQ ID NO: 313643 - RNA, 19 nt, Artificial Sequence
  Description of Artificial Sequence: Synthetic oligonucleotide
gacacauauaguucaccuc

SEQ ID NO: 313644 - RNA, 19 nt, Artificial Sequence
  Description of Artificial Sequence: Synthetic oligonucleotide
ucuagugaacugguuuuag

SEQ ID NO: 313645 - RNA, 19 nt, Artificial Sequence
  Description of Artificial Sequence: Synthetic oligonucleotide
agaacggaauguccucaac

SEQ ID NO: 313646 - RNA, 19 nt, Artificial Sequence
  Description of Artificial Sequence: Synthetic oligonucleotide
caauacgacuagaaaggac

SEQ ID NO: 313647 - RNA, 19 nt, Artificial Sequence
  Description of Artificial Sequence: Synthetic oligonucleotide
aauugucaucauccaagau

SEQ ID NO: 313648 - RNA, 19 nt, Artificial Sequence
  Description of Artificial Sequence: Synthetic oligonucleotide
aacuuucuaucaggucacc

SEQ ID NO: 313649 - RNA, 19 nt, Artificial Sequence
  Description of Artificial Sequence: Synthetic oligonucleotide
uauugagucgguucugcau

SEQ ID NO: 313650 - RNA, 19 nt, Artificial Sequence
  Description of Artificial Sequence: Synthetic oligonucleotide
gauuacacucagugcggag

SEQ ID NO: 313651 - RNA, 19 nt, Artificial Sequence
  Description of Artificial Sequence: Synthetic oligonucleotide
gaccuuauugagucgguuc

SEQ ID NO: 313652 - RNA, 19 nt, Artificial Sequence
  Description of Artificial Sequence: Synthetic oligonucleotide
ucuaucaggucaccaucga

SEQ ID NO: 313653 - RNA, 19 nt, Artificial Sequence
  Description of Artificial Sequence: Synthetic oligonucleotide
acgugcacagagcugcuuc

SEQ ID NO: 313654 - RNA, 19 nt, Artificial Sequence
  Description of Artificial Sequence: Synthetic oligonucleotide
gagcaguacugcuagagaa

SEQ ID NO: 313655 - RNA, 19 nt, Artificial Sequence
  Description of Artificial Sequence: Synthetic oligonucleotide
acccacaaccuacauaaga

SEQ ID NO: 313656 - RNA, 19 nt, Artificial Sequence
  Description of Artificial Sequence: Synthetic oligonucleotide
ugcuauugaugcuggcaag

SEQ ID NO: 313657 - RNA, 19 nt, Artificial Sequence
  Description of Artificial Sequence: Synthetic oligonucleotide
auacuggaagaccacaaua

SEQ ID NO: 313658 - RNA, 19 nt, Artificial Sequence
  Description of Artificial Sequence: Synthetic oligonucleotide
agaccaaccuccuguaggu

SEQ ID NO: 313659 - RNA, 19 nt, Artificial Sequence
  Description of Artificial Sequence: Synthetic oligonucleotide
ucagcccauuccuaggucu

SEQ ID NO: 313660 - RNA, 19 nt, Artificial Sequence
  Description of Artificial Sequence: Synthetic oligonucleotide
ugaugaccuuauugagucg

SEQ ID NO: 313661 - RNA, 19 nt, Artificial Sequence
  Description of Artificial Sequence: Synthetic oligonucleotide
ggucagagcaagcaaagac

SEQ ID NO: 313662 - RNA, 19 nt, Artificial Sequence
  Description of Artificial Sequence: Synthetic oligonucleotide
gcgaauguggaguuucugg

SEQ ID NO: 313663 - RNA, 19 nt, Artificial Sequence
  Description of Artificial Sequence: Synthetic oligonucleotide
agcccuaucaugccguuga

SEQ ID NO: 313664 - RNA, 19 nt, Artificial Sequence
  Description of Artificial Sequence: Synthetic oligonucleotide
gguuauaccagcucucuga

SEQ ID NO: 313665 - RNA, 19 nt, Artificial Sequence
  Description of Artificial Sequence: Synthetic oligonucleotide
ggaauuauccaccuuccca

SEQ ID NO: 313666 - RNA, 19 nt, Artificial Sequence
  Description of Artificial Sequence: Synthetic oligonucleotide
gagggcagugccuuuagga

SEQ ID NO: 313667 - RNA, 19 nt, Artificial Sequence
  Description of Artificial Sequence: Synthetic oligonucleotide
acaauacgaccuugcuugg

SEQ ID NO: 313668 - RNA, 19 nt, Artificial Sequence
  Description of Artificial Sequence: Synthetic oligonucleotide
aagaguggcaaagguccuc

SEQ ID NO: 313669 - RNA, 19 nt, Artificial Sequence
  Description of Artificial Sequence: Synthetic oligonucleotide
uuggcuaauggauccgagu

SEQ ID NO: 313670 - RNA, 19 nt, Artificial Sequence
  Description of Artificial Sequence: Synthetic oligonucleotide
aggagugcucgaucuugcc

SEQ ID NO: 313671 - RNA, 19 nt, Artificial Sequence
  Description of Artificial Sequence: Synthetic oligonucleotide
ucuucuccgaaggaagucu

SEQ ID NO: 313672 - RNA, 19 nt, Artificial Sequence
  Description of Artificial Sequence: Synthetic oligonucleotide
agaaggagccaacuggcaa

SEQ ID NO: 313673 - RNA, 19 nt, Artificial Sequence
  Description of Artificial Sequence: Synthetic oligonucleotide
uguugagcccaaaguagaa

SEQ ID NO: 313674 - RNA, 19 nt, Artificial Sequence
  Description of Artificial Sequence: Synthetic oligonucleotide
uucucagaggcgagagaag

SEQ ID NO: 313675 - RNA, 19 nt, Artificial Sequence
  Description of Artificial Sequence: Synthetic oligonucleotide
ugcauaacuagggagccau

SEQ ID NO: 313676 - RNA, 19 nt, Artificial Sequence
  Description of Artificial Sequence: Synthetic oligonucleotide
cucgugaggagcaguacug

SEQ ID NO: 313677 - RNA, 19 nt, Artificial Sequence
  Description of Artificial Sequence: Synthetic oligonucleotide
uuguuguagugauuacacu

SEQ ID NO: 313678 - RNA, 19 nt, Artificial Sequence
  Description of Artificial Sequence: Synthetic oligonucleotide
cucgauguugagcccaaag

SEQ ID NO: 313679 - RNA, 19 nt, Artificial Sequence
  Description of Artificial Sequence: Synthetic oligonucleotide
uacugcuagagaauagcuu

SEQ ID NO: 313680 - RNA, 19 nt, Artificial Sequence
  Description of Artificial Sequence: Synthetic oligonucleotide
uccccgagacaaaagggcu

SEQ ID NO: 313681 - RNA, 19 nt, Artificial Sequence
  Description of Artificial Sequence: Synthetic oligonucleotide
ggauggaaaaggaugggag

SEQ ID NO: 313682 - RNA, 19 nt, Artificial Sequence
  Description of Artificial Sequence: Synthetic oligonucleotide
ucguagaggggaaccgugc

SEQ ID NO: 313683 - RNA, 19 nt, Artificial Sequence
  Description of Artificial Sequence: Synthetic oligonucleotide
auguggaguuucuggaucu

SEQ ID NO: 313684 - RNA, 19 nt, Artificial Sequence
  Description of Artificial Sequence: Synthetic oligonucleotide
aacugguuuuaguuauaaa

SEQ ID NO: 313685 - RNA, 19 nt, Artificial Sequence
  Description of Artificial Sequence: Synthetic oligonucleotide
cacugagcgcaugaggucg

SEQ ID NO: 313686 - RNA, 19 nt, Artificial Sequence
  Description of Artificial Sequence: Synthetic oligonucleotide
gagucgguucugcaugucc

SEQ ID NO: 313687 - RNA, 19 nt, Artificial Sequence
  Description of Artificial Sequence: Synthetic oligonucleotide
uuaggacgggucaggaaaa

SEQ ID NO: 313688 - RNA, 19 nt, Artificial Sequence
  Description of Artificial Sequence: Synthetic oligonucleotide
ucaggauagccaucugagu

SEQ ID NO: 313689 - RNA, 19 nt, Artificial Sequence
  Description of Artificial Sequence: Synthetic oligonucleotide
guuccccgagacaaaaggg

SEQ ID NO: 313690 - RNA, 19 nt, Artificial Sequence
  Description of Artificial Sequence: Synthetic oligonucleotide
ugggagcuucaagauacgg

SEQ ID NO: 313691 - RNA, 19 nt, Artificial Sequence
  Description of Artificial Sequence: Synthetic oligonucleotide
agcacugagcgcaugaggu

SEQ ID NO: 313692 - RNA, 19 nt, Artificial Sequence
  Description of Artificial Sequence: Synthetic oligonucleotide
cauccaagauuuccacugc

SEQ ID NO: 313693 - RNA, 19 nt, Artificial Sequence
  Description of Artificial Sequence: Synthetic oligonucleotide
gaaccgugcgaauguggag

SEQ ID NO: 313694 - RNA, 19 nt, Artificial Sequence
  Description of Artificial Sequence: Synthetic oligonucleotide
acgaccuugcuugggcucc

SEQ ID NO: 313695 - RNA, 19 nt, Artificial Sequence
  Description of Artificial Sequence: Synthetic oligonucleotide
gaugacagugggccgguca

SEQ ID NO: 313696 - RNA, 19 nt, Artificial Sequence
  Description of Artificial Sequence: Synthetic oligonucleotide
aagccugucucgauguuga

SEQ ID NO: 313697 - RNA, 19 nt, Artificial Sequence
  Description of Artificial Sequence: Synthetic oligonucleotide
gucgccucccgcuucauac

SEQ ID NO: 313698 - RNA, 19 nt, Artificial Sequence
  Description of Artificial Sequence: Synthetic oligonucleotide
uucgcucagugugaaagga

SEQ ID NO: 313699 - RNA, 19 nt, Artificial Sequence
  Description of Artificial Sequence: Synthetic oligonucleotide
ugaguugagaggacacaua

SEQ ID NO: 313700 - RNA, 19 nt, Artificial Sequence
  Description of Artificial Sequence: Synthetic oligonucleotide
uuaaagucucgggcaaucu

SEQ ID NO: 313701 - RNA, 19 nt, Artificial Sequence
  Description of Artificial Sequence: Synthetic oligonucleotide
acgacuagaaaggacccca

SEQ ID NO: 313702 - RNA, 19 nt, Artificial Sequence
  Description of Artificial Sequence: Synthetic oligonucleotide
uaccucaaccuccccacac

SEQ ID NO: 313703 - RNA, 19 nt, Artificial Sequence
  Description of Artificial Sequence: Synthetic oligonucleotide
agugcggagcuccuuuucu

SEQ ID NO: 313704 - RNA, 19 nt, Artificial Sequence
  Description of Artificial Sequence: Synthetic oligonucleotide
aagacguuggugguagaaa

SEQ ID NO: 313705 - RNA, 19 nt, Artificial Sequence
  Description of Artificial Sequence: Synthetic oligonucleotide
uucuuagauucuacuuuau

SEQ ID NO: 313706 - RNA, 19 nt, Artificial Sequence
  Description of Artificial Sequence: Synthetic oligonucleotide
ggauauaccauggcugugc

SEQ ID NO: 313707 - RNA, 19 nt, Artificial Sequence
  Description of Artificial Sequence: Synthetic oligonucleotide
guagaggacaaagcaugag

SEQ ID NO: 313708 - RNA, 19 nt, Artificial Sequence
  Description of Artificial Sequence: Synthetic oligonucleotide
ggggugauauccaagcaag

SEQ ID NO: 313709 - RNA, 19 nt, Artificial Sequence
  Description of Artificial Sequence: Synthetic oligonucleotide
aggaugggagcuucaagau

SEQ ID NO: 313710 - RNA, 19 nt, Artificial Sequence
  Description of Artificial Sequence: Synthetic oligonucleotide
caucauacugaagguuugc

SEQ ID NO: 313711 - RNA, 19 nt, Artificial Sequence
  Description of Artificial Sequence: Synthetic oligonucleotide
ggcauacucauucuguaga

SEQ ID NO: 313712 - RNA, 19 nt, Artificial Sequence
  Description of Artificial Sequence: Synthetic oligonucleotide
cacgacuuugaugagguca

SEQ ID NO: 313713 - RNA, 19 nt, Artificial Sequence
  Description of Artificial Sequence: Synthetic oligonucleotide
aacuaacaaccaauucaca

SEQ ID NO: 313714 - RNA, 19 nt, Artificial Sequence
  Description of Artificial Sequence: Synthetic oligonucleotide
agauucuacuuuauuuggu

SEQ ID NO: 313715 - RNA, 19 nt, Artificial Sequence
  Description of Artificial Sequence: Synthetic oligonucleotide
acggaauguccucaacacu

SEQ ID NO: 313716 - RNA, 19 nt, Artificial Sequence
  Description of Artificial Sequence: Synthetic oligonucleotide
uaccagcucucugacagug

SEQ ID NO: 313717 - RNA, 19 nt, Artificial Sequence
  Description of Artificial Sequence: Synthetic oligonucleotide
gaauacuggaagaccacaa

SEQ ID NO: 313718 - RNA, 19 nt, Artificial Sequence
  Description of Artificial Sequence: Synthetic oligonucleotide
uccccuaauggggugauau

SEQ ID NO: 313719 - RNA, 19 nt, Artificial Sequence
  Description of Artificial Sequence: Synthetic oligonucleotide
cagccgauggccugauagg

SEQ ID NO: 313720 - RNA, 19 nt, Artificial Sequence
  Description of Artificial Sequence: Synthetic oligonucleotide
agguuauaccagcucucug

SEQ ID NO: 313721 - RNA, 19 nt, Artificial Sequence
  Description of Artificial Sequence: Synthetic oligonucleotide
uacgacuagaaaggacccc

SEQ ID NO: 313722 - RNA, 19 nt, Artificial Sequence
  Description of Artificial Sequence: Synthetic oligonucleotide
ggacgggucaggaaaagag

SEQ ID NO: 313723 - RNA, 19 nt, Artificial Sequence
  Description of Artificial Sequence: Synthetic oligonucleotide
gggagcuucaagauacggg

SEQ ID NO: 313724 - RNA, 19 nt, Artificial Sequence
  Description of Artificial Sequence: Synthetic oligonucleotide
aggggaaccgugcgaaugu

SEQ ID NO: 313725 - RNA, 19 nt, Artificial Sequence
  Description of Artificial Sequence: Synthetic oligonucleotide
guggcuagggaaaagccuc

SEQ ID NO: 313726 - RNA, 19 nt, Artificial Sequence
  Description of Artificial Sequence: Synthetic oligonucleotide
uugagucgguucugcaugu

SEQ ID NO: 313727 - RNA, 19 nt, Artificial Sequence
  Description of Artificial Sequence: Synthetic oligonucleotide
gguaucacacacauacgug

SEQ ID NO: 313728 - RNA, 19 nt, Artificial Sequence
  Description of Artificial Sequence: Synthetic oligonucleotide
gaccacaauacgaccuugc

SEQ ID NO: 313729 - RNA, 19 nt, Artificial Sequence
  Description of Artificial Sequence: Synthetic oligonucleotide
guagagggccaugauguug

SEQ ID NO: 313730 - RNA, 19 nt, Artificial Sequence
  Description of Artificial Sequence: Synthetic oligonucleotide
auguugagcccaaaguaga

SEQ ID NO: 313731 - RNA, 19 nt, Artificial Sequence
  Description of Artificial Sequence: Synthetic oligonucleotide
uagaggggaaccgugcgaa

SEQ ID NO: 313732 - RNA, 19 nt, Artificial Sequence
  Description of Artificial Sequence: Synthetic oligonucleotide
ugaacugguuuuaguuaua

SEQ ID NO: 313733 - RNA, 19 nt, Artificial Sequence
  Description of Artificial Sequence: Synthetic oligonucleotide
uucaagauacgggcugaga

SEQ ID NO: 313734 - RNA, 19 nt, Artificial Sequence
  Description of Artificial Sequence: Synthetic oligonucleotide
caguugggauuaaagucuc

SEQ ID NO: 313735 - RNA, 19 nt, Artificial Sequence
  Description of Artificial Sequence: Synthetic oligonucleotide
auacgaccuugcuugggcu

SEQ ID NO: 313736 - RNA, 19 nt, Artificial Sequence
  Description of Artificial Sequence: Synthetic oligonucleotide
gcaaagacguuggugguag

SEQ ID NO: 313737 - RNA, 19 nt, Artificial Sequence
  Description of Artificial Sequence: Synthetic oligonucleotide
gaggggaaccgugcgaaug

SEQ ID NO: 313738 - RNA, 19 nt, Artificial Sequence
  Description of Artificial Sequence: Synthetic oligonucleotide
ucuccgaaggaagucucgu

SEQ ID NO: 313739 - RNA, 19 nt, Artificial Sequence
  Description of Artificial Sequence: Synthetic oligonucleotide
guauguguuggggucuuug

SEQ ID NO: 313740 - RNA, 19 nt, Artificial Sequence
  Description of Artificial Sequence: Synthetic oligonucleotide
aagcauugagacacuuccu

SEQ ID NO: 313741 - RNA, 19 nt, Artificial Sequence
  Description of Artificial Sequence: Synthetic oligonucleotide
cacagccccuuucacuucc

SEQ ID NO: 313742 - RNA, 19 nt, Artificial Sequence
  Description of Artificial Sequence: Synthetic oligonucleotide
guuauuggccaaugccaga

SEQ ID NO: 313743 - RNA, 19 nt, Artificial Sequence
  Description of Artificial Sequence: Synthetic oligonucleotide
caugaguguggguaucaca

SEQ ID NO: 313744 - RNA, 19 nt, Artificial Sequence
  Description of Artificial Sequence: Synthetic oligonucleotide
cccuaauggggugauaucc

SEQ ID NO: 313745 - RNA, 19 nt, Artificial Sequence
  Description of Artificial Sequence: Synthetic oligonucleotide
ucgugaggagcaguacugc

SEQ ID NO: 313746 - RNA, 19 nt, Artificial Sequence
  Description of Artificial Sequence: Synthetic oligonucleotide
ugcgaauguggaguuucug

SEQ ID NO: 313747 - RNA, 19 nt, Artificial Sequence
  Description of Artificial Sequence: Synthetic oligonucleotide
ggagugcucgaucuugccc

SEQ ID NO: 313748 - RNA, 19 nt, Artificial Sequence
  Description of Artificial Sequence: Synthetic oligonucleotide
augccagacugucaggaua

SEQ ID NO: 313749 - RNA, 19 nt, Artificial Sequence
  Description of Artificial Sequence: Synthetic oligonucleotide
ugcugcuauagaugacagu

SEQ ID NO: 313750 - RNA, 19 nt, Artificial Sequence
  Description of Artificial Sequence: Synthetic oligonucleotide
aaggcauuuucagcuccca

SEQ ID NO: 313751 - RNA, 19 nt, Artificial Sequence
  Description of Artificial Sequence: Synthetic oligonucleotide
ugccuuuaggacgggucag

SEQ ID NO: 313752 - RNA, 19 nt, Artificial Sequence
  Description of Artificial Sequence: Synthetic oligonucleotide
agcucucacuucaagacaa

SEQ ID NO: 313753 - RNA, 19 nt, Artificial Sequence
  Description of Artificial Sequence: Synthetic oligonucleotide
cucucacuucaagacaaug

SEQ ID NO: 313754 - RNA, 19 nt, Artificial Sequence
  Description of Artificial Sequence: Synthetic oligonucleotide
caauacgaccuugcuuggg

SEQ ID NO: 313755 - RNA, 19 nt, Artificial Sequence
  Description of Artificial Sequence: Synthetic oligonucleotide
gauguucucagaggcgaga

SEQ ID NO: 313756 - RNA, 19 nt, Artificial Sequence
  Description of Artificial Sequence: Synthetic oligonucleotide
uaagacaguagaggacaaa

SEQ ID NO: 313757 - RNA, 19 nt, Artificial Sequence
  Description of Artificial Sequence: Synthetic oligonucleotide
uagaguacacagccccuuu

SEQ ID NO: 313758 - RNA, 19 nt, Artificial Sequence
  Description of Artificial Sequence: Synthetic oligonucleotide
gugccuuuaggacggguca

SEQ ID NO: 313759 - RNA, 19 nt, Artificial Sequence
  Description of Artificial Sequence: Synthetic oligonucleotide
gucaccaucgaugaagccu

SEQ ID NO: 313760 - RNA, 19 nt, Artificial Sequence
  Description of Artificial Sequence: Synthetic oligonucleotide
acauauaguucaccuccuu

SEQ ID NO: 313761 - RNA, 19 nt, Artificial Sequence
  Description of Artificial Sequence: Synthetic oligonucleotide
auucguagaggggaaccgu

SEQ ID NO: 313762 - RNA, 19 nt, Artificial Sequence
  Description of Artificial Sequence: Synthetic oligonucleotide
cuaauggggugauauccaa

SEQ ID NO: 313763 - RNA, 19 nt, Artificial Sequence
  Description of Artificial Sequence: Synthetic oligonucleotide
ucgcucagugugaaaggau

SEQ ID NO: 313764 - RNA, 19 nt, Artificial Sequence
  Description of Artificial Sequence: Synthetic oligonucleotide
uacgaccuugcuugggcuc

SEQ ID NO: 313765 - RNA, 19 nt, Artificial Sequence
  Description of Artificial Sequence: Synthetic oligonucleotide
cuccgaaggaagucucgug

SEQ ID NO: 313766 - RNA, 19 nt, Artificial Sequence
  Description of Artificial Sequence: Synthetic oligonucleotide
gggagauucguagagggga

SEQ ID NO: 313767 - RNA, 19 nt, Artificial Sequence
  Description of Artificial Sequence: Synthetic oligonucleotide
uggcugaaauuuugccgga

SEQ ID NO: 313768 - RNA, 19 nt, Artificial Sequence
  Description of Artificial Sequence: Synthetic oligonucleotide
aguugggauuaaagucucg

SEQ ID NO: 313769 - RNA, 19 nt, Artificial Sequence
  Description of Artificial Sequence: Synthetic oligonucleotide
agucgguucugcaugucca

SEQ ID NO: 313770 - RNA, 19 nt, Artificial Sequence
  Description of Artificial Sequence: Synthetic oligonucleotide
uucgaccauagaguacaca

SEQ ID NO: 313771 - RNA, 19 nt, Artificial Sequence
  Description of Artificial Sequence: Synthetic oligonucleotide
cucagugugaaaggaucuc

SEQ ID NO: 313772 - RNA, 19 nt, Artificial Sequence
  Description of Artificial Sequence: Synthetic oligonucleotide
gaggacacauauaguucac

SEQ ID NO: 313773 - RNA, 19 nt, Artificial Sequence
  Description of Artificial Sequence: Synthetic oligonucleotide
aagucucgugaggagcagu

SEQ ID NO: 313774 - RNA, 19 nt, Artificial Sequence
  Description of Artificial Sequence: Synthetic oligonucleotide
agauuuccacugcacucau

SEQ ID NO: 313775 - RNA, 19 nt, Artificial Sequence
  Description of Artificial Sequence: Synthetic oligonucleotide
cuuuugcggucacucagca

SEQ ID NO: 313776 - RNA, 19 nt, Artificial Sequence
  Description of Artificial Sequence: Synthetic oligonucleotide
uuuugcggucacucagcaa

SEQ ID NO: 313777 - RNA, 19 nt, Artificial Sequence
  Description of Artificial Sequence: Synthetic oligonucleotide
gaauagcuugcuggagcug

SEQ ID NO: 313778 - RNA, 19 nt, Artificial Sequence
  Description of Artificial Sequence: Synthetic oligonucleotide
agcaagcaaagacguuggu

SEQ ID NO: 313779 - RNA, 19 nt, Artificial Sequence
  Description of Artificial Sequence: Synthetic oligonucleotide
aagucaccuuuugcgguca

SEQ ID NO: 313780 - RNA, 19 nt, Artificial Sequence
  Description of Artificial Sequence: Synthetic oligonucleotide
ggucucagagcaguugugc

SEQ ID NO: 313781 - RNA, 19 nt, Artificial Sequence
  Description of Artificial Sequence: Synthetic oligonucleotide
uacgggcugagaugucugu

SEQ ID NO: 313782 - RNA, 19 nt, Artificial Sequence
  Description of Artificial Sequence: Synthetic oligonucleotide
gacguuggugguagaaaga

SEQ ID NO: 313783 - RNA, 19 nt, Artificial Sequence
  Description of Artificial Sequence: Synthetic oligonucleotide
guagaggggaaccgugcga

SEQ ID NO: 313784 - RNA, 19 nt, Artificial Sequence
  Description of Artificial Sequence: Synthetic oligonucleotide
ggguaucacacacauacgu

SEQ ID NO: 313785 - RNA, 19 nt, Artificial Sequence
  Description of Artificial Sequence: Synthetic oligonucleotide
accgugcuauugaugcugg

SEQ ID NO: 313786 - RNA, 19 nt, Artificial Sequence
  Description of Artificial Sequence: Synthetic oligonucleotide
cucccaggaaauugucauc

SEQ ID NO: 313787 - RNA, 19 nt, Artificial Sequence
  Description of Artificial Sequence: Synthetic oligonucleotide
acaaagcaugagugugggu

SEQ ID NO: 313788 - RNA, 19 nt, Artificial Sequence
  Description of Artificial Sequence: Synthetic oligonucleotide
agguuugccacaaccuccu

SEQ ID NO: 313789 - RNA, 19 nt, Artificial Sequence
  Description of Artificial Sequence: Synthetic oligonucleotide
uccaagcaagccacuucau

SEQ ID NO: 313790 - RNA, 19 nt, Artificial Sequence
  Description of Artificial Sequence: Synthetic oligonucleotide
gugcggagcuccuuuucug

SEQ ID NO: 313791 - RNA, 19 nt, Artificial Sequence
  Description of Artificial Sequence: Synthetic oligonucleotide
caaagucaccuuuugcggu

SEQ ID NO: 313792 - RNA, 19 nt, Artificial Sequence
  Description of Artificial Sequence: Synthetic oligonucleotide
cacauacgugcacagagcu

SEQ ID NO: 313793 - RNA, 19 nt, Artificial Sequence
  Description of Artificial Sequence: Synthetic oligonucleotide
auagaguacacagccccuu

SEQ ID NO: 313794 - RNA, 19 nt, Artificial Sequence
  Description of Artificial Sequence: Synthetic oligonucleotide
ccuuuugcggucacucagc

SEQ ID NO: 313795 - RNA, 19 nt, Artificial Sequence
  Description of Artificial Sequence: Synthetic oligonucleotide
gauacgggcugagaugucu

SEQ ID NO: 313796 - RNA, 19 nt, Artificial Sequence
  Description of Artificial Sequence: Synthetic oligonucleotide
augaaacccucucgacccu

SEQ ID NO: 313797 - RNA, 19 nt, Artificial Sequence
  Description of Artificial Sequence: Synthetic oligonucleotide
caacuggcaacaccauuca

SEQ ID NO: 313798 - RNA, 19 nt, Artificial Sequence
  Description of Artificial Sequence: Synthetic oligonucleotide
agcaugaguguggguauca

SEQ ID NO: 313799 - RNA, 19 nt, Artificial Sequence
  Description of Artificial Sequence: Synthetic oligonucleotide
gagauucguagaggggaac

SEQ ID NO: 313800 - RNA, 19 nt, Artificial Sequence
  Description of Artificial Sequence: Synthetic oligonucleotide
ugcggucacucagcaagcc

SEQ ID NO: 313801 - RNA, 19 nt, Artificial Sequence
  Description of Artificial Sequence: Synthetic oligonucleotide
caagacaaugaaacccucu

SEQ ID NO: 313802 - RNA, 19 nt, Artificial Sequence
  Description of Artificial Sequence: Synthetic oligonucleotide
ggcuaauggauccgaguca

SEQ ID NO: 313803 - RNA, 19 nt, Artificial Sequence
  Description of Artificial Sequence: Synthetic oligonucleotide
cuuggggcggcugauaucu

SEQ ID NO: 313804 - RNA, 19 nt, Artificial Sequence
  Description of Artificial Sequence: Synthetic oligonucleotide
acauacgugcacagagcug

SEQ ID NO: 313805 - RNA, 19 nt, Artificial Sequence
  Description of Artificial Sequence: Synthetic oligonucleotide
cagaaacuaacaaccaauu

SEQ ID NO: 313806 - RNA, 19 nt, Artificial Sequence
  Description of Artificial Sequence: Synthetic oligonucleotide
cuuccacgacuuugaugag

SEQ ID NO: 313807 - RNA, 19 nt, Artificial Sequence
  Description of Artificial Sequence: Synthetic oligonucleotide
cuagugaacugguuuuagu

SEQ ID NO: 313808 - RNA, 19 nt, Artificial Sequence
  Description of Artificial Sequence: Synthetic oligonucleotide
cugcucucaaaggugguca

SEQ ID NO: 313809 - RNA, 19 nt, Artificial Sequence
  Description of Artificial Sequence: Synthetic oligonucleotide
auaagacaguagaggacaa

SEQ ID NO: 313810 - RNA, 19 nt, Artificial Sequence
  Description of Artificial Sequence: Synthetic oligonucleotide
ggagcaguacugcuagaga

SEQ ID NO: 313811 - RNA, 19 nt, Artificial Sequence
  Description of Artificial Sequence: Synthetic oligonucleotide
guugagcccaaaguagaaa

SEQ ID NO: 313812 - RNA, 19 nt, Artificial Sequence
  Description of Artificial Sequence: Synthetic oligonucleotide
ugaccuuauugagucgguu

SEQ ID NO: 313813 - RNA, 19 nt, Artificial Sequence
  Description of Artificial Sequence: Synthetic oligonucleotide
ucgguucugcauguccaac

SEQ ID NO: 313814 - RNA, 19 nt, Artificial Sequence
  Description of Artificial Sequence: Synthetic oligonucleotide
gagguuauaccagcucucu

SEQ ID NO: 313815 - RNA, 19 nt, Artificial Sequence
  Description of Artificial Sequence: Synthetic oligonucleotide
aggucucuagugaacuggu

SEQ ID NO: 313816 - RNA, 19 nt, Artificial Sequence
  Description of Artificial Sequence: Synthetic oligonucleotide
ugcagucgccucccgcuuc

SEQ ID NO: 313817 - RNA, 19 nt, Artificial Sequence
  Description of Artificial Sequence: Synthetic oligonucleotide
cagaaggagccaacuggca

SEQ ID NO: 313818 - RNA, 19 nt, Artificial Sequence
  Description of Artificial Sequence: Synthetic oligonucleotide
cagcccauuccuaggucuc

SEQ ID NO: 313819 - RNA, 19 nt, Artificial Sequence
  Description of Artificial Sequence: Synthetic oligonucleotide
auacgggcugagaugucug

SEQ ID NO: 313820 - RNA, 19 nt, Artificial Sequence
  Description of Artificial Sequence: Synthetic oligonucleotide
augggagcuucaagauacg

SEQ ID NO: 313821 - RNA, 19 nt, Artificial Sequence
  Description of Artificial Sequence: Synthetic oligonucleotide
aagcaccgaccccugugua

SEQ ID NO: 313822 - RNA, 19 nt, Artificial Sequence
  Description of Artificial Sequence: Synthetic oligonucleotide
ggaaccgugcgaaugugga

SEQ ID NO: 313823 - RNA, 19 nt, Artificial Sequence
  Description of Artificial Sequence: Synthetic oligonucleotide
ccaauggcacaaagcgggg

SEQ ID NO: 313824 - RNA, 19 nt, Artificial Sequence
  Description of Artificial Sequence: Synthetic oligonucleotide
ugagcgcaugaggucgccc

SEQ ID NO: 313825 - RNA, 19 nt, Artificial Sequence
  Description of Artificial Sequence: Synthetic oligonucleotide
ugggccggucagagcaagc

SEQ ID NO: 313826 - RNA, 19 nt, Artificial Sequence
  Description of Artificial Sequence: Synthetic oligonucleotide
ccggucagagcaagcaaag

SEQ ID NO: 313827 - RNA, 19 nt, Artificial Sequence
  Description of Artificial Sequence: Synthetic oligonucleotide
ggcaaagaguggcaaaggu

SEQ ID NO: 313828 - RNA, 19 nt, Artificial Sequence
  Description of Artificial Sequence: Synthetic oligonucleotide
ccuaauggggugauaucca

SEQ ID NO: 313829 - RNA, 19 nt, Artificial Sequence
  Description of Artificial Sequence: Synthetic oligonucleotide
guacugcuagagaauagcu

SEQ ID NO: 313830 - RNA, 19 nt, Artificial Sequence
  Description of Artificial Sequence: Synthetic oligonucleotide
aagucucgggcaaucucuu

SEQ ID NO: 313831 - RNA, 19 nt, Artificial Sequence
  Description of Artificial Sequence: Synthetic oligonucleotide
gggaaccgugcgaaugugg

SEQ ID NO: 313832 - RNA, 19 nt, Artificial Sequence
  Description of Artificial Sequence: Synthetic oligonucleotide
gaccaaccuccuguaggug

SEQ ID NO: 313833 - RNA, 19 nt, Artificial Sequence
  Description of Artificial Sequence: Synthetic oligonucleotide
accgugcgaauguggaguu

SEQ ID NO: 313834 - RNA, 19 nt, Artificial Sequence
  Description of Artificial Sequence: Synthetic oligonucleotide
cucccgcuucauaccacug

SEQ ID NO: 313835 - RNA, 19 nt, Artificial Sequence
  Description of Artificial Sequence: Synthetic oligonucleotide
aguugagaggacacauaua

SEQ ID NO: 313836 - RNA, 19 nt, Artificial Sequence
  Description of Artificial Sequence: Synthetic oligonucleotide
caucaauggugccaauggu

SEQ ID NO: 313837 - RNA, 19 nt, Artificial Sequence
  Description of Artificial Sequence: Synthetic oligonucleotide
ccccuuggucuucagguag

SEQ ID NO: 313838 - RNA, 19 nt, Artificial Sequence
  Description of Artificial Sequence: Synthetic oligonucleotide
caccgaccccuguguaggg

SEQ ID NO: 313839 - RNA, 19 nt, Artificial Sequence
  Description of Artificial Sequence: Synthetic oligonucleotide
agucucgugaggagcagua

SEQ ID NO: 313840 - RNA, 19 nt, Artificial Sequence
  Description of Artificial Sequence: Synthetic oligonucleotide
augaccuuauugagucggu

SEQ ID NO: 313841 - RNA, 19 nt, Artificial Sequence
  Description of Artificial Sequence: Synthetic oligonucleotide
cggcugauaucuaggaaac

SEQ ID NO: 313842 - RNA, 19 nt, Artificial Sequence
  Description of Artificial Sequence: Synthetic oligonucleotide
cacucauccaguugggauu

SEQ ID NO: 313843 - RNA, 19 nt, Artificial Sequence
  Description of Artificial Sequence: Synthetic oligonucleotide
agauacgggcugagauguc

SEQ ID NO: 313844 - RNA, 19 nt, Artificial Sequence
  Description of Artificial Sequence: Synthetic oligonucleotide
gucgguucugcauguccaa

SEQ ID NO: 313845 - RNA, 19 nt, Artificial Sequence
  Description of Artificial Sequence: Synthetic oligonucleotide
ggcugaaauuuugccggag

SEQ ID NO: 313846 - RNA, 19 nt, Artificial Sequence
  Description of Artificial Sequence: Synthetic oligonucleotide
gcuucauaccacugccauc

SEQ ID NO: 313847 - RNA, 19 nt, Artificial Sequence
  Description of Artificial Sequence: Synthetic oligonucleotide
agaggggaaccgugcgaau

SEQ ID NO: 313848 - RNA, 19 nt, Artificial Sequence
  Description of Artificial Sequence: Synthetic oligonucleotide
cagugcggagcuccuuuuc

SEQ ID NO: 313849 - RNA, 19 nt, Artificial Sequence
  Description of Artificial Sequence: Synthetic oligonucleotide
caauggcacaaagcgggga

SEQ ID NO: 313850 - RNA, 19 nt, Artificial Sequence
  Description of Artificial Sequence: Synthetic oligonucleotide
ggaugggagcuucaagaua

SEQ ID NO: 313851 - RNA, 19 nt, Artificial Sequence
  Description of Artificial Sequence: Synthetic oligonucleotide
gccugucucgauguugagc

SEQ ID NO: 313852 - RNA, 19 nt, Artificial Sequence
  Description of Artificial Sequence: Synthetic oligonucleotide
ugagucgguucugcauguc

SEQ ID NO: 313853 - RNA, 19 nt, Artificial Sequence
  Description of Artificial Sequence: Synthetic oligonucleotide
uguccccuaauggggugau

SEQ ID NO: 313854 - RNA, 19 nt, Artificial Sequence
  Description of Artificial Sequence: Synthetic oligonucleotide
agcccauuccuaggucucu

SEQ ID NO: 313855 - RNA, 19 nt, Artificial Sequence
  Description of Artificial Sequence: Synthetic oligonucleotide
gaugggcaugaagcacuuc

SEQ ID NO: 313856 - RNA, 19 nt, Artificial Sequence
  Description of Artificial Sequence: Synthetic oligonucleotide
cuaucaugccguugaccgu

SEQ ID NO: 313857 - RNA, 19 nt, Artificial Sequence
  Description of Artificial Sequence: Synthetic oligonucleotide
gaugaagccuguggcuggu

SEQ ID NO: 313858 - RNA, 19 nt, Artificial Sequence
  Description of Artificial Sequence: Synthetic oligonucleotide
cuaccucaaccuccccaca

SEQ ID NO: 313859 - RNA, 19 nt, Artificial Sequence
  Description of Artificial Sequence: Synthetic oligonucleotide
gagccgcaccgugcuauug

SEQ ID NO: 313860 - RNA, 19 nt, Artificial Sequence
  Description of Artificial Sequence: Synthetic oligonucleotide
gugggccggucagagcaag

SEQ ID NO: 313861 - RNA, 19 nt, Artificial Sequence
  Description of Artificial Sequence: Synthetic oligonucleotide
gguggcuagggaaaagccu

SEQ ID NO: 313862 - RNA, 19 nt, Artificial Sequence
  Description of Artificial Sequence: Synthetic oligonucleotide
auagagccgcaccgugcua

SEQ ID NO: 313863 - RNA, 19 nt, Artificial Sequence
  Description of Artificial Sequence: Synthetic oligonucleotide
cugagcgcaugaggucgcc

SEQ ID NO: 313864 - RNA, 19 nt, Artificial Sequence
  Description of Artificial Sequence: Synthetic oligonucleotide
ggcuagggaaaagccuccc

SEQ ID NO: 313865 - RNA, 19 nt, Artificial Sequence
  Description of Artificial Sequence: Synthetic oligonucleotide
ggagauucguagaggggaa

SEQ ID NO: 313866 - RNA, 19 nt, Artificial Sequence
  Description of Artificial Sequence: Synthetic oligonucleotide
cccuaucaugccguugacc

SEQ ID NO: 313867 - RNA, 19 nt, Artificial Sequence
  Description of Artificial Sequence: Synthetic oligonucleotide
gucuuucgcucagugugaa

SEQ ID NO: 313868 - RNA, 19 nt, Artificial Sequence
  Description of Artificial Sequence: Synthetic oligonucleotide
ggaccccaaagcauugaga

SEQ ID NO: 313869 - RNA, 19 nt, Artificial Sequence
  Description of Artificial Sequence: Synthetic oligonucleotide
auacgugcacagagcugcu

SEQ ID NO: 313870 - RNA, 19 nt, Artificial Sequence
  Description of Artificial Sequence: Synthetic oligonucleotide
gcccagauucugcauaacu

SEQ ID NO: 313871 - RNA, 19 nt, Artificial Sequence
  Description of Artificial Sequence: Synthetic oligonucleotide
cgugcgaauguggaguuuc

SEQ ID NO: 313872 - RNA, 19 nt, Artificial Sequence
  Description of Artificial Sequence: Synthetic oligonucleotide
uacgugcacagagcugcuu

SEQ ID NO: 313873 - RNA, 19 nt, Artificial Sequence
  Description of Artificial Sequence: Synthetic oligonucleotide
cugcauaacuagggagcca

SEQ ID NO: 313874 - RNA, 19 nt, Artificial Sequence
  Description of Artificial Sequence: Synthetic oligonucleotide
agucgccucccgcuucaua

SEQ ID NO: 313875 - RNA, 19 nt, Artificial Sequence
  Description of Artificial Sequence: Synthetic oligonucleotide
ggcaaagguccuccccaga

SEQ ID NO: 313876 - RNA, 19 nt, Artificial Sequence
  Description of Artificial Sequence: Synthetic oligonucleotide
gcaugaguguggguaucac

SEQ ID NO: 313877 - RNA, 19 nt, Artificial Sequence
  Description of Artificial Sequence: Synthetic oligonucleotide
cagcccuaucaugccguug

SEQ ID NO: 313878 - RNA, 19 nt, Artificial Sequence
  Description of Artificial Sequence: Synthetic oligonucleotide
acgaggcugagggcauacu

SEQ ID NO: 313879 - RNA, 19 nt, Artificial Sequence
  Description of Artificial Sequence: Synthetic oligonucleotide
gccggucagagcaagcaaa

SEQ ID NO: 313880 - RNA, 19 nt, Artificial Sequence
  Description of Artificial Sequence: Synthetic oligonucleotide
cuuggugguccaaggugau

SEQ ID NO: 313881 - RNA, 19 nt, Artificial Sequence
  Description of Artificial Sequence: Synthetic oligonucleotide
cccauuaaauucgaccaua

SEQ ID NO: 313882 - RNA, 19 nt, Artificial Sequence
  Description of Artificial Sequence: Synthetic oligonucleotide
cgugcuauugaugcuggca

SEQ ID NO: 313883 - RNA, 19 nt, Artificial Sequence
  Description of Artificial Sequence: Synthetic oligonucleotide
cucagugcggagcuccuuu

SEQ ID NO: 313884 - RNA, 19 nt, Artificial Sequence
  Description of Artificial Sequence: Synthetic oligonucleotide
gggccggucagagcaagca

SEQ ID NO: 313885 - RNA, 19 nt, Artificial Sequence
  Description of Artificial Sequence: Synthetic oligonucleotide
ccccuaauggggugauauc

SEQ ID NO: 313886 - RNA, 19 nt, Artificial Sequence
  Description of Artificial Sequence: Synthetic oligonucleotide
aguauguguuggggucuuu

SEQ ID NO: 313887 - RNA, 19 nt, Artificial Sequence
  Description of Artificial Sequence: Synthetic oligonucleotide
ggggaaccgugcgaaugug

SEQ ID NO: 313888 - RNA, 19 nt, Artificial Sequence
  Description of Artificial Sequence: Synthetic oligonucleotide
agccaacuggcaacaccau

SEQ ID NO: 313889 - RNA, 19 nt, Artificial Sequence
  Description of Artificial Sequence: Synthetic oligonucleotide
gcagucgccucccgcuuca

SEQ ID NO: 313890 - RNA, 19 nt, Artificial Sequence
  Description of Artificial Sequence: Synthetic oligonucleotide
ggccggucagagcaagcaa

SEQ ID NO: 313891 - RNA, 19 nt, Artificial Sequence
  Description of Artificial Sequence: Synthetic oligonucleotide
gcccaacuugcaggagacg

SEQ ID NO: 313892 - RNA, 19 nt, Artificial Sequence
  Description of Artificial Sequence: Synthetic oligonucleotide
gagacgaggcugagggcau

SEQ ID NO: 313893 - RNA, 19 nt, Artificial Sequence
  Description of Artificial Sequence: Synthetic oligonucleotide
ccgugcuauugaugcuggc

SEQ ID NO: 313894 - RNA, 19 nt, Artificial Sequence
  Description of Artificial Sequence: Synthetic oligonucleotide
agugggccggucagagcaa

SEQ ID NO: 313895 - RNA, 19 nt, Artificial Sequence
  Description of Artificial Sequence: Synthetic oligonucleotide
gcccuaucaugccguugac

SEQ ID NO: 313896 - RNA, 19 nt, Artificial Sequence
  Description of Artificial Sequence: Synthetic oligonucleotide
ccgccucuucaggauauac

SEQ ID NO: 313897 - RNA, 19 nt, Artificial Sequence
  Description of Artificial Sequence: Synthetic oligonucleotide
gcgcaugaggucgcccacc

SEQ ID NO: 313898 - RNA, 19 nt, Artificial Sequence
  Description of Artificial Sequence: Synthetic oligonucleotide
gugcgaauguggaguuucu

SEQ ID NO: 313899 - RNA, 19 nt, Artificial Sequence
  Description of Artificial Sequence: Synthetic oligonucleotide
ccacuagugucuuggacuu

SEQ ID NO: 313900 - RNA, 19 nt, Artificial Sequence
  Description of Artificial Sequence: Synthetic oligonucleotide
ccgcaccgugcuauugaug

SEQ ID NO: 313901 - RNA, 19 nt, Artificial Sequence
  Description of Artificial Sequence: Synthetic oligonucleotide
cagagcaagcaaagacguu

SEQ ID NO: 313902 - RNA, 19 nt, Artificial Sequence
  Description of Artificial Sequence: Synthetic oligonucleotide
agacgaggcugagggcaua

SEQ ID NO: 313903 - RNA, 19 nt, Artificial Sequence
  Description of Artificial Sequence: Synthetic oligonucleotide
caucuuggggcggcugaua

SEQ ID NO: 313904 - RNA, 19 nt, Artificial Sequence
  Description of Artificial Sequence: Synthetic oligonucleotide
gccguugaccgugccaaaa

SEQ ID NO: 313905 - RNA, 19 nt, Artificial Sequence
  Description of Artificial Sequence: Synthetic oligonucleotide
ccacgacuuugaugagguc

SEQ ID NO: 313906 - RNA, 19 nt, Artificial Sequence
  Description of Artificial Sequence: Synthetic oligonucleotide
gggaguuccccgagacaaa

SEQ ID NO: 313907 - RNA, 19 nt, Artificial Sequence
  Description of Artificial Sequence: Synthetic oligonucleotide
cccgagacaaaagggcugu

SEQ ID NO: 313908 - RNA, 19 nt, Artificial Sequence
  Description of Artificial Sequence: Synthetic oligonucleotide
cgacuagaaaggaccccaa

SEQ ID NO: 313909 - RNA, 19 nt, Artificial Sequence
  Description of Artificial Sequence: Synthetic oligonucleotide
caccaucgaugaagccugu

SEQ ID NO: 313910 - RNA, 19 nt, Artificial Sequence
  Description of Artificial Sequence: Synthetic oligonucleotide
ccccuguccuuggcuaaug

SEQ ID NO: 313911 - RNA, 19 nt, Artificial Sequence
  Description of Artificial Sequence: Synthetic oligonucleotide
gccgcaccgugcuauugau

SEQ ID NO: 313912 - RNA, 19 nt, Artificial Sequence
  Description of Artificial Sequence: Synthetic oligonucleotide
ccccuaccucaaccucccc

SEQ ID NO: 313913 - RNA, 19 nt, Artificial Sequence
  Description of Artificial Sequence: Synthetic oligonucleotide
cugcagucgccucccgcuu

SEQ ID NO: 313914 - RNA, 19 nt, Artificial Sequence
  Description of Artificial Sequence: Synthetic oligonucleotide
ggucucuagugaacugguu

SEQ ID NO: 313915 - RNA, 19 nt, Artificial Sequence
  Description of Artificial Sequence: Synthetic oligonucleotide
guccccuaauggggugaua

SEQ ID NO: 313916 - RNA, 19 nt, Artificial Sequence
  Description of Artificial Sequence: Synthetic oligonucleotide
gcucucacuucaagacaau

SEQ ID NO: 313917 - RNA, 19 nt, Artificial Sequence
  Description of Artificial Sequence: Synthetic oligonucleotide
ggcagccgauggccugaua

SEQ ID NO: 313918 - RNA, 19 nt, Artificial Sequence
  Description of Artificial Sequence: Synthetic oligonucleotide
gccccuguccuuggcuaau

SEQ ID NO: 313919 - RNA, 19 nt, Artificial Sequence
  Description of Artificial Sequence: Synthetic oligonucleotide
cagucgccucccgcuucau

SEQ ID NO: 313920 - RNA, 19 nt, Artificial Sequence
  Description of Artificial Sequence: Synthetic oligonucleotide
ccgugcgaauguggaguuu

SEQ ID NO: 313921 - RNA, 19 nt, Artificial Sequence
  Description of Artificial Sequence: Synthetic oligonucleotide
ucuaauacuauuaauagcc

SEQ ID NO: 313922 - RNA, 19 nt, Artificial Sequence
  Description of Artificial Sequence: Synthetic oligonucleotide
aaguaaaguagcuagaggg

SEQ ID NO: 313923 - RNA, 19 nt, Artificial Sequence
  Description of Artificial Sequence: Synthetic oligonucleotide
aaaaguccuuacuagaggc

SEQ ID NO: 313924 - RNA, 19 nt, Artificial Sequence
  Description of Artificial Sequence: Synthetic oligonucleotide
aaacaaauugacuaagagg

SEQ ID NO: 313925 - RNA, 19 nt, Artificial Sequence
  Description of Artificial Sequence: Synthetic oligonucleotide
aacaaauugacuaagaggu

SEQ ID NO: 313926 - RNA, 19 nt, Artificial Sequence
  Description of Artificial Sequence: Synthetic oligonucleotide
agcacagacauucugaggc

SEQ ID NO: 313927 - RNA, 19 nt, Artificial Sequence
  Description of Artificial Sequence: Synthetic oligonucleotide
aguuguaaugaucuaauac

SEQ ID NO: 313928 - RNA, 19 nt, Artificial Sequence
  Description of Artificial Sequence: Synthetic oligonucleotide
cuauuaauagccauuacag

SEQ ID NO: 313929 - RNA, 19 nt, Artificial Sequence
  Description of Artificial Sequence: Synthetic oligonucleotide
gaucuaauacuauuaauag

SEQ ID NO: 313930 - RNA, 19 nt, Artificial Sequence
  Description of Artificial Sequence: Synthetic oligonucleotide
uuaauauccagccaagcug

SEQ ID NO: 313931 - RNA, 19 nt, Artificial Sequence
  Description of Artificial Sequence: Synthetic oligonucleotide
ugaucuaauacuauuaaua

SEQ ID NO: 313932 - RNA, 19 nt, Artificial Sequence
  Description of Artificial Sequence: Synthetic oligonucleotide
aaaucguacaaccuuacau

SEQ ID NO: 313933 - RNA, 19 nt, Artificial Sequence
  Description of Artificial Sequence: Synthetic oligonucleotide
uaaaaguccuuacuagagg

SEQ ID NO: 313934 - RNA, 19 nt, Artificial Sequence
  Description of Artificial Sequence: Synthetic oligonucleotide
acuauuaauagccauuaca

SEQ ID NO: 313935 - RNA, 19 nt, Artificial Sequence
  Description of Artificial Sequence: Synthetic oligonucleotide
uggaaauuaacuaguauaa

SEQ ID NO: 313936 - RNA, 19 nt, Artificial Sequence
  Description of Artificial Sequence: Synthetic oligonucleotide
uaaguaaaguagcuagagg

SEQ ID NO: 313937 - RNA, 19 nt, Artificial Sequence
  Description of Artificial Sequence: Synthetic oligonucleotide
uuuacaaugagcucccacu

SEQ ID NO: 313938 - RNA, 19 nt, Artificial Sequence
  Description of Artificial Sequence: Synthetic oligonucleotide
uguauugcaggguguaucg

SEQ ID NO: 313939 - RNA, 19 nt, Artificial Sequence
  Description of Artificial Sequence: Synthetic oligonucleotide
uauaggucaagcaagugaa

SEQ ID NO: 313940 - RNA, 19 nt, Artificial Sequence
  Description of Artificial Sequence: Synthetic oligonucleotide
aaguauugacagcucugcc

SEQ ID NO: 313941 - RNA, 19 nt, Artificial Sequence
  Description of Artificial Sequence: Synthetic oligonucleotide
uccuuauaggucaagcaag

SEQ ID NO: 313942 - RNA, 19 nt, Artificial Sequence
  Description of Artificial Sequence: Synthetic oligonucleotide
uuaucuuggguucaauuac

SEQ ID NO: 313943 - RNA, 19 nt, Artificial Sequence
  Description of Artificial Sequence: Synthetic oligonucleotide
ugagcucccacuuuuaucu

SEQ ID NO: 313944 - RNA, 19 nt, Artificial Sequence
  Description of Artificial Sequence: Synthetic oligonucleotide
acucugaccucucacauuc

SEQ ID NO: 313945 - RNA, 19 nt, Artificial Sequence
  Description of Artificial Sequence: Synthetic oligonucleotide
agcagaauuagaccuguac

SEQ ID NO: 313946 - RNA, 19 nt, Artificial Sequence
  Description of Artificial Sequence: Synthetic oligonucleotide
aaucguacaaccuuacaua

SEQ ID NO: 313947 - RNA, 19 nt, Artificial Sequence
  Description of Artificial Sequence: Synthetic oligonucleotide
ugcaacuaggcaaagggga

SEQ ID NO: 313948 - RNA, 19 nt, Artificial Sequence
  Description of Artificial Sequence: Synthetic oligonucleotide
acauucuaaguaaaguagc

SEQ ID NO: 313949 - RNA, 19 nt, Artificial Sequence
  Description of Artificial Sequence: Synthetic oligonucleotide
uguugagccacaaggcccg

SEQ ID NO: 313950 - RNA, 19 nt, Artificial Sequence
  Description of Artificial Sequence: Synthetic oligonucleotide
auagggauagguguauugc

SEQ ID NO: 313951 - RNA, 19 nt, Artificial Sequence
  Description of Artificial Sequence: Synthetic oligonucleotide
guucagauaguacccaagg

SEQ ID NO: 313952 - RNA, 19 nt, Artificial Sequence
  Description of Artificial Sequence: Synthetic oligonucleotide
aacucaauuuuacagcuuu

SEQ ID NO: 313953 - RNA, 19 nt, Artificial Sequence
  Description of Artificial Sequence: Synthetic oligonucleotide
acaacucaauuuuacagcu

SEQ ID NO: 313954 - RNA, 19 nt, Artificial Sequence
  Description of Artificial Sequence: Synthetic oligonucleotide
aacuaguauaaguuuugca

SEQ ID NO: 313955 - RNA, 19 nt, Artificial Sequence
  Description of Artificial Sequence: Synthetic oligonucleotide
uacgcauagggauaggugu

SEQ ID NO: 313956 - RNA, 19 nt, Artificial Sequence
  Description of Artificial Sequence: Synthetic oligonucleotide
guuguaaugaucuaauacu

SEQ ID NO: 313957 - RNA, 19 nt, Artificial Sequence
  Description of Artificial Sequence: Synthetic oligonucleotide
ucaaguauugacagcucug

SEQ ID NO: 313958 - RNA, 19 nt, Artificial Sequence
  Description of Artificial Sequence: Synthetic oligonucleotide
uuguaaugaucuaauacua

SEQ ID NO: 313959 - RNA, 19 nt, Artificial Sequence
  Description of Artificial Sequence: Synthetic oligonucleotide
gucauaugcucauggaggg

SEQ ID NO: 313960 - RNA, 19 nt, Artificial Sequence
  Description of Artificial Sequence: Synthetic oligonucleotide
aaaguccuuacuagaggcc

SEQ ID NO: 313961 - RNA, 19 nt, Artificial Sequence
  Description of Artificial Sequence: Synthetic oligonucleotide
uccacggacaucuuaauau

SEQ ID NO: 313962 - RNA, 19 nt, Artificial Sequence
  Description of Artificial Sequence: Synthetic oligonucleotide
auagguguauugcagggug

SEQ ID NO: 313963 - RNA, 19 nt, Artificial Sequence
  Description of Artificial Sequence: Synthetic oligonucleotide
uaaguuugugccucuagcu

SEQ ID NO: 313964 - RNA, 19 nt, Artificial Sequence
  Description of Artificial Sequence: Synthetic oligonucleotide
cuaaguaaaguagcuagag

SEQ ID NO: 313965 - RNA, 19 nt, Artificial Sequence
  Description of Artificial Sequence: Synthetic oligonucleotide
aagcaagugaacugguacu

SEQ ID NO: 313966 - RNA, 19 nt, Artificial Sequence
  Description of Artificial Sequence: Synthetic oligonucleotide
  modified_base (4)..(4): a, c, u, g, unknown or other
uucncuaugggcucuccca

SEQ ID NO: 313967 - RNA, 19 nt, Artificial Sequence
  Description of Artificial Sequence: Synthetic oligonucleotide
aauccacguucccaaauug

SEQ ID NO: 313968 - RNA, 19 nt, Artificial Sequence
  Description of Artificial Sequence: Synthetic oligonucleotide
aauacuauuaauagccauu

SEQ ID NO: 313969 - RNA, 19 nt, Artificial Sequence
  Description of Artificial Sequence: Synthetic oligonucleotide
uaccaaauuacuucuccca

SEQ ID NO: 313970 - RNA, 19 nt, Artificial Sequence
  Description of Artificial Sequence: Synthetic oligonucleotide
ucauuugucggggacaaca

SEQ ID NO: 313971 - RNA, 19 nt, Artificial Sequence
  Description of Artificial Sequence: Synthetic oligonucleotide
gauaccuuuaaggcagagg

SEQ ID NO: 313972 - RNA, 19 nt, Artificial Sequence
  Description of Artificial Sequence: Synthetic oligonucleotide
uuuacaugguaccuaggua

SEQ ID NO: 313973 - RNA, 19 nt, Artificial Sequence
  Description of Artificial Sequence: Synthetic oligonucleotide
  modified_base (3)..(3): a, c, u, g, unknown or other
ucncuaugggcucucccag

SEQ ID NO: 313974 - RNA, 19 nt, Artificial Sequence
  Description of Artificial Sequence: Synthetic oligonucleotide
uucugugcgugucauggcc

SEQ ID NO: 313975 - RNA, 19 nt, Artificial Sequence
  Description of Artificial Sequence: Synthetic oligonucleotide
uguaucgacacuuggccaa

SEQ ID NO: 313976 - RNA, 19 nt, Artificial Sequence
  Description of Artificial Sequence: Synthetic oligonucleotide
aaccuagcuguugagccac

SEQ ID NO: 313977 - RNA, 19 nt, Artificial Sequence
  Description of Artificial Sequence: Synthetic oligonucleotide
uuugguuuuccaagucccc

SEQ ID NO: 313978 - RNA, 19 nt, Artificial Sequence
  Description of Artificial Sequence: Synthetic oligonucleotide
ucugugcgugucauggccg

SEQ ID NO: 313979 - RNA, 19 nt, Artificial Sequence
  Description of Artificial Sequence: Synthetic oligonucleotide
ugucgugaaaguccuucag

SEQ ID NO: 313980 - RNA, 19 nt, Artificial Sequence
  Description of Artificial Sequence: Synthetic oligonucleotide
uggccaagaguuuuagcag

SEQ ID NO: 313981 - RNA, 19 nt, Artificial Sequence
  Description of Artificial Sequence: Synthetic oligonucleotide
ugacuaagagguguguugc

SEQ ID NO: 313982 - RNA, 19 nt, Artificial Sequence
  Description of Artificial Sequence: Synthetic oligonucleotide
gguguaucgacacuuggcc

SEQ ID NO: 313983 - RNA, 19 nt, Artificial Sequence
  Description of Artificial Sequence: Synthetic oligonucleotide
uguaguacgcauagggaua

SEQ ID NO: 313984 - RNA, 19 nt, Artificial Sequence
  Description of Artificial Sequence: Synthetic oligonucleotide
acaaccuuacauaaguugu

SEQ ID NO: 313985 - RNA, 19 nt, Artificial Sequence
  Description of Artificial Sequence: Synthetic oligonucleotide
uagguaauugcugacugga

SEQ ID NO: 313986 - RNA, 19 nt, Artificial Sequence
  Description of Artificial Sequence: Synthetic oligonucleotide
aaaccuagcuguugagcca

SEQ ID NO: 313987 - RNA, 19 nt, Artificial Sequence
  Description of Artificial Sequence: Synthetic oligonucleotide
uauugcaggguguaucgac

SEQ ID NO: 313988 - RNA, 19 nt, Artificial Sequence
  Description of Artificial Sequence: Synthetic oligonucleotide
cuagguaauugcugacugg

SEQ ID NO: 313989 - RNA, 19 nt, Artificial Sequence
  Description of Artificial Sequence: Synthetic oligonucleotide
ugugccucuagcuguaaac

SEQ ID NO: 313990 - RNA, 19 nt, Artificial Sequence
  Description of Artificial Sequence: Synthetic oligonucleotide
auaaguuguaaugaucuaa

SEQ ID NO: 313991 - RNA, 19 nt, Artificial Sequence
  Description of Artificial Sequence: Synthetic oligonucleotide
ugcuuugacggauuaggcu

SEQ ID NO: 313992 - RNA, 19 nt, Artificial Sequence
  Description of Artificial Sequence: Synthetic oligonucleotide
uacggcagaagguacuuga

SEQ ID NO: 313993 - RNA, 19 nt, Artificial Sequence
  Description of Artificial Sequence: Synthetic oligonucleotide
ccauguaguacgcauaggg

SEQ ID NO: 313994 - RNA, 19 nt, Artificial Sequence
  Description of Artificial Sequence: Synthetic oligonucleotide
cuucugaccgcacuccagg

SEQ ID NO: 313995 - RNA, 19 nt, Artificial Sequence
  Description of Artificial Sequence: Synthetic oligonucleotide
agcaggaaugaauacuccu

SEQ ID NO: 313996 - RNA, 19 nt, Artificial Sequence
  Description of Artificial Sequence: Synthetic oligonucleotide
uucacaugccaccccuggg

SEQ ID NO: 313997 - RNA, 19 nt, Artificial Sequence
  Description of Artificial Sequence: Synthetic oligonucleotide
ccuuacauaaguuguaaug

SEQ ID NO: 313998 - RNA, 19 nt, Artificial Sequence
  Description of Artificial Sequence: Synthetic oligonucleotide
  modified_base (5)..(5): a, c, u, g, unknown or other
uuucncuaugggcucuccc

SEQ ID NO: 313999 - RNA, 19 nt, Artificial Sequence
  Description of Artificial Sequence: Synthetic oligonucleotide
cauaacccucucuugaauc

SEQ ID NO: 314000 - RNA, 19 nt, Artificial Sequence
  Description of Artificial Sequence: Synthetic oligonucleotide
guucauaacccucucuuga

SEQ ID NO: 314001 - RNA, 19 nt, Artificial Sequence
  Description of Artificial Sequence: Synthetic oligonucleotide
ccagacuccauguaguacg

SEQ ID NO: 314002 - RNA, 19 nt, Artificial Sequence
  Description of Artificial Sequence: Synthetic oligonucleotide
ugccuugacuguacaagag

SEQ ID NO: 314003 - RNA, 19 nt, Artificial Sequence
  Description of Artificial Sequence: Synthetic oligonucleotide
cauagggauagguguauug

SEQ ID NO: 314004 - RNA, 19 nt, Artificial Sequence
  Description of Artificial Sequence: Synthetic oligonucleotide
ucguacaaccuuacauaag

SEQ ID NO: 314005 - RNA, 19 nt, Artificial Sequence
  Description of Artificial Sequence: Synthetic oligonucleotide
aucguacaaccuuacauaa

SEQ ID NO: 314006 - RNA, 19 nt, Artificial Sequence
  Description of Artificial Sequence: Synthetic oligonucleotide
cacggacaucuuaauaucc

SEQ ID NO: 314007 - RNA, 19 nt, Artificial Sequence
  Description of Artificial Sequence: Synthetic oligonucleotide
augaucuaauacuauuaau

SEQ ID NO: 314008 - RNA, 19 nt, Artificial Sequence
  Description of Artificial Sequence: Synthetic oligonucleotide
uuauccuaugguuugccuu

SEQ ID NO: 314009 - RNA, 19 nt, Artificial Sequence
  Description of Artificial Sequence: Synthetic oligonucleotide
cuggguuuuagacucccag

SEQ ID NO: 314010 - RNA, 19 nt, Artificial Sequence
  Description of Artificial Sequence: Synthetic oligonucleotide
uccacgaaagguuuucaau

SEQ ID NO: 314011 - RNA, 19 nt, Artificial Sequence
  Description of Artificial Sequence: Synthetic oligonucleotide
ggauagguguauugcaggg

SEQ ID NO: 314012 - RNA, 19 nt, Artificial Sequence
  Description of Artificial Sequence: Synthetic oligonucleotide
gguucugugcgugucaugg

SEQ ID NO: 314013 - RNA, 19 nt, Artificial Sequence
  Description of Artificial Sequence: Synthetic oligonucleotide
uggguuuuagacucccaga

SEQ ID NO: 314014 - RNA, 19 nt, Artificial Sequence
  Description of Artificial Sequence: Synthetic oligonucleotide
ucgugaaaggcagagccug

SEQ ID NO: 314015 - RNA, 19 nt, Artificial Sequence
  Description of Artificial Sequence: Synthetic oligonucleotide
aacccugcuaugcuccgug

SEQ ID NO: 314016 - RNA, 19 nt, Artificial Sequence
  Description of Artificial Sequence: Synthetic oligonucleotide
guaccuagguaauugcuga

SEQ ID NO: 314017 - RNA, 19 nt, Artificial Sequence
  Description of Artificial Sequence: Synthetic oligonucleotide
uacuauuaauagccauuac

SEQ ID NO: 314018 - RNA, 19 nt, Artificial Sequence
  Description of Artificial Sequence: Synthetic oligonucleotide
gacggauuaggcugaacuc

SEQ ID NO: 314019 - RNA, 19 nt, Artificial Sequence
  Description of Artificial Sequence: Synthetic oligonucleotide
cucggcaaugugcauuugg

SEQ ID NO: 314020 - RNA, 19 nt, Artificial Sequence
  Description of Artificial Sequence: Synthetic oligonucleotide
aguaaaguagcuagagggu

SEQ ID NO: 314021 - RNA, 19 nt, Artificial Sequence
  Description of Artificial Sequence: Synthetic oligonucleotide
agcuugugcaaaccuagcu

SEQ ID NO: 314022 - RNA, 19 nt, Artificial Sequence
  Description of Artificial Sequence: Synthetic oligonucleotide
ucagcuacggcagaaggua

SEQ ID NO: 314023 - RNA, 19 nt, Artificial Sequence
  Description of Artificial Sequence: Synthetic oligonucleotide
accaaauuacuucucccaa

SEQ ID NO: 314024 - RNA, 19 nt, Artificial Sequence
  Description of Artificial Sequence: Synthetic oligonucleotide
ugccaguggaaauuaacua

SEQ ID NO: 314025 - RNA, 19 nt, Artificial Sequence
  Description of Artificial Sequence: Synthetic oligonucleotide
aggguguaucgacacuugg

SEQ ID NO: 314026 - RNA, 19 nt, Artificial Sequence
  Description of Artificial Sequence: Synthetic oligonucleotide
auacuauuaauagccauua

SEQ ID NO: 314027 - RNA, 19 nt, Artificial Sequence
  Description of Artificial Sequence: Synthetic oligonucleotide
aacccugguagaaacaaaa

SEQ ID NO: 314028 - RNA, 19 nt, Artificial Sequence
  Description of Artificial Sequence: Synthetic oligonucleotide
ucucucauuugucggggac

SEQ ID NO: 314029 - RNA, 19 nt, Artificial Sequence
  Description of Artificial Sequence: Synthetic oligonucleotide
uguuauccuaugguuugcc

SEQ ID NO: 314030 - RNA, 19 nt, Artificial Sequence
  Description of Artificial Sequence: Synthetic oligonucleotide
cauguauaggagcauggca

SEQ ID NO: 314031 - RNA, 19 nt, Artificial Sequence
  Description of Artificial Sequence: Synthetic oligonucleotide
acauacucuucccuuggga

SEQ ID NO: 314032 - RNA, 19 nt, Artificial Sequence
  Description of Artificial Sequence: Synthetic oligonucleotide
guaguacgcauagggauag

SEQ ID NO: 314033 - RNA, 19 nt, Artificial Sequence
  Description of Artificial Sequence: Synthetic oligonucleotide
cuuaauauccagccaagcu

SEQ ID NO: 314034 - RNA, 19 nt, Artificial Sequence
  Description of Artificial Sequence: Synthetic oligonucleotide
ucaauccacguucccaaau

SEQ ID NO: 314035 - RNA, 19 nt, Artificial Sequence
  Description of Artificial Sequence: Synthetic oligonucleotide
uacugccagucaauccacg

SEQ ID NO: 314036 - RNA, 19 nt, Artificial Sequence
  Description of Artificial Sequence: Synthetic oligonucleotide
cacguucccaaauuguuca

SEQ ID NO: 314037 - RNA, 19 nt, Artificial Sequence
  Description of Artificial Sequence: Synthetic oligonucleotide
gacuaagagguguguugcc

SEQ ID NO: 314038 - RNA, 19 nt, Artificial Sequence
  Description of Artificial Sequence: Synthetic oligonucleotide
ugggacuccagguaacguc

SEQ ID NO: 314039 - RNA, 19 nt, Artificial Sequence
  Description of Artificial Sequence: Synthetic oligonucleotide
cuggggucgugaaaggcag

SEQ ID NO: 314040 - RNA, 19 nt, Artificial Sequence
  Description of Artificial Sequence: Synthetic oligonucleotide
cucuaucauagcugucugc

SEQ ID NO: 314041 - RNA, 19 nt, Artificial Sequence
  Description of Artificial Sequence: Synthetic oligonucleotide
cauagugaaacccugcuau

SEQ ID NO: 314042 - RNA, 19 nt, Artificial Sequence
  Description of Artificial Sequence: Synthetic oligonucleotide
uacucccacauaguagucc

SEQ ID NO: 314043 - RNA, 19 nt, Artificial Sequence
  Description of Artificial Sequence: Synthetic oligonucleotide
aagcccauagugaaacccu

SEQ ID NO: 314044 - RNA, 19 nt, Artificial Sequence
  Description of Artificial Sequence: Synthetic oligonucleotide
gagaucacagaucuaacuu

SEQ ID NO: 314045 - RNA, 19 nt, Artificial Sequence
  Description of Artificial Sequence: Synthetic oligonucleotide
uccaaguccccucuaucau

SEQ ID NO: 314046 - RNA, 19 nt, Artificial Sequence
  Description of Artificial Sequence: Synthetic oligonucleotide
gucggggacaacaugaaga

SEQ ID NO: 314047 - RNA, 19 nt, Artificial Sequence
  Description of Artificial Sequence: Synthetic oligonucleotide
cuacgucuuccucaccccg

SEQ ID NO: 314048 - RNA, 19 nt, Artificial Sequence
  Description of Artificial Sequence: Synthetic oligonucleotide
gguuuuagacucccagacc

SEQ ID NO: 314049 - RNA, 19 nt, Artificial Sequence
  Description of Artificial Sequence: Synthetic oligonucleotide
uuguugugguuuucccacc

SEQ ID NO: 314050 - RNA, 19 nt, Artificial Sequence
  Description of Artificial Sequence: Synthetic oligonucleotide
cauucuaaguaaaguagcu

SEQ ID NO: 314051 - RNA, 19 nt, Artificial Sequence
  Description of Artificial Sequence: Synthetic oligonucleotide
gaauucacaugccaccccu

SEQ ID NO: 314052 - RNA, 19 nt, Artificial Sequence
  Description of Artificial Sequence: Synthetic oligonucleotide
ucucauuugucggggacaa

SEQ ID NO: 314053 - RNA, 19 nt, Artificial Sequence
  Description of Artificial Sequence: Synthetic oligonucleotide
cagacuccauguaguacgc

SEQ ID NO: 314054 - RNA, 19 nt, Artificial Sequence
  Description of Artificial Sequence: Synthetic oligonucleotide
uagguguauugcagggugu

SEQ ID NO: 314055 - RNA, 19 nt, Artificial Sequence
  Description of Artificial Sequence: Synthetic oligonucleotide
ccacgaaagguuuucaauc

SEQ ID NO: 314056 - RNA, 19 nt, Artificial Sequence
  Description of Artificial Sequence: Synthetic oligonucleotide
uugcaggguguaucgacac

SEQ ID NO: 314057 - RNA, 19 nt, Artificial Sequence
  Description of Artificial Sequence: Synthetic oligonucleotide
auaugcucauggaggguac

SEQ ID NO: 314058 - RNA, 19 nt, Artificial Sequence
  Description of Artificial Sequence: Synthetic oligonucleotide
cuuauaggucaagcaagug

SEQ ID NO: 314059 - RNA, 19 nt, Artificial Sequence
  Description of Artificial Sequence: Synthetic oligonucleotide
uggcuacucccacauagua

SEQ ID NO: 314060 - RNA, 19 nt, Artificial Sequence
  Description of Artificial Sequence: Synthetic oligonucleotide
auacugccagucaauccac

SEQ ID NO: 314061 - RNA, 19 nt, Artificial Sequence
  Description of Artificial Sequence: Synthetic oligonucleotide
uggaggugaaauguaugaa

SEQ ID NO: 314062 - RNA, 19 nt, Artificial Sequence
  Description of Artificial Sequence: Synthetic oligonucleotide
uaacccugguagaaacaaa

SEQ ID NO: 314063 - RNA, 19 nt, Artificial Sequence
  Description of Artificial Sequence: Synthetic oligonucleotide
aguuacccucccucccaac

SEQ ID NO: 314064 - RNA, 19 nt, Artificial Sequence
  Description of Artificial Sequence: Synthetic oligonucleotide
caaauugacuaagaggugu

SEQ ID NO: 314065 - RNA, 19 nt, Artificial Sequence
  Description of Artificial Sequence: Synthetic oligonucleotide
guuacccucccucccaaca

SEQ ID NO: 314066 - RNA, 19 nt, Artificial Sequence
  Description of Artificial Sequence: Synthetic oligonucleotide
aaguuacccucccucccaa

SEQ ID NO: 314067 - RNA, 19 nt, Artificial Sequence
  Description of Artificial Sequence: Synthetic oligonucleotide
gugaaacccugcuaugcuc

SEQ ID NO: 314068 - RNA, 19 nt, Artificial Sequence
  Description of Artificial Sequence: Synthetic oligonucleotide
uugucggggacaacaugaa

SEQ ID NO: 314069 - RNA, 19 nt, Artificial Sequence
  Description of Artificial Sequence: Synthetic oligonucleotide
auugcaggguguaucgaca

SEQ ID NO: 314070 - RNA, 19 nt, Artificial Sequence
  Description of Artificial Sequence: Synthetic oligonucleotide
ccuagguaauugcugacug

SEQ ID NO: 314071 - RNA, 19 nt, Artificial Sequence
  Description of Artificial Sequence: Synthetic oligonucleotide
acggacaucuuaauaucca

SEQ ID NO: 314072 - RNA, 19 nt, Artificial Sequence
  Description of Artificial Sequence: Synthetic oligonucleotide
guacuugacucucugugcu

SEQ ID NO: 314073 - RNA, 19 nt, Artificial Sequence
  Description of Artificial Sequence: Synthetic oligonucleotide
guguaucgacacuuggcca

SEQ ID NO: 314074 - RNA, 19 nt, Artificial Sequence
  Description of Artificial Sequence: Synthetic oligonucleotide
cagguuaacauaauagcuu

SEQ ID NO: 314075 - RNA, 19 nt, Artificial Sequence
  Description of Artificial Sequence: Synthetic oligonucleotide
uucugaccgcacuccaggu

SEQ ID NO: 314076 - RNA, 19 nt, Artificial Sequence
  Description of Artificial Sequence: Synthetic oligonucleotide
cuaacccugguagaaacaa

SEQ ID NO: 314077 - RNA, 19 nt, Artificial Sequence
  Description of Artificial Sequence: Synthetic oligonucleotide
cugugcgugucauggccgc

SEQ ID NO: 314078 - RNA, 19 nt, Artificial Sequence
  Description of Artificial Sequence: Synthetic oligonucleotide
ugaauccgcugguaaguuu

SEQ ID NO: 314079 - RNA, 19 nt, Artificial Sequence
  Description of Artificial Sequence: Synthetic oligonucleotide
ucugaccgcacuccagguu

SEQ ID NO: 314080 - RNA, 19 nt, Artificial Sequence
  Description of Artificial Sequence: Synthetic oligonucleotide
agguaauugcugacuggag

SEQ ID NO: 314081 - RNA, 19 nt, Artificial Sequence
  Description of Artificial Sequence: Synthetic oligonucleotide
guucugugcgugucauggc

SEQ ID NO: 314082 - RNA, 19 nt, Artificial Sequence
  Description of Artificial Sequence: Synthetic oligonucleotide
agauaccuuuaaggcagag

SEQ ID NO: 314083 - RNA, 19 nt, Artificial Sequence
  Description of Artificial Sequence: Synthetic oligonucleotide
ucauaugcucauggagggu

SEQ ID NO: 314084 - RNA, 19 nt, Artificial Sequence
  Description of Artificial Sequence: Synthetic oligonucleotide
guauaggaacugccacccc

SEQ ID NO: 314085 - RNA, 19 nt, Artificial Sequence
  Description of Artificial Sequence: Synthetic oligonucleotide
ugcgugucauggccgcuga

SEQ ID NO: 314086 - RNA, 19 nt, Artificial Sequence
  Description of Artificial Sequence: Synthetic oligonucleotide
uugugccucuagcuguaaa

SEQ ID NO: 314087 - RNA, 19 nt, Artificial Sequence
  Description of Artificial Sequence: Synthetic oligonucleotide
uauugacagcucugccagu

SEQ ID NO: 314088 - RNA, 19 nt, Artificial Sequence
  Description of Artificial Sequence: Synthetic oligonucleotide
agcuucugaccgcacucca

SEQ ID NO: 314089 - RNA, 19 nt, Artificial Sequence
  Description of Artificial Sequence: Synthetic oligonucleotide
cauaugcucauggagggua

SEQ ID NO: 314090 - RNA, 19 nt, Artificial Sequence
  Description of Artificial Sequence: Synthetic oligonucleotide
ggcuacucccacauaguag

SEQ ID NO: 314091 - RNA, 19 nt, Artificial Sequence
  Description of Artificial Sequence: Synthetic oligonucleotide
cucaccccggcacauccac

SEQ ID NO: 314092 - RNA, 19 nt, Artificial Sequence
  Description of Artificial Sequence: Synthetic oligonucleotide
ggugucgugaaaguccuuc

SEQ ID NO: 314093 - RNA, 19 nt, Artificial Sequence
  Description of Artificial Sequence: Synthetic oligonucleotide
gugucgugaaaguccuuca

SEQ ID NO: 314094 - RNA, 19 nt, Artificial Sequence
  Description of Artificial Sequence: Synthetic oligonucleotide
aucucucauuugucgggga

SEQ ID NO: 314095 - RNA, 19 nt, Artificial Sequence
  Description of Artificial Sequence: Synthetic oligonucleotide
guguuauccuaugguuugc

SEQ ID NO: 314096 - RNA, 19 nt, Artificial Sequence
  Description of Artificial Sequence: Synthetic oligonucleotide
uugggacuccagguaacgu

SEQ ID NO: 314097 - RNA, 19 nt, Artificial Sequence
  Description of Artificial Sequence: Synthetic oligonucleotide
cuacucccacauaguaguc

SEQ ID NO: 314098 - RNA, 19 nt, Artificial Sequence
  Description of Artificial Sequence: Synthetic oligonucleotide
cugaccgcacuccagguua

SEQ ID NO: 314099 - RNA, 19 nt, Artificial Sequence
  Description of Artificial Sequence: Synthetic oligonucleotide
uaguacgcauagggauagg

SEQ ID NO: 314100 - RNA, 19 nt, Artificial Sequence
  Description of Artificial Sequence: Synthetic oligonucleotide
aaacccugcuaugcuccgu

SEQ ID NO: 314101 - RNA, 19 nt, Artificial Sequence
  Description of Artificial Sequence: Synthetic oligonucleotide
gcucaacuuuccacgaaag

SEQ ID NO: 314102 - RNA, 19 nt, Artificial Sequence
  Description of Artificial Sequence: Synthetic oligonucleotide
acacuuggccaagaguuuu

SEQ ID NO: 314103 - RNA, 19 nt, Artificial Sequence
  Description of Artificial Sequence: Synthetic oligonucleotide
ugaccgcacuccagguuaa

SEQ ID NO: 314104 - RNA, 19 nt, Artificial Sequence
  Description of Artificial Sequence: Synthetic oligonucleotide
ccccuucuuguauaggaac

SEQ ID NO: 314105 - RNA, 19 nt, Artificial Sequence
  Description of Artificial Sequence: Synthetic oligonucleotide
caugaauccgcugguaagu

SEQ ID NO: 314106 - RNA, 19 nt, Artificial Sequence
  Description of Artificial Sequence: Synthetic oligonucleotide
ccacggacaucuuaauauc

SEQ ID NO: 314107 - RNA, 19 nt, Artificial Sequence
  Description of Artificial Sequence: Synthetic oligonucleotide
cucucauuugucggggaca

SEQ ID NO: 314108 - RNA, 19 nt, Artificial Sequence
  Description of Artificial Sequence: Synthetic oligonucleotide
cacgcucaacuuuccacga

SEQ ID NO: 314109 - RNA, 19 nt, Artificial Sequence
  Description of Artificial Sequence: Synthetic oligonucleotide
uggggucgugaaaggcaga

SEQ ID NO: 314110 - RNA, 19 nt, Artificial Sequence
  Description of Artificial Sequence: Synthetic oligonucleotide
agcuacggcagaagguacu

SEQ ID NO: 314111 - RNA, 19 nt, Artificial Sequence
  Description of Artificial Sequence: Synthetic oligonucleotide
uaacccucucuugaaucuu

SEQ ID NO: 314112 - RNA, 19 nt, Artificial Sequence
  Description of Artificial Sequence: Synthetic oligonucleotide
agguguauugcagggugua

SEQ ID NO: 314113 - RNA, 19 nt, Artificial Sequence
  Description of Artificial Sequence: Synthetic oligonucleotide
cuccaaugccaauuuauuu

SEQ ID NO: 314114 - RNA, 19 nt, Artificial Sequence
  Description of Artificial Sequence: Synthetic oligonucleotide
cguacaaccuuacauaagu

SEQ ID NO: 314115 - RNA, 19 nt, Artificial Sequence
  Description of Artificial Sequence: Synthetic oligonucleotide
ccuugacuguacaagagcu

SEQ ID NO: 314116 - RNA, 19 nt, Artificial Sequence
  Description of Artificial Sequence: Synthetic oligonucleotide
gagaugggguucucugacu

SEQ ID NO: 314117 - RNA, 19 nt, Artificial Sequence
  Description of Artificial Sequence: Synthetic oligonucleotide
acgcucaacuuuccacgaa

SEQ ID NO: 314118 - RNA, 19 nt, Artificial Sequence
  Description of Artificial Sequence: Synthetic oligonucleotide
cuacggcagaagguacuug

SEQ ID NO: 314119 - RNA, 19 nt, Artificial Sequence
  Description of Artificial Sequence: Synthetic oligonucleotide
gcuuuacaugguaccuagg

SEQ ID NO: 314120 - RNA, 19 nt, Artificial Sequence
  Description of Artificial Sequence: Synthetic oligonucleotide
uugacggauuaggcugaac

SEQ ID NO: 314121 - RNA, 19 nt, Artificial Sequence
  Description of Artificial Sequence: Synthetic oligonucleotide
ggauuaggcugaacucgag

SEQ ID NO: 314122 - RNA, 19 nt, Artificial Sequence
  Description of Artificial Sequence: Synthetic oligonucleotide
uuugugccucuagcuguaa

SEQ ID NO: 314123 - RNA, 19 nt, Artificial Sequence
  Description of Artificial Sequence: Synthetic oligonucleotide
ccaccucucaaaguagaac

SEQ ID NO: 314124 - RNA, 19 nt, Artificial Sequence
  Description of Artificial Sequence: Synthetic oligonucleotide
cugagacuugccaguggaa

SEQ ID NO: 314125 - RNA, 19 nt, Artificial Sequence
  Description of Artificial Sequence: Synthetic oligonucleotide
acgcauagggauaggugua

SEQ ID NO: 314126 - RNA, 19 nt, Artificial Sequence
  Description of Artificial Sequence: Synthetic oligonucleotide
uggccgcugaaaggacuug

SEQ ID NO: 314127 - RNA, 19 nt, Artificial Sequence
  Description of Artificial Sequence: Synthetic oligonucleotide
ccuuauaggucaagcaagu

SEQ ID NO: 314128 - RNA, 19 nt, Artificial Sequence
  Description of Artificial Sequence: Synthetic oligonucleotide
gcccauagugaaacccugc

SEQ ID NO: 314129 - RNA, 19 nt, Artificial Sequence
  Description of Artificial Sequence: Synthetic oligonucleotide
cucauuugucggggacaac

SEQ ID NO: 314130 - RNA, 19 nt, Artificial Sequence
  Description of Artificial Sequence: Synthetic oligonucleotide
ggcuguucauguccacgga

SEQ ID NO: 314131 - RNA, 19 nt, Artificial Sequence
  Description of Artificial Sequence: Synthetic oligonucleotide
gcuaagcuggucauaugcu

SEQ ID NO: 314132 - RNA, 19 nt, Artificial Sequence
  Description of Artificial Sequence: Synthetic oligonucleotide
cagcuacgucuuccucacc

SEQ ID NO: 314133 - RNA, 19 nt, Artificial Sequence
  Description of Artificial Sequence: Synthetic oligonucleotide
guacaaccuuacauaaguu

SEQ ID NO: 314134 - RNA, 19 nt, Artificial Sequence
  Description of Artificial Sequence: Synthetic oligonucleotide
gggucgugaaaggcagagc

SEQ ID NO: 314135 - RNA, 19 nt, Artificial Sequence
  Description of Artificial Sequence: Synthetic oligonucleotide
gccucuaacccugguagaa

SEQ ID NO: 314136 - RNA, 19 nt, Artificial Sequence
  Description of Artificial Sequence: Synthetic oligonucleotide
gaccgcacuccagguuaac

SEQ ID NO: 314137 - RNA, 19 nt, Artificial Sequence
  Description of Artificial Sequence: Synthetic oligonucleotide
ccgugcccuuagaagggcc

SEQ ID NO: 314138 - RNA, 19 nt, Artificial Sequence
  Description of Artificial Sequence: Synthetic oligonucleotide
cagaggcuaagcuggucau

SEQ ID NO: 314139 - RNA, 19 nt, Artificial Sequence
  Description of Artificial Sequence: Synthetic oligonucleotide
cggauuaggcugaacucga

SEQ ID NO: 314140 - RNA, 19 nt, Artificial Sequence
  Description of Artificial Sequence: Synthetic oligonucleotide
gagcagaauuagaccugua

SEQ ID NO: 314141 - RNA, 19 nt, Artificial Sequence
  Description of Artificial Sequence: Synthetic oligonucleotide
cugccagucaauccacguu

SEQ ID NO: 314142 - RNA, 19 nt, Artificial Sequence
  Description of Artificial Sequence: Synthetic oligonucleotide
gggacaugcuuugacggau

SEQ ID NO: 314143 - RNA, 19 nt, Artificial Sequence
  Description of Artificial Sequence: Synthetic oligonucleotide
cccaccucucaaaguagaa

SEQ ID NO: 314144 - RNA, 19 nt, Artificial Sequence
  Description of Artificial Sequence: Synthetic oligonucleotide
gccucuagcuguaaacuuu

SEQ ID NO: 314145 - RNA, 19 nt, Artificial Sequence
  Description of Artificial Sequence: Synthetic oligonucleotide
agguaacgucaaagaggau

SEQ ID NO: 314146 - RNA, 19 nt, Artificial Sequence
  Description of Artificial Sequence: Synthetic oligonucleotide
cccgugcccuuagaagggc

SEQ ID NO: 314147 - RNA, 19 nt, Artificial Sequence
  Description of Artificial Sequence: Synthetic oligonucleotide
cugggcguguggggacaug

SEQ ID NO: 314148 - RNA, 19 nt, Artificial Sequence
  Description of Artificial Sequence: Synthetic oligonucleotide
ccgcacuccagguuaacau

SEQ ID NO: 314149 - RNA, 19 nt, Artificial Sequence
  Description of Artificial Sequence: Synthetic oligonucleotide
gguguauugcaggguguau

SEQ ID NO: 314150 - RNA, 19 nt, Artificial Sequence
  Description of Artificial Sequence: Synthetic oligonucleotide
gcuacggcagaagguacuu

SEQ ID NO: 314151 - RNA, 19 nt, Artificial Sequence
  Description of Artificial Sequence: Synthetic oligonucleotide
gcguguggggacaugcuuu

SEQ ID NO: 314152 - RNA, 19 nt, Artificial Sequence
  Description of Artificial Sequence: Synthetic oligonucleotide
gcauagggauagguguauu

SEQ ID NO: 314153 - RNA, 19 nt, Artificial Sequence
  Description of Artificial Sequence: Synthetic oligonucleotide
cccuuagaagggccaugcu

SEQ ID NO: 314154 - RNA, 19 nt, Artificial Sequence
  Description of Artificial Sequence: Synthetic oligonucleotide
cggcaaugugcauuugguu

SEQ ID NO: 314155 - RNA, 19 nt, Artificial Sequence
  Description of Artificial Sequence: Synthetic oligonucleotide
cgcauagggauagguguau

SEQ ID NO: 314156 - RNA, 19 nt, Artificial Sequence
  Description of Artificial Sequence: Synthetic oligonucleotide
aauaguuaaaucgaguucc

SEQ ID NO: 314157 - RNA, 19 nt, Artificial Sequence
  Description of Artificial Sequence: Synthetic oligonucleotide
aaugugaccauccaggucg

SEQ ID NO: 314158 - RNA, 19 nt, Artificial Sequence
  Description of Artificial Sequence: Synthetic oligonucleotide
auuacuacaaaauagcaag

SEQ ID NO: 314159 - RNA, 19 nt, Artificial Sequence
  Description of Artificial Sequence: Synthetic oligonucleotide
uuaaaugugaccauccagg

SEQ ID NO: 314160 - RNA, 19 nt, Artificial Sequence
  Description of Artificial Sequence: Synthetic oligonucleotide
aauaguauaaugaaaaugu

SEQ ID NO: 314161 - RNA, 19 nt, Artificial Sequence
  Description of Artificial Sequence: Synthetic oligonucleotide
uuuaaugcagugaaggucc

SEQ ID NO: 314162 - RNA, 19 nt, Artificial Sequence
  Description of Artificial Sequence: Synthetic oligonucleotide
ugugaguccaccuaaaucc

SEQ ID NO: 314163 - RNA, 19 nt, Artificial Sequence
  Description of Artificial Sequence: Synthetic oligonucleotide
ucuauaguuauauauacac

SEQ ID NO: 314164 - RNA, 19 nt, Artificial Sequence
  Description of Artificial Sequence: Synthetic oligonucleotide
uuauauaugacaaacguuu

SEQ ID NO: 314165 - RNA, 19 nt, Artificial Sequence
  Description of Artificial Sequence: Synthetic oligonucleotide
aacguuuacauuugccucc

SEQ ID NO: 314166 - RNA, 19 nt, Artificial Sequence
  Description of Artificial Sequence: Synthetic oligonucleotide
auacauuaugcuaagaacc

SEQ ID NO: 314167 - RNA, 19 nt, Artificial Sequence
  Description of Artificial Sequence: Synthetic oligonucleotide
aaucugcuuacacauacac

SEQ ID NO: 314168 - RNA, 19 nt, Artificial Sequence
  Description of Artificial Sequence: Synthetic oligonucleotide
uacuauaauaugcggaggg

SEQ ID NO: 314169 - RNA, 19 nt, Artificial Sequence
  Description of Artificial Sequence: Synthetic oligonucleotide
uuugauguguuuuauauau

SEQ ID NO: 314170 - RNA, 19 nt, Artificial Sequence
  Description of Artificial Sequence: Synthetic oligonucleotide
aaauauguggaauaguaua

SEQ ID NO: 314171 - RNA, 19 nt, Artificial Sequence
  Description of Artificial Sequence: Synthetic oligonucleotide
auuaaccaaaacuagaaau

SEQ ID NO: 314172 - RNA, 19 nt, Artificial Sequence
  Description of Artificial Sequence: Synthetic oligonucleotide
aaaauggguauccauaaaa

SEQ ID NO: 314173 - RNA, 19 nt, Artificial Sequence
  Description of Artificial Sequence: Synthetic oligonucleotide
uacuaauuugaaauaagga

SEQ ID NO: 314174 - RNA, 19 nt, Artificial Sequence
  Description of Artificial Sequence: Synthetic oligonucleotide
gauacgguaauuuuauaac

SEQ ID NO: 314175 - RNA, 19 nt, Artificial Sequence
  Description of Artificial Sequence: Synthetic oligonucleotide
aaugggugcgccuugaggu

SEQ ID NO: 314176 - RNA, 19 nt, Artificial Sequence
  Description of Artificial Sequence: Synthetic oligonucleotide
ucuagaauaccucauuuaa

SEQ ID NO: 314177 - RNA, 19 nt, Artificial Sequence
  Description of Artificial Sequence: Synthetic oligonucleotide
augaguauccaccuuacag

SEQ ID NO: 314178 - RNA, 19 nt, Artificial Sequence
  Description of Artificial Sequence: Synthetic oligonucleotide
auauaugacaaacguuuac

SEQ ID NO: 314179 - RNA, 19 nt, Artificial Sequence
  Description of Artificial Sequence: Synthetic oligonucleotide
uacgguaauuuuauaacag

SEQ ID NO: 314180 - RNA, 19 nt, Artificial Sequence
  Description of Artificial Sequence: Synthetic oligonucleotide
ugauguguuuuauauauga

SEQ ID NO: 314181 - RNA, 19 nt, Artificial Sequence
  Description of Artificial Sequence: Synthetic oligonucleotide
gaauaugccauucauacaa

SEQ ID NO: 314182 - RNA, 19 nt, Artificial Sequence
  Description of Artificial Sequence: Synthetic oligonucleotide
ucacgcauuagucagcucc

SEQ ID NO: 314183 - RNA, 19 nt, Artificial Sequence
  Description of Artificial Sequence: Synthetic oligonucleotide
gauaugguucccuuucugg

SEQ ID NO: 314184 - RNA, 19 nt, Artificial Sequence
  Description of Artificial Sequence: Synthetic oligonucleotide
guuaucacgcauuagucag

SEQ ID NO: 314185 - RNA, 19 nt, Artificial Sequence
  Description of Artificial Sequence: Synthetic oligonucleotide
aauucgaagucacggugac

SEQ ID NO: 314186 - RNA, 19 nt, Artificial Sequence
  Description of Artificial Sequence: Synthetic oligonucleotide
uagaauaccucauuuaaaa

SEQ ID NO: 314187 - RNA, 19 nt, Artificial Sequence
  Description of Artificial Sequence: Synthetic oligonucleotide
accacaagaaacuauguca

SEQ ID NO: 314188 - RNA, 19 nt, Artificial Sequence
  Description of Artificial Sequence: Synthetic oligonucleotide
augacaaacguuuacauuu

SEQ ID NO: 314189 - RNA, 19 nt, Artificial Sequence
  Description of Artificial Sequence: Synthetic oligonucleotide
agaaccuaccacaagaaac

SEQ ID NO: 314190 - RNA, 19 nt, Artificial Sequence
  Description of Artificial Sequence: Synthetic oligonucleotide
auaauaguuaaaucgaguu

SEQ ID NO: 314191 - RNA, 19 nt, Artificial Sequence
  Description of Artificial Sequence: Synthetic oligonucleotide
caagaauacuguaaguccc

SEQ ID NO: 314192 - RNA, 19 nt, Artificial Sequence
  Description of Artificial Sequence: Synthetic oligonucleotide
aaauaauaguuaaaucgag

SEQ ID NO: 314193 - RNA, 19 nt, Artificial Sequence
  Description of Artificial Sequence: Synthetic oligonucleotide
agcgcuguaaauaacacgg

SEQ ID NO: 314194 - RNA, 19 nt, Artificial Sequence
  Description of Artificial Sequence: Synthetic oligonucleotide
aaucgaguuccugagaaag

SEQ ID NO: 314195 - RNA, 19 nt, Artificial Sequence
  Description of Artificial Sequence: Synthetic oligonucleotide
agauaaacgguccugguga

SEQ ID NO: 314196 - RNA, 19 nt, Artificial Sequence
  Description of Artificial Sequence: Synthetic oligonucleotide
augccauucauacaaaugu

SEQ ID NO: 314197 - RNA, 19 nt, Artificial Sequence
  Description of Artificial Sequence: Synthetic oligonucleotide
aguaacggauacauuaugc

SEQ ID NO: 314198 - RNA, 19 nt, Artificial Sequence
  Description of Artificial Sequence: Synthetic oligonucleotide
uguagauaaacgguccugg

SEQ ID NO: 314199 - RNA, 19 nt, Artificial Sequence
  Description of Artificial Sequence: Synthetic oligonucleotide
guuaaaucgaguuccugag

SEQ ID NO: 314200 - RNA, 19 nt, Artificial Sequence
  Description of Artificial Sequence: Synthetic oligonucleotide
ucuaccgggucaaaauugg

SEQ ID NO: 314201 - RNA, 19 nt, Artificial Sequence
  Description of Artificial Sequence: Synthetic oligonucleotide
aaaauagcaagaauacugu

SEQ ID NO: 314202 - RNA, 19 nt, Artificial Sequence
  Description of Artificial Sequence: Synthetic oligonucleotide
cauacuaaguaacggauac

SEQ ID NO: 314203 - RNA, 19 nt, Artificial Sequence
  Description of Artificial Sequence: Synthetic oligonucleotide
uaaaucgaguuccugagaa

SEQ ID NO: 314204 - RNA, 19 nt, Artificial Sequence
  Description of Artificial Sequence: Synthetic oligonucleotide
uuacacauacacuggcugg

SEQ ID NO: 314205 - RNA, 19 nt, Artificial Sequence
  Description of Artificial Sequence: Synthetic oligonucleotide
uccauauuguacuaaauuu

SEQ ID NO: 314206 - RNA, 19 nt, Artificial Sequence
  Description of Artificial Sequence: Synthetic oligonucleotide
uucagucuguuguaguugg

SEQ ID NO: 314207 - RNA, 19 nt, Artificial Sequence
  Description of Artificial Sequence: Synthetic oligonucleotide
caaggcaugaguauccacc

SEQ ID NO: 314208 - RNA, 19 nt, Artificial Sequence
  Description of Artificial Sequence: Synthetic oligonucleotide
aauaauaguuaaaucgagu

SEQ ID NO: 314209 - RNA, 19 nt, Artificial Sequence
  Description of Artificial Sequence: Synthetic oligonucleotide
aauuguauggcuugcuuuu

SEQ ID NO: 314210 - RNA, 19 nt, Artificial Sequence
  Description of Artificial Sequence: Synthetic oligonucleotide
ucugccuagauacauacua

SEQ ID NO: 314211 - RNA, 19 nt, Artificial Sequence
  Description of Artificial Sequence: Synthetic oligonucleotide
uuauugcacguuaucacgc

SEQ ID NO: 314212 - RNA, 19 nt, Artificial Sequence
  Description of Artificial Sequence: Synthetic oligonucleotide
aaacaaagccacuguguag

SEQ ID NO: 314213 - RNA, 19 nt, Artificial Sequence
  Description of Artificial Sequence: Synthetic oligonucleotide
ucccaauacaagcacagca

SEQ ID NO: 314214 - RNA, 19 nt, Artificial Sequence
  Description of Artificial Sequence: Synthetic oligonucleotide
auuugccucccaaagaacc

SEQ ID NO: 314215 - RNA, 19 nt, Artificial Sequence
  Description of Artificial Sequence: Synthetic oligonucleotide
aaaugugaccauccagguc

SEQ ID NO: 314216 - RNA, 19 nt, Artificial Sequence
  Description of Artificial Sequence: Synthetic oligonucleotide
auacauacuaaguaacgga

SEQ ID NO: 314217 - RNA, 19 nt, Artificial Sequence
  Description of Artificial Sequence: Synthetic oligonucleotide
aagugcucuuuccauauug

SEQ ID NO: 314218 - RNA, 19 nt, Artificial Sequence
  Description of Artificial Sequence: Synthetic oligonucleotide
aaaagcacgaaagcagcuc

SEQ ID NO: 314219 - RNA, 19 nt, Artificial Sequence
  Description of Artificial Sequence: Synthetic oligonucleotide
cuaaguaacggauacauua

SEQ ID NO: 314220 - RNA, 19 nt, Artificial Sequence
  Description of Artificial Sequence: Synthetic oligonucleotide
ugcccauuaaccaaaacua

SEQ ID NO: 314221 - RNA, 19 nt, Artificial Sequence
  Description of Artificial Sequence: Synthetic oligonucleotide
aauguggacaagugcuauc

SEQ ID NO: 314222 - RNA, 19 nt, Artificial Sequence
  Description of Artificial Sequence: Synthetic oligonucleotide
aacccagucauauccaaga

SEQ ID NO: 314223 - RNA, 19 nt, Artificial Sequence
  Description of Artificial Sequence: Synthetic oligonucleotide
gaaaggguagccguugucg

SEQ ID NO: 314224 - RNA, 19 nt, Artificial Sequence
  Description of Artificial Sequence: Synthetic oligonucleotide
accgggucaaaauuggagg

SEQ ID NO: 314225 - RNA, 19 nt, Artificial Sequence
  Description of Artificial Sequence: Synthetic oligonucleotide
ucugauaugguucccuuuc

SEQ ID NO: 314226 - RNA, 19 nt, Artificial Sequence
  Description of Artificial Sequence: Synthetic oligonucleotide
cuuaaaugugaccauccag

SEQ ID NO: 314227 - RNA, 19 nt, Artificial Sequence
  Description of Artificial Sequence: Synthetic oligonucleotide
uauaauaugcggaggggaa

SEQ ID NO: 314228 - RNA, 19 nt, Artificial Sequence
  Description of Artificial Sequence: Synthetic oligonucleotide
aaauuguauggcuugcuuu

SEQ ID NO: 314229 - RNA, 19 nt, Artificial Sequence
  Description of Artificial Sequence: Synthetic oligonucleotide
agauacgguaauuuuauaa

SEQ ID NO: 314230 - RNA, 19 nt, Artificial Sequence
  Description of Artificial Sequence: Synthetic oligonucleotide
uacauacuaaguaacggau

SEQ ID NO: 314231 - RNA, 19 nt, Artificial Sequence
  Description of Artificial Sequence: Synthetic oligonucleotide
ucacgggagaagucgaugg

SEQ ID NO: 314232 - RNA, 19 nt, Artificial Sequence
  Description of Artificial Sequence: Synthetic oligonucleotide
uuuuaaugcagugaagguc

SEQ ID NO: 314233 - RNA, 19 nt, Artificial Sequence
  Description of Artificial Sequence: Synthetic oligonucleotide
ugaauuaaucccuuuugau

SEQ ID NO: 314234 - RNA, 19 nt, Artificial Sequence
  Description of Artificial Sequence: Synthetic oligonucleotide
uagauaaacgguccuggug

SEQ ID NO: 314235 - RNA, 19 nt, Artificial Sequence
  Description of Artificial Sequence: Synthetic oligonucleotide
ucgaagaaccugcggaagg

SEQ ID NO: 314236 - RNA, 19 nt, Artificial Sequence
  Description of Artificial Sequence: Synthetic oligonucleotide
uguuuaucuauaguuauau

SEQ ID NO: 314237 - RNA, 19 nt, Artificial Sequence
  Description of Artificial Sequence: Synthetic oligonucleotide
aaguaacggauacauuaug

SEQ ID NO: 314238 - RNA, 19 nt, Artificial Sequence
  Description of Artificial Sequence: Synthetic oligonucleotide
aaguuaauccuuauaauuu

SEQ ID NO: 314239 - RNA, 19 nt, Artificial Sequence
  Description of Artificial Sequence: Synthetic oligonucleotide
aauggcaagauacgguaau

SEQ ID NO: 314240 - RNA, 19 nt, Artificial Sequence
  Description of Artificial Sequence: Synthetic oligonucleotide
uuaacaccacacaauacau

SEQ ID NO: 314241 - RNA, 19 nt, Artificial Sequence
  Description of Artificial Sequence: Synthetic oligonucleotide
auaaugaaaaugugaugca

SEQ ID NO: 314242 - RNA, 19 nt, Artificial Sequence
  Description of Artificial Sequence: Synthetic oligonucleotide
ucgucgaagaaccugcgga

SEQ ID NO: 314243 - RNA, 19 nt, Artificial Sequence
  Description of Artificial Sequence: Synthetic oligonucleotide
aaaauuggagguguccaug

SEQ ID NO: 314244 - RNA, 19 nt, Artificial Sequence
  Description of Artificial Sequence: Synthetic oligonucleotide
uucuuuaacaccacacaau

SEQ ID NO: 314245 - RNA, 19 nt, Artificial Sequence
  Description of Artificial Sequence: Synthetic oligonucleotide
uuucugccuagauacauac

SEQ ID NO: 314246 - RNA, 19 nt, Artificial Sequence
  Description of Artificial Sequence: Synthetic oligonucleotide
ugaauggcaagauacggua

SEQ ID NO: 314247 - RNA, 19 nt, Artificial Sequence
  Description of Artificial Sequence: Synthetic oligonucleotide
cuuacacauacacuggcug

SEQ ID NO: 314248 - RNA, 19 nt, Artificial Sequence
  Description of Artificial Sequence: Synthetic oligonucleotide
uuuacauuugccucccaaa

SEQ ID NO: 314249 - RNA, 19 nt, Artificial Sequence
  Description of Artificial Sequence: Synthetic oligonucleotide
uaccgggucaaaauuggag

SEQ ID NO: 314250 - RNA, 19 nt, Artificial Sequence
  Description of Artificial Sequence: Synthetic oligonucleotide
aaggcaugaguauccaccu

SEQ ID NO: 314251 - RNA, 19 nt, Artificial Sequence
  Description of Artificial Sequence: Synthetic oligonucleotide
acuagaaaugaaggauucc

SEQ ID NO: 314252 - RNA, 19 nt, Artificial Sequence
  Description of Artificial Sequence: Synthetic oligonucleotide
aacggauacauuaugcuaa

SEQ ID NO: 314253 - RNA, 19 nt, Artificial Sequence
  Description of Artificial Sequence: Synthetic oligonucleotide
acaccuauaugucuaagaa

SEQ ID NO: 314254 - RNA, 19 nt, Artificial Sequence
  Description of Artificial Sequence: Synthetic oligonucleotide
caauguuuuggcauagcug

SEQ ID NO: 314255 - RNA, 19 nt, Artificial Sequence
  Description of Artificial Sequence: Synthetic oligonucleotide
agugaagguccucaaagga

SEQ ID NO: 314256 - RNA, 19 nt, Artificial Sequence
  Description of Artificial Sequence: Synthetic oligonucleotide
uucgaagucacggugacuc

SEQ ID NO: 314257 - RNA, 19 nt, Artificial Sequence
  Description of Artificial Sequence: Synthetic oligonucleotide
uacuaaguaacggauacau

SEQ ID NO: 314258 - RNA, 19 nt, Artificial Sequence
  Description of Artificial Sequence: Synthetic oligonucleotide
agcuuaaaugugaccaucc

SEQ ID NO: 314259 - RNA, 19 nt, Artificial Sequence
  Description of Artificial Sequence: Synthetic oligonucleotide
cuggacuagagaaauggac

SEQ ID NO: 314260 - RNA, 19 nt, Artificial Sequence
  Description of Artificial Sequence: Synthetic oligonucleotide
ucgauggcgcugaagaaug

SEQ ID NO: 314261 - RNA, 19 nt, Artificial Sequence
  Description of Artificial Sequence: Synthetic oligonucleotide
uuugccucccaaagaaccc

SEQ ID NO: 314262 - RNA, 19 nt, Artificial Sequence
  Description of Artificial Sequence: Synthetic oligonucleotide
acauuugccucccaaagaa

SEQ ID NO: 314263 - RNA, 19 nt, Artificial Sequence
  Description of Artificial Sequence: Synthetic oligonucleotide
uacaccuauaugucuaaga

SEQ ID NO: 314264 - RNA, 19 nt, Artificial Sequence
  Description of Artificial Sequence: Synthetic oligonucleotide
ugcuuacacauacacuggc

SEQ ID NO: 314265 - RNA, 19 nt, Artificial Sequence
  Description of Artificial Sequence: Synthetic oligonucleotide
ugacaaacguuuacauuug

SEQ ID NO: 314266 - RNA, 19 nt, Artificial Sequence
  Description of Artificial Sequence: Synthetic oligonucleotide
uuaugcuaagaaccucaag

SEQ ID NO: 314267 - RNA, 19 nt, Artificial Sequence
  Description of Artificial Sequence: Synthetic oligonucleotide
uauauaugacaaacguuua

SEQ ID NO: 314268 - RNA, 19 nt, Artificial Sequence
  Description of Artificial Sequence: Synthetic oligonucleotide
aguuaauccuuauaauuua

SEQ ID NO: 314269 - RNA, 19 nt, Artificial Sequence
  Description of Artificial Sequence: Synthetic oligonucleotide
gucagcuuaaaugugacca

SEQ ID NO: 314270 - RNA, 19 nt, Artificial Sequence
  Description of Artificial Sequence: Synthetic oligonucleotide
gagcgcuguaaauaacacg

SEQ ID NO: 314271 - RNA, 19 nt, Artificial Sequence
  Description of Artificial Sequence: Synthetic oligonucleotide
uuaaaucgaguuccugaga

SEQ ID NO: 314272 - RNA, 19 nt, Artificial Sequence
  Description of Artificial Sequence: Synthetic oligonucleotide
auaugacaaacguuuacau

SEQ ID NO: 314273 - RNA, 19 nt, Artificial Sequence
  Description of Artificial Sequence: Synthetic oligonucleotide
acuauaauaugcggagggg

SEQ ID NO: 314274 - RNA, 19 nt, Artificial Sequence
  Description of Artificial Sequence: Synthetic oligonucleotide
ccagucauauccaagacac

SEQ ID NO: 314275 - RNA, 19 nt, Artificial Sequence
  Description of Artificial Sequence: Synthetic oligonucleotide
uugugaguccaccuaaauc

SEQ ID NO: 314276 - RNA, 19 nt, Artificial Sequence
  Description of Artificial Sequence: Synthetic oligonucleotide
agaaagaaccuaccacaag

SEQ ID NO: 314277 - RNA, 19 nt, Artificial Sequence
  Description of Artificial Sequence: Synthetic oligonucleotide
guuaauccuuauaauuuag

SEQ ID NO: 314278 - RNA, 19 nt, Artificial Sequence
  Description of Artificial Sequence: Synthetic oligonucleotide
cugugaauggcaagauacg

SEQ ID NO: 314279 - RNA, 19 nt, Artificial Sequence
  Description of Artificial Sequence: Synthetic oligonucleotide
aaauggguauccauaaaau

SEQ ID NO: 314280 - RNA, 19 nt, Artificial Sequence
  Description of Artificial Sequence: Synthetic oligonucleotide
aaacuagaaaugaaggauu

SEQ ID NO: 314281 - RNA, 19 nt, Artificial Sequence
  Description of Artificial Sequence: Synthetic oligonucleotide
auaugguucccuuucuggu

SEQ ID NO: 314282 - RNA, 19 nt, Artificial Sequence
  Description of Artificial Sequence: Synthetic oligonucleotide
aaacagauucacaggaccu

SEQ ID NO: 314283 - RNA, 19 nt, Artificial Sequence
  Description of Artificial Sequence: Synthetic oligonucleotide
uccaccuaaauccggugca

SEQ ID NO: 314284 - RNA, 19 nt, Artificial Sequence
  Description of Artificial Sequence: Synthetic oligonucleotide
gaaacuaugucagagcgcu

SEQ ID NO: 314285 - RNA, 19 nt, Artificial Sequence
  Description of Artificial Sequence: Synthetic oligonucleotide
cacaauacauuaucagcac

SEQ ID NO: 314286 - RNA, 19 nt, Artificial Sequence
  Description of Artificial Sequence: Synthetic oligonucleotide
uaacacggcauuacuacaa

SEQ ID NO: 314287 - RNA, 19 nt, Artificial Sequence
  Description of Artificial Sequence: Synthetic oligonucleotide
ugggcaucggaaaggguag

SEQ ID NO: 314288 - RNA, 19 nt, Artificial Sequence
  Description of Artificial Sequence: Synthetic oligonucleotide
ugaguccaccuaaauccgg

SEQ ID NO: 314289 - RNA, 19 nt, Artificial Sequence
  Description of Artificial Sequence: Synthetic oligonucleotide
uugauguguuuuauauaug

SEQ ID NO: 314290 - RNA, 19 nt, Artificial Sequence
  Description of Artificial Sequence: Synthetic oligonucleotide
uaacggauacauuaugcua

SEQ ID NO: 314291 - RNA, 19 nt, Artificial Sequence
  Description of Artificial Sequence: Synthetic oligonucleotide
ugcuaagaaccucaaggaa

SEQ ID NO: 314292 - RNA, 19 nt, Artificial Sequence
  Description of Artificial Sequence: Synthetic oligonucleotide
ucaucuaccgggucaaaau

SEQ ID NO: 314293 - RNA, 19 nt, Artificial Sequence
  Description of Artificial Sequence: Synthetic oligonucleotide
agaaacuaugucagagcgc

SEQ ID NO: 314294 - RNA, 19 nt, Artificial Sequence
  Description of Artificial Sequence: Synthetic oligonucleotide
cuuuaacaccacacaauac

SEQ ID NO: 314295 - RNA, 19 nt, Artificial Sequence
  Description of Artificial Sequence: Synthetic oligonucleotide
guauacuauaauaugcgga

SEQ ID NO: 314296 - RNA, 19 nt, Artificial Sequence
  Description of Artificial Sequence: Synthetic oligonucleotide
ggcauuacuacaaaauagc

SEQ ID NO: 314297 - RNA, 19 nt, Artificial Sequence
  Description of Artificial Sequence: Synthetic oligonucleotide
cauuacuacaaaauagcaa

SEQ ID NO: 314298 - RNA, 19 nt, Artificial Sequence
  Description of Artificial Sequence: Synthetic oligonucleotide
uccugucugauaugguucc

SEQ ID NO: 314299 - RNA, 19 nt, Artificial Sequence
  Description of Artificial Sequence: Synthetic oligonucleotide
uccuaccuuucucuaaaug

SEQ ID NO: 314300 - RNA, 19 nt, Artificial Sequence
  Description of Artificial Sequence: Synthetic oligonucleotide
uuaucacgcauuagucagc

SEQ ID NO: 314301 - RNA, 19 nt, Artificial Sequence
  Description of Artificial Sequence: Synthetic oligonucleotide
auaguauaaugaaaaugug

SEQ ID NO: 314302 - RNA, 19 nt, Artificial Sequence
  Description of Artificial Sequence: Synthetic oligonucleotide
gaugcauuccauccuuuca

SEQ ID NO: 314303 - RNA, 19 nt, Artificial Sequence
  Description of Artificial Sequence: Synthetic oligonucleotide
auacuauaauaugcggagg

SEQ ID NO: 314304 - RNA, 19 nt, Artificial Sequence
  Description of Artificial Sequence: Synthetic oligonucleotide
ccaguagaagcuuucaaag

SEQ ID NO: 314305 - RNA, 19 nt, Artificial Sequence
  Description of Artificial Sequence: Synthetic oligonucleotide
agaauaugccauucauaca

SEQ ID NO: 314306 - RNA, 19 nt, Artificial Sequence
  Description of Artificial Sequence: Synthetic oligonucleotide
uccugagaaagaaccuacc

SEQ ID NO: 314307 - RNA, 19 nt, Artificial Sequence
  Description of Artificial Sequence: Synthetic oligonucleotide
gucacggugacucucccug

SEQ ID NO: 314308 - RNA, 19 nt, Artificial Sequence
  Description of Artificial Sequence: Synthetic oligonucleotide
ugaacucguagaaggcgug

SEQ ID NO: 314309 - RNA, 19 nt, Artificial Sequence
  Description of Artificial Sequence: Synthetic oligonucleotide
uuccguaugucacgggaga

SEQ ID NO: 314310 - RNA, 19 nt, Artificial Sequence
  Description of Artificial Sequence: Synthetic oligonucleotide
uauugcacguuaucacgca

SEQ ID NO: 314311 - RNA, 19 nt, Artificial Sequence
  Description of Artificial Sequence: Synthetic oligonucleotide
gaaggugaacucguagaag

SEQ ID NO: 314312 - RNA, 19 nt, Artificial Sequence
  Description of Artificial Sequence: Synthetic oligonucleotide
agaaaccauacuaauuuga

SEQ ID NO: 314313 - RNA, 19 nt, Artificial Sequence
  Description of Artificial Sequence: Synthetic oligonucleotide
accaauucgaagucacggu

SEQ ID NO: 314314 - RNA, 19 nt, Artificial Sequence
  Description of Artificial Sequence: Synthetic oligonucleotide
gaauugugaguccaccuaa

SEQ ID NO: 314315 - RNA, 19 nt, Artificial Sequence
  Description of Artificial Sequence: Synthetic oligonucleotide
acccagucauauccaagac

SEQ ID NO: 314316 - RNA, 19 nt, Artificial Sequence
  Description of Artificial Sequence: Synthetic oligonucleotide
aaggauuccucaacuugag

SEQ ID NO: 314317 - RNA, 19 nt, Artificial Sequence
  Description of Artificial Sequence: Synthetic oligonucleotide
uauacaccuauaugucuaa

SEQ ID NO: 314318 - RNA, 19 nt, Artificial Sequence
  Description of Artificial Sequence: Synthetic oligonucleotide
aaaucgaguuccugagaaa

SEQ ID NO: 314319 - RNA, 19 nt, Artificial Sequence
  Description of Artificial Sequence: Synthetic oligonucleotide
cugaauuaaucccuuuuga

SEQ ID NO: 314320 - RNA, 19 nt, Artificial Sequence
  Description of Artificial Sequence: Synthetic oligonucleotide
cucacucuuucuaguauac

SEQ ID NO: 314321 - RNA, 19 nt, Artificial Sequence
  Description of Artificial Sequence: Synthetic oligonucleotide
ccacaagaaacuaugucag

SEQ ID NO: 314322 - RNA, 19 nt, Artificial Sequence
  Description of Artificial Sequence: Synthetic oligonucleotide
gcauagcugaauuaauccc

SEQ ID NO: 314323 - RNA, 19 nt, Artificial Sequence
  Description of Artificial Sequence: Synthetic oligonucleotide
acauuaugcuaagaaccuc

SEQ ID NO: 314324 - RNA, 19 nt, Artificial Sequence
  Description of Artificial Sequence: Synthetic oligonucleotide
uguccugucugauaugguu

SEQ ID NO: 314325 - RNA, 19 nt, Artificial Sequence
  Description of Artificial Sequence: Synthetic oligonucleotide
acguuaucacgcauuaguc

SEQ ID NO: 314326 - RNA, 19 nt, Artificial Sequence
  Description of Artificial Sequence: Synthetic oligonucleotide
acggcauuacuacaaaaua

SEQ ID NO: 314327 - RNA, 19 nt, Artificial Sequence
  Description of Artificial Sequence: Synthetic oligonucleotide
acggauacauuaugcuaag

SEQ ID NO: 314328 - RNA, 19 nt, Artificial Sequence
  Description of Artificial Sequence: Synthetic oligonucleotide
agagcgcuguaaauaacac

SEQ ID NO: 314329 - RNA, 19 nt, Artificial Sequence
  Description of Artificial Sequence: Synthetic oligonucleotide
aacgguccuggugacuugg

SEQ ID NO: 314330 - RNA, 19 nt, Artificial Sequence
  Description of Artificial Sequence: Synthetic oligonucleotide
aaauguggacaagugcuau

SEQ ID NO: 314331 - RNA, 19 nt, Artificial Sequence
  Description of Artificial Sequence: Synthetic oligonucleotide
agucccaauacaagcacag

SEQ ID NO: 314332 - RNA, 19 nt, Artificial Sequence
  Description of Artificial Sequence: Synthetic oligonucleotide
aacacggcauuacuacaaa

SEQ ID NO: 314333 - RNA, 19 nt, Artificial Sequence
  Description of Artificial Sequence: Synthetic oligonucleotide
gauaaacgguccuggugac

SEQ ID NO: 314334 - RNA, 19 nt, Artificial Sequence
  Description of Artificial Sequence: Synthetic oligonucleotide
cuuccguaugucacgggag

SEQ ID NO: 314335 - RNA, 19 nt, Artificial Sequence
  Description of Artificial Sequence: Synthetic oligonucleotide
acguuuacauuugccuccc

SEQ ID NO: 314336 - RNA, 19 nt, Artificial Sequence
  Description of Artificial Sequence: Synthetic oligonucleotide
ugcacguuaucacgcauua

SEQ ID NO: 314337 - RNA, 19 nt, Artificial Sequence
  Description of Artificial Sequence: Synthetic oligonucleotide
ucgaguuccugagaaagaa

SEQ ID NO: 314338 - RNA, 19 nt, Artificial Sequence
  Description of Artificial Sequence: Synthetic oligonucleotide
gaaaugugggaaacuauaa

SEQ ID NO: 314339 - RNA, 19 nt, Artificial Sequence
  Description of Artificial Sequence: Synthetic oligonucleotide
ucagcuuaaaugugaccau

SEQ ID NO: 314340 - RNA, 19 nt, Artificial Sequence
  Description of Artificial Sequence: Synthetic oligonucleotide
uaauaugcggaggggaaaa

SEQ ID NO: 314341 - RNA, 19 nt, Artificial Sequence
  Description of Artificial Sequence: Synthetic oligonucleotide
uaucacgcauuagucagcu

SEQ ID NO: 314342 - RNA, 19 nt, Artificial Sequence
  Description of Artificial Sequence: Synthetic oligonucleotide
auguggacaagugcuauca

SEQ ID NO: 314343 - RNA, 19 nt, Artificial Sequence
  Description of Artificial Sequence: Synthetic oligonucleotide
agucaacucugcaauguag

SEQ ID NO: 314344 - RNA, 19 nt, Artificial Sequence
  Description of Artificial Sequence: Synthetic oligonucleotide
agcugaauuaaucccuuuu

SEQ ID NO: 314345 - RNA, 19 nt, Artificial Sequence
  Description of Artificial Sequence: Synthetic oligonucleotide
gaagucacggugacucucc

SEQ ID NO: 314346 - RNA, 19 nt, Artificial Sequence
  Description of Artificial Sequence: Synthetic oligonucleotide
aggucgaucaggauguugu

SEQ ID NO: 314347 - RNA, 19 nt, Artificial Sequence
  Description of Artificial Sequence: Synthetic oligonucleotide
guaacggauacauuaugcu

SEQ ID NO: 314348 - RNA, 19 nt, Artificial Sequence
  Description of Artificial Sequence: Synthetic oligonucleotide
cauagcugaauuaaucccu

SEQ ID NO: 314349 - RNA, 19 nt, Artificial Sequence
  Description of Artificial Sequence: Synthetic oligonucleotide
cuagaauaccucauuuaaa

SEQ ID NO: 314350 - RNA, 19 nt, Artificial Sequence
  Description of Artificial Sequence: Synthetic oligonucleotide
accaaacaaacuucaguuu

SEQ ID NO: 314351 - RNA, 19 nt, Artificial Sequence
  Description of Artificial Sequence: Synthetic oligonucleotide
cuauaauaugcggagggga

SEQ ID NO: 314352 - RNA, 19 nt, Artificial Sequence
  Description of Artificial Sequence: Synthetic oligonucleotide
auaauaaauugugccagua

SEQ ID NO: 314353 - RNA, 19 nt, Artificial Sequence
  Description of Artificial Sequence: Synthetic oligonucleotide
guugucgucgaagaaccug

SEQ ID NO: 314354 - RNA, 19 nt, Artificial Sequence
  Description of Artificial Sequence: Synthetic oligonucleotide
cccaauacaagcacagcag

SEQ ID NO: 314355 - RNA, 19 nt, Artificial Sequence
  Description of Artificial Sequence: Synthetic oligonucleotide
gcauuagucagcuccuacc

SEQ ID NO: 314356 - RNA, 19 nt, Artificial Sequence
  Description of Artificial Sequence: Synthetic oligonucleotide
uccgguucaggacaucuuu

SEQ ID NO: 314357 - RNA, 19 nt, Artificial Sequence
  Description of Artificial Sequence: Synthetic oligonucleotide
aucuauaguuauauauaca

SEQ ID NO: 314358 - RNA, 19 nt, Artificial Sequence
  Description of Artificial Sequence: Synthetic oligonucleotide
uuggcgcucuccccgcugg

SEQ ID NO: 314359 - RNA, 19 nt, Artificial Sequence
  Description of Artificial Sequence: Synthetic oligonucleotide
gaucaggauguugucgggc

SEQ ID NO: 314360 - RNA, 19 nt, Artificial Sequence
  Description of Artificial Sequence: Synthetic oligonucleotide
auauacaccuauaugucua

SEQ ID NO: 314361 - RNA, 19 nt, Artificial Sequence
  Description of Artificial Sequence: Synthetic oligonucleotide
cagagcgcuguaaauaaca

SEQ ID NO: 314362 - RNA, 19 nt, Artificial Sequence
  Description of Artificial Sequence: Synthetic oligonucleotide
caauucgaagucacgguga

SEQ ID NO: 314363 - RNA, 19 nt, Artificial Sequence
  Description of Artificial Sequence: Synthetic oligonucleotide
guuuuaaugcagugaaggu

SEQ ID NO: 314364 - RNA, 19 nt, Artificial Sequence
  Description of Artificial Sequence: Synthetic oligonucleotide
ugcucacucuuucuaguau

SEQ ID NO: 314365 - RNA, 19 nt, Artificial Sequence
  Description of Artificial Sequence: Synthetic oligonucleotide
uuaaugcagugaagguccu

SEQ ID NO: 314366 - RNA, 19 nt, Artificial Sequence
  Description of Artificial Sequence: Synthetic oligonucleotide
gugaguccaccuaaauccg

SEQ ID NO: 314367 - RNA, 19 nt, Artificial Sequence
  Description of Artificial Sequence: Synthetic oligonucleotide
guccaccuaaauccggugc

SEQ ID NO: 314368 - RNA, 19 nt, Artificial Sequence
  Description of Artificial Sequence: Synthetic oligonucleotide
ucagagcgcuguaaauaac

SEQ ID NO: 314369 - RNA, 19 nt, Artificial Sequence
  Description of Artificial Sequence: Synthetic oligonucleotide
gucagagcgcuguaaauaa

SEQ ID NO: 314370 - RNA, 19 nt, Artificial Sequence
  Description of Artificial Sequence: Synthetic oligonucleotide
aagauacgguaauuuuaua

SEQ ID NO: 314371 - RNA, 19 nt, Artificial Sequence
  Description of Artificial Sequence: Synthetic oligonucleotide
ugguaguacuuuggaauug

SEQ ID NO: 314372 - RNA, 19 nt, Artificial Sequence
  Description of Artificial Sequence: Synthetic oligonucleotide
caaagaacccagucauauc

SEQ ID NO: 314373 - RNA, 19 nt, Artificial Sequence
  Description of Artificial Sequence: Synthetic oligonucleotide
cuucauggcaucaaggcau

SEQ ID NO: 314374 - RNA, 19 nt, Artificial Sequence
  Description of Artificial Sequence: Synthetic oligonucleotide
caagauacgguaauuuuau

SEQ ID NO: 314375 - RNA, 19 nt, Artificial Sequence
  Description of Artificial Sequence: Synthetic oligonucleotide
cauuaaccaaaacuagaaa

SEQ ID NO: 314376 - RNA, 19 nt, Artificial Sequence
  Description of Artificial Sequence: Synthetic oligonucleotide
aucuaccgggucaaaauug

SEQ ID NO: 314377 - RNA, 19 nt, Artificial Sequence
  Description of Artificial Sequence: Synthetic oligonucleotide
ucaaggcaugaguauccac

SEQ ID NO: 314378 - RNA, 19 nt, Artificial Sequence
  Description of Artificial Sequence: Synthetic oligonucleotide
augggugcgccuugagguc

SEQ ID NO: 314379 - RNA, 19 nt, Artificial Sequence
  Description of Artificial Sequence: Synthetic oligonucleotide
cacguuaucacgcauuagu

SEQ ID NO: 314380 - RNA, 19 nt, Artificial Sequence
  Description of Artificial Sequence: Synthetic oligonucleotide
gucgucgaagaaccugcgg

SEQ ID NO: 314381 - RNA, 19 nt, Artificial Sequence
  Description of Artificial Sequence: Synthetic oligonucleotide
ggcacacuucuccaaaggc

SEQ ID NO: 314382 - RNA, 19 nt, Artificial Sequence
  Description of Artificial Sequence: Synthetic oligonucleotide
accugcggaaggugaacuc

SEQ ID NO: 314383 - RNA, 19 nt, Artificial Sequence
  Description of Artificial Sequence: Synthetic oligonucleotide
aguccaccuaaauccggug

SEQ ID NO: 314384 - RNA, 19 nt, Artificial Sequence
  Description of Artificial Sequence: Synthetic oligonucleotide
gaagaaccugcggaaggug

SEQ ID NO: 314385 - RNA, 19 nt, Artificial Sequence
  Description of Artificial Sequence: Synthetic oligonucleotide
uugcacguuaucacgcauu

SEQ ID NO: 314386 - RNA, 19 nt, Artificial Sequence
  Description of Artificial Sequence: Synthetic oligonucleotide
ugaggucucgugccucggc

SEQ ID NO: 314387 - RNA, 19 nt, Artificial Sequence
  Description of Artificial Sequence: Synthetic oligonucleotide
aaccugcggaaggugaacu

SEQ ID NO: 314388 - RNA, 19 nt, Artificial Sequence
  Description of Artificial Sequence: Synthetic oligonucleotide
ugggugcgccuugaggucg

SEQ ID NO: 314389 - RNA, 19 nt, Artificial Sequence
  Description of Artificial Sequence: Synthetic oligonucleotide
ucggaaaggguagccguug

SEQ ID NO: 314390 - RNA, 19 nt, Artificial Sequence
  Description of Artificial Sequence: Synthetic oligonucleotide
cuggccucgugccagggac

SEQ ID NO: 314391 - RNA, 19 nt, Artificial Sequence
  Description of Artificial Sequence: Synthetic oligonucleotide
cggcauuacuacaaaauag

SEQ ID NO: 314392 - RNA, 19 nt, Artificial Sequence
  Description of Artificial Sequence: Synthetic oligonucleotide
uagaaggcgugcucagggu

SEQ ID NO: 314393 - RNA, 19 nt, Artificial Sequence
  Description of Artificial Sequence: Synthetic oligonucleotide
auaauaugcggaggggaaa

SEQ ID NO: 314394 - RNA, 19 nt, Artificial Sequence
  Description of Artificial Sequence: Synthetic oligonucleotide
gaacucguagaaggcgugc

SEQ ID NO: 314395 - RNA, 19 nt, Artificial Sequence
  Description of Artificial Sequence: Synthetic oligonucleotide
ccguugucgucgaagaacc

SEQ ID NO: 314396 - RNA, 19 nt, Artificial Sequence
  Description of Artificial Sequence: Synthetic oligonucleotide
uguugcccauuaaccaaaa

SEQ ID NO: 314397 - RNA, 19 nt, Artificial Sequence
  Description of Artificial Sequence: Synthetic oligonucleotide
cucucggcuggcucugacg

SEQ ID NO: 314398 - RNA, 19 nt, Artificial Sequence
  Description of Artificial Sequence: Synthetic oligonucleotide
ccauuaaccaaaacuagaa

SEQ ID NO: 314399 - RNA, 19 nt, Artificial Sequence
  Description of Artificial Sequence: Synthetic oligonucleotide
cucuagaauaccucauuua

SEQ ID NO: 314400 - RNA, 19 nt, Artificial Sequence
  Description of Artificial Sequence: Synthetic oligonucleotide
uccaagacacacacacguu

SEQ ID NO: 314401 - RNA, 19 nt, Artificial Sequence
  Description of Artificial Sequence: Synthetic oligonucleotide
auacuaaguaacggauaca

SEQ ID NO: 314402 - RNA, 19 nt, Artificial Sequence
  Description of Artificial Sequence: Synthetic oligonucleotide
ccuagauacauacuaagua

SEQ ID NO: 314403 - RNA, 19 nt, Artificial Sequence
  Description of Artificial Sequence: Synthetic oligonucleotide
ccaauucgaagucacggug

SEQ ID NO: 314404 - RNA, 19 nt, Artificial Sequence
  Description of Artificial Sequence: Synthetic oligonucleotide
agacuucagaauaugccau

SEQ ID NO: 314405 - RNA, 19 nt, Artificial Sequence
  Description of Artificial Sequence: Synthetic oligonucleotide
uggcaagauacgguaauuu

SEQ ID NO: 314406 - RNA, 19 nt, Artificial Sequence
  Description of Artificial Sequence: Synthetic oligonucleotide
caccuauaugucuaagaaa

SEQ ID NO: 314407 - RNA, 19 nt, Artificial Sequence
  Description of Artificial Sequence: Synthetic oligonucleotide
gucgaagaaccugcggaag

SEQ ID NO: 314408 - RNA, 19 nt, Artificial Sequence
  Description of Artificial Sequence: Synthetic oligonucleotide
augucagagcgcuguaaau

SEQ ID NO: 314409 - RNA, 19 nt, Artificial Sequence
  Description of Artificial Sequence: Synthetic oligonucleotide
cacgggagaagucgauggc

SEQ ID NO: 314410 - RNA, 19 nt, Artificial Sequence
  Description of Artificial Sequence: Synthetic oligonucleotide
agugcucuuuccauauugu

SEQ ID NO: 314411 - RNA, 19 nt, Artificial Sequence
  Description of Artificial Sequence: Synthetic oligonucleotide
ucagccucgcagaguccag

SEQ ID NO: 314412 - RNA, 19 nt, Artificial Sequence
  Description of Artificial Sequence: Synthetic oligonucleotide
acucucggcuggcucugac

SEQ ID NO: 314413 - RNA, 19 nt, Artificial Sequence
  Description of Artificial Sequence: Synthetic oligonucleotide
cacuguguagauaaacggu

SEQ ID NO: 314414 - RNA, 19 nt, Artificial Sequence
  Description of Artificial Sequence: Synthetic oligonucleotide
ucucagccgcauccucuag

SEQ ID NO: 314415 - RNA, 19 nt, Artificial Sequence
  Description of Artificial Sequence: Synthetic oligonucleotide
ggaaucacccaucaucucu

SEQ ID NO: 314416 - RNA, 19 nt, Artificial Sequence
  Description of Artificial Sequence: Synthetic oligonucleotide
aguuggacuccuucuggua

SEQ ID NO: 314417 - RNA, 19 nt, Artificial Sequence
  Description of Artificial Sequence: Synthetic oligonucleotide
agccuugacaugggccacc

SEQ ID NO: 314418 - RNA, 19 nt, Artificial Sequence
  Description of Artificial Sequence: Synthetic oligonucleotide
ggaaggugaacucguagaa

SEQ ID NO: 314419 - RNA, 19 nt, Artificial Sequence
  Description of Artificial Sequence: Synthetic oligonucleotide
cagcucuuaaacauuacau

SEQ ID NO: 314420 - RNA, 19 nt, Artificial Sequence
  Description of Artificial Sequence: Synthetic oligonucleotide
agcgagcgccgucuuguuc

SEQ ID NO: 314421 - RNA, 19 nt, Artificial Sequence
  Description of Artificial Sequence: Synthetic oligonucleotide
aucugcuuacacauacacu

SEQ ID NO: 314422 - RNA, 19 nt, Artificial Sequence
  Description of Artificial Sequence: Synthetic oligonucleotide
acacggcauuacuacaaaa

SEQ ID NO: 314423 - RNA, 19 nt, Artificial Sequence
  Description of Artificial Sequence: Synthetic oligonucleotide
cacaagaaacuaugucaga

SEQ ID NO: 314424 - RNA, 19 nt, Artificial Sequence
  Description of Artificial Sequence: Synthetic oligonucleotide
uggaaucacccaucaucuc

SEQ ID NO: 314425 - RNA, 19 nt, Artificial Sequence
  Description of Artificial Sequence: Synthetic oligonucleotide
acauacuaaguaacggaua

SEQ ID NO: 314426 - RNA, 19 nt, Artificial Sequence
  Description of Artificial Sequence: Synthetic oligonucleotide
acggugacucucccuguug

SEQ ID NO: 314427 - RNA, 19 nt, Artificial Sequence
  Description of Artificial Sequence: Synthetic oligonucleotide
ggauuccucaacuugaguu

SEQ ID NO: 314428 - RNA, 19 nt, Artificial Sequence
  Description of Artificial Sequence: Synthetic oligonucleotide
ccuaaauccggugcagagg

SEQ ID NO: 314429 - RNA, 19 nt, Artificial Sequence
  Description of Artificial Sequence: Synthetic oligonucleotide
acuggacuagagaaaugga

SEQ ID NO: 314430 - RNA, 19 nt, Artificial Sequence
  Description of Artificial Sequence: Synthetic oligonucleotide
cucgcagaguccagcuuug

SEQ ID NO: 314431 - RNA, 19 nt, Artificial Sequence
  Description of Artificial Sequence: Synthetic oligonucleotide
ugucacgggagaagucgau

SEQ ID NO: 314432 - RNA, 19 nt, Artificial Sequence
  Description of Artificial Sequence: Synthetic oligonucleotide
guccugucugauaugguuc

SEQ ID NO: 314433 - RNA, 19 nt, Artificial Sequence
  Description of Artificial Sequence: Synthetic oligonucleotide
ggaauugugaguccaccua

SEQ ID NO: 314434 - RNA, 19 nt, Artificial Sequence
  Description of Artificial Sequence: Synthetic oligonucleotide
cauacuggacuagagaaau

SEQ ID NO: 314435 - RNA, 19 nt, Artificial Sequence
  Description of Artificial Sequence: Synthetic oligonucleotide
ucgaagucacggugacucu

SEQ ID NO: 314436 - RNA, 19 nt, Artificial Sequence
  Description of Artificial Sequence: Synthetic oligonucleotide
gagucaacucugcaaugua

SEQ ID NO: 314437 - RNA, 19 nt, Artificial Sequence
  Description of Artificial Sequence: Synthetic oligonucleotide
acagcagacuucagaauau

SEQ ID NO: 314438 - RNA, 19 nt, Artificial Sequence
  Description of Artificial Sequence: Synthetic oligonucleotide
ucuuguggucacucucaau

SEQ ID NO: 314439 - RNA, 19 nt, Artificial Sequence
  Description of Artificial Sequence: Synthetic oligonucleotide
cacggcauuacuacaaaau

SEQ ID NO: 314440 - RNA, 19 nt, Artificial Sequence
  Description of Artificial Sequence: Synthetic oligonucleotide
aaccuaccacaagaaacua

SEQ ID NO: 314441 - RNA, 19 nt, Artificial Sequence
  Description of Artificial Sequence: Synthetic oligonucleotide
uccucaacuugaguuuguc

SEQ ID NO: 314442 - RNA, 19 nt, Artificial Sequence
  Description of Artificial Sequence: Synthetic oligonucleotide
gcuuaaaugugaccaucca

SEQ ID NO: 314443 - RNA, 19 nt, Artificial Sequence
  Description of Artificial Sequence: Synthetic oligonucleotide
acaagugcuaucagauaaa

SEQ ID NO: 314444 - RNA, 19 nt, Artificial Sequence
  Description of Artificial Sequence: Synthetic oligonucleotide
agaauacuguaagucccaa

SEQ ID NO: 314445 - RNA, 19 nt, Artificial Sequence
  Description of Artificial Sequence: Synthetic oligonucleotide
acggcuuugggcaucggaa

SEQ ID NO: 314446 - RNA, 19 nt, Artificial Sequence
  Description of Artificial Sequence: Synthetic oligonucleotide
gcaucggaaaggguagccg

SEQ ID NO: 314447 - RNA, 19 nt, Artificial Sequence
  Description of Artificial Sequence: Synthetic oligonucleotide
aaacuaugucagagcgcug

SEQ ID NO: 314448 - RNA, 19 nt, Artificial Sequence
  Description of Artificial Sequence: Synthetic oligonucleotide
agucacggugacucucccu

SEQ ID NO: 314449 - RNA, 19 nt, Artificial Sequence
  Description of Artificial Sequence: Synthetic oligonucleotide
guagauaaacgguccuggu

SEQ ID NO: 314450 - RNA, 19 nt, Artificial Sequence
  Description of Artificial Sequence: Synthetic oligonucleotide
gucacgggagaagucgaug

SEQ ID NO: 314451 - RNA, 19 nt, Artificial Sequence
  Description of Artificial Sequence: Synthetic oligonucleotide
aucgaguuccugagaaaga

SEQ ID NO: 314452 - RNA, 19 nt, Artificial Sequence
  Description of Artificial Sequence: Synthetic oligonucleotide
gcggaaggugaacucguag

SEQ ID NO: 314453 - RNA, 19 nt, Artificial Sequence
  Description of Artificial Sequence: Synthetic oligonucleotide
gcuuccguaugucacggga

SEQ ID NO: 314454 - RNA, 19 nt, Artificial Sequence
  Description of Artificial Sequence: Synthetic oligonucleotide
gaaccugcggaaggugaac

SEQ ID NO: 314455 - RNA, 19 nt, Artificial Sequence
  Description of Artificial Sequence: Synthetic oligonucleotide
uccguaugucacgggagaa

SEQ ID NO: 314456 - RNA, 19 nt, Artificial Sequence
  Description of Artificial Sequence: Synthetic oligonucleotide
ccugcggaaggugaacucg

SEQ ID NO: 314457 - RNA, 19 nt, Artificial Sequence
  Description of Artificial Sequence: Synthetic oligonucleotide
auacuggacuagagaaaug

SEQ ID NO: 314458 - RNA, 19 nt, Artificial Sequence
  Description of Artificial Sequence: Synthetic oligonucleotide
uuccgguucaggacaucuu

SEQ ID NO: 314459 - RNA, 19 nt, Artificial Sequence
  Description of Artificial Sequence: Synthetic oligonucleotide
auaaacgguccuggugacu

SEQ ID NO: 314460 - RNA, 19 nt, Artificial Sequence
  Description of Artificial Sequence: Synthetic oligonucleotide
gugaccauccaggucgauc

SEQ ID NO: 314461 - RNA, 19 nt, Artificial Sequence
  Description of Artificial Sequence: Synthetic oligonucleotide
cugacggcuuugggcaucg

SEQ ID NO: 314462 - RNA, 19 nt, Artificial Sequence
  Description of Artificial Sequence: Synthetic oligonucleotide
caucggaaaggguagccgu

SEQ ID NO: 314463 - RNA, 19 nt, Artificial Sequence
  Description of Artificial Sequence: Synthetic oligonucleotide
caugaguauccaccuuaca

SEQ ID NO: 314464 - RNA, 19 nt, Artificial Sequence
  Description of Artificial Sequence: Synthetic oligonucleotide
cagcagacuucagaauaug

SEQ ID NO: 314465 - RNA, 19 nt, Artificial Sequence
  Description of Artificial Sequence: Synthetic oligonucleotide
acuaaguaacggauacauu

SEQ ID NO: 314466 - RNA, 19 nt, Artificial Sequence
  Description of Artificial Sequence: Synthetic oligonucleotide
guguuuaucuauaguuaua

SEQ ID NO: 314467 - RNA, 19 nt, Artificial Sequence
  Description of Artificial Sequence: Synthetic oligonucleotide
gccguugucgucgaagaac

SEQ ID NO: 314468 - RNA, 19 nt, Artificial Sequence
  Description of Artificial Sequence: Synthetic oligonucleotide
cuaccacaagaaacuaugu

SEQ ID NO: 314469 - RNA, 19 nt, Artificial Sequence
  Description of Artificial Sequence: Synthetic oligonucleotide
ugguuccgguucaggacau

SEQ ID NO: 314470 - RNA, 19 nt, Artificial Sequence
  Description of Artificial Sequence: Synthetic oligonucleotide
cuaccgggucaaaauugga

SEQ ID NO: 314471 - RNA, 19 nt, Artificial Sequence
  Description of Artificial Sequence: Synthetic oligonucleotide
caaaauuggagguguccau

SEQ ID NO: 314472 - RNA, 19 nt, Artificial Sequence
  Description of Artificial Sequence: Synthetic oligonucleotide
accuaccacaagaaacuau

SEQ ID NO: 314473 - RNA, 19 nt, Artificial Sequence
  Description of Artificial Sequence: Synthetic oligonucleotide
gugaacucguagaaggcgu

SEQ ID NO: 314474 - RNA, 19 nt, Artificial Sequence
  Description of Artificial Sequence: Synthetic oligonucleotide
agcacgaaagcagcucuua

SEQ ID NO: 314475 - RNA, 19 nt, Artificial Sequence
  Description of Artificial Sequence: Synthetic oligonucleotide
auggcaagauacgguaauu

SEQ ID NO: 314476 - RNA, 19 nt, Artificial Sequence
  Description of Artificial Sequence: Synthetic oligonucleotide
cguuaucacgcauuaguca

SEQ ID NO: 314477 - RNA, 19 nt, Artificial Sequence
  Description of Artificial Sequence: Synthetic oligonucleotide
auucgaagucacggugacu

SEQ ID NO: 314478 - RNA, 19 nt, Artificial Sequence
  Description of Artificial Sequence: Synthetic oligonucleotide
cucuuuccauauuguacua

SEQ ID NO: 314479 - RNA, 19 nt, Artificial Sequence
  Description of Artificial Sequence: Synthetic oligonucleotide
gaguccaccuaaauccggu

SEQ ID NO: 314480 - RNA, 19 nt, Artificial Sequence
  Description of Artificial Sequence: Synthetic oligonucleotide
cucggcgcucagcuucacc

SEQ ID NO: 314481 - RNA, 19 nt, Artificial Sequence
  Description of Artificial Sequence: Synthetic oligonucleotide
ggcaucggaaaggguagcc

SEQ ID NO: 314482 - RNA, 19 nt, Artificial Sequence
  Description of Artificial Sequence: Synthetic oligonucleotide
ggaaaggguagccguuguc

SEQ ID NO: 314483 - RNA, 19 nt, Artificial Sequence
  Description of Artificial Sequence: Synthetic oligonucleotide
gcucacucuuucuaguaua

SEQ ID NO: 314484 - RNA, 19 nt, Artificial Sequence
  Description of Artificial Sequence: Synthetic oligonucleotide
gcaugaguauccaccuuac

SEQ ID NO: 314485 - RNA, 19 nt, Artificial Sequence
  Description of Artificial Sequence: Synthetic oligonucleotide
guuccgguucaggacaucu

SEQ ID NO: 314486 - RNA, 19 nt, Artificial Sequence
  Description of Artificial Sequence: Synthetic oligonucleotide
cacgcauuagucagcuccu

SEQ ID NO: 314487 - RNA, 19 nt, Artificial Sequence
  Description of Artificial Sequence: Synthetic oligonucleotide
aggcaugaguauccaccuu

SEQ ID NO: 314488 - RNA, 19 nt, Artificial Sequence
  Description of Artificial Sequence: Synthetic oligonucleotide
acauagggcgcaggcugcu

SEQ ID NO: 314489 - RNA, 19 nt, Artificial Sequence
  Description of Artificial Sequence: Synthetic oligonucleotide
caucuaccgggucaaaauu

SEQ ID NO: 314490 - RNA, 19 nt, Artificial Sequence
  Description of Artificial Sequence: Synthetic oligonucleotide
aucggaaaggguagccguu

SEQ ID NO: 314491 - RNA, 19 nt, Artificial Sequence
  Description of Artificial Sequence: Synthetic oligonucleotide
accuuacaggccaggcaca

SEQ ID NO: 314492 - RNA, 19 nt, Artificial Sequence
  Description of Artificial Sequence: Synthetic oligonucleotide
cagagcgagcgccgucuug

SEQ ID NO: 314493 - RNA, 19 nt, Artificial Sequence
  Description of Artificial Sequence: Synthetic oligonucleotide
caccuaaauccggugcaga

SEQ ID NO: 314494 - RNA, 19 nt, Artificial Sequence
  Description of Artificial Sequence: Synthetic oligonucleotide
cgcuguaaauaacacggca

SEQ ID NO: 314495 - RNA, 19 nt, Artificial Sequence
  Description of Artificial Sequence: Synthetic oligonucleotide
ggguauccauaaaauaagu

SEQ ID NO: 314496 - RNA, 19 nt, Artificial Sequence
  Description of Artificial Sequence: Synthetic oligonucleotide
ccguaugucacgggagaag

SEQ ID NO: 314497 - RNA, 19 nt, Artificial Sequence
  Description of Artificial Sequence: Synthetic oligonucleotide
cgaucaggauguugucggg

SEQ ID NO: 314498 - RNA, 19 nt, Artificial Sequence
  Description of Artificial Sequence: Synthetic oligonucleotide
gccagggacuuucuucauc

SEQ ID NO: 314499 - RNA, 19 nt, Artificial Sequence
  Description of Artificial Sequence: Synthetic oligonucleotide
gcgagcgccgucuuguucu

SEQ ID NO: 314500 - RNA, 19 nt, Artificial Sequence
  Description of Artificial Sequence: Synthetic oligonucleotide
gcgcuguaaauaacacggc

SEQ ID NO: 314501 - RNA, 19 nt, Artificial Sequence
  Description of Artificial Sequence: Synthetic oligonucleotide
gcacgaaagcagcucuuaa

SEQ ID NO: 314502 - RNA, 19 nt, Artificial Sequence
  Description of Artificial Sequence: Synthetic oligonucleotide
ccaccuaaauccggugcag

SEQ ID NO: 314503 - RNA, 19 nt, Artificial Sequence
  Description of Artificial Sequence: Synthetic oligonucleotide
cgcauuagucagcuccuac

SEQ ID NO: 314504 - RNA, 19 nt, Artificial Sequence
  Description of Artificial Sequence: Synthetic oligonucleotide
ccauuccuucccaggcggc

SEQ ID NO: 314505 - RNA, 19 nt, Artificial Sequence
  Description of Artificial Sequence: Synthetic oligonucleotide
gcacguuaucacgcauuag

SEQ ID NO: 314506 - RNA, 19 nt, Artificial Sequence
  Description of Artificial Sequence: Synthetic oligonucleotide
ucgugccucggcgcucagc

SEQ ID NO: 314507 - RNA, 19 nt, Artificial Sequence
  Description of Artificial Sequence: Synthetic oligonucleotide
gcuuacacauacacuggcu

SEQ ID NO: 314508 - RNA, 19 nt, Artificial Sequence
  Description of Artificial Sequence: Synthetic oligonucleotide
caaagccacuguguagaua

SEQ ID NO: 314509 - RNA, 19 nt, Artificial Sequence
  Description of Artificial Sequence: Synthetic oligonucleotide
cagccgcauccucuagcuc

SEQ ID NO: 314510 - RNA, 19 nt, Artificial Sequence
  Description of Artificial Sequence: Synthetic oligonucleotide
ugugaccauccaggucgau

SEQ ID NO: 314511 - RNA, 19 nt, Artificial Sequence
  Description of Artificial Sequence: Synthetic oligonucleotide
ggaauguuucucagacaua

SEQ ID NO: 314512 - RNA, 19 nt, Artificial Sequence
  Description of Artificial Sequence: Synthetic oligonucleotide
caccugcgcugggaugugc

SEQ ID NO: 314513 - RNA, 19 nt, Artificial Sequence
  Description of Artificial Sequence: Synthetic oligonucleotide
ugaggucgucugccccauu

SEQ ID NO: 314514 - RNA, 19 nt, Artificial Sequence
  Description of Artificial Sequence: Synthetic oligonucleotide
gcgccgucuuguucucucc

SEQ ID NO: 314515 - RNA, 19 nt, Artificial Sequence
  Description of Artificial Sequence: Synthetic oligonucleotide
ccgggucaaaauuggaggu

SEQ ID NO: 314516 - RNA, 19 nt, Artificial Sequence
  Description of Artificial Sequence: Synthetic oligonucleotide
gggcaucggaaaggguagc

SEQ ID NO: 314517 - RNA, 19 nt, Artificial Sequence
  Description of Artificial Sequence: Synthetic oligonucleotide
gggagaagucgauggcgcu

SEQ ID NO: 314518 - RNA, 19 nt, Artificial Sequence
  Description of Artificial Sequence: Synthetic oligonucleotide
cgucgaagaaccugcggaa

SEQ ID NO: 314519 - RNA, 19 nt, Artificial Sequence
  Description of Artificial Sequence: Synthetic oligonucleotide
ccgggucugcacucucggc

SEQ ID NO: 314520 - RNA, 19 nt, Artificial Sequence
  Description of Artificial Sequence: Synthetic oligonucleotide
caucgcccgggucugcacu

SEQ ID NO: 314521 - RNA, 19 nt, Artificial Sequence
  Description of Artificial Sequence: Synthetic oligonucleotide
ggaaagccaggaugucccu

SEQ ID NO: 314522 - RNA, 19 nt, Artificial Sequence
  Description of Artificial Sequence: Synthetic oligonucleotide
ccucaacuugaguuugucu

SEQ ID NO: 314523 - RNA, 19 nt, Artificial Sequence
  Description of Artificial Sequence: Synthetic oligonucleotide
gcaggcugcuuccguaugu

SEQ ID NO: 314524 - RNA, 19 nt, Artificial Sequence
  Description of Artificial Sequence: Synthetic oligonucleotide
cuccuaccuuucucuaaau

SEQ ID NO: 314525 - RNA, 19 nt, Artificial Sequence
  Description of Artificial Sequence: Synthetic oligonucleotide
cugcaucgcccgggucugc

SEQ ID NO: 314526 - RNA, 19 nt, Artificial Sequence
  Description of Artificial Sequence: Synthetic oligonucleotide
gcgugucccagaggucacc

SEQ ID NO: 314527 - RNA, 19 nt, Artificial Sequence
  Description of Artificial Sequence: Synthetic oligonucleotide
ggguagccguugucgucga

SEQ ID NO: 314528 - RNA, 19 nt, Artificial Sequence
  Description of Artificial Sequence: Synthetic oligonucleotide
cucgugccucggcgcucag

SEQ ID NO: 314529 - RNA, 19 nt, Artificial Sequence
  Description of Artificial Sequence: Synthetic oligonucleotide
gcucucagccgcauccucu

SEQ ID NO: 314530 - RNA, 19 nt, Artificial Sequence
  Description of Artificial Sequence: Synthetic oligonucleotide
cacggugacucucccuguu

SEQ ID NO: 314531 - RNA, 19 nt, Artificial Sequence
  Description of Artificial Sequence: Synthetic oligonucleotide
cucugacggcuuugggcau

SEQ ID NO: 314532 - RNA, 19 nt, Artificial Sequence
  Description of Artificial Sequence: Synthetic oligonucleotide
gguuccgguucaggacauc

SEQ ID NO: 314533 - RNA, 19 nt, Artificial Sequence
  Description of Artificial Sequence: Synthetic oligonucleotide
ccgcuggccucgugccagg

SEQ ID NO: 314534 - RNA, 19 nt, Artificial Sequence
  Description of Artificial Sequence: Synthetic oligonucleotide
gcgcucuccccgcuggccu

SEQ ID NO: 314535 - RNA, 19 nt, Artificial Sequence
  Description of Artificial Sequence: Synthetic oligonucleotide
cacucucggcuggcucuga

SEQ ID NO: 314536 - RNA, 19 nt, Artificial Sequence
  Description of Artificial Sequence: Synthetic oligonucleotide
cggauacauuaugcuaaga

SEQ ID NO: 314537 - RNA, 19 nt, Artificial Sequence
  Description of Artificial Sequence: Synthetic oligonucleotide
cgagcgccgucuuguucuc

SEQ ID NO: 314538 - RNA, 19 nt, Artificial Sequence
  Description of Artificial Sequence: Synthetic oligonucleotide
gcgcaggcugcuuccguau

SEQ ID NO: 314539 - RNA, 19 nt, Artificial Sequence
  Description of Artificial Sequence: Synthetic oligonucleotide
agccugcggcugaccuucu

SEQ ID NO: 314540 - RNA, 19 nt, Artificial Sequence
  Description of Artificial Sequence: Synthetic oligonucleotide
cauagggcgcaggcugcuu

SEQ ID NO: 314541 - RNA, 19 nt, Artificial Sequence
  Description of Artificial Sequence: Synthetic oligonucleotide
gccucccaaagaacccagu

SEQ ID NO: 314542 - RNA, 19 nt, Artificial Sequence
  Description of Artificial Sequence: Synthetic oligonucleotide
cguugucgucgaagaaccu

SEQ ID NO: 314543 - RNA, 19 nt, Artificial Sequence
  Description of Artificial Sequence: Synthetic oligonucleotide
gcagagcgagcgccgucuu

SEQ ID NO: 314544 - RNA, 19 nt, Artificial Sequence
  Description of Artificial Sequence: Synthetic oligonucleotide
gggugcgccuugaggucgu

SEQ ID NO: 314545 - RNA, 19 nt, Artificial Sequence
  Description of Artificial Sequence: Synthetic oligonucleotide
gcgcugggaugugcagcgu

SEQ ID NO: 314546 - RNA, 19 nt, Artificial Sequence
  Description of Artificial Sequence: Synthetic oligonucleotide
aacagcaccuuguuaaagc

SEQ ID NO: 314547 - RNA, 19 nt, Artificial Sequence
  Description of Artificial Sequence: Synthetic oligonucleotide
ugaaguaagggucucaucu

SEQ ID NO: 314548 - RNA, 19 nt, Artificial Sequence
  Description of Artificial Sequence: Synthetic oligonucleotide
uuuggaguuaucaauguca

SEQ ID NO: 314549 - RNA, 19 nt, Artificial Sequence
  Description of Artificial Sequence: Synthetic oligonucleotide
uguagauagaggcugcccg

SEQ ID NO: 314550 - RNA, 19 nt, Artificial Sequence
  Description of Artificial Sequence: Synthetic oligonucleotide
auauugauuaaccaggggu

SEQ ID NO: 314551 - RNA, 19 nt, Artificial Sequence
  Description of Artificial Sequence: Synthetic oligonucleotide
uauugauuaaccaggggug

SEQ ID NO: 314552 - RNA, 19 nt, Artificial Sequence
  Description of Artificial Sequence: Synthetic oligonucleotide
aagugcucgcugcagauac

SEQ ID NO: 314553 - RNA, 19 nt, Artificial Sequence
  Description of Artificial Sequence: Synthetic oligonucleotide
auauuugugacucuugcca

SEQ ID NO: 314554 - RNA, 19 nt, Artificial Sequence
  Description of Artificial Sequence: Synthetic oligonucleotide
gaugggacuauauggagag

SEQ ID NO: 314555 - RNA, 19 nt, Artificial Sequence
  Description of Artificial Sequence: Synthetic oligonucleotide
acuauauggagagaggaac

SEQ ID NO: 314556 - RNA, 19 nt, Artificial Sequence
  Description of Artificial Sequence: Synthetic oligonucleotide
uuuugugucgguacuaaca

SEQ ID NO: 314557 - RNA, 19 nt, Artificial Sequence
  Description of Artificial Sequence: Synthetic oligonucleotide
ucacgaacaaugaaggaca

SEQ ID NO: 314558 - RNA, 19 nt, Artificial Sequence
  Description of Artificial Sequence: Synthetic oligonucleotide
uauguaaguucucauuccc

SEQ ID NO: 314559 - RNA, 19 nt, Artificial Sequence
  Description of Artificial Sequence: Synthetic oligonucleotide
uauauugauuaaccagggg

SEQ ID NO: 314560 - RNA, 19 nt, Artificial Sequence
  Description of Artificial Sequence: Synthetic oligonucleotide
aaugaaggacagugauucc

SEQ ID NO: 314561 - RNA, 19 nt, Artificial Sequence
  Description of Artificial Sequence: Synthetic oligonucleotide
acuauguccaccccgagug

SEQ ID NO: 314562 - RNA, 19 nt, Artificial Sequence
  Description of Artificial Sequence: Synthetic oligonucleotide
uaggucaugcaccagaagu

SEQ ID NO: 314563 - RNA, 19 nt, Artificial Sequence
  Description of Artificial Sequence: Synthetic oligonucleotide
caggugaucucccagaggg

SEQ ID NO: 314564 - RNA, 19 nt, Artificial Sequence
  Description of Artificial Sequence: Synthetic oligonucleotide
uucaaaaguugucaggggu

SEQ ID NO: 314565 - RNA, 19 nt, Artificial Sequence
  Description of Artificial Sequence: Synthetic oligonucleotide
agaggcuacagguuaugcc

SEQ ID NO: 314566 - RNA, 19 nt, Artificial Sequence
  Description of Artificial Sequence: Synthetic oligonucleotide
uucagaggugggaauaggg

SEQ ID NO: 314567 - RNA, 19 nt, Artificial Sequence
  Description of Artificial Sequence: Synthetic oligonucleotide
aauagggucuguaggacgg

SEQ ID NO: 314568 - RNA, 19 nt, Artificial Sequence
  Description of Artificial Sequence: Synthetic oligonucleotide
ugcaauaaagggcaccagc

SEQ ID NO: 314569 - RNA, 19 nt, Artificial Sequence
  Description of Artificial Sequence: Synthetic oligonucleotide
ucaaaaguugucaggggug

SEQ ID NO: 314570 - RNA, 19 nt, Artificial Sequence
  Description of Artificial Sequence: Synthetic oligonucleotide
uuauccugggauuugcacc

SEQ ID NO: 314571 - RNA, 19 nt, Artificial Sequence
  Description of Artificial Sequence: Synthetic oligonucleotide
acagguuaugccugugucc

SEQ ID NO: 314572 - RNA, 19 nt, Artificial Sequence
  Description of Artificial Sequence: Synthetic oligonucleotide
agaggaacaaagugcagag

SEQ ID NO: 314573 - RNA, 19 nt, Artificial Sequence
  Description of Artificial Sequence: Synthetic oligonucleotide
uuaaggccuaaccuggcag

SEQ ID NO: 314574 - RNA, 19 nt, Artificial Sequence
  Description of Artificial Sequence: Synthetic oligonucleotide
augcggagagucuugacac

SEQ ID NO: 314575 - RNA, 19 nt, Artificial Sequence
  Description of Artificial Sequence: Synthetic oligonucleotide
uaaccaaccacuguugacc

SEQ ID NO: 314576 - RNA, 19 nt, Artificial Sequence
  Description of Artificial Sequence: Synthetic oligonucleotide
gaauagggucuguaggacg

SEQ ID NO: 314577 - RNA, 19 nt, Artificial Sequence
  Description of Artificial Sequence: Synthetic oligonucleotide
ugugucgguacuaacauuu

SEQ ID NO: 314578 - RNA, 19 nt, Artificial Sequence
  Description of Artificial Sequence: Synthetic oligonucleotide
cucuuaaggccuaaccugg

SEQ ID NO: 314579 - RNA, 19 nt, Artificial Sequence
  Description of Artificial Sequence: Synthetic oligonucleotide
uuuuguaggucaugcacca

SEQ ID NO: 314580 - RNA, 19 nt, Artificial Sequence
  Description of Artificial Sequence: Synthetic oligonucleotide
uauccugggauuugcaccc

SEQ ID NO: 314581 - RNA, 19 nt, Artificial Sequence
  Description of Artificial Sequence: Synthetic oligonucleotide
uuugugucgguacuaacau

SEQ ID NO: 314582 - RNA, 19 nt, Artificial Sequence
  Description of Artificial Sequence: Synthetic oligonucleotide
auguacaugcuccuauggg

SEQ ID NO: 314583 - RNA, 19 nt, Artificial Sequence
  Description of Artificial Sequence: Synthetic oligonucleotide
aaguccuaccugcccaccc

SEQ ID NO: 314584 - RNA, 19 nt, Artificial Sequence
  Description of Artificial Sequence: Synthetic oligonucleotide
uccacucucggcuuggaag

SEQ ID NO: 314585 - RNA, 19 nt, Artificial Sequence
  Description of Artificial Sequence: Synthetic oligonucleotide
ugggacuauauggagagag

SEQ ID NO: 314586 - RNA, 19 nt, Artificial Sequence
  Description of Artificial Sequence: Synthetic oligonucleotide
agcaucacgaacaaugaag

SEQ ID NO: 314587 - RNA, 19 nt, Artificial Sequence
  Description of Artificial Sequence: Synthetic oligonucleotide
gauuaaccaggggugaagg

SEQ ID NO: 314588 - RNA, 19 nt, Artificial Sequence
  Description of Artificial Sequence: Synthetic oligonucleotide
uuugcacccaccauucaga

SEQ ID NO: 314589 - RNA, 19 nt, Artificial Sequence
  Description of Artificial Sequence: Synthetic oligonucleotide
accuuguuaaagcaggacu

SEQ ID NO: 314590 - RNA, 19 nt, Artificial Sequence
  Description of Artificial Sequence: Synthetic oligonucleotide
auuugcacccaccauucag

SEQ ID NO: 314591 - RNA, 19 nt, Artificial Sequence
  Description of Artificial Sequence: Synthetic oligonucleotide
gaccauaucagcaucugug

SEQ ID NO: 314592 - RNA, 19 nt, Artificial Sequence
  Description of Artificial Sequence: Synthetic oligonucleotide
agcagcaucacgaacaaug

SEQ ID NO: 314593 - RNA, 19 nt, Artificial Sequence
  Description of Artificial Sequence: Synthetic oligonucleotide
uuuuccauauguacaugcu

SEQ ID NO: 314594 - RNA, 19 nt, Artificial Sequence
  Description of Artificial Sequence: Synthetic oligonucleotide
gaucgguguaucuugccag

SEQ ID NO: 314595 - RNA, 19 nt, Artificial Sequence
  Description of Artificial Sequence: Synthetic oligonucleotide
ugcuccuaugggcagaccc

SEQ ID NO: 314596 - RNA, 19 nt, Artificial Sequence
  Description of Artificial Sequence: Synthetic oligonucleotide
uaaggccuaaccuggcagg

SEQ ID NO: 314597 - RNA, 19 nt, Artificial Sequence
  Description of Artificial Sequence: Synthetic oligonucleotide
cagacuggccucuacaaag

SEQ ID NO: 314598 - RNA, 19 nt, Artificial Sequence
  Description of Artificial Sequence: Synthetic oligonucleotide
ggcugaugggacuauaugg

SEQ ID NO: 314599 - RNA, 19 nt, Artificial Sequence
  Description of Artificial Sequence: Synthetic oligonucleotide
ucgguacuaacauuuauua

SEQ ID NO: 314600 - RNA, 19 nt, Artificial Sequence
  Description of Artificial Sequence: Synthetic oligonucleotide
cugaccaacuauuuaauga

SEQ ID NO: 314601 - RNA, 19 nt, Artificial Sequence
  Description of Artificial Sequence: Synthetic oligonucleotide
auuuaaugaagggagaauu

SEQ ID NO: 314602 - RNA, 19 nt, Artificial Sequence
  Description of Artificial Sequence: Synthetic oligonucleotide
cugaccuguaaagacaccg

SEQ ID NO: 314603 - RNA, 19 nt, Artificial Sequence
  Description of Artificial Sequence: Synthetic oligonucleotide
agucuugacacagaguuca

SEQ ID NO: 314604 - RNA, 19 nt, Artificial Sequence
  Description of Artificial Sequence: Synthetic oligonucleotide
gcugauauuuucuaacagc

SEQ ID NO: 314605 - RNA, 19 nt, Artificial Sequence
  Description of Artificial Sequence: Synthetic oligonucleotide
aagaccuuugagagcagcg

SEQ ID NO: 314606 - RNA, 19 nt, Artificial Sequence
  Description of Artificial Sequence: Synthetic oligonucleotide
agcaaguccugacugaccu

SEQ ID NO: 314607 - RNA, 19 nt, Artificial Sequence
  Description of Artificial Sequence: Synthetic oligonucleotide
aucaguaacaagaugcgca

SEQ ID NO: 314608 - RNA, 19 nt, Artificial Sequence
  Description of Artificial Sequence: Synthetic oligonucleotide
cuguaaagacaccguaugg

SEQ ID NO: 314609 - RNA, 19 nt, Artificial Sequence
  Description of Artificial Sequence: Synthetic oligonucleotide
caaucaaugcgcucccagg

SEQ ID NO: 314610 - RNA, 19 nt, Artificial Sequence
  Description of Artificial Sequence: Synthetic oligonucleotide
caaguaguagcaacagcag

SEQ ID NO: 314611 - RNA, 19 nt, Artificial Sequence
  Description of Artificial Sequence: Synthetic oligonucleotide
gaugagugcaggguugagg

SEQ ID NO: 314612 - RNA, 19 nt, Artificial Sequence
  Description of Artificial Sequence: Synthetic oligonucleotide
gaagguagauggccggccg

SEQ ID NO: 314613 - RNA, 19 nt, Artificial Sequence
  Description of Artificial Sequence: Synthetic oligonucleotide
cugcagauacgucagggcc

SEQ ID NO: 314614 - RNA, 19 nt, Artificial Sequence
  Description of Artificial Sequence: Synthetic oligonucleotide
uggucaguagaggaaacag

SEQ ID NO: 314615 - RNA, 19 nt, Artificial Sequence
  Description of Artificial Sequence: Synthetic oligonucleotide
uuggaguuaucaaugucau

SEQ ID NO: 314616 - RNA, 19 nt, Artificial Sequence
  Description of Artificial Sequence: Synthetic oligonucleotide
gggacuuagugucaugugg

SEQ ID NO: 314617 - RNA, 19 nt, Artificial Sequence
  Description of Artificial Sequence: Synthetic oligonucleotide
gcacccaccauucagacug

SEQ ID NO: 314618 - RNA, 19 nt, Artificial Sequence
  Description of Artificial Sequence: Synthetic oligonucleotide
aagguagauggccggccgg

SEQ ID NO: 314619 - RNA, 19 nt, Artificial Sequence
  Description of Artificial Sequence: Synthetic oligonucleotide
ucuuucggccaccugacuc

SEQ ID NO: 314620 - RNA, 19 nt, Artificial Sequence
  Description of Artificial Sequence: Synthetic oligonucleotide
uguacccucggucuaggcu

SEQ ID NO: 314621 - RNA, 19 nt, Artificial Sequence
  Description of Artificial Sequence: Synthetic oligonucleotide
uaaccaggggugaagggcu

SEQ ID NO: 314622 - RNA, 19 nt, Artificial Sequence
  Description of Artificial Sequence: Synthetic oligonucleotide
cuuucggccaccugacucc

SEQ ID NO: 314623 - RNA, 19 nt, Artificial Sequence
  Description of Artificial Sequence: Synthetic oligonucleotide
gaagggagaauuggaggcg

SEQ ID NO: 314624 - RNA, 19 nt, Artificial Sequence
  Description of Artificial Sequence: Synthetic oligonucleotide
acugaccaacuauuuaaug

SEQ ID NO: 314625 - RNA, 19 nt, Artificial Sequence
  Description of Artificial Sequence: Synthetic oligonucleotide
aaccaaccacuguugacca

SEQ ID NO: 314626 - RNA, 19 nt, Artificial Sequence
  Description of Artificial Sequence: Synthetic oligonucleotide
cuuguuaaagcaggacucc

SEQ ID NO: 314627 - RNA, 19 nt, Artificial Sequence
  Description of Artificial Sequence: Synthetic oligonucleotide
gaagcgguucccuuugcug

SEQ ID NO: 314628 - RNA, 19 nt, Artificial Sequence
  Description of Artificial Sequence: Synthetic oligonucleotide
guacccucggucuaggcug

SEQ ID NO: 314629 - RNA, 19 nt, Artificial Sequence
  Description of Artificial Sequence: Synthetic oligonucleotide
acagugauuccacacacuu

SEQ ID NO: 314630 - RNA, 19 nt, Artificial Sequence
  Description of Artificial Sequence: Synthetic oligonucleotide
ccuuaguugacuucagagg

SEQ ID NO: 314631 - RNA, 19 nt, Artificial Sequence
  Description of Artificial Sequence: Synthetic oligonucleotide
ugcagauacgucagggccu

SEQ ID NO: 314632 - RNA, 19 nt, Artificial Sequence
  Description of Artificial Sequence: Synthetic oligonucleotide
cacgccugagccaauacac

SEQ ID NO: 314633 - RNA, 19 nt, Artificial Sequence
  Description of Artificial Sequence: Synthetic oligonucleotide
cuuaguugacuucagaggu

SEQ ID NO: 314634 - RNA, 19 nt, Artificial Sequence
  Description of Artificial Sequence: Synthetic oligonucleotide
caaucuuucggccaccuga

SEQ ID NO: 314635 - RNA, 19 nt, Artificial Sequence
  Description of Artificial Sequence: Synthetic oligonucleotide
gaguucauggagcccguag

SEQ ID NO: 314636 - RNA, 19 nt, Artificial Sequence
  Description of Artificial Sequence: Synthetic oligonucleotide
aagagcucgucacguaagu

SEQ ID NO: 314637 - RNA, 19 nt, Artificial Sequence
  Description of Artificial Sequence: Synthetic oligonucleotide
ugagucagcuucaaucuuu

SEQ ID NO: 314638 - RNA, 19 nt, Artificial Sequence
  Description of Artificial Sequence: Synthetic oligonucleotide
gaaguaagggucucaucuc

SEQ ID NO: 314639 - RNA, 19 nt, Artificial Sequence
  Description of Artificial Sequence: Synthetic oligonucleotide
uauuuaaugaagggagaau

SEQ ID NO: 314640 - RNA, 19 nt, Artificial Sequence
  Description of Artificial Sequence: Synthetic oligonucleotide
gaguggacaagagaggcac

SEQ ID NO: 314641 - RNA, 19 nt, Artificial Sequence
  Description of Artificial Sequence: Synthetic oligonucleotide
gaagaggguggcccagucg

SEQ ID NO: 314642 - RNA, 19 nt, Artificial Sequence
  Description of Artificial Sequence: Synthetic oligonucleotide
cacggugccaagcaacucc

SEQ ID NO: 314643 - RNA, 19 nt, Artificial Sequence
  Description of Artificial Sequence: Synthetic oligonucleotide
acuaaccaaccacuguuga

SEQ ID NO: 314644 - RNA, 19 nt, Artificial Sequence
  Description of Artificial Sequence: Synthetic oligonucleotide
agaucgguguaucuugcca

SEQ ID NO: 314645 - RNA, 19 nt, Artificial Sequence
  Description of Artificial Sequence: Synthetic oligonucleotide
gguguuauuuuccauaugu

SEQ ID NO: 314646 - RNA, 19 nt, Artificial Sequence
  Description of Artificial Sequence: Synthetic oligonucleotide
agugacccgccuuaguuga

SEQ ID NO: 314647 - RNA, 19 nt, Artificial Sequence
  Description of Artificial Sequence: Synthetic oligonucleotide
gagaggaacaaagugcaga

SEQ ID NO: 314648 - RNA, 19 nt, Artificial Sequence
  Description of Artificial Sequence: Synthetic oligonucleotide
acaagaugcgcagggacag

SEQ ID NO: 314649 - RNA, 19 nt, Artificial Sequence
  Description of Artificial Sequence: Synthetic oligonucleotide
aaguggaucccagcagggg

SEQ ID NO: 314650 - RNA, 19 nt, Artificial Sequence
  Description of Artificial Sequence: Synthetic oligonucleotide
ugaccuguaaagacaccgu

SEQ ID NO: 314651 - RNA, 19 nt, Artificial Sequence
  Description of Artificial Sequence: Synthetic oligonucleotide
auucagacuggccucuaca

SEQ ID NO: 314652 - RNA, 19 nt, Artificial Sequence
  Description of Artificial Sequence: Synthetic oligonucleotide
gccuuaguugacuucagag

SEQ ID NO: 314653 - RNA, 19 nt, Artificial Sequence
  Description of Artificial Sequence: Synthetic oligonucleotide
uucagacuggccucuacaa

SEQ ID NO: 314654 - RNA, 19 nt, Artificial Sequence
  Description of Artificial Sequence: Synthetic oligonucleotide
gugccaagcaacuccaaac

SEQ ID NO: 314655 - RNA, 19 nt, Artificial Sequence
  Description of Artificial Sequence: Synthetic oligonucleotide
gcucuuaaggccuaaccug

SEQ ID NO: 314656 - RNA, 19 nt, Artificial Sequence
  Description of Artificial Sequence: Synthetic oligonucleotide
auugauuaaccagggguga

SEQ ID NO: 314657 - RNA, 19 nt, Artificial Sequence
  Description of Artificial Sequence: Synthetic oligonucleotide
cucgcugcagauacgucag

SEQ ID NO: 314658 - RNA, 19 nt, Artificial Sequence
  Description of Artificial Sequence: Synthetic oligonucleotide
ucacgccugagccaauaca

SEQ ID NO: 314659 - RNA, 19 nt, Artificial Sequence
  Description of Artificial Sequence: Synthetic oligonucleotide
ugaccauaucagcaucugu

SEQ ID NO: 314660 - RNA, 19 nt, Artificial Sequence
  Description of Artificial Sequence: Synthetic oligonucleotide
cuaggcugacaucauuuug

SEQ ID NO: 314661 - RNA, 19 nt, Artificial Sequence
  Description of Artificial Sequence: Synthetic oligonucleotide
uuggcgccgggcaucacag

SEQ ID NO: 314662 - RNA, 19 nt, Artificial Sequence
  Description of Artificial Sequence: Synthetic oligonucleotide
ucaucuccgagugacccgc

SEQ ID NO: 314663 - RNA, 19 nt, Artificial Sequence
  Description of Artificial Sequence: Synthetic oligonucleotide
uauuuuccauauguacaug

SEQ ID NO: 314664 - RNA, 19 nt, Artificial Sequence
  Description of Artificial Sequence: Synthetic oligonucleotide
cuaacagcuuggucaguag

SEQ ID NO: 314665 - RNA, 19 nt, Artificial Sequence
  Description of Artificial Sequence: Synthetic oligonucleotide
ugucgguacuaacauuuau

SEQ ID NO: 314666 - RNA, 19 nt, Artificial Sequence
  Description of Artificial Sequence: Synthetic oligonucleotide
cuugcaauaaagggcacca

SEQ ID NO: 314667 - RNA, 19 nt, Artificial Sequence
  Description of Artificial Sequence: Synthetic oligonucleotide
aagaugcgcagggacagca

SEQ ID NO: 314668 - RNA, 19 nt, Artificial Sequence
  Description of Artificial Sequence: Synthetic oligonucleotide
gaagagcucgucacguaag

SEQ ID NO: 314669 - RNA, 19 nt, Artificial Sequence
  Description of Artificial Sequence: Synthetic oligonucleotide
ugugaaguaagggucucau

SEQ ID NO: 314670 - RNA, 19 nt, Artificial Sequence
  Description of Artificial Sequence: Synthetic oligonucleotide
aguccauugguguuauuuu

SEQ ID NO: 314671 - RNA, 19 nt, Artificial Sequence
  Description of Artificial Sequence: Synthetic oligonucleotide
acuauuuaaugaagggaga

SEQ ID NO: 314672 - RNA, 19 nt, Artificial Sequence
  Description of Artificial Sequence: Synthetic oligonucleotide
ucagacuggccucuacaaa

SEQ ID NO: 314673 - RNA, 19 nt, Artificial Sequence
  Description of Artificial Sequence: Synthetic oligonucleotide
cacuaaccaaccacuguug

SEQ ID NO: 314674 - RNA, 19 nt, Artificial Sequence
  Description of Artificial Sequence: Synthetic oligonucleotide
accguaugguagcuggcag

SEQ ID NO: 314675 - RNA, 19 nt, Artificial Sequence
  Description of Artificial Sequence: Synthetic oligonucleotide
uauguccaccccgagugcc

SEQ ID NO: 314676 - RNA, 19 nt, Artificial Sequence
  Description of Artificial Sequence: Synthetic oligonucleotide
agcuucaaucuuucggcca

SEQ ID NO: 314677 - RNA, 19 nt, Artificial Sequence
  Description of Artificial Sequence: Synthetic oligonucleotide
cugagucggaaguguaccc

SEQ ID NO: 314678 - RNA, 19 nt, Artificial Sequence
  Description of Artificial Sequence: Synthetic oligonucleotide
uuugugacucuugccacgu

SEQ ID NO: 314679 - RNA, 19 nt, Artificial Sequence
  Description of Artificial Sequence: Synthetic oligonucleotide
agaggaaacagcaccuugu

SEQ ID NO: 314680 - RNA, 19 nt, Artificial Sequence
  Description of Artificial Sequence: Synthetic oligonucleotide
cacacacuugagcagggac

SEQ ID NO: 314681 - RNA, 19 nt, Artificial Sequence
  Description of Artificial Sequence: Synthetic oligonucleotide
ugcauccgcacuuggcgcc

SEQ ID NO: 314682 - RNA, 19 nt, Artificial Sequence
  Description of Artificial Sequence: Synthetic oligonucleotide
uguaucuugccaggccugc

SEQ ID NO: 314683 - RNA, 19 nt, Artificial Sequence
  Description of Artificial Sequence: Synthetic oligonucleotide
cucgaugagugcaggguug

SEQ ID NO: 314684 - RNA, 19 nt, Artificial Sequence
  Description of Artificial Sequence: Synthetic oligonucleotide
cucaucuccgagugacccg

SEQ ID NO: 314685 - RNA, 19 nt, Artificial Sequence
  Description of Artificial Sequence: Synthetic oligonucleotide
auuggucuugaggaguuca

SEQ ID NO: 314686 - RNA, 19 nt, Artificial Sequence
  Description of Artificial Sequence: Synthetic oligonucleotide
gaagaccuuugagagcagc

SEQ ID NO: 314687 - RNA, 19 nt, Artificial Sequence
  Description of Artificial Sequence: Synthetic oligonucleotide
gacuuagugucaugugguc

SEQ ID NO: 314688 - RNA, 19 nt, Artificial Sequence
  Description of Artificial Sequence: Synthetic oligonucleotide
uuggucaguagaggaaaca

SEQ ID NO: 314689 - RNA, 19 nt, Artificial Sequence
  Description of Artificial Sequence: Synthetic oligonucleotide
cacgaacaaugaaggacag

SEQ ID NO: 314690 - RNA, 19 nt, Artificial Sequence
  Description of Artificial Sequence: Synthetic oligonucleotide
ggagcucacugucugacug

SEQ ID NO: 314691 - RNA, 19 nt, Artificial Sequence
  Description of Artificial Sequence: Synthetic oligonucleotide
guacccucaggcuucucug

SEQ ID NO: 314692 - RNA, 19 nt, Artificial Sequence
  Description of Artificial Sequence: Synthetic oligonucleotide
ccuguaaagacaccguaug

SEQ ID NO: 314693 - RNA, 19 nt, Artificial Sequence
  Description of Artificial Sequence: Synthetic oligonucleotide
aguuaucaaugucauccuu

SEQ ID NO: 314694 - RNA, 19 nt, Artificial Sequence
  Description of Artificial Sequence: Synthetic oligonucleotide
ggcagaucgguguaucuug

SEQ ID NO: 314695 - RNA, 19 nt, Artificial Sequence
  Description of Artificial Sequence: Synthetic oligonucleotide
agggacuuagugucaugug

SEQ ID NO: 314696 - RNA, 19 nt, Artificial Sequence
  Description of Artificial Sequence: Synthetic oligonucleotide
cucgucacguaaguguggc

SEQ ID NO: 314697 - RNA, 19 nt, Artificial Sequence
  Description of Artificial Sequence: Synthetic oligonucleotide
ucacuauguccaccccgag

SEQ ID NO: 314698 - RNA, 19 nt, Artificial Sequence
  Description of Artificial Sequence: Synthetic oligonucleotide
gcgugagucagcuucaauc

SEQ ID NO: 314699 - RNA, 19 nt, Artificial Sequence
  Description of Artificial Sequence: Synthetic oligonucleotide
gagcucacugucugacugc

SEQ ID NO: 314700 - RNA, 19 nt, Artificial Sequence
  Description of Artificial Sequence: Synthetic oligonucleotide
aucacuauguccaccccga

SEQ ID NO: 314701 - RNA, 19 nt, Artificial Sequence
  Description of Artificial Sequence: Synthetic oligonucleotide
ucggguacccucaggcuuc

SEQ ID NO: 314702 - RNA, 19 nt, Artificial Sequence
  Description of Artificial Sequence: Synthetic oligonucleotide
cugaggguaucucugggga

SEQ ID NO: 314703 - RNA, 19 nt, Artificial Sequence
  Description of Artificial Sequence: Synthetic oligonucleotide
aagaugcggagagucuuga

SEQ ID NO: 314704 - RNA, 19 nt, Artificial Sequence
  Description of Artificial Sequence: Synthetic oligonucleotide
gcuucugacagcaaaucac

SEQ ID NO: 314705 - RNA, 19 nt, Artificial Sequence
  Description of Artificial Sequence: Synthetic oligonucleotide
ucggaaguguacccucggu

SEQ ID NO: 314706 - RNA, 19 nt, Artificial Sequence
  Description of Artificial Sequence: Synthetic oligonucleotide
uugcaauaaagggcaccag

SEQ ID NO: 314707 - RNA, 19 nt, Artificial Sequence
  Description of Artificial Sequence: Synthetic oligonucleotide
gagucggaaguguacccuc

SEQ ID NO: 314708 - RNA, 19 nt, Artificial Sequence
  Description of Artificial Sequence: Synthetic oligonucleotide
uggccucuacaaagaugcg

SEQ ID NO: 314709 - RNA, 19 nt, Artificial Sequence
  Description of Artificial Sequence: Synthetic oligonucleotide
uucacgccugagccaauac

SEQ ID NO: 314710 - RNA, 19 nt, Artificial Sequence
  Description of Artificial Sequence: Synthetic oligonucleotide
aguggacaagagaggcacc

SEQ ID NO: 314711 - RNA, 19 nt, Artificial Sequence
  Description of Artificial Sequence: Synthetic oligonucleotide
aagacaccguaugguagcu

SEQ ID NO: 314712 - RNA, 19 nt, Artificial Sequence
  Description of Artificial Sequence: Synthetic oligonucleotide
cuguagauagaggcugccc

SEQ ID NO: 314713 - RNA, 19 nt, Artificial Sequence
  Description of Artificial Sequence: Synthetic oligonucleotide
gacuauauggagagaggaa

SEQ ID NO: 314714 - RNA, 19 nt, Artificial Sequence
  Description of Artificial Sequence: Synthetic oligonucleotide
cagaucgguguaucuugcc

SEQ ID NO: 314715 - RNA, 19 nt, Artificial Sequence
  Description of Artificial Sequence: Synthetic oligonucleotide
agguuaugccuguguccac

SEQ ID NO: 314716 - RNA, 19 nt, Artificial Sequence
  Description of Artificial Sequence: Synthetic oligonucleotide
gauaaugggcagagccaug

SEQ ID NO: 314717 - RNA, 19 nt, Artificial Sequence
  Description of Artificial Sequence: Synthetic oligonucleotide
caccacuaaccaaccacug

SEQ ID NO: 314718 - RNA, 19 nt, Artificial Sequence
  Description of Artificial Sequence: Synthetic oligonucleotide
cagguuaugccugugucca

SEQ ID NO: 314719 - RNA, 19 nt, Artificial Sequence
  Description of Artificial Sequence: Synthetic oligonucleotide
aguccuaccugcccacccu

SEQ ID NO: 314720 - RNA, 19 nt, Artificial Sequence
  Description of Artificial Sequence: Synthetic oligonucleotide
gcaauaaagggcaccagca

SEQ ID NO: 314721 - RNA, 19 nt, Artificial Sequence
  Description of Artificial Sequence: Synthetic oligonucleotide
uccaccccgagugccaugc

SEQ ID NO: 314722 - RNA, 19 nt, Artificial Sequence
  Description of Artificial Sequence: Synthetic oligonucleotide
gaccuguaaagacaccgua

SEQ ID NO: 314723 - RNA, 19 nt, Artificial Sequence
  Description of Artificial Sequence: Synthetic oligonucleotide
gugucaugugguccccagg

SEQ ID NO: 314724 - RNA, 19 nt, Artificial Sequence
  Description of Artificial Sequence: Synthetic oligonucleotide
ggccucuacaaagaugcgg

SEQ ID NO: 314725 - RNA, 19 nt, Artificial Sequence
  Description of Artificial Sequence: Synthetic oligonucleotide
ggacuauauggagagagga

SEQ ID NO: 314726 - RNA, 19 nt, Artificial Sequence
  Description of Artificial Sequence: Synthetic oligonucleotide
agucggaaguguacccucg

SEQ ID NO: 314727 - RNA, 19 nt, Artificial Sequence
  Description of Artificial Sequence: Synthetic oligonucleotide
ucacguaaguguggcaaaa

SEQ ID NO: 314728 - RNA, 19 nt, Artificial Sequence
  Description of Artificial Sequence: Synthetic oligonucleotide
gaguuaucaaugucauccu

SEQ ID NO: 314729 - RNA, 19 nt, Artificial Sequence
  Description of Artificial Sequence: Synthetic oligonucleotide
cuuaaggccuaaccuggca

SEQ ID NO: 314730 - RNA, 19 nt, Artificial Sequence
  Description of Artificial Sequence: Synthetic oligonucleotide
cuauguccaccccgagugc

SEQ ID NO: 314731 - RNA, 19 nt, Artificial Sequence
  Description of Artificial Sequence: Synthetic oligonucleotide
ccagucgucacccgagugg

SEQ ID NO: 314732 - RNA, 19 nt, Artificial Sequence
  Description of Artificial Sequence: Synthetic oligonucleotide
ggucucaucuccgagugac

SEQ ID NO: 314733 - RNA, 19 nt, Artificial Sequence
  Description of Artificial Sequence: Synthetic oligonucleotide
ucgaugagugcaggguuga

SEQ ID NO: 314734 - RNA, 19 nt, Artificial Sequence
  Description of Artificial Sequence: Synthetic oligonucleotide
ggucaugcaccagaagugc

SEQ ID NO: 314735 - RNA, 19 nt, Artificial Sequence
  Description of Artificial Sequence: Synthetic oligonucleotide
ggccguguccaucaccagg

SEQ ID NO: 314736 - RNA, 19 nt, Artificial Sequence
  Description of Artificial Sequence: Synthetic oligonucleotide
ccacucucggcuuggaagc

SEQ ID NO: 314737 - RNA, 19 nt, Artificial Sequence
  Description of Artificial Sequence: Synthetic oligonucleotide
ucuguaggacggggagugg

SEQ ID NO: 314738 - RNA, 19 nt, Artificial Sequence
  Description of Artificial Sequence: Synthetic oligonucleotide
gggacuauauggagagagg

SEQ ID NO: 314739 - RNA, 19 nt, Artificial Sequence
  Description of Artificial Sequence: Synthetic oligonucleotide
ugucaggggugaugugagc

SEQ ID NO: 314740 - RNA, 19 nt, Artificial Sequence
  Description of Artificial Sequence: Synthetic oligonucleotide
uguggcagaucgguguauc

SEQ ID NO: 314741 - RNA, 19 nt, Artificial Sequence
  Description of Artificial Sequence: Synthetic oligonucleotide
ggggaagguagauggccgg

SEQ ID NO: 314742 - RNA, 19 nt, Artificial Sequence
  Description of Artificial Sequence: Synthetic oligonucleotide
aggacucagucuacugggg

SEQ ID NO: 314743 - RNA, 19 nt, Artificial Sequence
  Description of Artificial Sequence: Synthetic oligonucleotide
gucgucacccgaguggaug

SEQ ID NO: 314744 - RNA, 19 nt, Artificial Sequence
  Description of Artificial Sequence: Synthetic oligonucleotide
ucgguguaucuugccaggc

SEQ ID NO: 314745 - RNA, 19 nt, Artificial Sequence
  Description of Artificial Sequence: Synthetic oligonucleotide
acaccguaugguagcuggc

SEQ ID NO: 314746 - RNA, 19 nt, Artificial Sequence
  Description of Artificial Sequence: Synthetic oligonucleotide
gauuugcacccaccauuca

SEQ ID NO: 314747 - RNA, 19 nt, Artificial Sequence
  Description of Artificial Sequence: Synthetic oligonucleotide
gggcucuuaaggccuaacc

SEQ ID NO: 314748 - RNA, 19 nt, Artificial Sequence
  Description of Artificial Sequence: Synthetic oligonucleotide
auagggucuguaggacggg

SEQ ID NO: 314749 - RNA, 19 nt, Artificial Sequence
  Description of Artificial Sequence: Synthetic oligonucleotide
cagaggcuacagguuaugc

SEQ ID NO: 314750 - RNA, 19 nt, Artificial Sequence
  Description of Artificial Sequence: Synthetic oligonucleotide
cuccaugccuccccagggc

SEQ ID NO: 314751 - RNA, 19 nt, Artificial Sequence
  Description of Artificial Sequence: Synthetic oligonucleotide
cagcacaagcaggcgaugc

SEQ ID NO: 314752 - RNA, 19 nt, Artificial Sequence
  Description of Artificial Sequence: Synthetic oligonucleotide
gggcugauauuuucuaaca

SEQ ID NO: 314753 - RNA, 19 nt, Artificial Sequence
  Description of Artificial Sequence: Synthetic oligonucleotide
accuguaaagacaccguau

SEQ ID NO: 314754 - RNA, 19 nt, Artificial Sequence
  Description of Artificial Sequence: Synthetic oligonucleotide
gaaguguacccucggucua

SEQ ID NO: 314755 - RNA, 19 nt, Artificial Sequence
  Description of Artificial Sequence: Synthetic oligonucleotide
guaacaagaugcgcaggga

SEQ ID NO: 314756 - RNA, 19 nt, Artificial Sequence
  Description of Artificial Sequence: Synthetic oligonucleotide
gugaaguaagggucucauc

SEQ ID NO: 314757 - RNA, 19 nt, Artificial Sequence
  Description of Artificial Sequence: Synthetic oligonucleotide
caccuuguuaaagcaggac

SEQ ID NO: 314758 - RNA, 19 nt, Artificial Sequence
  Description of Artificial Sequence: Synthetic oligonucleotide
agauacgucagggccugca

SEQ ID NO: 314759 - RNA, 19 nt, Artificial Sequence
  Description of Artificial Sequence: Synthetic oligonucleotide
gcucgcugcagauacguca

SEQ ID NO: 314760 - RNA, 19 nt, Artificial Sequence
  Description of Artificial Sequence: Synthetic oligonucleotide
ugcacccaccauucagacu

SEQ ID NO: 314761 - RNA, 19 nt, Artificial Sequence
  Description of Artificial Sequence: Synthetic oligonucleotide
ggaauagggucuguaggac

SEQ ID NO: 314762 - RNA, 19 nt, Artificial Sequence
  Description of Artificial Sequence: Synthetic oligonucleotide
augguaggaugggagcuca

SEQ ID NO: 314763 - RNA, 19 nt, Artificial Sequence
  Description of Artificial Sequence: Synthetic oligonucleotide
uugugucgguacuaacauu

SEQ ID NO: 314764 - RNA, 19 nt, Artificial Sequence
  Description of Artificial Sequence: Synthetic oligonucleotide
guccugacugaccuguaaa

SEQ ID NO: 314765 - RNA, 19 nt, Artificial Sequence
  Description of Artificial Sequence: Synthetic oligonucleotide
ggcucuuaaggccuaaccu

SEQ ID NO: 314766 - RNA, 19 nt, Artificial Sequence
  Description of Artificial Sequence: Synthetic oligonucleotide
acguuuauccugggauuug

SEQ ID NO: 314767 - RNA, 19 nt, Artificial Sequence
  Description of Artificial Sequence: Synthetic oligonucleotide
ugccauggucaguguagac

SEQ ID NO: 314768 - RNA, 19 nt, Artificial Sequence
  Description of Artificial Sequence: Synthetic oligonucleotide
gggcugaugggacuauaug

SEQ ID NO: 314769 - RNA, 19 nt, Artificial Sequence
  Description of Artificial Sequence: Synthetic oligonucleotide
uacccucggucuaggcuga

SEQ ID NO: 314770 - RNA, 19 nt, Artificial Sequence
  Description of Artificial Sequence: Synthetic oligonucleotide
ucuccgagugacccgccuu

SEQ ID NO: 314771 - RNA, 19 nt, Artificial Sequence
  Description of Artificial Sequence: Synthetic oligonucleotide
ucucggcuuggaagcucag

SEQ ID NO: 314772 - RNA, 19 nt, Artificial Sequence
  Description of Artificial Sequence: Synthetic oligonucleotide
ugacccgccuuaguugacu

SEQ ID NO: 314773 - RNA, 19 nt, Artificial Sequence
  Description of Artificial Sequence: Synthetic oligonucleotide
uggcucggguacccucagg

SEQ ID NO: 314774 - RNA, 19 nt, Artificial Sequence
  Description of Artificial Sequence: Synthetic oligonucleotide
gguguaucuugccaggccu

SEQ ID NO: 314775 - RNA, 19 nt, Artificial Sequence
  Description of Artificial Sequence: Synthetic oligonucleotide
agacuggccucuacaaaga

SEQ ID NO: 314776 - RNA, 19 nt, Artificial Sequence
  Description of Artificial Sequence: Synthetic oligonucleotide
ccguaugguagcuggcagg

SEQ ID NO: 314777 - RNA, 19 nt, Artificial Sequence
  Description of Artificial Sequence: Synthetic oligonucleotide
ugcgugagucagcuucaau

SEQ ID NO: 314778 - RNA, 19 nt, Artificial Sequence
  Description of Artificial Sequence: Synthetic oligonucleotide
ucgucacguaaguguggca

SEQ ID NO: 314779 - RNA, 19 nt, Artificial Sequence
  Description of Artificial Sequence: Synthetic oligonucleotide
gugauuccacacacuugag

SEQ ID NO: 314780 - RNA, 19 nt, Artificial Sequence
  Description of Artificial Sequence: Synthetic oligonucleotide
uggcagaucgguguaucuu

SEQ ID NO: 314781 - RNA, 19 nt, Artificial Sequence
  Description of Artificial Sequence: Synthetic oligonucleotide
ccaauacacuccagcaaug

SEQ ID NO: 314782 - RNA, 19 nt, Artificial Sequence
  Description of Artificial Sequence: Synthetic oligonucleotide
uccgagugacccgccuuag

SEQ ID NO: 314783 - RNA, 19 nt, Artificial Sequence
  Description of Artificial Sequence: Synthetic oligonucleotide
gucacguaaguguggcaaa

SEQ ID NO: 314784 - RNA, 19 nt, Artificial Sequence
  Description of Artificial Sequence: Synthetic oligonucleotide
cucagucuacuggggcugg

SEQ ID NO: 314785 - RNA, 19 nt, Artificial Sequence
  Description of Artificial Sequence: Synthetic oligonucleotide
ugcccaugagcuguagaua

SEQ ID NO: 314786 - RNA, 19 nt, Artificial Sequence
  Description of Artificial Sequence: Synthetic oligonucleotide
uggccucgaugagugcagg

SEQ ID NO: 314787 - RNA, 19 nt, Artificial Sequence
  Description of Artificial Sequence: Synthetic oligonucleotide
acccuccacggugccaagc

SEQ ID NO: 314788 - RNA, 19 nt, Artificial Sequence
  Description of Artificial Sequence: Synthetic oligonucleotide
ccguaggcaaccugguggc

SEQ ID NO: 314789 - RNA, 19 nt, Artificial Sequence
  Description of Artificial Sequence: Synthetic oligonucleotide
caggcgaugccuugcaaua

SEQ ID NO: 314790 - RNA, 19 nt, Artificial Sequence
  Description of Artificial Sequence: Synthetic oligonucleotide
acgaacaaugaaggacagu

SEQ ID NO: 314791 - RNA, 19 nt, Artificial Sequence
  Description of Artificial Sequence: Synthetic oligonucleotide
agcuuggucaguagaggaa

SEQ ID NO: 314792 - RNA, 19 nt, Artificial Sequence
  Description of Artificial Sequence: Synthetic oligonucleotide
cucggucuaggcugacauc

SEQ ID NO: 314793 - RNA, 19 nt, Artificial Sequence
  Description of Artificial Sequence: Synthetic oligonucleotide
cacccaccauucagacugg

SEQ ID NO: 314794 - RNA, 19 nt, Artificial Sequence
  Description of Artificial Sequence: Synthetic oligonucleotide
ugaucccggagagcugcug

SEQ ID NO: 314795 - RNA, 19 nt, Artificial Sequence
  Description of Artificial Sequence: Synthetic oligonucleotide
ugcucgcugcagauacguc

SEQ ID NO: 314796 - RNA, 19 nt, Artificial Sequence
  Description of Artificial Sequence: Synthetic oligonucleotide
gguucggggccgccgaagc

SEQ ID NO: 314797 - RNA, 19 nt, Artificial Sequence
  Description of Artificial Sequence: Synthetic oligonucleotide
ugguaggaugggagcucac

SEQ ID NO: 314798 - RNA, 19 nt, Artificial Sequence
  Description of Artificial Sequence: Synthetic oligonucleotide
gcguggaagcccucauccg

SEQ ID NO: 314799 - RNA, 19 nt, Artificial Sequence
  Description of Artificial Sequence: Synthetic oligonucleotide
cgcaucugcacuguggaag

SEQ ID NO: 314800 - RNA, 19 nt, Artificial Sequence
  Description of Artificial Sequence: Synthetic oligonucleotide
gauacgucagggccugcau

SEQ ID NO: 314801 - RNA, 19 nt, Artificial Sequence
  Description of Artificial Sequence: Synthetic oligonucleotide
aggacggggaguggacaag

SEQ ID NO: 314802 - RNA, 19 nt, Artificial Sequence
  Description of Artificial Sequence: Synthetic oligonucleotide
ucggggccgccgaagcacu

SEQ ID NO: 314803 - RNA, 19 nt, Artificial Sequence
  Description of Artificial Sequence: Synthetic oligonucleotide
caagaugcgcagggacagc

SEQ ID NO: 314804 - RNA, 19 nt, Artificial Sequence
  Description of Artificial Sequence: Synthetic oligonucleotide
caaguccuaccugcccacc

SEQ ID NO: 314805 - RNA, 19 nt, Artificial Sequence
  Description of Artificial Sequence: Synthetic oligonucleotide
acaugcuccuaugggcaga

SEQ ID NO: 314806 - RNA, 19 nt, Artificial Sequence
  Description of Artificial Sequence: Synthetic oligonucleotide
gcuccuaugggcagacccc

SEQ ID NO: 314807 - RNA, 19 nt, Artificial Sequence
  Description of Artificial Sequence: Synthetic oligonucleotide
ggccucgaugagugcaggg

SEQ ID NO: 314808 - RNA, 19 nt, Artificial Sequence
  Description of Artificial Sequence: Synthetic oligonucleotide
acggugccaagcaacucca

SEQ ID NO: 314809 - RNA, 19 nt, Artificial Sequence
  Description of Artificial Sequence: Synthetic oligonucleotide
gcagauacgucagggccug

SEQ ID NO: 314810 - RNA, 19 nt, Artificial Sequence
  Description of Artificial Sequence: Synthetic oligonucleotide
ccucauccgggucuccucc

SEQ ID NO: 314811 - RNA, 19 nt, Artificial Sequence
  Description of Artificial Sequence: Synthetic oligonucleotide
gugaugugagcagcaucac

SEQ ID NO: 314812 - RNA, 19 nt, Artificial Sequence
  Description of Artificial Sequence: Synthetic oligonucleotide
gucucaucuccgagugacc

SEQ ID NO: 314813 - RNA, 19 nt, Artificial Sequence
  Description of Artificial Sequence: Synthetic oligonucleotide
acgucagggccugcauccg

SEQ ID NO: 314814 - RNA, 19 nt, Artificial Sequence
  Description of Artificial Sequence: Synthetic oligonucleotide
aggggcuauguaaguucuc

SEQ ID NO: 314815 - RNA, 19 nt, Artificial Sequence
  Description of Artificial Sequence: Synthetic oligonucleotide
gcgaugccuugcaauaaag

SEQ ID NO: 314816 - RNA, 19 nt, Artificial Sequence
  Description of Artificial Sequence: Synthetic oligonucleotide
gaggucccucuggggaagg

SEQ ID NO: 314817 - RNA, 19 nt, Artificial Sequence
  Description of Artificial Sequence: Synthetic oligonucleotide
cagucgucacccgagugga

SEQ ID NO: 314818 - RNA, 19 nt, Artificial Sequence
  Description of Artificial Sequence: Synthetic oligonucleotide
gccuguguccacucucggc

SEQ ID NO: 314819 - RNA, 19 nt, Artificial Sequence
  Description of Artificial Sequence: Synthetic oligonucleotide
agggcugaugggacuauau

SEQ ID NO: 314820 - RNA, 19 nt, Artificial Sequence
  Description of Artificial Sequence: Synthetic oligonucleotide
agacaccguaugguagcug

SEQ ID NO: 314821 - RNA, 19 nt, Artificial Sequence
  Description of Artificial Sequence: Synthetic oligonucleotide
ugggcucuuaaggccuaac

SEQ ID NO: 314822 - RNA, 19 nt, Artificial Sequence
  Description of Artificial Sequence: Synthetic oligonucleotide
cagcaucacgaacaaugaa

SEQ ID NO: 314823 - RNA, 19 nt, Artificial Sequence
  Description of Artificial Sequence: Synthetic oligonucleotide
gcagaucgguguaucuugc

SEQ ID NO: 314824 - RNA, 19 nt, Artificial Sequence
  Description of Artificial Sequence: Synthetic oligonucleotide
caccguaugguagcuggca

SEQ ID NO: 314825 - RNA, 19 nt, Artificial Sequence
  Description of Artificial Sequence: Synthetic oligonucleotide
ccaggugaucucccagagg

SEQ ID NO: 314826 - RNA, 19 nt, Artificial Sequence
  Description of Artificial Sequence: Synthetic oligonucleotide
gcugcccgagugugcaggg

SEQ ID NO: 314827 - RNA, 19 nt, Artificial Sequence
  Description of Artificial Sequence: Synthetic oligonucleotide
augcuccuaugggcagacc

SEQ ID NO: 314828 - RNA, 19 nt, Artificial Sequence
  Description of Artificial Sequence: Synthetic oligonucleotide
gaucucggccguguccauc

SEQ ID NO: 314829 - RNA, 19 nt, Artificial Sequence
  Description of Artificial Sequence: Synthetic oligonucleotide
acgccugagccaauacacu

SEQ ID NO: 314830 - RNA, 19 nt, Artificial Sequence
  Description of Artificial Sequence: Synthetic oligonucleotide
caccugacuccagguggcg

SEQ ID NO: 314831 - RNA, 19 nt, Artificial Sequence
  Description of Artificial Sequence: Synthetic oligonucleotide
cagcguggaagcccucauc

SEQ ID NO: 314832 - RNA, 19 nt, Artificial Sequence
  Description of Artificial Sequence: Synthetic oligonucleotide
gugugaaguaagggucuca

SEQ ID NO: 314833 - RNA, 19 nt, Artificial Sequence
  Description of Artificial Sequence: Synthetic oligonucleotide
gacagugauuccacacacu

SEQ ID NO: 314834 - RNA, 19 nt, Artificial Sequence
  Description of Artificial Sequence: Synthetic oligonucleotide
uccgcacuuggcgccgggc

SEQ ID NO: 314835 - RNA, 19 nt, Artificial Sequence
  Description of Artificial Sequence: Synthetic oligonucleotide
accaaccacuguugaccau

SEQ ID NO: 314836 - RNA, 19 nt, Artificial Sequence
  Description of Artificial Sequence: Synthetic oligonucleotide
agguucggggccgccgaag

SEQ ID NO: 314837 - RNA, 19 nt, Artificial Sequence
  Description of Artificial Sequence: Synthetic oligonucleotide
gcaaguccugacugaccug

SEQ ID NO: 314838 - RNA, 19 nt, Artificial Sequence
  Description of Artificial Sequence: Synthetic oligonucleotide
caccggagagguggccucg

SEQ ID NO: 314839 - RNA, 19 nt, Artificial Sequence
  Description of Artificial Sequence: Synthetic oligonucleotide
gccguguccaucaccagga

SEQ ID NO: 314840 - RNA, 19 nt, Artificial Sequence
  Description of Artificial Sequence: Synthetic oligonucleotide
cauugguguuauuuuccau

SEQ ID NO: 314841 - RNA, 19 nt, Artificial Sequence
  Description of Artificial Sequence: Synthetic oligonucleotide
agauggccggccgggguca

SEQ ID NO: 314842 - RNA, 19 nt, Artificial Sequence
  Description of Artificial Sequence: Synthetic oligonucleotide
gacuggccucuacaaagau

SEQ ID NO: 314843 - RNA, 19 nt, Artificial Sequence
  Description of Artificial Sequence: Synthetic oligonucleotide
guggccuguagagcaucug

SEQ ID NO: 314844 - RNA, 19 nt, Artificial Sequence
  Description of Artificial Sequence: Synthetic oligonucleotide
augggacuauauggagaga

SEQ ID NO: 314845 - RNA, 19 nt, Artificial Sequence
  Description of Artificial Sequence: Synthetic oligonucleotide
cacuauguccaccccgagu

SEQ ID NO: 314846 - RNA, 19 nt, Artificial Sequence
  Description of Artificial Sequence: Synthetic oligonucleotide
guucggggccgccgaagca

SEQ ID NO: 314847 - RNA, 19 nt, Artificial Sequence
  Description of Artificial Sequence: Synthetic oligonucleotide
guagauggccggccggggu

SEQ ID NO: 314848 - RNA, 19 nt, Artificial Sequence
  Description of Artificial Sequence: Synthetic oligonucleotide
ggagguucggggccgccga

SEQ ID NO: 314849 - RNA, 19 nt, Artificial Sequence
  Description of Artificial Sequence: Synthetic oligonucleotide
ggaggucccucuggggaag

SEQ ID NO: 314850 - RNA, 19 nt, Artificial Sequence
  Description of Artificial Sequence: Synthetic oligonucleotide
agggagaauuggaggcggu

SEQ ID NO: 314851 - RNA, 19 nt, Artificial Sequence
  Description of Artificial Sequence: Synthetic oligonucleotide
cgugagucagcuucaaucu

SEQ ID NO: 314852 - RNA, 19 nt, Artificial Sequence
  Description of Artificial Sequence: Synthetic oligonucleotide
agaucucggccguguccau

SEQ ID NO: 314853 - RNA, 19 nt, Artificial Sequence
  Description of Artificial Sequence: Synthetic oligonucleotide
cuccgagugacccgccuua

SEQ ID NO: 314854 - RNA, 19 nt, Artificial Sequence
  Description of Artificial Sequence: Synthetic oligonucleotide
cgguguaucuugccaggcc

SEQ ID NO: 314855 - RNA, 19 nt, Artificial Sequence
  Description of Artificial Sequence: Synthetic oligonucleotide
gcagggacuuagugucaug

SEQ ID NO: 314856 - RNA, 19 nt, Artificial Sequence
  Description of Artificial Sequence: Synthetic oligonucleotide
cucggguacccucaggcuu

SEQ ID NO: 314857 - RNA, 19 nt, Artificial Sequence
  Description of Artificial Sequence: Synthetic oligonucleotide
gguuaugccuguguccacu

SEQ ID NO: 314858 - RNA, 19 nt, Artificial Sequence
  Description of Artificial Sequence: Synthetic oligonucleotide
ggugcgugagucagcuuca

SEQ ID NO: 314859 - RNA, 19 nt, Artificial Sequence
  Description of Artificial Sequence: Synthetic oligonucleotide
gucaugcaccagaagugcu

SEQ ID NO: 314860 - RNA, 19 nt, Artificial Sequence
  Description of Artificial Sequence: Synthetic oligonucleotide
uggcgccgggcaucacagc

SEQ ID NO: 314861 - RNA, 19 nt, Artificial Sequence
  Description of Artificial Sequence: Synthetic oligonucleotide
gguggcucggguacccuca

SEQ ID NO: 314862 - RNA, 19 nt, Artificial Sequence
  Description of Artificial Sequence: Synthetic oligonucleotide
ccaccacuaaccaaccacu

SEQ ID NO: 314863 - RNA, 19 nt, Artificial Sequence
  Description of Artificial Sequence: Synthetic oligonucleotide
gcauccgcacuuggcgccg

SEQ ID NO: 314864 - RNA, 19 nt, Artificial Sequence
  Description of Artificial Sequence: Synthetic oligonucleotide
cccgccuuaguugacuuca

SEQ ID NO: 314865 - RNA, 19 nt, Artificial Sequence
  Description of Artificial Sequence: Synthetic oligonucleotide
cauccgcacuuggcgccgg

SEQ ID NO: 314866 - RNA, 19 nt, Artificial Sequence
  Description of Artificial Sequence: Synthetic oligonucleotide
ggccggggucaccagcagc

SEQ ID NO: 314867 - RNA, 19 nt, Artificial Sequence
  Description of Artificial Sequence: Synthetic oligonucleotide
cuggagccugcaugcaugu

SEQ ID NO: 314868 - RNA, 19 nt, Artificial Sequence
  Description of Artificial Sequence: Synthetic oligonucleotide
ccacuaaccaaccacuguu

SEQ ID NO: 314869 - RNA, 19 nt, Artificial Sequence
  Description of Artificial Sequence: Synthetic oligonucleotide
ggacggggaguggacaaga

SEQ ID NO: 314870 - RNA, 19 nt, Artificial Sequence
  Description of Artificial Sequence: Synthetic oligonucleotide
guagaggaaacagcaccuu

SEQ ID NO: 314871 - RNA, 19 nt, Artificial Sequence
  Description of Artificial Sequence: Synthetic oligonucleotide
cacguuuauccugggauuu

SEQ ID NO: 314872 - RNA, 19 nt, Artificial Sequence
  Description of Artificial Sequence: Synthetic oligonucleotide
gugucgguacuaacauuua

SEQ ID NO: 314873 - RNA, 19 nt, Artificial Sequence
  Description of Artificial Sequence: Synthetic oligonucleotide
gcccguaggcaaccuggug

SEQ ID NO: 314874 - RNA, 19 nt, Artificial Sequence
  Description of Artificial Sequence: Synthetic oligonucleotide
gguggcacgcccaccugca

SEQ ID NO: 314875 - RNA, 19 nt, Artificial Sequence
  Description of Artificial Sequence: Synthetic oligonucleotide
gcacgcggcaggcacugca

SEQ ID NO: 314876 - RNA, 19 nt, Artificial Sequence
  Description of Artificial Sequence: Synthetic oligonucleotide
cuucacgccugagccaaua

SEQ ID NO: 314877 - RNA, 19 nt, Artificial Sequence
  Description of Artificial Sequence: Synthetic oligonucleotide
cccagucgucacccgagug

SEQ ID NO: 314878 - RNA, 19 nt, Artificial Sequence
  Description of Artificial Sequence: Synthetic oligonucleotide
ccgccuuaguugacuucag

SEQ ID NO: 314879 - RNA, 19 nt, Artificial Sequence
  Description of Artificial Sequence: Synthetic oligonucleotide
cgucacguaaguguggcaa

SEQ ID NO: 314880 - RNA, 19 nt, Artificial Sequence
  Description of Artificial Sequence: Synthetic oligonucleotide
aggcccacugugaggcuau

SEQ ID NO: 314881 - RNA, 19 nt, Artificial Sequence
  Description of Artificial Sequence: Synthetic oligonucleotide
acccucggucuaggcugac

SEQ ID NO: 314882 - RNA, 19 nt, Artificial Sequence
  Description of Artificial Sequence: Synthetic oligonucleotide
cagauacgucagggccugc

SEQ ID NO: 314883 - RNA, 19 nt, Artificial Sequence
  Description of Artificial Sequence: Synthetic oligonucleotide
gugacccgccuuaguugac

SEQ ID NO: 314884 - RNA, 19 nt, Artificial Sequence
  Description of Artificial Sequence: Synthetic oligonucleotide
ccgagugugcagggugugc

SEQ ID NO: 314885 - RNA, 19 nt, Artificial Sequence
  Description of Artificial Sequence: Synthetic oligonucleotide
gaguggauguuggcugcau

SEQ ID NO: 314886 - RNA, 19 nt, Artificial Sequence
  Description of Artificial Sequence: Synthetic oligonucleotide
gggucucaucuccgaguga

SEQ ID NO: 314887 - RNA, 19 nt, Artificial Sequence
  Description of Artificial Sequence: Synthetic oligonucleotide
agggugcgugagucagcuu

SEQ ID NO: 314888 - RNA, 19 nt, Artificial Sequence
  Description of Artificial Sequence: Synthetic oligonucleotide
agucgucacccgaguggau

SEQ ID NO: 314889 - RNA, 19 nt, Artificial Sequence
  Description of Artificial Sequence: Synthetic oligonucleotide
caggcccacugugaggcua

SEQ ID NO: 314890 - RNA, 19 nt, Artificial Sequence
  Description of Artificial Sequence: Synthetic oligonucleotide
gcucggguacccucaggcu

SEQ ID NO: 314891 - RNA, 19 nt, Artificial Sequence
  Description of Artificial Sequence: Synthetic oligonucleotide
ccucggucuaggcugacau

SEQ ID NO: 314892 - RNA, 19 nt, Artificial Sequence
  Description of Artificial Sequence: Synthetic oligonucleotide
gugcgugagucagcuucaa

SEQ ID NO: 314893 - RNA, 19 nt, Artificial Sequence
  Description of Artificial Sequence: Synthetic oligonucleotide
cccacugugaggcuauauu

SEQ ID NO: 314894 - RNA, 19 nt, Artificial Sequence
  Description of Artificial Sequence: Synthetic oligonucleotide
ccauauguacaugcuccua

SEQ ID NO: 314895 - RNA, 19 nt, Artificial Sequence
  Description of Artificial Sequence: Synthetic oligonucleotide
ccacguuuauccugggauu

SEQ ID NO: 314896 - RNA, 19 nt, Artificial Sequence
  Description of Artificial Sequence: Synthetic oligonucleotide
cugagcccuccuuggguuu

SEQ ID NO: 314897 - RNA, 19 nt, Artificial Sequence
  Description of Artificial Sequence: Synthetic oligonucleotide
cagggcugaugggacuaua

SEQ ID NO: 314898 - RNA, 19 nt, Artificial Sequence
  Description of Artificial Sequence: Synthetic oligonucleotide
cacucucggcuuggaagcu

SEQ ID NO: 314899 - RNA, 19 nt, Artificial Sequence
  Description of Artificial Sequence: Synthetic oligonucleotide
cgccuuaguugacuucaga

SEQ ID NO: 314900 - RNA, 19 nt, Artificial Sequence
  Description of Artificial Sequence: Synthetic oligonucleotide
ccacggugccaagcaacuc

SEQ ID NO: 314901 - RNA, 19 nt, Artificial Sequence
  Description of Artificial Sequence: Synthetic oligonucleotide
cgagugacccgccuuaguu

SEQ ID NO: 314902 - RNA, 19 nt, Artificial Sequence
  Description of Artificial Sequence: Synthetic oligonucleotide
cagggccgccaggcugaag

SEQ ID NO: 314903 - RNA, 19 nt, Artificial Sequence
  Description of Artificial Sequence: Synthetic oligonucleotide
ggcuuuuggcugugagguu

SEQ ID NO: 314904 - RNA, 19 nt, Artificial Sequence
  Description of Artificial Sequence: Synthetic oligonucleotide
cgccgaagcacugagcccu

SEQ ID NO: 314905 - RNA, 19 nt, Artificial Sequence
  Description of Artificial Sequence: Synthetic oligonucleotide
ccccaccacuaaccaacca

SEQ ID NO: 314906 - RNA, 19 nt, Artificial Sequence
  Description of Artificial Sequence: Synthetic oligonucleotide
ccccaucaaguaguagcaa

SEQ ID NO: 314907 - RNA, 19 nt, Artificial Sequence
  Description of Artificial Sequence: Synthetic oligonucleotide
gcccagucgucacccgagu

SEQ ID NO: 314908 - RNA, 19 nt, Artificial Sequence
  Description of Artificial Sequence: Synthetic oligonucleotide
ggcacgcggcaggcacugc

SEQ ID NO: 314909 - RNA, 19 nt, Artificial Sequence
  Description of Artificial Sequence: Synthetic oligonucleotide
cccucggucuaggcugaca

SEQ ID NO: 314910 - RNA, 19 nt, Artificial Sequence
  Description of Artificial Sequence: Synthetic oligonucleotide
ccgagugacccgccuuagu

SEQ ID NO: 314911 - RNA, 19 nt, Artificial Sequence
  Description of Artificial Sequence: Synthetic oligonucleotide
cccacccuccacggugcca

SEQ ID NO: 314912 - RNA, 19 nt, Artificial Sequence
  Description of Artificial Sequence: Synthetic oligonucleotide
cggucuaggcugacaucau

SEQ ID NO: 314913 - RNA, 19 nt, Artificial Sequence
  Description of Artificial Sequence: Synthetic oligonucleotide
ggcccacugugaggcuaua

SEQ ID NO: 314914 - RNA, 19 nt, Artificial Sequence
  Description of Artificial Sequence: Synthetic oligonucleotide
cguaggcaaccugguggcu

SEQ ID NO: 314915 - RNA, 19 nt, Artificial Sequence
  Description of Artificial Sequence: Synthetic oligonucleotide
cgguucccuuugcugucau

SEQ ID NO: 314916 - RNA, 19 nt, Artificial Sequence
  Description of Artificial Sequence: Synthetic oligonucleotide
ucuggaaagaucuugaugg

SEQ ID NO: 314917 - RNA, 19 nt, Artificial Sequence
  Description of Artificial Sequence: Synthetic oligonucleotide
agauucacaacucaguucc

SEQ ID NO: 314918 - RNA, 19 nt, Artificial Sequence
  Description of Artificial Sequence: Synthetic oligonucleotide
aauagauguaccaaagugc

SEQ ID NO: 314919 - RNA, 19 nt, Artificial Sequence
  Description of Artificial Sequence: Synthetic oligonucleotide
gaauagauguaccaaagug

SEQ ID NO: 314920 - RNA, 19 nt, Artificial Sequence
  Description of Artificial Sequence: Synthetic oligonucleotide
uuauccgguauccagaggc

SEQ ID NO: 314921 - RNA, 19 nt, Artificial Sequence
  Description of Artificial Sequence: Synthetic oligonucleotide
ugugucuggaagcacaaag

SEQ ID NO: 314922 - RNA, 19 nt, Artificial Sequence
  Description of Artificial Sequence: Synthetic oligonucleotide
agcuauacagcccucagag

SEQ ID NO: 314923 - RNA, 19 nt, Artificial Sequence
  Description of Artificial Sequence: Synthetic oligonucleotide
auggacaacaaguucgugg

SEQ ID NO: 314924 - RNA, 19 nt, Artificial Sequence
  Description of Artificial Sequence: Synthetic oligonucleotide
uguaccaaagugcagcugu

SEQ ID NO: 314925 - RNA, 19 nt, Artificial Sequence
  Description of Artificial Sequence: Synthetic oligonucleotide
gauggugggaaagagacgc

SEQ ID NO: 314926 - RNA, 19 nt, Artificial Sequence
  Description of Artificial Sequence: Synthetic oligonucleotide
ucuugauggaguauucacc

SEQ ID NO: 314927 - RNA, 19 nt, Artificial Sequence
  Description of Artificial Sequence: Synthetic oligonucleotide
uacaaaggaugcuacaaug

SEQ ID NO: 314928 - RNA, 19 nt, Artificial Sequence
  Description of Artificial Sequence: Synthetic oligonucleotide
augaguagcauuggcaacc

SEQ ID NO: 314929 - RNA, 19 nt, Artificial Sequence
  Description of Artificial Sequence: Synthetic oligonucleotide
uggacaacaaguucguggc

SEQ ID NO: 314930 - RNA, 19 nt, Artificial Sequence
  Description of Artificial Sequence: Synthetic oligonucleotide
gguacugcuacucucagag

SEQ ID NO: 314931 - RNA, 19 nt, Artificial Sequence
  Description of Artificial Sequence: Synthetic oligonucleotide
augaguagcccagaguugc

SEQ ID NO: 314932 - RNA, 19 nt, Artificial Sequence
  Description of Artificial Sequence: Synthetic oligonucleotide
agucacaucuuccaaggag

SEQ ID NO: 314933 - RNA, 19 nt, Artificial Sequence
  Description of Artificial Sequence: Synthetic oligonucleotide
ggaauggacaacaaguucg

SEQ ID NO: 314934 - RNA, 19 nt, Artificial Sequence
  Description of Artificial Sequence: Synthetic oligonucleotide
aacgucaugaguagcauug

SEQ ID NO: 314935 - RNA, 19 nt, Artificial Sequence
  Description of Artificial Sequence: Synthetic oligonucleotide
agcucaaugguacuggaug

SEQ ID NO: 314936 - RNA, 19 nt, Artificial Sequence
  Description of Artificial Sequence: Synthetic oligonucleotide
uuuacggucacugugcggu

SEQ ID NO: 314937 - RNA, 19 nt, Artificial Sequence
  Description of Artificial Sequence: Synthetic oligonucleotide
ugauggaguauucaccugu

SEQ ID NO: 314938 - RNA, 19 nt, Artificial Sequence
  Description of Artificial Sequence: Synthetic oligonucleotide
acauuuacggucacugugc

SEQ ID NO: 314939 - RNA, 19 nt, Artificial Sequence
  Description of Artificial Sequence: Synthetic oligonucleotide
uguagaucacaauggauuc

SEQ ID NO: 314940 - RNA, 19 nt, Artificial Sequence
  Description of Artificial Sequence: Synthetic oligonucleotide
uuuggggucaaccaguguu

SEQ ID NO: 314941 - RNA, 19 nt, Artificial Sequence
  Description of Artificial Sequence: Synthetic oligonucleotide
aagacuagguggccaucgc

SEQ ID NO: 314942 - RNA, 19 nt, Artificial Sequence
  Description of Artificial Sequence: Synthetic oligonucleotide
uggaccgugacaucagagg

SEQ ID NO: 314943 - RNA, 19 nt, Artificial Sequence
  Description of Artificial Sequence: Synthetic oligonucleotide
ucaaccaguguugccaucg

SEQ ID NO: 314944 - RNA, 19 nt, Artificial Sequence
  Description of Artificial Sequence: Synthetic oligonucleotide
gaugcucuuuucuggaaag

SEQ ID NO: 314945 - RNA, 19 nt, Artificial Sequence
  Description of Artificial Sequence: Synthetic oligonucleotide
cucagugagacaucacugg

SEQ ID NO: 314946 - RNA, 19 nt, Artificial Sequence
  Description of Artificial Sequence: Synthetic oligonucleotide
ucugccaagcaguagggug

SEQ ID NO: 314947 - RNA, 19 nt, Artificial Sequence
  Description of Artificial Sequence: Synthetic oligonucleotide
uguaugucaccucacuccu

SEQ ID NO: 314948 - RNA, 19 nt, Artificial Sequence
  Description of Artificial Sequence: Synthetic oligonucleotide
gaggacgaugcuuuugggg

SEQ ID NO: 314949 - RNA, 19 nt, Artificial Sequence
  Description of Artificial Sequence: Synthetic oligonucleotide
ugaauauacaggguuuggc

SEQ ID NO: 314950 - RNA, 19 nt, Artificial Sequence
  Description of Artificial Sequence: Synthetic oligonucleotide
uggaguauucaccuguggu

SEQ ID NO: 314951 - RNA, 19 nt, Artificial Sequence
  Description of Artificial Sequence: Synthetic oligonucleotide
ugugcgcugggccuuaucc

SEQ ID NO: 314952 - RNA, 19 nt, Artificial Sequence
  Description of Artificial Sequence: Synthetic oligonucleotide
aguguugccaucgagguga

SEQ ID NO: 314953 - RNA, 19 nt, Artificial Sequence
  Description of Artificial Sequence: Synthetic oligonucleotide
uugccauucaaggaugggg

SEQ ID NO: 314954 - RNA, 19 nt, Artificial Sequence
  Description of Artificial Sequence: Synthetic oligonucleotide
caggcuguagaucacaaug

SEQ ID NO: 314955 - RNA, 19 nt, Artificial Sequence
  Description of Artificial Sequence: Synthetic oligonucleotide
ugcuuuuggggucaaccag

SEQ ID NO: 314956 - RNA, 19 nt, Artificial Sequence
  Description of Artificial Sequence: Synthetic oligonucleotide
agagcuacauugcagcuga

SEQ ID NO: 314957 - RNA, 19 nt, Artificial Sequence
  Description of Artificial Sequence: Synthetic oligonucleotide
agugagacaucacuggcca

SEQ ID NO: 314958 - RNA, 19 nt, Artificial Sequence
  Description of Artificial Sequence: Synthetic oligonucleotide
uacuacgcaagacuaggug

SEQ ID NO: 314959 - RNA, 19 nt, Artificial Sequence
  Description of Artificial Sequence: Synthetic oligonucleotide
cucagaugcauggagacag

SEQ ID NO: 314960 - RNA, 19 nt, Artificial Sequence
  Description of Artificial Sequence: Synthetic oligonucleotide
gucauugccacacuucggc

SEQ ID NO: 314961 - RNA, 19 nt, Artificial Sequence
  Description of Artificial Sequence: Synthetic oligonucleotide
gaguauucaccuguggucc

SEQ ID NO: 314962 - RNA, 19 nt, Artificial Sequence
  Description of Artificial Sequence: Synthetic oligonucleotide
aggacgaugcuuuuggggu

SEQ ID NO: 314963 - RNA, 19 nt, Artificial Sequence
  Description of Artificial Sequence: Synthetic oligonucleotide
aguuccagagucaugaugu

SEQ ID NO: 314964 - RNA, 19 nt, Artificial Sequence
  Description of Artificial Sequence: Synthetic oligonucleotide
gagaacgugaacgucauga

SEQ ID NO: 314965 - RNA, 19 nt, Artificial Sequence
  Description of Artificial Sequence: Synthetic oligonucleotide
uauacagcccucagagacc

SEQ ID NO: 314966 - RNA, 19 nt, Artificial Sequence
  Description of Artificial Sequence: Synthetic oligonucleotide
cuaugguugguacugcuac

SEQ ID NO: 314967 - RNA, 19 nt, Artificial Sequence
  Description of Artificial Sequence: Synthetic oligonucleotide
agaauauaugccuccuugu

SEQ ID NO: 314968 - RNA, 19 nt, Artificial Sequence
  Description of Artificial Sequence: Synthetic oligonucleotide
cuuggaugccugaagaguc

SEQ ID NO: 314969 - RNA, 19 nt, Artificial Sequence
  Description of Artificial Sequence: Synthetic oligonucleotide
aacgugaacgucaugagua

SEQ ID NO: 314970 - RNA, 19 nt, Artificial Sequence
  Description of Artificial Sequence: Synthetic oligonucleotide
uuugcgaggcagguuaggg

SEQ ID NO: 314971 - RNA, 19 nt, Artificial Sequence
  Description of Artificial Sequence: Synthetic oligonucleotide
cacauuuacggucacugug

SEQ ID NO: 314972 - RNA, 19 nt, Artificial Sequence
  Description of Artificial Sequence: Synthetic oligonucleotide
accugugguccauaacugc

SEQ ID NO: 314973 - RNA, 19 nt, Artificial Sequence
  Description of Artificial Sequence: Synthetic oligonucleotide
ugaagcgugggucaccuuc

SEQ ID NO: 314974 - RNA, 19 nt, Artificial Sequence
  Description of Artificial Sequence: Synthetic oligonucleotide
cacgaccgcagcuagaggc

SEQ ID NO: 314975 - RNA, 19 nt, Artificial Sequence
  Description of Artificial Sequence: Synthetic oligonucleotide
uuuuacugaguuccagagu

SEQ ID NO: 314976 - RNA, 19 nt, Artificial Sequence
  Description of Artificial Sequence: Synthetic oligonucleotide
cuacgcaagacuagguggc

SEQ ID NO: 314977 - RNA, 19 nt, Artificial Sequence
  Description of Artificial Sequence: Synthetic oligonucleotide
agguuagggcuguggaugc

SEQ ID NO: 314978 - RNA, 19 nt, Artificial Sequence
  Description of Artificial Sequence: Synthetic oligonucleotide
agaacgugaacgucaugag

SEQ ID NO: 314979 - RNA, 19 nt, Artificial Sequence
  Description of Artificial Sequence: Synthetic oligonucleotide
auucucaccugcacaaagc

SEQ ID NO: 314980 - RNA, 19 nt, Artificial Sequence
  Description of Artificial Sequence: Synthetic oligonucleotide
gagucaugaugucauugcc

SEQ ID NO: 314981 - RNA, 19 nt, Artificial Sequence
  Description of Artificial Sequence: Synthetic oligonucleotide
ugcgaggcagguuagggcu

SEQ ID NO: 314982 - RNA, 19 nt, Artificial Sequence
  Description of Artificial Sequence: Synthetic oligonucleotide
uccgguauccagaggcagg

SEQ ID NO: 314983 - RNA, 19 nt, Artificial Sequence
  Description of Artificial Sequence: Synthetic oligonucleotide
aguagguacuacgcaagac

SEQ ID NO: 314984 - RNA, 19 nt, Artificial Sequence
  Description of Artificial Sequence: Synthetic oligonucleotide
uggaguagguacuacgcaa

SEQ ID NO: 314985 - RNA, 19 nt, Artificial Sequence
  Description of Artificial Sequence: Synthetic oligonucleotide
ugugugggaauagauguac

SEQ ID NO: 314986 - RNA, 19 nt, Artificial Sequence
  Description of Artificial Sequence: Synthetic oligonucleotide
uagguacuacgcaagacua

SEQ ID NO: 314987 - RNA, 19 nt, Artificial Sequence
  Description of Artificial Sequence: Synthetic oligonucleotide
cagucaaggaucugcuucc

SEQ ID NO: 314988 - RNA, 19 nt, Artificial Sequence
  Description of Artificial Sequence: Synthetic oligonucleotide
ccagcuuuaaggcagcucc

SEQ ID NO: 314989 - RNA, 19 nt, Artificial Sequence
  Description of Artificial Sequence: Synthetic oligonucleotide
acaaguucguggccagugg

SEQ ID NO: 314990 - RNA, 19 nt, Artificial Sequence
  Description of Artificial Sequence: Synthetic oligonucleotide
acaacucaguuccacauuu

SEQ ID NO: 314991 - RNA, 19 nt, Artificial Sequence
  Description of Artificial Sequence: Synthetic oligonucleotide
gaagcugaagcguggguca

SEQ ID NO: 314992 - RNA, 19 nt, Artificial Sequence
  Description of Artificial Sequence: Synthetic oligonucleotide
ugguaagccugacaggaaa

SEQ ID NO: 314993 - RNA, 19 nt, Artificial Sequence
  Description of Artificial Sequence: Synthetic oligonucleotide
auaauggccagagggagca

SEQ ID NO: 314994 - RNA, 19 nt, Artificial Sequence
  Description of Artificial Sequence: Synthetic oligonucleotide
aaccugagcuauacagccc

SEQ ID NO: 314995 - RNA, 19 nt, Artificial Sequence
  Description of Artificial Sequence: Synthetic oligonucleotide
cauuuacggucacugugcg

SEQ ID NO: 314996 - RNA, 19 nt, Artificial Sequence
  Description of Artificial Sequence: Synthetic oligonucleotide
gguacuacgcaagacuagg

SEQ ID NO: 314997 - RNA, 19 nt, Artificial Sequence
  Description of Artificial Sequence: Synthetic oligonucleotide
ugcuuggaugccugaagag

SEQ ID NO: 314998 - RNA, 19 nt, Artificial Sequence
  Description of Artificial Sequence: Synthetic oligonucleotide
accccgaugaggaaggcac

SEQ ID NO: 314999 - RNA, 19 nt, Artificial Sequence
  Description of Artificial Sequence: Synthetic oligonucleotide
uccccuaccaggccuuggg

SEQ ID NO: 315000 - RNA, 19 nt, Artificial Sequence
  Description of Artificial Sequence: Synthetic oligonucleotide
cauguugugguuggcauug

SEQ ID NO: 315001 - RNA, 19 nt, Artificial Sequence
  Description of Artificial Sequence: Synthetic oligonucleotide
accugagcuauacagcccu

SEQ ID NO: 315002 - RNA, 19 nt, Artificial Sequence
  Description of Artificial Sequence: Synthetic oligonucleotide
auggaguauucaccugugg

SEQ ID NO: 315003 - RNA, 19 nt, Artificial Sequence
  Description of Artificial Sequence: Synthetic oligonucleotide
caagcaguaggguggugcc

SEQ ID NO: 315004 - RNA, 19 nt, Artificial Sequence
  Description of Artificial Sequence: Synthetic oligonucleotide
ggagaagugagcucgggac

SEQ ID NO: 315005 - RNA, 19 nt, Artificial Sequence
  Description of Artificial Sequence: Synthetic oligonucleotide
acacagauggagguagggg

SEQ ID NO: 315006 - RNA, 19 nt, Artificial Sequence
  Description of Artificial Sequence: Synthetic oligonucleotide
uucggcuggaucagggaca

SEQ ID NO: 315007 - RNA, 19 nt, Artificial Sequence
  Description of Artificial Sequence: Synthetic oligonucleotide
aucagagguugauggggac

SEQ ID NO: 315008 - RNA, 19 nt, Artificial Sequence
  Description of Artificial Sequence: Synthetic oligonucleotide
auuuacggucacugugcgg

SEQ ID NO: 315009 - RNA, 19 nt, Artificial Sequence
  Description of Artificial Sequence: Synthetic oligonucleotide
ucgcacggggacccgaagg

SEQ ID NO: 315010 - RNA, 19 nt, Artificial Sequence
  Description of Artificial Sequence: Synthetic oligonucleotide
augguugguacugcuacuc

SEQ ID NO: 315011 - RNA, 19 nt, Artificial Sequence
  Description of Artificial Sequence: Synthetic oligonucleotide
caagacuagguggccaucg

SEQ ID NO: 315012 - RNA, 19 nt, Artificial Sequence
  Description of Artificial Sequence: Synthetic oligonucleotide
aaagagacgcugcucucuu

SEQ ID NO: 315013 - RNA, 19 nt, Artificial Sequence
  Description of Artificial Sequence: Synthetic oligonucleotide
cagauucacaacucaguuc

SEQ ID NO: 315014 - RNA, 19 nt, Artificial Sequence
  Description of Artificial Sequence: Synthetic oligonucleotide
cauauggaggacccugcag

SEQ ID NO: 315015 - RNA, 19 nt, Artificial Sequence
  Description of Artificial Sequence: Synthetic oligonucleotide
uguauuccugggcagccau

SEQ ID NO: 315016 - RNA, 19 nt, Artificial Sequence
  Description of Artificial Sequence: Synthetic oligonucleotide
aguucguggccagugguuc

SEQ ID NO: 315017 - RNA, 19 nt, Artificial Sequence
  Description of Artificial Sequence: Synthetic oligonucleotide
ugucugauuuauuggugaa

SEQ ID NO: 315018 - RNA, 19 nt, Artificial Sequence
  Description of Artificial Sequence: Synthetic oligonucleotide
gcggugguaagccugacag

SEQ ID NO: 315019 - RNA, 19 nt, Artificial Sequence
  Description of Artificial Sequence: Synthetic oligonucleotide
caugaguagcauuggcaac

SEQ ID NO: 315020 - RNA, 19 nt, Artificial Sequence
  Description of Artificial Sequence: Synthetic oligonucleotide
gacuagguggccaucgcug

SEQ ID NO: 315021 - RNA, 19 nt, Artificial Sequence
  Description of Artificial Sequence: Synthetic oligonucleotide
acgugaacgucaugaguag

SEQ ID NO: 315022 - RNA, 19 nt, Artificial Sequence
  Description of Artificial Sequence: Synthetic oligonucleotide
ugcuacucucagaggaggc

SEQ ID NO: 315023 - RNA, 19 nt, Artificial Sequence
  Description of Artificial Sequence: Synthetic oligonucleotide
accacgucccugcuccagc

SEQ ID NO: 315024 - RNA, 19 nt, Artificial Sequence
  Description of Artificial Sequence: Synthetic oligonucleotide
guagguacuacgcaagacu

SEQ ID NO: 315025 - RNA, 19 nt, Artificial Sequence
  Description of Artificial Sequence: Synthetic oligonucleotide
cucccgaugcuaugguugg

SEQ ID NO: 315026 - RNA, 19 nt, Artificial Sequence
  Description of Artificial Sequence: Synthetic oligonucleotide
cuuuuggggucaaccagug

SEQ ID NO: 315027 - RNA, 19 nt, Artificial Sequence
  Description of Artificial Sequence: Synthetic oligonucleotide
caucgggauccccagauuc

SEQ ID NO: 315028 - RNA, 19 nt, Artificial Sequence
  Description of Artificial Sequence: Synthetic oligonucleotide
uauccgguauccagaggca

SEQ ID NO: 315029 - RNA, 19 nt, Artificial Sequence
  Description of Artificial Sequence: Synthetic oligonucleotide
ggaguauucaccugugguc

SEQ ID NO: 315030 - RNA, 19 nt, Artificial Sequence
  Description of Artificial Sequence: Synthetic oligonucleotide
accgugacaucagagguug

SEQ ID NO: 315031 - RNA, 19 nt, Artificial Sequence
  Description of Artificial Sequence: Synthetic oligonucleotide
aagagucagcuccaucuuu

SEQ ID NO: 315032 - RNA, 19 nt, Artificial Sequence
  Description of Artificial Sequence: Synthetic oligonucleotide
ggauccagcuuuaaggcag

SEQ ID NO: 315033 - RNA, 19 nt, Artificial Sequence
  Description of Artificial Sequence: Synthetic oligonucleotide
caugaguagcccagaguug

SEQ ID NO: 315034 - RNA, 19 nt, Artificial Sequence
  Description of Artificial Sequence: Synthetic oligonucleotide
ggaucagggacaugaguag

SEQ ID NO: 315035 - RNA, 19 nt, Artificial Sequence
  Description of Artificial Sequence: Synthetic oligonucleotide
acggucacugugcggugcc

SEQ ID NO: 315036 - RNA, 19 nt, Artificial Sequence
  Description of Artificial Sequence: Synthetic oligonucleotide
uugcgaggcagguuagggc

SEQ ID NO: 315037 - RNA, 19 nt, Artificial Sequence
  Description of Artificial Sequence: Synthetic oligonucleotide
uuucgggccuccccuacca

SEQ ID NO: 315038 - RNA, 19 nt, Artificial Sequence
  Description of Artificial Sequence: Synthetic oligonucleotide
cuucggcuggaucagggac

SEQ ID NO: 315039 - RNA, 19 nt, Artificial Sequence
  Description of Artificial Sequence: Synthetic oligonucleotide
gauggaguauucaccugug

SEQ ID NO: 315040 - RNA, 19 nt, Artificial Sequence
  Description of Artificial Sequence: Synthetic oligonucleotide
ucagggacaugaguagccc

SEQ ID NO: 315041 - RNA, 19 nt, Artificial Sequence
  Description of Artificial Sequence: Synthetic oligonucleotide
gaugcauggagacagucuu

SEQ ID NO: 315042 - RNA, 19 nt, Artificial Sequence
  Description of Artificial Sequence: Synthetic oligonucleotide
cacuucggcuggaucaggg

SEQ ID NO: 315043 - RNA, 19 nt, Artificial Sequence
  Description of Artificial Sequence: Synthetic oligonucleotide
ucguugcugaucacaugug

SEQ ID NO: 315044 - RNA, 19 nt, Artificial Sequence
  Description of Artificial Sequence: Synthetic oligonucleotide
acuagguggccaucgcugu

SEQ ID NO: 315045 - RNA, 19 nt, Artificial Sequence
  Description of Artificial Sequence: Synthetic oligonucleotide
uuuucgggccuccccuacc

SEQ ID NO: 315046 - RNA, 19 nt, Artificial Sequence
  Description of Artificial Sequence: Synthetic oligonucleotide
ucagagguugauggggaca

SEQ ID NO: 315047 - RNA, 19 nt, Artificial Sequence
  Description of Artificial Sequence: Synthetic oligonucleotide
cucaaugguacuggaugcc

SEQ ID NO: 315048 - RNA, 19 nt, Artificial Sequence
  Description of Artificial Sequence: Synthetic oligonucleotide
gcucaaugguacuggaugc

SEQ ID NO: 315049 - RNA, 19 nt, Artificial Sequence
  Description of Artificial Sequence: Synthetic oligonucleotide
uguagacuuccugggacac

SEQ ID NO: 315050 - RNA, 19 nt, Artificial Sequence
  Description of Artificial Sequence: Synthetic oligonucleotide
acauauggaggacccugca

SEQ ID NO: 315051 - RNA, 19 nt, Artificial Sequence
  Description of Artificial Sequence: Synthetic oligonucleotide
gaugccugaagagucagcu

SEQ ID NO: 315052 - RNA, 19 nt, Artificial Sequence
  Description of Artificial Sequence: Synthetic oligonucleotide
ugcuaugguugguacugcu

SEQ ID NO: 315053 - RNA, 19 nt, Artificial Sequence
  Description of Artificial Sequence: Synthetic oligonucleotide
agguaggaccaggaacacc

SEQ ID NO: 315054 - RNA, 19 nt, Artificial Sequence
  Description of Artificial Sequence: Synthetic oligonucleotide
gauguaccaaagugcagcu

SEQ ID NO: 315055 - RNA, 19 nt, Artificial Sequence
  Description of Artificial Sequence: Synthetic oligonucleotide
ggaugcuacaaugcuggcg

SEQ ID NO: 315056 - RNA, 19 nt, Artificial Sequence
  Description of Artificial Sequence: Synthetic oligonucleotide
aagagaacgugaacgucau

SEQ ID NO: 315057 - RNA, 19 nt, Artificial Sequence
  Description of Artificial Sequence: Synthetic oligonucleotide
cacgccucgguccauggug

SEQ ID NO: 315058 - RNA, 19 nt, Artificial Sequence
  Description of Artificial Sequence: Synthetic oligonucleotide
agggacaugaguagcccag

SEQ ID NO: 315059 - RNA, 19 nt, Artificial Sequence
  Description of Artificial Sequence: Synthetic oligonucleotide
gugaacgucaugaguagca

SEQ ID NO: 315060 - RNA, 19 nt, Artificial Sequence
  Description of Artificial Sequence: Synthetic oligonucleotide
cugcuacucucagaggagg

SEQ ID NO: 315061 - RNA, 19 nt, Artificial Sequence
  Description of Artificial Sequence: Synthetic oligonucleotide
gaguagguacuacgcaaga

SEQ ID NO: 315062 - RNA, 19 nt, Artificial Sequence
  Description of Artificial Sequence: Synthetic oligonucleotide
uccggagcggugguaagcc

SEQ ID NO: 315063 - RNA, 19 nt, Artificial Sequence
  Description of Artificial Sequence: Synthetic oligonucleotide
acgaccgcagcuagaggcc

SEQ ID NO: 315064 - RNA, 19 nt, Artificial Sequence
  Description of Artificial Sequence: Synthetic oligonucleotide
gacgcugcucucuuuugga

SEQ ID NO: 315065 - RNA, 19 nt, Artificial Sequence
  Description of Artificial Sequence: Synthetic oligonucleotide
gugcgcugggccuuauccg

SEQ ID NO: 315066 - RNA, 19 nt, Artificial Sequence
  Description of Artificial Sequence: Synthetic oligonucleotide
augcuaugguugguacugc

SEQ ID NO: 315067 - RNA, 19 nt, Artificial Sequence
  Description of Artificial Sequence: Synthetic oligonucleotide
uuuuggggucaaccagugu

SEQ ID NO: 315068 - RNA, 19 nt, Artificial Sequence
  Description of Artificial Sequence: Synthetic oligonucleotide
guugccauucaaggauggg

SEQ ID NO: 315069 - RNA, 19 nt, Artificial Sequence
  Description of Artificial Sequence: Synthetic oligonucleotide
acugcuacucucagaggag

SEQ ID NO: 315070 - RNA, 19 nt, Artificial Sequence
  Description of Artificial Sequence: Synthetic oligonucleotide
ggccuuauccgguauccag

SEQ ID NO: 315071 - RNA, 19 nt, Artificial Sequence
  Description of Artificial Sequence: Synthetic oligonucleotide
cucguugcugaucacaugu

SEQ ID NO: 315072 - RNA, 19 nt, Artificial Sequence
  Description of Artificial Sequence: Synthetic oligonucleotide
gaaccuggcaggauccuca

SEQ ID NO: 315073 - RNA, 19 nt, Artificial Sequence
  Description of Artificial Sequence: Synthetic oligonucleotide
gagcuauacagcccucaga

SEQ ID NO: 315074 - RNA, 19 nt, Artificial Sequence
  Description of Artificial Sequence: Synthetic oligonucleotide
ggagcgaccacgucccugc

SEQ ID NO: 315075 - RNA, 19 nt, Artificial Sequence
  Description of Artificial Sequence: Synthetic oligonucleotide
caaaggaugcuacaaugcu

SEQ ID NO: 315076 - RNA, 19 nt, Artificial Sequence
  Description of Artificial Sequence: Synthetic oligonucleotide
uuuccggagcggugguaag

SEQ ID NO: 315077 - RNA, 19 nt, Artificial Sequence
  Description of Artificial Sequence: Synthetic oligonucleotide
ggaguagguacuacgcaag

SEQ ID NO: 315078 - RNA, 19 nt, Artificial Sequence
  Description of Artificial Sequence: Synthetic oligonucleotide
ugaguagcauuggcaaccu

SEQ ID NO: 315079 - RNA, 19 nt, Artificial Sequence
  Description of Artificial Sequence: Synthetic oligonucleotide
cacagauggagguaggggu

SEQ ID NO: 315080 - RNA, 19 nt, Artificial Sequence
  Description of Artificial Sequence: Synthetic oligonucleotide
ccagucaaggaucugcuuc

SEQ ID NO: 315081 - RNA, 19 nt, Artificial Sequence
  Description of Artificial Sequence: Synthetic oligonucleotide
gaacgugaacgucaugagu

SEQ ID NO: 315082 - RNA, 19 nt, Artificial Sequence
  Description of Artificial Sequence: Synthetic oligonucleotide
uuggggcuuggcccagccg

SEQ ID NO: 315083 - RNA, 19 nt, Artificial Sequence
  Description of Artificial Sequence: Synthetic oligonucleotide
gauggaccgugacaucaga

SEQ ID NO: 315084 - RNA, 19 nt, Artificial Sequence
  Description of Artificial Sequence: Synthetic oligonucleotide
aggaccccgaugaggaagg

SEQ ID NO: 315085 - RNA, 19 nt, Artificial Sequence
  Description of Artificial Sequence: Synthetic oligonucleotide
ggugcucccgaugcuaugg

SEQ ID NO: 315086 - RNA, 19 nt, Artificial Sequence
  Description of Artificial Sequence: Synthetic oligonucleotide
acgucaugaguagcauugg

SEQ ID NO: 315087 - RNA, 19 nt, Artificial Sequence
  Description of Artificial Sequence: Synthetic oligonucleotide
aucgaggugacagcacucu

SEQ ID NO: 315088 - RNA, 19 nt, Artificial Sequence
  Description of Artificial Sequence: Synthetic oligonucleotide
cucuagauggaccgugaca

SEQ ID NO: 315089 - RNA, 19 nt, Artificial Sequence
  Description of Artificial Sequence: Synthetic oligonucleotide
gcuggcguugaguuuucgg

SEQ ID NO: 315090 - RNA, 19 nt, Artificial Sequence
  Description of Artificial Sequence: Synthetic oligonucleotide
ccagauggcagcucucuag

SEQ ID NO: 315091 - RNA, 19 nt, Artificial Sequence
  Description of Artificial Sequence: Synthetic oligonucleotide
gcgaccacgucccugcucc

SEQ ID NO: 315092 - RNA, 19 nt, Artificial Sequence
  Description of Artificial Sequence: Synthetic oligonucleotide
acuucggcuggaucaggga

SEQ ID NO: 315093 - RNA, 19 nt, Artificial Sequence
  Description of Artificial Sequence: Synthetic oligonucleotide
cuugggugcucgguucugg

SEQ ID NO: 315094 - RNA, 19 nt, Artificial Sequence
  Description of Artificial Sequence: Synthetic oligonucleotide
ccuuauccgguauccagag

SEQ ID NO: 315095 - RNA, 19 nt, Artificial Sequence
  Description of Artificial Sequence: Synthetic oligonucleotide
cugcaagacuuguggggag

SEQ ID NO: 315096 - RNA, 19 nt, Artificial Sequence
  Description of Artificial Sequence: Synthetic oligonucleotide
ucaggccuaugauggugca

SEQ ID NO: 315097 - RNA, 19 nt, Artificial Sequence
  Description of Artificial Sequence: Synthetic oligonucleotide
uacgcaagacuagguggcc

SEQ ID NO: 315098 - RNA, 19 nt, Artificial Sequence
  Description of Artificial Sequence: Synthetic oligonucleotide
cagagcuacauugcagcug

SEQ ID NO: 315099 - RNA, 19 nt, Artificial Sequence
  Description of Artificial Sequence: Synthetic oligonucleotide
agcgccauuuugcuuggau

SEQ ID NO: 315100 - RNA, 19 nt, Artificial Sequence
  Description of Artificial Sequence: Synthetic oligonucleotide
gagaagugagcucgggacu

SEQ ID NO: 315101 - RNA, 19 nt, Artificial Sequence
  Description of Artificial Sequence: Synthetic oligonucleotide
uggggucaaccaguguugc

SEQ ID NO: 315102 - RNA, 19 nt, Artificial Sequence
  Description of Artificial Sequence: Synthetic oligonucleotide
gguaggaccaggaacaccu

SEQ ID NO: 315103 - RNA, 19 nt, Artificial Sequence
  Description of Artificial Sequence: Synthetic oligonucleotide
guucguggccagugguucc

SEQ ID NO: 315104 - RNA, 19 nt, Artificial Sequence
  Description of Artificial Sequence: Synthetic oligonucleotide
guagacuuccugggacacg

SEQ ID NO: 315105 - RNA, 19 nt, Artificial Sequence
  Description of Artificial Sequence: Synthetic oligonucleotide
agguacuacgcaagacuag

SEQ ID NO: 315106 - RNA, 19 nt, Artificial Sequence
  Description of Artificial Sequence: Synthetic oligonucleotide
cuuugcgaggcagguuagg

SEQ ID NO: 315107 - RNA, 19 nt, Artificial Sequence
  Description of Artificial Sequence: Synthetic oligonucleotide
uggguucgcacggggaccc

SEQ ID NO: 315108 - RNA, 19 nt, Artificial Sequence
  Description of Artificial Sequence: Synthetic oligonucleotide
acacgaccgcagcuagagg

SEQ ID NO: 315109 - RNA, 19 nt, Artificial Sequence
  Description of Artificial Sequence: Synthetic oligonucleotide
uuacggucacugugcggug

SEQ ID NO: 315110 - RNA, 19 nt, Artificial Sequence
  Description of Artificial Sequence: Synthetic oligonucleotide
caucgaggugacagcacuc

SEQ ID NO: 315111 - RNA, 19 nt, Artificial Sequence
  Description of Artificial Sequence: Synthetic oligonucleotide
ggucuguggcacacgaccg

SEQ ID NO: 315112 - RNA, 19 nt, Artificial Sequence
  Description of Artificial Sequence: Synthetic oligonucleotide
agauggaccgugacaucag

SEQ ID NO: 315113 - RNA, 19 nt, Artificial Sequence
  Description of Artificial Sequence: Synthetic oligonucleotide
ggaggacgaugcuuuuggg

SEQ ID NO: 315114 - RNA, 19 nt, Artificial Sequence
  Description of Artificial Sequence: Synthetic oligonucleotide
acaggcuguagaucacaau

SEQ ID NO: 315115 - RNA, 19 nt, Artificial Sequence
  Description of Artificial Sequence: Synthetic oligonucleotide
uugaguuuucgggccuccc

SEQ ID NO: 315116 - RNA, 19 nt, Artificial Sequence
  Description of Artificial Sequence: Synthetic oligonucleotide
uuccggagcggugguaagc

SEQ ID NO: 315117 - RNA, 19 nt, Artificial Sequence
  Description of Artificial Sequence: Synthetic oligonucleotide
agcgaccacgucccugcuc

SEQ ID NO: 315118 - RNA, 19 nt, Artificial Sequence
  Description of Artificial Sequence: Synthetic oligonucleotide
cuagggacgggacacagau

SEQ ID NO: 315119 - RNA, 19 nt, Artificial Sequence
  Description of Artificial Sequence: Synthetic oligonucleotide
gacgaugcuuuugggguca

SEQ ID NO: 315120 - RNA, 19 nt, Artificial Sequence
  Description of Artificial Sequence: Synthetic oligonucleotide
gaaagagacgcugcucucu

SEQ ID NO: 315121 - RNA, 19 nt, Artificial Sequence
  Description of Artificial Sequence: Synthetic oligonucleotide
gccagugguucccagcuug

SEQ ID NO: 315122 - RNA, 19 nt, Artificial Sequence
  Description of Artificial Sequence: Synthetic oligonucleotide
ccaagcaguaggguggugc

SEQ ID NO: 315123 - RNA, 19 nt, Artificial Sequence
  Description of Artificial Sequence: Synthetic oligonucleotide
uacggucacugugcggugc

SEQ ID NO: 315124 - RNA, 19 nt, Artificial Sequence
  Description of Artificial Sequence: Synthetic oligonucleotide
agagaacgugaacgucaug

SEQ ID NO: 315125 - RNA, 19 nt, Artificial Sequence
  Description of Artificial Sequence: Synthetic oligonucleotide
gagggagcacgccucgguc

SEQ ID NO: 315126 - RNA, 19 nt, Artificial Sequence
  Description of Artificial Sequence: Synthetic oligonucleotide
agauggcagcucucuagau

SEQ ID NO: 315127 - RNA, 19 nt, Artificial Sequence
  Description of Artificial Sequence: Synthetic oligonucleotide
guuuucgggccuccccuac

SEQ ID NO: 315128 - RNA, 19 nt, Artificial Sequence
  Description of Artificial Sequence: Synthetic oligonucleotide
agcggugguaagccugaca

SEQ ID NO: 315129 - RNA, 19 nt, Artificial Sequence
  Description of Artificial Sequence: Synthetic oligonucleotide
ugggugcucccgaugcuau

SEQ ID NO: 315130 - RNA, 19 nt, Artificial Sequence
  Description of Artificial Sequence: Synthetic oligonucleotide
uccucggcagggaguucag

SEQ ID NO: 315131 - RNA, 19 nt, Artificial Sequence
  Description of Artificial Sequence: Synthetic oligonucleotide
gcgccauuuugcuuggaug

SEQ ID NO: 315132 - RNA, 19 nt, Artificial Sequence
  Description of Artificial Sequence: Synthetic oligonucleotide
aagagacgcugcucucuuu

SEQ ID NO: 315133 - RNA, 19 nt, Artificial Sequence
  Description of Artificial Sequence: Synthetic oligonucleotide
cuggggucccagaaaguca

SEQ ID NO: 315134 - RNA, 19 nt, Artificial Sequence
  Description of Artificial Sequence: Synthetic oligonucleotide
gggucaaccaguguugcca

SEQ ID NO: 315135 - RNA, 19 nt, Artificial Sequence
  Description of Artificial Sequence: Synthetic oligonucleotide
ccauguccccuucaggccc

SEQ ID NO: 315136 - RNA, 19 nt, Artificial Sequence
  Description of Artificial Sequence: Synthetic oligonucleotide
gaggcccucagugagacau

SEQ ID NO: 315137 - RNA, 19 nt, Artificial Sequence
  Description of Artificial Sequence: Synthetic oligonucleotide
acuaugccaugcugcuggu

SEQ ID NO: 315138 - RNA, 19 nt, Artificial Sequence
  Description of Artificial Sequence: Synthetic oligonucleotide
gcggcugagaagucaggag

SEQ ID NO: 315139 - RNA, 19 nt, Artificial Sequence
  Description of Artificial Sequence: Synthetic oligonucleotide
auguaccaaagugcagcug

SEQ ID NO: 315140 - RNA, 19 nt, Artificial Sequence
  Description of Artificial Sequence: Synthetic oligonucleotide
gguaagccugacaggaaac

SEQ ID NO: 315141 - RNA, 19 nt, Artificial Sequence
  Description of Artificial Sequence: Synthetic oligonucleotide
cggaggacgaugcuuuugg

SEQ ID NO: 315142 - RNA, 19 nt, Artificial Sequence
  Description of Artificial Sequence: Synthetic oligonucleotide
ugguuucaugucugauuua

SEQ ID NO: 315143 - RNA, 19 nt, Artificial Sequence
  Description of Artificial Sequence: Synthetic oligonucleotide
cauagggcaggggcaggcc

SEQ ID NO: 315144 - RNA, 19 nt, Artificial Sequence
  Description of Artificial Sequence: Synthetic oligonucleotide
aucgggauccccagauuca

SEQ ID NO: 315145 - RNA, 19 nt, Artificial Sequence
  Description of Artificial Sequence: Synthetic oligonucleotide
ugggagguguggucacaac

SEQ ID NO: 315146 - RNA, 19 nt, Artificial Sequence
  Description of Artificial Sequence: Synthetic oligonucleotide
gggcacuaugccaugcugc

SEQ ID NO: 315147 - RNA, 19 nt, Artificial Sequence
  Description of Artificial Sequence: Synthetic oligonucleotide
agcaguaggguggugccuu

SEQ ID NO: 315148 - RNA, 19 nt, Artificial Sequence
  Description of Artificial Sequence: Synthetic oligonucleotide
cguugcugaucacaugugc

SEQ ID NO: 315149 - RNA, 19 nt, Artificial Sequence
  Description of Artificial Sequence: Synthetic oligonucleotide
aguuuucgggccuccccua

SEQ ID NO: 315150 - RNA, 19 nt, Artificial Sequence
  Description of Artificial Sequence: Synthetic oligonucleotide
gaagagucagcuccaucuu

SEQ ID NO: 315151 - RNA, 19 nt, Artificial Sequence
  Description of Artificial Sequence: Synthetic oligonucleotide
ugggugcucgguucuggau

SEQ ID NO: 315152 - RNA, 19 nt, Artificial Sequence
  Description of Artificial Sequence: Synthetic oligonucleotide
augcauggagacagucuug

SEQ ID NO: 315153 - RNA, 19 nt, Artificial Sequence
  Description of Artificial Sequence: Synthetic oligonucleotide
ggaccgugacaucagaggu

SEQ ID NO: 315154 - RNA, 19 nt, Artificial Sequence
  Description of Artificial Sequence: Synthetic oligonucleotide
acacuucggcuggaucagg

SEQ ID NO: 315155 - RNA, 19 nt, Artificial Sequence
  Description of Artificial Sequence: Synthetic oligonucleotide
gccuuugcgaggcagguua

SEQ ID NO: 315156 - RNA, 19 nt, Artificial Sequence
  Description of Artificial Sequence: Synthetic oligonucleotide
gaccacgucccugcuccag

SEQ ID NO: 315157 - RNA, 19 nt, Artificial Sequence
  Description of Artificial Sequence: Synthetic oligonucleotide
agcuuuaaggcagcuccuu

SEQ ID NO: 315158 - RNA, 19 nt, Artificial Sequence
  Description of Artificial Sequence: Synthetic oligonucleotide
ugcuggcguugaguuuucg

SEQ ID NO: 315159 - RNA, 19 nt, Artificial Sequence
  Description of Artificial Sequence: Synthetic oligonucleotide
guggguucgcacggggacc

SEQ ID NO: 315160 - RNA, 19 nt, Artificial Sequence
  Description of Artificial Sequence: Synthetic oligonucleotide
guagaucacaauggauucu

SEQ ID NO: 315161 - RNA, 19 nt, Artificial Sequence
  Description of Artificial Sequence: Synthetic oligonucleotide
cagcgguccuggccuaggg

SEQ ID NO: 315162 - RNA, 19 nt, Artificial Sequence
  Description of Artificial Sequence: Synthetic oligonucleotide
acgcaagacuagguggcca

SEQ ID NO: 315163 - RNA, 19 nt, Artificial Sequence
  Description of Artificial Sequence: Synthetic oligonucleotide
gaacgucaugaguagcauu

SEQ ID NO: 315164 - RNA, 19 nt, Artificial Sequence
  Description of Artificial Sequence: Synthetic oligonucleotide
ggacgaugcuuuugggguc

SEQ ID NO: 315165 - RNA, 19 nt, Artificial Sequence
  Description of Artificial Sequence: Synthetic oligonucleotide
cugcauguugugguuggca

SEQ ID NO: 315166 - RNA, 19 nt, Artificial Sequence
  Description of Artificial Sequence: Synthetic oligonucleotide
ccgaugcuaugguugguac

SEQ ID NO: 315167 - RNA, 19 nt, Artificial Sequence
  Description of Artificial Sequence: Synthetic oligonucleotide
cuggccuagggacgggaca

SEQ ID NO: 315168 - RNA, 19 nt, Artificial Sequence
  Description of Artificial Sequence: Synthetic oligonucleotide
gaggucuguggcacacgac

SEQ ID NO: 315169 - RNA, 19 nt, Artificial Sequence
  Description of Artificial Sequence: Synthetic oligonucleotide
acgucccugcuccagccuu

SEQ ID NO: 315170 - RNA, 19 nt, Artificial Sequence
  Description of Artificial Sequence: Synthetic oligonucleotide
gcuauacagcccucagaga

SEQ ID NO: 315171 - RNA, 19 nt, Artificial Sequence
  Description of Artificial Sequence: Synthetic oligonucleotide
gggucugacuguccucggc

SEQ ID NO: 315172 - RNA, 19 nt, Artificial Sequence
  Description of Artificial Sequence: Synthetic oligonucleotide
caaguucguggccaguggu

SEQ ID NO: 315173 - RNA, 19 nt, Artificial Sequence
  Description of Artificial Sequence: Synthetic oligonucleotide
ggcacuaugccaugcugcu

SEQ ID NO: 315174 - RNA, 19 nt, Artificial Sequence
  Description of Artificial Sequence: Synthetic oligonucleotide
ggggucaaccaguguugcc

SEQ ID NO: 315175 - RNA, 19 nt, Artificial Sequence
  Description of Artificial Sequence: Synthetic oligonucleotide
gaccccgaugaggaaggca

SEQ ID NO: 315176 - RNA, 19 nt, Artificial Sequence
  Description of Artificial Sequence: Synthetic oligonucleotide
caccucguugcugaucaca

SEQ ID NO: 315177 - RNA, 19 nt, Artificial Sequence
  Description of Artificial Sequence: Synthetic oligonucleotide
gucaaccaguguugccauc

SEQ ID NO: 315178 - RNA, 19 nt, Artificial Sequence
  Description of Artificial Sequence: Synthetic oligonucleotide
cucagaauauaugccuccu

SEQ ID NO: 315179 - RNA, 19 nt, Artificial Sequence
  Description of Artificial Sequence: Synthetic oligonucleotide
auacaggguuuggcccagg

SEQ ID NO: 315180 - RNA, 19 nt, Artificial Sequence
  Description of Artificial Sequence: Synthetic oligonucleotide
agcucucuagauggaccgu

SEQ ID NO: 315181 - RNA, 19 nt, Artificial Sequence
  Description of Artificial Sequence: Synthetic oligonucleotide
cgcacggggacccgaaggg

SEQ ID NO: 315182 - RNA, 19 nt, Artificial Sequence
  Description of Artificial Sequence: Synthetic oligonucleotide
caggccuaugauggugcac

SEQ ID NO: 315183 - RNA, 19 nt, Artificial Sequence
  Description of Artificial Sequence: Synthetic oligonucleotide
ggccuaugauggugcacug

SEQ ID NO: 315184 - RNA, 19 nt, Artificial Sequence
  Description of Artificial Sequence: Synthetic oligonucleotide
gccuuauccgguauccaga

SEQ ID NO: 315185 - RNA, 19 nt, Artificial Sequence
  Description of Artificial Sequence: Synthetic oligonucleotide
ccuuugcgaggcagguuag

SEQ ID NO: 315186 - RNA, 19 nt, Artificial Sequence
  Description of Artificial Sequence: Synthetic oligonucleotide
acgccucgguccauggugu

SEQ ID NO: 315187 - RNA, 19 nt, Artificial Sequence
  Description of Artificial Sequence: Synthetic oligonucleotide
gacacauauggaggacccu

SEQ ID NO: 315188 - RNA, 19 nt, Artificial Sequence
  Description of Artificial Sequence: Synthetic oligonucleotide
gacccugcaggaugagaau

SEQ ID NO: 315189 - RNA, 19 nt, Artificial Sequence
  Description of Artificial Sequence: Synthetic oligonucleotide
guacuacgcaagacuaggu

SEQ ID NO: 315190 - RNA, 19 nt, Artificial Sequence
  Description of Artificial Sequence: Synthetic oligonucleotide
cguggguucgcacggggac

SEQ ID NO: 315191 - RNA, 19 nt, Artificial Sequence
  Description of Artificial Sequence: Synthetic oligonucleotide
guaggaccaggaacaccuc

SEQ ID NO: 315192 - RNA, 19 nt, Artificial Sequence
  Description of Artificial Sequence: Synthetic oligonucleotide
ccggcguggguucgcacgg

SEQ ID NO: 315193 - RNA, 19 nt, Artificial Sequence
  Description of Artificial Sequence: Synthetic oligonucleotide
cagagguugauggggacau

SEQ ID NO: 315194 - RNA, 19 nt, Artificial Sequence
  Description of Artificial Sequence: Synthetic oligonucleotide
ggacccgaagggagcaggc

SEQ ID NO: 315195 - RNA, 19 nt, Artificial Sequence
  Description of Artificial Sequence: Synthetic oligonucleotide
gccuagggacgggacacag

SEQ ID NO: 315196 - RNA, 19 nt, Artificial Sequence
  Description of Artificial Sequence: Synthetic oligonucleotide
gugguaagccugacaggaa

SEQ ID NO: 315197 - RNA, 19 nt, Artificial Sequence
  Description of Artificial Sequence: Synthetic oligonucleotide
ggccacuccccuccugcug

SEQ ID NO: 315198 - RNA, 19 nt, Artificial Sequence
  Description of Artificial Sequence: Synthetic oligonucleotide
ccucguugcugaucacaug

SEQ ID NO: 315199 - RNA, 19 nt, Artificial Sequence
  Description of Artificial Sequence: Synthetic oligonucleotide
gacacggugcugggcugca

SEQ ID NO: 315200 - RNA, 19 nt, Artificial Sequence
  Description of Artificial Sequence: Synthetic oligonucleotide
cagcuuuaaggcagcuccu

SEQ ID NO: 315201 - RNA, 19 nt, Artificial Sequence
  Description of Artificial Sequence: Synthetic oligonucleotide
ggcaucgggauccccagau

SEQ ID NO: 315202 - RNA, 19 nt, Artificial Sequence
  Description of Artificial Sequence: Synthetic oligonucleotide
gacuggaguggggccuuga

SEQ ID NO: 315203 - RNA, 19 nt, Artificial Sequence
  Description of Artificial Sequence: Synthetic oligonucleotide
ggcggccggagcgaccacg

SEQ ID NO: 315204 - RNA, 19 nt, Artificial Sequence
  Description of Artificial Sequence: Synthetic oligonucleotide
ggugcacugcagagucugc

SEQ ID NO: 315205 - RNA, 19 nt, Artificial Sequence
  Description of Artificial Sequence: Synthetic oligonucleotide
cgugaacgucaugaguagc

SEQ ID NO: 315206 - RNA, 19 nt, Artificial Sequence
  Description of Artificial Sequence: Synthetic oligonucleotide
ggacacggugcugggcugc

SEQ ID NO: 315207 - RNA, 19 nt, Artificial Sequence
  Description of Artificial Sequence: Synthetic oligonucleotide
cggagcggugguaagccug

SEQ ID NO: 315208 - RNA, 19 nt, Artificial Sequence
  Description of Artificial Sequence: Synthetic oligonucleotide
ggccccaaauccagauggc

SEQ ID NO: 315209 - RNA, 19 nt, Artificial Sequence
  Description of Artificial Sequence: Synthetic oligonucleotide
cacaacucaguuccacauu

SEQ ID NO: 315210 - RNA, 19 nt, Artificial Sequence
  Description of Artificial Sequence: Synthetic oligonucleotide
gaccgugacaucagagguu

SEQ ID NO: 315211 - RNA, 19 nt, Artificial Sequence
  Description of Artificial Sequence: Synthetic oligonucleotide
gcuaugguugguacugcua

SEQ ID NO: 315212 - RNA, 19 nt, Artificial Sequence
  Description of Artificial Sequence: Synthetic oligonucleotide
gcacuaugccaugcugcug

SEQ ID NO: 315213 - RNA, 19 nt, Artificial Sequence
  Description of Artificial Sequence: Synthetic oligonucleotide
ggucaaccaguguugccau

SEQ ID NO: 315214 - RNA, 19 nt, Artificial Sequence
  Description of Artificial Sequence: Synthetic oligonucleotide
cagcucaaugguacuggau

SEQ ID NO: 315215 - RNA, 19 nt, Artificial Sequence
  Description of Artificial Sequence: Synthetic oligonucleotide
aagugccggcugagguaga

SEQ ID NO: 315216 - RNA, 19 nt, Artificial Sequence
  Description of Artificial Sequence: Synthetic oligonucleotide
gcagcgguccuggccuagg

SEQ ID NO: 315217 - RNA, 19 nt, Artificial Sequence
  Description of Artificial Sequence: Synthetic oligonucleotide
gagcggugguaagccugac

SEQ ID NO: 315218 - RNA, 19 nt, Artificial Sequence
  Description of Artificial Sequence: Synthetic oligonucleotide
guauuccugggcagccaua

SEQ ID NO: 315219 - RNA, 19 nt, Artificial Sequence
  Description of Artificial Sequence: Synthetic oligonucleotide
ccaucgaggugacagcacu

SEQ ID NO: 315220 - RNA, 19 nt, Artificial Sequence
  Description of Artificial Sequence: Synthetic oligonucleotide
ccugagcuauacagcccuc

SEQ ID NO: 315221 - RNA, 19 nt, Artificial Sequence
  Description of Artificial Sequence: Synthetic oligonucleotide
guauucaccugugguccau

SEQ ID NO: 315222 - RNA, 19 nt, Artificial Sequence
  Description of Artificial Sequence: Synthetic oligonucleotide
gugcucgguucuggaugag

SEQ ID NO: 315223 - RNA, 19 nt, Artificial Sequence
  Description of Artificial Sequence: Synthetic oligonucleotide
gcugaagcgugggucaccu

SEQ ID NO: 315224 - RNA, 19 nt, Artificial Sequence
  Description of Artificial Sequence: Synthetic oligonucleotide
uguccucggcagggaguuc

SEQ ID NO: 315225 - RNA, 19 nt, Artificial Sequence
  Description of Artificial Sequence: Synthetic oligonucleotide
gugcucccgaugcuauggu

SEQ ID NO: 315226 - RNA, 19 nt, Artificial Sequence
  Description of Artificial Sequence: Synthetic oligonucleotide
ccuagggacgggacacaga

SEQ ID NO: 315227 - RNA, 19 nt, Artificial Sequence
  Description of Artificial Sequence: Synthetic oligonucleotide
gcgaggcagguuagggcug

SEQ ID NO: 315228 - RNA, 19 nt, Artificial Sequence
  Description of Artificial Sequence: Synthetic oligonucleotide
ccagaaagucaggccuaug

SEQ ID NO: 315229 - RNA, 19 nt, Artificial Sequence
  Description of Artificial Sequence: Synthetic oligonucleotide
cuucuacagcaauguucau

SEQ ID NO: 315230 - RNA, 19 nt, Artificial Sequence
  Description of Artificial Sequence: Synthetic oligonucleotide
cgaagggagcaggcggccg

SEQ ID NO: 315231 - RNA, 19 nt, Artificial Sequence
  Description of Artificial Sequence: Synthetic oligonucleotide
gggccuuauccgguaucca

SEQ ID NO: 315232 - RNA, 19 nt, Artificial Sequence
  Description of Artificial Sequence: Synthetic oligonucleotide
gagcgaccacgucccugcu

SEQ ID NO: 315233 - RNA, 19 nt, Artificial Sequence
  Description of Artificial Sequence: Synthetic oligonucleotide
ccuugggugcucgguucug

SEQ ID NO: 315234 - RNA, 19 nt, Artificial Sequence
  Description of Artificial Sequence: Synthetic oligonucleotide
cacgucccugcuccagccu

SEQ ID NO: 315235 - RNA, 19 nt, Artificial Sequence
  Description of Artificial Sequence: Synthetic oligonucleotide
ggacuggaguggggccuug

SEQ ID NO: 315236 - RNA, 19 nt, Artificial Sequence
  Description of Artificial Sequence: Synthetic oligonucleotide
gcguggguucgcacgggga

SEQ ID NO: 315237 - RNA, 19 nt, Artificial Sequence
  Description of Artificial Sequence: Synthetic oligonucleotide
cggagcgaccacgucccug

SEQ ID NO: 315238 - RNA, 19 nt, Artificial Sequence
  Description of Artificial Sequence: Synthetic oligonucleotide
cgcaagacuagguggccau

SEQ ID NO: 315239 - RNA, 19 nt, Artificial Sequence
  Description of Artificial Sequence: Synthetic oligonucleotide
gcaucgggauccccagauu

SEQ ID NO: 315240 - RNA, 19 nt, Artificial Sequence
  Description of Artificial Sequence: Synthetic oligonucleotide
ccgugacaucagagguuga

SEQ ID NO: 315241 - RNA, 19 nt, Artificial Sequence
  Description of Artificial Sequence: Synthetic oligonucleotide
ccuccccuaccaggccuug

SEQ ID NO: 315242 - RNA, 19 nt, Artificial Sequence
  Description of Artificial Sequence: Synthetic oligonucleotide
gcaguaggguggugccuuu

SEQ ID NO: 315243 - RNA, 19 nt, Artificial Sequence
  Description of Artificial Sequence: Synthetic oligonucleotide
cagcgccauuuugcuugga

SEQ ID NO: 315244 - RNA, 19 nt, Artificial Sequence
  Description of Artificial Sequence: Synthetic oligonucleotide
gcggccggagcgaccacgu

SEQ ID NO: 315245 - RNA, 19 nt, Artificial Sequence
  Description of Artificial Sequence: Synthetic oligonucleotide
cggcguggguucgcacggg

SEQ ID NO: 315246 - RNA, 19 nt, Artificial Sequence
  Description of Artificial Sequence: Synthetic oligonucleotide
ccggagcggugguaagccu

SEQ ID NO: 315247 - RNA, 19 nt, Artificial Sequence
  Description of Artificial Sequence: Synthetic oligonucleotide
ggccuuugcgaggcagguu

SEQ ID NO: 315248 - RNA, 19 nt, Artificial Sequence
  Description of Artificial Sequence: Synthetic oligonucleotide
cggccggagcgaccacguc

SEQ ID NO: 315249 - RNA, 19 nt, Artificial Sequence
  Description of Artificial Sequence: Synthetic oligonucleotide
gccuccccuaccaggccuu

SEQ ID NO: 315250 - RNA, 19 nt, Artificial Sequence
  Description of Artificial Sequence: Synthetic oligonucleotide
ggagcacgccucgguccau

SEQ ID NO: 315251 - RNA, 19 nt, Artificial Sequence
  Description of Artificial Sequence: Synthetic oligonucleotide
ccggagcgaccacgucccu

SEQ ID NO: 315252 - RNA, 19 nt, Artificial Sequence
  Description of Artificial Sequence: Synthetic oligonucleotide
cggcagcgguccuggccua

SEQ ID NO: 315253 - RNA, 19 nt, Artificial Sequence
  Description of Artificial Sequence: Synthetic oligonucleotide
uauaagagaacaaugaugu

SEQ ID NO: 315254 - RNA, 19 nt, Artificial Sequence
  Description of Artificial Sequence: Synthetic oligonucleotide
uccaaauuuagaaugcugg

SEQ ID NO: 315255 - RNA, 19 nt, Artificial Sequence
  Description of Artificial Sequence: Synthetic oligonucleotide
auaaauggcagcuggaugg

SEQ ID NO: 315256 - RNA, 19 nt, Artificial Sequence
  Description of Artificial Sequence: Synthetic oligonucleotide
aaugcauugacaaaugguc

SEQ ID NO: 315257 - RNA, 19 nt, Artificial Sequence
  Description of Artificial Sequence: Synthetic oligonucleotide
aaucagagucuauaaauuc

SEQ ID NO: 315258 - RNA, 19 nt, Artificial Sequence
  Description of Artificial Sequence: Synthetic oligonucleotide
gauuauaaauggcagcugg

SEQ ID NO: 315259 - RNA, 19 nt, Artificial Sequence
  Description of Artificial Sequence: Synthetic oligonucleotide
auuauuuagggcaugacac

SEQ ID NO: 315260 - RNA, 19 nt, Artificial Sequence
  Description of Artificial Sequence: Synthetic oligonucleotide
uauucuaaaugucaacuag

SEQ ID NO: 315261 - RNA, 19 nt, Artificial Sequence
  Description of Artificial Sequence: Synthetic oligonucleotide
aauuauuuagggcaugaca

SEQ ID NO: 315262 - RNA, 19 nt, Artificial Sequence
  Description of Artificial Sequence: Synthetic oligonucleotide
acucagaacagugagaggc

SEQ ID NO: 315263 - RNA, 19 nt, Artificial Sequence
  Description of Artificial Sequence: Synthetic oligonucleotide
agucuauaaauucucuagc

SEQ ID NO: 315264 - RNA, 19 nt, Artificial Sequence
  Description of Artificial Sequence: Synthetic oligonucleotide
aaacgcauagcuuugauua

SEQ ID NO: 315265 - RNA, 19 nt, Artificial Sequence
  Description of Artificial Sequence: Synthetic oligonucleotide
uuugaaacggauuggguag

SEQ ID NO: 315266 - RNA, 19 nt, Artificial Sequence
  Description of Artificial Sequence: Synthetic oligonucleotide
cuuauaaucauuugggguc

SEQ ID NO: 315267 - RNA, 19 nt, Artificial Sequence
  Description of Artificial Sequence: Synthetic oligonucleotide
cuugguuuacacuugauug

SEQ ID NO: 315268 - RNA, 19 nt, Artificial Sequence
  Description of Artificial Sequence: Synthetic oligonucleotide
uggacaagcaauuugguca

SEQ ID NO: 315269 - RNA, 19 nt, Artificial Sequence
  Description of Artificial Sequence: Synthetic oligonucleotide
uaauauauuagccugugua

SEQ ID NO: 315270 - RNA, 19 nt, Artificial Sequence
  Description of Artificial Sequence: Synthetic oligonucleotide
aaauuuagaaugcuggcaa

SEQ ID NO: 315271 - RNA, 19 nt, Artificial Sequence
  Description of Artificial Sequence: Synthetic oligonucleotide
uucgguaaaaucuuuguug

SEQ ID NO: 315272 - RNA, 19 nt, Artificial Sequence
  Description of Artificial Sequence: Synthetic oligonucleotide
acuauuuaauaccugccgg

SEQ ID NO: 315273 - RNA, 19 nt, Artificial Sequence
  Description of Artificial Sequence: Synthetic oligonucleotide
aacuccuaugcaccaaugc

SEQ ID NO: 315274 - RNA, 19 nt, Artificial Sequence
  Description of Artificial Sequence: Synthetic oligonucleotide
gagucuauaaauucucuag

SEQ ID NO: 315275 - RNA, 19 nt, Artificial Sequence
  Description of Artificial Sequence: Synthetic oligonucleotide
cuauggacaagcaauuugg

SEQ ID NO: 315276 - RNA, 19 nt, Artificial Sequence
  Description of Artificial Sequence: Synthetic oligonucleotide
agauaauuaaauuaaugaa

SEQ ID NO: 315277 - RNA, 19 nt, Artificial Sequence
  Description of Artificial Sequence: Synthetic oligonucleotide
uaugcaaagucugagauac

SEQ ID NO: 315278 - RNA, 19 nt, Artificial Sequence
  Description of Artificial Sequence: Synthetic oligonucleotide
auuaaugauuauaaauggc

SEQ ID NO: 315279 - RNA, 19 nt, Artificial Sequence
  Description of Artificial Sequence: Synthetic oligonucleotide
cuagguacuuauaagguag

SEQ ID NO: 315280 - RNA, 19 nt, Artificial Sequence
  Description of Artificial Sequence: Synthetic oligonucleotide
aguagucccugauuuaacc

SEQ ID NO: 315281 - RNA, 19 nt, Artificial Sequence
  Description of Artificial Sequence: Synthetic oligonucleotide
aauugguaauucucugugg

SEQ ID NO: 315282 - RNA, 19 nt, Artificial Sequence
  Description of Artificial Sequence: Synthetic oligonucleotide
ucaaccuaggaacaaaacu

SEQ ID NO: 315283 - RNA, 19 nt, Artificial Sequence
  Description of Artificial Sequence: Synthetic oligonucleotide
uguuuaaauuauuuagggc

SEQ ID NO: 315284 - RNA, 19 nt, Artificial Sequence
  Description of Artificial Sequence: Synthetic oligonucleotide
uggacucccaaucagaaca

SEQ ID NO: 315285 - RNA, 19 nt, Artificial Sequence
  Description of Artificial Sequence: Synthetic oligonucleotide
uguguauucaaccuaggaa

SEQ ID NO: 315286 - RNA, 19 nt, Artificial Sequence
  Description of Artificial Sequence: Synthetic oligonucleotide
aaaggugucaucaaaauua

SEQ ID NO: 315287 - RNA, 19 nt, Artificial Sequence
  Description of Artificial Sequence: Synthetic oligonucleotide
ugagauacuacaaaauaau

SEQ ID NO: 315288 - RNA, 19 nt, Artificial Sequence
  Description of Artificial Sequence: Synthetic oligonucleotide
uugguuuacacuugauugg

SEQ ID NO: 315289 - RNA, 19 nt, Artificial Sequence
  Description of Artificial Sequence: Synthetic oligonucleotide
caucguugaaugaacaagg

SEQ ID NO: 315290 - RNA, 19 nt, Artificial Sequence
  Description of Artificial Sequence: Synthetic oligonucleotide
aauaguacgauuacaauuu

SEQ ID NO: 315291 - RNA, 19 nt, Artificial Sequence
  Description of Artificial Sequence: Synthetic oligonucleotide
ucaacuagguacuuauaag

SEQ ID NO: 315292 - RNA, 19 nt, Artificial Sequence
  Description of Artificial Sequence: Synthetic oligonucleotide
uaguauuuaugcaaagucu

SEQ ID NO: 315293 - RNA, 19 nt, Artificial Sequence
  Description of Artificial Sequence: Synthetic oligonucleotide
ugaacuuucucacacacuu

SEQ ID NO: 315294 - RNA, 19 nt, Artificial Sequence
  Description of Artificial Sequence: Synthetic oligonucleotide
uuggguagaguucaaaagu

SEQ ID NO: 315295 - RNA, 19 nt, Artificial Sequence
  Description of Artificial Sequence: Synthetic oligonucleotide
uaaaugucaacuagguacu

SEQ ID NO: 315296 - RNA, 19 nt, Artificial Sequence
  Description of Artificial Sequence: Synthetic oligonucleotide
aaugcuuuuggaacgagug

SEQ ID NO: 315297 - RNA, 19 nt, Artificial Sequence
  Description of Artificial Sequence: Synthetic oligonucleotide
uuuggaacgagugauuuug

SEQ ID NO: 315298 - RNA, 19 nt, Artificial Sequence
  Description of Artificial Sequence: Synthetic oligonucleotide
aauucucuagcucguuuuc

SEQ ID NO: 315299 - RNA, 19 nt, Artificial Sequence
  Description of Artificial Sequence: Synthetic oligonucleotide
gaauugguaauucucugug

SEQ ID NO: 315300 - RNA, 19 nt, Artificial Sequence
  Description of Artificial Sequence: Synthetic oligonucleotide
auuauucuaaaugucaacu

SEQ ID NO: 315301 - RNA, 19 nt, Artificial Sequence
  Description of Artificial Sequence: Synthetic oligonucleotide
cuucuaaugcuuuuggaac

SEQ ID NO: 315302 - RNA, 19 nt, Artificial Sequence
  Description of Artificial Sequence: Synthetic oligonucleotide
uucuaaaugucaacuaggu

SEQ ID NO: 315303 - RNA, 19 nt, Artificial Sequence
  Description of Artificial Sequence: Synthetic oligonucleotide
auaucugugauauagccuu

SEQ ID NO: 315304 - RNA, 19 nt, Artificial Sequence
  Description of Artificial Sequence: Synthetic oligonucleotide
aacucuucgucuaauguuc

SEQ ID NO: 315305 - RNA, 19 nt, Artificial Sequence
  Description of Artificial Sequence: Synthetic oligonucleotide
cuaaagacacacaugagca

SEQ ID NO: 315306 - RNA, 19 nt, Artificial Sequence
  Description of Artificial Sequence: Synthetic oligonucleotide
auaccugccgguuaccuac

SEQ ID NO: 315307 - RNA, 19 nt, Artificial Sequence
  Description of Artificial Sequence: Synthetic oligonucleotide
uuuacccuaaggaauaaau

SEQ ID NO: 315308 - RNA, 19 nt, Artificial Sequence
  Description of Artificial Sequence: Synthetic oligonucleotide
ucuauaaauucucuagcuc

SEQ ID NO: 315309 - RNA, 19 nt, Artificial Sequence
  Description of Artificial Sequence: Synthetic oligonucleotide
ucacaaauugcacacgggu

SEQ ID NO: 315310 - RNA, 19 nt, Artificial Sequence
  Description of Artificial Sequence: Synthetic oligonucleotide
uauaagguagcacuugcuc

SEQ ID NO: 315311 - RNA, 19 nt, Artificial Sequence
  Description of Artificial Sequence: Synthetic oligonucleotide
cauaagccgaaucagcugc

SEQ ID NO: 315312 - RNA, 19 nt, Artificial Sequence
  Description of Artificial Sequence: Synthetic oligonucleotide
aaacggauuggguagaguu

SEQ ID NO: 315313 - RNA, 19 nt, Artificial Sequence
  Description of Artificial Sequence: Synthetic oligonucleotide
aaauuauuuagggcaugac

SEQ ID NO: 315314 - RNA, 19 nt, Artificial Sequence
  Description of Artificial Sequence: Synthetic oligonucleotide
ucaucguugaaugaacaag

SEQ ID NO: 315315 - RNA, 19 nt, Artificial Sequence
  Description of Artificial Sequence: Synthetic oligonucleotide
auugcacacggguaaaauc

SEQ ID NO: 315316 - RNA, 19 nt, Artificial Sequence
  Description of Artificial Sequence: Synthetic oligonucleotide
cacucuuacaguaugaaca

SEQ ID NO: 315317 - RNA, 19 nt, Artificial Sequence
  Description of Artificial Sequence: Synthetic oligonucleotide
uauuuaugcaaagucugag

SEQ ID NO: 315318 - RNA, 19 nt, Artificial Sequence
  Description of Artificial Sequence: Synthetic oligonucleotide
uguauucaaccuaggaaca

SEQ ID NO: 315319 - RNA, 19 nt, Artificial Sequence
  Description of Artificial Sequence: Synthetic oligonucleotide
ucuaucacugggaacccag

SEQ ID NO: 315320 - RNA, 19 nt, Artificial Sequence
  Description of Artificial Sequence: Synthetic oligonucleotide
cuuauaagguagcacuugc

SEQ ID NO: 315321 - RNA, 19 nt, Artificial Sequence
  Description of Artificial Sequence: Synthetic oligonucleotide
uuuauucuggggaggagga

SEQ ID NO: 315322 - RNA, 19 nt, Artificial Sequence
  Description of Artificial Sequence: Synthetic oligonucleotide
uuauuuagggcaugacacc

SEQ ID NO: 315323 - RNA, 19 nt, Artificial Sequence
  Description of Artificial Sequence: Synthetic oligonucleotide
ucacagaauaguacgauua

SEQ ID NO: 315324 - RNA, 19 nt, Artificial Sequence
  Description of Artificial Sequence: Synthetic oligonucleotide
cacggguaaaaucauacag

SEQ ID NO: 315325 - RNA, 19 nt, Artificial Sequence
  Description of Artificial Sequence: Synthetic oligonucleotide
aauuccccgucucuucugg

SEQ ID NO: 315326 - RNA, 19 nt, Artificial Sequence
  Description of Artificial Sequence: Synthetic oligonucleotide
uuuucgguaaaaucuuugu

SEQ ID NO: 315327 - RNA, 19 nt, Artificial Sequence
  Description of Artificial Sequence: Synthetic oligonucleotide
uaauaguauuuaugcaaag

SEQ ID NO: 315328 - RNA, 19 nt, Artificial Sequence
  Description of Artificial Sequence: Synthetic oligonucleotide
gcuaauacuuccuagguac

SEQ ID NO: 315329 - RNA, 19 nt, Artificial Sequence
  Description of Artificial Sequence: Synthetic oligonucleotide
guuuugacauuccugagca

SEQ ID NO: 315330 - RNA, 19 nt, Artificial Sequence
  Description of Artificial Sequence: Synthetic oligonucleotide
uucacaaauugcacacggg

SEQ ID NO: 315331 - RNA, 19 nt, Artificial Sequence
  Description of Artificial Sequence: Synthetic oligonucleotide
ucuagcucguuuucuauca

SEQ ID NO: 315332 - RNA, 19 nt, Artificial Sequence
  Description of Artificial Sequence: Synthetic oligonucleotide
auucuaaaugucaacuagg

SEQ ID NO: 315333 - RNA, 19 nt, Artificial Sequence
  Description of Artificial Sequence: Synthetic oligonucleotide
ugauaagaucauuuuagau

SEQ ID NO: 315334 - RNA, 19 nt, Artificial Sequence
  Description of Artificial Sequence: Synthetic oligonucleotide
uaugauguugugccuuucc

SEQ ID NO: 315335 - RNA, 19 nt, Artificial Sequence
  Description of Artificial Sequence: Synthetic oligonucleotide
ucuuaccuuguuuaaauua

SEQ ID NO: 315336 - RNA, 19 nt, Artificial Sequence
  Description of Artificial Sequence: Synthetic oligonucleotide
augaacaaggggucucgcc

SEQ ID NO: 315337 - RNA, 19 nt, Artificial Sequence
  Description of Artificial Sequence: Synthetic oligonucleotide
ucgucuaauguucuucuga

SEQ ID NO: 315338 - RNA, 19 nt, Artificial Sequence
  Description of Artificial Sequence: Synthetic oligonucleotide
ugugccuuuccgcugaacu

SEQ ID NO: 315339 - RNA, 19 nt, Artificial Sequence
  Description of Artificial Sequence: Synthetic oligonucleotide
augauguugugccuuuccg

SEQ ID NO: 315340 - RNA, 19 nt, Artificial Sequence
  Description of Artificial Sequence: Synthetic oligonucleotide
acuugauugggguacggug

SEQ ID NO: 315341 - RNA, 19 nt, Artificial Sequence
  Description of Artificial Sequence: Synthetic oligonucleotide
aggucuguauuugaaacgg

SEQ ID NO: 315342 - RNA, 19 nt, Artificial Sequence
  Description of Artificial Sequence: Synthetic oligonucleotide
ugguuuacacuugauuggg

SEQ ID NO: 315343 - RNA, 19 nt, Artificial Sequence
  Description of Artificial Sequence: Synthetic oligonucleotide
uaaauuauuuagggcauga

SEQ ID NO: 315344 - RNA, 19 nt, Artificial Sequence
  Description of Artificial Sequence: Synthetic oligonucleotide
ucuguaaauuauucuaaau

SEQ ID NO: 315345 - RNA, 19 nt, Artificial Sequence
  Description of Artificial Sequence: Synthetic oligonucleotide
ucgauuucucuguaccagg

SEQ ID NO: 315346 - RNA, 19 nt, Artificial Sequence
  Description of Artificial Sequence: Synthetic oligonucleotide
guaugaacaaagaugugug

SEQ ID NO: 315347 - RNA, 19 nt, Artificial Sequence
  Description of Artificial Sequence: Synthetic oligonucleotide
uuauaaucauuuggggucc

SEQ ID NO: 315348 - RNA, 19 nt, Artificial Sequence
  Description of Artificial Sequence: Synthetic oligonucleotide
uuuagggcaugacaccagc

SEQ ID NO: 315349 - RNA, 19 nt, Artificial Sequence
  Description of Artificial Sequence: Synthetic oligonucleotide
caguacuucuaugucaucg

SEQ ID NO: 315350 - RNA, 19 nt, Artificial Sequence
  Description of Artificial Sequence: Synthetic oligonucleotide
cguuauaugauguugugcc

SEQ ID NO: 315351 - RNA, 19 nt, Artificial Sequence
  Description of Artificial Sequence: Synthetic oligonucleotide
auguauaagagaacaauga

SEQ ID NO: 315352 - RNA, 19 nt, Artificial Sequence
  Description of Artificial Sequence: Synthetic oligonucleotide
agaauugguaggcaagcca

SEQ ID NO: 315353 - RNA, 19 nt, Artificial Sequence
  Description of Artificial Sequence: Synthetic oligonucleotide
aaaguagucccugauuuaa

SEQ ID NO: 315354 - RNA, 19 nt, Artificial Sequence
  Description of Artificial Sequence: Synthetic oligonucleotide
uauuuagggcaugacacca

SEQ ID NO: 315355 - RNA, 19 nt, Artificial Sequence
  Description of Artificial Sequence: Synthetic oligonucleotide
cacacggguaaaaucauac

SEQ ID NO: 315356 - RNA, 19 nt, Artificial Sequence
  Description of Artificial Sequence: Synthetic oligonucleotide
aaagcaucauaaacucuuc

SEQ ID NO: 315357 - RNA, 19 nt, Artificial Sequence
  Description of Artificial Sequence: Synthetic oligonucleotide
uccugaauugguaauucuc

SEQ ID NO: 315358 - RNA, 19 nt, Artificial Sequence
  Description of Artificial Sequence: Synthetic oligonucleotide
auuuauuggcccuaagguu

SEQ ID NO: 315359 - RNA, 19 nt, Artificial Sequence
  Description of Artificial Sequence: Synthetic oligonucleotide
aauuuagaaugcuggcaaa

SEQ ID NO: 315360 - RNA, 19 nt, Artificial Sequence
  Description of Artificial Sequence: Synthetic oligonucleotide
guacuuauaagguagcacu

SEQ ID NO: 315361 - RNA, 19 nt, Artificial Sequence
  Description of Artificial Sequence: Synthetic oligonucleotide
uauggacucccaaucagaa

SEQ ID NO: 315362 - RNA, 19 nt, Artificial Sequence
  Description of Artificial Sequence: Synthetic oligonucleotide
uuagggcaugacaccagcg

SEQ ID NO: 315363 - RNA, 19 nt, Artificial Sequence
  Description of Artificial Sequence: Synthetic oligonucleotide
uuacccuaaggaauaaaua

SEQ ID NO: 315364 - RNA, 19 nt, Artificial Sequence
  Description of Artificial Sequence: Synthetic oligonucleotide
agaugguuacuugaauugg

SEQ ID NO: 315365 - RNA, 19 nt, Artificial Sequence
  Description of Artificial Sequence: Synthetic oligonucleotide
uaugcaccaaugcauugac

SEQ ID NO: 315366 - RNA, 19 nt, Artificial Sequence
  Description of Artificial Sequence: Synthetic oligonucleotide
uucguuauaugauguugug

SEQ ID NO: 315367 - RNA, 19 nt, Artificial Sequence
  Description of Artificial Sequence: Synthetic oligonucleotide
uguaugaaacgcauagcuu

SEQ ID NO: 315368 - RNA, 19 nt, Artificial Sequence
  Description of Artificial Sequence: Synthetic oligonucleotide
ugauuuaaccaagaagguc

SEQ ID NO: 315369 - RNA, 19 nt, Artificial Sequence
  Description of Artificial Sequence: Synthetic oligonucleotide
uaaauuccccgucucuucu

SEQ ID NO: 315370 - RNA, 19 nt, Artificial Sequence
  Description of Artificial Sequence: Synthetic oligonucleotide
ucguuuucuaucacuggga

SEQ ID NO: 315371 - RNA, 19 nt, Artificial Sequence
  Description of Artificial Sequence: Synthetic oligonucleotide
agcacuugcucccuucuag

SEQ ID NO: 315372 - RNA, 19 nt, Artificial Sequence
  Description of Artificial Sequence: Synthetic oligonucleotide
ucuguauuugaaacggauu

SEQ ID NO: 315373 - RNA, 19 nt, Artificial Sequence
  Description of Artificial Sequence: Synthetic oligonucleotide
aaaucacagaauaguacga

SEQ ID NO: 315374 - RNA, 19 nt, Artificial Sequence
  Description of Artificial Sequence: Synthetic oligonucleotide
cugaucauaagccgaauca

SEQ ID NO: 315375 - RNA, 19 nt, Artificial Sequence
  Description of Artificial Sequence: Synthetic oligonucleotide
uuaaauuauuuagggcaug

SEQ ID NO: 315376 - RNA, 19 nt, Artificial Sequence
  Description of Artificial Sequence: Synthetic oligonucleotide
acauguauaagagaacaau

SEQ ID NO: 315377 - RNA, 19 nt, Artificial Sequence
  Description of Artificial Sequence: Synthetic oligonucleotide
ucuaaaugucaacuaggua

SEQ ID NO: 315378 - RNA, 19 nt, Artificial Sequence
  Description of Artificial Sequence: Synthetic oligonucleotide
gauauagccuucuaaugcu

SEQ ID NO: 315379 - RNA, 19 nt, Artificial Sequence
  Description of Artificial Sequence: Synthetic oligonucleotide
cagaauaguacgauuacaa

SEQ ID NO: 315380 - RNA, 19 nt, Artificial Sequence
  Description of Artificial Sequence: Synthetic oligonucleotide
agaauaguacgauuacaau

SEQ ID NO: 315381 - RNA, 19 nt, Artificial Sequence
  Description of Artificial Sequence: Synthetic oligonucleotide
acagcuauggacaagcaau

SEQ ID NO: 315382 - RNA, 19 nt, Artificial Sequence
  Description of Artificial Sequence: Synthetic oligonucleotide
cugagauacuacaaaauaa

SEQ ID NO: 315383 - RNA, 19 nt, Artificial Sequence
  Description of Artificial Sequence: Synthetic oligonucleotide
gguaaaaucuuuguuggug

SEQ ID NO: 315384 - RNA, 19 nt, Artificial Sequence
  Description of Artificial Sequence: Synthetic oligonucleotide
aacggauuggguagaguuc

SEQ ID NO: 315385 - RNA, 19 nt, Artificial Sequence
  Description of Artificial Sequence: Synthetic oligonucleotide
acuucguuauaugauguug

SEQ ID NO: 315386 - RNA, 19 nt, Artificial Sequence
  Description of Artificial Sequence: Synthetic oligonucleotide
auaauaguauuuaugcaaa

SEQ ID NO: 315387 - RNA, 19 nt, Artificial Sequence
  Description of Artificial Sequence: Synthetic oligonucleotide
aaccuaggaacaaaacucu

SEQ ID NO: 315388 - RNA, 19 nt, Artificial Sequence
  Description of Artificial Sequence: Synthetic oligonucleotide
agccuucuaaugcuuuugg

SEQ ID NO: 315389 - RNA, 19 nt, Artificial Sequence
  Description of Artificial Sequence: Synthetic oligonucleotide
agaacacuuccugaauugg

SEQ ID NO: 315390 - RNA, 19 nt, Artificial Sequence
  Description of Artificial Sequence: Synthetic oligonucleotide
caaucauuucaaaacacaa

SEQ ID NO: 315391 - RNA, 19 nt, Artificial Sequence
  Description of Artificial Sequence: Synthetic oligonucleotide
aaagacugaagcaaucauu

SEQ ID NO: 315392 - RNA, 19 nt, Artificial Sequence
  Description of Artificial Sequence: Synthetic oligonucleotide
aacaaggggucucgccgcg

SEQ ID NO: 315393 - RNA, 19 nt, Artificial Sequence
  Description of Artificial Sequence: Synthetic oligonucleotide
uagguacuuauaagguagc

SEQ ID NO: 315394 - RNA, 19 nt, Artificial Sequence
  Description of Artificial Sequence: Synthetic oligonucleotide
gucaacuagguacuuauaa

SEQ ID NO: 315395 - RNA, 19 nt, Artificial Sequence
  Description of Artificial Sequence: Synthetic oligonucleotide
ucguuauaugauguugugc

SEQ ID NO: 315396 - RNA, 19 nt, Artificial Sequence
  Description of Artificial Sequence: Synthetic oligonucleotide
uuggcccuaagguuuucgg

SEQ ID NO: 315397 - RNA, 19 nt, Artificial Sequence
  Description of Artificial Sequence: Synthetic oligonucleotide
ucacucuuacaguaugaac

SEQ ID NO: 315398 - RNA, 19 nt, Artificial Sequence
  Description of Artificial Sequence: Synthetic oligonucleotide
auaauauauuagccugugu

SEQ ID NO: 315399 - RNA, 19 nt, Artificial Sequence
  Description of Artificial Sequence: Synthetic oligonucleotide
uacucauuucagauguuau

SEQ ID NO: 315400 - RNA, 19 nt, Artificial Sequence
  Description of Artificial Sequence: Synthetic oligonucleotide
uucaucguugaaugaacaa

SEQ ID NO: 315401 - RNA, 19 nt, Artificial Sequence
  Description of Artificial Sequence: Synthetic oligonucleotide
agacugaagcaaucauuuc

SEQ ID NO: 315402 - RNA, 19 nt, Artificial Sequence
  Description of Artificial Sequence: Synthetic oligonucleotide
cuucaguacuucuauguca

SEQ ID NO: 315403 - RNA, 19 nt, Artificial Sequence
  Description of Artificial Sequence: Synthetic oligonucleotide
ucucuaguuuucacuaaaa

SEQ ID NO: 315404 - RNA, 19 nt, Artificial Sequence
  Description of Artificial Sequence: Synthetic oligonucleotide
ugucgauuucucuguacca

SEQ ID NO: 315405 - RNA, 19 nt, Artificial Sequence
  Description of Artificial Sequence: Synthetic oligonucleotide
aaggacauacccauccgcu

SEQ ID NO: 315406 - RNA, 19 nt, Artificial Sequence
  Description of Artificial Sequence: Synthetic oligonucleotide
gcagcaauuuacccuaagg

SEQ ID NO: 315407 - RNA, 19 nt, Artificial Sequence
  Description of Artificial Sequence: Synthetic oligonucleotide
acuagguacuuauaaggua

SEQ ID NO: 315408 - RNA, 19 nt, Artificial Sequence
  Description of Artificial Sequence: Synthetic oligonucleotide
aaguagucccugauuuaac

SEQ ID NO: 315409 - RNA, 19 nt, Artificial Sequence
  Description of Artificial Sequence: Synthetic oligonucleotide
uagaaacuccuaugcacca

SEQ ID NO: 315410 - RNA, 19 nt, Artificial Sequence
  Description of Artificial Sequence: Synthetic oligonucleotide
agagcucacacuaaagaca

SEQ ID NO: 315411 - RNA, 19 nt, Artificial Sequence
  Description of Artificial Sequence: Synthetic oligonucleotide
acuuauaagguagcacuug

SEQ ID NO: 315412 - RNA, 19 nt, Artificial Sequence
  Description of Artificial Sequence: Synthetic oligonucleotide
gcuggcgaaguuuuaaugc

SEQ ID NO: 315413 - RNA, 19 nt, Artificial Sequence
  Description of Artificial Sequence: Synthetic oligonucleotide
cacagaauaguacgauuac

SEQ ID NO: 315414 - RNA, 19 nt, Artificial Sequence
  Description of Artificial Sequence: Synthetic oligonucleotide
cucagaacagugagaggcc

SEQ ID NO: 315415 - RNA, 19 nt, Artificial Sequence
  Description of Artificial Sequence: Synthetic oligonucleotide
ugaccauugcuggugcagg

SEQ ID NO: 315416 - RNA, 19 nt, Artificial Sequence
  Description of Artificial Sequence: Synthetic oligonucleotide
gaacaaggggucucgccgc

SEQ ID NO: 315417 - RNA, 19 nt, Artificial Sequence
  Description of Artificial Sequence: Synthetic oligonucleotide
uuauaugauguugugccuu

SEQ ID NO: 315418 - RNA, 19 nt, Artificial Sequence
  Description of Artificial Sequence: Synthetic oligonucleotide
acacccugagcuucuaucu

SEQ ID NO: 315419 - RNA, 19 nt, Artificial Sequence
  Description of Artificial Sequence: Synthetic oligonucleotide
guaugaaacgcauagcuuu

SEQ ID NO: 315420 - RNA, 19 nt, Artificial Sequence
  Description of Artificial Sequence: Synthetic oligonucleotide
acuacuggacuggugacug

SEQ ID NO: 315421 - RNA, 19 nt, Artificial Sequence
  Description of Artificial Sequence: Synthetic oligonucleotide
gaacgagugauuuugcaau

SEQ ID NO: 315422 - RNA, 19 nt, Artificial Sequence
  Description of Artificial Sequence: Synthetic oligonucleotide
caaauuuagaaugcuggca

SEQ ID NO: 315423 - RNA, 19 nt, Artificial Sequence
  Description of Artificial Sequence: Synthetic oligonucleotide
aacgcauagcuuugauuaa

SEQ ID NO: 315424 - RNA, 19 nt, Artificial Sequence
  Description of Artificial Sequence: Synthetic oligonucleotide
ucuaucuggagugggugca

SEQ ID NO: 315425 - RNA, 19 nt, Artificial Sequence
  Description of Artificial Sequence: Synthetic oligonucleotide
guugaaugaacaagggguc

SEQ ID NO: 315426 - RNA, 19 nt, Artificial Sequence
  Description of Artificial Sequence: Synthetic oligonucleotide
cugauaagaucauuuuaga

SEQ ID NO: 315427 - RNA, 19 nt, Artificial Sequence
  Description of Artificial Sequence: Synthetic oligonucleotide
gcuauggacaagcaauuug

SEQ ID NO: 315428 - RNA, 19 nt, Artificial Sequence
  Description of Artificial Sequence: Synthetic oligonucleotide
uuggaacgagugauuuugc

SEQ ID NO: 315429 - RNA, 19 nt, Artificial Sequence
  Description of Artificial Sequence: Synthetic oligonucleotide
agucgcuaaggccacuuca

SEQ ID NO: 315430 - RNA, 19 nt, Artificial Sequence
  Description of Artificial Sequence: Synthetic oligonucleotide
agaaguagcccuagaaacu

SEQ ID NO: 315431 - RNA, 19 nt, Artificial Sequence
  Description of Artificial Sequence: Synthetic oligonucleotide
gguacgguggcaccagugg

SEQ ID NO: 315432 - RNA, 19 nt, Artificial Sequence
  Description of Artificial Sequence: Synthetic oligonucleotide
aacgagugauuuugcaauu

SEQ ID NO: 315433 - RNA, 19 nt, Artificial Sequence
  Description of Artificial Sequence: Synthetic oligonucleotide
uauaugauguugugccuuu

SEQ ID NO: 315434 - RNA, 19 nt, Artificial Sequence
  Description of Artificial Sequence: Synthetic oligonucleotide
aauaccugccgguuaccua

SEQ ID NO: 315435 - RNA, 19 nt, Artificial Sequence
  Description of Artificial Sequence: Synthetic oligonucleotide
uacccauccgcuucaguac

SEQ ID NO: 315436 - RNA, 19 nt, Artificial Sequence
  Description of Artificial Sequence: Synthetic oligonucleotide
auauauuagccuguguauu

SEQ ID NO: 315437 - RNA, 19 nt, Artificial Sequence
  Description of Artificial Sequence: Synthetic oligonucleotide
uggcgaaguuuuaaugcac

SEQ ID NO: 315438 - RNA, 19 nt, Artificial Sequence
  Description of Artificial Sequence: Synthetic oligonucleotide
uuuugacauuccugagcag

SEQ ID NO: 315439 - RNA, 19 nt, Artificial Sequence
  Description of Artificial Sequence: Synthetic oligonucleotide
uugaaugaacaaggggucu

SEQ ID NO: 315440 - RNA, 19 nt, Artificial Sequence
  Description of Artificial Sequence: Synthetic oligonucleotide
cuguaugaaacgcauagcu

SEQ ID NO: 315441 - RNA, 19 nt, Artificial Sequence
  Description of Artificial Sequence: Synthetic oligonucleotide
uaguugggcacgcuucugu

SEQ ID NO: 315442 - RNA, 19 nt, Artificial Sequence
  Description of Artificial Sequence: Synthetic oligonucleotide
uauuuaauaccugccgguu

SEQ ID NO: 315443 - RNA, 19 nt, Artificial Sequence
  Description of Artificial Sequence: Synthetic oligonucleotide
uuccugaauugguaauucu

SEQ ID NO: 315444 - RNA, 19 nt, Artificial Sequence
  Description of Artificial Sequence: Synthetic oligonucleotide
ugaaugaacaaggggucuc

SEQ ID NO: 315445 - RNA, 19 nt, Artificial Sequence
  Description of Artificial Sequence: Synthetic oligonucleotide
gugaguuggugcuggaaac

SEQ ID NO: 315446 - RNA, 19 nt, Artificial Sequence
  Description of Artificial Sequence: Synthetic oligonucleotide
guggaauucagagcaggag

SEQ ID NO: 315447 - RNA, 19 nt, Artificial Sequence
  Description of Artificial Sequence: Synthetic oligonucleotide
guacuucuaugucaucgug

SEQ ID NO: 315448 - RNA, 19 nt, Artificial Sequence
  Description of Artificial Sequence: Synthetic oligonucleotide
aagcacaacccuugguuua

SEQ ID NO: 315449 - RNA, 19 nt, Artificial Sequence
  Description of Artificial Sequence: Synthetic oligonucleotide
acggguaaaaucauacagu

SEQ ID NO: 315450 - RNA, 19 nt, Artificial Sequence
  Description of Artificial Sequence: Synthetic oligonucleotide
auuauaaauggcagcugga

SEQ ID NO: 315451 - RNA, 19 nt, Artificial Sequence
  Description of Artificial Sequence: Synthetic oligonucleotide
uagcccuagaaacuccuau

SEQ ID NO: 315452 - RNA, 19 nt, Artificial Sequence
  Description of Artificial Sequence: Synthetic oligonucleotide
aaauacugauaagaucauu

SEQ ID NO: 315453 - RNA, 19 nt, Artificial Sequence
  Description of Artificial Sequence: Synthetic oligonucleotide
uuugcuuauuguguuucuc

SEQ ID NO: 315454 - RNA, 19 nt, Artificial Sequence
  Description of Artificial Sequence: Synthetic oligonucleotide
cugcuuguauuaaugauua

SEQ ID NO: 315455 - RNA, 19 nt, Artificial Sequence
  Description of Artificial Sequence: Synthetic oligonucleotide
uaaucauuugggguccaac

SEQ ID NO: 315456 - RNA, 19 nt, Artificial Sequence
  Description of Artificial Sequence: Synthetic oligonucleotide
aucacagaauaguacgauu

SEQ ID NO: 315457 - RNA, 19 nt, Artificial Sequence
  Description of Artificial Sequence: Synthetic oligonucleotide
uucgucuaauguucuucug

SEQ ID NO: 315458 - RNA, 19 nt, Artificial Sequence
  Description of Artificial Sequence: Synthetic oligonucleotide
uccuagguacacccugagc

SEQ ID NO: 315459 - RNA, 19 nt, Artificial Sequence
  Description of Artificial Sequence: Synthetic oligonucleotide
caagcaauuuggucaaaga

SEQ ID NO: 315460 - RNA, 19 nt, Artificial Sequence
  Description of Artificial Sequence: Synthetic oligonucleotide
ucgcuaaggccacuucagc

SEQ ID NO: 315461 - RNA, 19 nt, Artificial Sequence
  Description of Artificial Sequence: Synthetic oligonucleotide
auauuagccuguguauuca

SEQ ID NO: 315462 - RNA, 19 nt, Artificial Sequence
  Description of Artificial Sequence: Synthetic oligonucleotide
guuuacacuugauuggggu

SEQ ID NO: 315463 - RNA, 19 nt, Artificial Sequence
  Description of Artificial Sequence: Synthetic oligonucleotide
acacggguaaaaucauaca

SEQ ID NO: 315464 - RNA, 19 nt, Artificial Sequence
  Description of Artificial Sequence: Synthetic oligonucleotide
acggauuggguagaguuca

SEQ ID NO: 315465 - RNA, 19 nt, Artificial Sequence
  Description of Artificial Sequence: Synthetic oligonucleotide
gagugauuuugcaauuuuc

SEQ ID NO: 315466 - RNA, 19 nt, Artificial Sequence
  Description of Artificial Sequence: Synthetic oligonucleotide
gaauucagagcaggagggc

SEQ ID NO: 315467 - RNA, 19 nt, Artificial Sequence
  Description of Artificial Sequence: Synthetic oligonucleotide
ucccuucuagaagcuaagg

SEQ ID NO: 315468 - RNA, 19 nt, Artificial Sequence
  Description of Artificial Sequence: Synthetic oligonucleotide
gaaacugcccagucgcuaa

SEQ ID NO: 315469 - RNA, 19 nt, Artificial Sequence
  Description of Artificial Sequence: Synthetic oligonucleotide
aucagaacacuuccugaau

SEQ ID NO: 315470 - RNA, 19 nt, Artificial Sequence
  Description of Artificial Sequence: Synthetic oligonucleotide
uuaccuacuggaaggcauu

SEQ ID NO: 315471 - RNA, 19 nt, Artificial Sequence
  Description of Artificial Sequence: Synthetic oligonucleotide
guacugcagacagcuaugg

SEQ ID NO: 315472 - RNA, 19 nt, Artificial Sequence
  Description of Artificial Sequence: Synthetic oligonucleotide
cuaucacugggaacccagc

SEQ ID NO: 315473 - RNA, 19 nt, Artificial Sequence
  Description of Artificial Sequence: Synthetic oligonucleotide
agcuaauacuuccuaggua

SEQ ID NO: 315474 - RNA, 19 nt, Artificial Sequence
  Description of Artificial Sequence: Synthetic oligonucleotide
cuggcgaaguuuuaaugca

SEQ ID NO: 315475 - RNA, 19 nt, Artificial Sequence
  Description of Artificial Sequence: Synthetic oligonucleotide
ccgguuaccuacuggaagg

SEQ ID NO: 315476 - RNA, 19 nt, Artificial Sequence
  Description of Artificial Sequence: Synthetic oligonucleotide
ucuccagguuuugacauuc

SEQ ID NO: 315477 - RNA, 19 nt, Artificial Sequence
  Description of Artificial Sequence: Synthetic oligonucleotide
guauuuaugcaaagucuga

SEQ ID NO: 315478 - RNA, 19 nt, Artificial Sequence
  Description of Artificial Sequence: Synthetic oligonucleotide
cccugauuuaaccaagaag

SEQ ID NO: 315479 - RNA, 19 nt, Artificial Sequence
  Description of Artificial Sequence: Synthetic oligonucleotide
ugaaacggauuggguagag

SEQ ID NO: 315480 - RNA, 19 nt, Artificial Sequence
  Description of Artificial Sequence: Synthetic oligonucleotide
ugaguuggugcuggaaacu

SEQ ID NO: 315481 - RNA, 19 nt, Artificial Sequence
  Description of Artificial Sequence: Synthetic oligonucleotide
agaccaaaggacauaccca

SEQ ID NO: 315482 - RNA, 19 nt, Artificial Sequence
  Description of Artificial Sequence: Synthetic oligonucleotide
gguacuuauaagguagcac

SEQ ID NO: 315483 - RNA, 19 nt, Artificial Sequence
  Description of Artificial Sequence: Synthetic oligonucleotide
ucuaagaggcaggcgagau

SEQ ID NO: 315484 - RNA, 19 nt, Artificial Sequence
  Description of Artificial Sequence: Synthetic oligonucleotide
cuauuuaauaccugccggu

SEQ ID NO: 315485 - RNA, 19 nt, Artificial Sequence
  Description of Artificial Sequence: Synthetic oligonucleotide
gaccaaaggacauacccau

SEQ ID NO: 315486 - RNA, 19 nt, Artificial Sequence
  Description of Artificial Sequence: Synthetic oligonucleotide
gacagcuauggacaagcaa

SEQ ID NO: 315487 - RNA, 19 nt, Artificial Sequence
  Description of Artificial Sequence: Synthetic oligonucleotide
uaauaccugccgguuaccu

SEQ ID NO: 315488 - RNA, 19 nt, Artificial Sequence
  Description of Artificial Sequence: Synthetic oligonucleotide
gucgcuaaggccacuucag

SEQ ID NO: 315489 - RNA, 19 nt, Artificial Sequence
  Description of Artificial Sequence: Synthetic oligonucleotide
augcauugacaaaugguca

SEQ ID NO: 315490 - RNA, 19 nt, Artificial Sequence
  Description of Artificial Sequence: Synthetic oligonucleotide
cagcgugugcuucaugcag

SEQ ID NO: 315491 - RNA, 19 nt, Artificial Sequence
  Description of Artificial Sequence: Synthetic oligonucleotide
cucuagcucguuuucuauc

SEQ ID NO: 315492 - RNA, 19 nt, Artificial Sequence
  Description of Artificial Sequence: Synthetic oligonucleotide
uacugcagacagcuaugga

SEQ ID NO: 315493 - RNA, 19 nt, Artificial Sequence
  Description of Artificial Sequence: Synthetic oligonucleotide
gugugcuuauaaucauuug

SEQ ID NO: 315494 - RNA, 19 nt, Artificial Sequence
  Description of Artificial Sequence: Synthetic oligonucleotide
cuucguuauaugauguugu

SEQ ID NO: 315495 - RNA, 19 nt, Artificial Sequence
  Description of Artificial Sequence: Synthetic oligonucleotide
uccgcugaacuuucucaca

SEQ ID NO: 315496 - RNA, 19 nt, Artificial Sequence
  Description of Artificial Sequence: Synthetic oligonucleotide
aaacuccuaugcaccaaug

SEQ ID NO: 315497 - RNA, 19 nt, Artificial Sequence
  Description of Artificial Sequence: Synthetic oligonucleotide
cagaauugguaggcaagcc

SEQ ID NO: 315498 - RNA, 19 nt, Artificial Sequence
  Description of Artificial Sequence: Synthetic oligonucleotide
gacauacccauccgcuuca

SEQ ID NO: 315499 - RNA, 19 nt, Artificial Sequence
  Description of Artificial Sequence: Synthetic oligonucleotide
agcuucuaucuggaguggg

SEQ ID NO: 315500 - RNA, 19 nt, Artificial Sequence
  Description of Artificial Sequence: Synthetic oligonucleotide
cuguguauucaaccuagga

SEQ ID NO: 315501 - RNA, 19 nt, Artificial Sequence
  Description of Artificial Sequence: Synthetic oligonucleotide
aguggucaggucuguauuu

SEQ ID NO: 315502 - RNA, 19 nt, Artificial Sequence
  Description of Artificial Sequence: Synthetic oligonucleotide
cucaguaaaacuccaaauu

SEQ ID NO: 315503 - RNA, 19 nt, Artificial Sequence
  Description of Artificial Sequence: Synthetic oligonucleotide
caacauacucauuucagau

SEQ ID NO: 315504 - RNA, 19 nt, Artificial Sequence
  Description of Artificial Sequence: Synthetic oligonucleotide
uugaaacggauuggguaga

SEQ ID NO: 315505 - RNA, 19 nt, Artificial Sequence
  Description of Artificial Sequence: Synthetic oligonucleotide
auaagagaacaaugauguu

SEQ ID NO: 315506 - RNA, 19 nt, Artificial Sequence
  Description of Artificial Sequence: Synthetic oligonucleotide
uaaauggcagcuggauggu

SEQ ID NO: 315507 - RNA, 19 nt, Artificial Sequence
  Description of Artificial Sequence: Synthetic oligonucleotide
auaguacgauuacaauuuu

SEQ ID NO: 315508 - RNA, 19 nt, Artificial Sequence
  Description of Artificial Sequence: Synthetic oligonucleotide
auuuagggcaugacaccag

SEQ ID NO: 315509 - RNA, 19 nt, Artificial Sequence
  Description of Artificial Sequence: Synthetic oligonucleotide
cccuucuagaagcuaaggc

SEQ ID NO: 315510 - RNA, 19 nt, Artificial Sequence
  Description of Artificial Sequence: Synthetic oligonucleotide
guaaauucaaaagcuguau

SEQ ID NO: 315511 - RNA, 19 nt, Artificial Sequence
  Description of Artificial Sequence: Synthetic oligonucleotide
ugucaacuagguacuuaua

SEQ ID NO: 315512 - RNA, 19 nt, Artificial Sequence
  Description of Artificial Sequence: Synthetic oligonucleotide
uacuucguuauaugauguu

SEQ ID NO: 315513 - RNA, 19 nt, Artificial Sequence
  Description of Artificial Sequence: Synthetic oligonucleotide
gcugcuagaugguuacuug

SEQ ID NO: 315514 - RNA, 19 nt, Artificial Sequence
  Description of Artificial Sequence: Synthetic oligonucleotide
agcuacuucguuauaugau

SEQ ID NO: 315515 - RNA, 19 nt, Artificial Sequence
  Description of Artificial Sequence: Synthetic oligonucleotide
ggaacgagugauuuugcaa

SEQ ID NO: 315516 - RNA, 19 nt, Artificial Sequence
  Description of Artificial Sequence: Synthetic oligonucleotide
auuccccgucucuucuggg

SEQ ID NO: 315517 - RNA, 19 nt, Artificial Sequence
  Description of Artificial Sequence: Synthetic oligonucleotide
auguugugccuuuccgcug

SEQ ID NO: 315518 - RNA, 19 nt, Artificial Sequence
  Description of Artificial Sequence: Synthetic oligonucleotide
uacuuccuagguacacccu

SEQ ID NO: 315519 - RNA, 19 nt, Artificial Sequence
  Description of Artificial Sequence: Synthetic oligonucleotide
aacccuugguuuacacuug

SEQ ID NO: 315520 - RNA, 19 nt, Artificial Sequence
  Description of Artificial Sequence: Synthetic oligonucleotide
cugcuagaugguuacuuga

SEQ ID NO: 315521 - RNA, 19 nt, Artificial Sequence
  Description of Artificial Sequence: Synthetic oligonucleotide
gcucguuuucuaucacugg

SEQ ID NO: 315522 - RNA, 19 nt, Artificial Sequence
  Description of Artificial Sequence: Synthetic oligonucleotide
cugccgguuaccuacugga

SEQ ID NO: 315523 - RNA, 19 nt, Artificial Sequence
  Description of Artificial Sequence: Synthetic oligonucleotide
guuauaugauguugugccu

SEQ ID NO: 315524 - RNA, 19 nt, Artificial Sequence
  Description of Artificial Sequence: Synthetic oligonucleotide
uuccccgucucuucugggu

SEQ ID NO: 315525 - RNA, 19 nt, Artificial Sequence
  Description of Artificial Sequence: Synthetic oligonucleotide
ugucuggggcaggaaacug

SEQ ID NO: 315526 - RNA, 19 nt, Artificial Sequence
  Description of Artificial Sequence: Synthetic oligonucleotide
agguacuuauaagguagca

SEQ ID NO: 315527 - RNA, 19 nt, Artificial Sequence
  Description of Artificial Sequence: Synthetic oligonucleotide
gccgguuaccuacuggaag

SEQ ID NO: 315528 - RNA, 19 nt, Artificial Sequence
  Description of Artificial Sequence: Synthetic oligonucleotide
caaggggucucgccgcggg

SEQ ID NO: 315529 - RNA, 19 nt, Artificial Sequence
  Description of Artificial Sequence: Synthetic oligonucleotide
acccauccgcuucaguacu

SEQ ID NO: 315530 - RNA, 19 nt, Artificial Sequence
  Description of Artificial Sequence: Synthetic oligonucleotide
agugcuggcgaaguuuuaa

SEQ ID NO: 315531 - RNA, 19 nt, Artificial Sequence
  Description of Artificial Sequence: Synthetic oligonucleotide
cugauuuaaccaagaaggu

SEQ ID NO: 315532 - RNA, 19 nt, Artificial Sequence
  Description of Artificial Sequence: Synthetic oligonucleotide
gaaacuccuaugcaccaau

SEQ ID NO: 315533 - RNA, 19 nt, Artificial Sequence
  Description of Artificial Sequence: Synthetic oligonucleotide
aguagcccuagaaacuccu

SEQ ID NO: 315534 - RNA, 19 nt, Artificial Sequence
  Description of Artificial Sequence: Synthetic oligonucleotide
gacauuccugagcagaauu

SEQ ID NO: 315535 - RNA, 19 nt, Artificial Sequence
  Description of Artificial Sequence: Synthetic oligonucleotide
gucuuuauucuggggagga

SEQ ID NO: 315536 - RNA, 19 nt, Artificial Sequence
  Description of Artificial Sequence: Synthetic oligonucleotide
gguuuacacuugauugggg

SEQ ID NO: 315537 - RNA, 19 nt, Artificial Sequence
  Description of Artificial Sequence: Synthetic oligonucleotide
ggacauacccauccgcuuc

SEQ ID NO: 315538 - RNA, 19 nt, Artificial Sequence
  Description of Artificial Sequence: Synthetic oligonucleotide
ucccucuuaccuuguuuaa

SEQ ID NO: 315539 - RNA, 19 nt, Artificial Sequence
  Description of Artificial Sequence: Synthetic oligonucleotide
ggguccaacauucacauuu

SEQ ID NO: 315540 - RNA, 19 nt, Artificial Sequence
  Description of Artificial Sequence: Synthetic oligonucleotide
ccuagguacacccugagcu

SEQ ID NO: 315541 - RNA, 19 nt, Artificial Sequence
  Description of Artificial Sequence: Synthetic oligonucleotide
aggacauacccauccgcuu

SEQ ID NO: 315542 - RNA, 19 nt, Artificial Sequence
  Description of Artificial Sequence: Synthetic oligonucleotide
uucuaucacugggaaccca

SEQ ID NO: 315543 - RNA, 19 nt, Artificial Sequence
  Description of Artificial Sequence: Synthetic oligonucleotide
gccuguguauucaaccuag

SEQ ID NO: 315544 - RNA, 19 nt, Artificial Sequence
  Description of Artificial Sequence: Synthetic oligonucleotide
agguuuucgguaaaaucuu

SEQ ID NO: 315545 - RNA, 19 nt, Artificial Sequence
  Description of Artificial Sequence: Synthetic oligonucleotide
ggaaaugcaacaagugaaa

SEQ ID NO: 315546 - RNA, 19 nt, Artificial Sequence
  Description of Artificial Sequence: Synthetic oligonucleotide
agccuguguauucaaccua

SEQ ID NO: 315547 - RNA, 19 nt, Artificial Sequence
  Description of Artificial Sequence: Synthetic oligonucleotide
aggggucucgccgcgggac

SEQ ID NO: 315548 - RNA, 19 nt, Artificial Sequence
  Description of Artificial Sequence: Synthetic oligonucleotide
ugcuuguauuaaugauuau

SEQ ID NO: 315549 - RNA, 19 nt, Artificial Sequence
  Description of Artificial Sequence: Synthetic oligonucleotide
cacccugagcuucuaucug

SEQ ID NO: 315550 - RNA, 19 nt, Artificial Sequence
  Description of Artificial Sequence: Synthetic oligonucleotide
auaaauucucuagcucguu

SEQ ID NO: 315551 - RNA, 19 nt, Artificial Sequence
  Description of Artificial Sequence: Synthetic oligonucleotide
gagaggccgcacuacugga

SEQ ID NO: 315552 - RNA, 19 nt, Artificial Sequence
  Description of Artificial Sequence: Synthetic oligonucleotide
gcuguaugaaacgcauagc

SEQ ID NO: 315553 - RNA, 19 nt, Artificial Sequence
  Description of Artificial Sequence: Synthetic oligonucleotide
agaaacuccuaugcaccaa

SEQ ID NO: 315554 - RNA, 19 nt, Artificial Sequence
  Description of Artificial Sequence: Synthetic oligonucleotide
ugacauuccugagcagaau

SEQ ID NO: 315555 - RNA, 19 nt, Artificial Sequence
  Description of Artificial Sequence: Synthetic oligonucleotide
gcuggcaaaaggcagugcu

SEQ ID NO: 315556 - RNA, 19 nt, Artificial Sequence
  Description of Artificial Sequence: Synthetic oligonucleotide
gugagaggccgcacuacug

SEQ ID NO: 315557 - RNA, 19 nt, Artificial Sequence
  Description of Artificial Sequence: Synthetic oligonucleotide
guuaccuacuggaaggcau

SEQ ID NO: 315558 - RNA, 19 nt, Artificial Sequence
  Description of Artificial Sequence: Synthetic oligonucleotide
gcaggcgagaugugguuug

SEQ ID NO: 315559 - RNA, 19 nt, Artificial Sequence
  Description of Artificial Sequence: Synthetic oligonucleotide
aaggggucucgccgcggga

SEQ ID NO: 315560 - RNA, 19 nt, Artificial Sequence
  Description of Artificial Sequence: Synthetic oligonucleotide
gguagaguucaaaaguagu

SEQ ID NO: 315561 - RNA, 19 nt, Artificial Sequence
  Description of Artificial Sequence: Synthetic oligonucleotide
aggccgcacuacuggacug

SEQ ID NO: 315562 - RNA, 19 nt, Artificial Sequence
  Description of Artificial Sequence: Synthetic oligonucleotide
auaagccgaaucagcugcu

SEQ ID NO: 315563 - RNA, 19 nt, Artificial Sequence
  Description of Artificial Sequence: Synthetic oligonucleotide
acucuucgucuaauguucu

SEQ ID NO: 315564 - RNA, 19 nt, Artificial Sequence
  Description of Artificial Sequence: Synthetic oligonucleotide
auauagccuucuaaugcuu

SEQ ID NO: 315565 - RNA, 19 nt, Artificial Sequence
  Description of Artificial Sequence: Synthetic oligonucleotide
gaggccgcacuacuggacu

SEQ ID NO: 315566 - RNA, 19 nt, Artificial Sequence
  Description of Artificial Sequence: Synthetic oligonucleotide
ggcgaaguuuuaaugcaca

SEQ ID NO: 315567 - RNA, 19 nt, Artificial Sequence
  Description of Artificial Sequence: Synthetic oligonucleotide
acgagugauuuugcaauuu

SEQ ID NO: 315568 - RNA, 19 nt, Artificial Sequence
  Description of Artificial Sequence: Synthetic oligonucleotide
auaaucauuugggguccaa

SEQ ID NO: 315569 - RNA, 19 nt, Artificial Sequence
  Description of Artificial Sequence: Synthetic oligonucleotide
agcuauggacaagcaauuu

SEQ ID NO: 315570 - RNA, 19 nt, Artificial Sequence
  Description of Artificial Sequence: Synthetic oligonucleotide
uaccugccgguuaccuacu

SEQ ID NO: 315571 - RNA, 19 nt, Artificial Sequence
  Description of Artificial Sequence: Synthetic oligonucleotide
uaagccgaaucagcugcua

SEQ ID NO: 315572 - RNA, 19 nt, Artificial Sequence
  Description of Artificial Sequence: Synthetic oligonucleotide
guaguugggcacgcuucug

SEQ ID NO: 315573 - RNA, 19 nt, Artificial Sequence
  Description of Artificial Sequence: Synthetic oligonucleotide
cucgccgcgggacucagaa

SEQ ID NO: 315574 - RNA, 19 nt, Artificial Sequence
  Description of Artificial Sequence: Synthetic oligonucleotide
cacuugcucccuucuagaa

SEQ ID NO: 315575 - RNA, 19 nt, Artificial Sequence
  Description of Artificial Sequence: Synthetic oligonucleotide
acaaggggucucgccgcgg

SEQ ID NO: 315576 - RNA, 19 nt, Artificial Sequence
  Description of Artificial Sequence: Synthetic oligonucleotide
gggacacuauuuaauaccu

SEQ ID NO: 315577 - RNA, 19 nt, Artificial Sequence
  Description of Artificial Sequence: Synthetic oligonucleotide
ccugccgguuaccuacugg

SEQ ID NO: 315578 - RNA, 19 nt, Artificial Sequence
  Description of Artificial Sequence: Synthetic oligonucleotide
uaccuacuggaaggcauuu

SEQ ID NO: 315579 - RNA, 19 nt, Artificial Sequence
  Description of Artificial Sequence: Synthetic oligonucleotide
caggcgagaugugguuugc

SEQ ID NO: 315580 - RNA, 19 nt, Artificial Sequence
  Description of Artificial Sequence: Synthetic oligonucleotide
accugccgguuaccuacug

SEQ ID NO: 315581 - RNA, 19 nt, Artificial Sequence
  Description of Artificial Sequence: Synthetic oligonucleotide
agacagcuauggacaagca

SEQ ID NO: 315582 - RNA, 19 nt, Artificial Sequence
  Description of Artificial Sequence: Synthetic oligonucleotide
gaaacggauuggguagagu

SEQ ID NO: 315583 - RNA, 19 nt, Artificial Sequence
  Description of Artificial Sequence: Synthetic oligonucleotide
cuagguacacccugagcuu

SEQ ID NO: 315584 - RNA, 19 nt, Artificial Sequence
  Description of Artificial Sequence: Synthetic oligonucleotide
ggccgcacuacuggacugg

SEQ ID NO: 315585 - RNA, 19 nt, Artificial Sequence
  Description of Artificial Sequence: Synthetic oligonucleotide
cucuaagaggcaggcgaga

SEQ ID NO: 315586 - RNA, 19 nt, Artificial Sequence
  Description of Artificial Sequence: Synthetic oligonucleotide
ggacucccaaucagaacac

SEQ ID NO: 315587 - RNA, 19 nt, Artificial Sequence
  Description of Artificial Sequence: Synthetic oligonucleotide
cucuuaccuuguuuaaauu

SEQ ID NO: 315588 - RNA, 19 nt, Artificial Sequence
  Description of Artificial Sequence: Synthetic oligonucleotide
gcuagaugguuacuugaau

SEQ ID NO: 315589 - RNA, 19 nt, Artificial Sequence
  Description of Artificial Sequence: Synthetic oligonucleotide
ccucuuaccuuguuuaaau

SEQ ID NO: 315590 - RNA, 19 nt, Artificial Sequence
  Description of Artificial Sequence: Synthetic oligonucleotide
ggucuguauuugaaacgga

SEQ ID NO: 315591 - RNA, 19 nt, Artificial Sequence
  Description of Artificial Sequence: Synthetic oligonucleotide
cagcuauggacaagcaauu

SEQ ID NO: 315592 - RNA, 19 nt, Artificial Sequence
  Description of Artificial Sequence: Synthetic oligonucleotide
ccaagcacaacccuugguu

SEQ ID NO: 315593 - RNA, 19 nt, Artificial Sequence
  Description of Artificial Sequence: Synthetic oligonucleotide
ggauuggguagaguucaaa

SEQ ID NO: 315594 - RNA, 19 nt, Artificial Sequence
  Description of Artificial Sequence: Synthetic oligonucleotide
gacucccaaucagaacacu

SEQ ID NO: 315595 - RNA, 19 nt, Artificial Sequence
  Description of Artificial Sequence: Synthetic oligonucleotide
aggcggucccugagccacc

SEQ ID NO: 315596 - RNA, 19 nt, Artificial Sequence
  Description of Artificial Sequence: Synthetic oligonucleotide
ggcgagaugugguuugcau

SEQ ID NO: 315597 - RNA, 19 nt, Artificial Sequence
  Description of Artificial Sequence: Synthetic oligonucleotide
ggcacgcuucuguuuuauc

SEQ ID NO: 315598 - RNA, 19 nt, Artificial Sequence
  Description of Artificial Sequence: Synthetic oligonucleotide
gagugggugcagggaguga

SEQ ID NO: 315599 - RNA, 19 nt, Artificial Sequence
  Description of Artificial Sequence: Synthetic oligonucleotide
guagcccuagaaacuccua

SEQ ID NO: 315600 - RNA, 19 nt, Artificial Sequence
  Description of Artificial Sequence: Synthetic oligonucleotide
cgccgcgggacucagaaca

SEQ ID NO: 315601 - RNA, 19 nt, Artificial Sequence
  Description of Artificial Sequence: Synthetic oligonucleotide
cacuacuggacuggugacu

SEQ ID NO: 315602 - RNA, 19 nt, Artificial Sequence
  Description of Artificial Sequence: Synthetic oligonucleotide
cacuugauugggguacggu

SEQ ID NO: 315603 - RNA, 19 nt, Artificial Sequence
  Description of Artificial Sequence: Synthetic oligonucleotide
ccagcgugugcuucaugca

SEQ ID NO: 315604 - RNA, 19 nt, Artificial Sequence
  Description of Artificial Sequence: Synthetic oligonucleotide
gucucgccgcgggacucag

SEQ ID NO: 315605 - RNA, 19 nt, Artificial Sequence
  Description of Artificial Sequence: Synthetic oligonucleotide
gcgagaugugguuugcauu

SEQ ID NO: 315606 - RNA, 19 nt, Artificial Sequence
  Description of Artificial Sequence: Synthetic oligonucleotide
ccuaagguuuucgguaaaa

SEQ ID NO: 315607 - RNA, 19 nt, Artificial Sequence
  Description of Artificial Sequence: Synthetic oligonucleotide
caucagcuacuucguuaua

SEQ ID NO: 315608 - RNA, 19 nt, Artificial Sequence
  Description of Artificial Sequence: Synthetic oligonucleotide
gggcaugacaccagcgugu

SEQ ID NO: 315609 - RNA, 19 nt, Artificial Sequence
  Description of Artificial Sequence: Synthetic oligonucleotide
gccgcgggacucagaacag

SEQ ID NO: 315610 - RNA, 19 nt, Artificial Sequence
  Description of Artificial Sequence: Synthetic oligonucleotide
cgucuaauguucuucugau

SEQ ID NO: 315611 - RNA, 19 nt, Artificial Sequence
  Description of Artificial Sequence: Synthetic oligonucleotide
gguuuucgguaaaaucuuu

SEQ ID NO: 315612 - RNA, 19 nt, Artificial Sequence
  Description of Artificial Sequence: Synthetic oligonucleotide
gccgaaucagcugcuagau

SEQ ID NO: 315613 - RNA, 19 nt, Artificial Sequence
  Description of Artificial Sequence: Synthetic oligonucleotide
acccgaagugggacacuau

SEQ ID NO: 315614 - RNA, 19 nt, Artificial Sequence
  Description of Artificial Sequence: Synthetic oligonucleotide
ggcggucccugagccaccc

SEQ ID NO: 315615 - RNA, 19 nt, Artificial Sequence
  Description of Artificial Sequence: Synthetic oligonucleotide
gccuuuccgcugaacuuuc

SEQ ID NO: 315616 - RNA, 19 nt, Artificial Sequence
  Description of Artificial Sequence: Synthetic oligonucleotide
ccgaagugggacacuauuu

SEQ ID NO: 315617 - RNA, 19 nt, Artificial Sequence
  Description of Artificial Sequence: Synthetic oligonucleotide
gcacacggguaaaaucaua

SEQ ID NO: 315618 - RNA, 19 nt, Artificial Sequence
  Description of Artificial Sequence: Synthetic oligonucleotide
ggucccugagccacccgaa

SEQ ID NO: 315619 - RNA, 19 nt, Artificial Sequence
  Description of Artificial Sequence: Synthetic oligonucleotide
gcggucccugagccacccg

SEQ ID NO: 315620 - RNA, 19 nt, Artificial Sequence
  Description of Artificial Sequence: Synthetic oligonucleotide
gcacaacccuugguuuaca

SEQ ID NO: 315621 - RNA, 19 nt, Artificial Sequence
  Description of Artificial Sequence: Synthetic oligonucleotide
cccgaagugggacacuauu

SEQ ID NO: 315622 - RNA, 19 nt, Artificial Sequence
  Description of Artificial Sequence: Synthetic oligonucleotide
ggucucgccgcgggacuca

SEQ ID NO: 315623 - RNA, 19 nt, Artificial Sequence
  Description of Artificial Sequence: Synthetic oligonucleotide
gggucucgccgcgggacuc

SEQ ID NO: 315624 - RNA, 19 nt, Artificial Sequence
  Description of Artificial Sequence: Synthetic oligonucleotide
gguacacccugagcuucua

SEQ ID NO: 315625 - RNA, 19 nt, Artificial Sequence
  Description of Artificial Sequence: Synthetic oligonucleotide
cgagugauuuugcaauuuu

SEQ ID NO: 315626 - RNA, 19 nt, Artificial Sequence
  Description of Artificial Sequence: Synthetic oligonucleotide
ggggucucgccgcgggacu

SEQ ID NO: 315627 - RNA, 19 nt, Artificial Sequence
  Description of Artificial Sequence: Synthetic oligonucleotide
gggguacgguggcaccagu

SEQ ID NO: 315628 - RNA, 19 nt, Artificial Sequence
  Description of Artificial Sequence: Synthetic oligonucleotide
caccaguggucaggucugu

SEQ ID NO: 315629 - RNA, 19 nt, Artificial Sequence
  Description of Artificial Sequence: Synthetic oligonucleotide
gccgcacuacuggacuggu

SEQ ID NO: 315630 - RNA, 19 nt, Artificial Sequence
  Description of Artificial Sequence: Synthetic oligonucleotide
ccagucgcuaaggccacuu

SEQ ID NO: 315631 - RNA, 19 nt, Artificial Sequence
  Description of Artificial Sequence: Synthetic oligonucleotide
ccgcgggacucagaacagu

SEQ ID NO: 315632 - RNA, 19 nt, Artificial Sequence
  Description of Artificial Sequence: Synthetic oligonucleotide
agcaccaucauauacaugc

SEQ ID NO: 315633 - RNA, 19 nt, Artificial Sequence
  Description of Artificial Sequence: Synthetic oligonucleotide
uugacuauaagacagcaag

SEQ ID NO: 315634 - RNA, 19 nt, Artificial Sequence
  Description of Artificial Sequence: Synthetic oligonucleotide
aaaaccaucacccuggcca

SEQ ID NO: 315635 - RNA, 19 nt, Artificial Sequence
  Description of Artificial Sequence: Synthetic oligonucleotide
uaaguugcccguaagaagg

SEQ ID NO: 315636 - RNA, 19 nt, Artificial Sequence
  Description of Artificial Sequence: Synthetic oligonucleotide
aauggaucugagcugcaac

SEQ ID NO: 315637 - RNA, 19 nt, Artificial Sequence
  Description of Artificial Sequence: Synthetic oligonucleotide
uaaacaguauccccgaaca

SEQ ID NO: 315638 - RNA, 19 nt, Artificial Sequence
  Description of Artificial Sequence: Synthetic oligonucleotide
aggaucauagcauuguguc

SEQ ID NO: 315639 - RNA, 19 nt, Artificial Sequence
  Description of Artificial Sequence: Synthetic oligonucleotide
acaccuaacuuucugcacc

SEQ ID NO: 315640 - RNA, 19 nt, Artificial Sequence
  Description of Artificial Sequence: Synthetic oligonucleotide
uaugcuguauuccugggug

SEQ ID NO: 315641 - RNA, 19 nt, Artificial Sequence
  Description of Artificial Sequence: Synthetic oligonucleotide
auaaaaguccuccaaggug

SEQ ID NO: 315642 - RNA, 19 nt, Artificial Sequence
  Description of Artificial Sequence: Synthetic oligonucleotide
auuaacaacacaucauccu

SEQ ID NO: 315643 - RNA, 19 nt, Artificial Sequence
  Description of Artificial Sequence: Synthetic oligonucleotide
ugugugguaggacacaaca

SEQ ID NO: 315644 - RNA, 19 nt, Artificial Sequence
  Description of Artificial Sequence: Synthetic oligonucleotide
auggaucugagcugcaacc

SEQ ID NO: 315645 - RNA, 19 nt, Artificial Sequence
  Description of Artificial Sequence: Synthetic oligonucleotide
gauagcacaguggagaagc

SEQ ID NO: 315646 - RNA, 19 nt, Artificial Sequence
  Description of Artificial Sequence: Synthetic oligonucleotide
cuagauuuucaccagcccc

SEQ ID NO: 315647 - RNA, 19 nt, Artificial Sequence
  Description of Artificial Sequence: Synthetic oligonucleotide
uacuuaaggccacuuuugg

SEQ ID NO: 315648 - RNA, 19 nt, Artificial Sequence
  Description of Artificial Sequence: Synthetic oligonucleotide
cuagucauacacagaaggg

SEQ ID NO: 315649 - RNA, 19 nt, Artificial Sequence
  Description of Artificial Sequence: Synthetic oligonucleotide
auaacugccgcugugauga

SEQ ID NO: 315650 - RNA, 19 nt, Artificial Sequence
  Description of Artificial Sequence: Synthetic oligonucleotide
uugggaaccuuucuuaaca

SEQ ID NO: 315651 - RNA, 19 nt, Artificial Sequence
  Description of Artificial Sequence: Synthetic oligonucleotide
acuauaagacagcaagaag

SEQ ID NO: 315652 - RNA, 19 nt, Artificial Sequence
  Description of Artificial Sequence: Synthetic oligonucleotide
guagguagcauuaaagccc

SEQ ID NO: 315653 - RNA, 19 nt, Artificial Sequence
  Description of Artificial Sequence: Synthetic oligonucleotide
auaaguugcccguaagaag

SEQ ID NO: 315654 - RNA, 19 nt, Artificial Sequence
  Description of Artificial Sequence: Synthetic oligonucleotide
aggacaccuaacuuucugc

SEQ ID NO: 315655 - RNA, 19 nt, Artificial Sequence
  Description of Artificial Sequence: Synthetic oligonucleotide
agaguuaucguuaggguuc

SEQ ID NO: 315656 - RNA, 19 nt, Artificial Sequence
  Description of Artificial Sequence: Synthetic oligonucleotide
auugguucgaggaaguagg

SEQ ID NO: 315657 - RNA, 19 nt, Artificial Sequence
  Description of Artificial Sequence: Synthetic oligonucleotide
aacaguauccccgaacaug

SEQ ID NO: 315658 - RNA, 19 nt, Artificial Sequence
  Description of Artificial Sequence: Synthetic oligonucleotide
aaccagacgacgcaccgag

SEQ ID NO: 315659 - RNA, 19 nt, Artificial Sequence
  Description of Artificial Sequence: Synthetic oligonucleotide
acagcggugguucaagcac

SEQ ID NO: 315660 - RNA, 19 nt, Artificial Sequence
  Description of Artificial Sequence: Synthetic oligonucleotide
aguaaaugcucugaaccac

SEQ ID NO: 315661 - RNA, 19 nt, Artificial Sequence
  Description of Artificial Sequence: Synthetic oligonucleotide
caucgaucccaucacagcg

SEQ ID NO: 315662 - RNA, 19 nt, Artificial Sequence
  Description of Artificial Sequence: Synthetic oligonucleotide
cuacguagcagucucgggg

SEQ ID NO: 315663 - RNA, 19 nt, Artificial Sequence
  Description of Artificial Sequence: Synthetic oligonucleotide
ugggguauugguucgagga

SEQ ID NO: 315664 - RNA, 19 nt, Artificial Sequence
  Description of Artificial Sequence: Synthetic oligonucleotide
agugggugagacuacguag

SEQ ID NO: 315665 - RNA, 19 nt, Artificial Sequence
  Description of Artificial Sequence: Synthetic oligonucleotide
uauuccugggugcgaaugg

SEQ ID NO: 315666 - RNA, 19 nt, Artificial Sequence
  Description of Artificial Sequence: Synthetic oligonucleotide
auaacccaggugcaguugg

SEQ ID NO: 315667 - RNA, 19 nt, Artificial Sequence
  Description of Artificial Sequence: Synthetic oligonucleotide
uagguagcauuaaagcccc

SEQ ID NO: 315668 - RNA, 19 nt, Artificial Sequence
  Description of Artificial Sequence: Synthetic oligonucleotide
uacugcuccgcccucacag

SEQ ID NO: 315669 - RNA, 19 nt, Artificial Sequence
  Description of Artificial Sequence: Synthetic oligonucleotide
uauugguucgaggaaguag

SEQ ID NO: 315670 - RNA, 19 nt, Artificial Sequence
  Description of Artificial Sequence: Synthetic oligonucleotide
aauaacugccgcugugaug

SEQ ID NO: 315671 - RNA, 19 nt, Artificial Sequence
  Description of Artificial Sequence: Synthetic oligonucleotide
aacgcagguucccuagcac

SEQ ID NO: 315672 - RNA, 19 nt, Artificial Sequence
  Description of Artificial Sequence: Synthetic oligonucleotide
gaagaccccauaaaagucc

SEQ ID NO: 315673 - RNA, 19 nt, Artificial Sequence
  Description of Artificial Sequence: Synthetic oligonucleotide
acaguauccccgaacaugg

SEQ ID NO: 315674 - RNA, 19 nt, Artificial Sequence
  Description of Artificial Sequence: Synthetic oligonucleotide
ugacuauaagacagcaaga

SEQ ID NO: 315675 - RNA, 19 nt, Artificial Sequence
  Description of Artificial Sequence: Synthetic oligonucleotide
agucccaugagccaucaca

SEQ ID NO: 315676 - RNA, 19 nt, Artificial Sequence
  Description of Artificial Sequence: Synthetic oligonucleotide
aguugcaaagggcuggcag

SEQ ID NO: 315677 - RNA, 19 nt, Artificial Sequence
  Description of Artificial Sequence: Synthetic oligonucleotide
uuaucguuaggguucucug

SEQ ID NO: 315678 - RNA, 19 nt, Artificial Sequence
  Description of Artificial Sequence: Synthetic oligonucleotide
uguagggaagucuucuaca

SEQ ID NO: 315679 - RNA, 19 nt, Artificial Sequence
  Description of Artificial Sequence: Synthetic oligonucleotide
ucuaagugggccaggcacc

SEQ ID NO: 315680 - RNA, 19 nt, Artificial Sequence
  Description of Artificial Sequence: Synthetic oligonucleotide
acaggcaucgaucccauca

SEQ ID NO: 315681 - RNA, 19 nt, Artificial Sequence
  Description of Artificial Sequence: Synthetic oligonucleotide
cugggcaauaaguugcccg

SEQ ID NO: 315682 - RNA, 19 nt, Artificial Sequence
  Description of Artificial Sequence: Synthetic oligonucleotide
guagggaagucuucuacag

SEQ ID NO: 315683 - RNA, 19 nt, Artificial Sequence
  Description of Artificial Sequence: Synthetic oligonucleotide
ugagccaucacagcgcugc

SEQ ID NO: 315684 - RNA, 19 nt, Artificial Sequence
  Description of Artificial Sequence: Synthetic oligonucleotide
ugugaagcguacugcaagc

SEQ ID NO: 315685 - RNA, 19 nt, Artificial Sequence
  Description of Artificial Sequence: Synthetic oligonucleotide
guuaggguucucuguaggg

SEQ ID NO: 315686 - RNA, 19 nt, Artificial Sequence
  Description of Artificial Sequence: Synthetic oligonucleotide
uccuaggcaaugaugcagc

SEQ ID NO: 315687 - RNA, 19 nt, Artificial Sequence
  Description of Artificial Sequence: Synthetic oligonucleotide
gguucgaggaaguaggccc

SEQ ID NO: 315688 - RNA, 19 nt, Artificial Sequence
  Description of Artificial Sequence: Synthetic oligonucleotide
accuagauuuucaccagcc

SEQ ID NO: 315689 - RNA, 19 nt, Artificial Sequence
  Description of Artificial Sequence: Synthetic oligonucleotide
gagaagaccccauaaaagu

SEQ ID NO: 315690 - RNA, 19 nt, Artificial Sequence
  Description of Artificial Sequence: Synthetic oligonucleotide
gagacuacguagcagucuc

SEQ ID NO: 315691 - RNA, 19 nt, Artificial Sequence
  Description of Artificial Sequence: Synthetic oligonucleotide
agggcaacccuccucaucu

SEQ ID NO: 315692 - RNA, 19 nt, Artificial Sequence
  Description of Artificial Sequence: Synthetic oligonucleotide
gaccuguacaacuccagac

SEQ ID NO: 315693 - RNA, 19 nt, Artificial Sequence
  Description of Artificial Sequence: Synthetic oligonucleotide
agcacagaguuaucguuag

SEQ ID NO: 315694 - RNA, 19 nt, Artificial Sequence
  Description of Artificial Sequence: Synthetic oligonucleotide
caagcaacugugugguagg

SEQ ID NO: 315695 - RNA, 19 nt, Artificial Sequence
  Description of Artificial Sequence: Synthetic oligonucleotide
uggcgcaagaucuggagca

SEQ ID NO: 315696 - RNA, 19 nt, Artificial Sequence
  Description of Artificial Sequence: Synthetic oligonucleotide
guaaacaguauccccgaac

SEQ ID NO: 315697 - RNA, 19 nt, Artificial Sequence
  Description of Artificial Sequence: Synthetic oligonucleotide
ucuugacuauaagacagca

SEQ ID NO: 315698 - RNA, 19 nt, Artificial Sequence
  Description of Artificial Sequence: Synthetic oligonucleotide
ugaagcguacugcaagccu

SEQ ID NO: 315699 - RNA, 19 nt, Artificial Sequence
  Description of Artificial Sequence: Synthetic oligonucleotide
ugcccuguacuuccaagag

SEQ ID NO: 315700 - RNA, 19 nt, Artificial Sequence
  Description of Artificial Sequence: Synthetic oligonucleotide
accuguacaacuccagaca

SEQ ID NO: 315701 - RNA, 19 nt, Artificial Sequence
  Description of Artificial Sequence: Synthetic oligonucleotide
uuccuaggcaaugaugcag

SEQ ID NO: 315702 - RNA, 19 nt, Artificial Sequence
  Description of Artificial Sequence: Synthetic oligonucleotide
gaccccauaaaaguccucc

SEQ ID NO: 315703 - RNA, 19 nt, Artificial Sequence
  Description of Artificial Sequence: Synthetic oligonucleotide
uugcccguaagaaggaggu

SEQ ID NO: 315704 - RNA, 19 nt, Artificial Sequence
  Description of Artificial Sequence: Synthetic oligonucleotide
uucuagaggcacugagggg

SEQ ID NO: 315705 - RNA, 19 nt, Artificial Sequence
  Description of Artificial Sequence: Synthetic oligonucleotide
uauacagcggugguucaag

SEQ ID NO: 315706 - RNA, 19 nt, Artificial Sequence
  Description of Artificial Sequence: Synthetic oligonucleotide
gacuauaagacagcaagaa

SEQ ID NO: 315707 - RNA, 19 nt, Artificial Sequence
  Description of Artificial Sequence: Synthetic oligonucleotide
uucccuagcacagaguuau

SEQ ID NO: 315708 - RNA, 19 nt, Artificial Sequence
  Description of Artificial Sequence: Synthetic oligonucleotide
guagcagacggccucggag

SEQ ID NO: 315709 - RNA, 19 nt, Artificial Sequence
  Description of Artificial Sequence: Synthetic oligonucleotide
aagcguacugcaagccucc

SEQ ID NO: 315710 - RNA, 19 nt, Artificial Sequence
  Description of Artificial Sequence: Synthetic oligonucleotide
acgacggagacggcgaacc

SEQ ID NO: 315711 - RNA, 19 nt, Artificial Sequence
  Description of Artificial Sequence: Synthetic oligonucleotide
ugggcaauaaguugcccgu

SEQ ID NO: 315712 - RNA, 19 nt, Artificial Sequence
  Description of Artificial Sequence: Synthetic oligonucleotide
ugaauauccaggggaggag

SEQ ID NO: 315713 - RNA, 19 nt, Artificial Sequence
  Description of Artificial Sequence: Synthetic oligonucleotide
auacagcggugguucaagc

SEQ ID NO: 315714 - RNA, 19 nt, Artificial Sequence
  Description of Artificial Sequence: Synthetic oligonucleotide
cugugaagcguacugcaag

SEQ ID NO: 315715 - RNA, 19 nt, Artificial Sequence
  Description of Artificial Sequence: Synthetic oligonucleotide
guauccccgaacaugguag

SEQ ID NO: 315716 - RNA, 19 nt, Artificial Sequence
  Description of Artificial Sequence: Synthetic oligonucleotide
uaucguuaggguucucugu

SEQ ID NO: 315717 - RNA, 19 nt, Artificial Sequence
  Description of Artificial Sequence: Synthetic oligonucleotide
caaucuugacuauaagaca

SEQ ID NO: 315718 - RNA, 19 nt, Artificial Sequence
  Description of Artificial Sequence: Synthetic oligonucleotide
aucauagcauugugucugg

SEQ ID NO: 315719 - RNA, 19 nt, Artificial Sequence
  Description of Artificial Sequence: Synthetic oligonucleotide
uuggcgcaagaucuggagc

SEQ ID NO: 315720 - RNA, 19 nt, Artificial Sequence
  Description of Artificial Sequence: Synthetic oligonucleotide
uaaagccccgaccacugcu

SEQ ID NO: 315721 - RNA, 19 nt, Artificial Sequence
  Description of Artificial Sequence: Synthetic oligonucleotide
gaggacaccuaacuuucug

SEQ ID NO: 315722 - RNA, 19 nt, Artificial Sequence
  Description of Artificial Sequence: Synthetic oligonucleotide
ugguauacagcggugguuc

SEQ ID NO: 315723 - RNA, 19 nt, Artificial Sequence
  Description of Artificial Sequence: Synthetic oligonucleotide
ugcuguauuccugggugcg

SEQ ID NO: 315724 - RNA, 19 nt, Artificial Sequence
  Description of Artificial Sequence: Synthetic oligonucleotide
aaugccggcagcgccuuuc

SEQ ID NO: 315725 - RNA, 19 nt, Artificial Sequence
  Description of Artificial Sequence: Synthetic oligonucleotide
uacguagcagucucggggu

SEQ ID NO: 315726 - RNA, 19 nt, Artificial Sequence
  Description of Artificial Sequence: Synthetic oligonucleotide
gcaaugaugcagcuagggg

SEQ ID NO: 315727 - RNA, 19 nt, Artificial Sequence
  Description of Artificial Sequence: Synthetic oligonucleotide
guagcauuaaagccccgac

SEQ ID NO: 315728 - RNA, 19 nt, Artificial Sequence
  Description of Artificial Sequence: Synthetic oligonucleotide
ugucucauacacacacuuc

SEQ ID NO: 315729 - RNA, 19 nt, Artificial Sequence
  Description of Artificial Sequence: Synthetic oligonucleotide
uuuccuaggcaaugaugca

SEQ ID NO: 315730 - RNA, 19 nt, Artificial Sequence
  Description of Artificial Sequence: Synthetic oligonucleotide
aaacaguauccccgaacau

SEQ ID NO: 315731 - RNA, 19 nt, Artificial Sequence
  Description of Artificial Sequence: Synthetic oligonucleotide
aggugugaauauccagggg

SEQ ID NO: 315732 - RNA, 19 nt, Artificial Sequence
  Description of Artificial Sequence: Synthetic oligonucleotide
uagcacagaguuaucguua

SEQ ID NO: 315733 - RNA, 19 nt, Artificial Sequence
  Description of Artificial Sequence: Synthetic oligonucleotide
ugugccgucagcgcagucc

SEQ ID NO: 315734 - RNA, 19 nt, Artificial Sequence
  Description of Artificial Sequence: Synthetic oligonucleotide
agacgacgcaccgagcggc

SEQ ID NO: 315735 - RNA, 19 nt, Artificial Sequence
  Description of Artificial Sequence: Synthetic oligonucleotide
agggaauggaucugagcug

SEQ ID NO: 315736 - RNA, 19 nt, Artificial Sequence
  Description of Artificial Sequence: Synthetic oligonucleotide
aucgaucccaucacagcgc

SEQ ID NO: 315737 - RNA, 19 nt, Artificial Sequence
  Description of Artificial Sequence: Synthetic oligonucleotide
guacuuaaggccacuuuug

SEQ ID NO: 315738 - RNA, 19 nt, Artificial Sequence
  Description of Artificial Sequence: Synthetic oligonucleotide
gacaccuaacuuucugcac

SEQ ID NO: 315739 - RNA, 19 nt, Artificial Sequence
  Description of Artificial Sequence: Synthetic oligonucleotide
aacagccugaccagacagg

SEQ ID NO: 315740 - RNA, 19 nt, Artificial Sequence
  Description of Artificial Sequence: Synthetic oligonucleotide
aggacuguugugugauguc

SEQ ID NO: 315741 - RNA, 19 nt, Artificial Sequence
  Description of Artificial Sequence: Synthetic oligonucleotide
caucauauacaugcacggc

SEQ ID NO: 315742 - RNA, 19 nt, Artificial Sequence
  Description of Artificial Sequence: Synthetic oligonucleotide
aacugccgcugugaugacc

SEQ ID NO: 315743 - RNA, 19 nt, Artificial Sequence
  Description of Artificial Sequence: Synthetic oligonucleotide
ugguaguugcagcggucgg

SEQ ID NO: 315744 - RNA, 19 nt, Artificial Sequence
  Description of Artificial Sequence: Synthetic oligonucleotide
guugcccguaagaaggagg

SEQ ID NO: 315745 - RNA, 19 nt, Artificial Sequence
  Description of Artificial Sequence: Synthetic oligonucleotide
aacaugguagguagcauua

SEQ ID NO: 315746 - RNA, 19 nt, Artificial Sequence
  Description of Artificial Sequence: Synthetic oligonucleotide
ugguugagccucuagucau

SEQ ID NO: 315747 - RNA, 19 nt, Artificial Sequence
  Description of Artificial Sequence: Synthetic oligonucleotide
gugguaggacacaacagcc

SEQ ID NO: 315748 - RNA, 19 nt, Artificial Sequence
  Description of Artificial Sequence: Synthetic oligonucleotide
gugugaauauccaggggag

SEQ ID NO: 315749 - RNA, 19 nt, Artificial Sequence
  Description of Artificial Sequence: Synthetic oligonucleotide
ucguuaggguucucuguag

SEQ ID NO: 315750 - RNA, 19 nt, Artificial Sequence
  Description of Artificial Sequence: Synthetic oligonucleotide
agucauaucuuggcgcaag

SEQ ID NO: 315751 - RNA, 19 nt, Artificial Sequence
  Description of Artificial Sequence: Synthetic oligonucleotide
ugggaaccuuucuuaacac

SEQ ID NO: 315752 - RNA, 19 nt, Artificial Sequence
  Description of Artificial Sequence: Synthetic oligonucleotide
aucguuaggguucucugua

SEQ ID NO: 315753 - RNA, 19 nt, Artificial Sequence
  Description of Artificial Sequence: Synthetic oligonucleotide
gaagcguacugcaagccuc

SEQ ID NO: 315754 - RNA, 19 nt, Artificial Sequence
  Description of Artificial Sequence: Synthetic oligonucleotide
cacuuguguucucuaagug

SEQ ID NO: 315755 - RNA, 19 nt, Artificial Sequence
  Description of Artificial Sequence: Synthetic oligonucleotide
uguaagugcccuguacuuc

SEQ ID NO: 315756 - RNA, 19 nt, Artificial Sequence
  Description of Artificial Sequence: Synthetic oligonucleotide
caccagauagcacagugga

SEQ ID NO: 315757 - RNA, 19 nt, Artificial Sequence
  Description of Artificial Sequence: Synthetic oligonucleotide
ucgaucccaucacagcgcu

SEQ ID NO: 315758 - RNA, 19 nt, Artificial Sequence
  Description of Artificial Sequence: Synthetic oligonucleotide
gagacugaggccaggugug

SEQ ID NO: 315759 - RNA, 19 nt, Artificial Sequence
  Description of Artificial Sequence: Synthetic oligonucleotide
ugggugagacuacguagca

SEQ ID NO: 315760 - RNA, 19 nt, Artificial Sequence
  Description of Artificial Sequence: Synthetic oligonucleotide
ugacggguaguggaggagc

SEQ ID NO: 315761 - RNA, 19 nt, Artificial Sequence
  Description of Artificial Sequence: Synthetic oligonucleotide
ugagacuacguagcagucu

SEQ ID NO: 315762 - RNA, 19 nt, Artificial Sequence
  Description of Artificial Sequence: Synthetic oligonucleotide
agagcuucggcugucccug

SEQ ID NO: 315763 - RNA, 19 nt, Artificial Sequence
  Description of Artificial Sequence: Synthetic oligonucleotide
ggaaguaggccccaacgac

SEQ ID NO: 315764 - RNA, 19 nt, Artificial Sequence
  Description of Artificial Sequence: Synthetic oligonucleotide
agccaaucuugacuauaag

SEQ ID NO: 315765 - RNA, 19 nt, Artificial Sequence
  Description of Artificial Sequence: Synthetic oligonucleotide
acggcgaaccagacgacgc

SEQ ID NO: 315766 - RNA, 19 nt, Artificial Sequence
  Description of Artificial Sequence: Synthetic oligonucleotide
gugggugagacuacguagc

SEQ ID NO: 315767 - RNA, 19 nt, Artificial Sequence
  Description of Artificial Sequence: Synthetic oligonucleotide
cugggugcgaauggcauag

SEQ ID NO: 315768 - RNA, 19 nt, Artificial Sequence
  Description of Artificial Sequence: Synthetic oligonucleotide
gugcgaauggcauagaguu

SEQ ID NO: 315769 - RNA, 19 nt, Artificial Sequence
  Description of Artificial Sequence: Synthetic oligonucleotide
ggagcgcaggaguaaaugc

SEQ ID NO: 315770 - RNA, 19 nt, Artificial Sequence
  Description of Artificial Sequence: Synthetic oligonucleotide
aguauccccgaacauggua

SEQ ID NO: 315771 - RNA, 19 nt, Artificial Sequence
  Description of Artificial Sequence: Synthetic oligonucleotide
gacggcgaaccagacgacg

SEQ ID NO: 315772 - RNA, 19 nt, Artificial Sequence
  Description of Artificial Sequence: Synthetic oligonucleotide
aacgacggagacggcgaac

SEQ ID NO: 315773 - RNA, 19 nt, Artificial Sequence
  Description of Artificial Sequence: Synthetic oligonucleotide
gaucuggucucaggggucc

SEQ ID NO: 315774 - RNA, 19 nt, Artificial Sequence
  Description of Artificial Sequence: Synthetic oligonucleotide
gcgaauggcauagaguuug

SEQ ID NO: 315775 - RNA, 19 nt, Artificial Sequence
  Description of Artificial Sequence: Synthetic oligonucleotide
cagcuaggggacaaaagca

SEQ ID NO: 315776 - RNA, 19 nt, Artificial Sequence
  Description of Artificial Sequence: Synthetic oligonucleotide
uaacccaggugcaguuggc

SEQ ID NO: 315777 - RNA, 19 nt, Artificial Sequence
  Description of Artificial Sequence: Synthetic oligonucleotide
gugcuugggguugggaugg

SEQ ID NO: 315778 - RNA, 19 nt, Artificial Sequence
  Description of Artificial Sequence: Synthetic oligonucleotide
aacagcgcucaccuagauu

SEQ ID NO: 315779 - RNA, 19 nt, Artificial Sequence
  Description of Artificial Sequence: Synthetic oligonucleotide
aucuggagcagagaacgca

SEQ ID NO: 315780 - RNA, 19 nt, Artificial Sequence
  Description of Artificial Sequence: Synthetic oligonucleotide
uucuacaggugggauggca

SEQ ID NO: 315781 - RNA, 19 nt, Artificial Sequence
  Description of Artificial Sequence: Synthetic oligonucleotide
ccagacgacgcaccgagcg

SEQ ID NO: 315782 - RNA, 19 nt, Artificial Sequence
  Description of Artificial Sequence: Synthetic oligonucleotide
gaacgcagguucccuagca

SEQ ID NO: 315783 - RNA, 19 nt, Artificial Sequence
  Description of Artificial Sequence: Synthetic oligonucleotide
agcuucggcugucccugcc

SEQ ID NO: 315784 - RNA, 19 nt, Artificial Sequence
  Description of Artificial Sequence: Synthetic oligonucleotide
cugccgucaguacagucug

SEQ ID NO: 315785 - RNA, 19 nt, Artificial Sequence
  Description of Artificial Sequence: Synthetic oligonucleotide
guauuccugggugcgaaug

SEQ ID NO: 315786 - RNA, 19 nt, Artificial Sequence
  Description of Artificial Sequence: Synthetic oligonucleotide
guuagggaauggaucugag

SEQ ID NO: 315787 - RNA, 19 nt, Artificial Sequence
  Description of Artificial Sequence: Synthetic oligonucleotide
cugggguauugguucgagg

SEQ ID NO: 315788 - RNA, 19 nt, Artificial Sequence
  Description of Artificial Sequence: Synthetic oligonucleotide
gggaauggaucugagcugc

SEQ ID NO: 315789 - RNA, 19 nt, Artificial Sequence
  Description of Artificial Sequence: Synthetic oligonucleotide
gugugguaggacacaacag

SEQ ID NO: 315790 - RNA, 19 nt, Artificial Sequence
  Description of Artificial Sequence: Synthetic oligonucleotide
ggagucauaucuuggcgca

SEQ ID NO: 315791 - RNA, 19 nt, Artificial Sequence
  Description of Artificial Sequence: Synthetic oligonucleotide
cagguuagggaauggaucu

SEQ ID NO: 315792 - RNA, 19 nt, Artificial Sequence
  Description of Artificial Sequence: Synthetic oligonucleotide
gucaguacagucuggcugu

SEQ ID NO: 315793 - RNA, 19 nt, Artificial Sequence
  Description of Artificial Sequence: Synthetic oligonucleotide
gaccacugcuccaagcaac

SEQ ID NO: 315794 - RNA, 19 nt, Artificial Sequence
  Description of Artificial Sequence: Synthetic oligonucleotide
gaagccuagccacuuccaa

SEQ ID NO: 315795 - RNA, 19 nt, Artificial Sequence
  Description of Artificial Sequence: Synthetic oligonucleotide
ggguucuagaggcacugag

SEQ ID NO: 315796 - RNA, 19 nt, Artificial Sequence
  Description of Artificial Sequence: Synthetic oligonucleotide
agccagcggcauuaacaac

SEQ ID NO: 315797 - RNA, 19 nt, Artificial Sequence
  Description of Artificial Sequence: Synthetic oligonucleotide
caggcaucgaucccaucac

SEQ ID NO: 315798 - RNA, 19 nt, Artificial Sequence
  Description of Artificial Sequence: Synthetic oligonucleotide
ugcacggcaucuccauaac

SEQ ID NO: 315799 - RNA, 19 nt, Artificial Sequence
  Description of Artificial Sequence: Synthetic oligonucleotide
cuugacuauaagacagcaa

SEQ ID NO: 315800 - RNA, 19 nt, Artificial Sequence
  Description of Artificial Sequence: Synthetic oligonucleotide
acuuaggggauagaagauu

SEQ ID NO: 315801 - RNA, 19 nt, Artificial Sequence
  Description of Artificial Sequence: Synthetic oligonucleotide
ggguauugguucgaggaag

SEQ ID NO: 315802 - RNA, 19 nt, Artificial Sequence
  Description of Artificial Sequence: Synthetic oligonucleotide
aggauaacccaggugcagu

SEQ ID NO: 315803 - RNA, 19 nt, Artificial Sequence
  Description of Artificial Sequence: Synthetic oligonucleotide
uaagugcccuguacuucca

SEQ ID NO: 315804 - RNA, 19 nt, Artificial Sequence
  Description of Artificial Sequence: Synthetic oligonucleotide
cagacgacgcaccgagcgg

SEQ ID NO: 315805 - RNA, 19 nt, Artificial Sequence
  Description of Artificial Sequence: Synthetic oligonucleotide
uugacggguaguggaggag

SEQ ID NO: 315806 - RNA, 19 nt, Artificial Sequence
  Description of Artificial Sequence: Synthetic oligonucleotide
uuucggggcagggcguagg

SEQ ID NO: 315807 - RNA, 19 nt, Artificial Sequence
  Description of Artificial Sequence: Synthetic oligonucleotide
ugcacgaucucagccucca

SEQ ID NO: 315808 - RNA, 19 nt, Artificial Sequence
  Description of Artificial Sequence: Synthetic oligonucleotide
gaacaugguagguagcauu

SEQ ID NO: 315809 - RNA, 19 nt, Artificial Sequence
  Description of Artificial Sequence: Synthetic oligonucleotide
guucgaggaaguaggcccc

SEQ ID NO: 315810 - RNA, 19 nt, Artificial Sequence
  Description of Artificial Sequence: Synthetic oligonucleotide
uggguucagguuagggaau

SEQ ID NO: 315811 - RNA, 19 nt, Artificial Sequence
  Description of Artificial Sequence: Synthetic oligonucleotide
ggacaccuaacuuucugca

SEQ ID NO: 315812 - RNA, 19 nt, Artificial Sequence
  Description of Artificial Sequence: Synthetic oligonucleotide
caucuccauaacccaaguc

SEQ ID NO: 315813 - RNA, 19 nt, Artificial Sequence
  Description of Artificial Sequence: Synthetic oligonucleotide
ggacuguugugugaugucc

SEQ ID NO: 315814 - RNA, 19 nt, Artificial Sequence
  Description of Artificial Sequence: Synthetic oligonucleotide
ccucuagucauacacagaa

SEQ ID NO: 315815 - RNA, 19 nt, Artificial Sequence
  Description of Artificial Sequence: Synthetic oligonucleotide
cacuucucaucccggcagc

SEQ ID NO: 315816 - RNA, 19 nt, Artificial Sequence
  Description of Artificial Sequence: Synthetic oligonucleotide
cuuaggggauagaagauuu

SEQ ID NO: 315817 - RNA, 19 nt, Artificial Sequence
  Description of Artificial Sequence: Synthetic oligonucleotide
ugccgucaguacagucugg

SEQ ID NO: 315818 - RNA, 19 nt, Artificial Sequence
  Description of Artificial Sequence: Synthetic oligonucleotide
gcccguaagaaggaggugc

SEQ ID NO: 315819 - RNA, 19 nt, Artificial Sequence
  Description of Artificial Sequence: Synthetic oligonucleotide
gugaagcguacugcaagcc

SEQ ID NO: 315820 - RNA, 19 nt, Artificial Sequence
  Description of Artificial Sequence: Synthetic oligonucleotide
ccuagauuuucaccagccc

SEQ ID NO: 315821 - RNA, 19 nt, Artificial Sequence
  Description of Artificial Sequence: Synthetic oligonucleotide
gacggguaguggaggagcc

SEQ ID NO: 315822 - RNA, 19 nt, Artificial Sequence
  Description of Artificial Sequence: Synthetic oligonucleotide
cagacggccucggaggacc

SEQ ID NO: 315823 - RNA, 19 nt, Artificial Sequence
  Description of Artificial Sequence: Synthetic oligonucleotide
gcaucgaucccaucacagc

SEQ ID NO: 315824 - RNA, 19 nt, Artificial Sequence
  Description of Artificial Sequence: Synthetic oligonucleotide
uucggggcagggcguagga

SEQ ID NO: 315825 - RNA, 19 nt, Artificial Sequence
  Description of Artificial Sequence: Synthetic oligonucleotide
cugaaugaccuccuggagu

SEQ ID NO: 315826 - RNA, 19 nt, Artificial Sequence
  Description of Artificial Sequence: Synthetic oligonucleotide
uggaguguccaagccuaug

SEQ ID NO: 315827 - RNA, 19 nt, Artificial Sequence
  Description of Artificial Sequence: Synthetic oligonucleotide
caggauaacccaggugcag

SEQ ID NO: 315828 - RNA, 19 nt, Artificial Sequence
  Description of Artificial Sequence: Synthetic oligonucleotide
guaguugcagcggucggca

SEQ ID NO: 315829 - RNA, 19 nt, Artificial Sequence
  Description of Artificial Sequence: Synthetic oligonucleotide
ggcagcgccuuucaucugc

SEQ ID NO: 315830 - RNA, 19 nt, Artificial Sequence
  Description of Artificial Sequence: Synthetic oligonucleotide
aguugcccguaagaaggag

SEQ ID NO: 315831 - RNA, 19 nt, Artificial Sequence
  Description of Artificial Sequence: Synthetic oligonucleotide
aggaccuguacaacuccag

SEQ ID NO: 315832 - RNA, 19 nt, Artificial Sequence
  Description of Artificial Sequence: Synthetic oligonucleotide
aggugagauugcagggugg

SEQ ID NO: 315833 - RNA, 19 nt, Artificial Sequence
  Description of Artificial Sequence: Synthetic oligonucleotide
aagcaacugugugguagga

SEQ ID NO: 315834 - RNA, 19 nt, Artificial Sequence
  Description of Artificial Sequence: Synthetic oligonucleotide
guacugcaagccuccugcc

SEQ ID NO: 315835 - RNA, 19 nt, Artificial Sequence
  Description of Artificial Sequence: Synthetic oligonucleotide
caucugugccgucagcgca

SEQ ID NO: 315836 - RNA, 19 nt, Artificial Sequence
  Description of Artificial Sequence: Synthetic oligonucleotide
gggugcgaauggcauagag

SEQ ID NO: 315837 - RNA, 19 nt, Artificial Sequence
  Description of Artificial Sequence: Synthetic oligonucleotide
ucucaucccggcagcggaa

SEQ ID NO: 315838 - RNA, 19 nt, Artificial Sequence
  Description of Artificial Sequence: Synthetic oligonucleotide
uaacagcgcucaccuagau

SEQ ID NO: 315839 - RNA, 19 nt, Artificial Sequence
  Description of Artificial Sequence: Synthetic oligonucleotide
caccuaacuuucugcacca

SEQ ID NO: 315840 - RNA, 19 nt, Artificial Sequence
  Description of Artificial Sequence: Synthetic oligonucleotide
guuaucguuaggguucucu

SEQ ID NO: 315841 - RNA, 19 nt, Artificial Sequence
  Description of Artificial Sequence: Synthetic oligonucleotide
ugaccuccuggagucauau

SEQ ID NO: 315842 - RNA, 19 nt, Artificial Sequence
  Description of Artificial Sequence: Synthetic oligonucleotide
agcagacggccucggagga

SEQ ID NO: 315843 - RNA, 19 nt, Artificial Sequence
  Description of Artificial Sequence: Synthetic oligonucleotide
ugaggccaggugugaauau

SEQ ID NO: 315844 - RNA, 19 nt, Artificial Sequence
  Description of Artificial Sequence: Synthetic oligonucleotide
gucauaucuuggcgcaaga

SEQ ID NO: 315845 - RNA, 19 nt, Artificial Sequence
  Description of Artificial Sequence: Synthetic oligonucleotide
aagugcccuguacuuccaa

SEQ ID NO: 315846 - RNA, 19 nt, Artificial Sequence
  Description of Artificial Sequence: Synthetic oligonucleotide
caaaggaucauagcauugu

SEQ ID NO: 315847 - RNA, 19 nt, Artificial Sequence
  Description of Artificial Sequence: Synthetic oligonucleotide
gcggucggcaggcagguag

SEQ ID NO: 315848 - RNA, 19 nt, Artificial Sequence
  Description of Artificial Sequence: Synthetic oligonucleotide
gccagcggcauuaacaaca

SEQ ID NO: 315849 - RNA, 19 nt, Artificial Sequence
  Description of Artificial Sequence: Synthetic oligonucleotide
cacacuaggcugccaauaa

SEQ ID NO: 315850 - RNA, 19 nt, Artificial Sequence
  Description of Artificial Sequence: Synthetic oligonucleotide
agggccuaucccaagguaa

SEQ ID NO: 315851 - RNA, 19 nt, Artificial Sequence
  Description of Artificial Sequence: Synthetic oligonucleotide
ccccgaacaugguagguag

SEQ ID NO: 315852 - RNA, 19 nt, Artificial Sequence
  Description of Artificial Sequence: Synthetic oligonucleotide
ugccuggaggacaccuaac

SEQ ID NO: 315853 - RNA, 19 nt, Artificial Sequence
  Description of Artificial Sequence: Synthetic oligonucleotide
uaguugcagcggucggcag

SEQ ID NO: 315854 - RNA, 19 nt, Artificial Sequence
  Description of Artificial Sequence: Synthetic oligonucleotide
cccuagcacagaguuaucg

SEQ ID NO: 315855 - RNA, 19 nt, Artificial Sequence
  Description of Artificial Sequence: Synthetic oligonucleotide
agacuacguagcagucucg

SEQ ID NO: 315856 - RNA, 19 nt, Artificial Sequence
  Description of Artificial Sequence: Synthetic oligonucleotide
gaauggaucugagcugcaa

SEQ ID NO: 315857 - RNA, 19 nt, Artificial Sequence
  Description of Artificial Sequence: Synthetic oligonucleotide
gguaguugcagcggucggc

SEQ ID NO: 315858 - RNA, 19 nt, Artificial Sequence
  Description of Artificial Sequence: Synthetic oligonucleotide
ucgucacugccgucaguac

SEQ ID NO: 315859 - RNA, 19 nt, Artificial Sequence
  Description of Artificial Sequence: Synthetic oligonucleotide
ucaucccggcagcggaagu

SEQ ID NO: 315860 - RNA, 19 nt, Artificial Sequence
  Description of Artificial Sequence: Synthetic oligonucleotide
cccguaagaaggaggugcc

SEQ ID NO: 315861 - RNA, 19 nt, Artificial Sequence
  Description of Artificial Sequence: Synthetic oligonucleotide
aaguugcaaagggcuggca

SEQ ID NO: 315862 - RNA, 19 nt, Artificial Sequence
  Description of Artificial Sequence: Synthetic oligonucleotide
uccccgaacaugguaggua

SEQ ID NO: 315863 - RNA, 19 nt, Artificial Sequence
  Description of Artificial Sequence: Synthetic oligonucleotide
gggaaccuuucuuaacaca

SEQ ID NO: 315864 - RNA, 19 nt, Artificial Sequence
  Description of Artificial Sequence: Synthetic oligonucleotide
gggguaaugcccggguggg

SEQ ID NO: 315865 - RNA, 19 nt, Artificial Sequence
  Description of Artificial Sequence: Synthetic oligonucleotide
acguagcagucucggggug

SEQ ID NO: 315866 - RNA, 19 nt, Artificial Sequence
  Description of Artificial Sequence: Synthetic oligonucleotide
gguucagguuagggaaugg

SEQ ID NO: 315867 - RNA, 19 nt, Artificial Sequence
  Description of Artificial Sequence: Synthetic oligonucleotide
gaaccuuucuuaacacagu

SEQ ID NO: 315868 - RNA, 19 nt, Artificial Sequence
  Description of Artificial Sequence: Synthetic oligonucleotide
agaagccuagccacuucca

SEQ ID NO: 315869 - RNA, 19 nt, Artificial Sequence
  Description of Artificial Sequence: Synthetic oligonucleotide
gguaaugcccgggugggca

SEQ ID NO: 315870 - RNA, 19 nt, Artificial Sequence
  Description of Artificial Sequence: Synthetic oligonucleotide
ucuggucucagggguccga

SEQ ID NO: 315871 - RNA, 19 nt, Artificial Sequence
  Description of Artificial Sequence: Synthetic oligonucleotide
cguuaggguucucuguagg

SEQ ID NO: 315872 - RNA, 19 nt, Artificial Sequence
  Description of Artificial Sequence: Synthetic oligonucleotide
gcuugacggguaguggagg

SEQ ID NO: 315873 - RNA, 19 nt, Artificial Sequence
  Description of Artificial Sequence: Synthetic oligonucleotide
cugcacgaucucagccucc

SEQ ID NO: 315874 - RNA, 19 nt, Artificial Sequence
  Description of Artificial Sequence: Synthetic oligonucleotide
ggcaauaaguugcccguaa

SEQ ID NO: 315875 - RNA, 19 nt, Artificial Sequence
  Description of Artificial Sequence: Synthetic oligonucleotide
ccagcauagcuguauguga

SEQ ID NO: 315876 - RNA, 19 nt, Artificial Sequence
  Description of Artificial Sequence: Synthetic oligonucleotide
gcccuguacuuccaagagc

SEQ ID NO: 315877 - RNA, 19 nt, Artificial Sequence
  Description of Artificial Sequence: Synthetic oligonucleotide
gguucccuagcacagaguu

SEQ ID NO: 315878 - RNA, 19 nt, Artificial Sequence
  Description of Artificial Sequence: Synthetic oligonucleotide
agcccagagcgaugaccag

SEQ ID NO: 315879 - RNA, 19 nt, Artificial Sequence
  Description of Artificial Sequence: Synthetic oligonucleotide
gggagcgcaggaguaaaug

SEQ ID NO: 315880 - RNA, 19 nt, Artificial Sequence
  Description of Artificial Sequence: Synthetic oligonucleotide
cucaucccggcagcggaag

SEQ ID NO: 315881 - RNA, 19 nt, Artificial Sequence
  Description of Artificial Sequence: Synthetic oligonucleotide
gggcuugacggguagugga

SEQ ID NO: 315882 - RNA, 19 nt, Artificial Sequence
  Description of Artificial Sequence: Synthetic oligonucleotide
uaaugcccgggugggcagc

SEQ ID NO: 315883 - RNA, 19 nt, Artificial Sequence
  Description of Artificial Sequence: Synthetic oligonucleotide
cguaggagcagucccacuc

SEQ ID NO: 315884 - RNA, 19 nt, Artificial Sequence
  Description of Artificial Sequence: Synthetic oligonucleotide
gcacagaguuaucguuagg

SEQ ID NO: 315885 - RNA, 19 nt, Artificial Sequence
  Description of Artificial Sequence: Synthetic oligonucleotide
acgacgcaccgagcggccc

SEQ ID NO: 315886 - RNA, 19 nt, Artificial Sequence
  Description of Artificial Sequence: Synthetic oligonucleotide
cuaagugggccaggcacca

SEQ ID NO: 315887 - RNA, 19 nt, Artificial Sequence
  Description of Artificial Sequence: Synthetic oligonucleotide
caccauagaacuggaagcu

SEQ ID NO: 315888 - RNA, 19 nt, Artificial Sequence
  Description of Artificial Sequence: Synthetic oligonucleotide
gaaccagacgacgcaccga

SEQ ID NO: 315889 - RNA, 19 nt, Artificial Sequence
  Description of Artificial Sequence: Synthetic oligonucleotide
ugcccguaagaaggaggug

SEQ ID NO: 315890 - RNA, 19 nt, Artificial Sequence
  Description of Artificial Sequence: Synthetic oligonucleotide
accuaacuuucugcaccag

SEQ ID NO: 315891 - RNA, 19 nt, Artificial Sequence
  Description of Artificial Sequence: Synthetic oligonucleotide
cacugccgucaguacaguc

SEQ ID NO: 315892 - RNA, 19 nt, Artificial Sequence
  Description of Artificial Sequence: Synthetic oligonucleotide
cagcauagcuguaugugau

SEQ ID NO: 315893 - RNA, 19 nt, Artificial Sequence
  Description of Artificial Sequence: Synthetic oligonucleotide
cuccaagcaacuguguggu

SEQ ID NO: 315894 - RNA, 19 nt, Artificial Sequence
  Description of Artificial Sequence: Synthetic oligonucleotide
ggcuugacggguaguggag

SEQ ID NO: 315895 - RNA, 19 nt, Artificial Sequence
  Description of Artificial Sequence: Synthetic oligonucleotide
cgaaccagacgacgcaccg

SEQ ID NO: 315896 - RNA, 19 nt, Artificial Sequence
  Description of Artificial Sequence: Synthetic oligonucleotide
ggagagcuucggcuguccc

SEQ ID NO: 315897 - RNA, 19 nt, Artificial Sequence
  Description of Artificial Sequence: Synthetic oligonucleotide
ccagcggcauuaacaacac

SEQ ID NO: 315898 - RNA, 19 nt, Artificial Sequence
  Description of Artificial Sequence: Synthetic oligonucleotide
ccacuuuuggguggggaag

SEQ ID NO: 315899 - RNA, 19 nt, Artificial Sequence
  Description of Artificial Sequence: Synthetic oligonucleotide
gcacggcaucuccauaacc

SEQ ID NO: 315900 - RNA, 19 nt, Artificial Sequence
  Description of Artificial Sequence: Synthetic oligonucleotide
gggugagacuacguagcag

SEQ ID NO: 315901 - RNA, 19 nt, Artificial Sequence
  Description of Artificial Sequence: Synthetic oligonucleotide
guagcagucucgggguguc

SEQ ID NO: 315902 - RNA, 19 nt, Artificial Sequence
  Description of Artificial Sequence: Synthetic oligonucleotide
gguauacagcggugguuca

SEQ ID NO: 315903 - RNA, 19 nt, Artificial Sequence
  Description of Artificial Sequence: Synthetic oligonucleotide
aggagccaaucuugacuau

SEQ ID NO: 315904 - RNA, 19 nt, Artificial Sequence
  Description of Artificial Sequence: Synthetic oligonucleotide
gacgacgcaccgagcggcc

SEQ ID NO: 315905 - RNA, 19 nt, Artificial Sequence
  Description of Artificial Sequence: Synthetic oligonucleotide
ggggcuugacggguagugg

SEQ ID NO: 315906 - RNA, 19 nt, Artificial Sequence
  Description of Artificial Sequence: Synthetic oligonucleotide
gccgucaguacagucuggc

SEQ ID NO: 315907 - RNA, 19 nt, Artificial Sequence
  Description of Artificial Sequence: Synthetic oligonucleotide
agcggugguucaagcacug

SEQ ID NO: 315908 - RNA, 19 nt, Artificial Sequence
  Description of Artificial Sequence: Synthetic oligonucleotide
ggcauagaguuugcaggug

SEQ ID NO: 315909 - RNA, 19 nt, Artificial Sequence
  Description of Artificial Sequence: Synthetic oligonucleotide
aguuaucguuaggguucuc

SEQ ID NO: 315910 - RNA, 19 nt, Artificial Sequence
  Description of Artificial Sequence: Synthetic oligonucleotide
gaguuaucguuaggguucu

SEQ ID NO: 315911 - RNA, 19 nt, Artificial Sequence
  Description of Artificial Sequence: Synthetic oligonucleotide
ggcauuaacaacacaucau

SEQ ID NO: 315912 - RNA, 19 nt, Artificial Sequence
  Description of Artificial Sequence: Synthetic oligonucleotide
augccggcagcgccuuuca

SEQ ID NO: 315913 - RNA, 19 nt, Artificial Sequence
  Description of Artificial Sequence: Synthetic oligonucleotide
acggccucggaggaccugu

SEQ ID NO: 315914 - RNA, 19 nt, Artificial Sequence
  Description of Artificial Sequence: Synthetic oligonucleotide
guauacagcggugguucaa

SEQ ID NO: 315915 - RNA, 19 nt, Artificial Sequence
  Description of Artificial Sequence: Synthetic oligonucleotide
gcggcauuaacaacacauc

SEQ ID NO: 315916 - RNA, 19 nt, Artificial Sequence
  Description of Artificial Sequence: Synthetic oligonucleotide
agacugaggccagguguga

SEQ ID NO: 315917 - RNA, 19 nt, Artificial Sequence
  Description of Artificial Sequence: Synthetic oligonucleotide
gcuucggcugucccugccc

SEQ ID NO: 315918 - RNA, 19 nt, Artificial Sequence
  Description of Artificial Sequence: Synthetic oligonucleotide
gaugcagcuaggggacaaa

SEQ ID NO: 315919 - RNA, 19 nt, Artificial Sequence
  Description of Artificial Sequence: Synthetic oligonucleotide
gccuaucccaagguaaaca

SEQ ID NO: 315920 - RNA, 19 nt, Artificial Sequence
  Description of Artificial Sequence: Synthetic oligonucleotide
gagcuucggcugucccugc

SEQ ID NO: 315921 - RNA, 19 nt, Artificial Sequence
  Description of Artificial Sequence: Synthetic oligonucleotide
gaagugggugagacuacgu

SEQ ID NO: 315922 - RNA, 19 nt, Artificial Sequence
  Description of Artificial Sequence: Synthetic oligonucleotide
gccucggaggaccuguaca

SEQ ID NO: 315923 - RNA, 19 nt, Artificial Sequence
  Description of Artificial Sequence: Synthetic oligonucleotide
gaccuccuggagucauauc

SEQ ID NO: 315924 - RNA, 19 nt, Artificial Sequence
  Description of Artificial Sequence: Synthetic oligonucleotide
auccccgaacaugguaggu

SEQ ID NO: 315925 - RNA, 19 nt, Artificial Sequence
  Description of Artificial Sequence: Synthetic oligonucleotide
gccacuuuuggguggggaa

SEQ ID NO: 315926 - RNA, 19 nt, Artificial Sequence
  Description of Artificial Sequence: Synthetic oligonucleotide
ccaacgacggagacggcga

SEQ ID NO: 315927 - RNA, 19 nt, Artificial Sequence
  Description of Artificial Sequence: Synthetic oligonucleotide
uaacugccgcugugaugac

SEQ ID NO: 315928 - RNA, 19 nt, Artificial Sequence
  Description of Artificial Sequence: Synthetic oligonucleotide
caggacuguugugugaugu

SEQ ID NO: 315929 - RNA, 19 nt, Artificial Sequence
  Description of Artificial Sequence: Synthetic oligonucleotide
gccggcagcgccuuucauc

SEQ ID NO: 315930 - RNA, 19 nt, Artificial Sequence
  Description of Artificial Sequence: Synthetic oligonucleotide
ggugcgaauggcauagagu

SEQ ID NO: 315931 - RNA, 19 nt, Artificial Sequence
  Description of Artificial Sequence: Synthetic oligonucleotide
ccaagccuaugaucuuuug

SEQ ID NO: 315932 - RNA, 19 nt, Artificial Sequence
  Description of Artificial Sequence: Synthetic oligonucleotide
aggguucuagaggcacuga

SEQ ID NO: 315933 - RNA, 19 nt, Artificial Sequence
  Description of Artificial Sequence: Synthetic oligonucleotide
gcccagagcgaugaccagc

SEQ ID NO: 315934 - RNA, 19 nt, Artificial Sequence
  Description of Artificial Sequence: Synthetic oligonucleotide
ccgaccacugcuccaagca

SEQ ID NO: 315935 - RNA, 19 nt, Artificial Sequence
  Description of Artificial Sequence: Synthetic oligonucleotide
gagucauaucuuggcgcaa

SEQ ID NO: 315936 - RNA, 19 nt, Artificial Sequence
  Description of Artificial Sequence: Synthetic oligonucleotide
ugccgcugugaugaccuuu

SEQ ID NO: 315937 - RNA, 19 nt, Artificial Sequence
  Description of Artificial Sequence: Synthetic oligonucleotide
cuaggcaaugaugcagcua

SEQ ID NO: 315938 - RNA, 19 nt, Artificial Sequence
  Description of Artificial Sequence: Synthetic oligonucleotide
agguagcauuaaagccccg

SEQ ID NO: 315939 - RNA, 19 nt, Artificial Sequence
  Description of Artificial Sequence: Synthetic oligonucleotide
ucgaggaaguaggccccaa

SEQ ID NO: 315940 - RNA, 19 nt, Artificial Sequence
  Description of Artificial Sequence: Synthetic oligonucleotide
agccccgaccacugcucca

SEQ ID NO: 315941 - RNA, 19 nt, Artificial Sequence
  Description of Artificial Sequence: Synthetic oligonucleotide
ggcgaaccagacgacgcac

SEQ ID NO: 315942 - RNA, 19 nt, Artificial Sequence
  Description of Artificial Sequence: Synthetic oligonucleotide
gguauugguucgaggaagu

SEQ ID NO: 315943 - RNA, 19 nt, Artificial Sequence
  Description of Artificial Sequence: Synthetic oligonucleotide
ccgaacaugguagguagca

SEQ ID NO: 315944 - RNA, 19 nt, Artificial Sequence
  Description of Artificial Sequence: Synthetic oligonucleotide
ccaggauaacccaggugca

SEQ ID NO: 315945 - RNA, 19 nt, Artificial Sequence
  Description of Artificial Sequence: Synthetic oligonucleotide
ccucacuguaacagcgcuc

SEQ ID NO: 315946 - RNA, 19 nt, Artificial Sequence
  Description of Artificial Sequence: Synthetic oligonucleotide
gcguacugcaagccuccug

SEQ ID NO: 315947 - RNA, 19 nt, Artificial Sequence
  Description of Artificial Sequence: Synthetic oligonucleotide
cccgaacaugguagguagc

SEQ ID NO: 315948 - RNA, 19 nt, Artificial Sequence
  Description of Artificial Sequence: Synthetic oligonucleotide
ccucggaggaccuguacaa

SEQ ID NO: 315949 - RNA, 19 nt, Artificial Sequence
  Description of Artificial Sequence: Synthetic oligonucleotide
ggcacccugggcaauaagu

SEQ ID NO: 315950 - RNA, 19 nt, Artificial Sequence
  Description of Artificial Sequence: Synthetic oligonucleotide
gcgaaccagacgacgcacc

SEQ ID NO: 315951 - RNA, 19 nt, Artificial Sequence
  Description of Artificial Sequence: Synthetic oligonucleotide
ggagccaaucuugacuaua

SEQ ID NO: 315952 - RNA, 19 nt, Artificial Sequence
  Description of Artificial Sequence: Synthetic oligonucleotide
gcugguauacagcgguggu

SEQ ID NO: 315953 - RNA, 19 nt, Artificial Sequence
  Description of Artificial Sequence: Synthetic oligonucleotide
gccgcugugaugaccuuuc

SEQ ID NO: 315954 - RNA, 19 nt, Artificial Sequence
  Description of Artificial Sequence: Synthetic oligonucleotide
caugcacggcaucuccaua

SEQ ID NO: 315955 - RNA, 19 nt, Artificial Sequence
  Description of Artificial Sequence: Synthetic oligonucleotide
ggcguaggagcagucccac

SEQ ID NO: 315956 - RNA, 19 nt, Artificial Sequence
  Description of Artificial Sequence: Synthetic oligonucleotide
cagcggugguucaagcacu

SEQ ID NO: 315957 - RNA, 19 nt, Artificial Sequence
  Description of Artificial Sequence: Synthetic oligonucleotide
ccaucagcacagaaugucu

SEQ ID NO: 315958 - RNA, 19 nt, Artificial Sequence
  Description of Artificial Sequence: Synthetic oligonucleotide
ggccccgcuggcgacggcg

SEQ ID NO: 315959 - RNA, 19 nt, Artificial Sequence
  Description of Artificial Sequence: Synthetic oligonucleotide
ggccuaucccaagguaaac

SEQ ID NO: 315960 - RNA, 19 nt, Artificial Sequence
  Description of Artificial Sequence: Synthetic oligonucleotide
ggccaggacuguuguguga

SEQ ID NO: 315961 - RNA, 19 nt, Artificial Sequence
  Description of Artificial Sequence: Synthetic oligonucleotide
ggccucuguaagugcccug

SEQ ID NO: 315962 - RNA, 19 nt, Artificial Sequence
  Description of Artificial Sequence: Synthetic oligonucleotide
ggauaacccaggugcaguu

SEQ ID NO: 315963 - RNA, 19 nt, Artificial Sequence
  Description of Artificial Sequence: Synthetic oligonucleotide
ccuacugcuccgcccucac

SEQ ID NO: 315964 - RNA, 19 nt, Artificial Sequence
  Description of Artificial Sequence: Synthetic oligonucleotide
gacggccucggaggaccug

SEQ ID NO: 315965 - RNA, 19 nt, Artificial Sequence
  Description of Artificial Sequence: Synthetic oligonucleotide
cagcgccuuucaucugcuc

SEQ ID NO: 315966 - RNA, 19 nt, Artificial Sequence
  Description of Artificial Sequence: Synthetic oligonucleotide
auggaguguccaagccuau

SEQ ID NO: 315967 - RNA, 19 nt, Artificial Sequence
  Description of Artificial Sequence: Synthetic oligonucleotide
gggccuaucccaagguaaa

SEQ ID NO: 315968 - RNA, 19 nt, Artificial Sequence
  Description of Artificial Sequence: Synthetic oligonucleotide
augagccaucacagcgcug

SEQ ID NO: 315969 - RNA, 19 nt, Artificial Sequence
  Description of Artificial Sequence: Synthetic oligonucleotide
cagucccaugagccaucac

SEQ ID NO: 315970 - RNA, 19 nt, Artificial Sequence
  Description of Artificial Sequence: Synthetic oligonucleotide
agccucacacagggagacu

SEQ ID NO: 315971 - RNA, 19 nt, Artificial Sequence
  Description of Artificial Sequence: Synthetic oligonucleotide
ccggcagcgccuuucaucu

SEQ ID NO: 315972 - RNA, 19 nt, Artificial Sequence
  Description of Artificial Sequence: Synthetic oligonucleotide
gcugcgccucacuguaaca

SEQ ID NO: 315973 - RNA, 19 nt, Artificial Sequence
  Description of Artificial Sequence: Synthetic oligonucleotide
gggcaacccuccucaucug

SEQ ID NO: 315974 - RNA, 19 nt, Artificial Sequence
  Description of Artificial Sequence: Synthetic oligonucleotide
caacgacggagacggcgaa

SEQ ID NO: 315975 - RNA, 19 nt, Artificial Sequence
  Description of Artificial Sequence: Synthetic oligonucleotide
gcggugguucaagcacugg

SEQ ID NO: 315976 - RNA, 19 nt, Artificial Sequence
  Description of Artificial Sequence: Synthetic oligonucleotide
ccacucgucacugccguca

SEQ ID NO: 315977 - RNA, 19 nt, Artificial Sequence
  Description of Artificial Sequence: Synthetic oligonucleotide
cagagaacgcagguucccu

SEQ ID NO: 315978 - RNA, 19 nt, Artificial Sequence
  Description of Artificial Sequence: Synthetic oligonucleotide
ggccucggaggaccuguac

SEQ ID NO: 315979 - RNA, 19 nt, Artificial Sequence
  Description of Artificial Sequence: Synthetic oligonucleotide
cggugguucaagcacugga

SEQ ID NO: 315980 - RNA, 19 nt, Artificial Sequence
  Description of Artificial Sequence: Synthetic oligonucleotide
cuguaacagcgcucaccua

SEQ ID NO: 315981 - RNA, 19 nt, Artificial Sequence
  Description of Artificial Sequence: Synthetic oligonucleotide
gcuguauuccugggugcga

SEQ ID NO: 315982 - RNA, 19 nt, Artificial Sequence
  Description of Artificial Sequence: Synthetic oligonucleotide
ccgcugugaugaccuuucg

SEQ ID NO: 315983 - RNA, 19 nt, Artificial Sequence
  Description of Artificial Sequence: Synthetic oligonucleotide
gcagacgguggugguugag

SEQ ID NO: 315984 - RNA, 19 nt, Artificial Sequence
  Description of Artificial Sequence: Synthetic oligonucleotide
gccucuagucauacacaga

SEQ ID NO: 315985 - RNA, 19 nt, Artificial Sequence
  Description of Artificial Sequence: Synthetic oligonucleotide
gcgcucaccuagauuuuca

SEQ ID NO: 315986 - RNA, 19 nt, Artificial Sequence
  Description of Artificial Sequence: Synthetic oligonucleotide
ggaauggaucugagcugca

SEQ ID NO: 315987 - RNA, 19 nt, Artificial Sequence
  Description of Artificial Sequence: Synthetic oligonucleotide
ggguaaugcccgggugggc

SEQ ID NO: 315988 - RNA, 19 nt, Artificial Sequence
  Description of Artificial Sequence: Synthetic oligonucleotide
cuuuuggguggggaaggau

SEQ ID NO: 315989 - RNA, 19 nt, Artificial Sequence
  Description of Artificial Sequence: Synthetic oligonucleotide
augaccuccuggagucaua

SEQ ID NO: 315990 - RNA, 19 nt, Artificial Sequence
  Description of Artificial Sequence: Synthetic oligonucleotide
gguugagccucuagucaua

SEQ ID NO: 315991 - RNA, 19 nt, Artificial Sequence
  Description of Artificial Sequence: Synthetic oligonucleotide
cugguauacagcggugguu

SEQ ID NO: 315992 - RNA, 19 nt, Artificial Sequence
  Description of Artificial Sequence: Synthetic oligonucleotide
caguauccccgaacauggu

SEQ ID NO: 315993 - RNA, 19 nt, Artificial Sequence
  Description of Artificial Sequence: Synthetic oligonucleotide
ccccacuuaggggauagaa

SEQ ID NO: 315994 - RNA, 19 nt, Artificial Sequence
  Description of Artificial Sequence: Synthetic oligonucleotide
agacggccucggaggaccu

SEQ ID NO: 315995 - RNA, 19 nt, Artificial Sequence
  Description of Artificial Sequence: Synthetic oligonucleotide
cugugccgucagcgcaguc

SEQ ID NO: 315996 - RNA, 19 nt, Artificial Sequence
  Description of Artificial Sequence: Synthetic oligonucleotide
cgacgcaccgagcggcccc

SEQ ID NO: 315997 - RNA, 19 nt, Artificial Sequence
  Description of Artificial Sequence: Synthetic oligonucleotide
gcacccugggcaauaaguu

SEQ ID NO: 315998 - RNA, 19 nt, Artificial Sequence
  Description of Artificial Sequence: Synthetic oligonucleotide
ccgucagcgcagucccaug

SEQ ID NO: 315999 - RNA, 19 nt, Artificial Sequence
  Description of Artificial Sequence: Synthetic oligonucleotide
ccugggugcgaauggcaua

SEQ ID NO: 316000 - RNA, 19 nt, Artificial Sequence
  Description of Artificial Sequence: Synthetic oligonucleotide
cgucagcgcagucccauga

SEQ ID NO: 316001 - RNA, 19 nt, Artificial Sequence
  Description of Artificial Sequence: Synthetic oligonucleotide
gcagacggccucggaggac

SEQ ID NO: 316002 - RNA, 19 nt, Artificial Sequence
  Description of Artificial Sequence: Synthetic oligonucleotide
ccaagggcugaaauuuauu

SEQ ID NO: 316003 - RNA, 19 nt, Artificial Sequence
  Description of Artificial Sequence: Synthetic oligonucleotide
cacagcgcugcgccucacu

SEQ ID NO: 316004 - RNA, 19 nt, Artificial Sequence
  Description of Artificial Sequence: Synthetic oligonucleotide
caucccggcagcggaaguu

SEQ ID NO: 316005 - RNA, 19 nt, Artificial Sequence
  Description of Artificial Sequence: Synthetic oligonucleotide
ggaggacaccuaacuuucu

SEQ ID NO: 316006 - RNA, 19 nt, Artificial Sequence
  Description of Artificial Sequence: Synthetic oligonucleotide
gccccgaccacugcuccaa

SEQ ID NO: 316007 - RNA, 19 nt, Artificial Sequence
  Description of Artificial Sequence: Synthetic oligonucleotide
cagggcugugaagcguacu

SEQ ID NO: 316008 - RNA, 19 nt, Artificial Sequence
  Description of Artificial Sequence: Synthetic oligonucleotide
gcagggcguaggagcaguc

SEQ ID NO: 316009 - RNA, 19 nt, Artificial Sequence
  Description of Artificial Sequence: Synthetic oligonucleotide
cagcgcucaccuagauuuu

SEQ ID NO: 316010 - RNA, 19 nt, Artificial Sequence
  Description of Artificial Sequence: Synthetic oligonucleotide
cagcggucggcaggcaggu

SEQ ID NO: 316011 - RNA, 19 nt, Artificial Sequence
  Description of Artificial Sequence: Synthetic oligonucleotide
cggcgaaccagacgacgca

SEQ ID NO: 316012 - RNA, 19 nt, Artificial Sequence
  Description of Artificial Sequence: Synthetic oligonucleotide
ccgagcugggguauugguu

SEQ ID NO: 316013 - RNA, 19 nt, Artificial Sequence
  Description of Artificial Sequence: Synthetic oligonucleotide
gccgucagcgcagucccau

SEQ ID NO: 316014 - RNA, 19 nt, Artificial Sequence
  Description of Artificial Sequence: Synthetic oligonucleotide
gcagcgccuuucaucugcu

SEQ ID NO: 316015 - RNA, 19 nt, Artificial Sequence
  Description of Artificial Sequence: Synthetic oligonucleotide
agcggucggcaggcaggua

SEQ ID NO: 316016 - RNA, 19 nt, Artificial Sequence
  Description of Artificial Sequence: Synthetic oligonucleotide
caacugcagucugguacuu

SEQ ID NO: 316017 - RNA, 19 nt, Artificial Sequence
  Description of Artificial Sequence: Synthetic oligonucleotide
ccggcagcggaaguugccu

SEQ ID NO: 316018 - RNA, 19 nt, Artificial Sequence
  Description of Artificial Sequence: Synthetic oligonucleotide
ccguaagaaggaggugccu

SEQ ID NO: 316019 - RNA, 19 nt, Artificial Sequence
  Description of Artificial Sequence: Synthetic oligonucleotide
cguagcagucucggggugu

SEQ ID NO: 316020 - RNA, 19 nt, Artificial Sequence
  Description of Artificial Sequence: Synthetic oligonucleotide
cggcagcgccuuucaucug

SEQ ID NO: 316021 - RNA, 19 nt, Artificial Sequence
  Description of Artificial Sequence: Synthetic oligonucleotide
gcaaugccggcagcgccuu

SEQ ID NO: 316022 - RNA, 19 nt, Artificial Sequence
  Description of Artificial Sequence: Synthetic oligonucleotide
cugccgcugugaugaccuu

SEQ ID NO: 316023 - RNA, 19 nt, Artificial Sequence
  Description of Artificial Sequence: Synthetic oligonucleotide
caaugccggcagcgccuuu

SEQ ID NO: 316024 - RNA, 19 nt, Artificial Sequence
  Description of Artificial Sequence: Synthetic oligonucleotide
gcgcugcgccucacuguaa

SEQ ID NO: 316025 - RNA, 19 nt, Artificial Sequence
  Description of Artificial Sequence: Synthetic oligonucleotide
cggccucggaggaccugua

SEQ ID NO: 316026 - RNA, 19 nt, Artificial Sequence
  Description of Artificial Sequence: Synthetic oligonucleotide
cuaugauucgaucaagucc

SEQ ID NO: 316027 - RNA, 19 nt, Artificial Sequence
  Description of Artificial Sequence: Synthetic oligonucleotide
uaaagaccaaguaucacug

SEQ ID NO: 316028 - RNA, 19 nt, Artificial Sequence
  Description of Artificial Sequence: Synthetic oligonucleotide
cauggauaggggaugaugg

SEQ ID NO: 316029 - RNA, 19 nt, Artificial Sequence
  Description of Artificial Sequence: Synthetic oligonucleotide
ugugagaggagccuuagac

SEQ ID NO: 316030 - RNA, 19 nt, Artificial Sequence
  Description of Artificial Sequence: Synthetic oligonucleotide
  modified_base (12)..(12): a, c, u, g, unknown or other
cuuuguaccucncaagccg

SEQ ID NO: 316031 - RNA, 19 nt, Artificial Sequence
  Description of Artificial Sequence: Synthetic oligonucleotide
auaaaugucggcaggaggg

SEQ ID NO: 316032 - RNA, 19 nt, Artificial Sequence
  Description of Artificial Sequence: Synthetic oligonucleotide
aggggugucaaauuucucg

SEQ ID NO: 316033 - RNA, 19 nt, Artificial Sequence
  Description of Artificial Sequence: Synthetic oligonucleotide
auaggcacacgacacauuc

SEQ ID NO: 316034 - RNA, 19 nt, Artificial Sequence
  Description of Artificial Sequence: Synthetic oligonucleotide
agaacuagagugcucauca

SEQ ID NO: 316035 - RNA, 19 nt, Artificial Sequence
  Description of Artificial Sequence: Synthetic oligonucleotide
ucuauaccaacagagcagg

SEQ ID NO: 316036 - RNA, 19 nt, Artificial Sequence
  Description of Artificial Sequence: Synthetic oligonucleotide
ucgaucaaguccaacaaga

SEQ ID NO: 316037 - RNA, 19 nt, Artificial Sequence
  Description of Artificial Sequence: Synthetic oligonucleotide
gaagcaaaguaguuucccg

SEQ ID NO: 316038 - RNA, 19 nt, Artificial Sequence
  Description of Artificial Sequence: Synthetic oligonucleotide
  modified_base (7)..(7): a, c, u, g, unknown or other
uaccucncaagccggaggg

SEQ ID NO: 316039 - RNA, 19 nt, Artificial Sequence
  Description of Artificial Sequence: Synthetic oligonucleotide
gaugcggcgacucaggaug

SEQ ID NO: 316040 - RNA, 19 nt, Artificial Sequence
  Description of Artificial Sequence: Synthetic oligonucleotide
uuugccuuaaagaccaagu

SEQ ID NO: 316041 - RNA, 19 nt, Artificial Sequence
  Description of Artificial Sequence: Synthetic oligonucleotide
gauucgaucaaguccaaca

SEQ ID NO: 316042 - RNA, 19 nt, Artificial Sequence
  Description of Artificial Sequence: Synthetic oligonucleotide
  modified_base (11)..(11): a, c, u, g, unknown or other
uuuguaccucncaagccgg

SEQ ID NO: 316043 - RNA, 19 nt, Artificial Sequence
  Description of Artificial Sequence: Synthetic oligonucleotide
uggacgacugcccaggaag

SEQ ID NO: 316044 - RNA, 19 nt, Artificial Sequence
  Description of Artificial Sequence: Synthetic oligonucleotide
uccacaacauucuacugcc

SEQ ID NO: 316045 - RNA, 19 nt, Artificial Sequence
  Description of Artificial Sequence: Synthetic oligonucleotide
uuagacaauuaaccaauga

SEQ ID NO: 316046 - RNA, 19 nt, Artificial Sequence
  Description of Artificial Sequence: Synthetic oligonucleotide
aauuucucgccucccauga

SEQ ID NO: 316047 - RNA, 19 nt, Artificial Sequence
  Description of Artificial Sequence: Synthetic oligonucleotide
acuuucuaugauucgauca

SEQ ID NO: 316048 - RNA, 19 nt, Artificial Sequence
  Description of Artificial Sequence: Synthetic oligonucleotide
gagccuuagacaauuaacc

SEQ ID NO: 316049 - RNA, 19 nt, Artificial Sequence
  Description of Artificial Sequence: Synthetic oligonucleotide
uauagaccauagaaaagga

SEQ ID NO: 316050 - RNA, 19 nt, Artificial Sequence
  Description of Artificial Sequence: Synthetic oligonucleotide
uuugcuaagugcucagagc

SEQ ID NO: 316051 - RNA, 19 nt, Artificial Sequence
  Description of Artificial Sequence: Synthetic oligonucleotide
ucacuauggccucucaaag

SEQ ID NO: 316052 - RNA, 19 nt, Artificial Sequence
  Description of Artificial Sequence: Synthetic oligonucleotide
aauuuuggggauacugagg

SEQ ID NO: 316053 - RNA, 19 nt, Artificial Sequence
  Description of Artificial Sequence: Synthetic oligonucleotide
guagauaaaugucggcagg

SEQ ID NO: 316054 - RNA, 19 nt, Artificial Sequence
  Description of Artificial Sequence: Synthetic oligonucleotide
guaggugacuuccucauag

SEQ ID NO: 316055 - RNA, 19 nt, Artificial Sequence
  Description of Artificial Sequence: Synthetic oligonucleotide
auuugauaaagguucacua

SEQ ID NO: 316056 - RNA, 19 nt, Artificial Sequence
  Description of Artificial Sequence: Synthetic oligonucleotide
aggcacacgacacauucac

SEQ ID NO: 316057 - RNA, 19 nt, Artificial Sequence
  Description of Artificial Sequence: Synthetic oligonucleotide
cucuauaccaacagagcag

SEQ ID NO: 316058 - RNA, 19 nt, Artificial Sequence
  Description of Artificial Sequence: Synthetic oligonucleotide
auuaaccaaugagaaacac

SEQ ID NO: 316059 - RNA, 19 nt, Artificial Sequence
  Description of Artificial Sequence: Synthetic oligonucleotide
ugagugacggcucauccac

SEQ ID NO: 316060 - RNA, 19 nt, Artificial Sequence
  Description of Artificial Sequence: Synthetic oligonucleotide
gacacgauccacaauuugc

SEQ ID NO: 316061 - RNA, 19 nt, Artificial Sequence
  Description of Artificial Sequence: Synthetic oligonucleotide
uucgaucaaguccaacaag

SEQ ID NO: 316062 - RNA, 19 nt, Artificial Sequence
  Description of Artificial Sequence: Synthetic oligonucleotide
caaagagguaaccuucagg

SEQ ID NO: 316063 - RNA, 19 nt, Artificial Sequence
  Description of Artificial Sequence: Synthetic oligonucleotide
agaccauagaaaaggaggg

SEQ ID NO: 316064 - RNA, 19 nt, Artificial Sequence
  Description of Artificial Sequence: Synthetic oligonucleotide
ucuaugauucgaucaaguc

SEQ ID NO: 316065 - RNA, 19 nt, Artificial Sequence
  Description of Artificial Sequence: Synthetic oligonucleotide
ugccuuaaagaccaaguau

SEQ ID NO: 316066 - RNA, 19 nt, Artificial Sequence
  Description of Artificial Sequence: Synthetic oligonucleotide
ugcgcguuucggcugaccg

SEQ ID NO: 316067 - RNA, 19 nt, Artificial Sequence
  Description of Artificial Sequence: Synthetic oligonucleotide
ugaggggugucaaauuucu

SEQ ID NO: 316068 - RNA, 19 nt, Artificial Sequence
  Description of Artificial Sequence: Synthetic oligonucleotide
agacacgugagucuguagu

SEQ ID NO: 316069 - RNA, 19 nt, Artificial Sequence
  Description of Artificial Sequence: Synthetic oligonucleotide
uauggccucucaaagccca

SEQ ID NO: 316070 - RNA, 19 nt, Artificial Sequence
  Description of Artificial Sequence: Synthetic oligonucleotide
ugacauagggaaacuggac

SEQ ID NO: 316071 - RNA, 19 nt, Artificial Sequence
  Description of Artificial Sequence: Synthetic oligonucleotide
gauagcacaugugaaucug

SEQ ID NO: 316072 - RNA, 19 nt, Artificial Sequence
  Description of Artificial Sequence: Synthetic oligonucleotide
agccuuagacaauuaacca

SEQ ID NO: 316073 - RNA, 19 nt, Artificial Sequence
  Description of Artificial Sequence: Synthetic oligonucleotide
uggugauagccacacgggc

SEQ ID NO: 316074 - RNA, 19 nt, Artificial Sequence
  Description of Artificial Sequence: Synthetic oligonucleotide
uccgaaacucucaggggag

SEQ ID NO: 316075 - RNA, 19 nt, Artificial Sequence
  Description of Artificial Sequence: Synthetic oligonucleotide
aaaugucggcaggagggac

SEQ ID NO: 316076 - RNA, 19 nt, Artificial Sequence
  Description of Artificial Sequence: Synthetic oligonucleotide
uugauugagugacggcuca

SEQ ID NO: 316077 - RNA, 19 nt, Artificial Sequence
  Description of Artificial Sequence: Synthetic oligonucleotide
ucauggauaggggaugaug

SEQ ID NO: 316078 - RNA, 19 nt, Artificial Sequence
  Description of Artificial Sequence: Synthetic oligonucleotide
acaaaaggacauguacccg

SEQ ID NO: 316079 - RNA, 19 nt, Artificial Sequence
  Description of Artificial Sequence: Synthetic oligonucleotide
aguccaacaagaggacagc

SEQ ID NO: 316080 - RNA, 19 nt, Artificial Sequence
  Description of Artificial Sequence: Synthetic oligonucleotide
gaggaaccgagugaagcgg

SEQ ID NO: 316081 - RNA, 19 nt, Artificial Sequence
  Description of Artificial Sequence: Synthetic oligonucleotide
augugaaucugagacacgu

SEQ ID NO: 316082 - RNA, 19 nt, Artificial Sequence
  Description of Artificial Sequence: Synthetic oligonucleotide
cuugauugagugacggcuc

SEQ ID NO: 316083 - RNA, 19 nt, Artificial Sequence
  Description of Artificial Sequence: Synthetic oligonucleotide
accgcaacgugucagcaca

SEQ ID NO: 316084 - RNA, 19 nt, Artificial Sequence
  Description of Artificial Sequence: Synthetic oligonucleotide
cacuauggccucucaaagc

SEQ ID NO: 316085 - RNA, 19 nt, Artificial Sequence
  Description of Artificial Sequence: Synthetic oligonucleotide
cagagaaacugccaucgac

SEQ ID NO: 316086 - RNA, 19 nt, Artificial Sequence
  Description of Artificial Sequence: Synthetic oligonucleotide
aguaucacugggacccugc

SEQ ID NO: 316087 - RNA, 19 nt, Artificial Sequence
  Description of Artificial Sequence: Synthetic oligonucleotide
cacacgacacauucacugc

SEQ ID NO: 316088 - RNA, 19 nt, Artificial Sequence
  Description of Artificial Sequence: Synthetic oligonucleotide
uggcgcggcaugcacaugc

SEQ ID NO: 316089 - RNA, 19 nt, Artificial Sequence
  Description of Artificial Sequence: Synthetic oligonucleotide
  modified_base (8)..(8): a, c, u, g, unknown or other
guaccucncaagccggagg

SEQ ID NO: 316090 - RNA, 19 nt, Artificial Sequence
  Description of Artificial Sequence: Synthetic oligonucleotide
auaggccggggagacagcc

SEQ ID NO: 316091 - RNA, 19 nt, Artificial Sequence
  Description of Artificial Sequence: Synthetic oligonucleotide
agauaaaugucggcaggag

SEQ ID NO: 316092 - RNA, 19 nt, Artificial Sequence
  Description of Artificial Sequence: Synthetic oligonucleotide
gagguaaccuucaggauga

SEQ ID NO: 316093 - RNA, 19 nt, Artificial Sequence
  Description of Artificial Sequence: Synthetic oligonucleotide
cuacugccugacaauaaug

SEQ ID NO: 316094 - RNA, 19 nt, Artificial Sequence
  Description of Artificial Sequence: Synthetic oligonucleotide
gacacgugagucuguaguc

SEQ ID NO: 316095 - RNA, 19 nt, Artificial Sequence
  Description of Artificial Sequence: Synthetic oligonucleotide
agccggagggaaucuuugc

SEQ ID NO: 316096 - RNA, 19 nt, Artificial Sequence
  Description of Artificial Sequence: Synthetic oligonucleotide
auagcgguaggccgaguug

SEQ ID NO: 316097 - RNA, 19 nt, Artificial Sequence
  Description of Artificial Sequence: Synthetic oligonucleotide
  modified_base (10)..(10): a, c, u, g, unknown or other
uuguaccucncaagccgga

SEQ ID NO: 316098 - RNA, 19 nt, Artificial Sequence
  Description of Artificial Sequence: Synthetic oligonucleotide
ggagacagcccguagacca

SEQ ID NO: 316099 - RNA, 19 nt, Artificial Sequence
  Description of Artificial Sequence: Synthetic oligonucleotide
cagcuuacuccucuauacc

SEQ ID NO: 316100 - RNA, 19 nt, Artificial Sequence
  Description of Artificial Sequence: Synthetic oligonucleotide
  modified_base (9)..(9): a, c, u, g, unknown or other
uguaccucncaagccggag

SEQ ID NO: 316101 - RNA, 19 nt, Artificial Sequence
  Description of Artificial Sequence: Synthetic oligonucleotide
cccucuagagccuauggcc

SEQ ID NO: 316102 - RNA, 19 nt, Artificial Sequence
  Description of Artificial Sequence: Synthetic oligonucleotide
aggaucaacgugucccuca

SEQ ID NO: 316103 - RNA, 19 nt, Artificial Sequence
  Description of Artificial Sequence: Synthetic oligonucleotide
uaaaugucggcaggaggga

SEQ ID NO: 316104 - RNA, 19 nt, Artificial Sequence
  Description of Artificial Sequence: Synthetic oligonucleotide
ggggugucaaauuucucgc

SEQ ID NO: 316105 - RNA, 19 nt, Artificial Sequence
  Description of Artificial Sequence: Synthetic oligonucleotide
ggugaauuccaaacuguag

SEQ ID NO: 316106 - RNA, 19 nt, Artificial Sequence
  Description of Artificial Sequence: Synthetic oligonucleotide
aaugucggcaggagggacu

SEQ ID NO: 316107 - RNA, 19 nt, Artificial Sequence
  Description of Artificial Sequence: Synthetic oligonucleotide
guuucggcugaccggcccg

SEQ ID NO: 316108 - RNA, 19 nt, Artificial Sequence
  Description of Artificial Sequence: Synthetic oligonucleotide
agcgcucggaauggcagcc

SEQ ID NO: 316109 - RNA, 19 nt, Artificial Sequence
  Description of Artificial Sequence: Synthetic oligonucleotide
uccuagucuugcccgucag

SEQ ID NO: 316110 - RNA, 19 nt, Artificial Sequence
  Description of Artificial Sequence: Synthetic oligonucleotide
acacgauccacaauuugcu

SEQ ID NO: 316111 - RNA, 19 nt, Artificial Sequence
  Description of Artificial Sequence: Synthetic oligonucleotide
aggagcguccgaguccucc

SEQ ID NO: 316112 - RNA, 19 nt, Artificial Sequence
  Description of Artificial Sequence: Synthetic oligonucleotide
uuggggauacugaggguuc

SEQ ID NO: 316113 - RNA, 19 nt, Artificial Sequence
  Description of Artificial Sequence: Synthetic oligonucleotide
augaggggugucaaauuuc

SEQ ID NO: 316114 - RNA, 19 nt, Artificial Sequence
  Description of Artificial Sequence: Synthetic oligonucleotide
aggcaugugaggaaccgag

SEQ ID NO: 316115 - RNA, 19 nt, Artificial Sequence
  Description of Artificial Sequence: Synthetic oligonucleotide
gcaugugaggaaccgagug

SEQ ID NO: 316116 - RNA, 19 nt, Artificial Sequence
  Description of Artificial Sequence: Synthetic oligonucleotide
caacagguagcugacacga

SEQ ID NO: 316117 - RNA, 19 nt, Artificial Sequence
  Description of Artificial Sequence: Synthetic oligonucleotide
acgacugcccaggaaguuc

SEQ ID NO: 316118 - RNA, 19 nt, Artificial Sequence
  Description of Artificial Sequence: Synthetic oligonucleotide
uugcugcaugauuuuauua

SEQ ID NO: 316119 - RNA, 19 nt, Artificial Sequence
  Description of Artificial Sequence: Synthetic oligonucleotide
caucggaaggcuuggucuc

SEQ ID NO: 316120 - RNA, 19 nt, Artificial Sequence
  Description of Artificial Sequence: Synthetic oligonucleotide
gugacauagggaaacugga

SEQ ID NO: 316121 - RNA, 19 nt, Artificial Sequence
  Description of Artificial Sequence: Synthetic oligonucleotide
guuggccugaaugucgaug

SEQ ID NO: 316122 - RNA, 19 nt, Artificial Sequence
  Description of Artificial Sequence: Synthetic oligonucleotide
gcaacagguagcugacacg

SEQ ID NO: 316123 - RNA, 19 nt, Artificial Sequence
  Description of Artificial Sequence: Synthetic oligonucleotide
cagcccguagaccauugag

SEQ ID NO: 316124 - RNA, 19 nt, Artificial Sequence
  Description of Artificial Sequence: Synthetic oligonucleotide
ccugcuuauagguggacug

SEQ ID NO: 316125 - RNA, 19 nt, Artificial Sequence
  Description of Artificial Sequence: Synthetic oligonucleotide
ggagccuuagacaauuaac

SEQ ID NO: 316126 - RNA, 19 nt, Artificial Sequence
  Description of Artificial Sequence: Synthetic oligonucleotide
ggcgacucaggauggagcc

SEQ ID NO: 316127 - RNA, 19 nt, Artificial Sequence
  Description of Artificial Sequence: Synthetic oligonucleotide
cacaugugaaucugagaca

SEQ ID NO: 316128 - RNA, 19 nt, Artificial Sequence
  Description of Artificial Sequence: Synthetic oligonucleotide
gagacacgugagucuguag

SEQ ID NO: 316129 - RNA, 19 nt, Artificial Sequence
  Description of Artificial Sequence: Synthetic oligonucleotide
gcccguagaccauugagug

SEQ ID NO: 316130 - RNA, 19 nt, Artificial Sequence
  Description of Artificial Sequence: Synthetic oligonucleotide
uguacccgccaaugggucu

SEQ ID NO: 316131 - RNA, 19 nt, Artificial Sequence
  Description of Artificial Sequence: Synthetic oligonucleotide
aguugggagccccucuaga

SEQ ID NO: 316132 - RNA, 19 nt, Artificial Sequence
  Description of Artificial Sequence: Synthetic oligonucleotide
ccguagaccauugagugcc

SEQ ID NO: 316133 - RNA, 19 nt, Artificial Sequence
  Description of Artificial Sequence: Synthetic oligonucleotide
caugagcauggccugucac

SEQ ID NO: 316134 - RNA, 19 nt, Artificial Sequence
  Description of Artificial Sequence: Synthetic oligonucleotide
  modified_base (3)..(3): a, c, u, g, unknown or other
ucncaagccggagggaauc

SEQ ID NO: 316135 - RNA, 19 nt, Artificial Sequence
  Description of Artificial Sequence: Synthetic oligonucleotide
ccucuagagccuauggccc

SEQ ID NO: 316136 - RNA, 19 nt, Artificial Sequence
  Description of Artificial Sequence: Synthetic oligonucleotide
acgugagucuguagucugc

SEQ ID NO: 316137 - RNA, 19 nt, Artificial Sequence
  Description of Artificial Sequence: Synthetic oligonucleotide
cagggcugguagauaaaug

SEQ ID NO: 316138 - RNA, 19 nt, Artificial Sequence
  Description of Artificial Sequence: Synthetic oligonucleotide
acagcccggaucugcagga

SEQ ID NO: 316139 - RNA, 19 nt, Artificial Sequence
  Description of Artificial Sequence: Synthetic oligonucleotide
cucuguuccgaaacucuca

SEQ ID NO: 316140 - RNA, 19 nt, Artificial Sequence
  Description of Artificial Sequence: Synthetic oligonucleotide
aggaaccgagugaagcggg

SEQ ID NO: 316141 - RNA, 19 nt, Artificial Sequence
  Description of Artificial Sequence: Synthetic oligonucleotide
ggccgaguuggccugaaug

SEQ ID NO: 316142 - RNA, 19 nt, Artificial Sequence
  Description of Artificial Sequence: Synthetic oligonucleotide
cucccuugauugagugacg

SEQ ID NO: 316143 - RNA, 19 nt, Artificial Sequence
  Description of Artificial Sequence: Synthetic oligonucleotide
caacgugucagcacaggaa

SEQ ID NO: 316144 - RNA, 19 nt, Artificial Sequence
  Description of Artificial Sequence: Synthetic oligonucleotide
agagccuauggcccaugga

SEQ ID NO: 316145 - RNA, 19 nt, Artificial Sequence
  Description of Artificial Sequence: Synthetic oligonucleotide
uuucgucaucggaaggcuu

SEQ ID NO: 316146 - RNA, 19 nt, Artificial Sequence
  Description of Artificial Sequence: Synthetic oligonucleotide
gagcgcucggaauggcagc

SEQ ID NO: 316147 - RNA, 19 nt, Artificial Sequence
  Description of Artificial Sequence: Synthetic oligonucleotide
ugauucgaucaaguccaac

SEQ ID NO: 316148 - RNA, 19 nt, Artificial Sequence
  Description of Artificial Sequence: Synthetic oligonucleotide
uaccgcaacgugucagcac

SEQ ID NO: 316149 - RNA, 19 nt, Artificial Sequence
  Description of Artificial Sequence: Synthetic oligonucleotide
ggccuccuagucuugcccg

SEQ ID NO: 316150 - RNA, 19 nt, Artificial Sequence
  Description of Artificial Sequence: Synthetic oligonucleotide
agcccguagaccauugagu

SEQ ID NO: 316151 - RNA, 19 nt, Artificial Sequence
  Description of Artificial Sequence: Synthetic oligonucleotide
ugccuccguggguagauuc

SEQ ID NO: 316152 - RNA, 19 nt, Artificial Sequence
  Description of Artificial Sequence: Synthetic oligonucleotide
auggugcgcguuucggcug

SEQ ID NO: 316153 - RNA, 19 nt, Artificial Sequence
  Description of Artificial Sequence: Synthetic oligonucleotide
gaaccgagugaagcgggac

SEQ ID NO: 316154 - RNA, 19 nt, Artificial Sequence
  Description of Artificial Sequence: Synthetic oligonucleotide
ggucuguuaugggaguugc

SEQ ID NO: 316155 - RNA, 19 nt, Artificial Sequence
  Description of Artificial Sequence: Synthetic oligonucleotide
gugccaaggcuguguggcg

SEQ ID NO: 316156 - RNA, 19 nt, Artificial Sequence
  Description of Artificial Sequence: Synthetic oligonucleotide
gggugucaaauuucucgcc

SEQ ID NO: 316157 - RNA, 19 nt, Artificial Sequence
  Description of Artificial Sequence: Synthetic oligonucleotide
cucggcucccuugauugag

SEQ ID NO: 316158 - RNA, 19 nt, Artificial Sequence
  Description of Artificial Sequence: Synthetic oligonucleotide
uggugcgcguuucggcuga

SEQ ID NO: 316159 - RNA, 19 nt, Artificial Sequence
  Description of Artificial Sequence: Synthetic oligonucleotide
ggagcguccgaguccuccg

SEQ ID NO: 316160 - RNA, 19 nt, Artificial Sequence
  Description of Artificial Sequence: Synthetic oligonucleotide
aguaguccacugugcaauu

SEQ ID NO: 316161 - RNA, 19 nt, Artificial Sequence
  Description of Artificial Sequence: Synthetic oligonucleotide
cauguacccgccaaugggu

SEQ ID NO: 316162 - RNA, 19 nt, Artificial Sequence
  Description of Artificial Sequence: Synthetic oligonucleotide
guucacuauggccucucaa

SEQ ID NO: 316163 - RNA, 19 nt, Artificial Sequence
  Description of Artificial Sequence: Synthetic oligonucleotide
gagaccguagggugcuguc

SEQ ID NO: 316164 - RNA, 19 nt, Artificial Sequence
  Description of Artificial Sequence: Synthetic oligonucleotide
ugcggcguccucacacgga

SEQ ID NO: 316165 - RNA, 19 nt, Artificial Sequence
  Description of Artificial Sequence: Synthetic oligonucleotide
ggugucaaauuucucgccu

SEQ ID NO: 316166 - RNA, 19 nt, Artificial Sequence
  Description of Artificial Sequence: Synthetic oligonucleotide
gauagcgguaggccgaguu

SEQ ID NO: 316167 - RNA, 19 nt, Artificial Sequence
  Description of Artificial Sequence: Synthetic oligonucleotide
gguaggccgaguuggccug

SEQ ID NO: 316168 - RNA, 19 nt, Artificial Sequence
  Description of Artificial Sequence: Synthetic oligonucleotide
cucuagagccuauggccca

SEQ ID NO: 316169 - RNA, 19 nt, Artificial Sequence
  Description of Artificial Sequence: Synthetic oligonucleotide
guacccgccaaugggucug

SEQ ID NO: 316170 - RNA, 19 nt, Artificial Sequence
  Description of Artificial Sequence: Synthetic oligonucleotide
uggggauacugaggguucu

SEQ ID NO: 316171 - RNA, 19 nt, Artificial Sequence
  Description of Artificial Sequence: Synthetic oligonucleotide
cuccgauagcuucuccuca

SEQ ID NO: 316172 - RNA, 19 nt, Artificial Sequence
  Description of Artificial Sequence: Synthetic oligonucleotide
auuucucgccucccaugaa

SEQ ID NO: 316173 - RNA, 19 nt, Artificial Sequence
  Description of Artificial Sequence: Synthetic oligonucleotide
cauggugcgcguuucggcu

SEQ ID NO: 316174 - RNA, 19 nt, Artificial Sequence
  Description of Artificial Sequence: Synthetic oligonucleotide
ccaaugggucuguuauggg

SEQ ID NO: 316175 - RNA, 19 nt, Artificial Sequence
  Description of Artificial Sequence: Synthetic oligonucleotide
gccaucgacaugcuucuca

SEQ ID NO: 316176 - RNA, 19 nt, Artificial Sequence
  Description of Artificial Sequence: Synthetic oligonucleotide
gcaacgugucagcacagga

SEQ ID NO: 316177 - RNA, 19 nt, Artificial Sequence
  Description of Artificial Sequence: Synthetic oligonucleotide
gacagcccguagaccauug

SEQ ID NO: 316178 - RNA, 19 nt, Artificial Sequence
  Description of Artificial Sequence: Synthetic oligonucleotide
ugccugaguaggugacuuc

SEQ ID NO: 316179 - RNA, 19 nt, Artificial Sequence
  Description of Artificial Sequence: Synthetic oligonucleotide
agaccguagggugcugucu

SEQ ID NO: 316180 - RNA, 19 nt, Artificial Sequence
  Description of Artificial Sequence: Synthetic oligonucleotide
ucggcugaccggcccgaga

SEQ ID NO: 316181 - RNA, 19 nt, Artificial Sequence
  Description of Artificial Sequence: Synthetic oligonucleotide
ucuagagccuauggcccau

SEQ ID NO: 316182 - RNA, 19 nt, Artificial Sequence
  Description of Artificial Sequence: Synthetic oligonucleotide
acagcccguagaccauuga

SEQ ID NO: 316183 - RNA, 19 nt, Artificial Sequence
  Description of Artificial Sequence: Synthetic oligonucleotide
cacugccuaggcaccuuug

SEQ ID NO: 316184 - RNA, 19 nt, Artificial Sequence
  Description of Artificial Sequence: Synthetic oligonucleotide
uggccugaaugucgauguc

SEQ ID NO: 316185 - RNA, 19 nt, Artificial Sequence
  Description of Artificial Sequence: Synthetic oligonucleotide
gaggcaugugaggaaccga

SEQ ID NO: 316186 - RNA, 19 nt, Artificial Sequence
  Description of Artificial Sequence: Synthetic oligonucleotide
ccauggugcgcguuucggc

SEQ ID NO: 316187 - RNA, 19 nt, Artificial Sequence
  Description of Artificial Sequence: Synthetic oligonucleotide
ggucugauaggcacacgac

SEQ ID NO: 316188 - RNA, 19 nt, Artificial Sequence
  Description of Artificial Sequence: Synthetic oligonucleotide
ggcugcggcguccucacac

SEQ ID NO: 316189 - RNA, 19 nt, Artificial Sequence
  Description of Artificial Sequence: Synthetic oligonucleotide
acccugcuuauagguggac

SEQ ID NO: 316190 - RNA, 19 nt, Artificial Sequence
  Description of Artificial Sequence: Synthetic oligonucleotide
uuucggcugaccggcccga

SEQ ID NO: 316191 - RNA, 19 nt, Artificial Sequence
  Description of Artificial Sequence: Synthetic oligonucleotide
cccguagaccauugagugc

SEQ ID NO: 316192 - RNA, 19 nt, Artificial Sequence
  Description of Artificial Sequence: Synthetic oligonucleotide
aucggaaggcuuggucucu

SEQ ID NO: 316193 - RNA, 19 nt, Artificial Sequence
  Description of Artificial Sequence: Synthetic oligonucleotide
gcgcguuucggcugaccgg

SEQ ID NO: 316194 - RNA, 19 nt, Artificial Sequence
  Description of Artificial Sequence: Synthetic oligonucleotide
ccaaaacagggcugaaaga

SEQ ID NO: 316195 - RNA, 19 nt, Artificial Sequence
  Description of Artificial Sequence: Synthetic oligonucleotide
cugaugggauaggccgggg

SEQ ID NO: 316196 - RNA, 19 nt, Artificial Sequence
  Description of Artificial Sequence: Synthetic oligonucleotide
gaggggugucaaauuucuc

SEQ ID NO: 316197 - RNA, 19 nt, Artificial Sequence
  Description of Artificial Sequence: Synthetic oligonucleotide
ugggucuguuaugggaguu

SEQ ID NO: 316198 - RNA, 19 nt, Artificial Sequence
  Description of Artificial Sequence: Synthetic oligonucleotide
augcggcgacucaggaugg

SEQ ID NO: 316199 - RNA, 19 nt, Artificial Sequence
  Description of Artificial Sequence: Synthetic oligonucleotide
uccacaccacuugguggga

SEQ ID NO: 316200 - RNA, 19 nt, Artificial Sequence
  Description of Artificial Sequence: Synthetic oligonucleotide
aaacugccaucgacaugcu

SEQ ID NO: 316201 - RNA, 19 nt, Artificial Sequence
  Description of Artificial Sequence: Synthetic oligonucleotide
aguuggccugaaugucgau

SEQ ID NO: 316202 - RNA, 19 nt, Artificial Sequence
  Description of Artificial Sequence: Synthetic oligonucleotide
gggcugguagauaaauguc

SEQ ID NO: 316203 - RNA, 19 nt, Artificial Sequence
  Description of Artificial Sequence: Synthetic oligonucleotide
guuggcgcggcaugcacau

SEQ ID NO: 316204 - RNA, 19 nt, Artificial Sequence
  Description of Artificial Sequence: Synthetic oligonucleotide
guaccgcaacgugucagca

SEQ ID NO: 316205 - RNA, 19 nt, Artificial Sequence
  Description of Artificial Sequence: Synthetic oligonucleotide
cuccuagucuugcccguca

SEQ ID NO: 316206 - RNA, 19 nt, Artificial Sequence
  Description of Artificial Sequence: Synthetic oligonucleotide
gccuauggcccauggagaa

SEQ ID NO: 316207 - RNA, 19 nt, Artificial Sequence
  Description of Artificial Sequence: Synthetic oligonucleotide
gccgaguuggccugaaugu

SEQ ID NO: 316208 - RNA, 19 nt, Artificial Sequence
  Description of Artificial Sequence: Synthetic oligonucleotide
gagcguccgaguccuccga

SEQ ID NO: 316209 - RNA, 19 nt, Artificial Sequence
  Description of Artificial Sequence: Synthetic oligonucleotide
guagaccauugagugccuc

SEQ ID NO: 316210 - RNA, 19 nt, Artificial Sequence
  Description of Artificial Sequence: Synthetic oligonucleotide
gggacccugcuuauaggug

SEQ ID NO: 316211 - RNA, 19 nt, Artificial Sequence
  Description of Artificial Sequence: Synthetic oligonucleotide
agcguccgaguccuccgau

SEQ ID NO: 316212 - RNA, 19 nt, Artificial Sequence
  Description of Artificial Sequence: Synthetic oligonucleotide
guaucacugggacccugcu

SEQ ID NO: 316213 - RNA, 19 nt, Artificial Sequence
  Description of Artificial Sequence: Synthetic oligonucleotide
gcggcguccucacacggac

SEQ ID NO: 316214 - RNA, 19 nt, Artificial Sequence
  Description of Artificial Sequence: Synthetic oligonucleotide
aggagcgcucggaauggca

SEQ ID NO: 316215 - RNA, 19 nt, Artificial Sequence
  Description of Artificial Sequence: Synthetic oligonucleotide
cuugcccgucagcugccuc

SEQ ID NO: 316216 - RNA, 19 nt, Artificial Sequence
  Description of Artificial Sequence: Synthetic oligonucleotide
cuagagccuauggcccaug

SEQ ID NO: 316217 - RNA, 19 nt, Artificial Sequence
  Description of Artificial Sequence: Synthetic oligonucleotide
cugugagaggagccuuaga

SEQ ID NO: 316218 - RNA, 19 nt, Artificial Sequence
  Description of Artificial Sequence: Synthetic oligonucleotide
ggcugaccggcccgagagg

SEQ ID NO: 316219 - RNA, 19 nt, Artificial Sequence
  Description of Artificial Sequence: Synthetic oligonucleotide
uccgaacagcccggaucug

SEQ ID NO: 316220 - RNA, 19 nt, Artificial Sequence
  Description of Artificial Sequence: Synthetic oligonucleotide
cgcguuucggcugaccggc

SEQ ID NO: 316221 - RNA, 19 nt, Artificial Sequence
  Description of Artificial Sequence: Synthetic oligonucleotide
  modified_base (6)..(6): a, c, u, g, unknown or other
accucncaagccggaggga

SEQ ID NO: 316222 - RNA, 19 nt, Artificial Sequence
  Description of Artificial Sequence: Synthetic oligonucleotide
gggauagcgguaggccgag

SEQ ID NO: 316223 - RNA, 19 nt, Artificial Sequence
  Description of Artificial Sequence: Synthetic oligonucleotide
  modified_base (4)..(4): a, c, u, g, unknown or other
cucncaagccggagggaau

SEQ ID NO: 316224 - RNA, 19 nt, Artificial Sequence
  Description of Artificial Sequence: Synthetic oligonucleotide
gcugaccggcccgagagga

SEQ ID NO: 316225 - RNA, 19 nt, Artificial Sequence
  Description of Artificial Sequence: Synthetic oligonucleotide
gcgggacacugucagaacu

SEQ ID NO: 316226 - RNA, 19 nt, Artificial Sequence
  Description of Artificial Sequence: Synthetic oligonucleotide
cggcugaccggcccgagag

SEQ ID NO: 316227 - RNA, 19 nt, Artificial Sequence
  Description of Artificial Sequence: Synthetic oligonucleotide
ccgaaacucucaggggagc

SEQ ID NO: 316228 - RNA, 19 nt, Artificial Sequence
  Description of Artificial Sequence: Synthetic oligonucleotide
cgcgaugcggcgacucagg

SEQ ID NO: 316229 - RNA, 19 nt, Artificial Sequence
  Description of Artificial Sequence: Synthetic oligonucleotide
ccgaguuggccugaauguc

SEQ ID NO: 316230 - RNA, 19 nt, Artificial Sequence
  Description of Artificial Sequence: Synthetic oligonucleotide
gauaggcacacgacacauu

SEQ ID NO: 316231 - RNA, 19 nt, Artificial Sequence
  Description of Artificial Sequence: Synthetic oligonucleotide
gcggcgacucaggauggag

SEQ ID NO: 316232 - RNA, 19 nt, Artificial Sequence
  Description of Artificial Sequence: Synthetic oligonucleotide
gggcacucggcucccuuga

SEQ ID NO: 316233 - RNA, 19 nt, Artificial Sequence
  Description of Artificial Sequence: Synthetic oligonucleotide
ggaaccgagugaagcggga

SEQ ID NO: 316234 - RNA, 19 nt, Artificial Sequence
  Description of Artificial Sequence: Synthetic oligonucleotide
gguuggcgcggcaugcaca

SEQ ID NO: 316235 - RNA, 19 nt, Artificial Sequence
  Description of Artificial Sequence: Synthetic oligonucleotide
cguuucggcugaccggccc

SEQ ID NO: 316236 - RNA, 19 nt, Artificial Sequence
  Description of Artificial Sequence: Synthetic oligonucleotide
ggcguccucacacggacau

SEQ ID NO: 316237 - RNA, 19 nt, Artificial Sequence
  Description of Artificial Sequence: Synthetic oligonucleotide
uuggcgcggcaugcacaug

SEQ ID NO: 316238 - RNA, 19 nt, Artificial Sequence
  Description of Artificial Sequence: Synthetic oligonucleotide
uacccgccaaugggucugu

SEQ ID NO: 316239 - RNA, 19 nt, Artificial Sequence
  Description of Artificial Sequence: Synthetic oligonucleotide
uaggccgaguuggccugaa

SEQ ID NO: 316240 - RNA, 19 nt, Artificial Sequence
  Description of Artificial Sequence: Synthetic oligonucleotide
gcgacucaggauggagccc

SEQ ID NO: 316241 - RNA, 19 nt, Artificial Sequence
  Description of Artificial Sequence: Synthetic oligonucleotide
gcgaugcggcgacucagga

SEQ ID NO: 316242 - RNA, 19 nt, Artificial Sequence
  Description of Artificial Sequence: Synthetic oligonucleotide
  modified_base (5)..(5): a, c, u, g, unknown or other
ccucncaagccggagggaa

SEQ ID NO: 316243 - RNA, 19 nt, Artificial Sequence
  Description of Artificial Sequence: Synthetic oligonucleotide
gugcgcguuucggcugacc

SEQ ID NO: 316244 - RNA, 19 nt, Artificial Sequence
  Description of Artificial Sequence: Synthetic oligonucleotide
ccgcaacgugucagcacag

SEQ ID NO: 316245 - RNA, 19 nt, Artificial Sequence
  Description of Artificial Sequence: Synthetic oligonucleotide
gcgcggcaugcacaugcug

SEQ ID NO: 316246 - RNA, 19 nt, Artificial Sequence
  Description of Artificial Sequence: Synthetic oligonucleotide
gacgacugcccaggaaguu

SEQ ID NO: 316247 - RNA, 19 nt, Artificial Sequence
  Description of Artificial Sequence: Synthetic oligonucleotide
ccgccaaugggucuguuau

SEQ ID NO: 316248 - RNA, 19 nt, Artificial Sequence
  Description of Artificial Sequence: Synthetic oligonucleotide
ggccccuggcuucuuccga

SEQ ID NO: 316249 - RNA, 19 nt, Artificial Sequence
  Description of Artificial Sequence: Synthetic oligonucleotide
gcgcucggaauggcagccg

SEQ ID NO: 316250 - RNA, 19 nt, Artificial Sequence
  Description of Artificial Sequence: Synthetic oligonucleotide
  modified_base (2)..(2): a, c, u, g, unknown or other
cncaagccggagggaaucu

SEQ ID NO: 316251 - RNA, 19 nt, Artificial Sequence
  Description of Artificial Sequence: Synthetic oligonucleotide
ccgcgaugcggcgacucag

SEQ ID NO: 316252 - RNA, 19 nt, Artificial Sequence
  Description of Artificial Sequence: Synthetic oligonucleotide
ccggggagacagcccguag

SEQ ID NO: 316253 - RNA, 19 nt, Artificial Sequence
  Description of Artificial Sequence: Synthetic oligonucleotide
ggacgacugcccaggaagu

SEQ ID NO: 316254 - RNA, 19 nt, Artificial Sequence
  Description of Artificial Sequence: Synthetic oligonucleotide
ggagaccguagggugcugu

SEQ ID NO: 316255 - RNA, 19 nt, Artificial Sequence
  Description of Artificial Sequence: Synthetic oligonucleotide
ggcacacgacacauucacu

SEQ ID NO: 316256 - RNA, 19 nt, Artificial Sequence
  Description of Artificial Sequence: Synthetic oligonucleotide
cacgcccgcgaugcggcga

SEQ ID NO: 316257 - RNA, 19 nt, Artificial Sequence
  Description of Artificial Sequence: Synthetic oligonucleotide
gcguccgaguccuccgaua

SEQ ID NO: 316258 - RNA, 19 nt, Artificial Sequence
  Description of Artificial Sequence: Synthetic oligonucleotide
gcguuucggcugaccggcc

SEQ ID NO: 316259 - RNA, 19 nt, Artificial Sequence
  Description of Artificial Sequence: Synthetic oligonucleotide
gccuccguggguagauucu

SEQ ID NO: 316260 - RNA, 19 nt, Artificial Sequence
  Description of Artificial Sequence: Synthetic oligonucleotide
ccacaacauucuacugccu

SEQ ID NO: 316261 - RNA, 19 nt, Artificial Sequence
  Description of Artificial Sequence: Synthetic oligonucleotide
cccgcgaugcggcgacuca

SEQ ID NO: 316262 - RNA, 19 nt, Artificial Sequence
  Description of Artificial Sequence: Synthetic oligonucleotide
gcccgcgaugcggcgacuc

SEQ ID NO: 316263 - RNA, 19 nt, Artificial Sequence
  Description of Artificial Sequence: Synthetic oligonucleotide
ggugcgcguuucggcugac

SEQ ID NO: 316264 - RNA, 19 nt, Artificial Sequence
  Description of Artificial Sequence: Synthetic oligonucleotide
acccgccaaugggucuguu

SEQ ID NO: 316265 - RNA, 19 nt, Artificial Sequence
  Description of Artificial Sequence: Synthetic oligonucleotide
cguagaccauugagugccu

SEQ ID NO: 316266 - RNA, 19 nt, Artificial Sequence
  Description of Artificial Sequence: Synthetic oligonucleotide
cgaugcggcgacucaggau

SEQ ID NO: 316267 - RNA, 19 nt, Artificial Sequence
  Description of Artificial Sequence: Synthetic oligonucleotide
ggauagcgguaggccgagu

SEQ ID NO: 316268 - RNA, 19 nt, Artificial Sequence
  Description of Artificial Sequence: Synthetic oligonucleotide
cggcguccucacacggaca

SEQ ID NO: 316269 - RNA, 19 nt, Artificial Sequence
  Description of Artificial Sequence: Synthetic oligonucleotide
cugccuccguggguagauu

SEQ ID NO: 316270 - RNA, 19 nt, Artificial Sequence
  Description of Artificial Sequence: Synthetic oligonucleotide
ccgaguccuccgauagcuu

SEQ ID NO: 316271 - RNA, 19 nt, Artificial Sequence
  Description of Artificial Sequence: Synthetic oligonucleotide
cgcccgcgaugcggcgacu

SEQ ID NO: 316272 - RNA, 19 nt, Artificial Sequence
  Description of Artificial Sequence: Synthetic oligonucleotide
gauuguaagcuuuauguag

SEQ ID NO: 316273 - RNA, 19 nt, Artificial Sequence
  Description of Artificial Sequence: Synthetic oligonucleotide
uguguagcaucaaagcacg

SEQ ID NO: 316274 - RNA, 19 nt, Artificial Sequence
  Description of Artificial Sequence: Synthetic oligonucleotide
aggauuguaagcuuuaugu

SEQ ID NO: 316275 - RNA, 19 nt, Artificial Sequence
  Description of Artificial Sequence: Synthetic oligonucleotide
ugaucuucaccuuaauggg

SEQ ID NO: 316276 - RNA, 19 nt, Artificial Sequence
  Description of Artificial Sequence: Synthetic oligonucleotide
aauacaugucaugauucgc

SEQ ID NO: 316277 - RNA, 19 nt, Artificial Sequence
  Description of Artificial Sequence: Synthetic oligonucleotide
gagguugugauacuggucc

SEQ ID NO: 316278 - RNA, 19 nt, Artificial Sequence
  Description of Artificial Sequence: Synthetic oligonucleotide
uggaaucugauaaagcccc

SEQ ID NO: 316279 - RNA, 19 nt, Artificial Sequence
  Description of Artificial Sequence: Synthetic oligonucleotide
uucauaaaggccaucgcug

SEQ ID NO: 316280 - RNA, 19 nt, Artificial Sequence
  Description of Artificial Sequence: Synthetic oligonucleotide
aaaacugcacucaacugac

SEQ ID NO: 316281 - RNA, 19 nt, Artificial Sequence
  Description of Artificial Sequence: Synthetic oligonucleotide
uuuucaucguaaaacuuca

SEQ ID NO: 316282 - RNA, 19 nt, Artificial Sequence
  Description of Artificial Sequence: Synthetic oligonucleotide
aaaacaugauggcaguuga

SEQ ID NO: 316283 - RNA, 19 nt, Artificial Sequence
  Description of Artificial Sequence: Synthetic oligonucleotide
cuccccacaauaaauauag

SEQ ID NO: 316284 - RNA, 19 nt, Artificial Sequence
  Description of Artificial Sequence: Synthetic oligonucleotide
ugauacuggucccagagga

SEQ ID NO: 316285 - RNA, 19 nt, Artificial Sequence
  Description of Artificial Sequence: Synthetic oligonucleotide
cuugagggcgauucgaucg

SEQ ID NO: 316286 - RNA, 19 nt, Artificial Sequence
  Description of Artificial Sequence: Synthetic oligonucleotide
ucucauaacagaaguguug

SEQ ID NO: 316287 - RNA, 19 nt, Artificial Sequence
  Description of Artificial Sequence: Synthetic oligonucleotide
aauuggaaucuccauacaa

SEQ ID NO: 316288 - RNA, 19 nt, Artificial Sequence
  Description of Artificial Sequence: Synthetic oligonucleotide
aaugggaagcuucacugug

SEQ ID NO: 316289 - RNA, 19 nt, Artificial Sequence
  Description of Artificial Sequence: Synthetic oligonucleotide
auacaugucaugauucgcc

SEQ ID NO: 316290 - RNA, 19 nt, Artificial Sequence
  Description of Artificial Sequence: Synthetic oligonucleotide
ucuuuaaagugacucuccc

SEQ ID NO: 316291 - RNA, 19 nt, Artificial Sequence
  Description of Artificial Sequence: Synthetic oligonucleotide
aacuuggcgaugcugcauc

SEQ ID NO: 316292 - RNA, 19 nt, Artificial Sequence
  Description of Artificial Sequence: Synthetic oligonucleotide
uccauucugugguaaauag

SEQ ID NO: 316293 - RNA, 19 nt, Artificial Sequence
  Description of Artificial Sequence: Synthetic oligonucleotide
ugaggaucugauaggcucg

SEQ ID NO: 316294 - RNA, 19 nt, Artificial Sequence
  Description of Artificial Sequence: Synthetic oligonucleotide
ucuaaaggaucauucuuca

SEQ ID NO: 316295 - RNA, 19 nt, Artificial Sequence
  Description of Artificial Sequence: Synthetic oligonucleotide
uuuuaagaccuccaauccu

SEQ ID NO: 316296 - RNA, 19 nt, Artificial Sequence
  Description of Artificial Sequence: Synthetic oligonucleotide
acaguacaagucuuuaaag

SEQ ID NO: 316297 - RNA, 19 nt, Artificial Sequence
  Description of Artificial Sequence: Synthetic oligonucleotide
auguagcuaggacucaagc

SEQ ID NO: 316298 - RNA, 19 nt, Artificial Sequence
  Description of Artificial Sequence: Synthetic oligonucleotide
aaagcgaaggcuugcauuu

SEQ ID NO: 316299 - RNA, 19 nt, Artificial Sequence
  Description of Artificial Sequence: Synthetic oligonucleotide
auuggaaucuccauacaac

SEQ ID NO: 316300 - RNA, 19 nt, Artificial Sequence
  Description of Artificial Sequence: Synthetic oligonucleotide
aaaguuggguaacacuacu

SEQ ID NO: 316301 - RNA, 19 nt, Artificial Sequence
  Description of Artificial Sequence: Synthetic oligonucleotide
uuggguaacacuacuuugu

SEQ ID NO: 316302 - RNA, 19 nt, Artificial Sequence
  Description of Artificial Sequence: Synthetic oligonucleotide
aucuccauacaacacgauc

SEQ ID NO: 316303 - RNA, 19 nt, Artificial Sequence
  Description of Artificial Sequence: Synthetic oligonucleotide
uuuauguagaaaguguguc

SEQ ID NO: 316304 - RNA, 19 nt, Artificial Sequence
  Description of Artificial Sequence: Synthetic oligonucleotide
ugcucgaacauguuaacac

SEQ ID NO: 316305 - RNA, 19 nt, Artificial Sequence
  Description of Artificial Sequence: Synthetic oligonucleotide
uuuaagaccuccaauccuu

SEQ ID NO: 316306 - RNA, 19 nt, Artificial Sequence
  Description of Artificial Sequence: Synthetic oligonucleotide
aguagaugggcugagaaca

SEQ ID NO: 316307 - RNA, 19 nt, Artificial Sequence
  Description of Artificial Sequence: Synthetic oligonucleotide
uacaacacgauccggcccc

SEQ ID NO: 316308 - RNA, 19 nt, Artificial Sequence
  Description of Artificial Sequence: Synthetic oligonucleotide
agggcuacugagcaccucc

SEQ ID NO: 316309 - RNA, 19 nt, Artificial Sequence
  Description of Artificial Sequence: Synthetic oligonucleotide
cuguguagcaucaaagcac

SEQ ID NO: 316310 - RNA, 19 nt, Artificial Sequence
  Description of Artificial Sequence: Synthetic oligonucleotide
guagcuaggacucaagcuc

SEQ ID NO: 316311 - RNA, 19 nt, Artificial Sequence
  Description of Artificial Sequence: Synthetic oligonucleotide
uggcaguugauacuuauaa

SEQ ID NO: 316312 - RNA, 19 nt, Artificial Sequence
  Description of Artificial Sequence: Synthetic oligonucleotide
uuaacaauuguuggcauuc

SEQ ID NO: 316313 - RNA, 19 nt, Artificial Sequence
  Description of Artificial Sequence: Synthetic oligonucleotide
aaggucucacuugagggcg

SEQ ID NO: 316314 - RNA, 19 nt, Artificial Sequence
  Description of Artificial Sequence: Synthetic oligonucleotide
auacaacacgauccggccc

SEQ ID NO: 316315 - RNA, 19 nt, Artificial Sequence
  Description of Artificial Sequence: Synthetic oligonucleotide
uguggaaguaugcucggca

SEQ ID NO: 316316 - RNA, 19 nt, Artificial Sequence
  Description of Artificial Sequence: Synthetic oligonucleotide
cuauccaccaugagcaaag

SEQ ID NO: 316317 - RNA, 19 nt, Artificial Sequence
  Description of Artificial Sequence: Synthetic oligonucleotide
uggcauuccuccauaguag

SEQ ID NO: 316318 - RNA, 19 nt, Artificial Sequence
  Description of Artificial Sequence: Synthetic oligonucleotide
uaaaggccaucgcugaacc

SEQ ID NO: 316319 - RNA, 19 nt, Artificial Sequence
  Description of Artificial Sequence: Synthetic oligonucleotide
gauucgaucgaaaguuggg

SEQ ID NO: 316320 - RNA, 19 nt, Artificial Sequence
  Description of Artificial Sequence: Synthetic oligonucleotide
uuaagguuaugcauauuua

SEQ ID NO: 316321 - RNA, 19 nt, Artificial Sequence
  Description of Artificial Sequence: Synthetic oligonucleotide
cauacaacacgauccggcc

SEQ ID NO: 316322 - RNA, 19 nt, Artificial Sequence
  Description of Artificial Sequence: Synthetic oligonucleotide
uuggcgaugcugcaucccg

SEQ ID NO: 316323 - RNA, 19 nt, Artificial Sequence
  Description of Artificial Sequence: Synthetic oligonucleotide
ucauaaaggccaucgcuga

SEQ ID NO: 316324 - RNA, 19 nt, Artificial Sequence
  Description of Artificial Sequence: Synthetic oligonucleotide
ucccagaugggccucaaga

SEQ ID NO: 316325 - RNA, 19 nt, Artificial Sequence
  Description of Artificial Sequence: Synthetic oligonucleotide
cauccuuucaggaggggcc

SEQ ID NO: 316326 - RNA, 19 nt, Artificial Sequence
  Description of Artificial Sequence: Synthetic oligonucleotide
accgugaucaugaugugac

SEQ ID NO: 316327 - RNA, 19 nt, Artificial Sequence
  Description of Artificial Sequence: Synthetic oligonucleotide
aagaggccgagguuuuggg

SEQ ID NO: 316328 - RNA, 19 nt, Artificial Sequence
  Description of Artificial Sequence: Synthetic oligonucleotide
ucagucaggucgauguagc

SEQ ID NO: 316329 - RNA, 19 nt, Artificial Sequence
  Description of Artificial Sequence: Synthetic oligonucleotide
auguuaacaccaggaagcc

SEQ ID NO: 316330 - RNA, 19 nt, Artificial Sequence
  Description of Artificial Sequence: Synthetic oligonucleotide
cuccuuaugaugucacugc

SEQ ID NO: 316331 - RNA, 19 nt, Artificial Sequence
  Description of Artificial Sequence: Synthetic oligonucleotide
uguagcaucaaagcacgug

SEQ ID NO: 316332 - RNA, 19 nt, Artificial Sequence
  Description of Artificial Sequence: Synthetic oligonucleotide
cugaggaucugauaggcuc

SEQ ID NO: 316333 - RNA, 19 nt, Artificial Sequence
  Description of Artificial Sequence: Synthetic oligonucleotide
ucauccaagcaauuggaau

SEQ ID NO: 316334 - RNA, 19 nt, Artificial Sequence
  Description of Artificial Sequence: Synthetic oligonucleotide
guagcaucaaagcacguga

SEQ ID NO: 316335 - RNA, 19 nt, Artificial Sequence
  Description of Artificial Sequence: Synthetic oligonucleotide
accaacaauggugaaauca

SEQ ID NO: 316336 - RNA, 19 nt, Artificial Sequence
  Description of Artificial Sequence: Synthetic oligonucleotide
cuuaugaugucacugcaga

SEQ ID NO: 316337 - RNA, 19 nt, Artificial Sequence
  Description of Artificial Sequence: Synthetic oligonucleotide
aauaaagcgaaggcuugca

SEQ ID NO: 316338 - RNA, 19 nt, Artificial Sequence
  Description of Artificial Sequence: Synthetic oligonucleotide
uaaagugacucuccccaca

SEQ ID NO: 316339 - RNA, 19 nt, Artificial Sequence
  Description of Artificial Sequence: Synthetic oligonucleotide
acgaaguagcccaugcugc

SEQ ID NO: 316340 - RNA, 19 nt, Artificial Sequence
  Description of Artificial Sequence: Synthetic oligonucleotide
auaguagaugggcugagaa

SEQ ID NO: 316341 - RNA, 19 nt, Artificial Sequence
  Description of Artificial Sequence: Synthetic oligonucleotide
gucccuuggaaauaggcac

SEQ ID NO: 316342 - RNA, 19 nt, Artificial Sequence
  Description of Artificial Sequence: Synthetic oligonucleotide
aauggagagcagcuucuga

SEQ ID NO: 316343 - RNA, 19 nt, Artificial Sequence
  Description of Artificial Sequence: Synthetic oligonucleotide
ugaggaguaggagaaggcc

SEQ ID NO: 316344 - RNA, 19 nt, Artificial Sequence
  Description of Artificial Sequence: Synthetic oligonucleotide
guuggguaacacuacuuug

SEQ ID NO: 316345 - RNA, 19 nt, Artificial Sequence
  Description of Artificial Sequence: Synthetic oligonucleotide
aagcacgugaauggggcac

SEQ ID NO: 316346 - RNA, 19 nt, Artificial Sequence
  Description of Artificial Sequence: Synthetic oligonucleotide
aguguuguaccagucacug

SEQ ID NO: 316347 - RNA, 19 nt, Artificial Sequence
  Description of Artificial Sequence: Synthetic oligonucleotide
aggucgauguagcuaggac

SEQ ID NO: 316348 - RNA, 19 nt, Artificial Sequence
  Description of Artificial Sequence: Synthetic oligonucleotide
acaaguguggacaggcugg

SEQ ID NO: 316349 - RNA, 19 nt, Artificial Sequence
  Description of Artificial Sequence: Synthetic oligonucleotide
ucgaaaguuggguaacacu

SEQ ID NO: 316350 - RNA, 19 nt, Artificial Sequence
  Description of Artificial Sequence: Synthetic oligonucleotide
agaaaauagccuguaacaa

SEQ ID NO: 316351 - RNA, 19 nt, Artificial Sequence
  Description of Artificial Sequence: Synthetic oligonucleotide
auuguaagcuuuauguaga

SEQ ID NO: 316352 - RNA, 19 nt, Artificial Sequence
  Description of Artificial Sequence: Synthetic oligonucleotide
agggcgauucgaucgaaag

SEQ ID NO: 316353 - RNA, 19 nt, Artificial Sequence
  Description of Artificial Sequence: Synthetic oligonucleotide
ugaaggagugcauccagaa

SEQ ID NO: 316354 - RNA, 19 nt, Artificial Sequence
  Description of Artificial Sequence: Synthetic oligonucleotide
gaaggagugcauccagaag

SEQ ID NO: 316355 - RNA, 19 nt, Artificial Sequence
  Description of Artificial Sequence: Synthetic oligonucleotide
uccuuaugaugucacugca

SEQ ID NO: 316356 - RNA, 19 nt, Artificial Sequence
  Description of Artificial Sequence: Synthetic oligonucleotide
ugugacugucauccaagca

SEQ ID NO: 316357 - RNA, 19 nt, Artificial Sequence
  Description of Artificial Sequence: Synthetic oligonucleotide
ucauucaaaggcuguggcu

SEQ ID NO: 316358 - RNA, 19 nt, Artificial Sequence
  Description of Artificial Sequence: Synthetic oligonucleotide
auacuguguagcaucaaag

SEQ ID NO: 316359 - RNA, 19 nt, Artificial Sequence
  Description of Artificial Sequence: Synthetic oligonucleotide
ucgaucgaaaguuggguaa

SEQ ID NO: 316360 - RNA, 19 nt, Artificial Sequence
  Description of Artificial Sequence: Synthetic oligonucleotide
gaagccaccgugaucauga

SEQ ID NO: 316361 - RNA, 19 nt, Artificial Sequence
  Description of Artificial Sequence: Synthetic oligonucleotide
cuguguaagcuguggacgc

SEQ ID NO: 316362 - RNA, 19 nt, Artificial Sequence
  Description of Artificial Sequence: Synthetic oligonucleotide
gcaguugauacuuauaaaa

SEQ ID NO: 316363 - RNA, 19 nt, Artificial Sequence
  Description of Artificial Sequence: Synthetic oligonucleotide
uccaaagauuacugggcgc

SEQ ID NO: 316364 - RNA, 19 nt, Artificial Sequence
  Description of Artificial Sequence: Synthetic oligonucleotide
uaaagcgaaggcuugcauu

SEQ ID NO: 316365 - RNA, 19 nt, Artificial Sequence
  Description of Artificial Sequence: Synthetic oligonucleotide
uagccuguaacaagcauuu

SEQ ID NO: 316366 - RNA, 19 nt, Artificial Sequence
  Description of Artificial Sequence: Synthetic oligonucleotide
caggauguaacucagagau

SEQ ID NO: 316367 - RNA, 19 nt, Artificial Sequence
  Description of Artificial Sequence: Synthetic oligonucleotide
agguugugauacugguccc

SEQ ID NO: 316368 - RNA, 19 nt, Artificial Sequence
  Description of Artificial Sequence: Synthetic oligonucleotide
ucccgaugcauaauacaug

SEQ ID NO: 316369 - RNA, 19 nt, Artificial Sequence
  Description of Artificial Sequence: Synthetic oligonucleotide
aucguaaaacuucacuuuu

SEQ ID NO: 316370 - RNA, 19 nt, Artificial Sequence
  Description of Artificial Sequence: Synthetic oligonucleotide
ugguaaauagggccgccac

SEQ ID NO: 316371 - RNA, 19 nt, Artificial Sequence
  Description of Artificial Sequence: Synthetic oligonucleotide
acgugaauggggcaccgag

SEQ ID NO: 316372 - RNA, 19 nt, Artificial Sequence
  Description of Artificial Sequence: Synthetic oligonucleotide
uuugggucucccagauggg

SEQ ID NO: 316373 - RNA, 19 nt, Artificial Sequence
  Description of Artificial Sequence: Synthetic oligonucleotide
uaguagaugggcugagaac

SEQ ID NO: 316374 - RNA, 19 nt, Artificial Sequence
  Description of Artificial Sequence: Synthetic oligonucleotide
uaagcuguggacgcuuugc

SEQ ID NO: 316375 - RNA, 19 nt, Artificial Sequence
  Description of Artificial Sequence: Synthetic oligonucleotide
uggggagaacacacuaacc

SEQ ID NO: 316376 - RNA, 19 nt, Artificial Sequence
  Description of Artificial Sequence: Synthetic oligonucleotide
aagcaauuggaaucuccau

SEQ ID NO: 316377 - RNA, 19 nt, Artificial Sequence
  Description of Artificial Sequence: Synthetic oligonucleotide
ggaaauaggcaccucccag

SEQ ID NO: 316378 - RNA, 19 nt, Artificial Sequence
  Description of Artificial Sequence: Synthetic oligonucleotide
aucgaaaguuggguaacac

SEQ ID NO: 316379 - RNA, 19 nt, Artificial Sequence
  Description of Artificial Sequence: Synthetic oligonucleotide
gaaguacucuucuucacua

SEQ ID NO: 316380 - RNA, 19 nt, Artificial Sequence
  Description of Artificial Sequence: Synthetic oligonucleotide
aaaaggucaugggaucuga

SEQ ID NO: 316381 - RNA, 19 nt, Artificial Sequence
  Description of Artificial Sequence: Synthetic oligonucleotide
auuaacaauuguuggcauu

SEQ ID NO: 316382 - RNA, 19 nt, Artificial Sequence
  Description of Artificial Sequence: Synthetic oligonucleotide
cacauguagggacacucag

SEQ ID NO: 316383 - RNA, 19 nt, Artificial Sequence
  Description of Artificial Sequence: Synthetic oligonucleotide
agcuuuauguagaaagugu

SEQ ID NO: 316384 - RNA, 19 nt, Artificial Sequence
  Description of Artificial Sequence: Synthetic oligonucleotide
uuaaagugacucuccccac

SEQ ID NO: 316385 - RNA, 19 nt, Artificial Sequence
  Description of Artificial Sequence: Synthetic oligonucleotide
gucuaaaggaucauucuuc

SEQ ID NO: 316386 - RNA, 19 nt, Artificial Sequence
  Description of Artificial Sequence: Synthetic oligonucleotide
aaaggucaugggaucugac

SEQ ID NO: 316387 - RNA, 19 nt, Artificial Sequence
  Description of Artificial Sequence: Synthetic oligonucleotide
uucuuucaccaacaauggu

SEQ ID NO: 316388 - RNA, 19 nt, Artificial Sequence
  Description of Artificial Sequence: Synthetic oligonucleotide
guacaagucuuuaaaguga

SEQ ID NO: 316389 - RNA, 19 nt, Artificial Sequence
  Description of Artificial Sequence: Synthetic oligonucleotide
uggggcaccgagcaccucc

SEQ ID NO: 316390 - RNA, 19 nt, Artificial Sequence
  Description of Artificial Sequence: Synthetic oligonucleotide
caccuuaaugggaagcuuc

SEQ ID NO: 316391 - RNA, 19 nt, Artificial Sequence
  Description of Artificial Sequence: Synthetic oligonucleotide
ggaaaggccauuguccacg

SEQ ID NO: 316392 - RNA, 19 nt, Artificial Sequence
  Description of Artificial Sequence: Synthetic oligonucleotide
cuggggagaacacacuaac

SEQ ID NO: 316393 - RNA, 19 nt, Artificial Sequence
  Description of Artificial Sequence: Synthetic oligonucleotide
cugaggaguaggagaaggc

SEQ ID NO: 316394 - RNA, 19 nt, Artificial Sequence
  Description of Artificial Sequence: Synthetic oligonucleotide
uucgaucgaaaguugggua

SEQ ID NO: 316395 - RNA, 19 nt, Artificial Sequence
  Description of Artificial Sequence: Synthetic oligonucleotide
ucucacuugagggcgauuc

SEQ ID NO: 316396 - RNA, 19 nt, Artificial Sequence
  Description of Artificial Sequence: Synthetic oligonucleotide
uggguaacacuacuuuguc

SEQ ID NO: 316397 - RNA, 19 nt, Artificial Sequence
  Description of Artificial Sequence: Synthetic oligonucleotide
gaggccgagguuuuggguc

SEQ ID NO: 316398 - RNA, 19 nt, Artificial Sequence
  Description of Artificial Sequence: Synthetic oligonucleotide
guaggagaaggccacuuca

SEQ ID NO: 316399 - RNA, 19 nt, Artificial Sequence
  Description of Artificial Sequence: Synthetic oligonucleotide
ucuugguuguagcggccag

SEQ ID NO: 316400 - RNA, 19 nt, Artificial Sequence
  Description of Artificial Sequence: Synthetic oligonucleotide
gugaauggggcaccgagca

SEQ ID NO: 316401 - RNA, 19 nt, Artificial Sequence
  Description of Artificial Sequence: Synthetic oligonucleotide
aaagaaggccagggccacc

SEQ ID NO: 316402 - RNA, 19 nt, Artificial Sequence
  Description of Artificial Sequence: Synthetic oligonucleotide
aaagauuacugggcgcagu

SEQ ID NO: 316403 - RNA, 19 nt, Artificial Sequence
  Description of Artificial Sequence: Synthetic oligonucleotide
auucgaucgaaaguugggu

SEQ ID NO: 316404 - RNA, 19 nt, Artificial Sequence
  Description of Artificial Sequence: Synthetic oligonucleotide
uuucaucguaaaacuucac

SEQ ID NO: 316405 - RNA, 19 nt, Artificial Sequence
  Description of Artificial Sequence: Synthetic oligonucleotide
gacucucuugcuccgagga

SEQ ID NO: 316406 - RNA, 19 nt, Artificial Sequence
  Description of Artificial Sequence: Synthetic oligonucleotide
gugauacuggucccagagg

SEQ ID NO: 316407 - RNA, 19 nt, Artificial Sequence
  Description of Artificial Sequence: Synthetic oligonucleotide
gaucacacugacggggucc

SEQ ID NO: 316408 - RNA, 19 nt, Artificial Sequence
  Description of Artificial Sequence: Synthetic oligonucleotide
uugguuguagcggccaggc

SEQ ID NO: 316409 - RNA, 19 nt, Artificial Sequence
  Description of Artificial Sequence: Synthetic oligonucleotide
cucgaacauguuaacacca

SEQ ID NO: 316410 - RNA, 19 nt, Artificial Sequence
  Description of Artificial Sequence: Synthetic oligonucleotide
agaggacucucuugcuccg

SEQ ID NO: 316411 - RNA, 19 nt, Artificial Sequence
  Description of Artificial Sequence: Synthetic oligonucleotide
ccauacaacacgauccggc

SEQ ID NO: 316412 - RNA, 19 nt, Artificial Sequence
  Description of Artificial Sequence: Synthetic oligonucleotide
gaggggucacgccauauga

SEQ ID NO: 316413 - RNA, 19 nt, Artificial Sequence
  Description of Artificial Sequence: Synthetic oligonucleotide
uccauacaacacgauccgg

SEQ ID NO: 316414 - RNA, 19 nt, Artificial Sequence
  Description of Artificial Sequence: Synthetic oligonucleotide
gauguagcuaggacucaag

SEQ ID NO: 316415 - RNA, 19 nt, Artificial Sequence
  Description of Artificial Sequence: Synthetic oligonucleotide
uccgcaaguugucccuggg

SEQ ID NO: 316416 - RNA, 19 nt, Artificial Sequence
  Description of Artificial Sequence: Synthetic oligonucleotide
gcuguguaagcuguggacg

SEQ ID NO: 316417 - RNA, 19 nt, Artificial Sequence
  Description of Artificial Sequence: Synthetic oligonucleotide
caagaaccuuggaguaucg

SEQ ID NO: 316418 - RNA, 19 nt, Artificial Sequence
  Description of Artificial Sequence: Synthetic oligonucleotide
auuucuucgcuuggucagg

SEQ ID NO: 316419 - RNA, 19 nt, Artificial Sequence
  Description of Artificial Sequence: Synthetic oligonucleotide
acacugacgggguccuugg

SEQ ID NO: 316420 - RNA, 19 nt, Artificial Sequence
  Description of Artificial Sequence: Synthetic oligonucleotide
ugcacucaacugacaaaca

SEQ ID NO: 316421 - RNA, 19 nt, Artificial Sequence
  Description of Artificial Sequence: Synthetic oligonucleotide
uaacaauuguuggcauucc

SEQ ID NO: 316422 - RNA, 19 nt, Artificial Sequence
  Description of Artificial Sequence: Synthetic oligonucleotide
ggagaacacacuaacccag

SEQ ID NO: 316423 - RNA, 19 nt, Artificial Sequence
  Description of Artificial Sequence: Synthetic oligonucleotide
cuugcucgaacauguuaac

SEQ ID NO: 316424 - RNA, 19 nt, Artificial Sequence
  Description of Artificial Sequence: Synthetic oligonucleotide
ucguucagagcugggaugu

SEQ ID NO: 316425 - RNA, 19 nt, Artificial Sequence
  Description of Artificial Sequence: Synthetic oligonucleotide
gauucgccagggcaaacuc

SEQ ID NO: 316426 - RNA, 19 nt, Artificial Sequence
  Description of Artificial Sequence: Synthetic oligonucleotide
uaggcaccucccaggaugc

SEQ ID NO: 316427 - RNA, 19 nt, Artificial Sequence
  Description of Artificial Sequence: Synthetic oligonucleotide
ggaucugauaggcucgcag

SEQ ID NO: 316428 - RNA, 19 nt, Artificial Sequence
  Description of Artificial Sequence: Synthetic oligonucleotide
cuccgaggaaggcaaagac

SEQ ID NO: 316429 - RNA, 19 nt, Artificial Sequence
  Description of Artificial Sequence: Synthetic oligonucleotide
auggugaaaucaagacccc

SEQ ID NO: 316430 - RNA, 19 nt, Artificial Sequence
  Description of Artificial Sequence: Synthetic oligonucleotide
uccgaggagggguggaaug

SEQ ID NO: 316431 - RNA, 19 nt, Artificial Sequence
  Description of Artificial Sequence: Synthetic oligonucleotide
gaaggccacuucaauguug

SEQ ID NO: 316432 - RNA, 19 nt, Artificial Sequence
  Description of Artificial Sequence: Synthetic oligonucleotide
agcacgugaauggggcacc

SEQ ID NO: 316433 - RNA, 19 nt, Artificial Sequence
  Description of Artificial Sequence: Synthetic oligonucleotide
guggaaguaugcucggcac

SEQ ID NO: 316434 - RNA, 19 nt, Artificial Sequence
  Description of Artificial Sequence: Synthetic oligonucleotide
ccagucuaaaggaucauuc

SEQ ID NO: 316435 - RNA, 19 nt, Artificial Sequence
  Description of Artificial Sequence: Synthetic oligonucleotide
cucguucagagcugggaug

SEQ ID NO: 316436 - RNA, 19 nt, Artificial Sequence
  Description of Artificial Sequence: Synthetic oligonucleotide
gcucgaacauguuaacacc

SEQ ID NO: 316437 - RNA, 19 nt, Artificial Sequence
  Description of Artificial Sequence: Synthetic oligonucleotide
auaaagcgaaggcuugcau

SEQ ID NO: 316438 - RNA, 19 nt, Artificial Sequence
  Description of Artificial Sequence: Synthetic oligonucleotide
cuuuauguagaaagugugu

SEQ ID NO: 316439 - RNA, 19 nt, Artificial Sequence
  Description of Artificial Sequence: Synthetic oligonucleotide
guugugauacuggucccag

SEQ ID NO: 316440 - RNA, 19 nt, Artificial Sequence
  Description of Artificial Sequence: Synthetic oligonucleotide
ugcugcaucccgaugcaua

SEQ ID NO: 316441 - RNA, 19 nt, Artificial Sequence
  Description of Artificial Sequence: Synthetic oligonucleotide
cuucggccggcuuuuggcc

SEQ ID NO: 316442 - RNA, 19 nt, Artificial Sequence
  Description of Artificial Sequence: Synthetic oligonucleotide
cacgccauaugauguguac

SEQ ID NO: 316443 - RNA, 19 nt, Artificial Sequence
  Description of Artificial Sequence: Synthetic oligonucleotide
cauacuguguagcaucaaa

SEQ ID NO: 316444 - RNA, 19 nt, Artificial Sequence
  Description of Artificial Sequence: Synthetic oligonucleotide
auagccuguaacaagcauu

SEQ ID NO: 316445 - RNA, 19 nt, Artificial Sequence
  Description of Artificial Sequence: Synthetic oligonucleotide
uugcucgaacauguuaaca

SEQ ID NO: 316446 - RNA, 19 nt, Artificial Sequence
  Description of Artificial Sequence: Synthetic oligonucleotide
acauggucgccauuccagu

SEQ ID NO: 316447 - RNA, 19 nt, Artificial Sequence
  Description of Artificial Sequence: Synthetic oligonucleotide
gacucccaugccauugagg

SEQ ID NO: 316448 - RNA, 19 nt, Artificial Sequence
  Description of Artificial Sequence: Synthetic oligonucleotide
ugauucgccagggcaaacu

SEQ ID NO: 316449 - RNA, 19 nt, Artificial Sequence
  Description of Artificial Sequence: Synthetic oligonucleotide
guagcggccaggcaugauc

SEQ ID NO: 316450 - RNA, 19 nt, Artificial Sequence
  Description of Artificial Sequence: Synthetic oligonucleotide
aggacucucuugcuccgag

SEQ ID NO: 316451 - RNA, 19 nt, Artificial Sequence
  Description of Artificial Sequence: Synthetic oligonucleotide
aucccgaugcauaauacau

SEQ ID NO: 316452 - RNA, 19 nt, Artificial Sequence
  Description of Artificial Sequence: Synthetic oligonucleotide
ucaagcucgccugugguuu

SEQ ID NO: 316453 - RNA, 19 nt, Artificial Sequence
  Description of Artificial Sequence: Synthetic oligonucleotide
gccaaaagcaauccuucug

SEQ ID NO: 316454 - RNA, 19 nt, Artificial Sequence
  Description of Artificial Sequence: Synthetic oligonucleotide
accaugagcaaagugccau

SEQ ID NO: 316455 - RNA, 19 nt, Artificial Sequence
  Description of Artificial Sequence: Synthetic oligonucleotide
aagcgaaggcuugcauuuc

SEQ ID NO: 316456 - RNA, 19 nt, Artificial Sequence
  Description of Artificial Sequence: Synthetic oligonucleotide
auaaagccccaaaauggga

SEQ ID NO: 316457 - RNA, 19 nt, Artificial Sequence
  Description of Artificial Sequence: Synthetic oligonucleotide
cuggagauggggucccuug

SEQ ID NO: 316458 - RNA, 19 nt, Artificial Sequence
  Description of Artificial Sequence: Synthetic oligonucleotide
ggacgcuuugcccugggcc

SEQ ID NO: 316459 - RNA, 19 nt, Artificial Sequence
  Description of Artificial Sequence: Synthetic oligonucleotide
gguuuguagcugcugagga

SEQ ID NO: 316460 - RNA, 19 nt, Artificial Sequence
  Description of Artificial Sequence: Synthetic oligonucleotide
uggggucccuuggaaauag

SEQ ID NO: 316461 - RNA, 19 nt, Artificial Sequence
  Description of Artificial Sequence: Synthetic oligonucleotide
ucgaugaaggugguuuccu

SEQ ID NO: 316462 - RNA, 19 nt, Artificial Sequence
  Description of Artificial Sequence: Synthetic oligonucleotide
ucucuuguuuuaagaccuc

SEQ ID NO: 316463 - RNA, 19 nt, Artificial Sequence
  Description of Artificial Sequence: Synthetic oligonucleotide
ugugguaaauagggccgcc

SEQ ID NO: 316464 - RNA, 19 nt, Artificial Sequence
  Description of Artificial Sequence: Synthetic oligonucleotide
cuugguuguagcggccagg

SEQ ID NO: 316465 - RNA, 19 nt, Artificial Sequence
  Description of Artificial Sequence: Synthetic oligonucleotide
auccgcaaguugucccugg

SEQ ID NO: 316466 - RNA, 19 nt, Artificial Sequence
  Description of Artificial Sequence: Synthetic oligonucleotide
cucaacugacaaacacaac

SEQ ID NO: 316467 - RNA, 19 nt, Artificial Sequence
  Description of Artificial Sequence: Synthetic oligonucleotide
aagaaccuuggaguaucga

SEQ ID NO: 316468 - RNA, 19 nt, Artificial Sequence
  Description of Artificial Sequence: Synthetic oligonucleotide
ugagcaccuccugucaaga

SEQ ID NO: 316469 - RNA, 19 nt, Artificial Sequence
  Description of Artificial Sequence: Synthetic oligonucleotide
gguagccugaccaaggcca

SEQ ID NO: 316470 - RNA, 19 nt, Artificial Sequence
  Description of Artificial Sequence: Synthetic oligonucleotide
agguuuugggucucccaga

SEQ ID NO: 316471 - RNA, 19 nt, Artificial Sequence
  Description of Artificial Sequence: Synthetic oligonucleotide
gugaaaucaagaccccaaa

SEQ ID NO: 316472 - RNA, 19 nt, Artificial Sequence
  Description of Artificial Sequence: Synthetic oligonucleotide
caucccgaugcauaauaca

SEQ ID NO: 316473 - RNA, 19 nt, Artificial Sequence
  Description of Artificial Sequence: Synthetic oligonucleotide
gucucuuguuuuaagaccu

SEQ ID NO: 316474 - RNA, 19 nt, Artificial Sequence
  Description of Artificial Sequence: Synthetic oligonucleotide
cacucagucaggucgaugu

SEQ ID NO: 316475 - RNA, 19 nt, Artificial Sequence
  Description of Artificial Sequence: Synthetic oligonucleotide
ucauaacagaaguguugua

SEQ ID NO: 316476 - RNA, 19 nt, Artificial Sequence
  Description of Artificial Sequence: Synthetic oligonucleotide
ggggucacgccauaugaug

SEQ ID NO: 316477 - RNA, 19 nt, Artificial Sequence
  Description of Artificial Sequence: Synthetic oligonucleotide
ucuccauucugugguaaau

SEQ ID NO: 316478 - RNA, 19 nt, Artificial Sequence
  Description of Artificial Sequence: Synthetic oligonucleotide
uuucuucgcuuggucagga

SEQ ID NO: 316479 - RNA, 19 nt, Artificial Sequence
  Description of Artificial Sequence: Synthetic oligonucleotide
cucauaacagaaguguugu

SEQ ID NO: 316480 - RNA, 19 nt, Artificial Sequence
  Description of Artificial Sequence: Synthetic oligonucleotide
uccccacaauaaauauaga

SEQ ID NO: 316481 - RNA, 19 nt, Artificial Sequence
  Description of Artificial Sequence: Synthetic oligonucleotide
ggcuuauccacaauucuuc

SEQ ID NO: 316482 - RNA, 19 nt, Artificial Sequence
  Description of Artificial Sequence: Synthetic oligonucleotide
ccuuaugaugucacugcag

SEQ ID NO: 316483 - RNA, 19 nt, Artificial Sequence
  Description of Artificial Sequence: Synthetic oligonucleotide
ucccgacagcccuuccagg

SEQ ID NO: 316484 - RNA, 19 nt, Artificial Sequence
  Description of Artificial Sequence: Synthetic oligonucleotide
caagaccccaaauuacaaa

SEQ ID NO: 316485 - RNA, 19 nt, Artificial Sequence
  Description of Artificial Sequence: Synthetic oligonucleotide
ugaucacacugacgggguc

SEQ ID NO: 316486 - RNA, 19 nt, Artificial Sequence
  Description of Artificial Sequence: Synthetic oligonucleotide
guaagcuguggacgcuuug

SEQ ID NO: 316487 - RNA, 19 nt, Artificial Sequence
  Description of Artificial Sequence: Synthetic oligonucleotide
caaagauuacugggcgcag

SEQ ID NO: 316488 - RNA, 19 nt, Artificial Sequence
  Description of Artificial Sequence: Synthetic oligonucleotide
ugccgguucccugaauggc

SEQ ID NO: 316489 - RNA, 19 nt, Artificial Sequence
  Description of Artificial Sequence: Synthetic oligonucleotide
agagaugccuggggagaac

SEQ ID NO: 316490 - RNA, 19 nt, Artificial Sequence
  Description of Artificial Sequence: Synthetic oligonucleotide
gaucgaaaguuggguaaca

SEQ ID NO: 316491 - RNA, 19 nt, Artificial Sequence
  Description of Artificial Sequence: Synthetic oligonucleotide
gcacaugcccuucaguuca

SEQ ID NO: 316492 - RNA, 19 nt, Artificial Sequence
  Description of Artificial Sequence: Synthetic oligonucleotide
gagugcauccagaagccaa

SEQ ID NO: 316493 - RNA, 19 nt, Artificial Sequence
  Description of Artificial Sequence: Synthetic oligonucleotide
guaucgaugaaggugguuu

SEQ ID NO: 316494 - RNA, 19 nt, Artificial Sequence
  Description of Artificial Sequence: Synthetic oligonucleotide
cgauucgaucgaaaguugg

SEQ ID NO: 316495 - RNA, 19 nt, Artificial Sequence
  Description of Artificial Sequence: Synthetic oligonucleotide
cgaugcugcaucccgaugc

SEQ ID NO: 316496 - RNA, 19 nt, Artificial Sequence
  Description of Artificial Sequence: Synthetic oligonucleotide
guaccacaaagaaggccag

SEQ ID NO: 316497 - RNA, 19 nt, Artificial Sequence
  Description of Artificial Sequence: Synthetic oligonucleotide
gccucaagaaccuuggagu

SEQ ID NO: 316498 - RNA, 19 nt, Artificial Sequence
  Description of Artificial Sequence: Synthetic oligonucleotide
ucacgccauaugaugugua

SEQ ID NO: 316499 - RNA, 19 nt, Artificial Sequence
  Description of Artificial Sequence: Synthetic oligonucleotide
uucggccggcuuuuggccu

SEQ ID NO: 316500 - RNA, 19 nt, Artificial Sequence
  Description of Artificial Sequence: Synthetic oligonucleotide
ggugggucugcuguguaag

SEQ ID NO: 316501 - RNA, 19 nt, Artificial Sequence
  Description of Artificial Sequence: Synthetic oligonucleotide
ggucgauguagcuaggacu

SEQ ID NO: 316502 - RNA, 19 nt, Artificial Sequence
  Description of Artificial Sequence: Synthetic oligonucleotide
ccuuggaguaucgaugaag

SEQ ID NO: 316503 - RNA, 19 nt, Artificial Sequence
  Description of Artificial Sequence: Synthetic oligonucleotide
uggcgaugcugcaucccga

SEQ ID NO: 316504 - RNA, 19 nt, Artificial Sequence
  Description of Artificial Sequence: Synthetic oligonucleotide
ggaaguaugcucggcacca

SEQ ID NO: 316505 - RNA, 19 nt, Artificial Sequence
  Description of Artificial Sequence: Synthetic oligonucleotide
acgccauaugauguguacu

SEQ ID NO: 316506 - RNA, 19 nt, Artificial Sequence
  Description of Artificial Sequence: Synthetic oligonucleotide
ccaucagagugguccaagg

SEQ ID NO: 316507 - RNA, 19 nt, Artificial Sequence
  Description of Artificial Sequence: Synthetic oligonucleotide
uguggacgcuuugcccugg

SEQ ID NO: 316508 - RNA, 19 nt, Artificial Sequence
  Description of Artificial Sequence: Synthetic oligonucleotide
ggucacgccauaugaugug

SEQ ID NO: 316509 - RNA, 19 nt, Artificial Sequence
  Description of Artificial Sequence: Synthetic oligonucleotide
aguaugcucggcaccauuu

SEQ ID NO: 316510 - RNA, 19 nt, Artificial Sequence
  Description of Artificial Sequence: Synthetic oligonucleotide
ccugaaauugguguggaca

SEQ ID NO: 316511 - RNA, 19 nt, Artificial Sequence
  Description of Artificial Sequence: Synthetic oligonucleotide
caugggaucugacuccuua

SEQ ID NO: 316512 - RNA, 19 nt, Artificial Sequence
  Description of Artificial Sequence: Synthetic oligonucleotide
gccaccgugaucaugaugu

SEQ ID NO: 316513 - RNA, 19 nt, Artificial Sequence
  Description of Artificial Sequence: Synthetic oligonucleotide
uggacgcuuugcccugggc

SEQ ID NO: 316514 - RNA, 19 nt, Artificial Sequence
  Description of Artificial Sequence: Synthetic oligonucleotide
agccaccgugaucaugaug

SEQ ID NO: 316515 - RNA, 19 nt, Artificial Sequence
  Description of Artificial Sequence: Synthetic oligonucleotide
augauucgccagggcaaac

SEQ ID NO: 316516 - RNA, 19 nt, Artificial Sequence
  Description of Artificial Sequence: Synthetic oligonucleotide
agugcauccagaagccaaa

SEQ ID NO: 316517 - RNA, 19 nt, Artificial Sequence
  Description of Artificial Sequence: Synthetic oligonucleotide
cgaaaguuggguaacacua

SEQ ID NO: 316518 - RNA, 19 nt, Artificial Sequence
  Description of Artificial Sequence: Synthetic oligonucleotide
ccuugcucgaacauguuaa

SEQ ID NO: 316519 - RNA, 19 nt, Artificial Sequence
  Description of Artificial Sequence: Synthetic oligonucleotide
aaucuccauacaacacgau

SEQ ID NO: 316520 - RNA, 19 nt, Artificial Sequence
  Description of Artificial Sequence: Synthetic oligonucleotide
ucccagaucugugcacaug

SEQ ID NO: 316521 - RNA, 19 nt, Artificial Sequence
  Description of Artificial Sequence: Synthetic oligonucleotide
uggucgccauuccagucua

SEQ ID NO: 316522 - RNA, 19 nt, Artificial Sequence
  Description of Artificial Sequence: Synthetic oligonucleotide
gguuguagcggccaggcau

SEQ ID NO: 316523 - RNA, 19 nt, Artificial Sequence
  Description of Artificial Sequence: Synthetic oligonucleotide
ccugucaagagcccagcac

SEQ ID NO: 316524 - RNA, 19 nt, Artificial Sequence
  Description of Artificial Sequence: Synthetic oligonucleotide
gccuguaacaagcauuucu

SEQ ID NO: 316525 - RNA, 19 nt, Artificial Sequence
  Description of Artificial Sequence: Synthetic oligonucleotide
gcgcagucucauucaaagg

SEQ ID NO: 316526 - RNA, 19 nt, Artificial Sequence
  Description of Artificial Sequence: Synthetic oligonucleotide
cauucaaaggcuguggcuu

SEQ ID NO: 316527 - RNA, 19 nt, Artificial Sequence
  Description of Artificial Sequence: Synthetic oligonucleotide
ggacucucuugcuccgagg

SEQ ID NO: 316528 - RNA, 19 nt, Artificial Sequence
  Description of Artificial Sequence: Synthetic oligonucleotide
ggcaguugauacuuauaaa

SEQ ID NO: 316529 - RNA, 19 nt, Artificial Sequence
  Description of Artificial Sequence: Synthetic oligonucleotide
caagcucgccugugguuug

SEQ ID NO: 316530 - RNA, 19 nt, Artificial Sequence
  Description of Artificial Sequence: Synthetic oligonucleotide
ggaggggucacgccauaug

SEQ ID NO: 316531 - RNA, 19 nt, Artificial Sequence
  Description of Artificial Sequence: Synthetic oligonucleotide
ggucccuuggaaauaggca

SEQ ID NO: 316532 - RNA, 19 nt, Artificial Sequence
  Description of Artificial Sequence: Synthetic oligonucleotide
cauaaaggccaucgcugaa

SEQ ID NO: 316533 - RNA, 19 nt, Artificial Sequence
  Description of Artificial Sequence: Synthetic oligonucleotide
cauuaacaauuguuggcau

SEQ ID NO: 316534 - RNA, 19 nt, Artificial Sequence
  Description of Artificial Sequence: Synthetic oligonucleotide
cuaggacucaagcucgccu

SEQ ID NO: 316535 - RNA, 19 nt, Artificial Sequence
  Description of Artificial Sequence: Synthetic oligonucleotide
ccgccacucaggcuuaucc

SEQ ID NO: 316536 - RNA, 19 nt, Artificial Sequence
  Description of Artificial Sequence: Synthetic oligonucleotide
agccuguaacaagcauuuc

SEQ ID NO: 316537 - RNA, 19 nt, Artificial Sequence
  Description of Artificial Sequence: Synthetic oligonucleotide
gacucuccccacaauaaau

SEQ ID NO: 316538 - RNA, 19 nt, Artificial Sequence
  Description of Artificial Sequence: Synthetic oligonucleotide
aguugucccugggaaagua

SEQ ID NO: 316539 - RNA, 19 nt, Artificial Sequence
  Description of Artificial Sequence: Synthetic oligonucleotide
augacgagggaaaggccau

SEQ ID NO: 316540 - RNA, 19 nt, Artificial Sequence
  Description of Artificial Sequence: Synthetic oligonucleotide
guggacgcuuugcccuggg

SEQ ID NO: 316541 - RNA, 19 nt, Artificial Sequence
  Description of Artificial Sequence: Synthetic oligonucleotide
uugcuccgaggaggggugg

SEQ ID NO: 316542 - RNA, 19 nt, Artificial Sequence
  Description of Artificial Sequence: Synthetic oligonucleotide
uccaagcaauuggaaucuc

SEQ ID NO: 316543 - RNA, 19 nt, Artificial Sequence
  Description of Artificial Sequence: Synthetic oligonucleotide
ggcgauucgaucgaaaguu

SEQ ID NO: 316544 - RNA, 19 nt, Artificial Sequence
  Description of Artificial Sequence: Synthetic oligonucleotide
aguaucgaugaaggugguu

SEQ ID NO: 316545 - RNA, 19 nt, Artificial Sequence
  Description of Artificial Sequence: Synthetic oligonucleotide
agccccaaaaugggaacau

SEQ ID NO: 316546 - RNA, 19 nt, Artificial Sequence
  Description of Artificial Sequence: Synthetic oligonucleotide
ggaucugacuccuuaugau

SEQ ID NO: 316547 - RNA, 19 nt, Artificial Sequence
  Description of Artificial Sequence: Synthetic oligonucleotide
guaaggccacauguaggga

SEQ ID NO: 316548 - RNA, 19 nt, Artificial Sequence
  Description of Artificial Sequence: Synthetic oligonucleotide
cgugaauggggcaccgagc

SEQ ID NO: 316549 - RNA, 19 nt, Artificial Sequence
  Description of Artificial Sequence: Synthetic oligonucleotide
gguaaauagggccgccacu

SEQ ID NO: 316550 - RNA, 19 nt, Artificial Sequence
  Description of Artificial Sequence: Synthetic oligonucleotide
cccgaugcauaauacaugu

SEQ ID NO: 316551 - RNA, 19 nt, Artificial Sequence
  Description of Artificial Sequence: Synthetic oligonucleotide
accuuggaguaucgaugaa

SEQ ID NO: 316552 - RNA, 19 nt, Artificial Sequence
  Description of Artificial Sequence: Synthetic oligonucleotide
gcuacugagcaccuccugu

SEQ ID NO: 316553 - RNA, 19 nt, Artificial Sequence
  Description of Artificial Sequence: Synthetic oligonucleotide
caugauucgccagggcaaa

SEQ ID NO: 316554 - RNA, 19 nt, Artificial Sequence
  Description of Artificial Sequence: Synthetic oligonucleotide
cauccgcaaguugucccug

SEQ ID NO: 316555 - RNA, 19 nt, Artificial Sequence
  Description of Artificial Sequence: Synthetic oligonucleotide
uagcggagguugugauacu

SEQ ID NO: 316556 - RNA, 19 nt, Artificial Sequence
  Description of Artificial Sequence: Synthetic oligonucleotide
gguugugauacugguccca

SEQ ID NO: 316557 - RNA, 19 nt, Artificial Sequence
  Description of Artificial Sequence: Synthetic oligonucleotide
aagcucgccugugguuugu

SEQ ID NO: 316558 - RNA, 19 nt, Artificial Sequence
  Description of Artificial Sequence: Synthetic oligonucleotide
ugagggcgauucgaucgaa

SEQ ID NO: 316559 - RNA, 19 nt, Artificial Sequence
  Description of Artificial Sequence: Synthetic oligonucleotide
gcaugaucccuccaggaau

SEQ ID NO: 316560 - RNA, 19 nt, Artificial Sequence
  Description of Artificial Sequence: Synthetic oligonucleotide
gcgauucgaucgaaaguug

SEQ ID NO: 316561 - RNA, 19 nt, Artificial Sequence
  Description of Artificial Sequence: Synthetic oligonucleotide
ccgugaucaugaugugacc

SEQ ID NO: 316562 - RNA, 19 nt, Artificial Sequence
  Description of Artificial Sequence: Synthetic oligonucleotide
uccgcuucggccggcuuuu

SEQ ID NO: 316563 - RNA, 19 nt, Artificial Sequence
  Description of Artificial Sequence: Synthetic oligonucleotide
aggggucacgccauaugau

SEQ ID NO: 316564 - RNA, 19 nt, Artificial Sequence
  Description of Artificial Sequence: Synthetic oligonucleotide
ggcgcugccgguucccuga

SEQ ID NO: 316565 - RNA, 19 nt, Artificial Sequence
  Description of Artificial Sequence: Synthetic oligonucleotide
ucggccggcuuuuggccuu

SEQ ID NO: 316566 - RNA, 19 nt, Artificial Sequence
  Description of Artificial Sequence: Synthetic oligonucleotide
ugacgagggaaaggccauu

SEQ ID NO: 316567 - RNA, 19 nt, Artificial Sequence
  Description of Artificial Sequence: Synthetic oligonucleotide
gaggacucucuugcuccga

SEQ ID NO: 316568 - RNA, 19 nt, Artificial Sequence
  Description of Artificial Sequence: Synthetic oligonucleotide
gagggcgauucgaucgaaa

SEQ ID NO: 316569 - RNA, 19 nt, Artificial Sequence
  Description of Artificial Sequence: Synthetic oligonucleotide
gguagcggagguugugaua

SEQ ID NO: 316570 - RNA, 19 nt, Artificial Sequence
  Description of Artificial Sequence: Synthetic oligonucleotide
uccuuucaggaggggccaa

SEQ ID NO: 316571 - RNA, 19 nt, Artificial Sequence
  Description of Artificial Sequence: Synthetic oligonucleotide
gucacgccauaugaugugu

SEQ ID NO: 316572 - RNA, 19 nt, Artificial Sequence
  Description of Artificial Sequence: Synthetic oligonucleotide
uguagcggccaggcaugau

SEQ ID NO: 316573 - RNA, 19 nt, Artificial Sequence
  Description of Artificial Sequence: Synthetic oligonucleotide
gggcgauucgaucgaaagu

SEQ ID NO: 316574 - RNA, 19 nt, Artificial Sequence
  Description of Artificial Sequence: Synthetic oligonucleotide
gaugcccuguguggccauc

SEQ ID NO: 316575 - RNA, 19 nt, Artificial Sequence
  Description of Artificial Sequence: Synthetic oligonucleotide
gcacgugaauggggcaccg

SEQ ID NO: 316576 - RNA, 19 nt, Artificial Sequence
  Description of Artificial Sequence: Synthetic oligonucleotide
uacugggcgcagucucauu

SEQ ID NO: 316577 - RNA, 19 nt, Artificial Sequence
  Description of Artificial Sequence: Synthetic oligonucleotide
gccaucgcugaaccccaug

SEQ ID NO: 316578 - RNA, 19 nt, Artificial Sequence
  Description of Artificial Sequence: Synthetic oligonucleotide
gcaauccuucugucuguga

SEQ ID NO: 316579 - RNA, 19 nt, Artificial Sequence
  Description of Artificial Sequence: Synthetic oligonucleotide
ccgaugcauaauacauguc

SEQ ID NO: 316580 - RNA, 19 nt, Artificial Sequence
  Description of Artificial Sequence: Synthetic oligonucleotide
cgaucgaaaguuggguaac

SEQ ID NO: 316581 - RNA, 19 nt, Artificial Sequence
  Description of Artificial Sequence: Synthetic oligonucleotide
cgcaaguugucccugggaa

SEQ ID NO: 316582 - RNA, 19 nt, Artificial Sequence
  Description of Artificial Sequence: Synthetic oligonucleotide
cagagaugccuggggagaa

SEQ ID NO: 316583 - RNA, 19 nt, Artificial Sequence
  Description of Artificial Sequence: Synthetic oligonucleotide
gagggcuacugagcaccuc

SEQ ID NO: 316584 - RNA, 19 nt, Artificial Sequence
  Description of Artificial Sequence: Synthetic oligonucleotide
gcucguucagagcugggau

SEQ ID NO: 316585 - RNA, 19 nt, Artificial Sequence
  Description of Artificial Sequence: Synthetic oligonucleotide
aggucucacuugagggcga

SEQ ID NO: 316586 - RNA, 19 nt, Artificial Sequence
  Description of Artificial Sequence: Synthetic oligonucleotide
gcgaugcugcaucccgaug

SEQ ID NO: 316587 - RNA, 19 nt, Artificial Sequence
  Description of Artificial Sequence: Synthetic oligonucleotide
gggguagcggagguuguga

SEQ ID NO: 316588 - RNA, 19 nt, Artificial Sequence
  Description of Artificial Sequence: Synthetic oligonucleotide
cagucaggucgauguagcu

SEQ ID NO: 316589 - RNA, 19 nt, Artificial Sequence
  Description of Artificial Sequence: Synthetic oligonucleotide
gggucacgccauaugaugu

SEQ ID NO: 316590 - RNA, 19 nt, Artificial Sequence
  Description of Artificial Sequence: Synthetic oligonucleotide
gaguaucgaugaagguggu

SEQ ID NO: 316591 - RNA, 19 nt, Artificial Sequence
  Description of Artificial Sequence: Synthetic oligonucleotide
ugggcgcugccgguucccu

SEQ ID NO: 316592 - RNA, 19 nt, Artificial Sequence
  Description of Artificial Sequence: Synthetic oligonucleotide
ccauaacacugaggaguag

SEQ ID NO: 316593 - RNA, 19 nt, Artificial Sequence
  Description of Artificial Sequence: Synthetic oligonucleotide
cucaagcucgccugugguu

SEQ ID NO: 316594 - RNA, 19 nt, Artificial Sequence
  Description of Artificial Sequence: Synthetic oligonucleotide
cccaaaaugggaacauuuu

SEQ ID NO: 316595 - RNA, 19 nt, Artificial Sequence
  Description of Artificial Sequence: Synthetic oligonucleotide
gucaagagcccagcacagu

SEQ ID NO: 316596 - RNA, 19 nt, Artificial Sequence
  Description of Artificial Sequence: Synthetic oligonucleotide
ggcccaugacaagugugga

SEQ ID NO: 316597 - RNA, 19 nt, Artificial Sequence
  Description of Artificial Sequence: Synthetic oligonucleotide
ccccaaaaugggaacauuu

SEQ ID NO: 316598 - RNA, 19 nt, Artificial Sequence
  Description of Artificial Sequence: Synthetic oligonucleotide
ccauggccuugcucgaaca

SEQ ID NO: 316599 - RNA, 19 nt, Artificial Sequence
  Description of Artificial Sequence: Synthetic oligonucleotide
gacagcccuuccaggcucu

SEQ ID NO: 316600 - RNA, 19 nt, Artificial Sequence
  Description of Artificial Sequence: Synthetic oligonucleotide
guguaagcuguggacgcuu

SEQ ID NO: 316601 - RNA, 19 nt, Artificial Sequence
  Description of Artificial Sequence: Synthetic oligonucleotide
cacgugaauggggcaccga

SEQ ID NO: 316602 - RNA, 19 nt, Artificial Sequence
  Description of Artificial Sequence: Synthetic oligonucleotide
guagccugaccaaggccau

SEQ ID NO: 316603 - RNA, 19 nt, Artificial Sequence
  Description of Artificial Sequence: Synthetic oligonucleotide
cucccaugccauugaggau

SEQ ID NO: 316604 - RNA, 19 nt, Artificial Sequence
  Description of Artificial Sequence: Synthetic oligonucleotide
ggcgaugcugcaucccgau

SEQ ID NO: 316605 - RNA, 19 nt, Artificial Sequence
  Description of Artificial Sequence: Synthetic oligonucleotide
ggguagcggagguugugau

SEQ ID NO: 316606 - RNA, 19 nt, Artificial Sequence
  Description of Artificial Sequence: Synthetic oligonucleotide
ccgaggagggguggaauga

SEQ ID NO: 316607 - RNA, 19 nt, Artificial Sequence
  Description of Artificial Sequence: Synthetic oligonucleotide
agcucgccugugguuugua

SEQ ID NO: 316608 - RNA, 19 nt, Artificial Sequence
  Description of Artificial Sequence: Synthetic oligonucleotide
cggagguugugauacuggu

SEQ ID NO: 316609 - RNA, 19 nt, Artificial Sequence
  Description of Artificial Sequence: Synthetic oligonucleotide
gggccaagccagcuccacu

SEQ ID NO: 316610 - RNA, 19 nt, Artificial Sequence
  Description of Artificial Sequence: Synthetic oligonucleotide
cuccgcuucggccggcuuu

SEQ ID NO: 316611 - RNA, 19 nt, Artificial Sequence
  Description of Artificial Sequence: Synthetic oligonucleotide
cgauguagcuaggacucaa

SEQ ID NO: 316612 - RNA, 19 nt, Artificial Sequence
  Description of Artificial Sequence: Synthetic oligonucleotide
gggcgcagucucauucaaa

SEQ ID NO: 316613 - RNA, 19 nt, Artificial Sequence
  Description of Artificial Sequence: Synthetic oligonucleotide
ggucucacuugagggcgau

SEQ ID NO: 316614 - RNA, 19 nt, Artificial Sequence
  Description of Artificial Sequence: Synthetic oligonucleotide
gccgccacucaggcuuauc

SEQ ID NO: 316615 - RNA, 19 nt, Artificial Sequence
  Description of Artificial Sequence: Synthetic oligonucleotide
gucucacuugagggcgauu

SEQ ID NO: 316616 - RNA, 19 nt, Artificial Sequence
  Description of Artificial Sequence: Synthetic oligonucleotide
gccccaaaaugggaacauu

SEQ ID NO: 316617 - RNA, 19 nt, Artificial Sequence
  Description of Artificial Sequence: Synthetic oligonucleotide
ggccggcuuuuggccuugc

SEQ ID NO: 316618 - RNA, 19 nt, Artificial Sequence
  Description of Artificial Sequence: Synthetic oligonucleotide
gcgcugccgguucccugaa

SEQ ID NO: 316619 - RNA, 19 nt, Artificial Sequence
  Description of Artificial Sequence: Synthetic oligonucleotide
ggccuugcucgaacauguu

SEQ ID NO: 316620 - RNA, 19 nt, Artificial Sequence
  Description of Artificial Sequence: Synthetic oligonucleotide
gggccgccacucaggcuua

SEQ ID NO: 316621 - RNA, 19 nt, Artificial Sequence
  Description of Artificial Sequence: Synthetic oligonucleotide
ccgcuucggccggcuuuug

SEQ ID NO: 316622 - RNA, 19 nt, Artificial Sequence
  Description of Artificial Sequence: Synthetic oligonucleotide
ggccgccacucaggcuuau

SEQ ID NO: 316623 - RNA, 19 nt, Artificial Sequence
  Description of Artificial Sequence: Synthetic oligonucleotide
acaagcuacauuuaaaugc

SEQ ID NO: 316624 - RNA, 19 nt, Artificial Sequence
  Description of Artificial Sequence: Synthetic oligonucleotide
aauuucacaaaauuaugac

SEQ ID NO: 316625 - RNA, 19 nt, Artificial Sequence
  Description of Artificial Sequence: Synthetic oligonucleotide
aaaauuaugacguugcaga

SEQ ID NO: 316626 - RNA, 19 nt, Artificial Sequence
  Description of Artificial Sequence: Synthetic oligonucleotide
ugcaacuugaccaaaaggg

SEQ ID NO: 316627 - RNA, 19 nt, Artificial Sequence
  Description of Artificial Sequence: Synthetic oligonucleotide
ucuaauauuuauuuguuca

SEQ ID NO: 316628 - RNA, 19 nt, Artificial Sequence
  Description of Artificial Sequence: Synthetic oligonucleotide
aauauagcaguccuaguag

SEQ ID NO: 316629 - RNA, 19 nt, Artificial Sequence
  Description of Artificial Sequence: Synthetic oligonucleotide
uguuuaauacacaaugcag

SEQ ID NO: 316630 - RNA, 19 nt, Artificial Sequence
  Description of Artificial Sequence: Synthetic oligonucleotide
uauugucuaaauuagcaag

SEQ ID NO: 316631 - RNA, 19 nt, Artificial Sequence
  Description of Artificial Sequence: Synthetic oligonucleotide
ucuuuaaagaauuuagcca

SEQ ID NO: 316632 - RNA, 19 nt, Artificial Sequence
  Description of Artificial Sequence: Synthetic oligonucleotide
uuuaacauacaugaugccg

SEQ ID NO: 316633 - RNA, 19 nt, Artificial Sequence
  Description of Artificial Sequence: Synthetic oligonucleotide
uguaaugaucacauaacag

SEQ ID NO: 316634 - RNA, 19 nt, Artificial Sequence
  Description of Artificial Sequence: Synthetic oligonucleotide
aaugaauaaaccuuccgau

SEQ ID NO: 316635 - RNA, 19 nt, Artificial Sequence
  Description of Artificial Sequence: Synthetic oligonucleotide
auuaccugguguuuaauac

SEQ ID NO: 316636 - RNA, 19 nt, Artificial Sequence
  Description of Artificial Sequence: Synthetic oligonucleotide
aaaaugagcaaaauuagca

SEQ ID NO: 316637 - RNA, 19 nt, Artificial Sequence
  Description of Artificial Sequence: Synthetic oligonucleotide
aaaccuccaaaauuacucg

SEQ ID NO: 316638 - RNA, 19 nt, Artificial Sequence
  Description of Artificial Sequence: Synthetic oligonucleotide
aacauuggguucuuguuuc

SEQ ID NO: 316639 - RNA, 19 nt, Artificial Sequence
  Description of Artificial Sequence: Synthetic oligonucleotide
gaagauauugucuaaauua

SEQ ID NO: 316640 - RNA, 19 nt, Artificial Sequence
  Description of Artificial Sequence: Synthetic oligonucleotide
acuacucauuauuuaaggc

SEQ ID NO: 316641 - RNA, 19 nt, Artificial Sequence
  Description of Artificial Sequence: Synthetic oligonucleotide
uuaaaauaggccuuuugca

SEQ ID NO: 316642 - RNA, 19 nt, Artificial Sequence
  Description of Artificial Sequence: Synthetic oligonucleotide
aauuacucgaaccacuaga

SEQ ID NO: 316643 - RNA, 19 nt, Artificial Sequence
  Description of Artificial Sequence: Synthetic oligonucleotide
uguaaggcuauaagaaagg

SEQ ID NO: 316644 - RNA, 19 nt, Artificial Sequence
  Description of Artificial Sequence: Synthetic oligonucleotide
uacugauaugcacaaauag

SEQ ID NO: 316645 - RNA, 19 nt, Artificial Sequence
  Description of Artificial Sequence: Synthetic oligonucleotide
uaaaaggauuacuagacac

SEQ ID NO: 316646 - RNA, 19 nt, Artificial Sequence
  Description of Artificial Sequence: Synthetic oligonucleotide
cuaaacuuaguauugcuac

SEQ ID NO: 316647 - RNA, 19 nt, Artificial Sequence
  Description of Artificial Sequence: Synthetic oligonucleotide
aaaggauuacuagacacuc

SEQ ID NO: 316648 - RNA, 19 nt, Artificial Sequence
  Description of Artificial Sequence: Synthetic oligonucleotide
auaaacuaaacuuaguauu

SEQ ID NO: 316649 - RNA, 19 nt, Artificial Sequence
  Description of Artificial Sequence: Synthetic oligonucleotide
aagacaauuaaaauggaga

SEQ ID NO: 316650 - RNA, 19 nt, Artificial Sequence
  Description of Artificial Sequence: Synthetic oligonucleotide
gccaagaucacucaaaagg

SEQ ID NO: 316651 - RNA, 19 nt, Artificial Sequence
  Description of Artificial Sequence: Synthetic oligonucleotide
aguucguuccaguacagcg

SEQ ID NO: 316652 - RNA, 19 nt, Artificial Sequence
  Description of Artificial Sequence: Synthetic oligonucleotide
ucugcaauaacuuaauauu

SEQ ID NO: 316653 - RNA, 19 nt, Artificial Sequence
  Description of Artificial Sequence: Synthetic oligonucleotide
agccgaagcacccacaggc

SEQ ID NO: 316654 - RNA, 19 nt, Artificial Sequence
  Description of Artificial Sequence: Synthetic oligonucleotide
acugauaugcacaaauagc

SEQ ID NO: 316655 - RNA, 19 nt, Artificial Sequence
  Description of Artificial Sequence: Synthetic oligonucleotide
aaauguuccauagagaguu

SEQ ID NO: 316656 - RNA, 19 nt, Artificial Sequence
  Description of Artificial Sequence: Synthetic oligonucleotide
uugagagcgaccuacaacu

SEQ ID NO: 316657 - RNA, 19 nt, Artificial Sequence
  Description of Artificial Sequence: Synthetic oligonucleotide
uuaagugcagugcuggugc

SEQ ID NO: 316658 - RNA, 19 nt, Artificial Sequence
  Description of Artificial Sequence: Synthetic oligonucleotide
aaauuaugacguugcagag

SEQ ID NO: 316659 - RNA, 19 nt, Artificial Sequence
  Description of Artificial Sequence: Synthetic oligonucleotide
aauagcauauuuucuaaua

SEQ ID NO: 316660 - RNA, 19 nt, Artificial Sequence
  Description of Artificial Sequence: Synthetic oligonucleotide
uauuuaagugcagugcugg

SEQ ID NO: 316661 - RNA, 19 nt, Artificial Sequence
  Description of Artificial Sequence: Synthetic oligonucleotide
ugugggaucugcaauaacu

SEQ ID NO: 316662 - RNA, 19 nt, Artificial Sequence
  Description of Artificial Sequence: Synthetic oligonucleotide
uacucgaaccacuagacug

SEQ ID NO: 316663 - RNA, 19 nt, Artificial Sequence
  Description of Artificial Sequence: Synthetic oligonucleotide
aaggcggagccccaaaugg

SEQ ID NO: 316664 - RNA, 19 nt, Artificial Sequence
  Description of Artificial Sequence: Synthetic oligonucleotide
agcuuuauuccgcagacag

SEQ ID NO: 316665 - RNA, 19 nt, Artificial Sequence
  Description of Artificial Sequence: Synthetic oligonucleotide
agucugagaauucaagauc

SEQ ID NO: 316666 - RNA, 19 nt, Artificial Sequence
  Description of Artificial Sequence: Synthetic oligonucleotide
gauuacuagacacuccagc

SEQ ID NO: 316667 - RNA, 19 nt, Artificial Sequence
  Description of Artificial Sequence: Synthetic oligonucleotide
aacaguucguuccaguaca

SEQ ID NO: 316668 - RNA, 19 nt, Artificial Sequence
  Description of Artificial Sequence: Synthetic oligonucleotide
agaaugaauaaaccuuccg

SEQ ID NO: 316669 - RNA, 19 nt, Artificial Sequence
  Description of Artificial Sequence: Synthetic oligonucleotide
uguugaaacuuuacuaaca

SEQ ID NO: 316670 - RNA, 19 nt, Artificial Sequence
  Description of Artificial Sequence: Synthetic oligonucleotide
cacaaaauuaugacguugc

SEQ ID NO: 316671 - RNA, 19 nt, Artificial Sequence
  Description of Artificial Sequence: Synthetic oligonucleotide
gaaugaauaaaccuuccga

SEQ ID NO: 316672 - RNA, 19 nt, Artificial Sequence
  Description of Artificial Sequence: Synthetic oligonucleotide
auucaagaaugaauaaacc

SEQ ID NO: 316673 - RNA, 19 nt, Artificial Sequence
  Description of Artificial Sequence: Synthetic oligonucleotide
uguuuugcacguauuaccu

SEQ ID NO: 316674 - RNA, 19 nt, Artificial Sequence
  Description of Artificial Sequence: Synthetic oligonucleotide
aaaugugcaaaguuagcaa

SEQ ID NO: 316675 - RNA, 19 nt, Artificial Sequence
  Description of Artificial Sequence: Synthetic oligonucleotide
auuacuagacacuccagca

SEQ ID NO: 316676 - RNA, 19 nt, Artificial Sequence
  Description of Artificial Sequence: Synthetic oligonucleotide
auuaugacguugcagagaa

SEQ ID NO: 316677 - RNA, 19 nt, Artificial Sequence
  Description of Artificial Sequence: Synthetic oligonucleotide
ucacaguuaaugcaugucu

SEQ ID NO: 316678 - RNA, 19 nt, Artificial Sequence
  Description of Artificial Sequence: Synthetic oligonucleotide
ugugcccuuauuuaagugc

SEQ ID NO: 316679 - RNA, 19 nt, Artificial Sequence
  Description of Artificial Sequence: Synthetic oligonucleotide
aacuaaacuuaguauugcu

SEQ ID NO: 316680 - RNA, 19 nt, Artificial Sequence
  Description of Artificial Sequence: Synthetic oligonucleotide
aaggcuauaagaaaggguu

SEQ ID NO: 316681 - RNA, 19 nt, Artificial Sequence
  Description of Artificial Sequence: Synthetic oligonucleotide
auguuuucaacucacuacu

SEQ ID NO: 316682 - RNA, 19 nt, Artificial Sequence
  Description of Artificial Sequence: Synthetic oligonucleotide
aaaccugcaccauugggcu

SEQ ID NO: 316683 - RNA, 19 nt, Artificial Sequence
  Description of Artificial Sequence: Synthetic oligonucleotide
ucacuacucauuauuuaag

SEQ ID NO: 316684 - RNA, 19 nt, Artificial Sequence
  Description of Artificial Sequence: Synthetic oligonucleotide
uuacuaacaguugauguug

SEQ ID NO: 316685 - RNA, 19 nt, Artificial Sequence
  Description of Artificial Sequence: Synthetic oligonucleotide
uaugcauuacuggacgugg

SEQ ID NO: 316686 - RNA, 19 nt, Artificial Sequence
  Description of Artificial Sequence: Synthetic oligonucleotide
uuacaaauacugauaugca

SEQ ID NO: 316687 - RNA, 19 nt, Artificial Sequence
  Description of Artificial Sequence: Synthetic oligonucleotide
uuacuagacacuccagcag

SEQ ID NO: 316688 - RNA, 19 nt, Artificial Sequence
  Description of Artificial Sequence: Synthetic oligonucleotide
aaauuacucgaaccacuag

SEQ ID NO: 316689 - RNA, 19 nt, Artificial Sequence
  Description of Artificial Sequence: Synthetic oligonucleotide
ucacauaacaauguguuaa

SEQ ID NO: 316690 - RNA, 19 nt, Artificial Sequence
  Description of Artificial Sequence: Synthetic oligonucleotide
cacuagacuguccaaaugc

SEQ ID NO: 316691 - RNA, 19 nt, Artificial Sequence
  Description of Artificial Sequence: Synthetic oligonucleotide
uaaauuagcaagugccgca

SEQ ID NO: 316692 - RNA, 19 nt, Artificial Sequence
  Description of Artificial Sequence: Synthetic oligonucleotide
ugucuaaauuagcaagugc

SEQ ID NO: 316693 - RNA, 19 nt, Artificial Sequence
  Description of Artificial Sequence: Synthetic oligonucleotide
uccauagagaguuaucagu

SEQ ID NO: 316694 - RNA, 19 nt, Artificial Sequence
  Description of Artificial Sequence: Synthetic oligonucleotide
cacuacucauuauuuaagg

SEQ ID NO: 316695 - RNA, 19 nt, Artificial Sequence
  Description of Artificial Sequence: Synthetic oligonucleotide
uaaacuuaguauugcuacc

SEQ ID NO: 316696 - RNA, 19 nt, Artificial Sequence
  Description of Artificial Sequence: Synthetic oligonucleotide
uacuagacacuccagcagc

SEQ ID NO: 316697 - RNA, 19 nt, Artificial Sequence
  Description of Artificial Sequence: Synthetic oligonucleotide
aaaaugaggggcaaucaug

SEQ ID NO: 316698 - RNA, 19 nt, Artificial Sequence
  Description of Artificial Sequence: Synthetic oligonucleotide
cuaagaucagugaaacaag

SEQ ID NO: 316699 - RNA, 19 nt, Artificial Sequence
  Description of Artificial Sequence: Synthetic oligonucleotide
gauaugcacaaauagcuaa

SEQ ID NO: 316700 - RNA, 19 nt, Artificial Sequence
  Description of Artificial Sequence: Synthetic oligonucleotide
cauuccaagauauaugaca

SEQ ID NO: 316701 - RNA, 19 nt, Artificial Sequence
  Description of Artificial Sequence: Synthetic oligonucleotide
uuaaaaguggcugaucuau

SEQ ID NO: 316702 - RNA, 19 nt, Artificial Sequence
  Description of Artificial Sequence: Synthetic oligonucleotide
auuccaagauauaugacag

SEQ ID NO: 316703 - RNA, 19 nt, Artificial Sequence
  Description of Artificial Sequence: Synthetic oligonucleotide
uuauuuaagugcagugcug

SEQ ID NO: 316704 - RNA, 19 nt, Artificial Sequence
  Description of Artificial Sequence: Synthetic oligonucleotide
ucguguuuaaagcuaagau

SEQ ID NO: 316705 - RNA, 19 nt, Artificial Sequence
  Description of Artificial Sequence: Synthetic oligonucleotide
gacguguaugcauuacugg

SEQ ID NO: 316706 - RNA, 19 nt, Artificial Sequence
  Description of Artificial Sequence: Synthetic oligonucleotide
aaacuuaguauugcuaccu

SEQ ID NO: 316707 - RNA, 19 nt, Artificial Sequence
  Description of Artificial Sequence: Synthetic oligonucleotide
auagcuaauuucuaagaaa

SEQ ID NO: 316708 - RNA, 19 nt, Artificial Sequence
  Description of Artificial Sequence: Synthetic oligonucleotide
guaaugaucacauaacagu

SEQ ID NO: 316709 - RNA, 19 nt, Artificial Sequence
  Description of Artificial Sequence: Synthetic oligonucleotide
auguaaugaucacauaaca

SEQ ID NO: 316710 - RNA, 19 nt, Artificial Sequence
  Description of Artificial Sequence: Synthetic oligonucleotide
aggauuacuagacacucca

SEQ ID NO: 316711 - RNA, 19 nt, Artificial Sequence
  Description of Artificial Sequence: Synthetic oligonucleotide
uaaggcuauaagaaagggu

SEQ ID NO: 316712 - RNA, 19 nt, Artificial Sequence
  Description of Artificial Sequence: Synthetic oligonucleotide
cugaauauagcaguccuag

SEQ ID NO: 316713 - RNA, 19 nt, Artificial Sequence
  Description of Artificial Sequence: Synthetic oligonucleotide
uauuuaaggccacuuuggu

SEQ ID NO: 316714 - RNA, 19 nt, Artificial Sequence
  Description of Artificial Sequence: Synthetic oligonucleotide
caugguguaucugacaagc

SEQ ID NO: 316715 - RNA, 19 nt, Artificial Sequence
  Description of Artificial Sequence: Synthetic oligonucleotide
aaccuuccgauuuugacuu

SEQ ID NO: 316716 - RNA, 19 nt, Artificial Sequence
  Description of Artificial Sequence: Synthetic oligonucleotide
acaaauacugauaugcaca

SEQ ID NO: 316717 - RNA, 19 nt, Artificial Sequence
  Description of Artificial Sequence: Synthetic oligonucleotide
aaaaggauuacuagacacu

SEQ ID NO: 316718 - RNA, 19 nt, Artificial Sequence
  Description of Artificial Sequence: Synthetic oligonucleotide
acuagaagucuuuuaagaa

SEQ ID NO: 316719 - RNA, 19 nt, Artificial Sequence
  Description of Artificial Sequence: Synthetic oligonucleotide
agauauugucuaaauuagc

SEQ ID NO: 316720 - RNA, 19 nt, Artificial Sequence
  Description of Artificial Sequence: Synthetic oligonucleotide
agcauaaugaaugugggau

SEQ ID NO: 316721 - RNA, 19 nt, Artificial Sequence
  Description of Artificial Sequence: Synthetic oligonucleotide
guccaaauguugcaaaacc

SEQ ID NO: 316722 - RNA, 19 nt, Artificial Sequence
  Description of Artificial Sequence: Synthetic oligonucleotide
cuucucucguguuuaaagc

SEQ ID NO: 316723 - RNA, 19 nt, Artificial Sequence
  Description of Artificial Sequence: Synthetic oligonucleotide
uaugacguugcagagaaau

SEQ ID NO: 316724 - RNA, 19 nt, Artificial Sequence
  Description of Artificial Sequence: Synthetic oligonucleotide
caugacuguuaaaaugugc

SEQ ID NO: 316725 - RNA, 19 nt, Artificial Sequence
  Description of Artificial Sequence: Synthetic oligonucleotide
gauaaacuaaacuuaguau

SEQ ID NO: 316726 - RNA, 19 nt, Artificial Sequence
  Description of Artificial Sequence: Synthetic oligonucleotide
uuuuaacauacaugaugcc

SEQ ID NO: 316727 - RNA, 19 nt, Artificial Sequence
  Description of Artificial Sequence: Synthetic oligonucleotide
cuaaauuagcaagugccgc

SEQ ID NO: 316728 - RNA, 19 nt, Artificial Sequence
  Description of Artificial Sequence: Synthetic oligonucleotide
aaggauuacuagacacucc

SEQ ID NO: 316729 - RNA, 19 nt, Artificial Sequence
  Description of Artificial Sequence: Synthetic oligonucleotide
guaggaaacuguccugucg

SEQ ID NO: 316730 - RNA, 19 nt, Artificial Sequence
  Description of Artificial Sequence: Synthetic oligonucleotide
aaacuguccugucggugcg

SEQ ID NO: 316731 - RNA, 19 nt, Artificial Sequence
  Description of Artificial Sequence: Synthetic oligonucleotide
accaaaagggguuaccacu

SEQ ID NO: 316732 - RNA, 19 nt, Artificial Sequence
  Description of Artificial Sequence: Synthetic oligonucleotide
uccugaauauagcaguccu

SEQ ID NO: 316733 - RNA, 19 nt, Artificial Sequence
  Description of Artificial Sequence: Synthetic oligonucleotide
caaaauuaugacguugcag

SEQ ID NO: 316734 - RNA, 19 nt, Artificial Sequence
  Description of Artificial Sequence: Synthetic oligonucleotide
uccgauuuugacuuucaac

SEQ ID NO: 316735 - RNA, 19 nt, Artificial Sequence
  Description of Artificial Sequence: Synthetic oligonucleotide
aucacucaaaaggucaaac

SEQ ID NO: 316736 - RNA, 19 nt, Artificial Sequence
  Description of Artificial Sequence: Synthetic oligonucleotide
ugaucuauuuccccaguaa

SEQ ID NO: 316737 - RNA, 19 nt, Artificial Sequence
  Description of Artificial Sequence: Synthetic oligonucleotide
uuaccugguguuuaauaca

SEQ ID NO: 316738 - RNA, 19 nt, Artificial Sequence
  Description of Artificial Sequence: Synthetic oligonucleotide
ugggauguacugaagguuc

SEQ ID NO: 316739 - RNA, 19 nt, Artificial Sequence
  Description of Artificial Sequence: Synthetic oligonucleotide
caacuuucaagaagcaaug

SEQ ID NO: 316740 - RNA, 19 nt, Artificial Sequence
  Description of Artificial Sequence: Synthetic oligonucleotide
uaaugaaugugggaucugc

SEQ ID NO: 316741 - RNA, 19 nt, Artificial Sequence
  Description of Artificial Sequence: Synthetic oligonucleotide
aauuaugacguugcagaga

SEQ ID NO: 316742 - RNA, 19 nt, Artificial Sequence
  Description of Artificial Sequence: Synthetic oligonucleotide
agaaaggguugguugauga

SEQ ID NO: 316743 - RNA, 19 nt, Artificial Sequence
  Description of Artificial Sequence: Synthetic oligonucleotide
gcaacaaauggauucguag

SEQ ID NO: 316744 - RNA, 19 nt, Artificial Sequence
  Description of Artificial Sequence: Synthetic oligonucleotide
uuaagguaacauuggguuc

SEQ ID NO: 316745 - RNA, 19 nt, Artificial Sequence
  Description of Artificial Sequence: Synthetic oligonucleotide
ugcaccauugggcugcuga

SEQ ID NO: 316746 - RNA, 19 nt, Artificial Sequence
  Description of Artificial Sequence: Synthetic oligonucleotide
uuuaagugcagugcuggug

SEQ ID NO: 316747 - RNA, 19 nt, Artificial Sequence
  Description of Artificial Sequence: Synthetic oligonucleotide
uucuuguuucuuuacccca

SEQ ID NO: 316748 - RNA, 19 nt, Artificial Sequence
  Description of Artificial Sequence: Synthetic oligonucleotide
agcauuuacugauccagca

SEQ ID NO: 316749 - RNA, 19 nt, Artificial Sequence
  Description of Artificial Sequence: Synthetic oligonucleotide
acguguaugcauuacugga

SEQ ID NO: 316750 - RNA, 19 nt, Artificial Sequence
  Description of Artificial Sequence: Synthetic oligonucleotide
agagauguaaugaucacau

SEQ ID NO: 316751 - RNA, 19 nt, Artificial Sequence
  Description of Artificial Sequence: Synthetic oligonucleotide
cugauaugcacaaauagcu

SEQ ID NO: 316752 - RNA, 19 nt, Artificial Sequence
  Description of Artificial Sequence: Synthetic oligonucleotide
uguggggaaaccuccaaaa

SEQ ID NO: 316753 - RNA, 19 nt, Artificial Sequence
  Description of Artificial Sequence: Synthetic oligonucleotide
ugcacguauuaccuggugu

SEQ ID NO: 316754 - RNA, 19 nt, Artificial Sequence
  Description of Artificial Sequence: Synthetic oligonucleotide
cauuacuggacguggcugc

SEQ ID NO: 316755 - RNA, 19 nt, Artificial Sequence
  Description of Artificial Sequence: Synthetic oligonucleotide
uuuaccuguggucccaaaa

SEQ ID NO: 316756 - RNA, 19 nt, Artificial Sequence
  Description of Artificial Sequence: Synthetic oligonucleotide
caaagguugccgcuguugc

SEQ ID NO: 316757 - RNA, 19 nt, Artificial Sequence
  Description of Artificial Sequence: Synthetic oligonucleotide
aaaaucagcacuggaggau

SEQ ID NO: 316758 - RNA, 19 nt, Artificial Sequence
  Description of Artificial Sequence: Synthetic oligonucleotide
uguugucuggugacucugg

SEQ ID NO: 316759 - RNA, 19 nt, Artificial Sequence
  Description of Artificial Sequence: Synthetic oligonucleotide
uuuccacugucacaguccu

SEQ ID NO: 316760 - RNA, 19 nt, Artificial Sequence
  Description of Artificial Sequence: Synthetic oligonucleotide
cuagcguuacucguggacg

SEQ ID NO: 316761 - RNA, 19 nt, Artificial Sequence
  Description of Artificial Sequence: Synthetic oligonucleotide
uuugucugcugucuguaaa

SEQ ID NO: 316762 - RNA, 19 nt, Artificial Sequence
  Description of Artificial Sequence: Synthetic oligonucleotide
cacaguuaaugcaugucug

SEQ ID NO: 316763 - RNA, 19 nt, Artificial Sequence
  Description of Artificial Sequence: Synthetic oligonucleotide
gucugaaauggguuuguag

SEQ ID NO: 316764 - RNA, 19 nt, Artificial Sequence
  Description of Artificial Sequence: Synthetic oligonucleotide
aggcauugcagcaagaaca

SEQ ID NO: 316765 - RNA, 19 nt, Artificial Sequence
  Description of Artificial Sequence: Synthetic oligonucleotide
uacucguggacguguaugc

SEQ ID NO: 316766 - RNA, 19 nt, Artificial Sequence
  Description of Artificial Sequence: Synthetic oligonucleotide
ugagccaagaucacucaaa

SEQ ID NO: 316767 - RNA, 19 nt, Artificial Sequence
  Description of Artificial Sequence: Synthetic oligonucleotide
ugauaugcacaaauagcua

SEQ ID NO: 316768 - RNA, 19 nt, Artificial Sequence
  Description of Artificial Sequence: Synthetic oligonucleotide
caccuuaagguaacauugg

SEQ ID NO: 316769 - RNA, 19 nt, Artificial Sequence
  Description of Artificial Sequence: Synthetic oligonucleotide
cuguguaaggcuauaagaa

SEQ ID NO: 316770 - RNA, 19 nt, Artificial Sequence
  Description of Artificial Sequence: Synthetic oligonucleotide
uagcauuuacugauccagc

SEQ ID NO: 316771 - RNA, 19 nt, Artificial Sequence
  Description of Artificial Sequence: Synthetic oligonucleotide
gugaaacaagacaacagug

SEQ ID NO: 316772 - RNA, 19 nt, Artificial Sequence
  Description of Artificial Sequence: Synthetic oligonucleotide
cacuagaagucuuuuaaga

SEQ ID NO: 316773 - RNA, 19 nt, Artificial Sequence
  Description of Artificial Sequence: Synthetic oligonucleotide
gacguugcagagaaauuag

SEQ ID NO: 316774 - RNA, 19 nt, Artificial Sequence
  Description of Artificial Sequence: Synthetic oligonucleotide
guagcuguugacugaggag

SEQ ID NO: 316775 - RNA, 19 nt, Artificial Sequence
  Description of Artificial Sequence: Synthetic oligonucleotide
uggggaaaccuccaaaauu

SEQ ID NO: 316776 - RNA, 19 nt, Artificial Sequence
  Description of Artificial Sequence: Synthetic oligonucleotide
cuugagagcgaccuacaac

SEQ ID NO: 316777 - RNA, 19 nt, Artificial Sequence
  Description of Artificial Sequence: Synthetic oligonucleotide
aagggguuaccacugguuu

SEQ ID NO: 316778 - RNA, 19 nt, Artificial Sequence
  Description of Artificial Sequence: Synthetic oligonucleotide
uuagcaaaauuggcuguag

SEQ ID NO: 316779 - RNA, 19 nt, Artificial Sequence
  Description of Artificial Sequence: Synthetic oligonucleotide
ugguguaucugacaagcua

SEQ ID NO: 316780 - RNA, 19 nt, Artificial Sequence
  Description of Artificial Sequence: Synthetic oligonucleotide
caacaaauggauucguaga

SEQ ID NO: 316781 - RNA, 19 nt, Artificial Sequence
  Description of Artificial Sequence: Synthetic oligonucleotide
cuuggguugggaaggcggg

SEQ ID NO: 316782 - RNA, 19 nt, Artificial Sequence
  Description of Artificial Sequence: Synthetic oligonucleotide
acuuuacuaacaguugaug

SEQ ID NO: 316783 - RNA, 19 nt, Artificial Sequence
  Description of Artificial Sequence: Synthetic oligonucleotide
aguacagcgagugucugug

SEQ ID NO: 316784 - RNA, 19 nt, Artificial Sequence
  Description of Artificial Sequence: Synthetic oligonucleotide
ucacaguccugaauauagc

SEQ ID NO: 316785 - RNA, 19 nt, Artificial Sequence
  Description of Artificial Sequence: Synthetic oligonucleotide
ugacguugcagagaaauua

SEQ ID NO: 316786 - RNA, 19 nt, Artificial Sequence
  Description of Artificial Sequence: Synthetic oligonucleotide
auuagcaagugccgcauau

SEQ ID NO: 316787 - RNA, 19 nt, Artificial Sequence
  Description of Artificial Sequence: Synthetic oligonucleotide
acugaagguuccaaaauca

SEQ ID NO: 316788 - RNA, 19 nt, Artificial Sequence
  Description of Artificial Sequence: Synthetic oligonucleotide
ugaucagcuuuauuccgca

SEQ ID NO: 316789 - RNA, 19 nt, Artificial Sequence
  Description of Artificial Sequence: Synthetic oligonucleotide
aagauaaacuaaacuuagu

SEQ ID NO: 316790 - RNA, 19 nt, Artificial Sequence
  Description of Artificial Sequence: Synthetic oligonucleotide
ugguggggagacuguaugg

SEQ ID NO: 316791 - RNA, 19 nt, Artificial Sequence
  Description of Artificial Sequence: Synthetic oligonucleotide
caguagcagcaacaaaugg

SEQ ID NO: 316792 - RNA, 19 nt, Artificial Sequence
  Description of Artificial Sequence: Synthetic oligonucleotide
gagaguuaucagucugucc

SEQ ID NO: 316793 - RNA, 19 nt, Artificial Sequence
  Description of Artificial Sequence: Synthetic oligonucleotide
ugacuguuaaaaugugcaa

SEQ ID NO: 316794 - RNA, 19 nt, Artificial Sequence
  Description of Artificial Sequence: Synthetic oligonucleotide
ugcauuacuggacguggcu

SEQ ID NO: 316795 - RNA, 19 nt, Artificial Sequence
  Description of Artificial Sequence: Synthetic oligonucleotide
agcugcaugacuguuaaaa

SEQ ID NO: 316796 - RNA, 19 nt, Artificial Sequence
  Description of Artificial Sequence: Synthetic oligonucleotide
gaggcggagagauguaaug

SEQ ID NO: 316797 - RNA, 19 nt, Artificial Sequence
  Description of Artificial Sequence: Synthetic oligonucleotide
gcuaagaucagugaaacaa

SEQ ID NO: 316798 - RNA, 19 nt, Artificial Sequence
  Description of Artificial Sequence: Synthetic oligonucleotide
uugucugcugucuguaaac

SEQ ID NO: 316799 - RNA, 19 nt, Artificial Sequence
  Description of Artificial Sequence: Synthetic oligonucleotide
uuacucguggacguguaug

SEQ ID NO: 316800 - RNA, 19 nt, Artificial Sequence
  Description of Artificial Sequence: Synthetic oligonucleotide
aaauuagcaagugccgcau

SEQ ID NO: 316801 - RNA, 19 nt, Artificial Sequence
  Description of Artificial Sequence: Synthetic oligonucleotide
uaacauacaugaugccgcu

SEQ ID NO: 316802 - RNA, 19 nt, Artificial Sequence
  Description of Artificial Sequence: Synthetic oligonucleotide
cuuuacuaacaguugaugu

SEQ ID NO: 316803 - RNA, 19 nt, Artificial Sequence
  Description of Artificial Sequence: Synthetic oligonucleotide
ggagcuuuaccuguggucc

SEQ ID NO: 316804 - RNA, 19 nt, Artificial Sequence
  Description of Artificial Sequence: Synthetic oligonucleotide
uguaugcauuacuggacgu

SEQ ID NO: 316805 - RNA, 19 nt, Artificial Sequence
  Description of Artificial Sequence: Synthetic oligonucleotide
ucuguaaaccagcuuuguu

SEQ ID NO: 316806 - RNA, 19 nt, Artificial Sequence
  Description of Artificial Sequence: Synthetic oligonucleotide
ugaauauagcaguccuagu

SEQ ID NO: 316807 - RNA, 19 nt, Artificial Sequence
  Description of Artificial Sequence: Synthetic oligonucleotide
gguguuuaauacacaaugc

SEQ ID NO: 316808 - RNA, 19 nt, Artificial Sequence
  Description of Artificial Sequence: Synthetic oligonucleotide
gaacacacugucuaacucu

SEQ ID NO: 316809 - RNA, 19 nt, Artificial Sequence
  Description of Artificial Sequence: Synthetic oligonucleotide
uacuaacaguugauguugu

SEQ ID NO: 316810 - RNA, 19 nt, Artificial Sequence
  Description of Artificial Sequence: Synthetic oligonucleotide
ugaugccgcagaaggacca

SEQ ID NO: 316811 - RNA, 19 nt, Artificial Sequence
  Description of Artificial Sequence: Synthetic oligonucleotide
aguuagucacuagaagucu

SEQ ID NO: 316812 - RNA, 19 nt, Artificial Sequence
  Description of Artificial Sequence: Synthetic oligonucleotide
agaugcacuugagugacug

SEQ ID NO: 316813 - RNA, 19 nt, Artificial Sequence
  Description of Artificial Sequence: Synthetic oligonucleotide
gaaggcggagccccaaaug

SEQ ID NO: 316814 - RNA, 19 nt, Artificial Sequence
  Description of Artificial Sequence: Synthetic oligonucleotide
gagagaaagcugucugcug

SEQ ID NO: 316815 - RNA, 19 nt, Artificial Sequence
  Description of Artificial Sequence: Synthetic oligonucleotide
agcagcaaagaugucugag

SEQ ID NO: 316816 - RNA, 19 nt, Artificial Sequence
  Description of Artificial Sequence: Synthetic oligonucleotide
gguugguugaugaacuucc

SEQ ID NO: 316817 - RNA, 19 nt, Artificial Sequence
  Description of Artificial Sequence: Synthetic oligonucleotide
cuuuaccccaaaacaaaca

SEQ ID NO: 316818 - RNA, 19 nt, Artificial Sequence
  Description of Artificial Sequence: Synthetic oligonucleotide
ucucguguuuaaagcuaag

SEQ ID NO: 316819 - RNA, 19 nt, Artificial Sequence
  Description of Artificial Sequence: Synthetic oligonucleotide
aacuguagcaaaacaugau

SEQ ID NO: 316820 - RNA, 19 nt, Artificial Sequence
  Description of Artificial Sequence: Synthetic oligonucleotide
gauuuggggaaguuaucaa

SEQ ID NO: 316821 - RNA, 19 nt, Artificial Sequence
  Description of Artificial Sequence: Synthetic oligonucleotide
agugccaaagguugccgcu

SEQ ID NO: 316822 - RNA, 19 nt, Artificial Sequence
  Description of Artificial Sequence: Synthetic oligonucleotide
guggggagacuguaugggg

SEQ ID NO: 316823 - RNA, 19 nt, Artificial Sequence
  Description of Artificial Sequence: Synthetic oligonucleotide
ucccaaaaccacucccuug

SEQ ID NO: 316824 - RNA, 19 nt, Artificial Sequence
  Description of Artificial Sequence: Synthetic oligonucleotide
aacuugaccaaaagggguu

SEQ ID NO: 316825 - RNA, 19 nt, Artificial Sequence
  Description of Artificial Sequence: Synthetic oligonucleotide
agguugccgcuguugcucc

SEQ ID NO: 316826 - RNA, 19 nt, Artificial Sequence
  Description of Artificial Sequence: Synthetic oligonucleotide
aagacuucucucguguuua

SEQ ID NO: 316827 - RNA, 19 nt, Artificial Sequence
  Description of Artificial Sequence: Synthetic oligonucleotide
aaugugggaucugcaauaa

SEQ ID NO: 316828 - RNA, 19 nt, Artificial Sequence
  Description of Artificial Sequence: Synthetic oligonucleotide
auuuaagugcagugcuggu

SEQ ID NO: 316829 - RNA, 19 nt, Artificial Sequence
  Description of Artificial Sequence: Synthetic oligonucleotide
uguauggggcaggagugcc

SEQ ID NO: 316830 - RNA, 19 nt, Artificial Sequence
  Description of Artificial Sequence: Synthetic oligonucleotide
ccauagagaguuaucaguc

SEQ ID NO: 316831 - RNA, 19 nt, Artificial Sequence
  Description of Artificial Sequence: Synthetic oligonucleotide
ugagagcgaccuacaacug

SEQ ID NO: 316832 - RNA, 19 nt, Artificial Sequence
  Description of Artificial Sequence: Synthetic oligonucleotide
cguguuuaaagcuaagauc

SEQ ID NO: 316833 - RNA, 19 nt, Artificial Sequence
  Description of Artificial Sequence: Synthetic oligonucleotide
ugaucacauaacaguucgu

SEQ ID NO: 316834 - RNA, 19 nt, Artificial Sequence
  Description of Artificial Sequence: Synthetic oligonucleotide
caaaauuggcuguagcugu

SEQ ID NO: 316835 - RNA, 19 nt, Artificial Sequence
  Description of Artificial Sequence: Synthetic oligonucleotide
uacaugaugccgcuaccuu

SEQ ID NO: 316836 - RNA, 19 nt, Artificial Sequence
  Description of Artificial Sequence: Synthetic oligonucleotide
gugcgccagucauaaaagg

SEQ ID NO: 316837 - RNA, 19 nt, Artificial Sequence
  Description of Artificial Sequence: Synthetic oligonucleotide
uguccugucggugcgccag

SEQ ID NO: 316838 - RNA, 19 nt, Artificial Sequence
  Description of Artificial Sequence: Synthetic oligonucleotide
uugaccaaaagggguuacc

SEQ ID NO: 316839 - RNA, 19 nt, Artificial Sequence
  Description of Artificial Sequence: Synthetic oligonucleotide
cugcuagcguuacucgugg

SEQ ID NO: 316840 - RNA, 19 nt, Artificial Sequence
  Description of Artificial Sequence: Synthetic oligonucleotide
augugggaucugcaauaac

SEQ ID NO: 316841 - RNA, 19 nt, Artificial Sequence
  Description of Artificial Sequence: Synthetic oligonucleotide
uucugccaauucacaagug

SEQ ID NO: 316842 - RNA, 19 nt, Artificial Sequence
  Description of Artificial Sequence: Synthetic oligonucleotide
acuaaacuuaguauugcua

SEQ ID NO: 316843 - RNA, 19 nt, Artificial Sequence
  Description of Artificial Sequence: Synthetic oligonucleotide
gagccaagaucacucaaaa

SEQ ID NO: 316844 - RNA, 19 nt, Artificial Sequence
  Description of Artificial Sequence: Synthetic oligonucleotide
ucaacucacuacucauuau

SEQ ID NO: 316845 - RNA, 19 nt, Artificial Sequence
  Description of Artificial Sequence: Synthetic oligonucleotide
guaugcauuacuggacgug

SEQ ID NO: 316846 - RNA, 19 nt, Artificial Sequence
  Description of Artificial Sequence: Synthetic oligonucleotide
uacagcgagugucugugua

SEQ ID NO: 316847 - RNA, 19 nt, Artificial Sequence
  Description of Artificial Sequence: Synthetic oligonucleotide
gcagcauaaugaauguggg

SEQ ID NO: 316848 - RNA, 19 nt, Artificial Sequence
  Description of Artificial Sequence: Synthetic oligonucleotide
accacuagacuguccaaau

SEQ ID NO: 316849 - RNA, 19 nt, Artificial Sequence
  Description of Artificial Sequence: Synthetic oligonucleotide
uagcguuacucguggacgu

SEQ ID NO: 316850 - RNA, 19 nt, Artificial Sequence
  Description of Artificial Sequence: Synthetic oligonucleotide
agagauuucaggggcuuga

SEQ ID NO: 316851 - RNA, 19 nt, Artificial Sequence
  Description of Artificial Sequence: Synthetic oligonucleotide
uggauucguagaaggcgga

SEQ ID NO: 316852 - RNA, 19 nt, Artificial Sequence
  Description of Artificial Sequence: Synthetic oligonucleotide
cacucccuugaucaccucc

SEQ ID NO: 316853 - RNA, 19 nt, Artificial Sequence
  Description of Artificial Sequence: Synthetic oligonucleotide
auacaugaugccgcuaccu

SEQ ID NO: 316854 - RNA, 19 nt, Artificial Sequence
  Description of Artificial Sequence: Synthetic oligonucleotide
ugccaaacccugcuggcau

SEQ ID NO: 316855 - RNA, 19 nt, Artificial Sequence
  Description of Artificial Sequence: Synthetic oligonucleotide
ugcuggcauacucauggau

SEQ ID NO: 316856 - RNA, 19 nt, Artificial Sequence
  Description of Artificial Sequence: Synthetic oligonucleotide
ccaauucacaagugaaaag

SEQ ID NO: 316857 - RNA, 19 nt, Artificial Sequence
  Description of Artificial Sequence: Synthetic oligonucleotide
augcauuacuggacguggc

SEQ ID NO: 316858 - RNA, 19 nt, Artificial Sequence
  Description of Artificial Sequence: Synthetic oligonucleotide
agcgagugucuguguaagg

SEQ ID NO: 316859 - RNA, 19 nt, Artificial Sequence
  Description of Artificial Sequence: Synthetic oligonucleotide
cacuugagugacugggaac

SEQ ID NO: 316860 - RNA, 19 nt, Artificial Sequence
  Description of Artificial Sequence: Synthetic oligonucleotide
cucaaaaggucaaacugcu

SEQ ID NO: 316861 - RNA, 19 nt, Artificial Sequence
  Description of Artificial Sequence: Synthetic oligonucleotide
accugcaaacuguagcaaa

SEQ ID NO: 316862 - RNA, 19 nt, Artificial Sequence
  Description of Artificial Sequence: Synthetic oligonucleotide
aauuagcaagugccgcaua

SEQ ID NO: 316863 - RNA, 19 nt, Artificial Sequence
  Description of Artificial Sequence: Synthetic oligonucleotide
guuaccacugguuuuguuu

SEQ ID NO: 316864 - RNA, 19 nt, Artificial Sequence
  Description of Artificial Sequence: Synthetic oligonucleotide
gguggggagacuguauggg

SEQ ID NO: 316865 - RNA, 19 nt, Artificial Sequence
  Description of Artificial Sequence: Synthetic oligonucleotide
cugccaauucacaagugaa

SEQ ID NO: 316866 - RNA, 19 nt, Artificial Sequence
  Description of Artificial Sequence: Synthetic oligonucleotide
cugacaagcuacauuuaaa

SEQ ID NO: 316867 - RNA, 19 nt, Artificial Sequence
  Description of Artificial Sequence: Synthetic oligonucleotide
acucgaaccacuagacugu

SEQ ID NO: 316868 - RNA, 19 nt, Artificial Sequence
  Description of Artificial Sequence: Synthetic oligonucleotide
cacuuugguaaaggcauug

SEQ ID NO: 316869 - RNA, 19 nt, Artificial Sequence
  Description of Artificial Sequence: Synthetic oligonucleotide
ugucugagccaagaucacu

SEQ ID NO: 316870 - RNA, 19 nt, Artificial Sequence
  Description of Artificial Sequence: Synthetic oligonucleotide
agcgaccuacaacugggga

SEQ ID NO: 316871 - RNA, 19 nt, Artificial Sequence
  Description of Artificial Sequence: Synthetic oligonucleotide
auaugcacaaauagcuaau

SEQ ID NO: 316872 - RNA, 19 nt, Artificial Sequence
  Description of Artificial Sequence: Synthetic oligonucleotide
cagugccaaagguugccgc

SEQ ID NO: 316873 - RNA, 19 nt, Artificial Sequence
  Description of Artificial Sequence: Synthetic oligonucleotide
auuuagccauguauaagaa

SEQ ID NO: 316874 - RNA, 19 nt, Artificial Sequence
  Description of Artificial Sequence: Synthetic oligonucleotide
gcuggcauacucauggaug

SEQ ID NO: 316875 - RNA, 19 nt, Artificial Sequence
  Description of Artificial Sequence: Synthetic oligonucleotide
auaaugaaugugggaucug

SEQ ID NO: 316876 - RNA, 19 nt, Artificial Sequence
  Description of Artificial Sequence: Synthetic oligonucleotide
acauaacaguucguuccag

SEQ ID NO: 316877 - RNA, 19 nt, Artificial Sequence
  Description of Artificial Sequence: Synthetic oligonucleotide
gcauuuacugauccagcac

SEQ ID NO: 316878 - RNA, 19 nt, Artificial Sequence
  Description of Artificial Sequence: Synthetic oligonucleotide
guccugaauauagcagucc

SEQ ID NO: 316879 - RNA, 19 nt, Artificial Sequence
  Description of Artificial Sequence: Synthetic oligonucleotide
aaaauuggcuguagcuguu

SEQ ID NO: 316880 - RNA, 19 nt, Artificial Sequence
  Description of Artificial Sequence: Synthetic oligonucleotide
aggauuuggggaaguuauc

SEQ ID NO: 316881 - RNA, 19 nt, Artificial Sequence
  Description of Artificial Sequence: Synthetic oligonucleotide
aguuaucagucuguccaga

SEQ ID NO: 316882 - RNA, 19 nt, Artificial Sequence
  Description of Artificial Sequence: Synthetic oligonucleotide
ugucuguguaaggcuauaa

SEQ ID NO: 316883 - RNA, 19 nt, Artificial Sequence
  Description of Artificial Sequence: Synthetic oligonucleotide
aggcggagagauguaauga

SEQ ID NO: 316884 - RNA, 19 nt, Artificial Sequence
  Description of Artificial Sequence: Synthetic oligonucleotide
ugacuugcuguggggaaac

SEQ ID NO: 316885 - RNA, 19 nt, Artificial Sequence
  Description of Artificial Sequence: Synthetic oligonucleotide
gaucugcaauaacuuaaua

SEQ ID NO: 316886 - RNA, 19 nt, Artificial Sequence
  Description of Artificial Sequence: Synthetic oligonucleotide
aggcuauaagaaaggguug

SEQ ID NO: 316887 - RNA, 19 nt, Artificial Sequence
  Description of Artificial Sequence: Synthetic oligonucleotide
gugcccuuauuuaagugca

SEQ ID NO: 316888 - RNA, 19 nt, Artificial Sequence
  Description of Artificial Sequence: Synthetic oligonucleotide
agcaagugccgcauauuug

SEQ ID NO: 316889 - RNA, 19 nt, Artificial Sequence
  Description of Artificial Sequence: Synthetic oligonucleotide
cccuuauuuaagugcagug

SEQ ID NO: 316890 - RNA, 19 nt, Artificial Sequence
  Description of Artificial Sequence: Synthetic oligonucleotide
agaaggcggagccccaaau

SEQ ID NO: 316891 - RNA, 19 nt, Artificial Sequence
  Description of Artificial Sequence: Synthetic oligonucleotide
cucguguuuaaagcuaaga

SEQ ID NO: 316892 - RNA, 19 nt, Artificial Sequence
  Description of Artificial Sequence: Synthetic oligonucleotide
cuggggacugacuaggugu

SEQ ID NO: 316893 - RNA, 19 nt, Artificial Sequence
  Description of Artificial Sequence: Synthetic oligonucleotide
ggugcgccagucauaaaag

SEQ ID NO: 316894 - RNA, 19 nt, Artificial Sequence
  Description of Artificial Sequence: Synthetic oligonucleotide
ggcugaaaaggagagugac

SEQ ID NO: 316895 - RNA, 19 nt, Artificial Sequence
  Description of Artificial Sequence: Synthetic oligonucleotide
ggggaaaccuccaaaauua

SEQ ID NO: 316896 - RNA, 19 nt, Artificial Sequence
  Description of Artificial Sequence: Synthetic oligonucleotide
ugccgcauauuugucugcu

SEQ ID NO: 316897 - RNA, 19 nt, Artificial Sequence
  Description of Artificial Sequence: Synthetic oligonucleotide
gcgaccuacaacuggggac

SEQ ID NO: 316898 - RNA, 19 nt, Artificial Sequence
  Description of Artificial Sequence: Synthetic oligonucleotide
agaucacucaaaaggucaa

SEQ ID NO: 316899 - RNA, 19 nt, Artificial Sequence
  Description of Artificial Sequence: Synthetic oligonucleotide
gcuagcguuacucguggac

SEQ ID NO: 316900 - RNA, 19 nt, Artificial Sequence
  Description of Artificial Sequence: Synthetic oligonucleotide
cagcgagugucuguguaag

SEQ ID NO: 316901 - RNA, 19 nt, Artificial Sequence
  Description of Artificial Sequence: Synthetic oligonucleotide
cauagagaguuaucagucu

SEQ ID NO: 316902 - RNA, 19 nt, Artificial Sequence
  Description of Artificial Sequence: Synthetic oligonucleotide
cucucguguuuaaagcuaa

SEQ ID NO: 316903 - RNA, 19 nt, Artificial Sequence
  Description of Artificial Sequence: Synthetic oligonucleotide
caagugccgcauauuuguc

SEQ ID NO: 316904 - RNA, 19 nt, Artificial Sequence
  Description of Artificial Sequence: Synthetic oligonucleotide
cuugaccaaaagggguuac

SEQ ID NO: 316905 - RNA, 19 nt, Artificial Sequence
  Description of Artificial Sequence: Synthetic oligonucleotide
acuagacacuccagcagcu

SEQ ID NO: 316906 - RNA, 19 nt, Artificial Sequence
  Description of Artificial Sequence: Synthetic oligonucleotide
gagcgaccuacaacugggg

SEQ ID NO: 316907 - RNA, 19 nt, Artificial Sequence
  Description of Artificial Sequence: Synthetic oligonucleotide
cuuccgauuuugacuuuca

SEQ ID NO: 316908 - RNA, 19 nt, Artificial Sequence
  Description of Artificial Sequence: Synthetic oligonucleotide
agggguuaccacugguuuu

SEQ ID NO: 316909 - RNA, 19 nt, Artificial Sequence
  Description of Artificial Sequence: Synthetic oligonucleotide
uagaaggcggagccccaaa

SEQ ID NO: 316910 - RNA, 19 nt, Artificial Sequence
  Description of Artificial Sequence: Synthetic oligonucleotide
cugaagauauugucuaaau

SEQ ID NO: 316911 - RNA, 19 nt, Artificial Sequence
  Description of Artificial Sequence: Synthetic oligonucleotide
cguguaugcauuacuggac

SEQ ID NO: 316912 - RNA, 19 nt, Artificial Sequence
  Description of Artificial Sequence: Synthetic oligonucleotide
cucacauaacaauguguua

SEQ ID NO: 316913 - RNA, 19 nt, Artificial Sequence
  Description of Artificial Sequence: Synthetic oligonucleotide
auuuacugauccagcacuu

SEQ ID NO: 316914 - RNA, 19 nt, Artificial Sequence
  Description of Artificial Sequence: Synthetic oligonucleotide
ggcauugcagcaagaacac

SEQ ID NO: 316915 - RNA, 19 nt, Artificial Sequence
  Description of Artificial Sequence: Synthetic oligonucleotide
gagacuguauggggcagga

SEQ ID NO: 316916 - RNA, 19 nt, Artificial Sequence
  Description of Artificial Sequence: Synthetic oligonucleotide
uagcagcaacaaauggauu

SEQ ID NO: 316917 - RNA, 19 nt, Artificial Sequence
  Description of Artificial Sequence: Synthetic oligonucleotide
gagugucuguguaaggcua

SEQ ID NO: 316918 - RNA, 19 nt, Artificial Sequence
  Description of Artificial Sequence: Synthetic oligonucleotide
ggacugacuaggugugccc

SEQ ID NO: 316919 - RNA, 19 nt, Artificial Sequence
  Description of Artificial Sequence: Synthetic oligonucleotide
acaguucguuccaguacag

SEQ ID NO: 316920 - RNA, 19 nt, Artificial Sequence
  Description of Artificial Sequence: Synthetic oligonucleotide
ggaaagcugcuuggguugg

SEQ ID NO: 316921 - RNA, 19 nt, Artificial Sequence
  Description of Artificial Sequence: Synthetic oligonucleotide
ggaaacuguccugucggug

SEQ ID NO: 316922 - RNA, 19 nt, Artificial Sequence
  Description of Artificial Sequence: Synthetic oligonucleotide
ggauuacuagacacuccag

SEQ ID NO: 316923 - RNA, 19 nt, Artificial Sequence
  Description of Artificial Sequence: Synthetic oligonucleotide
acguugcagagaaauuaga

SEQ ID NO: 316924 - RNA, 19 nt, Artificial Sequence
  Description of Artificial Sequence: Synthetic oligonucleotide
gcugcuagcguuacucgug

SEQ ID NO: 316925 - RNA, 19 nt, Artificial Sequence
  Description of Artificial Sequence: Synthetic oligonucleotide
ugacuaggugugcccuuau

SEQ ID NO: 316926 - RNA, 19 nt, Artificial Sequence
  Description of Artificial Sequence: Synthetic oligonucleotide
acugacuaggugugcccuu

SEQ ID NO: 316927 - RNA, 19 nt, Artificial Sequence
  Description of Artificial Sequence: Synthetic oligonucleotide
caacaggagcuuuaccugu

SEQ ID NO: 316928 - RNA, 19 nt, Artificial Sequence
  Description of Artificial Sequence: Synthetic oligonucleotide
acuggacguggcugcagaa

SEQ ID NO: 316929 - RNA, 19 nt, Artificial Sequence
  Description of Artificial Sequence: Synthetic oligonucleotide
agcaacaaauggauucgua

SEQ ID NO: 316930 - RNA, 19 nt, Artificial Sequence
  Description of Artificial Sequence: Synthetic oligonucleotide
ggauucguagaaggcggag

SEQ ID NO: 316931 - RNA, 19 nt, Artificial Sequence
  Description of Artificial Sequence: Synthetic oligonucleotide
gugccgcauauuugucugc

SEQ ID NO: 316932 - RNA, 19 nt, Artificial Sequence
  Description of Artificial Sequence: Synthetic oligonucleotide
ugucggugcgccagucaua

SEQ ID NO: 316933 - RNA, 19 nt, Artificial Sequence
  Description of Artificial Sequence: Synthetic oligonucleotide
ggcggagccccaaauggag

SEQ ID NO: 316934 - RNA, 19 nt, Artificial Sequence
  Description of Artificial Sequence: Synthetic oligonucleotide
aagcuacauuuaaaugcuu

SEQ ID NO: 316935 - RNA, 19 nt, Artificial Sequence
  Description of Artificial Sequence: Synthetic oligonucleotide
gcaugacuguuaaaaugug

SEQ ID NO: 316936 - RNA, 19 nt, Artificial Sequence
  Description of Artificial Sequence: Synthetic oligonucleotide
cugaucuauuuccccagua

SEQ ID NO: 316937 - RNA, 19 nt, Artificial Sequence
  Description of Artificial Sequence: Synthetic oligonucleotide
augguguaucugacaagcu

SEQ ID NO: 316938 - RNA, 19 nt, Artificial Sequence
  Description of Artificial Sequence: Synthetic oligonucleotide
gucggugcgccagucauaa

SEQ ID NO: 316939 - RNA, 19 nt, Artificial Sequence
  Description of Artificial Sequence: Synthetic oligonucleotide
cgaaccacuagacugucca

SEQ ID NO: 316940 - RNA, 19 nt, Artificial Sequence
  Description of Artificial Sequence: Synthetic oligonucleotide
gcaagaggcggagagaugu

SEQ ID NO: 316941 - RNA, 19 nt, Artificial Sequence
  Description of Artificial Sequence: Synthetic oligonucleotide
uuccgcagacagguguccu

SEQ ID NO: 316942 - RNA, 19 nt, Artificial Sequence
  Description of Artificial Sequence: Synthetic oligonucleotide
acucguggacguguaugca

SEQ ID NO: 316943 - RNA, 19 nt, Artificial Sequence
  Description of Artificial Sequence: Synthetic oligonucleotide
caugaugccgcuaccuuuu

SEQ ID NO: 316944 - RNA, 19 nt, Artificial Sequence
  Description of Artificial Sequence: Synthetic oligonucleotide
agcguuacucguggacgug

SEQ ID NO: 316945 - RNA, 19 nt, Artificial Sequence
  Description of Artificial Sequence: Synthetic oligonucleotide
augacguugcagagaaauu

SEQ ID NO: 316946 - RNA, 19 nt, Artificial Sequence
  Description of Artificial Sequence: Synthetic oligonucleotide
cguugcagagaaauuagaa

SEQ ID NO: 316947 - RNA, 19 nt, Artificial Sequence
  Description of Artificial Sequence: Synthetic oligonucleotide
ccacuagacuguccaaaug

SEQ ID NO: 316948 - RNA, 19 nt, Artificial Sequence
  Description of Artificial Sequence: Synthetic oligonucleotide
gacugacuaggugugcccu

SEQ ID NO: 316949 - RNA, 19 nt, Artificial Sequence
  Description of Artificial Sequence: Synthetic oligonucleotide
uggaggauuuggggaaguu

SEQ ID NO: 316950 - RNA, 19 nt, Artificial Sequence
  Description of Artificial Sequence: Synthetic oligonucleotide
gugcaaaguuagcaaaauu

SEQ ID NO: 316951 - RNA, 19 nt, Artificial Sequence
  Description of Artificial Sequence: Synthetic oligonucleotide
ggugugcccuuauuuaagu

SEQ ID NO: 316952 - RNA, 19 nt, Artificial Sequence
  Description of Artificial Sequence: Synthetic oligonucleotide
guggggaaaccuccaaaau

SEQ ID NO: 316953 - RNA, 19 nt, Artificial Sequence
  Description of Artificial Sequence: Synthetic oligonucleotide
cuguggucccaaaaccacu

SEQ ID NO: 316954 - RNA, 19 nt, Artificial Sequence
  Description of Artificial Sequence: Synthetic oligonucleotide
accugguguuuaauacaca

SEQ ID NO: 316955 - RNA, 19 nt, Artificial Sequence
  Description of Artificial Sequence: Synthetic oligonucleotide
gugacuugcuguggggaaa

SEQ ID NO: 316956 - RNA, 19 nt, Artificial Sequence
  Description of Artificial Sequence: Synthetic oligonucleotide
ggaggauuuggggaaguua

SEQ ID NO: 316957 - RNA, 19 nt, Artificial Sequence
  Description of Artificial Sequence: Synthetic oligonucleotide
gcugcaugacuguuaaaau

SEQ ID NO: 316958 - RNA, 19 nt, Artificial Sequence
  Description of Artificial Sequence: Synthetic oligonucleotide
gugggaucugcaauaacuu

SEQ ID NO: 316959 - RNA, 19 nt, Artificial Sequence
  Description of Artificial Sequence: Synthetic oligonucleotide
caccuguaguuuggggcug

SEQ ID NO: 316960 - RNA, 19 nt, Artificial Sequence
  Description of Artificial Sequence: Synthetic oligonucleotide
cugagccgaagcacccaca

SEQ ID NO: 316961 - RNA, 19 nt, Artificial Sequence
  Description of Artificial Sequence: Synthetic oligonucleotide
ggagccccaaauggagcag

SEQ ID NO: 316962 - RNA, 19 nt, Artificial Sequence
  Description of Artificial Sequence: Synthetic oligonucleotide
accuacaacuggggacuga

SEQ ID NO: 316963 - RNA, 19 nt, Artificial Sequence
  Description of Artificial Sequence: Synthetic oligonucleotide
cuuuaccuguggucccaaa

SEQ ID NO: 316964 - RNA, 19 nt, Artificial Sequence
  Description of Artificial Sequence: Synthetic oligonucleotide
gccgcauauuugucugcug

SEQ ID NO: 316965 - RNA, 19 nt, Artificial Sequence
  Description of Artificial Sequence: Synthetic oligonucleotide
gaaucucccagcagagauu

SEQ ID NO: 316966 - RNA, 19 nt, Artificial Sequence
  Description of Artificial Sequence: Synthetic oligonucleotide
ggacguggcugcagaacug

SEQ ID NO: 316967 - RNA, 19 nt, Artificial Sequence
  Description of Artificial Sequence: Synthetic oligonucleotide
ccuuccgauuuugacuuuc

SEQ ID NO: 316968 - RNA, 19 nt, Artificial Sequence
  Description of Artificial Sequence: Synthetic oligonucleotide
guuacucguggacguguau

SEQ ID NO: 316969 - RNA, 19 nt, Artificial Sequence
  Description of Artificial Sequence: Synthetic oligonucleotide
caagaggcggagagaugua

SEQ ID NO: 316970 - RNA, 19 nt, Artificial Sequence
  Description of Artificial Sequence: Synthetic oligonucleotide
cugagcccucuguuuugca

SEQ ID NO: 316971 - RNA, 19 nt, Artificial Sequence
  Description of Artificial Sequence: Synthetic oligonucleotide
cuacaacuggggacugacu

SEQ ID NO: 316972 - RNA, 19 nt, Artificial Sequence
  Description of Artificial Sequence: Synthetic oligonucleotide
ccugaauauagcaguccua

SEQ ID NO: 316973 - RNA, 19 nt, Artificial Sequence
  Description of Artificial Sequence: Synthetic oligonucleotide
cugacuaggugugcccuua

SEQ ID NO: 316974 - RNA, 19 nt, Artificial Sequence
  Description of Artificial Sequence: Synthetic oligonucleotide
cagcuuuauuccgcagaca

SEQ ID NO: 316975 - RNA, 19 nt, Artificial Sequence
  Description of Artificial Sequence: Synthetic oligonucleotide
gacuaggugugcccuuauu

SEQ ID NO: 316976 - RNA, 19 nt, Artificial Sequence
  Description of Artificial Sequence: Synthetic oligonucleotide
uccugucggugcgccaguc

SEQ ID NO: 316977 - RNA, 19 nt, Artificial Sequence
  Description of Artificial Sequence: Synthetic oligonucleotide
cugcagaacugaacacacu

SEQ ID NO: 316978 - RNA, 19 nt, Artificial Sequence
  Description of Artificial Sequence: Synthetic oligonucleotide
gagcugcaugacuguuaaa

SEQ ID NO: 316979 - RNA, 19 nt, Artificial Sequence
  Description of Artificial Sequence: Synthetic oligonucleotide
caguccuaguaguuuuaau

SEQ ID NO: 316980 - RNA, 19 nt, Artificial Sequence
  Description of Artificial Sequence: Synthetic oligonucleotide
cguauuaccugguguuuaa

SEQ ID NO: 316981 - RNA, 19 nt, Artificial Sequence
  Description of Artificial Sequence: Synthetic oligonucleotide
guauuaccugguguuuaau

SEQ ID NO: 316982 - RNA, 19 nt, Artificial Sequence
  Description of Artificial Sequence: Synthetic oligonucleotide
gcggagccccaaauggagc

SEQ ID NO: 316983 - RNA, 19 nt, Artificial Sequence
  Description of Artificial Sequence: Synthetic oligonucleotide
ccgcauauuugucugcugu

SEQ ID NO: 316984 - RNA, 19 nt, Artificial Sequence
  Description of Artificial Sequence: Synthetic oligonucleotide
cggugcgccagucauaaaa

SEQ ID NO: 316985 - RNA, 19 nt, Artificial Sequence
  Description of Artificial Sequence: Synthetic oligonucleotide
gcaguccuaguaguuuuaa

SEQ ID NO: 316986 - RNA, 19 nt, Artificial Sequence
  Description of Artificial Sequence: Synthetic oligonucleotide
guacagcgagugucugugu

SEQ ID NO: 316987 - RNA, 19 nt, Artificial Sequence
  Description of Artificial Sequence: Synthetic oligonucleotide
ggcgggcugcuggaaacug

SEQ ID NO: 316988 - RNA, 19 nt, Artificial Sequence
  Description of Artificial Sequence: Synthetic oligonucleotide
caccuuaaaaguggcugau

SEQ ID NO: 316989 - RNA, 19 nt, Artificial Sequence
  Description of Artificial Sequence: Synthetic oligonucleotide
ucggugcgccagucauaaa

SEQ ID NO: 316990 - RNA, 19 nt, Artificial Sequence
  Description of Artificial Sequence: Synthetic oligonucleotide
guugggaaggcgggcugcu

SEQ ID NO: 316991 - RNA, 19 nt, Artificial Sequence
  Description of Artificial Sequence: Synthetic oligonucleotide
gcgggcugcuggaaacugc

SEQ ID NO: 316992 - RNA, 19 nt, Artificial Sequence
  Description of Artificial Sequence: Synthetic oligonucleotide
cuguccugucggugcgcca

SEQ ID NO: 316993 - RNA, 19 nt, Artificial Sequence
  Description of Artificial Sequence: Synthetic oligonucleotide
cagcaacaaauggauucgu

SEQ ID NO: 316994 - RNA, 19 nt, Artificial Sequence
  Description of Artificial Sequence: Synthetic oligonucleotide
ggucugaaauggguuugua

SEQ ID NO: 316995 - RNA, 19 nt, Artificial Sequence
  Description of Artificial Sequence: Synthetic oligonucleotide
cacguauuaccugguguuu

SEQ ID NO: 316996 - RNA, 19 nt, Artificial Sequence
  Description of Artificial Sequence: Synthetic oligonucleotide
cuggaggauuuggggaagu

SEQ ID NO: 316997 - RNA, 19 nt, Artificial Sequence
  Description of Artificial Sequence: Synthetic oligonucleotide
gguuaccacugguuuuguu

SEQ ID NO: 316998 - RNA, 19 nt, Artificial Sequence
  Description of Artificial Sequence: Synthetic oligonucleotide
gcguuacucguggacgugu

SEQ ID NO: 316999 - RNA, 19 nt, Artificial Sequence
  Description of Artificial Sequence: Synthetic oligonucleotide
cguuacucguggacgugua

SEQ ID NO: 317000 - RNA, 19 nt, Artificial Sequence
  Description of Artificial Sequence: Synthetic oligonucleotide
aaagcuuuaaauuacaugg

SEQ ID NO: 317001 - RNA, 19 nt, Artificial Sequence
  Description of Artificial Sequence: Synthetic oligonucleotide
aaauuauuuggcugaagcc

SEQ ID NO: 317002 - RNA, 19 nt, Artificial Sequence
  Description of Artificial Sequence: Synthetic oligonucleotide
aagacuucgaguuugcugg

SEQ ID NO: 317003 - RNA, 19 nt, Artificial Sequence
  Description of Artificial Sequence: Synthetic oligonucleotide
auugauguuuuauucaugc

SEQ ID NO: 317004 - RNA, 19 nt, Artificial Sequence
  Description of Artificial Sequence: Synthetic oligonucleotide
aaaucagauauucagaaaa

SEQ ID NO: 317005 - RNA, 19 nt, Artificial Sequence
  Description of Artificial Sequence: Synthetic oligonucleotide
acaaccaagaguucaaacg

SEQ ID NO: 317006 - RNA, 19 nt, Artificial Sequence
  Description of Artificial Sequence: Synthetic oligonucleotide
aaaaugcgcauucccaggc

SEQ ID NO: 317007 - RNA, 19 nt, Artificial Sequence
  Description of Artificial Sequence: Synthetic oligonucleotide
ucugaugcuaucaagggca

SEQ ID NO: 317008 - RNA, 19 nt, Artificial Sequence
  Description of Artificial Sequence: Synthetic oligonucleotide
cuuaauauuugucaagcag

SEQ ID NO: 317009 - RNA, 19 nt, Artificial Sequence
  Description of Artificial Sequence: Synthetic oligonucleotide
agcuggaccagucuaaacc

SEQ ID NO: 317010 - RNA, 19 nt, Artificial Sequence
  Description of Artificial Sequence: Synthetic oligonucleotide
aauuauuuggcugaagcca

SEQ ID NO: 317011 - RNA, 19 nt, Artificial Sequence
  Description of Artificial Sequence: Synthetic oligonucleotide
uuaaacuacacauuucggu

SEQ ID NO: 317012 - RNA, 19 nt, Artificial Sequence
  Description of Artificial Sequence: Synthetic oligonucleotide
uauuccagcaugaacacgu

SEQ ID NO: 317013 - RNA, 19 nt, Artificial Sequence
  Description of Artificial Sequence: Synthetic oligonucleotide
acuuuuaacaacccucagg

SEQ ID NO: 317014 - RNA, 19 nt, Artificial Sequence
  Description of Artificial Sequence: Synthetic oligonucleotide
gaugucaagaaacuccugc

SEQ ID NO: 317015 - RNA, 19 nt, Artificial Sequence
  Description of Artificial Sequence: Synthetic oligonucleotide
agaaaggauuccucggucc

SEQ ID NO: 317016 - RNA, 19 nt, Artificial Sequence
  Description of Artificial Sequence: Synthetic oligonucleotide
ugcagaaucacacuagcgu

SEQ ID NO: 317017 - RNA, 19 nt, Artificial Sequence
  Description of Artificial Sequence: Synthetic oligonucleotide
aacggaaacaaaaucaaca

SEQ ID NO: 317018 - RNA, 19 nt, Artificial Sequence
  Description of Artificial Sequence: Synthetic oligonucleotide
aaaacgagggacaugucuc

SEQ ID NO: 317019 - RNA, 19 nt, Artificial Sequence
  Description of Artificial Sequence: Synthetic oligonucleotide
uuacguaugauaccacugc

SEQ ID NO: 317020 - RNA, 19 nt, Artificial Sequence
  Description of Artificial Sequence: Synthetic oligonucleotide
acagccuuaaacuacacau

SEQ ID NO: 317021 - RNA, 19 nt, Artificial Sequence
  Description of Artificial Sequence: Synthetic oligonucleotide
uaaauauugccugucagcu

SEQ ID NO: 317022 - RNA, 19 nt, Artificial Sequence
  Description of Artificial Sequence: Synthetic oligonucleotide
uguguagauaaacucgaug

SEQ ID NO: 317023 - RNA, 19 nt, Artificial Sequence
  Description of Artificial Sequence: Synthetic oligonucleotide
ucaagugcuuccucgaugc

SEQ ID NO: 317024 - RNA, 19 nt, Artificial Sequence
  Description of Artificial Sequence: Synthetic oligonucleotide
aauuagauacuccuucuuu

SEQ ID NO: 317025 - RNA, 19 nt, Artificial Sequence
  Description of Artificial Sequence: Synthetic oligonucleotide
ugacuuuuaacaacccuca

SEQ ID NO: 317026 - RNA, 19 nt, Artificial Sequence
  Description of Artificial Sequence: Synthetic oligonucleotide
guagcaugggaucaugggg

SEQ ID NO: 317027 - RNA, 19 nt, Artificial Sequence
  Description of Artificial Sequence: Synthetic oligonucleotide
uauauacguguaaacguca

SEQ ID NO: 317028 - RNA, 19 nt, Artificial Sequence
  Description of Artificial Sequence: Synthetic oligonucleotide
gacccuuaaauauugccug

SEQ ID NO: 317029 - RNA, 19 nt, Artificial Sequence
  Description of Artificial Sequence: Synthetic oligonucleotide
auuguuacguaugauacca

SEQ ID NO: 317030 - RNA, 19 nt, Artificial Sequence
  Description of Artificial Sequence: Synthetic oligonucleotide
caagaguucaaacggaaac

SEQ ID NO: 317031 - RNA, 19 nt, Artificial Sequence
  Description of Artificial Sequence: Synthetic oligonucleotide
auauauacguguaaacguc

SEQ ID NO: 317032 - RNA, 19 nt, Artificial Sequence
  Description of Artificial Sequence: Synthetic oligonucleotide
cuagcgugaacccacuugg

SEQ ID NO: 317033 - RNA, 19 nt, Artificial Sequence
  Description of Artificial Sequence: Synthetic oligonucleotide
ucaagcagagauuugggaa

SEQ ID NO: 317034 - RNA, 19 nt, Artificial Sequence
  Description of Artificial Sequence: Synthetic oligonucleotide
aaugcucacagcgaacguc

SEQ ID NO: 317035 - RNA, 19 nt, Artificial Sequence
  Description of Artificial Sequence: Synthetic oligonucleotide
aaugcgcauucccaggcuc

SEQ ID NO: 317036 - RNA, 19 nt, Artificial Sequence
  Description of Artificial Sequence: Synthetic oligonucleotide
aagggcauaaacacagcac

SEQ ID NO: 317037 - RNA, 19 nt, Artificial Sequence
  Description of Artificial Sequence: Synthetic oligonucleotide
ugucaagcagagauuuggg

SEQ ID NO: 317038 - RNA, 19 nt, Artificial Sequence
  Description of Artificial Sequence: Synthetic oligonucleotide
aucacacuagcgugaaccc

SEQ ID NO: 317039 - RNA, 19 nt, Artificial Sequence
  Description of Artificial Sequence: Synthetic oligonucleotide
agaaugcucacagcgaacg

SEQ ID NO: 317040 - RNA, 19 nt, Artificial Sequence
  Description of Artificial Sequence: Synthetic oligonucleotide
ucgcuuacugcuuuggccc

SEQ ID NO: 317041 - RNA, 19 nt, Artificial Sequence
  Description of Artificial Sequence: Synthetic oligonucleotide
agggcauaaacacagcaca

SEQ ID NO: 317042 - RNA, 19 nt, Artificial Sequence
  Description of Artificial Sequence: Synthetic oligonucleotide
ucagcuguaugugacagug

SEQ ID NO: 317043 - RNA, 19 nt, Artificial Sequence
  Description of Artificial Sequence: Synthetic oligonucleotide
uguagauaaacucgauguc

SEQ ID NO: 317044 - RNA, 19 nt, Artificial Sequence
  Description of Artificial Sequence: Synthetic oligonucleotide
auacguguaaacgucaucu

SEQ ID NO: 317045 - RNA, 19 nt, Artificial Sequence
  Description of Artificial Sequence: Synthetic oligonucleotide
ucgaugucaagaaacuccu

SEQ ID NO: 317046 - RNA, 19 nt, Artificial Sequence
  Description of Artificial Sequence: Synthetic oligonucleotide
guacccaaggaucaaagac

SEQ ID NO: 317047 - RNA, 19 nt, Artificial Sequence
  Description of Artificial Sequence: Synthetic oligonucleotide
ucucacaacaaccgucaag

SEQ ID NO: 317048 - RNA, 19 nt, Artificial Sequence
  Description of Artificial Sequence: Synthetic oligonucleotide
ccauguuuagggaaaaugg

SEQ ID NO: 317049 - RNA, 19 nt, Artificial Sequence
  Description of Artificial Sequence: Synthetic oligonucleotide
agauacuccuucuuuccuc

SEQ ID NO: 317050 - RNA, 19 nt, Artificial Sequence
  Description of Artificial Sequence: Synthetic oligonucleotide
ccuauaagggccuuaagag

SEQ ID NO: 317051 - RNA, 19 nt, Artificial Sequence
  Description of Artificial Sequence: Synthetic oligonucleotide
aaacaagcgggcuggaaaa

SEQ ID NO: 317052 - RNA, 19 nt, Artificial Sequence
  Description of Artificial Sequence: Synthetic oligonucleotide
acgucugcauugcaaaacg

SEQ ID NO: 317053 - RNA, 19 nt, Artificial Sequence
  Description of Artificial Sequence: Synthetic oligonucleotide
gguaccaugcgcaagagcc

SEQ ID NO: 317054 - RNA, 19 nt, Artificial Sequence
  Description of Artificial Sequence: Synthetic oligonucleotide
uguuacguaugauaccacu

SEQ ID NO: 317055 - RNA, 19 nt, Artificial Sequence
  Description of Artificial Sequence: Synthetic oligonucleotide
agaucagaagaaaggauuc

SEQ ID NO: 317056 - RNA, 19 nt, Artificial Sequence
  Description of Artificial Sequence: Synthetic oligonucleotide
aacuacacauuucgguuga

SEQ ID NO: 317057 - RNA, 19 nt, Artificial Sequence
  Description of Artificial Sequence: Synthetic oligonucleotide
uuuggcccugaucacuacg

SEQ ID NO: 317058 - RNA, 19 nt, Artificial Sequence
  Description of Artificial Sequence: Synthetic oligonucleotide
cuuuuaacaacccucaggu

SEQ ID NO: 317059 - RNA, 19 nt, Artificial Sequence
  Description of Artificial Sequence: Synthetic oligonucleotide
gaaaggauuccucgguccc

SEQ ID NO: 317060 - RNA, 19 nt, Artificial Sequence
  Description of Artificial Sequence: Synthetic oligonucleotide
ugcacaacaugaaaauguc

SEQ ID NO: 317061 - RNA, 19 nt, Artificial Sequence
  Description of Artificial Sequence: Synthetic oligonucleotide
caaaaugcgcauucccagg

SEQ ID NO: 317062 - RNA, 19 nt, Artificial Sequence
  Description of Artificial Sequence: Synthetic oligonucleotide
ucacuucucuugaugcagg

SEQ ID NO: 317063 - RNA, 19 nt, Artificial Sequence
  Description of Artificial Sequence: Synthetic oligonucleotide
aucacuacgucugcauugc

SEQ ID NO: 317064 - RNA, 19 nt, Artificial Sequence
  Description of Artificial Sequence: Synthetic oligonucleotide
guguagauaaacucgaugu

SEQ ID NO: 317065 - RNA, 19 nt, Artificial Sequence
  Description of Artificial Sequence: Synthetic oligonucleotide
agagccgucacuucucuug

SEQ ID NO: 317066 - RNA, 19 nt, Artificial Sequence
  Description of Artificial Sequence: Synthetic oligonucleotide
cauuguuacguaugauacc

SEQ ID NO: 317067 - RNA, 19 nt, Artificial Sequence
  Description of Artificial Sequence: Synthetic oligonucleotide
agagcaucacugcacaaca

SEQ ID NO: 317068 - RNA, 19 nt, Artificial Sequence
  Description of Artificial Sequence: Synthetic oligonucleotide
cuccggagcaaguaggugc

SEQ ID NO: 317069 - RNA, 19 nt, Artificial Sequence
  Description of Artificial Sequence: Synthetic oligonucleotide
cacauuucgguugauuugc

SEQ ID NO: 317070 - RNA, 19 nt, Artificial Sequence
  Description of Artificial Sequence: Synthetic oligonucleotide
cucgcuuacugcuuuggcc

SEQ ID NO: 317071 - RNA, 19 nt, Artificial Sequence
  Description of Artificial Sequence: Synthetic oligonucleotide
uguccauugacagagcaau

SEQ ID NO: 317072 - RNA, 19 nt, Artificial Sequence
  Description of Artificial Sequence: Synthetic oligonucleotide
acacauuucgguugauuug

SEQ ID NO: 317073 - RNA, 19 nt, Artificial Sequence
  Description of Artificial Sequence: Synthetic oligonucleotide
gaggguaaugugcaucuug

SEQ ID NO: 317074 - RNA, 19 nt, Artificial Sequence
  Description of Artificial Sequence: Synthetic oligonucleotide
acuagcgugaacccacuug

SEQ ID NO: 317075 - RNA, 19 nt, Artificial Sequence
  Description of Artificial Sequence: Synthetic oligonucleotide
uagauaaacucgaugucuu

SEQ ID NO: 317076 - RNA, 19 nt, Artificial Sequence
  Description of Artificial Sequence: Synthetic oligonucleotide
augucuuaauauuugucaa

SEQ ID NO: 317077 - RNA, 19 nt, Artificial Sequence
  Description of Artificial Sequence: Synthetic oligonucleotide
acaacccucagguguugcc

SEQ ID NO: 317078 - RNA, 19 nt, Artificial Sequence
  Description of Artificial Sequence: Synthetic oligonucleotide
aaacgagggacaugucucu

SEQ ID NO: 317079 - RNA, 19 nt, Artificial Sequence
  Description of Artificial Sequence: Synthetic oligonucleotide
ugaaagacuucgaguuugc

SEQ ID NO: 317080 - RNA, 19 nt, Artificial Sequence
  Description of Artificial Sequence: Synthetic oligonucleotide
uuaacaacccucagguguu

SEQ ID NO: 317081 - RNA, 19 nt, Artificial Sequence
  Description of Artificial Sequence: Synthetic oligonucleotide
uuugauaauaugguuuauu

SEQ ID NO: 317082 - RNA, 19 nt, Artificial Sequence
  Description of Artificial Sequence: Synthetic oligonucleotide
ugggcauuguuacguauga

SEQ ID NO: 317083 - RNA, 19 nt, Artificial Sequence
  Description of Artificial Sequence: Synthetic oligonucleotide
ugcauugcaaaacgccugu

SEQ ID NO: 317084 - RNA, 19 nt, Artificial Sequence
  Description of Artificial Sequence: Synthetic oligonucleotide
gucacagaggguaaugugc

SEQ ID NO: 317085 - RNA, 19 nt, Artificial Sequence
  Description of Artificial Sequence: Synthetic oligonucleotide
ucucucgucugccuggugu

SEQ ID NO: 317086 - RNA, 19 nt, Artificial Sequence
  Description of Artificial Sequence: Synthetic oligonucleotide
uauugcgcuccgaggaucc

SEQ ID NO: 317087 - RNA, 19 nt, Artificial Sequence
  Description of Artificial Sequence: Synthetic oligonucleotide
acuacgucugcauugcaaa

SEQ ID NO: 317088 - RNA, 19 nt, Artificial Sequence
  Description of Artificial Sequence: Synthetic oligonucleotide
ggcacuuugucccaguagc

SEQ ID NO: 317089 - RNA, 19 nt, Artificial Sequence
  Description of Artificial Sequence: Synthetic oligonucleotide
auauuggauccucuugaug

SEQ ID NO: 317090 - RNA, 19 nt, Artificial Sequence
  Description of Artificial Sequence: Synthetic oligonucleotide
gauguuuuauucaugcugu

SEQ ID NO: 317091 - RNA, 19 nt, Artificial Sequence
  Description of Artificial Sequence: Synthetic oligonucleotide
agggccuuaagagacgggg

SEQ ID NO: 317092 - RNA, 19 nt, Artificial Sequence
  Description of Artificial Sequence: Synthetic oligonucleotide
uaagggccuuaagagacgg

SEQ ID NO: 317093 - RNA, 19 nt, Artificial Sequence
  Description of Artificial Sequence: Synthetic oligonucleotide
aaacgccuguugcgggugc

SEQ ID NO: 317094 - RNA, 19 nt, Artificial Sequence
  Description of Artificial Sequence: Synthetic oligonucleotide
ugggauagaccgcaggguc

SEQ ID NO: 317095 - RNA, 19 nt, Artificial Sequence
  Description of Artificial Sequence: Synthetic oligonucleotide
ugugucccagggcacaaug

SEQ ID NO: 317096 - RNA, 19 nt, Artificial Sequence
  Description of Artificial Sequence: Synthetic oligonucleotide
cacacuagcgugaacccac

SEQ ID NO: 317097 - RNA, 19 nt, Artificial Sequence
  Description of Artificial Sequence: Synthetic oligonucleotide
gaacccacuuggaugauug

SEQ ID NO: 317098 - RNA, 19 nt, Artificial Sequence
  Description of Artificial Sequence: Synthetic oligonucleotide
aagaaugcucacagcgaac

SEQ ID NO: 317099 - RNA, 19 nt, Artificial Sequence
  Description of Artificial Sequence: Synthetic oligonucleotide
cauugcaaaacgccuguug

SEQ ID NO: 317100 - RNA, 19 nt, Artificial Sequence
  Description of Artificial Sequence: Synthetic oligonucleotide
gauuccucggucccaggcc

SEQ ID NO: 317101 - RNA, 19 nt, Artificial Sequence
  Description of Artificial Sequence: Synthetic oligonucleotide
guuacguaugauaccacug

SEQ ID NO: 317102 - RNA, 19 nt, Artificial Sequence
  Description of Artificial Sequence: Synthetic oligonucleotide
acguguaaacgucaucuga

SEQ ID NO: 317103 - RNA, 19 nt, Artificial Sequence
  Description of Artificial Sequence: Synthetic oligonucleotide
aaugggcauuguuacguau

SEQ ID NO: 317104 - RNA, 19 nt, Artificial Sequence
  Description of Artificial Sequence: Synthetic oligonucleotide
ggugggauagaccgcaggg

SEQ ID NO: 317105 - RNA, 19 nt, Artificial Sequence
  Description of Artificial Sequence: Synthetic oligonucleotide
acaacaaccgucaaguguu

SEQ ID NO: 317106 - RNA, 19 nt, Artificial Sequence
  Description of Artificial Sequence: Synthetic oligonucleotide
cugaaagacuucgaguuug

SEQ ID NO: 317107 - RNA, 19 nt, Artificial Sequence
  Description of Artificial Sequence: Synthetic oligonucleotide
cuauaagggccuuaagaga

SEQ ID NO: 317108 - RNA, 19 nt, Artificial Sequence
  Description of Artificial Sequence: Synthetic oligonucleotide
ugccuuuccugcaauuaga

SEQ ID NO: 317109 - RNA, 19 nt, Artificial Sequence
  Description of Artificial Sequence: Synthetic oligonucleotide
uauacguguaaacgucauc

SEQ ID NO: 317110 - RNA, 19 nt, Artificial Sequence
  Description of Artificial Sequence: Synthetic oligonucleotide
uguguuugcugcgggcucg

SEQ ID NO: 317111 - RNA, 19 nt, Artificial Sequence
  Description of Artificial Sequence: Synthetic oligonucleotide
uuaagagacggggaagggu

SEQ ID NO: 317112 - RNA, 19 nt, Artificial Sequence
  Description of Artificial Sequence: Synthetic oligonucleotide
agcgagaccccgcacacug

SEQ ID NO: 317113 - RNA, 19 nt, Artificial Sequence
  Description of Artificial Sequence: Synthetic oligonucleotide
ugcaccggggagcagcugc

SEQ ID NO: 317114 - RNA, 19 nt, Artificial Sequence
  Description of Artificial Sequence: Synthetic oligonucleotide
uugccguagaugucguucc

SEQ ID NO: 317115 - RNA, 19 nt, Artificial Sequence
  Description of Artificial Sequence: Synthetic oligonucleotide
uacguguaaacgucaucug

SEQ ID NO: 317116 - RNA, 19 nt, Artificial Sequence
  Description of Artificial Sequence: Synthetic oligonucleotide
uuuauugcgcuccgaggau

SEQ ID NO: 317117 - RNA, 19 nt, Artificial Sequence
  Description of Artificial Sequence: Synthetic oligonucleotide
aaaugcgcauucccaggcu

SEQ ID NO: 317118 - RNA, 19 nt, Artificial Sequence
  Description of Artificial Sequence: Synthetic oligonucleotide
uugacagagcaaucacuca

SEQ ID NO: 317119 - RNA, 19 nt, Artificial Sequence
  Description of Artificial Sequence: Synthetic oligonucleotide
uaaacucgaugucuuuguc

SEQ ID NO: 317120 - RNA, 19 nt, Artificial Sequence
  Description of Artificial Sequence: Synthetic oligonucleotide
gguaaugugcaucuugcca

SEQ ID NO: 317121 - RNA, 19 nt, Artificial Sequence
  Description of Artificial Sequence: Synthetic oligonucleotide
guaugugacagugcccacg

SEQ ID NO: 317122 - RNA, 19 nt, Artificial Sequence
  Description of Artificial Sequence: Synthetic oligonucleotide
uggcacuuugucccaguag

SEQ ID NO: 317123 - RNA, 19 nt, Artificial Sequence
  Description of Artificial Sequence: Synthetic oligonucleotide
agacuucgaguuugcuggc

SEQ ID NO: 317124 - RNA, 19 nt, Artificial Sequence
  Description of Artificial Sequence: Synthetic oligonucleotide
acguaugauaccacugcac

SEQ ID NO: 317125 - RNA, 19 nt, Artificial Sequence
  Description of Artificial Sequence: Synthetic oligonucleotide
ccaacguccagcgagaccc

SEQ ID NO: 317126 - RNA, 19 nt, Artificial Sequence
  Description of Artificial Sequence: Synthetic oligonucleotide
uucgaguuugcuggcauga

SEQ ID NO: 317127 - RNA, 19 nt, Artificial Sequence
  Description of Artificial Sequence: Synthetic oligonucleotide
aaacacggcucagaggggu

SEQ ID NO: 317128 - RNA, 19 nt, Artificial Sequence
  Description of Artificial Sequence: Synthetic oligonucleotide
agcgugugaucuugcacuc

SEQ ID NO: 317129 - RNA, 19 nt, Artificial Sequence
  Description of Artificial Sequence: Synthetic oligonucleotide
gaaaugggcauuguuacgu

SEQ ID NO: 317130 - RNA, 19 nt, Artificial Sequence
  Description of Artificial Sequence: Synthetic oligonucleotide
ucucgcuuacugcuuuggc

SEQ ID NO: 317131 - RNA, 19 nt, Artificial Sequence
  Description of Artificial Sequence: Synthetic oligonucleotide
cugcauugcaaaacgccug

SEQ ID NO: 317132 - RNA, 19 nt, Artificial Sequence
  Description of Artificial Sequence: Synthetic oligonucleotide
uuauuuggcugaagccaga

SEQ ID NO: 317133 - RNA, 19 nt, Artificial Sequence
  Description of Artificial Sequence: Synthetic oligonucleotide
agaugucguucccggaauc

SEQ ID NO: 317134 - RNA, 19 nt, Artificial Sequence
  Description of Artificial Sequence: Synthetic oligonucleotide
cuuaagagacggggaaggg

SEQ ID NO: 317135 - RNA, 19 nt, Artificial Sequence
  Description of Artificial Sequence: Synthetic oligonucleotide
auacaaagcaucagagaca

SEQ ID NO: 317136 - RNA, 19 nt, Artificial Sequence
  Description of Artificial Sequence: Synthetic oligonucleotide
auccagagacacucauccg

SEQ ID NO: 317137 - RNA, 19 nt, Artificial Sequence
  Description of Artificial Sequence: Synthetic oligonucleotide
cugcacaacaugaaaaugu

SEQ ID NO: 317138 - RNA, 19 nt, Artificial Sequence
  Description of Artificial Sequence: Synthetic oligonucleotide
ucagggccuuugaacaucu

SEQ ID NO: 317139 - RNA, 19 nt, Artificial Sequence
  Description of Artificial Sequence: Synthetic oligonucleotide
ugucguucccggaauccac

SEQ ID NO: 317140 - RNA, 19 nt, Artificial Sequence
  Description of Artificial Sequence: Synthetic oligonucleotide
uucucgcuuacugcuuugg

SEQ ID NO: 317141 - RNA, 19 nt, Artificial Sequence
  Description of Artificial Sequence: Synthetic oligonucleotide
auugccugucagcuguaug

SEQ ID NO: 317142 - RNA, 19 nt, Artificial Sequence
  Description of Artificial Sequence: Synthetic oligonucleotide
aaaugggcauuguuacgua

SEQ ID NO: 317143 - RNA, 19 nt, Artificial Sequence
  Description of Artificial Sequence: Synthetic oligonucleotide
cuguaugugacagugccca

SEQ ID NO: 317144 - RNA, 19 nt, Artificial Sequence
  Description of Artificial Sequence: Synthetic oligonucleotide
auuccucggucccaggcca

SEQ ID NO: 317145 - RNA, 19 nt, Artificial Sequence
  Description of Artificial Sequence: Synthetic oligonucleotide
agucucacaacaaccguca

SEQ ID NO: 317146 - RNA, 19 nt, Artificial Sequence
  Description of Artificial Sequence: Synthetic oligonucleotide
gcgaacgucagaaacaaac

SEQ ID NO: 317147 - RNA, 19 nt, Artificial Sequence
  Description of Artificial Sequence: Synthetic oligonucleotide
aaaacgccuguugcgggug

SEQ ID NO: 317148 - RNA, 19 nt, Artificial Sequence
  Description of Artificial Sequence: Synthetic oligonucleotide
gucaagcagagauuuggga

SEQ ID NO: 317149 - RNA, 19 nt, Artificial Sequence
  Description of Artificial Sequence: Synthetic oligonucleotide
guagaugucguucccggaa

SEQ ID NO: 317150 - RNA, 19 nt, Artificial Sequence
  Description of Artificial Sequence: Synthetic oligonucleotide
uagaugucguucccggaau

SEQ ID NO: 317151 - RNA, 19 nt, Artificial Sequence
  Description of Artificial Sequence: Synthetic oligonucleotide
ggaaaaucagauauucaga

SEQ ID NO: 317152 - RNA, 19 nt, Artificial Sequence
  Description of Artificial Sequence: Synthetic oligonucleotide
agagauuugggaauauaua

SEQ ID NO: 317153 - RNA, 19 nt, Artificial Sequence
  Description of Artificial Sequence: Synthetic oligonucleotide
gagauguagcaugggauca

SEQ ID NO: 317154 - RNA, 19 nt, Artificial Sequence
  Description of Artificial Sequence: Synthetic oligonucleotide
cauuucgguugauuugcug

SEQ ID NO: 317155 - RNA, 19 nt, Artificial Sequence
  Description of Artificial Sequence: Synthetic oligonucleotide
uggaccagucuaaacccuc

SEQ ID NO: 317156 - RNA, 19 nt, Artificial Sequence
  Description of Artificial Sequence: Synthetic oligonucleotide
auuugggaauauauacgug

SEQ ID NO: 317157 - RNA, 19 nt, Artificial Sequence
  Description of Artificial Sequence: Synthetic oligonucleotide
uuguuacguaugauaccac

SEQ ID NO: 317158 - RNA, 19 nt, Artificial Sequence
  Description of Artificial Sequence: Synthetic oligonucleotide
acgucagaaacaaaccaga

SEQ ID NO: 317159 - RNA, 19 nt, Artificial Sequence
  Description of Artificial Sequence: Synthetic oligonucleotide
aaaggauuccucgguccca

SEQ ID NO: 317160 - RNA, 19 nt, Artificial Sequence
  Description of Artificial Sequence: Synthetic oligonucleotide
guccucgaugucaagaaac

SEQ ID NO: 317161 - RNA, 19 nt, Artificial Sequence
  Description of Artificial Sequence: Synthetic oligonucleotide
gugcagaaucacacuagcg

SEQ ID NO: 317162 - RNA, 19 nt, Artificial Sequence
  Description of Artificial Sequence: Synthetic oligonucleotide
cuggaaaaucagauauuca

SEQ ID NO: 317163 - RNA, 19 nt, Artificial Sequence
  Description of Artificial Sequence: Synthetic oligonucleotide
guugccguagaugucguuc

SEQ ID NO: 317164 - RNA, 19 nt, Artificial Sequence
  Description of Artificial Sequence: Synthetic oligonucleotide
uccugggaagagcaucacu

SEQ ID NO: 317165 - RNA, 19 nt, Artificial Sequence
  Description of Artificial Sequence: Synthetic oligonucleotide
gucucagauuucauauucc

SEQ ID NO: 317166 - RNA, 19 nt, Artificial Sequence
  Description of Artificial Sequence: Synthetic oligonucleotide
gaucucauauuggauccuc

SEQ ID NO: 317167 - RNA, 19 nt, Artificial Sequence
  Description of Artificial Sequence: Synthetic oligonucleotide
cagaaaacgagggacaugu

SEQ ID NO: 317168 - RNA, 19 nt, Artificial Sequence
  Description of Artificial Sequence: Synthetic oligonucleotide
uccucgaugccgaaacauu

SEQ ID NO: 317169 - RNA, 19 nt, Artificial Sequence
  Description of Artificial Sequence: Synthetic oligonucleotide
uucuauggcuguguuugcu

SEQ ID NO: 317170 - RNA, 19 nt, Artificial Sequence
  Description of Artificial Sequence: Synthetic oligonucleotide
ucgguugauuugcugcaaa

SEQ ID NO: 317171 - RNA, 19 nt, Artificial Sequence
  Description of Artificial Sequence: Synthetic oligonucleotide
gggguugccguagaugucg

SEQ ID NO: 317172 - RNA, 19 nt, Artificial Sequence
  Description of Artificial Sequence: Synthetic oligonucleotide
agcgugaacccacuuggau

SEQ ID NO: 317173 - RNA, 19 nt, Artificial Sequence
  Description of Artificial Sequence: Synthetic oligonucleotide
uacuccuucuuuccuccaa

SEQ ID NO: 317174 - RNA, 19 nt, Artificial Sequence
  Description of Artificial Sequence: Synthetic oligonucleotide
caagcgggcuggaaaauca

SEQ ID NO: 317175 - RNA, 19 nt, Artificial Sequence
  Description of Artificial Sequence: Synthetic oligonucleotide
acccacaaccauguuuagg

SEQ ID NO: 317176 - RNA, 19 nt, Artificial Sequence
  Description of Artificial Sequence: Synthetic oligonucleotide
ugcagaaaacgagggacau

SEQ ID NO: 317177 - RNA, 19 nt, Artificial Sequence
  Description of Artificial Sequence: Synthetic oligonucleotide
gaaacacggcucagagggg

SEQ ID NO: 317178 - RNA, 19 nt, Artificial Sequence
  Description of Artificial Sequence: Synthetic oligonucleotide
caucugguaccugugguuc

SEQ ID NO: 317179 - RNA, 19 nt, Artificial Sequence
  Description of Artificial Sequence: Synthetic oligonucleotide
cuucuauggcuguguuugc

SEQ ID NO: 317180 - RNA, 19 nt, Artificial Sequence
  Description of Artificial Sequence: Synthetic oligonucleotide
aggagauguagcaugggau

SEQ ID NO: 317181 - RNA, 19 nt, Artificial Sequence
  Description of Artificial Sequence: Synthetic oligonucleotide
guaccaugcgcaagagccg

SEQ ID NO: 317182 - RNA, 19 nt, Artificial Sequence
  Description of Artificial Sequence: Synthetic oligonucleotide
cucagguguugccagcaug

SEQ ID NO: 317183 - RNA, 19 nt, Artificial Sequence
  Description of Artificial Sequence: Synthetic oligonucleotide
ucggucccaggccagcugu

SEQ ID NO: 317184 - RNA, 19 nt, Artificial Sequence
  Description of Artificial Sequence: Synthetic oligonucleotide
ucacacuagcgugaaccca

SEQ ID NO: 317185 - RNA, 19 nt, Artificial Sequence
  Description of Artificial Sequence: Synthetic oligonucleotide
gggaguagagagaggaaag

SEQ ID NO: 317186 - RNA, 19 nt, Artificial Sequence
  Description of Artificial Sequence: Synthetic oligonucleotide
acgagggacaugucucucu

SEQ ID NO: 317187 - RNA, 19 nt, Artificial Sequence
  Description of Artificial Sequence: Synthetic oligonucleotide
aacccacuuggaugauuga

SEQ ID NO: 317188 - RNA, 19 nt, Artificial Sequence
  Description of Artificial Sequence: Synthetic oligonucleotide
aacguccagcgagaccccg

SEQ ID NO: 317189 - RNA, 19 nt, Artificial Sequence
  Description of Artificial Sequence: Synthetic oligonucleotide
gcgugaacccacuuggaug

SEQ ID NO: 317190 - RNA, 19 nt, Artificial Sequence
  Description of Artificial Sequence: Synthetic oligonucleotide
cgaacgucagaaacaaacc

SEQ ID NO: 317191 - RNA, 19 nt, Artificial Sequence
  Description of Artificial Sequence: Synthetic oligonucleotide
uguaugugacagugcccac

SEQ ID NO: 317192 - RNA, 19 nt, Artificial Sequence
  Description of Artificial Sequence: Synthetic oligonucleotide
ugcucacagcgaacgucag

SEQ ID NO: 317193 - RNA, 19 nt, Artificial Sequence
  Description of Artificial Sequence: Synthetic oligonucleotide
guguaaacgucaucugaaa

SEQ ID NO: 317194 - RNA, 19 nt, Artificial Sequence
  Description of Artificial Sequence: Synthetic oligonucleotide
ggaguagagagaggaaagc

SEQ ID NO: 317195 - RNA, 19 nt, Artificial Sequence
  Description of Artificial Sequence: Synthetic oligonucleotide
gagagcgcggggcagugca

SEQ ID NO: 317196 - RNA, 19 nt, Artificial Sequence
  Description of Artificial Sequence: Synthetic oligonucleotide
uuauugcgcuccgaggauc

SEQ ID NO: 317197 - RNA, 19 nt, Artificial Sequence
  Description of Artificial Sequence: Synthetic oligonucleotide
caucugaaagacuucgagu

SEQ ID NO: 317198 - RNA, 19 nt, Artificial Sequence
  Description of Artificial Sequence: Synthetic oligonucleotide
ugccguagaugucguuccc

SEQ ID NO: 317199 - RNA, 19 nt, Artificial Sequence
  Description of Artificial Sequence: Synthetic oligonucleotide
uaccaugcgcaagagccgu

SEQ ID NO: 317200 - RNA, 19 nt, Artificial Sequence
  Description of Artificial Sequence: Synthetic oligonucleotide
uuccucgaugccgaaacau

SEQ ID NO: 317201 - RNA, 19 nt, Artificial Sequence
  Description of Artificial Sequence: Synthetic oligonucleotide
augcucacagcgaacguca

SEQ ID NO: 317202 - RNA, 19 nt, Artificial Sequence
  Description of Artificial Sequence: Synthetic oligonucleotide
ugcccacgagaccugguaa

SEQ ID NO: 317203 - RNA, 19 nt, Artificial Sequence
  Description of Artificial Sequence: Synthetic oligonucleotide
aagcgggcuggaaaaucag

SEQ ID NO: 317204 - RNA, 19 nt, Artificial Sequence
  Description of Artificial Sequence: Synthetic oligonucleotide
guucgucucagauuucaua

SEQ ID NO: 317205 - RNA, 19 nt, Artificial Sequence
  Description of Artificial Sequence: Synthetic oligonucleotide
uagcgugaacccacuugga

SEQ ID NO: 317206 - RNA, 19 nt, Artificial Sequence
  Description of Artificial Sequence: Synthetic oligonucleotide
gccaucuggcacuuugucc

SEQ ID NO: 317207 - RNA, 19 nt, Artificial Sequence
  Description of Artificial Sequence: Synthetic oligonucleotide
aucuugcacucgcagccca

SEQ ID NO: 317208 - RNA, 19 nt, Artificial Sequence
  Description of Artificial Sequence: Synthetic oligonucleotide
auauacguguaaacgucau

SEQ ID NO: 317209 - RNA, 19 nt, Artificial Sequence
  Description of Artificial Sequence: Synthetic oligonucleotide
ggauuccucggucccaggc

SEQ ID NO: 317210 - RNA, 19 nt, Artificial Sequence
  Description of Artificial Sequence: Synthetic oligonucleotide
ucgucucagauuucauauu

SEQ ID NO: 317211 - RNA, 19 nt, Artificial Sequence
  Description of Artificial Sequence: Synthetic oligonucleotide
agcaaguaggugccccagu

SEQ ID NO: 317212 - RNA, 19 nt, Artificial Sequence
  Description of Artificial Sequence: Synthetic oligonucleotide
cccuauaagggccuuaaga

SEQ ID NO: 317213 - RNA, 19 nt, Artificial Sequence
  Description of Artificial Sequence: Synthetic oligonucleotide
augggaucauggggcagcg

SEQ ID NO: 317214 - RNA, 19 nt, Artificial Sequence
  Description of Artificial Sequence: Synthetic oligonucleotide
cagcgugugaucuugcacu

SEQ ID NO: 317215 - RNA, 19 nt, Artificial Sequence
  Description of Artificial Sequence: Synthetic oligonucleotide
ucacuacgucugcauugca

SEQ ID NO: 317216 - RNA, 19 nt, Artificial Sequence
  Description of Artificial Sequence: Synthetic oligonucleotide
aagggccuuaagagacggg

SEQ ID NO: 317217 - RNA, 19 nt, Artificial Sequence
  Description of Artificial Sequence: Synthetic oligonucleotide
aaccauguuuagggaaaau

SEQ ID NO: 317218 - RNA, 19 nt, Artificial Sequence
  Description of Artificial Sequence: Synthetic oligonucleotide
gaaucacacuagcgugaac

SEQ ID NO: 317219 - RNA, 19 nt, Artificial Sequence
  Description of Artificial Sequence: Synthetic oligonucleotide
gauagaccgcagggucucg

SEQ ID NO: 317220 - RNA, 19 nt, Artificial Sequence
  Description of Artificial Sequence: Synthetic oligonucleotide
augcgcaagagccgucacu

SEQ ID NO: 317221 - RNA, 19 nt, Artificial Sequence
  Description of Artificial Sequence: Synthetic oligonucleotide
gagccgucacuucucuuga

SEQ ID NO: 317222 - RNA, 19 nt, Artificial Sequence
  Description of Artificial Sequence: Synthetic oligonucleotide
acgugcagccggcuuguug

SEQ ID NO: 317223 - RNA, 19 nt, Artificial Sequence
  Description of Artificial Sequence: Synthetic oligonucleotide
agaaaacgagggacauguc

SEQ ID NO: 317224 - RNA, 19 nt, Artificial Sequence
  Description of Artificial Sequence: Synthetic oligonucleotide
cuucucgcuuacugcuuug

SEQ ID NO: 317225 - RNA, 19 nt, Artificial Sequence
  Description of Artificial Sequence: Synthetic oligonucleotide
agugcacccagcggagaag

SEQ ID NO: 317226 - RNA, 19 nt, Artificial Sequence
  Description of Artificial Sequence: Synthetic oligonucleotide
guucaaacggaaacaaaau

SEQ ID NO: 317227 - RNA, 19 nt, Artificial Sequence
  Description of Artificial Sequence: Synthetic oligonucleotide
gguacccaaggaucaaaga

SEQ ID NO: 317228 - RNA, 19 nt, Artificial Sequence
  Description of Artificial Sequence: Synthetic oligonucleotide
cacuacgucugcauugcaa

SEQ ID NO: 317229 - RNA, 19 nt, Artificial Sequence
  Description of Artificial Sequence: Synthetic oligonucleotide
aacuuggccuggugcccgu

SEQ ID NO: 317230 - RNA, 19 nt, Artificial Sequence
  Description of Artificial Sequence: Synthetic oligonucleotide
augucguucccggaaucca

SEQ ID NO: 317231 - RNA, 19 nt, Artificial Sequence
  Description of Artificial Sequence: Synthetic oligonucleotide
cacgccccuccucaccugg

SEQ ID NO: 317232 - RNA, 19 nt, Artificial Sequence
  Description of Artificial Sequence: Synthetic oligonucleotide
cuuauggguccucgauguc

SEQ ID NO: 317233 - RNA, 19 nt, Artificial Sequence
  Description of Artificial Sequence: Synthetic oligonucleotide
cgucucagauuucauauuc

SEQ ID NO: 317234 - RNA, 19 nt, Artificial Sequence
  Description of Artificial Sequence: Synthetic oligonucleotide
uggugcccguugaugcucu

SEQ ID NO: 317235 - RNA, 19 nt, Artificial Sequence
  Description of Artificial Sequence: Synthetic oligonucleotide
ggacagaaauuauuuggcu

SEQ ID NO: 317236 - RNA, 19 nt, Artificial Sequence
  Description of Artificial Sequence: Synthetic oligonucleotide
cagaacacaacagccuuaa

SEQ ID NO: 317237 - RNA, 19 nt, Artificial Sequence
  Description of Artificial Sequence: Synthetic oligonucleotide
agauguagcaugggaucau

SEQ ID NO: 317238 - RNA, 19 nt, Artificial Sequence
  Description of Artificial Sequence: Synthetic oligonucleotide
cguaugauaccacugcaca

SEQ ID NO: 317239 - RNA, 19 nt, Artificial Sequence
  Description of Artificial Sequence: Synthetic oligonucleotide
uucgguugauuugcugcaa

SEQ ID NO: 317240 - RNA, 19 nt, Artificial Sequence
  Description of Artificial Sequence: Synthetic oligonucleotide
guagcuuguguguuuguuu

SEQ ID NO: 317241 - RNA, 19 nt, Artificial Sequence
  Description of Artificial Sequence: Synthetic oligonucleotide
ugcgcauucccaggcucug

SEQ ID NO: 317242 - RNA, 19 nt, Artificial Sequence
  Description of Artificial Sequence: Synthetic oligonucleotide
cuguugcgggugcaccggg

SEQ ID NO: 317243 - RNA, 19 nt, Artificial Sequence
  Description of Artificial Sequence: Synthetic oligonucleotide
ucgucugccugguguggcu

SEQ ID NO: 317244 - RNA, 19 nt, Artificial Sequence
  Description of Artificial Sequence: Synthetic oligonucleotide
cgagccgccguuuuauugc

SEQ ID NO: 317245 - RNA, 19 nt, Artificial Sequence
  Description of Artificial Sequence: Synthetic oligonucleotide
guugcgggugcaccgggga

SEQ ID NO: 317246 - RNA, 19 nt, Artificial Sequence
  Description of Artificial Sequence: Synthetic oligonucleotide
guuugccugucucucgucu

SEQ ID NO: 317247 - RNA, 19 nt, Artificial Sequence
  Description of Artificial Sequence: Synthetic oligonucleotide
cgugugaucuugcacucgc

SEQ ID NO: 317248 - RNA, 19 nt, Artificial Sequence
  Description of Artificial Sequence: Synthetic oligonucleotide
acggcucagagggguggcc

SEQ ID NO: 317249 - RNA, 19 nt, Artificial Sequence
  Description of Artificial Sequence: Synthetic oligonucleotide
gcccugaucacuacgucug

SEQ ID NO: 317250 - RNA, 19 nt, Artificial Sequence
  Description of Artificial Sequence: Synthetic oligonucleotide
cuccgcgguaccaugcgca

SEQ ID NO: 317251 - RNA, 19 nt, Artificial Sequence
  Description of Artificial Sequence: Synthetic oligonucleotide
cgugaacccacuuggauga

SEQ ID NO: 317252 - RNA, 19 nt, Artificial Sequence
  Description of Artificial Sequence: Synthetic oligonucleotide
cugcuuuggcccugaucac

SEQ ID NO: 317253 - RNA, 19 nt, Artificial Sequence
  Description of Artificial Sequence: Synthetic oligonucleotide
ugccuucuauggcuguguu

SEQ ID NO: 317254 - RNA, 19 nt, Artificial Sequence
  Description of Artificial Sequence: Synthetic oligonucleotide
gccguuuuauugcgcuccg

SEQ ID NO: 317255 - RNA, 19 nt, Artificial Sequence
  Description of Artificial Sequence: Synthetic oligonucleotide
uccgcgguaccaugcgcaa

SEQ ID NO: 317256 - RNA, 19 nt, Artificial Sequence
  Description of Artificial Sequence: Synthetic oligonucleotide
acuccggagcaaguaggug

SEQ ID NO: 317257 - RNA, 19 nt, Artificial Sequence
  Description of Artificial Sequence: Synthetic oligonucleotide
ggacccuuaaauauugccu

SEQ ID NO: 317258 - RNA, 19 nt, Artificial Sequence
  Description of Artificial Sequence: Synthetic oligonucleotide
ggggcagugcacccagcgg

SEQ ID NO: 317259 - RNA, 19 nt, Artificial Sequence
  Description of Artificial Sequence: Synthetic oligonucleotide
gcagcgugugaucuugcac

SEQ ID NO: 317260 - RNA, 19 nt, Artificial Sequence
  Description of Artificial Sequence: Synthetic oligonucleotide
gaaugcucacagcgaacgu

SEQ ID NO: 317261 - RNA, 19 nt, Artificial Sequence
  Description of Artificial Sequence: Synthetic oligonucleotide
caugcgcaagagccgucac

SEQ ID NO: 317262 - RNA, 19 nt, Artificial Sequence
  Description of Artificial Sequence: Synthetic oligonucleotide
cauauuggauccucuugau

SEQ ID NO: 317263 - RNA, 19 nt, Artificial Sequence
  Description of Artificial Sequence: Synthetic oligonucleotide
ugucucucgucugccuggu

SEQ ID NO: 317264 - RNA, 19 nt, Artificial Sequence
  Description of Artificial Sequence: Synthetic oligonucleotide
caacguccagcgagacccc

SEQ ID NO: 317265 - RNA, 19 nt, Artificial Sequence
  Description of Artificial Sequence: Synthetic oligonucleotide
cagcgaacgucagaaacaa

SEQ ID NO: 317266 - RNA, 19 nt, Artificial Sequence
  Description of Artificial Sequence: Synthetic oligonucleotide
ggcgagcgagcgcagcccg

SEQ ID NO: 317267 - RNA, 19 nt, Artificial Sequence
  Description of Artificial Sequence: Synthetic oligonucleotide
auagaccgcagggucucgu

SEQ ID NO: 317268 - RNA, 19 nt, Artificial Sequence
  Description of Artificial Sequence: Synthetic oligonucleotide
gacuucgaguuugcuggca

SEQ ID NO: 317269 - RNA, 19 nt, Artificial Sequence
  Description of Artificial Sequence: Synthetic oligonucleotide
aacgccuguugcgggugca

SEQ ID NO: 317270 - RNA, 19 nt, Artificial Sequence
  Description of Artificial Sequence: Synthetic oligonucleotide
ucucgugggcugguccaug

SEQ ID NO: 317271 - RNA, 19 nt, Artificial Sequence
  Description of Artificial Sequence: Synthetic oligonucleotide
gccguagaugucguucccg

SEQ ID NO: 317272 - RNA, 19 nt, Artificial Sequence
  Description of Artificial Sequence: Synthetic oligonucleotide
cccagcggagaagaaagag

SEQ ID NO: 317273 - RNA, 19 nt, Artificial Sequence
  Description of Artificial Sequence: Synthetic oligonucleotide
ggagcaaguaggugcccca

SEQ ID NO: 317274 - RNA, 19 nt, Artificial Sequence
  Description of Artificial Sequence: Synthetic oligonucleotide
cgacuccggagcaaguagg

SEQ ID NO: 317275 - RNA, 19 nt, Artificial Sequence
  Description of Artificial Sequence: Synthetic oligonucleotide
gcuguaugugacagugccc

SEQ ID NO: 317276 - RNA, 19 nt, Artificial Sequence
  Description of Artificial Sequence: Synthetic oligonucleotide
cguguaaacgucaucugaa

SEQ ID NO: 317277 - RNA, 19 nt, Artificial Sequence
  Description of Artificial Sequence: Synthetic oligonucleotide
agacacgugcagccggcuu

SEQ ID NO: 317278 - RNA, 19 nt, Artificial Sequence
  Description of Artificial Sequence: Synthetic oligonucleotide
agcgggcuggaaaaucaga

SEQ ID NO: 317279 - RNA, 19 nt, Artificial Sequence
  Description of Artificial Sequence: Synthetic oligonucleotide
aggguaggacagaaauuau

SEQ ID NO: 317280 - RNA, 19 nt, Artificial Sequence
  Description of Artificial Sequence: Synthetic oligonucleotide
augcgcauucccaggcucu

SEQ ID NO: 317281 - RNA, 19 nt, Artificial Sequence
  Description of Artificial Sequence: Synthetic oligonucleotide
cuccgaggauccucugcuc

SEQ ID NO: 317282 - RNA, 19 nt, Artificial Sequence
  Description of Artificial Sequence: Synthetic oligonucleotide
agugcucagccuggcacau

SEQ ID NO: 317283 - RNA, 19 nt, Artificial Sequence
  Description of Artificial Sequence: Synthetic oligonucleotide
acgccuguugcgggugcac

SEQ ID NO: 317284 - RNA, 19 nt, Artificial Sequence
  Description of Artificial Sequence: Synthetic oligonucleotide
caauuagauacuccuucuu

SEQ ID NO: 317285 - RNA, 19 nt, Artificial Sequence
  Description of Artificial Sequence: Synthetic oligonucleotide
cuggugcccguugaugcuc

SEQ ID NO: 317286 - RNA, 19 nt, Artificial Sequence
  Description of Artificial Sequence: Synthetic oligonucleotide
caucuggcacuuuguccca

SEQ ID NO: 317287 - RNA, 19 nt, Artificial Sequence
  Description of Artificial Sequence: Synthetic oligonucleotide
agccgccguuuuauugcgc

SEQ ID NO: 317288 - RNA, 19 nt, Artificial Sequence
  Description of Artificial Sequence: Synthetic oligonucleotide
agcggcgaggggagagcgc

SEQ ID NO: 317289 - RNA, 19 nt, Artificial Sequence
  Description of Artificial Sequence: Synthetic oligonucleotide
ccaguagcuuguguguuug

SEQ ID NO: 317290 - RNA, 19 nt, Artificial Sequence
  Description of Artificial Sequence: Synthetic oligonucleotide
ggguucgucucagauuuca

SEQ ID NO: 317291 - RNA, 19 nt, Artificial Sequence
  Description of Artificial Sequence: Synthetic oligonucleotide
cuuacugcuuuggcccuga

SEQ ID NO: 317292 - RNA, 19 nt, Artificial Sequence
  Description of Artificial Sequence: Synthetic oligonucleotide
ugcagccggcuuguugacu

SEQ ID NO: 317293 - RNA, 19 nt, Artificial Sequence
  Description of Artificial Sequence: Synthetic oligonucleotide
ccgcgcaaacuuucugucc

SEQ ID NO: 317294 - RNA, 19 nt, Artificial Sequence
  Description of Artificial Sequence: Synthetic oligonucleotide
gccuuaaacuacacauuuc

SEQ ID NO: 317295 - RNA, 19 nt, Artificial Sequence
  Description of Artificial Sequence: Synthetic oligonucleotide
cgucugcauugcaaaacgc

SEQ ID NO: 317296 - RNA, 19 nt, Artificial Sequence
  Description of Artificial Sequence: Synthetic oligonucleotide
gcaggcgucggccgggcgc

SEQ ID NO: 317297 - RNA, 19 nt, Artificial Sequence
  Description of Artificial Sequence: Synthetic oligonucleotide
gguaccugugguucaggcu

SEQ ID NO: 317298 - RNA, 19 nt, Artificial Sequence
  Description of Artificial Sequence: Synthetic oligonucleotide
ggcagugcacccagcggag

SEQ ID NO: 317299 - RNA, 19 nt, Artificial Sequence
  Description of Artificial Sequence: Synthetic oligonucleotide
ggcgaggggagagcgcggg

SEQ ID NO: 317300 - RNA, 19 nt, Artificial Sequence
  Description of Artificial Sequence: Synthetic oligonucleotide
ccaagaguucaaacggaaa

SEQ ID NO: 317301 - RNA, 19 nt, Artificial Sequence
  Description of Artificial Sequence: Synthetic oligonucleotide
cagugcacccagcggagaa

SEQ ID NO: 317302 - RNA, 19 nt, Artificial Sequence
  Description of Artificial Sequence: Synthetic oligonucleotide
acacuagcgugaacccacu

SEQ ID NO: 317303 - RNA, 19 nt, Artificial Sequence
  Description of Artificial Sequence: Synthetic oligonucleotide
cccgcgcaaacuuucuguc

SEQ ID NO: 317304 - RNA, 19 nt, Artificial Sequence
  Description of Artificial Sequence: Synthetic oligonucleotide
guccggcugcuguggcgcg

SEQ ID NO: 317305 - RNA, 19 nt, Artificial Sequence
  Description of Artificial Sequence: Synthetic oligonucleotide
cuccaacguccagcgagac

SEQ ID NO: 317306 - RNA, 19 nt, Artificial Sequence
  Description of Artificial Sequence: Synthetic oligonucleotide
cagccuuaaacuacacauu

SEQ ID NO: 317307 - RNA, 19 nt, Artificial Sequence
  Description of Artificial Sequence: Synthetic oligonucleotide
gucucacaacaaccgucaa

SEQ ID NO: 317308 - RNA, 19 nt, Artificial Sequence
  Description of Artificial Sequence: Synthetic oligonucleotide
ccuguugcgggugcaccgg

SEQ ID NO: 317309 - RNA, 19 nt, Artificial Sequence
  Description of Artificial Sequence: Synthetic oligonucleotide
cucgaugccgaaacauuuu

SEQ ID NO: 317310 - RNA, 19 nt, Artificial Sequence
  Description of Artificial Sequence: Synthetic oligonucleotide
uggggcagcgugugaucuu

SEQ ID NO: 317311 - RNA, 19 nt, Artificial Sequence
  Description of Artificial Sequence: Synthetic oligonucleotide
gcuccgaggauccucugcu

SEQ ID NO: 317312 - RNA, 19 nt, Artificial Sequence
  Description of Artificial Sequence: Synthetic oligonucleotide
gugggauagaccgcagggu

SEQ ID NO: 317313 - RNA, 19 nt, Artificial Sequence
  Description of Artificial Sequence: Synthetic oligonucleotide
ggcccugaucacuacgucu

SEQ ID NO: 317314 - RNA, 19 nt, Artificial Sequence
  Description of Artificial Sequence: Synthetic oligonucleotide
acuacacauuucgguugau

SEQ ID NO: 317315 - RNA, 19 nt, Artificial Sequence
  Description of Artificial Sequence: Synthetic oligonucleotide
cgccguuuuauugcgcucc

SEQ ID NO: 317316 - RNA, 19 nt, Artificial Sequence
  Description of Artificial Sequence: Synthetic oligonucleotide
gugcagccggcuuguugac

SEQ ID NO: 317317 - RNA, 19 nt, Artificial Sequence
  Description of Artificial Sequence: Synthetic oligonucleotide
gcaagagccgucacuucuc

SEQ ID NO: 317318 - RNA, 19 nt, Artificial Sequence
  Description of Artificial Sequence: Synthetic oligonucleotide
caguuggccgcaggggcuc

SEQ ID NO: 317319 - RNA, 19 nt, Artificial Sequence
  Description of Artificial Sequence: Synthetic oligonucleotide
cuguguagauaaacucgau

SEQ ID NO: 317320 - RNA, 19 nt, Artificial Sequence
  Description of Artificial Sequence: Synthetic oligonucleotide
ccaggggacccuuaaauau

SEQ ID NO: 317321 - RNA, 19 nt, Artificial Sequence
  Description of Artificial Sequence: Synthetic oligonucleotide
gcgugugaucuugcacucg

SEQ ID NO: 317322 - RNA, 19 nt, Artificial Sequence
  Description of Artificial Sequence: Synthetic oligonucleotide
ggugccgcuccgcgguacc

SEQ ID NO: 317323 - RNA, 19 nt, Artificial Sequence
  Description of Artificial Sequence: Synthetic oligonucleotide
ggaaagcccagugcucaga

SEQ ID NO: 317324 - RNA, 19 nt, Artificial Sequence
  Description of Artificial Sequence: Synthetic oligonucleotide
gucucucgucugccuggug

SEQ ID NO: 317325 - RNA, 19 nt, Artificial Sequence
  Description of Artificial Sequence: Synthetic oligonucleotide
ggggacccuuaaauauugc

SEQ ID NO: 317326 - RNA, 19 nt, Artificial Sequence
  Description of Artificial Sequence: Synthetic oligonucleotide
ugggaucauggggcagcgu

SEQ ID NO: 317327 - RNA, 19 nt, Artificial Sequence
  Description of Artificial Sequence: Synthetic oligonucleotide
gcuccgcgguaccaugcgc

SEQ ID NO: 317328 - RNA, 19 nt, Artificial Sequence
  Description of Artificial Sequence: Synthetic oligonucleotide
agcauccugggaagagcau

SEQ ID NO: 317329 - RNA, 19 nt, Artificial Sequence
  Description of Artificial Sequence: Synthetic oligonucleotide
ccacaaccauguuuaggga

SEQ ID NO: 317330 - RNA, 19 nt, Artificial Sequence
  Description of Artificial Sequence: Synthetic oligonucleotide
agccugcuuauggguccuc

SEQ ID NO: 317331 - RNA, 19 nt, Artificial Sequence
  Description of Artificial Sequence: Synthetic oligonucleotide
caguucccuauaagggccu

SEQ ID NO: 317332 - RNA, 19 nt, Artificial Sequence
  Description of Artificial Sequence: Synthetic oligonucleotide
cugaugcuaucaagggcau

SEQ ID NO: 317333 - RNA, 19 nt, Artificial Sequence
  Description of Artificial Sequence: Synthetic oligonucleotide
ugccgcuccgcgguaccau

SEQ ID NO: 317334 - RNA, 19 nt, Artificial Sequence
  Description of Artificial Sequence: Synthetic oligonucleotide
guccagcgagaccccgcac

SEQ ID NO: 317335 - RNA, 19 nt, Artificial Sequence
  Description of Artificial Sequence: Synthetic oligonucleotide
ccuccaacguccagcgaga

SEQ ID NO: 317336 - RNA, 19 nt, Artificial Sequence
  Description of Artificial Sequence: Synthetic oligonucleotide
gcuguguuugcugcgggcu

SEQ ID NO: 317337 - RNA, 19 nt, Artificial Sequence
  Description of Artificial Sequence: Synthetic oligonucleotide
gcuuacugcuuuggcccug

SEQ ID NO: 317338 - RNA, 19 nt, Artificial Sequence
  Description of Artificial Sequence: Synthetic oligonucleotide
gcgaggggagagcgcgggg

SEQ ID NO: 317339 - RNA, 19 nt, Artificial Sequence
  Description of Artificial Sequence: Synthetic oligonucleotide
guucccuauaagggccuua

SEQ ID NO: 317340 - RNA, 19 nt, Artificial Sequence
  Description of Artificial Sequence: Synthetic oligonucleotide
gccgccguuuuauugcgcu

SEQ ID NO: 317341 - RNA, 19 nt, Artificial Sequence
  Description of Artificial Sequence: Synthetic oligonucleotide
agcgaacgucagaaacaaa

SEQ ID NO: 317342 - RNA, 19 nt, Artificial Sequence
  Description of Artificial Sequence: Synthetic oligonucleotide
gcgcaaacuuucuguccuc

SEQ ID NO: 317343 - RNA, 19 nt, Artificial Sequence
  Description of Artificial Sequence: Synthetic oligonucleotide
agccggcuuguugacuuuu

SEQ ID NO: 317344 - RNA, 19 nt, Artificial Sequence
  Description of Artificial Sequence: Synthetic oligonucleotide
gagcaucacugcacaacau

SEQ ID NO: 317345 - RNA, 19 nt, Artificial Sequence
  Description of Artificial Sequence: Synthetic oligonucleotide
ggguaggacagaaauuauu

SEQ ID NO: 317346 - RNA, 19 nt, Artificial Sequence
  Description of Artificial Sequence: Synthetic oligonucleotide
ccgucaaguguuucugcaa

SEQ ID NO: 317347 - RNA, 19 nt, Artificial Sequence
  Description of Artificial Sequence: Synthetic oligonucleotide
gcgguaccaugcgcaagag

SEQ ID NO: 317348 - RNA, 19 nt, Artificial Sequence
  Description of Artificial Sequence: Synthetic oligonucleotide
cgcuccgaggauccucugc

SEQ ID NO: 317349 - RNA, 19 nt, Artificial Sequence
  Description of Artificial Sequence: Synthetic oligonucleotide
ggaucauggggcagcgugu

SEQ ID NO: 317350 - RNA, 19 nt, Artificial Sequence
  Description of Artificial Sequence: Synthetic oligonucleotide
ccucaccuggcccgcuccc

SEQ ID NO: 317351 - RNA, 19 nt, Artificial Sequence
  Description of Artificial Sequence: Synthetic oligonucleotide
ccccgcacacugcugagga

SEQ ID NO: 317352 - RNA, 19 nt, Artificial Sequence
  Description of Artificial Sequence: Synthetic oligonucleotide
cgguaccaugcgcaagagc

SEQ ID NO: 317353 - RNA, 19 nt, Artificial Sequence
  Description of Artificial Sequence: Synthetic oligonucleotide
caggcgucggccgggcgca

SEQ ID NO: 317354 - RNA, 19 nt, Artificial Sequence
  Description of Artificial Sequence: Synthetic oligonucleotide
gcgggcuggaaaaucagau

SEQ ID NO: 317355 - RNA, 19 nt, Artificial Sequence
  Description of Artificial Sequence: Synthetic oligonucleotide
ccucgaugccgaaacauuu

SEQ ID NO: 317356 - RNA, 19 nt, Artificial Sequence
  Description of Artificial Sequence: Synthetic oligonucleotide
cgcuccgcgguaccaugcg

SEQ ID NO: 317357 - RNA, 19 nt, Artificial Sequence
  Description of Artificial Sequence: Synthetic oligonucleotide
gggagagcgcggggcagug

SEQ ID NO: 317358 - RNA, 19 nt, Artificial Sequence
  Description of Artificial Sequence: Synthetic oligonucleotide
cgcgcaaacuuucuguccu

SEQ ID NO: 317359 - RNA, 19 nt, Artificial Sequence
  Description of Artificial Sequence: Synthetic oligonucleotide
ccaugcgcaagagccguca

SEQ ID NO: 317360 - RNA, 19 nt, Artificial Sequence
  Description of Artificial Sequence: Synthetic oligonucleotide
ccgccguuuuauugcgcuc

SEQ ID NO: 317361 - RNA, 19 nt, Artificial Sequence
  Description of Artificial Sequence: Synthetic oligonucleotide
ccccaacaaccaagaguuc

SEQ ID NO: 317362 - RNA, 19 nt, Artificial Sequence
  Description of Artificial Sequence: Synthetic oligonucleotide
gcgcauucccaggcucugc

SEQ ID NO: 317363 - RNA, 19 nt, Artificial Sequence
  Description of Artificial Sequence: Synthetic oligonucleotide
ccggcuuguugacuuuuaa

SEQ ID NO: 317364 - RNA, 19 nt, Artificial Sequence
  Description of Artificial Sequence: Synthetic oligonucleotide
ggcucgggccgagccgccg

SEQ ID NO: 317365 - RNA, 19 nt, Artificial Sequence
  Description of Artificial Sequence: Synthetic oligonucleotide
ggcuggaaaaucagauauu

SEQ ID NO: 317366 - RNA, 19 nt, Artificial Sequence
  Description of Artificial Sequence: Synthetic oligonucleotide
gcgagaccccgcacacugc

SEQ ID NO: 317367 - RNA, 19 nt, Artificial Sequence
  Description of Artificial Sequence: Synthetic oligonucleotide
guuggccgcaggggcucca

SEQ ID NO: 317368 - RNA, 19 nt, Artificial Sequence
  Description of Artificial Sequence: Synthetic oligonucleotide
ccccgcgcaaacuuucugu

SEQ ID NO: 317369 - RNA, 19 nt, Artificial Sequence
  Description of Artificial Sequence: Synthetic oligonucleotide
gguucgucucagauuucau

SEQ ID NO: 317370 - RNA, 19 nt, Artificial Sequence
  Description of Artificial Sequence: Synthetic oligonucleotide
ggcggcgagcgagcgcagc

SEQ ID NO: 317371 - RNA, 19 nt, Artificial Sequence
  Description of Artificial Sequence: Synthetic oligonucleotide
gugccgcuccgcgguacca

SEQ ID NO: 317372 - RNA, 19 nt, Artificial Sequence
  Description of Artificial Sequence: Synthetic oligonucleotide
ggcaagaacuuggccuggu

SEQ ID NO: 317373 - RNA, 19 nt, Artificial Sequence
  Description of Artificial Sequence: Synthetic oligonucleotide
cccacgagaccugguaaaa

SEQ ID NO: 317374 - RNA, 19 nt, Artificial Sequence
  Description of Artificial Sequence: Synthetic oligonucleotide
gcagugcacccagcggaga

SEQ ID NO: 317375 - RNA, 19 nt, Artificial Sequence
  Description of Artificial Sequence: Synthetic oligonucleotide
cguccagcgagaccccgca

SEQ ID NO: 317376 - RNA, 19 nt, Artificial Sequence
  Description of Artificial Sequence: Synthetic oligonucleotide
ggugcaccggggagcagcu

SEQ ID NO: 317377 - RNA, 19 nt, Artificial Sequence
  Description of Artificial Sequence: Synthetic oligonucleotide
ccgcgguaccaugcgcaag

SEQ ID NO: 317378 - RNA, 19 nt, Artificial Sequence
  Description of Artificial Sequence: Synthetic oligonucleotide
ggccagcuacacagucuca

SEQ ID NO: 317379 - RNA, 19 nt, Artificial Sequence
  Description of Artificial Sequence: Synthetic oligonucleotide
cacuagcgugaacccacuu

SEQ ID NO: 317380 - RNA, 19 nt, Artificial Sequence
  Description of Artificial Sequence: Synthetic oligonucleotide
gggguucgucucagauuuc

SEQ ID NO: 317381 - RNA, 19 nt, Artificial Sequence
  Description of Artificial Sequence: Synthetic oligonucleotide
gucucgugggcugguccau

SEQ ID NO: 317382 - RNA, 19 nt, Artificial Sequence
  Description of Artificial Sequence: Synthetic oligonucleotide
gggugccgcuccgcgguac

SEQ ID NO: 317383 - RNA, 19 nt, Artificial Sequence
  Description of Artificial Sequence: Synthetic oligonucleotide
ggccgagccgccguuuuau

SEQ ID NO: 317384 - RNA, 19 nt, Artificial Sequence
  Description of Artificial Sequence: Synthetic oligonucleotide
ccguuuuauugcgcuccga

SEQ ID NO: 317385 - RNA, 19 nt, Artificial Sequence
  Description of Artificial Sequence: Synthetic oligonucleotide
aggcgucggccgggcgcag

SEQ ID NO: 317386 - RNA, 19 nt, Artificial Sequence
  Description of Artificial Sequence: Synthetic oligonucleotide
cggcgagcgagcgcagccc

SEQ ID NO: 317387 - RNA, 19 nt, Artificial Sequence
  Description of Artificial Sequence: Synthetic oligonucleotide
cgagaccccgcacacugcu

SEQ ID NO: 317388 - RNA, 19 nt, Artificial Sequence
  Description of Artificial Sequence: Synthetic oligonucleotide
gggccgagccgccguuuua

SEQ ID NO: 317389 - RNA, 19 nt, Artificial Sequence
  Description of Artificial Sequence: Synthetic oligonucleotide
ggguugccguagaugucgu

SEQ ID NO: 317390 - RNA, 19 nt, Artificial Sequence
  Description of Artificial Sequence: Synthetic oligonucleotide
cagcgagaccccgcacacu

SEQ ID NO: 317391 - RNA, 19 nt, Artificial Sequence
  Description of Artificial Sequence: Synthetic oligonucleotide
cagggccuuugaacaucuu

SEQ ID NO: 317392 - RNA, 19 nt, Artificial Sequence
  Description of Artificial Sequence: Synthetic oligonucleotide
cgcuuacugcuuuggcccu

SEQ ID NO: 317393 - RNA, 19 nt, Artificial Sequence
  Description of Artificial Sequence: Synthetic oligonucleotide
gggcggcgagcgagcgcag

SEQ ID NO: 317394 - RNA, 19 nt, Artificial Sequence
  Description of Artificial Sequence: Synthetic oligonucleotide
ggggugccgcuccgcggua

SEQ ID NO: 317395 - RNA, 19 nt, Artificial Sequence
  Description of Artificial Sequence: Synthetic oligonucleotide
ggugcccguugaugcucuu

SEQ ID NO: 317396 - RNA, 19 nt, Artificial Sequence
  Description of Artificial Sequence: Synthetic oligonucleotide
auguucaccacauagagcc

SEQ ID NO: 317397 - RNA, 19 nt, Artificial Sequence
  Description of Artificial Sequence: Synthetic oligonucleotide
aaggaucaaacuuugcugc

SEQ ID NO: 317398 - RNA, 19 nt, Artificial Sequence
  Description of Artificial Sequence: Synthetic oligonucleotide
aauucggucacuuuacuuc

SEQ ID NO: 317399 - RNA, 19 nt, Artificial Sequence
  Description of Artificial Sequence: Synthetic oligonucleotide
auauccguagcucucaucc

SEQ ID NO: 317400 - RNA, 19 nt, Artificial Sequence
  Description of Artificial Sequence: Synthetic oligonucleotide
agucguaagggcuaaauuc

SEQ ID NO: 317401 - RNA, 19 nt, Artificial Sequence
  Description of Artificial Sequence: Synthetic oligonucleotide
agagugacgagccagauug

SEQ ID NO: 317402 - RNA, 19 nt, Artificial Sequence
  Description of Artificial Sequence: Synthetic oligonucleotide
uucacaaagauuuuaggga

SEQ ID NO: 317403 - RNA, 19 nt, Artificial Sequence
  Description of Artificial Sequence: Synthetic oligonucleotide
aguaaaucgaacuuguccu

SEQ ID NO: 317404 - RNA, 19 nt, Artificial Sequence
  Description of Artificial Sequence: Synthetic oligonucleotide
gguaucaacgaguaaaucg

SEQ ID NO: 317405 - RNA, 19 nt, Artificial Sequence
  Description of Artificial Sequence: Synthetic oligonucleotide
uggaagaccuuaacgaugg

SEQ ID NO: 317406 - RNA, 19 nt, Artificial Sequence
  Description of Artificial Sequence: Synthetic oligonucleotide
uguacaaagugucacugcc

SEQ ID NO: 317407 - RNA, 19 nt, Artificial Sequence
  Description of Artificial Sequence: Synthetic oligonucleotide
gaguaaaucgaacuugucc

SEQ ID NO: 317408 - RNA, 19 nt, Artificial Sequence
  Description of Artificial Sequence: Synthetic oligonucleotide
ucauucuccaaucucucgg

SEQ ID NO: 317409 - RNA, 19 nt, Artificial Sequence
  Description of Artificial Sequence: Synthetic oligonucleotide
gauucggcagaacauaucc

SEQ ID NO: 317410 - RNA, 19 nt, Artificial Sequence
  Description of Artificial Sequence: Synthetic oligonucleotide
agauuuuagggagaaaugg

SEQ ID NO: 317411 - RNA, 19 nt, Artificial Sequence
  Description of Artificial Sequence: Synthetic oligonucleotide
gacacuauuguuuugggga

SEQ ID NO: 317412 - RNA, 19 nt, Artificial Sequence
  Description of Artificial Sequence: Synthetic oligonucleotide
uggguaguuaucuggaggg

SEQ ID NO: 317413 - RNA, 19 nt, Artificial Sequence
  Description of Artificial Sequence: Synthetic oligonucleotide
gacucguccguaaagaugg

SEQ ID NO: 317414 - RNA, 19 nt, Artificial Sequence
  Description of Artificial Sequence: Synthetic oligonucleotide
ucaacgaguaaaucgaacu

SEQ ID NO: 317415 - RNA, 19 nt, Artificial Sequence
  Description of Artificial Sequence: Synthetic oligonucleotide
uaaggaugugcaaacaugu

SEQ ID NO: 317416 - RNA, 19 nt, Artificial Sequence
  Description of Artificial Sequence: Synthetic oligonucleotide
uugacugccacacauuucu

SEQ ID NO: 317417 - RNA, 19 nt, Artificial Sequence
  Description of Artificial Sequence: Synthetic oligonucleotide
guaguuuagcauuuccucg

SEQ ID NO: 317418 - RNA, 19 nt, Artificial Sequence
  Description of Artificial Sequence: Synthetic oligonucleotide
uuggguaguuaucuggagg

SEQ ID NO: 317419 - RNA, 19 nt, Artificial Sequence
  Description of Artificial Sequence: Synthetic oligonucleotide
ucagcuauuuucagcauca

SEQ ID NO: 317420 - RNA, 19 nt, Artificial Sequence
  Description of Artificial Sequence: Synthetic oligonucleotide
auuuuagggagaaauggcg

SEQ ID NO: 317421 - RNA, 19 nt, Artificial Sequence
  Description of Artificial Sequence: Synthetic oligonucleotide
cacaucguugguaucaacg

SEQ ID NO: 317422 - RNA, 19 nt, Artificial Sequence
  Description of Artificial Sequence: Synthetic oligonucleotide
ucggcuaccuucuucgugg

SEQ ID NO: 317423 - RNA, 19 nt, Artificial Sequence
  Description of Artificial Sequence: Synthetic oligonucleotide
uccucagcuauuuucagca

SEQ ID NO: 317424 - RNA, 19 nt, Artificial Sequence
  Description of Artificial Sequence: Synthetic oligonucleotide
aacgaguaaaucgaacuug

SEQ ID NO: 317425 - RNA, 19 nt, Artificial Sequence
  Description of Artificial Sequence: Synthetic oligonucleotide
uuuuagggagaaauggcgu

SEQ ID NO: 317426 - RNA, 19 nt, Artificial Sequence
  Description of Artificial Sequence: Synthetic oligonucleotide
gacggcuguagcaagaagg

SEQ ID NO: 317427 - RNA, 19 nt, Artificial Sequence
  Description of Artificial Sequence: Synthetic oligonucleotide
augauuuuaaaauggguuu

SEQ ID NO: 317428 - RNA, 19 nt, Artificial Sequence
  Description of Artificial Sequence: Synthetic oligonucleotide
auucggucacuuuacuucg

SEQ ID NO: 317429 - RNA, 19 nt, Artificial Sequence
  Description of Artificial Sequence: Synthetic oligonucleotide
agaacauauccguagcucu

SEQ ID NO: 317430 - RNA, 19 nt, Artificial Sequence
  Description of Artificial Sequence: Synthetic oligonucleotide
uacuucgauucuuugaugu

SEQ ID NO: 317431 - RNA, 19 nt, Artificial Sequence
  Description of Artificial Sequence: Synthetic oligonucleotide
uucgauucuuugauguugc

SEQ ID NO: 317432 - RNA, 19 nt, Artificial Sequence
  Description of Artificial Sequence: Synthetic oligonucleotide
ugacgagccagauugagaa

SEQ ID NO: 317433 - RNA, 19 nt, Artificial Sequence
  Description of Artificial Sequence: Synthetic oligonucleotide
caacuggacagguuggucg

SEQ ID NO: 317434 - RNA, 19 nt, Artificial Sequence
  Description of Artificial Sequence: Synthetic oligonucleotide
aacgcaguagcuucagacu

SEQ ID NO: 317435 - RNA, 19 nt, Artificial Sequence
  Description of Artificial Sequence: Synthetic oligonucleotide
guauccuccagucugccag

SEQ ID NO: 317436 - RNA, 19 nt, Artificial Sequence
  Description of Artificial Sequence: Synthetic oligonucleotide
acuucgaagcuccagggug

SEQ ID NO: 317437 - RNA, 19 nt, Artificial Sequence
  Description of Artificial Sequence: Synthetic oligonucleotide
uucaaaggacuccauuaug

SEQ ID NO: 317438 - RNA, 19 nt, Artificial Sequence
  Description of Artificial Sequence: Synthetic oligonucleotide
aacauguccugcucaaccu

SEQ ID NO: 317439 - RNA, 19 nt, Artificial Sequence
  Description of Artificial Sequence: Synthetic oligonucleotide
uccuaaauggguuuucaaa

SEQ ID NO: 317440 - RNA, 19 nt, Artificial Sequence
  Description of Artificial Sequence: Synthetic oligonucleotide
gaucaagagagugacgagc

SEQ ID NO: 317441 - RNA, 19 nt, Artificial Sequence
  Description of Artificial Sequence: Synthetic oligonucleotide
cuggauuaaaagaugcauc

SEQ ID NO: 317442 - RNA, 19 nt, Artificial Sequence
  Description of Artificial Sequence: Synthetic oligonucleotide
cacaacuccagccucauuc

SEQ ID NO: 317443 - RNA, 19 nt, Artificial Sequence
  Description of Artificial Sequence: Synthetic oligonucleotide
agacccaucaguuggggug

SEQ ID NO: 317444 - RNA, 19 nt, Artificial Sequence
  Description of Artificial Sequence: Synthetic oligonucleotide
agucaggcagaguaaagug

SEQ ID NO: 317445 - RNA, 19 nt, Artificial Sequence
  Description of Artificial Sequence: Synthetic oligonucleotide
ucacuucgaagcuccaggg

SEQ ID NO: 317446 - RNA, 19 nt, Artificial Sequence
  Description of Artificial Sequence: Synthetic oligonucleotide
ccuaaauggguuuucaaag

SEQ ID NO: 317447 - RNA, 19 nt, Artificial Sequence
  Description of Artificial Sequence: Synthetic oligonucleotide
uuugacuccacaccacagu

SEQ ID NO: 317448 - RNA, 19 nt, Artificial Sequence
  Description of Artificial Sequence: Synthetic oligonucleotide
aacuuguccuccaauucgg

SEQ ID NO: 317449 - RNA, 19 nt, Artificial Sequence
  Description of Artificial Sequence: Synthetic oligonucleotide
acaacuccagccucauucg

SEQ ID NO: 317450 - RNA, 19 nt, Artificial Sequence
  Description of Artificial Sequence: Synthetic oligonucleotide
uucuggagcaccgagucag

SEQ ID NO: 317451 - RNA, 19 nt, Artificial Sequence
  Description of Artificial Sequence: Synthetic oligonucleotide
agugaugacggcuguagca

SEQ ID NO: 317452 - RNA, 19 nt, Artificial Sequence
  Description of Artificial Sequence: Synthetic oligonucleotide
acgcaguagcuucagacuc

SEQ ID NO: 317453 - RNA, 19 nt, Artificial Sequence
  Description of Artificial Sequence: Synthetic oligonucleotide
aaagaugggcuugacaaau

SEQ ID NO: 317454 - RNA, 19 nt, Artificial Sequence
  Description of Artificial Sequence: Synthetic oligonucleotide
uucggcagaacauauccgu

SEQ ID NO: 317455 - RNA, 19 nt, Artificial Sequence
  Description of Artificial Sequence: Synthetic oligonucleotide
uuucuugccagaaggugcu

SEQ ID NO: 317456 - RNA, 19 nt, Artificial Sequence
  Description of Artificial Sequence: Synthetic oligonucleotide
ucguccguaaagaugggcu

SEQ ID NO: 317457 - RNA, 19 nt, Artificial Sequence
  Description of Artificial Sequence: Synthetic oligonucleotide
uuaacgauggcugggucug

SEQ ID NO: 317458 - RNA, 19 nt, Artificial Sequence
  Description of Artificial Sequence: Synthetic oligonucleotide
augcccugaagucugacug

SEQ ID NO: 317459 - RNA, 19 nt, Artificial Sequence
  Description of Artificial Sequence: Synthetic oligonucleotide
uucguccaguaauauaccc

SEQ ID NO: 317460 - RNA, 19 nt, Artificial Sequence
  Description of Artificial Sequence: Synthetic oligonucleotide
acuggcuguagucguaagg

SEQ ID NO: 317461 - RNA, 19 nt, Artificial Sequence
  Description of Artificial Sequence: Synthetic oligonucleotide
agcaucaugugauucggca

SEQ ID NO: 317462 - RNA, 19 nt, Artificial Sequence
  Description of Artificial Sequence: Synthetic oligonucleotide
ucuagguccacugcaaacu

SEQ ID NO: 317463 - RNA, 19 nt, Artificial Sequence
  Description of Artificial Sequence: Synthetic oligonucleotide
uagauguacagcagguagu

SEQ ID NO: 317464 - RNA, 19 nt, Artificial Sequence
  Description of Artificial Sequence: Synthetic oligonucleotide
guaucaacgaguaaaucga

SEQ ID NO: 317465 - RNA, 19 nt, Artificial Sequence
  Description of Artificial Sequence: Synthetic oligonucleotide
acaucguugguaucaacga

SEQ ID NO: 317466 - RNA, 19 nt, Artificial Sequence
  Description of Artificial Sequence: Synthetic oligonucleotide
ucguccaguaauauaccca

SEQ ID NO: 317467 - RNA, 19 nt, Artificial Sequence
  Description of Artificial Sequence: Synthetic oligonucleotide
guacgagugaugcucuagg

SEQ ID NO: 317468 - RNA, 19 nt, Artificial Sequence
  Description of Artificial Sequence: Synthetic oligonucleotide
agucugacuggcuguaguc

SEQ ID NO: 317469 - RNA, 19 nt, Artificial Sequence
  Description of Artificial Sequence: Synthetic oligonucleotide
agaccuuaacgauggcugg

SEQ ID NO: 317470 - RNA, 19 nt, Artificial Sequence
  Description of Artificial Sequence: Synthetic oligonucleotide
uguacaacuggggcugugg

SEQ ID NO: 317471 - RNA, 19 nt, Artificial Sequence
  Description of Artificial Sequence: Synthetic oligonucleotide
gaacaaguggugguacugg

SEQ ID NO: 317472 - RNA, 19 nt, Artificial Sequence
  Description of Artificial Sequence: Synthetic oligonucleotide
cacgaguugguccagggug

SEQ ID NO: 317473 - RNA, 19 nt, Artificial Sequence
  Description of Artificial Sequence: Synthetic oligonucleotide
cuuguuugacuccacacca

SEQ ID NO: 317474 - RNA, 19 nt, Artificial Sequence
  Description of Artificial Sequence: Synthetic oligonucleotide
ugagaauguacaugucacu

SEQ ID NO: 317475 - RNA, 19 nt, Artificial Sequence
  Description of Artificial Sequence: Synthetic oligonucleotide
uggacacuauuguuuuggg

SEQ ID NO: 317476 - RNA, 19 nt, Artificial Sequence
  Description of Artificial Sequence: Synthetic oligonucleotide
aagucgugcugccuggugu

SEQ ID NO: 317477 - RNA, 19 nt, Artificial Sequence
  Description of Artificial Sequence: Synthetic oligonucleotide
aucaguuggggugauuggg

SEQ ID NO: 317478 - RNA, 19 nt, Artificial Sequence
  Description of Artificial Sequence: Synthetic oligonucleotide
uuuccucgggcagagggcg

SEQ ID NO: 317479 - RNA, 19 nt, Artificial Sequence
  Description of Artificial Sequence: Synthetic oligonucleotide
gauuuucgaagaaggauca

SEQ ID NO: 317480 - RNA, 19 nt, Artificial Sequence
  Description of Artificial Sequence: Synthetic oligonucleotide
aguaggaauggauuuuaau

SEQ ID NO: 317481 - RNA, 19 nt, Artificial Sequence
  Description of Artificial Sequence: Synthetic oligonucleotide
auccguagcucucauccuc

SEQ ID NO: 317482 - RNA, 19 nt, Artificial Sequence
  Description of Artificial Sequence: Synthetic oligonucleotide
acugauaaggaugugcaaa

SEQ ID NO: 317483 - RNA, 19 nt, Artificial Sequence
  Description of Artificial Sequence: Synthetic oligonucleotide
gagaucauucuccaaucuc

SEQ ID NO: 317484 - RNA, 19 nt, Artificial Sequence
  Description of Artificial Sequence: Synthetic oligonucleotide
acaugcucuuguuucccac

SEQ ID NO: 317485 - RNA, 19 nt, Artificial Sequence
  Description of Artificial Sequence: Synthetic oligonucleotide
gacucuuuccacuuuccuc

SEQ ID NO: 317486 - RNA, 19 nt, Artificial Sequence
  Description of Artificial Sequence: Synthetic oligonucleotide
augugcaaacauguccugc

SEQ ID NO: 317487 - RNA, 19 nt, Artificial Sequence
  Description of Artificial Sequence: Synthetic oligonucleotide
agagucggcaccauggaag

SEQ ID NO: 317488 - RNA, 19 nt, Artificial Sequence
  Description of Artificial Sequence: Synthetic oligonucleotide
uucggucauagauguacag

SEQ ID NO: 317489 - RNA, 19 nt, Artificial Sequence
  Description of Artificial Sequence: Synthetic oligonucleotide
acggcuguagcaagaaggc

SEQ ID NO: 317490 - RNA, 19 nt, Artificial Sequence
  Description of Artificial Sequence: Synthetic oligonucleotide
cauucuccaaucucucggc

SEQ ID NO: 317491 - RNA, 19 nt, Artificial Sequence
  Description of Artificial Sequence: Synthetic oligonucleotide
auugaucugcugccgaaca

SEQ ID NO: 317492 - RNA, 19 nt, Artificial Sequence
  Description of Artificial Sequence: Synthetic oligonucleotide
aucucucggcgauagguag

SEQ ID NO: 317493 - RNA, 19 nt, Artificial Sequence
  Description of Artificial Sequence: Synthetic oligonucleotide
ucaguuggggugauugggu

SEQ ID NO: 317494 - RNA, 19 nt, Artificial Sequence
  Description of Artificial Sequence: Synthetic oligonucleotide
aucaacgaguaaaucgaac

SEQ ID NO: 317495 - RNA, 19 nt, Artificial Sequence
  Description of Artificial Sequence: Synthetic oligonucleotide
cuucgauucuuugauguug

SEQ ID NO: 317496 - RNA, 19 nt, Artificial Sequence
  Description of Artificial Sequence: Synthetic oligonucleotide
agaguaaagugauccaguu

SEQ ID NO: 317497 - RNA, 19 nt, Artificial Sequence
  Description of Artificial Sequence: Synthetic oligonucleotide
ucggucauagauguacagc

SEQ ID NO: 317498 - RNA, 19 nt, Artificial Sequence
  Description of Artificial Sequence: Synthetic oligonucleotide
aacauauccguagcucuca

SEQ ID NO: 317499 - RNA, 19 nt, Artificial Sequence
  Description of Artificial Sequence: Synthetic oligonucleotide
uccuguacgagugaugcuc

SEQ ID NO: 317500 - RNA, 19 nt, Artificial Sequence
  Description of Artificial Sequence: Synthetic oligonucleotide
uggucguugccucucuccc

SEQ ID NO: 317501 - RNA, 19 nt, Artificial Sequence
  Description of Artificial Sequence: Synthetic oligonucleotide
ugugccaccgucaguggac

SEQ ID NO: 317502 - RNA, 19 nt, Artificial Sequence
  Description of Artificial Sequence: Synthetic oligonucleotide
guuccaacgcaguagcuuc

SEQ ID NO: 317503 - RNA, 19 nt, Artificial Sequence
  Description of Artificial Sequence: Synthetic oligonucleotide
uccacgaguugguccaggg

SEQ ID NO: 317504 - RNA, 19 nt, Artificial Sequence
  Description of Artificial Sequence: Synthetic oligonucleotide
gaagucuucuguccggguc

SEQ ID NO: 317505 - RNA, 19 nt, Artificial Sequence
  Description of Artificial Sequence: Synthetic oligonucleotide
cuuuagguucuuucuggac

SEQ ID NO: 317506 - RNA, 19 nt, Artificial Sequence
  Description of Artificial Sequence: Synthetic oligonucleotide
ggcuaaauucucuuccugc

SEQ ID NO: 317507 - RNA, 19 nt, Artificial Sequence
  Description of Artificial Sequence: Synthetic oligonucleotide
cucagcgcuagguucacug

SEQ ID NO: 317508 - RNA, 19 nt, Artificial Sequence
  Description of Artificial Sequence: Synthetic oligonucleotide
ugugauucggcagaacaua

SEQ ID NO: 317509 - RNA, 19 nt, Artificial Sequence
  Description of Artificial Sequence: Synthetic oligonucleotide
uccguagcucucauccucc

SEQ ID NO: 317510 - RNA, 19 nt, Artificial Sequence
  Description of Artificial Sequence: Synthetic oligonucleotide
gaguaaagugauccaguuc

SEQ ID NO: 317511 - RNA, 19 nt, Artificial Sequence
  Description of Artificial Sequence: Synthetic oligonucleotide
cuucguccaguaauauacc

SEQ ID NO: 317512 - RNA, 19 nt, Artificial Sequence
  Description of Artificial Sequence: Synthetic oligonucleotide
uuggucguugccucucucc

SEQ ID NO: 317513 - RNA, 19 nt, Artificial Sequence
  Description of Artificial Sequence: Synthetic oligonucleotide
aaaguggcagggugucucu

SEQ ID NO: 317514 - RNA, 19 nt, Artificial Sequence
  Description of Artificial Sequence: Synthetic oligonucleotide
aggcaucuggcauccaaag

SEQ ID NO: 317515 - RNA, 19 nt, Artificial Sequence
  Description of Artificial Sequence: Synthetic oligonucleotide
guuuuggggaccugcaguc

SEQ ID NO: 317516 - RNA, 19 nt, Artificial Sequence
  Description of Artificial Sequence: Synthetic oligonucleotide
ucagagucggcaccaugga

SEQ ID NO: 317517 - RNA, 19 nt, Artificial Sequence
  Description of Artificial Sequence: Synthetic oligonucleotide
caucaguuggggugauugg

SEQ ID NO: 317518 - RNA, 19 nt, Artificial Sequence
  Description of Artificial Sequence: Synthetic oligonucleotide
uuugacugccacacauuuc

SEQ ID NO: 317519 - RNA, 19 nt, Artificial Sequence
  Description of Artificial Sequence: Synthetic oligonucleotide
gcgguugcugauuucauag

SEQ ID NO: 317520 - RNA, 19 nt, Artificial Sequence
  Description of Artificial Sequence: Synthetic oligonucleotide
ucguugguaucaacgagua

SEQ ID NO: 317521 - RNA, 19 nt, Artificial Sequence
  Description of Artificial Sequence: Synthetic oligonucleotide
accgucaguggacucuuuc

SEQ ID NO: 317522 - RNA, 19 nt, Artificial Sequence
  Description of Artificial Sequence: Synthetic oligonucleotide
uuagggagaaauggcgugu

SEQ ID NO: 317523 - RNA, 19 nt, Artificial Sequence
  Description of Artificial Sequence: Synthetic oligonucleotide
uggauuugcuguccccagc

SEQ ID NO: 317524 - RNA, 19 nt, Artificial Sequence
  Description of Artificial Sequence: Synthetic oligonucleotide
augaagucuucuguccggg

SEQ ID NO: 317525 - RNA, 19 nt, Artificial Sequence
  Description of Artificial Sequence: Synthetic oligonucleotide
cucguugagaauguacaug

SEQ ID NO: 317526 - RNA, 19 nt, Artificial Sequence
  Description of Artificial Sequence: Synthetic oligonucleotide
ggugguacuggguugcagc

SEQ ID NO: 317527 - RNA, 19 nt, Artificial Sequence
  Description of Artificial Sequence: Synthetic oligonucleotide
cucgaaaucugagcugagg

SEQ ID NO: 317528 - RNA, 19 nt, Artificial Sequence
  Description of Artificial Sequence: Synthetic oligonucleotide
cauccaaagaggucccuuc

SEQ ID NO: 317529 - RNA, 19 nt, Artificial Sequence
  Description of Artificial Sequence: Synthetic oligonucleotide
cagaugaucaagagaguga

SEQ ID NO: 317530 - RNA, 19 nt, Artificial Sequence
  Description of Artificial Sequence: Synthetic oligonucleotide
uacgagugaugcucuaggu

SEQ ID NO: 317531 - RNA, 19 nt, Artificial Sequence
  Description of Artificial Sequence: Synthetic oligonucleotide
cucuagguccacugcaaac

SEQ ID NO: 317532 - RNA, 19 nt, Artificial Sequence
  Description of Artificial Sequence: Synthetic oligonucleotide
uagucguaagggcuaaauu

SEQ ID NO: 317533 - RNA, 19 nt, Artificial Sequence
  Description of Artificial Sequence: Synthetic oligonucleotide
acgagccagauugagaagu

SEQ ID NO: 317534 - RNA, 19 nt, Artificial Sequence
  Description of Artificial Sequence: Synthetic oligonucleotide
auggaagaccuuaacgaug

SEQ ID NO: 317535 - RNA, 19 nt, Artificial Sequence
  Description of Artificial Sequence: Synthetic oligonucleotide
aaucgaacuuguccuccaa

SEQ ID NO: 317536 - RNA, 19 nt, Artificial Sequence
  Description of Artificial Sequence: Synthetic oligonucleotide
gaugucccugcuccgcugc

SEQ ID NO: 317537 - RNA, 19 nt, Artificial Sequence
  Description of Artificial Sequence: Synthetic oligonucleotide
uggguugcagcaagcuaug

SEQ ID NO: 317538 - RNA, 19 nt, Artificial Sequence
  Description of Artificial Sequence: Synthetic oligonucleotide
ucguaagggcuaaauucuc

SEQ ID NO: 317539 - RNA, 19 nt, Artificial Sequence
  Description of Artificial Sequence: Synthetic oligonucleotide
uguccgggucgaaaucugc

SEQ ID NO: 317540 - RNA, 19 nt, Artificial Sequence
  Description of Artificial Sequence: Synthetic oligonucleotide
aauggcguguuggaauuau

SEQ ID NO: 317541 - RNA, 19 nt, Artificial Sequence
  Description of Artificial Sequence: Synthetic oligonucleotide
cagaacauauccguagcuc

SEQ ID NO: 317542 - RNA, 19 nt, Artificial Sequence
  Description of Artificial Sequence: Synthetic oligonucleotide
auucggcagaacauauccg

SEQ ID NO: 317543 - RNA, 19 nt, Artificial Sequence
  Description of Artificial Sequence: Synthetic oligonucleotide
acgaguaaaucgaacuugu

SEQ ID NO: 317544 - RNA, 19 nt, Artificial Sequence
  Description of Artificial Sequence: Synthetic oligonucleotide
ucucgaaaucugagcugag

SEQ ID NO: 317545 - RNA, 19 nt, Artificial Sequence
  Description of Artificial Sequence: Synthetic oligonucleotide
gugauuggguaguuaucug

SEQ ID NO: 317546 - RNA, 19 nt, Artificial Sequence
  Description of Artificial Sequence: Synthetic oligonucleotide
uguuccaacgcaguagcuu

SEQ ID NO: 317547 - RNA, 19 nt, Artificial Sequence
  Description of Artificial Sequence: Synthetic oligonucleotide
uugaucugcugccgaacaa

SEQ ID NO: 317548 - RNA, 19 nt, Artificial Sequence
  Description of Artificial Sequence: Synthetic oligonucleotide
gcuaaauucucuuccugca

SEQ ID NO: 317549 - RNA, 19 nt, Artificial Sequence
  Description of Artificial Sequence: Synthetic oligonucleotide
guuuagcauuuccucgggc

SEQ ID NO: 317550 - RNA, 19 nt, Artificial Sequence
  Description of Artificial Sequence: Synthetic oligonucleotide
ucggcgauagguagugguc

SEQ ID NO: 317551 - RNA, 19 nt, Artificial Sequence
  Description of Artificial Sequence: Synthetic oligonucleotide
uacugauaaggaugugcaa

SEQ ID NO: 317552 - RNA, 19 nt, Artificial Sequence
  Description of Artificial Sequence: Synthetic oligonucleotide
cucauucggucauagaugu

SEQ ID NO: 317553 - RNA, 19 nt, Artificial Sequence
  Description of Artificial Sequence: Synthetic oligonucleotide
ugaggucggaggauguuuu

SEQ ID NO: 317554 - RNA, 19 nt, Artificial Sequence
  Description of Artificial Sequence: Synthetic oligonucleotide
ucgggcagagggcguaucc

SEQ ID NO: 317555 - RNA, 19 nt, Artificial Sequence
  Description of Artificial Sequence: Synthetic oligonucleotide
aacauccuaaauggguuuu

SEQ ID NO: 317556 - RNA, 19 nt, Artificial Sequence
  Description of Artificial Sequence: Synthetic oligonucleotide
guuugacuccacaccacag

SEQ ID NO: 317557 - RNA, 19 nt, Artificial Sequence
  Description of Artificial Sequence: Synthetic oligonucleotide
agucgugcugccuggugug

SEQ ID NO: 317558 - RNA, 19 nt, Artificial Sequence
  Description of Artificial Sequence: Synthetic oligonucleotide
gcagaguaaagugauccag

SEQ ID NO: 317559 - RNA, 19 nt, Artificial Sequence
  Description of Artificial Sequence: Synthetic oligonucleotide
ucagcgcuagguucacuga

SEQ ID NO: 317560 - RNA, 19 nt, Artificial Sequence
  Description of Artificial Sequence: Synthetic oligonucleotide
gcaucaugugauucggcag

SEQ ID NO: 317561 - RNA, 19 nt, Artificial Sequence
  Description of Artificial Sequence: Synthetic oligonucleotide
gaacauauccguagcucuc

SEQ ID NO: 317562 - RNA, 19 nt, Artificial Sequence
  Description of Artificial Sequence: Synthetic oligonucleotide
auauacccacucucuccag

SEQ ID NO: 317563 - RNA, 19 nt, Artificial Sequence
  Description of Artificial Sequence: Synthetic oligonucleotide
acgaguugguccagggugg

SEQ ID NO: 317564 - RNA, 19 nt, Artificial Sequence
  Description of Artificial Sequence: Synthetic oligonucleotide
gguaguuaucuggaggggc

SEQ ID NO: 317565 - RNA, 19 nt, Artificial Sequence
  Description of Artificial Sequence: Synthetic oligonucleotide
gagggcguauccuccaguc

SEQ ID NO: 317566 - RNA, 19 nt, Artificial Sequence
  Description of Artificial Sequence: Synthetic oligonucleotide
acaacccaggagcuuuuca

SEQ ID NO: 317567 - RNA, 19 nt, Artificial Sequence
  Description of Artificial Sequence: Synthetic oligonucleotide
caaaguggcagggugucuc

SEQ ID NO: 317568 - RNA, 19 nt, Artificial Sequence
  Description of Artificial Sequence: Synthetic oligonucleotide
cucgaugucagagucggca

SEQ ID NO: 317569 - RNA, 19 nt, Artificial Sequence
  Description of Artificial Sequence: Synthetic oligonucleotide
agucugccaguugauacug

SEQ ID NO: 317570 - RNA, 19 nt, Artificial Sequence
  Description of Artificial Sequence: Synthetic oligonucleotide
cacggggauggccuguucc

SEQ ID NO: 317571 - RNA, 19 nt, Artificial Sequence
  Description of Artificial Sequence: Synthetic oligonucleotide
ucucucggcgauagguagu

SEQ ID NO: 317572 - RNA, 19 nt, Artificial Sequence
  Description of Artificial Sequence: Synthetic oligonucleotide
auccuaaauggguuuucaa

SEQ ID NO: 317573 - RNA, 19 nt, Artificial Sequence
  Description of Artificial Sequence: Synthetic oligonucleotide
gagucggcaccauggaaga

SEQ ID NO: 317574 - RNA, 19 nt, Artificial Sequence
  Description of Artificial Sequence: Synthetic oligonucleotide
uccguaaagaugggcuuga

SEQ ID NO: 317575 - RNA, 19 nt, Artificial Sequence
  Description of Artificial Sequence: Synthetic oligonucleotide
aauguacaugucacuucga

SEQ ID NO: 317576 - RNA, 19 nt, Artificial Sequence
  Description of Artificial Sequence: Synthetic oligonucleotide
cguaguuuagcauuuccuc

SEQ ID NO: 317577 - RNA, 19 nt, Artificial Sequence
  Description of Artificial Sequence: Synthetic oligonucleotide
uggacagguuggucguugc

SEQ ID NO: 317578 - RNA, 19 nt, Artificial Sequence
  Description of Artificial Sequence: Synthetic oligonucleotide
gaugcuucguccaguaaua

SEQ ID NO: 317579 - RNA, 19 nt, Artificial Sequence
  Description of Artificial Sequence: Synthetic oligonucleotide
ccucauucggucauagaug

SEQ ID NO: 317580 - RNA, 19 nt, Artificial Sequence
  Description of Artificial Sequence: Synthetic oligonucleotide
ucggcagaacauauccgua

SEQ ID NO: 317581 - RNA, 19 nt, Artificial Sequence
  Description of Artificial Sequence: Synthetic oligonucleotide
gggcguauccuccagucug

SEQ ID NO: 317582 - RNA, 19 nt, Artificial Sequence
  Description of Artificial Sequence: Synthetic oligonucleotide
ugccgcacggggauggccu

SEQ ID NO: 317583 - RNA, 19 nt, Artificial Sequence
  Description of Artificial Sequence: Synthetic oligonucleotide
gcuagguucacugaacaga

SEQ ID NO: 317584 - RNA, 19 nt, Artificial Sequence
  Description of Artificial Sequence: Synthetic oligonucleotide
ugcuucguccaguaauaua

SEQ ID NO: 317585 - RNA, 19 nt, Artificial Sequence
  Description of Artificial Sequence: Synthetic oligonucleotide
gucguugccucucucccac

SEQ ID NO: 317586 - RNA, 19 nt, Artificial Sequence
  Description of Artificial Sequence: Synthetic oligonucleotide
uucuguccgggucgaaauc

SEQ ID NO: 317587 - RNA, 19 nt, Artificial Sequence
  Description of Artificial Sequence: Synthetic oligonucleotide
aaucucucggcgauaggua

SEQ ID NO: 317588 - RNA, 19 nt, Artificial Sequence
  Description of Artificial Sequence: Synthetic oligonucleotide
aacgauggcugggucugug

SEQ ID NO: 317589 - RNA, 19 nt, Artificial Sequence
  Description of Artificial Sequence: Synthetic oligonucleotide
ucggaaagucucagauuuc

SEQ ID NO: 317590 - RNA, 19 nt, Artificial Sequence
  Description of Artificial Sequence: Synthetic oligonucleotide
ggcgauagguagugguccg

SEQ ID NO: 317591 - RNA, 19 nt, Artificial Sequence
  Description of Artificial Sequence: Synthetic oligonucleotide
acuucgauucuuugauguu

SEQ ID NO: 317592 - RNA, 19 nt, Artificial Sequence
  Description of Artificial Sequence: Synthetic oligonucleotide
aggacucguccguaaagau

SEQ ID NO: 317593 - RNA, 19 nt, Artificial Sequence
  Description of Artificial Sequence: Synthetic oligonucleotide
ggcguaguuuagcauuucc

SEQ ID NO: 317594 - RNA, 19 nt, Artificial Sequence
  Description of Artificial Sequence: Synthetic oligonucleotide
agaggcucggcuguuucug

SEQ ID NO: 317595 - RNA, 19 nt, Artificial Sequence
  Description of Artificial Sequence: Synthetic oligonucleotide
cacuauuguuuuggggacc

SEQ ID NO: 317596 - RNA, 19 nt, Artificial Sequence
  Description of Artificial Sequence: Synthetic oligonucleotide
gacaugcucuuguuuccca

SEQ ID NO: 317597 - RNA, 19 nt, Artificial Sequence
  Description of Artificial Sequence: Synthetic oligonucleotide
agccagauugagaagucgu

SEQ ID NO: 317598 - RNA, 19 nt, Artificial Sequence
  Description of Artificial Sequence: Synthetic oligonucleotide
uugcaugcagcagucggaa

SEQ ID NO: 317599 - RNA, 19 nt, Artificial Sequence
  Description of Artificial Sequence: Synthetic oligonucleotide
uccgggucgaaaucugcau

SEQ ID NO: 317600 - RNA, 19 nt, Artificial Sequence
  Description of Artificial Sequence: Synthetic oligonucleotide
gucguaagggcuaaauucu

SEQ ID NO: 317601 - RNA, 19 nt, Artificial Sequence
  Description of Artificial Sequence: Synthetic oligonucleotide
agcagucggaaagucucag

SEQ ID NO: 317602 - RNA, 19 nt, Artificial Sequence
  Description of Artificial Sequence: Synthetic oligonucleotide
ugcucuuguuucccaccga

SEQ ID NO: 317603 - RNA, 19 nt, Artificial Sequence
  Description of Artificial Sequence: Synthetic oligonucleotide
cuuaacgauggcugggucu

SEQ ID NO: 317604 - RNA, 19 nt, Artificial Sequence
  Description of Artificial Sequence: Synthetic oligonucleotide
cguccaguaauauacccac

SEQ ID NO: 317605 - RNA, 19 nt, Artificial Sequence
  Description of Artificial Sequence: Synthetic oligonucleotide
ugguaucaacgaguaaauc

SEQ ID NO: 317606 - RNA, 19 nt, Artificial Sequence
  Description of Artificial Sequence: Synthetic oligonucleotide
cuucagacuugagcagggg

SEQ ID NO: 317607 - RNA, 19 nt, Artificial Sequence
  Description of Artificial Sequence: Synthetic oligonucleotide
aucccgggcguaguuuagc

SEQ ID NO: 317608 - RNA, 19 nt, Artificial Sequence
  Description of Artificial Sequence: Synthetic oligonucleotide
cauauccguagcucucauc

SEQ ID NO: 317609 - RNA, 19 nt, Artificial Sequence
  Description of Artificial Sequence: Synthetic oligonucleotide
gaugacggcuguagcaaga

SEQ ID NO: 317610 - RNA, 19 nt, Artificial Sequence
  Description of Artificial Sequence: Synthetic oligonucleotide
agcaagcuaugaugccuug

SEQ ID NO: 317611 - RNA, 19 nt, Artificial Sequence
  Description of Artificial Sequence: Synthetic oligonucleotide
agauccgccagggcagggg

SEQ ID NO: 317612 - RNA, 19 nt, Artificial Sequence
  Description of Artificial Sequence: Synthetic oligonucleotide
cucggcuaccuucuucgug

SEQ ID NO: 317613 - RNA, 19 nt, Artificial Sequence
  Description of Artificial Sequence: Synthetic oligonucleotide
ugagagaugugggccuugu

SEQ ID NO: 317614 - RNA, 19 nt, Artificial Sequence
  Description of Artificial Sequence: Synthetic oligonucleotide
agaugucccugcuccgcug

SEQ ID NO: 317615 - RNA, 19 nt, Artificial Sequence
  Description of Artificial Sequence: Synthetic oligonucleotide
caguugugccugaagccuc

SEQ ID NO: 317616 - RNA, 19 nt, Artificial Sequence
  Description of Artificial Sequence: Synthetic oligonucleotide
caggacgguccuguggacg

SEQ ID NO: 317617 - RNA, 19 nt, Artificial Sequence
  Description of Artificial Sequence: Synthetic oligonucleotide
accuuaacgauggcugggu

SEQ ID NO: 317618 - RNA, 19 nt, Artificial Sequence
  Description of Artificial Sequence: Synthetic oligonucleotide
cagauugagaagucgugcu

SEQ ID NO: 317619 - RNA, 19 nt, Artificial Sequence
  Description of Artificial Sequence: Synthetic oligonucleotide
cagcaucaugugauucggc

SEQ ID NO: 317620 - RNA, 19 nt, Artificial Sequence
  Description of Artificial Sequence: Synthetic oligonucleotide
uaguuaucuggaggggcgu

SEQ ID NO: 317621 - RNA, 19 nt, Artificial Sequence
  Description of Artificial Sequence: Synthetic oligonucleotide
auucggucauagauguaca

SEQ ID NO: 317622 - RNA, 19 nt, Artificial Sequence
  Description of Artificial Sequence: Synthetic oligonucleotide
cucauugaucugcugccga

SEQ ID NO: 317623 - RNA, 19 nt, Artificial Sequence
  Description of Artificial Sequence: Synthetic oligonucleotide
cucguccguaaagaugggc

SEQ ID NO: 317624 - RNA, 19 nt, Artificial Sequence
  Description of Artificial Sequence: Synthetic oligonucleotide
cagaguaaagugauccagu

SEQ ID NO: 317625 - RNA, 19 nt, Artificial Sequence
  Description of Artificial Sequence: Synthetic oligonucleotide
cucucggcgauagguagug

SEQ ID NO: 317626 - RNA, 19 nt, Artificial Sequence
  Description of Artificial Sequence: Synthetic oligonucleotide
gugaugacggcuguagcaa

SEQ ID NO: 317627 - RNA, 19 nt, Artificial Sequence
  Description of Artificial Sequence: Synthetic oligonucleotide
agggcguauccuccagucu

SEQ ID NO: 317628 - RNA, 19 nt, Artificial Sequence
  Description of Artificial Sequence: Synthetic oligonucleotide
gggcuaaauucucuuccug

SEQ ID NO: 317629 - RNA, 19 nt, Artificial Sequence
  Description of Artificial Sequence: Synthetic oligonucleotide
cauccuaaauggguuuuca

SEQ ID NO: 317630 - RNA, 19 nt, Artificial Sequence
  Description of Artificial Sequence: Synthetic oligonucleotide
uggugguacuggguugcag

SEQ ID NO: 317631 - RNA, 19 nt, Artificial Sequence
  Description of Artificial Sequence: Synthetic oligonucleotide
gacccaucaguugggguga

SEQ ID NO: 317632 - RNA, 19 nt, Artificial Sequence
  Description of Artificial Sequence: Synthetic oligonucleotide
ggaugugcaaacauguccu

SEQ ID NO: 317633 - RNA, 19 nt, Artificial Sequence
  Description of Artificial Sequence: Synthetic oligonucleotide
ggacucguccguaaagaug

SEQ ID NO: 317634 - RNA, 19 nt, Artificial Sequence
  Description of Artificial Sequence: Synthetic oligonucleotide
ucccaccgacuguuaaacu

SEQ ID NO: 317635 - RNA, 19 nt, Artificial Sequence
  Description of Artificial Sequence: Synthetic oligonucleotide
ccgucaguggacucuuucc

SEQ ID NO: 317636 - RNA, 19 nt, Artificial Sequence
  Description of Artificial Sequence: Synthetic oligonucleotide
ggcagaguaaagugaucca

SEQ ID NO: 317637 - RNA, 19 nt, Artificial Sequence
  Description of Artificial Sequence: Synthetic oligonucleotide
ugucaucccgggcguaguu

SEQ ID NO: 317638 - RNA, 19 nt, Artificial Sequence
  Description of Artificial Sequence: Synthetic oligonucleotide
gagugaugcucuaggucca

SEQ ID NO: 317639 - RNA, 19 nt, Artificial Sequence
  Description of Artificial Sequence: Synthetic oligonucleotide
ucauucggucauagaugua

SEQ ID NO: 317640 - RNA, 19 nt, Artificial Sequence
  Description of Artificial Sequence: Synthetic oligonucleotide
cuaugaugccuuggggcuc

SEQ ID NO: 317641 - RNA, 19 nt, Artificial Sequence
  Description of Artificial Sequence: Synthetic oligonucleotide
cgauagagcucaagguagg

SEQ ID NO: 317642 - RNA, 19 nt, Artificial Sequence
  Description of Artificial Sequence: Synthetic oligonucleotide
gaaggacaugcucuuguuu

SEQ ID NO: 317643 - RNA, 19 nt, Artificial Sequence
  Description of Artificial Sequence: Synthetic oligonucleotide
ucucggcgauagguagugg

SEQ ID NO: 317644 - RNA, 19 nt, Artificial Sequence
  Description of Artificial Sequence: Synthetic oligonucleotide
gccucauucggucauagau

SEQ ID NO: 317645 - RNA, 19 nt, Artificial Sequence
  Description of Artificial Sequence: Synthetic oligonucleotide
aggacgggcugcuggugcu

SEQ ID NO: 317646 - RNA, 19 nt, Artificial Sequence
  Description of Artificial Sequence: Synthetic oligonucleotide
aaauggcguguuggaauua

SEQ ID NO: 317647 - RNA, 19 nt, Artificial Sequence
  Description of Artificial Sequence: Synthetic oligonucleotide
ggguaguuaucuggagggg

SEQ ID NO: 317648 - RNA, 19 nt, Artificial Sequence
  Description of Artificial Sequence: Synthetic oligonucleotide
ggcguguuggaauuaucaa

SEQ ID NO: 317649 - RNA, 19 nt, Artificial Sequence
  Description of Artificial Sequence: Synthetic oligonucleotide
caucccgggcguaguuuag

SEQ ID NO: 317650 - RNA, 19 nt, Artificial Sequence
  Description of Artificial Sequence: Synthetic oligonucleotide
agucggcaccauggaagac

SEQ ID NO: 317651 - RNA, 19 nt, Artificial Sequence
  Description of Artificial Sequence: Synthetic oligonucleotide
ugacaacccaggagcuuuu

SEQ ID NO: 317652 - RNA, 19 nt, Artificial Sequence
  Description of Artificial Sequence: Synthetic oligonucleotide
agguaggacucguccguaa

SEQ ID NO: 317653 - RNA, 19 nt, Artificial Sequence
  Description of Artificial Sequence: Synthetic oligonucleotide
aagguaggacucguccgua

SEQ ID NO: 317654 - RNA, 19 nt, Artificial Sequence
  Description of Artificial Sequence: Synthetic oligonucleotide
auuuucgaagaaggaucaa

SEQ ID NO: 317655 - RNA, 19 nt, Artificial Sequence
  Description of Artificial Sequence: Synthetic oligonucleotide
gguugcugauuucauagau

SEQ ID NO: 317656 - RNA, 19 nt, Artificial Sequence
  Description of Artificial Sequence: Synthetic oligonucleotide
cuucgaagcuccagggugu

SEQ ID NO: 317657 - RNA, 19 nt, Artificial Sequence
  Description of Artificial Sequence: Synthetic oligonucleotide
caagguaggacucguccgu

SEQ ID NO: 317658 - RNA, 19 nt, Artificial Sequence
  Description of Artificial Sequence: Synthetic oligonucleotide
ugccgaacaagugguggua

SEQ ID NO: 317659 - RNA, 19 nt, Artificial Sequence
  Description of Artificial Sequence: Synthetic oligonucleotide
gugacgagccagauugaga

SEQ ID NO: 317660 - RNA, 19 nt, Artificial Sequence
  Description of Artificial Sequence: Synthetic oligonucleotide
gccagauugagaagucgug

SEQ ID NO: 317661 - RNA, 19 nt, Artificial Sequence
  Description of Artificial Sequence: Synthetic oligonucleotide
uucacaccugaugcuucgu

SEQ ID NO: 317662 - RNA, 19 nt, Artificial Sequence
  Description of Artificial Sequence: Synthetic oligonucleotide
agcagaugaucaagagagu

SEQ ID NO: 317663 - RNA, 19 nt, Artificial Sequence
  Description of Artificial Sequence: Synthetic oligonucleotide
ugacugccacacauuucuu

SEQ ID NO: 317664 - RNA, 19 nt, Artificial Sequence
  Description of Artificial Sequence: Synthetic oligonucleotide
gaggcucggcuguuucuga

SEQ ID NO: 317665 - RNA, 19 nt, Artificial Sequence
  Description of Artificial Sequence: Synthetic oligonucleotide
cuucguggcugcuucuuua

SEQ ID NO: 317666 - RNA, 19 nt, Artificial Sequence
  Description of Artificial Sequence: Synthetic oligonucleotide
agccucauucggucauaga

SEQ ID NO: 317667 - RNA, 19 nt, Artificial Sequence
  Description of Artificial Sequence: Synthetic oligonucleotide
uggagcucuuuagucguuu

SEQ ID NO: 317668 - RNA, 19 nt, Artificial Sequence
  Description of Artificial Sequence: Synthetic oligonucleotide
gacuugagcaggggcaucu

SEQ ID NO: 317669 - RNA, 19 nt, Artificial Sequence
  Description of Artificial Sequence: Synthetic oligonucleotide
uggaccugacuggccagcu

SEQ ID NO: 317670 - RNA, 19 nt, Artificial Sequence
  Description of Artificial Sequence: Synthetic oligonucleotide
ggacaugcucuuguuuccc

SEQ ID NO: 317671 - RNA, 19 nt, Artificial Sequence
  Description of Artificial Sequence: Synthetic oligonucleotide
cggcagaacauauccguag

SEQ ID NO: 317672 - RNA, 19 nt, Artificial Sequence
  Description of Artificial Sequence: Synthetic oligonucleotide
ccucaggacgguccugugg

SEQ ID NO: 317673 - RNA, 19 nt, Artificial Sequence
  Description of Artificial Sequence: Synthetic oligonucleotide
ggacagguuggucguugcc

SEQ ID NO: 317674 - RNA, 19 nt, Artificial Sequence
  Description of Artificial Sequence: Synthetic oligonucleotide
gcucucguugagaauguac

SEQ ID NO: 317675 - RNA, 19 nt, Artificial Sequence
  Description of Artificial Sequence: Synthetic oligonucleotide
cucggcgauagguaguggu

SEQ ID NO: 317676 - RNA, 19 nt, Artificial Sequence
  Description of Artificial Sequence: Synthetic oligonucleotide
caacgaguaaaucgaacuu

SEQ ID NO: 317677 - RNA, 19 nt, Artificial Sequence
  Description of Artificial Sequence: Synthetic oligonucleotide
uucgaagcuccaggguguc

SEQ ID NO: 317678 - RNA, 19 nt, Artificial Sequence
  Description of Artificial Sequence: Synthetic oligonucleotide
acuaucucuuuggccaguu

SEQ ID NO: 317679 - RNA, 19 nt, Artificial Sequence
  Description of Artificial Sequence: Synthetic oligonucleotide
caguaggaauggauuuuaa

SEQ ID NO: 317680 - RNA, 19 nt, Artificial Sequence
  Description of Artificial Sequence: Synthetic oligonucleotide
uguagucguaagggcuaaa

SEQ ID NO: 317681 - RNA, 19 nt, Artificial Sequence
  Description of Artificial Sequence: Synthetic oligonucleotide
cuuguuucccaccgacugu

SEQ ID NO: 317682 - RNA, 19 nt, Artificial Sequence
  Description of Artificial Sequence: Synthetic oligonucleotide
cagucugccaguugauacu

SEQ ID NO: 317683 - RNA, 19 nt, Artificial Sequence
  Description of Artificial Sequence: Synthetic oligonucleotide
ggucacuuguggcucgcuc

SEQ ID NO: 317684 - RNA, 19 nt, Artificial Sequence
  Description of Artificial Sequence: Synthetic oligonucleotide
guacaaagugucacugccu

SEQ ID NO: 317685 - RNA, 19 nt, Artificial Sequence
  Description of Artificial Sequence: Synthetic oligonucleotide
uuuaucccuccaggcgaaa

SEQ ID NO: 317686 - RNA, 19 nt, Artificial Sequence
  Description of Artificial Sequence: Synthetic oligonucleotide
guuugcucggcuaccuucu

SEQ ID NO: 317687 - RNA, 19 nt, Artificial Sequence
  Description of Artificial Sequence: Synthetic oligonucleotide
ggggugauuggguaguuau

SEQ ID NO: 317688 - RNA, 19 nt, Artificial Sequence
  Description of Artificial Sequence: Synthetic oligonucleotide
aggcucggcuguuucugaa

SEQ ID NO: 317689 - RNA, 19 nt, Artificial Sequence
  Description of Artificial Sequence: Synthetic oligonucleotide
acucguccguaaagauggg

SEQ ID NO: 317690 - RNA, 19 nt, Artificial Sequence
  Description of Artificial Sequence: Synthetic oligonucleotide
guccgggucgaaaucugca

SEQ ID NO: 317691 - RNA, 19 nt, Artificial Sequence
  Description of Artificial Sequence: Synthetic oligonucleotide
guagucguaagggcuaaau

SEQ ID NO: 317692 - RNA, 19 nt, Artificial Sequence
  Description of Artificial Sequence: Synthetic oligonucleotide
gcguguuggaauuaucaau

SEQ ID NO: 317693 - RNA, 19 nt, Artificial Sequence
  Description of Artificial Sequence: Synthetic oligonucleotide
cuuccgguuccagcuggac

SEQ ID NO: 317694 - RNA, 19 nt, Artificial Sequence
  Description of Artificial Sequence: Synthetic oligonucleotide
gcgcuagguucacugaaca

SEQ ID NO: 317695 - RNA, 19 nt, Artificial Sequence
  Description of Artificial Sequence: Synthetic oligonucleotide
gggcuuccgagcauugggc

SEQ ID NO: 317696 - RNA, 19 nt, Artificial Sequence
  Description of Artificial Sequence: Synthetic oligonucleotide
ucgaagcuccaggguguca

SEQ ID NO: 317697 - RNA, 19 nt, Artificial Sequence
  Description of Artificial Sequence: Synthetic oligonucleotide
ggcguauccuccagucugc

SEQ ID NO: 317698 - RNA, 19 nt, Artificial Sequence
  Description of Artificial Sequence: Synthetic oligonucleotide
uggggugauuggguaguua

SEQ ID NO: 317699 - RNA, 19 nt, Artificial Sequence
  Description of Artificial Sequence: Synthetic oligonucleotide
gggucgaaaucugcaucag

SEQ ID NO: 317700 - RNA, 19 nt, Artificial Sequence
  Description of Artificial Sequence: Synthetic oligonucleotide
gguugcagcaagcuaugau

SEQ ID NO: 317701 - RNA, 19 nt, Artificial Sequence
  Description of Artificial Sequence: Synthetic oligonucleotide
ucguugccucucucccaca

SEQ ID NO: 317702 - RNA, 19 nt, Artificial Sequence
  Description of Artificial Sequence: Synthetic oligonucleotide
uguggacgcucccgccuuu

SEQ ID NO: 317703 - RNA, 19 nt, Artificial Sequence
  Description of Artificial Sequence: Synthetic oligonucleotide
gucugccaguugauacugc

SEQ ID NO: 317704 - RNA, 19 nt, Artificial Sequence
  Description of Artificial Sequence: Synthetic oligonucleotide
cagagucggcaccauggaa

SEQ ID NO: 317705 - RNA, 19 nt, Artificial Sequence
  Description of Artificial Sequence: Synthetic oligonucleotide
gagagugacgagccagauu

SEQ ID NO: 317706 - RNA, 19 nt, Artificial Sequence
  Description of Artificial Sequence: Synthetic oligonucleotide
cugccgaacaagugguggu

SEQ ID NO: 317707 - RNA, 19 nt, Artificial Sequence
  Description of Artificial Sequence: Synthetic oligonucleotide
uaacgauggcugggucugu

SEQ ID NO: 317708 - RNA, 19 nt, Artificial Sequence
  Description of Artificial Sequence: Synthetic oligonucleotide
gugauucggcagaacauau

SEQ ID NO: 317709 - RNA, 19 nt, Artificial Sequence
  Description of Artificial Sequence: Synthetic oligonucleotide
uccugccuuccgguuccag

SEQ ID NO: 317710 - RNA, 19 nt, Artificial Sequence
  Description of Artificial Sequence: Synthetic oligonucleotide
uguuuccgggcagcuguuu

SEQ ID NO: 317711 - RNA, 19 nt, Artificial Sequence
  Description of Artificial Sequence: Synthetic oligonucleotide
uccucagcgcuagguucac

SEQ ID NO: 317712 - RNA, 19 nt, Artificial Sequence
  Description of Artificial Sequence: Synthetic oligonucleotide
gagugacgagccagauuga

SEQ ID NO: 317713 - RNA, 19 nt, Artificial Sequence
  Description of Artificial Sequence: Synthetic oligonucleotide
cgaacaaguggugguacug

SEQ ID NO: 317714 - RNA, 19 nt, Artificial Sequence
  Description of Artificial Sequence: Synthetic oligonucleotide
cguaaagaugggcuugaca

SEQ ID NO: 317715 - RNA, 19 nt, Artificial Sequence
  Description of Artificial Sequence: Synthetic oligonucleotide
ggucguugccucucuccca

SEQ ID NO: 317716 - RNA, 19 nt, Artificial Sequence
  Description of Artificial Sequence: Synthetic oligonucleotide
gugguccgcucuucuucac

SEQ ID NO: 317717 - RNA, 19 nt, Artificial Sequence
  Description of Artificial Sequence: Synthetic oligonucleotide
uuccgagcauugggcuuca

SEQ ID NO: 317718 - RNA, 19 nt, Artificial Sequence
  Description of Artificial Sequence: Synthetic oligonucleotide
ccgggucgaaaucugcauc

SEQ ID NO: 317719 - RNA, 19 nt, Artificial Sequence
  Description of Artificial Sequence: Synthetic oligonucleotide
cugacaacccaggagcuuu

SEQ ID NO: 317720 - RNA, 19 nt, Artificial Sequence
  Description of Artificial Sequence: Synthetic oligonucleotide
gcuguagucguaagggcua

SEQ ID NO: 317721 - RNA, 19 nt, Artificial Sequence
  Description of Artificial Sequence: Synthetic oligonucleotide
cgaguaaaucgaacuuguc

SEQ ID NO: 317722 - RNA, 19 nt, Artificial Sequence
  Description of Artificial Sequence: Synthetic oligonucleotide
gguagugguccgcucuucu

SEQ ID NO: 317723 - RNA, 19 nt, Artificial Sequence
  Description of Artificial Sequence: Synthetic oligonucleotide
gggugauuggguaguuauc

SEQ ID NO: 317724 - RNA, 19 nt, Artificial Sequence
  Description of Artificial Sequence: Synthetic oligonucleotide
ccuuaacgauggcuggguc

SEQ ID NO: 317725 - RNA, 19 nt, Artificial Sequence
  Description of Artificial Sequence: Synthetic oligonucleotide
gccgaacaaguggugguac

SEQ ID NO: 317726 - RNA, 19 nt, Artificial Sequence
  Description of Artificial Sequence: Synthetic oligonucleotide
cgggucgaaaucugcauca

SEQ ID NO: 317727 - RNA, 19 nt, Artificial Sequence
  Description of Artificial Sequence: Synthetic oligonucleotide
ggaauggauuuuaaugauu

SEQ ID NO: 317728 - RNA, 19 nt, Artificial Sequence
  Description of Artificial Sequence: Synthetic oligonucleotide
gcguaguuuagcauuuccu

SEQ ID NO: 317729 - RNA, 19 nt, Artificial Sequence
  Description of Artificial Sequence: Synthetic oligonucleotide
cggcgauagguaguggucc

SEQ ID NO: 317730 - RNA, 19 nt, Artificial Sequence
  Description of Artificial Sequence: Synthetic oligonucleotide
cagcaagcuaugaugccuu

SEQ ID NO: 317731 - RNA, 19 nt, Artificial Sequence
  Description of Artificial Sequence: Synthetic oligonucleotide
caguagcuucagacuccuc

SEQ ID NO: 317732 - RNA, 19 nt, Artificial Sequence
  Description of Artificial Sequence: Synthetic oligonucleotide
guagugguccgcucuucuu

SEQ ID NO: 317733 - RNA, 19 nt, Artificial Sequence
  Description of Artificial Sequence: Synthetic oligonucleotide
cuguagucguaagggcuaa

SEQ ID NO: 317734 - RNA, 19 nt, Artificial Sequence
  Description of Artificial Sequence: Synthetic oligonucleotide
gcgauagguagugguccgc

SEQ ID NO: 317735 - RNA, 19 nt, Artificial Sequence
  Description of Artificial Sequence: Synthetic oligonucleotide
cagacccaucaguuggggu

SEQ ID NO: 317736 - RNA, 19 nt, Artificial Sequence
  Description of Artificial Sequence: Synthetic oligonucleotide
cuguacgagugaugcucua

SEQ ID NO: 317737 - RNA, 19 nt, Artificial Sequence
  Description of Artificial Sequence: Synthetic oligonucleotide
aggucacuuguggcucgcu

SEQ ID NO: 317738 - RNA, 19 nt, Artificial Sequence
  Description of Artificial Sequence: Synthetic oligonucleotide
gcucuccaacacuaucucu

SEQ ID NO: 317739 - RNA, 19 nt, Artificial Sequence
  Description of Artificial Sequence: Synthetic oligonucleotide
ccacucucuccagaaucac

SEQ ID NO: 317740 - RNA, 19 nt, Artificial Sequence
  Description of Artificial Sequence: Synthetic oligonucleotide
ccaguugugccugaagccu

SEQ ID NO: 317741 - RNA, 19 nt, Artificial Sequence
  Description of Artificial Sequence: Synthetic oligonucleotide
ggggcgugggaacagucau

SEQ ID NO: 317742 - RNA, 19 nt, Artificial Sequence
  Description of Artificial Sequence: Synthetic oligonucleotide
gcguauccuccagucugcc

SEQ ID NO: 317743 - RNA, 19 nt, Artificial Sequence
  Description of Artificial Sequence: Synthetic oligonucleotide
cuccuguacgagugaugcu

SEQ ID NO: 317744 - RNA, 19 nt, Artificial Sequence
  Description of Artificial Sequence: Synthetic oligonucleotide
cguaagggcuaaauucucu

SEQ ID NO: 317745 - RNA, 19 nt, Artificial Sequence
  Description of Artificial Sequence: Synthetic oligonucleotide
cccaccgacuguuaaacuu

SEQ ID NO: 317746 - RNA, 19 nt, Artificial Sequence
  Description of Artificial Sequence: Synthetic oligonucleotide
caccgacuguuaaacuuuu

SEQ ID NO: 317747 - RNA, 19 nt, Artificial Sequence
  Description of Artificial Sequence: Synthetic oligonucleotide
cagguuggucguugccucu

SEQ ID NO: 317748 - RNA, 19 nt, Artificial Sequence
  Description of Artificial Sequence: Synthetic oligonucleotide
ggggacguccagguccuca

SEQ ID NO: 317749 - RNA, 19 nt, Artificial Sequence
  Description of Artificial Sequence: Synthetic oligonucleotide
cccugcgagcuguuuuauc

SEQ ID NO: 317750 - RNA, 19 nt, Artificial Sequence
  Description of Artificial Sequence: Synthetic oligonucleotide
gccuguuuccgggcagcug

SEQ ID NO: 317751 - RNA, 19 nt, Artificial Sequence
  Description of Artificial Sequence: Synthetic oligonucleotide
ccaccgacuguuaaacuuu

SEQ ID NO: 317752 - RNA, 19 nt, Artificial Sequence
  Description of Artificial Sequence: Synthetic oligonucleotide
gccgcacggggauggccug

SEQ ID NO: 317753 - RNA, 19 nt, Artificial Sequence
  Description of Artificial Sequence: Synthetic oligonucleotide
ccaauucggucacuuuacu

SEQ ID NO: 317754 - RNA, 19 nt, Artificial Sequence
  Description of Artificial Sequence: Synthetic oligonucleotide
uccgagcauugggcuucac

SEQ ID NO: 317755 - RNA, 19 nt, Artificial Sequence
  Description of Artificial Sequence: Synthetic oligonucleotide
cauuauguucugggcuuuu

SEQ ID NO: 317756 - RNA, 19 nt, Artificial Sequence
  Description of Artificial Sequence: Synthetic oligonucleotide
ccgggcguaguuuagcauu

SEQ ID NO: 317757 - RNA, 19 nt, Artificial Sequence
  Description of Artificial Sequence: Synthetic oligonucleotide
ccguaaagaugggcuugac

SEQ ID NO: 317758 - RNA, 19 nt, Artificial Sequence
  Description of Artificial Sequence: Synthetic oligonucleotide
gccaccgucaguggacucu

SEQ ID NO: 317759 - RNA, 19 nt, Artificial Sequence
  Description of Artificial Sequence: Synthetic oligonucleotide
ccgaacaaguggugguacu

SEQ ID NO: 317760 - RNA, 19 nt, Artificial Sequence
  Description of Artificial Sequence: Synthetic oligonucleotide
cuguggacgcucccgccuu

SEQ ID NO: 317761 - RNA, 19 nt, Artificial Sequence
  Description of Artificial Sequence: Synthetic oligonucleotide
cuguuuccgggcagcuguu

SEQ ID NO: 317762 - RNA, 19 nt, Artificial Sequence
  Description of Artificial Sequence: Synthetic oligonucleotide
ccacgaguugguccagggu

SEQ ID NO: 317763 - RNA, 19 nt, Artificial Sequence
  Description of Artificial Sequence: Synthetic oligonucleotide
ccaguugauacugcuuguu

SEQ ID NO: 317764 - RNA, 19 nt, Artificial Sequence
  Description of Artificial Sequence: Synthetic oligonucleotide
ggaccugacuggccagcuu

SEQ ID NO: 317765 - RNA, 19 nt, Artificial Sequence
  Description of Artificial Sequence: Synthetic oligonucleotide
cgauagguagugguccgcu

SEQ ID NO: 317766 - RNA, 19 nt, Artificial Sequence
  Description of Artificial Sequence: Synthetic oligonucleotide
ggacgguccuguggacgcu

SEQ ID NO: 317767 - RNA, 19 nt, Artificial Sequence
  Description of Artificial Sequence: Synthetic oligonucleotide
cccgggcguaguuuagcau

SEQ ID NO: 317768 - RNA, 19 nt, Artificial Sequence
  Description of Artificial Sequence: Synthetic oligonucleotide
ccugacaacccaggagcuu

SEQ ID NO: 317769 - RNA, 19 nt, Artificial Sequence
  Description of Artificial Sequence: Synthetic oligonucleotide
cggucacuuuacuucgauu

SEQ ID NO: 317770 - RNA, 19 nt, Artificial Sequence
  Description of Artificial Sequence: Synthetic oligonucleotide
ccucagcgcuagguucacu

SEQ ID NO: 317771 - RNA, 19 nt, Artificial Sequence
  Description of Artificial Sequence: Synthetic oligonucleotide
ccucgggcagagggcguau

SEQ ID NO: 317772 - RNA, 19 nt, Artificial Sequence
  Description of Artificial Sequence: Synthetic oligonucleotide
ccgcacggggauggccugu

SEQ ID NO: 317773 - RNA, 19 nt, Artificial Sequence
  Description of Artificial Sequence: Synthetic oligonucleotide
cggcaccauggaagaccuu

SEQ ID NO: 317774 - RNA, 19 nt, Artificial Sequence
  Description of Artificial Sequence: Synthetic oligonucleotide
aauaccguggacugaaggg

SEQ ID NO: 317775 - RNA, 19 nt, Artificial Sequence
  Description of Artificial Sequence: Synthetic oligonucleotide
auaaauaaggaguagaguu

SEQ ID NO: 317776 - RNA, 19 nt, Artificial Sequence
  Description of Artificial Sequence: Synthetic oligonucleotide
ucugaaaauagagagcgcg

SEQ ID NO: 317777 - RNA, 19 nt, Artificial Sequence
  Description of Artificial Sequence: Synthetic oligonucleotide
aaauaaggaguagaguugg

SEQ ID NO: 317778 - RNA, 19 nt, Artificial Sequence
  Description of Artificial Sequence: Synthetic oligonucleotide
aaggacggugcauaagucc

SEQ ID NO: 317779 - RNA, 19 nt, Artificial Sequence
  Description of Artificial Sequence: Synthetic oligonucleotide
agcacaucccuccaaaacc

SEQ ID NO: 317780 - RNA, 19 nt, Artificial Sequence
  Description of Artificial Sequence: Synthetic oligonucleotide
aaaauagagagcgcgauug

SEQ ID NO: 317781 - RNA, 19 nt, Artificial Sequence
  Description of Artificial Sequence: Synthetic oligonucleotide
uggauaacagccuuggugc

SEQ ID NO: 317782 - RNA, 19 nt, Artificial Sequence
  Description of Artificial Sequence: Synthetic oligonucleotide
auauacagaagcaacggcc

SEQ ID NO: 317783 - RNA, 19 nt, Artificial Sequence
  Description of Artificial Sequence: Synthetic oligonucleotide
aaauagagagcgcgauugc

SEQ ID NO: 317784 - RNA, 19 nt, Artificial Sequence
  Description of Artificial Sequence: Synthetic oligonucleotide
aauagagagcgcgauugcc

SEQ ID NO: 317785 - RNA, 19 nt, Artificial Sequence
  Description of Artificial Sequence: Synthetic oligonucleotide
ugagauugaacagaaaaga

SEQ ID NO: 317786 - RNA, 19 nt, Artificial Sequence
  Description of Artificial Sequence: Synthetic oligonucleotide
auugggaaacaagucaucc

SEQ ID NO: 317787 - RNA, 19 nt, Artificial Sequence
  Description of Artificial Sequence: Synthetic oligonucleotide
auuaccagauuguggaggg

SEQ ID NO: 317788 - RNA, 19 nt, Artificial Sequence
  Description of Artificial Sequence: Synthetic oligonucleotide
uuuuaguagcucuaccacc

SEQ ID NO: 317789 - RNA, 19 nt, Artificial Sequence
  Description of Artificial Sequence: Synthetic oligonucleotide
ugaugucuucuccaaaucc

SEQ ID NO: 317790 - RNA, 19 nt, Artificial Sequence
  Description of Artificial Sequence: Synthetic oligonucleotide
cugagauugaacagaaaag

SEQ ID NO: 317791 - RNA, 19 nt, Artificial Sequence
  Description of Artificial Sequence: Synthetic oligonucleotide
gaaggcuagagacaggcug

SEQ ID NO: 317792 - RNA, 19 nt, Artificial Sequence
  Description of Artificial Sequence: Synthetic oligonucleotide
uucauccuagaauuagggg

SEQ ID NO: 317793 - RNA, 19 nt, Artificial Sequence
  Description of Artificial Sequence: Synthetic oligonucleotide
ucgacuggcacaaucuucc

SEQ ID NO: 317794 - RNA, 19 nt, Artificial Sequence
  Description of Artificial Sequence: Synthetic oligonucleotide
aaggggucgugucagauga

SEQ ID NO: 317795 - RNA, 19 nt, Artificial Sequence
  Description of Artificial Sequence: Synthetic oligonucleotide
cucuauauacagaagcaac

SEQ ID NO: 317796 - RNA, 19 nt, Artificial Sequence
  Description of Artificial Sequence: Synthetic oligonucleotide
guuacccugagauugaaca

SEQ ID NO: 317797 - RNA, 19 nt, Artificial Sequence
  Description of Artificial Sequence: Synthetic oligonucleotide
gauuaccagauuguggagg

SEQ ID NO: 317798 - RNA, 19 nt, Artificial Sequence
  Description of Artificial Sequence: Synthetic oligonucleotide
ugaauguagggaagagagg

SEQ ID NO: 317799 - RNA, 19 nt, Artificial Sequence
  Description of Artificial Sequence: Synthetic oligonucleotide
aauguagggaagagaggcc

SEQ ID NO: 317800 - RNA, 19 nt, Artificial Sequence
  Description of Artificial Sequence: Synthetic oligonucleotide
uggacugaagggaggaggg

SEQ ID NO: 317801 - RNA, 19 nt, Artificial Sequence
  Description of Artificial Sequence: Synthetic oligonucleotide
uucuagauucaaaucgucu

SEQ ID NO: 317802 - RNA, 19 nt, Artificial Sequence
  Description of Artificial Sequence: Synthetic oligonucleotide
gaauaccguggacugaagg

SEQ ID NO: 317803 - RNA, 19 nt, Artificial Sequence
  Description of Artificial Sequence: Synthetic oligonucleotide
gucccgauaaaccagugcc

SEQ ID NO: 317804 - RNA, 19 nt, Artificial Sequence
  Description of Artificial Sequence: Synthetic oligonucleotide
agaagcaacggccgagggc

SEQ ID NO: 317805 - RNA, 19 nt, Artificial Sequence
  Description of Artificial Sequence: Synthetic oligonucleotide
ucgucuuuauuucuacagc

SEQ ID NO: 317806 - RNA, 19 nt, Artificial Sequence
  Description of Artificial Sequence: Synthetic oligonucleotide
guuucuucgggagaggucc

SEQ ID NO: 317807 - RNA, 19 nt, Artificial Sequence
  Description of Artificial Sequence: Synthetic oligonucleotide
cauccugguacuugcaagg

SEQ ID NO: 317808 - RNA, 19 nt, Artificial Sequence
  Description of Artificial Sequence: Synthetic oligonucleotide
ugucagaugaaggcuagag

SEQ ID NO: 317809 - RNA, 19 nt, Artificial Sequence
  Description of Artificial Sequence: Synthetic oligonucleotide
aguguucuuggcuuuggag

SEQ ID NO: 317810 - RNA, 19 nt, Artificial Sequence
  Description of Artificial Sequence: Synthetic oligonucleotide
cucgauagccuccagggag

SEQ ID NO: 317811 - RNA, 19 nt, Artificial Sequence
  Description of Artificial Sequence: Synthetic oligonucleotide
ugggagauaccaccacucg

SEQ ID NO: 317812 - RNA, 19 nt, Artificial Sequence
  Description of Artificial Sequence: Synthetic oligonucleotide
uguugugggaguccgggca

SEQ ID NO: 317813 - RNA, 19 nt, Artificial Sequence
  Description of Artificial Sequence: Synthetic oligonucleotide
ucgugcugguauuucauag

SEQ ID NO: 317814 - RNA, 19 nt, Artificial Sequence
  Description of Artificial Sequence: Synthetic oligonucleotide
uuacccugagauugaacag

SEQ ID NO: 317815 - RNA, 19 nt, Artificial Sequence
  Description of Artificial Sequence: Synthetic oligonucleotide
ucaaaucgucuuuauuucu

SEQ ID NO: 317816 - RNA, 19 nt, Artificial Sequence
  Description of Artificial Sequence: Synthetic oligonucleotide
gagcuagcccucuucaucc

SEQ ID NO: 317817 - RNA, 19 nt, Artificial Sequence
  Description of Artificial Sequence: Synthetic oligonucleotide
cucgcuugcacaauggcuc

SEQ ID NO: 317818 - RNA, 19 nt, Artificial Sequence
  Description of Artificial Sequence: Synthetic oligonucleotide
aaucgucuuuauuucuaca

SEQ ID NO: 317819 - RNA, 19 nt, Artificial Sequence
  Description of Artificial Sequence: Synthetic oligonucleotide
agcacgaucucguccuggc

SEQ ID NO: 317820 - RNA, 19 nt, Artificial Sequence
  Description of Artificial Sequence: Synthetic oligonucleotide
uuaaggaaguugagagagc

SEQ ID NO: 317821 - RNA, 19 nt, Artificial Sequence
  Description of Artificial Sequence: Synthetic oligonucleotide
accaucuuuuaguagcucu

SEQ ID NO: 317822 - RNA, 19 nt, Artificial Sequence
  Description of Artificial Sequence: Synthetic oligonucleotide
cagcuuuagcccacgaggg

SEQ ID NO: 317823 - RNA, 19 nt, Artificial Sequence
  Description of Artificial Sequence: Synthetic oligonucleotide
ugugggacugucaacuuua

SEQ ID NO: 317824 - RNA, 19 nt, Artificial Sequence
  Description of Artificial Sequence: Synthetic oligonucleotide
cuaaacccuggauaacagc

SEQ ID NO: 317825 - RNA, 19 nt, Artificial Sequence
  Description of Artificial Sequence: Synthetic oligonucleotide
aaaggacggugcauaaguc

SEQ ID NO: 317826 - RNA, 19 nt, Artificial Sequence
  Description of Artificial Sequence: Synthetic oligonucleotide
ucucuauauacagaagcaa

SEQ ID NO: 317827 - RNA, 19 nt, Artificial Sequence
  Description of Artificial Sequence: Synthetic oligonucleotide
uacgcagucgugcugguau

SEQ ID NO: 317828 - RNA, 19 nt, Artificial Sequence
  Description of Artificial Sequence: Synthetic oligonucleotide
ucacccaucaaauggggua

SEQ ID NO: 317829 - RNA, 19 nt, Artificial Sequence
  Description of Artificial Sequence: Synthetic oligonucleotide
ucuuguaccaggcgccgca

SEQ ID NO: 317830 - RNA, 19 nt, Artificial Sequence
  Description of Artificial Sequence: Synthetic oligonucleotide
ugaaaauagagagcgcgau

SEQ ID NO: 317831 - RNA, 19 nt, Artificial Sequence
  Description of Artificial Sequence: Synthetic oligonucleotide
ggagguuacccugagauug

SEQ ID NO: 317832 - RNA, 19 nt, Artificial Sequence
  Description of Artificial Sequence: Synthetic oligonucleotide
uugggagauaccaccacuc

SEQ ID NO: 317833 - RNA, 19 nt, Artificial Sequence
  Description of Artificial Sequence: Synthetic oligonucleotide
guacuuaaguguucuuggc

SEQ ID NO: 317834 - RNA, 19 nt, Artificial Sequence
  Description of Artificial Sequence: Synthetic oligonucleotide
aggacggugcauaaguccg

SEQ ID NO: 317835 - RNA, 19 nt, Artificial Sequence
  Description of Artificial Sequence: Synthetic oligonucleotide
ucacguaaccacugguucu

SEQ ID NO: 317836 - RNA, 19 nt, Artificial Sequence
  Description of Artificial Sequence: Synthetic oligonucleotide
gacauuggaagcugaggca

SEQ ID NO: 317837 - RNA, 19 nt, Artificial Sequence
  Description of Artificial Sequence: Synthetic oligonucleotide
cauagcggccuugugaagc

SEQ ID NO: 317838 - RNA, 19 nt, Artificial Sequence
  Description of Artificial Sequence: Synthetic oligonucleotide
gucucuaaacccuggauaa

SEQ ID NO: 317839 - RNA, 19 nt, Artificial Sequence
  Description of Artificial Sequence: Synthetic oligonucleotide
uucucaugagcacggguaa

SEQ ID NO: 317840 - RNA, 19 nt, Artificial Sequence
  Description of Artificial Sequence: Synthetic oligonucleotide
ggugcauaaguccgggagg

SEQ ID NO: 317841 - RNA, 19 nt, Artificial Sequence
  Description of Artificial Sequence: Synthetic oligonucleotide
uuaccugagccuccccaag

SEQ ID NO: 317842 - RNA, 19 nt, Artificial Sequence
  Description of Artificial Sequence: Synthetic oligonucleotide
cucacguaaccacugguuc

SEQ ID NO: 317843 - RNA, 19 nt, Artificial Sequence
  Description of Artificial Sequence: Synthetic oligonucleotide
ucgggaacccuuucaggag

SEQ ID NO: 317844 - RNA, 19 nt, Artificial Sequence
  Description of Artificial Sequence: Synthetic oligonucleotide
cugcuugcggcuucgacug

SEQ ID NO: 317845 - RNA, 19 nt, Artificial Sequence
  Description of Artificial Sequence: Synthetic oligonucleotide
ugggaguccgggcaucugc

SEQ ID NO: 317846 - RNA, 19 nt, Artificial Sequence
  Description of Artificial Sequence: Synthetic oligonucleotide
aggauuaccugagccuccc

SEQ ID NO: 317847 - RNA, 19 nt, Artificial Sequence
  Description of Artificial Sequence: Synthetic oligonucleotide
ugggcgguaccacuggaga

SEQ ID NO: 317848 - RNA, 19 nt, Artificial Sequence
  Description of Artificial Sequence: Synthetic oligonucleotide
ucccgauaaaccagugcca

SEQ ID NO: 317849 - RNA, 19 nt, Artificial Sequence
  Description of Artificial Sequence: Synthetic oligonucleotide
uguauuugccccgcuugcc

SEQ ID NO: 317850 - RNA, 19 nt, Artificial Sequence
  Description of Artificial Sequence: Synthetic oligonucleotide
uuaaguguucuuggcuuug

SEQ ID NO: 317851 - RNA, 19 nt, Artificial Sequence
  Description of Artificial Sequence: Synthetic oligonucleotide
acgagggaguuucuucggg

SEQ ID NO: 317852 - RNA, 19 nt, Artificial Sequence
  Description of Artificial Sequence: Synthetic oligonucleotide
cucagagugcggcugucgg

SEQ ID NO: 317853 - RNA, 19 nt, Artificial Sequence
  Description of Artificial Sequence: Synthetic oligonucleotide
aaguguucuuggcuuugga

SEQ ID NO: 317854 - RNA, 19 nt, Artificial Sequence
  Description of Artificial Sequence: Synthetic oligonucleotide
aaaugggguagccccuccu

SEQ ID NO: 317855 - RNA, 19 nt, Artificial Sequence
  Description of Artificial Sequence: Synthetic oligonucleotide
ugcuaaaggacagcaagua

SEQ ID NO: 317856 - RNA, 19 nt, Artificial Sequence
  Description of Artificial Sequence: Synthetic oligonucleotide
cauaaguccgggaggcaac

SEQ ID NO: 317857 - RNA, 19 nt, Artificial Sequence
  Description of Artificial Sequence: Synthetic oligonucleotide
caagcuucgcagaguagug

SEQ ID NO: 317858 - RNA, 19 nt, Artificial Sequence
  Description of Artificial Sequence: Synthetic oligonucleotide
ugcucgcuugcacaauggc

SEQ ID NO: 317859 - RNA, 19 nt, Artificial Sequence
  Description of Artificial Sequence: Synthetic oligonucleotide
ucgugucagaugaaggcua

SEQ ID NO: 317860 - RNA, 19 nt, Artificial Sequence
  Description of Artificial Sequence: Synthetic oligonucleotide
agugccaggauuaccugag

SEQ ID NO: 317861 - RNA, 19 nt, Artificial Sequence
  Description of Artificial Sequence: Synthetic oligonucleotide
cacgucugggugaacuugc

SEQ ID NO: 317862 - RNA, 19 nt, Artificial Sequence
  Description of Artificial Sequence: Synthetic oligonucleotide
ugccucaugagaagccaga

SEQ ID NO: 317863 - RNA, 19 nt, Artificial Sequence
  Description of Artificial Sequence: Synthetic oligonucleotide
uacgucucagggcaucccu

SEQ ID NO: 317864 - RNA, 19 nt, Artificial Sequence
  Description of Artificial Sequence: Synthetic oligonucleotide
cucauagcggccuugugaa

SEQ ID NO: 317865 - RNA, 19 nt, Artificial Sequence
  Description of Artificial Sequence: Synthetic oligonucleotide
gcuagagacaggcugcccc

SEQ ID NO: 317866 - RNA, 19 nt, Artificial Sequence
  Description of Artificial Sequence: Synthetic oligonucleotide
auaccguggacugaaggga

SEQ ID NO: 317867 - RNA, 19 nt, Artificial Sequence
  Description of Artificial Sequence: Synthetic oligonucleotide
cugaaaauagagagcgcga

SEQ ID NO: 317868 - RNA, 19 nt, Artificial Sequence
  Description of Artificial Sequence: Synthetic oligonucleotide
uagagagcgcgauugccuc

SEQ ID NO: 317869 - RNA, 19 nt, Artificial Sequence
  Description of Artificial Sequence: Synthetic oligonucleotide
cucgcuugccucaugagaa

SEQ ID NO: 317870 - RNA, 19 nt, Artificial Sequence
  Description of Artificial Sequence: Synthetic oligonucleotide
acauuggaagcugaggcaa

SEQ ID NO: 317871 - RNA, 19 nt, Artificial Sequence
  Description of Artificial Sequence: Synthetic oligonucleotide
uccucacguaaccacuggu

SEQ ID NO: 317872 - RNA, 19 nt, Artificial Sequence
  Description of Artificial Sequence: Synthetic oligonucleotide
ugcggcuucgacuggcaca

SEQ ID NO: 317873 - RNA, 19 nt, Artificial Sequence
  Description of Artificial Sequence: Synthetic oligonucleotide
auagagagcgcgauugccu

SEQ ID NO: 317874 - RNA, 19 nt, Artificial Sequence
  Description of Artificial Sequence: Synthetic oligonucleotide
cacgaucucguccuggcuc

SEQ ID NO: 317875 - RNA, 19 nt, Artificial Sequence
  Description of Artificial Sequence: Synthetic oligonucleotide
ugggccgcauccuuguacu

SEQ ID NO: 317876 - RNA, 19 nt, Artificial Sequence
  Description of Artificial Sequence: Synthetic oligonucleotide
gacggugcauaaguccggg

SEQ ID NO: 317877 - RNA, 19 nt, Artificial Sequence
  Description of Artificial Sequence: Synthetic oligonucleotide
gagaucgggaacccuuuca

SEQ ID NO: 317878 - RNA, 19 nt, Artificial Sequence
  Description of Artificial Sequence: Synthetic oligonucleotide
gguagccccuccuacugcg

SEQ ID NO: 317879 - RNA, 19 nt, Artificial Sequence
  Description of Artificial Sequence: Synthetic oligonucleotide
gugcauaaguccgggaggc

SEQ ID NO: 317880 - RNA, 19 nt, Artificial Sequence
  Description of Artificial Sequence: Synthetic oligonucleotide
agcaaguacuuaaguguuc

SEQ ID NO: 317881 - RNA, 19 nt, Artificial Sequence
  Description of Artificial Sequence: Synthetic oligonucleotide
cagauuguggaggguacgc

SEQ ID NO: 317882 - RNA, 19 nt, Artificial Sequence
  Description of Artificial Sequence: Synthetic oligonucleotide
cacgagggaguuucuucgg

SEQ ID NO: 317883 - RNA, 19 nt, Artificial Sequence
  Description of Artificial Sequence: Synthetic oligonucleotide
ugucccggcgcuuaucuuu

SEQ ID NO: 317884 - RNA, 19 nt, Artificial Sequence
  Description of Artificial Sequence: Synthetic oligonucleotide
uugccucacccaucaaaug

SEQ ID NO: 317885 - RNA, 19 nt, Artificial Sequence
  Description of Artificial Sequence: Synthetic oligonucleotide
cacccaucaaaugggguag

SEQ ID NO: 317886 - RNA, 19 nt, Artificial Sequence
  Description of Artificial Sequence: Synthetic oligonucleotide
ucucaugagcacggguaag

SEQ ID NO: 317887 - RNA, 19 nt, Artificial Sequence
  Description of Artificial Sequence: Synthetic oligonucleotide
caaaggacggugcauaagu

SEQ ID NO: 317888 - RNA, 19 nt, Artificial Sequence
  Description of Artificial Sequence: Synthetic oligonucleotide
acgaucucguccuggcuca

SEQ ID NO: 317889 - RNA, 19 nt, Artificial Sequence
  Description of Artificial Sequence: Synthetic oligonucleotide
cuuggugcccagcacgauc

SEQ ID NO: 317890 - RNA, 19 nt, Artificial Sequence
  Description of Artificial Sequence: Synthetic oligonucleotide
agcgcgauugccucaccca

SEQ ID NO: 317891 - RNA, 19 nt, Artificial Sequence
  Description of Artificial Sequence: Synthetic oligonucleotide
gaaggacccacugcgccgc

SEQ ID NO: 317892 - RNA, 19 nt, Artificial Sequence
  Description of Artificial Sequence: Synthetic oligonucleotide
ucgcuugccucaugagaag

SEQ ID NO: 317893 - RNA, 19 nt, Artificial Sequence
  Description of Artificial Sequence: Synthetic oligonucleotide
gacauggccaauaacuuau

SEQ ID NO: 317894 - RNA, 19 nt, Artificial Sequence
  Description of Artificial Sequence: Synthetic oligonucleotide
acugucaacuuuacaggcu

SEQ ID NO: 317895 - RNA, 19 nt, Artificial Sequence
  Description of Artificial Sequence: Synthetic oligonucleotide
ccacgagggaguuucuucg

SEQ ID NO: 317896 - RNA, 19 nt, Artificial Sequence
  Description of Artificial Sequence: Synthetic oligonucleotide
cagcucgauagccuccagg

SEQ ID NO: 317897 - RNA, 19 nt, Artificial Sequence
  Description of Artificial Sequence: Synthetic oligonucleotide
ucauagcggccuugugaag

SEQ ID NO: 317898 - RNA, 19 nt, Artificial Sequence
  Description of Artificial Sequence: Synthetic oligonucleotide
ccaagccccagcucgauag

SEQ ID NO: 317899 - RNA, 19 nt, Artificial Sequence
  Description of Artificial Sequence: Synthetic oligonucleotide
uggcacaaucuuccagugu

SEQ ID NO: 317900 - RNA, 19 nt, Artificial Sequence
  Description of Artificial Sequence: Synthetic oligonucleotide
agcuucgcagaguaguguu

SEQ ID NO: 317901 - RNA, 19 nt, Artificial Sequence
  Description of Artificial Sequence: Synthetic oligonucleotide
guuggggugggcaggcccg

SEQ ID NO: 317902 - RNA, 19 nt, Artificial Sequence
  Description of Artificial Sequence: Synthetic oligonucleotide
uuucuucgggagaggucca

SEQ ID NO: 317903 - RNA, 19 nt, Artificial Sequence
  Description of Artificial Sequence: Synthetic oligonucleotide
gagcgcgauugccucaccc

SEQ ID NO: 317904 - RNA, 19 nt, Artificial Sequence
  Description of Artificial Sequence: Synthetic oligonucleotide
augcuaaaggacagcaagu

SEQ ID NO: 317905 - RNA, 19 nt, Artificial Sequence
  Description of Artificial Sequence: Synthetic oligonucleotide
agcuuuagcccacgaggga

SEQ ID NO: 317906 - RNA, 19 nt, Artificial Sequence
  Description of Artificial Sequence: Synthetic oligonucleotide
cuccugcgaaccuggcucg

SEQ ID NO: 317907 - RNA, 19 nt, Artificial Sequence
  Description of Artificial Sequence: Synthetic oligonucleotide
ucccggauagccagggcau

SEQ ID NO: 317908 - RNA, 19 nt, Artificial Sequence
  Description of Artificial Sequence: Synthetic oligonucleotide
aggucagacucagaccgag

SEQ ID NO: 317909 - RNA, 19 nt, Artificial Sequence
  Description of Artificial Sequence: Synthetic oligonucleotide
cuccucacguaaccacugg

SEQ ID NO: 317910 - RNA, 19 nt, Artificial Sequence
  Description of Artificial Sequence: Synthetic oligonucleotide
ggagauaccaccacucgga

SEQ ID NO: 317911 - RNA, 19 nt, Artificial Sequence
  Description of Artificial Sequence: Synthetic oligonucleotide
ggucucuaaacccuggaua

SEQ ID NO: 317912 - RNA, 19 nt, Artificial Sequence
  Description of Artificial Sequence: Synthetic oligonucleotide
agauuguggaggguacgca

SEQ ID NO: 317913 - RNA, 19 nt, Artificial Sequence
  Description of Artificial Sequence: Synthetic oligonucleotide
acccaucaaaugggguagc

SEQ ID NO: 317914 - RNA, 19 nt, Artificial Sequence
  Description of Artificial Sequence: Synthetic oligonucleotide
caaaugggguagccccucc

SEQ ID NO: 317915 - RNA, 19 nt, Artificial Sequence
  Description of Artificial Sequence: Synthetic oligonucleotide
gaaaauagagagcgcgauu

SEQ ID NO: 317916 - RNA, 19 nt, Artificial Sequence
  Description of Artificial Sequence: Synthetic oligonucleotide
ucaaaugggguagccccuc

SEQ ID NO: 317917 - RNA, 19 nt, Artificial Sequence
  Description of Artificial Sequence: Synthetic oligonucleotide
cugccauauuccccauagg

SEQ ID NO: 317918 - RNA, 19 nt, Artificial Sequence
  Description of Artificial Sequence: Synthetic oligonucleotide
cugggcgguaccacuggag

SEQ ID NO: 317919 - RNA, 19 nt, Artificial Sequence
  Description of Artificial Sequence: Synthetic oligonucleotide
gccgcagagagccacugcc

SEQ ID NO: 317920 - RNA, 19 nt, Artificial Sequence
  Description of Artificial Sequence: Synthetic oligonucleotide
gcuccugcgaaccuggcuc

SEQ ID NO: 317921 - RNA, 19 nt, Artificial Sequence
  Description of Artificial Sequence: Synthetic oligonucleotide
caagggagguuacccugag

SEQ ID NO: 317922 - RNA, 19 nt, Artificial Sequence
  Description of Artificial Sequence: Synthetic oligonucleotide
agaggcccgugccuccagg

SEQ ID NO: 317923 - RNA, 19 nt, Artificial Sequence
  Description of Artificial Sequence: Synthetic oligonucleotide
auaaguccgggaggcaaca

SEQ ID NO: 317924 - RNA, 19 nt, Artificial Sequence
  Description of Artificial Sequence: Synthetic oligonucleotide
cacguaaccacugguucuc

SEQ ID NO: 317925 - RNA, 19 nt, Artificial Sequence
  Description of Artificial Sequence: Synthetic oligonucleotide
cagggagcaaaggacggug

SEQ ID NO: 317926 - RNA, 19 nt, Artificial Sequence
  Description of Artificial Sequence: Synthetic oligonucleotide
cugucggagaggcccgugc

SEQ ID NO: 317927 - RNA, 19 nt, Artificial Sequence
  Description of Artificial Sequence: Synthetic oligonucleotide
gaaggcguggcaggauggc

SEQ ID NO: 317928 - RNA, 19 nt, Artificial Sequence
  Description of Artificial Sequence: Synthetic oligonucleotide
gauggcucaaugggccgug

SEQ ID NO: 317929 - RNA, 19 nt, Artificial Sequence
  Description of Artificial Sequence: Synthetic oligonucleotide
ggguacgcagucgugcugg

SEQ ID NO: 317930 - RNA, 19 nt, Artificial Sequence
  Description of Artificial Sequence: Synthetic oligonucleotide
agagcgcgauugccucacc

SEQ ID NO: 317931 - RNA, 19 nt, Artificial Sequence
  Description of Artificial Sequence: Synthetic oligonucleotide
cuucgcagaguaguguuga

SEQ ID NO: 317932 - RNA, 19 nt, Artificial Sequence
  Description of Artificial Sequence: Synthetic oligonucleotide
agagagcgcgauugccuca

SEQ ID NO: 317933 - RNA, 19 nt, Artificial Sequence
  Description of Artificial Sequence: Synthetic oligonucleotide
gccucacccaucaaauggg

SEQ ID NO: 317934 - RNA, 19 nt, Artificial Sequence
  Description of Artificial Sequence: Synthetic oligonucleotide
ccgcuugccauacagaaca

SEQ ID NO: 317935 - RNA, 19 nt, Artificial Sequence
  Description of Artificial Sequence: Synthetic oligonucleotide
uuggagcuugggagauacc

SEQ ID NO: 317936 - RNA, 19 nt, Artificial Sequence
  Description of Artificial Sequence: Synthetic oligonucleotide
gaggcccgugccuccaggc

SEQ ID NO: 317937 - RNA, 19 nt, Artificial Sequence
  Description of Artificial Sequence: Synthetic oligonucleotide
gaggcagcgcuccugcgaa

SEQ ID NO: 317938 - RNA, 19 nt, Artificial Sequence
  Description of Artificial Sequence: Synthetic oligonucleotide
aucugcaagguuggguaga

SEQ ID NO: 317939 - RNA, 19 nt, Artificial Sequence
  Description of Artificial Sequence: Synthetic oligonucleotide
ggcgguaccacuggagaag

SEQ ID NO: 317940 - RNA, 19 nt, Artificial Sequence
  Description of Artificial Sequence: Synthetic oligonucleotide
agcgcuccugcgaaccugg

SEQ ID NO: 317941 - RNA, 19 nt, Artificial Sequence
  Description of Artificial Sequence: Synthetic oligonucleotide
uuguucuggucccgauaaa

SEQ ID NO: 317942 - RNA, 19 nt, Artificial Sequence
  Description of Artificial Sequence: Synthetic oligonucleotide
ugcuugcggcuucgacugg

SEQ ID NO: 317943 - RNA, 19 nt, Artificial Sequence
  Description of Artificial Sequence: Synthetic oligonucleotide
cuagauucaaaucgucuuu

SEQ ID NO: 317944 - RNA, 19 nt, Artificial Sequence
  Description of Artificial Sequence: Synthetic oligonucleotide
acaagggagguuacccuga

SEQ ID NO: 317945 - RNA, 19 nt, Artificial Sequence
  Description of Artificial Sequence: Synthetic oligonucleotide
cgucuuuauuucuacagca

SEQ ID NO: 317946 - RNA, 19 nt, Artificial Sequence
  Description of Artificial Sequence: Synthetic oligonucleotide
aggugggccgcauccuugu

SEQ ID NO: 317947 - RNA, 19 nt, Artificial Sequence
  Description of Artificial Sequence: Synthetic oligonucleotide
gggcacgaugcucuccgcg

SEQ ID NO: 317948 - RNA, 19 nt, Artificial Sequence
  Description of Artificial Sequence: Synthetic oligonucleotide
caagccccagcucgauagc

SEQ ID NO: 317949 - RNA, 19 nt, Artificial Sequence
  Description of Artificial Sequence: Synthetic oligonucleotide
gagguuacccugagauuga

SEQ ID NO: 317950 - RNA, 19 nt, Artificial Sequence
  Description of Artificial Sequence: Synthetic oligonucleotide
ugugggaguccgggcaucu

SEQ ID NO: 317951 - RNA, 19 nt, Artificial Sequence
  Description of Artificial Sequence: Synthetic oligonucleotide
cugcuggaaggaauaaaua

SEQ ID NO: 317952 - RNA, 19 nt, Artificial Sequence
  Description of Artificial Sequence: Synthetic oligonucleotide
ugcauaaguccgggaggca

SEQ ID NO: 317953 - RNA, 19 nt, Artificial Sequence
  Description of Artificial Sequence: Synthetic oligonucleotide
cacggcggucuccucgucc

SEQ ID NO: 317954 - RNA, 19 nt, Artificial Sequence
  Description of Artificial Sequence: Synthetic oligonucleotide
gauuuaaggccugggcggu

SEQ ID NO: 317955 - RNA, 19 nt, Artificial Sequence
  Description of Artificial Sequence: Synthetic oligonucleotide
cagucgugcugguauuuca

SEQ ID NO: 317956 - RNA, 19 nt, Artificial Sequence
  Description of Artificial Sequence: Synthetic oligonucleotide
gcggcugucggagaggccc

SEQ ID NO: 317957 - RNA, 19 nt, Artificial Sequence
  Description of Artificial Sequence: Synthetic oligonucleotide
cccgauaaaccagugccag

SEQ ID NO: 317958 - RNA, 19 nt, Artificial Sequence
  Description of Artificial Sequence: Synthetic oligonucleotide
uccgcgcagggucucuaaa

SEQ ID NO: 317959 - RNA, 19 nt, Artificial Sequence
  Description of Artificial Sequence: Synthetic oligonucleotide
gcgauugccucacccauca

SEQ ID NO: 317960 - RNA, 19 nt, Artificial Sequence
  Description of Artificial Sequence: Synthetic oligonucleotide
auaccaccacucggaacag

SEQ ID NO: 317961 - RNA, 19 nt, Artificial Sequence
  Description of Artificial Sequence: Synthetic oligonucleotide
ggguaaggggucgugucag

SEQ ID NO: 317962 - RNA, 19 nt, Artificial Sequence
  Description of Artificial Sequence: Synthetic oligonucleotide
ucggagaggcccgugccuc

SEQ ID NO: 317963 - RNA, 19 nt, Artificial Sequence
  Description of Artificial Sequence: Synthetic oligonucleotide
uuaccagauuguggagggu

SEQ ID NO: 317964 - RNA, 19 nt, Artificial Sequence
  Description of Artificial Sequence: Synthetic oligonucleotide
gaggguacgcagucgugcu

SEQ ID NO: 317965 - RNA, 19 nt, Artificial Sequence
  Description of Artificial Sequence: Synthetic oligonucleotide
ccgggaauaccguggacug

SEQ ID NO: 317966 - RNA, 19 nt, Artificial Sequence
  Description of Artificial Sequence: Synthetic oligonucleotide
ccgauaaaccagugccagg

SEQ ID NO: 317967 - RNA, 19 nt, Artificial Sequence
  Description of Artificial Sequence: Synthetic oligonucleotide
gggugauuuaaggccuggg

SEQ ID NO: 317968 - RNA, 19 nt, Artificial Sequence
  Description of Artificial Sequence: Synthetic oligonucleotide
ggggucgugucagaugaag

SEQ ID NO: 317969 - RNA, 19 nt, Artificial Sequence
  Description of Artificial Sequence: Synthetic oligonucleotide
cuacgucucagggcauccc

SEQ ID NO: 317970 - RNA, 19 nt, Artificial Sequence
  Description of Artificial Sequence: Synthetic oligonucleotide
guagagcacaucccuccaa

SEQ ID NO: 317971 - RNA, 19 nt, Artificial Sequence
  Description of Artificial Sequence: Synthetic oligonucleotide
ccaucaaaugggguagccc

SEQ ID NO: 317972 - RNA, 19 nt, Artificial Sequence
  Description of Artificial Sequence: Synthetic oligonucleotide
ccgaaggacccacugcgcc

SEQ ID NO: 317973 - RNA, 19 nt, Artificial Sequence
  Description of Artificial Sequence: Synthetic oligonucleotide
cggugcauaaguccgggag

SEQ ID NO: 317974 - RNA, 19 nt, Artificial Sequence
  Description of Artificial Sequence: Synthetic oligonucleotide
ccaggauuaccugagccuc

SEQ ID NO: 317975 - RNA, 19 nt, Artificial Sequence
  Description of Artificial Sequence: Synthetic oligonucleotide
uuuagcccacgagggaguu

SEQ ID NO: 317976 - RNA, 19 nt, Artificial Sequence
  Description of Artificial Sequence: Synthetic oligonucleotide
ccagauuauucaggguugc

SEQ ID NO: 317977 - RNA, 19 nt, Artificial Sequence
  Description of Artificial Sequence: Synthetic oligonucleotide
gaucucguccuggcucagc

SEQ ID NO: 317978 - RNA, 19 nt, Artificial Sequence
  Description of Artificial Sequence: Synthetic oligonucleotide
uccugcgaaccuggcucgg

SEQ ID NO: 317979 - RNA, 19 nt, Artificial Sequence
  Description of Artificial Sequence: Synthetic oligonucleotide
ggauggcaaggagaucggg

SEQ ID NO: 317980 - RNA, 19 nt, Artificial Sequence
  Description of Artificial Sequence: Synthetic oligonucleotide
cagcggcaggcccugacuc

SEQ ID NO: 317981 - RNA, 19 nt, Artificial Sequence
  Description of Artificial Sequence: Synthetic oligonucleotide
gcgcagggucucuaaaccc

SEQ ID NO: 317982 - RNA, 19 nt, Artificial Sequence
  Description of Artificial Sequence: Synthetic oligonucleotide
uaaguccgggaggcaacac

SEQ ID NO: 317983 - RNA, 19 nt, Artificial Sequence
  Description of Artificial Sequence: Synthetic oligonucleotide
ugcuacgucucagggcauc

SEQ ID NO: 317984 - RNA, 19 nt, Artificial Sequence
  Description of Artificial Sequence: Synthetic oligonucleotide
caggggugauuuaaggccu

SEQ ID NO: 317985 - RNA, 19 nt, Artificial Sequence
  Description of Artificial Sequence: Synthetic oligonucleotide
ggcuucgacuggcacaauc

SEQ ID NO: 317986 - RNA, 19 nt, Artificial Sequence
  Description of Artificial Sequence: Synthetic oligonucleotide
accgaggcccagccacauc

SEQ ID NO: 317987 - RNA, 19 nt, Artificial Sequence
  Description of Artificial Sequence: Synthetic oligonucleotide
agguuggguagagcacauc

SEQ ID NO: 317988 - RNA, 19 nt, Artificial Sequence
  Description of Artificial Sequence: Synthetic oligonucleotide
gucgugucagaugaaggcu

SEQ ID NO: 317989 - RNA, 19 nt, Artificial Sequence
  Description of Artificial Sequence: Synthetic oligonucleotide
cagcacgaucucguccugg

SEQ ID NO: 317990 - RNA, 19 nt, Artificial Sequence
  Description of Artificial Sequence: Synthetic oligonucleotide
gcaaaggacggugcauaag

SEQ ID NO: 317991 - RNA, 19 nt, Artificial Sequence
  Description of Artificial Sequence: Synthetic oligonucleotide
gcgguaccacuggagaagg

SEQ ID NO: 317992 - RNA, 19 nt, Artificial Sequence
  Description of Artificial Sequence: Synthetic oligonucleotide
ugcgccgcagagagccacu

SEQ ID NO: 317993 - RNA, 19 nt, Artificial Sequence
  Description of Artificial Sequence: Synthetic oligonucleotide
guggaggguacgcagucgu

SEQ ID NO: 317994 - RNA, 19 nt, Artificial Sequence
  Description of Artificial Sequence: Synthetic oligonucleotide
cgaaggacccacugcgccg

SEQ ID NO: 317995 - RNA, 19 nt, Artificial Sequence
  Description of Artificial Sequence: Synthetic oligonucleotide
agagugcggcugucggaga

SEQ ID NO: 317996 - RNA, 19 nt, Artificial Sequence
  Description of Artificial Sequence: Synthetic oligonucleotide
caccacucggaacaggggu

SEQ ID NO: 317997 - RNA, 19 nt, Artificial Sequence
  Description of Artificial Sequence: Synthetic oligonucleotide
gucgugcugguauuucaua

SEQ ID NO: 317998 - RNA, 19 nt, Artificial Sequence
  Description of Artificial Sequence: Synthetic oligonucleotide
ggacggugcauaaguccgg

SEQ ID NO: 317999 - RNA, 19 nt, Artificial Sequence
  Description of Artificial Sequence: Synthetic oligonucleotide
ggggacauuggaagcugag

SEQ ID NO: 318000 - RNA, 19 nt, Artificial Sequence
  Description of Artificial Sequence: Synthetic oligonucleotide
ccacaucucggcugccacg

SEQ ID NO: 318001 - RNA, 19 nt, Artificial Sequence
  Description of Artificial Sequence: Synthetic oligonucleotide
ggucagacucagaccgagg

SEQ ID NO: 318002 - RNA, 19 nt, Artificial Sequence
  Description of Artificial Sequence: Synthetic oligonucleotide
gggguaaggggucguguca

SEQ ID NO: 318003 - RNA, 19 nt, Artificial Sequence
  Description of Artificial Sequence: Synthetic oligonucleotide
aggcccgugccuccaggcu

SEQ ID NO: 318004 - RNA, 19 nt, Artificial Sequence
  Description of Artificial Sequence: Synthetic oligonucleotide
cuugcggcuucgacuggca

SEQ ID NO: 318005 - RNA, 19 nt, Artificial Sequence
  Description of Artificial Sequence: Synthetic oligonucleotide
gcaagguuggguagagcac

SEQ ID NO: 318006 - RNA, 19 nt, Artificial Sequence
  Description of Artificial Sequence: Synthetic oligonucleotide
cagauuauucaggguugca

SEQ ID NO: 318007 - RNA, 19 nt, Artificial Sequence
  Description of Artificial Sequence: Synthetic oligonucleotide
ggggugauuuaaggccugg

SEQ ID NO: 318008 - RNA, 19 nt, Artificial Sequence
  Description of Artificial Sequence: Synthetic oligonucleotide
cgugucagaugaaggcuag

SEQ ID NO: 318009 - RNA, 19 nt, Artificial Sequence
  Description of Artificial Sequence: Synthetic oligonucleotide
cgcgcagggucucuaaacc

SEQ ID NO: 318010 - RNA, 19 nt, Artificial Sequence
  Description of Artificial Sequence: Synthetic oligonucleotide
ugcggcugucggagaggcc

SEQ ID NO: 318011 - RNA, 19 nt, Artificial Sequence
  Description of Artificial Sequence: Synthetic oligonucleotide
gcgcuuaucuuugcucucc

SEQ ID NO: 318012 - RNA, 19 nt, Artificial Sequence
  Description of Artificial Sequence: Synthetic oligonucleotide
ccaccacucggaacagggg

SEQ ID NO: 318013 - RNA, 19 nt, Artificial Sequence
  Description of Artificial Sequence: Synthetic oligonucleotide
aggggugauuuaaggccug

SEQ ID NO: 318014 - RNA, 19 nt, Artificial Sequence
  Description of Artificial Sequence: Synthetic oligonucleotide
acccuggauaacagccuug

SEQ ID NO: 318015 - RNA, 19 nt, Artificial Sequence
  Description of Artificial Sequence: Synthetic oligonucleotide
cuggcucggccucgcuugc

SEQ ID NO: 318016 - RNA, 19 nt, Artificial Sequence
  Description of Artificial Sequence: Synthetic oligonucleotide
cuggucccgauaaaccagu

SEQ ID NO: 318017 - RNA, 19 nt, Artificial Sequence
  Description of Artificial Sequence: Synthetic oligonucleotide
ucggaacaggggugauuua

SEQ ID NO: 318018 - RNA, 19 nt, Artificial Sequence
  Description of Artificial Sequence: Synthetic oligonucleotide
cuuuguauuugccccgcuu

SEQ ID NO: 318019 - RNA, 19 nt, Artificial Sequence
  Description of Artificial Sequence: Synthetic oligonucleotide
ugccugggcggggcggagg

SEQ ID NO: 318020 - RNA, 19 nt, Artificial Sequence
  Description of Artificial Sequence: Synthetic oligonucleotide
gagagcuagcccucuucau

SEQ ID NO: 318021 - RNA, 19 nt, Artificial Sequence
  Description of Artificial Sequence: Synthetic oligonucleotide
gcuacgucucagggcaucc

SEQ ID NO: 318022 - RNA, 19 nt, Artificial Sequence
  Description of Artificial Sequence: Synthetic oligonucleotide
cucggaacaggggugauuu

SEQ ID NO: 318023 - RNA, 19 nt, Artificial Sequence
  Description of Artificial Sequence: Synthetic oligonucleotide
guagcucuaccaccuuggu

SEQ ID NO: 318024 - RNA, 19 nt, Artificial Sequence
  Description of Artificial Sequence: Synthetic oligonucleotide
gcuucgcagaguaguguug

SEQ ID NO: 318025 - RNA, 19 nt, Artificial Sequence
  Description of Artificial Sequence: Synthetic oligonucleotide
ggagaucgggaacccuuuc

SEQ ID NO: 318026 - RNA, 19 nt, Artificial Sequence
  Description of Artificial Sequence: Synthetic oligonucleotide
ggaauaccguggacugaag

SEQ ID NO: 318027 - RNA, 19 nt, Artificial Sequence
  Description of Artificial Sequence: Synthetic oligonucleotide
cucacccaucaaauggggu

SEQ ID NO: 318028 - RNA, 19 nt, Artificial Sequence
  Description of Artificial Sequence: Synthetic oligonucleotide
aggagaucgggaacccuuu

SEQ ID NO: 318029 - RNA, 19 nt, Artificial Sequence
  Description of Artificial Sequence: Synthetic oligonucleotide
ggauggguaggcaggccac

SEQ ID NO: 318030 - RNA, 19 nt, Artificial Sequence
  Description of Artificial Sequence: Synthetic oligonucleotide
ggguagccccuccuacugc

SEQ ID NO: 318031 - RNA, 19 nt, Artificial Sequence
  Description of Artificial Sequence: Synthetic oligonucleotide
gccgguacaaggcucccaa

SEQ ID NO: 318032 - RNA, 19 nt, Artificial Sequence
  Description of Artificial Sequence: Synthetic oligonucleotide
aggggacauuggaagcuga

SEQ ID NO: 318033 - RNA, 19 nt, Artificial Sequence
  Description of Artificial Sequence: Synthetic oligonucleotide
acguaaccacugguucucu

SEQ ID NO: 318034 - RNA, 19 nt, Artificial Sequence
  Description of Artificial Sequence: Synthetic oligonucleotide
ccgguguugugggaguccg

SEQ ID NO: 318035 - RNA, 19 nt, Artificial Sequence
  Description of Artificial Sequence: Synthetic oligonucleotide
ccugaauguagggaagaga

SEQ ID NO: 318036 - RNA, 19 nt, Artificial Sequence
  Description of Artificial Sequence: Synthetic oligonucleotide
gccugggcgguaccacugg

SEQ ID NO: 318037 - RNA, 19 nt, Artificial Sequence
  Description of Artificial Sequence: Synthetic oligonucleotide
agguuacccugagauugaa

SEQ ID NO: 318038 - RNA, 19 nt, Artificial Sequence
  Description of Artificial Sequence: Synthetic oligonucleotide
cccaucaaaugggguagcc

SEQ ID NO: 318039 - RNA, 19 nt, Artificial Sequence
  Description of Artificial Sequence: Synthetic oligonucleotide
ggcgcuuaucuuugcucuc

SEQ ID NO: 318040 - RNA, 19 nt, Artificial Sequence
  Description of Artificial Sequence: Synthetic oligonucleotide
cccgcuugccauacagaac

SEQ ID NO: 318041 - RNA, 19 nt, Artificial Sequence
  Description of Artificial Sequence: Synthetic oligonucleotide
acgcagucgugcugguauu

SEQ ID NO: 318042 - RNA, 19 nt, Artificial Sequence
  Description of Artificial Sequence: Synthetic oligonucleotide
ccucgcuugccucaugaga

SEQ ID NO: 318043 - RNA, 19 nt, Artificial Sequence
  Description of Artificial Sequence: Synthetic oligonucleotide
gcuucgacuggcacaaucu

SEQ ID NO: 318044 - RNA, 19 nt, Artificial Sequence
  Description of Artificial Sequence: Synthetic oligonucleotide
auuuaaggccugggcggua

SEQ ID NO: 318045 - RNA, 19 nt, Artificial Sequence
  Description of Artificial Sequence: Synthetic oligonucleotide
acucggaacaggggugauu

SEQ ID NO: 318046 - RNA, 19 nt, Artificial Sequence
  Description of Artificial Sequence: Synthetic oligonucleotide
cugcgccgcagagagccac

SEQ ID NO: 318047 - RNA, 19 nt, Artificial Sequence
  Description of Artificial Sequence: Synthetic oligonucleotide
gcucgauagccuccaggga

SEQ ID NO: 318048 - RNA, 19 nt, Artificial Sequence
  Description of Artificial Sequence: Synthetic oligonucleotide
cagcgcuccugcgaaccug

SEQ ID NO: 318049 - RNA, 19 nt, Artificial Sequence
  Description of Artificial Sequence: Synthetic oligonucleotide
ggcucccaagcuucgcaga

SEQ ID NO: 318050 - RNA, 19 nt, Artificial Sequence
  Description of Artificial Sequence: Synthetic oligonucleotide
caacggccgagggcugggg

SEQ ID NO: 318051 - RNA, 19 nt, Artificial Sequence
  Description of Artificial Sequence: Synthetic oligonucleotide
cuucgacuggcacaaucuu

SEQ ID NO: 318052 - RNA, 19 nt, Artificial Sequence
  Description of Artificial Sequence: Synthetic oligonucleotide
ccacgucugggugaacuug

SEQ ID NO: 318053 - RNA, 19 nt, Artificial Sequence
  Description of Artificial Sequence: Synthetic oligonucleotide
gucggagaggcccgugccu

SEQ ID NO: 318054 - RNA, 19 nt, Artificial Sequence
  Description of Artificial Sequence: Synthetic oligonucleotide
gcggcuucgacuggcacaa

SEQ ID NO: 318055 - RNA, 19 nt, Artificial Sequence
  Description of Artificial Sequence: Synthetic oligonucleotide
gcaacggccgagggcuggg

SEQ ID NO: 318056 - RNA, 19 nt, Artificial Sequence
  Description of Artificial Sequence: Synthetic oligonucleotide
gcaacacagggcccggugu

SEQ ID NO: 318057 - RNA, 19 nt, Artificial Sequence
  Description of Artificial Sequence: Synthetic oligonucleotide
agcggccuugugaagcaua

SEQ ID NO: 318058 - RNA, 19 nt, Artificial Sequence
  Description of Artificial Sequence: Synthetic oligonucleotide
gugggaguccgggcaucug

SEQ ID NO: 318059 - RNA, 19 nt, Artificial Sequence
  Description of Artificial Sequence: Synthetic oligonucleotide
ccgguacaaggcucccaag

SEQ ID NO: 318060 - RNA, 19 nt, Artificial Sequence
  Description of Artificial Sequence: Synthetic oligonucleotide
ucggccucgcuugccucau

SEQ ID NO: 318061 - RNA, 19 nt, Artificial Sequence
  Description of Artificial Sequence: Synthetic oligonucleotide
ucuccgcgcagggucucua

SEQ ID NO: 318062 - RNA, 19 nt, Artificial Sequence
  Description of Artificial Sequence: Synthetic oligonucleotide
gcuagcagggcacgaugcu

SEQ ID NO: 318063 - RNA, 19 nt, Artificial Sequence
  Description of Artificial Sequence: Synthetic oligonucleotide
gcucgcuugcacaauggcu

SEQ ID NO: 318064 - RNA, 19 nt, Artificial Sequence
  Description of Artificial Sequence: Synthetic oligonucleotide
cuggcgccgguacaaggcu

SEQ ID NO: 318065 - RNA, 19 nt, Artificial Sequence
  Description of Artificial Sequence: Synthetic oligonucleotide
cccauguugugcagcuaca

SEQ ID NO: 318066 - RNA, 19 nt, Artificial Sequence
  Description of Artificial Sequence: Synthetic oligonucleotide
cgagggaguuucuucggga

SEQ ID NO: 318067 - RNA, 19 nt, Artificial Sequence
  Description of Artificial Sequence: Synthetic oligonucleotide
uagcggccuugugaagcau

SEQ ID NO: 318068 - RNA, 19 nt, Artificial Sequence
  Description of Artificial Sequence: Synthetic oligonucleotide
ggucauguccugaugucuu

SEQ ID NO: 318069 - RNA, 19 nt, Artificial Sequence
  Description of Artificial Sequence: Synthetic oligonucleotide
gcuagcccucuucauccua

SEQ ID NO: 318070 - RNA, 19 nt, Artificial Sequence
  Description of Artificial Sequence: Synthetic oligonucleotide
cuccgcgcagggucucuaa

SEQ ID NO: 318071 - RNA, 19 nt, Artificial Sequence
  Description of Artificial Sequence: Synthetic oligonucleotide
ggccacgucugggugaacu

SEQ ID NO: 318072 - RNA, 19 nt, Artificial Sequence
  Description of Artificial Sequence: Synthetic oligonucleotide
ccgcagagagccacugcca

SEQ ID NO: 318073 - RNA, 19 nt, Artificial Sequence
  Description of Artificial Sequence: Synthetic oligonucleotide
ccucacguaaccacugguu

SEQ ID NO: 318074 - RNA, 19 nt, Artificial Sequence
  Description of Artificial Sequence: Synthetic oligonucleotide
cgcgauugccucacccauc

SEQ ID NO: 318075 - RNA, 19 nt, Artificial Sequence
  Description of Artificial Sequence: Synthetic oligonucleotide
acugcgccgcagagagcca

SEQ ID NO: 318076 - RNA, 19 nt, Artificial Sequence
  Description of Artificial Sequence: Synthetic oligonucleotide
gggagguuacccugagauu

SEQ ID NO: 318077 - RNA, 19 nt, Artificial Sequence
  Description of Artificial Sequence: Synthetic oligonucleotide
cggcugucggagaggcccg

SEQ ID NO: 318078 - RNA, 19 nt, Artificial Sequence
  Description of Artificial Sequence: Synthetic oligonucleotide
guacgcagucgugcuggua

SEQ ID NO: 318079 - RNA, 19 nt, Artificial Sequence
  Description of Artificial Sequence: Synthetic oligonucleotide
gcugucggagaggcccgug

SEQ ID NO: 318080 - RNA, 19 nt, Artificial Sequence
  Description of Artificial Sequence: Synthetic oligonucleotide
ccuucucaugagcacgggu

SEQ ID NO: 318081 - RNA, 19 nt, Artificial Sequence
  Description of Artificial Sequence: Synthetic oligonucleotide
gcgcgauugccucacccau

SEQ ID NO: 318082 - RNA, 19 nt, Artificial Sequence
  Description of Artificial Sequence: Synthetic oligonucleotide
ggcguugucccggcgcuua

SEQ ID NO: 318083 - RNA, 19 nt, Artificial Sequence
  Description of Artificial Sequence: Synthetic oligonucleotide
ggccgugcccagggugggg

SEQ ID NO: 318084 - RNA, 19 nt, Artificial Sequence
  Description of Artificial Sequence: Synthetic oligonucleotide
gaccgaggcccagccacau

SEQ ID NO: 318085 - RNA, 19 nt, Artificial Sequence
  Description of Artificial Sequence: Synthetic oligonucleotide
ccccagauggcuugacagu

SEQ ID NO: 318086 - RNA, 19 nt, Artificial Sequence
  Description of Artificial Sequence: Synthetic oligonucleotide
gguacgcagucgugcuggu

SEQ ID NO: 318087 - RNA, 19 nt, Artificial Sequence
  Description of Artificial Sequence: Synthetic oligonucleotide
gcacgaucucguccuggcu

SEQ ID NO: 318088 - RNA, 19 nt, Artificial Sequence
  Description of Artificial Sequence: Synthetic oligonucleotide
gcgccgcagagagccacug

SEQ ID NO: 318089 - RNA, 19 nt, Artificial Sequence
  Description of Artificial Sequence: Synthetic oligonucleotide
ccugggcgguaccacugga

SEQ ID NO: 318090 - RNA, 19 nt, Artificial Sequence
  Description of Artificial Sequence: Synthetic oligonucleotide
cccugcuggaaggaauaaa

SEQ ID NO: 318091 - RNA, 19 nt, Artificial Sequence
  Description of Artificial Sequence: Synthetic oligonucleotide
cgccgcagagagccacugc

SEQ ID NO: 318092 - RNA, 19 nt, Artificial Sequence
  Description of Artificial Sequence: Synthetic oligonucleotide
gccacgucugggugaacuu

SEQ ID NO: 318093 - RNA, 19 nt, Artificial Sequence
  Description of Artificial Sequence: Synthetic oligonucleotide
ggcccgguguugugggagu

SEQ ID NO: 318094 - RNA, 19 nt, Artificial Sequence
  Description of Artificial Sequence: Synthetic oligonucleotide
ggugggccgcauccuugua

SEQ ID NO: 318095 - RNA, 19 nt, Artificial Sequence
  Description of Artificial Sequence: Synthetic oligonucleotide
gguggcccgggaauaccgu

SEQ ID NO: 318096 - RNA, 19 nt, Artificial Sequence
  Description of Artificial Sequence: Synthetic oligonucleotide
gcagcgcuccugcgaaccu

SEQ ID NO: 318097 - RNA, 19 nt, Artificial Sequence
  Description of Artificial Sequence: Synthetic oligonucleotide
gggguacguggaggggaca

SEQ ID NO: 318098 - RNA, 19 nt, Artificial Sequence
  Description of Artificial Sequence: Synthetic oligonucleotide
gcccgguguugugggaguc

SEQ ID NO: 318099 - RNA, 19 nt, Artificial Sequence
  Description of Artificial Sequence: Synthetic oligonucleotide
cugcuacgucucagggcau

SEQ ID NO: 318100 - RNA, 19 nt, Artificial Sequence
  Description of Artificial Sequence: Synthetic oligonucleotide
ccgugcccagggugggguc

SEQ ID NO: 318101 - RNA, 19 nt, Artificial Sequence
  Description of Artificial Sequence: Synthetic oligonucleotide
gcgcuccugcgaaccuggc

SEQ ID NO: 318102 - RNA, 19 nt, Artificial Sequence
  Description of Artificial Sequence: Synthetic oligonucleotide
gcucuccgcgcagggucuc

SEQ ID NO: 318103 - RNA, 19 nt, Artificial Sequence
  Description of Artificial Sequence: Synthetic oligonucleotide
cgggaauaccguggacuga

SEQ ID NO: 318104 - RNA, 19 nt, Artificial Sequence
  Description of Artificial Sequence: Synthetic oligonucleotide
gcuucccgaaggacccacu

SEQ ID NO: 318105 - RNA, 19 nt, Artificial Sequence
  Description of Artificial Sequence: Synthetic oligonucleotide
cucuccgcgcagggucucu

SEQ ID NO: 318106 - RNA, 19 nt, Artificial Sequence
  Description of Artificial Sequence: Synthetic oligonucleotide
cacucggaacaggggugau

SEQ ID NO: 318107 - RNA, 19 nt, Artificial Sequence
  Description of Artificial Sequence: Synthetic oligonucleotide
ccccugcuggaaggaauaa

SEQ ID NO: 318108 - RNA, 19 nt, Artificial Sequence
  Description of Artificial Sequence: Synthetic oligonucleotide
gcguugucccggcgcuuau

SEQ ID NO: 318109 - RNA, 19 nt, Artificial Sequence
  Description of Artificial Sequence: Synthetic oligonucleotide
ggcugucggagaggcccgu

SEQ ID NO: 318110 - RNA, 19 nt, Artificial Sequence
  Description of Artificial Sequence: Synthetic oligonucleotide
gcguggcaggauggcucaa

SEQ ID NO: 318111 - RNA, 19 nt, Artificial Sequence
  Description of Artificial Sequence: Synthetic oligonucleotide
gcccugcuugcggcuucga

SEQ ID NO: 318112 - RNA, 19 nt, Artificial Sequence
  Description of Artificial Sequence: Synthetic oligonucleotide
cgccgguacaaggcuccca

SEQ ID NO: 318113 - RNA, 19 nt, Artificial Sequence
  Description of Artificial Sequence: Synthetic oligonucleotide
cguggcaggauggcucaau

SEQ ID NO: 318114 - RNA, 19 nt, Artificial Sequence
  Description of Artificial Sequence: Synthetic oligonucleotide
cgcagucgugcugguauuu

SEQ ID NO: 318115 - RNA, 19 nt, Artificial Sequence
  Description of Artificial Sequence: Synthetic oligonucleotide
gggcguugucccggcgcuu

SEQ ID NO: 318116 - RNA, 19 nt, Artificial Sequence
  Description of Artificial Sequence: Synthetic oligonucleotide
cggcuucgacuggcacaau

SEQ ID NO: 318117 - RNA, 19 nt, Artificial Sequence
  Description of Artificial Sequence: Synthetic oligonucleotide
aaaauaagauguuugaggg

SEQ ID NO: 318118 - RNA, 19 nt, Artificial Sequence
  Description of Artificial Sequence: Synthetic oligonucleotide
aaacacauccuucugaugc

SEQ ID NO: 318119 - RNA, 19 nt, Artificial Sequence
  Description of Artificial Sequence: Synthetic oligonucleotide
aauaagauguuugagggcc

SEQ ID NO: 318120 - RNA, 19 nt, Artificial Sequence
  Description of Artificial Sequence: Synthetic oligonucleotide
aauaaguacacauaugcga

SEQ ID NO: 318121 - RNA, 19 nt, Artificial Sequence
  Description of Artificial Sequence: Synthetic oligonucleotide
uauauuaauaauucaagug

SEQ ID NO: 318122 - RNA, 19 nt, Artificial Sequence
  Description of Artificial Sequence: Synthetic oligonucleotide
aaauaagauguuugagggc

SEQ ID NO: 318123 - RNA, 19 nt, Artificial Sequence
  Description of Artificial Sequence: Synthetic oligonucleotide
aaucucuuaaccaaagaac

SEQ ID NO: 318124 - RNA, 19 nt, Artificial Sequence
  Description of Artificial Sequence: Synthetic oligonucleotide
uuuuaaggcauccucgggg

SEQ ID NO: 318125 - RNA, 19 nt, Artificial Sequence
  Description of Artificial Sequence: Synthetic oligonucleotide
uuaagaucuugucaguggg

SEQ ID NO: 318126 - RNA, 19 nt, Artificial Sequence
  Description of Artificial Sequence: Synthetic oligonucleotide
uuucgaaacaccaucgaag

SEQ ID NO: 318127 - RNA, 19 nt, Artificial Sequence
  Description of Artificial Sequence: Synthetic oligonucleotide
uucaauaacugucuguacc

SEQ ID NO: 318128 - RNA, 19 nt, Artificial Sequence
  Description of Artificial Sequence: Synthetic oligonucleotide
auuaacuuuugaaagcucc

SEQ ID NO: 318129 - RNA, 19 nt, Artificial Sequence
  Description of Artificial Sequence: Synthetic oligonucleotide
uuuaagaucuugucagugg

SEQ ID NO: 318130 - RNA, 19 nt, Artificial Sequence
  Description of Artificial Sequence: Synthetic oligonucleotide
uguaccaaugccaccaggg

SEQ ID NO: 318131 - RNA, 19 nt, Artificial Sequence
  Description of Artificial Sequence: Synthetic oligonucleotide
uucggaguaaauaaguaca

SEQ ID NO: 318132 - RNA, 19 nt, Artificial Sequence
  Description of Artificial Sequence: Synthetic oligonucleotide
ugauuucgaaacaccaucg

SEQ ID NO: 318133 - RNA, 19 nt, Artificial Sequence
  Description of Artificial Sequence: Synthetic oligonucleotide
uguuaaacaaaacuuguua

SEQ ID NO: 318134 - RNA, 19 nt, Artificial Sequence
  Description of Artificial Sequence: Synthetic oligonucleotide
aaauaaguacacauaugcg

SEQ ID NO: 318135 - RNA, 19 nt, Artificial Sequence
  Description of Artificial Sequence: Synthetic oligonucleotide
gauacuuuuacggauguug

SEQ ID NO: 318136 - RNA, 19 nt, Artificial Sequence
  Description of Artificial Sequence: Synthetic oligonucleotide
gaacacauccacuaggggc

SEQ ID NO: 318137 - RNA, 19 nt, Artificial Sequence
  Description of Artificial Sequence: Synthetic oligonucleotide
acauauagccuucaggcag

SEQ ID NO: 318138 - RNA, 19 nt, Artificial Sequence
  Description of Artificial Sequence: Synthetic oligonucleotide
uguguuaaacaaaacuugu

SEQ ID NO: 318139 - RNA, 19 nt, Artificial Sequence
  Description of Artificial Sequence: Synthetic oligonucleotide
ucuuaaccaaagaacagca

SEQ ID NO: 318140 - RNA, 19 nt, Artificial Sequence
  Description of Artificial Sequence: Synthetic oligonucleotide
aaaaucuccuugugccugc

SEQ ID NO: 318141 - RNA, 19 nt, Artificial Sequence
  Description of Artificial Sequence: Synthetic oligonucleotide
ugcuuagagaacaauuugc

SEQ ID NO: 318142 - RNA, 19 nt, Artificial Sequence
  Description of Artificial Sequence: Synthetic oligonucleotide
auaccugauaaccacauca

SEQ ID NO: 318143 - RNA, 19 nt, Artificial Sequence
  Description of Artificial Sequence: Synthetic oligonucleotide
aauggacuguggaagaucg

SEQ ID NO: 318144 - RNA, 19 nt, Artificial Sequence
  Description of Artificial Sequence: Synthetic oligonucleotide
auaaguacacauaugcgac

SEQ ID NO: 318145 - RNA, 19 nt, Artificial Sequence
  Description of Artificial Sequence: Synthetic oligonucleotide
ugcauuugugaucugccgg

SEQ ID NO: 318146 - RNA, 19 nt, Artificial Sequence
  Description of Artificial Sequence: Synthetic oligonucleotide
accuuaaugcuacaguccg

SEQ ID NO: 318147 - RNA, 19 nt, Artificial Sequence
  Description of Artificial Sequence: Synthetic oligonucleotide
aaagaauugccuucugggu

SEQ ID NO: 318148 - RNA, 19 nt, Artificial Sequence
  Description of Artificial Sequence: Synthetic oligonucleotide
gacucaaccaccuucacga

SEQ ID NO: 318149 - RNA, 19 nt, Artificial Sequence
  Description of Artificial Sequence: Synthetic oligonucleotide
uucgaaacaccaucgaagc

SEQ ID NO: 318150 - RNA, 19 nt, Artificial Sequence
  Description of Artificial Sequence: Synthetic oligonucleotide
aacagcacuuuauagccug

SEQ ID NO: 318151 - RNA, 19 nt, Artificial Sequence
  Description of Artificial Sequence: Synthetic oligonucleotide
cuaguuugcacuucguagc

SEQ ID NO: 318152 - RNA, 19 nt, Artificial Sequence
  Description of Artificial Sequence: Synthetic oligonucleotide
agauagaccacuacuuucc

SEQ ID NO: 318153 - RNA, 19 nt, Artificial Sequence
  Description of Artificial Sequence: Synthetic oligonucleotide
aaccuuaaugcuacagucc

SEQ ID NO: 318154 - RNA, 19 nt, Artificial Sequence
  Description of Artificial Sequence: Synthetic oligonucleotide
uacuagauagaccacuacu

SEQ ID NO: 318155 - RNA, 19 nt, Artificial Sequence
  Description of Artificial Sequence: Synthetic oligonucleotide
acauaugcgacucccuugg

SEQ ID NO: 318156 - RNA, 19 nt, Artificial Sequence
  Description of Artificial Sequence: Synthetic oligonucleotide
auagucaacguagcaaacc

SEQ ID NO: 318157 - RNA, 19 nt, Artificial Sequence
  Description of Artificial Sequence: Synthetic oligonucleotide
gaacugaacaucgagggcc

SEQ ID NO: 318158 - RNA, 19 nt, Artificial Sequence
  Description of Artificial Sequence: Synthetic oligonucleotide
guagcaaaccuuuaucuug

SEQ ID NO: 318159 - RNA, 19 nt, Artificial Sequence
  Description of Artificial Sequence: Synthetic oligonucleotide
ucaucguucagaaucucca

SEQ ID NO: 318160 - RNA, 19 nt, Artificial Sequence
  Description of Artificial Sequence: Synthetic oligonucleotide
ucucuuaaccaaagaacag

SEQ ID NO: 318161 - RNA, 19 nt, Artificial Sequence
  Description of Artificial Sequence: Synthetic oligonucleotide
uugccuacauaccugauaa

SEQ ID NO: 318162 - RNA, 19 nt, Artificial Sequence
  Description of Artificial Sequence: Synthetic oligonucleotide
uuauggugcacacaucaga

SEQ ID NO: 318163 - RNA, 19 nt, Artificial Sequence
  Description of Artificial Sequence: Synthetic oligonucleotide
ugacuugucgaguaucucc

SEQ ID NO: 318164 - RNA, 19 nt, Artificial Sequence
  Description of Artificial Sequence: Synthetic oligonucleotide
uaaccuuaaugcuacaguc

SEQ ID NO: 318165 - RNA, 19 nt, Artificial Sequence
  Description of Artificial Sequence: Synthetic oligonucleotide
ugaugucaaaaucuccuug

SEQ ID NO: 318166 - RNA, 19 nt, Artificial Sequence
  Description of Artificial Sequence: Synthetic oligonucleotide
gaaucucuuaaccaaagaa

SEQ ID NO: 318167 - RNA, 19 nt, Artificial Sequence
  Description of Artificial Sequence: Synthetic oligonucleotide
gacuuugacaaguggacug

SEQ ID NO: 318168 - RNA, 19 nt, Artificial Sequence
  Description of Artificial Sequence: Synthetic oligonucleotide
uguuugagggccuacuaca

SEQ ID NO: 318169 - RNA, 19 nt, Artificial Sequence
  Description of Artificial Sequence: Synthetic oligonucleotide
ugcacuucacuccugcaag

SEQ ID NO: 318170 - RNA, 19 nt, Artificial Sequence
  Description of Artificial Sequence: Synthetic oligonucleotide
cacuuuauagccugagggg

SEQ ID NO: 318171 - RNA, 19 nt, Artificial Sequence
  Description of Artificial Sequence: Synthetic oligonucleotide
aaugcugcgaugaggauca

SEQ ID NO: 318172 - RNA, 19 nt, Artificial Sequence
  Description of Artificial Sequence: Synthetic oligonucleotide
ugacucaaccaccuucacg

SEQ ID NO: 318173 - RNA, 19 nt, Artificial Sequence
  Description of Artificial Sequence: Synthetic oligonucleotide
uguugcauugccagagucc

SEQ ID NO: 318174 - RNA, 19 nt, Artificial Sequence
  Description of Artificial Sequence: Synthetic oligonucleotide
ugaggaucagggaaguucu

SEQ ID NO: 318175 - RNA, 19 nt, Artificial Sequence
  Description of Artificial Sequence: Synthetic oligonucleotide
cacuucguagcuuggaagg

SEQ ID NO: 318176 - RNA, 19 nt, Artificial Sequence
  Description of Artificial Sequence: Synthetic oligonucleotide
ugaacuucuagagauuugu

SEQ ID NO: 318177 - RNA, 19 nt, Artificial Sequence
  Description of Artificial Sequence: Synthetic oligonucleotide
auugacuugaugucaaaau

SEQ ID NO: 318178 - RNA, 19 nt, Artificial Sequence
  Description of Artificial Sequence: Synthetic oligonucleotide
uagucaacguagcaaaccu

SEQ ID NO: 318179 - RNA, 19 nt, Artificial Sequence
  Description of Artificial Sequence: Synthetic oligonucleotide
aaucauugacuugauguca

SEQ ID NO: 318180 - RNA, 19 nt, Artificial Sequence
  Description of Artificial Sequence: Synthetic oligonucleotide
uguaguaaaauaagauguu

SEQ ID NO: 318181 - RNA, 19 nt, Artificial Sequence
  Description of Artificial Sequence: Synthetic oligonucleotide
cuucggaguaaauaaguac

SEQ ID NO: 318182 - RNA, 19 nt, Artificial Sequence
  Description of Artificial Sequence: Synthetic oligonucleotide
uucuucggaguaaauaagu

SEQ ID NO: 318183 - RNA, 19 nt, Artificial Sequence
  Description of Artificial Sequence: Synthetic oligonucleotide
ucaagcagugauuaauuaa

SEQ ID NO: 318184 - RNA, 19 nt, Artificial Sequence
  Description of Artificial Sequence: Synthetic oligonucleotide
aucguucagaaucuccaac

SEQ ID NO: 318185 - RNA, 19 nt, Artificial Sequence
  Description of Artificial Sequence: Synthetic oligonucleotide
uuuaaggcauccucgggga

SEQ ID NO: 318186 - RNA, 19 nt, Artificial Sequence
  Description of Artificial Sequence: Synthetic oligonucleotide
ucagggaaguucuucggag

SEQ ID NO: 318187 - RNA, 19 nt, Artificial Sequence
  Description of Artificial Sequence: Synthetic oligonucleotide
aaaauggcccgggugacag

SEQ ID NO: 318188 - RNA, 19 nt, Artificial Sequence
  Description of Artificial Sequence: Synthetic oligonucleotide
acggauguugcauugccag

SEQ ID NO: 318189 - RNA, 19 nt, Artificial Sequence
  Description of Artificial Sequence: Synthetic oligonucleotide
uguaaccuuaaugcuacag

SEQ ID NO: 318190 - RNA, 19 nt, Artificial Sequence
  Description of Artificial Sequence: Synthetic oligonucleotide
cugacuuugacaaguggac

SEQ ID NO: 318191 - RNA, 19 nt, Artificial Sequence
  Description of Artificial Sequence: Synthetic oligonucleotide
cuuaaugcuacaguccgag

SEQ ID NO: 318192 - RNA, 19 nt, Artificial Sequence
  Description of Artificial Sequence: Synthetic oligonucleotide
agaucggccaaacagcacu

SEQ ID NO: 318193 - RNA, 19 nt, Artificial Sequence
  Description of Artificial Sequence: Synthetic oligonucleotide
acguucgugaucuccacuc

SEQ ID NO: 318194 - RNA, 19 nt, Artificial Sequence
  Description of Artificial Sequence: Synthetic oligonucleotide
gaagcguggguucagucug

SEQ ID NO: 318195 - RNA, 19 nt, Artificial Sequence
  Description of Artificial Sequence: Synthetic oligonucleotide
cacgaggucgggaucaucg

SEQ ID NO: 318196 - RNA, 19 nt, Artificial Sequence
  Description of Artificial Sequence: Synthetic oligonucleotide
aucucuuaaccaaagaaca

SEQ ID NO: 318197 - RNA, 19 nt, Artificial Sequence
  Description of Artificial Sequence: Synthetic oligonucleotide
cucuuaaccaaagaacagc

SEQ ID NO: 318198 - RNA, 19 nt, Artificial Sequence
  Description of Artificial Sequence: Synthetic oligonucleotide
uuacggauguugcauugcc

SEQ ID NO: 318199 - RNA, 19 nt, Artificial Sequence
  Description of Artificial Sequence: Synthetic oligonucleotide
uuuuacggauguugcauug

SEQ ID NO: 318200 - RNA, 19 nt, Artificial Sequence
  Description of Artificial Sequence: Synthetic oligonucleotide
gauagaccacuacuuuccg

SEQ ID NO: 318201 - RNA, 19 nt, Artificial Sequence
  Description of Artificial Sequence: Synthetic oligonucleotide
aguacacauaugcgacucc

SEQ ID NO: 318202 - RNA, 19 nt, Artificial Sequence
  Description of Artificial Sequence: Synthetic oligonucleotide
augaucugcgcgcguaacc

SEQ ID NO: 318203 - RNA, 19 nt, Artificial Sequence
  Description of Artificial Sequence: Synthetic oligonucleotide
gguauuuccggaaauguag

SEQ ID NO: 318204 - RNA, 19 nt, Artificial Sequence
  Description of Artificial Sequence: Synthetic oligonucleotide
aguagaguguuccaucaga

SEQ ID NO: 318205 - RNA, 19 nt, Artificial Sequence
  Description of Artificial Sequence: Synthetic oligonucleotide
uuauggaucuccugccaag

SEQ ID NO: 318206 - RNA, 19 nt, Artificial Sequence
  Description of Artificial Sequence: Synthetic oligonucleotide
agcacggacuuucugauga

SEQ ID NO: 318207 - RNA, 19 nt, Artificial Sequence
  Description of Artificial Sequence: Synthetic oligonucleotide
uccguggagaugaucugcg

SEQ ID NO: 318208 - RNA, 19 nt, Artificial Sequence
  Description of Artificial Sequence: Synthetic oligonucleotide
cauauagccuucaggcagg

SEQ ID NO: 318209 - RNA, 19 nt, Artificial Sequence
  Description of Artificial Sequence: Synthetic oligonucleotide
uguggcgcuccucagacac

SEQ ID NO: 318210 - RNA, 19 nt, Artificial Sequence
  Description of Artificial Sequence: Synthetic oligonucleotide
ucugacuugucgaguaucu

SEQ ID NO: 318211 - RNA, 19 nt, Artificial Sequence
  Description of Artificial Sequence: Synthetic oligonucleotide
gacuagcucaugcuugccg

SEQ ID NO: 318212 - RNA, 19 nt, Artificial Sequence
  Description of Artificial Sequence: Synthetic oligonucleotide
ucggaguaaauaaguacac

SEQ ID NO: 318213 - RNA, 19 nt, Artificial Sequence
  Description of Artificial Sequence: Synthetic oligonucleotide
uauguggcgcuccucagac

SEQ ID NO: 318214 - RNA, 19 nt, Artificial Sequence
  Description of Artificial Sequence: Synthetic oligonucleotide
gguuauguccuccacaaac

SEQ ID NO: 318215 - RNA, 19 nt, Artificial Sequence
  Description of Artificial Sequence: Synthetic oligonucleotide
uagauagaccacuacuuuc

SEQ ID NO: 318216 - RNA, 19 nt, Artificial Sequence
  Description of Artificial Sequence: Synthetic oligonucleotide
uuccuuauguugacuagcu

SEQ ID NO: 318217 - RNA, 19 nt, Artificial Sequence
  Description of Artificial Sequence: Synthetic oligonucleotide
guacucagaggucaugugc

SEQ ID NO: 318218 - RNA, 19 nt, Artificial Sequence
  Description of Artificial Sequence: Synthetic oligonucleotide
cagcuuauggaucuccugc

SEQ ID NO: 318219 - RNA, 19 nt, Artificial Sequence
  Description of Artificial Sequence: Synthetic oligonucleotide
gcuaguuugcacuucguag

SEQ ID NO: 318220 - RNA, 19 nt, Artificial Sequence
  Description of Artificial Sequence: Synthetic oligonucleotide
agcacuuuauagccugagg

SEQ ID NO: 318221 - RNA, 19 nt, Artificial Sequence
  Description of Artificial Sequence: Synthetic oligonucleotide
uacauaccugauaaccaca

SEQ ID NO: 318222 - RNA, 19 nt, Artificial Sequence
  Description of Artificial Sequence: Synthetic oligonucleotide
ugccaauggacuguggaag

SEQ ID NO: 318223 - RNA, 19 nt, Artificial Sequence
  Description of Artificial Sequence: Synthetic oligonucleotide
ucuacuagauagaccacua

SEQ ID NO: 318224 - RNA, 19 nt, Artificial Sequence
  Description of Artificial Sequence: Synthetic oligonucleotide
auagaccacuacuuuccgg

SEQ ID NO: 318225 - RNA, 19 nt, Artificial Sequence
  Description of Artificial Sequence: Synthetic oligonucleotide
aaaagccauagucaacgua

SEQ ID NO: 318226 - RNA, 19 nt, Artificial Sequence
  Description of Artificial Sequence: Synthetic oligonucleotide
ucuucggaguaaauaagua

SEQ ID NO: 318227 - RNA, 19 nt, Artificial Sequence
  Description of Artificial Sequence: Synthetic oligonucleotide
aauguagcuuauggugcac

SEQ ID NO: 318228 - RNA, 19 nt, Artificial Sequence
  Description of Artificial Sequence: Synthetic oligonucleotide
auuucgaaacaccaucgaa

SEQ ID NO: 318229 - RNA, 19 nt, Artificial Sequence
  Description of Artificial Sequence: Synthetic oligonucleotide
uaugcgacucccuugguuu

SEQ ID NO: 318230 - RNA, 19 nt, Artificial Sequence
  Description of Artificial Sequence: Synthetic oligonucleotide
aaaugcuuuggggagugca

SEQ ID NO: 318231 - RNA, 19 nt, Artificial Sequence
  Description of Artificial Sequence: Synthetic oligonucleotide
auguugcauugccagaguc

SEQ ID NO: 318232 - RNA, 19 nt, Artificial Sequence
  Description of Artificial Sequence: Synthetic oligonucleotide
acaccaucgaagcuuccuc

SEQ ID NO: 318233 - RNA, 19 nt, Artificial Sequence
  Description of Artificial Sequence: Synthetic oligonucleotide
uuugcacuucguagcuugg

SEQ ID NO: 318234 - RNA, 19 nt, Artificial Sequence
  Description of Artificial Sequence: Synthetic oligonucleotide
acuacuuuccggucccaag

SEQ ID NO: 318235 - RNA, 19 nt, Artificial Sequence
  Description of Artificial Sequence: Synthetic oligonucleotide
augugucuacuagauagac

SEQ ID NO: 318236 - RNA, 19 nt, Artificial Sequence
  Description of Artificial Sequence: Synthetic oligonucleotide
uggacuguggaagaucggc

SEQ ID NO: 318237 - RNA, 19 nt, Artificial Sequence
  Description of Artificial Sequence: Synthetic oligonucleotide
agucaacuguguuaaacaa

SEQ ID NO: 318238 - RNA, 19 nt, Artificial Sequence
  Description of Artificial Sequence: Synthetic oligonucleotide
uauuuccggaaauguagcu

SEQ ID NO: 318239 - RNA, 19 nt, Artificial Sequence
  Description of Artificial Sequence: Synthetic oligonucleotide
guggguucagucuguaugc

SEQ ID NO: 318240 - RNA, 19 nt, Artificial Sequence
  Description of Artificial Sequence: Synthetic oligonucleotide
uaccaaugccaccaggggu

SEQ ID NO: 318241 - RNA, 19 nt, Artificial Sequence
  Description of Artificial Sequence: Synthetic oligonucleotide
cuuuaagaucuugucagug

SEQ ID NO: 318242 - RNA, 19 nt, Artificial Sequence
  Description of Artificial Sequence: Synthetic oligonucleotide
uacaguccgagcaauucaa

SEQ ID NO: 318243 - RNA, 19 nt, Artificial Sequence
  Description of Artificial Sequence: Synthetic oligonucleotide
accaucgaagcuuccuccg

SEQ ID NO: 318244 - RNA, 19 nt, Artificial Sequence
  Description of Artificial Sequence: Synthetic oligonucleotide
uggacguucgugaucucca

SEQ ID NO: 318245 - RNA, 19 nt, Artificial Sequence
  Description of Artificial Sequence: Synthetic oligonucleotide
cacgugauuucgaaacacc

SEQ ID NO: 318246 - RNA, 19 nt, Artificial Sequence
  Description of Artificial Sequence: Synthetic oligonucleotide
uguagcuuauggugcacac

SEQ ID NO: 318247 - RNA, 19 nt, Artificial Sequence
  Description of Artificial Sequence: Synthetic oligonucleotide
ucuugucaguggguaaugg

SEQ ID NO: 318248 - RNA, 19 nt, Artificial Sequence
  Description of Artificial Sequence: Synthetic oligonucleotide
uaguauuccuucaucucau

SEQ ID NO: 318249 - RNA, 19 nt, Artificial Sequence
  Description of Artificial Sequence: Synthetic oligonucleotide
cuccugagguaucauacag

SEQ ID NO: 318250 - RNA, 19 nt, Artificial Sequence
  Description of Artificial Sequence: Synthetic oligonucleotide
uguaccacuuauucuccac

SEQ ID NO: 318251 - RNA, 19 nt, Artificial Sequence
  Description of Artificial Sequence: Synthetic oligonucleotide
guagaguguuccaucagag

SEQ ID NO: 318252 - RNA, 19 nt, Artificial Sequence
  Description of Artificial Sequence: Synthetic oligonucleotide
guuaguguguucaauaacu

SEQ ID NO: 318253 - RNA, 19 nt, Artificial Sequence
  Description of Artificial Sequence: Synthetic oligonucleotide
uccacucguaaccauuuuc

SEQ ID NO: 318254 - RNA, 19 nt, Artificial Sequence
  Description of Artificial Sequence: Synthetic oligonucleotide
guaucauacagaaccacca

SEQ ID NO: 318255 - RNA, 19 nt, Artificial Sequence
  Description of Artificial Sequence: Synthetic oligonucleotide
gauuucgaaacaccaucga

SEQ ID NO: 318256 - RNA, 19 nt, Artificial Sequence
  Description of Artificial Sequence: Synthetic oligonucleotide
acgguuauguccuccacaa

SEQ ID NO: 318257 - RNA, 19 nt, Artificial Sequence
  Description of Artificial Sequence: Synthetic oligonucleotide
uccugagguaucauacaga

SEQ ID NO: 318258 - RNA, 19 nt, Artificial Sequence
  Description of Artificial Sequence: Synthetic oligonucleotide
auaauucaagugcaauuuu

SEQ ID NO: 318259 - RNA, 19 nt, Artificial Sequence
  Description of Artificial Sequence: Synthetic oligonucleotide
gaagaggcagaucuuccca

SEQ ID NO: 318260 - RNA, 19 nt, Artificial Sequence
  Description of Artificial Sequence: Synthetic oligonucleotide
auccguggagaugaucugc

SEQ ID NO: 318261 - RNA, 19 nt, Artificial Sequence
  Description of Artificial Sequence: Synthetic oligonucleotide
gagauuugucacauauagc

SEQ ID NO: 318262 - RNA, 19 nt, Artificial Sequence
  Description of Artificial Sequence: Synthetic oligonucleotide
uuuacggauguugcauugc

SEQ ID NO: 318263 - RNA, 19 nt, Artificial Sequence
  Description of Artificial Sequence: Synthetic oligonucleotide
gaaggguagugagaugaag

SEQ ID NO: 318264 - RNA, 19 nt, Artificial Sequence
  Description of Artificial Sequence: Synthetic oligonucleotide
ugcaaguugagcggugacc

SEQ ID NO: 318265 - RNA, 19 nt, Artificial Sequence
  Description of Artificial Sequence: Synthetic oligonucleotide
agcccauuggucaggauuc

SEQ ID NO: 318266 - RNA, 19 nt, Artificial Sequence
  Description of Artificial Sequence: Synthetic oligonucleotide
guauuuccggaaauguagc

SEQ ID NO: 318267 - RNA, 19 nt, Artificial Sequence
  Description of Artificial Sequence: Synthetic oligonucleotide
ugaucugcgcgcguaacca

SEQ ID NO: 318268 - RNA, 19 nt, Artificial Sequence
  Description of Artificial Sequence: Synthetic oligonucleotide
acuagauagaccacuacuu

SEQ ID NO: 318269 - RNA, 19 nt, Artificial Sequence
  Description of Artificial Sequence: Synthetic oligonucleotide
uuaaugcuacaguccgagc

SEQ ID NO: 318270 - RNA, 19 nt, Artificial Sequence
  Description of Artificial Sequence: Synthetic oligonucleotide
ucgaagcuuccuccgacca

SEQ ID NO: 318271 - RNA, 19 nt, Artificial Sequence
  Description of Artificial Sequence: Synthetic oligonucleotide
cauagucaacguagcaaac

SEQ ID NO: 318272 - RNA, 19 nt, Artificial Sequence
  Description of Artificial Sequence: Synthetic oligonucleotide
gguaucauacagaaccacc

SEQ ID NO: 318273 - RNA, 19 nt, Artificial Sequence
  Description of Artificial Sequence: Synthetic oligonucleotide
aggaucagggaaguucuuc

SEQ ID NO: 318274 - RNA, 19 nt, Artificial Sequence
  Description of Artificial Sequence: Synthetic oligonucleotide
ggauuggugucacuuuggg

SEQ ID NO: 318275 - RNA, 19 nt, Artificial Sequence
  Description of Artificial Sequence: Synthetic oligonucleotide
gcuuauggugcacacauca

SEQ ID NO: 318276 - RNA, 19 nt, Artificial Sequence
  Description of Artificial Sequence: Synthetic oligonucleotide
acuugucgaguaucuccac

SEQ ID NO: 318277 - RNA, 19 nt, Artificial Sequence
  Description of Artificial Sequence: Synthetic oligonucleotide
cacauaugcgacucccuug

SEQ ID NO: 318278 - RNA, 19 nt, Artificial Sequence
  Description of Artificial Sequence: Synthetic oligonucleotide
uacggauguugcauugcca

SEQ ID NO: 318279 - RNA, 19 nt, Artificial Sequence
  Description of Artificial Sequence: Synthetic oligonucleotide
guacacauaugcgacuccc

SEQ ID NO: 318280 - RNA, 19 nt, Artificial Sequence
  Description of Artificial Sequence: Synthetic oligonucleotide
ccuuauguugacuagcuca

SEQ ID NO: 318281 - RNA, 19 nt, Artificial Sequence
  Description of Artificial Sequence: Synthetic oligonucleotide
ucgggaucaucguucagaa

SEQ ID NO: 318282 - RNA, 19 nt, Artificial Sequence
  Description of Artificial Sequence: Synthetic oligonucleotide
accgaggugggauuucucu

SEQ ID NO: 318283 - RNA, 19 nt, Artificial Sequence
  Description of Artificial Sequence: Synthetic oligonucleotide
ugcuaguuugcacuucgua

SEQ ID NO: 318284 - RNA, 19 nt, Artificial Sequence
  Description of Artificial Sequence: Synthetic oligonucleotide
ucuggguauuuccggaaau

SEQ ID NO: 318285 - RNA, 19 nt, Artificial Sequence
  Description of Artificial Sequence: Synthetic oligonucleotide
ugucgaggucucaagcagu

SEQ ID NO: 318286 - RNA, 19 nt, Artificial Sequence
  Description of Artificial Sequence: Synthetic oligonucleotide
caccaucgaagcuuccucc

SEQ ID NO: 318287 - RNA, 19 nt, Artificial Sequence
  Description of Artificial Sequence: Synthetic oligonucleotide
ugacuuugacaaguggacu

SEQ ID NO: 318288 - RNA, 19 nt, Artificial Sequence
  Description of Artificial Sequence: Synthetic oligonucleotide
aggguuaguguguucaaua

SEQ ID NO: 318289 - RNA, 19 nt, Artificial Sequence
  Description of Artificial Sequence: Synthetic oligonucleotide
gguuaaugcugcgaugagg

SEQ ID NO: 318290 - RNA, 19 nt, Artificial Sequence
  Description of Artificial Sequence: Synthetic oligonucleotide
gggccuacuacacauuuug

SEQ ID NO: 318291 - RNA, 19 nt, Artificial Sequence
  Description of Artificial Sequence: Synthetic oligonucleotide
gucgaguaucuccacagca

SEQ ID NO: 318292 - RNA, 19 nt, Artificial Sequence
  Description of Artificial Sequence: Synthetic oligonucleotide
guaaugggaguuuugcaua

SEQ ID NO: 318293 - RNA, 19 nt, Artificial Sequence
  Description of Artificial Sequence: Synthetic oligonucleotide
guaaccuuaaugcuacagu

SEQ ID NO: 318294 - RNA, 19 nt, Artificial Sequence
  Description of Artificial Sequence: Synthetic oligonucleotide
aucugacuugucgaguauc

SEQ ID NO: 318295 - RNA, 19 nt, Artificial Sequence
  Description of Artificial Sequence: Synthetic oligonucleotide
guucaauaacugucuguac

SEQ ID NO: 318296 - RNA, 19 nt, Artificial Sequence
  Description of Artificial Sequence: Synthetic oligonucleotide
acucguaaccauuuuccuu

SEQ ID NO: 318297 - RNA, 19 nt, Artificial Sequence
  Description of Artificial Sequence: Synthetic oligonucleotide
agagaacaauuugcugucg

SEQ ID NO: 318298 - RNA, 19 nt, Artificial Sequence
  Description of Artificial Sequence: Synthetic oligonucleotide
ucugcgcgcguaaccaggc

SEQ ID NO: 318299 - RNA, 19 nt, Artificial Sequence
  Description of Artificial Sequence: Synthetic oligonucleotide
ugaacaucgagggcccggc

SEQ ID NO: 318300 - RNA, 19 nt, Artificial Sequence
  Description of Artificial Sequence: Synthetic oligonucleotide
cuacuagauagaccacuac

SEQ ID NO: 318301 - RNA, 19 nt, Artificial Sequence
  Description of Artificial Sequence: Synthetic oligonucleotide
ucaacguagcaaaccuuua

SEQ ID NO: 318302 - RNA, 19 nt, Artificial Sequence
  Description of Artificial Sequence: Synthetic oligonucleotide
agaccacuacuuuccgguc

SEQ ID NO: 318303 - RNA, 19 nt, Artificial Sequence
  Description of Artificial Sequence: Synthetic oligonucleotide
ugaccgccuggaauggcag

SEQ ID NO: 318304 - RNA, 19 nt, Artificial Sequence
  Description of Artificial Sequence: Synthetic oligonucleotide
ucggggaacuugauuuugu

SEQ ID NO: 318305 - RNA, 19 nt, Artificial Sequence
  Description of Artificial Sequence: Synthetic oligonucleotide
ugccgguuaaugcugcgau

SEQ ID NO: 318306 - RNA, 19 nt, Artificial Sequence
  Description of Artificial Sequence: Synthetic oligonucleotide
ucuccacucguaaccauuu

SEQ ID NO: 318307 - RNA, 19 nt, Artificial Sequence
  Description of Artificial Sequence: Synthetic oligonucleotide
uucgugaucuccacucgua

SEQ ID NO: 318308 - RNA, 19 nt, Artificial Sequence
  Description of Artificial Sequence: Synthetic oligonucleotide
aggauuccuuuuaaaagca

SEQ ID NO: 318309 - RNA, 19 nt, Artificial Sequence
  Description of Artificial Sequence: Synthetic oligonucleotide
caucagagagcgaggcaag

SEQ ID NO: 318310 - RNA, 19 nt, Artificial Sequence
  Description of Artificial Sequence: Synthetic oligonucleotide
uccccugacuuugacaagu

SEQ ID NO: 318311 - RNA, 19 nt, Artificial Sequence
  Description of Artificial Sequence: Synthetic oligonucleotide
cccuguaccacuuauucuc

SEQ ID NO: 318312 - RNA, 19 nt, Artificial Sequence
  Description of Artificial Sequence: Synthetic oligonucleotide
gcagcgaugugucuacuag

SEQ ID NO: 318313 - RNA, 19 nt, Artificial Sequence
  Description of Artificial Sequence: Synthetic oligonucleotide
gaugugucuacuagauaga

SEQ ID NO: 318314 - RNA, 19 nt, Artificial Sequence
  Description of Artificial Sequence: Synthetic oligonucleotide
ucgugaucuccacucguaa

SEQ ID NO: 318315 - RNA, 19 nt, Artificial Sequence
  Description of Artificial Sequence: Synthetic oligonucleotide
uuauugcuuagagaacaau

SEQ ID NO: 318316 - RNA, 19 nt, Artificial Sequence
  Description of Artificial Sequence: Synthetic oligonucleotide
guauggcaagcauuuccug

SEQ ID NO: 318317 - RNA, 19 nt, Artificial Sequence
  Description of Artificial Sequence: Synthetic oligonucleotide
cguaguccaacucauacac

SEQ ID NO: 318318 - RNA, 19 nt, Artificial Sequence
  Description of Artificial Sequence: Synthetic oligonucleotide
ugaguagucuuugccuaca

SEQ ID NO: 318319 - RNA, 19 nt, Artificial Sequence
  Description of Artificial Sequence: Synthetic oligonucleotide
gguuaguguguucaauaac

SEQ ID NO: 318320 - RNA, 19 nt, Artificial Sequence
  Description of Artificial Sequence: Synthetic oligonucleotide
gaucugcgcgcguaaccag

SEQ ID NO: 318321 - RNA, 19 nt, Artificial Sequence
  Description of Artificial Sequence: Synthetic oligonucleotide
gaucugccgguuaaugcug

SEQ ID NO: 318322 - RNA, 19 nt, Artificial Sequence
  Description of Artificial Sequence: Synthetic oligonucleotide
uccuuauguugacuagcuc

SEQ ID NO: 318323 - RNA, 19 nt, Artificial Sequence
  Description of Artificial Sequence: Synthetic oligonucleotide
acgugauuucgaaacacca

SEQ ID NO: 318324 - RNA, 19 nt, Artificial Sequence
  Description of Artificial Sequence: Synthetic oligonucleotide
cacauauagccuucaggca

SEQ ID NO: 318325 - RNA, 19 nt, Artificial Sequence
  Description of Artificial Sequence: Synthetic oligonucleotide
augcuugccguaguccaac

SEQ ID NO: 318326 - RNA, 19 nt, Artificial Sequence
  Description of Artificial Sequence: Synthetic oligonucleotide
accuucacgaggucgggau

SEQ ID NO: 318327 - RNA, 19 nt, Artificial Sequence
  Description of Artificial Sequence: Synthetic oligonucleotide
ucguaaccauuuuccuuug

SEQ ID NO: 318328 - RNA, 19 nt, Artificial Sequence
  Description of Artificial Sequence: Synthetic oligonucleotide
agccauagucaacguagca

SEQ ID NO: 318329 - RNA, 19 nt, Artificial Sequence
  Description of Artificial Sequence: Synthetic oligonucleotide
auaugcgacucccuugguu

SEQ ID NO: 318330 - RNA, 19 nt, Artificial Sequence
  Description of Artificial Sequence: Synthetic oligonucleotide
gaggucgggaucaucguuc

SEQ ID NO: 318331 - RNA, 19 nt, Artificial Sequence
  Description of Artificial Sequence: Synthetic oligonucleotide
augcgacucccuugguuuc

SEQ ID NO: 318332 - RNA, 19 nt, Artificial Sequence
  Description of Artificial Sequence: Synthetic oligonucleotide
cuacaguccgagcaauuca

SEQ ID NO: 318333 - RNA, 19 nt, Artificial Sequence
  Description of Artificial Sequence: Synthetic oligonucleotide
cuucguagcuuggaaggac

SEQ ID NO: 318334 - RNA, 19 nt, Artificial Sequence
  Description of Artificial Sequence: Synthetic oligonucleotide
cugagguaucauacagaac

SEQ ID NO: 318335 - RNA, 19 nt, Artificial Sequence
  Description of Artificial Sequence: Synthetic oligonucleotide
cuggguauuuccggaaaug

SEQ ID NO: 318336 - RNA, 19 nt, Artificial Sequence
  Description of Artificial Sequence: Synthetic oligonucleotide
gaucuccugccaaggcugg

SEQ ID NO: 318337 - RNA, 19 nt, Artificial Sequence
  Description of Artificial Sequence: Synthetic oligonucleotide
auuuccggaaauguagcuu

SEQ ID NO: 318338 - RNA, 19 nt, Artificial Sequence
  Description of Artificial Sequence: Synthetic oligonucleotide
auggugcacacaucagaga

SEQ ID NO: 318339 - RNA, 19 nt, Artificial Sequence
  Description of Artificial Sequence: Synthetic oligonucleotide
cucguaaccauuuuccuuu

SEQ ID NO: 318340 - RNA, 19 nt, Artificial Sequence
  Description of Artificial Sequence: Synthetic oligonucleotide
uuaaggcauccucggggaa

SEQ ID NO: 318341 - RNA, 19 nt, Artificial Sequence
  Description of Artificial Sequence: Synthetic oligonucleotide
gaacuucuagagauuuguc

SEQ ID NO: 318342 - RNA, 19 nt, Artificial Sequence
  Description of Artificial Sequence: Synthetic oligonucleotide
cuuauguugacuagcucau

SEQ ID NO: 318343 - RNA, 19 nt, Artificial Sequence
  Description of Artificial Sequence: Synthetic oligonucleotide
gcacuucguagcuuggaag

SEQ ID NO: 318344 - RNA, 19 nt, Artificial Sequence
  Description of Artificial Sequence: Synthetic oligonucleotide
ugcugcgaugaggaucagg

SEQ ID NO: 318345 - RNA, 19 nt, Artificial Sequence
  Description of Artificial Sequence: Synthetic oligonucleotide
uuaaugcugcgaugaggau

SEQ ID NO: 318346 - RNA, 19 nt, Artificial Sequence
  Description of Artificial Sequence: Synthetic oligonucleotide
gccguaguccaacucauac

SEQ ID NO: 318347 - RNA, 19 nt, Artificial Sequence
  Description of Artificial Sequence: Synthetic oligonucleotide
acuuuccggucccaagggu

SEQ ID NO: 318348 - RNA, 19 nt, Artificial Sequence
  Description of Artificial Sequence: Synthetic oligonucleotide
uugcauugccagaguccag

SEQ ID NO: 318349 - RNA, 19 nt, Artificial Sequence
  Description of Artificial Sequence: Synthetic oligonucleotide
aucugccgguuaaugcugc

SEQ ID NO: 318350 - RNA, 19 nt, Artificial Sequence
  Description of Artificial Sequence: Synthetic oligonucleotide
ccacuuauucuccacuuug

SEQ ID NO: 318351 - RNA, 19 nt, Artificial Sequence
  Description of Artificial Sequence: Synthetic oligonucleotide
agcgaugugucuacuagau

SEQ ID NO: 318352 - RNA, 19 nt, Artificial Sequence
  Description of Artificial Sequence: Synthetic oligonucleotide
agagagcgaggcaagauuu

SEQ ID NO: 318353 - RNA, 19 nt, Artificial Sequence
  Description of Artificial Sequence: Synthetic oligonucleotide
accugauaaccacaucauu

SEQ ID NO: 318354 - RNA, 19 nt, Artificial Sequence
  Description of Artificial Sequence: Synthetic oligonucleotide
agcggugaccgccuggaau

SEQ ID NO: 318355 - RNA, 19 nt, Artificial Sequence
  Description of Artificial Sequence: Synthetic oligonucleotide
agcacccuguaccacuuau

SEQ ID NO: 318356 - RNA, 19 nt, Artificial Sequence
  Description of Artificial Sequence: Synthetic oligonucleotide
gaugaucugcgcgcguaac

SEQ ID NO: 318357 - RNA, 19 nt, Artificial Sequence
  Description of Artificial Sequence: Synthetic oligonucleotide
gaguuuguuuagacccuug

SEQ ID NO: 318358 - RNA, 19 nt, Artificial Sequence
  Description of Artificial Sequence: Synthetic oligonucleotide
gguagugagaugaaguacu

SEQ ID NO: 318359 - RNA, 19 nt, Artificial Sequence
  Description of Artificial Sequence: Synthetic oligonucleotide
guggacguucgugaucucc

SEQ ID NO: 318360 - RNA, 19 nt, Artificial Sequence
  Description of Artificial Sequence: Synthetic oligonucleotide
augaacuucuagagauuug

SEQ ID NO: 318361 - RNA, 19 nt, Artificial Sequence
  Description of Artificial Sequence: Synthetic oligonucleotide
gcggugaccgccuggaaug

SEQ ID NO: 318362 - RNA, 19 nt, Artificial Sequence
  Description of Artificial Sequence: Synthetic oligonucleotide
acacagauggggaggccuc

SEQ ID NO: 318363 - RNA, 19 nt, Artificial Sequence
  Description of Artificial Sequence: Synthetic oligonucleotide
aucugcgcgcguaaccagg

SEQ ID NO: 318364 - RNA, 19 nt, Artificial Sequence
  Description of Artificial Sequence: Synthetic oligonucleotide
ugccccacgugcacagucu

SEQ ID NO: 318365 - RNA, 19 nt, Artificial Sequence
  Description of Artificial Sequence: Synthetic oligonucleotide
ugaguuuguuuagacccuu

SEQ ID NO: 318366 - RNA, 19 nt, Artificial Sequence
  Description of Artificial Sequence: Synthetic oligonucleotide
gauaucugacuugucgagu

SEQ ID NO: 318367 - RNA, 19 nt, Artificial Sequence
  Description of Artificial Sequence: Synthetic oligonucleotide
ccugagguaucauacagaa

SEQ ID NO: 318368 - RNA, 19 nt, Artificial Sequence
  Description of Artificial Sequence: Synthetic oligonucleotide
cacggacuuucugaugacc

SEQ ID NO: 318369 - RNA, 19 nt, Artificial Sequence
  Description of Artificial Sequence: Synthetic oligonucleotide
acuucguagcuuggaagga

SEQ ID NO: 318370 - RNA, 19 nt, Artificial Sequence
  Description of Artificial Sequence: Synthetic oligonucleotide
aggucgggaucaucguuca

SEQ ID NO: 318371 - RNA, 19 nt, Artificial Sequence
  Description of Artificial Sequence: Synthetic oligonucleotide
ggcagaucuucccacagaa

SEQ ID NO: 318372 - RNA, 19 nt, Artificial Sequence
  Description of Artificial Sequence: Synthetic oligonucleotide
cucaagcagugauuaauua

SEQ ID NO: 318373 - RNA, 19 nt, Artificial Sequence
  Description of Artificial Sequence: Synthetic oligonucleotide
uuguaaccuuaaugcuaca

SEQ ID NO: 318374 - RNA, 19 nt, Artificial Sequence
  Description of Artificial Sequence: Synthetic oligonucleotide
agaugaucugcgcgcguaa

SEQ ID NO: 318375 - RNA, 19 nt, Artificial Sequence
  Description of Artificial Sequence: Synthetic oligonucleotide
ccauagucaacguagcaaa

SEQ ID NO: 318376 - RNA, 19 nt, Artificial Sequence
  Description of Artificial Sequence: Synthetic oligonucleotide
auaagauguuugagggccu

SEQ ID NO: 318377 - RNA, 19 nt, Artificial Sequence
  Description of Artificial Sequence: Synthetic oligonucleotide
gacacggcacucagaaaca

SEQ ID NO: 318378 - RNA, 19 nt, Artificial Sequence
  Description of Artificial Sequence: Synthetic oligonucleotide
cuucacgaggucgggauca

SEQ ID NO: 318379 - RNA, 19 nt, Artificial Sequence
  Description of Artificial Sequence: Synthetic oligonucleotide
ugccuacauaccugauaac

SEQ ID NO: 318380 - RNA, 19 nt, Artificial Sequence
  Description of Artificial Sequence: Synthetic oligonucleotide
cacgguuauguccuccaca

SEQ ID NO: 318381 - RNA, 19 nt, Artificial Sequence
  Description of Artificial Sequence: Synthetic oligonucleotide
cauugacuugaugucaaaa

SEQ ID NO: 318382 - RNA, 19 nt, Artificial Sequence
  Description of Artificial Sequence: Synthetic oligonucleotide
ggugugguccagcacggac

SEQ ID NO: 318383 - RNA, 19 nt, Artificial Sequence
  Description of Artificial Sequence: Synthetic oligonucleotide
gcugucgaggucucaagca

SEQ ID NO: 318384 - RNA, 19 nt, Artificial Sequence
  Description of Artificial Sequence: Synthetic oligonucleotide
ugacuagcucaugcuugcc

SEQ ID NO: 318385 - RNA, 19 nt, Artificial Sequence
  Description of Artificial Sequence: Synthetic oligonucleotide
acgaggucgggaucaucgu

SEQ ID NO: 318386 - RNA, 19 nt, Artificial Sequence
  Description of Artificial Sequence: Synthetic oligonucleotide
agacaccagcccauugguc

SEQ ID NO: 318387 - RNA, 19 nt, Artificial Sequence
  Description of Artificial Sequence: Synthetic oligonucleotide
ggguuaguguguucaauaa

SEQ ID NO: 318388 - RNA, 19 nt, Artificial Sequence
  Description of Artificial Sequence: Synthetic oligonucleotide
cucggggaacuugauuuug

SEQ ID NO: 318389 - RNA, 19 nt, Artificial Sequence
  Description of Artificial Sequence: Synthetic oligonucleotide
agcucaugcuugccguagu

SEQ ID NO: 318390 - RNA, 19 nt, Artificial Sequence
  Description of Artificial Sequence: Synthetic oligonucleotide
agcaaauguuagucacuuu

SEQ ID NO: 318391 - RNA, 19 nt, Artificial Sequence
  Description of Artificial Sequence: Synthetic oligonucleotide
cuauguggcgcuccucaga

SEQ ID NO: 318392 - RNA, 19 nt, Artificial Sequence
  Description of Artificial Sequence: Synthetic oligonucleotide
ugcuacaguccgagcaauu

SEQ ID NO: 318393 - RNA, 19 nt, Artificial Sequence
  Description of Artificial Sequence: Synthetic oligonucleotide
ggguagugagaugaaguac

SEQ ID NO: 318394 - RNA, 19 nt, Artificial Sequence
  Description of Artificial Sequence: Synthetic oligonucleotide
accgcuauguggcgcuccu

SEQ ID NO: 318395 - RNA, 19 nt, Artificial Sequence
  Description of Artificial Sequence: Synthetic oligonucleotide
ggacuguggaagaucggcc

SEQ ID NO: 318396 - RNA, 19 nt, Artificial Sequence
  Description of Artificial Sequence: Synthetic oligonucleotide
guagcuuauggugcacaca

SEQ ID NO: 318397 - RNA, 19 nt, Artificial Sequence
  Description of Artificial Sequence: Synthetic oligonucleotide
cuagauagaccacuacuuu

SEQ ID NO: 318398 - RNA, 19 nt, Artificial Sequence
  Description of Artificial Sequence: Synthetic oligonucleotide
gaccgccuggaauggcagc

SEQ ID NO: 318399 - RNA, 19 nt, Artificial Sequence
  Description of Artificial Sequence: Synthetic oligonucleotide
accgccuggaauggcagcu

SEQ ID NO: 318400 - RNA, 19 nt, Artificial Sequence
  Description of Artificial Sequence: Synthetic oligonucleotide
agacccuugcauggcaccu

SEQ ID NO: 318401 - RNA, 19 nt, Artificial Sequence
  Description of Artificial Sequence: Synthetic oligonucleotide
ggguaaugggaguuuugca

SEQ ID NO: 318402 - RNA, 19 nt, Artificial Sequence
  Description of Artificial Sequence: Synthetic oligonucleotide
uggucucucuccaccgcua

SEQ ID NO: 318403 - RNA, 19 nt, Artificial Sequence
  Description of Artificial Sequence: Synthetic oligonucleotide
ugagggccuacuacacauu

SEQ ID NO: 318404 - RNA, 19 nt, Artificial Sequence
  Description of Artificial Sequence: Synthetic oligonucleotide
caugaauccaggugucagu

SEQ ID NO: 318405 - RNA, 19 nt, Artificial Sequence
  Description of Artificial Sequence: Synthetic oligonucleotide
ugcuugccguaguccaacu

SEQ ID NO: 318406 - RNA, 19 nt, Artificial Sequence
  Description of Artificial Sequence: Synthetic oligonucleotide
cagcgaugugucuacuaga

SEQ ID NO: 318407 - RNA, 19 nt, Artificial Sequence
  Description of Artificial Sequence: Synthetic oligonucleotide
acagauggggaggccucag

SEQ ID NO: 318408 - RNA, 19 nt, Artificial Sequence
  Description of Artificial Sequence: Synthetic oligonucleotide
auggacuguggaagaucgg

SEQ ID NO: 318409 - RNA, 19 nt, Artificial Sequence
  Description of Artificial Sequence: Synthetic oligonucleotide
gucucaagcagugauuaau

SEQ ID NO: 318410 - RNA, 19 nt, Artificial Sequence
  Description of Artificial Sequence: Synthetic oligonucleotide
gcuuagagaacaauuugcu

SEQ ID NO: 318411 - RNA, 19 nt, Artificial Sequence
  Description of Artificial Sequence: Synthetic oligonucleotide
ugcgacucccuugguuuca

SEQ ID NO: 318412 - RNA, 19 nt, Artificial Sequence
  Description of Artificial Sequence: Synthetic oligonucleotide
ggaguuuugcauaaagaau

SEQ ID NO: 318413 - RNA, 19 nt, Artificial Sequence
  Description of Artificial Sequence: Synthetic oligonucleotide
gucaacguagcaaaccuuu

SEQ ID NO: 318414 - RNA, 19 nt, Artificial Sequence
  Description of Artificial Sequence: Synthetic oligonucleotide
cuguggacguucgugaucu

SEQ ID NO: 318415 - RNA, 19 nt, Artificial Sequence
  Description of Artificial Sequence: Synthetic oligonucleotide
gacccuugcauggcaccug

SEQ ID NO: 318416 - RNA, 19 nt, Artificial Sequence
  Description of Artificial Sequence: Synthetic oligonucleotide
ucgaggucucaagcaguga

SEQ ID NO: 318417 - RNA, 19 nt, Artificial Sequence
  Description of Artificial Sequence: Synthetic oligonucleotide
gccaauggacuguggaaga

SEQ ID NO: 318418 - RNA, 19 nt, Artificial Sequence
  Description of Artificial Sequence: Synthetic oligonucleotide
aguugagcggugaccgccu

SEQ ID NO: 318419 - RNA, 19 nt, Artificial Sequence
  Description of Artificial Sequence: Synthetic oligonucleotide
guaguccaacucauacaca

SEQ ID NO: 318420 - RNA, 19 nt, Artificial Sequence
  Description of Artificial Sequence: Synthetic oligonucleotide
auauagccuucaggcaggu

SEQ ID NO: 318421 - RNA, 19 nt, Artificial Sequence
  Description of Artificial Sequence: Synthetic oligonucleotide
ugccguaguccaacucaua

SEQ ID NO: 318422 - RNA, 19 nt, Artificial Sequence
  Description of Artificial Sequence: Synthetic oligonucleotide
cuuuuacggauguugcauu

SEQ ID NO: 318423 - RNA, 19 nt, Artificial Sequence
  Description of Artificial Sequence: Synthetic oligonucleotide
gcauuugugaucugccggu

SEQ ID NO: 318424 - RNA, 19 nt, Artificial Sequence
  Description of Artificial Sequence: Synthetic oligonucleotide
guucgugaucuccacucgu

SEQ ID NO: 318425 - RNA, 19 nt, Artificial Sequence
  Description of Artificial Sequence: Synthetic oligonucleotide
guugagcggugaccgccug

SEQ ID NO: 318426 - RNA, 19 nt, Artificial Sequence
  Description of Artificial Sequence: Synthetic oligonucleotide
caggccacgggcacauaca

SEQ ID NO: 318427 - RNA, 19 nt, Artificial Sequence
  Description of Artificial Sequence: Synthetic oligonucleotide
agcguacacuuggucucuc

SEQ ID NO: 318428 - RNA, 19 nt, Artificial Sequence
  Description of Artificial Sequence: Synthetic oligonucleotide
gugaccgccuggaauggca

SEQ ID NO: 318429 - RNA, 19 nt, Artificial Sequence
  Description of Artificial Sequence: Synthetic oligonucleotide
acaugccaauggacugugg

SEQ ID NO: 318430 - RNA, 19 nt, Artificial Sequence
  Description of Artificial Sequence: Synthetic oligonucleotide
caugcuugccguaguccaa

SEQ ID NO: 318431 - RNA, 19 nt, Artificial Sequence
  Description of Artificial Sequence: Synthetic oligonucleotide
agucaacguagcaaaccuu

SEQ ID NO: 318432 - RNA, 19 nt, Artificial Sequence
  Description of Artificial Sequence: Synthetic oligonucleotide
caacguagcaaaccuuuau

SEQ ID NO: 318433 - RNA, 19 nt, Artificial Sequence
  Description of Artificial Sequence: Synthetic oligonucleotide
uugugaucugccgguuaau

SEQ ID NO: 318434 - RNA, 19 nt, Artificial Sequence
  Description of Artificial Sequence: Synthetic oligonucleotide
gacguucgugaucuccacu

SEQ ID NO: 318435 - RNA, 19 nt, Artificial Sequence
  Description of Artificial Sequence: Synthetic oligonucleotide
gagggccuacuacacauuu

SEQ ID NO: 318436 - RNA, 19 nt, Artificial Sequence
  Description of Artificial Sequence: Synthetic oligonucleotide
cacucguaaccauuuuccu

SEQ ID NO: 318437 - RNA, 19 nt, Artificial Sequence
  Description of Artificial Sequence: Synthetic oligonucleotide
cauuggucaggauuccuuu

SEQ ID NO: 318438 - RNA, 19 nt, Artificial Sequence
  Description of Artificial Sequence: Synthetic oligonucleotide
gguggcacgguuauguccu

SEQ ID NO: 318439 - RNA, 19 nt, Artificial Sequence
  Description of Artificial Sequence: Synthetic oligonucleotide
uggcucuuucugagacccu

SEQ ID NO: 318440 - RNA, 19 nt, Artificial Sequence
  Description of Artificial Sequence: Synthetic oligonucleotide
aagcguggguucagucugu

SEQ ID NO: 318441 - RNA, 19 nt, Artificial Sequence
  Description of Artificial Sequence: Synthetic oligonucleotide
ccgaggugggauuucucug

SEQ ID NO: 318442 - RNA, 19 nt, Artificial Sequence
  Description of Artificial Sequence: Synthetic oligonucleotide
cugcgaugaggaucaggga

SEQ ID NO: 318443 - RNA, 19 nt, Artificial Sequence
  Description of Artificial Sequence: Synthetic oligonucleotide
cauugccagaguccaggaa

SEQ ID NO: 318444 - RNA, 19 nt, Artificial Sequence
  Description of Artificial Sequence: Synthetic oligonucleotide
ccgguuaaugcugcgauga

SEQ ID NO: 318445 - RNA, 19 nt, Artificial Sequence
  Description of Artificial Sequence: Synthetic oligonucleotide
acagcacuuuauagccuga

SEQ ID NO: 318446 - RNA, 19 nt, Artificial Sequence
  Description of Artificial Sequence: Synthetic oligonucleotide
auguggcgcuccucagaca

SEQ ID NO: 318447 - RNA, 19 nt, Artificial Sequence
  Description of Artificial Sequence: Synthetic oligonucleotide
ggacguucgugaucuccac

SEQ ID NO: 318448 - RNA, 19 nt, Artificial Sequence
  Description of Artificial Sequence: Synthetic oligonucleotide
cgugaucuccacucguaac

SEQ ID NO: 318449 - RNA, 19 nt, Artificial Sequence
  Description of Artificial Sequence: Synthetic oligonucleotide
gccgguuaaugcugcgaug

SEQ ID NO: 318450 - RNA, 19 nt, Artificial Sequence
  Description of Artificial Sequence: Synthetic oligonucleotide
cguucgugaucuccacucg

SEQ ID NO: 318451 - RNA, 19 nt, Artificial Sequence
  Description of Artificial Sequence: Synthetic oligonucleotide
aguuugcacuucguagcuu

SEQ ID NO: 318452 - RNA, 19 nt, Artificial Sequence
  Description of Artificial Sequence: Synthetic oligonucleotide
ccuugcauggcaccuggca

SEQ ID NO: 318453 - RNA, 19 nt, Artificial Sequence
  Description of Artificial Sequence: Synthetic oligonucleotide
acaguccgagcaauucaaa

SEQ ID NO: 318454 - RNA, 19 nt, Artificial Sequence
  Description of Artificial Sequence: Synthetic oligonucleotide
gaucuccacucguaaccau

SEQ ID NO: 318455 - RNA, 19 nt, Artificial Sequence
  Description of Artificial Sequence: Synthetic oligonucleotide
ccguaguccaacucauaca

SEQ ID NO: 318456 - RNA, 19 nt, Artificial Sequence
  Description of Artificial Sequence: Synthetic oligonucleotide
uucacgaggucgggaucau

SEQ ID NO: 318457 - RNA, 19 nt, Artificial Sequence
  Description of Artificial Sequence: Synthetic oligonucleotide
caggugagcugacugcacu

SEQ ID NO: 318458 - RNA, 19 nt, Artificial Sequence
  Description of Artificial Sequence: Synthetic oligonucleotide
caccgcuauguggcgcucc

SEQ ID NO: 318459 - RNA, 19 nt, Artificial Sequence
  Description of Artificial Sequence: Synthetic oligonucleotide
uguggacguucgugaucuc

SEQ ID NO: 318460 - RNA, 19 nt, Artificial Sequence
  Description of Artificial Sequence: Synthetic oligonucleotide
ucacgaggucgggaucauc

SEQ ID NO: 318461 - RNA, 19 nt, Artificial Sequence
  Description of Artificial Sequence: Synthetic oligonucleotide
ccuuaaugcuacaguccga

SEQ ID NO: 318462 - RNA, 19 nt, Artificial Sequence
  Description of Artificial Sequence: Synthetic oligonucleotide
ccguggagaugaucugcgc

SEQ ID NO: 318463 - RNA, 19 nt, Artificial Sequence
  Description of Artificial Sequence: Synthetic oligonucleotide
cugccgguuaaugcugcga

SEQ ID NO: 318464 - RNA, 19 nt, Artificial Sequence
  Description of Artificial Sequence: Synthetic oligonucleotide
ccgggugacaggccacggg

SEQ ID NO: 318465 - RNA, 19 nt, Artificial Sequence
  Description of Artificial Sequence: Synthetic oligonucleotide
gaacaucgagggcccggcu

SEQ ID NO: 318466 - RNA, 19 nt, Artificial Sequence
  Description of Artificial Sequence: Synthetic oligonucleotide
ccccacgugcacagucugg

SEQ ID NO: 318467 - RNA, 19 nt, Artificial Sequence
  Description of Artificial Sequence: Synthetic oligonucleotide
agggccuacuacacauuuu

SEQ ID NO: 318468 - RNA, 19 nt, Artificial Sequence
  Description of Artificial Sequence: Synthetic oligonucleotide
gcacggacuuucugaugac

SEQ ID NO: 318469 - RNA, 19 nt, Artificial Sequence
  Description of Artificial Sequence: Synthetic oligonucleotide
ccccugacuuugacaagug

SEQ ID NO: 318470 - RNA, 19 nt, Artificial Sequence
  Description of Artificial Sequence: Synthetic oligonucleotide
ggcagcgaugugucuacua

SEQ ID NO: 318471 - RNA, 19 nt, Artificial Sequence
  Description of Artificial Sequence: Synthetic oligonucleotide
uggcagcgaugugucuacu

SEQ ID NO: 318472 - RNA, 19 nt, Artificial Sequence
  Description of Artificial Sequence: Synthetic oligonucleotide
ggugaccgccuggaauggc

SEQ ID NO: 318473 - RNA, 19 nt, Artificial Sequence
  Description of Artificial Sequence: Synthetic oligonucleotide
cacuacuuuccggucccaa

SEQ ID NO: 318474 - RNA, 19 nt, Artificial Sequence
  Description of Artificial Sequence: Synthetic oligonucleotide
ccuucacgaggucgggauc

SEQ ID NO: 318475 - RNA, 19 nt, Artificial Sequence
  Description of Artificial Sequence: Synthetic oligonucleotide
cgguuaaugcugcgaugag

SEQ ID NO: 318476 - RNA, 19 nt, Artificial Sequence
  Description of Artificial Sequence: Synthetic oligonucleotide
gaugaggaucagggaaguu

SEQ ID NO: 318477 - RNA, 19 nt, Artificial Sequence
  Description of Artificial Sequence: Synthetic oligonucleotide
gagagcgaggcaagauuuu

SEQ ID NO: 318478 - RNA, 19 nt, Artificial Sequence
  Description of Artificial Sequence: Synthetic oligonucleotide
caaugccaccagggguuuc

SEQ ID NO: 318479 - RNA, 19 nt, Artificial Sequence
  Description of Artificial Sequence: Synthetic oligonucleotide
gcgaugugucuacuagaua

SEQ ID NO: 318480 - RNA, 19 nt, Artificial Sequence
  Description of Artificial Sequence: Synthetic oligonucleotide
gcccgggugacaggccacg

SEQ ID NO: 318481 - RNA, 19 nt, Artificial Sequence
  Description of Artificial Sequence: Synthetic oligonucleotide
gagcggugaccgccuggaa

SEQ ID NO: 318482 - RNA, 19 nt, Artificial Sequence
  Description of Artificial Sequence: Synthetic oligonucleotide
gggugacaggccacgggca

SEQ ID NO: 318483 - RNA, 19 nt, Artificial Sequence
  Description of Artificial Sequence: Synthetic oligonucleotide
cauaugcgacucccuuggu

SEQ ID NO: 318484 - RNA, 19 nt, Artificial Sequence
  Description of Artificial Sequence: Synthetic oligonucleotide
ccggucccaaggguuagug

SEQ ID NO: 318485 - RNA, 19 nt, Artificial Sequence
  Description of Artificial Sequence: Synthetic oligonucleotide
cugcgcgcguaaccaggca

SEQ ID NO: 318486 - RNA, 19 nt, Artificial Sequence
  Description of Artificial Sequence: Synthetic oligonucleotide
cagagccauguaguaaaau

SEQ ID NO: 318487 - RNA, 19 nt, Artificial Sequence
  Description of Artificial Sequence: Synthetic oligonucleotide
gcgcgcguaaccaggcauc

SEQ ID NO: 318488 - RNA, 19 nt, Artificial Sequence
  Description of Artificial Sequence: Synthetic oligonucleotide
ggguucagucuguaugcuu

SEQ ID NO: 318489 - RNA, 19 nt, Artificial Sequence
  Description of Artificial Sequence: Synthetic oligonucleotide
ccuccgaccacuggcugca

SEQ ID NO: 318490 - RNA, 19 nt, Artificial Sequence
  Description of Artificial Sequence: Synthetic oligonucleotide
ggugucacuuugggguucu

SEQ ID NO: 318491 - RNA, 19 nt, Artificial Sequence
  Description of Artificial Sequence: Synthetic oligonucleotide
augcugcgaugaggaucag

SEQ ID NO: 318492 - RNA, 19 nt, Artificial Sequence
  Description of Artificial Sequence: Synthetic oligonucleotide
gaggaucagggaaguucuu

SEQ ID NO: 318493 - RNA, 19 nt, Artificial Sequence
  Description of Artificial Sequence: Synthetic oligonucleotide
ggccuacuacacauuuugu

SEQ ID NO: 318494 - RNA, 19 nt, Artificial Sequence
  Description of Artificial Sequence: Synthetic oligonucleotide
cauccucggggaacuugau

SEQ ID NO: 318495 - RNA, 19 nt, Artificial Sequence
  Description of Artificial Sequence: Synthetic oligonucleotide
gcauggcaccuggcaguag

SEQ ID NO: 318496 - RNA, 19 nt, Artificial Sequence
  Description of Artificial Sequence: Synthetic oligonucleotide
cuccacucguaaccauuuu

SEQ ID NO: 318497 - RNA, 19 nt, Artificial Sequence
  Description of Artificial Sequence: Synthetic oligonucleotide
cccgggugacaggccacgg

SEQ ID NO: 318498 - RNA, 19 nt, Artificial Sequence
  Description of Artificial Sequence: Synthetic oligonucleotide
cguagcuuggaaggacaga

SEQ ID NO: 318499 - RNA, 19 nt, Artificial Sequence
  Description of Artificial Sequence: Synthetic oligonucleotide
cuccgaccacuggcugcac

SEQ ID NO: 318500 - RNA, 19 nt, Artificial Sequence
  Description of Artificial Sequence: Synthetic oligonucleotide
cggugaccgccuggaaugg

SEQ ID NO: 318501 - RNA, 19 nt, Artificial Sequence
  Description of Artificial Sequence: Synthetic oligonucleotide
gcagaagcguggguucagu

SEQ ID NO: 318502 - RNA, 19 nt, Artificial Sequence
  Description of Artificial Sequence: Synthetic oligonucleotide
cggccaaacagcacuuuau

SEQ ID NO: 318503 - RNA, 19 nt, Artificial Sequence
  Description of Artificial Sequence: Synthetic oligonucleotide
ccgaccacuggcugcacuu

SEQ ID NO: 318504 - RNA, 19 nt, Artificial Sequence
  Description of Artificial Sequence: Synthetic oligonucleotide
cgacucccuugguuucauc

SEQ ID NO: 318505 - RNA, 19 nt, Artificial Sequence
  Description of Artificial Sequence: Synthetic oligonucleotide
caucgagggcccggcugcu

SEQ ID NO: 318506 - RNA, 19 nt, Artificial Sequence
  Description of Artificial Sequence: Synthetic oligonucleotide
gcacccuguaccacuuauu

SEQ ID NO: 318507 - RNA, 19 nt, Artificial Sequence
  Description of Artificial Sequence: Synthetic oligonucleotide
cccauuggucaggauuccu

SEQ ID NO: 318508 - RNA, 19 nt, Artificial Sequence
  Description of Artificial Sequence: Synthetic oligonucleotide
cgguuauguccuccacaaa

SEQ ID NO: 318509 - RNA, 19 nt, Artificial Sequence
  Description of Artificial Sequence: Synthetic oligonucleotide
ccgcuauguggcgcuccuc

SEQ ID NO: 318510 - RNA, 19 nt, Artificial Sequence
  Description of Artificial Sequence: Synthetic oligonucleotide
ccaccgcuauguggcgcuc

SEQ ID NO: 318511 - RNA, 19 nt, Artificial Sequence
  Description of Artificial Sequence: Synthetic oligonucleotide
cgaggucgggaucaucguu

SEQ ID NO: 318512 - RNA, 19 nt, Artificial Sequence
  Description of Artificial Sequence: Synthetic oligonucleotide
gcgacucccuugguuucau

SEQ ID NO: 318513 - RNA, 19 nt, Artificial Sequence
  Description of Artificial Sequence: Synthetic oligonucleotide
gcgcguaaccaggcauccu

SEQ ID NO: 318514 - RNA, 19 nt, Artificial Sequence
  Description of Artificial Sequence: Synthetic oligonucleotide
ggcgcuccucagacacacu

SEQ ID NO: 318515 - RNA, 19 nt, Artificial Sequence
  Description of Artificial Sequence: Synthetic oligonucleotide
cgggaucaucguucagaau

SEQ ID NO: 318516 - RNA, 19 nt, Artificial Sequence
  Description of Artificial Sequence: Synthetic oligonucleotide
ccgccuggaauggcagcuu

SEQ ID NO: 318517 - RNA, 19 nt, Artificial Sequence
  Description of Artificial Sequence: Synthetic oligonucleotide
uauauuagcaccgacaggg

SEQ ID NO: 318518 - RNA, 19 nt, Artificial Sequence
  Description of Artificial Sequence: Synthetic oligonucleotide
aaagacggacacuaguucc

SEQ ID NO: 318519 - RNA, 19 nt, Artificial Sequence
  Description of Artificial Sequence: Synthetic oligonucleotide
uccauuuaaaauuugacac

SEQ ID NO: 318520 - RNA, 19 nt, Artificial Sequence
  Description of Artificial Sequence: Synthetic oligonucleotide
aaguauauacaccuguuag

SEQ ID NO: 318521 - RNA, 19 nt, Artificial Sequence
  Description of Artificial Sequence: Synthetic oligonucleotide
aacuauaugacugcauucc

SEQ ID NO: 318522 - RNA, 19 nt, Artificial Sequence
  Description of Artificial Sequence: Synthetic oligonucleotide
aguacggaaaguuacuagc

SEQ ID NO: 318523 - RNA, 19 nt, Artificial Sequence
  Description of Artificial Sequence: Synthetic oligonucleotide
aagguuaaaacauugcuaa

SEQ ID NO: 318524 - RNA, 19 nt, Artificial Sequence
  Description of Artificial Sequence: Synthetic oligonucleotide
aguauauuagcaccgacag

SEQ ID NO: 318525 - RNA, 19 nt, Artificial Sequence
  Description of Artificial Sequence: Synthetic oligonucleotide
aacuagaggaguuuucagg

SEQ ID NO: 318526 - RNA, 19 nt, Artificial Sequence
  Description of Artificial Sequence: Synthetic oligonucleotide
uaaaauuugacacucucaa

SEQ ID NO: 318527 - RNA, 19 nt, Artificial Sequence
  Description of Artificial Sequence: Synthetic oligonucleotide
aauacaaagguuaaaacau

SEQ ID NO: 318528 - RNA, 19 nt, Artificial Sequence
  Description of Artificial Sequence: Synthetic oligonucleotide
caugcgagcacucugaucc

SEQ ID NO: 318529 - RNA, 19 nt, Artificial Sequence
  Description of Artificial Sequence: Synthetic oligonucleotide
gauaacaguacuuucugug

SEQ ID NO: 318530 - RNA, 19 nt, Artificial Sequence
  Description of Artificial Sequence: Synthetic oligonucleotide
aaacuauaugacugcauuc

SEQ ID NO: 318531 - RNA, 19 nt, Artificial Sequence
  Description of Artificial Sequence: Synthetic oligonucleotide
acauacuccacuuacaagu

SEQ ID NO: 318532 - RNA, 19 nt, Artificial Sequence
  Description of Artificial Sequence: Synthetic oligonucleotide
uuggaaaucuuuaagugcu

SEQ ID NO: 318533 - RNA, 19 nt, Artificial Sequence
  Description of Artificial Sequence: Synthetic oligonucleotide
uuagaaucccaguagaacu

SEQ ID NO: 318534 - RNA, 19 nt, Artificial Sequence
  Description of Artificial Sequence: Synthetic oligonucleotide
uuaaaugcuucacagggcu

SEQ ID NO: 318535 - RNA, 19 nt, Artificial Sequence
  Description of Artificial Sequence: Synthetic oligonucleotide
uauaugacugcauuccucc

SEQ ID NO: 318536 - RNA, 19 nt, Artificial Sequence
  Description of Artificial Sequence: Synthetic oligonucleotide
agaaacaccucacugucac

SEQ ID NO: 318537 - RNA, 19 nt, Artificial Sequence
  Description of Artificial Sequence: Synthetic oligonucleotide
acggaaaguuacuagcucc

SEQ ID NO: 318538 - RNA, 19 nt, Artificial Sequence
  Description of Artificial Sequence: Synthetic oligonucleotide
agaacuacugcauagggaa

SEQ ID NO: 318539 - RNA, 19 nt, Artificial Sequence
  Description of Artificial Sequence: Synthetic oligonucleotide
aacguagagacugacuacg

SEQ ID NO: 318540 - RNA, 19 nt, Artificial Sequence
  Description of Artificial Sequence: Synthetic oligonucleotide
aaaguuacuagcuccuccu

SEQ ID NO: 318541 - RNA, 19 nt, Artificial Sequence
  Description of Artificial Sequence: Synthetic oligonucleotide
uaaaagaggucuuauguuc

SEQ ID NO: 318542 - RNA, 19 nt, Artificial Sequence
  Description of Artificial Sequence: Synthetic oligonucleotide
acauugcuaacacagcacg

SEQ ID NO: 318543 - RNA, 19 nt, Artificial Sequence
  Description of Artificial Sequence: Synthetic oligonucleotide
auuguacaugauuaugccg

SEQ ID NO: 318544 - RNA, 19 nt, Artificial Sequence
  Description of Artificial Sequence: Synthetic oligonucleotide
guagagacugacuacgagg

SEQ ID NO: 318545 - RNA, 19 nt, Artificial Sequence
  Description of Artificial Sequence: Synthetic oligonucleotide
caugguaugagcucauggg

SEQ ID NO: 318546 - RNA, 19 nt, Artificial Sequence
  Description of Artificial Sequence: Synthetic oligonucleotide
acaaccggcauuuugggag

SEQ ID NO: 318547 - RNA, 19 nt, Artificial Sequence
  Description of Artificial Sequence: Synthetic oligonucleotide
  modified_base (8)..(8): a, c, u, g, unknown or other
augaaagngcgcugcaugc

SEQ ID NO: 318548 - RNA, 19 nt, Artificial Sequence
  Description of Artificial Sequence: Synthetic oligonucleotide
auugugcucugauaaggcc

SEQ ID NO: 318549 - RNA, 19 nt, Artificial Sequence
  Description of Artificial Sequence: Synthetic oligonucleotide
ucuuguugagaaaauuuga

SEQ ID NO: 318550 - RNA, 19 nt, Artificial Sequence
  Description of Artificial Sequence: Synthetic oligonucleotide
guuacaaccggcauuuugg

SEQ ID NO: 318551 - RNA, 19 nt, Artificial Sequence
  Description of Artificial Sequence: Synthetic oligonucleotide
  modified_base (15)..(15): a, c, u, g, unknown or other
ucuacaugggaaccngggg

SEQ ID NO: 318552 - RNA, 19 nt, Artificial Sequence
  Description of Artificial Sequence: Synthetic oligonucleotide
ugaccaguauauuagcacc

SEQ ID NO: 318553 - RNA, 19 nt, Artificial Sequence
  Description of Artificial Sequence: Synthetic oligonucleotide
ugugcuaaaguuacucccc

SEQ ID NO: 318554 - RNA, 19 nt, Artificial Sequence
  Description of Artificial Sequence: Synthetic oligonucleotide
  modified_base (14)..(14): a, c, u, g, unknown or other
cuacaugggaaccnggggc

SEQ ID NO: 318555 - RNA, 19 nt, Artificial Sequence
  Description of Artificial Sequence: Synthetic oligonucleotide
aaacaccucacugucacuc

SEQ ID NO: 318556 - RNA, 19 nt, Artificial Sequence
  Description of Artificial Sequence: Synthetic oligonucleotide
uguuggaggacacuggccu

SEQ ID NO: 318557 - RNA, 19 nt, Artificial Sequence
  Description of Artificial Sequence: Synthetic oligonucleotide
aggucuaucuucucggcac

SEQ ID NO: 318558 - RNA, 19 nt, Artificial Sequence
  Description of Artificial Sequence: Synthetic oligonucleotide
aacauugcuaacacagcac

SEQ ID NO: 318559 - RNA, 19 nt, Artificial Sequence
  Description of Artificial Sequence: Synthetic oligonucleotide
  modified_base (16)..(16): a, c, u, g, unknown or other
cucuacaugggaaccnggg

SEQ ID NO: 318560 - RNA, 19 nt, Artificial Sequence
  Description of Artificial Sequence: Synthetic oligonucleotide
aaaacuaguuucaaccuga

SEQ ID NO: 318561 - RNA, 19 nt, Artificial Sequence
  Description of Artificial Sequence: Synthetic oligonucleotide
guuuugaccaguauauuag

SEQ ID NO: 318562 - RNA, 19 nt, Artificial Sequence
  Description of Artificial Sequence: Synthetic oligonucleotide
uacagaaacaccucacugu

SEQ ID NO: 318563 - RNA, 19 nt, Artificial Sequence
  Description of Artificial Sequence: Synthetic oligonucleotide
acagaacuacugcauaggg

SEQ ID NO: 318564 - RNA, 19 nt, Artificial Sequence
  Description of Artificial Sequence: Synthetic oligonucleotide
aaaguauauacaccuguua

SEQ ID NO: 318565 - RNA, 19 nt, Artificial Sequence
  Description of Artificial Sequence: Synthetic oligonucleotide
uuacacguaaguuauguuu

SEQ ID NO: 318566 - RNA, 19 nt, Artificial Sequence
  Description of Artificial Sequence: Synthetic oligonucleotide
aauauaguguuaaauguuu

SEQ ID NO: 318567 - RNA, 19 nt, Artificial Sequence
  Description of Artificial Sequence: Synthetic oligonucleotide
auguggaugucgccgaccc

SEQ ID NO: 318568 - RNA, 19 nt, Artificial Sequence
  Description of Artificial Sequence: Synthetic oligonucleotide
uguuuugaccaguauauua

SEQ ID NO: 318569 - RNA, 19 nt, Artificial Sequence
  Description of Artificial Sequence: Synthetic oligonucleotide
acaccuauuccacagagau

SEQ ID NO: 318570 - RNA, 19 nt, Artificial Sequence
  Description of Artificial Sequence: Synthetic oligonucleotide
ucagccaucccauugcgca

SEQ ID NO: 318571 - RNA, 19 nt, Artificial Sequence
  Description of Artificial Sequence: Synthetic oligonucleotide
uucuagauuauuugugacu

SEQ ID NO: 318572 - RNA, 19 nt, Artificial Sequence
  Description of Artificial Sequence: Synthetic oligonucleotide
ugucaaagucaaguaaagg

SEQ ID NO: 318573 - RNA, 19 nt, Artificial Sequence
  Description of Artificial Sequence: Synthetic oligonucleotide
auuugugacagacaggcuu

SEQ ID NO: 318574 - RNA, 19 nt, Artificial Sequence
  Description of Artificial Sequence: Synthetic oligonucleotide
ggucacaucgcucacuucg

SEQ ID NO: 318575 - RNA, 19 nt, Artificial Sequence
  Description of Artificial Sequence: Synthetic oligonucleotide
  modified_base (4)..(4): a, c, u, g, unknown or other
aagngcgcugcaugcgagc

SEQ ID NO: 318576 - RNA, 19 nt, Artificial Sequence
  Description of Artificial Sequence: Synthetic oligonucleotide
agggcuuuaauauaguguu

SEQ ID NO: 318577 - RNA, 19 nt, Artificial Sequence
  Description of Artificial Sequence: Synthetic oligonucleotide
uucaccuggacccaguguc

SEQ ID NO: 318578 - RNA, 19 nt, Artificial Sequence
  Description of Artificial Sequence: Synthetic oligonucleotide
aaggauaacaguacuuucu

SEQ ID NO: 318579 - RNA, 19 nt, Artificial Sequence
  Description of Artificial Sequence: Synthetic oligonucleotide
ugcacgagaggccauguug

SEQ ID NO: 318580 - RNA, 19 nt, Artificial Sequence
  Description of Artificial Sequence: Synthetic oligonucleotide
aaagucggguccccaguac

SEQ ID NO: 318581 - RNA, 19 nt, Artificial Sequence
  Description of Artificial Sequence: Synthetic oligonucleotide
agggccuuuguucacacag

SEQ ID NO: 318582 - RNA, 19 nt, Artificial Sequence
  Description of Artificial Sequence: Synthetic oligonucleotide
ugccgggcuacaauuaagg

SEQ ID NO: 318583 - RNA, 19 nt, Artificial Sequence
  Description of Artificial Sequence: Synthetic oligonucleotide
gagacugacuacgagguag

SEQ ID NO: 318584 - RNA, 19 nt, Artificial Sequence
  Description of Artificial Sequence: Synthetic oligonucleotide
ucuagauuauuugugacuu

SEQ ID NO: 318585 - RNA, 19 nt, Artificial Sequence
  Description of Artificial Sequence: Synthetic oligonucleotide
uagaagauuguacaugauu

SEQ ID NO: 318586 - RNA, 19 nt, Artificial Sequence
  Description of Artificial Sequence: Synthetic oligonucleotide
caagucaccugcuuacacg

SEQ ID NO: 318587 - RNA, 19 nt, Artificial Sequence
  Description of Artificial Sequence: Synthetic oligonucleotide
uuucaaccugaguugcacg

SEQ ID NO: 318588 - RNA, 19 nt, Artificial Sequence
  Description of Artificial Sequence: Synthetic oligonucleotide
  modified_base (7)..(7): a, c, u, g, unknown or other
ugaaagngcgcugcaugcg

SEQ ID NO: 318589 - RNA, 19 nt, Artificial Sequence
  Description of Artificial Sequence: Synthetic oligonucleotide
acauugugcucugauaagg

SEQ ID NO: 318590 - RNA, 19 nt, Artificial Sequence
  Description of Artificial Sequence: Synthetic oligonucleotide
agaguggagacccaagcca

SEQ ID NO: 318591 - RNA, 19 nt, Artificial Sequence
  Description of Artificial Sequence: Synthetic oligonucleotide
uugugcucugauaaggccu

SEQ ID NO: 318592 - RNA, 19 nt, Artificial Sequence
  Description of Artificial Sequence: Synthetic oligonucleotide
uaguacggaaaguuacuag

SEQ ID NO: 318593 - RNA, 19 nt, Artificial Sequence
  Description of Artificial Sequence: Synthetic oligonucleotide
aauggguucucuacauggg

SEQ ID NO: 318594 - RNA, 19 nt, Artificial Sequence
  Description of Artificial Sequence: Synthetic oligonucleotide
ucggacuuagcucaggaua

SEQ ID NO: 318595 - RNA, 19 nt, Artificial Sequence
  Description of Artificial Sequence: Synthetic oligonucleotide
aucgggauggagugaaagg

SEQ ID NO: 318596 - RNA, 19 nt, Artificial Sequence
  Description of Artificial Sequence: Synthetic oligonucleotide
  modified_base (9)..(9): a, c, u, g, unknown or other
caugaaagngcgcugcaug

SEQ ID NO: 318597 - RNA, 19 nt, Artificial Sequence
  Description of Artificial Sequence: Synthetic oligonucleotide
auacauacuccacuuacaa

SEQ ID NO: 318598 - RNA, 19 nt, Artificial Sequence
  Description of Artificial Sequence: Synthetic oligonucleotide
aaaggccuaucaaacauca

SEQ ID NO: 318599 - RNA, 19 nt, Artificial Sequence
  Description of Artificial Sequence: Synthetic oligonucleotide
aguuacaaccggcauuuug

SEQ ID NO: 318600 - RNA, 19 nt, Artificial Sequence
  Description of Artificial Sequence: Synthetic oligonucleotide
agaagauuguacaugauua

SEQ ID NO: 318601 - RNA, 19 nt, Artificial Sequence
  Description of Artificial Sequence: Synthetic oligonucleotide
aaguuacuagcuccuccuc

SEQ ID NO: 318602 - RNA, 19 nt, Artificial Sequence
  Description of Artificial Sequence: Synthetic oligonucleotide
aucagcugggaacuagagg

SEQ ID NO: 318603 - RNA, 19 nt, Artificial Sequence
  Description of Artificial Sequence: Synthetic oligonucleotide
ucuacagacucgcugcccu

SEQ ID NO: 318604 - RNA, 19 nt, Artificial Sequence
  Description of Artificial Sequence: Synthetic oligonucleotide
gaacuagaggaguuuucag

SEQ ID NO: 318605 - RNA, 19 nt, Artificial Sequence
  Description of Artificial Sequence: Synthetic oligonucleotide
ggucuuauguucuagauua

SEQ ID NO: 318606 - RNA, 19 nt, Artificial Sequence
  Description of Artificial Sequence: Synthetic oligonucleotide
caucucuagaagauuguac

SEQ ID NO: 318607 - RNA, 19 nt, Artificial Sequence
  Description of Artificial Sequence: Synthetic oligonucleotide
uucaaccugaguugcacga

SEQ ID NO: 318608 - RNA, 19 nt, Artificial Sequence
  Description of Artificial Sequence: Synthetic oligonucleotide
uaugacugcauuccuccac

SEQ ID NO: 318609 - RNA, 19 nt, Artificial Sequence
  Description of Artificial Sequence: Synthetic oligonucleotide
cauugugcucugauaaggc

SEQ ID NO: 318610 - RNA, 19 nt, Artificial Sequence
  Description of Artificial Sequence: Synthetic oligonucleotide
  modified_base (6)..(6): a, c, u, g, unknown or other
gaaccnggggcagaggagg

SEQ ID NO: 318611 - RNA, 19 nt, Artificial Sequence
  Description of Artificial Sequence: Synthetic oligonucleotide
uuuugggagcuaugcgucg

SEQ ID NO: 318612 - RNA, 19 nt, Artificial Sequence
  Description of Artificial Sequence: Synthetic oligonucleotide
cacagagaugauucaaaag

SEQ ID NO: 318613 - RNA, 19 nt, Artificial Sequence
  Description of Artificial Sequence: Synthetic oligonucleotide
uacagggauggcauauucc

SEQ ID NO: 318614 - RNA, 19 nt, Artificial Sequence
  Description of Artificial Sequence: Synthetic oligonucleotide
ugcacugcuguacagggau

SEQ ID NO: 318615 - RNA, 19 nt, Artificial Sequence
  Description of Artificial Sequence: Synthetic oligonucleotide
accuguuaguccaagggcg

SEQ ID NO: 318616 - RNA, 19 nt, Artificial Sequence
  Description of Artificial Sequence: Synthetic oligonucleotide
uagaaucccaguagaacuc

SEQ ID NO: 318617 - RNA, 19 nt, Artificial Sequence
  Description of Artificial Sequence: Synthetic oligonucleotide
gauggcauauucccaccag

SEQ ID NO: 318618 - RNA, 19 nt, Artificial Sequence
  Description of Artificial Sequence: Synthetic oligonucleotide
guauauuagcaccgacagg

SEQ ID NO: 318619 - RNA, 19 nt, Artificial Sequence
  Description of Artificial Sequence: Synthetic oligonucleotide
auuuugggagcuaugcguc

SEQ ID NO: 318620 - RNA, 19 nt, Artificial Sequence
  Description of Artificial Sequence: Synthetic oligonucleotide
auagggaauacaaagguua

SEQ ID NO: 318621 - RNA, 19 nt, Artificial Sequence
  Description of Artificial Sequence: Synthetic oligonucleotide
agugcuacagcauguugga

SEQ ID NO: 318622 - RNA, 19 nt, Artificial Sequence
  Description of Artificial Sequence: Synthetic oligonucleotide
ugaauggguucucuacaug

SEQ ID NO: 318623 - RNA, 19 nt, Artificial Sequence
  Description of Artificial Sequence: Synthetic oligonucleotide
acuauaugacugcauuccu

SEQ ID NO: 318624 - RNA, 19 nt, Artificial Sequence
  Description of Artificial Sequence: Synthetic oligonucleotide
uucuucucaaacguagaga

SEQ ID NO: 318625 - RNA, 19 nt, Artificial Sequence
  Description of Artificial Sequence: Synthetic oligonucleotide
acaggccugacaaaguggg

SEQ ID NO: 318626 - RNA, 19 nt, Artificial Sequence
  Description of Artificial Sequence: Synthetic oligonucleotide
cuauaugacugcauuccuc

SEQ ID NO: 318627 - RNA, 19 nt, Artificial Sequence
  Description of Artificial Sequence: Synthetic oligonucleotide
  modified_base (17)..(17): a, c, u, g, unknown or other
ucucuacaugggaaccngg

SEQ ID NO: 318628 - RNA, 19 nt, Artificial Sequence
  Description of Artificial Sequence: Synthetic oligonucleotide
guucuagauuauuugugac

SEQ ID NO: 318629 - RNA, 19 nt, Artificial Sequence
  Description of Artificial Sequence: Synthetic oligonucleotide
aguuacuagcuccuccucu

SEQ ID NO: 318630 - RNA, 19 nt, Artificial Sequence
  Description of Artificial Sequence: Synthetic oligonucleotide
acuacugcauagggaauac

SEQ ID NO: 318631 - RNA, 19 nt, Artificial Sequence
  Description of Artificial Sequence: Synthetic oligonucleotide
uccacgaccaagacauugu

SEQ ID NO: 318632 - RNA, 19 nt, Artificial Sequence
  Description of Artificial Sequence: Synthetic oligonucleotide
aggccuaucaaacaucaua

SEQ ID NO: 318633 - RNA, 19 nt, Artificial Sequence
  Description of Artificial Sequence: Synthetic oligonucleotide
uagggaauacaaagguuaa

SEQ ID NO: 318634 - RNA, 19 nt, Artificial Sequence
  Description of Artificial Sequence: Synthetic oligonucleotide
uacggaaaguuacuagcuc

SEQ ID NO: 318635 - RNA, 19 nt, Artificial Sequence
  Description of Artificial Sequence: Synthetic oligonucleotide
aaagugcuggggagguugc

SEQ ID NO: 318636 - RNA, 19 nt, Artificial Sequence
  Description of Artificial Sequence: Synthetic oligonucleotide
aacuaguuucaaccugagu

SEQ ID NO: 318637 - RNA, 19 nt, Artificial Sequence
  Description of Artificial Sequence: Synthetic oligonucleotide
gacagaaguuacaaccggc

SEQ ID NO: 318638 - RNA, 19 nt, Artificial Sequence
  Description of Artificial Sequence: Synthetic oligonucleotide
gucaaguaaagguuuuaca

SEQ ID NO: 318639 - RNA, 19 nt, Artificial Sequence
  Description of Artificial Sequence: Synthetic oligonucleotide
gugacagacaggcuugccc

SEQ ID NO: 318640 - RNA, 19 nt, Artificial Sequence
  Description of Artificial Sequence: Synthetic oligonucleotide
uggccucggacuuagcuca

SEQ ID NO: 318641 - RNA, 19 nt, Artificial Sequence
  Description of Artificial Sequence: Synthetic oligonucleotide
cucgggagagcucagcggc

SEQ ID NO: 318642 - RNA, 19 nt, Artificial Sequence
  Description of Artificial Sequence: Synthetic oligonucleotide
cauccagcaguggagaggc

SEQ ID NO: 318643 - RNA, 19 nt, Artificial Sequence
  Description of Artificial Sequence: Synthetic oligonucleotide
  modified_base (18)..(18): a, c, u, g, unknown or other
uucucuacaugggaaccng

SEQ ID NO: 318644 - RNA, 19 nt, Artificial Sequence
  Description of Artificial Sequence: Synthetic oligonucleotide
ucugauccugaacacgcuc

SEQ ID NO: 318645 - RNA, 19 nt, Artificial Sequence
  Description of Artificial Sequence: Synthetic oligonucleotide
gauaaggccuucuugcacu

SEQ ID NO: 318646 - RNA, 19 nt, Artificial Sequence
  Description of Artificial Sequence: Synthetic oligonucleotide
caccuguuaguccaagggc

SEQ ID NO: 318647 - RNA, 19 nt, Artificial Sequence
  Description of Artificial Sequence: Synthetic oligonucleotide
cugaguugcacgagaggcc

SEQ ID NO: 318648 - RNA, 19 nt, Artificial Sequence
  Description of Artificial Sequence: Synthetic oligonucleotide
ggccuaucaaacaucauag

SEQ ID NO: 318649 - RNA, 19 nt, Artificial Sequence
  Description of Artificial Sequence: Synthetic oligonucleotide
aggcauacuugcgacgccc

SEQ ID NO: 318650 - RNA, 19 nt, Artificial Sequence
  Description of Artificial Sequence: Synthetic oligonucleotide
aaaagucggguccccagua

SEQ ID NO: 318651 - RNA, 19 nt, Artificial Sequence
  Description of Artificial Sequence: Synthetic oligonucleotide
ugcaggcauacuugcgacg

SEQ ID NO: 318652 - RNA, 19 nt, Artificial Sequence
  Description of Artificial Sequence: Synthetic oligonucleotide
cauugcgcaugguaugagc

SEQ ID NO: 318653 - RNA, 19 nt, Artificial Sequence
  Description of Artificial Sequence: Synthetic oligonucleotide
caaagacggacacuaguuc

SEQ ID NO: 318654 - RNA, 19 nt, Artificial Sequence
  Description of Artificial Sequence: Synthetic oligonucleotide
  modified_base (6)..(6): a, c, u, g, unknown or other
gaaagngcgcugcaugcga

SEQ ID NO: 318655 - RNA, 19 nt, Artificial Sequence
  Description of Artificial Sequence: Synthetic oligonucleotide
aaacuaguuucaaccugag

SEQ ID NO: 318656 - RNA, 19 nt, Artificial Sequence
  Description of Artificial Sequence: Synthetic oligonucleotide
cccuaagagagcaaagugc

SEQ ID NO: 318657 - RNA, 19 nt, Artificial Sequence
  Description of Artificial Sequence: Synthetic oligonucleotide
guaccaguuagaaucccag

SEQ ID NO: 318658 - RNA, 19 nt, Artificial Sequence
  Description of Artificial Sequence: Synthetic oligonucleotide
uaugccgggcuacaauuaa

SEQ ID NO: 318659 - RNA, 19 nt, Artificial Sequence
  Description of Artificial Sequence: Synthetic oligonucleotide
acagggugccucuauauuu

SEQ ID NO: 318660 - RNA, 19 nt, Artificial Sequence
  Description of Artificial Sequence: Synthetic oligonucleotide
gacuccauaucaccagaac

SEQ ID NO: 318661 - RNA, 19 nt, Artificial Sequence
  Description of Artificial Sequence: Synthetic oligonucleotide
ugacuuccaacagaacuac

SEQ ID NO: 318662 - RNA, 19 nt, Artificial Sequence
  Description of Artificial Sequence: Synthetic oligonucleotide
ucucaaacguagagacuga

SEQ ID NO: 318663 - RNA, 19 nt, Artificial Sequence
  Description of Artificial Sequence: Synthetic oligonucleotide
aacuacugcauagggaaua

SEQ ID NO: 318664 - RNA, 19 nt, Artificial Sequence
  Description of Artificial Sequence: Synthetic oligonucleotide
  modified_base (5)..(5): a, c, u, g, unknown or other
aaagngcgcugcaugcgag

SEQ ID NO: 318665 - RNA, 19 nt, Artificial Sequence
  Description of Artificial Sequence: Synthetic oligonucleotide
gcaugguaugagcucaugg

SEQ ID NO: 318666 - RNA, 19 nt, Artificial Sequence
  Description of Artificial Sequence: Synthetic oligonucleotide
uccgaucgcugcuuucagg

SEQ ID NO: 318667 - RNA, 19 nt, Artificial Sequence
  Description of Artificial Sequence: Synthetic oligonucleotide
caaagugcuggggagguug

SEQ ID NO: 318668 - RNA, 19 nt, Artificial Sequence
  Description of Artificial Sequence: Synthetic oligonucleotide
gacacuaguuccugcugac

SEQ ID NO: 318669 - RNA, 19 nt, Artificial Sequence
  Description of Artificial Sequence: Synthetic oligonucleotide
aaccugaguugcacgagag

SEQ ID NO: 318670 - RNA, 19 nt, Artificial Sequence
  Description of Artificial Sequence: Synthetic oligonucleotide
ugcgcaugguaugagcuca

SEQ ID NO: 318671 - RNA, 19 nt, Artificial Sequence
  Description of Artificial Sequence: Synthetic oligonucleotide
ugaggucugcacacacugc

SEQ ID NO: 318672 - RNA, 19 nt, Artificial Sequence
  Description of Artificial Sequence: Synthetic oligonucleotide
agagaugauucaaaaguau

SEQ ID NO: 318673 - RNA, 19 nt, Artificial Sequence
  Description of Artificial Sequence: Synthetic oligonucleotide
acagaaguuacaaccggca

SEQ ID NO: 318674 - RNA, 19 nt, Artificial Sequence
  Description of Artificial Sequence: Synthetic oligonucleotide
aagacggacacuaguuccu

SEQ ID NO: 318675 - RNA, 19 nt, Artificial Sequence
  Description of Artificial Sequence: Synthetic oligonucleotide
acuacgagguagaugagau

SEQ ID NO: 318676 - RNA, 19 nt, Artificial Sequence
  Description of Artificial Sequence: Synthetic oligonucleotide
  modified_base (5)..(5): a, c, u, g, unknown or other
aaccnggggcagaggaggc

SEQ ID NO: 318677 - RNA, 19 nt, Artificial Sequence
  Description of Artificial Sequence: Synthetic oligonucleotide
agcucacgaugcucagucc

SEQ ID NO: 318678 - RNA, 19 nt, Artificial Sequence
  Description of Artificial Sequence: Synthetic oligonucleotide
agcuaugcgucgguaguac

SEQ ID NO: 318679 - RNA, 19 nt, Artificial Sequence
  Description of Artificial Sequence: Synthetic oligonucleotide
cauuuugggagcuaugcgu

SEQ ID NO: 318680 - RNA, 19 nt, Artificial Sequence
  Description of Artificial Sequence: Synthetic oligonucleotide
  modified_base (4)..(4): a, c, u, g, unknown or other
gganacaugggcagcgucc

SEQ ID NO: 318681 - RNA, 19 nt, Artificial Sequence
  Description of Artificial Sequence: Synthetic oligonucleotide
caugauuaugccgggcuac

SEQ ID NO: 318682 - RNA, 19 nt, Artificial Sequence
  Description of Artificial Sequence: Synthetic oligonucleotide
acguacagaaacaccucac

SEQ ID NO: 318683 - RNA, 19 nt, Artificial Sequence
  Description of Artificial Sequence: Synthetic oligonucleotide
uaugcgucgguaguacgga

SEQ ID NO: 318684 - RNA, 19 nt, Artificial Sequence
  Description of Artificial Sequence: Synthetic oligonucleotide
cagggugccucuauauuug

SEQ ID NO: 318685 - RNA, 19 nt, Artificial Sequence
  Description of Artificial Sequence: Synthetic oligonucleotide
ucaaccugaguugcacgag

SEQ ID NO: 318686 - RNA, 19 nt, Artificial Sequence
  Description of Artificial Sequence: Synthetic oligonucleotide
auugcgcaugguaugagcu

SEQ ID NO: 318687 - RNA, 19 nt, Artificial Sequence
  Description of Artificial Sequence: Synthetic oligonucleotide
aguaaagguuuuacagcag

SEQ ID NO: 318688 - RNA, 19 nt, Artificial Sequence
  Description of Artificial Sequence: Synthetic oligonucleotide
ucuuauguucuagauuauu

SEQ ID NO: 318689 - RNA, 19 nt, Artificial Sequence
  Description of Artificial Sequence: Synthetic oligonucleotide
auugcuaacacagcacgua

SEQ ID NO: 318690 - RNA, 19 nt, Artificial Sequence
  Description of Artificial Sequence: Synthetic oligonucleotide
uuagcaccgacagggugcc

SEQ ID NO: 318691 - RNA, 19 nt, Artificial Sequence
  Description of Artificial Sequence: Synthetic oligonucleotide
augucgccgacccugucug

SEQ ID NO: 318692 - RNA, 19 nt, Artificial Sequence
  Description of Artificial Sequence: Synthetic oligonucleotide
aggucuuauguucuagauu

SEQ ID NO: 318693 - RNA, 19 nt, Artificial Sequence
  Description of Artificial Sequence: Synthetic oligonucleotide
ggcauuuugggagcuaugc

SEQ ID NO: 318694 - RNA, 19 nt, Artificial Sequence
  Description of Artificial Sequence: Synthetic oligonucleotide
uccauaucaccagaacaaa

SEQ ID NO: 318695 - RNA, 19 nt, Artificial Sequence
  Description of Artificial Sequence: Synthetic oligonucleotide
caguagaacuccaggucac

SEQ ID NO: 318696 - RNA, 19 nt, Artificial Sequence
  Description of Artificial Sequence: Synthetic oligonucleotide
uuaugccgggcuacaauua

SEQ ID NO: 318697 - RNA, 19 nt, Artificial Sequence
  Description of Artificial Sequence: Synthetic oligonucleotide
acaaagacggacacuaguu

SEQ ID NO: 318698 - RNA, 19 nt, Artificial Sequence
  Description of Artificial Sequence: Synthetic oligonucleotide
gucugucaaagucaaguaa

SEQ ID NO: 318699 - RNA, 19 nt, Artificial Sequence
  Description of Artificial Sequence: Synthetic oligonucleotide
aagccagaccuggaaaagu

SEQ ID NO: 318700 - RNA, 19 nt, Artificial Sequence
  Description of Artificial Sequence: Synthetic oligonucleotide
agaagcuccgaucgcugcu

SEQ ID NO: 318701 - RNA, 19 nt, Artificial Sequence
  Description of Artificial Sequence: Synthetic oligonucleotide
ugacacucucaacaucaau

SEQ ID NO: 318702 - RNA, 19 nt, Artificial Sequence
  Description of Artificial Sequence: Synthetic oligonucleotide
ugcccuggaaaaggaagag

SEQ ID NO: 318703 - RNA, 19 nt, Artificial Sequence
  Description of Artificial Sequence: Synthetic oligonucleotide
cccaaauuguucuccuugg

SEQ ID NO: 318704 - RNA, 19 nt, Artificial Sequence
  Description of Artificial Sequence: Synthetic oligonucleotide
caucgggauggagugaaag

SEQ ID NO: 318705 - RNA, 19 nt, Artificial Sequence
  Description of Artificial Sequence: Synthetic oligonucleotide
uguuaguccaagggcgugu

SEQ ID NO: 318706 - RNA, 19 nt, Artificial Sequence
  Description of Artificial Sequence: Synthetic oligonucleotide
uccacccuaagagagcaaa

SEQ ID NO: 318707 - RNA, 19 nt, Artificial Sequence
  Description of Artificial Sequence: Synthetic oligonucleotide
ucguccuguggcucgggag

SEQ ID NO: 318708 - RNA, 19 nt, Artificial Sequence
  Description of Artificial Sequence: Synthetic oligonucleotide
ucaccuggacccaguguca

SEQ ID NO: 318709 - RNA, 19 nt, Artificial Sequence
  Description of Artificial Sequence: Synthetic oligonucleotide
cuugcacuuugacaggaca

SEQ ID NO: 318710 - RNA, 19 nt, Artificial Sequence
  Description of Artificial Sequence: Synthetic oligonucleotide
ucaacugcggagggccagg

SEQ ID NO: 318711 - RNA, 19 nt, Artificial Sequence
  Description of Artificial Sequence: Synthetic oligonucleotide
gaacaaagacggacacuag

SEQ ID NO: 318712 - RNA, 19 nt, Artificial Sequence
  Description of Artificial Sequence: Synthetic oligonucleotide
caccuggucaacugcggag

SEQ ID NO: 318713 - RNA, 19 nt, Artificial Sequence
  Description of Artificial Sequence: Synthetic oligonucleotide
caguuagaaucccaguaga

SEQ ID NO: 318714 - RNA, 19 nt, Artificial Sequence
  Description of Artificial Sequence: Synthetic oligonucleotide
cagaacuacugcauaggga

SEQ ID NO: 318715 - RNA, 19 nt, Artificial Sequence
  Description of Artificial Sequence: Synthetic oligonucleotide
  modified_base (12)..(12): a, c, u, g, unknown or other
cagcaugaaagngcgcugc

SEQ ID NO: 318716 - RNA, 19 nt, Artificial Sequence
  Description of Artificial Sequence: Synthetic oligonucleotide
caaccggcauuuugggagc

SEQ ID NO: 318717 - RNA, 19 nt, Artificial Sequence
  Description of Artificial Sequence: Synthetic oligonucleotide
gacuuagcucaggauacac

SEQ ID NO: 318718 - RNA, 19 nt, Artificial Sequence
  Description of Artificial Sequence: Synthetic oligonucleotide
cugcaggcucacugaaugg

SEQ ID NO: 318719 - RNA, 19 nt, Artificial Sequence
  Description of Artificial Sequence: Synthetic oligonucleotide
ugcgucgguaguacggaaa

SEQ ID NO: 318720 - RNA, 19 nt, Artificial Sequence
  Description of Artificial Sequence: Synthetic oligonucleotide
uggucuucgaguguuugua

SEQ ID NO: 318721 - RNA, 19 nt, Artificial Sequence
  Description of Artificial Sequence: Synthetic oligonucleotide
agguuuuacagcaguauuu

SEQ ID NO: 318722 - RNA, 19 nt, Artificial Sequence
  Description of Artificial Sequence: Synthetic oligonucleotide
accuggacccagugucagc

SEQ ID NO: 318723 - RNA, 19 nt, Artificial Sequence
  Description of Artificial Sequence: Synthetic oligonucleotide
guacagggauggcauauuc

SEQ ID NO: 318724 - RNA, 19 nt, Artificial Sequence
  Description of Artificial Sequence: Synthetic oligonucleotide
caagggcguguucaccugg

SEQ ID NO: 318725 - RNA, 19 nt, Artificial Sequence
  Description of Artificial Sequence: Synthetic oligonucleotide
ggcaccaaaaggccuauca

SEQ ID NO: 318726 - RNA, 19 nt, Artificial Sequence
  Description of Artificial Sequence: Synthetic oligonucleotide
acaggacuccauaucacca

SEQ ID NO: 318727 - RNA, 19 nt, Artificial Sequence
  Description of Artificial Sequence: Synthetic oligonucleotide
ugacuacgagguagaugag

SEQ ID NO: 318728 - RNA, 19 nt, Artificial Sequence
  Description of Artificial Sequence: Synthetic oligonucleotide
cugauaaggccuucuugca

SEQ ID NO: 318729 - RNA, 19 nt, Artificial Sequence
  Description of Artificial Sequence: Synthetic oligonucleotide
gacuacgagguagaugaga

SEQ ID NO: 318730 - RNA, 19 nt, Artificial Sequence
  Description of Artificial Sequence: Synthetic oligonucleotide
caaacuauaugacugcauu

SEQ ID NO: 318731 - RNA, 19 nt, Artificial Sequence
  Description of Artificial Sequence: Synthetic oligonucleotide
ugcauuccuccacccuaag

SEQ ID NO: 318732 - RNA, 19 nt, Artificial Sequence
  Description of Artificial Sequence: Synthetic oligonucleotide
gcucacgaugcucaguccc

SEQ ID NO: 318733 - RNA, 19 nt, Artificial Sequence
  Description of Artificial Sequence: Synthetic oligonucleotide
acaugauuaugccgggcua

SEQ ID NO: 318734 - RNA, 19 nt, Artificial Sequence
  Description of Artificial Sequence: Synthetic oligonucleotide
gaucgcugcuuucagggcu

SEQ ID NO: 318735 - RNA, 19 nt, Artificial Sequence
  Description of Artificial Sequence: Synthetic oligonucleotide
ggaacuagaggaguuuuca

SEQ ID NO: 318736 - RNA, 19 nt, Artificial Sequence
  Description of Artificial Sequence: Synthetic oligonucleotide
cuaaaagaggucuuauguu

SEQ ID NO: 318737 - RNA, 19 nt, Artificial Sequence
  Description of Artificial Sequence: Synthetic oligonucleotide
agccggcagucacuggugg

SEQ ID NO: 318738 - RNA, 19 nt, Artificial Sequence
  Description of Artificial Sequence: Synthetic oligonucleotide
cucaaacguagagacugac

SEQ ID NO: 318739 - RNA, 19 nt, Artificial Sequence
  Description of Artificial Sequence: Synthetic oligonucleotide
auauaguguuaaauguuuu

SEQ ID NO: 318740 - RNA, 19 nt, Artificial Sequence
  Description of Artificial Sequence: Synthetic oligonucleotide
acugcauagggaauacaaa

SEQ ID NO: 318741 - RNA, 19 nt, Artificial Sequence
  Description of Artificial Sequence: Synthetic oligonucleotide
caccuauuccacagagaug

SEQ ID NO: 318742 - RNA, 19 nt, Artificial Sequence
  Description of Artificial Sequence: Synthetic oligonucleotide
agacucgcugcccucugcu

SEQ ID NO: 318743 - RNA, 19 nt, Artificial Sequence
  Description of Artificial Sequence: Synthetic oligonucleotide
uugcgcaugguaugagcuc

SEQ ID NO: 318744 - RNA, 19 nt, Artificial Sequence
  Description of Artificial Sequence: Synthetic oligonucleotide
acaccuggucaacugcgga

SEQ ID NO: 318745 - RNA, 19 nt, Artificial Sequence
  Description of Artificial Sequence: Synthetic oligonucleotide
guggccucggacuuagcuc

SEQ ID NO: 318746 - RNA, 19 nt, Artificial Sequence
  Description of Artificial Sequence: Synthetic oligonucleotide
cagggcuuuaauauagugu

SEQ ID NO: 318747 - RNA, 19 nt, Artificial Sequence
  Description of Artificial Sequence: Synthetic oligonucleotide
ugcucuuguugagaaaauu

SEQ ID NO: 318748 - RNA, 19 nt, Artificial Sequence
  Description of Artificial Sequence: Synthetic oligonucleotide
uugggaggucacaucgcuc

SEQ ID NO: 318749 - RNA, 19 nt, Artificial Sequence
  Description of Artificial Sequence: Synthetic oligonucleotide
gacaucgggauggagugaa

SEQ ID NO: 318750 - RNA, 19 nt, Artificial Sequence
  Description of Artificial Sequence: Synthetic oligonucleotide
gauuaugccgggcuacaau

SEQ ID NO: 318751 - RNA, 19 nt, Artificial Sequence
  Description of Artificial Sequence: Synthetic oligonucleotide
gguucucuacaugggaacc

SEQ ID NO: 318752 - RNA, 19 nt, Artificial Sequence
  Description of Artificial Sequence: Synthetic oligonucleotide
accaguauauuagcaccga

SEQ ID NO: 318753 - RNA, 19 nt, Artificial Sequence
  Description of Artificial Sequence: Synthetic oligonucleotide
aucccauugcgcaugguau

SEQ ID NO: 318754 - RNA, 19 nt, Artificial Sequence
  Description of Artificial Sequence: Synthetic oligonucleotide
aguugcacgagaggccaug

SEQ ID NO: 318755 - RNA, 19 nt, Artificial Sequence
  Description of Artificial Sequence: Synthetic oligonucleotide
auacuccacuuacaaguuu

SEQ ID NO: 318756 - RNA, 19 nt, Artificial Sequence
  Description of Artificial Sequence: Synthetic oligonucleotide
ccugcuuacacguaaguua

SEQ ID NO: 318757 - RNA, 19 nt, Artificial Sequence
  Description of Artificial Sequence: Synthetic oligonucleotide
gggagcuaugcgucgguag

SEQ ID NO: 318758 - RNA, 19 nt, Artificial Sequence
  Description of Artificial Sequence: Synthetic oligonucleotide
gaugucgccgacccugucu

SEQ ID NO: 318759 - RNA, 19 nt, Artificial Sequence
  Description of Artificial Sequence: Synthetic oligonucleotide
  modified_base (19)..(19): a, c, u, g, unknown or other
guucucuacaugggaaccn

SEQ ID NO: 318760 - RNA, 19 nt, Artificial Sequence
  Description of Artificial Sequence: Synthetic oligonucleotide
  modified_base (3)..(3): a, c, u, g, unknown or other
ganacaugggcagcguccu

SEQ ID NO: 318761 - RNA, 19 nt, Artificial Sequence
  Description of Artificial Sequence: Synthetic oligonucleotide
gcgucgguaguacggaaag

SEQ ID NO: 318762 - RNA, 19 nt, Artificial Sequence
  Description of Artificial Sequence: Synthetic oligonucleotide
ugucaucggugcucugacu

SEQ ID NO: 318763 - RNA, 19 nt, Artificial Sequence
  Description of Artificial Sequence: Synthetic oligonucleotide
ugcaugcgagcacucugau

SEQ ID NO: 318764 - RNA, 19 nt, Artificial Sequence
  Description of Artificial Sequence: Synthetic oligonucleotide
gcuaugcgucgguaguacg

SEQ ID NO: 318765 - RNA, 19 nt, Artificial Sequence
  Description of Artificial Sequence: Synthetic oligonucleotide
auacaccuguuaguccaag

SEQ ID NO: 318766 - RNA, 19 nt, Artificial Sequence
  Description of Artificial Sequence: Synthetic oligonucleotide
uuaguccaagggcguguuc

SEQ ID NO: 318767 - RNA, 19 nt, Artificial Sequence
  Description of Artificial Sequence: Synthetic oligonucleotide
ccuaagagagcaaagugcu

SEQ ID NO: 318768 - RNA, 19 nt, Artificial Sequence
  Description of Artificial Sequence: Synthetic oligonucleotide
  modified_base (3)..(3): a, c, u, g, unknown or other
agngcgcugcaugcgagca

SEQ ID NO: 318769 - RNA, 19 nt, Artificial Sequence
  Description of Artificial Sequence: Synthetic oligonucleotide
ugauuaugccgggcuacaa

SEQ ID NO: 318770 - RNA, 19 nt, Artificial Sequence
  Description of Artificial Sequence: Synthetic oligonucleotide
guaguacggaaaguuacua

SEQ ID NO: 318771 - RNA, 19 nt, Artificial Sequence
  Description of Artificial Sequence: Synthetic oligonucleotide
uguggaugucgccgacccu

SEQ ID NO: 318772 - RNA, 19 nt, Artificial Sequence
  Description of Artificial Sequence: Synthetic oligonucleotide
cugcaugcgagcacucuga

SEQ ID NO: 318773 - RNA, 19 nt, Artificial Sequence
  Description of Artificial Sequence: Synthetic oligonucleotide
gcugcaugcgagcacucug

SEQ ID NO: 318774 - RNA, 19 nt, Artificial Sequence
  Description of Artificial Sequence: Synthetic oligonucleotide
  modified_base (7)..(7): a, c, u, g, unknown or other
ggaaccnggggcagaggag

SEQ ID NO: 318775 - RNA, 19 nt, Artificial Sequence
  Description of Artificial Sequence: Synthetic oligonucleotide
agacugacuacgagguaga

SEQ ID NO: 318776 - RNA, 19 nt, Artificial Sequence
  Description of Artificial Sequence: Synthetic oligonucleotide
auauuagcaccgacagggu

SEQ ID NO: 318777 - RNA, 19 nt, Artificial Sequence
  Description of Artificial Sequence: Synthetic oligonucleotide
gcacgagaggccauguugc

SEQ ID NO: 318778 - RNA, 19 nt, Artificial Sequence
  Description of Artificial Sequence: Synthetic oligonucleotide
ugcgagcacucugauccug

SEQ ID NO: 318779 - RNA, 19 nt, Artificial Sequence
  Description of Artificial Sequence: Synthetic oligonucleotide
  modified_base (8)..(8): a, c, u, g, unknown or other
gggaaccnggggcagagga

SEQ ID NO: 318780 - RNA, 19 nt, Artificial Sequence
  Description of Artificial Sequence: Synthetic oligonucleotide
guacggaaaguuacuagcu

SEQ ID NO: 318781 - RNA, 19 nt, Artificial Sequence
  Description of Artificial Sequence: Synthetic oligonucleotide
gcucgggagagcucagcgg

SEQ ID NO: 318782 - RNA, 19 nt, Artificial Sequence
  Description of Artificial Sequence: Synthetic oligonucleotide
  modified_base (2)..(2): a, c, u, g, unknown or other
anacaugggcagcguccuu

SEQ ID NO: 318783 - RNA, 19 nt, Artificial Sequence
  Description of Artificial Sequence: Synthetic oligonucleotide
cggacuuagcucaggauac

SEQ ID NO: 318784 - RNA, 19 nt, Artificial Sequence
  Description of Artificial Sequence: Synthetic oligonucleotide
agacggacacuaguuccug

SEQ ID NO: 318785 - RNA, 19 nt, Artificial Sequence
  Description of Artificial Sequence: Synthetic oligonucleotide
ggucuucgaguguuuguac

SEQ ID NO: 318786 - RNA, 19 nt, Artificial Sequence
  Description of Artificial Sequence: Synthetic oligonucleotide
agaugagauuccaggucca

SEQ ID NO: 318787 - RNA, 19 nt, Artificial Sequence
  Description of Artificial Sequence: Synthetic oligonucleotide
gucaacugcggagggccag

SEQ ID NO: 318788 - RNA, 19 nt, Artificial Sequence
  Description of Artificial Sequence: Synthetic oligonucleotide
cuccgaucgcugcuuucag

SEQ ID NO: 318789 - RNA, 19 nt, Artificial Sequence
  Description of Artificial Sequence: Synthetic oligonucleotide
caggcauacuugcgacgcc

SEQ ID NO: 318790 - RNA, 19 nt, Artificial Sequence
  Description of Artificial Sequence: Synthetic oligonucleotide
  modified_base (9)..(9): a, c, u, g, unknown or other
ugggaaccnggggcagagg

SEQ ID NO: 318791 - RNA, 19 nt, Artificial Sequence
  Description of Artificial Sequence: Synthetic oligonucleotide
cuguuaguccaagggcgug

SEQ ID NO: 318792 - RNA, 19 nt, Artificial Sequence
  Description of Artificial Sequence: Synthetic oligonucleotide
cuuggacaucgggauggag

SEQ ID NO: 318793 - RNA, 19 nt, Artificial Sequence
  Description of Artificial Sequence: Synthetic oligonucleotide
agccaucccauugcgcaug

SEQ ID NO: 318794 - RNA, 19 nt, Artificial Sequence
  Description of Artificial Sequence: Synthetic oligonucleotide
ccauguugccagcacugcc

SEQ ID NO: 318795 - RNA, 19 nt, Artificial Sequence
  Description of Artificial Sequence: Synthetic oligonucleotide
ucggguccccaguaccagu

SEQ ID NO: 318796 - RNA, 19 nt, Artificial Sequence
  Description of Artificial Sequence: Synthetic oligonucleotide
ucgcucacuucguccugug

SEQ ID NO: 318797 - RNA, 19 nt, Artificial Sequence
  Description of Artificial Sequence: Synthetic oligonucleotide
augccgggcuacaauuaag

SEQ ID NO: 318798 - RNA, 19 nt, Artificial Sequence
  Description of Artificial Sequence: Synthetic oligonucleotide
aucgcugcuuucagggcug

SEQ ID NO: 318799 - RNA, 19 nt, Artificial Sequence
  Description of Artificial Sequence: Synthetic oligonucleotide
gccgggcuacaauuaaggc

SEQ ID NO: 318800 - RNA, 19 nt, Artificial Sequence
  Description of Artificial Sequence: Synthetic oligonucleotide
cuugggaggucacaucgcu

SEQ ID NO: 318801 - RNA, 19 nt, Artificial Sequence
  Description of Artificial Sequence: Synthetic oligonucleotide
gacccugucugugcuggac

SEQ ID NO: 318802 - RNA, 19 nt, Artificial Sequence
  Description of Artificial Sequence: Synthetic oligonucleotide
cauugcuaacacagcacgu

SEQ ID NO: 318803 - RNA, 19 nt, Artificial Sequence
  Description of Artificial Sequence: Synthetic oligonucleotide
gacugcaacuuggacuaaa

SEQ ID NO: 318804 - RNA, 19 nt, Artificial Sequence
  Description of Artificial Sequence: Synthetic oligonucleotide
cacacuugaggcaggcaua

SEQ ID NO: 318805 - RNA, 19 nt, Artificial Sequence
  Description of Artificial Sequence: Synthetic oligonucleotide
  modified_base (2)..(2): a, c, u, g, unknown or other
gngcgcugcaugcgagcac

SEQ ID NO: 318806 - RNA, 19 nt, Artificial Sequence
  Description of Artificial Sequence: Synthetic oligonucleotide
gcuuacacguaaguuaugu

SEQ ID NO: 318807 - RNA, 19 nt, Artificial Sequence
  Description of Artificial Sequence: Synthetic oligonucleotide
cccuccacgaccaagacau

SEQ ID NO: 318808 - RNA, 19 nt, Artificial Sequence
  Description of Artificial Sequence: Synthetic oligonucleotide
uugcacgagaggccauguu

SEQ ID NO: 318809 - RNA, 19 nt, Artificial Sequence
  Description of Artificial Sequence: Synthetic oligonucleotide
  modified_base (5)..(5): a, c, u, g, unknown or other
ggganacaugggcagcguc

SEQ ID NO: 318810 - RNA, 19 nt, Artificial Sequence
  Description of Artificial Sequence: Synthetic oligonucleotide
accgacagggugccucuau

SEQ ID NO: 318811 - RNA, 19 nt, Artificial Sequence
  Description of Artificial Sequence: Synthetic oligonucleotide
acguagagacugacuacga

SEQ ID NO: 318812 - RNA, 19 nt, Artificial Sequence
  Description of Artificial Sequence: Synthetic oligonucleotide
augcgagcacucugauccu

SEQ ID NO: 318813 - RNA, 19 nt, Artificial Sequence
  Description of Artificial Sequence: Synthetic oligonucleotide
auucccaccagaggaugua

SEQ ID NO: 318814 - RNA, 19 nt, Artificial Sequence
  Description of Artificial Sequence: Synthetic oligonucleotide
ccacccuaagagagcaaag

SEQ ID NO: 318815 - RNA, 19 nt, Artificial Sequence
  Description of Artificial Sequence: Synthetic oligonucleotide
aaggccuaucaaacaucau

SEQ ID NO: 318816 - RNA, 19 nt, Artificial Sequence
  Description of Artificial Sequence: Synthetic oligonucleotide
gucggguccccaguaccag

SEQ ID NO: 318817 - RNA, 19 nt, Artificial Sequence
  Description of Artificial Sequence: Synthetic oligonucleotide
agaggccauguugccagca

SEQ ID NO: 318818 - RNA, 19 nt, Artificial Sequence
  Description of Artificial Sequence: Synthetic oligonucleotide
gacagggugccucuauauu

SEQ ID NO: 318819 - RNA, 19 nt, Artificial Sequence
  Description of Artificial Sequence: Synthetic oligonucleotide
caucgcucacuucguccug

SEQ ID NO: 318820 - RNA, 19 nt, Artificial Sequence
  Description of Artificial Sequence: Synthetic oligonucleotide
cauacuccacuuacaaguu

SEQ ID NO: 318821 - RNA, 19 nt, Artificial Sequence
  Description of Artificial Sequence: Synthetic oligonucleotide
gcacucugauccugaacac

SEQ ID NO: 318822 - RNA, 19 nt, Artificial Sequence
  Description of Artificial Sequence: Synthetic oligonucleotide
acuccacuuacaaguuuau

SEQ ID NO: 318823 - RNA, 19 nt, Artificial Sequence
  Description of Artificial Sequence: Synthetic oligonucleotide
ggagcuaugcgucgguagu

SEQ ID NO: 318824 - RNA, 19 nt, Artificial Sequence
  Description of Artificial Sequence: Synthetic oligonucleotide
caaaagucggguccccagu

SEQ ID NO: 318825 - RNA, 19 nt, Artificial Sequence
  Description of Artificial Sequence: Synthetic oligonucleotide
ccuggucaacugcggaggg

SEQ ID NO: 318826 - RNA, 19 nt, Artificial Sequence
  Description of Artificial Sequence: Synthetic oligonucleotide
cuuacacguaaguuauguu

SEQ ID NO: 318827 - RNA, 19 nt, Artificial Sequence
  Description of Artificial Sequence: Synthetic oligonucleotide
gguaguacggaaaguuacu

SEQ ID NO: 318828 - RNA, 19 nt, Artificial Sequence
  Description of Artificial Sequence: Synthetic oligonucleotide
augcgucgguaguacggaa

SEQ ID NO: 318829 - RNA, 19 nt, Artificial Sequence
  Description of Artificial Sequence: Synthetic oligonucleotide
ccacuuacaaguuuauuuu

SEQ ID NO: 318830 - RNA, 19 nt, Artificial Sequence
  Description of Artificial Sequence: Synthetic oligonucleotide
cagaaguuacaaccggcau

SEQ ID NO: 318831 - RNA, 19 nt, Artificial Sequence
  Description of Artificial Sequence: Synthetic oligonucleotide
caacugcggagggccaggc

SEQ ID NO: 318832 - RNA, 19 nt, Artificial Sequence
  Description of Artificial Sequence: Synthetic oligonucleotide
cagcggcuccgacuucacc

SEQ ID NO: 318833 - RNA, 19 nt, Artificial Sequence
  Description of Artificial Sequence: Synthetic oligonucleotide
ugggagcuaugcgucggua

SEQ ID NO: 318834 - RNA, 19 nt, Artificial Sequence
  Description of Artificial Sequence: Synthetic oligonucleotide
cauuugugacagacaggcu

SEQ ID NO: 318835 - RNA, 19 nt, Artificial Sequence
  Description of Artificial Sequence: Synthetic oligonucleotide
aaguuacaaccggcauuuu

SEQ ID NO: 318836 - RNA, 19 nt, Artificial Sequence
  Description of Artificial Sequence: Synthetic oligonucleotide
gcuccgaucgcugcuuuca

SEQ ID NO: 318837 - RNA, 19 nt, Artificial Sequence
  Description of Artificial Sequence: Synthetic oligonucleotide
cuucguccuguggcucggg

SEQ ID NO: 318838 - RNA, 19 nt, Artificial Sequence
  Description of Artificial Sequence: Synthetic oligonucleotide
gcaccaagucaccugcuua

SEQ ID NO: 318839 - RNA, 19 nt, Artificial Sequence
  Description of Artificial Sequence: Synthetic oligonucleotide
gaacuacugcauagggaau

SEQ ID NO: 318840 - RNA, 19 nt, Artificial Sequence
  Description of Artificial Sequence: Synthetic oligonucleotide
  modified_base (11)..(11): a, c, u, g, unknown or other
caugggaaccnggggcaga

SEQ ID NO: 318841 - RNA, 19 nt, Artificial Sequence
  Description of Artificial Sequence: Synthetic oligonucleotide
gcuccugacagaaguuaca

SEQ ID NO: 318842 - RNA, 19 nt, Artificial Sequence
  Description of Artificial Sequence: Synthetic oligonucleotide
gcaugcgagcacucugauc

SEQ ID NO: 318843 - RNA, 19 nt, Artificial Sequence
  Description of Artificial Sequence: Synthetic oligonucleotide
ccaagggcguguucaccug

SEQ ID NO: 318844 - RNA, 19 nt, Artificial Sequence
  Description of Artificial Sequence: Synthetic oligonucleotide
ggccugacaaagugggagu

SEQ ID NO: 318845 - RNA, 19 nt, Artificial Sequence
  Description of Artificial Sequence: Synthetic oligonucleotide
gggaggucacaucgcucac

SEQ ID NO: 318846 - RNA, 19 nt, Artificial Sequence
  Description of Artificial Sequence: Synthetic oligonucleotide
cagaccuggaaaaguccau

SEQ ID NO: 318847 - RNA, 19 nt, Artificial Sequence
  Description of Artificial Sequence: Synthetic oligonucleotide
ugacugcaacuuggacuaa

SEQ ID NO: 318848 - RNA, 19 nt, Artificial Sequence
  Description of Artificial Sequence: Synthetic oligonucleotide
ggacuuagcucaggauaca

SEQ ID NO: 318849 - RNA, 19 nt, Artificial Sequence
  Description of Artificial Sequence: Synthetic oligonucleotide
gaagcuccgaucgcugcuu

SEQ ID NO: 318850 - RNA, 19 nt, Artificial Sequence
  Description of Artificial Sequence: Synthetic oligonucleotide
cucggacuuagcucaggau

SEQ ID NO: 318851 - RNA, 19 nt, Artificial Sequence
  Description of Artificial Sequence: Synthetic oligonucleotide
cgaucgcugcuuucagggc

SEQ ID NO: 318852 - RNA, 19 nt, Artificial Sequence
  Description of Artificial Sequence: Synthetic oligonucleotide
ucgcugcuuucagggcuga

SEQ ID NO: 318853 - RNA, 19 nt, Artificial Sequence
  Description of Artificial Sequence: Synthetic oligonucleotide
guugcacgagaggccaugu

SEQ ID NO: 318854 - RNA, 19 nt, Artificial Sequence
  Description of Artificial Sequence: Synthetic oligonucleotide
aggccaaccucaggauuuu

SEQ ID NO: 318855 - RNA, 19 nt, Artificial Sequence
  Description of Artificial Sequence: Synthetic oligonucleotide
ccucggacuuagcucagga

SEQ ID NO: 318856 - RNA, 19 nt, Artificial Sequence
  Description of Artificial Sequence: Synthetic oligonucleotide
ccauugcgcaugguaugag

SEQ ID NO: 318857 - RNA, 19 nt, Artificial Sequence
  Description of Artificial Sequence: Synthetic oligonucleotide
cgaccaagacauugugcuc

SEQ ID NO: 318858 - RNA, 19 nt, Artificial Sequence
  Description of Artificial Sequence: Synthetic oligonucleotide
  modified_base (10)..(10): a, c, u, g, unknown or other
gcaugaaagngcgcugcau

SEQ ID NO: 318859 - RNA, 19 nt, Artificial Sequence
  Description of Artificial Sequence: Synthetic oligonucleotide
guuaguccaagggcguguu

SEQ ID NO: 318860 - RNA, 19 nt, Artificial Sequence
  Description of Artificial Sequence: Synthetic oligonucleotide
cuacgagguagaugagauu

SEQ ID NO: 318861 - RNA, 19 nt, Artificial Sequence
  Description of Artificial Sequence: Synthetic oligonucleotide
agucaccugcuuacacgua

SEQ ID NO: 318862 - RNA, 19 nt, Artificial Sequence
  Description of Artificial Sequence: Synthetic oligonucleotide
gucuuauguucuagauuau

SEQ ID NO: 318863 - RNA, 19 nt, Artificial Sequence
  Description of Artificial Sequence: Synthetic oligonucleotide
cccauugcgcaugguauga

SEQ ID NO: 318864 - RNA, 19 nt, Artificial Sequence
  Description of Artificial Sequence: Synthetic oligonucleotide
gccucggacuuagcucagg

SEQ ID NO: 318865 - RNA, 19 nt, Artificial Sequence
  Description of Artificial Sequence: Synthetic oligonucleotide
ccuguuaguccaagggcgu

SEQ ID NO: 318866 - RNA, 19 nt, Artificial Sequence
  Description of Artificial Sequence: Synthetic oligonucleotide
gacugacuacgagguagau

SEQ ID NO: 318867 - RNA, 19 nt, Artificial Sequence
  Description of Artificial Sequence: Synthetic oligonucleotide
cuguuuugaccaguauauu

SEQ ID NO: 318868 - RNA, 19 nt, Artificial Sequence
  Description of Artificial Sequence: Synthetic oligonucleotide
gguaaggggccgucacccu

SEQ ID NO: 318869 - RNA, 19 nt, Artificial Sequence
  Description of Artificial Sequence: Synthetic oligonucleotide
cuccgacuucaccaccacu

SEQ ID NO: 318870 - RNA, 19 nt, Artificial Sequence
  Description of Artificial Sequence: Synthetic oligonucleotide
ggacaucgggauggaguga

SEQ ID NO: 318871 - RNA, 19 nt, Artificial Sequence
  Description of Artificial Sequence: Synthetic oligonucleotide
cggcauuuugggagcuaug

SEQ ID NO: 318872 - RNA, 19 nt, Artificial Sequence
  Description of Artificial Sequence: Synthetic oligonucleotide
cagccaucccauugcgcau

SEQ ID NO: 318873 - RNA, 19 nt, Artificial Sequence
  Description of Artificial Sequence: Synthetic oligonucleotide
ccccuccacgaccaagaca

SEQ ID NO: 318874 - RNA, 19 nt, Artificial Sequence
  Description of Artificial Sequence: Synthetic oligonucleotide
gcguguucaccuggaccca

SEQ ID NO: 318875 - RNA, 19 nt, Artificial Sequence
  Description of Artificial Sequence: Synthetic oligonucleotide
gaguugcacgagaggccau

SEQ ID NO: 318876 - RNA, 19 nt, Artificial Sequence
  Description of Artificial Sequence: Synthetic oligonucleotide
ggccaaccucaggauuuuc

SEQ ID NO: 318877 - RNA, 19 nt, Artificial Sequence
  Description of Artificial Sequence: Synthetic oligonucleotide
  modified_base (6)..(6): a, c, u, g, unknown or other
gggganacaugggcagcgu

SEQ ID NO: 318878 - RNA, 19 nt, Artificial Sequence
  Description of Artificial Sequence: Synthetic oligonucleotide
gcccuggguccaguuuccc

SEQ ID NO: 318879 - RNA, 19 nt, Artificial Sequence
  Description of Artificial Sequence: Synthetic oligonucleotide
ccgacagggugccucuaua

SEQ ID NO: 318880 - RNA, 19 nt, Artificial Sequence
  Description of Artificial Sequence: Synthetic oligonucleotide
gccggcagucacugguggu

SEQ ID NO: 318881 - RNA, 19 nt, Artificial Sequence
  Description of Artificial Sequence: Synthetic oligonucleotide
gggcaccaaaaggccuauc

SEQ ID NO: 318882 - RNA, 19 nt, Artificial Sequence
  Description of Artificial Sequence: Synthetic oligonucleotide
ccggcauuuugggagcuau

SEQ ID NO: 318883 - RNA, 19 nt, Artificial Sequence
  Description of Artificial Sequence: Synthetic oligonucleotide
caccgacagggugccucua

SEQ ID NO: 318884 - RNA, 19 nt, Artificial Sequence
  Description of Artificial Sequence: Synthetic oligonucleotide
gcgcugcaugcgagcacuc

SEQ ID NO: 318885 - RNA, 19 nt, Artificial Sequence
  Description of Artificial Sequence: Synthetic oligonucleotide
gcgcaugguaugagcucau

SEQ ID NO: 318886 - RNA, 19 nt, Artificial Sequence
  Description of Artificial Sequence: Synthetic oligonucleotide
cgucgguaguacggaaagu

SEQ ID NO: 318887 - RNA, 19 nt, Artificial Sequence
  Description of Artificial Sequence: Synthetic oligonucleotide
cgccgacccugucugugcu

SEQ ID NO: 318888 - RNA, 19 nt, Artificial Sequence
  Description of Artificial Sequence: Synthetic oligonucleotide
aaaugguccaucuucacgc

SEQ ID NO: 318889 - RNA, 19 nt, Artificial Sequence
  Description of Artificial Sequence: Synthetic oligonucleotide
aagaucauaucaaagaccc

SEQ ID NO: 318890 - RNA, 19 nt, Artificial Sequence
  Description of Artificial Sequence: Synthetic oligonucleotide
ucuaccaugacuugaaagg

SEQ ID NO: 318891 - RNA, 19 nt, Artificial Sequence
  Description of Artificial Sequence: Synthetic oligonucleotide
uauaguguggauaugaaac

SEQ ID NO: 318892 - RNA, 19 nt, Artificial Sequence
  Description of Artificial Sequence: Synthetic oligonucleotide
aaugcauccaauuuaaaua

SEQ ID NO: 318893 - RNA, 19 nt, Artificial Sequence
  Description of Artificial Sequence: Synthetic oligonucleotide
acuucuuuaagacaaggag

SEQ ID NO: 318894 - RNA, 19 nt, Artificial Sequence
  Description of Artificial Sequence: Synthetic oligonucleotide
aaucaugucuggccgauac

SEQ ID NO: 318895 - RNA, 19 nt, Artificial Sequence
  Description of Artificial Sequence: Synthetic oligonucleotide
aaauaugaccucugauccc

SEQ ID NO: 318896 - RNA, 19 nt, Artificial Sequence
  Description of Artificial Sequence: Synthetic oligonucleotide
aauuuaaauaaaccccucu

SEQ ID NO: 318897 - RNA, 19 nt, Artificial Sequence
  Description of Artificial Sequence: Synthetic oligonucleotide
agccacuuuaaauaugacc

SEQ ID NO: 318898 - RNA, 19 nt, Artificial Sequence
  Description of Artificial Sequence: Synthetic oligonucleotide
uuuccgaagacccauguca

SEQ ID NO: 318899 - RNA, 19 nt, Artificial Sequence
  Description of Artificial Sequence: Synthetic oligonucleotide
ucgcaaauaaauauuucag

SEQ ID NO: 318900 - RNA, 19 nt, Artificial Sequence
  Description of Artificial Sequence: Synthetic oligonucleotide
aaccucguaggcuuguagc

SEQ ID NO: 318901 - RNA, 19 nt, Artificial Sequence
  Description of Artificial Sequence: Synthetic oligonucleotide
aauaaaccccucucagucg

SEQ ID NO: 318902 - RNA, 19 nt, Artificial Sequence
  Description of Artificial Sequence: Synthetic oligonucleotide
ugacuugaaaggaugagca

SEQ ID NO: 318903 - RNA, 19 nt, Artificial Sequence
  Description of Artificial Sequence: Synthetic oligonucleotide
aucgauaaguucuucuugg

SEQ ID NO: 318904 - RNA, 19 nt, Artificial Sequence
  Description of Artificial Sequence: Synthetic oligonucleotide
aguaacgaucaaugcaucc

SEQ ID NO: 318905 - RNA, 19 nt, Artificial Sequence
  Description of Artificial Sequence: Synthetic oligonucleotide
ucaguaacgaucaaugcau

SEQ ID NO: 318906 - RNA, 19 nt, Artificial Sequence
  Description of Artificial Sequence: Synthetic oligonucleotide
aaagacccuggcuacaaag

SEQ ID NO: 318907 - RNA, 19 nt, Artificial Sequence
  Description of Artificial Sequence: Synthetic oligonucleotide
aaucgauaaguucuucuug

SEQ ID NO: 318908 - RNA, 19 nt, Artificial Sequence
  Description of Artificial Sequence: Synthetic oligonucleotide
cugauuaaggccuggacag

SEQ ID NO: 318909 - RNA, 19 nt, Artificial Sequence
  Description of Artificial Sequence: Synthetic oligonucleotide
acauuuaucuaccaugacu

SEQ ID NO: 318910 - RNA, 19 nt, Artificial Sequence
  Description of Artificial Sequence: Synthetic oligonucleotide
uggacaucauuucaauagg

SEQ ID NO: 318911 - RNA, 19 nt, Artificial Sequence
  Description of Artificial Sequence: Synthetic oligonucleotide
ugugguuacuucuuuaaga

SEQ ID NO: 318912 - RNA, 19 nt, Artificial Sequence
  Description of Artificial Sequence: Synthetic oligonucleotide
auaaucaagcuucaggcgu

SEQ ID NO: 318913 - RNA, 19 nt, Artificial Sequence
  Description of Artificial Sequence: Synthetic oligonucleotide
aaugacucaggguguuggc

SEQ ID NO: 318914 - RNA, 19 nt, Artificial Sequence
  Description of Artificial Sequence: Synthetic oligonucleotide
uaagugacccuauagugug

SEQ ID NO: 318915 - RNA, 19 nt, Artificial Sequence
  Description of Artificial Sequence: Synthetic oligonucleotide
aacaccgugagaaaccagg

SEQ ID NO: 318916 - RNA, 19 nt, Artificial Sequence
  Description of Artificial Sequence: Synthetic oligonucleotide
agucaguaacgaucaaugc

SEQ ID NO: 318917 - RNA, 19 nt, Artificial Sequence
  Description of Artificial Sequence: Synthetic oligonucleotide
augacuugaaaggaugagc

SEQ ID NO: 318918 - RNA, 19 nt, Artificial Sequence
  Description of Artificial Sequence: Synthetic oligonucleotide
ugcuuggggagucacaugc

SEQ ID NO: 318919 - RNA, 19 nt, Artificial Sequence
  Description of Artificial Sequence: Synthetic oligonucleotide
auaugaaacucgcaaauaa

SEQ ID NO: 318920 - RNA, 19 nt, Artificial Sequence
  Description of Artificial Sequence: Synthetic oligonucleotide
accgugagaaaccagggag

SEQ ID NO: 318921 - RNA, 19 nt, Artificial Sequence
  Description of Artificial Sequence: Synthetic oligonucleotide
auacuguuuccgaagaccc

SEQ ID NO: 318922 - RNA, 19 nt, Artificial Sequence
  Description of Artificial Sequence: Synthetic oligonucleotide
uguaaagugacagcugacc

SEQ ID NO: 318923 - RNA, 19 nt, Artificial Sequence
  Description of Artificial Sequence: Synthetic oligonucleotide
aaagguucgcccaagguca

SEQ ID NO: 318924 - RNA, 19 nt, Artificial Sequence
  Description of Artificial Sequence: Synthetic oligonucleotide
uguguaaaagacgaguuuc

SEQ ID NO: 318925 - RNA, 19 nt, Artificial Sequence
  Description of Artificial Sequence: Synthetic oligonucleotide
ucagucaccgguagauucg

SEQ ID NO: 318926 - RNA, 19 nt, Artificial Sequence
  Description of Artificial Sequence: Synthetic oligonucleotide
aaaugccugccacaaagcu

SEQ ID NO: 318927 - RNA, 19 nt, Artificial Sequence
  Description of Artificial Sequence: Synthetic oligonucleotide
cuuagcauuugccaccugc

SEQ ID NO: 318928 - RNA, 19 nt, Artificial Sequence
  Description of Artificial Sequence: Synthetic oligonucleotide
uaccucaugaguuuucucu

SEQ ID NO: 318929 - RNA, 19 nt, Artificial Sequence
  Description of Artificial Sequence: Synthetic oligonucleotide
uuuggaucuuagcauuugc

SEQ ID NO: 318930 - RNA, 19 nt, Artificial Sequence
  Description of Artificial Sequence: Synthetic oligonucleotide
ugaaacucgcaaauaaaua

SEQ ID NO: 318931 - RNA, 19 nt, Artificial Sequence
  Description of Artificial Sequence: Synthetic oligonucleotide
uuaucuaccaugacuugaa

SEQ ID NO: 318932 - RNA, 19 nt, Artificial Sequence
  Description of Artificial Sequence: Synthetic oligonucleotide
ucgcccaaggucaaugagg

SEQ ID NO: 318933 - RNA, 19 nt, Artificial Sequence
  Description of Artificial Sequence: Synthetic oligonucleotide
agcaaaucauucucagagg

SEQ ID NO: 318934 - RNA, 19 nt, Artificial Sequence
  Description of Artificial Sequence: Synthetic oligonucleotide
uacuucuuuaagacaagga

SEQ ID NO: 318935 - RNA, 19 nt, Artificial Sequence
  Description of Artificial Sequence: Synthetic oligonucleotide
aucuaccaugacuugaaag

SEQ ID NO: 318936 - RNA, 19 nt, Artificial Sequence
  Description of Artificial Sequence: Synthetic oligonucleotide
uugcguaagcugcuguugg

SEQ ID NO: 318937 - RNA, 19 nt, Artificial Sequence
  Description of Artificial Sequence: Synthetic oligonucleotide
gaugcguuggaaagguucg

SEQ ID NO: 318938 - RNA, 19 nt, Artificial Sequence
  Description of Artificial Sequence: Synthetic oligonucleotide
caaaugguccaucuucacg

SEQ ID NO: 318939 - RNA, 19 nt, Artificial Sequence
  Description of Artificial Sequence: Synthetic oligonucleotide
aaagacgaguuucuucagu

SEQ ID NO: 318940 - RNA, 19 nt, Artificial Sequence
  Description of Artificial Sequence: Synthetic oligonucleotide
guauccuacuuccuggucc

SEQ ID NO: 318941 - RNA, 19 nt, Artificial Sequence
  Description of Artificial Sequence: Synthetic oligonucleotide
uccaauuuauccauucuuu

SEQ ID NO: 318942 - RNA, 19 nt, Artificial Sequence
  Description of Artificial Sequence: Synthetic oligonucleotide
cucagcuagaaauuuccag

SEQ ID NO: 318943 - RNA, 19 nt, Artificial Sequence
  Description of Artificial Sequence: Synthetic oligonucleotide
aagguacauuuauucaugu

SEQ ID NO: 318944 - RNA, 19 nt, Artificial Sequence
  Description of Artificial Sequence: Synthetic oligonucleotide
cucgcaaauaaauauuuca

SEQ ID NO: 318945 - RNA, 19 nt, Artificial Sequence
  Description of Artificial Sequence: Synthetic oligonucleotide
auaguguggauaugaaacu

SEQ ID NO: 318946 - RNA, 19 nt, Artificial Sequence
  Description of Artificial Sequence: Synthetic oligonucleotide
aagacgaguuucuucagua

SEQ ID NO: 318947 - RNA, 19 nt, Artificial Sequence
  Description of Artificial Sequence: Synthetic oligonucleotide
cagaaucaagggcuuaugg

SEQ ID NO: 318948 - RNA, 19 nt, Artificial Sequence
  Description of Artificial Sequence: Synthetic oligonucleotide
ugagcucgaaagcaucugc

SEQ ID NO: 318949 - RNA, 19 nt, Artificial Sequence
  Description of Artificial Sequence: Synthetic oligonucleotide
agaugagaggaaucgauaa

SEQ ID NO: 318950 - RNA, 19 nt, Artificial Sequence
  Description of Artificial Sequence: Synthetic oligonucleotide
uguagggcacauccuuugg

SEQ ID NO: 318951 - RNA, 19 nt, Artificial Sequence
  Description of Artificial Sequence: Synthetic oligonucleotide
ugugaggcgaacaccguga

SEQ ID NO: 318952 - RNA, 19 nt, Artificial Sequence
  Description of Artificial Sequence: Synthetic oligonucleotide
ucacucauaugaagaagca

SEQ ID NO: 318953 - RNA, 19 nt, Artificial Sequence
  Description of Artificial Sequence: Synthetic oligonucleotide
aaugccgccgggucuucac

SEQ ID NO: 318954 - RNA, 19 nt, Artificial Sequence
  Description of Artificial Sequence: Synthetic oligonucleotide
cucgaaagcaucugcgggc

SEQ ID NO: 318955 - RNA, 19 nt, Artificial Sequence
  Description of Artificial Sequence: Synthetic oligonucleotide
ucauaucaaagacccuggc

SEQ ID NO: 318956 - RNA, 19 nt, Artificial Sequence
  Description of Artificial Sequence: Synthetic oligonucleotide
aggguguuggcucuccuuc

SEQ ID NO: 318957 - RNA, 19 nt, Artificial Sequence
  Description of Artificial Sequence: Synthetic oligonucleotide
agcgaguaggccuucagga

SEQ ID NO: 318958 - RNA, 19 nt, Artificial Sequence
  Description of Artificial Sequence: Synthetic oligonucleotide
gaaagcaucugcgggcugg

SEQ ID NO: 318959 - RNA, 19 nt, Artificial Sequence
  Description of Artificial Sequence: Synthetic oligonucleotide
aaccccucucagucguucc

SEQ ID NO: 318960 - RNA, 19 nt, Artificial Sequence
  Description of Artificial Sequence: Synthetic oligonucleotide
agcucgaaagcaucugcgg

SEQ ID NO: 318961 - RNA, 19 nt, Artificial Sequence
  Description of Artificial Sequence: Synthetic oligonucleotide
cuggguacaauccggcucc

SEQ ID NO: 318962 - RNA, 19 nt, Artificial Sequence
  Description of Artificial Sequence: Synthetic oligonucleotide
uaacgaucaaugcauccaa

SEQ ID NO: 318963 - RNA, 19 nt, Artificial Sequence
  Description of Artificial Sequence: Synthetic oligonucleotide
caauguggcucucugaguc

SEQ ID NO: 318964 - RNA, 19 nt, Artificial Sequence
  Description of Artificial Sequence: Synthetic oligonucleotide
auucgggcuggguacaauc

SEQ ID NO: 318965 - RNA, 19 nt, Artificial Sequence
  Description of Artificial Sequence: Synthetic oligonucleotide
ucugaaugccugcuggggu

SEQ ID NO: 318966 - RNA, 19 nt, Artificial Sequence
  Description of Artificial Sequence: Synthetic oligonucleotide
cucauggacagcucuuugc

SEQ ID NO: 318967 - RNA, 19 nt, Artificial Sequence
  Description of Artificial Sequence: Synthetic oligonucleotide
auaaaccccucucagucgu

SEQ ID NO: 318968 - RNA, 19 nt, Artificial Sequence
  Description of Artificial Sequence: Synthetic oligonucleotide
ugugcucacggagugauac

SEQ ID NO: 318969 - RNA, 19 nt, Artificial Sequence
  Description of Artificial Sequence: Synthetic oligonucleotide
aucauaucaaagacccugg

SEQ ID NO: 318970 - RNA, 19 nt, Artificial Sequence
  Description of Artificial Sequence: Synthetic oligonucleotide
gagaggaaucgauaaguuc

SEQ ID NO: 318971 - RNA, 19 nt, Artificial Sequence
  Description of Artificial Sequence: Synthetic oligonucleotide
uggaaagguucgcccaagg

SEQ ID NO: 318972 - RNA, 19 nt, Artificial Sequence
  Description of Artificial Sequence: Synthetic oligonucleotide
aggagugauuucuucauaa

SEQ ID NO: 318973 - RNA, 19 nt, Artificial Sequence
  Description of Artificial Sequence: Synthetic oligonucleotide
gauuaaggccuggacagug

SEQ ID NO: 318974 - RNA, 19 nt, Artificial Sequence
  Description of Artificial Sequence: Synthetic oligonucleotide
aguauggaugcguuggaaa

SEQ ID NO: 318975 - RNA, 19 nt, Artificial Sequence
  Description of Artificial Sequence: Synthetic oligonucleotide
auaagugacccuauagugu

SEQ ID NO: 318976 - RNA, 19 nt, Artificial Sequence
  Description of Artificial Sequence: Synthetic oligonucleotide
aguguuagaggugugcacu

SEQ ID NO: 318977 - RNA, 19 nt, Artificial Sequence
  Description of Artificial Sequence: Synthetic oligonucleotide
aaagcaucugcgggcuggc

SEQ ID NO: 318978 - RNA, 19 nt, Artificial Sequence
  Description of Artificial Sequence: Synthetic oligonucleotide
agucguuccccauggucac

SEQ ID NO: 318979 - RNA, 19 nt, Artificial Sequence
  Description of Artificial Sequence: Synthetic oligonucleotide
cauggaggagccgugacag

SEQ ID NO: 318980 - RNA, 19 nt, Artificial Sequence
  Description of Artificial Sequence: Synthetic oligonucleotide
agcaguaucugcugcagaa

SEQ ID NO: 318981 - RNA, 19 nt, Artificial Sequence
  Description of Artificial Sequence: Synthetic oligonucleotide
ugcagucacacacuagcaa

SEQ ID NO: 318982 - RNA, 19 nt, Artificial Sequence
  Description of Artificial Sequence: Synthetic oligonucleotide
aaugguccaucuucacgca

SEQ ID NO: 318983 - RNA, 19 nt, Artificial Sequence
  Description of Artificial Sequence: Synthetic oligonucleotide
gaggcgaacaccgugagaa

SEQ ID NO: 318984 - RNA, 19 nt, Artificial Sequence
  Description of Artificial Sequence: Synthetic oligonucleotide
uaaucauggaggagccgug

SEQ ID NO: 318985 - RNA, 19 nt, Artificial Sequence
  Description of Artificial Sequence: Synthetic oligonucleotide
acuugaaaggaugagcaaa

SEQ ID NO: 318986 - RNA, 19 nt, Artificial Sequence
  Description of Artificial Sequence: Synthetic oligonucleotide
uuguagggcacauccuuug

SEQ ID NO: 318987 - RNA, 19 nt, Artificial Sequence
  Description of Artificial Sequence: Synthetic oligonucleotide
cuuguguucaugaggcguc

SEQ ID NO: 318988 - RNA, 19 nt, Artificial Sequence
  Description of Artificial Sequence: Synthetic oligonucleotide
ucuguuugcguaagcugcu

SEQ ID NO: 318989 - RNA, 19 nt, Artificial Sequence
  Description of Artificial Sequence: Synthetic oligonucleotide
aguauccuacuuccugguc

SEQ ID NO: 318990 - RNA, 19 nt, Artificial Sequence
  Description of Artificial Sequence: Synthetic oligonucleotide
ucucgagaugucuucuucu

SEQ ID NO: 318991 - RNA, 19 nt, Artificial Sequence
  Description of Artificial Sequence: Synthetic oligonucleotide
ugagaggaaucgauaaguu

SEQ ID NO: 318992 - RNA, 19 nt, Artificial Sequence
  Description of Artificial Sequence: Synthetic oligonucleotide
uacaaagccgagugggaac

SEQ ID NO: 318993 - RNA, 19 nt, Artificial Sequence
  Description of Artificial Sequence: Synthetic oligonucleotide
uccuggagugcuaagcauc

SEQ ID NO: 318994 - RNA, 19 nt, Artificial Sequence
  Description of Artificial Sequence: Synthetic oligonucleotide
ugguuacuucuuuaagaca

SEQ ID NO: 318995 - RNA, 19 nt, Artificial Sequence
  Description of Artificial Sequence: Synthetic oligonucleotide
aaacugugauuuccuuaug

SEQ ID NO: 318996 - RNA, 19 nt, Artificial Sequence
  Description of Artificial Sequence: Synthetic oligonucleotide
cauuuaucuaccaugacuu

SEQ ID NO: 318997 - RNA, 19 nt, Artificial Sequence
  Description of Artificial Sequence: Synthetic oligonucleotide
ucagucguuccccaugguc

SEQ ID NO: 318998 - RNA, 19 nt, Artificial Sequence
  Description of Artificial Sequence: Synthetic oligonucleotide
agugauaccucaugaguuu

SEQ ID NO: 318999 - RNA, 19 nt, Artificial Sequence
  Description of Artificial Sequence: Synthetic oligonucleotide
uucgggcuggguacaaucc

SEQ ID NO: 319000 - RNA, 19 nt, Artificial Sequence
  Description of Artificial Sequence: Synthetic oligonucleotide
gaucaagguucuguuugcg

SEQ ID NO: 319001 - RNA, 19 nt, Artificial Sequence
  Description of Artificial Sequence: Synthetic oligonucleotide
ucgaagaauaucugcuguc

SEQ ID NO: 319002 - RNA, 19 nt, Artificial Sequence
  Description of Artificial Sequence: Synthetic oligonucleotide
ugacguggcacaccuugcc

SEQ ID NO: 319003 - RNA, 19 nt, Artificial Sequence
  Description of Artificial Sequence: Synthetic oligonucleotide
ucaccgguagauucgggcu

SEQ ID NO: 319004 - RNA, 19 nt, Artificial Sequence
  Description of Artificial Sequence: Synthetic oligonucleotide
uuugguugucacugagaug

SEQ ID NO: 319005 - RNA, 19 nt, Artificial Sequence
  Description of Artificial Sequence: Synthetic oligonucleotide
ucacgcacuggcucuaaug

SEQ ID NO: 319006 - RNA, 19 nt, Artificial Sequence
  Description of Artificial Sequence: Synthetic oligonucleotide
aaaagacuuaaagccacuu

SEQ ID NO: 319007 - RNA, 19 nt, Artificial Sequence
  Description of Artificial Sequence: Synthetic oligonucleotide
gagcucgaaagcaucugcg

SEQ ID NO: 319008 - RNA, 19 nt, Artificial Sequence
  Description of Artificial Sequence: Synthetic oligonucleotide
ucgauaaguucuucuugga

SEQ ID NO: 319009 - RNA, 19 nt, Artificial Sequence
  Description of Artificial Sequence: Synthetic oligonucleotide
ccaagucugagcucgaaag

SEQ ID NO: 319010 - RNA, 19 nt, Artificial Sequence
  Description of Artificial Sequence: Synthetic oligonucleotide
caauuguuccaggagauca

SEQ ID NO: 319011 - RNA, 19 nt, Artificial Sequence
  Description of Artificial Sequence: Synthetic oligonucleotide
guaacgaucaaugcaucca

SEQ ID NO: 319012 - RNA, 19 nt, Artificial Sequence
  Description of Artificial Sequence: Synthetic oligonucleotide
uguuugcguaagcugcugu

SEQ ID NO: 319013 - RNA, 19 nt, Artificial Sequence
  Description of Artificial Sequence: Synthetic oligonucleotide
cacuagcaagaacagggag

SEQ ID NO: 319014 - RNA, 19 nt, Artificial Sequence
  Description of Artificial Sequence: Synthetic oligonucleotide
uuuguagggcacauccuuu

SEQ ID NO: 319015 - RNA, 19 nt, Artificial Sequence
  Description of Artificial Sequence: Synthetic oligonucleotide
gucaccgguagauucgggc

SEQ ID NO: 319016 - RNA, 19 nt, Artificial Sequence
  Description of Artificial Sequence: Synthetic oligonucleotide
aaaccccucucagucguuc

SEQ ID NO: 319017 - RNA, 19 nt, Artificial Sequence
  Description of Artificial Sequence: Synthetic oligonucleotide
guacaauccggcuccugag

SEQ ID NO: 319018 - RNA, 19 nt, Artificial Sequence
  Description of Artificial Sequence: Synthetic oligonucleotide
cuggcucuaauggggaucg

SEQ ID NO: 319019 - RNA, 19 nt, Artificial Sequence
  Description of Artificial Sequence: Synthetic oligonucleotide
uggagugcuaagcaucuuu

SEQ ID NO: 319020 - RNA, 19 nt, Artificial Sequence
  Description of Artificial Sequence: Synthetic oligonucleotide
acggagugauaccucauga

SEQ ID NO: 319021 - RNA, 19 nt, Artificial Sequence
  Description of Artificial Sequence: Synthetic oligonucleotide
gucagucaccgguagauuc

SEQ ID NO: 319022 - RNA, 19 nt, Artificial Sequence
  Description of Artificial Sequence: Synthetic oligonucleotide
ugugguaaucauggaggag

SEQ ID NO: 319023 - RNA, 19 nt, Artificial Sequence
  Description of Artificial Sequence: Synthetic oligonucleotide
augaaacauuuaucuacca

SEQ ID NO: 319024 - RNA, 19 nt, Artificial Sequence
  Description of Artificial Sequence: Synthetic oligonucleotide
uacaauccggcuccugagu

SEQ ID NO: 319025 - RNA, 19 nt, Artificial Sequence
  Description of Artificial Sequence: Synthetic oligonucleotide
uuccgaagacccaugucaa

SEQ ID NO: 319026 - RNA, 19 nt, Artificial Sequence
  Description of Artificial Sequence: Synthetic oligonucleotide
gaagcgaguaggccuucag

SEQ ID NO: 319027 - RNA, 19 nt, Artificial Sequence
  Description of Artificial Sequence: Synthetic oligonucleotide
aaguccacuaugguuucca

SEQ ID NO: 319028 - RNA, 19 nt, Artificial Sequence
  Description of Artificial Sequence: Synthetic oligonucleotide
aggcuuuggaucuuagcau

SEQ ID NO: 319029 - RNA, 19 nt, Artificial Sequence
  Description of Artificial Sequence: Synthetic oligonucleotide
uaccaugacuugaaaggau

SEQ ID NO: 319030 - RNA, 19 nt, Artificial Sequence
  Description of Artificial Sequence: Synthetic oligonucleotide
accaugacuugaaaggaug

SEQ ID NO: 319031 - RNA, 19 nt, Artificial Sequence
  Description of Artificial Sequence: Synthetic oligonucleotide
aagggcuuauggcuuccca

SEQ ID NO: 319032 - RNA, 19 nt, Artificial Sequence
  Description of Artificial Sequence: Synthetic oligonucleotide
cucauaugaagaagcaaaa

SEQ ID NO: 319033 - RNA, 19 nt, Artificial Sequence
  Description of Artificial Sequence: Synthetic oligonucleotide
uacuguuuccgaagaccca

SEQ ID NO: 319034 - RNA, 19 nt, Artificial Sequence
  Description of Artificial Sequence: Synthetic oligonucleotide
ucucaccccggugaugacg

SEQ ID NO: 319035 - RNA, 19 nt, Artificial Sequence
  Description of Artificial Sequence: Synthetic oligonucleotide
accccucucagucguuccc

SEQ ID NO: 319036 - RNA, 19 nt, Artificial Sequence
  Description of Artificial Sequence: Synthetic oligonucleotide
gcucgaaagcaucugcggg

SEQ ID NO: 319037 - RNA, 19 nt, Artificial Sequence
  Description of Artificial Sequence: Synthetic oligonucleotide
cucagagacgggcaccgcc

SEQ ID NO: 319038 - RNA, 19 nt, Artificial Sequence
  Description of Artificial Sequence: Synthetic oligonucleotide
ggagugauaguggagucag

SEQ ID NO: 319039 - RNA, 19 nt, Artificial Sequence
  Description of Artificial Sequence: Synthetic oligonucleotide
aucuucacgcacuggcucu

SEQ ID NO: 319040 - RNA, 19 nt, Artificial Sequence
  Description of Artificial Sequence: Synthetic oligonucleotide
uaguguggauaugaaacuc

SEQ ID NO: 319041 - RNA, 19 nt, Artificial Sequence
  Description of Artificial Sequence: Synthetic oligonucleotide
ugcugucuaaagcuacaaa

SEQ ID NO: 319042 - RNA, 19 nt, Artificial Sequence
  Description of Artificial Sequence: Synthetic oligonucleotide
uccaagucugagcucgaaa

SEQ ID NO: 319043 - RNA, 19 nt, Artificial Sequence
  Description of Artificial Sequence: Synthetic oligonucleotide
aaggagugauuucuucaua

SEQ ID NO: 319044 - RNA, 19 nt, Artificial Sequence
  Description of Artificial Sequence: Synthetic oligonucleotide
aauccggcuccugagugcu

SEQ ID NO: 319045 - RNA, 19 nt, Artificial Sequence
  Description of Artificial Sequence: Synthetic oligonucleotide
cucucgcugguuagaagcc

SEQ ID NO: 319046 - RNA, 19 nt, Artificial Sequence
  Description of Artificial Sequence: Synthetic oligonucleotide
ugauaccucaugaguuuuc

SEQ ID NO: 319047 - RNA, 19 nt, Artificial Sequence
  Description of Artificial Sequence: Synthetic oligonucleotide
acacacuagcaagaacagg

SEQ ID NO: 319048 - RNA, 19 nt, Artificial Sequence
  Description of Artificial Sequence: Synthetic oligonucleotide
gacguggcacaccuugccc

SEQ ID NO: 319049 - RNA, 19 nt, Artificial Sequence
  Description of Artificial Sequence: Synthetic oligonucleotide
caauuucgugcucuuccag

SEQ ID NO: 319050 - RNA, 19 nt, Artificial Sequence
  Description of Artificial Sequence: Synthetic oligonucleotide
ugcucacggagugauaccu

SEQ ID NO: 319051 - RNA, 19 nt, Artificial Sequence
  Description of Artificial Sequence: Synthetic oligonucleotide
aaucauggaggagccguga

SEQ ID NO: 319052 - RNA, 19 nt, Artificial Sequence
  Description of Artificial Sequence: Synthetic oligonucleotide
cuauaguguggauaugaaa

SEQ ID NO: 319053 - RNA, 19 nt, Artificial Sequence
  Description of Artificial Sequence: Synthetic oligonucleotide
gaaucgauaaguucuucuu

SEQ ID NO: 319054 - RNA, 19 nt, Artificial Sequence
  Description of Artificial Sequence: Synthetic oligonucleotide
ugcguuggaaagguucgcc

SEQ ID NO: 319055 - RNA, 19 nt, Artificial Sequence
  Description of Artificial Sequence: Synthetic oligonucleotide
gcucuaauggggaucgugg

SEQ ID NO: 319056 - RNA, 19 nt, Artificial Sequence
  Description of Artificial Sequence: Synthetic oligonucleotide
uuaaggccuggacaguguu

SEQ ID NO: 319057 - RNA, 19 nt, Artificial Sequence
  Description of Artificial Sequence: Synthetic oligonucleotide
cugcguagaggcuggggcc

SEQ ID NO: 319058 - RNA, 19 nt, Artificial Sequence
  Description of Artificial Sequence: Synthetic oligonucleotide
gacccuauaguguggauau

SEQ ID NO: 319059 - RNA, 19 nt, Artificial Sequence
  Description of Artificial Sequence: Synthetic oligonucleotide
cuggccgauacuguuuccg

SEQ ID NO: 319060 - RNA, 19 nt, Artificial Sequence
  Description of Artificial Sequence: Synthetic oligonucleotide
agccaaggagcuugaagga

SEQ ID NO: 319061 - RNA, 19 nt, Artificial Sequence
  Description of Artificial Sequence: Synthetic oligonucleotide
caugccuucuguggagugg

SEQ ID NO: 319062 - RNA, 19 nt, Artificial Sequence
  Description of Artificial Sequence: Synthetic oligonucleotide
acuguuuccgaagacccau

SEQ ID NO: 319063 - RNA, 19 nt, Artificial Sequence
  Description of Artificial Sequence: Synthetic oligonucleotide
aagugacccuauagugugg

SEQ ID NO: 319064 - RNA, 19 nt, Artificial Sequence
  Description of Artificial Sequence: Synthetic oligonucleotide
ugagagaccccuggagagc

SEQ ID NO: 319065 - RNA, 19 nt, Artificial Sequence
  Description of Artificial Sequence: Synthetic oligonucleotide
caauccggcuccugagugc

SEQ ID NO: 319066 - RNA, 19 nt, Artificial Sequence
  Description of Artificial Sequence: Synthetic oligonucleotide
uagaggugugcacucucuc

SEQ ID NO: 319067 - RNA, 19 nt, Artificial Sequence
  Description of Artificial Sequence: Synthetic oligonucleotide
ucgaaagcaucugcgggcu

SEQ ID NO: 319068 - RNA, 19 nt, Artificial Sequence
  Description of Artificial Sequence: Synthetic oligonucleotide
aggagagcggacucuucug

SEQ ID NO: 319069 - RNA, 19 nt, Artificial Sequence
  Description of Artificial Sequence: Synthetic oligonucleotide
ugcagaaucaagggcuuau

SEQ ID NO: 319070 - RNA, 19 nt, Artificial Sequence
  Description of Artificial Sequence: Synthetic oligonucleotide
acaccgugagaaaccaggg

SEQ ID NO: 319071 - RNA, 19 nt, Artificial Sequence
  Description of Artificial Sequence: Synthetic oligonucleotide
gguacucaaccucguaggc

SEQ ID NO: 319072 - RNA, 19 nt, Artificial Sequence
  Description of Artificial Sequence: Synthetic oligonucleotide
gguacaauccggcuccuga

SEQ ID NO: 319073 - RNA, 19 nt, Artificial Sequence
  Description of Artificial Sequence: Synthetic oligonucleotide
cugcaccaagcccagguug

SEQ ID NO: 319074 - RNA, 19 nt, Artificial Sequence
  Description of Artificial Sequence: Synthetic oligonucleotide
agccgugacagcugguaca

SEQ ID NO: 319075 - RNA, 19 nt, Artificial Sequence
  Description of Artificial Sequence: Synthetic oligonucleotide
augcguuggaaagguucgc

SEQ ID NO: 319076 - RNA, 19 nt, Artificial Sequence
  Description of Artificial Sequence: Synthetic oligonucleotide
cacggagugauaccucaug

SEQ ID NO: 319077 - RNA, 19 nt, Artificial Sequence
  Description of Artificial Sequence: Synthetic oligonucleotide
guaaucauggaggagccgu

SEQ ID NO: 319078 - RNA, 19 nt, Artificial Sequence
  Description of Artificial Sequence: Synthetic oligonucleotide
ccauggucaccucagguag

SEQ ID NO: 319079 - RNA, 19 nt, Artificial Sequence
  Description of Artificial Sequence: Synthetic oligonucleotide
agacuuaaagccacuuuaa

SEQ ID NO: 319080 - RNA, 19 nt, Artificial Sequence
  Description of Artificial Sequence: Synthetic oligonucleotide
agggcuuauggcuucccaa

SEQ ID NO: 319081 - RNA, 19 nt, Artificial Sequence
  Description of Artificial Sequence: Synthetic oligonucleotide
gccgauacuguuuccgaag

SEQ ID NO: 319082 - RNA, 19 nt, Artificial Sequence
  Description of Artificial Sequence: Synthetic oligonucleotide
aggaaucgauaaguucuuc

SEQ ID NO: 319083 - RNA, 19 nt, Artificial Sequence
  Description of Artificial Sequence: Synthetic oligonucleotide
cccaaggucaaugaggaug

SEQ ID NO: 319084 - RNA, 19 nt, Artificial Sequence
  Description of Artificial Sequence: Synthetic oligonucleotide
cucacggagugauaccuca

SEQ ID NO: 319085 - RNA, 19 nt, Artificial Sequence
  Description of Artificial Sequence: Synthetic oligonucleotide
gagugggaacugugaggcg

SEQ ID NO: 319086 - RNA, 19 nt, Artificial Sequence
  Description of Artificial Sequence: Synthetic oligonucleotide
uguuagaggugugcacucu

SEQ ID NO: 319087 - RNA, 19 nt, Artificial Sequence
  Description of Artificial Sequence: Synthetic oligonucleotide
ucagaccccauagcugcag

SEQ ID NO: 319088 - RNA, 19 nt, Artificial Sequence
  Description of Artificial Sequence: Synthetic oligonucleotide
cuaccaugacuugaaagga

SEQ ID NO: 319089 - RNA, 19 nt, Artificial Sequence
  Description of Artificial Sequence: Synthetic oligonucleotide
cugugaggcgaacaccgug

SEQ ID NO: 319090 - RNA, 19 nt, Artificial Sequence
  Description of Artificial Sequence: Synthetic oligonucleotide
gcugguuagaagccucucc

SEQ ID NO: 319091 - RNA, 19 nt, Artificial Sequence
  Description of Artificial Sequence: Synthetic oligonucleotide
auaaucaugucuggccgau

SEQ ID NO: 319092 - RNA, 19 nt, Artificial Sequence
  Description of Artificial Sequence: Synthetic oligonucleotide
caaccucguaggcuuguag

SEQ ID NO: 319093 - RNA, 19 nt, Artificial Sequence
  Description of Artificial Sequence: Synthetic oligonucleotide
ugucuggccgauacuguuu

SEQ ID NO: 319094 - RNA, 19 nt, Artificial Sequence
  Description of Artificial Sequence: Synthetic oligonucleotide
ccaauuuaaauaaaccccu

SEQ ID NO: 319095 - RNA, 19 nt, Artificial Sequence
  Description of Artificial Sequence: Synthetic oligonucleotide
ugcguaagcugcuguuggu

SEQ ID NO: 319096 - RNA, 19 nt, Artificial Sequence
  Description of Artificial Sequence: Synthetic oligonucleotide
gucacacacuagcaagaac

SEQ ID NO: 319097 - RNA, 19 nt, Artificial Sequence
  Description of Artificial Sequence: Synthetic oligonucleotide
ugaggcgaacaccgugaga

SEQ ID NO: 319098 - RNA, 19 nt, Artificial Sequence
  Description of Artificial Sequence: Synthetic oligonucleotide
gucaccucagguaggagga

SEQ ID NO: 319099 - RNA, 19 nt, Artificial Sequence
  Description of Artificial Sequence: Synthetic oligonucleotide
cauaucaaagacccuggcu

SEQ ID NO: 319100 - RNA, 19 nt, Artificial Sequence
  Description of Artificial Sequence: Synthetic oligonucleotide
cucuaauggggaucgugga

SEQ ID NO: 319101 - RNA, 19 nt, Artificial Sequence
  Description of Artificial Sequence: Synthetic oligonucleotide
ugggacuuuugcccuccca

SEQ ID NO: 319102 - RNA, 19 nt, Artificial Sequence
  Description of Artificial Sequence: Synthetic oligonucleotide
ccugauuaaggccuggaca

SEQ ID NO: 319103 - RNA, 19 nt, Artificial Sequence
  Description of Artificial Sequence: Synthetic oligonucleotide
accgguagauucgggcugg

SEQ ID NO: 319104 - RNA, 19 nt, Artificial Sequence
  Description of Artificial Sequence: Synthetic oligonucleotide
cugcucagcuagaaauuuc

SEQ ID NO: 319105 - RNA, 19 nt, Artificial Sequence
  Description of Artificial Sequence: Synthetic oligonucleotide
ugauuaaggccuggacagu

SEQ ID NO: 319106 - RNA, 19 nt, Artificial Sequence
  Description of Artificial Sequence: Synthetic oligonucleotide
cucgcugguuagaagccuc

SEQ ID NO: 319107 - RNA, 19 nt, Artificial Sequence
  Description of Artificial Sequence: Synthetic oligonucleotide
acgggcaccgccucuuugu

SEQ ID NO: 319108 - RNA, 19 nt, Artificial Sequence
  Description of Artificial Sequence: Synthetic oligonucleotide
uccaugaaugccgccgggu

SEQ ID NO: 319109 - RNA, 19 nt, Artificial Sequence
  Description of Artificial Sequence: Synthetic oligonucleotide
gugaggcgaacaccgugag

SEQ ID NO: 319110 - RNA, 19 nt, Artificial Sequence
  Description of Artificial Sequence: Synthetic oligonucleotide
ggagugauaccucaugagu

SEQ ID NO: 319111 - RNA, 19 nt, Artificial Sequence
  Description of Artificial Sequence: Synthetic oligonucleotide
ugcguagaggcuggggcca

SEQ ID NO: 319112 - RNA, 19 nt, Artificial Sequence
  Description of Artificial Sequence: Synthetic oligonucleotide
guguuagaggugugcacuc

SEQ ID NO: 319113 - RNA, 19 nt, Artificial Sequence
  Description of Artificial Sequence: Synthetic oligonucleotide
guuggaaagguucgcccaa

SEQ ID NO: 319114 - RNA, 19 nt, Artificial Sequence
  Description of Artificial Sequence: Synthetic oligonucleotide
ggcggagcguuccagcucc

SEQ ID NO: 319115 - RNA, 19 nt, Artificial Sequence
  Description of Artificial Sequence: Synthetic oligonucleotide
ggauaugaaacucgcaaau

SEQ ID NO: 319116 - RNA, 19 nt, Artificial Sequence
  Description of Artificial Sequence: Synthetic oligonucleotide
cuuuaagacaaggagugau

SEQ ID NO: 319117 - RNA, 19 nt, Artificial Sequence
  Description of Artificial Sequence: Synthetic oligonucleotide
ggaugcguuggaaagguuc

SEQ ID NO: 319118 - RNA, 19 nt, Artificial Sequence
  Description of Artificial Sequence: Synthetic oligonucleotide
gagccgugacagcugguac

SEQ ID NO: 319119 - RNA, 19 nt, Artificial Sequence
  Description of Artificial Sequence: Synthetic oligonucleotide
gcguuuguucagcaaauca

SEQ ID NO: 319120 - RNA, 19 nt, Artificial Sequence
  Description of Artificial Sequence: Synthetic oligonucleotide
aagccgagugggaacugug

SEQ ID NO: 319121 - RNA, 19 nt, Artificial Sequence
  Description of Artificial Sequence: Synthetic oligonucleotide
cccaaaagacuuaaagcca

SEQ ID NO: 319122 - RNA, 19 nt, Artificial Sequence
  Description of Artificial Sequence: Synthetic oligonucleotide
agagaaguauggaugcguu

SEQ ID NO: 319123 - RNA, 19 nt, Artificial Sequence
  Description of Artificial Sequence: Synthetic oligonucleotide
ucuggccgauacuguuucc

SEQ ID NO: 319124 - RNA, 19 nt, Artificial Sequence
  Description of Artificial Sequence: Synthetic oligonucleotide
aucuuccuggagugcuaag

SEQ ID NO: 319125 - RNA, 19 nt, Artificial Sequence
  Description of Artificial Sequence: Synthetic oligonucleotide
caccgguagauucgggcug

SEQ ID NO: 319126 - RNA, 19 nt, Artificial Sequence
  Description of Artificial Sequence: Synthetic oligonucleotide
ggaaucgauaaguucuucu

SEQ ID NO: 319127 - RNA, 19 nt, Artificial Sequence
  Description of Artificial Sequence: Synthetic oligonucleotide
uagauucgggcuggguaca

SEQ ID NO: 319128 - RNA, 19 nt, Artificial Sequence
  Description of Artificial Sequence: Synthetic oligonucleotide
gggcacauccuuuggcugc

SEQ ID NO: 319129 - RNA, 19 nt, Artificial Sequence
  Description of Artificial Sequence: Synthetic oligonucleotide
cagucaccgguagauucgg

SEQ ID NO: 319130 - RNA, 19 nt, Artificial Sequence
  Description of Artificial Sequence: Synthetic oligonucleotide
cgagugggaacugugaggc

SEQ ID NO: 319131 - RNA, 19 nt, Artificial Sequence
  Description of Artificial Sequence: Synthetic oligonucleotide
ucucgcugguuagaagccu

SEQ ID NO: 319132 - RNA, 19 nt, Artificial Sequence
  Description of Artificial Sequence: Synthetic oligonucleotide
agucacacacuagcaagaa

SEQ ID NO: 319133 - RNA, 19 nt, Artificial Sequence
  Description of Artificial Sequence: Synthetic oligonucleotide
aggugauuguagaggucuc

SEQ ID NO: 319134 - RNA, 19 nt, Artificial Sequence
  Description of Artificial Sequence: Synthetic oligonucleotide
ccgugagaaaccagggagc

SEQ ID NO: 319135 - RNA, 19 nt, Artificial Sequence
  Description of Artificial Sequence: Synthetic oligonucleotide
ugacaggagagcggacucu

SEQ ID NO: 319136 - RNA, 19 nt, Artificial Sequence
  Description of Artificial Sequence: Synthetic oligonucleotide
gcaucugcgggcuggcgag

SEQ ID NO: 319137 - RNA, 19 nt, Artificial Sequence
  Description of Artificial Sequence: Synthetic oligonucleotide
ccgagugggaacugugagg

SEQ ID NO: 319138 - RNA, 19 nt, Artificial Sequence
  Description of Artificial Sequence: Synthetic oligonucleotide
ggacuuuugcccucccaac

SEQ ID NO: 319139 - RNA, 19 nt, Artificial Sequence
  Description of Artificial Sequence: Synthetic oligonucleotide
gcguuggaaagguucgccc

SEQ ID NO: 319140 - RNA, 19 nt, Artificial Sequence
  Description of Artificial Sequence: Synthetic oligonucleotide
guucgcccaaggucaauga

SEQ ID NO: 319141 - RNA, 19 nt, Artificial Sequence
  Description of Artificial Sequence: Synthetic oligonucleotide
guuuguucagcaaaucauu

SEQ ID NO: 319142 - RNA, 19 nt, Artificial Sequence
  Description of Artificial Sequence: Synthetic oligonucleotide
cacaggggucccaucugug

SEQ ID NO: 319143 - RNA, 19 nt, Artificial Sequence
  Description of Artificial Sequence: Synthetic oligonucleotide
ggaguggccacucgaagaa

SEQ ID NO: 319144 - RNA, 19 nt, Artificial Sequence
  Description of Artificial Sequence: Synthetic oligonucleotide
acacuguguaaaagacgag

SEQ ID NO: 319145 - RNA, 19 nt, Artificial Sequence
  Description of Artificial Sequence: Synthetic oligonucleotide
caggugauuguagaggucu

SEQ ID NO: 319146 - RNA, 19 nt, Artificial Sequence
  Description of Artificial Sequence: Synthetic oligonucleotide
gguaaucauggaggagccg

SEQ ID NO: 319147 - RNA, 19 nt, Artificial Sequence
  Description of Artificial Sequence: Synthetic oligonucleotide
caaggagugauuucuucau

SEQ ID NO: 319148 - RNA, 19 nt, Artificial Sequence
  Description of Artificial Sequence: Synthetic oligonucleotide
gugcucacggagugauacc

SEQ ID NO: 319149 - RNA, 19 nt, Artificial Sequence
  Description of Artificial Sequence: Synthetic oligonucleotide
cagggcggagcguuccagc

SEQ ID NO: 319150 - RNA, 19 nt, Artificial Sequence
  Description of Artificial Sequence: Synthetic oligonucleotide
uguggcucucugagucacu

SEQ ID NO: 319151 - RNA, 19 nt, Artificial Sequence
  Description of Artificial Sequence: Synthetic oligonucleotide
cuuuguagggcacauccuu

SEQ ID NO: 319152 - RNA, 19 nt, Artificial Sequence
  Description of Artificial Sequence: Synthetic oligonucleotide
gggacuuuugcccucccaa

SEQ ID NO: 319153 - RNA, 19 nt, Artificial Sequence
  Description of Artificial Sequence: Synthetic oligonucleotide
guguaaaagacgaguuucu

SEQ ID NO: 319154 - RNA, 19 nt, Artificial Sequence
  Description of Artificial Sequence: Synthetic oligonucleotide
caugaggcgucucugugcu

SEQ ID NO: 319155 - RNA, 19 nt, Artificial Sequence
  Description of Artificial Sequence: Synthetic oligonucleotide
agaucauaucaaagacccu

SEQ ID NO: 319156 - RNA, 19 nt, Artificial Sequence
  Description of Artificial Sequence: Synthetic oligonucleotide
uugcucucgcugguuagaa

SEQ ID NO: 319157 - RNA, 19 nt, Artificial Sequence
  Description of Artificial Sequence: Synthetic oligonucleotide
agagacgggcaccgccucu

SEQ ID NO: 319158 - RNA, 19 nt, Artificial Sequence
  Description of Artificial Sequence: Synthetic oligonucleotide
gguucgcccaaggucaaug

SEQ ID NO: 319159 - RNA, 19 nt, Artificial Sequence
  Description of Artificial Sequence: Synthetic oligonucleotide
agcucucgagaugucuucu

SEQ ID NO: 319160 - RNA, 19 nt, Artificial Sequence
  Description of Artificial Sequence: Synthetic oligonucleotide
uucacgcacuggcucuaau

SEQ ID NO: 319161 - RNA, 19 nt, Artificial Sequence
  Description of Artificial Sequence: Synthetic oligonucleotide
aguggccacucgaagaaua

SEQ ID NO: 319162 - RNA, 19 nt, Artificial Sequence
  Description of Artificial Sequence: Synthetic oligonucleotide
augcugucuaaagcuacaa

SEQ ID NO: 319163 - RNA, 19 nt, Artificial Sequence
  Description of Artificial Sequence: Synthetic oligonucleotide
gccaaggagcuugaaggag

SEQ ID NO: 319164 - RNA, 19 nt, Artificial Sequence
  Description of Artificial Sequence: Synthetic oligonucleotide
augaaugccgccgggucuu

SEQ ID NO: 319165 - RNA, 19 nt, Artificial Sequence
  Description of Artificial Sequence: Synthetic oligonucleotide
gcuaagcaucuuuucccac

SEQ ID NO: 319166 - RNA, 19 nt, Artificial Sequence
  Description of Artificial Sequence: Synthetic oligonucleotide
ggcucuaauggggaucgug

SEQ ID NO: 319167 - RNA, 19 nt, Artificial Sequence
  Description of Artificial Sequence: Synthetic oligonucleotide
cugagaugagaggaaucga

SEQ ID NO: 319168 - RNA, 19 nt, Artificial Sequence
  Description of Artificial Sequence: Synthetic oligonucleotide
cucguaggcuuguagcugu

SEQ ID NO: 319169 - RNA, 19 nt, Artificial Sequence
  Description of Artificial Sequence: Synthetic oligonucleotide
uggccacucgaagaauauc

SEQ ID NO: 319170 - RNA, 19 nt, Artificial Sequence
  Description of Artificial Sequence: Synthetic oligonucleotide
ucgaagcucucgagauguc

SEQ ID NO: 319171 - RNA, 19 nt, Artificial Sequence
  Description of Artificial Sequence: Synthetic oligonucleotide
caccgugagaaaccaggga

SEQ ID NO: 319172 - RNA, 19 nt, Artificial Sequence
  Description of Artificial Sequence: Synthetic oligonucleotide
cuguuugcguaagcugcug

SEQ ID NO: 319173 - RNA, 19 nt, Artificial Sequence
  Description of Artificial Sequence: Synthetic oligonucleotide
ggugaugacguggcacacc

SEQ ID NO: 319174 - RNA, 19 nt, Artificial Sequence
  Description of Artificial Sequence: Synthetic oligonucleotide
ugucagucaccgguagauu

SEQ ID NO: 319175 - RNA, 19 nt, Artificial Sequence
  Description of Artificial Sequence: Synthetic oligonucleotide
gggcuuauggcuucccaaa

SEQ ID NO: 319176 - RNA, 19 nt, Artificial Sequence
  Description of Artificial Sequence: Synthetic oligonucleotide
cggagugauaccucaugag

SEQ ID NO: 319177 - RNA, 19 nt, Artificial Sequence
  Description of Artificial Sequence: Synthetic oligonucleotide
gagagaccccuggagagcu

SEQ ID NO: 319178 - RNA, 19 nt, Artificial Sequence
  Description of Artificial Sequence: Synthetic oligonucleotide
cugcaauguggcucucuga

SEQ ID NO: 319179 - RNA, 19 nt, Artificial Sequence
  Description of Artificial Sequence: Synthetic oligonucleotide
gcagaaucaagggcuuaug

SEQ ID NO: 319180 - RNA, 19 nt, Artificial Sequence
  Description of Artificial Sequence: Synthetic oligonucleotide
uaaaccccucucagucguu

SEQ ID NO: 319181 - RNA, 19 nt, Artificial Sequence
  Description of Artificial Sequence: Synthetic oligonucleotide
agucaccgguagauucggg

SEQ ID NO: 319182 - RNA, 19 nt, Artificial Sequence
  Description of Artificial Sequence: Synthetic oligonucleotide
gaagcucucgagaugucuu

SEQ ID NO: 319183 - RNA, 19 nt, Artificial Sequence
  Description of Artificial Sequence: Synthetic oligonucleotide
ggccacucgaagaauaucu

SEQ ID NO: 319184 - RNA, 19 nt, Artificial Sequence
  Description of Artificial Sequence: Synthetic oligonucleotide
aggcguuuguucagcaaau

SEQ ID NO: 319185 - RNA, 19 nt, Artificial Sequence
  Description of Artificial Sequence: Synthetic oligonucleotide
cucaccccggugaugacgu

SEQ ID NO: 319186 - RNA, 19 nt, Artificial Sequence
  Description of Artificial Sequence: Synthetic oligonucleotide
agaagcgaguaggccuuca

SEQ ID NO: 319187 - RNA, 19 nt, Artificial Sequence
  Description of Artificial Sequence: Synthetic oligonucleotide
guuugcguaagcugcuguu

SEQ ID NO: 319188 - RNA, 19 nt, Artificial Sequence
  Description of Artificial Sequence: Synthetic oligonucleotide
cuguguaaaagacgaguuu

SEQ ID NO: 319189 - RNA, 19 nt, Artificial Sequence
  Description of Artificial Sequence: Synthetic oligonucleotide
uagcaagaacagggagucu

SEQ ID NO: 319190 - RNA, 19 nt, Artificial Sequence
  Description of Artificial Sequence: Synthetic oligonucleotide
uggaugcguuggaaagguu

SEQ ID NO: 319191 - RNA, 19 nt, Artificial Sequence
  Description of Artificial Sequence: Synthetic oligonucleotide
caugguacucaaccucgua

SEQ ID NO: 319192 - RNA, 19 nt, Artificial Sequence
  Description of Artificial Sequence: Synthetic oligonucleotide
ucaaccucguaggcuugua

SEQ ID NO: 319193 - RNA, 19 nt, Artificial Sequence
  Description of Artificial Sequence: Synthetic oligonucleotide
ggaaagguucgcccaaggu

SEQ ID NO: 319194 - RNA, 19 nt, Artificial Sequence
  Description of Artificial Sequence: Synthetic oligonucleotide
uaaucaugucuggccgaua

SEQ ID NO: 319195 - RNA, 19 nt, Artificial Sequence
  Description of Artificial Sequence: Synthetic oligonucleotide
aggcgaacaccgugagaaa

SEQ ID NO: 319196 - RNA, 19 nt, Artificial Sequence
  Description of Artificial Sequence: Synthetic oligonucleotide
agccgagugggaacuguga

SEQ ID NO: 319197 - RNA, 19 nt, Artificial Sequence
  Description of Artificial Sequence: Synthetic oligonucleotide
caugucuggccgauacugu

SEQ ID NO: 319198 - RNA, 19 nt, Artificial Sequence
  Description of Artificial Sequence: Synthetic oligonucleotide
acugugaggcgaacaccgu

SEQ ID NO: 319199 - RNA, 19 nt, Artificial Sequence
  Description of Artificial Sequence: Synthetic oligonucleotide
aagguucgcccaaggucaa

SEQ ID NO: 319200 - RNA, 19 nt, Artificial Sequence
  Description of Artificial Sequence: Synthetic oligonucleotide
ucguaggcuuguagcuguu

SEQ ID NO: 319201 - RNA, 19 nt, Artificial Sequence
  Description of Artificial Sequence: Synthetic oligonucleotide
ggcuggggccaauuucgug

SEQ ID NO: 319202 - RNA, 19 nt, Artificial Sequence
  Description of Artificial Sequence: Synthetic oligonucleotide
acucaaccucguaggcuug

SEQ ID NO: 319203 - RNA, 19 nt, Artificial Sequence
  Description of Artificial Sequence: Synthetic oligonucleotide
ucaccucagguaggaggaa

SEQ ID NO: 319204 - RNA, 19 nt, Artificial Sequence
  Description of Artificial Sequence: Synthetic oligonucleotide
caaagccgagugggaacug

SEQ ID NO: 319205 - RNA, 19 nt, Artificial Sequence
  Description of Artificial Sequence: Synthetic oligonucleotide
ggagugauuucuucauaau

SEQ ID NO: 319206 - RNA, 19 nt, Artificial Sequence
  Description of Artificial Sequence: Synthetic oligonucleotide
aggagcucucagagacggg

SEQ ID NO: 319207 - RNA, 19 nt, Artificial Sequence
  Description of Artificial Sequence: Synthetic oligonucleotide
ggcuuuggaucuuagcauu

SEQ ID NO: 319208 - RNA, 19 nt, Artificial Sequence
  Description of Artificial Sequence: Synthetic oligonucleotide
gcuacaaagccgaguggga

SEQ ID NO: 319209 - RNA, 19 nt, Artificial Sequence
  Description of Artificial Sequence: Synthetic oligonucleotide
cugggacuuuugcccuccc

SEQ ID NO: 319210 - RNA, 19 nt, Artificial Sequence
  Description of Artificial Sequence: Synthetic oligonucleotide
ugggaacugugaggcgaac

SEQ ID NO: 319211 - RNA, 19 nt, Artificial Sequence
  Description of Artificial Sequence: Synthetic oligonucleotide
gaccccuggagagcucuga

SEQ ID NO: 319212 - RNA, 19 nt, Artificial Sequence
  Description of Artificial Sequence: Synthetic oligonucleotide
ccgauacuguuuccgaaga

SEQ ID NO: 319213 - RNA, 19 nt, Artificial Sequence
  Description of Artificial Sequence: Synthetic oligonucleotide
gaaugccugcuggggugac

SEQ ID NO: 319214 - RNA, 19 nt, Artificial Sequence
  Description of Artificial Sequence: Synthetic oligonucleotide
gcaauuguuccaggagauc

SEQ ID NO: 319215 - RNA, 19 nt, Artificial Sequence
  Description of Artificial Sequence: Synthetic oligonucleotide
ucaccccggugaugacgug

SEQ ID NO: 319216 - RNA, 19 nt, Artificial Sequence
  Description of Artificial Sequence: Synthetic oligonucleotide
ggaucguggagggagcucu

SEQ ID NO: 319217 - RNA, 19 nt, Artificial Sequence
  Description of Artificial Sequence: Synthetic oligonucleotide
ggaggagccgugacagcug

SEQ ID NO: 319218 - RNA, 19 nt, Artificial Sequence
  Description of Artificial Sequence: Synthetic oligonucleotide
ggagucaguaacgaucaau

SEQ ID NO: 319219 - RNA, 19 nt, Artificial Sequence
  Description of Artificial Sequence: Synthetic oligonucleotide
cgaagacccaugucaaaca

SEQ ID NO: 319220 - RNA, 19 nt, Artificial Sequence
  Description of Artificial Sequence: Synthetic oligonucleotide
ccaugucaaacuuaauuuu

SEQ ID NO: 319221 - RNA, 19 nt, Artificial Sequence
  Description of Artificial Sequence: Synthetic oligonucleotide
ggccgauacuguuuccgaa

SEQ ID NO: 319222 - RNA, 19 nt, Artificial Sequence
  Description of Artificial Sequence: Synthetic oligonucleotide
ccaggugauuguagagguc

SEQ ID NO: 319223 - RNA, 19 nt, Artificial Sequence
  Description of Artificial Sequence: Synthetic oligonucleotide
agauucgggcuggguacaa

SEQ ID NO: 319224 - RNA, 19 nt, Artificial Sequence
  Description of Artificial Sequence: Synthetic oligonucleotide
ggugauuguagaggucucu

SEQ ID NO: 319225 - RNA, 19 nt, Artificial Sequence
  Description of Artificial Sequence: Synthetic oligonucleotide
caucugcgggcuggcgagc

SEQ ID NO: 319226 - RNA, 19 nt, Artificial Sequence
  Description of Artificial Sequence: Synthetic oligonucleotide
gaaugccgccgggucuuca

SEQ ID NO: 319227 - RNA, 19 nt, Artificial Sequence
  Description of Artificial Sequence: Synthetic oligonucleotide
ugaaugccgccgggucuuc

SEQ ID NO: 319228 - RNA, 19 nt, Artificial Sequence
  Description of Artificial Sequence: Synthetic oligonucleotide
ugcgggcuggcgagccaau

SEQ ID NO: 319229 - RNA, 19 nt, Artificial Sequence
  Description of Artificial Sequence: Synthetic oligonucleotide
ggagccgugacagcuggua

SEQ ID NO: 319230 - RNA, 19 nt, Artificial Sequence
  Description of Artificial Sequence: Synthetic oligonucleotide
gugauaccucaugaguuuu

SEQ ID NO: 319231 - RNA, 19 nt, Artificial Sequence
  Description of Artificial Sequence: Synthetic oligonucleotide
aggcuggggccaauuucgu

SEQ ID NO: 319232 - RNA, 19 nt, Artificial Sequence
  Description of Artificial Sequence: Synthetic oligonucleotide
cugggcacuuugccuucga

SEQ ID NO: 319233 - RNA, 19 nt, Artificial Sequence
  Description of Artificial Sequence: Synthetic oligonucleotide
ccuuguguucaugaggcgu

SEQ ID NO: 319234 - RNA, 19 nt, Artificial Sequence
  Description of Artificial Sequence: Synthetic oligonucleotide
gcagggcggagcguuccag

SEQ ID NO: 319235 - RNA, 19 nt, Artificial Sequence
  Description of Artificial Sequence: Synthetic oligonucleotide
gagugauaguggagucagu

SEQ ID NO: 319236 - RNA, 19 nt, Artificial Sequence
  Description of Artificial Sequence: Synthetic oligonucleotide
uggcucuaauggggaucgu

SEQ ID NO: 319237 - RNA, 19 nt, Artificial Sequence
  Description of Artificial Sequence: Synthetic oligonucleotide
ggggccaauuucgugcucu

SEQ ID NO: 319238 - RNA, 19 nt, Artificial Sequence
  Description of Artificial Sequence: Synthetic oligonucleotide
uggaggcgccuggcucucc

SEQ ID NO: 319239 - RNA, 19 nt, Artificial Sequence
  Description of Artificial Sequence: Synthetic oligonucleotide
cuggaggcgccuggcucuc

SEQ ID NO: 319240 - RNA, 19 nt, Artificial Sequence
  Description of Artificial Sequence: Synthetic oligonucleotide
accguggcuucaaggcuuu

SEQ ID NO: 319241 - RNA, 19 nt, Artificial Sequence
  Description of Artificial Sequence: Synthetic oligonucleotide
gcucacggagugauaccuc

SEQ ID NO: 319242 - RNA, 19 nt, Artificial Sequence
  Description of Artificial Sequence: Synthetic oligonucleotide
cgaagaauaucugcugucu

SEQ ID NO: 319243 - RNA, 19 nt, Artificial Sequence
  Description of Artificial Sequence: Synthetic oligonucleotide
ggguacaauccggcuccug

SEQ ID NO: 319244 - RNA, 19 nt, Artificial Sequence
  Description of Artificial Sequence: Synthetic oligonucleotide
gcgucucugugcucacgga

SEQ ID NO: 319245 - RNA, 19 nt, Artificial Sequence
  Description of Artificial Sequence: Synthetic oligonucleotide
cagaccccauagcugcagu

SEQ ID NO: 319246 - RNA, 19 nt, Artificial Sequence
  Description of Artificial Sequence: Synthetic oligonucleotide
agguucgcccaaggucaau

SEQ ID NO: 319247 - RNA, 19 nt, Artificial Sequence
  Description of Artificial Sequence: Synthetic oligonucleotide
caggguguuggcucuccuu

SEQ ID NO: 319248 - RNA, 19 nt, Artificial Sequence
  Description of Artificial Sequence: Synthetic oligonucleotide
cucaaccucguaggcuugu

SEQ ID NO: 319249 - RNA, 19 nt, Artificial Sequence
  Description of Artificial Sequence: Synthetic oligonucleotide
cuucacgcacuggcucuaa

SEQ ID NO: 319250 - RNA, 19 nt, Artificial Sequence
  Description of Artificial Sequence: Synthetic oligonucleotide
gggaucguggagggagcuc

SEQ ID NO: 319251 - RNA, 19 nt, Artificial Sequence
  Description of Artificial Sequence: Synthetic oligonucleotide
gaguggccacucgaagaau

SEQ ID NO: 319252 - RNA, 19 nt, Artificial Sequence
  Description of Artificial Sequence: Synthetic oligonucleotide
ccggcuccugagugcuggg

SEQ ID NO: 319253 - RNA, 19 nt, Artificial Sequence
  Description of Artificial Sequence: Synthetic oligonucleotide
ccagaagcgaguaggccuu

SEQ ID NO: 319254 - RNA, 19 nt, Artificial Sequence
  Description of Artificial Sequence: Synthetic oligonucleotide
guagaggcuggggccaauu

SEQ ID NO: 319255 - RNA, 19 nt, Artificial Sequence
  Description of Artificial Sequence: Synthetic oligonucleotide
cucagucguuccccauggu

SEQ ID NO: 319256 - RNA, 19 nt, Artificial Sequence
  Description of Artificial Sequence: Synthetic oligonucleotide
cgugagaaaccagggagcu

SEQ ID NO: 319257 - RNA, 19 nt, Artificial Sequence
  Description of Artificial Sequence: Synthetic oligonucleotide
ccaccguggcuucaaggcu

SEQ ID NO: 319258 - RNA, 19 nt, Artificial Sequence
  Description of Artificial Sequence: Synthetic oligonucleotide
ccgguagauucgggcuggg

SEQ ID NO: 319259 - RNA, 19 nt, Artificial Sequence
  Description of Artificial Sequence: Synthetic oligonucleotide
gcguaagcugcuguugguu

SEQ ID NO: 319260 - RNA, 19 nt, Artificial Sequence
  Description of Artificial Sequence: Synthetic oligonucleotide
ggggaucguggagggagcu

SEQ ID NO: 319261 - RNA, 19 nt, Artificial Sequence
  Description of Artificial Sequence: Synthetic oligonucleotide
caucuugcucucgcugguu

SEQ ID NO: 319262 - RNA, 19 nt, Artificial Sequence
  Description of Artificial Sequence: Synthetic oligonucleotide
cgggcaccgccucuuuguc

SEQ ID NO: 319263 - RNA, 19 nt, Artificial Sequence
  Description of Artificial Sequence: Synthetic oligonucleotide
cgaagcucucgagaugucu

SEQ ID NO: 319264 - RNA, 19 nt, Artificial Sequence
  Description of Artificial Sequence: Synthetic oligonucleotide
ccauccugagcagcaguau

SEQ ID NO: 319265 - RNA, 19 nt, Artificial Sequence
  Description of Artificial Sequence: Synthetic oligonucleotide
ccgugacagcugguacauc

SEQ ID NO: 319266 - RNA, 19 nt, Artificial Sequence
  Description of Artificial Sequence: Synthetic oligonucleotide
gcaccgccucuuugucacu

SEQ ID NO: 319267 - RNA, 19 nt, Artificial Sequence
  Description of Artificial Sequence: Synthetic oligonucleotide
ccccggugaugacguggca

SEQ ID NO: 319268 - RNA, 19 nt, Artificial Sequence
  Description of Artificial Sequence: Synthetic oligonucleotide
gcggagcguuccagcucca

SEQ ID NO: 319269 - RNA, 19 nt, Artificial Sequence
  Description of Artificial Sequence: Synthetic oligonucleotide
gcgggcuggcgagccaauu

SEQ ID NO: 319270 - RNA, 19 nt, Artificial Sequence
  Description of Artificial Sequence: Synthetic oligonucleotide
cgguagauucgggcugggu

SEQ ID NO: 319271 - RNA, 19 nt, Artificial Sequence
  Description of Artificial Sequence: Synthetic oligonucleotide
agauaaucgacccaugucc

SEQ ID NO: 319272 - RNA, 19 nt, Artificial Sequence
  Description of Artificial Sequence: Synthetic oligonucleotide
uauucuuuaaggccaaucg

SEQ ID NO: 319273 - RNA, 19 nt, Artificial Sequence
  Description of Artificial Sequence: Synthetic oligonucleotide
aaagcugucgaccaucuuc

SEQ ID NO: 319274 - RNA, 19 nt, Artificial Sequence
  Description of Artificial Sequence: Synthetic oligonucleotide
uauaaacguagcaaaaucc

SEQ ID NO: 319275 - RNA, 19 nt, Artificial Sequence
  Description of Artificial Sequence: Synthetic oligonucleotide
aauaauuacaguaaaugca

SEQ ID NO: 319276 - RNA, 19 nt, Artificial Sequence
  Description of Artificial Sequence: Synthetic oligonucleotide
aauccugaccaucuguccc

SEQ ID NO: 319277 - RNA, 19 nt, Artificial Sequence
  Description of Artificial Sequence: Synthetic oligonucleotide
cucucuauuagauuguugg

SEQ ID NO: 319278 - RNA, 19 nt, Artificial Sequence
  Description of Artificial Sequence: Synthetic oligonucleotide
auaucuuggguccauauag

SEQ ID NO: 319279 - RNA, 19 nt, Artificial Sequence
  Description of Artificial Sequence: Synthetic oligonucleotide
uggaaauaaagucugcuug

SEQ ID NO: 319280 - RNA, 19 nt, Artificial Sequence
  Description of Artificial Sequence: Synthetic oligonucleotide
ugaguguacagcuaguucc

SEQ ID NO: 319281 - RNA, 19 nt, Artificial Sequence
  Description of Artificial Sequence: Synthetic oligonucleotide
gauggcaccacucuugacg

SEQ ID NO: 319282 - RNA, 19 nt, Artificial Sequence
  Description of Artificial Sequence: Synthetic oligonucleotide
uaaaacacgacagaaagac

SEQ ID NO: 319283 - RNA, 19 nt, Artificial Sequence
  Description of Artificial Sequence: Synthetic oligonucleotide
aagauaaucgacccauguc

SEQ ID NO: 319284 - RNA, 19 nt, Artificial Sequence
  Description of Artificial Sequence: Synthetic oligonucleotide
uguaacaacagugccaggg

SEQ ID NO: 319285 - RNA, 19 nt, Artificial Sequence
  Description of Artificial Sequence: Synthetic oligonucleotide
agaguaaguaacuauauaa

SEQ ID NO: 319286 - RNA, 19 nt, Artificial Sequence
  Description of Artificial Sequence: Synthetic oligonucleotide
auauacaugaaagaguaag

SEQ ID NO: 319287 - RNA, 19 nt, Artificial Sequence
  Description of Artificial Sequence: Synthetic oligonucleotide
uuauaaacguagcaaaauc

SEQ ID NO: 319288 - RNA, 19 nt, Artificial Sequence
  Description of Artificial Sequence: Synthetic oligonucleotide
acagcuaugaguguacagc

SEQ ID NO: 319289 - RNA, 19 nt, Artificial Sequence
  Description of Artificial Sequence: Synthetic oligonucleotide
uuuaaggccaaucgacagg

SEQ ID NO: 319290 - RNA, 19 nt, Artificial Sequence
  Description of Artificial Sequence: Synthetic oligonucleotide
aacguagcaaaauccuuuc

SEQ ID NO: 319291 - RNA, 19 nt, Artificial Sequence
  Description of Artificial Sequence: Synthetic oligonucleotide
aggucagucauuaaaacac

SEQ ID NO: 319292 - RNA, 19 nt, Artificial Sequence
  Description of Artificial Sequence: Synthetic oligonucleotide
uucuuuaaggccaaucgac

SEQ ID NO: 319293 - RNA, 19 nt, Artificial Sequence
  Description of Artificial Sequence: Synthetic oligonucleotide
uuaaggucagucauuaaaa

SEQ ID NO: 319294 - RNA, 19 nt, Artificial Sequence
  Description of Artificial Sequence: Synthetic oligonucleotide
aguaguguggguaaacagc

SEQ ID NO: 319295 - RNA, 19 nt, Artificial Sequence
  Description of Artificial Sequence: Synthetic oligonucleotide
aaaucgaaagucucgucca

SEQ ID NO: 319296 - RNA, 19 nt, Artificial Sequence
  Description of Artificial Sequence: Synthetic oligonucleotide
cuuggguccauauagcgag

SEQ ID NO: 319297 - RNA, 19 nt, Artificial Sequence
  Description of Artificial Sequence: Synthetic oligonucleotide
aauucaaccuucucaggca

SEQ ID NO: 319298 - RNA, 19 nt, Artificial Sequence
  Description of Artificial Sequence: Synthetic oligonucleotide
aaguaguguggguaaacag

SEQ ID NO: 319299 - RNA, 19 nt, Artificial Sequence
  Description of Artificial Sequence: Synthetic oligonucleotide
gauccagcgaaucacccgg

SEQ ID NO: 319300 - RNA, 19 nt, Artificial Sequence
  Description of Artificial Sequence: Synthetic oligonucleotide
auaugcuagcgucuggucg

SEQ ID NO: 319301 - RNA, 19 nt, Artificial Sequence
  Description of Artificial Sequence: Synthetic oligonucleotide
aauaaggccuuuauuggag

SEQ ID NO: 319302 - RNA, 19 nt, Artificial Sequence
  Description of Artificial Sequence: Synthetic oligonucleotide
gucaagacagcuaugagug

SEQ ID NO: 319303 - RNA, 19 nt, Artificial Sequence
  Description of Artificial Sequence: Synthetic oligonucleotide
ugaauugacucaaaaggau

SEQ ID NO: 319304 - RNA, 19 nt, Artificial Sequence
  Description of Artificial Sequence: Synthetic oligonucleotide
caguaaaugcauaauuuac

SEQ ID NO: 319305 - RNA, 19 nt, Artificial Sequence
  Description of Artificial Sequence: Synthetic oligonucleotide
auuugaaccuucuuuggcu

SEQ ID NO: 319306 - RNA, 19 nt, Artificial Sequence
  Description of Artificial Sequence: Synthetic oligonucleotide
uuagauuguuggcauauuc

SEQ ID NO: 319307 - RNA, 19 nt, Artificial Sequence
  Description of Artificial Sequence: Synthetic oligonucleotide
accgcucucuauuagauug

SEQ ID NO: 319308 - RNA, 19 nt, Artificial Sequence
  Description of Artificial Sequence: Synthetic oligonucleotide
ucuguagaaguaguguggg

SEQ ID NO: 319309 - RNA, 19 nt, Artificial Sequence
  Description of Artificial Sequence: Synthetic oligonucleotide
gacgucuggaaauaaaguc

SEQ ID NO: 319310 - RNA, 19 nt, Artificial Sequence
  Description of Artificial Sequence: Synthetic oligonucleotide
uuacaguaaaugcauaauu

SEQ ID NO: 319311 - RNA, 19 nt, Artificial Sequence
  Description of Artificial Sequence: Synthetic oligonucleotide
guaagcauccacaugcccg

SEQ ID NO: 319312 - RNA, 19 nt, Artificial Sequence
  Description of Artificial Sequence: Synthetic oligonucleotide
aaacucuguaauaaaauau

SEQ ID NO: 319313 - RNA, 19 nt, Artificial Sequence
  Description of Artificial Sequence: Synthetic oligonucleotide
cucgguaucugacagggcc

SEQ ID NO: 319314 - RNA, 19 nt, Artificial Sequence
  Description of Artificial Sequence: Synthetic oligonucleotide
aaaagguuguugaacucuc

SEQ ID NO: 319315 - RNA, 19 nt, Artificial Sequence
  Description of Artificial Sequence: Synthetic oligonucleotide
auuagguauaagaacauga

SEQ ID NO: 319316 - RNA, 19 nt, Artificial Sequence
  Description of Artificial Sequence: Synthetic oligonucleotide
aauuagguauaagaacaug

SEQ ID NO: 319317 - RNA, 19 nt, Artificial Sequence
  Description of Artificial Sequence: Synthetic oligonucleotide
ucagucauuaaaacacgac

SEQ ID NO: 319318 - RNA, 19 nt, Artificial Sequence
  Description of Artificial Sequence: Synthetic oligonucleotide
uuugaaccuucuuuggcug

SEQ ID NO: 319319 - RNA, 19 nt, Artificial Sequence
  Description of Artificial Sequence: Synthetic oligonucleotide
gaugacauagaggagguga

SEQ ID NO: 319320 - RNA, 19 nt, Artificial Sequence
  Description of Artificial Sequence: Synthetic oligonucleotide
auaauuacaguaaaugcau

SEQ ID NO: 319321 - RNA, 19 nt, Artificial Sequence
  Description of Artificial Sequence: Synthetic oligonucleotide
aaucgacccauguccagag

SEQ ID NO: 319322 - RNA, 19 nt, Artificial Sequence
  Description of Artificial Sequence: Synthetic oligonucleotide
cacacaagcauuacaguac

SEQ ID NO: 319323 - RNA, 19 nt, Artificial Sequence
  Description of Artificial Sequence: Synthetic oligonucleotide
uaacucaucagagucaguc

SEQ ID NO: 319324 - RNA, 19 nt, Artificial Sequence
  Description of Artificial Sequence: Synthetic oligonucleotide
aauauaagaaacagucaau

SEQ ID NO: 319325 - RNA, 19 nt, Artificial Sequence
  Description of Artificial Sequence: Synthetic oligonucleotide
agguauaagaacaugaauu

SEQ ID NO: 319326 - RNA, 19 nt, Artificial Sequence
  Description of Artificial Sequence: Synthetic oligonucleotide
auauaaaugaggaagugua

SEQ ID NO: 319327 - RNA, 19 nt, Artificial Sequence
  Description of Artificial Sequence: Synthetic oligonucleotide
ucucuauuagauuguuggc

SEQ ID NO: 319328 - RNA, 19 nt, Artificial Sequence
  Description of Artificial Sequence: Synthetic oligonucleotide
accaacuuguccuggugac

SEQ ID NO: 319329 - RNA, 19 nt, Artificial Sequence
  Description of Artificial Sequence: Synthetic oligonucleotide
cacacuaccauccauuuga

SEQ ID NO: 319330 - RNA, 19 nt, Artificial Sequence
  Description of Artificial Sequence: Synthetic oligonucleotide
ucuugagaugaauuuucug

SEQ ID NO: 319331 - RNA, 19 nt, Artificial Sequence
  Description of Artificial Sequence: Synthetic oligonucleotide
aaaacacgacagaaagacg

SEQ ID NO: 319332 - RNA, 19 nt, Artificial Sequence
  Description of Artificial Sequence: Synthetic oligonucleotide
uugacguuugcucggcaag

SEQ ID NO: 319333 - RNA, 19 nt, Artificial Sequence
  Description of Artificial Sequence: Synthetic oligonucleotide
aucacccggucauugcucc

SEQ ID NO: 319334 - RNA, 19 nt, Artificial Sequence
  Description of Artificial Sequence: Synthetic oligonucleotide
ucccaaggcaucuugagau

SEQ ID NO: 319335 - RNA, 19 nt, Artificial Sequence
  Description of Artificial Sequence: Synthetic oligonucleotide
uguagagugcugcucccag

SEQ ID NO: 319336 - RNA, 19 nt, Artificial Sequence
  Description of Artificial Sequence: Synthetic oligonucleotide
ucggucauaauucaaccuu

SEQ ID NO: 319337 - RNA, 19 nt, Artificial Sequence
  Description of Artificial Sequence: Synthetic oligonucleotide
aucucgguaucugacaggg

SEQ ID NO: 319338 - RNA, 19 nt, Artificial Sequence
  Description of Artificial Sequence: Synthetic oligonucleotide
auaaacguagcaaaauccu

SEQ ID NO: 319339 - RNA, 19 nt, Artificial Sequence
  Description of Artificial Sequence: Synthetic oligonucleotide
auaaagucugcuuguuuca

SEQ ID NO: 319340 - RNA, 19 nt, Artificial Sequence
  Description of Artificial Sequence: Synthetic oligonucleotide
auauaagaaacagucaauu

SEQ ID NO: 319341 - RNA, 19 nt, Artificial Sequence
  Description of Artificial Sequence: Synthetic oligonucleotide
cuaguuccacccuuaagac

SEQ ID NO: 319342 - RNA, 19 nt, Artificial Sequence
  Description of Artificial Sequence: Synthetic oligonucleotide
ucguccaaggcuagaagug

SEQ ID NO: 319343 - RNA, 19 nt, Artificial Sequence
  Description of Artificial Sequence: Synthetic oligonucleotide
gaaagaguaaguaacuaua

SEQ ID NO: 319344 - RNA, 19 nt, Artificial Sequence
  Description of Artificial Sequence: Synthetic oligonucleotide
ucgacccauguccagagca

SEQ ID NO: 319345 - RNA, 19 nt, Artificial Sequence
  Description of Artificial Sequence: Synthetic oligonucleotide
gugaccaaaagguuguuga

SEQ ID NO: 319346 - RNA, 19 nt, Artificial Sequence
  Description of Artificial Sequence: Synthetic oligonucleotide
augaauugacucaaaagga

SEQ ID NO: 319347 - RNA, 19 nt, Artificial Sequence
  Description of Artificial Sequence: Synthetic oligonucleotide
aucgacaggauccagcgaa

SEQ ID NO: 319348 - RNA, 19 nt, Artificial Sequence
  Description of Artificial Sequence: Synthetic oligonucleotide
ugugcaaauggcaaaccuu

SEQ ID NO: 319349 - RNA, 19 nt, Artificial Sequence
  Description of Artificial Sequence: Synthetic oligonucleotide
uccuaguuugcugaguccc

SEQ ID NO: 319350 - RNA, 19 nt, Artificial Sequence
  Description of Artificial Sequence: Synthetic oligonucleotide
aacaccgcucucuauuaga

SEQ ID NO: 319351 - RNA, 19 nt, Artificial Sequence
  Description of Artificial Sequence: Synthetic oligonucleotide
aagcacaucucuugucuca

SEQ ID NO: 319352 - RNA, 19 nt, Artificial Sequence
  Description of Artificial Sequence: Synthetic oligonucleotide
uauuagauuguuggcauau

SEQ ID NO: 319353 - RNA, 19 nt, Artificial Sequence
  Description of Artificial Sequence: Synthetic oligonucleotide
gcuaguuccacccuuaaga

SEQ ID NO: 319354 - RNA, 19 nt, Artificial Sequence
  Description of Artificial Sequence: Synthetic oligonucleotide
cuuggauauacaugaaaga

SEQ ID NO: 319355 - RNA, 19 nt, Artificial Sequence
  Description of Artificial Sequence: Synthetic oligonucleotide
acgacagaaagacgucugg

SEQ ID NO: 319356 - RNA, 19 nt, Artificial Sequence
  Description of Artificial Sequence: Synthetic oligonucleotide
augcccgucugccacaggg

SEQ ID NO: 319357 - RNA, 19 nt, Artificial Sequence
  Description of Artificial Sequence: Synthetic oligonucleotide
gcuaugaguguacagcuag

SEQ ID NO: 319358 - RNA, 19 nt, Artificial Sequence
  Description of Artificial Sequence: Synthetic oligonucleotide
aagcccuauauuugcucag

SEQ ID NO: 319359 - RNA, 19 nt, Artificial Sequence
  Description of Artificial Sequence: Synthetic oligonucleotide
aguuccacccuuaagacau

SEQ ID NO: 319360 - RNA, 19 nt, Artificial Sequence
  Description of Artificial Sequence: Synthetic oligonucleotide
aaacguagcaaaauccuuu

SEQ ID NO: 319361 - RNA, 19 nt, Artificial Sequence
  Description of Artificial Sequence: Synthetic oligonucleotide
agggguaaaggcuguucac

SEQ ID NO: 319362 - RNA, 19 nt, Artificial Sequence
  Description of Artificial Sequence: Synthetic oligonucleotide
agaaguaguguggguaaac

SEQ ID NO: 319363 - RNA, 19 nt, Artificial Sequence
  Description of Artificial Sequence: Synthetic oligonucleotide
ugcucagauuuacacacaa

SEQ ID NO: 319364 - RNA, 19 nt, Artificial Sequence
  Description of Artificial Sequence: Synthetic oligonucleotide
uucaguugcccucguaggu

SEQ ID NO: 319365 - RNA, 19 nt, Artificial Sequence
  Description of Artificial Sequence: Synthetic oligonucleotide
uauucuguguuggaaucug

SEQ ID NO: 319366 - RNA, 19 nt, Artificial Sequence
  Description of Artificial Sequence: Synthetic oligonucleotide
aagcauuacaguacauuca

SEQ ID NO: 319367 - RNA, 19 nt, Artificial Sequence
  Description of Artificial Sequence: Synthetic oligonucleotide
acacaagcauuacaguaca

SEQ ID NO: 319368 - RNA, 19 nt, Artificial Sequence
  Description of Artificial Sequence: Synthetic oligonucleotide
aacacgacagaaagacguc

SEQ ID NO: 319369 - RNA, 19 nt, Artificial Sequence
  Description of Artificial Sequence: Synthetic oligonucleotide
aucuacaaggcacuccagu

SEQ ID NO: 319370 - RNA, 19 nt, Artificial Sequence
  Description of Artificial Sequence: Synthetic oligonucleotide
uguugaacucucuuuccaa

SEQ ID NO: 319371 - RNA, 19 nt, Artificial Sequence
  Description of Artificial Sequence: Synthetic oligonucleotide
gacagcuaugaguguacag

SEQ ID NO: 319372 - RNA, 19 nt, Artificial Sequence
  Description of Artificial Sequence: Synthetic oligonucleotide
ugaaguagcuucgguacug

SEQ ID NO: 319373 - RNA, 19 nt, Artificial Sequence
  Description of Artificial Sequence: Synthetic oligonucleotide
ggcacauaauuccacacug

SEQ ID NO: 319374 - RNA, 19 nt, Artificial Sequence
  Description of Artificial Sequence: Synthetic oligonucleotide
cucaucaaaccuccgauca

SEQ ID NO: 319375 - RNA, 19 nt, Artificial Sequence
  Description of Artificial Sequence: Synthetic oligonucleotide
gugcaaauggcaaaccuug

SEQ ID NO: 319376 - RNA, 19 nt, Artificial Sequence
  Description of Artificial Sequence: Synthetic oligonucleotide
ucggccgugaugaagugaa

SEQ ID NO: 319377 - RNA, 19 nt, Artificial Sequence
  Description of Artificial Sequence: Synthetic oligonucleotide
ugacccggaaguuggcagg

SEQ ID NO: 319378 - RNA, 19 nt, Artificial Sequence
  Description of Artificial Sequence: Synthetic oligonucleotide
ucugucggguucaucauua

SEQ ID NO: 319379 - RNA, 19 nt, Artificial Sequence
  Description of Artificial Sequence: Synthetic oligonucleotide
ugcacuggugcuguaagca

SEQ ID NO: 319380 - RNA, 19 nt, Artificial Sequence
  Description of Artificial Sequence: Synthetic oligonucleotide
gaucucgguaucugacagg

SEQ ID NO: 319381 - RNA, 19 nt, Artificial Sequence
  Description of Artificial Sequence: Synthetic oligonucleotide
uucauguccccauaugcua

SEQ ID NO: 319382 - RNA, 19 nt, Artificial Sequence
  Description of Artificial Sequence: Synthetic oligonucleotide
aaagucucguccaaggcua

SEQ ID NO: 319383 - RNA, 19 nt, Artificial Sequence
  Description of Artificial Sequence: Synthetic oligonucleotide
auaaucgacccauguccag

SEQ ID NO: 319384 - RNA, 19 nt, Artificial Sequence
  Description of Artificial Sequence: Synthetic oligonucleotide
augacauagaggaggugac

SEQ ID NO: 319385 - RNA, 19 nt, Artificial Sequence
  Description of Artificial Sequence: Synthetic oligonucleotide
auauagcgaguguugccag

SEQ ID NO: 319386 - RNA, 19 nt, Artificial Sequence
  Description of Artificial Sequence: Synthetic oligonucleotide
aaguccgggacgcugccca

SEQ ID NO: 319387 - RNA, 19 nt, Artificial Sequence
  Description of Artificial Sequence: Synthetic oligonucleotide
aaggccuuuauuggaguug

SEQ ID NO: 319388 - RNA, 19 nt, Artificial Sequence
  Description of Artificial Sequence: Synthetic oligonucleotide
ucccaagccuaauggaagc

SEQ ID NO: 319389 - RNA, 19 nt, Artificial Sequence
  Description of Artificial Sequence: Synthetic oligonucleotide
gaaagucucguccaaggcu

SEQ ID NO: 319390 - RNA, 19 nt, Artificial Sequence
  Description of Artificial Sequence: Synthetic oligonucleotide
agccacaccaccacggugg

SEQ ID NO: 319391 - RNA, 19 nt, Artificial Sequence
  Description of Artificial Sequence: Synthetic oligonucleotide
ucggauguccuuuggucug

SEQ ID NO: 319392 - RNA, 19 nt, Artificial Sequence
  Description of Artificial Sequence: Synthetic oligonucleotide
cucugcaccgucucugccg

SEQ ID NO: 319393 - RNA, 19 nt, Artificial Sequence
  Description of Artificial Sequence: Synthetic oligonucleotide
acgucuggaaauaaagucu

SEQ ID NO: 319394 - RNA, 19 nt, Artificial Sequence
  Description of Artificial Sequence: Synthetic oligonucleotide
ggcuuaacucaucagaguc

SEQ ID NO: 319395 - RNA, 19 nt, Artificial Sequence
  Description of Artificial Sequence: Synthetic oligonucleotide
caaggcuagaagugcuccg

SEQ ID NO: 319396 - RNA, 19 nt, Artificial Sequence
  Description of Artificial Sequence: Synthetic oligonucleotide
aaucgaaagucucguccaa

SEQ ID NO: 319397 - RNA, 19 nt, Artificial Sequence
  Description of Artificial Sequence: Synthetic oligonucleotide
uugguaaggugguccagca

SEQ ID NO: 319398 - RNA, 19 nt, Artificial Sequence
  Description of Artificial Sequence: Synthetic oligonucleotide
ugguucauguccccauaug

SEQ ID NO: 319399 - RNA, 19 nt, Artificial Sequence
  Description of Artificial Sequence: Synthetic oligonucleotide
uugccaauccacucguggu

SEQ ID NO: 319400 - RNA, 19 nt, Artificial Sequence
  Description of Artificial Sequence: Synthetic oligonucleotide
guaguguggguaaacagca

SEQ ID NO: 319401 - RNA, 19 nt, Artificial Sequence
  Description of Artificial Sequence: Synthetic oligonucleotide
uggaucucgguaucugaca

SEQ ID NO: 319402 - RNA, 19 nt, Artificial Sequence
  Description of Artificial Sequence: Synthetic oligonucleotide
acauaccaggcaggcaucc

SEQ ID NO: 319403 - RNA, 19 nt, Artificial Sequence
  Description of Artificial Sequence: Synthetic oligonucleotide
aggcacauaauuccacacu

SEQ ID NO: 319404 - RNA, 19 nt, Artificial Sequence
  Description of Artificial Sequence: Synthetic oligonucleotide
gauaaucgacccaugucca

SEQ ID NO: 319405 - RNA, 19 nt, Artificial Sequence
  Description of Artificial Sequence: Synthetic oligonucleotide
auggcaccacucuugacgu

SEQ ID NO: 319406 - RNA, 19 nt, Artificial Sequence
  Description of Artificial Sequence: Synthetic oligonucleotide
cagagugauuguugcagag

SEQ ID NO: 319407 - RNA, 19 nt, Artificial Sequence
  Description of Artificial Sequence: Synthetic oligonucleotide
gaaguaguguggguaaaca

SEQ ID NO: 319408 - RNA, 19 nt, Artificial Sequence
  Description of Artificial Sequence: Synthetic oligonucleotide
agcuuggauauacaugaaa

SEQ ID NO: 319409 - RNA, 19 nt, Artificial Sequence
  Description of Artificial Sequence: Synthetic oligonucleotide
aggaguaaguccugacugu

SEQ ID NO: 319410 - RNA, 19 nt, Artificial Sequence
  Description of Artificial Sequence: Synthetic oligonucleotide
ugaaaucgaaagucucguc

SEQ ID NO: 319411 - RNA, 19 nt, Artificial Sequence
  Description of Artificial Sequence: Synthetic oligonucleotide
cauauagcgaguguugcca

SEQ ID NO: 319412 - RNA, 19 nt, Artificial Sequence
  Description of Artificial Sequence: Synthetic oligonucleotide
cuggaucucgguaucugac

SEQ ID NO: 319413 - RNA, 19 nt, Artificial Sequence
  Description of Artificial Sequence: Synthetic oligonucleotide
uaaucgacccauguccaga

SEQ ID NO: 319414 - RNA, 19 nt, Artificial Sequence
  Description of Artificial Sequence: Synthetic oligonucleotide
aaggcuagaagugcuccgu

SEQ ID NO: 319415 - RNA, 19 nt, Artificial Sequence
  Description of Artificial Sequence: Synthetic oligonucleotide
uggcaaaccuugccugcgg

SEQ ID NO: 319416 - RNA, 19 nt, Artificial Sequence
  Description of Artificial Sequence: Synthetic oligonucleotide
ggaucucgguaucugacag

SEQ ID NO: 319417 - RNA, 19 nt, Artificial Sequence
  Description of Artificial Sequence: Synthetic oligonucleotide
gaauugacucaaaaggaua

SEQ ID NO: 319418 - RNA, 19 nt, Artificial Sequence
  Description of Artificial Sequence: Synthetic oligonucleotide
uccgaucagucccugugac

SEQ ID NO: 319419 - RNA, 19 nt, Artificial Sequence
  Description of Artificial Sequence: Synthetic oligonucleotide
ggaaguguaaguuuacaua

SEQ ID NO: 319420 - RNA, 19 nt, Artificial Sequence
  Description of Artificial Sequence: Synthetic oligonucleotide
aaagacgucuggaaauaaa

SEQ ID NO: 319421 - RNA, 19 nt, Artificial Sequence
  Description of Artificial Sequence: Synthetic oligonucleotide
guagaaguaguguggguaa

SEQ ID NO: 319422 - RNA, 19 nt, Artificial Sequence
  Description of Artificial Sequence: Synthetic oligonucleotide
ugcugaugccaaucucccg

SEQ ID NO: 319423 - RNA, 19 nt, Artificial Sequence
  Description of Artificial Sequence: Synthetic oligonucleotide
ucugcaccgucucugccgu

SEQ ID NO: 319424 - RNA, 19 nt, Artificial Sequence
  Description of Artificial Sequence: Synthetic oligonucleotide
gaagaguguggagggaggc

SEQ ID NO: 319425 - RNA, 19 nt, Artificial Sequence
  Description of Artificial Sequence: Synthetic oligonucleotide
agccucugaagauaaucga

SEQ ID NO: 319426 - RNA, 19 nt, Artificial Sequence
  Description of Artificial Sequence: Synthetic oligonucleotide
cacgacagaaagacgucug

SEQ ID NO: 319427 - RNA, 19 nt, Artificial Sequence
  Description of Artificial Sequence: Synthetic oligonucleotide
uggcuuaacucaucagagu

SEQ ID NO: 319428 - RNA, 19 nt, Artificial Sequence
  Description of Artificial Sequence: Synthetic oligonucleotide
uugcucggcaagcagccac

SEQ ID NO: 319429 - RNA, 19 nt, Artificial Sequence
  Description of Artificial Sequence: Synthetic oligonucleotide
acaagcggccaauggagga

SEQ ID NO: 319430 - RNA, 19 nt, Artificial Sequence
  Description of Artificial Sequence: Synthetic oligonucleotide
caggauccagcgaaucacc

SEQ ID NO: 319431 - RNA, 19 nt, Artificial Sequence
  Description of Artificial Sequence: Synthetic oligonucleotide
agcuaguuccacccuuaag

SEQ ID NO: 319432 - RNA, 19 nt, Artificial Sequence
  Description of Artificial Sequence: Synthetic oligonucleotide
gaacaccgcucucuauuag

SEQ ID NO: 319433 - RNA, 19 nt, Artificial Sequence
  Description of Artificial Sequence: Synthetic oligonucleotide
uacugcggcaggccaaggc

SEQ ID NO: 319434 - RNA, 19 nt, Artificial Sequence
  Description of Artificial Sequence: Synthetic oligonucleotide
uauagcgaguguugccaga

SEQ ID NO: 319435 - RNA, 19 nt, Artificial Sequence
  Description of Artificial Sequence: Synthetic oligonucleotide
gucggguucaucauuaaaa

SEQ ID NO: 319436 - RNA, 19 nt, Artificial Sequence
  Description of Artificial Sequence: Synthetic oligonucleotide
gugacccggaaguuggcag

SEQ ID NO: 319437 - RNA, 19 nt, Artificial Sequence
  Description of Artificial Sequence: Synthetic oligonucleotide
ugacauagaggaggugacc

SEQ ID NO: 319438 - RNA, 19 nt, Artificial Sequence
  Description of Artificial Sequence: Synthetic oligonucleotide
cuagaagugcuccgugaac

SEQ ID NO: 319439 - RNA, 19 nt, Artificial Sequence
  Description of Artificial Sequence: Synthetic oligonucleotide
guuugcucggcaagcagcc

SEQ ID NO: 319440 - RNA, 19 nt, Artificial Sequence
  Description of Artificial Sequence: Synthetic oligonucleotide
ucguugccaauccacucgu

SEQ ID NO: 319441 - RNA, 19 nt, Artificial Sequence
  Description of Artificial Sequence: Synthetic oligonucleotide
gucaagaggcugucaagac

SEQ ID NO: 319442 - RNA, 19 nt, Artificial Sequence
  Description of Artificial Sequence: Synthetic oligonucleotide
ugacguuugcucggcaagc

SEQ ID NO: 319443 - RNA, 19 nt, Artificial Sequence
  Description of Artificial Sequence: Synthetic oligonucleotide
ggauccagcgaaucacccg

SEQ ID NO: 319444 - RNA, 19 nt, Artificial Sequence
  Description of Artificial Sequence: Synthetic oligonucleotide
cugucaagacagcuaugag

SEQ ID NO: 319445 - RNA, 19 nt, Artificial Sequence
  Description of Artificial Sequence: Synthetic oligonucleotide
cauguccccauaugcuagc

SEQ ID NO: 319446 - RNA, 19 nt, Artificial Sequence
  Description of Artificial Sequence: Synthetic oligonucleotide
ugaaccuucuuuggcugca

SEQ ID NO: 319447 - RNA, 19 nt, Artificial Sequence
  Description of Artificial Sequence: Synthetic oligonucleotide
ccucguaggucuuucuugg

SEQ ID NO: 319448 - RNA, 19 nt, Artificial Sequence
  Description of Artificial Sequence: Synthetic oligonucleotide
ugaaguccgggacgcugcc

SEQ ID NO: 319449 - RNA, 19 nt, Artificial Sequence
  Description of Artificial Sequence: Synthetic oligonucleotide
acacacuaccauccauuug

SEQ ID NO: 319450 - RNA, 19 nt, Artificial Sequence
  Description of Artificial Sequence: Synthetic oligonucleotide
auggcaaaccuugccugcg

SEQ ID NO: 319451 - RNA, 19 nt, Artificial Sequence
  Description of Artificial Sequence: Synthetic oligonucleotide
caacuuguccuggugacuc

SEQ ID NO: 319452 - RNA, 19 nt, Artificial Sequence
  Description of Artificial Sequence: Synthetic oligonucleotide
uccccauaugcuagcgucu

SEQ ID NO: 319453 - RNA, 19 nt, Artificial Sequence
  Description of Artificial Sequence: Synthetic oligonucleotide
gucgaccaucuucaguugc

SEQ ID NO: 319454 - RNA, 19 nt, Artificial Sequence
  Description of Artificial Sequence: Synthetic oligonucleotide
aaaauaucuuggguccaua

SEQ ID NO: 319455 - RNA, 19 nt, Artificial Sequence
  Description of Artificial Sequence: Synthetic oligonucleotide
agacgucuggaaauaaagu

SEQ ID NO: 319456 - RNA, 19 nt, Artificial Sequence
  Description of Artificial Sequence: Synthetic oligonucleotide
cuccuaguuugcugagucc

SEQ ID NO: 319457 - RNA, 19 nt, Artificial Sequence
  Description of Artificial Sequence: Synthetic oligonucleotide
cuacaaggcacuccaguga

SEQ ID NO: 319458 - RNA, 19 nt, Artificial Sequence
  Description of Artificial Sequence: Synthetic oligonucleotide
acguuugcucggcaagcag

SEQ ID NO: 319459 - RNA, 19 nt, Artificial Sequence
  Description of Artificial Sequence: Synthetic oligonucleotide
aagaguguggagggaggca

SEQ ID NO: 319460 - RNA, 19 nt, Artificial Sequence
  Description of Artificial Sequence: Synthetic oligonucleotide
cacccuuaagacauuuaca

SEQ ID NO: 319461 - RNA, 19 nt, Artificial Sequence
  Description of Artificial Sequence: Synthetic oligonucleotide
ucgagccuguguauucugu

SEQ ID NO: 319462 - RNA, 19 nt, Artificial Sequence
  Description of Artificial Sequence: Synthetic oligonucleotide
cauaugcuagcgucugguc

SEQ ID NO: 319463 - RNA, 19 nt, Artificial Sequence
  Description of Artificial Sequence: Synthetic oligonucleotide
ugccaauccacucgugguu

SEQ ID NO: 319464 - RNA, 19 nt, Artificial Sequence
  Description of Artificial Sequence: Synthetic oligonucleotide
gcaaggcucuaucagcugc

SEQ ID NO: 319465 - RNA, 19 nt, Artificial Sequence
  Description of Artificial Sequence: Synthetic oligonucleotide
guggcgucgucaucuguag

SEQ ID NO: 319466 - RNA, 19 nt, Artificial Sequence
  Description of Artificial Sequence: Synthetic oligonucleotide
agaaagacgucuggaaaua

SEQ ID NO: 319467 - RNA, 19 nt, Artificial Sequence
  Description of Artificial Sequence: Synthetic oligonucleotide
guagagugcugcucccagc

SEQ ID NO: 319468 - RNA, 19 nt, Artificial Sequence
  Description of Artificial Sequence: Synthetic oligonucleotide
ccaaucgacaggauccagc

SEQ ID NO: 319469 - RNA, 19 nt, Artificial Sequence
  Description of Artificial Sequence: Synthetic oligonucleotide
acguagcaaaauccuuucu

SEQ ID NO: 319470 - RNA, 19 nt, Artificial Sequence
  Description of Artificial Sequence: Synthetic oligonucleotide
ccacccuuaagacauuuac

SEQ ID NO: 319471 - RNA, 19 nt, Artificial Sequence
  Description of Artificial Sequence: Synthetic oligonucleotide
uguccccauaugcuagcgu

SEQ ID NO: 319472 - RNA, 19 nt, Artificial Sequence
  Description of Artificial Sequence: Synthetic oligonucleotide
aggccggcccuuuuccuuc

SEQ ID NO: 319473 - RNA, 19 nt, Artificial Sequence
  Description of Artificial Sequence: Synthetic oligonucleotide
acacgacagaaagacgucu

SEQ ID NO: 319474 - RNA, 19 nt, Artificial Sequence
  Description of Artificial Sequence: Synthetic oligonucleotide
acauaauuccacacuggaa

SEQ ID NO: 319475 - RNA, 19 nt, Artificial Sequence
  Description of Artificial Sequence: Synthetic oligonucleotide
uggguccauauagcgagug

SEQ ID NO: 319476 - RNA, 19 nt, Artificial Sequence
  Description of Artificial Sequence: Synthetic oligonucleotide
caggcaucccgacccagag

SEQ ID NO: 319477 - RNA, 19 nt, Artificial Sequence
  Description of Artificial Sequence: Synthetic oligonucleotide
ugccguggcgucgucaucu

SEQ ID NO: 319478 - RNA, 19 nt, Artificial Sequence
  Description of Artificial Sequence: Synthetic oligonucleotide
ucuugacguuugcucggca

SEQ ID NO: 319479 - RNA, 19 nt, Artificial Sequence
  Description of Artificial Sequence: Synthetic oligonucleotide
cuguggcuuaacucaucag

SEQ ID NO: 319480 - RNA, 19 nt, Artificial Sequence
  Description of Artificial Sequence: Synthetic oligonucleotide
ucccgcuggaucucgguau

SEQ ID NO: 319481 - RNA, 19 nt, Artificial Sequence
  Description of Artificial Sequence: Synthetic oligonucleotide
ccauauagcgaguguugcc

SEQ ID NO: 319482 - RNA, 19 nt, Artificial Sequence
  Description of Artificial Sequence: Synthetic oligonucleotide
gcugucaagacagcuauga

SEQ ID NO: 319483 - RNA, 19 nt, Artificial Sequence
  Description of Artificial Sequence: Synthetic oligonucleotide
ucucgguaucugacagggc

SEQ ID NO: 319484 - RNA, 19 nt, Artificial Sequence
  Description of Artificial Sequence: Synthetic oligonucleotide
cacuaccauccauuugaac

SEQ ID NO: 319485 - RNA, 19 nt, Artificial Sequence
  Description of Artificial Sequence: Synthetic oligonucleotide
ggcaaaccuugccugcggg

SEQ ID NO: 319486 - RNA, 19 nt, Artificial Sequence
  Description of Artificial Sequence: Synthetic oligonucleotide
aagcggccaauggaggacu

SEQ ID NO: 319487 - RNA, 19 nt, Artificial Sequence
  Description of Artificial Sequence: Synthetic oligonucleotide
ucgugguucauguccccau

SEQ ID NO: 319488 - RNA, 19 nt, Artificial Sequence
  Description of Artificial Sequence: Synthetic oligonucleotide
cuugacguuugcucggcaa

SEQ ID NO: 319489 - RNA, 19 nt, Artificial Sequence
  Description of Artificial Sequence: Synthetic oligonucleotide
ggaguaaguccugacugug

SEQ ID NO: 319490 - RNA, 19 nt, Artificial Sequence
  Description of Artificial Sequence: Synthetic oligonucleotide
agugcuccgugaacaccgc

SEQ ID NO: 319491 - RNA, 19 nt, Artificial Sequence
  Description of Artificial Sequence: Synthetic oligonucleotide
ucccugugaccaaaagguu

SEQ ID NO: 319492 - RNA, 19 nt, Artificial Sequence
  Description of Artificial Sequence: Synthetic oligonucleotide
ucgacaggauccagcgaau

SEQ ID NO: 319493 - RNA, 19 nt, Artificial Sequence
  Description of Artificial Sequence: Synthetic oligonucleotide
uccacccuuaagacauuua

SEQ ID NO: 319494 - RNA, 19 nt, Artificial Sequence
  Description of Artificial Sequence: Synthetic oligonucleotide
gaaagacgucuggaaauaa

SEQ ID NO: 319495 - RNA, 19 nt, Artificial Sequence
  Description of Artificial Sequence: Synthetic oligonucleotide
uuggguccauauagcgagu

SEQ ID NO: 319496 - RNA, 19 nt, Artificial Sequence
  Description of Artificial Sequence: Synthetic oligonucleotide
gucguccuggaugugggug

SEQ ID NO: 319497 - RNA, 19 nt, Artificial Sequence
  Description of Artificial Sequence: Synthetic oligonucleotide
ggugacuccuugcccagug

SEQ ID NO: 319498 - RNA, 19 nt, Artificial Sequence
  Description of Artificial Sequence: Synthetic oligonucleotide
gugcuccggacacacuacc

SEQ ID NO: 319499 - RNA, 19 nt, Artificial Sequence
  Description of Artificial Sequence: Synthetic oligonucleotide
ugguaaggugguccagcau

SEQ ID NO: 319500 - RNA, 19 nt, Artificial Sequence
  Description of Artificial Sequence: Synthetic oligonucleotide
aagucucguccaaggcuag

SEQ ID NO: 319501 - RNA, 19 nt, Artificial Sequence
  Description of Artificial Sequence: Synthetic oligonucleotide
uggagggcucgucccgcag

SEQ ID NO: 319502 - RNA, 19 nt, Artificial Sequence
  Description of Artificial Sequence: Synthetic oligonucleotide
caagcggccaauggaggac

SEQ ID NO: 319503 - RNA, 19 nt, Artificial Sequence
  Description of Artificial Sequence: Synthetic oligonucleotide
ccacucuugacguuugcuc

SEQ ID NO: 319504 - RNA, 19 nt, Artificial Sequence
  Description of Artificial Sequence: Synthetic oligonucleotide
ugacuguggcagaguccag

SEQ ID NO: 319505 - RNA, 19 nt, Artificial Sequence
  Description of Artificial Sequence: Synthetic oligonucleotide
ccagacgagcucugcaccg

SEQ ID NO: 319506 - RNA, 19 nt, Artificial Sequence
  Description of Artificial Sequence: Synthetic oligonucleotide
aaguacaguuaaggucagu

SEQ ID NO: 319507 - RNA, 19 nt, Artificial Sequence
  Description of Artificial Sequence: Synthetic oligonucleotide
cucgagccuguguauucug

SEQ ID NO: 319508 - RNA, 19 nt, Artificial Sequence
  Description of Artificial Sequence: Synthetic oligonucleotide
cucuugacguuugcucggc

SEQ ID NO: 319509 - RNA, 19 nt, Artificial Sequence
  Description of Artificial Sequence: Synthetic oligonucleotide
cacauaccaggcaggcauc

SEQ ID NO: 319510 - RNA, 19 nt, Artificial Sequence
  Description of Artificial Sequence: Synthetic oligonucleotide
agggaaccugaaguccggg

SEQ ID NO: 319511 - RNA, 19 nt, Artificial Sequence
  Description of Artificial Sequence: Synthetic oligonucleotide
gacguuugcucggcaagca

SEQ ID NO: 319512 - RNA, 19 nt, Artificial Sequence
  Description of Artificial Sequence: Synthetic oligonucleotide
ggucagugacaugaucucc

SEQ ID NO: 319513 - RNA, 19 nt, Artificial Sequence
  Description of Artificial Sequence: Synthetic oligonucleotide
gacccggaaguuggcaggc

SEQ ID NO: 319514 - RNA, 19 nt, Artificial Sequence
  Description of Artificial Sequence: Synthetic oligonucleotide
cagcuaugaguguacagcu

SEQ ID NO: 319515 - RNA, 19 nt, Artificial Sequence
  Description of Artificial Sequence: Synthetic oligonucleotide
cucggauguccuuuggucu

SEQ ID NO: 319516 - RNA, 19 nt, Artificial Sequence
  Description of Artificial Sequence: Synthetic oligonucleotide
cguuugcucggcaagcagc

SEQ ID NO: 319517 - RNA, 19 nt, Artificial Sequence
  Description of Artificial Sequence: Synthetic oligonucleotide
cuauuagauuguuggcaua

SEQ ID NO: 319518 - RNA, 19 nt, Artificial Sequence
  Description of Artificial Sequence: Synthetic oligonucleotide
gcaagcagccacauaccag

SEQ ID NO: 319519 - RNA, 19 nt, Artificial Sequence
  Description of Artificial Sequence: Synthetic oligonucleotide
agcccuauauuugcucaga

SEQ ID NO: 319520 - RNA, 19 nt, Artificial Sequence
  Description of Artificial Sequence: Synthetic oligonucleotide
accgucucugccguggcgu

SEQ ID NO: 319521 - RNA, 19 nt, Artificial Sequence
  Description of Artificial Sequence: Synthetic oligonucleotide
ccuccuaguuugcugaguc

SEQ ID NO: 319522 - RNA, 19 nt, Artificial Sequence
  Description of Artificial Sequence: Synthetic oligonucleotide
uccgggacgcugcccaaau

SEQ ID NO: 319523 - RNA, 19 nt, Artificial Sequence
  Description of Artificial Sequence: Synthetic oligonucleotide
ccucggauguccuuugguc

SEQ ID NO: 319524 - RNA, 19 nt, Artificial Sequence
  Description of Artificial Sequence: Synthetic oligonucleotide
agacagcuaugaguguaca

SEQ ID NO: 319525 - RNA, 19 nt, Artificial Sequence
  Description of Artificial Sequence: Synthetic oligonucleotide
ugccaaacaagcggccaau

SEQ ID NO: 319526 - RNA, 19 nt, Artificial Sequence
  Description of Artificial Sequence: Synthetic oligonucleotide
gucuggucguccuggaugu

SEQ ID NO: 319527 - RNA, 19 nt, Artificial Sequence
  Description of Artificial Sequence: Synthetic oligonucleotide
acaccgcucucuauuagau

SEQ ID NO: 319528 - RNA, 19 nt, Artificial Sequence
  Description of Artificial Sequence: Synthetic oligonucleotide
cugcucagucugaugguga

SEQ ID NO: 319529 - RNA, 19 nt, Artificial Sequence
  Description of Artificial Sequence: Synthetic oligonucleotide
ccacucguugccaauccac

SEQ ID NO: 319530 - RNA, 19 nt, Artificial Sequence
  Description of Artificial Sequence: Synthetic oligonucleotide
gguacugcggcaggccaag

SEQ ID NO: 319531 - RNA, 19 nt, Artificial Sequence
  Description of Artificial Sequence: Synthetic oligonucleotide
ugcuuguuucagagugauu

SEQ ID NO: 319532 - RNA, 19 nt, Artificial Sequence
  Description of Artificial Sequence: Synthetic oligonucleotide
gcuucgguacugcggcagg

SEQ ID NO: 319533 - RNA, 19 nt, Artificial Sequence
  Description of Artificial Sequence: Synthetic oligonucleotide
ggcuagaagugcuccguga

SEQ ID NO: 319534 - RNA, 19 nt, Artificial Sequence
  Description of Artificial Sequence: Synthetic oligonucleotide
gcauccgggcaucuacaag

SEQ ID NO: 319535 - RNA, 19 nt, Artificial Sequence
  Description of Artificial Sequence: Synthetic oligonucleotide
aggccucggauguccuuug

SEQ ID NO: 319536 - RNA, 19 nt, Artificial Sequence
  Description of Artificial Sequence: Synthetic oligonucleotide
gaaguccgggacgcugccc

SEQ ID NO: 319537 - RNA, 19 nt, Artificial Sequence
  Description of Artificial Sequence: Synthetic oligonucleotide
gcugaggugucuugcuuuc

SEQ ID NO: 319538 - RNA, 19 nt, Artificial Sequence
  Description of Artificial Sequence: Synthetic oligonucleotide
cuccgaucagucccuguga

SEQ ID NO: 319539 - RNA, 19 nt, Artificial Sequence
  Description of Artificial Sequence: Synthetic oligonucleotide
ucacccggucauugcucca

SEQ ID NO: 319540 - RNA, 19 nt, Artificial Sequence
  Description of Artificial Sequence: Synthetic oligonucleotide
caccacucuugacguuugc

SEQ ID NO: 319541 - RNA, 19 nt, Artificial Sequence
  Description of Artificial Sequence: Synthetic oligonucleotide
gaucagucccugugaccaa

SEQ ID NO: 319542 - RNA, 19 nt, Artificial Sequence
  Description of Artificial Sequence: Synthetic oligonucleotide
ugcccucguaggucuuucu

SEQ ID NO: 319543 - RNA, 19 nt, Artificial Sequence
  Description of Artificial Sequence: Synthetic oligonucleotide
gcucuagcaggaguaaguc

SEQ ID NO: 319544 - RNA, 19 nt, Artificial Sequence
  Description of Artificial Sequence: Synthetic oligonucleotide
cuaugaguguacagcuagu

SEQ ID NO: 319545 - RNA, 19 nt, Artificial Sequence
  Description of Artificial Sequence: Synthetic oligonucleotide
acagcuaguuccacccuua

SEQ ID NO: 319546 - RNA, 19 nt, Artificial Sequence
  Description of Artificial Sequence: Synthetic oligonucleotide
gucugauggugaccagcca

SEQ ID NO: 319547 - RNA, 19 nt, Artificial Sequence
  Description of Artificial Sequence: Synthetic oligonucleotide
ccacaugcccgucugccac

SEQ ID NO: 319548 - RNA, 19 nt, Artificial Sequence
  Description of Artificial Sequence: Synthetic oligonucleotide
ugggcccgucccacugugc

SEQ ID NO: 319549 - RNA, 19 nt, Artificial Sequence
  Description of Artificial Sequence: Synthetic oligonucleotide
aucuucaguugcccucgua

SEQ ID NO: 319550 - RNA, 19 nt, Artificial Sequence
  Description of Artificial Sequence: Synthetic oligonucleotide
gugggcccgucccacugug

SEQ ID NO: 319551 - RNA, 19 nt, Artificial Sequence
  Description of Artificial Sequence: Synthetic oligonucleotide
gcucucuauuagauuguug

SEQ ID NO: 319552 - RNA, 19 nt, Artificial Sequence
  Description of Artificial Sequence: Synthetic oligonucleotide
ccgaucagucccugugacc

SEQ ID NO: 319553 - RNA, 19 nt, Artificial Sequence
  Description of Artificial Sequence: Synthetic oligonucleotide
ccggucauugcuccaaaca

SEQ ID NO: 319554 - RNA, 19 nt, Artificial Sequence
  Description of Artificial Sequence: Synthetic oligonucleotide
acacuaccauccauuugaa

SEQ ID NO: 319555 - RNA, 19 nt, Artificial Sequence
  Description of Artificial Sequence: Synthetic oligonucleotide
cuuguaucaugaugacuuu

SEQ ID NO: 319556 - RNA, 19 nt, Artificial Sequence
  Description of Artificial Sequence: Synthetic oligonucleotide
ugcuagcgucuggucgucc

SEQ ID NO: 319557 - RNA, 19 nt, Artificial Sequence
  Description of Artificial Sequence: Synthetic oligonucleotide
cagccacucguugccaauc

SEQ ID NO: 319558 - RNA, 19 nt, Artificial Sequence
  Description of Artificial Sequence: Synthetic oligonucleotide
gcccuuggagggcucgucc

SEQ ID NO: 319559 - RNA, 19 nt, Artificial Sequence
  Description of Artificial Sequence: Synthetic oligonucleotide
caacagugccagggcacug

SEQ ID NO: 319560 - RNA, 19 nt, Artificial Sequence
  Description of Artificial Sequence: Synthetic oligonucleotide
cagcgaaucacccggucau

SEQ ID NO: 319561 - RNA, 19 nt, Artificial Sequence
  Description of Artificial Sequence: Synthetic oligonucleotide
gccaauccacucgugguuc

SEQ ID NO: 319562 - RNA, 19 nt, Artificial Sequence
  Description of Artificial Sequence: Synthetic oligonucleotide
gugguucauguccccauau

SEQ ID NO: 319563 - RNA, 19 nt, Artificial Sequence
  Description of Artificial Sequence: Synthetic oligonucleotide
cucgugguucaugucccca

SEQ ID NO: 319564 - RNA, 19 nt, Artificial Sequence
  Description of Artificial Sequence: Synthetic oligonucleotide
agaacgcacauggcuugua

SEQ ID NO: 319565 - RNA, 19 nt, Artificial Sequence
  Description of Artificial Sequence: Synthetic oligonucleotide
guacugcggcaggccaagg

SEQ ID NO: 319566 - RNA, 19 nt, Artificial Sequence
  Description of Artificial Sequence: Synthetic oligonucleotide
ccuaguuugcugaguccca

SEQ ID NO: 319567 - RNA, 19 nt, Artificial Sequence
  Description of Artificial Sequence: Synthetic oligonucleotide
caugcccgucugccacagg

SEQ ID NO: 319568 - RNA, 19 nt, Artificial Sequence
  Description of Artificial Sequence: Synthetic oligonucleotide
cacggugggcccgucccac

SEQ ID NO: 319569 - RNA, 19 nt, Artificial Sequence
  Description of Artificial Sequence: Synthetic oligonucleotide
guacagcuaguuccacccu

SEQ ID NO: 319570 - RNA, 19 nt, Artificial Sequence
  Description of Artificial Sequence: Synthetic oligonucleotide
acccggucauugcuccaaa

SEQ ID NO: 319571 - RNA, 19 nt, Artificial Sequence
  Description of Artificial Sequence: Synthetic oligonucleotide
guguugccagacgagcucu

SEQ ID NO: 319572 - RNA, 19 nt, Artificial Sequence
  Description of Artificial Sequence: Synthetic oligonucleotide
ccagcgaaucacccgguca

SEQ ID NO: 319573 - RNA, 19 nt, Artificial Sequence
  Description of Artificial Sequence: Synthetic oligonucleotide
gguccauauagcgaguguu

SEQ ID NO: 319574 - RNA, 19 nt, Artificial Sequence
  Description of Artificial Sequence: Synthetic oligonucleotide
gggcccgucccacugugca

SEQ ID NO: 319575 - RNA, 19 nt, Artificial Sequence
  Description of Artificial Sequence: Synthetic oligonucleotide
cugucggguucaucauuaa

SEQ ID NO: 319576 - RNA, 19 nt, Artificial Sequence
  Description of Artificial Sequence: Synthetic oligonucleotide
gagaacgcacauggcuugu

SEQ ID NO: 319577 - RNA, 19 nt, Artificial Sequence
  Description of Artificial Sequence: Synthetic oligonucleotide
gcuccgugaacaccgcucu

SEQ ID NO: 319578 - RNA, 19 nt, Artificial Sequence
  Description of Artificial Sequence: Synthetic oligonucleotide
agcgaaucacccggucauu

SEQ ID NO: 319579 - RNA, 19 nt, Artificial Sequence
  Description of Artificial Sequence: Synthetic oligonucleotide
gccaaucgacaggauccag

SEQ ID NO: 319580 - RNA, 19 nt, Artificial Sequence
  Description of Artificial Sequence: Synthetic oligonucleotide
auccagcgaaucacccggu

SEQ ID NO: 319581 - RNA, 19 nt, Artificial Sequence
  Description of Artificial Sequence: Synthetic oligonucleotide
cagcuaguuccacccuuaa

SEQ ID NO: 319582 - RNA, 19 nt, Artificial Sequence
  Description of Artificial Sequence: Synthetic oligonucleotide
ccccauaugcuagcgucug

SEQ ID NO: 319583 - RNA, 19 nt, Artificial Sequence
  Description of Artificial Sequence: Synthetic oligonucleotide
cugcccaaauggggucggc

SEQ ID NO: 319584 - RNA, 19 nt, Artificial Sequence
  Description of Artificial Sequence: Synthetic oligonucleotide
ccaaauggggucggccgug

SEQ ID NO: 319585 - RNA, 19 nt, Artificial Sequence
  Description of Artificial Sequence: Synthetic oligonucleotide
gacgagcucugcaccgucu

SEQ ID NO: 319586 - RNA, 19 nt, Artificial Sequence
  Description of Artificial Sequence: Synthetic oligonucleotide
cucguaggucuuucuuggu

SEQ ID NO: 319587 - RNA, 19 nt, Artificial Sequence
  Description of Artificial Sequence: Synthetic oligonucleotide
ggccaaucgacaggaucca

SEQ ID NO: 319588 - RNA, 19 nt, Artificial Sequence
  Description of Artificial Sequence: Synthetic oligonucleotide
cagagucagucaagaggcu

SEQ ID NO: 319589 - RNA, 19 nt, Artificial Sequence
  Description of Artificial Sequence: Synthetic oligonucleotide
uggcaccacucuugacguu

SEQ ID NO: 319590 - RNA, 19 nt, Artificial Sequence
  Description of Artificial Sequence: Synthetic oligonucleotide
cccggucauugcuccaaac

SEQ ID NO: 319591 - RNA, 19 nt, Artificial Sequence
  Description of Artificial Sequence: Synthetic oligonucleotide
gcaccacucuugacguuug

SEQ ID NO: 319592 - RNA, 19 nt, Artificial Sequence
  Description of Artificial Sequence: Synthetic oligonucleotide
gcuagcgucuggucguccu

SEQ ID NO: 319593 - RNA, 19 nt, Artificial Sequence
  Description of Artificial Sequence: Synthetic oligonucleotide
cucgucccgcagcgcugcc

SEQ ID NO: 319594 - RNA, 19 nt, Artificial Sequence
  Description of Artificial Sequence: Synthetic oligonucleotide
gguaucugacagggccgac

SEQ ID NO: 319595 - RNA, 19 nt, Artificial Sequence
  Description of Artificial Sequence: Synthetic oligonucleotide
gcucgucccgcagcgcugc

SEQ ID NO: 319596 - RNA, 19 nt, Artificial Sequence
  Description of Artificial Sequence: Synthetic oligonucleotide
cugccguggcgucgucauc

SEQ ID NO: 319597 - RNA, 19 nt, Artificial Sequence
  Description of Artificial Sequence: Synthetic oligonucleotide
cccgcuggaucucgguauc

SEQ ID NO: 319598 - RNA, 19 nt, Artificial Sequence
  Description of Artificial Sequence: Synthetic oligonucleotide
ccauaugcuagcgucuggu

SEQ ID NO: 319599 - RNA, 19 nt, Artificial Sequence
  Description of Artificial Sequence: Synthetic oligonucleotide
gccguggcgucgucaucug

SEQ ID NO: 319600 - RNA, 19 nt, Artificial Sequence
  Description of Artificial Sequence: Synthetic oligonucleotide
gcacuggugcuguaagcau

SEQ ID NO: 319601 - RNA, 19 nt, Artificial Sequence
  Description of Artificial Sequence: Synthetic oligonucleotide
ggcaccacucuugacguuu

SEQ ID NO: 319602 - RNA, 19 nt, Artificial Sequence
  Description of Artificial Sequence: Synthetic oligonucleotide
gcccuauauuugcucagau

SEQ ID NO: 319603 - RNA, 19 nt, Artificial Sequence
  Description of Artificial Sequence: Synthetic oligonucleotide
gcggccaauggaggacuug

SEQ ID NO: 319604 - RNA, 19 nt, Artificial Sequence
  Description of Artificial Sequence: Synthetic oligonucleotide
cguggcgucgucaucugua

SEQ ID NO: 319605 - RNA, 19 nt, Artificial Sequence
  Description of Artificial Sequence: Synthetic oligonucleotide
gccucggauguccuuuggu

SEQ ID NO: 319606 - RNA, 19 nt, Artificial Sequence
  Description of Artificial Sequence: Synthetic oligonucleotide
gcgccgcaacacugcacug

SEQ ID NO: 319607 - RNA, 19 nt, Artificial Sequence
  Description of Artificial Sequence: Synthetic oligonucleotide
cugacagggccgacaugau

SEQ ID NO: 319608 - RNA, 19 nt, Artificial Sequence
  Description of Artificial Sequence: Synthetic oligonucleotide
cccuauauuugcucagauu

SEQ ID NO: 319609 - RNA, 19 nt, Artificial Sequence
  Description of Artificial Sequence: Synthetic oligonucleotide
cguugccaauccacucgug

SEQ ID NO: 319610 - RNA, 19 nt, Artificial Sequence
  Description of Artificial Sequence: Synthetic oligonucleotide
cacccugcuccuguagagu

SEQ ID NO: 319611 - RNA, 19 nt, Artificial Sequence
  Description of Artificial Sequence: Synthetic oligonucleotide
cagacgagcucugcaccgu

SEQ ID NO: 319612 - RNA, 19 nt, Artificial Sequence
  Description of Artificial Sequence: Synthetic oligonucleotide
caccgcucucuauuagauu

SEQ ID NO: 319613 - RNA, 19 nt, Artificial Sequence
  Description of Artificial Sequence: Synthetic oligonucleotide
agcggccaauggaggacuu

SEQ ID NO: 319614 - RNA, 19 nt, Artificial Sequence
  Description of Artificial Sequence: Synthetic oligonucleotide
caggccggcccuuuuccuu

SEQ ID NO: 319615 - RNA, 19 nt, Artificial Sequence
  Description of Artificial Sequence: Synthetic oligonucleotide
caggccucggauguccuuu

SEQ ID NO: 319616 - RNA, 19 nt, Artificial Sequence
  Description of Artificial Sequence: Synthetic oligonucleotide
ggcccgucccacugugcaa

SEQ ID NO: 319617 - RNA, 19 nt, Artificial Sequence
  Description of Artificial Sequence: Synthetic oligonucleotide
guccgggacgcugcccaaa

SEQ ID NO: 319618 - RNA, 19 nt, Artificial Sequence
  Description of Artificial Sequence: Synthetic oligonucleotide
ccgggacgcugcccaaaug

SEQ ID NO: 319619 - RNA, 19 nt, Artificial Sequence
  Description of Artificial Sequence: Synthetic oligonucleotide
guugcccucguaggucuuu

SEQ ID NO: 319620 - RNA, 19 nt, Artificial Sequence
  Description of Artificial Sequence: Synthetic oligonucleotide
cccaaauggggucggccgu

SEQ ID NO: 319621 - RNA, 19 nt, Artificial Sequence
  Description of Artificial Sequence: Synthetic oligonucleotide
ccgacaugauggcaccacu

SEQ ID NO: 319622 - RNA, 19 nt, Artificial Sequence
  Description of Artificial Sequence: Synthetic oligonucleotide
gcauuacaguacauucauu

SEQ ID NO: 319623 - RNA, 19 nt, Artificial Sequence
  Description of Artificial Sequence: Synthetic oligonucleotide
ccgucccacugugcaaaug

SEQ ID NO: 319624 - RNA, 19 nt, Artificial Sequence
  Description of Artificial Sequence: Synthetic oligonucleotide
gcccucguaggucuuucuu

SEQ ID NO: 319625 - RNA, 19 nt, Artificial Sequence
  Description of Artificial Sequence: Synthetic oligonucleotide
ccgcucucuauuagauugu

SEQ ID NO: 319626 - RNA, 19 nt, Artificial Sequence
  Description of Artificial Sequence: Synthetic oligonucleotide
cggccgugaugaagugaag

SEQ ID NO: 319627 - RNA, 19 nt, Artificial Sequence
  Description of Artificial Sequence: Synthetic oligonucleotide
cgguaucugacagggccga

SEQ ID NO: 319628 - RNA, 19 nt, Artificial Sequence
  Description of Artificial Sequence: Synthetic oligonucleotide
ccaacuuguccuggugacu

SEQ ID NO: 319629 - RNA, 19 nt, Artificial Sequence
  Description of Artificial Sequence: Synthetic oligonucleotide
ggccaauggaggacuugau

SEQ ID NO: 319630 - RNA, 19 nt, Artificial Sequence
  Description of Artificial Sequence: Synthetic oligonucleotide
gcgucuggucguccuggau

SEQ ID NO: 319631 - RNA, 19 nt, Artificial Sequence
  Description of Artificial Sequence: Synthetic oligonucleotide
cgcacauggcuuguaucau

SEQ ID NO: 319632 - RNA, 19 nt, Artificial Sequence
  Description of Artificial Sequence: Synthetic oligonucleotide
ccguggcgucgucaucugu

SEQ ID NO: 319633 - RNA, 19 nt, Artificial Sequence
  Description of Artificial Sequence: Synthetic oligonucleotide
cgcucucuauuagauuguu

SEQ ID NO: 319634 - RNA, 19 nt, Artificial Sequence
  Description of Artificial Sequence: Synthetic oligonucleotide
ccgcuggaucucgguaucu

SEQ ID NO: 319635 - RNA, 19 nt, Artificial Sequence
  Description of Artificial Sequence: Synthetic oligonucleotide
cgucugccacagggaaccu

SEQ ID NO: 319636 - RNA, 19 nt, Artificial Sequence
  Description of Artificial Sequence: Synthetic oligonucleotide
aauagcuuauguuaagugc

SEQ ID NO: 319637 - RNA, 19 nt, Artificial Sequence
  Description of Artificial Sequence: Synthetic oligonucleotide
uugaaugcaagcuaaaucg

SEQ ID NO: 319638 - RNA, 19 nt, Artificial Sequence
  Description of Artificial Sequence: Synthetic oligonucleotide
aagacuacuuucuauacac

SEQ ID NO: 319639 - RNA, 19 nt, Artificial Sequence
  Description of Artificial Sequence: Synthetic oligonucleotide
aauaacucaucuuauauau

SEQ ID NO: 319640 - RNA, 19 nt, Artificial Sequence
  Description of Artificial Sequence: Synthetic oligonucleotide
ucuacuauauuuuauaaaa

SEQ ID NO: 319641 - RNA, 19 nt, Artificial Sequence
  Description of Artificial Sequence: Synthetic oligonucleotide
agaacuuugguacacauug

SEQ ID NO: 319642 - RNA, 19 nt, Artificial Sequence
  Description of Artificial Sequence: Synthetic oligonucleotide
uuagcugacauuuuaaaga

SEQ ID NO: 319643 - RNA, 19 nt, Artificial Sequence
  Description of Artificial Sequence: Synthetic oligonucleotide
uaaaauaagcggaugauaa

SEQ ID NO: 319644 - RNA, 19 nt, Artificial Sequence
  Description of Artificial Sequence: Synthetic oligonucleotide
cuugacaguagcauuaugg

SEQ ID NO: 319645 - RNA, 19 nt, Artificial Sequence
  Description of Artificial Sequence: Synthetic oligonucleotide
aaaauaagcggaugauaac

SEQ ID NO: 319646 - RNA, 19 nt, Artificial Sequence
  Description of Artificial Sequence: Synthetic oligonucleotide
uauaguuucagcagggaug

SEQ ID NO: 319647 - RNA, 19 nt, Artificial Sequence
  Description of Artificial Sequence: Synthetic oligonucleotide
aaaauacccaugcggacgg

SEQ ID NO: 319648 - RNA, 19 nt, Artificial Sequence
  Description of Artificial Sequence: Synthetic oligonucleotide
ugcagauauacuuacagga

SEQ ID NO: 319649 - RNA, 19 nt, Artificial Sequence
  Description of Artificial Sequence: Synthetic oligonucleotide
guucaaaauacccaugcgg

SEQ ID NO: 319650 - RNA, 19 nt, Artificial Sequence
  Description of Artificial Sequence: Synthetic oligonucleotide
aaauagcuuauguuaagug

SEQ ID NO: 319651 - RNA, 19 nt, Artificial Sequence
  Description of Artificial Sequence: Synthetic oligonucleotide
uuuacuaaucaucacugac

SEQ ID NO: 319652 - RNA, 19 nt, Artificial Sequence
  Description of Artificial Sequence: Synthetic oligonucleotide
gagauauaguuucagcagg

SEQ ID NO: 319653 - RNA, 19 nt, Artificial Sequence
  Description of Artificial Sequence: Synthetic oligonucleotide
cuuaugagcaucauuguug

SEQ ID NO: 319654 - RNA, 19 nt, Artificial Sequence
  Description of Artificial Sequence: Synthetic oligonucleotide
uuugcugccugauagagcu

SEQ ID NO: 319655 - RNA, 19 nt, Artificial Sequence
  Description of Artificial Sequence: Synthetic oligonucleotide
uuacuaaucaucacugaca

SEQ ID NO: 319656 - RNA, 19 nt, Artificial Sequence
  Description of Artificial Sequence: Synthetic oligonucleotide
ucaucgagguucaucaagg

SEQ ID NO: 319657 - RNA, 19 nt, Artificial Sequence
  Description of Artificial Sequence: Synthetic oligonucleotide
aaaguucccaccauaaaag

SEQ ID NO: 319658 - RNA, 19 nt, Artificial Sequence
  Description of Artificial Sequence: Synthetic oligonucleotide
aaauaagcggaugauaaca

SEQ ID NO: 319659 - RNA, 19 nt, Artificial Sequence
  Description of Artificial Sequence: Synthetic oligonucleotide
uuaaauacgggacuugcaa

SEQ ID NO: 319660 - RNA, 19 nt, Artificial Sequence
  Description of Artificial Sequence: Synthetic oligonucleotide
uguaaacucccauuagggg

SEQ ID NO: 319661 - RNA, 19 nt, Artificial Sequence
  Description of Artificial Sequence: Synthetic oligonucleotide
uguaacacuugacaguagc

SEQ ID NO: 319662 - RNA, 19 nt, Artificial Sequence
  Description of Artificial Sequence: Synthetic oligonucleotide
aaaugagauuuccucauca

SEQ ID NO: 319663 - RNA, 19 nt, Artificial Sequence
  Description of Artificial Sequence: Synthetic oligonucleotide
aucagaugaagcucuacac

SEQ ID NO: 319664 - RNA, 19 nt, Artificial Sequence
  Description of Artificial Sequence: Synthetic oligonucleotide
gacaguagcauuauggagc

SEQ ID NO: 319665 - RNA, 19 nt, Artificial Sequence
  Description of Artificial Sequence: Synthetic oligonucleotide
ucauauucgaucuucugcu

SEQ ID NO: 319666 - RNA, 19 nt, Artificial Sequence
  Description of Artificial Sequence: Synthetic oligonucleotide
uuaaccacgggcaaacucu

SEQ ID NO: 319667 - RNA, 19 nt, Artificial Sequence
  Description of Artificial Sequence: Synthetic oligonucleotide
uuuaccuuggugaaucuac

SEQ ID NO: 319668 - RNA, 19 nt, Artificial Sequence
  Description of Artificial Sequence: Synthetic oligonucleotide
cuuauguuaagugcaaggg

SEQ ID NO: 319669 - RNA, 19 nt, Artificial Sequence
  Description of Artificial Sequence: Synthetic oligonucleotide
guuguaguuaaccacgggc

SEQ ID NO: 319670 - RNA, 19 nt, Artificial Sequence
  Description of Artificial Sequence: Synthetic oligonucleotide
aaaucgcaacaacauauug

SEQ ID NO: 319671 - RNA, 19 nt, Artificial Sequence
  Description of Artificial Sequence: Synthetic oligonucleotide
uauacuuacaggagguugu

SEQ ID NO: 319672 - RNA, 19 nt, Artificial Sequence
  Description of Artificial Sequence: Synthetic oligonucleotide
aguagcauuauggagcgcg

SEQ ID NO: 319673 - RNA, 19 nt, Artificial Sequence
  Description of Artificial Sequence: Synthetic oligonucleotide
uuguaguuaaccacgggca

SEQ ID NO: 319674 - RNA, 19 nt, Artificial Sequence
  Description of Artificial Sequence: Synthetic oligonucleotide
uauucgaucuucugcuugg

SEQ ID NO: 319675 - RNA, 19 nt, Artificial Sequence
  Description of Artificial Sequence: Synthetic oligonucleotide
uaagcggaugauaacacga

SEQ ID NO: 319676 - RNA, 19 nt, Artificial Sequence
  Description of Artificial Sequence: Synthetic oligonucleotide
ugucagaucuccaaaugug

SEQ ID NO: 319677 - RNA, 19 nt, Artificial Sequence
  Description of Artificial Sequence: Synthetic oligonucleotide
aaucgaaugcauccugaag

SEQ ID NO: 319678 - RNA, 19 nt, Artificial Sequence
  Description of Artificial Sequence: Synthetic oligonucleotide
aacuuugguacacauugca

SEQ ID NO: 319679 - RNA, 19 nt, Artificial Sequence
  Description of Artificial Sequence: Synthetic oligonucleotide
uaucccgcuacccuuauug

SEQ ID NO: 319680 - RNA, 19 nt, Artificial Sequence
  Description of Artificial Sequence: Synthetic oligonucleotide
aaagacuacuuucuauaca

SEQ ID NO: 319681 - RNA, 19 nt, Artificial Sequence
  Description of Artificial Sequence: Synthetic oligonucleotide
cagauauacuuacaggagg

SEQ ID NO: 319682 - RNA, 19 nt, Artificial Sequence
  Description of Artificial Sequence: Synthetic oligonucleotide
uauggagcgcgauagaacu

SEQ ID NO: 319683 - RNA, 19 nt, Artificial Sequence
  Description of Artificial Sequence: Synthetic oligonucleotide
acaguagcauuauggagcg

SEQ ID NO: 319684 - RNA, 19 nt, Artificial Sequence
  Description of Artificial Sequence: Synthetic oligonucleotide
uaaacucccauuaggggug

SEQ ID NO: 319685 - RNA, 19 nt, Artificial Sequence
  Description of Artificial Sequence: Synthetic oligonucleotide
uuuaaagacuacuuucuau

SEQ ID NO: 319686 - RNA, 19 nt, Artificial Sequence
  Description of Artificial Sequence: Synthetic oligonucleotide
aaaugucucacuguuguca

SEQ ID NO: 319687 - RNA, 19 nt, Artificial Sequence
  Description of Artificial Sequence: Synthetic oligonucleotide
gagguuguaguuaaccacg

SEQ ID NO: 319688 - RNA, 19 nt, Artificial Sequence
  Description of Artificial Sequence: Synthetic oligonucleotide
uacuaaucaucacugacau

SEQ ID NO: 319689 - RNA, 19 nt, Artificial Sequence
  Description of Artificial Sequence: Synthetic oligonucleotide
uugacaguagcauuaugga

SEQ ID NO: 319690 - RNA, 19 nt, Artificial Sequence
  Description of Artificial Sequence: Synthetic oligonucleotide
uuuaaauacgggacuugca

SEQ ID NO: 319691 - RNA, 19 nt, Artificial Sequence
  Description of Artificial Sequence: Synthetic oligonucleotide
cacgcuauguuugucaucg

SEQ ID NO: 319692 - RNA, 19 nt, Artificial Sequence
  Description of Artificial Sequence: Synthetic oligonucleotide
aggaauuggaguucucggg

SEQ ID NO: 319693 - RNA, 19 nt, Artificial Sequence
  Description of Artificial Sequence: Synthetic oligonucleotide
cuugaaugcaagcuaaauc

SEQ ID NO: 319694 - RNA, 19 nt, Artificial Sequence
  Description of Artificial Sequence: Synthetic oligonucleotide
ugaaugcaagcuaaaucgc

SEQ ID NO: 319695 - RNA, 19 nt, Artificial Sequence
  Description of Artificial Sequence: Synthetic oligonucleotide
ugacauuaacugcuggacc

SEQ ID NO: 319696 - RNA, 19 nt, Artificial Sequence
  Description of Artificial Sequence: Synthetic oligonucleotide
ugacaguagcauuauggag

SEQ ID NO: 319697 - RNA, 19 nt, Artificial Sequence
  Description of Artificial Sequence: Synthetic oligonucleotide
aucgcaacaacauauugau

SEQ ID NO: 319698 - RNA, 19 nt, Artificial Sequence
  Description of Artificial Sequence: Synthetic oligonucleotide
uuuuacuauuagcugacau

SEQ ID NO: 319699 - RNA, 19 nt, Artificial Sequence
  Description of Artificial Sequence: Synthetic oligonucleotide
uguuaacuccugcauagga

SEQ ID NO: 319700 - RNA, 19 nt, Artificial Sequence
  Description of Artificial Sequence: Synthetic oligonucleotide
caggcuggaaacuaaacug

SEQ ID NO: 319701 - RNA, 19 nt, Artificial Sequence
  Description of Artificial Sequence: Synthetic oligonucleotide
auccauaugguguuuccuc

SEQ ID NO: 319702 - RNA, 19 nt, Artificial Sequence
  Description of Artificial Sequence: Synthetic oligonucleotide
auauugauugauucaacau

SEQ ID NO: 319703 - RNA, 19 nt, Artificial Sequence
  Description of Artificial Sequence: Synthetic oligonucleotide
auagugaugucuguaaaug

SEQ ID NO: 319704 - RNA, 19 nt, Artificial Sequence
  Description of Artificial Sequence: Synthetic oligonucleotide
guguucaaaauacccaugc

SEQ ID NO: 319705 - RNA, 19 nt, Artificial Sequence
  Description of Artificial Sequence: Synthetic oligonucleotide
aaauacgggacuugcaaua

SEQ ID NO: 319706 - RNA, 19 nt, Artificial Sequence
  Description of Artificial Sequence: Synthetic oligonucleotide
aaucgcaacaacauauuga

SEQ ID NO: 319707 - RNA, 19 nt, Artificial Sequence
  Description of Artificial Sequence: Synthetic oligonucleotide
cucuacacagacuagccac

SEQ ID NO: 319708 - RNA, 19 nt, Artificial Sequence
  Description of Artificial Sequence: Synthetic oligonucleotide
ggucuauuggcacaaacag

SEQ ID NO: 319709 - RNA, 19 nt, Artificial Sequence
  Description of Artificial Sequence: Synthetic oligonucleotide
uucauacuuugcauaagga

SEQ ID NO: 319710 - RNA, 19 nt, Artificial Sequence
  Description of Artificial Sequence: Synthetic oligonucleotide
ucuauaaaauaagcggaug

SEQ ID NO: 319711 - RNA, 19 nt, Artificial Sequence
  Description of Artificial Sequence: Synthetic oligonucleotide
ugaaucuacuauauuuuau

SEQ ID NO: 319712 - RNA, 19 nt, Artificial Sequence
  Description of Artificial Sequence: Synthetic oligonucleotide
ugagugcccauuuugguac

SEQ ID NO: 319713 - RNA, 19 nt, Artificial Sequence
  Description of Artificial Sequence: Synthetic oligonucleotide
uguugugcuggccugacuc

SEQ ID NO: 319714 - RNA, 19 nt, Artificial Sequence
  Description of Artificial Sequence: Synthetic oligonucleotide
caugcuucggccauucaag

SEQ ID NO: 319715 - RNA, 19 nt, Artificial Sequence
  Description of Artificial Sequence: Synthetic oligonucleotide
agguucaucaaggagaacu

SEQ ID NO: 319716 - RNA, 19 nt, Artificial Sequence
  Description of Artificial Sequence: Synthetic oligonucleotide
uuuuauccuggacucauau

SEQ ID NO: 319717 - RNA, 19 nt, Artificial Sequence
  Description of Artificial Sequence: Synthetic oligonucleotide
gaaaggucauccugugggg

SEQ ID NO: 319718 - RNA, 19 nt, Artificial Sequence
  Description of Artificial Sequence: Synthetic oligonucleotide
acauauccaguuguaacac

SEQ ID NO: 319719 - RNA, 19 nt, Artificial Sequence
  Description of Artificial Sequence: Synthetic oligonucleotide
gaaugaccggcucugggag

SEQ ID NO: 319720 - RNA, 19 nt, Artificial Sequence
  Description of Artificial Sequence: Synthetic oligonucleotide
ugcaagcuaaaucgcaaca

SEQ ID NO: 319721 - RNA, 19 nt, Artificial Sequence
  Description of Artificial Sequence: Synthetic oligonucleotide
acacauugcagauauggau

SEQ ID NO: 319722 - RNA, 19 nt, Artificial Sequence
  Description of Artificial Sequence: Synthetic oligonucleotide
  modified_base (7)..(7): a, c, u, g, unknown or other
caaaggngggcuucucucc

SEQ ID NO: 319723 - RNA, 19 nt, Artificial Sequence
  Description of Artificial Sequence: Synthetic oligonucleotide
auauacuuacaggagguug

SEQ ID NO: 319724 - RNA, 19 nt, Artificial Sequence
  Description of Artificial Sequence: Synthetic oligonucleotide
uuauggagcgcgauagaac

SEQ ID NO: 319725 - RNA, 19 nt, Artificial Sequence
  Description of Artificial Sequence: Synthetic oligonucleotide
caggaauuggaguucucgg

SEQ ID NO: 319726 - RNA, 19 nt, Artificial Sequence
  Description of Artificial Sequence: Synthetic oligonucleotide
ggaauuggaguucucgggg

SEQ ID NO: 319727 - RNA, 19 nt, Artificial Sequence
  Description of Artificial Sequence: Synthetic oligonucleotide
cuacccuuauugaaggcag

SEQ ID NO: 319728 - RNA, 19 nt, Artificial Sequence
  Description of Artificial Sequence: Synthetic oligonucleotide
uuugggcgcaggauguuag

SEQ ID NO: 319729 - RNA, 19 nt, Artificial Sequence
  Description of Artificial Sequence: Synthetic oligonucleotide
gggacuugcaauaaaauac

SEQ ID NO: 319730 - RNA, 19 nt, Artificial Sequence
  Description of Artificial Sequence: Synthetic oligonucleotide
cgcaacaacauauugauug

SEQ ID NO: 319731 - RNA, 19 nt, Artificial Sequence
  Description of Artificial Sequence: Synthetic oligonucleotide
aacuccugcauaggacugc

SEQ ID NO: 319732 - RNA, 19 nt, Artificial Sequence
  Description of Artificial Sequence: Synthetic oligonucleotide
ugcagauauggauagugau

SEQ ID NO: 319733 - RNA, 19 nt, Artificial Sequence
  Description of Artificial Sequence: Synthetic oligonucleotide
gguaccagagcucuucagg

SEQ ID NO: 319734 - RNA, 19 nt, Artificial Sequence
  Description of Artificial Sequence: Synthetic oligonucleotide
aucgagguucaucaaggag

SEQ ID NO: 319735 - RNA, 19 nt, Artificial Sequence
  Description of Artificial Sequence: Synthetic oligonucleotide
uaugguguuuccucucuca

SEQ ID NO: 319736 - RNA, 19 nt, Artificial Sequence
  Description of Artificial Sequence: Synthetic oligonucleotide
  modified_base (6)..(6): a, c, u, g, unknown or other
aaaggngggcuucucucca

SEQ ID NO: 319737 - RNA, 19 nt, Artificial Sequence
  Description of Artificial Sequence: Synthetic oligonucleotide
auauaguuucagcagggau

SEQ ID NO: 319738 - RNA, 19 nt, Artificial Sequence
  Description of Artificial Sequence: Synthetic oligonucleotide
caccauaaaagucuugcuc

SEQ ID NO: 319739 - RNA, 19 nt, Artificial Sequence
  Description of Artificial Sequence: Synthetic oligonucleotide
ucaugcuucggccauucaa

SEQ ID NO: 319740 - RNA, 19 nt, Artificial Sequence
  Description of Artificial Sequence: Synthetic oligonucleotide
ucgaaugcauccugaagcu

SEQ ID NO: 319741 - RNA, 19 nt, Artificial Sequence
  Description of Artificial Sequence: Synthetic oligonucleotide
uacgggacuugcaauaaaa

SEQ ID NO: 319742 - RNA, 19 nt, Artificial Sequence
  Description of Artificial Sequence: Synthetic oligonucleotide
uugcagauauggauaguga

SEQ ID NO: 319743 - RNA, 19 nt, Artificial Sequence
  Description of Artificial Sequence: Synthetic oligonucleotide
gucaucgagguucaucaag

SEQ ID NO: 319744 - RNA, 19 nt, Artificial Sequence
  Description of Artificial Sequence: Synthetic oligonucleotide
agccaacucaugcuucggc

SEQ ID NO: 319745 - RNA, 19 nt, Artificial Sequence
  Description of Artificial Sequence: Synthetic oligonucleotide
uuccauacccuuuucucgu

SEQ ID NO: 319746 - RNA, 19 nt, Artificial Sequence
  Description of Artificial Sequence: Synthetic oligonucleotide
uggauagugaugucuguaa

SEQ ID NO: 319747 - RNA, 19 nt, Artificial Sequence
  Description of Artificial Sequence: Synthetic oligonucleotide
uuuugcuuucauagucccc

SEQ ID NO: 319748 - RNA, 19 nt, Artificial Sequence
  Description of Artificial Sequence: Synthetic oligonucleotide
  modified_base (8)..(8): a, c, u, g, unknown or other
ucaaaggngggcuucucuc

SEQ ID NO: 319749 - RNA, 19 nt, Artificial Sequence
  Description of Artificial Sequence: Synthetic oligonucleotide
uaaauacgggacuugcaau

SEQ ID NO: 319750 - RNA, 19 nt, Artificial Sequence
  Description of Artificial Sequence: Synthetic oligonucleotide
aucggagagaggcucacug

SEQ ID NO: 319751 - RNA, 19 nt, Artificial Sequence
  Description of Artificial Sequence: Synthetic oligonucleotide
  modified_base (5)..(5): a, c, u, g, unknown or other
aaggngggcuucucuccac

SEQ ID NO: 319752 - RNA, 19 nt, Artificial Sequence
  Description of Artificial Sequence: Synthetic oligonucleotide
gagacggucauguuuacua

SEQ ID NO: 319753 - RNA, 19 nt, Artificial Sequence
  Description of Artificial Sequence: Synthetic oligonucleotide
auauggauagugaugucug

SEQ ID NO: 319754 - RNA, 19 nt, Artificial Sequence
  Description of Artificial Sequence: Synthetic oligonucleotide
aaugcaagcuaaaucgcaa

SEQ ID NO: 319755 - RNA, 19 nt, Artificial Sequence
  Description of Artificial Sequence: Synthetic oligonucleotide
aagagacggucauguuuac

SEQ ID NO: 319756 - RNA, 19 nt, Artificial Sequence
  Description of Artificial Sequence: Synthetic oligonucleotide
uuccguucugcacacugug

SEQ ID NO: 319757 - RNA, 19 nt, Artificial Sequence
  Description of Artificial Sequence: Synthetic oligonucleotide
cuaaaucgcaacaacauau

SEQ ID NO: 319758 - RNA, 19 nt, Artificial Sequence
  Description of Artificial Sequence: Synthetic oligonucleotide
guaaacucccauuaggggu

SEQ ID NO: 319759 - RNA, 19 nt, Artificial Sequence
  Description of Artificial Sequence: Synthetic oligonucleotide
gcuucggccauucaagggg

SEQ ID NO: 319760 - RNA, 19 nt, Artificial Sequence
  Description of Artificial Sequence: Synthetic oligonucleotide
uucaagggguucccuagug

SEQ ID NO: 319761 - RNA, 19 nt, Artificial Sequence
  Description of Artificial Sequence: Synthetic oligonucleotide
ugcuucggccauucaaggg

SEQ ID NO: 319762 - RNA, 19 nt, Artificial Sequence
  Description of Artificial Sequence: Synthetic oligonucleotide
auuagggguggucugaguu

SEQ ID NO: 319763 - RNA, 19 nt, Artificial Sequence
  Description of Artificial Sequence: Synthetic oligonucleotide
uuaccuuggugaaucuacu

SEQ ID NO: 319764 - RNA, 19 nt, Artificial Sequence
  Description of Artificial Sequence: Synthetic oligonucleotide
gacgguuccguucugcaca

SEQ ID NO: 319765 - RNA, 19 nt, Artificial Sequence
  Description of Artificial Sequence: Synthetic oligonucleotide
ugcuuucauaguccccagg

SEQ ID NO: 319766 - RNA, 19 nt, Artificial Sequence
  Description of Artificial Sequence: Synthetic oligonucleotide
cugacauuaacugcuggac

SEQ ID NO: 319767 - RNA, 19 nt, Artificial Sequence
  Description of Artificial Sequence: Synthetic oligonucleotide
guuuugcugccugauagag

SEQ ID NO: 319768 - RNA, 19 nt, Artificial Sequence
  Description of Artificial Sequence: Synthetic oligonucleotide
auaaaauaagcggaugaua

SEQ ID NO: 319769 - RNA, 19 nt, Artificial Sequence
  Description of Artificial Sequence: Synthetic oligonucleotide
agcgcgauagaacuuuggu

SEQ ID NO: 319770 - RNA, 19 nt, Artificial Sequence
  Description of Artificial Sequence: Synthetic oligonucleotide
ucucguaucggacgguguc

SEQ ID NO: 319771 - RNA, 19 nt, Artificial Sequence
  Description of Artificial Sequence: Synthetic oligonucleotide
uaacuccugcauaggacug

SEQ ID NO: 319772 - RNA, 19 nt, Artificial Sequence
  Description of Artificial Sequence: Synthetic oligonucleotide
gauauggauagugaugucu

SEQ ID NO: 319773 - RNA, 19 nt, Artificial Sequence
  Description of Artificial Sequence: Synthetic oligonucleotide
augcuucggccauucaagg

SEQ ID NO: 319774 - RNA, 19 nt, Artificial Sequence
  Description of Artificial Sequence: Synthetic oligonucleotide
guucugcacacugugagug

SEQ ID NO: 319775 - RNA, 19 nt, Artificial Sequence
  Description of Artificial Sequence: Synthetic oligonucleotide
gcuauguuugucaucgagg

SEQ ID NO: 319776 - RNA, 19 nt, Artificial Sequence
  Description of Artificial Sequence: Synthetic oligonucleotide
accuuggugaaucuacuau

SEQ ID NO: 319777 - RNA, 19 nt, Artificial Sequence
  Description of Artificial Sequence: Synthetic oligonucleotide
uaguuaaccacgggcaaac

SEQ ID NO: 319778 - RNA, 19 nt, Artificial Sequence
  Description of Artificial Sequence: Synthetic oligonucleotide
agauauggauagugauguc

SEQ ID NO: 319779 - RNA, 19 nt, Artificial Sequence
  Description of Artificial Sequence: Synthetic oligonucleotide
cugcugaaagacccguugg

SEQ ID NO: 319780 - RNA, 19 nt, Artificial Sequence
  Description of Artificial Sequence: Synthetic oligonucleotide
ucaagggguucccuagugu

SEQ ID NO: 319781 - RNA, 19 nt, Artificial Sequence
  Description of Artificial Sequence: Synthetic oligonucleotide
uauggauagugaugucugu

SEQ ID NO: 319782 - RNA, 19 nt, Artificial Sequence
  Description of Artificial Sequence: Synthetic oligonucleotide
cgcgauagaacuuugguac

SEQ ID NO: 319783 - RNA, 19 nt, Artificial Sequence
  Description of Artificial Sequence: Synthetic oligonucleotide
uuguuaacuccugcauagg

SEQ ID NO: 319784 - RNA, 19 nt, Artificial Sequence
  Description of Artificial Sequence: Synthetic oligonucleotide
aauacgggacuugcaauaa

SEQ ID NO: 319785 - RNA, 19 nt, Artificial Sequence
  Description of Artificial Sequence: Synthetic oligonucleotide
uggacgucuguguugcugu

SEQ ID NO: 319786 - RNA, 19 nt, Artificial Sequence
  Description of Artificial Sequence: Synthetic oligonucleotide
gaaugcaagcuaaaucgca

SEQ ID NO: 319787 - RNA, 19 nt, Artificial Sequence
  Description of Artificial Sequence: Synthetic oligonucleotide
acauuaacugcuggaccac

SEQ ID NO: 319788 - RNA, 19 nt, Artificial Sequence
  Description of Artificial Sequence: Synthetic oligonucleotide
auuauggagcgcgauagaa

SEQ ID NO: 319789 - RNA, 19 nt, Artificial Sequence
  Description of Artificial Sequence: Synthetic oligonucleotide
gaauuggaguucucgggga

SEQ ID NO: 319790 - RNA, 19 nt, Artificial Sequence
  Description of Artificial Sequence: Synthetic oligonucleotide
cugaaagacccguugguga

SEQ ID NO: 319791 - RNA, 19 nt, Artificial Sequence
  Description of Artificial Sequence: Synthetic oligonucleotide
ggagguuguaguuaaccac

SEQ ID NO: 319792 - RNA, 19 nt, Artificial Sequence
  Description of Artificial Sequence: Synthetic oligonucleotide
acggucauguuuacuaauc

SEQ ID NO: 319793 - RNA, 19 nt, Artificial Sequence
  Description of Artificial Sequence: Synthetic oligonucleotide
caucagaugaagcucuaca

SEQ ID NO: 319794 - RNA, 19 nt, Artificial Sequence
  Description of Artificial Sequence: Synthetic oligonucleotide
agcggaugauaacacgaug

SEQ ID NO: 319795 - RNA, 19 nt, Artificial Sequence
  Description of Artificial Sequence: Synthetic oligonucleotide
guccguggggaagagacgg

SEQ ID NO: 319796 - RNA, 19 nt, Artificial Sequence
  Description of Artificial Sequence: Synthetic oligonucleotide
cacauugcagauauggaua

SEQ ID NO: 319797 - RNA, 19 nt, Artificial Sequence
  Description of Artificial Sequence: Synthetic oligonucleotide
acccguuggugacuauccc

SEQ ID NO: 319798 - RNA, 19 nt, Artificial Sequence
  Description of Artificial Sequence: Synthetic oligonucleotide
agacucagcauuucuguuu

SEQ ID NO: 319799 - RNA, 19 nt, Artificial Sequence
  Description of Artificial Sequence: Synthetic oligonucleotide
gguagcuuucuuaugagca

SEQ ID NO: 319800 - RNA, 19 nt, Artificial Sequence
  Description of Artificial Sequence: Synthetic oligonucleotide
aagcuugaaugcaagcuaa

SEQ ID NO: 319801 - RNA, 19 nt, Artificial Sequence
  Description of Artificial Sequence: Synthetic oligonucleotide
uagcuuauguuaagugcaa

SEQ ID NO: 319802 - RNA, 19 nt, Artificial Sequence
  Description of Artificial Sequence: Synthetic oligonucleotide
gauagugaugucuguaaau

SEQ ID NO: 319803 - RNA, 19 nt, Artificial Sequence
  Description of Artificial Sequence: Synthetic oligonucleotide
aggucuauuggcacaaaca

SEQ ID NO: 319804 - RNA, 19 nt, Artificial Sequence
  Description of Artificial Sequence: Synthetic oligonucleotide
cuauuagcugacauuuuaa

SEQ ID NO: 319805 - RNA, 19 nt, Artificial Sequence
  Description of Artificial Sequence: Synthetic oligonucleotide
cacaaucgaaugcauccug

SEQ ID NO: 319806 - RNA, 19 nt, Artificial Sequence
  Description of Artificial Sequence: Synthetic oligonucleotide
gcauuauggagcgcgauag

SEQ ID NO: 319807 - RNA, 19 nt, Artificial Sequence
  Description of Artificial Sequence: Synthetic oligonucleotide
aucaaggagaacugcugau

SEQ ID NO: 319808 - RNA, 19 nt, Artificial Sequence
  Description of Artificial Sequence: Synthetic oligonucleotide
gaacuuugguacacauugc

SEQ ID NO: 319809 - RNA, 19 nt, Artificial Sequence
  Description of Artificial Sequence: Synthetic oligonucleotide
caugagcaccgucugccgg

SEQ ID NO: 319810 - RNA, 19 nt, Artificial Sequence
  Description of Artificial Sequence: Synthetic oligonucleotide
ggagugguccaggacaucg

SEQ ID NO: 319811 - RNA, 19 nt, Artificial Sequence
  Description of Artificial Sequence: Synthetic oligonucleotide
guugccgacaaaugucuca

SEQ ID NO: 319812 - RNA, 19 nt, Artificial Sequence
  Description of Artificial Sequence: Synthetic oligonucleotide
agcacagccacaaaguauu

SEQ ID NO: 319813 - RNA, 19 nt, Artificial Sequence
  Description of Artificial Sequence: Synthetic oligonucleotide
ccuuuucucguaucggacg

SEQ ID NO: 319814 - RNA, 19 nt, Artificial Sequence
  Description of Artificial Sequence: Synthetic oligonucleotide
uacccaugcggacgguucc

SEQ ID NO: 319815 - RNA, 19 nt, Artificial Sequence
  Description of Artificial Sequence: Synthetic oligonucleotide
gauagaacuuugguacaca

SEQ ID NO: 319816 - RNA, 19 nt, Artificial Sequence
  Description of Artificial Sequence: Synthetic oligonucleotide
cauaaggaaugaccggcuc

SEQ ID NO: 319817 - RNA, 19 nt, Artificial Sequence
  Description of Artificial Sequence: Synthetic oligonucleotide
uuuauccuggacucauauu

SEQ ID NO: 319818 - RNA, 19 nt, Artificial Sequence
  Description of Artificial Sequence: Synthetic oligonucleotide
gguuccauacccuuuucuc

SEQ ID NO: 319819 - RNA, 19 nt, Artificial Sequence
  Description of Artificial Sequence: Synthetic oligonucleotide
ugugaagugcacugugguu

SEQ ID NO: 319820 - RNA, 19 nt, Artificial Sequence
  Description of Artificial Sequence: Synthetic oligonucleotide
uacuuacaggagguuguag

SEQ ID NO: 319821 - RNA, 19 nt, Artificial Sequence
  Description of Artificial Sequence: Synthetic oligonucleotide
gacccguuggugacuaucc

SEQ ID NO: 319822 - RNA, 19 nt, Artificial Sequence
  Description of Artificial Sequence: Synthetic oligonucleotide
gaagcucuacacagacuag

SEQ ID NO: 319823 - RNA, 19 nt, Artificial Sequence
  Description of Artificial Sequence: Synthetic oligonucleotide
aaacucccauuaggggugg

SEQ ID NO: 319824 - RNA, 19 nt, Artificial Sequence
  Description of Artificial Sequence: Synthetic oligonucleotide
guaucggacggugucuucc

SEQ ID NO: 319825 - RNA, 19 nt, Artificial Sequence
  Description of Artificial Sequence: Synthetic oligonucleotide
ugauaacacgaugccaaaa

SEQ ID NO: 319826 - RNA, 19 nt, Artificial Sequence
  Description of Artificial Sequence: Synthetic oligonucleotide
acggcuacuucggccaccc

SEQ ID NO: 319827 - RNA, 19 nt, Artificial Sequence
  Description of Artificial Sequence: Synthetic oligonucleotide
cagauauggauagugaugu

SEQ ID NO: 319828 - RNA, 19 nt, Artificial Sequence
  Description of Artificial Sequence: Synthetic oligonucleotide
gugaaucuacuauauuuua

SEQ ID NO: 319829 - RNA, 19 nt, Artificial Sequence
  Description of Artificial Sequence: Synthetic oligonucleotide
auuauggucaaagggucuu

SEQ ID NO: 319830 - RNA, 19 nt, Artificial Sequence
  Description of Artificial Sequence: Synthetic oligonucleotide
uaacugacccaugguagcu

SEQ ID NO: 319831 - RNA, 19 nt, Artificial Sequence
  Description of Artificial Sequence: Synthetic oligonucleotide
uaucggacggugucuucca

SEQ ID NO: 319832 - RNA, 19 nt, Artificial Sequence
  Description of Artificial Sequence: Synthetic oligonucleotide
ggcgcaggauguuaggacc

SEQ ID NO: 319833 - RNA, 19 nt, Artificial Sequence
  Description of Artificial Sequence: Synthetic oligonucleotide
gcagauauggauagugaug

SEQ ID NO: 319834 - RNA, 19 nt, Artificial Sequence
  Description of Artificial Sequence: Synthetic oligonucleotide
agcauuauggagcgcgaua

SEQ ID NO: 319835 - RNA, 19 nt, Artificial Sequence
  Description of Artificial Sequence: Synthetic oligonucleotide
uucccuagugugucagugu

SEQ ID NO: 319836 - RNA, 19 nt, Artificial Sequence
  Description of Artificial Sequence: Synthetic oligonucleotide
guucccuagugugucagug

SEQ ID NO: 319837 - RNA, 19 nt, Artificial Sequence
  Description of Artificial Sequence: Synthetic oligonucleotide
auacccaugcggacgguuc

SEQ ID NO: 319838 - RNA, 19 nt, Artificial Sequence
  Description of Artificial Sequence: Synthetic oligonucleotide
caguucgucguggagacuc

SEQ ID NO: 319839 - RNA, 19 nt, Artificial Sequence
  Description of Artificial Sequence: Synthetic oligonucleotide
acgggcaaacucuucacuu

SEQ ID NO: 319840 - RNA, 19 nt, Artificial Sequence
  Description of Artificial Sequence: Synthetic oligonucleotide
caugcggacgguuccguuc

SEQ ID NO: 319841 - RNA, 19 nt, Artificial Sequence
  Description of Artificial Sequence: Synthetic oligonucleotide
cucggagauauaguuucag

SEQ ID NO: 319842 - RNA, 19 nt, Artificial Sequence
  Description of Artificial Sequence: Synthetic oligonucleotide
uuggugaaucuacuauauu

SEQ ID NO: 319843 - RNA, 19 nt, Artificial Sequence
  Description of Artificial Sequence: Synthetic oligonucleotide
uccacgcuauguuugucau

SEQ ID NO: 319844 - RNA, 19 nt, Artificial Sequence
  Description of Artificial Sequence: Synthetic oligonucleotide
agacccguuggugacuauc

SEQ ID NO: 319845 - RNA, 19 nt, Artificial Sequence
  Description of Artificial Sequence: Synthetic oligonucleotide
augauaacacgaugccaaa

SEQ ID NO: 319846 - RNA, 19 nt, Artificial Sequence
  Description of Artificial Sequence: Synthetic oligonucleotide
ugacuaucccgcuacccuu

SEQ ID NO: 319847 - RNA, 19 nt, Artificial Sequence
  Description of Artificial Sequence: Synthetic oligonucleotide
ccauuauggucaaaggguc

SEQ ID NO: 319848 - RNA, 19 nt, Artificial Sequence
  Description of Artificial Sequence: Synthetic oligonucleotide
ucccauuagggguggucug

SEQ ID NO: 319849 - RNA, 19 nt, Artificial Sequence
  Description of Artificial Sequence: Synthetic oligonucleotide
guaacacuugacaguagca

SEQ ID NO: 319850 - RNA, 19 nt, Artificial Sequence
  Description of Artificial Sequence: Synthetic oligonucleotide
uacuauuagcugacauuuu

SEQ ID NO: 319851 - RNA, 19 nt, Artificial Sequence
  Description of Artificial Sequence: Synthetic oligonucleotide
gguuccguucugcacacug

SEQ ID NO: 319852 - RNA, 19 nt, Artificial Sequence
  Description of Artificial Sequence: Synthetic oligonucleotide
uccuggacucauauucgau

SEQ ID NO: 319853 - RNA, 19 nt, Artificial Sequence
  Description of Artificial Sequence: Synthetic oligonucleotide
cuccacaaucgaaugcauc

SEQ ID NO: 319854 - RNA, 19 nt, Artificial Sequence
  Description of Artificial Sequence: Synthetic oligonucleotide
ugacccaugguagcuuucu

SEQ ID NO: 319855 - RNA, 19 nt, Artificial Sequence
  Description of Artificial Sequence: Synthetic oligonucleotide
gcugcugaaagacccguug

SEQ ID NO: 319856 - RNA, 19 nt, Artificial Sequence
  Description of Artificial Sequence: Synthetic oligonucleotide
acaaucgaaugcauccuga

SEQ ID NO: 319857 - RNA, 19 nt, Artificial Sequence
  Description of Artificial Sequence: Synthetic oligonucleotide
ccaguuguaacacuugaca

SEQ ID NO: 319858 - RNA, 19 nt, Artificial Sequence
  Description of Artificial Sequence: Synthetic oligonucleotide
caaaugucucacuguuguc

SEQ ID NO: 319859 - RNA, 19 nt, Artificial Sequence
  Description of Artificial Sequence: Synthetic oligonucleotide
uuccgcuguucuaagcuuu

SEQ ID NO: 319860 - RNA, 19 nt, Artificial Sequence
  Description of Artificial Sequence: Synthetic oligonucleotide
acucaugcuucggccauuc

SEQ ID NO: 319861 - RNA, 19 nt, Artificial Sequence
  Description of Artificial Sequence: Synthetic oligonucleotide
gccugauagagcugugggg

SEQ ID NO: 319862 - RNA, 19 nt, Artificial Sequence
  Description of Artificial Sequence: Synthetic oligonucleotide
augcggacgguuccguucu

SEQ ID NO: 319863 - RNA, 19 nt, Artificial Sequence
  Description of Artificial Sequence: Synthetic oligonucleotide
accugaacccacacuguuc

SEQ ID NO: 319864 - RNA, 19 nt, Artificial Sequence
  Description of Artificial Sequence: Synthetic oligonucleotide
ucccgcuacccuuauugaa

SEQ ID NO: 319865 - RNA, 19 nt, Artificial Sequence
  Description of Artificial Sequence: Synthetic oligonucleotide
gcugacauuuuaaagacua

SEQ ID NO: 319866 - RNA, 19 nt, Artificial Sequence
  Description of Artificial Sequence: Synthetic oligonucleotide
cagauuccgcuguucuaag

SEQ ID NO: 319867 - RNA, 19 nt, Artificial Sequence
  Description of Artificial Sequence: Synthetic oligonucleotide
uguugccgacaaaugucuc

SEQ ID NO: 319868 - RNA, 19 nt, Artificial Sequence
  Description of Artificial Sequence: Synthetic oligonucleotide
cacuggauccauauggugu

SEQ ID NO: 319869 - RNA, 19 nt, Artificial Sequence
  Description of Artificial Sequence: Synthetic oligonucleotide
uaccuuggugaaucuacua

SEQ ID NO: 319870 - RNA, 19 nt, Artificial Sequence
  Description of Artificial Sequence: Synthetic oligonucleotide
aagcggaugauaacacgau

SEQ ID NO: 319871 - RNA, 19 nt, Artificial Sequence
  Description of Artificial Sequence: Synthetic oligonucleotide
aaagacccguuggugacua

SEQ ID NO: 319872 - RNA, 19 nt, Artificial Sequence
  Description of Artificial Sequence: Synthetic oligonucleotide
auugagauaugugcauuuu

SEQ ID NO: 319873 - RNA, 19 nt, Artificial Sequence
  Description of Artificial Sequence: Synthetic oligonucleotide
gccaacucaugcuucggcc

SEQ ID NO: 319874 - RNA, 19 nt, Artificial Sequence
  Description of Artificial Sequence: Synthetic oligonucleotide
gucauuccguuucucggca

SEQ ID NO: 319875 - RNA, 19 nt, Artificial Sequence
  Description of Artificial Sequence: Synthetic oligonucleotide
gagcgcgauagaacuuugg

SEQ ID NO: 319876 - RNA, 19 nt, Artificial Sequence
  Description of Artificial Sequence: Synthetic oligonucleotide
acccaugguagcuuucuua

SEQ ID NO: 319877 - RNA, 19 nt, Artificial Sequence
  Description of Artificial Sequence: Synthetic oligonucleotide
acgguguggacgucugugu

SEQ ID NO: 319878 - RNA, 19 nt, Artificial Sequence
  Description of Artificial Sequence: Synthetic oligonucleotide
aauacccaugcggacgguu

SEQ ID NO: 319879 - RNA, 19 nt, Artificial Sequence
  Description of Artificial Sequence: Synthetic oligonucleotide
ugcacacugugagugccca

SEQ ID NO: 319880 - RNA, 19 nt, Artificial Sequence
  Description of Artificial Sequence: Synthetic oligonucleotide
cccgcuacccuuauugaag

SEQ ID NO: 319881 - RNA, 19 nt, Artificial Sequence
  Description of Artificial Sequence: Synthetic oligonucleotide
auuuuacuauuagcugaca

SEQ ID NO: 319882 - RNA, 19 nt, Artificial Sequence
  Description of Artificial Sequence: Synthetic oligonucleotide
acucccauuaggggugguc

SEQ ID NO: 319883 - RNA, 19 nt, Artificial Sequence
  Description of Artificial Sequence: Synthetic oligonucleotide
uuauggucaaagggucuuc

SEQ ID NO: 319884 - RNA, 19 nt, Artificial Sequence
  Description of Artificial Sequence: Synthetic oligonucleotide
ucggacggugucuuccagu

SEQ ID NO: 319885 - RNA, 19 nt, Artificial Sequence
  Description of Artificial Sequence: Synthetic oligonucleotide
ugcgcucaucuuguuaacu

SEQ ID NO: 319886 - RNA, 19 nt, Artificial Sequence
  Description of Artificial Sequence: Synthetic oligonucleotide
  modified_base (4)..(4): a, c, u, g, unknown or other
aggngggcuucucuccaca

SEQ ID NO: 319887 - RNA, 19 nt, Artificial Sequence
  Description of Artificial Sequence: Synthetic oligonucleotide
cauuccguuucucggcauc

SEQ ID NO: 319888 - RNA, 19 nt, Artificial Sequence
  Description of Artificial Sequence: Synthetic oligonucleotide
uggagcgcgauagaacuuu

SEQ ID NO: 319889 - RNA, 19 nt, Artificial Sequence
  Description of Artificial Sequence: Synthetic oligonucleotide
ugauucaggcuugucccau

SEQ ID NO: 319890 - RNA, 19 nt, Artificial Sequence
  Description of Artificial Sequence: Synthetic oligonucleotide
ccauaaaagucuugcucug

SEQ ID NO: 319891 - RNA, 19 nt, Artificial Sequence
  Description of Artificial Sequence: Synthetic oligonucleotide
ggcuacuucggccacccac

SEQ ID NO: 319892 - RNA, 19 nt, Artificial Sequence
  Description of Artificial Sequence: Synthetic oligonucleotide
gugacuaucccgcuacccu

SEQ ID NO: 319893 - RNA, 19 nt, Artificial Sequence
  Description of Artificial Sequence: Synthetic oligonucleotide
ugucaucgagguucaucaa

SEQ ID NO: 319894 - RNA, 19 nt, Artificial Sequence
  Description of Artificial Sequence: Synthetic oligonucleotide
gguggcacggcuacuucgg

SEQ ID NO: 319895 - RNA, 19 nt, Artificial Sequence
  Description of Artificial Sequence: Synthetic oligonucleotide
auggauagugaugucugua

SEQ ID NO: 319896 - RNA, 19 nt, Artificial Sequence
  Description of Artificial Sequence: Synthetic oligonucleotide
uggauccauaugguguuuc

SEQ ID NO: 319897 - RNA, 19 nt, Artificial Sequence
  Description of Artificial Sequence: Synthetic oligonucleotide
aucccgcuacccuuauuga

SEQ ID NO: 319898 - RNA, 19 nt, Artificial Sequence
  Description of Artificial Sequence: Synthetic oligonucleotide
uuuucucguaucggacggu

SEQ ID NO: 319899 - RNA, 19 nt, Artificial Sequence
  Description of Artificial Sequence: Synthetic oligonucleotide
auacgggacuugcaauaaa

SEQ ID NO: 319900 - RNA, 19 nt, Artificial Sequence
  Description of Artificial Sequence: Synthetic oligonucleotide
ccguucugcacacugugag

SEQ ID NO: 319901 - RNA, 19 nt, Artificial Sequence
  Description of Artificial Sequence: Synthetic oligonucleotide
cugucagaucuccaaaugu

SEQ ID NO: 319902 - RNA, 19 nt, Artificial Sequence
  Description of Artificial Sequence: Synthetic oligonucleotide
uugucucgcagggucacau

SEQ ID NO: 319903 - RNA, 19 nt, Artificial Sequence
  Description of Artificial Sequence: Synthetic oligonucleotide
aucggacggugucuuccag

SEQ ID NO: 319904 - RNA, 19 nt, Artificial Sequence
  Description of Artificial Sequence: Synthetic oligonucleotide
gcuaaaucgcaacaacaua

SEQ ID NO: 319905 - RNA, 19 nt, Artificial Sequence
  Description of Artificial Sequence: Synthetic oligonucleotide
acuaaucaucacugacauu

SEQ ID NO: 319906 - RNA, 19 nt, Artificial Sequence
  Description of Artificial Sequence: Synthetic oligonucleotide
cuagccaccugaacccaca

SEQ ID NO: 319907 - RNA, 19 nt, Artificial Sequence
  Description of Artificial Sequence: Synthetic oligonucleotide
ucgcaacaacauauugauu

SEQ ID NO: 319908 - RNA, 19 nt, Artificial Sequence
  Description of Artificial Sequence: Synthetic oligonucleotide
ccgcuacccuuauugaagg

SEQ ID NO: 319909 - RNA, 19 nt, Artificial Sequence
  Description of Artificial Sequence: Synthetic oligonucleotide
cuguuuuacauuucucuuu

SEQ ID NO: 319910 - RNA, 19 nt, Artificial Sequence
  Description of Artificial Sequence: Synthetic oligonucleotide
gaggagcgacaggaauugg

SEQ ID NO: 319911 - RNA, 19 nt, Artificial Sequence
  Description of Artificial Sequence: Synthetic oligonucleotide
caucgagguucaucaagga

SEQ ID NO: 319912 - RNA, 19 nt, Artificial Sequence
  Description of Artificial Sequence: Synthetic oligonucleotide
cggaugauaacacgaugcc

SEQ ID NO: 319913 - RNA, 19 nt, Artificial Sequence
  Description of Artificial Sequence: Synthetic oligonucleotide
ggauagugaugucuguaaa

SEQ ID NO: 319914 - RNA, 19 nt, Artificial Sequence
  Description of Artificial Sequence: Synthetic oligonucleotide
ggaugauaacacgaugcca

SEQ ID NO: 319915 - RNA, 19 nt, Artificial Sequence
  Description of Artificial Sequence: Synthetic oligonucleotide
gcuugucccaugagcaccg

SEQ ID NO: 319916 - RNA, 19 nt, Artificial Sequence
  Description of Artificial Sequence: Synthetic oligonucleotide
uugucccaugagcaccguc

SEQ ID NO: 319917 - RNA, 19 nt, Artificial Sequence
  Description of Artificial Sequence: Synthetic oligonucleotide
gucguggagacucagcauu

SEQ ID NO: 319918 - RNA, 19 nt, Artificial Sequence
  Description of Artificial Sequence: Synthetic oligonucleotide
cauuauggucaaagggucu

SEQ ID NO: 319919 - RNA, 19 nt, Artificial Sequence
  Description of Artificial Sequence: Synthetic oligonucleotide
uccgcuguucuaagcuuuu

SEQ ID NO: 319920 - RNA, 19 nt, Artificial Sequence
  Description of Artificial Sequence: Synthetic oligonucleotide
ggugacuaucccgcuaccc

SEQ ID NO: 319921 - RNA, 19 nt, Artificial Sequence
  Description of Artificial Sequence: Synthetic oligonucleotide
cuacuucggccacccacac

SEQ ID NO: 319922 - RNA, 19 nt, Artificial Sequence
  Description of Artificial Sequence: Synthetic oligonucleotide
gauccauaugguguuuccu

SEQ ID NO: 319923 - RNA, 19 nt, Artificial Sequence
  Description of Artificial Sequence: Synthetic oligonucleotide
gcuacccuuauugaaggca

SEQ ID NO: 319924 - RNA, 19 nt, Artificial Sequence
  Description of Artificial Sequence: Synthetic oligonucleotide
agagacggucauguuuacu

SEQ ID NO: 319925 - RNA, 19 nt, Artificial Sequence
  Description of Artificial Sequence: Synthetic oligonucleotide
uccguggggaagagacggu

SEQ ID NO: 319926 - RNA, 19 nt, Artificial Sequence
  Description of Artificial Sequence: Synthetic oligonucleotide
cauuauggagcgcgauaga

SEQ ID NO: 319927 - RNA, 19 nt, Artificial Sequence
  Description of Artificial Sequence: Synthetic oligonucleotide
auacacauauccaguugua

SEQ ID NO: 319928 - RNA, 19 nt, Artificial Sequence
  Description of Artificial Sequence: Synthetic oligonucleotide
ucauuccguuucucggcau

SEQ ID NO: 319929 - RNA, 19 nt, Artificial Sequence
  Description of Artificial Sequence: Synthetic oligonucleotide
guuggugacuaucccgcua

SEQ ID NO: 319930 - RNA, 19 nt, Artificial Sequence
  Description of Artificial Sequence: Synthetic oligonucleotide
uagcauuauggagcgcgau

SEQ ID NO: 319931 - RNA, 19 nt, Artificial Sequence
  Description of Artificial Sequence: Synthetic oligonucleotide
gacggucauguuuacuaau

SEQ ID NO: 319932 - RNA, 19 nt, Artificial Sequence
  Description of Artificial Sequence: Synthetic oligonucleotide
gcucgcucagcauuucuca

SEQ ID NO: 319933 - RNA, 19 nt, Artificial Sequence
  Description of Artificial Sequence: Synthetic oligonucleotide
gacucauauucgaucuucu

SEQ ID NO: 319934 - RNA, 19 nt, Artificial Sequence
  Description of Artificial Sequence: Synthetic oligonucleotide
aaauacccaugcggacggu

SEQ ID NO: 319935 - RNA, 19 nt, Artificial Sequence
  Description of Artificial Sequence: Synthetic oligonucleotide
aguuaaccacgggcaaacu

SEQ ID NO: 319936 - RNA, 19 nt, Artificial Sequence
  Description of Artificial Sequence: Synthetic oligonucleotide
ugugguugcugguguuguu

SEQ ID NO: 319937 - RNA, 19 nt, Artificial Sequence
  Description of Artificial Sequence: Synthetic oligonucleotide
ggugaaucuacuauauuuu

SEQ ID NO: 319938 - RNA, 19 nt, Artificial Sequence
  Description of Artificial Sequence: Synthetic oligonucleotide
acccaugcggacgguuccg

SEQ ID NO: 319939 - RNA, 19 nt, Artificial Sequence
  Description of Artificial Sequence: Synthetic oligonucleotide
guagcauuauggagcgcga

SEQ ID NO: 319940 - RNA, 19 nt, Artificial Sequence
  Description of Artificial Sequence: Synthetic oligonucleotide
gcaagcuaaaucgcaacaa

SEQ ID NO: 319941 - RNA, 19 nt, Artificial Sequence
  Description of Artificial Sequence: Synthetic oligonucleotide
agcaugggcgccagcccgg

SEQ ID NO: 319942 - RNA, 19 nt, Artificial Sequence
  Description of Artificial Sequence: Synthetic oligonucleotide
gucagauuccgcuguucua

SEQ ID NO: 319943 - RNA, 19 nt, Artificial Sequence
  Description of Artificial Sequence: Synthetic oligonucleotide
gcucuacacagacuagcca

SEQ ID NO: 319944 - RNA, 19 nt, Artificial Sequence
  Description of Artificial Sequence: Synthetic oligonucleotide
ggucauguuuacuaaucau

SEQ ID NO: 319945 - RNA, 19 nt, Artificial Sequence
  Description of Artificial Sequence: Synthetic oligonucleotide
ggccuguaaacucccauua

SEQ ID NO: 319946 - RNA, 19 nt, Artificial Sequence
  Description of Artificial Sequence: Synthetic oligonucleotide
gggcgcaggauguuaggac

SEQ ID NO: 319947 - RNA, 19 nt, Artificial Sequence
  Description of Artificial Sequence: Synthetic oligonucleotide
cgcuauguuugucaucgag

SEQ ID NO: 319948 - RNA, 19 nt, Artificial Sequence
  Description of Artificial Sequence: Synthetic oligonucleotide
guucgucguggagacucag

SEQ ID NO: 319949 - RNA, 19 nt, Artificial Sequence
  Description of Artificial Sequence: Synthetic oligonucleotide
ucguaucggacggugucuu

SEQ ID NO: 319950 - RNA, 19 nt, Artificial Sequence
  Description of Artificial Sequence: Synthetic oligonucleotide
gcgauagaacuuugguaca

SEQ ID NO: 319951 - RNA, 19 nt, Artificial Sequence
  Description of Artificial Sequence: Synthetic oligonucleotide
cuugugaauacuguuccuu

SEQ ID NO: 319952 - RNA, 19 nt, Artificial Sequence
  Description of Artificial Sequence: Synthetic oligonucleotide
uggguugauucaggcuugu

SEQ ID NO: 319953 - RNA, 19 nt, Artificial Sequence
  Description of Artificial Sequence: Synthetic oligonucleotide
guggcacggcuacuucggc

SEQ ID NO: 319954 - RNA, 19 nt, Artificial Sequence
  Description of Artificial Sequence: Synthetic oligonucleotide
uggcacuguccacgcuaug

SEQ ID NO: 319955 - RNA, 19 nt, Artificial Sequence
  Description of Artificial Sequence: Synthetic oligonucleotide
agcccgguuccauacccuu

SEQ ID NO: 319956 - RNA, 19 nt, Artificial Sequence
  Description of Artificial Sequence: Synthetic oligonucleotide
uguccacgcuauguuuguc

SEQ ID NO: 319957 - RNA, 19 nt, Artificial Sequence
  Description of Artificial Sequence: Synthetic oligonucleotide
cucagcaaaaggggaaaua

SEQ ID NO: 319958 - RNA, 19 nt, Artificial Sequence
  Description of Artificial Sequence: Synthetic oligonucleotide
guugugcuggccugacucu

SEQ ID NO: 319959 - RNA, 19 nt, Artificial Sequence
  Description of Artificial Sequence: Synthetic oligonucleotide
ggaccauguggcacugucc

SEQ ID NO: 319960 - RNA, 19 nt, Artificial Sequence
  Description of Artificial Sequence: Synthetic oligonucleotide
ggacgguuccguucugcac

SEQ ID NO: 319961 - RNA, 19 nt, Artificial Sequence
  Description of Artificial Sequence: Synthetic oligonucleotide
gacuaucccgcuacccuua

SEQ ID NO: 319962 - RNA, 19 nt, Artificial Sequence
  Description of Artificial Sequence: Synthetic oligonucleotide
caucuaaaacaggguccuc

SEQ ID NO: 319963 - RNA, 19 nt, Artificial Sequence
  Description of Artificial Sequence: Synthetic oligonucleotide
agcuugaaugcaagcuaaa

SEQ ID NO: 319964 - RNA, 19 nt, Artificial Sequence
  Description of Artificial Sequence: Synthetic oligonucleotide
gcgcgauagaacuuuggua

SEQ ID NO: 319965 - RNA, 19 nt, Artificial Sequence
  Description of Artificial Sequence: Synthetic oligonucleotide
caaacagcacagccacaaa

SEQ ID NO: 319966 - RNA, 19 nt, Artificial Sequence
  Description of Artificial Sequence: Synthetic oligonucleotide
aagacccguuggugacuau

SEQ ID NO: 319967 - RNA, 19 nt, Artificial Sequence
  Description of Artificial Sequence: Synthetic oligonucleotide
ggguucccuagugugucag

SEQ ID NO: 319968 - RNA, 19 nt, Artificial Sequence
  Description of Artificial Sequence: Synthetic oligonucleotide
aguucgucguggagacuca

SEQ ID NO: 319969 - RNA, 19 nt, Artificial Sequence
  Description of Artificial Sequence: Synthetic oligonucleotide
ugcggacgguuccguucug

SEQ ID NO: 319970 - RNA, 19 nt, Artificial Sequence
  Description of Artificial Sequence: Synthetic oligonucleotide
acgcuauguuugucaucga

SEQ ID NO: 319971 - RNA, 19 nt, Artificial Sequence
  Description of Artificial Sequence: Synthetic oligonucleotide
cucccauuagggguggucu

SEQ ID NO: 319972 - RNA, 19 nt, Artificial Sequence
  Description of Artificial Sequence: Synthetic oligonucleotide
cgauagaacuuugguacac

SEQ ID NO: 319973 - RNA, 19 nt, Artificial Sequence
  Description of Artificial Sequence: Synthetic oligonucleotide
cauauucgaucuucugcuu

SEQ ID NO: 319974 - RNA, 19 nt, Artificial Sequence
  Description of Artificial Sequence: Synthetic oligonucleotide
cuuugggcgcaggauguua

SEQ ID NO: 319975 - RNA, 19 nt, Artificial Sequence
  Description of Artificial Sequence: Synthetic oligonucleotide
cuguccacgcuauguuugu

SEQ ID NO: 319976 - RNA, 19 nt, Artificial Sequence
  Description of Artificial Sequence: Synthetic oligonucleotide
ggcacuguccacgcuaugu

SEQ ID NO: 319977 - RNA, 19 nt, Artificial Sequence
  Description of Artificial Sequence: Synthetic oligonucleotide
gcgacaggaauuggaguuc

SEQ ID NO: 319978 - RNA, 19 nt, Artificial Sequence
  Description of Artificial Sequence: Synthetic oligonucleotide
agggguggucugaguuuuc

SEQ ID NO: 319979 - RNA, 19 nt, Artificial Sequence
  Description of Artificial Sequence: Synthetic oligonucleotide
gccauugggcagccaacuc

SEQ ID NO: 319980 - RNA, 19 nt, Artificial Sequence
  Description of Artificial Sequence: Synthetic oligonucleotide
caguagcauuauggagcgc

SEQ ID NO: 319981 - RNA, 19 nt, Artificial Sequence
  Description of Artificial Sequence: Synthetic oligonucleotide
ggagcgcgauagaacuuug

SEQ ID NO: 319982 - RNA, 19 nt, Artificial Sequence
  Description of Artificial Sequence: Synthetic oligonucleotide
  modified_base (3)..(3): a, c, u, g, unknown or other
ggngggcuucucuccacaa

SEQ ID NO: 319983 - RNA, 19 nt, Artificial Sequence
  Description of Artificial Sequence: Synthetic oligonucleotide
gcuugugaauacuguuccu

SEQ ID NO: 319984 - RNA, 19 nt, Artificial Sequence
  Description of Artificial Sequence: Synthetic oligonucleotide
gcuugaaugcaagcuaaau

SEQ ID NO: 319985 - RNA, 19 nt, Artificial Sequence
  Description of Artificial Sequence: Synthetic oligonucleotide
cggucauguuuacuaauca

SEQ ID NO: 319986 - RNA, 19 nt, Artificial Sequence
  Description of Artificial Sequence: Synthetic oligonucleotide
guugucucgcagggucaca

SEQ ID NO: 319987 - RNA, 19 nt, Artificial Sequence
  Description of Artificial Sequence: Synthetic oligonucleotide
guuuguugucucgcagggu

SEQ ID NO: 319988 - RNA, 19 nt, Artificial Sequence
  Description of Artificial Sequence: Synthetic oligonucleotide
cauuagggguggucugagu

SEQ ID NO: 319989 - RNA, 19 nt, Artificial Sequence
  Description of Artificial Sequence: Synthetic oligonucleotide
acacuccugcggucauuuu

SEQ ID NO: 319990 - RNA, 19 nt, Artificial Sequence
  Description of Artificial Sequence: Synthetic oligonucleotide
cuggagcaugucauuccgu

SEQ ID NO: 319991 - RNA, 19 nt, Artificial Sequence
  Description of Artificial Sequence: Synthetic oligonucleotide
cucgcucagcauuucucau

SEQ ID NO: 319992 - RNA, 19 nt, Artificial Sequence
  Description of Artificial Sequence: Synthetic oligonucleotide
cucguaucggacggugucu

SEQ ID NO: 319993 - RNA, 19 nt, Artificial Sequence
  Description of Artificial Sequence: Synthetic oligonucleotide
ccgacaaaugucucacugu

SEQ ID NO: 319994 - RNA, 19 nt, Artificial Sequence
  Description of Artificial Sequence: Synthetic oligonucleotide
gaggcucacuggauccaua

SEQ ID NO: 319995 - RNA, 19 nt, Artificial Sequence
  Description of Artificial Sequence: Synthetic oligonucleotide
ccacgcuauguuugucauc

SEQ ID NO: 319996 - RNA, 19 nt, Artificial Sequence
  Description of Artificial Sequence: Synthetic oligonucleotide
cgcuacccuuauugaaggc

SEQ ID NO: 319997 - RNA, 19 nt, Artificial Sequence
  Description of Artificial Sequence: Synthetic oligonucleotide
gacccaugguagcuuucuu

SEQ ID NO: 319998 - RNA, 19 nt, Artificial Sequence
  Description of Artificial Sequence: Synthetic oligonucleotide
gggguucccuaguguguca

SEQ ID NO: 319999 - RNA, 19 nt, Artificial Sequence
  Description of Artificial Sequence: Synthetic oligonucleotide
gcggacgguuccguucugc

SEQ ID NO: 320000 - RNA, 19 nt, Artificial Sequence
  Description of Artificial Sequence: Synthetic oligonucleotide
gaccggcucugggaguucu

SEQ ID NO: 320001 - RNA, 19 nt, Artificial Sequence
  Description of Artificial Sequence: Synthetic oligonucleotide
ccguggggaagagacgguc

SEQ ID NO: 320002 - RNA, 19 nt, Artificial Sequence
  Description of Artificial Sequence: Synthetic oligonucleotide
ggguugauucaggcuuguc

SEQ ID NO: 320003 - RNA, 19 nt, Artificial Sequence
  Description of Artificial Sequence: Synthetic oligonucleotide
gguucccuagugugucagu

SEQ ID NO: 320004 - RNA, 19 nt, Artificial Sequence
  Description of Artificial Sequence: Synthetic oligonucleotide
gggaugccacgguguggac

SEQ ID NO: 320005 - RNA, 19 nt, Artificial Sequence
  Description of Artificial Sequence: Synthetic oligonucleotide
cagugcccuccauuauggu

SEQ ID NO: 320006 - RNA, 19 nt, Artificial Sequence
  Description of Artificial Sequence: Synthetic oligonucleotide
ccgguuccauacccuuuuc

SEQ ID NO: 320007 - RNA, 19 nt, Artificial Sequence
  Description of Artificial Sequence: Synthetic oligonucleotide
cguaucggacggugucuuc

SEQ ID NO: 320008 - RNA, 19 nt, Artificial Sequence
  Description of Artificial Sequence: Synthetic oligonucleotide
cagcccggaagaggcccuc

SEQ ID NO: 320009 - RNA, 19 nt, Artificial Sequence
  Description of Artificial Sequence: Synthetic oligonucleotide
cagcccgguuccauacccu

SEQ ID NO: 320010 - RNA, 19 nt, Artificial Sequence
  Description of Artificial Sequence: Synthetic oligonucleotide
cugggaguucucggagaua

SEQ ID NO: 320011 - RNA, 19 nt, Artificial Sequence
  Description of Artificial Sequence: Synthetic oligonucleotide
ccacaaucgaaugcauccu

SEQ ID NO: 320012 - RNA, 19 nt, Artificial Sequence
  Description of Artificial Sequence: Synthetic oligonucleotide
caucggagagaggcucacu

SEQ ID NO: 320013 - RNA, 19 nt, Artificial Sequence
  Description of Artificial Sequence: Synthetic oligonucleotide
cuaucccgcuacccuuauu

SEQ ID NO: 320014 - RNA, 19 nt, Artificial Sequence
  Description of Artificial Sequence: Synthetic oligonucleotide
cuggauccauaugguguuu

SEQ ID NO: 320015 - RNA, 19 nt, Artificial Sequence
  Description of Artificial Sequence: Synthetic oligonucleotide
ccauacccuuuucucguau

SEQ ID NO: 320016 - RNA, 19 nt, Artificial Sequence
  Description of Artificial Sequence: Synthetic oligonucleotide
cuugucccaugagcaccgu

SEQ ID NO: 320017 - RNA, 19 nt, Artificial Sequence
  Description of Artificial Sequence: Synthetic oligonucleotide
cccgguuccauacccuuuu

SEQ ID NO: 320018 - RNA, 19 nt, Artificial Sequence
  Description of Artificial Sequence: Synthetic oligonucleotide
gggaguucucggagauaua

SEQ ID NO: 320019 - RNA, 19 nt, Artificial Sequence
  Description of Artificial Sequence: Synthetic oligonucleotide
cgguuccauacccuuuucu

SEQ ID NO: 320020 - RNA, 19 nt, Artificial Sequence
  Description of Artificial Sequence: Synthetic oligonucleotide
ggacggugucuuccaguuu

SEQ ID NO: 320021 - RNA, 19 nt, Artificial Sequence
  Description of Artificial Sequence: Synthetic oligonucleotide
gcgccagcccgguuccaua

SEQ ID NO: 320022 - RNA, 19 nt, Artificial Sequence
  Description of Artificial Sequence: Synthetic oligonucleotide
cggacggugucuuccaguu

SEQ ID NO: 320023 - RNA, 19 nt, Artificial Sequence
  Description of Artificial Sequence: Synthetic oligonucleotide
gucugccggggcucuccuu

SEQ ID NO: 320024 - RNA, 19 nt, Artificial Sequence
  Description of Artificial Sequence: Synthetic oligonucleotide
gcaugggcgccagcccggu

SEQ ID NO: 320025 - RNA, 19 nt, Artificial Sequence
  Description of Artificial Sequence: Synthetic oligonucleotide
caugggcgccagcccgguu

SEQ ID NO: 320026 - RNA, 19 nt, Artificial Sequence
  Description of Artificial Sequence: Synthetic oligonucleotide
ccaugcggacgguuccguu

SEQ ID NO: 320027 - RNA, 19 nt, Artificial Sequence
  Description of Artificial Sequence: Synthetic oligonucleotide
gcccgguuccauacccuuu

SEQ ID NO: 320028 - RNA, 19 nt, Artificial Sequence
  Description of Artificial Sequence: Synthetic oligonucleotide
cccaugcggacgguuccgu

SEQ ID NO: 320029 - RNA, 19 nt, Artificial Sequence
  Description of Artificial Sequence: Synthetic oligonucleotide
ccaguucgucguggagacu

SEQ ID NO: 320030 - RNA, 19 nt, Artificial Sequence
  Description of Artificial Sequence: Synthetic oligonucleotide
gggcgccagcccgguucca

SEQ ID NO: 320031 - RNA, 19 nt, Artificial Sequence
  Description of Artificial Sequence: Synthetic oligonucleotide
cgucugccggggcucuccu

SEQ ID NO: 320032 - RNA, 19 nt, Artificial Sequence
  Description of Artificial Sequence: Synthetic oligonucleotide
cggcuacuucggccaccca

SEQ ID NO: 320033 - RNA, 19 nt, Artificial Sequence
  Description of Artificial Sequence: Synthetic oligonucleotide
aaacaauuugccuagggcc

SEQ ID NO: 320034 - RNA, 19 nt, Artificial Sequence
  Description of Artificial Sequence: Synthetic oligonucleotide
uuuguuaucagauuugggg

SEQ ID NO: 320035 - RNA, 19 nt, Artificial Sequence
  Description of Artificial Sequence: Synthetic oligonucleotide
auaaccaucgcuuuggugg

SEQ ID NO: 320036 - RNA, 19 nt, Artificial Sequence
  Description of Artificial Sequence: Synthetic oligonucleotide
uuuaggauaaggcagaaca

SEQ ID NO: 320037 - RNA, 19 nt, Artificial Sequence
  Description of Artificial Sequence: Synthetic oligonucleotide
acuuguuagcaacagaacc

SEQ ID NO: 320038 - RNA, 19 nt, Artificial Sequence
  Description of Artificial Sequence: Synthetic oligonucleotide
aaaacuaacaguucaacaa

SEQ ID NO: 320039 - RNA, 19 nt, Artificial Sequence
  Description of Artificial Sequence: Synthetic oligonucleotide
aacaauguuaacacgacac

SEQ ID NO: 320040 - RNA, 19 nt, Artificial Sequence
  Description of Artificial Sequence: Synthetic oligonucleotide
aagaaaacguccucaaauc

SEQ ID NO: 320041 - RNA, 19 nt, Artificial Sequence
  Description of Artificial Sequence: Synthetic oligonucleotide
uaucguuccagaaaacugg

SEQ ID NO: 320042 - RNA, 19 nt, Artificial Sequence
  Description of Artificial Sequence: Synthetic oligonucleotide
aggaauauugauccguugc

SEQ ID NO: 320043 - RNA, 19 nt, Artificial Sequence
  Description of Artificial Sequence: Synthetic oligonucleotide
ucuaagucguugcugaccg

SEQ ID NO: 320044 - RNA, 19 nt, Artificial Sequence
  Description of Artificial Sequence: Synthetic oligonucleotide
agaaaacguccucaaaucc

SEQ ID NO: 320045 - RNA, 19 nt, Artificial Sequence
  Description of Artificial Sequence: Synthetic oligonucleotide
uauaauagacuacuccaag

SEQ ID NO: 320046 - RNA, 19 nt, Artificial Sequence
  Description of Artificial Sequence: Synthetic oligonucleotide
aauauugauccguugcucu

SEQ ID NO: 320047 - RNA, 19 nt, Artificial Sequence
  Description of Artificial Sequence: Synthetic oligonucleotide
cuuuccauaaaaucugugc

SEQ ID NO: 320048 - RNA, 19 nt, Artificial Sequence
  Description of Artificial Sequence: Synthetic oligonucleotide
aaguugggcaacuucccgc

SEQ ID NO: 320049 - RNA, 19 nt, Artificial Sequence
  Description of Artificial Sequence: Synthetic oligonucleotide
ucaaaagcgguccagucug

SEQ ID NO: 320050 - RNA, 19 nt, Artificial Sequence
  Description of Artificial Sequence: Synthetic oligonucleotide
uaacacgacacauacaggu

SEQ ID NO: 320051 - RNA, 19 nt, Artificial Sequence
  Description of Artificial Sequence: Synthetic oligonucleotide
aaguaauucacugccuugg

SEQ ID NO: 320052 - RNA, 19 nt, Artificial Sequence
  Description of Artificial Sequence: Synthetic oligonucleotide
aaaauccuuagcugcguuc

SEQ ID NO: 320053 - RNA, 19 nt, Artificial Sequence
  Description of Artificial Sequence: Synthetic oligonucleotide
agcgaaauuaaaauuguac

SEQ ID NO: 320054 - RNA, 19 nt, Artificial Sequence
  Description of Artificial Sequence: Synthetic oligonucleotide
uuuugagacaucacuuucc

SEQ ID NO: 320055 - RNA, 19 nt, Artificial Sequence
  Description of Artificial Sequence: Synthetic oligonucleotide
cauaggaagaguucuuucc

SEQ ID NO: 320056 - RNA, 19 nt, Artificial Sequence
  Description of Artificial Sequence: Synthetic oligonucleotide
uguaucugcagcgugagca

SEQ ID NO: 320057 - RNA, 19 nt, Artificial Sequence
  Description of Artificial Sequence: Synthetic oligonucleotide
aacaugaugggccuauggu

SEQ ID NO: 320058 - RNA, 19 nt, Artificial Sequence
  Description of Artificial Sequence: Synthetic oligonucleotide
uuagcugcguucuagacau

SEQ ID NO: 320059 - RNA, 19 nt, Artificial Sequence
  Description of Artificial Sequence: Synthetic oligonucleotide
acaagcgaaauuaaaauug

SEQ ID NO: 320060 - RNA, 19 nt, Artificial Sequence
  Description of Artificial Sequence: Synthetic oligonucleotide
uuauaauagacuacuccaa

SEQ ID NO: 320061 - RNA, 19 nt, Artificial Sequence
  Description of Artificial Sequence: Synthetic oligonucleotide
aggacuaaaaggucagggg

SEQ ID NO: 320062 - RNA, 19 nt, Artificial Sequence
  Description of Artificial Sequence: Synthetic oligonucleotide
uuacuagucacagaugccc

SEQ ID NO: 320063 - RNA, 19 nt, Artificial Sequence
  Description of Artificial Sequence: Synthetic oligonucleotide
ucguugugcacauaaaacu

SEQ ID NO: 320064 - RNA, 19 nt, Artificial Sequence
  Description of Artificial Sequence: Synthetic oligonucleotide
aagaccucaucuugguauc

SEQ ID NO: 320065 - RNA, 19 nt, Artificial Sequence
  Description of Artificial Sequence: Synthetic oligonucleotide
aacuugagcaguuuauaau

SEQ ID NO: 320066 - RNA, 19 nt, Artificial Sequence
  Description of Artificial Sequence: Synthetic oligonucleotide
acauugacaggcuacguca

SEQ ID NO: 320067 - RNA, 19 nt, Artificial Sequence
  Description of Artificial Sequence: Synthetic oligonucleotide
acuaaauccugugucuccc

SEQ ID NO: 320068 - RNA, 19 nt, Artificial Sequence
  Description of Artificial Sequence: Synthetic oligonucleotide
auaauagacuacuccaaga

SEQ ID NO: 320069 - RNA, 19 nt, Artificial Sequence
  Description of Artificial Sequence: Synthetic oligonucleotide
ucacaugucaaaagaacaa

SEQ ID NO: 320070 - RNA, 19 nt, Artificial Sequence
  Description of Artificial Sequence: Synthetic oligonucleotide
uucaguuagccacaccagc

SEQ ID NO: 320071 - RNA, 19 nt, Artificial Sequence
  Description of Artificial Sequence: Synthetic oligonucleotide
uuaacacgacacauacagg

SEQ ID NO: 320072 - RNA, 19 nt, Artificial Sequence
  Description of Artificial Sequence: Synthetic oligonucleotide
ucaguuagccacaccagca

SEQ ID NO: 320073 - RNA, 19 nt, Artificial Sequence
  Description of Artificial Sequence: Synthetic oligonucleotide
aaaacucuaccuaaccuca

SEQ ID NO: 320074 - RNA, 19 nt, Artificial Sequence
  Description of Artificial Sequence: Synthetic oligonucleotide
accgucugcucauagaaag

SEQ ID NO: 320075 - RNA, 19 nt, Artificial Sequence
  Description of Artificial Sequence: Synthetic oligonucleotide
aaaaccgaaguugggcaac

SEQ ID NO: 320076 - RNA, 19 nt, Artificial Sequence
  Description of Artificial Sequence: Synthetic oligonucleotide
cuauggauuuccuucugcc

SEQ ID NO: 320077 - RNA, 19 nt, Artificial Sequence
  Description of Artificial Sequence: Synthetic oligonucleotide
ugagguucagugacaaagc

SEQ ID NO: 320078 - RNA, 19 nt, Artificial Sequence
  Description of Artificial Sequence: Synthetic oligonucleotide
cuugagcaguuuauaauag

SEQ ID NO: 320079 - RNA, 19 nt, Artificial Sequence
  Description of Artificial Sequence: Synthetic oligonucleotide
acaaaaccgaaguugggca

SEQ ID NO: 320080 - RNA, 19 nt, Artificial Sequence
  Description of Artificial Sequence: Synthetic oligonucleotide
uucuccauaaccaucgcuu

SEQ ID NO: 320081 - RNA, 19 nt, Artificial Sequence
  Description of Artificial Sequence: Synthetic oligonucleotide
aaggcgguuaucccugcgg

SEQ ID NO: 320082 - RNA, 19 nt, Artificial Sequence
  Description of Artificial Sequence: Synthetic oligonucleotide
acacaagcgaaauuaaaau

SEQ ID NO: 320083 - RNA, 19 nt, Artificial Sequence
  Description of Artificial Sequence: Synthetic oligonucleotide
aaagcgguccagucugagg

SEQ ID NO: 320084 - RNA, 19 nt, Artificial Sequence
  Description of Artificial Sequence: Synthetic oligonucleotide
ggaaacaccuuuuauucag

SEQ ID NO: 320085 - RNA, 19 nt, Artificial Sequence
  Description of Artificial Sequence: Synthetic oligonucleotide
uagacauugacaggcuacg

SEQ ID NO: 320086 - RNA, 19 nt, Artificial Sequence
  Description of Artificial Sequence: Synthetic oligonucleotide
gaaguugggcaacuucccg

SEQ ID NO: 320087 - RNA, 19 nt, Artificial Sequence
  Description of Artificial Sequence: Synthetic oligonucleotide
ugugucucccaccaauuga

SEQ ID NO: 320088 - RNA, 19 nt, Artificial Sequence
  Description of Artificial Sequence: Synthetic oligonucleotide
cuagacauugacaggcuac

SEQ ID NO: 320089 - RNA, 19 nt, Artificial Sequence
  Description of Artificial Sequence: Synthetic oligonucleotide
uauugauccguugcucucg

SEQ ID NO: 320090 - RNA, 19 nt, Artificial Sequence
  Description of Artificial Sequence: Synthetic oligonucleotide
auauugauccguugcucuc

SEQ ID NO: 320091 - RNA, 19 nt, Artificial Sequence
  Description of Artificial Sequence: Synthetic oligonucleotide
agaacaauguuaacacgac

SEQ ID NO: 320092 - RNA, 19 nt, Artificial Sequence
  Description of Artificial Sequence: Synthetic oligonucleotide
uuaggauaaggcagaacaa

SEQ ID NO: 320093 - RNA, 19 nt, Artificial Sequence
  Description of Artificial Sequence: Synthetic oligonucleotide
acauacaggugauacaaaa

SEQ ID NO: 320094 - RNA, 19 nt, Artificial Sequence
  Description of Artificial Sequence: Synthetic oligonucleotide
uccuccuaaaguaucguuc

SEQ ID NO: 320095 - RNA, 19 nt, Artificial Sequence
  Description of Artificial Sequence: Synthetic oligonucleotide
cagaguagaauguggcccg

SEQ ID NO: 320096 - RNA, 19 nt, Artificial Sequence
  Description of Artificial Sequence: Synthetic oligonucleotide
cacguucccauaauuuugg

SEQ ID NO: 320097 - RNA, 19 nt, Artificial Sequence
  Description of Artificial Sequence: Synthetic oligonucleotide
augaacacaagcgaaauua

SEQ ID NO: 320098 - RNA, 19 nt, Artificial Sequence
  Description of Artificial Sequence: Synthetic oligonucleotide
gacuaaaaggucaggggag

SEQ ID NO: 320099 - RNA, 19 nt, Artificial Sequence
  Description of Artificial Sequence: Synthetic oligonucleotide
cucuaaaugcuccucuaag

SEQ ID NO: 320100 - RNA, 19 nt, Artificial Sequence
  Description of Artificial Sequence: Synthetic oligonucleotide
uuaaugcgcagcuccacca

SEQ ID NO: 320101 - RNA, 19 nt, Artificial Sequence
  Description of Artificial Sequence: Synthetic oligonucleotide
gguaaucacaugucaaaag

SEQ ID NO: 320102 - RNA, 19 nt, Artificial Sequence
  Description of Artificial Sequence: Synthetic oligonucleotide
ugauccguugcucucgaac

SEQ ID NO: 320103 - RNA, 19 nt, Artificial Sequence
  Description of Artificial Sequence: Synthetic oligonucleotide
ucccguuggaauccaagcc

SEQ ID NO: 320104 - RNA, 19 nt, Artificial Sequence
  Description of Artificial Sequence: Synthetic oligonucleotide
aggaauucaccauucugca

SEQ ID NO: 320105 - RNA, 19 nt, Artificial Sequence
  Description of Artificial Sequence: Synthetic oligonucleotide
cuccuuuggggaauggccg

SEQ ID NO: 320106 - RNA, 19 nt, Artificial Sequence
  Description of Artificial Sequence: Synthetic oligonucleotide
gaugucguugugcacauaa

SEQ ID NO: 320107 - RNA, 19 nt, Artificial Sequence
  Description of Artificial Sequence: Synthetic oligonucleotide
ugcguucuagacauugaca

SEQ ID NO: 320108 - RNA, 19 nt, Artificial Sequence
  Description of Artificial Sequence: Synthetic oligonucleotide
guuguuggacaguagcccc

SEQ ID NO: 320109 - RNA, 19 nt, Artificial Sequence
  Description of Artificial Sequence: Synthetic oligonucleotide
gcgaaauuaaaauuguaca

SEQ ID NO: 320110 - RNA, 19 nt, Artificial Sequence
  Description of Artificial Sequence: Synthetic oligonucleotide
agugaagcgagacgcgcuc

SEQ ID NO: 320111 - RNA, 19 nt, Artificial Sequence
  Description of Artificial Sequence: Synthetic oligonucleotide
guaauucacugccuuggag

SEQ ID NO: 320112 - RNA, 19 nt, Artificial Sequence
  Description of Artificial Sequence: Synthetic oligonucleotide
aguaucguuccagaaaacu

SEQ ID NO: 320113 - RNA, 19 nt, Artificial Sequence
  Description of Artificial Sequence: Synthetic oligonucleotide
ugucgcacaaacucccgcc

SEQ ID NO: 320114 - RNA, 19 nt, Artificial Sequence
  Description of Artificial Sequence: Synthetic oligonucleotide
uugagcaguuuauaauaga

SEQ ID NO: 320115 - RNA, 19 nt, Artificial Sequence
  Description of Artificial Sequence: Synthetic oligonucleotide
uucccguuggaauccaagc

SEQ ID NO: 320116 - RNA, 19 nt, Artificial Sequence
  Description of Artificial Sequence: Synthetic oligonucleotide
aacccgauagacagcagag

SEQ ID NO: 320117 - RNA, 19 nt, Artificial Sequence
  Description of Artificial Sequence: Synthetic oligonucleotide
guuuggaacuguuugguaa

SEQ ID NO: 320118 - RNA, 19 nt, Artificial Sequence
  Description of Artificial Sequence: Synthetic oligonucleotide
uagacuacuccaagacacc

SEQ ID NO: 320119 - RNA, 19 nt, Artificial Sequence
  Description of Artificial Sequence: Synthetic oligonucleotide
acacgacacauacagguga

SEQ ID NO: 320120 - RNA, 19 nt, Artificial Sequence
  Description of Artificial Sequence: Synthetic oligonucleotide
aacaccuuuuauucaguua

SEQ ID NO: 320121 - RNA, 19 nt, Artificial Sequence
  Description of Artificial Sequence: Synthetic oligonucleotide
acggagucgugacuaaauc

SEQ ID NO: 320122 - RNA, 19 nt, Artificial Sequence
  Description of Artificial Sequence: Synthetic oligonucleotide
guaucguuccagaaaacug

SEQ ID NO: 320123 - RNA, 19 nt, Artificial Sequence
  Description of Artificial Sequence: Synthetic oligonucleotide
gaugcccaagaaaacgucc

SEQ ID NO: 320124 - RNA, 19 nt, Artificial Sequence
  Description of Artificial Sequence: Synthetic oligonucleotide
accgaaguugggcaacuuc

SEQ ID NO: 320125 - RNA, 19 nt, Artificial Sequence
  Description of Artificial Sequence: Synthetic oligonucleotide
guuaaugcgcagcuccacc

SEQ ID NO: 320126 - RNA, 19 nt, Artificial Sequence
  Description of Artificial Sequence: Synthetic oligonucleotide
ugcgccucggaacaugaug

SEQ ID NO: 320127 - RNA, 19 nt, Artificial Sequence
  Description of Artificial Sequence: Synthetic oligonucleotide
ucccagaaucaucaggcac

SEQ ID NO: 320128 - RNA, 19 nt, Artificial Sequence
  Description of Artificial Sequence: Synthetic oligonucleotide
aguagaauguggcccguca

SEQ ID NO: 320129 - RNA, 19 nt, Artificial Sequence
  Description of Artificial Sequence: Synthetic oligonucleotide
guuuugagacaucacuuuc

SEQ ID NO: 320130 - RNA, 19 nt, Artificial Sequence
  Description of Artificial Sequence: Synthetic oligonucleotide
uuguuagcaacagaacccu

SEQ ID NO: 320131 - RNA, 19 nt, Artificial Sequence
  Description of Artificial Sequence: Synthetic oligonucleotide
uggcccgucagccacugag

SEQ ID NO: 320132 - RNA, 19 nt, Artificial Sequence
  Description of Artificial Sequence: Synthetic oligonucleotide
uucuuacuagucacagaug

SEQ ID NO: 320133 - RNA, 19 nt, Artificial Sequence
  Description of Artificial Sequence: Synthetic oligonucleotide
ucagugacaaagccaccga

SEQ ID NO: 320134 - RNA, 19 nt, Artificial Sequence
  Description of Artificial Sequence: Synthetic oligonucleotide
gcacuuuuaccacaugggg

SEQ ID NO: 320135 - RNA, 19 nt, Artificial Sequence
  Description of Artificial Sequence: Synthetic oligonucleotide
caggguguaguacugucgc

SEQ ID NO: 320136 - RNA, 19 nt, Artificial Sequence
  Description of Artificial Sequence: Synthetic oligonucleotide
aggcagaacaauguuaaca

SEQ ID NO: 320137 - RNA, 19 nt, Artificial Sequence
  Description of Artificial Sequence: Synthetic oligonucleotide
uggaagugaaggacuaaaa

SEQ ID NO: 320138 - RNA, 19 nt, Artificial Sequence
  Description of Artificial Sequence: Synthetic oligonucleotide
acuacuccaagacaccaaa

SEQ ID NO: 320139 - RNA, 19 nt, Artificial Sequence
  Description of Artificial Sequence: Synthetic oligonucleotide
uacuagucacagaugccca

SEQ ID NO: 320140 - RNA, 19 nt, Artificial Sequence
  Description of Artificial Sequence: Synthetic oligonucleotide
auagaccgcauccgcuggc

SEQ ID NO: 320141 - RNA, 19 nt, Artificial Sequence
  Description of Artificial Sequence: Synthetic oligonucleotide
gaagaccucaucuugguau

SEQ ID NO: 320142 - RNA, 19 nt, Artificial Sequence
  Description of Artificial Sequence: Synthetic oligonucleotide
caaccugcgcggcugagcg

SEQ ID NO: 320143 - RNA, 19 nt, Artificial Sequence
  Description of Artificial Sequence: Synthetic oligonucleotide
augguugaggaccuucuga

SEQ ID NO: 320144 - RNA, 19 nt, Artificial Sequence
  Description of Artificial Sequence: Synthetic oligonucleotide
guaguacugucgcacaaac

SEQ ID NO: 320145 - RNA, 19 nt, Artificial Sequence
  Description of Artificial Sequence: Synthetic oligonucleotide
caccccaucauucagagua

SEQ ID NO: 320146 - RNA, 19 nt, Artificial Sequence
  Description of Artificial Sequence: Synthetic oligonucleotide
uucccuggcagcucgaguc

SEQ ID NO: 320147 - RNA, 19 nt, Artificial Sequence
  Description of Artificial Sequence: Synthetic oligonucleotide
ucauucagaguagcgugag

SEQ ID NO: 320148 - RNA, 19 nt, Artificial Sequence
  Description of Artificial Sequence: Synthetic oligonucleotide
gaacccgauagacagcaga

SEQ ID NO: 320149 - RNA, 19 nt, Artificial Sequence
  Description of Artificial Sequence: Synthetic oligonucleotide
gaggaauauugauccguug

SEQ ID NO: 320150 - RNA, 19 nt, Artificial Sequence
  Description of Artificial Sequence: Synthetic oligonucleotide
cuucccgccacuguuaaug

SEQ ID NO: 320151 - RNA, 19 nt, Artificial Sequence
  Description of Artificial Sequence: Synthetic oligonucleotide
uuggugaaguuuugagaca

SEQ ID NO: 320152 - RNA, 19 nt, Artificial Sequence
  Description of Artificial Sequence: Synthetic oligonucleotide
ggacuaaaaggucagggga

SEQ ID NO: 320153 - RNA, 19 nt, Artificial Sequence
  Description of Artificial Sequence: Synthetic oligonucleotide
uuauucaguuagccacacc

SEQ ID NO: 320154 - RNA, 19 nt, Artificial Sequence
  Description of Artificial Sequence: Synthetic oligonucleotide
ccuagggccagaaucaaag

SEQ ID NO: 320155 - RNA, 19 nt, Artificial Sequence
  Description of Artificial Sequence: Synthetic oligonucleotide
aguaauucacugccuugga

SEQ ID NO: 320156 - RNA, 19 nt, Artificial Sequence
  Description of Artificial Sequence: Synthetic oligonucleotide
acuguuugguaaucacaug

SEQ ID NO: 320157 - RNA, 19 nt, Artificial Sequence
  Description of Artificial Sequence: Synthetic oligonucleotide
gucguugugcacauaaaac

SEQ ID NO: 320158 - RNA, 19 nt, Artificial Sequence
  Description of Artificial Sequence: Synthetic oligonucleotide
ucagugaagcgagacgcgc

SEQ ID NO: 320159 - RNA, 19 nt, Artificial Sequence
  Description of Artificial Sequence: Synthetic oligonucleotide
gauucaaccugcgcggcug

SEQ ID NO: 320160 - RNA, 19 nt, Artificial Sequence
  Description of Artificial Sequence: Synthetic oligonucleotide
ggaggaagguucuuacuag

SEQ ID NO: 320161 - RNA, 19 nt, Artificial Sequence
  Description of Artificial Sequence: Synthetic oligonucleotide
aaguaucguuccagaaaac

SEQ ID NO: 320162 - RNA, 19 nt, Artificial Sequence
  Description of Artificial Sequence: Synthetic oligonucleotide
cccaccaauugaaacaucc

SEQ ID NO: 320163 - RNA, 19 nt, Artificial Sequence
  Description of Artificial Sequence: Synthetic oligonucleotide
ucaguuccgacuugucaac

SEQ ID NO: 320164 - RNA, 19 nt, Artificial Sequence
  Description of Artificial Sequence: Synthetic oligonucleotide
ugguaaucacaugucaaaa

SEQ ID NO: 320165 - RNA, 19 nt, Artificial Sequence
  Description of Artificial Sequence: Synthetic oligonucleotide
gagacgcgcuccuuugggg

SEQ ID NO: 320166 - RNA, 19 nt, Artificial Sequence
  Description of Artificial Sequence: Synthetic oligonucleotide
uuccgacuugucaaccuca

SEQ ID NO: 320167 - RNA, 19 nt, Artificial Sequence
  Description of Artificial Sequence: Synthetic oligonucleotide
auucagacggacugcgccu

SEQ ID NO: 320168 - RNA, 19 nt, Artificial Sequence
  Description of Artificial Sequence: Synthetic oligonucleotide
uggugaaguuuugagacau

SEQ ID NO: 320169 - RNA, 19 nt, Artificial Sequence
  Description of Artificial Sequence: Synthetic oligonucleotide
guaucugcagcgugagcag

SEQ ID NO: 320170 - RNA, 19 nt, Artificial Sequence
  Description of Artificial Sequence: Synthetic oligonucleotide
acucuaccuaaccucaaaa

SEQ ID NO: 320171 - RNA, 19 nt, Artificial Sequence
  Description of Artificial Sequence: Synthetic oligonucleotide
cccagaaucaucaggcacc

SEQ ID NO: 320172 - RNA, 19 nt, Artificial Sequence
  Description of Artificial Sequence: Synthetic oligonucleotide
cuuagcugcguucuagaca

SEQ ID NO: 320173 - RNA, 19 nt, Artificial Sequence
  Description of Artificial Sequence: Synthetic oligonucleotide
gucgugacuaaauccugug

SEQ ID NO: 320174 - RNA, 19 nt, Artificial Sequence
  Description of Artificial Sequence: Synthetic oligonucleotide
auggccguuacacuccagu

SEQ ID NO: 320175 - RNA, 19 nt, Artificial Sequence
  Description of Artificial Sequence: Synthetic oligonucleotide
auccguugcucucgaacuc

SEQ ID NO: 320176 - RNA, 19 nt, Artificial Sequence
  Description of Artificial Sequence: Synthetic oligonucleotide
cauagaccgcauccgcugg

SEQ ID NO: 320177 - RNA, 19 nt, Artificial Sequence
  Description of Artificial Sequence: Synthetic oligonucleotide
cuucugaggggccuaucag

SEQ ID NO: 320178 - RNA, 19 nt, Artificial Sequence
  Description of Artificial Sequence: Synthetic oligonucleotide
aggaggaauauugauccgu

SEQ ID NO: 320179 - RNA, 19 nt, Artificial Sequence
  Description of Artificial Sequence: Synthetic oligonucleotide
cauaaccaucgcuuuggug

SEQ ID NO: 320180 - RNA, 19 nt, Artificial Sequence
  Description of Artificial Sequence: Synthetic oligonucleotide
aggaagguucuuacuaguc

SEQ ID NO: 320181 - RNA, 19 nt, Artificial Sequence
  Description of Artificial Sequence: Synthetic oligonucleotide
cuggcuucccguuggaauc

SEQ ID NO: 320182 - RNA, 19 nt, Artificial Sequence
  Description of Artificial Sequence: Synthetic oligonucleotide
caguuagccacaccagcag

SEQ ID NO: 320183 - RNA, 19 nt, Artificial Sequence
  Description of Artificial Sequence: Synthetic oligonucleotide
cugcguucuagacauugac

SEQ ID NO: 320184 - RNA, 19 nt, Artificial Sequence
  Description of Artificial Sequence: Synthetic oligonucleotide
cucuaagucguugcugacc

SEQ ID NO: 320185 - RNA, 19 nt, Artificial Sequence
  Description of Artificial Sequence: Synthetic oligonucleotide
uccuauggauuuccuucug

SEQ ID NO: 320186 - RNA, 19 nt, Artificial Sequence
  Description of Artificial Sequence: Synthetic oligonucleotide
aggaacccgauagacagca

SEQ ID NO: 320187 - RNA, 19 nt, Artificial Sequence
  Description of Artificial Sequence: Synthetic oligonucleotide
auucaguuagccacaccag

SEQ ID NO: 320188 - RNA, 19 nt, Artificial Sequence
  Description of Artificial Sequence: Synthetic oligonucleotide
ugcccauagaccgcauccg

SEQ ID NO: 320189 - RNA, 19 nt, Artificial Sequence
  Description of Artificial Sequence: Synthetic oligonucleotide
accgaagaccucaucuugg

SEQ ID NO: 320190 - RNA, 19 nt, Artificial Sequence
  Description of Artificial Sequence: Synthetic oligonucleotide
uuuuaggauaaggcagaac

SEQ ID NO: 320191 - RNA, 19 nt, Artificial Sequence
  Description of Artificial Sequence: Synthetic oligonucleotide
gauccguugcucucgaacu

SEQ ID NO: 320192 - RNA, 19 nt, Artificial Sequence
  Description of Artificial Sequence: Synthetic oligonucleotide
ggagcaagaacaaaggucu

SEQ ID NO: 320193 - RNA, 19 nt, Artificial Sequence
  Description of Artificial Sequence: Synthetic oligonucleotide
uccuuagcugcguucuaga

SEQ ID NO: 320194 - RNA, 19 nt, Artificial Sequence
  Description of Artificial Sequence: Synthetic oligonucleotide
gaaaacguccucaaauccu

SEQ ID NO: 320195 - RNA, 19 nt, Artificial Sequence
  Description of Artificial Sequence: Synthetic oligonucleotide
cauugacaggcuacgucac

SEQ ID NO: 320196 - RNA, 19 nt, Artificial Sequence
  Description of Artificial Sequence: Synthetic oligonucleotide
uguuuggaacuguuuggua

SEQ ID NO: 320197 - RNA, 19 nt, Artificial Sequence
  Description of Artificial Sequence: Synthetic oligonucleotide
uuuggggaauggccguuac

SEQ ID NO: 320198 - RNA, 19 nt, Artificial Sequence
  Description of Artificial Sequence: Synthetic oligonucleotide
ggaagguucuuacuaguca

SEQ ID NO: 320199 - RNA, 19 nt, Artificial Sequence
  Description of Artificial Sequence: Synthetic oligonucleotide
uugacaggcuacgucacaa

SEQ ID NO: 320200 - RNA, 19 nt, Artificial Sequence
  Description of Artificial Sequence: Synthetic oligonucleotide
guacugucgcacaaacucc

SEQ ID NO: 320201 - RNA, 19 nt, Artificial Sequence
  Description of Artificial Sequence: Synthetic oligonucleotide
aacuucccgccacuguuaa

SEQ ID NO: 320202 - RNA, 19 nt, Artificial Sequence
  Description of Artificial Sequence: Synthetic oligonucleotide
gggccuaugguugaggacc

SEQ ID NO: 320203 - RNA, 19 nt, Artificial Sequence
  Description of Artificial Sequence: Synthetic oligonucleotide
cuacuccuccuaaaguauc

SEQ ID NO: 320204 - RNA, 19 nt, Artificial Sequence
  Description of Artificial Sequence: Synthetic oligonucleotide
gaugggccuaugguugagg

SEQ ID NO: 320205 - RNA, 19 nt, Artificial Sequence
  Description of Artificial Sequence: Synthetic oligonucleotide
gggaauggccguuacacuc

SEQ ID NO: 320206 - RNA, 19 nt, Artificial Sequence
  Description of Artificial Sequence: Synthetic oligonucleotide
ucagacggacugcgccucg

SEQ ID NO: 320207 - RNA, 19 nt, Artificial Sequence
  Description of Artificial Sequence: Synthetic oligonucleotide
accaauugaaacauccauu

SEQ ID NO: 320208 - RNA, 19 nt, Artificial Sequence
  Description of Artificial Sequence: Synthetic oligonucleotide
uuuaccacaugggguggug

SEQ ID NO: 320209 - RNA, 19 nt, Artificial Sequence
  Description of Artificial Sequence: Synthetic oligonucleotide
auugacaggcuacgucaca

SEQ ID NO: 320210 - RNA, 19 nt, Artificial Sequence
  Description of Artificial Sequence: Synthetic oligonucleotide
ucaaccucauguggcaggu

SEQ ID NO: 320211 - RNA, 19 nt, Artificial Sequence
  Description of Artificial Sequence: Synthetic oligonucleotide
augggccuaugguugagga

SEQ ID NO: 320212 - RNA, 19 nt, Artificial Sequence
  Description of Artificial Sequence: Synthetic oligonucleotide
caccgaagaccucaucuug

SEQ ID NO: 320213 - RNA, 19 nt, Artificial Sequence
  Description of Artificial Sequence: Synthetic oligonucleotide
acaauuugccuagggccag

SEQ ID NO: 320214 - RNA, 19 nt, Artificial Sequence
  Description of Artificial Sequence: Synthetic oligonucleotide
aacggagucgugacuaaau

SEQ ID NO: 320215 - RNA, 19 nt, Artificial Sequence
  Description of Artificial Sequence: Synthetic oligonucleotide
caagcgaaauuaaaauugu

SEQ ID NO: 320216 - RNA, 19 nt, Artificial Sequence
  Description of Artificial Sequence: Synthetic oligonucleotide
aaaccgaaguugggcaacu

SEQ ID NO: 320217 - RNA, 19 nt, Artificial Sequence
  Description of Artificial Sequence: Synthetic oligonucleotide
agcugcguucuagacauug

SEQ ID NO: 320218 - RNA, 19 nt, Artificial Sequence
  Description of Artificial Sequence: Synthetic oligonucleotide
ucccgccacuguuaaugcg

SEQ ID NO: 320219 - RNA, 19 nt, Artificial Sequence
  Description of Artificial Sequence: Synthetic oligonucleotide
auccuuagcugcguucuag

SEQ ID NO: 320220 - RNA, 19 nt, Artificial Sequence
  Description of Artificial Sequence: Synthetic oligonucleotide
gccguuacacuccagucug

SEQ ID NO: 320221 - RNA, 19 nt, Artificial Sequence
  Description of Artificial Sequence: Synthetic oligonucleotide
auugauccguugcucucga

SEQ ID NO: 320222 - RNA, 19 nt, Artificial Sequence
  Description of Artificial Sequence: Synthetic oligonucleotide
agcucgagucuucuucucu

SEQ ID NO: 320223 - RNA, 19 nt, Artificial Sequence
  Description of Artificial Sequence: Synthetic oligonucleotide
ucacggauuggccgggguc

SEQ ID NO: 320224 - RNA, 19 nt, Artificial Sequence
  Description of Artificial Sequence: Synthetic oligonucleotide
uucccgccacuguuaaugc

SEQ ID NO: 320225 - RNA, 19 nt, Artificial Sequence
  Description of Artificial Sequence: Synthetic oligonucleotide
acguggcggaucuuggugu

SEQ ID NO: 320226 - RNA, 19 nt, Artificial Sequence
  Description of Artificial Sequence: Synthetic oligonucleotide
agacuacuccaagacacca

SEQ ID NO: 320227 - RNA, 19 nt, Artificial Sequence
  Description of Artificial Sequence: Synthetic oligonucleotide
gaggaccuucugaacaggc

SEQ ID NO: 320228 - RNA, 19 nt, Artificial Sequence
  Description of Artificial Sequence: Synthetic oligonucleotide
uuaucagauuugggguuug

SEQ ID NO: 320229 - RNA, 19 nt, Artificial Sequence
  Description of Artificial Sequence: Synthetic oligonucleotide
cacggauuggccggggucc

SEQ ID NO: 320230 - RNA, 19 nt, Artificial Sequence
  Description of Artificial Sequence: Synthetic oligonucleotide
gucgcacaaacucccgccc

SEQ ID NO: 320231 - RNA, 19 nt, Artificial Sequence
  Description of Artificial Sequence: Synthetic oligonucleotide
uuggggaauggccguuaca

SEQ ID NO: 320232 - RNA, 19 nt, Artificial Sequence
  Description of Artificial Sequence: Synthetic oligonucleotide
acuagucacagaugcccaa

SEQ ID NO: 320233 - RNA, 19 nt, Artificial Sequence
  Description of Artificial Sequence: Synthetic oligonucleotide
accugcgcggcugagcggg

SEQ ID NO: 320234 - RNA, 19 nt, Artificial Sequence
  Description of Artificial Sequence: Synthetic oligonucleotide
cugugucucccaccaauug

SEQ ID NO: 320235 - RNA, 19 nt, Artificial Sequence
  Description of Artificial Sequence: Synthetic oligonucleotide
cugagauucaggcuuagau

SEQ ID NO: 320236 - RNA, 19 nt, Artificial Sequence
  Description of Artificial Sequence: Synthetic oligonucleotide
agcgagacgcgcuccuuug

SEQ ID NO: 320237 - RNA, 19 nt, Artificial Sequence
  Description of Artificial Sequence: Synthetic oligonucleotide
gagucgugacuaaauccug

SEQ ID NO: 320238 - RNA, 19 nt, Artificial Sequence
  Description of Artificial Sequence: Synthetic oligonucleotide
agucguugcugaccgucug

SEQ ID NO: 320239 - RNA, 19 nt, Artificial Sequence
  Description of Artificial Sequence: Synthetic oligonucleotide
cacguggcggaucuuggug

SEQ ID NO: 320240 - RNA, 19 nt, Artificial Sequence
  Description of Artificial Sequence: Synthetic oligonucleotide
aagcgaaauuaaaauugua

SEQ ID NO: 320241 - RNA, 19 nt, Artificial Sequence
  Description of Artificial Sequence: Synthetic oligonucleotide
gucagugaagcgagacgcg

SEQ ID NO: 320242 - RNA, 19 nt, Artificial Sequence
  Description of Artificial Sequence: Synthetic oligonucleotide
ucgaacucucugaucucuc

SEQ ID NO: 320243 - RNA, 19 nt, Artificial Sequence
  Description of Artificial Sequence: Synthetic oligonucleotide
cccguuggaauccaagccc

SEQ ID NO: 320244 - RNA, 19 nt, Artificial Sequence
  Description of Artificial Sequence: Synthetic oligonucleotide
aucauucagaguagcguga

SEQ ID NO: 320245 - RNA, 19 nt, Artificial Sequence
  Description of Artificial Sequence: Synthetic oligonucleotide
cacuuuuaccacauggggu

SEQ ID NO: 320246 - RNA, 19 nt, Artificial Sequence
  Description of Artificial Sequence: Synthetic oligonucleotide
guuccgacuugucaaccuc

SEQ ID NO: 320247 - RNA, 19 nt, Artificial Sequence
  Description of Artificial Sequence: Synthetic oligonucleotide
uggccguuacacuccaguc

SEQ ID NO: 320248 - RNA, 19 nt, Artificial Sequence
  Description of Artificial Sequence: Synthetic oligonucleotide
ggcuacgucacaauuaaaa

SEQ ID NO: 320249 - RNA, 19 nt, Artificial Sequence
  Description of Artificial Sequence: Synthetic oligonucleotide
aggcgguuaucccugcggu

SEQ ID NO: 320250 - RNA, 19 nt, Artificial Sequence
  Description of Artificial Sequence: Synthetic oligonucleotide
uccgacuugucaaccucau

SEQ ID NO: 320251 - RNA, 19 nt, Artificial Sequence
  Description of Artificial Sequence: Synthetic oligonucleotide
aggggacuaggcuucucca

SEQ ID NO: 320252 - RNA, 19 nt, Artificial Sequence
  Description of Artificial Sequence: Synthetic oligonucleotide
uccguugcucucgaacucu

SEQ ID NO: 320253 - RNA, 19 nt, Artificial Sequence
  Description of Artificial Sequence: Synthetic oligonucleotide
aauccuuagcugcguucua

SEQ ID NO: 320254 - RNA, 19 nt, Artificial Sequence
  Description of Artificial Sequence: Synthetic oligonucleotide
guccccgucacuggaacag

SEQ ID NO: 320255 - RNA, 19 nt, Artificial Sequence
  Description of Artificial Sequence: Synthetic oligonucleotide
ggaauauugauccguugcu

SEQ ID NO: 320256 - RNA, 19 nt, Artificial Sequence
  Description of Artificial Sequence: Synthetic oligonucleotide
ggugccucaccauccuccg

SEQ ID NO: 320257 - RNA, 19 nt, Artificial Sequence
  Description of Artificial Sequence: Synthetic oligonucleotide
ucaaccugcgcggcugagc

SEQ ID NO: 320258 - RNA, 19 nt, Artificial Sequence
  Description of Artificial Sequence: Synthetic oligonucleotide
uccggcuccacaacagguu

SEQ ID NO: 320259 - RNA, 19 nt, Artificial Sequence
  Description of Artificial Sequence: Synthetic oligonucleotide
gcgccucggaacaugaugg

SEQ ID NO: 320260 - RNA, 19 nt, Artificial Sequence
  Description of Artificial Sequence: Synthetic oligonucleotide
gucguugcugaccgucugc

SEQ ID NO: 320261 - RNA, 19 nt, Artificial Sequence
  Description of Artificial Sequence: Synthetic oligonucleotide
gaggaagguucuuacuagu

SEQ ID NO: 320262 - RNA, 19 nt, Artificial Sequence
  Description of Artificial Sequence: Synthetic oligonucleotide
ccgauagacagcagaguag

SEQ ID NO: 320263 - RNA, 19 nt, Artificial Sequence
  Description of Artificial Sequence: Synthetic oligonucleotide
agucgugacuaaauccugu

SEQ ID NO: 320264 - RNA, 19 nt, Artificial Sequence
  Description of Artificial Sequence: Synthetic oligonucleotide
aagucguugcugaccgucu

SEQ ID NO: 320265 - RNA, 19 nt, Artificial Sequence
  Description of Artificial Sequence: Synthetic oligonucleotide
cauguccggggccugguuc

SEQ ID NO: 320266 - RNA, 19 nt, Artificial Sequence
  Description of Artificial Sequence: Synthetic oligonucleotide
cacaugucaaaagaacaaa

SEQ ID NO: 320267 - RNA, 19 nt, Artificial Sequence
  Description of Artificial Sequence: Synthetic oligonucleotide
gaauggccguuacacucca

SEQ ID NO: 320268 - RNA, 19 nt, Artificial Sequence
  Description of Artificial Sequence: Synthetic oligonucleotide
caaaaccgaaguugggcaa

SEQ ID NO: 320269 - RNA, 19 nt, Artificial Sequence
  Description of Artificial Sequence: Synthetic oligonucleotide
cgugacuaaauccuguguc

SEQ ID NO: 320270 - RNA, 19 nt, Artificial Sequence
  Description of Artificial Sequence: Synthetic oligonucleotide
cacauacucugaaucuaga

SEQ ID NO: 320271 - RNA, 19 nt, Artificial Sequence
  Description of Artificial Sequence: Synthetic oligonucleotide
ucguugcugaccgucugcu

SEQ ID NO: 320272 - RNA, 19 nt, Artificial Sequence
  Description of Artificial Sequence: Synthetic oligonucleotide
ugcggucuccuucccuggc

SEQ ID NO: 320273 - RNA, 19 nt, Artificial Sequence
  Description of Artificial Sequence: Synthetic oligonucleotide
ccuauggauuuccuucugc

SEQ ID NO: 320274 - RNA, 19 nt, Artificial Sequence
  Description of Artificial Sequence: Synthetic oligonucleotide
ggaauggccguuacacucc

SEQ ID NO: 320275 - RNA, 19 nt, Artificial Sequence
  Description of Artificial Sequence: Synthetic oligonucleotide
caggaacccgauagacagc

SEQ ID NO: 320276 - RNA, 19 nt, Artificial Sequence
  Description of Artificial Sequence: Synthetic oligonucleotide
gaccgcauccgcuggcuuc

SEQ ID NO: 320277 - RNA, 19 nt, Artificial Sequence
  Description of Artificial Sequence: Synthetic oligonucleotide
gccagaaucaaagauaaau

SEQ ID NO: 320278 - RNA, 19 nt, Artificial Sequence
  Description of Artificial Sequence: Synthetic oligonucleotide
gggaggaagguucuuacua

SEQ ID NO: 320279 - RNA, 19 nt, Artificial Sequence
  Description of Artificial Sequence: Synthetic oligonucleotide
ugacaggcuacgucacaau

SEQ ID NO: 320280 - RNA, 19 nt, Artificial Sequence
  Description of Artificial Sequence: Synthetic oligonucleotide
gacaguagccccaucacuu

SEQ ID NO: 320281 - RNA, 19 nt, Artificial Sequence
  Description of Artificial Sequence: Synthetic oligonucleotide
agaacggagucgugacuaa

SEQ ID NO: 320282 - RNA, 19 nt, Artificial Sequence
  Description of Artificial Sequence: Synthetic oligonucleotide
uguccccgucacuggaaca

SEQ ID NO: 320283 - RNA, 19 nt, Artificial Sequence
  Description of Artificial Sequence: Synthetic oligonucleotide
cucauguggcagguucccg

SEQ ID NO: 320284 - RNA, 19 nt, Artificial Sequence
  Description of Artificial Sequence: Synthetic oligonucleotide
guagcgugagcauccacgu

SEQ ID NO: 320285 - RNA, 19 nt, Artificial Sequence
  Description of Artificial Sequence: Synthetic oligonucleotide
acaggcuacgucacaauua

SEQ ID NO: 320286 - RNA, 19 nt, Artificial Sequence
  Description of Artificial Sequence: Synthetic oligonucleotide
ccguuggaauccaagcccc

SEQ ID NO: 320287 - RNA, 19 nt, Artificial Sequence
  Description of Artificial Sequence: Synthetic oligonucleotide
accuuccucaaaagcgguc

SEQ ID NO: 320288 - RNA, 19 nt, Artificial Sequence
  Description of Artificial Sequence: Synthetic oligonucleotide
gcaggguguaguacugucg

SEQ ID NO: 320289 - RNA, 19 nt, Artificial Sequence
  Description of Artificial Sequence: Synthetic oligonucleotide
cuccucuaagucguugcug

SEQ ID NO: 320290 - RNA, 19 nt, Artificial Sequence
  Description of Artificial Sequence: Synthetic oligonucleotide
uaucagauuugggguuugu

SEQ ID NO: 320291 - RNA, 19 nt, Artificial Sequence
  Description of Artificial Sequence: Synthetic oligonucleotide
acggauuggccgggguccc

SEQ ID NO: 320292 - RNA, 19 nt, Artificial Sequence
  Description of Artificial Sequence: Synthetic oligonucleotide
ccauagaccgcauccgcug

SEQ ID NO: 320293 - RNA, 19 nt, Artificial Sequence
  Description of Artificial Sequence: Synthetic oligonucleotide
aaacucuaccuaaccucaa

SEQ ID NO: 320294 - RNA, 19 nt, Artificial Sequence
  Description of Artificial Sequence: Synthetic oligonucleotide
cugucagggugccucacca

SEQ ID NO: 320295 - RNA, 19 nt, Artificial Sequence
  Description of Artificial Sequence: Synthetic oligonucleotide
gguguaguacugucgcaca

SEQ ID NO: 320296 - RNA, 19 nt, Artificial Sequence
  Description of Artificial Sequence: Synthetic oligonucleotide
acguucccauaauuuugga

SEQ ID NO: 320297 - RNA, 19 nt, Artificial Sequence
  Description of Artificial Sequence: Synthetic oligonucleotide
caccaauugaaacauccau

SEQ ID NO: 320298 - RNA, 19 nt, Artificial Sequence
  Description of Artificial Sequence: Synthetic oligonucleotide
cugcggucuccuucccugg

SEQ ID NO: 320299 - RNA, 19 nt, Artificial Sequence
  Description of Artificial Sequence: Synthetic oligonucleotide
cugcucauagaaaguccca

SEQ ID NO: 320300 - RNA, 19 nt, Artificial Sequence
  Description of Artificial Sequence: Synthetic oligonucleotide
cuaugguugaggaccuucu

SEQ ID NO: 320301 - RNA, 19 nt, Artificial Sequence
  Description of Artificial Sequence: Synthetic oligonucleotide
uucagacggacugcgccuc

SEQ ID NO: 320302 - RNA, 19 nt, Artificial Sequence
  Description of Artificial Sequence: Synthetic oligonucleotide
caguuccgacuugucaacc

SEQ ID NO: 320303 - RNA, 19 nt, Artificial Sequence
  Description of Artificial Sequence: Synthetic oligonucleotide
acuccuccuaaaguaucgu

SEQ ID NO: 320304 - RNA, 19 nt, Artificial Sequence
  Description of Artificial Sequence: Synthetic oligonucleotide
gcuacgucacaauuaaaau

SEQ ID NO: 320305 - RNA, 19 nt, Artificial Sequence
  Description of Artificial Sequence: Synthetic oligonucleotide
gaguagcgugagcauccac

SEQ ID NO: 320306 - RNA, 19 nt, Artificial Sequence
  Description of Artificial Sequence: Synthetic oligonucleotide
caauugaaacauccauugu

SEQ ID NO: 320307 - RNA, 19 nt, Artificial Sequence
  Description of Artificial Sequence: Synthetic oligonucleotide
ggauaaggcagaacaaugu

SEQ ID NO: 320308 - RNA, 19 nt, Artificial Sequence
  Description of Artificial Sequence: Synthetic oligonucleotide
cugaccgucugcucauaga

SEQ ID NO: 320309 - RNA, 19 nt, Artificial Sequence
  Description of Artificial Sequence: Synthetic oligonucleotide
gacuacuccaagacaccaa

SEQ ID NO: 320310 - RNA, 19 nt, Artificial Sequence
  Description of Artificial Sequence: Synthetic oligonucleotide
aauggccguuacacuccag

SEQ ID NO: 320311 - RNA, 19 nt, Artificial Sequence
  Description of Artificial Sequence: Synthetic oligonucleotide
agccaccgaagaccucauc

SEQ ID NO: 320312 - RNA, 19 nt, Artificial Sequence
  Description of Artificial Sequence: Synthetic oligonucleotide
cagaacggagucgugacua

SEQ ID NO: 320313 - RNA, 19 nt, Artificial Sequence
  Description of Artificial Sequence: Synthetic oligonucleotide
ucccaccaauugaaacauc

SEQ ID NO: 320314 - RNA, 19 nt, Artificial Sequence
  Description of Artificial Sequence: Synthetic oligonucleotide
accccaucauucagaguag

SEQ ID NO: 320315 - RNA, 19 nt, Artificial Sequence
  Description of Artificial Sequence: Synthetic oligonucleotide
gacugcgccucggaacaug

SEQ ID NO: 320316 - RNA, 19 nt, Artificial Sequence
  Description of Artificial Sequence: Synthetic oligonucleotide
ccuuagcugcguucuagac

SEQ ID NO: 320317 - RNA, 19 nt, Artificial Sequence
  Description of Artificial Sequence: Synthetic oligonucleotide
acccgauagacagcagagu

SEQ ID NO: 320318 - RNA, 19 nt, Artificial Sequence
  Description of Artificial Sequence: Synthetic oligonucleotide
cgacacauacaggugauac

SEQ ID NO: 320319 - RNA, 19 nt, Artificial Sequence
  Description of Artificial Sequence: Synthetic oligonucleotide
gguugaaggaauucaccau

SEQ ID NO: 320320 - RNA, 19 nt, Artificial Sequence
  Description of Artificial Sequence: Synthetic oligonucleotide
auuggccgggguccccucu

SEQ ID NO: 320321 - RNA, 19 nt, Artificial Sequence
  Description of Artificial Sequence: Synthetic oligonucleotide
caccaccccaucauucaga

SEQ ID NO: 320322 - RNA, 19 nt, Artificial Sequence
  Description of Artificial Sequence: Synthetic oligonucleotide
agaguagaauguggcccgu

SEQ ID NO: 320323 - RNA, 19 nt, Artificial Sequence
  Description of Artificial Sequence: Synthetic oligonucleotide
ggacuaggcuucuccauaa

SEQ ID NO: 320324 - RNA, 19 nt, Artificial Sequence
  Description of Artificial Sequence: Synthetic oligonucleotide
uggggccggagaagcacuc

SEQ ID NO: 320325 - RNA, 19 nt, Artificial Sequence
  Description of Artificial Sequence: Synthetic oligonucleotide
agaguagcgugagcaucca

SEQ ID NO: 320326 - RNA, 19 nt, Artificial Sequence
  Description of Artificial Sequence: Synthetic oligonucleotide
gccaccgaagaccucaucu

SEQ ID NO: 320327 - RNA, 19 nt, Artificial Sequence
  Description of Artificial Sequence: Synthetic oligonucleotide
cuucugcccauagaccgca

SEQ ID NO: 320328 - RNA, 19 nt, Artificial Sequence
  Description of Artificial Sequence: Synthetic oligonucleotide
acugcgccucggaacauga

SEQ ID NO: 320329 - RNA, 19 nt, Artificial Sequence
  Description of Artificial Sequence: Synthetic oligonucleotide
uccccgucacuggaacagc

SEQ ID NO: 320330 - RNA, 19 nt, Artificial Sequence
  Description of Artificial Sequence: Synthetic oligonucleotide
gacgcgcuccuuuggggaa

SEQ ID NO: 320331 - RNA, 19 nt, Artificial Sequence
  Description of Artificial Sequence: Synthetic oligonucleotide
caaaagcgguccagucuga

SEQ ID NO: 320332 - RNA, 19 nt, Artificial Sequence
  Description of Artificial Sequence: Synthetic oligonucleotide
ccgucagccacugagguca

SEQ ID NO: 320333 - RNA, 19 nt, Artificial Sequence
  Description of Artificial Sequence: Synthetic oligonucleotide
gcggaucuugguguggcag

SEQ ID NO: 320334 - RNA, 19 nt, Artificial Sequence
  Description of Artificial Sequence: Synthetic oligonucleotide
auccuccgagguuccacau

SEQ ID NO: 320335 - RNA, 19 nt, Artificial Sequence
  Description of Artificial Sequence: Synthetic oligonucleotide
gaacggagucgugacuaaa

SEQ ID NO: 320336 - RNA, 19 nt, Artificial Sequence
  Description of Artificial Sequence: Synthetic oligonucleotide
cucggaacaugaugggccu

SEQ ID NO: 320337 - RNA, 19 nt, Artificial Sequence
  Description of Artificial Sequence: Synthetic oligonucleotide
cacuguuaaugcgcagcuc

SEQ ID NO: 320338 - RNA, 19 nt, Artificial Sequence
  Description of Artificial Sequence: Synthetic oligonucleotide
uugauccguugcucucgaa

SEQ ID NO: 320339 - RNA, 19 nt, Artificial Sequence
  Description of Artificial Sequence: Synthetic oligonucleotide
cagacggacugcgccucgg

SEQ ID NO: 320340 - RNA, 19 nt, Artificial Sequence
  Description of Artificial Sequence: Synthetic oligonucleotide
gcgagacgcgcuccuuugg

SEQ ID NO: 320341 - RNA, 19 nt, Artificial Sequence
  Description of Artificial Sequence: Synthetic oligonucleotide
ccuaugguugaggaccuuc

SEQ ID NO: 320342 - RNA, 19 nt, Artificial Sequence
  Description of Artificial Sequence: Synthetic oligonucleotide
caacuucccgccacuguua

SEQ ID NO: 320343 - RNA, 19 nt, Artificial Sequence
  Description of Artificial Sequence: Synthetic oligonucleotide
cccgauagacagcagagua

SEQ ID NO: 320344 - RNA, 19 nt, Artificial Sequence
  Description of Artificial Sequence: Synthetic oligonucleotide
ccaccaauugaaacaucca

SEQ ID NO: 320345 - RNA, 19 nt, Artificial Sequence
  Description of Artificial Sequence: Synthetic oligonucleotide
aaccgaaguugggcaacuu

SEQ ID NO: 320346 - RNA, 19 nt, Artificial Sequence
  Description of Artificial Sequence: Synthetic oligonucleotide
ccucaaauccuccugugcu

SEQ ID NO: 320347 - RNA, 19 nt, Artificial Sequence
  Description of Artificial Sequence: Synthetic oligonucleotide
uuaucccugcggucuccuu

SEQ ID NO: 320348 - RNA, 19 nt, Artificial Sequence
  Description of Artificial Sequence: Synthetic oligonucleotide
augucguugugcacauaaa

SEQ ID NO: 320349 - RNA, 19 nt, Artificial Sequence
  Description of Artificial Sequence: Synthetic oligonucleotide
ggccguuacacuccagucu

SEQ ID NO: 320350 - RNA, 19 nt, Artificial Sequence
  Description of Artificial Sequence: Synthetic oligonucleotide
ugccuccgcggggagggcc

SEQ ID NO: 320351 - RNA, 19 nt, Artificial Sequence
  Description of Artificial Sequence: Synthetic oligonucleotide
aaccaucgcuuugguggau

SEQ ID NO: 320352 - RNA, 19 nt, Artificial Sequence
  Description of Artificial Sequence: Synthetic oligonucleotide
acuucccgccacuguuaau

SEQ ID NO: 320353 - RNA, 19 nt, Artificial Sequence
  Description of Artificial Sequence: Synthetic oligonucleotide
cagugaagcgagacgcgcu

SEQ ID NO: 320354 - RNA, 19 nt, Artificial Sequence
  Description of Artificial Sequence: Synthetic oligonucleotide
accaucgcuuugguggauu

SEQ ID NO: 320355 - RNA, 19 nt, Artificial Sequence
  Description of Artificial Sequence: Synthetic oligonucleotide
ggaacaugaugggccuaug

SEQ ID NO: 320356 - RNA, 19 nt, Artificial Sequence
  Description of Artificial Sequence: Synthetic oligonucleotide
cacgacacauacaggugau

SEQ ID NO: 320357 - RNA, 19 nt, Artificial Sequence
  Description of Artificial Sequence: Synthetic oligonucleotide
gguuaucccugcggucucc

SEQ ID NO: 320358 - RNA, 19 nt, Artificial Sequence
  Description of Artificial Sequence: Synthetic oligonucleotide
ccaccaccccaucauucag

SEQ ID NO: 320359 - RNA, 19 nt, Artificial Sequence
  Description of Artificial Sequence: Synthetic oligonucleotide
ggcgguuaucccugcgguc

SEQ ID NO: 320360 - RNA, 19 nt, Artificial Sequence
  Description of Artificial Sequence: Synthetic oligonucleotide
cugaggggccuaucaggaa

SEQ ID NO: 320361 - RNA, 19 nt, Artificial Sequence
  Description of Artificial Sequence: Synthetic oligonucleotide
accuccgcagagccugguu

SEQ ID NO: 320362 - RNA, 19 nt, Artificial Sequence
  Description of Artificial Sequence: Synthetic oligonucleotide
agaccgcauccgcuggcuu

SEQ ID NO: 320363 - RNA, 19 nt, Artificial Sequence
  Description of Artificial Sequence: Synthetic oligonucleotide
ucggaacaugaugggccua

SEQ ID NO: 320364 - RNA, 19 nt, Artificial Sequence
  Description of Artificial Sequence: Synthetic oligonucleotide
acgacacauacaggugaua

SEQ ID NO: 320365 - RNA, 19 nt, Artificial Sequence
  Description of Artificial Sequence: Synthetic oligonucleotide
gcauccacguggcggaucu

SEQ ID NO: 320366 - RNA, 19 nt, Artificial Sequence
  Description of Artificial Sequence: Synthetic oligonucleotide
cuccgcagagccugguugu

SEQ ID NO: 320367 - RNA, 19 nt, Artificial Sequence
  Description of Artificial Sequence: Synthetic oligonucleotide
cauguggcagguucccgau

SEQ ID NO: 320368 - RNA, 19 nt, Artificial Sequence
  Description of Artificial Sequence: Synthetic oligonucleotide
ccaagaaaacguccucaaa

SEQ ID NO: 320369 - RNA, 19 nt, Artificial Sequence
  Description of Artificial Sequence: Synthetic oligonucleotide
gcgugagcaggaaggugag

SEQ ID NO: 320370 - RNA, 19 nt, Artificial Sequence
  Description of Artificial Sequence: Synthetic oligonucleotide
caccauucugcaggagcca

SEQ ID NO: 320371 - RNA, 19 nt, Artificial Sequence
  Description of Artificial Sequence: Synthetic oligonucleotide
gcgguuaucccugcggucu

SEQ ID NO: 320372 - RNA, 19 nt, Artificial Sequence
  Description of Artificial Sequence: Synthetic oligonucleotide
ccccgaaggcgguuauccc

SEQ ID NO: 320373 - RNA, 19 nt, Artificial Sequence
  Description of Artificial Sequence: Synthetic oligonucleotide
agggacccaguggcaguug

SEQ ID NO: 320374 - RNA, 19 nt, Artificial Sequence
  Description of Artificial Sequence: Synthetic oligonucleotide
gcugcguucuagacauuga

SEQ ID NO: 320375 - RNA, 19 nt, Artificial Sequence
  Description of Artificial Sequence: Synthetic oligonucleotide
cuccuccuaaaguaucguu

SEQ ID NO: 320376 - RNA, 19 nt, Artificial Sequence
  Description of Artificial Sequence: Synthetic oligonucleotide
ggaacccgauagacagcag

SEQ ID NO: 320377 - RNA, 19 nt, Artificial Sequence
  Description of Artificial Sequence: Synthetic oligonucleotide
ccuacuccuccuaaaguau

SEQ ID NO: 320378 - RNA, 19 nt, Artificial Sequence
  Description of Artificial Sequence: Synthetic oligonucleotide
ccgacuugucaaccucaug

SEQ ID NO: 320379 - RNA, 19 nt, Artificial Sequence
  Description of Artificial Sequence: Synthetic oligonucleotide
ggaggaauauugauccguu

SEQ ID NO: 320380 - RNA, 19 nt, Artificial Sequence
  Description of Artificial Sequence: Synthetic oligonucleotide
cgccucggaacaugauggg

SEQ ID NO: 320381 - RNA, 19 nt, Artificial Sequence
  Description of Artificial Sequence: Synthetic oligonucleotide
guuaucccugcggucuccu

SEQ ID NO: 320382 - RNA, 19 nt, Artificial Sequence
  Description of Artificial Sequence: Synthetic oligonucleotide
ggauucaaccugcgcggcu

SEQ ID NO: 320383 - RNA, 19 nt, Artificial Sequence
  Description of Artificial Sequence: Synthetic oligonucleotide
cguggcggaucuuggugug

SEQ ID NO: 320384 - RNA, 19 nt, Artificial Sequence
  Description of Artificial Sequence: Synthetic oligonucleotide
cuaagucguugcugaccgu

SEQ ID NO: 320385 - RNA, 19 nt, Artificial Sequence
  Description of Artificial Sequence: Synthetic oligonucleotide
agguccccgaaggcgguua

SEQ ID NO: 320386 - RNA, 19 nt, Artificial Sequence
  Description of Artificial Sequence: Synthetic oligonucleotide
ccacuguuaaugcgcagcu

SEQ ID NO: 320387 - RNA, 19 nt, Artificial Sequence
  Description of Artificial Sequence: Synthetic oligonucleotide
cggacugcgccucggaaca

SEQ ID NO: 320388 - RNA, 19 nt, Artificial Sequence
  Description of Artificial Sequence: Synthetic oligonucleotide
ugcugaccgucugcucaua

SEQ ID NO: 320389 - RNA, 19 nt, Artificial Sequence
  Description of Artificial Sequence: Synthetic oligonucleotide
ccguugcucucgaacucuc

SEQ ID NO: 320390 - RNA, 19 nt, Artificial Sequence
  Description of Artificial Sequence: Synthetic oligonucleotide
ccgaccagcaggggacuag

SEQ ID NO: 320391 - RNA, 19 nt, Artificial Sequence
  Description of Artificial Sequence: Synthetic oligonucleotide
ggggacuaggcuucuccau

SEQ ID NO: 320392 - RNA, 19 nt, Artificial Sequence
  Description of Artificial Sequence: Synthetic oligonucleotide
uccgcggggagggccucuc

SEQ ID NO: 320393 - RNA, 19 nt, Artificial Sequence
  Description of Artificial Sequence: Synthetic oligonucleotide
cccgaaggcgguuaucccu

SEQ ID NO: 320394 - RNA, 19 nt, Artificial Sequence
  Description of Artificial Sequence: Synthetic oligonucleotide
cucacggauuggccggggu

SEQ ID NO: 320395 - RNA, 19 nt, Artificial Sequence
  Description of Artificial Sequence: Synthetic oligonucleotide
agaugucguugugcacaua

SEQ ID NO: 320396 - RNA, 19 nt, Artificial Sequence
  Description of Artificial Sequence: Synthetic oligonucleotide
gcccgucagccacugaggu

SEQ ID NO: 320397 - RNA, 19 nt, Artificial Sequence
  Description of Artificial Sequence: Synthetic oligonucleotide
ccgaagaccucaucuuggu

SEQ ID NO: 320398 - RNA, 19 nt, Artificial Sequence
  Description of Artificial Sequence: Synthetic oligonucleotide
ccgcagagccugguuguug

SEQ ID NO: 320399 - RNA, 19 nt, Artificial Sequence
  Description of Artificial Sequence: Synthetic oligonucleotide
ccaccgaagaccucaucuu

SEQ ID NO: 320400 - RNA, 19 nt, Artificial Sequence
  Description of Artificial Sequence: Synthetic oligonucleotide
ggccuaugguugaggaccu

SEQ ID NO: 320401 - RNA, 19 nt, Artificial Sequence
  Description of Artificial Sequence: Synthetic oligonucleotide
ccgucugcucauagaaagu

SEQ ID NO: 320402 - RNA, 19 nt, Artificial Sequence
  Description of Artificial Sequence: Synthetic oligonucleotide
gcgcuccuuuggggaaugg

SEQ ID NO: 320403 - RNA, 19 nt, Artificial Sequence
  Description of Artificial Sequence: Synthetic oligonucleotide
ccugugucucccaccaauu

SEQ ID NO: 320404 - RNA, 19 nt, Artificial Sequence
  Description of Artificial Sequence: Synthetic oligonucleotide
ccauaaccaucgcuuuggu

SEQ ID NO: 320405 - RNA, 19 nt, Artificial Sequence
  Description of Artificial Sequence: Synthetic oligonucleotide
cgguuaucccugcggucuc

SEQ ID NO: 320406 - RNA, 19 nt, Artificial Sequence
  Description of Artificial Sequence: Synthetic oligonucleotide
cguuacacuccagucugua

SEQ ID NO: 320407 - RNA, 19 nt, Artificial Sequence
  Description of Artificial Sequence: Synthetic oligonucleotide
gcgguccagucugaggcgu

SEQ ID NO: 320408 - RNA, 19 nt, Artificial Sequence
  Description of Artificial Sequence: Synthetic oligonucleotide
gcuucccguuggaauccaa

SEQ ID NO: 320409 - RNA, 19 nt, Artificial Sequence
  Description of Artificial Sequence: Synthetic oligonucleotide
gguccccgaaggcgguuau

SEQ ID NO: 320410 - RNA, 19 nt, Artificial Sequence
  Description of Artificial Sequence: Synthetic oligonucleotide
ggugacugucagggugccu

SEQ ID NO: 320411 - RNA, 19 nt, Artificial Sequence
  Description of Artificial Sequence: Synthetic oligonucleotide
ccaccacguucccauaauu

SEQ ID NO: 320412 - RNA, 19 nt, Artificial Sequence
  Description of Artificial Sequence: Synthetic oligonucleotide
ccguuacacuccagucugu

SEQ ID NO: 320413 - RNA, 19 nt, Artificial Sequence
  Description of Artificial Sequence: Synthetic oligonucleotide
ggggccggagaagcacucu

SEQ ID NO: 320414 - RNA, 19 nt, Artificial Sequence
  Description of Artificial Sequence: Synthetic oligonucleotide
cccgcccgaccagcagggg

SEQ ID NO: 320415 - RNA, 19 nt, Artificial Sequence
  Description of Artificial Sequence: Synthetic oligonucleotide
cggauuggccggggucccc

SEQ ID NO: 320416 - RNA, 19 nt, Artificial Sequence
  Description of Artificial Sequence: Synthetic oligonucleotide
cggaacaugaugggccuau

SEQ ID NO: 320417 - RNA, 19 nt, Artificial Sequence
  Description of Artificial Sequence: Synthetic oligonucleotide
gcauguccggggccugguu

SEQ ID NO: 320418 - RNA, 19 nt, Artificial Sequence
  Description of Artificial Sequence: Synthetic oligonucleotide
cccugcggucuccuucccu

SEQ ID NO: 320419 - RNA, 19 nt, Artificial Sequence
  Description of Artificial Sequence: Synthetic oligonucleotide
gcccgaccagcaggggacu

SEQ ID NO: 320420 - RNA, 19 nt, Artificial Sequence
  Description of Artificial Sequence: Synthetic oligonucleotide
ccgcggggagggccucuca

SEQ ID NO: 320421 - RNA, 19 nt, Artificial Sequence
  Description of Artificial Sequence: Synthetic oligonucleotide
cccgaccagcaggggacua

SEQ ID NO: 320422 - RNA, 19 nt, Artificial Sequence
  Description of Artificial Sequence: Synthetic oligonucleotide
gccuaugguugaggaccuu

SEQ ID NO: 320423 - RNA, 19 nt, Artificial Sequence
  Description of Artificial Sequence: Synthetic oligonucleotide
cgcggggagggccucucau

SEQ ID NO: 320424 - RNA, 19 nt, Artificial Sequence
  Description of Artificial Sequence: Synthetic oligonucleotide
aauaacaccguucuggaag

SEQ ID NO: 320425 - RNA, 19 nt, Artificial Sequence
  Description of Artificial Sequence: Synthetic oligonucleotide
uauuuauuaaguuaugagc

SEQ ID NO: 320426 - RNA, 19 nt, Artificial Sequence
  Description of Artificial Sequence: Synthetic oligonucleotide
aaaagcagaguguaaaauc

SEQ ID NO: 320427 - RNA, 19 nt, Artificial Sequence
  Description of Artificial Sequence: Synthetic oligonucleotide
auaguuguaaacuaucagg

SEQ ID NO: 320428 - RNA, 19 nt, Artificial Sequence
  Description of Artificial Sequence: Synthetic oligonucleotide
ugagauuccagcaacaccc

SEQ ID NO: 320429 - RNA, 19 nt, Artificial Sequence
  Description of Artificial Sequence: Synthetic oligonucleotide
uuuaaugacagaugcauag

SEQ ID NO: 320430 - RNA, 19 nt, Artificial Sequence
  Description of Artificial Sequence: Synthetic oligonucleotide
ugcucuucuaacaacaagg

SEQ ID NO: 320431 - RNA, 19 nt, Artificial Sequence
  Description of Artificial Sequence: Synthetic oligonucleotide
aaggguacccgguagaugg

SEQ ID NO: 320432 - RNA, 19 nt, Artificial Sequence
  Description of Artificial Sequence: Synthetic oligonucleotide
aaugauaggacaugcaagu

SEQ ID NO: 320433 - RNA, 19 nt, Artificial Sequence
  Description of Artificial Sequence: Synthetic oligonucleotide
agaacauugauauuuucuc

SEQ ID NO: 320434 - RNA, 19 nt, Artificial Sequence
  Description of Artificial Sequence: Synthetic oligonucleotide
aauaggaaggucaagucuc

SEQ ID NO: 320435 - RNA, 19 nt, Artificial Sequence
  Description of Artificial Sequence: Synthetic oligonucleotide
ugguuaauagccaaugcag

SEQ ID NO: 320436 - RNA, 19 nt, Artificial Sequence
  Description of Artificial Sequence: Synthetic oligonucleotide
uguagaauuggcaucuugc

SEQ ID NO: 320437 - RNA, 19 nt, Artificial Sequence
  Description of Artificial Sequence: Synthetic oligonucleotide
aacuuuucgaauugcaugu

SEQ ID NO: 320438 - RNA, 19 nt, Artificial Sequence
  Description of Artificial Sequence: Synthetic oligonucleotide
ugcagaaugcucuagagcu

SEQ ID NO: 320439 - RNA, 19 nt, Artificial Sequence
  Description of Artificial Sequence: Synthetic oligonucleotide
cauaaggagagaauguucc

SEQ ID NO: 320440 - RNA, 19 nt, Artificial Sequence
  Description of Artificial Sequence: Synthetic oligonucleotide
uuaaguuaugagcauacac

SEQ ID NO: 320441 - RNA, 19 nt, Artificial Sequence
  Description of Artificial Sequence: Synthetic oligonucleotide
uauuacaaaaguuuucccu

SEQ ID NO: 320442 - RNA, 19 nt, Artificial Sequence
  Description of Artificial Sequence: Synthetic oligonucleotide
acaaucuccauccucucgc

SEQ ID NO: 320443 - RNA, 19 nt, Artificial Sequence
  Description of Artificial Sequence: Synthetic oligonucleotide
uguaaaaucauaguuguaa

SEQ ID NO: 320444 - RNA, 19 nt, Artificial Sequence
  Description of Artificial Sequence: Synthetic oligonucleotide
ugugacacuucauagagcu

SEQ ID NO: 320445 - RNA, 19 nt, Artificial Sequence
  Description of Artificial Sequence: Synthetic oligonucleotide
auuuauuaaguuaugagca

SEQ ID NO: 320446 - RNA, 19 nt, Artificial Sequence
  Description of Artificial Sequence: Synthetic oligonucleotide
aacaggguaguugaugacc

SEQ ID NO: 320447 - RNA, 19 nt, Artificial Sequence
  Description of Artificial Sequence: Synthetic oligonucleotide
ugagggacaacuuggacag

SEQ ID NO: 320448 - RNA, 19 nt, Artificial Sequence
  Description of Artificial Sequence: Synthetic oligonucleotide
uaacuuuucgaauugcaug

SEQ ID NO: 320449 - RNA, 19 nt, Artificial Sequence
  Description of Artificial Sequence: Synthetic oligonucleotide
agaaaauagucuacaaccc

SEQ ID NO: 320450 - RNA, 19 nt, Artificial Sequence
  Description of Artificial Sequence: Synthetic oligonucleotide
gucaacugcaauaacaccg

SEQ ID NO: 320451 - RNA, 19 nt, Artificial Sequence
  Description of Artificial Sequence: Synthetic oligonucleotide
uaguugaugaccuuccacc

SEQ ID NO: 320452 - RNA, 19 nt, Artificial Sequence
  Description of Artificial Sequence: Synthetic oligonucleotide
agauuauuguccuugguga

SEQ ID NO: 320453 - RNA, 19 nt, Artificial Sequence
  Description of Artificial Sequence: Synthetic oligonucleotide
uauaaaugauaggacaugc

SEQ ID NO: 320454 - RNA, 19 nt, Artificial Sequence
  Description of Artificial Sequence: Synthetic oligonucleotide
aacaucaugaacacagauc

SEQ ID NO: 320455 - RNA, 19 nt, Artificial Sequence
  Description of Artificial Sequence: Synthetic oligonucleotide
ugucugauguaccagagaa

SEQ ID NO: 320456 - RNA, 19 nt, Artificial Sequence
  Description of Artificial Sequence: Synthetic oligonucleotide
ucucucaauaggaagguca

SEQ ID NO: 320457 - RNA, 19 nt, Artificial Sequence
  Description of Artificial Sequence: Synthetic oligonucleotide
aaaugauaggacaugcaag

SEQ ID NO: 320458 - RNA, 19 nt, Artificial Sequence
  Description of Artificial Sequence: Synthetic oligonucleotide
caugguuccacccaucugc

SEQ ID NO: 320459 - RNA, 19 nt, Artificial Sequence
  Description of Artificial Sequence: Synthetic oligonucleotide
ucauaguuguaaacuauca

SEQ ID NO: 320460 - RNA, 19 nt, Artificial Sequence
  Description of Artificial Sequence: Synthetic oligonucleotide
ucuccgaagaaaauagucu

SEQ ID NO: 320461 - RNA, 19 nt, Artificial Sequence
  Description of Artificial Sequence: Synthetic oligonucleotide
gaugacuagucuuaggguc

SEQ ID NO: 320462 - RNA, 19 nt, Artificial Sequence
  Description of Artificial Sequence: Synthetic oligonucleotide
ugauaggacaugcaaguga

SEQ ID NO: 320463 - RNA, 19 nt, Artificial Sequence
  Description of Artificial Sequence: Synthetic oligonucleotide
uaaugacagaugcauagga

SEQ ID NO: 320464 - RNA, 19 nt, Artificial Sequence
  Description of Artificial Sequence: Synthetic oligonucleotide
ucuccauagaguuuucuca

SEQ ID NO: 320465 - RNA, 19 nt, Artificial Sequence
  Description of Artificial Sequence: Synthetic oligonucleotide
acaguuagcagcccaggac

SEQ ID NO: 320466 - RNA, 19 nt, Artificial Sequence
  Description of Artificial Sequence: Synthetic oligonucleotide
agaguguaaaaucauaguu

SEQ ID NO: 320467 - RNA, 19 nt, Artificial Sequence
  Description of Artificial Sequence: Synthetic oligonucleotide
uguaccagagaaccaaaca

SEQ ID NO: 320468 - RNA, 19 nt, Artificial Sequence
  Description of Artificial Sequence: Synthetic oligonucleotide
ugcggugucacauuaagaa

SEQ ID NO: 320469 - RNA, 19 nt, Artificial Sequence
  Description of Artificial Sequence: Synthetic oligonucleotide
agaauucuaccacugcuag

SEQ ID NO: 320470 - RNA, 19 nt, Artificial Sequence
  Description of Artificial Sequence: Synthetic oligonucleotide
aaaauagucuacaaccccu

SEQ ID NO: 320471 - RNA, 19 nt, Artificial Sequence
  Description of Artificial Sequence: Synthetic oligonucleotide
aagaguuccccacaacuca

SEQ ID NO: 320472 - RNA, 19 nt, Artificial Sequence
  Description of Artificial Sequence: Synthetic oligonucleotide
ugugaugugagggacaacu

SEQ ID NO: 320473 - RNA, 19 nt, Artificial Sequence
  Description of Artificial Sequence: Synthetic oligonucleotide
agagcgauagagcaggucu

SEQ ID NO: 320474 - RNA, 19 nt, Artificial Sequence
  Description of Artificial Sequence: Synthetic oligonucleotide
uuaugugacacuucauaga

SEQ ID NO: 320475 - RNA, 19 nt, Artificial Sequence
  Description of Artificial Sequence: Synthetic oligonucleotide
accaagcucaauaacacac

SEQ ID NO: 320476 - RNA, 19 nt, Artificial Sequence
  Description of Artificial Sequence: Synthetic oligonucleotide
aguuguaaacuaucagguc

SEQ ID NO: 320477 - RNA, 19 nt, Artificial Sequence
  Description of Artificial Sequence: Synthetic oligonucleotide
aagucuccgaagaaaauag

SEQ ID NO: 320478 - RNA, 19 nt, Artificial Sequence
  Description of Artificial Sequence: Synthetic oligonucleotide
ucgaauugcaugucaacug

SEQ ID NO: 320479 - RNA, 19 nt, Artificial Sequence
  Description of Artificial Sequence: Synthetic oligonucleotide
uuaaugacagaugcauagg

SEQ ID NO: 320480 - RNA, 19 nt, Artificial Sequence
  Description of Artificial Sequence: Synthetic oligonucleotide
cauaguuguaaacuaucag

SEQ ID NO: 320481 - RNA, 19 nt, Artificial Sequence
  Description of Artificial Sequence: Synthetic oligonucleotide
auagaguuuucucaugacu

SEQ ID NO: 320482 - RNA, 19 nt, Artificial Sequence
  Description of Artificial Sequence: Synthetic oligonucleotide
uguuccugcaucaauguua

SEQ ID NO: 320483 - RNA, 19 nt, Artificial Sequence
  Description of Artificial Sequence: Synthetic oligonucleotide
ugugguuaauagccaaugc

SEQ ID NO: 320484 - RNA, 19 nt, Artificial Sequence
  Description of Artificial Sequence: Synthetic oligonucleotide
uugaugaccuuccaccagc

SEQ ID NO: 320485 - RNA, 19 nt, Artificial Sequence
  Description of Artificial Sequence: Synthetic oligonucleotide
uucaccucaaaucgguggc

SEQ ID NO: 320486 - RNA, 19 nt, Artificial Sequence
  Description of Artificial Sequence: Synthetic oligonucleotide
ugcaaaggaauuuucucac

SEQ ID NO: 320487 - RNA, 19 nt, Artificial Sequence
  Description of Artificial Sequence: Synthetic oligonucleotide
cucacaaacagguauguca

SEQ ID NO: 320488 - RNA, 19 nt, Artificial Sequence
  Description of Artificial Sequence: Synthetic oligonucleotide
ugcucauaaggagagaaug

SEQ ID NO: 320489 - RNA, 19 nt, Artificial Sequence
  Description of Artificial Sequence: Synthetic oligonucleotide
cuaacaacaaggguacccg

SEQ ID NO: 320490 - RNA, 19 nt, Artificial Sequence
  Description of Artificial Sequence: Synthetic oligonucleotide
aguaaucuccuuugcguuc

SEQ ID NO: 320491 - RNA, 19 nt, Artificial Sequence
  Description of Artificial Sequence: Synthetic oligonucleotide
ucuguuuccgagcccaggc

SEQ ID NO: 320492 - RNA, 19 nt, Artificial Sequence
  Description of Artificial Sequence: Synthetic oligonucleotide
uccucuaagcucccgaaca

SEQ ID NO: 320493 - RNA, 19 nt, Artificial Sequence
  Description of Artificial Sequence: Synthetic oligonucleotide
uggauucaccucaaaucgg

SEQ ID NO: 320494 - RNA, 19 nt, Artificial Sequence
  Description of Artificial Sequence: Synthetic oligonucleotide
acauccagaguccuacuuc

SEQ ID NO: 320495 - RNA, 19 nt, Artificial Sequence
  Description of Artificial Sequence: Synthetic oligonucleotide
uuuguuccccuguugaacu

SEQ ID NO: 320496 - RNA, 19 nt, Artificial Sequence
  Description of Artificial Sequence: Synthetic oligonucleotide
ucaacugcaauaacaccgu

SEQ ID NO: 320497 - RNA, 19 nt, Artificial Sequence
  Description of Artificial Sequence: Synthetic oligonucleotide
auugcggugucacauuaag

SEQ ID NO: 320498 - RNA, 19 nt, Artificial Sequence
  Description of Artificial Sequence: Synthetic oligonucleotide
gauaggacaugcaagugac

SEQ ID NO: 320499 - RNA, 19 nt, Artificial Sequence
  Description of Artificial Sequence: Synthetic oligonucleotide
uuaauaacauacugguaua

SEQ ID NO: 320500 - RNA, 19 nt, Artificial Sequence
  Description of Artificial Sequence: Synthetic oligonucleotide
aaccaaacaucccucuaga

SEQ ID NO: 320501 - RNA, 19 nt, Artificial Sequence
  Description of Artificial Sequence: Synthetic oligonucleotide
uuguaaacuaucaggucaa

SEQ ID NO: 320502 - RNA, 19 nt, Artificial Sequence
  Description of Artificial Sequence: Synthetic oligonucleotide
uuggauugcaucugugaug

SEQ ID NO: 320503 - RNA, 19 nt, Artificial Sequence
  Description of Artificial Sequence: Synthetic oligonucleotide
ugacugucucucaauagga

SEQ ID NO: 320504 - RNA, 19 nt, Artificial Sequence
  Description of Artificial Sequence: Synthetic oligonucleotide
aguccuacuucccauguca

SEQ ID NO: 320505 - RNA, 19 nt, Artificial Sequence
  Description of Artificial Sequence: Synthetic oligonucleotide
uucgaauugcaugucaacu

SEQ ID NO: 320506 - RNA, 19 nt, Artificial Sequence
  Description of Artificial Sequence: Synthetic oligonucleotide
uguaaguacuggcacccca

SEQ ID NO: 320507 - RNA, 19 nt, Artificial Sequence
  Description of Artificial Sequence: Synthetic oligonucleotide
auauaaaugauaggacaug

SEQ ID NO: 320508 - RNA, 19 nt, Artificial Sequence
  Description of Artificial Sequence: Synthetic oligonucleotide
aagcgaucauaucugucug

SEQ ID NO: 320509 - RNA, 19 nt, Artificial Sequence
  Description of Artificial Sequence: Synthetic oligonucleotide
uguggaaucaauguacuuu

SEQ ID NO: 320510 - RNA, 19 nt, Artificial Sequence
  Description of Artificial Sequence: Synthetic oligonucleotide
aaguaaucuccuuugcguu

SEQ ID NO: 320511 - RNA, 19 nt, Artificial Sequence
  Description of Artificial Sequence: Synthetic oligonucleotide
auaacacacacuugaggcu

SEQ ID NO: 320512 - RNA, 19 nt, Artificial Sequence
  Description of Artificial Sequence: Synthetic oligonucleotide
aaaucgguggcggugccuc

SEQ ID NO: 320513 - RNA, 19 nt, Artificial Sequence
  Description of Artificial Sequence: Synthetic oligonucleotide
auuugaacaccugcacacc

SEQ ID NO: 320514 - RNA, 19 nt, Artificial Sequence
  Description of Artificial Sequence: Synthetic oligonucleotide
uaccagagaaccaaacauc

SEQ ID NO: 320515 - RNA, 19 nt, Artificial Sequence
  Description of Artificial Sequence: Synthetic oligonucleotide
uuccuaagcacacacccaa

SEQ ID NO: 320516 - RNA, 19 nt, Artificial Sequence
  Description of Artificial Sequence: Synthetic oligonucleotide
gaccccuugaugcaaggag

SEQ ID NO: 320517 - RNA, 19 nt, Artificial Sequence
  Description of Artificial Sequence: Synthetic oligonucleotide
uaacaacaaggguacccgg

SEQ ID NO: 320518 - RNA, 19 nt, Artificial Sequence
  Description of Artificial Sequence: Synthetic oligonucleotide
aacaagcgaucauaucugu

SEQ ID NO: 320519 - RNA, 19 nt, Artificial Sequence
  Description of Artificial Sequence: Synthetic oligonucleotide
uaucaaggaaccuuucaua

SEQ ID NO: 320520 - RNA, 19 nt, Artificial Sequence
  Description of Artificial Sequence: Synthetic oligonucleotide
caacaagcgaucauaucug

SEQ ID NO: 320521 - RNA, 19 nt, Artificial Sequence
  Description of Artificial Sequence: Synthetic oligonucleotide
ugauguaccagagaaccaa

SEQ ID NO: 320522 - RNA, 19 nt, Artificial Sequence
  Description of Artificial Sequence: Synthetic oligonucleotide
aaugcucuagagcuuuaau

SEQ ID NO: 320523 - RNA, 19 nt, Artificial Sequence
  Description of Artificial Sequence: Synthetic oligonucleotide
caauaaagaauggaugauc

SEQ ID NO: 320524 - RNA, 19 nt, Artificial Sequence
  Description of Artificial Sequence: Synthetic oligonucleotide
aacaaggguacccgguaga

SEQ ID NO: 320525 - RNA, 19 nt, Artificial Sequence
  Description of Artificial Sequence: Synthetic oligonucleotide
aagaauggaugaucuucca

SEQ ID NO: 320526 - RNA, 19 nt, Artificial Sequence
  Description of Artificial Sequence: Synthetic oligonucleotide
acgagagggcuucagaacu

SEQ ID NO: 320527 - RNA, 19 nt, Artificial Sequence
  Description of Artificial Sequence: Synthetic oligonucleotide
uugcaugucaacugcaaua

SEQ ID NO: 320528 - RNA, 19 nt, Artificial Sequence
  Description of Artificial Sequence: Synthetic oligonucleotide
cuaggcuccaggucugugg

SEQ ID NO: 320529 - RNA, 19 nt, Artificial Sequence
  Description of Artificial Sequence: Synthetic oligonucleotide
uuucgaauugcaugucaac

SEQ ID NO: 320530 - RNA, 19 nt, Artificial Sequence
  Description of Artificial Sequence: Synthetic oligonucleotide
uugugguuaauagccaaug

SEQ ID NO: 320531 - RNA, 19 nt, Artificial Sequence
  Description of Artificial Sequence: Synthetic oligonucleotide
uaggacaugcaagugacaa

SEQ ID NO: 320532 - RNA, 19 nt, Artificial Sequence
  Description of Artificial Sequence: Synthetic oligonucleotide
auaacaccguucuggaaga

SEQ ID NO: 320533 - RNA, 19 nt, Artificial Sequence
  Description of Artificial Sequence: Synthetic oligonucleotide
cacuccaugagcacugcag

SEQ ID NO: 320534 - RNA, 19 nt, Artificial Sequence
  Description of Artificial Sequence: Synthetic oligonucleotide
aggguuauguucuggcaug

SEQ ID NO: 320535 - RNA, 19 nt, Artificial Sequence
  Description of Artificial Sequence: Synthetic oligonucleotide
gugaccaugcccauugcgg

SEQ ID NO: 320536 - RNA, 19 nt, Artificial Sequence
  Description of Artificial Sequence: Synthetic oligonucleotide
uuaauagccaaugcagaau

SEQ ID NO: 320537 - RNA, 19 nt, Artificial Sequence
  Description of Artificial Sequence: Synthetic oligonucleotide
caccaaauccuccuggaac

SEQ ID NO: 320538 - RNA, 19 nt, Artificial Sequence
  Description of Artificial Sequence: Synthetic oligonucleotide
cugagauuccagcaacacc

SEQ ID NO: 320539 - RNA, 19 nt, Artificial Sequence
  Description of Artificial Sequence: Synthetic oligonucleotide
cauggcagaacauugauau

SEQ ID NO: 320540 - RNA, 19 nt, Artificial Sequence
  Description of Artificial Sequence: Synthetic oligonucleotide
acuaguuuccaagauuccu

SEQ ID NO: 320541 - RNA, 19 nt, Artificial Sequence
  Description of Artificial Sequence: Synthetic oligonucleotide
uuugcguuccuuguuaaua

SEQ ID NO: 320542 - RNA, 19 nt, Artificial Sequence
  Description of Artificial Sequence: Synthetic oligonucleotide
cagugauuucagaaucggg

SEQ ID NO: 320543 - RNA, 19 nt, Artificial Sequence
  Description of Artificial Sequence: Synthetic oligonucleotide
cuugaugcaaggaguguuc

SEQ ID NO: 320544 - RNA, 19 nt, Artificial Sequence
  Description of Artificial Sequence: Synthetic oligonucleotide
uggugaggcggauaucaag

SEQ ID NO: 320545 - RNA, 19 nt, Artificial Sequence
  Description of Artificial Sequence: Synthetic oligonucleotide
acaggcacgugaccaugcc

SEQ ID NO: 320546 - RNA, 19 nt, Artificial Sequence
  Description of Artificial Sequence: Synthetic oligonucleotide
ggugaggcggauaucaagg

SEQ ID NO: 320547 - RNA, 19 nt, Artificial Sequence
  Description of Artificial Sequence: Synthetic oligonucleotide
ucgccuucaacaucuuggc

SEQ ID NO: 320548 - RNA, 19 nt, Artificial Sequence
  Description of Artificial Sequence: Synthetic oligonucleotide
agaugcauaggagucugag

SEQ ID NO: 320549 - RNA, 19 nt, Artificial Sequence
  Description of Artificial Sequence: Synthetic oligonucleotide
aggcggauaucaaggaacc

SEQ ID NO: 320550 - RNA, 19 nt, Artificial Sequence
  Description of Artificial Sequence: Synthetic oligonucleotide
ugugagggacaacuuggac

SEQ ID NO: 320551 - RNA, 19 nt, Artificial Sequence
  Description of Artificial Sequence: Synthetic oligonucleotide
uauuugcccacaagagcga

SEQ ID NO: 320552 - RNA, 19 nt, Artificial Sequence
  Description of Artificial Sequence: Synthetic oligonucleotide
uguuuccgagcccaggcaa

SEQ ID NO: 320553 - RNA, 19 nt, Artificial Sequence
  Description of Artificial Sequence: Synthetic oligonucleotide
ccuuucauaauuucccaag

SEQ ID NO: 320554 - RNA, 19 nt, Artificial Sequence
  Description of Artificial Sequence: Synthetic oligonucleotide
gaugcauaggagucugaga

SEQ ID NO: 320555 - RNA, 19 nt, Artificial Sequence
  Description of Artificial Sequence: Synthetic oligonucleotide
ucuuagggucaaauucugu

SEQ ID NO: 320556 - RNA, 19 nt, Artificial Sequence
  Description of Artificial Sequence: Synthetic oligonucleotide
uacacgagagggcuucaga

SEQ ID NO: 320557 - RNA, 19 nt, Artificial Sequence
  Description of Artificial Sequence: Synthetic oligonucleotide
cuguaaguagugugagagc

SEQ ID NO: 320558 - RNA, 19 nt, Artificial Sequence
  Description of Artificial Sequence: Synthetic oligonucleotide
cauccucucgccuucaaca

SEQ ID NO: 320559 - RNA, 19 nt, Artificial Sequence
  Description of Artificial Sequence: Synthetic oligonucleotide
aacaacaaggguacccggu

SEQ ID NO: 320560 - RNA, 19 nt, Artificial Sequence
  Description of Artificial Sequence: Synthetic oligonucleotide
aagagcgauagagcagguc

SEQ ID NO: 320561 - RNA, 19 nt, Artificial Sequence
  Description of Artificial Sequence: Synthetic oligonucleotide
ccaacuugugguuaauagc

SEQ ID NO: 320562 - RNA, 19 nt, Artificial Sequence
  Description of Artificial Sequence: Synthetic oligonucleotide
uuucgugacugucucucaa

SEQ ID NO: 320563 - RNA, 19 nt, Artificial Sequence
  Description of Artificial Sequence: Synthetic oligonucleotide
cuucaagccuugcucuucc

SEQ ID NO: 320564 - RNA, 19 nt, Artificial Sequence
  Description of Artificial Sequence: Synthetic oligonucleotide
ccaugucagaaacagaaac

SEQ ID NO: 320565 - RNA, 19 nt, Artificial Sequence
  Description of Artificial Sequence: Synthetic oligonucleotide
agaauggaugaucuuccaa

SEQ ID NO: 320566 - RNA, 19 nt, Artificial Sequence
  Description of Artificial Sequence: Synthetic oligonucleotide
agucuacaaccccuugcuc

SEQ ID NO: 320567 - RNA, 19 nt, Artificial Sequence
  Description of Artificial Sequence: Synthetic oligonucleotide
cacgugaccaugcccauug

SEQ ID NO: 320568 - RNA, 19 nt, Artificial Sequence
  Description of Artificial Sequence: Synthetic oligonucleotide
uuaucuccaacuugugguu

SEQ ID NO: 320569 - RNA, 19 nt, Artificial Sequence
  Description of Artificial Sequence: Synthetic oligonucleotide
auugcaugucaacugcaau

SEQ ID NO: 320570 - RNA, 19 nt, Artificial Sequence
  Description of Artificial Sequence: Synthetic oligonucleotide
guaaucuccuuugcguucc

SEQ ID NO: 320571 - RNA, 19 nt, Artificial Sequence
  Description of Artificial Sequence: Synthetic oligonucleotide
agugucaaaagcagagugu

SEQ ID NO: 320572 - RNA, 19 nt, Artificial Sequence
  Description of Artificial Sequence: Synthetic oligonucleotide
aaguagugugagagccucc

SEQ ID NO: 320573 - RNA, 19 nt, Artificial Sequence
  Description of Artificial Sequence: Synthetic oligonucleotide
caaguaaucuccuuugcgu

SEQ ID NO: 320574 - RNA, 19 nt, Artificial Sequence
  Description of Artificial Sequence: Synthetic oligonucleotide
agagccggcagccuuucug

SEQ ID NO: 320575 - RNA, 19 nt, Artificial Sequence
  Description of Artificial Sequence: Synthetic oligonucleotide
auaaaugauaggacaugca

SEQ ID NO: 320576 - RNA, 19 nt, Artificial Sequence
  Description of Artificial Sequence: Synthetic oligonucleotide
uugcaccccaauaaagaau

SEQ ID NO: 320577 - RNA, 19 nt, Artificial Sequence
  Description of Artificial Sequence: Synthetic oligonucleotide
guaaguacuggcaccccag

SEQ ID NO: 320578 - RNA, 19 nt, Artificial Sequence
  Description of Artificial Sequence: Synthetic oligonucleotide
guggaaucaauguacuuua

SEQ ID NO: 320579 - RNA, 19 nt, Artificial Sequence
  Description of Artificial Sequence: Synthetic oligonucleotide
ccaaguaaucuccuuugcg

SEQ ID NO: 320580 - RNA, 19 nt, Artificial Sequence
  Description of Artificial Sequence: Synthetic oligonucleotide
ugucucucaauaggaaggu

SEQ ID NO: 320581 - RNA, 19 nt, Artificial Sequence
  Description of Artificial Sequence: Synthetic oligonucleotide
uaagcucccgaacacuguu

SEQ ID NO: 320582 - RNA, 19 nt, Artificial Sequence
  Description of Artificial Sequence: Synthetic oligonucleotide
aacucggggugguauugca

SEQ ID NO: 320583 - RNA, 19 nt, Artificial Sequence
  Description of Artificial Sequence: Synthetic oligonucleotide
auguaccagagaaccaaac

SEQ ID NO: 320584 - RNA, 19 nt, Artificial Sequence
  Description of Artificial Sequence: Synthetic oligonucleotide
caacuuggacaguuuuccc

SEQ ID NO: 320585 - RNA, 19 nt, Artificial Sequence
  Description of Artificial Sequence: Synthetic oligonucleotide
ggcggggagggcuugauag

SEQ ID NO: 320586 - RNA, 19 nt, Artificial Sequence
  Description of Artificial Sequence: Synthetic oligonucleotide
caagcgaucauaucugucu

SEQ ID NO: 320587 - RNA, 19 nt, Artificial Sequence
  Description of Artificial Sequence: Synthetic oligonucleotide
gacucaaguggucggaaaa

SEQ ID NO: 320588 - RNA, 19 nt, Artificial Sequence
  Description of Artificial Sequence: Synthetic oligonucleotide
aggaaggucaagucuccga

SEQ ID NO: 320589 - RNA, 19 nt, Artificial Sequence
  Description of Artificial Sequence: Synthetic oligonucleotide
uuuucgugacugucucuca

SEQ ID NO: 320590 - RNA, 19 nt, Artificial Sequence
  Description of Artificial Sequence: Synthetic oligonucleotide
uuuccccaaguaaucuccu

SEQ ID NO: 320591 - RNA, 19 nt, Artificial Sequence
  Description of Artificial Sequence: Synthetic oligonucleotide
cucaaaucgguggcggugc

SEQ ID NO: 320592 - RNA, 19 nt, Artificial Sequence
  Description of Artificial Sequence: Synthetic oligonucleotide
auuaaguuaugagcauaca

SEQ ID NO: 320593 - RNA, 19 nt, Artificial Sequence
  Description of Artificial Sequence: Synthetic oligonucleotide
ucaagacuggauucaccuc

SEQ ID NO: 320594 - RNA, 19 nt, Artificial Sequence
  Description of Artificial Sequence: Synthetic oligonucleotide
uugcggugucacauuaaga

SEQ ID NO: 320595 - RNA, 19 nt, Artificial Sequence
  Description of Artificial Sequence: Synthetic oligonucleotide
uucucacaaacagguaugu

SEQ ID NO: 320596 - RNA, 19 nt, Artificial Sequence
  Description of Artificial Sequence: Synthetic oligonucleotide
augugacacuucauagagc

SEQ ID NO: 320597 - RNA, 19 nt, Artificial Sequence
  Description of Artificial Sequence: Synthetic oligonucleotide
acuaucaggucaaaggcuu

SEQ ID NO: 320598 - RNA, 19 nt, Artificial Sequence
  Description of Artificial Sequence: Synthetic oligonucleotide
ucaccucaaaucgguggcg

SEQ ID NO: 320599 - RNA, 19 nt, Artificial Sequence
  Description of Artificial Sequence: Synthetic oligonucleotide
gaccuugaacuggaacugg

SEQ ID NO: 320600 - RNA, 19 nt, Artificial Sequence
  Description of Artificial Sequence: Synthetic oligonucleotide
ggucagauuauuguccuug

SEQ ID NO: 320601 - RNA, 19 nt, Artificial Sequence
  Description of Artificial Sequence: Synthetic oligonucleotide
gucuccgaagaaaauaguc

SEQ ID NO: 320602 - RNA, 19 nt, Artificial Sequence
  Description of Artificial Sequence: Synthetic oligonucleotide
cuugaccccuugaugcaag

SEQ ID NO: 320603 - RNA, 19 nt, Artificial Sequence
  Description of Artificial Sequence: Synthetic oligonucleotide
gcucuucuaacaacaaggg

SEQ ID NO: 320604 - RNA, 19 nt, Artificial Sequence
  Description of Artificial Sequence: Synthetic oligonucleotide
agaguccuacuucccaugu

SEQ ID NO: 320605 - RNA, 19 nt, Artificial Sequence
  Description of Artificial Sequence: Synthetic oligonucleotide
cagcaucacacuuggauga

SEQ ID NO: 320606 - RNA, 19 nt, Artificial Sequence
  Description of Artificial Sequence: Synthetic oligonucleotide
ucucaauaggaaggucaag

SEQ ID NO: 320607 - RNA, 19 nt, Artificial Sequence
  Description of Artificial Sequence: Synthetic oligonucleotide
ggaaucaauguacuuuauc

SEQ ID NO: 320608 - RNA, 19 nt, Artificial Sequence
  Description of Artificial Sequence: Synthetic oligonucleotide
cagugacucaaguggucgg

SEQ ID NO: 320609 - RNA, 19 nt, Artificial Sequence
  Description of Artificial Sequence: Synthetic oligonucleotide
ugucccugggugagagccg

SEQ ID NO: 320610 - RNA, 19 nt, Artificial Sequence
  Description of Artificial Sequence: Synthetic oligonucleotide
cacgagagggcuucagaac

SEQ ID NO: 320611 - RNA, 19 nt, Artificial Sequence
  Description of Artificial Sequence: Synthetic oligonucleotide
aaauagucuacaaccccuu

SEQ ID NO: 320612 - RNA, 19 nt, Artificial Sequence
  Description of Artificial Sequence: Synthetic oligonucleotide
aagcucaauaacacacacu

SEQ ID NO: 320613 - RNA, 19 nt, Artificial Sequence
  Description of Artificial Sequence: Synthetic oligonucleotide
aacgcacaggcuccuccug

SEQ ID NO: 320614 - RNA, 19 nt, Artificial Sequence
  Description of Artificial Sequence: Synthetic oligonucleotide
caacaaggguacccgguag

SEQ ID NO: 320615 - RNA, 19 nt, Artificial Sequence
  Description of Artificial Sequence: Synthetic oligonucleotide
cuccgaagaaaauagucua

SEQ ID NO: 320616 - RNA, 19 nt, Artificial Sequence
  Description of Artificial Sequence: Synthetic oligonucleotide
augcccauugcggugucac

SEQ ID NO: 320617 - RNA, 19 nt, Artificial Sequence
  Description of Artificial Sequence: Synthetic oligonucleotide
acaacaaggguacccggua

SEQ ID NO: 320618 - RNA, 19 nt, Artificial Sequence
  Description of Artificial Sequence: Synthetic oligonucleotide
accccaauaaagaauggau

SEQ ID NO: 320619 - RNA, 19 nt, Artificial Sequence
  Description of Artificial Sequence: Synthetic oligonucleotide
agcugcauuccuaagcaca

SEQ ID NO: 320620 - RNA, 19 nt, Artificial Sequence
  Description of Artificial Sequence: Synthetic oligonucleotide
acaagcgaucauaucuguc

SEQ ID NO: 320621 - RNA, 19 nt, Artificial Sequence
  Description of Artificial Sequence: Synthetic oligonucleotide
ucaaaucgguggcggugcc

SEQ ID NO: 320622 - RNA, 19 nt, Artificial Sequence
  Description of Artificial Sequence: Synthetic oligonucleotide
ggccaacaaacuucaagcc

SEQ ID NO: 320623 - RNA, 19 nt, Artificial Sequence
  Description of Artificial Sequence: Synthetic oligonucleotide
uccuacuucccaugucaga

SEQ ID NO: 320624 - RNA, 19 nt, Artificial Sequence
  Description of Artificial Sequence: Synthetic oligonucleotide
cuacagguauuaaggccug

SEQ ID NO: 320625 - RNA, 19 nt, Artificial Sequence
  Description of Artificial Sequence: Synthetic oligonucleotide
ugcguuccuuguuaauaac

SEQ ID NO: 320626 - RNA, 19 nt, Artificial Sequence
  Description of Artificial Sequence: Synthetic oligonucleotide
gauucaccucaaaucggug

SEQ ID NO: 320627 - RNA, 19 nt, Artificial Sequence
  Description of Artificial Sequence: Synthetic oligonucleotide
cacacuuggaugacaguga

SEQ ID NO: 320628 - RNA, 19 nt, Artificial Sequence
  Description of Artificial Sequence: Synthetic oligonucleotide
guacccgguagauggauga

SEQ ID NO: 320629 - RNA, 19 nt, Artificial Sequence
  Description of Artificial Sequence: Synthetic oligonucleotide
augacuagucuuaggguca

SEQ ID NO: 320630 - RNA, 19 nt, Artificial Sequence
  Description of Artificial Sequence: Synthetic oligonucleotide
ugccaccaagcucaauaac

SEQ ID NO: 320631 - RNA, 19 nt, Artificial Sequence
  Description of Artificial Sequence: Synthetic oligonucleotide
cugggugagagccggcagc

SEQ ID NO: 320632 - RNA, 19 nt, Artificial Sequence
  Description of Artificial Sequence: Synthetic oligonucleotide
augauaggacaugcaagug

SEQ ID NO: 320633 - RNA, 19 nt, Artificial Sequence
  Description of Artificial Sequence: Synthetic oligonucleotide
agcaucacacuuggaugac

SEQ ID NO: 320634 - RNA, 19 nt, Artificial Sequence
  Description of Artificial Sequence: Synthetic oligonucleotide
uggaaucaauguacuuuau

SEQ ID NO: 320635 - RNA, 19 nt, Artificial Sequence
  Description of Artificial Sequence: Synthetic oligonucleotide
uacaaccccuugcucuucu

SEQ ID NO: 320636 - RNA, 19 nt, Artificial Sequence
  Description of Artificial Sequence: Synthetic oligonucleotide
cucaauaggaaggucaagu

SEQ ID NO: 320637 - RNA, 19 nt, Artificial Sequence
  Description of Artificial Sequence: Synthetic oligonucleotide
gaccaugcccauugcggug

SEQ ID NO: 320638 - RNA, 19 nt, Artificial Sequence
  Description of Artificial Sequence: Synthetic oligonucleotide
gaacacuguucuggguagg

SEQ ID NO: 320639 - RNA, 19 nt, Artificial Sequence
  Description of Artificial Sequence: Synthetic oligonucleotide
aaggaaccuuucauaauuu

SEQ ID NO: 320640 - RNA, 19 nt, Artificial Sequence
  Description of Artificial Sequence: Synthetic oligonucleotide
agaguuccccacaacucag

SEQ ID NO: 320641 - RNA, 19 nt, Artificial Sequence
  Description of Artificial Sequence: Synthetic oligonucleotide
ugcuagcugcauuccuaag

SEQ ID NO: 320642 - RNA, 19 nt, Artificial Sequence
  Description of Artificial Sequence: Synthetic oligonucleotide
guaggugucccugggugag

SEQ ID NO: 320643 - RNA, 19 nt, Artificial Sequence
  Description of Artificial Sequence: Synthetic oligonucleotide
cucucaauaggaaggucaa

SEQ ID NO: 320644 - RNA, 19 nt, Artificial Sequence
  Description of Artificial Sequence: Synthetic oligonucleotide
aagcagaguguaaaaucau

SEQ ID NO: 320645 - RNA, 19 nt, Artificial Sequence
  Description of Artificial Sequence: Synthetic oligonucleotide
acaccguucuggaagaaaa

SEQ ID NO: 320646 - RNA, 19 nt, Artificial Sequence
  Description of Artificial Sequence: Synthetic oligonucleotide
gguuaauagccaaugcaga

SEQ ID NO: 320647 - RNA, 19 nt, Artificial Sequence
  Description of Artificial Sequence: Synthetic oligonucleotide
agguaugucacaggaucca

SEQ ID NO: 320648 - RNA, 19 nt, Artificial Sequence
  Description of Artificial Sequence: Synthetic oligonucleotide
ccaacaagcgaucauaucu

SEQ ID NO: 320649 - RNA, 19 nt, Artificial Sequence
  Description of Artificial Sequence: Synthetic oligonucleotide
augccucaugguaacgcac

SEQ ID NO: 320650 - RNA, 19 nt, Artificial Sequence
  Description of Artificial Sequence: Synthetic oligonucleotide
caccucaaaucgguggcgg

SEQ ID NO: 320651 - RNA, 19 nt, Artificial Sequence
  Description of Artificial Sequence: Synthetic oligonucleotide
ggcuugauaggccuugaca

SEQ ID NO: 320652 - RNA, 19 nt, Artificial Sequence
  Description of Artificial Sequence: Synthetic oligonucleotide
aggacaugcaagugacaaa

SEQ ID NO: 320653 - RNA, 19 nt, Artificial Sequence
  Description of Artificial Sequence: Synthetic oligonucleotide
caugccucaugguaacgca

SEQ ID NO: 320654 - RNA, 19 nt, Artificial Sequence
  Description of Artificial Sequence: Synthetic oligonucleotide
guauaucuucccugugguc

SEQ ID NO: 320655 - RNA, 19 nt, Artificial Sequence
  Description of Artificial Sequence: Synthetic oligonucleotide
acgugaccaugcccauugc

SEQ ID NO: 320656 - RNA, 19 nt, Artificial Sequence
  Description of Artificial Sequence: Synthetic oligonucleotide
ggugcuaggcuccaggucu

SEQ ID NO: 320657 - RNA, 19 nt, Artificial Sequence
  Description of Artificial Sequence: Synthetic oligonucleotide
ccucuagauggccagggcc

SEQ ID NO: 320658 - RNA, 19 nt, Artificial Sequence
  Description of Artificial Sequence: Synthetic oligonucleotide
agugacucaaguggucgga

SEQ ID NO: 320659 - RNA, 19 nt, Artificial Sequence
  Description of Artificial Sequence: Synthetic oligonucleotide
auuccuaagcacacaccca

SEQ ID NO: 320660 - RNA, 19 nt, Artificial Sequence
  Description of Artificial Sequence: Synthetic oligonucleotide
uuugcccacaagagcgaua

SEQ ID NO: 320661 - RNA, 19 nt, Artificial Sequence
  Description of Artificial Sequence: Synthetic oligonucleotide
ggauccaauauaaaugaua

SEQ ID NO: 320662 - RNA, 19 nt, Artificial Sequence
  Description of Artificial Sequence: Synthetic oligonucleotide
auccucucgccuucaacau

SEQ ID NO: 320663 - RNA, 19 nt, Artificial Sequence
  Description of Artificial Sequence: Synthetic oligonucleotide
ggaaggucaagucuccgaa

SEQ ID NO: 320664 - RNA, 19 nt, Artificial Sequence
  Description of Artificial Sequence: Synthetic oligonucleotide
cagaguguaaaaucauagu

SEQ ID NO: 320665 - RNA, 19 nt, Artificial Sequence
  Description of Artificial Sequence: Synthetic oligonucleotide
aggccuugacaggaacucg

SEQ ID NO: 320666 - RNA, 19 nt, Artificial Sequence
  Description of Artificial Sequence: Synthetic oligonucleotide
auaggccuugacaggaacu

SEQ ID NO: 320667 - RNA, 19 nt, Artificial Sequence
  Description of Artificial Sequence: Synthetic oligonucleotide
caggcacgugaccaugccc

SEQ ID NO: 320668 - RNA, 19 nt, Artificial Sequence
  Description of Artificial Sequence: Synthetic oligonucleotide
ggccuugacaggaacucgg

SEQ ID NO: 320669 - RNA, 19 nt, Artificial Sequence
  Description of Artificial Sequence: Synthetic oligonucleotide
gguauaucuucccuguggu

SEQ ID NO: 320670 - RNA, 19 nt, Artificial Sequence
  Description of Artificial Sequence: Synthetic oligonucleotide
cuuggauugcaucugugau

SEQ ID NO: 320671 - RNA, 19 nt, Artificial Sequence
  Description of Artificial Sequence: Synthetic oligonucleotide
aguuagcagcccaggacug

SEQ ID NO: 320672 - RNA, 19 nt, Artificial Sequence
  Description of Artificial Sequence: Synthetic oligonucleotide
agccuuucuguaaguagug

SEQ ID NO: 320673 - RNA, 19 nt, Artificial Sequence
  Description of Artificial Sequence: Synthetic oligonucleotide
gauguaccagagaaccaaa

SEQ ID NO: 320674 - RNA, 19 nt, Artificial Sequence
  Description of Artificial Sequence: Synthetic oligonucleotide
cccgguagauggaugaaac

SEQ ID NO: 320675 - RNA, 19 nt, Artificial Sequence
  Description of Artificial Sequence: Synthetic oligonucleotide
gcgaucauaucugucugcc

SEQ ID NO: 320676 - RNA, 19 nt, Artificial Sequence
  Description of Artificial Sequence: Synthetic oligonucleotide
caguuagcagcccaggacu

SEQ ID NO: 320677 - RNA, 19 nt, Artificial Sequence
  Description of Artificial Sequence: Synthetic oligonucleotide
gugaggcggauaucaagga

SEQ ID NO: 320678 - RNA, 19 nt, Artificial Sequence
  Description of Artificial Sequence: Synthetic oligonucleotide
aagacuggauucaccucaa

SEQ ID NO: 320679 - RNA, 19 nt, Artificial Sequence
  Description of Artificial Sequence: Synthetic oligonucleotide
gugguauugcaccccaaua

SEQ ID NO: 320680 - RNA, 19 nt, Artificial Sequence
  Description of Artificial Sequence: Synthetic oligonucleotide
agcagaguguaaaaucaua

SEQ ID NO: 320681 - RNA, 19 nt, Artificial Sequence
  Description of Artificial Sequence: Synthetic oligonucleotide
accccuugaugcaaggagu

SEQ ID NO: 320682 - RNA, 19 nt, Artificial Sequence
  Description of Artificial Sequence: Synthetic oligonucleotide
gccaaaguagggcggggag

SEQ ID NO: 320683 - RNA, 19 nt, Artificial Sequence
  Description of Artificial Sequence: Synthetic oligonucleotide
gaguccuacuucccauguc

SEQ ID NO: 320684 - RNA, 19 nt, Artificial Sequence
  Description of Artificial Sequence: Synthetic oligonucleotide
accucaaaucgguggcggu

SEQ ID NO: 320685 - RNA, 19 nt, Artificial Sequence
  Description of Artificial Sequence: Synthetic oligonucleotide
gucccugggugagagccgg

SEQ ID NO: 320686 - RNA, 19 nt, Artificial Sequence
  Description of Artificial Sequence: Synthetic oligonucleotide
ugcauacacgagagggcuu

SEQ ID NO: 320687 - RNA, 19 nt, Artificial Sequence
  Description of Artificial Sequence: Synthetic oligonucleotide
cacaguuagcagcccagga

SEQ ID NO: 320688 - RNA, 19 nt, Artificial Sequence
  Description of Artificial Sequence: Synthetic oligonucleotide
ugacuagucuuagggucaa

SEQ ID NO: 320689 - RNA, 19 nt, Artificial Sequence
  Description of Artificial Sequence: Synthetic oligonucleotide
gacugucucucaauaggaa

SEQ ID NO: 320690 - RNA, 19 nt, Artificial Sequence
  Description of Artificial Sequence: Synthetic oligonucleotide
uaaucuccuuugcguuccu

SEQ ID NO: 320691 - RNA, 19 nt, Artificial Sequence
  Description of Artificial Sequence: Synthetic oligonucleotide
auagagcuugucugaugua

SEQ ID NO: 320692 - RNA, 19 nt, Artificial Sequence
  Description of Artificial Sequence: Synthetic oligonucleotide
acaaggguacccgguagau

SEQ ID NO: 320693 - RNA, 19 nt, Artificial Sequence
  Description of Artificial Sequence: Synthetic oligonucleotide
ccaagucaaggucaacuuc

SEQ ID NO: 320694 - RNA, 19 nt, Artificial Sequence
  Description of Artificial Sequence: Synthetic oligonucleotide
gagauuccagcaacaccca

SEQ ID NO: 320695 - RNA, 19 nt, Artificial Sequence
  Description of Artificial Sequence: Synthetic oligonucleotide
ccccaaguaaucuccuuug

SEQ ID NO: 320696 - RNA, 19 nt, Artificial Sequence
  Description of Artificial Sequence: Synthetic oligonucleotide
gacagaugcauaggagucu

SEQ ID NO: 320697 - RNA, 19 nt, Artificial Sequence
  Description of Artificial Sequence: Synthetic oligonucleotide
gugccaccaagcucaauaa

SEQ ID NO: 320698 - RNA, 19 nt, Artificial Sequence
  Description of Artificial Sequence: Synthetic oligonucleotide
cuuggaugacagugacuca

SEQ ID NO: 320699 - RNA, 19 nt, Artificial Sequence
  Description of Artificial Sequence: Synthetic oligonucleotide
cccaaguaaucuccuuugc

SEQ ID NO: 320700 - RNA, 19 nt, Artificial Sequence
  Description of Artificial Sequence: Synthetic oligonucleotide
gcugcauuccuaagcacac

SEQ ID NO: 320701 - RNA, 19 nt, Artificial Sequence
  Description of Artificial Sequence: Synthetic oligonucleotide
auggcagaacauugauauu

SEQ ID NO: 320702 - RNA, 19 nt, Artificial Sequence
  Description of Artificial Sequence: Synthetic oligonucleotide
cuguaaguacuggcacccc

SEQ ID NO: 320703 - RNA, 19 nt, Artificial Sequence
  Description of Artificial Sequence: Synthetic oligonucleotide
agaucaguccugauuuauu

SEQ ID NO: 320704 - RNA, 19 nt, Artificial Sequence
  Description of Artificial Sequence: Synthetic oligonucleotide
ugcccauugcggugucaca

SEQ ID NO: 320705 - RNA, 19 nt, Artificial Sequence
  Description of Artificial Sequence: Synthetic oligonucleotide
gguaguugaugaccuucca

SEQ ID NO: 320706 - RNA, 19 nt, Artificial Sequence
  Description of Artificial Sequence: Synthetic oligonucleotide
ucgguggcggugccucucu

SEQ ID NO: 320707 - RNA, 19 nt, Artificial Sequence
  Description of Artificial Sequence: Synthetic oligonucleotide
cagguauuaaggccugucu

SEQ ID NO: 320708 - RNA, 19 nt, Artificial Sequence
  Description of Artificial Sequence: Synthetic oligonucleotide
auuugcccacaagagcgau

SEQ ID NO: 320709 - RNA, 19 nt, Artificial Sequence
  Description of Artificial Sequence: Synthetic oligonucleotide
cuggcaugucuaugaccac

SEQ ID NO: 320710 - RNA, 19 nt, Artificial Sequence
  Description of Artificial Sequence: Synthetic oligonucleotide
uacagguauuaaggccugu

SEQ ID NO: 320711 - RNA, 19 nt, Artificial Sequence
  Description of Artificial Sequence: Synthetic oligonucleotide
uacuggcaccccagggaaa

SEQ ID NO: 320712 - RNA, 19 nt, Artificial Sequence
  Description of Artificial Sequence: Synthetic oligonucleotide
cuacuucccaugucagaaa

SEQ ID NO: 320713 - RNA, 19 nt, Artificial Sequence
  Description of Artificial Sequence: Synthetic oligonucleotide
uucucaugacugaguucuu

SEQ ID NO: 320714 - RNA, 19 nt, Artificial Sequence
  Description of Artificial Sequence: Synthetic oligonucleotide
cuguuuccgagcccaggca

SEQ ID NO: 320715 - RNA, 19 nt, Artificial Sequence
  Description of Artificial Sequence: Synthetic oligonucleotide
gccucaugguaacgcacag

SEQ ID NO: 320716 - RNA, 19 nt, Artificial Sequence
  Description of Artificial Sequence: Synthetic oligonucleotide
uggucagauuauuguccuu

SEQ ID NO: 320717 - RNA, 19 nt, Artificial Sequence
  Description of Artificial Sequence: Synthetic oligonucleotide
cacaacucagcagcacuga

SEQ ID NO: 320718 - RNA, 19 nt, Artificial Sequence
  Description of Artificial Sequence: Synthetic oligonucleotide
caggguuauguucuggcau

SEQ ID NO: 320719 - RNA, 19 nt, Artificial Sequence
  Description of Artificial Sequence: Synthetic oligonucleotide
ccuacuucccaugucagaa

SEQ ID NO: 320720 - RNA, 19 nt, Artificial Sequence
  Description of Artificial Sequence: Synthetic oligonucleotide
cugcauacacgagagggcu

SEQ ID NO: 320721 - RNA, 19 nt, Artificial Sequence
  Description of Artificial Sequence: Synthetic oligonucleotide
acccgguagauggaugaaa

SEQ ID NO: 320722 - RNA, 19 nt, Artificial Sequence
  Description of Artificial Sequence: Synthetic oligonucleotide
cauugcggugucacauuaa

SEQ ID NO: 320723 - RNA, 19 nt, Artificial Sequence
  Description of Artificial Sequence: Synthetic oligonucleotide
gcguuccuuguuaauaaca

SEQ ID NO: 320724 - RNA, 19 nt, Artificial Sequence
  Description of Artificial Sequence: Synthetic oligonucleotide
ggauucaccucaaaucggu

SEQ ID NO: 320725 - RNA, 19 nt, Artificial Sequence
  Description of Artificial Sequence: Synthetic oligonucleotide
gucucucaauaggaagguc

SEQ ID NO: 320726 - RNA, 19 nt, Artificial Sequence
  Description of Artificial Sequence: Synthetic oligonucleotide
gcggugucacauuaagaaa

SEQ ID NO: 320727 - RNA, 19 nt, Artificial Sequence
  Description of Artificial Sequence: Synthetic oligonucleotide
gguacccgguagauggaug

SEQ ID NO: 320728 - RNA, 19 nt, Artificial Sequence
  Description of Artificial Sequence: Synthetic oligonucleotide
uacccgguagauggaugaa

SEQ ID NO: 320729 - RNA, 19 nt, Artificial Sequence
  Description of Artificial Sequence: Synthetic oligonucleotide
ggauaucaaggaaccuuuc

SEQ ID NO: 320730 - RNA, 19 nt, Artificial Sequence
  Description of Artificial Sequence: Synthetic oligonucleotide
ugagagccggcagccuuuc

SEQ ID NO: 320731 - RNA, 19 nt, Artificial Sequence
  Description of Artificial Sequence: Synthetic oligonucleotide
caccaagaguuccccacaa

SEQ ID NO: 320732 - RNA, 19 nt, Artificial Sequence
  Description of Artificial Sequence: Synthetic oligonucleotide
uaacaccguucuggaagaa

SEQ ID NO: 320733 - RNA, 19 nt, Artificial Sequence
  Description of Artificial Sequence: Synthetic oligonucleotide
ccucaaaucgguggcggug

SEQ ID NO: 320734 - RNA, 19 nt, Artificial Sequence
  Description of Artificial Sequence: Synthetic oligonucleotide
gcaccaagaguuccccaca

SEQ ID NO: 320735 - RNA, 19 nt, Artificial Sequence
  Description of Artificial Sequence: Synthetic oligonucleotide
gcucauaaggagagaaugu

SEQ ID NO: 320736 - RNA, 19 nt, Artificial Sequence
  Description of Artificial Sequence: Synthetic oligonucleotide
ccgaacacuguucugggua

SEQ ID NO: 320737 - RNA, 19 nt, Artificial Sequence
  Description of Artificial Sequence: Synthetic oligonucleotide
gugacucaaguggucggaa

SEQ ID NO: 320738 - RNA, 19 nt, Artificial Sequence
  Description of Artificial Sequence: Synthetic oligonucleotide
gguaugucacaggauccaa

SEQ ID NO: 320739 - RNA, 19 nt, Artificial Sequence
  Description of Artificial Sequence: Synthetic oligonucleotide
gugcuaggcuccaggucug

SEQ ID NO: 320740 - RNA, 19 nt, Artificial Sequence
  Description of Artificial Sequence: Synthetic oligonucleotide
ucccuguggucagauuauu

SEQ ID NO: 320741 - RNA, 19 nt, Artificial Sequence
  Description of Artificial Sequence: Synthetic oligonucleotide
acaaccccuugcucuucua

SEQ ID NO: 320742 - RNA, 19 nt, Artificial Sequence
  Description of Artificial Sequence: Synthetic oligonucleotide
cuacaaccccuugcucuuc

SEQ ID NO: 320743 - RNA, 19 nt, Artificial Sequence
  Description of Artificial Sequence: Synthetic oligonucleotide
ugcuaggcuccaggucugu

SEQ ID NO: 320744 - RNA, 19 nt, Artificial Sequence
  Description of Artificial Sequence: Synthetic oligonucleotide
cagaaugcucuagagcuuu

SEQ ID NO: 320745 - RNA, 19 nt, Artificial Sequence
  Description of Artificial Sequence: Synthetic oligonucleotide
cuuugcguuccuuguuaau

SEQ ID NO: 320746 - RNA, 19 nt, Artificial Sequence
  Description of Artificial Sequence: Synthetic oligonucleotide
ccgguagauggaugaaaca

SEQ ID NO: 320747 - RNA, 19 nt, Artificial Sequence
  Description of Artificial Sequence: Synthetic oligonucleotide
agaaugcucuagagcuuua

SEQ ID NO: 320748 - RNA, 19 nt, Artificial Sequence
  Description of Artificial Sequence: Synthetic oligonucleotide
caucugcccaggguuaugu

SEQ ID NO: 320749 - RNA, 19 nt, Artificial Sequence
  Description of Artificial Sequence: Synthetic oligonucleotide
aacuggcggaaggccucaa

SEQ ID NO: 320750 - RNA, 19 nt, Artificial Sequence
  Description of Artificial Sequence: Synthetic oligonucleotide
gcggauaucaaggaaccuu

SEQ ID NO: 320751 - RNA, 19 nt, Artificial Sequence
  Description of Artificial Sequence: Synthetic oligonucleotide
cacugcuagcugcauuccu

SEQ ID NO: 320752 - RNA, 19 nt, Artificial Sequence
  Description of Artificial Sequence: Synthetic oligonucleotide
guagggcggggagggcuug

SEQ ID NO: 320753 - RNA, 19 nt, Artificial Sequence
  Description of Artificial Sequence: Synthetic oligonucleotide
gcaucacacuuggaugaca

SEQ ID NO: 320754 - RNA, 19 nt, Artificial Sequence
  Description of Artificial Sequence: Synthetic oligonucleotide
gcggugccucucuuccaag

SEQ ID NO: 320755 - RNA, 19 nt, Artificial Sequence
  Description of Artificial Sequence: Synthetic oligonucleotide
cuaugaccacaggaugacu

SEQ ID NO: 320756 - RNA, 19 nt, Artificial Sequence
  Description of Artificial Sequence: Synthetic oligonucleotide
ggugagagccggcagccuu

SEQ ID NO: 320757 - RNA, 19 nt, Artificial Sequence
  Description of Artificial Sequence: Synthetic oligonucleotide
gcuaggcuccaggucugug

SEQ ID NO: 320758 - RNA, 19 nt, Artificial Sequence
  Description of Artificial Sequence: Synthetic oligonucleotide
ccuuugcguuccuuguuaa

SEQ ID NO: 320759 - RNA, 19 nt, Artificial Sequence
  Description of Artificial Sequence: Synthetic oligonucleotide
cacccacucuuggauugca

SEQ ID NO: 320760 - RNA, 19 nt, Artificial Sequence
  Description of Artificial Sequence: Synthetic oligonucleotide
gugaugugagggacaacuu

SEQ ID NO: 320761 - RNA, 19 nt, Artificial Sequence
  Description of Artificial Sequence: Synthetic oligonucleotide
gguaacgcacaggcuccuc

SEQ ID NO: 320762 - RNA, 19 nt, Artificial Sequence
  Description of Artificial Sequence: Synthetic oligonucleotide
cagauguguccagaggauu

SEQ ID NO: 320763 - RNA, 19 nt, Artificial Sequence
  Description of Artificial Sequence: Synthetic oligonucleotide
ccauugcggugucacauua

SEQ ID NO: 320764 - RNA, 19 nt, Artificial Sequence
  Description of Artificial Sequence: Synthetic oligonucleotide
cuugccaucccagcacauu

SEQ ID NO: 320765 - RNA, 19 nt, Artificial Sequence
  Description of Artificial Sequence: Synthetic oligonucleotide
gcgauagagcaggucucca

SEQ ID NO: 320766 - RNA, 19 nt, Artificial Sequence
  Description of Artificial Sequence: Synthetic oligonucleotide
caugcccauugcgguguca

SEQ ID NO: 320767 - RNA, 19 nt, Artificial Sequence
  Description of Artificial Sequence: Synthetic oligonucleotide
cgguagauggaugaaacau

SEQ ID NO: 320768 - RNA, 19 nt, Artificial Sequence
  Description of Artificial Sequence: Synthetic oligonucleotide
ggguuauguucuggcaugu

SEQ ID NO: 320769 - RNA, 19 nt, Artificial Sequence
  Description of Artificial Sequence: Synthetic oligonucleotide
cccaagucaaggucaacuu

SEQ ID NO: 320770 - RNA, 19 nt, Artificial Sequence
  Description of Artificial Sequence: Synthetic oligonucleotide
cggauaucaaggaaccuuu

SEQ ID NO: 320771 - RNA, 19 nt, Artificial Sequence
  Description of Artificial Sequence: Synthetic oligonucleotide
caaaucgguggcggugccu

SEQ ID NO: 320772 - RNA, 19 nt, Artificial Sequence
  Description of Artificial Sequence: Synthetic oligonucleotide
gccucaugguuccacccau

SEQ ID NO: 320773 - RNA, 19 nt, Artificial Sequence
  Description of Artificial Sequence: Synthetic oligonucleotide
gcccauugcggugucacau

SEQ ID NO: 320774 - RNA, 19 nt, Artificial Sequence
  Description of Artificial Sequence: Synthetic oligonucleotide
ccuugaugcaaggaguguu

SEQ ID NO: 320775 - RNA, 19 nt, Artificial Sequence
  Description of Artificial Sequence: Synthetic oligonucleotide
gugagagccggcagccuuu

SEQ ID NO: 320776 - RNA, 19 nt, Artificial Sequence
  Description of Artificial Sequence: Synthetic oligonucleotide
ccaucugcccaggguuaug

SEQ ID NO: 320777 - RNA, 19 nt, Artificial Sequence
  Description of Artificial Sequence: Synthetic oligonucleotide
ggcggauaucaaggaaccu

SEQ ID NO: 320778 - RNA, 19 nt, Artificial Sequence
  Description of Artificial Sequence: Synthetic oligonucleotide
gugacacuucauagagcuu

SEQ ID NO: 320779 - RNA, 19 nt, Artificial Sequence
  Description of Artificial Sequence: Synthetic oligonucleotide
gcagaaugcucuagagcuu

SEQ ID NO: 320780 - RNA, 19 nt, Artificial Sequence
  Description of Artificial Sequence: Synthetic oligonucleotide
ggcacgugaccaugcccau

SEQ ID NO: 320781 - RNA, 19 nt, Artificial Sequence
  Description of Artificial Sequence: Synthetic oligonucleotide
ccgagcccaggcaauugcu

SEQ ID NO: 320782 - RNA, 19 nt, Artificial Sequence
  Description of Artificial Sequence: Synthetic oligonucleotide
ggguacccgguagauggau

SEQ ID NO: 320783 - RNA, 19 nt, Artificial Sequence
  Description of Artificial Sequence: Synthetic oligonucleotide
cccauugcggugucacauu

SEQ ID NO: 320784 - RNA, 19 nt, Artificial Sequence
  Description of Artificial Sequence: Synthetic oligonucleotide
cccuugaugcaaggagugu

SEQ ID NO: 320785 - RNA, 19 nt, Artificial Sequence
  Description of Artificial Sequence: Synthetic oligonucleotide
cccaggcaauugcuugaau

SEQ ID NO: 320786 - RNA, 19 nt, Artificial Sequence
  Description of Artificial Sequence: Synthetic oligonucleotide
gcacgugaccaugcccauu

SEQ ID NO: 320787 - RNA, 19 nt, Artificial Sequence
  Description of Artificial Sequence: Synthetic oligonucleotide
cgguggcggugccucucuu

SEQ ID NO: 320788 - RNA, 19 nt, Artificial Sequence
  Description of Artificial Sequence: Synthetic oligonucleotide
aaacgaaugacuuaaacac

SEQ ID NO: 320789 - RNA, 19 nt, Artificial Sequence
  Description of Artificial Sequence: Synthetic oligonucleotide
ucuacauuggcccagcugg

SEQ ID NO: 320790 - RNA, 19 nt, Artificial Sequence
  Description of Artificial Sequence: Synthetic oligonucleotide
auaagaacacaccaaagcg

SEQ ID NO: 320791 - RNA, 19 nt, Artificial Sequence
  Description of Artificial Sequence: Synthetic oligonucleotide
aacacuacaaacauugaac

SEQ ID NO: 320792 - RNA, 19 nt, Artificial Sequence
  Description of Artificial Sequence: Synthetic oligonucleotide
uguauaagagcaagguacg

SEQ ID NO: 320793 - RNA, 19 nt, Artificial Sequence
  Description of Artificial Sequence: Synthetic oligonucleotide
aaaugcguuaucuuguagu

SEQ ID NO: 320794 - RNA, 19 nt, Artificial Sequence
  Description of Artificial Sequence: Synthetic oligonucleotide
aagugucuggaccacauag

SEQ ID NO: 320795 - RNA, 19 nt, Artificial Sequence
  Description of Artificial Sequence: Synthetic oligonucleotide
uaaauacaacucccgaagg

SEQ ID NO: 320796 - RNA, 19 nt, Artificial Sequence
  Description of Artificial Sequence: Synthetic oligonucleotide
uguaguaacuugcacguga

SEQ ID NO: 320797 - RNA, 19 nt, Artificial Sequence
  Description of Artificial Sequence: Synthetic oligonucleotide
ucggacaaugcuuuagucg

SEQ ID NO: 320798 - RNA, 19 nt, Artificial Sequence
  Description of Artificial Sequence: Synthetic oligonucleotide
aaugcaaagucguucuuga

SEQ ID NO: 320799 - RNA, 19 nt, Artificial Sequence
  Description of Artificial Sequence: Synthetic oligonucleotide
ugagcauucuacauuggcc

SEQ ID NO: 320800 - RNA, 19 nt, Artificial Sequence
  Description of Artificial Sequence: Synthetic oligonucleotide
agugauuauaacuuuuccu

SEQ ID NO: 320801 - RNA, 19 nt, Artificial Sequence
  Description of Artificial Sequence: Synthetic oligonucleotide
aaauacaacucccgaaggu

SEQ ID NO: 320802 - RNA, 19 nt, Artificial Sequence
  Description of Artificial Sequence: Synthetic oligonucleotide
acuaaucucccucaguuug

SEQ ID NO: 320803 - RNA, 19 nt, Artificial Sequence
  Description of Artificial Sequence: Synthetic oligonucleotide
agucuguucgaccuuugcc

SEQ ID NO: 320804 - RNA, 19 nt, Artificial Sequence
  Description of Artificial Sequence: Synthetic oligonucleotide
ugaagcuacuuucuucccg

SEQ ID NO: 320805 - RNA, 19 nt, Artificial Sequence
  Description of Artificial Sequence: Synthetic oligonucleotide
uggucuuccacaacaagcc

SEQ ID NO: 320806 - RNA, 19 nt, Artificial Sequence
  Description of Artificial Sequence: Synthetic oligonucleotide
uugacgucuugauucaacg

SEQ ID NO: 320807 - RNA, 19 nt, Artificial Sequence
  Description of Artificial Sequence: Synthetic oligonucleotide
aaggaaugcaaagucguuc

SEQ ID NO: 320808 - RNA, 19 nt, Artificial Sequence
  Description of Artificial Sequence: Synthetic oligonucleotide
gucuguucgaccuuugccg

SEQ ID NO: 320809 - RNA, 19 nt, Artificial Sequence
  Description of Artificial Sequence: Synthetic oligonucleotide
uuauagaucaagucacugu

SEQ ID NO: 320810 - RNA, 19 nt, Artificial Sequence
  Description of Artificial Sequence: Synthetic oligonucleotide
gagcuuauagaucaaguca

SEQ ID NO: 320811 - RNA, 19 nt, Artificial Sequence
  Description of Artificial Sequence: Synthetic oligonucleotide
ucagucguuucaaauguug

SEQ ID NO: 320812 - RNA, 19 nt, Artificial Sequence
  Description of Artificial Sequence: Synthetic oligonucleotide
aggauauuugaaccaaaag

SEQ ID NO: 320813 - RNA, 19 nt, Artificial Sequence
  Description of Artificial Sequence: Synthetic oligonucleotide
ugugguauucucucuagcu

SEQ ID NO: 320814 - RNA, 19 nt, Artificial Sequence
  Description of Artificial Sequence: Synthetic oligonucleotide
aaaaugcguuaucuuguag

SEQ ID NO: 320815 - RNA, 19 nt, Artificial Sequence
  Description of Artificial Sequence: Synthetic oligonucleotide
augauggaaauguagcuga

SEQ ID NO: 320816 - RNA, 19 nt, Artificial Sequence
  Description of Artificial Sequence: Synthetic oligonucleotide
guuuaaagggcguaucuac

SEQ ID NO: 320817 - RNA, 19 nt, Artificial Sequence
  Description of Artificial Sequence: Synthetic oligonucleotide
cuuuagucguccaacggag

SEQ ID NO: 320818 - RNA, 19 nt, Artificial Sequence
  Description of Artificial Sequence: Synthetic oligonucleotide
aacaagcccgcuuuucuug

SEQ ID NO: 320819 - RNA, 19 nt, Artificial Sequence
  Description of Artificial Sequence: Synthetic oligonucleotide
aaugcguuaucuuguagua

SEQ ID NO: 320820 - RNA, 19 nt, Artificial Sequence
  Description of Artificial Sequence: Synthetic oligonucleotide
uccgcuuaguuuaaauccc

SEQ ID NO: 320821 - RNA, 19 nt, Artificial Sequence
  Description of Artificial Sequence: Synthetic oligonucleotide
uuucgaaagaauauuccuu

SEQ ID NO: 320822 - RNA, 19 nt, Artificial Sequence
  Description of Artificial Sequence: Synthetic oligonucleotide
aguaacuugcacgugagca

SEQ ID NO: 320823 - RNA, 19 nt, Artificial Sequence
  Description of Artificial Sequence: Synthetic oligonucleotide
ugugcgaauguuauuugac

SEQ ID NO: 320824 - RNA, 19 nt, Artificial Sequence
  Description of Artificial Sequence: Synthetic oligonucleotide
cacaaaggggacauugacg

SEQ ID NO: 320825 - RNA, 19 nt, Artificial Sequence
  Description of Artificial Sequence: Synthetic oligonucleotide
ucguuucaaauguuggaag

SEQ ID NO: 320826 - RNA, 19 nt, Artificial Sequence
  Description of Artificial Sequence: Synthetic oligonucleotide
uguaagcuaaacaccgcca

SEQ ID NO: 320827 - RNA, 19 nt, Artificial Sequence
  Description of Artificial Sequence: Synthetic oligonucleotide
aacaccgccacuggcaagg

SEQ ID NO: 320828 - RNA, 19 nt, Artificial Sequence
  Description of Artificial Sequence: Synthetic oligonucleotide
caacuguuuuggcagaacg

SEQ ID NO: 320829 - RNA, 19 nt, Artificial Sequence
  Description of Artificial Sequence: Synthetic oligonucleotide
ugcuuuagucguccaacgg

SEQ ID NO: 320830 - RNA, 19 nt, Artificial Sequence
  Description of Artificial Sequence: Synthetic oligonucleotide
uaaggugccgcaacucccg

SEQ ID NO: 320831 - RNA, 19 nt, Artificial Sequence
  Description of Artificial Sequence: Synthetic oligonucleotide
gacucgagcuuguuguugg

SEQ ID NO: 320832 - RNA, 19 nt, Artificial Sequence
  Description of Artificial Sequence: Synthetic oligonucleotide
auaagagcaagguacggaa

SEQ ID NO: 320833 - RNA, 19 nt, Artificial Sequence
  Description of Artificial Sequence: Synthetic oligonucleotide
accuuugccgggcaguggc

SEQ ID NO: 320834 - RNA, 19 nt, Artificial Sequence
  Description of Artificial Sequence: Synthetic oligonucleotide
gauauuugaaccaaaaguu

SEQ ID NO: 320835 - RNA, 19 nt, Artificial Sequence
  Description of Artificial Sequence: Synthetic oligonucleotide
uagagcuuauagaucaagu

SEQ ID NO: 320836 - RNA, 19 nt, Artificial Sequence
  Description of Artificial Sequence: Synthetic oligonucleotide
uauaagagcaagguacgga

SEQ ID NO: 320837 - RNA, 19 nt, Artificial Sequence
  Description of Artificial Sequence: Synthetic oligonucleotide
uguguauaagagcaaggua

SEQ ID NO: 320838 - RNA, 19 nt, Artificial Sequence
  Description of Artificial Sequence: Synthetic oligonucleotide
auauuugaaccaaaaguug

SEQ ID NO: 320839 - RNA, 19 nt, Artificial Sequence
  Description of Artificial Sequence: Synthetic oligonucleotide
aagcccgcuuuucuugagc

SEQ ID NO: 320840 - RNA, 19 nt, Artificial Sequence
  Description of Artificial Sequence: Synthetic oligonucleotide
aacggagaccucaaagcac

SEQ ID NO: 320841 - RNA, 19 nt, Artificial Sequence
  Description of Artificial Sequence: Synthetic oligonucleotide
gagcugaccgauuuucucc

SEQ ID NO: 320842 - RNA, 19 nt, Artificial Sequence
  Description of Artificial Sequence: Synthetic oligonucleotide
uucaacgccucucugacuu

SEQ ID NO: 320843 - RNA, 19 nt, Artificial Sequence
  Description of Artificial Sequence: Synthetic oligonucleotide
acguggaggaucuuaaggu

SEQ ID NO: 320844 - RNA, 19 nt, Artificial Sequence
  Description of Artificial Sequence: Synthetic oligonucleotide
uggacacgugcuuugguag

SEQ ID NO: 320845 - RNA, 19 nt, Artificial Sequence
  Description of Artificial Sequence: Synthetic oligonucleotide
cagucguuucaaauguugg

SEQ ID NO: 320846 - RNA, 19 nt, Artificial Sequence
  Description of Artificial Sequence: Synthetic oligonucleotide
gaccauaaggaugauggug

SEQ ID NO: 320847 - RNA, 19 nt, Artificial Sequence
  Description of Artificial Sequence: Synthetic oligonucleotide
ucuacuccuaaaaugcguu

SEQ ID NO: 320848 - RNA, 19 nt, Artificial Sequence
  Description of Artificial Sequence: Synthetic oligonucleotide
ucgauugugcgaauguuau

SEQ ID NO: 320849 - RNA, 19 nt, Artificial Sequence
  Description of Artificial Sequence: Synthetic oligonucleotide
acuccuaaaaugcguuauc

SEQ ID NO: 320850 - RNA, 19 nt, Artificial Sequence
  Description of Artificial Sequence: Synthetic oligonucleotide
gccuauuaaauacaacucc

SEQ ID NO: 320851 - RNA, 19 nt, Artificial Sequence
  Description of Artificial Sequence: Synthetic oligonucleotide
ucgcacguggacaacgugc

SEQ ID NO: 320852 - RNA, 19 nt, Artificial Sequence
  Description of Artificial Sequence: Synthetic oligonucleotide
aucuuauugugccacaguu

SEQ ID NO: 320853 - RNA, 19 nt, Artificial Sequence
  Description of Artificial Sequence: Synthetic oligonucleotide
aggcggucuaggcaguucc

SEQ ID NO: 320854 - RNA, 19 nt, Artificial Sequence
  Description of Artificial Sequence: Synthetic oligonucleotide
uucuacaugggcacggaau

SEQ ID NO: 320855 - RNA, 19 nt, Artificial Sequence
  Description of Artificial Sequence: Synthetic oligonucleotide
aggaucgucaugcugggga

SEQ ID NO: 320856 - RNA, 19 nt, Artificial Sequence
  Description of Artificial Sequence: Synthetic oligonucleotide
agcugaccgauuuucuccg

SEQ ID NO: 320857 - RNA, 19 nt, Artificial Sequence
  Description of Artificial Sequence: Synthetic oligonucleotide
uucuacauuggcccagcug

SEQ ID NO: 320858 - RNA, 19 nt, Artificial Sequence
  Description of Artificial Sequence: Synthetic oligonucleotide
gugucuggaccacauagag

SEQ ID NO: 320859 - RNA, 19 nt, Artificial Sequence
  Description of Artificial Sequence: Synthetic oligonucleotide
agaucagugauuauaacuu

SEQ ID NO: 320860 - RNA, 19 nt, Artificial Sequence
  Description of Artificial Sequence: Synthetic oligonucleotide
agggacucaaguccaauca

SEQ ID NO: 320861 - RNA, 19 nt, Artificial Sequence
  Description of Artificial Sequence: Synthetic oligonucleotide
agucguuucaaauguugga

SEQ ID NO: 320862 - RNA, 19 nt, Artificial Sequence
  Description of Artificial Sequence: Synthetic oligonucleotide
uuuagcaggcaagcgaugu

SEQ ID NO: 320863 - RNA, 19 nt, Artificial Sequence
  Description of Artificial Sequence: Synthetic oligonucleotide
guaagcuaaacaccgccac

SEQ ID NO: 320864 - RNA, 19 nt, Artificial Sequence
  Description of Artificial Sequence: Synthetic oligonucleotide
ucgaaagaauauuccuuca

SEQ ID NO: 320865 - RNA, 19 nt, Artificial Sequence
  Description of Artificial Sequence: Synthetic oligonucleotide
accgauuuucuccgggagg

SEQ ID NO: 320866 - RNA, 19 nt, Artificial Sequence
  Description of Artificial Sequence: Synthetic oligonucleotide
ugcagacgugcucaaagcu

SEQ ID NO: 320867 - RNA, 19 nt, Artificial Sequence
  Description of Artificial Sequence: Synthetic oligonucleotide
aacuuuuggcuugcagacg

SEQ ID NO: 320868 - RNA, 19 nt, Artificial Sequence
  Description of Artificial Sequence: Synthetic oligonucleotide
accauaaggaugauggugu

SEQ ID NO: 320869 - RNA, 19 nt, Artificial Sequence
  Description of Artificial Sequence: Synthetic oligonucleotide
guuuugauaagugucugga

SEQ ID NO: 320870 - RNA, 19 nt, Artificial Sequence
  Description of Artificial Sequence: Synthetic oligonucleotide
aucuuauuguuuucugagu

SEQ ID NO: 320871 - RNA, 19 nt, Artificial Sequence
  Description of Artificial Sequence: Synthetic oligonucleotide
gaucuuaaggugccgcaac

SEQ ID NO: 320872 - RNA, 19 nt, Artificial Sequence
  Description of Artificial Sequence: Synthetic oligonucleotide
ugacgucuugauucaacgc

SEQ ID NO: 320873 - RNA, 19 nt, Artificial Sequence
  Description of Artificial Sequence: Synthetic oligonucleotide
aacaccucguaccccguca

SEQ ID NO: 320874 - RNA, 19 nt, Artificial Sequence
  Description of Artificial Sequence: Synthetic oligonucleotide
ucgagaggcugaaaauagc

SEQ ID NO: 320875 - RNA, 19 nt, Artificial Sequence
  Description of Artificial Sequence: Synthetic oligonucleotide
auugccuauuaaauacaac

SEQ ID NO: 320876 - RNA, 19 nt, Artificial Sequence
  Description of Artificial Sequence: Synthetic oligonucleotide
auugacgucuugauucaac

SEQ ID NO: 320877 - RNA, 19 nt, Artificial Sequence
  Description of Artificial Sequence: Synthetic oligonucleotide
ucaccgguuucucagccga

SEQ ID NO: 320878 - RNA, 19 nt, Artificial Sequence
  Description of Artificial Sequence: Synthetic oligonucleotide
uggagcagguuuuaggaua

SEQ ID NO: 320879 - RNA, 19 nt, Artificial Sequence
  Description of Artificial Sequence: Synthetic oligonucleotide
uagcugacauccaagcauc

SEQ ID NO: 320880 - RNA, 19 nt, Artificial Sequence
  Description of Artificial Sequence: Synthetic oligonucleotide
acugagaucagugauuaua

SEQ ID NO: 320881 - RNA, 19 nt, Artificial Sequence
  Description of Artificial Sequence: Synthetic oligonucleotide
uaaaaugcguuaucuugua

SEQ ID NO: 320882 - RNA, 19 nt, Artificial Sequence
  Description of Artificial Sequence: Synthetic oligonucleotide
caacuucacgcacuuaaac

SEQ ID NO: 320883 - RNA, 19 nt, Artificial Sequence
  Description of Artificial Sequence: Synthetic oligonucleotide
cacgugagcaucuccaauc

SEQ ID NO: 320884 - RNA, 19 nt, Artificial Sequence
  Description of Artificial Sequence: Synthetic oligonucleotide
aacuaaucucccucaguuu

SEQ ID NO: 320885 - RNA, 19 nt, Artificial Sequence
  Description of Artificial Sequence: Synthetic oligonucleotide
uagaguuggucguacuggu

SEQ ID NO: 320886 - RNA, 19 nt, Artificial Sequence
  Description of Artificial Sequence: Synthetic oligonucleotide
uuuagucguccaacggaga

SEQ ID NO: 320887 - RNA, 19 nt, Artificial Sequence
  Description of Artificial Sequence: Synthetic oligonucleotide
acguggacaacgugcccgc

SEQ ID NO: 320888 - RNA, 19 nt, Artificial Sequence
  Description of Artificial Sequence: Synthetic oligonucleotide
uugauucaacgccucucug

SEQ ID NO: 320889 - RNA, 19 nt, Artificial Sequence
  Description of Artificial Sequence: Synthetic oligonucleotide
guauaagagcaagguacgg

SEQ ID NO: 320890 - RNA, 19 nt, Artificial Sequence
  Description of Artificial Sequence: Synthetic oligonucleotide
acauugacgucuugauuca

SEQ ID NO: 320891 - RNA, 19 nt, Artificial Sequence
  Description of Artificial Sequence: Synthetic oligonucleotide
gaccgauuuucuccgggag

SEQ ID NO: 320892 - RNA, 19 nt, Artificial Sequence
  Description of Artificial Sequence: Synthetic oligonucleotide
uggcguugacgaaauuugc

SEQ ID NO: 320893 - RNA, 19 nt, Artificial Sequence
  Description of Artificial Sequence: Synthetic oligonucleotide
cugagaucagugauuauaa

SEQ ID NO: 320894 - RNA, 19 nt, Artificial Sequence
  Description of Artificial Sequence: Synthetic oligonucleotide
acuucgaucaccgguuucu

SEQ ID NO: 320895 - RNA, 19 nt, Artificial Sequence
  Description of Artificial Sequence: Synthetic oligonucleotide
gcguugacgaaauuugcag

SEQ ID NO: 320896 - RNA, 19 nt, Artificial Sequence
  Description of Artificial Sequence: Synthetic oligonucleotide
guaguaacuugcacgugag

SEQ ID NO: 320897 - RNA, 19 nt, Artificial Sequence
  Description of Artificial Sequence: Synthetic oligonucleotide
cacguggacaacgugcccg

SEQ ID NO: 320898 - RNA, 19 nt, Artificial Sequence
  Description of Artificial Sequence: Synthetic oligonucleotide
gacacgugcuuugguaggg

SEQ ID NO: 320899 - RNA, 19 nt, Artificial Sequence
  Description of Artificial Sequence: Synthetic oligonucleotide
ugaccgauuuucuccggga

SEQ ID NO: 320900 - RNA, 19 nt, Artificial Sequence
  Description of Artificial Sequence: Synthetic oligonucleotide
cuacauuggcccagcuggg

SEQ ID NO: 320901 - RNA, 19 nt, Artificial Sequence
  Description of Artificial Sequence: Synthetic oligonucleotide
aucaccgguuucucagccg

SEQ ID NO: 320902 - RNA, 19 nt, Artificial Sequence
  Description of Artificial Sequence: Synthetic oligonucleotide
cugaccgauuuucuccggg

SEQ ID NO: 320903 - RNA, 19 nt, Artificial Sequence
  Description of Artificial Sequence: Synthetic oligonucleotide
cgauguguaaacauucagc

SEQ ID NO: 320904 - RNA, 19 nt, Artificial Sequence
  Description of Artificial Sequence: Synthetic oligonucleotide
cagccgagaacuugaggcc

SEQ ID NO: 320905 - RNA, 19 nt, Artificial Sequence
  Description of Artificial Sequence: Synthetic oligonucleotide
uggucguacuggucgacca

SEQ ID NO: 320906 - RNA, 19 nt, Artificial Sequence
  Description of Artificial Sequence: Synthetic oligonucleotide
ugaccauaaggaugauggu

SEQ ID NO: 320907 - RNA, 19 nt, Artificial Sequence
  Description of Artificial Sequence: Synthetic oligonucleotide
uaacuugcacgugagcauc

SEQ ID NO: 320908 - RNA, 19 nt, Artificial Sequence
  Description of Artificial Sequence: Synthetic oligonucleotide
uccucgcacguggacaacg

SEQ ID NO: 320909 - RNA, 19 nt, Artificial Sequence
  Description of Artificial Sequence: Synthetic oligonucleotide
uucgaucaccgguuucuca

SEQ ID NO: 320910 - RNA, 19 nt, Artificial Sequence
  Description of Artificial Sequence: Synthetic oligonucleotide
cuccccucgucacugcugg

SEQ ID NO: 320911 - RNA, 19 nt, Artificial Sequence
  Description of Artificial Sequence: Synthetic oligonucleotide
caacggagaccucaaagca

SEQ ID NO: 320912 - RNA, 19 nt, Artificial Sequence
  Description of Artificial Sequence: Synthetic oligonucleotide
uguucgaccuuugccgggc

SEQ ID NO: 320913 - RNA, 19 nt, Artificial Sequence
  Description of Artificial Sequence: Synthetic oligonucleotide
uacaugggcacggaauuuc

SEQ ID NO: 320914 - RNA, 19 nt, Artificial Sequence
  Description of Artificial Sequence: Synthetic oligonucleotide
cugaagcuacuuucuuccc

SEQ ID NO: 320915 - RNA, 19 nt, Artificial Sequence
  Description of Artificial Sequence: Synthetic oligonucleotide
uccuggagguuagucaucu

SEQ ID NO: 320916 - RNA, 19 nt, Artificial Sequence
  Description of Artificial Sequence: Synthetic oligonucleotide
gucguuucaaauguuggaa

SEQ ID NO: 320917 - RNA, 19 nt, Artificial Sequence
  Description of Artificial Sequence: Synthetic oligonucleotide
cauugcgagacacgugcug

SEQ ID NO: 320918 - RNA, 19 nt, Artificial Sequence
  Description of Artificial Sequence: Synthetic oligonucleotide
aucuacuccuaaaaugcgu

SEQ ID NO: 320919 - RNA, 19 nt, Artificial Sequence
  Description of Artificial Sequence: Synthetic oligonucleotide
gcuuuagucguccaacgga

SEQ ID NO: 320920 - RNA, 19 nt, Artificial Sequence
  Description of Artificial Sequence: Synthetic oligonucleotide
aacgugcccgcguuccgcu

SEQ ID NO: 320921 - RNA, 19 nt, Artificial Sequence
  Description of Artificial Sequence: Synthetic oligonucleotide
acggagaccucaaagcacu

SEQ ID NO: 320922 - RNA, 19 nt, Artificial Sequence
  Description of Artificial Sequence: Synthetic oligonucleotide
aucuccucgauugugcgaa

SEQ ID NO: 320923 - RNA, 19 nt, Artificial Sequence
  Description of Artificial Sequence: Synthetic oligonucleotide
gacucaaguccaaucaucu

SEQ ID NO: 320924 - RNA, 19 nt, Artificial Sequence
  Description of Artificial Sequence: Synthetic oligonucleotide
ggucacaaucuuauugugc

SEQ ID NO: 320925 - RNA, 19 nt, Artificial Sequence
  Description of Artificial Sequence: Synthetic oligonucleotide
uguagcugaugagaaguuu

SEQ ID NO: 320926 - RNA, 19 nt, Artificial Sequence
  Description of Artificial Sequence: Synthetic oligonucleotide
uucgaccuuugccgggcag

SEQ ID NO: 320927 - RNA, 19 nt, Artificial Sequence
  Description of Artificial Sequence: Synthetic oligonucleotide
ggacacgugcuuugguagg

SEQ ID NO: 320928 - RNA, 19 nt, Artificial Sequence
  Description of Artificial Sequence: Synthetic oligonucleotide
cauucuacauuggcccagc

SEQ ID NO: 320929 - RNA, 19 nt, Artificial Sequence
  Description of Artificial Sequence: Synthetic oligonucleotide
uuccacaacaagcccgcuu

SEQ ID NO: 320930 - RNA, 19 nt, Artificial Sequence
  Description of Artificial Sequence: Synthetic oligonucleotide
gguaccuguuauucucugc

SEQ ID NO: 320931 - RNA, 19 nt, Artificial Sequence
  Description of Artificial Sequence: Synthetic oligonucleotide
uuggucguacuggucgacc

SEQ ID NO: 320932 - RNA, 19 nt, Artificial Sequence
  Description of Artificial Sequence: Synthetic oligonucleotide
cuugauucaacgccucucu

SEQ ID NO: 320933 - RNA, 19 nt, Artificial Sequence
  Description of Artificial Sequence: Synthetic oligonucleotide
ugguggacacgugcuuugg

SEQ ID NO: 320934 - RNA, 19 nt, Artificial Sequence
  Description of Artificial Sequence: Synthetic oligonucleotide
acgucugggaugucacuga

SEQ ID NO: 320935 - RNA, 19 nt, Artificial Sequence
  Description of Artificial Sequence: Synthetic oligonucleotide
cucgauugugcgaauguua

SEQ ID NO: 320936 - RNA, 19 nt, Artificial Sequence
  Description of Artificial Sequence: Synthetic oligonucleotide
guguguauaagagcaaggu

SEQ ID NO: 320937 - RNA, 19 nt, Artificial Sequence
  Description of Artificial Sequence: Synthetic oligonucleotide
cuuuucacguggaggaucu

SEQ ID NO: 320938 - RNA, 19 nt, Artificial Sequence
  Description of Artificial Sequence: Synthetic oligonucleotide
agugucuggaccacauaga

SEQ ID NO: 320939 - RNA, 19 nt, Artificial Sequence
  Description of Artificial Sequence: Synthetic oligonucleotide
ccuaucucuauggguaugg

SEQ ID NO: 320940 - RNA, 19 nt, Artificial Sequence
  Description of Artificial Sequence: Synthetic oligonucleotide
ggugguauggucacaaucu

SEQ ID NO: 320941 - RNA, 19 nt, Artificial Sequence
  Description of Artificial Sequence: Synthetic oligonucleotide
agaguuggucguacugguc

SEQ ID NO: 320942 - RNA, 19 nt, Artificial Sequence
  Description of Artificial Sequence: Synthetic oligonucleotide
auucaacgccucucugacu

SEQ ID NO: 320943 - RNA, 19 nt, Artificial Sequence
  Description of Artificial Sequence: Synthetic oligonucleotide
uugguagggucuggguacc

SEQ ID NO: 320944 - RNA, 19 nt, Artificial Sequence
  Description of Artificial Sequence: Synthetic oligonucleotide
gugcgaauguuauuugacu

SEQ ID NO: 320945 - RNA, 19 nt, Artificial Sequence
  Description of Artificial Sequence: Synthetic oligonucleotide
guaacuugcacgugagcau

SEQ ID NO: 320946 - RNA, 19 nt, Artificial Sequence
  Description of Artificial Sequence: Synthetic oligonucleotide
gcugaaaauagcauguggu

SEQ ID NO: 320947 - RNA, 19 nt, Artificial Sequence
  Description of Artificial Sequence: Synthetic oligonucleotide
ggcguaucuacuccuaaaa

SEQ ID NO: 320948 - RNA, 19 nt, Artificial Sequence
  Description of Artificial Sequence: Synthetic oligonucleotide
gcuuugugagguguggagc

SEQ ID NO: 320949 - RNA, 19 nt, Artificial Sequence
  Description of Artificial Sequence: Synthetic oligonucleotide
ugacgucugggaugucacu

SEQ ID NO: 320950 - RNA, 19 nt, Artificial Sequence
  Description of Artificial Sequence: Synthetic oligonucleotide
auucuacauuggcccagcu

SEQ ID NO: 320951 - RNA, 19 nt, Artificial Sequence
  Description of Artificial Sequence: Synthetic oligonucleotide
cuuugccgggcaguggcag

SEQ ID NO: 320952 - RNA, 19 nt, Artificial Sequence
  Description of Artificial Sequence: Synthetic oligonucleotide
gacuucgaucaccgguuuc

SEQ ID NO: 320953 - RNA, 19 nt, Artificial Sequence
  Description of Artificial Sequence: Synthetic oligonucleotide
ucgaccuuugccgggcagu

SEQ ID NO: 320954 - RNA, 19 nt, Artificial Sequence
  Description of Artificial Sequence: Synthetic oligonucleotide
guggacacgugcuuuggua

SEQ ID NO: 320955 - RNA, 19 nt, Artificial Sequence
  Description of Artificial Sequence: Synthetic oligonucleotide
ucguaccccgucaggugcu

SEQ ID NO: 320956 - RNA, 19 nt, Artificial Sequence
  Description of Artificial Sequence: Synthetic oligonucleotide
caagccuaucucuaugggu

SEQ ID NO: 320957 - RNA, 19 nt, Artificial Sequence
  Description of Artificial Sequence: Synthetic oligonucleotide
caagcccgcuuuucuugag

SEQ ID NO: 320958 - RNA, 19 nt, Artificial Sequence
  Description of Artificial Sequence: Synthetic oligonucleotide
caagcgauguguaaacauu

SEQ ID NO: 320959 - RNA, 19 nt, Artificial Sequence
  Description of Artificial Sequence: Synthetic oligonucleotide
agggcguaucuacuccuaa

SEQ ID NO: 320960 - RNA, 19 nt, Artificial Sequence
  Description of Artificial Sequence: Synthetic oligonucleotide
uggaguagaguuggucgua

SEQ ID NO: 320961 - RNA, 19 nt, Artificial Sequence
  Description of Artificial Sequence: Synthetic oligonucleotide
aguuggucuuccacaacaa

SEQ ID NO: 320962 - RNA, 19 nt, Artificial Sequence
  Description of Artificial Sequence: Synthetic oligonucleotide
gaccuuugccgggcagugg

SEQ ID NO: 320963 - RNA, 19 nt, Artificial Sequence
  Description of Artificial Sequence: Synthetic oligonucleotide
caagguacggaaaguacuu

SEQ ID NO: 320964 - RNA, 19 nt, Artificial Sequence
  Description of Artificial Sequence: Synthetic oligonucleotide
acacgugcugccugaguuu

SEQ ID NO: 320965 - RNA, 19 nt, Artificial Sequence
  Description of Artificial Sequence: Synthetic oligonucleotide
ugcgagacacgugcugccu

SEQ ID NO: 320966 - RNA, 19 nt, Artificial Sequence
  Description of Artificial Sequence: Synthetic oligonucleotide
augcguuaucuuguaguaa

SEQ ID NO: 320967 - RNA, 19 nt, Artificial Sequence
  Description of Artificial Sequence: Synthetic oligonucleotide
cacgugcugccugaguuuc

SEQ ID NO: 320968 - RNA, 19 nt, Artificial Sequence
  Description of Artificial Sequence: Synthetic oligonucleotide
cuaaucucccucaguuugu

SEQ ID NO: 320969 - RNA, 19 nt, Artificial Sequence
  Description of Artificial Sequence: Synthetic oligonucleotide
cucgcacguggacaacgug

SEQ ID NO: 320970 - RNA, 19 nt, Artificial Sequence
  Description of Artificial Sequence: Synthetic oligonucleotide
gcauucuacauuggcccag

SEQ ID NO: 320971 - RNA, 19 nt, Artificial Sequence
  Description of Artificial Sequence: Synthetic oligonucleotide
cuacuccuaaaaugcguua

SEQ ID NO: 320972 - RNA, 19 nt, Artificial Sequence
  Description of Artificial Sequence: Synthetic oligonucleotide
cacuacaaacauugaacau

SEQ ID NO: 320973 - RNA, 19 nt, Artificial Sequence
  Description of Artificial Sequence: Synthetic oligonucleotide
ccaggaucgucaugcuggg

SEQ ID NO: 320974 - RNA, 19 nt, Artificial Sequence
  Description of Artificial Sequence: Synthetic oligonucleotide
ggcguugacgaaauuugca

SEQ ID NO: 320975 - RNA, 19 nt, Artificial Sequence
  Description of Artificial Sequence: Synthetic oligonucleotide
caacgugcccgcguuccgc

SEQ ID NO: 320976 - RNA, 19 nt, Artificial Sequence
  Description of Artificial Sequence: Synthetic oligonucleotide
gguauucucucuagcucac

SEQ ID NO: 320977 - RNA, 19 nt, Artificial Sequence
  Description of Artificial Sequence: Synthetic oligonucleotide
aucgucaugcuggggacuu

SEQ ID NO: 320978 - RNA, 19 nt, Artificial Sequence
  Description of Artificial Sequence: Synthetic oligonucleotide
cgcacguggacaacgugcc

SEQ ID NO: 320979 - RNA, 19 nt, Artificial Sequence
  Description of Artificial Sequence: Synthetic oligonucleotide
cuucgaucaccgguuucuc

SEQ ID NO: 320980 - RNA, 19 nt, Artificial Sequence
  Description of Artificial Sequence: Synthetic oligonucleotide
gugcucaacuuuggagcag

SEQ ID NO: 320981 - RNA, 19 nt, Artificial Sequence
  Description of Artificial Sequence: Synthetic oligonucleotide
gugccgucauugugaauga

SEQ ID NO: 320982 - RNA, 19 nt, Artificial Sequence
  Description of Artificial Sequence: Synthetic oligonucleotide
ggaguagaguuggucguac

SEQ ID NO: 320983 - RNA, 19 nt, Artificial Sequence
  Description of Artificial Sequence: Synthetic oligonucleotide
cuccucgauugugcgaaug

SEQ ID NO: 320984 - RNA, 19 nt, Artificial Sequence
  Description of Artificial Sequence: Synthetic oligonucleotide
cgaaugacuuaaacacuac

SEQ ID NO: 320985 - RNA, 19 nt, Artificial Sequence
  Description of Artificial Sequence: Synthetic oligonucleotide
uuagcacauccaggucugu

SEQ ID NO: 320986 - RNA, 19 nt, Artificial Sequence
  Description of Artificial Sequence: Synthetic oligonucleotide
ggggacauugacgucuuga

SEQ ID NO: 320987 - RNA, 19 nt, Artificial Sequence
  Description of Artificial Sequence: Synthetic oligonucleotide
gaguagaguuggucguacu

SEQ ID NO: 320988 - RNA, 19 nt, Artificial Sequence
  Description of Artificial Sequence: Synthetic oligonucleotide
aagggcguaucuacuccua

SEQ ID NO: 320989 - RNA, 19 nt, Artificial Sequence
  Description of Artificial Sequence: Synthetic oligonucleotide
gcugaccgauuuucuccgg

SEQ ID NO: 320990 - RNA, 19 nt, Artificial Sequence
  Description of Artificial Sequence: Synthetic oligonucleotide
ugcuggggacuucgaucac

SEQ ID NO: 320991 - RNA, 19 nt, Artificial Sequence
  Description of Artificial Sequence: Synthetic oligonucleotide
aggugccgcaacucccgca

SEQ ID NO: 320992 - RNA, 19 nt, Artificial Sequence
  Description of Artificial Sequence: Synthetic oligonucleotide
ggggacuucgaucaccggu

SEQ ID NO: 320993 - RNA, 19 nt, Artificial Sequence
  Description of Artificial Sequence: Synthetic oligonucleotide
caccgguuucucagccgag

SEQ ID NO: 320994 - RNA, 19 nt, Artificial Sequence
  Description of Artificial Sequence: Synthetic oligonucleotide
agggugguauggucacaau

SEQ ID NO: 320995 - RNA, 19 nt, Artificial Sequence
  Description of Artificial Sequence: Synthetic oligonucleotide
cuucuacaugggcacggaa

SEQ ID NO: 320996 - RNA, 19 nt, Artificial Sequence
  Description of Artificial Sequence: Synthetic oligonucleotide
ggagaaguaaagagacucu

SEQ ID NO: 320997 - RNA, 19 nt, Artificial Sequence
  Description of Artificial Sequence: Synthetic oligonucleotide
cuggucgaccaugugcaga

SEQ ID NO: 320998 - RNA, 19 nt, Artificial Sequence
  Description of Artificial Sequence: Synthetic oligonucleotide
gggacauugacgucuugau

SEQ ID NO: 320999 - RNA, 19 nt, Artificial Sequence
  Description of Artificial Sequence: Synthetic oligonucleotide
guauucucucuagcucaca

SEQ ID NO: 321000 - RNA, 19 nt, Artificial Sequence
  Description of Artificial Sequence: Synthetic oligonucleotide
auccccgccggguuuuguu

SEQ ID NO: 321001 - RNA, 19 nt, Artificial Sequence
  Description of Artificial Sequence: Synthetic oligonucleotide
aguuguccucgcacgugga

SEQ ID NO: 321002 - RNA, 19 nt, Artificial Sequence
  Description of Artificial Sequence: Synthetic oligonucleotide
gugcccgcguuccgcuuag

SEQ ID NO: 321003 - RNA, 19 nt, Artificial Sequence
  Description of Artificial Sequence: Synthetic oligonucleotide
gcgaauguuauuugacuuu

SEQ ID NO: 321004 - RNA, 19 nt, Artificial Sequence
  Description of Artificial Sequence: Synthetic oligonucleotide
gguuuuguuuaaagggcgu

SEQ ID NO: 321005 - RNA, 19 nt, Artificial Sequence
  Description of Artificial Sequence: Synthetic oligonucleotide
gggcguaucuacuccuaaa

SEQ ID NO: 321006 - RNA, 19 nt, Artificial Sequence
  Description of Artificial Sequence: Synthetic oligonucleotide
gcggucuaggcaguucccc

SEQ ID NO: 321007 - RNA, 19 nt, Artificial Sequence
  Description of Artificial Sequence: Synthetic oligonucleotide
ccgcguuccgcuuaguuua

SEQ ID NO: 321008 - RNA, 19 nt, Artificial Sequence
  Description of Artificial Sequence: Synthetic oligonucleotide
uuucuccgggagggaggug

SEQ ID NO: 321009 - RNA, 19 nt, Artificial Sequence
  Description of Artificial Sequence: Synthetic oligonucleotide
cuggaaucaguucgaguuu

SEQ ID NO: 321010 - RNA, 19 nt, Artificial Sequence
  Description of Artificial Sequence: Synthetic oligonucleotide
ugguagggucuggguaccu

SEQ ID NO: 321011 - RNA, 19 nt, Artificial Sequence
  Description of Artificial Sequence: Synthetic oligonucleotide
ugccgucauugugaaugau

SEQ ID NO: 321012 - RNA, 19 nt, Artificial Sequence
  Description of Artificial Sequence: Synthetic oligonucleotide
guucgaccuuugccgggca

SEQ ID NO: 321013 - RNA, 19 nt, Artificial Sequence
  Description of Artificial Sequence: Synthetic oligonucleotide
ugcauccccgccggguuuu

SEQ ID NO: 321014 - RNA, 19 nt, Artificial Sequence
  Description of Artificial Sequence: Synthetic oligonucleotide
cauugugaaugaugagcuu

SEQ ID NO: 321015 - RNA, 19 nt, Artificial Sequence
  Description of Artificial Sequence: Synthetic oligonucleotide
ccgcuuaguuuaaauccca

SEQ ID NO: 321016 - RNA, 19 nt, Artificial Sequence
  Description of Artificial Sequence: Synthetic oligonucleotide
gcguaucuacuccuaaaau

SEQ ID NO: 321017 - RNA, 19 nt, Artificial Sequence
  Description of Artificial Sequence: Synthetic oligonucleotide
gcuuauagaucaagucacu

SEQ ID NO: 321018 - RNA, 19 nt, Artificial Sequence
  Description of Artificial Sequence: Synthetic oligonucleotide
gccuaucucuauggguaug

SEQ ID NO: 321019 - RNA, 19 nt, Artificial Sequence
  Description of Artificial Sequence: Synthetic oligonucleotide
cauugacgucuugauucaa

SEQ ID NO: 321020 - RNA, 19 nt, Artificial Sequence
  Description of Artificial Sequence: Synthetic oligonucleotide
ggacauugacgucuugauu

SEQ ID NO: 321021 - RNA, 19 nt, Artificial Sequence
  Description of Artificial Sequence: Synthetic oligonucleotide
ucgucaugcuggggacuuc

SEQ ID NO: 321022 - RNA, 19 nt, Artificial Sequence
  Description of Artificial Sequence: Synthetic oligonucleotide
ggcagcguuucaaacaguu

SEQ ID NO: 321023 - RNA, 19 nt, Artificial Sequence
  Description of Artificial Sequence: Synthetic oligonucleotide
ggcggucuaggcaguuccc

SEQ ID NO: 321024 - RNA, 19 nt, Artificial Sequence
  Description of Artificial Sequence: Synthetic oligonucleotide
gcacuuuggucagauugcu

SEQ ID NO: 321025 - RNA, 19 nt, Artificial Sequence
  Description of Artificial Sequence: Synthetic oligonucleotide
ggcacggaauuuccucacu

SEQ ID NO: 321026 - RNA, 19 nt, Artificial Sequence
  Description of Artificial Sequence: Synthetic oligonucleotide
cuguuauucucugcuuguu

SEQ ID NO: 321027 - RNA, 19 nt, Artificial Sequence
  Description of Artificial Sequence: Synthetic oligonucleotide
gacgugggugauggagggu

SEQ ID NO: 321028 - RNA, 19 nt, Artificial Sequence
  Description of Artificial Sequence: Synthetic oligonucleotide
acgugcccgcguuccgcuu

SEQ ID NO: 321029 - RNA, 19 nt, Artificial Sequence
  Description of Artificial Sequence: Synthetic oligonucleotide
guccucgcacguggacaac

SEQ ID NO: 321030 - RNA, 19 nt, Artificial Sequence
  Description of Artificial Sequence: Synthetic oligonucleotide
cgaccuuugccgggcagug

SEQ ID NO: 321031 - RNA, 19 nt, Artificial Sequence
  Description of Artificial Sequence: Synthetic oligonucleotide
ccuuugccgggcaguggca

SEQ ID NO: 321032 - RNA, 19 nt, Artificial Sequence
  Description of Artificial Sequence: Synthetic oligonucleotide
ccgggagggaggugauaca

SEQ ID NO: 321033 - RNA, 19 nt, Artificial Sequence
  Description of Artificial Sequence: Synthetic oligonucleotide
ugcccgcguuccgcuuagu

SEQ ID NO: 321034 - RNA, 19 nt, Artificial Sequence
  Description of Artificial Sequence: Synthetic oligonucleotide
cccgcguuccgcuuaguuu

SEQ ID NO: 321035 - RNA, 19 nt, Artificial Sequence
  Description of Artificial Sequence: Synthetic oligonucleotide
gcauugcgagacacgugcu

SEQ ID NO: 321036 - RNA, 19 nt, Artificial Sequence
  Description of Artificial Sequence: Synthetic oligonucleotide
ccucgcacguggacaacgu

SEQ ID NO: 321037 - RNA, 19 nt, Artificial Sequence
  Description of Artificial Sequence: Synthetic oligonucleotide
cgcuuaguuuaaaucccau

SEQ ID NO: 321038 - RNA, 19 nt, Artificial Sequence
  Description of Artificial Sequence: Synthetic oligonucleotide
cccgccggguuuuguuuaa

SEQ ID NO: 321039 - RNA, 19 nt, Artificial Sequence
  Description of Artificial Sequence: Synthetic oligonucleotide
ccucgauugugcgaauguu

SEQ ID NO: 321040 - RNA, 19 nt, Artificial Sequence
  Description of Artificial Sequence: Synthetic oligonucleotide
gcccgcguuccgcuuaguu

SEQ ID NO: 321041 - RNA, 19 nt, Artificial Sequence
  Description of Artificial Sequence: Synthetic oligonucleotide
gcguuccgcuuaguuuaaa

SEQ ID NO: 321042 - RNA, 19 nt, Artificial Sequence
  Description of Artificial Sequence: Synthetic oligonucleotide
cauccccgccggguuuugu

SEQ ID NO: 321043 - RNA, 19 nt, Artificial Sequence
  Description of Artificial Sequence: Synthetic oligonucleotide
cgugcccgcguuccgcuua

SEQ ID NO: 321044 - RNA, 19 nt, Artificial Sequence
  Description of Artificial Sequence: Synthetic oligonucleotide
ccgccggguuuuguuuaaa

SEQ ID NO: 321045 - RNA, 19 nt, Artificial Sequence
  Description of Artificial Sequence: Synthetic oligonucleotide
aaucaaaacacgcucauuc

SEQ ID NO: 321046 - RNA, 19 nt, Artificial Sequence
  Description of Artificial Sequence: Synthetic oligonucleotide
uuuugauagaaacuuaggg

SEQ ID NO: 321047 - RNA, 19 nt, Artificial Sequence
  Description of Artificial Sequence: Synthetic oligonucleotide
auugucaagacauugaucu

SEQ ID NO: 321048 - RNA, 19 nt, Artificial Sequence
  Description of Artificial Sequence: Synthetic oligonucleotide
ucaaguacugggaugaugg

SEQ ID NO: 321049 - RNA, 19 nt, Artificial Sequence
  Description of Artificial Sequence: Synthetic oligonucleotide
uuugauagaaacuuaggga

SEQ ID NO: 321050 - RNA, 19 nt, Artificial Sequence
  Description of Artificial Sequence: Synthetic oligonucleotide
aacuaaagcguucccaggg

SEQ ID NO: 321051 - RNA, 19 nt, Artificial Sequence
  Description of Artificial Sequence: Synthetic oligonucleotide
caauuugugagcaucaaag

SEQ ID NO: 321052 - RNA, 19 nt, Artificial Sequence
  Description of Artificial Sequence: Synthetic oligonucleotide
ugagauauggagaggacag

SEQ ID NO: 321053 - RNA, 19 nt, Artificial Sequence
  Description of Artificial Sequence: Synthetic oligonucleotide
aaaagaguucaucguacac

SEQ ID NO: 321054 - RNA, 19 nt, Artificial Sequence
  Description of Artificial Sequence: Synthetic oligonucleotide
aaagcgacuaagcuuucgg

SEQ ID NO: 321055 - RNA, 19 nt, Artificial Sequence
  Description of Artificial Sequence: Synthetic oligonucleotide
aaaacacgcucauucaaag

SEQ ID NO: 321056 - RNA, 19 nt, Artificial Sequence
  Description of Artificial Sequence: Synthetic oligonucleotide
uugauagaaacuuagggau

SEQ ID NO: 321057 - RNA, 19 nt, Artificial Sequence
  Description of Artificial Sequence: Synthetic oligonucleotide
cuuaucuuuagccacgacc

SEQ ID NO: 321058 - RNA, 19 nt, Artificial Sequence
  Description of Artificial Sequence: Synthetic oligonucleotide
auuugugagcaucaaagag

SEQ ID NO: 321059 - RNA, 19 nt, Artificial Sequence
  Description of Artificial Sequence: Synthetic oligonucleotide
aaaucugguauucucgcug

SEQ ID NO: 321060 - RNA, 19 nt, Artificial Sequence
  Description of Artificial Sequence: Synthetic oligonucleotide
aacaauagugucaauuguc

SEQ ID NO: 321061 - RNA, 19 nt, Artificial Sequence
  Description of Artificial Sequence: Synthetic oligonucleotide
ucuuagacuuuuaaucucc

SEQ ID NO: 321062 - RNA, 19 nt, Artificial Sequence
  Description of Artificial Sequence: Synthetic oligonucleotide
gaaacuaacaacauagcuc

SEQ ID NO: 321063 - RNA, 19 nt, Artificial Sequence
  Description of Artificial Sequence: Synthetic oligonucleotide
uuuugaaacagacugccau

SEQ ID NO: 321064 - RNA, 19 nt, Artificial Sequence
  Description of Artificial Sequence: Synthetic oligonucleotide
aauuugugagcaucaaaga

SEQ ID NO: 321065 - RNA, 19 nt, Artificial Sequence
  Description of Artificial Sequence: Synthetic oligonucleotide
guaacauaagaauucuccc

SEQ ID NO: 321066 - RNA, 19 nt, Artificial Sequence
  Description of Artificial Sequence: Synthetic oligonucleotide
ucaucuagaguccaguauc

SEQ ID NO: 321067 - RNA, 19 nt, Artificial Sequence
  Description of Artificial Sequence: Synthetic oligonucleotide
auauauagugcucuucuca

SEQ ID NO: 321068 - RNA, 19 nt, Artificial Sequence
  Description of Artificial Sequence: Synthetic oligonucleotide
ugaguuugcgcacugcagc

SEQ ID NO: 321069 - RNA, 19 nt, Artificial Sequence
  Description of Artificial Sequence: Synthetic oligonucleotide
auuuugucauccuggcccc

SEQ ID NO: 321070 - RNA, 19 nt, Artificial Sequence
  Description of Artificial Sequence: Synthetic oligonucleotide
uccaaagcgacuaagcuuu

SEQ ID NO: 321071 - RNA, 19 nt, Artificial Sequence
  Description of Artificial Sequence: Synthetic oligonucleotide
ugcagcugaacauagauuu

SEQ ID NO: 321072 - RNA, 19 nt, Artificial Sequence
  Description of Artificial Sequence: Synthetic oligonucleotide
agacuuuuaaucuccauau

SEQ ID NO: 321073 - RNA, 19 nt, Artificial Sequence
  Description of Artificial Sequence: Synthetic oligonucleotide
cauagcucagguuucaaac

SEQ ID NO: 321074 - RNA, 19 nt, Artificial Sequence
  Description of Artificial Sequence: Synthetic oligonucleotide
uagcguauaaaagaguuca

SEQ ID NO: 321075 - RNA, 19 nt, Artificial Sequence
  Description of Artificial Sequence: Synthetic oligonucleotide
aaucaaacaauagugucaa

SEQ ID NO: 321076 - RNA, 19 nt, Artificial Sequence
  Description of Artificial Sequence: Synthetic oligonucleotide
aggaugauucugucaaccc

SEQ ID NO: 321077 - RNA, 19 nt, Artificial Sequence
  Description of Artificial Sequence: Synthetic oligonucleotide
uuuuagagguaagaggacc

SEQ ID NO: 321078 - RNA, 19 nt, Artificial Sequence
  Description of Artificial Sequence: Synthetic oligonucleotide
ucuaccuggguccaaaguc

SEQ ID NO: 321079 - RNA, 19 nt, Artificial Sequence
  Description of Artificial Sequence: Synthetic oligonucleotide
ggaacugagauauggagag

SEQ ID NO: 321080 - RNA, 19 nt, Artificial Sequence
  Description of Artificial Sequence: Synthetic oligonucleotide
aaagcguucccaggggugc

SEQ ID NO: 321081 - RNA, 19 nt, Artificial Sequence
  Description of Artificial Sequence: Synthetic oligonucleotide
auuuccaaagcgacuaagc

SEQ ID NO: 321082 - RNA, 19 nt, Artificial Sequence
  Description of Artificial Sequence: Synthetic oligonucleotide
uguggugccgucaaaggca

SEQ ID NO: 321083 - RNA, 19 nt, Artificial Sequence
  Description of Artificial Sequence: Synthetic oligonucleotide
uguucgguagcucguagcc

SEQ ID NO: 321084 - RNA, 19 nt, Artificial Sequence
  Description of Artificial Sequence: Synthetic oligonucleotide
gguaacauaagaauucucc

SEQ ID NO: 321085 - RNA, 19 nt, Artificial Sequence
  Description of Artificial Sequence: Synthetic oligonucleotide
acauagauuucuggaagcc

SEQ ID NO: 321086 - RNA, 19 nt, Artificial Sequence
  Description of Artificial Sequence: Synthetic oligonucleotide
aaguaagauaagaagugug

SEQ ID NO: 321087 - RNA, 19 nt, Artificial Sequence
  Description of Artificial Sequence: Synthetic oligonucleotide
ugggugauagcguauaaaa

SEQ ID NO: 321088 - RNA, 19 nt, Artificial Sequence
  Description of Artificial Sequence: Synthetic oligonucleotide
aacugagauauggagagga

SEQ ID NO: 321089 - RNA, 19 nt, Artificial Sequence
  Description of Artificial Sequence: Synthetic oligonucleotide
uauauagugcucuucucaa

SEQ ID NO: 321090 - RNA, 19 nt, Artificial Sequence
  Description of Artificial Sequence: Synthetic oligonucleotide
cauacccucggcuaaugcg

SEQ ID NO: 321091 - RNA, 19 nt, Artificial Sequence
  Description of Artificial Sequence: Synthetic oligonucleotide
uuaaucaaaacacgcucau

SEQ ID NO: 321092 - RNA, 19 nt, Artificial Sequence
  Description of Artificial Sequence: Synthetic oligonucleotide
uaagauaagaaguguggau

SEQ ID NO: 321093 - RNA, 19 nt, Artificial Sequence
  Description of Artificial Sequence: Synthetic oligonucleotide
aagucggcguccuccagcg

SEQ ID NO: 321094 - RNA, 19 nt, Artificial Sequence
  Description of Artificial Sequence: Synthetic oligonucleotide
acuaacaacauagcucagg

SEQ ID NO: 321095 - RNA, 19 nt, Artificial Sequence
  Description of Artificial Sequence: Synthetic oligonucleotide
uauagugcucuucucaaua

SEQ ID NO: 321096 - RNA, 19 nt, Artificial Sequence
  Description of Artificial Sequence: Synthetic oligonucleotide
gcuaaggacauucagcaag

SEQ ID NO: 321097 - RNA, 19 nt, Artificial Sequence
  Description of Artificial Sequence: Synthetic oligonucleotide
aguaucugcccuucccuac

SEQ ID NO: 321098 - RNA, 19 nt, Artificial Sequence
  Description of Artificial Sequence: Synthetic oligonucleotide
gugauagcguauaaaagag

SEQ ID NO: 321099 - RNA, 19 nt, Artificial Sequence
  Description of Artificial Sequence: Synthetic oligonucleotide
aacucguggaagcgguacg

SEQ ID NO: 321100 - RNA, 19 nt, Artificial Sequence
  Description of Artificial Sequence: Synthetic oligonucleotide
ucucucucuaccugggucc

SEQ ID NO: 321101 - RNA, 19 nt, Artificial Sequence
  Description of Artificial Sequence: Synthetic oligonucleotide
acuaaagcguucccagggg

SEQ ID NO: 321102 - RNA, 19 nt, Artificial Sequence
  Description of Artificial Sequence: Synthetic oligonucleotide
caugccagggaaaucuugc

SEQ ID NO: 321103 - RNA, 19 nt, Artificial Sequence
  Description of Artificial Sequence: Synthetic oligonucleotide
uacguaugagggaacugag

SEQ ID NO: 321104 - RNA, 19 nt, Artificial Sequence
  Description of Artificial Sequence: Synthetic oligonucleotide
auacccucggcuaaugcgc

SEQ ID NO: 321105 - RNA, 19 nt, Artificial Sequence
  Description of Artificial Sequence: Synthetic oligonucleotide
agugucaauugucaagaca

SEQ ID NO: 321106 - RNA, 19 nt, Artificial Sequence
  Description of Artificial Sequence: Synthetic oligonucleotide
uccacaacuaaagcguucc

SEQ ID NO: 321107 - RNA, 19 nt, Artificial Sequence
  Description of Artificial Sequence: Synthetic oligonucleotide
uugaucgccucugagaacu

SEQ ID NO: 321108 - RNA, 19 nt, Artificial Sequence
  Description of Artificial Sequence: Synthetic oligonucleotide
uuguuuucgaagucggcgu

SEQ ID NO: 321109 - RNA, 19 nt, Artificial Sequence
  Description of Artificial Sequence: Synthetic oligonucleotide
ucagucagccuuuggcagg

SEQ ID NO: 321110 - RNA, 19 nt, Artificial Sequence
  Description of Artificial Sequence: Synthetic oligonucleotide
agaaacuuagggauuuuag

SEQ ID NO: 321111 - RNA, 19 nt, Artificial Sequence
  Description of Artificial Sequence: Synthetic oligonucleotide
auuaaucaaaacacgcuca

SEQ ID NO: 321112 - RNA, 19 nt, Artificial Sequence
  Description of Artificial Sequence: Synthetic oligonucleotide
uuagggauuuuagagguaa

SEQ ID NO: 321113 - RNA, 19 nt, Artificial Sequence
  Description of Artificial Sequence: Synthetic oligonucleotide
guagacucgaaguaccuca

SEQ ID NO: 321114 - RNA, 19 nt, Artificial Sequence
  Description of Artificial Sequence: Synthetic oligonucleotide
aguacugggaugauggaug

SEQ ID NO: 321115 - RNA, 19 nt, Artificial Sequence
  Description of Artificial Sequence: Synthetic oligonucleotide
aaacacgcucauucaaagu

SEQ ID NO: 321116 - RNA, 19 nt, Artificial Sequence
  Description of Artificial Sequence: Synthetic oligonucleotide
cuguagucggcucugggcc

SEQ ID NO: 321117 - RNA, 19 nt, Artificial Sequence
  Description of Artificial Sequence: Synthetic oligonucleotide
aauuaagggugggaguaug

SEQ ID NO: 321118 - RNA, 19 nt, Artificial Sequence
  Description of Artificial Sequence: Synthetic oligonucleotide
aacagacugccaugaaacu

SEQ ID NO: 321119 - RNA, 19 nt, Artificial Sequence
  Description of Artificial Sequence: Synthetic oligonucleotide
ugauagcguauaaaagagu

SEQ ID NO: 321120 - RNA, 19 nt, Artificial Sequence
  Description of Artificial Sequence: Synthetic oligonucleotide
agcacaugaaucuguucag

SEQ ID NO: 321121 - RNA, 19 nt, Artificial Sequence
  Description of Artificial Sequence: Synthetic oligonucleotide
aucaaaacacgcucauuca

SEQ ID NO: 321122 - RNA, 19 nt, Artificial Sequence
  Description of Artificial Sequence: Synthetic oligonucleotide
auagcucagguuucaaacu

SEQ ID NO: 321123 - RNA, 19 nt, Artificial Sequence
  Description of Artificial Sequence: Synthetic oligonucleotide
gaauuuugucauccuggcc

SEQ ID NO: 321124 - RNA, 19 nt, Artificial Sequence
  Description of Artificial Sequence: Synthetic oligonucleotide
uaaagcguucccaggggug

SEQ ID NO: 321125 - RNA, 19 nt, Artificial Sequence
  Description of Artificial Sequence: Synthetic oligonucleotide
acaauagugucaauuguca

SEQ ID NO: 321126 - RNA, 19 nt, Artificial Sequence
  Description of Artificial Sequence: Synthetic oligonucleotide
auaaguucucgcuucuuau

SEQ ID NO: 321127 - RNA, 19 nt, Artificial Sequence
  Description of Artificial Sequence: Synthetic oligonucleotide
auuuuagagguaagaggac

SEQ ID NO: 321128 - RNA, 19 nt, Artificial Sequence
  Description of Artificial Sequence: Synthetic oligonucleotide
aagcgacuaagcuuucgga

SEQ ID NO: 321129 - RNA, 19 nt, Artificial Sequence
  Description of Artificial Sequence: Synthetic oligonucleotide
uucccuacccuacguauga

SEQ ID NO: 321130 - RNA, 19 nt, Artificial Sequence
  Description of Artificial Sequence: Synthetic oligonucleotide
auugaugggugauagcgua

SEQ ID NO: 321131 - RNA, 19 nt, Artificial Sequence
  Description of Artificial Sequence: Synthetic oligonucleotide
aucuuuagccacgacccac

SEQ ID NO: 321132 - RNA, 19 nt, Artificial Sequence
  Description of Artificial Sequence: Synthetic oligonucleotide
gaagcgguacgccuccucc

SEQ ID NO: 321133 - RNA, 19 nt, Artificial Sequence
  Description of Artificial Sequence: Synthetic oligonucleotide
ugcgcugguagagcgagcg

SEQ ID NO: 321134 - RNA, 19 nt, Artificial Sequence
  Description of Artificial Sequence: Synthetic oligonucleotide
aaguaccucagguguguug

SEQ ID NO: 321135 - RNA, 19 nt, Artificial Sequence
  Description of Artificial Sequence: Synthetic oligonucleotide
aggcgaguggaacucgugg

SEQ ID NO: 321136 - RNA, 19 nt, Artificial Sequence
  Description of Artificial Sequence: Synthetic oligonucleotide
gaguuugcgcacugcagcc

SEQ ID NO: 321137 - RNA, 19 nt, Artificial Sequence
  Description of Artificial Sequence: Synthetic oligonucleotide
ccauugaugggugauagcg

SEQ ID NO: 321138 - RNA, 19 nt, Artificial Sequence
  Description of Artificial Sequence: Synthetic oligonucleotide
uuccaaagcgacuaagcuu

SEQ ID NO: 321139 - RNA, 19 nt, Artificial Sequence
  Description of Artificial Sequence: Synthetic oligonucleotide
auagcguauaaaagaguuc

SEQ ID NO: 321140 - RNA, 19 nt, Artificial Sequence
  Description of Artificial Sequence: Synthetic oligonucleotide
cacucgaauuuugucaucc

SEQ ID NO: 321141 - RNA, 19 nt, Artificial Sequence
  Description of Artificial Sequence: Synthetic oligonucleotide
gauaaguucucgcuucuua

SEQ ID NO: 321142 - RNA, 19 nt, Artificial Sequence
  Description of Artificial Sequence: Synthetic oligonucleotide
caguaaguaucugaugaag

SEQ ID NO: 321143 - RNA, 19 nt, Artificial Sequence
  Description of Artificial Sequence: Synthetic oligonucleotide
agccacgacccacucuucc

SEQ ID NO: 321144 - RNA, 19 nt, Artificial Sequence
  Description of Artificial Sequence: Synthetic oligonucleotide
aaggaaucuguagucggcu

SEQ ID NO: 321145 - RNA, 19 nt, Artificial Sequence
  Description of Artificial Sequence: Synthetic oligonucleotide
ugccauugaugggugauag

SEQ ID NO: 321146 - RNA, 19 nt, Artificial Sequence
  Description of Artificial Sequence: Synthetic oligonucleotide
guaaguaucugaugaaggu

SEQ ID NO: 321147 - RNA, 19 nt, Artificial Sequence
  Description of Artificial Sequence: Synthetic oligonucleotide
aagucauacccucggcuaa

SEQ ID NO: 321148 - RNA, 19 nt, Artificial Sequence
  Description of Artificial Sequence: Synthetic oligonucleotide
acgacaggagugccggggc

SEQ ID NO: 321149 - RNA, 19 nt, Artificial Sequence
  Description of Artificial Sequence: Synthetic oligonucleotide
ugugucccauuaaucaaaa

SEQ ID NO: 321150 - RNA, 19 nt, Artificial Sequence
  Description of Artificial Sequence: Synthetic oligonucleotide
guaagauaagaagugugga

SEQ ID NO: 321151 - RNA, 19 nt, Artificial Sequence
  Description of Artificial Sequence: Synthetic oligonucleotide
ugcaccgcguccaugccgc

SEQ ID NO: 321152 - RNA, 19 nt, Artificial Sequence
  Description of Artificial Sequence: Synthetic oligonucleotide
ucuacaguucugacccuga

SEQ ID NO: 321153 - RNA, 19 nt, Artificial Sequence
  Description of Artificial Sequence: Synthetic oligonucleotide
cauauauagugcucuucuc

SEQ ID NO: 321154 - RNA, 19 nt, Artificial Sequence
  Description of Artificial Sequence: Synthetic oligonucleotide
acuaagcuuucggaauggc

SEQ ID NO: 321155 - RNA, 19 nt, Artificial Sequence
  Description of Artificial Sequence: Synthetic oligonucleotide
guagccauccaacuugauc

SEQ ID NO: 321156 - RNA, 19 nt, Artificial Sequence
  Description of Artificial Sequence: Synthetic oligonucleotide
ugacaccugauaucuugcc

SEQ ID NO: 321157 - RNA, 19 nt, Artificial Sequence
  Description of Artificial Sequence: Synthetic oligonucleotide
uucgguagcucguagccau

SEQ ID NO: 321158 - RNA, 19 nt, Artificial Sequence
  Description of Artificial Sequence: Synthetic oligonucleotide
agcgacuaagcuuucggaa

SEQ ID NO: 321159 - RNA, 19 nt, Artificial Sequence
  Description of Artificial Sequence: Synthetic oligonucleotide
ugucaacccucucagcaaa

SEQ ID NO: 321160 - RNA, 19 nt, Artificial Sequence
  Description of Artificial Sequence: Synthetic oligonucleotide
gaagucauacccucggcua

SEQ ID NO: 321161 - RNA, 19 nt, Artificial Sequence
  Description of Artificial Sequence: Synthetic oligonucleotide
acucgcaucagcugcugug

SEQ ID NO: 321162 - RNA, 19 nt, Artificial Sequence
  Description of Artificial Sequence: Synthetic oligonucleotide
acucguggaagcgguacgc

SEQ ID NO: 321163 - RNA, 19 nt, Artificial Sequence
  Description of Artificial Sequence: Synthetic oligonucleotide
ccuacccuacguaugaggg

SEQ ID NO: 321164 - RNA, 19 nt, Artificial Sequence
  Description of Artificial Sequence: Synthetic oligonucleotide
guugaguuugcgcacugca

SEQ ID NO: 321165 - RNA, 19 nt, Artificial Sequence
  Description of Artificial Sequence: Synthetic oligonucleotide
ucacagucggccagcuucc

SEQ ID NO: 321166 - RNA, 19 nt, Artificial Sequence
  Description of Artificial Sequence: Synthetic oligonucleotide
gauagcguauaaaagaguu

SEQ ID NO: 321167 - RNA, 19 nt, Artificial Sequence
  Description of Artificial Sequence: Synthetic oligonucleotide
gucgcagucacagucggcc

SEQ ID NO: 321168 - RNA, 19 nt, Artificial Sequence
  Description of Artificial Sequence: Synthetic oligonucleotide
ucggcucugggccaauucu

SEQ ID NO: 321169 - RNA, 19 nt, Artificial Sequence
  Description of Artificial Sequence: Synthetic oligonucleotide
ugcgagcacaugaaucugu

SEQ ID NO: 321170 - RNA, 19 nt, Artificial Sequence
  Description of Artificial Sequence: Synthetic oligonucleotide
uacccuacguaugagggaa

SEQ ID NO: 321171 - RNA, 19 nt, Artificial Sequence
  Description of Artificial Sequence: Synthetic oligonucleotide
ugggacaaagcagauuuuc

SEQ ID NO: 321172 - RNA, 19 nt, Artificial Sequence
  Description of Artificial Sequence: Synthetic oligonucleotide
ugacagcuccagauggggc

SEQ ID NO: 321173 - RNA, 19 nt, Artificial Sequence
  Description of Artificial Sequence: Synthetic oligonucleotide
uguuuucgaagucggcguc

SEQ ID NO: 321174 - RNA, 19 nt, Artificial Sequence
  Description of Artificial Sequence: Synthetic oligonucleotide
aucuguagucggcucuggg

SEQ ID NO: 321175 - RNA, 19 nt, Artificial Sequence
  Description of Artificial Sequence: Synthetic oligonucleotide
uagcucguagccauccaac

SEQ ID NO: 321176 - RNA, 19 nt, Artificial Sequence
  Description of Artificial Sequence: Synthetic oligonucleotide
ugguaacauaagaauucuc

SEQ ID NO: 321177 - RNA, 19 nt, Artificial Sequence
  Description of Artificial Sequence: Synthetic oligonucleotide
uuuagccacgacccacucu

SEQ ID NO: 321178 - RNA, 19 nt, Artificial Sequence
  Description of Artificial Sequence: Synthetic oligonucleotide
auagugcucuucucaauau

SEQ ID NO: 321179 - RNA, 19 nt, Artificial Sequence
  Description of Artificial Sequence: Synthetic oligonucleotide
gacaccugauaucuugcca

SEQ ID NO: 321180 - RNA, 19 nt, Artificial Sequence
  Description of Artificial Sequence: Synthetic oligonucleotide
uaagggugggaguauguuu

SEQ ID NO: 321181 - RNA, 19 nt, Artificial Sequence
  Description of Artificial Sequence: Synthetic oligonucleotide
aaucuguagucggcucugg

SEQ ID NO: 321182 - RNA, 19 nt, Artificial Sequence
  Description of Artificial Sequence: Synthetic oligonucleotide
ucagccucgaagagccggc

SEQ ID NO: 321183 - RNA, 19 nt, Artificial Sequence
  Description of Artificial Sequence: Synthetic oligonucleotide
agacucaucagggaugcga

SEQ ID NO: 321184 - RNA, 19 nt, Artificial Sequence
  Description of Artificial Sequence: Synthetic oligonucleotide
ugaacaugcugccgcccgc

SEQ ID NO: 321185 - RNA, 19 nt, Artificial Sequence
  Description of Artificial Sequence: Synthetic oligonucleotide
agccgugcucgcuugauga

SEQ ID NO: 321186 - RNA, 19 nt, Artificial Sequence
  Description of Artificial Sequence: Synthetic oligonucleotide
uccccauacaucacagcaa

SEQ ID NO: 321187 - RNA, 19 nt, Artificial Sequence
  Description of Artificial Sequence: Synthetic oligonucleotide
acugagauauggagaggac

SEQ ID NO: 321188 - RNA, 19 nt, Artificial Sequence
  Description of Artificial Sequence: Synthetic oligonucleotide
cacaugaaucuguucagga

SEQ ID NO: 321189 - RNA, 19 nt, Artificial Sequence
  Description of Artificial Sequence: Synthetic oligonucleotide
caaaacacgcucauucaaa

SEQ ID NO: 321190 - RNA, 19 nt, Artificial Sequence
  Description of Artificial Sequence: Synthetic oligonucleotide
cagacugccaugaaacuaa

SEQ ID NO: 321191 - RNA, 19 nt, Artificial Sequence
  Description of Artificial Sequence: Synthetic oligonucleotide
gaaucuguagucggcucug

SEQ ID NO: 321192 - RNA, 19 nt, Artificial Sequence
  Description of Artificial Sequence: Synthetic oligonucleotide
cuguucgguagcucguagc

SEQ ID NO: 321193 - RNA, 19 nt, Artificial Sequence
  Description of Artificial Sequence: Synthetic oligonucleotide
cuacguaugagggaacuga

SEQ ID NO: 321194 - RNA, 19 nt, Artificial Sequence
  Description of Artificial Sequence: Synthetic oligonucleotide
uccauauauagugcucuuc

SEQ ID NO: 321195 - RNA, 19 nt, Artificial Sequence
  Description of Artificial Sequence: Synthetic oligonucleotide
ucguacacaggcuuaucuu

SEQ ID NO: 321196 - RNA, 19 nt, Artificial Sequence
  Description of Artificial Sequence: Synthetic oligonucleotide
acauagcucagguuucaaa

SEQ ID NO: 321197 - RNA, 19 nt, Artificial Sequence
  Description of Artificial Sequence: Synthetic oligonucleotide
cuuuggccagccgugcucg

SEQ ID NO: 321198 - RNA, 19 nt, Artificial Sequence
  Description of Artificial Sequence: Synthetic oligonucleotide
cuucccuacccuacguaug

SEQ ID NO: 321199 - RNA, 19 nt, Artificial Sequence
  Description of Artificial Sequence: Synthetic oligonucleotide
auauagugcucuucucaau

SEQ ID NO: 321200 - RNA, 19 nt, Artificial Sequence
  Description of Artificial Sequence: Synthetic oligonucleotide
ucucuaccuggguccaaag

SEQ ID NO: 321201 - RNA, 19 nt, Artificial Sequence
  Description of Artificial Sequence: Synthetic oligonucleotide
ggugccgucaaaggcaccg

SEQ ID NO: 321202 - RNA, 19 nt, Artificial Sequence
  Description of Artificial Sequence: Synthetic oligonucleotide
cuuagacuuuuaaucucca

SEQ ID NO: 321203 - RNA, 19 nt, Artificial Sequence
  Description of Artificial Sequence: Synthetic oligonucleotide
uggucagccuuguucaaua

SEQ ID NO: 321204 - RNA, 19 nt, Artificial Sequence
  Description of Artificial Sequence: Synthetic oligonucleotide
caauucucaugccagggaa

SEQ ID NO: 321205 - RNA, 19 nt, Artificial Sequence
  Description of Artificial Sequence: Synthetic oligonucleotide
uguagacucgaaguaccuc

SEQ ID NO: 321206 - RNA, 19 nt, Artificial Sequence
  Description of Artificial Sequence: Synthetic oligonucleotide
uggaagccugaagauaagu

SEQ ID NO: 321207 - RNA, 19 nt, Artificial Sequence
  Description of Artificial Sequence: Synthetic oligonucleotide
uugucaagacauugaucuc

SEQ ID NO: 321208 - RNA, 19 nt, Artificial Sequence
  Description of Artificial Sequence: Synthetic oligonucleotide
cucgaaguaccucaggugu

SEQ ID NO: 321209 - RNA, 19 nt, Artificial Sequence
  Description of Artificial Sequence: Synthetic oligonucleotide
caaagcgacuaagcuuucg

SEQ ID NO: 321210 - RNA, 19 nt, Artificial Sequence
  Description of Artificial Sequence: Synthetic oligonucleotide
gaacucguggaagcgguac

SEQ ID NO: 321211 - RNA, 19 nt, Artificial Sequence
  Description of Artificial Sequence: Synthetic oligonucleotide
gcuaaugcgcugcuucucc

SEQ ID NO: 321212 - RNA, 19 nt, Artificial Sequence
  Description of Artificial Sequence: Synthetic oligonucleotide
ugggcuuguuuucgaaguc

SEQ ID NO: 321213 - RNA, 19 nt, Artificial Sequence
  Description of Artificial Sequence: Synthetic oligonucleotide
uuagagguaagaggaccuc

SEQ ID NO: 321214 - RNA, 19 nt, Artificial Sequence
  Description of Artificial Sequence: Synthetic oligonucleotide
cuacaguucugacccugag

SEQ ID NO: 321215 - RNA, 19 nt, Artificial Sequence
  Description of Artificial Sequence: Synthetic oligonucleotide
acucgaauuuugucauccu

SEQ ID NO: 321216 - RNA, 19 nt, Artificial Sequence
  Description of Artificial Sequence: Synthetic oligonucleotide
ugguugggcagcugcgagc

SEQ ID NO: 321217 - RNA, 19 nt, Artificial Sequence
  Description of Artificial Sequence: Synthetic oligonucleotide
ggagaggacagaaccuugg

SEQ ID NO: 321218 - RNA, 19 nt, Artificial Sequence
  Description of Artificial Sequence: Synthetic oligonucleotide
ucuccccauacaucacagc

SEQ ID NO: 321219 - RNA, 19 nt, Artificial Sequence
  Description of Artificial Sequence: Synthetic oligonucleotide
cugagauauggagaggaca

SEQ ID NO: 321220 - RNA, 19 nt, Artificial Sequence
  Description of Artificial Sequence: Synthetic oligonucleotide
aucuacaguucugacccug

SEQ ID NO: 321221 - RNA, 19 nt, Artificial Sequence
  Description of Artificial Sequence: Synthetic oligonucleotide
uugaugggugauagcguau

SEQ ID NO: 321222 - RNA, 19 nt, Artificial Sequence
  Description of Artificial Sequence: Synthetic oligonucleotide
guguggaugguaacauaag

SEQ ID NO: 321223 - RNA, 19 nt, Artificial Sequence
  Description of Artificial Sequence: Synthetic oligonucleotide
aacuaacaacauagcucag

SEQ ID NO: 321224 - RNA, 19 nt, Artificial Sequence
  Description of Artificial Sequence: Synthetic oligonucleotide
cacgacaggagugccgggg

SEQ ID NO: 321225 - RNA, 19 nt, Artificial Sequence
  Description of Artificial Sequence: Synthetic oligonucleotide
auagcauacuucaggccca

SEQ ID NO: 321226 - RNA, 19 nt, Artificial Sequence
  Description of Artificial Sequence: Synthetic oligonucleotide
ucguugaguuugcgcacug

SEQ ID NO: 321227 - RNA, 19 nt, Artificial Sequence
  Description of Artificial Sequence: Synthetic oligonucleotide
ugaugggugauagcguaua

SEQ ID NO: 321228 - RNA, 19 nt, Artificial Sequence
  Description of Artificial Sequence: Synthetic oligonucleotide
gagcguucgcgcccgcccg

SEQ ID NO: 321229 - RNA, 19 nt, Artificial Sequence
  Description of Artificial Sequence: Synthetic oligonucleotide
uuuugucauccuggccccg

SEQ ID NO: 321230 - RNA, 19 nt, Artificial Sequence
  Description of Artificial Sequence: Synthetic oligonucleotide
cuugaucgccucugagaac

SEQ ID NO: 321231 - RNA, 19 nt, Artificial Sequence
  Description of Artificial Sequence: Synthetic oligonucleotide
cacaacuaaagcguuccca

SEQ ID NO: 321232 - RNA, 19 nt, Artificial Sequence
  Description of Artificial Sequence: Synthetic oligonucleotide
cuaggacuauacaauucaa

SEQ ID NO: 321233 - RNA, 19 nt, Artificial Sequence
  Description of Artificial Sequence: Synthetic oligonucleotide
ugaggucguugaguuugcg

SEQ ID NO: 321234 - RNA, 19 nt, Artificial Sequence
  Description of Artificial Sequence: Synthetic oligonucleotide
ucuugcccgugcuguacug

SEQ ID NO: 321235 - RNA, 19 nt, Artificial Sequence
  Description of Artificial Sequence: Synthetic oligonucleotide
ucaauaccacucgaauuuu

SEQ ID NO: 321236 - RNA, 19 nt, Artificial Sequence
  Description of Artificial Sequence: Synthetic oligonucleotide
uaaucaaaacacgcucauu

SEQ ID NO: 321237 - RNA, 19 nt, Artificial Sequence
  Description of Artificial Sequence: Synthetic oligonucleotide
cauguacuuuggccagccg

SEQ ID NO: 321238 - RNA, 19 nt, Artificial Sequence
  Description of Artificial Sequence: Synthetic oligonucleotide
agaggaccucaucuagagu

SEQ ID NO: 321239 - RNA, 19 nt, Artificial Sequence
  Description of Artificial Sequence: Synthetic oligonucleotide
guacgccuccuccagcggc

SEQ ID NO: 321240 - RNA, 19 nt, Artificial Sequence
  Description of Artificial Sequence: Synthetic oligonucleotide
cagauucauucauuucuga

SEQ ID NO: 321241 - RNA, 19 nt, Artificial Sequence
  Description of Artificial Sequence: Synthetic oligonucleotide
ggaauuaagggugggagua

SEQ ID NO: 321242 - RNA, 19 nt, Artificial Sequence
  Description of Artificial Sequence: Synthetic oligonucleotide
gggcuuguuuucgaagucg

SEQ ID NO: 321243 - RNA, 19 nt, Artificial Sequence
  Description of Artificial Sequence: Synthetic oligonucleotide
acagucggccagcuuccag

SEQ ID NO: 321244 - RNA, 19 nt, Artificial Sequence
  Description of Artificial Sequence: Synthetic oligonucleotide
guggaagcgguacgccucc

SEQ ID NO: 321245 - RNA, 19 nt, Artificial Sequence
  Description of Artificial Sequence: Synthetic oligonucleotide
ccaacuugaucuugaugag

SEQ ID NO: 321246 - RNA, 19 nt, Artificial Sequence
  Description of Artificial Sequence: Synthetic oligonucleotide
gaugggugauagcguauaa

SEQ ID NO: 321247 - RNA, 19 nt, Artificial Sequence
  Description of Artificial Sequence: Synthetic oligonucleotide
ggccaauucucaugccagg

SEQ ID NO: 321248 - RNA, 19 nt, Artificial Sequence
  Description of Artificial Sequence: Synthetic oligonucleotide
gggcauguucaucucuucc

SEQ ID NO: 321249 - RNA, 19 nt, Artificial Sequence
  Description of Artificial Sequence: Synthetic oligonucleotide
ggacaaagcagauuuuccu

SEQ ID NO: 321250 - RNA, 19 nt, Artificial Sequence
  Description of Artificial Sequence: Synthetic oligonucleotide
gccaauucucaugccaggg

SEQ ID NO: 321251 - RNA, 19 nt, Artificial Sequence
  Description of Artificial Sequence: Synthetic oligonucleotide
uggaggucaccauuuccuu

SEQ ID NO: 321252 - RNA, 19 nt, Artificial Sequence
  Description of Artificial Sequence: Synthetic oligonucleotide
uacccucggcuaaugcgcu

SEQ ID NO: 321253 - RNA, 19 nt, Artificial Sequence
  Description of Artificial Sequence: Synthetic oligonucleotide
ucaccgucugcaccgcguc

SEQ ID NO: 321254 - RNA, 19 nt, Artificial Sequence
  Description of Artificial Sequence: Synthetic oligonucleotide
caaagaguaggaugauucu

SEQ ID NO: 321255 - RNA, 19 nt, Artificial Sequence
  Description of Artificial Sequence: Synthetic oligonucleotide
cuugcccgugcuguacugg

SEQ ID NO: 321256 - RNA, 19 nt, Artificial Sequence
  Description of Artificial Sequence: Synthetic oligonucleotide
accucaucuagaguccagu

SEQ ID NO: 321257 - RNA, 19 nt, Artificial Sequence
  Description of Artificial Sequence: Synthetic oligonucleotide
cugcaccgcguccaugccg

SEQ ID NO: 321258 - RNA, 19 nt, Artificial Sequence
  Description of Artificial Sequence: Synthetic oligonucleotide
agcguucgcgcccgcccgc

SEQ ID NO: 321259 - RNA, 19 nt, Artificial Sequence
  Description of Artificial Sequence: Synthetic oligonucleotide
ugccggggcgugucgauga

SEQ ID NO: 321260 - RNA, 19 nt, Artificial Sequence
  Description of Artificial Sequence: Synthetic oligonucleotide
agacugccaugaaacuaac

SEQ ID NO: 321261 - RNA, 19 nt, Artificial Sequence
  Description of Artificial Sequence: Synthetic oligonucleotide
uggggcuagucucucucua

SEQ ID NO: 321262 - RNA, 19 nt, Artificial Sequence
  Description of Artificial Sequence: Synthetic oligonucleotide
guagcucguagccauccaa

SEQ ID NO: 321263 - RNA, 19 nt, Artificial Sequence
  Description of Artificial Sequence: Synthetic oligonucleotide
uagcauacuucaggcccag

SEQ ID NO: 321264 - RNA, 19 nt, Artificial Sequence
  Description of Artificial Sequence: Synthetic oligonucleotide
cccaaaaugagccaaugua

SEQ ID NO: 321265 - RNA, 19 nt, Artificial Sequence
  Description of Artificial Sequence: Synthetic oligonucleotide
cuaccuggguccaaagucu

SEQ ID NO: 321266 - RNA, 19 nt, Artificial Sequence
  Description of Artificial Sequence: Synthetic oligonucleotide
gggcuagucucucucuacc

SEQ ID NO: 321267 - RNA, 19 nt, Artificial Sequence
  Description of Artificial Sequence: Synthetic oligonucleotide
cuugcuccaguaaguaucu

SEQ ID NO: 321268 - RNA, 19 nt, Artificial Sequence
  Description of Artificial Sequence: Synthetic oligonucleotide
caugccgcccgagcguucg

SEQ ID NO: 321269 - RNA, 19 nt, Artificial Sequence
  Description of Artificial Sequence: Synthetic oligonucleotide
gcggaaaucugguauucuc

SEQ ID NO: 321270 - RNA, 19 nt, Artificial Sequence
  Description of Artificial Sequence: Synthetic oligonucleotide
auggggcuagucucucucu

SEQ ID NO: 321271 - RNA, 19 nt, Artificial Sequence
  Description of Artificial Sequence: Synthetic oligonucleotide
ugcacaccauguuucucuu

SEQ ID NO: 321272 - RNA, 19 nt, Artificial Sequence
  Description of Artificial Sequence: Synthetic oligonucleotide
ucgcagucacagucggcca

SEQ ID NO: 321273 - RNA, 19 nt, Artificial Sequence
  Description of Artificial Sequence: Synthetic oligonucleotide
cuacccuacguaugaggga

SEQ ID NO: 321274 - RNA, 19 nt, Artificial Sequence
  Description of Artificial Sequence: Synthetic oligonucleotide
gcugcgagcacaugaaucu

SEQ ID NO: 321275 - RNA, 19 nt, Artificial Sequence
  Description of Artificial Sequence: Synthetic oligonucleotide
gccugaagauaaguucucg

SEQ ID NO: 321276 - RNA, 19 nt, Artificial Sequence
  Description of Artificial Sequence: Synthetic oligonucleotide
cuuuagccacgacccacuc

SEQ ID NO: 321277 - RNA, 19 nt, Artificial Sequence
  Description of Artificial Sequence: Synthetic oligonucleotide
caucuagaguccaguaucu

SEQ ID NO: 321278 - RNA, 19 nt, Artificial Sequence
  Description of Artificial Sequence: Synthetic oligonucleotide
cugccgcccgccaacuagc

SEQ ID NO: 321279 - RNA, 19 nt, Artificial Sequence
  Description of Artificial Sequence: Synthetic oligonucleotide
agcgggugcugggacaaag

SEQ ID NO: 321280 - RNA, 19 nt, Artificial Sequence
  Description of Artificial Sequence: Synthetic oligonucleotide
ggaugauucugucaacccu

SEQ ID NO: 321281 - RNA, 19 nt, Artificial Sequence
  Description of Artificial Sequence: Synthetic oligonucleotide
cccuacccuacguaugagg

SEQ ID NO: 321282 - RNA, 19 nt, Artificial Sequence
  Description of Artificial Sequence: Synthetic oligonucleotide
caaguacugggaugaugga

SEQ ID NO: 321283 - RNA, 19 nt, Artificial Sequence
  Description of Artificial Sequence: Synthetic oligonucleotide
aucaaacaauagugucaau

SEQ ID NO: 321284 - RNA, 19 nt, Artificial Sequence
  Description of Artificial Sequence: Synthetic oligonucleotide
ccgcccgccaacuagcagc

SEQ ID NO: 321285 - RNA, 19 nt, Artificial Sequence
  Description of Artificial Sequence: Synthetic oligonucleotide
cacgcucauucaaaguaaa

SEQ ID NO: 321286 - RNA, 19 nt, Artificial Sequence
  Description of Artificial Sequence: Synthetic oligonucleotide
aggagugccggggcguguc

SEQ ID NO: 321287 - RNA, 19 nt, Artificial Sequence
  Description of Artificial Sequence: Synthetic oligonucleotide
gcugccgcccgccaacuag

SEQ ID NO: 321288 - RNA, 19 nt, Artificial Sequence
  Description of Artificial Sequence: Synthetic oligonucleotide
acguaugagggaacugaga

SEQ ID NO: 321289 - RNA, 19 nt, Artificial Sequence
  Description of Artificial Sequence: Synthetic oligonucleotide
ggucguugaguuugcgcac

SEQ ID NO: 321290 - RNA, 19 nt, Artificial Sequence
  Description of Artificial Sequence: Synthetic oligonucleotide
ccauuaaucaaaacacgcu

SEQ ID NO: 321291 - RNA, 19 nt, Artificial Sequence
  Description of Artificial Sequence: Synthetic oligonucleotide
ggcgaguggaacucgugga

SEQ ID NO: 321292 - RNA, 19 nt, Artificial Sequence
  Description of Artificial Sequence: Synthetic oligonucleotide
aguuugcgcacugcagccu

SEQ ID NO: 321293 - RNA, 19 nt, Artificial Sequence
  Description of Artificial Sequence: Synthetic oligonucleotide
cugccuacucugcugggga

SEQ ID NO: 321294 - RNA, 19 nt, Artificial Sequence
  Description of Artificial Sequence: Synthetic oligonucleotide
caggcgaguggaacucgug

SEQ ID NO: 321295 - RNA, 19 nt, Artificial Sequence
  Description of Artificial Sequence: Synthetic oligonucleotide
ucccuacccuacguaugag

SEQ ID NO: 321296 - RNA, 19 nt, Artificial Sequence
  Description of Artificial Sequence: Synthetic oligonucleotide
cucaucuagaguccaguau

SEQ ID NO: 321297 - RNA, 19 nt, Artificial Sequence
  Description of Artificial Sequence: Synthetic oligonucleotide
aggcauuuccaaagcgacu

SEQ ID NO: 321298 - RNA, 19 nt, Artificial Sequence
  Description of Artificial Sequence: Synthetic oligonucleotide
agcguauaaaagaguucau

SEQ ID NO: 321299 - RNA, 19 nt, Artificial Sequence
  Description of Artificial Sequence: Synthetic oligonucleotide
guacugggaugauggaugu

SEQ ID NO: 321300 - RNA, 19 nt, Artificial Sequence
  Description of Artificial Sequence: Synthetic oligonucleotide
gcuguucgguagcucguag

SEQ ID NO: 321301 - RNA, 19 nt, Artificial Sequence
  Description of Artificial Sequence: Synthetic oligonucleotide
cuaaagcguucccaggggu

SEQ ID NO: 321302 - RNA, 19 nt, Artificial Sequence
  Description of Artificial Sequence: Synthetic oligonucleotide
gagacucaucagggaugcg

SEQ ID NO: 321303 - RNA, 19 nt, Artificial Sequence
  Description of Artificial Sequence: Synthetic oligonucleotide
gacugccaugaaacuaaca

SEQ ID NO: 321304 - RNA, 19 nt, Artificial Sequence
  Description of Artificial Sequence: Synthetic oligonucleotide
ggccccauagacucgcauc

SEQ ID NO: 321305 - RNA, 19 nt, Artificial Sequence
  Description of Artificial Sequence: Synthetic oligonucleotide
cuuagggauuuuagaggua

SEQ ID NO: 321306 - RNA, 19 nt, Artificial Sequence
  Description of Artificial Sequence: Synthetic oligonucleotide
ggaaucuguagucggcucu

SEQ ID NO: 321307 - RNA, 19 nt, Artificial Sequence
  Description of Artificial Sequence: Synthetic oligonucleotide
agucauacccucggcuaau

SEQ ID NO: 321308 - RNA, 19 nt, Artificial Sequence
  Description of Artificial Sequence: Synthetic oligonucleotide
gguacgccuccuccagcgg

SEQ ID NO: 321309 - RNA, 19 nt, Artificial Sequence
  Description of Artificial Sequence: Synthetic oligonucleotide
caacauagcucagguuuca

SEQ ID NO: 321310 - RNA, 19 nt, Artificial Sequence
  Description of Artificial Sequence: Synthetic oligonucleotide
ggcgugucgaugaugcuga

SEQ ID NO: 321311 - RNA, 19 nt, Artificial Sequence
  Description of Artificial Sequence: Synthetic oligonucleotide
gagccggcgguugucugug

SEQ ID NO: 321312 - RNA, 19 nt, Artificial Sequence
  Description of Artificial Sequence: Synthetic oligonucleotide
gguugggcagcugcgagca

SEQ ID NO: 321313 - RNA, 19 nt, Artificial Sequence
  Description of Artificial Sequence: Synthetic oligonucleotide
gucggcucugggccaauuc

SEQ ID NO: 321314 - RNA, 19 nt, Artificial Sequence
  Description of Artificial Sequence: Synthetic oligonucleotide
cggggcgugucgaugaugc

SEQ ID NO: 321315 - RNA, 19 nt, Artificial Sequence
  Description of Artificial Sequence: Synthetic oligonucleotide
aagcguucccaggggugcu

SEQ ID NO: 321316 - RNA, 19 nt, Artificial Sequence
  Description of Artificial Sequence: Synthetic oligonucleotide
ucgguagcucguagccauc

SEQ ID NO: 321317 - RNA, 19 nt, Artificial Sequence
  Description of Artificial Sequence: Synthetic oligonucleotide
gaaccuuggcuaaggacau

SEQ ID NO: 321318 - RNA, 19 nt, Artificial Sequence
  Description of Artificial Sequence: Synthetic oligonucleotide
cgacuaagcuuucggaaug

SEQ ID NO: 321319 - RNA, 19 nt, Artificial Sequence
  Description of Artificial Sequence: Synthetic oligonucleotide
ggucagccuuguucaauac

SEQ ID NO: 321320 - RNA, 19 nt, Artificial Sequence
  Description of Artificial Sequence: Synthetic oligonucleotide
gugcgcccuccucagucag

SEQ ID NO: 321321 - RNA, 19 nt, Artificial Sequence
  Description of Artificial Sequence: Synthetic oligonucleotide
caccuugcgcugguagagc

SEQ ID NO: 321322 - RNA, 19 nt, Artificial Sequence
  Description of Artificial Sequence: Synthetic oligonucleotide
guccacaacuaaagcguuc

SEQ ID NO: 321323 - RNA, 19 nt, Artificial Sequence
  Description of Artificial Sequence: Synthetic oligonucleotide
agauaaguucucgcuucuu

SEQ ID NO: 321324 - RNA, 19 nt, Artificial Sequence
  Description of Artificial Sequence: Synthetic oligonucleotide
guucgguagcucguagcca

SEQ ID NO: 321325 - RNA, 19 nt, Artificial Sequence
  Description of Artificial Sequence: Synthetic oligonucleotide
gggaauuaagggugggagu

SEQ ID NO: 321326 - RNA, 19 nt, Artificial Sequence
  Description of Artificial Sequence: Synthetic oligonucleotide
acccuacguaugagggaac

SEQ ID NO: 321327 - RNA, 19 nt, Artificial Sequence
  Description of Artificial Sequence: Synthetic oligonucleotide
gaauuaagggugggaguau

SEQ ID NO: 321328 - RNA, 19 nt, Artificial Sequence
  Description of Artificial Sequence: Synthetic oligonucleotide
gcugguagagcgagcgcag

SEQ ID NO: 321329 - RNA, 19 nt, Artificial Sequence
  Description of Artificial Sequence: Synthetic oligonucleotide
augccgcccgagcguucgc

SEQ ID NO: 321330 - RNA, 19 nt, Artificial Sequence
  Description of Artificial Sequence: Synthetic oligonucleotide
guaggaccuggcagaaguc

SEQ ID NO: 321331 - RNA, 19 nt, Artificial Sequence
  Description of Artificial Sequence: Synthetic oligonucleotide
caccgucugcaccgcgucc

SEQ ID NO: 321332 - RNA, 19 nt, Artificial Sequence
  Description of Artificial Sequence: Synthetic oligonucleotide
agugccggggcgugucgau

SEQ ID NO: 321333 - RNA, 19 nt, Artificial Sequence
  Description of Artificial Sequence: Synthetic oligonucleotide
uccccacgacaggagugcc

SEQ ID NO: 321334 - RNA, 19 nt, Artificial Sequence
  Description of Artificial Sequence: Synthetic oligonucleotide
acgcucauucaaaguaaaa

SEQ ID NO: 321335 - RNA, 19 nt, Artificial Sequence
  Description of Artificial Sequence: Synthetic oligonucleotide
gcuguguguccacuugguc

SEQ ID NO: 321336 - RNA, 19 nt, Artificial Sequence
  Description of Artificial Sequence: Synthetic oligonucleotide
cgguacgccuccuccagcg

SEQ ID NO: 321337 - RNA, 19 nt, Artificial Sequence
  Description of Artificial Sequence: Synthetic oligonucleotide
ccaguaaguaucugaugaa

SEQ ID NO: 321338 - RNA, 19 nt, Artificial Sequence
  Description of Artificial Sequence: Synthetic oligonucleotide
guucgcgcccgcccgccug

SEQ ID NO: 321339 - RNA, 19 nt, Artificial Sequence
  Description of Artificial Sequence: Synthetic oligonucleotide
cagccucgaagagccggcg

SEQ ID NO: 321340 - RNA, 19 nt, Artificial Sequence
  Description of Artificial Sequence: Synthetic oligonucleotide
ccacaacuaaagcguuccc

SEQ ID NO: 321341 - RNA, 19 nt, Artificial Sequence
  Description of Artificial Sequence: Synthetic oligonucleotide
uagccacgacccacucuuc

SEQ ID NO: 321342 - RNA, 19 nt, Artificial Sequence
  Description of Artificial Sequence: Synthetic oligonucleotide
accccagcggugcgcccuc

SEQ ID NO: 321343 - RNA, 19 nt, Artificial Sequence
  Description of Artificial Sequence: Synthetic oligonucleotide
caaagucucuaggacuaua

SEQ ID NO: 321344 - RNA, 19 nt, Artificial Sequence
  Description of Artificial Sequence: Synthetic oligonucleotide
gcgacuaagcuuucggaau

SEQ ID NO: 321345 - RNA, 19 nt, Artificial Sequence
  Description of Artificial Sequence: Synthetic oligonucleotide
cgucccauccagcugaaca

SEQ ID NO: 321346 - RNA, 19 nt, Artificial Sequence
  Description of Artificial Sequence: Synthetic oligonucleotide
cucuaccuggguccaaagu

SEQ ID NO: 321347 - RNA, 19 nt, Artificial Sequence
  Description of Artificial Sequence: Synthetic oligonucleotide
cguggaagcgguacgccuc

SEQ ID NO: 321348 - RNA, 19 nt, Artificial Sequence
  Description of Artificial Sequence: Synthetic oligonucleotide
gcuuaucuuuagccacgac

SEQ ID NO: 321349 - RNA, 19 nt, Artificial Sequence
  Description of Artificial Sequence: Synthetic oligonucleotide
cccauacaucacagcaaug

SEQ ID NO: 321350 - RNA, 19 nt, Artificial Sequence
  Description of Artificial Sequence: Synthetic oligonucleotide
cucucuaccuggguccaaa

SEQ ID NO: 321351 - RNA, 19 nt, Artificial Sequence
  Description of Artificial Sequence: Synthetic oligonucleotide
ccuacguaugagggaacug

SEQ ID NO: 321352 - RNA, 19 nt, Artificial Sequence
  Description of Artificial Sequence: Synthetic oligonucleotide
guuugcgcacugcagccuu

SEQ ID NO: 321353 - RNA, 19 nt, Artificial Sequence
  Description of Artificial Sequence: Synthetic oligonucleotide
cccggaaggccuugaucgc

SEQ ID NO: 321354 - RNA, 19 nt, Artificial Sequence
  Description of Artificial Sequence: Synthetic oligonucleotide
ggugcgcccuccucaguca

SEQ ID NO: 321355 - RNA, 19 nt, Artificial Sequence
  Description of Artificial Sequence: Synthetic oligonucleotide
ggaagcgguacgccuccuc

SEQ ID NO: 321356 - RNA, 19 nt, Artificial Sequence
  Description of Artificial Sequence: Synthetic oligonucleotide
ggucuugcccgugcuguac

SEQ ID NO: 321357 - RNA, 19 nt, Artificial Sequence
  Description of Artificial Sequence: Synthetic oligonucleotide
ggcuuaucuuuagccacga

SEQ ID NO: 321358 - RNA, 19 nt, Artificial Sequence
  Description of Artificial Sequence: Synthetic oligonucleotide
ccccacgacaggagugccg

SEQ ID NO: 321359 - RNA, 19 nt, Artificial Sequence
  Description of Artificial Sequence: Synthetic oligonucleotide
cucucucuaccugggucca

SEQ ID NO: 321360 - RNA, 19 nt, Artificial Sequence
  Description of Artificial Sequence: Synthetic oligonucleotide
gucguugaguuugcgcacu

SEQ ID NO: 321361 - RNA, 19 nt, Artificial Sequence
  Description of Artificial Sequence: Synthetic oligonucleotide
gucuugcccgugcuguacu

SEQ ID NO: 321362 - RNA, 19 nt, Artificial Sequence
  Description of Artificial Sequence: Synthetic oligonucleotide
ucucucuaccuggguccaa

SEQ ID NO: 321363 - RNA, 19 nt, Artificial Sequence
  Description of Artificial Sequence: Synthetic oligonucleotide
ggccucgaucagcuugggc

SEQ ID NO: 321364 - RNA, 19 nt, Artificial Sequence
  Description of Artificial Sequence: Synthetic oligonucleotide
gcagcugcgagcacaugaa

SEQ ID NO: 321365 - RNA, 19 nt, Artificial Sequence
  Description of Artificial Sequence: Synthetic oligonucleotide
guugggcagcugcgagcac

SEQ ID NO: 321366 - RNA, 19 nt, Artificial Sequence
  Description of Artificial Sequence: Synthetic oligonucleotide
gagugccggggcgugucga

SEQ ID NO: 321367 - RNA, 19 nt, Artificial Sequence
  Description of Artificial Sequence: Synthetic oligonucleotide
cgagcguucgcgcccgccc

SEQ ID NO: 321368 - RNA, 19 nt, Artificial Sequence
  Description of Artificial Sequence: Synthetic oligonucleotide
guagucggcucugggccaa

SEQ ID NO: 321369 - RNA, 19 nt, Artificial Sequence
  Description of Artificial Sequence: Synthetic oligonucleotide
ggcguccuccagcgcaggc

SEQ ID NO: 321370 - RNA, 19 nt, Artificial Sequence
  Description of Artificial Sequence: Synthetic oligonucleotide
ccucaucuagaguccagua

SEQ ID NO: 321371 - RNA, 19 nt, Artificial Sequence
  Description of Artificial Sequence: Synthetic oligonucleotide
gugccggggcgugucgaug

SEQ ID NO: 321372 - RNA, 19 nt, Artificial Sequence
  Description of Artificial Sequence: Synthetic oligonucleotide
gucaccgucugcaccgcgu

SEQ ID NO: 321373 - RNA, 19 nt, Artificial Sequence
  Description of Artificial Sequence: Synthetic oligonucleotide
cgcccgccaacuagcagcc

SEQ ID NO: 321374 - RNA, 19 nt, Artificial Sequence
  Description of Artificial Sequence: Synthetic oligonucleotide
gcgguacgccuccuccagc

SEQ ID NO: 321375 - RNA, 19 nt, Artificial Sequence
  Description of Artificial Sequence: Synthetic oligonucleotide
augcugccgcccgccaacu

SEQ ID NO: 321376 - RNA, 19 nt, Artificial Sequence
  Description of Artificial Sequence: Synthetic oligonucleotide
caccugauaucuugccauu

SEQ ID NO: 321377 - RNA, 19 nt, Artificial Sequence
  Description of Artificial Sequence: Synthetic oligonucleotide
cguugaguuugcgcacugc

SEQ ID NO: 321378 - RNA, 19 nt, Artificial Sequence
  Description of Artificial Sequence: Synthetic oligonucleotide
ccccauacaucacagcaau

SEQ ID NO: 321379 - RNA, 19 nt, Artificial Sequence
  Description of Artificial Sequence: Synthetic oligonucleotide
gccgcccgccaacuagcag

SEQ ID NO: 321380 - RNA, 19 nt, Artificial Sequence
  Description of Artificial Sequence: Synthetic oligonucleotide
ccuucccuacccuacguau

SEQ ID NO: 321381 - RNA, 19 nt, Artificial Sequence
  Description of Artificial Sequence: Synthetic oligonucleotide
agcguucccaggggugcuu

SEQ ID NO: 321382 - RNA, 19 nt, Artificial Sequence
  Description of Artificial Sequence: Synthetic oligonucleotide
ccucagucuccccauacau

SEQ ID NO: 321383 - RNA, 19 nt, Artificial Sequence
  Description of Artificial Sequence: Synthetic oligonucleotide
cgcugguagagcgagcgca

SEQ ID NO: 321384 - RNA, 19 nt, Artificial Sequence
  Description of Artificial Sequence: Synthetic oligonucleotide
ccgcggaaaucugguauuc

SEQ ID NO: 321385 - RNA, 19 nt, Artificial Sequence
  Description of Artificial Sequence: Synthetic oligonucleotide
aggccgcccgucaccgucu

SEQ ID NO: 321386 - RNA, 19 nt, Artificial Sequence
  Description of Artificial Sequence: Synthetic oligonucleotide
cagaggcugugcccaaaau

SEQ ID NO: 321387 - RNA, 19 nt, Artificial Sequence
  Description of Artificial Sequence: Synthetic oligonucleotide
gcccgagcguucgcgcccg

SEQ ID NO: 321388 - RNA, 19 nt, Artificial Sequence
  Description of Artificial Sequence: Synthetic oligonucleotide
agucggcucugggccaauu

SEQ ID NO: 321389 - RNA, 19 nt, Artificial Sequence
  Description of Artificial Sequence: Synthetic oligonucleotide
gugcccaaaaugagccaau

SEQ ID NO: 321390 - RNA, 19 nt, Artificial Sequence
  Description of Artificial Sequence: Synthetic oligonucleotide
cggugcgcccuccucaguc

SEQ ID NO: 321391 - RNA, 19 nt, Artificial Sequence
  Description of Artificial Sequence: Synthetic oligonucleotide
gcgcaggcgaguggaacuc

SEQ ID NO: 321392 - RNA, 19 nt, Artificial Sequence
  Description of Artificial Sequence: Synthetic oligonucleotide
cgucgcagucacagucggc

SEQ ID NO: 321393 - RNA, 19 nt, Artificial Sequence
  Description of Artificial Sequence: Synthetic oligonucleotide
uagucggcucugggccaau

SEQ ID NO: 321394 - RNA, 19 nt, Artificial Sequence
  Description of Artificial Sequence: Synthetic oligonucleotide
gguccacaacuaaagcguu

SEQ ID NO: 321395 - RNA, 19 nt, Artificial Sequence
  Description of Artificial Sequence: Synthetic oligonucleotide
ggcuguucgguagcucgua

SEQ ID NO: 321396 - RNA, 19 nt, Artificial Sequence
  Description of Artificial Sequence: Synthetic oligonucleotide
cagcugcgagcacaugaau

SEQ ID NO: 321397 - RNA, 19 nt, Artificial Sequence
  Description of Artificial Sequence: Synthetic oligonucleotide
ggaacucguggaagcggua

SEQ ID NO: 321398 - RNA, 19 nt, Artificial Sequence
  Description of Artificial Sequence: Synthetic oligonucleotide
ccuuucccaccccagcggu

SEQ ID NO: 321399 - RNA, 19 nt, Artificial Sequence
  Description of Artificial Sequence: Synthetic oligonucleotide
cgucaccgucugcaccgcg

SEQ ID NO: 321400 - RNA, 19 nt, Artificial Sequence
  Description of Artificial Sequence: Synthetic oligonucleotide
ccgcccgucaccgucugca

SEQ ID NO: 321401 - RNA, 19 nt, Artificial Sequence
  Description of Artificial Sequence: Synthetic oligonucleotide
ccccuccccauagcccugg

SEQ ID NO: 321402 - RNA, 19 nt, Artificial Sequence
  Description of Artificial Sequence: Synthetic oligonucleotide
ccccgcggaaaucugguau

SEQ ID NO: 321403 - RNA, 19 nt, Artificial Sequence
  Description of Artificial Sequence: Synthetic oligonucleotide
ggcccuucuguggugccgu

SEQ ID NO: 321404 - RNA, 19 nt, Artificial Sequence
  Description of Artificial Sequence: Synthetic oligonucleotide
gcguucccaggggugcuuc

SEQ ID NO: 321405 - RNA, 19 nt, Artificial Sequence
  Description of Artificial Sequence: Synthetic oligonucleotide
ccgugcuguacuggcccac

SEQ ID NO: 321406 - RNA, 19 nt, Artificial Sequence
  Description of Artificial Sequence: Synthetic oligonucleotide
cccgugcuguacuggccca

SEQ ID NO: 321407 - RNA, 19 nt, Artificial Sequence
  Description of Artificial Sequence: Synthetic oligonucleotide
gcaccgcguccaugccgcc

SEQ ID NO: 321408 - RNA, 19 nt, Artificial Sequence
  Description of Artificial Sequence: Synthetic oligonucleotide
ccgagcguucgcgcccgcc

SEQ ID NO: 321409 - RNA, 19 nt, Artificial Sequence
  Description of Artificial Sequence: Synthetic oligonucleotide
gcguucgcgcccgcccgcc

SEQ ID NO: 321410 - RNA, 19 nt, Artificial Sequence
  Description of Artificial Sequence: Synthetic oligonucleotide
cgccugccgucccauccag

SEQ ID NO: 321411 - RNA, 19 nt, Artificial Sequence
  Description of Artificial Sequence: Synthetic oligonucleotide
cccgcggaaaucugguauu

SEQ ID NO: 321412 - RNA, 19 nt, Artificial Sequence
  Description of Artificial Sequence: Synthetic oligonucleotide
ccggggcgugucgaugaug

SEQ ID NO: 321413 - RNA, 19 nt, Artificial Sequence
  Description of Artificial Sequence: Synthetic oligonucleotide
ccaugccgcccgagcguuc

SEQ ID NO: 321414 - RNA, 19 nt, Artificial Sequence
  Description of Artificial Sequence: Synthetic oligonucleotide
gccgcccgucaccgucugc

SEQ ID NO: 321415 - RNA, 19 nt, Artificial Sequence
  Description of Artificial Sequence: Synthetic oligonucleotide
ggggcgugucgaugaugcu

SEQ ID NO: 321416 - RNA, 19 nt, Artificial Sequence
  Description of Artificial Sequence: Synthetic oligonucleotide
ggccccggaaggccuugau

SEQ ID NO: 321417 - RNA, 19 nt, Artificial Sequence
  Description of Artificial Sequence: Synthetic oligonucleotide
cagcgggugcugggacaaa

SEQ ID NO: 321418 - RNA, 19 nt, Artificial Sequence
  Description of Artificial Sequence: Synthetic oligonucleotide
cgcggaaaucugguauucu

SEQ ID NO: 321419 - RNA, 19 nt, Artificial Sequence
  Description of Artificial Sequence: Synthetic oligonucleotide
gccgucccauccagcugaa

SEQ ID NO: 321420 - RNA, 19 nt, Artificial Sequence
  Description of Artificial Sequence: Synthetic oligonucleotide
cggcguccuccagcgcagg

SEQ ID NO: 321421 - RNA, 19 nt, Artificial Sequence
  Description of Artificial Sequence: Synthetic oligonucleotide
gcgugucgaugaugcugau

SEQ ID NO: 321422 - RNA, 19 nt, Artificial Sequence
  Description of Artificial Sequence: Synthetic oligonucleotide
gcggugcgcccuccucagu

SEQ ID NO: 321423 - RNA, 19 nt, Artificial Sequence
  Description of Artificial Sequence: Synthetic oligonucleotide
ccgcguccaugccgcccga

SEQ ID NO: 321424 - RNA, 19 nt, Artificial Sequence
  Description of Artificial Sequence: Synthetic oligonucleotide
cguucgcgcccgcccgccu

SEQ ID NO: 321425 - RNA, 19 nt, Artificial Sequence
  Description of Artificial Sequence: Synthetic oligonucleotide
cgcccgccugccgucccau

SEQ ID NO: 321426 - RNA, 19 nt, Artificial Sequence
  Description of Artificial Sequence: Synthetic oligonucleotide
uagaggaucgguaagaagg

SEQ ID NO: 321427 - RNA, 19 nt, Artificial Sequence
  Description of Artificial Sequence: Synthetic oligonucleotide
acaaguagaaaacuguccc

SEQ ID NO: 321428 - RNA, 19 nt, Artificial Sequence
  Description of Artificial Sequence: Synthetic oligonucleotide
aaagggaucagacuuagug

SEQ ID NO: 321429 - RNA, 19 nt, Artificial Sequence
  Description of Artificial Sequence: Synthetic oligonucleotide
aauacucggagcuugacug

SEQ ID NO: 321430 - RNA, 19 nt, Artificial Sequence
  Description of Artificial Sequence: Synthetic oligonucleotide
uuagugauagguuagugcc

SEQ ID NO: 321431 - RNA, 19 nt, Artificial Sequence
  Description of Artificial Sequence: Synthetic oligonucleotide
ucuaaaguggauucgcucg

SEQ ID NO: 321432 - RNA, 19 nt, Artificial Sequence
  Description of Artificial Sequence: Synthetic oligonucleotide
uucguauucagauagcccc

SEQ ID NO: 321433 - RNA, 19 nt, Artificial Sequence
  Description of Artificial Sequence: Synthetic oligonucleotide
aauacaagucacauucugc

SEQ ID NO: 321434 - RNA, 19 nt, Artificial Sequence
  Description of Artificial Sequence: Synthetic oligonucleotide
cugaauuggaaguagaaac

SEQ ID NO: 321435 - RNA, 19 nt, Artificial Sequence
  Description of Artificial Sequence: Synthetic oligonucleotide
gauaccgagagauuuuagg

SEQ ID NO: 321436 - RNA, 19 nt, Artificial Sequence
  Description of Artificial Sequence: Synthetic oligonucleotide
aaguggauucgcucgauac

SEQ ID NO: 321437 - RNA, 19 nt, Artificial Sequence
  Description of Artificial Sequence: Synthetic oligonucleotide
aaccuagcuaaugaguucc

SEQ ID NO: 321438 - RNA, 19 nt, Artificial Sequence
  Description of Artificial Sequence: Synthetic oligonucleotide
auaccgagagauuuuaggg

SEQ ID NO: 321439 - RNA, 19 nt, Artificial Sequence
  Description of Artificial Sequence: Synthetic oligonucleotide
aaacucccuaaacaugccc

SEQ ID NO: 321440 - RNA, 19 nt, Artificial Sequence
  Description of Artificial Sequence: Synthetic oligonucleotide
ucuacgaugauguggguug

SEQ ID NO: 321441 - RNA, 19 nt, Artificial Sequence
  Description of Artificial Sequence: Synthetic oligonucleotide
uggguuucuucccacaccg

SEQ ID NO: 321442 - RNA, 19 nt, Artificial Sequence
  Description of Artificial Sequence: Synthetic oligonucleotide
cuuagugauagguuagugc

SEQ ID NO: 321443 - RNA, 19 nt, Artificial Sequence
  Description of Artificial Sequence: Synthetic oligonucleotide
ugugauucacuuccaaacc

SEQ ID NO: 321444 - RNA, 19 nt, Artificial Sequence
  Description of Artificial Sequence: Synthetic oligonucleotide
ugagccaugacucgggagc

SEQ ID NO: 321445 - RNA, 19 nt, Artificial Sequence
  Description of Artificial Sequence: Synthetic oligonucleotide
aaaccuagcuaaugaguuc

SEQ ID NO: 321446 - RNA, 19 nt, Artificial Sequence
  Description of Artificial Sequence: Synthetic oligonucleotide
acacgauucaucuacgaug

SEQ ID NO: 321447 - RNA, 19 nt, Artificial Sequence
  Description of Artificial Sequence: Synthetic oligonucleotide
acucguauaaaagggaagg

SEQ ID NO: 321448 - RNA, 19 nt, Artificial Sequence
  Description of Artificial Sequence: Synthetic oligonucleotide
aacucccuaaacaugcccc

SEQ ID NO: 321449 - RNA, 19 nt, Artificial Sequence
  Description of Artificial Sequence: Synthetic oligonucleotide
cauagugaguagaggaucg

SEQ ID NO: 321450 - RNA, 19 nt, Artificial Sequence
  Description of Artificial Sequence: Synthetic oligonucleotide
aguggauucgcucgauacc

SEQ ID NO: 321451 - RNA, 19 nt, Artificial Sequence
  Description of Artificial Sequence: Synthetic oligonucleotide
aggcacacgauucaucuac

SEQ ID NO: 321452 - RNA, 19 nt, Artificial Sequence
  Description of Artificial Sequence: Synthetic oligonucleotide
agcaacuaaggccuugugg

SEQ ID NO: 321453 - RNA, 19 nt, Artificial Sequence
  Description of Artificial Sequence: Synthetic oligonucleotide
aagggaucagacuuaguga

SEQ ID NO: 321454 - RNA, 19 nt, Artificial Sequence
  Description of Artificial Sequence: Synthetic oligonucleotide
gguaguuuaagccucauga

SEQ ID NO: 321455 - RNA, 19 nt, Artificial Sequence
  Description of Artificial Sequence: Synthetic oligonucleotide
uauuacaugcuuuggaaua

SEQ ID NO: 321456 - RNA, 19 nt, Artificial Sequence
  Description of Artificial Sequence: Synthetic oligonucleotide
agccucaugauucaaucuc

SEQ ID NO: 321457 - RNA, 19 nt, Artificial Sequence
  Description of Artificial Sequence: Synthetic oligonucleotide
gguuuucguauucagauag

SEQ ID NO: 321458 - RNA, 19 nt, Artificial Sequence
  Description of Artificial Sequence: Synthetic oligonucleotide
aggguuaugggguacucgg

SEQ ID NO: 321459 - RNA, 19 nt, Artificial Sequence
  Description of Artificial Sequence: Synthetic oligonucleotide
uuuucguauucagauagcc

SEQ ID NO: 321460 - RNA, 19 nt, Artificial Sequence
  Description of Artificial Sequence: Synthetic oligonucleotide
agguacugaacuuggucgc

SEQ ID NO: 321461 - RNA, 19 nt, Artificial Sequence
  Description of Artificial Sequence: Synthetic oligonucleotide
ucuucgugccaaaagaguc

SEQ ID NO: 321462 - RNA, 19 nt, Artificial Sequence
  Description of Artificial Sequence: Synthetic oligonucleotide
ugaacaagaaacucguaua

SEQ ID NO: 321463 - RNA, 19 nt, Artificial Sequence
  Description of Artificial Sequence: Synthetic oligonucleotide
ugaguagacaccauuucuc

SEQ ID NO: 321464 - RNA, 19 nt, Artificial Sequence
  Description of Artificial Sequence: Synthetic oligonucleotide
augacuaaggaccaguuua

SEQ ID NO: 321465 - RNA, 19 nt, Artificial Sequence
  Description of Artificial Sequence: Synthetic oligonucleotide
acggaauuaugucuucugg

SEQ ID NO: 321466 - RNA, 19 nt, Artificial Sequence
  Description of Artificial Sequence: Synthetic oligonucleotide
auucgcucgauaccgagag

SEQ ID NO: 321467 - RNA, 19 nt, Artificial Sequence
  Description of Artificial Sequence: Synthetic oligonucleotide
aaggauugacacuguacug

SEQ ID NO: 321468 - RNA, 19 nt, Artificial Sequence
  Description of Artificial Sequence: Synthetic oligonucleotide
ucuugauaggaauuccaca

SEQ ID NO: 321469 - RNA, 19 nt, Artificial Sequence
  Description of Artificial Sequence: Synthetic oligonucleotide
aagggauuguagaugccgc

SEQ ID NO: 321470 - RNA, 19 nt, Artificial Sequence
  Description of Artificial Sequence: Synthetic oligonucleotide
auuacaugcuuuggaauac

SEQ ID NO: 321471 - RNA, 19 nt, Artificial Sequence
  Description of Artificial Sequence: Synthetic oligonucleotide
aaucuuguuuugucaccgg

SEQ ID NO: 321472 - RNA, 19 nt, Artificial Sequence
  Description of Artificial Sequence: Synthetic oligonucleotide
agaccaaucuuguuuuguc

SEQ ID NO: 321473 - RNA, 19 nt, Artificial Sequence
  Description of Artificial Sequence: Synthetic oligonucleotide
cauaguagcugguguaggg

SEQ ID NO: 321474 - RNA, 19 nt, Artificial Sequence
  Description of Artificial Sequence: Synthetic oligonucleotide
aucgguaagaaggauugac

SEQ ID NO: 321475 - RNA, 19 nt, Artificial Sequence
  Description of Artificial Sequence: Synthetic oligonucleotide
accacguuaaggcacacga

SEQ ID NO: 321476 - RNA, 19 nt, Artificial Sequence
  Description of Artificial Sequence: Synthetic oligonucleotide
acuaaggaccaguuuaaca

SEQ ID NO: 321477 - RNA, 19 nt, Artificial Sequence
  Description of Artificial Sequence: Synthetic oligonucleotide
gguaagggauuguagaugc

SEQ ID NO: 321478 - RNA, 19 nt, Artificial Sequence
  Description of Artificial Sequence: Synthetic oligonucleotide
auacaaguagaaaacuguc

SEQ ID NO: 321479 - RNA, 19 nt, Artificial Sequence
  Description of Artificial Sequence: Synthetic oligonucleotide
uuguuauucccuuccuaag

SEQ ID NO: 321480 - RNA, 19 nt, Artificial Sequence
  Description of Artificial Sequence: Synthetic oligonucleotide
guaccagccacgcaggugc

SEQ ID NO: 321481 - RNA, 19 nt, Artificial Sequence
  Description of Artificial Sequence: Synthetic oligonucleotide
uccaguguuuuguaagggc

SEQ ID NO: 321482 - RNA, 19 nt, Artificial Sequence
  Description of Artificial Sequence: Synthetic oligonucleotide
uuucuaaaguggauucgcu

SEQ ID NO: 321483 - RNA, 19 nt, Artificial Sequence
  Description of Artificial Sequence: Synthetic oligonucleotide
ugcguaucccgagauauag

SEQ ID NO: 321484 - RNA, 19 nt, Artificial Sequence
  Description of Artificial Sequence: Synthetic oligonucleotide
uuggucgcugcccagcaag

SEQ ID NO: 321485 - RNA, 19 nt, Artificial Sequence
  Description of Artificial Sequence: Synthetic oligonucleotide
auauaguaaccagaaggag

SEQ ID NO: 321486 - RNA, 19 nt, Artificial Sequence
  Description of Artificial Sequence: Synthetic oligonucleotide
guggauucgcucgauaccg

SEQ ID NO: 321487 - RNA, 19 nt, Artificial Sequence
  Description of Artificial Sequence: Synthetic oligonucleotide
gucucuauucacaauauga

SEQ ID NO: 321488 - RNA, 19 nt, Artificial Sequence
  Description of Artificial Sequence: Synthetic oligonucleotide
uuucugacggaauuauguc

SEQ ID NO: 321489 - RNA, 19 nt, Artificial Sequence
  Description of Artificial Sequence: Synthetic oligonucleotide
gaagagucgggguuccaag

SEQ ID NO: 321490 - RNA, 19 nt, Artificial Sequence
  Description of Artificial Sequence: Synthetic oligonucleotide
aaugacuaaggaccaguuu

SEQ ID NO: 321491 - RNA, 19 nt, Artificial Sequence
  Description of Artificial Sequence: Synthetic oligonucleotide
uucaaaccuugucauggug

SEQ ID NO: 321492 - RNA, 19 nt, Artificial Sequence
  Description of Artificial Sequence: Synthetic oligonucleotide
cugcauauggugcguaucc

SEQ ID NO: 321493 - RNA, 19 nt, Artificial Sequence
  Description of Artificial Sequence: Synthetic oligonucleotide
gacggaauuaugucuucug

SEQ ID NO: 321494 - RNA, 19 nt, Artificial Sequence
  Description of Artificial Sequence: Synthetic oligonucleotide
ugacuaaggaccaguuuaa

SEQ ID NO: 321495 - RNA, 19 nt, Artificial Sequence
  Description of Artificial Sequence: Synthetic oligonucleotide
aaggguuaugggguacucg

SEQ ID NO: 321496 - RNA, 19 nt, Artificial Sequence
  Description of Artificial Sequence: Synthetic oligonucleotide
aacuaaggccuuguggaug

SEQ ID NO: 321497 - RNA, 19 nt, Artificial Sequence
  Description of Artificial Sequence: Synthetic oligonucleotide
ucaaagcuagucugugggc

SEQ ID NO: 321498 - RNA, 19 nt, Artificial Sequence
  Description of Artificial Sequence: Synthetic oligonucleotide
uccugaauuggaaguagaa

SEQ ID NO: 321499 - RNA, 19 nt, Artificial Sequence
  Description of Artificial Sequence: Synthetic oligonucleotide
acuguaauacaagucacau

SEQ ID NO: 321500 - RNA, 19 nt, Artificial Sequence
  Description of Artificial Sequence: Synthetic oligonucleotide
cacgauucaucuacgauga

SEQ ID NO: 321501 - RNA, 19 nt, Artificial Sequence
  Description of Artificial Sequence: Synthetic oligonucleotide
acuguucaccacguuaagg

SEQ ID NO: 321502 - RNA, 19 nt, Artificial Sequence
  Description of Artificial Sequence: Synthetic oligonucleotide
aaguauccuuuugugcuag

SEQ ID NO: 321503 - RNA, 19 nt, Artificial Sequence
  Description of Artificial Sequence: Synthetic oligonucleotide
caugaguucaaaccuuguc

SEQ ID NO: 321504 - RNA, 19 nt, Artificial Sequence
  Description of Artificial Sequence: Synthetic oligonucleotide
ucagauagccccacaguua

SEQ ID NO: 321505 - RNA, 19 nt, Artificial Sequence
  Description of Artificial Sequence: Synthetic oligonucleotide
aggauugacacuguacugu

SEQ ID NO: 321506 - RNA, 19 nt, Artificial Sequence
  Description of Artificial Sequence: Synthetic oligonucleotide
ugggugguauaguaagggc

SEQ ID NO: 321507 - RNA, 19 nt, Artificial Sequence
  Description of Artificial Sequence: Synthetic oligonucleotide
uaaggaccaguuuaacaaa

SEQ ID NO: 321508 - RNA, 19 nt, Artificial Sequence
  Description of Artificial Sequence: Synthetic oligonucleotide
uugucaccggguaacagau

SEQ ID NO: 321509 - RNA, 19 nt, Artificial Sequence
  Description of Artificial Sequence: Synthetic oligonucleotide
uggaaagaccugcuguagu

SEQ ID NO: 321510 - RNA, 19 nt, Artificial Sequence
  Description of Artificial Sequence: Synthetic oligonucleotide
cauggugagccaugacucg

SEQ ID NO: 321511 - RNA, 19 nt, Artificial Sequence
  Description of Artificial Sequence: Synthetic oligonucleotide
gaucagacuuagugauagg

SEQ ID NO: 321512 - RNA, 19 nt, Artificial Sequence
  Description of Artificial Sequence: Synthetic oligonucleotide
gauuuggagagggugaaaa

SEQ ID NO: 321513 - RNA, 19 nt, Artificial Sequence
  Description of Artificial Sequence: Synthetic oligonucleotide
acguuaaggcacacgauuc

SEQ ID NO: 321514 - RNA, 19 nt, Artificial Sequence
  Description of Artificial Sequence: Synthetic oligonucleotide
gauuggagguuuaacuuuc

SEQ ID NO: 321515 - RNA, 19 nt, Artificial Sequence
  Description of Artificial Sequence: Synthetic oligonucleotide
aggcgucacacaguaauac

SEQ ID NO: 321516 - RNA, 19 nt, Artificial Sequence
  Description of Artificial Sequence: Synthetic oligonucleotide
ugccuagaguuugaaaggc

SEQ ID NO: 321517 - RNA, 19 nt, Artificial Sequence
  Description of Artificial Sequence: Synthetic oligonucleotide
caacaaaccuagcuaauga

SEQ ID NO: 321518 - RNA, 19 nt, Artificial Sequence
  Description of Artificial Sequence: Synthetic oligonucleotide
guagaggaucgguaagaag

SEQ ID NO: 321519 - RNA, 19 nt, Artificial Sequence
  Description of Artificial Sequence: Synthetic oligonucleotide
ucgaggaucucagugcuac

SEQ ID NO: 321520 - RNA, 19 nt, Artificial Sequence
  Description of Artificial Sequence: Synthetic oligonucleotide
aagaaggauugacacugua

SEQ ID NO: 321521 - RNA, 19 nt, Artificial Sequence
  Description of Artificial Sequence: Synthetic oligonucleotide
ucaugaguucaaaccuugu

SEQ ID NO: 321522 - RNA, 19 nt, Artificial Sequence
  Description of Artificial Sequence: Synthetic oligonucleotide
acacuagugugagaacgcg

SEQ ID NO: 321523 - RNA, 19 nt, Artificial Sequence
  Description of Artificial Sequence: Synthetic oligonucleotide
uacugaacuuggucgcugc

SEQ ID NO: 321524 - RNA, 19 nt, Artificial Sequence
  Description of Artificial Sequence: Synthetic oligonucleotide
ccuaagaacucgcuguggg

SEQ ID NO: 321525 - RNA, 19 nt, Artificial Sequence
  Description of Artificial Sequence: Synthetic oligonucleotide
guaggaggacgcucgacug

SEQ ID NO: 321526 - RNA, 19 nt, Artificial Sequence
  Description of Artificial Sequence: Synthetic oligonucleotide
aucccgagauauaguaacc

SEQ ID NO: 321527 - RNA, 19 nt, Artificial Sequence
  Description of Artificial Sequence: Synthetic oligonucleotide
ugugcuagguugggcaugc

SEQ ID NO: 321528 - RNA, 19 nt, Artificial Sequence
  Description of Artificial Sequence: Synthetic oligonucleotide
cuacuguucaccacguuaa

SEQ ID NO: 321529 - RNA, 19 nt, Artificial Sequence
  Description of Artificial Sequence: Synthetic oligonucleotide
cacuagugugagaacgcgc

SEQ ID NO: 321530 - RNA, 19 nt, Artificial Sequence
  Description of Artificial Sequence: Synthetic oligonucleotide
uccuaagaacucgcugugg

SEQ ID NO: 321531 - RNA, 19 nt, Artificial Sequence
  Description of Artificial Sequence: Synthetic oligonucleotide
gcacacuagugugagaacg

SEQ ID NO: 321532 - RNA, 19 nt, Artificial Sequence
  Description of Artificial Sequence: Synthetic oligonucleotide
uaggaggacgcucgacugc

SEQ ID NO: 321533 - RNA, 19 nt, Artificial Sequence
  Description of Artificial Sequence: Synthetic oligonucleotide
ucccgagauauaguaacca

SEQ ID NO: 321534 - RNA, 19 nt, Artificial Sequence
  Description of Artificial Sequence: Synthetic oligonucleotide
uuguuuugucaccggguaa

SEQ ID NO: 321535 - RNA, 19 nt, Artificial Sequence
  Description of Artificial Sequence: Synthetic oligonucleotide
ggcuugguagucuucgugc

SEQ ID NO: 321536 - RNA, 19 nt, Artificial Sequence
  Description of Artificial Sequence: Synthetic oligonucleotide
aaaguggauucgcucgaua

SEQ ID NO: 321537 - RNA, 19 nt, Artificial Sequence
  Description of Artificial Sequence: Synthetic oligonucleotide
gugaguagaggaucgguaa

SEQ ID NO: 321538 - RNA, 19 nt, Artificial Sequence
  Description of Artificial Sequence: Synthetic oligonucleotide
agguaguuuaagccucaug

SEQ ID NO: 321539 - RNA, 19 nt, Artificial Sequence
  Description of Artificial Sequence: Synthetic oligonucleotide
ucgcucgauaccgagagau

SEQ ID NO: 321540 - RNA, 19 nt, Artificial Sequence
  Description of Artificial Sequence: Synthetic oligonucleotide
caguaauacucggagcuug

SEQ ID NO: 321541 - RNA, 19 nt, Artificial Sequence
  Description of Artificial Sequence: Synthetic oligonucleotide
aaggaccaguuuaacaaau

SEQ ID NO: 321542 - RNA, 19 nt, Artificial Sequence
  Description of Artificial Sequence: Synthetic oligonucleotide
cauauggugcguaucccga

SEQ ID NO: 321543 - RNA, 19 nt, Artificial Sequence
  Description of Artificial Sequence: Synthetic oligonucleotide
ucuccuaccccuggcucgg

SEQ ID NO: 321544 - RNA, 19 nt, Artificial Sequence
  Description of Artificial Sequence: Synthetic oligonucleotide
gaguagaggaucgguaaga

SEQ ID NO: 321545 - RNA, 19 nt, Artificial Sequence
  Description of Artificial Sequence: Synthetic oligonucleotide
ccaucuguaccguccagcg

SEQ ID NO: 321546 - RNA, 19 nt, Artificial Sequence
  Description of Artificial Sequence: Synthetic oligonucleotide
acccuuugaguagacacca

SEQ ID NO: 321547 - RNA, 19 nt, Artificial Sequence
  Description of Artificial Sequence: Synthetic oligonucleotide
aggaccaguuuaacaaauc

SEQ ID NO: 321548 - RNA, 19 nt, Artificial Sequence
  Description of Artificial Sequence: Synthetic oligonucleotide
cuaaaguggauucgcucga

SEQ ID NO: 321549 - RNA, 19 nt, Artificial Sequence
  Description of Artificial Sequence: Synthetic oligonucleotide
ugcuuucugacggaauuau

SEQ ID NO: 321550 - RNA, 19 nt, Artificial Sequence
  Description of Artificial Sequence: Synthetic oligonucleotide
gauagccccacaguuaacu

SEQ ID NO: 321551 - RNA, 19 nt, Artificial Sequence
  Description of Artificial Sequence: Synthetic oligonucleotide
gagaguugcauaaggguua

SEQ ID NO: 321552 - RNA, 19 nt, Artificial Sequence
  Description of Artificial Sequence: Synthetic oligonucleotide
caucuguaccguccagcgg

SEQ ID NO: 321553 - RNA, 19 nt, Artificial Sequence
  Description of Artificial Sequence: Synthetic oligonucleotide
ugaagagucgggguuccaa

SEQ ID NO: 321554 - RNA, 19 nt, Artificial Sequence
  Description of Artificial Sequence: Synthetic oligonucleotide
agaggaucgguaagaagga

SEQ ID NO: 321555 - RNA, 19 nt, Artificial Sequence
  Description of Artificial Sequence: Synthetic oligonucleotide
ugacggaauuaugucuucu

SEQ ID NO: 321556 - RNA, 19 nt, Artificial Sequence
  Description of Artificial Sequence: Synthetic oligonucleotide
ucugcauauggugcguauc

SEQ ID NO: 321557 - RNA, 19 nt, Artificial Sequence
  Description of Artificial Sequence: Synthetic oligonucleotide
guuuucguauucagauagc

SEQ ID NO: 321558 - RNA, 19 nt, Artificial Sequence
  Description of Artificial Sequence: Synthetic oligonucleotide
auaaggguuaugggguacu

SEQ ID NO: 321559 - RNA, 19 nt, Artificial Sequence
  Description of Artificial Sequence: Synthetic oligonucleotide
cagauagccccacaguuaa

SEQ ID NO: 321560 - RNA, 19 nt, Artificial Sequence
  Description of Artificial Sequence: Synthetic oligonucleotide
gguccugacccuuugagua

SEQ ID NO: 321561 - RNA, 19 nt, Artificial Sequence
  Description of Artificial Sequence: Synthetic oligonucleotide
gccggagaguugcauaagg

SEQ ID NO: 321562 - RNA, 19 nt, Artificial Sequence
  Description of Artificial Sequence: Synthetic oligonucleotide
uggauucgcucgauaccga

SEQ ID NO: 321563 - RNA, 19 nt, Artificial Sequence
  Description of Artificial Sequence: Synthetic oligonucleotide
ccuaugaacaacaaaccua

SEQ ID NO: 321564 - RNA, 19 nt, Artificial Sequence
  Description of Artificial Sequence: Synthetic oligonucleotide
cugaacugugcuucaccuc

SEQ ID NO: 321565 - RNA, 19 nt, Artificial Sequence
  Description of Artificial Sequence: Synthetic oligonucleotide
ucgauaccgagagauuuua

SEQ ID NO: 321566 - RNA, 19 nt, Artificial Sequence
  Description of Artificial Sequence: Synthetic oligonucleotide
uucgugggauuuggaagcc

SEQ ID NO: 321567 - RNA, 19 nt, Artificial Sequence
  Description of Artificial Sequence: Synthetic oligonucleotide
ugugauccccugucugagu

SEQ ID NO: 321568 - RNA, 19 nt, Artificial Sequence
  Description of Artificial Sequence: Synthetic oligonucleotide
gacuaaggaccaguuuaac

SEQ ID NO: 321569 - RNA, 19 nt, Artificial Sequence
  Description of Artificial Sequence: Synthetic oligonucleotide
ggauucgcucgauaccgag

SEQ ID NO: 321570 - RNA, 19 nt, Artificial Sequence
  Description of Artificial Sequence: Synthetic oligonucleotide
ccggauucgguauucguug

SEQ ID NO: 321571 - RNA, 19 nt, Artificial Sequence
  Description of Artificial Sequence: Synthetic oligonucleotide
agugaguagaggaucggua

SEQ ID NO: 321572 - RNA, 19 nt, Artificial Sequence
  Description of Artificial Sequence: Synthetic oligonucleotide
caucuguuuguaggaacug

SEQ ID NO: 321573 - RNA, 19 nt, Artificial Sequence
  Description of Artificial Sequence: Synthetic oligonucleotide
ccggagaguugcauaaggg

SEQ ID NO: 321574 - RNA, 19 nt, Artificial Sequence
  Description of Artificial Sequence: Synthetic oligonucleotide
cuacgaugauguggguugg

SEQ ID NO: 321575 - RNA, 19 nt, Artificial Sequence
  Description of Artificial Sequence: Synthetic oligonucleotide
caccuuucgugggauuugg

SEQ ID NO: 321576 - RNA, 19 nt, Artificial Sequence
  Description of Artificial Sequence: Synthetic oligonucleotide
ucgugggauuuggaagccg

SEQ ID NO: 321577 - RNA, 19 nt, Artificial Sequence
  Description of Artificial Sequence: Synthetic oligonucleotide
guuaugggguacucggucu

SEQ ID NO: 321578 - RNA, 19 nt, Artificial Sequence
  Description of Artificial Sequence: Synthetic oligonucleotide
acgcucgacugcuuggaga

SEQ ID NO: 321579 - RNA, 19 nt, Artificial Sequence
  Description of Artificial Sequence: Synthetic oligonucleotide
uugugcuagguugggcaug

SEQ ID NO: 321580 - RNA, 19 nt, Artificial Sequence
  Description of Artificial Sequence: Synthetic oligonucleotide
ugguauaguaagggccaga

SEQ ID NO: 321581 - RNA, 19 nt, Artificial Sequence
  Description of Artificial Sequence: Synthetic oligonucleotide
agcggaguggucucugcau

SEQ ID NO: 321582 - RNA, 19 nt, Artificial Sequence
  Description of Artificial Sequence: Synthetic oligonucleotide
gaacgcgcagugcuugguc

SEQ ID NO: 321583 - RNA, 19 nt, Artificial Sequence
  Description of Artificial Sequence: Synthetic oligonucleotide
gauucgcucgauaccgaga

SEQ ID NO: 321584 - RNA, 19 nt, Artificial Sequence
  Description of Artificial Sequence: Synthetic oligonucleotide
ucgcuacucuccagguugu

SEQ ID NO: 321585 - RNA, 19 nt, Artificial Sequence
  Description of Artificial Sequence: Synthetic oligonucleotide
guaauacucggagcuugac

SEQ ID NO: 321586 - RNA, 19 nt, Artificial Sequence
  Description of Artificial Sequence: Synthetic oligonucleotide
uaaggguuaugggguacuc

SEQ ID NO: 321587 - RNA, 19 nt, Artificial Sequence
  Description of Artificial Sequence: Synthetic oligonucleotide
uaugggguacucggucuac

SEQ ID NO: 321588 - RNA, 19 nt, Artificial Sequence
  Description of Artificial Sequence: Synthetic oligonucleotide
guaagggauuguagaugcc

SEQ ID NO: 321589 - RNA, 19 nt, Artificial Sequence
  Description of Artificial Sequence: Synthetic oligonucleotide
uucgcucgauaccgagaga

SEQ ID NO: 321590 - RNA, 19 nt, Artificial Sequence
  Description of Artificial Sequence: Synthetic oligonucleotide
cuugguagucuucgugcca

SEQ ID NO: 321591 - RNA, 19 nt, Artificial Sequence
  Description of Artificial Sequence: Synthetic oligonucleotide
agaguugcauaaggguuau

SEQ ID NO: 321592 - RNA, 19 nt, Artificial Sequence
  Description of Artificial Sequence: Synthetic oligonucleotide
gugguauaguaagggccag

SEQ ID NO: 321593 - RNA, 19 nt, Artificial Sequence
  Description of Artificial Sequence: Synthetic oligonucleotide
gucaccggguaacagauuu

SEQ ID NO: 321594 - RNA, 19 nt, Artificial Sequence
  Description of Artificial Sequence: Synthetic oligonucleotide
ggcguggugggcaugcucc

SEQ ID NO: 321595 - RNA, 19 nt, Artificial Sequence
  Description of Artificial Sequence: Synthetic oligonucleotide
ugcgcuggguuuucguauu

SEQ ID NO: 321596 - RNA, 19 nt, Artificial Sequence
  Description of Artificial Sequence: Synthetic oligonucleotide
cgcucauauccauagugag

SEQ ID NO: 321597 - RNA, 19 nt, Artificial Sequence
  Description of Artificial Sequence: Synthetic oligonucleotide
ugggguacucggucuacuu

SEQ ID NO: 321598 - RNA, 19 nt, Artificial Sequence
  Description of Artificial Sequence: Synthetic oligonucleotide
gccucaugauucaaucucc

SEQ ID NO: 321599 - RNA, 19 nt, Artificial Sequence
  Description of Artificial Sequence: Synthetic oligonucleotide
ccuagaguuugaaaggcaa

SEQ ID NO: 321600 - RNA, 19 nt, Artificial Sequence
  Description of Artificial Sequence: Synthetic oligonucleotide
ucgugccaaaagagucucu

SEQ ID NO: 321601 - RNA, 19 nt, Artificial Sequence
  Description of Artificial Sequence: Synthetic oligonucleotide
agcaccuuucgugggauuu

SEQ ID NO: 321602 - RNA, 19 nt, Artificial Sequence
  Description of Artificial Sequence: Synthetic oligonucleotide
cacguuaaggcacacgauu

SEQ ID NO: 321603 - RNA, 19 nt, Artificial Sequence
  Description of Artificial Sequence: Synthetic oligonucleotide
caaagcuagucugugggcu

SEQ ID NO: 321604 - RNA, 19 nt, Artificial Sequence
  Description of Artificial Sequence: Synthetic oligonucleotide
gaucgguaagaaggauuga

SEQ ID NO: 321605 - RNA, 19 nt, Artificial Sequence
  Description of Artificial Sequence: Synthetic oligonucleotide
caccacguuaaggcacacg

SEQ ID NO: 321606 - RNA, 19 nt, Artificial Sequence
  Description of Artificial Sequence: Synthetic oligonucleotide
cuaagaacucgcugugggu

SEQ ID NO: 321607 - RNA, 19 nt, Artificial Sequence
  Description of Artificial Sequence: Synthetic oligonucleotide
uccccggacuucauuucua

SEQ ID NO: 321608 - RNA, 19 nt, Artificial Sequence
  Description of Artificial Sequence: Synthetic oligonucleotide
uggugcguaucccgagaua

SEQ ID NO: 321609 - RNA, 19 nt, Artificial Sequence
  Description of Artificial Sequence: Synthetic oligonucleotide
guaucccgagauauaguaa

SEQ ID NO: 321610 - RNA, 19 nt, Artificial Sequence
  Description of Artificial Sequence: Synthetic oligonucleotide
ggcacacgauucaucuacg

SEQ ID NO: 321611 - RNA, 19 nt, Artificial Sequence
  Description of Artificial Sequence: Synthetic oligonucleotide
caguuaacuggguccucca

SEQ ID NO: 321612 - RNA, 19 nt, Artificial Sequence
  Description of Artificial Sequence: Synthetic oligonucleotide
cagccggagaguugcauaa

SEQ ID NO: 321613 - RNA, 19 nt, Artificial Sequence
  Description of Artificial Sequence: Synthetic oligonucleotide
guguagggagagugcgcug

SEQ ID NO: 321614 - RNA, 19 nt, Artificial Sequence
  Description of Artificial Sequence: Synthetic oligonucleotide
uaccguccagcggaguggu

SEQ ID NO: 321615 - RNA, 19 nt, Artificial Sequence
  Description of Artificial Sequence: Synthetic oligonucleotide
ggcuuagugugugauucac

SEQ ID NO: 321616 - RNA, 19 nt, Artificial Sequence
  Description of Artificial Sequence: Synthetic oligonucleotide
cagcaacuaaggccuugug

SEQ ID NO: 321617 - RNA, 19 nt, Artificial Sequence
  Description of Artificial Sequence: Synthetic oligonucleotide
gguagaauggcugcagccu

SEQ ID NO: 321618 - RNA, 19 nt, Artificial Sequence
  Description of Artificial Sequence: Synthetic oligonucleotide
agaacgcgcagugcuuggu

SEQ ID NO: 321619 - RNA, 19 nt, Artificial Sequence
  Description of Artificial Sequence: Synthetic oligonucleotide
ugucaccggguaacagauu

SEQ ID NO: 321620 - RNA, 19 nt, Artificial Sequence
  Description of Artificial Sequence: Synthetic oligonucleotide
gggauuguagaugccgcca

SEQ ID NO: 321621 - RNA, 19 nt, Artificial Sequence
  Description of Artificial Sequence: Synthetic oligonucleotide
guuaaggcacacgauucau

SEQ ID NO: 321622 - RNA, 19 nt, Artificial Sequence
  Description of Artificial Sequence: Synthetic oligonucleotide
agccggagaguugcauaag

SEQ ID NO: 321623 - RNA, 19 nt, Artificial Sequence
  Description of Artificial Sequence: Synthetic oligonucleotide
ccuuucgugggauuuggaa

SEQ ID NO: 321624 - RNA, 19 nt, Artificial Sequence
  Description of Artificial Sequence: Synthetic oligonucleotide
ggcacacuagugugagaac

SEQ ID NO: 321625 - RNA, 19 nt, Artificial Sequence
  Description of Artificial Sequence: Synthetic oligonucleotide
ggagaguugcauaaggguu

SEQ ID NO: 321626 - RNA, 19 nt, Artificial Sequence
  Description of Artificial Sequence: Synthetic oligonucleotide
gcuuucugacggaauuaug

SEQ ID NO: 321627 - RNA, 19 nt, Artificial Sequence
  Description of Artificial Sequence: Synthetic oligonucleotide
gaacucgcugugggucaag

SEQ ID NO: 321628 - RNA, 19 nt, Artificial Sequence
  Description of Artificial Sequence: Synthetic oligonucleotide
ggugcguaucccgagauau

SEQ ID NO: 321629 - RNA, 19 nt, Artificial Sequence
  Description of Artificial Sequence: Synthetic oligonucleotide
cguaucccgagauauagua

SEQ ID NO: 321630 - RNA, 19 nt, Artificial Sequence
  Description of Artificial Sequence: Synthetic oligonucleotide
gcacacgauucaucuacga

SEQ ID NO: 321631 - RNA, 19 nt, Artificial Sequence
  Description of Artificial Sequence: Synthetic oligonucleotide
acgauucaucuacgaugau

SEQ ID NO: 321632 - RNA, 19 nt, Artificial Sequence
  Description of Artificial Sequence: Synthetic oligonucleotide
ggguuuucguauucagaua

SEQ ID NO: 321633 - RNA, 19 nt, Artificial Sequence
  Description of Artificial Sequence: Synthetic oligonucleotide
gguguagggagagugcgcu

SEQ ID NO: 321634 - RNA, 19 nt, Artificial Sequence
  Description of Artificial Sequence: Synthetic oligonucleotide
accuagcuaaugaguuccu

SEQ ID NO: 321635 - RNA, 19 nt, Artificial Sequence
  Description of Artificial Sequence: Synthetic oligonucleotide
agaacucgcugugggucaa

SEQ ID NO: 321636 - RNA, 19 nt, Artificial Sequence
  Description of Artificial Sequence: Synthetic oligonucleotide
caacuaaggccuuguggau

SEQ ID NO: 321637 - RNA, 19 nt, Artificial Sequence
  Description of Artificial Sequence: Synthetic oligonucleotide
cgauaccgagagauuuuag

SEQ ID NO: 321638 - RNA, 19 nt, Artificial Sequence
  Description of Artificial Sequence: Synthetic oligonucleotide
gcauaaggguuauggggua

SEQ ID NO: 321639 - RNA, 19 nt, Artificial Sequence
  Description of Artificial Sequence: Synthetic oligonucleotide
ggaaaucccaggccccucu

SEQ ID NO: 321640 - RNA, 19 nt, Artificial Sequence
  Description of Artificial Sequence: Synthetic oligonucleotide
ccaggcuuccgcuccgcug

SEQ ID NO: 321641 - RNA, 19 nt, Artificial Sequence
  Description of Artificial Sequence: Synthetic oligonucleotide
gcccucugguaccagccac

SEQ ID NO: 321642 - RNA, 19 nt, Artificial Sequence
  Description of Artificial Sequence: Synthetic oligonucleotide
guccaacugcauucagacu

SEQ ID NO: 321643 - RNA, 19 nt, Artificial Sequence
  Description of Artificial Sequence: Synthetic oligonucleotide
gggcuuagugugugauuca

SEQ ID NO: 321644 - RNA, 19 nt, Artificial Sequence
  Description of Artificial Sequence: Synthetic oligonucleotide
gcccuaaaagcaagcaaaa

SEQ ID NO: 321645 - RNA, 19 nt, Artificial Sequence
  Description of Artificial Sequence: Synthetic oligonucleotide
cguuaaggcacacgauuca

SEQ ID NO: 321646 - RNA, 19 nt, Artificial Sequence
  Description of Artificial Sequence: Synthetic oligonucleotide
ccuagcuaaugaguuccuc

SEQ ID NO: 321647 - RNA, 19 nt, Artificial Sequence
  Description of Artificial Sequence: Synthetic oligonucleotide
cgugggauuuggaagccga

SEQ ID NO: 321648 - RNA, 19 nt, Artificial Sequence
  Description of Artificial Sequence: Synthetic oligonucleotide
ccuuuugcccagaagcccu

SEQ ID NO: 321649 - RNA, 19 nt, Artificial Sequence
  Description of Artificial Sequence: Synthetic oligonucleotide
accuuucgugggauuugga

SEQ ID NO: 321650 - RNA, 19 nt, Artificial Sequence
  Description of Artificial Sequence: Synthetic oligonucleotide
gaggaucgguaagaaggau

SEQ ID NO: 321651 - RNA, 19 nt, Artificial Sequence
  Description of Artificial Sequence: Synthetic oligonucleotide
gcucgauaccgagagauuu

SEQ ID NO: 321652 - RNA, 19 nt, Artificial Sequence
  Description of Artificial Sequence: Synthetic oligonucleotide
gcggaguggucucugcaua

SEQ ID NO: 321653 - RNA, 19 nt, Artificial Sequence
  Description of Artificial Sequence: Synthetic oligonucleotide
cgcucgacugcuuggagaa

SEQ ID NO: 321654 - RNA, 19 nt, Artificial Sequence
  Description of Artificial Sequence: Synthetic oligonucleotide
cggagaguugcauaagggu

SEQ ID NO: 321655 - RNA, 19 nt, Artificial Sequence
  Description of Artificial Sequence: Synthetic oligonucleotide
gagguaguuuaagccucau

SEQ ID NO: 321656 - RNA, 19 nt, Artificial Sequence
  Description of Artificial Sequence: Synthetic oligonucleotide
gugcguaucccgagauaua

SEQ ID NO: 321657 - RNA, 19 nt, Artificial Sequence
  Description of Artificial Sequence: Synthetic oligonucleotide
ccuuugaguagacaccauu

SEQ ID NO: 321658 - RNA, 19 nt, Artificial Sequence
  Description of Artificial Sequence: Synthetic oligonucleotide
gcuuagugugugauucacu

SEQ ID NO: 321659 - RNA, 19 nt, Artificial Sequence
  Description of Artificial Sequence: Synthetic oligonucleotide
caucuacgaugaugugggu

SEQ ID NO: 321660 - RNA, 19 nt, Artificial Sequence
  Description of Artificial Sequence: Synthetic oligonucleotide
gggguaggagguaguuuaa

SEQ ID NO: 321661 - RNA, 19 nt, Artificial Sequence
  Description of Artificial Sequence: Synthetic oligonucleotide
gcgcuggguuuucguauuc

SEQ ID NO: 321662 - RNA, 19 nt, Artificial Sequence
  Description of Artificial Sequence: Synthetic oligonucleotide
cugugggucaaggcuuccu

SEQ ID NO: 321663 - RNA, 19 nt, Artificial Sequence
  Description of Artificial Sequence: Synthetic oligonucleotide
cggauucgguauucguuga

SEQ ID NO: 321664 - RNA, 19 nt, Artificial Sequence
  Description of Artificial Sequence: Synthetic oligonucleotide
ggguuaugggguacucggu

SEQ ID NO: 321665 - RNA, 19 nt, Artificial Sequence
  Description of Artificial Sequence: Synthetic oligonucleotide
cgcgcagugcuuggucagg

SEQ ID NO: 321666 - RNA, 19 nt, Artificial Sequence
  Description of Artificial Sequence: Synthetic oligonucleotide
gcucgacugcuuggagaac

SEQ ID NO: 321667 - RNA, 19 nt, Artificial Sequence
  Description of Artificial Sequence: Synthetic oligonucleotide
ccguccagcggaguggucu

SEQ ID NO: 321668 - RNA, 19 nt, Artificial Sequence
  Description of Artificial Sequence: Synthetic oligonucleotide
gcucgcuacucuccagguu

SEQ ID NO: 321669 - RNA, 19 nt, Artificial Sequence
  Description of Artificial Sequence: Synthetic oligonucleotide
cccggacuucauuucuaau

SEQ ID NO: 321670 - RNA, 19 nt, Artificial Sequence
  Description of Artificial Sequence: Synthetic oligonucleotide
cccuuugaguagacaccau

SEQ ID NO: 321671 - RNA, 19 nt, Artificial Sequence
  Description of Artificial Sequence: Synthetic oligonucleotide
cgcucgauaccgagagauu

SEQ ID NO: 321672 - RNA, 19 nt, Artificial Sequence
  Description of Artificial Sequence: Synthetic oligonucleotide
gcucagcaacuaaggccuu

SEQ ID NO: 321673 - RNA, 19 nt, Artificial Sequence
  Description of Artificial Sequence: Synthetic oligonucleotide
guagauacgacacugaggg

SEQ ID NO: 321674 - RNA, 19 nt, Artificial Sequence
  Description of Artificial Sequence: Synthetic oligonucleotide
aaauaccugaaccacugcc

SEQ ID NO: 321675 - RNA, 19 nt, Artificial Sequence
  Description of Artificial Sequence: Synthetic oligonucleotide
auaaaauucgcucagggug

SEQ ID NO: 321676 - RNA, 19 nt, Artificial Sequence
  Description of Artificial Sequence: Synthetic oligonucleotide
acagaauauagcuaagggc

SEQ ID NO: 321677 - RNA, 19 nt, Artificial Sequence
  Description of Artificial Sequence: Synthetic oligonucleotide
auagaugguggcuaaaucg

SEQ ID NO: 321678 - RNA, 19 nt, Artificial Sequence
  Description of Artificial Sequence: Synthetic oligonucleotide
ugaucuaagauuacuagug

SEQ ID NO: 321679 - RNA, 19 nt, Artificial Sequence
  Description of Artificial Sequence: Synthetic oligonucleotide
agugauacccuucagggag

SEQ ID NO: 321680 - RNA, 19 nt, Artificial Sequence
  Description of Artificial Sequence: Synthetic oligonucleotide
aagaauauccccaguaaac

SEQ ID NO: 321681 - RNA, 19 nt, Artificial Sequence
  Description of Artificial Sequence: Synthetic oligonucleotide
ugguguucgaagaauaucc

SEQ ID NO: 321682 - RNA, 19 nt, Artificial Sequence
  Description of Artificial Sequence: Synthetic oligonucleotide
agcguaagaacucauaucu

SEQ ID NO: 321683 - RNA, 19 nt, Artificial Sequence
  Description of Artificial Sequence: Synthetic oligonucleotide
gaagauucgaagcaacugc

SEQ ID NO: 321684 - RNA, 19 nt, Artificial Sequence
  Description of Artificial Sequence: Synthetic oligonucleotide
uagaugguggcuaaaucgg

SEQ ID NO: 321685 - RNA, 19 nt, Artificial Sequence
  Description of Artificial Sequence: Synthetic oligonucleotide
auagcuaagggcucacgcc

SEQ ID NO: 321686 - RNA, 19 nt, Artificial Sequence
  Description of Artificial Sequence: Synthetic oligonucleotide
uuaauagguggguaaaucu

SEQ ID NO: 321687 - RNA, 19 nt, Artificial Sequence
  Description of Artificial Sequence: Synthetic oligonucleotide
gaucuaagauuacuagugg

SEQ ID NO: 321688 - RNA, 19 nt, Artificial Sequence
  Description of Artificial Sequence: Synthetic oligonucleotide
aacgagaggucacauuuuc

SEQ ID NO: 321689 - RNA, 19 nt, Artificial Sequence
  Description of Artificial Sequence: Synthetic oligonucleotide
uaaaucgguguacauguag

SEQ ID NO: 321690 - RNA, 19 nt, Artificial Sequence
  Description of Artificial Sequence: Synthetic oligonucleotide
uucacgauuccccgcaucg

SEQ ID NO: 321691 - RNA, 19 nt, Artificial Sequence
  Description of Artificial Sequence: Synthetic oligonucleotide
uaauagguggguaaaucug

SEQ ID NO: 321692 - RNA, 19 nt, Artificial Sequence
  Description of Artificial Sequence: Synthetic oligonucleotide
uacccgaccaagcauaucc

SEQ ID NO: 321693 - RNA, 19 nt, Artificial Sequence
  Description of Artificial Sequence: Synthetic oligonucleotide
uauagcuaagggcucacgc

SEQ ID NO: 321694 - RNA, 19 nt, Artificial Sequence
  Description of Artificial Sequence: Synthetic oligonucleotide
uugggaaacccaaacaaga

SEQ ID NO: 321695 - RNA, 19 nt, Artificial Sequence
  Description of Artificial Sequence: Synthetic oligonucleotide
caugaucuaagauuacuag

SEQ ID NO: 321696 - RNA, 19 nt, Artificial Sequence
  Description of Artificial Sequence: Synthetic oligonucleotide
acaauaguuaccuagccuu

SEQ ID NO: 321697 - RNA, 19 nt, Artificial Sequence
  Description of Artificial Sequence: Synthetic oligonucleotide
gauuugaagaaccgggcug

SEQ ID NO: 321698 - RNA, 19 nt, Artificial Sequence
  Description of Artificial Sequence: Synthetic oligonucleotide
gauagcauagcaugcguac

SEQ ID NO: 321699 - RNA, 19 nt, Artificial Sequence
  Description of Artificial Sequence: Synthetic oligonucleotide
uugaauacccgaccaagca

SEQ ID NO: 321700 - RNA, 19 nt, Artificial Sequence
  Description of Artificial Sequence: Synthetic oligonucleotide
auccgguaaggucaaaugg

SEQ ID NO: 321701 - RNA, 19 nt, Artificial Sequence
  Description of Artificial Sequence: Synthetic oligonucleotide
auaacgagaggucacauuu

SEQ ID NO: 321702 - RNA, 19 nt, Artificial Sequence
  Description of Artificial Sequence: Synthetic oligonucleotide
ugauccauugaauacccga

SEQ ID NO: 321703 - RNA, 19 nt, Artificial Sequence
  Description of Artificial Sequence: Synthetic oligonucleotide
auccauugaauacccgacc

SEQ ID NO: 321704 - RNA, 19 nt, Artificial Sequence
  Description of Artificial Sequence: Synthetic oligonucleotide
ucuacauagagcagaggac

SEQ ID NO: 321705 - RNA, 19 nt, Artificial Sequence
  Description of Artificial Sequence: Synthetic oligonucleotide
guaauagagccauuucucc

SEQ ID NO: 321706 - RNA, 19 nt, Artificial Sequence
  Description of Artificial Sequence: Synthetic oligonucleotide
uugccgauagcauagcaug

SEQ ID NO: 321707 - RNA, 19 nt, Artificial Sequence
  Description of Artificial Sequence: Synthetic oligonucleotide
uguagccugggaaaccgcg

SEQ ID NO: 321708 - RNA, 19 nt, Artificial Sequence
  Description of Artificial Sequence: Synthetic oligonucleotide
ugagaauagggauuugggu

SEQ ID NO: 321709 - RNA, 19 nt, Artificial Sequence
  Description of Artificial Sequence: Synthetic oligonucleotide
aaccgcgccgaccaggaac

SEQ ID NO: 321710 - RNA, 19 nt, Artificial Sequence
  Description of Artificial Sequence: Synthetic oligonucleotide
uuacuaguggaccauucac

SEQ ID NO: 321711 - RNA, 19 nt, Artificial Sequence
  Description of Artificial Sequence: Synthetic oligonucleotide
accuguuagcaguuuaaac

SEQ ID NO: 321712 - RNA, 19 nt, Artificial Sequence
  Description of Artificial Sequence: Synthetic oligonucleotide
cuugccccuaauuugagac

SEQ ID NO: 321713 - RNA, 19 nt, Artificial Sequence
  Description of Artificial Sequence: Synthetic oligonucleotide
uccauugaauacccgacca

SEQ ID NO: 321714 - RNA, 19 nt, Artificial Sequence
  Description of Artificial Sequence: Synthetic oligonucleotide
auagccgacuucaucaacc

SEQ ID NO: 321715 - RNA, 19 nt, Artificial Sequence
  Description of Artificial Sequence: Synthetic oligonucleotide
cuaagauuacuaguggacc

SEQ ID NO: 321716 - RNA, 19 nt, Artificial Sequence
  Description of Artificial Sequence: Synthetic oligonucleotide
ggauuuggguaauagagcc

SEQ ID NO: 321717 - RNA, 19 nt, Artificial Sequence
  Description of Artificial Sequence: Synthetic oligonucleotide
ucagcguaagaacucauau

SEQ ID NO: 321718 - RNA, 19 nt, Artificial Sequence
  Description of Artificial Sequence: Synthetic oligonucleotide
uccgguaaggucaaaugga

SEQ ID NO: 321719 - RNA, 19 nt, Artificial Sequence
  Description of Artificial Sequence: Synthetic oligonucleotide
acacuggcacaauaguuac

SEQ ID NO: 321720 - RNA, 19 nt, Artificial Sequence
  Description of Artificial Sequence: Synthetic oligonucleotide
auuuauaacgagaggucac

SEQ ID NO: 321721 - RNA, 19 nt, Artificial Sequence
  Description of Artificial Sequence: Synthetic oligonucleotide
augaucuaagauuacuagu

SEQ ID NO: 321722 - RNA, 19 nt, Artificial Sequence
  Description of Artificial Sequence: Synthetic oligonucleotide
caaagucucauagacagug

SEQ ID NO: 321723 - RNA, 19 nt, Artificial Sequence
  Description of Artificial Sequence: Synthetic oligonucleotide
agacugaagcauuuuaacu

SEQ ID NO: 321724 - RNA, 19 nt, Artificial Sequence
  Description of Artificial Sequence: Synthetic oligonucleotide
uaguggaccauucacuccu

SEQ ID NO: 321725 - RNA, 19 nt, Artificial Sequence
  Description of Artificial Sequence: Synthetic oligonucleotide
auugaauacccgaccaagc

SEQ ID NO: 321726 - RNA, 19 nt, Artificial Sequence
  Description of Artificial Sequence: Synthetic oligonucleotide
gauggaaugcacagagugg

SEQ ID NO: 321727 - RNA, 19 nt, Artificial Sequence
  Description of Artificial Sequence: Synthetic oligonucleotide
aauauagcuaagggcucac

SEQ ID NO: 321728 - RNA, 19 nt, Artificial Sequence
  Description of Artificial Sequence: Synthetic oligonucleotide
aguagcuagugcuuugcag

SEQ ID NO: 321729 - RNA, 19 nt, Artificial Sequence
  Description of Artificial Sequence: Synthetic oligonucleotide
uagcauagcaugcguacag

SEQ ID NO: 321730 - RNA, 19 nt, Artificial Sequence
  Description of Artificial Sequence: Synthetic oligonucleotide
gaccauucacuccugagac

SEQ ID NO: 321731 - RNA, 19 nt, Artificial Sequence
  Description of Artificial Sequence: Synthetic oligonucleotide
aauagguggguaaaucugu

SEQ ID NO: 321732 - RNA, 19 nt, Artificial Sequence
  Description of Artificial Sequence: Synthetic oligonucleotide
uuuauaacgagaggucaca

SEQ ID NO: 321733 - RNA, 19 nt, Artificial Sequence
  Description of Artificial Sequence: Synthetic oligonucleotide
gagugcaaaaggaaucagg

SEQ ID NO: 321734 - RNA, 19 nt, Artificial Sequence
  Description of Artificial Sequence: Synthetic oligonucleotide
caugcguacagcugguuag

SEQ ID NO: 321735 - RNA, 19 nt, Artificial Sequence
  Description of Artificial Sequence: Synthetic oligonucleotide
aauaccugaaccacugccu

SEQ ID NO: 321736 - RNA, 19 nt, Artificial Sequence
  Description of Artificial Sequence: Synthetic oligonucleotide
caaugguugggucauuagc

SEQ ID NO: 321737 - RNA, 19 nt, Artificial Sequence
  Description of Artificial Sequence: Synthetic oligonucleotide
agugcaaaaggaaucagga

SEQ ID NO: 321738 - RNA, 19 nt, Artificial Sequence
  Description of Artificial Sequence: Synthetic oligonucleotide
uucgaagcaacugccagcc

SEQ ID NO: 321739 - RNA, 19 nt, Artificial Sequence
  Description of Artificial Sequence: Synthetic oligonucleotide
auuacuaguggaccauuca

SEQ ID NO: 321740 - RNA, 19 nt, Artificial Sequence
  Description of Artificial Sequence: Synthetic oligonucleotide
uuucauagggacccugagu

SEQ ID NO: 321741 - RNA, 19 nt, Artificial Sequence
  Description of Artificial Sequence: Synthetic oligonucleotide
aauaguuaccuagccuuug

SEQ ID NO: 321742 - RNA, 19 nt, Artificial Sequence
  Description of Artificial Sequence: Synthetic oligonucleotide
ugcugaaaccucucgaagu

SEQ ID NO: 321743 - RNA, 19 nt, Artificial Sequence
  Description of Artificial Sequence: Synthetic oligonucleotide
uaacagguaaacucccaca

SEQ ID NO: 321744 - RNA, 19 nt, Artificial Sequence
  Description of Artificial Sequence: Synthetic oligonucleotide
agguggguaaaucugucug

SEQ ID NO: 321745 - RNA, 19 nt, Artificial Sequence
  Description of Artificial Sequence: Synthetic oligonucleotide
ugggaaacccaaacaagac

SEQ ID NO: 321746 - RNA, 19 nt, Artificial Sequence
  Description of Artificial Sequence: Synthetic oligonucleotide
agaggucacauuuucuaca

SEQ ID NO: 321747 - RNA, 19 nt, Artificial Sequence
  Description of Artificial Sequence: Synthetic oligonucleotide
aaacuuugcaacacuggca

SEQ ID NO: 321748 - RNA, 19 nt, Artificial Sequence
  Description of Artificial Sequence: Synthetic oligonucleotide
caucuauaccugauguccc

SEQ ID NO: 321749 - RNA, 19 nt, Artificial Sequence
  Description of Artificial Sequence: Synthetic oligonucleotide
acauuauuagcaacuagcu

SEQ ID NO: 321750 - RNA, 19 nt, Artificial Sequence
  Description of Artificial Sequence: Synthetic oligonucleotide
cauuauuagcaacuagcuc

SEQ ID NO: 321751 - RNA, 19 nt, Artificial Sequence
  Description of Artificial Sequence: Synthetic oligonucleotide
ugaauacccgaccaagcau

SEQ ID NO: 321752 - RNA, 19 nt, Artificial Sequence
  Description of Artificial Sequence: Synthetic oligonucleotide
uagccgacuucaucaaccg

SEQ ID NO: 321753 - RNA, 19 nt, Artificial Sequence
  Description of Artificial Sequence: Synthetic oligonucleotide
guaguuccggcucacggcc

SEQ ID NO: 321754 - RNA, 19 nt, Artificial Sequence
  Description of Artificial Sequence: Synthetic oligonucleotide
cucuggguagauacgacac

SEQ ID NO: 321755 - RNA, 19 nt, Artificial Sequence
  Description of Artificial Sequence: Synthetic oligonucleotide
aauucgcucagggugcucu

SEQ ID NO: 321756 - RNA, 19 nt, Artificial Sequence
  Description of Artificial Sequence: Synthetic oligonucleotide
uagcuagugcuuugcagag

SEQ ID NO: 321757 - RNA, 19 nt, Artificial Sequence
  Description of Artificial Sequence: Synthetic oligonucleotide
gagaggucacauuuucuac

SEQ ID NO: 321758 - RNA, 19 nt, Artificial Sequence
  Description of Artificial Sequence: Synthetic oligonucleotide
gauccauugaauacccgac

SEQ ID NO: 321759 - RNA, 19 nt, Artificial Sequence
  Description of Artificial Sequence: Synthetic oligonucleotide
guguucgaagaauaucccc

SEQ ID NO: 321760 - RNA, 19 nt, Artificial Sequence
  Description of Artificial Sequence: Synthetic oligonucleotide
gguaaggucaaauggacaa

SEQ ID NO: 321761 - RNA, 19 nt, Artificial Sequence
  Description of Artificial Sequence: Synthetic oligonucleotide
agaauauagcuaagggcuc

SEQ ID NO: 321762 - RNA, 19 nt, Artificial Sequence
  Description of Artificial Sequence: Synthetic oligonucleotide
uccccuagcaauacuguuc

SEQ ID NO: 321763 - RNA, 19 nt, Artificial Sequence
  Description of Artificial Sequence: Synthetic oligonucleotide
gcaucuauaccugaugucc

SEQ ID NO: 321764 - RNA, 19 nt, Artificial Sequence
  Description of Artificial Sequence: Synthetic oligonucleotide
auaguuaccuagccuuugu

SEQ ID NO: 321765 - RNA, 19 nt, Artificial Sequence
  Description of Artificial Sequence: Synthetic oligonucleotide
auuggcugacccaugaugu

SEQ ID NO: 321766 - RNA, 19 nt, Artificial Sequence
  Description of Artificial Sequence: Synthetic oligonucleotide
ucguuguguggcaauccag

SEQ ID NO: 321767 - RNA, 19 nt, Artificial Sequence
  Description of Artificial Sequence: Synthetic oligonucleotide
cauuucuccccuccacucg

SEQ ID NO: 321768 - RNA, 19 nt, Artificial Sequence
  Description of Artificial Sequence: Synthetic oligonucleotide
caaagagaaagauugccua

SEQ ID NO: 321769 - RNA, 19 nt, Artificial Sequence
  Description of Artificial Sequence: Synthetic oligonucleotide
guaaugaaguucuucucaa

SEQ ID NO: 321770 - RNA, 19 nt, Artificial Sequence
  Description of Artificial Sequence: Synthetic oligonucleotide
cauccgguaaggucaaaug

SEQ ID NO: 321771 - RNA, 19 nt, Artificial Sequence
  Description of Artificial Sequence: Synthetic oligonucleotide
agcauagcaugcguacagc

SEQ ID NO: 321772 - RNA, 19 nt, Artificial Sequence
  Description of Artificial Sequence: Synthetic oligonucleotide
ugccccuaauuugagacug

SEQ ID NO: 321773 - RNA, 19 nt, Artificial Sequence
  Description of Artificial Sequence: Synthetic oligonucleotide
ugccgauagcauagcaugc

SEQ ID NO: 321774 - RNA, 19 nt, Artificial Sequence
  Description of Artificial Sequence: Synthetic oligonucleotide
ucuggguagauacgacacu

SEQ ID NO: 321775 - RNA, 19 nt, Artificial Sequence
  Description of Artificial Sequence: Synthetic oligonucleotide
aagacauuauuagcaacua

SEQ ID NO: 321776 - RNA, 19 nt, Artificial Sequence
  Description of Artificial Sequence: Synthetic oligonucleotide
aggaagacucagccaagag

SEQ ID NO: 321777 - RNA, 19 nt, Artificial Sequence
  Description of Artificial Sequence: Synthetic oligonucleotide
uggguaauagagccauuuc

SEQ ID NO: 321778 - RNA, 19 nt, Artificial Sequence
  Description of Artificial Sequence: Synthetic oligonucleotide
gaagaaccgggcuguuucc

SEQ ID NO: 321779 - RNA, 19 nt, Artificial Sequence
  Description of Artificial Sequence: Synthetic oligonucleotide
aauuugagacugaagcauu

SEQ ID NO: 321780 - RNA, 19 nt, Artificial Sequence
  Description of Artificial Sequence: Synthetic oligonucleotide
aagauuacuaguggaccau

SEQ ID NO: 321781 - RNA, 19 nt, Artificial Sequence
  Description of Artificial Sequence: Synthetic oligonucleotide
cagugcgguuuucauaggg

SEQ ID NO: 321782 - RNA, 19 nt, Artificial Sequence
  Description of Artificial Sequence: Synthetic oligonucleotide
gguagauacgacacugagg

SEQ ID NO: 321783 - RNA, 19 nt, Artificial Sequence
  Description of Artificial Sequence: Synthetic oligonucleotide
ggucacgccacacaagcag

SEQ ID NO: 321784 - RNA, 19 nt, Artificial Sequence
  Description of Artificial Sequence: Synthetic oligonucleotide
uguccccuagcaauacugu

SEQ ID NO: 321785 - RNA, 19 nt, Artificial Sequence
  Description of Artificial Sequence: Synthetic oligonucleotide
uauaacgagaggucacauu

SEQ ID NO: 321786 - RNA, 19 nt, Artificial Sequence
  Description of Artificial Sequence: Synthetic oligonucleotide
gguaauagagccauuucuc

SEQ ID NO: 321787 - RNA, 19 nt, Artificial Sequence
  Description of Artificial Sequence: Synthetic oligonucleotide
cuggguagauacgacacug

SEQ ID NO: 321788 - RNA, 19 nt, Artificial Sequence
  Description of Artificial Sequence: Synthetic oligonucleotide
uggguagauacgacacuga

SEQ ID NO: 321789 - RNA, 19 nt, Artificial Sequence
  Description of Artificial Sequence: Synthetic oligonucleotide
gcuaaaucgguguacaugu

SEQ ID NO: 321790 - RNA, 19 nt, Artificial Sequence
  Description of Artificial Sequence: Synthetic oligonucleotide
ccaauagccgacuucauca

SEQ ID NO: 321791 - RNA, 19 nt, Artificial Sequence
  Description of Artificial Sequence: Synthetic oligonucleotide
auagguggguaaaucuguc

SEQ ID NO: 321792 - RNA, 19 nt, Artificial Sequence
  Description of Artificial Sequence: Synthetic oligonucleotide
ggaauucccaacucacagc

SEQ ID NO: 321793 - RNA, 19 nt, Artificial Sequence
  Description of Artificial Sequence: Synthetic oligonucleotide
agcacauuaauaggugggu

SEQ ID NO: 321794 - RNA, 19 nt, Artificial Sequence
  Description of Artificial Sequence: Synthetic oligonucleotide
aacuagcucuccacuaugu

SEQ ID NO: 321795 - RNA, 19 nt, Artificial Sequence
  Description of Artificial Sequence: Synthetic oligonucleotide
ccaacucacagcacuaggc

SEQ ID NO: 321796 - RNA, 19 nt, Artificial Sequence
  Description of Artificial Sequence: Synthetic oligonucleotide
cagcguaagaacucauauc

SEQ ID NO: 321797 - RNA, 19 nt, Artificial Sequence
  Description of Artificial Sequence: Synthetic oligonucleotide
acauuaauagguggguaaa

SEQ ID NO: 321798 - RNA, 19 nt, Artificial Sequence
  Description of Artificial Sequence: Synthetic oligonucleotide
ucugacacugguguucgaa

SEQ ID NO: 321799 - RNA, 19 nt, Artificial Sequence
  Description of Artificial Sequence: Synthetic oligonucleotide
aaaauucgcucagggugcu

SEQ ID NO: 321800 - RNA, 19 nt, Artificial Sequence
  Description of Artificial Sequence: Synthetic oligonucleotide
gguaguuccggcucacggc

SEQ ID NO: 321801 - RNA, 19 nt, Artificial Sequence
  Description of Artificial Sequence: Synthetic oligonucleotide
auauagcuaagggcucacg

SEQ ID NO: 321802 - RNA, 19 nt, Artificial Sequence
  Description of Artificial Sequence: Synthetic oligonucleotide
gaauacccgaccaagcaua

SEQ ID NO: 321803 - RNA, 19 nt, Artificial Sequence
  Description of Artificial Sequence: Synthetic oligonucleotide
guuguguggcaauccagca

SEQ ID NO: 321804 - RNA, 19 nt, Artificial Sequence
  Description of Artificial Sequence: Synthetic oligonucleotide
ugccagccaauguccaaag

SEQ ID NO: 321805 - RNA, 19 nt, Artificial Sequence
  Description of Artificial Sequence: Synthetic oligonucleotide
aguccacuacaucuuugga

SEQ ID NO: 321806 - RNA, 19 nt, Artificial Sequence
  Description of Artificial Sequence: Synthetic oligonucleotide
uuauaacgagaggucacau

SEQ ID NO: 321807 - RNA, 19 nt, Artificial Sequence
  Description of Artificial Sequence: Synthetic oligonucleotide
aagauugccuacacaggaa

SEQ ID NO: 321808 - RNA, 19 nt, Artificial Sequence
  Description of Artificial Sequence: Synthetic oligonucleotide
uaugugccacaagaucacc

SEQ ID NO: 321809 - RNA, 19 nt, Artificial Sequence
  Description of Artificial Sequence: Synthetic oligonucleotide
ggcacaauaguuaccuagc

SEQ ID NO: 321810 - RNA, 19 nt, Artificial Sequence
  Description of Artificial Sequence: Synthetic oligonucleotide
ccgagauccggccauaggc

SEQ ID NO: 321811 - RNA, 19 nt, Artificial Sequence
  Description of Artificial Sequence: Synthetic oligonucleotide
agcaacuagcucuccacua

SEQ ID NO: 321812 - RNA, 19 nt, Artificial Sequence
  Description of Artificial Sequence: Synthetic oligonucleotide
gccgacuucaucaaccgag

SEQ ID NO: 321813 - RNA, 19 nt, Artificial Sequence
  Description of Artificial Sequence: Synthetic oligonucleotide
gcagggaucuuucaaccug

SEQ ID NO: 321814 - RNA, 19 nt, Artificial Sequence
  Description of Artificial Sequence: Synthetic oligonucleotide
cuggcgacagaucugagcu

SEQ ID NO: 321815 - RNA, 19 nt, Artificial Sequence
  Description of Artificial Sequence: Synthetic oligonucleotide
aguugagagguaggguuug

SEQ ID NO: 321816 - RNA, 19 nt, Artificial Sequence
  Description of Artificial Sequence: Synthetic oligonucleotide
caacuagcucuccacuaug

SEQ ID NO: 321817 - RNA, 19 nt, Artificial Sequence
  Description of Artificial Sequence: Synthetic oligonucleotide
ggcuaaaucgguguacaug

SEQ ID NO: 321818 - RNA, 19 nt, Artificial Sequence
  Description of Artificial Sequence: Synthetic oligonucleotide
uugccccuaauuugagacu

SEQ ID NO: 321819 - RNA, 19 nt, Artificial Sequence
  Description of Artificial Sequence: Synthetic oligonucleotide
cugguguucgaagaauauc

SEQ ID NO: 321820 - RNA, 19 nt, Artificial Sequence
  Description of Artificial Sequence: Synthetic oligonucleotide
ggaccauucacuccugaga

SEQ ID NO: 321821 - RNA, 19 nt, Artificial Sequence
  Description of Artificial Sequence: Synthetic oligonucleotide
uaguuaccuagccuuuguu

SEQ ID NO: 321822 - RNA, 19 nt, Artificial Sequence
  Description of Artificial Sequence: Synthetic oligonucleotide
ugccgucaauggcagaaau

SEQ ID NO: 321823 - RNA, 19 nt, Artificial Sequence
  Description of Artificial Sequence: Synthetic oligonucleotide
agacagugcgguuuucaua

SEQ ID NO: 321824 - RNA, 19 nt, Artificial Sequence
  Description of Artificial Sequence: Synthetic oligonucleotide
gcacguucauagauggugg

SEQ ID NO: 321825 - RNA, 19 nt, Artificial Sequence
  Description of Artificial Sequence: Synthetic oligonucleotide
aauacccgaccaagcauau

SEQ ID NO: 321826 - RNA, 19 nt, Artificial Sequence
  Description of Artificial Sequence: Synthetic oligonucleotide
uauuagcaacuagcucucc

SEQ ID NO: 321827 - RNA, 19 nt, Artificial Sequence
  Description of Artificial Sequence: Synthetic oligonucleotide
ugcguacagcugguuagag

SEQ ID NO: 321828 - RNA, 19 nt, Artificial Sequence
  Description of Artificial Sequence: Synthetic oligonucleotide
ggguaauagagccauuucu

SEQ ID NO: 321829 - RNA, 19 nt, Artificial Sequence
  Description of Artificial Sequence: Synthetic oligonucleotide
gggcauggugagaauaggg

SEQ ID NO: 321830 - RNA, 19 nt, Artificial Sequence
  Description of Artificial Sequence: Synthetic oligonucleotide
gugcaaaaggaaucaggaa

SEQ ID NO: 321831 - RNA, 19 nt, Artificial Sequence
  Description of Artificial Sequence: Synthetic oligonucleotide
acgccacacaagcagcagu

SEQ ID NO: 321832 - RNA, 19 nt, Artificial Sequence
  Description of Artificial Sequence: Synthetic oligonucleotide
auagggacccugaguaaug

SEQ ID NO: 321833 - RNA, 19 nt, Artificial Sequence
  Description of Artificial Sequence: Synthetic oligonucleotide
ccuagcaauacuguucaug

SEQ ID NO: 321834 - RNA, 19 nt, Artificial Sequence
  Description of Artificial Sequence: Synthetic oligonucleotide
guggcuaaaucgguguaca

SEQ ID NO: 321835 - RNA, 19 nt, Artificial Sequence
  Description of Artificial Sequence: Synthetic oligonucleotide
auaccugaugucccuucaa

SEQ ID NO: 321836 - RNA, 19 nt, Artificial Sequence
  Description of Artificial Sequence: Synthetic oligonucleotide
gccgauagcauagcaugcg

SEQ ID NO: 321837 - RNA, 19 nt, Artificial Sequence
  Description of Artificial Sequence: Synthetic oligonucleotide
uagauacgacacugagggu

SEQ ID NO: 321838 - RNA, 19 nt, Artificial Sequence
  Description of Artificial Sequence: Synthetic oligonucleotide
ugguggcuaaaucggugua

SEQ ID NO: 321839 - RNA, 19 nt, Artificial Sequence
  Description of Artificial Sequence: Synthetic oligonucleotide
gggaugagugaugucauca

SEQ ID NO: 321840 - RNA, 19 nt, Artificial Sequence
  Description of Artificial Sequence: Synthetic oligonucleotide
gccauaggcccaccggugg

SEQ ID NO: 321841 - RNA, 19 nt, Artificial Sequence
  Description of Artificial Sequence: Synthetic oligonucleotide
cucguuguguggcaaucca

SEQ ID NO: 321842 - RNA, 19 nt, Artificial Sequence
  Description of Artificial Sequence: Synthetic oligonucleotide
gaaaccgcgccgaccagga

SEQ ID NO: 321843 - RNA, 19 nt, Artificial Sequence
  Description of Artificial Sequence: Synthetic oligonucleotide
ccgguaaggucaaauggac

SEQ ID NO: 321844 - RNA, 19 nt, Artificial Sequence
  Description of Artificial Sequence: Synthetic oligonucleotide
uuuggguaauagagccauu

SEQ ID NO: 321845 - RNA, 19 nt, Artificial Sequence
  Description of Artificial Sequence: Synthetic oligonucleotide
acugguguucgaagaauau

SEQ ID NO: 321846 - RNA, 19 nt, Artificial Sequence
  Description of Artificial Sequence: Synthetic oligonucleotide
guagccugggaaaccgcgc

SEQ ID NO: 321847 - RNA, 19 nt, Artificial Sequence
  Description of Artificial Sequence: Synthetic oligonucleotide
uggcuaaaucgguguacau

SEQ ID NO: 321848 - RNA, 19 nt, Artificial Sequence
  Description of Artificial Sequence: Synthetic oligonucleotide
cauaggcccaccggugggc

SEQ ID NO: 321849 - RNA, 19 nt, Artificial Sequence
  Description of Artificial Sequence: Synthetic oligonucleotide
ccccaguaaacucacagga

SEQ ID NO: 321850 - RNA, 19 nt, Artificial Sequence
  Description of Artificial Sequence: Synthetic oligonucleotide
aaccagccuggcgacagau

SEQ ID NO: 321851 - RNA, 19 nt, Artificial Sequence
  Description of Artificial Sequence: Synthetic oligonucleotide
ccgucuugccccuaauuug

SEQ ID NO: 321852 - RNA, 19 nt, Artificial Sequence
  Description of Artificial Sequence: Synthetic oligonucleotide
gauuccccgcaucgcucgc

SEQ ID NO: 321853 - RNA, 19 nt, Artificial Sequence
  Description of Artificial Sequence: Synthetic oligonucleotide
caauagccgacuucaucaa

SEQ ID NO: 321854 - RNA, 19 nt, Artificial Sequence
  Description of Artificial Sequence: Synthetic oligonucleotide
cuugccgauagcauagcau

SEQ ID NO: 321855 - RNA, 19 nt, Artificial Sequence
  Description of Artificial Sequence: Synthetic oligonucleotide
cccuaauuugagacugaag

SEQ ID NO: 321856 - RNA, 19 nt, Artificial Sequence
  Description of Artificial Sequence: Synthetic oligonucleotide
cacugguguucgaagaaua

SEQ ID NO: 321857 - RNA, 19 nt, Artificial Sequence
  Description of Artificial Sequence: Synthetic oligonucleotide
guucacgauuccccgcauc

SEQ ID NO: 321858 - RNA, 19 nt, Artificial Sequence
  Description of Artificial Sequence: Synthetic oligonucleotide
cugcucccgagauccggcc

SEQ ID NO: 321859 - RNA, 19 nt, Artificial Sequence
  Description of Artificial Sequence: Synthetic oligonucleotide
agauuacuaguggaccauu

SEQ ID NO: 321860 - RNA, 19 nt, Artificial Sequence
  Description of Artificial Sequence: Synthetic oligonucleotide
cgcaacgccaucuugucuc

SEQ ID NO: 321861 - RNA, 19 nt, Artificial Sequence
  Description of Artificial Sequence: Synthetic oligonucleotide
ggaauggaggagugcaaaa

SEQ ID NO: 321862 - RNA, 19 nt, Artificial Sequence
  Description of Artificial Sequence: Synthetic oligonucleotide
auacccgaccaagcauauc

SEQ ID NO: 321863 - RNA, 19 nt, Artificial Sequence
  Description of Artificial Sequence: Synthetic oligonucleotide
agccgacuucaucaaccga

SEQ ID NO: 321864 - RNA, 19 nt, Artificial Sequence
  Description of Artificial Sequence: Synthetic oligonucleotide
acgagaggucacauuuucu

SEQ ID NO: 321865 - RNA, 19 nt, Artificial Sequence
  Description of Artificial Sequence: Synthetic oligonucleotide
ccccgcaucgcucgcaacg

SEQ ID NO: 321866 - RNA, 19 nt, Artificial Sequence
  Description of Artificial Sequence: Synthetic oligonucleotide
accucggucaauggguuuu

SEQ ID NO: 321867 - RNA, 19 nt, Artificial Sequence
  Description of Artificial Sequence: Synthetic oligonucleotide
cuugucuccuccgucccga

SEQ ID NO: 321868 - RNA, 19 nt, Artificial Sequence
  Description of Artificial Sequence: Synthetic oligonucleotide
ucccgagauccggccauag

SEQ ID NO: 321869 - RNA, 19 nt, Artificial Sequence
  Description of Artificial Sequence: Synthetic oligonucleotide
uugggucauuagccaaguu

SEQ ID NO: 321870 - RNA, 19 nt, Artificial Sequence
  Description of Artificial Sequence: Synthetic oligonucleotide
ucuggcccucaguaauaua

SEQ ID NO: 321871 - RNA, 19 nt, Artificial Sequence
  Description of Artificial Sequence: Synthetic oligonucleotide
cccaauagccgacuucauc

SEQ ID NO: 321872 - RNA, 19 nt, Artificial Sequence
  Description of Artificial Sequence: Synthetic oligonucleotide
cuccacucgaccagcacgu

SEQ ID NO: 321873 - RNA, 19 nt, Artificial Sequence
  Description of Artificial Sequence: Synthetic oligonucleotide
aucuggcccucaguaauau

SEQ ID NO: 321874 - RNA, 19 nt, Artificial Sequence
  Description of Artificial Sequence: Synthetic oligonucleotide
caguagcuagugcuuugca

SEQ ID NO: 321875 - RNA, 19 nt, Artificial Sequence
  Description of Artificial Sequence: Synthetic oligonucleotide
gcuucagcguaagaacuca

SEQ ID NO: 321876 - RNA, 19 nt, Artificial Sequence
  Description of Artificial Sequence: Synthetic oligonucleotide
acgacacugaggguugauu

SEQ ID NO: 321877 - RNA, 19 nt, Artificial Sequence
  Description of Artificial Sequence: Synthetic oligonucleotide
gaucuggcccucaguaaua

SEQ ID NO: 321878 - RNA, 19 nt, Artificial Sequence
  Description of Artificial Sequence: Synthetic oligonucleotide
aaaccgcgccgaccaggaa

SEQ ID NO: 321879 - RNA, 19 nt, Artificial Sequence
  Description of Artificial Sequence: Synthetic oligonucleotide
ccccguucacgauuccccg

SEQ ID NO: 321880 - RNA, 19 nt, Artificial Sequence
  Description of Artificial Sequence: Synthetic oligonucleotide
cgaccaagcauauccucug

SEQ ID NO: 321881 - RNA, 19 nt, Artificial Sequence
  Description of Artificial Sequence: Synthetic oligonucleotide
cgauuccccgcaucgcucg

SEQ ID NO: 321882 - RNA, 19 nt, Artificial Sequence
  Description of Artificial Sequence: Synthetic oligonucleotide
ccauaggcccaccgguggg

SEQ ID NO: 321883 - RNA, 19 nt, Artificial Sequence
  Description of Artificial Sequence: Synthetic oligonucleotide
gacccugaguaaugaaguu

SEQ ID NO: 321884 - RNA, 19 nt, Artificial Sequence
  Description of Artificial Sequence: Synthetic oligonucleotide
caauaguuaccuagccuuu

SEQ ID NO: 321885 - RNA, 19 nt, Artificial Sequence
  Description of Artificial Sequence: Synthetic oligonucleotide
cauagggacccugaguaau

SEQ ID NO: 321886 - RNA, 19 nt, Artificial Sequence
  Description of Artificial Sequence: Synthetic oligonucleotide
ccucuggguagauacgaca

SEQ ID NO: 321887 - RNA, 19 nt, Artificial Sequence
  Description of Artificial Sequence: Synthetic oligonucleotide
gcaaucucguuguguggca

SEQ ID NO: 321888 - RNA, 19 nt, Artificial Sequence
  Description of Artificial Sequence: Synthetic oligonucleotide
cauuaauagguggguaaau

SEQ ID NO: 321889 - RNA, 19 nt, Artificial Sequence
  Description of Artificial Sequence: Synthetic oligonucleotide
acccgaccaagcauauccu

SEQ ID NO: 321890 - RNA, 19 nt, Artificial Sequence
  Description of Artificial Sequence: Synthetic oligonucleotide
ucgcucgcaacgccaucuu

SEQ ID NO: 321891 - RNA, 19 nt, Artificial Sequence
  Description of Artificial Sequence: Synthetic oligonucleotide
cugagacaguccuguaggu

SEQ ID NO: 321892 - RNA, 19 nt, Artificial Sequence
  Description of Artificial Sequence: Synthetic oligonucleotide
gcaugcguacagcugguua

SEQ ID NO: 321893 - RNA, 19 nt, Artificial Sequence
  Description of Artificial Sequence: Synthetic oligonucleotide
auuccccgcaucgcucgca

SEQ ID NO: 321894 - RNA, 19 nt, Artificial Sequence
  Description of Artificial Sequence: Synthetic oligonucleotide
uaggcccaccggugggcac

SEQ ID NO: 321895 - RNA, 19 nt, Artificial Sequence
  Description of Artificial Sequence: Synthetic oligonucleotide
caucgcucgcaacgccauc

SEQ ID NO: 321896 - RNA, 19 nt, Artificial Sequence
  Description of Artificial Sequence: Synthetic oligonucleotide
caaucucguuguguggcaa

SEQ ID NO: 321897 - RNA, 19 nt, Artificial Sequence
  Description of Artificial Sequence: Synthetic oligonucleotide
cccguucacgauuccccgc

SEQ ID NO: 321898 - RNA, 19 nt, Artificial Sequence
  Description of Artificial Sequence: Synthetic oligonucleotide
cccgagauccggccauagg

SEQ ID NO: 321899 - RNA, 19 nt, Artificial Sequence
  Description of Artificial Sequence: Synthetic oligonucleotide
gaauagggauuuggguaau

SEQ ID NO: 321900 - RNA, 19 nt, Artificial Sequence
  Description of Artificial Sequence: Synthetic oligonucleotide
ggccauaggcccaccggug

SEQ ID NO: 321901 - RNA, 19 nt, Artificial Sequence
  Description of Artificial Sequence: Synthetic oligonucleotide
ccauugaauacccgaccaa

SEQ ID NO: 321902 - RNA, 19 nt, Artificial Sequence
  Description of Artificial Sequence: Synthetic oligonucleotide
cuggcacaauaguuaccua

SEQ ID NO: 321903 - RNA, 19 nt, Artificial Sequence
  Description of Artificial Sequence: Synthetic oligonucleotide
cuucagcguaagaacucau

SEQ ID NO: 321904 - RNA, 19 nt, Artificial Sequence
  Description of Artificial Sequence: Synthetic oligonucleotide
uccccgcaucgcucgcaac

SEQ ID NO: 321905 - RNA, 19 nt, Artificial Sequence
  Description of Artificial Sequence: Synthetic oligonucleotide
ccuuggagccgcugacuuc

SEQ ID NO: 321906 - RNA, 19 nt, Artificial Sequence
  Description of Artificial Sequence: Synthetic oligonucleotide
ccguucacgauuccccgca

SEQ ID NO: 321907 - RNA, 19 nt, Artificial Sequence
  Description of Artificial Sequence: Synthetic oligonucleotide
ggccccguucacgauuccc

SEQ ID NO: 321908 - RNA, 19 nt, Artificial Sequence
  Description of Artificial Sequence: Synthetic oligonucleotide
ccgaccaagcauauccucu

SEQ ID NO: 321909 - RNA, 19 nt, Artificial Sequence
  Description of Artificial Sequence: Synthetic oligonucleotide
cccgcaucgcucgcaacgc

SEQ ID NO: 321910 - RNA, 19 nt, Artificial Sequence
  Description of Artificial Sequence: Synthetic oligonucleotide
agcaugcguacagcugguu

SEQ ID NO: 321911 - RNA, 19 nt, Artificial Sequence
  Description of Artificial Sequence: Synthetic oligonucleotide
ccuugccgauagcauagca

SEQ ID NO: 321912 - RNA, 19 nt, Artificial Sequence
  Description of Artificial Sequence: Synthetic oligonucleotide
gaccucggucaauggguuu

SEQ ID NO: 321913 - RNA, 19 nt, Artificial Sequence
  Description of Artificial Sequence: Synthetic oligonucleotide
ccgauagcauagcaugcgu

SEQ ID NO: 321914 - RNA, 19 nt, Artificial Sequence
  Description of Artificial Sequence: Synthetic oligonucleotide
caggcggggagugaugauu

SEQ ID NO: 321915 - RNA, 19 nt, Artificial Sequence
  Description of Artificial Sequence: Synthetic oligonucleotide
gcggccccguucacgauuc

SEQ ID NO: 321916 - RNA, 19 nt, Artificial Sequence
  Description of Artificial Sequence: Synthetic oligonucleotide
gccuuggagccgcugacuu

SEQ ID NO: 321917 - RNA, 19 nt, Artificial Sequence
  Description of Artificial Sequence: Synthetic oligonucleotide
ccucggucaauggguuuuc

SEQ ID NO: 321918 - RNA, 19 nt, Artificial Sequence
  Description of Artificial Sequence: Synthetic oligonucleotide
ggcggggagugaugauucu

SEQ ID NO: 321919 - RNA, 19 nt, Artificial Sequence
  Description of Artificial Sequence: Synthetic oligonucleotide
gcgacagaucugagcugca

SEQ ID NO: 321920 - RNA, 19 nt, Artificial Sequence
  Description of Artificial Sequence: Synthetic oligonucleotide
ccauccgguaaggucaaau

SEQ ID NO: 321921 - RNA, 19 nt, Artificial Sequence
  Description of Artificial Sequence: Synthetic oligonucleotide
gcaucgcucgcaacgccau

SEQ ID NO: 321922 - RNA, 19 nt, Artificial Sequence
  Description of Artificial Sequence: Synthetic oligonucleotide
cucccgagauccggccaua

SEQ ID NO: 321923 - RNA, 19 nt, Artificial Sequence
  Description of Artificial Sequence: Synthetic oligonucleotide
cggccauaggcccaccggu

SEQ ID NO: 321924 - RNA, 19 nt, Artificial Sequence
  Description of Artificial Sequence: Synthetic oligonucleotide
ccccaauagccgacuucau

SEQ ID NO: 321925 - RNA, 19 nt, Artificial Sequence
  Description of Artificial Sequence: Synthetic oligonucleotide
gccauccgguaaggucaaa

SEQ ID NO: 321926 - RNA, 19 nt, Artificial Sequence
  Description of Artificial Sequence: Synthetic oligonucleotide
cggccccguucacgauucc

SEQ ID NO: 321927 - RNA, 19 nt, Artificial Sequence
  Description of Artificial Sequence: Synthetic oligonucleotide
cgcggccccguucacgauu

SEQ ID NO: 321928 - RNA, 19 nt, Artificial Sequence
  Description of Artificial Sequence: Synthetic oligonucleotide
aaguuuuacugcuaaauac

SEQ ID NO: 321929 - RNA, 19 nt, Artificial Sequence
  Description of Artificial Sequence: Synthetic oligonucleotide
aaccuuaacauccuuaauc

SEQ ID NO: 321930 - RNA, 19 nt, Artificial Sequence
  Description of Artificial Sequence: Synthetic oligonucleotide
ugagcaaugucgcauagcg

SEQ ID NO: 321931 - RNA, 19 nt, Artificial Sequence
  Description of Artificial Sequence: Synthetic oligonucleotide
ugcauuaucaugucgacag

SEQ ID NO: 321932 - RNA, 19 nt, Artificial Sequence
  Description of Artificial Sequence: Synthetic oligonucleotide
agggauaacguuuucuucc

SEQ ID NO: 321933 - RNA, 19 nt, Artificial Sequence
  Description of Artificial Sequence: Synthetic oligonucleotide
ucuaaucuuguccaguccg

SEQ ID NO: 321934 - RNA, 19 nt, Artificial Sequence
  Description of Artificial Sequence: Synthetic oligonucleotide
aaucaauucaggaacgugg

SEQ ID NO: 321935 - RNA, 19 nt, Artificial Sequence
  Description of Artificial Sequence: Synthetic oligonucleotide
gaagagaucagugacaggc

SEQ ID NO: 321936 - RNA, 19 nt, Artificial Sequence
  Description of Artificial Sequence: Synthetic oligonucleotide
ucaauauuuucuauggcga

SEQ ID NO: 321937 - RNA, 19 nt, Artificial Sequence
  Description of Artificial Sequence: Synthetic oligonucleotide
ucuauuagcuugcacaaga

SEQ ID NO: 321938 - RNA, 19 nt, Artificial Sequence
  Description of Artificial Sequence: Synthetic oligonucleotide
ucugcuaacaguugcaaug

SEQ ID NO: 321939 - RNA, 19 nt, Artificial Sequence
  Description of Artificial Sequence: Synthetic oligonucleotide
agaaacaggucaucuaucg

SEQ ID NO: 321940 - RNA, 19 nt, Artificial Sequence
  Description of Artificial Sequence: Synthetic oligonucleotide
ucuaagagagcuuuggccu

SEQ ID NO: 321941 - RNA, 19 nt, Artificial Sequence
  Description of Artificial Sequence: Synthetic oligonucleotide
aggaacgugguauccaucc

SEQ ID NO: 321942 - RNA, 19 nt, Artificial Sequence
  Description of Artificial Sequence: Synthetic oligonucleotide
cuaacuugcgcuaugauga

SEQ ID NO: 321943 - RNA, 19 nt, Artificial Sequence
  Description of Artificial Sequence: Synthetic oligonucleotide
uuugaggaagauauuauau

SEQ ID NO: 321944 - RNA, 19 nt, Artificial Sequence
  Description of Artificial Sequence: Synthetic oligonucleotide
uuugauuccagaucagaug

SEQ ID NO: 321945 - RNA, 19 nt, Artificial Sequence
  Description of Artificial Sequence: Synthetic oligonucleotide
ugcgcuaugaugaggaggc

SEQ ID NO: 321946 - RNA, 19 nt, Artificial Sequence
  Description of Artificial Sequence: Synthetic oligonucleotide
uuagcgguaauacaucugu

SEQ ID NO: 321947 - RNA, 19 nt, Artificial Sequence
  Description of Artificial Sequence: Synthetic oligonucleotide
uuuauaaggcguauauacu

SEQ ID NO: 321948 - RNA, 19 nt, Artificial Sequence
  Description of Artificial Sequence: Synthetic oligonucleotide
guaaaucgagaacugauug

SEQ ID NO: 321949 - RNA, 19 nt, Artificial Sequence
  Description of Artificial Sequence: Synthetic oligonucleotide
gauaacguuuucuuccugc

SEQ ID NO: 321950 - RNA, 19 nt, Artificial Sequence
  Description of Artificial Sequence: Synthetic oligonucleotide
uaacucaggaaucaauucu

SEQ ID NO: 321951 - RNA, 19 nt, Artificial Sequence
  Description of Artificial Sequence: Synthetic oligonucleotide
uauaaggcguauauacuug

SEQ ID NO: 321952 - RNA, 19 nt, Artificial Sequence
  Description of Artificial Sequence: Synthetic oligonucleotide
cacacacacacacagaggc

SEQ ID NO: 321953 - RNA, 19 nt, Artificial Sequence
  Description of Artificial Sequence: Synthetic oligonucleotide
aacgucaaagggaaccucc

SEQ ID NO: 321954 - RNA, 19 nt, Artificial Sequence
  Description of Artificial Sequence: Synthetic oligonucleotide
aaucccgccuaacuugcgc

SEQ ID NO: 321955 - RNA, 19 nt, Artificial Sequence
  Description of Artificial Sequence: Synthetic oligonucleotide
cuucaaaccacaacucagg

SEQ ID NO: 321956 - RNA, 19 nt, Artificial Sequence
  Description of Artificial Sequence: Synthetic oligonucleotide
uguucuugcgccuauugca

SEQ ID NO: 321957 - RNA, 19 nt, Artificial Sequence
  Description of Artificial Sequence: Synthetic oligonucleotide
acuuucaaauaaucccgcc

SEQ ID NO: 321958 - RNA, 19 nt, Artificial Sequence
  Description of Artificial Sequence: Synthetic oligonucleotide
accuuaacauccuuaauca

SEQ ID NO: 321959 - RNA, 19 nt, Artificial Sequence
  Description of Artificial Sequence: Synthetic oligonucleotide
aaauaaucccgccuaacuu

SEQ ID NO: 321960 - RNA, 19 nt, Artificial Sequence
  Description of Artificial Sequence: Synthetic oligonucleotide
aguauuucggaucuauggu

SEQ ID NO: 321961 - RNA, 19 nt, Artificial Sequence
  Description of Artificial Sequence: Synthetic oligonucleotide
uuauaaggcguauauacuu

SEQ ID NO: 321962 - RNA, 19 nt, Artificial Sequence
  Description of Artificial Sequence: Synthetic oligonucleotide
ugcgacagaacaccaacag

SEQ ID NO: 321963 - RNA, 19 nt, Artificial Sequence
  Description of Artificial Sequence: Synthetic oligonucleotide
uauuauaugcgucuuuguu

SEQ ID NO: 321964 - RNA, 19 nt, Artificial Sequence
  Description of Artificial Sequence: Synthetic oligonucleotide
ugcuuuuagaguuuccaga

SEQ ID NO: 321965 - RNA, 19 nt, Artificial Sequence
  Description of Artificial Sequence: Synthetic oligonucleotide
ucggacaugaugcucaauc

SEQ ID NO: 321966 - RNA, 19 nt, Artificial Sequence
  Description of Artificial Sequence: Synthetic oligonucleotide
ucuaucggcauguucuuug

SEQ ID NO: 321967 - RNA, 19 nt, Artificial Sequence
  Description of Artificial Sequence: Synthetic oligonucleotide
aaggcguauauacuugaca

SEQ ID NO: 321968 - RNA, 19 nt, Artificial Sequence
  Description of Artificial Sequence: Synthetic oligonucleotide
uauuagcuugcacaagaca

SEQ ID NO: 321969 - RNA, 19 nt, Artificial Sequence
  Description of Artificial Sequence: Synthetic oligonucleotide
cacacacacacacacagag

SEQ ID NO: 321970 - RNA, 19 nt, Artificial Sequence
  Description of Artificial Sequence: Synthetic oligonucleotide
uuaucaugucgacagcaca

SEQ ID NO: 321971 - RNA, 19 nt, Artificial Sequence
  Description of Artificial Sequence: Synthetic oligonucleotide
uuucaugaaggguuuuccc

SEQ ID NO: 321972 - RNA, 19 nt, Artificial Sequence
  Description of Artificial Sequence: Synthetic oligonucleotide
cacacacacacacacacag

SEQ ID NO: 321973 - RNA, 19 nt, Artificial Sequence
  Description of Artificial Sequence: Synthetic oligonucleotide
uccuuaucacguaacucag

SEQ ID NO: 321974 - RNA, 19 nt, Artificial Sequence
  Description of Artificial Sequence: Synthetic oligonucleotide
uguaaaucgagaacugauu

SEQ ID NO: 321975 - RNA, 19 nt, Artificial Sequence
  Description of Artificial Sequence: Synthetic oligonucleotide
uauaggcugauugucagcu

SEQ ID NO: 321976 - RNA, 19 nt, Artificial Sequence
  Description of Artificial Sequence: Synthetic oligonucleotide
uaucaugucgacagcacaa

SEQ ID NO: 321977 - RNA, 19 nt, Artificial Sequence
  Description of Artificial Sequence: Synthetic oligonucleotide
ucaugcugcaagaguaugc

SEQ ID NO: 321978 - RNA, 19 nt, Artificial Sequence
  Description of Artificial Sequence: Synthetic oligonucleotide
auuuugcgcgcgcacacac

SEQ ID NO: 321979 - RNA, 19 nt, Artificial Sequence
  Description of Artificial Sequence: Synthetic oligonucleotide
auuagcuugcacaagacau

SEQ ID NO: 321980 - RNA, 19 nt, Artificial Sequence
  Description of Artificial Sequence: Synthetic oligonucleotide
uguuauugaugaaaaccau

SEQ ID NO: 321981 - RNA, 19 nt, Artificial Sequence
  Description of Artificial Sequence: Synthetic oligonucleotide
cacacacacacacacacac

SEQ ID NO: 321982 - RNA, 19 nt, Artificial Sequence
  Description of Artificial Sequence: Synthetic oligonucleotide
aagaguaugcgucuuccuu

SEQ ID NO: 321983 - RNA, 19 nt, Artificial Sequence
  Description of Artificial Sequence: Synthetic oligonucleotide
uauucauuuuguguagucu

SEQ ID NO: 321984 - RNA, 19 nt, Artificial Sequence
  Description of Artificial Sequence: Synthetic oligonucleotide
uuauuuugcgcgcgcacac

SEQ ID NO: 321985 - RNA, 19 nt, Artificial Sequence
  Description of Artificial Sequence: Synthetic oligonucleotide
uggaugguuuugcuaaccc

SEQ ID NO: 321986 - RNA, 19 nt, Artificial Sequence
  Description of Artificial Sequence: Synthetic oligonucleotide
cuuaucacguaacucagga

SEQ ID NO: 321987 - RNA, 19 nt, Artificial Sequence
  Description of Artificial Sequence: Synthetic oligonucleotide
uuuucuauggcgacaucua

SEQ ID NO: 321988 - RNA, 19 nt, Artificial Sequence
  Description of Artificial Sequence: Synthetic oligonucleotide
uuuauuuugcgcgcgcaca

SEQ ID NO: 321989 - RNA, 19 nt, Artificial Sequence
  Description of Artificial Sequence: Synthetic oligonucleotide
agacaaauuacgaaugccu

SEQ ID NO: 321990 - RNA, 19 nt, Artificial Sequence
  Description of Artificial Sequence: Synthetic oligonucleotide
uauuucggaucuaugguuu

SEQ ID NO: 321991 - RNA, 19 nt, Artificial Sequence
  Description of Artificial Sequence: Synthetic oligonucleotide
uagucucucggacaugaug

SEQ ID NO: 321992 - RNA, 19 nt, Artificial Sequence
  Description of Artificial Sequence: Synthetic oligonucleotide
uuagcuugcacaagacauc

SEQ ID NO: 321993 - RNA, 19 nt, Artificial Sequence
  Description of Artificial Sequence: Synthetic oligonucleotide
ucuccuauaggcugauugu

SEQ ID NO: 321994 - RNA, 19 nt, Artificial Sequence
  Description of Artificial Sequence: Synthetic oligonucleotide
caauaaccaugucugauuc

SEQ ID NO: 321995 - RNA, 19 nt, Artificial Sequence
  Description of Artificial Sequence: Synthetic oligonucleotide
ugauuagcgguaauacauc

SEQ ID NO: 321996 - RNA, 19 nt, Artificial Sequence
  Description of Artificial Sequence: Synthetic oligonucleotide
caauauuuucuauggcgac

SEQ ID NO: 321997 - RNA, 19 nt, Artificial Sequence
  Description of Artificial Sequence: Synthetic oligonucleotide
uaaucaauucaggaacgug

SEQ ID NO: 321998 - RNA, 19 nt, Artificial Sequence
  Description of Artificial Sequence: Synthetic oligonucleotide
caugacuguugaaucuugg

SEQ ID NO: 321999 - RNA, 19 nt, Artificial Sequence
  Description of Artificial Sequence: Synthetic oligonucleotide
ucuagcgcugucuccaucu

SEQ ID NO: 322000 - RNA, 19 nt, Artificial Sequence
  Description of Artificial Sequence: Synthetic oligonucleotide
auauaagcggucaaauucu

SEQ ID NO: 322001 - RNA, 19 nt, Artificial Sequence
  Description of Artificial Sequence: Synthetic oligonucleotide
cuuucaugaaggguuuucc

SEQ ID NO: 322002 - RNA, 19 nt, Artificial Sequence
  Description of Artificial Sequence: Synthetic oligonucleotide
uauugaugaaaaccauuuu

SEQ ID NO: 322003 - RNA, 19 nt, Artificial Sequence
  Description of Artificial Sequence: Synthetic oligonucleotide
cugaguaaguuguaguaca

SEQ ID NO: 322004 - RNA, 19 nt, Artificial Sequence
  Description of Artificial Sequence: Synthetic oligonucleotide
ucugcauuaucaugucgac

SEQ ID NO: 322005 - RNA, 19 nt, Artificial Sequence
  Description of Artificial Sequence: Synthetic oligonucleotide
caccacaccucucuaagag

SEQ ID NO: 322006 - RNA, 19 nt, Artificial Sequence
  Description of Artificial Sequence: Synthetic oligonucleotide
uugcgcuaugaugaggagg

SEQ ID NO: 322007 - RNA, 19 nt, Artificial Sequence
  Description of Artificial Sequence: Synthetic oligonucleotide
uuaaucaauucaggaacgu

SEQ ID NO: 322008 - RNA, 19 nt, Artificial Sequence
  Description of Artificial Sequence: Synthetic oligonucleotide
aacugugcuuuguucggca

SEQ ID NO: 322009 - RNA, 19 nt, Artificial Sequence
  Description of Artificial Sequence: Synthetic oligonucleotide
cuauuagcuugcacaagac

SEQ ID NO: 322010 - RNA, 19 nt, Artificial Sequence
  Description of Artificial Sequence: Synthetic oligonucleotide
caauguccucucacgaggg

SEQ ID NO: 322011 - RNA, 19 nt, Artificial Sequence
  Description of Artificial Sequence: Synthetic oligonucleotide
ugaguaaguuguaguacau

SEQ ID NO: 322012 - RNA, 19 nt, Artificial Sequence
  Description of Artificial Sequence: Synthetic oligonucleotide
uguaaguuuuacugcuaaa

SEQ ID NO: 322013 - RNA, 19 nt, Artificial Sequence
  Description of Artificial Sequence: Synthetic oligonucleotide
caugaauccuggguaauac

SEQ ID NO: 322014 - RNA, 19 nt, Artificial Sequence
  Description of Artificial Sequence: Synthetic oligonucleotide
ugugggucucagcaaaauc

SEQ ID NO: 322015 - RNA, 19 nt, Artificial Sequence
  Description of Artificial Sequence: Synthetic oligonucleotide
uaaggcguauauacuugac

SEQ ID NO: 322016 - RNA, 19 nt, Artificial Sequence
  Description of Artificial Sequence: Synthetic oligonucleotide
uucggcaauggcaccacac

SEQ ID NO: 322017 - RNA, 19 nt, Artificial Sequence
  Description of Artificial Sequence: Synthetic oligonucleotide
uccaagaaucuacuuucuc

SEQ ID NO: 322018 - RNA, 19 nt, Artificial Sequence
  Description of Artificial Sequence: Synthetic oligonucleotide
aucguucagugugaagccc

SEQ ID NO: 322019 - RNA, 19 nt, Artificial Sequence
  Description of Artificial Sequence: Synthetic oligonucleotide
guacaucuggucucuauca

SEQ ID NO: 322020 - RNA, 19 nt, Artificial Sequence
  Description of Artificial Sequence: Synthetic oligonucleotide
cuuuauuuugcgcgcgcac

SEQ ID NO: 322021 - RNA, 19 nt, Artificial Sequence
  Description of Artificial Sequence: Synthetic oligonucleotide
agaguaugcgucuuccuua

SEQ ID NO: 322022 - RNA, 19 nt, Artificial Sequence
  Description of Artificial Sequence: Synthetic oligonucleotide
uucuugcgccuauugcagg

SEQ ID NO: 322023 - RNA, 19 nt, Artificial Sequence
  Description of Artificial Sequence: Synthetic oligonucleotide
acgugguauccauccagac

SEQ ID NO: 322024 - RNA, 19 nt, Artificial Sequence
  Description of Artificial Sequence: Synthetic oligonucleotide
uaacuugcgcuaugaugag

SEQ ID NO: 322025 - RNA, 19 nt, Artificial Sequence
  Description of Artificial Sequence: Synthetic oligonucleotide
cugauuagcgguaauacau

SEQ ID NO: 322026 - RNA, 19 nt, Artificial Sequence
  Description of Artificial Sequence: Synthetic oligonucleotide
gauuagcgguaauacaucu

SEQ ID NO: 322027 - RNA, 19 nt, Artificial Sequence
  Description of Artificial Sequence: Synthetic oligonucleotide
aagauauuauaugcgucuu

SEQ ID NO: 322028 - RNA, 19 nt, Artificial Sequence
  Description of Artificial Sequence: Synthetic oligonucleotide
ugucaaccagccaaccuua

SEQ ID NO: 322029 - RNA, 19 nt, Artificial Sequence
  Description of Artificial Sequence: Synthetic oligonucleotide
cacacacacacagaggcac

SEQ ID NO: 322030 - RNA, 19 nt, Artificial Sequence
  Description of Artificial Sequence: Synthetic oligonucleotide
gcguauauacuugacagug

SEQ ID NO: 322031 - RNA, 19 nt, Artificial Sequence
  Description of Artificial Sequence: Synthetic oligonucleotide
cucgccaaccuccuugagc

SEQ ID NO: 322032 - RNA, 19 nt, Artificial Sequence
  Description of Artificial Sequence: Synthetic oligonucleotide
ucuugcgccuauugcaggu

SEQ ID NO: 322033 - RNA, 19 nt, Artificial Sequence
  Description of Artificial Sequence: Synthetic oligonucleotide
ucaggaacgugguauccau

SEQ ID NO: 322034 - RNA, 19 nt, Artificial Sequence
  Description of Artificial Sequence: Synthetic oligonucleotide
aaugucgcauagcgcuuca

SEQ ID NO: 322035 - RNA, 19 nt, Artificial Sequence
  Description of Artificial Sequence: Synthetic oligonucleotide
uucaaccugauuagcggua

SEQ ID NO: 322036 - RNA, 19 nt, Artificial Sequence
  Description of Artificial Sequence: Synthetic oligonucleotide
caggucgagcucuaaugcc

SEQ ID NO: 322037 - RNA, 19 nt, Artificial Sequence
  Description of Artificial Sequence: Synthetic oligonucleotide
ccuaacuugcgcuaugaug

SEQ ID NO: 322038 - RNA, 19 nt, Artificial Sequence
  Description of Artificial Sequence: Synthetic oligonucleotide
aucaauucaggaacguggu

SEQ ID NO: 322039 - RNA, 19 nt, Artificial Sequence
  Description of Artificial Sequence: Synthetic oligonucleotide
auaugcgucuuuguucuug

SEQ ID NO: 322040 - RNA, 19 nt, Artificial Sequence
  Description of Artificial Sequence: Synthetic oligonucleotide
cacagaggcacgcacgcac

SEQ ID NO: 322041 - RNA, 19 nt, Artificial Sequence
  Description of Artificial Sequence: Synthetic oligonucleotide
agauauuauaugcgucuuu

SEQ ID NO: 322042 - RNA, 19 nt, Artificial Sequence
  Description of Artificial Sequence: Synthetic oligonucleotide
uaaucccgccuaacuugcg

SEQ ID NO: 322043 - RNA, 19 nt, Artificial Sequence
  Description of Artificial Sequence: Synthetic oligonucleotide
gcacaagacaucaugaauc

SEQ ID NO: 322044 - RNA, 19 nt, Artificial Sequence
  Description of Artificial Sequence: Synthetic oligonucleotide
gagaucagugacaggcuug

SEQ ID NO: 322045 - RNA, 19 nt, Artificial Sequence
  Description of Artificial Sequence: Synthetic oligonucleotide
ucaugucgacagcacaaau

SEQ ID NO: 322046 - RNA, 19 nt, Artificial Sequence
  Description of Artificial Sequence: Synthetic oligonucleotide
cagaaacaggucaucuauc

SEQ ID NO: 322047 - RNA, 19 nt, Artificial Sequence
  Description of Artificial Sequence: Synthetic oligonucleotide
ccuauugcagguauccaac

SEQ ID NO: 322048 - RNA, 19 nt, Artificial Sequence
  Description of Artificial Sequence: Synthetic oligonucleotide
accaauaaccaugucugau

SEQ ID NO: 322049 - RNA, 19 nt, Artificial Sequence
  Description of Artificial Sequence: Synthetic oligonucleotide
aaccacaacucaggaacgu

SEQ ID NO: 322050 - RNA, 19 nt, Artificial Sequence
  Description of Artificial Sequence: Synthetic oligonucleotide
agaucagugacaggcuugu

SEQ ID NO: 322051 - RNA, 19 nt, Artificial Sequence
  Description of Artificial Sequence: Synthetic oligonucleotide
ucacgagggauaacguuuu

SEQ ID NO: 322052 - RNA, 19 nt, Artificial Sequence
  Description of Artificial Sequence: Synthetic oligonucleotide
ucucacgagggauaacguu

SEQ ID NO: 322053 - RNA, 19 nt, Artificial Sequence
  Description of Artificial Sequence: Synthetic oligonucleotide
uucugcuaacaguugcaau

SEQ ID NO: 322054 - RNA, 19 nt, Artificial Sequence
  Description of Artificial Sequence: Synthetic oligonucleotide
gucgcauagcgcuucagaa

SEQ ID NO: 322055 - RNA, 19 nt, Artificial Sequence
  Description of Artificial Sequence: Synthetic oligonucleotide
ucgacagcacaaauuuauu

SEQ ID NO: 322056 - RNA, 19 nt, Artificial Sequence
  Description of Artificial Sequence: Synthetic oligonucleotide
uugagcaaugucgcauagc

SEQ ID NO: 322057 - RNA, 19 nt, Artificial Sequence
  Description of Artificial Sequence: Synthetic oligonucleotide
auuagcgguaauacaucug

SEQ ID NO: 322058 - RNA, 19 nt, Artificial Sequence
  Description of Artificial Sequence: Synthetic oligonucleotide
uccagaucagaugggguaa

SEQ ID NO: 322059 - RNA, 19 nt, Artificial Sequence
  Description of Artificial Sequence: Synthetic oligonucleotide
uaguacaucuggucucuau

SEQ ID NO: 322060 - RNA, 19 nt, Artificial Sequence
  Description of Artificial Sequence: Synthetic oligonucleotide
uuuugcgcgcgcacacaca

SEQ ID NO: 322061 - RNA, 19 nt, Artificial Sequence
  Description of Artificial Sequence: Synthetic oligonucleotide
uaucggcauguucuuugcu

SEQ ID NO: 322062 - RNA, 19 nt, Artificial Sequence
  Description of Artificial Sequence: Synthetic oligonucleotide
acacacacacacacagagg

SEQ ID NO: 322063 - RNA, 19 nt, Artificial Sequence
  Description of Artificial Sequence: Synthetic oligonucleotide
gcgguaauacaucugucac

SEQ ID NO: 322064 - RNA, 19 nt, Artificial Sequence
  Description of Artificial Sequence: Synthetic oligonucleotide
ucaaccugauuagcgguaa

SEQ ID NO: 322065 - RNA, 19 nt, Artificial Sequence
  Description of Artificial Sequence: Synthetic oligonucleotide
ggaucaaaucagucucucc

SEQ ID NO: 322066 - RNA, 19 nt, Artificial Sequence
  Description of Artificial Sequence: Synthetic oligonucleotide
cuauugcagguauccaaca

SEQ ID NO: 322067 - RNA, 19 nt, Artificial Sequence
  Description of Artificial Sequence: Synthetic oligonucleotide
gauuggcuagucucucgga

SEQ ID NO: 322068 - RNA, 19 nt, Artificial Sequence
  Description of Artificial Sequence: Synthetic oligonucleotide
gaggucguacagcauuguc

SEQ ID NO: 322069 - RNA, 19 nt, Artificial Sequence
  Description of Artificial Sequence: Synthetic oligonucleotide
cuugcgcuaugaugaggag

SEQ ID NO: 322070 - RNA, 19 nt, Artificial Sequence
  Description of Artificial Sequence: Synthetic oligonucleotide
uagcgguaauacaucuguc

SEQ ID NO: 322071 - RNA, 19 nt, Artificial Sequence
  Description of Artificial Sequence: Synthetic oligonucleotide
aucccgccuaacuugcgcu

SEQ ID NO: 322072 - RNA, 19 nt, Artificial Sequence
  Description of Artificial Sequence: Synthetic oligonucleotide
augcgucuuuguucuugcg

SEQ ID NO: 322073 - RNA, 19 nt, Artificial Sequence
  Description of Artificial Sequence: Synthetic oligonucleotide
uauuuugcgcgcgcacaca

SEQ ID NO: 322074 - RNA, 19 nt, Artificial Sequence
  Description of Artificial Sequence: Synthetic oligonucleotide
cuccuauaggcugauuguc

SEQ ID NO: 322075 - RNA, 19 nt, Artificial Sequence
  Description of Artificial Sequence: Synthetic oligonucleotide
gguuugauucucugacaug

SEQ ID NO: 322076 - RNA, 19 nt, Artificial Sequence
  Description of Artificial Sequence: Synthetic oligonucleotide
gaucgcuacuugagagggg

SEQ ID NO: 322077 - RNA, 19 nt, Artificial Sequence
  Description of Artificial Sequence: Synthetic oligonucleotide
gucgagcucuaaugccugg

SEQ ID NO: 322078 - RNA, 19 nt, Artificial Sequence
  Description of Artificial Sequence: Synthetic oligonucleotide
uggagcuugccaugcuuuc

SEQ ID NO: 322079 - RNA, 19 nt, Artificial Sequence
  Description of Artificial Sequence: Synthetic oligonucleotide
aggucgagcucuaaugccu

SEQ ID NO: 322080 - RNA, 19 nt, Artificial Sequence
  Description of Artificial Sequence: Synthetic oligonucleotide
guauuucggaucuaugguu

SEQ ID NO: 322081 - RNA, 19 nt, Artificial Sequence
  Description of Artificial Sequence: Synthetic oligonucleotide
acagaggcacgcacgcacg

SEQ ID NO: 322082 - RNA, 19 nt, Artificial Sequence
  Description of Artificial Sequence: Synthetic oligonucleotide
ugaggcgggugaucgcuac

SEQ ID NO: 322083 - RNA, 19 nt, Artificial Sequence
  Description of Artificial Sequence: Synthetic oligonucleotide
aggcugauugucagcuugg

SEQ ID NO: 322084 - RNA, 19 nt, Artificial Sequence
  Description of Artificial Sequence: Synthetic oligonucleotide
gacaaauuacgaaugccuu

SEQ ID NO: 322085 - RNA, 19 nt, Artificial Sequence
  Description of Artificial Sequence: Synthetic oligonucleotide
ucgagcucuaaugccugga

SEQ ID NO: 322086 - RNA, 19 nt, Artificial Sequence
  Description of Artificial Sequence: Synthetic oligonucleotide
cgcauagcgcuucagaaac

SEQ ID NO: 322087 - RNA, 19 nt, Artificial Sequence
  Description of Artificial Sequence: Synthetic oligonucleotide
uugcgccuauugcagguau

SEQ ID NO: 322088 - RNA, 19 nt, Artificial Sequence
  Description of Artificial Sequence: Synthetic oligonucleotide
gucgacagcacaaauuuau

SEQ ID NO: 322089 - RNA, 19 nt, Artificial Sequence
  Description of Artificial Sequence: Synthetic oligonucleotide
ucggaucuaugguuugauu

SEQ ID NO: 322090 - RNA, 19 nt, Artificial Sequence
  Description of Artificial Sequence: Synthetic oligonucleotide
aucaugucgacagcacaaa

SEQ ID NO: 322091 - RNA, 19 nt, Artificial Sequence
  Description of Artificial Sequence: Synthetic oligonucleotide
cacaacucaggaacgucaa

SEQ ID NO: 322092 - RNA, 19 nt, Artificial Sequence
  Description of Artificial Sequence: Synthetic oligonucleotide
cucacgagggauaacguuu

SEQ ID NO: 322093 - RNA, 19 nt, Artificial Sequence
  Description of Artificial Sequence: Synthetic oligonucleotide
gagaacugauuggcuaguc

SEQ ID NO: 322094 - RNA, 19 nt, Artificial Sequence
  Description of Artificial Sequence: Synthetic oligonucleotide
gaacgucaaagggaaccuc

SEQ ID NO: 322095 - RNA, 19 nt, Artificial Sequence
  Description of Artificial Sequence: Synthetic oligonucleotide
ugcgccuauugcagguauc

SEQ ID NO: 322096 - RNA, 19 nt, Artificial Sequence
  Description of Artificial Sequence: Synthetic oligonucleotide
cgcacacacacacacacac

SEQ ID NO: 322097 - RNA, 19 nt, Artificial Sequence
  Description of Artificial Sequence: Synthetic oligonucleotide
caaugucgcauagcgcuuc

SEQ ID NO: 322098 - RNA, 19 nt, Artificial Sequence
  Description of Artificial Sequence: Synthetic oligonucleotide
ggcucacaaaauccauggc

SEQ ID NO: 322099 - RNA, 19 nt, Artificial Sequence
  Description of Artificial Sequence: Synthetic oligonucleotide
acguaacucaggaaucaau

SEQ ID NO: 322100 - RNA, 19 nt, Artificial Sequence
  Description of Artificial Sequence: Synthetic oligonucleotide
gagcucuaaugccuggagu

SEQ ID NO: 322101 - RNA, 19 nt, Artificial Sequence
  Description of Artificial Sequence: Synthetic oligonucleotide
ggcuuuauuuugcgcgcgc

SEQ ID NO: 322102 - RNA, 19 nt, Artificial Sequence
  Description of Artificial Sequence: Synthetic oligonucleotide
gaguaugcgucuuccuuau

SEQ ID NO: 322103 - RNA, 19 nt, Artificial Sequence
  Description of Artificial Sequence: Synthetic oligonucleotide
ucaaaguauuucggaucua

SEQ ID NO: 322104 - RNA, 19 nt, Artificial Sequence
  Description of Artificial Sequence: Synthetic oligonucleotide
ggauaacguuuucuuccug

SEQ ID NO: 322105 - RNA, 19 nt, Artificial Sequence
  Description of Artificial Sequence: Synthetic oligonucleotide
gcugucaaguacucauaca

SEQ ID NO: 322106 - RNA, 19 nt, Artificial Sequence
  Description of Artificial Sequence: Synthetic oligonucleotide
acacacacacacagaggca

SEQ ID NO: 322107 - RNA, 19 nt, Artificial Sequence
  Description of Artificial Sequence: Synthetic oligonucleotide
gcgccuauugcagguaucc

SEQ ID NO: 322108 - RNA, 19 nt, Artificial Sequence
  Description of Artificial Sequence: Synthetic oligonucleotide
acacacacacacacacaca

SEQ ID NO: 322109 - RNA, 19 nt, Artificial Sequence
  Description of Artificial Sequence: Synthetic oligonucleotide
auaggcugauugucagcuu

SEQ ID NO: 322110 - RNA, 19 nt, Artificial Sequence
  Description of Artificial Sequence: Synthetic oligonucleotide
acacacacacacacacaga

SEQ ID NO: 322111 - RNA, 19 nt, Artificial Sequence
  Description of Artificial Sequence: Synthetic oligonucleotide
gugaaggguacaggcucgc

SEQ ID NO: 322112 - RNA, 19 nt, Artificial Sequence
  Description of Artificial Sequence: Synthetic oligonucleotide
gcgacagaacaccaacaga

SEQ ID NO: 322113 - RNA, 19 nt, Artificial Sequence
  Description of Artificial Sequence: Synthetic oligonucleotide
caccauuuaggacguggaa

SEQ ID NO: 322114 - RNA, 19 nt, Artificial Sequence
  Description of Artificial Sequence: Synthetic oligonucleotide
cgcgcacacacacacacac

SEQ ID NO: 322115 - RNA, 19 nt, Artificial Sequence
  Description of Artificial Sequence: Synthetic oligonucleotide
gcuaacccaagagucacaa

SEQ ID NO: 322116 - RNA, 19 nt, Artificial Sequence
  Description of Artificial Sequence: Synthetic oligonucleotide
ucccgccuaacuugcgcua

SEQ ID NO: 322117 - RNA, 19 nt, Artificial Sequence
  Description of Artificial Sequence: Synthetic oligonucleotide
gggugaucgcuacuugaga

SEQ ID NO: 322118 - RNA, 19 nt, Artificial Sequence
  Description of Artificial Sequence: Synthetic oligonucleotide
cgggugaucgcuacuugag

SEQ ID NO: 322119 - RNA, 19 nt, Artificial Sequence
  Description of Artificial Sequence: Synthetic oligonucleotide
gcuaugaugaggaggcugu

SEQ ID NO: 322120 - RNA, 19 nt, Artificial Sequence
  Description of Artificial Sequence: Synthetic oligonucleotide
ggucgagcucuaaugccug

SEQ ID NO: 322121 - RNA, 19 nt, Artificial Sequence
  Description of Artificial Sequence: Synthetic oligonucleotide
cacgagggauaacguuuuc

SEQ ID NO: 322122 - RNA, 19 nt, Artificial Sequence
  Description of Artificial Sequence: Synthetic oligonucleotide
ggguacaggcucgccaacc

SEQ ID NO: 322123 - RNA, 19 nt, Artificial Sequence
  Description of Artificial Sequence: Synthetic oligonucleotide
gcagaaggauauaagcggu

SEQ ID NO: 322124 - RNA, 19 nt, Artificial Sequence
  Description of Artificial Sequence: Synthetic oligonucleotide
gcuuuauuuugcgcgcgca

SEQ ID NO: 322125 - RNA, 19 nt, Artificial Sequence
  Description of Artificial Sequence: Synthetic oligonucleotide
gcgggugaucgcuacuuga

SEQ ID NO: 322126 - RNA, 19 nt, Artificial Sequence
  Description of Artificial Sequence: Synthetic oligonucleotide
cagguacauagugaccaaa

SEQ ID NO: 322127 - RNA, 19 nt, Artificial Sequence
  Description of Artificial Sequence: Synthetic oligonucleotide
ggcgggugaucgcuacuug

SEQ ID NO: 322128 - RNA, 19 nt, Artificial Sequence
  Description of Artificial Sequence: Synthetic oligonucleotide
gguacaggcucgccaaccu

SEQ ID NO: 322129 - RNA, 19 nt, Artificial Sequence
  Description of Artificial Sequence: Synthetic oligonucleotide
guagucugaguaaguugua

SEQ ID NO: 322130 - RNA, 19 nt, Artificial Sequence
  Description of Artificial Sequence: Synthetic oligonucleotide
aggcgggugaucgcuacuu

SEQ ID NO: 322131 - RNA, 19 nt, Artificial Sequence
  Description of Artificial Sequence: Synthetic oligonucleotide
ggaacgucaaagggaaccu

SEQ ID NO: 322132 - RNA, 19 nt, Artificial Sequence
  Description of Artificial Sequence: Synthetic oligonucleotide
cacguaacucaggaaucaa

SEQ ID NO: 322133 - RNA, 19 nt, Artificial Sequence
  Description of Artificial Sequence: Synthetic oligonucleotide
cgcgcgcacacacacacac

SEQ ID NO: 322134 - RNA, 19 nt, Artificial Sequence
  Description of Artificial Sequence: Synthetic oligonucleotide
ccaauaaccaugucugauu

SEQ ID NO: 322135 - RNA, 19 nt, Artificial Sequence
  Description of Artificial Sequence: Synthetic oligonucleotide
cguaacucaggaaucaauu

SEQ ID NO: 322136 - RNA, 19 nt, Artificial Sequence
  Description of Artificial Sequence: Synthetic oligonucleotide
ccacuaacuuuucaagagu

SEQ ID NO: 322137 - RNA, 19 nt, Artificial Sequence
  Description of Artificial Sequence: Synthetic oligonucleotide
caaagggaaccuccugguu

SEQ ID NO: 322138 - RNA, 19 nt, Artificial Sequence
  Description of Artificial Sequence: Synthetic oligonucleotide
gcacacacacacacacaca

SEQ ID NO: 322139 - RNA, 19 nt, Artificial Sequence
  Description of Artificial Sequence: Synthetic oligonucleotide
gaggcgggugaucgcuacu

SEQ ID NO: 322140 - RNA, 19 nt, Artificial Sequence
  Description of Artificial Sequence: Synthetic oligonucleotide
cuugcgccuauugcaggua

SEQ ID NO: 322141 - RNA, 19 nt, Artificial Sequence
  Description of Artificial Sequence: Synthetic oligonucleotide
cguauauacuugacagugu

SEQ ID NO: 322142 - RNA, 19 nt, Artificial Sequence
  Description of Artificial Sequence: Synthetic oligonucleotide
gggguaagcugugaaguuu

SEQ ID NO: 322143 - RNA, 19 nt, Artificial Sequence
  Description of Artificial Sequence: Synthetic oligonucleotide
cuagucucucggacaugau

SEQ ID NO: 322144 - RNA, 19 nt, Artificial Sequence
  Description of Artificial Sequence: Synthetic oligonucleotide
caaccugauuagcgguaau

SEQ ID NO: 322145 - RNA, 19 nt, Artificial Sequence
  Description of Artificial Sequence: Synthetic oligonucleotide
ccgccuaacuugcgcuaug

SEQ ID NO: 322146 - RNA, 19 nt, Artificial Sequence
  Description of Artificial Sequence: Synthetic oligonucleotide
cuauggcgacaucuauguu

SEQ ID NO: 322147 - RNA, 19 nt, Artificial Sequence
  Description of Artificial Sequence: Synthetic oligonucleotide
gcgcacacacacacacaca

SEQ ID NO: 322148 - RNA, 19 nt, Artificial Sequence
  Description of Artificial Sequence: Synthetic oligonucleotide
gcaaugucgcauagcgcuu

SEQ ID NO: 322149 - RNA, 19 nt, Artificial Sequence
  Description of Artificial Sequence: Synthetic oligonucleotide
gcgcgcacacacacacaca

SEQ ID NO: 322150 - RNA, 19 nt, Artificial Sequence
  Description of Artificial Sequence: Synthetic oligonucleotide
cucggacaugaugcucaau

SEQ ID NO: 322151 - RNA, 19 nt, Artificial Sequence
  Description of Artificial Sequence: Synthetic oligonucleotide
cgcacgcacagagagugcu

SEQ ID NO: 322152 - RNA, 19 nt, Artificial Sequence
  Description of Artificial Sequence: Synthetic oligonucleotide
cgccuauugcagguaucca

SEQ ID NO: 322153 - RNA, 19 nt, Artificial Sequence
  Description of Artificial Sequence: Synthetic oligonucleotide
gcgcgcgcacacacacaca

SEQ ID NO: 322154 - RNA, 19 nt, Artificial Sequence
  Description of Artificial Sequence: Synthetic oligonucleotide
gcgcuaugaugaggaggcu

SEQ ID NO: 322155 - RNA, 19 nt, Artificial Sequence
  Description of Artificial Sequence: Synthetic oligonucleotide
cccgccuaacuugcgcuau

SEQ ID NO: 322156 - RNA, 19 nt, Artificial Sequence
  Description of Artificial Sequence: Synthetic oligonucleotide
gauaaguuggucuaguugg

SEQ ID NO: 322157 - RNA, 19 nt, Artificial Sequence
  Description of Artificial Sequence: Synthetic oligonucleotide
uuugcaaucaucuaaguac

SEQ ID NO: 322158 - RNA, 19 nt, Artificial Sequence
  Description of Artificial Sequence: Synthetic oligonucleotide
uugguaaucgcacagggcg

SEQ ID NO: 322159 - RNA, 19 nt, Artificial Sequence
  Description of Artificial Sequence: Synthetic oligonucleotide
ugauacauaagaaguauag

SEQ ID NO: 322160 - RNA, 19 nt, Artificial Sequence
  Description of Artificial Sequence: Synthetic oligonucleotide
aauuaagcagaaaagcugg

SEQ ID NO: 322161 - RNA, 19 nt, Artificial Sequence
  Description of Artificial Sequence: Synthetic oligonucleotide
cugccuauaguuaaggugg

SEQ ID NO: 322162 - RNA, 19 nt, Artificial Sequence
  Description of Artificial Sequence: Synthetic oligonucleotide
ugcacugugucaaacaugc

SEQ ID NO: 322163 - RNA, 19 nt, Artificial Sequence
  Description of Artificial Sequence: Synthetic oligonucleotide
cuaaguacugguuuucucg

SEQ ID NO: 322164 - RNA, 19 nt, Artificial Sequence
  Description of Artificial Sequence: Synthetic oligonucleotide
gagaucuuuuguuuggugg

SEQ ID NO: 322165 - RNA, 19 nt, Artificial Sequence
  Description of Artificial Sequence: Synthetic oligonucleotide
agagauacuagacaugucu

SEQ ID NO: 322166 - RNA, 19 nt, Artificial Sequence
  Description of Artificial Sequence: Synthetic oligonucleotide
aauauguugguacuggguu

SEQ ID NO: 322167 - RNA, 19 nt, Artificial Sequence
  Description of Artificial Sequence: Synthetic oligonucleotide
agauacuagacaugucugc

SEQ ID NO: 322168 - RNA, 19 nt, Artificial Sequence
  Description of Artificial Sequence: Synthetic oligonucleotide
ugaagauggaaucgaagcc

SEQ ID NO: 322169 - RNA, 19 nt, Artificial Sequence
  Description of Artificial Sequence: Synthetic oligonucleotide
acaugugauacauaagaag

SEQ ID NO: 322170 - RNA, 19 nt, Artificial Sequence
  Description of Artificial Sequence: Synthetic oligonucleotide
ugggaauuaagcagaaaag

SEQ ID NO: 322171 - RNA, 19 nt, Artificial Sequence
  Description of Artificial Sequence: Synthetic oligonucleotide
uuugguggaaacuuguaga

SEQ ID NO: 322172 - RNA, 19 nt, Artificial Sequence
  Description of Artificial Sequence: Synthetic oligonucleotide
gaagauggaaucgaagccg

SEQ ID NO: 322173 - RNA, 19 nt, Artificial Sequence
  Description of Artificial Sequence: Synthetic oligonucleotide
agaaguauagcccugggaa

SEQ ID NO: 322174 - RNA, 19 nt, Artificial Sequence
  Description of Artificial Sequence: Synthetic oligonucleotide
gaauuaagcagaaaagcug

SEQ ID NO: 322175 - RNA, 19 nt, Artificial Sequence
  Description of Artificial Sequence: Synthetic oligonucleotide
uaaggugggauauggaacc

SEQ ID NO: 322176 - RNA, 19 nt, Artificial Sequence
  Description of Artificial Sequence: Synthetic oligonucleotide
uguaucuuugccuggagcu

SEQ ID NO: 322177 - RNA, 19 nt, Artificial Sequence
  Description of Artificial Sequence: Synthetic oligonucleotide
ucugccuauaguuaaggug

SEQ ID NO: 322178 - RNA, 19 nt, Artificial Sequence
  Description of Artificial Sequence: Synthetic oligonucleotide
auggaaguugaacggacgc

SEQ ID NO: 322179 - RNA, 19 nt, Artificial Sequence
  Description of Artificial Sequence: Synthetic oligonucleotide
uuaaggugggauauggaac

SEQ ID NO: 322180 - RNA, 19 nt, Artificial Sequence
  Description of Artificial Sequence: Synthetic oligonucleotide
guagcguccaaauauguug

SEQ ID NO: 322181 - RNA, 19 nt, Artificial Sequence
  Description of Artificial Sequence: Synthetic oligonucleotide
uuuucucgccaauugauca

SEQ ID NO: 322182 - RNA, 19 nt, Artificial Sequence
  Description of Artificial Sequence: Synthetic oligonucleotide
acuaggggucaucugaugg

SEQ ID NO: 322183 - RNA, 19 nt, Artificial Sequence
  Description of Artificial Sequence: Synthetic oligonucleotide
ugguuugcaaucaucuaag

SEQ ID NO: 322184 - RNA, 19 nt, Artificial Sequence
  Description of Artificial Sequence: Synthetic oligonucleotide
acauaagaaguauagcccu

SEQ ID NO: 322185 - RNA, 19 nt, Artificial Sequence
  Description of Artificial Sequence: Synthetic oligonucleotide
aaguugaacggacgccugc

SEQ ID NO: 322186 - RNA, 19 nt, Artificial Sequence
  Description of Artificial Sequence: Synthetic oligonucleotide
acaguagucauaguugugg

SEQ ID NO: 322187 - RNA, 19 nt, Artificial Sequence
  Description of Artificial Sequence: Synthetic oligonucleotide
aaccauaggaagaacuagg

SEQ ID NO: 322188 - RNA, 19 nt, Artificial Sequence
  Description of Artificial Sequence: Synthetic oligonucleotide
aaguacugguuuucucgcc

SEQ ID NO: 322189 - RNA, 19 nt, Artificial Sequence
  Description of Artificial Sequence: Synthetic oligonucleotide
uguacaagcaguuccucca

SEQ ID NO: 322190 - RNA, 19 nt, Artificial Sequence
  Description of Artificial Sequence: Synthetic oligonucleotide
ggagcuaccagccauacgc

SEQ ID NO: 322191 - RNA, 19 nt, Artificial Sequence
  Description of Artificial Sequence: Synthetic oligonucleotide
ugauucuggguguacaggc

SEQ ID NO: 322192 - RNA, 19 nt, Artificial Sequence
  Description of Artificial Sequence: Synthetic oligonucleotide
gauaagaaaggcugcuggc

SEQ ID NO: 322193 - RNA, 19 nt, Artificial Sequence
  Description of Artificial Sequence: Synthetic oligonucleotide
ugagagauacuagacaugu

SEQ ID NO: 322194 - RNA, 19 nt, Artificial Sequence
  Description of Artificial Sequence: Synthetic oligonucleotide
gaugcacauagccacuggg

SEQ ID NO: 322195 - RNA, 19 nt, Artificial Sequence
  Description of Artificial Sequence: Synthetic oligonucleotide
acuagacaugucugcagcc

SEQ ID NO: 322196 - RNA, 19 nt, Artificial Sequence
  Description of Artificial Sequence: Synthetic oligonucleotide
aacacaguugugaaaagcu

SEQ ID NO: 322197 - RNA, 19 nt, Artificial Sequence
  Description of Artificial Sequence: Synthetic oligonucleotide
ugucacaccauacggggcc

SEQ ID NO: 322198 - RNA, 19 nt, Artificial Sequence
  Description of Artificial Sequence: Synthetic oligonucleotide
uuugaguggaagucagucc

SEQ ID NO: 322199 - RNA, 19 nt, Artificial Sequence
  Description of Artificial Sequence: Synthetic oligonucleotide
ggugugaaaccuuugagug

SEQ ID NO: 322200 - RNA, 19 nt, Artificial Sequence
  Description of Artificial Sequence: Synthetic oligonucleotide
uccaguugacucaguagcg

SEQ ID NO: 322201 - RNA, 19 nt, Artificial Sequence
  Description of Artificial Sequence: Synthetic oligonucleotide
auaugcacguuuguuuucc

SEQ ID NO: 322202 - RNA, 19 nt, Artificial Sequence
  Description of Artificial Sequence: Synthetic oligonucleotide
auugauaagcacacucagc

SEQ ID NO: 322203 - RNA, 19 nt, Artificial Sequence
  Description of Artificial Sequence: Synthetic oligonucleotide
uaguuaaggugggauaugg

SEQ ID NO: 322204 - RNA, 19 nt, Artificial Sequence
  Description of Artificial Sequence: Synthetic oligonucleotide
ucgccaauugaucacaauc

SEQ ID NO: 322205 - RNA, 19 nt, Artificial Sequence
  Description of Artificial Sequence: Synthetic oligonucleotide
uugagccgcaguuugagug

SEQ ID NO: 322206 - RNA, 19 nt, Artificial Sequence
  Description of Artificial Sequence: Synthetic oligonucleotide
uaagaaguauagcccuggg

SEQ ID NO: 322207 - RNA, 19 nt, Artificial Sequence
  Description of Artificial Sequence: Synthetic oligonucleotide
guacugucacaccauacgg

SEQ ID NO: 322208 - RNA, 19 nt, Artificial Sequence
  Description of Artificial Sequence: Synthetic oligonucleotide
ucaguagcguccaaauaug

SEQ ID NO: 322209 - RNA, 19 nt, Artificial Sequence
  Description of Artificial Sequence: Synthetic oligonucleotide
ggaagaggaacccaggugc

SEQ ID NO: 322210 - RNA, 19 nt, Artificial Sequence
  Description of Artificial Sequence: Synthetic oligonucleotide
ucaugcauuaguugcuuug

SEQ ID NO: 322211 - RNA, 19 nt, Artificial Sequence
  Description of Artificial Sequence: Synthetic oligonucleotide
gguacugucacaccauacg

SEQ ID NO: 322212 - RNA, 19 nt, Artificial Sequence
  Description of Artificial Sequence: Synthetic oligonucleotide
cucaauggagucauaguac

SEQ ID NO: 322213 - RNA, 19 nt, Artificial Sequence
  Description of Artificial Sequence: Synthetic oligonucleotide
uucgggaagaggaacccag

SEQ ID NO: 322214 - RNA, 19 nt, Artificial Sequence
  Description of Artificial Sequence: Synthetic oligonucleotide
cuuuucgggaagaggaacc

SEQ ID NO: 322215 - RNA, 19 nt, Artificial Sequence
  Description of Artificial Sequence: Synthetic oligonucleotide
aagaaguauagcccuggga

SEQ ID NO: 322216 - RNA, 19 nt, Artificial Sequence
  Description of Artificial Sequence: Synthetic oligonucleotide
uauaguuaaggugggauau

SEQ ID NO: 322217 - RNA, 19 nt, Artificial Sequence
  Description of Artificial Sequence: Synthetic oligonucleotide
ucuacaagaguaggauugg

SEQ ID NO: 322218 - RNA, 19 nt, Artificial Sequence
  Description of Artificial Sequence: Synthetic oligonucleotide
acucaauggagucauagua

SEQ ID NO: 322219 - RNA, 19 nt, Artificial Sequence
  Description of Artificial Sequence: Synthetic oligonucleotide
aagauggaaucgaagccgg

SEQ ID NO: 322220 - RNA, 19 nt, Artificial Sequence
  Description of Artificial Sequence: Synthetic oligonucleotide
gucgaucucguucuuuucg

SEQ ID NO: 322221 - RNA, 19 nt, Artificial Sequence
  Description of Artificial Sequence: Synthetic oligonucleotide
auaagaaguauagcccugg

SEQ ID NO: 322222 - RNA, 19 nt, Artificial Sequence
  Description of Artificial Sequence: Synthetic oligonucleotide
accgaugguaccugcaggg

SEQ ID NO: 322223 - RNA, 19 nt, Artificial Sequence
  Description of Artificial Sequence: Synthetic oligonucleotide
uggguguacaggccuaggg

SEQ ID NO: 322224 - RNA, 19 nt, Artificial Sequence
  Description of Artificial Sequence: Synthetic oligonucleotide
uauuggagagcuguuguug

SEQ ID NO: 322225 - RNA, 19 nt, Artificial Sequence
  Description of Artificial Sequence: Synthetic oligonucleotide
auaguugugggcagcacac

SEQ ID NO: 322226 - RNA, 19 nt, Artificial Sequence
  Description of Artificial Sequence: Synthetic oligonucleotide
uuggugucgauaagggagc

SEQ ID NO: 322227 - RNA, 19 nt, Artificial Sequence
  Description of Artificial Sequence: Synthetic oligonucleotide
uuguagacccuccuucuug

SEQ ID NO: 322228 - RNA, 19 nt, Artificial Sequence
  Description of Artificial Sequence: Synthetic oligonucleotide
uuaagcagaaaagcugggc

SEQ ID NO: 322229 - RNA, 19 nt, Artificial Sequence
  Description of Artificial Sequence: Synthetic oligonucleotide
aaucgcacagggcgguagg

SEQ ID NO: 322230 - RNA, 19 nt, Artificial Sequence
  Description of Artificial Sequence: Synthetic oligonucleotide
uguggcuggguauuggaga

SEQ ID NO: 322231 - RNA, 19 nt, Artificial Sequence
  Description of Artificial Sequence: Synthetic oligonucleotide
ugguaaucgcacagggcgg

SEQ ID NO: 322232 - RNA, 19 nt, Artificial Sequence
  Description of Artificial Sequence: Synthetic oligonucleotide
uguguugcugcaaucccac

SEQ ID NO: 322233 - RNA, 19 nt, Artificial Sequence
  Description of Artificial Sequence: Synthetic oligonucleotide
cucugauaagguuggcugg

SEQ ID NO: 322234 - RNA, 19 nt, Artificial Sequence
  Description of Artificial Sequence: Synthetic oligonucleotide
ucuagagagcugagcacag

SEQ ID NO: 322235 - RNA, 19 nt, Artificial Sequence
  Description of Artificial Sequence: Synthetic oligonucleotide
guuaaggugggauauggaa

SEQ ID NO: 322236 - RNA, 19 nt, Artificial Sequence
  Description of Artificial Sequence: Synthetic oligonucleotide
aguugacucaguagcgucc

SEQ ID NO: 322237 - RNA, 19 nt, Artificial Sequence
  Description of Artificial Sequence: Synthetic oligonucleotide
gauaagguuggcuggagua

SEQ ID NO: 322238 - RNA, 19 nt, Artificial Sequence
  Description of Artificial Sequence: Synthetic oligonucleotide
uuguuugguggaaacuugu

SEQ ID NO: 322239 - RNA, 19 nt, Artificial Sequence
  Description of Artificial Sequence: Synthetic oligonucleotide
augacaguagucauaguug

SEQ ID NO: 322240 - RNA, 19 nt, Artificial Sequence
  Description of Artificial Sequence: Synthetic oligonucleotide
ccagccauacgccagaacg

SEQ ID NO: 322241 - RNA, 19 nt, Artificial Sequence
  Description of Artificial Sequence: Synthetic oligonucleotide
aagaacuaggggucaucug

SEQ ID NO: 322242 - RNA, 19 nt, Artificial Sequence
  Description of Artificial Sequence: Synthetic oligonucleotide
aguugaacggacgccugcc

SEQ ID NO: 322243 - RNA, 19 nt, Artificial Sequence
  Description of Artificial Sequence: Synthetic oligonucleotide
accauaggaagaacuaggg

SEQ ID NO: 322244 - RNA, 19 nt, Artificial Sequence
  Description of Artificial Sequence: Synthetic oligonucleotide
auuggagagcuguuguuga

SEQ ID NO: 322245 - RNA, 19 nt, Artificial Sequence
  Description of Artificial Sequence: Synthetic oligonucleotide
gagauacuagacaugucug

SEQ ID NO: 322246 - RNA, 19 nt, Artificial Sequence
  Description of Artificial Sequence: Synthetic oligonucleotide
uacgccagaacguucuaga

SEQ ID NO: 322247 - RNA, 19 nt, Artificial Sequence
  Description of Artificial Sequence: Synthetic oligonucleotide
auaguacccaucaugggug

SEQ ID NO: 322248 - RNA, 19 nt, Artificial Sequence
  Description of Artificial Sequence: Synthetic oligonucleotide
aguguuuggugugaaaccu

SEQ ID NO: 322249 - RNA, 19 nt, Artificial Sequence
  Description of Artificial Sequence: Synthetic oligonucleotide
uguagacccuccuucuuga

SEQ ID NO: 322250 - RNA, 19 nt, Artificial Sequence
  Description of Artificial Sequence: Synthetic oligonucleotide
aguacugguuuucucgcca

SEQ ID NO: 322251 - RNA, 19 nt, Artificial Sequence
  Description of Artificial Sequence: Synthetic oligonucleotide
agacaugucagcaccagug

SEQ ID NO: 322252 - RNA, 19 nt, Artificial Sequence
  Description of Artificial Sequence: Synthetic oligonucleotide
cauaagaaguauagcccug

SEQ ID NO: 322253 - RNA, 19 nt, Artificial Sequence
  Description of Artificial Sequence: Synthetic oligonucleotide
ugccuauaguuaagguggg

SEQ ID NO: 322254 - RNA, 19 nt, Artificial Sequence
  Description of Artificial Sequence: Synthetic oligonucleotide
ugccaaaccaggcccagga

SEQ ID NO: 322255 - RNA, 19 nt, Artificial Sequence
  Description of Artificial Sequence: Synthetic oligonucleotide
ucucguucuuuucgggaag

SEQ ID NO: 322256 - RNA, 19 nt, Artificial Sequence
  Description of Artificial Sequence: Synthetic oligonucleotide
uagagaagcagccguugcu

SEQ ID NO: 322257 - RNA, 19 nt, Artificial Sequence
  Description of Artificial Sequence: Synthetic oligonucleotide
ggauaaguuggucuaguug

SEQ ID NO: 322258 - RNA, 19 nt, Artificial Sequence
  Description of Artificial Sequence: Synthetic oligonucleotide
ugacugucccaacaucccc

SEQ ID NO: 322259 - RNA, 19 nt, Artificial Sequence
  Description of Artificial Sequence: Synthetic oligonucleotide
ucuaaguacugguuuucuc

SEQ ID NO: 322260 - RNA, 19 nt, Artificial Sequence
  Description of Artificial Sequence: Synthetic oligonucleotide
ugaaccuuuuccagacugu

SEQ ID NO: 322261 - RNA, 19 nt, Artificial Sequence
  Description of Artificial Sequence: Synthetic oligonucleotide
auaagguuggcuggaguag

SEQ ID NO: 322262 - RNA, 19 nt, Artificial Sequence
  Description of Artificial Sequence: Synthetic oligonucleotide
gagggaaggaccccaacca

SEQ ID NO: 322263 - RNA, 19 nt, Artificial Sequence
  Description of Artificial Sequence: Synthetic oligonucleotide
cacaguugugaaaagcuca

SEQ ID NO: 322264 - RNA, 19 nt, Artificial Sequence
  Description of Artificial Sequence: Synthetic oligonucleotide
ccaauugaucacaaucugg

SEQ ID NO: 322265 - RNA, 19 nt, Artificial Sequence
  Description of Artificial Sequence: Synthetic oligonucleotide
agcuuucaauacguggccc

SEQ ID NO: 322266 - RNA, 19 nt, Artificial Sequence
  Description of Artificial Sequence: Synthetic oligonucleotide
uggcaacaguugaugaacc

SEQ ID NO: 322267 - RNA, 19 nt, Artificial Sequence
  Description of Artificial Sequence: Synthetic oligonucleotide
uuuucgggaagaggaaccc

SEQ ID NO: 322268 - RNA, 19 nt, Artificial Sequence
  Description of Artificial Sequence: Synthetic oligonucleotide
auguccaacacaguuguga

SEQ ID NO: 322269 - RNA, 19 nt, Artificial Sequence
  Description of Artificial Sequence: Synthetic oligonucleotide
gaacguucuagagagcuga

SEQ ID NO: 322270 - RNA, 19 nt, Artificial Sequence
  Description of Artificial Sequence: Synthetic oligonucleotide
auacguuggggccugcuga

SEQ ID NO: 322271 - RNA, 19 nt, Artificial Sequence
  Description of Artificial Sequence: Synthetic oligonucleotide
uucaauacguggcccugga

SEQ ID NO: 322272 - RNA, 19 nt, Artificial Sequence
  Description of Artificial Sequence: Synthetic oligonucleotide
ugagccgcaguuugagugc

SEQ ID NO: 322273 - RNA, 19 nt, Artificial Sequence
  Description of Artificial Sequence: Synthetic oligonucleotide
ugucugcagccaauguucc

SEQ ID NO: 322274 - RNA, 19 nt, Artificial Sequence
  Description of Artificial Sequence: Synthetic oligonucleotide
aaacuuguagacccuccuu

SEQ ID NO: 322275 - RNA, 19 nt, Artificial Sequence
  Description of Artificial Sequence: Synthetic oligonucleotide
ucugauaagguuggcugga

SEQ ID NO: 322276 - RNA, 19 nt, Artificial Sequence
  Description of Artificial Sequence: Synthetic oligonucleotide
guaggaucuacaagaguag

SEQ ID NO: 322277 - RNA, 19 nt, Artificial Sequence
  Description of Artificial Sequence: Synthetic oligonucleotide
ugauaagguuggcuggagu

SEQ ID NO: 322278 - RNA, 19 nt, Artificial Sequence
  Description of Artificial Sequence: Synthetic oligonucleotide
aacuaggggucaucugaug

SEQ ID NO: 322279 - RNA, 19 nt, Artificial Sequence
  Description of Artificial Sequence: Synthetic oligonucleotide
uuucucgccaauugaucac

SEQ ID NO: 322280 - RNA, 19 nt, Artificial Sequence
  Description of Artificial Sequence: Synthetic oligonucleotide
caacacaguugugaaaagc

SEQ ID NO: 322281 - RNA, 19 nt, Artificial Sequence
  Description of Artificial Sequence: Synthetic oligonucleotide
acuacuggagcucgcccag

SEQ ID NO: 322282 - RNA, 19 nt, Artificial Sequence
  Description of Artificial Sequence: Synthetic oligonucleotide
gcucugauaagguuggcug

SEQ ID NO: 322283 - RNA, 19 nt, Artificial Sequence
  Description of Artificial Sequence: Synthetic oligonucleotide
cucgcguugcucauccugc

SEQ ID NO: 322284 - RNA, 19 nt, Artificial Sequence
  Description of Artificial Sequence: Synthetic oligonucleotide
ugggcaguuuggcaaugag

SEQ ID NO: 322285 - RNA, 19 nt, Artificial Sequence
  Description of Artificial Sequence: Synthetic oligonucleotide
aguggcaacaguugaugaa

SEQ ID NO: 322286 - RNA, 19 nt, Artificial Sequence
  Description of Artificial Sequence: Synthetic oligonucleotide
uggaaguugaacggacgcc

SEQ ID NO: 322287 - RNA, 19 nt, Artificial Sequence
  Description of Artificial Sequence: Synthetic oligonucleotide
acacaguugugaaaagcuc

SEQ ID NO: 322288 - RNA, 19 nt, Artificial Sequence
  Description of Artificial Sequence: Synthetic oligonucleotide
aaguugccgcacaagagcu

SEQ ID NO: 322289 - RNA, 19 nt, Artificial Sequence
  Description of Artificial Sequence: Synthetic oligonucleotide
guagagaagcagccguugc

SEQ ID NO: 322290 - RNA, 19 nt, Artificial Sequence
  Description of Artificial Sequence: Synthetic oligonucleotide
guaguggcaacaguugaug

SEQ ID NO: 322291 - RNA, 19 nt, Artificial Sequence
  Description of Artificial Sequence: Synthetic oligonucleotide
accacuacuggagcucgcc

SEQ ID NO: 322292 - RNA, 19 nt, Artificial Sequence
  Description of Artificial Sequence: Synthetic oligonucleotide
gguacuacgcugcacugug

SEQ ID NO: 322293 - RNA, 19 nt, Artificial Sequence
  Description of Artificial Sequence: Synthetic oligonucleotide
uauaugcacguuuguuuuc

SEQ ID NO: 322294 - RNA, 19 nt, Artificial Sequence
  Description of Artificial Sequence: Synthetic oligonucleotide
cugagagauacuagacaug

SEQ ID NO: 322295 - RNA, 19 nt, Artificial Sequence
  Description of Artificial Sequence: Synthetic oligonucleotide
gauggaaucgaagccggca

SEQ ID NO: 322296 - RNA, 19 nt, Artificial Sequence
  Description of Artificial Sequence: Synthetic oligonucleotide
ucgauaagggagcccugug

SEQ ID NO: 322297 - RNA, 19 nt, Artificial Sequence
  Description of Artificial Sequence: Synthetic oligonucleotide
acguucuagagagcugagc

SEQ ID NO: 322298 - RNA, 19 nt, Artificial Sequence
  Description of Artificial Sequence: Synthetic oligonucleotide
uguuugguggaaacuugua

SEQ ID NO: 322299 - RNA, 19 nt, Artificial Sequence
  Description of Artificial Sequence: Synthetic oligonucleotide
auauggaaccaggauuuug

SEQ ID NO: 322300 - RNA, 19 nt, Artificial Sequence
  Description of Artificial Sequence: Synthetic oligonucleotide
cagcuuucaauacguggcc

SEQ ID NO: 322301 - RNA, 19 nt, Artificial Sequence
  Description of Artificial Sequence: Synthetic oligonucleotide
uucugccuauaguuaaggu

SEQ ID NO: 322302 - RNA, 19 nt, Artificial Sequence
  Description of Artificial Sequence: Synthetic oligonucleotide
gcggguaggaucuacaaga

SEQ ID NO: 322303 - RNA, 19 nt, Artificial Sequence
  Description of Artificial Sequence: Synthetic oligonucleotide
guucuagagagcugagcac

SEQ ID NO: 322304 - RNA, 19 nt, Artificial Sequence
  Description of Artificial Sequence: Synthetic oligonucleotide
auacggggccacuccgacc

SEQ ID NO: 322305 - RNA, 19 nt, Artificial Sequence
  Description of Artificial Sequence: Synthetic oligonucleotide
ugauaagcacacucagcau

SEQ ID NO: 322306 - RNA, 19 nt, Artificial Sequence
  Description of Artificial Sequence: Synthetic oligonucleotide
uuugcugcugcugcugcug

SEQ ID NO: 322307 - RNA, 19 nt, Artificial Sequence
  Description of Artificial Sequence: Synthetic oligonucleotide
aaucgaagccggcaaucuu

SEQ ID NO: 322308 - RNA, 19 nt, Artificial Sequence
  Description of Artificial Sequence: Synthetic oligonucleotide
cauuguuagacugcauguc

SEQ ID NO: 322309 - RNA, 19 nt, Artificial Sequence
  Description of Artificial Sequence: Synthetic oligonucleotide
ugguggaaacuuguagacc

SEQ ID NO: 322310 - RNA, 19 nt, Artificial Sequence
  Description of Artificial Sequence: Synthetic oligonucleotide
cacccugggcacucaaugg

SEQ ID NO: 322311 - RNA, 19 nt, Artificial Sequence
  Description of Artificial Sequence: Synthetic oligonucleotide
ucgaagccggcaaucuugu

SEQ ID NO: 322312 - RNA, 19 nt, Artificial Sequence
  Description of Artificial Sequence: Synthetic oligonucleotide
cucaguagcguccaaauau

SEQ ID NO: 322313 - RNA, 19 nt, Artificial Sequence
  Description of Artificial Sequence: Synthetic oligonucleotide
ugggcccaugccauagucc

SEQ ID NO: 322314 - RNA, 19 nt, Artificial Sequence
  Description of Artificial Sequence: Synthetic oligonucleotide
caagaguaggauugguaga

SEQ ID NO: 322315 - RNA, 19 nt, Artificial Sequence
  Description of Artificial Sequence: Synthetic oligonucleotide
auaagggagcccuguggcu

SEQ ID NO: 322316 - RNA, 19 nt, Artificial Sequence
  Description of Artificial Sequence: Synthetic oligonucleotide
ugcaaucccacaugugaua

SEQ ID NO: 322317 - RNA, 19 nt, Artificial Sequence
  Description of Artificial Sequence: Synthetic oligonucleotide
cuauaguuaaggugggaua

SEQ ID NO: 322318 - RNA, 19 nt, Artificial Sequence
  Description of Artificial Sequence: Synthetic oligonucleotide
gaccccaaccacuacugga

SEQ ID NO: 322319 - RNA, 19 nt, Artificial Sequence
  Description of Artificial Sequence: Synthetic oligonucleotide
acgccagaacguucuagag

SEQ ID NO: 322320 - RNA, 19 nt, Artificial Sequence
  Description of Artificial Sequence: Synthetic oligonucleotide
caggauuuugcauggugca

SEQ ID NO: 322321 - RNA, 19 nt, Artificial Sequence
  Description of Artificial Sequence: Synthetic oligonucleotide
uaaucgcacagggcgguag

SEQ ID NO: 322322 - RNA, 19 nt, Artificial Sequence
  Description of Artificial Sequence: Synthetic oligonucleotide
gaggcgaggagucccucgc

SEQ ID NO: 322323 - RNA, 19 nt, Artificial Sequence
  Description of Artificial Sequence: Synthetic oligonucleotide
auaguuaaggugggauaug

SEQ ID NO: 322324 - RNA, 19 nt, Artificial Sequence
  Description of Artificial Sequence: Synthetic oligonucleotide
gaaacuuguagacccuccu

SEQ ID NO: 322325 - RNA, 19 nt, Artificial Sequence
  Description of Artificial Sequence: Synthetic oligonucleotide
cauacguuggggccugcug

SEQ ID NO: 322326 - RNA, 19 nt, Artificial Sequence
  Description of Artificial Sequence: Synthetic oligonucleotide
uacuggagcucgcccagga

SEQ ID NO: 322327 - RNA, 19 nt, Artificial Sequence
  Description of Artificial Sequence: Synthetic oligonucleotide
caguugacucaguagcguc

SEQ ID NO: 322328 - RNA, 19 nt, Artificial Sequence
  Description of Artificial Sequence: Synthetic oligonucleotide
gccaauugaucacaaucug

SEQ ID NO: 322329 - RNA, 19 nt, Artificial Sequence
  Description of Artificial Sequence: Synthetic oligonucleotide
caccgaugguaccugcagg

SEQ ID NO: 322330 - RNA, 19 nt, Artificial Sequence
  Description of Artificial Sequence: Synthetic oligonucleotide
caaccacuacuggagcucg

SEQ ID NO: 322331 - RNA, 19 nt, Artificial Sequence
  Description of Artificial Sequence: Synthetic oligonucleotide
gaaguugaacggacgccug

SEQ ID NO: 322332 - RNA, 19 nt, Artificial Sequence
  Description of Artificial Sequence: Synthetic oligonucleotide
uggguacuacgcugcacug

SEQ ID NO: 322333 - RNA, 19 nt, Artificial Sequence
  Description of Artificial Sequence: Synthetic oligonucleotide
guuuucucgccaauugauc

SEQ ID NO: 322334 - RNA, 19 nt, Artificial Sequence
  Description of Artificial Sequence: Synthetic oligonucleotide
ugaggguucaaggcccaug

SEQ ID NO: 322335 - RNA, 19 nt, Artificial Sequence
  Description of Artificial Sequence: Synthetic oligonucleotide
aggagcuaccagccauacg

SEQ ID NO: 322336 - RNA, 19 nt, Artificial Sequence
  Description of Artificial Sequence: Synthetic oligonucleotide
guuguugaaguugccgcac

SEQ ID NO: 322337 - RNA, 19 nt, Artificial Sequence
  Description of Artificial Sequence: Synthetic oligonucleotide
ugcuguugccguagaauuu

SEQ ID NO: 322338 - RNA, 19 nt, Artificial Sequence
  Description of Artificial Sequence: Synthetic oligonucleotide
aaggcccaugacaguaguc

SEQ ID NO: 322339 - RNA, 19 nt, Artificial Sequence
  Description of Artificial Sequence: Synthetic oligonucleotide
caauacguggcccuggacu

SEQ ID NO: 322340 - RNA, 19 nt, Artificial Sequence
  Description of Artificial Sequence: Synthetic oligonucleotide
cagugguagugguuccagg

SEQ ID NO: 322341 - RNA, 19 nt, Artificial Sequence
  Description of Artificial Sequence: Synthetic oligonucleotide
cugagcacagguuuagucu

SEQ ID NO: 322342 - RNA, 19 nt, Artificial Sequence
  Description of Artificial Sequence: Synthetic oligonucleotide
gugccucaugcauuaguug

SEQ ID NO: 322343 - RNA, 19 nt, Artificial Sequence
  Description of Artificial Sequence: Synthetic oligonucleotide
aacguucuagagagcugag

SEQ ID NO: 322344 - RNA, 19 nt, Artificial Sequence
  Description of Artificial Sequence: Synthetic oligonucleotide
agguaaugacaucucgguu

SEQ ID NO: 322345 - RNA, 19 nt, Artificial Sequence
  Description of Artificial Sequence: Synthetic oligonucleotide
uccacucggacugugccaa

SEQ ID NO: 322346 - RNA, 19 nt, Artificial Sequence
  Description of Artificial Sequence: Synthetic oligonucleotide
agauggaaucgaagccggc

SEQ ID NO: 322347 - RNA, 19 nt, Artificial Sequence
  Description of Artificial Sequence: Synthetic oligonucleotide
gccuuuggugucgauaagg

SEQ ID NO: 322348 - RNA, 19 nt, Artificial Sequence
  Description of Artificial Sequence: Synthetic oligonucleotide
auacgccagaacguucuag

SEQ ID NO: 322349 - RNA, 19 nt, Artificial Sequence
  Description of Artificial Sequence: Synthetic oligonucleotide
augugauacauaagaagua

SEQ ID NO: 322350 - RNA, 19 nt, Artificial Sequence
  Description of Artificial Sequence: Synthetic oligonucleotide
cauacggggccacuccgac

SEQ ID NO: 322351 - RNA, 19 nt, Artificial Sequence
  Description of Artificial Sequence: Synthetic oligonucleotide
cuguugccguagaauuugc

SEQ ID NO: 322352 - RNA, 19 nt, Artificial Sequence
  Description of Artificial Sequence: Synthetic oligonucleotide
aggauaaguuggucuaguu

SEQ ID NO: 322353 - RNA, 19 nt, Artificial Sequence
  Description of Artificial Sequence: Synthetic oligonucleotide
ucggcgguccacucggacu

SEQ ID NO: 322354 - RNA, 19 nt, Artificial Sequence
  Description of Artificial Sequence: Synthetic oligonucleotide
ugugccaaaccaggcccag

SEQ ID NO: 322355 - RNA, 19 nt, Artificial Sequence
  Description of Artificial Sequence: Synthetic oligonucleotide
aacggacgccugccuggac

SEQ ID NO: 322356 - RNA, 19 nt, Artificial Sequence
  Description of Artificial Sequence: Synthetic oligonucleotide
uuucgggaagaggaaccca

SEQ ID NO: 322357 - RNA, 19 nt, Artificial Sequence
  Description of Artificial Sequence: Synthetic oligonucleotide
ucgcacagggcgguagggg

SEQ ID NO: 322358 - RNA, 19 nt, Artificial Sequence
  Description of Artificial Sequence: Synthetic oligonucleotide
uaguacccaucaugggugu

SEQ ID NO: 322359 - RNA, 19 nt, Artificial Sequence
  Description of Artificial Sequence: Synthetic oligonucleotide
acggacgccugccuggaca

SEQ ID NO: 322360 - RNA, 19 nt, Artificial Sequence
  Description of Artificial Sequence: Synthetic oligonucleotide
ucguucuuuucgggaagag

SEQ ID NO: 322361 - RNA, 19 nt, Artificial Sequence
  Description of Artificial Sequence: Synthetic oligonucleotide
caccauacggggccacucc

SEQ ID NO: 322362 - RNA, 19 nt, Artificial Sequence
  Description of Artificial Sequence: Synthetic oligonucleotide
guugugggcagcacaccag

SEQ ID NO: 322363 - RNA, 19 nt, Artificial Sequence
  Description of Artificial Sequence: Synthetic oligonucleotide
gacgccugccuggacaccc

SEQ ID NO: 322364 - RNA, 19 nt, Artificial Sequence
  Description of Artificial Sequence: Synthetic oligonucleotide
aggaacccaggugcugacc

SEQ ID NO: 322365 - RNA, 19 nt, Artificial Sequence
  Description of Artificial Sequence: Synthetic oligonucleotide
uggaaacuuguagacccuc

SEQ ID NO: 322366 - RNA, 19 nt, Artificial Sequence
  Description of Artificial Sequence: Synthetic oligonucleotide
cuggagguacugucacacc

SEQ ID NO: 322367 - RNA, 19 nt, Artificial Sequence
  Description of Artificial Sequence: Synthetic oligonucleotide
acaccauacggggccacuc

SEQ ID NO: 322368 - RNA, 19 nt, Artificial Sequence
  Description of Artificial Sequence: Synthetic oligonucleotide
guuugagugccucaugcau

SEQ ID NO: 322369 - RNA, 19 nt, Artificial Sequence
  Description of Artificial Sequence: Synthetic oligonucleotide
uacaggccuagggaguucu

SEQ ID NO: 322370 - RNA, 19 nt, Artificial Sequence
  Description of Artificial Sequence: Synthetic oligonucleotide
ugcaaaccauaggaagaac

SEQ ID NO: 322371 - RNA, 19 nt, Artificial Sequence
  Description of Artificial Sequence: Synthetic oligonucleotide
ggucuuauaagaugagggu

SEQ ID NO: 322372 - RNA, 19 nt, Artificial Sequence
  Description of Artificial Sequence: Synthetic oligonucleotide
ucucgccaauugaucacaa

SEQ ID NO: 322373 - RNA, 19 nt, Artificial Sequence
  Description of Artificial Sequence: Synthetic oligonucleotide
caccaaguucauauaugca

SEQ ID NO: 322374 - RNA, 19 nt, Artificial Sequence
  Description of Artificial Sequence: Synthetic oligonucleotide
agaacguucuagagagcug

SEQ ID NO: 322375 - RNA, 19 nt, Artificial Sequence
  Description of Artificial Sequence: Synthetic oligonucleotide
acucaguagcguccaaaua

SEQ ID NO: 322376 - RNA, 19 nt, Artificial Sequence
  Description of Artificial Sequence: Synthetic oligonucleotide
cacuacuggagcucgccca

SEQ ID NO: 322377 - RNA, 19 nt, Artificial Sequence
  Description of Artificial Sequence: Synthetic oligonucleotide
guugcugcugcugcugcug

SEQ ID NO: 322378 - RNA, 19 nt, Artificial Sequence
  Description of Artificial Sequence: Synthetic oligonucleotide
ucgcguugcucauccugcc

SEQ ID NO: 322379 - RNA, 19 nt, Artificial Sequence
  Description of Artificial Sequence: Synthetic oligonucleotide
uggcggguaggaucuacaa

SEQ ID NO: 322380 - RNA, 19 nt, Artificial Sequence
  Description of Artificial Sequence: Synthetic oligonucleotide
cucggacugugccaaacca

SEQ ID NO: 322381 - RNA, 19 nt, Artificial Sequence
  Description of Artificial Sequence: Synthetic oligonucleotide
gaggagucccucgcguugc

SEQ ID NO: 322382 - RNA, 19 nt, Artificial Sequence
  Description of Artificial Sequence: Synthetic oligonucleotide
uccgaccugggcccaugcc

SEQ ID NO: 322383 - RNA, 19 nt, Artificial Sequence
  Description of Artificial Sequence: Synthetic oligonucleotide
gguugagccgcaguuugag

SEQ ID NO: 322384 - RNA, 19 nt, Artificial Sequence
  Description of Artificial Sequence: Synthetic oligonucleotide
aguuaaggugggauaugga

SEQ ID NO: 322385 - RNA, 19 nt, Artificial Sequence
  Description of Artificial Sequence: Synthetic oligonucleotide
guugacucaguagcgucca

SEQ ID NO: 322386 - RNA, 19 nt, Artificial Sequence
  Description of Artificial Sequence: Synthetic oligonucleotide
ggcggguaggaucuacaag

SEQ ID NO: 322387 - RNA, 19 nt, Artificial Sequence
  Description of Artificial Sequence: Synthetic oligonucleotide
uacguuggggccugcugau

SEQ ID NO: 322388 - RNA, 19 nt, Artificial Sequence
  Description of Artificial Sequence: Synthetic oligonucleotide
gguauuggagagcuguugu

SEQ ID NO: 322389 - RNA, 19 nt, Artificial Sequence
  Description of Artificial Sequence: Synthetic oligonucleotide
caggccuagggaguucugc

SEQ ID NO: 322390 - RNA, 19 nt, Artificial Sequence
  Description of Artificial Sequence: Synthetic oligonucleotide
gaaggaccccaaccacuac

SEQ ID NO: 322391 - RNA, 19 nt, Artificial Sequence
  Description of Artificial Sequence: Synthetic oligonucleotide
gagaggagcuaccagccau

SEQ ID NO: 322392 - RNA, 19 nt, Artificial Sequence
  Description of Artificial Sequence: Synthetic oligonucleotide
aucgcacagggcgguaggg

SEQ ID NO: 322393 - RNA, 19 nt, Artificial Sequence
  Description of Artificial Sequence: Synthetic oligonucleotide
gguagagaagcagccguug

SEQ ID NO: 322394 - RNA, 19 nt, Artificial Sequence
  Description of Artificial Sequence: Synthetic oligonucleotide
uacguggcccuggacugag

SEQ ID NO: 322395 - RNA, 19 nt, Artificial Sequence
  Description of Artificial Sequence: Synthetic oligonucleotide
auuuugcauggugcagaag

SEQ ID NO: 322396 - RNA, 19 nt, Artificial Sequence
  Description of Artificial Sequence: Synthetic oligonucleotide
ggcgguagggguccacacg

SEQ ID NO: 322397 - RNA, 19 nt, Artificial Sequence
  Description of Artificial Sequence: Synthetic oligonucleotide
aguagcguccaaauauguu

SEQ ID NO: 322398 - RNA, 19 nt, Artificial Sequence
  Description of Artificial Sequence: Synthetic oligonucleotide
uacugguuuucucgccaau

SEQ ID NO: 322399 - RNA, 19 nt, Artificial Sequence
  Description of Artificial Sequence: Synthetic oligonucleotide
aggcgaggagucccucgcg

SEQ ID NO: 322400 - RNA, 19 nt, Artificial Sequence
  Description of Artificial Sequence: Synthetic oligonucleotide
uugcugcugcugcugcugu

SEQ ID NO: 322401 - RNA, 19 nt, Artificial Sequence
  Description of Artificial Sequence: Synthetic oligonucleotide
ugggugcucugauaagguu

SEQ ID NO: 322402 - RNA, 19 nt, Artificial Sequence
  Description of Artificial Sequence: Synthetic oligonucleotide
gcccuuucagacaugucag

SEQ ID NO: 322403 - RNA, 19 nt, Artificial Sequence
  Description of Artificial Sequence: Synthetic oligonucleotide
uggugucgauaagggagcc

SEQ ID NO: 322404 - RNA, 19 nt, Artificial Sequence
  Description of Artificial Sequence: Synthetic oligonucleotide
acugguuuucucgccaauu

SEQ ID NO: 322405 - RNA, 19 nt, Artificial Sequence
  Description of Artificial Sequence: Synthetic oligonucleotide
gcaaucccacaugugauac

SEQ ID NO: 322406 - RNA, 19 nt, Artificial Sequence
  Description of Artificial Sequence: Synthetic oligonucleotide
ugcccauacguuggggccu

SEQ ID NO: 322407 - RNA, 19 nt, Artificial Sequence
  Description of Artificial Sequence: Synthetic oligonucleotide
gugauacauaagaaguaua

SEQ ID NO: 322408 - RNA, 19 nt, Artificial Sequence
  Description of Artificial Sequence: Synthetic oligonucleotide
cagaacguucuagagagcu

SEQ ID NO: 322409 - RNA, 19 nt, Artificial Sequence
  Description of Artificial Sequence: Synthetic oligonucleotide
gugucgauaagggagcccu

SEQ ID NO: 322410 - RNA, 19 nt, Artificial Sequence
  Description of Artificial Sequence: Synthetic oligonucleotide
gaaucgaagccggcaaucu

SEQ ID NO: 322411 - RNA, 19 nt, Artificial Sequence
  Description of Artificial Sequence: Synthetic oligonucleotide
uuuugucgaucucguucuu

SEQ ID NO: 322412 - RNA, 19 nt, Artificial Sequence
  Description of Artificial Sequence: Synthetic oligonucleotide
cgauaagggagcccugugg

SEQ ID NO: 322413 - RNA, 19 nt, Artificial Sequence
  Description of Artificial Sequence: Synthetic oligonucleotide
cauguccaacacaguugug

SEQ ID NO: 322414 - RNA, 19 nt, Artificial Sequence
  Description of Artificial Sequence: Synthetic oligonucleotide
gcuaccagccauacgccag

SEQ ID NO: 322415 - RNA, 19 nt, Artificial Sequence
  Description of Artificial Sequence: Synthetic oligonucleotide
caggcucuaguagggcagg

SEQ ID NO: 322416 - RNA, 19 nt, Artificial Sequence
  Description of Artificial Sequence: Synthetic oligonucleotide
cuguggcucacagguaaug

SEQ ID NO: 322417 - RNA, 19 nt, Artificial Sequence
  Description of Artificial Sequence: Synthetic oligonucleotide
gagccgcaguuugagugcc

SEQ ID NO: 322418 - RNA, 19 nt, Artificial Sequence
  Description of Artificial Sequence: Synthetic oligonucleotide
ggguauuggagagcuguug

SEQ ID NO: 322419 - RNA, 19 nt, Artificial Sequence
  Description of Artificial Sequence: Synthetic oligonucleotide
ccguagaauuugcugcugc

SEQ ID NO: 322420 - RNA, 19 nt, Artificial Sequence
  Description of Artificial Sequence: Synthetic oligonucleotide
cuaccagccauacgccaga

SEQ ID NO: 322421 - RNA, 19 nt, Artificial Sequence
  Description of Artificial Sequence: Synthetic oligonucleotide
gguugauucuggguguaca

SEQ ID NO: 322422 - RNA, 19 nt, Artificial Sequence
  Description of Artificial Sequence: Synthetic oligonucleotide
caguguacaagcaguuccu

SEQ ID NO: 322423 - RNA, 19 nt, Artificial Sequence
  Description of Artificial Sequence: Synthetic oligonucleotide
guacugguuuucucgccaa

SEQ ID NO: 322424 - RNA, 19 nt, Artificial Sequence
  Description of Artificial Sequence: Synthetic oligonucleotide
ggauauggaaccaggauuu

SEQ ID NO: 322425 - RNA, 19 nt, Artificial Sequence
  Description of Artificial Sequence: Synthetic oligonucleotide
uugacucaguagcguccaa

SEQ ID NO: 322426 - RNA, 19 nt, Artificial Sequence
  Description of Artificial Sequence: Synthetic oligonucleotide
ggcucuaguagggcagggg

SEQ ID NO: 322427 - RNA, 19 nt, Artificial Sequence
  Description of Artificial Sequence: Synthetic oligonucleotide
agccauacgccagaacguu

SEQ ID NO: 322428 - RNA, 19 nt, Artificial Sequence
  Description of Artificial Sequence: Synthetic oligonucleotide
ggaaguugaacggacgccu

SEQ ID NO: 322429 - RNA, 19 nt, Artificial Sequence
  Description of Artificial Sequence: Synthetic oligonucleotide
gcgguagggguccacacga

SEQ ID NO: 322430 - RNA, 19 nt, Artificial Sequence
  Description of Artificial Sequence: Synthetic oligonucleotide
gcccaugccauaguccucc

SEQ ID NO: 322431 - RNA, 19 nt, Artificial Sequence
  Description of Artificial Sequence: Synthetic oligonucleotide
ggaaucgaagccggcaauc

SEQ ID NO: 322432 - RNA, 19 nt, Artificial Sequence
  Description of Artificial Sequence: Synthetic oligonucleotide
ugggcccacucuguagucu

SEQ ID NO: 322433 - RNA, 19 nt, Artificial Sequence
  Description of Artificial Sequence: Synthetic oligonucleotide
ccucaggugugugugguag

SEQ ID NO: 322434 - RNA, 19 nt, Artificial Sequence
  Description of Artificial Sequence: Synthetic oligonucleotide
gccauaguccuccgacuug

SEQ ID NO: 322435 - RNA, 19 nt, Artificial Sequence
  Description of Artificial Sequence: Synthetic oligonucleotide
cacucggacugugccaaac

SEQ ID NO: 322436 - RNA, 19 nt, Artificial Sequence
  Description of Artificial Sequence: Synthetic oligonucleotide
gucaucugauggacagaug

SEQ ID NO: 322437 - RNA, 19 nt, Artificial Sequence
  Description of Artificial Sequence: Synthetic oligonucleotide
aguugccgcacaagagcug

SEQ ID NO: 322438 - RNA, 19 nt, Artificial Sequence
  Description of Artificial Sequence: Synthetic oligonucleotide
augccucccaccagguuga

SEQ ID NO: 322439 - RNA, 19 nt, Artificial Sequence
  Description of Artificial Sequence: Synthetic oligonucleotide
cccuuucagacaugucagc

SEQ ID NO: 322440 - RNA, 19 nt, Artificial Sequence
  Description of Artificial Sequence: Synthetic oligonucleotide
cuacuggagcucgcccagg

SEQ ID NO: 322441 - RNA, 19 nt, Artificial Sequence
  Description of Artificial Sequence: Synthetic oligonucleotide
gggcccacucuguagucug

SEQ ID NO: 322442 - RNA, 19 nt, Artificial Sequence
  Description of Artificial Sequence: Synthetic oligonucleotide
gauugguagaagggugggu

SEQ ID NO: 322443 - RNA, 19 nt, Artificial Sequence
  Description of Artificial Sequence: Synthetic oligonucleotide
guuggucuaguuggcagcu

SEQ ID NO: 322444 - RNA, 19 nt, Artificial Sequence
  Description of Artificial Sequence: Synthetic oligonucleotide
gcagugguagugguuccag

SEQ ID NO: 322445 - RNA, 19 nt, Artificial Sequence
  Description of Artificial Sequence: Synthetic oligonucleotide
agagaggcgaggagucccu

SEQ ID NO: 322446 - RNA, 19 nt, Artificial Sequence
  Description of Artificial Sequence: Synthetic oligonucleotide
cucggcgguccacucggac

SEQ ID NO: 322447 - RNA, 19 nt, Artificial Sequence
  Description of Artificial Sequence: Synthetic oligonucleotide
cucaggugugugugguaga

SEQ ID NO: 322448 - RNA, 19 nt, Artificial Sequence
  Description of Artificial Sequence: Synthetic oligonucleotide
ggugcugacccuucuccaa

SEQ ID NO: 322449 - RNA, 19 nt, Artificial Sequence
  Description of Artificial Sequence: Synthetic oligonucleotide
cgaucucguucuuuucggg

SEQ ID NO: 322450 - RNA, 19 nt, Artificial Sequence
  Description of Artificial Sequence: Synthetic oligonucleotide
gugccaaaccaggcccagg

SEQ ID NO: 322451 - RNA, 19 nt, Artificial Sequence
  Description of Artificial Sequence: Synthetic oligonucleotide
gccgcacaagagcugcugc

SEQ ID NO: 322452 - RNA, 19 nt, Artificial Sequence
  Description of Artificial Sequence: Synthetic oligonucleotide
gaacuaggggucaucugau

SEQ ID NO: 322453 - RNA, 19 nt, Artificial Sequence
  Description of Artificial Sequence: Synthetic oligonucleotide
guauuggagagcuguuguu

SEQ ID NO: 322454 - RNA, 19 nt, Artificial Sequence
  Description of Artificial Sequence: Synthetic oligonucleotide
cugcaaucccacaugugau

SEQ ID NO: 322455 - RNA, 19 nt, Artificial Sequence
  Description of Artificial Sequence: Synthetic oligonucleotide
cucguucuuuucgggaaga

SEQ ID NO: 322456 - RNA, 19 nt, Artificial Sequence
  Description of Artificial Sequence: Synthetic oligonucleotide
guacccaucaugggugucu

SEQ ID NO: 322457 - RNA, 19 nt, Artificial Sequence
  Description of Artificial Sequence: Synthetic oligonucleotide
guaguaggcucugggccga

SEQ ID NO: 322458 - RNA, 19 nt, Artificial Sequence
  Description of Artificial Sequence: Synthetic oligonucleotide
caguagcguccaaauaugu

SEQ ID NO: 322459 - RNA, 19 nt, Artificial Sequence
  Description of Artificial Sequence: Synthetic oligonucleotide
guugaacggacgccugccu

SEQ ID NO: 322460 - RNA, 19 nt, Artificial Sequence
  Description of Artificial Sequence: Synthetic oligonucleotide
cuccgaccugggcccaugc

SEQ ID NO: 322461 - RNA, 19 nt, Artificial Sequence
  Description of Artificial Sequence: Synthetic oligonucleotide
gggcccaugccauaguccu

SEQ ID NO: 322462 - RNA, 19 nt, Artificial Sequence
  Description of Artificial Sequence: Synthetic oligonucleotide
ccaggauaaguuggucuag

SEQ ID NO: 322463 - RNA, 19 nt, Artificial Sequence
  Description of Artificial Sequence: Synthetic oligonucleotide
gguuggcuggaguaggcgu

SEQ ID NO: 322464 - RNA, 19 nt, Artificial Sequence
  Description of Artificial Sequence: Synthetic oligonucleotide
gaacggacgccugccugga

SEQ ID NO: 322465 - RNA, 19 nt, Artificial Sequence
  Description of Artificial Sequence: Synthetic oligonucleotide
auacguggcccuggacuga

SEQ ID NO: 322466 - RNA, 19 nt, Artificial Sequence
  Description of Artificial Sequence: Synthetic oligonucleotide
ccacuacuggagcucgccc

SEQ ID NO: 322467 - RNA, 19 nt, Artificial Sequence
  Description of Artificial Sequence: Synthetic oligonucleotide
agccaauguuccauugaua

SEQ ID NO: 322468 - RNA, 19 nt, Artificial Sequence
  Description of Artificial Sequence: Synthetic oligonucleotide
guugagccgcaguuugagu

SEQ ID NO: 322469 - RNA, 19 nt, Artificial Sequence
  Description of Artificial Sequence: Synthetic oligonucleotide
gguacacagaggucuuaua

SEQ ID NO: 322470 - RNA, 19 nt, Artificial Sequence
  Description of Artificial Sequence: Synthetic oligonucleotide
ggucaucugauggacagau

SEQ ID NO: 322471 - RNA, 19 nt, Artificial Sequence
  Description of Artificial Sequence: Synthetic oligonucleotide
ccgacuugguggcuggcug

SEQ ID NO: 322472 - RNA, 19 nt, Artificial Sequence
  Description of Artificial Sequence: Synthetic oligonucleotide
ccuccgacuugguggcugg

SEQ ID NO: 322473 - RNA, 19 nt, Artificial Sequence
  Description of Artificial Sequence: Synthetic oligonucleotide
aggagucccucgcguugcu

SEQ ID NO: 322474 - RNA, 19 nt, Artificial Sequence
  Description of Artificial Sequence: Synthetic oligonucleotide
augguaccugcagggccug

SEQ ID NO: 322475 - RNA, 19 nt, Artificial Sequence
  Description of Artificial Sequence: Synthetic oligonucleotide
ccagaacguucuagagagc

SEQ ID NO: 322476 - RNA, 19 nt, Artificial Sequence
  Description of Artificial Sequence: Synthetic oligonucleotide
ucgugccacucggcggucc

SEQ ID NO: 322477 - RNA, 19 nt, Artificial Sequence
  Description of Artificial Sequence: Synthetic oligonucleotide
uaguaggcucugggccgag

SEQ ID NO: 322478 - RNA, 19 nt, Artificial Sequence
  Description of Artificial Sequence: Synthetic oligonucleotide
guggcggguaggaucuaca

SEQ ID NO: 322479 - RNA, 19 nt, Artificial Sequence
  Description of Artificial Sequence: Synthetic oligonucleotide
ugcugcugcugcugcuguu

SEQ ID NO: 322480 - RNA, 19 nt, Artificial Sequence
  Description of Artificial Sequence: Synthetic oligonucleotide
cgccaauugaucacaaucu

SEQ ID NO: 322481 - RNA, 19 nt, Artificial Sequence
  Description of Artificial Sequence: Synthetic oligonucleotide
ccauacgccagaacguucu

SEQ ID NO: 322482 - RNA, 19 nt, Artificial Sequence
  Description of Artificial Sequence: Synthetic oligonucleotide
caggauaaguuggucuagu

SEQ ID NO: 322483 - RNA, 19 nt, Artificial Sequence
  Description of Artificial Sequence: Synthetic oligonucleotide
ccacucggcgguccacucg

SEQ ID NO: 322484 - RNA, 19 nt, Artificial Sequence
  Description of Artificial Sequence: Synthetic oligonucleotide
acguuggggccugcugaug

SEQ ID NO: 322485 - RNA, 19 nt, Artificial Sequence
  Description of Artificial Sequence: Synthetic oligonucleotide
ccuauaguuaaggugggau

SEQ ID NO: 322486 - RNA, 19 nt, Artificial Sequence
  Description of Artificial Sequence: Synthetic oligonucleotide
acuccgaccugggcccaug

SEQ ID NO: 322487 - RNA, 19 nt, Artificial Sequence
  Description of Artificial Sequence: Synthetic oligonucleotide
cuuguagacccuccuucuu

SEQ ID NO: 322488 - RNA, 19 nt, Artificial Sequence
  Description of Artificial Sequence: Synthetic oligonucleotide
guauagcccugggaagucu

SEQ ID NO: 322489 - RNA, 19 nt, Artificial Sequence
  Description of Artificial Sequence: Synthetic oligonucleotide
ccgaccugggcccaugcca

SEQ ID NO: 322490 - RNA, 19 nt, Artificial Sequence
  Description of Artificial Sequence: Synthetic oligonucleotide
guggaaacuuguagacccu

SEQ ID NO: 322491 - RNA, 19 nt, Artificial Sequence
  Description of Artificial Sequence: Synthetic oligonucleotide
cauacgccagaacguucua

SEQ ID NO: 322492 - RNA, 19 nt, Artificial Sequence
  Description of Artificial Sequence: Synthetic oligonucleotide
gguaguggcaacaguugau

SEQ ID NO: 322493 - RNA, 19 nt, Artificial Sequence
  Description of Artificial Sequence: Synthetic oligonucleotide
gcguugcucauccugcccu

SEQ ID NO: 322494 - RNA, 19 nt, Artificial Sequence
  Description of Artificial Sequence: Synthetic oligonucleotide
gguaaucgcacagggcggu

SEQ ID NO: 322495 - RNA, 19 nt, Artificial Sequence
  Description of Artificial Sequence: Synthetic oligonucleotide
ccgaugguaccugcagggc

SEQ ID NO: 322496 - RNA, 19 nt, Artificial Sequence
  Description of Artificial Sequence: Synthetic oligonucleotide
gccuagggaguucugccua

SEQ ID NO: 322497 - RNA, 19 nt, Artificial Sequence
  Description of Artificial Sequence: Synthetic oligonucleotide
acaggccuagggaguucug

SEQ ID NO: 322498 - RNA, 19 nt, Artificial Sequence
  Description of Artificial Sequence: Synthetic oligonucleotide
guacaggccuagggaguuc

SEQ ID NO: 322499 - RNA, 19 nt, Artificial Sequence
  Description of Artificial Sequence: Synthetic oligonucleotide
gggcaccgaugguaccugc

SEQ ID NO: 322500 - RNA, 19 nt, Artificial Sequence
  Description of Artificial Sequence: Synthetic oligonucleotide
cauaguccuccgacuuggu

SEQ ID NO: 322501 - RNA, 19 nt, Artificial Sequence
  Description of Artificial Sequence: Synthetic oligonucleotide
ggguuguggcuggguauug

SEQ ID NO: 322502 - RNA, 19 nt, Artificial Sequence
  Description of Artificial Sequence: Synthetic oligonucleotide
cucgccaauugaucacaau

SEQ ID NO: 322503 - RNA, 19 nt, Artificial Sequence
  Description of Artificial Sequence: Synthetic oligonucleotide
ggggcaccgaugguaccug

SEQ ID NO: 322504 - RNA, 19 nt, Artificial Sequence
  Description of Artificial Sequence: Synthetic oligonucleotide
gccauacgccagaacguuc

SEQ ID NO: 322505 - RNA, 19 nt, Artificial Sequence
  Description of Artificial Sequence: Synthetic oligonucleotide
ggcaccgaugguaccugca

SEQ ID NO: 322506 - RNA, 19 nt, Artificial Sequence
  Description of Artificial Sequence: Synthetic oligonucleotide
gguagugguuccagguagu

SEQ ID NO: 322507 - RNA, 19 nt, Artificial Sequence
  Description of Artificial Sequence: Synthetic oligonucleotide
gcguccaaauauguuggua

SEQ ID NO: 322508 - RNA, 19 nt, Artificial Sequence
  Description of Artificial Sequence: Synthetic oligonucleotide
guaaucgcacagggcggua

SEQ ID NO: 322509 - RNA, 19 nt, Artificial Sequence
  Description of Artificial Sequence: Synthetic oligonucleotide
gccuauaguuaagguggga

SEQ ID NO: 322510 - RNA, 19 nt, Artificial Sequence
  Description of Artificial Sequence: Synthetic oligonucleotide
cuagggaguucugccuaua

SEQ ID NO: 322511 - RNA, 19 nt, Artificial Sequence
  Description of Artificial Sequence: Synthetic oligonucleotide
ggcgaggagucccucgcgu

SEQ ID NO: 322512 - RNA, 19 nt, Artificial Sequence
  Description of Artificial Sequence: Synthetic oligonucleotide
acguggcccuggacugagg

SEQ ID NO: 322513 - RNA, 19 nt, Artificial Sequence
  Description of Artificial Sequence: Synthetic oligonucleotide
cgcguugcucauccugccc

SEQ ID NO: 322514 - RNA, 19 nt, Artificial Sequence
  Description of Artificial Sequence: Synthetic oligonucleotide
ccauacggggccacuccga

SEQ ID NO: 322515 - RNA, 19 nt, Artificial Sequence
  Description of Artificial Sequence: Synthetic oligonucleotide
gcccauacguuggggccug

SEQ ID NO: 322516 - RNA, 19 nt, Artificial Sequence
  Description of Artificial Sequence: Synthetic oligonucleotide
gcacagggcgguagggguc

SEQ ID NO: 322517 - RNA, 19 nt, Artificial Sequence
  Description of Artificial Sequence: Synthetic oligonucleotide
guacuacgcugcacugugu

SEQ ID NO: 322518 - RNA, 19 nt, Artificial Sequence
  Description of Artificial Sequence: Synthetic oligonucleotide
gugccacucggcgguccac

SEQ ID NO: 322519 - RNA, 19 nt, Artificial Sequence
  Description of Artificial Sequence: Synthetic oligonucleotide
acgccugccuggacacccu

SEQ ID NO: 322520 - RNA, 19 nt, Artificial Sequence
  Description of Artificial Sequence: Synthetic oligonucleotide
ccggcaaucuuguugccuu

SEQ ID NO: 322521 - RNA, 19 nt, Artificial Sequence
  Description of Artificial Sequence: Synthetic oligonucleotide
ccaguugacucaguagcgu

SEQ ID NO: 322522 - RNA, 19 nt, Artificial Sequence
  Description of Artificial Sequence: Synthetic oligonucleotide
cucgugccacucggcgguc

SEQ ID NO: 322523 - RNA, 19 nt, Artificial Sequence
  Description of Artificial Sequence: Synthetic oligonucleotide
ggagucccucgcguugcuc

SEQ ID NO: 322524 - RNA, 19 nt, Artificial Sequence
  Description of Artificial Sequence: Synthetic oligonucleotide
ccgcaguuugagugccuca

SEQ ID NO: 322525 - RNA, 19 nt, Artificial Sequence
  Description of Artificial Sequence: Synthetic oligonucleotide
ggacgccugccuggacacc

SEQ ID NO: 322526 - RNA, 19 nt, Artificial Sequence
  Description of Artificial Sequence: Synthetic oligonucleotide
gcgguccacucggacugug

SEQ ID NO: 322527 - RNA, 19 nt, Artificial Sequence
  Description of Artificial Sequence: Synthetic oligonucleotide
gccggcaaucuuguugccu

SEQ ID NO: 322528 - RNA, 19 nt, Artificial Sequence
  Description of Artificial Sequence: Synthetic oligonucleotide
cuguugcagguggcgggua

SEQ ID NO: 322529 - RNA, 19 nt, Artificial Sequence
  Description of Artificial Sequence: Synthetic oligonucleotide
gcgaggagucccucgcguu

SEQ ID NO: 322530 - RNA, 19 nt, Artificial Sequence
  Description of Artificial Sequence: Synthetic oligonucleotide
ccgaggccucaggugugug

SEQ ID NO: 322531 - RNA, 19 nt, Artificial Sequence
  Description of Artificial Sequence: Synthetic oligonucleotide
cccauacguuggggccugc

SEQ ID NO: 322532 - RNA, 19 nt, Artificial Sequence
  Description of Artificial Sequence: Synthetic oligonucleotide
guccuccgacuugguggcu

SEQ ID NO: 322533 - RNA, 19 nt, Artificial Sequence
  Description of Artificial Sequence: Synthetic oligonucleotide
ccauacguuggggccugcu

SEQ ID NO: 322534 - RNA, 19 nt, Artificial Sequence
  Description of Artificial Sequence: Synthetic oligonucleotide
ggcgguccacucggacugu

SEQ ID NO: 322535 - RNA, 19 nt, Artificial Sequence
  Description of Artificial Sequence: Synthetic oligonucleotide
cacuccgaccugggcccau

SEQ ID NO: 322536 - RNA, 19 nt, Artificial Sequence
  Description of Artificial Sequence: Synthetic oligonucleotide
cccucgcguugcucauccu

SEQ ID NO: 322537 - RNA, 19 nt, Artificial Sequence
  Description of Artificial Sequence: Synthetic oligonucleotide
uuuaauaacacuauguguc

SEQ ID NO: 322538 - RNA, 19 nt, Artificial Sequence
  Description of Artificial Sequence: Synthetic oligonucleotide
ucuaauaucgccaugaaau

SEQ ID NO: 322539 - RNA, 19 nt, Artificial Sequence
  Description of Artificial Sequence: Synthetic oligonucleotide
uguaucaauaccuacauac

SEQ ID NO: 322540 - RNA, 19 nt, Artificial Sequence
  Description of Artificial Sequence: Synthetic oligonucleotide
uuaaaugggucucagcucg

SEQ ID NO: 322541 - RNA, 19 nt, Artificial Sequence
  Description of Artificial Sequence: Synthetic oligonucleotide
aauguguguacaucucucc

SEQ ID NO: 322542 - RNA, 19 nt, Artificial Sequence
  Description of Artificial Sequence: Synthetic oligonucleotide
acuacuaaugcuuuuagca

SEQ ID NO: 322543 - RNA, 19 nt, Artificial Sequence
  Description of Artificial Sequence: Synthetic oligonucleotide
uuauuagauauauucagca

SEQ ID NO: 322544 - RNA, 19 nt, Artificial Sequence
  Description of Artificial Sequence: Synthetic oligonucleotide
aacacuaugugucagugga

SEQ ID NO: 322545 - RNA, 19 nt, Artificial Sequence
  Description of Artificial Sequence: Synthetic oligonucleotide
agaguaaacuacuugcugg

SEQ ID NO: 322546 - RNA, 19 nt, Artificial Sequence
  Description of Artificial Sequence: Synthetic oligonucleotide
uuaaguacauuacaugaug

SEQ ID NO: 322547 - RNA, 19 nt, Artificial Sequence
  Description of Artificial Sequence: Synthetic oligonucleotide
uguuuaaagugcuaugucc

SEQ ID NO: 322548 - RNA, 19 nt, Artificial Sequence
  Description of Artificial Sequence: Synthetic oligonucleotide
uuaugaauuuuccaggcca

SEQ ID NO: 322549 - RNA, 19 nt, Artificial Sequence
  Description of Artificial Sequence: Synthetic oligonucleotide
agugcuauguccuucagug

SEQ ID NO: 322550 - RNA, 19 nt, Artificial Sequence
  Description of Artificial Sequence: Synthetic oligonucleotide
cagacuauccauuugagac

SEQ ID NO: 322551 - RNA, 19 nt, Artificial Sequence
  Description of Artificial Sequence: Synthetic oligonucleotide
ucugauugcuguuuaacag

SEQ ID NO: 322552 - RNA, 19 nt, Artificial Sequence
  Description of Artificial Sequence: Synthetic oligonucleotide
ugauugcuguuuaacagcg

SEQ ID NO: 322553 - RNA, 19 nt, Artificial Sequence
  Description of Artificial Sequence: Synthetic oligonucleotide
uuacauuucuaauaucgcc

SEQ ID NO: 322554 - RNA, 19 nt, Artificial Sequence
  Description of Artificial Sequence: Synthetic oligonucleotide
aaguacauuacaugauguc

SEQ ID NO: 322555 - RNA, 19 nt, Artificial Sequence
  Description of Artificial Sequence: Synthetic oligonucleotide
aguguaucaauucauguga

SEQ ID NO: 322556 - RNA, 19 nt, Artificial Sequence
  Description of Artificial Sequence: Synthetic oligonucleotide
uuuaucuacuuuacacugg

SEQ ID NO: 322557 - RNA, 19 nt, Artificial Sequence
  Description of Artificial Sequence: Synthetic oligonucleotide
aacuauucgaagaaccugg

SEQ ID NO: 322558 - RNA, 19 nt, Artificial Sequence
  Description of Artificial Sequence: Synthetic oligonucleotide
agaaccuggagacugcccc

SEQ ID NO: 322559 - RNA, 19 nt, Artificial Sequence
  Description of Artificial Sequence: Synthetic oligonucleotide
uuacauucugaucuaacca

SEQ ID NO: 322560 - RNA, 19 nt, Artificial Sequence
  Description of Artificial Sequence: Synthetic oligonucleotide
aggccauuaaucccgaggc

SEQ ID NO: 322561 - RNA, 19 nt, Artificial Sequence
  Description of Artificial Sequence: Synthetic oligonucleotide
ugcucgaccacuuugaccu

SEQ ID NO: 322562 - RNA, 19 nt, Artificial Sequence
  Description of Artificial Sequence: Synthetic oligonucleotide
uauaguguaucaauucaug

SEQ ID NO: 322563 - RNA, 19 nt, Artificial Sequence
  Description of Artificial Sequence: Synthetic oligonucleotide
aaaguagugucacugccug

SEQ ID NO: 322564 - RNA, 19 nt, Artificial Sequence
  Description of Artificial Sequence: Synthetic oligonucleotide
aaggccauuaaucccgagg

SEQ ID NO: 322565 - RNA, 19 nt, Artificial Sequence
  Description of Artificial Sequence: Synthetic oligonucleotide
auuagauauauucagcaau

SEQ ID NO: 322566 - RNA, 19 nt, Artificial Sequence
  Description of Artificial Sequence: Synthetic oligonucleotide
gguagaagggcguugaugg

SEQ ID NO: 322567 - RNA, 19 nt, Artificial Sequence
  Description of Artificial Sequence: Synthetic oligonucleotide
cauguuggcaguuggaggg

SEQ ID NO: 322568 - RNA, 19 nt, Artificial Sequence
  Description of Artificial Sequence: Synthetic oligonucleotide
aucaacuuaucucuuagug

SEQ ID NO: 322569 - RNA, 19 nt, Artificial Sequence
  Description of Artificial Sequence: Synthetic oligonucleotide
auugacaccacugcugucc

SEQ ID NO: 322570 - RNA, 19 nt, Artificial Sequence
  Description of Artificial Sequence: Synthetic oligonucleotide
agguuuaggaacugcagac

SEQ ID NO: 322571 - RNA, 19 nt, Artificial Sequence
  Description of Artificial Sequence: Synthetic oligonucleotide
aaagugugcauuaaguaug

SEQ ID NO: 322572 - RNA, 19 nt, Artificial Sequence
  Description of Artificial Sequence: Synthetic oligonucleotide
ucaacuuaucucuuagugc

SEQ ID NO: 322573 - RNA, 19 nt, Artificial Sequence
  Description of Artificial Sequence: Synthetic oligonucleotide
auuauaauggauguagucu

SEQ ID NO: 322574 - RNA, 19 nt, Artificial Sequence
  Description of Artificial Sequence: Synthetic oligonucleotide
uaaaccuucuguuaggguc

SEQ ID NO: 322575 - RNA, 19 nt, Artificial Sequence
  Description of Artificial Sequence: Synthetic oligonucleotide
uaaguaugcuuguacauga

SEQ ID NO: 322576 - RNA, 19 nt, Artificial Sequence
  Description of Artificial Sequence: Synthetic oligonucleotide
guuaaaaguagugucacug

SEQ ID NO: 322577 - RNA, 19 nt, Artificial Sequence
  Description of Artificial Sequence: Synthetic oligonucleotide
uaguguaucaauucaugug

SEQ ID NO: 322578 - RNA, 19 nt, Artificial Sequence
  Description of Artificial Sequence: Synthetic oligonucleotide
aacguuugguacuauuucu

SEQ ID NO: 322579 - RNA, 19 nt, Artificial Sequence
  Description of Artificial Sequence: Synthetic oligonucleotide
uaugaauuuuccaggccag

SEQ ID NO: 322580 - RNA, 19 nt, Artificial Sequence
  Description of Artificial Sequence: Synthetic oligonucleotide
agaugauauaucaccaagc

SEQ ID NO: 322581 - RNA, 19 nt, Artificial Sequence
  Description of Artificial Sequence: Synthetic oligonucleotide
uuaacagcgacuguagaug

SEQ ID NO: 322582 - RNA, 19 nt, Artificial Sequence
  Description of Artificial Sequence: Synthetic oligonucleotide
aauaucgccaugaaauucu

SEQ ID NO: 322583 - RNA, 19 nt, Artificial Sequence
  Description of Artificial Sequence: Synthetic oligonucleotide
ucuagaaacguuugguacu

SEQ ID NO: 322584 - RNA, 19 nt, Artificial Sequence
  Description of Artificial Sequence: Synthetic oligonucleotide
uuaaguaugcuuguacaug

SEQ ID NO: 322585 - RNA, 19 nt, Artificial Sequence
  Description of Artificial Sequence: Synthetic oligonucleotide
uguugggagaagcauguug

SEQ ID NO: 322586 - RNA, 19 nt, Artificial Sequence
  Description of Artificial Sequence: Synthetic oligonucleotide
aucacuugaccacuuauca

SEQ ID NO: 322587 - RNA, 19 nt, Artificial Sequence
  Description of Artificial Sequence: Synthetic oligonucleotide
ucuaaaccuucuguuaggg

SEQ ID NO: 322588 - RNA, 19 nt, Artificial Sequence
  Description of Artificial Sequence: Synthetic oligonucleotide
acguccuuggucuauagug

SEQ ID NO: 322589 - RNA, 19 nt, Artificial Sequence
  Description of Artificial Sequence: Synthetic oligonucleotide
gauuccuuaggucaucuuc

SEQ ID NO: 322590 - RNA, 19 nt, Artificial Sequence
  Description of Artificial Sequence: Synthetic oligonucleotide
agauaaagugugcauuaag

SEQ ID NO: 322591 - RNA, 19 nt, Artificial Sequence
  Description of Artificial Sequence: Synthetic oligonucleotide
auaaaagauaaagugugca

SEQ ID NO: 322592 - RNA, 19 nt, Artificial Sequence
  Description of Artificial Sequence: Synthetic oligonucleotide
auaguguaucaauucaugu

SEQ ID NO: 322593 - RNA, 19 nt, Artificial Sequence
  Description of Artificial Sequence: Synthetic oligonucleotide
aagugugcauuaaguaugc

SEQ ID NO: 322594 - RNA, 19 nt, Artificial Sequence
  Description of Artificial Sequence: Synthetic oligonucleotide
uucuaaaccuucuguuagg

SEQ ID NO: 322595 - RNA, 19 nt, Artificial Sequence
  Description of Artificial Sequence: Synthetic oligonucleotide
aucgccaugaaauucugca

SEQ ID NO: 322596 - RNA, 19 nt, Artificial Sequence
  Description of Artificial Sequence: Synthetic oligonucleotide
cauucugaucuaaccaugg

SEQ ID NO: 322597 - RNA, 19 nt, Artificial Sequence
  Description of Artificial Sequence: Synthetic oligonucleotide
acccauuaaugcuuuuggc

SEQ ID NO: 322598 - RNA, 19 nt, Artificial Sequence
  Description of Artificial Sequence: Synthetic oligonucleotide
uuacagaaccauuuccggc

SEQ ID NO: 322599 - RNA, 19 nt, Artificial Sequence
  Description of Artificial Sequence: Synthetic oligonucleotide
ucaccaacguugaacgucc

SEQ ID NO: 322600 - RNA, 19 nt, Artificial Sequence
  Description of Artificial Sequence: Synthetic oligonucleotide
uguggcaccacagaguuac

SEQ ID NO: 322601 - RNA, 19 nt, Artificial Sequence
  Description of Artificial Sequence: Synthetic oligonucleotide
uuugcagugccuagcagcu

SEQ ID NO: 322602 - RNA, 19 nt, Artificial Sequence
  Description of Artificial Sequence: Synthetic oligonucleotide
aaccucuggaugauuagcg

SEQ ID NO: 322603 - RNA, 19 nt, Artificial Sequence
  Description of Artificial Sequence: Synthetic oligonucleotide
ugauuagcgguguuggcug

SEQ ID NO: 322604 - RNA, 19 nt, Artificial Sequence
  Description of Artificial Sequence: Synthetic oligonucleotide
aaauccccgacucugccga

SEQ ID NO: 322605 - RNA, 19 nt, Artificial Sequence
  Description of Artificial Sequence: Synthetic oligonucleotide
ucacuacuaaugcuuuuag

SEQ ID NO: 322606 - RNA, 19 nt, Artificial Sequence
  Description of Artificial Sequence: Synthetic oligonucleotide
guuugcagugccuagcagc

SEQ ID NO: 322607 - RNA, 19 nt, Artificial Sequence
  Description of Artificial Sequence: Synthetic oligonucleotide
uuguacuacuauuucuuug

SEQ ID NO: 322608 - RNA, 19 nt, Artificial Sequence
  Description of Artificial Sequence: Synthetic oligonucleotide
auuaaguaugcuuguacau

SEQ ID NO: 322609 - RNA, 19 nt, Artificial Sequence
  Description of Artificial Sequence: Synthetic oligonucleotide
uugucugacugauugcuug

SEQ ID NO: 322610 - RNA, 19 nt, Artificial Sequence
  Description of Artificial Sequence: Synthetic oligonucleotide
aauuguuacugcugcuacu

SEQ ID NO: 322611 - RNA, 19 nt, Artificial Sequence
  Description of Artificial Sequence: Synthetic oligonucleotide
uggauucccagcauuauua

SEQ ID NO: 322612 - RNA, 19 nt, Artificial Sequence
  Description of Artificial Sequence: Synthetic oligonucleotide
uacuaaugcuuuuagcauc

SEQ ID NO: 322613 - RNA, 19 nt, Artificial Sequence
  Description of Artificial Sequence: Synthetic oligonucleotide
uuugguacuauuucuuaua

SEQ ID NO: 322614 - RNA, 19 nt, Artificial Sequence
  Description of Artificial Sequence: Synthetic oligonucleotide
aaccguauuguugaccuug

SEQ ID NO: 322615 - RNA, 19 nt, Artificial Sequence
  Description of Artificial Sequence: Synthetic oligonucleotide
aucaauucaugugaagaag

SEQ ID NO: 322616 - RNA, 19 nt, Artificial Sequence
  Description of Artificial Sequence: Synthetic oligonucleotide
cuuaugaauuuuccaggcc

SEQ ID NO: 322617 - RNA, 19 nt, Artificial Sequence
  Description of Artificial Sequence: Synthetic oligonucleotide
uuugaccagagaacuuucc

SEQ ID NO: 322618 - RNA, 19 nt, Artificial Sequence
  Description of Artificial Sequence: Synthetic oligonucleotide
cuaggcggaaccuuaugcc

SEQ ID NO: 322619 - RNA, 19 nt, Artificial Sequence
  Description of Artificial Sequence: Synthetic oligonucleotide
acguugaacguccuugguc

SEQ ID NO: 322620 - RNA, 19 nt, Artificial Sequence
  Description of Artificial Sequence: Synthetic oligonucleotide
agacugccccucuaggacc

SEQ ID NO: 322621 - RNA, 19 nt, Artificial Sequence
  Description of Artificial Sequence: Synthetic oligonucleotide
ugucugacugauugcuugg

SEQ ID NO: 322622 - RNA, 19 nt, Artificial Sequence
  Description of Artificial Sequence: Synthetic oligonucleotide
ucgaagaaccuggagacug

SEQ ID NO: 322623 - RNA, 19 nt, Artificial Sequence
  Description of Artificial Sequence: Synthetic oligonucleotide
uguacaugacaauauugua

SEQ ID NO: 322624 - RNA, 19 nt, Artificial Sequence
  Description of Artificial Sequence: Synthetic oligonucleotide
uuggggaaccguauuguug

SEQ ID NO: 322625 - RNA, 19 nt, Artificial Sequence
  Description of Artificial Sequence: Synthetic oligonucleotide
uggucuauaguguaucaau

SEQ ID NO: 322626 - RNA, 19 nt, Artificial Sequence
  Description of Artificial Sequence: Synthetic oligonucleotide
gaaaccucuggaugauuag

SEQ ID NO: 322627 - RNA, 19 nt, Artificial Sequence
  Description of Artificial Sequence: Synthetic oligonucleotide
aaccaggcugacucuuuac

SEQ ID NO: 322628 - RNA, 19 nt, Artificial Sequence
  Description of Artificial Sequence: Synthetic oligonucleotide
uucugaucuaaccaugguu

SEQ ID NO: 322629 - RNA, 19 nt, Artificial Sequence
  Description of Artificial Sequence: Synthetic oligonucleotide
uacuacuauuucuuuguac

SEQ ID NO: 322630 - RNA, 19 nt, Artificial Sequence
  Description of Artificial Sequence: Synthetic oligonucleotide
ucuaaccaugguuguauca

SEQ ID NO: 322631 - RNA, 19 nt, Artificial Sequence
  Description of Artificial Sequence: Synthetic oligonucleotide
uucuuauaaucacaauuuu

SEQ ID NO: 322632 - RNA, 19 nt, Artificial Sequence
  Description of Artificial Sequence: Synthetic oligonucleotide
ugcagacuauccauuugag

SEQ ID NO: 322633 - RNA, 19 nt, Artificial Sequence
  Description of Artificial Sequence: Synthetic oligonucleotide
acuuuacacugguagucuc

SEQ ID NO: 322634 - RNA, 19 nt, Artificial Sequence
  Description of Artificial Sequence: Synthetic oligonucleotide
gauguaucugugcaugcuc

SEQ ID NO: 322635 - RNA, 19 nt, Artificial Sequence
  Description of Artificial Sequence: Synthetic oligonucleotide
agacuauccauuugagacu

SEQ ID NO: 322636 - RNA, 19 nt, Artificial Sequence
  Description of Artificial Sequence: Synthetic oligonucleotide
ccuuuaauaacacuaugug

SEQ ID NO: 322637 - RNA, 19 nt, Artificial Sequence
  Description of Artificial Sequence: Synthetic oligonucleotide
uauccauuugagacugucu

SEQ ID NO: 322638 - RNA, 19 nt, Artificial Sequence
  Description of Artificial Sequence: Synthetic oligonucleotide
aaagcucggaaaggguuuc

SEQ ID NO: 322639 - RNA, 19 nt, Artificial Sequence
  Description of Artificial Sequence: Synthetic oligonucleotide
ucgucuucucuuaugaauu

SEQ ID NO: 322640 - RNA, 19 nt, Artificial Sequence
  Description of Artificial Sequence: Synthetic oligonucleotide
uccuuuuccggacucggcu

SEQ ID NO: 322641 - RNA, 19 nt, Artificial Sequence
  Description of Artificial Sequence: Synthetic oligonucleotide
gaguaaacuacuugcugga

SEQ ID NO: 322642 - RNA, 19 nt, Artificial Sequence
  Description of Artificial Sequence: Synthetic oligonucleotide
auagaugauauaucaccaa

SEQ ID NO: 322643 - RNA, 19 nt, Artificial Sequence
  Description of Artificial Sequence: Synthetic oligonucleotide
ugcuuguacaugacaauau

SEQ ID NO: 322644 - RNA, 19 nt, Artificial Sequence
  Description of Artificial Sequence: Synthetic oligonucleotide
agauauauucagcaauguu

SEQ ID NO: 322645 - RNA, 19 nt, Artificial Sequence
  Description of Artificial Sequence: Synthetic oligonucleotide
acucggaggaaacaucuga

SEQ ID NO: 322646 - RNA, 19 nt, Artificial Sequence
  Description of Artificial Sequence: Synthetic oligonucleotide
cagcaaaccaggcugacuc

SEQ ID NO: 322647 - RNA, 19 nt, Artificial Sequence
  Description of Artificial Sequence: Synthetic oligonucleotide
uaacagcgacuguagauga

SEQ ID NO: 322648 - RNA, 19 nt, Artificial Sequence
  Description of Artificial Sequence: Synthetic oligonucleotide
caacguugaacguccuugg

SEQ ID NO: 322649 - RNA, 19 nt, Artificial Sequence
  Description of Artificial Sequence: Synthetic oligonucleotide
uaauaucgccaugaaauuc

SEQ ID NO: 322650 - RNA, 19 nt, Artificial Sequence
  Description of Artificial Sequence: Synthetic oligonucleotide
aaaccuucuguuagggucu

SEQ ID NO: 322651 - RNA, 19 nt, Artificial Sequence
  Description of Artificial Sequence: Synthetic oligonucleotide
caugaucugaugaugugga

SEQ ID NO: 322652 - RNA, 19 nt, Artificial Sequence
  Description of Artificial Sequence: Synthetic oligonucleotide
ugguguuuaaagugcuaug

SEQ ID NO: 322653 - RNA, 19 nt, Artificial Sequence
  Description of Artificial Sequence: Synthetic oligonucleotide
cuuaggucaucuucacuac

SEQ ID NO: 322654 - RNA, 19 nt, Artificial Sequence
  Description of Artificial Sequence: Synthetic oligonucleotide
augaauugugaacgucguc

SEQ ID NO: 322655 - RNA, 19 nt, Artificial Sequence
  Description of Artificial Sequence: Synthetic oligonucleotide
guuaaaugggucucagcuc

SEQ ID NO: 322656 - RNA, 19 nt, Artificial Sequence
  Description of Artificial Sequence: Synthetic oligonucleotide
cacuacuaaugcuuuuagc

SEQ ID NO: 322657 - RNA, 19 nt, Artificial Sequence
  Description of Artificial Sequence: Synthetic oligonucleotide
augaaauuuccaugaucug

SEQ ID NO: 322658 - RNA, 19 nt, Artificial Sequence
  Description of Artificial Sequence: Synthetic oligonucleotide
gaugauuagcgguguuggc

SEQ ID NO: 322659 - RNA, 19 nt, Artificial Sequence
  Description of Artificial Sequence: Synthetic oligonucleotide
gcaugaauugugaacgucg

SEQ ID NO: 322660 - RNA, 19 nt, Artificial Sequence
  Description of Artificial Sequence: Synthetic oligonucleotide
uuccggcagaugcaguagg

SEQ ID NO: 322661 - RNA, 19 nt, Artificial Sequence
  Description of Artificial Sequence: Synthetic oligonucleotide
ucuuugaccagagaacuuu

SEQ ID NO: 322662 - RNA, 19 nt, Artificial Sequence
  Description of Artificial Sequence: Synthetic oligonucleotide
uaaagcucggaaaggguuu

SEQ ID NO: 322663 - RNA, 19 nt, Artificial Sequence
  Description of Artificial Sequence: Synthetic oligonucleotide
uaggcggaaccuuaugcca

SEQ ID NO: 322664 - RNA, 19 nt, Artificial Sequence
  Description of Artificial Sequence: Synthetic oligonucleotide
uuaggucaucuucacuacu

SEQ ID NO: 322665 - RNA, 19 nt, Artificial Sequence
  Description of Artificial Sequence: Synthetic oligonucleotide
acugcuugggguauuaagu

SEQ ID NO: 322666 - RNA, 19 nt, Artificial Sequence
  Description of Artificial Sequence: Synthetic oligonucleotide
guuaaguagcuguggcacc

SEQ ID NO: 322667 - RNA, 19 nt, Artificial Sequence
  Description of Artificial Sequence: Synthetic oligonucleotide
uggugaacagucccagaca

SEQ ID NO: 322668 - RNA, 19 nt, Artificial Sequence
  Description of Artificial Sequence: Synthetic oligonucleotide
augauuagcgguguuggcu

SEQ ID NO: 322669 - RNA, 19 nt, Artificial Sequence
  Description of Artificial Sequence: Synthetic oligonucleotide
gaauuguuuauagaugaua

SEQ ID NO: 322670 - RNA, 19 nt, Artificial Sequence
  Description of Artificial Sequence: Synthetic oligonucleotide
cuacuuuacacugguaguc

SEQ ID NO: 322671 - RNA, 19 nt, Artificial Sequence
  Description of Artificial Sequence: Synthetic oligonucleotide
ggugguagcuaucugccag

SEQ ID NO: 322672 - RNA, 19 nt, Artificial Sequence
  Description of Artificial Sequence: Synthetic oligonucleotide
uguuugcagugccuagcag

SEQ ID NO: 322673 - RNA, 19 nt, Artificial Sequence
  Description of Artificial Sequence: Synthetic oligonucleotide
agcaauguuucugccauug

SEQ ID NO: 322674 - RNA, 19 nt, Artificial Sequence
  Description of Artificial Sequence: Synthetic oligonucleotide
uuccauuaauguguguaca

SEQ ID NO: 322675 - RNA, 19 nt, Artificial Sequence
  Description of Artificial Sequence: Synthetic oligonucleotide
ggaugauuagcgguguugg

SEQ ID NO: 322676 - RNA, 19 nt, Artificial Sequence
  Description of Artificial Sequence: Synthetic oligonucleotide
uuuagcacccugugguggu

SEQ ID NO: 322677 - RNA, 19 nt, Artificial Sequence
  Description of Artificial Sequence: Synthetic oligonucleotide
uggaugauuagcgguguug

SEQ ID NO: 322678 - RNA, 19 nt, Artificial Sequence
  Description of Artificial Sequence: Synthetic oligonucleotide
ugcuacuguuguuaccagc

SEQ ID NO: 322679 - RNA, 19 nt, Artificial Sequence
  Description of Artificial Sequence: Synthetic oligonucleotide
uucacuacuaaugcuuuua

SEQ ID NO: 322680 - RNA, 19 nt, Artificial Sequence
  Description of Artificial Sequence: Synthetic oligonucleotide
ugguuguaucaauaccuac

SEQ ID NO: 322681 - RNA, 19 nt, Artificial Sequence
  Description of Artificial Sequence: Synthetic oligonucleotide
ugcaugcuccuuuaauaac

SEQ ID NO: 322682 - RNA, 19 nt, Artificial Sequence
  Description of Artificial Sequence: Synthetic oligonucleotide
acuaugugucaguggaaca

SEQ ID NO: 322683 - RNA, 19 nt, Artificial Sequence
  Description of Artificial Sequence: Synthetic oligonucleotide
aacguugaacguccuuggu

SEQ ID NO: 322684 - RNA, 19 nt, Artificial Sequence
  Description of Artificial Sequence: Synthetic oligonucleotide
uuuuccguaaugagucuuu

SEQ ID NO: 322685 - RNA, 19 nt, Artificial Sequence
  Description of Artificial Sequence: Synthetic oligonucleotide
cuauucgaagaaccuggag

SEQ ID NO: 322686 - RNA, 19 nt, Artificial Sequence
  Description of Artificial Sequence: Synthetic oligonucleotide
uagaagggcguugauggca

SEQ ID NO: 322687 - RNA, 19 nt, Artificial Sequence
  Description of Artificial Sequence: Synthetic oligonucleotide
ccaguagaggguuaaguag

SEQ ID NO: 322688 - RNA, 19 nt, Artificial Sequence
  Description of Artificial Sequence: Synthetic oligonucleotide
uguaggcuucuaaaccuuc

SEQ ID NO: 322689 - RNA, 19 nt, Artificial Sequence
  Description of Artificial Sequence: Synthetic oligonucleotide
gaccaggucuuguuugcag

SEQ ID NO: 322690 - RNA, 19 nt, Artificial Sequence
  Description of Artificial Sequence: Synthetic oligonucleotide
guaugcuuguacaugacaa

SEQ ID NO: 322691 - RNA, 19 nt, Artificial Sequence
  Description of Artificial Sequence: Synthetic oligonucleotide
gguuaaguagcuguggcac

SEQ ID NO: 322692 - RNA, 19 nt, Artificial Sequence
  Description of Artificial Sequence: Synthetic oligonucleotide
guguuuaaagugcuauguc

SEQ ID NO: 322693 - RNA, 19 nt, Artificial Sequence
  Description of Artificial Sequence: Synthetic oligonucleotide
aacguccuuggucuauagu

SEQ ID NO: 322694 - RNA, 19 nt, Artificial Sequence
  Description of Artificial Sequence: Synthetic oligonucleotide
ugaccacuuaucacuuugu

SEQ ID NO: 322695 - RNA, 19 nt, Artificial Sequence
  Description of Artificial Sequence: Synthetic oligonucleotide
gguuauuuagcuuuccacu

SEQ ID NO: 322696 - RNA, 19 nt, Artificial Sequence
  Description of Artificial Sequence: Synthetic oligonucleotide
acuaggcucacacccauua

SEQ ID NO: 322697 - RNA, 19 nt, Artificial Sequence
  Description of Artificial Sequence: Synthetic oligonucleotide
cacuaugugucaguggaac

SEQ ID NO: 322698 - RNA, 19 nt, Artificial Sequence
  Description of Artificial Sequence: Synthetic oligonucleotide
uuguuuugauuugcuagcu

SEQ ID NO: 322699 - RNA, 19 nt, Artificial Sequence
  Description of Artificial Sequence: Synthetic oligonucleotide
cucuuagugcugcucgacc

SEQ ID NO: 322700 - RNA, 19 nt, Artificial Sequence
  Description of Artificial Sequence: Synthetic oligonucleotide
agaagggcguugauggcac

SEQ ID NO: 322701 - RNA, 19 nt, Artificial Sequence
  Description of Artificial Sequence: Synthetic oligonucleotide
cugauugcuuggcaaacuc

SEQ ID NO: 322702 - RNA, 19 nt, Artificial Sequence
  Description of Artificial Sequence: Synthetic oligonucleotide
uuccggacucggcuguagg

SEQ ID NO: 322703 - RNA, 19 nt, Artificial Sequence
  Description of Artificial Sequence: Synthetic oligonucleotide
ugacucuuuacagaaccau

SEQ ID NO: 322704 - RNA, 19 nt, Artificial Sequence
  Description of Artificial Sequence: Synthetic oligonucleotide
agcucggaaaggguuuccc

SEQ ID NO: 322705 - RNA, 19 nt, Artificial Sequence
  Description of Artificial Sequence: Synthetic oligonucleotide
auuuccggcagaugcagua

SEQ ID NO: 322706 - RNA, 19 nt, Artificial Sequence
  Description of Artificial Sequence: Synthetic oligonucleotide
aacagcgacuguagaugac

SEQ ID NO: 322707 - RNA, 19 nt, Artificial Sequence
  Description of Artificial Sequence: Synthetic oligonucleotide
gauuuggugaacaguccca

SEQ ID NO: 322708 - RNA, 19 nt, Artificial Sequence
  Description of Artificial Sequence: Synthetic oligonucleotide
uagcgguguuggcugaugc

SEQ ID NO: 322709 - RNA, 19 nt, Artificial Sequence
  Description of Artificial Sequence: Synthetic oligonucleotide
augguguuuaaagugcuau

SEQ ID NO: 322710 - RNA, 19 nt, Artificial Sequence
  Description of Artificial Sequence: Synthetic oligonucleotide
ugaacgucgucuucucuua

SEQ ID NO: 322711 - RNA, 19 nt, Artificial Sequence
  Description of Artificial Sequence: Synthetic oligonucleotide
aagcucggaaaggguuucc

SEQ ID NO: 322712 - RNA, 19 nt, Artificial Sequence
  Description of Artificial Sequence: Synthetic oligonucleotide
gggauuauuguuagcuggg

SEQ ID NO: 322713 - RNA, 19 nt, Artificial Sequence
  Description of Artificial Sequence: Synthetic oligonucleotide
agaauuguuacugcugcua

SEQ ID NO: 322714 - RNA, 19 nt, Artificial Sequence
  Description of Artificial Sequence: Synthetic oligonucleotide
ucccaccaaguguugagac

SEQ ID NO: 322715 - RNA, 19 nt, Artificial Sequence
  Description of Artificial Sequence: Synthetic oligonucleotide
aaaccaggcugacucuuua

SEQ ID NO: 322716 - RNA, 19 nt, Artificial Sequence
  Description of Artificial Sequence: Synthetic oligonucleotide
caugggauuauuguuagcu

SEQ ID NO: 322717 - RNA, 19 nt, Artificial Sequence
  Description of Artificial Sequence: Synthetic oligonucleotide
cuuagugcugcucgaccac

SEQ ID NO: 322718 - RNA, 19 nt, Artificial Sequence
  Description of Artificial Sequence: Synthetic oligonucleotide
caaacuauucgaagaaccu

SEQ ID NO: 322719 - RNA, 19 nt, Artificial Sequence
  Description of Artificial Sequence: Synthetic oligonucleotide
acagcgacuguagaugacu

SEQ ID NO: 322720 - RNA, 19 nt, Artificial Sequence
  Description of Artificial Sequence: Synthetic oligonucleotide
cuucuagaaacguuuggua

SEQ ID NO: 322721 - RNA, 19 nt, Artificial Sequence
  Description of Artificial Sequence: Synthetic oligonucleotide
ucggcuguugucugacuga

SEQ ID NO: 322722 - RNA, 19 nt, Artificial Sequence
  Description of Artificial Sequence: Synthetic oligonucleotide
aaguagugucacugccugu

SEQ ID NO: 322723 - RNA, 19 nt, Artificial Sequence
  Description of Artificial Sequence: Synthetic oligonucleotide
uccuuaggucaucuucacu

SEQ ID NO: 322724 - RNA, 19 nt, Artificial Sequence
  Description of Artificial Sequence: Synthetic oligonucleotide
ugaccuaggcggaaccuua

SEQ ID NO: 322725 - RNA, 19 nt, Artificial Sequence
  Description of Artificial Sequence: Synthetic oligonucleotide
gaacguccuuggucuauag

SEQ ID NO: 322726 - RNA, 19 nt, Artificial Sequence
  Description of Artificial Sequence: Synthetic oligonucleotide
cugcucgaccacuuugacc

SEQ ID NO: 322727 - RNA, 19 nt, Artificial Sequence
  Description of Artificial Sequence: Synthetic oligonucleotide
uggaccagguggauuccca

SEQ ID NO: 322728 - RNA, 19 nt, Artificial Sequence
  Description of Artificial Sequence: Synthetic oligonucleotide
agauguaucugugcaugcu

SEQ ID NO: 322729 - RNA, 19 nt, Artificial Sequence
  Description of Artificial Sequence: Synthetic oligonucleotide
cuauccauuugagacuguc

SEQ ID NO: 322730 - RNA, 19 nt, Artificial Sequence
  Description of Artificial Sequence: Synthetic oligonucleotide
aguagugucacugccugua

SEQ ID NO: 322731 - RNA, 19 nt, Artificial Sequence
  Description of Artificial Sequence: Synthetic oligonucleotide
gugcaugcuccuuuaauaa

SEQ ID NO: 322732 - RNA, 19 nt, Artificial Sequence
  Description of Artificial Sequence: Synthetic oligonucleotide
cuaaccaugguuguaucaa

SEQ ID NO: 322733 - RNA, 19 nt, Artificial Sequence
  Description of Artificial Sequence: Synthetic oligonucleotide
cucggcuguugucugacug

SEQ ID NO: 322734 - RNA, 19 nt, Artificial Sequence
  Description of Artificial Sequence: Synthetic oligonucleotide
ccucauuugucugucaccc

SEQ ID NO: 322735 - RNA, 19 nt, Artificial Sequence
  Description of Artificial Sequence: Synthetic oligonucleotide
ggaaccuuaugccacuaca

SEQ ID NO: 322736 - RNA, 19 nt, Artificial Sequence
  Description of Artificial Sequence: Synthetic oligonucleotide
gaaccuuaugccacuacaa

SEQ ID NO: 322737 - RNA, 19 nt, Artificial Sequence
  Description of Artificial Sequence: Synthetic oligonucleotide
gacaccacugcugucccac

SEQ ID NO: 322738 - RNA, 19 nt, Artificial Sequence
  Description of Artificial Sequence: Synthetic oligonucleotide
cauuucuaauaucgccaug

SEQ ID NO: 322739 - RNA, 19 nt, Artificial Sequence
  Description of Artificial Sequence: Synthetic oligonucleotide
ggcucacacccauuaaugc

SEQ ID NO: 322740 - RNA, 19 nt, Artificial Sequence
  Description of Artificial Sequence: Synthetic oligonucleotide
uuaaucccgaggccccagu

SEQ ID NO: 322741 - RNA, 19 nt, Artificial Sequence
  Description of Artificial Sequence: Synthetic oligonucleotide
guagaagggcguugauggc

SEQ ID NO: 322742 - RNA, 19 nt, Artificial Sequence
  Description of Artificial Sequence: Synthetic oligonucleotide
ccuaggcggaaccuuaugc

SEQ ID NO: 322743 - RNA, 19 nt, Artificial Sequence
  Description of Artificial Sequence: Synthetic oligonucleotide
uggggauucaaggccauua

SEQ ID NO: 322744 - RNA, 19 nt, Artificial Sequence
  Description of Artificial Sequence: Synthetic oligonucleotide
ucggaggaaacaucugauu

SEQ ID NO: 322745 - RNA, 19 nt, Artificial Sequence
  Description of Artificial Sequence: Synthetic oligonucleotide
aggcucacacccauuaaug

SEQ ID NO: 322746 - RNA, 19 nt, Artificial Sequence
  Description of Artificial Sequence: Synthetic oligonucleotide
gagggacuaggcucacacc

SEQ ID NO: 322747 - RNA, 19 nt, Artificial Sequence
  Description of Artificial Sequence: Synthetic oligonucleotide
aggcggaaccuuaugccac

SEQ ID NO: 322748 - RNA, 19 nt, Artificial Sequence
  Description of Artificial Sequence: Synthetic oligonucleotide
agugccuagcagcucucca

SEQ ID NO: 322749 - RNA, 19 nt, Artificial Sequence
  Description of Artificial Sequence: Synthetic oligonucleotide
gccaugggauuauuguuag

SEQ ID NO: 322750 - RNA, 19 nt, Artificial Sequence
  Description of Artificial Sequence: Synthetic oligonucleotide
agcgacuguagaugacuca

SEQ ID NO: 322751 - RNA, 19 nt, Artificial Sequence
  Description of Artificial Sequence: Synthetic oligonucleotide
aucucuuagugcugcucga

SEQ ID NO: 322752 - RNA, 19 nt, Artificial Sequence
  Description of Artificial Sequence: Synthetic oligonucleotide
ugguagcuaucugccagag

SEQ ID NO: 322753 - RNA, 19 nt, Artificial Sequence
  Description of Artificial Sequence: Synthetic oligonucleotide
ggaaccguauuguugaccu

SEQ ID NO: 322754 - RNA, 19 nt, Artificial Sequence
  Description of Artificial Sequence: Synthetic oligonucleotide
gaucuaaccaugguuguau

SEQ ID NO: 322755 - RNA, 19 nt, Artificial Sequence
  Description of Artificial Sequence: Synthetic oligonucleotide
ucucuuagugcugcucgac

SEQ ID NO: 322756 - RNA, 19 nt, Artificial Sequence
  Description of Artificial Sequence: Synthetic oligonucleotide
cuacuaaugcuuuuagcau

SEQ ID NO: 322757 - RNA, 19 nt, Artificial Sequence
  Description of Artificial Sequence: Synthetic oligonucleotide
gaaacguuugguacuauuu

SEQ ID NO: 322758 - RNA, 19 nt, Artificial Sequence
  Description of Artificial Sequence: Synthetic oligonucleotide
gagguugcuauggaaaccu

SEQ ID NO: 322759 - RNA, 19 nt, Artificial Sequence
  Description of Artificial Sequence: Synthetic oligonucleotide
ugacucagcugaugguuau

SEQ ID NO: 322760 - RNA, 19 nt, Artificial Sequence
  Description of Artificial Sequence: Synthetic oligonucleotide
accguauuguugaccuugg

SEQ ID NO: 322761 - RNA, 19 nt, Artificial Sequence
  Description of Artificial Sequence: Synthetic oligonucleotide
ucugugcaugcuccuuuaa

SEQ ID NO: 322762 - RNA, 19 nt, Artificial Sequence
  Description of Artificial Sequence: Synthetic oligonucleotide
gcgacuguagaugacucag

SEQ ID NO: 322763 - RNA, 19 nt, Artificial Sequence
  Description of Artificial Sequence: Synthetic oligonucleotide
ugaucuaaccaugguugua

SEQ ID NO: 322764 - RNA, 19 nt, Artificial Sequence
  Description of Artificial Sequence: Synthetic oligonucleotide
ggguuaaaaguagugucac

SEQ ID NO: 322765 - RNA, 19 nt, Artificial Sequence
  Description of Artificial Sequence: Synthetic oligonucleotide
agcucggcuguugucugac

SEQ ID NO: 322766 - RNA, 19 nt, Artificial Sequence
  Description of Artificial Sequence: Synthetic oligonucleotide
agaauuguuuauagaugau

SEQ ID NO: 322767 - RNA, 19 nt, Artificial Sequence
  Description of Artificial Sequence: Synthetic oligonucleotide
aauccccgacucugccgag

SEQ ID NO: 322768 - RNA, 19 nt, Artificial Sequence
  Description of Artificial Sequence: Synthetic oligonucleotide
gucgucuucucuuaugaau

SEQ ID NO: 322769 - RNA, 19 nt, Artificial Sequence
  Description of Artificial Sequence: Synthetic oligonucleotide
guuugguacuauuucuuau

SEQ ID NO: 322770 - RNA, 19 nt, Artificial Sequence
  Description of Artificial Sequence: Synthetic oligonucleotide
cggaggaaacaucugauug

SEQ ID NO: 322771 - RNA, 19 nt, Artificial Sequence
  Description of Artificial Sequence: Synthetic oligonucleotide
caugaauugugaacgucgu

SEQ ID NO: 322772 - RNA, 19 nt, Artificial Sequence
  Description of Artificial Sequence: Synthetic oligonucleotide
gauuagcgguguuggcuga

SEQ ID NO: 322773 - RNA, 19 nt, Artificial Sequence
  Description of Artificial Sequence: Synthetic oligonucleotide
uucgaagaaccuggagacu

SEQ ID NO: 322774 - RNA, 19 nt, Artificial Sequence
  Description of Artificial Sequence: Synthetic oligonucleotide
cacuacaaaguggccuggg

SEQ ID NO: 322775 - RNA, 19 nt, Artificial Sequence
  Description of Artificial Sequence: Synthetic oligonucleotide
agcgguguuggcugaugcu

SEQ ID NO: 322776 - RNA, 19 nt, Artificial Sequence
  Description of Artificial Sequence: Synthetic oligonucleotide
gguguuuaaagugcuaugu

SEQ ID NO: 322777 - RNA, 19 nt, Artificial Sequence
  Description of Artificial Sequence: Synthetic oligonucleotide
acuauucgaagaaccugga

SEQ ID NO: 322778 - RNA, 19 nt, Artificial Sequence
  Description of Artificial Sequence: Synthetic oligonucleotide
ggcaucaugaaauuuccau

SEQ ID NO: 322779 - RNA, 19 nt, Artificial Sequence
  Description of Artificial Sequence: Synthetic oligonucleotide
agucaccaacguugaacgu

SEQ ID NO: 322780 - RNA, 19 nt, Artificial Sequence
  Description of Artificial Sequence: Synthetic oligonucleotide
ggauuauuguuagcugggc

SEQ ID NO: 322781 - RNA, 19 nt, Artificial Sequence
  Description of Artificial Sequence: Synthetic oligonucleotide
uuagcgguguuggcugaug

SEQ ID NO: 322782 - RNA, 19 nt, Artificial Sequence
  Description of Artificial Sequence: Synthetic oligonucleotide
accuaggcggaaccuuaug

SEQ ID NO: 322783 - RNA, 19 nt, Artificial Sequence
  Description of Artificial Sequence: Synthetic oligonucleotide
cagcgacuguagaugacuc

SEQ ID NO: 322784 - RNA, 19 nt, Artificial Sequence
  Description of Artificial Sequence: Synthetic oligonucleotide
augaucugaugauguggaa

SEQ ID NO: 322785 - RNA, 19 nt, Artificial Sequence
  Description of Artificial Sequence: Synthetic oligonucleotide
uuuccggacucggcuguag

SEQ ID NO: 322786 - RNA, 19 nt, Artificial Sequence
  Description of Artificial Sequence: Synthetic oligonucleotide
gaauugugaacgucgucuu

SEQ ID NO: 322787 - RNA, 19 nt, Artificial Sequence
  Description of Artificial Sequence: Synthetic oligonucleotide
gucacccugugggauuugg

SEQ ID NO: 322788 - RNA, 19 nt, Artificial Sequence
  Description of Artificial Sequence: Synthetic oligonucleotide
auaucgccaugaaauucug

SEQ ID NO: 322789 - RNA, 19 nt, Artificial Sequence
  Description of Artificial Sequence: Synthetic oligonucleotide
gaaccauuuccggcagaug

SEQ ID NO: 322790 - RNA, 19 nt, Artificial Sequence
  Description of Artificial Sequence: Synthetic oligonucleotide
cuaauaucgccaugaaauu

SEQ ID NO: 322791 - RNA, 19 nt, Artificial Sequence
  Description of Artificial Sequence: Synthetic oligonucleotide
cugcugacucggaggaaac

SEQ ID NO: 322792 - RNA, 19 nt, Artificial Sequence
  Description of Artificial Sequence: Synthetic oligonucleotide
uuuccguaaugagucuuuu

SEQ ID NO: 322793 - RNA, 19 nt, Artificial Sequence
  Description of Artificial Sequence: Synthetic oligonucleotide
cugccuguaaagcucggaa

SEQ ID NO: 322794 - RNA, 19 nt, Artificial Sequence
  Description of Artificial Sequence: Synthetic oligonucleotide
augguuguaucaauaccua

SEQ ID NO: 322795 - RNA, 19 nt, Artificial Sequence
  Description of Artificial Sequence: Synthetic oligonucleotide
agacuugguagaagggcgu

SEQ ID NO: 322796 - RNA, 19 nt, Artificial Sequence
  Description of Artificial Sequence: Synthetic oligonucleotide
ugcugacucggaggaaaca

SEQ ID NO: 322797 - RNA, 19 nt, Artificial Sequence
  Description of Artificial Sequence: Synthetic oligonucleotide
gcagacuauccauuugaga

SEQ ID NO: 322798 - RNA, 19 nt, Artificial Sequence
  Description of Artificial Sequence: Synthetic oligonucleotide
cuagaaacguuugguacua

SEQ ID NO: 322799 - RNA, 19 nt, Artificial Sequence
  Description of Artificial Sequence: Synthetic oligonucleotide
uugaacguccuuggucuau

SEQ ID NO: 322800 - RNA, 19 nt, Artificial Sequence
  Description of Artificial Sequence: Synthetic oligonucleotide
ugguagucucugguaggug

SEQ ID NO: 322801 - RNA, 19 nt, Artificial Sequence
  Description of Artificial Sequence: Synthetic oligonucleotide
acguuugguacuauuucuu

SEQ ID NO: 322802 - RNA, 19 nt, Artificial Sequence
  Description of Artificial Sequence: Synthetic oligonucleotide
ggcaguuggagggaacaug

SEQ ID NO: 322803 - RNA, 19 nt, Artificial Sequence
  Description of Artificial Sequence: Synthetic oligonucleotide
gaagaugagcgugaucuuu

SEQ ID NO: 322804 - RNA, 19 nt, Artificial Sequence
  Description of Artificial Sequence: Synthetic oligonucleotide
gauugcuguuuaacagcga

SEQ ID NO: 322805 - RNA, 19 nt, Artificial Sequence
  Description of Artificial Sequence: Synthetic oligonucleotide
gggauuuggugaacagucc

SEQ ID NO: 322806 - RNA, 19 nt, Artificial Sequence
  Description of Artificial Sequence: Synthetic oligonucleotide
aagggcguugauggcacuu

SEQ ID NO: 322807 - RNA, 19 nt, Artificial Sequence
  Description of Artificial Sequence: Synthetic oligonucleotide
ccugaucaaaacacaucuc

SEQ ID NO: 322808 - RNA, 19 nt, Artificial Sequence
  Description of Artificial Sequence: Synthetic oligonucleotide
ggccauuaaucccgaggcc

SEQ ID NO: 322809 - RNA, 19 nt, Artificial Sequence
  Description of Artificial Sequence: Synthetic oligonucleotide
acugccuguaaagcucgga

SEQ ID NO: 322810 - RNA, 19 nt, Artificial Sequence
  Description of Artificial Sequence: Synthetic oligonucleotide
cugaucuaaccaugguugu

SEQ ID NO: 322811 - RNA, 19 nt, Artificial Sequence
  Description of Artificial Sequence: Synthetic oligonucleotide
uccuuugauuuggccccag

SEQ ID NO: 322812 - RNA, 19 nt, Artificial Sequence
  Description of Artificial Sequence: Synthetic oligonucleotide
gucaguccuuugauuuggc

SEQ ID NO: 322813 - RNA, 19 nt, Artificial Sequence
  Description of Artificial Sequence: Synthetic oligonucleotide
guagugucacugccuguaa

SEQ ID NO: 322814 - RNA, 19 nt, Artificial Sequence
  Description of Artificial Sequence: Synthetic oligonucleotide
agugugcauuaaguaugcu

SEQ ID NO: 322815 - RNA, 19 nt, Artificial Sequence
  Description of Artificial Sequence: Synthetic oligonucleotide
ugcugcugcugcugcugac

SEQ ID NO: 322816 - RNA, 19 nt, Artificial Sequence
  Description of Artificial Sequence: Synthetic oligonucleotide
gacucuuuacagaaccauu

SEQ ID NO: 322817 - RNA, 19 nt, Artificial Sequence
  Description of Artificial Sequence: Synthetic oligonucleotide
gaccacuuaucacuuuguu

SEQ ID NO: 322818 - RNA, 19 nt, Artificial Sequence
  Description of Artificial Sequence: Synthetic oligonucleotide
guuagcugggcaagggacu

SEQ ID NO: 322819 - RNA, 19 nt, Artificial Sequence
  Description of Artificial Sequence: Synthetic oligonucleotide
ggcaugaauugugaacguc

SEQ ID NO: 322820 - RNA, 19 nt, Artificial Sequence
  Description of Artificial Sequence: Synthetic oligonucleotide
gcuauggaaaccucuggau

SEQ ID NO: 322821 - RNA, 19 nt, Artificial Sequence
  Description of Artificial Sequence: Synthetic oligonucleotide
cauuaaugcuuuuggcauu

SEQ ID NO: 322822 - RNA, 19 nt, Artificial Sequence
  Description of Artificial Sequence: Synthetic oligonucleotide
gguuaaaaguagugucacu

SEQ ID NO: 322823 - RNA, 19 nt, Artificial Sequence
  Description of Artificial Sequence: Synthetic oligonucleotide
cucggaggaaacaucugau

SEQ ID NO: 322824 - RNA, 19 nt, Artificial Sequence
  Description of Artificial Sequence: Synthetic oligonucleotide
auguuggcaguuggaggga

SEQ ID NO: 322825 - RNA, 19 nt, Artificial Sequence
  Description of Artificial Sequence: Synthetic oligonucleotide
aaaguggccugggguccgu

SEQ ID NO: 322826 - RNA, 19 nt, Artificial Sequence
  Description of Artificial Sequence: Synthetic oligonucleotide
gguccguacagguggcauc

SEQ ID NO: 322827 - RNA, 19 nt, Artificial Sequence
  Description of Artificial Sequence: Synthetic oligonucleotide
uggcaguuggagggaacau

SEQ ID NO: 322828 - RNA, 19 nt, Artificial Sequence
  Description of Artificial Sequence: Synthetic oligonucleotide
uguccccaguagaggguua

SEQ ID NO: 322829 - RNA, 19 nt, Artificial Sequence
  Description of Artificial Sequence: Synthetic oligonucleotide
cuaggcucacacccauuaa

SEQ ID NO: 322830 - RNA, 19 nt, Artificial Sequence
  Description of Artificial Sequence: Synthetic oligonucleotide
ggggauucaaggccauuaa

SEQ ID NO: 322831 - RNA, 19 nt, Artificial Sequence
  Description of Artificial Sequence: Synthetic oligonucleotide
uagaaacguuugguacuau

SEQ ID NO: 322832 - RNA, 19 nt, Artificial Sequence
  Description of Artificial Sequence: Synthetic oligonucleotide
ggugcugcugcugcugcug

SEQ ID NO: 322833 - RNA, 19 nt, Artificial Sequence
  Description of Artificial Sequence: Synthetic oligonucleotide
uugggguauuaaguacauu

SEQ ID NO: 322834 - RNA, 19 nt, Artificial Sequence
  Description of Artificial Sequence: Synthetic oligonucleotide
acucugccgaggucuguuu

SEQ ID NO: 322835 - RNA, 19 nt, Artificial Sequence
  Description of Artificial Sequence: Synthetic oligonucleotide
cagugccuagcagcucucc

SEQ ID NO: 322836 - RNA, 19 nt, Artificial Sequence
  Description of Artificial Sequence: Synthetic oligonucleotide
auuagcgguguuggcugau

SEQ ID NO: 322837 - RNA, 19 nt, Artificial Sequence
  Description of Artificial Sequence: Synthetic oligonucleotide
cguugaacguccuuggucu

SEQ ID NO: 322838 - RNA, 19 nt, Artificial Sequence
  Description of Artificial Sequence: Synthetic oligonucleotide
guugaacguccuuggucua

SEQ ID NO: 322839 - RNA, 19 nt, Artificial Sequence
  Description of Artificial Sequence: Synthetic oligonucleotide
cuuuuccggacucggcugu

SEQ ID NO: 322840 - RNA, 19 nt, Artificial Sequence
  Description of Artificial Sequence: Synthetic oligonucleotide
ccaugggauuauuguuagc

SEQ ID NO: 322841 - RNA, 19 nt, Artificial Sequence
  Description of Artificial Sequence: Synthetic oligonucleotide
aaccuucuguuagggucuu

SEQ ID NO: 322842 - RNA, 19 nt, Artificial Sequence
  Description of Artificial Sequence: Synthetic oligonucleotide
cauuaaucccgaggcccca

SEQ ID NO: 322843 - RNA, 19 nt, Artificial Sequence
  Description of Artificial Sequence: Synthetic oligonucleotide
agggaacaugguguuuaaa

SEQ ID NO: 322844 - RNA, 19 nt, Artificial Sequence
  Description of Artificial Sequence: Synthetic oligonucleotide
gguuuaggaacugcagacu

SEQ ID NO: 322845 - RNA, 19 nt, Artificial Sequence
  Description of Artificial Sequence: Synthetic oligonucleotide
uuuuccggacucggcugua

SEQ ID NO: 322846 - RNA, 19 nt, Artificial Sequence
  Description of Artificial Sequence: Synthetic oligonucleotide
cugugcaugcuccuuuaau

SEQ ID NO: 322847 - RNA, 19 nt, Artificial Sequence
  Description of Artificial Sequence: Synthetic oligonucleotide
ucccaacagcuggggauuc

SEQ ID NO: 322848 - RNA, 19 nt, Artificial Sequence
  Description of Artificial Sequence: Synthetic oligonucleotide
ggucuauaguguaucaauu

SEQ ID NO: 322849 - RNA, 19 nt, Artificial Sequence
  Description of Artificial Sequence: Synthetic oligonucleotide
cuguuagggucuucaacuu

SEQ ID NO: 322850 - RNA, 19 nt, Artificial Sequence
  Description of Artificial Sequence: Synthetic oligonucleotide
cuuggggaaccguauuguu

SEQ ID NO: 322851 - RNA, 19 nt, Artificial Sequence
  Description of Artificial Sequence: Synthetic oligonucleotide
ccauuauaauggauguagu

SEQ ID NO: 322852 - RNA, 19 nt, Artificial Sequence
  Description of Artificial Sequence: Synthetic oligonucleotide
gugcugcugcugcugcuga

SEQ ID NO: 322853 - RNA, 19 nt, Artificial Sequence
  Description of Artificial Sequence: Synthetic oligonucleotide
gaacgucgucuucucuuau

SEQ ID NO: 322854 - RNA, 19 nt, Artificial Sequence
  Description of Artificial Sequence: Synthetic oligonucleotide
gggauucaaggccauuaau

SEQ ID NO: 322855 - RNA, 19 nt, Artificial Sequence
  Description of Artificial Sequence: Synthetic oligonucleotide
cuucacuacuaaugcuuuu

SEQ ID NO: 322856 - RNA, 19 nt, Artificial Sequence
  Description of Artificial Sequence: Synthetic oligonucleotide
cuuggugaccuaggcggaa

SEQ ID NO: 322857 - RNA, 19 nt, Artificial Sequence
  Description of Artificial Sequence: Synthetic oligonucleotide
ggggaaccguauuguugac

SEQ ID NO: 322858 - RNA, 19 nt, Artificial Sequence
  Description of Artificial Sequence: Synthetic oligonucleotide
cagaguuacuguugagcuu

SEQ ID NO: 322859 - RNA, 19 nt, Artificial Sequence
  Description of Artificial Sequence: Synthetic oligonucleotide
gcuaucugccagaguuuac

SEQ ID NO: 322860 - RNA, 19 nt, Artificial Sequence
  Description of Artificial Sequence: Synthetic oligonucleotide
cauuuccggcagaugcagu

SEQ ID NO: 322861 - RNA, 19 nt, Artificial Sequence
  Description of Artificial Sequence: Synthetic oligonucleotide
ggcugacucuuuacagaac

SEQ ID NO: 322862 - RNA, 19 nt, Artificial Sequence
  Description of Artificial Sequence: Synthetic oligonucleotide
gaaccguauuguugaccuu

SEQ ID NO: 322863 - RNA, 19 nt, Artificial Sequence
  Description of Artificial Sequence: Synthetic oligonucleotide
cguuugguacuauuucuua

SEQ ID NO: 322864 - RNA, 19 nt, Artificial Sequence
  Description of Artificial Sequence: Synthetic oligonucleotide
caguuggagggaacauggu

SEQ ID NO: 322865 - RNA, 19 nt, Artificial Sequence
  Description of Artificial Sequence: Synthetic oligonucleotide
gaagggcguugauggcacu

SEQ ID NO: 322866 - RNA, 19 nt, Artificial Sequence
  Description of Artificial Sequence: Synthetic oligonucleotide
gcuguuuaacagcgacugu

SEQ ID NO: 322867 - RNA, 19 nt, Artificial Sequence
  Description of Artificial Sequence: Synthetic oligonucleotide
ggaccaggucuuguuugca

SEQ ID NO: 322868 - RNA, 19 nt, Artificial Sequence
  Description of Artificial Sequence: Synthetic oligonucleotide
ccuuggugaccuaggcgga

SEQ ID NO: 322869 - RNA, 19 nt, Artificial Sequence
  Description of Artificial Sequence: Synthetic oligonucleotide
ggcggaaccuuaugccacu

SEQ ID NO: 322870 - RNA, 19 nt, Artificial Sequence
  Description of Artificial Sequence: Synthetic oligonucleotide
cuguuguuaccagcaaguu

SEQ ID NO: 322871 - RNA, 19 nt, Artificial Sequence
  Description of Artificial Sequence: Synthetic oligonucleotide
gguagcuaucugccagagu

SEQ ID NO: 322872 - RNA, 19 nt, Artificial Sequence
  Description of Artificial Sequence: Synthetic oligonucleotide
ggacuaggcucacacccau

SEQ ID NO: 322873 - RNA, 19 nt, Artificial Sequence
  Description of Artificial Sequence: Synthetic oligonucleotide
gugaccuaggcggaaccuu

SEQ ID NO: 322874 - RNA, 19 nt, Artificial Sequence
  Description of Artificial Sequence: Synthetic oligonucleotide
gaacagucccagacauuuu

SEQ ID NO: 322875 - RNA, 19 nt, Artificial Sequence
  Description of Artificial Sequence: Synthetic oligonucleotide
gaccuaggcggaaccuuau

SEQ ID NO: 322876 - RNA, 19 nt, Artificial Sequence
  Description of Artificial Sequence: Synthetic oligonucleotide
cucgggcuccaccuucccu

SEQ ID NO: 322877 - RNA, 19 nt, Artificial Sequence
  Description of Artificial Sequence: Synthetic oligonucleotide
cccgacucugccgaggucu

SEQ ID NO: 322878 - RNA, 19 nt, Artificial Sequence
  Description of Artificial Sequence: Synthetic oligonucleotide
gacuaggcucacacccauu

SEQ ID NO: 322879 - RNA, 19 nt, Artificial Sequence
  Description of Artificial Sequence: Synthetic oligonucleotide
caccaacguugaacguccu

SEQ ID NO: 322880 - RNA, 19 nt, Artificial Sequence
  Description of Artificial Sequence: Synthetic oligonucleotide
gggguccguacagguggca

SEQ ID NO: 322881 - RNA, 19 nt, Artificial Sequence
  Description of Artificial Sequence: Synthetic oligonucleotide
gcggaaccuuaugccacua

SEQ ID NO: 322882 - RNA, 19 nt, Artificial Sequence
  Description of Artificial Sequence: Synthetic oligonucleotide
cuguugggagaagcauguu

SEQ ID NO: 322883 - RNA, 19 nt, Artificial Sequence
  Description of Artificial Sequence: Synthetic oligonucleotide
ccguauuguugaccuuggu

SEQ ID NO: 322884 - RNA, 19 nt, Artificial Sequence
  Description of Artificial Sequence: Synthetic oligonucleotide
ccccgacucugccgagguc

SEQ ID NO: 322885 - RNA, 19 nt, Artificial Sequence
  Description of Artificial Sequence: Synthetic oligonucleotide
gcacccuguggugguggua

SEQ ID NO: 322886 - RNA, 19 nt, Artificial Sequence
  Description of Artificial Sequence: Synthetic oligonucleotide
uauuccuugaaucagaucu

SEQ ID NO: 322887 - RNA, 19 nt, Artificial Sequence
  Description of Artificial Sequence: Synthetic oligonucleotide
uuagguauaaggcaaaaug

SEQ ID NO: 322888 - RNA, 19 nt, Artificial Sequence
  Description of Artificial Sequence: Synthetic oligonucleotide
ucacauaugagcuugacga

SEQ ID NO: 322889 - RNA, 19 nt, Artificial Sequence
  Description of Artificial Sequence: Synthetic oligonucleotide
ucgaucaugaagauaaagg

SEQ ID NO: 322890 - RNA, 19 nt, Artificial Sequence
  Description of Artificial Sequence: Synthetic oligonucleotide
aaaauuaggcaccaaguug

SEQ ID NO: 322891 - RNA, 19 nt, Artificial Sequence
  Description of Artificial Sequence: Synthetic oligonucleotide
uguuguaugugauaaaacc

SEQ ID NO: 322892 - RNA, 19 nt, Artificial Sequence
  Description of Artificial Sequence: Synthetic oligonucleotide
aaauuaggcaccaaguugg

SEQ ID NO: 322893 - RNA, 19 nt, Artificial Sequence
  Description of Artificial Sequence: Synthetic oligonucleotide
acuggaaaauauuuuaaac

SEQ ID NO: 322894 - RNA, 19 nt, Artificial Sequence
  Description of Artificial Sequence: Synthetic oligonucleotide
ugauaguugacaaggaacc

SEQ ID NO: 322895 - RNA, 19 nt, Artificial Sequence
  Description of Artificial Sequence: Synthetic oligonucleotide
ugagacaucgaucaugaag

SEQ ID NO: 322896 - RNA, 19 nt, Artificial Sequence
  Description of Artificial Sequence: Synthetic oligonucleotide
gaaccaugaaucuauacag

SEQ ID NO: 322897 - RNA, 19 nt, Artificial Sequence
  Description of Artificial Sequence: Synthetic oligonucleotide
uagacuguucccuuuaugg

SEQ ID NO: 322898 - RNA, 19 nt, Artificial Sequence
  Description of Artificial Sequence: Synthetic oligonucleotide
auagacagcuguuuggggc

SEQ ID NO: 322899 - RNA, 19 nt, Artificial Sequence
  Description of Artificial Sequence: Synthetic oligonucleotide
uuauguuacuguaugagac

SEQ ID NO: 322900 - RNA, 19 nt, Artificial Sequence
  Description of Artificial Sequence: Synthetic oligonucleotide
uaagacucauuauauacag

SEQ ID NO: 322901 - RNA, 19 nt, Artificial Sequence
  Description of Artificial Sequence: Synthetic oligonucleotide
agauugagauucuugauag

SEQ ID NO: 322902 - RNA, 19 nt, Artificial Sequence
  Description of Artificial Sequence: Synthetic oligonucleotide
aagaugaauagcuucccag

SEQ ID NO: 322903 - RNA, 19 nt, Artificial Sequence
  Description of Artificial Sequence: Synthetic oligonucleotide
uucauuaucauucggaguu

SEQ ID NO: 322904 - RNA, 19 nt, Artificial Sequence
  Description of Artificial Sequence: Synthetic oligonucleotide
acgaugaugagcuucauug

SEQ ID NO: 322905 - RNA, 19 nt, Artificial Sequence
  Description of Artificial Sequence: Synthetic oligonucleotide
agaaccauuaagaauauag

SEQ ID NO: 322906 - RNA, 19 nt, Artificial Sequence
  Description of Artificial Sequence: Synthetic oligonucleotide
aucauugggaaaauuaggc

SEQ ID NO: 322907 - RNA, 19 nt, Artificial Sequence
  Description of Artificial Sequence: Synthetic oligonucleotide
aagcagaacagccagaaau

SEQ ID NO: 322908 - RNA, 19 nt, Artificial Sequence
  Description of Artificial Sequence: Synthetic oligonucleotide
gauuaacuagaauuucccg

SEQ ID NO: 322909 - RNA, 19 nt, Artificial Sequence
  Description of Artificial Sequence: Synthetic oligonucleotide
aaguggagaacuuuguugu

SEQ ID NO: 322910 - RNA, 19 nt, Artificial Sequence
  Description of Artificial Sequence: Synthetic oligonucleotide
ugaaacauccgucaccacc

SEQ ID NO: 322911 - RNA, 19 nt, Artificial Sequence
  Description of Artificial Sequence: Synthetic oligonucleotide
uaugugauaaaaccaacuc

SEQ ID NO: 322912 - RNA, 19 nt, Artificial Sequence
  Description of Artificial Sequence: Synthetic oligonucleotide
uugauaguugacaaggaac

SEQ ID NO: 322913 - RNA, 19 nt, Artificial Sequence
  Description of Artificial Sequence: Synthetic oligonucleotide
agugcuuccgguaacacgc

SEQ ID NO: 322914 - RNA, 19 nt, Artificial Sequence
  Description of Artificial Sequence: Synthetic oligonucleotide
uaaaacuagccuacuauca

SEQ ID NO: 322915 - RNA, 19 nt, Artificial Sequence
  Description of Artificial Sequence: Synthetic oligonucleotide
uaugagacaucgaucauga

SEQ ID NO: 322916 - RNA, 19 nt, Artificial Sequence
  Description of Artificial Sequence: Synthetic oligonucleotide
uauugguuaagacucauua

SEQ ID NO: 322917 - RNA, 19 nt, Artificial Sequence
  Description of Artificial Sequence: Synthetic oligonucleotide
agucugauuaacuagaauu

SEQ ID NO: 322918 - RNA, 19 nt, Artificial Sequence
  Description of Artificial Sequence: Synthetic oligonucleotide
cuaucauugggaaaauuag

SEQ ID NO: 322919 - RNA, 19 nt, Artificial Sequence
  Description of Artificial Sequence: Synthetic oligonucleotide
uaacacgccagcauguggg

SEQ ID NO: 322920 - RNA, 19 nt, Artificial Sequence
  Description of Artificial Sequence: Synthetic oligonucleotide
uugaacucgacagucacgg

SEQ ID NO: 322921 - RNA, 19 nt, Artificial Sequence
  Description of Artificial Sequence: Synthetic oligonucleotide
ucccggaugacuuucaaag

SEQ ID NO: 322922 - RNA, 19 nt, Artificial Sequence
  Description of Artificial Sequence: Synthetic oligonucleotide
gaaauugagacagcgaaug

SEQ ID NO: 322923 - RNA, 19 nt, Artificial Sequence
  Description of Artificial Sequence: Synthetic oligonucleotide
auuaaaacuagccuacuau

SEQ ID NO: 322924 - RNA, 19 nt, Artificial Sequence
  Description of Artificial Sequence: Synthetic oligonucleotide
acagucacggccuuaucgc

SEQ ID NO: 322925 - RNA, 19 nt, Artificial Sequence
  Description of Artificial Sequence: Synthetic oligonucleotide
uucacauaugagcuugacg

SEQ ID NO: 322926 - RNA, 19 nt, Artificial Sequence
  Description of Artificial Sequence: Synthetic oligonucleotide
agaugaauagcuucccagg

SEQ ID NO: 322927 - RNA, 19 nt, Artificial Sequence
  Description of Artificial Sequence: Synthetic oligonucleotide
uuuauguuacuguaugaga

SEQ ID NO: 322928 - RNA, 19 nt, Artificial Sequence
  Description of Artificial Sequence: Synthetic oligonucleotide
uguuguucauaaauauucc

SEQ ID NO: 322929 - RNA, 19 nt, Artificial Sequence
  Description of Artificial Sequence: Synthetic oligonucleotide
gaugaugagcuucauugag

SEQ ID NO: 322930 - RNA, 19 nt, Artificial Sequence
  Description of Artificial Sequence: Synthetic oligonucleotide
aguacuuucauagaaucug

SEQ ID NO: 322931 - RNA, 19 nt, Artificial Sequence
  Description of Artificial Sequence: Synthetic oligonucleotide
ugaauagcuucccagggca

SEQ ID NO: 322932 - RNA, 19 nt, Artificial Sequence
  Description of Artificial Sequence: Synthetic oligonucleotide
uggcuauccaaauuaaccc

SEQ ID NO: 322933 - RNA, 19 nt, Artificial Sequence
  Description of Artificial Sequence: Synthetic oligonucleotide
aucuaauguguguauuggc

SEQ ID NO: 322934 - RNA, 19 nt, Artificial Sequence
  Description of Artificial Sequence: Synthetic oligonucleotide
agaauauagauacuguuuu

SEQ ID NO: 322935 - RNA, 19 nt, Artificial Sequence
  Description of Artificial Sequence: Synthetic oligonucleotide
uaauguguguauuggcagg

SEQ ID NO: 322936 - RNA, 19 nt, Artificial Sequence
  Description of Artificial Sequence: Synthetic oligonucleotide
gauaaaaccaacucgaauu

SEQ ID NO: 322937 - RNA, 19 nt, Artificial Sequence
  Description of Artificial Sequence: Synthetic oligonucleotide
uuaaaacuagccuacuauc

SEQ ID NO: 322938 - RNA, 19 nt, Artificial Sequence
  Description of Artificial Sequence: Synthetic oligonucleotide
aaauccacguaagaugauc

SEQ ID NO: 322939 - RNA, 19 nt, Artificial Sequence
  Description of Artificial Sequence: Synthetic oligonucleotide
aggaauggaagaugaauag

SEQ ID NO: 322940 - RNA, 19 nt, Artificial Sequence
  Description of Artificial Sequence: Synthetic oligonucleotide
acuagaauuucccggauga

SEQ ID NO: 322941 - RNA, 19 nt, Artificial Sequence
  Description of Artificial Sequence: Synthetic oligonucleotide
ugucggaaaaccaucuccc

SEQ ID NO: 322942 - RNA, 19 nt, Artificial Sequence
  Description of Artificial Sequence: Synthetic oligonucleotide
aaaacuagccuacuaucau

SEQ ID NO: 322943 - RNA, 19 nt, Artificial Sequence
  Description of Artificial Sequence: Synthetic oligonucleotide
agcaucgaagccuauuuuc

SEQ ID NO: 322944 - RNA, 19 nt, Artificial Sequence
  Description of Artificial Sequence: Synthetic oligonucleotide
agcuauuggccacacaguc

SEQ ID NO: 322945 - RNA, 19 nt, Artificial Sequence
  Description of Artificial Sequence: Synthetic oligonucleotide
cuaauguguguauuggcag

SEQ ID NO: 322946 - RNA, 19 nt, Artificial Sequence
  Description of Artificial Sequence: Synthetic oligonucleotide
cuuuauguuacuguaugag

SEQ ID NO: 322947 - RNA, 19 nt, Artificial Sequence
  Description of Artificial Sequence: Synthetic oligonucleotide
ucauagacagcuguuuggg

SEQ ID NO: 322948 - RNA, 19 nt, Artificial Sequence
  Description of Artificial Sequence: Synthetic oligonucleotide
uauacagguagaaaccauc

SEQ ID NO: 322949 - RNA, 19 nt, Artificial Sequence
  Description of Artificial Sequence: Synthetic oligonucleotide
acaucgaucaugaagauaa

SEQ ID NO: 322950 - RNA, 19 nt, Artificial Sequence
  Description of Artificial Sequence: Synthetic oligonucleotide
aauuaaaacuagccuacua

SEQ ID NO: 322951 - RNA, 19 nt, Artificial Sequence
  Description of Artificial Sequence: Synthetic oligonucleotide
uuaucauucggaguuguug

SEQ ID NO: 322952 - RNA, 19 nt, Artificial Sequence
  Description of Artificial Sequence: Synthetic oligonucleotide
uaagaauauagauacuguu

SEQ ID NO: 322953 - RNA, 19 nt, Artificial Sequence
  Description of Artificial Sequence: Synthetic oligonucleotide
cuuuaugguaccaccacac

SEQ ID NO: 322954 - RNA, 19 nt, Artificial Sequence
  Description of Artificial Sequence: Synthetic oligonucleotide
ucauugggaaaauuaggca

SEQ ID NO: 322955 - RNA, 19 nt, Artificial Sequence
  Description of Artificial Sequence: Synthetic oligonucleotide
aaacugucagcuuuagaaa

SEQ ID NO: 322956 - RNA, 19 nt, Artificial Sequence
  Description of Artificial Sequence: Synthetic oligonucleotide
gauuguggauccgaagucg

SEQ ID NO: 322957 - RNA, 19 nt, Artificial Sequence
  Description of Artificial Sequence: Synthetic oligonucleotide
uagccuacuaucauuggga

SEQ ID NO: 322958 - RNA, 19 nt, Artificial Sequence
  Description of Artificial Sequence: Synthetic oligonucleotide
guauaagcuggcuugcugc

SEQ ID NO: 322959 - RNA, 19 nt, Artificial Sequence
  Description of Artificial Sequence: Synthetic oligonucleotide
auccaaauuaacccgaaaa

SEQ ID NO: 322960 - RNA, 19 nt, Artificial Sequence
  Description of Artificial Sequence: Synthetic oligonucleotide
uaucuagcuagcacaaaga

SEQ ID NO: 322961 - RNA, 19 nt, Artificial Sequence
  Description of Artificial Sequence: Synthetic oligonucleotide
ugauaaaaccaacucgaau

SEQ ID NO: 322962 - RNA, 19 nt, Artificial Sequence
  Description of Artificial Sequence: Synthetic oligonucleotide
cuguaugagacaucgauca

SEQ ID NO: 322963 - RNA, 19 nt, Artificial Sequence
  Description of Artificial Sequence: Synthetic oligonucleotide
cagcuuuagaaauuagaag

SEQ ID NO: 322964 - RNA, 19 nt, Artificial Sequence
  Description of Artificial Sequence: Synthetic oligonucleotide
uucguuagagucagcaaac

SEQ ID NO: 322965 - RNA, 19 nt, Artificial Sequence
  Description of Artificial Sequence: Synthetic oligonucleotide
aagaauauagauacuguuu

SEQ ID NO: 322966 - RNA, 19 nt, Artificial Sequence
  Description of Artificial Sequence: Synthetic oligonucleotide
cauucggaguuguugagag

SEQ ID NO: 322967 - RNA, 19 nt, Artificial Sequence
  Description of Artificial Sequence: Synthetic oligonucleotide
cuagccuacuaucauuggg

SEQ ID NO: 322968 - RNA, 19 nt, Artificial Sequence
  Description of Artificial Sequence: Synthetic oligonucleotide
acuagcacagugcuuccgg

SEQ ID NO: 322969 - RNA, 19 nt, Artificial Sequence
  Description of Artificial Sequence: Synthetic oligonucleotide
ugguuaagacucauuauau

SEQ ID NO: 322970 - RNA, 19 nt, Artificial Sequence
  Description of Artificial Sequence: Synthetic oligonucleotide
ucuaugugcugucuuggca

SEQ ID NO: 322971 - RNA, 19 nt, Artificial Sequence
  Description of Artificial Sequence: Synthetic oligonucleotide
aacacgccagcaugugggc

SEQ ID NO: 322972 - RNA, 19 nt, Artificial Sequence
  Description of Artificial Sequence: Synthetic oligonucleotide
uguguguauuggcaggagc

SEQ ID NO: 322973 - RNA, 19 nt, Artificial Sequence
  Description of Artificial Sequence: Synthetic oligonucleotide
aacuagccuacuaucauug

SEQ ID NO: 322974 - RNA, 19 nt, Artificial Sequence
  Description of Artificial Sequence: Synthetic oligonucleotide
gaacacaaauuguucuacc

SEQ ID NO: 322975 - RNA, 19 nt, Artificial Sequence
  Description of Artificial Sequence: Synthetic oligonucleotide
cuaccagacagauuacaag

SEQ ID NO: 322976 - RNA, 19 nt, Artificial Sequence
  Description of Artificial Sequence: Synthetic oligonucleotide
aaccaacucgaauugcaga

SEQ ID NO: 322977 - RNA, 19 nt, Artificial Sequence
  Description of Artificial Sequence: Synthetic oligonucleotide
gcagcuauuggccacacag

SEQ ID NO: 322978 - RNA, 19 nt, Artificial Sequence
  Description of Artificial Sequence: Synthetic oligonucleotide
ugugacccgagcaccaaag

SEQ ID NO: 322979 - RNA, 19 nt, Artificial Sequence
  Description of Artificial Sequence: Synthetic oligonucleotide
ucggaaaaccaucucccgc

SEQ ID NO: 322980 - RNA, 19 nt, Artificial Sequence
  Description of Artificial Sequence: Synthetic oligonucleotide
agcgaaugguucuguaaac

SEQ ID NO: 322981 - RNA, 19 nt, Artificial Sequence
  Description of Artificial Sequence: Synthetic oligonucleotide
guacuccucaguuaagcag

SEQ ID NO: 322982 - RNA, 19 nt, Artificial Sequence
  Description of Artificial Sequence: Synthetic oligonucleotide
cugucggaaaaccaucucc

SEQ ID NO: 322983 - RNA, 19 nt, Artificial Sequence
  Description of Artificial Sequence: Synthetic oligonucleotide
aggaaccaugaaucuauac

SEQ ID NO: 322984 - RNA, 19 nt, Artificial Sequence
  Description of Artificial Sequence: Synthetic oligonucleotide
guacgaacccucauaauag

SEQ ID NO: 322985 - RNA, 19 nt, Artificial Sequence
  Description of Artificial Sequence: Synthetic oligonucleotide
caucuaauguguguauugg

SEQ ID NO: 322986 - RNA, 19 nt, Artificial Sequence
  Description of Artificial Sequence: Synthetic oligonucleotide
gagaguguggacuucccac

SEQ ID NO: 322987 - RNA, 19 nt, Artificial Sequence
  Description of Artificial Sequence: Synthetic oligonucleotide
gaugucaugucuguguuga

SEQ ID NO: 322988 - RNA, 19 nt, Artificial Sequence
  Description of Artificial Sequence: Synthetic oligonucleotide
auaugagcuugacgagucc

SEQ ID NO: 322989 - RNA, 19 nt, Artificial Sequence
  Description of Artificial Sequence: Synthetic oligonucleotide
agccauaagaacauguuca

SEQ ID NO: 322990 - RNA, 19 nt, Artificial Sequence
  Description of Artificial Sequence: Synthetic oligonucleotide
agcuugacgaguccauuuc

SEQ ID NO: 322991 - RNA, 19 nt, Artificial Sequence
  Description of Artificial Sequence: Synthetic oligonucleotide
ugagacagcgaaugguucu

SEQ ID NO: 322992 - RNA, 19 nt, Artificial Sequence
  Description of Artificial Sequence: Synthetic oligonucleotide
caagcuauccugaaaauua

SEQ ID NO: 322993 - RNA, 19 nt, Artificial Sequence
  Description of Artificial Sequence: Synthetic oligonucleotide
ggaaccaugaaucuauaca

SEQ ID NO: 322994 - RNA, 19 nt, Artificial Sequence
  Description of Artificial Sequence: Synthetic oligonucleotide
ggcuauccaaauuaacccg

SEQ ID NO: 322995 - RNA, 19 nt, Artificial Sequence
  Description of Artificial Sequence: Synthetic oligonucleotide
aaacuagccuacuaucauu

SEQ ID NO: 322996 - RNA, 19 nt, Artificial Sequence
  Description of Artificial Sequence: Synthetic oligonucleotide
aguugauaagggcaucugu

SEQ ID NO: 322997 - RNA, 19 nt, Artificial Sequence
  Description of Artificial Sequence: Synthetic oligonucleotide
ucgaauugcagaugucucu

SEQ ID NO: 322998 - RNA, 19 nt, Artificial Sequence
  Description of Artificial Sequence: Synthetic oligonucleotide
aaaccaacucgaauugcag

SEQ ID NO: 322999 - RNA, 19 nt, Artificial Sequence
  Description of Artificial Sequence: Synthetic oligonucleotide
aaaagcugacuuggcaaag

SEQ ID NO: 323000 - RNA, 19 nt, Artificial Sequence
  Description of Artificial Sequence: Synthetic oligonucleotide
aaaugauggcacauuaaau

SEQ ID NO: 323001 - RNA, 19 nt, Artificial Sequence
  Description of Artificial Sequence: Synthetic oligonucleotide
ugcccguucaucaggggag

SEQ ID NO: 323002 - RNA, 19 nt, Artificial Sequence
  Description of Artificial Sequence: Synthetic oligonucleotide
ggcaguauaagcuggcuug

SEQ ID NO: 323003 - RNA, 19 nt, Artificial Sequence
  Description of Artificial Sequence: Synthetic oligonucleotide
cauaugagcuugacgaguc

SEQ ID NO: 323004 - RNA, 19 nt, Artificial Sequence
  Description of Artificial Sequence: Synthetic oligonucleotide
ucugauuaacuagaauuuc

SEQ ID NO: 323005 - RNA, 19 nt, Artificial Sequence
  Description of Artificial Sequence: Synthetic oligonucleotide
auugguuaagacucauuau

SEQ ID NO: 323006 - RNA, 19 nt, Artificial Sequence
  Description of Artificial Sequence: Synthetic oligonucleotide
aagacucauuauauacagg

SEQ ID NO: 323007 - RNA, 19 nt, Artificial Sequence
  Description of Artificial Sequence: Synthetic oligonucleotide
cuugaacucgacagucacg

SEQ ID NO: 323008 - RNA, 19 nt, Artificial Sequence
  Description of Artificial Sequence: Synthetic oligonucleotide
ucuucggagagucgggacu

SEQ ID NO: 323009 - RNA, 19 nt, Artificial Sequence
  Description of Artificial Sequence: Synthetic oligonucleotide
acuguaugagacaucgauc

SEQ ID NO: 323010 - RNA, 19 nt, Artificial Sequence
  Description of Artificial Sequence: Synthetic oligonucleotide
agagucgggacucggagca

SEQ ID NO: 323011 - RNA, 19 nt, Artificial Sequence
  Description of Artificial Sequence: Synthetic oligonucleotide
aaagaaaucaguggcccua

SEQ ID NO: 323012 - RNA, 19 nt, Artificial Sequence
  Description of Artificial Sequence: Synthetic oligonucleotide
gaucuggugggcuacucac

SEQ ID NO: 323013 - RNA, 19 nt, Artificial Sequence
  Description of Artificial Sequence: Synthetic oligonucleotide
auagcaucgaagccuauuu

SEQ ID NO: 323014 - RNA, 19 nt, Artificial Sequence
  Description of Artificial Sequence: Synthetic oligonucleotide
agagucaccgagcagcuau

SEQ ID NO: 323015 - RNA, 19 nt, Artificial Sequence
  Description of Artificial Sequence: Synthetic oligonucleotide
uggcccuaaaaccugugcu

SEQ ID NO: 323016 - RNA, 19 nt, Artificial Sequence
  Description of Artificial Sequence: Synthetic oligonucleotide
ucguuuucguuagagucag

SEQ ID NO: 323017 - RNA, 19 nt, Artificial Sequence
  Description of Artificial Sequence: Synthetic oligonucleotide
aauauuccuugaaucagau

SEQ ID NO: 323018 - RNA, 19 nt, Artificial Sequence
  Description of Artificial Sequence: Synthetic oligonucleotide
ucauuauauacagguagaa

SEQ ID NO: 323019 - RNA, 19 nt, Artificial Sequence
  Description of Artificial Sequence: Synthetic oligonucleotide
acuaucauugggaaaauua

SEQ ID NO: 323020 - RNA, 19 nt, Artificial Sequence
  Description of Artificial Sequence: Synthetic oligonucleotide
gaacccucauaauagcauc

SEQ ID NO: 323021 - RNA, 19 nt, Artificial Sequence
  Description of Artificial Sequence: Synthetic oligonucleotide
gaaucuggcaguauaagcu

SEQ ID NO: 323022 - RNA, 19 nt, Artificial Sequence
  Description of Artificial Sequence: Synthetic oligonucleotide
cgaucaugaagauaaaggc

SEQ ID NO: 323023 - RNA, 19 nt, Artificial Sequence
  Description of Artificial Sequence: Synthetic oligonucleotide
uuaaagaaguggagaacuu

SEQ ID NO: 323024 - RNA, 19 nt, Artificial Sequence
  Description of Artificial Sequence: Synthetic oligonucleotide
auauuccuugaaucagauc

SEQ ID NO: 323025 - RNA, 19 nt, Artificial Sequence
  Description of Artificial Sequence: Synthetic oligonucleotide
guaccaccacacuucacgg

SEQ ID NO: 323026 - RNA, 19 nt, Artificial Sequence
  Description of Artificial Sequence: Synthetic oligonucleotide
ugggccaaauuacucuuca

SEQ ID NO: 323027 - RNA, 19 nt, Artificial Sequence
  Description of Artificial Sequence: Synthetic oligonucleotide
guaugagacaucgaucaug

SEQ ID NO: 323028 - RNA, 19 nt, Artificial Sequence
  Description of Artificial Sequence: Synthetic oligonucleotide
augacgggagcaaagacug

SEQ ID NO: 323029 - RNA, 19 nt, Artificial Sequence
  Description of Artificial Sequence: Synthetic oligonucleotide
aacuguuggcuauccaaau

SEQ ID NO: 323030 - RNA, 19 nt, Artificial Sequence
  Description of Artificial Sequence: Synthetic oligonucleotide
accauuaagaauauagaua

SEQ ID NO: 323031 - RNA, 19 nt, Artificial Sequence
  Description of Artificial Sequence: Synthetic oligonucleotide
uacgaacccucauaauagc

SEQ ID NO: 323032 - RNA, 19 nt, Artificial Sequence
  Description of Artificial Sequence: Synthetic oligonucleotide
uagaggucugcuagcuggg

SEQ ID NO: 323033 - RNA, 19 nt, Artificial Sequence
  Description of Artificial Sequence: Synthetic oligonucleotide
ugacugggaaagaggaaga

SEQ ID NO: 323034 - RNA, 19 nt, Artificial Sequence
  Description of Artificial Sequence: Synthetic oligonucleotide
cucauuauauacagguaga

SEQ ID NO: 323035 - RNA, 19 nt, Artificial Sequence
  Description of Artificial Sequence: Synthetic oligonucleotide
ugucucguuuucguuagag

SEQ ID NO: 323036 - RNA, 19 nt, Artificial Sequence
  Description of Artificial Sequence: Synthetic oligonucleotide
cauagacagcuguuugggg

SEQ ID NO: 323037 - RNA, 19 nt, Artificial Sequence
  Description of Artificial Sequence: Synthetic oligonucleotide
uuuucguuagagucagcaa

SEQ ID NO: 323038 - RNA, 19 nt, Artificial Sequence
  Description of Artificial Sequence: Synthetic oligonucleotide
aucgaucaugaagauaaag

SEQ ID NO: 323039 - RNA, 19 nt, Artificial Sequence
  Description of Artificial Sequence: Synthetic oligonucleotide
ucucgcugcuucacgauga

SEQ ID NO: 323040 - RNA, 19 nt, Artificial Sequence
  Description of Artificial Sequence: Synthetic oligonucleotide
ucccuuuaugguaccacca

SEQ ID NO: 323041 - RNA, 19 nt, Artificial Sequence
  Description of Artificial Sequence: Synthetic oligonucleotide
ucgaagccuauuuucuucu

SEQ ID NO: 323042 - RNA, 19 nt, Artificial Sequence
  Description of Artificial Sequence: Synthetic oligonucleotide
uguuggcuauccaaauuaa

SEQ ID NO: 323043 - RNA, 19 nt, Artificial Sequence
  Description of Artificial Sequence: Synthetic oligonucleotide
acuagccuacuaucauugg

SEQ ID NO: 323044 - RNA, 19 nt, Artificial Sequence
  Description of Artificial Sequence: Synthetic oligonucleotide
auagacuguucccuuuaug

SEQ ID NO: 323045 - RNA, 19 nt, Artificial Sequence
  Description of Artificial Sequence: Synthetic oligonucleotide
gaaaauuaggcaccaaguu

SEQ ID NO: 323046 - RNA, 19 nt, Artificial Sequence
  Description of Artificial Sequence: Synthetic oligonucleotide
acugucggaaaaccaucuc

SEQ ID NO: 323047 - RNA, 19 nt, Artificial Sequence
  Description of Artificial Sequence: Synthetic oligonucleotide
uuaucgcagucgauggcug

SEQ ID NO: 323048 - RNA, 19 nt, Artificial Sequence
  Description of Artificial Sequence: Synthetic oligonucleotide
aguaggaacauuccuucuu

SEQ ID NO: 323049 - RNA, 19 nt, Artificial Sequence
  Description of Artificial Sequence: Synthetic oligonucleotide
gaaaucaguggcccuaaaa

SEQ ID NO: 323050 - RNA, 19 nt, Artificial Sequence
  Description of Artificial Sequence: Synthetic oligonucleotide
acagcagaggaaauccacg

SEQ ID NO: 323051 - RNA, 19 nt, Artificial Sequence
  Description of Artificial Sequence: Synthetic oligonucleotide
guaggaacauuccuucuuc

SEQ ID NO: 323052 - RNA, 19 nt, Artificial Sequence
  Description of Artificial Sequence: Synthetic oligonucleotide
augcuugaacucgacaguc

SEQ ID NO: 323053 - RNA, 19 nt, Artificial Sequence
  Description of Artificial Sequence: Synthetic oligonucleotide
cacauaugagcuugacgag

SEQ ID NO: 323054 - RNA, 19 nt, Artificial Sequence
  Description of Artificial Sequence: Synthetic oligonucleotide
gaggguacuccucaguuaa

SEQ ID NO: 323055 - RNA, 19 nt, Artificial Sequence
  Description of Artificial Sequence: Synthetic oligonucleotide
aucauucggaguuguugag

SEQ ID NO: 323056 - RNA, 19 nt, Artificial Sequence
  Description of Artificial Sequence: Synthetic oligonucleotide
cacguccacauacugacug

SEQ ID NO: 323057 - RNA, 19 nt, Artificial Sequence
  Description of Artificial Sequence: Synthetic oligonucleotide
cauaauagcaucgaagccu

SEQ ID NO: 323058 - RNA, 19 nt, Artificial Sequence
  Description of Artificial Sequence: Synthetic oligonucleotide
gucggaaaaccaucucccg

SEQ ID NO: 323059 - RNA, 19 nt, Artificial Sequence
  Description of Artificial Sequence: Synthetic oligonucleotide
acuccgagccauaagaaca

SEQ ID NO: 323060 - RNA, 19 nt, Artificial Sequence
  Description of Artificial Sequence: Synthetic oligonucleotide
gacccgagcaccaaagcug

SEQ ID NO: 323061 - RNA, 19 nt, Artificial Sequence
  Description of Artificial Sequence: Synthetic oligonucleotide
ugauggcacauuaaauauu

SEQ ID NO: 323062 - RNA, 19 nt, Artificial Sequence
  Description of Artificial Sequence: Synthetic oligonucleotide
acauccguugguguuguuc

SEQ ID NO: 323063 - RNA, 19 nt, Artificial Sequence
  Description of Artificial Sequence: Synthetic oligonucleotide
cucacuccgagccauaaga

SEQ ID NO: 323064 - RNA, 19 nt, Artificial Sequence
  Description of Artificial Sequence: Synthetic oligonucleotide
aacaucucgggaaucuggu

SEQ ID NO: 323065 - RNA, 19 nt, Artificial Sequence
  Description of Artificial Sequence: Synthetic oligonucleotide
agaggaaccaugaaucuau

SEQ ID NO: 323066 - RNA, 19 nt, Artificial Sequence
  Description of Artificial Sequence: Synthetic oligonucleotide
aauagcaucgaagccuauu

SEQ ID NO: 323067 - RNA, 19 nt, Artificial Sequence
  Description of Artificial Sequence: Synthetic oligonucleotide
uauccaaauuaacccgaaa

SEQ ID NO: 323068 - RNA, 19 nt, Artificial Sequence
  Description of Artificial Sequence: Synthetic oligonucleotide
auuguucuaccagacagau

SEQ ID NO: 323069 - RNA, 19 nt, Artificial Sequence
  Description of Artificial Sequence: Synthetic oligonucleotide
uaaagaaguggagaacuuu

SEQ ID NO: 323070 - RNA, 19 nt, Artificial Sequence
  Description of Artificial Sequence: Synthetic oligonucleotide
aacucgacagucacggccu

SEQ ID NO: 323071 - RNA, 19 nt, Artificial Sequence
  Description of Artificial Sequence: Synthetic oligonucleotide
uccggugagcagaggaacc

SEQ ID NO: 323072 - RNA, 19 nt, Artificial Sequence
  Description of Artificial Sequence: Synthetic oligonucleotide
agguagaaaccaucaaaau

SEQ ID NO: 323073 - RNA, 19 nt, Artificial Sequence
  Description of Artificial Sequence: Synthetic oligonucleotide
aacugucggaaaaccaucu

SEQ ID NO: 323074 - RNA, 19 nt, Artificial Sequence
  Description of Artificial Sequence: Synthetic oligonucleotide
cucguuuucguuagaguca

SEQ ID NO: 323075 - RNA, 19 nt, Artificial Sequence
  Description of Artificial Sequence: Synthetic oligonucleotide
gguaugcccguucaucagg

SEQ ID NO: 323076 - RNA, 19 nt, Artificial Sequence
  Description of Artificial Sequence: Synthetic oligonucleotide
gauggacuagcacagugcu

SEQ ID NO: 323077 - RNA, 19 nt, Artificial Sequence
  Description of Artificial Sequence: Synthetic oligonucleotide
ugaaucagaucuggugggc

SEQ ID NO: 323078 - RNA, 19 nt, Artificial Sequence
  Description of Artificial Sequence: Synthetic oligonucleotide
auacagguagaaaccauca

SEQ ID NO: 323079 - RNA, 19 nt, Artificial Sequence
  Description of Artificial Sequence: Synthetic oligonucleotide
acauaugagcuugacgagu

SEQ ID NO: 323080 - RNA, 19 nt, Artificial Sequence
  Description of Artificial Sequence: Synthetic oligonucleotide
gguacgaacccucauaaua

SEQ ID NO: 323081 - RNA, 19 nt, Artificial Sequence
  Description of Artificial Sequence: Synthetic oligonucleotide
uucuaccagacagauuaca

SEQ ID NO: 323082 - RNA, 19 nt, Artificial Sequence
  Description of Artificial Sequence: Synthetic oligonucleotide
cuucacgggcuugugaccc

SEQ ID NO: 323083 - RNA, 19 nt, Artificial Sequence
  Description of Artificial Sequence: Synthetic oligonucleotide
ucauuaucauucggaguug

SEQ ID NO: 323084 - RNA, 19 nt, Artificial Sequence
  Description of Artificial Sequence: Synthetic oligonucleotide
ugguaugcccguucaucag

SEQ ID NO: 323085 - RNA, 19 nt, Artificial Sequence
  Description of Artificial Sequence: Synthetic oligonucleotide
uguaugagacaucgaucau

SEQ ID NO: 323086 - RNA, 19 nt, Artificial Sequence
  Description of Artificial Sequence: Synthetic oligonucleotide
cauccguugguguuguuca

SEQ ID NO: 323087 - RNA, 19 nt, Artificial Sequence
  Description of Artificial Sequence: Synthetic oligonucleotide
agcaaagacugucucguuu

SEQ ID NO: 323088 - RNA, 19 nt, Artificial Sequence
  Description of Artificial Sequence: Synthetic oligonucleotide
gagagucgggacucggagc

SEQ ID NO: 323089 - RNA, 19 nt, Artificial Sequence
  Description of Artificial Sequence: Synthetic oligonucleotide
uccgguaacacgccagcau

SEQ ID NO: 323090 - RNA, 19 nt, Artificial Sequence
  Description of Artificial Sequence: Synthetic oligonucleotide
aaggucuaugugcugucuu

SEQ ID NO: 323091 - RNA, 19 nt, Artificial Sequence
  Description of Artificial Sequence: Synthetic oligonucleotide
ucacuccgagccauaagaa

SEQ ID NO: 323092 - RNA, 19 nt, Artificial Sequence
  Description of Artificial Sequence: Synthetic oligonucleotide
ucauucggaguuguugaga

SEQ ID NO: 323093 - RNA, 19 nt, Artificial Sequence
  Description of Artificial Sequence: Synthetic oligonucleotide
gcaguacuuucauagaauc

SEQ ID NO: 323094 - RNA, 19 nt, Artificial Sequence
  Description of Artificial Sequence: Synthetic oligonucleotide
cuuccgguaacacgccagc

SEQ ID NO: 323095 - RNA, 19 nt, Artificial Sequence
  Description of Artificial Sequence: Synthetic oligonucleotide
guaugcccguucaucaggg

SEQ ID NO: 323096 - RNA, 19 nt, Artificial Sequence
  Description of Artificial Sequence: Synthetic oligonucleotide
cugagguugggccaaauua

SEQ ID NO: 323097 - RNA, 19 nt, Artificial Sequence
  Description of Artificial Sequence: Synthetic oligonucleotide
uaacuagaauuucccggau

SEQ ID NO: 323098 - RNA, 19 nt, Artificial Sequence
  Description of Artificial Sequence: Synthetic oligonucleotide
agaccauuagccaguagga

SEQ ID NO: 323099 - RNA, 19 nt, Artificial Sequence
  Description of Artificial Sequence: Synthetic oligonucleotide
auauaucuagcuagcacaa

SEQ ID NO: 323100 - RNA, 19 nt, Artificial Sequence
  Description of Artificial Sequence: Synthetic oligonucleotide
auuagguauaaggcaaaau

SEQ ID NO: 323101 - RNA, 19 nt, Artificial Sequence
  Description of Artificial Sequence: Synthetic oligonucleotide
gccuuaucgcagucgaugg

SEQ ID NO: 323102 - RNA, 19 nt, Artificial Sequence
  Description of Artificial Sequence: Synthetic oligonucleotide
uccuugaaucagaucuggu

SEQ ID NO: 323103 - RNA, 19 nt, Artificial Sequence
  Description of Artificial Sequence: Synthetic oligonucleotide
ugcagauuuuaaguugaaa

SEQ ID NO: 323104 - RNA, 19 nt, Artificial Sequence
  Description of Artificial Sequence: Synthetic oligonucleotide
uaugcccguucaucagggg

SEQ ID NO: 323105 - RNA, 19 nt, Artificial Sequence
  Description of Artificial Sequence: Synthetic oligonucleotide
guugguaugcccguucauc

SEQ ID NO: 323106 - RNA, 19 nt, Artificial Sequence
  Description of Artificial Sequence: Synthetic oligonucleotide
agucgggacucggagcagc

SEQ ID NO: 323107 - RNA, 19 nt, Artificial Sequence
  Description of Artificial Sequence: Synthetic oligonucleotide
aagucgucgcuggccaccg

SEQ ID NO: 323108 - RNA, 19 nt, Artificial Sequence
  Description of Artificial Sequence: Synthetic oligonucleotide
gaacugucggaaaaccauc

SEQ ID NO: 323109 - RNA, 19 nt, Artificial Sequence
  Description of Artificial Sequence: Synthetic oligonucleotide
accgauggucguguagagc

SEQ ID NO: 323110 - RNA, 19 nt, Artificial Sequence
  Description of Artificial Sequence: Synthetic oligonucleotide
gaugacgggagcaaagacu

SEQ ID NO: 323111 - RNA, 19 nt, Artificial Sequence
  Description of Artificial Sequence: Synthetic oligonucleotide
augcccguucaucagggga

SEQ ID NO: 323112 - RNA, 19 nt, Artificial Sequence
  Description of Artificial Sequence: Synthetic oligonucleotide
uuaaggcaagauuguggau

SEQ ID NO: 323113 - RNA, 19 nt, Artificial Sequence
  Description of Artificial Sequence: Synthetic oligonucleotide
ucgggcagugaugucaugu

SEQ ID NO: 323114 - RNA, 19 nt, Artificial Sequence
  Description of Artificial Sequence: Synthetic oligonucleotide
aagaacauguucagaccau

SEQ ID NO: 323115 - RNA, 19 nt, Artificial Sequence
  Description of Artificial Sequence: Synthetic oligonucleotide
acggccuuaucgcagucga

SEQ ID NO: 323116 - RNA, 19 nt, Artificial Sequence
  Description of Artificial Sequence: Synthetic oligonucleotide
uccgaagucgucgcuggcc

SEQ ID NO: 323117 - RNA, 19 nt, Artificial Sequence
  Description of Artificial Sequence: Synthetic oligonucleotide
gucuaugugcugucuuggc

SEQ ID NO: 323118 - RNA, 19 nt, Artificial Sequence
  Description of Artificial Sequence: Synthetic oligonucleotide
auuccuugaaucagaucug

SEQ ID NO: 323119 - RNA, 19 nt, Artificial Sequence
  Description of Artificial Sequence: Synthetic oligonucleotide
caaauuguucuaccagaca

SEQ ID NO: 323120 - RNA, 19 nt, Artificial Sequence
  Description of Artificial Sequence: Synthetic oligonucleotide
ucugagguugggccaaauu

SEQ ID NO: 323121 - RNA, 19 nt, Artificial Sequence
  Description of Artificial Sequence: Synthetic oligonucleotide
guauuggcaggagcugugg

SEQ ID NO: 323122 - RNA, 19 nt, Artificial Sequence
  Description of Artificial Sequence: Synthetic oligonucleotide
guacacaggcaguacuuuc

SEQ ID NO: 323123 - RNA, 19 nt, Artificial Sequence
  Description of Artificial Sequence: Synthetic oligonucleotide
cugucuuggcaagcuaucc

SEQ ID NO: 323124 - RNA, 19 nt, Artificial Sequence
  Description of Artificial Sequence: Synthetic oligonucleotide
cagaugucucuucaugcuc

SEQ ID NO: 323125 - RNA, 19 nt, Artificial Sequence
  Description of Artificial Sequence: Synthetic oligonucleotide
gagacagcgaaugguucug

SEQ ID NO: 323126 - RNA, 19 nt, Artificial Sequence
  Description of Artificial Sequence: Synthetic oligonucleotide
gacucggagcagcggacag

SEQ ID NO: 323127 - RNA, 19 nt, Artificial Sequence
  Description of Artificial Sequence: Synthetic oligonucleotide
agauacuguuuuauagaca

SEQ ID NO: 323128 - RNA, 19 nt, Artificial Sequence
  Description of Artificial Sequence: Synthetic oligonucleotide
uucuucggagagucgggac

SEQ ID NO: 323129 - RNA, 19 nt, Artificial Sequence
  Description of Artificial Sequence: Synthetic oligonucleotide
acgaguccauuucuuuaug

SEQ ID NO: 323130 - RNA, 19 nt, Artificial Sequence
  Description of Artificial Sequence: Synthetic oligonucleotide
gguagaaaccaucaaaauu

SEQ ID NO: 323131 - RNA, 19 nt, Artificial Sequence
  Description of Artificial Sequence: Synthetic oligonucleotide
ucgggaaucugguccaaua

SEQ ID NO: 323132 - RNA, 19 nt, Artificial Sequence
  Description of Artificial Sequence: Synthetic oligonucleotide
gacgggagcaaagacuguc

SEQ ID NO: 323133 - RNA, 19 nt, Artificial Sequence
  Description of Artificial Sequence: Synthetic oligonucleotide
gaagucgucgcuggccacc

SEQ ID NO: 323134 - RNA, 19 nt, Artificial Sequence
  Description of Artificial Sequence: Synthetic oligonucleotide
uucacgggcuugugacccg

SEQ ID NO: 323135 - RNA, 19 nt, Artificial Sequence
  Description of Artificial Sequence: Synthetic oligonucleotide
guuggcuauccaaauuaac

SEQ ID NO: 323136 - RNA, 19 nt, Artificial Sequence
  Description of Artificial Sequence: Synthetic oligonucleotide
guggauccgaagucgucgc

SEQ ID NO: 323137 - RNA, 19 nt, Artificial Sequence
  Description of Artificial Sequence: Synthetic oligonucleotide
agguugggccaaauuacuc

SEQ ID NO: 323138 - RNA, 19 nt, Artificial Sequence
  Description of Artificial Sequence: Synthetic oligonucleotide
auccgaagucgucgcuggc

SEQ ID NO: 323139 - RNA, 19 nt, Artificial Sequence
  Description of Artificial Sequence: Synthetic oligonucleotide
agccuacuaucauugggaa

SEQ ID NO: 323140 - RNA, 19 nt, Artificial Sequence
  Description of Artificial Sequence: Synthetic oligonucleotide
guggcccuaaaaccugugc

SEQ ID NO: 323141 - RNA, 19 nt, Artificial Sequence
  Description of Artificial Sequence: Synthetic oligonucleotide
uugggccaaauuacucuuc

SEQ ID NO: 323142 - RNA, 19 nt, Artificial Sequence
  Description of Artificial Sequence: Synthetic oligonucleotide
uauaucuagcuagcacaaa

SEQ ID NO: 323143 - RNA, 19 nt, Artificial Sequence
  Description of Artificial Sequence: Synthetic oligonucleotide
ggucuaugugcugucuugg

SEQ ID NO: 323144 - RNA, 19 nt, Artificial Sequence
  Description of Artificial Sequence: Synthetic oligonucleotide
gugggcuacucacuccgag

SEQ ID NO: 323145 - RNA, 19 nt, Artificial Sequence
  Description of Artificial Sequence: Synthetic oligonucleotide
uagcaucgaagccuauuuu

SEQ ID NO: 323146 - RNA, 19 nt, Artificial Sequence
  Description of Artificial Sequence: Synthetic oligonucleotide
aaaccugugcugguacgaa

SEQ ID NO: 323147 - RNA, 19 nt, Artificial Sequence
  Description of Artificial Sequence: Synthetic oligonucleotide
gcugccguugguaugcccg

SEQ ID NO: 323148 - RNA, 19 nt, Artificial Sequence
  Description of Artificial Sequence: Synthetic oligonucleotide
agucgauggcugccauuuc

SEQ ID NO: 323149 - RNA, 19 nt, Artificial Sequence
  Description of Artificial Sequence: Synthetic oligonucleotide
cagcgaaugguucuguaaa

SEQ ID NO: 323150 - RNA, 19 nt, Artificial Sequence
  Description of Artificial Sequence: Synthetic oligonucleotide
auuucggaggucauucaaa

SEQ ID NO: 323151 - RNA, 19 nt, Artificial Sequence
  Description of Artificial Sequence: Synthetic oligonucleotide
gauggucguguagagcaca

SEQ ID NO: 323152 - RNA, 19 nt, Artificial Sequence
  Description of Artificial Sequence: Synthetic oligonucleotide
cuucacauaugagcuugac

SEQ ID NO: 323153 - RNA, 19 nt, Artificial Sequence
  Description of Artificial Sequence: Synthetic oligonucleotide
accgagcagcuauuggcca

SEQ ID NO: 323154 - RNA, 19 nt, Artificial Sequence
  Description of Artificial Sequence: Synthetic oligonucleotide
cuggaucaaggcuccagca

SEQ ID NO: 323155 - RNA, 19 nt, Artificial Sequence
  Description of Artificial Sequence: Synthetic oligonucleotide
ggaaaauuaggcaccaagu

SEQ ID NO: 323156 - RNA, 19 nt, Artificial Sequence
  Description of Artificial Sequence: Synthetic oligonucleotide
agcagaggaaauccacgua

SEQ ID NO: 323157 - RNA, 19 nt, Artificial Sequence
  Description of Artificial Sequence: Synthetic oligonucleotide
uugugacccgagcaccaaa

SEQ ID NO: 323158 - RNA, 19 nt, Artificial Sequence
  Description of Artificial Sequence: Synthetic oligonucleotide
acgaacccucauaauagca

SEQ ID NO: 323159 - RNA, 19 nt, Artificial Sequence
  Description of Artificial Sequence: Synthetic oligonucleotide
ucgacagucacggccuuau

SEQ ID NO: 323160 - RNA, 19 nt, Artificial Sequence
  Description of Artificial Sequence: Synthetic oligonucleotide
cuauccaaauuaacccgaa

SEQ ID NO: 323161 - RNA, 19 nt, Artificial Sequence
  Description of Artificial Sequence: Synthetic oligonucleotide
gguuaagacucauuauaua

SEQ ID NO: 323162 - RNA, 19 nt, Artificial Sequence
  Description of Artificial Sequence: Synthetic oligonucleotide
ggccuuaucgcagucgaug

SEQ ID NO: 323163 - RNA, 19 nt, Artificial Sequence
  Description of Artificial Sequence: Synthetic oligonucleotide
cauuucggaggucauucaa

SEQ ID NO: 323164 - RNA, 19 nt, Artificial Sequence
  Description of Artificial Sequence: Synthetic oligonucleotide
ucggagagucgggacucgg

SEQ ID NO: 323165 - RNA, 19 nt, Artificial Sequence
  Description of Artificial Sequence: Synthetic oligonucleotide
gaauagcuucccagggcac

SEQ ID NO: 323166 - RNA, 19 nt, Artificial Sequence
  Description of Artificial Sequence: Synthetic oligonucleotide
augaaucuauacaguuuga

SEQ ID NO: 323167 - RNA, 19 nt, Artificial Sequence
  Description of Artificial Sequence: Synthetic oligonucleotide
uucggagagucgggacucg

SEQ ID NO: 323168 - RNA, 19 nt, Artificial Sequence
  Description of Artificial Sequence: Synthetic oligonucleotide
gucugauuaacuagaauuu

SEQ ID NO: 323169 - RNA, 19 nt, Artificial Sequence
  Description of Artificial Sequence: Synthetic oligonucleotide
cauguacacaggcaguacu

SEQ ID NO: 323170 - RNA, 19 nt, Artificial Sequence
  Description of Artificial Sequence: Synthetic oligonucleotide
agccagaaauagacuguuc

SEQ ID NO: 323171 - RNA, 19 nt, Artificial Sequence
  Description of Artificial Sequence: Synthetic oligonucleotide
uagcacagugcuuccggua

SEQ ID NO: 323172 - RNA, 19 nt, Artificial Sequence
  Description of Artificial Sequence: Synthetic oligonucleotide
cuucggagagucgggacuc

SEQ ID NO: 323173 - RNA, 19 nt, Artificial Sequence
  Description of Artificial Sequence: Synthetic oligonucleotide
ggaugacgggagcaaagac

SEQ ID NO: 323174 - RNA, 19 nt, Artificial Sequence
  Description of Artificial Sequence: Synthetic oligonucleotide
caccgauggucguguagag

SEQ ID NO: 323175 - RNA, 19 nt, Artificial Sequence
  Description of Artificial Sequence: Synthetic oligonucleotide
aagaaccauuaagaauaua

SEQ ID NO: 323176 - RNA, 19 nt, Artificial Sequence
  Description of Artificial Sequence: Synthetic oligonucleotide
ggaaaaccaucucccgcug

SEQ ID NO: 323177 - RNA, 19 nt, Artificial Sequence
  Description of Artificial Sequence: Synthetic oligonucleotide
cccggaugacuuucaaagg

SEQ ID NO: 323178 - RNA, 19 nt, Artificial Sequence
  Description of Artificial Sequence: Synthetic oligonucleotide
ugguacgaacccucauaau

SEQ ID NO: 323179 - RNA, 19 nt, Artificial Sequence
  Description of Artificial Sequence: Synthetic oligonucleotide
cuuaucgcagucgauggcu

SEQ ID NO: 323180 - RNA, 19 nt, Artificial Sequence
  Description of Artificial Sequence: Synthetic oligonucleotide
gguugggccaaauuacucu

SEQ ID NO: 323181 - RNA, 19 nt, Artificial Sequence
  Description of Artificial Sequence: Synthetic oligonucleotide
uuguucuaccagacagauu

SEQ ID NO: 323182 - RNA, 19 nt, Artificial Sequence
  Description of Artificial Sequence: Synthetic oligonucleotide
cuccggugagcagaggaac

SEQ ID NO: 323183 - RNA, 19 nt, Artificial Sequence
  Description of Artificial Sequence: Synthetic oligonucleotide
gauauugguuaagacucau

SEQ ID NO: 323184 - RNA, 19 nt, Artificial Sequence
  Description of Artificial Sequence: Synthetic oligonucleotide
uuccgguaacacgccagca

SEQ ID NO: 323185 - RNA, 19 nt, Artificial Sequence
  Description of Artificial Sequence: Synthetic oligonucleotide
auggucguguagagcacag

SEQ ID NO: 323186 - RNA, 19 nt, Artificial Sequence
  Description of Artificial Sequence: Synthetic oligonucleotide
ugacgggagcaaagacugu

SEQ ID NO: 323187 - RNA, 19 nt, Artificial Sequence
  Description of Artificial Sequence: Synthetic oligonucleotide
caguacuuucauagaaucu

SEQ ID NO: 323188 - RNA, 19 nt, Artificial Sequence
  Description of Artificial Sequence: Synthetic oligonucleotide
cacggccuuaucgcagucg

SEQ ID NO: 323189 - RNA, 19 nt, Artificial Sequence
  Description of Artificial Sequence: Synthetic oligonucleotide
gacaucgaucaugaagaua

SEQ ID NO: 323190 - RNA, 19 nt, Artificial Sequence
  Description of Artificial Sequence: Synthetic oligonucleotide
caugcuugaacucgacagu

SEQ ID NO: 323191 - RNA, 19 nt, Artificial Sequence
  Description of Artificial Sequence: Synthetic oligonucleotide
cucggagcagcggacagca

SEQ ID NO: 323192 - RNA, 19 nt, Artificial Sequence
  Description of Artificial Sequence: Synthetic oligonucleotide
ugagcuugacgaguccauu

SEQ ID NO: 323193 - RNA, 19 nt, Artificial Sequence
  Description of Artificial Sequence: Synthetic oligonucleotide
guuccuccggugagcagag

SEQ ID NO: 323194 - RNA, 19 nt, Artificial Sequence
  Description of Artificial Sequence: Synthetic oligonucleotide
ucgggacucggagcagcgg

SEQ ID NO: 323195 - RNA, 19 nt, Artificial Sequence
  Description of Artificial Sequence: Synthetic oligonucleotide
auauugguuaagacucauu

SEQ ID NO: 323196 - RNA, 19 nt, Artificial Sequence
  Description of Artificial Sequence: Synthetic oligonucleotide
uggucguguagagcacagc

SEQ ID NO: 323197 - RNA, 19 nt, Artificial Sequence
  Description of Artificial Sequence: Synthetic oligonucleotide
gacagcgaaugguucugua

SEQ ID NO: 323198 - RNA, 19 nt, Artificial Sequence
  Description of Artificial Sequence: Synthetic oligonucleotide
acccgagcaccaaagcuga

SEQ ID NO: 323199 - RNA, 19 nt, Artificial Sequence
  Description of Artificial Sequence: Synthetic oligonucleotide
cugaaacauccgucaccac

SEQ ID NO: 323200 - RNA, 19 nt, Artificial Sequence
  Description of Artificial Sequence: Synthetic oligonucleotide
uccguugguguuguucaua

SEQ ID NO: 323201 - RNA, 19 nt, Artificial Sequence
  Description of Artificial Sequence: Synthetic oligonucleotide
cccuuuaugguaccaccac

SEQ ID NO: 323202 - RNA, 19 nt, Artificial Sequence
  Description of Artificial Sequence: Synthetic oligonucleotide
acgggagcaaagacugucu

SEQ ID NO: 323203 - RNA, 19 nt, Artificial Sequence
  Description of Artificial Sequence: Synthetic oligonucleotide
agaaaccaucaaaauugua

SEQ ID NO: 323204 - RNA, 19 nt, Artificial Sequence
  Description of Artificial Sequence: Synthetic oligonucleotide
cguaagaugauccuccaua

SEQ ID NO: 323205 - RNA, 19 nt, Artificial Sequence
  Description of Artificial Sequence: Synthetic oligonucleotide
cacagcgcacuggaucaag

SEQ ID NO: 323206 - RNA, 19 nt, Artificial Sequence
  Description of Artificial Sequence: Synthetic oligonucleotide
ggcaagauuguggauccga

SEQ ID NO: 323207 - RNA, 19 nt, Artificial Sequence
  Description of Artificial Sequence: Synthetic oligonucleotide
guucuaccagacagauuac

SEQ ID NO: 323208 - RNA, 19 nt, Artificial Sequence
  Description of Artificial Sequence: Synthetic oligonucleotide
cagucacggccuuaucgca

SEQ ID NO: 323209 - RNA, 19 nt, Artificial Sequence
  Description of Artificial Sequence: Synthetic oligonucleotide
agacucauagacagcuguu

SEQ ID NO: 323210 - RNA, 19 nt, Artificial Sequence
  Description of Artificial Sequence: Synthetic oligonucleotide
ggcuugugacccgagcacc

SEQ ID NO: 323211 - RNA, 19 nt, Artificial Sequence
  Description of Artificial Sequence: Synthetic oligonucleotide
caggggagaucucuggucu

SEQ ID NO: 323212 - RNA, 19 nt, Artificial Sequence
  Description of Artificial Sequence: Synthetic oligonucleotide
ccuuaucgcagucgauggc

SEQ ID NO: 323213 - RNA, 19 nt, Artificial Sequence
  Description of Artificial Sequence: Synthetic oligonucleotide
cucuuguagaggucugcua

SEQ ID NO: 323214 - RNA, 19 nt, Artificial Sequence
  Description of Artificial Sequence: Synthetic oligonucleotide
cuguuucacagcucuugua

SEQ ID NO: 323215 - RNA, 19 nt, Artificial Sequence
  Description of Artificial Sequence: Synthetic oligonucleotide
agcagcuauuggccacaca

SEQ ID NO: 323216 - RNA, 19 nt, Artificial Sequence
  Description of Artificial Sequence: Synthetic oligonucleotide
ggauauuguucauuaucau

SEQ ID NO: 323217 - RNA, 19 nt, Artificial Sequence
  Description of Artificial Sequence: Synthetic oligonucleotide
agacagcgaaugguucugu

SEQ ID NO: 323218 - RNA, 19 nt, Artificial Sequence
  Description of Artificial Sequence: Synthetic oligonucleotide
ccuuuaugguaccaccaca

SEQ ID NO: 323219 - RNA, 19 nt, Artificial Sequence
  Description of Artificial Sequence: Synthetic oligonucleotide
ucacggccuuaucgcaguc

SEQ ID NO: 323220 - RNA, 19 nt, Artificial Sequence
  Description of Artificial Sequence: Synthetic oligonucleotide
gaaggucuaugugcugucu

SEQ ID NO: 323221 - RNA, 19 nt, Artificial Sequence
  Description of Artificial Sequence: Synthetic oligonucleotide
cauuaucauucggaguugu

SEQ ID NO: 323222 - RNA, 19 nt, Artificial Sequence
  Description of Artificial Sequence: Synthetic oligonucleotide
gcaaacugucagcuuuaga

SEQ ID NO: 323223 - RNA, 19 nt, Artificial Sequence
  Description of Artificial Sequence: Synthetic oligonucleotide
ccgagcaccaaagcugaag

SEQ ID NO: 323224 - RNA, 19 nt, Artificial Sequence
  Description of Artificial Sequence: Synthetic oligonucleotide
cgcacuggaucaaggcucc

SEQ ID NO: 323225 - RNA, 19 nt, Artificial Sequence
  Description of Artificial Sequence: Synthetic oligonucleotide
cuagcacagugcuuccggu

SEQ ID NO: 323226 - RNA, 19 nt, Artificial Sequence
  Description of Artificial Sequence: Synthetic oligonucleotide
gcaucgaagccuauuuucu

SEQ ID NO: 323227 - RNA, 19 nt, Artificial Sequence
  Description of Artificial Sequence: Synthetic oligonucleotide
caguaggaacauuccuucu

SEQ ID NO: 323228 - RNA, 19 nt, Artificial Sequence
  Description of Artificial Sequence: Synthetic oligonucleotide
cuccgagccauaagaacau

SEQ ID NO: 323229 - RNA, 19 nt, Artificial Sequence
  Description of Artificial Sequence: Synthetic oligonucleotide
cgucgcuggccaccgaugg

SEQ ID NO: 323230 - RNA, 19 nt, Artificial Sequence
  Description of Artificial Sequence: Synthetic oligonucleotide
gugcuuccgguaacacgcc

SEQ ID NO: 323231 - RNA, 19 nt, Artificial Sequence
  Description of Artificial Sequence: Synthetic oligonucleotide
cacgggcuugugacccgag

SEQ ID NO: 323232 - RNA, 19 nt, Artificial Sequence
  Description of Artificial Sequence: Synthetic oligonucleotide
caauguagucacagaguuu

SEQ ID NO: 323233 - RNA, 19 nt, Artificial Sequence
  Description of Artificial Sequence: Synthetic oligonucleotide
ucacgaugaugagcuucau

SEQ ID NO: 323234 - RNA, 19 nt, Artificial Sequence
  Description of Artificial Sequence: Synthetic oligonucleotide
ggaaauugagacagcgaau

SEQ ID NO: 323235 - RNA, 19 nt, Artificial Sequence
  Description of Artificial Sequence: Synthetic oligonucleotide
ccauccaacaaaggaacaa

SEQ ID NO: 323236 - RNA, 19 nt, Artificial Sequence
  Description of Artificial Sequence: Synthetic oligonucleotide
ggucaugaccagcugccgu

SEQ ID NO: 323237 - RNA, 19 nt, Artificial Sequence
  Description of Artificial Sequence: Synthetic oligonucleotide
cagucugauuaacuagaau

SEQ ID NO: 323238 - RNA, 19 nt, Artificial Sequence
  Description of Artificial Sequence: Synthetic oligonucleotide
ccguugguguuguucauaa

SEQ ID NO: 323239 - RNA, 19 nt, Artificial Sequence
  Description of Artificial Sequence: Synthetic oligonucleotide
cuagcugggugcugcaguu

SEQ ID NO: 323240 - RNA, 19 nt, Artificial Sequence
  Description of Artificial Sequence: Synthetic oligonucleotide
gccuacuaucauugggaaa

SEQ ID NO: 323241 - RNA, 19 nt, Artificial Sequence
  Description of Artificial Sequence: Synthetic oligonucleotide
ggcaguacuuucauagaau

SEQ ID NO: 323242 - RNA, 19 nt, Artificial Sequence
  Description of Artificial Sequence: Synthetic oligonucleotide
gcgaaugguucuguaaacu

SEQ ID NO: 323243 - RNA, 19 nt, Artificial Sequence
  Description of Artificial Sequence: Synthetic oligonucleotide
auggacuagcacagugcuu

SEQ ID NO: 323244 - RNA, 19 nt, Artificial Sequence
  Description of Artificial Sequence: Synthetic oligonucleotide
gcagucugauuaacuagaa

SEQ ID NO: 323245 - RNA, 19 nt, Artificial Sequence
  Description of Artificial Sequence: Synthetic oligonucleotide
acucgacagucacggccuu

SEQ ID NO: 323246 - RNA, 19 nt, Artificial Sequence
  Description of Artificial Sequence: Synthetic oligonucleotide
ggcuacucacuccgagcca

SEQ ID NO: 323247 - RNA, 19 nt, Artificial Sequence
  Description of Artificial Sequence: Synthetic oligonucleotide
gccguugguaugcccguuc

SEQ ID NO: 323248 - RNA, 19 nt, Artificial Sequence
  Description of Artificial Sequence: Synthetic oligonucleotide
gcuugugacccgagcacca

SEQ ID NO: 323249 - RNA, 19 nt, Artificial Sequence
  Description of Artificial Sequence: Synthetic oligonucleotide
aucugagguugggccaaau

SEQ ID NO: 323250 - RNA, 19 nt, Artificial Sequence
  Description of Artificial Sequence: Synthetic oligonucleotide
gugcugguacgaacccuca

SEQ ID NO: 323251 - RNA, 19 nt, Artificial Sequence
  Description of Artificial Sequence: Synthetic oligonucleotide
gucgucgcuggccaccgau

SEQ ID NO: 323252 - RNA, 19 nt, Artificial Sequence
  Description of Artificial Sequence: Synthetic oligonucleotide
cuacauccguugguguugu

SEQ ID NO: 323253 - RNA, 19 nt, Artificial Sequence
  Description of Artificial Sequence: Synthetic oligonucleotide
acgccagcaugugggcagu

SEQ ID NO: 323254 - RNA, 19 nt, Artificial Sequence
  Description of Artificial Sequence: Synthetic oligonucleotide
cggaguuguugagagugug

SEQ ID NO: 323255 - RNA, 19 nt, Artificial Sequence
  Description of Artificial Sequence: Synthetic oligonucleotide
uacauccguugguguuguu

SEQ ID NO: 323256 - RNA, 19 nt, Artificial Sequence
  Description of Artificial Sequence: Synthetic oligonucleotide
cugucucguuuucguuaga

SEQ ID NO: 323257 - RNA, 19 nt, Artificial Sequence
  Description of Artificial Sequence: Synthetic oligonucleotide
cgaagccuauuuucuucuc

SEQ ID NO: 323258 - RNA, 19 nt, Artificial Sequence
  Description of Artificial Sequence: Synthetic oligonucleotide
caguauaagcuggcuugcu

SEQ ID NO: 323259 - RNA, 19 nt, Artificial Sequence
  Description of Artificial Sequence: Synthetic oligonucleotide
ugccguugguaugcccguu

SEQ ID NO: 323260 - RNA, 19 nt, Artificial Sequence
  Description of Artificial Sequence: Synthetic oligonucleotide
cgauggucguguagagcac

SEQ ID NO: 323261 - RNA, 19 nt, Artificial Sequence
  Description of Artificial Sequence: Synthetic oligonucleotide
ccggugccucugcaguagg

SEQ ID NO: 323262 - RNA, 19 nt, Artificial Sequence
  Description of Artificial Sequence: Synthetic oligonucleotide
cagccggcaucccugugcu

SEQ ID NO: 323263 - RNA, 19 nt, Artificial Sequence
  Description of Artificial Sequence: Synthetic oligonucleotide
cccggugccucugcaguag

SEQ ID NO: 323264 - RNA, 19 nt, Artificial Sequence
  Description of Artificial Sequence: Synthetic oligonucleotide
ccguugguaugcccguuca

SEQ ID NO: 323265 - RNA, 19 nt, Artificial Sequence
  Description of Artificial Sequence: Synthetic oligonucleotide
cgaacccucauaauagcau

SEQ ID NO: 323266 - RNA, 19 nt, Artificial Sequence
  Description of Artificial Sequence: Synthetic oligonucleotide
cauuagccaguaggaacau

SEQ ID NO: 323267 - RNA, 19 nt, Artificial Sequence
  Description of Artificial Sequence: Synthetic oligonucleotide
cggugccucugcaguaggc

SEQ ID NO: 323268 - RNA, 19 nt, Artificial Sequence
  Description of Artificial Sequence: Synthetic oligonucleotide
ccuccauagaguccuuuau

SEQ ID NO: 323269 - RNA, 19 nt, Artificial Sequence
  Description of Artificial Sequence: Synthetic oligonucleotide
cguuuucguuagagucagc

SEQ ID NO: 323270 - RNA, 19 nt, Artificial Sequence
  Description of Artificial Sequence: Synthetic oligonucleotide
gagucaccgagcagcuauu

SEQ ID NO: 323271 - RNA, 19 nt, Artificial Sequence
  Description of Artificial Sequence: Synthetic oligonucleotide
cguuagagucagcaaacau

SEQ ID NO: 323272 - RNA, 19 nt, Artificial Sequence
  Description of Artificial Sequence: Synthetic oligonucleotide
cucgcugcuucacgaugau

SEQ ID NO: 323273 - RNA, 19 nt, Artificial Sequence
  Description of Artificial Sequence: Synthetic oligonucleotide
cucgacagucacggccuua

SEQ ID NO: 323274 - RNA, 19 nt, Artificial Sequence
  Description of Artificial Sequence: Synthetic oligonucleotide
gcccguucaucaggggaga

SEQ ID NO: 323275 - RNA, 19 nt, Artificial Sequence
  Description of Artificial Sequence: Synthetic oligonucleotide
agccggcaucccugugcuu

SEQ ID NO: 323276 - RNA, 19 nt, Artificial Sequence
  Description of Artificial Sequence: Synthetic oligonucleotide
cucgggaaucugguccaau

SEQ ID NO: 323277 - RNA, 19 nt, Artificial Sequence
  Description of Artificial Sequence: Synthetic oligonucleotide
cgaauugcagaugucucuu

SEQ ID NO: 323278 - RNA, 19 nt, Artificial Sequence
  Description of Artificial Sequence: Synthetic oligonucleotide
gcacagcgcacuggaucaa

SEQ ID NO: 323279 - RNA, 19 nt, Artificial Sequence
  Description of Artificial Sequence: Synthetic oligonucleotide
cccgagcaccaaagcugaa

SEQ ID NO: 323280 - RNA, 19 nt, Artificial Sequence
  Description of Artificial Sequence: Synthetic oligonucleotide
ccggcaucccugugcuuuu

SEQ ID NO: 323281 - RNA, 19 nt, Artificial Sequence
  Description of Artificial Sequence: Synthetic oligonucleotide
cggccuuaucgcagucgau

SEQ ID NO: 323282 - RNA, 19 nt, Artificial Sequence
  Description of Artificial Sequence: Synthetic oligonucleotide
ucuagcugaauuauggugg

SEQ ID NO: 323283 - RNA, 19 nt, Artificial Sequence
  Description of Artificial Sequence: Synthetic oligonucleotide
aauggugccaggcugggcc

SEQ ID NO: 323284 - RNA, 19 nt, Artificial Sequence
  Description of Artificial Sequence: Synthetic oligonucleotide
auucguacacgcuucagcc

SEQ ID NO: 323285 - RNA, 19 nt, Artificial Sequence
  Description of Artificial Sequence: Synthetic oligonucleotide
aaguaguaucuguagcucc

SEQ ID NO: 323286 - RNA, 19 nt, Artificial Sequence
  Description of Artificial Sequence: Synthetic oligonucleotide
agugacauguacaauauac

SEQ ID NO: 323287 - RNA, 19 nt, Artificial Sequence
  Description of Artificial Sequence: Synthetic oligonucleotide
auucuucgcagauucagcc

SEQ ID NO: 323288 - RNA, 19 nt, Artificial Sequence
  Description of Artificial Sequence: Synthetic oligonucleotide
acucaguaggaccagaggg

SEQ ID NO: 323289 - RNA, 19 nt, Artificial Sequence
  Description of Artificial Sequence: Synthetic oligonucleotide
aauuaugguggacauggug

SEQ ID NO: 323290 - RNA, 19 nt, Artificial Sequence
  Description of Artificial Sequence: Synthetic oligonucleotide
uguacaauauacagaggcc

SEQ ID NO: 323291 - RNA, 19 nt, Artificial Sequence
  Description of Artificial Sequence: Synthetic oligonucleotide
uuacgaauccuguaugggg

SEQ ID NO: 323292 - RNA, 19 nt, Artificial Sequence
  Description of Artificial Sequence: Synthetic oligonucleotide
auuaugguggacauggugg

SEQ ID NO: 323293 - RNA, 19 nt, Artificial Sequence
  Description of Artificial Sequence: Synthetic oligonucleotide
auaguagggguugacaggc

SEQ ID NO: 323294 - RNA, 19 nt, Artificial Sequence
  Description of Artificial Sequence: Synthetic oligonucleotide
aaaguaguaucuguagcuc

SEQ ID NO: 323295 - RNA, 19 nt, Artificial Sequence
  Description of Artificial Sequence: Synthetic oligonucleotide
acuuagaagggaccagacc

SEQ ID NO: 323296 - RNA, 19 nt, Artificial Sequence
  Description of Artificial Sequence: Synthetic oligonucleotide
ucaaccccaacuuaggaac

SEQ ID NO: 323297 - RNA, 19 nt, Artificial Sequence
  Description of Artificial Sequence: Synthetic oligonucleotide
agaaauaguaggccacaac

SEQ ID NO: 323298 - RNA, 19 nt, Artificial Sequence
  Description of Artificial Sequence: Synthetic oligonucleotide
agaguuucggagcugagca

SEQ ID NO: 323299 - RNA, 19 nt, Artificial Sequence
  Description of Artificial Sequence: Synthetic oligonucleotide
uguacccuggguauguugc

SEQ ID NO: 323300 - RNA, 19 nt, Artificial Sequence
  Description of Artificial Sequence: Synthetic oligonucleotide
auagccagaguugacauag

SEQ ID NO: 323301 - RNA, 19 nt, Artificial Sequence
  Description of Artificial Sequence: Synthetic oligonucleotide
gacaagacugcucacuggc

SEQ ID NO: 323302 - RNA, 19 nt, Artificial Sequence
  Description of Artificial Sequence: Synthetic oligonucleotide
uuauuauccaaguaccuuu

SEQ ID NO: 323303 - RNA, 19 nt, Artificial Sequence
  Description of Artificial Sequence: Synthetic oligonucleotide
ucuuaaaguaguaucugua

SEQ ID NO: 323304 - RNA, 19 nt, Artificial Sequence
  Description of Artificial Sequence: Synthetic oligonucleotide
ucggagaguuccaaguccg

SEQ ID NO: 323305 - RNA, 19 nt, Artificial Sequence
  Description of Artificial Sequence: Synthetic oligonucleotide
aagacugccucguccuccc

SEQ ID NO: 323306 - RNA, 19 nt, Artificial Sequence
  Description of Artificial Sequence: Synthetic oligonucleotide
aauaagcucuucagcaaac

SEQ ID NO: 323307 - RNA, 19 nt, Artificial Sequence
  Description of Artificial Sequence: Synthetic oligonucleotide
gagcuugugacacacaauc

SEQ ID NO: 323308 - RNA, 19 nt, Artificial Sequence
  Description of Artificial Sequence: Synthetic oligonucleotide
aguaccuuugaaaagauaa

SEQ ID NO: 323309 - RNA, 19 nt, Artificial Sequence
  Description of Artificial Sequence: Synthetic oligonucleotide
uguacaagucaucgcauga

SEQ ID NO: 323310 - RNA, 19 nt, Artificial Sequence
  Description of Artificial Sequence: Synthetic oligonucleotide
ccagaguugacauaguagg

SEQ ID NO: 323311 - RNA, 19 nt, Artificial Sequence
  Description of Artificial Sequence: Synthetic oligonucleotide
cuugugacuugucaugggg

SEQ ID NO: 323312 - RNA, 19 nt, Artificial Sequence
  Description of Artificial Sequence: Synthetic oligonucleotide
augcccggagguuacaccc

SEQ ID NO: 323313 - RNA, 19 nt, Artificial Sequence
  Description of Artificial Sequence: Synthetic oligonucleotide
aguaguaucuguagcuccc

SEQ ID NO: 323314 - RNA, 19 nt, Artificial Sequence
  Description of Artificial Sequence: Synthetic oligonucleotide
ugcacuagcuuuaccacca

SEQ ID NO: 323315 - RNA, 19 nt, Artificial Sequence
  Description of Artificial Sequence: Synthetic oligonucleotide
aaagguaucccugggucag

SEQ ID NO: 323316 - RNA, 19 nt, Artificial Sequence
  Description of Artificial Sequence: Synthetic oligonucleotide
uucuuaaaguaguaucugu

SEQ ID NO: 323317 - RNA, 19 nt, Artificial Sequence
  Description of Artificial Sequence: Synthetic oligonucleotide
uccccacagaaauaguagg

SEQ ID NO: 323318 - RNA, 19 nt, Artificial Sequence
  Description of Artificial Sequence: Synthetic oligonucleotide
gacugcacuuuagugaugg

SEQ ID NO: 323319 - RNA, 19 nt, Artificial Sequence
  Description of Artificial Sequence: Synthetic oligonucleotide
acauaccucugcuuggagg

SEQ ID NO: 323320 - RNA, 19 nt, Artificial Sequence
  Description of Artificial Sequence: Synthetic oligonucleotide
uuagaagggaccagacccc

SEQ ID NO: 323321 - RNA, 19 nt, Artificial Sequence
  Description of Artificial Sequence: Synthetic oligonucleotide
uucucgagugcgcugaaca

SEQ ID NO: 323322 - RNA, 19 nt, Artificial Sequence
  Description of Artificial Sequence: Synthetic oligonucleotide
uaauuguacaagucaucgc

SEQ ID NO: 323323 - RNA, 19 nt, Artificial Sequence
  Description of Artificial Sequence: Synthetic oligonucleotide
agugcgaggaaugugaggu

SEQ ID NO: 323324 - RNA, 19 nt, Artificial Sequence
  Description of Artificial Sequence: Synthetic oligonucleotide
gaaucaagcugguggcugg

SEQ ID NO: 323325 - RNA, 19 nt, Artificial Sequence
  Description of Artificial Sequence: Synthetic oligonucleotide
guugagggucaugagaugg

SEQ ID NO: 323326 - RNA, 19 nt, Artificial Sequence
  Description of Artificial Sequence: Synthetic oligonucleotide
cacacuacuguccguaagg

SEQ ID NO: 323327 - RNA, 19 nt, Artificial Sequence
  Description of Artificial Sequence: Synthetic oligonucleotide
aagauccauaccugagcuc

SEQ ID NO: 323328 - RNA, 19 nt, Artificial Sequence
  Description of Artificial Sequence: Synthetic oligonucleotide
ugauuuugucucugucucg

SEQ ID NO: 323329 - RNA, 19 nt, Artificial Sequence
  Description of Artificial Sequence: Synthetic oligonucleotide
aguaggaccagagggacag

SEQ ID NO: 323330 - RNA, 19 nt, Artificial Sequence
  Description of Artificial Sequence: Synthetic oligonucleotide
aaugugagguagaggcacc

SEQ ID NO: 323331 - RNA, 19 nt, Artificial Sequence
  Description of Artificial Sequence: Synthetic oligonucleotide
guaaagguaucccuggguc

SEQ ID NO: 323332 - RNA, 19 nt, Artificial Sequence
  Description of Artificial Sequence: Synthetic oligonucleotide
acgcucaauggacaagggc

SEQ ID NO: 323333 - RNA, 19 nt, Artificial Sequence
  Description of Artificial Sequence: Synthetic oligonucleotide
ugaauaagcucuucagcaa

SEQ ID NO: 323334 - RNA, 19 nt, Artificial Sequence
  Description of Artificial Sequence: Synthetic oligonucleotide
ugucauggggccagaaggc

SEQ ID NO: 323335 - RNA, 19 nt, Artificial Sequence
  Description of Artificial Sequence: Synthetic oligonucleotide
uccuccaagcgccugcggg

SEQ ID NO: 323336 - RNA, 19 nt, Artificial Sequence
  Description of Artificial Sequence: Synthetic oligonucleotide
aagugcgaggaaugugagg

SEQ ID NO: 323337 - RNA, 19 nt, Artificial Sequence
  Description of Artificial Sequence: Synthetic oligonucleotide
uucuagccggugaauaagc

SEQ ID NO: 323338 - RNA, 19 nt, Artificial Sequence
  Description of Artificial Sequence: Synthetic oligonucleotide
uaaagguaucccuggguca

SEQ ID NO: 323339 - RNA, 19 nt, Artificial Sequence
  Description of Artificial Sequence: Synthetic oligonucleotide
aaaggggccugaguuacuc

SEQ ID NO: 323340 - RNA, 19 nt, Artificial Sequence
  Description of Artificial Sequence: Synthetic oligonucleotide
aguccgacacggcugguac

SEQ ID NO: 323341 - RNA, 19 nt, Artificial Sequence
  Description of Artificial Sequence: Synthetic oligonucleotide
uguauccagcuucaacccc

SEQ ID NO: 323342 - RNA, 19 nt, Artificial Sequence
  Description of Artificial Sequence: Synthetic oligonucleotide
agauccauaccugagcucu

SEQ ID NO: 323343 - RNA, 19 nt, Artificial Sequence
  Description of Artificial Sequence: Synthetic oligonucleotide
acaggugcguccccgcugc

SEQ ID NO: 323344 - RNA, 19 nt, Artificial Sequence
  Description of Artificial Sequence: Synthetic oligonucleotide
uggcauucuucgcagauuc

SEQ ID NO: 323345 - RNA, 19 nt, Artificial Sequence
  Description of Artificial Sequence: Synthetic oligonucleotide
cuuacgaauccuguauggg

SEQ ID NO: 323346 - RNA, 19 nt, Artificial Sequence
  Description of Artificial Sequence: Synthetic oligonucleotide
agauucagccuucuuggug

SEQ ID NO: 323347 - RNA, 19 nt, Artificial Sequence
  Description of Artificial Sequence: Synthetic oligonucleotide
aaauaguaggccacaacaa

SEQ ID NO: 323348 - RNA, 19 nt, Artificial Sequence
  Description of Artificial Sequence: Synthetic oligonucleotide
aauagggcucaggguaccc

SEQ ID NO: 323349 - RNA, 19 nt, Artificial Sequence
  Description of Artificial Sequence: Synthetic oligonucleotide
uucguacacgcuucagccg

SEQ ID NO: 323350 - RNA, 19 nt, Artificial Sequence
  Description of Artificial Sequence: Synthetic oligonucleotide
cacagaaauaguaggccac

SEQ ID NO: 323351 - RNA, 19 nt, Artificial Sequence
  Description of Artificial Sequence: Synthetic oligonucleotide
cuguccguaagggauaggg

SEQ ID NO: 323352 - RNA, 19 nt, Artificial Sequence
  Description of Artificial Sequence: Synthetic oligonucleotide
agcgugacagcacggcccc

SEQ ID NO: 323353 - RNA, 19 nt, Artificial Sequence
  Description of Artificial Sequence: Synthetic oligonucleotide
cauucuucgcagauucagc

SEQ ID NO: 323354 - RNA, 19 nt, Artificial Sequence
  Description of Artificial Sequence: Synthetic oligonucleotide
cuguauccagcuucaaccc

SEQ ID NO: 323355 - RNA, 19 nt, Artificial Sequence
  Description of Artificial Sequence: Synthetic oligonucleotide
ucgagugcgcugaacagcu

SEQ ID NO: 323356 - RNA, 19 nt, Artificial Sequence
  Description of Artificial Sequence: Synthetic oligonucleotide
aauagcugcggggcuuggc

SEQ ID NO: 323357 - RNA, 19 nt, Artificial Sequence
  Description of Artificial Sequence: Synthetic oligonucleotide
ucgucacucacuuucuuaa

SEQ ID NO: 323358 - RNA, 19 nt, Artificial Sequence
  Description of Artificial Sequence: Synthetic oligonucleotide
uggcucaugguauugcuuc

SEQ ID NO: 323359 - RNA, 19 nt, Artificial Sequence
  Description of Artificial Sequence: Synthetic oligonucleotide
acuacuguccguaagggau

SEQ ID NO: 323360 - RNA, 19 nt, Artificial Sequence
  Description of Artificial Sequence: Synthetic oligonucleotide
cagagguauggcaaacacc

SEQ ID NO: 323361 - RNA, 19 nt, Artificial Sequence
  Description of Artificial Sequence: Synthetic oligonucleotide
auuauuauccaaguaccuu

SEQ ID NO: 323362 - RNA, 19 nt, Artificial Sequence
  Description of Artificial Sequence: Synthetic oligonucleotide
ugggaucuuggaugaaaag

SEQ ID NO: 323363 - RNA, 19 nt, Artificial Sequence
  Description of Artificial Sequence: Synthetic oligonucleotide
cucggagaguuccaagucc

SEQ ID NO: 323364 - RNA, 19 nt, Artificial Sequence
  Description of Artificial Sequence: Synthetic oligonucleotide
guaagugcgaggaauguga

SEQ ID NO: 323365 - RNA, 19 nt, Artificial Sequence
  Description of Artificial Sequence: Synthetic oligonucleotide
cugcacauaccucugcuug

SEQ ID NO: 323366 - RNA, 19 nt, Artificial Sequence
  Description of Artificial Sequence: Synthetic oligonucleotide
ucucgagugcgcugaacag

SEQ ID NO: 323367 - RNA, 19 nt, Artificial Sequence
  Description of Artificial Sequence: Synthetic oligonucleotide
gagaguuccaaguccgaca

SEQ ID NO: 323368 - RNA, 19 nt, Artificial Sequence
  Description of Artificial Sequence: Synthetic oligonucleotide
uaccuuugaaaagauaauu

SEQ ID NO: 323369 - RNA, 19 nt, Artificial Sequence
  Description of Artificial Sequence: Synthetic oligonucleotide
ucuucgcagauucagccuu

SEQ ID NO: 323370 - RNA, 19 nt, Artificial Sequence
  Description of Artificial Sequence: Synthetic oligonucleotide
ucuuccauucguacacgcu

SEQ ID NO: 323371 - RNA, 19 nt, Artificial Sequence
  Description of Artificial Sequence: Synthetic oligonucleotide
ugcgcugaacagcuucuag

SEQ ID NO: 323372 - RNA, 19 nt, Artificial Sequence
  Description of Artificial Sequence: Synthetic oligonucleotide
caaucuugugcuguugccc

SEQ ID NO: 323373 - RNA, 19 nt, Artificial Sequence
  Description of Artificial Sequence: Synthetic oligonucleotide
agcuugugacuugucaugg

SEQ ID NO: 323374 - RNA, 19 nt, Artificial Sequence
  Description of Artificial Sequence: Synthetic oligonucleotide
caugagauggcucauggua

SEQ ID NO: 323375 - RNA, 19 nt, Artificial Sequence
  Description of Artificial Sequence: Synthetic oligonucleotide
gcuuacgaauccuguaugg

SEQ ID NO: 323376 - RNA, 19 nt, Artificial Sequence
  Description of Artificial Sequence: Synthetic oligonucleotide
ucuagccggugaauaagcu

SEQ ID NO: 323377 - RNA, 19 nt, Artificial Sequence
  Description of Artificial Sequence: Synthetic oligonucleotide
cauacuccacauagcgggg

SEQ ID NO: 323378 - RNA, 19 nt, Artificial Sequence
  Description of Artificial Sequence: Synthetic oligonucleotide
guaucccugggucagucug

SEQ ID NO: 323379 - RNA, 19 nt, Artificial Sequence
  Description of Artificial Sequence: Synthetic oligonucleotide
uacucagccgccacacuca

SEQ ID NO: 323380 - RNA, 19 nt, Artificial Sequence
  Description of Artificial Sequence: Synthetic oligonucleotide
gcuacaugcccacugucgg

SEQ ID NO: 323381 - RNA, 19 nt, Artificial Sequence
  Description of Artificial Sequence: Synthetic oligonucleotide
ucucggagaguuccaaguc

SEQ ID NO: 323382 - RNA, 19 nt, Artificial Sequence
  Description of Artificial Sequence: Synthetic oligonucleotide
ugacugccugcacauaccu

SEQ ID NO: 323383 - RNA, 19 nt, Artificial Sequence
  Description of Artificial Sequence: Synthetic oligonucleotide
auagcggggugggaaaugg

SEQ ID NO: 323384 - RNA, 19 nt, Artificial Sequence
  Description of Artificial Sequence: Synthetic oligonucleotide
acacuacuguccguaaggg

SEQ ID NO: 323385 - RNA, 19 nt, Artificial Sequence
  Description of Artificial Sequence: Synthetic oligonucleotide
ccugaacccaaccaggugc

SEQ ID NO: 323386 - RNA, 19 nt, Artificial Sequence
  Description of Artificial Sequence: Synthetic oligonucleotide
ugaguuacucagccgccac

SEQ ID NO: 323387 - RNA, 19 nt, Artificial Sequence
  Description of Artificial Sequence: Synthetic oligonucleotide
aaauggugccaggcugggc

SEQ ID NO: 323388 - RNA, 19 nt, Artificial Sequence
  Description of Artificial Sequence: Synthetic oligonucleotide
uguccguaagggauagggu

SEQ ID NO: 323389 - RNA, 19 nt, Artificial Sequence
  Description of Artificial Sequence: Synthetic oligonucleotide
guccucaugacccuuugca

SEQ ID NO: 323390 - RNA, 19 nt, Artificial Sequence
  Description of Artificial Sequence: Synthetic oligonucleotide
ugucauuggcgcugguggc

SEQ ID NO: 323391 - RNA, 19 nt, Artificial Sequence
  Description of Artificial Sequence: Synthetic oligonucleotide
ugcugcuuacgaauccugu

SEQ ID NO: 323392 - RNA, 19 nt, Artificial Sequence
  Description of Artificial Sequence: Synthetic oligonucleotide
cacucaguaggaccagagg

SEQ ID NO: 323393 - RNA, 19 nt, Artificial Sequence
  Description of Artificial Sequence: Synthetic oligonucleotide
uucuucgcagauucagccu

SEQ ID NO: 323394 - RNA, 19 nt, Artificial Sequence
  Description of Artificial Sequence: Synthetic oligonucleotide
cuacaugcccacugucggg

SEQ ID NO: 323395 - RNA, 19 nt, Artificial Sequence
  Description of Artificial Sequence: Synthetic oligonucleotide
gugccuaugguggugcagg

SEQ ID NO: 323396 - RNA, 19 nt, Artificial Sequence
  Description of Artificial Sequence: Synthetic oligonucleotide
cuucuagccggugaauaag

SEQ ID NO: 323397 - RNA, 19 nt, Artificial Sequence
  Description of Artificial Sequence: Synthetic oligonucleotide
aguuucggagcugagcacu

SEQ ID NO: 323398 - RNA, 19 nt, Artificial Sequence
  Description of Artificial Sequence: Synthetic oligonucleotide
aguccggagcagcccauac

SEQ ID NO: 323399 - RNA, 19 nt, Artificial Sequence
  Description of Artificial Sequence: Synthetic oligonucleotide
gugcacuagcuuuaccacc

SEQ ID NO: 323400 - RNA, 19 nt, Artificial Sequence
  Description of Artificial Sequence: Synthetic oligonucleotide
ugucugcugaucuccuucu

SEQ ID NO: 323401 - RNA, 19 nt, Artificial Sequence
  Description of Artificial Sequence: Synthetic oligonucleotide
cagcgugacagcacggccc

SEQ ID NO: 323402 - RNA, 19 nt, Artificial Sequence
  Description of Artificial Sequence: Synthetic oligonucleotide
cacuuagaagggaccagac

SEQ ID NO: 323403 - RNA, 19 nt, Artificial Sequence
  Description of Artificial Sequence: Synthetic oligonucleotide
cugcacuuuagugauggug

SEQ ID NO: 323404 - RNA, 19 nt, Artificial Sequence
  Description of Artificial Sequence: Synthetic oligonucleotide
gguacuggguaccucagca

SEQ ID NO: 323405 - RNA, 19 nt, Artificial Sequence
  Description of Artificial Sequence: Synthetic oligonucleotide
uucggagcugagcacugac

SEQ ID NO: 323406 - RNA, 19 nt, Artificial Sequence
  Description of Artificial Sequence: Synthetic oligonucleotide
ccuggccugagaaauauac

SEQ ID NO: 323407 - RNA, 19 nt, Artificial Sequence
  Description of Artificial Sequence: Synthetic oligonucleotide
acuuggacacucucuugca

SEQ ID NO: 323408 - RNA, 19 nt, Artificial Sequence
  Description of Artificial Sequence: Synthetic oligonucleotide
aagacaggcaagacugccu

SEQ ID NO: 323409 - RNA, 19 nt, Artificial Sequence
  Description of Artificial Sequence: Synthetic oligonucleotide
ugacacaggugcguccccg

SEQ ID NO: 323410 - RNA, 19 nt, Artificial Sequence
  Description of Artificial Sequence: Synthetic oligonucleotide
augauccacugcaugaucu

SEQ ID NO: 323411 - RNA, 19 nt, Artificial Sequence
  Description of Artificial Sequence: Synthetic oligonucleotide
gacauaguagggguugaca

SEQ ID NO: 323412 - RNA, 19 nt, Artificial Sequence
  Description of Artificial Sequence: Synthetic oligonucleotide
ggacgcucaauggacaagg

SEQ ID NO: 323413 - RNA, 19 nt, Artificial Sequence
  Description of Artificial Sequence: Synthetic oligonucleotide
uccucaugagcaucccgca

SEQ ID NO: 323414 - RNA, 19 nt, Artificial Sequence
  Description of Artificial Sequence: Synthetic oligonucleotide
augcucauccagaaugcuc

SEQ ID NO: 323415 - RNA, 19 nt, Artificial Sequence
  Description of Artificial Sequence: Synthetic oligonucleotide
uggcauucgguaagugcga

SEQ ID NO: 323416 - RNA, 19 nt, Artificial Sequence
  Description of Artificial Sequence: Synthetic oligonucleotide
auaccugagcucucugccu

SEQ ID NO: 323417 - RNA, 19 nt, Artificial Sequence
  Description of Artificial Sequence: Synthetic oligonucleotide
cucacccucaaugauccac

SEQ ID NO: 323418 - RNA, 19 nt, Artificial Sequence
  Description of Artificial Sequence: Synthetic oligonucleotide
acucagccgccacacucac

SEQ ID NO: 323419 - RNA, 19 nt, Artificial Sequence
  Description of Artificial Sequence: Synthetic oligonucleotide
ugguacuggguaccucagc

SEQ ID NO: 323420 - RNA, 19 nt, Artificial Sequence
  Description of Artificial Sequence: Synthetic oligonucleotide
uacuguccguaagggauag

SEQ ID NO: 323421 - RNA, 19 nt, Artificial Sequence
  Description of Artificial Sequence: Synthetic oligonucleotide
cucgagugcgcugaacagc

SEQ ID NO: 323422 - RNA, 19 nt, Artificial Sequence
  Description of Artificial Sequence: Synthetic oligonucleotide
ccaagauccauaccugagc

SEQ ID NO: 323423 - RNA, 19 nt, Artificial Sequence
  Description of Artificial Sequence: Synthetic oligonucleotide
ucccguacuucuucaaaua

SEQ ID NO: 323424 - RNA, 19 nt, Artificial Sequence
  Description of Artificial Sequence: Synthetic oligonucleotide
caugcccggagguuacacc

SEQ ID NO: 323425 - RNA, 19 nt, Artificial Sequence
  Description of Artificial Sequence: Synthetic oligonucleotide
gggaucuuggaugaaaaga

SEQ ID NO: 323426 - RNA, 19 nt, Artificial Sequence
  Description of Artificial Sequence: Synthetic oligonucleotide
gaugguguacccuggguau

SEQ ID NO: 323427 - RNA, 19 nt, Artificial Sequence
  Description of Artificial Sequence: Synthetic oligonucleotide
uugggucuagcugaauuau

SEQ ID NO: 323428 - RNA, 19 nt, Artificial Sequence
  Description of Artificial Sequence: Synthetic oligonucleotide
gaggcacccgcccauugac

SEQ ID NO: 323429 - RNA, 19 nt, Artificial Sequence
  Description of Artificial Sequence: Synthetic oligonucleotide
ugguucuacccggaucucc

SEQ ID NO: 323430 - RNA, 19 nt, Artificial Sequence
  Description of Artificial Sequence: Synthetic oligonucleotide
cauuauuauccaaguaccu

SEQ ID NO: 323431 - RNA, 19 nt, Artificial Sequence
  Description of Artificial Sequence: Synthetic oligonucleotide
ucggugcugcuuacgaauc

SEQ ID NO: 323432 - RNA, 19 nt, Artificial Sequence
  Description of Artificial Sequence: Synthetic oligonucleotide
ggacaagacugcucacugg

SEQ ID NO: 323433 - RNA, 19 nt, Artificial Sequence
  Description of Artificial Sequence: Synthetic oligonucleotide
gacgcucaauggacaaggg

SEQ ID NO: 323434 - RNA, 19 nt, Artificial Sequence
  Description of Artificial Sequence: Synthetic oligonucleotide
guauguugcccagugcuca

SEQ ID NO: 323435 - RNA, 19 nt, Artificial Sequence
  Description of Artificial Sequence: Synthetic oligonucleotide
augagauggcucaugguau

SEQ ID NO: 323436 - RNA, 19 nt, Artificial Sequence
  Description of Artificial Sequence: Synthetic oligonucleotide
auagggugucagcaucacu

SEQ ID NO: 323437 - RNA, 19 nt, Artificial Sequence
  Description of Artificial Sequence: Synthetic oligonucleotide
guauccagcuucaacccca

SEQ ID NO: 323438 - RNA, 19 nt, Artificial Sequence
  Description of Artificial Sequence: Synthetic oligonucleotide
gaguuucggagcugagcac

SEQ ID NO: 323439 - RNA, 19 nt, Artificial Sequence
  Description of Artificial Sequence: Synthetic oligonucleotide
cuaugguggugcaggccag

SEQ ID NO: 323440 - RNA, 19 nt, Artificial Sequence
  Description of Artificial Sequence: Synthetic oligonucleotide
gccagaguugacauaguag

SEQ ID NO: 323441 - RNA, 19 nt, Artificial Sequence
  Description of Artificial Sequence: Synthetic oligonucleotide
cuacccggaucuccuuugg

SEQ ID NO: 323442 - RNA, 19 nt, Artificial Sequence
  Description of Artificial Sequence: Synthetic oligonucleotide
gacacaggugcguccccgc

SEQ ID NO: 323443 - RNA, 19 nt, Artificial Sequence
  Description of Artificial Sequence: Synthetic oligonucleotide
agccagaguugacauagua

SEQ ID NO: 323444 - RNA, 19 nt, Artificial Sequence
  Description of Artificial Sequence: Synthetic oligonucleotide
gacgugccuaugguggugc

SEQ ID NO: 323445 - RNA, 19 nt, Artificial Sequence
  Description of Artificial Sequence: Synthetic oligonucleotide
agucuuggcuacaugccca

SEQ ID NO: 323446 - RNA, 19 nt, Artificial Sequence
  Description of Artificial Sequence: Synthetic oligonucleotide
ccccaacuuaggaacaugc

SEQ ID NO: 323447 - RNA, 19 nt, Artificial Sequence
  Description of Artificial Sequence: Synthetic oligonucleotide
aaucaagcugguggcugga

SEQ ID NO: 323448 - RNA, 19 nt, Artificial Sequence
  Description of Artificial Sequence: Synthetic oligonucleotide
ggucagucugcauucagaa

SEQ ID NO: 323449 - RNA, 19 nt, Artificial Sequence
  Description of Artificial Sequence: Synthetic oligonucleotide
cacuuuagugaugguguac

SEQ ID NO: 323450 - RNA, 19 nt, Artificial Sequence
  Description of Artificial Sequence: Synthetic oligonucleotide
uucuacccggaucuccuuu

SEQ ID NO: 323451 - RNA, 19 nt, Artificial Sequence
  Description of Artificial Sequence: Synthetic oligonucleotide
ccccacagaaauaguaggc

SEQ ID NO: 323452 - RNA, 19 nt, Artificial Sequence
  Description of Artificial Sequence: Synthetic oligonucleotide
guacccuggguauguugcc

SEQ ID NO: 323453 - RNA, 19 nt, Artificial Sequence
  Description of Artificial Sequence: Synthetic oligonucleotide
gcgcugaacagcuucuagc

SEQ ID NO: 323454 - RNA, 19 nt, Artificial Sequence
  Description of Artificial Sequence: Synthetic oligonucleotide
gggccugaguuacucagcc

SEQ ID NO: 323455 - RNA, 19 nt, Artificial Sequence
  Description of Artificial Sequence: Synthetic oligonucleotide
cccacagaaauaguaggcc

SEQ ID NO: 323456 - RNA, 19 nt, Artificial Sequence
  Description of Artificial Sequence: Synthetic oligonucleotide
gguaagugcgaggaaugug

SEQ ID NO: 323457 - RNA, 19 nt, Artificial Sequence
  Description of Artificial Sequence: Synthetic oligonucleotide
uggcaugcccauguguuuc

SEQ ID NO: 323458 - RNA, 19 nt, Artificial Sequence
  Description of Artificial Sequence: Synthetic oligonucleotide
uuccuccaagcgccugcgg

SEQ ID NO: 323459 - RNA, 19 nt, Artificial Sequence
  Description of Artificial Sequence: Synthetic oligonucleotide
gcuugugacuugucauggg

SEQ ID NO: 323460 - RNA, 19 nt, Artificial Sequence
  Description of Artificial Sequence: Synthetic oligonucleotide
uggguaccucagcacuggc

SEQ ID NO: 323461 - RNA, 19 nt, Artificial Sequence
  Description of Artificial Sequence: Synthetic oligonucleotide
acccuggguauguugccca

SEQ ID NO: 323462 - RNA, 19 nt, Artificial Sequence
  Description of Artificial Sequence: Synthetic oligonucleotide
ccaaguccgacacggcugg

SEQ ID NO: 323463 - RNA, 19 nt, Artificial Sequence
  Description of Artificial Sequence: Synthetic oligonucleotide
ugccucguccucccguacu

SEQ ID NO: 323464 - RNA, 19 nt, Artificial Sequence
  Description of Artificial Sequence: Synthetic oligonucleotide
gucucggagaguuccaagu

SEQ ID NO: 323465 - RNA, 19 nt, Artificial Sequence
  Description of Artificial Sequence: Synthetic oligonucleotide
cacccgcccauugacuugg

SEQ ID NO: 323466 - RNA, 19 nt, Artificial Sequence
  Description of Artificial Sequence: Synthetic oligonucleotide
acacugggauaaaagucca

SEQ ID NO: 323467 - RNA, 19 nt, Artificial Sequence
  Description of Artificial Sequence: Synthetic oligonucleotide
uaguagggguugacaggcu

SEQ ID NO: 323468 - RNA, 19 nt, Artificial Sequence
  Description of Artificial Sequence: Synthetic oligonucleotide
caccggugcacaugcuggc

SEQ ID NO: 323469 - RNA, 19 nt, Artificial Sequence
  Description of Artificial Sequence: Synthetic oligonucleotide
ccauaccugagcucucugc

SEQ ID NO: 323470 - RNA, 19 nt, Artificial Sequence
  Description of Artificial Sequence: Synthetic oligonucleotide
ggguauguugcccagugcu

SEQ ID NO: 323471 - RNA, 19 nt, Artificial Sequence
  Description of Artificial Sequence: Synthetic oligonucleotide
ugucgggagagcgguggcc

SEQ ID NO: 323472 - RNA, 19 nt, Artificial Sequence
  Description of Artificial Sequence: Synthetic oligonucleotide
cuuggcaugcccauguguu

SEQ ID NO: 323473 - RNA, 19 nt, Artificial Sequence
  Description of Artificial Sequence: Synthetic oligonucleotide
uagcuccccuucuugguua

SEQ ID NO: 323474 - RNA, 19 nt, Artificial Sequence
  Description of Artificial Sequence: Synthetic oligonucleotide
uugugcuguugcccacaug

SEQ ID NO: 323475 - RNA, 19 nt, Artificial Sequence
  Description of Artificial Sequence: Synthetic oligonucleotide
gggauagggugucagcauc

SEQ ID NO: 323476 - RNA, 19 nt, Artificial Sequence
  Description of Artificial Sequence: Synthetic oligonucleotide
aggacgcucaauggacaag

SEQ ID NO: 323477 - RNA, 19 nt, Artificial Sequence
  Description of Artificial Sequence: Synthetic oligonucleotide
auacuccacauagcggggu

SEQ ID NO: 323478 - RNA, 19 nt, Artificial Sequence
  Description of Artificial Sequence: Synthetic oligonucleotide
cacuacuguccguaaggga

SEQ ID NO: 323479 - RNA, 19 nt, Artificial Sequence
  Description of Artificial Sequence: Synthetic oligonucleotide
cccguacuucuucaaauac

SEQ ID NO: 323480 - RNA, 19 nt, Artificial Sequence
  Description of Artificial Sequence: Synthetic oligonucleotide
cacccucaaugauccacug

SEQ ID NO: 323481 - RNA, 19 nt, Artificial Sequence
  Description of Artificial Sequence: Synthetic oligonucleotide
uucccaugcccggagguua

SEQ ID NO: 323482 - RNA, 19 nt, Artificial Sequence
  Description of Artificial Sequence: Synthetic oligonucleotide
gaggacaagacugcucacu

SEQ ID NO: 323483 - RNA, 19 nt, Artificial Sequence
  Description of Artificial Sequence: Synthetic oligonucleotide
uucgcagauucagccuucu

SEQ ID NO: 323484 - RNA, 19 nt, Artificial Sequence
  Description of Artificial Sequence: Synthetic oligonucleotide
uuucggagcugagcacuga

SEQ ID NO: 323485 - RNA, 19 nt, Artificial Sequence
  Description of Artificial Sequence: Synthetic oligonucleotide
cuuccauucguacacgcuu

SEQ ID NO: 323486 - RNA, 19 nt, Artificial Sequence
  Description of Artificial Sequence: Synthetic oligonucleotide
ggugcguccccgcugcaug

SEQ ID NO: 323487 - RNA, 19 nt, Artificial Sequence
  Description of Artificial Sequence: Synthetic oligonucleotide
ccuccaagauccauaccug

SEQ ID NO: 323488 - RNA, 19 nt, Artificial Sequence
  Description of Artificial Sequence: Synthetic oligonucleotide
agcuucuagccggugaaua

SEQ ID NO: 323489 - RNA, 19 nt, Artificial Sequence
  Description of Artificial Sequence: Synthetic oligonucleotide
uagccagaguugacauagu

SEQ ID NO: 323490 - RNA, 19 nt, Artificial Sequence
  Description of Artificial Sequence: Synthetic oligonucleotide
ccacucaguaggaccagag

SEQ ID NO: 323491 - RNA, 19 nt, Artificial Sequence
  Description of Artificial Sequence: Synthetic oligonucleotide
acugcacuuuagugauggu

SEQ ID NO: 323492 - RNA, 19 nt, Artificial Sequence
  Description of Artificial Sequence: Synthetic oligonucleotide
cacaacaaugcugucacau

SEQ ID NO: 323493 - RNA, 19 nt, Artificial Sequence
  Description of Artificial Sequence: Synthetic oligonucleotide
acaagacugcucacuggcu

SEQ ID NO: 323494 - RNA, 19 nt, Artificial Sequence
  Description of Artificial Sequence: Synthetic oligonucleotide
ggauaaaaguccagguaaa

SEQ ID NO: 323495 - RNA, 19 nt, Artificial Sequence
  Description of Artificial Sequence: Synthetic oligonucleotide
cauagcggggugggaaaug

SEQ ID NO: 323496 - RNA, 19 nt, Artificial Sequence
  Description of Artificial Sequence: Synthetic oligonucleotide
ggccugaguuacucagccg

SEQ ID NO: 323497 - RNA, 19 nt, Artificial Sequence
  Description of Artificial Sequence: Synthetic oligonucleotide
agacaggcaaaggggccug

SEQ ID NO: 323498 - RNA, 19 nt, Artificial Sequence
  Description of Artificial Sequence: Synthetic oligonucleotide
aagguaucccugggucagu

SEQ ID NO: 323499 - RNA, 19 nt, Artificial Sequence
  Description of Artificial Sequence: Synthetic oligonucleotide
cuacuguccguaagggaua

SEQ ID NO: 323500 - RNA, 19 nt, Artificial Sequence
  Description of Artificial Sequence: Synthetic oligonucleotide
cugcuuacgaauccuguau

SEQ ID NO: 323501 - RNA, 19 nt, Artificial Sequence
  Description of Artificial Sequence: Synthetic oligonucleotide
uccucccguacuucuucaa

SEQ ID NO: 323502 - RNA, 19 nt, Artificial Sequence
  Description of Artificial Sequence: Synthetic oligonucleotide
gcucucugaauagcugcgg

SEQ ID NO: 323503 - RNA, 19 nt, Artificial Sequence
  Description of Artificial Sequence: Synthetic oligonucleotide
cugacacaggugcgucccc

SEQ ID NO: 323504 - RNA, 19 nt, Artificial Sequence
  Description of Artificial Sequence: Synthetic oligonucleotide
cacauagcggggugggaaa

SEQ ID NO: 323505 - RNA, 19 nt, Artificial Sequence
  Description of Artificial Sequence: Synthetic oligonucleotide
ucgggagagcgguggccug

SEQ ID NO: 323506 - RNA, 19 nt, Artificial Sequence
  Description of Artificial Sequence: Synthetic oligonucleotide
guaccuuugaaaagauaau

SEQ ID NO: 323507 - RNA, 19 nt, Artificial Sequence
  Description of Artificial Sequence: Synthetic oligonucleotide
gguauguugcccagugcuc

SEQ ID NO: 323508 - RNA, 19 nt, Artificial Sequence
  Description of Artificial Sequence: Synthetic oligonucleotide
cucuugcaucucccuucgg

SEQ ID NO: 323509 - RNA, 19 nt, Artificial Sequence
  Description of Artificial Sequence: Synthetic oligonucleotide
ggugcaggccagcuguauc

SEQ ID NO: 323510 - RNA, 19 nt, Artificial Sequence
  Description of Artificial Sequence: Synthetic oligonucleotide
ucccgcaguccggagcagc

SEQ ID NO: 323511 - RNA, 19 nt, Artificial Sequence
  Description of Artificial Sequence: Synthetic oligonucleotide
cugaguuacucagccgcca

SEQ ID NO: 323512 - RNA, 19 nt, Artificial Sequence
  Description of Artificial Sequence: Synthetic oligonucleotide
ggcauucgguaagugcgag

SEQ ID NO: 323513 - RNA, 19 nt, Artificial Sequence
  Description of Artificial Sequence: Synthetic oligonucleotide
acuguccguaagggauagg

SEQ ID NO: 323514 - RNA, 19 nt, Artificial Sequence
  Description of Artificial Sequence: Synthetic oligonucleotide
ucguccucccguacuucuu

SEQ ID NO: 323515 - RNA, 19 nt, Artificial Sequence
  Description of Artificial Sequence: Synthetic oligonucleotide
cucccuucggugcugcuua

SEQ ID NO: 323516 - RNA, 19 nt, Artificial Sequence
  Description of Artificial Sequence: Synthetic oligonucleotide
gcugcuuacgaauccugua

SEQ ID NO: 323517 - RNA, 19 nt, Artificial Sequence
  Description of Artificial Sequence: Synthetic oligonucleotide
cuuuaccaccaaaggccaa

SEQ ID NO: 323518 - RNA, 19 nt, Artificial Sequence
  Description of Artificial Sequence: Synthetic oligonucleotide
gcggggugggaaauggugc

SEQ ID NO: 323519 - RNA, 19 nt, Artificial Sequence
  Description of Artificial Sequence: Synthetic oligonucleotide
ccagcgugacagcacggcc

SEQ ID NO: 323520 - RNA, 19 nt, Artificial Sequence
  Description of Artificial Sequence: Synthetic oligonucleotide
caguaggaccagagggaca

SEQ ID NO: 323521 - RNA, 19 nt, Artificial Sequence
  Description of Artificial Sequence: Synthetic oligonucleotide
cccauugacuuggacacuc

SEQ ID NO: 323522 - RNA, 19 nt, Artificial Sequence
  Description of Artificial Sequence: Synthetic oligonucleotide
caauggacaagggccugga

SEQ ID NO: 323523 - RNA, 19 nt, Artificial Sequence
  Description of Artificial Sequence: Synthetic oligonucleotide
uccaagcgccugcgggccu

SEQ ID NO: 323524 - RNA, 19 nt, Artificial Sequence
  Description of Artificial Sequence: Synthetic oligonucleotide
ggucuagcugaauuauggu

SEQ ID NO: 323525 - RNA, 19 nt, Artificial Sequence
  Description of Artificial Sequence: Synthetic oligonucleotide
ccgcccauugacuuggaca

SEQ ID NO: 323526 - RNA, 19 nt, Artificial Sequence
  Description of Artificial Sequence: Synthetic oligonucleotide
gcuacugggccugaaccca

SEQ ID NO: 323527 - RNA, 19 nt, Artificial Sequence
  Description of Artificial Sequence: Synthetic oligonucleotide
ucgcagauucagccuucuu

SEQ ID NO: 323528 - RNA, 19 nt, Artificial Sequence
  Description of Artificial Sequence: Synthetic oligonucleotide
caggcaagacugccucguc

SEQ ID NO: 323529 - RNA, 19 nt, Artificial Sequence
  Description of Artificial Sequence: Synthetic oligonucleotide
ggacagagguauggcaaac

SEQ ID NO: 323530 - RNA, 19 nt, Artificial Sequence
  Description of Artificial Sequence: Synthetic oligonucleotide
auguugcccagugcucagu

SEQ ID NO: 323531 - RNA, 19 nt, Artificial Sequence
  Description of Artificial Sequence: Synthetic oligonucleotide
cuacugggccugaacccaa

SEQ ID NO: 323532 - RNA, 19 nt, Artificial Sequence
  Description of Artificial Sequence: Synthetic oligonucleotide
ccggugaauaagcucuuca

SEQ ID NO: 323533 - RNA, 19 nt, Artificial Sequence
  Description of Artificial Sequence: Synthetic oligonucleotide
acgugccuaugguggugca

SEQ ID NO: 323534 - RNA, 19 nt, Artificial Sequence
  Description of Artificial Sequence: Synthetic oligonucleotide
cacugucgggagagcggug

SEQ ID NO: 323535 - RNA, 19 nt, Artificial Sequence
  Description of Artificial Sequence: Synthetic oligonucleotide
cucguccucccguacuucu

SEQ ID NO: 323536 - RNA, 19 nt, Artificial Sequence
  Description of Artificial Sequence: Synthetic oligonucleotide
gugcguccccgcugcauga

SEQ ID NO: 323537 - RNA, 19 nt, Artificial Sequence
  Description of Artificial Sequence: Synthetic oligonucleotide
cccuaguacugcagucuug

SEQ ID NO: 323538 - RNA, 19 nt, Artificial Sequence
  Description of Artificial Sequence: Synthetic oligonucleotide
gguucuacccggaucuccu

SEQ ID NO: 323539 - RNA, 19 nt, Artificial Sequence
  Description of Artificial Sequence: Synthetic oligonucleotide
caccccuaucccaggagcu

SEQ ID NO: 323540 - RNA, 19 nt, Artificial Sequence
  Description of Artificial Sequence: Synthetic oligonucleotide
caggguccgguaggggaug

SEQ ID NO: 323541 - RNA, 19 nt, Artificial Sequence
  Description of Artificial Sequence: Synthetic oligonucleotide
ccaggacgcucaauggaca

SEQ ID NO: 323542 - RNA, 19 nt, Artificial Sequence
  Description of Artificial Sequence: Synthetic oligonucleotide
gcacccgcccauugacuug

SEQ ID NO: 323543 - RNA, 19 nt, Artificial Sequence
  Description of Artificial Sequence: Synthetic oligonucleotide
gugcgaggaaugugaggua

SEQ ID NO: 323544 - RNA, 19 nt, Artificial Sequence
  Description of Artificial Sequence: Synthetic oligonucleotide
ggguaccucagcacuggca

SEQ ID NO: 323545 - RNA, 19 nt, Artificial Sequence
  Description of Artificial Sequence: Synthetic oligonucleotide
gucgggagagcgguggccu

SEQ ID NO: 323546 - RNA, 19 nt, Artificial Sequence
  Description of Artificial Sequence: Synthetic oligonucleotide
ggugcugcuuacgaauccu

SEQ ID NO: 323547 - RNA, 19 nt, Artificial Sequence
  Description of Artificial Sequence: Synthetic oligonucleotide
gcugcggggcuuggcaugc

SEQ ID NO: 323548 - RNA, 19 nt, Artificial Sequence
  Description of Artificial Sequence: Synthetic oligonucleotide
ccauucguacacgcuucag

SEQ ID NO: 323549 - RNA, 19 nt, Artificial Sequence
  Description of Artificial Sequence: Synthetic oligonucleotide
ccagaaugcucucaggauu

SEQ ID NO: 323550 - RNA, 19 nt, Artificial Sequence
  Description of Artificial Sequence: Synthetic oligonucleotide
cugaaucaagcugguggcu

SEQ ID NO: 323551 - RNA, 19 nt, Artificial Sequence
  Description of Artificial Sequence: Synthetic oligonucleotide
acccuucgggcagcuucag

SEQ ID NO: 323552 - RNA, 19 nt, Artificial Sequence
  Description of Artificial Sequence: Synthetic oligonucleotide
aggcacccgcccauugacu

SEQ ID NO: 323553 - RNA, 19 nt, Artificial Sequence
  Description of Artificial Sequence: Synthetic oligonucleotide
ccauuugcuccuugggucu

SEQ ID NO: 323554 - RNA, 19 nt, Artificial Sequence
  Description of Artificial Sequence: Synthetic oligonucleotide
gacuugucauggggccaga

SEQ ID NO: 323555 - RNA, 19 nt, Artificial Sequence
  Description of Artificial Sequence: Synthetic oligonucleotide
cucagccgccacacucaca

SEQ ID NO: 323556 - RNA, 19 nt, Artificial Sequence
  Description of Artificial Sequence: Synthetic oligonucleotide
cauguguuucugggcccca

SEQ ID NO: 323557 - RNA, 19 nt, Artificial Sequence
  Description of Artificial Sequence: Synthetic oligonucleotide
ccgguaggggauggguucc

SEQ ID NO: 323558 - RNA, 19 nt, Artificial Sequence
  Description of Artificial Sequence: Synthetic oligonucleotide
cggugcugcuuacgaaucc

SEQ ID NO: 323559 - RNA, 19 nt, Artificial Sequence
  Description of Artificial Sequence: Synthetic oligonucleotide
gugguucuacccggaucuc

SEQ ID NO: 323560 - RNA, 19 nt, Artificial Sequence
  Description of Artificial Sequence: Synthetic oligonucleotide
gggccccaugagaagcugc

SEQ ID NO: 323561 - RNA, 19 nt, Artificial Sequence
  Description of Artificial Sequence: Synthetic oligonucleotide
aggugcguccccgcugcau

SEQ ID NO: 323562 - RNA, 19 nt, Artificial Sequence
  Description of Artificial Sequence: Synthetic oligonucleotide
ccccaggacgcucaaugga

SEQ ID NO: 323563 - RNA, 19 nt, Artificial Sequence
  Description of Artificial Sequence: Synthetic oligonucleotide
ccccaugagaagcugcucu

SEQ ID NO: 323564 - RNA, 19 nt, Artificial Sequence
  Description of Artificial Sequence: Synthetic oligonucleotide
ccguaagggauaggguguc

SEQ ID NO: 323565 - RNA, 19 nt, Artificial Sequence
  Description of Artificial Sequence: Synthetic oligonucleotide
gcaaacuucugugguucua

SEQ ID NO: 323566 - RNA, 19 nt, Artificial Sequence
  Description of Artificial Sequence: Synthetic oligonucleotide
ccaugcccggagguuacac

SEQ ID NO: 323567 - RNA, 19 nt, Artificial Sequence
  Description of Artificial Sequence: Synthetic oligonucleotide
ggcacccgcccauugacuu

SEQ ID NO: 323568 - RNA, 19 nt, Artificial Sequence
  Description of Artificial Sequence: Synthetic oligonucleotide
gggcauagccagaguugac

SEQ ID NO: 323569 - RNA, 19 nt, Artificial Sequence
  Description of Artificial Sequence: Synthetic oligonucleotide
agccggugaauaagcucuu

SEQ ID NO: 323570 - RNA, 19 nt, Artificial Sequence
  Description of Artificial Sequence: Synthetic oligonucleotide
ggggugcacucccgccacc

SEQ ID NO: 323571 - RNA, 19 nt, Artificial Sequence
  Description of Artificial Sequence: Synthetic oligonucleotide
cggugcacaugcuggccug

SEQ ID NO: 323572 - RNA, 19 nt, Artificial Sequence
  Description of Artificial Sequence: Synthetic oligonucleotide
ggagcuugugacacacaau

SEQ ID NO: 323573 - RNA, 19 nt, Artificial Sequence
  Description of Artificial Sequence: Synthetic oligonucleotide
gcccagcgugacagcacgg

SEQ ID NO: 323574 - RNA, 19 nt, Artificial Sequence
  Description of Artificial Sequence: Synthetic oligonucleotide
gccacucaguaggaccaga

SEQ ID NO: 323575 - RNA, 19 nt, Artificial Sequence
  Description of Artificial Sequence: Synthetic oligonucleotide
cgugccuaugguggugcag

SEQ ID NO: 323576 - RNA, 19 nt, Artificial Sequence
  Description of Artificial Sequence: Synthetic oligonucleotide
gccggugaauaagcucuuc

SEQ ID NO: 323577 - RNA, 19 nt, Artificial Sequence
  Description of Artificial Sequence: Synthetic oligonucleotide
gugcgcugaacagcuucua

SEQ ID NO: 323578 - RNA, 19 nt, Artificial Sequence
  Description of Artificial Sequence: Synthetic oligonucleotide
guccgguaggggauggguu

SEQ ID NO: 323579 - RNA, 19 nt, Artificial Sequence
  Description of Artificial Sequence: Synthetic oligonucleotide
cccgcccauugacuuggac

SEQ ID NO: 323580 - RNA, 19 nt, Artificial Sequence
  Description of Artificial Sequence: Synthetic oligonucleotide
cuucccaugcccggagguu

SEQ ID NO: 323581 - RNA, 19 nt, Artificial Sequence
  Description of Artificial Sequence: Synthetic oligonucleotide
ccaggggugcacagcccca

SEQ ID NO: 323582 - RNA, 19 nt, Artificial Sequence
  Description of Artificial Sequence: Synthetic oligonucleotide
gcccuggccugagaaauau

SEQ ID NO: 323583 - RNA, 19 nt, Artificial Sequence
  Description of Artificial Sequence: Synthetic oligonucleotide
gccucguccucccguacuu

SEQ ID NO: 323584 - RNA, 19 nt, Artificial Sequence
  Description of Artificial Sequence: Synthetic oligonucleotide
cagcuucuagccggugaau

SEQ ID NO: 323585 - RNA, 19 nt, Artificial Sequence
  Description of Artificial Sequence: Synthetic oligonucleotide
cguaagggauaggguguca

SEQ ID NO: 323586 - RNA, 19 nt, Artificial Sequence
  Description of Artificial Sequence: Synthetic oligonucleotide
cccuaucccaggagcuugu

SEQ ID NO: 323587 - RNA, 19 nt, Artificial Sequence
  Description of Artificial Sequence: Synthetic oligonucleotide
ccccuaguacugcagucuu

SEQ ID NO: 323588 - RNA, 19 nt, Artificial Sequence
  Description of Artificial Sequence: Synthetic oligonucleotide
gguguacccuggguauguu

SEQ ID NO: 323589 - RNA, 19 nt, Artificial Sequence
  Description of Artificial Sequence: Synthetic oligonucleotide
cccaugcccggagguuaca

SEQ ID NO: 323590 - RNA, 19 nt, Artificial Sequence
  Description of Artificial Sequence: Synthetic oligonucleotide
gcaguccggagcagcccau

SEQ ID NO: 323591 - RNA, 19 nt, Artificial Sequence
  Description of Artificial Sequence: Synthetic oligonucleotide
cguacacgcuucagccguu

SEQ ID NO: 323592 - RNA, 19 nt, Artificial Sequence
  Description of Artificial Sequence: Synthetic oligonucleotide
gcgugacagcacggccccu

SEQ ID NO: 323593 - RNA, 19 nt, Artificial Sequence
  Description of Artificial Sequence: Synthetic oligonucleotide
ugagaaacuacacagaugg

SEQ ID NO: 323594 - RNA, 19 nt, Artificial Sequence
  Description of Artificial Sequence: Synthetic oligonucleotide
aaaacccuagaauauaacc

SEQ ID NO: 323595 - RNA, 19 nt, Artificial Sequence
  Description of Artificial Sequence: Synthetic oligonucleotide
uaaauaauauauaugcgcc

SEQ ID NO: 323596 - RNA, 19 nt, Artificial Sequence
  Description of Artificial Sequence: Synthetic oligonucleotide
ugcauaaguagccugaugg

SEQ ID NO: 323597 - RNA, 19 nt, Artificial Sequence
  Description of Artificial Sequence: Synthetic oligonucleotide
augucuaguaguuacaggg

SEQ ID NO: 323598 - RNA, 19 nt, Artificial Sequence
  Description of Artificial Sequence: Synthetic oligonucleotide
aacccuagaauauaaccac

SEQ ID NO: 323599 - RNA, 19 nt, Artificial Sequence
  Description of Artificial Sequence: Synthetic oligonucleotide
aauauaaccacuccaugca

SEQ ID NO: 323600 - RNA, 19 nt, Artificial Sequence
  Description of Artificial Sequence: Synthetic oligonucleotide
aacuaggcaauagaaaagc

SEQ ID NO: 323601 - RNA, 19 nt, Artificial Sequence
  Description of Artificial Sequence: Synthetic oligonucleotide
acuaucauauuguaacccc

SEQ ID NO: 323602 - RNA, 19 nt, Artificial Sequence
  Description of Artificial Sequence: Synthetic oligonucleotide
gaauauaaccacuccaugc

SEQ ID NO: 323603 - RNA, 19 nt, Artificial Sequence
  Description of Artificial Sequence: Synthetic oligonucleotide
aaauauggauaucucagca

SEQ ID NO: 323604 - RNA, 19 nt, Artificial Sequence
  Description of Artificial Sequence: Synthetic oligonucleotide
auauaugcgccacauaauc

SEQ ID NO: 323605 - RNA, 19 nt, Artificial Sequence
  Description of Artificial Sequence: Synthetic oligonucleotide
ugauaaaguguguagaaac

SEQ ID NO: 323606 - RNA, 19 nt, Artificial Sequence
  Description of Artificial Sequence: Synthetic oligonucleotide
auauauaugcgccacauaa

SEQ ID NO: 323607 - RNA, 19 nt, Artificial Sequence
  Description of Artificial Sequence: Synthetic oligonucleotide
gauuuuggcgcccugacgc

SEQ ID NO: 323608 - RNA, 19 nt, Artificial Sequence
  Description of Artificial Sequence: Synthetic oligonucleotide
acuagcaggaaccaccaac

SEQ ID NO: 323609 - RNA, 19 nt, Artificial Sequence
  Description of Artificial Sequence: Synthetic oligonucleotide
acauugauaagguacugag

SEQ ID NO: 323610 - RNA, 19 nt, Artificial Sequence
  Description of Artificial Sequence: Synthetic oligonucleotide
ugucuaacccuaaacacug

SEQ ID NO: 323611 - RNA, 19 nt, Artificial Sequence
  Description of Artificial Sequence: Synthetic oligonucleotide
uauaaccacuccaugcagg

SEQ ID NO: 323612 - RNA, 19 nt, Artificial Sequence
  Description of Artificial Sequence: Synthetic oligonucleotide
aguaguuacagggagcugg

SEQ ID NO: 323613 - RNA, 19 nt, Artificial Sequence
  Description of Artificial Sequence: Synthetic oligonucleotide
aaaacggaagaaaauaccu

SEQ ID NO: 323614 - RNA, 19 nt, Artificial Sequence
  Description of Artificial Sequence: Synthetic oligonucleotide
ucuaacccuaaacacuggg

SEQ ID NO: 323615 - RNA, 19 nt, Artificial Sequence
  Description of Artificial Sequence: Synthetic oligonucleotide
acuaaauauggauaucuca

SEQ ID NO: 323616 - RNA, 19 nt, Artificial Sequence
  Description of Artificial Sequence: Synthetic oligonucleotide
uaaauauggauaucucagc

SEQ ID NO: 323617 - RNA, 19 nt, Artificial Sequence
  Description of Artificial Sequence: Synthetic oligonucleotide
aagggaucauggaugaacc

SEQ ID NO: 323618 - RNA, 19 nt, Artificial Sequence
  Description of Artificial Sequence: Synthetic oligonucleotide
uaaaguguguagaaacuga

SEQ ID NO: 323619 - RNA, 19 nt, Artificial Sequence
  Description of Artificial Sequence: Synthetic oligonucleotide
aguguguagaaacugaaaa

SEQ ID NO: 323620 - RNA, 19 nt, Artificial Sequence
  Description of Artificial Sequence: Synthetic oligonucleotide
cuauucaaacccaaccagg

SEQ ID NO: 323621 - RNA, 19 nt, Artificial Sequence
  Description of Artificial Sequence: Synthetic oligonucleotide
uagaauauaaccacuccau

SEQ ID NO: 323622 - RNA, 19 nt, Artificial Sequence
  Description of Artificial Sequence: Synthetic oligonucleotide
aguaacacccuagagcuac

SEQ ID NO: 323623 - RNA, 19 nt, Artificial Sequence
  Description of Artificial Sequence: Synthetic oligonucleotide
ugguauaggccucuagagg

SEQ ID NO: 323624 - RNA, 19 nt, Artificial Sequence
  Description of Artificial Sequence: Synthetic oligonucleotide
aacggaagaaaauaccuua

SEQ ID NO: 323625 - RNA, 19 nt, Artificial Sequence
  Description of Artificial Sequence: Synthetic oligonucleotide
aaacccuagaauauaacca

SEQ ID NO: 323626 - RNA, 19 nt, Artificial Sequence
  Description of Artificial Sequence: Synthetic oligonucleotide
uacuguuuacacauuuugc

SEQ ID NO: 323627 - RNA, 19 nt, Artificial Sequence
  Description of Artificial Sequence: Synthetic oligonucleotide
aagaugacuggagaacucg

SEQ ID NO: 323628 - RNA, 19 nt, Artificial Sequence
  Description of Artificial Sequence: Synthetic oligonucleotide
agauggggcuuucuuaagc

SEQ ID NO: 323629 - RNA, 19 nt, Artificial Sequence
  Description of Artificial Sequence: Synthetic oligonucleotide
gggaaaaugagacuguugc

SEQ ID NO: 323630 - RNA, 19 nt, Artificial Sequence
  Description of Artificial Sequence: Synthetic oligonucleotide
uaauccaccuucaaucaca

SEQ ID NO: 323631 - RNA, 19 nt, Artificial Sequence
  Description of Artificial Sequence: Synthetic oligonucleotide
caauuaccaaguucuaggg

SEQ ID NO: 323632 - RNA, 19 nt, Artificial Sequence
  Description of Artificial Sequence: Synthetic oligonucleotide
acacccuagagcuacgagg

SEQ ID NO: 323633 - RNA, 19 nt, Artificial Sequence
  Description of Artificial Sequence: Synthetic oligonucleotide
cuauuggucauagagcugc

SEQ ID NO: 323634 - RNA, 19 nt, Artificial Sequence
  Description of Artificial Sequence: Synthetic oligonucleotide
uguugcauugccaacuggu

SEQ ID NO: 323635 - RNA, 19 nt, Artificial Sequence
  Description of Artificial Sequence: Synthetic oligonucleotide
ugggucaugggaaaaugag

SEQ ID NO: 323636 - RNA, 19 nt, Artificial Sequence
  Description of Artificial Sequence: Synthetic oligonucleotide
auuaaaacgcuuugaauua

SEQ ID NO: 323637 - RNA, 19 nt, Artificial Sequence
  Description of Artificial Sequence: Synthetic oligonucleotide
uaucauauuguaaccccug

SEQ ID NO: 323638 - RNA, 19 nt, Artificial Sequence
  Description of Artificial Sequence: Synthetic oligonucleotide
gggacuaucauauuguaac

SEQ ID NO: 323639 - RNA, 19 nt, Artificial Sequence
  Description of Artificial Sequence: Synthetic oligonucleotide
aauuaccaaguucuaggga

SEQ ID NO: 323640 - RNA, 19 nt, Artificial Sequence
  Description of Artificial Sequence: Synthetic oligonucleotide
aauaacaucaagacaggaa

SEQ ID NO: 323641 - RNA, 19 nt, Artificial Sequence
  Description of Artificial Sequence: Synthetic oligonucleotide
ucuaguaguuacagggagc

SEQ ID NO: 323642 - RNA, 19 nt, Artificial Sequence
  Description of Artificial Sequence: Synthetic oligonucleotide
ucuucuuaacggauucucc

SEQ ID NO: 323643 - RNA, 19 nt, Artificial Sequence
  Description of Artificial Sequence: Synthetic oligonucleotide
aacuaaauauggauaucuc

SEQ ID NO: 323644 - RNA, 19 nt, Artificial Sequence
  Description of Artificial Sequence: Synthetic oligonucleotide
uauaugcgccacauaauca

SEQ ID NO: 323645 - RNA, 19 nt, Artificial Sequence
  Description of Artificial Sequence: Synthetic oligonucleotide
augaguggaugauaaagug

SEQ ID NO: 323646 - RNA, 19 nt, Artificial Sequence
  Description of Artificial Sequence: Synthetic oligonucleotide
ugaguggaugauaaagugu

SEQ ID NO: 323647 - RNA, 19 nt, Artificial Sequence
  Description of Artificial Sequence: Synthetic oligonucleotide
aggacaauucccuucugag

SEQ ID NO: 323648 - RNA, 19 nt, Artificial Sequence
  Description of Artificial Sequence: Synthetic oligonucleotide
ucgaggguuuucuugauga

SEQ ID NO: 323649 - RNA, 19 nt, Artificial Sequence
  Description of Artificial Sequence: Synthetic oligonucleotide
ucauauuguaaccccugug

SEQ ID NO: 323650 - RNA, 19 nt, Artificial Sequence
  Description of Artificial Sequence: Synthetic oligonucleotide
cuaacccuaaacacugggg

SEQ ID NO: 323651 - RNA, 19 nt, Artificial Sequence
  Description of Artificial Sequence: Synthetic oligonucleotide
acacugucuaacccuaaac

SEQ ID NO: 323652 - RNA, 19 nt, Artificial Sequence
  Description of Artificial Sequence: Synthetic oligonucleotide
ucaacagauagauggggcu

SEQ ID NO: 323653 - RNA, 19 nt, Artificial Sequence
  Description of Artificial Sequence: Synthetic oligonucleotide
ggaaccaccaaccguaagg

SEQ ID NO: 323654 - RNA, 19 nt, Artificial Sequence
  Description of Artificial Sequence: Synthetic oligonucleotide
caugagaaguaguuugagc

SEQ ID NO: 323655 - RNA, 19 nt, Artificial Sequence
  Description of Artificial Sequence: Synthetic oligonucleotide
aacaucaagacaggaauaa

SEQ ID NO: 323656 - RNA, 19 nt, Artificial Sequence
  Description of Artificial Sequence: Synthetic oligonucleotide
aacaauaggggcgggcggg

SEQ ID NO: 323657 - RNA, 19 nt, Artificial Sequence
  Description of Artificial Sequence: Synthetic oligonucleotide
acacugacuagcaggaacc

SEQ ID NO: 323658 - RNA, 19 nt, Artificial Sequence
  Description of Artificial Sequence: Synthetic oligonucleotide
uugcauugccaacuggugc

SEQ ID NO: 323659 - RNA, 19 nt, Artificial Sequence
  Description of Artificial Sequence: Synthetic oligonucleotide
cacucaaugauggauugcg

SEQ ID NO: 323660 - RNA, 19 nt, Artificial Sequence
  Description of Artificial Sequence: Synthetic oligonucleotide
uggauaucucagcauaacu

SEQ ID NO: 323661 - RNA, 19 nt, Artificial Sequence
  Description of Artificial Sequence: Synthetic oligonucleotide
guucuagggacccuggcag

SEQ ID NO: 323662 - RNA, 19 nt, Artificial Sequence
  Description of Artificial Sequence: Synthetic oligonucleotide
acucuuacauuuccaugac

SEQ ID NO: 323663 - RNA, 19 nt, Artificial Sequence
  Description of Artificial Sequence: Synthetic oligonucleotide
auuguaaccccugugaaaa

SEQ ID NO: 323664 - RNA, 19 nt, Artificial Sequence
  Description of Artificial Sequence: Synthetic oligonucleotide
cauauuguaaccccuguga

SEQ ID NO: 323665 - RNA, 19 nt, Artificial Sequence
  Description of Artificial Sequence: Synthetic oligonucleotide
auauggauaucucagcaua

SEQ ID NO: 323666 - RNA, 19 nt, Artificial Sequence
  Description of Artificial Sequence: Synthetic oligonucleotide
ucugucgaggguuuucuug

SEQ ID NO: 323667 - RNA, 19 nt, Artificial Sequence
  Description of Artificial Sequence: Synthetic oligonucleotide
auaagucacugugccaucc

SEQ ID NO: 323668 - RNA, 19 nt, Artificial Sequence
  Description of Artificial Sequence: Synthetic oligonucleotide
aaaaucaugaguggaugau

SEQ ID NO: 323669 - RNA, 19 nt, Artificial Sequence
  Description of Artificial Sequence: Synthetic oligonucleotide
cauugauaagguacugagc

SEQ ID NO: 323670 - RNA, 19 nt, Artificial Sequence
  Description of Artificial Sequence: Synthetic oligonucleotide
aauggcauacuguccuuga

SEQ ID NO: 323671 - RNA, 19 nt, Artificial Sequence
  Description of Artificial Sequence: Synthetic oligonucleotide
gauggucacgcccuucggg

SEQ ID NO: 323672 - RNA, 19 nt, Artificial Sequence
  Description of Artificial Sequence: Synthetic oligonucleotide
gaagggaucauggaugaac

SEQ ID NO: 323673 - RNA, 19 nt, Artificial Sequence
  Description of Artificial Sequence: Synthetic oligonucleotide
cuagaauauaaccacucca

SEQ ID NO: 323674 - RNA, 19 nt, Artificial Sequence
  Description of Artificial Sequence: Synthetic oligonucleotide
auagauggggcuuucuuaa

SEQ ID NO: 323675 - RNA, 19 nt, Artificial Sequence
  Description of Artificial Sequence: Synthetic oligonucleotide
caaguaacacccuagagcu

SEQ ID NO: 323676 - RNA, 19 nt, Artificial Sequence
  Description of Artificial Sequence: Synthetic oligonucleotide
acggauucuccuuucuuuc

SEQ ID NO: 323677 - RNA, 19 nt, Artificial Sequence
  Description of Artificial Sequence: Synthetic oligonucleotide
aaagaugacuggagaacuc

SEQ ID NO: 323678 - RNA, 19 nt, Artificial Sequence
  Description of Artificial Sequence: Synthetic oligonucleotide
ugucuaguaguuacaggga

SEQ ID NO: 323679 - RNA, 19 nt, Artificial Sequence
  Description of Artificial Sequence: Synthetic oligonucleotide
ugcaaagaugacuggagaa

SEQ ID NO: 323680 - RNA, 19 nt, Artificial Sequence
  Description of Artificial Sequence: Synthetic oligonucleotide
uauauaugcgccacauaau

SEQ ID NO: 323681 - RNA, 19 nt, Artificial Sequence
  Description of Artificial Sequence: Synthetic oligonucleotide
agucgggccagccaaagug

SEQ ID NO: 323682 - RNA, 19 nt, Artificial Sequence
  Description of Artificial Sequence: Synthetic oligonucleotide
auggucacgcccuucgggg

SEQ ID NO: 323683 - RNA, 19 nt, Artificial Sequence
  Description of Artificial Sequence: Synthetic oligonucleotide
aucaguagauccuuccacu

SEQ ID NO: 323684 - RNA, 19 nt, Artificial Sequence
  Description of Artificial Sequence: Synthetic oligonucleotide
cacucuuacauuuccauga

SEQ ID NO: 323685 - RNA, 19 nt, Artificial Sequence
  Description of Artificial Sequence: Synthetic oligonucleotide
acugcacuuuuauuuuccg

SEQ ID NO: 323686 - RNA, 19 nt, Artificial Sequence
  Description of Artificial Sequence: Synthetic oligonucleotide
uguaaccccugugaaaacc

SEQ ID NO: 323687 - RNA, 19 nt, Artificial Sequence
  Description of Artificial Sequence: Synthetic oligonucleotide
auaugcgccacauaaucaa

SEQ ID NO: 323688 - RNA, 19 nt, Artificial Sequence
  Description of Artificial Sequence: Synthetic oligonucleotide
cuaggcaauagaaaagcca

SEQ ID NO: 323689 - RNA, 19 nt, Artificial Sequence
  Description of Artificial Sequence: Synthetic oligonucleotide
auuuuggcgcccugacgcc

SEQ ID NO: 323690 - RNA, 19 nt, Artificial Sequence
  Description of Artificial Sequence: Synthetic oligonucleotide
ugcgccacauaaucaacag

SEQ ID NO: 323691 - RNA, 19 nt, Artificial Sequence
  Description of Artificial Sequence: Synthetic oligonucleotide
uauuguaaccccugugaaa

SEQ ID NO: 323692 - RNA, 19 nt, Artificial Sequence
  Description of Artificial Sequence: Synthetic oligonucleotide
auaccuuaauucuauucaa

SEQ ID NO: 323693 - RNA, 19 nt, Artificial Sequence
  Description of Artificial Sequence: Synthetic oligonucleotide
aauauauaugcgccacaua

SEQ ID NO: 323694 - RNA, 19 nt, Artificial Sequence
  Description of Artificial Sequence: Synthetic oligonucleotide
ugggaaaaugagacuguug

SEQ ID NO: 323695 - RNA, 19 nt, Artificial Sequence
  Description of Artificial Sequence: Synthetic oligonucleotide
uauaggccucuagaggugg

SEQ ID NO: 323696 - RNA, 19 nt, Artificial Sequence
  Description of Artificial Sequence: Synthetic oligonucleotide
gaacaauaggggcgggcgg

SEQ ID NO: 323697 - RNA, 19 nt, Artificial Sequence
  Description of Artificial Sequence: Synthetic oligonucleotide
ggaaagaggaaccccgggg

SEQ ID NO: 323698 - RNA, 19 nt, Artificial Sequence
  Description of Artificial Sequence: Synthetic oligonucleotide
cagcaauagugauugcccg

SEQ ID NO: 323699 - RNA, 19 nt, Artificial Sequence
  Description of Artificial Sequence: Synthetic oligonucleotide
aauaggggcgggcgggaag

SEQ ID NO: 323700 - RNA, 19 nt, Artificial Sequence
  Description of Artificial Sequence: Synthetic oligonucleotide
uaaaacgcuuugaauuaaa

SEQ ID NO: 323701 - RNA, 19 nt, Artificial Sequence
  Description of Artificial Sequence: Synthetic oligonucleotide
gaaacuggucccuccuugc

SEQ ID NO: 323702 - RNA, 19 nt, Artificial Sequence
  Description of Artificial Sequence: Synthetic oligonucleotide
cacauaaucaacagauaga

SEQ ID NO: 323703 - RNA, 19 nt, Artificial Sequence
  Description of Artificial Sequence: Synthetic oligonucleotide
ugacuagcaggaaccacca

SEQ ID NO: 323704 - RNA, 19 nt, Artificial Sequence
  Description of Artificial Sequence: Synthetic oligonucleotide
auggauaucucagcauaac

SEQ ID NO: 323705 - RNA, 19 nt, Artificial Sequence
  Description of Artificial Sequence: Synthetic oligonucleotide
uaccuuaauucuauucaaa

SEQ ID NO: 323706 - RNA, 19 nt, Artificial Sequence
  Description of Artificial Sequence: Synthetic oligonucleotide
gucucuacacugucuaacc

SEQ ID NO: 323707 - RNA, 19 nt, Artificial Sequence
  Description of Artificial Sequence: Synthetic oligonucleotide
cauaaguagccugauggug

SEQ ID NO: 323708 - RNA, 19 nt, Artificial Sequence
  Description of Artificial Sequence: Synthetic oligonucleotide
ggaaacuaaggcugggucc

SEQ ID NO: 323709 - RNA, 19 nt, Artificial Sequence
  Description of Artificial Sequence: Synthetic oligonucleotide
cugugaaaacccuagaaua

SEQ ID NO: 323710 - RNA, 19 nt, Artificial Sequence
  Description of Artificial Sequence: Synthetic oligonucleotide
uuaacggauucuccuuucu

SEQ ID NO: 323711 - RNA, 19 nt, Artificial Sequence
  Description of Artificial Sequence: Synthetic oligonucleotide
ugauggauugcggaaugcc

SEQ ID NO: 323712 - RNA, 19 nt, Artificial Sequence
  Description of Artificial Sequence: Synthetic oligonucleotide
uccaugcauaaguagccug

SEQ ID NO: 323713 - RNA, 19 nt, Artificial Sequence
  Description of Artificial Sequence: Synthetic oligonucleotide
uagcaggaaccaccaaccg

SEQ ID NO: 323714 - RNA, 19 nt, Artificial Sequence
  Description of Artificial Sequence: Synthetic oligonucleotide
aauccgguguugccauggg

SEQ ID NO: 323715 - RNA, 19 nt, Artificial Sequence
  Description of Artificial Sequence: Synthetic oligonucleotide
ugcggaaugccagcaauag

SEQ ID NO: 323716 - RNA, 19 nt, Artificial Sequence
  Description of Artificial Sequence: Synthetic oligonucleotide
gaaugguauaggccucuag

SEQ ID NO: 323717 - RNA, 19 nt, Artificial Sequence
  Description of Artificial Sequence: Synthetic oligonucleotide
guaacccauuucuuugucc

SEQ ID NO: 323718 - RNA, 19 nt, Artificial Sequence
  Description of Artificial Sequence: Synthetic oligonucleotide
aucauauuguaaccccugu

SEQ ID NO: 323719 - RNA, 19 nt, Artificial Sequence
  Description of Artificial Sequence: Synthetic oligonucleotide
ggaauuaaaacgcuuugaa

SEQ ID NO: 323720 - RNA, 19 nt, Artificial Sequence
  Description of Artificial Sequence: Synthetic oligonucleotide
accaauuaccaaguucuag

SEQ ID NO: 323721 - RNA, 19 nt, Artificial Sequence
  Description of Artificial Sequence: Synthetic oligonucleotide
gaugacuggagaacucgag

SEQ ID NO: 323722 - RNA, 19 nt, Artificial Sequence
  Description of Artificial Sequence: Synthetic oligonucleotide
ucuuaacggauucuccuuu

SEQ ID NO: 323723 - RNA, 19 nt, Artificial Sequence
  Description of Artificial Sequence: Synthetic oligonucleotide
cuacuguuacccuggugcc

SEQ ID NO: 323724 - RNA, 19 nt, Artificial Sequence
  Description of Artificial Sequence: Synthetic oligonucleotide
agacuguugcauugccaac

SEQ ID NO: 323725 - RNA, 19 nt, Artificial Sequence
  Description of Artificial Sequence: Synthetic oligonucleotide
ugacgggaggucuacuggc

SEQ ID NO: 323726 - RNA, 19 nt, Artificial Sequence
  Description of Artificial Sequence: Synthetic oligonucleotide
ucgcugacuguugagaaac

SEQ ID NO: 323727 - RNA, 19 nt, Artificial Sequence
  Description of Artificial Sequence: Synthetic oligonucleotide
uggaaucgcugacuguuga

SEQ ID NO: 323728 - RNA, 19 nt, Artificial Sequence
  Description of Artificial Sequence: Synthetic oligonucleotide
gaaaaugagacuguugcau

SEQ ID NO: 323729 - RNA, 19 nt, Artificial Sequence
  Description of Artificial Sequence: Synthetic oligonucleotide
ggaguggucaagucuuugg

SEQ ID NO: 323730 - RNA, 19 nt, Artificial Sequence
  Description of Artificial Sequence: Synthetic oligonucleotide
aaaacgcuuugaauuaaaa

SEQ ID NO: 323731 - RNA, 19 nt, Artificial Sequence
  Description of Artificial Sequence: Synthetic oligonucleotide
agcuacgaggaaaggaaac

SEQ ID NO: 323732 - RNA, 19 nt, Artificial Sequence
  Description of Artificial Sequence: Synthetic oligonucleotide
cucagcauaacugcugaac

SEQ ID NO: 323733 - RNA, 19 nt, Artificial Sequence
  Description of Artificial Sequence: Synthetic oligonucleotide
uguaacccauuucuuuguc

SEQ ID NO: 323734 - RNA, 19 nt, Artificial Sequence
  Description of Artificial Sequence: Synthetic oligonucleotide
agagcuacgaggaaaggaa

SEQ ID NO: 323735 - RNA, 19 nt, Artificial Sequence
  Description of Artificial Sequence: Synthetic oligonucleotide
cacugucuaacccuaaaca

SEQ ID NO: 323736 - RNA, 19 nt, Artificial Sequence
  Description of Artificial Sequence: Synthetic oligonucleotide
gaagguuuaaagguauaaa

SEQ ID NO: 323737 - RNA, 19 nt, Artificial Sequence
  Description of Artificial Sequence: Synthetic oligonucleotide
aaaucaugaguggaugaua

SEQ ID NO: 323738 - RNA, 19 nt, Artificial Sequence
  Description of Artificial Sequence: Synthetic oligonucleotide
gugacgggaggucuacugg

SEQ ID NO: 323739 - RNA, 19 nt, Artificial Sequence
  Description of Artificial Sequence: Synthetic oligonucleotide
ugauccgugcaccacucuc

SEQ ID NO: 323740 - RNA, 19 nt, Artificial Sequence
  Description of Artificial Sequence: Synthetic oligonucleotide
uuaaaacgcuuugaauuaa

SEQ ID NO: 323741 - RNA, 19 nt, Artificial Sequence
  Description of Artificial Sequence: Synthetic oligonucleotide
auugcggaaugccagcaau

SEQ ID NO: 323742 - RNA, 19 nt, Artificial Sequence
  Description of Artificial Sequence: Synthetic oligonucleotide
auggauugcggaaugccag

SEQ ID NO: 323743 - RNA, 19 nt, Artificial Sequence
  Description of Artificial Sequence: Synthetic oligonucleotide
aaacggaagaaaauaccuu

SEQ ID NO: 323744 - RNA, 19 nt, Artificial Sequence
  Description of Artificial Sequence: Synthetic oligonucleotide
augauggauugcggaaugc

SEQ ID NO: 323745 - RNA, 19 nt, Artificial Sequence
  Description of Artificial Sequence: Synthetic oligonucleotide
ggaacaauaggggcgggcg

SEQ ID NO: 323746 - RNA, 19 nt, Artificial Sequence
  Description of Artificial Sequence: Synthetic oligonucleotide
agugauugcccgcucaguu

SEQ ID NO: 323747 - RNA, 19 nt, Artificial Sequence
  Description of Artificial Sequence: Synthetic oligonucleotide
aaggugacgggaggucuac

SEQ ID NO: 323748 - RNA, 19 nt, Artificial Sequence
  Description of Artificial Sequence: Synthetic oligonucleotide
uuaagacugcacuuuuauu

SEQ ID NO: 323749 - RNA, 19 nt, Artificial Sequence
  Description of Artificial Sequence: Synthetic oligonucleotide
cuugaaugguauaggccuc

SEQ ID NO: 323750 - RNA, 19 nt, Artificial Sequence
  Description of Artificial Sequence: Synthetic oligonucleotide
acugaauccgguguugcca

SEQ ID NO: 323751 - RNA, 19 nt, Artificial Sequence
  Description of Artificial Sequence: Synthetic oligonucleotide
gacauugauaagguacuga

SEQ ID NO: 323752 - RNA, 19 nt, Artificial Sequence
  Description of Artificial Sequence: Synthetic oligonucleotide
uccaguccaucuuuuaauu

SEQ ID NO: 323753 - RNA, 19 nt, Artificial Sequence
  Description of Artificial Sequence: Synthetic oligonucleotide
gcucaguugaguugggaag

SEQ ID NO: 323754 - RNA, 19 nt, Artificial Sequence
  Description of Artificial Sequence: Synthetic oligonucleotide
ggacuaucauauuguaacc

SEQ ID NO: 323755 - RNA, 19 nt, Artificial Sequence
  Description of Artificial Sequence: Synthetic oligonucleotide
gcucugugaagguuuaaag

SEQ ID NO: 323756 - RNA, 19 nt, Artificial Sequence
  Description of Artificial Sequence: Synthetic oligonucleotide
gauccgugcaccacucucc

SEQ ID NO: 323757 - RNA, 19 nt, Artificial Sequence
  Description of Artificial Sequence: Synthetic oligonucleotide
uacccuggugccugguagg

SEQ ID NO: 323758 - RNA, 19 nt, Artificial Sequence
  Description of Artificial Sequence: Synthetic oligonucleotide
ugucuccgaggaaagccug

SEQ ID NO: 323759 - RNA, 19 nt, Artificial Sequence
  Description of Artificial Sequence: Synthetic oligonucleotide
cuuaacggauucuccuuuc

SEQ ID NO: 323760 - RNA, 19 nt, Artificial Sequence
  Description of Artificial Sequence: Synthetic oligonucleotide
accaaccguaaggugacgg

SEQ ID NO: 323761 - RNA, 19 nt, Artificial Sequence
  Description of Artificial Sequence: Synthetic oligonucleotide
guaaccccugugaaaaccc

SEQ ID NO: 323762 - RNA, 19 nt, Artificial Sequence
  Description of Artificial Sequence: Synthetic oligonucleotide
gaauggauggaguggaaau

SEQ ID NO: 323763 - RNA, 19 nt, Artificial Sequence
  Description of Artificial Sequence: Synthetic oligonucleotide
agcugcuuauguccucuuc

SEQ ID NO: 323764 - RNA, 19 nt, Artificial Sequence
  Description of Artificial Sequence: Synthetic oligonucleotide
gguauaggccucuagaggu

SEQ ID NO: 323765 - RNA, 19 nt, Artificial Sequence
  Description of Artificial Sequence: Synthetic oligonucleotide
gaaccugcacugcucuagc

SEQ ID NO: 323766 - RNA, 19 nt, Artificial Sequence
  Description of Artificial Sequence: Synthetic oligonucleotide
gaaucgcugacuguugaga

SEQ ID NO: 323767 - RNA, 19 nt, Artificial Sequence
  Description of Artificial Sequence: Synthetic oligonucleotide
ccuagaauauaaccacucc

SEQ ID NO: 323768 - RNA, 19 nt, Artificial Sequence
  Description of Artificial Sequence: Synthetic oligonucleotide
augauaaaguguguagaaa

SEQ ID NO: 323769 - RNA, 19 nt, Artificial Sequence
  Description of Artificial Sequence: Synthetic oligonucleotide
ccugccgaucaguagaucc

SEQ ID NO: 323770 - RNA, 19 nt, Artificial Sequence
  Description of Artificial Sequence: Synthetic oligonucleotide
guugcauugccaacuggug

SEQ ID NO: 323771 - RNA, 19 nt, Artificial Sequence
  Description of Artificial Sequence: Synthetic oligonucleotide
gaauggcauacuguccuug

SEQ ID NO: 323772 - RNA, 19 nt, Artificial Sequence
  Description of Artificial Sequence: Synthetic oligonucleotide
cuuaagccuuaaagucagg

SEQ ID NO: 323773 - RNA, 19 nt, Artificial Sequence
  Description of Artificial Sequence: Synthetic oligonucleotide
gaaacuaaggcuggguccu

SEQ ID NO: 323774 - RNA, 19 nt, Artificial Sequence
  Description of Artificial Sequence: Synthetic oligonucleotide
augcauaaguagccugaug

SEQ ID NO: 323775 - RNA, 19 nt, Artificial Sequence
  Description of Artificial Sequence: Synthetic oligonucleotide
uaccaaguucuagggaccc

SEQ ID NO: 323776 - RNA, 19 nt, Artificial Sequence
  Description of Artificial Sequence: Synthetic oligonucleotide
cugucgaggguuuucuuga

SEQ ID NO: 323777 - RNA, 19 nt, Artificial Sequence
  Description of Artificial Sequence: Synthetic oligonucleotide
ggcgcgagucgacugaggg

SEQ ID NO: 323778 - RNA, 19 nt, Artificial Sequence
  Description of Artificial Sequence: Synthetic oligonucleotide
auggcauuagucgggccag

SEQ ID NO: 323779 - RNA, 19 nt, Artificial Sequence
  Description of Artificial Sequence: Synthetic oligonucleotide
ggcggggacuaucauauug

SEQ ID NO: 323780 - RNA, 19 nt, Artificial Sequence
  Description of Artificial Sequence: Synthetic oligonucleotide
ggaaaaugagacuguugca

SEQ ID NO: 323781 - RNA, 19 nt, Artificial Sequence
  Description of Artificial Sequence: Synthetic oligonucleotide
ccgugcaccacucuccucg

SEQ ID NO: 323782 - RNA, 19 nt, Artificial Sequence
  Description of Artificial Sequence: Synthetic oligonucleotide
cuguugcauugccaacugg

SEQ ID NO: 323783 - RNA, 19 nt, Artificial Sequence
  Description of Artificial Sequence: Synthetic oligonucleotide
cuggaaucgcugacuguug

SEQ ID NO: 323784 - RNA, 19 nt, Artificial Sequence
  Description of Artificial Sequence: Synthetic oligonucleotide
agggaucauggaugaaccu

SEQ ID NO: 323785 - RNA, 19 nt, Artificial Sequence
  Description of Artificial Sequence: Synthetic oligonucleotide
cuaaggcuggguccucccc

SEQ ID NO: 323786 - RNA, 19 nt, Artificial Sequence
  Description of Artificial Sequence: Synthetic oligonucleotide
uugcggaaugccagcaaua

SEQ ID NO: 323787 - RNA, 19 nt, Artificial Sequence
  Description of Artificial Sequence: Synthetic oligonucleotide
caggcaacuaggcaauaga

SEQ ID NO: 323788 - RNA, 19 nt, Artificial Sequence
  Description of Artificial Sequence: Synthetic oligonucleotide
cuaucauauuguaaccccu

SEQ ID NO: 323789 - RNA, 19 nt, Artificial Sequence
  Description of Artificial Sequence: Synthetic oligonucleotide
ggugacgggaggucuacug

SEQ ID NO: 323790 - RNA, 19 nt, Artificial Sequence
  Description of Artificial Sequence: Synthetic oligonucleotide
cauaagucacugugccauc

SEQ ID NO: 323791 - RNA, 19 nt, Artificial Sequence
  Description of Artificial Sequence: Synthetic oligonucleotide
cauuuugcacuugggagga

SEQ ID NO: 323792 - RNA, 19 nt, Artificial Sequence
  Description of Artificial Sequence: Synthetic oligonucleotide
cuagagcuacgaggaaagg

SEQ ID NO: 323793 - RNA, 19 nt, Artificial Sequence
  Description of Artificial Sequence: Synthetic oligonucleotide
guggaauggcauacugucc

SEQ ID NO: 323794 - RNA, 19 nt, Artificial Sequence
  Description of Artificial Sequence: Synthetic oligonucleotide
uuuuggcgcccugacgccc

SEQ ID NO: 323795 - RNA, 19 nt, Artificial Sequence
  Description of Artificial Sequence: Synthetic oligonucleotide
ggggcggaacaauaggggc

SEQ ID NO: 323796 - RNA, 19 nt, Artificial Sequence
  Description of Artificial Sequence: Synthetic oligonucleotide
agggcggggacuaucauau

SEQ ID NO: 323797 - RNA, 19 nt, Artificial Sequence
  Description of Artificial Sequence: Synthetic oligonucleotide
aucaugaguggaugauaaa

SEQ ID NO: 323798 - RNA, 19 nt, Artificial Sequence
  Description of Artificial Sequence: Synthetic oligonucleotide
ggaaucgcugacuguugag

SEQ ID NO: 323799 - RNA, 19 nt, Artificial Sequence
  Description of Artificial Sequence: Synthetic oligonucleotide
cuucagaaugaaggacccc

SEQ ID NO: 323800 - RNA, 19 nt, Artificial Sequence
  Description of Artificial Sequence: Synthetic oligonucleotide
accugucuccgaggaaagc

SEQ ID NO: 323801 - RNA, 19 nt, Artificial Sequence
  Description of Artificial Sequence: Synthetic oligonucleotide
gaccugagccccuguacuc

SEQ ID NO: 323802 - RNA, 19 nt, Artificial Sequence
  Description of Artificial Sequence: Synthetic oligonucleotide
gacuguugcauugccaacu

SEQ ID NO: 323803 - RNA, 19 nt, Artificial Sequence
  Description of Artificial Sequence: Synthetic oligonucleotide
aucgcugacuguugagaaa

SEQ ID NO: 323804 - RNA, 19 nt, Artificial Sequence
  Description of Artificial Sequence: Synthetic oligonucleotide
guauaggccucuagaggug

SEQ ID NO: 323805 - RNA, 19 nt, Artificial Sequence
  Description of Artificial Sequence: Synthetic oligonucleotide
ggacaauucccuucugaga

SEQ ID NO: 323806 - RNA, 19 nt, Artificial Sequence
  Description of Artificial Sequence: Synthetic oligonucleotide
agagccacacugacuagca

SEQ ID NO: 323807 - RNA, 19 nt, Artificial Sequence
  Description of Artificial Sequence: Synthetic oligonucleotide
ccaaccguaaggugacggg

SEQ ID NO: 323808 - RNA, 19 nt, Artificial Sequence
  Description of Artificial Sequence: Synthetic oligonucleotide
ucuccgaggaaagccugac

SEQ ID NO: 323809 - RNA, 19 nt, Artificial Sequence
  Description of Artificial Sequence: Synthetic oligonucleotide
agcuggauucaaugccacu

SEQ ID NO: 323810 - RNA, 19 nt, Artificial Sequence
  Description of Artificial Sequence: Synthetic oligonucleotide
ccugucuccgaggaaagcc

SEQ ID NO: 323811 - RNA, 19 nt, Artificial Sequence
  Description of Artificial Sequence: Synthetic oligonucleotide
guggaugauaaagugugua

SEQ ID NO: 323812 - RNA, 19 nt, Artificial Sequence
  Description of Artificial Sequence: Synthetic oligonucleotide
agaaguaguuugagcagau

SEQ ID NO: 323813 - RNA, 19 nt, Artificial Sequence
  Description of Artificial Sequence: Synthetic oligonucleotide
guugaggcacauggacggg

SEQ ID NO: 323814 - RNA, 19 nt, Artificial Sequence
  Description of Artificial Sequence: Synthetic oligonucleotide
cuuauguccucuuccaguu

SEQ ID NO: 323815 - RNA, 19 nt, Artificial Sequence
  Description of Artificial Sequence: Synthetic oligonucleotide
uugauccgugcaccacucu

SEQ ID NO: 323816 - RNA, 19 nt, Artificial Sequence
  Description of Artificial Sequence: Synthetic oligonucleotide
agccugacauugauaaggu

SEQ ID NO: 323817 - RNA, 19 nt, Artificial Sequence
  Description of Artificial Sequence: Synthetic oligonucleotide
agaugacuggagaacucga

SEQ ID NO: 323818 - RNA, 19 nt, Artificial Sequence
  Description of Artificial Sequence: Synthetic oligonucleotide
guaacacccuagagcuacg

SEQ ID NO: 323819 - RNA, 19 nt, Artificial Sequence
  Description of Artificial Sequence: Synthetic oligonucleotide
augcgccacauaaucaaca

SEQ ID NO: 323820 - RNA, 19 nt, Artificial Sequence
  Description of Artificial Sequence: Synthetic oligonucleotide
guaguuacagggagcugga

SEQ ID NO: 323821 - RNA, 19 nt, Artificial Sequence
  Description of Artificial Sequence: Synthetic oligonucleotide
ugucgaggguuuucuugau

SEQ ID NO: 323822 - RNA, 19 nt, Artificial Sequence
  Description of Artificial Sequence: Synthetic oligonucleotide
ucgggccagccaaagugau

SEQ ID NO: 323823 - RNA, 19 nt, Artificial Sequence
  Description of Artificial Sequence: Synthetic oligonucleotide
gagcuggauucaaugccac

SEQ ID NO: 323824 - RNA, 19 nt, Artificial Sequence
  Description of Artificial Sequence: Synthetic oligonucleotide
ccacucuuacauuuccaug

SEQ ID NO: 323825 - RNA, 19 nt, Artificial Sequence
  Description of Artificial Sequence: Synthetic oligonucleotide
gaaagcucgcacugucgcu

SEQ ID NO: 323826 - RNA, 19 nt, Artificial Sequence
  Description of Artificial Sequence: Synthetic oligonucleotide
auccgguguugccaugggu

SEQ ID NO: 323827 - RNA, 19 nt, Artificial Sequence
  Description of Artificial Sequence: Synthetic oligonucleotide
accgguguccaugucuagu

SEQ ID NO: 323828 - RNA, 19 nt, Artificial Sequence
  Description of Artificial Sequence: Synthetic oligonucleotide
caaccguaaggugacggga

SEQ ID NO: 323829 - RNA, 19 nt, Artificial Sequence
  Description of Artificial Sequence: Synthetic oligonucleotide
ccauuccuuauguucagca

SEQ ID NO: 323830 - RNA, 19 nt, Artificial Sequence
  Description of Artificial Sequence: Synthetic oligonucleotide
acuggaggcgcgagucgac

SEQ ID NO: 323831 - RNA, 19 nt, Artificial Sequence
  Description of Artificial Sequence: Synthetic oligonucleotide
cuguuacccuggugccugg

SEQ ID NO: 323832 - RNA, 19 nt, Artificial Sequence
  Description of Artificial Sequence: Synthetic oligonucleotide
ggauggucacgcccuucgg

SEQ ID NO: 323833 - RNA, 19 nt, Artificial Sequence
  Description of Artificial Sequence: Synthetic oligonucleotide
ccaccaaccguaaggugac

SEQ ID NO: 323834 - RNA, 19 nt, Artificial Sequence
  Description of Artificial Sequence: Synthetic oligonucleotide
acuuaagacugcacuuuua

SEQ ID NO: 323835 - RNA, 19 nt, Artificial Sequence
  Description of Artificial Sequence: Synthetic oligonucleotide
gaggcgcgagucgacugag

SEQ ID NO: 323836 - RNA, 19 nt, Artificial Sequence
  Description of Artificial Sequence: Synthetic oligonucleotide
ccgauuaugcagccaauca

SEQ ID NO: 323837 - RNA, 19 nt, Artificial Sequence
  Description of Artificial Sequence: Synthetic oligonucleotide
ggcaacuaggcaauagaaa

SEQ ID NO: 323838 - RNA, 19 nt, Artificial Sequence
  Description of Artificial Sequence: Synthetic oligonucleotide
ugaaugguauaggccucua

SEQ ID NO: 323839 - RNA, 19 nt, Artificial Sequence
  Description of Artificial Sequence: Synthetic oligonucleotide
gacgggaggucuacuggca

SEQ ID NO: 323840 - RNA, 19 nt, Artificial Sequence
  Description of Artificial Sequence: Synthetic oligonucleotide
aaccccugugaaaacccua

SEQ ID NO: 323841 - RNA, 19 nt, Artificial Sequence
  Description of Artificial Sequence: Synthetic oligonucleotide
gauugcccgcucaguugag

SEQ ID NO: 323842 - RNA, 19 nt, Artificial Sequence
  Description of Artificial Sequence: Synthetic oligonucleotide
gagcuacgaggaaaggaaa

SEQ ID NO: 323843 - RNA, 19 nt, Artificial Sequence
  Description of Artificial Sequence: Synthetic oligonucleotide
ugccgaucaguagauccuu

SEQ ID NO: 323844 - RNA, 19 nt, Artificial Sequence
  Description of Artificial Sequence: Synthetic oligonucleotide
auugcccgcucaguugagu

SEQ ID NO: 323845 - RNA, 19 nt, Artificial Sequence
  Description of Artificial Sequence: Synthetic oligonucleotide
gcgcgagucgacugagggg

SEQ ID NO: 323846 - RNA, 19 nt, Artificial Sequence
  Description of Artificial Sequence: Synthetic oligonucleotide
acaauaggggcgggcggga

SEQ ID NO: 323847 - RNA, 19 nt, Artificial Sequence
  Description of Artificial Sequence: Synthetic oligonucleotide
ccuuauguucagcaggcaa

SEQ ID NO: 323848 - RNA, 19 nt, Artificial Sequence
  Description of Artificial Sequence: Synthetic oligonucleotide
aaguaacacccuagagcua

SEQ ID NO: 323849 - RNA, 19 nt, Artificial Sequence
  Description of Artificial Sequence: Synthetic oligonucleotide
aucugucgaggguuuucuu

SEQ ID NO: 323850 - RNA, 19 nt, Artificial Sequence
  Description of Artificial Sequence: Synthetic oligonucleotide
cacaccgguguccaugucu

SEQ ID NO: 323851 - RNA, 19 nt, Artificial Sequence
  Description of Artificial Sequence: Synthetic oligonucleotide
gucgggccagccaaaguga

SEQ ID NO: 323852 - RNA, 19 nt, Artificial Sequence
  Description of Artificial Sequence: Synthetic oligonucleotide
augaaccugcacugcucua

SEQ ID NO: 323853 - RNA, 19 nt, Artificial Sequence
  Description of Artificial Sequence: Synthetic oligonucleotide
cugccgaucaguagauccu

SEQ ID NO: 323854 - RNA, 19 nt, Artificial Sequence
  Description of Artificial Sequence: Synthetic oligonucleotide
uguuacccuggugccuggu

SEQ ID NO: 323855 - RNA, 19 nt, Artificial Sequence
  Description of Artificial Sequence: Synthetic oligonucleotide
ggguccuccccucugaggu

SEQ ID NO: 323856 - RNA, 19 nt, Artificial Sequence
  Description of Artificial Sequence: Synthetic oligonucleotide
gguagggcggggacuauca

SEQ ID NO: 323857 - RNA, 19 nt, Artificial Sequence
  Description of Artificial Sequence: Synthetic oligonucleotide
cuagggacccuggcagcug

SEQ ID NO: 323858 - RNA, 19 nt, Artificial Sequence
  Description of Artificial Sequence: Synthetic oligonucleotide
gcauuagucgggccagcca

SEQ ID NO: 323859 - RNA, 19 nt, Artificial Sequence
  Description of Artificial Sequence: Synthetic oligonucleotide
gcuacgaggaaaggaaacu

SEQ ID NO: 323860 - RNA, 19 nt, Artificial Sequence
  Description of Artificial Sequence: Synthetic oligonucleotide
gacuagcaggaaccaccaa

SEQ ID NO: 323861 - RNA, 19 nt, Artificial Sequence
  Description of Artificial Sequence: Synthetic oligonucleotide
augaauggauggaguggaa

SEQ ID NO: 323862 - RNA, 19 nt, Artificial Sequence
  Description of Artificial Sequence: Synthetic oligonucleotide
cccugacgcccgauuaugc

SEQ ID NO: 323863 - RNA, 19 nt, Artificial Sequence
  Description of Artificial Sequence: Synthetic oligonucleotide
cgauuaugcagccaaucaa

SEQ ID NO: 323864 - RNA, 19 nt, Artificial Sequence
  Description of Artificial Sequence: Synthetic oligonucleotide
ggaggcgcgagucgacuga

SEQ ID NO: 323865 - RNA, 19 nt, Artificial Sequence
  Description of Artificial Sequence: Synthetic oligonucleotide
cacugacuagcaggaacca

SEQ ID NO: 323866 - RNA, 19 nt, Artificial Sequence
  Description of Artificial Sequence: Synthetic oligonucleotide
guaccuguccugaccaccu

SEQ ID NO: 323867 - RNA, 19 nt, Artificial Sequence
  Description of Artificial Sequence: Synthetic oligonucleotide
caccaaccguaaggugacg

SEQ ID NO: 323868 - RNA, 19 nt, Artificial Sequence
  Description of Artificial Sequence: Synthetic oligonucleotide
acccagugauggugaccug

SEQ ID NO: 323869 - RNA, 19 nt, Artificial Sequence
  Description of Artificial Sequence: Synthetic oligonucleotide
caucugucgaggguuuucu

SEQ ID NO: 323870 - RNA, 19 nt, Artificial Sequence
  Description of Artificial Sequence: Synthetic oligonucleotide
ccugacgcccgauuaugca

SEQ ID NO: 323871 - RNA, 19 nt, Artificial Sequence
  Description of Artificial Sequence: Synthetic oligonucleotide
gcgccacauaaucaacaga

SEQ ID NO: 323872 - RNA, 19 nt, Artificial Sequence
  Description of Artificial Sequence: Synthetic oligonucleotide
gccugauggugagagugac

SEQ ID NO: 323873 - RNA, 19 nt, Artificial Sequence
  Description of Artificial Sequence: Synthetic oligonucleotide
caacagauagauggggcuu

SEQ ID NO: 323874 - RNA, 19 nt, Artificial Sequence
  Description of Artificial Sequence: Synthetic oligonucleotide
ggccccgcuaggcgggcgg

SEQ ID NO: 323875 - RNA, 19 nt, Artificial Sequence
  Description of Artificial Sequence: Synthetic oligonucleotide
cgaucaguagauccuucca

SEQ ID NO: 323876 - RNA, 19 nt, Artificial Sequence
  Description of Artificial Sequence: Synthetic oligonucleotide
ggugaccugccgaucagua

SEQ ID NO: 323877 - RNA, 19 nt, Artificial Sequence
  Description of Artificial Sequence: Synthetic oligonucleotide
caugcauaaguagccugau

SEQ ID NO: 323878 - RNA, 19 nt, Artificial Sequence
  Description of Artificial Sequence: Synthetic oligonucleotide
cgcgagucgacugagggga

SEQ ID NO: 323879 - RNA, 19 nt, Artificial Sequence
  Description of Artificial Sequence: Synthetic oligonucleotide
gcccugacgcccgauuaug

SEQ ID NO: 323880 - RNA, 19 nt, Artificial Sequence
  Description of Artificial Sequence: Synthetic oligonucleotide
caccuucaaucacaccggu

SEQ ID NO: 323881 - RNA, 19 nt, Artificial Sequence
  Description of Artificial Sequence: Synthetic oligonucleotide
gccaaaacuggaggcgcga

SEQ ID NO: 323882 - RNA, 19 nt, Artificial Sequence
  Description of Artificial Sequence: Synthetic oligonucleotide
cguaaggugacgggagguc

SEQ ID NO: 323883 - RNA, 19 nt, Artificial Sequence
  Description of Artificial Sequence: Synthetic oligonucleotide
gucucucagguggcaaugu

SEQ ID NO: 323884 - RNA, 19 nt, Artificial Sequence
  Description of Artificial Sequence: Synthetic oligonucleotide
cgcucaguugaguugggaa

SEQ ID NO: 323885 - RNA, 19 nt, Artificial Sequence
  Description of Artificial Sequence: Synthetic oligonucleotide
gaccugccgaucaguagau

SEQ ID NO: 323886 - RNA, 19 nt, Artificial Sequence
  Description of Artificial Sequence: Synthetic oligonucleotide
cacugucgcugccugugcu

SEQ ID NO: 323887 - RNA, 19 nt, Artificial Sequence
  Description of Artificial Sequence: Synthetic oligonucleotide
gcaauguaacccauuucuu

SEQ ID NO: 323888 - RNA, 19 nt, Artificial Sequence
  Description of Artificial Sequence: Synthetic oligonucleotide
cggaacaauaggggcgggc

SEQ ID NO: 323889 - RNA, 19 nt, Artificial Sequence
  Description of Artificial Sequence: Synthetic oligonucleotide
ggggcuuucuuaagccuua

SEQ ID NO: 323890 - RNA, 19 nt, Artificial Sequence
  Description of Artificial Sequence: Synthetic oligonucleotide
ccuggaaucgcugacuguu

SEQ ID NO: 323891 - RNA, 19 nt, Artificial Sequence
  Description of Artificial Sequence: Synthetic oligonucleotide
gcggaaugccagcaauagu

SEQ ID NO: 323892 - RNA, 19 nt, Artificial Sequence
  Description of Artificial Sequence: Synthetic oligonucleotide
gccgaucaguagauccuuc

SEQ ID NO: 323893 - RNA, 19 nt, Artificial Sequence
  Description of Artificial Sequence: Synthetic oligonucleotide
guagggcggggacuaucau

SEQ ID NO: 323894 - RNA, 19 nt, Artificial Sequence
  Description of Artificial Sequence: Synthetic oligonucleotide
cccugaccaauuaccaagu

SEQ ID NO: 323895 - RNA, 19 nt, Artificial Sequence
  Description of Artificial Sequence: Synthetic oligonucleotide
gcggaacaauaggggcggg

SEQ ID NO: 323896 - RNA, 19 nt, Artificial Sequence
  Description of Artificial Sequence: Synthetic oligonucleotide
caauaggggcgggcgggaa

SEQ ID NO: 323897 - RNA, 19 nt, Artificial Sequence
  Description of Artificial Sequence: Synthetic oligonucleotide
cuggaggcgcgagucgacu

SEQ ID NO: 323898 - RNA, 19 nt, Artificial Sequence
  Description of Artificial Sequence: Synthetic oligonucleotide
gcgcccugacgcccgauua

SEQ ID NO: 323899 - RNA, 19 nt, Artificial Sequence
  Description of Artificial Sequence: Synthetic oligonucleotide
ccgguacgggauggucacg

SEQ ID NO: 323900 - RNA, 19 nt, Artificial Sequence
  Description of Artificial Sequence: Synthetic oligonucleotide
ggcuguggaauggcauacu

SEQ ID NO: 323901 - RNA, 19 nt, Artificial Sequence
  Description of Artificial Sequence: Synthetic oligonucleotide
cggggacuaucauauugua

SEQ ID NO: 323902 - RNA, 19 nt, Artificial Sequence
  Description of Artificial Sequence: Synthetic oligonucleotide
gcgcaucuucuuaacggau

SEQ ID NO: 323903 - RNA, 19 nt, Artificial Sequence
  Description of Artificial Sequence: Synthetic oligonucleotide
cgcuaggcgggcggaggag

SEQ ID NO: 323904 - RNA, 19 nt, Artificial Sequence
  Description of Artificial Sequence: Synthetic oligonucleotide
ccguaaggugacgggaggu

SEQ ID NO: 323905 - RNA, 19 nt, Artificial Sequence
  Description of Artificial Sequence: Synthetic oligonucleotide
gggccccgcuaggcgggcg

SEQ ID NO: 323906 - RNA, 19 nt, Artificial Sequence
  Description of Artificial Sequence: Synthetic oligonucleotide
ccgcucaguugaguuggga

SEQ ID NO: 323907 - RNA, 19 nt, Artificial Sequence
  Description of Artificial Sequence: Synthetic oligonucleotide
ccaugccaccugucuccga

SEQ ID NO: 323908 - RNA, 19 nt, Artificial Sequence
  Description of Artificial Sequence: Synthetic oligonucleotide
gccugguagggcggggacu

SEQ ID NO: 323909 - RNA, 19 nt, Artificial Sequence
  Description of Artificial Sequence: Synthetic oligonucleotide
gcgagucgacugaggggaa

SEQ ID NO: 323910 - RNA, 19 nt, Artificial Sequence
  Description of Artificial Sequence: Synthetic oligonucleotide
cguuuacuguuuacacauu

SEQ ID NO: 323911 - RNA, 19 nt, Artificial Sequence
  Description of Artificial Sequence: Synthetic oligonucleotide
ccccgcuaggcgggcggag

SEQ ID NO: 323912 - RNA, 19 nt, Artificial Sequence
  Description of Artificial Sequence: Synthetic oligonucleotide
cgagucgacugaggggaaa

SEQ ID NO: 323913 - RNA, 19 nt, Artificial Sequence
  Description of Artificial Sequence: Synthetic oligonucleotide
gccccgcuaggcgggcgga

SEQ ID NO: 323914 - RNA, 19 nt, Artificial Sequence
  Description of Artificial Sequence: Synthetic oligonucleotide
gggcggggacuaucauauu

SEQ ID NO: 323915 - RNA, 19 nt, Artificial Sequence
  Description of Artificial Sequence: Synthetic oligonucleotide
cgcccugacgcccgauuau

SEQ ID NO: 323916 - RNA, 19 nt, Artificial Sequence
  Description of Artificial Sequence: Synthetic oligonucleotide
aacugcgacacacagauac

SEQ ID NO: 323917 - RNA, 19 nt, Artificial Sequence
  Description of Artificial Sequence: Synthetic oligonucleotide
gaugccucgggucauaagg

SEQ ID NO: 323918 - RNA, 19 nt, Artificial Sequence
  Description of Artificial Sequence: Synthetic oligonucleotide
aagaugguaaagucccggc

SEQ ID NO: 323919 - RNA, 19 nt, Artificial Sequence
  Description of Artificial Sequence: Synthetic oligonucleotide
aagacacccacugaugugc

SEQ ID NO: 323920 - RNA, 19 nt, Artificial Sequence
  Description of Artificial Sequence: Synthetic oligonucleotide
ucaacugcgacacacagau

SEQ ID NO: 323921 - RNA, 19 nt, Artificial Sequence
  Description of Artificial Sequence: Synthetic oligonucleotide
agugggugugguuauacgc

SEQ ID NO: 323922 - RNA, 19 nt, Artificial Sequence
  Description of Artificial Sequence: Synthetic oligonucleotide
agucuaaucugcuacagcu

SEQ ID NO: 323923 - RNA, 19 nt, Artificial Sequence
  Description of Artificial Sequence: Synthetic oligonucleotide
cuagauccugaauugagcc

SEQ ID NO: 323924 - RNA, 19 nt, Artificial Sequence
  Description of Artificial Sequence: Synthetic oligonucleotide
uacgacgcgauucuguugc

SEQ ID NO: 323925 - RNA, 19 nt, Artificial Sequence
  Description of Artificial Sequence: Synthetic oligonucleotide
uguugcgacccuuacgacg

SEQ ID NO: 323926 - RNA, 19 nt, Artificial Sequence
  Description of Artificial Sequence: Synthetic oligonucleotide
uggaguuggucaaaauggg

SEQ ID NO: 323927 - RNA, 19 nt, Artificial Sequence
  Description of Artificial Sequence: Synthetic oligonucleotide
cucuauugguccaaggacc

SEQ ID NO: 323928 - RNA, 19 nt, Artificial Sequence
  Description of Artificial Sequence: Synthetic oligonucleotide
gucaaaaugggugucaccc

SEQ ID NO: 323929 - RNA, 19 nt, Artificial Sequence
  Description of Artificial Sequence: Synthetic oligonucleotide
ucuaaucugcuacagcuuc

SEQ ID NO: 323930 - RNA, 19 nt, Artificial Sequence
  Description of Artificial Sequence: Synthetic oligonucleotide
uguucggagacucggauuc

SEQ ID NO: 323931 - RNA, 19 nt, Artificial Sequence
  Description of Artificial Sequence: Synthetic oligonucleotide
uguacacgcagacagcaga

SEQ ID NO: 323932 - RNA, 19 nt, Artificial Sequence
  Description of Artificial Sequence: Synthetic oligonucleotide
acaccuaagaccuuccgcu

SEQ ID NO: 323933 - RNA, 19 nt, Artificial Sequence
  Description of Artificial Sequence: Synthetic oligonucleotide
uugcauuacuuuaguacag

SEQ ID NO: 323934 - RNA, 19 nt, Artificial Sequence
  Description of Artificial Sequence: Synthetic oligonucleotide
cuguacggcacucagcacg

SEQ ID NO: 323935 - RNA, 19 nt, Artificial Sequence
  Description of Artificial Sequence: Synthetic oligonucleotide
ucagaguuaggucggcugc

SEQ ID NO: 323936 - RNA, 19 nt, Artificial Sequence
  Description of Artificial Sequence: Synthetic oligonucleotide
aaagucccgguaccagagc

SEQ ID NO: 323937 - RNA, 19 nt, Artificial Sequence
  Description of Artificial Sequence: Synthetic oligonucleotide
ucaugcgucccguugcugg

SEQ ID NO: 323938 - RNA, 19 nt, Artificial Sequence
  Description of Artificial Sequence: Synthetic oligonucleotide
augaagagaacaucguagu

SEQ ID NO: 323939 - RNA, 19 nt, Artificial Sequence
  Description of Artificial Sequence: Synthetic oligonucleotide
agucguucggccuguacgg

SEQ ID NO: 323940 - RNA, 19 nt, Artificial Sequence
  Description of Artificial Sequence: Synthetic oligonucleotide
ucuauugguccaaggaccu

SEQ ID NO: 323941 - RNA, 19 nt, Artificial Sequence
  Description of Artificial Sequence: Synthetic oligonucleotide
gaguuggucaaaaugggug

SEQ ID NO: 323942 - RNA, 19 nt, Artificial Sequence
  Description of Artificial Sequence: Synthetic oligonucleotide
accuaagaccuuccgcucc

SEQ ID NO: 323943 - RNA, 19 nt, Artificial Sequence
  Description of Artificial Sequence: Synthetic oligonucleotide
agcuguuaucugcuggggc

SEQ ID NO: 323944 - RNA, 19 nt, Artificial Sequence
  Description of Artificial Sequence: Synthetic oligonucleotide
aguccuggcgccucagacc

SEQ ID NO: 323945 - RNA, 19 nt, Artificial Sequence
  Description of Artificial Sequence: Synthetic oligonucleotide
ccugaauugagccuggacc

SEQ ID NO: 323946 - RNA, 19 nt, Artificial Sequence
  Description of Artificial Sequence: Synthetic oligonucleotide
cuugugagcaaacgguccc

SEQ ID NO: 323947 - RNA, 19 nt, Artificial Sequence
  Description of Artificial Sequence: Synthetic oligonucleotide
ugagacuacauucgcgggu

SEQ ID NO: 323948 - RNA, 19 nt, Artificial Sequence
  Description of Artificial Sequence: Synthetic oligonucleotide
cuacccuuuggccagggcc

SEQ ID NO: 323949 - RNA, 19 nt, Artificial Sequence
  Description of Artificial Sequence: Synthetic oligonucleotide
caaacggucccaagaaggc

SEQ ID NO: 323950 - RNA, 19 nt, Artificial Sequence
  Description of Artificial Sequence: Synthetic oligonucleotide
cacgucuguaccaaugaag

SEQ ID NO: 323951 - RNA, 19 nt, Artificial Sequence
  Description of Artificial Sequence: Synthetic oligonucleotide
aguuugccccuccacugcc

SEQ ID NO: 323952 - RNA, 19 nt, Artificial Sequence
  Description of Artificial Sequence: Synthetic oligonucleotide
agcgaugcaaugcaaucug

SEQ ID NO: 323953 - RNA, 19 nt, Artificial Sequence
  Description of Artificial Sequence: Synthetic oligonucleotide
ugcuacgcggucugcagcg

SEQ ID NO: 323954 - RNA, 19 nt, Artificial Sequence
  Description of Artificial Sequence: Synthetic oligonucleotide
acgauggaagguccacucc

SEQ ID NO: 323955 - RNA, 19 nt, Artificial Sequence
  Description of Artificial Sequence: Synthetic oligonucleotide
uuccgagcaaacuggauaa

SEQ ID NO: 323956 - RNA, 19 nt, Artificial Sequence
  Description of Artificial Sequence: Synthetic oligonucleotide
ggugugguuauacgcaugg

SEQ ID NO: 323957 - RNA, 19 nt, Artificial Sequence
  Description of Artificial Sequence: Synthetic oligonucleotide
guacugagcauaccagccg

SEQ ID NO: 323958 - RNA, 19 nt, Artificial Sequence
  Description of Artificial Sequence: Synthetic oligonucleotide
ugugccuguagcgagcgag

SEQ ID NO: 323959 - RNA, 19 nt, Artificial Sequence
  Description of Artificial Sequence: Synthetic oligonucleotide
acucggugauccuauguag

SEQ ID NO: 323960 - RNA, 19 nt, Artificial Sequence
  Description of Artificial Sequence: Synthetic oligonucleotide
aagucccgguaccagagcu

SEQ ID NO: 323961 - RNA, 19 nt, Artificial Sequence
  Description of Artificial Sequence: Synthetic oligonucleotide
cagucguucggccuguacg

SEQ ID NO: 323962 - RNA, 19 nt, Artificial Sequence
  Description of Artificial Sequence: Synthetic oligonucleotide
cugaauugagccuggacca

SEQ ID NO: 323963 - RNA, 19 nt, Artificial Sequence
  Description of Artificial Sequence: Synthetic oligonucleotide
gaagguaccaaaggucuug

SEQ ID NO: 323964 - RNA, 19 nt, Artificial Sequence
  Description of Artificial Sequence: Synthetic oligonucleotide
aguuguagaaagucccggu

SEQ ID NO: 323965 - RNA, 19 nt, Artificial Sequence
  Description of Artificial Sequence: Synthetic oligonucleotide
ugcacuacguggcccacgc

SEQ ID NO: 323966 - RNA, 19 nt, Artificial Sequence
  Description of Artificial Sequence: Synthetic oligonucleotide
uauaaguuaggugucucua

SEQ ID NO: 323967 - RNA, 19 nt, Artificial Sequence
  Description of Artificial Sequence: Synthetic oligonucleotide
ugugaaaagccuugcucaa

SEQ ID NO: 323968 - RNA, 19 nt, Artificial Sequence
  Description of Artificial Sequence: Synthetic oligonucleotide
agaagucccucagaguuag

SEQ ID NO: 323969 - RNA, 19 nt, Artificial Sequence
  Description of Artificial Sequence: Synthetic oligonucleotide
auacacgccagaguccugg

SEQ ID NO: 323970 - RNA, 19 nt, Artificial Sequence
  Description of Artificial Sequence: Synthetic oligonucleotide
agugucauauccagccugg

SEQ ID NO: 323971 - RNA, 19 nt, Artificial Sequence
  Description of Artificial Sequence: Synthetic oligonucleotide
cacaccuaagaccuuccgc

SEQ ID NO: 323972 - RNA, 19 nt, Artificial Sequence
  Description of Artificial Sequence: Synthetic oligonucleotide
uguacggcacucagcacgu

SEQ ID NO: 323973 - RNA, 19 nt, Artificial Sequence
  Description of Artificial Sequence: Synthetic oligonucleotide
ugucauauccagccugguc

SEQ ID NO: 323974 - RNA, 19 nt, Artificial Sequence
  Description of Artificial Sequence: Synthetic oligonucleotide
guuauacgcauggagcagc

SEQ ID NO: 323975 - RNA, 19 nt, Artificial Sequence
  Description of Artificial Sequence: Synthetic oligonucleotide
uuauacgcauggagcagcu

SEQ ID NO: 323976 - RNA, 19 nt, Artificial Sequence
  Description of Artificial Sequence: Synthetic oligonucleotide
uacggcacucagcacgugc

SEQ ID NO: 323977 - RNA, 19 nt, Artificial Sequence
  Description of Artificial Sequence: Synthetic oligonucleotide
cacaugugccuguagcgag

SEQ ID NO: 323978 - RNA, 19 nt, Artificial Sequence
  Description of Artificial Sequence: Synthetic oligonucleotide
cugagacuacauucgcggg

SEQ ID NO: 323979 - RNA, 19 nt, Artificial Sequence
  Description of Artificial Sequence: Synthetic oligonucleotide
acgucuguaccaaugaaga

SEQ ID NO: 323980 - RNA, 19 nt, Artificial Sequence
  Description of Artificial Sequence: Synthetic oligonucleotide
aggacaaaagaaacacguc

SEQ ID NO: 323981 - RNA, 19 nt, Artificial Sequence
  Description of Artificial Sequence: Synthetic oligonucleotide
ucuguucggagacucggau

SEQ ID NO: 323982 - RNA, 19 nt, Artificial Sequence
  Description of Artificial Sequence: Synthetic oligonucleotide
agaguuaggucggcugccc

SEQ ID NO: 323983 - RNA, 19 nt, Artificial Sequence
  Description of Artificial Sequence: Synthetic oligonucleotide
cacgacccugguaagacac

SEQ ID NO: 323984 - RNA, 19 nt, Artificial Sequence
  Description of Artificial Sequence: Synthetic oligonucleotide
gacgcgauucuguugccac

SEQ ID NO: 323985 - RNA, 19 nt, Artificial Sequence
  Description of Artificial Sequence: Synthetic oligonucleotide
agcgauuugcgugaaggug

SEQ ID NO: 323986 - RNA, 19 nt, Artificial Sequence
  Description of Artificial Sequence: Synthetic oligonucleotide
uuuugucgucaucaggguu

SEQ ID NO: 323987 - RNA, 19 nt, Artificial Sequence
  Description of Artificial Sequence: Synthetic oligonucleotide
ucgcggguuaucuuguuaa

SEQ ID NO: 323988 - RNA, 19 nt, Artificial Sequence
  Description of Artificial Sequence: Synthetic oligonucleotide
uggucuacaccggagcccc

SEQ ID NO: 323989 - RNA, 19 nt, Artificial Sequence
  Description of Artificial Sequence: Synthetic oligonucleotide
acagucuaaucugcuacag

SEQ ID NO: 323990 - RNA, 19 nt, Artificial Sequence
  Description of Artificial Sequence: Synthetic oligonucleotide
gcgagguccgcucagcucg

SEQ ID NO: 323991 - RNA, 19 nt, Artificial Sequence
  Description of Artificial Sequence: Synthetic oligonucleotide
acuacauucgcggguuauc

SEQ ID NO: 323992 - RNA, 19 nt, Artificial Sequence
  Description of Artificial Sequence: Synthetic oligonucleotide
caguuguagaaagucccgg

SEQ ID NO: 323993 - RNA, 19 nt, Artificial Sequence
  Description of Artificial Sequence: Synthetic oligonucleotide
gcagcgauuugcgugaagg

SEQ ID NO: 323994 - RNA, 19 nt, Artificial Sequence
  Description of Artificial Sequence: Synthetic oligonucleotide
aggucggcugcccuugggg

SEQ ID NO: 323995 - RNA, 19 nt, Artificial Sequence
  Description of Artificial Sequence: Synthetic oligonucleotide
cagcgugagaggaaucccc

SEQ ID NO: 323996 - RNA, 19 nt, Artificial Sequence
  Description of Artificial Sequence: Synthetic oligonucleotide
aaacggucccaagaaggcu

SEQ ID NO: 323997 - RNA, 19 nt, Artificial Sequence
  Description of Artificial Sequence: Synthetic oligonucleotide
ugugcccacgucuguacca

SEQ ID NO: 323998 - RNA, 19 nt, Artificial Sequence
  Description of Artificial Sequence: Synthetic oligonucleotide
gacacgacccugguaagac

SEQ ID NO: 323999 - RNA, 19 nt, Artificial Sequence
  Description of Artificial Sequence: Synthetic oligonucleotide
uucccgccauuccacgggg

SEQ ID NO: 324000 - RNA, 19 nt, Artificial Sequence
  Description of Artificial Sequence: Synthetic oligonucleotide
guaagacacccacugaugu

SEQ ID NO: 324001 - RNA, 19 nt, Artificial Sequence
  Description of Artificial Sequence: Synthetic oligonucleotide
uuacgacgcgauucuguug

SEQ ID NO: 324002 - RNA, 19 nt, Artificial Sequence
  Description of Artificial Sequence: Synthetic oligonucleotide
cacgauggaagguccacuc

SEQ ID NO: 324003 - RNA, 19 nt, Artificial Sequence
  Description of Artificial Sequence: Synthetic oligonucleotide
acaugugccuguagcgagc

SEQ ID NO: 324004 - RNA, 19 nt, Artificial Sequence
  Description of Artificial Sequence: Synthetic oligonucleotide
caacagcgcagcgugagag

SEQ ID NO: 324005 - RNA, 19 nt, Artificial Sequence
  Description of Artificial Sequence: Synthetic oligonucleotide
cgauguauaaguuaggugu

SEQ ID NO: 324006 - RNA, 19 nt, Artificial Sequence
  Description of Artificial Sequence: Synthetic oligonucleotide
uuaggucggcugcccuugg

SEQ ID NO: 324007 - RNA, 19 nt, Artificial Sequence
  Description of Artificial Sequence: Synthetic oligonucleotide
acccuuacgacgcgauucu

SEQ ID NO: 324008 - RNA, 19 nt, Artificial Sequence
  Description of Artificial Sequence: Synthetic oligonucleotide
cacauucgcagggaguuug

SEQ ID NO: 324009 - RNA, 19 nt, Artificial Sequence
  Description of Artificial Sequence: Synthetic oligonucleotide
gacgcaggggcugugaaaa

SEQ ID NO: 324010 - RNA, 19 nt, Artificial Sequence
  Description of Artificial Sequence: Synthetic oligonucleotide
ugcacuccgugccaauguc

SEQ ID NO: 324011 - RNA, 19 nt, Artificial Sequence
  Description of Artificial Sequence: Synthetic oligonucleotide
agagaacaucguaguggcc

SEQ ID NO: 324012 - RNA, 19 nt, Artificial Sequence
  Description of Artificial Sequence: Synthetic oligonucleotide
caagagaaugcuugcccca

SEQ ID NO: 324013 - RNA, 19 nt, Artificial Sequence
  Description of Artificial Sequence: Synthetic oligonucleotide
ugaauugagccuggaccac

SEQ ID NO: 324014 - RNA, 19 nt, Artificial Sequence
  Description of Artificial Sequence: Synthetic oligonucleotide
ugggugugguuauacgcau

SEQ ID NO: 324015 - RNA, 19 nt, Artificial Sequence
  Description of Artificial Sequence: Synthetic oligonucleotide
uggggccauuccaacguca

SEQ ID NO: 324016 - RNA, 19 nt, Artificial Sequence
  Description of Artificial Sequence: Synthetic oligonucleotide
cucggugauccuauguaga

SEQ ID NO: 324017 - RNA, 19 nt, Artificial Sequence
  Description of Artificial Sequence: Synthetic oligonucleotide
agacucacggaagaagaaa

SEQ ID NO: 324018 - RNA, 19 nt, Artificial Sequence
  Description of Artificial Sequence: Synthetic oligonucleotide
agcccgaugccucggguca

SEQ ID NO: 324019 - RNA, 19 nt, Artificial Sequence
  Description of Artificial Sequence: Synthetic oligonucleotide
ucguucggccuguacggca

SEQ ID NO: 324020 - RNA, 19 nt, Artificial Sequence
  Description of Artificial Sequence: Synthetic oligonucleotide
gccuguacggcacucagca

SEQ ID NO: 324021 - RNA, 19 nt, Artificial Sequence
  Description of Artificial Sequence: Synthetic oligonucleotide
uucggagacucggauucug

SEQ ID NO: 324022 - RNA, 19 nt, Artificial Sequence
  Description of Artificial Sequence: Synthetic oligonucleotide
acgacgcgauucuguugcc

SEQ ID NO: 324023 - RNA, 19 nt, Artificial Sequence
  Description of Artificial Sequence: Synthetic oligonucleotide
uucgcggguuaucuuguua

SEQ ID NO: 324024 - RNA, 19 nt, Artificial Sequence
  Description of Artificial Sequence: Synthetic oligonucleotide
guuaggucggcugcccuug

SEQ ID NO: 324025 - RNA, 19 nt, Artificial Sequence
  Description of Artificial Sequence: Synthetic oligonucleotide
cacagucuaaucugcuaca

SEQ ID NO: 324026 - RNA, 19 nt, Artificial Sequence
  Description of Artificial Sequence: Synthetic oligonucleotide
caccuccccugcacgaugg

SEQ ID NO: 324027 - RNA, 19 nt, Artificial Sequence
  Description of Artificial Sequence: Synthetic oligonucleotide
gguuauacgcauggagcag

SEQ ID NO: 324028 - RNA, 19 nt, Artificial Sequence
  Description of Artificial Sequence: Synthetic oligonucleotide
gcugcgaaagaugguaaag

SEQ ID NO: 324029 - RNA, 19 nt, Artificial Sequence
  Description of Artificial Sequence: Synthetic oligonucleotide
gugagcaaacggucccaag

SEQ ID NO: 324030 - RNA, 19 nt, Artificial Sequence
  Description of Artificial Sequence: Synthetic oligonucleotide
gugggugugguuauacgca

SEQ ID NO: 324031 - RNA, 19 nt, Artificial Sequence
  Description of Artificial Sequence: Synthetic oligonucleotide
aagaaggcucggcgcacau

SEQ ID NO: 324032 - RNA, 19 nt, Artificial Sequence
  Description of Artificial Sequence: Synthetic oligonucleotide
cauucaugcuguacacgca

SEQ ID NO: 324033 - RNA, 19 nt, Artificial Sequence
  Description of Artificial Sequence: Synthetic oligonucleotide
ugaccaagcugcgcuggcc

SEQ ID NO: 324034 - RNA, 19 nt, Artificial Sequence
  Description of Artificial Sequence: Synthetic oligonucleotide
cugagcauaccagccgcgc

SEQ ID NO: 324035 - RNA, 19 nt, Artificial Sequence
  Description of Artificial Sequence: Synthetic oligonucleotide
ccgauguauaaguuaggug

SEQ ID NO: 324036 - RNA, 19 nt, Artificial Sequence
  Description of Artificial Sequence: Synthetic oligonucleotide
ugcagcgauuugcgugaag

SEQ ID NO: 324037 - RNA, 19 nt, Artificial Sequence
  Description of Artificial Sequence: Synthetic oligonucleotide
cagaguuaggucggcugcc

SEQ ID NO: 324038 - RNA, 19 nt, Artificial Sequence
  Description of Artificial Sequence: Synthetic oligonucleotide
aguuaggucggcugcccuu

SEQ ID NO: 324039 - RNA, 19 nt, Artificial Sequence
  Description of Artificial Sequence: Synthetic oligonucleotide
gaaaggcgcugccacucuc

SEQ ID NO: 324040 - RNA, 19 nt, Artificial Sequence
  Description of Artificial Sequence: Synthetic oligonucleotide
gugcagguggauccauccc

SEQ ID NO: 324041 - RNA, 19 nt, Artificial Sequence
  Description of Artificial Sequence: Synthetic oligonucleotide
caccuaagaccuuccgcuc

SEQ ID NO: 324042 - RNA, 19 nt, Artificial Sequence
  Description of Artificial Sequence: Synthetic oligonucleotide
cauucgcagggaguuugcc

SEQ ID NO: 324043 - RNA, 19 nt, Artificial Sequence
  Description of Artificial Sequence: Synthetic oligonucleotide
uacauucgcggguuaucuu

SEQ ID NO: 324044 - RNA, 19 nt, Artificial Sequence
  Description of Artificial Sequence: Synthetic oligonucleotide
ugccuguagcgagcgaggc

SEQ ID NO: 324045 - RNA, 19 nt, Artificial Sequence
  Description of Artificial Sequence: Synthetic oligonucleotide
gacucacggaagaagaaau

SEQ ID NO: 324046 - RNA, 19 nt, Artificial Sequence
  Description of Artificial Sequence: Synthetic oligonucleotide
acgacccugguaagacacc

SEQ ID NO: 324047 - RNA, 19 nt, Artificial Sequence
  Description of Artificial Sequence: Synthetic oligonucleotide
caagcugcgcuggccaccc

SEQ ID NO: 324048 - RNA, 19 nt, Artificial Sequence
  Description of Artificial Sequence: Synthetic oligonucleotide
gugaaaagccuugcucaac

SEQ ID NO: 324049 - RNA, 19 nt, Artificial Sequence
  Description of Artificial Sequence: Synthetic oligonucleotide
acugaugugcagggcccuc

SEQ ID NO: 324050 - RNA, 19 nt, Artificial Sequence
  Description of Artificial Sequence: Synthetic oligonucleotide
cauuccuuacgucuugccu

SEQ ID NO: 324051 - RNA, 19 nt, Artificial Sequence
  Description of Artificial Sequence: Synthetic oligonucleotide
acacgacccugguaagaca

SEQ ID NO: 324052 - RNA, 19 nt, Artificial Sequence
  Description of Artificial Sequence: Synthetic oligonucleotide
ugcauccgccuguugcgac

SEQ ID NO: 324053 - RNA, 19 nt, Artificial Sequence
  Description of Artificial Sequence: Synthetic oligonucleotide
cugaugugcagggcccucc

SEQ ID NO: 324054 - RNA, 19 nt, Artificial Sequence
  Description of Artificial Sequence: Synthetic oligonucleotide
uugcgacccuuacgacgcg

SEQ ID NO: 324055 - RNA, 19 nt, Artificial Sequence
  Description of Artificial Sequence: Synthetic oligonucleotide
uguccccuuuucugagugu

SEQ ID NO: 324056 - RNA, 19 nt, Artificial Sequence
  Description of Artificial Sequence: Synthetic oligonucleotide
gcgagcgaggcucacacuc

SEQ ID NO: 324057 - RNA, 19 nt, Artificial Sequence
  Description of Artificial Sequence: Synthetic oligonucleotide
acggaagaagaaauagauu

SEQ ID NO: 324058 - RNA, 19 nt, Artificial Sequence
  Description of Artificial Sequence: Synthetic oligonucleotide
gcugcuacgcggucugcag

SEQ ID NO: 324059 - RNA, 19 nt, Artificial Sequence
  Description of Artificial Sequence: Synthetic oligonucleotide
acggucccaagaaggcucg

SEQ ID NO: 324060 - RNA, 19 nt, Artificial Sequence
  Description of Artificial Sequence: Synthetic oligonucleotide
cacucggugauccuaugua

SEQ ID NO: 324061 - RNA, 19 nt, Artificial Sequence
  Description of Artificial Sequence: Synthetic oligonucleotide
gccuguugcgacccuuacg

SEQ ID NO: 324062 - RNA, 19 nt, Artificial Sequence
  Description of Artificial Sequence: Synthetic oligonucleotide
gcauggguuccuccagccg

SEQ ID NO: 324063 - RNA, 19 nt, Artificial Sequence
  Description of Artificial Sequence: Synthetic oligonucleotide
cuguugcgacccuuacgac

SEQ ID NO: 324064 - RNA, 19 nt, Artificial Sequence
  Description of Artificial Sequence: Synthetic oligonucleotide
aagcuacccuuuggccagg

SEQ ID NO: 324065 - RNA, 19 nt, Artificial Sequence
  Description of Artificial Sequence: Synthetic oligonucleotide
agcgggagucaugggguuc

SEQ ID NO: 324066 - RNA, 19 nt, Artificial Sequence
  Description of Artificial Sequence: Synthetic oligonucleotide
agcgcagcgugagaggaau

SEQ ID NO: 324067 - RNA, 19 nt, Artificial Sequence
  Description of Artificial Sequence: Synthetic oligonucleotide
cuuacgacgcgauucuguu

SEQ ID NO: 324068 - RNA, 19 nt, Artificial Sequence
  Description of Artificial Sequence: Synthetic oligonucleotide
acgcaggggcugugaaaag

SEQ ID NO: 324069 - RNA, 19 nt, Artificial Sequence
  Description of Artificial Sequence: Synthetic oligonucleotide
uacgcggucugcagcgauu

SEQ ID NO: 324070 - RNA, 19 nt, Artificial Sequence
  Description of Artificial Sequence: Synthetic oligonucleotide
gaauugagccuggaccacu

SEQ ID NO: 324071 - RNA, 19 nt, Artificial Sequence
  Description of Artificial Sequence: Synthetic oligonucleotide
caggcugcgaaagauggua

SEQ ID NO: 324072 - RNA, 19 nt, Artificial Sequence
  Description of Artificial Sequence: Synthetic oligonucleotide
acucacggaagaagaaaua

SEQ ID NO: 324073 - RNA, 19 nt, Artificial Sequence
  Description of Artificial Sequence: Synthetic oligonucleotide
ccauuccuuacgucuugcc

SEQ ID NO: 324074 - RNA, 19 nt, Artificial Sequence
  Description of Artificial Sequence: Synthetic oligonucleotide
uuuggccagggccgaugua

SEQ ID NO: 324075 - RNA, 19 nt, Artificial Sequence
  Description of Artificial Sequence: Synthetic oligonucleotide
gagggugguuccgagcaaa

SEQ ID NO: 324076 - RNA, 19 nt, Artificial Sequence
  Description of Artificial Sequence: Synthetic oligonucleotide
cuacauucgcggguuaucu

SEQ ID NO: 324077 - RNA, 19 nt, Artificial Sequence
  Description of Artificial Sequence: Synthetic oligonucleotide
cagcccgaugccucggguc

SEQ ID NO: 324078 - RNA, 19 nt, Artificial Sequence
  Description of Artificial Sequence: Synthetic oligonucleotide
ucgcagggaguuugccccu

SEQ ID NO: 324079 - RNA, 19 nt, Artificial Sequence
  Description of Artificial Sequence: Synthetic oligonucleotide
agcugcuacgcggucugca

SEQ ID NO: 324080 - RNA, 19 nt, Artificial Sequence
  Description of Artificial Sequence: Synthetic oligonucleotide
gagacuacauucgcggguu

SEQ ID NO: 324081 - RNA, 19 nt, Artificial Sequence
  Description of Artificial Sequence: Synthetic oligonucleotide
ugcgacccuuacgacgcga

SEQ ID NO: 324082 - RNA, 19 nt, Artificial Sequence
  Description of Artificial Sequence: Synthetic oligonucleotide
ggucccgggaggacaaaag

SEQ ID NO: 324083 - RNA, 19 nt, Artificial Sequence
  Description of Artificial Sequence: Synthetic oligonucleotide
ucggccuguacggcacuca

SEQ ID NO: 324084 - RNA, 19 nt, Artificial Sequence
  Description of Artificial Sequence: Synthetic oligonucleotide
cauaccagccgcgccuuca

SEQ ID NO: 324085 - RNA, 19 nt, Artificial Sequence
  Description of Artificial Sequence: Synthetic oligonucleotide
gcugccaccccugaauaca

SEQ ID NO: 324086 - RNA, 19 nt, Artificial Sequence
  Description of Artificial Sequence: Synthetic oligonucleotide
gcgugagaggaauccccag

SEQ ID NO: 324087 - RNA, 19 nt, Artificial Sequence
  Description of Artificial Sequence: Synthetic oligonucleotide
gcauccgccuguugcgacc

SEQ ID NO: 324088 - RNA, 19 nt, Artificial Sequence
  Description of Artificial Sequence: Synthetic oligonucleotide
cucccacuuggaggaagag

SEQ ID NO: 324089 - RNA, 19 nt, Artificial Sequence
  Description of Artificial Sequence: Synthetic oligonucleotide
gucguucggccuguacggc

SEQ ID NO: 324090 - RNA, 19 nt, Artificial Sequence
  Description of Artificial Sequence: Synthetic oligonucleotide
agcuacccuuuggccaggg

SEQ ID NO: 324091 - RNA, 19 nt, Artificial Sequence
  Description of Artificial Sequence: Synthetic oligonucleotide
cccgguaccagagcuuggg

SEQ ID NO: 324092 - RNA, 19 nt, Artificial Sequence
  Description of Artificial Sequence: Synthetic oligonucleotide
auucgcggguuaucuuguu

SEQ ID NO: 324093 - RNA, 19 nt, Artificial Sequence
  Description of Artificial Sequence: Synthetic oligonucleotide
cauucgcggguuaucuugu

SEQ ID NO: 324094 - RNA, 19 nt, Artificial Sequence
  Description of Artificial Sequence: Synthetic oligonucleotide
gcgauuugcgugaaggugu

SEQ ID NO: 324095 - RNA, 19 nt, Artificial Sequence
  Description of Artificial Sequence: Synthetic oligonucleotide
guggaacugaagguaccaa

SEQ ID NO: 324096 - RNA, 19 nt, Artificial Sequence
  Description of Artificial Sequence: Synthetic oligonucleotide
cuggggccauuccaacguc

SEQ ID NO: 324097 - RNA, 19 nt, Artificial Sequence
  Description of Artificial Sequence: Synthetic oligonucleotide
gacccugguaagacaccca

SEQ ID NO: 324098 - RNA, 19 nt, Artificial Sequence
  Description of Artificial Sequence: Synthetic oligonucleotide
ggaauccaaaagaccuuga

SEQ ID NO: 324099 - RNA, 19 nt, Artificial Sequence
  Description of Artificial Sequence: Synthetic oligonucleotide
ucgggucauaaggacucuu

SEQ ID NO: 324100 - RNA, 19 nt, Artificial Sequence
  Description of Artificial Sequence: Synthetic oligonucleotide
gaguuaggucggcugcccu

SEQ ID NO: 324101 - RNA, 19 nt, Artificial Sequence
  Description of Artificial Sequence: Synthetic oligonucleotide
agacuacauucgcggguua

SEQ ID NO: 324102 - RNA, 19 nt, Artificial Sequence
  Description of Artificial Sequence: Synthetic oligonucleotide
ggcugcgaaagaugguaaa

SEQ ID NO: 324103 - RNA, 19 nt, Artificial Sequence
  Description of Artificial Sequence: Synthetic oligonucleotide
gccgauguauaaguuaggu

SEQ ID NO: 324104 - RNA, 19 nt, Artificial Sequence
  Description of Artificial Sequence: Synthetic oligonucleotide
cgcagcgugagaggaaucc

SEQ ID NO: 324105 - RNA, 19 nt, Artificial Sequence
  Description of Artificial Sequence: Synthetic oligonucleotide
gugugguuauacgcaugga

SEQ ID NO: 324106 - RNA, 19 nt, Artificial Sequence
  Description of Artificial Sequence: Synthetic oligonucleotide
ucagcccgcgccagucguu

SEQ ID NO: 324107 - RNA, 19 nt, Artificial Sequence
  Description of Artificial Sequence: Synthetic oligonucleotide
gacuacauucgcggguuau

SEQ ID NO: 324108 - RNA, 19 nt, Artificial Sequence
  Description of Artificial Sequence: Synthetic oligonucleotide
uucggccuguacggcacuc

SEQ ID NO: 324109 - RNA, 19 nt, Artificial Sequence
  Description of Artificial Sequence: Synthetic oligonucleotide
cagcgauuugcgugaaggu

SEQ ID NO: 324110 - RNA, 19 nt, Artificial Sequence
  Description of Artificial Sequence: Synthetic oligonucleotide
ggugugagccaccuccccu

SEQ ID NO: 324111 - RNA, 19 nt, Artificial Sequence
  Description of Artificial Sequence: Synthetic oligonucleotide
cucgcucaucagccagcac

SEQ ID NO: 324112 - RNA, 19 nt, Artificial Sequence
  Description of Artificial Sequence: Synthetic oligonucleotide
ggaguuggucaaaaugggu

SEQ ID NO: 324113 - RNA, 19 nt, Artificial Sequence
  Description of Artificial Sequence: Synthetic oligonucleotide
augcgucccguugcuggug

SEQ ID NO: 324114 - RNA, 19 nt, Artificial Sequence
  Description of Artificial Sequence: Synthetic oligonucleotide
gcgccagucguucggccug

SEQ ID NO: 324115 - RNA, 19 nt, Artificial Sequence
  Description of Artificial Sequence: Synthetic oligonucleotide
gggugugguuauacgcaug

SEQ ID NO: 324116 - RNA, 19 nt, Artificial Sequence
  Description of Artificial Sequence: Synthetic oligonucleotide
gguggcacauucgcaggga

SEQ ID NO: 324117 - RNA, 19 nt, Artificial Sequence
  Description of Artificial Sequence: Synthetic oligonucleotide
gcuacccuuuggccagggc

SEQ ID NO: 324118 - RNA, 19 nt, Artificial Sequence
  Description of Artificial Sequence: Synthetic oligonucleotide
gcccgcgccagucguucgg

SEQ ID NO: 324119 - RNA, 19 nt, Artificial Sequence
  Description of Artificial Sequence: Synthetic oligonucleotide
ggacacgacccugguaaga

SEQ ID NO: 324120 - RNA, 19 nt, Artificial Sequence
  Description of Artificial Sequence: Synthetic oligonucleotide
ccacaugugccuguagcga

SEQ ID NO: 324121 - RNA, 19 nt, Artificial Sequence
  Description of Artificial Sequence: Synthetic oligonucleotide
ccuguacggcacucagcac

SEQ ID NO: 324122 - RNA, 19 nt, Artificial Sequence
  Description of Artificial Sequence: Synthetic oligonucleotide
ccuuacgacgcgauucugu

SEQ ID NO: 324123 - RNA, 19 nt, Artificial Sequence
  Description of Artificial Sequence: Synthetic oligonucleotide
cuguucggagacucggauu

SEQ ID NO: 324124 - RNA, 19 nt, Artificial Sequence
  Description of Artificial Sequence: Synthetic oligonucleotide
ggccuguacggcacucagc

SEQ ID NO: 324125 - RNA, 19 nt, Artificial Sequence
  Description of Artificial Sequence: Synthetic oligonucleotide
cagcccgcgccagucguuc

SEQ ID NO: 324126 - RNA, 19 nt, Artificial Sequence
  Description of Artificial Sequence: Synthetic oligonucleotide
gcgccucagaccacgcagc

SEQ ID NO: 324127 - RNA, 19 nt, Artificial Sequence
  Description of Artificial Sequence: Synthetic oligonucleotide
cugcauccgccuguugcga

SEQ ID NO: 324128 - RNA, 19 nt, Artificial Sequence
  Description of Artificial Sequence: Synthetic oligonucleotide
guguacccagcucccacuu

SEQ ID NO: 324129 - RNA, 19 nt, Artificial Sequence
  Description of Artificial Sequence: Synthetic oligonucleotide
cucggcgcacaucauucau

SEQ ID NO: 324130 - RNA, 19 nt, Artificial Sequence
  Description of Artificial Sequence: Synthetic oligonucleotide
cccgugugaugacagccca

SEQ ID NO: 324131 - RNA, 19 nt, Artificial Sequence
  Description of Artificial Sequence: Synthetic oligonucleotide
guacggcacucagcacgug

SEQ ID NO: 324132 - RNA, 19 nt, Artificial Sequence
  Description of Artificial Sequence: Synthetic oligonucleotide
gcucgcucaucagccagca

SEQ ID NO: 324133 - RNA, 19 nt, Artificial Sequence
  Description of Artificial Sequence: Synthetic oligonucleotide
ggcguggguaggggacacg

SEQ ID NO: 324134 - RNA, 19 nt, Artificial Sequence
  Description of Artificial Sequence: Synthetic oligonucleotide
cagcgcagcgugagaggaa

SEQ ID NO: 324135 - RNA, 19 nt, Artificial Sequence
  Description of Artificial Sequence: Synthetic oligonucleotide
gugcagcgaugcaaugcaa

SEQ ID NO: 324136 - RNA, 19 nt, Artificial Sequence
  Description of Artificial Sequence: Synthetic oligonucleotide
cagcugcuacgcggucugc

SEQ ID NO: 324137 - RNA, 19 nt, Artificial Sequence
  Description of Artificial Sequence: Synthetic oligonucleotide
guucggagacucggauucu

SEQ ID NO: 324138 - RNA, 19 nt, Artificial Sequence
  Description of Artificial Sequence: Synthetic oligonucleotide
gugucauauccagccuggu

SEQ ID NO: 324139 - RNA, 19 nt, Artificial Sequence
  Description of Artificial Sequence: Synthetic oligonucleotide
cggccuguacggcacucag

SEQ ID NO: 324140 - RNA, 19 nt, Artificial Sequence
  Description of Artificial Sequence: Synthetic oligonucleotide
cgucuugccuccugaaucu

SEQ ID NO: 324141 - RNA, 19 nt, Artificial Sequence
  Description of Artificial Sequence: Synthetic oligonucleotide
cuccaacccacagucuaau

SEQ ID NO: 324142 - RNA, 19 nt, Artificial Sequence
  Description of Artificial Sequence: Synthetic oligonucleotide
ccaacagcgcagcgugaga

SEQ ID NO: 324143 - RNA, 19 nt, Artificial Sequence
  Description of Artificial Sequence: Synthetic oligonucleotide
guucggccuguacggcacu

SEQ ID NO: 324144 - RNA, 19 nt, Artificial Sequence
  Description of Artificial Sequence: Synthetic oligonucleotide
ccagccgcgccuucagaaa

SEQ ID NO: 324145 - RNA, 19 nt, Artificial Sequence
  Description of Artificial Sequence: Synthetic oligonucleotide
cuacgcggucugcagcgau

SEQ ID NO: 324146 - RNA, 19 nt, Artificial Sequence
  Description of Artificial Sequence: Synthetic oligonucleotide
ggcacccaagacagcucuc

SEQ ID NO: 324147 - RNA, 19 nt, Artificial Sequence
  Description of Artificial Sequence: Synthetic oligonucleotide
ccgcgccagucguucggcc

SEQ ID NO: 324148 - RNA, 19 nt, Artificial Sequence
  Description of Artificial Sequence: Synthetic oligonucleotide
cccuuacgacgcgauucug

SEQ ID NO: 324149 - RNA, 19 nt, Artificial Sequence
  Description of Artificial Sequence: Synthetic oligonucleotide
ccgcuccaacagcgcagcg

SEQ ID NO: 324150 - RNA, 19 nt, Artificial Sequence
  Description of Artificial Sequence: Synthetic oligonucleotide
gcgggagucaugggguucu

SEQ ID NO: 324151 - RNA, 19 nt, Artificial Sequence
  Description of Artificial Sequence: Synthetic oligonucleotide
cucgggucauaaggacucu

SEQ ID NO: 324152 - RNA, 19 nt, Artificial Sequence
  Description of Artificial Sequence: Synthetic oligonucleotide
ccacucggugauccuaugu

SEQ ID NO: 324153 - RNA, 19 nt, Artificial Sequence
  Description of Artificial Sequence: Synthetic oligonucleotide
cccgcgccagucguucggc

SEQ ID NO: 324154 - RNA, 19 nt, Artificial Sequence
  Description of Artificial Sequence: Synthetic oligonucleotide
gccgccuggcuccaccagu

SEQ ID NO: 324155 - RNA, 19 nt, Artificial Sequence
  Description of Artificial Sequence: Synthetic oligonucleotide
gcuacgcggucugcagcga

SEQ ID NO: 324156 - RNA, 19 nt, Artificial Sequence
  Description of Artificial Sequence: Synthetic oligonucleotide
ccccgcgagguccgcucag

SEQ ID NO: 324157 - RNA, 19 nt, Artificial Sequence
  Description of Artificial Sequence: Synthetic oligonucleotide
caccccacucggugauccu

SEQ ID NO: 324158 - RNA, 19 nt, Artificial Sequence
  Description of Artificial Sequence: Synthetic oligonucleotide
gcagcccgaugccucgggu

SEQ ID NO: 324159 - RNA, 19 nt, Artificial Sequence
  Description of Artificial Sequence: Synthetic oligonucleotide
ggucuacaccggagcccca

SEQ ID NO: 324160 - RNA, 19 nt, Artificial Sequence
  Description of Artificial Sequence: Synthetic oligonucleotide
gcgcagcgugagaggaauc

SEQ ID NO: 324161 - RNA, 19 nt, Artificial Sequence
  Description of Artificial Sequence: Synthetic oligonucleotide
ccccacucggugauccuau

SEQ ID NO: 324162 - RNA, 19 nt, Artificial Sequence
  Description of Artificial Sequence: Synthetic oligonucleotide
cgacgcgauucuguugcca

SEQ ID NO: 324163 - RNA, 19 nt, Artificial Sequence
  Description of Artificial Sequence: Synthetic oligonucleotide
gcgacccuuacgacgcgau

SEQ ID NO: 324164 - RNA, 19 nt, Artificial Sequence
  Description of Artificial Sequence: Synthetic oligonucleotide
gcacuacguggcccacgcu

SEQ ID NO: 324165 - RNA, 19 nt, Artificial Sequence
  Description of Artificial Sequence: Synthetic oligonucleotide
gcgcggccuagggcagugc

SEQ ID NO: 324166 - RNA, 19 nt, Artificial Sequence
  Description of Artificial Sequence: Synthetic oligonucleotide
cgcgccagucguucggccu

SEQ ID NO: 324167 - RNA, 19 nt, Artificial Sequence
  Description of Artificial Sequence: Synthetic oligonucleotide
ggccaacacgggacacagu

SEQ ID NO: 324168 - RNA, 19 nt, Artificial Sequence
  Description of Artificial Sequence: Synthetic oligonucleotide
gccagucguucggccugua

SEQ ID NO: 324169 - RNA, 19 nt, Artificial Sequence
  Description of Artificial Sequence: Synthetic oligonucleotide
gcccgaugccucgggucau

SEQ ID NO: 324170 - RNA, 19 nt, Artificial Sequence
  Description of Artificial Sequence: Synthetic oligonucleotide
cgccagucguucggccugu

SEQ ID NO: 324171 - RNA, 19 nt, Artificial Sequence
  Description of Artificial Sequence: Synthetic oligonucleotide
uuaauguccaacaaagagg

SEQ ID NO: 324172 - RNA, 19 nt, Artificial Sequence
  Description of Artificial Sequence: Synthetic oligonucleotide
uauguacggacuuagaagc

SEQ ID NO: 324173 - RNA, 19 nt, Artificial Sequence
  Description of Artificial Sequence: Synthetic oligonucleotide
uguagauguagcaauagca

SEQ ID NO: 324174 - RNA, 19 nt, Artificial Sequence
  Description of Artificial Sequence: Synthetic oligonucleotide
auauguacuacucaguugu

SEQ ID NO: 324175 - RNA, 19 nt, Artificial Sequence
  Description of Artificial Sequence: Synthetic oligonucleotide
aaaacggccagagaagagc

SEQ ID NO: 324176 - RNA, 19 nt, Artificial Sequence
  Description of Artificial Sequence: Synthetic oligonucleotide
uuauguacggacuuagaag

SEQ ID NO: 324177 - RNA, 19 nt, Artificial Sequence
  Description of Artificial Sequence: Synthetic oligonucleotide
caaauugcgaagaaagcgg

SEQ ID NO: 324178 - RNA, 19 nt, Artificial Sequence
  Description of Artificial Sequence: Synthetic oligonucleotide
aggucaauggaccaugcac

SEQ ID NO: 324179 - RNA, 19 nt, Artificial Sequence
  Description of Artificial Sequence: Synthetic oligonucleotide
agcuaggucgaguauagac

SEQ ID NO: 324180 - RNA, 19 nt, Artificial Sequence
  Description of Artificial Sequence: Synthetic oligonucleotide
aacagacgcacuucaaaag

SEQ ID NO: 324181 - RNA, 19 nt, Artificial Sequence
  Description of Artificial Sequence: Synthetic oligonucleotide
ucgagauugaacaagcuua

SEQ ID NO: 324182 - RNA, 19 nt, Artificial Sequence
  Description of Artificial Sequence: Synthetic oligonucleotide
ugguuuuaagccacggccg

SEQ ID NO: 324183 - RNA, 19 nt, Artificial Sequence
  Description of Artificial Sequence: Synthetic oligonucleotide
agauugaacaagcuuaggu

SEQ ID NO: 324184 - RNA, 19 nt, Artificial Sequence
  Description of Artificial Sequence: Synthetic oligonucleotide
uguacuacucaguuguccc

SEQ ID NO: 324185 - RNA, 19 nt, Artificial Sequence
  Description of Artificial Sequence: Synthetic oligonucleotide
agagacuaaccacuagccc

SEQ ID NO: 324186 - RNA, 19 nt, Artificial Sequence
  Description of Artificial Sequence: Synthetic oligonucleotide
gucgaguauagacagacag

SEQ ID NO: 324187 - RNA, 19 nt, Artificial Sequence
  Description of Artificial Sequence: Synthetic oligonucleotide
aauaccucgugcauauuac

SEQ ID NO: 324188 - RNA, 19 nt, Artificial Sequence
  Description of Artificial Sequence: Synthetic oligonucleotide
aacaugguuucuuaaugca

SEQ ID NO: 324189 - RNA, 19 nt, Artificial Sequence
  Description of Artificial Sequence: Synthetic oligonucleotide
uguuauagaucacuuccug

SEQ ID NO: 324190 - RNA, 19 nt, Artificial Sequence
  Description of Artificial Sequence: Synthetic oligonucleotide
gaagcgucgaccaaugcgg

SEQ ID NO: 324191 - RNA, 19 nt, Artificial Sequence
  Description of Artificial Sequence: Synthetic oligonucleotide
uuggcuaaauaccucgugc

SEQ ID NO: 324192 - RNA, 19 nt, Artificial Sequence
  Description of Artificial Sequence: Synthetic oligonucleotide
gugguuuuaagccacggcc

SEQ ID NO: 324193 - RNA, 19 nt, Artificial Sequence
  Description of Artificial Sequence: Synthetic oligonucleotide
auuauguacggacuuagaa

SEQ ID NO: 324194 - RNA, 19 nt, Artificial Sequence
  Description of Artificial Sequence: Synthetic oligonucleotide
  modified_base (4)..(4): a, c, u, g, unknown or other
uccngcaugcacucgagcc

SEQ ID NO: 324195 - RNA, 19 nt, Artificial Sequence
  Description of Artificial Sequence: Synthetic oligonucleotide
aaauugcgaagaaagcggg

SEQ ID NO: 324196 - RNA, 19 nt, Artificial Sequence
  Description of Artificial Sequence: Synthetic oligonucleotide
cuaggucgaguauagacag

SEQ ID NO: 324197 - RNA, 19 nt, Artificial Sequence
  Description of Artificial Sequence: Synthetic oligonucleotide
uagauguagcaauagcagc

SEQ ID NO: 324198 - RNA, 19 nt, Artificial Sequence
  Description of Artificial Sequence: Synthetic oligonucleotide
uguguugccucgauguaag

SEQ ID NO: 324199 - RNA, 19 nt, Artificial Sequence
  Description of Artificial Sequence: Synthetic oligonucleotide
uaccguaucuggcacagcc

SEQ ID NO: 324200 - RNA, 19 nt, Artificial Sequence
  Description of Artificial Sequence: Synthetic oligonucleotide
aaccguaaugucucuccac

SEQ ID NO: 324201 - RNA, 19 nt, Artificial Sequence
  Description of Artificial Sequence: Synthetic oligonucleotide
guagauguagcaauagcag

SEQ ID NO: 324202 - RNA, 19 nt, Artificial Sequence
  Description of Artificial Sequence: Synthetic oligonucleotide
uuuuguucucaacucggca

SEQ ID NO: 324203 - RNA, 19 nt, Artificial Sequence
  Description of Artificial Sequence: Synthetic oligonucleotide
acaucgagcauguucacga

SEQ ID NO: 324204 - RNA, 19 nt, Artificial Sequence
  Description of Artificial Sequence: Synthetic oligonucleotide
ugccaguuggcuaaauacc

SEQ ID NO: 324205 - RNA, 19 nt, Artificial Sequence
  Description of Artificial Sequence: Synthetic oligonucleotide
agaucagacaaaugggcug

SEQ ID NO: 324206 - RNA, 19 nt, Artificial Sequence
  Description of Artificial Sequence: Synthetic oligonucleotide
caugcacuaaucacaggcg

SEQ ID NO: 324207 - RNA, 19 nt, Artificial Sequence
  Description of Artificial Sequence: Synthetic oligonucleotide
cuuucacuguucaaccucc

SEQ ID NO: 324208 - RNA, 19 nt, Artificial Sequence
  Description of Artificial Sequence: Synthetic oligonucleotide
auuacccaaggcugguggc

SEQ ID NO: 324209 - RNA, 19 nt, Artificial Sequence
  Description of Artificial Sequence: Synthetic oligonucleotide
  modified_base (7)..(7): a, c, u, g, unknown or other
aaguccngcaugcacucga

SEQ ID NO: 324210 - RNA, 19 nt, Artificial Sequence
  Description of Artificial Sequence: Synthetic oligonucleotide
ucauuauguacggacuuag

SEQ ID NO: 324211 - RNA, 19 nt, Artificial Sequence
  Description of Artificial Sequence: Synthetic oligonucleotide
aauugcgaagaaagcgggc

SEQ ID NO: 324212 - RNA, 19 nt, Artificial Sequence
  Description of Artificial Sequence: Synthetic oligonucleotide
cauagcuguauccacuaag

SEQ ID NO: 324213 - RNA, 19 nt, Artificial Sequence
  Description of Artificial Sequence: Synthetic oligonucleotide
aggucgaguauagacagac

SEQ ID NO: 324214 - RNA, 19 nt, Artificial Sequence
  Description of Artificial Sequence: Synthetic oligonucleotide
aaggacauauugccaggag

SEQ ID NO: 324215 - RNA, 19 nt, Artificial Sequence
  Description of Artificial Sequence: Synthetic oligonucleotide
uccagcaacccucacacuc

SEQ ID NO: 324216 - RNA, 19 nt, Artificial Sequence
  Description of Artificial Sequence: Synthetic oligonucleotide
aagacugaagggcccucac

SEQ ID NO: 324217 - RNA, 19 nt, Artificial Sequence
  Description of Artificial Sequence: Synthetic oligonucleotide
uggaccaugcacuaaucac

SEQ ID NO: 324218 - RNA, 19 nt, Artificial Sequence
  Description of Artificial Sequence: Synthetic oligonucleotide
ucgagcucugcucaguaga

SEQ ID NO: 324219 - RNA, 19 nt, Artificial Sequence
  Description of Artificial Sequence: Synthetic oligonucleotide
uggcuaaauaccucgugca

SEQ ID NO: 324220 - RNA, 19 nt, Artificial Sequence
  Description of Artificial Sequence: Synthetic oligonucleotide
ucgaguauagacagacagu

SEQ ID NO: 324221 - RNA, 19 nt, Artificial Sequence
  Description of Artificial Sequence: Synthetic oligonucleotide
ugaaaacggccagagaaga

SEQ ID NO: 324222 - RNA, 19 nt, Artificial Sequence
  Description of Artificial Sequence: Synthetic oligonucleotide
gagacuaaccacuagcccu

SEQ ID NO: 324223 - RNA, 19 nt, Artificial Sequence
  Description of Artificial Sequence: Synthetic oligonucleotide
ggauuagccggucacaggc

SEQ ID NO: 324224 - RNA, 19 nt, Artificial Sequence
  Description of Artificial Sequence: Synthetic oligonucleotide
agcaaggccaaauugcgaa

SEQ ID NO: 324225 - RNA, 19 nt, Artificial Sequence
  Description of Artificial Sequence: Synthetic oligonucleotide
uguucaaccucccucgauu

SEQ ID NO: 324226 - RNA, 19 nt, Artificial Sequence
  Description of Artificial Sequence: Synthetic oligonucleotide
agauguagcaauagcagcu

SEQ ID NO: 324227 - RNA, 19 nt, Artificial Sequence
  Description of Artificial Sequence: Synthetic oligonucleotide
cucucuuaccguaucuggc

SEQ ID NO: 324228 - RNA, 19 nt, Artificial Sequence
  Description of Artificial Sequence: Synthetic oligonucleotide
auguaaggcucccucaacu

SEQ ID NO: 324229 - RNA, 19 nt, Artificial Sequence
  Description of Artificial Sequence: Synthetic oligonucleotide
uucucaacucggcaaauuu

SEQ ID NO: 324230 - RNA, 19 nt, Artificial Sequence
  Description of Artificial Sequence: Synthetic oligonucleotide
accguaaugucucuccaca

SEQ ID NO: 324231 - RNA, 19 nt, Artificial Sequence
  Description of Artificial Sequence: Synthetic oligonucleotide
aggucaaguccccugacga

SEQ ID NO: 324232 - RNA, 19 nt, Artificial Sequence
  Description of Artificial Sequence: Synthetic oligonucleotide
uguugccucgauguaaggc

SEQ ID NO: 324233 - RNA, 19 nt, Artificial Sequence
  Description of Artificial Sequence: Synthetic oligonucleotide
gaguggacggugaaggugc

SEQ ID NO: 324234 - RNA, 19 nt, Artificial Sequence
  Description of Artificial Sequence: Synthetic oligonucleotide
cagacaguaagcccaggag

SEQ ID NO: 324235 - RNA, 19 nt, Artificial Sequence
  Description of Artificial Sequence: Synthetic oligonucleotide
auugcgaagaaagcgggcu

SEQ ID NO: 324236 - RNA, 19 nt, Artificial Sequence
  Description of Artificial Sequence: Synthetic oligonucleotide
gaagucugagaaaggcggg

SEQ ID NO: 324237 - RNA, 19 nt, Artificial Sequence
  Description of Artificial Sequence: Synthetic oligonucleotide
ccgaauauguacuacucag

SEQ ID NO: 324238 - RNA, 19 nt, Artificial Sequence
  Description of Artificial Sequence: Synthetic oligonucleotide
aaaggacauauugccagga

SEQ ID NO: 324239 - RNA, 19 nt, Artificial Sequence
  Description of Artificial Sequence: Synthetic oligonucleotide
acagacaguaagcccagga

SEQ ID NO: 324240 - RNA, 19 nt, Artificial Sequence
  Description of Artificial Sequence: Synthetic oligonucleotide
gaaggugccugaaaacggc

SEQ ID NO: 324241 - RNA, 19 nt, Artificial Sequence
  Description of Artificial Sequence: Synthetic oligonucleotide
acgcacuucaaaaggugcc

SEQ ID NO: 324242 - RNA, 19 nt, Artificial Sequence
  Description of Artificial Sequence: Synthetic oligonucleotide
cugaggcuacaccaggagg

SEQ ID NO: 324243 - RNA, 19 nt, Artificial Sequence
  Description of Artificial Sequence: Synthetic oligonucleotide
auagcuguauccacuaaga

SEQ ID NO: 324244 - RNA, 19 nt, Artificial Sequence
  Description of Artificial Sequence: Synthetic oligonucleotide
gauggccuaaugccucagg

SEQ ID NO: 324245 - RNA, 19 nt, Artificial Sequence
  Description of Artificial Sequence: Synthetic oligonucleotide
guuggcuaaauaccucgug

SEQ ID NO: 324246 - RNA, 19 nt, Artificial Sequence
  Description of Artificial Sequence: Synthetic oligonucleotide
ucucaacucggcaaauuuu

SEQ ID NO: 324247 - RNA, 19 nt, Artificial Sequence
  Description of Artificial Sequence: Synthetic oligonucleotide
uguacggacuuagaagccu

SEQ ID NO: 324248 - RNA, 19 nt, Artificial Sequence
  Description of Artificial Sequence: Synthetic oligonucleotide
ugcugacccgaauauguac

SEQ ID NO: 324249 - RNA, 19 nt, Artificial Sequence
  Description of Artificial Sequence: Synthetic oligonucleotide
cuuaccguaucuggcacag

SEQ ID NO: 324250 - RNA, 19 nt, Artificial Sequence
  Description of Artificial Sequence: Synthetic oligonucleotide
auggccuaaugccucaggu

SEQ ID NO: 324251 - RNA, 19 nt, Artificial Sequence
  Description of Artificial Sequence: Synthetic oligonucleotide
ucgauguaaggcucccuca

SEQ ID NO: 324252 - RNA, 19 nt, Artificial Sequence
  Description of Artificial Sequence: Synthetic oligonucleotide
uaaccacuagcccugcgua

SEQ ID NO: 324253 - RNA, 19 nt, Artificial Sequence
  Description of Artificial Sequence: Synthetic oligonucleotide
uguaaggcucccucaacua

SEQ ID NO: 324254 - RNA, 19 nt, Artificial Sequence
  Description of Artificial Sequence: Synthetic oligonucleotide
  modified_base (9)..(9): a, c, u, g, unknown or other
caaaguccngcaugcacuc

SEQ ID NO: 324255 - RNA, 19 nt, Artificial Sequence
  Description of Artificial Sequence: Synthetic oligonucleotide
gaccaaugcggagaucccg

SEQ ID NO: 324256 - RNA, 19 nt, Artificial Sequence
  Description of Artificial Sequence: Synthetic oligonucleotide
accucgugcauauuaccca

SEQ ID NO: 324257 - RNA, 19 nt, Artificial Sequence
  Description of Artificial Sequence: Synthetic oligonucleotide
acuaaucacaggcgcccag

SEQ ID NO: 324258 - RNA, 19 nt, Artificial Sequence
  Description of Artificial Sequence: Synthetic oligonucleotide
uccgguuaauguccaacaa

SEQ ID NO: 324259 - RNA, 19 nt, Artificial Sequence
  Description of Artificial Sequence: Synthetic oligonucleotide
cuaaucacaggcgcccagg

SEQ ID NO: 324260 - RNA, 19 nt, Artificial Sequence
  Description of Artificial Sequence: Synthetic oligonucleotide
  modified_base (8)..(8): a, c, u, g, unknown or other
aaaguccngcaugcacucg

SEQ ID NO: 324261 - RNA, 19 nt, Artificial Sequence
  Description of Artificial Sequence: Synthetic oligonucleotide
guggacggaggugaggugg

SEQ ID NO: 324262 - RNA, 19 nt, Artificial Sequence
  Description of Artificial Sequence: Synthetic oligonucleotide
auguacggacuuagaagcc

SEQ ID NO: 324263 - RNA, 19 nt, Artificial Sequence
  Description of Artificial Sequence: Synthetic oligonucleotide
gcagaguggacggugaagg

SEQ ID NO: 324264 - RNA, 19 nt, Artificial Sequence
  Description of Artificial Sequence: Synthetic oligonucleotide
ucaacucggcaaauuuuau

SEQ ID NO: 324265 - RNA, 19 nt, Artificial Sequence
  Description of Artificial Sequence: Synthetic oligonucleotide
aacaagcuuaggugguuuu

SEQ ID NO: 324266 - RNA, 19 nt, Artificial Sequence
  Description of Artificial Sequence: Synthetic oligonucleotide
guuccaaccguaaugucuc

SEQ ID NO: 324267 - RNA, 19 nt, Artificial Sequence
  Description of Artificial Sequence: Synthetic oligonucleotide
ucacugcugacccgaauau

SEQ ID NO: 324268 - RNA, 19 nt, Artificial Sequence
  Description of Artificial Sequence: Synthetic oligonucleotide
gcggguaagaagcugggag

SEQ ID NO: 324269 - RNA, 19 nt, Artificial Sequence
  Description of Artificial Sequence: Synthetic oligonucleotide
ggugguaaugacugaagca

SEQ ID NO: 324270 - RNA, 19 nt, Artificial Sequence
  Description of Artificial Sequence: Synthetic oligonucleotide
ucuuaccguaucuggcaca

SEQ ID NO: 324271 - RNA, 19 nt, Artificial Sequence
  Description of Artificial Sequence: Synthetic oligonucleotide
acagcuaggucgaguauag

SEQ ID NO: 324272 - RNA, 19 nt, Artificial Sequence
  Description of Artificial Sequence: Synthetic oligonucleotide
agcacggagcaguagcaca

SEQ ID NO: 324273 - RNA, 19 nt, Artificial Sequence
  Description of Artificial Sequence: Synthetic oligonucleotide
guugccucgauguaaggcu

SEQ ID NO: 324274 - RNA, 19 nt, Artificial Sequence
  Description of Artificial Sequence: Synthetic oligonucleotide
cuggauuagccggucacag

SEQ ID NO: 324275 - RNA, 19 nt, Artificial Sequence
  Description of Artificial Sequence: Synthetic oligonucleotide
gaagagccccaggcgaucg

SEQ ID NO: 324276 - RNA, 19 nt, Artificial Sequence
  Description of Artificial Sequence: Synthetic oligonucleotide
cucaacucggcaaauuuua

SEQ ID NO: 324277 - RNA, 19 nt, Artificial Sequence
  Description of Artificial Sequence: Synthetic oligonucleotide
cugcguauagcuggguugc

SEQ ID NO: 324278 - RNA, 19 nt, Artificial Sequence
  Description of Artificial Sequence: Synthetic oligonucleotide
uauguacuacucaguuguc

SEQ ID NO: 324279 - RNA, 19 nt, Artificial Sequence
  Description of Artificial Sequence: Synthetic oligonucleotide
gaggccgauuccccaaacc

SEQ ID NO: 324280 - RNA, 19 nt, Artificial Sequence
  Description of Artificial Sequence: Synthetic oligonucleotide
ggguugagacagcugagag

SEQ ID NO: 324281 - RNA, 19 nt, Artificial Sequence
  Description of Artificial Sequence: Synthetic oligonucleotide
acccucccuagaaaagucc

SEQ ID NO: 324282 - RNA, 19 nt, Artificial Sequence
  Description of Artificial Sequence: Synthetic oligonucleotide
gggugguaaugacugaagc

SEQ ID NO: 324283 - RNA, 19 nt, Artificial Sequence
  Description of Artificial Sequence: Synthetic oligonucleotide
ccuagaaaagucccggaug

SEQ ID NO: 324284 - RNA, 19 nt, Artificial Sequence
  Description of Artificial Sequence: Synthetic oligonucleotide
guuguucccggaagcgucg

SEQ ID NO: 324285 - RNA, 19 nt, Artificial Sequence
  Description of Artificial Sequence: Synthetic oligonucleotide
aaccacuagcccugcguau

SEQ ID NO: 324286 - RNA, 19 nt, Artificial Sequence
  Description of Artificial Sequence: Synthetic oligonucleotide
cucuuaccguaucuggcac

SEQ ID NO: 324287 - RNA, 19 nt, Artificial Sequence
  Description of Artificial Sequence: Synthetic oligonucleotide
cacaucgagcauguucacg

SEQ ID NO: 324288 - RNA, 19 nt, Artificial Sequence
  Description of Artificial Sequence: Synthetic oligonucleotide
ccaaccguaaugucucucc

SEQ ID NO: 324289 - RNA, 19 nt, Artificial Sequence
  Description of Artificial Sequence: Synthetic oligonucleotide
cccaucaggucaauggacc

SEQ ID NO: 324290 - RNA, 19 nt, Artificial Sequence
  Description of Artificial Sequence: Synthetic oligonucleotide
gcaaagaagcgguguaccc

SEQ ID NO: 324291 - RNA, 19 nt, Artificial Sequence
  Description of Artificial Sequence: Synthetic oligonucleotide
aggcgaucgauguugcgau

SEQ ID NO: 324292 - RNA, 19 nt, Artificial Sequence
  Description of Artificial Sequence: Synthetic oligonucleotide
cuacacccgucagaaaagc

SEQ ID NO: 324293 - RNA, 19 nt, Artificial Sequence
  Description of Artificial Sequence: Synthetic oligonucleotide
ucccuagaaaagucccgga

SEQ ID NO: 324294 - RNA, 19 nt, Artificial Sequence
  Description of Artificial Sequence: Synthetic oligonucleotide
aagccacggccgaugacuc

SEQ ID NO: 324295 - RNA, 19 nt, Artificial Sequence
  Description of Artificial Sequence: Synthetic oligonucleotide
agacgcacuucaaaaggug

SEQ ID NO: 324296 - RNA, 19 nt, Artificial Sequence
  Description of Artificial Sequence: Synthetic oligonucleotide
uucaaccucccucgauuuc

SEQ ID NO: 324297 - RNA, 19 nt, Artificial Sequence
  Description of Artificial Sequence: Synthetic oligonucleotide
caucgagcauguucacgag

SEQ ID NO: 324298 - RNA, 19 nt, Artificial Sequence
  Description of Artificial Sequence: Synthetic oligonucleotide
agacccuccccgaugauga

SEQ ID NO: 324299 - RNA, 19 nt, Artificial Sequence
  Description of Artificial Sequence: Synthetic oligonucleotide
gacccgaauauguacuacu

SEQ ID NO: 324300 - RNA, 19 nt, Artificial Sequence
  Description of Artificial Sequence: Synthetic oligonucleotide
gccccuaagacugaagggc

SEQ ID NO: 324301 - RNA, 19 nt, Artificial Sequence
  Description of Artificial Sequence: Synthetic oligonucleotide
ggccccuaagacugaaggg

SEQ ID NO: 324302 - RNA, 19 nt, Artificial Sequence
  Description of Artificial Sequence: Synthetic oligonucleotide
cauuauguacggacuuaga

SEQ ID NO: 324303 - RNA, 19 nt, Artificial Sequence
  Description of Artificial Sequence: Synthetic oligonucleotide
uacuacucaguugucccau

SEQ ID NO: 324304 - RNA, 19 nt, Artificial Sequence
  Description of Artificial Sequence: Synthetic oligonucleotide
aauggcccaugcucccgga

SEQ ID NO: 324305 - RNA, 19 nt, Artificial Sequence
  Description of Artificial Sequence: Synthetic oligonucleotide
guacuacucaguuguccca

SEQ ID NO: 324306 - RNA, 19 nt, Artificial Sequence
  Description of Artificial Sequence: Synthetic oligonucleotide
ugacccgaauauguacuac

SEQ ID NO: 324307 - RNA, 19 nt, Artificial Sequence
  Description of Artificial Sequence: Synthetic oligonucleotide
agccuuagagaagcaaaga

SEQ ID NO: 324308 - RNA, 19 nt, Artificial Sequence
  Description of Artificial Sequence: Synthetic oligonucleotide
aggcuacaccaggagggcc

SEQ ID NO: 324309 - RNA, 19 nt, Artificial Sequence
  Description of Artificial Sequence: Synthetic oligonucleotide
auauuacccaaggcuggug

SEQ ID NO: 324310 - RNA, 19 nt, Artificial Sequence
  Description of Artificial Sequence: Synthetic oligonucleotide
gcgaucgauguugcgaugg

SEQ ID NO: 324311 - RNA, 19 nt, Artificial Sequence
  Description of Artificial Sequence: Synthetic oligonucleotide
agcgucgaccaaugcggag

SEQ ID NO: 324312 - RNA, 19 nt, Artificial Sequence
  Description of Artificial Sequence: Synthetic oligonucleotide
gcuaggucgaguauagaca

SEQ ID NO: 324313 - RNA, 19 nt, Artificial Sequence
  Description of Artificial Sequence: Synthetic oligonucleotide
ucaauggaccaugcacuaa

SEQ ID NO: 324314 - RNA, 19 nt, Artificial Sequence
  Description of Artificial Sequence: Synthetic oligonucleotide
gguugagacagcugagaga

SEQ ID NO: 324315 - RNA, 19 nt, Artificial Sequence
  Description of Artificial Sequence: Synthetic oligonucleotide
aguaugccuccgguuaaug

SEQ ID NO: 324316 - RNA, 19 nt, Artificial Sequence
  Description of Artificial Sequence: Synthetic oligonucleotide
ccugcguauagcuggguug

SEQ ID NO: 324317 - RNA, 19 nt, Artificial Sequence
  Description of Artificial Sequence: Synthetic oligonucleotide
agugcacuagaaggcuaag

SEQ ID NO: 324318 - RNA, 19 nt, Artificial Sequence
  Description of Artificial Sequence: Synthetic oligonucleotide
gcaaggccaaauugcgaag

SEQ ID NO: 324319 - RNA, 19 nt, Artificial Sequence
  Description of Artificial Sequence: Synthetic oligonucleotide
ccgcucauuauguacggac

SEQ ID NO: 324320 - RNA, 19 nt, Artificial Sequence
  Description of Artificial Sequence: Synthetic oligonucleotide
uuagccggucacaggccuc

SEQ ID NO: 324321 - RNA, 19 nt, Artificial Sequence
  Description of Artificial Sequence: Synthetic oligonucleotide
uccugaagguuucgagauu

SEQ ID NO: 324322 - RNA, 19 nt, Artificial Sequence
  Description of Artificial Sequence: Synthetic oligonucleotide
ccccuaagacugaagggcc

SEQ ID NO: 324323 - RNA, 19 nt, Artificial Sequence
  Description of Artificial Sequence: Synthetic oligonucleotide
aagagccccaggcgaucga

SEQ ID NO: 324324 - RNA, 19 nt, Artificial Sequence
  Description of Artificial Sequence: Synthetic oligonucleotide
cuaaccacuagcccugcgu

SEQ ID NO: 324325 - RNA, 19 nt, Artificial Sequence
  Description of Artificial Sequence: Synthetic oligonucleotide
ccucccuagaaaagucccg

SEQ ID NO: 324326 - RNA, 19 nt, Artificial Sequence
  Description of Artificial Sequence: Synthetic oligonucleotide
caggcgaucgauguugcga

SEQ ID NO: 324327 - RNA, 19 nt, Artificial Sequence
  Description of Artificial Sequence: Synthetic oligonucleotide
  modified_base (5)..(5): a, c, u, g, unknown or other
guccngcaugcacucgagc

SEQ ID NO: 324328 - RNA, 19 nt, Artificial Sequence
  Description of Artificial Sequence: Synthetic oligonucleotide
gugucgagaggcuucccaa

SEQ ID NO: 324329 - RNA, 19 nt, Artificial Sequence
  Description of Artificial Sequence: Synthetic oligonucleotide
uuccaaccguaaugucucu

SEQ ID NO: 324330 - RNA, 19 nt, Artificial Sequence
  Description of Artificial Sequence: Synthetic oligonucleotide
uguucccggaagcgucgac

SEQ ID NO: 324331 - RNA, 19 nt, Artificial Sequence
  Description of Artificial Sequence: Synthetic oligonucleotide
caaccguaaugucucucca

SEQ ID NO: 324332 - RNA, 19 nt, Artificial Sequence
  Description of Artificial Sequence: Synthetic oligonucleotide
uccaaccguaaugucucuc

SEQ ID NO: 324333 - RNA, 19 nt, Artificial Sequence
  Description of Artificial Sequence: Synthetic oligonucleotide
caauggaccaugcacuaau

SEQ ID NO: 324334 - RNA, 19 nt, Artificial Sequence
  Description of Artificial Sequence: Synthetic oligonucleotide
caaugcggagaucccgcuc

SEQ ID NO: 324335 - RNA, 19 nt, Artificial Sequence
  Description of Artificial Sequence: Synthetic oligonucleotide
guaugccuccgguuaaugu

SEQ ID NO: 324336 - RNA, 19 nt, Artificial Sequence
  Description of Artificial Sequence: Synthetic oligonucleotide
cgugcauauuacccaaggc

SEQ ID NO: 324337 - RNA, 19 nt, Artificial Sequence
  Description of Artificial Sequence: Synthetic oligonucleotide
acggugaaggugccugaaa

SEQ ID NO: 324338 - RNA, 19 nt, Artificial Sequence
  Description of Artificial Sequence: Synthetic oligonucleotide
aagcgucgaccaaugcgga

SEQ ID NO: 324339 - RNA, 19 nt, Artificial Sequence
  Description of Artificial Sequence: Synthetic oligonucleotide
agggguugagacagcugag

SEQ ID NO: 324340 - RNA, 19 nt, Artificial Sequence
  Description of Artificial Sequence: Synthetic oligonucleotide
gguuguucccggaagcguc

SEQ ID NO: 324341 - RNA, 19 nt, Artificial Sequence
  Description of Artificial Sequence: Synthetic oligonucleotide
cagacgcacuucaaaaggu

SEQ ID NO: 324342 - RNA, 19 nt, Artificial Sequence
  Description of Artificial Sequence: Synthetic oligonucleotide
gcacggagcaguagcacag

SEQ ID NO: 324343 - RNA, 19 nt, Artificial Sequence
  Description of Artificial Sequence: Synthetic oligonucleotide
ugcguauagcuggguugcc

SEQ ID NO: 324344 - RNA, 19 nt, Artificial Sequence
  Description of Artificial Sequence: Synthetic oligonucleotide
gacuaaccacuagcccugc

SEQ ID NO: 324345 - RNA, 19 nt, Artificial Sequence
  Description of Artificial Sequence: Synthetic oligonucleotide
cucauuauguacggacuua

SEQ ID NO: 324346 - RNA, 19 nt, Artificial Sequence
  Description of Artificial Sequence: Synthetic oligonucleotide
guauagcuggguugccaaa

SEQ ID NO: 324347 - RNA, 19 nt, Artificial Sequence
  Description of Artificial Sequence: Synthetic oligonucleotide
accacuagcccugcguaua

SEQ ID NO: 324348 - RNA, 19 nt, Artificial Sequence
  Description of Artificial Sequence: Synthetic oligonucleotide
cagcuucggaaggccaggg

SEQ ID NO: 324349 - RNA, 19 nt, Artificial Sequence
  Description of Artificial Sequence: Synthetic oligonucleotide
agcccgagcagguggcaaa

SEQ ID NO: 324350 - RNA, 19 nt, Artificial Sequence
  Description of Artificial Sequence: Synthetic oligonucleotide
cuuuggguuggcccggaua

SEQ ID NO: 324351 - RNA, 19 nt, Artificial Sequence
  Description of Artificial Sequence: Synthetic oligonucleotide
uuaccguaucuggcacagc

SEQ ID NO: 324352 - RNA, 19 nt, Artificial Sequence
  Description of Artificial Sequence: Synthetic oligonucleotide
cuguguugccucgauguaa

SEQ ID NO: 324353 - RNA, 19 nt, Artificial Sequence
  Description of Artificial Sequence: Synthetic oligonucleotide
cugacccgaauauguacua

SEQ ID NO: 324354 - RNA, 19 nt, Artificial Sequence
  Description of Artificial Sequence: Synthetic oligonucleotide
ggccgauuccccaaaccug

SEQ ID NO: 324355 - RNA, 19 nt, Artificial Sequence
  Description of Artificial Sequence: Synthetic oligonucleotide
caggucaauggaccaugca

SEQ ID NO: 324356 - RNA, 19 nt, Artificial Sequence
  Description of Artificial Sequence: Synthetic oligonucleotide
uuguucccggaagcgucga

SEQ ID NO: 324357 - RNA, 19 nt, Artificial Sequence
  Description of Artificial Sequence: Synthetic oligonucleotide
aaaugggcugaggccgauu

SEQ ID NO: 324358 - RNA, 19 nt, Artificial Sequence
  Description of Artificial Sequence: Synthetic oligonucleotide
gaaaggcggguaagaagcu

SEQ ID NO: 324359 - RNA, 19 nt, Artificial Sequence
  Description of Artificial Sequence: Synthetic oligonucleotide
cgaguauagacagacagua

SEQ ID NO: 324360 - RNA, 19 nt, Artificial Sequence
  Description of Artificial Sequence: Synthetic oligonucleotide
caacucggcaaauuuuauu

SEQ ID NO: 324361 - RNA, 19 nt, Artificial Sequence
  Description of Artificial Sequence: Synthetic oligonucleotide
  modified_base (3)..(3): a, c, u, g, unknown or other
ccngcaugcacucgagcca

SEQ ID NO: 324362 - RNA, 19 nt, Artificial Sequence
  Description of Artificial Sequence: Synthetic oligonucleotide
gacggugaaggugccugaa

SEQ ID NO: 324363 - RNA, 19 nt, Artificial Sequence
  Description of Artificial Sequence: Synthetic oligonucleotide
accgcucauuauguacgga

SEQ ID NO: 324364 - RNA, 19 nt, Artificial Sequence
  Description of Artificial Sequence: Synthetic oligonucleotide
gagccccaggcgaucgaug

SEQ ID NO: 324365 - RNA, 19 nt, Artificial Sequence
  Description of Artificial Sequence: Synthetic oligonucleotide
uuggguuggcccggauaaa

SEQ ID NO: 324366 - RNA, 19 nt, Artificial Sequence
  Description of Artificial Sequence: Synthetic oligonucleotide
caaagggguugagacagcu

SEQ ID NO: 324367 - RNA, 19 nt, Artificial Sequence
  Description of Artificial Sequence: Synthetic oligonucleotide
ggucaaguccccugacgaa

SEQ ID NO: 324368 - RNA, 19 nt, Artificial Sequence
  Description of Artificial Sequence: Synthetic oligonucleotide
agagccccaggcgaucgau

SEQ ID NO: 324369 - RNA, 19 nt, Artificial Sequence
  Description of Artificial Sequence: Synthetic oligonucleotide
ccgguuaauguccaacaaa

SEQ ID NO: 324370 - RNA, 19 nt, Artificial Sequence
  Description of Artificial Sequence: Synthetic oligonucleotide
gcgucgaccaaugcggaga

SEQ ID NO: 324371 - RNA, 19 nt, Artificial Sequence
  Description of Artificial Sequence: Synthetic oligonucleotide
gugccugaaaacggccaga

SEQ ID NO: 324372 - RNA, 19 nt, Artificial Sequence
  Description of Artificial Sequence: Synthetic oligonucleotide
ccggacacucucaucaaaa

SEQ ID NO: 324373 - RNA, 19 nt, Artificial Sequence
  Description of Artificial Sequence: Synthetic oligonucleotide
gcugacccgaauauguacu

SEQ ID NO: 324374 - RNA, 19 nt, Artificial Sequence
  Description of Artificial Sequence: Synthetic oligonucleotide
ggcuaaauaccucgugcau

SEQ ID NO: 324375 - RNA, 19 nt, Artificial Sequence
  Description of Artificial Sequence: Synthetic oligonucleotide
gcaguaugccuccgguuaa

SEQ ID NO: 324376 - RNA, 19 nt, Artificial Sequence
  Description of Artificial Sequence: Synthetic oligonucleotide
ggcgaucgauguugcgaug

SEQ ID NO: 324377 - RNA, 19 nt, Artificial Sequence
  Description of Artificial Sequence: Synthetic oligonucleotide
gcuggauuagccggucaca

SEQ ID NO: 324378 - RNA, 19 nt, Artificial Sequence
  Description of Artificial Sequence: Synthetic oligonucleotide
ccaggcgaucgauguugcg

SEQ ID NO: 324379 - RNA, 19 nt, Artificial Sequence
  Description of Artificial Sequence: Synthetic oligonucleotide
ccucgugcauauuacccaa

SEQ ID NO: 324380 - RNA, 19 nt, Artificial Sequence
  Description of Artificial Sequence: Synthetic oligonucleotide
cuuccguuccaaccguaau

SEQ ID NO: 324381 - RNA, 19 nt, Artificial Sequence
  Description of Artificial Sequence: Synthetic oligonucleotide
ccgauuccccaaaccuggc

SEQ ID NO: 324382 - RNA, 19 nt, Artificial Sequence
  Description of Artificial Sequence: Synthetic oligonucleotide
cugaggccgauuccccaaa

SEQ ID NO: 324383 - RNA, 19 nt, Artificial Sequence
  Description of Artificial Sequence: Synthetic oligonucleotide
ccagagagacuaaccacua

SEQ ID NO: 324384 - RNA, 19 nt, Artificial Sequence
  Description of Artificial Sequence: Synthetic oligonucleotide
gccucgauguaaggcuccc

SEQ ID NO: 324385 - RNA, 19 nt, Artificial Sequence
  Description of Artificial Sequence: Synthetic oligonucleotide
cucccucaacuagcagcug

SEQ ID NO: 324386 - RNA, 19 nt, Artificial Sequence
  Description of Artificial Sequence: Synthetic oligonucleotide
gcccgagcagguggcaaag

SEQ ID NO: 324387 - RNA, 19 nt, Artificial Sequence
  Description of Artificial Sequence: Synthetic oligonucleotide
cuguucaaccucccucgau

SEQ ID NO: 324388 - RNA, 19 nt, Artificial Sequence
  Description of Artificial Sequence: Synthetic oligonucleotide
cgauguaaggcucccucaa

SEQ ID NO: 324389 - RNA, 19 nt, Artificial Sequence
  Description of Artificial Sequence: Synthetic oligonucleotide
ggcggguaagaagcuggga

SEQ ID NO: 324390 - RNA, 19 nt, Artificial Sequence
  Description of Artificial Sequence: Synthetic oligonucleotide
cagcuaggucgaguauaga

SEQ ID NO: 324391 - RNA, 19 nt, Artificial Sequence
  Description of Artificial Sequence: Synthetic oligonucleotide
gcagugcacuagaaggcua

SEQ ID NO: 324392 - RNA, 19 nt, Artificial Sequence
  Description of Artificial Sequence: Synthetic oligonucleotide
ggguuguucccggaagcgu

SEQ ID NO: 324393 - RNA, 19 nt, Artificial Sequence
  Description of Artificial Sequence: Synthetic oligonucleotide
cccuagaaaagucccggau

SEQ ID NO: 324394 - RNA, 19 nt, Artificial Sequence
  Description of Artificial Sequence: Synthetic oligonucleotide
gguaggcaccagccccaga

SEQ ID NO: 324395 - RNA, 19 nt, Artificial Sequence
  Description of Artificial Sequence: Synthetic oligonucleotide
ggacggaggugagguggac

SEQ ID NO: 324396 - RNA, 19 nt, Artificial Sequence
  Description of Artificial Sequence: Synthetic oligonucleotide
ccuaagacugaagggcccu

SEQ ID NO: 324397 - RNA, 19 nt, Artificial Sequence
  Description of Artificial Sequence: Synthetic oligonucleotide
cacggagcaguagcacagu

SEQ ID NO: 324398 - RNA, 19 nt, Artificial Sequence
  Description of Artificial Sequence: Synthetic oligonucleotide
caguaugccuccgguuaau

SEQ ID NO: 324399 - RNA, 19 nt, Artificial Sequence
  Description of Artificial Sequence: Synthetic oligonucleotide
caaaugggcugaggccgau

SEQ ID NO: 324400 - RNA, 19 nt, Artificial Sequence
  Description of Artificial Sequence: Synthetic oligonucleotide
cccggaagcgucgaccaau

SEQ ID NO: 324401 - RNA, 19 nt, Artificial Sequence
  Description of Artificial Sequence: Synthetic oligonucleotide
cccugcguauagcuggguu

SEQ ID NO: 324402 - RNA, 19 nt, Artificial Sequence
  Description of Artificial Sequence: Synthetic oligonucleotide
cccgagcagguggcaaaga

SEQ ID NO: 324403 - RNA, 19 nt, Artificial Sequence
  Description of Artificial Sequence: Synthetic oligonucleotide
cgucgaccaaugcggagau

SEQ ID NO: 324404 - RNA, 19 nt, Artificial Sequence
  Description of Artificial Sequence: Synthetic oligonucleotide
cgcuuccguuccaaccgua

SEQ ID NO: 324405 - RNA, 19 nt, Artificial Sequence
  Description of Artificial Sequence: Synthetic oligonucleotide
gcccugcguauagcugggu

SEQ ID NO: 324406 - RNA, 19 nt, Artificial Sequence
  Description of Artificial Sequence: Synthetic oligonucleotide
aauguuguaauaaagguac

SEQ ID NO: 324407 - RNA, 19 nt, Artificial Sequence
  Description of Artificial Sequence: Synthetic oligonucleotide
aauguugcuaacuugacag

SEQ ID NO: 324408 - RNA, 19 nt, Artificial Sequence
  Description of Artificial Sequence: Synthetic oligonucleotide
aaagagacugauccaaucc

SEQ ID NO: 324409 - RNA, 19 nt, Artificial Sequence
  Description of Artificial Sequence: Synthetic oligonucleotide
aauacugaaugacagaaca

SEQ ID NO: 324410 - RNA, 19 nt, Artificial Sequence
  Description of Artificial Sequence: Synthetic oligonucleotide
aauaucuaaccccaagagg

SEQ ID NO: 324411 - RNA, 19 nt, Artificial Sequence
  Description of Artificial Sequence: Synthetic oligonucleotide
uuaucggaaaggaacaugg

SEQ ID NO: 324412 - RNA, 19 nt, Artificial Sequence
  Description of Artificial Sequence: Synthetic oligonucleotide
ugagauuuagcaaaggcca

SEQ ID NO: 324413 - RNA, 19 nt, Artificial Sequence
  Description of Artificial Sequence: Synthetic oligonucleotide
agaaauaucaguccgugag

SEQ ID NO: 324414 - RNA, 19 nt, Artificial Sequence
  Description of Artificial Sequence: Synthetic oligonucleotide
uaggucaugaaguaagugg

SEQ ID NO: 324415 - RNA, 19 nt, Artificial Sequence
  Description of Artificial Sequence: Synthetic oligonucleotide
acuucgaugacaaugaggg

SEQ ID NO: 324416 - RNA, 19 nt, Artificial Sequence
  Description of Artificial Sequence: Synthetic oligonucleotide
gaacgaaguacacaggugg

SEQ ID NO: 324417 - RNA, 19 nt, Artificial Sequence
  Description of Artificial Sequence: Synthetic oligonucleotide
aaugaggaccgccaagccc

SEQ ID NO: 324418 - RNA, 19 nt, Artificial Sequence
  Description of Artificial Sequence: Synthetic oligonucleotide
uuuguaucgcucuugagug

SEQ ID NO: 324419 - RNA, 19 nt, Artificial Sequence
  Description of Artificial Sequence: Synthetic oligonucleotide
aagacaauggcuaaguaca

SEQ ID NO: 324420 - RNA, 19 nt, Artificial Sequence
  Description of Artificial Sequence: Synthetic oligonucleotide
agaacuacccaugugggcc

SEQ ID NO: 324421 - RNA, 19 nt, Artificial Sequence
  Description of Artificial Sequence: Synthetic oligonucleotide
ugauauuaacagcugaacu

SEQ ID NO: 324422 - RNA, 19 nt, Artificial Sequence
  Description of Artificial Sequence: Synthetic oligonucleotide
agcucuuuaaacuacaaaa

SEQ ID NO: 324423 - RNA, 19 nt, Artificial Sequence
  Description of Artificial Sequence: Synthetic oligonucleotide
uagucaucgauccaggaug

SEQ ID NO: 324424 - RNA, 19 nt, Artificial Sequence
  Description of Artificial Sequence: Synthetic oligonucleotide
gaugagguauuuuauuaag

SEQ ID NO: 324425 - RNA, 19 nt, Artificial Sequence
  Description of Artificial Sequence: Synthetic oligonucleotide
aaacuugaccucuccauag

SEQ ID NO: 324426 - RNA, 19 nt, Artificial Sequence
  Description of Artificial Sequence: Synthetic oligonucleotide
agcugcguuaaauaucugc

SEQ ID NO: 324427 - RNA, 19 nt, Artificial Sequence
  Description of Artificial Sequence: Synthetic oligonucleotide
ugcguuaaauaucugcugc

SEQ ID NO: 324428 - RNA, 19 nt, Artificial Sequence
  Description of Artificial Sequence: Synthetic oligonucleotide
gaugacuucgaugacaaug

SEQ ID NO: 324429 - RNA, 19 nt, Artificial Sequence
  Description of Artificial Sequence: Synthetic oligonucleotide
cacauaagaaucauuuggc

SEQ ID NO: 324430 - RNA, 19 nt, Artificial Sequence
  Description of Artificial Sequence: Synthetic oligonucleotide
aguacuaucaggauccccg

SEQ ID NO: 324431 - RNA, 19 nt, Artificial Sequence
  Description of Artificial Sequence: Synthetic oligonucleotide
caucgauccaggaugaggg

SEQ ID NO: 324432 - RNA, 19 nt, Artificial Sequence
  Description of Artificial Sequence: Synthetic oligonucleotide
aaguuaaaacccaugagcu

SEQ ID NO: 324433 - RNA, 19 nt, Artificial Sequence
  Description of Artificial Sequence: Synthetic oligonucleotide
ucagcugcguuaaauaucu

SEQ ID NO: 324434 - RNA, 19 nt, Artificial Sequence
  Description of Artificial Sequence: Synthetic oligonucleotide
uacaacauucugaaguccc

SEQ ID NO: 324435 - RNA, 19 nt, Artificial Sequence
  Description of Artificial Sequence: Synthetic oligonucleotide
aaucacauaagaaucauuu

SEQ ID NO: 324436 - RNA, 19 nt, Artificial Sequence
  Description of Artificial Sequence: Synthetic oligonucleotide
ugguaggucaugaaguaag

SEQ ID NO: 324437 - RNA, 19 nt, Artificial Sequence
  Description of Artificial Sequence: Synthetic oligonucleotide
aaaauugaggagccguucu

SEQ ID NO: 324438 - RNA, 19 nt, Artificial Sequence
  Description of Artificial Sequence: Synthetic oligonucleotide
agcgauuugaaauagucaa

SEQ ID NO: 324439 - RNA, 19 nt, Artificial Sequence
  Description of Artificial Sequence: Synthetic oligonucleotide
gaaguaaguggccccaacg

SEQ ID NO: 324440 - RNA, 19 nt, Artificial Sequence
  Description of Artificial Sequence: Synthetic oligonucleotide
agaacacccacaaauacgg

SEQ ID NO: 324441 - RNA, 19 nt, Artificial Sequence
  Description of Artificial Sequence: Synthetic oligonucleotide
agucaaucacauaagaauc

SEQ ID NO: 324442 - RNA, 19 nt, Artificial Sequence
  Description of Artificial Sequence: Synthetic oligonucleotide
aaauugaggagccguucuc

SEQ ID NO: 324443 - RNA, 19 nt, Artificial Sequence
  Description of Artificial Sequence: Synthetic oligonucleotide
uuguaauaaagguaccuac

SEQ ID NO: 324444 - RNA, 19 nt, Artificial Sequence
  Description of Artificial Sequence: Synthetic oligonucleotide
ugaaugacagaacacccac

SEQ ID NO: 324445 - RNA, 19 nt, Artificial Sequence
  Description of Artificial Sequence: Synthetic oligonucleotide
auaucaguccgugaguggc

SEQ ID NO: 324446 - RNA, 19 nt, Artificial Sequence
  Description of Artificial Sequence: Synthetic oligonucleotide
aauacggcuaucacaauug

SEQ ID NO: 324447 - RNA, 19 nt, Artificial Sequence
  Description of Artificial Sequence: Synthetic oligonucleotide
uacugaaugacagaacacc

SEQ ID NO: 324448 - RNA, 19 nt, Artificial Sequence
  Description of Artificial Sequence: Synthetic oligonucleotide
agaagcauugcaaaacugg

SEQ ID NO: 324449 - RNA, 19 nt, Artificial Sequence
  Description of Artificial Sequence: Synthetic oligonucleotide
acuguuacuuucccgauug

SEQ ID NO: 324450 - RNA, 19 nt, Artificial Sequence
  Description of Artificial Sequence: Synthetic oligonucleotide
aauuggucgcagccagucc

SEQ ID NO: 324451 - RNA, 19 nt, Artificial Sequence
  Description of Artificial Sequence: Synthetic oligonucleotide
uagaagacguagaacacac

SEQ ID NO: 324452 - RNA, 19 nt, Artificial Sequence
  Description of Artificial Sequence: Synthetic oligonucleotide
uuccgcugaauacagaacu

SEQ ID NO: 324453 - RNA, 19 nt, Artificial Sequence
  Description of Artificial Sequence: Synthetic oligonucleotide
auauggagcccagagacac

SEQ ID NO: 324454 - RNA, 19 nt, Artificial Sequence
  Description of Artificial Sequence: Synthetic oligonucleotide
acuguaugggaacacucgg

SEQ ID NO: 324455 - RNA, 19 nt, Artificial Sequence
  Description of Artificial Sequence: Synthetic oligonucleotide
uaauaaagguaccuacaac

SEQ ID NO: 324456 - RNA, 19 nt, Artificial Sequence
  Description of Artificial Sequence: Synthetic oligonucleotide
uucaugacugcaauacuga

SEQ ID NO: 324457 - RNA, 19 nt, Artificial Sequence
  Description of Artificial Sequence: Synthetic oligonucleotide
uacuguucguagaagacgu

SEQ ID NO: 324458 - RNA, 19 nt, Artificial Sequence
  Description of Artificial Sequence: Synthetic oligonucleotide
cagaacacccacaaauacg

SEQ ID NO: 324459 - RNA, 19 nt, Artificial Sequence
  Description of Artificial Sequence: Synthetic oligonucleotide
uugggucaaucacagaagc

SEQ ID NO: 324460 - RNA, 19 nt, Artificial Sequence
  Description of Artificial Sequence: Synthetic oligonucleotide
aaauacggcuaucacaauu

SEQ ID NO: 324461 - RNA, 19 nt, Artificial Sequence
  Description of Artificial Sequence: Synthetic oligonucleotide
acaaaauguuguaauaaag

SEQ ID NO: 324462 - RNA, 19 nt, Artificial Sequence
  Description of Artificial Sequence: Synthetic oligonucleotide
acacucgguaguuacuccc

SEQ ID NO: 324463 - RNA, 19 nt, Artificial Sequence
  Description of Artificial Sequence: Synthetic oligonucleotide
aauuugagauuuagcaaag

SEQ ID NO: 324464 - RNA, 19 nt, Artificial Sequence
  Description of Artificial Sequence: Synthetic oligonucleotide
cauuguaggggccacuucc

SEQ ID NO: 324465 - RNA, 19 nt, Artificial Sequence
  Description of Artificial Sequence: Synthetic oligonucleotide
uccuccagaacgaaguaca

SEQ ID NO: 324466 - RNA, 19 nt, Artificial Sequence
  Description of Artificial Sequence: Synthetic oligonucleotide
uuaugugucccaaggcaag

SEQ ID NO: 324467 - RNA, 19 nt, Artificial Sequence
  Description of Artificial Sequence: Synthetic oligonucleotide
uccauagacaaagucacca

SEQ ID NO: 324468 - RNA, 19 nt, Artificial Sequence
  Description of Artificial Sequence: Synthetic oligonucleotide
acggcuaucacaauugguc

SEQ ID NO: 324469 - RNA, 19 nt, Artificial Sequence
  Description of Artificial Sequence: Synthetic oligonucleotide
ugaggcuacauuuucccca

SEQ ID NO: 324470 - RNA, 19 nt, Artificial Sequence
  Description of Artificial Sequence: Synthetic oligonucleotide
ugugauuccgcugaauaca

SEQ ID NO: 324471 - RNA, 19 nt, Artificial Sequence
  Description of Artificial Sequence: Synthetic oligonucleotide
uucgaugacaaugaggguc

SEQ ID NO: 324472 - RNA, 19 nt, Artificial Sequence
  Description of Artificial Sequence: Synthetic oligonucleotide
gauuugaaauagucaauca

SEQ ID NO: 324473 - RNA, 19 nt, Artificial Sequence
  Description of Artificial Sequence: Synthetic oligonucleotide
gaagaaauaucaguccgug

SEQ ID NO: 324474 - RNA, 19 nt, Artificial Sequence
  Description of Artificial Sequence: Synthetic oligonucleotide
aguguagucaugaccuucc

SEQ ID NO: 324475 - RNA, 19 nt, Artificial Sequence
  Description of Artificial Sequence: Synthetic oligonucleotide
ugacuaaggacacagcauu

SEQ ID NO: 324476 - RNA, 19 nt, Artificial Sequence
  Description of Artificial Sequence: Synthetic oligonucleotide
gagucagaggucugcagcg

SEQ ID NO: 324477 - RNA, 19 nt, Artificial Sequence
  Description of Artificial Sequence: Synthetic oligonucleotide
gaaguacacagguggaccc

SEQ ID NO: 324478 - RNA, 19 nt, Artificial Sequence
  Description of Artificial Sequence: Synthetic oligonucleotide
acauaagaaucauuuggca

SEQ ID NO: 324479 - RNA, 19 nt, Artificial Sequence
  Description of Artificial Sequence: Synthetic oligonucleotide
aaauguuguaauaaaggua

SEQ ID NO: 324480 - RNA, 19 nt, Artificial Sequence
  Description of Artificial Sequence: Synthetic oligonucleotide
ugaccgagcgauuugaaau

SEQ ID NO: 324481 - RNA, 19 nt, Artificial Sequence
  Description of Artificial Sequence: Synthetic oligonucleotide
aaucccuccaaauuuugua

SEQ ID NO: 324482 - RNA, 19 nt, Artificial Sequence
  Description of Artificial Sequence: Synthetic oligonucleotide
uaggucugcacuagaauga

SEQ ID NO: 324483 - RNA, 19 nt, Artificial Sequence
  Description of Artificial Sequence: Synthetic oligonucleotide
ugacaguacagcuuuccug

SEQ ID NO: 324484 - RNA, 19 nt, Artificial Sequence
  Description of Artificial Sequence: Synthetic oligonucleotide
aaaacccaugagcuuuguc

SEQ ID NO: 324485 - RNA, 19 nt, Artificial Sequence
  Description of Artificial Sequence: Synthetic oligonucleotide
ugaauacagaacuacccau

SEQ ID NO: 324486 - RNA, 19 nt, Artificial Sequence
  Description of Artificial Sequence: Synthetic oligonucleotide
uaucggaaaggaacauggg

SEQ ID NO: 324487 - RNA, 19 nt, Artificial Sequence
  Description of Artificial Sequence: Synthetic oligonucleotide
auauagucagcagaggucu

SEQ ID NO: 324488 - RNA, 19 nt, Artificial Sequence
  Description of Artificial Sequence: Synthetic oligonucleotide
guaagugugauuccgcuga

SEQ ID NO: 324489 - RNA, 19 nt, Artificial Sequence
  Description of Artificial Sequence: Synthetic oligonucleotide
auagacaaagucaccaaag

SEQ ID NO: 324490 - RNA, 19 nt, Artificial Sequence
  Description of Artificial Sequence: Synthetic oligonucleotide
uucaugguuucugugaugu

SEQ ID NO: 324491 - RNA, 19 nt, Artificial Sequence
  Description of Artificial Sequence: Synthetic oligonucleotide
uagaaugaagauguuacuc

SEQ ID NO: 324492 - RNA, 19 nt, Artificial Sequence
  Description of Artificial Sequence: Synthetic oligonucleotide
ucaucgauccaggaugagg

SEQ ID NO: 324493 - RNA, 19 nt, Artificial Sequence
  Description of Artificial Sequence: Synthetic oligonucleotide
caacguaagugucaucucc

SEQ ID NO: 324494 - RNA, 19 nt, Artificial Sequence
  Description of Artificial Sequence: Synthetic oligonucleotide
uuuaccgaugguccuacgu

SEQ ID NO: 324495 - RNA, 19 nt, Artificial Sequence
  Description of Artificial Sequence: Synthetic oligonucleotide
uauauggcugcagaacucc

SEQ ID NO: 324496 - RNA, 19 nt, Artificial Sequence
  Description of Artificial Sequence: Synthetic oligonucleotide
cuaaaguaaaauaucucaa

SEQ ID NO: 324497 - RNA, 19 nt, Artificial Sequence
  Description of Artificial Sequence: Synthetic oligonucleotide
caagcccgcaaacagagag

SEQ ID NO: 324498 - RNA, 19 nt, Artificial Sequence
  Description of Artificial Sequence: Synthetic oligonucleotide
uucccgauugaguucaucu

SEQ ID NO: 324499 - RNA, 19 nt, Artificial Sequence
  Description of Artificial Sequence: Synthetic oligonucleotide
uguucguagaagacguaga

SEQ ID NO: 324500 - RNA, 19 nt, Artificial Sequence
  Description of Artificial Sequence: Synthetic oligonucleotide
uccuacguagcugaguaag

SEQ ID NO: 324501 - RNA, 19 nt, Artificial Sequence
  Description of Artificial Sequence: Synthetic oligonucleotide
agcggaugcagguuggguc

SEQ ID NO: 324502 - RNA, 19 nt, Artificial Sequence
  Description of Artificial Sequence: Synthetic oligonucleotide
accccgaacauguugacca

SEQ ID NO: 324503 - RNA, 19 nt, Artificial Sequence
  Description of Artificial Sequence: Synthetic oligonucleotide
augaggaccgccaagcccg

SEQ ID NO: 324504 - RNA, 19 nt, Artificial Sequence
  Description of Artificial Sequence: Synthetic oligonucleotide
aagaaauaucaguccguga

SEQ ID NO: 324505 - RNA, 19 nt, Artificial Sequence
  Description of Artificial Sequence: Synthetic oligonucleotide
gcuauggugauacacauga

SEQ ID NO: 324506 - RNA, 19 nt, Artificial Sequence
  Description of Artificial Sequence: Synthetic oligonucleotide
gaauacagaacuacccaug

SEQ ID NO: 324507 - RNA, 19 nt, Artificial Sequence
  Description of Artificial Sequence: Synthetic oligonucleotide
aaugccgaggucucagaga

SEQ ID NO: 324508 - RNA, 19 nt, Artificial Sequence
  Description of Artificial Sequence: Synthetic oligonucleotide
uguaagugugauuccgcug

SEQ ID NO: 324509 - RNA, 19 nt, Artificial Sequence
  Description of Artificial Sequence: Synthetic oligonucleotide
uugacuaaggacacagcau

SEQ ID NO: 324510 - RNA, 19 nt, Artificial Sequence
  Description of Artificial Sequence: Synthetic oligonucleotide
uugguacucauggugaaug

SEQ ID NO: 324511 - RNA, 19 nt, Artificial Sequence
  Description of Artificial Sequence: Synthetic oligonucleotide
gacuucgaugacaaugagg

SEQ ID NO: 324512 - RNA, 19 nt, Artificial Sequence
  Description of Artificial Sequence: Synthetic oligonucleotide
agauuuagcaaaggccaac

SEQ ID NO: 324513 - RNA, 19 nt, Artificial Sequence
  Description of Artificial Sequence: Synthetic oligonucleotide
ugaguggcguuguagaguc

SEQ ID NO: 324514 - RNA, 19 nt, Artificial Sequence
  Description of Artificial Sequence: Synthetic oligonucleotide
guagaacacacuguauggg

SEQ ID NO: 324515 - RNA, 19 nt, Artificial Sequence
  Description of Artificial Sequence: Synthetic oligonucleotide
acguagcugaguaagacag

SEQ ID NO: 324516 - RNA, 19 nt, Artificial Sequence
  Description of Artificial Sequence: Synthetic oligonucleotide
guucaugacugcaauacug

SEQ ID NO: 324517 - RNA, 19 nt, Artificial Sequence
  Description of Artificial Sequence: Synthetic oligonucleotide
agcagaggucuuaaggacc

SEQ ID NO: 324518 - RNA, 19 nt, Artificial Sequence
  Description of Artificial Sequence: Synthetic oligonucleotide
ccuaaaguaaaauaucuca

SEQ ID NO: 324519 - RNA, 19 nt, Artificial Sequence
  Description of Artificial Sequence: Synthetic oligonucleotide
aaagucaccaaagccugcu

SEQ ID NO: 324520 - RNA, 19 nt, Artificial Sequence
  Description of Artificial Sequence: Synthetic oligonucleotide
auccuaaaguaaaauaucu

SEQ ID NO: 324521 - RNA, 19 nt, Artificial Sequence
  Description of Artificial Sequence: Synthetic oligonucleotide
aguaagacaauggcuaagu

SEQ ID NO: 324522 - RNA, 19 nt, Artificial Sequence
  Description of Artificial Sequence: Synthetic oligonucleotide
ugauacacaugaugacugc

SEQ ID NO: 324523 - RNA, 19 nt, Artificial Sequence
  Description of Artificial Sequence: Synthetic oligonucleotide
uaaauaucugcugcaccag

SEQ ID NO: 324524 - RNA, 19 nt, Artificial Sequence
  Description of Artificial Sequence: Synthetic oligonucleotide
uaccgaugguccuacguag

SEQ ID NO: 324525 - RNA, 19 nt, Artificial Sequence
  Description of Artificial Sequence: Synthetic oligonucleotide
auuggucgcagccaguccu

SEQ ID NO: 324526 - RNA, 19 nt, Artificial Sequence
  Description of Artificial Sequence: Synthetic oligonucleotide
uuauauggcugcagaacuc

SEQ ID NO: 324527 - RNA, 19 nt, Artificial Sequence
  Description of Artificial Sequence: Synthetic oligonucleotide
uuguaagugugauuccgcu

SEQ ID NO: 324528 - RNA, 19 nt, Artificial Sequence
  Description of Artificial Sequence: Synthetic oligonucleotide
gaugauauuaacagcugaa

SEQ ID NO: 324529 - RNA, 19 nt, Artificial Sequence
  Description of Artificial Sequence: Synthetic oligonucleotide
cauaaccccgaacauguug

SEQ ID NO: 324530 - RNA, 19 nt, Artificial Sequence
  Description of Artificial Sequence: Synthetic oligonucleotide
uucauagcaucgauauagu

SEQ ID NO: 324531 - RNA, 19 nt, Artificial Sequence
  Description of Artificial Sequence: Synthetic oligonucleotide
uacguagcugaguaagaca

SEQ ID NO: 324532 - RNA, 19 nt, Artificial Sequence
  Description of Artificial Sequence: Synthetic oligonucleotide
auacggcuaucacaauugg

SEQ ID NO: 324533 - RNA, 19 nt, Artificial Sequence
  Description of Artificial Sequence: Synthetic oligonucleotide
auacugaaugacagaacac

SEQ ID NO: 324534 - RNA, 19 nt, Artificial Sequence
  Description of Artificial Sequence: Synthetic oligonucleotide
ugcccagugagauuuuaga

SEQ ID NO: 324535 - RNA, 19 nt, Artificial Sequence
  Description of Artificial Sequence: Synthetic oligonucleotide
cauaacuagcuggugacug

SEQ ID NO: 324536 - RNA, 19 nt, Artificial Sequence
  Description of Artificial Sequence: Synthetic oligonucleotide
uuaccgaugguccuacgua

SEQ ID NO: 324537 - RNA, 19 nt, Artificial Sequence
  Description of Artificial Sequence: Synthetic oligonucleotide
aacuugaccucuccauaga

SEQ ID NO: 324538 - RNA, 19 nt, Artificial Sequence
  Description of Artificial Sequence: Synthetic oligonucleotide
ucaucuccgaugauauuaa

SEQ ID NO: 324539 - RNA, 19 nt, Artificial Sequence
  Description of Artificial Sequence: Synthetic oligonucleotide
uugacaguacagcuuuccu

SEQ ID NO: 324540 - RNA, 19 nt, Artificial Sequence
  Description of Artificial Sequence: Synthetic oligonucleotide
agacguagaacacacugua

SEQ ID NO: 324541 - RNA, 19 nt, Artificial Sequence
  Description of Artificial Sequence: Synthetic oligonucleotide
uuguaucgcucuugagugg

SEQ ID NO: 324542 - RNA, 19 nt, Artificial Sequence
  Description of Artificial Sequence: Synthetic oligonucleotide
acagaacuacccauguggg

SEQ ID NO: 324543 - RNA, 19 nt, Artificial Sequence
  Description of Artificial Sequence: Synthetic oligonucleotide
uggugaguggcguuguaga

SEQ ID NO: 324544 - RNA, 19 nt, Artificial Sequence
  Description of Artificial Sequence: Synthetic oligonucleotide
aaggcaagggaaauauaca

SEQ ID NO: 324545 - RNA, 19 nt, Artificial Sequence
  Description of Artificial Sequence: Synthetic oligonucleotide
auuguaggggccacuuccc

SEQ ID NO: 324546 - RNA, 19 nt, Artificial Sequence
  Description of Artificial Sequence: Synthetic oligonucleotide
aagacguagaacacacugu

SEQ ID NO: 324547 - RNA, 19 nt, Artificial Sequence
  Description of Artificial Sequence: Synthetic oligonucleotide
aaguacacagguggacccg

SEQ ID NO: 324548 - RNA, 19 nt, Artificial Sequence
  Description of Artificial Sequence: Synthetic oligonucleotide
gaagucaaugaggaccgcc

SEQ ID NO: 324549 - RNA, 19 nt, Artificial Sequence
  Description of Artificial Sequence: Synthetic oligonucleotide
guaugggaacacucgguag

SEQ ID NO: 324550 - RNA, 19 nt, Artificial Sequence
  Description of Artificial Sequence: Synthetic oligonucleotide
ugaaugcucuuguuauaug

SEQ ID NO: 324551 - RNA, 19 nt, Artificial Sequence
  Description of Artificial Sequence: Synthetic oligonucleotide
aagucaaugaggaccgcca

SEQ ID NO: 324552 - RNA, 19 nt, Artificial Sequence
  Description of Artificial Sequence: Synthetic oligonucleotide
aaaaugccgaggucucaga

SEQ ID NO: 324553 - RNA, 19 nt, Artificial Sequence
  Description of Artificial Sequence: Synthetic oligonucleotide
agugcagguacugaccgag

SEQ ID NO: 324554 - RNA, 19 nt, Artificial Sequence
  Description of Artificial Sequence: Synthetic oligonucleotide
caauacugaaugacagaac

SEQ ID NO: 324555 - RNA, 19 nt, Artificial Sequence
  Description of Artificial Sequence: Synthetic oligonucleotide
ugugguaggucaugaagua

SEQ ID NO: 324556 - RNA, 19 nt, Artificial Sequence
  Description of Artificial Sequence: Synthetic oligonucleotide
uuuuggagaacaagcucua

SEQ ID NO: 324557 - RNA, 19 nt, Artificial Sequence
  Description of Artificial Sequence: Synthetic oligonucleotide
aaggaacauuguaggggcc

SEQ ID NO: 324558 - RNA, 19 nt, Artificial Sequence
  Description of Artificial Sequence: Synthetic oligonucleotide
ucauagcaucgauauaguc

SEQ ID NO: 324559 - RNA, 19 nt, Artificial Sequence
  Description of Artificial Sequence: Synthetic oligonucleotide
cuuuguaucgcucuugagu

SEQ ID NO: 324560 - RNA, 19 nt, Artificial Sequence
  Description of Artificial Sequence: Synthetic oligonucleotide
acuaucaggauccccgcaa

SEQ ID NO: 324561 - RNA, 19 nt, Artificial Sequence
  Description of Artificial Sequence: Synthetic oligonucleotide
ucgauauagucagcagagg

SEQ ID NO: 324562 - RNA, 19 nt, Artificial Sequence
  Description of Artificial Sequence: Synthetic oligonucleotide
uccaauccgauuuccacuu

SEQ ID NO: 324563 - RNA, 19 nt, Artificial Sequence
  Description of Artificial Sequence: Synthetic oligonucleotide
ucugcacuagaaugaagau

SEQ ID NO: 324564 - RNA, 19 nt, Artificial Sequence
  Description of Artificial Sequence: Synthetic oligonucleotide
ugggucaaucacagaagca

SEQ ID NO: 324565 - RNA, 19 nt, Artificial Sequence
  Description of Artificial Sequence: Synthetic oligonucleotide
auaaccccgaacauguuga

SEQ ID NO: 324566 - RNA, 19 nt, Artificial Sequence
  Description of Artificial Sequence: Synthetic oligonucleotide
acgaaguacacagguggac

SEQ ID NO: 324567 - RNA, 19 nt, Artificial Sequence
  Description of Artificial Sequence: Synthetic oligonucleotide
cuaacuugacaguacagcu

SEQ ID NO: 324568 - RNA, 19 nt, Artificial Sequence
  Description of Artificial Sequence: Synthetic oligonucleotide
gaaaugccacagcucauca

SEQ ID NO: 324569 - RNA, 19 nt, Artificial Sequence
  Description of Artificial Sequence: Synthetic oligonucleotide
uguugcuaacuugacagua

SEQ ID NO: 324570 - RNA, 19 nt, Artificial Sequence
  Description of Artificial Sequence: Synthetic oligonucleotide
auagucaaucacauaagaa

SEQ ID NO: 324571 - RNA, 19 nt, Artificial Sequence
  Description of Artificial Sequence: Synthetic oligonucleotide
uccucaaauguugcuaacu

SEQ ID NO: 324572 - RNA, 19 nt, Artificial Sequence
  Description of Artificial Sequence: Synthetic oligonucleotide
cuguucguagaagacguag

SEQ ID NO: 324573 - RNA, 19 nt, Artificial Sequence
  Description of Artificial Sequence: Synthetic oligonucleotide
uacagcucuuuaugugucc

SEQ ID NO: 324574 - RNA, 19 nt, Artificial Sequence
  Description of Artificial Sequence: Synthetic oligonucleotide
guuaucggaaaggaacaug

SEQ ID NO: 324575 - RNA, 19 nt, Artificial Sequence
  Description of Artificial Sequence: Synthetic oligonucleotide
cugcguuaaauaucugcug

SEQ ID NO: 324576 - RNA, 19 nt, Artificial Sequence
  Description of Artificial Sequence: Synthetic oligonucleotide
aagacgucacuguuacuuu

SEQ ID NO: 324577 - RNA, 19 nt, Artificial Sequence
  Description of Artificial Sequence: Synthetic oligonucleotide
gggguuaucggaaaggaac

SEQ ID NO: 324578 - RNA, 19 nt, Artificial Sequence
  Description of Artificial Sequence: Synthetic oligonucleotide
aucgauccaggaugagggg

SEQ ID NO: 324579 - RNA, 19 nt, Artificial Sequence
  Description of Artificial Sequence: Synthetic oligonucleotide
uacggcuaucacaauuggu

SEQ ID NO: 324580 - RNA, 19 nt, Artificial Sequence
  Description of Artificial Sequence: Synthetic oligonucleotide
agaagcgaaacagguagcu

SEQ ID NO: 324581 - RNA, 19 nt, Artificial Sequence
  Description of Artificial Sequence: Synthetic oligonucleotide
cucuaaugaggccuacaac

SEQ ID NO: 324582 - RNA, 19 nt, Artificial Sequence
  Description of Artificial Sequence: Synthetic oligonucleotide
gugugauuccgcugaauac

SEQ ID NO: 324583 - RNA, 19 nt, Artificial Sequence
  Description of Artificial Sequence: Synthetic oligonucleotide
cuuacucggcuuccuuugg

SEQ ID NO: 324584 - RNA, 19 nt, Artificial Sequence
  Description of Artificial Sequence: Synthetic oligonucleotide
gaacacucgguaguuacuc

SEQ ID NO: 324585 - RNA, 19 nt, Artificial Sequence
  Description of Artificial Sequence: Synthetic oligonucleotide
ggcuaaguacauccuaaag

SEQ ID NO: 324586 - RNA, 19 nt, Artificial Sequence
  Description of Artificial Sequence: Synthetic oligonucleotide
cagaacuacccaugugggc

SEQ ID NO: 324587 - RNA, 19 nt, Artificial Sequence
  Description of Artificial Sequence: Synthetic oligonucleotide
caauccgauuuccacuuug

SEQ ID NO: 324588 - RNA, 19 nt, Artificial Sequence
  Description of Artificial Sequence: Synthetic oligonucleotide
cuguaagcagcaugucccc

SEQ ID NO: 324589 - RNA, 19 nt, Artificial Sequence
  Description of Artificial Sequence: Synthetic oligonucleotide
cuacguagcugaguaagac

SEQ ID NO: 324590 - RNA, 19 nt, Artificial Sequence
  Description of Artificial Sequence: Synthetic oligonucleotide
agguaccuacaacauccuc

SEQ ID NO: 324591 - RNA, 19 nt, Artificial Sequence
  Description of Artificial Sequence: Synthetic oligonucleotide
auuccgcugaauacagaac

SEQ ID NO: 324592 - RNA, 19 nt, Artificial Sequence
  Description of Artificial Sequence: Synthetic oligonucleotide
gaagacgcucgucucucug

SEQ ID NO: 324593 - RNA, 19 nt, Artificial Sequence
  Description of Artificial Sequence: Synthetic oligonucleotide
gacugauccaauccgauuu

SEQ ID NO: 324594 - RNA, 19 nt, Artificial Sequence
  Description of Artificial Sequence: Synthetic oligonucleotide
aacgaaguacacaggugga

SEQ ID NO: 324595 - RNA, 19 nt, Artificial Sequence
  Description of Artificial Sequence: Synthetic oligonucleotide
ucgguaguuacuccccuua

SEQ ID NO: 324596 - RNA, 19 nt, Artificial Sequence
  Description of Artificial Sequence: Synthetic oligonucleotide
uuguaggggccacuucccc

SEQ ID NO: 324597 - RNA, 19 nt, Artificial Sequence
  Description of Artificial Sequence: Synthetic oligonucleotide
uggcuauggugauacacau

SEQ ID NO: 324598 - RNA, 19 nt, Artificial Sequence
  Description of Artificial Sequence: Synthetic oligonucleotide
uacuaucaggauccccgca

SEQ ID NO: 324599 - RNA, 19 nt, Artificial Sequence
  Description of Artificial Sequence: Synthetic oligonucleotide
cauaagaaucauuuggcau

SEQ ID NO: 324600 - RNA, 19 nt, Artificial Sequence
  Description of Artificial Sequence: Synthetic oligonucleotide
ggcguuguagagucuacag

SEQ ID NO: 324601 - RNA, 19 nt, Artificial Sequence
  Description of Artificial Sequence: Synthetic oligonucleotide
aucuccgaugauauuaaca

SEQ ID NO: 324602 - RNA, 19 nt, Artificial Sequence
  Description of Artificial Sequence: Synthetic oligonucleotide
gguaccuacaacauccuca

SEQ ID NO: 324603 - RNA, 19 nt, Artificial Sequence
  Description of Artificial Sequence: Synthetic oligonucleotide
aucuaaccccaagaggcuc

SEQ ID NO: 324604 - RNA, 19 nt, Artificial Sequence
  Description of Artificial Sequence: Synthetic oligonucleotide
guacuaucaggauccccgc

SEQ ID NO: 324605 - RNA, 19 nt, Artificial Sequence
  Description of Artificial Sequence: Synthetic oligonucleotide
uuauuuaccgaugguccua

SEQ ID NO: 324606 - RNA, 19 nt, Artificial Sequence
  Description of Artificial Sequence: Synthetic oligonucleotide
auggcuauggugauacaca

SEQ ID NO: 324607 - RNA, 19 nt, Artificial Sequence
  Description of Artificial Sequence: Synthetic oligonucleotide
agaacgaaguacacaggug

SEQ ID NO: 324608 - RNA, 19 nt, Artificial Sequence
  Description of Artificial Sequence: Synthetic oligonucleotide
gugauuccgcugaauacag

SEQ ID NO: 324609 - RNA, 19 nt, Artificial Sequence
  Description of Artificial Sequence: Synthetic oligonucleotide
uuacucggcuuccuuuggu

SEQ ID NO: 324610 - RNA, 19 nt, Artificial Sequence
  Description of Artificial Sequence: Synthetic oligonucleotide
caugaugacugcagaccac

SEQ ID NO: 324611 - RNA, 19 nt, Artificial Sequence
  Description of Artificial Sequence: Synthetic oligonucleotide
guaggucaugaaguaagug

SEQ ID NO: 324612 - RNA, 19 nt, Artificial Sequence
  Description of Artificial Sequence: Synthetic oligonucleotide
gagcgauuugaaauaguca

SEQ ID NO: 324613 - RNA, 19 nt, Artificial Sequence
  Description of Artificial Sequence: Synthetic oligonucleotide
ugaagucccuugauaguuu

SEQ ID NO: 324614 - RNA, 19 nt, Artificial Sequence
  Description of Artificial Sequence: Synthetic oligonucleotide
ugacugcaauacugaauga

SEQ ID NO: 324615 - RNA, 19 nt, Artificial Sequence
  Description of Artificial Sequence: Synthetic oligonucleotide
gaagcauugcaaaacuggu

SEQ ID NO: 324616 - RNA, 19 nt, Artificial Sequence
  Description of Artificial Sequence: Synthetic oligonucleotide
caaugaggaccgccaagcc

SEQ ID NO: 324617 - RNA, 19 nt, Artificial Sequence
  Description of Artificial Sequence: Synthetic oligonucleotide
cuuuguggguaguguaguc

SEQ ID NO: 324618 - RNA, 19 nt, Artificial Sequence
  Description of Artificial Sequence: Synthetic oligonucleotide
auguugcuaacuugacagu

SEQ ID NO: 324619 - RNA, 19 nt, Artificial Sequence
  Description of Artificial Sequence: Synthetic oligonucleotide
uacugaccgagcgauuuga

SEQ ID NO: 324620 - RNA, 19 nt, Artificial Sequence
  Description of Artificial Sequence: Synthetic oligonucleotide
uggcuaaguacauccuaaa

SEQ ID NO: 324621 - RNA, 19 nt, Artificial Sequence
  Description of Artificial Sequence: Synthetic oligonucleotide
ggucagguacuguucguag

SEQ ID NO: 324622 - RNA, 19 nt, Artificial Sequence
  Description of Artificial Sequence: Synthetic oligonucleotide
uugaggagccguucucgcu

SEQ ID NO: 324623 - RNA, 19 nt, Artificial Sequence
  Description of Artificial Sequence: Synthetic oligonucleotide
ugauuccgcugaauacaga

SEQ ID NO: 324624 - RNA, 19 nt, Artificial Sequence
  Description of Artificial Sequence: Synthetic oligonucleotide
gaacuacccaugugggcca

SEQ ID NO: 324625 - RNA, 19 nt, Artificial Sequence
  Description of Artificial Sequence: Synthetic oligonucleotide
gccauaacuagcuggugac

SEQ ID NO: 324626 - RNA, 19 nt, Artificial Sequence
  Description of Artificial Sequence: Synthetic oligonucleotide
caauuggucgcagccaguc

SEQ ID NO: 324627 - RNA, 19 nt, Artificial Sequence
  Description of Artificial Sequence: Synthetic oligonucleotide
auggcuaaguacauccuaa

SEQ ID NO: 324628 - RNA, 19 nt, Artificial Sequence
  Description of Artificial Sequence: Synthetic oligonucleotide
accgagcgauuugaaauag

SEQ ID NO: 324629 - RNA, 19 nt, Artificial Sequence
  Description of Artificial Sequence: Synthetic oligonucleotide
aagcucuaaugaggccuac

SEQ ID NO: 324630 - RNA, 19 nt, Artificial Sequence
  Description of Artificial Sequence: Synthetic oligonucleotide
ucucgcucggucccuuugu

SEQ ID NO: 324631 - RNA, 19 nt, Artificial Sequence
  Description of Artificial Sequence: Synthetic oligonucleotide
auccccgcaaugcccagug

SEQ ID NO: 324632 - RNA, 19 nt, Artificial Sequence
  Description of Artificial Sequence: Synthetic oligonucleotide
gauugggauucuuguagcu

SEQ ID NO: 324633 - RNA, 19 nt, Artificial Sequence
  Description of Artificial Sequence: Synthetic oligonucleotide
cagaacgaaguacacaggu

SEQ ID NO: 324634 - RNA, 19 nt, Artificial Sequence
  Description of Artificial Sequence: Synthetic oligonucleotide
ggcaauagugaagacguca

SEQ ID NO: 324635 - RNA, 19 nt, Artificial Sequence
  Description of Artificial Sequence: Synthetic oligonucleotide
gcuuacucggcuuccuuug

SEQ ID NO: 324636 - RNA, 19 nt, Artificial Sequence
  Description of Artificial Sequence: Synthetic oligonucleotide
gcucggucccuuuguaucg

SEQ ID NO: 324637 - RNA, 19 nt, Artificial Sequence
  Description of Artificial Sequence: Synthetic oligonucleotide
gaagcgaaacagguagcuc

SEQ ID NO: 324638 - RNA, 19 nt, Artificial Sequence
  Description of Artificial Sequence: Synthetic oligonucleotide
gaccgagcgauuugaaaua

SEQ ID NO: 324639 - RNA, 19 nt, Artificial Sequence
  Description of Artificial Sequence: Synthetic oligonucleotide
agacugauccaauccgauu

SEQ ID NO: 324640 - RNA, 19 nt, Artificial Sequence
  Description of Artificial Sequence: Synthetic oligonucleotide
uggguaguguagucaugac

SEQ ID NO: 324641 - RNA, 19 nt, Artificial Sequence
  Description of Artificial Sequence: Synthetic oligonucleotide
agacgcucgucucucuggu

SEQ ID NO: 324642 - RNA, 19 nt, Artificial Sequence
  Description of Artificial Sequence: Synthetic oligonucleotide
ucccgauugaguucaucuu

SEQ ID NO: 324643 - RNA, 19 nt, Artificial Sequence
  Description of Artificial Sequence: Synthetic oligonucleotide
cuggugaguggcguuguag

SEQ ID NO: 324644 - RNA, 19 nt, Artificial Sequence
  Description of Artificial Sequence: Synthetic oligonucleotide
gaaugacagaacacccaca

SEQ ID NO: 324645 - RNA, 19 nt, Artificial Sequence
  Description of Artificial Sequence: Synthetic oligonucleotide
ugaagacgcccagggagca

SEQ ID NO: 324646 - RNA, 19 nt, Artificial Sequence
  Description of Artificial Sequence: Synthetic oligonucleotide
uacucggcuuccuuuggua

SEQ ID NO: 324647 - RNA, 19 nt, Artificial Sequence
  Description of Artificial Sequence: Synthetic oligonucleotide
gcguuguagagucuacagc

SEQ ID NO: 324648 - RNA, 19 nt, Artificial Sequence
  Description of Artificial Sequence: Synthetic oligonucleotide
cuagaaugaagauguuacu

SEQ ID NO: 324649 - RNA, 19 nt, Artificial Sequence
  Description of Artificial Sequence: Synthetic oligonucleotide
uuacuccccuuagaauuca

SEQ ID NO: 324650 - RNA, 19 nt, Artificial Sequence
  Description of Artificial Sequence: Synthetic oligonucleotide
guacugaccgagcgauuug

SEQ ID NO: 324651 - RNA, 19 nt, Artificial Sequence
  Description of Artificial Sequence: Synthetic oligonucleotide
gcaucgaggacagugcccc

SEQ ID NO: 324652 - RNA, 19 nt, Artificial Sequence
  Description of Artificial Sequence: Synthetic oligonucleotide
gcuccgaguaagacaaugg

SEQ ID NO: 324653 - RNA, 19 nt, Artificial Sequence
  Description of Artificial Sequence: Synthetic oligonucleotide
caccagaagucugcuacag

SEQ ID NO: 324654 - RNA, 19 nt, Artificial Sequence
  Description of Artificial Sequence: Synthetic oligonucleotide
ugaccaggaucauggcuau

SEQ ID NO: 324655 - RNA, 19 nt, Artificial Sequence
  Description of Artificial Sequence: Synthetic oligonucleotide
cgagcgauuugaaauaguc

SEQ ID NO: 324656 - RNA, 19 nt, Artificial Sequence
  Description of Artificial Sequence: Synthetic oligonucleotide
uccgugaguggcuccgagu

SEQ ID NO: 324657 - RNA, 19 nt, Artificial Sequence
  Description of Artificial Sequence: Synthetic oligonucleotide
agugaagacgucacuguua

SEQ ID NO: 324658 - RNA, 19 nt, Artificial Sequence
  Description of Artificial Sequence: Synthetic oligonucleotide
ucaguacuaucaggauccc

SEQ ID NO: 324659 - RNA, 19 nt, Artificial Sequence
  Description of Artificial Sequence: Synthetic oligonucleotide
caucuccgaugauauuaac

SEQ ID NO: 324660 - RNA, 19 nt, Artificial Sequence
  Description of Artificial Sequence: Synthetic oligonucleotide
caaugauggucagguacug

SEQ ID NO: 324661 - RNA, 19 nt, Artificial Sequence
  Description of Artificial Sequence: Synthetic oligonucleotide
ugaagacgcucgucucucu

SEQ ID NO: 324662 - RNA, 19 nt, Artificial Sequence
  Description of Artificial Sequence: Synthetic oligonucleotide
guagucaucgauccaggau

SEQ ID NO: 324663 - RNA, 19 nt, Artificial Sequence
  Description of Artificial Sequence: Synthetic oligonucleotide
agucaucgauccaggauga

SEQ ID NO: 324664 - RNA, 19 nt, Artificial Sequence
  Description of Artificial Sequence: Synthetic oligonucleotide
uggcguuguagagucuaca

SEQ ID NO: 324665 - RNA, 19 nt, Artificial Sequence
  Description of Artificial Sequence: Synthetic oligonucleotide
agcccgcaaacagagagaa

SEQ ID NO: 324666 - RNA, 19 nt, Artificial Sequence
  Description of Artificial Sequence: Synthetic oligonucleotide
ugggauucuuguagcuuuu

SEQ ID NO: 324667 - RNA, 19 nt, Artificial Sequence
  Description of Artificial Sequence: Synthetic oligonucleotide
cgauuugaaauagucaauc

SEQ ID NO: 324668 - RNA, 19 nt, Artificial Sequence
  Description of Artificial Sequence: Synthetic oligonucleotide
cgugugguaggucaugaag

SEQ ID NO: 324669 - RNA, 19 nt, Artificial Sequence
  Description of Artificial Sequence: Synthetic oligonucleotide
aagcccgcaaacagagaga

SEQ ID NO: 324670 - RNA, 19 nt, Artificial Sequence
  Description of Artificial Sequence: Synthetic oligonucleotide
cggcuaucacaauuggucg

SEQ ID NO: 324671 - RNA, 19 nt, Artificial Sequence
  Description of Artificial Sequence: Synthetic oligonucleotide
ugaagacgucacuguuacu

SEQ ID NO: 324672 - RNA, 19 nt, Artificial Sequence
  Description of Artificial Sequence: Synthetic oligonucleotide
ucggcuuccuuugguacuc

SEQ ID NO: 324673 - RNA, 19 nt, Artificial Sequence
  Description of Artificial Sequence: Synthetic oligonucleotide
caguccgugaguggcuccg

SEQ ID NO: 324674 - RNA, 19 nt, Artificial Sequence
  Description of Artificial Sequence: Synthetic oligonucleotide
gccuaugcggguauaguug

SEQ ID NO: 324675 - RNA, 19 nt, Artificial Sequence
  Description of Artificial Sequence: Synthetic oligonucleotide
caguacuaucaggaucccc

SEQ ID NO: 324676 - RNA, 19 nt, Artificial Sequence
  Description of Artificial Sequence: Synthetic oligonucleotide
cgagugcagguacugaccg

SEQ ID NO: 324677 - RNA, 19 nt, Artificial Sequence
  Description of Artificial Sequence: Synthetic oligonucleotide
aacuacccaugugggccag

SEQ ID NO: 324678 - RNA, 19 nt, Artificial Sequence
  Description of Artificial Sequence: Synthetic oligonucleotide
gcggguauaguuguccagc

SEQ ID NO: 324679 - RNA, 19 nt, Artificial Sequence
  Description of Artificial Sequence: Synthetic oligonucleotide
uacccaugugggccagcgc

SEQ ID NO: 324680 - RNA, 19 nt, Artificial Sequence
  Description of Artificial Sequence: Synthetic oligonucleotide
uggcaauagugaagacguc

SEQ ID NO: 324681 - RNA, 19 nt, Artificial Sequence
  Description of Artificial Sequence: Synthetic oligonucleotide
acuccccuuagaauucaug

SEQ ID NO: 324682 - RNA, 19 nt, Artificial Sequence
  Description of Artificial Sequence: Synthetic oligonucleotide
ugaggaccgccaagcccgc

SEQ ID NO: 324683 - RNA, 19 nt, Artificial Sequence
  Description of Artificial Sequence: Synthetic oligonucleotide
ccgaugauauuaacagcug

SEQ ID NO: 324684 - RNA, 19 nt, Artificial Sequence
  Description of Artificial Sequence: Synthetic oligonucleotide
gcucuuuaugugucccaag

SEQ ID NO: 324685 - RNA, 19 nt, Artificial Sequence
  Description of Artificial Sequence: Synthetic oligonucleotide
cuaugcggguauaguuguc

SEQ ID NO: 324686 - RNA, 19 nt, Artificial Sequence
  Description of Artificial Sequence: Synthetic oligonucleotide
ggguuaucggaaaggaaca

SEQ ID NO: 324687 - RNA, 19 nt, Artificial Sequence
  Description of Artificial Sequence: Synthetic oligonucleotide
ccagaagucugcuacagcu

SEQ ID NO: 324688 - RNA, 19 nt, Artificial Sequence
  Description of Artificial Sequence: Synthetic oligonucleotide
cugaccgagcgauuugaaa

SEQ ID NO: 324689 - RNA, 19 nt, Artificial Sequence
  Description of Artificial Sequence: Synthetic oligonucleotide
cgaaguacacagguggacc

SEQ ID NO: 324690 - RNA, 19 nt, Artificial Sequence
  Description of Artificial Sequence: Synthetic oligonucleotide
cagccggcaucgaggacag

SEQ ID NO: 324691 - RNA, 19 nt, Artificial Sequence
  Description of Artificial Sequence: Synthetic oligonucleotide
accgccaagcccgcaaaca

SEQ ID NO: 324692 - RNA, 19 nt, Artificial Sequence
  Description of Artificial Sequence: Synthetic oligonucleotide
uggaugccucuuccauugu

SEQ ID NO: 324693 - RNA, 19 nt, Artificial Sequence
  Description of Artificial Sequence: Synthetic oligonucleotide
aggacugcggcgcgaccca

SEQ ID NO: 324694 - RNA, 19 nt, Artificial Sequence
  Description of Artificial Sequence: Synthetic oligonucleotide
gagugcagguacugaccga

SEQ ID NO: 324695 - RNA, 19 nt, Artificial Sequence
  Description of Artificial Sequence: Synthetic oligonucleotide
gaagacgcccagggagcag

SEQ ID NO: 324696 - RNA, 19 nt, Artificial Sequence
  Description of Artificial Sequence: Synthetic oligonucleotide
uggcguagcugauggcaau

SEQ ID NO: 324697 - RNA, 19 nt, Artificial Sequence
  Description of Artificial Sequence: Synthetic oligonucleotide
aggauccccgcaaugccca

SEQ ID NO: 324698 - RNA, 19 nt, Artificial Sequence
  Description of Artificial Sequence: Synthetic oligonucleotide
aggaccgccaagcccgcaa

SEQ ID NO: 324699 - RNA, 19 nt, Artificial Sequence
  Description of Artificial Sequence: Synthetic oligonucleotide
ccacauaaccccgaacaug

SEQ ID NO: 324700 - RNA, 19 nt, Artificial Sequence
  Description of Artificial Sequence: Synthetic oligonucleotide
uuggucgcagccaguccuu

SEQ ID NO: 324701 - RNA, 19 nt, Artificial Sequence
  Description of Artificial Sequence: Synthetic oligonucleotide
ucggucccuuuguaucgcu

SEQ ID NO: 324702 - RNA, 19 nt, Artificial Sequence
  Description of Artificial Sequence: Synthetic oligonucleotide
cucggucccuuuguaucgc

SEQ ID NO: 324703 - RNA, 19 nt, Artificial Sequence
  Description of Artificial Sequence: Synthetic oligonucleotide
augccauaacuagcuggug

SEQ ID NO: 324704 - RNA, 19 nt, Artificial Sequence
  Description of Artificial Sequence: Synthetic oligonucleotide
gggucaaucacagaagcau

SEQ ID NO: 324705 - RNA, 19 nt, Artificial Sequence
  Description of Artificial Sequence: Synthetic oligonucleotide
cguuaaauaucugcugcac

SEQ ID NO: 324706 - RNA, 19 nt, Artificial Sequence
  Description of Artificial Sequence: Synthetic oligonucleotide
gaccgccaagcccgcaaac

SEQ ID NO: 324707 - RNA, 19 nt, Artificial Sequence
  Description of Artificial Sequence: Synthetic oligonucleotide
gguugacuaaggacacagc

SEQ ID NO: 324708 - RNA, 19 nt, Artificial Sequence
  Description of Artificial Sequence: Synthetic oligonucleotide
ccgauugaguucaucuuca

SEQ ID NO: 324709 - RNA, 19 nt, Artificial Sequence
  Description of Artificial Sequence: Synthetic oligonucleotide
ggaacauuguaggggccac

SEQ ID NO: 324710 - RNA, 19 nt, Artificial Sequence
  Description of Artificial Sequence: Synthetic oligonucleotide
guacacagguggacccgag

SEQ ID NO: 324711 - RNA, 19 nt, Artificial Sequence
  Description of Artificial Sequence: Synthetic oligonucleotide
auguuccuggcuacaaguu

SEQ ID NO: 324712 - RNA, 19 nt, Artificial Sequence
  Description of Artificial Sequence: Synthetic oligonucleotide
cguagcugaguaagacagg

SEQ ID NO: 324713 - RNA, 19 nt, Artificial Sequence
  Description of Artificial Sequence: Synthetic oligonucleotide
caauagugaagacgucacu

SEQ ID NO: 324714 - RNA, 19 nt, Artificial Sequence
  Description of Artificial Sequence: Synthetic oligonucleotide
ucggcuuacucggcuuccu

SEQ ID NO: 324715 - RNA, 19 nt, Artificial Sequence
  Description of Artificial Sequence: Synthetic oligonucleotide
cugcuacagcucuuuaugu

SEQ ID NO: 324716 - RNA, 19 nt, Artificial Sequence
  Description of Artificial Sequence: Synthetic oligonucleotide
gucaucgauccaggaugag

SEQ ID NO: 324717 - RNA, 19 nt, Artificial Sequence
  Description of Artificial Sequence: Synthetic oligonucleotide
aucgaggacagugccccaa

SEQ ID NO: 324718 - RNA, 19 nt, Artificial Sequence
  Description of Artificial Sequence: Synthetic oligonucleotide
caaaacuggugaguggcgu

SEQ ID NO: 324719 - RNA, 19 nt, Artificial Sequence
  Description of Artificial Sequence: Synthetic oligonucleotide
ccgccaagcccgcaaacag

SEQ ID NO: 324720 - RNA, 19 nt, Artificial Sequence
  Description of Artificial Sequence: Synthetic oligonucleotide
ggguauaguuguccagcuc

SEQ ID NO: 324721 - RNA, 19 nt, Artificial Sequence
  Description of Artificial Sequence: Synthetic oligonucleotide
gccguucucgcucgguccc

SEQ ID NO: 324722 - RNA, 19 nt, Artificial Sequence
  Description of Artificial Sequence: Synthetic oligonucleotide
gagacugauccaauccgau

SEQ ID NO: 324723 - RNA, 19 nt, Artificial Sequence
  Description of Artificial Sequence: Synthetic oligonucleotide
acaauuggucgcagccagu

SEQ ID NO: 324724 - RNA, 19 nt, Artificial Sequence
  Description of Artificial Sequence: Synthetic oligonucleotide
augaaguaaguggccccaa

SEQ ID NO: 324725 - RNA, 19 nt, Artificial Sequence
  Description of Artificial Sequence: Synthetic oligonucleotide
gcagguacugaccgagcga

SEQ ID NO: 324726 - RNA, 19 nt, Artificial Sequence
  Description of Artificial Sequence: Synthetic oligonucleotide
cgaugauauuaacagcuga

SEQ ID NO: 324727 - RNA, 19 nt, Artificial Sequence
  Description of Artificial Sequence: Synthetic oligonucleotide
aggagccguucucgcucgg

SEQ ID NO: 324728 - RNA, 19 nt, Artificial Sequence
  Description of Artificial Sequence: Synthetic oligonucleotide
ggccuacaacauucugaag

SEQ ID NO: 324729 - RNA, 19 nt, Artificial Sequence
  Description of Artificial Sequence: Synthetic oligonucleotide
gguaggucugcacuagaau

SEQ ID NO: 324730 - RNA, 19 nt, Artificial Sequence
  Description of Artificial Sequence: Synthetic oligonucleotide
ggcuauggugauacacaug

SEQ ID NO: 324731 - RNA, 19 nt, Artificial Sequence
  Description of Artificial Sequence: Synthetic oligonucleotide
ggcauugaaagagacugau

SEQ ID NO: 324732 - RNA, 19 nt, Artificial Sequence
  Description of Artificial Sequence: Synthetic oligonucleotide
acuggugaguggcguugua

SEQ ID NO: 324733 - RNA, 19 nt, Artificial Sequence
  Description of Artificial Sequence: Synthetic oligonucleotide
cgcgacccagucaaaguag

SEQ ID NO: 324734 - RNA, 19 nt, Artificial Sequence
  Description of Artificial Sequence: Synthetic oligonucleotide
gacguagaacacacuguau

SEQ ID NO: 324735 - RNA, 19 nt, Artificial Sequence
  Description of Artificial Sequence: Synthetic oligonucleotide
guggcguuguagagucuac

SEQ ID NO: 324736 - RNA, 19 nt, Artificial Sequence
  Description of Artificial Sequence: Synthetic oligonucleotide
caggauguccagccgauuu

SEQ ID NO: 324737 - RNA, 19 nt, Artificial Sequence
  Description of Artificial Sequence: Synthetic oligonucleotide
ccuacguagcugaguaaga

SEQ ID NO: 324738 - RNA, 19 nt, Artificial Sequence
  Description of Artificial Sequence: Synthetic oligonucleotide
acugaccgagcgauuugaa

SEQ ID NO: 324739 - RNA, 19 nt, Artificial Sequence
  Description of Artificial Sequence: Synthetic oligonucleotide
uaaccccaagaggcucaca

SEQ ID NO: 324740 - RNA, 19 nt, Artificial Sequence
  Description of Artificial Sequence: Synthetic oligonucleotide
cccgaacauguugaccagg

SEQ ID NO: 324741 - RNA, 19 nt, Artificial Sequence
  Description of Artificial Sequence: Synthetic oligonucleotide
cuucgaugacaaugagggu

SEQ ID NO: 324742 - RNA, 19 nt, Artificial Sequence
  Description of Artificial Sequence: Synthetic oligonucleotide
cagguacugaccgagcgau

SEQ ID NO: 324743 - RNA, 19 nt, Artificial Sequence
  Description of Artificial Sequence: Synthetic oligonucleotide
gccgccgcacaccauguuc

SEQ ID NO: 324744 - RNA, 19 nt, Artificial Sequence
  Description of Artificial Sequence: Synthetic oligonucleotide
cgcucggucccuuuguauc

SEQ ID NO: 324745 - RNA, 19 nt, Artificial Sequence
  Description of Artificial Sequence: Synthetic oligonucleotide
guccuacguagcugaguaa

SEQ ID NO: 324746 - RNA, 19 nt, Artificial Sequence
  Description of Artificial Sequence: Synthetic oligonucleotide
cuaucaggauccccgcaau

SEQ ID NO: 324747 - RNA, 19 nt, Artificial Sequence
  Description of Artificial Sequence: Synthetic oligonucleotide
gguacugaccgagcgauuu

SEQ ID NO: 324748 - RNA, 19 nt, Artificial Sequence
  Description of Artificial Sequence: Synthetic oligonucleotide
guaguguagucaugaccuu

SEQ ID NO: 324749 - RNA, 19 nt, Artificial Sequence
  Description of Artificial Sequence: Synthetic oligonucleotide
ccuaugcggguauaguugu

SEQ ID NO: 324750 - RNA, 19 nt, Artificial Sequence
  Description of Artificial Sequence: Synthetic oligonucleotide
gguaggucaugaaguaagu

SEQ ID NO: 324751 - RNA, 19 nt, Artificial Sequence
  Description of Artificial Sequence: Synthetic oligonucleotide
uggucgcagccaguccuuc

SEQ ID NO: 324752 - RNA, 19 nt, Artificial Sequence
  Description of Artificial Sequence: Synthetic oligonucleotide
acuguucguagaagacgua

SEQ ID NO: 324753 - RNA, 19 nt, Artificial Sequence
  Description of Artificial Sequence: Synthetic oligonucleotide
gacgcucgucucucuggua

SEQ ID NO: 324754 - RNA, 19 nt, Artificial Sequence
  Description of Artificial Sequence: Synthetic oligonucleotide
gcagcggaugcagguuggg

SEQ ID NO: 324755 - RNA, 19 nt, Artificial Sequence
  Description of Artificial Sequence: Synthetic oligonucleotide
cacaggauguccagccgau

SEQ ID NO: 324756 - RNA, 19 nt, Artificial Sequence
  Description of Artificial Sequence: Synthetic oligonucleotide
uggcuacaaguugggcuuu

SEQ ID NO: 324757 - RNA, 19 nt, Artificial Sequence
  Description of Artificial Sequence: Synthetic oligonucleotide
gcgcgacccagucaaagua

SEQ ID NO: 324758 - RNA, 19 nt, Artificial Sequence
  Description of Artificial Sequence: Synthetic oligonucleotide
ccccgaacauguugaccag

SEQ ID NO: 324759 - RNA, 19 nt, Artificial Sequence
  Description of Artificial Sequence: Synthetic oligonucleotide
aguccgugaguggcuccga

SEQ ID NO: 324760 - RNA, 19 nt, Artificial Sequence
  Description of Artificial Sequence: Synthetic oligonucleotide
ggccccaacguaaguguca

SEQ ID NO: 324761 - RNA, 19 nt, Artificial Sequence
  Description of Artificial Sequence: Synthetic oligonucleotide
caaauacggcuaucacaau

SEQ ID NO: 324762 - RNA, 19 nt, Artificial Sequence
  Description of Artificial Sequence: Synthetic oligonucleotide
augugggccagcgccucuu

SEQ ID NO: 324763 - RNA, 19 nt, Artificial Sequence
  Description of Artificial Sequence: Synthetic oligonucleotide
cucgcucggucccuuugua

SEQ ID NO: 324764 - RNA, 19 nt, Artificial Sequence
  Description of Artificial Sequence: Synthetic oligonucleotide
ggcgcgacccagucaaagu

SEQ ID NO: 324765 - RNA, 19 nt, Artificial Sequence
  Description of Artificial Sequence: Synthetic oligonucleotide
ggaacacucgguaguuacu

SEQ ID NO: 324766 - RNA, 19 nt, Artificial Sequence
  Description of Artificial Sequence: Synthetic oligonucleotide
gguuaucggaaaggaacau

SEQ ID NO: 324767 - RNA, 19 nt, Artificial Sequence
  Description of Artificial Sequence: Synthetic oligonucleotide
gcgauuugaaauagucaau

SEQ ID NO: 324768 - RNA, 19 nt, Artificial Sequence
  Description of Artificial Sequence: Synthetic oligonucleotide
cgaugguccuacguagcug

SEQ ID NO: 324769 - RNA, 19 nt, Artificial Sequence
  Description of Artificial Sequence: Synthetic oligonucleotide
gauccccgcaaugcccagu

SEQ ID NO: 324770 - RNA, 19 nt, Artificial Sequence
  Description of Artificial Sequence: Synthetic oligonucleotide
ggaccgccaagcccgcaaa

SEQ ID NO: 324771 - RNA, 19 nt, Artificial Sequence
  Description of Artificial Sequence: Synthetic oligonucleotide
cucgguaguuacuccccuu

SEQ ID NO: 324772 - RNA, 19 nt, Artificial Sequence
  Description of Artificial Sequence: Synthetic oligonucleotide
cacccacaaauacggcuau

SEQ ID NO: 324773 - RNA, 19 nt, Artificial Sequence
  Description of Artificial Sequence: Synthetic oligonucleotide
gcgaaacagguagcucuca

SEQ ID NO: 324774 - RNA, 19 nt, Artificial Sequence
  Description of Artificial Sequence: Synthetic oligonucleotide
ggcguagcugauggcaaua

SEQ ID NO: 324775 - RNA, 19 nt, Artificial Sequence
  Description of Artificial Sequence: Synthetic oligonucleotide
agguacugaccgagcgauu

SEQ ID NO: 324776 - RNA, 19 nt, Artificial Sequence
  Description of Artificial Sequence: Synthetic oligonucleotide
gcccgcaaacagagagaag

SEQ ID NO: 324777 - RNA, 19 nt, Artificial Sequence
  Description of Artificial Sequence: Synthetic oligonucleotide
gaggaccgccaagcccgca

SEQ ID NO: 324778 - RNA, 19 nt, Artificial Sequence
  Description of Artificial Sequence: Synthetic oligonucleotide
ggacugcggcgcgacccag

SEQ ID NO: 324779 - RNA, 19 nt, Artificial Sequence
  Description of Artificial Sequence: Synthetic oligonucleotide
cugcggcgcgacccaguca

SEQ ID NO: 324780 - RNA, 19 nt, Artificial Sequence
  Description of Artificial Sequence: Synthetic oligonucleotide
gcgacccagucaaaguagu

SEQ ID NO: 324781 - RNA, 19 nt, Artificial Sequence
  Description of Artificial Sequence: Synthetic oligonucleotide
ccaagcccgcaaacagaga

SEQ ID NO: 324782 - RNA, 19 nt, Artificial Sequence
  Description of Artificial Sequence: Synthetic oligonucleotide
gacugcggcgcgacccagu

SEQ ID NO: 324783 - RNA, 19 nt, Artificial Sequence
  Description of Artificial Sequence: Synthetic oligonucleotide
ccgaugguccuacguagcu

SEQ ID NO: 324784 - RNA, 19 nt, Artificial Sequence
  Description of Artificial Sequence: Synthetic oligonucleotide
cagcggaugcagguugggu

SEQ ID NO: 324785 - RNA, 19 nt, Artificial Sequence
  Description of Artificial Sequence: Synthetic oligonucleotide
ccgccgcacaccauguucu

SEQ ID NO: 324786 - RNA, 19 nt, Artificial Sequence
  Description of Artificial Sequence: Synthetic oligonucleotide
cggcgcgacccagucaaag

SEQ ID NO: 324787 - RNA, 19 nt, Artificial Sequence
  Description of Artificial Sequence: Synthetic oligonucleotide
ccgugugguaggucaugaa

SEQ ID NO: 324788 - RNA, 19 nt, Artificial Sequence
  Description of Artificial Sequence: Synthetic oligonucleotide
ccauaacuagcuggugacu

SEQ ID NO: 324789 - RNA, 19 nt, Artificial Sequence
  Description of Artificial Sequence: Synthetic oligonucleotide
gccccaacguaagugucau

SEQ ID NO: 324790 - RNA, 19 nt, Artificial Sequence
  Description of Artificial Sequence: Synthetic oligonucleotide
ccgagcgauuugaaauagu

SEQ ID NO: 324791 - RNA, 19 nt, Artificial Sequence
  Description of Artificial Sequence: Synthetic oligonucleotide
cguagcugauggcaauagu

SEQ ID NO: 324792 - RNA, 19 nt, Artificial Sequence
  Description of Artificial Sequence: Synthetic oligonucleotide
ggacccgagugcagguacu

SEQ ID NO: 324793 - RNA, 19 nt, Artificial Sequence
  Description of Artificial Sequence: Synthetic oligonucleotide
cagaggucuuaaggaccgu

SEQ ID NO: 324794 - RNA, 19 nt, Artificial Sequence
  Description of Artificial Sequence: Synthetic oligonucleotide
ccgcaaugcccagugagau

SEQ ID NO: 324795 - RNA, 19 nt, Artificial Sequence
  Description of Artificial Sequence: Synthetic oligonucleotide
ggaccgugugguaggucau

SEQ ID NO: 324796 - RNA, 19 nt, Artificial Sequence
  Description of Artificial Sequence: Synthetic oligonucleotide
agccggcaucgaggacagu

SEQ ID NO: 324797 - RNA, 19 nt, Artificial Sequence
  Description of Artificial Sequence: Synthetic oligonucleotide
gcacuagaaugaagauguu

SEQ ID NO: 324798 - RNA, 19 nt, Artificial Sequence
  Description of Artificial Sequence: Synthetic oligonucleotide
ccaauccgauuuccacuuu

SEQ ID NO: 324799 - RNA, 19 nt, Artificial Sequence
  Description of Artificial Sequence: Synthetic oligonucleotide
gcggcgcgacccagucaaa

SEQ ID NO: 324800 - RNA, 19 nt, Artificial Sequence
  Description of Artificial Sequence: Synthetic oligonucleotide
ccguucucgcucggucccu

SEQ ID NO: 324801 - RNA, 19 nt, Artificial Sequence
  Description of Artificial Sequence: Synthetic oligonucleotide
cggcuuacucggcuuccuu

SEQ ID NO: 324802 - RNA, 19 nt, Artificial Sequence
  Description of Artificial Sequence: Synthetic oligonucleotide
ccaugccgccgcacaccau

SEQ ID NO: 324803 - RNA, 19 nt, Artificial Sequence
  Description of Artificial Sequence: Synthetic oligonucleotide
cguucucgcucggucccuu

SEQ ID NO: 324804 - RNA, 19 nt, Artificial Sequence
  Description of Artificial Sequence: Synthetic oligonucleotide
  modified_base (6)..(6): a, c, u, g, unknown or other
aaaaunuuuacauaaacag

SEQ ID NO: 324805 - RNA, 19 nt, Artificial Sequence
  Description of Artificial Sequence: Synthetic oligonucleotide
aacaauaucucuuauggcc

SEQ ID NO: 324806 - RNA, 19 nt, Artificial Sequence
  Description of Artificial Sequence: Synthetic oligonucleotide
cuauaaaucacuaacaauc

SEQ ID NO: 324807 - RNA, 19 nt, Artificial Sequence
  Description of Artificial Sequence: Synthetic oligonucleotide
uauuauaucacucaacuuc

SEQ ID NO: 324808 - RNA, 19 nt, Artificial Sequence
  Description of Artificial Sequence: Synthetic oligonucleotide
aaugguuuuguccauaucu

SEQ ID NO: 324809 - RNA, 19 nt, Artificial Sequence
  Description of Artificial Sequence: Synthetic oligonucleotide
ugaauuaccaaucccacag

SEQ ID NO: 324810 - RNA, 19 nt, Artificial Sequence
  Description of Artificial Sequence: Synthetic oligonucleotide
aaagauauaucauucugug

SEQ ID NO: 324811 - RNA, 19 nt, Artificial Sequence
  Description of Artificial Sequence: Synthetic oligonucleotide
ugauuuguuacuaauaagu

SEQ ID NO: 324812 - RNA, 19 nt, Artificial Sequence
  Description of Artificial Sequence: Synthetic oligonucleotide
aaucuugaauuaccaaucc

SEQ ID NO: 324813 - RNA, 19 nt, Artificial Sequence
  Description of Artificial Sequence: Synthetic oligonucleotide
  modified_base (8)..(8): a, c, u, g, unknown or other
acaaaaunuuuacauaaac

SEQ ID NO: 324814 - RNA, 19 nt, Artificial Sequence
  Description of Artificial Sequence: Synthetic oligonucleotide
uuacuaauaagucaugcug

SEQ ID NO: 324815 - RNA, 19 nt, Artificial Sequence
  Description of Artificial Sequence: Synthetic oligonucleotide
ucuuaucugaggaagacag

SEQ ID NO: 324816 - RNA, 19 nt, Artificial Sequence
  Description of Artificial Sequence: Synthetic oligonucleotide
uacaguuuaacaugcaccg

SEQ ID NO: 324817 - RNA, 19 nt, Artificial Sequence
  Description of Artificial Sequence: Synthetic oligonucleotide
agauauaucauucugugga

SEQ ID NO: 324818 - RNA, 19 nt, Artificial Sequence
  Description of Artificial Sequence: Synthetic oligonucleotide
  modified_base (4)..(4): a, c, u, g, unknown or other
aaunuuuacauaaacagua

SEQ ID NO: 324819 - RNA, 19 nt, Artificial Sequence
  Description of Artificial Sequence: Synthetic oligonucleotide
uucaauuccaaauagcacu

SEQ ID NO: 324820 - RNA, 19 nt, Artificial Sequence
  Description of Artificial Sequence: Synthetic oligonucleotide
uaguaaucaauaauaaaug

SEQ ID NO: 324821 - RNA, 19 nt, Artificial Sequence
  Description of Artificial Sequence: Synthetic oligonucleotide
aguauagcaaccugcaaac

SEQ ID NO: 324822 - RNA, 19 nt, Artificial Sequence
  Description of Artificial Sequence: Synthetic oligonucleotide
aacaaaucccugcuuuucc

SEQ ID NO: 324823 - RNA, 19 nt, Artificial Sequence
  Description of Artificial Sequence: Synthetic oligonucleotide
aaaauuaguugguccauag

SEQ ID NO: 324824 - RNA, 19 nt, Artificial Sequence
  Description of Artificial Sequence: Synthetic oligonucleotide
aauuaauucaaaaccaacu

SEQ ID NO: 324825 - RNA, 19 nt, Artificial Sequence
  Description of Artificial Sequence: Synthetic oligonucleotide
uucuacaguaaucucacag

SEQ ID NO: 324826 - RNA, 19 nt, Artificial Sequence
  Description of Artificial Sequence: Synthetic oligonucleotide
uuucuaaugcacaaugggc

SEQ ID NO: 324827 - RNA, 19 nt, Artificial Sequence
  Description of Artificial Sequence: Synthetic oligonucleotide
ucuauaaugccuuggauuc

SEQ ID NO: 324828 - RNA, 19 nt, Artificial Sequence
  Description of Artificial Sequence: Synthetic oligonucleotide
ugugaaacuccaaguaugg

SEQ ID NO: 324829 - RNA, 19 nt, Artificial Sequence
  Description of Artificial Sequence: Synthetic oligonucleotide
uauaauuauucacucacuc

SEQ ID NO: 324830 - RNA, 19 nt, Artificial Sequence
  Description of Artificial Sequence: Synthetic oligonucleotide
aaucguaauagucccuuuc

SEQ ID NO: 324831 - RNA, 19 nt, Artificial Sequence
  Description of Artificial Sequence: Synthetic oligonucleotide
uucuaaugcacaaugggca

SEQ ID NO: 324832 - RNA, 19 nt, Artificial Sequence
  Description of Artificial Sequence: Synthetic oligonucleotide
uuaacaugcaccgagaauc

SEQ ID NO: 324833 - RNA, 19 nt, Artificial Sequence
  Description of Artificial Sequence: Synthetic oligonucleotide
cauuuaugcauucauauuc

SEQ ID NO: 324834 - RNA, 19 nt, Artificial Sequence
  Description of Artificial Sequence: Synthetic oligonucleotide
ucugcugaaaucguaauag

SEQ ID NO: 324835 - RNA, 19 nt, Artificial Sequence
  Description of Artificial Sequence: Synthetic oligonucleotide
aaggguccgacuuugaugu

SEQ ID NO: 324836 - RNA, 19 nt, Artificial Sequence
  Description of Artificial Sequence: Synthetic oligonucleotide
  modified_base (7)..(7): a, c, u, g, unknown or other
caaaaunuuuacauaaaca

SEQ ID NO: 324837 - RNA, 19 nt, Artificial Sequence
  Description of Artificial Sequence: Synthetic oligonucleotide
uugauaacugauuuguuac

SEQ ID NO: 324838 - RNA, 19 nt, Artificial Sequence
  Description of Artificial Sequence: Synthetic oligonucleotide
aaugggcaguaauuaauuc

SEQ ID NO: 324839 - RNA, 19 nt, Artificial Sequence
  Description of Artificial Sequence: Synthetic oligonucleotide
aaauuugggacucaacgaa

SEQ ID NO: 324840 - RNA, 19 nt, Artificial Sequence
  Description of Artificial Sequence: Synthetic oligonucleotide
uauaaugcagggaaucuga

SEQ ID NO: 324841 - RNA, 19 nt, Artificial Sequence
  Description of Artificial Sequence: Synthetic oligonucleotide
aaaucacuaacaaucacug

SEQ ID NO: 324842 - RNA, 19 nt, Artificial Sequence
  Description of Artificial Sequence: Synthetic oligonucleotide
auuagggcugauauaaugc

SEQ ID NO: 324843 - RNA, 19 nt, Artificial Sequence
  Description of Artificial Sequence: Synthetic oligonucleotide
  modified_base (5)..(5): a, c, u, g, unknown or other
aaaunuuuacauaaacagu

SEQ ID NO: 324844 - RNA, 19 nt, Artificial Sequence
  Description of Artificial Sequence: Synthetic oligonucleotide
aaaaccaacuguguaauga

SEQ ID NO: 324845 - RNA, 19 nt, Artificial Sequence
  Description of Artificial Sequence: Synthetic oligonucleotide
ucauuggaaauucaugaga

SEQ ID NO: 324846 - RNA, 19 nt, Artificial Sequence
  Description of Artificial Sequence: Synthetic oligonucleotide
uuugauaaccuccguucgg

SEQ ID NO: 324847 - RNA, 19 nt, Artificial Sequence
  Description of Artificial Sequence: Synthetic oligonucleotide
aauaagucaugcuguggag

SEQ ID NO: 324848 - RNA, 19 nt, Artificial Sequence
  Description of Artificial Sequence: Synthetic oligonucleotide
uacuaauaagucaugcugu

SEQ ID NO: 324849 - RNA, 19 nt, Artificial Sequence
  Description of Artificial Sequence: Synthetic oligonucleotide
aaugaaucugagguguuuc

SEQ ID NO: 324850 - RNA, 19 nt, Artificial Sequence
  Description of Artificial Sequence: Synthetic oligonucleotide
ucaucacucagcucaauag

SEQ ID NO: 324851 - RNA, 19 nt, Artificial Sequence
  Description of Artificial Sequence: Synthetic oligonucleotide
uguaaugaaucugaggugu

SEQ ID NO: 324852 - RNA, 19 nt, Artificial Sequence
  Description of Artificial Sequence: Synthetic oligonucleotide
cucaacgaauucuuaaucc

SEQ ID NO: 324853 - RNA, 19 nt, Artificial Sequence
  Description of Artificial Sequence: Synthetic oligonucleotide
ucgaguuaauuucuuacug

SEQ ID NO: 324854 - RNA, 19 nt, Artificial Sequence
  Description of Artificial Sequence: Synthetic oligonucleotide
aaaggguccgacuuugaug

SEQ ID NO: 324855 - RNA, 19 nt, Artificial Sequence
  Description of Artificial Sequence: Synthetic oligonucleotide
cugaaaucguaauaguccc

SEQ ID NO: 324856 - RNA, 19 nt, Artificial Sequence
  Description of Artificial Sequence: Synthetic oligonucleotide
cuuauuauccaguuuucug

SEQ ID NO: 324857 - RNA, 19 nt, Artificial Sequence
  Description of Artificial Sequence: Synthetic oligonucleotide
cugaguaccagguuucugg

SEQ ID NO: 324858 - RNA, 19 nt, Artificial Sequence
  Description of Artificial Sequence: Synthetic oligonucleotide
ugcaccgagaaucuguaag

SEQ ID NO: 324859 - RNA, 19 nt, Artificial Sequence
  Description of Artificial Sequence: Synthetic oligonucleotide
agcuuaugaauccugaagu

SEQ ID NO: 324860 - RNA, 19 nt, Artificial Sequence
  Description of Artificial Sequence: Synthetic oligonucleotide
aaugccuuggauuccauua

SEQ ID NO: 324861 - RNA, 19 nt, Artificial Sequence
  Description of Artificial Sequence: Synthetic oligonucleotide
uauaucauucuguggaaga

SEQ ID NO: 324862 - RNA, 19 nt, Artificial Sequence
  Description of Artificial Sequence: Synthetic oligonucleotide
uaaacaguauagcaaccug

SEQ ID NO: 324863 - RNA, 19 nt, Artificial Sequence
  Description of Artificial Sequence: Synthetic oligonucleotide
ugguuucuaaugcacaaug

SEQ ID NO: 324864 - RNA, 19 nt, Artificial Sequence
  Description of Artificial Sequence: Synthetic oligonucleotide
auaauuauucacucacucu

SEQ ID NO: 324865 - RNA, 19 nt, Artificial Sequence
  Description of Artificial Sequence: Synthetic oligonucleotide
ugaaccacuucaaaguagu

SEQ ID NO: 324866 - RNA, 19 nt, Artificial Sequence
  Description of Artificial Sequence: Synthetic oligonucleotide
auuauucacucacucugac

SEQ ID NO: 324867 - RNA, 19 nt, Artificial Sequence
  Description of Artificial Sequence: Synthetic oligonucleotide
uuucuuacuggaaacaauu

SEQ ID NO: 324868 - RNA, 19 nt, Artificial Sequence
  Description of Artificial Sequence: Synthetic oligonucleotide
ucauccuauaauuauucac

SEQ ID NO: 324869 - RNA, 19 nt, Artificial Sequence
  Description of Artificial Sequence: Synthetic oligonucleotide
auaacacucuaccuuaaug

SEQ ID NO: 324870 - RNA, 19 nt, Artificial Sequence
  Description of Artificial Sequence: Synthetic oligonucleotide
ugaaacuccaaguauggau

SEQ ID NO: 324871 - RNA, 19 nt, Artificial Sequence
  Description of Artificial Sequence: Synthetic oligonucleotide
cacacacacacacacaugc

SEQ ID NO: 324872 - RNA, 19 nt, Artificial Sequence
  Description of Artificial Sequence: Synthetic oligonucleotide
uauuauccaguuuucuggc

SEQ ID NO: 324873 - RNA, 19 nt, Artificial Sequence
  Description of Artificial Sequence: Synthetic oligonucleotide
uuaugaauccugaaguuuu

SEQ ID NO: 324874 - RNA, 19 nt, Artificial Sequence
  Description of Artificial Sequence: Synthetic oligonucleotide
ucaacgaauucuuaauccu

SEQ ID NO: 324875 - RNA, 19 nt, Artificial Sequence
  Description of Artificial Sequence: Synthetic oligonucleotide
acucaacgaauucuuaauc

SEQ ID NO: 324876 - RNA, 19 nt, Artificial Sequence
  Description of Artificial Sequence: Synthetic oligonucleotide
auagagucuuaucugagga

SEQ ID NO: 324877 - RNA, 19 nt, Artificial Sequence
  Description of Artificial Sequence: Synthetic oligonucleotide
guuccaauaagaucaugag

SEQ ID NO: 324878 - RNA, 19 nt, Artificial Sequence
  Description of Artificial Sequence: Synthetic oligonucleotide
auaagucaugcuguggagc

SEQ ID NO: 324879 - RNA, 19 nt, Artificial Sequence
  Description of Artificial Sequence: Synthetic oligonucleotide
aagcauugacgauagcaug

SEQ ID NO: 324880 - RNA, 19 nt, Artificial Sequence
  Description of Artificial Sequence: Synthetic oligonucleotide
aauaagaucaugagaucca

SEQ ID NO: 324881 - RNA, 19 nt, Artificial Sequence
  Description of Artificial Sequence: Synthetic oligonucleotide
ucauuauagaaaguagaca

SEQ ID NO: 324882 - RNA, 19 nt, Artificial Sequence
  Description of Artificial Sequence: Synthetic oligonucleotide
uuaucugaggaagacaggu

SEQ ID NO: 324883 - RNA, 19 nt, Artificial Sequence
  Description of Artificial Sequence: Synthetic oligonucleotide
agagauuuuaaaaggcuuc

SEQ ID NO: 324884 - RNA, 19 nt, Artificial Sequence
  Description of Artificial Sequence: Synthetic oligonucleotide
aagacagguccgauaagcc

SEQ ID NO: 324885 - RNA, 19 nt, Artificial Sequence
  Description of Artificial Sequence: Synthetic oligonucleotide
aaccucauaccacuguuga

SEQ ID NO: 324886 - RNA, 19 nt, Artificial Sequence
  Description of Artificial Sequence: Synthetic oligonucleotide
uuacccauauuauaucacu

SEQ ID NO: 324887 - RNA, 19 nt, Artificial Sequence
  Description of Artificial Sequence: Synthetic oligonucleotide
acuaauaagucaugcugug

SEQ ID NO: 324888 - RNA, 19 nt, Artificial Sequence
  Description of Artificial Sequence: Synthetic oligonucleotide
cauagagucuuaucugagg

SEQ ID NO: 324889 - RNA, 19 nt, Artificial Sequence
  Description of Artificial Sequence: Synthetic oligonucleotide
guaauagucccuuucccug

SEQ ID NO: 324890 - RNA, 19 nt, Artificial Sequence
  Description of Artificial Sequence: Synthetic oligonucleotide
ugggcaguaauuaauucaa

SEQ ID NO: 324891 - RNA, 19 nt, Artificial Sequence
  Description of Artificial Sequence: Synthetic oligonucleotide
aauaucucuuauggccacc

SEQ ID NO: 324892 - RNA, 19 nt, Artificial Sequence
  Description of Artificial Sequence: Synthetic oligonucleotide
gaagacagguccgauaagc

SEQ ID NO: 324893 - RNA, 19 nt, Artificial Sequence
  Description of Artificial Sequence: Synthetic oligonucleotide
ucaagagcacaaaguauug

SEQ ID NO: 324894 - RNA, 19 nt, Artificial Sequence
  Description of Artificial Sequence: Synthetic oligonucleotide
uuagggcugauauaaugca

SEQ ID NO: 324895 - RNA, 19 nt, Artificial Sequence
  Description of Artificial Sequence: Synthetic oligonucleotide
ucggugaaccaucagccag

SEQ ID NO: 324896 - RNA, 19 nt, Artificial Sequence
  Description of Artificial Sequence: Synthetic oligonucleotide
cuggaauugucugaaaggc

SEQ ID NO: 324897 - RNA, 19 nt, Artificial Sequence
  Description of Artificial Sequence: Synthetic oligonucleotide
augguuucaaaagagagaa

SEQ ID NO: 324898 - RNA, 19 nt, Artificial Sequence
  Description of Artificial Sequence: Synthetic oligonucleotide
guaguaaucaauaauaaau

SEQ ID NO: 324899 - RNA, 19 nt, Artificial Sequence
  Description of Artificial Sequence: Synthetic oligonucleotide
uuacaguagggauuagaug

SEQ ID NO: 324900 - RNA, 19 nt, Artificial Sequence
  Description of Artificial Sequence: Synthetic oligonucleotide
agagucuuaucugaggaag

SEQ ID NO: 324901 - RNA, 19 nt, Artificial Sequence
  Description of Artificial Sequence: Synthetic oligonucleotide
cucaauaguuuuguugucg

SEQ ID NO: 324902 - RNA, 19 nt, Artificial Sequence
  Description of Artificial Sequence: Synthetic oligonucleotide
guagggauuagauggguug

SEQ ID NO: 324903 - RNA, 19 nt, Artificial Sequence
  Description of Artificial Sequence: Synthetic oligonucleotide
ugugcauucuacaguaauc

SEQ ID NO: 324904 - RNA, 19 nt, Artificial Sequence
  Description of Artificial Sequence: Synthetic oligonucleotide
cucacacacacacacacac

SEQ ID NO: 324905 - RNA, 19 nt, Artificial Sequence
  Description of Artificial Sequence: Synthetic oligonucleotide
cauauuauaucacucaacu

SEQ ID NO: 324906 - RNA, 19 nt, Artificial Sequence
  Description of Artificial Sequence: Synthetic oligonucleotide
auagcaaccugcaaaccac

SEQ ID NO: 324907 - RNA, 19 nt, Artificial Sequence
  Description of Artificial Sequence: Synthetic oligonucleotide
cuugcuacuguccucuuac

SEQ ID NO: 324908 - RNA, 19 nt, Artificial Sequence
  Description of Artificial Sequence: Synthetic oligonucleotide
cugauuuguuacuaauaag

SEQ ID NO: 324909 - RNA, 19 nt, Artificial Sequence
  Description of Artificial Sequence: Synthetic oligonucleotide
cauuagggcugauauaaug

SEQ ID NO: 324910 - RNA, 19 nt, Artificial Sequence
  Description of Artificial Sequence: Synthetic oligonucleotide
augggcaguaauuaauuca

SEQ ID NO: 324911 - RNA, 19 nt, Artificial Sequence
  Description of Artificial Sequence: Synthetic oligonucleotide
ucuucugcugaaaucguaa

SEQ ID NO: 324912 - RNA, 19 nt, Artificial Sequence
  Description of Artificial Sequence: Synthetic oligonucleotide
ugucgaugucauaaauucc

SEQ ID NO: 324913 - RNA, 19 nt, Artificial Sequence
  Description of Artificial Sequence: Synthetic oligonucleotide
agaaaccugccacugagga

SEQ ID NO: 324914 - RNA, 19 nt, Artificial Sequence
  Description of Artificial Sequence: Synthetic oligonucleotide
caucauccuauaauuauuc

SEQ ID NO: 324915 - RNA, 19 nt, Artificial Sequence
  Description of Artificial Sequence: Synthetic oligonucleotide
aauuuguccaagaguaacu

SEQ ID NO: 324916 - RNA, 19 nt, Artificial Sequence
  Description of Artificial Sequence: Synthetic oligonucleotide
ccuauaauuauucacucac

SEQ ID NO: 324917 - RNA, 19 nt, Artificial Sequence
  Description of Artificial Sequence: Synthetic oligonucleotide
auuauaucacucaacuuca

SEQ ID NO: 324918 - RNA, 19 nt, Artificial Sequence
  Description of Artificial Sequence: Synthetic oligonucleotide
uuuaacaugcaccgagaau

SEQ ID NO: 324919 - RNA, 19 nt, Artificial Sequence
  Description of Artificial Sequence: Synthetic oligonucleotide
aacaguauagcaaccugca

SEQ ID NO: 324920 - RNA, 19 nt, Artificial Sequence
  Description of Artificial Sequence: Synthetic oligonucleotide
ugauauaaugcagggaauc

SEQ ID NO: 324921 - RNA, 19 nt, Artificial Sequence
  Description of Artificial Sequence: Synthetic oligonucleotide
gauuccauuacaguaggga

SEQ ID NO: 324922 - RNA, 19 nt, Artificial Sequence
  Description of Artificial Sequence: Synthetic oligonucleotide
cacacacacacacacacac

SEQ ID NO: 324923 - RNA, 19 nt, Artificial Sequence
  Description of Artificial Sequence: Synthetic oligonucleotide
ugaguuuugucaugguggu

SEQ ID NO: 324924 - RNA, 19 nt, Artificial Sequence
  Description of Artificial Sequence: Synthetic oligonucleotide
cuguguaaugaaucugagg

SEQ ID NO: 324925 - RNA, 19 nt, Artificial Sequence
  Description of Artificial Sequence: Synthetic oligonucleotide
aucaauaauaaaugucuua

SEQ ID NO: 324926 - RNA, 19 nt, Artificial Sequence
  Description of Artificial Sequence: Synthetic oligonucleotide
uccugaaaaccacugugac

SEQ ID NO: 324927 - RNA, 19 nt, Artificial Sequence
  Description of Artificial Sequence: Synthetic oligonucleotide
cucucucacacacacacac

SEQ ID NO: 324928 - RNA, 19 nt, Artificial Sequence
  Description of Artificial Sequence: Synthetic oligonucleotide
acaccauuagggcugauau

SEQ ID NO: 324929 - RNA, 19 nt, Artificial Sequence
  Description of Artificial Sequence: Synthetic oligonucleotide
uccuauaauuauucacuca

SEQ ID NO: 324930 - RNA, 19 nt, Artificial Sequence
  Description of Artificial Sequence: Synthetic oligonucleotide
agucuuaucugaggaagac

SEQ ID NO: 324931 - RNA, 19 nt, Artificial Sequence
  Description of Artificial Sequence: Synthetic oligonucleotide
uuacacugauaacaccuga

SEQ ID NO: 324932 - RNA, 19 nt, Artificial Sequence
  Description of Artificial Sequence: Synthetic oligonucleotide
cugaacaauaucucuuaug

SEQ ID NO: 324933 - RNA, 19 nt, Artificial Sequence
  Description of Artificial Sequence: Synthetic oligonucleotide
uucuccuaagaagucauca

SEQ ID NO: 324934 - RNA, 19 nt, Artificial Sequence
  Description of Artificial Sequence: Synthetic oligonucleotide
gcacaaaguauugagaugc

SEQ ID NO: 324935 - RNA, 19 nt, Artificial Sequence
  Description of Artificial Sequence: Synthetic oligonucleotide
ugauaacugauuuguuacu

SEQ ID NO: 324936 - RNA, 19 nt, Artificial Sequence
  Description of Artificial Sequence: Synthetic oligonucleotide
uucugagcaccaguggucg

SEQ ID NO: 324937 - RNA, 19 nt, Artificial Sequence
  Description of Artificial Sequence: Synthetic oligonucleotide
uugaauuaccaaucccaca

SEQ ID NO: 324938 - RNA, 19 nt, Artificial Sequence
  Description of Artificial Sequence: Synthetic oligonucleotide
acccauauuauaucacuca

SEQ ID NO: 324939 - RNA, 19 nt, Artificial Sequence
  Description of Artificial Sequence: Synthetic oligonucleotide
uaagccucuauaaugccuu

SEQ ID NO: 324940 - RNA, 19 nt, Artificial Sequence
  Description of Artificial Sequence: Synthetic oligonucleotide
cagcuuaugaauccugaag

SEQ ID NO: 324941 - RNA, 19 nt, Artificial Sequence
  Description of Artificial Sequence: Synthetic oligonucleotide
agugauaaucaagagcaca

SEQ ID NO: 324942 - RNA, 19 nt, Artificial Sequence
  Description of Artificial Sequence: Synthetic oligonucleotide
ucuauuucgcagcuggguu

SEQ ID NO: 324943 - RNA, 19 nt, Artificial Sequence
  Description of Artificial Sequence: Synthetic oligonucleotide
cuuacccauauuauaucac

SEQ ID NO: 324944 - RNA, 19 nt, Artificial Sequence
  Description of Artificial Sequence: Synthetic oligonucleotide
aauuauucacucacucuga

SEQ ID NO: 324945 - RNA, 19 nt, Artificial Sequence
  Description of Artificial Sequence: Synthetic oligonucleotide
cagcuuggaagcauugacg

SEQ ID NO: 324946 - RNA, 19 nt, Artificial Sequence
  Description of Artificial Sequence: Synthetic oligonucleotide
uauaaugccuuggauucca

SEQ ID NO: 324947 - RNA, 19 nt, Artificial Sequence
  Description of Artificial Sequence: Synthetic oligonucleotide
cucucacacacacacacac

SEQ ID NO: 324948 - RNA, 19 nt, Artificial Sequence
  Description of Artificial Sequence: Synthetic oligonucleotide
cuuuacacugauaacaccu

SEQ ID NO: 324949 - RNA, 19 nt, Artificial Sequence
  Description of Artificial Sequence: Synthetic oligonucleotide
ugcacaaugggcaguaauu

SEQ ID NO: 324950 - RNA, 19 nt, Artificial Sequence
  Description of Artificial Sequence: Synthetic oligonucleotide
uuauucacucacucugaca

SEQ ID NO: 324951 - RNA, 19 nt, Artificial Sequence
  Description of Artificial Sequence: Synthetic oligonucleotide
ucucuuauggccaccucuc

SEQ ID NO: 324952 - RNA, 19 nt, Artificial Sequence
  Description of Artificial Sequence: Synthetic oligonucleotide
aguucauuggaaauucaug

SEQ ID NO: 324953 - RNA, 19 nt, Artificial Sequence
  Description of Artificial Sequence: Synthetic oligonucleotide
uaacugauuuguuacuaau

SEQ ID NO: 324954 - RNA, 19 nt, Artificial Sequence
  Description of Artificial Sequence: Synthetic oligonucleotide
agcacaaaguauugagaug

SEQ ID NO: 324955 - RNA, 19 nt, Artificial Sequence
  Description of Artificial Sequence: Synthetic oligonucleotide
uacacugauaacaccugaa

SEQ ID NO: 324956 - RNA, 19 nt, Artificial Sequence
  Description of Artificial Sequence: Synthetic oligonucleotide
uccgauaagccucuauaau

SEQ ID NO: 324957 - RNA, 19 nt, Artificial Sequence
  Description of Artificial Sequence: Synthetic oligonucleotide
auauaaugcagggaaucug

SEQ ID NO: 324958 - RNA, 19 nt, Artificial Sequence
  Description of Artificial Sequence: Synthetic oligonucleotide
uacccauauuauaucacuc

SEQ ID NO: 324959 - RNA, 19 nt, Artificial Sequence
  Description of Artificial Sequence: Synthetic oligonucleotide
acuaacaaucacugaauuu

SEQ ID NO: 324960 - RNA, 19 nt, Artificial Sequence
  Description of Artificial Sequence: Synthetic oligonucleotide
ucauuuaugcauucauauu

SEQ ID NO: 324961 - RNA, 19 nt, Artificial Sequence
  Description of Artificial Sequence: Synthetic oligonucleotide
uaacaugcaccgagaaucu

SEQ ID NO: 324962 - RNA, 19 nt, Artificial Sequence
  Description of Artificial Sequence: Synthetic oligonucleotide
gaaaccugccacugaggag

SEQ ID NO: 324963 - RNA, 19 nt, Artificial Sequence
  Description of Artificial Sequence: Synthetic oligonucleotide
auaacugauuuguuacuaa

SEQ ID NO: 324964 - RNA, 19 nt, Artificial Sequence
  Description of Artificial Sequence: Synthetic oligonucleotide
uguugucgaugucauaaau

SEQ ID NO: 324965 - RNA, 19 nt, Artificial Sequence
  Description of Artificial Sequence: Synthetic oligonucleotide
agagagauuuuaaaaggcu

SEQ ID NO: 324966 - RNA, 19 nt, Artificial Sequence
  Description of Artificial Sequence: Synthetic oligonucleotide
ugaaaucguaauagucccu

SEQ ID NO: 324967 - RNA, 19 nt, Artificial Sequence
  Description of Artificial Sequence: Synthetic oligonucleotide
acgugauuuauaauuggag

SEQ ID NO: 324968 - RNA, 19 nt, Artificial Sequence
  Description of Artificial Sequence: Synthetic oligonucleotide
cucucucucucucacacac

SEQ ID NO: 324969 - RNA, 19 nt, Artificial Sequence
  Description of Artificial Sequence: Synthetic oligonucleotide
ucagccaguugccaucuga

SEQ ID NO: 324970 - RNA, 19 nt, Artificial Sequence
  Description of Artificial Sequence: Synthetic oligonucleotide
uucaaccucauaccacugu

SEQ ID NO: 324971 - RNA, 19 nt, Artificial Sequence
  Description of Artificial Sequence: Synthetic oligonucleotide
gguuucugguuucuaaugc

SEQ ID NO: 324972 - RNA, 19 nt, Artificial Sequence
  Description of Artificial Sequence: Synthetic oligonucleotide
gauaaccuccguucgguga

SEQ ID NO: 324973 - RNA, 19 nt, Artificial Sequence
  Description of Artificial Sequence: Synthetic oligonucleotide
ugcaaaccuggccacguga

SEQ ID NO: 324974 - RNA, 19 nt, Artificial Sequence
  Description of Artificial Sequence: Synthetic oligonucleotide
cacacacacacacaugcac

SEQ ID NO: 324975 - RNA, 19 nt, Artificial Sequence
  Description of Artificial Sequence: Synthetic oligonucleotide
acaauaucucuuauggcca

SEQ ID NO: 324976 - RNA, 19 nt, Artificial Sequence
  Description of Artificial Sequence: Synthetic oligonucleotide
agagauggcauugcuccac

SEQ ID NO: 324977 - RNA, 19 nt, Artificial Sequence
  Description of Artificial Sequence: Synthetic oligonucleotide
auauuauaucacucaacuu

SEQ ID NO: 324978 - RNA, 19 nt, Artificial Sequence
  Description of Artificial Sequence: Synthetic oligonucleotide
ugaggucugcuugugaaac

SEQ ID NO: 324979 - RNA, 19 nt, Artificial Sequence
  Description of Artificial Sequence: Synthetic oligonucleotide
uugaaguucauuggaaauu

SEQ ID NO: 324980 - RNA, 19 nt, Artificial Sequence
  Description of Artificial Sequence: Synthetic oligonucleotide
ucaaccucauaccacuguu

SEQ ID NO: 324981 - RNA, 19 nt, Artificial Sequence
  Description of Artificial Sequence: Synthetic oligonucleotide
uuauaucacucaacuucac

SEQ ID NO: 324982 - RNA, 19 nt, Artificial Sequence
  Description of Artificial Sequence: Synthetic oligonucleotide
aucauccuauaauuauuca

SEQ ID NO: 324983 - RNA, 19 nt, Artificial Sequence
  Description of Artificial Sequence: Synthetic oligonucleotide
caaaguauugagaugcugu

SEQ ID NO: 324984 - RNA, 19 nt, Artificial Sequence
  Description of Artificial Sequence: Synthetic oligonucleotide
guuuguauguguugaagua

SEQ ID NO: 324985 - RNA, 19 nt, Artificial Sequence
  Description of Artificial Sequence: Synthetic oligonucleotide
uugauaaccuccguucggu

SEQ ID NO: 324986 - RNA, 19 nt, Artificial Sequence
  Description of Artificial Sequence: Synthetic oligonucleotide
auauucaacaggugaguuu

SEQ ID NO: 324987 - RNA, 19 nt, Artificial Sequence
  Description of Artificial Sequence: Synthetic oligonucleotide
acacugauaacaccugaau

SEQ ID NO: 324988 - RNA, 19 nt, Artificial Sequence
  Description of Artificial Sequence: Synthetic oligonucleotide
ugauaacgccaucagugau

SEQ ID NO: 324989 - RNA, 19 nt, Artificial Sequence
  Description of Artificial Sequence: Synthetic oligonucleotide
aggaguuuguauguguuga

SEQ ID NO: 324990 - RNA, 19 nt, Artificial Sequence
  Description of Artificial Sequence: Synthetic oligonucleotide
uuugucauggugguuugaa

SEQ ID NO: 324991 - RNA, 19 nt, Artificial Sequence
  Description of Artificial Sequence: Synthetic oligonucleotide
agacagguccgauaagccu

SEQ ID NO: 324992 - RNA, 19 nt, Artificial Sequence
  Description of Artificial Sequence: Synthetic oligonucleotide
uucuguccguucaaccuca

SEQ ID NO: 324993 - RNA, 19 nt, Artificial Sequence
  Description of Artificial Sequence: Synthetic oligonucleotide
uucuauuucgcagcugggu

SEQ ID NO: 324994 - RNA, 19 nt, Artificial Sequence
  Description of Artificial Sequence: Synthetic oligonucleotide
auagcacagagaguuaaga

SEQ ID NO: 324995 - RNA, 19 nt, Artificial Sequence
  Description of Artificial Sequence: Synthetic oligonucleotide
cauaaaggguccgacuuug

SEQ ID NO: 324996 - RNA, 19 nt, Artificial Sequence
  Description of Artificial Sequence: Synthetic oligonucleotide
cucucucucucucucacac

SEQ ID NO: 324997 - RNA, 19 nt, Artificial Sequence
  Description of Artificial Sequence: Synthetic oligonucleotide
ccgacuuugauguuaaauc

SEQ ID NO: 324998 - RNA, 19 nt, Artificial Sequence
  Description of Artificial Sequence: Synthetic oligonucleotide
ugcuacuguccucuuacaa

SEQ ID NO: 324999 - RNA, 19 nt, Artificial Sequence
  Description of Artificial Sequence: Synthetic oligonucleotide
aagagauggcauugcucca

SEQ ID NO: 325000 - RNA, 19 nt, Artificial Sequence
  Description of Artificial Sequence: Synthetic oligonucleotide
uaucugaggaagacagguc

SEQ ID NO: 325001 - RNA, 19 nt, Artificial Sequence
  Description of Artificial Sequence: Synthetic oligonucleotide
ggucgaguuaauuucuuac

SEQ ID NO: 325002 - RNA, 19 nt, Artificial Sequence
  Description of Artificial Sequence: Synthetic oligonucleotide
ugaguaccagguuucuggu

SEQ ID NO: 325003 - RNA, 19 nt, Artificial Sequence
  Description of Artificial Sequence: Synthetic oligonucleotide
augaaucugagguguuucu

SEQ ID NO: 325004 - RNA, 19 nt, Artificial Sequence
  Description of Artificial Sequence: Synthetic oligonucleotide
cagucagguacucauuaac

SEQ ID NO: 325005 - RNA, 19 nt, Artificial Sequence
  Description of Artificial Sequence: Synthetic oligonucleotide
ucucacacacacacacaca

SEQ ID NO: 325006 - RNA, 19 nt, Artificial Sequence
  Description of Artificial Sequence: Synthetic oligonucleotide
gauaacugauuuguuacua

SEQ ID NO: 325007 - RNA, 19 nt, Artificial Sequence
  Description of Artificial Sequence: Synthetic oligonucleotide
acagagaguuaagagagau

SEQ ID NO: 325008 - RNA, 19 nt, Artificial Sequence
  Description of Artificial Sequence: Synthetic oligonucleotide
cuacuguccucuuacaaaa

SEQ ID NO: 325009 - RNA, 19 nt, Artificial Sequence
  Description of Artificial Sequence: Synthetic oligonucleotide
ucgaugucauaaauuccaa

SEQ ID NO: 325010 - RNA, 19 nt, Artificial Sequence
  Description of Artificial Sequence: Synthetic oligonucleotide
uccgacuuugauguuaaau

SEQ ID NO: 325011 - RNA, 19 nt, Artificial Sequence
  Description of Artificial Sequence: Synthetic oligonucleotide
aaaucuguauuggucuuuu

SEQ ID NO: 325012 - RNA, 19 nt, Artificial Sequence
  Description of Artificial Sequence: Synthetic oligonucleotide
  modified_base (3)..(3): a, c, u, g, unknown or other
aunuuuacauaaacaguau

SEQ ID NO: 325013 - RNA, 19 nt, Artificial Sequence
  Description of Artificial Sequence: Synthetic oligonucleotide
ugggcuuacccauauuaua

SEQ ID NO: 325014 - RNA, 19 nt, Artificial Sequence
  Description of Artificial Sequence: Synthetic oligonucleotide
caauaucucuuauggccac

SEQ ID NO: 325015 - RNA, 19 nt, Artificial Sequence
  Description of Artificial Sequence: Synthetic oligonucleotide
aauuugggacucaacgaau

SEQ ID NO: 325016 - RNA, 19 nt, Artificial Sequence
  Description of Artificial Sequence: Synthetic oligonucleotide
ucacacacacacacacaca

SEQ ID NO: 325017 - RNA, 19 nt, Artificial Sequence
  Description of Artificial Sequence: Synthetic oligonucleotide
ucacucugacaacauuuaa

SEQ ID NO: 325018 - RNA, 19 nt, Artificial Sequence
  Description of Artificial Sequence: Synthetic oligonucleotide
uccaaauagcacucuuaaa

SEQ ID NO: 325019 - RNA, 19 nt, Artificial Sequence
  Description of Artificial Sequence: Synthetic oligonucleotide
ccaacucccacaaugauga

SEQ ID NO: 325020 - RNA, 19 nt, Artificial Sequence
  Description of Artificial Sequence: Synthetic oligonucleotide
aaaucguaauagucccuuu

SEQ ID NO: 325021 - RNA, 19 nt, Artificial Sequence
  Description of Artificial Sequence: Synthetic oligonucleotide
ccgauaagccucuauaaug

SEQ ID NO: 325022 - RNA, 19 nt, Artificial Sequence
  Description of Artificial Sequence: Synthetic oligonucleotide
uaguugguccauagagucu

SEQ ID NO: 325023 - RNA, 19 nt, Artificial Sequence
  Description of Artificial Sequence: Synthetic oligonucleotide
ucucucacacacacacaca

SEQ ID NO: 325024 - RNA, 19 nt, Artificial Sequence
  Description of Artificial Sequence: Synthetic oligonucleotide
agucagguacucauuaaca

SEQ ID NO: 325025 - RNA, 19 nt, Artificial Sequence
  Description of Artificial Sequence: Synthetic oligonucleotide
uagagucuuaucugaggaa

SEQ ID NO: 325026 - RNA, 19 nt, Artificial Sequence
  Description of Artificial Sequence: Synthetic oligonucleotide
cuguugaccacucguguuc

SEQ ID NO: 325027 - RNA, 19 nt, Artificial Sequence
  Description of Artificial Sequence: Synthetic oligonucleotide
ugcauucuacaguaaucuc

SEQ ID NO: 325028 - RNA, 19 nt, Artificial Sequence
  Description of Artificial Sequence: Synthetic oligonucleotide
aaccuccguucggugaacc

SEQ ID NO: 325029 - RNA, 19 nt, Artificial Sequence
  Description of Artificial Sequence: Synthetic oligonucleotide
cacgugauuuauaauugga

SEQ ID NO: 325030 - RNA, 19 nt, Artificial Sequence
  Description of Artificial Sequence: Synthetic oligonucleotide
ccucauaccacuguugacc

SEQ ID NO: 325031 - RNA, 19 nt, Artificial Sequence
  Description of Artificial Sequence: Synthetic oligonucleotide
ugauaaccuccguucggug

SEQ ID NO: 325032 - RNA, 19 nt, Artificial Sequence
  Description of Artificial Sequence: Synthetic oligonucleotide
acgauagcaugucugguuu

SEQ ID NO: 325033 - RNA, 19 nt, Artificial Sequence
  Description of Artificial Sequence: Synthetic oligonucleotide
uaaucucacagugcuuuac

SEQ ID NO: 325034 - RNA, 19 nt, Artificial Sequence
  Description of Artificial Sequence: Synthetic oligonucleotide
cuaccuuaaugguuuuguc

SEQ ID NO: 325035 - RNA, 19 nt, Artificial Sequence
  Description of Artificial Sequence: Synthetic oligonucleotide
uggacucucucucucucuc

SEQ ID NO: 325036 - RNA, 19 nt, Artificial Sequence
  Description of Artificial Sequence: Synthetic oligonucleotide
auaacgccaucagugauaa

SEQ ID NO: 325037 - RNA, 19 nt, Artificial Sequence
  Description of Artificial Sequence: Synthetic oligonucleotide
uaccaaucccacagaccag

SEQ ID NO: 325038 - RNA, 19 nt, Artificial Sequence
  Description of Artificial Sequence: Synthetic oligonucleotide
gaaccaucagccaguugcc

SEQ ID NO: 325039 - RNA, 19 nt, Artificial Sequence
  Description of Artificial Sequence: Synthetic oligonucleotide
acagcuuaugaauccugaa

SEQ ID NO: 325040 - RNA, 19 nt, Artificial Sequence
  Description of Artificial Sequence: Synthetic oligonucleotide
augauagacaugggcagcu

SEQ ID NO: 325041 - RNA, 19 nt, Artificial Sequence
  Description of Artificial Sequence: Synthetic oligonucleotide
ugcuacaguuuaacaugca

SEQ ID NO: 325042 - RNA, 19 nt, Artificial Sequence
  Description of Artificial Sequence: Synthetic oligonucleotide
cuauaaugccuuggauucc

SEQ ID NO: 325043 - RNA, 19 nt, Artificial Sequence
  Description of Artificial Sequence: Synthetic oligonucleotide
gaagcauugacgauagcau

SEQ ID NO: 325044 - RNA, 19 nt, Artificial Sequence
  Description of Artificial Sequence: Synthetic oligonucleotide
auuuguccaagaguaacuu

SEQ ID NO: 325045 - RNA, 19 nt, Artificial Sequence
  Description of Artificial Sequence: Synthetic oligonucleotide
uuguugucgaugucauaaa

SEQ ID NO: 325046 - RNA, 19 nt, Artificial Sequence
  Description of Artificial Sequence: Synthetic oligonucleotide
cuugaacugugggccaugg

SEQ ID NO: 325047 - RNA, 19 nt, Artificial Sequence
  Description of Artificial Sequence: Synthetic oligonucleotide
ucucucucacacacacaca

SEQ ID NO: 325048 - RNA, 19 nt, Artificial Sequence
  Description of Artificial Sequence: Synthetic oligonucleotide
uguugaccacucguguuca

SEQ ID NO: 325049 - RNA, 19 nt, Artificial Sequence
  Description of Artificial Sequence: Synthetic oligonucleotide
ccauauuauaucacucaac

SEQ ID NO: 325050 - RNA, 19 nt, Artificial Sequence
  Description of Artificial Sequence: Synthetic oligonucleotide
gacucaacgaauucuuaau

SEQ ID NO: 325051 - RNA, 19 nt, Artificial Sequence
  Description of Artificial Sequence: Synthetic oligonucleotide
acuguugaccacucguguu

SEQ ID NO: 325052 - RNA, 19 nt, Artificial Sequence
  Description of Artificial Sequence: Synthetic oligonucleotide
cuggccacgugauuuauaa

SEQ ID NO: 325053 - RNA, 19 nt, Artificial Sequence
  Description of Artificial Sequence: Synthetic oligonucleotide
acauaaaggguccgacuuu

SEQ ID NO: 325054 - RNA, 19 nt, Artificial Sequence
  Description of Artificial Sequence: Synthetic oligonucleotide
gauaacgccaucagugaua

SEQ ID NO: 325055 - RNA, 19 nt, Artificial Sequence
  Description of Artificial Sequence: Synthetic oligonucleotide
gacucucucucucucucuc

SEQ ID NO: 325056 - RNA, 19 nt, Artificial Sequence
  Description of Artificial Sequence: Synthetic oligonucleotide
aacaccauuagggcugaua

SEQ ID NO: 325057 - RNA, 19 nt, Artificial Sequence
  Description of Artificial Sequence: Synthetic oligonucleotide
cucuauaaugccuuggauu

SEQ ID NO: 325058 - RNA, 19 nt, Artificial Sequence
  Description of Artificial Sequence: Synthetic oligonucleotide
aguggucgaguuaauuucu

SEQ ID NO: 325059 - RNA, 19 nt, Artificial Sequence
  Description of Artificial Sequence: Synthetic oligonucleotide
uccguucggugaaccauca

SEQ ID NO: 325060 - RNA, 19 nt, Artificial Sequence
  Description of Artificial Sequence: Synthetic oligonucleotide
augcacaaugggcaguaau

SEQ ID NO: 325061 - RNA, 19 nt, Artificial Sequence
  Description of Artificial Sequence: Synthetic oligonucleotide
gcauucuacaguaaucuca

SEQ ID NO: 325062 - RNA, 19 nt, Artificial Sequence
  Description of Artificial Sequence: Synthetic oligonucleotide
agcacacauaaaggguccg

SEQ ID NO: 325063 - RNA, 19 nt, Artificial Sequence
  Description of Artificial Sequence: Synthetic oligonucleotide
acacacacacacaugcaca

SEQ ID NO: 325064 - RNA, 19 nt, Artificial Sequence
  Description of Artificial Sequence: Synthetic oligonucleotide
ucucucucucucucucuca

SEQ ID NO: 325065 - RNA, 19 nt, Artificial Sequence
  Description of Artificial Sequence: Synthetic oligonucleotide
aacaugcaccgagaaucug

SEQ ID NO: 325066 - RNA, 19 nt, Artificial Sequence
  Description of Artificial Sequence: Synthetic oligonucleotide
gucgaguuaauuucuuacu

SEQ ID NO: 325067 - RNA, 19 nt, Artificial Sequence
  Description of Artificial Sequence: Synthetic oligonucleotide
uuaacaccauuagggcuga

SEQ ID NO: 325068 - RNA, 19 nt, Artificial Sequence
  Description of Artificial Sequence: Synthetic oligonucleotide
cuuggacucucucucucuc

SEQ ID NO: 325069 - RNA, 19 nt, Artificial Sequence
  Description of Artificial Sequence: Synthetic oligonucleotide
cucucucucucucucucac

SEQ ID NO: 325070 - RNA, 19 nt, Artificial Sequence
  Description of Artificial Sequence: Synthetic oligonucleotide
uuggacucucucucucucu

SEQ ID NO: 325071 - RNA, 19 nt, Artificial Sequence
  Description of Artificial Sequence: Synthetic oligonucleotide
cugccaagacacacugagc

SEQ ID NO: 325072 - RNA, 19 nt, Artificial Sequence
  Description of Artificial Sequence: Synthetic oligonucleotide
guccgauaagccucuauaa

SEQ ID NO: 325073 - RNA, 19 nt, Artificial Sequence
  Description of Artificial Sequence: Synthetic oligonucleotide
acaguauagcaaccugcaa

SEQ ID NO: 325074 - RNA, 19 nt, Artificial Sequence
  Description of Artificial Sequence: Synthetic oligonucleotide
ccacgugauuuauaauugg

SEQ ID NO: 325075 - RNA, 19 nt, Artificial Sequence
  Description of Artificial Sequence: Synthetic oligonucleotide
ugguuucaaaagagagaaa

SEQ ID NO: 325076 - RNA, 19 nt, Artificial Sequence
  Description of Artificial Sequence: Synthetic oligonucleotide
cuauaauuauucacucacu

SEQ ID NO: 325077 - RNA, 19 nt, Artificial Sequence
  Description of Artificial Sequence: Synthetic oligonucleotide
agccucuauaaugccuugg

SEQ ID NO: 325078 - RNA, 19 nt, Artificial Sequence
  Description of Artificial Sequence: Synthetic oligonucleotide
cagugauaaucaagagcac

SEQ ID NO: 325079 - RNA, 19 nt, Artificial Sequence
  Description of Artificial Sequence: Synthetic oligonucleotide
ucucucucucucacacaca

SEQ ID NO: 325080 - RNA, 19 nt, Artificial Sequence
  Description of Artificial Sequence: Synthetic oligonucleotide
acaucauccuauaauuauu

SEQ ID NO: 325081 - RNA, 19 nt, Artificial Sequence
  Description of Artificial Sequence: Synthetic oligonucleotide
cgugauuuauaauuggaga

SEQ ID NO: 325082 - RNA, 19 nt, Artificial Sequence
  Description of Artificial Sequence: Synthetic oligonucleotide
ucucucucucucucucucu

SEQ ID NO: 325083 - RNA, 19 nt, Artificial Sequence
  Description of Artificial Sequence: Synthetic oligonucleotide
aguagacaacaaaccaaca

SEQ ID NO: 325084 - RNA, 19 nt, Artificial Sequence
  Description of Artificial Sequence: Synthetic oligonucleotide
ucucucucucucucucaca

SEQ ID NO: 325085 - RNA, 19 nt, Artificial Sequence
  Description of Artificial Sequence: Synthetic oligonucleotide
ucucucucucucucacaca

SEQ ID NO: 325086 - RNA, 19 nt, Artificial Sequence
  Description of Artificial Sequence: Synthetic oligonucleotide
auucuacaguaaucucaca

SEQ ID NO: 325087 - RNA, 19 nt, Artificial Sequence
  Description of Artificial Sequence: Synthetic oligonucleotide
ugacgauagcaugucuggu

SEQ ID NO: 325088 - RNA, 19 nt, Artificial Sequence
  Description of Artificial Sequence: Synthetic oligonucleotide
guagucaagaaaugugcau

SEQ ID NO: 325089 - RNA, 19 nt, Artificial Sequence
  Description of Artificial Sequence: Synthetic oligonucleotide
cacaaugggcaguaauuaa

SEQ ID NO: 325090 - RNA, 19 nt, Artificial Sequence
  Description of Artificial Sequence: Synthetic oligonucleotide
cauuggagccggugaaguc

SEQ ID NO: 325091 - RNA, 19 nt, Artificial Sequence
  Description of Artificial Sequence: Synthetic oligonucleotide
gccaucugaggucugcuug

SEQ ID NO: 325092 - RNA, 19 nt, Artificial Sequence
  Description of Artificial Sequence: Synthetic oligonucleotide
cuccguucggugaaccauc

SEQ ID NO: 325093 - RNA, 19 nt, Artificial Sequence
  Description of Artificial Sequence: Synthetic oligonucleotide
aaaauucagcuggcacccu

SEQ ID NO: 325094 - RNA, 19 nt, Artificial Sequence
  Description of Artificial Sequence: Synthetic oligonucleotide
uaucucuuauggccaccuc

SEQ ID NO: 325095 - RNA, 19 nt, Artificial Sequence
  Description of Artificial Sequence: Synthetic oligonucleotide
gguuuuguccauaucucca

SEQ ID NO: 325096 - RNA, 19 nt, Artificial Sequence
  Description of Artificial Sequence: Synthetic oligonucleotide
cacacacacacaugcacaa

SEQ ID NO: 325097 - RNA, 19 nt, Artificial Sequence
  Description of Artificial Sequence: Synthetic oligonucleotide
gcuacuguccucuuacaaa

SEQ ID NO: 325098 - RNA, 19 nt, Artificial Sequence
  Description of Artificial Sequence: Synthetic oligonucleotide
cucucucucucucucucuc

SEQ ID NO: 325099 - RNA, 19 nt, Artificial Sequence
  Description of Artificial Sequence: Synthetic oligonucleotide
gaaaucguaauagucccuu

SEQ ID NO: 325100 - RNA, 19 nt, Artificial Sequence
  Description of Artificial Sequence: Synthetic oligonucleotide
gagagauuuuaaaaggcuu

SEQ ID NO: 325101 - RNA, 19 nt, Artificial Sequence
  Description of Artificial Sequence: Synthetic oligonucleotide
gccacgugauuuauaauug

SEQ ID NO: 325102 - RNA, 19 nt, Artificial Sequence
  Description of Artificial Sequence: Synthetic oligonucleotide
ccauagagucuuaucugag

SEQ ID NO: 325103 - RNA, 19 nt, Artificial Sequence
  Description of Artificial Sequence: Synthetic oligonucleotide
uugaccacucguguucaaa

SEQ ID NO: 325104 - RNA, 19 nt, Artificial Sequence
  Description of Artificial Sequence: Synthetic oligonucleotide
ccauaucuccauagcacag

SEQ ID NO: 325105 - RNA, 19 nt, Artificial Sequence
  Description of Artificial Sequence: Synthetic oligonucleotide
auuugggacucaacgaauu

SEQ ID NO: 325106 - RNA, 19 nt, Artificial Sequence
  Description of Artificial Sequence: Synthetic oligonucleotide
acucucucucucucucucu

SEQ ID NO: 325107 - RNA, 19 nt, Artificial Sequence
  Description of Artificial Sequence: Synthetic oligonucleotide
accauuggagccggugaag

SEQ ID NO: 325108 - RNA, 19 nt, Artificial Sequence
  Description of Artificial Sequence: Synthetic oligonucleotide
acaguuuaacaugcaccga

SEQ ID NO: 325109 - RNA, 19 nt, Artificial Sequence
  Description of Artificial Sequence: Synthetic oligonucleotide
acucagcucaauaguuuug

SEQ ID NO: 325110 - RNA, 19 nt, Artificial Sequence
  Description of Artificial Sequence: Synthetic oligonucleotide
gacgauagcaugucugguu

SEQ ID NO: 325111 - RNA, 19 nt, Artificial Sequence
  Description of Artificial Sequence: Synthetic oligonucleotide
auaccacuguugaccacuc

SEQ ID NO: 325112 - RNA, 19 nt, Artificial Sequence
  Description of Artificial Sequence: Synthetic oligonucleotide
cugauaacaccugaauucu

SEQ ID NO: 325113 - RNA, 19 nt, Artificial Sequence
  Description of Artificial Sequence: Synthetic oligonucleotide
caccugagcuccaaagcca

SEQ ID NO: 325114 - RNA, 19 nt, Artificial Sequence
  Description of Artificial Sequence: Synthetic oligonucleotide
ugaaaaccacugugacauc

SEQ ID NO: 325115 - RNA, 19 nt, Artificial Sequence
  Description of Artificial Sequence: Synthetic oligonucleotide
cacacacacacacacacau

SEQ ID NO: 325116 - RNA, 19 nt, Artificial Sequence
  Description of Artificial Sequence: Synthetic oligonucleotide
ucuggugggcuuacccaua

SEQ ID NO: 325117 - RNA, 19 nt, Artificial Sequence
  Description of Artificial Sequence: Synthetic oligonucleotide
caccucuccugauggggag

SEQ ID NO: 325118 - RNA, 19 nt, Artificial Sequence
  Description of Artificial Sequence: Synthetic oligonucleotide
gccggugaaguccacuccc

SEQ ID NO: 325119 - RNA, 19 nt, Artificial Sequence
  Description of Artificial Sequence: Synthetic oligonucleotide
ggcuuacccauauuauauc

SEQ ID NO: 325120 - RNA, 19 nt, Artificial Sequence
  Description of Artificial Sequence: Synthetic oligonucleotide
acaauuuguccaagaguaa

SEQ ID NO: 325121 - RNA, 19 nt, Artificial Sequence
  Description of Artificial Sequence: Synthetic oligonucleotide
gguccgauaagccucuaua

SEQ ID NO: 325122 - RNA, 19 nt, Artificial Sequence
  Description of Artificial Sequence: Synthetic oligonucleotide
acuuuccaaacagauccuu

SEQ ID NO: 325123 - RNA, 19 nt, Artificial Sequence
  Description of Artificial Sequence: Synthetic oligonucleotide
gggauuagauggguugaag

SEQ ID NO: 325124 - RNA, 19 nt, Artificial Sequence
  Description of Artificial Sequence: Synthetic oligonucleotide
ggucugccauuucugagca

SEQ ID NO: 325125 - RNA, 19 nt, Artificial Sequence
  Description of Artificial Sequence: Synthetic oligonucleotide
ccucccaugauguagucaa

SEQ ID NO: 325126 - RNA, 19 nt, Artificial Sequence
  Description of Artificial Sequence: Synthetic oligonucleotide
gccucuauaaugccuugga

SEQ ID NO: 325127 - RNA, 19 nt, Artificial Sequence
  Description of Artificial Sequence: Synthetic oligonucleotide
cuguauuggucuuuucuau

SEQ ID NO: 325128 - RNA, 19 nt, Artificial Sequence
  Description of Artificial Sequence: Synthetic oligonucleotide
uggccccauaagcagucau

SEQ ID NO: 325129 - RNA, 19 nt, Artificial Sequence
  Description of Artificial Sequence: Synthetic oligonucleotide
ggccacgugauuuauaauu

SEQ ID NO: 325130 - RNA, 19 nt, Artificial Sequence
  Description of Artificial Sequence: Synthetic oligonucleotide
aaugcacaaugggcaguaa

SEQ ID NO: 325131 - RNA, 19 nt, Artificial Sequence
  Description of Artificial Sequence: Synthetic oligonucleotide
acacacacacacacacaug

SEQ ID NO: 325132 - RNA, 19 nt, Artificial Sequence
  Description of Artificial Sequence: Synthetic oligonucleotide
accugaauucuuguagcuu

SEQ ID NO: 325133 - RNA, 19 nt, Artificial Sequence
  Description of Artificial Sequence: Synthetic oligonucleotide
cucuaccuuaaugguuuug

SEQ ID NO: 325134 - RNA, 19 nt, Artificial Sequence
  Description of Artificial Sequence: Synthetic oligonucleotide
aguagggauuagauggguu

SEQ ID NO: 325135 - RNA, 19 nt, Artificial Sequence
  Description of Artificial Sequence: Synthetic oligonucleotide
gaaggaguuuguauguguu

SEQ ID NO: 325136 - RNA, 19 nt, Artificial Sequence
  Description of Artificial Sequence: Synthetic oligonucleotide
accuccguucggugaacca

SEQ ID NO: 325137 - RNA, 19 nt, Artificial Sequence
  Description of Artificial Sequence: Synthetic oligonucleotide
guaaucucacagugcuuua

SEQ ID NO: 325138 - RNA, 19 nt, Artificial Sequence
  Description of Artificial Sequence: Synthetic oligonucleotide
acacacacacacacaugca

SEQ ID NO: 325139 - RNA, 19 nt, Artificial Sequence
  Description of Artificial Sequence: Synthetic oligonucleotide
guugucgaugucauaaauu

SEQ ID NO: 325140 - RNA, 19 nt, Artificial Sequence
  Description of Artificial Sequence: Synthetic oligonucleotide
acacacacacacacacaca

SEQ ID NO: 325141 - RNA, 19 nt, Artificial Sequence
  Description of Artificial Sequence: Synthetic oligonucleotide
cagagauggacuugcuacu

SEQ ID NO: 325142 - RNA, 19 nt, Artificial Sequence
  Description of Artificial Sequence: Synthetic oligonucleotide
agguccgauaagccucuau

SEQ ID NO: 325143 - RNA, 19 nt, Artificial Sequence
  Description of Artificial Sequence: Synthetic oligonucleotide
auaaaggguccgacuuuga

SEQ ID NO: 325144 - RNA, 19 nt, Artificial Sequence
  Description of Artificial Sequence: Synthetic oligonucleotide
agggauuagauggguugaa

SEQ ID NO: 325145 - RNA, 19 nt, Artificial Sequence
  Description of Artificial Sequence: Synthetic oligonucleotide
cucagcucaauaguuuugu

SEQ ID NO: 325146 - RNA, 19 nt, Artificial Sequence
  Description of Artificial Sequence: Synthetic oligonucleotide
cuguauccaaaagguuguc

SEQ ID NO: 325147 - RNA, 19 nt, Artificial Sequence
  Description of Artificial Sequence: Synthetic oligonucleotide
uggccacgugauuuauaau

SEQ ID NO: 325148 - RNA, 19 nt, Artificial Sequence
  Description of Artificial Sequence: Synthetic oligonucleotide
ccguucaaccucauaccac

SEQ ID NO: 325149 - RNA, 19 nt, Artificial Sequence
  Description of Artificial Sequence: Synthetic oligonucleotide
cugccauuucugagcacca

SEQ ID NO: 325150 - RNA, 19 nt, Artificial Sequence
  Description of Artificial Sequence: Synthetic oligonucleotide
caccauuggagccggugaa

SEQ ID NO: 325151 - RNA, 19 nt, Artificial Sequence
  Description of Artificial Sequence: Synthetic oligonucleotide
augcaccgagaaucuguaa

SEQ ID NO: 325152 - RNA, 19 nt, Artificial Sequence
  Description of Artificial Sequence: Synthetic oligonucleotide
cugugauaacgccaucagu

SEQ ID NO: 325153 - RNA, 19 nt, Artificial Sequence
  Description of Artificial Sequence: Synthetic oligonucleotide
gacuuuccaaacagauccu

SEQ ID NO: 325154 - RNA, 19 nt, Artificial Sequence
  Description of Artificial Sequence: Synthetic oligonucleotide
cuucugcugaaaucguaau

SEQ ID NO: 325155 - RNA, 19 nt, Artificial Sequence
  Description of Artificial Sequence: Synthetic oligonucleotide
cacucagcucaauaguuuu

SEQ ID NO: 325156 - RNA, 19 nt, Artificial Sequence
  Description of Artificial Sequence: Synthetic oligonucleotide
uaaccuccguucggugaac

SEQ ID NO: 325157 - RNA, 19 nt, Artificial Sequence
  Description of Artificial Sequence: Synthetic oligonucleotide
cuuaauccuuucuguccgu

SEQ ID NO: 325158 - RNA, 19 nt, Artificial Sequence
  Description of Artificial Sequence: Synthetic oligonucleotide
gaaccacuucaaaguagua

SEQ ID NO: 325159 - RNA, 19 nt, Artificial Sequence
  Description of Artificial Sequence: Synthetic oligonucleotide
cauaacacucuaccuuaau

SEQ ID NO: 325160 - RNA, 19 nt, Artificial Sequence
  Description of Artificial Sequence: Synthetic oligonucleotide
gcuuaugaauccugaaguu

SEQ ID NO: 325161 - RNA, 19 nt, Artificial Sequence
  Description of Artificial Sequence: Synthetic oligonucleotide
ggcugauauaaugcaggga

SEQ ID NO: 325162 - RNA, 19 nt, Artificial Sequence
  Description of Artificial Sequence: Synthetic oligonucleotide
caccauuagggcugauaua

SEQ ID NO: 325163 - RNA, 19 nt, Artificial Sequence
  Description of Artificial Sequence: Synthetic oligonucleotide
caauaguuuuguugucgau

SEQ ID NO: 325164 - RNA, 19 nt, Artificial Sequence
  Description of Artificial Sequence: Synthetic oligonucleotide
gggcuuacccauauuauau

SEQ ID NO: 325165 - RNA, 19 nt, Artificial Sequence
  Description of Artificial Sequence: Synthetic oligonucleotide
agguacucauuaacaccau

SEQ ID NO: 325166 - RNA, 19 nt, Artificial Sequence
  Description of Artificial Sequence: Synthetic oligonucleotide
ugguuucaucaaggucugu

SEQ ID NO: 325167 - RNA, 19 nt, Artificial Sequence
  Description of Artificial Sequence: Synthetic oligonucleotide
cguucaaccucauaccacu

SEQ ID NO: 325168 - RNA, 19 nt, Artificial Sequence
  Description of Artificial Sequence: Synthetic oligonucleotide
guugaccacucguguucaa

SEQ ID NO: 325169 - RNA, 19 nt, Artificial Sequence
  Description of Artificial Sequence: Synthetic oligonucleotide
gugggcuuacccauauuau

SEQ ID NO: 325170 - RNA, 19 nt, Artificial Sequence
  Description of Artificial Sequence: Synthetic oligonucleotide
cagagaguuaagagagauu

SEQ ID NO: 325171 - RNA, 19 nt, Artificial Sequence
  Description of Artificial Sequence: Synthetic oligonucleotide
cuccuucuauuucgcagcu

SEQ ID NO: 325172 - RNA, 19 nt, Artificial Sequence
  Description of Artificial Sequence: Synthetic oligonucleotide
ccaguggucgaguuaauuu

SEQ ID NO: 325173 - RNA, 19 nt, Artificial Sequence
  Description of Artificial Sequence: Synthetic oligonucleotide
gcacacauaaaggguccga

SEQ ID NO: 325174 - RNA, 19 nt, Artificial Sequence
  Description of Artificial Sequence: Synthetic oligonucleotide
acagugcuuuacacugaua

SEQ ID NO: 325175 - RNA, 19 nt, Artificial Sequence
  Description of Artificial Sequence: Synthetic oligonucleotide
gcucccuuuguaugccaaa

SEQ ID NO: 325176 - RNA, 19 nt, Artificial Sequence
  Description of Artificial Sequence: Synthetic oligonucleotide
ggguccgacuuugauguua

SEQ ID NO: 325177 - RNA, 19 nt, Artificial Sequence
  Description of Artificial Sequence: Synthetic oligonucleotide
aggguccgacuuugauguu

SEQ ID NO: 325178 - RNA, 19 nt, Artificial Sequence
  Description of Artificial Sequence: Synthetic oligonucleotide
ggacucucucucucucucu

SEQ ID NO: 325179 - RNA, 19 nt, Artificial Sequence
  Description of Artificial Sequence: Synthetic oligonucleotide
caguaaucucacagugcuu

SEQ ID NO: 325180 - RNA, 19 nt, Artificial Sequence
  Description of Artificial Sequence: Synthetic oligonucleotide
cacucacucugacaacauu

SEQ ID NO: 325181 - RNA, 19 nt, Artificial Sequence
  Description of Artificial Sequence: Synthetic oligonucleotide
guccgacuuugauguuaaa

SEQ ID NO: 325182 - RNA, 19 nt, Artificial Sequence
  Description of Artificial Sequence: Synthetic oligonucleotide
caaaccuggccacgugauu

SEQ ID NO: 325183 - RNA, 19 nt, Artificial Sequence
  Description of Artificial Sequence: Synthetic oligonucleotide
ccguucggugaaccaucag

SEQ ID NO: 325184 - RNA, 19 nt, Artificial Sequence
  Description of Artificial Sequence: Synthetic oligonucleotide
guggucgaguuaauuucuu

SEQ ID NO: 325185 - RNA, 19 nt, Artificial Sequence
  Description of Artificial Sequence: Synthetic oligonucleotide
ccaacaaaucccugcuuuu

SEQ ID NO: 325186 - RNA, 19 nt, Artificial Sequence
  Description of Artificial Sequence: Synthetic oligonucleotide
gcaaaccuggccacgugau

SEQ ID NO: 325187 - RNA, 19 nt, Artificial Sequence
  Description of Artificial Sequence: Synthetic oligonucleotide
ccuuggacucucucucucu

SEQ ID NO: 325188 - RNA, 19 nt, Artificial Sequence
  Description of Artificial Sequence: Synthetic oligonucleotide
ggugaaccaucagccaguu

SEQ ID NO: 325189 - RNA, 19 nt, Artificial Sequence
  Description of Artificial Sequence: Synthetic oligonucleotide
ccuccguucggugaaccau

SEQ ID NO: 325190 - RNA, 19 nt, Artificial Sequence
  Description of Artificial Sequence: Synthetic oligonucleotide
caccaguggucgaguuaau

SEQ ID NO: 325191 - RNA, 19 nt, Artificial Sequence
  Description of Artificial Sequence: Synthetic oligonucleotide
ccacucccacaguaaaauu

SEQ ID NO: 325192 - RNA, 19 nt, Artificial Sequence
  Description of Artificial Sequence: Synthetic oligonucleotide
cagguccgauaagccucua

SEQ ID NO: 325193 - RNA, 19 nt, Artificial Sequence
  Description of Artificial Sequence: Synthetic oligonucleotide
aauucuaguagauagcccg

SEQ ID NO: 325194 - RNA, 19 nt, Artificial Sequence
  Description of Artificial Sequence: Synthetic oligonucleotide
cuuggauugaauaugacug

SEQ ID NO: 325195 - RNA, 19 nt, Artificial Sequence
  Description of Artificial Sequence: Synthetic oligonucleotide
auagaucccacagagaugc

SEQ ID NO: 325196 - RNA, 19 nt, Artificial Sequence
  Description of Artificial Sequence: Synthetic oligonucleotide
cuagguuuagcugagaugg

SEQ ID NO: 325197 - RNA, 19 nt, Artificial Sequence
  Description of Artificial Sequence: Synthetic oligonucleotide
ugcaauaagaaucuugugu

SEQ ID NO: 325198 - RNA, 19 nt, Artificial Sequence
  Description of Artificial Sequence: Synthetic oligonucleotide
agagagauagcacagaacu

SEQ ID NO: 325199 - RNA, 19 nt, Artificial Sequence
  Description of Artificial Sequence: Synthetic oligonucleotide
agcgauucaagucagcugg

SEQ ID NO: 325200 - RNA, 19 nt, Artificial Sequence
  Description of Artificial Sequence: Synthetic oligonucleotide
acaauucuaguagauagcc

SEQ ID NO: 325201 - RNA, 19 nt, Artificial Sequence
  Description of Artificial Sequence: Synthetic oligonucleotide
aacauuaucaagggauccc

SEQ ID NO: 325202 - RNA, 19 nt, Artificial Sequence
  Description of Artificial Sequence: Synthetic oligonucleotide
ucagucuuaguggagaugg

SEQ ID NO: 325203 - RNA, 19 nt, Artificial Sequence
  Description of Artificial Sequence: Synthetic oligonucleotide
aagggaucccacuuuggcc

SEQ ID NO: 325204 - RNA, 19 nt, Artificial Sequence
  Description of Artificial Sequence: Synthetic oligonucleotide
ugaaguuuaacuucugacu

SEQ ID NO: 325205 - RNA, 19 nt, Artificial Sequence
  Description of Artificial Sequence: Synthetic oligonucleotide
uuuguaucacaccaugacc

SEQ ID NO: 325206 - RNA, 19 nt, Artificial Sequence
  Description of Artificial Sequence: Synthetic oligonucleotide
gauugaauaugacuguagc

SEQ ID NO: 325207 - RNA, 19 nt, Artificial Sequence
  Description of Artificial Sequence: Synthetic oligonucleotide
ucuuguguugauauaauuc

SEQ ID NO: 325208 - RNA, 19 nt, Artificial Sequence
  Description of Artificial Sequence: Synthetic oligonucleotide
gagcuuacaauucuaguag

SEQ ID NO: 325209 - RNA, 19 nt, Artificial Sequence
  Description of Artificial Sequence: Synthetic oligonucleotide
aauauuauccuuggaacca

SEQ ID NO: 325210 - RNA, 19 nt, Artificial Sequence
  Description of Artificial Sequence: Synthetic oligonucleotide
uuuuggguaugucaggcag

SEQ ID NO: 325211 - RNA, 19 nt, Artificial Sequence
  Description of Artificial Sequence: Synthetic oligonucleotide
agcaccccaccauagaucc

SEQ ID NO: 325212 - RNA, 19 nt, Artificial Sequence
  Description of Artificial Sequence: Synthetic oligonucleotide
caguucauagguuauuugg

SEQ ID NO: 325213 - RNA, 19 nt, Artificial Sequence
  Description of Artificial Sequence: Synthetic oligonucleotide
uguugauauaauucccagg

SEQ ID NO: 325214 - RNA, 19 nt, Artificial Sequence
  Description of Artificial Sequence: Synthetic oligonucleotide
ugauauucgcuuuggaccc

SEQ ID NO: 325215 - RNA, 19 nt, Artificial Sequence
  Description of Artificial Sequence: Synthetic oligonucleotide
aauccuuuauuagaaacca

SEQ ID NO: 325216 - RNA, 19 nt, Artificial Sequence
  Description of Artificial Sequence: Synthetic oligonucleotide
ugaauccuuuauuagaaac

SEQ ID NO: 325217 - RNA, 19 nt, Artificial Sequence
  Description of Artificial Sequence: Synthetic oligonucleotide
uugaauaugacuguagcuc

SEQ ID NO: 325218 - RNA, 19 nt, Artificial Sequence
  Description of Artificial Sequence: Synthetic oligonucleotide
ugguuuuagguccaggucu

SEQ ID NO: 325219 - RNA, 19 nt, Artificial Sequence
  Description of Artificial Sequence: Synthetic oligonucleotide
uuuugugacugcauuaggu

SEQ ID NO: 325220 - RNA, 19 nt, Artificial Sequence
  Description of Artificial Sequence: Synthetic oligonucleotide
aaccaugcaaacuuuaaua

SEQ ID NO: 325221 - RNA, 19 nt, Artificial Sequence
  Description of Artificial Sequence: Synthetic oligonucleotide
cuuaauauuauccuuggaa

SEQ ID NO: 325222 - RNA, 19 nt, Artificial Sequence
  Description of Artificial Sequence: Synthetic oligonucleotide
uuguuuaaaucacagggau

SEQ ID NO: 325223 - RNA, 19 nt, Artificial Sequence
  Description of Artificial Sequence: Synthetic oligonucleotide
uaguuuucaauuuccacac

SEQ ID NO: 325224 - RNA, 19 nt, Artificial Sequence
  Description of Artificial Sequence: Synthetic oligonucleotide
uuuucaggaaucuuagcgu

SEQ ID NO: 325225 - RNA, 19 nt, Artificial Sequence
  Description of Artificial Sequence: Synthetic oligonucleotide
ugaauaugacuguagcuca

SEQ ID NO: 325226 - RNA, 19 nt, Artificial Sequence
  Description of Artificial Sequence: Synthetic oligonucleotide
uuuagguccaggucugagg

SEQ ID NO: 325227 - RNA, 19 nt, Artificial Sequence
  Description of Artificial Sequence: Synthetic oligonucleotide
uugggaugguuuuaggucc

SEQ ID NO: 325228 - RNA, 19 nt, Artificial Sequence
  Description of Artificial Sequence: Synthetic oligonucleotide
auaauucccaggauuuucc

SEQ ID NO: 325229 - RNA, 19 nt, Artificial Sequence
  Description of Artificial Sequence: Synthetic oligonucleotide
auugaauaugacuguagcu

SEQ ID NO: 325230 - RNA, 19 nt, Artificial Sequence
  Description of Artificial Sequence: Synthetic oligonucleotide
uuagguuugaauccuuuau

SEQ ID NO: 325231 - RNA, 19 nt, Artificial Sequence
  Description of Artificial Sequence: Synthetic oligonucleotide
ucugucgacccaaucuugg

SEQ ID NO: 325232 - RNA, 19 nt, Artificial Sequence
  Description of Artificial Sequence: Synthetic oligonucleotide
ugauauucucugucgaccc

SEQ ID NO: 325233 - RNA, 19 nt, Artificial Sequence
  Description of Artificial Sequence: Synthetic oligonucleotide
uucucugucgacccaaucu

SEQ ID NO: 325234 - RNA, 19 nt, Artificial Sequence
  Description of Artificial Sequence: Synthetic oligonucleotide
cuuagcgucuguaauuggc

SEQ ID NO: 325235 - RNA, 19 nt, Artificial Sequence
  Description of Artificial Sequence: Synthetic oligonucleotide
guaggggcagcauacaugc

SEQ ID NO: 325236 - RNA, 19 nt, Artificial Sequence
  Description of Artificial Sequence: Synthetic oligonucleotide
uggguagagagauagcaca

SEQ ID NO: 325237 - RNA, 19 nt, Artificial Sequence
  Description of Artificial Sequence: Synthetic oligonucleotide
gagauguggcuuuugaaac

SEQ ID NO: 325238 - RNA, 19 nt, Artificial Sequence
  Description of Artificial Sequence: Synthetic oligonucleotide
gauucaagucagcuggugc

SEQ ID NO: 325239 - RNA, 19 nt, Artificial Sequence
  Description of Artificial Sequence: Synthetic oligonucleotide
uuguguugauauaauuccc

SEQ ID NO: 325240 - RNA, 19 nt, Artificial Sequence
  Description of Artificial Sequence: Synthetic oligonucleotide
aagugggauggccucaguc

SEQ ID NO: 325241 - RNA, 19 nt, Artificial Sequence
  Description of Artificial Sequence: Synthetic oligonucleotide
aaucuuagcgucuguaauu

SEQ ID NO: 325242 - RNA, 19 nt, Artificial Sequence
  Description of Artificial Sequence: Synthetic oligonucleotide
agacuaucuggacuuuccc

SEQ ID NO: 325243 - RNA, 19 nt, Artificial Sequence
  Description of Artificial Sequence: Synthetic oligonucleotide
ucuacuagucccuccaagu

SEQ ID NO: 325244 - RNA, 19 nt, Artificial Sequence
  Description of Artificial Sequence: Synthetic oligonucleotide
uucaccacaaacuuagguu

SEQ ID NO: 325245 - RNA, 19 nt, Artificial Sequence
  Description of Artificial Sequence: Synthetic oligonucleotide
uuugagcgauucaagucag

SEQ ID NO: 325246 - RNA, 19 nt, Artificial Sequence
  Description of Artificial Sequence: Synthetic oligonucleotide
uuauuuggaaaggcagugg

SEQ ID NO: 325247 - RNA, 19 nt, Artificial Sequence
  Description of Artificial Sequence: Synthetic oligonucleotide
agucuuaguggagaugggc

SEQ ID NO: 325248 - RNA, 19 nt, Artificial Sequence
  Description of Artificial Sequence: Synthetic oligonucleotide
auacaugcaaugccagcac

SEQ ID NO: 325249 - RNA, 19 nt, Artificial Sequence
  Description of Artificial Sequence: Synthetic oligonucleotide
uacuagucccuccaaguug

SEQ ID NO: 325250 - RNA, 19 nt, Artificial Sequence
  Description of Artificial Sequence: Synthetic oligonucleotide
augguuuuagguccagguc

SEQ ID NO: 325251 - RNA, 19 nt, Artificial Sequence
  Description of Artificial Sequence: Synthetic oligonucleotide
uuagcgucuguaauuggcu

SEQ ID NO: 325252 - RNA, 19 nt, Artificial Sequence
  Description of Artificial Sequence: Synthetic oligonucleotide
aggagcuagguuuagcuga

SEQ ID NO: 325253 - RNA, 19 nt, Artificial Sequence
  Description of Artificial Sequence: Synthetic oligonucleotide
ucuacuuuggcccggccuc

SEQ ID NO: 325254 - RNA, 19 nt, Artificial Sequence
  Description of Artificial Sequence: Synthetic oligonucleotide
uguaauuggcuuugguuuc

SEQ ID NO: 325255 - RNA, 19 nt, Artificial Sequence
  Description of Artificial Sequence: Synthetic oligonucleotide
caagagcuuacaauucuag

SEQ ID NO: 325256 - RNA, 19 nt, Artificial Sequence
  Description of Artificial Sequence: Synthetic oligonucleotide
agaggagcuagguuuagcu

SEQ ID NO: 325257 - RNA, 19 nt, Artificial Sequence
  Description of Artificial Sequence: Synthetic oligonucleotide
ugucgacccaaucuuggag

SEQ ID NO: 325258 - RNA, 19 nt, Artificial Sequence
  Description of Artificial Sequence: Synthetic oligonucleotide
cuuugagcgauucaaguca

SEQ ID NO: 325259 - RNA, 19 nt, Artificial Sequence
  Description of Artificial Sequence: Synthetic oligonucleotide
auuaucaagggaucccacu

SEQ ID NO: 325260 - RNA, 19 nt, Artificial Sequence
  Description of Artificial Sequence: Synthetic oligonucleotide
guaggucucaauuugucuc

SEQ ID NO: 325261 - RNA, 19 nt, Artificial Sequence
  Description of Artificial Sequence: Synthetic oligonucleotide
cauccuuuugacaucagca

SEQ ID NO: 325262 - RNA, 19 nt, Artificial Sequence
  Description of Artificial Sequence: Synthetic oligonucleotide
uuaucaagggaucccacuu

SEQ ID NO: 325263 - RNA, 19 nt, Artificial Sequence
  Description of Artificial Sequence: Synthetic oligonucleotide
aguagacuccuaccccucc

SEQ ID NO: 325264 - RNA, 19 nt, Artificial Sequence
  Description of Artificial Sequence: Synthetic oligonucleotide
acugcauuagguucaggcu

SEQ ID NO: 325265 - RNA, 19 nt, Artificial Sequence
  Description of Artificial Sequence: Synthetic oligonucleotide
agguuuagcugagaugggc

SEQ ID NO: 325266 - RNA, 19 nt, Artificial Sequence
  Description of Artificial Sequence: Synthetic oligonucleotide
cuugauauucucugucgac

SEQ ID NO: 325267 - RNA, 19 nt, Artificial Sequence
  Description of Artificial Sequence: Synthetic oligonucleotide
aagagcuacagaaggccgg

SEQ ID NO: 325268 - RNA, 19 nt, Artificial Sequence
  Description of Artificial Sequence: Synthetic oligonucleotide
uuugugacugcauuagguu

SEQ ID NO: 325269 - RNA, 19 nt, Artificial Sequence
  Description of Artificial Sequence: Synthetic oligonucleotide
agugggauggccucagucu

SEQ ID NO: 325270 - RNA, 19 nt, Artificial Sequence
  Description of Artificial Sequence: Synthetic oligonucleotide
acuagucccuccaaguugg

SEQ ID NO: 325271 - RNA, 19 nt, Artificial Sequence
  Description of Artificial Sequence: Synthetic oligonucleotide
ucaacccgcagcaaacuac

SEQ ID NO: 325272 - RNA, 19 nt, Artificial Sequence
  Description of Artificial Sequence: Synthetic oligonucleotide
ucgacccaaucuuggagcg

SEQ ID NO: 325273 - RNA, 19 nt, Artificial Sequence
  Description of Artificial Sequence: Synthetic oligonucleotide
gaaucugaacauugccacc

SEQ ID NO: 325274 - RNA, 19 nt, Artificial Sequence
  Description of Artificial Sequence: Synthetic oligonucleotide
uggugggauaguagguugg

SEQ ID NO: 325275 - RNA, 19 nt, Artificial Sequence
  Description of Artificial Sequence: Synthetic oligonucleotide
ggaaacaagaguugaagga

SEQ ID NO: 325276 - RNA, 19 nt, Artificial Sequence
  Description of Artificial Sequence: Synthetic oligonucleotide
caauucuaguagauagccc

SEQ ID NO: 325277 - RNA, 19 nt, Artificial Sequence
  Description of Artificial Sequence: Synthetic oligonucleotide
uuuggguaugucaggcagc

SEQ ID NO: 325278 - RNA, 19 nt, Artificial Sequence
  Description of Artificial Sequence: Synthetic oligonucleotide
aaacaagaguugaaggaga

SEQ ID NO: 325279 - RNA, 19 nt, Artificial Sequence
  Description of Artificial Sequence: Synthetic oligonucleotide
gagcgaacacucuucagac

SEQ ID NO: 325280 - RNA, 19 nt, Artificial Sequence
  Description of Artificial Sequence: Synthetic oligonucleotide
uuggguagagagauagcac

SEQ ID NO: 325281 - RNA, 19 nt, Artificial Sequence
  Description of Artificial Sequence: Synthetic oligonucleotide
augaccacugcaucccagg

SEQ ID NO: 325282 - RNA, 19 nt, Artificial Sequence
  Description of Artificial Sequence: Synthetic oligonucleotide
ucgcuuuggacccacacuu

SEQ ID NO: 325283 - RNA, 19 nt, Artificial Sequence
  Description of Artificial Sequence: Synthetic oligonucleotide
ucuaguagauagcccggga

SEQ ID NO: 325284 - RNA, 19 nt, Artificial Sequence
  Description of Artificial Sequence: Synthetic oligonucleotide
cuacugauuggcccagugg

SEQ ID NO: 325285 - RNA, 19 nt, Artificial Sequence
  Description of Artificial Sequence: Synthetic oligonucleotide
uguacccaaagcagagaug

SEQ ID NO: 325286 - RNA, 19 nt, Artificial Sequence
  Description of Artificial Sequence: Synthetic oligonucleotide
uucuaguagauagcccggg

SEQ ID NO: 325287 - RNA, 19 nt, Artificial Sequence
  Description of Artificial Sequence: Synthetic oligonucleotide
uuugcccggaacgucagcc

SEQ ID NO: 325288 - RNA, 19 nt, Artificial Sequence
  Description of Artificial Sequence: Synthetic oligonucleotide
aacacucuucagacuaggg

SEQ ID NO: 325289 - RNA, 19 nt, Artificial Sequence
  Description of Artificial Sequence: Synthetic oligonucleotide
auuauccuuggaaccacac

SEQ ID NO: 325290 - RNA, 19 nt, Artificial Sequence
  Description of Artificial Sequence: Synthetic oligonucleotide
ugcgcacucccaauggagc

SEQ ID NO: 325291 - RNA, 19 nt, Artificial Sequence
  Description of Artificial Sequence: Synthetic oligonucleotide
uguaucacaccaugaccac

SEQ ID NO: 325292 - RNA, 19 nt, Artificial Sequence
  Description of Artificial Sequence: Synthetic oligonucleotide
aucuuagcgucuguaauug

SEQ ID NO: 325293 - RNA, 19 nt, Artificial Sequence
  Description of Artificial Sequence: Synthetic oligonucleotide
ucuuagcgucuguaauugg

SEQ ID NO: 325294 - RNA, 19 nt, Artificial Sequence
  Description of Artificial Sequence: Synthetic oligonucleotide
ugucaguuucuuuuggguu

SEQ ID NO: 325295 - RNA, 19 nt, Artificial Sequence
  Description of Artificial Sequence: Synthetic oligonucleotide
gagacuaucuggacuuucc

SEQ ID NO: 325296 - RNA, 19 nt, Artificial Sequence
  Description of Artificial Sequence: Synthetic oligonucleotide
agacauggcuucaacccgc

SEQ ID NO: 325297 - RNA, 19 nt, Artificial Sequence
  Description of Artificial Sequence: Synthetic oligonucleotide
uagguuuagcugagauggg

SEQ ID NO: 325298 - RNA, 19 nt, Artificial Sequence
  Description of Artificial Sequence: Synthetic oligonucleotide
uugauauaauucccaggau

SEQ ID NO: 325299 - RNA, 19 nt, Artificial Sequence
  Description of Artificial Sequence: Synthetic oligonucleotide
ucucugucgacccaaucuu

SEQ ID NO: 325300 - RNA, 19 nt, Artificial Sequence
  Description of Artificial Sequence: Synthetic oligonucleotide
auaagaaucuuguguugau

SEQ ID NO: 325301 - RNA, 19 nt, Artificial Sequence
  Description of Artificial Sequence: Synthetic oligonucleotide
uuuuagguccaggucugag

SEQ ID NO: 325302 - RNA, 19 nt, Artificial Sequence
  Description of Artificial Sequence: Synthetic oligonucleotide
aguucauagguuauuugga

SEQ ID NO: 325303 - RNA, 19 nt, Artificial Sequence
  Description of Artificial Sequence: Synthetic oligonucleotide
ucgaggggcagucauuccu

SEQ ID NO: 325304 - RNA, 19 nt, Artificial Sequence
  Description of Artificial Sequence: Synthetic oligonucleotide
uuggagcgaacacucuuca

SEQ ID NO: 325305 - RNA, 19 nt, Artificial Sequence
  Description of Artificial Sequence: Synthetic oligonucleotide
agggauagcuuccuugggu

SEQ ID NO: 325306 - RNA, 19 nt, Artificial Sequence
  Description of Artificial Sequence: Synthetic oligonucleotide
cuuguccacagaaagagcu

SEQ ID NO: 325307 - RNA, 19 nt, Artificial Sequence
  Description of Artificial Sequence: Synthetic oligonucleotide
gauacaggcuuggauggug

SEQ ID NO: 325308 - RNA, 19 nt, Artificial Sequence
  Description of Artificial Sequence: Synthetic oligonucleotide
agcuuacaauucuaguaga

SEQ ID NO: 325309 - RNA, 19 nt, Artificial Sequence
  Description of Artificial Sequence: Synthetic oligonucleotide
ucgggagacaaugucggcc

SEQ ID NO: 325310 - RNA, 19 nt, Artificial Sequence
  Description of Artificial Sequence: Synthetic oligonucleotide
gagcgauucaagucagcug

SEQ ID NO: 325311 - RNA, 19 nt, Artificial Sequence
  Description of Artificial Sequence: Synthetic oligonucleotide
cauacaugcaaugccagca

SEQ ID NO: 325312 - RNA, 19 nt, Artificial Sequence
  Description of Artificial Sequence: Synthetic oligonucleotide
accaccaguucauagguua

SEQ ID NO: 325313 - RNA, 19 nt, Artificial Sequence
  Description of Artificial Sequence: Synthetic oligonucleotide
uggaaaggcagugguuagg

SEQ ID NO: 325314 - RNA, 19 nt, Artificial Sequence
  Description of Artificial Sequence: Synthetic oligonucleotide
acaguugggaugguuuuag

SEQ ID NO: 325315 - RNA, 19 nt, Artificial Sequence
  Description of Artificial Sequence: Synthetic oligonucleotide
accacacuuggauugaaua

SEQ ID NO: 325316 - RNA, 19 nt, Artificial Sequence
  Description of Artificial Sequence: Synthetic oligonucleotide
guuuaggugccuuggccug

SEQ ID NO: 325317 - RNA, 19 nt, Artificial Sequence
  Description of Artificial Sequence: Synthetic oligonucleotide
guucauagguuauuuggaa

SEQ ID NO: 325318 - RNA, 19 nt, Artificial Sequence
  Description of Artificial Sequence: Synthetic oligonucleotide
gcagacuuagcagucaucc

SEQ ID NO: 325319 - RNA, 19 nt, Artificial Sequence
  Description of Artificial Sequence: Synthetic oligonucleotide
ucucugcgcacucccaaug

SEQ ID NO: 325320 - RNA, 19 nt, Artificial Sequence
  Description of Artificial Sequence: Synthetic oligonucleotide
ucuagcugucagacucagg

SEQ ID NO: 325321 - RNA, 19 nt, Artificial Sequence
  Description of Artificial Sequence: Synthetic oligonucleotide
ucagggauuuugaccuuca

SEQ ID NO: 325322 - RNA, 19 nt, Artificial Sequence
  Description of Artificial Sequence: Synthetic oligonucleotide
agcaaacuacaccaccagu

SEQ ID NO: 325323 - RNA, 19 nt, Artificial Sequence
  Description of Artificial Sequence: Synthetic oligonucleotide
acucgaggggcagucauuc

SEQ ID NO: 325324 - RNA, 19 nt, Artificial Sequence
  Description of Artificial Sequence: Synthetic oligonucleotide
ugcauuagguucaggcuuu

SEQ ID NO: 325325 - RNA, 19 nt, Artificial Sequence
  Description of Artificial Sequence: Synthetic oligonucleotide
caucaggagacuggaaccc

SEQ ID NO: 325326 - RNA, 19 nt, Artificial Sequence
  Description of Artificial Sequence: Synthetic oligonucleotide
acacggaggggccucacug

SEQ ID NO: 325327 - RNA, 19 nt, Artificial Sequence
  Description of Artificial Sequence: Synthetic oligonucleotide
aacaagaguugaaggagau

SEQ ID NO: 325328 - RNA, 19 nt, Artificial Sequence
  Description of Artificial Sequence: Synthetic oligonucleotide
acuggaacccagcacccca

SEQ ID NO: 325329 - RNA, 19 nt, Artificial Sequence
  Description of Artificial Sequence: Synthetic oligonucleotide
uuggguaugucaggcagcu

SEQ ID NO: 325330 - RNA, 19 nt, Artificial Sequence
  Description of Artificial Sequence: Synthetic oligonucleotide
aguuggaccagggaagaga

SEQ ID NO: 325331 - RNA, 19 nt, Artificial Sequence
  Description of Artificial Sequence: Synthetic oligonucleotide
agcuagguuuagcugagau

SEQ ID NO: 325332 - RNA, 19 nt, Artificial Sequence
  Description of Artificial Sequence: Synthetic oligonucleotide
aaagggccgcccagcaccc

SEQ ID NO: 325333 - RNA, 19 nt, Artificial Sequence
  Description of Artificial Sequence: Synthetic oligonucleotide
aggucgggagacaaugucg

SEQ ID NO: 325334 - RNA, 19 nt, Artificial Sequence
  Description of Artificial Sequence: Synthetic oligonucleotide
agcaagcuaggcaggaggg

SEQ ID NO: 325335 - RNA, 19 nt, Artificial Sequence
  Description of Artificial Sequence: Synthetic oligonucleotide
uaucaagggaucccacuuu

SEQ ID NO: 325336 - RNA, 19 nt, Artificial Sequence
  Description of Artificial Sequence: Synthetic oligonucleotide
ucugcgcacucccaaugga

SEQ ID NO: 325337 - RNA, 19 nt, Artificial Sequence
  Description of Artificial Sequence: Synthetic oligonucleotide
auuugcccggaacgucagc

SEQ ID NO: 325338 - RNA, 19 nt, Artificial Sequence
  Description of Artificial Sequence: Synthetic oligonucleotide
acaaugucggccccauggu

SEQ ID NO: 325339 - RNA, 19 nt, Artificial Sequence
  Description of Artificial Sequence: Synthetic oligonucleotide
ggagcgaacacucuucaga

SEQ ID NO: 325340 - RNA, 19 nt, Artificial Sequence
  Description of Artificial Sequence: Synthetic oligonucleotide
cuuagcagucauccuuuug

SEQ ID NO: 325341 - RNA, 19 nt, Artificial Sequence
  Description of Artificial Sequence: Synthetic oligonucleotide
cagcauacaugcaaugcca

SEQ ID NO: 325342 - RNA, 19 nt, Artificial Sequence
  Description of Artificial Sequence: Synthetic oligonucleotide
agcagucauccuuuugaca

SEQ ID NO: 325343 - RNA, 19 nt, Artificial Sequence
  Description of Artificial Sequence: Synthetic oligonucleotide
uaagaaucuuguguugaua

SEQ ID NO: 325344 - RNA, 19 nt, Artificial Sequence
  Description of Artificial Sequence: Synthetic oligonucleotide
uuagcugagaugggcuucu

SEQ ID NO: 325345 - RNA, 19 nt, Artificial Sequence
  Description of Artificial Sequence: Synthetic oligonucleotide
gaauaugacuguagcucac

SEQ ID NO: 325346 - RNA, 19 nt, Artificial Sequence
  Description of Artificial Sequence: Synthetic oligonucleotide
cucugcgcacucccaaugg

SEQ ID NO: 325347 - RNA, 19 nt, Artificial Sequence
  Description of Artificial Sequence: Synthetic oligonucleotide
agucagcuggugcagacuu

SEQ ID NO: 325348 - RNA, 19 nt, Artificial Sequence
  Description of Artificial Sequence: Synthetic oligonucleotide
gaggucgggagacaauguc

SEQ ID NO: 325349 - RNA, 19 nt, Artificial Sequence
  Description of Artificial Sequence: Synthetic oligonucleotide
uucaacccgcagcaaacua

SEQ ID NO: 325350 - RNA, 19 nt, Artificial Sequence
  Description of Artificial Sequence: Synthetic oligonucleotide
auauucgcuuuggacccac

SEQ ID NO: 325351 - RNA, 19 nt, Artificial Sequence
  Description of Artificial Sequence: Synthetic oligonucleotide
ggauugaauaugacuguag

SEQ ID NO: 325352 - RNA, 19 nt, Artificial Sequence
  Description of Artificial Sequence: Synthetic oligonucleotide
cugcgcacucccaauggag

SEQ ID NO: 325353 - RNA, 19 nt, Artificial Sequence
  Description of Artificial Sequence: Synthetic oligonucleotide
agcauacaugcaaugccag

SEQ ID NO: 325354 - RNA, 19 nt, Artificial Sequence
  Description of Artificial Sequence: Synthetic oligonucleotide
cugagaacucucauuuaga

SEQ ID NO: 325355 - RNA, 19 nt, Artificial Sequence
  Description of Artificial Sequence: Synthetic oligonucleotide
uggagcgaacacucuucag

SEQ ID NO: 325356 - RNA, 19 nt, Artificial Sequence
  Description of Artificial Sequence: Synthetic oligonucleotide
ggucgggagacaaugucgg

SEQ ID NO: 325357 - RNA, 19 nt, Artificial Sequence
  Description of Artificial Sequence: Synthetic oligonucleotide
gcuagguuuagcugagaug

SEQ ID NO: 325358 - RNA, 19 nt, Artificial Sequence
  Description of Artificial Sequence: Synthetic oligonucleotide
aucaccuacugagaacucu

SEQ ID NO: 325359 - RNA, 19 nt, Artificial Sequence
  Description of Artificial Sequence: Synthetic oligonucleotide
auaugacuguagcucacuu

SEQ ID NO: 325360 - RNA, 19 nt, Artificial Sequence
  Description of Artificial Sequence: Synthetic oligonucleotide
augucggccccauggucgg

SEQ ID NO: 325361 - RNA, 19 nt, Artificial Sequence
  Description of Artificial Sequence: Synthetic oligonucleotide
ugacucgaggggcagucau

SEQ ID NO: 325362 - RNA, 19 nt, Artificial Sequence
  Description of Artificial Sequence: Synthetic oligonucleotide
guagguggccaacauuauc

SEQ ID NO: 325363 - RNA, 19 nt, Artificial Sequence
  Description of Artificial Sequence: Synthetic oligonucleotide
acuccuaccccuccuccca

SEQ ID NO: 325364 - RNA, 19 nt, Artificial Sequence
  Description of Artificial Sequence: Synthetic oligonucleotide
ucagucuucacggcgccuc

SEQ ID NO: 325365 - RNA, 19 nt, Artificial Sequence
  Description of Artificial Sequence: Synthetic oligonucleotide
cuaguagauagcccgggaa

SEQ ID NO: 325366 - RNA, 19 nt, Artificial Sequence
  Description of Artificial Sequence: Synthetic oligonucleotide
cauuugcccggaacgucag

SEQ ID NO: 325367 - RNA, 19 nt, Artificial Sequence
  Description of Artificial Sequence: Synthetic oligonucleotide
guuagguuccaggggauuc

SEQ ID NO: 325368 - RNA, 19 nt, Artificial Sequence
  Description of Artificial Sequence: Synthetic oligonucleotide
gccucagucucacacauuc

SEQ ID NO: 325369 - RNA, 19 nt, Artificial Sequence
  Description of Artificial Sequence: Synthetic oligonucleotide
cucugucgacccaaucuug

SEQ ID NO: 325370 - RNA, 19 nt, Artificial Sequence
  Description of Artificial Sequence: Synthetic oligonucleotide
cagucuuaguggagauggg

SEQ ID NO: 325371 - RNA, 19 nt, Artificial Sequence
  Description of Artificial Sequence: Synthetic oligonucleotide
caggggauucagucagugc

SEQ ID NO: 325372 - RNA, 19 nt, Artificial Sequence
  Description of Artificial Sequence: Synthetic oligonucleotide
caguugggaugguuuuagg

SEQ ID NO: 325373 - RNA, 19 nt, Artificial Sequence
  Description of Artificial Sequence: Synthetic oligonucleotide
cagggauagcuuccuuggg

SEQ ID NO: 325374 - RNA, 19 nt, Artificial Sequence
  Description of Artificial Sequence: Synthetic oligonucleotide
cagacuagggccagaggca

SEQ ID NO: 325375 - RNA, 19 nt, Artificial Sequence
  Description of Artificial Sequence: Synthetic oligonucleotide
uauucucugucgacccaau

SEQ ID NO: 325376 - RNA, 19 nt, Artificial Sequence
  Description of Artificial Sequence: Synthetic oligonucleotide
auagcccgggaaagggagc

SEQ ID NO: 325377 - RNA, 19 nt, Artificial Sequence
  Description of Artificial Sequence: Synthetic oligonucleotide
auauucucugucgacccaa

SEQ ID NO: 325378 - RNA, 19 nt, Artificial Sequence
  Description of Artificial Sequence: Synthetic oligonucleotide
gcuuuugaaacaguuggga

SEQ ID NO: 325379 - RNA, 19 nt, Artificial Sequence
  Description of Artificial Sequence: Synthetic oligonucleotide
ggagcccuuagacacuccc

SEQ ID NO: 325380 - RNA, 19 nt, Artificial Sequence
  Description of Artificial Sequence: Synthetic oligonucleotide
agcgaacacucuucagacu

SEQ ID NO: 325381 - RNA, 19 nt, Artificial Sequence
  Description of Artificial Sequence: Synthetic oligonucleotide
agcacccaagagcuuacaa

SEQ ID NO: 325382 - RNA, 19 nt, Artificial Sequence
  Description of Artificial Sequence: Synthetic oligonucleotide
ggaaucuuagcgucuguaa

SEQ ID NO: 325383 - RNA, 19 nt, Artificial Sequence
  Description of Artificial Sequence: Synthetic oligonucleotide
aguggaaacaagaguugaa

SEQ ID NO: 325384 - RNA, 19 nt, Artificial Sequence
  Description of Artificial Sequence: Synthetic oligonucleotide
cuugacucgaggggcaguc

SEQ ID NO: 325385 - RNA, 19 nt, Artificial Sequence
  Description of Artificial Sequence: Synthetic oligonucleotide
cacggaggggccucacugc

SEQ ID NO: 325386 - RNA, 19 nt, Artificial Sequence
  Description of Artificial Sequence: Synthetic oligonucleotide
cccgcagcaaacuacacca

SEQ ID NO: 325387 - RNA, 19 nt, Artificial Sequence
  Description of Artificial Sequence: Synthetic oligonucleotide
gaccacugcaucccaggga

SEQ ID NO: 325388 - RNA, 19 nt, Artificial Sequence
  Description of Artificial Sequence: Synthetic oligonucleotide
gaacucucauuuagacaug

SEQ ID NO: 325389 - RNA, 19 nt, Artificial Sequence
  Description of Artificial Sequence: Synthetic oligonucleotide
ugauuccccacugcucaca

SEQ ID NO: 325390 - RNA, 19 nt, Artificial Sequence
  Description of Artificial Sequence: Synthetic oligonucleotide
gggauaguagguuggagcu

SEQ ID NO: 325391 - RNA, 19 nt, Artificial Sequence
  Description of Artificial Sequence: Synthetic oligonucleotide
gggaaugagacaaaugcua

SEQ ID NO: 325392 - RNA, 19 nt, Artificial Sequence
  Description of Artificial Sequence: Synthetic oligonucleotide
agaggccuaaagggccgcc

SEQ ID NO: 325393 - RNA, 19 nt, Artificial Sequence
  Description of Artificial Sequence: Synthetic oligonucleotide
cuaaagggccgcccagcac

SEQ ID NO: 325394 - RNA, 19 nt, Artificial Sequence
  Description of Artificial Sequence: Synthetic oligonucleotide
uuuccagcccugguuuugu

SEQ ID NO: 325395 - RNA, 19 nt, Artificial Sequence
  Description of Artificial Sequence: Synthetic oligonucleotide
gguuuuagguccaggucug

SEQ ID NO: 325396 - RNA, 19 nt, Artificial Sequence
  Description of Artificial Sequence: Synthetic oligonucleotide
gggauucagucagugcugg

SEQ ID NO: 325397 - RNA, 19 nt, Artificial Sequence
  Description of Artificial Sequence: Synthetic oligonucleotide
caaugucggccccaugguc

SEQ ID NO: 325398 - RNA, 19 nt, Artificial Sequence
  Description of Artificial Sequence: Synthetic oligonucleotide
gacccaaucuuggagcgaa

SEQ ID NO: 325399 - RNA, 19 nt, Artificial Sequence
  Description of Artificial Sequence: Synthetic oligonucleotide
gccaguagacuccuacccc

SEQ ID NO: 325400 - RNA, 19 nt, Artificial Sequence
  Description of Artificial Sequence: Synthetic oligonucleotide
uucucuacuuuggcccggc

SEQ ID NO: 325401 - RNA, 19 nt, Artificial Sequence
  Description of Artificial Sequence: Synthetic oligonucleotide
uauucgcuuuggacccaca

SEQ ID NO: 325402 - RNA, 19 nt, Artificial Sequence
  Description of Artificial Sequence: Synthetic oligonucleotide
cagcaccccaccauagauc

SEQ ID NO: 325403 - RNA, 19 nt, Artificial Sequence
  Description of Artificial Sequence: Synthetic oligonucleotide
ugccccaguaggaguggug

SEQ ID NO: 325404 - RNA, 19 nt, Artificial Sequence
  Description of Artificial Sequence: Synthetic oligonucleotide
aggccuaaagggccgccca

SEQ ID NO: 325405 - RNA, 19 nt, Artificial Sequence
  Description of Artificial Sequence: Synthetic oligonucleotide
caccucuacuagucccucc

SEQ ID NO: 325406 - RNA, 19 nt, Artificial Sequence
  Description of Artificial Sequence: Synthetic oligonucleotide
gguuuaggugccuuggccu

SEQ ID NO: 325407 - RNA, 19 nt, Artificial Sequence
  Description of Artificial Sequence: Synthetic oligonucleotide
ccaaucuuggagcgaacac

SEQ ID NO: 325408 - RNA, 19 nt, Artificial Sequence
  Description of Artificial Sequence: Synthetic oligonucleotide
cucagucuuaguggagaug

SEQ ID NO: 325409 - RNA, 19 nt, Artificial Sequence
  Description of Artificial Sequence: Synthetic oligonucleotide
aaccacacuuggauugaau

SEQ ID NO: 325410 - RNA, 19 nt, Artificial Sequence
  Description of Artificial Sequence: Synthetic oligonucleotide
gaggccuaaagggccgccc

SEQ ID NO: 325411 - RNA, 19 nt, Artificial Sequence
  Description of Artificial Sequence: Synthetic oligonucleotide
caaucuuggagcgaacacu

SEQ ID NO: 325412 - RNA, 19 nt, Artificial Sequence
  Description of Artificial Sequence: Synthetic oligonucleotide
gggaggucgggagacaaug

SEQ ID NO: 325413 - RNA, 19 nt, Artificial Sequence
  Description of Artificial Sequence: Synthetic oligonucleotide
caguagacuccuaccccuc

SEQ ID NO: 325414 - RNA, 19 nt, Artificial Sequence
  Description of Artificial Sequence: Synthetic oligonucleotide
cagaggagcuagguuuagc

SEQ ID NO: 325415 - RNA, 19 nt, Artificial Sequence
  Description of Artificial Sequence: Synthetic oligonucleotide
ggagcuagguuuagcugag

SEQ ID NO: 325416 - RNA, 19 nt, Artificial Sequence
  Description of Artificial Sequence: Synthetic oligonucleotide
cugauuccccacugcucac

SEQ ID NO: 325417 - RNA, 19 nt, Artificial Sequence
  Description of Artificial Sequence: Synthetic oligonucleotide
gucgggagacaaugucggc

SEQ ID NO: 325418 - RNA, 19 nt, Artificial Sequence
  Description of Artificial Sequence: Synthetic oligonucleotide
ggaacgucagccuguaggu

SEQ ID NO: 325419 - RNA, 19 nt, Artificial Sequence
  Description of Artificial Sequence: Synthetic oligonucleotide
gaggagcccuuagacacuc

SEQ ID NO: 325420 - RNA, 19 nt, Artificial Sequence
  Description of Artificial Sequence: Synthetic oligonucleotide
cuacuuuggcccggccucc

SEQ ID NO: 325421 - RNA, 19 nt, Artificial Sequence
  Description of Artificial Sequence: Synthetic oligonucleotide
caucaccuacugagaacuc

SEQ ID NO: 325422 - RNA, 19 nt, Artificial Sequence
  Description of Artificial Sequence: Synthetic oligonucleotide
gacaugggcuugacucgag

SEQ ID NO: 325423 - RNA, 19 nt, Artificial Sequence
  Description of Artificial Sequence: Synthetic oligonucleotide
ccagacgugaggguuuagg

SEQ ID NO: 325424 - RNA, 19 nt, Artificial Sequence
  Description of Artificial Sequence: Synthetic oligonucleotide
ggaugguuuuagguccagg

SEQ ID NO: 325425 - RNA, 19 nt, Artificial Sequence
  Description of Artificial Sequence: Synthetic oligonucleotide
auaguagguuggagcuggg

SEQ ID NO: 325426 - RNA, 19 nt, Artificial Sequence
  Description of Artificial Sequence: Synthetic oligonucleotide
caccagaaggaaaguggga

SEQ ID NO: 325427 - RNA, 19 nt, Artificial Sequence
  Description of Artificial Sequence: Synthetic oligonucleotide
ggguuugucaguuucuuuu

SEQ ID NO: 325428 - RNA, 19 nt, Artificial Sequence
  Description of Artificial Sequence: Synthetic oligonucleotide
aggggcagucauuccuacu

SEQ ID NO: 325429 - RNA, 19 nt, Artificial Sequence
  Description of Artificial Sequence: Synthetic oligonucleotide
gauauucgcuuuggaccca

SEQ ID NO: 325430 - RNA, 19 nt, Artificial Sequence
  Description of Artificial Sequence: Synthetic oligonucleotide
cagucucacacauucuagu

SEQ ID NO: 325431 - RNA, 19 nt, Artificial Sequence
  Description of Artificial Sequence: Synthetic oligonucleotide
cuguacccaaagcagagau

SEQ ID NO: 325432 - RNA, 19 nt, Artificial Sequence
  Description of Artificial Sequence: Synthetic oligonucleotide
cugcauuagguucaggcuu

SEQ ID NO: 325433 - RNA, 19 nt, Artificial Sequence
  Description of Artificial Sequence: Synthetic oligonucleotide
caccccaccauagauccca

SEQ ID NO: 325434 - RNA, 19 nt, Artificial Sequence
  Description of Artificial Sequence: Synthetic oligonucleotide
gaacgucagccuguagguc

SEQ ID NO: 325435 - RNA, 19 nt, Artificial Sequence
  Description of Artificial Sequence: Synthetic oligonucleotide
cugucgacccaaucuugga

SEQ ID NO: 325436 - RNA, 19 nt, Artificial Sequence
  Description of Artificial Sequence: Synthetic oligonucleotide
acugauuggcccaguggaa

SEQ ID NO: 325437 - RNA, 19 nt, Artificial Sequence
  Description of Artificial Sequence: Synthetic oligonucleotide
cgggagacaaugucggccc

SEQ ID NO: 325438 - RNA, 19 nt, Artificial Sequence
  Description of Artificial Sequence: Synthetic oligonucleotide
gguagagagauagcacaga

SEQ ID NO: 325439 - RNA, 19 nt, Artificial Sequence
  Description of Artificial Sequence: Synthetic oligonucleotide
uugacucgaggggcaguca

SEQ ID NO: 325440 - RNA, 19 nt, Artificial Sequence
  Description of Artificial Sequence: Synthetic oligonucleotide
ccagcccugguuuuguauc

SEQ ID NO: 325441 - RNA, 19 nt, Artificial Sequence
  Description of Artificial Sequence: Synthetic oligonucleotide
ggauaguagguuggagcug

SEQ ID NO: 325442 - RNA, 19 nt, Artificial Sequence
  Description of Artificial Sequence: Synthetic oligonucleotide
aggagaccuuggaaauguc

SEQ ID NO: 325443 - RNA, 19 nt, Artificial Sequence
  Description of Artificial Sequence: Synthetic oligonucleotide
cuuggauggugagguccgc

SEQ ID NO: 325444 - RNA, 19 nt, Artificial Sequence
  Description of Artificial Sequence: Synthetic oligonucleotide
guggucuuugagcgauuca

SEQ ID NO: 325445 - RNA, 19 nt, Artificial Sequence
  Description of Artificial Sequence: Synthetic oligonucleotide
ucaccucuacuagucccuc

SEQ ID NO: 325446 - RNA, 19 nt, Artificial Sequence
  Description of Artificial Sequence: Synthetic oligonucleotide
gcgcacucccaauggagcc

SEQ ID NO: 325447 - RNA, 19 nt, Artificial Sequence
  Description of Artificial Sequence: Synthetic oligonucleotide
ggacuucuacugauuggcc

SEQ ID NO: 325448 - RNA, 19 nt, Artificial Sequence
  Description of Artificial Sequence: Synthetic oligonucleotide
gagaggccuaaagggccgc

SEQ ID NO: 325449 - RNA, 19 nt, Artificial Sequence
  Description of Artificial Sequence: Synthetic oligonucleotide
ucggccccauggucggugc

SEQ ID NO: 325450 - RNA, 19 nt, Artificial Sequence
  Description of Artificial Sequence: Synthetic oligonucleotide
ggggauucagucagugcug

SEQ ID NO: 325451 - RNA, 19 nt, Artificial Sequence
  Description of Artificial Sequence: Synthetic oligonucleotide
uccuaccccuccucccaac

SEQ ID NO: 325452 - RNA, 19 nt, Artificial Sequence
  Description of Artificial Sequence: Synthetic oligonucleotide
gcgucuguaauuggcuuug

SEQ ID NO: 325453 - RNA, 19 nt, Artificial Sequence
  Description of Artificial Sequence: Synthetic oligonucleotide
agcccgggaaagggagccc

SEQ ID NO: 325454 - RNA, 19 nt, Artificial Sequence
  Description of Artificial Sequence: Synthetic oligonucleotide
ggugcuugauauucucugu

SEQ ID NO: 325455 - RNA, 19 nt, Artificial Sequence
  Description of Artificial Sequence: Synthetic oligonucleotide
gucggugcgggcccuggca

SEQ ID NO: 325456 - RNA, 19 nt, Artificial Sequence
  Description of Artificial Sequence: Synthetic oligonucleotide
gcauuugcccggaacguca

SEQ ID NO: 325457 - RNA, 19 nt, Artificial Sequence
  Description of Artificial Sequence: Synthetic oligonucleotide
ugccaccgcccucagucuu

SEQ ID NO: 325458 - RNA, 19 nt, Artificial Sequence
  Description of Artificial Sequence: Synthetic oligonucleotide
ggccuaaagggccgcccag

SEQ ID NO: 325459 - RNA, 19 nt, Artificial Sequence
  Description of Artificial Sequence: Synthetic oligonucleotide
ucccaacagguggucucug

SEQ ID NO: 325460 - RNA, 19 nt, Artificial Sequence
  Description of Artificial Sequence: Synthetic oligonucleotide
uucuacugauuggcccagu

SEQ ID NO: 325461 - RNA, 19 nt, Artificial Sequence
  Description of Artificial Sequence: Synthetic oligonucleotide
acccaaucuuggagcgaac

SEQ ID NO: 325462 - RNA, 19 nt, Artificial Sequence
  Description of Artificial Sequence: Synthetic oligonucleotide
aggagcccuuagacacucc

SEQ ID NO: 325463 - RNA, 19 nt, Artificial Sequence
  Description of Artificial Sequence: Synthetic oligonucleotide
gcaaacuacaccaccaguu

SEQ ID NO: 325464 - RNA, 19 nt, Artificial Sequence
  Description of Artificial Sequence: Synthetic oligonucleotide
gguuuagcugagaugggcu

SEQ ID NO: 325465 - RNA, 19 nt, Artificial Sequence
  Description of Artificial Sequence: Synthetic oligonucleotide
cuacuagucccuccaaguu

SEQ ID NO: 325466 - RNA, 19 nt, Artificial Sequence
  Description of Artificial Sequence: Synthetic oligonucleotide
cccaacagguggucucugc

SEQ ID NO: 325467 - RNA, 19 nt, Artificial Sequence
  Description of Artificial Sequence: Synthetic oligonucleotide
guuuuagguccaggucuga

SEQ ID NO: 325468 - RNA, 19 nt, Artificial Sequence
  Description of Artificial Sequence: Synthetic oligonucleotide
ggaacccagcaccccacca

SEQ ID NO: 325469 - RNA, 19 nt, Artificial Sequence
  Description of Artificial Sequence: Synthetic oligonucleotide
gggccucuuaggcagaggu

SEQ ID NO: 325470 - RNA, 19 nt, Artificial Sequence
  Description of Artificial Sequence: Synthetic oligonucleotide
ggaaagugggauggccuca

SEQ ID NO: 325471 - RNA, 19 nt, Artificial Sequence
  Description of Artificial Sequence: Synthetic oligonucleotide
guggcccggggccccaagc

SEQ ID NO: 325472 - RNA, 19 nt, Artificial Sequence
  Description of Artificial Sequence: Synthetic oligonucleotide
ggugggauaguagguugga

SEQ ID NO: 325473 - RNA, 19 nt, Artificial Sequence
  Description of Artificial Sequence: Synthetic oligonucleotide
ggccaacauuaucaaggga

SEQ ID NO: 325474 - RNA, 19 nt, Artificial Sequence
  Description of Artificial Sequence: Synthetic oligonucleotide
cagacuuagcagucauccu

SEQ ID NO: 325475 - RNA, 19 nt, Artificial Sequence
  Description of Artificial Sequence: Synthetic oligonucleotide
gcacccaagagcuuacaau

SEQ ID NO: 325476 - RNA, 19 nt, Artificial Sequence
  Description of Artificial Sequence: Synthetic oligonucleotide
accccaccauagaucccac

SEQ ID NO: 325477 - RNA, 19 nt, Artificial Sequence
  Description of Artificial Sequence: Synthetic oligonucleotide
gcacucccaauggagccag

SEQ ID NO: 325478 - RNA, 19 nt, Artificial Sequence
  Description of Artificial Sequence: Synthetic oligonucleotide
ccgcuuuucaggaaucuua

SEQ ID NO: 325479 - RNA, 19 nt, Artificial Sequence
  Description of Artificial Sequence: Synthetic oligonucleotide
gcccgggaaagggagcccg

SEQ ID NO: 325480 - RNA, 19 nt, Artificial Sequence
  Description of Artificial Sequence: Synthetic oligonucleotide
gucggccccauggucggug

SEQ ID NO: 325481 - RNA, 19 nt, Artificial Sequence
  Description of Artificial Sequence: Synthetic oligonucleotide
cugcagguagguggccaac

SEQ ID NO: 325482 - RNA, 19 nt, Artificial Sequence
  Description of Artificial Sequence: Synthetic oligonucleotide
gccuaaagggccgcccagc

SEQ ID NO: 325483 - RNA, 19 nt, Artificial Sequence
  Description of Artificial Sequence: Synthetic oligonucleotide
ccuaaagggccgcccagca

SEQ ID NO: 325484 - RNA, 19 nt, Artificial Sequence
  Description of Artificial Sequence: Synthetic oligonucleotide
ggccucuuaggcagaggug

SEQ ID NO: 325485 - RNA, 19 nt, Artificial Sequence
  Description of Artificial Sequence: Synthetic oligonucleotide
ccaguagacuccuaccccu

SEQ ID NO: 325486 - RNA, 19 nt, Artificial Sequence
  Description of Artificial Sequence: Synthetic oligonucleotide
gcuuacaauucuaguagau

SEQ ID NO: 325487 - RNA, 19 nt, Artificial Sequence
  Description of Artificial Sequence: Synthetic oligonucleotide
ggagacaaugucggcccca

SEQ ID NO: 325488 - RNA, 19 nt, Artificial Sequence
  Description of Artificial Sequence: Synthetic oligonucleotide
gcagaggagcuagguuuag

SEQ ID NO: 325489 - RNA, 19 nt, Artificial Sequence
  Description of Artificial Sequence: Synthetic oligonucleotide
cuucaacccgcagcaaacu

SEQ ID NO: 325490 - RNA, 19 nt, Artificial Sequence
  Description of Artificial Sequence: Synthetic oligonucleotide
gggaugguuuuagguccag

SEQ ID NO: 325491 - RNA, 19 nt, Artificial Sequence
  Description of Artificial Sequence: Synthetic oligonucleotide
gagcuagguuuagcugaga

SEQ ID NO: 325492 - RNA, 19 nt, Artificial Sequence
  Description of Artificial Sequence: Synthetic oligonucleotide
uggccggcucuagcuguca

SEQ ID NO: 325493 - RNA, 19 nt, Artificial Sequence
  Description of Artificial Sequence: Synthetic oligonucleotide
ggccggcucuagcugucag

SEQ ID NO: 325494 - RNA, 19 nt, Artificial Sequence
  Description of Artificial Sequence: Synthetic oligonucleotide
gguccgcuuuucaggaauc

SEQ ID NO: 325495 - RNA, 19 nt, Artificial Sequence
  Description of Artificial Sequence: Synthetic oligonucleotide
gugcaguggugggauagua

SEQ ID NO: 325496 - RNA, 19 nt, Artificial Sequence
  Description of Artificial Sequence: Synthetic oligonucleotide
gccccauggucggugcggg

SEQ ID NO: 325497 - RNA, 19 nt, Artificial Sequence
  Description of Artificial Sequence: Synthetic oligonucleotide
gucucugcgcacucccaau

SEQ ID NO: 325498 - RNA, 19 nt, Artificial Sequence
  Description of Artificial Sequence: Synthetic oligonucleotide
ccuguaggucucaauuugu

SEQ ID NO: 325499 - RNA, 19 nt, Artificial Sequence
  Description of Artificial Sequence: Synthetic oligonucleotide
cacacuuggaggagaccuu

SEQ ID NO: 325500 - RNA, 19 nt, Artificial Sequence
  Description of Artificial Sequence: Synthetic oligonucleotide
ccgcagcaaacuacaccac

SEQ ID NO: 325501 - RNA, 19 nt, Artificial Sequence
  Description of Artificial Sequence: Synthetic oligonucleotide
guccgcuuuucaggaaucu

SEQ ID NO: 325502 - RNA, 19 nt, Artificial Sequence
  Description of Artificial Sequence: Synthetic oligonucleotide
cacggcgccuccugcaggu

SEQ ID NO: 325503 - RNA, 19 nt, Artificial Sequence
  Description of Artificial Sequence: Synthetic oligonucleotide
gccggcucuagcugucaga

SEQ ID NO: 325504 - RNA, 19 nt, Artificial Sequence
  Description of Artificial Sequence: Synthetic oligonucleotide
ggucggugcgggcccuggc

SEQ ID NO: 325505 - RNA, 19 nt, Artificial Sequence
  Description of Artificial Sequence: Synthetic oligonucleotide
ugucggccccauggucggu

SEQ ID NO: 325506 - RNA, 19 nt, Artificial Sequence
  Description of Artificial Sequence: Synthetic oligonucleotide
auggucggugcgggcccug

SEQ ID NO: 325507 - RNA, 19 nt, Artificial Sequence
  Description of Artificial Sequence: Synthetic oligonucleotide
gccccaguaggaguggugu

SEQ ID NO: 325508 - RNA, 19 nt, Artificial Sequence
  Description of Artificial Sequence: Synthetic oligonucleotide
cgucuguaauuggcuuugg

SEQ ID NO: 325509 - RNA, 19 nt, Artificial Sequence
  Description of Artificial Sequence: Synthetic oligonucleotide
ggauucagucagugcuggu

SEQ ID NO: 325510 - RNA, 19 nt, Artificial Sequence
  Description of Artificial Sequence: Synthetic oligonucleotide
gcauuagguucaggcuuuc

SEQ ID NO: 325511 - RNA, 19 nt, Artificial Sequence
  Description of Artificial Sequence: Synthetic oligonucleotide
cugcugccugagcaagcua

SEQ ID NO: 325512 - RNA, 19 nt, Artificial Sequence
  Description of Artificial Sequence: Synthetic oligonucleotide
ccgggaaagggagcccgug

SEQ ID NO: 325513 - RNA, 19 nt, Artificial Sequence
  Description of Artificial Sequence: Synthetic oligonucleotide
gguagguggccaacauuau

SEQ ID NO: 325514 - RNA, 19 nt, Artificial Sequence
  Description of Artificial Sequence: Synthetic oligonucleotide
cugccaccgcccucagucu

SEQ ID NO: 325515 - RNA, 19 nt, Artificial Sequence
  Description of Artificial Sequence: Synthetic oligonucleotide
caagugcaauaagaaucuu

SEQ ID NO: 325516 - RNA, 19 nt, Artificial Sequence
  Description of Artificial Sequence: Synthetic oligonucleotide
cuaccccuccucccaacuu

SEQ ID NO: 325517 - RNA, 19 nt, Artificial Sequence
  Description of Artificial Sequence: Synthetic oligonucleotide
gcgggcccuggcauuugcc

SEQ ID NO: 325518 - RNA, 19 nt, Artificial Sequence
  Description of Artificial Sequence: Synthetic oligonucleotide
gggcugauacaggcuugga

SEQ ID NO: 325519 - RNA, 19 nt, Artificial Sequence
  Description of Artificial Sequence: Synthetic oligonucleotide
cggcgccuccugcagguag

SEQ ID NO: 325520 - RNA, 19 nt, Artificial Sequence
  Description of Artificial Sequence: Synthetic oligonucleotide
ccccauggucggugcgggc

SEQ ID NO: 325521 - RNA, 19 nt, Artificial Sequence
  Description of Artificial Sequence: Synthetic oligonucleotide
gguuagguuccaggggauu

SEQ ID NO: 325522 - RNA, 19 nt, Artificial Sequence
  Description of Artificial Sequence: Synthetic oligonucleotide
ccggaacgucagccuguag

SEQ ID NO: 325523 - RNA, 19 nt, Artificial Sequence
  Description of Artificial Sequence: Synthetic oligonucleotide
ccucagucucacacauucu

SEQ ID NO: 325524 - RNA, 19 nt, Artificial Sequence
  Description of Artificial Sequence: Synthetic oligonucleotide
ggccgggaaggugcagaca

SEQ ID NO: 325525 - RNA, 19 nt, Artificial Sequence
  Description of Artificial Sequence: Synthetic oligonucleotide
gcgauucaagucagcuggu

SEQ ID NO: 325526 - RNA, 19 nt, Artificial Sequence
  Description of Artificial Sequence: Synthetic oligonucleotide
gccaucccacccacuccuc

SEQ ID NO: 325527 - RNA, 19 nt, Artificial Sequence
  Description of Artificial Sequence: Synthetic oligonucleotide
cauggucggugcgggcccu

SEQ ID NO: 325528 - RNA, 19 nt, Artificial Sequence
  Description of Artificial Sequence: Synthetic oligonucleotide
cccagacgugaggguuuag

SEQ ID NO: 325529 - RNA, 19 nt, Artificial Sequence
  Description of Artificial Sequence: Synthetic oligonucleotide
gcccggaacgucagccugu

SEQ ID NO: 325530 - RNA, 19 nt, Artificial Sequence
  Description of Artificial Sequence: Synthetic oligonucleotide
cgacccaaucuuggagcga

SEQ ID NO: 325531 - RNA, 19 nt, Artificial Sequence
  Description of Artificial Sequence: Synthetic oligonucleotide
cccggaacgucagccugua

SEQ ID NO: 325532 - RNA, 19 nt, Artificial Sequence
  Description of Artificial Sequence: Synthetic oligonucleotide
cccgggaaagggagcccgu

SEQ ID NO: 325533 - RNA, 19 nt, Artificial Sequence
  Description of Artificial Sequence: Synthetic oligonucleotide
ccccagacgugaggguuua

SEQ ID NO: 325534 - RNA, 19 nt, Artificial Sequence
  Description of Artificial Sequence: Synthetic oligonucleotide
auaauuguauuccugaucc

SEQ ID NO: 325535 - RNA, 19 nt, Artificial Sequence
  Description of Artificial Sequence: Synthetic oligonucleotide
aauuaacuauccuacaagc

SEQ ID NO: 325536 - RNA, 19 nt, Artificial Sequence
  Description of Artificial Sequence: Synthetic oligonucleotide
agaacuaucauuucgauag

SEQ ID NO: 325537 - RNA, 19 nt, Artificial Sequence
  Description of Artificial Sequence: Synthetic oligonucleotide
uguacuaacaacuuuagcc

SEQ ID NO: 325538 - RNA, 19 nt, Artificial Sequence
  Description of Artificial Sequence: Synthetic oligonucleotide
uuuauguauauauauauag

SEQ ID NO: 325539 - RNA, 19 nt, Artificial Sequence
  Description of Artificial Sequence: Synthetic oligonucleotide
aaaaccguuauuuguaaac

SEQ ID NO: 325540 - RNA, 19 nt, Artificial Sequence
  Description of Artificial Sequence: Synthetic oligonucleotide
aaauugaauuuauaauccc

SEQ ID NO: 325541 - RNA, 19 nt, Artificial Sequence
  Description of Artificial Sequence: Synthetic oligonucleotide
uuuaguguuaccauagcag

SEQ ID NO: 325542 - RNA, 19 nt, Artificial Sequence
  Description of Artificial Sequence: Synthetic oligonucleotide
ucuuauacaagcuaugucu

SEQ ID NO: 325543 - RNA, 19 nt, Artificial Sequence
  Description of Artificial Sequence: Synthetic oligonucleotide
uauaaguguacuaacaacu

SEQ ID NO: 325544 - RNA, 19 nt, Artificial Sequence
  Description of Artificial Sequence: Synthetic oligonucleotide
auugggaucacucccaagc

SEQ ID NO: 325545 - RNA, 19 nt, Artificial Sequence
  Description of Artificial Sequence: Synthetic oligonucleotide
uuuauaaucccuaugacuu

SEQ ID NO: 325546 - RNA, 19 nt, Artificial Sequence
  Description of Artificial Sequence: Synthetic oligonucleotide
aauccguggaaccacuucc

SEQ ID NO: 325547 - RNA, 19 nt, Artificial Sequence
  Description of Artificial Sequence: Synthetic oligonucleotide
caaauugaauuuauaaucc

SEQ ID NO: 325548 - RNA, 19 nt, Artificial Sequence
  Description of Artificial Sequence: Synthetic oligonucleotide
uguauauauauauaguuaa

SEQ ID NO: 325549 - RNA, 19 nt, Artificial Sequence
  Description of Artificial Sequence: Synthetic oligonucleotide
ugcuaaaugggcuuguugg

SEQ ID NO: 325550 - RNA, 19 nt, Artificial Sequence
  Description of Artificial Sequence: Synthetic oligonucleotide
cuaauaaguaaucacaaug

SEQ ID NO: 325551 - RNA, 19 nt, Artificial Sequence
  Description of Artificial Sequence: Synthetic oligonucleotide
uacuaaacuauauugauaa

SEQ ID NO: 325552 - RNA, 19 nt, Artificial Sequence
  Description of Artificial Sequence: Synthetic oligonucleotide
ugcucgaucaacauuuucg

SEQ ID NO: 325553 - RNA, 19 nt, Artificial Sequence
  Description of Artificial Sequence: Synthetic oligonucleotide
aacccagucggcuauuucc

SEQ ID NO: 325554 - RNA, 19 nt, Artificial Sequence
  Description of Artificial Sequence: Synthetic oligonucleotide
gaauuuauaaucccuauga

SEQ ID NO: 325555 - RNA, 19 nt, Artificial Sequence
  Description of Artificial Sequence: Synthetic oligonucleotide
cauaauaugccaucaaggc

SEQ ID NO: 325556 - RNA, 19 nt, Artificial Sequence
  Description of Artificial Sequence: Synthetic oligonucleotide
ucuauuuacuauugaauag

SEQ ID NO: 325557 - RNA, 19 nt, Artificial Sequence
  Description of Artificial Sequence: Synthetic oligonucleotide
ucaugaauuaugccaaggg

SEQ ID NO: 325558 - RNA, 19 nt, Artificial Sequence
  Description of Artificial Sequence: Synthetic oligonucleotide
uaauaugccaucaaggcaa

SEQ ID NO: 325559 - RNA, 19 nt, Artificial Sequence
  Description of Artificial Sequence: Synthetic oligonucleotide
uauccuacaagcaauuagc

SEQ ID NO: 325560 - RNA, 19 nt, Artificial Sequence
  Description of Artificial Sequence: Synthetic oligonucleotide
gucauaagaauucauuagg

SEQ ID NO: 325561 - RNA, 19 nt, Artificial Sequence
  Description of Artificial Sequence: Synthetic oligonucleotide
uuagcaaauacuaaacuau

SEQ ID NO: 325562 - RNA, 19 nt, Artificial Sequence
  Description of Artificial Sequence: Synthetic oligonucleotide
aaaugggaaaacccagucg

SEQ ID NO: 325563 - RNA, 19 nt, Artificial Sequence
  Description of Artificial Sequence: Synthetic oligonucleotide
uuaacuauccuacaagcaa

SEQ ID NO: 325564 - RNA, 19 nt, Artificial Sequence
  Description of Artificial Sequence: Synthetic oligonucleotide
uauauauauauaguuaaga

SEQ ID NO: 325565 - RNA, 19 nt, Artificial Sequence
  Description of Artificial Sequence: Synthetic oligonucleotide
auauaugucgauuccuugg

SEQ ID NO: 325566 - RNA, 19 nt, Artificial Sequence
  Description of Artificial Sequence: Synthetic oligonucleotide
uauguauauauauauaguu

SEQ ID NO: 325567 - RNA, 19 nt, Artificial Sequence
  Description of Artificial Sequence: Synthetic oligonucleotide
aagcaauuagcauuacauc

SEQ ID NO: 325568 - RNA, 19 nt, Artificial Sequence
  Description of Artificial Sequence: Synthetic oligonucleotide
uuaacaacucuuauacaag

SEQ ID NO: 325569 - RNA, 19 nt, Artificial Sequence
  Description of Artificial Sequence: Synthetic oligonucleotide
uuagaaacaguacacgcac

SEQ ID NO: 325570 - RNA, 19 nt, Artificial Sequence
  Description of Artificial Sequence: Synthetic oligonucleotide
agauauaguauuuauguau

SEQ ID NO: 325571 - RNA, 19 nt, Artificial Sequence
  Description of Artificial Sequence: Synthetic oligonucleotide
auuuauaaucccuaugacu

SEQ ID NO: 325572 - RNA, 19 nt, Artificial Sequence
  Description of Artificial Sequence: Synthetic oligonucleotide
uuauguauauauauauagu

SEQ ID NO: 325573 - RNA, 19 nt, Artificial Sequence
  Description of Artificial Sequence: Synthetic oligonucleotide
uagacaagagaccacuuag

SEQ ID NO: 325574 - RNA, 19 nt, Artificial Sequence
  Description of Artificial Sequence: Synthetic oligonucleotide
uuaguguuaccauagcagc

SEQ ID NO: 325575 - RNA, 19 nt, Artificial Sequence
  Description of Artificial Sequence: Synthetic oligonucleotide
acgaguuccauauagagau

SEQ ID NO: 325576 - RNA, 19 nt, Artificial Sequence
  Description of Artificial Sequence: Synthetic oligonucleotide
acuauauugauaauuuauc

SEQ ID NO: 325577 - RNA, 19 nt, Artificial Sequence
  Description of Artificial Sequence: Synthetic oligonucleotide
uccauauagagauauagua

SEQ ID NO: 325578 - RNA, 19 nt, Artificial Sequence
  Description of Artificial Sequence: Synthetic oligonucleotide
ucuacaagacggcagcuag

SEQ ID NO: 325579 - RNA, 19 nt, Artificial Sequence
  Description of Artificial Sequence: Synthetic oligonucleotide
accuaauauaugucgauuc

SEQ ID NO: 325580 - RNA, 19 nt, Artificial Sequence
  Description of Artificial Sequence: Synthetic oligonucleotide
uuauuaguugcaguguacg

SEQ ID NO: 325581 - RNA, 19 nt, Artificial Sequence
  Description of Artificial Sequence: Synthetic oligonucleotide
agauaguuugagcagaugu

SEQ ID NO: 325582 - RNA, 19 nt, Artificial Sequence
  Description of Artificial Sequence: Synthetic oligonucleotide
uuacgaguuccauauagag

SEQ ID NO: 325583 - RNA, 19 nt, Artificial Sequence
  Description of Artificial Sequence: Synthetic oligonucleotide
caagcuaugucucugaguc

SEQ ID NO: 325584 - RNA, 19 nt, Artificial Sequence
  Description of Artificial Sequence: Synthetic oligonucleotide
aucccuaugacuucccuac

SEQ ID NO: 325585 - RNA, 19 nt, Artificial Sequence
  Description of Artificial Sequence: Synthetic oligonucleotide
uguacgaugcaacaaaaua

SEQ ID NO: 325586 - RNA, 19 nt, Artificial Sequence
  Description of Artificial Sequence: Synthetic oligonucleotide
uauauaguuuccuguacgc

SEQ ID NO: 325587 - RNA, 19 nt, Artificial Sequence
  Description of Artificial Sequence: Synthetic oligonucleotide
uagccuaaucccaauaaag

SEQ ID NO: 325588 - RNA, 19 nt, Artificial Sequence
  Description of Artificial Sequence: Synthetic oligonucleotide
aagaguguaguaaaauuag

SEQ ID NO: 325589 - RNA, 19 nt, Artificial Sequence
  Description of Artificial Sequence: Synthetic oligonucleotide
aauuuaucauucuuaguuu

SEQ ID NO: 325590 - RNA, 19 nt, Artificial Sequence
  Description of Artificial Sequence: Synthetic oligonucleotide
ucccaauaaagccugauaa

SEQ ID NO: 325591 - RNA, 19 nt, Artificial Sequence
  Description of Artificial Sequence: Synthetic oligonucleotide
uauaugucgauuccuuggc

SEQ ID NO: 325592 - RNA, 19 nt, Artificial Sequence
  Description of Artificial Sequence: Synthetic oligonucleotide
aaaagcucuuuuguguugg

SEQ ID NO: 325593 - RNA, 19 nt, Artificial Sequence
  Description of Artificial Sequence: Synthetic oligonucleotide
auuuaucauucuuaguuug

SEQ ID NO: 325594 - RNA, 19 nt, Artificial Sequence
  Description of Artificial Sequence: Synthetic oligonucleotide
uagagauauaguauuuaug

SEQ ID NO: 325595 - RNA, 19 nt, Artificial Sequence
  Description of Artificial Sequence: Synthetic oligonucleotide
cuuuacgaguuccauauag

SEQ ID NO: 325596 - RNA, 19 nt, Artificial Sequence
  Description of Artificial Sequence: Synthetic oligonucleotide
ucauagguuacacagcaaa

SEQ ID NO: 325597 - RNA, 19 nt, Artificial Sequence
  Description of Artificial Sequence: Synthetic oligonucleotide
acaggugaaauguacaagu

SEQ ID NO: 325598 - RNA, 19 nt, Artificial Sequence
  Description of Artificial Sequence: Synthetic oligonucleotide
aucauuucgauaguuggac

SEQ ID NO: 325599 - RNA, 19 nt, Artificial Sequence
  Description of Artificial Sequence: Synthetic oligonucleotide
ugguaaagagucaaaggca

SEQ ID NO: 325600 - RNA, 19 nt, Artificial Sequence
  Description of Artificial Sequence: Synthetic oligonucleotide
uuaguugcaguguacgaug

SEQ ID NO: 325601 - RNA, 19 nt, Artificial Sequence
  Description of Artificial Sequence: Synthetic oligonucleotide
aaagcucacaucaguaccg

SEQ ID NO: 325602 - RNA, 19 nt, Artificial Sequence
  Description of Artificial Sequence: Synthetic oligonucleotide
caauuaacuauccuacaag

SEQ ID NO: 325603 - RNA, 19 nt, Artificial Sequence
  Description of Artificial Sequence: Synthetic oligonucleotide
acugacuacaaucucagau

SEQ ID NO: 325604 - RNA, 19 nt, Artificial Sequence
  Description of Artificial Sequence: Synthetic oligonucleotide
auaauaugccaucaaggca

SEQ ID NO: 325605 - RNA, 19 nt, Artificial Sequence
  Description of Artificial Sequence: Synthetic oligonucleotide
uagagauuagaauucaaua

SEQ ID NO: 325606 - RNA, 19 nt, Artificial Sequence
  Description of Artificial Sequence: Synthetic oligonucleotide
uaccauuauacccaugccu

SEQ ID NO: 325607 - RNA, 19 nt, Artificial Sequence
  Description of Artificial Sequence: Synthetic oligonucleotide
agugaucuaguaaacugcc

SEQ ID NO: 325608 - RNA, 19 nt, Artificial Sequence
  Description of Artificial Sequence: Synthetic oligonucleotide
uguuggacuaaagucagcc

SEQ ID NO: 325609 - RNA, 19 nt, Artificial Sequence
  Description of Artificial Sequence: Synthetic oligonucleotide
agaacuagaacuaucauuu

SEQ ID NO: 325610 - RNA, 19 nt, Artificial Sequence
  Description of Artificial Sequence: Synthetic oligonucleotide
ugaucuaguaaacugccau

SEQ ID NO: 325611 - RNA, 19 nt, Artificial Sequence
  Description of Artificial Sequence: Synthetic oligonucleotide
accguuauaauggaaauca

SEQ ID NO: 325612 - RNA, 19 nt, Artificial Sequence
  Description of Artificial Sequence: Synthetic oligonucleotide
aguuaagggcccuuuauca

SEQ ID NO: 325613 - RNA, 19 nt, Artificial Sequence
  Description of Artificial Sequence: Synthetic oligonucleotide
ugucucugagucuauaaga

SEQ ID NO: 325614 - RNA, 19 nt, Artificial Sequence
  Description of Artificial Sequence: Synthetic oligonucleotide
uuuagccuaaucccaauaa

SEQ ID NO: 325615 - RNA, 19 nt, Artificial Sequence
  Description of Artificial Sequence: Synthetic oligonucleotide
uaauagcuugaucagacua

SEQ ID NO: 325616 - RNA, 19 nt, Artificial Sequence
  Description of Artificial Sequence: Synthetic oligonucleotide
agccuaaucccaauaaagc

SEQ ID NO: 325617 - RNA, 19 nt, Artificial Sequence
  Description of Artificial Sequence: Synthetic oligonucleotide
aaacaguacacgcaccuaa

SEQ ID NO: 325618 - RNA, 19 nt, Artificial Sequence
  Description of Artificial Sequence: Synthetic oligonucleotide
cuauccuacaagcaauuag

SEQ ID NO: 325619 - RNA, 19 nt, Artificial Sequence
  Description of Artificial Sequence: Synthetic oligonucleotide
uauaguuuccuguacgcau

SEQ ID NO: 325620 - RNA, 19 nt, Artificial Sequence
  Description of Artificial Sequence: Synthetic oligonucleotide
aagucaauguagcaguuuu

SEQ ID NO: 325621 - RNA, 19 nt, Artificial Sequence
  Description of Artificial Sequence: Synthetic oligonucleotide
auuauacccaugccuuuac

SEQ ID NO: 325622 - RNA, 19 nt, Artificial Sequence
  Description of Artificial Sequence: Synthetic oligonucleotide
auagguuugaaaugaagua

SEQ ID NO: 325623 - RNA, 19 nt, Artificial Sequence
  Description of Artificial Sequence: Synthetic oligonucleotide
gauucuggaggugagcuag

SEQ ID NO: 325624 - RNA, 19 nt, Artificial Sequence
  Description of Artificial Sequence: Synthetic oligonucleotide
cuaaucccaauaaagccug

SEQ ID NO: 325625 - RNA, 19 nt, Artificial Sequence
  Description of Artificial Sequence: Synthetic oligonucleotide
uguggcuaggcuuugggac

SEQ ID NO: 325626 - RNA, 19 nt, Artificial Sequence
  Description of Artificial Sequence: Synthetic oligonucleotide
ugaauagacauaagauuuc

SEQ ID NO: 325627 - RNA, 19 nt, Artificial Sequence
  Description of Artificial Sequence: Synthetic oligonucleotide
aacuuuauacgaaauguaa

SEQ ID NO: 325628 - RNA, 19 nt, Artificial Sequence
  Description of Artificial Sequence: Synthetic oligonucleotide
uauacccaugccuuuacga

SEQ ID NO: 325629 - RNA, 19 nt, Artificial Sequence
  Description of Artificial Sequence: Synthetic oligonucleotide
auagagauauaguauuuau

SEQ ID NO: 325630 - RNA, 19 nt, Artificial Sequence
  Description of Artificial Sequence: Synthetic oligonucleotide
uaauagacaagagaccacu

SEQ ID NO: 325631 - RNA, 19 nt, Artificial Sequence
  Description of Artificial Sequence: Synthetic oligonucleotide
acgcaccuaauauaugucg

SEQ ID NO: 325632 - RNA, 19 nt, Artificial Sequence
  Description of Artificial Sequence: Synthetic oligonucleotide
agaaacaguacacgcaccu

SEQ ID NO: 325633 - RNA, 19 nt, Artificial Sequence
  Description of Artificial Sequence: Synthetic oligonucleotide
ucccaaauuguaaccagug

SEQ ID NO: 325634 - RNA, 19 nt, Artificial Sequence
  Description of Artificial Sequence: Synthetic oligonucleotide
cagugaucuaguaaacugc

SEQ ID NO: 325635 - RNA, 19 nt, Artificial Sequence
  Description of Artificial Sequence: Synthetic oligonucleotide
gauuggaagagagccaugc

SEQ ID NO: 325636 - RNA, 19 nt, Artificial Sequence
  Description of Artificial Sequence: Synthetic oligonucleotide
augaauuaugccaagggca

SEQ ID NO: 325637 - RNA, 19 nt, Artificial Sequence
  Description of Artificial Sequence: Synthetic oligonucleotide
uuuggauugccugaguaac

SEQ ID NO: 325638 - RNA, 19 nt, Artificial Sequence
  Description of Artificial Sequence: Synthetic oligonucleotide
ccaucuuaaguuaagggcc

SEQ ID NO: 325639 - RNA, 19 nt, Artificial Sequence
  Description of Artificial Sequence: Synthetic oligonucleotide
guacgaugcaacaaaauac

SEQ ID NO: 325640 - RNA, 19 nt, Artificial Sequence
  Description of Artificial Sequence: Synthetic oligonucleotide
agaguguaguaaaauuagc

SEQ ID NO: 325641 - RNA, 19 nt, Artificial Sequence
  Description of Artificial Sequence: Synthetic oligonucleotide
uguuugugauuggaaauag

SEQ ID NO: 325642 - RNA, 19 nt, Artificial Sequence
  Description of Artificial Sequence: Synthetic oligonucleotide
uaacuauccuacaagcaau

SEQ ID NO: 325643 - RNA, 19 nt, Artificial Sequence
  Description of Artificial Sequence: Synthetic oligonucleotide
uuauacccaugccuuuacg

SEQ ID NO: 325644 - RNA, 19 nt, Artificial Sequence
  Description of Artificial Sequence: Synthetic oligonucleotide
guauauauauauaguuaag

SEQ ID NO: 325645 - RNA, 19 nt, Artificial Sequence
  Description of Artificial Sequence: Synthetic oligonucleotide
caucuuaaguuaagggccc

SEQ ID NO: 325646 - RNA, 19 nt, Artificial Sequence
  Description of Artificial Sequence: Synthetic oligonucleotide
uuagccuaaucccaauaaa

SEQ ID NO: 325647 - RNA, 19 nt, Artificial Sequence
  Description of Artificial Sequence: Synthetic oligonucleotide
uauuaguugcaguguacga

SEQ ID NO: 325648 - RNA, 19 nt, Artificial Sequence
  Description of Artificial Sequence: Synthetic oligonucleotide
uacaagacggcagcuagag

SEQ ID NO: 325649 - RNA, 19 nt, Artificial Sequence
  Description of Artificial Sequence: Synthetic oligonucleotide
uaaguuaagggcccuuuau

SEQ ID NO: 325650 - RNA, 19 nt, Artificial Sequence
  Description of Artificial Sequence: Synthetic oligonucleotide
aagacaaauauggauugaa

SEQ ID NO: 325651 - RNA, 19 nt, Artificial Sequence
  Description of Artificial Sequence: Synthetic oligonucleotide
cuuauuaguugcaguguac

SEQ ID NO: 325652 - RNA, 19 nt, Artificial Sequence
  Description of Artificial Sequence: Synthetic oligonucleotide
aauauaggugcaucccaaa

SEQ ID NO: 325653 - RNA, 19 nt, Artificial Sequence
  Description of Artificial Sequence: Synthetic oligonucleotide
agacaaauauggauugaac

SEQ ID NO: 325654 - RNA, 19 nt, Artificial Sequence
  Description of Artificial Sequence: Synthetic oligonucleotide
aggugaaauguacaagugu

SEQ ID NO: 325655 - RNA, 19 nt, Artificial Sequence
  Description of Artificial Sequence: Synthetic oligonucleotide
ccuauuauuacuaauaagu

SEQ ID NO: 325656 - RNA, 19 nt, Artificial Sequence
  Description of Artificial Sequence: Synthetic oligonucleotide
aaagcucuuuuguguuggg

SEQ ID NO: 325657 - RNA, 19 nt, Artificial Sequence
  Description of Artificial Sequence: Synthetic oligonucleotide
ugucacuucaaagcggagc

SEQ ID NO: 325658 - RNA, 19 nt, Artificial Sequence
  Description of Artificial Sequence: Synthetic oligonucleotide
agagugaauuuggauugcc

SEQ ID NO: 325659 - RNA, 19 nt, Artificial Sequence
  Description of Artificial Sequence: Synthetic oligonucleotide
uuucgauaguuggacauca

SEQ ID NO: 325660 - RNA, 19 nt, Artificial Sequence
  Description of Artificial Sequence: Synthetic oligonucleotide
uacaagcuaugucucugag

SEQ ID NO: 325661 - RNA, 19 nt, Artificial Sequence
  Description of Artificial Sequence: Synthetic oligonucleotide
gauaguuggacaucauucu

SEQ ID NO: 325662 - RNA, 19 nt, Artificial Sequence
  Description of Artificial Sequence: Synthetic oligonucleotide
guacuaacaacuuuagccu

SEQ ID NO: 325663 - RNA, 19 nt, Artificial Sequence
  Description of Artificial Sequence: Synthetic oligonucleotide
uguacgcauggcgauaugc

SEQ ID NO: 325664 - RNA, 19 nt, Artificial Sequence
  Description of Artificial Sequence: Synthetic oligonucleotide
auacauaacaaaagagugu

SEQ ID NO: 325665 - RNA, 19 nt, Artificial Sequence
  Description of Artificial Sequence: Synthetic oligonucleotide
uugggaucacucccaagcc

SEQ ID NO: 325666 - RNA, 19 nt, Artificial Sequence
  Description of Artificial Sequence: Synthetic oligonucleotide
gaauagacauaagauuuca

SEQ ID NO: 325667 - RNA, 19 nt, Artificial Sequence
  Description of Artificial Sequence: Synthetic oligonucleotide
gaucuaguaaacugccauc

SEQ ID NO: 325668 - RNA, 19 nt, Artificial Sequence
  Description of Artificial Sequence: Synthetic oligonucleotide
uauagagauauaguauuua

SEQ ID NO: 325669 - RNA, 19 nt, Artificial Sequence
  Description of Artificial Sequence: Synthetic oligonucleotide
aucuaguaaacugccauca

SEQ ID NO: 325670 - RNA, 19 nt, Artificial Sequence
  Description of Artificial Sequence: Synthetic oligonucleotide
ugucuggcaaacuggacau

SEQ ID NO: 325671 - RNA, 19 nt, Artificial Sequence
  Description of Artificial Sequence: Synthetic oligonucleotide
uaaacugauuggagguugu

SEQ ID NO: 325672 - RNA, 19 nt, Artificial Sequence
  Description of Artificial Sequence: Synthetic oligonucleotide
caagcaauuagcauuacau

SEQ ID NO: 325673 - RNA, 19 nt, Artificial Sequence
  Description of Artificial Sequence: Synthetic oligonucleotide
auauauaguuaagagugaa

SEQ ID NO: 325674 - RNA, 19 nt, Artificial Sequence
  Description of Artificial Sequence: Synthetic oligonucleotide
gccuaaucccaauaaagcc

SEQ ID NO: 325675 - RNA, 19 nt, Artificial Sequence
  Description of Artificial Sequence: Synthetic oligonucleotide
guaaacugauuggagguug

SEQ ID NO: 325676 - RNA, 19 nt, Artificial Sequence
  Description of Artificial Sequence: Synthetic oligonucleotide
uaguugcaguguacgaugc

SEQ ID NO: 325677 - RNA, 19 nt, Artificial Sequence
  Description of Artificial Sequence: Synthetic oligonucleotide
uaagggcccuuuaucauaa

SEQ ID NO: 325678 - RNA, 19 nt, Artificial Sequence
  Description of Artificial Sequence: Synthetic oligonucleotide
uuaagggcccuuuaucaua

SEQ ID NO: 325679 - RNA, 19 nt, Artificial Sequence
  Description of Artificial Sequence: Synthetic oligonucleotide
auuaguugcaguguacgau

SEQ ID NO: 325680 - RNA, 19 nt, Artificial Sequence
  Description of Artificial Sequence: Synthetic oligonucleotide
uuaaguuaagggcccuuua

SEQ ID NO: 325681 - RNA, 19 nt, Artificial Sequence
  Description of Artificial Sequence: Synthetic oligonucleotide
auguauauauauauaguua

SEQ ID NO: 325682 - RNA, 19 nt, Artificial Sequence
  Description of Artificial Sequence: Synthetic oligonucleotide
cauuuugcucauagguuac

SEQ ID NO: 325683 - RNA, 19 nt, Artificial Sequence
  Description of Artificial Sequence: Synthetic oligonucleotide
ucaguaccguuauaaugga

SEQ ID NO: 325684 - RNA, 19 nt, Artificial Sequence
  Description of Artificial Sequence: Synthetic oligonucleotide
auauaauaucagugcuuug

SEQ ID NO: 325685 - RNA, 19 nt, Artificial Sequence
  Description of Artificial Sequence: Synthetic oligonucleotide
cucuuauacaagcuauguc

SEQ ID NO: 325686 - RNA, 19 nt, Artificial Sequence
  Description of Artificial Sequence: Synthetic oligonucleotide
aaacugauuggagguuguc

SEQ ID NO: 325687 - RNA, 19 nt, Artificial Sequence
  Description of Artificial Sequence: Synthetic oligonucleotide
caucuguaaugccaggcac

SEQ ID NO: 325688 - RNA, 19 nt, Artificial Sequence
  Description of Artificial Sequence: Synthetic oligonucleotide
caucccugucacuucaaag

SEQ ID NO: 325689 - RNA, 19 nt, Artificial Sequence
  Description of Artificial Sequence: Synthetic oligonucleotide
uaugucgauuccuuggcuu

SEQ ID NO: 325690 - RNA, 19 nt, Artificial Sequence
  Description of Artificial Sequence: Synthetic oligonucleotide
uagaacuaucauuucgaua

SEQ ID NO: 325691 - RNA, 19 nt, Artificial Sequence
  Description of Artificial Sequence: Synthetic oligonucleotide
guaaagagucaaaggcagg

SEQ ID NO: 325692 - RNA, 19 nt, Artificial Sequence
  Description of Artificial Sequence: Synthetic oligonucleotide
ucgauaguuggacaucauu

SEQ ID NO: 325693 - RNA, 19 nt, Artificial Sequence
  Description of Artificial Sequence: Synthetic oligonucleotide
cuaaaugggcuuguuggac

SEQ ID NO: 325694 - RNA, 19 nt, Artificial Sequence
  Description of Artificial Sequence: Synthetic oligonucleotide
ggcgagaugaaagucaaug

SEQ ID NO: 325695 - RNA, 19 nt, Artificial Sequence
  Description of Artificial Sequence: Synthetic oligonucleotide
auuuauguauauauauaua

SEQ ID NO: 325696 - RNA, 19 nt, Artificial Sequence
  Description of Artificial Sequence: Synthetic oligonucleotide
uacuaacaacuuuagccua

SEQ ID NO: 325697 - RNA, 19 nt, Artificial Sequence
  Description of Artificial Sequence: Synthetic oligonucleotide
auacaagcuaugucucuga

SEQ ID NO: 325698 - RNA, 19 nt, Artificial Sequence
  Description of Artificial Sequence: Synthetic oligonucleotide
guaccauuauacccaugcc

SEQ ID NO: 325699 - RNA, 19 nt, Artificial Sequence
  Description of Artificial Sequence: Synthetic oligonucleotide
gagaacuagaacuaucauu

SEQ ID NO: 325700 - RNA, 19 nt, Artificial Sequence
  Description of Artificial Sequence: Synthetic oligonucleotide
auaguuggacaucauucuu

SEQ ID NO: 325701 - RNA, 19 nt, Artificial Sequence
  Description of Artificial Sequence: Synthetic oligonucleotide
auacgaaauguaacucuuc

SEQ ID NO: 325702 - RNA, 19 nt, Artificial Sequence
  Description of Artificial Sequence: Synthetic oligonucleotide
auauaguuuccuguacgca

SEQ ID NO: 325703 - RNA, 19 nt, Artificial Sequence
  Description of Artificial Sequence: Synthetic oligonucleotide
ugggcuuguuggacuaaag

SEQ ID NO: 325704 - RNA, 19 nt, Artificial Sequence
  Description of Artificial Sequence: Synthetic oligonucleotide
guggcuaggcuuugggacc

SEQ ID NO: 325705 - RNA, 19 nt, Artificial Sequence
  Description of Artificial Sequence: Synthetic oligonucleotide
uucccgugcucgaucaaca

SEQ ID NO: 325706 - RNA, 19 nt, Artificial Sequence
  Description of Artificial Sequence: Synthetic oligonucleotide
gguuacacagcaaaguaga

SEQ ID NO: 325707 - RNA, 19 nt, Artificial Sequence
  Description of Artificial Sequence: Synthetic oligonucleotide
cuacaagcaauuagcauua

SEQ ID NO: 325708 - RNA, 19 nt, Artificial Sequence
  Description of Artificial Sequence: Synthetic oligonucleotide
gaauccguggaaccacuuc

SEQ ID NO: 325709 - RNA, 19 nt, Artificial Sequence
  Description of Artificial Sequence: Synthetic oligonucleotide
auaugucgauuccuuggcu

SEQ ID NO: 325710 - RNA, 19 nt, Artificial Sequence
  Description of Artificial Sequence: Synthetic oligonucleotide
agcuagagguggaaccacc

SEQ ID NO: 325711 - RNA, 19 nt, Artificial Sequence
  Description of Artificial Sequence: Synthetic oligonucleotide
ugggaaaacccagucggcu

SEQ ID NO: 325712 - RNA, 19 nt, Artificial Sequence
  Description of Artificial Sequence: Synthetic oligonucleotide
ucucugagucuauaagaua

SEQ ID NO: 325713 - RNA, 19 nt, Artificial Sequence
  Description of Artificial Sequence: Synthetic oligonucleotide
uuauuaucucccuccccau

SEQ ID NO: 325714 - RNA, 19 nt, Artificial Sequence
  Description of Artificial Sequence: Synthetic oligonucleotide
augggaaaacccagucggc

SEQ ID NO: 325715 - RNA, 19 nt, Artificial Sequence
  Description of Artificial Sequence: Synthetic oligonucleotide
augguaguguaucuccaaa

SEQ ID NO: 325716 - RNA, 19 nt, Artificial Sequence
  Description of Artificial Sequence: Synthetic oligonucleotide
guaaacugccaucagcccu

SEQ ID NO: 325717 - RNA, 19 nt, Artificial Sequence
  Description of Artificial Sequence: Synthetic oligonucleotide
cacaucaguaccguuauaa

SEQ ID NO: 325718 - RNA, 19 nt, Artificial Sequence
  Description of Artificial Sequence: Synthetic oligonucleotide
uuguuggacuaaagucagc

SEQ ID NO: 325719 - RNA, 19 nt, Artificial Sequence
  Description of Artificial Sequence: Synthetic oligonucleotide
cuagagauuagaauucaau

SEQ ID NO: 325720 - RNA, 19 nt, Artificial Sequence
  Description of Artificial Sequence: Synthetic oligonucleotide
auaaguguacuaacaacuu

SEQ ID NO: 325721 - RNA, 19 nt, Artificial Sequence
  Description of Artificial Sequence: Synthetic oligonucleotide
caauauaggugcaucccaa

SEQ ID NO: 325722 - RNA, 19 nt, Artificial Sequence
  Description of Artificial Sequence: Synthetic oligonucleotide
acccacugacuacaaucuc

SEQ ID NO: 325723 - RNA, 19 nt, Artificial Sequence
  Description of Artificial Sequence: Synthetic oligonucleotide
caggagagucuacugcaag

SEQ ID NO: 325724 - RNA, 19 nt, Artificial Sequence
  Description of Artificial Sequence: Synthetic oligonucleotide
gaacuagggcagcaauaac

SEQ ID NO: 325725 - RNA, 19 nt, Artificial Sequence
  Description of Artificial Sequence: Synthetic oligonucleotide
uaggaauccguggaaccac

SEQ ID NO: 325726 - RNA, 19 nt, Artificial Sequence
  Description of Artificial Sequence: Synthetic oligonucleotide
uaccguuauaauggaaauc

SEQ ID NO: 325727 - RNA, 19 nt, Artificial Sequence
  Description of Artificial Sequence: Synthetic oligonucleotide
cccuauuauuacuaauaag

SEQ ID NO: 325728 - RNA, 19 nt, Artificial Sequence
  Description of Artificial Sequence: Synthetic oligonucleotide
guuggacuaaagucagcca

SEQ ID NO: 325729 - RNA, 19 nt, Artificial Sequence
  Description of Artificial Sequence: Synthetic oligonucleotide
auggaacuagggcagcaau

SEQ ID NO: 325730 - RNA, 19 nt, Artificial Sequence
  Description of Artificial Sequence: Synthetic oligonucleotide
agcuagagauuagaauuca

SEQ ID NO: 325731 - RNA, 19 nt, Artificial Sequence
  Description of Artificial Sequence: Synthetic oligonucleotide
auagcuugaucagacuaau

SEQ ID NO: 325732 - RNA, 19 nt, Artificial Sequence
  Description of Artificial Sequence: Synthetic oligonucleotide
cugggcgagaugaaaguca

SEQ ID NO: 325733 - RNA, 19 nt, Artificial Sequence
  Description of Artificial Sequence: Synthetic oligonucleotide
aagcucuuuuguguuggga

SEQ ID NO: 325734 - RNA, 19 nt, Artificial Sequence
  Description of Artificial Sequence: Synthetic oligonucleotide
uaaucccaauaaagccuga

SEQ ID NO: 325735 - RNA, 19 nt, Artificial Sequence
  Description of Artificial Sequence: Synthetic oligonucleotide
aacuauccuacaagcaauu

SEQ ID NO: 325736 - RNA, 19 nt, Artificial Sequence
  Description of Artificial Sequence: Synthetic oligonucleotide
aacaguacacgcaccuaau

SEQ ID NO: 325737 - RNA, 19 nt, Artificial Sequence
  Description of Artificial Sequence: Synthetic oligonucleotide
gacuucccuacauauacau

SEQ ID NO: 325738 - RNA, 19 nt, Artificial Sequence
  Description of Artificial Sequence: Synthetic oligonucleotide
acuuuagccuaaucccaau

SEQ ID NO: 325739 - RNA, 19 nt, Artificial Sequence
  Description of Artificial Sequence: Synthetic oligonucleotide
augucgauuccuuggcuua

SEQ ID NO: 325740 - RNA, 19 nt, Artificial Sequence
  Description of Artificial Sequence: Synthetic oligonucleotide
accguuauuuguaaacuuu

SEQ ID NO: 325741 - RNA, 19 nt, Artificial Sequence
  Description of Artificial Sequence: Synthetic oligonucleotide
caaguguguuuuaaagaaa

SEQ ID NO: 325742 - RNA, 19 nt, Artificial Sequence
  Description of Artificial Sequence: Synthetic oligonucleotide
caguguacgaugcaacaaa

SEQ ID NO: 325743 - RNA, 19 nt, Artificial Sequence
  Description of Artificial Sequence: Synthetic oligonucleotide
cccaauaaagccugauaac

SEQ ID NO: 325744 - RNA, 19 nt, Artificial Sequence
  Description of Artificial Sequence: Synthetic oligonucleotide
uaucuacaagacggcagcu

SEQ ID NO: 325745 - RNA, 19 nt, Artificial Sequence
  Description of Artificial Sequence: Synthetic oligonucleotide
acaguacacgcaccuaaua

SEQ ID NO: 325746 - RNA, 19 nt, Artificial Sequence
  Description of Artificial Sequence: Synthetic oligonucleotide
aguaaacugauuggagguu

SEQ ID NO: 325747 - RNA, 19 nt, Artificial Sequence
  Description of Artificial Sequence: Synthetic oligonucleotide
cuuugggacccacugacua

SEQ ID NO: 325748 - RNA, 19 nt, Artificial Sequence
  Description of Artificial Sequence: Synthetic oligonucleotide
caugccuuuacgaguucca

SEQ ID NO: 325749 - RNA, 19 nt, Artificial Sequence
  Description of Artificial Sequence: Synthetic oligonucleotide
cauugggaucacucccaag

SEQ ID NO: 325750 - RNA, 19 nt, Artificial Sequence
  Description of Artificial Sequence: Synthetic oligonucleotide
cacggcuaggaggaacugg

SEQ ID NO: 325751 - RNA, 19 nt, Artificial Sequence
  Description of Artificial Sequence: Synthetic oligonucleotide
auguucgcauucucaaauu

SEQ ID NO: 325752 - RNA, 19 nt, Artificial Sequence
  Description of Artificial Sequence: Synthetic oligonucleotide
uucgauaguuggacaucau

SEQ ID NO: 325753 - RNA, 19 nt, Artificial Sequence
  Description of Artificial Sequence: Synthetic oligonucleotide
uacuugcaauccugcagaa

SEQ ID NO: 325754 - RNA, 19 nt, Artificial Sequence
  Description of Artificial Sequence: Synthetic oligonucleotide
uuaugccaagggcauuauu

SEQ ID NO: 325755 - RNA, 19 nt, Artificial Sequence
  Description of Artificial Sequence: Synthetic oligonucleotide
aguguacgaugcaacaaaa

SEQ ID NO: 325756 - RNA, 19 nt, Artificial Sequence
  Description of Artificial Sequence: Synthetic oligonucleotide
ucaaagcggagcgggcggc

SEQ ID NO: 325757 - RNA, 19 nt, Artificial Sequence
  Description of Artificial Sequence: Synthetic oligonucleotide
gcuaaaugggcuuguugga

SEQ ID NO: 325758 - RNA, 19 nt, Artificial Sequence
  Description of Artificial Sequence: Synthetic oligonucleotide
guacgcauggcgauaugca

SEQ ID NO: 325759 - RNA, 19 nt, Artificial Sequence
  Description of Artificial Sequence: Synthetic oligonucleotide
acggcagcuagagauuaga

SEQ ID NO: 325760 - RNA, 19 nt, Artificial Sequence
  Description of Artificial Sequence: Synthetic oligonucleotide
acaagacggcagcuagaga

SEQ ID NO: 325761 - RNA, 19 nt, Artificial Sequence
  Description of Artificial Sequence: Synthetic oligonucleotide
aucagcccuauuauuacua

SEQ ID NO: 325762 - RNA, 19 nt, Artificial Sequence
  Description of Artificial Sequence: Synthetic oligonucleotide
gcuuauuaguugcagugua

SEQ ID NO: 325763 - RNA, 19 nt, Artificial Sequence
  Description of Artificial Sequence: Synthetic oligonucleotide
guaaugccaggcacccucc

SEQ ID NO: 325764 - RNA, 19 nt, Artificial Sequence
  Description of Artificial Sequence: Synthetic oligonucleotide
cuacaaucucagauguaua

SEQ ID NO: 325765 - RNA, 19 nt, Artificial Sequence
  Description of Artificial Sequence: Synthetic oligonucleotide
gcccuauuauuacuaauaa

SEQ ID NO: 325766 - RNA, 19 nt, Artificial Sequence
  Description of Artificial Sequence: Synthetic oligonucleotide
aagacggcagcuagagauu

SEQ ID NO: 325767 - RNA, 19 nt, Artificial Sequence
  Description of Artificial Sequence: Synthetic oligonucleotide
cuacaagacggcagcuaga

SEQ ID NO: 325768 - RNA, 19 nt, Artificial Sequence
  Description of Artificial Sequence: Synthetic oligonucleotide
gccuuuacgaguuccauau

SEQ ID NO: 325769 - RNA, 19 nt, Artificial Sequence
  Description of Artificial Sequence: Synthetic oligonucleotide
agugguuaacugguucaaa

SEQ ID NO: 325770 - RNA, 19 nt, Artificial Sequence
  Description of Artificial Sequence: Synthetic oligonucleotide
guacacgcaccuaauauau

SEQ ID NO: 325771 - RNA, 19 nt, Artificial Sequence
  Description of Artificial Sequence: Synthetic oligonucleotide
gcaauccugcagaauuagg

SEQ ID NO: 325772 - RNA, 19 nt, Artificial Sequence
  Description of Artificial Sequence: Synthetic oligonucleotide
gaaacaguacacgcaccua

SEQ ID NO: 325773 - RNA, 19 nt, Artificial Sequence
  Description of Artificial Sequence: Synthetic oligonucleotide
cagauaguuugagcagaug

SEQ ID NO: 325774 - RNA, 19 nt, Artificial Sequence
  Description of Artificial Sequence: Synthetic oligonucleotide
gacggcagcuagagauuag

SEQ ID NO: 325775 - RNA, 19 nt, Artificial Sequence
  Description of Artificial Sequence: Synthetic oligonucleotide
ugucgauuccuuggcuuau

SEQ ID NO: 325776 - RNA, 19 nt, Artificial Sequence
  Description of Artificial Sequence: Synthetic oligonucleotide
ugugcuaaaugggcuuguu

SEQ ID NO: 325777 - RNA, 19 nt, Artificial Sequence
  Description of Artificial Sequence: Synthetic oligonucleotide
caguacacgcaccuaauau

SEQ ID NO: 325778 - RNA, 19 nt, Artificial Sequence
  Description of Artificial Sequence: Synthetic oligonucleotide
aucuacaagacggcagcua

SEQ ID NO: 325779 - RNA, 19 nt, Artificial Sequence
  Description of Artificial Sequence: Synthetic oligonucleotide
cauuauacccaugccuuua

SEQ ID NO: 325780 - RNA, 19 nt, Artificial Sequence
  Description of Artificial Sequence: Synthetic oligonucleotide
gugaucuaguaaacugcca

SEQ ID NO: 325781 - RNA, 19 nt, Artificial Sequence
  Description of Artificial Sequence: Synthetic oligonucleotide
ccauauagagauauaguau

SEQ ID NO: 325782 - RNA, 19 nt, Artificial Sequence
  Description of Artificial Sequence: Synthetic oligonucleotide
acccagucggcuauuucca

SEQ ID NO: 325783 - RNA, 19 nt, Artificial Sequence
  Description of Artificial Sequence: Synthetic oligonucleotide
ccguggaaccacuuccuag

SEQ ID NO: 325784 - RNA, 19 nt, Artificial Sequence
  Description of Artificial Sequence: Synthetic oligonucleotide
ucacaucaguaccguuaua

SEQ ID NO: 325785 - RNA, 19 nt, Artificial Sequence
  Description of Artificial Sequence: Synthetic oligonucleotide
auuaugccaagggcauuau

SEQ ID NO: 325786 - RNA, 19 nt, Artificial Sequence
  Description of Artificial Sequence: Synthetic oligonucleotide
agagaccacuuagguuuag

SEQ ID NO: 325787 - RNA, 19 nt, Artificial Sequence
  Description of Artificial Sequence: Synthetic oligonucleotide
acuugcaauccugcagaau

SEQ ID NO: 325788 - RNA, 19 nt, Artificial Sequence
  Description of Artificial Sequence: Synthetic oligonucleotide
acccaugccuuuacgaguu

SEQ ID NO: 325789 - RNA, 19 nt, Artificial Sequence
  Description of Artificial Sequence: Synthetic oligonucleotide
aggaauccguggaaccacu

SEQ ID NO: 325790 - RNA, 19 nt, Artificial Sequence
  Description of Artificial Sequence: Synthetic oligonucleotide
agacggcagcuagagauua

SEQ ID NO: 325791 - RNA, 19 nt, Artificial Sequence
  Description of Artificial Sequence: Synthetic oligonucleotide
guuaccauagcagccuuuu

SEQ ID NO: 325792 - RNA, 19 nt, Artificial Sequence
  Description of Artificial Sequence: Synthetic oligonucleotide
ggcgauaugcauuucuauu

SEQ ID NO: 325793 - RNA, 19 nt, Artificial Sequence
  Description of Artificial Sequence: Synthetic oligonucleotide
aagggcccuuuaucauaaa

SEQ ID NO: 325794 - RNA, 19 nt, Artificial Sequence
  Description of Artificial Sequence: Synthetic oligonucleotide
ggcagcuagagauuagaau

SEQ ID NO: 325795 - RNA, 19 nt, Artificial Sequence
  Description of Artificial Sequence: Synthetic oligonucleotide
cacagaugguaguguaucu

SEQ ID NO: 325796 - RNA, 19 nt, Artificial Sequence
  Description of Artificial Sequence: Synthetic oligonucleotide
uccuguacgcauggcgaua

SEQ ID NO: 325797 - RNA, 19 nt, Artificial Sequence
  Description of Artificial Sequence: Synthetic oligonucleotide
acgcauggcgauaugcauu

SEQ ID NO: 325798 - RNA, 19 nt, Artificial Sequence
  Description of Artificial Sequence: Synthetic oligonucleotide
cguggaaccacuuccuaga

SEQ ID NO: 325799 - RNA, 19 nt, Artificial Sequence
  Description of Artificial Sequence: Synthetic oligonucleotide
gggaaaacccagucggcua

SEQ ID NO: 325800 - RNA, 19 nt, Artificial Sequence
  Description of Artificial Sequence: Synthetic oligonucleotide
cucugggcgagaugaaagu

SEQ ID NO: 325801 - RNA, 19 nt, Artificial Sequence
  Description of Artificial Sequence: Synthetic oligonucleotide
caucagcccuauuauuacu

SEQ ID NO: 325802 - RNA, 19 nt, Artificial Sequence
  Description of Artificial Sequence: Synthetic oligonucleotide
gcaauuagcauuacaucau

SEQ ID NO: 325803 - RNA, 19 nt, Artificial Sequence
  Description of Artificial Sequence: Synthetic oligonucleotide
ccguuauuuguaaacuuua

SEQ ID NO: 325804 - RNA, 19 nt, Artificial Sequence
  Description of Artificial Sequence: Synthetic oligonucleotide
agcucacaucaguaccguu

SEQ ID NO: 325805 - RNA, 19 nt, Artificial Sequence
  Description of Artificial Sequence: Synthetic oligonucleotide
cagucggcuauuuccacau

SEQ ID NO: 325806 - RNA, 19 nt, Artificial Sequence
  Description of Artificial Sequence: Synthetic oligonucleotide
gagaccacuuagguuuagu

SEQ ID NO: 325807 - RNA, 19 nt, Artificial Sequence
  Description of Artificial Sequence: Synthetic oligonucleotide
cuguacgcauggcgauaug

SEQ ID NO: 325808 - RNA, 19 nt, Artificial Sequence
  Description of Artificial Sequence: Synthetic oligonucleotide
caccaguauaauguuuugu

SEQ ID NO: 325809 - RNA, 19 nt, Artificial Sequence
  Description of Artificial Sequence: Synthetic oligonucleotide
ccugugcuaaaugggcuug

SEQ ID NO: 325810 - RNA, 19 nt, Artificial Sequence
  Description of Artificial Sequence: Synthetic oligonucleotide
cgcaccuaauauaugucga

SEQ ID NO: 325811 - RNA, 19 nt, Artificial Sequence
  Description of Artificial Sequence: Synthetic oligonucleotide
gcuagagauuagaauucaa

SEQ ID NO: 325812 - RNA, 19 nt, Artificial Sequence
  Description of Artificial Sequence: Synthetic oligonucleotide
ggagagucuacugcaagau

SEQ ID NO: 325813 - RNA, 19 nt, Artificial Sequence
  Description of Artificial Sequence: Synthetic oligonucleotide
ggauuggaagagagccaug

SEQ ID NO: 325814 - RNA, 19 nt, Artificial Sequence
  Description of Artificial Sequence: Synthetic oligonucleotide
agucggcuauuuccacauu

SEQ ID NO: 325815 - RNA, 19 nt, Artificial Sequence
  Description of Artificial Sequence: Synthetic oligonucleotide
ggcuuauuaguugcagugu

SEQ ID NO: 325816 - RNA, 19 nt, Artificial Sequence
  Description of Artificial Sequence: Synthetic oligonucleotide
gcaccuaauauaugucgau

SEQ ID NO: 325817 - RNA, 19 nt, Artificial Sequence
  Description of Artificial Sequence: Synthetic oligonucleotide
guguacgaugcaacaaaau

SEQ ID NO: 325818 - RNA, 19 nt, Artificial Sequence
  Description of Artificial Sequence: Synthetic oligonucleotide
ccagucggcuauuuccaca

SEQ ID NO: 325819 - RNA, 19 nt, Artificial Sequence
  Description of Artificial Sequence: Synthetic oligonucleotide
acccaccaguauaauguuu

SEQ ID NO: 325820 - RNA, 19 nt, Artificial Sequence
  Description of Artificial Sequence: Synthetic oligonucleotide
cccagucggcuauuuccac

SEQ ID NO: 325821 - RNA, 19 nt, Artificial Sequence
  Description of Artificial Sequence: Synthetic oligonucleotide
gaaaacccagucggcuauu

SEQ ID NO: 325822 - RNA, 19 nt, Artificial Sequence
  Description of Artificial Sequence: Synthetic oligonucleotide
cugugcuaaaugggcuugu

SEQ ID NO: 325823 - RNA, 19 nt, Artificial Sequence
  Description of Artificial Sequence: Synthetic oligonucleotide
gggguaccauuauacccau

SEQ ID NO: 325824 - RNA, 19 nt, Artificial Sequence
  Description of Artificial Sequence: Synthetic oligonucleotide
ccguuauaauggaaaucau

SEQ ID NO: 325825 - RNA, 19 nt, Artificial Sequence
  Description of Artificial Sequence: Synthetic oligonucleotide
gccagccuauugcuuccaa

SEQ ID NO: 325826 - RNA, 19 nt, Artificial Sequence
  Description of Artificial Sequence: Synthetic oligonucleotide
cccuaugacuucccuacau

SEQ ID NO: 325827 - RNA, 19 nt, Artificial Sequence
  Description of Artificial Sequence: Synthetic oligonucleotide
ccauuauacccaugccuuu

SEQ ID NO: 325828 - RNA, 19 nt, Artificial Sequence
  Description of Artificial Sequence: Synthetic oligonucleotide
gucgauuccuuggcuuauu

SEQ ID NO: 325829 - RNA, 19 nt, Artificial Sequence
  Description of Artificial Sequence: Synthetic oligonucleotide
ccuguacgcauggcgauau

SEQ ID NO: 325830 - RNA, 19 nt, Artificial Sequence
  Description of Artificial Sequence: Synthetic oligonucleotide
ggaauccguggaaccacuu

SEQ ID NO: 325831 - RNA, 19 nt, Artificial Sequence
  Description of Artificial Sequence: Synthetic oligonucleotide
gggcgagaugaaagucaau

SEQ ID NO: 325832 - RNA, 19 nt, Artificial Sequence
  Description of Artificial Sequence: Synthetic oligonucleotide
aaauagaucguccauggcc

SEQ ID NO: 325833 - RNA, 19 nt, Artificial Sequence
  Description of Artificial Sequence: Synthetic oligonucleotide
uuaguucagaguuagaaag

SEQ ID NO: 325834 - RNA, 19 nt, Artificial Sequence
  Description of Artificial Sequence: Synthetic oligonucleotide
aauacgucgugcuggaggc

SEQ ID NO: 325835 - RNA, 19 nt, Artificial Sequence
  Description of Artificial Sequence: Synthetic oligonucleotide
cucuauaggaacuugaaag

SEQ ID NO: 325836 - RNA, 19 nt, Artificial Sequence
  Description of Artificial Sequence: Synthetic oligonucleotide
aauaggaugagagaggaca

SEQ ID NO: 325837 - RNA, 19 nt, Artificial Sequence
  Description of Artificial Sequence: Synthetic oligonucleotide
gaagauaccacccaaagaa

SEQ ID NO: 325838 - RNA, 19 nt, Artificial Sequence
  Description of Artificial Sequence: Synthetic oligonucleotide
aauagaucguccauggccg

SEQ ID NO: 325839 - RNA, 19 nt, Artificial Sequence
  Description of Artificial Sequence: Synthetic oligonucleotide
ugauaauaaggcgucaugg

SEQ ID NO: 325840 - RNA, 19 nt, Artificial Sequence
  Description of Artificial Sequence: Synthetic oligonucleotide
aagagcaagaguccaacag

SEQ ID NO: 325841 - RNA, 19 nt, Artificial Sequence
  Description of Artificial Sequence: Synthetic oligonucleotide
aagggagcugacuauuacc

SEQ ID NO: 325842 - RNA, 19 nt, Artificial Sequence
  Description of Artificial Sequence: Synthetic oligonucleotide
uuuauuaguucagaguuag

SEQ ID NO: 325843 - RNA, 19 nt, Artificial Sequence
  Description of Artificial Sequence: Synthetic oligonucleotide
aguuauagcuucuggguac

SEQ ID NO: 325844 - RNA, 19 nt, Artificial Sequence
  Description of Artificial Sequence: Synthetic oligonucleotide
auguuggaaagguauaggg

SEQ ID NO: 325845 - RNA, 19 nt, Artificial Sequence
  Description of Artificial Sequence: Synthetic oligonucleotide
gauaauaaggcgucauggc

SEQ ID NO: 325846 - RNA, 19 nt, Artificial Sequence
  Description of Artificial Sequence: Synthetic oligonucleotide
agacacgugauaauaaggc

SEQ ID NO: 325847 - RNA, 19 nt, Artificial Sequence
  Description of Artificial Sequence: Synthetic oligonucleotide
gaagacacgugauaauaag

SEQ ID NO: 325848 - RNA, 19 nt, Artificial Sequence
  Description of Artificial Sequence: Synthetic oligonucleotide
uuugucacacagcaagaag

SEQ ID NO: 325849 - RNA, 19 nt, Artificial Sequence
  Description of Artificial Sequence: Synthetic oligonucleotide
aaucuguaagugcuucggg

SEQ ID NO: 325850 - RNA, 19 nt, Artificial Sequence
  Description of Artificial Sequence: Synthetic oligonucleotide
cuagaacugagacaggggc

SEQ ID NO: 325851 - RNA, 19 nt, Artificial Sequence
  Description of Artificial Sequence: Synthetic oligonucleotide
uaauaaggcgucauggccu

SEQ ID NO: 325852 - RNA, 19 nt, Artificial Sequence
  Description of Artificial Sequence: Synthetic oligonucleotide
gacacgugauaauaaggcg

SEQ ID NO: 325853 - RNA, 19 nt, Artificial Sequence
  Description of Artificial Sequence: Synthetic oligonucleotide
agauauugccaauaauaag

SEQ ID NO: 325854 - RNA, 19 nt, Artificial Sequence
  Description of Artificial Sequence: Synthetic oligonucleotide
acuauuaccguggagaagu

SEQ ID NO: 325855 - RNA, 19 nt, Artificial Sequence
  Description of Artificial Sequence: Synthetic oligonucleotide
caugguaacacauuuauua

SEQ ID NO: 325856 - RNA, 19 nt, Artificial Sequence
  Description of Artificial Sequence: Synthetic oligonucleotide
uaaagcgaagccauucgcc

SEQ ID NO: 325857 - RNA, 19 nt, Artificial Sequence
  Description of Artificial Sequence: Synthetic oligonucleotide
aauacguaagggcugcuau

SEQ ID NO: 325858 - RNA, 19 nt, Artificial Sequence
  Description of Artificial Sequence: Synthetic oligonucleotide
aauagccacuugccggugc

SEQ ID NO: 325859 - RNA, 19 nt, Artificial Sequence
  Description of Artificial Sequence: Synthetic oligonucleotide
aguagguccauuaaaagga

SEQ ID NO: 325860 - RNA, 19 nt, Artificial Sequence
  Description of Artificial Sequence: Synthetic oligonucleotide
aagacacgugauaauaagg

SEQ ID NO: 325861 - RNA, 19 nt, Artificial Sequence
  Description of Artificial Sequence: Synthetic oligonucleotide
aucagaaggccgccgaagc

SEQ ID NO: 325862 - RNA, 19 nt, Artificial Sequence
  Description of Artificial Sequence: Synthetic oligonucleotide
ggaaauagaucguccaugg

SEQ ID NO: 325863 - RNA, 19 nt, Artificial Sequence
  Description of Artificial Sequence: Synthetic oligonucleotide
agaucuugagcucagcagu

SEQ ID NO: 325864 - RNA, 19 nt, Artificial Sequence
  Description of Artificial Sequence: Synthetic oligonucleotide
agaugguaacaccaugggg

SEQ ID NO: 325865 - RNA, 19 nt, Artificial Sequence
  Description of Artificial Sequence: Synthetic oligonucleotide
cuugagaaaaggagccucg

SEQ ID NO: 325866 - RNA, 19 nt, Artificial Sequence
  Description of Artificial Sequence: Synthetic oligonucleotide
uuugagaucugcccagaug

SEQ ID NO: 325867 - RNA, 19 nt, Artificial Sequence
  Description of Artificial Sequence: Synthetic oligonucleotide
cugaguugucgacagaugc

SEQ ID NO: 325868 - RNA, 19 nt, Artificial Sequence
  Description of Artificial Sequence: Synthetic oligonucleotide
uucgaacuguuccuggucc

SEQ ID NO: 325869 - RNA, 19 nt, Artificial Sequence
  Description of Artificial Sequence: Synthetic oligonucleotide
aguucauguggaugaggcc

SEQ ID NO: 325870 - RNA, 19 nt, Artificial Sequence
  Description of Artificial Sequence: Synthetic oligonucleotide
uugggcagcaauacguaag

SEQ ID NO: 325871 - RNA, 19 nt, Artificial Sequence
  Description of Artificial Sequence: Synthetic oligonucleotide
caauacgucgugcuggagg

SEQ ID NO: 325872 - RNA, 19 nt, Artificial Sequence
  Description of Artificial Sequence: Synthetic oligonucleotide
uuaaugcuucugcuuaagc

SEQ ID NO: 325873 - RNA, 19 nt, Artificial Sequence
  Description of Artificial Sequence: Synthetic oligonucleotide
ugaguugucgacagaugcc

SEQ ID NO: 325874 - RNA, 19 nt, Artificial Sequence
  Description of Artificial Sequence: Synthetic oligonucleotide
auuaggagcauugcuuugg

SEQ ID NO: 325875 - RNA, 19 nt, Artificial Sequence
  Description of Artificial Sequence: Synthetic oligonucleotide
uucgagaaggcacagcaau

SEQ ID NO: 325876 - RNA, 19 nt, Artificial Sequence
  Description of Artificial Sequence: Synthetic oligonucleotide
uauggaggaguccggaaca

SEQ ID NO: 325877 - RNA, 19 nt, Artificial Sequence
  Description of Artificial Sequence: Synthetic oligonucleotide
gacccucacacuuguagcg

SEQ ID NO: 325878 - RNA, 19 nt, Artificial Sequence
  Description of Artificial Sequence: Synthetic oligonucleotide
agaagaucucauccccacc

SEQ ID NO: 325879 - RNA, 19 nt, Artificial Sequence
  Description of Artificial Sequence: Synthetic oligonucleotide
gaagaucucauccccacca

SEQ ID NO: 325880 - RNA, 19 nt, Artificial Sequence
  Description of Artificial Sequence: Synthetic oligonucleotide
ugcuauuccaccuguuccc

SEQ ID NO: 325881 - RNA, 19 nt, Artificial Sequence
  Description of Artificial Sequence: Synthetic oligonucleotide
aauacaccucaaugucuuc

SEQ ID NO: 325882 - RNA, 19 nt, Artificial Sequence
  Description of Artificial Sequence: Synthetic oligonucleotide
ugcccugcuauuaaggcac

SEQ ID NO: 325883 - RNA, 19 nt, Artificial Sequence
  Description of Artificial Sequence: Synthetic oligonucleotide
aaaacagccccucgugcug

SEQ ID NO: 325884 - RNA, 19 nt, Artificial Sequence
  Description of Artificial Sequence: Synthetic oligonucleotide
ucucucacccggaauacug

SEQ ID NO: 325885 - RNA, 19 nt, Artificial Sequence
  Description of Artificial Sequence: Synthetic oligonucleotide
agcaugguaacacauuuau

SEQ ID NO: 325886 - RNA, 19 nt, Artificial Sequence
  Description of Artificial Sequence: Synthetic oligonucleotide
ucgaugaucuccacauaag

SEQ ID NO: 325887 - RNA, 19 nt, Artificial Sequence
  Description of Artificial Sequence: Synthetic oligonucleotide
cagcuugagaaaaggagcc

SEQ ID NO: 325888 - RNA, 19 nt, Artificial Sequence
  Description of Artificial Sequence: Synthetic oligonucleotide
aagguggccagugcuauuc

SEQ ID NO: 325889 - RNA, 19 nt, Artificial Sequence
  Description of Artificial Sequence: Synthetic oligonucleotide
agcaauacguaagggcugc

SEQ ID NO: 325890 - RNA, 19 nt, Artificial Sequence
  Description of Artificial Sequence: Synthetic oligonucleotide
ucuguaagugcuucgggaa

SEQ ID NO: 325891 - RNA, 19 nt, Artificial Sequence
  Description of Artificial Sequence: Synthetic oligonucleotide
gaugcagcggucugggcag

SEQ ID NO: 325892 - RNA, 19 nt, Artificial Sequence
  Description of Artificial Sequence: Synthetic oligonucleotide
gacaguugagcuucgagaa

SEQ ID NO: 325893 - RNA, 19 nt, Artificial Sequence
  Description of Artificial Sequence: Synthetic oligonucleotide
ugcucgaugaucuccacau

SEQ ID NO: 325894 - RNA, 19 nt, Artificial Sequence
  Description of Artificial Sequence: Synthetic oligonucleotide
agauucgaacuguuccugg

SEQ ID NO: 325895 - RNA, 19 nt, Artificial Sequence
  Description of Artificial Sequence: Synthetic oligonucleotide
caauaauaaggugccaccc

SEQ ID NO: 325896 - RNA, 19 nt, Artificial Sequence
  Description of Artificial Sequence: Synthetic oligonucleotide
auaauaaggugccacccau

SEQ ID NO: 325897 - RNA, 19 nt, Artificial Sequence
  Description of Artificial Sequence: Synthetic oligonucleotide
guagcggaaacgcaugccc

SEQ ID NO: 325898 - RNA, 19 nt, Artificial Sequence
  Description of Artificial Sequence: Synthetic oligonucleotide
gugaaauacaccucaaugu

SEQ ID NO: 325899 - RNA, 19 nt, Artificial Sequence
  Description of Artificial Sequence: Synthetic oligonucleotide
gaugggaaauagaucgucc

SEQ ID NO: 325900 - RNA, 19 nt, Artificial Sequence
  Description of Artificial Sequence: Synthetic oligonucleotide
aauccgguggcgaucaucu

SEQ ID NO: 325901 - RNA, 19 nt, Artificial Sequence
  Description of Artificial Sequence: Synthetic oligonucleotide
acaauagccacuugccggu

SEQ ID NO: 325902 - RNA, 19 nt, Artificial Sequence
  Description of Artificial Sequence: Synthetic oligonucleotide
agaguucccuaccaagaag

SEQ ID NO: 325903 - RNA, 19 nt, Artificial Sequence
  Description of Artificial Sequence: Synthetic oligonucleotide
cugacuauuaccguggaga

SEQ ID NO: 325904 - RNA, 19 nt, Artificial Sequence
  Description of Artificial Sequence: Synthetic oligonucleotide
aucuguaagugcuucggga

SEQ ID NO: 325905 - RNA, 19 nt, Artificial Sequence
  Description of Artificial Sequence: Synthetic oligonucleotide
auuaccguggagaagucug

SEQ ID NO: 325906 - RNA, 19 nt, Artificial Sequence
  Description of Artificial Sequence: Synthetic oligonucleotide
cuuuaggccacagauccag

SEQ ID NO: 325907 - RNA, 19 nt, Artificial Sequence
  Description of Artificial Sequence: Synthetic oligonucleotide
acgcacaggagccugcagg

SEQ ID NO: 325908 - RNA, 19 nt, Artificial Sequence
  Description of Artificial Sequence: Synthetic oligonucleotide
guugucgacagaugccagg

SEQ ID NO: 325909 - RNA, 19 nt, Artificial Sequence
  Description of Artificial Sequence: Synthetic oligonucleotide
cuagccgaguuauagcuuc

SEQ ID NO: 325910 - RNA, 19 nt, Artificial Sequence
  Description of Artificial Sequence: Synthetic oligonucleotide
ucacccggaauacugccug

SEQ ID NO: 325911 - RNA, 19 nt, Artificial Sequence
  Description of Artificial Sequence: Synthetic oligonucleotide
gaaagagcaagaguccaac

SEQ ID NO: 325912 - RNA, 19 nt, Artificial Sequence
  Description of Artificial Sequence: Synthetic oligonucleotide
ugacuauuaccguggagaa

SEQ ID NO: 325913 - RNA, 19 nt, Artificial Sequence
  Description of Artificial Sequence: Synthetic oligonucleotide
gugcuauuccaccuguucc

SEQ ID NO: 325914 - RNA, 19 nt, Artificial Sequence
  Description of Artificial Sequence: Synthetic oligonucleotide
aaauaggaugagagaggac

SEQ ID NO: 325915 - RNA, 19 nt, Artificial Sequence
  Description of Artificial Sequence: Synthetic oligonucleotide
uccucuauaggaacuugaa

SEQ ID NO: 325916 - RNA, 19 nt, Artificial Sequence
  Description of Artificial Sequence: Synthetic oligonucleotide
gugauaauaaggcgucaug

SEQ ID NO: 325917 - RNA, 19 nt, Artificial Sequence
  Description of Artificial Sequence: Synthetic oligonucleotide
uuuacucggcagaucuuga

SEQ ID NO: 325918 - RNA, 19 nt, Artificial Sequence
  Description of Artificial Sequence: Synthetic oligonucleotide
uuaggccacagauccagcu

SEQ ID NO: 325919 - RNA, 19 nt, Artificial Sequence
  Description of Artificial Sequence: Synthetic oligonucleotide
cacgugauaauaaggcguc

SEQ ID NO: 325920 - RNA, 19 nt, Artificial Sequence
  Description of Artificial Sequence: Synthetic oligonucleotide
uacaggaacccaugaugag

SEQ ID NO: 325921 - RNA, 19 nt, Artificial Sequence
  Description of Artificial Sequence: Synthetic oligonucleotide
agcggaaacgcaugccccg

SEQ ID NO: 325922 - RNA, 19 nt, Artificial Sequence
  Description of Artificial Sequence: Synthetic oligonucleotide
guuuacucggcagaucuug

SEQ ID NO: 325923 - RNA, 19 nt, Artificial Sequence
  Description of Artificial Sequence: Synthetic oligonucleotide
agccucgugcuucccagcc

SEQ ID NO: 325924 - RNA, 19 nt, Artificial Sequence
  Description of Artificial Sequence: Synthetic oligonucleotide
cacacuuguagcggaaacg

SEQ ID NO: 325925 - RNA, 19 nt, Artificial Sequence
  Description of Artificial Sequence: Synthetic oligonucleotide
acacgugauaauaaggcgu

SEQ ID NO: 325926 - RNA, 19 nt, Artificial Sequence
  Description of Artificial Sequence: Synthetic oligonucleotide
guauggaggaguccggaac

SEQ ID NO: 325927 - RNA, 19 nt, Artificial Sequence
  Description of Artificial Sequence: Synthetic oligonucleotide
gcuaaagcgaagccauucg

SEQ ID NO: 325928 - RNA, 19 nt, Artificial Sequence
  Description of Artificial Sequence: Synthetic oligonucleotide
gaagggagcugacuauuac

SEQ ID NO: 325929 - RNA, 19 nt, Artificial Sequence
  Description of Artificial Sequence: Synthetic oligonucleotide
accagggagauucgaacug

SEQ ID NO: 325930 - RNA, 19 nt, Artificial Sequence
  Description of Artificial Sequence: Synthetic oligonucleotide
ggaguuccgguuuacucgg

SEQ ID NO: 325931 - RNA, 19 nt, Artificial Sequence
  Description of Artificial Sequence: Synthetic oligonucleotide
uagcggaaacgcaugcccc

SEQ ID NO: 325932 - RNA, 19 nt, Artificial Sequence
  Description of Artificial Sequence: Synthetic oligonucleotide
uuauuaguucagaguuaga

SEQ ID NO: 325933 - RNA, 19 nt, Artificial Sequence
  Description of Artificial Sequence: Synthetic oligonucleotide
ucucacccggaauacugcc

SEQ ID NO: 325934 - RNA, 19 nt, Artificial Sequence
  Description of Artificial Sequence: Synthetic oligonucleotide
ccaauaauaaggugccacc

SEQ ID NO: 325935 - RNA, 19 nt, Artificial Sequence
  Description of Artificial Sequence: Synthetic oligonucleotide
gggaaacucaucaaaguug

SEQ ID NO: 325936 - RNA, 19 nt, Artificial Sequence
  Description of Artificial Sequence: Synthetic oligonucleotide
ucccguguagccauugauc

SEQ ID NO: 325937 - RNA, 19 nt, Artificial Sequence
  Description of Artificial Sequence: Synthetic oligonucleotide
guaacacauuuauuaguuc

SEQ ID NO: 325938 - RNA, 19 nt, Artificial Sequence
  Description of Artificial Sequence: Synthetic oligonucleotide
auaggaugagagaggacag

SEQ ID NO: 325939 - RNA, 19 nt, Artificial Sequence
  Description of Artificial Sequence: Synthetic oligonucleotide
cucccgaucagaaggccgc

SEQ ID NO: 325940 - RNA, 19 nt, Artificial Sequence
  Description of Artificial Sequence: Synthetic oligonucleotide
uuccgguuuacucggcaga

SEQ ID NO: 325941 - RNA, 19 nt, Artificial Sequence
  Description of Artificial Sequence: Synthetic oligonucleotide
cagcguauggaggaguccg

SEQ ID NO: 325942 - RNA, 19 nt, Artificial Sequence
  Description of Artificial Sequence: Synthetic oligonucleotide
uucaauccgguggcgauca

SEQ ID NO: 325943 - RNA, 19 nt, Artificial Sequence
  Description of Artificial Sequence: Synthetic oligonucleotide
auagaucguccauggccgg

SEQ ID NO: 325944 - RNA, 19 nt, Artificial Sequence
  Description of Artificial Sequence: Synthetic oligonucleotide
gaaggcacagcaauacguc

SEQ ID NO: 325945 - RNA, 19 nt, Artificial Sequence
  Description of Artificial Sequence: Synthetic oligonucleotide
uuuaggccacagauccagc

SEQ ID NO: 325946 - RNA, 19 nt, Artificial Sequence
  Description of Artificial Sequence: Synthetic oligonucleotide
cuguaagugcuucgggaag

SEQ ID NO: 325947 - RNA, 19 nt, Artificial Sequence
  Description of Artificial Sequence: Synthetic oligonucleotide
ucccuuaggagcugaucug

SEQ ID NO: 325948 - RNA, 19 nt, Artificial Sequence
  Description of Artificial Sequence: Synthetic oligonucleotide
ggcuagaacugagacaggg

SEQ ID NO: 325949 - RNA, 19 nt, Artificial Sequence
  Description of Artificial Sequence: Synthetic oligonucleotide
ccgaguuauagcuucuggg

SEQ ID NO: 325950 - RNA, 19 nt, Artificial Sequence
  Description of Artificial Sequence: Synthetic oligonucleotide
uguagcggaaacgcaugcc

SEQ ID NO: 325951 - RNA, 19 nt, Artificial Sequence
  Description of Artificial Sequence: Synthetic oligonucleotide
caucccggcagucuuuccc

SEQ ID NO: 325952 - RNA, 19 nt, Artificial Sequence
  Description of Artificial Sequence: Synthetic oligonucleotide
uggggcuagaacugagaca

SEQ ID NO: 325953 - RNA, 19 nt, Artificial Sequence
  Description of Artificial Sequence: Synthetic oligonucleotide
cacccauagaagauaccac

SEQ ID NO: 325954 - RNA, 19 nt, Artificial Sequence
  Description of Artificial Sequence: Synthetic oligonucleotide
aggaugagagaggacagga

SEQ ID NO: 325955 - RNA, 19 nt, Artificial Sequence
  Description of Artificial Sequence: Synthetic oligonucleotide
cucacugagcucccgauca

SEQ ID NO: 325956 - RNA, 19 nt, Artificial Sequence
  Description of Artificial Sequence: Synthetic oligonucleotide
guuccgguuuacucggcag

SEQ ID NO: 325957 - RNA, 19 nt, Artificial Sequence
  Description of Artificial Sequence: Synthetic oligonucleotide
aaggcgucauggccuuuag

SEQ ID NO: 325958 - RNA, 19 nt, Artificial Sequence
  Description of Artificial Sequence: Synthetic oligonucleotide
cucucacccggaauacugc

SEQ ID NO: 325959 - RNA, 19 nt, Artificial Sequence
  Description of Artificial Sequence: Synthetic oligonucleotide
gguguugggcagcaauacg

SEQ ID NO: 325960 - RNA, 19 nt, Artificial Sequence
  Description of Artificial Sequence: Synthetic oligonucleotide
agguggccagugcuauucc

SEQ ID NO: 325961 - RNA, 19 nt, Artificial Sequence
  Description of Artificial Sequence: Synthetic oligonucleotide
gacuauuaccguggagaag

SEQ ID NO: 325962 - RNA, 19 nt, Artificial Sequence
  Description of Artificial Sequence: Synthetic oligonucleotide
ugagaucugcccagauggu

SEQ ID NO: 325963 - RNA, 19 nt, Artificial Sequence
  Description of Artificial Sequence: Synthetic oligonucleotide
ucgagaaggcacagcaaua

SEQ ID NO: 325964 - RNA, 19 nt, Artificial Sequence
  Description of Artificial Sequence: Synthetic oligonucleotide
acgcaugccccguuguuug

SEQ ID NO: 325965 - RNA, 19 nt, Artificial Sequence
  Description of Artificial Sequence: Synthetic oligonucleotide
aagaagggagcugacuauu

SEQ ID NO: 325966 - RNA, 19 nt, Artificial Sequence
  Description of Artificial Sequence: Synthetic oligonucleotide
ucuagcccacccuucugac

SEQ ID NO: 325967 - RNA, 19 nt, Artificial Sequence
  Description of Artificial Sequence: Synthetic oligonucleotide
uggaagcagaggcgcacug

SEQ ID NO: 325968 - RNA, 19 nt, Artificial Sequence
  Description of Artificial Sequence: Synthetic oligonucleotide
aagugcuucgggaaggcuu

SEQ ID NO: 325969 - RNA, 19 nt, Artificial Sequence
  Description of Artificial Sequence: Synthetic oligonucleotide
uauuaccguggagaagucu

SEQ ID NO: 325970 - RNA, 19 nt, Artificial Sequence
  Description of Artificial Sequence: Synthetic oligonucleotide
gggaaauagaucguccaug

SEQ ID NO: 325971 - RNA, 19 nt, Artificial Sequence
  Description of Artificial Sequence: Synthetic oligonucleotide
acguaagggcugcuauuag

SEQ ID NO: 325972 - RNA, 19 nt, Artificial Sequence
  Description of Artificial Sequence: Synthetic oligonucleotide
acaauuugcccugcuauua

SEQ ID NO: 325973 - RNA, 19 nt, Artificial Sequence
  Description of Artificial Sequence: Synthetic oligonucleotide
gcugcauggagacacgcac

SEQ ID NO: 325974 - RNA, 19 nt, Artificial Sequence
  Description of Artificial Sequence: Synthetic oligonucleotide
uugagaaaaggagccucgu

SEQ ID NO: 325975 - RNA, 19 nt, Artificial Sequence
  Description of Artificial Sequence: Synthetic oligonucleotide
uagaucguccauggccggg

SEQ ID NO: 325976 - RNA, 19 nt, Artificial Sequence
  Description of Artificial Sequence: Synthetic oligonucleotide
aaacgcaugccccguuguu

SEQ ID NO: 325977 - RNA, 19 nt, Artificial Sequence
  Description of Artificial Sequence: Synthetic oligonucleotide
ggagacacgcacaggagcc

SEQ ID NO: 325978 - RNA, 19 nt, Artificial Sequence
  Description of Artificial Sequence: Synthetic oligonucleotide
auagaagauaccacccaaa

SEQ ID NO: 325979 - RNA, 19 nt, Artificial Sequence
  Description of Artificial Sequence: Synthetic oligonucleotide
agugugagauauugccaau

SEQ ID NO: 325980 - RNA, 19 nt, Artificial Sequence
  Description of Artificial Sequence: Synthetic oligonucleotide
gucucgcuucuucacacac

SEQ ID NO: 325981 - RNA, 19 nt, Artificial Sequence
  Description of Artificial Sequence: Synthetic oligonucleotide
gcgacccucacacuuguag

SEQ ID NO: 325982 - RNA, 19 nt, Artificial Sequence
  Description of Artificial Sequence: Synthetic oligonucleotide
gauucgaacuguuccuggu

SEQ ID NO: 325983 - RNA, 19 nt, Artificial Sequence
  Description of Artificial Sequence: Synthetic oligonucleotide
agggagauucgaacuguuc

SEQ ID NO: 325984 - RNA, 19 nt, Artificial Sequence
  Description of Artificial Sequence: Synthetic oligonucleotide
ugccccguuguuugggcug

SEQ ID NO: 325985 - RNA, 19 nt, Artificial Sequence
  Description of Artificial Sequence: Synthetic oligonucleotide
ucagcguauggaggagucc

SEQ ID NO: 325986 - RNA, 19 nt, Artificial Sequence
  Description of Artificial Sequence: Synthetic oligonucleotide
acccucacacuuguagcgg

SEQ ID NO: 325987 - RNA, 19 nt, Artificial Sequence
  Description of Artificial Sequence: Synthetic oligonucleotide
gucgacagaugccaggucu

SEQ ID NO: 325988 - RNA, 19 nt, Artificial Sequence
  Description of Artificial Sequence: Synthetic oligonucleotide
cgcaccgucaccuggaagc

SEQ ID NO: 325989 - RNA, 19 nt, Artificial Sequence
  Description of Artificial Sequence: Synthetic oligonucleotide
aacgcaugccccguuguuu

SEQ ID NO: 325990 - RNA, 19 nt, Artificial Sequence
  Description of Artificial Sequence: Synthetic oligonucleotide
uaggaacuugaaagggguu

SEQ ID NO: 325991 - RNA, 19 nt, Artificial Sequence
  Description of Artificial Sequence: Synthetic oligonucleotide
cacuagccgaguuauagcu

SEQ ID NO: 325992 - RNA, 19 nt, Artificial Sequence
  Description of Artificial Sequence: Synthetic oligonucleotide
gccgaguuauagcuucugg

SEQ ID NO: 325993 - RNA, 19 nt, Artificial Sequence
  Description of Artificial Sequence: Synthetic oligonucleotide
uggcgcaugcuccccagaa

SEQ ID NO: 325994 - RNA, 19 nt, Artificial Sequence
  Description of Artificial Sequence: Synthetic oligonucleotide
agcaucuagcccacccuuc

SEQ ID NO: 325995 - RNA, 19 nt, Artificial Sequence
  Description of Artificial Sequence: Synthetic oligonucleotide
agaaaccaucccggcaguc

SEQ ID NO: 325996 - RNA, 19 nt, Artificial Sequence
  Description of Artificial Sequence: Synthetic oligonucleotide
cuauuaggagcauugcuuu

SEQ ID NO: 325997 - RNA, 19 nt, Artificial Sequence
  Description of Artificial Sequence: Synthetic oligonucleotide
cuucgggaaggcuucaaua

SEQ ID NO: 325998 - RNA, 19 nt, Artificial Sequence
  Description of Artificial Sequence: Synthetic oligonucleotide
ggggaccaagguuugggcc

SEQ ID NO: 325999 - RNA, 19 nt, Artificial Sequence
  Description of Artificial Sequence: Synthetic oligonucleotide
cagccucauagaaaccauc

SEQ ID NO: 326000 - RNA, 19 nt, Artificial Sequence
  Description of Artificial Sequence: Synthetic oligonucleotide
ugcuucucucacccggaau

SEQ ID NO: 326001 - RNA, 19 nt, Artificial Sequence
  Description of Artificial Sequence: Synthetic oligonucleotide
cuauuaccguggagaaguc

SEQ ID NO: 326002 - RNA, 19 nt, Artificial Sequence
  Description of Artificial Sequence: Synthetic oligonucleotide
uggcagguacuggaacucc

SEQ ID NO: 326003 - RNA, 19 nt, Artificial Sequence
  Description of Artificial Sequence: Synthetic oligonucleotide
ggaguccggaacacaauag

SEQ ID NO: 326004 - RNA, 19 nt, Artificial Sequence
  Description of Artificial Sequence: Synthetic oligonucleotide
auacgucgugcuggaggcc

SEQ ID NO: 326005 - RNA, 19 nt, Artificial Sequence
  Description of Artificial Sequence: Synthetic oligonucleotide
uagccgaguuauagcuucu

SEQ ID NO: 326006 - RNA, 19 nt, Artificial Sequence
  Description of Artificial Sequence: Synthetic oligonucleotide
ugucgacagaugccagguc

SEQ ID NO: 326007 - RNA, 19 nt, Artificial Sequence
  Description of Artificial Sequence: Synthetic oligonucleotide
gcgucauggccuuuaggcc

SEQ ID NO: 326008 - RNA, 19 nt, Artificial Sequence
  Description of Artificial Sequence: Synthetic oligonucleotide
ggaaacgcaugccccguug

SEQ ID NO: 326009 - RNA, 19 nt, Artificial Sequence
  Description of Artificial Sequence: Synthetic oligonucleotide
guugggcagcaauacguaa

SEQ ID NO: 326010 - RNA, 19 nt, Artificial Sequence
  Description of Artificial Sequence: Synthetic oligonucleotide
cagugugccuuccccggcc

SEQ ID NO: 326011 - RNA, 19 nt, Artificial Sequence
  Description of Artificial Sequence: Synthetic oligonucleotide
cuuugucacacagcaagaa

SEQ ID NO: 326012 - RNA, 19 nt, Artificial Sequence
  Description of Artificial Sequence: Synthetic oligonucleotide
ggcaguuggcgcaugcucc

SEQ ID NO: 326013 - RNA, 19 nt, Artificial Sequence
  Description of Artificial Sequence: Synthetic oligonucleotide
accaucccggcagucuuuc

SEQ ID NO: 326014 - RNA, 19 nt, Artificial Sequence
  Description of Artificial Sequence: Synthetic oligonucleotide
uccgguuuacucggcagau

SEQ ID NO: 326015 - RNA, 19 nt, Artificial Sequence
  Description of Artificial Sequence: Synthetic oligonucleotide
agcugacuauuaccgugga

SEQ ID NO: 326016 - RNA, 19 nt, Artificial Sequence
  Description of Artificial Sequence: Synthetic oligonucleotide
aguugucgacagaugccag

SEQ ID NO: 326017 - RNA, 19 nt, Artificial Sequence
  Description of Artificial Sequence: Synthetic oligonucleotide
uaaggcgucauggccuuua

SEQ ID NO: 326018 - RNA, 19 nt, Artificial Sequence
  Description of Artificial Sequence: Synthetic oligonucleotide
gguaacacauuuauuaguu

SEQ ID NO: 326019 - RNA, 19 nt, Artificial Sequence
  Description of Artificial Sequence: Synthetic oligonucleotide
cucgugcugguguugggca

SEQ ID NO: 326020 - RNA, 19 nt, Artificial Sequence
  Description of Artificial Sequence: Synthetic oligonucleotide
ccugaugggucccgcaccg

SEQ ID NO: 326021 - RNA, 19 nt, Artificial Sequence
  Description of Artificial Sequence: Synthetic oligonucleotide
ggagauucgaacuguuccu

SEQ ID NO: 326022 - RNA, 19 nt, Artificial Sequence
  Description of Artificial Sequence: Synthetic oligonucleotide
agcguauggaggaguccgg

SEQ ID NO: 326023 - RNA, 19 nt, Artificial Sequence
  Description of Artificial Sequence: Synthetic oligonucleotide
ggucucguagguccuuuug

SEQ ID NO: 326024 - RNA, 19 nt, Artificial Sequence
  Description of Artificial Sequence: Synthetic oligonucleotide
uaggagcauugcuuuggau

SEQ ID NO: 326025 - RNA, 19 nt, Artificial Sequence
  Description of Artificial Sequence: Synthetic oligonucleotide
guguugggcagcaauacgu

SEQ ID NO: 326026 - RNA, 19 nt, Artificial Sequence
  Description of Artificial Sequence: Synthetic oligonucleotide
gcuucucucacccggaaua

SEQ ID NO: 326027 - RNA, 19 nt, Artificial Sequence
  Description of Artificial Sequence: Synthetic oligonucleotide
gguucaguagguccauuaa

SEQ ID NO: 326028 - RNA, 19 nt, Artificial Sequence
  Description of Artificial Sequence: Synthetic oligonucleotide
guucccuaccaagaaggga

SEQ ID NO: 326029 - RNA, 19 nt, Artificial Sequence
  Description of Artificial Sequence: Synthetic oligonucleotide
cccgcggcgcgcuaaagcg

SEQ ID NO: 326030 - RNA, 19 nt, Artificial Sequence
  Description of Artificial Sequence: Synthetic oligonucleotide
ccguuguuugggcugcucg

SEQ ID NO: 326031 - RNA, 19 nt, Artificial Sequence
  Description of Artificial Sequence: Synthetic oligonucleotide
gaaacgcaugccccguugu

SEQ ID NO: 326032 - RNA, 19 nt, Artificial Sequence
  Description of Artificial Sequence: Synthetic oligonucleotide
cuucaauccgguggcgauc

SEQ ID NO: 326033 - RNA, 19 nt, Artificial Sequence
  Description of Artificial Sequence: Synthetic oligonucleotide
gaugggucccgcaccguca

SEQ ID NO: 326034 - RNA, 19 nt, Artificial Sequence
  Description of Artificial Sequence: Synthetic oligonucleotide
accgucaccuggaagcaga

SEQ ID NO: 326035 - RNA, 19 nt, Artificial Sequence
  Description of Artificial Sequence: Synthetic oligonucleotide
cugcauggagacacgcaca

SEQ ID NO: 326036 - RNA, 19 nt, Artificial Sequence
  Description of Artificial Sequence: Synthetic oligonucleotide
agacacgcacaggagccug

SEQ ID NO: 326037 - RNA, 19 nt, Artificial Sequence
  Description of Artificial Sequence: Synthetic oligonucleotide
cacagcaauacgucgugcu

SEQ ID NO: 326038 - RNA, 19 nt, Artificial Sequence
  Description of Artificial Sequence: Synthetic oligonucleotide
agugugccuuccccggccu

SEQ ID NO: 326039 - RNA, 19 nt, Artificial Sequence
  Description of Artificial Sequence: Synthetic oligonucleotide
gcugacuauuaccguggag

SEQ ID NO: 326040 - RNA, 19 nt, Artificial Sequence
  Description of Artificial Sequence: Synthetic oligonucleotide
cuuaggagcugaucugacu

SEQ ID NO: 326041 - RNA, 19 nt, Artificial Sequence
  Description of Artificial Sequence: Synthetic oligonucleotide
gcgaucaucugugucuggc

SEQ ID NO: 326042 - RNA, 19 nt, Artificial Sequence
  Description of Artificial Sequence: Synthetic oligonucleotide
ccccagaaucuguaagugc

SEQ ID NO: 326043 - RNA, 19 nt, Artificial Sequence
  Description of Artificial Sequence: Synthetic oligonucleotide
gcgcaugcuccccagaauc

SEQ ID NO: 326044 - RNA, 19 nt, Artificial Sequence
  Description of Artificial Sequence: Synthetic oligonucleotide
gcaguuggcgcaugcuccc

SEQ ID NO: 326045 - RNA, 19 nt, Artificial Sequence
  Description of Artificial Sequence: Synthetic oligonucleotide
guucagccucauagaaacc

SEQ ID NO: 326046 - RNA, 19 nt, Artificial Sequence
  Description of Artificial Sequence: Synthetic oligonucleotide
ucaacucccucaggauccu

SEQ ID NO: 326047 - RNA, 19 nt, Artificial Sequence
  Description of Artificial Sequence: Synthetic oligonucleotide
ccagaguucccuaccaaga

SEQ ID NO: 326048 - RNA, 19 nt, Artificial Sequence
  Description of Artificial Sequence: Synthetic oligonucleotide
cacccggaauacugccugc

SEQ ID NO: 326049 - RNA, 19 nt, Artificial Sequence
  Description of Artificial Sequence: Synthetic oligonucleotide
cagcuucagucccuuagga

SEQ ID NO: 326050 - RNA, 19 nt, Artificial Sequence
  Description of Artificial Sequence: Synthetic oligonucleotide
cuccccagaaucuguaagu

SEQ ID NO: 326051 - RNA, 19 nt, Artificial Sequence
  Description of Artificial Sequence: Synthetic oligonucleotide
gucagcguauggaggaguc

SEQ ID NO: 326052 - RNA, 19 nt, Artificial Sequence
  Description of Artificial Sequence: Synthetic oligonucleotide
cuucgagaaggcacagcaa

SEQ ID NO: 326053 - RNA, 19 nt, Artificial Sequence
  Description of Artificial Sequence: Synthetic oligonucleotide
aaggucucguagguccuuu

SEQ ID NO: 326054 - RNA, 19 nt, Artificial Sequence
  Description of Artificial Sequence: Synthetic oligonucleotide
gguggcgaucaucuguguc

SEQ ID NO: 326055 - RNA, 19 nt, Artificial Sequence
  Description of Artificial Sequence: Synthetic oligonucleotide
cuucugacuccacacaauu

SEQ ID NO: 326056 - RNA, 19 nt, Artificial Sequence
  Description of Artificial Sequence: Synthetic oligonucleotide
agccgaguuauagcuucug

SEQ ID NO: 326057 - RNA, 19 nt, Artificial Sequence
  Description of Artificial Sequence: Synthetic oligonucleotide
caauccgguggcgaucauc

SEQ ID NO: 326058 - RNA, 19 nt, Artificial Sequence
  Description of Artificial Sequence: Synthetic oligonucleotide
augccccguuguuugggcu

SEQ ID NO: 326059 - RNA, 19 nt, Artificial Sequence
  Description of Artificial Sequence: Synthetic oligonucleotide
caggucucgcuucuucaca

SEQ ID NO: 326060 - RNA, 19 nt, Artificial Sequence
  Description of Artificial Sequence: Synthetic oligonucleotide
ggcgcgcuaaagcgaagcc

SEQ ID NO: 326061 - RNA, 19 nt, Artificial Sequence
  Description of Artificial Sequence: Synthetic oligonucleotide
acgugauaauaaggcguca

SEQ ID NO: 326062 - RNA, 19 nt, Artificial Sequence
  Description of Artificial Sequence: Synthetic oligonucleotide
cauggccggggucccgggg

SEQ ID NO: 326063 - RNA, 19 nt, Artificial Sequence
  Description of Artificial Sequence: Synthetic oligonucleotide
gggugcacgguuaucaaaa

SEQ ID NO: 326064 - RNA, 19 nt, Artificial Sequence
  Description of Artificial Sequence: Synthetic oligonucleotide
gcuauuaggagcauugcuu

SEQ ID NO: 326065 - RNA, 19 nt, Artificial Sequence
  Description of Artificial Sequence: Synthetic oligonucleotide
agaagggagcugacuauua

SEQ ID NO: 326066 - RNA, 19 nt, Artificial Sequence
  Description of Artificial Sequence: Synthetic oligonucleotide
ggggaaacucaucaaaguu

SEQ ID NO: 326067 - RNA, 19 nt, Artificial Sequence
  Description of Artificial Sequence: Synthetic oligonucleotide
ucccggcagucuuucccca

SEQ ID NO: 326068 - RNA, 19 nt, Artificial Sequence
  Description of Artificial Sequence: Synthetic oligonucleotide
ucccgaucagaaggccgcc

SEQ ID NO: 326069 - RNA, 19 nt, Artificial Sequence
  Description of Artificial Sequence: Synthetic oligonucleotide
ggaggaguccggaacacaa

SEQ ID NO: 326070 - RNA, 19 nt, Artificial Sequence
  Description of Artificial Sequence: Synthetic oligonucleotide
caagaguccaacagcuuuu

SEQ ID NO: 326071 - RNA, 19 nt, Artificial Sequence
  Description of Artificial Sequence: Synthetic oligonucleotide
uguugggugcacgguuauc

SEQ ID NO: 326072 - RNA, 19 nt, Artificial Sequence
  Description of Artificial Sequence: Synthetic oligonucleotide
ccggaguuccgguuuacuc

SEQ ID NO: 326073 - RNA, 19 nt, Artificial Sequence
  Description of Artificial Sequence: Synthetic oligonucleotide
cgacccucacacuuguagc

SEQ ID NO: 326074 - RNA, 19 nt, Artificial Sequence
  Description of Artificial Sequence: Synthetic oligonucleotide
ccgguggcgaucaucugug

SEQ ID NO: 326075 - RNA, 19 nt, Artificial Sequence
  Description of Artificial Sequence: Synthetic oligonucleotide
guguacaggaacccaugau

SEQ ID NO: 326076 - RNA, 19 nt, Artificial Sequence
  Description of Artificial Sequence: Synthetic oligonucleotide
cucugaguugucgacagau

SEQ ID NO: 326077 - RNA, 19 nt, Artificial Sequence
  Description of Artificial Sequence: Synthetic oligonucleotide
acccggaauacugccugcu

SEQ ID NO: 326078 - RNA, 19 nt, Artificial Sequence
  Description of Artificial Sequence: Synthetic oligonucleotide
acuagccgaguuauagcuu

SEQ ID NO: 326079 - RNA, 19 nt, Artificial Sequence
  Description of Artificial Sequence: Synthetic oligonucleotide
uggucccguguagccauug

SEQ ID NO: 326080 - RNA, 19 nt, Artificial Sequence
  Description of Artificial Sequence: Synthetic oligonucleotide
aucugcccagaugguaaca

SEQ ID NO: 326081 - RNA, 19 nt, Artificial Sequence
  Description of Artificial Sequence: Synthetic oligonucleotide
aggaacccaugaugaggaa

SEQ ID NO: 326082 - RNA, 19 nt, Artificial Sequence
  Description of Artificial Sequence: Synthetic oligonucleotide
cagcaugguaacacauuua

SEQ ID NO: 326083 - RNA, 19 nt, Artificial Sequence
  Description of Artificial Sequence: Synthetic oligonucleotide
cacgcacaggagccugcag

SEQ ID NO: 326084 - RNA, 19 nt, Artificial Sequence
  Description of Artificial Sequence: Synthetic oligonucleotide
ggguucaguagguccauua

SEQ ID NO: 326085 - RNA, 19 nt, Artificial Sequence
  Description of Artificial Sequence: Synthetic oligonucleotide
auccgguggcgaucaucug

SEQ ID NO: 326086 - RNA, 19 nt, Artificial Sequence
  Description of Artificial Sequence: Synthetic oligonucleotide
gagcaucuagcccacccuu

SEQ ID NO: 326087 - RNA, 19 nt, Artificial Sequence
  Description of Artificial Sequence: Synthetic oligonucleotide
cucguagguccuuuugcgu

SEQ ID NO: 326088 - RNA, 19 nt, Artificial Sequence
  Description of Artificial Sequence: Synthetic oligonucleotide
cgucauggccuuuaggcca

SEQ ID NO: 326089 - RNA, 19 nt, Artificial Sequence
  Description of Artificial Sequence: Synthetic oligonucleotide
caauagccacuugccggug

SEQ ID NO: 326090 - RNA, 19 nt, Artificial Sequence
  Description of Artificial Sequence: Synthetic oligonucleotide
cugagcgacccucacacuu

SEQ ID NO: 326091 - RNA, 19 nt, Artificial Sequence
  Description of Artificial Sequence: Synthetic oligonucleotide
cgaguuauagcuucugggu

SEQ ID NO: 326092 - RNA, 19 nt, Artificial Sequence
  Description of Artificial Sequence: Synthetic oligonucleotide
ccucuauaggaacuugaaa

SEQ ID NO: 326093 - RNA, 19 nt, Artificial Sequence
  Description of Artificial Sequence: Synthetic oligonucleotide
caauacguaagggcugcua

SEQ ID NO: 326094 - RNA, 19 nt, Artificial Sequence
  Description of Artificial Sequence: Synthetic oligonucleotide
cccguguagccauugaucu

SEQ ID NO: 326095 - RNA, 19 nt, Artificial Sequence
  Description of Artificial Sequence: Synthetic oligonucleotide
uccccggccuggguggucu

SEQ ID NO: 326096 - RNA, 19 nt, Artificial Sequence
  Description of Artificial Sequence: Synthetic oligonucleotide
ccggaauacugccugcuga

SEQ ID NO: 326097 - RNA, 19 nt, Artificial Sequence
  Description of Artificial Sequence: Synthetic oligonucleotide
agcucccggaguuccgguu

SEQ ID NO: 326098 - RNA, 19 nt, Artificial Sequence
  Description of Artificial Sequence: Synthetic oligonucleotide
aggucucguagguccuuuu

SEQ ID NO: 326099 - RNA, 19 nt, Artificial Sequence
  Description of Artificial Sequence: Synthetic oligonucleotide
agcaagaguccaacagcuu

SEQ ID NO: 326100 - RNA, 19 nt, Artificial Sequence
  Description of Artificial Sequence: Synthetic oligonucleotide
gucgugcuggaggccgggg

SEQ ID NO: 326101 - RNA, 19 nt, Artificial Sequence
  Description of Artificial Sequence: Synthetic oligonucleotide
ggguggucuuuggaacagg

SEQ ID NO: 326102 - RNA, 19 nt, Artificial Sequence
  Description of Artificial Sequence: Synthetic oligonucleotide
gcuccucuauaggaacuug

SEQ ID NO: 326103 - RNA, 19 nt, Artificial Sequence
  Description of Artificial Sequence: Synthetic oligonucleotide
gagcgacccucacacuugu

SEQ ID NO: 326104 - RNA, 19 nt, Artificial Sequence
  Description of Artificial Sequence: Synthetic oligonucleotide
ucaauccgguggcgaucau

SEQ ID NO: 326105 - RNA, 19 nt, Artificial Sequence
  Description of Artificial Sequence: Synthetic oligonucleotide
cucacccggaauacugccu

SEQ ID NO: 326106 - RNA, 19 nt, Artificial Sequence
  Description of Artificial Sequence: Synthetic oligonucleotide
ccucgugcugguguugggc

SEQ ID NO: 326107 - RNA, 19 nt, Artificial Sequence
  Description of Artificial Sequence: Synthetic oligonucleotide
caccgucaccuggaagcag

SEQ ID NO: 326108 - RNA, 19 nt, Artificial Sequence
  Description of Artificial Sequence: Synthetic oligonucleotide
ggccuuuaggccacagauc

SEQ ID NO: 326109 - RNA, 19 nt, Artificial Sequence
  Description of Artificial Sequence: Synthetic oligonucleotide
ggccugguuugagaucugc

SEQ ID NO: 326110 - RNA, 19 nt, Artificial Sequence
  Description of Artificial Sequence: Synthetic oligonucleotide
ggucucgcuucuucacaca

SEQ ID NO: 326111 - RNA, 19 nt, Artificial Sequence
  Description of Artificial Sequence: Synthetic oligonucleotide
gguuugagaucugcccaga

SEQ ID NO: 326112 - RNA, 19 nt, Artificial Sequence
  Description of Artificial Sequence: Synthetic oligonucleotide
gucccguguagccauugau

SEQ ID NO: 326113 - RNA, 19 nt, Artificial Sequence
  Description of Artificial Sequence: Synthetic oligonucleotide
ggugagguggguccuuggu

SEQ ID NO: 326114 - RNA, 19 nt, Artificial Sequence
  Description of Artificial Sequence: Synthetic oligonucleotide
cgaacuguuccuggucccg

SEQ ID NO: 326115 - RNA, 19 nt, Artificial Sequence
  Description of Artificial Sequence: Synthetic oligonucleotide
agccccucgugcugguguu

SEQ ID NO: 326116 - RNA, 19 nt, Artificial Sequence
  Description of Artificial Sequence: Synthetic oligonucleotide
gugugccuuccccggccug

SEQ ID NO: 326117 - RNA, 19 nt, Artificial Sequence
  Description of Artificial Sequence: Synthetic oligonucleotide
cuuuugcguuucucuucaa

SEQ ID NO: 326118 - RNA, 19 nt, Artificial Sequence
  Description of Artificial Sequence: Synthetic oligonucleotide
gggauguuggaaagguaua

SEQ ID NO: 326119 - RNA, 19 nt, Artificial Sequence
  Description of Artificial Sequence: Synthetic oligonucleotide
gcacagcaauacgucgugc

SEQ ID NO: 326120 - RNA, 19 nt, Artificial Sequence
  Description of Artificial Sequence: Synthetic oligonucleotide
gagacacgcacaggagccu

SEQ ID NO: 326121 - RNA, 19 nt, Artificial Sequence
  Description of Artificial Sequence: Synthetic oligonucleotide
ggccacagauccagcuugc

SEQ ID NO: 326122 - RNA, 19 nt, Artificial Sequence
  Description of Artificial Sequence: Synthetic oligonucleotide
uggggaggaccuggggcua

SEQ ID NO: 326123 - RNA, 19 nt, Artificial Sequence
  Description of Artificial Sequence: Synthetic oligonucleotide
gcgcgcuaaagcgaagcca

SEQ ID NO: 326124 - RNA, 19 nt, Artificial Sequence
  Description of Artificial Sequence: Synthetic oligonucleotide
cccuuaggagcugaucuga

SEQ ID NO: 326125 - RNA, 19 nt, Artificial Sequence
  Description of Artificial Sequence: Synthetic oligonucleotide
gcaauacgucgugcuggag

SEQ ID NO: 326126 - RNA, 19 nt, Artificial Sequence
  Description of Artificial Sequence: Synthetic oligonucleotide
cgguuuacucggcagaucu

SEQ ID NO: 326127 - RNA, 19 nt, Artificial Sequence
  Description of Artificial Sequence: Synthetic oligonucleotide
ccuuuaggccacagaucca

SEQ ID NO: 326128 - RNA, 19 nt, Artificial Sequence
  Description of Artificial Sequence: Synthetic oligonucleotide
ccccucgugcugguguugg

SEQ ID NO: 326129 - RNA, 19 nt, Artificial Sequence
  Description of Artificial Sequence: Synthetic oligonucleotide
gcguauggaggaguccgga

SEQ ID NO: 326130 - RNA, 19 nt, Artificial Sequence
  Description of Artificial Sequence: Synthetic oligonucleotide
gccccguuguuugggcugc

SEQ ID NO: 326131 - RNA, 19 nt, Artificial Sequence
  Description of Artificial Sequence: Synthetic oligonucleotide
gcaccgucaccuggaagca

SEQ ID NO: 326132 - RNA, 19 nt, Artificial Sequence
  Description of Artificial Sequence: Synthetic oligonucleotide
cccucgugcugguguuggg

SEQ ID NO: 326133 - RNA, 19 nt, Artificial Sequence
  Description of Artificial Sequence: Synthetic oligonucleotide
cagcggucugggcagaguu

SEQ ID NO: 326134 - RNA, 19 nt, Artificial Sequence
  Description of Artificial Sequence: Synthetic oligonucleotide
gggaugucucagacucaac

SEQ ID NO: 326135 - RNA, 19 nt, Artificial Sequence
  Description of Artificial Sequence: Synthetic oligonucleotide
cagggagauucgaacuguu

SEQ ID NO: 326136 - RNA, 19 nt, Artificial Sequence
  Description of Artificial Sequence: Synthetic oligonucleotide
gcuucgggaaggcuucaau

SEQ ID NO: 326137 - RNA, 19 nt, Artificial Sequence
  Description of Artificial Sequence: Synthetic oligonucleotide
cgcgcuaaagcgaagccau

SEQ ID NO: 326138 - RNA, 19 nt, Artificial Sequence
  Description of Artificial Sequence: Synthetic oligonucleotide
ggucagcguauggaggagu

SEQ ID NO: 326139 - RNA, 19 nt, Artificial Sequence
  Description of Artificial Sequence: Synthetic oligonucleotide
augcagcggucugggcaga

SEQ ID NO: 326140 - RNA, 19 nt, Artificial Sequence
  Description of Artificial Sequence: Synthetic oligonucleotide
gccugccugaugggucccg

SEQ ID NO: 326141 - RNA, 19 nt, Artificial Sequence
  Description of Artificial Sequence: Synthetic oligonucleotide
cggcgcgcuaaagcgaagc

SEQ ID NO: 326142 - RNA, 19 nt, Artificial Sequence
  Description of Artificial Sequence: Synthetic oligonucleotide
ccacuugccggugcacauc

SEQ ID NO: 326143 - RNA, 19 nt, Artificial Sequence
  Description of Artificial Sequence: Synthetic oligonucleotide
ccgcaccgucaccuggaag

SEQ ID NO: 326144 - RNA, 19 nt, Artificial Sequence
  Description of Artificial Sequence: Synthetic oligonucleotide
ccgguuuacucggcagauc

SEQ ID NO: 326145 - RNA, 19 nt, Artificial Sequence
  Description of Artificial Sequence: Synthetic oligonucleotide
uuccccggccugggugguc

SEQ ID NO: 326146 - RNA, 19 nt, Artificial Sequence
  Description of Artificial Sequence: Synthetic oligonucleotide
cgugauaauaaggcgucau

SEQ ID NO: 326147 - RNA, 19 nt, Artificial Sequence
  Description of Artificial Sequence: Synthetic oligonucleotide
agcgacccucacacuugua

SEQ ID NO: 326148 - RNA, 19 nt, Artificial Sequence
  Description of Artificial Sequence: Synthetic oligonucleotide
gcgcuggcugauggcuugc

SEQ ID NO: 326149 - RNA, 19 nt, Artificial Sequence
  Description of Artificial Sequence: Synthetic oligonucleotide
gguuuacucggcagaucuu

SEQ ID NO: 326150 - RNA, 19 nt, Artificial Sequence
  Description of Artificial Sequence: Synthetic oligonucleotide
ggccugccugauggguccc

SEQ ID NO: 326151 - RNA, 19 nt, Artificial Sequence
  Description of Artificial Sequence: Synthetic oligonucleotide
gcugagcgacccucacacu

SEQ ID NO: 326152 - RNA, 19 nt, Artificial Sequence
  Description of Artificial Sequence: Synthetic oligonucleotide
cgcggcgcgcuaaagcgaa

SEQ ID NO: 326153 - RNA, 19 nt, Artificial Sequence
  Description of Artificial Sequence: Synthetic oligonucleotide
cgaucagaaggccgccgaa

SEQ ID NO: 326154 - RNA, 19 nt, Artificial Sequence
  Description of Artificial Sequence: Synthetic oligonucleotide
cccguuguuugggcugcuc

SEQ ID NO: 326155 - RNA, 19 nt, Artificial Sequence
  Description of Artificial Sequence: Synthetic oligonucleotide
cgucgugcuggaggccggg

SEQ ID NO: 326156 - RNA, 19 nt, Artificial Sequence
  Description of Artificial Sequence: Synthetic oligonucleotide
ccgcggcgcgcuaaagcga

SEQ ID NO: 326157 - RNA, 19 nt, Artificial Sequence
  Description of Artificial Sequence: Synthetic oligonucleotide
ggccgggguucaguagguc

SEQ ID NO: 326158 - RNA, 19 nt, Artificial Sequence
  Description of Artificial Sequence: Synthetic oligonucleotide
gccccucgugcugguguug

SEQ ID NO: 326159 - RNA, 19 nt, Artificial Sequence
  Description of Artificial Sequence: Synthetic oligonucleotide
gcaauacguaagggcugcu

SEQ ID NO: 326160 - RNA, 19 nt, Artificial Sequence
  Description of Artificial Sequence: Synthetic oligonucleotide
gcggaaacgcaugccccgu

SEQ ID NO: 326161 - RNA, 19 nt, Artificial Sequence
  Description of Artificial Sequence: Synthetic oligonucleotide
gcggcgcgcuaaagcgaag

SEQ ID NO: 326162 - RNA, 19 nt, Artificial Sequence
  Description of Artificial Sequence: Synthetic oligonucleotide
cguagguccuuuugcguuu

SEQ ID NO: 326163 - RNA, 19 nt, Artificial Sequence
  Description of Artificial Sequence: Synthetic oligonucleotide
cccacgcugcuccucuaua

SEQ ID NO: 326164 - RNA, 19 nt, Artificial Sequence
  Description of Artificial Sequence: Synthetic oligonucleotide
cccuaccaagaagggagcu

SEQ ID NO: 326165 - RNA, 19 nt, Artificial Sequence
  Description of Artificial Sequence: Synthetic oligonucleotide
ccguguagccauugaucuu

SEQ ID NO: 326166 - RNA, 19 nt, Artificial Sequence
  Description of Artificial Sequence: Synthetic oligonucleotide
cuggucccguguagccauu

SEQ ID NO: 326167 - RNA, 19 nt, Artificial Sequence
  Description of Artificial Sequence: Synthetic oligonucleotide
cugagcccgcggcgcgcua

SEQ ID NO: 326168 - RNA, 19 nt, Artificial Sequence
  Description of Artificial Sequence: Synthetic oligonucleotide
ggccggugagguggguccu

SEQ ID NO: 326169 - RNA, 19 nt, Artificial Sequence
  Description of Artificial Sequence: Synthetic oligonucleotide
gcccugcuauuaaggcacu

SEQ ID NO: 326170 - RNA, 19 nt, Artificial Sequence
  Description of Artificial Sequence: Synthetic oligonucleotide
cccugucacuagccgaguu

SEQ ID NO: 326171 - RNA, 19 nt, Artificial Sequence
  Description of Artificial Sequence: Synthetic oligonucleotide
ccgagguccccaggggugu

SEQ ID NO: 326172 - RNA, 19 nt, Artificial Sequence
  Description of Artificial Sequence: Synthetic oligonucleotide
cccggaguuccgguuuacu

SEQ ID NO: 326173 - RNA, 19 nt, Artificial Sequence
  Description of Artificial Sequence: Synthetic oligonucleotide
gcgcuaaagcgaagccauu

SEQ ID NO: 326174 - RNA, 19 nt, Artificial Sequence
  Description of Artificial Sequence: Synthetic oligonucleotide
ccccguuguuugggcugcu

SEQ ID NO: 326175 - RNA, 19 nt, Artificial Sequence
  Description of Artificial Sequence: Synthetic oligonucleotide
cccggccuggguggucuuu

SEQ ID NO: 326176 - RNA, 19 nt, Artificial Sequence
  Description of Artificial Sequence: Synthetic oligonucleotide
aauagcauugagcacucgc

SEQ ID NO: 326177 - RNA, 19 nt, Artificial Sequence
  Description of Artificial Sequence: Synthetic oligonucleotide
aacuaugugaauaaacagc

SEQ ID NO: 326178 - RNA, 19 nt, Artificial Sequence
  Description of Artificial Sequence: Synthetic oligonucleotide
agcuuuagccaccagagcc

SEQ ID NO: 326179 - RNA, 19 nt, Artificial Sequence
  Description of Artificial Sequence: Synthetic oligonucleotide
ugucgauacaaacucaggg

SEQ ID NO: 326180 - RNA, 19 nt, Artificial Sequence
  Description of Artificial Sequence: Synthetic oligonucleotide
uuuaggugcagcaacacug

SEQ ID NO: 326181 - RNA, 19 nt, Artificial Sequence
  Description of Artificial Sequence: Synthetic oligonucleotide
cagaauaugaaacaccagg

SEQ ID NO: 326182 - RNA, 19 nt, Artificial Sequence
  Description of Artificial Sequence: Synthetic oligonucleotide
uagagaaaggucuaggaag

SEQ ID NO: 326183 - RNA, 19 nt, Artificial Sequence
  Description of Artificial Sequence: Synthetic oligonucleotide
auugaggcaauuuugaaga

SEQ ID NO: 326184 - RNA, 19 nt, Artificial Sequence
  Description of Artificial Sequence: Synthetic oligonucleotide
gaagauucggaccccaucg

SEQ ID NO: 326185 - RNA, 19 nt, Artificial Sequence
  Description of Artificial Sequence: Synthetic oligonucleotide
aacuaugguaacuauguga

SEQ ID NO: 326186 - RNA, 19 nt, Artificial Sequence
  Description of Artificial Sequence: Synthetic oligonucleotide
acaacaacuauucugaauu

SEQ ID NO: 326187 - RNA, 19 nt, Artificial Sequence
  Description of Artificial Sequence: Synthetic oligonucleotide
aacuauucugaauuagugu

SEQ ID NO: 326188 - RNA, 19 nt, Artificial Sequence
  Description of Artificial Sequence: Synthetic oligonucleotide
ucgauacaaacucagggcc

SEQ ID NO: 326189 - RNA, 19 nt, Artificial Sequence
  Description of Artificial Sequence: Synthetic oligonucleotide
uuuguaaguuccuauuccc

SEQ ID NO: 326190 - RNA, 19 nt, Artificial Sequence
  Description of Artificial Sequence: Synthetic oligonucleotide
gaugcuuacagaacugucg

SEQ ID NO: 326191 - RNA, 19 nt, Artificial Sequence
  Description of Artificial Sequence: Synthetic oligonucleotide
aggguaaagcgauaagccc

SEQ ID NO: 326192 - RNA, 19 nt, Artificial Sequence
  Description of Artificial Sequence: Synthetic oligonucleotide
aauacaagccuguccagca

SEQ ID NO: 326193 - RNA, 19 nt, Artificial Sequence
  Description of Artificial Sequence: Synthetic oligonucleotide
aagcccguaaacuaguacu

SEQ ID NO: 326194 - RNA, 19 nt, Artificial Sequence
  Description of Artificial Sequence: Synthetic oligonucleotide
ugauggcuaguucagugcg

SEQ ID NO: 326195 - RNA, 19 nt, Artificial Sequence
  Description of Artificial Sequence: Synthetic oligonucleotide
cucagugcuaguuugcucc

SEQ ID NO: 326196 - RNA, 19 nt, Artificial Sequence
  Description of Artificial Sequence: Synthetic oligonucleotide
uauauuggcuauaggucag

SEQ ID NO: 326197 - RNA, 19 nt, Artificial Sequence
  Description of Artificial Sequence: Synthetic oligonucleotide
cagcuucugauuaauagcc

SEQ ID NO: 326198 - RNA, 19 nt, Artificial Sequence
  Description of Artificial Sequence: Synthetic oligonucleotide
aaagcgauaagccccucgu

SEQ ID NO: 326199 - RNA, 19 nt, Artificial Sequence
  Description of Artificial Sequence: Synthetic oligonucleotide
caaacugaaugcuuucggg

SEQ ID NO: 326200 - RNA, 19 nt, Artificial Sequence
  Description of Artificial Sequence: Synthetic oligonucleotide
auuaauagcccgugcuacg

SEQ ID NO: 326201 - RNA, 19 nt, Artificial Sequence
  Description of Artificial Sequence: Synthetic oligonucleotide
uugaauuuaauaccaccuc

SEQ ID NO: 326202 - RNA, 19 nt, Artificial Sequence
  Description of Artificial Sequence: Synthetic oligonucleotide
gauuguaaagguccuucag

SEQ ID NO: 326203 - RNA, 19 nt, Artificial Sequence
  Description of Artificial Sequence: Synthetic oligonucleotide
cucaguagagcaaugggac

SEQ ID NO: 326204 - RNA, 19 nt, Artificial Sequence
  Description of Artificial Sequence: Synthetic oligonucleotide
caggguaaagcgauaagcc

SEQ ID NO: 326205 - RNA, 19 nt, Artificial Sequence
  Description of Artificial Sequence: Synthetic oligonucleotide
ucaggguaaagcgauaagc

SEQ ID NO: 326206 - RNA, 19 nt, Artificial Sequence
  Description of Artificial Sequence: Synthetic oligonucleotide
auuguaaagguccuucaga

SEQ ID NO: 326207 - RNA, 19 nt, Artificial Sequence
  Description of Artificial Sequence: Synthetic oligonucleotide
aggcgugucacccagcuuc

SEQ ID NO: 326208 - RNA, 19 nt, Artificial Sequence
  Description of Artificial Sequence: Synthetic oligonucleotide
cuggguuauaacuaacccc

SEQ ID NO: 326209 - RNA, 19 nt, Artificial Sequence
  Description of Artificial Sequence: Synthetic oligonucleotide
uauuuauuauguuguuuca

SEQ ID NO: 326210 - RNA, 19 nt, Artificial Sequence
  Description of Artificial Sequence: Synthetic oligonucleotide
acuaugugaauaaacagcu

SEQ ID NO: 326211 - RNA, 19 nt, Artificial Sequence
  Description of Artificial Sequence: Synthetic oligonucleotide
gaacugucgauacaaacuc

SEQ ID NO: 326212 - RNA, 19 nt, Artificial Sequence
  Description of Artificial Sequence: Synthetic oligonucleotide
guaccugcuccccugaucg

SEQ ID NO: 326213 - RNA, 19 nt, Artificial Sequence
  Description of Artificial Sequence: Synthetic oligonucleotide
ucuuuuaggcuagacagca

SEQ ID NO: 326214 - RNA, 19 nt, Artificial Sequence
  Description of Artificial Sequence: Synthetic oligonucleotide
auuccggugcucaauagcc

SEQ ID NO: 326215 - RNA, 19 nt, Artificial Sequence
  Description of Artificial Sequence: Synthetic oligonucleotide
cucgguuucauuccggugc

SEQ ID NO: 326216 - RNA, 19 nt, Artificial Sequence
  Description of Artificial Sequence: Synthetic oligonucleotide
cuuacagaacugucgauac

SEQ ID NO: 326217 - RNA, 19 nt, Artificial Sequence
  Description of Artificial Sequence: Synthetic oligonucleotide
gucgauacaaacucagggc

SEQ ID NO: 326218 - RNA, 19 nt, Artificial Sequence
  Description of Artificial Sequence: Synthetic oligonucleotide
aaucggugauuucuugcuc

SEQ ID NO: 326219 - RNA, 19 nt, Artificial Sequence
  Description of Artificial Sequence: Synthetic oligonucleotide
caacuauucugaauuagug

SEQ ID NO: 326220 - RNA, 19 nt, Artificial Sequence
  Description of Artificial Sequence: Synthetic oligonucleotide
uagaucuccaguacuggcc

SEQ ID NO: 326221 - RNA, 19 nt, Artificial Sequence
  Description of Artificial Sequence: Synthetic oligonucleotide
uaaagcgauaagccccucg

SEQ ID NO: 326222 - RNA, 19 nt, Artificial Sequence
  Description of Artificial Sequence: Synthetic oligonucleotide
caauucgcucuucagaagc

SEQ ID NO: 326223 - RNA, 19 nt, Artificial Sequence
  Description of Artificial Sequence: Synthetic oligonucleotide
uuuuaggcuagacagcaua

SEQ ID NO: 326224 - RNA, 19 nt, Artificial Sequence
  Description of Artificial Sequence: Synthetic oligonucleotide
ggaagcauacuucuuagcc

SEQ ID NO: 326225 - RNA, 19 nt, Artificial Sequence
  Description of Artificial Sequence: Synthetic oligonucleotide
aguaggaguccucaucuag

SEQ ID NO: 326226 - RNA, 19 nt, Artificial Sequence
  Description of Artificial Sequence: Synthetic oligonucleotide
cacguccccaacaagaagc

SEQ ID NO: 326227 - RNA, 19 nt, Artificial Sequence
  Description of Artificial Sequence: Synthetic oligonucleotide
ugugucguguagagaaagg

SEQ ID NO: 326228 - RNA, 19 nt, Artificial Sequence
  Description of Artificial Sequence: Synthetic oligonucleotide
aauagcccgugcuacgucu

SEQ ID NO: 326229 - RNA, 19 nt, Artificial Sequence
  Description of Artificial Sequence: Synthetic oligonucleotide
aaugugguagucccuaaua

SEQ ID NO: 326230 - RNA, 19 nt, Artificial Sequence
  Description of Artificial Sequence: Synthetic oligonucleotide
ucugcuucggaggagcccg

SEQ ID NO: 326231 - RNA, 19 nt, Artificial Sequence
  Description of Artificial Sequence: Synthetic oligonucleotide
cagcauacaacaacuauuc

SEQ ID NO: 326232 - RNA, 19 nt, Artificial Sequence
  Description of Artificial Sequence: Synthetic oligonucleotide
ugacacaugcgcacgaaac

SEQ ID NO: 326233 - RNA, 19 nt, Artificial Sequence
  Description of Artificial Sequence: Synthetic oligonucleotide
uuuaggcuagacagcauac

SEQ ID NO: 326234 - RNA, 19 nt, Artificial Sequence
  Description of Artificial Sequence: Synthetic oligonucleotide
augugguagucccuaauag

SEQ ID NO: 326235 - RNA, 19 nt, Artificial Sequence
  Description of Artificial Sequence: Synthetic oligonucleotide
ucgcucuucagaagcauag

SEQ ID NO: 326236 - RNA, 19 nt, Artificial Sequence
  Description of Artificial Sequence: Synthetic oligonucleotide
caggacucgguucugaagc

SEQ ID NO: 326237 - RNA, 19 nt, Artificial Sequence
  Description of Artificial Sequence: Synthetic oligonucleotide
agaaaggucuaggaagugg

SEQ ID NO: 326238 - RNA, 19 nt, Artificial Sequence
  Description of Artificial Sequence: Synthetic oligonucleotide
acucgcauaucugaauagc

SEQ ID NO: 326239 - RNA, 19 nt, Artificial Sequence
  Description of Artificial Sequence: Synthetic oligonucleotide
gcauacaacaacuauucug

SEQ ID NO: 326240 - RNA, 19 nt, Artificial Sequence
  Description of Artificial Sequence: Synthetic oligonucleotide
agugugaaagauccgggca

SEQ ID NO: 326241 - RNA, 19 nt, Artificial Sequence
  Description of Artificial Sequence: Synthetic oligonucleotide
agcucaggcacuaaguagg

SEQ ID NO: 326242 - RNA, 19 nt, Artificial Sequence
  Description of Artificial Sequence: Synthetic oligonucleotide
gauuaauagcccgugcuac

SEQ ID NO: 326243 - RNA, 19 nt, Artificial Sequence
  Description of Artificial Sequence: Synthetic oligonucleotide
cuuuuguaaguuccuauuc

SEQ ID NO: 326244 - RNA, 19 nt, Artificial Sequence
  Description of Artificial Sequence: Synthetic oligonucleotide
cugaucguggcucauacuc

SEQ ID NO: 326245 - RNA, 19 nt, Artificial Sequence
  Description of Artificial Sequence: Synthetic oligonucleotide
cauuugauccucuguggcc

SEQ ID NO: 326246 - RNA, 19 nt, Artificial Sequence
  Description of Artificial Sequence: Synthetic oligonucleotide
uaaagccuccgcaauacaa

SEQ ID NO: 326247 - RNA, 19 nt, Artificial Sequence
  Description of Artificial Sequence: Synthetic oligonucleotide
uucuuuaggugcagcaaca

SEQ ID NO: 326248 - RNA, 19 nt, Artificial Sequence
  Description of Artificial Sequence: Synthetic oligonucleotide
ucuuucugggccuccaaca

SEQ ID NO: 326249 - RNA, 19 nt, Artificial Sequence
  Description of Artificial Sequence: Synthetic oligonucleotide
aaacucagugugaaagauc

SEQ ID NO: 326250 - RNA, 19 nt, Artificial Sequence
  Description of Artificial Sequence: Synthetic oligonucleotide
aggacgacugcaccagacc

SEQ ID NO: 326251 - RNA, 19 nt, Artificial Sequence
  Description of Artificial Sequence: Synthetic oligonucleotide
ugcuacgucuucaucugag

SEQ ID NO: 326252 - RNA, 19 nt, Artificial Sequence
  Description of Artificial Sequence: Synthetic oligonucleotide
acuaugguaacuaugugaa

SEQ ID NO: 326253 - RNA, 19 nt, Artificial Sequence
  Description of Artificial Sequence: Synthetic oligonucleotide
aaggauaagaguggugacu

SEQ ID NO: 326254 - RNA, 19 nt, Artificial Sequence
  Description of Artificial Sequence: Synthetic oligonucleotide
cucauauuuauuauguugu

SEQ ID NO: 326255 - RNA, 19 nt, Artificial Sequence
  Description of Artificial Sequence: Synthetic oligonucleotide
uuuaggagaagagguaccu

SEQ ID NO: 326256 - RNA, 19 nt, Artificial Sequence
  Description of Artificial Sequence: Synthetic oligonucleotide
ugaaccgacggaguugagg

SEQ ID NO: 326257 - RNA, 19 nt, Artificial Sequence
  Description of Artificial Sequence: Synthetic oligonucleotide
ugucguguagagaaagguc

SEQ ID NO: 326258 - RNA, 19 nt, Artificial Sequence
  Description of Artificial Sequence: Synthetic oligonucleotide
ugaucguggcucauacucc

SEQ ID NO: 326259 - RNA, 19 nt, Artificial Sequence
  Description of Artificial Sequence: Synthetic oligonucleotide
ugcuuauauuggcuauagg

SEQ ID NO: 326260 - RNA, 19 nt, Artificial Sequence
  Description of Artificial Sequence: Synthetic oligonucleotide
ggauucgaaagucacgugc

SEQ ID NO: 326261 - RNA, 19 nt, Artificial Sequence
  Description of Artificial Sequence: Synthetic oligonucleotide
aaacugucagguggaaauc

SEQ ID NO: 326262 - RNA, 19 nt, Artificial Sequence
  Description of Artificial Sequence: Synthetic oligonucleotide
gaccccaucgagcucaggc

SEQ ID NO: 326263 - RNA, 19 nt, Artificial Sequence
  Description of Artificial Sequence: Synthetic oligonucleotide
augcgcacgaaacugucag

SEQ ID NO: 326264 - RNA, 19 nt, Artificial Sequence
  Description of Artificial Sequence: Synthetic oligonucleotide
gauuucuugcucuuugaaa

SEQ ID NO: 326265 - RNA, 19 nt, Artificial Sequence
  Description of Artificial Sequence: Synthetic oligonucleotide
gaaacugucagguggaaau

SEQ ID NO: 326266 - RNA, 19 nt, Artificial Sequence
  Description of Artificial Sequence: Synthetic oligonucleotide
gagcucaggcacuaaguag

SEQ ID NO: 326267 - RNA, 19 nt, Artificial Sequence
  Description of Artificial Sequence: Synthetic oligonucleotide
gauuccaaugugguagucc

SEQ ID NO: 326268 - RNA, 19 nt, Artificial Sequence
  Description of Artificial Sequence: Synthetic oligonucleotide
ucaguagagcaaugggacc

SEQ ID NO: 326269 - RNA, 19 nt, Artificial Sequence
  Description of Artificial Sequence: Synthetic oligonucleotide
uccggaagucuccaugaag

SEQ ID NO: 326270 - RNA, 19 nt, Artificial Sequence
  Description of Artificial Sequence: Synthetic oligonucleotide
augcuuacagaacugucga

SEQ ID NO: 326271 - RNA, 19 nt, Artificial Sequence
  Description of Artificial Sequence: Synthetic oligonucleotide
agcgauaagccccucguga

SEQ ID NO: 326272 - RNA, 19 nt, Artificial Sequence
  Description of Artificial Sequence: Synthetic oligonucleotide
uaguacugcgccaucuucu

SEQ ID NO: 326273 - RNA, 19 nt, Artificial Sequence
  Description of Artificial Sequence: Synthetic oligonucleotide
uaaacuaguacugcgccau

SEQ ID NO: 326274 - RNA, 19 nt, Artificial Sequence
  Description of Artificial Sequence: Synthetic oligonucleotide
uuaggugcagcaacacugu

SEQ ID NO: 326275 - RNA, 19 nt, Artificial Sequence
  Description of Artificial Sequence: Synthetic oligonucleotide
uccucgauuuaguucauuc

SEQ ID NO: 326276 - RNA, 19 nt, Artificial Sequence
  Description of Artificial Sequence: Synthetic oligonucleotide
ucaauucgcucuucagaag

SEQ ID NO: 326277 - RNA, 19 nt, Artificial Sequence
  Description of Artificial Sequence: Synthetic oligonucleotide
uugauuguaaagguccuuc

SEQ ID NO: 326278 - RNA, 19 nt, Artificial Sequence
  Description of Artificial Sequence: Synthetic oligonucleotide
uacucgcauaucugaauag

SEQ ID NO: 326279 - RNA, 19 nt, Artificial Sequence
  Description of Artificial Sequence: Synthetic oligonucleotide
uucuuagccucauauuuau

SEQ ID NO: 326280 - RNA, 19 nt, Artificial Sequence
  Description of Artificial Sequence: Synthetic oligonucleotide
auucggaccccaucgagcu

SEQ ID NO: 326281 - RNA, 19 nt, Artificial Sequence
  Description of Artificial Sequence: Synthetic oligonucleotide
cuaaguaggaguccucauc

SEQ ID NO: 326282 - RNA, 19 nt, Artificial Sequence
  Description of Artificial Sequence: Synthetic oligonucleotide
gcacgaaacugucaggugg

SEQ ID NO: 326283 - RNA, 19 nt, Artificial Sequence
  Description of Artificial Sequence: Synthetic oligonucleotide
uuaguguuccaaauuuauu

SEQ ID NO: 326284 - RNA, 19 nt, Artificial Sequence
  Description of Artificial Sequence: Synthetic oligonucleotide
gaauuaguguuccaaauuu

SEQ ID NO: 326285 - RNA, 19 nt, Artificial Sequence
  Description of Artificial Sequence: Synthetic oligonucleotide
ccucauauuuauuauguug

SEQ ID NO: 326286 - RNA, 19 nt, Artificial Sequence
  Description of Artificial Sequence: Synthetic oligonucleotide
aaacuaguacugcgccauc

SEQ ID NO: 326287 - RNA, 19 nt, Artificial Sequence
  Description of Artificial Sequence: Synthetic oligonucleotide
ucgauuuaguucauucuuu

SEQ ID NO: 326288 - RNA, 19 nt, Artificial Sequence
  Description of Artificial Sequence: Synthetic oligonucleotide
agggauucgaaagucacgu

SEQ ID NO: 326289 - RNA, 19 nt, Artificial Sequence
  Description of Artificial Sequence: Synthetic oligonucleotide
caccagaccaucugcuucg

SEQ ID NO: 326290 - RNA, 19 nt, Artificial Sequence
  Description of Artificial Sequence: Synthetic oligonucleotide
guagaucuccaguacuggc

SEQ ID NO: 326291 - RNA, 19 nt, Artificial Sequence
  Description of Artificial Sequence: Synthetic oligonucleotide
acugucgauacaaacucag

SEQ ID NO: 326292 - RNA, 19 nt, Artificial Sequence
  Description of Artificial Sequence: Synthetic oligonucleotide
ugcgggagaagauucggac

SEQ ID NO: 326293 - RNA, 19 nt, Artificial Sequence
  Description of Artificial Sequence: Synthetic oligonucleotide
agaagcauagcuggcucgg

SEQ ID NO: 326294 - RNA, 19 nt, Artificial Sequence
  Description of Artificial Sequence: Synthetic oligonucleotide
uucggaggagcccggaugu

SEQ ID NO: 326295 - RNA, 19 nt, Artificial Sequence
  Description of Artificial Sequence: Synthetic oligonucleotide
ugaugcuuacagaacuguc

SEQ ID NO: 326296 - RNA, 19 nt, Artificial Sequence
  Description of Artificial Sequence: Synthetic oligonucleotide
aacugucagguggaaaucu

SEQ ID NO: 326297 - RNA, 19 nt, Artificial Sequence
  Description of Artificial Sequence: Synthetic oligonucleotide
auaccaccucucuccauac

SEQ ID NO: 326298 - RNA, 19 nt, Artificial Sequence
  Description of Artificial Sequence: Synthetic oligonucleotide
cuuucugggccuccaacag

SEQ ID NO: 326299 - RNA, 19 nt, Artificial Sequence
  Description of Artificial Sequence: Synthetic oligonucleotide
ggcuagacagcauacaaca

SEQ ID NO: 326300 - RNA, 19 nt, Artificial Sequence
  Description of Artificial Sequence: Synthetic oligonucleotide
uguaaacaccaggucagug

SEQ ID NO: 326301 - RNA, 19 nt, Artificial Sequence
  Description of Artificial Sequence: Synthetic oligonucleotide
uucgaggacgacugcacca

SEQ ID NO: 326302 - RNA, 19 nt, Artificial Sequence
  Description of Artificial Sequence: Synthetic oligonucleotide
aagauucggaccccaucga

SEQ ID NO: 326303 - RNA, 19 nt, Artificial Sequence
  Description of Artificial Sequence: Synthetic oligonucleotide
acaacuauucugaauuagu

SEQ ID NO: 326304 - RNA, 19 nt, Artificial Sequence
  Description of Artificial Sequence: Synthetic oligonucleotide
agauucggaccccaucgag

SEQ ID NO: 326305 - RNA, 19 nt, Artificial Sequence
  Description of Artificial Sequence: Synthetic oligonucleotide
ucggcugaccagccaaggg

SEQ ID NO: 326306 - RNA, 19 nt, Artificial Sequence
  Description of Artificial Sequence: Synthetic oligonucleotide
cugucgauacaaacucagg

SEQ ID NO: 326307 - RNA, 19 nt, Artificial Sequence
  Description of Artificial Sequence: Synthetic oligonucleotide
cagugugaaagauccgggc

SEQ ID NO: 326308 - RNA, 19 nt, Artificial Sequence
  Description of Artificial Sequence: Synthetic oligonucleotide
gaggcaauuuugaagaucu

SEQ ID NO: 326309 - RNA, 19 nt, Artificial Sequence
  Description of Artificial Sequence: Synthetic oligonucleotide
ucgcauaucugaauagcua

SEQ ID NO: 326310 - RNA, 19 nt, Artificial Sequence
  Description of Artificial Sequence: Synthetic oligonucleotide
cauuccggugcucaauagc

SEQ ID NO: 326311 - RNA, 19 nt, Artificial Sequence
  Description of Artificial Sequence: Synthetic oligonucleotide
gucccuaauagcauugagc

SEQ ID NO: 326312 - RNA, 19 nt, Artificial Sequence
  Description of Artificial Sequence: Synthetic oligonucleotide
ucauauuuauuauguuguu

SEQ ID NO: 326313 - RNA, 19 nt, Artificial Sequence
  Description of Artificial Sequence: Synthetic oligonucleotide
caucuuuaggagaagaggu

SEQ ID NO: 326314 - RNA, 19 nt, Artificial Sequence
  Description of Artificial Sequence: Synthetic oligonucleotide
uuaauagcccgugcuacgu

SEQ ID NO: 326315 - RNA, 19 nt, Artificial Sequence
  Description of Artificial Sequence: Synthetic oligonucleotide
aucgagcucaggcacuaag

SEQ ID NO: 326316 - RNA, 19 nt, Artificial Sequence
  Description of Artificial Sequence: Synthetic oligonucleotide
aauuaguguuccaaauuua

SEQ ID NO: 326317 - RNA, 19 nt, Artificial Sequence
  Description of Artificial Sequence: Synthetic oligonucleotide
agcuucugauuaauagccc

SEQ ID NO: 326318 - RNA, 19 nt, Artificial Sequence
  Description of Artificial Sequence: Synthetic oligonucleotide
cagaagcauagcuggcucg

SEQ ID NO: 326319 - RNA, 19 nt, Artificial Sequence
  Description of Artificial Sequence: Synthetic oligonucleotide
uucauuccggugcucaaua

SEQ ID NO: 326320 - RNA, 19 nt, Artificial Sequence
  Description of Artificial Sequence: Synthetic oligonucleotide
aacuaguacugcgccaucu

SEQ ID NO: 326321 - RNA, 19 nt, Artificial Sequence
  Description of Artificial Sequence: Synthetic oligonucleotide
gugguagucccuaauagca

SEQ ID NO: 326322 - RNA, 19 nt, Artificial Sequence
  Description of Artificial Sequence: Synthetic oligonucleotide
cuaauagcauugagcacuc

SEQ ID NO: 326323 - RNA, 19 nt, Artificial Sequence
  Description of Artificial Sequence: Synthetic oligonucleotide
gaaccgacggaguugaggu

SEQ ID NO: 326324 - RNA, 19 nt, Artificial Sequence
  Description of Artificial Sequence: Synthetic oligonucleotide
agccucauauuuauuaugu

SEQ ID NO: 326325 - RNA, 19 nt, Artificial Sequence
  Description of Artificial Sequence: Synthetic oligonucleotide
uauuggcuauaggucagag

SEQ ID NO: 326326 - RNA, 19 nt, Artificial Sequence
  Description of Artificial Sequence: Synthetic oligonucleotide
gaagcccguaaacuaguac

SEQ ID NO: 326327 - RNA, 19 nt, Artificial Sequence
  Description of Artificial Sequence: Synthetic oligonucleotide
auagcauugagcacucgca

SEQ ID NO: 326328 - RNA, 19 nt, Artificial Sequence
  Description of Artificial Sequence: Synthetic oligonucleotide
caggcacuaaguaggaguc

SEQ ID NO: 326329 - RNA, 19 nt, Artificial Sequence
  Description of Artificial Sequence: Synthetic oligonucleotide
ucauuccggugcucaauag

SEQ ID NO: 326330 - RNA, 19 nt, Artificial Sequence
  Description of Artificial Sequence: Synthetic oligonucleotide
caaggauaagaguggugac

SEQ ID NO: 326331 - RNA, 19 nt, Artificial Sequence
  Description of Artificial Sequence: Synthetic oligonucleotide
uacaggcccacucuuccac

SEQ ID NO: 326332 - RNA, 19 nt, Artificial Sequence
  Description of Artificial Sequence: Synthetic oligonucleotide
gaucguggcucauacucca

SEQ ID NO: 326333 - RNA, 19 nt, Artificial Sequence
  Description of Artificial Sequence: Synthetic oligonucleotide
aagagguaccugcuccccu

SEQ ID NO: 326334 - RNA, 19 nt, Artificial Sequence
  Description of Artificial Sequence: Synthetic oligonucleotide
auacaagccuguccagcag

SEQ ID NO: 326335 - RNA, 19 nt, Artificial Sequence
  Description of Artificial Sequence: Synthetic oligonucleotide
uuaggcuagacagcauaca

SEQ ID NO: 326336 - RNA, 19 nt, Artificial Sequence
  Description of Artificial Sequence: Synthetic oligonucleotide
acaagaagcaaagccuuga

SEQ ID NO: 326337 - RNA, 19 nt, Artificial Sequence
  Description of Artificial Sequence: Synthetic oligonucleotide
aaagucuccucgauuuagu

SEQ ID NO: 326338 - RNA, 19 nt, Artificial Sequence
  Description of Artificial Sequence: Synthetic oligonucleotide
ucuagacgccgcugaagcc

SEQ ID NO: 326339 - RNA, 19 nt, Artificial Sequence
  Description of Artificial Sequence: Synthetic oligonucleotide
ucguggcucauacuccagc

SEQ ID NO: 326340 - RNA, 19 nt, Artificial Sequence
  Description of Artificial Sequence: Synthetic oligonucleotide
gauaagccccucgugagga

SEQ ID NO: 326341 - RNA, 19 nt, Artificial Sequence
  Description of Artificial Sequence: Synthetic oligonucleotide
agagguaccugcuccccug

SEQ ID NO: 326342 - RNA, 19 nt, Artificial Sequence
  Description of Artificial Sequence: Synthetic oligonucleotide
aggcuagacagcauacaac

SEQ ID NO: 326343 - RNA, 19 nt, Artificial Sequence
  Description of Artificial Sequence: Synthetic oligonucleotide
gauggcuaguucagugcgg

SEQ ID NO: 326344 - RNA, 19 nt, Artificial Sequence
  Description of Artificial Sequence: Synthetic oligonucleotide
ucagccguggccccaucug

SEQ ID NO: 326345 - RNA, 19 nt, Artificial Sequence
  Description of Artificial Sequence: Synthetic oligonucleotide
cuaugugaauaaacagcuc

SEQ ID NO: 326346 - RNA, 19 nt, Artificial Sequence
  Description of Artificial Sequence: Synthetic oligonucleotide
aauucgcucuucagaagca

SEQ ID NO: 326347 - RNA, 19 nt, Artificial Sequence
  Description of Artificial Sequence: Synthetic oligonucleotide
cugcagagaugcuacucgc

SEQ ID NO: 326348 - RNA, 19 nt, Artificial Sequence
  Description of Artificial Sequence: Synthetic oligonucleotide
guaaacaccaggucagugu

SEQ ID NO: 326349 - RNA, 19 nt, Artificial Sequence
  Description of Artificial Sequence: Synthetic oligonucleotide
ugcuuucgggagcauugcc

SEQ ID NO: 326350 - RNA, 19 nt, Artificial Sequence
  Description of Artificial Sequence: Synthetic oligonucleotide
ugaggcaauuuugaagauc

SEQ ID NO: 326351 - RNA, 19 nt, Artificial Sequence
  Description of Artificial Sequence: Synthetic oligonucleotide
ugcgcacgaaacugucagg

SEQ ID NO: 326352 - RNA, 19 nt, Artificial Sequence
  Description of Artificial Sequence: Synthetic oligonucleotide
cugcuuauauuggcuauag

SEQ ID NO: 326353 - RNA, 19 nt, Artificial Sequence
  Description of Artificial Sequence: Synthetic oligonucleotide
aguugaaccgacggaguug

SEQ ID NO: 326354 - RNA, 19 nt, Artificial Sequence
  Description of Artificial Sequence: Synthetic oligonucleotide
cuuguacuucaggaaggcg

SEQ ID NO: 326355 - RNA, 19 nt, Artificial Sequence
  Description of Artificial Sequence: Synthetic oligonucleotide
ucgaggacgacugcaccag

SEQ ID NO: 326356 - RNA, 19 nt, Artificial Sequence
  Description of Artificial Sequence: Synthetic oligonucleotide
gugggacaaaaccaggcuc

SEQ ID NO: 326357 - RNA, 19 nt, Artificial Sequence
  Description of Artificial Sequence: Synthetic oligonucleotide
cucugcacgcuuguugugg

SEQ ID NO: 326358 - RNA, 19 nt, Artificial Sequence
  Description of Artificial Sequence: Synthetic oligonucleotide
uuccuugcuucgaggacga

SEQ ID NO: 326359 - RNA, 19 nt, Artificial Sequence
  Description of Artificial Sequence: Synthetic oligonucleotide
ccucauuugauccucugug

SEQ ID NO: 326360 - RNA, 19 nt, Artificial Sequence
  Description of Artificial Sequence: Synthetic oligonucleotide
agcacucgcagguccugac

SEQ ID NO: 326361 - RNA, 19 nt, Artificial Sequence
  Description of Artificial Sequence: Synthetic oligonucleotide
auaagaguggugacugugu

SEQ ID NO: 326362 - RNA, 19 nt, Artificial Sequence
  Description of Artificial Sequence: Synthetic oligonucleotide
augcuuucgggagcauugc

SEQ ID NO: 326363 - RNA, 19 nt, Artificial Sequence
  Description of Artificial Sequence: Synthetic oligonucleotide
cagguggaaaucugucaag

SEQ ID NO: 326364 - RNA, 19 nt, Artificial Sequence
  Description of Artificial Sequence: Synthetic oligonucleotide
acuaaguaggaguccucau

SEQ ID NO: 326365 - RNA, 19 nt, Artificial Sequence
  Description of Artificial Sequence: Synthetic oligonucleotide
caacuaugguaacuaugug

SEQ ID NO: 326366 - RNA, 19 nt, Artificial Sequence
  Description of Artificial Sequence: Synthetic oligonucleotide
gacagcauacaacaacuau

SEQ ID NO: 326367 - RNA, 19 nt, Artificial Sequence
  Description of Artificial Sequence: Synthetic oligonucleotide
guugaaccgacggaguuga

SEQ ID NO: 326368 - RNA, 19 nt, Artificial Sequence
  Description of Artificial Sequence: Synthetic oligonucleotide
cgcauaucugaauagcuag

SEQ ID NO: 326369 - RNA, 19 nt, Artificial Sequence
  Description of Artificial Sequence: Synthetic oligonucleotide
ugucagggauucgaaaguc

SEQ ID NO: 326370 - RNA, 19 nt, Artificial Sequence
  Description of Artificial Sequence: Synthetic oligonucleotide
aacugucgauacaaacuca

SEQ ID NO: 326371 - RNA, 19 nt, Artificial Sequence
  Description of Artificial Sequence: Synthetic oligonucleotide
cugugucguguagagaaag

SEQ ID NO: 326372 - RNA, 19 nt, Artificial Sequence
  Description of Artificial Sequence: Synthetic oligonucleotide
acgacugcaccagaccauc

SEQ ID NO: 326373 - RNA, 19 nt, Artificial Sequence
  Description of Artificial Sequence: Synthetic oligonucleotide
uccaaugugguagucccua

SEQ ID NO: 326374 - RNA, 19 nt, Artificial Sequence
  Description of Artificial Sequence: Synthetic oligonucleotide
cccguaaacuaguacugcg

SEQ ID NO: 326375 - RNA, 19 nt, Artificial Sequence
  Description of Artificial Sequence: Synthetic oligonucleotide
cacucgcagguccugacac

SEQ ID NO: 326376 - RNA, 19 nt, Artificial Sequence
  Description of Artificial Sequence: Synthetic oligonucleotide
ugugaaagauccgggcauc

SEQ ID NO: 326377 - RNA, 19 nt, Artificial Sequence
  Description of Artificial Sequence: Synthetic oligonucleotide
guacucgcauaucugaaua

SEQ ID NO: 326378 - RNA, 19 nt, Artificial Sequence
  Description of Artificial Sequence: Synthetic oligonucleotide
gucguguagagaaaggucu

SEQ ID NO: 326379 - RNA, 19 nt, Artificial Sequence
  Description of Artificial Sequence: Synthetic oligonucleotide
uucgcucuucagaagcaua

SEQ ID NO: 326380 - RNA, 19 nt, Artificial Sequence
  Description of Artificial Sequence: Synthetic oligonucleotide
uaauagcccgugcuacguc

SEQ ID NO: 326381 - RNA, 19 nt, Artificial Sequence
  Description of Artificial Sequence: Synthetic oligonucleotide
accgacggaguugagguca

SEQ ID NO: 326382 - RNA, 19 nt, Artificial Sequence
  Description of Artificial Sequence: Synthetic oligonucleotide
ugcuucgaggacgacugca

SEQ ID NO: 326383 - RNA, 19 nt, Artificial Sequence
  Description of Artificial Sequence: Synthetic oligonucleotide
cguaaacuaguacugcgcc

SEQ ID NO: 326384 - RNA, 19 nt, Artificial Sequence
  Description of Artificial Sequence: Synthetic oligonucleotide
ucuggcccgcugaaucuug

SEQ ID NO: 326385 - RNA, 19 nt, Artificial Sequence
  Description of Artificial Sequence: Synthetic oligonucleotide
accccaucgagcucaggca

SEQ ID NO: 326386 - RNA, 19 nt, Artificial Sequence
  Description of Artificial Sequence: Synthetic oligonucleotide
gcauaucugaauagcuagg

SEQ ID NO: 326387 - RNA, 19 nt, Artificial Sequence
  Description of Artificial Sequence: Synthetic oligonucleotide
agcucgguuucauuccggu

SEQ ID NO: 326388 - RNA, 19 nt, Artificial Sequence
  Description of Artificial Sequence: Synthetic oligonucleotide
cucgugaggauggccaccc

SEQ ID NO: 326389 - RNA, 19 nt, Artificial Sequence
  Description of Artificial Sequence: Synthetic oligonucleotide
uaauagcauugagcacucg

SEQ ID NO: 326390 - RNA, 19 nt, Artificial Sequence
  Description of Artificial Sequence: Synthetic oligonucleotide
agaucucuacaaagggcag

SEQ ID NO: 326391 - RNA, 19 nt, Artificial Sequence
  Description of Artificial Sequence: Synthetic oligonucleotide
ggcucucuuucucauauuc

SEQ ID NO: 326392 - RNA, 19 nt, Artificial Sequence
  Description of Artificial Sequence: Synthetic oligonucleotide
ugaagcccguaaacuagua

SEQ ID NO: 326393 - RNA, 19 nt, Artificial Sequence
  Description of Artificial Sequence: Synthetic oligonucleotide
ugguuccggagagucauga

SEQ ID NO: 326394 - RNA, 19 nt, Artificial Sequence
  Description of Artificial Sequence: Synthetic oligonucleotide
agcccguaaacuaguacug

SEQ ID NO: 326395 - RNA, 19 nt, Artificial Sequence
  Description of Artificial Sequence: Synthetic oligonucleotide
cuucuagacgccgcugaag

SEQ ID NO: 326396 - RNA, 19 nt, Artificial Sequence
  Description of Artificial Sequence: Synthetic oligonucleotide
uuccaaugugguagucccu

SEQ ID NO: 326397 - RNA, 19 nt, Artificial Sequence
  Description of Artificial Sequence: Synthetic oligonucleotide
auaggucagagggauucca

SEQ ID NO: 326398 - RNA, 19 nt, Artificial Sequence
  Description of Artificial Sequence: Synthetic oligonucleotide
gaagcagaguagaucucca

SEQ ID NO: 326399 - RNA, 19 nt, Artificial Sequence
  Description of Artificial Sequence: Synthetic oligonucleotide
ggcuagaaggcucugccuc

SEQ ID NO: 326400 - RNA, 19 nt, Artificial Sequence
  Description of Artificial Sequence: Synthetic oligonucleotide
acaugcgcacgaaacuguc

SEQ ID NO: 326401 - RNA, 19 nt, Artificial Sequence
  Description of Artificial Sequence: Synthetic oligonucleotide
gacggaguugaggucacca

SEQ ID NO: 326402 - RNA, 19 nt, Artificial Sequence
  Description of Artificial Sequence: Synthetic oligonucleotide
agccacguccccaacaaga

SEQ ID NO: 326403 - RNA, 19 nt, Artificial Sequence
  Description of Artificial Sequence: Synthetic oligonucleotide
gcgauaagccccucgugag

SEQ ID NO: 326404 - RNA, 19 nt, Artificial Sequence
  Description of Artificial Sequence: Synthetic oligonucleotide
aggaaggcgcagguacucg

SEQ ID NO: 326405 - RNA, 19 nt, Artificial Sequence
  Description of Artificial Sequence: Synthetic oligonucleotide
gaugcuacucgccccucaa

SEQ ID NO: 326406 - RNA, 19 nt, Artificial Sequence
  Description of Artificial Sequence: Synthetic oligonucleotide
caaucggugauuucuugcu

SEQ ID NO: 326407 - RNA, 19 nt, Artificial Sequence
  Description of Artificial Sequence: Synthetic oligonucleotide
gcaauccuugaguuccucc

SEQ ID NO: 326408 - RNA, 19 nt, Artificial Sequence
  Description of Artificial Sequence: Synthetic oligonucleotide
uagucccuaauagcauuga

SEQ ID NO: 326409 - RNA, 19 nt, Artificial Sequence
  Description of Artificial Sequence: Synthetic oligonucleotide
agaugcuacucgccccuca

SEQ ID NO: 326410 - RNA, 19 nt, Artificial Sequence
  Description of Artificial Sequence: Synthetic oligonucleotide
cucgcauaucugaauagcu

SEQ ID NO: 326411 - RNA, 19 nt, Artificial Sequence
  Description of Artificial Sequence: Synthetic oligonucleotide
guagguacucaucugcuuu

SEQ ID NO: 326412 - RNA, 19 nt, Artificial Sequence
  Description of Artificial Sequence: Synthetic oligonucleotide
guacuggccgcaugcuggc

SEQ ID NO: 326413 - RNA, 19 nt, Artificial Sequence
  Description of Artificial Sequence: Synthetic oligonucleotide
gcagaguagaucuccagua

SEQ ID NO: 326414 - RNA, 19 nt, Artificial Sequence
  Description of Artificial Sequence: Synthetic oligonucleotide
ggacgacugcaccagacca

SEQ ID NO: 326415 - RNA, 19 nt, Artificial Sequence
  Description of Artificial Sequence: Synthetic oligonucleotide
augaagcccguaaacuagu

SEQ ID NO: 326416 - RNA, 19 nt, Artificial Sequence
  Description of Artificial Sequence: Synthetic oligonucleotide
cugaaugcuuucgggagca

SEQ ID NO: 326417 - RNA, 19 nt, Artificial Sequence
  Description of Artificial Sequence: Synthetic oligonucleotide
uuucgggagcauugcccac

SEQ ID NO: 326418 - RNA, 19 nt, Artificial Sequence
  Description of Artificial Sequence: Synthetic oligonucleotide
auauuggcuauaggucaga

SEQ ID NO: 326419 - RNA, 19 nt, Artificial Sequence
  Description of Artificial Sequence: Synthetic oligonucleotide
agucacgugccagcugcuc

SEQ ID NO: 326420 - RNA, 19 nt, Artificial Sequence
  Description of Artificial Sequence: Synthetic oligonucleotide
uugcuucgaggacgacugc

SEQ ID NO: 326421 - RNA, 19 nt, Artificial Sequence
  Description of Artificial Sequence: Synthetic oligonucleotide
uggcuaguucagugcggcc

SEQ ID NO: 326422 - RNA, 19 nt, Artificial Sequence
  Description of Artificial Sequence: Synthetic oligonucleotide
caacaacuauucugaauua

SEQ ID NO: 326423 - RNA, 19 nt, Artificial Sequence
  Description of Artificial Sequence: Synthetic oligonucleotide
augaaacaccaggcguguc

SEQ ID NO: 326424 - RNA, 19 nt, Artificial Sequence
  Description of Artificial Sequence: Synthetic oligonucleotide
aaaccaggcucagcucggu

SEQ ID NO: 326425 - RNA, 19 nt, Artificial Sequence
  Description of Artificial Sequence: Synthetic oligonucleotide
gggcuugugcucuggcccg

SEQ ID NO: 326426 - RNA, 19 nt, Artificial Sequence
  Description of Artificial Sequence: Synthetic oligonucleotide
cuggccgcaugcuggcagc

SEQ ID NO: 326427 - RNA, 19 nt, Artificial Sequence
  Description of Artificial Sequence: Synthetic oligonucleotide
uugaaccgacggaguugag

SEQ ID NO: 326428 - RNA, 19 nt, Artificial Sequence
  Description of Artificial Sequence: Synthetic oligonucleotide
acucgcagguccugacaca

SEQ ID NO: 326429 - RNA, 19 nt, Artificial Sequence
  Description of Artificial Sequence: Synthetic oligonucleotide
caugcgcacgaaacuguca

SEQ ID NO: 326430 - RNA, 19 nt, Artificial Sequence
  Description of Artificial Sequence: Synthetic oligonucleotide
gugugaaagauccgggcau

SEQ ID NO: 326431 - RNA, 19 nt, Artificial Sequence
  Description of Artificial Sequence: Synthetic oligonucleotide
cucggcugaccagccaagg

SEQ ID NO: 326432 - RNA, 19 nt, Artificial Sequence
  Description of Artificial Sequence: Synthetic oligonucleotide
auccgggcauccaggacuc

SEQ ID NO: 326433 - RNA, 19 nt, Artificial Sequence
  Description of Artificial Sequence: Synthetic oligonucleotide
guagccaaucggugauuuc

SEQ ID NO: 326434 - RNA, 19 nt, Artificial Sequence
  Description of Artificial Sequence: Synthetic oligonucleotide
ggcugaccagccaagggcc

SEQ ID NO: 326435 - RNA, 19 nt, Artificial Sequence
  Description of Artificial Sequence: Synthetic oligonucleotide
ugucacccagcuucugauu

SEQ ID NO: 326436 - RNA, 19 nt, Artificial Sequence
  Description of Artificial Sequence: Synthetic oligonucleotide
cuccuggugauugucaucu

SEQ ID NO: 326437 - RNA, 19 nt, Artificial Sequence
  Description of Artificial Sequence: Synthetic oligonucleotide
gccauugaggcaauuuuga

SEQ ID NO: 326438 - RNA, 19 nt, Artificial Sequence
  Description of Artificial Sequence: Synthetic oligonucleotide
acaagccuguccagcagca

SEQ ID NO: 326439 - RNA, 19 nt, Artificial Sequence
  Description of Artificial Sequence: Synthetic oligonucleotide
auucgcucuucagaagcau

SEQ ID NO: 326440 - RNA, 19 nt, Artificial Sequence
  Description of Artificial Sequence: Synthetic oligonucleotide
cucaggcacuaaguaggag

SEQ ID NO: 326441 - RNA, 19 nt, Artificial Sequence
  Description of Artificial Sequence: Synthetic oligonucleotide
caucuucuagacgccgcug

SEQ ID NO: 326442 - RNA, 19 nt, Artificial Sequence
  Description of Artificial Sequence: Synthetic oligonucleotide
ugccucaagcaugcuuucu

SEQ ID NO: 326443 - RNA, 19 nt, Artificial Sequence
  Description of Artificial Sequence: Synthetic oligonucleotide
gugucguguagagaaaggu

SEQ ID NO: 326444 - RNA, 19 nt, Artificial Sequence
  Description of Artificial Sequence: Synthetic oligonucleotide
gccaaucggugauuucuug

SEQ ID NO: 326445 - RNA, 19 nt, Artificial Sequence
  Description of Artificial Sequence: Synthetic oligonucleotide
cccaggcugauacagcuuc

SEQ ID NO: 326446 - RNA, 19 nt, Artificial Sequence
  Description of Artificial Sequence: Synthetic oligonucleotide
guggcaugccagaagcaga

SEQ ID NO: 326447 - RNA, 19 nt, Artificial Sequence
  Description of Artificial Sequence: Synthetic oligonucleotide
ggcuaguucagugcggcca

SEQ ID NO: 326448 - RNA, 19 nt, Artificial Sequence
  Description of Artificial Sequence: Synthetic oligonucleotide
ucgugaggauggccacccc

SEQ ID NO: 326449 - RNA, 19 nt, Artificial Sequence
  Description of Artificial Sequence: Synthetic oligonucleotide
gcagguacucgcauaucug

SEQ ID NO: 326450 - RNA, 19 nt, Artificial Sequence
  Description of Artificial Sequence: Synthetic oligonucleotide
gagguaccugcuccccuga

SEQ ID NO: 326451 - RNA, 19 nt, Artificial Sequence
  Description of Artificial Sequence: Synthetic oligonucleotide
agguacucgcauaucugaa

SEQ ID NO: 326452 - RNA, 19 nt, Artificial Sequence
  Description of Artificial Sequence: Synthetic oligonucleotide
cauugagcacucgcagguc

SEQ ID NO: 326453 - RNA, 19 nt, Artificial Sequence
  Description of Artificial Sequence: Synthetic oligonucleotide
cgugcuacgucuucaucug

SEQ ID NO: 326454 - RNA, 19 nt, Artificial Sequence
  Description of Artificial Sequence: Synthetic oligonucleotide
gcuacgucuucaucugaga

SEQ ID NO: 326455 - RNA, 19 nt, Artificial Sequence
  Description of Artificial Sequence: Synthetic oligonucleotide
ugcuccccugaucguggcu

SEQ ID NO: 326456 - RNA, 19 nt, Artificial Sequence
  Description of Artificial Sequence: Synthetic oligonucleotide
cuggcucucuuucucauau

SEQ ID NO: 326457 - RNA, 19 nt, Artificial Sequence
  Description of Artificial Sequence: Synthetic oligonucleotide
cuacaggcccacucuucca

SEQ ID NO: 326458 - RNA, 19 nt, Artificial Sequence
  Description of Artificial Sequence: Synthetic oligonucleotide
cugcgggagaagauucgga

SEQ ID NO: 326459 - RNA, 19 nt, Artificial Sequence
  Description of Artificial Sequence: Synthetic oligonucleotide
ggugacugugucguguaga

SEQ ID NO: 326460 - RNA, 19 nt, Artificial Sequence
  Description of Artificial Sequence: Synthetic oligonucleotide
cgggaagcauacuucuuag

SEQ ID NO: 326461 - RNA, 19 nt, Artificial Sequence
  Description of Artificial Sequence: Synthetic oligonucleotide
cccuaauagcauugagcac

SEQ ID NO: 326462 - RNA, 19 nt, Artificial Sequence
  Description of Artificial Sequence: Synthetic oligonucleotide
augcuacucgccccucaau

SEQ ID NO: 326463 - RNA, 19 nt, Artificial Sequence
  Description of Artificial Sequence: Synthetic oligonucleotide
uucggaccccaucgagcuc

SEQ ID NO: 326464 - RNA, 19 nt, Artificial Sequence
  Description of Artificial Sequence: Synthetic oligonucleotide
cugcuucggaggagcccgg

SEQ ID NO: 326465 - RNA, 19 nt, Artificial Sequence
  Description of Artificial Sequence: Synthetic oligonucleotide
ccaugaagcccguaaacua

SEQ ID NO: 326466 - RNA, 19 nt, Artificial Sequence
  Description of Artificial Sequence: Synthetic oligonucleotide
gacgccgcugaagccucag

SEQ ID NO: 326467 - RNA, 19 nt, Artificial Sequence
  Description of Artificial Sequence: Synthetic oligonucleotide
cacaugcgcacgaaacugu

SEQ ID NO: 326468 - RNA, 19 nt, Artificial Sequence
  Description of Artificial Sequence: Synthetic oligonucleotide
cccugaucguggcucauac

SEQ ID NO: 326469 - RNA, 19 nt, Artificial Sequence
  Description of Artificial Sequence: Synthetic oligonucleotide
gcucgguuucauuccggug

SEQ ID NO: 326470 - RNA, 19 nt, Artificial Sequence
  Description of Artificial Sequence: Synthetic oligonucleotide
cacgcuuguuguggccucc

SEQ ID NO: 326471 - RNA, 19 nt, Artificial Sequence
  Description of Artificial Sequence: Synthetic oligonucleotide
aucguggcucauacuccag

SEQ ID NO: 326472 - RNA, 19 nt, Artificial Sequence
  Description of Artificial Sequence: Synthetic oligonucleotide
gaggagcccggauguugca

SEQ ID NO: 326473 - RNA, 19 nt, Artificial Sequence
  Description of Artificial Sequence: Synthetic oligonucleotide
aagucacgugccagcugcu

SEQ ID NO: 326474 - RNA, 19 nt, Artificial Sequence
  Description of Artificial Sequence: Synthetic oligonucleotide
cugcuccccugaucguggc

SEQ ID NO: 326475 - RNA, 19 nt, Artificial Sequence
  Description of Artificial Sequence: Synthetic oligonucleotide
ggguugguuccggagaguc

SEQ ID NO: 326476 - RNA, 19 nt, Artificial Sequence
  Description of Artificial Sequence: Synthetic oligonucleotide
cgauaagccccucgugagg

SEQ ID NO: 326477 - RNA, 19 nt, Artificial Sequence
  Description of Artificial Sequence: Synthetic oligonucleotide
uaccugcuccccugaucgu

SEQ ID NO: 326478 - RNA, 19 nt, Artificial Sequence
  Description of Artificial Sequence: Synthetic oligonucleotide
gguaaagcgauaagccccu

SEQ ID NO: 326479 - RNA, 19 nt, Artificial Sequence
  Description of Artificial Sequence: Synthetic oligonucleotide
ggcacuaaguaggaguccu

SEQ ID NO: 326480 - RNA, 19 nt, Artificial Sequence
  Description of Artificial Sequence: Synthetic oligonucleotide
gcccguaaacuaguacugc

SEQ ID NO: 326481 - RNA, 19 nt, Artificial Sequence
  Description of Artificial Sequence: Synthetic oligonucleotide
gguacucgcauaucugaau

SEQ ID NO: 326482 - RNA, 19 nt, Artificial Sequence
  Description of Artificial Sequence: Synthetic oligonucleotide
gugcuacgucuucaucuga

SEQ ID NO: 326483 - RNA, 19 nt, Artificial Sequence
  Description of Artificial Sequence: Synthetic oligonucleotide
gccguggccccaucuguag

SEQ ID NO: 326484 - RNA, 19 nt, Artificial Sequence
  Description of Artificial Sequence: Synthetic oligonucleotide
ccgcugaaucuugucagcc

SEQ ID NO: 326485 - RNA, 19 nt, Artificial Sequence
  Description of Artificial Sequence: Synthetic oligonucleotide
uggguugguuccggagagu

SEQ ID NO: 326486 - RNA, 19 nt, Artificial Sequence
  Description of Artificial Sequence: Synthetic oligonucleotide
ccccaucgagcucaggcac

SEQ ID NO: 326487 - RNA, 19 nt, Artificial Sequence
  Description of Artificial Sequence: Synthetic oligonucleotide
ggugauugucaucuugauu

SEQ ID NO: 326488 - RNA, 19 nt, Artificial Sequence
  Description of Artificial Sequence: Synthetic oligonucleotide
ccuccggaagucuccauga

SEQ ID NO: 326489 - RNA, 19 nt, Artificial Sequence
  Description of Artificial Sequence: Synthetic oligonucleotide
agccaaucggugauuucuu

SEQ ID NO: 326490 - RNA, 19 nt, Artificial Sequence
  Description of Artificial Sequence: Synthetic oligonucleotide
ggguaaagccuccgcaaua

SEQ ID NO: 326491 - RNA, 19 nt, Artificial Sequence
  Description of Artificial Sequence: Synthetic oligonucleotide
cuaugguaacuaugugaau

SEQ ID NO: 326492 - RNA, 19 nt, Artificial Sequence
  Description of Artificial Sequence: Synthetic oligonucleotide
ccacguccccaacaagaag

SEQ ID NO: 326493 - RNA, 19 nt, Artificial Sequence
  Description of Artificial Sequence: Synthetic oligonucleotide
acgaaacugucagguggaa

SEQ ID NO: 326494 - RNA, 19 nt, Artificial Sequence
  Description of Artificial Sequence: Synthetic oligonucleotide
agguaccugcuccccugau

SEQ ID NO: 326495 - RNA, 19 nt, Artificial Sequence
  Description of Artificial Sequence: Synthetic oligonucleotide
ccgugcuacgucuucaucu

SEQ ID NO: 326496 - RNA, 19 nt, Artificial Sequence
  Description of Artificial Sequence: Synthetic oligonucleotide
cuuuuaggcuagacagcau

SEQ ID NO: 326497 - RNA, 19 nt, Artificial Sequence
  Description of Artificial Sequence: Synthetic oligonucleotide
gacgacugcaccagaccau

SEQ ID NO: 326498 - RNA, 19 nt, Artificial Sequence
  Description of Artificial Sequence: Synthetic oligonucleotide
gagaugcuacucgccccuc

SEQ ID NO: 326499 - RNA, 19 nt, Artificial Sequence
  Description of Artificial Sequence: Synthetic oligonucleotide
uacuggccgcaugcuggca

SEQ ID NO: 326500 - RNA, 19 nt, Artificial Sequence
  Description of Artificial Sequence: Synthetic oligonucleotide
caucuagcacaaacugaau

SEQ ID NO: 326501 - RNA, 19 nt, Artificial Sequence
  Description of Artificial Sequence: Synthetic oligonucleotide
acucgccccucaauucgcu

SEQ ID NO: 326502 - RNA, 19 nt, Artificial Sequence
  Description of Artificial Sequence: Synthetic oligonucleotide
ccccucgugaggauggcca

SEQ ID NO: 326503 - RNA, 19 nt, Artificial Sequence
  Description of Artificial Sequence: Synthetic oligonucleotide
cccacucucaauggccuug

SEQ ID NO: 326504 - RNA, 19 nt, Artificial Sequence
  Description of Artificial Sequence: Synthetic oligonucleotide
guaaagcgauaagccccuc

SEQ ID NO: 326505 - RNA, 19 nt, Artificial Sequence
  Description of Artificial Sequence: Synthetic oligonucleotide
gguugguuccggagaguca

SEQ ID NO: 326506 - RNA, 19 nt, Artificial Sequence
  Description of Artificial Sequence: Synthetic oligonucleotide
gguuccggagagucaugaa

SEQ ID NO: 326507 - RNA, 19 nt, Artificial Sequence
  Description of Artificial Sequence: Synthetic oligonucleotide
acgcuuguuguggccucca

SEQ ID NO: 326508 - RNA, 19 nt, Artificial Sequence
  Description of Artificial Sequence: Synthetic oligonucleotide
cugagacagcaacuauggu

SEQ ID NO: 326509 - RNA, 19 nt, Artificial Sequence
  Description of Artificial Sequence: Synthetic oligonucleotide
uggccgcaugcuggcagcu

SEQ ID NO: 326510 - RNA, 19 nt, Artificial Sequence
  Description of Artificial Sequence: Synthetic oligonucleotide
cuugauuguaaagguccuu

SEQ ID NO: 326511 - RNA, 19 nt, Artificial Sequence
  Description of Artificial Sequence: Synthetic oligonucleotide
ggagcccggauguugcagu

SEQ ID NO: 326512 - RNA, 19 nt, Artificial Sequence
  Description of Artificial Sequence: Synthetic oligonucleotide
cgcacgaaacugucaggug

SEQ ID NO: 326513 - RNA, 19 nt, Artificial Sequence
  Description of Artificial Sequence: Synthetic oligonucleotide
auagcccgugcuacgucuu

SEQ ID NO: 326514 - RNA, 19 nt, Artificial Sequence
  Description of Artificial Sequence: Synthetic oligonucleotide
gcacucgcagguccugaca

SEQ ID NO: 326515 - RNA, 19 nt, Artificial Sequence
  Description of Artificial Sequence: Synthetic oligonucleotide
gggguaaagccuccgcaau

SEQ ID NO: 326516 - RNA, 19 nt, Artificial Sequence
  Description of Artificial Sequence: Synthetic oligonucleotide
gcgcacgaaacugucaggu

SEQ ID NO: 326517 - RNA, 19 nt, Artificial Sequence
  Description of Artificial Sequence: Synthetic oligonucleotide
cccucgugaggauggccac

SEQ ID NO: 326518 - RNA, 19 nt, Artificial Sequence
  Description of Artificial Sequence: Synthetic oligonucleotide
gucagccguggccccaucu

SEQ ID NO: 326519 - RNA, 19 nt, Artificial Sequence
  Description of Artificial Sequence: Synthetic oligonucleotide
gccacguccccaacaagaa

SEQ ID NO: 326520 - RNA, 19 nt, Artificial Sequence
  Description of Artificial Sequence: Synthetic oligonucleotide
ggacaccucuggguuauaa

SEQ ID NO: 326521 - RNA, 19 nt, Artificial Sequence
  Description of Artificial Sequence: Synthetic oligonucleotide
ccucgugaggauggccacc

SEQ ID NO: 326522 - RNA, 19 nt, Artificial Sequence
  Description of Artificial Sequence: Synthetic oligonucleotide
ccguggccccaucuguagc

SEQ ID NO: 326523 - RNA, 19 nt, Artificial Sequence
  Description of Artificial Sequence: Synthetic oligonucleotide
gcacuaaguaggaguccuc

SEQ ID NO: 326524 - RNA, 19 nt, Artificial Sequence
  Description of Artificial Sequence: Synthetic oligonucleotide
gggcagguagccaaucggu

SEQ ID NO: 326525 - RNA, 19 nt, Artificial Sequence
  Description of Artificial Sequence: Synthetic oligonucleotide
uccuugcuucgaggacgac

SEQ ID NO: 326526 - RNA, 19 nt, Artificial Sequence
  Description of Artificial Sequence: Synthetic oligonucleotide
agccguggccccaucugua

SEQ ID NO: 326527 - RNA, 19 nt, Artificial Sequence
  Description of Artificial Sequence: Synthetic oligonucleotide
ccgacggaguugaggucac

SEQ ID NO: 326528 - RNA, 19 nt, Artificial Sequence
  Description of Artificial Sequence: Synthetic oligonucleotide
cauacuccagcagcuugau

SEQ ID NO: 326529 - RNA, 19 nt, Artificial Sequence
  Description of Artificial Sequence: Synthetic oligonucleotide
gccucauauuuauuauguu

SEQ ID NO: 326530 - RNA, 19 nt, Artificial Sequence
  Description of Artificial Sequence: Synthetic oligonucleotide
ucggaggagcccggauguu

SEQ ID NO: 326531 - RNA, 19 nt, Artificial Sequence
  Description of Artificial Sequence: Synthetic oligonucleotide
gguagccaaucggugauuu

SEQ ID NO: 326532 - RNA, 19 nt, Artificial Sequence
  Description of Artificial Sequence: Synthetic oligonucleotide
gccauggguugguuccgga

SEQ ID NO: 326533 - RNA, 19 nt, Artificial Sequence
  Description of Artificial Sequence: Synthetic oligonucleotide
cuccucggcugaccagcca

SEQ ID NO: 326534 - RNA, 19 nt, Artificial Sequence
  Description of Artificial Sequence: Synthetic oligonucleotide
ccaaugugguagucccuaa

SEQ ID NO: 326535 - RNA, 19 nt, Artificial Sequence
  Description of Artificial Sequence: Synthetic oligonucleotide
cagccguggccccaucugu

SEQ ID NO: 326536 - RNA, 19 nt, Artificial Sequence
  Description of Artificial Sequence: Synthetic oligonucleotide
uccccugaucguggcucau

SEQ ID NO: 326537 - RNA, 19 nt, Artificial Sequence
  Description of Artificial Sequence: Synthetic oligonucleotide
cgcagguacucgcauaucu

SEQ ID NO: 326538 - RNA, 19 nt, Artificial Sequence
  Description of Artificial Sequence: Synthetic oligonucleotide
ccggugcucaauagccaca

SEQ ID NO: 326539 - RNA, 19 nt, Artificial Sequence
  Description of Artificial Sequence: Synthetic oligonucleotide
ccguagguacucaucugcu

SEQ ID NO: 326540 - RNA, 19 nt, Artificial Sequence
  Description of Artificial Sequence: Synthetic oligonucleotide
cccgugcuacgucuucauc

SEQ ID NO: 326541 - RNA, 19 nt, Artificial Sequence
  Description of Artificial Sequence: Synthetic oligonucleotide
ccccucaauucgcucuuca

SEQ ID NO: 326542 - RNA, 19 nt, Artificial Sequence
  Description of Artificial Sequence: Synthetic oligonucleotide
uggacaccucuggguuaua

SEQ ID NO: 326543 - RNA, 19 nt, Artificial Sequence
  Description of Artificial Sequence: Synthetic oligonucleotide
gccccucgugaggauggcc

SEQ ID NO: 326544 - RNA, 19 nt, Artificial Sequence
  Description of Artificial Sequence: Synthetic oligonucleotide
ccccuaaagggcaggcacu

SEQ ID NO: 326545 - RNA, 19 nt, Artificial Sequence
  Description of Artificial Sequence: Synthetic oligonucleotide
ggaccccaucgagcucagg

SEQ ID NO: 326546 - RNA, 19 nt, Artificial Sequence
  Description of Artificial Sequence: Synthetic oligonucleotide
cucacacgggaagcauacu

SEQ ID NO: 326547 - RNA, 19 nt, Artificial Sequence
  Description of Artificial Sequence: Synthetic oligonucleotide
ggccaguggcaugccagaa

SEQ ID NO: 326548 - RNA, 19 nt, Artificial Sequence
  Description of Artificial Sequence: Synthetic oligonucleotide
cagugcggccacagccaua

SEQ ID NO: 326549 - RNA, 19 nt, Artificial Sequence
  Description of Artificial Sequence: Synthetic oligonucleotide
cgaaacugucagguggaaa

SEQ ID NO: 326550 - RNA, 19 nt, Artificial Sequence
  Description of Artificial Sequence: Synthetic oligonucleotide
ccugaucguggcucauacu

SEQ ID NO: 326551 - RNA, 19 nt, Artificial Sequence
  Description of Artificial Sequence: Synthetic oligonucleotide
ccaucgagcucaggcacua

SEQ ID NO: 326552 - RNA, 19 nt, Artificial Sequence
  Description of Artificial Sequence: Synthetic oligonucleotide
cccaucgagcucaggcacu

SEQ ID NO: 326553 - RNA, 19 nt, Artificial Sequence
  Description of Artificial Sequence: Synthetic oligonucleotide
gccuugcucagugcuaguu

SEQ ID NO: 326554 - RNA, 19 nt, Artificial Sequence
  Description of Artificial Sequence: Synthetic oligonucleotide
gcuauaggucagagggauu

SEQ ID NO: 326555 - RNA, 19 nt, Artificial Sequence
  Description of Artificial Sequence: Synthetic oligonucleotide
cguagguacucaucugcuu

SEQ ID NO: 326556 - RNA, 19 nt, Artificial Sequence
  Description of Artificial Sequence: Synthetic oligonucleotide
cuccucgauuuaguucauu

SEQ ID NO: 326557 - RNA, 19 nt, Artificial Sequence
  Description of Artificial Sequence: Synthetic oligonucleotide
gccccucaauucgcucuuc

SEQ ID NO: 326558 - RNA, 19 nt, Artificial Sequence
  Description of Artificial Sequence: Synthetic oligonucleotide
cggaccccaucgagcucag

SEQ ID NO: 326559 - RNA, 19 nt, Artificial Sequence
  Description of Artificial Sequence: Synthetic oligonucleotide
cgaggacgacugcaccaga

SEQ ID NO: 326560 - RNA, 19 nt, Artificial Sequence
  Description of Artificial Sequence: Synthetic oligonucleotide
cgacggaguugaggucacc

SEQ ID NO: 326561 - RNA, 19 nt, Artificial Sequence
  Description of Artificial Sequence: Synthetic oligonucleotide
gcuugugcucuggcccgcu

SEQ ID NO: 326562 - RNA, 19 nt, Artificial Sequence
  Description of Artificial Sequence: Synthetic oligonucleotide
cagugcuccaggggccauu

SEQ ID NO: 326563 - RNA, 19 nt, Artificial Sequence
  Description of Artificial Sequence: Synthetic oligonucleotide
cgacugcaccagaccaucu

SEQ ID NO: 326564 - RNA, 19 nt, Artificial Sequence
  Description of Artificial Sequence: Synthetic oligonucleotide
ccccugaucguggcucaua

SEQ ID NO: 326565 - RNA, 19 nt, Artificial Sequence
  Description of Artificial Sequence: Synthetic oligonucleotide
gcagugcuccaggggccau

SEQ ID NO: 326566 - RNA, 19 nt, Artificial Sequence
  Description of Artificial Sequence: Synthetic oligonucleotide
aacaucguuauccaggucc

SEQ ID NO: 326567 - RNA, 19 nt, Artificial Sequence
  Description of Artificial Sequence: Synthetic oligonucleotide
ugauagaucaacuugagug

SEQ ID NO: 326568 - RNA, 19 nt, Artificial Sequence
  Description of Artificial Sequence: Synthetic oligonucleotide
aaugauucauaagucagcc

SEQ ID NO: 326569 - RNA, 19 nt, Artificial Sequence
  Description of Artificial Sequence: Synthetic oligonucleotide
uauacaacguauacggagg

SEQ ID NO: 326570 - RNA, 19 nt, Artificial Sequence
  Description of Artificial Sequence: Synthetic oligonucleotide
uuauacaacguauacggag

SEQ ID NO: 326571 - RNA, 19 nt, Artificial Sequence
  Description of Artificial Sequence: Synthetic oligonucleotide
uggauaaucuguaacaugu

SEQ ID NO: 326572 - RNA, 19 nt, Artificial Sequence
  Description of Artificial Sequence: Synthetic oligonucleotide
uguacauuuaaaauagggu

SEQ ID NO: 326573 - RNA, 19 nt, Artificial Sequence
  Description of Artificial Sequence: Synthetic oligonucleotide
ucuguaacaugucauuggg

SEQ ID NO: 326574 - RNA, 19 nt, Artificial Sequence
  Description of Artificial Sequence: Synthetic oligonucleotide
aaacaggccacuauuaaac

SEQ ID NO: 326575 - RNA, 19 nt, Artificial Sequence
  Description of Artificial Sequence: Synthetic oligonucleotide
uauguaacgcuuuugguca

SEQ ID NO: 326576 - RNA, 19 nt, Artificial Sequence
  Description of Artificial Sequence: Synthetic oligonucleotide
acaaguuaagugcagugcg

SEQ ID NO: 326577 - RNA, 19 nt, Artificial Sequence
  Description of Artificial Sequence: Synthetic oligonucleotide
agagauaccuuauguaacg

SEQ ID NO: 326578 - RNA, 19 nt, Artificial Sequence
  Description of Artificial Sequence: Synthetic oligonucleotide
agaguaucaucuuuccagc

SEQ ID NO: 326579 - RNA, 19 nt, Artificial Sequence
  Description of Artificial Sequence: Synthetic oligonucleotide
ucacuuacggacauuuggg

SEQ ID NO: 326580 - RNA, 19 nt, Artificial Sequence
  Description of Artificial Sequence: Synthetic oligonucleotide
uuagacuguugaaagacgc

SEQ ID NO: 326581 - RNA, 19 nt, Artificial Sequence
  Description of Artificial Sequence: Synthetic oligonucleotide
augauauugaugcuuagcu

SEQ ID NO: 326582 - RNA, 19 nt, Artificial Sequence
  Description of Artificial Sequence: Synthetic oligonucleotide
uuuucuauucccuggaagu

SEQ ID NO: 326583 - RNA, 19 nt, Artificial Sequence
  Description of Artificial Sequence: Synthetic oligonucleotide
uuuagacuguugaaagacg

SEQ ID NO: 326584 - RNA, 19 nt, Artificial Sequence
  Description of Artificial Sequence: Synthetic oligonucleotide
acaacguauacggaggucc

SEQ ID NO: 326585 - RNA, 19 nt, Artificial Sequence
  Description of Artificial Sequence: Synthetic oligonucleotide
ugucguucuaaauagcagc

SEQ ID NO: 326586 - RNA, 19 nt, Artificial Sequence
  Description of Artificial Sequence: Synthetic oligonucleotide
uaugucguucuaaauagca

SEQ ID NO: 326587 - RNA, 19 nt, Artificial Sequence
  Description of Artificial Sequence: Synthetic oligonucleotide
uucaaacugacaugguagg

SEQ ID NO: 326588 - RNA, 19 nt, Artificial Sequence
  Description of Artificial Sequence: Synthetic oligonucleotide
uuaucaacaauccaaucuu

SEQ ID NO: 326589 - RNA, 19 nt, Artificial Sequence
  Description of Artificial Sequence: Synthetic oligonucleotide
uuuaguucaauguaacuuu

SEQ ID NO: 326590 - RNA, 19 nt, Artificial Sequence
  Description of Artificial Sequence: Synthetic oligonucleotide
uuuuguaccuccauguguc

SEQ ID NO: 326591 - RNA, 19 nt, Artificial Sequence
  Description of Artificial Sequence: Synthetic oligonucleotide
acggcaauuauauucacca

SEQ ID NO: 326592 - RNA, 19 nt, Artificial Sequence
  Description of Artificial Sequence: Synthetic oligonucleotide
acuauuaaacacccaccac

SEQ ID NO: 326593 - RNA, 19 nt, Artificial Sequence
  Description of Artificial Sequence: Synthetic oligonucleotide
ucagagagauaccuuaugu

SEQ ID NO: 326594 - RNA, 19 nt, Artificial Sequence
  Description of Artificial Sequence: Synthetic oligonucleotide
aauagggucugcuuuuagu

SEQ ID NO: 326595 - RNA, 19 nt, Artificial Sequence
  Description of Artificial Sequence: Synthetic oligonucleotide
agagagauaccuuauguaa

SEQ ID NO: 326596 - RNA, 19 nt, Artificial Sequence
  Description of Artificial Sequence: Synthetic oligonucleotide
gguaugucguucuaaauag

SEQ ID NO: 326597 - RNA, 19 nt, Artificial Sequence
  Description of Artificial Sequence: Synthetic oligonucleotide
cacugagggacgaacaucg

SEQ ID NO: 326598 - RNA, 19 nt, Artificial Sequence
  Description of Artificial Sequence: Synthetic oligonucleotide
auaaaauucagaguucacu

SEQ ID NO: 326599 - RNA, 19 nt, Artificial Sequence
  Description of Artificial Sequence: Synthetic oligonucleotide
ucaauguuuagcacuggga

SEQ ID NO: 326600 - RNA, 19 nt, Artificial Sequence
  Description of Artificial Sequence: Synthetic oligonucleotide
gauaggauggaaugaggug

SEQ ID NO: 326601 - RNA, 19 nt, Artificial Sequence
  Description of Artificial Sequence: Synthetic oligonucleotide
agugaacuacaacugacug

SEQ ID NO: 326602 - RNA, 19 nt, Artificial Sequence
  Description of Artificial Sequence: Synthetic oligonucleotide
uguuaucuuuucuauuccc

SEQ ID NO: 326603 - RNA, 19 nt, Artificial Sequence
  Description of Artificial Sequence: Synthetic oligonucleotide
uaauaaaagcuguguaugu

SEQ ID NO: 326604 - RNA, 19 nt, Artificial Sequence
  Description of Artificial Sequence: Synthetic oligonucleotide
ugauauugaugcuuagcug

SEQ ID NO: 326605 - RNA, 19 nt, Artificial Sequence
  Description of Artificial Sequence: Synthetic oligonucleotide
uucaaagagucguuggucu

SEQ ID NO: 326606 - RNA, 19 nt, Artificial Sequence
  Description of Artificial Sequence: Synthetic oligonucleotide
uccuggauaaucuguaaca

SEQ ID NO: 326607 - RNA, 19 nt, Artificial Sequence
  Description of Artificial Sequence: Synthetic oligonucleotide
uuuaggcucuucauguggc

SEQ ID NO: 326608 - RNA, 19 nt, Artificial Sequence
  Description of Artificial Sequence: Synthetic oligonucleotide
aggcuugcaaucuacaaca

SEQ ID NO: 326609 - RNA, 19 nt, Artificial Sequence
  Description of Artificial Sequence: Synthetic oligonucleotide
uuaaaauaggguuguuuaa

SEQ ID NO: 326610 - RNA, 19 nt, Artificial Sequence
  Description of Artificial Sequence: Synthetic oligonucleotide
uuuaaacaggccacuauua

SEQ ID NO: 326611 - RNA, 19 nt, Artificial Sequence
  Description of Artificial Sequence: Synthetic oligonucleotide
gugaacuacaacugacugg

SEQ ID NO: 326612 - RNA, 19 nt, Artificial Sequence
  Description of Artificial Sequence: Synthetic oligonucleotide
agagucguuggucuaguuc

SEQ ID NO: 326613 - RNA, 19 nt, Artificial Sequence
  Description of Artificial Sequence: Synthetic oligonucleotide
caaugauucauaagucagc

SEQ ID NO: 326614 - RNA, 19 nt, Artificial Sequence
  Description of Artificial Sequence: Synthetic oligonucleotide
gaaccauuuguauggauga

SEQ ID NO: 326615 - RNA, 19 nt, Artificial Sequence
  Description of Artificial Sequence: Synthetic oligonucleotide
aucgaaucuuuacaaaaca

SEQ ID NO: 326616 - RNA, 19 nt, Artificial Sequence
  Description of Artificial Sequence: Synthetic oligonucleotide
cauauugccugccaucgcc

SEQ ID NO: 326617 - RNA, 19 nt, Artificial Sequence
  Description of Artificial Sequence: Synthetic oligonucleotide
uccauuugugcugagcucc

SEQ ID NO: 326618 - RNA, 19 nt, Artificial Sequence
  Description of Artificial Sequence: Synthetic oligonucleotide
aguuugaggguccauuugu

SEQ ID NO: 326619 - RNA, 19 nt, Artificial Sequence
  Description of Artificial Sequence: Synthetic oligonucleotide
aagaugaguaguaucuaug

SEQ ID NO: 326620 - RNA, 19 nt, Artificial Sequence
  Description of Artificial Sequence: Synthetic oligonucleotide
cuguuuaaaacuagaccug

SEQ ID NO: 326621 - RNA, 19 nt, Artificial Sequence
  Description of Artificial Sequence: Synthetic oligonucleotide
ucuauucccuggaaguugu

SEQ ID NO: 326622 - RNA, 19 nt, Artificial Sequence
  Description of Artificial Sequence: Synthetic oligonucleotide
ugcauauaucccagguucc

SEQ ID NO: 326623 - RNA, 19 nt, Artificial Sequence
  Description of Artificial Sequence: Synthetic oligonucleotide
uucaaugacuguagggagu

SEQ ID NO: 326624 - RNA, 19 nt, Artificial Sequence
  Description of Artificial Sequence: Synthetic oligonucleotide
acuagaccugcuuuccggg

SEQ ID NO: 326625 - RNA, 19 nt, Artificial Sequence
  Description of Artificial Sequence: Synthetic oligonucleotide
gauagaucaacuugagugu

SEQ ID NO: 326626 - RNA, 19 nt, Artificial Sequence
  Description of Artificial Sequence: Synthetic oligonucleotide
cuggaugacacgugcaagc

SEQ ID NO: 326627 - RNA, 19 nt, Artificial Sequence
  Description of Artificial Sequence: Synthetic oligonucleotide
ucaaugacuguagggagug

SEQ ID NO: 326628 - RNA, 19 nt, Artificial Sequence
  Description of Artificial Sequence: Synthetic oligonucleotide
cuuacggacauuuggguca

SEQ ID NO: 326629 - RNA, 19 nt, Artificial Sequence
  Description of Artificial Sequence: Synthetic oligonucleotide
ggaaggauaggauggaaug

SEQ ID NO: 326630 - RNA, 19 nt, Artificial Sequence
  Description of Artificial Sequence: Synthetic oligonucleotide
caguugacuuaacacaagc

SEQ ID NO: 326631 - RNA, 19 nt, Artificial Sequence
  Description of Artificial Sequence: Synthetic oligonucleotide
acuaucaaaagccgcugcu

SEQ ID NO: 326632 - RNA, 19 nt, Artificial Sequence
  Description of Artificial Sequence: Synthetic oligonucleotide
aucguuauccagguccagc

SEQ ID NO: 326633 - RNA, 19 nt, Artificial Sequence
  Description of Artificial Sequence: Synthetic oligonucleotide
caugauauugaugcuuagc

SEQ ID NO: 326634 - RNA, 19 nt, Artificial Sequence
  Description of Artificial Sequence: Synthetic oligonucleotide
ccuuauguaacgcuuuugg

SEQ ID NO: 326635 - RNA, 19 nt, Artificial Sequence
  Description of Artificial Sequence: Synthetic oligonucleotide
gaggugaacgagcugcuug

SEQ ID NO: 326636 - RNA, 19 nt, Artificial Sequence
  Description of Artificial Sequence: Synthetic oligonucleotide
ggacacugcacgcugauag

SEQ ID NO: 326637 - RNA, 19 nt, Artificial Sequence
  Description of Artificial Sequence: Synthetic oligonucleotide
uccgauacacugccaagca

SEQ ID NO: 326638 - RNA, 19 nt, Artificial Sequence
  Description of Artificial Sequence: Synthetic oligonucleotide
agauaccuuauguaacgcu

SEQ ID NO: 326639 - RNA, 19 nt, Artificial Sequence
  Description of Artificial Sequence: Synthetic oligonucleotide
gggacgaacaucguuaucc

SEQ ID NO: 326640 - RNA, 19 nt, Artificial Sequence
  Description of Artificial Sequence: Synthetic oligonucleotide
agaaguuaggcaguugacu

SEQ ID NO: 326641 - RNA, 19 nt, Artificial Sequence
  Description of Artificial Sequence: Synthetic oligonucleotide
gacuaucaaaagccgcugc

SEQ ID NO: 326642 - RNA, 19 nt, Artificial Sequence
  Description of Artificial Sequence: Synthetic oligonucleotide
cacuauuaaacacccacca

SEQ ID NO: 326643 - RNA, 19 nt, Artificial Sequence
  Description of Artificial Sequence: Synthetic oligonucleotide
aagugaacuacaacugacu

SEQ ID NO: 326644 - RNA, 19 nt, Artificial Sequence
  Description of Artificial Sequence: Synthetic oligonucleotide
gagagauaccuuauguaac

SEQ ID NO: 326645 - RNA, 19 nt, Artificial Sequence
  Description of Artificial Sequence: Synthetic oligonucleotide
uucuauucccuggaaguug

SEQ ID NO: 326646 - RNA, 19 nt, Artificial Sequence
  Description of Artificial Sequence: Synthetic oligonucleotide
agugcguggacaugggaca

SEQ ID NO: 326647 - RNA, 19 nt, Artificial Sequence
  Description of Artificial Sequence: Synthetic oligonucleotide
cacgcuggagaaaagucac

SEQ ID NO: 326648 - RNA, 19 nt, Artificial Sequence
  Description of Artificial Sequence: Synthetic oligonucleotide
gugacaaccagauaaacuu

SEQ ID NO: 326649 - RNA, 19 nt, Artificial Sequence
  Description of Artificial Sequence: Synthetic oligonucleotide
uaguaucuaugucugcauc

SEQ ID NO: 326650 - RNA, 19 nt, Artificial Sequence
  Description of Artificial Sequence: Synthetic oligonucleotide
aucuuuccgugccaccacg

SEQ ID NO: 326651 - RNA, 19 nt, Artificial Sequence
  Description of Artificial Sequence: Synthetic oligonucleotide
ugcaugaguuugagggucc

SEQ ID NO: 326652 - RNA, 19 nt, Artificial Sequence
  Description of Artificial Sequence: Synthetic oligonucleotide
cacggcaauuauauucacc

SEQ ID NO: 326653 - RNA, 19 nt, Artificial Sequence
  Description of Artificial Sequence: Synthetic oligonucleotide
gacgaacaucguuauccag

SEQ ID NO: 326654 - RNA, 19 nt, Artificial Sequence
  Description of Artificial Sequence: Synthetic oligonucleotide
gaguuugaggguccauuug

SEQ ID NO: 326655 - RNA, 19 nt, Artificial Sequence
  Description of Artificial Sequence: Synthetic oligonucleotide
ugcguuuuagacuguugaa

SEQ ID NO: 326656 - RNA, 19 nt, Artificial Sequence
  Description of Artificial Sequence: Synthetic oligonucleotide
ugaugcuuagcuggcaaac

SEQ ID NO: 326657 - RNA, 19 nt, Artificial Sequence
  Description of Artificial Sequence: Synthetic oligonucleotide
auacaacguauacggaggu

SEQ ID NO: 326658 - RNA, 19 nt, Artificial Sequence
  Description of Artificial Sequence: Synthetic oligonucleotide
gaaggauaggauggaauga

SEQ ID NO: 326659 - RNA, 19 nt, Artificial Sequence
  Description of Artificial Sequence: Synthetic oligonucleotide
uguaccuccaugugucauc

SEQ ID NO: 326660 - RNA, 19 nt, Artificial Sequence
  Description of Artificial Sequence: Synthetic oligonucleotide
guugaaagacgcuggcuuc

SEQ ID NO: 326661 - RNA, 19 nt, Artificial Sequence
  Description of Artificial Sequence: Synthetic oligonucleotide
cacccuucaaugacuguag

SEQ ID NO: 326662 - RNA, 19 nt, Artificial Sequence
  Description of Artificial Sequence: Synthetic oligonucleotide
gacacgugcaagccacugc

SEQ ID NO: 326663 - RNA, 19 nt, Artificial Sequence
  Description of Artificial Sequence: Synthetic oligonucleotide
caaugcuuggugacccggg

SEQ ID NO: 326664 - RNA, 19 nt, Artificial Sequence
  Description of Artificial Sequence: Synthetic oligonucleotide
cagugugcugcaaugucac

SEQ ID NO: 326665 - RNA, 19 nt, Artificial Sequence
  Description of Artificial Sequence: Synthetic oligonucleotide
agugacgccgucuggcuga

SEQ ID NO: 326666 - RNA, 19 nt, Artificial Sequence
  Description of Artificial Sequence: Synthetic oligonucleotide
aguugacuuaacacaagcu

SEQ ID NO: 326667 - RNA, 19 nt, Artificial Sequence
  Description of Artificial Sequence: Synthetic oligonucleotide
augucguucuaaauagcag

SEQ ID NO: 326668 - RNA, 19 nt, Artificial Sequence
  Description of Artificial Sequence: Synthetic oligonucleotide
cuccgauacacugccaagc

SEQ ID NO: 326669 - RNA, 19 nt, Artificial Sequence
  Description of Artificial Sequence: Synthetic oligonucleotide
augauucauaagucagccu

SEQ ID NO: 326670 - RNA, 19 nt, Artificial Sequence
  Description of Artificial Sequence: Synthetic oligonucleotide
aguucacuuacggacauuu

SEQ ID NO: 326671 - RNA, 19 nt, Artificial Sequence
  Description of Artificial Sequence: Synthetic oligonucleotide
ugcaaucuacaacacccuu

SEQ ID NO: 326672 - RNA, 19 nt, Artificial Sequence
  Description of Artificial Sequence: Synthetic oligonucleotide
gacuguagggagugcacga

SEQ ID NO: 326673 - RNA, 19 nt, Artificial Sequence
  Description of Artificial Sequence: Synthetic oligonucleotide
uugaaagacgcuggcuucu

SEQ ID NO: 326674 - RNA, 19 nt, Artificial Sequence
  Description of Artificial Sequence: Synthetic oligonucleotide
cuagcuaaucucuuuauuu

SEQ ID NO: 326675 - RNA, 19 nt, Artificial Sequence
  Description of Artificial Sequence: Synthetic oligonucleotide
gucaccaggcgcguggagg

SEQ ID NO: 326676 - RNA, 19 nt, Artificial Sequence
  Description of Artificial Sequence: Synthetic oligonucleotide
ccacuauuaaacacccacc

SEQ ID NO: 326677 - RNA, 19 nt, Artificial Sequence
  Description of Artificial Sequence: Synthetic oligonucleotide
ucccauauugccugccauc

SEQ ID NO: 326678 - RNA, 19 nt, Artificial Sequence
  Description of Artificial Sequence: Synthetic oligonucleotide
uugaugcuuagcuggcaaa

SEQ ID NO: 326679 - RNA, 19 nt, Artificial Sequence
  Description of Artificial Sequence: Synthetic oligonucleotide
caugcuaaccuguguuauc

SEQ ID NO: 326680 - RNA, 19 nt, Artificial Sequence
  Description of Artificial Sequence: Synthetic oligonucleotide
agugcauacugcucuugaa

SEQ ID NO: 326681 - RNA, 19 nt, Artificial Sequence
  Description of Artificial Sequence: Synthetic oligonucleotide
agcuccgauacacugccaa

SEQ ID NO: 326682 - RNA, 19 nt, Artificial Sequence
  Description of Artificial Sequence: Synthetic oligonucleotide
ucagugacgccgucuggcu

SEQ ID NO: 326683 - RNA, 19 nt, Artificial Sequence
  Description of Artificial Sequence: Synthetic oligonucleotide
auuauacaacguauacgga

SEQ ID NO: 326684 - RNA, 19 nt, Artificial Sequence
  Description of Artificial Sequence: Synthetic oligonucleotide
cucaaugcuuggugacccg

SEQ ID NO: 326685 - RNA, 19 nt, Artificial Sequence
  Description of Artificial Sequence: Synthetic oligonucleotide
ugugugcgccugcauuacc

SEQ ID NO: 326686 - RNA, 19 nt, Artificial Sequence
  Description of Artificial Sequence: Synthetic oligonucleotide
uaccuuauguaacgcuuuu

SEQ ID NO: 326687 - RNA, 19 nt, Artificial Sequence
  Description of Artificial Sequence: Synthetic oligonucleotide
gauaccuuauguaacgcuu

SEQ ID NO: 326688 - RNA, 19 nt, Artificial Sequence
  Description of Artificial Sequence: Synthetic oligonucleotide
ggcggcuauguuuucauca

SEQ ID NO: 326689 - RNA, 19 nt, Artificial Sequence
  Description of Artificial Sequence: Synthetic oligonucleotide
acaacugacuggaaggaua

SEQ ID NO: 326690 - RNA, 19 nt, Artificial Sequence
  Description of Artificial Sequence: Synthetic oligonucleotide
cuuauguaacgcuuuuggu

SEQ ID NO: 326691 - RNA, 19 nt, Artificial Sequence
  Description of Artificial Sequence: Synthetic oligonucleotide
guaugucguucuaaauagc

SEQ ID NO: 326692 - RNA, 19 nt, Artificial Sequence
  Description of Artificial Sequence: Synthetic oligonucleotide
gcugagcuccgauacacug

SEQ ID NO: 326693 - RNA, 19 nt, Artificial Sequence
  Description of Artificial Sequence: Synthetic oligonucleotide
aacgagcugcuugcagguc

SEQ ID NO: 326694 - RNA, 19 nt, Artificial Sequence
  Description of Artificial Sequence: Synthetic oligonucleotide
agggacgaacaucguuauc

SEQ ID NO: 326695 - RNA, 19 nt, Artificial Sequence
  Description of Artificial Sequence: Synthetic oligonucleotide
gucuaguucuuucagugau

SEQ ID NO: 326696 - RNA, 19 nt, Artificial Sequence
  Description of Artificial Sequence: Synthetic oligonucleotide
accuuauguaacgcuuuug

SEQ ID NO: 326697 - RNA, 19 nt, Artificial Sequence
  Description of Artificial Sequence: Synthetic oligonucleotide
caucuuuccgugccaccac

SEQ ID NO: 326698 - RNA, 19 nt, Artificial Sequence
  Description of Artificial Sequence: Synthetic oligonucleotide
uuacggacauuugggucac

SEQ ID NO: 326699 - RNA, 19 nt, Artificial Sequence
  Description of Artificial Sequence: Synthetic oligonucleotide
cacugcacgcugauagauc

SEQ ID NO: 326700 - RNA, 19 nt, Artificial Sequence
  Description of Artificial Sequence: Synthetic oligonucleotide
ugcagucuugcaugaguuu

SEQ ID NO: 326701 - RNA, 19 nt, Artificial Sequence
  Description of Artificial Sequence: Synthetic oligonucleotide
aggcggcuauguuuucauc

SEQ ID NO: 326702 - RNA, 19 nt, Artificial Sequence
  Description of Artificial Sequence: Synthetic oligonucleotide
caccauuauacaacguaua

SEQ ID NO: 326703 - RNA, 19 nt, Artificial Sequence
  Description of Artificial Sequence: Synthetic oligonucleotide
uacaacguauacggagguc

SEQ ID NO: 326704 - RNA, 19 nt, Artificial Sequence
  Description of Artificial Sequence: Synthetic oligonucleotide
gaacgagcugcuugcaggu

SEQ ID NO: 326705 - RNA, 19 nt, Artificial Sequence
  Description of Artificial Sequence: Synthetic oligonucleotide
acgaccagacugaaagcug

SEQ ID NO: 326706 - RNA, 19 nt, Artificial Sequence
  Description of Artificial Sequence: Synthetic oligonucleotide
agggccuguuuaaaacuag

SEQ ID NO: 326707 - RNA, 19 nt, Artificial Sequence
  Description of Artificial Sequence: Synthetic oligonucleotide
gcacaucgaaucuuuacaa

SEQ ID NO: 326708 - RNA, 19 nt, Artificial Sequence
  Description of Artificial Sequence: Synthetic oligonucleotide
cacgugcaagccacugccc

SEQ ID NO: 326709 - RNA, 19 nt, Artificial Sequence
  Description of Artificial Sequence: Synthetic oligonucleotide
aacguauacggagguccaa

SEQ ID NO: 326710 - RNA, 19 nt, Artificial Sequence
  Description of Artificial Sequence: Synthetic oligonucleotide
caacguauacggaggucca

SEQ ID NO: 326711 - RNA, 19 nt, Artificial Sequence
  Description of Artificial Sequence: Synthetic oligonucleotide
auaccuuauguaacgcuuu

SEQ ID NO: 326712 - RNA, 19 nt, Artificial Sequence
  Description of Artificial Sequence: Synthetic oligonucleotide
gggagugcauuacuuccug

SEQ ID NO: 326713 - RNA, 19 nt, Artificial Sequence
  Description of Artificial Sequence: Synthetic oligonucleotide
guaccuccaugugucauca

SEQ ID NO: 326714 - RNA, 19 nt, Artificial Sequence
  Description of Artificial Sequence: Synthetic oligonucleotide
gcaugauauugaugcuuag

SEQ ID NO: 326715 - RNA, 19 nt, Artificial Sequence
  Description of Artificial Sequence: Synthetic oligonucleotide
uuguaccuccaugugucau

SEQ ID NO: 326716 - RNA, 19 nt, Artificial Sequence
  Description of Artificial Sequence: Synthetic oligonucleotide
ggcaguugacuuaacacaa

SEQ ID NO: 326717 - RNA, 19 nt, Artificial Sequence
  Description of Artificial Sequence: Synthetic oligonucleotide
gaugcuuagcuggcaaacu

SEQ ID NO: 326718 - RNA, 19 nt, Artificial Sequence
  Description of Artificial Sequence: Synthetic oligonucleotide
acguauacggagguccaaa

SEQ ID NO: 326719 - RNA, 19 nt, Artificial Sequence
  Description of Artificial Sequence: Synthetic oligonucleotide
gaacaucguuauccagguc

SEQ ID NO: 326720 - RNA, 19 nt, Artificial Sequence
  Description of Artificial Sequence: Synthetic oligonucleotide
ugcaagccacugcccugag

SEQ ID NO: 326721 - RNA, 19 nt, Artificial Sequence
  Description of Artificial Sequence: Synthetic oligonucleotide
cccggaucuacugugcagg

SEQ ID NO: 326722 - RNA, 19 nt, Artificial Sequence
  Description of Artificial Sequence: Synthetic oligonucleotide
ggacgaacaucguuaucca

SEQ ID NO: 326723 - RNA, 19 nt, Artificial Sequence
  Description of Artificial Sequence: Synthetic oligonucleotide
caaguuaagugcagugcgu

SEQ ID NO: 326724 - RNA, 19 nt, Artificial Sequence
  Description of Artificial Sequence: Synthetic oligonucleotide
ugugcgccugcauuaccuu

SEQ ID NO: 326725 - RNA, 19 nt, Artificial Sequence
  Description of Artificial Sequence: Synthetic oligonucleotide
aggcgcguggaggucagag

SEQ ID NO: 326726 - RNA, 19 nt, Artificial Sequence
  Description of Artificial Sequence: Synthetic oligonucleotide
ucaucacgaccagacugaa

SEQ ID NO: 326727 - RNA, 19 nt, Artificial Sequence
  Description of Artificial Sequence: Synthetic oligonucleotide
acggacauuugggucacaa

SEQ ID NO: 326728 - RNA, 19 nt, Artificial Sequence
  Description of Artificial Sequence: Synthetic oligonucleotide
auguaacgcuuuuggucau

SEQ ID NO: 326729 - RNA, 19 nt, Artificial Sequence
  Description of Artificial Sequence: Synthetic oligonucleotide
gcuccgauacacugccaag

SEQ ID NO: 326730 - RNA, 19 nt, Artificial Sequence
  Description of Artificial Sequence: Synthetic oligonucleotide
ccauuugugcugagcuccg

SEQ ID NO: 326731 - RNA, 19 nt, Artificial Sequence
  Description of Artificial Sequence: Synthetic oligonucleotide
ggauaggauggaaugaggu

SEQ ID NO: 326732 - RNA, 19 nt, Artificial Sequence
  Description of Artificial Sequence: Synthetic oligonucleotide
ugcuaaccuguguuaucuu

SEQ ID NO: 326733 - RNA, 19 nt, Artificial Sequence
  Description of Artificial Sequence: Synthetic oligonucleotide
cauauaucccagguuccaa

SEQ ID NO: 326734 - RNA, 19 nt, Artificial Sequence
  Description of Artificial Sequence: Synthetic oligonucleotide
cacuuacggacauuugggu

SEQ ID NO: 326735 - RNA, 19 nt, Artificial Sequence
  Description of Artificial Sequence: Synthetic oligonucleotide
cagggccuguuuaaaacua

SEQ ID NO: 326736 - RNA, 19 nt, Artificial Sequence
  Description of Artificial Sequence: Synthetic oligonucleotide
caaugacuguagggagugc

SEQ ID NO: 326737 - RNA, 19 nt, Artificial Sequence
  Description of Artificial Sequence: Synthetic oligonucleotide
cugauagaucaacuugagu

SEQ ID NO: 326738 - RNA, 19 nt, Artificial Sequence
  Description of Artificial Sequence: Synthetic oligonucleotide
cacgaccagacugaaagcu

SEQ ID NO: 326739 - RNA, 19 nt, Artificial Sequence
  Description of Artificial Sequence: Synthetic oligonucleotide
gcguggacaugggacaucc

SEQ ID NO: 326740 - RNA, 19 nt, Artificial Sequence
  Description of Artificial Sequence: Synthetic oligonucleotide
caucguuauccagguccag

SEQ ID NO: 326741 - RNA, 19 nt, Artificial Sequence
  Description of Artificial Sequence: Synthetic oligonucleotide
uuuccggggucagguaaau

SEQ ID NO: 326742 - RNA, 19 nt, Artificial Sequence
  Description of Artificial Sequence: Synthetic oligonucleotide
acgccgucuggcugagaug

SEQ ID NO: 326743 - RNA, 19 nt, Artificial Sequence
  Description of Artificial Sequence: Synthetic oligonucleotide
cuuucgaucuggccugacu

SEQ ID NO: 326744 - RNA, 19 nt, Artificial Sequence
  Description of Artificial Sequence: Synthetic oligonucleotide
cacgcugauagaucaacuu

SEQ ID NO: 326745 - RNA, 19 nt, Artificial Sequence
  Description of Artificial Sequence: Synthetic oligonucleotide
uccugcguuuuagacuguu

SEQ ID NO: 326746 - RNA, 19 nt, Artificial Sequence
  Description of Artificial Sequence: Synthetic oligonucleotide
ucuuucgaucuggccugac

SEQ ID NO: 326747 - RNA, 19 nt, Artificial Sequence
  Description of Artificial Sequence: Synthetic oligonucleotide
guaacgcuuuuggucaugu

SEQ ID NO: 326748 - RNA, 19 nt, Artificial Sequence
  Description of Artificial Sequence: Synthetic oligonucleotide
gcaaacuuccuccugcguu

SEQ ID NO: 326749 - RNA, 19 nt, Artificial Sequence
  Description of Artificial Sequence: Synthetic oligonucleotide
ccauauugccugccaucgc

SEQ ID NO: 326750 - RNA, 19 nt, Artificial Sequence
  Description of Artificial Sequence: Synthetic oligonucleotide
ccggaucuacugugcaggc

SEQ ID NO: 326751 - RNA, 19 nt, Artificial Sequence
  Description of Artificial Sequence: Synthetic oligonucleotide
ugcguggacaugggacauc

SEQ ID NO: 326752 - RNA, 19 nt, Artificial Sequence
  Description of Artificial Sequence: Synthetic oligonucleotide
guuaggcaguugacuuaac

SEQ ID NO: 326753 - RNA, 19 nt, Artificial Sequence
  Description of Artificial Sequence: Synthetic oligonucleotide
aggguccauuugugcugag

SEQ ID NO: 326754 - RNA, 19 nt, Artificial Sequence
  Description of Artificial Sequence: Synthetic oligonucleotide
acugagggacgaacaucgu

SEQ ID NO: 326755 - RNA, 19 nt, Artificial Sequence
  Description of Artificial Sequence: Synthetic oligonucleotide
gugugcgccugcauuaccu

SEQ ID NO: 326756 - RNA, 19 nt, Artificial Sequence
  Description of Artificial Sequence: Synthetic oligonucleotide
ggcuugcaaucuacaacac

SEQ ID NO: 326757 - RNA, 19 nt, Artificial Sequence
  Description of Artificial Sequence: Synthetic oligonucleotide
augacacgugcaagccacu

SEQ ID NO: 326758 - RNA, 19 nt, Artificial Sequence
  Description of Artificial Sequence: Synthetic oligonucleotide
cugagggacgaacaucguu

SEQ ID NO: 326759 - RNA, 19 nt, Artificial Sequence
  Description of Artificial Sequence: Synthetic oligonucleotide
augccacucuguggggagu

SEQ ID NO: 326760 - RNA, 19 nt, Artificial Sequence
  Description of Artificial Sequence: Synthetic oligonucleotide
ucacagugacccggaucua

SEQ ID NO: 326761 - RNA, 19 nt, Artificial Sequence
  Description of Artificial Sequence: Synthetic oligonucleotide
ccccugcuaucucuggaug

SEQ ID NO: 326762 - RNA, 19 nt, Artificial Sequence
  Description of Artificial Sequence: Synthetic oligonucleotide
ggugaacgagcugcuugca

SEQ ID NO: 326763 - RNA, 19 nt, Artificial Sequence
  Description of Artificial Sequence: Synthetic oligonucleotide
caggcggcuauguuuucau

SEQ ID NO: 326764 - RNA, 19 nt, Artificial Sequence
  Description of Artificial Sequence: Synthetic oligonucleotide
uacggacauuugggucaca

SEQ ID NO: 326765 - RNA, 19 nt, Artificial Sequence
  Description of Artificial Sequence: Synthetic oligonucleotide
caccagggagugcauuacu

SEQ ID NO: 326766 - RNA, 19 nt, Artificial Sequence
  Description of Artificial Sequence: Synthetic oligonucleotide
cggcuauguuuucaucaug

SEQ ID NO: 326767 - RNA, 19 nt, Artificial Sequence
  Description of Artificial Sequence: Synthetic oligonucleotide
ggacaaucucaccccugcu

SEQ ID NO: 326768 - RNA, 19 nt, Artificial Sequence
  Description of Artificial Sequence: Synthetic oligonucleotide
ggucagagagauaccuuau

SEQ ID NO: 326769 - RNA, 19 nt, Artificial Sequence
  Description of Artificial Sequence: Synthetic oligonucleotide
cucuuucgaucuggccuga

SEQ ID NO: 326770 - RNA, 19 nt, Artificial Sequence
  Description of Artificial Sequence: Synthetic oligonucleotide
gagcuccgauacacugcca

SEQ ID NO: 326771 - RNA, 19 nt, Artificial Sequence
  Description of Artificial Sequence: Synthetic oligonucleotide
ccaggcgcguggaggucag

SEQ ID NO: 326772 - RNA, 19 nt, Artificial Sequence
  Description of Artificial Sequence: Synthetic oligonucleotide
cggaucuacugugcaggcc

SEQ ID NO: 326773 - RNA, 19 nt, Artificial Sequence
  Description of Artificial Sequence: Synthetic oligonucleotide
cguggacaugggacauccc

SEQ ID NO: 326774 - RNA, 19 nt, Artificial Sequence
  Description of Artificial Sequence: Synthetic oligonucleotide
gugcguggacaugggacau

SEQ ID NO: 326775 - RNA, 19 nt, Artificial Sequence
  Description of Artificial Sequence: Synthetic oligonucleotide
ccaugcuaaccuguguuau

SEQ ID NO: 326776 - RNA, 19 nt, Artificial Sequence
  Description of Artificial Sequence: Synthetic oligonucleotide
cccucuucagugacgccgu

SEQ ID NO: 326777 - RNA, 19 nt, Artificial Sequence
  Description of Artificial Sequence: Synthetic oligonucleotide
gggacacugcacgcugaua

SEQ ID NO: 326778 - RNA, 19 nt, Artificial Sequence
  Description of Artificial Sequence: Synthetic oligonucleotide
ggggcacaucgaaucuuua

SEQ ID NO: 326779 - RNA, 19 nt, Artificial Sequence
  Description of Artificial Sequence: Synthetic oligonucleotide
cccaacacugagggacgaa

SEQ ID NO: 326780 - RNA, 19 nt, Artificial Sequence
  Description of Artificial Sequence: Synthetic oligonucleotide
ggcuuggugcucaguuguu

SEQ ID NO: 326781 - RNA, 19 nt, Artificial Sequence
  Description of Artificial Sequence: Synthetic oligonucleotide
caggcgcguggaggucaga

SEQ ID NO: 326782 - RNA, 19 nt, Artificial Sequence
  Description of Artificial Sequence: Synthetic oligonucleotide
agauauauaauauauauga

SEQ ID NO: 326783 - RNA, 19 nt, Artificial Sequence
  Description of Artificial Sequence: Synthetic oligonucleotide
auauauaauauauaugaac

SEQ ID NO: 326784 - RNA, 19 nt, Artificial Sequence
  Description of Artificial Sequence: Synthetic oligonucleotide
aaagauauauaauauauau

SEQ ID NO: 326785 - RNA, 19 nt, Artificial Sequence
  Description of Artificial Sequence: Synthetic oligonucleotide
aacuaaaccacacuauugg

SEQ ID NO: 326786 - RNA, 19 nt, Artificial Sequence
  Description of Artificial Sequence: Synthetic oligonucleotide
uguaaugcuaugcacgucg

SEQ ID NO: 326787 - RNA, 19 nt, Artificial Sequence
  Description of Artificial Sequence: Synthetic oligonucleotide
uuuaaaagagcugagguag

SEQ ID NO: 326788 - RNA, 19 nt, Artificial Sequence
  Description of Artificial Sequence: Synthetic oligonucleotide
uauugaauuacacauuggc

SEQ ID NO: 326789 - RNA, 19 nt, Artificial Sequence
  Description of Artificial Sequence: Synthetic oligonucleotide
ucuauuuucacaucgguga

SEQ ID NO: 326790 - RNA, 19 nt, Artificial Sequence
  Description of Artificial Sequence: Synthetic oligonucleotide
aaugcuaugcacgucgacc

SEQ ID NO: 326791 - RNA, 19 nt, Artificial Sequence
  Description of Artificial Sequence: Synthetic oligonucleotide
uugaauuacacauuggcac

SEQ ID NO: 326792 - RNA, 19 nt, Artificial Sequence
  Description of Artificial Sequence: Synthetic oligonucleotide
uauaugaacucucugaaaa

SEQ ID NO: 326793 - RNA, 19 nt, Artificial Sequence
  Description of Artificial Sequence: Synthetic oligonucleotide
aauagcaaugguccccucc

SEQ ID NO: 326794 - RNA, 19 nt, Artificial Sequence
  Description of Artificial Sequence: Synthetic oligonucleotide
uuggcuaaaguccaagagg

SEQ ID NO: 326795 - RNA, 19 nt, Artificial Sequence
  Description of Artificial Sequence: Synthetic oligonucleotide
auauaauauauaugaacuc

SEQ ID NO: 326796 - RNA, 19 nt, Artificial Sequence
  Description of Artificial Sequence: Synthetic oligonucleotide
guagcaaccgcuuuaaaag

SEQ ID NO: 326797 - RNA, 19 nt, Artificial Sequence
  Description of Artificial Sequence: Synthetic oligonucleotide
auauauaugaacucucuga

SEQ ID NO: 326798 - RNA, 19 nt, Artificial Sequence
  Description of Artificial Sequence: Synthetic oligonucleotide
aaguuaacguaggagaagg

SEQ ID NO: 326799 - RNA, 19 nt, Artificial Sequence
  Description of Artificial Sequence: Synthetic oligonucleotide
acauuaaucagccaacugu

SEQ ID NO: 326800 - RNA, 19 nt, Artificial Sequence
  Description of Artificial Sequence: Synthetic oligonucleotide
aguacguggaaccaaagug

SEQ ID NO: 326801 - RNA, 19 nt, Artificial Sequence
  Description of Artificial Sequence: Synthetic oligonucleotide
uuuuaccugaaucucagcu

SEQ ID NO: 326802 - RNA, 19 nt, Artificial Sequence
  Description of Artificial Sequence: Synthetic oligonucleotide
uuucaauguacacuguacc

SEQ ID NO: 326803 - RNA, 19 nt, Artificial Sequence
  Description of Artificial Sequence: Synthetic oligonucleotide
gagugaguuacaaagaaag

SEQ ID NO: 326804 - RNA, 19 nt, Artificial Sequence
  Description of Artificial Sequence: Synthetic oligonucleotide
uuagacagcaaccuagugu

SEQ ID NO: 326805 - RNA, 19 nt, Artificial Sequence
  Description of Artificial Sequence: Synthetic oligonucleotide
uuaacguaggagaaggcug

SEQ ID NO: 326806 - RNA, 19 nt, Artificial Sequence
  Description of Artificial Sequence: Synthetic oligonucleotide
ugguuacuuggauagaggg

SEQ ID NO: 326807 - RNA, 19 nt, Artificial Sequence
  Description of Artificial Sequence: Synthetic oligonucleotide
ugacacucgacacggaagg

SEQ ID NO: 326808 - RNA, 19 nt, Artificial Sequence
  Description of Artificial Sequence: Synthetic oligonucleotide
cuauagacaccccaugucg

SEQ ID NO: 326809 - RNA, 19 nt, Artificial Sequence
  Description of Artificial Sequence: Synthetic oligonucleotide
uuugcuuguaccgagugag

SEQ ID NO: 326810 - RNA, 19 nt, Artificial Sequence
  Description of Artificial Sequence: Synthetic oligonucleotide
guggaaguaacauuaauca

SEQ ID NO: 326811 - RNA, 19 nt, Artificial Sequence
  Description of Artificial Sequence: Synthetic oligonucleotide
uucugaaugugcuuugucc

SEQ ID NO: 326812 - RNA, 19 nt, Artificial Sequence
  Description of Artificial Sequence: Synthetic oligonucleotide
aagauauauaauauauaug

SEQ ID NO: 326813 - RNA, 19 nt, Artificial Sequence
  Description of Artificial Sequence: Synthetic oligonucleotide
aaauaucacugaaagcggg

SEQ ID NO: 326814 - RNA, 19 nt, Artificial Sequence
  Description of Artificial Sequence: Synthetic oligonucleotide
uucacauugccucucagaa

SEQ ID NO: 326815 - RNA, 19 nt, Artificial Sequence
  Description of Artificial Sequence: Synthetic oligonucleotide
aucacugaaagcgggaccc

SEQ ID NO: 326816 - RNA, 19 nt, Artificial Sequence
  Description of Artificial Sequence: Synthetic oligonucleotide
aagugguuggugaugacac

SEQ ID NO: 326817 - RNA, 19 nt, Artificial Sequence
  Description of Artificial Sequence: Synthetic oligonucleotide
aaguccuuuagccaacuga

SEQ ID NO: 326818 - RNA, 19 nt, Artificial Sequence
  Description of Artificial Sequence: Synthetic oligonucleotide
ugcgcuaaggauuaaaaua

SEQ ID NO: 326819 - RNA, 19 nt, Artificial Sequence
  Description of Artificial Sequence: Synthetic oligonucleotide
uguacaagacuaugugagg

SEQ ID NO: 326820 - RNA, 19 nt, Artificial Sequence
  Description of Artificial Sequence: Synthetic oligonucleotide
auaauauauaugaacucuc

SEQ ID NO: 326821 - RNA, 19 nt, Artificial Sequence
  Description of Artificial Sequence: Synthetic oligonucleotide
auagcaaugguccccuccg

SEQ ID NO: 326822 - RNA, 19 nt, Artificial Sequence
  Description of Artificial Sequence: Synthetic oligonucleotide
ucggugauaaagaacacau

SEQ ID NO: 326823 - RNA, 19 nt, Artificial Sequence
  Description of Artificial Sequence: Synthetic oligonucleotide
uuuaccugaaucucagcug

SEQ ID NO: 326824 - RNA, 19 nt, Artificial Sequence
  Description of Artificial Sequence: Synthetic oligonucleotide
aacagagccagccgaguuc

SEQ ID NO: 326825 - RNA, 19 nt, Artificial Sequence
  Description of Artificial Sequence: Synthetic oligonucleotide
uucaauguacacuguacca

SEQ ID NO: 326826 - RNA, 19 nt, Artificial Sequence
  Description of Artificial Sequence: Synthetic oligonucleotide
uacguucacaguaagccug

SEQ ID NO: 326827 - RNA, 19 nt, Artificial Sequence
  Description of Artificial Sequence: Synthetic oligonucleotide
uggaaguaacauuaaucag

SEQ ID NO: 326828 - RNA, 19 nt, Artificial Sequence
  Description of Artificial Sequence: Synthetic oligonucleotide
ugaauuacacauuggcacu

SEQ ID NO: 326829 - RNA, 19 nt, Artificial Sequence
  Description of Artificial Sequence: Synthetic oligonucleotide
uuucaaugugcccacuggc

SEQ ID NO: 326830 - RNA, 19 nt, Artificial Sequence
  Description of Artificial Sequence: Synthetic oligonucleotide
ugaaguuaacguaggagaa

SEQ ID NO: 326831 - RNA, 19 nt, Artificial Sequence
  Description of Artificial Sequence: Synthetic oligonucleotide
gaaagcgggacccaugcgc

SEQ ID NO: 326832 - RNA, 19 nt, Artificial Sequence
  Description of Artificial Sequence: Synthetic oligonucleotide
ugugcgaguacguggaacc

SEQ ID NO: 326833 - RNA, 19 nt, Artificial Sequence
  Description of Artificial Sequence: Synthetic oligonucleotide
cugaaguuaacguaggaga

SEQ ID NO: 326834 - RNA, 19 nt, Artificial Sequence
  Description of Artificial Sequence: Synthetic oligonucleotide
auuuguuagacacuucaau

SEQ ID NO: 326835 - RNA, 19 nt, Artificial Sequence
  Description of Artificial Sequence: Synthetic oligonucleotide
ugaaugauggcaauacguu

SEQ ID NO: 326836 - RNA, 19 nt, Artificial Sequence
  Description of Artificial Sequence: Synthetic oligonucleotide
ucaguacagcuauagacac

SEQ ID NO: 326837 - RNA, 19 nt, Artificial Sequence
  Description of Artificial Sequence: Synthetic oligonucleotide
ugugcguuaaggcaccaga

SEQ ID NO: 326838 - RNA, 19 nt, Artificial Sequence
  Description of Artificial Sequence: Synthetic oligonucleotide
gucauagggaauuuuggug

SEQ ID NO: 326839 - RNA, 19 nt, Artificial Sequence
  Description of Artificial Sequence: Synthetic oligonucleotide
aagacuaugugagggaaca

SEQ ID NO: 326840 - RNA, 19 nt, Artificial Sequence
  Description of Artificial Sequence: Synthetic oligonucleotide
agauuagacagcaaccuag

SEQ ID NO: 326841 - RNA, 19 nt, Artificial Sequence
  Description of Artificial Sequence: Synthetic oligonucleotide
cuuggcuaaaguccaagag

SEQ ID NO: 326842 - RNA, 19 nt, Artificial Sequence
  Description of Artificial Sequence: Synthetic oligonucleotide
gacauuugcuuguaccgag

SEQ ID NO: 326843 - RNA, 19 nt, Artificial Sequence
  Description of Artificial Sequence: Synthetic oligonucleotide
ugucauagggaauuuuggu

SEQ ID NO: 326844 - RNA, 19 nt, Artificial Sequence
  Description of Artificial Sequence: Synthetic oligonucleotide
guacguggaaccaaagugg

SEQ ID NO: 326845 - RNA, 19 nt, Artificial Sequence
  Description of Artificial Sequence: Synthetic oligonucleotide
ucgucuauuuucacaucgg

SEQ ID NO: 326846 - RNA, 19 nt, Artificial Sequence
  Description of Artificial Sequence: Synthetic oligonucleotide
uuagccaacugacacucga

SEQ ID NO: 326847 - RNA, 19 nt, Artificial Sequence
  Description of Artificial Sequence: Synthetic oligonucleotide
guguggagaacauucuccg

SEQ ID NO: 326848 - RNA, 19 nt, Artificial Sequence
  Description of Artificial Sequence: Synthetic oligonucleotide
uguacacuguaccaaaauu

SEQ ID NO: 326849 - RNA, 19 nt, Artificial Sequence
  Description of Artificial Sequence: Synthetic oligonucleotide
acuauuccugacccucucc

SEQ ID NO: 326850 - RNA, 19 nt, Artificial Sequence
  Description of Artificial Sequence: Synthetic oligonucleotide
ucacaagaugguuagcaac

SEQ ID NO: 326851 - RNA, 19 nt, Artificial Sequence
  Description of Artificial Sequence: Synthetic oligonucleotide
cuauugaauuacacauugg

SEQ ID NO: 326852 - RNA, 19 nt, Artificial Sequence
  Description of Artificial Sequence: Synthetic oligonucleotide
aacuauuccugacccucuc

SEQ ID NO: 326853 - RNA, 19 nt, Artificial Sequence
  Description of Artificial Sequence: Synthetic oligonucleotide
cauagacucaggacuagag

SEQ ID NO: 326854 - RNA, 19 nt, Artificial Sequence
  Description of Artificial Sequence: Synthetic oligonucleotide
uagguauggcgucuucugg

SEQ ID NO: 326855 - RNA, 19 nt, Artificial Sequence
  Description of Artificial Sequence: Synthetic oligonucleotide
aguuucuauugaauuacac

SEQ ID NO: 326856 - RNA, 19 nt, Artificial Sequence
  Description of Artificial Sequence: Synthetic oligonucleotide
aaggaccgaguuuguuucc

SEQ ID NO: 326857 - RNA, 19 nt, Artificial Sequence
  Description of Artificial Sequence: Synthetic oligonucleotide
cuauuggaaaauccacagg

SEQ ID NO: 326858 - RNA, 19 nt, Artificial Sequence
  Description of Artificial Sequence: Synthetic oligonucleotide
aaaucagugccuccauccu

SEQ ID NO: 326859 - RNA, 19 nt, Artificial Sequence
  Description of Artificial Sequence: Synthetic oligonucleotide
gaagccuagcuuuucggug

SEQ ID NO: 326860 - RNA, 19 nt, Artificial Sequence
  Description of Artificial Sequence: Synthetic oligonucleotide
gaacuaaaccacacuauug

SEQ ID NO: 326861 - RNA, 19 nt, Artificial Sequence
  Description of Artificial Sequence: Synthetic oligonucleotide
ggucaguacagcuauagac

SEQ ID NO: 326862 - RNA, 19 nt, Artificial Sequence
  Description of Artificial Sequence: Synthetic oligonucleotide
uggugugggacucccauug

SEQ ID NO: 326863 - RNA, 19 nt, Artificial Sequence
  Description of Artificial Sequence: Synthetic oligonucleotide
agaacuaaaccacacuauu

SEQ ID NO: 326864 - RNA, 19 nt, Artificial Sequence
  Description of Artificial Sequence: Synthetic oligonucleotide
auggcucucuaguguaucc

SEQ ID NO: 326865 - RNA, 19 nt, Artificial Sequence
  Description of Artificial Sequence: Synthetic oligonucleotide
guauauggagcaguggucc

SEQ ID NO: 326866 - RNA, 19 nt, Artificial Sequence
  Description of Artificial Sequence: Synthetic oligonucleotide
uaaggaccgaguuuguuuc

SEQ ID NO: 326867 - RNA, 19 nt, Artificial Sequence
  Description of Artificial Sequence: Synthetic oligonucleotide
aaagugguuggugaugaca

SEQ ID NO: 326868 - RNA, 19 nt, Artificial Sequence
  Description of Artificial Sequence: Synthetic oligonucleotide
uaacguaggagaaggcugu

SEQ ID NO: 326869 - RNA, 19 nt, Artificial Sequence
  Description of Artificial Sequence: Synthetic oligonucleotide
ugguuuuaccugaaucuca

SEQ ID NO: 326870 - RNA, 19 nt, Artificial Sequence
  Description of Artificial Sequence: Synthetic oligonucleotide
uauagacaccccaugucgu

SEQ ID NO: 326871 - RNA, 19 nt, Artificial Sequence
  Description of Artificial Sequence: Synthetic oligonucleotide
auugaauuacacauuggca

SEQ ID NO: 326872 - RNA, 19 nt, Artificial Sequence
  Description of Artificial Sequence: Synthetic oligonucleotide
uuaaggaccgaguuuguuu

SEQ ID NO: 326873 - RNA, 19 nt, Artificial Sequence
  Description of Artificial Sequence: Synthetic oligonucleotide
gugccaauagcaauggucc

SEQ ID NO: 326874 - RNA, 19 nt, Artificial Sequence
  Description of Artificial Sequence: Synthetic oligonucleotide
accgcuuuaaaagagcuga

SEQ ID NO: 326875 - RNA, 19 nt, Artificial Sequence
  Description of Artificial Sequence: Synthetic oligonucleotide
aguugugucaguccugggu

SEQ ID NO: 326876 - RNA, 19 nt, Artificial Sequence
  Description of Artificial Sequence: Synthetic oligonucleotide
cacugugucaauacuuccc

SEQ ID NO: 326877 - RNA, 19 nt, Artificial Sequence
  Description of Artificial Sequence: Synthetic oligonucleotide
augucgucuauuuucacau

SEQ ID NO: 326878 - RNA, 19 nt, Artificial Sequence
  Description of Artificial Sequence: Synthetic oligonucleotide
ccugcuaagagaaaucagc

SEQ ID NO: 326879 - RNA, 19 nt, Artificial Sequence
  Description of Artificial Sequence: Synthetic oligonucleotide
gaaguuaacguaggagaag

SEQ ID NO: 326880 - RNA, 19 nt, Artificial Sequence
  Description of Artificial Sequence: Synthetic oligonucleotide
guuagugacgcuguacucc

SEQ ID NO: 326881 - RNA, 19 nt, Artificial Sequence
  Description of Artificial Sequence: Synthetic oligonucleotide
aaagaaccauuggaggcag

SEQ ID NO: 326882 - RNA, 19 nt, Artificial Sequence
  Description of Artificial Sequence: Synthetic oligonucleotide
gaaccaaagugguugguga

SEQ ID NO: 326883 - RNA, 19 nt, Artificial Sequence
  Description of Artificial Sequence: Synthetic oligonucleotide
acacaaauagucuccugca

SEQ ID NO: 326884 - RNA, 19 nt, Artificial Sequence
  Description of Artificial Sequence: Synthetic oligonucleotide
gcuaaugugguuuuaccug

SEQ ID NO: 326885 - RNA, 19 nt, Artificial Sequence
  Description of Artificial Sequence: Synthetic oligonucleotide
ucuguguuagugacgcugu

SEQ ID NO: 326886 - RNA, 19 nt, Artificial Sequence
  Description of Artificial Sequence: Synthetic oligonucleotide
gauauauaauauauaugaa

SEQ ID NO: 326887 - RNA, 19 nt, Artificial Sequence
  Description of Artificial Sequence: Synthetic oligonucleotide
auuacacauuggcacucac

SEQ ID NO: 326888 - RNA, 19 nt, Artificial Sequence
  Description of Artificial Sequence: Synthetic oligonucleotide
uggagaacauucuccguug

SEQ ID NO: 326889 - RNA, 19 nt, Artificial Sequence
  Description of Artificial Sequence: Synthetic oligonucleotide
auagacaccccaugucguc

SEQ ID NO: 326890 - RNA, 19 nt, Artificial Sequence
  Description of Artificial Sequence: Synthetic oligonucleotide
guucauguaacuuggcuaa

SEQ ID NO: 326891 - RNA, 19 nt, Artificial Sequence
  Description of Artificial Sequence: Synthetic oligonucleotide
uggacaggccugcuaagag

SEQ ID NO: 326892 - RNA, 19 nt, Artificial Sequence
  Description of Artificial Sequence: Synthetic oligonucleotide
aguuaccacacggucuucc

SEQ ID NO: 326893 - RNA, 19 nt, Artificial Sequence
  Description of Artificial Sequence: Synthetic oligonucleotide
caugguuacuuggauagag

SEQ ID NO: 326894 - RNA, 19 nt, Artificial Sequence
  Description of Artificial Sequence: Synthetic oligonucleotide
aagauuagacagcaaccua

SEQ ID NO: 326895 - RNA, 19 nt, Artificial Sequence
  Description of Artificial Sequence: Synthetic oligonucleotide
caauacguucacaguaagc

SEQ ID NO: 326896 - RNA, 19 nt, Artificial Sequence
  Description of Artificial Sequence: Synthetic oligonucleotide
aaaagagcugagguagaug

SEQ ID NO: 326897 - RNA, 19 nt, Artificial Sequence
  Description of Artificial Sequence: Synthetic oligonucleotide
uguaccaacacugccuuaa

SEQ ID NO: 326898 - RNA, 19 nt, Artificial Sequence
  Description of Artificial Sequence: Synthetic oligonucleotide
aauaucacugaaagcggga

SEQ ID NO: 326899 - RNA, 19 nt, Artificial Sequence
  Description of Artificial Sequence: Synthetic oligonucleotide
ugcguuaaggcaccagaac

SEQ ID NO: 326900 - RNA, 19 nt, Artificial Sequence
  Description of Artificial Sequence: Synthetic oligonucleotide
uacguggaaccaaaguggu

SEQ ID NO: 326901 - RNA, 19 nt, Artificial Sequence
  Description of Artificial Sequence: Synthetic oligonucleotide
gcauguaaugcuaugcacg

SEQ ID NO: 326902 - RNA, 19 nt, Artificial Sequence
  Description of Artificial Sequence: Synthetic oligonucleotide
cugaaagcgggacccaugc

SEQ ID NO: 326903 - RNA, 19 nt, Artificial Sequence
  Description of Artificial Sequence: Synthetic oligonucleotide
ugaagccuagcuuuucggu

SEQ ID NO: 326904 - RNA, 19 nt, Artificial Sequence
  Description of Artificial Sequence: Synthetic oligonucleotide
accgaguuuguuuccaugu

SEQ ID NO: 326905 - RNA, 19 nt, Artificial Sequence
  Description of Artificial Sequence: Synthetic oligonucleotide
agcuauagacaccccaugu

SEQ ID NO: 326906 - RNA, 19 nt, Artificial Sequence
  Description of Artificial Sequence: Synthetic oligonucleotide
caacugacacucgacacgg

SEQ ID NO: 326907 - RNA, 19 nt, Artificial Sequence
  Description of Artificial Sequence: Synthetic oligonucleotide
aagguacaacuguccagag

SEQ ID NO: 326908 - RNA, 19 nt, Artificial Sequence
  Description of Artificial Sequence: Synthetic oligonucleotide
guagcuugaaugcuuucac

SEQ ID NO: 326909 - RNA, 19 nt, Artificial Sequence
  Description of Artificial Sequence: Synthetic oligonucleotide
aaagacacuuuaaugccau

SEQ ID NO: 326910 - RNA, 19 nt, Artificial Sequence
  Description of Artificial Sequence: Synthetic oligonucleotide
cuuguaccgagugaguuac

SEQ ID NO: 326911 - RNA, 19 nt, Artificial Sequence
  Description of Artificial Sequence: Synthetic oligonucleotide
augguuucgucuguguuag

SEQ ID NO: 326912 - RNA, 19 nt, Artificial Sequence
  Description of Artificial Sequence: Synthetic oligonucleotide
acucacaagaugguuagca

SEQ ID NO: 326913 - RNA, 19 nt, Artificial Sequence
  Description of Artificial Sequence: Synthetic oligonucleotide
augcuaugcacgucgaccu

SEQ ID NO: 326914 - RNA, 19 nt, Artificial Sequence
  Description of Artificial Sequence: Synthetic oligonucleotide
agggauuuuaaggaccgag

SEQ ID NO: 326915 - RNA, 19 nt, Artificial Sequence
  Description of Artificial Sequence: Synthetic oligonucleotide
uacuuggauagagggaucc

SEQ ID NO: 326916 - RNA, 19 nt, Artificial Sequence
  Description of Artificial Sequence: Synthetic oligonucleotide
uguggugccaguccggaua

SEQ ID NO: 326917 - RNA, 19 nt, Artificial Sequence
  Description of Artificial Sequence: Synthetic oligonucleotide
ucacugugucaauacuucc

SEQ ID NO: 326918 - RNA, 19 nt, Artificial Sequence
  Description of Artificial Sequence: Synthetic oligonucleotide
cuuggauagagggaucccc

SEQ ID NO: 326919 - RNA, 19 nt, Artificial Sequence
  Description of Artificial Sequence: Synthetic oligonucleotide
uuuagccaacugacacucg

SEQ ID NO: 326920 - RNA, 19 nt, Artificial Sequence
  Description of Artificial Sequence: Synthetic oligonucleotide
uuagcaacaggaccccaaa

SEQ ID NO: 326921 - RNA, 19 nt, Artificial Sequence
  Description of Artificial Sequence: Synthetic oligonucleotide
ugggucaguacagcuauag

SEQ ID NO: 326922 - RNA, 19 nt, Artificial Sequence
  Description of Artificial Sequence: Synthetic oligonucleotide
ugcacgucgaccucuggga

SEQ ID NO: 326923 - RNA, 19 nt, Artificial Sequence
  Description of Artificial Sequence: Synthetic oligonucleotide
auacguucacaguaagccu

SEQ ID NO: 326924 - RNA, 19 nt, Artificial Sequence
  Description of Artificial Sequence: Synthetic oligonucleotide
augcacgucgaccucuggg

SEQ ID NO: 326925 - RNA, 19 nt, Artificial Sequence
  Description of Artificial Sequence: Synthetic oligonucleotide
augucaaguccuuuagcca

SEQ ID NO: 326926 - RNA, 19 nt, Artificial Sequence
  Description of Artificial Sequence: Synthetic oligonucleotide
ugaugcacacccacaccag

SEQ ID NO: 326927 - RNA, 19 nt, Artificial Sequence
  Description of Artificial Sequence: Synthetic oligonucleotide
acuaugugagggaacaugu

SEQ ID NO: 326928 - RNA, 19 nt, Artificial Sequence
  Description of Artificial Sequence: Synthetic oligonucleotide
ccaagauuagacagcaacc

SEQ ID NO: 326929 - RNA, 19 nt, Artificial Sequence
  Description of Artificial Sequence: Synthetic oligonucleotide
ugaaagcgggacccaugcg

SEQ ID NO: 326930 - RNA, 19 nt, Artificial Sequence
  Description of Artificial Sequence: Synthetic oligonucleotide
uagcaaccgcuuuaaaaga

SEQ ID NO: 326931 - RNA, 19 nt, Artificial Sequence
  Description of Artificial Sequence: Synthetic oligonucleotide
gucaguacagcuauagaca

SEQ ID NO: 326932 - RNA, 19 nt, Artificial Sequence
  Description of Artificial Sequence: Synthetic oligonucleotide
acaguuaccacacggucuu

SEQ ID NO: 326933 - RNA, 19 nt, Artificial Sequence
  Description of Artificial Sequence: Synthetic oligonucleotide
uucuccuaccucuuuccug

SEQ ID NO: 326934 - RNA, 19 nt, Artificial Sequence
  Description of Artificial Sequence: Synthetic oligonucleotide
auucacauauuuuguggaa

SEQ ID NO: 326935 - RNA, 19 nt, Artificial Sequence
  Description of Artificial Sequence: Synthetic oligonucleotide
gucgaccuccuuuucagcc

SEQ ID NO: 326936 - RNA, 19 nt, Artificial Sequence
  Description of Artificial Sequence: Synthetic oligonucleotide
cacaucggugauaaagaac

SEQ ID NO: 326937 - RNA, 19 nt, Artificial Sequence
  Description of Artificial Sequence: Synthetic oligonucleotide
ggcuucaguagguauggcg

SEQ ID NO: 326938 - RNA, 19 nt, Artificial Sequence
  Description of Artificial Sequence: Synthetic oligonucleotide
guaacuuggcuaaagucca

SEQ ID NO: 326939 - RNA, 19 nt, Artificial Sequence
  Description of Artificial Sequence: Synthetic oligonucleotide
cugacacucgacacggaag

SEQ ID NO: 326940 - RNA, 19 nt, Artificial Sequence
  Description of Artificial Sequence: Synthetic oligonucleotide
gacggaguuucuaggacag

SEQ ID NO: 326941 - RNA, 19 nt, Artificial Sequence
  Description of Artificial Sequence: Synthetic oligonucleotide
acacggaagguacaacugu

SEQ ID NO: 326942 - RNA, 19 nt, Artificial Sequence
  Description of Artificial Sequence: Synthetic oligonucleotide
aguuaacguaggagaaggc

SEQ ID NO: 326943 - RNA, 19 nt, Artificial Sequence
  Description of Artificial Sequence: Synthetic oligonucleotide
aaacagagccagccgaguu

SEQ ID NO: 326944 - RNA, 19 nt, Artificial Sequence
  Description of Artificial Sequence: Synthetic oligonucleotide
aauuacacauuggcacuca

SEQ ID NO: 326945 - RNA, 19 nt, Artificial Sequence
  Description of Artificial Sequence: Synthetic oligonucleotide
acaaugguaucaaauacuu

SEQ ID NO: 326946 - RNA, 19 nt, Artificial Sequence
  Description of Artificial Sequence: Synthetic oligonucleotide
agugacgcuguacuccuca

SEQ ID NO: 326947 - RNA, 19 nt, Artificial Sequence
  Description of Artificial Sequence: Synthetic oligonucleotide
uguguuagugacgcuguac

SEQ ID NO: 326948 - RNA, 19 nt, Artificial Sequence
  Description of Artificial Sequence: Synthetic oligonucleotide
acuuggauagagggauccc

SEQ ID NO: 326949 - RNA, 19 nt, Artificial Sequence
  Description of Artificial Sequence: Synthetic oligonucleotide
uuuuaaggaccgaguuugu

SEQ ID NO: 326950 - RNA, 19 nt, Artificial Sequence
  Description of Artificial Sequence: Synthetic oligonucleotide
cauuugcuuguaccgagug

SEQ ID NO: 326951 - RNA, 19 nt, Artificial Sequence
  Description of Artificial Sequence: Synthetic oligonucleotide
uagacauggcagaacuaaa

SEQ ID NO: 326952 - RNA, 19 nt, Artificial Sequence
  Description of Artificial Sequence: Synthetic oligonucleotide
gccauuggaaacaagcaag

SEQ ID NO: 326953 - RNA, 19 nt, Artificial Sequence
  Description of Artificial Sequence: Synthetic oligonucleotide
gagccagccgaguucuggg

SEQ ID NO: 326954 - RNA, 19 nt, Artificial Sequence
  Description of Artificial Sequence: Synthetic oligonucleotide
gacacggaagguacaacug

SEQ ID NO: 326955 - RNA, 19 nt, Artificial Sequence
  Description of Artificial Sequence: Synthetic oligonucleotide
uggaaacaagcaagugcug

SEQ ID NO: 326956 - RNA, 19 nt, Artificial Sequence
  Description of Artificial Sequence: Synthetic oligonucleotide
ggauagcgaugucauaggg

SEQ ID NO: 326957 - RNA, 19 nt, Artificial Sequence
  Description of Artificial Sequence: Synthetic oligonucleotide
caugucgucuauuuucaca

SEQ ID NO: 326958 - RNA, 19 nt, Artificial Sequence
  Description of Artificial Sequence: Synthetic oligonucleotide
augguuacuuggauagagg

SEQ ID NO: 326959 - RNA, 19 nt, Artificial Sequence
  Description of Artificial Sequence: Synthetic oligonucleotide
agugaggucgaccuccuuu

SEQ ID NO: 326960 - RNA, 19 nt, Artificial Sequence
  Description of Artificial Sequence: Synthetic oligonucleotide
acagcaguauucugucaug

SEQ ID NO: 326961 - RNA, 19 nt, Artificial Sequence
  Description of Artificial Sequence: Synthetic oligonucleotide
cuaugugagggaacaugug

SEQ ID NO: 326962 - RNA, 19 nt, Artificial Sequence
  Description of Artificial Sequence: Synthetic oligonucleotide
uguaccgagugaguuacaa

SEQ ID NO: 326963 - RNA, 19 nt, Artificial Sequence
  Description of Artificial Sequence: Synthetic oligonucleotide
uguuagugacgcuguacuc

SEQ ID NO: 326964 - RNA, 19 nt, Artificial Sequence
  Description of Artificial Sequence: Synthetic oligonucleotide
guuucgucuguguuaguga

SEQ ID NO: 326965 - RNA, 19 nt, Artificial Sequence
  Description of Artificial Sequence: Synthetic oligonucleotide
uccuaccucuuuccuguag

SEQ ID NO: 326966 - RNA, 19 nt, Artificial Sequence
  Description of Artificial Sequence: Synthetic oligonucleotide
gcucgagucucucagacac

SEQ ID NO: 326967 - RNA, 19 nt, Artificial Sequence
  Description of Artificial Sequence: Synthetic oligonucleotide
agccaacugacacucgaca

SEQ ID NO: 326968 - RNA, 19 nt, Artificial Sequence
  Description of Artificial Sequence: Synthetic oligonucleotide
uaccacacggucuuccaaa

SEQ ID NO: 326969 - RNA, 19 nt, Artificial Sequence
  Description of Artificial Sequence: Synthetic oligonucleotide
gguuuuaccugaaucucag

SEQ ID NO: 326970 - RNA, 19 nt, Artificial Sequence
  Description of Artificial Sequence: Synthetic oligonucleotide
cuggccuugugcgaguacg

SEQ ID NO: 326971 - RNA, 19 nt, Artificial Sequence
  Description of Artificial Sequence: Synthetic oligonucleotide
guuacuuggauagagggau

SEQ ID NO: 326972 - RNA, 19 nt, Artificial Sequence
  Description of Artificial Sequence: Synthetic oligonucleotide
ugccaauagcaaugguccc

SEQ ID NO: 326973 - RNA, 19 nt, Artificial Sequence
  Description of Artificial Sequence: Synthetic oligonucleotide
gaauuacacauuggcacuc

SEQ ID NO: 326974 - RNA, 19 nt, Artificial Sequence
  Description of Artificial Sequence: Synthetic oligonucleotide
uaaugcuaugcacgucgac

SEQ ID NO: 326975 - RNA, 19 nt, Artificial Sequence
  Description of Artificial Sequence: Synthetic oligonucleotide
aaagcgggacccaugcgcu

SEQ ID NO: 326976 - RNA, 19 nt, Artificial Sequence
  Description of Artificial Sequence: Synthetic oligonucleotide
ucaucgggcaugacaugca

SEQ ID NO: 326977 - RNA, 19 nt, Artificial Sequence
  Description of Artificial Sequence: Synthetic oligonucleotide
augcgcuaaggauuaaaau

SEQ ID NO: 326978 - RNA, 19 nt, Artificial Sequence
  Description of Artificial Sequence: Synthetic oligonucleotide
agcaaccgcuuuaaaagag

SEQ ID NO: 326979 - RNA, 19 nt, Artificial Sequence
  Description of Artificial Sequence: Synthetic oligonucleotide
aguguaaggguggugugga

SEQ ID NO: 326980 - RNA, 19 nt, Artificial Sequence
  Description of Artificial Sequence: Synthetic oligonucleotide
uguggagaacauucuccgu

SEQ ID NO: 326981 - RNA, 19 nt, Artificial Sequence
  Description of Artificial Sequence: Synthetic oligonucleotide
ucccaucuggggaugcccc

SEQ ID NO: 326982 - RNA, 19 nt, Artificial Sequence
  Description of Artificial Sequence: Synthetic oligonucleotide
aucggugauaaagaacaca

SEQ ID NO: 326983 - RNA, 19 nt, Artificial Sequence
  Description of Artificial Sequence: Synthetic oligonucleotide
agugaguuacaaagaaaga

SEQ ID NO: 326984 - RNA, 19 nt, Artificial Sequence
  Description of Artificial Sequence: Synthetic oligonucleotide
agacaaaaggcagugcuua

SEQ ID NO: 326985 - RNA, 19 nt, Artificial Sequence
  Description of Artificial Sequence: Synthetic oligonucleotide
uccugucaguggcauagac

SEQ ID NO: 326986 - RNA, 19 nt, Artificial Sequence
  Description of Artificial Sequence: Synthetic oligonucleotide
acugugugcuguuguauau

SEQ ID NO: 326987 - RNA, 19 nt, Artificial Sequence
  Description of Artificial Sequence: Synthetic oligonucleotide
gggugugagacccaucagc

SEQ ID NO: 326988 - RNA, 19 nt, Artificial Sequence
  Description of Artificial Sequence: Synthetic oligonucleotide
ugugggcgacaguacacug

SEQ ID NO: 326989 - RNA, 19 nt, Artificial Sequence
  Description of Artificial Sequence: Synthetic oligonucleotide
gaccgaguuuguuuccaug

SEQ ID NO: 326990 - RNA, 19 nt, Artificial Sequence
  Description of Artificial Sequence: Synthetic oligonucleotide
aauguacacuguaccaaaa

SEQ ID NO: 326991 - RNA, 19 nt, Artificial Sequence
  Description of Artificial Sequence: Synthetic oligonucleotide
ugugggacucccauugcuu

SEQ ID NO: 326992 - RNA, 19 nt, Artificial Sequence
  Description of Artificial Sequence: Synthetic oligonucleotide
acugugggcgacaguacac

SEQ ID NO: 326993 - RNA, 19 nt, Artificial Sequence
  Description of Artificial Sequence: Synthetic oligonucleotide
agggacggaguuucuagga

SEQ ID NO: 326994 - RNA, 19 nt, Artificial Sequence
  Description of Artificial Sequence: Synthetic oligonucleotide
uaugcacgucgaccucugg

SEQ ID NO: 326995 - RNA, 19 nt, Artificial Sequence
  Description of Artificial Sequence: Synthetic oligonucleotide
agcgaugucauagggaauu

SEQ ID NO: 326996 - RNA, 19 nt, Artificial Sequence
  Description of Artificial Sequence: Synthetic oligonucleotide
guacacugugacucaggcc

SEQ ID NO: 326997 - RNA, 19 nt, Artificial Sequence
  Description of Artificial Sequence: Synthetic oligonucleotide
gguucauguaacuuggcua

SEQ ID NO: 326998 - RNA, 19 nt, Artificial Sequence
  Description of Artificial Sequence: Synthetic oligonucleotide
ucagugaaacugggcuugg

SEQ ID NO: 326999 - RNA, 19 nt, Artificial Sequence
  Description of Artificial Sequence: Synthetic oligonucleotide
caguguaaggguggugugg

SEQ ID NO: 327000 - RNA, 19 nt, Artificial Sequence
  Description of Artificial Sequence: Synthetic oligonucleotide
uagccaacugacacucgac

SEQ ID NO: 327001 - RNA, 19 nt, Artificial Sequence
  Description of Artificial Sequence: Synthetic oligonucleotide
agacauuugcuuguaccga

SEQ ID NO: 327002 - RNA, 19 nt, Artificial Sequence
  Description of Artificial Sequence: Synthetic oligonucleotide
aaggcagugcuuaauuguu

SEQ ID NO: 327003 - RNA, 19 nt, Artificial Sequence
  Description of Artificial Sequence: Synthetic oligonucleotide
caugcgcuaaggauuaaaa

SEQ ID NO: 327004 - RNA, 19 nt, Artificial Sequence
  Description of Artificial Sequence: Synthetic oligonucleotide
aguagguauggcgucuucu

SEQ ID NO: 327005 - RNA, 19 nt, Artificial Sequence
  Description of Artificial Sequence: Synthetic oligonucleotide
augacaugcaugcgucgcu

SEQ ID NO: 327006 - RNA, 19 nt, Artificial Sequence
  Description of Artificial Sequence: Synthetic oligonucleotide
uuacuuggauagagggauc

SEQ ID NO: 327007 - RNA, 19 nt, Artificial Sequence
  Description of Artificial Sequence: Synthetic oligonucleotide
ugaucacaguuuccugccu

SEQ ID NO: 327008 - RNA, 19 nt, Artificial Sequence
  Description of Artificial Sequence: Synthetic oligonucleotide
aaccgcuuuaaaagagcug

SEQ ID NO: 327009 - RNA, 19 nt, Artificial Sequence
  Description of Artificial Sequence: Synthetic oligonucleotide
aguccggauagcgauguca

SEQ ID NO: 327010 - RNA, 19 nt, Artificial Sequence
  Description of Artificial Sequence: Synthetic oligonucleotide
gcaugcgucgcucacgagc

SEQ ID NO: 327011 - RNA, 19 nt, Artificial Sequence
  Description of Artificial Sequence: Synthetic oligonucleotide
ggcgacaguacacugugac

SEQ ID NO: 327012 - RNA, 19 nt, Artificial Sequence
  Description of Artificial Sequence: Synthetic oligonucleotide
gguuucgucuguguuagug

SEQ ID NO: 327013 - RNA, 19 nt, Artificial Sequence
  Description of Artificial Sequence: Synthetic oligonucleotide
ccacacuauuggaaaaucc

SEQ ID NO: 327014 - RNA, 19 nt, Artificial Sequence
  Description of Artificial Sequence: Synthetic oligonucleotide
gcagaacuaaaccacacua

SEQ ID NO: 327015 - RNA, 19 nt, Artificial Sequence
  Description of Artificial Sequence: Synthetic oligonucleotide
gacaggccugcuaagagaa

SEQ ID NO: 327016 - RNA, 19 nt, Artificial Sequence
  Description of Artificial Sequence: Synthetic oligonucleotide
guuaacguaggagaaggcu

SEQ ID NO: 327017 - RNA, 19 nt, Artificial Sequence
  Description of Artificial Sequence: Synthetic oligonucleotide
agcugugcguuaaggcacc

SEQ ID NO: 327018 - RNA, 19 nt, Artificial Sequence
  Description of Artificial Sequence: Synthetic oligonucleotide
uggguagcuugaaugcuuu

SEQ ID NO: 327019 - RNA, 19 nt, Artificial Sequence
  Description of Artificial Sequence: Synthetic oligonucleotide
gaaccauuggaggcagaug

SEQ ID NO: 327020 - RNA, 19 nt, Artificial Sequence
  Description of Artificial Sequence: Synthetic oligonucleotide
uuuaaggaccgaguuuguu

SEQ ID NO: 327021 - RNA, 19 nt, Artificial Sequence
  Description of Artificial Sequence: Synthetic oligonucleotide
guggugccaguccggauag

SEQ ID NO: 327022 - RNA, 19 nt, Artificial Sequence
  Description of Artificial Sequence: Synthetic oligonucleotide
ugguuagcaacaggacccc

SEQ ID NO: 327023 - RNA, 19 nt, Artificial Sequence
  Description of Artificial Sequence: Synthetic oligonucleotide
gaggucgaccuccuuuuca

SEQ ID NO: 327024 - RNA, 19 nt, Artificial Sequence
  Description of Artificial Sequence: Synthetic oligonucleotide
guuaggguggcccguggca

SEQ ID NO: 327025 - RNA, 19 nt, Artificial Sequence
  Description of Artificial Sequence: Synthetic oligonucleotide
acagcuauagacaccccau

SEQ ID NO: 327026 - RNA, 19 nt, Artificial Sequence
  Description of Artificial Sequence: Synthetic oligonucleotide
ccauuuguuagacacuuca

SEQ ID NO: 327027 - RNA, 19 nt, Artificial Sequence
  Description of Artificial Sequence: Synthetic oligonucleotide
uccguuucccagugagcug

SEQ ID NO: 327028 - RNA, 19 nt, Artificial Sequence
  Description of Artificial Sequence: Synthetic oligonucleotide
auguaaugcuaugcacguc

SEQ ID NO: 327029 - RNA, 19 nt, Artificial Sequence
  Description of Artificial Sequence: Synthetic oligonucleotide
gcuauagacaccccauguc

SEQ ID NO: 327030 - RNA, 19 nt, Artificial Sequence
  Description of Artificial Sequence: Synthetic oligonucleotide
uuaaggcaccagaacuauu

SEQ ID NO: 327031 - RNA, 19 nt, Artificial Sequence
  Description of Artificial Sequence: Synthetic oligonucleotide
gaaaucagcuggcccuaga

SEQ ID NO: 327032 - RNA, 19 nt, Artificial Sequence
  Description of Artificial Sequence: Synthetic oligonucleotide
acguucacaguaagccugg

SEQ ID NO: 327033 - RNA, 19 nt, Artificial Sequence
  Description of Artificial Sequence: Synthetic oligonucleotide
ggaaccaaagugguuggug

SEQ ID NO: 327034 - RNA, 19 nt, Artificial Sequence
  Description of Artificial Sequence: Synthetic oligonucleotide
auauggagcagugguccug

SEQ ID NO: 327035 - RNA, 19 nt, Artificial Sequence
  Description of Artificial Sequence: Synthetic oligonucleotide
cucaaggcgggcuguggug

SEQ ID NO: 327036 - RNA, 19 nt, Artificial Sequence
  Description of Artificial Sequence: Synthetic oligonucleotide
gaguacguggaaccaaagu

SEQ ID NO: 327037 - RNA, 19 nt, Artificial Sequence
  Description of Artificial Sequence: Synthetic oligonucleotide
cagcuauagacaccccaug

SEQ ID NO: 327038 - RNA, 19 nt, Artificial Sequence
  Description of Artificial Sequence: Synthetic oligonucleotide
uugugcgaguacguggaac

SEQ ID NO: 327039 - RNA, 19 nt, Artificial Sequence
  Description of Artificial Sequence: Synthetic oligonucleotide
cuuuccuguagcaaccgcu

SEQ ID NO: 327040 - RNA, 19 nt, Artificial Sequence
  Description of Artificial Sequence: Synthetic oligonucleotide
agcaaccuagugugaaaau

SEQ ID NO: 327041 - RNA, 19 nt, Artificial Sequence
  Description of Artificial Sequence: Synthetic oligonucleotide
uaacuuggcuaaaguccaa

SEQ ID NO: 327042 - RNA, 19 nt, Artificial Sequence
  Description of Artificial Sequence: Synthetic oligonucleotide
cuaugcacgucgaccucug

SEQ ID NO: 327043 - RNA, 19 nt, Artificial Sequence
  Description of Artificial Sequence: Synthetic oligonucleotide
agccagaacgcccuccuuu

SEQ ID NO: 327044 - RNA, 19 nt, Artificial Sequence
  Description of Artificial Sequence: Synthetic oligonucleotide
ugucgucuauuuucacauc

SEQ ID NO: 327045 - RNA, 19 nt, Artificial Sequence
  Description of Artificial Sequence: Synthetic oligonucleotide
auggcagaacuaaaccaca

SEQ ID NO: 327046 - RNA, 19 nt, Artificial Sequence
  Description of Artificial Sequence: Synthetic oligonucleotide
ucaugguuacuuggauaga

SEQ ID NO: 327047 - RNA, 19 nt, Artificial Sequence
  Description of Artificial Sequence: Synthetic oligonucleotide
guacacuguaccaaaauuu

SEQ ID NO: 327048 - RNA, 19 nt, Artificial Sequence
  Description of Artificial Sequence: Synthetic oligonucleotide
guaggagaaggcuguaggu

SEQ ID NO: 327049 - RNA, 19 nt, Artificial Sequence
  Description of Artificial Sequence: Synthetic oligonucleotide
ugacaugcaugcgucgcuc

SEQ ID NO: 327050 - RNA, 19 nt, Artificial Sequence
  Description of Artificial Sequence: Synthetic oligonucleotide
uggccuugugcgaguacgu

SEQ ID NO: 327051 - RNA, 19 nt, Artificial Sequence
  Description of Artificial Sequence: Synthetic oligonucleotide
gaugcguggugugggacuc

SEQ ID NO: 327052 - RNA, 19 nt, Artificial Sequence
  Description of Artificial Sequence: Synthetic oligonucleotide
gacucccauugcuuugcac

SEQ ID NO: 327053 - RNA, 19 nt, Artificial Sequence
  Description of Artificial Sequence: Synthetic oligonucleotide
gacaugcaugcgucgcuca

SEQ ID NO: 327054 - RNA, 19 nt, Artificial Sequence
  Description of Artificial Sequence: Synthetic oligonucleotide
acguaggagaaggcuguag

SEQ ID NO: 327055 - RNA, 19 nt, Artificial Sequence
  Description of Artificial Sequence: Synthetic oligonucleotide
ggacggaguuucuaggaca

SEQ ID NO: 327056 - RNA, 19 nt, Artificial Sequence
  Description of Artificial Sequence: Synthetic oligonucleotide
uaggucuauggagucuggu

SEQ ID NO: 327057 - RNA, 19 nt, Artificial Sequence
  Description of Artificial Sequence: Synthetic oligonucleotide
ccccaugucgucuauuuuc

SEQ ID NO: 327058 - RNA, 19 nt, Artificial Sequence
  Description of Artificial Sequence: Synthetic oligonucleotide
acugaaagcgggacccaug

SEQ ID NO: 327059 - RNA, 19 nt, Artificial Sequence
  Description of Artificial Sequence: Synthetic oligonucleotide
ugcuaugcacgucgaccuc

SEQ ID NO: 327060 - RNA, 19 nt, Artificial Sequence
  Description of Artificial Sequence: Synthetic oligonucleotide
caaagugguuggugaugac

SEQ ID NO: 327061 - RNA, 19 nt, Artificial Sequence
  Description of Artificial Sequence: Synthetic oligonucleotide
guaccaacacugccuuaac

SEQ ID NO: 327062 - RNA, 19 nt, Artificial Sequence
  Description of Artificial Sequence: Synthetic oligonucleotide
acgucgaccucugggaaga

SEQ ID NO: 327063 - RNA, 19 nt, Artificial Sequence
  Description of Artificial Sequence: Synthetic oligonucleotide
gccaauagcaauggucccc

SEQ ID NO: 327064 - RNA, 19 nt, Artificial Sequence
  Description of Artificial Sequence: Synthetic oligonucleotide
ugcgaguacguggaaccaa

SEQ ID NO: 327065 - RNA, 19 nt, Artificial Sequence
  Description of Artificial Sequence: Synthetic oligonucleotide
guaggucuauggagucugg

SEQ ID NO: 327066 - RNA, 19 nt, Artificial Sequence
  Description of Artificial Sequence: Synthetic oligonucleotide
caaccgcuuuaaaagagcu

SEQ ID NO: 327067 - RNA, 19 nt, Artificial Sequence
  Description of Artificial Sequence: Synthetic oligonucleotide
ggucugguagaugaugcac

SEQ ID NO: 327068 - RNA, 19 nt, Artificial Sequence
  Description of Artificial Sequence: Synthetic oligonucleotide
caucaucgggcaugacaug

SEQ ID NO: 327069 - RNA, 19 nt, Artificial Sequence
  Description of Artificial Sequence: Synthetic oligonucleotide
ucccagugagcuguccugu

SEQ ID NO: 327070 - RNA, 19 nt, Artificial Sequence
  Description of Artificial Sequence: Synthetic oligonucleotide
gccaaggacucagugaaac

SEQ ID NO: 327071 - RNA, 19 nt, Artificial Sequence
  Description of Artificial Sequence: Synthetic oligonucleotide
ugcguggugugggacuccc

SEQ ID NO: 327072 - RNA, 19 nt, Artificial Sequence
  Description of Artificial Sequence: Synthetic oligonucleotide
gugagggaacauguggaca

SEQ ID NO: 327073 - RNA, 19 nt, Artificial Sequence
  Description of Artificial Sequence: Synthetic oligonucleotide
accuucaguccugaucaca

SEQ ID NO: 327074 - RNA, 19 nt, Artificial Sequence
  Description of Artificial Sequence: Synthetic oligonucleotide
gcguuaaggcaccagaacu

SEQ ID NO: 327075 - RNA, 19 nt, Artificial Sequence
  Description of Artificial Sequence: Synthetic oligonucleotide
aagagcugagguagaugaa

SEQ ID NO: 327076 - RNA, 19 nt, Artificial Sequence
  Description of Artificial Sequence: Synthetic oligonucleotide
uagcgaugucauagggaau

SEQ ID NO: 327077 - RNA, 19 nt, Artificial Sequence
  Description of Artificial Sequence: Synthetic oligonucleotide
acacggucuuccaaaggca

SEQ ID NO: 327078 - RNA, 19 nt, Artificial Sequence
  Description of Artificial Sequence: Synthetic oligonucleotide
acauuugcuuguaccgagu

SEQ ID NO: 327079 - RNA, 19 nt, Artificial Sequence
  Description of Artificial Sequence: Synthetic oligonucleotide
ggauuuuaaggaccgaguu

SEQ ID NO: 327080 - RNA, 19 nt, Artificial Sequence
  Description of Artificial Sequence: Synthetic oligonucleotide
ccuuaacaagcuucaaaga

SEQ ID NO: 327081 - RNA, 19 nt, Artificial Sequence
  Description of Artificial Sequence: Synthetic oligonucleotide
guaccgagugaguuacaaa

SEQ ID NO: 327082 - RNA, 19 nt, Artificial Sequence
  Description of Artificial Sequence: Synthetic oligonucleotide
gggacggaguuucuaggac

SEQ ID NO: 327083 - RNA, 19 nt, Artificial Sequence
  Description of Artificial Sequence: Synthetic oligonucleotide
ucacugaaagcgggaccca

SEQ ID NO: 327084 - RNA, 19 nt, Artificial Sequence
  Description of Artificial Sequence: Synthetic oligonucleotide
uuguaccgagugaguuaca

SEQ ID NO: 327085 - RNA, 19 nt, Artificial Sequence
  Description of Artificial Sequence: Synthetic oligonucleotide
guaaugcuaugcacgucga

SEQ ID NO: 327086 - RNA, 19 nt, Artificial Sequence
  Description of Artificial Sequence: Synthetic oligonucleotide
caguggcauagacucagga

SEQ ID NO: 327087 - RNA, 19 nt, Artificial Sequence
  Description of Artificial Sequence: Synthetic oligonucleotide
ggacaggccugcuaagaga

SEQ ID NO: 327088 - RNA, 19 nt, Artificial Sequence
  Description of Artificial Sequence: Synthetic oligonucleotide
gguuaggguggcccguggc

SEQ ID NO: 327089 - RNA, 19 nt, Artificial Sequence
  Description of Artificial Sequence: Synthetic oligonucleotide
uccuggucugguagaugau

SEQ ID NO: 327090 - RNA, 19 nt, Artificial Sequence
  Description of Artificial Sequence: Synthetic oligonucleotide
cauguccgugcuccagaug

SEQ ID NO: 327091 - RNA, 19 nt, Artificial Sequence
  Description of Artificial Sequence: Synthetic oligonucleotide
cuauggagucugguucaug

SEQ ID NO: 327092 - RNA, 19 nt, Artificial Sequence
  Description of Artificial Sequence: Synthetic oligonucleotide
ggcaauacguucacaguaa

SEQ ID NO: 327093 - RNA, 19 nt, Artificial Sequence
  Description of Artificial Sequence: Synthetic oligonucleotide
guuaaggcaccagaacuau

SEQ ID NO: 327094 - RNA, 19 nt, Artificial Sequence
  Description of Artificial Sequence: Synthetic oligonucleotide
ugcaugcgucgcucacgag

SEQ ID NO: 327095 - RNA, 19 nt, Artificial Sequence
  Description of Artificial Sequence: Synthetic oligonucleotide
acaguaagccuggccuugu

SEQ ID NO: 327096 - RNA, 19 nt, Artificial Sequence
  Description of Artificial Sequence: Synthetic oligonucleotide
cuccguuucccagugagcu

SEQ ID NO: 327097 - RNA, 19 nt, Artificial Sequence
  Description of Artificial Sequence: Synthetic oligonucleotide
gacccaugcgcuaaggauu

SEQ ID NO: 327098 - RNA, 19 nt, Artificial Sequence
  Description of Artificial Sequence: Synthetic oligonucleotide
cccuccguuucccagugag

SEQ ID NO: 327099 - RNA, 19 nt, Artificial Sequence
  Description of Artificial Sequence: Synthetic oligonucleotide
aucgggcaugacaugcaug

SEQ ID NO: 327100 - RNA, 19 nt, Artificial Sequence
  Description of Artificial Sequence: Synthetic oligonucleotide
gcaaccuagugugaaaaua

SEQ ID NO: 327101 - RNA, 19 nt, Artificial Sequence
  Description of Artificial Sequence: Synthetic oligonucleotide
gaaacagagccagccgagu

SEQ ID NO: 327102 - RNA, 19 nt, Artificial Sequence
  Description of Artificial Sequence: Synthetic oligonucleotide
ggugugggacucccauugc

SEQ ID NO: 327103 - RNA, 19 nt, Artificial Sequence
  Description of Artificial Sequence: Synthetic oligonucleotide
cagcaaccuagugugaaaa

SEQ ID NO: 327104 - RNA, 19 nt, Artificial Sequence
  Description of Artificial Sequence: Synthetic oligonucleotide
ccauguaguuucuauugaa

SEQ ID NO: 327105 - RNA, 19 nt, Artificial Sequence
  Description of Artificial Sequence: Synthetic oligonucleotide
gaacuauuccugacccucu

SEQ ID NO: 327106 - RNA, 19 nt, Artificial Sequence
  Description of Artificial Sequence: Synthetic oligonucleotide
augcguggugugggacucc

SEQ ID NO: 327107 - RNA, 19 nt, Artificial Sequence
  Description of Artificial Sequence: Synthetic oligonucleotide
gggacucccauugcuuugc

SEQ ID NO: 327108 - RNA, 19 nt, Artificial Sequence
  Description of Artificial Sequence: Synthetic oligonucleotide
gugcguuaaggcaccagaa

SEQ ID NO: 327109 - RNA, 19 nt, Artificial Sequence
  Description of Artificial Sequence: Synthetic oligonucleotide
cccaugucgucuauuuuca

SEQ ID NO: 327110 - RNA, 19 nt, Artificial Sequence
  Description of Artificial Sequence: Synthetic oligonucleotide
cugugcguuaaggcaccag

SEQ ID NO: 327111 - RNA, 19 nt, Artificial Sequence
  Description of Artificial Sequence: Synthetic oligonucleotide
ggcacucacaagaugguua

SEQ ID NO: 327112 - RNA, 19 nt, Artificial Sequence
  Description of Artificial Sequence: Synthetic oligonucleotide
ggcauagacucaggacuag

SEQ ID NO: 327113 - RNA, 19 nt, Artificial Sequence
  Description of Artificial Sequence: Synthetic oligonucleotide
gcuuguaccgagugaguua

SEQ ID NO: 327114 - RNA, 19 nt, Artificial Sequence
  Description of Artificial Sequence: Synthetic oligonucleotide
cucgacacggaagguacaa

SEQ ID NO: 327115 - RNA, 19 nt, Artificial Sequence
  Description of Artificial Sequence: Synthetic oligonucleotide
aagcgggacccaugcgcua

SEQ ID NO: 327116 - RNA, 19 nt, Artificial Sequence
  Description of Artificial Sequence: Synthetic oligonucleotide
ccgagugaguuacaaagaa

SEQ ID NO: 327117 - RNA, 19 nt, Artificial Sequence
  Description of Artificial Sequence: Synthetic oligonucleotide
ucccaguguaaggguggug

SEQ ID NO: 327118 - RNA, 19 nt, Artificial Sequence
  Description of Artificial Sequence: Synthetic oligonucleotide
agacuaugugagggaacau

SEQ ID NO: 327119 - RNA, 19 nt, Artificial Sequence
  Description of Artificial Sequence: Synthetic oligonucleotide
guccgugcuccagauguca

SEQ ID NO: 327120 - RNA, 19 nt, Artificial Sequence
  Description of Artificial Sequence: Synthetic oligonucleotide
acccaugcgcuaaggauua

SEQ ID NO: 327121 - RNA, 19 nt, Artificial Sequence
  Description of Artificial Sequence: Synthetic oligonucleotide
gggucaguacagcuauaga

SEQ ID NO: 327122 - RNA, 19 nt, Artificial Sequence
  Description of Artificial Sequence: Synthetic oligonucleotide
caguagguauggcgucuuc

SEQ ID NO: 327123 - RNA, 19 nt, Artificial Sequence
  Description of Artificial Sequence: Synthetic oligonucleotide
ucccaccgcuucuccuacc

SEQ ID NO: 327124 - RNA, 19 nt, Artificial Sequence
  Description of Artificial Sequence: Synthetic oligonucleotide
ggacccaugcgcuaaggau

SEQ ID NO: 327125 - RNA, 19 nt, Artificial Sequence
  Description of Artificial Sequence: Synthetic oligonucleotide
ggguuaggguggcccgugg

SEQ ID NO: 327126 - RNA, 19 nt, Artificial Sequence
  Description of Artificial Sequence: Synthetic oligonucleotide
gggauuuuaaggaccgagu

SEQ ID NO: 327127 - RNA, 19 nt, Artificial Sequence
  Description of Artificial Sequence: Synthetic oligonucleotide
ggacuguacaagacuaugu

SEQ ID NO: 327128 - RNA, 19 nt, Artificial Sequence
  Description of Artificial Sequence: Synthetic oligonucleotide
ccaggugaugcguggugug

SEQ ID NO: 327129 - RNA, 19 nt, Artificial Sequence
  Description of Artificial Sequence: Synthetic oligonucleotide
gcugccggcauguaaugcu

SEQ ID NO: 327130 - RNA, 19 nt, Artificial Sequence
  Description of Artificial Sequence: Synthetic oligonucleotide
ccuccguuucccagugagc

SEQ ID NO: 327131 - RNA, 19 nt, Artificial Sequence
  Description of Artificial Sequence: Synthetic oligonucleotide
agcgggacccaugcgcuaa

SEQ ID NO: 327132 - RNA, 19 nt, Artificial Sequence
  Description of Artificial Sequence: Synthetic oligonucleotide
gggacccaugcgcuaagga

SEQ ID NO: 327133 - RNA, 19 nt, Artificial Sequence
  Description of Artificial Sequence: Synthetic oligonucleotide
cggaguuucuaggacaguc

SEQ ID NO: 327134 - RNA, 19 nt, Artificial Sequence
  Description of Artificial Sequence: Synthetic oligonucleotide
agacagcaaccuaguguga

SEQ ID NO: 327135 - RNA, 19 nt, Artificial Sequence
  Description of Artificial Sequence: Synthetic oligonucleotide
ccauuggaaacaagcaagu

SEQ ID NO: 327136 - RNA, 19 nt, Artificial Sequence
  Description of Artificial Sequence: Synthetic oligonucleotide
acucgacacggaagguaca

SEQ ID NO: 327137 - RNA, 19 nt, Artificial Sequence
  Description of Artificial Sequence: Synthetic oligonucleotide
ugguuucgucuguguuagu

SEQ ID NO: 327138 - RNA, 19 nt, Artificial Sequence
  Description of Artificial Sequence: Synthetic oligonucleotide
cuucaguccugaucacagu

SEQ ID NO: 327139 - RNA, 19 nt, Artificial Sequence
  Description of Artificial Sequence: Synthetic oligonucleotide
cuucuccuaccucuuuccu

SEQ ID NO: 327140 - RNA, 19 nt, Artificial Sequence
  Description of Artificial Sequence: Synthetic oligonucleotide
cguuaaggcaccagaacua

SEQ ID NO: 327141 - RNA, 19 nt, Artificial Sequence
  Description of Artificial Sequence: Synthetic oligonucleotide
gugcgaguacguggaacca

SEQ ID NO: 327142 - RNA, 19 nt, Artificial Sequence
  Description of Artificial Sequence: Synthetic oligonucleotide
gcauagacucaggacuaga

SEQ ID NO: 327143 - RNA, 19 nt, Artificial Sequence
  Description of Artificial Sequence: Synthetic oligonucleotide
acggaguuucuaggacagu

SEQ ID NO: 327144 - RNA, 19 nt, Artificial Sequence
  Description of Artificial Sequence: Synthetic oligonucleotide
cgaguacguggaaccaaag

SEQ ID NO: 327145 - RNA, 19 nt, Artificial Sequence
  Description of Artificial Sequence: Synthetic oligonucleotide
ggccuugugcgaguacgug

SEQ ID NO: 327146 - RNA, 19 nt, Artificial Sequence
  Description of Artificial Sequence: Synthetic oligonucleotide
guccggauagcgaugucau

SEQ ID NO: 327147 - RNA, 19 nt, Artificial Sequence
  Description of Artificial Sequence: Synthetic oligonucleotide
ggaggcacaaugguuucgu

SEQ ID NO: 327148 - RNA, 19 nt, Artificial Sequence
  Description of Artificial Sequence: Synthetic oligonucleotide
cgagugaguuacaaagaaa

SEQ ID NO: 327149 - RNA, 19 nt, Artificial Sequence
  Description of Artificial Sequence: Synthetic oligonucleotide
agccaacuguggagaauaa

SEQ ID NO: 327150 - RNA, 19 nt, Artificial Sequence
  Description of Artificial Sequence: Synthetic oligonucleotide
gcgaguacguggaaccaaa

SEQ ID NO: 327151 - RNA, 19 nt, Artificial Sequence
  Description of Artificial Sequence: Synthetic oligonucleotide
acguggaaccaaagugguu

SEQ ID NO: 327152 - RNA, 19 nt, Artificial Sequence
  Description of Artificial Sequence: Synthetic oligonucleotide
uggugccaguccggauagc

SEQ ID NO: 327153 - RNA, 19 nt, Artificial Sequence
  Description of Artificial Sequence: Synthetic oligonucleotide
cugugggcgacaguacacu

SEQ ID NO: 327154 - RNA, 19 nt, Artificial Sequence
  Description of Artificial Sequence: Synthetic oligonucleotide
caucgggcaugacaugcau

SEQ ID NO: 327155 - RNA, 19 nt, Artificial Sequence
  Description of Artificial Sequence: Synthetic oligonucleotide
cccaguguaaggguggugu

SEQ ID NO: 327156 - RNA, 19 nt, Artificial Sequence
  Description of Artificial Sequence: Synthetic oligonucleotide
gcuaugcacgucgaccucu

SEQ ID NO: 327157 - RNA, 19 nt, Artificial Sequence
  Description of Artificial Sequence: Synthetic oligonucleotide
ggacucccauugcuuugca

SEQ ID NO: 327158 - RNA, 19 nt, Artificial Sequence
  Description of Artificial Sequence: Synthetic oligonucleotide
ggagaaggcuguaggucua

SEQ ID NO: 327159 - RNA, 19 nt, Artificial Sequence
  Description of Artificial Sequence: Synthetic oligonucleotide
cacagcuaaugugguuuua

SEQ ID NO: 327160 - RNA, 19 nt, Artificial Sequence
  Description of Artificial Sequence: Synthetic oligonucleotide
cacacucaaggcgggcugu

SEQ ID NO: 327161 - RNA, 19 nt, Artificial Sequence
  Description of Artificial Sequence: Synthetic oligonucleotide
gucccaguguaaggguggu

SEQ ID NO: 327162 - RNA, 19 nt, Artificial Sequence
  Description of Artificial Sequence: Synthetic oligonucleotide
gcauguccgugcuccagau

SEQ ID NO: 327163 - RNA, 19 nt, Artificial Sequence
  Description of Artificial Sequence: Synthetic oligonucleotide
cacugaaagcgggacccau

SEQ ID NO: 327164 - RNA, 19 nt, Artificial Sequence
  Description of Artificial Sequence: Synthetic oligonucleotide
ccaugcgcuaaggauuaaa

SEQ ID NO: 327165 - RNA, 19 nt, Artificial Sequence
  Description of Artificial Sequence: Synthetic oligonucleotide
cgcuaaggauuaaaauagu

SEQ ID NO: 327166 - RNA, 19 nt, Artificial Sequence
  Description of Artificial Sequence: Synthetic oligonucleotide
ccaccgcuucuccuaccuc

SEQ ID NO: 327167 - RNA, 19 nt, Artificial Sequence
  Description of Artificial Sequence: Synthetic oligonucleotide
gcugugcguuaaggcacca

SEQ ID NO: 327168 - RNA, 19 nt, Artificial Sequence
  Description of Artificial Sequence: Synthetic oligonucleotide
cgggacccaugcgcuaagg

SEQ ID NO: 327169 - RNA, 19 nt, Artificial Sequence
  Description of Artificial Sequence: Synthetic oligonucleotide
cccaccgcuucuccuaccu

SEQ ID NO: 327170 - RNA, 19 nt, Artificial Sequence
  Description of Artificial Sequence: Synthetic oligonucleotide
cgagucucucagacacaca

SEQ ID NO: 327171 - RNA, 19 nt, Artificial Sequence
  Description of Artificial Sequence: Synthetic oligonucleotide
gccuagcuuuucggugcca

SEQ ID NO: 327172 - RNA, 19 nt, Artificial Sequence
  Description of Artificial Sequence: Synthetic oligonucleotide
gcgaugucauagggaauuu

SEQ ID NO: 327173 - RNA, 19 nt, Artificial Sequence
  Description of Artificial Sequence: Synthetic oligonucleotide
gcguggugugggacuccca

SEQ ID NO: 327174 - RNA, 19 nt, Artificial Sequence
  Description of Artificial Sequence: Synthetic oligonucleotide
ggacugugucaggguugaa

SEQ ID NO: 327175 - RNA, 19 nt, Artificial Sequence
  Description of Artificial Sequence: Synthetic oligonucleotide
cgucgaccucugggaagag

SEQ ID NO: 327176 - RNA, 19 nt, Artificial Sequence
  Description of Artificial Sequence: Synthetic oligonucleotide
cgcucacgagcugcaggga

SEQ ID NO: 327177 - RNA, 19 nt, Artificial Sequence
  Description of Artificial Sequence: Synthetic oligonucleotide
cccaugcgcuaaggauuaa

SEQ ID NO: 327178 - RNA, 19 nt, Artificial Sequence
  Description of Artificial Sequence: Synthetic oligonucleotide
uguauuaaagcuaucagcc

SEQ ID NO: 327179 - RNA, 19 nt, Artificial Sequence
  Description of Artificial Sequence: Synthetic oligonucleotide
aaccauagcacacagcuac

SEQ ID NO: 327180 - RNA, 19 nt, Artificial Sequence
  Description of Artificial Sequence: Synthetic oligonucleotide
  modified_base (6)..(6): a, c, u, g, unknown or other
uaaagnaucagucacuuac

SEQ ID NO: 327181 - RNA, 19 nt, Artificial Sequence
  Description of Artificial Sequence: Synthetic oligonucleotide
ugauaaaccaccaucaaga

SEQ ID NO: 327182 - RNA, 19 nt, Artificial Sequence
  Description of Artificial Sequence: Synthetic oligonucleotide
uauagagguacacaguuag

SEQ ID NO: 327183 - RNA, 19 nt, Artificial Sequence
  Description of Artificial Sequence: Synthetic oligonucleotide
  modified_base (2)..(2): a, c, u, g, unknown or other
gnaucagucacuuacuuac

SEQ ID NO: 327184 - RNA, 19 nt, Artificial Sequence
  Description of Artificial Sequence: Synthetic oligonucleotide
aaagcuaucagcccuagaa

SEQ ID NO: 327185 - RNA, 19 nt, Artificial Sequence
  Description of Artificial Sequence: Synthetic oligonucleotide
gauuaaguuaagcaagugc

SEQ ID NO: 327186 - RNA, 19 nt, Artificial Sequence
  Description of Artificial Sequence: Synthetic oligonucleotide
uuuacuaccuucuaacugu

SEQ ID NO: 327187 - RNA, 19 nt, Artificial Sequence
  Description of Artificial Sequence: Synthetic oligonucleotide
aacugucucuuacauaacg

SEQ ID NO: 327188 - RNA, 19 nt, Artificial Sequence
  Description of Artificial Sequence: Synthetic oligonucleotide
guagagauaacuauagagg

SEQ ID NO: 327189 - RNA, 19 nt, Artificial Sequence
  Description of Artificial Sequence: Synthetic oligonucleotide
aguauuacuaauguggaag

SEQ ID NO: 327190 - RNA, 19 nt, Artificial Sequence
  Description of Artificial Sequence: Synthetic oligonucleotide
uucaugggguuuaacaugg

SEQ ID NO: 327191 - RNA, 19 nt, Artificial Sequence
  Description of Artificial Sequence: Synthetic oligonucleotide
uauuaaagcuaucagcccu

SEQ ID NO: 327192 - RNA, 19 nt, Artificial Sequence
  Description of Artificial Sequence: Synthetic oligonucleotide
uuggguugcacaaauaaga

SEQ ID NO: 327193 - RNA, 19 nt, Artificial Sequence
  Description of Artificial Sequence: Synthetic oligonucleotide
acuagugauauuuugggcu

SEQ ID NO: 327194 - RNA, 19 nt, Artificial Sequence
  Description of Artificial Sequence: Synthetic oligonucleotide
uuacuaauguggaagaguc

SEQ ID NO: 327195 - RNA, 19 nt, Artificial Sequence
  Description of Artificial Sequence: Synthetic oligonucleotide
gauauuuugggcuggauaa

SEQ ID NO: 327196 - RNA, 19 nt, Artificial Sequence
  Description of Artificial Sequence: Synthetic oligonucleotide
uagagauaacuauagaggu

SEQ ID NO: 327197 - RNA, 19 nt, Artificial Sequence
  Description of Artificial Sequence: Synthetic oligonucleotide
aaucggguaugacagauga

SEQ ID NO: 327198 - RNA, 19 nt, Artificial Sequence
  Description of Artificial Sequence: Synthetic oligonucleotide
acugacauuagacaggggu

SEQ ID NO: 327199 - RNA, 19 nt, Artificial Sequence
  Description of Artificial Sequence: Synthetic oligonucleotide
agagguacacaguuaggcc

SEQ ID NO: 327200 - RNA, 19 nt, Artificial Sequence
  Description of Artificial Sequence: Synthetic oligonucleotide
ucuacccacauaaauaccu

SEQ ID NO: 327201 - RNA, 19 nt, Artificial Sequence
  Description of Artificial Sequence: Synthetic oligonucleotide
acacaaagugaacuugugc

SEQ ID NO: 327202 - RNA, 19 nt, Artificial Sequence
  Description of Artificial Sequence: Synthetic oligonucleotide
ucuacugauaggcaacacc

SEQ ID NO: 327203 - RNA, 19 nt, Artificial Sequence
  Description of Artificial Sequence: Synthetic oligonucleotide
aguuucagucuacugauag

SEQ ID NO: 327204 - RNA, 19 nt, Artificial Sequence
  Description of Artificial Sequence: Synthetic oligonucleotide
auguggaagagucuaacag

SEQ ID NO: 327205 - RNA, 19 nt, Artificial Sequence
  Description of Artificial Sequence: Synthetic oligonucleotide
gagauaacuauagagguac

SEQ ID NO: 327206 - RNA, 19 nt, Artificial Sequence
  Description of Artificial Sequence: Synthetic oligonucleotide
aaagcuagcccuuugcuuu

SEQ ID NO: 327207 - RNA, 19 nt, Artificial Sequence
  Description of Artificial Sequence: Synthetic oligonucleotide
acacuacuaaaccacgugg

SEQ ID NO: 327208 - RNA, 19 nt, Artificial Sequence
  Description of Artificial Sequence: Synthetic oligonucleotide
agucuaacagauccucugc

SEQ ID NO: 327209 - RNA, 19 nt, Artificial Sequence
  Description of Artificial Sequence: Synthetic oligonucleotide
ucuggaaucggguaugaca

SEQ ID NO: 327210 - RNA, 19 nt, Artificial Sequence
  Description of Artificial Sequence: Synthetic oligonucleotide
cuggaaucggguaugacag

SEQ ID NO: 327211 - RNA, 19 nt, Artificial Sequence
  Description of Artificial Sequence: Synthetic oligonucleotide
ucuauggcggguuucucgg

SEQ ID NO: 327212 - RNA, 19 nt, Artificial Sequence
  Description of Artificial Sequence: Synthetic oligonucleotide
uuuugggcuggauaaguag

SEQ ID NO: 327213 - RNA, 19 nt, Artificial Sequence
  Description of Artificial Sequence: Synthetic oligonucleotide
auaaaguagcuaauucacc

SEQ ID NO: 327214 - RNA, 19 nt, Artificial Sequence
  Description of Artificial Sequence: Synthetic oligonucleotide
uaaguuucagucuacugau

SEQ ID NO: 327215 - RNA, 19 nt, Artificial Sequence
  Description of Artificial Sequence: Synthetic oligonucleotide
gucacuuacuuacugcagg

SEQ ID NO: 327216 - RNA, 19 nt, Artificial Sequence
  Description of Artificial Sequence: Synthetic oligonucleotide
auauccaauauacuacaca

SEQ ID NO: 327217 - RNA, 19 nt, Artificial Sequence
  Description of Artificial Sequence: Synthetic oligonucleotide
agugacucauuuuauauua

SEQ ID NO: 327218 - RNA, 19 nt, Artificial Sequence
  Description of Artificial Sequence: Synthetic oligonucleotide
uagagguacacaguuaggc

SEQ ID NO: 327219 - RNA, 19 nt, Artificial Sequence
  Description of Artificial Sequence: Synthetic oligonucleotide
ucuuacauaacgucucagu

SEQ ID NO: 327220 - RNA, 19 nt, Artificial Sequence
  Description of Artificial Sequence: Synthetic oligonucleotide
agcuacaguucauaaaucu

SEQ ID NO: 327221 - RNA, 19 nt, Artificial Sequence
  Description of Artificial Sequence: Synthetic oligonucleotide
uacuaaaccacguggcuac

SEQ ID NO: 327222 - RNA, 19 nt, Artificial Sequence
  Description of Artificial Sequence: Synthetic oligonucleotide
agacaaaacuacuaccccu

SEQ ID NO: 327223 - RNA, 19 nt, Artificial Sequence
  Description of Artificial Sequence: Synthetic oligonucleotide
acuuacuuacugcaggacu

SEQ ID NO: 327224 - RNA, 19 nt, Artificial Sequence
  Description of Artificial Sequence: Synthetic oligonucleotide
ucgucuaaauccgacguag

SEQ ID NO: 327225 - RNA, 19 nt, Artificial Sequence
  Description of Artificial Sequence: Synthetic oligonucleotide
cuaccuauguguuacuauc

SEQ ID NO: 327226 - RNA, 19 nt, Artificial Sequence
  Description of Artificial Sequence: Synthetic oligonucleotide
gauaaaccaccaucaagac

SEQ ID NO: 327227 - RNA, 19 nt, Artificial Sequence
  Description of Artificial Sequence: Synthetic oligonucleotide
cuuggguugcacaaauaag

SEQ ID NO: 327228 - RNA, 19 nt, Artificial Sequence
  Description of Artificial Sequence: Synthetic oligonucleotide
uauggcggguuucucggcg

SEQ ID NO: 327229 - RNA, 19 nt, Artificial Sequence
  Description of Artificial Sequence: Synthetic oligonucleotide
acacaguaaugucucacag

SEQ ID NO: 327230 - RNA, 19 nt, Artificial Sequence
  Description of Artificial Sequence: Synthetic oligonucleotide
cuagugauauuuugggcug

SEQ ID NO: 327231 - RNA, 19 nt, Artificial Sequence
  Description of Artificial Sequence: Synthetic oligonucleotide
cacuacuaaaccacguggc

SEQ ID NO: 327232 - RNA, 19 nt, Artificial Sequence
  Description of Artificial Sequence: Synthetic oligonucleotide
aguauuguauuaaagcuau

SEQ ID NO: 327233 - RNA, 19 nt, Artificial Sequence
  Description of Artificial Sequence: Synthetic oligonucleotide
ucuguuagggauccaccug

SEQ ID NO: 327234 - RNA, 19 nt, Artificial Sequence
  Description of Artificial Sequence: Synthetic oligonucleotide
agcauugacgcacugugca

SEQ ID NO: 327235 - RNA, 19 nt, Artificial Sequence
  Description of Artificial Sequence: Synthetic oligonucleotide
guauuaaagcuaucagccc

SEQ ID NO: 327236 - RNA, 19 nt, Artificial Sequence
  Description of Artificial Sequence: Synthetic oligonucleotide
ugucguguugaguugcuug

SEQ ID NO: 327237 - RNA, 19 nt, Artificial Sequence
  Description of Artificial Sequence: Synthetic oligonucleotide
uggguugcacaaauaagac

SEQ ID NO: 327238 - RNA, 19 nt, Artificial Sequence
  Description of Artificial Sequence: Synthetic oligonucleotide
aauccgacguaggaagagg

SEQ ID NO: 327239 - RNA, 19 nt, Artificial Sequence
  Description of Artificial Sequence: Synthetic oligonucleotide
uucugcuaaccauagcaca

SEQ ID NO: 327240 - RNA, 19 nt, Artificial Sequence
  Description of Artificial Sequence: Synthetic oligonucleotide
uaucaguuuauggugggca

SEQ ID NO: 327241 - RNA, 19 nt, Artificial Sequence
  Description of Artificial Sequence: Synthetic oligonucleotide
  modified_base (8)..(8): a, c, u, g, unknown or other
uauaaagnaucagucacuu

SEQ ID NO: 327242 - RNA, 19 nt, Artificial Sequence
  Description of Artificial Sequence: Synthetic oligonucleotide
ccuauauccaauauacuac

SEQ ID NO: 327243 - RNA, 19 nt, Artificial Sequence
  Description of Artificial Sequence: Synthetic oligonucleotide
ucuaaauccgacguaggaa

SEQ ID NO: 327244 - RNA, 19 nt, Artificial Sequence
  Description of Artificial Sequence: Synthetic oligonucleotide
uauuacuaauguggaagag

SEQ ID NO: 327245 - RNA, 19 nt, Artificial Sequence
  Description of Artificial Sequence: Synthetic oligonucleotide
aguauguaaaugaaaugcu

SEQ ID NO: 327246 - RNA, 19 nt, Artificial Sequence
  Description of Artificial Sequence: Synthetic oligonucleotide
gucguguugaguugcuugg

SEQ ID NO: 327247 - RNA, 19 nt, Artificial Sequence
  Description of Artificial Sequence: Synthetic oligonucleotide
gacucuugcagagauuaag

SEQ ID NO: 327248 - RNA, 19 nt, Artificial Sequence
  Description of Artificial Sequence: Synthetic oligonucleotide
aaauccgacguaggaagag

SEQ ID NO: 327249 - RNA, 19 nt, Artificial Sequence
  Description of Artificial Sequence: Synthetic oligonucleotide
aaguauuguauuaaagcua

SEQ ID NO: 327250 - RNA, 19 nt, Artificial Sequence
  Description of Artificial Sequence: Synthetic oligonucleotide
acuacuaaaccacguggcu

SEQ ID NO: 327251 - RNA, 19 nt, Artificial Sequence
  Description of Artificial Sequence: Synthetic oligonucleotide
ugcuaaccauagcacacag

SEQ ID NO: 327252 - RNA, 19 nt, Artificial Sequence
  Description of Artificial Sequence: Synthetic oligonucleotide
uccuuuucaugagugcgcg

SEQ ID NO: 327253 - RNA, 19 nt, Artificial Sequence
  Description of Artificial Sequence: Synthetic oligonucleotide
aucaguuuauggugggcag

SEQ ID NO: 327254 - RNA, 19 nt, Artificial Sequence
  Description of Artificial Sequence: Synthetic oligonucleotide
aggaaacccagaaccaacc

SEQ ID NO: 327255 - RNA, 19 nt, Artificial Sequence
  Description of Artificial Sequence: Synthetic oligonucleotide
aacgucucaguauguaaau

SEQ ID NO: 327256 - RNA, 19 nt, Artificial Sequence
  Description of Artificial Sequence: Synthetic oligonucleotide
gcacuagugauauuuuggg

SEQ ID NO: 327257 - RNA, 19 nt, Artificial Sequence
  Description of Artificial Sequence: Synthetic oligonucleotide
uuauugucguguugaguug

SEQ ID NO: 327258 - RNA, 19 nt, Artificial Sequence
  Description of Artificial Sequence: Synthetic oligonucleotide
guauuacuaauguggaaga

SEQ ID NO: 327259 - RNA, 19 nt, Artificial Sequence
  Description of Artificial Sequence: Synthetic oligonucleotide
aagcuaucagcccuagaau

SEQ ID NO: 327260 - RNA, 19 nt, Artificial Sequence
  Description of Artificial Sequence: Synthetic oligonucleotide
cacuagugauauuuugggc

SEQ ID NO: 327261 - RNA, 19 nt, Artificial Sequence
  Description of Artificial Sequence: Synthetic oligonucleotide
cuucugcuaaccauagcac

SEQ ID NO: 327262 - RNA, 19 nt, Artificial Sequence
  Description of Artificial Sequence: Synthetic oligonucleotide
auugacgcacugugcaauc

SEQ ID NO: 327263 - RNA, 19 nt, Artificial Sequence
  Description of Artificial Sequence: Synthetic oligonucleotide
uauugucguguugaguugc

SEQ ID NO: 327264 - RNA, 19 nt, Artificial Sequence
  Description of Artificial Sequence: Synthetic oligonucleotide
acuaauguggaagagucua

SEQ ID NO: 327265 - RNA, 19 nt, Artificial Sequence
  Description of Artificial Sequence: Synthetic oligonucleotide
aacucgucaaugugaggga

SEQ ID NO: 327266 - RNA, 19 nt, Artificial Sequence
  Description of Artificial Sequence: Synthetic oligonucleotide
guuagguuucucaaacuug

SEQ ID NO: 327267 - RNA, 19 nt, Artificial Sequence
  Description of Artificial Sequence: Synthetic oligonucleotide
agaaccaaccagcuucaug

SEQ ID NO: 327268 - RNA, 19 nt, Artificial Sequence
  Description of Artificial Sequence: Synthetic oligonucleotide
uucagucuacugauaggca

SEQ ID NO: 327269 - RNA, 19 nt, Artificial Sequence
  Description of Artificial Sequence: Synthetic oligonucleotide
aagcuagcccuuugcuuuc

SEQ ID NO: 327270 - RNA, 19 nt, Artificial Sequence
  Description of Artificial Sequence: Synthetic oligonucleotide
ugcagagauuaaguuaagc

SEQ ID NO: 327271 - RNA, 19 nt, Artificial Sequence
  Description of Artificial Sequence: Synthetic oligonucleotide
acggcaagaagagcugugc

SEQ ID NO: 327272 - RNA, 19 nt, Artificial Sequence
  Description of Artificial Sequence: Synthetic oligonucleotide
aagcuacaguucauaaauc

SEQ ID NO: 327273 - RNA, 19 nt, Artificial Sequence
  Description of Artificial Sequence: Synthetic oligonucleotide
ucagauuguggagucagaa

SEQ ID NO: 327274 - RNA, 19 nt, Artificial Sequence
  Description of Artificial Sequence: Synthetic oligonucleotide
ggcacuagugauauuuugg

SEQ ID NO: 327275 - RNA, 19 nt, Artificial Sequence
  Description of Artificial Sequence: Synthetic oligonucleotide
uacccacauaaauaccuga

SEQ ID NO: 327276 - RNA, 19 nt, Artificial Sequence
  Description of Artificial Sequence: Synthetic oligonucleotide
ucuaacagauccucugcua

SEQ ID NO: 327277 - RNA, 19 nt, Artificial Sequence
  Description of Artificial Sequence: Synthetic oligonucleotide
cuuacauaacgucucagua

SEQ ID NO: 327278 - RNA, 19 nt, Artificial Sequence
  Description of Artificial Sequence: Synthetic oligonucleotide
aucugacacguucugccag

SEQ ID NO: 327279 - RNA, 19 nt, Artificial Sequence
  Description of Artificial Sequence: Synthetic oligonucleotide
auacuacacaguaaugucu

SEQ ID NO: 327280 - RNA, 19 nt, Artificial Sequence
  Description of Artificial Sequence: Synthetic oligonucleotide
ggugugaacggcaagaaga

SEQ ID NO: 327281 - RNA, 19 nt, Artificial Sequence
  Description of Artificial Sequence: Synthetic oligonucleotide
guuaagcaagugcuucugc

SEQ ID NO: 327282 - RNA, 19 nt, Artificial Sequence
  Description of Artificial Sequence: Synthetic oligonucleotide
  modified_base (3)..(3): a, c, u, g, unknown or other
agnaucagucacuuacuua

SEQ ID NO: 327283 - RNA, 19 nt, Artificial Sequence
  Description of Artificial Sequence: Synthetic oligonucleotide
uacuaauguggaagagucu

SEQ ID NO: 327284 - RNA, 19 nt, Artificial Sequence
  Description of Artificial Sequence: Synthetic oligonucleotide
ucaucacauuuauugucgu

SEQ ID NO: 327285 - RNA, 19 nt, Artificial Sequence
  Description of Artificial Sequence: Synthetic oligonucleotide
uuuauggugggcagagcuu

SEQ ID NO: 327286 - RNA, 19 nt, Artificial Sequence
  Description of Artificial Sequence: Synthetic oligonucleotide
aucccggaaaucugacacg

SEQ ID NO: 327287 - RNA, 19 nt, Artificial Sequence
  Description of Artificial Sequence: Synthetic oligonucleotide
gaaucaagguaguguguca

SEQ ID NO: 327288 - RNA, 19 nt, Artificial Sequence
  Description of Artificial Sequence: Synthetic oligonucleotide
cuaccccugcuguauaaag

SEQ ID NO: 327289 - RNA, 19 nt, Artificial Sequence
  Description of Artificial Sequence: Synthetic oligonucleotide
ggguaaugccuucaaagug

SEQ ID NO: 327290 - RNA, 19 nt, Artificial Sequence
  Description of Artificial Sequence: Synthetic oligonucleotide
  modified_base (18)..(18): a, c, u, g, unknown or other
accccugcuguauaaagna

SEQ ID NO: 327291 - RNA, 19 nt, Artificial Sequence
  Description of Artificial Sequence: Synthetic oligonucleotide
ucuaacugucucuuacaua

SEQ ID NO: 327292 - RNA, 19 nt, Artificial Sequence
  Description of Artificial Sequence: Synthetic oligonucleotide
ucgauauccagucggcguu

SEQ ID NO: 327293 - RNA, 19 nt, Artificial Sequence
  Description of Artificial Sequence: Synthetic oligonucleotide
augagugcgcgccagucga

SEQ ID NO: 327294 - RNA, 19 nt, Artificial Sequence
  Description of Artificial Sequence: Synthetic oligonucleotide
ugcaucaacugauggggaa

SEQ ID NO: 327295 - RNA, 19 nt, Artificial Sequence
  Description of Artificial Sequence: Synthetic oligonucleotide
agauuaaguuaagcaagug

SEQ ID NO: 327296 - RNA, 19 nt, Artificial Sequence
  Description of Artificial Sequence: Synthetic oligonucleotide
uuaaagcuaucagcccuag

SEQ ID NO: 327297 - RNA, 19 nt, Artificial Sequence
  Description of Artificial Sequence: Synthetic oligonucleotide
gucuaaauccgacguagga

SEQ ID NO: 327298 - RNA, 19 nt, Artificial Sequence
  Description of Artificial Sequence: Synthetic oligonucleotide
aguuaagcaagugcuucug

SEQ ID NO: 327299 - RNA, 19 nt, Artificial Sequence
  Description of Artificial Sequence: Synthetic oligonucleotide
agggagucgucuaaauccg

SEQ ID NO: 327300 - RNA, 19 nt, Artificial Sequence
  Description of Artificial Sequence: Synthetic oligonucleotide
uaaaccacguggcuaccua

SEQ ID NO: 327301 - RNA, 19 nt, Artificial Sequence
  Description of Artificial Sequence: Synthetic oligonucleotide
uguuagggauccaccugca

SEQ ID NO: 327302 - RNA, 19 nt, Artificial Sequence
  Description of Artificial Sequence: Synthetic oligonucleotide
ucccaauuguguucauucu

SEQ ID NO: 327303 - RNA, 19 nt, Artificial Sequence
  Description of Artificial Sequence: Synthetic oligonucleotide
uuacuaccuucuaacuguc

SEQ ID NO: 327304 - RNA, 19 nt, Artificial Sequence
  Description of Artificial Sequence: Synthetic oligonucleotide
gacacuauaggcaaaucau

SEQ ID NO: 327305 - RNA, 19 nt, Artificial Sequence
  Description of Artificial Sequence: Synthetic oligonucleotide
ucccuauauccaauauacu

SEQ ID NO: 327306 - RNA, 19 nt, Artificial Sequence
  Description of Artificial Sequence: Synthetic oligonucleotide
uucagauuguggagucaga

SEQ ID NO: 327307 - RNA, 19 nt, Artificial Sequence
  Description of Artificial Sequence: Synthetic oligonucleotide
  modified_base (7)..(7): a, c, u, g, unknown or other
auaaagnaucagucacuua

SEQ ID NO: 327308 - RNA, 19 nt, Artificial Sequence
  Description of Artificial Sequence: Synthetic oligonucleotide
cagucacuuacuuacugca

SEQ ID NO: 327309 - RNA, 19 nt, Artificial Sequence
  Description of Artificial Sequence: Synthetic oligonucleotide
guggcuaccuauguguuac

SEQ ID NO: 327310 - RNA, 19 nt, Artificial Sequence
  Description of Artificial Sequence: Synthetic oligonucleotide
uugcaucaacugaugggga

SEQ ID NO: 327311 - RNA, 19 nt, Artificial Sequence
  Description of Artificial Sequence: Synthetic oligonucleotide
aacuaagacaacagauuua

SEQ ID NO: 327312 - RNA, 19 nt, Artificial Sequence
  Description of Artificial Sequence: Synthetic oligonucleotide
uuucaugagugcgcgccag

SEQ ID NO: 327313 - RNA, 19 nt, Artificial Sequence
  Description of Artificial Sequence: Synthetic oligonucleotide
cuacacaguaaugucucac

SEQ ID NO: 327314 - RNA, 19 nt, Artificial Sequence
  Description of Artificial Sequence: Synthetic oligonucleotide
ugaccucuguuagggaucc

SEQ ID NO: 327315 - RNA, 19 nt, Artificial Sequence
  Description of Artificial Sequence: Synthetic oligonucleotide
gucauaugagggucgggac

SEQ ID NO: 327316 - RNA, 19 nt, Artificial Sequence
  Description of Artificial Sequence: Synthetic oligonucleotide
gcuaucaguuuaugguggg

SEQ ID NO: 327317 - RNA, 19 nt, Artificial Sequence
  Description of Artificial Sequence: Synthetic oligonucleotide
ugagggucgggacggugug

SEQ ID NO: 327318 - RNA, 19 nt, Artificial Sequence
  Description of Artificial Sequence: Synthetic oligonucleotide
acccaucuacuuuggccac

SEQ ID NO: 327319 - RNA, 19 nt, Artificial Sequence
  Description of Artificial Sequence: Synthetic oligonucleotide
uaaagcuaucagcccuaga

SEQ ID NO: 327320 - RNA, 19 nt, Artificial Sequence
  Description of Artificial Sequence: Synthetic oligonucleotide
ugugaacggcaagaagagc

SEQ ID NO: 327321 - RNA, 19 nt, Artificial Sequence
  Description of Artificial Sequence: Synthetic oligonucleotide
uuaaagcuugcagguguga

SEQ ID NO: 327322 - RNA, 19 nt, Artificial Sequence
  Description of Artificial Sequence: Synthetic oligonucleotide
acuacuaccccugcuguau

SEQ ID NO: 327323 - RNA, 19 nt, Artificial Sequence
  Description of Artificial Sequence: Synthetic oligonucleotide
guagcgucucuucaccuca

SEQ ID NO: 327324 - RNA, 19 nt, Artificial Sequence
  Description of Artificial Sequence: Synthetic oligonucleotide
ucugucucaaaggacuauu

SEQ ID NO: 327325 - RNA, 19 nt, Artificial Sequence
  Description of Artificial Sequence: Synthetic oligonucleotide
gugaacggcaagaagagcu

SEQ ID NO: 327326 - RNA, 19 nt, Artificial Sequence
  Description of Artificial Sequence: Synthetic oligonucleotide
cuaucaguuuauggugggc

SEQ ID NO: 327327 - RNA, 19 nt, Artificial Sequence
  Description of Artificial Sequence: Synthetic oligonucleotide
ucagucccgguccucugcu

SEQ ID NO: 327328 - RNA, 19 nt, Artificial Sequence
  Description of Artificial Sequence: Synthetic oligonucleotide
ugcgcgccagucgagguag

SEQ ID NO: 327329 - RNA, 19 nt, Artificial Sequence
  Description of Artificial Sequence: Synthetic oligonucleotide
ucaugggguuuaacauggc

SEQ ID NO: 327330 - RNA, 19 nt, Artificial Sequence
  Description of Artificial Sequence: Synthetic oligonucleotide
agucuacugauaggcaaca

SEQ ID NO: 327331 - RNA, 19 nt, Artificial Sequence
  Description of Artificial Sequence: Synthetic oligonucleotide
uccgacguaggaagaggaa

SEQ ID NO: 327332 - RNA, 19 nt, Artificial Sequence
  Description of Artificial Sequence: Synthetic oligonucleotide
ucgcucgaguuucaacuuc

SEQ ID NO: 327333 - RNA, 19 nt, Artificial Sequence
  Description of Artificial Sequence: Synthetic oligonucleotide
gaaucggguaugacagaug

SEQ ID NO: 327334 - RNA, 19 nt, Artificial Sequence
  Description of Artificial Sequence: Synthetic oligonucleotide
  modified_base (9)..(9): a, c, u, g, unknown or other
guauaaagnaucagucacu

SEQ ID NO: 327335 - RNA, 19 nt, Artificial Sequence
  Description of Artificial Sequence: Synthetic oligonucleotide
agagauaacuauagaggua

SEQ ID NO: 327336 - RNA, 19 nt, Artificial Sequence
  Description of Artificial Sequence: Synthetic oligonucleotide
cccacauaaauaccugaag

SEQ ID NO: 327337 - RNA, 19 nt, Artificial Sequence
  Description of Artificial Sequence: Synthetic oligonucleotide
auuaaagcuaucagcccua

SEQ ID NO: 327338 - RNA, 19 nt, Artificial Sequence
  Description of Artificial Sequence: Synthetic oligonucleotide
acgucucaguauguaaaug

SEQ ID NO: 327339 - RNA, 19 nt, Artificial Sequence
  Description of Artificial Sequence: Synthetic oligonucleotide
cccuauauccaauauacua

SEQ ID NO: 327340 - RNA, 19 nt, Artificial Sequence
  Description of Artificial Sequence: Synthetic oligonucleotide
uucguugucuauggcgggu

SEQ ID NO: 327341 - RNA, 19 nt, Artificial Sequence
  Description of Artificial Sequence: Synthetic oligonucleotide
uggaaucggguaugacaga

SEQ ID NO: 327342 - RNA, 19 nt, Artificial Sequence
  Description of Artificial Sequence: Synthetic oligonucleotide
uacuaccccugcuguauaa

SEQ ID NO: 327343 - RNA, 19 nt, Artificial Sequence
  Description of Artificial Sequence: Synthetic oligonucleotide
ccaggguuuagucauccug

SEQ ID NO: 327344 - RNA, 19 nt, Artificial Sequence
  Description of Artificial Sequence: Synthetic oligonucleotide
cucucgcucgaguuucaac

SEQ ID NO: 327345 - RNA, 19 nt, Artificial Sequence
  Description of Artificial Sequence: Synthetic oligonucleotide
uaugagggucgggacggug

SEQ ID NO: 327346 - RNA, 19 nt, Artificial Sequence
  Description of Artificial Sequence: Synthetic oligonucleotide
gagugcgcgccagucgagg

SEQ ID NO: 327347 - RNA, 19 nt, Artificial Sequence
  Description of Artificial Sequence: Synthetic oligonucleotide
ggguugcacaaauaagaca

SEQ ID NO: 327348 - RNA, 19 nt, Artificial Sequence
  Description of Artificial Sequence: Synthetic oligonucleotide
cacguggcuaccuaugugu

SEQ ID NO: 327349 - RNA, 19 nt, Artificial Sequence
  Description of Artificial Sequence: Synthetic oligonucleotide
cuauggcggguuucucggc

SEQ ID NO: 327350 - RNA, 19 nt, Artificial Sequence
  Description of Artificial Sequence: Synthetic oligonucleotide
ucgucauaugagggucggg

SEQ ID NO: 327351 - RNA, 19 nt, Artificial Sequence
  Description of Artificial Sequence: Synthetic oligonucleotide
aucggguaugacagaugac

SEQ ID NO: 327352 - RNA, 19 nt, Artificial Sequence
  Description of Artificial Sequence: Synthetic oligonucleotide
ggguuuagucauccugaag

SEQ ID NO: 327353 - RNA, 19 nt, Artificial Sequence
  Description of Artificial Sequence: Synthetic oligonucleotide
cauuagacagggguggcaa

SEQ ID NO: 327354 - RNA, 19 nt, Artificial Sequence
  Description of Artificial Sequence: Synthetic oligonucleotide
acccacauaaauaccugaa

SEQ ID NO: 327355 - RNA, 19 nt, Artificial Sequence
  Description of Artificial Sequence: Synthetic oligonucleotide
auacgcuucaucacauuua

SEQ ID NO: 327356 - RNA, 19 nt, Artificial Sequence
  Description of Artificial Sequence: Synthetic oligonucleotide
ucguguugaguugcuugga

SEQ ID NO: 327357 - RNA, 19 nt, Artificial Sequence
  Description of Artificial Sequence: Synthetic oligonucleotide
gucuaacagauccucugcu

SEQ ID NO: 327358 - RNA, 19 nt, Artificial Sequence
  Description of Artificial Sequence: Synthetic oligonucleotide
agugcgcgccagucgaggu

SEQ ID NO: 327359 - RNA, 19 nt, Artificial Sequence
  Description of Artificial Sequence: Synthetic oligonucleotide
cuacuaaaccacguggcua

SEQ ID NO: 327360 - RNA, 19 nt, Artificial Sequence
  Description of Artificial Sequence: Synthetic oligonucleotide
ggcaacaccauaggaauaa

SEQ ID NO: 327361 - RNA, 19 nt, Artificial Sequence
  Description of Artificial Sequence: Synthetic oligonucleotide
cugccucgauauccagucg

SEQ ID NO: 327362 - RNA, 19 nt, Artificial Sequence
  Description of Artificial Sequence: Synthetic oligonucleotide
auggggcucgucauaugag

SEQ ID NO: 327363 - RNA, 19 nt, Artificial Sequence
  Description of Artificial Sequence: Synthetic oligonucleotide
auuuugggcuggauaagua

SEQ ID NO: 327364 - RNA, 19 nt, Artificial Sequence
  Description of Artificial Sequence: Synthetic oligonucleotide
gguagcgucucuucaccuc

SEQ ID NO: 327365 - RNA, 19 nt, Artificial Sequence
  Description of Artificial Sequence: Synthetic oligonucleotide
ccacauaaauaccugaagu

SEQ ID NO: 327366 - RNA, 19 nt, Artificial Sequence
  Description of Artificial Sequence: Synthetic oligonucleotide
cgacguaggaagaggaaac

SEQ ID NO: 327367 - RNA, 19 nt, Artificial Sequence
  Description of Artificial Sequence: Synthetic oligonucleotide
uucuggaaucggguaugac

SEQ ID NO: 327368 - RNA, 19 nt, Artificial Sequence
  Description of Artificial Sequence: Synthetic oligonucleotide
aaguuucagucuacugaua

SEQ ID NO: 327369 - RNA, 19 nt, Artificial Sequence
  Description of Artificial Sequence: Synthetic oligonucleotide
ggagucgucuaaauccgac

SEQ ID NO: 327370 - RNA, 19 nt, Artificial Sequence
  Description of Artificial Sequence: Synthetic oligonucleotide
caggguuagguuucucaaa

SEQ ID NO: 327371 - RNA, 19 nt, Artificial Sequence
  Description of Artificial Sequence: Synthetic oligonucleotide
cauacgcuucaucacauuu

SEQ ID NO: 327372 - RNA, 19 nt, Artificial Sequence
  Description of Artificial Sequence: Synthetic oligonucleotide
ggacgguguggaauugagg

SEQ ID NO: 327373 - RNA, 19 nt, Artificial Sequence
  Description of Artificial Sequence: Synthetic oligonucleotide
auugucguguugaguugcu

SEQ ID NO: 327374 - RNA, 19 nt, Artificial Sequence
  Description of Artificial Sequence: Synthetic oligonucleotide
guauuguauuaaagcuauc

SEQ ID NO: 327375 - RNA, 19 nt, Artificial Sequence
  Description of Artificial Sequence: Synthetic oligonucleotide
aacuuggguugcacaaaua

SEQ ID NO: 327376 - RNA, 19 nt, Artificial Sequence
  Description of Artificial Sequence: Synthetic oligonucleotide
cucucucgaucugcagccg

SEQ ID NO: 327377 - RNA, 19 nt, Artificial Sequence
  Description of Artificial Sequence: Synthetic oligonucleotide
uggccgaguucguugucua

SEQ ID NO: 327378 - RNA, 19 nt, Artificial Sequence
  Description of Artificial Sequence: Synthetic oligonucleotide
agggucgggacggugugga

SEQ ID NO: 327379 - RNA, 19 nt, Artificial Sequence
  Description of Artificial Sequence: Synthetic oligonucleotide
gucgucuaaauccgacgua

SEQ ID NO: 327380 - RNA, 19 nt, Artificial Sequence
  Description of Artificial Sequence: Synthetic oligonucleotide
uggcggguuucucggcgcu

SEQ ID NO: 327381 - RNA, 19 nt, Artificial Sequence
  Description of Artificial Sequence: Synthetic oligonucleotide
ggauaaguagcagcccaca

SEQ ID NO: 327382 - RNA, 19 nt, Artificial Sequence
  Description of Artificial Sequence: Synthetic oligonucleotide
cgucuaaauccgacguagg

SEQ ID NO: 327383 - RNA, 19 nt, Artificial Sequence
  Description of Artificial Sequence: Synthetic oligonucleotide
gccgaguucguugucuaug

SEQ ID NO: 327384 - RNA, 19 nt, Artificial Sequence
  Description of Artificial Sequence: Synthetic oligonucleotide
ugucuauggcggguuucuc

SEQ ID NO: 327385 - RNA, 19 nt, Artificial Sequence
  Description of Artificial Sequence: Synthetic oligonucleotide
uggcuaccuauguguuacu

SEQ ID NO: 327386 - RNA, 19 nt, Artificial Sequence
  Description of Artificial Sequence: Synthetic oligonucleotide
ucguugucuauggcggguu

SEQ ID NO: 327387 - RNA, 19 nt, Artificial Sequence
  Description of Artificial Sequence: Synthetic oligonucleotide
gaauccgcagucucuccuu

SEQ ID NO: 327388 - RNA, 19 nt, Artificial Sequence
  Description of Artificial Sequence: Synthetic oligonucleotide
cgagguagcgucucuucac

SEQ ID NO: 327389 - RNA, 19 nt, Artificial Sequence
  Description of Artificial Sequence: Synthetic oligonucleotide
ucgggacgguguggaauug

SEQ ID NO: 327390 - RNA, 19 nt, Artificial Sequence
  Description of Artificial Sequence: Synthetic oligonucleotide
agucgagguagcgucucuu

SEQ ID NO: 327391 - RNA, 19 nt, Artificial Sequence
  Description of Artificial Sequence: Synthetic oligonucleotide
uugucguguugaguugcuu

SEQ ID NO: 327392 - RNA, 19 nt, Artificial Sequence
  Description of Artificial Sequence: Synthetic oligonucleotide
gcaucauuucggaaugcaa

SEQ ID NO: 327393 - RNA, 19 nt, Artificial Sequence
  Description of Artificial Sequence: Synthetic oligonucleotide
ggaaucggguaugacagau

SEQ ID NO: 327394 - RNA, 19 nt, Artificial Sequence
  Description of Artificial Sequence: Synthetic oligonucleotide
gucgggacgguguggaauu

SEQ ID NO: 327395 - RNA, 19 nt, Artificial Sequence
  Description of Artificial Sequence: Synthetic oligonucleotide
gcauugacgcacugugcaa

SEQ ID NO: 327396 - RNA, 19 nt, Artificial Sequence
  Description of Artificial Sequence: Synthetic oligonucleotide
cauugacgcacugugcaau

SEQ ID NO: 327397 - RNA, 19 nt, Artificial Sequence
  Description of Artificial Sequence: Synthetic oligonucleotide
auaugagggucgggacggu

SEQ ID NO: 327398 - RNA, 19 nt, Artificial Sequence
  Description of Artificial Sequence: Synthetic oligonucleotide
cgucauaugagggucggga

SEQ ID NO: 327399 - RNA, 19 nt, Artificial Sequence
  Description of Artificial Sequence: Synthetic oligonucleotide
cgccagucgagguagcguc

SEQ ID NO: 327400 - RNA, 19 nt, Artificial Sequence
  Description of Artificial Sequence: Synthetic oligonucleotide
cuacuaccccugcuguaua

SEQ ID NO: 327401 - RNA, 19 nt, Artificial Sequence
  Description of Artificial Sequence: Synthetic oligonucleotide
cacucccuauauccaauau

SEQ ID NO: 327402 - RNA, 19 nt, Artificial Sequence
  Description of Artificial Sequence: Synthetic oligonucleotide
cucgcucgaguuucaacuu

SEQ ID NO: 327403 - RNA, 19 nt, Artificial Sequence
  Description of Artificial Sequence: Synthetic oligonucleotide
cagcaguucaugggguuua

SEQ ID NO: 327404 - RNA, 19 nt, Artificial Sequence
  Description of Artificial Sequence: Synthetic oligonucleotide
ccgacguaggaagaggaaa

SEQ ID NO: 327405 - RNA, 19 nt, Artificial Sequence
  Description of Artificial Sequence: Synthetic oligonucleotide
gggcucgucauaugagggu

SEQ ID NO: 327406 - RNA, 19 nt, Artificial Sequence
  Description of Artificial Sequence: Synthetic oligonucleotide
gugcgcgccagucgaggua

SEQ ID NO: 327407 - RNA, 19 nt, Artificial Sequence
  Description of Artificial Sequence: Synthetic oligonucleotide
gggagucgucuaaauccga

SEQ ID NO: 327408 - RNA, 19 nt, Artificial Sequence
  Description of Artificial Sequence: Synthetic oligonucleotide
ggcggguuucucggcgcug

SEQ ID NO: 327409 - RNA, 19 nt, Artificial Sequence
  Description of Artificial Sequence: Synthetic oligonucleotide
ggucgggacgguguggaau

SEQ ID NO: 327410 - RNA, 19 nt, Artificial Sequence
  Description of Artificial Sequence: Synthetic oligonucleotide
ggcgcucucgcucgaguuu

SEQ ID NO: 327411 - RNA, 19 nt, Artificial Sequence
  Description of Artificial Sequence: Synthetic oligonucleotide
ccuggccgaguucguuguc

SEQ ID NO: 327412 - RNA, 19 nt, Artificial Sequence
  Description of Artificial Sequence: Synthetic oligonucleotide
cguggcuaccuauguguua

SEQ ID NO: 327413 - RNA, 19 nt, Artificial Sequence
  Description of Artificial Sequence: Synthetic oligonucleotide
ggccgaguucguugucuau

SEQ ID NO: 327414 - RNA, 19 nt, Artificial Sequence
  Description of Artificial Sequence: Synthetic oligonucleotide
gccagucgagguagcgucu

SEQ ID NO: 327415 - RNA, 19 nt, Artificial Sequence
  Description of Artificial Sequence: Synthetic oligonucleotide
gcgccagucgagguagcgu

SEQ ID NO: 327416 - RNA, 19 nt, Artificial Sequence
  Description of Artificial Sequence: Synthetic oligonucleotide
gcgcgccagucgagguagc

SEQ ID NO: 327417 - RNA, 19 nt, Artificial Sequence
  Description of Artificial Sequence: Synthetic oligonucleotide
cgauauccagucggcguuu

SEQ ID NO: 327418 - RNA, 19 nt, Artificial Sequence
  Description of Artificial Sequence: Synthetic oligonucleotide
aauaguuaagccuucauuc

SEQ ID NO: 327419 - RNA, 19 nt, Artificial Sequence
  Description of Artificial Sequence: Synthetic oligonucleotide
aacagaaccguauguaugc

SEQ ID NO: 327420 - RNA, 19 nt, Artificial Sequence
  Description of Artificial Sequence: Synthetic oligonucleotide
uauauaugggauauaacag

SEQ ID NO: 327421 - RNA, 19 nt, Artificial Sequence
  Description of Artificial Sequence: Synthetic oligonucleotide
uaugggauauaacagaacc

SEQ ID NO: 327422 - RNA, 19 nt, Artificial Sequence
  Description of Artificial Sequence: Synthetic oligonucleotide
uuugcuaugguucuccagg

SEQ ID NO: 327423 - RNA, 19 nt, Artificial Sequence
  Description of Artificial Sequence: Synthetic oligonucleotide
aaggcuaagagcuacuguc

SEQ ID NO: 327424 - RNA, 19 nt, Artificial Sequence
  Description of Artificial Sequence: Synthetic oligonucleotide
aaaugcacagcguaacuac

SEQ ID NO: 327425 - RNA, 19 nt, Artificial Sequence
  Description of Artificial Sequence: Synthetic oligonucleotide
aacccuaacacuuuuccag

SEQ ID NO: 327426 - RNA, 19 nt, Artificial Sequence
  Description of Artificial Sequence: Synthetic oligonucleotide
ugauuguuaaauaccaccc

SEQ ID NO: 327427 - RNA, 19 nt, Artificial Sequence
  Description of Artificial Sequence: Synthetic oligonucleotide
acuugauaaagcaauauac

SEQ ID NO: 327428 - RNA, 19 nt, Artificial Sequence
  Description of Artificial Sequence: Synthetic oligonucleotide
aaaccuaucuauugggaag

SEQ ID NO: 327429 - RNA, 19 nt, Artificial Sequence
  Description of Artificial Sequence: Synthetic oligonucleotide
uggcauauuaucuaauucc

SEQ ID NO: 327430 - RNA, 19 nt, Artificial Sequence
  Description of Artificial Sequence: Synthetic oligonucleotide
ugaaagguuauauauggga

SEQ ID NO: 327431 - RNA, 19 nt, Artificial Sequence
  Description of Artificial Sequence: Synthetic oligonucleotide
cuuuacuucgauuugagca

SEQ ID NO: 327432 - RNA, 19 nt, Artificial Sequence
  Description of Artificial Sequence: Synthetic oligonucleotide
aaacauaguacaccaauaa

SEQ ID NO: 327433 - RNA, 19 nt, Artificial Sequence
  Description of Artificial Sequence: Synthetic oligonucleotide
aagagcuacugucagaccu

SEQ ID NO: 327434 - RNA, 19 nt, Artificial Sequence
  Description of Artificial Sequence: Synthetic oligonucleotide
ugaucaagauuaauggagc

SEQ ID NO: 327435 - RNA, 19 nt, Artificial Sequence
  Description of Artificial Sequence: Synthetic oligonucleotide
aaaacguucaguuguuggu

SEQ ID NO: 327436 - RNA, 19 nt, Artificial Sequence
  Description of Artificial Sequence: Synthetic oligonucleotide
aucaagaaaagcuguggac

SEQ ID NO: 327437 - RNA, 19 nt, Artificial Sequence
  Description of Artificial Sequence: Synthetic oligonucleotide
auuagcauaaccuggugcu

SEQ ID NO: 327438 - RNA, 19 nt, Artificial Sequence
  Description of Artificial Sequence: Synthetic oligonucleotide
uuuauuuaguaucggcggc

SEQ ID NO: 327439 - RNA, 19 nt, Artificial Sequence
  Description of Artificial Sequence: Synthetic oligonucleotide
uuuacuucgauuugagcac

SEQ ID NO: 327440 - RNA, 19 nt, Artificial Sequence
  Description of Artificial Sequence: Synthetic oligonucleotide
acuuuauuuaguaucggcg

SEQ ID NO: 327441 - RNA, 19 nt, Artificial Sequence
  Description of Artificial Sequence: Synthetic oligonucleotide
uuuuauaaccagcuucucu

SEQ ID NO: 327442 - RNA, 19 nt, Artificial Sequence
  Description of Artificial Sequence: Synthetic oligonucleotide
gacgguugaaugcaggagg

SEQ ID NO: 327443 - RNA, 19 nt, Artificial Sequence
  Description of Artificial Sequence: Synthetic oligonucleotide
acuaugacaggcaaagcgc

SEQ ID NO: 327444 - RNA, 19 nt, Artificial Sequence
  Description of Artificial Sequence: Synthetic oligonucleotide
auauaugggauauaacaga

SEQ ID NO: 327445 - RNA, 19 nt, Artificial Sequence
  Description of Artificial Sequence: Synthetic oligonucleotide
uguuaaauaccaccccucc

SEQ ID NO: 327446 - RNA, 19 nt, Artificial Sequence
  Description of Artificial Sequence: Synthetic oligonucleotide
auuauagacacaaaguagu

SEQ ID NO: 327447 - RNA, 19 nt, Artificial Sequence
  Description of Artificial Sequence: Synthetic oligonucleotide
ucaagauuaauggagcucu

SEQ ID NO: 327448 - RNA, 19 nt, Artificial Sequence
  Description of Artificial Sequence: Synthetic oligonucleotide
aagcauacucccuagagua

SEQ ID NO: 327449 - RNA, 19 nt, Artificial Sequence
  Description of Artificial Sequence: Synthetic oligonucleotide
aaaaccuaucuauugggaa

SEQ ID NO: 327450 - RNA, 19 nt, Artificial Sequence
  Description of Artificial Sequence: Synthetic oligonucleotide
augaucaagauuaauggag

SEQ ID NO: 327451 - RNA, 19 nt, Artificial Sequence
  Description of Artificial Sequence: Synthetic oligonucleotide
aaaagagcgcgcgaccgcc

SEQ ID NO: 327452 - RNA, 19 nt, Artificial Sequence
  Description of Artificial Sequence: Synthetic oligonucleotide
guucguuggacacauacug

SEQ ID NO: 327453 - RNA, 19 nt, Artificial Sequence
  Description of Artificial Sequence: Synthetic oligonucleotide
uauguaugcuguaaccucu

SEQ ID NO: 327454 - RNA, 19 nt, Artificial Sequence
  Description of Artificial Sequence: Synthetic oligonucleotide
uaccaguuggcacaggagc

SEQ ID NO: 327455 - RNA, 19 nt, Artificial Sequence
  Description of Artificial Sequence: Synthetic oligonucleotide
ugccucauuagcauaaccu

SEQ ID NO: 327456 - RNA, 19 nt, Artificial Sequence
  Description of Artificial Sequence: Synthetic oligonucleotide
aaugcacagcguaacuacc

SEQ ID NO: 327457 - RNA, 19 nt, Artificial Sequence
  Description of Artificial Sequence: Synthetic oligonucleotide
aggaaugcaccagauagac

SEQ ID NO: 327458 - RNA, 19 nt, Artificial Sequence
  Description of Artificial Sequence: Synthetic oligonucleotide
guaacggcgacgcugcacg

SEQ ID NO: 327459 - RNA, 19 nt, Artificial Sequence
  Description of Artificial Sequence: Synthetic oligonucleotide
uagaguaguacaggcaggg

SEQ ID NO: 327460 - RNA, 19 nt, Artificial Sequence
  Description of Artificial Sequence: Synthetic oligonucleotide
ucacgagccucuuugaugu

SEQ ID NO: 327461 - RNA, 19 nt, Artificial Sequence
  Description of Artificial Sequence: Synthetic oligonucleotide
auaguuaagccuucauucu

SEQ ID NO: 327462 - RNA, 19 nt, Artificial Sequence
  Description of Artificial Sequence: Synthetic oligonucleotide
uauuguuuaugcccauagc

SEQ ID NO: 327463 - RNA, 19 nt, Artificial Sequence
  Description of Artificial Sequence: Synthetic oligonucleotide
cuaucaagaaaagcugugg

SEQ ID NO: 327464 - RNA, 19 nt, Artificial Sequence
  Description of Artificial Sequence: Synthetic oligonucleotide
cuaagagcuacugucagac

SEQ ID NO: 327465 - RNA, 19 nt, Artificial Sequence
  Description of Artificial Sequence: Synthetic oligonucleotide
acauaguacaccaauaaaa

SEQ ID NO: 327466 - RNA, 19 nt, Artificial Sequence
  Description of Artificial Sequence: Synthetic oligonucleotide
ucuauugggaagaacccua

SEQ ID NO: 327467 - RNA, 19 nt, Artificial Sequence
  Description of Artificial Sequence: Synthetic oligonucleotide
uccuuaugaaugaaaacuu

SEQ ID NO: 327468 - RNA, 19 nt, Artificial Sequence
  Description of Artificial Sequence: Synthetic oligonucleotide
uugcggggaaacuagacac

SEQ ID NO: 327469 - RNA, 19 nt, Artificial Sequence
  Description of Artificial Sequence: Synthetic oligonucleotide
cuaccuaagauaggcaagg

SEQ ID NO: 327470 - RNA, 19 nt, Artificial Sequence
  Description of Artificial Sequence: Synthetic oligonucleotide
gaaugcaccagauagacuu

SEQ ID NO: 327471 - RNA, 19 nt, Artificial Sequence
  Description of Artificial Sequence: Synthetic oligonucleotide
aaucaacacacuucaggaa

SEQ ID NO: 327472 - RNA, 19 nt, Artificial Sequence
  Description of Artificial Sequence: Synthetic oligonucleotide
uccgaagcucuucuugacg

SEQ ID NO: 327473 - RNA, 19 nt, Artificial Sequence
  Description of Artificial Sequence: Synthetic oligonucleotide
aaacguucaguuguuggug

SEQ ID NO: 327474 - RNA, 19 nt, Artificial Sequence
  Description of Artificial Sequence: Synthetic oligonucleotide
agguaucaggaacaaauca

SEQ ID NO: 327475 - RNA, 19 nt, Artificial Sequence
  Description of Artificial Sequence: Synthetic oligonucleotide
uucccaagauuguacuagg

SEQ ID NO: 327476 - RNA, 19 nt, Artificial Sequence
  Description of Artificial Sequence: Synthetic oligonucleotide
gggaaaaccuaucuauugg

SEQ ID NO: 327477 - RNA, 19 nt, Artificial Sequence
  Description of Artificial Sequence: Synthetic oligonucleotide
ucgacuaaccucgacuucc

SEQ ID NO: 327478 - RNA, 19 nt, Artificial Sequence
  Description of Artificial Sequence: Synthetic oligonucleotide
aucggcggcguuuauuugg

SEQ ID NO: 327479 - RNA, 19 nt, Artificial Sequence
  Description of Artificial Sequence: Synthetic oligonucleotide
agcguaacuaccuaagaua

SEQ ID NO: 327480 - RNA, 19 nt, Artificial Sequence
  Description of Artificial Sequence: Synthetic oligonucleotide
agaguaacggcgacgcugc

SEQ ID NO: 327481 - RNA, 19 nt, Artificial Sequence
  Description of Artificial Sequence: Synthetic oligonucleotide
aucaagauuaauggagcuc

SEQ ID NO: 327482 - RNA, 19 nt, Artificial Sequence
  Description of Artificial Sequence: Synthetic oligonucleotide
ggaaacuagacacugcaac

SEQ ID NO: 327483 - RNA, 19 nt, Artificial Sequence
  Description of Artificial Sequence: Synthetic oligonucleotide
aagacggcuucguugggug

SEQ ID NO: 327484 - RNA, 19 nt, Artificial Sequence
  Description of Artificial Sequence: Synthetic oligonucleotide
cuaaccucgacuuccucug

SEQ ID NO: 327485 - RNA, 19 nt, Artificial Sequence
  Description of Artificial Sequence: Synthetic oligonucleotide
ggaggaaugaucaagauua

SEQ ID NO: 327486 - RNA, 19 nt, Artificial Sequence
  Description of Artificial Sequence: Synthetic oligonucleotide
acuaaccucgacuuccucu

SEQ ID NO: 327487 - RNA, 19 nt, Artificial Sequence
  Description of Artificial Sequence: Synthetic oligonucleotide
uccucgacuaaccucgacu

SEQ ID NO: 327488 - RNA, 19 nt, Artificial Sequence
  Description of Artificial Sequence: Synthetic oligonucleotide
auaagugaugcugcauuac

SEQ ID NO: 327489 - RNA, 19 nt, Artificial Sequence
  Description of Artificial Sequence: Synthetic oligonucleotide
uuguuaaauaccaccccuc

SEQ ID NO: 327490 - RNA, 19 nt, Artificial Sequence
  Description of Artificial Sequence: Synthetic oligonucleotide
uucggacuguaagagaugc

SEQ ID NO: 327491 - RNA, 19 nt, Artificial Sequence
  Description of Artificial Sequence: Synthetic oligonucleotide
acccuaacacuuuuccagg

SEQ ID NO: 327492 - RNA, 19 nt, Artificial Sequence
  Description of Artificial Sequence: Synthetic oligonucleotide
ucuguggacauuugucuga

SEQ ID NO: 327493 - RNA, 19 nt, Artificial Sequence
  Description of Artificial Sequence: Synthetic oligonucleotide
cuagaguaguacaggcagg

SEQ ID NO: 327494 - RNA, 19 nt, Artificial Sequence
  Description of Artificial Sequence: Synthetic oligonucleotide
uucucucgcaucagggaag

SEQ ID NO: 327495 - RNA, 19 nt, Artificial Sequence
  Description of Artificial Sequence: Synthetic oligonucleotide
aaccuaucuauugggaaga

SEQ ID NO: 327496 - RNA, 19 nt, Artificial Sequence
  Description of Artificial Sequence: Synthetic oligonucleotide
augggauauaacagaaccg

SEQ ID NO: 327497 - RNA, 19 nt, Artificial Sequence
  Description of Artificial Sequence: Synthetic oligonucleotide
ucccuagaguaguacaggc

SEQ ID NO: 327498 - RNA, 19 nt, Artificial Sequence
  Description of Artificial Sequence: Synthetic oligonucleotide
ucaauaguuaagccuucau

SEQ ID NO: 327499 - RNA, 19 nt, Artificial Sequence
  Description of Artificial Sequence: Synthetic oligonucleotide
uaacuaccuaagauaggca

SEQ ID NO: 327500 - RNA, 19 nt, Artificial Sequence
  Description of Artificial Sequence: Synthetic oligonucleotide
auccguaucucuuguucuc

SEQ ID NO: 327501 - RNA, 19 nt, Artificial Sequence
  Description of Artificial Sequence: Synthetic oligonucleotide
caagcgaauaaagccaaag

SEQ ID NO: 327502 - RNA, 19 nt, Artificial Sequence
  Description of Artificial Sequence: Synthetic oligonucleotide
cucgcaucagggaagguuc

SEQ ID NO: 327503 - RNA, 19 nt, Artificial Sequence
  Description of Artificial Sequence: Synthetic oligonucleotide
uacuaggccuaucaagaaa

SEQ ID NO: 327504 - RNA, 19 nt, Artificial Sequence
  Description of Artificial Sequence: Synthetic oligonucleotide
cauuggaggauguuuaaaa

SEQ ID NO: 327505 - RNA, 19 nt, Artificial Sequence
  Description of Artificial Sequence: Synthetic oligonucleotide
auaugggauauaacagaac

SEQ ID NO: 327506 - RNA, 19 nt, Artificial Sequence
  Description of Artificial Sequence: Synthetic oligonucleotide
gucccgagaaaagagcgcg

SEQ ID NO: 327507 - RNA, 19 nt, Artificial Sequence
  Description of Artificial Sequence: Synthetic oligonucleotide
cucuaagagguuccuuagg

SEQ ID NO: 327508 - RNA, 19 nt, Artificial Sequence
  Description of Artificial Sequence: Synthetic oligonucleotide
augaaagguuauauauggg

SEQ ID NO: 327509 - RNA, 19 nt, Artificial Sequence
  Description of Artificial Sequence: Synthetic oligonucleotide
cucacgagccucuuugaug

SEQ ID NO: 327510 - RNA, 19 nt, Artificial Sequence
  Description of Artificial Sequence: Synthetic oligonucleotide
ugaaccucuugguuaugca

SEQ ID NO: 327511 - RNA, 19 nt, Artificial Sequence
  Description of Artificial Sequence: Synthetic oligonucleotide
uuucggacuguaagagaug

SEQ ID NO: 327512 - RNA, 19 nt, Artificial Sequence
  Description of Artificial Sequence: Synthetic oligonucleotide
gaaaaccuaucuauuggga

SEQ ID NO: 327513 - RNA, 19 nt, Artificial Sequence
  Description of Artificial Sequence: Synthetic oligonucleotide
uuuaguaucggcggcguuu

SEQ ID NO: 327514 - RNA, 19 nt, Artificial Sequence
  Description of Artificial Sequence: Synthetic oligonucleotide
uaggccuaucaagaaaagc

SEQ ID NO: 327515 - RNA, 19 nt, Artificial Sequence
  Description of Artificial Sequence: Synthetic oligonucleotide
uggacgguugaaugcagga

SEQ ID NO: 327516 - RNA, 19 nt, Artificial Sequence
  Description of Artificial Sequence: Synthetic oligonucleotide
acuaccuaagauaggcaag

SEQ ID NO: 327517 - RNA, 19 nt, Artificial Sequence
  Description of Artificial Sequence: Synthetic oligonucleotide
ucccaagauuguacuaggc

SEQ ID NO: 327518 - RNA, 19 nt, Artificial Sequence
  Description of Artificial Sequence: Synthetic oligonucleotide
cacggaguggcauauuauc

SEQ ID NO: 327519 - RNA, 19 nt, Artificial Sequence
  Description of Artificial Sequence: Synthetic oligonucleotide
gaauggaggaauugggcua

SEQ ID NO: 327520 - RNA, 19 nt, Artificial Sequence
  Description of Artificial Sequence: Synthetic oligonucleotide
auugggcuaggucauugga

SEQ ID NO: 327521 - RNA, 19 nt, Artificial Sequence
  Description of Artificial Sequence: Synthetic oligonucleotide
gugaauggaggaauugggc

SEQ ID NO: 327522 - RNA, 19 nt, Artificial Sequence
  Description of Artificial Sequence: Synthetic oligonucleotide
uauugggaagaacccuaac

SEQ ID NO: 327523 - RNA, 19 nt, Artificial Sequence
  Description of Artificial Sequence: Synthetic oligonucleotide
uguucucgcuccuugugaa

SEQ ID NO: 327524 - RNA, 19 nt, Artificial Sequence
  Description of Artificial Sequence: Synthetic oligonucleotide
uaagauaggcaaggcuaag

SEQ ID NO: 327525 - RNA, 19 nt, Artificial Sequence
  Description of Artificial Sequence: Synthetic oligonucleotide
aagagcgcgcgaccgccgg

SEQ ID NO: 327526 - RNA, 19 nt, Artificial Sequence
  Description of Artificial Sequence: Synthetic oligonucleotide
accagauagacuugauaaa

SEQ ID NO: 327527 - RNA, 19 nt, Artificial Sequence
  Description of Artificial Sequence: Synthetic oligonucleotide
auauggcagugucucuggg

SEQ ID NO: 327528 - RNA, 19 nt, Artificial Sequence
  Description of Artificial Sequence: Synthetic oligonucleotide
auuguacuaggccuaucaa

SEQ ID NO: 327529 - RNA, 19 nt, Artificial Sequence
  Description of Artificial Sequence: Synthetic oligonucleotide
uuaaggguugcggggaaac

SEQ ID NO: 327530 - RNA, 19 nt, Artificial Sequence
  Description of Artificial Sequence: Synthetic oligonucleotide
aacggcgacgcugcacggc

SEQ ID NO: 327531 - RNA, 19 nt, Artificial Sequence
  Description of Artificial Sequence: Synthetic oligonucleotide
gcguaacuaccuaagauag

SEQ ID NO: 327532 - RNA, 19 nt, Artificial Sequence
  Description of Artificial Sequence: Synthetic oligonucleotide
uacuucgauuugagcacag

SEQ ID NO: 327533 - RNA, 19 nt, Artificial Sequence
  Description of Artificial Sequence: Synthetic oligonucleotide
guugcggggaaacuagaca

SEQ ID NO: 327534 - RNA, 19 nt, Artificial Sequence
  Description of Artificial Sequence: Synthetic oligonucleotide
cuaggccuaucaagaaaag

SEQ ID NO: 327535 - RNA, 19 nt, Artificial Sequence
  Description of Artificial Sequence: Synthetic oligonucleotide
ucucccgguuuccuaaagu

SEQ ID NO: 327536 - RNA, 19 nt, Artificial Sequence
  Description of Artificial Sequence: Synthetic oligonucleotide
gaaagguuauauaugggau

SEQ ID NO: 327537 - RNA, 19 nt, Artificial Sequence
  Description of Artificial Sequence: Synthetic oligonucleotide
uuaaagugucugucuccca

SEQ ID NO: 327538 - RNA, 19 nt, Artificial Sequence
  Description of Artificial Sequence: Synthetic oligonucleotide
acucccuagaguaguacag

SEQ ID NO: 327539 - RNA, 19 nt, Artificial Sequence
  Description of Artificial Sequence: Synthetic oligonucleotide
gccucauuagcauaaccug

SEQ ID NO: 327540 - RNA, 19 nt, Artificial Sequence
  Description of Artificial Sequence: Synthetic oligonucleotide
accgucccgagaaaagagc

SEQ ID NO: 327541 - RNA, 19 nt, Artificial Sequence
  Description of Artificial Sequence: Synthetic oligonucleotide
uuugcacccuuuacuucga

SEQ ID NO: 327542 - RNA, 19 nt, Artificial Sequence
  Description of Artificial Sequence: Synthetic oligonucleotide
aucuauugggaagaacccu

SEQ ID NO: 327543 - RNA, 19 nt, Artificial Sequence
  Description of Artificial Sequence: Synthetic oligonucleotide
aguaguacaggcagggaaa

SEQ ID NO: 327544 - RNA, 19 nt, Artificial Sequence
  Description of Artificial Sequence: Synthetic oligonucleotide
gggaagguucccuugaauc

SEQ ID NO: 327545 - RNA, 19 nt, Artificial Sequence
  Description of Artificial Sequence: Synthetic oligonucleotide
uuacuucgauuugagcaca

SEQ ID NO: 327546 - RNA, 19 nt, Artificial Sequence
  Description of Artificial Sequence: Synthetic oligonucleotide
cuggacgguugaaugcagg

SEQ ID NO: 327547 - RNA, 19 nt, Artificial Sequence
  Description of Artificial Sequence: Synthetic oligonucleotide
accgccggaaaccagccga

SEQ ID NO: 327548 - RNA, 19 nt, Artificial Sequence
  Description of Artificial Sequence: Synthetic oligonucleotide
guaguccuuacccaagaaa

SEQ ID NO: 327549 - RNA, 19 nt, Artificial Sequence
  Description of Artificial Sequence: Synthetic oligonucleotide
cccaagauuguacuaggcc

SEQ ID NO: 327550 - RNA, 19 nt, Artificial Sequence
  Description of Artificial Sequence: Synthetic oligonucleotide
uucgccugcuuucccauau

SEQ ID NO: 327551 - RNA, 19 nt, Artificial Sequence
  Description of Artificial Sequence: Synthetic oligonucleotide
aaccguauguaugcuguaa

SEQ ID NO: 327552 - RNA, 19 nt, Artificial Sequence
  Description of Artificial Sequence: Synthetic oligonucleotide
caccgucccgagaaaagag

SEQ ID NO: 327553 - RNA, 19 nt, Artificial Sequence
  Description of Artificial Sequence: Synthetic oligonucleotide
gccuuuaaggguugcgggg

SEQ ID NO: 327554 - RNA, 19 nt, Artificial Sequence
  Description of Artificial Sequence: Synthetic oligonucleotide
ucucacgagccucuuugau

SEQ ID NO: 327555 - RNA, 19 nt, Artificial Sequence
  Description of Artificial Sequence: Synthetic oligonucleotide
caagauuaauggagcucug

SEQ ID NO: 327556 - RNA, 19 nt, Artificial Sequence
  Description of Artificial Sequence: Synthetic oligonucleotide
ucggcggcguuuauuugga

SEQ ID NO: 327557 - RNA, 19 nt, Artificial Sequence
  Description of Artificial Sequence: Synthetic oligonucleotide
ugcacagcguaacuaccua

SEQ ID NO: 327558 - RNA, 19 nt, Artificial Sequence
  Description of Artificial Sequence: Synthetic oligonucleotide
caagauuguacuaggccua

SEQ ID NO: 327559 - RNA, 19 nt, Artificial Sequence
  Description of Artificial Sequence: Synthetic oligonucleotide
uucucacgagccucuuuga

SEQ ID NO: 327560 - RNA, 19 nt, Artificial Sequence
  Description of Artificial Sequence: Synthetic oligonucleotide
uguugcgguccacuugauc

SEQ ID NO: 327561 - RNA, 19 nt, Artificial Sequence
  Description of Artificial Sequence: Synthetic oligonucleotide
uugaaugcaggaggaguuc

SEQ ID NO: 327562 - RNA, 19 nt, Artificial Sequence
  Description of Artificial Sequence: Synthetic oligonucleotide
ucccgagaaaagagcgcgc

SEQ ID NO: 327563 - RNA, 19 nt, Artificial Sequence
  Description of Artificial Sequence: Synthetic oligonucleotide
ucguguuuccaagcgaaua

SEQ ID NO: 327564 - RNA, 19 nt, Artificial Sequence
  Description of Artificial Sequence: Synthetic oligonucleotide
uuaguaucggcggcguuua

SEQ ID NO: 327565 - RNA, 19 nt, Artificial Sequence
  Description of Artificial Sequence: Synthetic oligonucleotide
ucuauuguuuaugcccaua

SEQ ID NO: 327566 - RNA, 19 nt, Artificial Sequence
  Description of Artificial Sequence: Synthetic oligonucleotide
aguucguuggacacauacu

SEQ ID NO: 327567 - RNA, 19 nt, Artificial Sequence
  Description of Artificial Sequence: Synthetic oligonucleotide
uuagcauaaccuggugcuc

SEQ ID NO: 327568 - RNA, 19 nt, Artificial Sequence
  Description of Artificial Sequence: Synthetic oligonucleotide
ucggacuguaagagaugca

SEQ ID NO: 327569 - RNA, 19 nt, Artificial Sequence
  Description of Artificial Sequence: Synthetic oligonucleotide
aaagagcgcgcgaccgccg

SEQ ID NO: 327570 - RNA, 19 nt, Artificial Sequence
  Description of Artificial Sequence: Synthetic oligonucleotide
cuucguugggugaaggucu

SEQ ID NO: 327571 - RNA, 19 nt, Artificial Sequence
  Description of Artificial Sequence: Synthetic oligonucleotide
gguaccaguuggcacagga

SEQ ID NO: 327572 - RNA, 19 nt, Artificial Sequence
  Description of Artificial Sequence: Synthetic oligonucleotide
ccguauguaugcuguaacc

SEQ ID NO: 327573 - RNA, 19 nt, Artificial Sequence
  Description of Artificial Sequence: Synthetic oligonucleotide
cucauggcgugcugccucc

SEQ ID NO: 327574 - RNA, 19 nt, Artificial Sequence
  Description of Artificial Sequence: Synthetic oligonucleotide
ggcggcguuuauuuggagc

SEQ ID NO: 327575 - RNA, 19 nt, Artificial Sequence
  Description of Artificial Sequence: Synthetic oligonucleotide
guaccaguuggcacaggag

SEQ ID NO: 327576 - RNA, 19 nt, Artificial Sequence
  Description of Artificial Sequence: Synthetic oligonucleotide
uucguguuuccaagcgaau

SEQ ID NO: 327577 - RNA, 19 nt, Artificial Sequence
  Description of Artificial Sequence: Synthetic oligonucleotide
gcggcguuuauuuggagca

SEQ ID NO: 327578 - RNA, 19 nt, Artificial Sequence
  Description of Artificial Sequence: Synthetic oligonucleotide
ugagggccuuccucgguca

SEQ ID NO: 327579 - RNA, 19 nt, Artificial Sequence
  Description of Artificial Sequence: Synthetic oligonucleotide
uaucggcggcguuuauuug

SEQ ID NO: 327580 - RNA, 19 nt, Artificial Sequence
  Description of Artificial Sequence: Synthetic oligonucleotide
ucgacuuccucugcccaca

SEQ ID NO: 327581 - RNA, 19 nt, Artificial Sequence
  Description of Artificial Sequence: Synthetic oligonucleotide
agaugcacuaugacaggca

SEQ ID NO: 327582 - RNA, 19 nt, Artificial Sequence
  Description of Artificial Sequence: Synthetic oligonucleotide
uaacggcgacgcugcacgg

SEQ ID NO: 327583 - RNA, 19 nt, Artificial Sequence
  Description of Artificial Sequence: Synthetic oligonucleotide
ucagaguaacggcgacgcu

SEQ ID NO: 327584 - RNA, 19 nt, Artificial Sequence
  Description of Artificial Sequence: Synthetic oligonucleotide
gcuguaaccucuguggaca

SEQ ID NO: 327585 - RNA, 19 nt, Artificial Sequence
  Description of Artificial Sequence: Synthetic oligonucleotide
gccggaaaccagccgacgg

SEQ ID NO: 327586 - RNA, 19 nt, Artificial Sequence
  Description of Artificial Sequence: Synthetic oligonucleotide
cccugagaacucaacaaug

SEQ ID NO: 327587 - RNA, 19 nt, Artificial Sequence
  Description of Artificial Sequence: Synthetic oligonucleotide
gggcauggcgccucuauug

SEQ ID NO: 327588 - RNA, 19 nt, Artificial Sequence
  Description of Artificial Sequence: Synthetic oligonucleotide
agauuguacuaggccuauc

SEQ ID NO: 327589 - RNA, 19 nt, Artificial Sequence
  Description of Artificial Sequence: Synthetic oligonucleotide
augcacagcguaacuaccu

SEQ ID NO: 327590 - RNA, 19 nt, Artificial Sequence
  Description of Artificial Sequence: Synthetic oligonucleotide
ugcccauagcaccucccau

SEQ ID NO: 327591 - RNA, 19 nt, Artificial Sequence
  Description of Artificial Sequence: Synthetic oligonucleotide
aggcuaagagcuacuguca

SEQ ID NO: 327592 - RNA, 19 nt, Artificial Sequence
  Description of Artificial Sequence: Synthetic oligonucleotide
uuuccacggaguggcauau

SEQ ID NO: 327593 - RNA, 19 nt, Artificial Sequence
  Description of Artificial Sequence: Synthetic oligonucleotide
aggaauugggcuaggucau

SEQ ID NO: 327594 - RNA, 19 nt, Artificial Sequence
  Description of Artificial Sequence: Synthetic oligonucleotide
uuggcccauccguaucucu

SEQ ID NO: 327595 - RNA, 19 nt, Artificial Sequence
  Description of Artificial Sequence: Synthetic oligonucleotide
uggcugcugcugcugcugc

SEQ ID NO: 327596 - RNA, 19 nt, Artificial Sequence
  Description of Artificial Sequence: Synthetic oligonucleotide
uguugucgucucauuucuu

SEQ ID NO: 327597 - RNA, 19 nt, Artificial Sequence
  Description of Artificial Sequence: Synthetic oligonucleotide
ucucccaguccucgacuaa

SEQ ID NO: 327598 - RNA, 19 nt, Artificial Sequence
  Description of Artificial Sequence: Synthetic oligonucleotide
gaccgccggaaaccagccg

SEQ ID NO: 327599 - RNA, 19 nt, Artificial Sequence
  Description of Artificial Sequence: Synthetic oligonucleotide
guaucggcggcguuuauuu

SEQ ID NO: 327600 - RNA, 19 nt, Artificial Sequence
  Description of Artificial Sequence: Synthetic oligonucleotide
ugucgccgcaucauuucuu

SEQ ID NO: 327601 - RNA, 19 nt, Artificial Sequence
  Description of Artificial Sequence: Synthetic oligonucleotide
cugagggccuuccucgguc

SEQ ID NO: 327602 - RNA, 19 nt, Artificial Sequence
  Description of Artificial Sequence: Synthetic oligonucleotide
cucgacuaaccucgacuuc

SEQ ID NO: 327603 - RNA, 19 nt, Artificial Sequence
  Description of Artificial Sequence: Synthetic oligonucleotide
uucguugggugaaggucuu

SEQ ID NO: 327604 - RNA, 19 nt, Artificial Sequence
  Description of Artificial Sequence: Synthetic oligonucleotide
gaagaacccuaacacuuuu

SEQ ID NO: 327605 - RNA, 19 nt, Artificial Sequence
  Description of Artificial Sequence: Synthetic oligonucleotide
ggaggauguuuaaaaguuc

SEQ ID NO: 327606 - RNA, 19 nt, Artificial Sequence
  Description of Artificial Sequence: Synthetic oligonucleotide
gcgccucuauuguuuaugc

SEQ ID NO: 327607 - RNA, 19 nt, Artificial Sequence
  Description of Artificial Sequence: Synthetic oligonucleotide
cguaacuaccuaagauagg

SEQ ID NO: 327608 - RNA, 19 nt, Artificial Sequence
  Description of Artificial Sequence: Synthetic oligonucleotide
acuucgauuugagcacagu

SEQ ID NO: 327609 - RNA, 19 nt, Artificial Sequence
  Description of Artificial Sequence: Synthetic oligonucleotide
acuagacacugcaacuuua

SEQ ID NO: 327610 - RNA, 19 nt, Artificial Sequence
  Description of Artificial Sequence: Synthetic oligonucleotide
cucucccgguuuccuaaag

SEQ ID NO: 327611 - RNA, 19 nt, Artificial Sequence
  Description of Artificial Sequence: Synthetic oligonucleotide
cuuuccacggaguggcaua

SEQ ID NO: 327612 - RNA, 19 nt, Artificial Sequence
  Description of Artificial Sequence: Synthetic oligonucleotide
auuuaguaucggcggcguu

SEQ ID NO: 327613 - RNA, 19 nt, Artificial Sequence
  Description of Artificial Sequence: Synthetic oligonucleotide
gacuaaccucgacuuccuc

SEQ ID NO: 327614 - RNA, 19 nt, Artificial Sequence
  Description of Artificial Sequence: Synthetic oligonucleotide
ccauuguagcagcuuggcc

SEQ ID NO: 327615 - RNA, 19 nt, Artificial Sequence
  Description of Artificial Sequence: Synthetic oligonucleotide
cguuggacacauacugagg

SEQ ID NO: 327616 - RNA, 19 nt, Artificial Sequence
  Description of Artificial Sequence: Synthetic oligonucleotide
aucaaacauaguacaccaa

SEQ ID NO: 327617 - RNA, 19 nt, Artificial Sequence
  Description of Artificial Sequence: Synthetic oligonucleotide
aguaucggcggcguuuauu

SEQ ID NO: 327618 - RNA, 19 nt, Artificial Sequence
  Description of Artificial Sequence: Synthetic oligonucleotide
cauucuccgaagcucuucu

SEQ ID NO: 327619 - RNA, 19 nt, Artificial Sequence
  Description of Artificial Sequence: Synthetic oligonucleotide
gcuaagagcuacugucaga

SEQ ID NO: 327620 - RNA, 19 nt, Artificial Sequence
  Description of Artificial Sequence: Synthetic oligonucleotide
aggccgaggaaaugugguu

SEQ ID NO: 327621 - RNA, 19 nt, Artificial Sequence
  Description of Artificial Sequence: Synthetic oligonucleotide
gaaccguauguaugcugua

SEQ ID NO: 327622 - RNA, 19 nt, Artificial Sequence
  Description of Artificial Sequence: Synthetic oligonucleotide
agacggcuucguuggguga

SEQ ID NO: 327623 - RNA, 19 nt, Artificial Sequence
  Description of Artificial Sequence: Synthetic oligonucleotide
cugcugcugcugcugcugc

SEQ ID NO: 327624 - RNA, 19 nt, Artificial Sequence
  Description of Artificial Sequence: Synthetic oligonucleotide
cggacuguaagagaugcac

SEQ ID NO: 327625 - RNA, 19 nt, Artificial Sequence
  Description of Artificial Sequence: Synthetic oligonucleotide
cagcguaacuaccuaagau

SEQ ID NO: 327626 - RNA, 19 nt, Artificial Sequence
  Description of Artificial Sequence: Synthetic oligonucleotide
caaagcgcacacgcagcug

SEQ ID NO: 327627 - RNA, 19 nt, Artificial Sequence
  Description of Artificial Sequence: Synthetic oligonucleotide
ugcugcugcugcugcugcu

SEQ ID NO: 327628 - RNA, 19 nt, Artificial Sequence
  Description of Artificial Sequence: Synthetic oligonucleotide
gacggcuucguugggugaa

SEQ ID NO: 327629 - RNA, 19 nt, Artificial Sequence
  Description of Artificial Sequence: Synthetic oligonucleotide
ggcagggaaaaccuaucua

SEQ ID NO: 327630 - RNA, 19 nt, Artificial Sequence
  Description of Artificial Sequence: Synthetic oligonucleotide
uugcacccuuuacuucgau

SEQ ID NO: 327631 - RNA, 19 nt, Artificial Sequence
  Description of Artificial Sequence: Synthetic oligonucleotide
uuccaacgcauggcauacu

SEQ ID NO: 327632 - RNA, 19 nt, Artificial Sequence
  Description of Artificial Sequence: Synthetic oligonucleotide
cucccgguuuccuaaaguu

SEQ ID NO: 327633 - RNA, 19 nt, Artificial Sequence
  Description of Artificial Sequence: Synthetic oligonucleotide
ugcugcugcugcugcugau

SEQ ID NO: 327634 - RNA, 19 nt, Artificial Sequence
  Description of Artificial Sequence: Synthetic oligonucleotide
ggucaauaguuaagccuuc

SEQ ID NO: 327635 - RNA, 19 nt, Artificial Sequence
  Description of Artificial Sequence: Synthetic oligonucleotide
gcgaccgccggaaaccagc

SEQ ID NO: 327636 - RNA, 19 nt, Artificial Sequence
  Description of Artificial Sequence: Synthetic oligonucleotide
uaguaucggcggcguuuau

SEQ ID NO: 327637 - RNA, 19 nt, Artificial Sequence
  Description of Artificial Sequence: Synthetic oligonucleotide
ucgccugcuuucccauauu

SEQ ID NO: 327638 - RNA, 19 nt, Artificial Sequence
  Description of Artificial Sequence: Synthetic oligonucleotide
ccuuuaaggguugcgggga

SEQ ID NO: 327639 - RNA, 19 nt, Artificial Sequence
  Description of Artificial Sequence: Synthetic oligonucleotide
cgucccgagaaaagagcgc

SEQ ID NO: 327640 - RNA, 19 nt, Artificial Sequence
  Description of Artificial Sequence: Synthetic oligonucleotide
gcugcugcugcugcugcug

SEQ ID NO: 327641 - RNA, 19 nt, Artificial Sequence
  Description of Artificial Sequence: Synthetic oligonucleotide
gggauauaacagaaccgua

SEQ ID NO: 327642 - RNA, 19 nt, Artificial Sequence
  Description of Artificial Sequence: Synthetic oligonucleotide
uggcgccucuauuguuuau

SEQ ID NO: 327643 - RNA, 19 nt, Artificial Sequence
  Description of Artificial Sequence: Synthetic oligonucleotide
agagcgcgcgaccgccgga

SEQ ID NO: 327644 - RNA, 19 nt, Artificial Sequence
  Description of Artificial Sequence: Synthetic oligonucleotide
gccuaucaagaaaagcugu

SEQ ID NO: 327645 - RNA, 19 nt, Artificial Sequence
  Description of Artificial Sequence: Synthetic oligonucleotide
ucauggcgugcugccucca

SEQ ID NO: 327646 - RNA, 19 nt, Artificial Sequence
  Description of Artificial Sequence: Synthetic oligonucleotide
cuuuucgagcagcuggcuu

SEQ ID NO: 327647 - RNA, 19 nt, Artificial Sequence
  Description of Artificial Sequence: Synthetic oligonucleotide
gguguauauggcagugucu

SEQ ID NO: 327648 - RNA, 19 nt, Artificial Sequence
  Description of Artificial Sequence: Synthetic oligonucleotide
gaguaacggcgacgcugca

SEQ ID NO: 327649 - RNA, 19 nt, Artificial Sequence
  Description of Artificial Sequence: Synthetic oligonucleotide
ggcguuuauuuggagcaaa

SEQ ID NO: 327650 - RNA, 19 nt, Artificial Sequence
  Description of Artificial Sequence: Synthetic oligonucleotide
ccguaucucuuguucucuc

SEQ ID NO: 327651 - RNA, 19 nt, Artificial Sequence
  Description of Artificial Sequence: Synthetic oligonucleotide
gggaaacuagacacugcaa

SEQ ID NO: 327652 - RNA, 19 nt, Artificial Sequence
  Description of Artificial Sequence: Synthetic oligonucleotide
cggggaaacuagacacugc

SEQ ID NO: 327653 - RNA, 19 nt, Artificial Sequence
  Description of Artificial Sequence: Synthetic oligonucleotide
cugcugcugcugcugcuga

SEQ ID NO: 327654 - RNA, 19 nt, Artificial Sequence
  Description of Artificial Sequence: Synthetic oligonucleotide
cugucgccgcaucauuucu

SEQ ID NO: 327655 - RNA, 19 nt, Artificial Sequence
  Description of Artificial Sequence: Synthetic oligonucleotide
aguccucgacuaaccucga

SEQ ID NO: 327656 - RNA, 19 nt, Artificial Sequence
  Description of Artificial Sequence: Synthetic oligonucleotide
cguauguaugcuguaaccu

SEQ ID NO: 327657 - RNA, 19 nt, Artificial Sequence
  Description of Artificial Sequence: Synthetic oligonucleotide
gagcgcgcgaccgccggaa

SEQ ID NO: 327658 - RNA, 19 nt, Artificial Sequence
  Description of Artificial Sequence: Synthetic oligonucleotide
cgaccgccggaaaccagcc

SEQ ID NO: 327659 - RNA, 19 nt, Artificial Sequence
  Description of Artificial Sequence: Synthetic oligonucleotide
cuucgccugcuuucccaua

SEQ ID NO: 327660 - RNA, 19 nt, Artificial Sequence
  Description of Artificial Sequence: Synthetic oligonucleotide
cuguaaccucuguggacau

SEQ ID NO: 327661 - RNA, 19 nt, Artificial Sequence
  Description of Artificial Sequence: Synthetic oligonucleotide
ccucgacuaaccucgacuu

SEQ ID NO: 327662 - RNA, 19 nt, Artificial Sequence
  Description of Artificial Sequence: Synthetic oligonucleotide
cgcgcgaccgccggaaacc

SEQ ID NO: 327663 - RNA, 19 nt, Artificial Sequence
  Description of Artificial Sequence: Synthetic oligonucleotide
ccaccgucccgagaaaaga

SEQ ID NO: 327664 - RNA, 19 nt, Artificial Sequence
  Description of Artificial Sequence: Synthetic oligonucleotide
ccgagaaaagagcgcgcga

SEQ ID NO: 327665 - RNA, 19 nt, Artificial Sequence
  Description of Artificial Sequence: Synthetic oligonucleotide
ccgccggaaaccagccgac

SEQ ID NO: 327666 - RNA, 19 nt, Artificial Sequence
  Description of Artificial Sequence: Synthetic oligonucleotide
ggaaugcaccagauagacu

SEQ ID NO: 327667 - RNA, 19 nt, Artificial Sequence
  Description of Artificial Sequence: Synthetic oligonucleotide
agcgcgcgaccgccggaaa

SEQ ID NO: 327668 - RNA, 19 nt, Artificial Sequence
  Description of Artificial Sequence: Synthetic oligonucleotide
ccauuuggcccauccguau

SEQ ID NO: 327669 - RNA, 19 nt, Artificial Sequence
  Description of Artificial Sequence: Synthetic oligonucleotide
cauggcgugcugccuccau

SEQ ID NO: 327670 - RNA, 19 nt, Artificial Sequence
  Description of Artificial Sequence: Synthetic oligonucleotide
gccaaaacguucaguuguu

SEQ ID NO: 327671 - RNA, 19 nt, Artificial Sequence
  Description of Artificial Sequence: Synthetic oligonucleotide
ggggcauggcgccucuauu

SEQ ID NO: 327672 - RNA, 19 nt, Artificial Sequence
  Description of Artificial Sequence: Synthetic oligonucleotide
ggcugcugcugcugcugcu

SEQ ID NO: 327673 - RNA, 19 nt, Artificial Sequence
  Description of Artificial Sequence: Synthetic oligonucleotide
cgcgaccgccggaaaccag

SEQ ID NO: 327674 - RNA, 19 nt, Artificial Sequence
  Description of Artificial Sequence: Synthetic oligonucleotide
ggaauugggcuaggucauu

SEQ ID NO: 327675 - RNA, 19 nt, Artificial Sequence
  Description of Artificial Sequence: Synthetic oligonucleotide
gcgcgaccgccggaaacca

SEQ ID NO: 327676 - RNA, 19 nt, Artificial Sequence
  Description of Artificial Sequence: Synthetic oligonucleotide
cgacuaaccucgacuuccu

SEQ ID NO: 327677 - RNA, 19 nt, Artificial Sequence
  Description of Artificial Sequence: Synthetic oligonucleotide
cacgagccucuuugauguu

SEQ ID NO: 327678 - RNA, 19 nt, Artificial Sequence
  Description of Artificial Sequence: Synthetic oligonucleotide
ccugagggccuuccucggu

SEQ ID NO: 327679 - RNA, 19 nt, Artificial Sequence
  Description of Artificial Sequence: Synthetic oligonucleotide
cucucgcaucagggaaggu

SEQ ID NO: 327680 - RNA, 19 nt, Artificial Sequence
  Description of Artificial Sequence: Synthetic oligonucleotide
ccgguuuccuaaaguucuu

SEQ ID NO: 327681 - RNA, 19 nt, Artificial Sequence
  Description of Artificial Sequence: Synthetic oligonucleotide
cggcguuuauuuggagcaa

SEQ ID NO: 327682 - RNA, 19 nt, Artificial Sequence
  Description of Artificial Sequence: Synthetic oligonucleotide
auagaauagacacagagac

SEQ ID NO: 327683 - RNA, 19 nt, Artificial Sequence
  Description of Artificial Sequence: Synthetic oligonucleotide
auugaugugagacaguucg

SEQ ID NO: 327684 - RNA, 19 nt, Artificial Sequence
  Description of Artificial Sequence: Synthetic oligonucleotide
aacacaguuuuacugaagg

SEQ ID NO: 327685 - RNA, 19 nt, Artificial Sequence
  Description of Artificial Sequence: Synthetic oligonucleotide
ucuauauacagucuaaaac

SEQ ID NO: 327686 - RNA, 19 nt, Artificial Sequence
  Description of Artificial Sequence: Synthetic oligonucleotide
auggaugcaauccagaguc

SEQ ID NO: 327687 - RNA, 19 nt, Artificial Sequence
  Description of Artificial Sequence: Synthetic oligonucleotide
aauaccaucauggcccucc

SEQ ID NO: 327688 - RNA, 19 nt, Artificial Sequence
  Description of Artificial Sequence: Synthetic oligonucleotide
uagauucaucuucagaagg

SEQ ID NO: 327689 - RNA, 19 nt, Artificial Sequence
  Description of Artificial Sequence: Synthetic oligonucleotide
aguuacacugcccuggugg

SEQ ID NO: 327690 - RNA, 19 nt, Artificial Sequence
  Description of Artificial Sequence: Synthetic oligonucleotide
ucgucauucaacauggaug

SEQ ID NO: 327691 - RNA, 19 nt, Artificial Sequence
  Description of Artificial Sequence: Synthetic oligonucleotide
agugaaaugaauggugggc

SEQ ID NO: 327692 - RNA, 19 nt, Artificial Sequence
  Description of Artificial Sequence: Synthetic oligonucleotide
uuuguuagcauguccaaac

SEQ ID NO: 327693 - RNA, 19 nt, Artificial Sequence
  Description of Artificial Sequence: Synthetic oligonucleotide
aauaccaacgguuccggcu

SEQ ID NO: 327694 - RNA, 19 nt, Artificial Sequence
  Description of Artificial Sequence: Synthetic oligonucleotide
aggauacccauguucaagc

SEQ ID NO: 327695 - RNA, 19 nt, Artificial Sequence
  Description of Artificial Sequence: Synthetic oligonucleotide
uguaggaccagccugccug

SEQ ID NO: 327696 - RNA, 19 nt, Artificial Sequence
  Description of Artificial Sequence: Synthetic oligonucleotide
aacaaaacucuguggagug

SEQ ID NO: 327697 - RNA, 19 nt, Artificial Sequence
  Description of Artificial Sequence: Synthetic oligonucleotide
gauaccagugugcacacag

SEQ ID NO: 327698 - RNA, 19 nt, Artificial Sequence
  Description of Artificial Sequence: Synthetic oligonucleotide
ugcaauguuguucaccacc

SEQ ID NO: 327699 - RNA, 19 nt, Artificial Sequence
  Description of Artificial Sequence: Synthetic oligonucleotide
agaaguuaagagcggggcc

SEQ ID NO: 327700 - RNA, 19 nt, Artificial Sequence
  Description of Artificial Sequence: Synthetic oligonucleotide
uccugauucccgauaaacg

SEQ ID NO: 327701 - RNA, 19 nt, Artificial Sequence
  Description of Artificial Sequence: Synthetic oligonucleotide
aauagacacagagacacca

SEQ ID NO: 327702 - RNA, 19 nt, Artificial Sequence
  Description of Artificial Sequence: Synthetic oligonucleotide
aagcauagggcagagauga

SEQ ID NO: 327703 - RNA, 19 nt, Artificial Sequence
  Description of Artificial Sequence: Synthetic oligonucleotide
acagucuaaaaccaguaga

SEQ ID NO: 327704 - RNA, 19 nt, Artificial Sequence
  Description of Artificial Sequence: Synthetic oligonucleotide
uguuaugggaggauaccag

SEQ ID NO: 327705 - RNA, 19 nt, Artificial Sequence
  Description of Artificial Sequence: Synthetic oligonucleotide
ucccauacaugaaugaggu

SEQ ID NO: 327706 - RNA, 19 nt, Artificial Sequence
  Description of Artificial Sequence: Synthetic oligonucleotide
ugauucccgauaaacgugc

SEQ ID NO: 327707 - RNA, 19 nt, Artificial Sequence
  Description of Artificial Sequence: Synthetic oligonucleotide
ugucuuuuggcacuuguaa

SEQ ID NO: 327708 - RNA, 19 nt, Artificial Sequence
  Description of Artificial Sequence: Synthetic oligonucleotide
aguucgucauucaacaugg

SEQ ID NO: 327709 - RNA, 19 nt, Artificial Sequence
  Description of Artificial Sequence: Synthetic oligonucleotide
uauacugugcccacauggc

SEQ ID NO: 327710 - RNA, 19 nt, Artificial Sequence
  Description of Artificial Sequence: Synthetic oligonucleotide
ugcacccguacuuagagug

SEQ ID NO: 327711 - RNA, 19 nt, Artificial Sequence
  Description of Artificial Sequence: Synthetic oligonucleotide
uguaugaagagcucuccga

SEQ ID NO: 327712 - RNA, 19 nt, Artificial Sequence
  Description of Artificial Sequence: Synthetic oligonucleotide
auacugugcccacauggcc

SEQ ID NO: 327713 - RNA, 19 nt, Artificial Sequence
  Description of Artificial Sequence: Synthetic oligonucleotide
auaggugccacagacaaug

SEQ ID NO: 327714 - RNA, 19 nt, Artificial Sequence
  Description of Artificial Sequence: Synthetic oligonucleotide
aucauguuguccauacucc

SEQ ID NO: 327715 - RNA, 19 nt, Artificial Sequence
  Description of Artificial Sequence: Synthetic oligonucleotide
ucgucuugucagaagaacc

SEQ ID NO: 327716 - RNA, 19 nt, Artificial Sequence
  Description of Artificial Sequence: Synthetic oligonucleotide
ugaaugagguucucauagg

SEQ ID NO: 327717 - RNA, 19 nt, Artificial Sequence
  Description of Artificial Sequence: Synthetic oligonucleotide
gacaguucgucauucaaca

SEQ ID NO: 327718 - RNA, 19 nt, Artificial Sequence
  Description of Artificial Sequence: Synthetic oligonucleotide
aagcaucguaccuggcgcc

SEQ ID NO: 327719 - RNA, 19 nt, Artificial Sequence
  Description of Artificial Sequence: Synthetic oligonucleotide
auguagugaucacaggguc

SEQ ID NO: 327720 - RNA, 19 nt, Artificial Sequence
  Description of Artificial Sequence: Synthetic oligonucleotide
ugugcucgcauucuuucag

SEQ ID NO: 327721 - RNA, 19 nt, Artificial Sequence
  Description of Artificial Sequence: Synthetic oligonucleotide
agacccacgguccaucugg

SEQ ID NO: 327722 - RNA, 19 nt, Artificial Sequence
  Description of Artificial Sequence: Synthetic oligonucleotide
auaccaacgguuccggcuc

SEQ ID NO: 327723 - RNA, 19 nt, Artificial Sequence
  Description of Artificial Sequence: Synthetic oligonucleotide
aaggauacccauguucaag

SEQ ID NO: 327724 - RNA, 19 nt, Artificial Sequence
  Description of Artificial Sequence: Synthetic oligonucleotide
uguuagcauguccaaaccu

SEQ ID NO: 327725 - RNA, 19 nt, Artificial Sequence
  Description of Artificial Sequence: Synthetic oligonucleotide
ucguaggaugcacugaaga

SEQ ID NO: 327726 - RNA, 19 nt, Artificial Sequence
  Description of Artificial Sequence: Synthetic oligonucleotide
gacccugagggaccgaucg

SEQ ID NO: 327727 - RNA, 19 nt, Artificial Sequence
  Description of Artificial Sequence: Synthetic oligonucleotide
ugcaguuacacugcccugg

SEQ ID NO: 327728 - RNA, 19 nt, Artificial Sequence
  Description of Artificial Sequence: Synthetic oligonucleotide
uucaagcgugcauugaugu

SEQ ID NO: 327729 - RNA, 19 nt, Artificial Sequence
  Description of Artificial Sequence: Synthetic oligonucleotide
ugcgauguuguuuguaugu

SEQ ID NO: 327730 - RNA, 19 nt, Artificial Sequence
  Description of Artificial Sequence: Synthetic oligonucleotide
uucccgauaaacgugcacc

SEQ ID NO: 327731 - RNA, 19 nt, Artificial Sequence
  Description of Artificial Sequence: Synthetic oligonucleotide
uugucgugggcccgaaugg

SEQ ID NO: 327732 - RNA, 19 nt, Artificial Sequence
  Description of Artificial Sequence: Synthetic oligonucleotide
gguguuuaccuucugcagg

SEQ ID NO: 327733 - RNA, 19 nt, Artificial Sequence
  Description of Artificial Sequence: Synthetic oligonucleotide
uaugggaggauaccagugu

SEQ ID NO: 327734 - RNA, 19 nt, Artificial Sequence
  Description of Artificial Sequence: Synthetic oligonucleotide
uggcaacacaguuuuacug

SEQ ID NO: 327735 - RNA, 19 nt, Artificial Sequence
  Description of Artificial Sequence: Synthetic oligonucleotide
ucggcaaauaccaacgguu

SEQ ID NO: 327736 - RNA, 19 nt, Artificial Sequence
  Description of Artificial Sequence: Synthetic oligonucleotide
acaugugucccacaccuug

SEQ ID NO: 327737 - RNA, 19 nt, Artificial Sequence
  Description of Artificial Sequence: Synthetic oligonucleotide
aaaugaauggugggccggg

SEQ ID NO: 327738 - RNA, 19 nt, Artificial Sequence
  Description of Artificial Sequence: Synthetic oligonucleotide
ugcacugaagacuuugguc

SEQ ID NO: 327739 - RNA, 19 nt, Artificial Sequence
  Description of Artificial Sequence: Synthetic oligonucleotide
aaaagacccacgguccauc

SEQ ID NO: 327740 - RNA, 19 nt, Artificial Sequence
  Description of Artificial Sequence: Synthetic oligonucleotide
gaauaggcaagggugcuag

SEQ ID NO: 327741 - RNA, 19 nt, Artificial Sequence
  Description of Artificial Sequence: Synthetic oligonucleotide
ugagggaccgaucguagga

SEQ ID NO: 327742 - RNA, 19 nt, Artificial Sequence
  Description of Artificial Sequence: Synthetic oligonucleotide
caagcaucguaccuggcgc

SEQ ID NO: 327743 - RNA, 19 nt, Artificial Sequence
  Description of Artificial Sequence: Synthetic oligonucleotide
gagaacguggagcgcaggg

SEQ ID NO: 327744 - RNA, 19 nt, Artificial Sequence
  Description of Artificial Sequence: Synthetic oligonucleotide
ucgucuacagaacgugugc

SEQ ID NO: 327745 - RNA, 19 nt, Artificial Sequence
  Description of Artificial Sequence: Synthetic oligonucleotide
gaaaugaauggugggccgg

SEQ ID NO: 327746 - RNA, 19 nt, Artificial Sequence
  Description of Artificial Sequence: Synthetic oligonucleotide
uguucaagcgugcauugau

SEQ ID NO: 327747 - RNA, 19 nt, Artificial Sequence
  Description of Artificial Sequence: Synthetic oligonucleotide
uuagcauguccaaaccuuc

SEQ ID NO: 327748 - RNA, 19 nt, Artificial Sequence
  Description of Artificial Sequence: Synthetic oligonucleotide
aaagcgaucuccuggucuu

SEQ ID NO: 327749 - RNA, 19 nt, Artificial Sequence
  Description of Artificial Sequence: Synthetic oligonucleotide
aggugaguaaaagacccac

SEQ ID NO: 327750 - RNA, 19 nt, Artificial Sequence
  Description of Artificial Sequence: Synthetic oligonucleotide
aacuuuagcucagugccca

SEQ ID NO: 327751 - RNA, 19 nt, Artificial Sequence
  Description of Artificial Sequence: Synthetic oligonucleotide
uaaacgugcacccguacuu

SEQ ID NO: 327752 - RNA, 19 nt, Artificial Sequence
  Description of Artificial Sequence: Synthetic oligonucleotide
uaagugguacauguguccc

SEQ ID NO: 327753 - RNA, 19 nt, Artificial Sequence
  Description of Artificial Sequence: Synthetic oligonucleotide
aaaucuauauacagucuaa

SEQ ID NO: 327754 - RNA, 19 nt, Artificial Sequence
  Description of Artificial Sequence: Synthetic oligonucleotide
cuaccucaaagacaccagg

SEQ ID NO: 327755 - RNA, 19 nt, Artificial Sequence
  Description of Artificial Sequence: Synthetic oligonucleotide
uggaugucccacacaauga

SEQ ID NO: 327756 - RNA, 19 nt, Artificial Sequence
  Description of Artificial Sequence: Synthetic oligonucleotide
uucgucauucaacauggau

SEQ ID NO: 327757 - RNA, 19 nt, Artificial Sequence
  Description of Artificial Sequence: Synthetic oligonucleotide
acaguuuuacugaaggcug

SEQ ID NO: 327758 - RNA, 19 nt, Artificial Sequence
  Description of Artificial Sequence: Synthetic oligonucleotide
guugucgugggcccgaaug

SEQ ID NO: 327759 - RNA, 19 nt, Artificial Sequence
  Description of Artificial Sequence: Synthetic oligonucleotide
agcuacugcaauguuguuc

SEQ ID NO: 327760 - RNA, 19 nt, Artificial Sequence
  Description of Artificial Sequence: Synthetic oligonucleotide
cucaaagcggcauguuucc

SEQ ID NO: 327761 - RNA, 19 nt, Artificial Sequence
  Description of Artificial Sequence: Synthetic oligonucleotide
auaaacgugcacccguacu

SEQ ID NO: 327762 - RNA, 19 nt, Artificial Sequence
  Description of Artificial Sequence: Synthetic oligonucleotide
caguucgucauucaacaug

SEQ ID NO: 327763 - RNA, 19 nt, Artificial Sequence
  Description of Artificial Sequence: Synthetic oligonucleotide
ugggucuaccucaaagaca

SEQ ID NO: 327764 - RNA, 19 nt, Artificial Sequence
  Description of Artificial Sequence: Synthetic oligonucleotide
gucccauacaugaaugagg

SEQ ID NO: 327765 - RNA, 19 nt, Artificial Sequence
  Description of Artificial Sequence: Synthetic oligonucleotide
agccugucuaucugucucc

SEQ ID NO: 327766 - RNA, 19 nt, Artificial Sequence
  Description of Artificial Sequence: Synthetic oligonucleotide
gaugugagacaguucguca

SEQ ID NO: 327767 - RNA, 19 nt, Artificial Sequence
  Description of Artificial Sequence: Synthetic oligonucleotide
uauagcuugcaccccugga

SEQ ID NO: 327768 - RNA, 19 nt, Artificial Sequence
  Description of Artificial Sequence: Synthetic oligonucleotide
caggacauggaugcaaucc

SEQ ID NO: 327769 - RNA, 19 nt, Artificial Sequence
  Description of Artificial Sequence: Synthetic oligonucleotide
caauguaugaagagcucuc

SEQ ID NO: 327770 - RNA, 19 nt, Artificial Sequence
  Description of Artificial Sequence: Synthetic oligonucleotide
ucauucaacauggaugcau

SEQ ID NO: 327771 - RNA, 19 nt, Artificial Sequence
  Description of Artificial Sequence: Synthetic oligonucleotide
uucaucccgaggcgaauag

SEQ ID NO: 327772 - RNA, 19 nt, Artificial Sequence
  Description of Artificial Sequence: Synthetic oligonucleotide
gaugugcucgcauucuuuc

SEQ ID NO: 327773 - RNA, 19 nt, Artificial Sequence
  Description of Artificial Sequence: Synthetic oligonucleotide
aacgugcacccguacuuag

SEQ ID NO: 327774 - RNA, 19 nt, Artificial Sequence
  Description of Artificial Sequence: Synthetic oligonucleotide
cugauucccgauaaacgug

SEQ ID NO: 327775 - RNA, 19 nt, Artificial Sequence
  Description of Artificial Sequence: Synthetic oligonucleotide
aggcgcaucgucuacagaa

SEQ ID NO: 327776 - RNA, 19 nt, Artificial Sequence
  Description of Artificial Sequence: Synthetic oligonucleotide
ugugcagaucauguugucc

SEQ ID NO: 327777 - RNA, 19 nt, Artificial Sequence
  Description of Artificial Sequence: Synthetic oligonucleotide
ugcaucucauggaagcggu

SEQ ID NO: 327778 - RNA, 19 nt, Artificial Sequence
  Description of Artificial Sequence: Synthetic oligonucleotide
guauguguuggucccauca

SEQ ID NO: 327779 - RNA, 19 nt, Artificial Sequence
  Description of Artificial Sequence: Synthetic oligonucleotide
uugaucgucuugucagaag

SEQ ID NO: 327780 - RNA, 19 nt, Artificial Sequence
  Description of Artificial Sequence: Synthetic oligonucleotide
ucccgauaaacgugcaccc

SEQ ID NO: 327781 - RNA, 19 nt, Artificial Sequence
  Description of Artificial Sequence: Synthetic oligonucleotide
ugggaggauaccagugugc

SEQ ID NO: 327782 - RNA, 19 nt, Artificial Sequence
  Description of Artificial Sequence: Synthetic oligonucleotide
auaggcaagggugcuagag

SEQ ID NO: 327783 - RNA, 19 nt, Artificial Sequence
  Description of Artificial Sequence: Synthetic oligonucleotide
ucgcauucuuucagguggg

SEQ ID NO: 327784 - RNA, 19 nt, Artificial Sequence
  Description of Artificial Sequence: Synthetic oligonucleotide
cagucuaaaaccaguagaa

SEQ ID NO: 327785 - RNA, 19 nt, Artificial Sequence
  Description of Artificial Sequence: Synthetic oligonucleotide
cgucauucaacauggaugc

SEQ ID NO: 327786 - RNA, 19 nt, Artificial Sequence
  Description of Artificial Sequence: Synthetic oligonucleotide
cugguaagagccacuguac

SEQ ID NO: 327787 - RNA, 19 nt, Artificial Sequence
  Description of Artificial Sequence: Synthetic oligonucleotide
gaucguaggaugcacugaa

SEQ ID NO: 327788 - RNA, 19 nt, Artificial Sequence
  Description of Artificial Sequence: Synthetic oligonucleotide
ccauacaugaaugagguuc

SEQ ID NO: 327789 - RNA, 19 nt, Artificial Sequence
  Description of Artificial Sequence: Synthetic oligonucleotide
aggaaagcgaucuccuggu

SEQ ID NO: 327790 - RNA, 19 nt, Artificial Sequence
  Description of Artificial Sequence: Synthetic oligonucleotide
cagagcgccagcacaauac

SEQ ID NO: 327791 - RNA, 19 nt, Artificial Sequence
  Description of Artificial Sequence: Synthetic oligonucleotide
acuguauagcuugcacccc

SEQ ID NO: 327792 - RNA, 19 nt, Artificial Sequence
  Description of Artificial Sequence: Synthetic oligonucleotide
cuuagaguggggacacuug

SEQ ID NO: 327793 - RNA, 19 nt, Artificial Sequence
  Description of Artificial Sequence: Synthetic oligonucleotide
aaagacccacgguccaucu

SEQ ID NO: 327794 - RNA, 19 nt, Artificial Sequence
  Description of Artificial Sequence: Synthetic oligonucleotide
ugucugguaagagccacug

SEQ ID NO: 327795 - RNA, 19 nt, Artificial Sequence
  Description of Artificial Sequence: Synthetic oligonucleotide
cuggacucggaguguaggg

SEQ ID NO: 327796 - RNA, 19 nt, Artificial Sequence
  Description of Artificial Sequence: Synthetic oligonucleotide
caaauaccaacgguuccgg

SEQ ID NO: 327797 - RNA, 19 nt, Artificial Sequence
  Description of Artificial Sequence: Synthetic oligonucleotide
ucaagcgugcauugaugug

SEQ ID NO: 327798 - RNA, 19 nt, Artificial Sequence
  Description of Artificial Sequence: Synthetic oligonucleotide
gcaagcaucguaccuggcg

SEQ ID NO: 327799 - RNA, 19 nt, Artificial Sequence
  Description of Artificial Sequence: Synthetic oligonucleotide
uggacucaaugucccauac

SEQ ID NO: 327800 - RNA, 19 nt, Artificial Sequence
  Description of Artificial Sequence: Synthetic oligonucleotide
gauaaacgugcacccguac

SEQ ID NO: 327801 - RNA, 19 nt, Artificial Sequence
  Description of Artificial Sequence: Synthetic oligonucleotide
aggcgaauaggcaagggug

SEQ ID NO: 327802 - RNA, 19 nt, Artificial Sequence
  Description of Artificial Sequence: Synthetic oligonucleotide
guuacacugcccugguggc

SEQ ID NO: 327803 - RNA, 19 nt, Artificial Sequence
  Description of Artificial Sequence: Synthetic oligonucleotide
ugguugaggccugugagcu

SEQ ID NO: 327804 - RNA, 19 nt, Artificial Sequence
  Description of Artificial Sequence: Synthetic oligonucleotide
gacuucaaggcgcaucguc

SEQ ID NO: 327805 - RNA, 19 nt, Artificial Sequence
  Description of Artificial Sequence: Synthetic oligonucleotide
aguccgaaugucccauauc

SEQ ID NO: 327806 - RNA, 19 nt, Artificial Sequence
  Description of Artificial Sequence: Synthetic oligonucleotide
augcaucucauggaagcgg

SEQ ID NO: 327807 - RNA, 19 nt, Artificial Sequence
  Description of Artificial Sequence: Synthetic oligonucleotide
uauccacggccccugagaa

SEQ ID NO: 327808 - RNA, 19 nt, Artificial Sequence
  Description of Artificial Sequence: Synthetic oligonucleotide
caacuuuagcucagugccc

SEQ ID NO: 327809 - RNA, 19 nt, Artificial Sequence
  Description of Artificial Sequence: Synthetic oligonucleotide
ugacugccagggcauauac

SEQ ID NO: 327810 - RNA, 19 nt, Artificial Sequence
  Description of Artificial Sequence: Synthetic oligonucleotide
cuccgaucugcucagcuac

SEQ ID NO: 327811 - RNA, 19 nt, Artificial Sequence
  Description of Artificial Sequence: Synthetic oligonucleotide
caugcaucucauggaagcg

SEQ ID NO: 327812 - RNA, 19 nt, Artificial Sequence
  Description of Artificial Sequence: Synthetic oligonucleotide
uuauuggggcagcgcacag

SEQ ID NO: 327813 - RNA, 19 nt, Artificial Sequence
  Description of Artificial Sequence: Synthetic oligonucleotide
uaagagccacuguacagau

SEQ ID NO: 327814 - RNA, 19 nt, Artificial Sequence
  Description of Artificial Sequence: Synthetic oligonucleotide
gaucccucaccaagcauag

SEQ ID NO: 327815 - RNA, 19 nt, Artificial Sequence
  Description of Artificial Sequence: Synthetic oligonucleotide
caagcauagggcagagaug

SEQ ID NO: 327816 - RNA, 19 nt, Artificial Sequence
  Description of Artificial Sequence: Synthetic oligonucleotide
uggagcgcaggaaagcgau

SEQ ID NO: 327817 - RNA, 19 nt, Artificial Sequence
  Description of Artificial Sequence: Synthetic oligonucleotide
guaagagccacuguacaga

SEQ ID NO: 327818 - RNA, 19 nt, Artificial Sequence
  Description of Artificial Sequence: Synthetic oligonucleotide
gagcggacagagauggcgg

SEQ ID NO: 327819 - RNA, 19 nt, Artificial Sequence
  Description of Artificial Sequence: Synthetic oligonucleotide
guauagcuugcaccccugg

SEQ ID NO: 327820 - RNA, 19 nt, Artificial Sequence
  Description of Artificial Sequence: Synthetic oligonucleotide
ggcaacacaguuuuacuga

SEQ ID NO: 327821 - RNA, 19 nt, Artificial Sequence
  Description of Artificial Sequence: Synthetic oligonucleotide
ugagcggcgaggaguguug

SEQ ID NO: 327822 - RNA, 19 nt, Artificial Sequence
  Description of Artificial Sequence: Synthetic oligonucleotide
auguuaugggaggauacca

SEQ ID NO: 327823 - RNA, 19 nt, Artificial Sequence
  Description of Artificial Sequence: Synthetic oligonucleotide
caacgggagccaaagcuug

SEQ ID NO: 327824 - RNA, 19 nt, Artificial Sequence
  Description of Artificial Sequence: Synthetic oligonucleotide
cagacaauguggugauuug

SEQ ID NO: 327825 - RNA, 19 nt, Artificial Sequence
  Description of Artificial Sequence: Synthetic oligonucleotide
guguugauaggaggcaugc

SEQ ID NO: 327826 - RNA, 19 nt, Artificial Sequence
  Description of Artificial Sequence: Synthetic oligonucleotide
guaaaagacccacggucca

SEQ ID NO: 327827 - RNA, 19 nt, Artificial Sequence
  Description of Artificial Sequence: Synthetic oligonucleotide
gaaagcgaucuccuggucu

SEQ ID NO: 327828 - RNA, 19 nt, Artificial Sequence
  Description of Artificial Sequence: Synthetic oligonucleotide
uguggugauuugucacagc

SEQ ID NO: 327829 - RNA, 19 nt, Artificial Sequence
  Description of Artificial Sequence: Synthetic oligonucleotide
aagcgugcauugaugugag

SEQ ID NO: 327830 - RNA, 19 nt, Artificial Sequence
  Description of Artificial Sequence: Synthetic oligonucleotide
gagcggggccuaaagaaag

SEQ ID NO: 327831 - RNA, 19 nt, Artificial Sequence
  Description of Artificial Sequence: Synthetic oligonucleotide
aggaagguguccugcgaug

SEQ ID NO: 327832 - RNA, 19 nt, Artificial Sequence
  Description of Artificial Sequence: Synthetic oligonucleotide
ggauacccauguucaagcg

SEQ ID NO: 327833 - RNA, 19 nt, Artificial Sequence
  Description of Artificial Sequence: Synthetic oligonucleotide
ucaccaagcauagggcaga

SEQ ID NO: 327834 - RNA, 19 nt, Artificial Sequence
  Description of Artificial Sequence: Synthetic oligonucleotide
gugguugaggccugugagc

SEQ ID NO: 327835 - RNA, 19 nt, Artificial Sequence
  Description of Artificial Sequence: Synthetic oligonucleotide
gaauagacacagagacacc

SEQ ID NO: 327836 - RNA, 19 nt, Artificial Sequence
  Description of Artificial Sequence: Synthetic oligonucleotide
ggaugcaauccagaguccg

SEQ ID NO: 327837 - RNA, 19 nt, Artificial Sequence
  Description of Artificial Sequence: Synthetic oligonucleotide
uucaaggcgcaucgucuac

SEQ ID NO: 327838 - RNA, 19 nt, Artificial Sequence
  Description of Artificial Sequence: Synthetic oligonucleotide
aagaucccucaccaagcau

SEQ ID NO: 327839 - RNA, 19 nt, Artificial Sequence
  Description of Artificial Sequence: Synthetic oligonucleotide
ucccgaggcgaauaggcaa

SEQ ID NO: 327840 - RNA, 19 nt, Artificial Sequence
  Description of Artificial Sequence: Synthetic oligonucleotide
cugagggaccgaucguagg

SEQ ID NO: 327841 - RNA, 19 nt, Artificial Sequence
  Description of Artificial Sequence: Synthetic oligonucleotide
ccgaaugucccauaucuug

SEQ ID NO: 327842 - RNA, 19 nt, Artificial Sequence
  Description of Artificial Sequence: Synthetic oligonucleotide
agaugacacugccuagcug

SEQ ID NO: 327843 - RNA, 19 nt, Artificial Sequence
  Description of Artificial Sequence: Synthetic oligonucleotide
aagacccacgguccaucug

SEQ ID NO: 327844 - RNA, 19 nt, Artificial Sequence
  Description of Artificial Sequence: Synthetic oligonucleotide
agugaucacaggguccuug

SEQ ID NO: 327845 - RNA, 19 nt, Artificial Sequence
  Description of Artificial Sequence: Synthetic oligonucleotide
ugaugugcucgcauucuuu

SEQ ID NO: 327846 - RNA, 19 nt, Artificial Sequence
  Description of Artificial Sequence: Synthetic oligonucleotide
caaggcgcaucgucuacag

SEQ ID NO: 327847 - RNA, 19 nt, Artificial Sequence
  Description of Artificial Sequence: Synthetic oligonucleotide
agucugagcggcgaggagu

SEQ ID NO: 327848 - RNA, 19 nt, Artificial Sequence
  Description of Artificial Sequence: Synthetic oligonucleotide
uuacacugcccugguggcg

SEQ ID NO: 327849 - RNA, 19 nt, Artificial Sequence
  Description of Artificial Sequence: Synthetic oligonucleotide
aucgucuacagaacgugug

SEQ ID NO: 327850 - RNA, 19 nt, Artificial Sequence
  Description of Artificial Sequence: Synthetic oligonucleotide
ucgugggcccgaauggugu

SEQ ID NO: 327851 - RNA, 19 nt, Artificial Sequence
  Description of Artificial Sequence: Synthetic oligonucleotide
ggugaguaaaagacccacg

SEQ ID NO: 327852 - RNA, 19 nt, Artificial Sequence
  Description of Artificial Sequence: Synthetic oligonucleotide
aacgggagccaaagcuugg

SEQ ID NO: 327853 - RNA, 19 nt, Artificial Sequence
  Description of Artificial Sequence: Synthetic oligonucleotide
guagggagcggacagagau

SEQ ID NO: 327854 - RNA, 19 nt, Artificial Sequence
  Description of Artificial Sequence: Synthetic oligonucleotide
gacaauguaugaagagcuc

SEQ ID NO: 327855 - RNA, 19 nt, Artificial Sequence
  Description of Artificial Sequence: Synthetic oligonucleotide
uccgcagacccacuguaua

SEQ ID NO: 327856 - RNA, 19 nt, Artificial Sequence
  Description of Artificial Sequence: Synthetic oligonucleotide
guucaagcgugcauugaug

SEQ ID NO: 327857 - RNA, 19 nt, Artificial Sequence
  Description of Artificial Sequence: Synthetic oligonucleotide
agcucagugcccacgaugu

SEQ ID NO: 327858 - RNA, 19 nt, Artificial Sequence
  Description of Artificial Sequence: Synthetic oligonucleotide
ccaaggauacccauguuca

SEQ ID NO: 327859 - RNA, 19 nt, Artificial Sequence
  Description of Artificial Sequence: Synthetic oligonucleotide
uugaugugcucgcauucuu

SEQ ID NO: 327860 - RNA, 19 nt, Artificial Sequence
  Description of Artificial Sequence: Synthetic oligonucleotide
gaguggggacacuugaugu

SEQ ID NO: 327861 - RNA, 19 nt, Artificial Sequence
  Description of Artificial Sequence: Synthetic oligonucleotide
guacuuagaguggggacac

SEQ ID NO: 327862 - RNA, 19 nt, Artificial Sequence
  Description of Artificial Sequence: Synthetic oligonucleotide
acccaacgggagccaaagc

SEQ ID NO: 327863 - RNA, 19 nt, Artificial Sequence
  Description of Artificial Sequence: Synthetic oligonucleotide
gccgacaauguaugaagag

SEQ ID NO: 327864 - RNA, 19 nt, Artificial Sequence
  Description of Artificial Sequence: Synthetic oligonucleotide
caggcuuuccagugccugc

SEQ ID NO: 327865 - RNA, 19 nt, Artificial Sequence
  Description of Artificial Sequence: Synthetic oligonucleotide
agaucccucaccaagcaua

SEQ ID NO: 327866 - RNA, 19 nt, Artificial Sequence
  Description of Artificial Sequence: Synthetic oligonucleotide
uauguaggaccagccugcc

SEQ ID NO: 327867 - RNA, 19 nt, Artificial Sequence
  Description of Artificial Sequence: Synthetic oligonucleotide
ccaaaugugucucauaugu

SEQ ID NO: 327868 - RNA, 19 nt, Artificial Sequence
  Description of Artificial Sequence: Synthetic oligonucleotide
ucaaggcgcaucgucuaca

SEQ ID NO: 327869 - RNA, 19 nt, Artificial Sequence
  Description of Artificial Sequence: Synthetic oligonucleotide
cugcgauguuguuuguaug

SEQ ID NO: 327870 - RNA, 19 nt, Artificial Sequence
  Description of Artificial Sequence: Synthetic oligonucleotide
ucuccgaucugcucagcua

SEQ ID NO: 327871 - RNA, 19 nt, Artificial Sequence
  Description of Artificial Sequence: Synthetic oligonucleotide
uuggacucaaugucccaua

SEQ ID NO: 327872 - RNA, 19 nt, Artificial Sequence
  Description of Artificial Sequence: Synthetic oligonucleotide
ccgacaauguaugaagagc

SEQ ID NO: 327873 - RNA, 19 nt, Artificial Sequence
  Description of Artificial Sequence: Synthetic oligonucleotide
gguacaugugucccacacc

SEQ ID NO: 327874 - RNA, 19 nt, Artificial Sequence
  Description of Artificial Sequence: Synthetic oligonucleotide
cacccguacuuagaguggg

SEQ ID NO: 327875 - RNA, 19 nt, Artificial Sequence
  Description of Artificial Sequence: Synthetic oligonucleotide
augugcucgcauucuuuca

SEQ ID NO: 327876 - RNA, 19 nt, Artificial Sequence
  Description of Artificial Sequence: Synthetic oligonucleotide
ucccuccggaacuccauga

SEQ ID NO: 327877 - RNA, 19 nt, Artificial Sequence
  Description of Artificial Sequence: Synthetic oligonucleotide
gaggcgaauaggcaagggu

SEQ ID NO: 327878 - RNA, 19 nt, Artificial Sequence
  Description of Artificial Sequence: Synthetic oligonucleotide
gaugcaauccagaguccga

SEQ ID NO: 327879 - RNA, 19 nt, Artificial Sequence
  Description of Artificial Sequence: Synthetic oligonucleotide
agggaccgaucguaggaug

SEQ ID NO: 327880 - RNA, 19 nt, Artificial Sequence
  Description of Artificial Sequence: Synthetic oligonucleotide
uccgaaugucccauaucuu

SEQ ID NO: 327881 - RNA, 19 nt, Artificial Sequence
  Description of Artificial Sequence: Synthetic oligonucleotide
uguugacggucggaaaggu

SEQ ID NO: 327882 - RNA, 19 nt, Artificial Sequence
  Description of Artificial Sequence: Synthetic oligonucleotide
guuauuggggcagcgcaca

SEQ ID NO: 327883 - RNA, 19 nt, Artificial Sequence
  Description of Artificial Sequence: Synthetic oligonucleotide
auuguccacaggacacuuc

SEQ ID NO: 327884 - RNA, 19 nt, Artificial Sequence
  Description of Artificial Sequence: Synthetic oligonucleotide
ugggguuauuggggcagcg

SEQ ID NO: 327885 - RNA, 19 nt, Artificial Sequence
  Description of Artificial Sequence: Synthetic oligonucleotide
aaacgugcacccguacuua

SEQ ID NO: 327886 - RNA, 19 nt, Artificial Sequence
  Description of Artificial Sequence: Synthetic oligonucleotide
cuauccacggccccugaga

SEQ ID NO: 327887 - RNA, 19 nt, Artificial Sequence
  Description of Artificial Sequence: Synthetic oligonucleotide
uaaaagacccacgguccau

SEQ ID NO: 327888 - RNA, 19 nt, Artificial Sequence
  Description of Artificial Sequence: Synthetic oligonucleotide
gcuggcaacacaguuuuac

SEQ ID NO: 327889 - RNA, 19 nt, Artificial Sequence
  Description of Artificial Sequence: Synthetic oligonucleotide
cugagaagagccggccccg

SEQ ID NO: 327890 - RNA, 19 nt, Artificial Sequence
  Description of Artificial Sequence: Synthetic oligonucleotide
ggcauuguccacaggacac

SEQ ID NO: 327891 - RNA, 19 nt, Artificial Sequence
  Description of Artificial Sequence: Synthetic oligonucleotide
augguguugacggucggaa

SEQ ID NO: 327892 - RNA, 19 nt, Artificial Sequence
  Description of Artificial Sequence: Synthetic oligonucleotide
ggccucuagauucaucuuc

SEQ ID NO: 327893 - RNA, 19 nt, Artificial Sequence
  Description of Artificial Sequence: Synthetic oligonucleotide
ggguuauuggggcagcgca

SEQ ID NO: 327894 - RNA, 19 nt, Artificial Sequence
  Description of Artificial Sequence: Synthetic oligonucleotide
caaaccuugauggccuuca

SEQ ID NO: 327895 - RNA, 19 nt, Artificial Sequence
  Description of Artificial Sequence: Synthetic oligonucleotide
ugcaauccagaguccgaau

SEQ ID NO: 327896 - RNA, 19 nt, Artificial Sequence
  Description of Artificial Sequence: Synthetic oligonucleotide
ucaaagcggcauguuucca

SEQ ID NO: 327897 - RNA, 19 nt, Artificial Sequence
  Description of Artificial Sequence: Synthetic oligonucleotide
aaggcgcaucgucuacaga

SEQ ID NO: 327898 - RNA, 19 nt, Artificial Sequence
  Description of Artificial Sequence: Synthetic oligonucleotide
acaaaacucuguggaguga

SEQ ID NO: 327899 - RNA, 19 nt, Artificial Sequence
  Description of Artificial Sequence: Synthetic oligonucleotide
uccgaucugcucagcuacu

SEQ ID NO: 327900 - RNA, 19 nt, Artificial Sequence
  Description of Artificial Sequence: Synthetic oligonucleotide
cauggaagcggucaucagu

SEQ ID NO: 327901 - RNA, 19 nt, Artificial Sequence
  Description of Artificial Sequence: Synthetic oligonucleotide
gcgcaucgucuacagaacg

SEQ ID NO: 327902 - RNA, 19 nt, Artificial Sequence
  Description of Artificial Sequence: Synthetic oligonucleotide
agcauguuaugggaggaua

SEQ ID NO: 327903 - RNA, 19 nt, Artificial Sequence
  Description of Artificial Sequence: Synthetic oligonucleotide
uaggugccacagacaaugu

SEQ ID NO: 327904 - RNA, 19 nt, Artificial Sequence
  Description of Artificial Sequence: Synthetic oligonucleotide
ccgaaugguguuuaccuuc

SEQ ID NO: 327905 - RNA, 19 nt, Artificial Sequence
  Description of Artificial Sequence: Synthetic oligonucleotide
uaccaacgguuccggcucc

SEQ ID NO: 327906 - RNA, 19 nt, Artificial Sequence
  Description of Artificial Sequence: Synthetic oligonucleotide
aggucacccauagaauaga

SEQ ID NO: 327907 - RNA, 19 nt, Artificial Sequence
  Description of Artificial Sequence: Synthetic oligonucleotide
guguccugauucccgauaa

SEQ ID NO: 327908 - RNA, 19 nt, Artificial Sequence
  Description of Artificial Sequence: Synthetic oligonucleotide
cguaggaugcacugaagac

SEQ ID NO: 327909 - RNA, 19 nt, Artificial Sequence
  Description of Artificial Sequence: Synthetic oligonucleotide
uggaagcggucaucagucu

SEQ ID NO: 327910 - RNA, 19 nt, Artificial Sequence
  Description of Artificial Sequence: Synthetic oligonucleotide
gucugagcggcgaggagug

SEQ ID NO: 327911 - RNA, 19 nt, Artificial Sequence
  Description of Artificial Sequence: Synthetic oligonucleotide
gaugguguugacggucgga

SEQ ID NO: 327912 - RNA, 19 nt, Artificial Sequence
  Description of Artificial Sequence: Synthetic oligonucleotide
agcggacagagauggcgga

SEQ ID NO: 327913 - RNA, 19 nt, Artificial Sequence
  Description of Artificial Sequence: Synthetic oligonucleotide
caugccgacaauguaugaa

SEQ ID NO: 327914 - RNA, 19 nt, Artificial Sequence
  Description of Artificial Sequence: Synthetic oligonucleotide
aagcggucaucagucugcu

SEQ ID NO: 327915 - RNA, 19 nt, Artificial Sequence
  Description of Artificial Sequence: Synthetic oligonucleotide
aggagguccagugccauua

SEQ ID NO: 327916 - RNA, 19 nt, Artificial Sequence
  Description of Artificial Sequence: Synthetic oligonucleotide
agcgccagcacaauaccau

SEQ ID NO: 327917 - RNA, 19 nt, Artificial Sequence
  Description of Artificial Sequence: Synthetic oligonucleotide
auaccaucauggcccucca

SEQ ID NO: 327918 - RNA, 19 nt, Artificial Sequence
  Description of Artificial Sequence: Synthetic oligonucleotide
cuguuugagccugucuauc

SEQ ID NO: 327919 - RNA, 19 nt, Artificial Sequence
  Description of Artificial Sequence: Synthetic oligonucleotide
guuagcauguccaaaccuu

SEQ ID NO: 327920 - RNA, 19 nt, Artificial Sequence
  Description of Artificial Sequence: Synthetic oligonucleotide
ggcacuuguaagugguaca

SEQ ID NO: 327921 - RNA, 19 nt, Artificial Sequence
  Description of Artificial Sequence: Synthetic oligonucleotide
ccuguagucacagcuacuc

SEQ ID NO: 327922 - RNA, 19 nt, Artificial Sequence
  Description of Artificial Sequence: Synthetic oligonucleotide
uuggcacuuguaaguggua

SEQ ID NO: 327923 - RNA, 19 nt, Artificial Sequence
  Description of Artificial Sequence: Synthetic oligonucleotide
aaguuaagagcggggccua

SEQ ID NO: 327924 - RNA, 19 nt, Artificial Sequence
  Description of Artificial Sequence: Synthetic oligonucleotide
gucacccauagaauagaca

SEQ ID NO: 327925 - RNA, 19 nt, Artificial Sequence
  Description of Artificial Sequence: Synthetic oligonucleotide
guacuauccacggccccug

SEQ ID NO: 327926 - RNA, 19 nt, Artificial Sequence
  Description of Artificial Sequence: Synthetic oligonucleotide
cacuuguaagugguacaug

SEQ ID NO: 327927 - RNA, 19 nt, Artificial Sequence
  Description of Artificial Sequence: Synthetic oligonucleotide
gacacuugaugugcucgca

SEQ ID NO: 327928 - RNA, 19 nt, Artificial Sequence
  Description of Artificial Sequence: Synthetic oligonucleotide
aucguaggaugcacugaag

SEQ ID NO: 327929 - RNA, 19 nt, Artificial Sequence
  Description of Artificial Sequence: Synthetic oligonucleotide
gcaggucacccauagaaua

SEQ ID NO: 327930 - RNA, 19 nt, Artificial Sequence
  Description of Artificial Sequence: Synthetic oligonucleotide
auggugcaguccgcagacc

SEQ ID NO: 327931 - RNA, 19 nt, Artificial Sequence
  Description of Artificial Sequence: Synthetic oligonucleotide
gacccacgguccaucuggg

SEQ ID NO: 327932 - RNA, 19 nt, Artificial Sequence
  Description of Artificial Sequence: Synthetic oligonucleotide
gugcaguuacacugcccug

SEQ ID NO: 327933 - RNA, 19 nt, Artificial Sequence
  Description of Artificial Sequence: Synthetic oligonucleotide
ggcugcucggcaaauacca

SEQ ID NO: 327934 - RNA, 19 nt, Artificial Sequence
  Description of Artificial Sequence: Synthetic oligonucleotide
cacugccuagcuguuugag

SEQ ID NO: 327935 - RNA, 19 nt, Artificial Sequence
  Description of Artificial Sequence: Synthetic oligonucleotide
ggcaaccaugccgacaaug

SEQ ID NO: 327936 - RNA, 19 nt, Artificial Sequence
  Description of Artificial Sequence: Synthetic oligonucleotide
cuucaaggcgcaucgucua

SEQ ID NO: 327937 - RNA, 19 nt, Artificial Sequence
  Description of Artificial Sequence: Synthetic oligonucleotide
auguucaagcgugcauuga

SEQ ID NO: 327938 - RNA, 19 nt, Artificial Sequence
  Description of Artificial Sequence: Synthetic oligonucleotide
auguaggaccagccugccu

SEQ ID NO: 327939 - RNA, 19 nt, Artificial Sequence
  Description of Artificial Sequence: Synthetic oligonucleotide
gaccgaucguaggaugcac

SEQ ID NO: 327940 - RNA, 19 nt, Artificial Sequence
  Description of Artificial Sequence: Synthetic oligonucleotide
ccugauucccgauaaacgu

SEQ ID NO: 327941 - RNA, 19 nt, Artificial Sequence
  Description of Artificial Sequence: Synthetic oligonucleotide
aaaugacugccagggcaua

SEQ ID NO: 327942 - RNA, 19 nt, Artificial Sequence
  Description of Artificial Sequence: Synthetic oligonucleotide
agcauagggcagagaugac

SEQ ID NO: 327943 - RNA, 19 nt, Artificial Sequence
  Description of Artificial Sequence: Synthetic oligonucleotide
agcaggucacccauagaau

SEQ ID NO: 327944 - RNA, 19 nt, Artificial Sequence
  Description of Artificial Sequence: Synthetic oligonucleotide
gcucgcauucuuucaggug

SEQ ID NO: 327945 - RNA, 19 nt, Artificial Sequence
  Description of Artificial Sequence: Synthetic oligonucleotide
cucgugguccuuccgggca

SEQ ID NO: 327946 - RNA, 19 nt, Artificial Sequence
  Description of Artificial Sequence: Synthetic oligonucleotide
ugcccacgaugucccaaac

SEQ ID NO: 327947 - RNA, 19 nt, Artificial Sequence
  Description of Artificial Sequence: Synthetic oligonucleotide
uuccgggcacuaagcuuga

SEQ ID NO: 327948 - RNA, 19 nt, Artificial Sequence
  Description of Artificial Sequence: Synthetic oligonucleotide
caaggauacccauguucaa

SEQ ID NO: 327949 - RNA, 19 nt, Artificial Sequence
  Description of Artificial Sequence: Synthetic oligonucleotide
ccgaucguaggaugcacug

SEQ ID NO: 327950 - RNA, 19 nt, Artificial Sequence
  Description of Artificial Sequence: Synthetic oligonucleotide
gauucccgauaaacgugca

SEQ ID NO: 327951 - RNA, 19 nt, Artificial Sequence
  Description of Artificial Sequence: Synthetic oligonucleotide
cuugaucgucuugucagaa

SEQ ID NO: 327952 - RNA, 19 nt, Artificial Sequence
  Description of Artificial Sequence: Synthetic oligonucleotide
guccuuccgggcacuaagc

SEQ ID NO: 327953 - RNA, 19 nt, Artificial Sequence
  Description of Artificial Sequence: Synthetic oligonucleotide
cgugcacccguacuuagag

SEQ ID NO: 327954 - RNA, 19 nt, Artificial Sequence
  Description of Artificial Sequence: Synthetic oligonucleotide
gggaccgaucguaggaugc

SEQ ID NO: 327955 - RNA, 19 nt, Artificial Sequence
  Description of Artificial Sequence: Synthetic oligonucleotide
gguuauuggggcagcgcac

SEQ ID NO: 327956 - RNA, 19 nt, Artificial Sequence
  Description of Artificial Sequence: Synthetic oligonucleotide
accgaucguaggaugcacu

SEQ ID NO: 327957 - RNA, 19 nt, Artificial Sequence
  Description of Artificial Sequence: Synthetic oligonucleotide
cuguauagcuugcaccccu

SEQ ID NO: 327958 - RNA, 19 nt, Artificial Sequence
  Description of Artificial Sequence: Synthetic oligonucleotide
gcgauguuguuuguaugug

SEQ ID NO: 327959 - RNA, 19 nt, Artificial Sequence
  Description of Artificial Sequence: Synthetic oligonucleotide
cccgaggcgaauaggcaag

SEQ ID NO: 327960 - RNA, 19 nt, Artificial Sequence
  Description of Artificial Sequence: Synthetic oligonucleotide
ccaagcauagggcagagau

SEQ ID NO: 327961 - RNA, 19 nt, Artificial Sequence
  Description of Artificial Sequence: Synthetic oligonucleotide
ggucuuucugggccagcgc

SEQ ID NO: 327962 - RNA, 19 nt, Artificial Sequence
  Description of Artificial Sequence: Synthetic oligonucleotide
ccgcagacccacuguauag

SEQ ID NO: 327963 - RNA, 19 nt, Artificial Sequence
  Description of Artificial Sequence: Synthetic oligonucleotide
gaguccgaaugucccauau

SEQ ID NO: 327964 - RNA, 19 nt, Artificial Sequence
  Description of Artificial Sequence: Synthetic oligonucleotide
gagcgccagcacaauacca

SEQ ID NO: 327965 - RNA, 19 nt, Artificial Sequence
  Description of Artificial Sequence: Synthetic oligonucleotide
ccguacuuagaguggggac

SEQ ID NO: 327966 - RNA, 19 nt, Artificial Sequence
  Description of Artificial Sequence: Synthetic oligonucleotide
acccguacuuagagugggg

SEQ ID NO: 327967 - RNA, 19 nt, Artificial Sequence
  Description of Artificial Sequence: Synthetic oligonucleotide
cucggaguguagggagcgg

SEQ ID NO: 327968 - RNA, 19 nt, Artificial Sequence
  Description of Artificial Sequence: Synthetic oligonucleotide
uggcccguuaggguccgca

SEQ ID NO: 327969 - RNA, 19 nt, Artificial Sequence
  Description of Artificial Sequence: Synthetic oligonucleotide
caguuacacugcccuggug

SEQ ID NO: 327970 - RNA, 19 nt, Artificial Sequence
  Description of Artificial Sequence: Synthetic oligonucleotide
ugacuucaaggcgcaucgu

SEQ ID NO: 327971 - RNA, 19 nt, Artificial Sequence
  Description of Artificial Sequence: Synthetic oligonucleotide
aucccgaggcgaauaggca

SEQ ID NO: 327972 - RNA, 19 nt, Artificial Sequence
  Description of Artificial Sequence: Synthetic oligonucleotide
ggucacccauagaauagac

SEQ ID NO: 327973 - RNA, 19 nt, Artificial Sequence
  Description of Artificial Sequence: Synthetic oligonucleotide
caucgucuacagaacgugu

SEQ ID NO: 327974 - RNA, 19 nt, Artificial Sequence
  Description of Artificial Sequence: Synthetic oligonucleotide
cccacgguccaucuggguc

SEQ ID NO: 327975 - RNA, 19 nt, Artificial Sequence
  Description of Artificial Sequence: Synthetic oligonucleotide
acguggagcgcagggacau

SEQ ID NO: 327976 - RNA, 19 nt, Artificial Sequence
  Description of Artificial Sequence: Synthetic oligonucleotide
acgggagccaaagcuuggu

SEQ ID NO: 327977 - RNA, 19 nt, Artificial Sequence
  Description of Artificial Sequence: Synthetic oligonucleotide
gcacccguacuuagagugg

SEQ ID NO: 327978 - RNA, 19 nt, Artificial Sequence
  Description of Artificial Sequence: Synthetic oligonucleotide
guuaagagcggggccuaaa

SEQ ID NO: 327979 - RNA, 19 nt, Artificial Sequence
  Description of Artificial Sequence: Synthetic oligonucleotide
acccugagggaccgaucgu

SEQ ID NO: 327980 - RNA, 19 nt, Artificial Sequence
  Description of Artificial Sequence: Synthetic oligonucleotide
gaacgugugcccacaugua

SEQ ID NO: 327981 - RNA, 19 nt, Artificial Sequence
  Description of Artificial Sequence: Synthetic oligonucleotide
augacugccagggcauaua

SEQ ID NO: 327982 - RNA, 19 nt, Artificial Sequence
  Description of Artificial Sequence: Synthetic oligonucleotide
ccucuagauucaucuucag

SEQ ID NO: 327983 - RNA, 19 nt, Artificial Sequence
  Description of Artificial Sequence: Synthetic oligonucleotide
gcccacgaugucccaaacc

SEQ ID NO: 327984 - RNA, 19 nt, Artificial Sequence
  Description of Artificial Sequence: Synthetic oligonucleotide
gaguguugauaggaggcau

SEQ ID NO: 327985 - RNA, 19 nt, Artificial Sequence
  Description of Artificial Sequence: Synthetic oligonucleotide
uacuuagaguggggacacu

SEQ ID NO: 327986 - RNA, 19 nt, Artificial Sequence
  Description of Artificial Sequence: Synthetic oligonucleotide
aggcagcgagaacguggag

SEQ ID NO: 327987 - RNA, 19 nt, Artificial Sequence
  Description of Artificial Sequence: Synthetic oligonucleotide
gcccguuaggguccgcacc

SEQ ID NO: 327988 - RNA, 19 nt, Artificial Sequence
  Description of Artificial Sequence: Synthetic oligonucleotide
cccgauaaacgugcacccg

SEQ ID NO: 327989 - RNA, 19 nt, Artificial Sequence
  Description of Artificial Sequence: Synthetic oligonucleotide
gcagcgcacaggccuguag

SEQ ID NO: 327990 - RNA, 19 nt, Artificial Sequence
  Description of Artificial Sequence: Synthetic oligonucleotide
ccgggcacuaagcuugaug

SEQ ID NO: 327991 - RNA, 19 nt, Artificial Sequence
  Description of Artificial Sequence: Synthetic oligonucleotide
ggcccgaaugguguuuacc

SEQ ID NO: 327992 - RNA, 19 nt, Artificial Sequence
  Description of Artificial Sequence: Synthetic oligonucleotide
ugggcccgaaugguguuua

SEQ ID NO: 327993 - RNA, 19 nt, Artificial Sequence
  Description of Artificial Sequence: Synthetic oligonucleotide
ugacacugccuagcuguuu

SEQ ID NO: 327994 - RNA, 19 nt, Artificial Sequence
  Description of Artificial Sequence: Synthetic oligonucleotide
gcuacucucgugguccuuc

SEQ ID NO: 327995 - RNA, 19 nt, Artificial Sequence
  Description of Artificial Sequence: Synthetic oligonucleotide
ggaguguagggagcggaca

SEQ ID NO: 327996 - RNA, 19 nt, Artificial Sequence
  Description of Artificial Sequence: Synthetic oligonucleotide
gcauauacugugcccacau

SEQ ID NO: 327997 - RNA, 19 nt, Artificial Sequence
  Description of Artificial Sequence: Synthetic oligonucleotide
gcaaccaugccgacaaugu

SEQ ID NO: 327998 - RNA, 19 nt, Artificial Sequence
  Description of Artificial Sequence: Synthetic oligonucleotide
cacggccccugagaagagc

SEQ ID NO: 327999 - RNA, 19 nt, Artificial Sequence
  Description of Artificial Sequence: Synthetic oligonucleotide
gucauucaacauggaugca

SEQ ID NO: 328000 - RNA, 19 nt, Artificial Sequence
  Description of Artificial Sequence: Synthetic oligonucleotide
ugcagagcgccagcacaau

SEQ ID NO: 328001 - RNA, 19 nt, Artificial Sequence
  Description of Artificial Sequence: Synthetic oligonucleotide
aguuaagagcggggccuaa

SEQ ID NO: 328002 - RNA, 19 nt, Artificial Sequence
  Description of Artificial Sequence: Synthetic oligonucleotide
ggcgcaucgucuacagaac

SEQ ID NO: 328003 - RNA, 19 nt, Artificial Sequence
  Description of Artificial Sequence: Synthetic oligonucleotide
cgcacccagugguugaggc

SEQ ID NO: 328004 - RNA, 19 nt, Artificial Sequence
  Description of Artificial Sequence: Synthetic oligonucleotide
agcggcgaggaguguugau

SEQ ID NO: 328005 - RNA, 19 nt, Artificial Sequence
  Description of Artificial Sequence: Synthetic oligonucleotide
cccaacgggagccaaagcu

SEQ ID NO: 328006 - RNA, 19 nt, Artificial Sequence
  Description of Artificial Sequence: Synthetic oligonucleotide
ggccgggcaagcaucguac

SEQ ID NO: 328007 - RNA, 19 nt, Artificial Sequence
  Description of Artificial Sequence: Synthetic oligonucleotide
aagcgaucuccuggucuuu

SEQ ID NO: 328008 - RNA, 19 nt, Artificial Sequence
  Description of Artificial Sequence: Synthetic oligonucleotide
acgugcacccguacuuaga

SEQ ID NO: 328009 - RNA, 19 nt, Artificial Sequence
  Description of Artificial Sequence: Synthetic oligonucleotide
ggugcuagaggaggaaggu

SEQ ID NO: 328010 - RNA, 19 nt, Artificial Sequence
  Description of Artificial Sequence: Synthetic oligonucleotide
guugacggucggaaaggua

SEQ ID NO: 328011 - RNA, 19 nt, Artificial Sequence
  Description of Artificial Sequence: Synthetic oligonucleotide
aggguugucgugggcccga

SEQ ID NO: 328012 - RNA, 19 nt, Artificial Sequence
  Description of Artificial Sequence: Synthetic oligonucleotide
gcuagaggaggaagguguc

SEQ ID NO: 328013 - RNA, 19 nt, Artificial Sequence
  Description of Artificial Sequence: Synthetic oligonucleotide
cacuugaugugcucgcauu

SEQ ID NO: 328014 - RNA, 19 nt, Artificial Sequence
  Description of Artificial Sequence: Synthetic oligonucleotide
ugguccuuccgggcacuaa

SEQ ID NO: 328015 - RNA, 19 nt, Artificial Sequence
  Description of Artificial Sequence: Synthetic oligonucleotide
gaccagccugccugacaga

SEQ ID NO: 328016 - RNA, 19 nt, Artificial Sequence
  Description of Artificial Sequence: Synthetic oligonucleotide
ggcauauacugugcccaca

SEQ ID NO: 328017 - RNA, 19 nt, Artificial Sequence
  Description of Artificial Sequence: Synthetic oligonucleotide
ccuugaucgucuugucaga

SEQ ID NO: 328018 - RNA, 19 nt, Artificial Sequence
  Description of Artificial Sequence: Synthetic oligonucleotide
gccgggcaagcaucguacc

SEQ ID NO: 328019 - RNA, 19 nt, Artificial Sequence
  Description of Artificial Sequence: Synthetic oligonucleotide
gcuguuugagccugucuau

SEQ ID NO: 328020 - RNA, 19 nt, Artificial Sequence
  Description of Artificial Sequence: Synthetic oligonucleotide
gcgccagcacaauaccauc

SEQ ID NO: 328021 - RNA, 19 nt, Artificial Sequence
  Description of Artificial Sequence: Synthetic oligonucleotide
gucugguguugaaaugacu

SEQ ID NO: 328022 - RNA, 19 nt, Artificial Sequence
  Description of Artificial Sequence: Synthetic oligonucleotide
cugccagggcauauacugu

SEQ ID NO: 328023 - RNA, 19 nt, Artificial Sequence
  Description of Artificial Sequence: Synthetic oligonucleotide
guucgucauucaacaugga

SEQ ID NO: 328024 - RNA, 19 nt, Artificial Sequence
  Description of Artificial Sequence: Synthetic oligonucleotide
gcggacagagauggcggag

SEQ ID NO: 328025 - RNA, 19 nt, Artificial Sequence
  Description of Artificial Sequence: Synthetic oligonucleotide
gagggaccgaucguaggau

SEQ ID NO: 328026 - RNA, 19 nt, Artificial Sequence
  Description of Artificial Sequence: Synthetic oligonucleotide
ggaccgaucguaggaugca

SEQ ID NO: 328027 - RNA, 19 nt, Artificial Sequence
  Description of Artificial Sequence: Synthetic oligonucleotide
gcggagucugagcggcgag

SEQ ID NO: 328028 - RNA, 19 nt, Artificial Sequence
  Description of Artificial Sequence: Synthetic oligonucleotide
gugugcccacauguaguga

SEQ ID NO: 328029 - RNA, 19 nt, Artificial Sequence
  Description of Artificial Sequence: Synthetic oligonucleotide
cagcgagaacguggagcgc

SEQ ID NO: 328030 - RNA, 19 nt, Artificial Sequence
  Description of Artificial Sequence: Synthetic oligonucleotide
gguccgcaccugcucuuug

SEQ ID NO: 328031 - RNA, 19 nt, Artificial Sequence
  Description of Artificial Sequence: Synthetic oligonucleotide
ggcccguuaggguccgcac

SEQ ID NO: 328032 - RNA, 19 nt, Artificial Sequence
  Description of Artificial Sequence: Synthetic oligonucleotide
agacccaacgggagccaaa

SEQ ID NO: 328033 - RNA, 19 nt, Artificial Sequence
  Description of Artificial Sequence: Synthetic oligonucleotide
ccugcgauguuguuuguau

SEQ ID NO: 328034 - RNA, 19 nt, Artificial Sequence
  Description of Artificial Sequence: Synthetic oligonucleotide
gagcggcgaggaguguuga

SEQ ID NO: 328035 - RNA, 19 nt, Artificial Sequence
  Description of Artificial Sequence: Synthetic oligonucleotide
cauaggugccacagacaau

SEQ ID NO: 328036 - RNA, 19 nt, Artificial Sequence
  Description of Artificial Sequence: Synthetic oligonucleotide
gcacuuguaagugguacau

SEQ ID NO: 328037 - RNA, 19 nt, Artificial Sequence
  Description of Artificial Sequence: Synthetic oligonucleotide
gcgagaacguggagcgcag

SEQ ID NO: 328038 - RNA, 19 nt, Artificial Sequence
  Description of Artificial Sequence: Synthetic oligonucleotide
cggggccuaaagaaagauc

SEQ ID NO: 328039 - RNA, 19 nt, Artificial Sequence
  Description of Artificial Sequence: Synthetic oligonucleotide
ccgauaaacgugcacccgu

SEQ ID NO: 328040 - RNA, 19 nt, Artificial Sequence
  Description of Artificial Sequence: Synthetic oligonucleotide
gugcacccguacuuagagu

SEQ ID NO: 328041 - RNA, 19 nt, Artificial Sequence
  Description of Artificial Sequence: Synthetic oligonucleotide
ccgaggcgaauaggcaagg

SEQ ID NO: 328042 - RNA, 19 nt, Artificial Sequence
  Description of Artificial Sequence: Synthetic oligonucleotide
uagugaucacaggguccuu

SEQ ID NO: 328043 - RNA, 19 nt, Artificial Sequence
  Description of Artificial Sequence: Synthetic oligonucleotide
ccgcugaagagcauguuau

SEQ ID NO: 328044 - RNA, 19 nt, Artificial Sequence
  Description of Artificial Sequence: Synthetic oligonucleotide
gcaguuacacugcccuggu

SEQ ID NO: 328045 - RNA, 19 nt, Artificial Sequence
  Description of Artificial Sequence: Synthetic oligonucleotide
cccguacuuagagugggga

SEQ ID NO: 328046 - RNA, 19 nt, Artificial Sequence
  Description of Artificial Sequence: Synthetic oligonucleotide
cagaguccgaaugucccau

SEQ ID NO: 328047 - RNA, 19 nt, Artificial Sequence
  Description of Artificial Sequence: Synthetic oligonucleotide
caucccuccggaacuccau

SEQ ID NO: 328048 - RNA, 19 nt, Artificial Sequence
  Description of Artificial Sequence: Synthetic oligonucleotide
ggucuaccucaaagacacc

SEQ ID NO: 328049 - RNA, 19 nt, Artificial Sequence
  Description of Artificial Sequence: Synthetic oligonucleotide
ggcaagcaucguaccuggc

SEQ ID NO: 328050 - RNA, 19 nt, Artificial Sequence
  Description of Artificial Sequence: Synthetic oligonucleotide
cccgggagacagccagugc

SEQ ID NO: 328051 - RNA, 19 nt, Artificial Sequence
  Description of Artificial Sequence: Synthetic oligonucleotide
cagacccacuguauagcuu

SEQ ID NO: 328052 - RNA, 19 nt, Artificial Sequence
  Description of Artificial Sequence: Synthetic oligonucleotide
ggcggagucugagcggcga

SEQ ID NO: 328053 - RNA, 19 nt, Artificial Sequence
  Description of Artificial Sequence: Synthetic oligonucleotide
cgauaaacgugcacccgua

SEQ ID NO: 328054 - RNA, 19 nt, Artificial Sequence
  Description of Artificial Sequence: Synthetic oligonucleotide
gggcccgaaugguguuuac

SEQ ID NO: 328055 - RNA, 19 nt, Artificial Sequence
  Description of Artificial Sequence: Synthetic oligonucleotide
ggauaccagugugcacaca

SEQ ID NO: 328056 - RNA, 19 nt, Artificial Sequence
  Description of Artificial Sequence: Synthetic oligonucleotide
cccguuaggguccgcaccu

SEQ ID NO: 328057 - RNA, 19 nt, Artificial Sequence
  Description of Artificial Sequence: Synthetic oligonucleotide
cagcuacucucgugguccu

SEQ ID NO: 328058 - RNA, 19 nt, Artificial Sequence
  Description of Artificial Sequence: Synthetic oligonucleotide
cgagaacguggagcgcagg

SEQ ID NO: 328059 - RNA, 19 nt, Artificial Sequence
  Description of Artificial Sequence: Synthetic oligonucleotide
gggagcggacagagauggc

SEQ ID NO: 328060 - RNA, 19 nt, Artificial Sequence
  Description of Artificial Sequence: Synthetic oligonucleotide
agcuggcaacacaguuuua

SEQ ID NO: 328061 - RNA, 19 nt, Artificial Sequence
  Description of Artificial Sequence: Synthetic oligonucleotide
cgaucguaggaugcacuga

SEQ ID NO: 328062 - RNA, 19 nt, Artificial Sequence
  Description of Artificial Sequence: Synthetic oligonucleotide
ggagguccagugccauuau

SEQ ID NO: 328063 - RNA, 19 nt, Artificial Sequence
  Description of Artificial Sequence: Synthetic oligonucleotide
ccaacgguuccggcuccuc

SEQ ID NO: 328064 - RNA, 19 nt, Artificial Sequence
  Description of Artificial Sequence: Synthetic oligonucleotide
gggccucuagauucaucuu

SEQ ID NO: 328065 - RNA, 19 nt, Artificial Sequence
  Description of Artificial Sequence: Synthetic oligonucleotide
gcggggccuaaagaaagau

SEQ ID NO: 328066 - RNA, 19 nt, Artificial Sequence
  Description of Artificial Sequence: Synthetic oligonucleotide
cccgaaugguguuuaccuu

SEQ ID NO: 328067 - RNA, 19 nt, Artificial Sequence
  Description of Artificial Sequence: Synthetic oligonucleotide
ccguuaggguccgcaccug

SEQ ID NO: 328068 - RNA, 19 nt, Artificial Sequence
  Description of Artificial Sequence: Synthetic oligonucleotide
gugguccuuccgggcacua

SEQ ID NO: 328069 - RNA, 19 nt, Artificial Sequence
  Description of Artificial Sequence: Synthetic oligonucleotide
gugggcccgaaugguguuu

SEQ ID NO: 328070 - RNA, 19 nt, Artificial Sequence
  Description of Artificial Sequence: Synthetic oligonucleotide
cgaauaggcaagggugcua

SEQ ID NO: 328071 - RNA, 19 nt, Artificial Sequence
  Description of Artificial Sequence: Synthetic oligonucleotide
gcgucugugugcagaucau

SEQ ID NO: 328072 - RNA, 19 nt, Artificial Sequence
  Description of Artificial Sequence: Synthetic oligonucleotide
ggguccgcaccugcucuuu

SEQ ID NO: 328073 - RNA, 19 nt, Artificial Sequence
  Description of Artificial Sequence: Synthetic oligonucleotide
gcccucaaagcggcauguu

SEQ ID NO: 328074 - RNA, 19 nt, Artificial Sequence
  Description of Artificial Sequence: Synthetic oligonucleotide
cgugggcccgaaugguguu

SEQ ID NO: 328075 - RNA, 19 nt, Artificial Sequence
  Description of Artificial Sequence: Synthetic oligonucleotide
agaguauagacuuuauuac

SEQ ID NO: 328076 - RNA, 19 nt, Artificial Sequence
  Description of Artificial Sequence: Synthetic oligonucleotide
ugacauugauaacauaugg

SEQ ID NO: 328077 - RNA, 19 nt, Artificial Sequence
  Description of Artificial Sequence: Synthetic oligonucleotide
ucgguuaccauaaauacug

SEQ ID NO: 328078 - RNA, 19 nt, Artificial Sequence
  Description of Artificial Sequence: Synthetic oligonucleotide
auaauuaucaaacuguuua

SEQ ID NO: 328079 - RNA, 19 nt, Artificial Sequence
  Description of Artificial Sequence: Synthetic oligonucleotide
uguuauagcauccuuuccc

SEQ ID NO: 328080 - RNA, 19 nt, Artificial Sequence
  Description of Artificial Sequence: Synthetic oligonucleotide
aguuagcagacauaggucg

SEQ ID NO: 328081 - RNA, 19 nt, Artificial Sequence
  Description of Artificial Sequence: Synthetic oligonucleotide
uuaccauaaauacugcugc

SEQ ID NO: 328082 - RNA, 19 nt, Artificial Sequence
  Description of Artificial Sequence: Synthetic oligonucleotide
aauagcuucagaccacauc

SEQ ID NO: 328083 - RNA, 19 nt, Artificial Sequence
  Description of Artificial Sequence: Synthetic oligonucleotide
uuuaggauuuacagggacg

SEQ ID NO: 328084 - RNA, 19 nt, Artificial Sequence
  Description of Artificial Sequence: Synthetic oligonucleotide
gaagcuccgguuuugauag

SEQ ID NO: 328085 - RNA, 19 nt, Artificial Sequence
  Description of Artificial Sequence: Synthetic oligonucleotide
aggcauaacacccaucucg

SEQ ID NO: 328086 - RNA, 19 nt, Artificial Sequence
  Description of Artificial Sequence: Synthetic oligonucleotide
agcuugugcaaucucaggc

SEQ ID NO: 328087 - RNA, 19 nt, Artificial Sequence
  Description of Artificial Sequence: Synthetic oligonucleotide
uauaucuggcucaaccugg

SEQ ID NO: 328088 - RNA, 19 nt, Artificial Sequence
  Description of Artificial Sequence: Synthetic oligonucleotide
ggaaagaccaacaaaaccg

SEQ ID NO: 328089 - RNA, 19 nt, Artificial Sequence
  Description of Artificial Sequence: Synthetic oligonucleotide
accgacaacaauaucaacc

SEQ ID NO: 328090 - RNA, 19 nt, Artificial Sequence
  Description of Artificial Sequence: Synthetic oligonucleotide
acaguuagcagacauaggu

SEQ ID NO: 328091 - RNA, 19 nt, Artificial Sequence
  Description of Artificial Sequence: Synthetic oligonucleotide
aauuaugagaagcucccgu

SEQ ID NO: 328092 - RNA, 19 nt, Artificial Sequence
  Description of Artificial Sequence: Synthetic oligonucleotide
aguaccuaggucuaaggag

SEQ ID NO: 328093 - RNA, 19 nt, Artificial Sequence
  Description of Artificial Sequence: Synthetic oligonucleotide
gauaucaguuggcagaagc

SEQ ID NO: 328094 - RNA, 19 nt, Artificial Sequence
  Description of Artificial Sequence: Synthetic oligonucleotide
gacgauguaacuaucuggg

SEQ ID NO: 328095 - RNA, 19 nt, Artificial Sequence
  Description of Artificial Sequence: Synthetic oligonucleotide
uguaccagaugguacagcc

SEQ ID NO: 328096 - RNA, 19 nt, Artificial Sequence
  Description of Artificial Sequence: Synthetic oligonucleotide
uuauaucuggcucaaccug

SEQ ID NO: 328097 - RNA, 19 nt, Artificial Sequence
  Description of Artificial Sequence: Synthetic oligonucleotide
aagauaauugcuugaucca

SEQ ID NO: 328098 - RNA, 19 nt, Artificial Sequence
  Description of Artificial Sequence: Synthetic oligonucleotide
uauggaacaccauggaugu

SEQ ID NO: 328099 - RNA, 19 nt, Artificial Sequence
  Description of Artificial Sequence: Synthetic oligonucleotide
augcacguaauucugcuuc

SEQ ID NO: 328100 - RNA, 19 nt, Artificial Sequence
  Description of Artificial Sequence: Synthetic oligonucleotide
uuuacagggacgacgacau

SEQ ID NO: 328101 - RNA, 19 nt, Artificial Sequence
  Description of Artificial Sequence: Synthetic oligonucleotide
aagaauuacuaagauugug

SEQ ID NO: 328102 - RNA, 19 nt, Artificial Sequence
  Description of Artificial Sequence: Synthetic oligonucleotide
ucuuuugcccauauguaac

SEQ ID NO: 328103 - RNA, 19 nt, Artificial Sequence
  Description of Artificial Sequence: Synthetic oligonucleotide
ugagccucguguuauagca

SEQ ID NO: 328104 - RNA, 19 nt, Artificial Sequence
  Description of Artificial Sequence: Synthetic oligonucleotide
aaucuuacgucuccuuucu

SEQ ID NO: 328105 - RNA, 19 nt, Artificial Sequence
  Description of Artificial Sequence: Synthetic oligonucleotide
cauugauaacauauggaac

SEQ ID NO: 328106 - RNA, 19 nt, Artificial Sequence
  Description of Artificial Sequence: Synthetic oligonucleotide
acuaagauuguguuuccug

SEQ ID NO: 328107 - RNA, 19 nt, Artificial Sequence
  Description of Artificial Sequence: Synthetic oligonucleotide
ugccauaaguacaucaccu

SEQ ID NO: 328108 - RNA, 19 nt, Artificial Sequence
  Description of Artificial Sequence: Synthetic oligonucleotide
aauacuaaaggcaccaguu

SEQ ID NO: 328109 - RNA, 19 nt, Artificial Sequence
  Description of Artificial Sequence: Synthetic oligonucleotide
guuaccauaaauacugcug

SEQ ID NO: 328110 - RNA, 19 nt, Artificial Sequence
  Description of Artificial Sequence: Synthetic oligonucleotide
ucaugcauagugaauuccu

SEQ ID NO: 328111 - RNA, 19 nt, Artificial Sequence
  Description of Artificial Sequence: Synthetic oligonucleotide
cauccuuucagcucgcccc

SEQ ID NO: 328112 - RNA, 19 nt, Artificial Sequence
  Description of Artificial Sequence: Synthetic oligonucleotide
cauaacacccaucucggag

SEQ ID NO: 328113 - RNA, 19 nt, Artificial Sequence
  Description of Artificial Sequence: Synthetic oligonucleotide
guaccuaggucuaaggagg

SEQ ID NO: 328114 - RNA, 19 nt, Artificial Sequence
  Description of Artificial Sequence: Synthetic oligonucleotide
aaucuaacuugagacaagu

SEQ ID NO: 328115 - RNA, 19 nt, Artificial Sequence
  Description of Artificial Sequence: Synthetic oligonucleotide
caugcaacaguuagcagac

SEQ ID NO: 328116 - RNA, 19 nt, Artificial Sequence
  Description of Artificial Sequence: Synthetic oligonucleotide
aaacuguuuauuaugggau

SEQ ID NO: 328117 - RNA, 19 nt, Artificial Sequence
  Description of Artificial Sequence: Synthetic oligonucleotide
uccaaguuaucacagucaa

SEQ ID NO: 328118 - RNA, 19 nt, Artificial Sequence
  Description of Artificial Sequence: Synthetic oligonucleotide
uuaggguuaucaauauacu

SEQ ID NO: 328119 - RNA, 19 nt, Artificial Sequence
  Description of Artificial Sequence: Synthetic oligonucleotide
caacaguuagcagacauag

SEQ ID NO: 328120 - RNA, 19 nt, Artificial Sequence
  Description of Artificial Sequence: Synthetic oligonucleotide
guauagacuuuauuacugc

SEQ ID NO: 328121 - RNA, 19 nt, Artificial Sequence
  Description of Artificial Sequence: Synthetic oligonucleotide
aucaucaguucgaauaugg

SEQ ID NO: 328122 - RNA, 19 nt, Artificial Sequence
  Description of Artificial Sequence: Synthetic oligonucleotide
aaaaugcauuaucuucuca

SEQ ID NO: 328123 - RNA, 19 nt, Artificial Sequence
  Description of Artificial Sequence: Synthetic oligonucleotide
ugcuugauccaucuugugu

SEQ ID NO: 328124 - RNA, 19 nt, Artificial Sequence
  Description of Artificial Sequence: Synthetic oligonucleotide
cuggauaaaacuggaauac

SEQ ID NO: 328125 - RNA, 19 nt, Artificial Sequence
  Description of Artificial Sequence: Synthetic oligonucleotide
ucaguaccuaggucuaagg

SEQ ID NO: 328126 - RNA, 19 nt, Artificial Sequence
  Description of Artificial Sequence: Synthetic oligonucleotide
auaacacccaucucggaga

SEQ ID NO: 328127 - RNA, 19 nt, Artificial Sequence
  Description of Artificial Sequence: Synthetic oligonucleotide
agagguaagaguauagacu

SEQ ID NO: 328128 - RNA, 19 nt, Artificial Sequence
  Description of Artificial Sequence: Synthetic oligonucleotide
caaaaccgucuuuuggugg

SEQ ID NO: 328129 - RNA, 19 nt, Artificial Sequence
  Description of Artificial Sequence: Synthetic oligonucleotide
uuaucuuuugcguguacau

SEQ ID NO: 328130 - RNA, 19 nt, Artificial Sequence
  Description of Artificial Sequence: Synthetic oligonucleotide
ugcguguacaucaucaguu

SEQ ID NO: 328131 - RNA, 19 nt, Artificial Sequence
  Description of Artificial Sequence: Synthetic oligonucleotide
uuagagguaagaguauaga

SEQ ID NO: 328132 - RNA, 19 nt, Artificial Sequence
  Description of Artificial Sequence: Synthetic oligonucleotide
gaaucuuacgucuccuuuc

SEQ ID NO: 328133 - RNA, 19 nt, Artificial Sequence
  Description of Artificial Sequence: Synthetic oligonucleotide
uacuaaaggcaccaguuuu

SEQ ID NO: 328134 - RNA, 19 nt, Artificial Sequence
  Description of Artificial Sequence: Synthetic oligonucleotide
guucgaauaugguucuucc

SEQ ID NO: 328135 - RNA, 19 nt, Artificial Sequence
  Description of Artificial Sequence: Synthetic oligonucleotide
cugugcauuaccugugugc

SEQ ID NO: 328136 - RNA, 19 nt, Artificial Sequence
  Description of Artificial Sequence: Synthetic oligonucleotide
aaauccaaacuugucagua

SEQ ID NO: 328137 - RNA, 19 nt, Artificial Sequence
  Description of Artificial Sequence: Synthetic oligonucleotide
uccaccgaagccaaaucca

SEQ ID NO: 328138 - RNA, 19 nt, Artificial Sequence
  Description of Artificial Sequence: Synthetic oligonucleotide
cuaaucuuccuggaguacc

SEQ ID NO: 328139 - RNA, 19 nt, Artificial Sequence
  Description of Artificial Sequence: Synthetic oligonucleotide
agggacgacgacauggugc

SEQ ID NO: 328140 - RNA, 19 nt, Artificial Sequence
  Description of Artificial Sequence: Synthetic oligonucleotide
ugugugcugcgacuugacg

SEQ ID NO: 328141 - RNA, 19 nt, Artificial Sequence
  Description of Artificial Sequence: Synthetic oligonucleotide
uuaugagaagcucccguaa

SEQ ID NO: 328142 - RNA, 19 nt, Artificial Sequence
  Description of Artificial Sequence: Synthetic oligonucleotide
uccgaugcacguaauucug

SEQ ID NO: 328143 - RNA, 19 nt, Artificial Sequence
  Description of Artificial Sequence: Synthetic oligonucleotide
aagcucccguaacuuaggg

SEQ ID NO: 328144 - RNA, 19 nt, Artificial Sequence
  Description of Artificial Sequence: Synthetic oligonucleotide
uccaucuacauggaaucag

SEQ ID NO: 328145 - RNA, 19 nt, Artificial Sequence
  Description of Artificial Sequence: Synthetic oligonucleotide
cugcuuggauaucaguugg

SEQ ID NO: 328146 - RNA, 19 nt, Artificial Sequence
  Description of Artificial Sequence: Synthetic oligonucleotide
uuaauagcuucagaccaca

SEQ ID NO: 328147 - RNA, 19 nt, Artificial Sequence
  Description of Artificial Sequence: Synthetic oligonucleotide
agccucguguuauagcauc

SEQ ID NO: 328148 - RNA, 19 nt, Artificial Sequence
  Description of Artificial Sequence: Synthetic oligonucleotide
cuuggucaugacaggauac

SEQ ID NO: 328149 - RNA, 19 nt, Artificial Sequence
  Description of Artificial Sequence: Synthetic oligonucleotide
auuaugggauuucuucccu

SEQ ID NO: 328150 - RNA, 19 nt, Artificial Sequence
  Description of Artificial Sequence: Synthetic oligonucleotide
ccaauuaugagaagcuccc

SEQ ID NO: 328151 - RNA, 19 nt, Artificial Sequence
  Description of Artificial Sequence: Synthetic oligonucleotide
auuaugagaagcucccgua

SEQ ID NO: 328152 - RNA, 19 nt, Artificial Sequence
  Description of Artificial Sequence: Synthetic oligonucleotide
uucacaugcccuuuaucaa

SEQ ID NO: 328153 - RNA, 19 nt, Artificial Sequence
  Description of Artificial Sequence: Synthetic oligonucleotide
cuucuaucucagaaagcag

SEQ ID NO: 328154 - RNA, 19 nt, Artificial Sequence
  Description of Artificial Sequence: Synthetic oligonucleotide
ccgacaacaauaucaaccc

SEQ ID NO: 328155 - RNA, 19 nt, Artificial Sequence
  Description of Artificial Sequence: Synthetic oligonucleotide
guuugcucagcuaacuccc

SEQ ID NO: 328156 - RNA, 19 nt, Artificial Sequence
  Description of Artificial Sequence: Synthetic oligonucleotide
aacgguaggugccaagaua

SEQ ID NO: 328157 - RNA, 19 nt, Artificial Sequence
  Description of Artificial Sequence: Synthetic oligonucleotide
acauggccuuuauaguuuc

SEQ ID NO: 328158 - RNA, 19 nt, Artificial Sequence
  Description of Artificial Sequence: Synthetic oligonucleotide
aaccaagaaucuaacuuga

SEQ ID NO: 328159 - RNA, 19 nt, Artificial Sequence
  Description of Artificial Sequence: Synthetic oligonucleotide
gacgacauggugcacagua

SEQ ID NO: 328160 - RNA, 19 nt, Artificial Sequence
  Description of Artificial Sequence: Synthetic oligonucleotide
aaucaacccacgugggaaa

SEQ ID NO: 328161 - RNA, 19 nt, Artificial Sequence
  Description of Artificial Sequence: Synthetic oligonucleotide
agguuugcucagcuaacuc

SEQ ID NO: 328162 - RNA, 19 nt, Artificial Sequence
  Description of Artificial Sequence: Synthetic oligonucleotide
gacaccugugcauuaccug

SEQ ID NO: 328163 - RNA, 19 nt, Artificial Sequence
  Description of Artificial Sequence: Synthetic oligonucleotide
ggucgguuaccauaaauac

SEQ ID NO: 328164 - RNA, 19 nt, Artificial Sequence
  Description of Artificial Sequence: Synthetic oligonucleotide
ugaacgguaggugccaaga

SEQ ID NO: 328165 - RNA, 19 nt, Artificial Sequence
  Description of Artificial Sequence: Synthetic oligonucleotide
uugcguguacaucaucagu

SEQ ID NO: 328166 - RNA, 19 nt, Artificial Sequence
  Description of Artificial Sequence: Synthetic oligonucleotide
ugagcacugaagcuccggu

SEQ ID NO: 328167 - RNA, 19 nt, Artificial Sequence
  Description of Artificial Sequence: Synthetic oligonucleotide
ugacaccugugcauuaccu

SEQ ID NO: 328168 - RNA, 19 nt, Artificial Sequence
  Description of Artificial Sequence: Synthetic oligonucleotide
uuuucaagggcggccaacu

SEQ ID NO: 328169 - RNA, 19 nt, Artificial Sequence
  Description of Artificial Sequence: Synthetic oligonucleotide
acauaggucgguuaccaua

SEQ ID NO: 328170 - RNA, 19 nt, Artificial Sequence
  Description of Artificial Sequence: Synthetic oligonucleotide
ucguguuauagcauccuuu

SEQ ID NO: 328171 - RNA, 19 nt, Artificial Sequence
  Description of Artificial Sequence: Synthetic oligonucleotide
acaggauaccucauaguag

SEQ ID NO: 328172 - RNA, 19 nt, Artificial Sequence
  Description of Artificial Sequence: Synthetic oligonucleotide
ugcauccuguugauaaagu

SEQ ID NO: 328173 - RNA, 19 nt, Artificial Sequence
  Description of Artificial Sequence: Synthetic oligonucleotide
gaauacuaaaggcaccagu

SEQ ID NO: 328174 - RNA, 19 nt, Artificial Sequence
  Description of Artificial Sequence: Synthetic oligonucleotide
caugcauagugaauuccuc

SEQ ID NO: 328175 - RNA, 19 nt, Artificial Sequence
  Description of Artificial Sequence: Synthetic oligonucleotide
ugauugcucggacagcaua

SEQ ID NO: 328176 - RNA, 19 nt, Artificial Sequence
  Description of Artificial Sequence: Synthetic oligonucleotide
uccgguuuugauaguaguu

SEQ ID NO: 328177 - RNA, 19 nt, Artificial Sequence
  Description of Artificial Sequence: Synthetic oligonucleotide
ugcuuggauaucaguuggc

SEQ ID NO: 328178 - RNA, 19 nt, Artificial Sequence
  Description of Artificial Sequence: Synthetic oligonucleotide
auacuaaaggcaccaguuu

SEQ ID NO: 328179 - RNA, 19 nt, Artificial Sequence
  Description of Artificial Sequence: Synthetic oligonucleotide
accguguuagagguaagag

SEQ ID NO: 328180 - RNA, 19 nt, Artificial Sequence
  Description of Artificial Sequence: Synthetic oligonucleotide
caguuagcagacauagguc

SEQ ID NO: 328181 - RNA, 19 nt, Artificial Sequence
  Description of Artificial Sequence: Synthetic oligonucleotide
ugacguuguucaagguuug

SEQ ID NO: 328182 - RNA, 19 nt, Artificial Sequence
  Description of Artificial Sequence: Synthetic oligonucleotide
uuguguuccuugauugcuc

SEQ ID NO: 328183 - RNA, 19 nt, Artificial Sequence
  Description of Artificial Sequence: Synthetic oligonucleotide
guagccaaggugcaggaaa

SEQ ID NO: 328184 - RNA, 19 nt, Artificial Sequence
  Description of Artificial Sequence: Synthetic oligonucleotide
gugugcugcgacuugacga

SEQ ID NO: 328185 - RNA, 19 nt, Artificial Sequence
  Description of Artificial Sequence: Synthetic oligonucleotide
gauucugcuuggauaucag

SEQ ID NO: 328186 - RNA, 19 nt, Artificial Sequence
  Description of Artificial Sequence: Synthetic oligonucleotide
agauaauugcuugauccau

SEQ ID NO: 328187 - RNA, 19 nt, Artificial Sequence
  Description of Artificial Sequence: Synthetic oligonucleotide
uuauagcauccuuucccac

SEQ ID NO: 328188 - RNA, 19 nt, Artificial Sequence
  Description of Artificial Sequence: Synthetic oligonucleotide
cauaggucgguuaccauaa

SEQ ID NO: 328189 - RNA, 19 nt, Artificial Sequence
  Description of Artificial Sequence: Synthetic oligonucleotide
caauaucaaccccauuguc

SEQ ID NO: 328190 - RNA, 19 nt, Artificial Sequence
  Description of Artificial Sequence: Synthetic oligonucleotide
uagugggacuagauucugc

SEQ ID NO: 328191 - RNA, 19 nt, Artificial Sequence
  Description of Artificial Sequence: Synthetic oligonucleotide
gaagcucccguaacuuagg

SEQ ID NO: 328192 - RNA, 19 nt, Artificial Sequence
  Description of Artificial Sequence: Synthetic oligonucleotide
auauggguucaucugccau

SEQ ID NO: 328193 - RNA, 19 nt, Artificial Sequence
  Description of Artificial Sequence: Synthetic oligonucleotide
augaggcuuucugucaccg

SEQ ID NO: 328194 - RNA, 19 nt, Artificial Sequence
  Description of Artificial Sequence: Synthetic oligonucleotide
guuaucuuuugcguguaca

SEQ ID NO: 328195 - RNA, 19 nt, Artificial Sequence
  Description of Artificial Sequence: Synthetic oligonucleotide
caauuaugagaagcucccg

SEQ ID NO: 328196 - RNA, 19 nt, Artificial Sequence
  Description of Artificial Sequence: Synthetic oligonucleotide
acgacgacauggugcacag

SEQ ID NO: 328197 - RNA, 19 nt, Artificial Sequence
  Description of Artificial Sequence: Synthetic oligonucleotide
ggcauaacacccaucucgg

SEQ ID NO: 328198 - RNA, 19 nt, Artificial Sequence
  Description of Artificial Sequence: Synthetic oligonucleotide
gacuugacgauguaacuau

SEQ ID NO: 328199 - RNA, 19 nt, Artificial Sequence
  Description of Artificial Sequence: Synthetic oligonucleotide
ucuuuugcguguacaucau

SEQ ID NO: 328200 - RNA, 19 nt, Artificial Sequence
  Description of Artificial Sequence: Synthetic oligonucleotide
aggccaucugacccaauug

SEQ ID NO: 328201 - RNA, 19 nt, Artificial Sequence
  Description of Artificial Sequence: Synthetic oligonucleotide
ugcugcgacuugacgaugu

SEQ ID NO: 328202 - RNA, 19 nt, Artificial Sequence
  Description of Artificial Sequence: Synthetic oligonucleotide
uuagcagacauaggucggu

SEQ ID NO: 328203 - RNA, 19 nt, Artificial Sequence
  Description of Artificial Sequence: Synthetic oligonucleotide
ugagacaaguugagcuuuc

SEQ ID NO: 328204 - RNA, 19 nt, Artificial Sequence
  Description of Artificial Sequence: Synthetic oligonucleotide
cuuacgucuccuuucuuaa

SEQ ID NO: 328205 - RNA, 19 nt, Artificial Sequence
  Description of Artificial Sequence: Synthetic oligonucleotide
ucuugaacgguaggugcca

SEQ ID NO: 328206 - RNA, 19 nt, Artificial Sequence
  Description of Artificial Sequence: Synthetic oligonucleotide
uugaacgguaggugccaag

SEQ ID NO: 328207 - RNA, 19 nt, Artificial Sequence
  Description of Artificial Sequence: Synthetic oligonucleotide
uuagugggacuagauucug

SEQ ID NO: 328208 - RNA, 19 nt, Artificial Sequence
  Description of Artificial Sequence: Synthetic oligonucleotide
uugucaguaccuaggucua

SEQ ID NO: 328209 - RNA, 19 nt, Artificial Sequence
  Description of Artificial Sequence: Synthetic oligonucleotide
cuaggucuaaggaggccug

SEQ ID NO: 328210 - RNA, 19 nt, Artificial Sequence
  Description of Artificial Sequence: Synthetic oligonucleotide
caggauaccucauaguagu

SEQ ID NO: 328211 - RNA, 19 nt, Artificial Sequence
  Description of Artificial Sequence: Synthetic oligonucleotide
gagaauuucacaugcccuu

SEQ ID NO: 328212 - RNA, 19 nt, Artificial Sequence
  Description of Artificial Sequence: Synthetic oligonucleotide
acgguaggugccaagauau

SEQ ID NO: 328213 - RNA, 19 nt, Artificial Sequence
  Description of Artificial Sequence: Synthetic oligonucleotide
acagcauacucucccuuaa

SEQ ID NO: 328214 - RNA, 19 nt, Artificial Sequence
  Description of Artificial Sequence: Synthetic oligonucleotide
gucaguaccuaggucuaag

SEQ ID NO: 328215 - RNA, 19 nt, Artificial Sequence
  Description of Artificial Sequence: Synthetic oligonucleotide
uaacuaucuggggccuugg

SEQ ID NO: 328216 - RNA, 19 nt, Artificial Sequence
  Description of Artificial Sequence: Synthetic oligonucleotide
uggucaugacaggauaccu

SEQ ID NO: 328217 - RNA, 19 nt, Artificial Sequence
  Description of Artificial Sequence: Synthetic oligonucleotide
cuaggcccauccuuucagc

SEQ ID NO: 328218 - RNA, 19 nt, Artificial Sequence
  Description of Artificial Sequence: Synthetic oligonucleotide
aagggcggccaacucuuga

SEQ ID NO: 328219 - RNA, 19 nt, Artificial Sequence
  Description of Artificial Sequence: Synthetic oligonucleotide
guuccuugauugcucggac

SEQ ID NO: 328220 - RNA, 19 nt, Artificial Sequence
  Description of Artificial Sequence: Synthetic oligonucleotide
gagacaaguugagcuuucc

SEQ ID NO: 328221 - RNA, 19 nt, Artificial Sequence
  Description of Artificial Sequence: Synthetic oligonucleotide
uuccaucuacauggaauca

SEQ ID NO: 328222 - RNA, 19 nt, Artificial Sequence
  Description of Artificial Sequence: Synthetic oligonucleotide
uaauagcuucagaccacau

SEQ ID NO: 328223 - RNA, 19 nt, Artificial Sequence
  Description of Artificial Sequence: Synthetic oligonucleotide
uucaagguuugcucagcua

SEQ ID NO: 328224 - RNA, 19 nt, Artificial Sequence
  Description of Artificial Sequence: Synthetic oligonucleotide
aggucgguuaccauaaaua

SEQ ID NO: 328225 - RNA, 19 nt, Artificial Sequence
  Description of Artificial Sequence: Synthetic oligonucleotide
gacgacgacauggugcaca

SEQ ID NO: 328226 - RNA, 19 nt, Artificial Sequence
  Description of Artificial Sequence: Synthetic oligonucleotide
ugcaguucagaugcucuuc

SEQ ID NO: 328227 - RNA, 19 nt, Artificial Sequence
  Description of Artificial Sequence: Synthetic oligonucleotide
caugcccuuuaucaauauc

SEQ ID NO: 328228 - RNA, 19 nt, Artificial Sequence
  Description of Artificial Sequence: Synthetic oligonucleotide
caaaucaacccacguggga

SEQ ID NO: 328229 - RNA, 19 nt, Artificial Sequence
  Description of Artificial Sequence: Synthetic oligonucleotide
ucaaccccauuguccaaaa

SEQ ID NO: 328230 - RNA, 19 nt, Artificial Sequence
  Description of Artificial Sequence: Synthetic oligonucleotide
uuacgucuccuuucuuaaa

SEQ ID NO: 328231 - RNA, 19 nt, Artificial Sequence
  Description of Artificial Sequence: Synthetic oligonucleotide
caguaccuaggucuaagga

SEQ ID NO: 328232 - RNA, 19 nt, Artificial Sequence
  Description of Artificial Sequence: Synthetic oligonucleotide
agcucccguaacuuagggu

SEQ ID NO: 328233 - RNA, 19 nt, Artificial Sequence
  Description of Artificial Sequence: Synthetic oligonucleotide
cacguaauucugcuucuca

SEQ ID NO: 328234 - RNA, 19 nt, Artificial Sequence
  Description of Artificial Sequence: Synthetic oligonucleotide
cguguuauagcauccuuuc

SEQ ID NO: 328235 - RNA, 19 nt, Artificial Sequence
  Description of Artificial Sequence: Synthetic oligonucleotide
gacguuguucaagguuugc

SEQ ID NO: 328236 - RNA, 19 nt, Artificial Sequence
  Description of Artificial Sequence: Synthetic oligonucleotide
gggacgacgacauggugca

SEQ ID NO: 328237 - RNA, 19 nt, Artificial Sequence
  Description of Artificial Sequence: Synthetic oligonucleotide
aaugccagaccaaggucuu

SEQ ID NO: 328238 - RNA, 19 nt, Artificial Sequence
  Description of Artificial Sequence: Synthetic oligonucleotide
cuuucaaaucaacccacgu

SEQ ID NO: 328239 - RNA, 19 nt, Artificial Sequence
  Description of Artificial Sequence: Synthetic oligonucleotide
uuacagggacgacgacaug

SEQ ID NO: 328240 - RNA, 19 nt, Artificial Sequence
  Description of Artificial Sequence: Synthetic oligonucleotide
guuccaccgaagccaaauc

SEQ ID NO: 328241 - RNA, 19 nt, Artificial Sequence
  Description of Artificial Sequence: Synthetic oligonucleotide
cuuuugcccauauguaacu

SEQ ID NO: 328242 - RNA, 19 nt, Artificial Sequence
  Description of Artificial Sequence: Synthetic oligonucleotide
uauuuucauuaggcugaca

SEQ ID NO: 328243 - RNA, 19 nt, Artificial Sequence
  Description of Artificial Sequence: Synthetic oligonucleotide
cguguacaucaucaguucg

SEQ ID NO: 328244 - RNA, 19 nt, Artificial Sequence
  Description of Artificial Sequence: Synthetic oligonucleotide
aggauuagugggacuagau

SEQ ID NO: 328245 - RNA, 19 nt, Artificial Sequence
  Description of Artificial Sequence: Synthetic oligonucleotide
agggugacauugauaacau

SEQ ID NO: 328246 - RNA, 19 nt, Artificial Sequence
  Description of Artificial Sequence: Synthetic oligonucleotide
uaucaaccccauuguccaa

SEQ ID NO: 328247 - RNA, 19 nt, Artificial Sequence
  Description of Artificial Sequence: Synthetic oligonucleotide
gaguaccgacaacaauauc

SEQ ID NO: 328248 - RNA, 19 nt, Artificial Sequence
  Description of Artificial Sequence: Synthetic oligonucleotide
gugcauuaccugugugcug

SEQ ID NO: 328249 - RNA, 19 nt, Artificial Sequence
  Description of Artificial Sequence: Synthetic oligonucleotide
agggcggccaacucuugaa

SEQ ID NO: 328250 - RNA, 19 nt, Artificial Sequence
  Description of Artificial Sequence: Synthetic oligonucleotide
cuugagacaaguugagcuu

SEQ ID NO: 328251 - RNA, 19 nt, Artificial Sequence
  Description of Artificial Sequence: Synthetic oligonucleotide
gacuagauucugcuuggau

SEQ ID NO: 328252 - RNA, 19 nt, Artificial Sequence
  Description of Artificial Sequence: Synthetic oligonucleotide
cugugugcugcgacuugac

SEQ ID NO: 328253 - RNA, 19 nt, Artificial Sequence
  Description of Artificial Sequence: Synthetic oligonucleotide
caauccucuaguggcucug

SEQ ID NO: 328254 - RNA, 19 nt, Artificial Sequence
  Description of Artificial Sequence: Synthetic oligonucleotide
cucaggcauaacacccauc

SEQ ID NO: 328255 - RNA, 19 nt, Artificial Sequence
  Description of Artificial Sequence: Synthetic oligonucleotide
gguagaccacccaacucug

SEQ ID NO: 328256 - RNA, 19 nt, Artificial Sequence
  Description of Artificial Sequence: Synthetic oligonucleotide
gucgguuaccauaaauacu

SEQ ID NO: 328257 - RNA, 19 nt, Artificial Sequence
  Description of Artificial Sequence: Synthetic oligonucleotide
ggucaugacaggauaccuc

SEQ ID NO: 328258 - RNA, 19 nt, Artificial Sequence
  Description of Artificial Sequence: Synthetic oligonucleotide
aggauaccucauaguagug

SEQ ID NO: 328259 - RNA, 19 nt, Artificial Sequence
  Description of Artificial Sequence: Synthetic oligonucleotide
aaaccgucuuuugguggaa

SEQ ID NO: 328260 - RNA, 19 nt, Artificial Sequence
  Description of Artificial Sequence: Synthetic oligonucleotide
guagaccacccaacucugc

SEQ ID NO: 328261 - RNA, 19 nt, Artificial Sequence
  Description of Artificial Sequence: Synthetic oligonucleotide
ccaucuacauggaaucaga

SEQ ID NO: 328262 - RNA, 19 nt, Artificial Sequence
  Description of Artificial Sequence: Synthetic oligonucleotide
ucccguaacuuaggguuau

SEQ ID NO: 328263 - RNA, 19 nt, Artificial Sequence
  Description of Artificial Sequence: Synthetic oligonucleotide
gcguguacaucaucaguuc

SEQ ID NO: 328264 - RNA, 19 nt, Artificial Sequence
  Description of Artificial Sequence: Synthetic oligonucleotide
gccauccuauuccaucuac

SEQ ID NO: 328265 - RNA, 19 nt, Artificial Sequence
  Description of Artificial Sequence: Synthetic oligonucleotide
ccgaugcacguaauucugc

SEQ ID NO: 328266 - RNA, 19 nt, Artificial Sequence
  Description of Artificial Sequence: Synthetic oligonucleotide
ugucaguaccuaggucuaa

SEQ ID NO: 328267 - RNA, 19 nt, Artificial Sequence
  Description of Artificial Sequence: Synthetic oligonucleotide
aagcuccgguuuugauagu

SEQ ID NO: 328268 - RNA, 19 nt, Artificial Sequence
  Description of Artificial Sequence: Synthetic oligonucleotide
gaugcacguaauucugcuu

SEQ ID NO: 328269 - RNA, 19 nt, Artificial Sequence
  Description of Artificial Sequence: Synthetic oligonucleotide
ucaacccacgugggaaaau

SEQ ID NO: 328270 - RNA, 19 nt, Artificial Sequence
  Description of Artificial Sequence: Synthetic oligonucleotide
aggcuuucugucaccguga

SEQ ID NO: 328271 - RNA, 19 nt, Artificial Sequence
  Description of Artificial Sequence: Synthetic oligonucleotide
auaggucgguuaccauaaa

SEQ ID NO: 328272 - RNA, 19 nt, Artificial Sequence
  Description of Artificial Sequence: Synthetic oligonucleotide
uagcauccuuucccacggu

SEQ ID NO: 328273 - RNA, 19 nt, Artificial Sequence
  Description of Artificial Sequence: Synthetic oligonucleotide
uguaacuaucuggggccuu

SEQ ID NO: 328274 - RNA, 19 nt, Artificial Sequence
  Description of Artificial Sequence: Synthetic oligonucleotide
acgugggaaaaugcauuau

SEQ ID NO: 328275 - RNA, 19 nt, Artificial Sequence
  Description of Artificial Sequence: Synthetic oligonucleotide
gaacgguaggugccaagau

SEQ ID NO: 328276 - RNA, 19 nt, Artificial Sequence
  Description of Artificial Sequence: Synthetic oligonucleotide
cuccgguuuugauaguagu

SEQ ID NO: 328277 - RNA, 19 nt, Artificial Sequence
  Description of Artificial Sequence: Synthetic oligonucleotide
uagcagacauaggucgguu

SEQ ID NO: 328278 - RNA, 19 nt, Artificial Sequence
  Description of Artificial Sequence: Synthetic oligonucleotide
caccguguuagagguaaga

SEQ ID NO: 328279 - RNA, 19 nt, Artificial Sequence
  Description of Artificial Sequence: Synthetic oligonucleotide
cugccaauccgaugcacgu

SEQ ID NO: 328280 - RNA, 19 nt, Artificial Sequence
  Description of Artificial Sequence: Synthetic oligonucleotide
ggauuagugggacuagauu

SEQ ID NO: 328281 - RNA, 19 nt, Artificial Sequence
  Description of Artificial Sequence: Synthetic oligonucleotide
gcuccgguuuugauaguag

SEQ ID NO: 328282 - RNA, 19 nt, Artificial Sequence
  Description of Artificial Sequence: Synthetic oligonucleotide
acgacauggugcacaguau

SEQ ID NO: 328283 - RNA, 19 nt, Artificial Sequence
  Description of Artificial Sequence: Synthetic oligonucleotide
aucuuacgucuccuuucuu

SEQ ID NO: 328284 - RNA, 19 nt, Artificial Sequence
  Description of Artificial Sequence: Synthetic oligonucleotide
cucccguaacuuaggguua

SEQ ID NO: 328285 - RNA, 19 nt, Artificial Sequence
  Description of Artificial Sequence: Synthetic oligonucleotide
ggauaucaguuggcagaag

SEQ ID NO: 328286 - RNA, 19 nt, Artificial Sequence
  Description of Artificial Sequence: Synthetic oligonucleotide
gcauaacacccaucucgga

SEQ ID NO: 328287 - RNA, 19 nt, Artificial Sequence
  Description of Artificial Sequence: Synthetic oligonucleotide
ggaguaccgacaacaauau
